(19) United States
(12) Patent Application Publication
(10) Pub. No.: US 2008/0318210 A1
(43) Pub. Date: Dec. 25, 2008

(54) BIOINFORMATICALLY DETECTABLE GROUP OF NOVEL REGULATORY VIRAL AND VIRAL ASSOCIATED OLIGONUCLEOTIDES AND USES THEREOF

(75) Inventor: Itzhak Bentwich, Kfar Daniel (IL)

Correspondence Address: ROSETTA-GENOMICS;c/o PSWS, 700 W. 47TH STREET, SUITE 1000, KANSAS CITY, MO, 64112, US

(73) Assignee: ROSETTA GENOMICS, Rehovot (IL)

(21) Appl. No.: 10/708,952

(22) Filed: Apr. 2, 2004

Related U.S. Application Data
(63) Continuation-in-part of application No. 10/604,984, filed on Aug. 29, 2003.
Application No. 10/604,984 is a continuation-in-part of application No. 10/604,945, filed on Aug. 27, 2003.
Application No. 10/604,945 is a continuation-in-part of application No. 10/604,942, filed on Aug. 28, 2003.
Application No. 10/604,942 is a continuation-in-part of application No. 10/605,838, filed on Oct. 30, 2003.
Application No. 10/605,838 is a continuation-in-part of application No. 10/604,944, filed on Aug. 28, 2003, now Pat. No. 7,217,807.
Application No. 10/604,944 is a continuation-in-part of application No. 10/604,943, filed on Aug. 28, 2003.
Application No. 10/604,943 is a continuation-in-part of application No. 10/605,840, filed on Oct. 30, 2003, now abandoned.

(30) Foreign Application Priority Data
Nov. 26, 2003 (IL) PCT/IL03/09998

(51) Int. Cl. C12Q 1/68; G06F 19/00; G01N 33/48; G01N 33/50; C07H 21/02

(52) U.S. Cl. 435/6; 536/23.1; 702/20

(57) ABSTRACT

The present invention relates to a first group of novel viral and human associated oligonucleotides, here identified as Genomic Address Messenger or GAM oligonucleotide, and a second group of novel operon-like viral and human polynucleotides, here identified as Genomic Record or GR polynucleotide. GAM oligonucleotides selectively inhibit translation of known ‘target’ genes, many of which are known to be involved in various viral diseases. Nucleic acid molecules are provided respectively encoding 15484 GAM precursors oligonucleotides, and 699 GR polynucleotides, as are vectors and probes both comprising the nucleic acid molecules, and methods and systems for detecting GAM oligonucleotides and GR polynucleotides and specific functions and utilities thereof, for detecting expression of GAM oligonucleotides and GR polynucleotides, and for selectively enhancing and selectively inhibiting translation of the respective target genes thereof.

### CROSS REFERENCE TO RELATED APPLICATIONS

[0001] This application is a continuation in part of and claims priority from the following patent applications, the disclosures of which applications are all hereby incorporated herein by reference: U.S. patent application Ser. No. 10/604,984 filed 29 Aug. 2003, U.S. patent application Ser. No. 10/604,945 filed 27 Aug. 2003, and U.S. patent application Ser. No. 10/604,942 filed 27 Aug. 2003. This application also claims priority from International Application Number: PCT/IL 03/009998, filed 26 Nov. 2003, the disclosure of which application is hereby incorporated herein by reference. All of the aforesaid patent applications are entitled “Bioinformatically Detectable Group of Novel Viral Regulatory Genes and Uses Thereof”; This application also is a continuation in part of and claims priority from the following patent applications: U.S. patent application Ser. No. 10/605,838 filed 30 Oct. 2003, and U.S. patent application Ser. No. 10/604,944 filed 28 Aug. 2003. Both of the aforesaid patent applications are entitled “Bioinformatically Detectable Group of Novel HIV Regulatory Genes and Uses Thereof”; This application also is a continuation in part of and claims priority from the following patent applications: U.S. patent application Ser. No. 10/605,840 filed 30 Oct. 2003, and U.S. patent application Ser. No. 10/604,943 filed 28 Aug. 2003. Both of the aforesaid patent applications are entitled “Bioinformatically Detectable Group of Novel Vaccinia Regulatory Genes and Uses Thereof”; International Application Number: PCT/IL 03/00998, filed 26 Nov. 2003, entitled “Bioinformatically Detectable Group of Novel Viral Regulatory Genes and Uses Thereof” claims priority from the following patent applications, the disclosures of which applications are all hereby incorporated herein by reference: U.S. patent application Ser. No. 10/604,984 filed 29 Aug. 2003, U.S. patent application Ser. No. 10/604,945 filed 27 Aug. 2003, U.S. patent application Ser. No. 10/604,942 filed 27 Aug. 2003, and U.S. Provisional Patent Application Ser. No. 60/457,788 filed 27 Mar. 2003. All of the aforesaid patent applications are entitled “Bioinformatically Detectable Group of Novel Viral Regulatory Genes and Uses Thereof”; This application also claims priority from the following patent applications: U.S. patent application Ser. No. 10/605,838 filed 30 Oct. 2003, and U.S. patent application Ser. No. 10/604,944 filed 28 Aug. 2003. Both of the aforesaid patent applications are entitled “Bioinformatically Detectable Group of Novel HIV Regulatory Genes and Uses Thereof”; This application also claims priority from the following patent applications: U.S. patent application Ser. No. 10/605,840 filed 30 Oct. 2003, U.S. patent application Ser. No. 10/604,943 filed 28 Aug. 2003, and U.S. Provisional Patent Application Ser. No. 60/441,241 filed 17 Jan. 2003. All of the aforesaid patent applications are entitled “Bioinformatically Detectable Group of Novel Vaccinia Regulatory Genes and Uses Thereof”; U.S. patent application Ser. No. 10/605,840, filed 30 Oct. 2003, entitled “Bioinformatically Detectable Group of Novel Vaccinia Regulatory Genes and Uses Thereof” is a continuation of and claims priority from the following patent applications, the disclosures of which applications are all hereby incorporated herein by reference: U.S. patent application Ser. No. 10/604,943 filed 28 Aug. 2003, and U.S. Provisional Patent Application Ser. No. 60/441,241 filed 17 Jan. 2003. Both of the aforesaid patent applications are entitled “Bioinformatically Detectable Group of Novel Vaccinia Regulatory Genes and Uses Thereof”; This application also is a continuation in part of and claims priority from the following patent applications: U.S. patent application Ser. No. 10/604,984 filed 29 Aug. 2003, U.S. patent application Ser. No. 10/604,945 filed 27 Aug. 2003, U.S. patent application Ser. No. 10/604,942 filed 27 Aug. 2003, U.S. Provisional Patent Application Ser. No. 60/457,788 filed 27 Mar. 2003, and U.S. patent application Ser. No. 10/310,188 filed 5 Dec. 2002. All of the aforesaid patent applications are entitled “Bioinformatically Detectable Group of Novel Viral Regulatory Genes and Uses Thereof”; This application also is a continuation in part of and claims priority from the following patent applications: U.S. patent application Ser. No. 10/605,838 filed 30 Oct. 2003, U.S. patent application Ser. No. 10/604,944 filed 28 Aug. 2003, and U.S. Provisional Patent Application Ser. No. 60/441,230 filed 16 Jan. 2003. All of the aforesaid patent applications are entitled “Bioinformatically Detectable Group of Novel HIV Regulatory Genes and Uses Thereof”; U.S. patent application Ser. No. 10/605,838, filed 30 Oct. 2003, entitled “Bioinformatically Detectable Group of Novel HIV Regulatory Genes and Uses Thereof” is a continuation of and claims priority from the following patent applications, the disclosures of which applications are all hereby incorporated herein by reference: U.S. patent application Ser. No. 10/604,944 filed 28 Aug. 2003, and U.S. Provisional Patent Application Ser. No. 60/441,230 filed 16 Jan. 2003. Both of the aforesaid patent applications are entitled “Bioinformatically Detectable Group of Novel HIV Regulatory Genes and Uses Thereof”; This application also is a continuation in part of and claims priority from the following patent applications: U.S. patent application Ser. No. 10/604,984 filed 29 Aug. 2003, U.S. patent application Ser. No. 10/604,945 filed 27 Aug. 2003, U.S. patent application Ser. No. 10/604,942 filed 27 Aug. 2003, U.S. Provisional Patent Application Ser. No. 60/457,788 filed 27 Mar. 2003, and U.S. Patent Application Ser. No. 10/310,188 filed 5 Dec. 2002. All of the aforesaid patent applications are entitled “Bioinformatically Detectable Group of Novel Viral Regulatory Genes and Uses Thereof”; This application also is a continuation in part of and claims priority from the following patent applications: U.S. patent application Ser. No. 10/604,943 filed 28 Aug. 2003, and U.S. Provisional Patent Application Ser. No. 60/441,241 filed 17 Jan. 2003. Both of the aforesaid patent applications are entitled “Bioinformatically Detectable Group of Novel Vaccinia Regulatory Genes and Uses Thereof”; U.S. patent application Ser. No. 10/604,984, filed 29 Aug. 2003, entitled “Bioinformatically Detectable Group of Novel Viral Regulatory Genes and Uses Thereof” is a continuation of U.S. Provisional Patent Application Ser. No. 60/457,788, filed 27 Mar. 2003, entitled “Bioinformatically Detectable Group of Novel Regulatory Genes and Uses Thereof”, the disclosure of which is hereby incorporated herein and claims priority therefrom; and is a continuation in part of and claims priority from the following patent applications, the disclosures of which applications are all hereby incorporated herein by reference: U.S. patent application Ser. No. 10/604,945 filed 27 Aug. 2003, U.S. patent application Ser. No. 10/604,942 filed 27 Aug. 2003, U.S. patent application Ser. No. 10/310,188 filed 5 Dec. 2002, and U.S. patent application Ser. No. 10/303,778 filed 26 Nov. 2002. All of the aforesaid patent applications are entitled “Bioinformatically Detectable Group of Novel Viral Regulatory Genes and Uses Thereof”; This application also is a continuation in part of and claims priority from the following patent applications: U.S. patent application Ser. No. 10/604,944 filed 28 Aug. 2003, and U.S. Provisional Patent Application Ser. No. 60/441,230 filed 16 Jan. 2003. Both of the aforesaid patent applications are entitled “Bioinformatically Detectable Group of Novel HIV Regulatory Genes and Uses Thereof”; This application also is a continuation in part of and claims priority from the following patent applications: U.S. patent application Ser. No. 10/604,943 filed 28 Aug. 2003, and U.S. Provisional Patent Application Ser. No. 60/441,241 filed 17 Jan. 2003. Both of the aforesaid patent applications are entitled “Bioinformatically Detectable Group of Novel Vaccinia Regulatory Genes and Uses Thereof”; U.S. patent application Ser. No. 10/604,943 filed 28 Aug. 2003, entitled “Bioinformatically Detectable Group of Novel Vaccinia Regulatory Genes and Uses Thereof” is a continuation of U.S. Provisional Patent Application Ser. No. 60/441,241, filed 17 Jan. 2003, entitled “Bioinformatically Detectable Group of Novel Vaccinia Regulatory Genes and Uses Thereof”, the disclosure of which is hereby incorporated herein and claims priority therefrom; This application also is a continuation in part of and claims priority from the following patent applications: U.S. patent application Ser. No. 10/604,945 filed 27 Aug. 2003, U.S. patent application Ser. No. 10/604,942 filed 27 Aug. 2003, U.S. Provisional Patent Application Ser. No. 60/457,788 filed 27 Mar. 2003, U.S. patent application Ser. No. 10/310,188 filed 5 Dec. 2002, and U.S. patent application Ser. No. 10/303,778 filed 26 Nov. 2002. All of the aforesaid patent applications are entitled “Bioinformatically Detectable Group of Novel Viral Regulatory Genes and Uses Thereof”; This application also is a continuation in part of and claims priority from the following patent applications: U.S. patent application Ser. No. 10/604,944 filed 28 Aug. 2003, and U.S. Provisional Patent Application Ser. No. 60/441,230 filed 16 Jan. 2003. Both of the aforesaid patent applications are entitled “Bioinformatically Detectable Group of Novel HIV Regulatory Genes and Uses Thereof”; U.S. patent application Ser. No. 10/604,944, filed 28 Aug. 2003, entitled “Bioinformatically Detectable Group of Novel HIV Regulatory Genes and Uses Thereof” is a continuation of U.S. Provisional Patent Application Ser. No. 60/441,230, filed 16 Jan. 2003, entitled “Bioinformatically Detectable Group of Novel HIV Regulatory Genes and Uses Thereof”, the disclosure of which is hereby incorporated herein and claims priority therefrom; This application also is a continuation in part of and claims priority from the following patent applications: U.S. patent application Ser. No. 10/604,945 filed 27 Aug. 2003, U.S. patent application Ser. No. 10/604,942 filed 27 Aug. 2003, U.S. Provisional Patent Application Ser. No. 60/457,788 filed 27 Mar. 2003, U.S. patent application Ser. No. 10/310,188 filed 5 Dec. 2002, and U.S. patent application Ser. No. 10/303,778 filed 26 Nov. 2002. All of the aforesaid patent applications are entitled “Bioinformatically Detectable Group of Novel Viral Regulatory Genes and Uses Thereof”; This application also is a continuation in part of U.S. Provisional Patent Application Ser. No. 60/441,241, filed 17 Jan. 2003, entitled “Bioinformatically Detectable Group of Novel Vaccinia Regulatory Genes and Uses Thereof”, the disclosure of which is hereby incorporated by reference and claims priority therefrom; U.S. patent application Ser. No. 10/604,945, filed 27 Aug. 2003, entitled “Bioinformatically Detectable Group of Novel Viral Regulatory Genes and Uses Thereof” is a continuation of U.S. patent application Ser. No. 10/303,778, filed 26 Nov. 2002, entitled “Bioinformatically Detectable Group of Novel Regulatory Genes and Uses Thereof”, the disclosure of which is hereby incorporated herein and claims priority therefrom; and is a continuation in part of and claims priority from the following patent applications, the disclosures of which applications are all hereby incorporated herein by reference: U.S. patent application Ser. No. 10/604,942 filed 27 Aug. 2003, U.S. Provisional Patent Application Ser. No. 60/457,788 filed 27 Mar. 2003, and U.S. patent application Ser. No. 10/310,188 filed 5 Dec. 2002. All of the aforesaid patent applications are entitled “Bioinformatically Detectable Group of Novel Viral Regulatory Genes and Uses Thereof”; This application also is a continuation in part of U.S. Provisional Patent Application Ser. No. 60/441,230 filed 16 Jan. 2003, entitled “Bioinformatically Detectable Group of Novel HIV Regulatory Genes and Uses Thereof”, the disclosure of which is hereby incorporated by reference and claims priority therefrom; This application also is a continuation in part of U.S. Provisional Patent Application Ser. No. 60/441,241, filed 17 Jan. 2003, entitled “Bioinformatically Detectable Group of Novel Vaccinia Regulatory Genes and Uses Thereof”, the disclosure of which is hereby incorporated by reference and claims priority therefrom; U.S. patent application Ser. No. 10/604,942, filed 27 Aug. 2003, entitled “Bioinformatically Detectable Group of Novel Viral Regulatory Genes and Uses Thereof” is a continuation of U.S. patent application Ser. No. 10/310,188, filed 5 Dec. 2002, entitled “Bioinformatically Detectable Group of Novel Regulatory Genes and Uses Thereof”, the disclosure of which is hereby incorporated herein and claims priority therefrom; and is a continuation in part of and claims priority from the following patent applications, the disclosures of which applications are all hereby incorporated herein by reference: U.S. Provisional Patent Application Ser. No. 60/457,788 filed 27 Mar. 2003, and U.S. patent application Ser. No. 10/303,778 filed 26 Nov. 2002. All of the aforesaid patent applications are entitled “Bioinformatically Detectable Group of Novel Viral Regulatory Genes and Uses Thereof”; This application also is a continuation in part of U.S. Provisional Patent Application Ser. No. 60/441,230 filed 16 Jan. 2003, entitled “Bioinformatically Detectable Group of Novel HIV Regulatory Genes and Uses Thereof”, the disclosure of which is hereby incorporated by reference and claims priority therefrom; This application also is a continuation in part of U.S. Provisional Patent Application Ser. No. 60/441,241, filed 17 Jan. 2003, entitled “Bioinformatically Detectable Group of Novel Vaccinia Regulatory Genes and Uses Thereof”, the disclosure of which is hereby incorporated by reference and claims priority therefrom; U.S. Provisional Patent Application Ser. No. 60/457,788, filed 27 Mar. 2003, entitled “Bioinformatically Detectable Group of Novel Viral Regulatory Genes and Uses Thereof” is a continuation in part of and claims priority from the following patent applications, the disclosures of which applications are all hereby incorporated herein by reference: U.S. patent application Ser. No. 10/310,188 filed 5 Dec. 2002, and U.S. patent application Ser. No. 10/303,778 filed 26 Nov. 2002. Both of the aforesaid patent applications are entitled “Bioinformatically Detectable Group of Novel Viral Regulatory Genes and Uses Thereof”; This application also is a continuation in part of U.S. Provisional Patent Application Ser. No. 60/441,230 filed 16 Jan. 2003, entitled “Bioinformatically Detectable Group of Novel HIV Regulatory Genes and Uses Thereof”, the disclosure of which is hereby incorporated by reference and claims priority therefrom; This application also is a continuation in part of U.S. Provisional Patent Application Ser. No. 60/441,241, filed 17 Jan. 2003, entitled “Bioinformatically Detectable Group of Novel Vaccinia Regulatory Genes and Uses Thereof”, the disclosure of which is hereby incorporated by reference and claims priority therefrom; U.S. Provisional Patent Application Ser. No. 60/441,241, filed 17 Jan. 2003, entitled “Bioinformatically Detectable Group of Novel Vaccinia Regulatory Genes and Uses Thereof” is a continuation in part of and claims priority from the following patent applications, the disclosures of which applications are all hereby incorporated herein by reference: U.S. patent application Ser. No. 10/310,188 filed 5 Dec. 2002, and U.S. patent application Ser. No. 10/303,778 filed 26 Nov. 2002. Both of the aforesaid patent applications are entitled “Bioinformatically Detectable Group of Novel Viral Regulatory Genes and Uses Thereof”; This application also is a continuation in part of U.S. Provisional Patent Application Ser. No. 60/441,230 filed 16 Jan. 2003, entitled “Bioinformatically Detectable Group of Novel HIV Regulatory Genes and Uses Thereof”, the disclosure of which is hereby incorporated by reference and claims priority therefrom; U.S. Provisional Patent Application Ser. No. 60/441,230, filed 17 Jan. 2003, entitled “Bioinformatically Detectable Group of Novel Vaccinia Regulatory Genes and Uses Thereof” is a continuation in part of and claims priority from the following patent applications, the disclosures of which applications are all hereby incorporated herein by reference: U.S. patent application Ser. No. 10/310,188 filed 5 Dec. 2002, and U.S. patent application Ser. No. 10/303,778 filed 26 Nov. 2002. Both of the aforesaid patent applications are entitled “Bioinformatically Detectable Group of Novel Viral Regulatory Genes and Uses Thereof” U.S. patent application Ser. No. 10/310,188, filed 5 Dec. 2002, entitled “Bioinformatically Detectable Group of Novel Viral Regulatory Genes and Uses Thereof” is a continuation in part of U.S. patent application Ser. No. 10/303,778, filed 26 Nov. 2002, entitled “Bioinformatically Detectable Group of Novel Viral Regulatory Genes and Uses Thereof”, the disclosure of which is hereby incorporated by reference and claims priority therefrom.

### REFERENCES CITED

[0002] Altschul, S. F., Gish, W., Miller, W., Myers, E. W., and Lipman, D. J. (1990). Basic local alignment search tool. J. Mol. Biol. 215, 403-410.
[0003] Ambros, V., Lee, R. C., Lavanway, A., Williams, P. T., and Jewell, D. (2003). MicroRNAs and Other Tiny Endogenous RNAs in C. elegans 1. Curr. Biol. 13, 807-818.
[0004] Dan Gusfield, Algorithms on strings, trees, and sequences: computer science and computational biology, Cambridge University Press, 1997.
[0005] Elbashir, S. M., Lendeckel, W., and Tuschl, T. (2001). RNA interference is mediated by 21- and 22-nucleotide RNAs. Genes Dev. 15, 188-200.
[0006] Gibbs, W. W. (2003). The unseen genome: gems among the junk. Sci. Am. 289, 46-53.
[0007] Gussow, D. and Clackson, T. (1989). Direct clone characterization from plaques and colonies by the polymerase chain reaction. Nucleic Acids Res. 17, 4000.
[0008] Hamosh A, Scott A F, Amberger J, Bocchini C, Valle D and McKusick V A. (2002). Online Mendelian Inheritance in Man (OMIM), a knowledgebase of human genes and genetic disorders. Nucleic Acids Res. 30: 52-55.
[0009] Jenuth, J. P. (2000). The NCBI. Publicly available tools and resources on the Web. Methods Mol. Biol. 132, 301-312.
[0010] Kirkness, E. F. and Kerlavage, A. R. (1997). The TIGR human cDNA database. Methods Mol. Biol. 69, 261-268.
[0011] Lagos-Quintana, M., Rauhut, R., Lendeckel, W., and Tuschl, T. (2001). Identification of novel genes coding for small expressed RNAs. Science 294, 853-858.
[0012] Lau, N. C., Lim, L. P., Weinstein, E. G., and Bartel, D. P. (2001). An abundant class of tiny RNAs with probable regulatory roles in Caenorhabditis elegans. Science 294, 858-862.
[0013] Lau, N. C. and Bartel, D. P. (2003). Censors of the genome. Sci. Am. 289, 34-41.
[0014] Lim, L. P., Glasner, M. E., Yekta, S., Burge, C. B., and Bartel, D. P. (2003). Vertebrate microRNA genes. Science 299, 1540.
[0015] Mathews, D. H., Sabina, J., Zuker, M., and Turner, D. H. (1999). Expanded sequence dependence of thermodynamic parameters improves prediction of RNA secondary structure. J. Mol. Biol. 288, 911-940.
[0016] Reinhart, B. J., Slack, F. J., Basson, M., Pasquinelli, A. E., Bettinger, J. C., Rougvie, A. E., Horvitz, H. R., and Ruvkun, G. (2000). The 21-nucleotide let-7 RNA regulates developmental timing in Caenorhabditis elegans. Nature 403, 901-906.
[0017] Southern, E. M. (1992). Detection of specific sequences among DNA fragments separated by gel electrophoresis. 1975. Biotechnology 24, 122-139.
[0018] Tom M. Mitchell, Machine Learning, McGraw Hill, 1997.
[0019] Wightman, B., Ha, I., and Ruvkun, G. (1993). Posttranscriptional regulation of the heterochronic gene lin-14 by lin-4 mediates temporal pattern formation in C. elegans. Cell 75, 855-862.
[0020] Zhang, H., Kolb, F. A., Brondani, V., Billy, E., and Filipowicz, W. (2002). Human Dicer preferentially cleaves dsRNAs at their termini without a requirement for ATP. EMBO J. 21, 5875-5885.
[0021] Zuker, M. (2003). Mfold web server for nucleic acid folding and hybridization prediction. Nucleic Acids Res. 31, 3406-3415.

### BACKGROUND OF THE INVENTION

[0022] 1. Field of the Invention

[0023] The present invention relates to a group of bioinformatically detectable novel viral oligonucleotides and to a group of bioinformatically detectable novel human oligonucleotides associated with viral infections, both are identified here as Genomic Address Messenger or GAM oligonucleotides.

[0024] All of which are believed to be related to the micro RNA (miRNA) group of oligonucleotides.

[0025] 2. Description of Prior Art

[0026] Micro RNAs (miRNA), are short ˜22 nt non-coding regulatory RNA oligonucleotides, found in a wide range of species, believed to function as specific gene translation repressors, sometimes involved in cell-differentiation.

[0027] The ability to detect novel miRNAs is limited by the methodologies used to detect such oligonucleotides. All miRNAs identified so far either present a visibly discernable whole body phenotype, as do Lin-4 and Let-7 (Wightman, B., Ha, I., and Ruvkun, G., Cell 75:855-862 (1993); Reinhart et al. Nature 403: 901-906 (2000)), or produce sufficient quantities of RNA so as to be detected by the standard molecular biological techniques.

[0028] Studies reporting miRNAs (Lau et al., Science 294:858-862 (2001), Lagos-Quintana et al., Science 294: 853-858 (2001)) discovered 93 miRNAs in several species, by sequencing a limited number of clones (300 by Lau and 100 by Lagos-Quintana) of small segments (i.e. size fractionated) RNA. mRNAs detected in these studies therefore, represent the more prevalent among the miRNA oligonucleotide family, and can not be much rarer than 1% of all small ˜20 nt-long RNA oligonucleotides.

[0029] The aforesaid studies provide no basis for detection of miRNA oligonucleotides which either do not present a visually discernable whole body phenotype, or are rare (e.g. rarer than 0.1% of all size fractionated ˜20 nt-long RNA segments expressed in the tissues examined), and therefore do not produce significant enough quantities of RNA so as to be detected by standard biological techniques. To date, miRNAs have not been detected in viruses.

[0030] The following U.S. patents relate to bioinformatic detection of genes: U.S. Pat. No. 348,935, entitled “Statistical algorithms for folding and target accessibility prediction and design of nucleic acids”, U.S. Pat. No. 6,369,195, entitled “Prostate-specific gene for diagnosis, prognosis and management of prostate cancer”, and U.S. Pat. No. 6,291,666 entitled “Spike tissue-specific promoter”, each of which is hereby incorporated by reference herein.

### BRIEF DESCRIPTION OF SEQUENCE LISTING, LARGE TABLES AND COMPUTER PROGRAM LISTING

[0031] A sequence listing is attached to the present invention, comprising 399737 genomic sequences, is contained in a file named SEQ_LIST.txt (63481 KB, 28 Mar. 2004), and is hereby incorporated by reference herein.

[0032] Large tables relating to genomic sequences are attached to the present application, appear in 10 table files (size, creation date), incorporated herein: TABLE1.txt (8737 KB, 28 Mar. 2004); TABLE2.txt (165851 KB, 28 Mar. 2004); TABLE3.txt (1443 KB, 28 Mar. 2004); TABLE4.txt (8120 KB, 28 Mar. 2004), TABLE5.txt (1567 KB, 28 Mar. 2004), TABLE6.txt (42273 KB, 28 Mar. 2004) and TABLE7.txt (76926 KB, 28 Mar. 2004), TABLE8.txt (198035 KB, 28 Mar. 2004), TABLE9.txt (30207 KB, 28 Mar. 2004) and TABLE10.txt (5084 KB, 28 Mar. 2004), all of which are incorporated by reference herein.

[0033] A computer program listing of a computer program constructed and operative in accordance with a preferred embodiment of the present invention is enclosed on an electronic medium in computer readable form, and is hereby incorporated by reference herein. The computer program listing is contained in 6 files, the name, sizes and creation date of which are as follows: AUXILARY_FILES.txt (117K, 14 Nov. 2003); EDIT_DISTANCE.txt (144K, 24 Nov. 2003); FIRST-K.txt (96K, 24 Nov. 2003); HAIRPIN_PREDICTION.txt (19K, 25 Mar. 2004); TWO_PHASED_SIDE_SELECTOR.txt (4K, 14 Nov. 2003); and TWO_PHASED_PREDICTOR.txt (74K, 14 Nov. 2003).

### SUMMARY OF THE INVENTION

[0034] The present invention relates to a novel group of bioinformatically detectable viral regulatory RNA oligonucleotides, which repress expression of human target genes, by means of complementary hybridization to binding sites in untranslated regions of these human target genes. It is believed that this novel group of viral oligonucleotides represents a pervasive viral mechanism of attacking hosts, and therefore knowledge of this novel group of viral oligonucleotides may be useful in preventing and treating viral diseases.

[0035] Additionally, the present invention relates to a novel group of bioinformatically detectable human regulatory RNA oligonucleotides, which repress expression of viral target genes, by means of complementary hybridization to binding sites in untranslated regions of these viral target genes. It is believed that this novel group of human oligonucleotides represents a pervasive novel anti-viral host defense mechanism, and therefore knowledge of this novel group of human oligonucleotides may be useful in preventing and treating viral diseases.

[0036] Furthermore, the present invention relates to a novel group of bioinformatically detectable human regulatory RNA oligonucleotides, which repress expression of human target genes associated with viral diseases, by means of complementary hybridization to binding sites in untranslated regions of these human target genes. It is believed that this novel group of human oligonucleotides represents a pervasive novel host response mechanism, and therefore knowledge of this novel group of human oligonucleotides may be useful in preventing and treating viral diseases.

[0037] Additionally, the present invention relates to a novel group of bioinformatically detectable viral regulatory RNA oligonucleotides, which repress expression of viral target genes, by means of complementary hybridization to binding sites in untranslated regions of these viral target genes. It is believed that this novel group of viral oligonucleotides represents a pervasive novel internal viral regulation mechanism, and therefore knowledge of this novel group of viral oligonucleotides may be useful in preventing and treating viral diseases.

[0038] In various preferred embodiments, the present invention seeks to provide improved method and system for detection and prevention of viral diseases, which are mediated by the abovementioned groups of novel oligonucleotides.

[0039] Accordingly, the invention provides several substantially pure nucleic acids (e.g., genomic DNA, cDNA or synthetic DNA) each comprising a novel GAM oligonucleotide, vectors comprising the DNAs, probes comprising the DNAs, a method and system for selectively modulating translation of known target genes utilizing the vectors, and a method and system utilizing the GAM probes to modulate expression of target genes.

[0040] The present invention represents a scientific breakthrough, disclosing novel miRNA-like oligonucleotides the number of which is dramatically larger than previously believed existed. Prior-art studies reporting miRNAs ((Lau et al., Science 294:858-862 (2001), Lagos-Quintana et al., Science 294: 853-858 (2001)) discovered 93 miRNAs in several species, including 21 in human, using conventional molecular biology methods, such as cloning and sequencing.

[0041] Molecular biology methodologies employed by these studies are limited in their ability to detect rare miRNA oligonucleotides, since these studies relied on sequencing of a limited number of clones (300 clones by Lau and 100 clones by Lagos-Quintana) of small segments (i.e. size fractionated) of RNA. MicroRNAs detected in these studies therefore, represent the more prevalent among the miRNA oligonucleotide family, and are typically not be much rarer than 1% of all small ˜20 nt-long RNA oligonucleotides present in the tissue from the RNA was extracted.

[0042] Recent studies state the number of miRNA oligonucleotides to be limited, and describe the limited sensitivity of available methods for detection of miRNA: The estimate of 255 human miRNA oligonucleotides is an upper bound implying that no more than 40 miRNA oligonucleotides remain to be identified in mammals (Lim et al., Science, 299:1540 (2003)); Estimates place the total number of vertebrate miRNA genes at about 200-250 (Ambros et al. Curr. Biol. 13:807-818 (2003)); and Confirmation of very low abundance miRNAs awaits the application of detection methods more sensitive than Northern blots (Ambros et al. Curr. Biol. 13:807-818 (2003)).

[0043] The oligonucleotides of the present invention represent a revolutionary new dimension of genomics and of biology: a dimension comprising a huge number of non-protein coding oligonucleotides which modulate expression of thousands of proteins and are associated with numerous major diseases. This new dimension disclosed by the present invention dismantles a central dogma that has dominated life-sciences during the past 50 years, a dogma which has emphasized the importance of protein coding regions of the genome, holding non-protein coding regions to be of little consequence, often dubbing them junk DNA.

[0044] Indeed, only in November, 2003 has this long held belief as to the low importance of non-protein coding regions been vocally challenged. As an example, an article titled The Unseen Genome—Gems in the Junk (Gibbs, W. W. Sci. Am. 289:46-53 (2003)) asserts that the failure to recognize the importance of non-protein-coding regions may well go down as one of the biggest mistakes in the history of molecular biology. Gibbs further asserts that what was damned as junk because it was not understood, may in fact turn out to be the very basis of human complexity. The present invention provides a dramatic leap in understanding specific important roles of non-protein coding regions.

[0045] An additional scientific breakthrough of the present invention is a novel conceptual model disclosed by the present invention, which conceptual model is preferably used to encode in a genome the determination of cell-differentiation, utilizing oligonucleotides and polynucleotides of the present invention.

[0046] In various preferred embodiments, the present invention seeks to provide an improved method and system for specific modulation of the expression of specific target genes involved in significant human diseases. It also provides an improved method and system for detection of the expression of novel oligonucleotides of the present invention, which modulate these target genes. In many cases the target genes may be known and fully characterized, however in alternative embodiments of the present invention, unknown or less well characterized genes may be targeted.

[0047] A Nucleic acid is defined as a ribonucleic acid (RNA) molecule, or a deoxyribonucleic acid (DNA) molecule, or complementary deoxyribonucleic acid (cDNA), comprising either naturally occurring nucleotides or non-naturally occurring nucleotides.

[0048] Substantially pure nucleic acid, Isolated Nucleic Acid, Isolated Oligonucleotide and Isolated Polynucleotide are defined as a nucleic acid that is free of the genome of the organism from which the nucleic acid is derived, and include, for example, a recombinant nucleic acid which is incorporated into a vector, into an autonomously replicating plasmid or virus, or into the genomic nucleic acid of a prokaryote or eukaryote at a site other than its natural site; or which exists as a separate molecule (e.g., a cDNA or a genomic or cDNA fragment produced by PCR or restriction endonuclease digestion) independent of other nucleic acids.

[0049] An Oligonucleotide is defined as a nucleic acid comprising 2-139 nucleotides, or preferably 16-120 nucleotides. A Polynucleotide is defined as a nucleic acid comprising 140-5000 nucleotides, or preferably 140-1000 nucleotides.

[0050] A Complementary sequence is defined as a first nucleotide sequence which reverses complementary of a second nucleotide sequence: the first nucleotide sequence is reversed relative to a second nucleotide sequence, and wherein each nucleotide in the first nucleotide sequence is complementary to a corresponding nucleotide in the second nucleotide sequence (e.g. ATGGC is the complementary sequence of GCCAT).

[0051] Hybridization, Binding and Annealing are defined as hybridization, under in-vivo physiologic conditions, of a first nucleic acid to a second nucleic acid, which second nucleic acid is at least partially complementary to the first nucleic acid.

[0052] A Hairpin Structure is defined as an oligonucleotide having a nucleotide sequence that is 50-140 nucleotides in length, the first half of which nucleotide sequence is at least partially complementary to the second part thereof, thereby causing the nucleic acid to fold onto itself, forming a secondary hairpin structure.

[0053] A Hairpin Shaped Precursor is defined as a Hairpin Structure which is processed by a Dicer enzyme complex, yielding an oligonucleotide which is about 19 to about 24 nucleotides in length.

[0054] “Inhibiting translation” is defined as the ability to prevent synthesis of a specific protein encoded by a respective gene by means of inhibiting the translation of the mRNA of this gene. For example, inhibiting translation may include the following steps: (1) a DNA segment encodes an RNA, the first half of whose sequence is partially complementary to the second half thereof; (2) the precursor folds onto itself forming a hairpin-shaped precursor; (3) a Dicer enzyme complex cuts the hairpin shaped precursor yielding an oligonucleotide that is approximately 22 nt in length; (4) the oligonucleotide binds complementarily to at least one binding site, having a nucleotide sequence that is at least partially complementary to the oligonucleotide, which binding site is located in the mRNA of a target gene, preferably in the untranslated region (UTR) of a target gene, such that the binding inhibits translation of the target protein.

[0055] A “Translation inhibitor site” is defined as the minimal nucleotide sequence sufficient to inhibit translation.

[0056] There is thus provided in accordance with a preferred embodiment of the present invention A bioinformatically detectable isolated oligonucleotide which is endogenously processed from a hairpin-shaped precursor, and anneals to a portion of a mRNA transcript of a target gene, wherein binding of the oligonucleotide to the mRNA transcript represses expression of the target gene, and wherein the oligonucleotide has at least 80% sequence identity with a nucleotide sequence selected from the group consisting of SEQ ID NOs: 1-14456. A bioinformatically detectable isolated oligonucleotide having a nucleotide sequence selected from the group consisting of SEQ ID NOs: 1-14456. A bioinformatically detectable first oligonucleotide which is a portion of a mRNA transcript of a target gene, and anneals to a second oligonucleotide that is endogenously processed from a hairpin precursor, wherein binding of the first oligonucleotide to the second oligonucleotide represses expression of the target gene, and wherein nucleotide sequence of the second nucleotide is selected from the group consisting of SEQ ID NOs: 1-14456. A bioinformatically detectable oligonucleotide having a nucleotide sequence selected from the group consisting of SEQ ID NOs: 1-14456. A bioinformatically detectable isolated oligonucleotide which anneals to a portion of a mRNA transcript of a target gene associated with Human immunodeficiency virus 1 (HIV-1) infection, wherein binding of the oligonucleotide to the mRNA transcript represses expression of the target gene, and wherein the oligonucleotide has at least 80% sequence identity with a nucleotide sequence selected from the group consisting of: (a) a sequence selected from the group consisting of SEQ ID NOs: 1, 3, 5 and 63804-66308, and (b) the complement of a sequence selected from the group consisting of SEQ ID NOs: 196685, 197420, 198047 and 194813-200687. A bioinformatically detectable first oligonucleotide which is a portion of a mRNA transcript of a target gene associated with Human immunodeficiency virus 1 (HIV-1), and anneals to a second oligonucleotide that is endogenously processed from a hairpin precursor, wherein binding of the first oligonucleotide to the second oligonucleotide represses expression of the target gene, and wherein nucleotide sequence of the second nucleotide is selected from the group consisting of SEQ ID NOs: 1, 3, 5 and 63804-66308. A bioinformatically detectable isolated oligonucleotide which anneals to a portion of a mRNA transcript of a target gene associated with Human immunodeficiency virus 2 (HIV-2) infection, wherein binding of the oligonucleotide to the mRNA transcript represses expression of the target gene, and wherein the oligonucleotide has at least 80% sequence identity with a nucleotide sequence selected from the group consisting of: (a) a sequence selected from the group consisting of SEQ ID NOs: 1, 3, 5 and 66309-68740, and (b) the complement of a sequence selected from the group consisting of SEQ ID NOs: 202601, 204421, 205326 and 200688-206410. A bioinformatically detectable first oligonucleotide which is a portion of a mRNA transcript of a target gene associated with Human immunodeficiency virus 2 (HIV-2), and anneals to a second oligonucleotide that is endogenously processed from a hairpin precursor, wherein binding of the first oligonucleotide to the second oligonucleotide represses expression of the target gene, and wherein nucleotide sequence of the second nucleotide is selected from the group consisting of SEQ ID NOs: 1, 3, 5 and 66309-68740. A bioinformatically detectable isolated oligonucleotide which anneals to a portion of a mRNA transcript of a target gene associated with Human adenovirus A infection, wherein binding of the oligonucleotide to the mRNA transcript represses expression of the target gene, and wherein the oligonucleotide has at least 80% sequence identity with a nucleotide sequence selected from the group consisting of: (a) a sequence selected from the group consisting of SEQ ID NOs: 3 and 18799-20253, and (b) the complement of a sequence selected from the group consisting of SEQ ID NOs: 99724 and 99658-102371. A bioinformatically detectable first oligonucleotide which is a portion of a mRNA transcript of a target gene associated with Human adenovirus A, and anneals to a second oligonucleotide that is endogenously processed from a hairpin precursor, wherein binding of the first oligonucleotide to the second oligonucleotide represses expression of the target gene, and wherein nucleotide sequence of the second nucleotide is selected from the group consisting of SEQ ID NOs: 3 and 18799-20253. A bioinformatically detectable isolated oligonucleotide which anneals to a portion of a mRNA transcript of a target gene associated with Human herpesvirus 1 infection, wherein binding of the oligonucleotide to the mRNA transcript represses expression of the target gene, and wherein the oligonucleotide has at least 80% sequence identity with a nucleotide sequence selected from the group consisting of: (a) a sequence selected from the group consisting of SEQ ID NOs: 1, 3, 4 and 29296-31435, and (b) the complement of a sequence selected from the group consisting of SEQ ID NOs: 119609, 119788 and 119381-124109. A bioinformatically detectable first oligonucleotide which is a portion of a mRNA transcript of a target gene associated with Human herpesvirus 1, and anneals to a second oligonucleotide that is endogenously processed from a hairpin precursor, wherein binding of the first oligonucleotide to the second oligonucleotide represses expression of the target gene, and wherein nucleotide sequence of the second nucleotide is selected from the group consisting of SEQ ID NOs: 1, 3, 4 and 29296-31435. A bioinformatically detectable isolated oligonucleotide which anneals to a portion of a mRNA transcript of a target gene associated with Human herpesvirus 4 (Epstein-Barr virus) infection, wherein binding of the oligonucleotide to the mRNA transcript represses expression of the target gene, and wherein the oligonucleotide has at least 80% sequence identity with a nucleotide sequence selected from the group consisting of: (a) a sequence selected from the group consisting of SEQ ID NOs: 1, 3, 4 and 36686-40656, and (b) the complement of a sequence selected from the group consisting of SEQ ID NOs: 134996, 135760 and 134776-142920. A bioinformatically detectable first oligonucleotide which is a portion of a mRNA transcript of a target gene associated with Human herpesvirus 4 (Epstein-Barr virus), and anneals to a second oligonucleotide that is endogenously processed from a hairpin precursor, wherein binding of the first oligonucleotide to the second oligonucleotide represses expression of the target gene, and wherein nucleotide sequence of the second nucleotide is selected from the group consisting of SEQ ID NOs: 1, 3, 4 and 36686-40656. A bioinformatically detectable isolated oligonucleotide which anneals to a portion of a mRNA transcript of a target gene associated with Human adenovirus B (HAdV-B) infection, wherein binding of the oligonucleotide to the mRNA transcript represses expression of the target gene, and wherein the oligonucleotide has at least 80% sequence identity with a nucleotide sequence selected from the group consisting of: (a) a sequence selected from the group consisting of SEQ ID NOs: 3 and 20254-22197, and (b) the complement of a sequence selected from the group consisting of SEQ ID NOs: 102401 and 102372-106136. A bioinformatically detectable first oligonucleotide which is a portion of a mRNA transcript of a target gene associated with Human adenovirus B (HAdV-B), and anneals to a second oligonucleotide that is endogenously processed from a hairpin precursor, wherein binding of the first oligonucleotide to the second oligonucleotide represses expression of the target gene, and wherein nucleotide sequence of the second nucleotide is selected from the group consisting of SEQ ID NOs: 3 and 20254-22197. A bioinformatically detectable isolated oligonucleotide which anneals to a portion of a mRNA transcript of a target gene associated with Human adenovirus C infection, wherein binding of the oligonucleotide to the mRNA transcript represses expression of the target gene, and wherein the oligonucleotide has at least 80% sequence identity with a nucleotide sequence selected from the group consisting of: (a) a sequence selected from the group consisting of SEQ ID NOs: 3 and 22198-23499, and (b) the complement of a sequence selected from the group consisting of SEQ ID NOs: 106234 and 106137-108504. A bioinformatically detectable first oligonucleotide which is a portion of a mRNA transcript of a target gene associated with Human adenovirus C, and anneals to a second oligonucleotide that is endogenously processed from a hairpin precursor, wherein binding of the first oligonucleotide to the second oligonucleotide represses expression of the target gene, and wherein nucleotide sequence of the second nucleotide is selected from the group consisting of SEQ ID NOs: 3 and 22198-23499. A bioinformatically detectable isolated oligonucleotide which anneals to a portion of a mRNA transcript of a target gene associated with Human adenovirus D infection, wherein binding of the oligonucleotide to the mRNA transcript represses expression of the target gene, and wherein the oligonucleotide has at least 80% sequence identity with a nucleotide sequence selected from the group consisting of: (a) a sequence selected from the group consisting of SEQ ID NOs: 3 and 23500-24998, and (b) the complement of a sequence selected from the group consisting of SEQ ID NOs: 108595 and 108505-111292. A bioinformatically detectable first oligonucleotide which is a portion of a mRNA transcript of a target gene associated with Human adenovirus D, and anneals to a second oligonucleotide that is endogenously processed from a hairpin precursor, wherein binding of the first oligonucleotide to the second oligonucleotide represses expression of the target gene, and wherein nucleotide sequence of the second nucleotide is selected from the group consisting of SEQ ID NOs: 3 and 23500-24998. A bioinformatically detectable isolated oligonucleotide which anneals to a portion of a mRNA transcript of a target gene associated with Human adenovirus E infection, wherein binding of the oligonucleotide to the mRNA transcript represses expression of the target gene, and wherein the oligonucleotide has at least 80% sequence identity with a nucleotide sequence selected from the group consisting of: (a) a sequence selected from the group consisting of SEQ ID NOs: 3 and 24999-26195, and (b) the complement of a sequence selected from the group consisting of SEQ ID NOs: 111356 and 111293-113584. A bioinformatically detectable first oligonucleotide which is a portion of a mRNA transcript of a target gene associated with Human adenovirus E, and anneals to a second oligonucleotide that is endogenously processed from a hairpin precursor, wherein binding of the first oligonucleotide to the second oligonucleotide represses expression of the target gene, and wherein nucleotide sequence of the second nucleotide is selected from the group consisting of SEQ ID NOs: 3 and 24999-26195. A bioinformatically detectable isolated oligonucleotide which anneals to a portion of a mRNA transcript of a target gene associated with Human adenovirus F infection, wherein binding of the oligonucleotide to the mRNA transcript represses expression of the target gene, and wherein the oligonucleotide has at least 80% sequence identity with a nucleotide sequence selected from the group consisting of: (a) a sequence selected from the group consisting of SEQ ID NOs: 3 and 26196-27681, and (b) the complement of a sequence selected from the group consisting of SEQ ID NOs: 113596 and 113585-116354. A bioinformatically detectable first oligonucleotide which is a portion of a mRNA transcript of a target gene associated with Human adenovirus F, and anneals to a second oligonucleotide that is endogenously processed from a hairpin precursor, wherein binding of the first oligonucleotide to the second oligonucleotide represses expression of the target gene, and wherein nucleotide sequence of the second nucleotide is selected from the group consisting of SEQ ID NOs: 3 and 26196-27681. A bioinformatically detectable isolated oligonucleotide which anneals to a portion of a mRNA transcript of a target gene associated with Human herpesvirus 2 infection, wherein binding of the oligonucleotide to the mRNA transcript represses expression of the target gene, and wherein the oligonucleotide has at least 80% sequence identity with a nucleotide sequence selected from the group consisting of: (a) a sequence selected from the group consisting of SEQ ID NOs: 1, 3, 4 and 31436-33484, and (b) the complement of a sequence selected from the group consisting of SEQ ID NOs: 125110, 125697 and 124110-128336. A bioinformatically detectable first oligonucleotide which is a portion of a mRNA transcript of a target gene associated with Human herpesvirus 2, and anneals to a second oligonucleotide that is endogenously processed from a hairpin precursor, wherein binding of the first oligonucleotide to the second oligonucleotide represses expression of the target gene, and wherein nucleotide sequence of the second nucleotide is selected from the group consisting of SEQ ID NOs: 1, 3, 4 and 31436-33484. A bioinformatically detectable isolated oligonucleotide which anneals to a portion of a mRNA transcript of a target gene associated with Human herpesvirus 3 infection, wherein binding of the oligonucleotide to the mRNA transcript represses expression of the target gene, and wherein the oligonucleotide has at least 80% sequence identity with a nucleotide sequence selected from the group consisting of: (a) a sequence selected from the group consisting of SEQ ID NOs: 1, 3, 4 and 33485-36685, and (b) the complement of a sequence selected from the group consisting of SEQ ID NOs: 128645, 128879 and 128337-134775. A bioinformatically detectable first oligonucleotide which is a portion of a mRNA transcript of a target gene associated with Human herpesvirus 3, and anneals to a second oligonucleotide that is endogenously processed from a hairpin precursor, wherein binding of the first oligonucleotide to the second oligonucleotide represses expression of the target gene, and wherein nucleotide sequence of the second nucleotide is selected from the group consisting of SEQ ID NOs: 1, 3, 4 and 33485-36685. A bioinformatically detectable isolated oligonucleotide which anneals to a portion of a mRNA transcript of a target gene associated with Human herpesvirus 5 infection, wherein binding of the oligonucleotide to the mRNA transcript represses expression of the target gene, and wherein the oligonucleotide has at least 80% sequence identity with a nucleotide sequence selected from the group consisting of: (a) a sequence selected from the group consisting of SEQ ID NOs: 1, 3, 4 and 40657-45367, and (b) the complement of a sequence selected from the group consisting of SEQ ID NOs: 143584, 143602 and 142921-153787. A bioinformatically detectable first oligonucleotide which is a portion of a mRNA transcript of a target gene associated with Human herpesvirus 5, and anneals to a second oligonucleotide that is endogenously processed from a hairpin precursor, wherein binding of the first oligonucleotide to the second oligonucleotide represses expression of the target gene, and wherein nucleotide sequence of the second nucleotide is selected from the group consisting of SEQ ID NOs: 1, 3, 4 and 40657-45367. A bioinformatically detectable isolated oligonucleotide which anneals to a portion of a mRNA transcript of a target gene associated with Human herpesvirus 6 infection, wherein binding of the oligonucleotide to the mRNA transcript represses expression of the target gene, and wherein the oligonucleotide has at least 80% sequence identity with a nucleotide sequence selected from the group consisting of: (a) a sequence selected from the group consisting of SEQ ID NOs: 1, 3, 4 and 45368-49938, and (b) the complement of a sequence selected from the group consisting of SEQ ID NOs: 154384, 155376 and 153788-163278. A bioinformatically detectable first oligonucleotide which is a portion of a mRNA transcript of a target gene associated with Human herpesvirus 6, and anneals to a second oligonucleotide that is endogenously processed from a hairpin precursor, wherein binding of the first oligonucleotide to the second oligonucleotide represses expression of the target gene, and wherein nucleotide sequence of the second nucleotide is selected from the group consisting of SEQ ID NOs: 1, 3, 4 and 45368-49938. A bioinformatically detectable isolated oligonucleotide which anneals to a portion of a mRNA transcript of a target gene associated with Human herpesvirus 6B infection, wherein binding of the oligonucleotide to the mRNA transcript represses expression of the target gene, and wherein the oligonucleotide has at least 80% sequence identity with a nucleotide sequence selected from the group consisting of: (a) a sequence selected from the group consisting of SEQ ID NOs: 1, 3, 4 and 49939-54807, and (b) the complement of a sequence selected from the group consisting of SEQ ID NOs: 163594, 163624 and 163279-174169. A bioinformatically detectable first oligonucleotide which is a portion of a mRNA transcript of a target gene associated with Human herpesvirus 6B, and anneals to a second oligonucleotide that is endogenously processed from a hairpin precursor, wherein binding of the first oligonucleotide to the second oligonucleotide represses expression of the target gene, and wherein nucleotide sequence of the second nucleotide is selected from the group consisting of SEQ ID NOs: 1, 3, 4 and 49939-54807. A bioinformatically detectable isolated oligonucleotide which anneals to a portion of a mRNA transcript of a target gene associated with Human herpesvirus 7 infection, wherein binding of the oligonucleotide to the mRNA transcript represses expression of the target gene, and wherein the oligonucleotide has at least 80% sequence identity with a nucleotide sequence selected from the group consisting of: (a) a sequence selected from the group consisting of SEQ ID NOs: 1, 3, 4 and 54808-59933, and (b) the complement of a sequence selected from the group consisting of SEQ ID NOs: 175525, 175696 and 174170-187099. A bioinformatically detectable first oligonucleotide which is a portion of a mRNA transcript of a target gene associated with Human herpesvirus 7, and anneals to a second oligonucleotide that is endogenously processed from a hairpin precursor, wherein binding of the first oligonucleotide to the second oligonucleotide represses expression of the target gene, and wherein nucleotide sequence of the second nucleotide is selected from the group consisting of SEQ ID NOs: 1, 3, 4 and 54808-59933. A bioinformatically detectable isolated oligonucleotide which anneals to a portion of a mRNA transcript of a target gene associated with Japanese encephalitis virus infection, wherein binding of the oligonucleotide to the mRNA transcript represses expression of the target gene, and wherein the oligonucleotide has at least 80% sequence identity with a nucleotide sequence selected from the group consisting of: (a) a sequence selected from the group consisting of SEQ ID NOs: 1, 2, 3, 4 and 76896-78717, and (b) the complement of a sequence selected from the group consisting of SEQ ID NOs: 222664, 224180, 224385, 224863 and 221707-225968. A bioinformatically detectable first oligonucleotide which is a portion of a mRNA transcript of a target gene associated with Japanese encephalitis virus, and anneals to a second oligonucleotide that is endogenously processed from a hairpin precursor, wherein binding of the first oligonucleotide to the second oligonucleotide represses expression of the target gene, and wherein nucleotide sequence of the second nucleotide is selected from the group consisting of SEQ ID NOs: 1, 2, 3, 4 and 76896-78717. A bioinformatically detectable isolated oligonucleotide which anneals to a portion of a mRNA transcript of a target gene associated with Murray Valley encephalitis virus infection, wherein binding of the oligonucleotide to the mRNA transcript represses expression of the target gene, and wherein the oligonucleotide has at least 80% sequence identity with a nucleotide sequence selected from the group consisting of: (a) a sequence selected from the group consisting of SEQ ID NOs: 1, 2, 3, 4 and 83567-85368, and (b) the complement of a sequence selected from the group consisting of SEQ ID NOs: 240498, 240554, 241922, 243206 and 240222-244441. A bioinformatically detectable first oligonucleotide which is a portion of a mRNA transcript of a target gene associated with Murray Valley encephalitis virus, and anneals to a second oligonucleotide that is endogenously processed from a hairpin precursor, wherein binding of the first oligonucleotide to the second oligonucleotide represses expression of the target gene, and wherein nucleotide sequence of the second nucleotide is selected from the group consisting of SEQ ID NOs: 1, 2, 3, 4 and 83567-85368. A bioinformatically detectable isolated oligonucleotide which anneals to a portion of a mRNA transcript of a target gene associated with West Nile virus infection, wherein binding of the oligonucleotide to the mRNA transcript represses expression of the target gene, and wherein the oligonucleotide has at least 80% sequence identity with a nucleotide sequence selected from the group consisting of: (a) a sequence selected from the group consisting of SEQ ID NOs: 5 and 89176-89792, and (b) the complement of a sequence selected from the group consisting of SEQ ID NOs: 251834 and 251558-253039. A bioinformatically detectable first oligonucleotide which is a portion of a mRNA transcript of a target gene associated with West Nile virus, and anneals to a second oligonucleotide that is endogenously processed from a hairpin precursor, wherein binding of the first oligonucleotide to the second oligonucleotide represses expression of the target gene, and wherein nucleotide sequence of the second nucleotide is selected from the group consisting of SEQ ID NOs: 5 and 89176-89792. A bioinformatically detectable isolated oligonucleotide which anneals to a portion of a mRNA transcript of a target gene associated with Western equine encephalomyelitis virus infection, wherein binding of the oligonucleotide to the mRNA transcript represses expression of the target gene, and wherein the oligonucleotide has at least 80% sequence identity with a nucleotide sequence selected from the group consisting of: (a) a sequence selected from the group consisting of SEQ ID NOs: 5 and 89793-90322, and (b) the complement of a sequence selected from the group consisting of SEQ ID NOs: 253274 and 253040-254154. A bioinformatically detectable first oligonucleotide which is a portion of a mRNA transcript of a target gene associated with Western equine encephalomyelitis virus, and anneals to a second oligonucleotide that is endogenously processed from a hairpin precursor, wherein binding of the first oligonucleotide to the second oligonucleotide represses expression of the target gene, and wherein nucleotide sequence of the second nucleotide is selected from the group consisting of SEQ ID NOs: 5 and 89793-90322. A bioinformatically detectable isolated oligonucleotide which anneals to a portion of a mRNA transcript of a target gene associated with Eastern equine encephalitis virus infection, wherein binding of the oligonucleotide to the mRNA transcript represses expression of the target gene, and wherein the oligonucleotide has at least 80% sequence identity with a nucleotide sequence selected from the group consisting of: (a) a sequence selected from the group consisting of SEQ ID NOs: 1, 2, 3, 4 and 16459-18368, and (b) the complement of a sequence selected from the group consisting of SEQ ID NOs: 95931, 96664, 98184, 98729 and 94518-98947. A bioinformatically detectable first oligonucleotide which is a portion of a mRNA transcript of a target gene associated with Eastern equine encephalitis virus, and anneals to a second oligonucleotide that is endogenously processed from a hairpin precursor, wherein binding of the first oligonucleotide to the second oligonucleotide represses expression of the target gene, and wherein nucleotide sequence of the second nucleotide is selected from the group consisting of SEQ ID NOs: 1, 2, 3, 4 and 16459-18368. A method for bioinformatic detection of microRNA oligonucleotides, the method including: bioinformatically detecting a hairpin shaped precursor oligonucleotide, bioinformatically detecting an oligonucleotide which is endogenously processed from the hairpin shaped precursor oligonucleotide, and bioinformatically detecting a target gene of the oligonucleotide wherein the oligonucleotide anneals to at least one portion of a mRNA transcript of the target gene, and wherein the binding represses expression of the target gene, and the target gene is associated with a disease.

### BRIEF DESCRIPTION OF DRAWINGS

[0057] FIG. 1 is a simplified diagram illustrating a mode by which an oligonucleotide of a novel group of oligonucleotides of the present invention modulates expression of known target genes;

[0058] FIG. 2 is a simplified block diagram illustrating a bioinformatic oligonucleotide detection system capable of detecting oligonucleotides of the novel group of oligonucleotides of the present invention, which system is constructed and operative in accordance with a preferred embodiment of the present invention;

[0059] FIG. 3 is a simplified flowchart illustrating operation of a mechanism for training of a computer system to recognize the novel oligonucleotides of the present invention, which mechanism is constructed and operative in accordance with a preferred embodiment of the present invention;

[0060] FIG. 4A is a simplified block diagram of a non-coding genomic sequence detector constructed and operative in accordance with a preferred embodiment of the present invention;

[0061] FIG. 4B is a simplified flowchart illustrating operation of a non-coding genomic sequence detector constructed and operative in accordance with a preferred embodiment of the present invention;

[0062] FIG. 5A is a simplified block diagram of a hairpin detector constructed and operative in accordance with a preferred embodiment of the present invention;

[0063] FIG. 5B is a simplified flowchart illustrating operation of a hairpin detector constructed and operative in accordance with a preferred embodiment of the present invention;

[0064] FIG. 6A is a simplified block diagram of a dicer-cut location detector constructed and operative in accordance with a preferred embodiment of the present invention;

[0065] FIG. 6B is a simplified flowchart illustrating training of a dicer-cut location detector constructed and operative in accordance with a preferred embodiment of the present invention;

[0066] FIG. 6C is a simplified flowchart illustrating operation of a dicer-cut location detector constructed and operative in accordance with a preferred embodiment of the present invention;

[0067] FIG. 7A is a simplified block diagram of a target gene binding-site detector constructed and operative in accordance with a preferred embodiment of the present invention;

[0068] FIG. 7B is a simplified flowchart illustrating operation of a target gene binding-site detector constructed and operative in accordance with a preferred embodiment of the present invention;

[0069] FIG. 8 is a simplified flowchart illustrating operation of a function & utility analyzer constructed and operative in accordance with a preferred embodiment of the present invention;

[0070] FIG. 9 is a simplified diagram describing a novel bioinformatically detected group of regulatory polynucleotides, referred to here as Genomic Record (GR) polynucleotides, each of which encodes an ‘operon-like’ cluster of novel miRNA-like oligonucleotides, which in turn modulate expression of one or more target genes;

[0071] FIG. 10 is a block diagram illustrating different utilities of novel oligonucleotides and novel operon-like polynucleotides, both of the present invention;

[0072] FIGS. 11A and 11B are simplified diagrams, which when taken together illustrate a mode of oligonucleotide therapy applicable to novel oligonucleotides of the present invention;

[0073] FIG. 12A is a histogram representing the distribution of known miRNA oligonucleotides and that of predicted miRNA-like hairpin structures extracted from expressed genome sequences with respect to their hairpin detector score;

[0074] FIG. 12B is a table summarizing laboratory validation results which validate efficacy of a bioinformatic oligonucleotide detection system constructed and operative in accordance with a preferred embodiment of the present invention;

[0075] FIG. 13A and FIG. 13B are a picture and a summary table of laboratory results validating the expression of novel human oligonucleotides detected by a bioinformatic oligonucleotide detection engine constructed and operative in accordance with a preferred embodiment of the present invention, thereby validating the efficacy of the oligonucleotide detection engine of the present invention;

[0076] FIG. 14A is a schematic representation of an “operon-like” cluster of novel human hairpin sequences detected bioinformatically by a bioinformatic oligonucleotide detection engine constructed and operative in accordance with a preferred embodiment of the present invention, and non-GAM hairpin useful as negative controls thereto;

[0077] FIG. 14B is a schematic representation of secondary folding of hairpins of the operon-like cluster of FIG. 14A;

[0078] FIG. 14C is a picture of laboratory results demonstrating expression of novel oligonucleotides of FIGS. 14A and 14B, and lack of expression of the negative controls, thereby validating efficacy of bioinformatic detection of GAM oligonucleotides and GR polynucleotides detected by a bioinformatic oligonucleotide detection engine, constructed and operative in accordance with a preferred embodiment of the present invention;

[0079] FIG. 15A is an annotated sequence of EST72223 comprising known human miRNA oligonucleotide MIR98 and novel human oligonucleotide GAM25 PRECURSOR detected by the oligonucleotide detection system of the present invention; and

[0080] FIGS. 15B, 15C and 15D are pictures of laboratory results demonstrating laboratory confirmation of expression of known human oligonucleotide MIR98 and of novel bioinformatically detected human GAM25 RNA respectively, both of FIG. 15A, thus validating the bioinformatic oligonucleotide detection system of the present invention;

[0081] FIG. 16 presents pictures of laboratory results demonstrating laboratory confirmation of ‘dicing’ of four novel bioinformatically detected HIV1 GAM PRECURSORSs into their corresponding mature GAM RNAs, herein designated VGAM2032-B (FIG. 16B), VGAM3249-A (FIG. 16C), GAM507-B (FIG. 16D) and VGAM1016-B (FIG. 16E);

### BRIEF DESCRIPTION OF SEQUENCES

[0082] A Sequence Listing of genomic sequences of the present invention designated SEQ ID NO:1 through SEQ ID: 399737 is attached to this application, and is hereby incorporated herein. The genomic listing comprises the following nucleotide sequences: nucleotide sequences of 15484 GAM precursors of respective novel oligonucleotides of the present invention; nucleotide sequences of 14452 GAM RNA oligonucleotides of respective novel oligonucleotides of the present invention; and nucleotide sequences of 127998 target gene binding sites of respective novel oligonucleotides of the present invention.

### DETAILED DESCRIPTION

[0083] Reference is now made to FIG. 1, which is a simplified diagram describing a plurality of novel bioinformatically detected oligonucleotide of the present invention referred to here as Genomic Address Messenger (GAM) oligonucleotide, which modulates expression of respective target genes whose function and utility is known in the art.

[0084] GAM is a novel bioinformatically detectable regulatory, non protein coding, microRNA (miRNA)-like oligonucleotide. The method by which GAM is detected is described with additional reference to FIGS. 1-8.

[0085] GAM PRECURSOR is preferably encoded by a viral genome. Alternatively or additionally GAM PRECURSOR is encoded by the human genome. GAM TARGET GENE is a gene encoded by the human genome. Alternatively or additionally GAM TARGET GENE is a gene encoded by a viral genome.

[0086] GAM PRECURSOR encodes a GAM PRECURSOR RNA. Similar to other miRNA oligonucleotides GAM PRECURSOR RNA does not encode a protein.

[0087] GAM PRECURSOR RNA folds onto itself, forming GAM FOLDED PRECURSOR RNA which has a two-dimensional ‘hairpin structure’. As is well known in the art, this ‘hairpin structure’, is typical of RNA encoded by known miRNA oligonucleotides, and is due to the fact that the nucleotide sequence of the first half of the RNA encoded by a miRNA oligonucleotide is a fully or partially complementary sequence of the nucleotide sequence of the second half thereof. By complementary is meant a sequence which is reversed and wherein each nucleotide is replaced by a complementary nucleotide, as is well known in the art (e.g. ATGGC is the complementary sequence of GCCAT). An enzyme complex designated DICER COMPLEX, ‘dices’ the GAM FOLDED PRECURSOR RNA yielding a GAM RNA in the form of a single stranded ˜22 nt long RNA segment. As is known in the art, ‘dicing’ of a hairpin structured RNA precursor product to yield a short ˜22 nt RNA segment is catalyzed by an enzyme complex Dicer RNaseIII together with other necessary proteins.

[0088] GAM TARGET GENE encodes a corresponding messenger RNA, GAM TARGET RNA. Each of the GAM TARGET RNAs of the present invention comprises three regions, as is typical of mRNA of a protein coding gene: a 5′ untranslated region, a protein coding region and a 3′ untranslated region, designated 5′UTR, PROTEIN CODING and 3′UTR respectively.

[0089] GAM RNA binds complementarily to one or more target binding sites located in untranslated regions of each of the GAM TARGET RNAs of the present invention. This complementary binding is due to the fact that the nucleotide sequence of GAM RNA is a partial or fully complementary sequence of the nucleotide sequence of each of the target binding sites. As an illustration, FIG. 1 shows three such target binding sites, designated BINDING SITE I, BINDING SITE II and BINDING SITE III respectively. It is appreciated that the number of target binding sites shown in FIG. 1 is only illustrative and that any suitable number of target binding sites may be present. It is further appreciated that although FIG. 1 shows target binding sites only in the 3′UTR region these target binding sites may be located instead in the 5′UTR region or in both 3′UTR and 5′UTR regions.

[0090] The complementary binding of GAM RNA to target binding sites on GAM TARGET RNA, such as BINDING SITE I, BINDING SITE II and BINDING SITE III, inhibits translation of each of the GAM TARGET RNAs of the present invention into GAM TARGET PROTEIN, which is shown surrounded by a broken line.

[0091] It is appreciated that GAM TARGET GENE in fact represents a plurality of GAM target genes. The mRNA of each one of this plurality of GAM target genes comprises one or more target binding sites, each having a nucleotide sequence which is at least partly complementary to GAM RNA and which when bound by GAM RNA causes inhibition of translation of the GAM target mRNA into a corresponding GAM target protein.

[0092] The mechanism of the translational inhibition exerted by GAM RNA on one or more GAM TARGET GENEs may be similar or identical to the known mechanism of translational inhibition exerted by known miRNA oligonucleotides.

[0093] Nucleotide sequences of each of a plurality of GAM oligonucleotides described by FIG. 1 and their respective genomic sources and genomic locations are set forth in Tables 1-3, hereby incorporated herein.

[0094] Nucleotide sequences of GAM PRECURSOR RNAs, and a schematic representation of a predicted secondary folding of GAM FOLDED PRECURSOR RNAs, of each of a plurality of GAM oligonucleotides described by FIG. 1 are set forth in Table 4, hereby incorporated herein.

[0095] Nucleotide sequences of diced GAM RNAs of each of a plurality of GAM oligonucleotides described by FIG. 1 are set forth in Table 5, hereby incorporated herein.

[0096] Nucleotide sequences of target binding sites, such as BINDING SITE I, BINDING SITE II and BINDING SITE III found on GAM TARGET RNAs of each of a plurality of GAM oligonucleotides described by FIG. 1, and a schematic representation of the complementarity of each of these target binding sites to each of a plurality of GAM RNAs described by FIG. 1 are set forth in Tables 6-7, hereby incorporated herein.

[0097] It is appreciated that specific functions and accordingly utilities of each of a plurality of GAM oligonucleotides described by FIG. 1 are correlated with, and may be deduced from the identity of the GAM TARGET GENEs inhibited thereby, and whose functions are set forth in Table 8, hereby incorporated herein.

[0098] Studies documenting well known correlations between each of a plurality of GAM TARGET GENEs of the GAM oligonucleotides of FIG. 1, and known functions and diseases are listed in Table 9, hereby incorporated herein.

[0099] The present invention discloses a novel group of viral and human oligonucleotides, belonging to the miRNA-like oligonucleotides group, here termed GAM oligonucleotides, for which a specific complementary binding has been determined bioinformatically.

[0100] Reference is now made to FIG. 2 which is a simplified block diagram illustrating a bioinformatic oligonucleotide detection system and method constructed and operative in accordance with a preferred embodiment of the present invention.

[0101] An important feature of the present invention is a BIOINFORMATIC OLIGONUCLEOTIDE DETECTION ENGINE 100, which is capable of bioinformatically detecting oligonucleotides of the present invention.

[0102] The functionality of the BIOINFORMATIC OLIGONUCLEOTIDE DETECTION ENGINE 100 includes receiving EXPRESSED RNA DATA 102, SEQUENCED DNA DATA 104, and PROTEIN FUNCTION DATA 106; performing a complex process of analysis of this data as elaborated hereinbelow, and based on this analysis provides information, designated by reference numeral 108, identifying and describing features of novel oligonucleotides.

[0103] EXPRESSED RNA DATA 102 comprises published expressed sequence tags (EST) data, published mRNA data, as well as other published RNA data. SEQUENCED DNA DATA 104 comprises alphanumeric data representing genomic sequences and preferably including annotations such as information indicating the location of known protein coding regions relative to the genomic sequences.

[0104] PROTEIN FUNCTION DATA 106 comprises information from scientific publications e.g. physiological functions of known proteins and their connection, involvement and possible utility in treatment and diagnosis of various diseases.

[0105] EXPRESSED RNA DATA 102 and SEQUENCED DNA DATA 104 may preferably be obtained from data published by the National Center for Biotechnology Information (NCBI) at the National Institute of Health (NIH) (Jenuth, J. P. (2000). Methods Mol. Biol. 132:301-312 (2000), herein incorporated by reference) as well as from various other published data sources. PROTEIN FUNCTION DATA 106 may preferably be obtained from any one of numerous relevant published data sources, such as the Online Mendelian Inherited Disease In Man (OMIM™), Hamosh et al., Nucleic Acids Res. 30: 52-55 (2002)) database developed by John Hopkins University, and also published by NCBI (2000).

[0106] Prior to or during actual detection of BIOINFORMATICALLY DETECTED GROUP OF NOVEL OLIGONUCLEOTIDES 108 by the BIOINFORMATIC OLIGONUCLEOTIDE DETECTION ENGINE 100, BIOINFORMATIC OLIGONUCLEOTIDE DETECTION ENGINE TRAINING & VALIDATION FUNCTIONALITY 110 is operative. This functionality uses one or more known miRNA oligonucleotides as a training set to train the BIOINFORMATIC OLIGONUCLEOTIDE DETECTION ENGINE 100 to bioinformatically recognize miRNA-like oligonucleotides, and their respective potential target binding sites. BIOINFORMATIC OLIGONUCLEOTIDE DETECTION ENGINE TRAINING & VALIDATION FUNCTIONALITY 110 is further described hereinbelow with reference to FIG. 3.

[0107] The BIOINFORMATIC OLIGONUCLEOTIDE DETECTION ENGINE 100 preferably comprises several modules which are preferably activated sequentially, and are described as follows:

[0108] A NON-CODING GENOMIC SEQUENCE DETECTOR 112 operative to bioinformatically detect non-protein coding genomic sequences. The NON-CODING GENOMIC SEQUENCE DETECTOR 112 is further described herein below with reference to FIGS. 4A and 4B.

[0109] A HAIRPIN DETECTOR 114 operative to bioinformatically detect genomic ‘hairpin-shaped’ sequences, similar to GAM FOLDED PRECURSOR RNA (FIG. 1). The HAIRPIN DETECTOR 114 is further described herein below with reference to FIGS. 5A and 5B.

[0110] A DICER-CUT LOCATION DETECTOR 116 operative to bioinformatically detect the location on a GAM FOLDED PRECURSOR RNA which is enzymatically cut by DICER COMPLEX (FIG. 1), yielding diced GAM RNA. The DICER-CUT LOCATION DETECTOR 116 is further described herein below with reference to FIGS. 6A-6C.

[0111] A TARGET GENE BINDING-SITE DETECTOR 118 operative to bioinformatically detect target genes having binding sites, the nucleotide sequence of which is partially complementary to that of a given genomic sequence, such as a nucleotide sequence cut by DICER COMPLEX. The TARGET GENE BINDING-SITE DETECTOR 118 is further described hereinbelow with reference to FIGS. 7A and 7B.

[0112] A FUNCTION & UTILITY ANALYZER 120 operative to analyze the function and utility of target genes in order to identify target genes which have a significant clinical function and utility. The FUNCTION & UTILITY ANALYZER 120 is further described hereinbelow with reference to FIG. 8.

[0113] According to a preferred embodiment of the present invention the engine 100 may employ a cluster of 40 PCs (XEON®), 2.8 GHz, with 80 GB storage each), connected by Ethernet to 8 servers (2-CPU, XEON™ 1.2-2.2 GHz, with ˜200 GB storage each), combined with an 8-processor server (8-CPU, Xeon 550 Mhz w/8 GB RAM) connected via 2 HBA fiber-channels to an EMC CLARIION™ 100-disks, 3.6 Terabyte storage device. A preferred embodiment of the present invention may also preferably comprise software which utilizes a commercial database software program, such as MICROSOFT™ SQL Server 2000. It is appreciated that the above mentioned hardware configuration is not meant to be limiting, and is given as an illustration only. The present invention may be implemented in a wide variety of hardware and software configurations.

[0114] The present invention discloses 15484 novel oligonucleotides of the GAM group of oligonucleotides, which have been detected bioinformatically and 699 novel polynucleotides of the GR group of polynucleotides, which have been detected bioinformatically. Laboratory confirmation of bioinformatically predicted oligonucleotides of the GAM group of oligonucleotides, and several bioinformatically predicted polynucleotides of the GR group of polynucleotides, is described hereinbelow with reference to FIGS. 12-15D. Laboratory confirmation of bioinformatically predicted oligonucleotides of the viral GAM group of oligonucleotides, and several bioinformatically predicted viral polynucleotides of the GR group of polynucleotides, is described hereinbelow with reference to FIG. 16.

[0115] Reference is now made to FIG. 3 which is a simplified flowchart illustrating operation of a preferred embodiment of the BIOINFORMATIC OLIGONUCLEOTIDE DETECTION ENGINE TRAINING & VALIDATION FUNCTIONALITY 110 described hereinabove with reference to FIG. 2.

[0116] BIOINFORMATIC OLIGONUCLEOTIDE DETECTION ENGINE TRAINING & VALIDATION FUNCTIONALITY 110 begins by training the BIOINFORMATIC OLIGONUCLEOTIDE DETECTION ENGINE 100 (FIG. 2) to recognize one or more known miRNA oligonucleotides, as designated by reference numeral 122. This training step comprises HAIRPIN DETECTOR TRAINING & VALIDATION FUNCTIONALITY 124, further described hereinbelow with reference to FIG. 5A, DICER-CUT LOCATION DETECTOR TRAINING & VALIDATION FUNCTIONALITY 126, further described hereinbelow with reference to FIGS. 6A and 6B, and TARGET GENE BINDING-SITE DETECTOR TRAINING & VALIDATION FUNCTIONALITY 128, further described hereinbelow with reference to FIG. 7A.

[0117] Next, the BIOINFORMATIC OLIGONUCLEOTIDE DETECTION ENGINE TRAINING & VALIDATION FUNCTIONALITY 110 is operative bioinformatically detect novel oligonucleotides, using BIOINFORMATIC OLIGONUCLEOTIDE DETECTION ENGINE 100 (FIG. 2), as designated by reference numeral 130. Wet lab experiments are preferably conducted in order to validate expression and preferably function of some samples of the novel oligonucleotides detected by the BIOINFORMATIC OLIGONUCLEOTIDE DETECTION ENGINE 100, as designated by reference numeral 132. FIGS. 13A-15D illustrate examples of wet-lab validation of sample novel human oligonucleotides bioinformatically detected in accordance with a preferred embodiment of the present invention. Laboratory confirmation of bioinformatically predicted oligonucleotides of the viral GAM group of oligonucleotides, and several bioinformatically predicted viral polynucleotides of the GR group of polynucleotides, is described hereinbelow with reference to FIG. 16.

[0118] Reference is now made to FIG. 4A which is a simplified block diagram of a preferred implementation of the NON-CODING GENOMIC SEQUENCE DETECTOR 112 described hereinabove with reference to FIG. 2. The NON-PROTEIN CODING GENOMIC SEQUENCE DETECTOR 112 preferably receives at least two types of published genomic data: EXPRESSED RNA DATA 102 and SEQUENCED DNA DATA 104. The EXPRESSED RNA DATA 102 may include, inter alia, EST data, EST clusters data, EST genome alignment data and mRNA data. Sources for EXPRESSED RNA DATA 102 include NCBI dbEST, NCBI UniGene clusters and mapping data, and TIGR gene indices (Kirkness F. and Kerlavage, A. R., Methods Mol. Biol. 69:261-268 (1997)). SEQUENCED DNA DATA 104 may include sequence data (FASTA format files), and feature annotations (GenBank file format) mainly from NCBI databases. Based on the above mentioned input data, the NON-PROTEIN CODING GENOMIC SEQUENCE DETECTOR 112 produces a plurality of NON-PROTEIN CODING GENOMIC SEQUENCES 136. Preferred operation of the NON-PROTEIN CODING GENOMIC SEQUENCE DETECTOR 112 is described hereinbelow with reference to FIG. 4B.

[0119] Reference is now made to FIG. 4B which is a simplified flowchart illustrating a preferred operation of the NON-CODING GENOMIC SEQUENCE DETECTOR 112 of FIG. 2. Detection of NON-PROTEIN CODING GENOMIC SEQUENCES 136, generally preferably progresses along one of the following two paths:

[0120] A first path for detecting NON-PROTEIN CODING GENOMIC SEQUENCES 136 (FIG. 4A) begins with receipt of a plurality of known RNA sequences, such as EST data. Each RNA sequence is first compared with known protein-coding DNA sequences, in order to select only those RNA sequences which are non-protein coding, i.e. intergenic or intronic sequences. This can preferably be performed by using one of many alignment algorithms known in the art, such as BLAST (Altschul et al., J. Mol. Biol. 215:403-410 (1990)). This sequence comparison preferably also provides localization of the RNA sequence on the DNA sequences.

[0121] Alternatively, selection of non-protein coding RNA sequences and their localization on the DNA sequences can be performed by using publicly available EST cluster data and genomic mapping databases, such as the UNIGENE database published by NCBI or the TIGR database. Such databases, map expressed RNA sequences to DNA sequences encoding them, find the correct orientation of EST sequences, and indicate mapping of ESTs to protein coding DNA regions, as is well known in the art. Public databases, such as TIGR, may also be used to map an EST to a cluster of ESTs, known in the art as Tentative Human Consensus and assumed to be expressed as one segment. Publicly available genome annotation databases, such as NCBIs GenBank, may also be used to deduce expressed intronic sequences.

[0122] Optionally, an attempt may be made to “expand” the non-protein RNA sequences thus found, by searching for transcription start and end signals, respectively upstream and downstream of the location of the RNA on the DNA, as is well known in the art.

[0123] A second path for detecting NON-PROTEIN CODING GENOMIC SEQUENCES 136 (FIG. 4A) begins with receipt of DNA sequences. The DNA sequences are parsed into non protein coding sequences, using published DNA annotation data, by extracting those DNA sequences which are between known protein coding sequences. Next, transcription start and end signals are sought. If such signals are found, and depending on their robustness, probable expressed non-protein coding genomic sequences are obtained. Such approach is especially useful for identifying novel GAM oligonucleotides which are found in proximity to other known miRNA oligonucleotides, or other wet-lab validated GAM oligonucleotides. Since, as described hereinbelow with reference to FIG. 9, GAM oligonucleotides are frequently found in clusters; sequences located near known miRNA oligonucleotides are more likely to contain novel GAM oligonucleotides. Optionally, sequence orthology, i.e. sequence conservation in an evolutionary related species, may be used to select genomic sequences having a relatively high probability of containing expressed novel GAM oligonucleotides. It is appreciated that in detecting non-human GAM oligonucleotides of the present invention the BIOINFORMATIC OLIGONUCLEOTIDE DETECTION ENGINE 100 utilizes the input genomic sequences, without filtering protein coding regions detected by the NON-CODING GENOMIC SEQUENCE DETECTOR 112, hence NON-PROTEIN CODING GENOMIC SEQUENCES 136 refers to GENOMIC SEQUENCES only.

[0124] Reference is now made to FIG. 5A which is a simplified block diagram of a preferred implementation of the HAIRPIN DETECTOR 114 described hereinabove with reference to FIG. 2.

[0125] The goal of the HAIRPIN DETECTOR 114 is to detect hairpin-shaped genomic sequences, similar to those of known miRNA oligonucleotides. A hairpin-shaped genomic sequence is a genomic sequence, having a first half which is at least partially complementary to a second half thereof, which causes the halves to folds onto themselves, thereby forming a hairpin structure, as mentioned hereinabove with reference to FIG. 1.

[0126] The HAIRPIN DETECTOR 114 (FIG. 2) receives a plurality of NON-PROTEIN CODING GENOMIC SEQUENCES 136 (FIG. 4A). Following operation of HAIRPIN DETECTOR TRAINING & VALIDATION FUNCTIONALITY 124 (FIG. 3), the HAIRPIN DETECTOR 114 is operative to detect and output hairpin-shaped sequences, which are found in the NON-PROTEIN CODING GENOMIC SEQUENCES 136. The hairpin-shaped sequences detected by the HAIRPIN DETECTOR 114 are designated HAIRPINS STRUCTURES ON GENOMIC SEQUENCES 138. A preferred mode of operation of the HAIRPIN DETECTOR 114 is described hereinbelow with reference to FIG. 5B.

[0127] HAIRPIN DETECTOR TRAINING & VALIDATION FUNCTIONALITY 124 includes an iterative process of applying the HAIRPIN DETECTOR 114 to known hairpin shaped miRNA precursor sequences, calibrating the HAIRPIN DETECTOR 114 such that it identifies a training set of known hairpin-shaped miRNA precursor sequences, as well as other similarly hairpin-shaped sequences. In a preferred embodiment of the present invention, the HAIRPIN DETECTOR TRAINING & VALIDATION FUNCTIONALITY 124 trains the HAIRPIN DETECTOR 114 and validates each of the steps of operation thereof described hereinbelow with reference to FIG. 5B

[0128] The HAIRPIN DETECTOR TRAINING & VALIDATION FUNCTIONALITY 124 preferably uses two sets of data: the aforesaid training set of known hairpin-shaped miRNA precursor sequences, such as hairpin-shaped miRNA precursor sequences of 440 miRNA oligonucleotides of H. sapiens, M. musculus, C. elegans, C. Brigssae and D. Melanogaster, annotated in the RFAM database (Griffiths-Jones 2003), and a background set of about 1000 hairpin-shaped sequences found in expressed non-protein coding human genomic sequences. The background set is expected to comprise some valid, previously undetected hairpin-shaped miRNA-like precursor sequences, and many hairpin-shaped sequences which are not hairpin-shaped miRNA-like precursors.

[0129] In a preferred embodiment of the present invention the efficacy of the HAIRPIN DETECTOR 114 (FIG. 2) is confirmed. For example, when a similarity threshold is chosen such that 87% of the known hairpin-shaped miRNA precursors are successfully predicted, only 21.8% of the 1000 background set of hairpin-shaped sequences are predicted to be hairpin-shaped miRNA-like precursors.

[0130] Reference is now made to FIG. 5B which is a simplified flowchart illustrating preferred operation of the HAIRPIN DETECTOR 114 of FIG. 2. The HAIRPIN DETECTOR 114 preferably initially uses a secondary structure folding algorithm based on free-energy minimization, such as the MFOLD algorithm, described in Mathews et al. J. Mol. Biol. 288:911-940 (1999) and Zuker, M. Nucleic Acids Res. 31: 3406-3415 (2003), the disclosure of which is hereby incorporated by reference. This algorithm is operative to calculate probable secondary structure folding patterns of the NON-PROTEIN CODING GENOMIC SEQUENCES 136 (FIG. 4A) as well as the free-energy of each of these probable secondary folding patterns. The secondary structure folding algorithm, such as the MFOLD algorithm (Mathews, 1997; Zuker 2003), typically provides a listing of the base-pairing of the folded shape, i.e. a listing of each pair of connected nucleotides in the sequence.

[0131] Next, the HAIRPIN DETECTOR 114 analyzes the results of the secondary structure folding patterns, in order to determine the presence and location of hairpin folding structures. The goal of this second step is to assess the base-pairing listing provided by the secondary structure folding algorithm, in order to determine whether the base-pairing listing describes one or more hairpin type bonding pattern. Preferably, sequence segment corresponding to a hairpin structure is then separately analyzed by the secondary structure folding algorithm in order to determine its exact folding pattern and free-energy.

[0132] The HAIRPIN DETECTOR 114 then assesses the hairpin structures found by the previous step, comparing them to hairpin structures of known miRNA precursors, using various characteristic hairpin structure features such as its free-energy and its thermodynamic stability, the amount and type of mismatched nucleotides and the existence of sequence repeat-elements, number of mismatched nucleotides in positions 18-22 counting from loop, and Percent of G nucleotide. Only hairpins that bear statistically significant resemblance to the training set of hairpin structures of known miRNA precursors, according to the abovementioned parameters, are accepted.

[0133] In a preferred embodiment of the present invention, similarity to the training set of hairpin structures of known miRNA precursors is determined using a “similarity score” which is calculated using a multiplicity of terms, where each term is a function of one of the above-mentioned hairpin structure features. The parameters of each function are found heuristically from the set of hairpin structures of known miRNA precursors, as described hereinabove with reference to HAIRPIN DETECTOR TRAINING & VALIDATION FUNCTIONALITY 124 (FIG. 3). The selection of the features and their function parameters is optimized so as to achieve maximized separation between the distribution of similarity scores validated miRNA-precursor hairpin structures, and the distribution of similarity scores of hairpin structures detected in the background set mentioned hereinabove with reference to FIG. 5B.

[0134] In an alternative preferred embodiment of the present invention, the step described in the preceding paragraph may be split into two stages. A first stage implements a simplified scoring method, typically based on thresholding a subset of the hairpin structure features described hereinabove, and may employ a minimum threshold for hairpin structure length and a maximum threshold for free energy. A second stage is preferably more stringent, and preferably employs a full calculation of the weighted sum of terms described hereinabove. The second stage preferably is performed only on the subset of hairpin structures that survived the first stage.

[0135] The HAIRPIN DETECTOR 114 also attempts to select hairpin structures whose thermodynamic stability is similar to that of hairpin structures of known miRNA precursors. This may be achieved in various ways. A preferred embodiment of the present invention utilizes the following methodology, preferably comprising three logical steps:

[0136] First, the HAIRPIN DETECTOR 114 attempts to group hairpin structures into “families” of closely related hairpin structures. As is known in the art, a secondary structure folding algorithm typically provides multiple alternative folding patterns, for a given genomic sequence and indicates the free energy of each alternative folding pattern. It is a particular feature of the present invention that the HAIRPIN DETECTOR 114 preferably assesses the various hairpin structures appearing in the various alternative folding patterns and groups' hairpin structures which appear at identical or similar sequence locations in various alternative folding patterns into common sequence location based “families” of hairpins. For example, all hairpin structures whose center is within 7 nucleotides of each other may be grouped into a family”. Hairpin structures may also be grouped into a family” if their nucleotide sequences are identical or overlap to a predetermined degree.

[0137] It is also a particular feature of the present invention that the hairpin structure “families” are assessed in order to select only those families which represent hairpin structures that are as thermodynamically stable as those of hairpin structures of known miRNA precursors. Preferably only families which are represented in at least a selected majority of the alternative secondary structure folding patterns, typically 65%, 80% or 100% are considered to be sufficiently stable. Our tests suggest that only about 50% of the hairpin structures, predicted by the MFOLD algorithm with default parameters, are members of sufficiently stable families, comparing to about 90% of the hairpin structures that contain known miRNAs. This percent depends on the size of the fraction that was fold. In an alternative embodiment of the present invention we use fractions of size 1000 nts as preferable size. Different embodiment uses other sizes of genomics sequences, more or less strict demand for representation in the alternative secondary structure folding patterns.

[0138] It is an additional particular feature of the present invention that the most suitable hairpin structure is selected from each selected family. For example, a hairpin structure which has the greatest similarity to the hairpin structures appearing in alternative folding patterns of the family may be preferred. Alternatively or additionally, the hairpin structures having relatively low free energy may be preferred.

[0139] Alternatively or additionally considerations of homology to hairpin structures of other organisms and the existence of clusters of thermodynamically stable hairpin structures located adjacent to each other along a sequence may be important in selection of hairpin structures. The tightness of the clusters in terms of their location and the occurrence of both homology and clusters may be of significance.

[0140] Reference is now made to FIGS. 6A-6C which together describe the structure and operation of the DICER-CUT LOCATION DETECTOR 116, described hereinabove with FIG. 2.

[0141] FIG. 6A is a simplified block diagram of a preferred implementation of the DICER-CUT LOCATION DETECTOR 116. The goal of the DICER-CUT LOCATION DETECTOR 116 is to detect the location in which the DICER COMPLEX, described hereinabove with reference to FIG. 1, dices GAM FOLDED PRECURSOR RNA, yielding GAM RNA.

[0142] The DICER-CUT LOCATION DETECTOR 116 therefore receives a plurality of HAIRPIN STRUCTURES ON GENOMIC SEQUENCES 138 (FIG. 5A), and following operation of DICER-CUT LOCATION DETECTOR TRAINING & VALIDATION FUNCTIONALITY 126 (FIG. 3), is operative to detect a plurality of DICER-CUT SEQUENCES FROM HAIRPIN STRUCTURES 140.

[0143] Reference is now made to FIG. 6B which is a simplified flowchart illustrating a preferred implementation of DICER-CUT LOCATION DETECTOR TRAINING & VALIDATION FUNCTIONALITY 126.

[0144] A general goal of the DICER-CUT LOCATION DETECTOR TRAINING & VALIDATION FUNCTIONALITY 126 is to analyze the dicer-cut locations of known diced miRNA on respective hairpin shaped miRNA precursors in order to determine a common pattern in these locations, which can be used to predict dicer cut locations on GAM folded precursor RNAs.

[0145] The dicer-cut locations of known miRNA precursors are obtained and studied. Locations of the 5′ and/or 3′ ends of the known diced miRNAs are preferably represented by their respective distances from the 5′ end of the corresponding hairpin shaped miRNA precursor. Additionally or alternatively, the 5′ and/or 3′ ends of the known diced miRNAs are preferably represented by the relationship between their locations and the locations of one or more nucleotides along the hairpin shaped miRNA precursor. Additionally or alternatively, the 5′ and/or 3′ ends of the known diced miRNAs are preferably represented by the relationship between their locations and the locations of one or more bound nucleotide pairs along the hairpin shaped miRNA precursor. Additionally or alternatively, the 5′ and/or 3′ ends of the known diced miRNAs are preferably represented by the relationship between their locations and the locations of one or more mismatched nucleotide pairs along the hairpin shaped miRNA precursor. Additionally or alternatively, the 5′ and/or 3′ ends of the known diced miRNAs are preferably represented by the relationship between their locations and the locations of one or more unmatched nucleotides along the hairpin shaped miRNA precursor. Additionally or alternatively, locations of the 5′ and/or 3′ ends of the known diced miRNAs are preferably represented by their respective distances from the loop located at the center of the corresponding hairpin shaped miRNA precursor.

[0146] One or more of the foregoing location metrics may be employed in the training and validation functionality. Additionally, metrics related to the nucleotide content of the diced miRNA and/or of the hairpin shaped miRNA precursor may be employed.

[0147] In a preferred embodiment of the present invention, DICER-CUT LOCATION DETECTOR TRAINING & VALIDATION FUNCTIONALITY 126 preferably employs standard machine learning techniques known in the art of machine learning for analysis of existing patterns in a given “training set” of examples. These techniques are capable, to a certain degree, of detecting similar patterns in other, previously unseen examples. Such machine learning techniques include, but are not limited to neural networks, Bayesian networks, Support Vector Machines (SVM), Genetic Algorithms, Markovian modeling, Maximum Likelihood modeling, Nearest Neighbor algorithms, Decision trees and other techniques, as is well known in the art.

[0148] In accordance with one embodiment of the present invention, machine learning predictors, such as a Support Vector Machine (SVM) predictor, are applied to the aforementioned training set and are operative, for example to test every possible nucleotide on a hairpin as a candidate for being the 5′ end or the 3′ end of a diced GAM RNA. More preferred machine learning predictors include predictors based on Nearest Neighbor, Bayesian modeling, and K-nearest-neighbor algorithms. A training set of the known miRNA precursor sequences is preferably used for training multiple separate classifiers or predictors, each of which produces a model for the 5′ and/or 3′ end locations of a diced miRNA with respect to its hairpin precursor. The models take into account one or more of the various miRNA location metrics described above.

[0149] Performance of the resulting predictors, evaluated on the abovementioned validation set of 440 published miRNAs using k-fold cross validation (Mitchell, 1997) with k=3, is found to be as follows: in 70% of known miRNAs 5′-end location is correctly determined by an SVM predictor within up to 2 nucleotides; a Nearest Neighbor (EDIT DISTANCE) predictor achieves 56% accuracy (247/440); a Two-Phased predictor that uses Bayesian modeling (TWO PHASED) achieves 80% accuracy (352/440), when only the first phase is used. When the second phase (strand choice) is implemented by a nave Bayesian model the accuracy is 55% (244/440), and when the K-nearest-neighbor modeling is used for the second phase, 374/440 decision are made and the accuracy is 65% (242/374). A K-nearest-neighbor predictor (FIRST-K) achieves 61% accuracy (268/440). The accuracies of all predictors are considerably higher on top scoring subsets of published miRNA.

[0150] Finally, in order to validate the efficacy and accuracy of the DICER-CUT LOCATION DETECTOR 116, a sample of novel oligonucleotides detected thereby is preferably selected, and validated by wet lab. Laboratory results validating the efficacy of the DICER-CUT LOCATION DETECTOR 116 are described hereinbelow with reference to FIGS. 12-15D. Laboratory confirmation of bioinformatically predicted oligonucleotides of the viral GAM group of oligonucleotides, and several bioinformatically predicted viral polynucleotides of the GR group of polynucleotides, is described hereinbelow with reference to FIG. 16.

[0151] Reference is now made to FIG. 6C which is a simplified flowchart illustrating operation of DICER-CUT LOCATION DETECTOR 116 (FIG. 2), constructed and operative in accordance with a preferred embodiment of the present invention. The DICER CUT LOCATION DETECTOR 116 preferably comprises a machine learning computer program module, which is trained to recognize dicer-cut locations on known hairpin-shaped miRNA precursors, and based on this training, is operable to detect dicer-cut locations of novel GAM RNAs (FIG. 1) on GAM FOLDED PRECURSOR RNAs (FIG. 1). In a preferred embodiment of the present invention, the dicer-cut location module preferably utilizes machine learning algorithms, such as known Support Vector Machine (SVM) and more preferably: known Bayesian modeling, Nearest Neighbors, and K-nearest-neighbor algorithms.

[0152] When initially assessing a novel GAM FOLDED PRECURSOR RNA, all 19-24 nucleotide long segments thereof are initially considered as “potential GAM RNAs”, since the dicer-cut location is initially unknown.

[0153] For each such potential GAM RNA, the location of its 5′ end or the locations of its 5′ and 3′ ends are scored by at least one recognition classifier or predictor.

[0154] In a preferred embodiment of the present invention, the DICER-CUT LOCATION DETECTOR 116 (FIG. 2) may use a Support Vector Machine predictor trained on and operating on features such as the following:

[0155] Locations of the 5′ and/or 3′ ends of the known diced miRNAs, which are preferably represented by their respective distances from the 5 end of the corresponding hairpin shaped miRNA precursor. Additionally or alternatively, the 5′ and/or 3′ ends of the known diced miRNAs are preferably represented by the relationship between their locations and the locations of one or more nucleotides along the hairpin shaped miRNA precursor. Additionally or alternatively, the 5′ and/or 3′ ends of the known diced miRNAs are preferably represented by the relationship between their locations and the locations of one or more bound nucleotide pairs along the hairpin shaped miRNA precursor. Additionally or alternatively, the 5′ and/or 3′ ends of the known diced miRNAs are preferably represented by the relationship between their locations and the locations of one or more mismatched nucleotide pairs along the hairpin shaped miRNA precursor. Additionally or alternatively, the 5′ and/or 3′ ends of the known diced miRNAs are preferably represented by the relationship between their locations and the locations of one or more unmatched nucleotides along the hairpin shaped miRNA precursor. Additionally or alternatively, locations of the 5′ and/or 3′ ends of the known diced miRNAs are preferably represented by their respective distances from the loop located at the center of the corresponding hairpin shaped miRNA precursor; and secondarily

[0156] Metrics related to the nucleotide content of the diced miRNA and/or of the hairpin shaped miRNA precursor.

[0157] In another preferred embodiment of the present invention, the DICER-CUT LOCATION DETECTOR 116 (FIG. 2) preferably employs an “EDIT DISTANCE” predictor, which seeks sequences that are similar to those of known miRNAs, utilizing a Nearest Neighbor algorithm, where a similarity metric between two sequences is a variant of the Edit Distance algorithm (Gusfield, 1997). The EDIT DISTANCE predictor is based on an observation that miRNA oligonucleotides tend to form clusters, the members of which show marked sequence similarity.

[0158] In yet another preferred embodiment of the present invention, the DICER-CUT LOCATION DETECTOR 116 (FIG. 2) preferably uses a “TWO PHASE” predictor, which predicts the dicer-cut location in two distinct phases: (a) selecting a double-stranded segment of the GAM FOLDED PRECURSOR RNA (FIG. 1) comprising the GAM RNA by nave Bayesian modeling and (b) detecting which strand of the double-stranded segment contains GAM RNA (FIG. 1) by employing either nave or by K-nearest-neighbor modeling. K-nearest-neighbor modeling is a variant of the ‘FIRST-K’ predictor described hereinbelow, with parameters optimized for this specific task. The ‘TWO PHASE’ predictor may be operated in two modes: either utilizing only the first phase and thereby producing two alternative dicer-cut location predictions, or utilizing both phases and thereby producing only one final dicer-cut location.

[0159] In still another preferred embodiment of the present invention, the DICER-CUT LOCATION DETECTOR 116 preferably uses a “FIRST-K” predictor, which utilizes a K-nearest-neighbor algorithm. The similarity metric between any two sequences is 1−E/L, where L is a parameter, preferably 8-10 and E is the edit distance between the two sequences, taking into account only the first L nucleotides of each sequence. If the K-nearest-neighbor scores of two or more locations on the GAM FOLDED PRECURSOR RNA (FIG. 1) are not significantly different, these locations are further ranked by a Bayesian model, similar to the one described hereinabove.

[0160] The TWO PHASE and FIRST-K predictors preferably are trained on and operate on features such as the following:

[0161] Locations of the 5′ and/or 3′ ends of the known diced miRNAs, which are preferably represented by their respective distances from the 5′ end of the corresponding hairpin shaped miRNA precursor. Additionally or alternatively, the 5′ and/or 3′ ends of the known diced miRNAs are preferably represented by the relationship between their locations and the locations of one or more nucleotides along the hairpin shaped miRNA precursor. Additionally or alternatively, the 5′ and/or 3′ ends of the known diced miRNAs are preferably represented by the relationship between their locations and the locations of one or more bound nucleotide pairs along the hairpin shaped miRNA precursor. Additionally or alternatively, the 5′ and/or 3′ ends of the known diced miRNAs are preferably represented by the relationship between their locations and the locations of one or more mismatched nucleotide pairs along the hairpin shaped miRNA precursor. Additionally or alternatively, the 5′ and/or 3′ ends of the known diced miRNAs are preferably represented by the relationship between their locations and the locations of one or more unmatched nucleotides along the hairpin shaped miRNA precursor. Additionally or alternatively, locations of the 5′ and/or 3′ ends of the known diced miRNAs are preferably represented by their respective distances from the loop located at the center of the corresponding hairpin shaped miRNA precursor; and secondarily Metrics related to the nucleotide content of the diced miRNA and/or of the hairpin shaped miRNA precursor.

[0162] In accordance with an embodiment of the present invention scores of two or more of the abovementioned classifiers or predictors are integrated, yielding an integrated score for each “potential GAM RNA”. As an example, FIG. 6C illustrates integration of scores from two classifiers, a 3′ end recognition classifier and a 5′ end recognition classifier, the scores of which are integrated to yield an integrated score. Most preferably, the INTEGRATED SCORE of FIG. 6C preferably implements a “best-of-breed” approach employing a pair of classifiers and accepting only “potential GAM RNAs” that score highly on one of the above mentioned “EDIT DISTANCE”, or “TWO-PHASE” predictors. In this context, “high scores” means scores which have been demonstrated to have low false positive value when scoring known miRNA oligonucleotides. Alternatively, the INTEGRATED SCORE may be derived from operation of more or less than two classifiers.

[0163] The INTEGRATED SCORE is evaluated as follows: (a) the “potential GAM RNA” having the highest score is preferably taken to be the most probable GAM RNA, and (b) if the integrated score of this most probable GAM RNA is higher than a pre-defined threshold, then the most probable GAM RNA is accepted as a PREDICTED GAM RNA. Preferably, this evaluation technique is not limited to the highest scoring potential GAM RNA.

[0164] As a final optional stage we may filter PREDICTED GAM RNAs with low complexity, which have high probability to be part of repeated element in the DNA (for example ATATATA sequences). For each PREDICTED GAM RNA sequence we count the number of occurrences of each 2 nucleotides combination (AA, AT, AC), we filter out sequences where the sum of the most 2 probable combination is higher then 9. Using this criteria we filter 2% of the known miRNA and around 30% of the PREDICTED GAM RNAs.

[0165] Reference is now made to FIG. 7A which is a simplified block diagram of a preferred implementation of the TARGET GENE BINDING-SITE DETECTOR 118 described hereinabove with reference to FIG. 2. The goal of the TARGET GENE BINDING-SITE DETECTOR 118 is to detect one or more binding sites such as BINDING SITE I, BINDING SITE II and BINDING SITE III (FIG. 1) located in 3′ untranslated regions of the mRNA of a known gene, the nucleotide sequence of which binding sites is partially or fully complementary to a GAM RNA, thereby determining that the above mentioned known gene is a target gene thereof.

[0166] The TARGET GENE BINDING-SITE DETECTOR 118 (FIG. 2) receives a plurality of DICER-CUT SEQUENCES FROM HAIRPIN STRUCTURES 140 (FIG. 6A), and a plurality of POTENTIAL TARGET GENE SEQUENCES 142 which are derived from SEQUENCED DNA DATA 104 (FIG. 2).

[0167] TARGET GENE BINDING-SITE DETECTOR TRAINING & VALIDATION FUNCTIONALITY 128 (FIG. 3) is operative to train the TARGET GENE BINDING-SITE DETECTOR 118 on known miRNAs and their respective target genes and to build a background model for evaluation of a P value for the TARGET GENE BINDING-SITE DETECTOR 118 results It Construct the model by analyzing both heuristically and computationally the results of the TARGET GENE BINDING-SITE DETECTOR 118.

[0168] Following operation of TARGET GENE BINDING-SITE DETECTOR TRAINING & VALIDATION FUNCTIONALITY 128 (FIG. 3), the TARGET GENE BINDING-SITE DETECTOR 118 is operative to detect a plurality of POTENTIAL NOVEL TARGET GENES HAVING BINDING-SITE/S 144 the nucleotide sequence of which is partially or fully complementary to that of each of the plurality of DICER-CUT SEQUENCES FROM HAIRPIN STRUCTURES 140. Preferred operation of the TARGET GENE BINDING-SITE DETECTOR 118 is further described hereinbelow with reference to FIG. 7B.

[0169] Reference is now made to FIG. 7B which is a simplified flowchart illustrating a preferred operation of the TARGET GENE BINDING-SITE DETECTOR 118 of FIG. 2. In a preferred embodiment of the present invention, the TARGET GENE BINDING-SITE DETECTOR 118 employs a match search tool described hereinbelow, in order to compare the nucleotide sequence of each of the plurality of DICER-CUT SEQUENCES FROM HAIRPIN STRUCTURES 140 (FIG. 6A), to the POTENTIAL TARGET GENE SEQUENCES 142 (FIG. 7A), such as 3 untranslated regions of known mRNAs, in order to find crude potential matches. Alternatively, a sequence comparison algorithm such as BLAST can be used.

[0170] The match search tool compare the DICER-CUT SEQUENCES FROM HAIRPIN STRUCTURES 140 (FIG. 7A) to POTENTIAL TARGET GENE SEQUENCES 142 (FIG. 7A). the methodology of the match search tool is to match Nucleotides 1:8 of DICER-CUT SEQUENCES FROM HAIRPIN STRUCTURES 140 (FIG. 7A) to POTENTIAL TARGET GENE SEQUENCES 142 (FIG. 7A). The results are preferably filtered to allow at most 1 edit distance between the DICER-CUT SEQUENCES FROM HAIRPIN STRUCTURES 140 (FIG. 7A) complementary sequence and POTENTIAL TARGET GENE SEQUENCES 142 (FIG. 7A).

[0171] In a preferred implementation of the match search tool, it first calculates two preprocess data structures: the first, store for every 9 nts sequences all its appearances in the POTENTIAL TARGET GENE SEQUENCES 142 (FIG. 7A).

[0172] The second is a map of all the 8 nts sequence to 9 nts sequences that can be accepted by adding one nucleotide and performing one or less editing actions to the 8 nts complementary sequence. This two data structures help to improve performance and to perform the binding site filtering stage as an integral part of the search. The match search tool in this implementation returns for every DICER-CUT SEQUENCES FROM HAIRPIN STRUCTURES 140 (FIG. 7A all the appearances of the 9 nts sequence in the POTENTIAL TARGET GENE SEQUENCES 142 (FIG. 7A) that are calculated using the second, describe hereinabove, data structure from its first 8 nts. The 9 nts sequences appearances are the potentially 3 of the POTENTIAL TARGET GENE SEQUENCES 142 (FIG. 7A) binding site of each DICER-CUT SEQUENCES FROM HAIRPIN STRUCTURES 140 (FIG. 7A

[0173] Next the binding sites are expanded, and determinations are made whether if nucleotide sequences immediately upstream to the binding sites 3 part matches with the 3′ end of the DICER-CUT SEQUENCES FROM HAIRPIN STRUCTURES. The alignment of the binding site 5 part is made by the alignment algorithm with specific weighting parameters describes hereinbelow with reference to FIG. 5). Alternatively the alignment can include also the 3 part of the binding site.

[0174] The alignment algorithm (implemented here) with specific weighting parameters. The weighting parameters are based on analyze of known miRNA binding sites (references: Wightman et al. Cell 1993, Moss Cell 1997, Reinhart Nature 2000, Abrahante Developmental Cell 2003 and Lin Developmental Cell 2003, Brennecke Cell 2003, Stark PLOS 2003, lewis et al. Cell 2003). It was heuristically found to best distinguish between known miRNA binding sites and sequences which are known not to be miRNA binding sites.

[0175] According to a preferred embodiment of the present invention a good matching at 5′ end of the miRNA (nucleotides 1-8), and at 3′ end of the miRNA, (the last 9 nucleotides) is required. The matching at 5′ end is crucial for the binding while the 3′ end binding is less important but can compensate on few mismatches at the 5′. The nucleotides at the middle of the miRNA have no punishment for any editing operation (reference: Doench et al. Gene and Development 2004). In this preferred embodiment the alignment of the 5 end of the miRNA (3 of the binding site) is a result of the match search tool, while the middle and 3 miRNA (5 of the binding site) is done by the alignment algorithm. The alignment is a combination of both. Alternatively, the alignment is done for all the miRNA and all the binding site sequence. The alignment algorithm finds the lowest free-energy spatial structure and heuristic constrain that were found to distinct the known binding sites in the best way. The alignment yields 2 scores for 5′ end and 3′ end. Each score represents the inverse of its probability to obtain such or higher score by running random sequences, with 22 nucleotides length and same base composition as known miRNA, with randomly chosen 3 un translated region sequences. The final score is the multiplicity of the two scores.

[0176] The binding site detector, then analyze the spatial structure of the miRNA with all its potential target gene 3 un translated region. It assesses the list of binding sites of each miRNA-Target gene pair with their positions and respective scores. The TARGET GENE BINDING-SITE DETECTOR 118 (FIG. 7A) then uses the fact that Many of the known binding sites are clustered, to evaluate the P value of obtaining cluster of few binding sites on the same target gene 3 un translated region in the following way: It scans different scores threshold, and calculate for each threshold the number and positions of possible binding sites with score above the threshold. It then gets from a preprocess calculated background matrixes, describe hereinbelow, a P value for each threshold and number and positions of binding sites combination. The output score for each miRNA and target gene pair is the minimal P value, normalized with the number of thresholds trying using Bernoulli distribution. A preference of low P value pairs is made.

[0177] As mentioned hereinabove, for each target gene a preprocess calculated background matrixes were build. The matrixes includes rows for each number of miRNA binding site (In the preferred embodiment the matrix include 7 rows for 0 to 6 binding site.), and columns for each different score threshold (In the preferred embodiment the matrix include 5 columns for 5 different threshold). Each matrix cell, corresponding to specific number of binding site and threshold, was set to be the probability to get equal or more binding sites with equal or more score by random sequences with 22 nucleotides length with the same letter distribution as known miRNAs (29.5% T, 24.5% A, 25% G and 21% C). Those probabilities are calculated by running the above procedure for 10000 random sequences. The P value can be estimated as the number of random sequences obeys the matrix cell requirement divided by the total number of random sequences (10000). In the preferred embodiment 2 matrixes are calculated. The P values are of the second matrix are calculated under constrain that at least two of the binding site position are under a heuristically determine constant value. The second matrix values are calculated without this constrain. The TARGET GENE BINDING-SITE DETECTOR uses the second matrix if the binding sites position agree with the constrain, else it uses the first. In an alternative embodiment only one matrix is calculated without any constrain on the binding sites positions.

[0178] Test preformed using the TARGET GENE BINDING-SITE DETECTOR showed that all of the known miRNA target genes are found using this algorithm with a P value of less than 0.5%. Running known miRNA against 3400 potential 3′ UTR of target genes sequences yield on average 32 target genes for each miRNA with P value less than 0.5%, while background sequences, as well as inverse or complement sequence of known miRNA (which preserve their high order sequence statistics) found, as excepted, on average 17 target genes. This reflects the algorithm performance to detect real target genes with 47% accuracy.

[0179] Scoring of all potential binding sites are calculated and P value for obtaining such binding sites list for DICER-CUT SEQUENCE FROM HAIRPIN STRUCTURE and POTENTIAL TARGET GENE SEQUENCE pair is evaluate using the background matrix. In accordance with another preferred embodiment of the present invention, binding sites are searched by a reversed process. Sequences of K (preferably 22) nucleotides of a untranslated regions of a target gene are assessed as potential binding sites. A sequence comparison algorithm, such as BLAST or EDIT DISTANCE varinet, is then used to search elsewhere in the genome for partially or fully complementary sequences which are found in known miRNA oligonucleotides or computationally predicted GAM oligonucleotides. Only complementary sequences, which meet predetermined spatial structure and free energy criteria as described hereinabove, are accepted. Clustered binding sites are strongly preferred and potential binding sites and potential GAM oligonucleotides which occur in evolutionarily conserved genomic sequences are also preferred. Scoring of candidate binding sites takes into account free energy and spatial structure of the binding site complexes, as well as the aforesaid preferences.

[0180] UTR of GAM viral target genes were preferably extracted directly from annotation of UTR records. Alternatively, UTR of GAM viral target genes were preferably extracted by taking the sequences spanned from last coding position to the 3 end of the mRNA sequence annotation. Alternatively, UTR of GAM viral target genes were preferably extracted by taking 400 nucleotides downstream to the endcoding region of the mRNA sequence. All of above-mention methods were applied on complete viral genomes data in GeneBank format from the NCBI RefSeq database, version 18 Jan. 2004 (ftp://ftp.ncbi.nih.gov/refseq/release/viral).

[0181] Reference is now made to FIG. 8 which is a simplified flowchart illustrating a preferred operation of the FUNCTION & UTILITY ANALYZER 120 described hereinabove with reference to FIG. 2. The goal of the FUNCTION & UTILITY ANALYZER 120 is to determine if a potential target gene is in fact a valid clinically useful target gene. Since a potential novel GAM oligonucleotide binding a binding site in the UTR of a target gene is understood to inhibit expression of that target gene, and if that target gene is shown to have a valid clinical utility, then in such a case it follows that the potential novel oligonucleotide itself also has a valid useful function which is the opposite of that of the target gene.

[0182] The FUNCTION & UTILITY ANALYZER 120 preferably receives as input a plurality of POTENTIAL NOVEL TARGET GENES HAVING BINDING-SITE/S 144 (FIG. 7A), generated by the TARGET GENE BINDING-SITE DETECTOR 118 (FIG. 2). Each potential oligonucleotide is evaluated as follows: First, the system checks to see if the function of the potential target gene is scientifically well established. Preferably, this can be achieved bioinformatically by searching various published data sources presenting information on known function of proteins. Many such data sources exist and are published as is well known in the art. Next, for those target genes the function of which is scientifically known and is well documented, the system then checks if scientific research data exists which links them to known diseases. For example, a preferred embodiment of the present invention utilizes the OMIM™ (Hamosh et al, 2002) database published by NCBI, which summarizes research publications relating to genes which have been shown to be associated with diseases. Finally, the specific possible utility of the target gene is evaluated. While this process too may be facilitated by bioinformatic means, it might require manual evaluation of published scientific research regarding the target gene, in order to determine the utility of the target gene to the diagnosis and or treatment of specific disease. Only potential novel oligonucleotides, the target genes of which have passed all three examinations, are accepted as novel oligonucleotide.

[0183] Reference is now made to FIG. 9, which is a simplified diagram describing each of a plurality of novel bioinformatically detected regulatory polynucleotide referred to here as Genomic Record (GR) polynucleotide, which encodes an ‘operon-like’ cluster of novel microRNA-like oligonucleotides, each of which in turn modulates expression of at least one target gene; the function and utility of which at least one target gene is known in the art.

[0184] GR PRECURSOR is a novel bioinformatically detected regulatory, non protein coding polynucleotide. The method by which GR PRECURSOR is detected is described hereinabove with additional reference to FIGS. 1-9.

[0185] GR PRECURSOR is preferably encoded by a viral genome and contains cluster of novel viral oligonucleotides, which preferably binds to a human target genes or to the virus self-genes. Alternatively or additionally, GR PRECURSOR is encoded by the human genome and contains cluster of novel human oligonucleotides, which preferably binds to viral target genes or to human self-genes.

[0186] GR PRECURSOR encodes GR PRECURSOR RNA, an RNA molecule, typically several hundred to several thousand nucleotides long. GR PRECURSOR RNA folds spatially, forming GR FOLDED PRECURSOR RNA. It is appreciated that GR FOLDED PRECURSOR RNA comprises a plurality of what is known in the art as ‘hairpin’ structures. These ‘hairpin’ structures are due to the fact that the nucleotide sequence of GR PRECURSOR RNA comprises a plurality of segments, the first half of each such segment having a nucleotide sequence which is at least a partial or accurate reverse-complement sequence of the second half thereof, as is well known in the art.

[0187] GR FOLDED PRECURSOR RNA is naturally processed by cellular enzymatic activity into a plurality of separate GAM precursor RNAs, herein schematically represented by GAM1 FOLDED PRECURSOR RNA through GAM3 FOLDED PRECURSOR RNA, each of which GAM folded precursor RNAs being a hairpin shaped RNA segment, corresponding to GAM FOLDED PRECURSOR RNA of FIG. 1.

[0188] The above mentioned GAM folded precursor RNAs are diced by DICER COMPLEX of FIG. 1, yielding respective short RNA segments of about 22 nucleotides in length, schematically represented by GAM1 RNA through GAM3 RNA, each of which GAM RNAs corresponding to GAM RNA of FIG. 1. GAM1 RNA, GAM2 RNA and GAM3 RNA, each bind complementarily to binding sites located in untranslated regions of respective target genes, designated GAM1 TARGET RNA, GAM2 TARGET RNA and GAM3 TARGET RNA, respectively, which target binding site corresponds to a target binding site such as BINDING SITE I, BINDING SITE II or BINDING SITE III of FIG. 1. This binding inhibits translation of the respective target proteins designated GAM1 TARGET PROTEIN, GAM2 TARGET PROTEIN and GAM3 TARGET PROTEIN respectively.

[0189] It is appreciated that specific functions, and accordingly utilities of GR polynucleotide are correlated with and may be deduced from the identity of the target genes, which are inhibited by GAM RNAs comprised in the ‘operon-like’ cluster of GR polynucleotide, schematically represented by GAM1 TARGET PROTEIN through GAM3 TARGET PROTEIN. The function of these target genes is elaborated in Table 8, hereby incorporated herein.

[0190] Reference is now made to FIG. 10 which is a block diagram illustrating different utilities of oligonucleotide of the novel group of oligonucleotides of the present invention referred to here as GAM oligonucleotides and GR polynucleotides. The present invention discloses a first plurality of novel oligonucleotides referred to here as GAM oligonucleotides and a second plurality of operon-like polynucleotides referred to here as GR polynucleotides, each of the GR polynucleotide encoding a plurality of GAM oligonucleotides. The present invention further discloses a very large number of known target genes, which are bound by, and the expression of which is modulated by each of the novel oligonucleotides of the present invention. Published scientific data referenced by the present invention provides specific, substantial, and credible evidence that the above mentioned target genes modulated by novel oligonucleotides of the present invention, are associated with various diseases. Specific novel oligonucleotides of the present invention, target genes thereof and diseases associated therewith, are described hereinbelow with reference to Tables 1 through 10. It is therefore appreciated that a function of GAM oligonucleotides and GR polynucleotides of the present invention is modulation of expression of target genes related to known viral diseases, and that therefore utilities of novel oligonucleotides of the present invention include diagnosis and treatment of the above mentioned diseases.

[0191] FIG. 10 describes various types of diagnostic and therapeutic utilities of novel oligonucleotides of the present invention. A utility of novel oligonucleotide of the present invention is detection of GAM oligonucleotides and of GR polynucleotides. It is appreciated that since GAM oligonucleotides and GR polynucleotides modulate expression of disease related target genes, that detection of expression of GAM oligonucleotides in clinical scenarios associated with said viral diseases is a specific, substantial and credible utility. Diagnosis of novel oligonucleotides of the present invention may preferably be implemented by RNA expression detection techniques, including but not limited to biochips, as is well known in the art. Diagnosis of expression of oligonucleotides of the present invention may be useful for research purposes, in order to further understand the connection between the novel oligonucleotides of the present invention and the above mentioned related viral diseases, for disease diagnosis and prevention purposes, and for monitoring disease progress.

[0192] Another utility of novel oligonucleotides of the present invention is anti-GAM therapy, a mode of therapy which allows up regulation of a viral disease-related target gene of a novel GAM oligonucleotide of the present invention, by lowering levels of the novel GAM oligonucleotide which naturally inhibits expression of that target gene. This mode of therapy is particularly useful with respect to target genes which have been shown to be under-expressed in association with a specific viral disease. Anti-GAM therapy is further discussed hereinbelow with reference to FIGS. 11A and 11B.

[0193] A further utility of novel oligonucleotides of the present invention is GAM replacement therapy, a mode of therapy which achieves down regulation of a viral disease related target gene of a novel GAM oligonucleotide of the present invention, by raising levels of the GAM which naturally inhibits expression of that target gene. This mode of therapy is particularly useful with respect to target genes which have been shown to be over-expressed in association with a specific viral disease. GAM replacement therapy involves introduction of supplementary GAM products into a cell, or stimulation of a cell to produce excess GAM products. GAM replacement therapy may preferably be achieved by transfecting cells with an artificial DNA molecule encoding a GAM which causes the cells to produce the GAM product, as is well known in the art.

[0194] Yet a further utility of novel oligonucleotides of the present invention is modified GAM therapy. Disease conditions are likely to exist, in which a mutation in a binding site of a GAM RNA prevents natural GAM RNA to effectively bind inhibit a viral disease related target gene, causing up regulation of that target gene, and thereby contributing to the disease pathology. In such conditions, a modified GAM oligonucleotides is designed which effectively binds the mutated GAM binding site, i.e. is an effective anti-sense of the mutated GAM binding site, and is introduced in disease effected cells. Modified GAM therapy is preferably achieved by transfecting cells with an artificial DNA molecule encoding the modified GAM which causes the cells to produce the modified GAM product, as is well known in the art.

[0195] Reference is now made to FIGS. 11A and 11B, simplified diagrams which when taken together illustrate anti-GAM therapy mentioned hereinabove with reference to FIG. 10. A utility of novel GAMs of the present invention is anti-GAM therapy, a mode of therapy which allows up regulation of a viral disease-related target gene of a novel GAM of the present invention, by lowering levels of the novel GAM which naturally inhibits expression of that target gene. FIG. 11A shows a normal GAM inhibiting translation of a target gene by binding of GAM RNA to a BINDING SITE found in an untranslated region of GAM TARGET RNA, as described hereinabove with reference to FIG. 1.

[0196] FIG. 11B shows an example of anti-GAM therapy. ANTI-GAM RNA is short artificial RNA molecule the sequence of which is an anti-sense of GAM RNA. Anti-GAM treatment comprises transfecting diseased cells with ANTI-GAM RNA, or with a DNA encoding thereof. The ANTI-GAM RNA binds the natural GAM RNA, thereby preventing binding of natural GAM RNA to its BINDING SITE. This prevents natural translation inhibition of GAM TARGET RNA by GAM RNA, thereby up regulating expression of GAM TARGET PROTEIN.

[0197] It is appreciated that anti-GAM therapy is particularly useful with respect to target genes which have been shown to be under-expressed in association with a specific viral disease.

[0198] Furthermore, anti-GAM therapy is particularly useful, since it may be used in situations in which technologies known in the art as RNAi and siRNA can not be utilized. As in known in the art, RNAi and siRNA are technologies which offer means for artificially inhibiting expression of a target protein, by artificially designed short RNA segments which bind complementarily to mRNA of said target protein. However, RNAi and siRNA can not be used to directly up regulate translation of target proteins.

[0199] Reference is now made to FIG. 12A, which is a histogram representing the distribution of known miRNA oligonucleotides and that of hairpin structures extracted from expressed human genome sequences with respect to their HAIRPIN DETECTOR score (this analysis preferably uses the previous version of the Hairpin Detector program). The known miRNA oligonucleotides set is taken from RFAM database, Release 2.1 and includes 440 miRNA oligonucleotides from H. sapienas, M. musculus, C. elegans, C. brigassae and D. melanogaster. Folding of expressed genome sequences taken from public databases of ESTs (Unigene-NCBI and TIGR) identified 342,882 hairpin structures. ˜154,000 out of the 342,882 hairpin structures did not pass the filter of being identified as hairpins in several secondary structure folding versions of the given genomic sequence, as described hereinabove with reference to FIG. 5B, and hence did not receive a Hairpin detector score. Furthermore, ˜133,000 hairpin structures did not pass the filter of minimum score of the DICER-CUT LOCATION DETECTOR 116 (FIG. 2) (those ˜287,000 hairpin structures are not represented in the histogram). Hairpin structures are considered as miRNA-like precursor oligonucleotides here referred to as GAM precursor, if their Hairpin detector score is above 0.3. Thus, the GAM precursor set is comprised of ˜40,000 hairpin structures, of those ˜5100 received a high Hairpin detector score (>=0.7). These are much higher numbers than those of the known miRNA oligonucleotides and of the upper bound of ˜255 human miRNA oligonucleotides, estimated by Bartel et al. (Science, 299, 1540, March 2003). Of the reference set that pass the above filter (408/440), 284 (69%) received a high Hairpin detector score (>=0.7).

[0200] Reference is now made to FIG. 12B, which is a table summarizing laboratory validation results that validate efficacy of the BIOINFORMATIC OLIGONUCLEOTIDE DETECTION ENGINE 100 (FIG. 2). In order to assess efficacy of the BIOINFORMATIC OLIGONUCLEOTIDE DETECTION ENGINE 100, novel oligonucleotides predicted thereby are preferably filtered using the scores of HAIRPIN DETECTOR 114 (FIG. 2) and DICER-CUT LOCATION DETECTOR 116 (FIG. 2) as follows: covering 85% (second column) of published hairpin our algorithm enable to filter 95% of background (third column), leaving only dozens of predicted hairpins with relatively high probability of being a real hairpin carrying a ‘diced’ miRNA for lab validation.

[0201] Group A (selected for the present invention, first column): The score of the HAIRPIN-DETECTOR is above 0, the overall score of the two-phased predictor is above 0.55, and the score of the second phase of the two-phased predictor is above 0.75, or the score of the EDIT-DISTANCE predictor is equal or above 17. In this group, one Dicer cut location is predicted for each hairpin.

[0202] Sample of novel bioinformatically predicted human GAMs are sent to the laboratory for validation (fourth column), and the number (fifth column) and percent (sixth column) of successful validation of predicted human GAM is noted for each of the groups, as well as overall (bottom line). The information about the above lab validation is based on previous patents group selections, there is a high correlation between the old group A predicted hairpin and the present one indicate that the update results should be approximately the same or better, due to improvement in the predictions.

[0203] It is appreciated that the present invention comprises 15484 novel GAM oligonucleotides, which fall into group A, and that the BIOINFORMATIC OLIGONUCLEOTIDE DETECTION ENGINE 100 (FIG. 2) is substantiated by a group of 37 novel human GAM oligonucleotides validated by laboratory means, out of 101 human GAM oligonucleotides which were tested in the lab, resulting in validation of an overall 31% accuracy. The selected group demonstrated 37% accuracy. Pictures of test-results of specific human GAM oligonucleotides as well as the methodology used for validating the expression of predicted oligonucleotides are elaborated hereinbelow with reference to FIG. 13.

[0204] It is further appreciated that failure to detect a predicted oligonucleotide in the lab does not necessarily indicate a mistaken bioinformatic prediction. Rather, it may be due to technical sensitivity limitation of the lab test, or because the predicted oligonucleotides are not expressed in the tissue examined, or at the development phase tested.

[0205] It is still further appreciated that in general these findings are in agreement with the expected bioinformatic accuracy, as describe hereinabove with reference to FIG. 6B: assuming 80% accuracy of the HAIRPIN DETECTOR 114 and 80% accuracy of the DICER-CUT LOCATION DETECTOR 116 and 80% accuracy of the lab validation, this would result in 50% overall accuracy of the predicted oligonucleotide validated in the lab.

[0206] Reference is now made to FIG. 13A which is a picture of laboratory results validating the expression of 43 novel human GAM oligonucleotides detected by the BIOINFORMATIC OLIGONUCLEOTIDE DETECTION ENGINE 100 (FIG. 2).

[0207] Reference is now made to FIG. 13A and FIG. 13B which are pictures and a summary table of laboratory results validating the expression of 43 novel human GAM oligonucleotides detected by the BIOINFORMATIC OLIGONUCLEOTIDE DETECTION ENGINE 100. In each row in FIG. 13A, pictures of several oligonucleotides validated by hybridization of Polymerase Chain Reaction (PCR)-product southern-blots, are provided, each corresponding to a specific GAM oligonucleotide, as elaborated hereinbelow. To test our validation method, we used a reference set of 8 known human miRNA oligonucleotides, as a blind test to our laboratory. These PCR-product hybridization pictures are designated 1 through 8 for the reference set known miRNA oligonucleotides; and 9 through 51 for predicted GAM oligonucleotides.

[0208] In each PCR hybridization picture, 2 lanes are seen: the test lane, designated “+” and the control lane, designated “−”. The control reaction contained all the components of the test reaction except library template. For convenience of viewing the results, all PCR-product hybridization pictures of FIG. 22A have been shrunk ×4 vertically. It is appreciated that for each of the tested GAM oligonucleotides a clear hybridization band appears in the test (“+”) lane, but not in the control (“−”) lane.

[0209] Specifically, FIG. 13A shows pictures of PCR-product hybridization validation by southern-blot, the methodology of which is described hereinbelow, to the following novel human GAM oligonucleotides (RosettaGenomics Ltd. Nomenclature, ‘A’ and ‘B’ referred to the Dicer Cut Location as described hereinbelow with reference to the description of large tables:

(1)hsa-MIR-21; (2)hsa-MIR-27b; (3)hsa-MIR-186; (4)hsa-MIR-93; (5)hsa-MIR-26a; (6)hsa-MIR-191; (7)hsa-MIR-31; (8)hsa-MIR-92; (9) GAM3418-A (later published by other researchers as hsa-MIR23); (10) GAM4426-A; (11) GAM281-A; (12) GAM7553-A; (13) GAM5385-A; (14) GAM2608-A; (15) GAM1032-A; (16) GAM3431-A; (17) GAM7933-A; (18) GAM3298-A.; (19) GAM7080-A; (20)GAM895-A.; (21) GAM3770.1; (22) GAM337162-A; (23) GAM 8678-A; (24) GAM2033-A; (25)GAM7776-A; (26) GAM8145-A; (27) GAM25-A; (28) GAM7352.1; (29) GAM337624-A; (30) GAM1479-A; (31) GAM2270-A; (32) GAM7591-A; (33) GAM8285-A; (34) GAM6773-A; (35) GAM336818-A; (36) GAM336487-A; (37) GAM337620-A; (38) GAM336809-A; (39) GAM5346-A; (40) GAM8554-A; (41)GAM2071-A; (42) GAM7957-A; (43) GAM391-A; (44) GAM6633-A; (45) GAM19; (46) GAM8358-A; (47) GAM3229-A; an)GAM 7052-A; (49) GAM3027-A; (50) GAM21 and (51) GAM oligonucleotide similar to mmu-MIR-30e.

[0210] The next validated GAM oligonucleotides are highly similar or identical to known mouse-miRNA oligonucleotides: GAM3027-A, similar to mmu-MIR-29c; GAM21, similar to mmu-MIR-130b; and GAM oligonucleotide which is highly similar to mmu-MIR-30e (picture number 51). In addition to the PCR-product hybridization detection, the following GAMs were also cloned and sequenced: GAM3418-A, GAM5385-A, GAM1032-A, GAM3298-A, GAM7080-A, GAM1338-A, GAM7776-A, GAM25-A, GAM337624-A, GAM1479-A, GAM6773-A, GAM336818-A, GAM336487-A, GAM337620-A, GAM336809-A, GAM3027-A, GAM21, and GAM oligonucleotide similar to mmu-MIR-30e (picture number 51). Furthermore, the following GAM oligonucleotides were sequenced directly from the ligation reaction by the method described hereinbelow under LIGATION-PCR DIAGNOSTIC METHOD: GAM4426-A, GAM7553-A, GAM2270-A, and GAM7591-A.

[0211] In order to validate the expression of predicted novel GAMs and assuming that these novel GAM oligonucleotides are probably expressed at low concentrations, a PCR product cloning approach was set up through the following strategy: two types of cDNA libraries designated “One tailed” and “Ligation” were prepared from frozen HeLa S100 extract (4c Biotech, Belgium) size fractionated RNA. Essentially, Total S100 RNA was prepared through an SDS-Proteinase K incubation followed by an acid Phenol-Chloroform purification and Isopropanol precipitation. Alternatively, total HeLa RNA was also used as starting material for these libraries.

[0212] Fractionation was done by loading up to 500 g per YM100 Amicon Microcon column (Millipore) followed by a 500g centrifugation for 40 minutes at 4 C. Flow through “YM100” RNA consisting of about of the total RNA was used for library preparation or fractionated further by loading onto a YM30 Amicon Microcon column (Millipore) followed by a 13,500 g centrifugation for 25 minutes at 4 C. Flowthrough “YM30” was used for library preparation as is and consists of less than 0.5% of total RNA. For the both the “ligation” and the “One-tailed” libraries, RNA was dephosphorilated and ligated to an RNA (lowercase)-DNA (UPPERCASE) hybrid 5-phosphorilated, 3 idT blocked 3-adapter (5-P-uuuAACCGCATCCTTCTC-idT-3 Dharmacon #P-002045-01-05) (as elaborated in Elbashir et al., Genes Dev. 15:188-200 (2001)) resulting in ligation only of RNase III type cleavage products. 3-Ligated RNA was excised and purified from a half 6%, half 13% polyacrylamide gel to remove excess adapter with a Nanosep 0.2M centrifugal device (Pall) according to instructions, and precipitated with glycogen and 3 volumes of Ethanol. Pellet was resuspended in a minimal volume of water.

[0213] For the “ligation” library a DNA (UPPERCASE)-RNA (lowercase) hybrid 5-adapter (5-TACTAATACGACTCACTaaa-3 Dharmacon #P-002046-01-05) was ligated to the 3-adapted RNA, reverse transcribed with “EcoRI-RT”:

[0214] (5-GACTAGCTGGAATTCAAGGATGCGGTTAAA-3), PCR amplified with two external primers essentially as in Elbashir et al 2001 except that primers were “EcoRI-RT” and “PstI

[0215] Fwd“(5-CAGCCAAGGCTGCAGATACGACTCACTAAA-3). This PCR product was used as a template for a second round of PCR with one hemispecific and one external primer or with two hemispecific primers.

[0216] For the “One tailed” library the 3-Adapted RNA was annealed to 20 pmol primer “EcoRI RT” by heating to 70 C and cooling 0.1 C/sec to 30 C and then reverse transcribed with Superscript II RT (According to instructions, Invitrogen) in a 20 l volume for 10 alternating 5 minute cycles of 37 C and 45 C. Subsequently, RNA was digested with 1 l 2M NaOH, 2 mM EDTA at 65 C for 10 minutes. cDNA was loaded on a polyacrylamide gel, excised and gel-purified from excess primer as above (invisible, judged by primer run alongside) and resuspended in 13 l of water. Purified cDNA was then oligo-dC tailed with 400 U of recombinant terminal transferase (Roche molecular biochemicals), 1 l 100M dCTP, 1 l 15 mM CoCl2, and 4 l reaction buffer, to a final volume of 20 l for 15 minutes at 37 C. Reaction was stopped with 2 l 0.2M EDTA and 15 l 3M NaOAc pH 5.2. Volume was adjusted to 150 l with water, Phenol: Bromochloropropane 10:1 extracted and subsequently precipitated with glycogen and 3 volumes of Ethanol. C-tailed cDNA was used as a template for PCR with the external primers “T3-PstBsg(G/1)18”(5-AATTAACCCTCACTAAAGGCTGCAG GTGCAGGIGGGIIGGGIIGGGIIGN-3 where I stands for Inosine and N for any of the 4 possible deoxynucleotides), and with “EcoRI Nested” (5-GGAATTCAAGGATGCGGTTA-3). This PCR product was used as a template for a second round of PCR with one hemispecific and one external primer or with two hemispecific primers.

[0217] Hemispecific primers were constructed for each predicted GAM RNA oligonucleotide by an in-house program designed to choose about half of the 5 or 3 sequence of the GAM RNA corresponding to a TM of about 30-34 C constrained by an optimized 3 clamp, appended to the cloning adapter sequence (for “One-tailed” libraries 5-GGNNGGGNNG on the 5 end of the GAM RNA, or TTTAACCGCATC-3 on the 3 end of the GAM RNA. For “Ligation” libraries the same 3 adapter and 5-CGACTCACTAAA on the 5 end). Consequently, a fully complementary primer of a TM higher than 60 C was created covering only one half of the GAM RNA sequence permitting the unbiased elucidation by sequencing of the other half.

### Confirmation of GAM Oligonucleotide Sequence Authenticity of PCR Products:

[0218] SOUTHERN BLOT: PCR-product sequences were confirmed by southern blot (Southern E. M., Biotechnology, 1992, 24:122-39 (1975)) and hybridization with DNA oligonucleotide probes synthesized as complimentary (antisense) to predicted GAM RNA oligonucleotides. Gels were transferred onto a Biodyne PLUS 0.45 m, (Pall) positively charged nylon membrane and UV cross-linked. Hybridization was performed overnight with DIG-labeled probes at 420 C in DIG Easy-Hyb buffer (Roche). Membranes were washed twice with 2×SSC and 0.1% SDS for 10 minutes at 420 C and then washed twice with 0.5×SSC and 0.1% SDS for 5 min at 420 C. The membrane was then developed by using a DIG luminescent detection kit (Roche) using anti-DIG and CSPD reaction, according to the manufacturer's protocol. All probes were prepared according to the manufacturers (Roche Molecular Biochemicals) protocols: Digoxigenin (DIG) labeled antisense transcripts was prepared from purified PCR products using a DIG RNA labeling kit with T3 RNA polymerase. DIG labeled PCR was prepared by using a DIG PCR labeling kit. 3-DIG-tailed oligo ssDNA antisense probes, containing DIG-dUTP and dATP at an average tail length of 50 nucleotides were prepared from 100 pmole oligonucleotides with the DIG Oligonucleotide Labeling Kit.

[0219] CLONE-SEQUENCING: PCR products were inserted into pGEM-T (Promega) or pTZ57/T (MBI Fermentas), heat-shock transformed into competent JM109 E. coli (Promega) and sown on LB-Ampicillin plates with IPTG and Xgal. White and light-blue colonies were transferred to duplicate gridded plates, one of which was blotted onto a membrane (Biodyne Plus, Pall) for hybridization with DIG tailed oligo probes (according to instructions, Roche) complimentary to the expected GAM. Plasmid DNA from positive colonies was sequenced.

[0220] LIGATION-PCR DIAGNOSTIC METHOD: To further validate predicted GAM PCR product sequence derived from hemi-primers, a PCR based diagnostic technique was devised to amplify only those products containing also at least two additional nucleotides of the non hemi-primer defined part of the predicted GAM RNA oligonucleotide. In essence, a diagnostic primer was designed so that its 3 end, which is the specificity determining side, was identical to the desired GAM RNA oligonucleotide, 2-10 nucleotides (typically 4-7, chosen for maximum specificity) further into its 3 end than the nucleotide stretch primed by the hemi-primer. The hemi-primer PCR product was first ligated into a T-cloning vector (pTZ57/T or pGEM-T) as described hereinabove. The ligation reaction mixture was used as template for the diagnostic PCR under strict annealing conditions with the new diagnostic primer in conjunction with a general plasmid-homologous primer, resulting in a distinct ˜200 base-pair product. This PCR product can be directly sequenced, permitting the elucidation of the remaining nucleotides up to the 3 of the mature GAM RNA oligonucleotide adjacent to the 3 adapter. Alternatively, following analysis of the diagnostic PCR reaction on an agarose gel, positive ligation reactions (containing a band of the expected size) were transformed into E. coli. Using this same diagnostic technique and as an alternative to screening by Southern-blot colony-hybridization, transformed bacterial colonies were screened by colony-PCR (Gussow, D. and Clackson, T, Nucleic Acids Res. 17: 4000 (1989)) prior to plasmid purification and sequencing.

[0221] Reference is now made to FIG. 13B which is a table summarizing laboratory results which validate the expression of 8 known human miRNA oligonucleotides and 43 novel GAM oligonucleotides detected by the BIOINFORMATIC OLIGONUCLEOTIDE DETECTION ENGINE 100. The table gives additional information on the above GAM oligonucleotides and contains the following fields: NUMBER: refers to the hybridization picture number of FIG. 13A; NAME: indicates the known MIR name for the reference set, or the GAM's name as given by RosettaGenomics nomenclature method; SEQUENCE: 5′ to 3′ sequence of the mature, ‘diced’ oligonucleotide; SEQUENCED: ‘+’ indicates the additional validation of the GAM RNA sequence by sequencing procedure as described hereinabove with reference to FIG. 13A.

[0222] Reference is now made to FIG. 14A, which is a schematic representation of a novel human GR polynucleotide herein designated GR12731 (RosettaGenomics Ltd. nomenclature), located on chromosome 9, comprising 2 known human MIR oligonucleotides—MIR24 and MIR23, and 2 novel GAM oligonucleotides, herein designated GAM22 and GAM116, all marked by solid black boxes. FIG. 14A also schematically illustrates 6 non-GAM hairpin sequences, and one non-hairpin sequence, all marked by white boxes, and serving as negative controls. By “non-GAM hairpin sequences” is meant sequences of a similar length to known MIR PRECURSOR sequences, which form hairpin secondary folding pattern similar to MIR PRECURSOR hairpins, and yet which are assessed by the BIOINFORMATIC OLIGONUCLEOTIDE DETECTION ENGINE 100 not to be valid GAM PRECURSOR hairpins. It is appreciated that FIG. 14A is a simplified schematic representation, reflecting only the order in which the segments of interest appear relative to one another, and not a proportional distance between the segments.

[0223] Reference is now made to FIG. 14B, which is a schematic representation of secondary folding of each of the MIRs and GAMs of GR GR12731 MIR24, MIR23, GAM22 and GAM116, and of the negative control non-GAM hairpins, herein designated N2, N3, N116, N4, N6 and N7. N0 is a non-hairpin control, of a similar length to that of known MIR PRECURSOR hairpins. It is appreciated that the negative controls are situated adjacent to and in between real MIR oligonucleotides and GAM predicted oligonucleotides and demonstrates similar secondary folding patterns to that of known MIRs and GAMs.

[0224] Reference is now made to FIG. 14C, which is a picture of laboratory results of a PCR test upon a YM100 size-fractionated “ligation”-library, utilizing a set of specific primer pairs located directly inside the boundaries of the hairpins. Due to the nature of the library the only PCR amplifiable products can result from RNaseIII type enzyme cleaved RNA, as expected for legitimate hairpin precursors presumed to be produced by DROSHA (Lee et al, Nature 425 415-419, 2003). FIG. 14C demonstrates expression of hairpin precursors of known MIR oligonucleotides MIRhsa-23 and MIRhsa-24, and of novel bioinformatically detected GAM22 and GAM116 hairpins predicted bioinformatically by a system constructed and operative in accordance with a preferred embodiment of the present invention. FIG. 14C also shows that none of the 7 controls (6 hairpins designated N2, N3, N23, N4, N6 and N7 and 1 non-hairpin sequence designated N0) were expressed. N116 is a negative control sequence partially overlapping GAM116.

[0225] In the picture, test lanes including template are designated “+” and the control lane is designated “−”. The control reaction contained all the components of the test reaction except library template. It is appreciated that for each of the tested hairpins, a clear PCR band appears in the test (“+”) lane, but not in the control (“−”) lane.

[0226] FIGS. 14A through 14C, when taken together validate the efficacy of the bioinformatic oligonucleotide detection engine in: (a) detecting known MIR oligonucleotides; (b) detecting novel GAM PRECURSOR hairpins which are found adjacent to these MIR oligonucleotides, and which despite exhaustive prior biological efforts and bioinformatic detection efforts, went undetected; (c) discerning between GAM (or MIR) PRECURSOR hairpins, and non-GAM hairpins.

[0227] It is appreciated that the ability to discern GAM-hairpins from non-GAM-hairpins is very significant in detecting GAM oligonucleotides since hairpins are highly abundant in the genome. Other MIR prediction programs have not been able to address this challenge successfully.

[0228] Reference is now made to FIG. 15A which is an annotated sequence of an EST comprising a novel GAM oligonucleotides detected by the oligonucleotide detection system of the present invention. FIG. 15A shows the nucleotide sequence of a known human non-protein coding EST (Expressed Sequence Tag), identified as EST72223. The EST72223 clone obtained from TIGR database (Kirkness and Kerlavage, 1997) was sequenced to yield the above 705 bp transcript with a polyadenyl tail. It is appreciated that the sequence of this EST comprises sequences of one known miRNA oligonucleotide, identified as hsa-MIR98, and of one novel GAM oligonucleotide referred to here as GAM25, detected by the BIOINFORMATIC OLIGONUCLEOTIDE DETECTION ENGINE 100 (FIG. 2) of the present invention.

[0229] The sequences of the precursors of the known MIR98 and of the predicted GAM25 precursors are marked in bold, the sequences of the established miRNA 98 and of the predicted miRNA-like oligonucleotide GAM25 are underlined.

[0230] Reference is now made to FIGS. 15B, 15C and 15D that are pictures of laboratory results, which when taken together demonstrate laboratory confirmation of expression of the bioinformatically detected novel oligonucleotide of FIG. 15A. In two parallel experiments, an enzymatically synthesized capped, EST72223 RNA transcript, was incubated with Hela S100 lysate for 0 minutes, 4 hours and 24 hours. RNA was subsequently harvested, run on a denaturing polyacrylamide gel, and reacted with either a 102 nt antisense MIR98 probe or a 145 nt antisense GAM25 precursor transcript probe respectively. The Northern blot results of these experiments demonstrated processing of EST72223 RNA by Hela lysate (lanes 2-4, in 15B and 15C), into ˜80 bp and ˜22 bp segments, which reacted with the MIR98 precursor probe (15B), and into ˜100 bp and ˜24 bp segments, which reacted with the GAM25 precursor probe (15C). These results demonstrate the processing of EST72223 by Hela lysate into MIR98 precursor and GAM25 precursor. It is also appreciated from FIG. 15C (lane 1) that Hela lysate itself reacted with the GAM25 precursor probe, in a number of bands, including a ˜100 bp band, indicating that GAM25-precursor is endogenously expressed in Hela cells. The presence of additional bands, higher than 100 bp in lanes 5-9 probably corresponds to the presence of nucleotide sequences in Hela lysate, which contain the GAM25 sequence.

[0231] In addition, in order to demonstrate the kinetics and specificity of the processing of MIR98 and GAM25 precursors into their respective mature, ‘diced’ segments, transcripts of MIR98 and of the bioinformatically predicted GAM25 precursors were similarly incubated with Hela S100 lysate, for 0 minutes, 30 minutes, 1 hour and 24 hours, and for 24 hours with the addition of EDTA, added to inhibit Dicer activity, following which RNA was harvested, run on a polyacrylamide gel and reacted with MIR98 and GAM25 precursor probes. Capped transcripts were prepared for in-vitro RNA cleavage assays with T7 RNA polymerase, including a m7G(5′)ppp(5′)G-capping reaction using the T7-mMessage mMachine kit (Ambion). Purified PCR products were used as template for the reaction. These were amplified for each assay with specific primers containing a T7 promoter at the 5 end and a T3 RNA polymerase promoter at the 3end. Capped RNA transcripts were incubated at 30 C in supplemented, dialysis concentrated, Hela S100 cytoplasmic extract (4 C Biotech, Seneffe, Belgium). The Hela S100 was supplemented by dialysis to a final concentration of 20 mM Hepes, 100 mM KCl, 2.5 mM MgCl2, 0.5 mM DTT, 20% glycerol and protease inhibitor cocktail tablets (Complete mini Roche Molecular Biochemicals). After addition of all components, final concentrations were 100 mM capped target RNA, 2 mM ATP, 0.2 mM GTP, 500 U/ml RNasin, 25 g/ml creatine kinase, 25 mM creatine phosphate, 2.5 mM DTT and 50% S100 extract. Proteinase K, used to enhance Dicer activity (Zhang et al., EMBO J. 21, 5875-5885 (2002)) was dissolved in 50 mM Tris-HCl pH 8, 5 mM CaCl2, and 50% glycerol, was added to a final concentration of 0.6 mg/ml. Cleavage reactions were stopped by the addition of 8 volumes of proteinase K buffer (200 Mm Tris-Hcl, pH 7.5, 25 mM EDTA, 300 mM NaCl, and 2% SDS) and incubated at 65 C for 15 min at different time points (0, 0.5, 1, 4, 24 h) and subjected to phenol/chloroform extraction. Pellets were dissolved in water and kept frozen. Samples were analyzed on a segmented half 6%, half 13% polyacrylamide 1×TBE-7M Urea gel.

[0232] The Northern blot results of these experiments demonstrated an accumulation of a ˜22 bp segment which reacted with the MIR98 precursor probe, and of a ˜24 bp segment which reacted with the GAM25 precursor probe, over time (lanes 5-8). Absence of these segments when incubated with EDTA (lane 9), which is known to inhibit Dicer enzyme (Zhang et al., 2002), supports the notion that the processing of MIR98 and GAM25 precursors into their ‘diced’ segments is mediated by Dicer enzyme, found in Hela lysate. Other RNases do not utilize divalent cations and are thus not inhibited by EDTA. The molecular sizes of EST72223, MIR-98 and GAM25 and their corresponding precursors are indicated by arrows.

[0233] FIG. 15D present Northern blot results of same above experiments with GAM25 probe (24 nt). The results clearly demonstrated the accumulation of mature GAM25 oligonucleotide after 24 h.

[0234] To validate the identity of the band shown by the lower arrow in FIGS. 15C and 15D, a RNA band parallel to a marker of 24 base was excised from the gel and cloned as in Elbashir et al (2001) and sequenced. 90 clones corresponded to the sequence of mature GAM25 oligonucleotide, three corresponded to GAM25* (the opposite arm of the hairpin with a 1-3 nucleotide 3 overhang) and two to the hairpin-loop.

[0235] GAM25 was also validated endogenously by sequencing from both sides from a HeLa YM100 total-RNA “ligation” libraries, utilizing hemispecific primers as described in FIG. 13.

[0236] Taken together, these results validate the presence and processing of a novel MIR-like oligonucleotide, GAM25, which was predicted bioinformatically. The processing of this novel GAM oligonucleotide product, by Hela lysate from EST72223, through its precursor, to its final form was similar to that observed for known miRNA oligonucleotide, MIR98.

[0237] Transcript products were 705 nt (EST72223), 102 nt (MIR98 precursor), 125 nt (GAM25 precursor) long. EST72223 was PCR amplified with T7-EST 72223 forward primer: 5-TAATACGACTCACTATAGGCCCTTATTAGAGGATTCTGCT-3 and T3-EST72223 reverse primer: “-AATTAACCCTCACTAAAGGTTTTTTTTTTCCTGAGA CAGAGT-3.MIR98 was PCR amplified using EST72223 as a template with T7MIR98 forward primer: 5-TAATACGACTCACTATAGGGTGAG GTAGTAAGTTGTATTG TT-3 and T3MIR98 reverse primer: 5-AATTAACCCTCACTAAAGGGAAAGTAGTAAGTTGTATAGT T-3.GAM25 was PCR amplified using EST72223 as a template with GAM25 forward primer: 5-GAGGCAGGAGAATTGCTTGA-3 and T3-EST72223 reverse primer: 5-AATTAACCCTCACTAAAGGCCTGAGACAGAGTCT TGCTC-3.

[0238] It is appreciated that the data presented in FIGS. 15A, 15B, 15C and 15D when taken together validate the function of the bioinformatic oligonucleotide detection engine 100 of FIG. 2. FIG. 15A shows a novel GAM oligonucleotide bioinformatically detected by the BIOINFORMATIC OLIGONUCLEOTIDE DETECTION ENGINE 100, and FIGS. 15C and 15D show laboratory confirmation of the expression of this novel oligonucleotide. This is in accord with the engine training and validation methodology described hereinabove with reference to FIG. 3.

[0239] Reference is now made to FIG. 16, which presents pictures of laboratory results, which demonstrate laboratory confirmation of excision (dicing) of the bioinformatically detected novel GAM HIV1 miRNA-like oligonucleotides, herein designated GAM2032-B, GAM3249-A, GAM 507-B and GAM1016-B from their predicted precursors by their incubation in HeLa S-100 lysate as described in FIG. 15.

[0240] FIG. 16A presents the entire 5-UTR of HIV1 (U5R) containing two predicted GAM precursor genes, in bold; GAM 2032 and GAM3249. The bioinformatically predicted mature GAMs are depicted with underscore, the 5-most is GAM 2032-B and the second is GAM 3249-A. GAM 2032-B matches the known HIV1 RNA structure named TAR to which the TAT protein binds (Nature 1987. 330:489-93).

[0241] FIG. 16B and FIG. 16C depict Northern blot analysis of GAMs in U5R, hybridized with predicted mature GAM oligonucleotide probes GAM 2032-B, and GAM 3249-A, respectively. The molecular size of the entire U5R transcript, 355 nt, is indicated by arrow. The predicted molecular sizes of GAM 2032-B, and GAM 3249-A are 22 nt and 17 nt respectively. The 22 nt molecular marker is indicated by arrow. Lanes: 1-Hela lysate; 2-U5R transcript in HeLa Lysate without incubation. 3-U5R transcript incubated overnight with Hela lysate.

[0242] FIGS. 16D and 16E present partial transcripts of HIV1 RNA reacted with predicted mature HIV1-GAM oligonucleotide probes. In each figure, the experimental transcript sequence is shown, annotated in bold is the predicted GAM precursor, and in underscore the predicted mature GAM. Northern blot analysis of GAM precursors for GAM507-B (FIG. 16D), and GAM1016-B (FIG. 16E). The transcript sizes are 163 nt for GAM507-B transcript and 200 nt for GAM1016-B transcript. The predicted molecular sizes of GAM507-B and GAM1016-B are both 24 nt. The 22 nt molecular marker is indicated by arrow. Lanes: 1—Transcript in HeLa Lysate without incubation. 2—Transcript incubated overnight with HeLa lysate.

[0243] It is appreciated that the sequence of the reacting bands in the foreseen sizes comprise sequences of novel GAM genes, referred to here as GAM 2032-B, GAM 3249-B, GAM 507-B, GAM 1016-B, detected by the bioinformatic gene detection engine 100 of the present invention, described hereinabove with reference to FIG. 2.

### DETAILED DESCRIPTION OF LARGE TABLES

[0244] Table 1 comprises data relating the SEQ ID NO of oligonucleotides of the present invention to their corresponding GAM NAME, and contains the following fields: GAM SEQ-ID: GAM SEQ ID NO, as in the Sequence Listing; GAM NAME: Rosetta Genomics Ltd. nomenclature (see below); GAM RNA SEQUENCE: Sequence (5 to 3) of the mature, ‘diced’ GAM RNA; GAM ORGANISM: identity of the organism encoding the GAM oligonucleotide; GAM POS: Dicer cut location (see below); and

[0245] Table 2 comprises detailed textual description according to the description of FIG. 1 of each of a plurality of novel GAM oligonucleotides of the present invention, and contains the following fields: GAM NAME: Rosetta Genomics Ltd. nomenclature (see below); GAM ORGANISM: identity of the organism encoding the GAM oligonucleotide; PRECUR SEQ-ID:GAM precursor Seq-ID, as in the Sequence Listing; PRECURSOR SEQUENCE: Sequence (5 to 3) of the GAM precursor; GAM DESCRIPTION: Detailed description of GAM oligonucleotide with reference to FIG. 1; and

[0246] Table 3 comprises data relating to the source and location of novel GAM oligonucleotides of the present invention, and contains the following fields: GAM NAME: Rosetta Genomics Ltd. nomenclature (see below); PRECUR SEQ-ID: GAM precursor SEQ ID NO, as in the Sequence Listing; GAM ORGANISM: identity of the organism encodes the GAM oligonucleotide; SOURCE: For human GAM-chromosome encoding the human GAM oligonucleotide, otherwise—accession ID (GenBank, NCBI); STRAND: Orientation of the strand, ‘+’ for the plus strand, ‘−’ for the minus strand; SRC-START OFFSET: Start offset of GAM precursor sequence relative to the SOURCE; SRC-END OFFSET: End offset of GAM precursor sequence relative to the SOURCE; and

[0247] Table 4 comprises data relating to GAM precursors of novel GAM oligonucleotides of the present invention, and contains the following fields: GAM NAME: Rosetta Genomics Ltd. nomenclature (see below); PRECUR SEQ-ID: GAM precursor Seq-ID, as in the Sequence Listing; GAM ORGANISM: identity of the organism encoding the GAM oligonucleotide; PRECURSOR-SEQUENCE: GAM precursor nucleotide sequence (5′ to 3′); GAM FOLDED PRECURSOR RNA: Schematic representation of the GAM folded precursor, beginning 5′ end (beginning of upper row) to 3′ end (beginning of lower row), where the hairpin loop is positioned at the right part of the draw; and

[0248] Table 5 comprises data relating to GAM oligonucleotides of the present invention, and contains the following fields: GAM NAME: Rosetta Genomics Ltd. nomenclature (see below); GAM ORGANISM: identity of the organism encoding the GAM oligonucleotide; GAM RNA SEQUENCE: Sequence (5′ to 3′) of the mature, ‘diced’ GAM RNA; PRECUR SEQ-ID: GAM precursor Seq-ID, as in the Sequence Listing; GAM POS: Dicer cut location (see below); and

[0249] Table 6 comprises data relating SEQ ID NO of the GAM target gene binding site sequence to TARGET gene name and target binding site sequence, and contains the following fields: TARGET BINDING SITE SEQ-ID: Target binding site SEQ ID NO, as in the Sequence Listing; TARGET ORGANISM: identity of organism encode the TARGET gene; TARGET: GAM target gene name; TARGET BINDING SITE SEQUENCE: Nucleotide sequence (5′ to 3′) of the target binding site; and

[0250] Table 7 comprises data relating to target-genes and binding sites of GAM oligonucleotides of the present invention, and contains the following fields: GAM NAME: Rosetta Genomics Ltd. nomenclature (see below); GAM ORGANISM: identity of the organism encoding the GAM oligonucleotide; GAM RNA SEQUENCE: Sequence (5′ to 3′) of the mature, ‘diced’ GAM RNA; TARGET: GAM target gene name; TARGET REF-ID: Target accession number (GenBank); TARGET ORGANISM: identity of organism encode the TARGET gene; UTR: Untranslated region of binding site/s (3″ or 5″); TARGET BS-SEQ: Nucleotide sequence (5′ to 3′) of the target binding site; BINDING-SITE-DRAW: Schematic representation of the binding site, upper row represent 5′ to 3′ sequence of the GAM, Lower row represent 3′ to 5′ Sequence of the target; GAM POS: Dicer cut location (see below); and

[0251] Table 8 comprises data relating to functions and utilities of novel GAM oligonucleotides of the present invention, and contains the following fields: GAM NAME: Rosetta Genomics Ltd. nomenclature (see below); GAM RNA SEQUENCE: Sequence (5′ to 3′) of the mature, ‘diced’ GAM RNA; GAM ORGANISM: identity of the organism encoding the GAM oligonucleotide; TARGET:GAM target gene name; TARGET ORGANISM: identity of organism encode the TARGET gene; GAM FUNCTION: Description of the GAM functions and utilities; GAM POS: Dicer cut location (see below); and

[0252] Table 9 comprises data of gene function references—Bibliography and contains the following fields: GAM NAME: Rosetta Genomics Ltd. nomenclature (see below); GAM RNA SEQUENCE: Sequence (5′ to 3′) of the mature, ‘diced’ GAM RNA gene; GAM ORGANISM: identity of the organism encoding the GAM oligonucleotide; TARGET: GAM target gene name; TARGET ORGANISM: identity of organism encode the TARGET gene; REFERENCES: list of references relating to the target gene; GAM POS: Dicer cut location (see below); and

[0253] Table 10 comprises data relating to novel GR (Genomic Record) polynucleotides of the present invention, and contains the following fields: GR NAME: Rosetta Genomics Ltd. nomenclature (see below); GR ORGANISM: identity of the organism encoding the GR polynucleotide; GR DESCRIPTION: Detailed description of a GR gene cluster, with reference to FIG. 9; and

[0254] The following conventions and abbreviations are used in the tables: The nucleotide ‘U’ is represented as ‘T’ in the tables, and

[0255] GAM NAME or GR NAME are names for nucleotide sequences of the present invention given by RosettaGenomics Ltd. nomenclature method. All GAMs/GRs are designated by GAMx/GRx where x is a unique ID.

[0256] GAM POS is a position of the GAM RNA on the GAM PRECURSOR RNA sequence. This position is the Dicer cut location: A indicates a probable Dicer cut location; B indicates an alternative Dicer cut location.

[0257] All human nucleotide sequences of the present invention as well as their chromosomal location and strand orientation are derived from sequence records of UCSC-hg16 version, which is based on NCBI, Build34 database (April, 2003).

[0258] All viral sequences of the present invention as well as their genomic location are derived from NCBI, RefSeq database.

1.-15. (canceled)

16. An isolated nucleic acid, wherein SEQ ID NO: 399738 comprises the nucleic acid, and wherein the sequence of the nucleic acid comprises a sequence selected from the group consisting of:
(a) any one of the sequences as set forth in SEQ ID NO: 399404, 399423, 399424, 399427, 399441, 14005, 14011, 14020, 14039, 14046, or 14051;
(b) a DNA encoding the sequence of (a), wherein the DNA is identical in length to (a);
(c) a sequence at least 80% identical to (a) or (b); and
(d) the complement of any one of (a)-(c), wherein the complement is identical in length to (a).

17. The nucleic acid of claim 16, wherein the sequence of (a) is the sequence as set forth in SEQ ID NO: 399424.

18. The nucleic acid of claim 16, wherein the sequence of (a) is the sequence as set forth in SEQ ID NO: 14051.

19.-21. (canceled)

22. A vector comprising the nucleic acid of claim 16.

23. A vector comprising the nucleic acid of claim 17.

24. (canceled)

25. A vector comprising the nucleic acid of claim 18

26. A probe comprising the nucleic acid of claim 16.

27. A probe comprising the nucleic acid of claim 17

28. A probe comprising the nucleic acid of claim 18.

The application's sequence listing, which the Patent Office published only in electronic form, follows.

SEQUENCE LISTING (399737 sequences)

SEQ ID NO: 1 - RNA, 22 nt, Homo sapiens
acugcacuccagccugggcaac

SEQ ID NO: 2 - RNA, 22 nt, Homo sapiens
cacugcaaccuccaccuccugg

SEQ ID NO: 3 - RNA, 22 nt, Homo sapiens
cacugcacuccagccugggcaa

SEQ ID NO: 4 - RNA, 22 nt, Homo sapiens
cauugcacuccagccugggcaa

SEQ ID NO: 5 - RNA, 22 nt, Homo sapiens
gcacucaagccuggguuacaga

SEQ ID NO: 6 - RNA, 22 nt, Dobrava virus
uaguaguagacuccgcaagaaa

SEQ ID NO: 7 - RNA, 22 nt, Eastern equine encephalitis virus
caagucacugcaaagaugcuuu

SEQ ID NO: 8 - RNA, 22 nt, Hepatitis E virus
cgcagcggcgguuccggcggug

SEQ ID NO: 9 - RNA, 22 nt, Homo sapiens
auugcacuccagccuggcaaua

SEQ ID NO: 10 - RNA, 22 nt, Homo sapiens
agcacagugaaugguuuacuca

SEQ ID NO: 11 - RNA, 22 nt, Homo sapiens
uuuggcaugggcuauuugcuuu

SEQ ID NO: 12 - RNA, 21 nt, Homo sapiens
gugcaacucccucucccuaca

SEQ ID NO: 13 - RNA, 22 nt, Homo sapiens
uaacaguggucugugguaucug

SEQ ID NO: 14 - RNA, 21 nt, Homo sapiens
ucacauggccagaguaggaac

SEQ ID NO: 15 - RNA, 23 nt, Homo sapiens
uugaggcauguaccaucaauauc

SEQ ID NO: 16 - RNA, 22 nt, Homo sapiens
ugaccacagaaagugagggagc

SEQ ID NO: 17 - RNA, 23 nt, Homo sapiens
uccccgggagcaccagcuuguug

SEQ ID NO: 18 - RNA, 22 nt, Homo sapiens
ugugcuaauacauacagugcua

SEQ ID NO: 19 - RNA, 22 nt, Homo sapiens
ugaaauguugggugauggaauc

SEQ ID NO: 20 - RNA, 21 nt, Homo sapiens
ucaaaguguucuuuuguugaa

SEQ ID NO: 21 - RNA, 20 nt, Homo sapiens
agaaccuguaguguagaggg

SEQ ID NO: 22 - RNA, 22 nt, Homo sapiens
ugauugcacaccugcacucaag

SEQ ID NO: 23 - RNA, 23 nt, Homo sapiens
uuucacagaaggauuguagggcc

SEQ ID NO: 24 - RNA, 19 nt, Homo sapiens
auuuccuggagcuggucuc

SEQ ID NO: 25 - RNA, 22 nt, Homo sapiens
uaagacacuuaaaauguuacau

SEQ ID NO: 26 - RNA, 22 nt, Homo sapiens
auaugcauacauguaugcagga

SEQ ID NO: 27 - RNA, 22 nt, Homo sapiens
ucagaguaguuccuggcagaaa

SEQ ID NO: 28 - RNA, 16 nt, Homo sapiens
agcagguuuuucugca

SEQ ID NO: 29 - RNA, 22 nt, Homo sapiens
gagaucauucugauccagaguc

SEQ ID NO: 30 - RNA, 22 nt, Homo sapiens
auugcucacacaaagccuguuu

SEQ ID NO: 31 - RNA, 22 nt, Homo sapiens
uuuagcacugugauugacaaaa

SEQ ID NO: 32 - RNA, 22 nt, Homo sapiens
gugacugcauccauccaggcuu

SEQ ID NO: 33 - RNA, 23 nt, Homo sapiens
augacacuguccuugaccauuuc

SEQ ID NO: 34 - RNA, 22 nt, Homo sapiens
guaugaccucgcuuuauugcag

SEQ ID NO: 35 - RNA, 22 nt, Homo sapiens
ccauuucacucuuccugaagga

SEQ ID NO: 36 - RNA, 19 nt, Homo sapiens
cuggcaaaugcuuuggcca

SEQ ID NO: 37 - RNA, 22 nt, Homo sapiens
uugagguggugucuugcucugu

SEQ ID NO: 38 - RNA, 22 nt, Homo sapiens
augagguccuagccaacuuuuu

SEQ ID NO: 39 - RNA, 22 nt, Homo sapiens
gagauauguuggcagcugguau

SEQ ID NO: 40 - RNA, 22 nt, Homo sapiens
uuagauguuugacugggccuua

SEQ ID NO: 41 - RNA, 18 nt, Homo sapiens
ugugcaauauuaaccacc

SEQ ID NO: 42 - RNA, 22 nt, Homo sapiens
uauggauuucauuagacuugag

SEQ ID NO: 43 - RNA, 22 nt, Homo sapiens
uaaggcacuacuuuaggcuuuc

SEQ ID NO: 44 - RNA, 22 nt, Homo sapiens
gccaguauuuuguugagaauuu

SEQ ID NO: 45 - RNA, 22 nt, Homo sapiens
gagugcuguuagcccuggguuu

SEQ ID NO: 46 - RNA, 22 nt, Homo sapiens
aaggagcagagagcccuguuuc

SEQ ID NO: 47 - RNA, 22 nt, Homo sapiens
uaucguaguguuggaaaacaag

SEQ ID NO: 48 - RNA, 22 nt, Homo sapiens
ggcaccacagacgccaggcgug

SEQ ID NO: 49 - RNA, 22 nt, Homo sapiens
agcacauuaguaucuaagaaca

SEQ ID NO: 50 - RNA, 22 nt, Homo sapiens
gggaggucauuguucaaugcug

SEQ ID NO: 51 - RNA, 22 nt, Homo sapiens
acuagagaugcauuuguaguuu

SEQ ID NO: 52 - RNA, 22 nt, Homo sapiens
uggcaaaauggaauauguuggg

SEQ ID NO: 53 - RNA, 22 nt, Homo sapiens
agugucaggagacagguagcug

SEQ ID NO: 54 - RNA, 22 nt, Homo sapiens
ucugagaucaugucugugcugu

SEQ ID NO: 55 - RNA, 22 nt, Homo sapiens
ggcucguguuuucuguccaguu

SEQ ID NO: 56 - RNA, 22 nt, Homo sapiens
uuggccgugucauuugcuuuga

SEQ ID NO: 57 - RNA, 22 nt, Homo sapiens
guggaaugaaaacucucucaca

SEQ ID NO: 58 - RNA, 22 nt, Homo sapiens
ggcaugauguauuugagguuug

SEQ ID NO: 59 - RNA, 22 nt, Homo sapiens
uuguuauguuaaacuacugaaa

SEQ ID NO: 60 - RNA, 22 nt, Homo sapiens
ccacaaccucaacagcaucuau

SEQ ID NO: 61 - RNA, 22 nt, Homo sapiens
aggugcaugcuucacuggauau

SEQ ID NO: 62 - RNA, 22 nt, Homo sapiens
ugcaaaguccucauucuuaccc

SEQ ID NO: 63 - RNA, 17 nt, Homo sapiens
gcacuggcguaucccac

SEQ ID NO: 64 - RNA, 18 nt, Homo sapiens
uugaaugcgucccagaga

SEQ ID NO: 65 - RNA, 22 nt, Homo sapiens
uuauagcacuaagaagguaaua

SEQ ID NO: 66 - RNA, 22 nt, Homo sapiens
auuggcauauccacgacaaugc

SEQ ID NO: 67 - RNA, 22 nt, Homo sapiens
aaccuuuagucagcucuuagga

SEQ ID NO: 68 - RNA, 22 nt, Homo sapiens
aguaaaucacuaauggcuuccg

SEQ ID NO: 69 - RNA, 22 nt, Homo sapiens
gugaauguaaagucaugugacu

SEQ ID NO: 70 - RNA, 22 nt, Homo sapiens
augugguaguuauagugauaag

SEQ ID NO: 71 - RNA, 22 nt, Homo sapiens
uaagugaugucuuuuugugugc

SEQ ID NO: 72 - RNA, 22 nt, Homo sapiens
ugacaagacuacauaucccauu

SEQ ID NO: 73 - RNA, 21 nt, Homo sapiens
uauggcuuagucaguguuucc

SEQ ID NO: 74 - RNA, 22 nt, Homo sapiens
uuuugcucuucggaagagcuug

SEQ ID NO: 75 - RNA, 22 nt, Homo sapiens
uuggagugugagagcagccugg

SEQ ID NO: 76 - RNA, 22 nt, Homo sapiens
cugcagucaucugaagauuuug

SEQ ID NO: 77 - RNA, 22 nt, Homo sapiens
uacaggacuauagaacuuuccc

SEQ ID NO: 78 - RNA, 22 nt, Homo sapiens
cauacaguaggcacuauuugua

SEQ ID NO: 79 - RNA, 22 nt, Homo sapiens
gugcaaguguaauacagcuagg

SEQ ID NO: 80 - RNA, 22 nt, Homo sapiens
uucuaaguaagucuguggggaa

SEQ ID NO: 81 - RNA, 22 nt, Homo sapiens
ugcuagaugcuguagggauuua

SEQ ID NO: 82 - RNA, 22 nt, Homo sapiens
augaagugcaugauaguugguu

SEQ ID NO: 83 - RNA, 22 nt, Homo sapiens
ugcagagaaacauuuuguauuu

SEQ ID NO: 84 - RNA, 20 nt, Homo sapiens
guaacagcacuuucccaaag

SEQ ID NO: 85 - RNA, 22 nt, Homo sapiens
cuugccuaaucugcaugauuuu

SEQ ID NO: 86 - RNA, 22 nt, Homo sapiens
uguaacaguaguuacuauucuu

SEQ ID NO: 87 - RNA, 22 nt, Homo sapiens
gcacaguggcucccgucuauaa

SEQ ID NO: 88 - RNA, 22 nt, Homo sapiens
gugcauaugcaugugcaugcac

SEQ ID NO: 89 - RNA, 22 nt, Homo sapiens
uugaggaaugucauuuguguuu

SEQ ID NO: 90 - RNA, 17 nt, Homo sapiens
auaugaauuuuggagau

SEQ ID NO: 91 - RNA, 22 nt, Homo sapiens
auagcagaccaccucucccacu

SEQ ID NO: 92 - RNA, 22 nt, Homo sapiens
gaaugauacuguuaacgaaaga

SEQ ID NO: 93 - RNA, 22 nt, Homo sapiens
auucaugggagcuacuuuaaaa

SEQ ID NO: 94 - RNA, 22 nt, Homo sapiens
gugaguuauuauuuauguaaac

SEQ ID NO: 95 - RNA, 22 nt, Homo sapiens
uugugaaugaugccgcaauaaa

SEQ ID NO: 96 - RNA, 22 nt, Homo sapiens
uugugaauggugccgcaguaaa

SEQ ID NO: 97 - RNA, 22 nt, Homo sapiens
guguaaaugagugcugaaggag

SEQ ID NO: 98 - RNA, 22 nt, Homo sapiens
gucuccggauguuguuuuuggg

SEQ ID NO: 99 - RNA, 20 nt, Homo sapiens
acugcacuccagucucuggg

SEQ ID NO: 100 - RNA, 22 nt, Homo sapiens
ucuggcuccaaagucuauuuuu

SEQ ID NO: 101 - RNA, 22 nt, Homo sapiens
uggaguauuauguaauuucaau

SEQ ID NO: 102 - RNA, 20 nt, Homo sapiens
uagccggguguugugucaug

SEQ ID NO: 103 - RNA, 22 nt, Homo sapiens
acacuguuuuaguuauuauagc

SEQ ID NO: 104 - RNA, 22 nt, Homo sapiens
guaacaccaguuauaucaguuc

SEQ ID NO: 105 - RNA, 22 nt, Homo sapiens
uaugguuuucucuuacguguug

SEQ ID NO: 106 - RNA, 22 nt, Homo sapiens
augaugcaguacuuugggaaca

SEQ ID NO: 107 - RNA, 21 nt, Homo sapiens
uugagacggagucucacucug

SEQ ID NO: 108 - RNA, 22 nt, Homo sapiens
uaaguaauugugguuuuugcca

SEQ ID NO: 109 - RNA, 22 nt, Homo sapiens
agaugcauuuuuauuggaauac

SEQ ID NO: 110 - RNA, 22 nt, Homo sapiens
ggcaaggauuagauucuccccu

SEQ ID NO: 111 - RNA, 22 nt, Homo sapiens
cacagagugagacccugucucu

SEQ ID NO: 112 - RNA, 22 nt, Homo sapiens
aucacaguggcucacaagagcc

SEQ ID NO: 113 - RNA, 22 nt, Homo sapiens
auggcagaaucaagccgacagc

SEQ ID NO: 114 - RNA, 22 nt, Homo sapiens
gggauguuuuauacugagccug

SEQ ID NO: 115 - RNA, 22 nt, Homo sapiens
gacucagucuuggauuuuuaau

SEQ ID NO: 116 - RNA, 22 nt, Homo sapiens
uaugcuuguuuauuuaagaaac

SEQ ID NO: 117 - RNA, 22 nt, Homo sapiens
guccaguguuggagguuuuacc

SEQ ID NO: 118 - RNA, 22 nt, Homo sapiens
uucaucagggagaaauaauuuc

SEQ ID NO: 119 - RNA, 22 nt, Homo sapiens
uuggaaggcugaauggccucuc

SEQ ID NO: 120 - RNA, 22 nt, Homo sapiens
uaucagaguuacacugaagacu

SEQ ID NO: 121 - RNA, 20 nt, Homo sapiens
auaugcagacacauacauac

SEQ ID NO: 122 - RNA, 22 nt, Homo sapiens
ugaaggacauaaggcagaguga

SEQ ID NO: 123 - RNA, 22 nt, Homo sapiens
aguaccauuagauuaggaugac

SEQ ID NO: 124 - RNA, 16 nt, Homo sapiens
accuguacagcaugug

SEQ ID NO: 125 - RNA, 22 nt, Homo sapiens
auagguauguaauacaaaugaa

SEQ ID NO: 126 - RNA, 22 nt, Homo sapiens
ggcaguuuguuugugaggucca

SEQ ID NO: 127 - RNA, 22 nt, Homo sapiens
auggcaguuuauucuaaaucaa

SEQ ID NO: 128 - RNA, 22 nt, Homo sapiens
ugaguuuaucuaaagaccuggg

SEQ ID NO: 129 - RNA, 22 nt, Homo sapiens
gugaacagaaccugggaucgaa

SEQ ID NO: 130 - RNA, 22 nt, Homo sapiens
ucugaaucguucccaugcagga

SEQ ID NO: 131 - RNA, 22 nt, Homo sapiens
gauggcucugcaggugagggua

SEQ ID NO: 132 - RNA, 22 nt, Homo sapiens
aacuggcacuacaucaagagcu

SEQ ID NO: 133 - RNA, 22 nt, Homo sapiens
augcauauuccugggccucacu

SEQ ID NO: 134 - RNA, 22 nt, Homo sapiens
cccuguguuguucaaggaucug

SEQ ID NO: 135 - RNA, 22 nt, Homo sapiens
guugguuuccuguaacuggaca

SEQ ID NO: 136 - RNA, 22 nt, Homo sapiens
ugguaagaggcccugaguuugu

SEQ ID NO: 137 - RNA, 22 nt, Homo sapiens
ugagcacauuuacaucaguucc

SEQ ID NO: 138 - RNA, 22 nt, Homo sapiens
ugugacaguguuacauuucaug

SEQ ID NO: 139 - RNA, 22 nt, Homo sapiens
uaucauggggacugcagccuag

SEQ ID NO: 140 - RNA, 22 nt, Homo sapiens
ucagaucacuggcgcuggcgga

SEQ ID NO: 141 - RNA, 22 nt, Homo sapiens
ugugaauggugcuuccuagaug

SEQ ID NO: 142 - RNA, 22 nt, Homo sapiens
gaagcauugauccacaggcgug

SEQ ID NO: 143 - RNA, 22 nt, Homo sapiens
accugugguuacagucugucuc

SEQ ID NO: 144 - RNA, 22 nt, Homo sapiens
auauuggucuucaagaccugug

SEQ ID NO: 145 - RNA, 22 nt, Homo sapiens
uucauaguuuauacugauauuu

SEQ ID NO: 146 - RNA, 20 nt, Homo sapiens
guccauuugcugccauugcu

SEQ ID NO: 147 - RNA, 22 nt, Homo sapiens
uuacaggacuaagcagcuuugc

SEQ ID NO: 148 - RNA, 22 nt, Homo sapiens
aguauguuuugaaaccaagaag

SEQ ID NO: 149 - RNA, 23 nt, Homo sapiens
uaagucacacagauuaauuuauu

SEQ ID NO: 150 - RNA, 22 nt, Homo sapiens
caaguguuuccuuaaauacuug

SEQ ID NO: 151 - RNA, 22 nt, Homo sapiens
cacccuugcagggacagcuuug

SEQ ID NO: 152 - RNA, 22 nt, Homo sapiens
uagauaguuaugauuugaugau

SEQ ID NO: 153 - RNA, 20 nt, Homo sapiens
uaggagcaaugagaguagaa

SEQ ID NO: 154 - RNA, 22 nt, Homo sapiens
ucacucggugaugauucuuaaa

SEQ ID NO: 155 - RNA, 22 nt, Homo sapiens
uagacccauuacguaguuucca

SEQ ID NO: 156 - RNA, 22 nt, Homo sapiens
ugcagcacaguagguuugcaau

SEQ ID NO: 157 - RNA, 22 nt, Homo sapiens
uacugcacuggaggccucagau

SEQ ID NO: 158 - RNA, 22 nt, Homo sapiens
uacccuuuaguauaaaaucaga

SEQ ID NO: 159 - RNA, 22 nt, Homo sapiens
uggagcccuaguuccucauaac

SEQ ID NO: 160 - RNA, 22 nt, Homo sapiens
cccugaagauacagaguuuggg

SEQ ID NO: 161 - RNA, 22 nt, Homo sapiens
augaauuuucugauguugggua

SEQ ID NO: 162 - RNA, 22 nt, Homo sapiens
aucacacucaccuucuguccuu

SEQ ID NO: 163 - RNA, 22 nt, Homo sapiens
ugcuuugguagaaaucuuuggu

SEQ ID NO: 164 - RNA, 22 nt, Homo sapiens
gcaguggugugugccagccuag

SEQ ID NO: 165 - RNA, 22 nt, Homo sapiens
uuaucucaguguuuguaaacaa

SEQ ID NO: 166 - RNA, 21 nt, Homo sapiens
agccaguguuccuuguggcuc

SEQ ID NO: 167 - RNA, 22 nt, Homo sapiens
ugaaacugcagugggcuuggca

SEQ ID NO: 168 - RNA, 19 nt, Homo sapiens
gaucuguugaucaaugugu

SEQ ID NO: 169 - RNA, 22 nt, Homo sapiens
cucaaaguguggucuguggguu

SEQ ID NO: 170 - RNA, 22 nt, Homo sapiens
cuuaaugcuacggcucuguguu

SEQ ID NO: 171 - RNA, 22 nt, Homo sapiens
uuugguaauguuucauugcaga

SEQ ID NO: 172 - RNA, 22 nt, Homo sapiens
ugcaccauugcauacuuaauua

SEQ ID NO: 173 - RNA, 20 nt, Homo sapiens
uuacagugggaccuuccuga

SEQ ID NO: 174 - RNA, 23 nt, Homo sapiens
ugauaacagcauaugaagauucu

SEQ ID NO: 175 - RNA, 22 nt, Homo sapiens
agucaagauggcaagguaaggc

SEQ ID NO: 176 - RNA, 22 nt, Homo sapiens
uagcagaauauaccucuuacuu

SEQ ID NO: 177 - RNA, 22 nt, Homo sapiens
ggugaguggugcuuaaguucag

SEQ ID NO: 178 - RNA, 22 nt, Homo sapiens
uaggcuuuuggacccugucucu

SEQ ID NO: 179 - RNA, 22 nt, Homo sapiens
agagguuuugcccucgagauaa

SEQ ID NO: 180 - RNA, 22 nt, Homo sapiens
ugucaccuugcucauccucgga

SEQ ID NO: 181 - RNA, 22 nt, Homo sapiens
ugaagacucauacuugaaucag

SEQ ID NO: 182 - RNA, 22 nt, Homo sapiens
gaaaugcucagggguuuuccag

SEQ ID NO: 183 - RNA, 22 nt, Homo sapiens
ggagaugugccugcucugcucu

SEQ ID NO: 184 - RNA, 22 nt, Homo sapiens
uuccuggaggggaaguguccaa

SEQ ID NO: 185 - RNA, 22 nt, Homo sapiens
auuggccaaugggacgucagca

SEQ ID NO: 186 - RNA, 22 nt, Homo sapiens
auaugcacuauacacacguaua

SEQ ID NO: 187 - RNA, 16 nt, Homo sapiens
ugaauguuuguggcug

SEQ ID NO: 188 - RNA, 22 nt, Homo sapiens
ggccuguaaacuagagacccug

SEQ ID NO: 189 - RNA, 22 nt, Homo sapiens
ugugaauggugcugcaaugaac

SEQ ID NO: 190 - RNA, 23 nt, Homo sapiens
uuguaacuggagaguaacauucc

SEQ ID NO: 191 - RNA, 22 nt, Homo sapiens
uacuccccuuguucugugagcu

SEQ ID NO: 192 - RNA, 22 nt, Homo sapiens
cugagauggagucucgcauugu

SEQ ID NO: 193 - RNA, 22 nt, Homo sapiens
gcacugggccacauuuauuuuc

SEQ ID NO: 194 - RNA, 22 nt, Homo sapiens
cacacuguuuuccauggggguu

SEQ ID NO: 195 - RNA, 20 nt, Homo sapiens
auuagagcuacauggcuaca

SEQ ID NO: 196 - RNA, 22 nt, Homo sapiens
aacaguguuuuggguuuucugg

SEQ ID NO: 197 - RNA, 22 nt, Homo sapiens
ugccugagccagguuuuaggag

SEQ ID NO: 198 - RNA, 22 nt, Homo sapiens
uaaagcuuggauuuaggcuaau

SEQ ID NO: 199 - RNA, 22 nt, Homo sapiens
guaaggcuguuaucuucacguc

SEQ ID NO: 200 - RNA, 22 nt, Homo sapiens
ugagaucuuaccuuccugccuu

SEQ ID NO: 201 - RNA, 21 nt, Homo sapiens
gcaaacauccuuugaugccag

SEQ ID NO: 202 - RNA, 23 nt, Homo sapiens
ccacaaugguugaacuagauuac

SEQ ID NO: 203 - RNA, 22 nt, Homo sapiens
uuuagggcagggacaguucuuc

SEQ ID NO: 204 - RNA, 22 nt, Homo sapiens
uggaaaguacuugaguuuguau

SEQ ID NO: 205 - RNA, 22 nt, Homo sapiens
uggguaguuuuucagcucuugc

SEQ ID NO: 206 - RNA, 22 nt, Homo sapiens
uccauuugucuauguuucuguu

SEQ ID NO: 207 - RNA, 22 nt, Homo sapiens
ugaggacugagaggcacugugg

SEQ ID NO: 208 - RNA, 19 nt, Homo sapiens
uaugcaacuuauagugcug

SEQ ID NO: 209 - RNA, 22 nt, Homo sapiens
uaagguuuuugauaugcugcug

SEQ ID NO: 210 - RNA, 22 nt, Homo sapiens
uggauauguucuuuguguaagg

SEQ ID NO: 211 - RNA, 22 nt, Homo sapiens
uuucaggcagggagcuucagug

SEQ ID NO: 212 - RNA, 22 nt, Homo sapiens
uaaggaaccagaaguggguagc

SEQ ID NO: 213 - RNA, 22 nt, Homo sapiens
auggagacaaauaaaggagagu

SEQ ID NO: 214 - RNA, 22 nt, Homo sapiens
guuauguuaguuacaaggcuag

SEQ ID NO: 215 - RNA, 22 nt, Homo sapiens
uucauguaauauuucacagcuu

SEQ ID NO: 216 - RNA, 22 nt, Homo sapiens
aaagugcaguauuugggcagga

SEQ ID NO: 217 - RNA, 22 nt, Homo sapiens
guuauauguuuggaaugaggaa

SEQ ID NO: 218 - RNA, 22 nt, Homo sapiens
auacaguaucuucuggcaagca

SEQ ID NO: 219 - RNA, 22 nt, Homo sapiens
cugguuuguaaaguuccugaga

SEQ ID NO: 220 - RNA, 22 nt, Homo sapiens
ucagguaucuuuauagcgaugc

SEQ ID NO: 221 - RNA, 22 nt, Homo sapiens
uauaugcucugggauccugaaa

SEQ ID NO: 222 - RNA, 22 nt, Homo sapiens
aguaccacgugaugccauuuuc

SEQ ID NO: 223 - RNA, 22 nt, Homo sapiens
ucacagacauugaggggaccuu

SEQ ID NO: 224 - RNA, 22 nt, Homo sapiens
ugcugguggucccauaugauua

SEQ ID NO: 225 - RNA, 22 nt, Homo sapiens
ugagauggguucugguccccug

SEQ ID NO: 226 - RNA, 22 nt, Homo sapiens
aauagcuguuuuuaauuccugc

SEQ ID NO: 227 - RNA, 22 nt, Homo sapiens
gagaugcaccuugucacguuuc

SEQ ID NO: 228 - RNA, 22 nt, Homo sapiens
ucagggacuuacaaaccagaag

SEQ ID NO: 229 - RNA, 22 nt, Homo sapiens
ucuggguuuuuccauugccggu

SEQ ID NO: 230 - RNA, 22 nt, Homo sapiens
uguucuugaguugggaguacaa

SEQ ID NO: 231 - RNA, 22 nt, Homo sapiens
uguaugucugcucuuuggaacu

SEQ ID NO: 232 - RNA, 22 nt, Homo sapiens
uauggguuuuugucuguuuacu

SEQ ID NO: 233 - RNA, 22 nt, Homo sapiens
uggaaugguaucuuguuggggu

SEQ ID NO: 234 - RNA, 22 nt, Homo sapiens
acccuguugucagaauguggau

SEQ ID NO: 235 - RNA, 22 nt, Homo sapiens
uucagaguggacagaaauuaag

SEQ ID NO: 236 - RNA, 22 nt, Homo sapiens
ugauccccucacauuauuauau

SEQ ID NO: 237 - RNA, 22 nt, Homo sapiens
agaguaguaggaugaauggacu

SEQ ID NO: 238 - RNA, 22 nt, Homo sapiens
gcucuuuugggguaauucugag

SEQ ID NO: 239 - RNA, 22 nt, Homo sapiens
gucagcaaagaggaauaguuug

SEQ ID NO: 240 - RNA, 22 nt, Homo sapiens
aacagugcuguuauaaauguac

SEQ ID NO: 241 - RNA, 22 nt, Homo sapiens
aaugauauguuauguuuagguu

SEQ ID NO: 242 - RNA, 21 nt, Homo sapiens
ugauaugguuuggauaugugu

SEQ ID NO: 243 - RNA, 21 nt, Homo sapiens
ugcauuggagaauguuucuca

SEQ ID NO: 244 - RNA, 22 nt, Homo sapiens
ccacugugguaucugauacugg

SEQ ID NO: 245 - RNA, 22 nt, Homo sapiens
uuuggcaauuugacuguauagg

SEQ ID NO: 246 - RNA, 22 nt, Homo sapiens
guaaagacacaugcacacguau

SEQ ID NO: 247 - RNA, 22 nt, Homo sapiens
ucucugauuauugcauuucauu

SEQ ID NO: 248 - RNA, 22 nt, Homo sapiens
gcagagaaacaggucuaaggag

SEQ ID NO: 249 - RNA, 22 nt, Homo sapiens
gugaggucguagucauaggcaa

SEQ ID NO: 250 - RNA, 22 nt, Homo sapiens
cugagcuagaccacuuggcucc

SEQ ID NO: 251 - RNA, 22 nt, Homo sapiens
cagauacuccuggucucaggag

SEQ ID NO: 252 - RNA, 22 nt, Homo sapiens
ucugucuugugguuugagugcc

SEQ ID NO: 253 - RNA, 22 nt, Homo sapiens
uaagcucauuccagccaugucc

SEQ ID NO: 254 - RNA, 22 nt, Homo sapiens
gagcucauuguugcuaaagaga

SEQ ID NO: 255 - RNA, 22 nt, Homo sapiens
auauguauuuuaacguguaagg

SEQ ID NO: 256 - RNA, 22 nt, Homo sapiens
acaguguuccuuuguugugacu

SEQ ID NO: 257 - RNA, 22 nt, Homo sapiens
ucugaguggcagaaugagcuga

SEQ ID NO: 258 - RNA, 22 nt, Homo sapiens
uuuggaagaugccacuguauca

SEQ ID NO: 259 - RNA, 22 nt, Homo sapiens
aggaaauguuggucccauuucu

SEQ ID NO: 260 - RNA, 22 nt, Homo sapiens
ggcaguguggcugcauauagca

SEQ ID NO: 261 - RNA, 22 nt, Homo sapiens
auacugccuuuagcaaaacagu

SEQ ID NO: 262 - RNA, 17 nt, Homo sapiens
uuucucagcccucuucu

SEQ ID NO: 263 - RNA, 22 nt, Homo sapiens
aauagcacugcuaugguuugaa

SEQ ID NO: 264 - RNA, 22 nt, Homo sapiens
gugaucaugauccugaagcauu

SEQ ID NO: 265 - RNA, 18 nt, Homo sapiens
aaaugcucuucuggaaua

SEQ ID NO: 266 - RNA, 22 nt, Homo sapiens
cuguugguguuuaaucacugca

SEQ ID NO: 267 - RNA, 22 nt, Homo sapiens
ugggaucagcugggcucucugu

SEQ ID NO: 268 - RNA, 22 nt, Homo sapiens
gcuguauugacuuuguaucaua

SEQ ID NO: 269 - RNA, 22 nt, Homo sapiens
ugaugaugaaugaucuuuuaca

SEQ ID NO: 270 - RNA, 22 nt, Homo sapiens
ucuuggguuguuggcuucuccu

SEQ ID NO: 271 - RNA, 22 nt, Homo sapiens
uugcaguagucugaaagcaaua

SEQ ID NO: 272 - RNA, 22 nt, Homo sapiens
uuaugguacaugugcacaaugu

SEQ ID NO: 273 - RNA, 22 nt, Homo sapiens
uuaaucucaggaguuugggacc

SEQ ID NO: 274 - RNA, 22 nt, Homo sapiens
gcaaggacucccugggucauuc

SEQ ID NO: 275 - RNA, 22 nt, Homo sapiens
guuguggagucuucuguucugg

SEQ ID NO: 276 - RNA, 22 nt, Homo sapiens
uuggucaaaucugaugggagaa

SEQ ID NO: 277 - RNA, 22 nt, Homo sapiens
uuugagcauggaaauggcauga

SEQ ID NO: 278 - RNA, 22 nt, Homo sapiens
ucaaaugauucagaagccaccu

SEQ ID NO: 279 - RNA, 22 nt, Homo sapiens
auuaaauguuggacguauacau

SEQ ID NO: 280 - RNA, 22 nt, Homo sapiens
acauugcauauggcacccucuu

SEQ ID NO: 281 - RNA, 22 nt, Homo sapiens
uuggauggugauaugguuugga

SEQ ID NO: 282 - RNA, 22 nt, Homo sapiens
auugcuuaagucccuguauuag

SEQ ID NO: 283 - RNA, 22 nt, Homo sapiens
gugagaugugacuucugccucu

SEQ ID NO: 284 - RNA, 22 nt, Homo sapiens
ugcauauguugagaugcauauu

SEQ ID NO: 285 - RNA, 22 nt, Homo sapiens
gauauguuagggggagaaguua

SEQ ID NO: 286 - RNA, 22 nt, Homo sapiens
cacugcgaccuccaccucccgg

SEQ ID NO: 287 - RNA, 22 nt, Homo sapiens
cuaugcuucuuaaauuaguuau

SEQ ID NO: 288 - RNA, 22 nt, Homo sapiens
cugcagaucuuggggcuugcca

SEQ ID NO: 289 - RNA, 21 nt, Homo sapiens
cuaaucucacccuuuucuggg

SEQ ID NO: 290 - RNA, 21 nt, Homo sapiens
aucagagacccaggcuuccuc

SEQ ID NO: 291 - RNA, 22 nt, Homo sapiens
ucacaugucagccguggggaag

SEQ ID NO: 292 - RNA, 22 nt, Homo sapiens
ucaaggcaguggccuuccuucu

SEQ ID NO: 293 - RNA, 22 nt, Homo sapiens
uuugacuacugaugguguacgc

SEQ ID NO: 294 - RNA, 22 nt, Homo sapiens
aacuggcauguuuuaaggcuua

SEQ ID NO: 295 - RNA, 22 nt, Homo sapiens
ugguccccaauacuucuauaga

SEQ ID NO: 296 - RNA, 20 nt, Homo sapiens
gagaacugagaugcguuuga

SEQ ID NO: 297 - RNA, 22 nt, Homo sapiens
uggaagugucugugcccagcuc

SEQ ID NO: 298 - RNA, 22 nt, Homo sapiens
gagaucaauucauggcauaguu

SEQ ID NO: 299 - RNA, 22 nt, Homo sapiens
cucaaagugcugggauuggcca

SEQ ID NO: 300 - RNA, 20 nt, Homo sapiens
gucacuggcccagggcuugu

SEQ ID NO: 301 - RNA, 22 nt, Homo sapiens
ucaauguaucuccaagaauuga

SEQ ID NO: 302 - RNA, 23 nt, Homo sapiens
ggauggaaaguuuugagggccac

SEQ ID NO: 303 - RNA, 22 nt, Homo sapiens
uuccuacugcccauuaaaaugg

SEQ ID NO: 304 - RNA, 22 nt, Homo sapiens
uguuaugaagaugccugguaca

SEQ ID NO: 305 - RNA, 22 nt, Homo sapiens
ugagacaugugaacuguaguuc

SEQ ID NO: 306 - RNA, 22 nt, Homo sapiens
gucaguucuugugguugcauuc

SEQ ID NO: 307 - RNA, 22 nt, Homo sapiens
uugggcaauaggaagcaggugg

SEQ ID NO: 308 - RNA, 22 nt, Homo sapiens
agugauguggaguuuggaugga

SEQ ID NO: 309 - RNA, 22 nt, Homo sapiens
uugcaugguggaacuuggagcu

SEQ ID NO: 310 - RNA, 22 nt, Homo sapiens
cugcaagaaucguaguauuuga

SEQ ID NO: 311 - RNA, 22 nt, Homo sapiens
uugggucaguuccuugacuccu

SEQ ID NO: 312 - RNA, 22 nt, Homo sapiens
gugggguagcaggcuccuaucu

SEQ ID NO: 313 - RNA, 22 nt, Homo sapiens
ucauagucuaagguucuuuugc

SEQ ID NO: 314 - RNA, 22 nt, Homo sapiens
gugagcauaacaacagaguuua

SEQ ID NO: 315 - RNA, 22 nt, Homo sapiens
ucagguaguuugugggagauga

SEQ ID NO: 316 - RNA, 20 nt, Homo sapiens
ugcauguccucacuuacuug

SEQ ID NO: 317 - RNA, 21 nt, Homo sapiens
gagugcaaauaaagagagggc

SEQ ID NO: 318 - RNA, 18 nt, Homo sapiens
ugacaguuucuuuauauu

SEQ ID NO: 319 - RNA, 22 nt, Homo sapiens
uguagucauuccuuuuugcuuu

SEQ ID NO: 320 - RNA, 22 nt, Homo sapiens
gugagauccucucuuauauggg

SEQ ID NO: 321 - RNA, 22 nt, Homo sapiens
uguugcacuccagccuggguga

SEQ ID NO: 322 - RNA, 22 nt, Homo sapiens
aagcuccauuucugccaugaga

SEQ ID NO: 323 - RNA, 22 nt, Homo sapiens
agguaauuuuaucauuauguga

SEQ ID NO: 324 - RNA, 22 nt, Homo sapiens
acugcacuccagccuggaccac

SEQ ID NO: 325 - RNA, 22 nt, Homo sapiens
ugcccuguaucccacuguuuca

SEQ ID NO: 326 - RNA, 22 nt, Homo sapiens
ugacggaggcauuggaagcuug

SEQ ID NO: 327 - RNA, 22 nt, Homo sapiens
ucagugauugcuuucauggaaa

SEQ ID NO: 328 - RNA, 22 nt, Homo sapiens
ugaguaguauucuaugguaugu

SEQ ID NO: 329 - RNA, 22 nt, Homo sapiens
uucaguaguaaguuggaacucu

SEQ ID NO: 330 - RNA, 22 nt, Homo sapiens
gacuagugcccucagaccuaga

SEQ ID NO: 331 - RNA, 22 nt, Homo sapiens
ugagguuauuuguucaagaagu

SEQ ID NO: 332 - RNA, 22 nt, Homo sapiens
uauguuaucaaaaagcuaagga

SEQ ID NO: 333 - RNA, 22 nt, Homo sapiens
gagaaugagaggggaaggccac

SEQ ID NO: 334 - RNA, 22 nt, Homo sapiens
uuggcauuuuggacacccagga

SEQ ID NO: 335 - RNA, 22 nt, Homo sapiens
ucacgguggaaucccagauccc

SEQ ID NO: 336 - RNA, 22 nt, Homo sapiens
aaguauuagugaggauauggaa

SEQ ID NO: 337 - RNA, 22 nt, Homo sapiens
uuggcucugcgucucgcggacg

SEQ ID NO: 338 - RNA, 22 nt, Homo sapiens
gcacaguaggugguaggacuuu

SEQ ID NO: 339 - RNA, 22 nt, Homo sapiens
auugccacaucucagaggcaga

SEQ ID NO: 340 - RNA, 22 nt, Homo sapiens
augguguauugauuauugcugu

SEQ ID NO: 341 - RNA, 22 nt, Homo sapiens
ucccugaaucucagguucugua

SEQ ID NO: 342 - RNA, 22 nt, Homo sapiens
guauuuguugcagcagcacuau

SEQ ID NO: 343 - RNA, 22 nt, Homo sapiens
gagcuaguagagugcacccggc

SEQ ID NO: 344 - RNA, 22 nt, Homo sapiens
ucagugguuaaaagauucuaga

SEQ ID NO: 345 - RNA, 22 nt, Homo sapiens
uugcucaccugagaagaauaga

SEQ ID NO: 346 - RNA, 22 nt, Homo sapiens
uugaauagugacuuugauucug

SEQ ID NO: 347 - RNA, 22 nt, Homo sapiens
uuaacagugaccccugguggcc

SEQ ID NO: 348 - RNA, 22 nt, Homo sapiens
auucaccauggcuaccaagggu

SEQ ID NO: 349 - RNA, 22 nt, Homo sapiens
uuauugcuaaaucaugaccaca

SEQ ID NO: 350 - RNA, 22 nt, Homo sapiens
uuucugguuaauuucuaagagc

SEQ ID NO: 351 - RNA, 22 nt, Homo sapiens
ugagucauuuccuuaugcuacu

SEQ ID NO: 352 - RNA, 22 nt, Homo sapiens
uucaguacacguguucucauuu

SEQ ID NO: 353 - RNA, 22 nt, Homo sapiens
guagaggaauggcuccaccaua

SEQ ID NO: 354 - RNA, 22 nt, Homo sapiens
aggugcucuuccuguaggucac

SEQ ID NO: 355 - RNA, 18 nt, Homo sapiens
uugcauaguguauccaaa

SEQ ID NO: 356 - RNA, 22 nt, Homo sapiens
augaccaugauccuugccgacc

SEQ ID NO: 357 - RNA, 22 nt, Homo sapiens
gggguauguaagugagugagug

SEQ ID NO: 358 - RNA, 22 nt, Homo sapiens
ucaugcaucuuguggaauuuga

SEQ ID NO: 359 - RNA, 22 nt, Homo sapiens
gguauguuuagaccauuuacau

SEQ ID NO: 360 - RNA, 22 nt, Homo sapiens
ugggaauaugauacaggucuuu

SEQ ID NO: 361 - RNA, 22 nt, Homo sapiens
guacucuggaguaggccuaauu

SEQ ID NO: 362 - RNA, 20 nt, Homo sapiens
agugguuuucaaauaugucu

SEQ ID NO: 363 - RNA, 22 nt, Homo sapiens
cuuggcacugcucacccuccuu

SEQ ID NO: 364 - RNA, 19 nt, Homo sapiens
uggaugacugucugggucu

SEQ ID NO: 365 - RNA, 22 nt, Homo sapiens
uaaguauuuuaauuccuggcau

SEQ ID NO: 366 - RNA, 21 nt, Homo sapiens
uaggccgggugcaggaugcuu

SEQ ID NO: 367 - RNA, 22 nt, Homo sapiens
cugugaagaaagucauugguag

SEQ ID NO: 368 - RNA, 22 nt, Homo sapiens
cuggaaggaaaaacaaccacag

SEQ ID NO: 369 - RNA, 22 nt, Homo sapiens
uuacacaguaggucccuaguaa

SEQ ID NO: 370 - RNA, 22 nt, Homo sapiens
guuguggcuugugauuaagcac

SEQ ID NO: 371 - RNA, 22 nt, Homo sapiens
accacguagaugagagaguuaa

SEQ ID NO: 372 - RNA, 20 nt, Homo sapiens
ggaauguuaaucuccaugau

SEQ ID NO: 373 - RNA, 22 nt, Homo sapiens
uguuauguucuacuuuuaggug

SEQ ID NO: 374 - RNA, 22 nt, Homo sapiens
uaguuguugcagguaggaugua

SEQ ID NO: 375 - RNA, 22 nt, Homo sapiens
uuguuauguuggucaguaaugu

SEQ ID NO: 376 - RNA, 22 nt, Homo sapiens
agcugcauuuacuuuugcacaa

SEQ ID NO: 377 - RNA, 22 nt, Homo sapiens
ugugaugugaugagaaguuccu

SEQ ID NO: 378 - RNA, 22 nt, Homo sapiens
uagcuucuccauagcuccaugu

SEQ ID NO: 379 - RNA, 18 nt, Homo sapiens
acccuucagcacugggcc

SEQ ID NO: 380 - RNA, 21 nt, Homo sapiens
aacagugcuuaguagauguuc

SEQ ID NO: 381 - RNA, 22 nt, Homo sapiens
uuccuaguccugagucucugcg

SEQ ID NO: 382 - RNA, 22 nt, Homo sapiens
uuugacaaugugugcuuguauu

SEQ ID NO: 383 - RNA, 22 nt, Homo sapiens
uauugauuuucaguguucagcu

SEQ ID NO: 384 - RNA, 22 nt, Homo sapiens
aauagugcugcaaaaacauacg

SEQ ID NO: 385 - RNA, 22 nt, Homo sapiens
uaauugcaguucuguguuauau

SEQ ID NO: 386 - RNA, 18 nt, Homo sapiens
uaacuggugugagauggu

SEQ ID NO: 387 - RNA, 22 nt, Homo sapiens
gagaaugcaugaaagacuuaca

SEQ ID NO: 388 - RNA, 22 nt, Homo sapiens
cuggaauguuccuaaagauuca

SEQ ID NO: 389 - RNA, 22 nt, Homo sapiens
auagacacugaaaucccugcca

SEQ ID NO: 390 - RNA, 22 nt, Homo sapiens
ccaaggaauacccucccuuuuu

SEQ ID NO: 391 - RNA, 22 nt, Homo sapiens
augagaacauaucaagugauug

SEQ ID NO: 392 - RNA, 20 nt, Homo sapiens
acuaaaucucauuuuaugca

SEQ ID NO: 393 - RNA, 22 nt, Homo sapiens
uauggcauuuuguaagggcuug

SEQ ID NO: 394 - RNA, 22 nt, Homo sapiens
uugguccacugugaaauuggga

SEQ ID NO: 395 - RNA, 22 nt, Homo sapiens
guagcagaauaucagauaauuu

SEQ ID NO: 396 - RNA, 21 nt, Homo sapiens
uugugccaaacccuggaggga

SEQ ID NO: 397 - RNA, 22 nt, Homo sapiens
augaagagaaaguggaucuugg

SEQ ID NO: 398 - RNA, 22 nt, Homo sapiens
uuccuacuguucaucaggaacc

SEQ ID NO: 399 - RNA, 22 nt, Homo sapiens
aucauugugcaucuucauucca

SEQ ID NO: 400 - RNA, 21 nt, Homo sapiens
uggaccccuuccuugcaccau

SEQ ID NO: 401 - RNA, 22 nt, Homo sapiens
uugccauggaguagaauugaag

SEQ ID NO: 402 - RNA, 22 nt, Homo sapiens
gucauggaggaugaauggccaa

SEQ ID NO: 403 - RNA, 22 nt, Homo sapiens
ggagguagucuuucccuuauca

SEQ ID NO: 404 - RNA, 21 nt, Homo sapiens
ugugaccucugucucugaguc

SEQ ID NO: 405 - RNA, 22 nt, Homo sapiens
ugacucaagagccugacucauc

SEQ ID NO: 406 - RNA, 22 nt, Homo sapiens
ugaguagauccaagacuguccu

SEQ ID NO: 407 - RNA, 22 nt, Homo sapiens
cugagguuaggaguuugagacc

SEQ ID NO: 408 - RNA, 22 nt, Homo sapiens
aucagauuccacauuuuaucag

SEQ ID NO: 409 - RNA, 20 nt, Homo sapiens
cucagugcacccccauaaaa

SEQ ID NO: 410 - RNA, 23 nt, Homo sapiens
ugcuauguaagcauuuauuaaau

SEQ ID NO: 411 - RNA, 22 nt, Homo sapiens
uaaagauaaggcucgcuuggau

SEQ ID NO: 412 - RNA, 20 nt, Homo sapiens
guguaagagcaagcuuccua

SEQ ID NO: 413 - RNA, 22 nt, Homo sapiens
uaucaccauguccguuuuaaaa

SEQ ID NO: 414 - RNA, 22 nt, Homo sapiens
uugaguauuugcagucugaaca

SEQ ID NO: 415 - RNA, 22 nt, Homo sapiens
gcugcuguaccagaugugguua

SEQ ID NO: 416 - RNA, 21 nt, Homo sapiens
uggaccccuuccuuacaucau

SEQ ID NO: 417 - RNA, 23 nt, Homo sapiens
uuggaaugagaccuaagaguuuu

SEQ ID NO: 418 - RNA, 22 nt, Homo sapiens
ugcaagucaucuguccuucaga

SEQ ID NO: 419 - RNA, 22 nt, Homo sapiens
augauuguucucacucaagaga

SEQ ID NO: 420 - RNA, 22 nt, Homo sapiens
ucuguggugggcuccacccagu

SEQ ID NO: 421 - RNA, 22 nt, Homo sapiens
ugugguccucugaaggcuuuuc

SEQ ID NO: 422 - RNA, 22 nt, Homo sapiens
uaggaaguuucuugauuacuua

SEQ ID NO: 423 - RNA, 22 nt, Homo sapiens
uuaagagugggaguuggccaca

SEQ ID NO: 424 - RNA, 22 nt, Homo sapiens
gacaguguggcgauuccucaag

SEQ ID NO: 425 - RNA, 22 nt, Homo sapiens
uaggcacacaucuacuacaaau

SEQ ID NO: 426 - RNA, 22 nt, Homo sapiens
augagaccagcagaaaaccugu

SEQ ID NO: 427 - RNA, 22 nt, Homo sapiens
uaugacuuuggaaaaauuacuu

SEQ ID NO: 428 - RNA, 22 nt, Homo sapiens
uucuauguuugaaaaugccaaa

SEQ ID NO: 429 - RNA, 22 nt, Homo sapiens
agucacagccuuuuacuuuaga

SEQ ID NO: 430 - RNA, 22 nt, Homo sapiens
ugagagaugaacucugauaugu

SEQ ID NO: 431 - RNA, 20 nt, Homo sapiens
uauaacaguuuggacccagu

SEQ ID NO: 432 - RNA, 22 nt, Homo sapiens
gaguagaacugguuaucuaaua

SEQ ID NO: 433 - RNA, 23 nt, Homo sapiens
acauguauagacuuuuuuuccuu

SEQ ID NO: 434 - RNA, 22 nt, Homo sapiens
ugaaacauacacucugaugggg

SEQ ID NO: 435 - RNA, 22 nt, Homo sapiens
aguagcauuggggggcauccuc

SEQ ID NO: 436 - RNA, 22 nt, Homo sapiens
agcagcgacacccuguggugag

SEQ ID NO: 437 - RNA, 22 nt, Homo sapiens
auggcccugggaaaggaggcau

SEQ ID NO: 438 - RNA, 22 nt, Homo sapiens
uaaacacucacuucauagccau

SEQ ID NO: 439 - RNA, 22 nt, Homo sapiens
uauuuggauagucuggaaaaaa

SEQ ID NO: 440 - RNA, 22 nt, Homo sapiens
guggcaagaauguacaaaaggu

SEQ ID NO: 441 - RNA, 22 nt, Homo sapiens
guauaguaguacaaaaguuuuu

SEQ ID NO: 442 - RNA, 22 nt, Homo sapiens
uuugucacucuuggagguuguu

SEQ ID NO: 443 - RNA, 22 nt, Homo sapiens
uugcuauguugcccagucugga

SEQ ID NO: 444 - RNA, 22 nt, Homo sapiens
ucaaauguucccuguacuggcc

SEQ ID NO: 445 - RNA, 22 nt, Homo sapiens
uuucccugaaggcucugaaguc

SEQ ID NO: 446 - RNA, 22 nt, Homo sapiens
uggaagcaugcaaucugugggg

SEQ ID NO: 447 - RNA, 22 nt, Homo sapiens
uacgccuguaauaucagcauuu

SEQ ID NO: 448 - RNA, 22 nt, Homo sapiens
guaccuguauguucauuucaca

SEQ ID NO: 449 - RNA, 22 nt, Homo sapiens
uuugugcuccuaugagaaucua

SEQ ID NO: 450 - RNA, 22 nt, Homo sapiens
gucagaugcagauuccaguucu

SEQ ID NO: 451 - RNA, 22 nt, Homo sapiens
uggagagcaaaaucaauccaaa

SEQ ID NO: 452 - RNA, 22 nt, Homo sapiens
cauugcacuccagcccagguga

SEQ ID NO: 453 - RNA, 22 nt, Homo sapiens
uuccaauguuccguguugcagu

SEQ ID NO: 454 - RNA, 22 nt, Homo sapiens
uuaaaugucuguagaugugcug

SEQ ID NO: 455 - RNA, 22 nt, Homo sapiens
uugcaacauguauucuggugau

SEQ ID NO: 456 - RNA, 22 nt, Homo sapiens
uuagauguuuagaagugggcca

SEQ ID NO: 457 - RNA, 22 nt, Homo sapiens
ucacagcggucgaacuaauuug

SEQ ID NO: 458 - RNA, 22 nt, Homo sapiens
gggguaggcuacacugaguucc

SEQ ID NO: 459 - RNA, 22 nt, Homo sapiens
uuguaaagucugucucagucag

SEQ ID NO: 460 - RNA, 22 nt, Homo sapiens
uucuugcugaauugugcccuuc

SEQ ID NO: 461 - RNA, 22 nt, Homo sapiens
aagagguaauaacaaagcuucu

SEQ ID NO: 462 - RNA, 22 nt, Homo sapiens
gugaacuguuugaggaagagaa

SEQ ID NO: 463 - RNA, 22 nt, Homo sapiens
uuuugcuuuuccucggucccac

SEQ ID NO: 464 - RNA, 22 nt, Homo sapiens
uuaugguuuuuagcagaguaau

SEQ ID NO: 465 - RNA, 22 nt, Homo sapiens
ugcuauguccccacccaaaucu

SEQ ID NO: 466 - RNA, 22 nt, Homo sapiens
agaauucugucauguuuauauu

SEQ ID NO: 467 - RNA, 22 nt, Homo sapiens
cacugcauuacucaugagcaug

SEQ ID NO: 468 - RNA, 22 nt, Homo sapiens
augccagggagaauuguucaag

SEQ ID NO: 469 - RNA, 20 nt, Homo sapiens
gacauguugguuugcugcac

SEQ ID NO: 470 - RNA, 22 nt, Homo sapiens
ucacaaggcaggaaugaaaggg

SEQ ID NO: 471 - RNA, 22 nt, Homo sapiens
guauggguuuuguuucuucugg

SEQ ID NO: 472 - RNA, 22 nt, Homo sapiens
gaccacauuccacacaggcuuu

SEQ ID NO: 473 - RNA, 22 nt, Homo sapiens
gugaaugcauuaagaaggggga

SEQ ID NO: 474 - RNA, 17 nt, Homo sapiens
agcaccacacucucuug

SEQ ID NO: 475 - RNA, 22 nt, Homo sapiens
aguaccauuacucacuuauuuu

SEQ ID NO: 476 - RNA, 22 nt, Homo sapiens
aucaaauugucauuuuaaggau

SEQ ID NO: 477 - RNA, 22 nt, Homo sapiens
aaaggcacugaucuuauccagu

SEQ ID NO: 478 - RNA, 22 nt, Homo sapiens
uucuaguacucccuggagcugg

SEQ ID NO: 479 - RNA, 22 nt, Homo sapiens
auaguagagagggcaaaaugcu

SEQ ID NO: 480 - RNA, 22 nt, Homo sapiens
agcugguauuuugucgaggacu

SEQ ID NO: 481 - RNA, 22 nt, Homo sapiens
uuuguauguuggagauuggaga

SEQ ID NO: 482 - RNA, 22 nt, Homo sapiens
uugcacuccagccuuggggaga

SEQ ID NO: 483 - RNA, 22 nt, Homo sapiens
ggucauagagaauucaccagga

SEQ ID NO: 484 - RNA, 22 nt, Homo sapiens
uucucuguggauugggugagag

SEQ ID NO: 485 - RNA, 22 nt, Homo sapiens
ugacaguaaacagucuugauua

SEQ ID NO: 486 - RNA, 22 nt, Homo sapiens
guugcacagucuuuccuggacu

SEQ ID NO: 487 - RNA, 22 nt, Homo sapiens
cugugauuauauaguuaaggua

SEQ ID NO: 488 - RNA, 22 nt, Homo sapiens
acagaaccauucacuccccugg

SEQ ID NO: 489 - RNA, 22 nt, Homo sapiens
ugauguugacuguaggcagaga

SEQ ID NO: 490 - RNA, 22 nt, Homo sapiens
uucacugcacuccagccugggu

SEQ ID NO: 491 - RNA, 22 nt, Homo sapiens
uggcaagaaccacaguuacuuu

SEQ ID NO: 492 - RNA, 22 nt, Homo sapiens
aagcugcauuuucuagaugcuu

SEQ ID NO: 493 - RNA, 22 nt, Homo sapiens
ggagaauguaauugguauuuug

SEQ ID NO: 494 - RNA, 22 nt, Homo sapiens
gauuuuuggggaagccucuuau

SEQ ID NO: 495 - RNA, 22 nt, Homo sapiens
uacauaguuacuuccauuucca

SEQ ID NO: 496 - RNA, 22 nt, Homo sapiens
acccuguugagcaacuggccau

SEQ ID NO: 497 - RNA, 22 nt, Homo sapiens
ggaagacuuagaguagcaucag

SEQ ID NO: 498 - RNA, 22 nt, Homo sapiens
uuaugcuguuuucuggagauuu

SEQ ID NO: 499 - RNA, 22 nt, Homo sapiens
gucaaugcauccaugaauggcu

SEQ ID NO: 500 - RNA, 22 nt, Homo sapiens
augaaguauuaggacacauuua

SEQ ID NO: 501 - RNA, 22 nt, Homo sapiens
ugagacgaagucuugcucuguu

SEQ ID NO: 502 - RNA, 22 nt, Homo sapiens
acauucagcuguuguuucaaug

SEQ ID NO: 503 - RNA, 22 nt, Homo sapiens
gucauggagggacauaacuaac

SEQ ID NO: 504 - RNA, 22 nt, Homo sapiens
gacaccauuucaguacuagguu

SEQ ID NO: 505 - RNA, 22 nt, Homo sapiens
auuuggguaaugagugcaaggg

SEQ ID NO: 506 - RNA, 23 nt, Homo sapiens
aauaucacaguggguguacaccc

SEQ ID NO: 507 - RNA, 22 nt, Homo sapiens
augcagagucccagccccuagc

SEQ ID NO: 508 - RNA, 22 nt, Homo sapiens
ggucauagagcaagcaaacagc

SEQ ID NO: 509 - RNA, 22 nt, Homo sapiens
cuaucucauugguuuuugaaag

SEQ ID NO: 510 - RNA, 23 nt, Homo sapiens
agauggcauuucaguucuuuagg

SEQ ID NO: 511 - RNA, 22 nt, Homo sapiens
aggagguagggugugaaacagc

SEQ ID NO: 512 - RNA, 22 nt, Homo sapiens
agaguacugacguuugcaaauu

SEQ ID NO: 513 - RNA, 22 nt, Homo sapiens
uugaucugugucccugcccaau

SEQ ID NO: 514 - RNA, 22 nt, Homo sapiens
uuaagagcauggugccagguug

SEQ ID NO: 515 - RNA, 20 nt, Homo sapiens
gugagaacaugugguauuug

SEQ ID NO: 516 - RNA, 22 nt, Homo sapiens
cacccuaucagauguccagaga

SEQ ID NO: 517 - RNA, 22 nt, Homo sapiens
ucccaguguguagcuugucucu

SEQ ID NO: 518 - RNA, 22 nt, Homo sapiens
uugcuucauucaacauugaggg

SEQ ID NO: 519 - RNA, 22 nt, Homo sapiens
uaucccaauguaauaucacaaa

SEQ ID NO: 520 - RNA, 22 nt, Homo sapiens
gggagguagguauuagcuuuuc

SEQ ID NO: 521 - RNA, 22 nt, Homo sapiens
ucugguuccuuggcuucggguc

SEQ ID NO: 522 - RNA, 22 nt, Homo sapiens
ucaagugcauaugcuaacgguu

SEQ ID NO: 523 - RNA, 22 nt, Homo sapiens
aaaugcugucaaauuguguucu

SEQ ID NO: 524 - RNA, 22 nt, Homo sapiens
agacuuagagagucuauucuau

SEQ ID NO: 525 - RNA, 22 nt, Homo sapiens
aaugugcacuauuagggugaua

SEQ ID NO: 526 - RNA, 22 nt, Homo sapiens
gucuaguuuuaauacauuaaga

SEQ ID NO: 527 - RNA, 22 nt, Homo sapiens
uagugacauugcugggaaugcu

SEQ ID NO: 528 - RNA, 22 nt, Homo sapiens
uuccauugugucaucuuggugg

SEQ ID NO: 529 - RNA, 20 nt, Homo sapiens
auggaccuggauuaacagca

SEQ ID NO: 530 - RNA, 22 nt, Homo sapiens
guaaguauuaggugugagauuc

SEQ ID NO: 531 - RNA, 22 nt, Homo sapiens
uaguaucacaagguguacaccc

SEQ ID NO: 532 - RNA, 22 nt, Homo sapiens
uuccacaaugguugaacuaauu

SEQ ID NO: 533 - RNA, 22 nt, Homo sapiens
uuauacacugugggaguguaaa

SEQ ID NO: 534 - RNA, 22 nt, Homo sapiens
aggcauguggcucuguucugac

SEQ ID NO: 535 - RNA, 22 nt, Homo sapiens
ugagauguuccaaugacuauua

SEQ ID NO: 536 - RNA, 21 nt, Homo sapiens
auuguauguaaaccaaaugag

SEQ ID NO: 537 - RNA, 22 nt, Homo sapiens
uugacauaguuucugaaauaga

SEQ ID NO: 538 - RNA, 22 nt, Homo sapiens
ggucaguguuaucaccgaagga

SEQ ID NO: 539 - RNA, 22 nt, Homo sapiens
auaauugcuaagugaagauggu

SEQ ID NO: 540 - RNA, 22 nt, Homo sapiens
cuucuugagggccugcugggaa

SEQ ID NO: 541 - RNA, 22 nt, Homo sapiens
uuugcuuaaaguccuuguggga

SEQ ID NO: 542 - RNA, 22 nt, Homo sapiens
uauuguuuuucccaggagucua

SEQ ID NO: 543 - RNA, 22 nt, Homo sapiens
ugcaaaugcugcuauuucucuu

SEQ ID NO: 544 - RNA, 19 nt, Homo sapiens
ggaaaugucuauuaagauc

SEQ ID NO: 545 - RNA, 22 nt, Homo sapiens
acagagcaaugagcuacggucu

SEQ ID NO: 546 - RNA, 22 nt, Homo sapiens
uucccaguaaacucuaucccuc

SEQ ID NO: 547 - RNA, 22 nt, Homo sapiens
uugaacugguaguuggaaaucu

SEQ ID NO: 548 - RNA, 22 nt, Homo sapiens
ugagaacuaaugaagaauuuau

SEQ ID NO: 549 - RNA, 22 nt, Homo sapiens
uugaggucuuugagcaaacgca

SEQ ID NO: 550 - RNA, 23 nt, Homo sapiens
aggagcuuagaaguugccauugc

SEQ ID NO: 551 - RNA, 22 nt, Homo sapiens
auuuuugguuucaccugcacgc

SEQ ID NO: 552 - RNA, 21 nt, Homo sapiens
cccugguguuuggaguuugag

SEQ ID NO: 553 - RNA, 19 nt, Homo sapiens
gugagcacagacaauacaa

SEQ ID NO: 554 - RNA, 22 nt, Homo sapiens
augauaaguuauuagaagaaga

SEQ ID NO: 555 - RNA, 22 nt, Homo sapiens
uuacauguuguggguuguggcc

SEQ ID NO: 556 - RNA, 23 nt, Homo sapiens
agaaaugucuauucagggucccu

SEQ ID NO: 557 - RNA, 22 nt, Homo sapiens
guguguaaauggcagugagcuc

SEQ ID NO: 558 - RNA, 22 nt, Homo sapiens
gggaagguaaucauuacuugau

SEQ ID NO: 559 - RNA, 22 nt, Homo sapiens
aaggugguuuucucuuggaguc

SEQ ID NO: 560 - RNA, 23 nt, Homo sapiens
caucacagagccuuccuugacuc

SEQ ID NO: 561 - RNA, 22 nt, Homo sapiens
ucauugguagcucauggaaccg

SEQ ID NO: 562 - RNA, 22 nt, Homo sapiens
uuaagugaauuaucuaacaugu

SEQ ID NO: 563 - RNA, 22 nt, Homo sapiens
ugagacugaguuucacuuuugu

SEQ ID NO: 564 - RNA, 18 nt, Homo sapiens
uagugcuguucucaugau

SEQ ID NO: 565 - RNA, 22 nt, Homo sapiens
aucacagcuacuccucugucuu

SEQ ID NO: 566 - RNA, 22 nt, Homo sapiens
cugaaagguauacgcuuguuau

SEQ ID NO: 567 - RNA, 22 nt, Homo sapiens
ggcaagaaccucaauuaccuuu

SEQ ID NO: 568 - RNA, 20 nt, Homo sapiens
uagcacacauguagaauagu

SEQ ID NO: 569 - RNA, 22 nt, Homo sapiens
gagaacuaaugguuugauaagg

SEQ ID NO: 570 - RNA, 22 nt, Homo sapiens
cacccgugacgcugucugaaau

SEQ ID NO: 571 - RNA, 22 nt, Homo sapiens
uagggcuuuuccaagcugccac

SEQ ID NO: 572 - RNA, 18 nt, Homo sapiens
ugucuuagagcuugaccc

SEQ ID NO: 573 - RNA, 21 nt, Homo sapiens
uccugagagaggaguaacucu

SEQ ID NO: 574 - RNA, 22 nt, Homo sapiens
ucugacuagacaagcaguguac

SEQ ID NO: 575 - RNA, 22 nt, Homo sapiens
uagcucagcccagcuaagcuca

SEQ ID NO: 576 - RNA, 20 nt, Homo sapiens
ggagguuguauaaguacauc

SEQ ID NO: 577 - RNA, 22 nt, Homo sapiens
uggccuguaacccucucauagg

SEQ ID NO: 578 - RNA, 22 nt, Homo sapiens
uucagaucaucccagcuccacu

SEQ ID NO: 579 - RNA, 22 nt, Homo sapiens
uuugaaaguaauuugguuggug

SEQ ID NO: 580 - RNA, 22 nt, Homo sapiens
cucagugguugauuuauuuauc

SEQ ID NO: 581 - RNA, 22 nt, Homo sapiens
acugcacuccagccuugugaca

SEQ ID NO: 582 - RNA, 22 nt, Homo sapiens
gaguaaaugucaaguacuuagg

SEQ ID NO: 583 - RNA, 18 nt, Homo sapiens
cuggaugucgaguguguu

SEQ ID NO: 584 - RNA, 21 nt, Homo sapiens
cccagguucucugaggguaga

SEQ ID NO: 585 - RNA, 22 nt, Homo sapiens
auggucuuuuuguuaugagaga

SEQ ID NO: 586 - RNA, 19 nt, Homo sapiens
cuuguacucggcgcaguug

SEQ ID NO: 587 - RNA, 22 nt, Homo sapiens
ucuaaaguacuacuacuguugg

SEQ ID NO: 588 - RNA, 22 nt, Homo sapiens
augagauuguuuguacuccaca

SEQ ID NO: 589 - RNA, 22 nt, Homo sapiens
uggaaucuagagaaaugcaaac

SEQ ID NO: 590 - RNA, 23 nt, Homo sapiens
ugcaccacuacacacucuugggu

SEQ ID NO: 591 - RNA, 22 nt, Homo sapiens
uuugauacuggguguggacaaa

SEQ ID NO: 592 - RNA, 22 nt, Homo sapiens
augcacuuggcaggaugauucc

SEQ ID NO: 593 - RNA, 22 nt, Homo sapiens
ucacaauucacuacaggcuuga

SEQ ID NO: 594 - RNA, 20 nt, Homo sapiens
cuugcuccccuuguucuaga

SEQ ID NO: 595 - RNA, 22 nt, Homo sapiens
uucauaguaacaguaacuaugg

SEQ ID NO: 596 - RNA, 22 nt, Homo sapiens
ccaucacacugugauuauuauc

SEQ ID NO: 597 - RNA, 22 nt, Homo sapiens
ugccauagagacucaacagccu

SEQ ID NO: 598 - RNA, 22 nt, Homo sapiens
gauaacagauaaugucaguuau

SEQ ID NO: 599 - RNA, 22 nt, Homo sapiens
uuugcauauguugaaccagccu

SEQ ID NO: 600 - RNA, 22 nt, Homo sapiens
aaacccauauaccagcugugcu

SEQ ID NO: 601 - RNA, 22 nt, Homo sapiens
uguuugcuuaacguggagccag

SEQ ID NO: 602 - RNA, 21 nt, Homo sapiens
auacuugcauccuuggagaga

SEQ ID NO: 603 - RNA, 20 nt, Homo sapiens
uguaaucuaaguuuuaagcc

SEQ ID NO: 604 - RNA, 21 nt, Homo sapiens
uuccagugagccuagaugccu

SEQ ID NO: 605 - RNA, 22 nt, Homo sapiens
uugauaguuuaauuaaugcuag

SEQ ID NO: 606 - RNA, 22 nt, Homo sapiens
uaaggcuaggaauucucugaag

SEQ ID NO: 607 - RNA, 20 nt, Homo sapiens
augcaaacccugcuuugugg

SEQ ID NO: 608 - RNA, 22 nt, Homo sapiens
uagcaugacacuuguugaaugc

SEQ ID NO: 609 - RNA, 22 nt, Homo sapiens
gugaaagcaucugacugugcca

SEQ ID NO: 610 - RNA, 16 nt, Homo sapiens
ugccuuauuccagcuc

SEQ ID NO: 611 - RNA, 22 nt, Homo sapiens
aauggcacacaccuggucuaac

SEQ ID NO: 612 - RNA, 22 nt, Homo sapiens
uggccaguuuuuaauugggucu

SEQ ID NO: 613 - RNA, 22 nt, Homo sapiens
gcugguguucaggcccucaguc

SEQ ID NO: 614 - RNA, 22 nt, Homo sapiens
agauguuguucaucugauuguu

SEQ ID NO: 615 - RNA, 22 nt, Homo sapiens
acacauuagcaagugcuguuau

SEQ ID NO: 616 - RNA, 20 nt, Homo sapiens
ugggaacaugugguauaugg

SEQ ID NO: 617 - RNA, 22 nt, Homo sapiens
uuauagcagugcaggaacagac

SEQ ID NO: 618 - RNA, 22 nt, Homo sapiens
uuucacguuggggaguugagug

SEQ ID NO: 619 - RNA, 22 nt, Homo sapiens
ccuuuguuaguuugcugagaau

SEQ ID NO: 620 - RNA, 22 nt, Homo sapiens
gugaaaugaaucuggaaauauu

SEQ ID NO: 621 - RNA, 22 nt, Homo sapiens
uugaggaguacugauuagguau

SEQ ID NO: 622 - RNA, 22 nt, Homo sapiens
uggcuguguccucucccaaauc

SEQ ID NO: 623 - RNA, 22 nt, Homo sapiens
uuggccuccuggucauauccag

SEQ ID NO: 624 - RNA, 22 nt, Homo sapiens
uacaugugcaggucuguggggg

SEQ ID NO: 625 - RNA, 22 nt, Homo sapiens
uaagucacuccagguuaaagug

SEQ ID NO: 626 - RNA, 22 nt, Homo sapiens
agagauaguuuccaacucauac

SEQ ID NO: 627 - RNA, 18 nt, Homo sapiens
ugcagcaucaguacccag

SEQ ID NO: 628 - RNA, 22 nt, Homo sapiens
acucugucuaguuguaaaauuu

SEQ ID NO: 629 - RNA, 22 nt, Homo sapiens
cauacaagcuacaaucacaaag

SEQ ID NO: 630 - RNA, 22 nt, Homo sapiens
gugcacaucgugcagguuuguu

SEQ ID NO: 631 - RNA, 22 nt, Homo sapiens
auggauauuuuuugaacauaga

SEQ ID NO: 632 - RNA, 17 nt, Homo sapiens
ggaaugaauuccagccc

SEQ ID NO: 633 - RNA, 22 nt, Homo sapiens
uuauguccuuuaacuucaucac

SEQ ID NO: 634 - RNA, 22 nt, Homo sapiens
cagcuguuguuaugucugcagg

SEQ ID NO: 635 - RNA, 22 nt, Homo sapiens
ggacauuaacugcaagauagau

SEQ ID NO: 636 - RNA, 22 nt, Homo sapiens
auagcaagaugauugauccauu

SEQ ID NO: 637 - RNA, 22 nt, Homo sapiens
uuuuguacgccuguguccauca

SEQ ID NO: 638 - RNA, 22 nt, Homo sapiens
auuguaguuugcuauggcaaua

SEQ ID NO: 639 - RNA, 22 nt, Homo sapiens
aucacuuucuauuucugugcca

SEQ ID NO: 640 - RNA, 22 nt, Homo sapiens
auucagaggggcagcugucuug

SEQ ID NO: 641 - RNA, 22 nt, Homo sapiens
guugcagcacacaggcugucag

SEQ ID NO: 642 - RNA, 22 nt, Homo sapiens
ugagcugagauuaagcugcugc

SEQ ID NO: 643 - RNA, 22 nt, Homo sapiens
gugauuauccacgucuuuguga

SEQ ID NO: 644 - RNA, 20 nt, Homo sapiens
uaguuggugauacagugcau

SEQ ID NO: 645 - RNA, 22 nt, Homo sapiens
ucacugcacucuccgccuugcg

SEQ ID NO: 646 - RNA, 21 nt, Homo sapiens
uggcaacauggauggauucug

SEQ ID NO: 647 - RNA, 22 nt, Homo sapiens
acaagugcuuuuccuggagaca

SEQ ID NO: 648 - RNA, 22 nt, Homo sapiens
aucuuuggugcaugauacuuug

SEQ ID NO: 649 - RNA, 22 nt, Homo sapiens
acuucauucucuggaucagaau

SEQ ID NO: 650 - RNA, 22 nt, Homo sapiens
gagcuagggucaugcuacugca

SEQ ID NO: 651 - RNA, 22 nt, Homo sapiens
uuuuugguugguaggcuauuaa

SEQ ID NO: 652 - RNA, 19 nt, Homo sapiens
uagaugucuuugcauagau

SEQ ID NO: 653 - RNA, 22 nt, Homo sapiens
uuccaguauuugggcaagcgca

SEQ ID NO: 654 - RNA, 22 nt, Homo sapiens
auuugguugggugcgguggcuu

SEQ ID NO: 655 - RNA, 22 nt, Homo sapiens
cagugcuuuaucaaguccucca

SEQ ID NO: 656 - RNA, 22 nt, Homo sapiens
uuggagugugucuuauuccauu

SEQ ID NO: 657 - RNA, 22 nt, Homo sapiens
gaaaguguugagauuacaggca

SEQ ID NO: 658 - RNA, 22 nt, Homo sapiens
augaacagagccuugagaaccu

SEQ ID NO: 659 - RNA, 22 nt, Homo sapiens
uugugccccuucucagucgggc

SEQ ID NO: 660 - RNA, 22 nt, Homo sapiens
auugauaguuuaauaggaauug

SEQ ID NO: 661 - RNA, 22 nt, Homo sapiens
agagguuuuggggcugagagcu

SEQ ID NO: 662 - RNA, 22 nt, Homo sapiens
gcagcauuaccaagacauggca

SEQ ID NO: 663 - RNA, 22 nt, Homo sapiens
acacaaugguaaguguuugugu

SEQ ID NO: 664 - RNA, 22 nt, Homo sapiens
gaaugcuaaguuuccucccugu

SEQ ID NO: 665 - RNA, 22 nt, Homo sapiens
uaauagcucggauaaacaugau

SEQ ID NO: 666 - RNA, 22 nt, Homo sapiens
aagagagcuaugugcauaauua

SEQ ID NO: 667 - RNA, 22 nt, Homo sapiens
caucaaaguggagggaaggacc

SEQ ID NO: 668 - RNA, 22 nt, Homo sapiens
agcagugucauuuucuggugag

SEQ ID NO: 669 - RNA, 19 nt, Homo sapiens
auaccucugugaaccccug

SEQ ID NO: 670 - RNA, 22 nt, Homo sapiens
cuaaucugugcauagaagaggc

SEQ ID NO: 671 - RNA, 17 nt, Homo sapiens
gugagguggguaguauc

SEQ ID NO: 672 - RNA, 22 nt, Homo sapiens
uucucaaggagccuucguaacu

SEQ ID NO: 673 - RNA, 22 nt, Homo sapiens
ccaguauuuuauugaggguuuu

SEQ ID NO: 674 - RNA, 22 nt, Homo sapiens
agucagugcauaagaaugaagu

SEQ ID NO: 675 - RNA, 22 nt, Homo sapiens
ucagugcgugcauagccuggau

SEQ ID NO: 676 - RNA, 22 nt, Homo sapiens
uauggcuuuucacuuaaguccu

SEQ ID NO: 677 - RNA, 22 nt, Homo sapiens
uuaggagacuggauaucucuuu

SEQ ID NO: 678 - RNA, 23 nt, Homo sapiens
ugacaaccucaugcuuugucaug

SEQ ID NO: 679 - RNA, 22 nt, Homo sapiens
ccaguguauuuuugggaccugc

SEQ ID NO: 680 - RNA, 22 nt, Homo sapiens
aagagguaggaaauggucauuu

SEQ ID NO: 681 - RNA, 22 nt, Homo sapiens
cugacauggggauccaccuuag

SEQ ID NO: 682 - RNA, 22 nt, Homo sapiens
agggcaguguuaggacugucug

SEQ ID NO: 683 - RNA, 20 nt, Homo sapiens
uuuaagacaugcugaauuga

SEQ ID NO: 684 - RNA, 22 nt, Homo sapiens
ugauaugugaguauaugguuau

SEQ ID NO: 685 - RNA, 22 nt, Homo sapiens
uuggccuuuucaaugccucuuu

SEQ ID NO: 686 - RNA, 22 nt, Homo sapiens
uccaguguuucuuccacuauuu

SEQ ID NO: 687 - RNA, 22 nt, Homo sapiens
gagguaagaaagucaguccuuc

SEQ ID NO: 688 - RNA, 22 nt, Homo sapiens
gggaagaaggagugguuuacuc

SEQ ID NO: 689 - RNA, 22 nt, Homo sapiens
uguagguguacauacaugguua

SEQ ID NO: 690 - RNA, 22 nt, Homo sapiens
uaucccuuagagcggggugguu

SEQ ID NO: 691 - RNA, 22 nt, Homo sapiens
aucugguauuacugcaacugua

SEQ ID NO: 692 - RNA, 19 nt, Homo sapiens
uggcuagaggccaggcguu

SEQ ID NO: 693 - RNA, 22 nt, Homo sapiens
cccaguguguuguggauauuua

SEQ ID NO: 694 - RNA, 22 nt, Homo sapiens
uugcauagacaauauuaaucuu

SEQ ID NO: 695 - RNA, 22 nt, Homo sapiens
gauaaauccagauucugaugua

SEQ ID NO: 696 - RNA, 22 nt, Homo sapiens
uuugucauagcagcaggaaugg

SEQ ID NO: 697 - RNA, 22 nt, Homo sapiens
gcagcaucaaaucacacaagau

SEQ ID NO: 698 - RNA, 19 nt, Homo sapiens
uccaugagcccacagugau

SEQ ID NO: 699 - RNA, 21 nt, Homo sapiens
ggaauuuagggaaugauuuag

SEQ ID NO: 700 - RNA, 22 nt, Homo sapiens
ccugucuugauuaaauuacuua

SEQ ID NO: 701 - RNA, 22 nt, Homo sapiens
ccuuggcacuuugccacagugc

SEQ ID NO: 702 - RNA, 22 nt, Homo sapiens
cucacugucaacauguauuugg

SEQ ID NO: 703 - RNA, 22 nt, Homo sapiens
ugaguagaaauaaacgcaaacu

SEQ ID NO: 704 - RNA, 20 nt, Homo sapiens
ugaguagaggaguucuauca

SEQ ID NO: 705 - RNA, 22 nt, Homo sapiens
uuaguaguuugaguggggguua

SEQ ID NO: 706 - RNA, 22 nt, Homo sapiens
guggcaaguguuccaagaggcg

SEQ ID NO: 707 - RNA, 22 nt, Homo sapiens
uuuugccggcauguugggcuuc

SEQ ID NO: 708 - RNA, 22 nt, Homo sapiens
gagacugagucucgcucugccg

SEQ ID NO: 709 - RNA, 22 nt, Homo sapiens
aagugucuuaccgggagggagu

SEQ ID NO: 710 - RNA, 22 nt, Homo sapiens
caagugcuugaugaaugaucaa

SEQ ID NO: 711 - RNA, 22 nt, Homo sapiens
cauugcaacuucugccucccag

SEQ ID NO: 712 - RNA, 22 nt, Homo sapiens
uacaagcuaaaauggaagauca

SEQ ID NO: 713 - RNA, 22 nt, Homo sapiens
agaaccaaucccacauggauac

SEQ ID NO: 714 - RNA, 22 nt, Homo sapiens
auaaaguagaggugaggugcau

SEQ ID NO: 715 - RNA, 22 nt, Homo sapiens
augugacuggaucauggggacg

SEQ ID NO: 716 - RNA, 22 nt, Homo sapiens
aggcuuuuggagguggcuuucu

SEQ ID NO: 717 - RNA, 20 nt, Homo sapiens
agagguuuugauagguucug

SEQ ID NO: 718 - RNA, 22 nt, Homo sapiens
gugcuauguuauccagcaagau

SEQ ID NO: 719 - RNA, 22 nt, Homo sapiens
guauagcaaugccccacaccug

SEQ ID NO: 720 - RNA, 22 nt, Homo sapiens
augagaaugauucuguuauggu

SEQ ID NO: 721 - RNA, 22 nt, Homo sapiens
gucaguuucacucagcuggaac

SEQ ID NO: 722 - RNA, 22 nt, Homo sapiens
caucgcacuccagccuggguaa

SEQ ID NO: 723 - RNA, 22 nt, Homo sapiens
auguggaaauguauaugugucu

SEQ ID NO: 724 - RNA, 21 nt, Homo sapiens
uugaguugaagcaaggaggga

SEQ ID NO: 725 - RNA, 23 nt, Homo sapiens
uuucacaguagcuggaucagccu

SEQ ID NO: 726 - RNA, 22 nt, Homo sapiens
auugcacucuagccuuggcgac

SEQ ID NO: 727 - RNA, 22 nt, Homo sapiens
cucccagugacccaggaacagg

SEQ ID NO: 728 - RNA, 22 nt, Homo sapiens
gcauggaaggcgcuuugugacu

SEQ ID NO: 729 - RNA, 22 nt, Homo sapiens
aauaaagcauggcuacuccaua

SEQ ID NO: 730 - RNA, 22 nt, Homo sapiens
caucacauucugagauacugag

SEQ ID NO: 731 - RNA, 22 nt, Homo sapiens
ugagccaugguuagcuucucau

SEQ ID NO: 732 - RNA, 22 nt, Homo sapiens
uugagcuuuuuacuuguccaau

SEQ ID NO: 733 - RNA, 22 nt, Homo sapiens
uugcagugugacgacuauauuu

SEQ ID NO: 734 - RNA, 22 nt, Homo sapiens
uugguccauuacauugaugaca

SEQ ID NO: 735 - RNA, 22 nt, Homo sapiens
auauaugcuaagugcuaauaaa

SEQ ID NO: 736 - RNA, 22 nt, Homo sapiens
ugaggucauguucugucagguu

SEQ ID NO: 737 - RNA, 22 nt, Homo sapiens
uuacuggcuuucacugguguua

SEQ ID NO: 738 - RNA, 23 nt, Homo sapiens
uugugucccuacccaaaucucau

SEQ ID NO: 739 - RNA, 22 nt, Homo sapiens
cucauuaguuguuuuaagauga

SEQ ID NO: 740 - RNA, 22 nt, Homo sapiens
ucuguggucagaguccuuggcc

SEQ ID NO: 741 - RNA, 22 nt, Homo sapiens
ugaacagcacguuuauucagaa

SEQ ID NO: 742 - RNA, 22 nt, Homo sapiens
agcuuguguuuuucuaaguauc

SEQ ID NO: 743 - RNA, 22 nt, Homo sapiens
uaaggcuuugcuggacucaguc

SEQ ID NO: 744 - RNA, 22 nt, Homo sapiens
agcugguuuauuucuauauccu

SEQ ID NO: 745 - RNA, 20 nt, Homo sapiens
auugaagacuccggggcaga

SEQ ID NO: 746 - RNA, 22 nt, Homo sapiens
uuacugcuuaagugauucaaca

SEQ ID NO: 747 - RNA, 22 nt, Homo sapiens
ugggaucagucuggaauauuga

SEQ ID NO: 748 - RNA, 22 nt, Homo sapiens
uaagugaaggaaguguguuuac

SEQ ID NO: 749 - RNA, 18 nt, Homo sapiens
ugauaugguuuggcucug

SEQ ID NO: 750 - RNA, 22 nt, Homo sapiens
uucucagugcuaucuuuuaugc

SEQ ID NO: 751 - RNA, 22 nt, Homo sapiens
uuuaaagcuaaaauauguuuau

SEQ ID NO: 752 - RNA, 22 nt, Homo sapiens
ucaguggauuuaaccugaauca

SEQ ID NO: 753 - RNA, 22 nt, Homo sapiens
uuugugcuccuguugagaaucu

SEQ ID NO: 754 - RNA, 22 nt, Homo sapiens
uuggcauuguggauggaaucau

SEQ ID NO: 755 - RNA, 22 nt, Homo sapiens
guauggaauuugugaccuuaua

SEQ ID NO: 756 - RNA, 22 nt, Homo sapiens
guguaauaaucguggacuaugu

SEQ ID NO: 757 - RNA, 22 nt, Homo sapiens
ugagguguuugugcaccaucug

SEQ ID NO: 758 - RNA, 22 nt, Homo sapiens
uugaauguaugcuggguuuacu

SEQ ID NO: 759 - RNA, 22 nt, Homo sapiens
uggcuuucuggggcuucuguuc

SEQ ID NO: 760 - RNA, 22 nt, Homo sapiens
ucaugaaguaguuaacugguug

SEQ ID NO: 761 - RNA, 22 nt, Homo sapiens
acuccauuuggacucugggagg

SEQ ID NO: 762 - RNA, 22 nt, Homo sapiens
uggguaaaucucuguucagggc

SEQ ID NO: 763 - RNA, 22 nt, Homo sapiens
caucacuuugccuccgucucua

SEQ ID NO: 764 - RNA, 22 nt, Homo sapiens
ucaguguuuggaaucucaauuu

SEQ ID NO: 765 - RNA, 22 nt, Homo sapiens
uggcuccguuguacaggcugga

SEQ ID NO: 766 - RNA, 23 nt, Homo sapiens
agacugaaguaucugagacucag

SEQ ID NO: 767 - RNA, 22 nt, Homo sapiens
uauugcacuuuuccauaggagu

SEQ ID NO: 768 - RNA, 22 nt, Homo sapiens
cuggagcaaaggugacucuugu

SEQ ID NO: 769 - RNA, 22 nt, Homo sapiens
auaaaugcuuagaucuguauau

SEQ ID NO: 770 - RNA, 22 nt, Homo sapiens
agcaccaugggcugaguaagug

SEQ ID NO: 771 - RNA, 22 nt, Homo sapiens
ugucuuuguuaguuguccuagu

SEQ ID NO: 772 - RNA, 23 nt, Homo sapiens
agccugguuucccugcuucuccc

SEQ ID NO: 773 - RNA, 22 nt, Homo sapiens
cugugcaaacaagugaaccccu

SEQ ID NO: 774 - RNA, 22 nt, Homo sapiens
guggacaugaauuuuggaggca

SEQ ID NO: 775 - RNA, 22 nt, Homo sapiens
ggacaucauuaccauggaccca

SEQ ID NO: 776 - RNA, 22 nt, Homo sapiens
auugacaguuggccaguaagug

SEQ ID NO: 777 - RNA, 22 nt, Homo sapiens
gagaaugagauuaugguuacau

SEQ ID NO: 778 - RNA, 22 nt, Homo sapiens
uagagcaugugccauacguaca

SEQ ID NO: 779 - RNA, 22 nt, Homo sapiens
ucaguaaauguuaggacauuuc

SEQ ID NO: 780 - RNA, 22 nt, Homo sapiens
auauugcuuagugaugaagucu

SEQ ID NO: 781 - RNA, 22 nt, Homo sapiens
aaugacagugcuaaagaacccu

SEQ ID NO: 782 - RNA, 17 nt, Homo sapiens
augaagucaucauuuuu

SEQ ID NO: 783 - RNA, 22 nt, Homo sapiens
ucauggcauuguuaaggguuuu

SEQ ID NO: 784 - RNA, 22 nt, Homo sapiens
uggguccccuacucuuuccaca

SEQ ID NO: 785 - RNA, 22 nt, Homo sapiens
ucucauggagucaggagcagaa

SEQ ID NO: 786 - RNA, 22 nt, Homo sapiens
guauggcauuuguggauuggcc

SEQ ID NO: 787 - RNA, 22 nt, Homo sapiens
uacaaagugggaaacgaagguu

SEQ ID NO: 788 - RNA, 22 nt, Homo sapiens
ggagucugacuuauaggaaccu

SEQ ID NO: 789 - RNA, 22 nt, Homo sapiens
agaucaauugcugauucgcucu

SEQ ID NO: 790 - RNA, 22 nt, Homo sapiens
uuagguaauauauugcugcuuu

SEQ ID NO: 791 - RNA, 22 nt, Homo sapiens
auaugacugccagggcccaguc

SEQ ID NO: 792 - RNA, 22 nt, Homo sapiens
uguggaaauaaaagaaagguua

SEQ ID NO: 793 - RNA, 22 nt, Homo sapiens
augagguauccaagcccagaaa

SEQ ID NO: 794 - RNA, 22 nt, Homo sapiens
guacaugugcacagugugcagg

SEQ ID NO: 795 - RNA, 22 nt, Homo sapiens
cucgaagacuaagcaucucuga

SEQ ID NO: 796 - RNA, 22 nt, Homo sapiens
acuuuuguuauacagugugaua

SEQ ID NO: 797 - RNA, 22 nt, Homo sapiens
cauugcacuccagcuugggcaa

SEQ ID NO: 798 - RNA, 21 nt, Homo sapiens
ugcauggagaacacugagggu

SEQ ID NO: 799 - RNA, 20 nt, Homo sapiens
uaacuguggcuucuuuuggc

SEQ ID NO: 800 - RNA, 22 nt, Homo sapiens
uauuauuguccuucuauaccca

SEQ ID NO: 801 - RNA, 22 nt, Homo sapiens
aaauugcacaaguggugauuug

SEQ ID NO: 802 - RNA, 23 nt, Homo sapiens
ccuguagaaugucugugauacuu

SEQ ID NO: 803 - RNA, 20 nt, Homo sapiens
uggauugugaugggauuugc

SEQ ID NO: 804 - RNA, 22 nt, Homo sapiens
uuacacguaauaucacggugug

SEQ ID NO: 805 - RNA, 22 nt, Homo sapiens
uaccacauuguagagggcauuc

SEQ ID NO: 806 - RNA, 22 nt, Homo sapiens
uauuccacuuacaugagguauc

SEQ ID NO: 807 - RNA, 17 nt, Homo sapiens
acagugucuaugaaaug

SEQ ID NO: 808 - RNA, 22 nt, Homo sapiens
aaggcaagaaaauggauucucc

SEQ ID NO: 809 - RNA, 19 nt, Homo sapiens
uucauacagugagagcagc

SEQ ID NO: 810 - RNA, 22 nt, Homo sapiens
uugcacuccauccuggguugac

SEQ ID NO: 811 - RNA, 22 nt, Homo sapiens
cuagaagcauauucagaacaga

SEQ ID NO: 812 - RNA, 22 nt, Homo sapiens
acccuuugucaaucaguacuaa

SEQ ID NO: 813 - RNA, 22 nt, Homo sapiens
uagggcuugugaucagguguag

SEQ ID NO: 814 - RNA, 22 nt, Homo sapiens
cacagugaacaauauccucugu

SEQ ID NO: 815 - RNA, 22 nt, Homo sapiens
acaucacuguuugauugauuga

SEQ ID NO: 816 - RNA, 22 nt, Homo sapiens
uacagaauucugucccuugagu

SEQ ID NO: 817 - RNA, 22 nt, Homo sapiens
cauggcauuucaagauuuacca

SEQ ID NO: 818 - RNA, 22 nt, Homo sapiens
gauguguuuaucacccaguccu

SEQ ID NO: 819 - RNA, 22 nt, Homo sapiens
accccugugacggguauuugag

SEQ ID NO: 820 - RNA, 22 nt, Homo sapiens
cugguuguuacaugcuugccag

SEQ ID NO: 821 - RNA, 23 nt, Homo sapiens
uucugccacugaaaaugccucag

SEQ ID NO: 822 - RNA, 22 nt, Homo sapiens
uuucauggcgaggcuucauggg

SEQ ID NO: 823 - RNA, 22 nt, Homo sapiens
agacucauuuuuaucgagcaug

SEQ ID NO: 824 - RNA, 22 nt, Homo sapiens
gugguagaaauguagaugcuag

SEQ ID NO: 825 - RNA, 22 nt, Homo sapiens
auccauugcucaagagaaguca

SEQ ID NO: 826 - RNA, 22 nt, Homo sapiens
gagugcauaugggccuguguca

SEQ ID NO: 827 - RNA, 22 nt, Homo sapiens
uuuugcaccauccuaauaguau

SEQ ID NO: 828 - RNA, 22 nt, Homo sapiens
aucacugggcaagauaucauga

SEQ ID NO: 829 - RNA, 22 nt, Homo sapiens
uuuuuggauaaugguacaugua

SEQ ID NO: 830 - RNA, 20 nt, Homo sapiens
gggcaaguaugugggaaguc

SEQ ID NO: 831 - RNA, 22 nt, Homo sapiens
uuguuaugggguggcuugaaag

SEQ ID NO: 832 - RNA, 22 nt, Homo sapiens
cugauacugaaagcuguugguu

SEQ ID NO: 833 - RNA, 22 nt, Homo sapiens
gagaugauuugccccauguauu

SEQ ID NO: 834 - RNA, 22 nt, Homo sapiens
uugugucccuacccaaaucuca

SEQ ID NO: 835 - RNA, 22 nt, Homo sapiens
ccacaguugaaauuuugacugu

SEQ ID NO: 836 - RNA, 21 nt, Homo sapiens
aggucaguaagaaugcagcac

SEQ ID NO: 837 - RNA, 22 nt, Homo sapiens
acaccaucuccuuauuucucuu

SEQ ID NO: 838 - RNA, 22 nt, Homo sapiens
uggcauguuggguguugacucc

SEQ ID NO: 839 - RNA, 20 nt, Homo sapiens
auguucuggaggacagaagc

SEQ ID NO: 840 - RNA, 22 nt, Homo sapiens
uggacagaaacauguuuucagu

SEQ ID NO: 841 - RNA, 22 nt, Homo sapiens
aacagagcuggugacuccaggu

SEQ ID NO: 842 - RNA, 22 nt, Homo sapiens
augaggugauuucuguucgggu

SEQ ID NO: 843 - RNA, 22 nt, Homo sapiens
guugcucaggcuggagugcagu

SEQ ID NO: 844 - RNA, 21 nt, Homo sapiens
uguagcagcaugauucauagu

SEQ ID NO: 845 - RNA, 23 nt, Homo sapiens
gaguacauuaaaagcccagacug

SEQ ID NO: 846 - RNA, 22 nt, Homo sapiens
uaagacugccccagacagcaag

SEQ ID NO: 847 - RNA, 23 nt, Homo sapiens
uuugugcuaauuuaugggcucuu

SEQ ID NO: 848 - RNA, 19 nt, Homo sapiens
aauggcuuuuccuguuccc

SEQ ID NO: 849 - RNA, 22 nt, Homo sapiens
augacucagaucuguuccuggu

SEQ ID NO: 850 - RNA, 22 nt, Homo sapiens
ucaacacaguuaaauggggaaa

SEQ ID NO: 851 - RNA, 22 nt, Homo sapiens
aagagugucuuugugcuggccc

SEQ ID NO: 852 - RNA, 22 nt, Homo sapiens
gaagguacgcuuaggaaaugau

SEQ ID NO: 853 - RNA, 22 nt, Homo sapiens
ugagauucucugauuguagguc

SEQ ID NO: 854 - RNA, 22 nt, Homo sapiens
augguauuuugugauaccuugu

SEQ ID NO: 855 - RNA, 22 nt, Homo sapiens
ucaaagugagcuccuucucacu

SEQ ID NO: 856 - RNA, 22 nt, Homo sapiens
gacuuugguagaggaaaaaucu

SEQ ID NO: 857 - RNA, 22 nt, Homo sapiens
acugcacuccagacucugucuc

SEQ ID NO: 858 - RNA, 22 nt, Homo sapiens
agcucacagccuagcacuguga

SEQ ID NO: 859 - RNA, 19 nt, Homo sapiens
uggcacauguauacauaug

SEQ ID NO: 860 - RNA, 22 nt, Homo sapiens
augaggacaucuuccuuaugga

SEQ ID NO: 861 - RNA, 22 nt, Homo sapiens
ugugaaaucagauagccuuuuu

SEQ ID NO: 862 - RNA, 22 nt, Homo sapiens
cccuguguuuagcugaagguuu

SEQ ID NO: 863 - RNA, 17 nt, Homo sapiens
uuuaaugcuaggacucu

SEQ ID NO: 864 - RNA, 22 nt, Homo sapiens
ccacugcacuccagcccggcaa

SEQ ID NO: 865 - RNA, 22 nt, Homo sapiens
ucaaaaccucagagaguagagc

SEQ ID NO: 866 - RNA, 20 nt, Homo sapiens
acugcauuuaguccucagga

SEQ ID NO: 867 - RNA, 21 nt, Homo sapiens
ugagaguaguguauuauucuc

SEQ ID NO: 868 - RNA, 22 nt, Homo sapiens
guguucauggaauuugcaauug

SEQ ID NO: 869 - RNA, 22 nt, Homo sapiens
ucuggguuuuuacaauguuuac

SEQ ID NO: 870 - RNA, 22 nt, Homo sapiens
uggauagaaauguacuguuuuc

SEQ ID NO: 871 - RNA, 22 nt, Homo sapiens
uaggcacugagaauaugaggau

SEQ ID NO: 872 - RNA, 22 nt, Homo sapiens
ugugguuuuucacauuuagaga

SEQ ID NO: 873 - RNA, 22 nt, Homo sapiens
uugugguugaugaagacugucu

SEQ ID NO: 874 - RNA, 22 nt, Homo sapiens
aguagcaauggcucugagcuau

SEQ ID NO: 875 - RNA, 20 nt, Homo sapiens
cucagauuauucugaagcaa

SEQ ID NO: 876 - RNA, 22 nt, Homo sapiens
uugauauguuguuagauucagu

SEQ ID NO: 877 - RNA, 22 nt, Homo sapiens
uugugguugacuaaauuuguaa

SEQ ID NO: 878 - RNA, 21 nt, Homo sapiens
uaugagucugcaagaaccaca

SEQ ID NO: 879 - RNA, 22 nt, Homo sapiens
ucucaguggcacccccaacacc

SEQ ID NO: 880 - RNA, 22 nt, Homo sapiens
uuuggcuguuucuggacuaaga

SEQ ID NO: 881 - RNA, 22 nt, Homo sapiens
uauagcacugaaagaggugauu

SEQ ID NO: 882 - RNA, 22 nt, Homo sapiens
caaaggugcuuuccagguccaa

SEQ ID NO: 883 - RNA, 22 nt, Homo sapiens
ggaggcuaguaaaaagguagaa

SEQ ID NO: 884 - RNA, 22 nt, Homo sapiens
acugcaaugucgaauagagaug

SEQ ID NO: 885 - RNA, 22 nt, Homo sapiens
ccuguagcauccaagaagcugc

SEQ ID NO: 886 - RNA, 22 nt, Homo sapiens
caauggcacgaucucgucucac

SEQ ID NO: 887 - RNA, 22 nt, Homo sapiens
ugcuucauuggccaccaggaag

SEQ ID NO: 888 - RNA, 22 nt, Homo sapiens
uggaaucuacuaaagcaaaauc

SEQ ID NO: 889 - RNA, 22 nt, Homo sapiens
auccucugagagaguuucauaa

SEQ ID NO: 890 - RNA, 22 nt, Homo sapiens
auuguacuccagccugggcaag

SEQ ID NO: 891 - RNA, 22 nt, Homo sapiens
ugauaugaaguucaaaccaggu

SEQ ID NO: 892 - RNA, 22 nt, Homo sapiens
auacacgugccuuguuggugua

SEQ ID NO: 893 - RNA, 22 nt, Homo sapiens
cuauguaccuggaacuguauua

SEQ ID NO: 894 - RNA, 22 nt, Homo sapiens
uugggaaugcuaaaccucuauu

SEQ ID NO: 895 - RNA, 22 nt, Homo sapiens
uaaaguguuuguuauuaaaggu

SEQ ID NO: 896 - RNA, 22 nt, Homo sapiens
ugagaugcaaaaugagaauugu

SEQ ID NO: 897 - RNA, 20 nt, Homo sapiens
uugaggugugaggggcagag

SEQ ID NO: 898 - RNA, 22 nt, Homo sapiens
agcuccaucuucagggguucag

SEQ ID NO: 899 - RNA, 22 nt, Homo sapiens
aucagaguggguuuuaaaagug

SEQ ID NO: 900 - RNA, 22 nt, Homo sapiens
uguggaaauuguuguauuuaau

SEQ ID NO: 901 - RNA, 22 nt, Homo sapiens
uggagauguuuaaaauccacug

SEQ ID NO: 902 - RNA, 22 nt, Homo sapiens
uaugggauuucauuaagugucu

SEQ ID NO: 903 - RNA, 22 nt, Homo sapiens
uuauuagguugguggaaaagua

SEQ ID NO: 904 - RNA, 23 nt, Homo sapiens
guuaagugaauguguacucuauu

SEQ ID NO: 905 - RNA, 20 nt, Homo sapiens
caucaccuggcaggauuugu

SEQ ID NO: 906 - RNA, 22 nt, Homo sapiens
ucauaguagucacuuaauaaau

SEQ ID NO: 907 - RNA, 22 nt, Homo sapiens
uuuuugagguauaguguggcua

SEQ ID NO: 908 - RNA, 22 nt, Homo sapiens
aaaggauucuaauggaaaugcu

SEQ ID NO: 909 - RNA, 22 nt, Homo sapiens
aagcuuucaacuguuugccauu

SEQ ID NO: 910 - RNA, 22 nt, Homo sapiens
gugaauguuuucuuacauggua

SEQ ID NO: 911 - RNA, 22 nt, Homo sapiens
uugauagguuuuauguauaguu

SEQ ID NO: 912 - RNA, 22 nt, Homo sapiens
cauguauagauuccauaguggu

SEQ ID NO: 913 - RNA, 22 nt, Homo sapiens
uagggcuuuaguuugcuugugu

SEQ ID NO: 914 - RNA, 22 nt, Homo sapiens
uagguaaguaugugugaugggg

SEQ ID NO: 915 - RNA, 22 nt, Homo sapiens
uagugaaugucacuggcuguug

SEQ ID NO: 916 - RNA, 22 nt, Homo sapiens
aaaggcacuagaaguuaccuuu

SEQ ID NO: 917 - RNA, 22 nt, Homo sapiens
ucacugugguuugggaaagugc

SEQ ID NO: 918 - RNA, 22 nt, Homo sapiens
gcuuguguuugcuccccagaau

SEQ ID NO: 919 - RNA, 20 nt, Homo sapiens
agcaucagugguaguguugc

SEQ ID NO: 920 - RNA, 22 nt, Homo sapiens
uuucagguauuuaagggccguu

SEQ ID NO: 921 - RNA, 22 nt, Homo sapiens
guguggcaggugggggcucaga

SEQ ID NO: 922 - RNA, 19 nt, Homo sapiens
ugcauugucugggaaaugg

SEQ ID NO: 923 - RNA, 19 nt, Homo sapiens
uuuagaucuuuuaugcagc

SEQ ID NO: 924 - RNA, 22 nt, Homo sapiens
ugagauggagucuugucgccua

SEQ ID NO: 925 - RNA, 22 nt, Homo sapiens
gcagaauugguuucuucuaagg

SEQ ID NO: 926 - RNA, 22 nt, Homo sapiens
ggucacauugcuagcauggguu

SEQ ID NO: 927 - RNA, 22 nt, Homo sapiens
guuugcauagugcugggagggg

SEQ ID NO: 928 - RNA, 22 nt, Homo sapiens
uagaccaauuggcauauaguaa

SEQ ID NO: 929 - RNA, 22 nt, Homo sapiens
gucugagcauggggccggcagg

SEQ ID NO: 930 - RNA, 22 nt, Homo sapiens
gccuuuggugacaggcaugugu

SEQ ID NO: 931 - RNA, 22 nt, Homo sapiens
uaggacacucucuccaccagua

SEQ ID NO: 932 - RNA, 22 nt, Homo sapiens
guaacacaugcugcucucuggu

SEQ ID NO: 933 - RNA, 22 nt, Homo sapiens
augagaugaggaauggcccucc

SEQ ID NO: 934 - RNA, 18 nt, Homo sapiens
uaguacuguucucaugau

SEQ ID NO: 935 - RNA, 22 nt, Homo sapiens
cauugucccucaaugucuauga

SEQ ID NO: 936 - RNA, 21 nt, Homo sapiens
uaaagcuagaaccuuagcuuu

SEQ ID NO: 937 - RNA, 23 nt, Homo sapiens
aucagguuguagaauguguuugc

SEQ ID NO: 938 - RNA, 21 nt, Homo sapiens
caugucacugcacucuagccu

SEQ ID NO: 939 - RNA, 22 nt, Homo sapiens
aaugguguuuccguuaagcuga

SEQ ID NO: 940 - RNA, 22 nt, Homo sapiens
uaacaacauucuaacugacggc

SEQ ID NO: 941 - RNA, 22 nt, Homo sapiens
cagugcaugacuguauauuauc

SEQ ID NO: 942 - RNA, 22 nt, Homo sapiens
uagcuaaauucagcucuaggua

SEQ ID NO: 943 - RNA, 22 nt, Homo sapiens
uagcaccugugcacaccaggca

SEQ ID NO: 944 - RNA, 22 nt, Homo sapiens
ugagacugaguuuugcucuugu

SEQ ID NO: 945 - RNA, 22 nt, Homo sapiens
aaugccacugugccugccaagg

SEQ ID NO: 946 - RNA, 22 nt, Homo sapiens
auagaguccugcucgaguugcu

SEQ ID NO: 947 - RNA, 22 nt, Homo sapiens
agagucacaugaggcccuucau

SEQ ID NO: 948 - RNA, 22 nt, Homo sapiens
ucugacacuucugcagaauuga

SEQ ID NO: 949 - RNA, 22 nt, Homo sapiens
ugcuuaguguugacccucugcc

SEQ ID NO: 950 - RNA, 22 nt, Homo sapiens
ucucugacacugaccccaaaaa

SEQ ID NO: 951 - RNA, 22 nt, Homo sapiens
ugagucuguucucacauugcua

SEQ ID NO: 952 - RNA, 18 nt, Homo sapiens
uuugccacuucccagaaa

SEQ ID NO: 953 - RNA, 22 nt, Homo sapiens
ugugaacacagaggcuauggca

SEQ ID NO: 954 - RNA, 19 nt, Homo sapiens
uuaaguaguuagagggucu

SEQ ID NO: 955 - RNA, 22 nt, Homo sapiens
ggcacaauugcagcaauaaaca

SEQ ID NO: 956 - RNA, 22 nt, Homo sapiens
caaugugcuuggggcacaugag

SEQ ID NO: 957 - RNA, 21 nt, Homo sapiens
aucuugguauagucuuauugg

SEQ ID NO: 958 - RNA, 22 nt, Homo sapiens
agcaucaugcaguugcuauuca

SEQ ID NO: 959 - RNA, 20 nt, Homo sapiens
accgggugaaacccuaucuc

SEQ ID NO: 960 - RNA, 22 nt, Homo sapiens
uuauugcuuaugauuagguguu

SEQ ID NO: 961 - RNA, 20 nt, Homo sapiens
uucuauggugaugaguccug

SEQ ID NO: 962 - RNA, 22 nt, Homo sapiens
ucucagcggacaggccggccag

SEQ ID NO: 963 - RNA, 18 nt, Homo sapiens
cuuaacauugggaugaua

SEQ ID NO: 964 - RNA, 22 nt, Homo sapiens
auugucauuuucugagaaguaa

SEQ ID NO: 965 - RNA, 20 nt, Homo sapiens
auagcagcaugauuuauagu

SEQ ID NO: 966 - RNA, 22 nt, Homo sapiens
uggcaaauagcaauaggagggu

SEQ ID NO: 967 - RNA, 22 nt, Homo sapiens
uaagagagcuccaucuuuuccu

SEQ ID NO: 968 - RNA, 18 nt, Homo sapiens
uugugccugagaaggugg

SEQ ID NO: 969 - RNA, 22 nt, Homo sapiens
ugcacaaccucacccccgcucu

SEQ ID NO: 970 - RNA, 22 nt, Homo sapiens
ggucaacaucaucaugguaagu

SEQ ID NO: 971 - RNA, 22 nt, Homo sapiens
aggugcacucagaaaacagaua

SEQ ID NO: 972 - RNA, 18 nt, Homo sapiens
cuucauugcuguuuugcu

SEQ ID NO: 973 - RNA, 22 nt, Homo sapiens
uugagguagugucuuguucugu

SEQ ID NO: 974 - RNA, 22 nt, Homo sapiens
augcauggcagagucaggguac

SEQ ID NO: 975 - RNA, 22 nt, Homo sapiens
ugaaguaauguuuuauucuauu

SEQ ID NO: 976 - RNA, 22 nt, Homo sapiens
uguggaguguaugugacagaga

SEQ ID NO: 977 - RNA, 22 nt, Homo sapiens
ugguacuguccuucuagauucc

SEQ ID NO: 978 - RNA, 22 nt, Homo sapiens
uuggcccugcugaccauucccu

SEQ ID NO: 979 - RNA, 22 nt, Homo sapiens
auagcucuugcuuacccacugu

SEQ ID NO: 980 - RNA, 22 nt, Homo sapiens
uaguaaacauaguucuuuugcu

SEQ ID NO: 981 - RNA, 22 nt, Homo sapiens
caucacacuuggauguaagaca

SEQ ID NO: 982 - RNA, 22 nt, Homo sapiens
uaucaugucuguguguaccuag

SEQ ID NO: 983 - RNA, 22 nt, Homo sapiens
ugagauccugugacuacacuga

SEQ ID NO: 984 - RNA, 22 nt, Homo sapiens
gcacgcauuguccuucuaguca

SEQ ID NO: 985 - RNA, 22 nt, Homo sapiens
ugaauguccugacgcugcaguu

SEQ ID NO: 986 - RNA, 22 nt, Homo sapiens
uugagauggaguuucgcucuuu

SEQ ID NO: 987 - RNA, 22 nt, Homo sapiens
uucuauguuguuagacccacca

SEQ ID NO: 988 - RNA, 20 nt, Homo sapiens
uugccgagagaaagguguua

SEQ ID NO: 989 - RNA, 22 nt, Homo sapiens
ugcagugcaugacuguguuaug

SEQ ID NO: 990 - RNA, 22 nt, Homo sapiens
ucuccggguggcggcgaaggga

SEQ ID NO: 991 - RNA, 22 nt, Homo sapiens
ugaggcuaggauaggcugauuc

SEQ ID NO: 992 - RNA, 22 nt, Homo sapiens
aauacagcacacagaugggucu

SEQ ID NO: 993 - RNA, 22 nt, Homo sapiens
gcccgugagacuggaagcaaga

SEQ ID NO: 994 - RNA, 22 nt, Homo sapiens
uccauugucuagauguaacaca

SEQ ID NO: 995 - RNA, 22 nt, Homo sapiens
uuguuauguaucucaagauaaa

SEQ ID NO: 996 - RNA, 22 nt, Homo sapiens
ugugauuauuuaaauaggacag

SEQ ID NO: 997 - RNA, 22 nt, Homo sapiens
cuugaucaaugugguacuugau

SEQ ID NO: 998 - RNA, 22 nt, Homo sapiens
guaucauugccuaaugcucuca

SEQ ID NO: 999 - RNA, 22 nt, Homo sapiens
gccucaguuguggccagggauu

SEQ ID NO: 1000 - RNA, 18 nt, Homo sapiens
uucauauguugaaccaga

SEQ ID NO: 1001 - RNA, 22 nt, Homo sapiens
uccauuuguagguagugagaca

SEQ ID NO: 1002 - RNA, 22 nt, Homo sapiens
caugccacuguggacaaagaca

SEQ ID NO: 1003 - RNA, 22 nt, Homo sapiens
ugcagcauugcacuccagccug

SEQ ID NO: 1004 - RNA, 20 nt, Homo sapiens
aagcugaguguuuuuuuaau

SEQ ID NO: 1005 - RNA, 15 nt, Homo sapiens
aaauaugucaguucu

SEQ ID NO: 1006 - RNA, 20 nt, Homo sapiens
gauuagagagaggcugugca

SEQ ID NO: 1007 - RNA, 22 nt, Homo sapiens
gucacagaaaaagauaugccaa

SEQ ID NO: 1008 - RNA, 22 nt, Homo sapiens
ugaaaugccuuuaaugaauuua

SEQ ID NO: 1009 - RNA, 22 nt, Homo sapiens
gucacugagaagguuaguuugu

SEQ ID NO: 1010 - RNA, 22 nt, Homo sapiens
gagguagguacaauugccacca

SEQ ID NO: 1011 - RNA, 18 nt, Homo sapiens
ucagucacugccuggcuu

SEQ ID NO: 1012 - RNA, 22 nt, Homo sapiens
auggcacagacucuuggucaag

SEQ ID NO: 1013 - RNA, 22 nt, Homo sapiens
auuggcaauguacauaucuugc

SEQ ID NO: 1014 - RNA, 22 nt, Homo sapiens
agcugguauuuugucaaggaua

SEQ ID NO: 1015 - RNA, 20 nt, Homo sapiens
ugguccccaccaaaucucau

SEQ ID NO: 1016 - RNA, 22 nt, Homo sapiens
ugacaugagauuugggaggggc

SEQ ID NO: 1017 - RNA, 22 nt, Homo sapiens
cccauuguuaaguugaguaucu

SEQ ID NO: 1018 - RNA, 22 nt, Homo sapiens
ucuucaugcuugaaauaauagc

SEQ ID NO: 1019 - RNA, 18 nt, Homo sapiens
auggcagaacaauuuaca

SEQ ID NO: 1020 - RNA, 22 nt, Homo sapiens
uggcuuuuccaggcauuacgau

SEQ ID NO: 1021 - RNA, 22 nt, Homo sapiens
gugugguauuauaacuagguau

SEQ ID NO: 1022 - RNA, 22 nt, Homo sapiens
caaaguaauugcuguuuugcca

SEQ ID NO: 1023 - RNA, 22 nt, Homo sapiens
uuugucccuuugcaguggcaca

SEQ ID NO: 1024 - RNA, 22 nt, Homo sapiens
gaggcauugaagauauggaagu

SEQ ID NO: 1025 - RNA, 18 nt, Homo sapiens
auugcacuccugccuggg

SEQ ID NO: 1026 - RNA, 21 nt, Homo sapiens
aacuggugugagaugguaugu

SEQ ID NO: 1027 - RNA, 22 nt, Homo sapiens
aagcuaccauuuguauauaaag

SEQ ID NO: 1028 - RNA, 16 nt, Homo sapiens
uuugugugugacgaga

SEQ ID NO: 1029 - RNA, 22 nt, Homo sapiens
uugagauggagucucacucugu

SEQ ID NO: 1030 - RNA, 22 nt, Homo sapiens
gugaagugugaccucagcaucu

SEQ ID NO: 1031 - RNA, 22 nt, Homo sapiens
caucccauucgaggggcacagc

SEQ ID NO: 1032 - RNA, 22 nt, Homo sapiens
aucagcaguguaaaaacggacu

SEQ ID NO: 1033 - RNA, 22 nt, Homo sapiens
cacugggccaucacuuaauauu

SEQ ID NO: 1034 - RNA, 22 nt, Homo sapiens
guaaacuuccccucaugaauga

SEQ ID NO: 1035 - RNA, 22 nt, Homo sapiens
gguaaguuuggggcuaauuugu

SEQ ID NO: 1036 - RNA, 22 nt, Homo sapiens
uuggcaagaauguaugccgauc

SEQ ID NO: 1037 - RNA, 22 nt, Homo sapiens
ucagugaacgaggaggagggug

SEQ ID NO: 1038 - RNA, 22 nt, Homo sapiens
gaaugucuuauugcucguugua

SEQ ID NO: 1039 - RNA, 22 nt, Homo sapiens
aaaguguuucugcaguagguuu

SEQ ID NO: 1040 - RNA, 22 nt, Homo sapiens
uuaaguuaggcuucagcagucu

SEQ ID NO: 1041 - RNA, 22 nt, Homo sapiens
uaugaaucuggcuacuccaggg

SEQ ID NO: 1042 - RNA, 22 nt, Homo sapiens
ugaauauagacagggguagaga

SEQ ID NO: 1043 - RNA, 22 nt, Homo sapiens
agcugguucuuugccuuguaga

SEQ ID NO: 1044 - RNA, 22 nt, Homo sapiens
uugagauggagucucacucuuu

SEQ ID NO: 1045 - RNA, 22 nt, Homo sapiens
agucagugucuguaaggagaac

SEQ ID NO: 1046 - RNA, 22 nt, Homo sapiens
auacagucuguuagauuuccuc

SEQ ID NO: 1047 - RNA, 22 nt, Homo sapiens
accaguagaaucaguggauucu

SEQ ID NO: 1048 - RNA, 22 nt, Homo sapiens
ucacugugguuggaaggcuuaa

SEQ ID NO: 1049 - RNA, 22 nt, Homo sapiens
ugcaauauccucuacuauaggu

SEQ ID NO: 1050 - RNA, 22 nt, Homo sapiens
uucacugugaacucauauucag

SEQ ID NO: 1051 - RNA, 22 nt, Homo sapiens
ugugguuuuuuucuccaauagg

SEQ ID NO: 1052 - RNA, 22 nt, Homo sapiens
aauggcaagagccacagaggcg

SEQ ID NO: 1053 - RNA, 22 nt, Homo sapiens
ugggaagcugcugaacuacagu

SEQ ID NO: 1054 - RNA, 19 nt, Homo sapiens
ucccaauguuuccaggcag

SEQ ID NO: 1055 - RNA, 22 nt, Homo sapiens
gugagucagucuguguagggcu

SEQ ID NO: 1056 - RNA, 22 nt, Homo sapiens
ucacaugugaagauugggagua

SEQ ID NO: 1057 - RNA, 22 nt, Homo sapiens
uggcauguagucugggaccugg

SEQ ID NO: 1058 - RNA, 22 nt, Homo sapiens
auggcggugugggcggugcagc

SEQ ID NO: 1059 - RNA, 22 nt, Homo sapiens
uccuucaugcaucaauguaucc

SEQ ID NO: 1060 - RNA, 22 nt, Homo sapiens
agcuggucuacguguguaugag

SEQ ID NO: 1061 - RNA, 22 nt, Homo sapiens
ucuuugguucuguuuauguaau

SEQ ID NO: 1062 - RNA, 22 nt, Homo sapiens
auucuauaguccuaggauuggg

SEQ ID NO: 1063 - RNA, 22 nt, Homo sapiens
augaagauguugccuuuuuaau

SEQ ID NO: 1064 - RNA, 22 nt, Homo sapiens
gucuuuggaaaaaaugucuguu

SEQ ID NO: 1065 - RNA, 22 nt, Homo sapiens
uauaacaaugcaagaauggccu

SEQ ID NO: 1066 - RNA, 22 nt, Homo sapiens
gugggguaggguaggacucaac

SEQ ID NO: 1067 - RNA, 22 nt, Homo sapiens
aacagugccugucauuuaguag

SEQ ID NO: 1068 - RNA, 22 nt, Homo sapiens
uuugagcauguaguuuaacccu

SEQ ID NO: 1069 - RNA, 22 nt, Homo sapiens
ucuauguuuuugcuaguagugu

SEQ ID NO: 1070 - RNA, 22 nt, Homo sapiens
auuugucacuuaacagccauua

SEQ ID NO: 1071 - RNA, 22 nt, Homo sapiens
cauugcacuccagccugccugg

SEQ ID NO: 1072 - RNA, 22 nt, Homo sapiens
ugaguucuuuuacauuuugaau

SEQ ID NO: 1073 - RNA, 22 nt, Homo sapiens
gugaaugaaugggugaauacau

SEQ ID NO: 1074 - RNA, 20 nt, Homo sapiens
agguucaaaucccaaucaug

SEQ ID NO: 1075 - RNA, 20 nt, Homo sapiens
ucccuaagagccuuuccuuc

SEQ ID NO: 1076 - RNA, 21 nt, Homo sapiens
uggauugagaaccccaggagg

SEQ ID NO: 1077 - RNA, 22 nt, Homo sapiens
uggagugcgagggugaaacuuu

SEQ ID NO: 1078 - RNA, 22 nt, Homo sapiens
gaugagaugagcauuugaauug

SEQ ID NO: 1079 - RNA, 22 nt, Homo sapiens
uagcauggagucaugcacggcu

SEQ ID NO: 1080 - RNA, 18 nt, Homo sapiens
acaguguguaaggguucu

SEQ ID NO: 1081 - RNA, 22 nt, Homo sapiens
ugccuggagagcuccuacauau

SEQ ID NO: 1082 - RNA, 22 nt, Homo sapiens
aagugccauguggaugggcccu

SEQ ID NO: 1083 - RNA, 22 nt, Homo sapiens
aaaggcacacacuccuuguuau

SEQ ID NO: 1084 - RNA, 22 nt, Homo sapiens
ucugagcaauagauguggauau

SEQ ID NO: 1085 - RNA, 22 nt, Homo sapiens
guuaaugcuggaauaaguuaag

SEQ ID NO: 1086 - RNA, 22 nt, Homo sapiens
ccagauguuuucauucagcaag

SEQ ID NO: 1087 - RNA, 22 nt, Homo sapiens
ugccauagcaaugguaagcuga

SEQ ID NO: 1088 - RNA, 22 nt, Homo sapiens
cugucacuggggcacauguccc

SEQ ID NO: 1089 - RNA, 22 nt, Homo sapiens
aaguaucaggaauaguuauugg

SEQ ID NO: 1090 - RNA, 22 nt, Homo sapiens
aaucacauuaaugcucccucag

SEQ ID NO: 1091 - RNA, 22 nt, Homo sapiens
auccaagagacugaugacuucc

SEQ ID NO: 1092 - RNA, 22 nt, Homo sapiens
acagugucaugucguguucccc

SEQ ID NO: 1093 - RNA, 22 nt, Homo sapiens
gguggugguauuucagaaaaug

SEQ ID NO: 1094 - RNA, 22 nt, Homo sapiens
ugcaugaugcugagauuuggga

SEQ ID NO: 1095 - RNA, 22 nt, Homo sapiens
uuaugguuuucucucacgcagg

SEQ ID NO: 1096 - RNA, 22 nt, Homo sapiens
augggguaggcuugcuguagua

SEQ ID NO: 1097 - RNA, 21 nt, Homo sapiens
acaucagaguugugaagguag

SEQ ID NO: 1098 - RNA, 15 nt, Homo sapiens
uuucuacugcacuuc

SEQ ID NO: 1099 - RNA, 22 nt, Homo sapiens
cuucaucugguuugugaacuuu

SEQ ID NO: 1100 - RNA, 22 nt, Homo sapiens
guauggaagucaguuuguuggc

SEQ ID NO: 1101 - RNA, 22 nt, Homo sapiens
gaggagucagacugugcaaggu

SEQ ID NO: 1102 - RNA, 22 nt, Homo sapiens
agcuguuguuuuaagauacuaa

SEQ ID NO: 1103 - RNA, 22 nt, Homo sapiens
cacugcgaccucugccuaccgg

SEQ ID NO: 1104 - RNA, 22 nt, Homo sapiens
uggaagucauugagguguguua

SEQ ID NO: 1105 - RNA, 23 nt, Homo sapiens
aaggacacugaacacuucccagc

SEQ ID NO: 1106 - RNA, 22 nt, Homo sapiens
ucaaguacugccuugcucuggc

SEQ ID NO: 1107 - RNA, 22 nt, Homo sapiens
augcaaaucuuaaguaugugug

SEQ ID NO: 1108 - RNA, 22 nt, Homo sapiens
auguaagugugcucaaauguua

SEQ ID NO: 1109 - RNA, 21 nt, Homo sapiens
aauacucuagguuaagagagc

SEQ ID NO: 1110 - RNA, 22 nt, Homo sapiens
cauggcacuggugggagugucu

SEQ ID NO: 1111 - RNA, 22 nt, Homo sapiens
aagcaaacaucagcuugguuaa

SEQ ID NO: 1112 - RNA, 22 nt, Homo sapiens
gucucccagccuacauauuucu

SEQ ID NO: 1113 - RNA, 22 nt, Homo sapiens
auguauggaguuuaggggaugg

SEQ ID NO: 1114 - RNA, 20 nt, Homo sapiens
ucaugccacugcgcuccagc

SEQ ID NO: 1115 - RNA, 22 nt, Homo sapiens
uugugggaggugauuagaucau

SEQ ID NO: 1116 - RNA, 22 nt, Homo sapiens
aaggcuguuguguaauaggauu

SEQ ID NO: 1117 - RNA, 20 nt, Homo sapiens
uggcaccugacagauagcca

SEQ ID NO: 1118 - RNA, 22 nt, Homo sapiens
guguaugugagaaugcucaugu

SEQ ID NO: 1119 - RNA, 22 nt, Homo sapiens
guagaauguauguauaacgcaa

SEQ ID NO: 1120 - RNA, 22 nt, Homo sapiens
aaauaguagcugaaugagggaa

SEQ ID NO: 1121 - RNA, 18 nt, Homo sapiens
ggaaaacuuuucuaagua

SEQ ID NO: 1122 - RNA, 22 nt, Homo sapiens
auagcaaugcaagaauggcuua

SEQ ID NO: 1123 - RNA, 22 nt, Homo sapiens
gugaggaaggaaaccugcuagc

SEQ ID NO: 1124 - RNA, 22 nt, Homo sapiens
agugccuacuugaauuguagug

SEQ ID NO: 1125 - RNA, 19 nt, Homo sapiens
gaaguguuuguucuccaug

SEQ ID NO: 1126 - RNA, 22 nt, Homo sapiens
guggcaaggaaaugcugcucac

SEQ ID NO: 1127 - RNA, 22 nt, Homo sapiens
aggugcuugagggaagaaauua

SEQ ID NO: 1128 - RNA, 22 nt, Homo sapiens
uuggaaugugacugauaauauu

SEQ ID NO: 1129 - RNA, 22 nt, Homo sapiens
ugaguucuuccaccgggaccag

SEQ ID NO: 1130 - RNA, 22 nt, Homo sapiens
ggaagguaauuggguaaugaga

SEQ ID NO: 1131 - RNA, 22 nt, Homo sapiens
ucucugaaacucuugacauccu

SEQ ID NO: 1132 - RNA, 22 nt, Homo sapiens
uugacaggaugcucagggccca

SEQ ID NO: 1133 - RNA, 22 nt, Homo sapiens
augagagcugacuuuaaggcaa

SEQ ID NO: 1134 - RNA, 22 nt, Homo sapiens
ggaaagaucagcuaaauguaag

SEQ ID NO: 1135 - RNA, 22 nt, Homo sapiens
augagggagggcaccugaccuu

SEQ ID NO: 1136 - RNA, 19 nt, Homo sapiens
ugccauguagcacaugguc

SEQ ID NO: 1137 - RNA, 22 nt, Homo sapiens
uuugugacucauggucuagugc

SEQ ID NO: 1138 - RNA, 22 nt, Homo sapiens
aggcauggagacuaaaauuaua

SEQ ID NO: 1139 - RNA, 22 nt, Homo sapiens
uagaucauauacuugccaugac

SEQ ID NO: 1140 - RNA, 22 nt, Homo sapiens
uuagcaauugauucucauaagc

SEQ ID NO: 1141 - RNA, 22 nt, Homo sapiens
uuuaacauuggaugagaucguc

SEQ ID NO: 1142 - RNA, 23 nt, Homo sapiens
ccaguauuuauguaaggaagugu

SEQ ID NO: 1143 - RNA, 22 nt, Homo sapiens
uccauguaguugagcggcuuug

SEQ ID NO: 1144 - RNA, 22 nt, Homo sapiens
aagaucauucagggaaggcuga

SEQ ID NO: 1145 - RNA, 22 nt, Homo sapiens
cuugacacugguuuucugaaua

SEQ ID NO: 1146 - RNA, 22 nt, Homo sapiens
ucaccaccuuccaggaccacug

SEQ ID NO: 1147 - RNA, 22 nt, Homo sapiens
uuugccaauauuuuauugagga

SEQ ID NO: 1148 - RNA, 22 nt, Homo sapiens
uauugcucugacugauuggaug

SEQ ID NO: 1149 - RNA, 20 nt, Homo sapiens
agacuagggagcagaaagcc

SEQ ID NO: 1150 - RNA, 22 nt, Homo sapiens
cuuccauaguuacacccaggga

SEQ ID NO: 1151 - RNA, 22 nt, Homo sapiens
agaaacauucucuugccuccuu

SEQ ID NO: 1152 - RNA, 22 nt, Homo sapiens
aauacucaguccuggugaggcu

SEQ ID NO: 1153 - RNA, 22 nt, Homo sapiens
cacacugucuuucagaaugguu

SEQ ID NO: 1154 - RNA, 22 nt, Homo sapiens
gccagugugaugugaucauggc

SEQ ID NO: 1155 - RNA, 21 nt, Homo sapiens
uaugguuucuaauucugcagg

SEQ ID NO: 1156 - RNA, 22 nt, Homo sapiens
auagugcugcaaucaacauaca

SEQ ID NO: 1157 - RNA, 22 nt, Homo sapiens
gugaucauuguauugggguuau

SEQ ID NO: 1158 - RNA, 22 nt, Homo sapiens
auugcacuccagccugggcagc

SEQ ID NO: 1159 - RNA, 22 nt, Homo sapiens
uucagggcauuggaguuucuga

SEQ ID NO: 1160 - RNA, 22 nt, Homo sapiens
auguggauaucuauaucuggau

SEQ ID NO: 1161 - RNA, 22 nt, Homo sapiens
uugcacuccagucuggggggca

SEQ ID NO: 1162 - RNA, 22 nt, Homo sapiens
uagcacaugucagguaauuugc

SEQ ID NO: 1163 - RNA, 22 nt, Homo sapiens
ugagaugaacuugauuguuuua

SEQ ID NO: 1164 - RNA, 22 nt, Homo sapiens
ucuuuagguguuauaguucaag

SEQ ID NO: 1165 - RNA, 22 nt, Homo sapiens
ugaaacacacauugcccuuuau

SEQ ID NO: 1166 - RNA, 22 nt, Homo sapiens
ccacugggcuagguguuuugga

SEQ ID NO: 1167 - RNA, 22 nt, Homo sapiens
cccaguaaucuugccaguuuuc

SEQ ID NO: 1168 - RNA, 20 nt, Homo sapiens
uagcacaucuggcuguagag

SEQ ID NO: 1169 - RNA, 22 nt, Homo sapiens
agcaucagugauuuuguugaag

SEQ ID NO: 1170 - RNA, 22 nt, Homo sapiens
uauagcuuaaaguuuagauccu

SEQ ID NO: 1171 - RNA, 22 nt, Homo sapiens
auggaaggagaggaaugaauga

SEQ ID NO: 1172 - RNA, 22 nt, Homo sapiens
gagauuauuuaaaaggugauuu

SEQ ID NO: 1173 - RNA, 22 nt, Homo sapiens
uggcuugauggcacaagguuuc

SEQ ID NO: 1174 - RNA, 22 nt, Homo sapiens
uaucaguauggauucauggauu

SEQ ID NO: 1175 - RNA, 19 nt, Homo sapiens
uggcuagagcagauauccu

SEQ ID NO: 1176 - RNA, 22 nt, Homo sapiens
uuugccuuugugauauggucua

SEQ ID NO: 1177 - RNA, 22 nt, Homo sapiens
ggcugguuuucaguuacugagu

SEQ ID NO: 1178 - RNA, 22 nt, Homo sapiens
uugggcauugcuauaaauucuu

SEQ ID NO: 1179 - RNA, 22 nt, Homo sapiens
acaguagcgcaaucucggcuca

SEQ ID NO: 1180 - RNA, 22 nt, Homo sapiens
ugccaguauuuuauugaggauu

SEQ ID NO: 1181 - RNA, 22 nt, Homo sapiens
ugucaguguaugagccccggau

SEQ ID NO: 1182 - RNA, 21 nt, Homo sapiens
uagcugaugauguaggggaug

SEQ ID NO: 1183 - RNA, 22 nt, Homo sapiens
uugagagagaacauuuguuaca

SEQ ID NO: 1184 - RNA, 22 nt, Homo sapiens
auuuaugguuaauauaggaagu

SEQ ID NO: 1185 - RNA, 22 nt, Homo sapiens
uguuacacugugcacuaaauuu

SEQ ID NO: 1186 - RNA, 22 nt, Homo sapiens
uuugacucacagccuggcugcc

SEQ ID NO: 1187 - RNA, 22 nt, Homo sapiens
ugucauuggacuucuuucaugg

SEQ ID NO: 1188 - RNA, 22 nt, Homo sapiens
ugagaugaagucucacucuguc

SEQ ID NO: 1189 - RNA, 22 nt, Homo sapiens
auagugcugcaauuaacauaca

SEQ ID NO: 1190 - RNA, 22 nt, Homo sapiens
ugcaagacuaaaccuuccccuc

SEQ ID NO: 1191 - RNA, 22 nt, Homo sapiens
uuaaugcuuuugggauauuucu

SEQ ID NO: 1192 - RNA, 23 nt, Homo sapiens
uucaccugguuauuaauagccuc

SEQ ID NO: 1193 - RNA, 22 nt, Homo sapiens
cauugcacucuaucccgguggg

SEQ ID NO: 1194 - RNA, 22 nt, Homo sapiens
cugcuggucuuuaaggucuagg

SEQ ID NO: 1195 - RNA, 22 nt, Homo sapiens
ugagacacugaauccggccuga

SEQ ID NO: 1196 - RNA, 22 nt, Homo sapiens
uugugguuauagagucucccug

SEQ ID NO: 1197 - RNA, 22 nt, Homo sapiens
guguauucaucuggcugaggua

SEQ ID NO: 1198 - RNA, 22 nt, Homo sapiens
gaaugaauguuuauccuuagau

SEQ ID NO: 1199 - RNA, 22 nt, Homo sapiens
uuacaguucugguggagaggua

SEQ ID NO: 1200 - RNA, 22 nt, Homo sapiens
gugcaaugagaaggggcucugg

SEQ ID NO: 1201 - RNA, 22 nt, Homo sapiens
uauaagacgagcaaaaagcuug

SEQ ID NO: 1202 - RNA, 22 nt, Homo sapiens
uuaagcaaagguaacaugagaa

SEQ ID NO: 1203 - RNA, 22 nt, Homo sapiens
ucacagucggugacuucuugcu

SEQ ID NO: 1204 - RNA, 22 nt, Homo sapiens
ugacuaaggaaggauuaugugc

SEQ ID NO: 1205 - RNA, 21 nt, Homo sapiens
uggcacuauucacaauagcaa

SEQ ID NO: 1206 - RNA, 22 nt, Homo sapiens
uggcaccugacuccgagaugca

SEQ ID NO: 1207 - RNA, 22 nt, Homo sapiens
aagcuguauuguguugcuauaa

SEQ ID NO: 1208 - RNA, 22 nt, Homo sapiens
auugcaguuagaacagaagucu

SEQ ID NO: 1209 - RNA, 22 nt, Homo sapiens
ugagacggaguuauuuauaaua

SEQ ID NO: 1210 - RNA, 22 nt, Homo sapiens
uauuugguuggugcaaaaguaa

SEQ ID NO: 1211 - RNA, 22 nt, Homo sapiens
uauuagguuggugcaaaaguua

SEQ ID NO: 1212 - RNA, 22 nt, Homo sapiens
uugucacccuacauaacaggga

SEQ ID NO: 1213 - RNA, 22 nt, Homo sapiens
aaggcaagaagagaaccaucgg

SEQ ID NO: 1214 - RNA, 20 nt, Homo sapiens
agcagccacagauuccucag

SEQ ID NO: 1215 - RNA, 22 nt, Homo sapiens
aucagcagcaugaaaacggacu

SEQ ID NO: 1216 - RNA, 23 nt, Homo sapiens
ucacaguuacuuuugcaucaacc

SEQ ID NO: 1217 - RNA, 22 nt, Homo sapiens
auuggccccguuuuaaauguca

SEQ ID NO: 1218 - RNA, 20 nt, Homo sapiens
gacauguuuuguggccuaac

SEQ ID NO: 1219 - RNA, 22 nt, Homo sapiens
acaguacuguuguuugcugcca

SEQ ID NO: 1220 - RNA, 22 nt, Homo sapiens
cccaguguuacgugacagccug

SEQ ID NO: 1221 - RNA, 22 nt, Homo sapiens
uauggcacuaguacuggaaagc

SEQ ID NO: 1222 - RNA, 22 nt, Homo sapiens
gucaauguaucuagcuguauua

SEQ ID NO: 1223 - RNA, 22 nt, Homo sapiens
auacuagucaagaauguaugag

SEQ ID NO: 1224 - RNA, 22 nt, Homo sapiens
ggagaucacucuuuguagcgug

SEQ ID NO: 1225 - RNA, 22 nt, Homo sapiens
uugagguaggaggagcuuggau

SEQ ID NO: 1226 - RNA, 22 nt, Homo sapiens
gagaagugcgucguuugaugau

SEQ ID NO: 1227 - RNA, 22 nt, Homo sapiens
ugcacacucuguaugagaaucu

SEQ ID NO: 1228 - RNA, 22 nt, Homo sapiens
agcauagugccuugaaaacaau

SEQ ID NO: 1229 - RNA, 22 nt, Homo sapiens
guucaguuuuaaagggaaauug

SEQ ID NO: 1230 - RNA, 22 nt, Homo sapiens
uaugcacacucucccaggaggg

SEQ ID NO: 1231 - RNA, 22 nt, Homo sapiens
uauacaugugccauguuggugu

SEQ ID NO: 1232 - RNA, 22 nt, Homo sapiens
ugccuagaaacacuauuucucc

SEQ ID NO: 1233 - RNA, 22 nt, Homo sapiens
ugagguguuauccagaguucuu

SEQ ID NO: 1234 - RNA, 17 nt, Homo sapiens
ugguagguuuuucuggc

SEQ ID NO: 1235 - RNA, 22 nt, Homo sapiens
gcaaugcugucugugcacagau

SEQ ID NO: 1236 - RNA, 22 nt, Homo sapiens
cuggcugagugguaaguagagg

SEQ ID NO: 1237 - RNA, 22 nt, Homo sapiens
uauggauuuuuuugacaagagc

SEQ ID NO: 1238 - RNA, 22 nt, Homo sapiens
gugagauuagcugagauccuug

SEQ ID NO: 1239 - RNA, 22 nt, Homo sapiens
ucagguauuuuaucacaugaag

SEQ ID NO: 1240 - RNA, 20 nt, Homo sapiens
ugauuaguccacuuggcucu

SEQ ID NO: 1241 - RNA, 22 nt, Homo sapiens
gugauugucuaaucaagauaca

SEQ ID NO: 1242 - RNA, 22 nt, Homo sapiens
acuuugguuuauagaauuuagg

SEQ ID NO: 1243 - RNA, 22 nt, Homo sapiens
aggguuuuuauuuauguggcau

SEQ ID NO: 1244 - RNA, 22 nt, Homo sapiens
gugagcacugaaagaaggcaag

SEQ ID NO: 1245 - RNA, 22 nt, Homo sapiens
auggauuuguaguacaugguug

SEQ ID NO: 1246 - RNA, 21 nt, Homo sapiens
ccagugguuggaaacuauggg

SEQ ID NO: 1247 - RNA, 20 nt, Homo sapiens
cuuaucaguggcaaguauaa

SEQ ID NO: 1248 - RNA, 22 nt, Homo sapiens
auugcacuccauccugggcaau

SEQ ID NO: 1249 - RNA, 22 nt, Homo sapiens
uuuugcacuagaaccagagguu

SEQ ID NO: 1250 - RNA, 22 nt, Homo sapiens
ugccaaggagucagucccuaga

SEQ ID NO: 1251 - RNA, 22 nt, Homo sapiens
gugacagucaaagacaugacuu

SEQ ID NO: 1252 - RNA, 22 nt, Homo sapiens
uucugugguagaaaucucaaau

SEQ ID NO: 1253 - RNA, 22 nt, Homo sapiens
gagcaucauggggccaaagcgc

SEQ ID NO: 1254 - RNA, 22 nt, Homo sapiens
ugcaagaugagauuuuggaugg

SEQ ID NO: 1255 - RNA, 22 nt, Homo sapiens
auggaagaauugucggggaugu

SEQ ID NO: 1256 - RNA, 22 nt, Homo sapiens
gaugguuuucaccugcaugcuu

SEQ ID NO: 1257 - RNA, 22 nt, Homo sapiens
gugcacaacguguagguuuguu

SEQ ID NO: 1258 - RNA, 22 nt, Homo sapiens
agucaugguaguaaauuuggac

SEQ ID NO: 1259 - RNA, 23 nt, Homo sapiens
cuacuagucaagucuuuuccagu

SEQ ID NO: 1260 - RNA, 23 nt, Homo sapiens
ucagguaggccuagaguauucuu

SEQ ID NO: 1261 - RNA, 22 nt, Homo sapiens
gucaggaugauuuggggaggug

SEQ ID NO: 1262 - RNA, 22 nt, Homo sapiens
acccuuuagguuggaugaggau

SEQ ID NO: 1263 - RNA, 22 nt, Homo sapiens
ccuucauccuccagcaggcuag

SEQ ID NO: 1264 - RNA, 22 nt, Homo sapiens
aucagugcauaguauuuaauga

SEQ ID NO: 1265 - RNA, 22 nt, Homo sapiens
auugcacuccacccugggcaac

SEQ ID NO: 1266 - RNA, 19 nt, Homo sapiens
uuggcagaguugcccccua

SEQ ID NO: 1267 - RNA, 22 nt, Homo sapiens
ucacaguaacuuuguugcuuuu

SEQ ID NO: 1268 - RNA, 22 nt, Homo sapiens
agcaacaucagcagcaggaaaa

SEQ ID NO: 1269 - RNA, 22 nt, Homo sapiens
aaagugccugacucauaguuag

SEQ ID NO: 1270 - RNA, 22 nt, Homo sapiens
augaagcuagcugauugcugau

SEQ ID NO: 1271 - RNA, 22 nt, Homo sapiens
guacaugcaugcaugggugugc

SEQ ID NO: 1272 - RNA, 22 nt, Homo sapiens
uuagauaguacugaaugguucu

SEQ ID NO: 1273 - RNA, 22 nt, Homo sapiens
ucuaucacagccccacacucuc

SEQ ID NO: 1274 - RNA, 22 nt, Homo sapiens
acagugcuucugauaugaugcc

SEQ ID NO: 1275 - RNA, 22 nt, Homo sapiens
ugaagcuaggauuaauuuucau

SEQ ID NO: 1276 - RNA, 22 nt, Homo sapiens
cauugcacuuagacaacuuuug

SEQ ID NO: 1277 - RNA, 22 nt, Homo sapiens
cacaggucauccuggaucaagg

SEQ ID NO: 1278 - RNA, 22 nt, Homo sapiens
ugagaacuaaaaugugguauau

SEQ ID NO: 1279 - RNA, 21 nt, Homo sapiens
ugaaguagcauaggaugucaa

SEQ ID NO: 1280 - RNA, 21 nt, Homo sapiens
ugcgauccucaauccucuguu

SEQ ID NO: 1281 - RNA, 21 nt, Homo sapiens
augugcacuaugucauuuaau

SEQ ID NO: 1282 - RNA, 22 nt, Homo sapiens
caccugagcgggaugcucgccu

SEQ ID NO: 1283 - RNA, 22 nt, Homo sapiens
uagcuggaguuuuuguuauagg

SEQ ID NO: 1284 - RNA, 22 nt, Homo sapiens
gagugguuuugauuuauagcug

SEQ ID NO: 1285 - RNA, 22 nt, Homo sapiens
aaguccccugacagaggggagg

SEQ ID NO: 1286 - RNA, 22 nt, Homo sapiens
cugacagaugacugccacugua

SEQ ID NO: 1287 - RNA, 23 nt, Homo sapiens
ugugacacuuccgucaguucauu

SEQ ID NO: 1288 - RNA, 22 nt, Homo sapiens
uucuuuaguucacuugcuccag

SEQ ID NO: 1289 - RNA, 22 nt, Homo sapiens
uugcaaugugaugugauuugga

SEQ ID NO: 1290 - RNA, 22 nt, Homo sapiens
cugugcaaguuauaggccaggu

SEQ ID NO: 1291 - RNA, 22 nt, Homo sapiens
auaucaacaugguaggguuggu

SEQ ID NO: 1292 - RNA, 21 nt, Homo sapiens
ugguucaguucguuacgugug

SEQ ID NO: 1293 - RNA, 22 nt, Homo sapiens
acaguaugcuuuaaacuuuguu

SEQ ID NO: 1294 - RNA, 22 nt, Homo sapiens
uccaugagaauaguuaggcucu

SEQ ID NO: 1295 - RNA, 22 nt, Homo sapiens
uugauccucugagaaucuaucg

SEQ ID NO: 1296 - RNA, 22 nt, Homo sapiens
ugagacaucugagauuuuaagc

SEQ ID NO: 1297 - RNA, 22 nt, Homo sapiens
uaauagagucauuauuauuguu

SEQ ID NO: 1298 - RNA, 22 nt, Homo sapiens
ugagaacuagagaacaagguga

SEQ ID NO: 1299 - RNA, 22 nt, Homo sapiens
auuguguuugaaugaggcucca

SEQ ID NO: 1300 - RNA, 22 nt, Homo sapiens
uaucauagacaaucaguuauug

SEQ ID NO: 1301 - RNA, 19 nt, Homo sapiens
agcuguguugccugugaga

SEQ ID NO: 1302 - RNA, 22 nt, Homo sapiens
ggcuuuggucacacaggggcaa

SEQ ID NO: 1303 - RNA, 22 nt, Homo sapiens
ucacugaaaccuccaccucucg

SEQ ID NO: 1304 - RNA, 22 nt, Homo sapiens
uuuaaugcacuaggugguguuc

SEQ ID NO: 1305 - RNA, 22 nt, Homo sapiens
gggaucaacuuauacuaaaauu

SEQ ID NO: 1306 - RNA, 22 nt, Homo sapiens
gagucagugucuugcucuguca

SEQ ID NO: 1307 - RNA, 22 nt, Homo sapiens
uuaaaugcacauacuugagaaa

SEQ ID NO: 1308 - RNA, 22 nt, Homo sapiens
uuugcaauguugugauggugaa

SEQ ID NO: 1309 - RNA, 17 nt, Homo sapiens
ugcaccauuugauuuuu

SEQ ID NO: 1310 - RNA, 22 nt, Homo sapiens
aacuggugauccacccgccuca

SEQ ID NO: 1311 - RNA, 22 nt, Homo sapiens
ugucaucauuccaucagggcuu

SEQ ID NO: 1312 - RNA, 22 nt, Homo sapiens
aacaggguggugccugguccau

SEQ ID NO: 1313 - RNA, 22 nt, Homo sapiens
guaaauaccaguuucuggaaca

SEQ ID NO: 1314 - RNA, 22 nt, Homo sapiens
ugcaggguccauugucccaagu

SEQ ID NO: 1315 - RNA, 22 nt, Homo sapiens
aaugugccuacuggagcuugca

SEQ ID NO: 1316 - RNA, 21 nt, Homo sapiens
ucaggaccucuaguuagccag

SEQ ID NO: 1317 - RNA, 22 nt, Homo sapiens
ucucaguguuaucuaucugccu

SEQ ID NO: 1318 - RNA, 22 nt, Homo sapiens
aaagaguucagguagauuucaa

SEQ ID NO: 1319 - RNA, 22 nt, Homo sapiens
auguggcacuugacuuucucgc

SEQ ID NO: 1320 - RNA, 22 nt, Homo sapiens
uauugcaauuggggaaacuggg

SEQ ID NO: 1321 - RNA, 22 nt, Homo sapiens
ucuuugccuaacccaaggucau

SEQ ID NO: 1322 - RNA, 21 nt, Homo sapiens
gauaaguuggcagccagcacc

SEQ ID NO: 1323 - RNA, 22 nt, Homo sapiens
uaaugcuccauggguuauuaaa

SEQ ID NO: 1324 - RNA, 22 nt, Homo sapiens
uagcaugucagucgccacacgu

SEQ ID NO: 1325 - RNA, 21 nt, Homo sapiens
uaucauggccauccucuucuc

SEQ ID NO: 1326 - RNA, 22 nt, Homo sapiens
ggucccccuccacucucgcaaa

SEQ ID NO: 1327 - RNA, 21 nt, Homo sapiens
uuuagguagcuuuucugggag

SEQ ID NO: 1328 - RNA, 22 nt, Homo sapiens
cuagugcaguuccccugucuua

SEQ ID NO: 1329 - RNA, 22 nt, Homo sapiens
uucucaguaauuccagauuuuu

SEQ ID NO: 1330 - RNA, 18 nt, Homo sapiens
ucauagaucaugacagug

SEQ ID NO: 1331 - RNA, 22 nt, Homo sapiens
augucauagaagccugugaacc

SEQ ID NO: 1332 - RNA, 22 nt, Homo sapiens
auguggcuuuucaacuguguga

SEQ ID NO: 1333 - RNA, 22 nt, Homo sapiens
uucauugcugcuuaucuccaga

SEQ ID NO: 1334 - RNA, 22 nt, Homo sapiens
ugucauggcauuuguaaacugc

SEQ ID NO: 1335 - RNA, 22 nt, Homo sapiens
cucacuaggaaguaaaguuugu

SEQ ID NO: 1336 - RNA, 22 nt, Homo sapiens
ucaaacauccccaccagggacu

SEQ ID NO: 1337 - RNA, 20 nt, Homo sapiens
agagcaaagccgcaccccua

SEQ ID NO: 1338 - RNA, 22 nt, Homo sapiens
uugagauguaguuucacuccug

SEQ ID NO: 1339 - RNA, 22 nt, Homo sapiens
uuaaggcuuuaaguaaacacag

SEQ ID NO: 1340 - RNA, 22 nt, Homo sapiens
uugagauggaguuucgcucuug

SEQ ID NO: 1341 - RNA, 22 nt, Homo sapiens
uugagacggaguuuugcucuug

SEQ ID NO: 1342 - RNA, 22 nt, Homo sapiens
uuccuugagucuuuuuccugag

SEQ ID NO: 1343 - RNA, 22 nt, Homo sapiens
uggcuacugacugaugauuaua

SEQ ID NO: 1344 - RNA, 22 nt, Homo sapiens
ucuugccacuucauccccuuuc

SEQ ID NO: 1345 - RNA, 22 nt, Homo sapiens
uuaacagucacuuagcucauuu

SEQ ID NO: 1346 - RNA, 22 nt, Homo sapiens
uaugcaugucucuguacacgug

SEQ ID NO: 1347 - RNA, 22 nt, Homo sapiens
uucaaaucuucguuuugccaua

SEQ ID NO: 1348 - RNA, 22 nt, Homo sapiens
uggaaugucuauguuuuugauu

SEQ ID NO: 1349 - RNA, 22 nt, Homo sapiens
acuaugcuuuucuuagaauuaa

SEQ ID NO: 1350 - RNA, 22 nt, Homo sapiens
aauggcaucuagaguggugaau

SEQ ID NO: 1351 - RNA, 22 nt, Homo sapiens
guauacaugucaaaacucacau

SEQ ID NO: 1352 - RNA, 22 nt, Homo sapiens
auuaaucaggcaaugcuugcua

SEQ ID NO: 1353 - RNA, 22 nt, Homo sapiens
ugcauuaguaaguaauuuuaau

SEQ ID NO: 1354 - RNA, 22 nt, Homo sapiens
gcagucacagggagauggugac

SEQ ID NO: 1355 - RNA, 22 nt, Homo sapiens
uaacccagugucugugaugggu

SEQ ID NO: 1356 - RNA, 22 nt, Homo sapiens
ucauuggcuaagcuuguuacac

SEQ ID NO: 1357 - RNA, 20 nt, Homo sapiens
ugcaguguccucacuuguca

SEQ ID NO: 1358 - RNA, 22 nt, Homo sapiens
ucuuuguugcauaggcuuguuc

SEQ ID NO: 1359 - RNA, 22 nt, Homo sapiens
acuccauuuccagagcagcccc

SEQ ID NO: 1360 - RNA, 20 nt, Homo sapiens
cuuccaguggccccaucuuu

SEQ ID NO: 1361 - RNA, 22 nt, Homo sapiens
uagcacuauuuauugaaaagga

SEQ ID NO: 1362 - RNA, 22 nt, Homo sapiens
uucuuuggaaacaguacuaauu

SEQ ID NO: 1363 - RNA, 22 nt, Homo sapiens
gcauggaguggaaauucuuggg

SEQ ID NO: 1364 - RNA, 22 nt, Homo sapiens
gucuggcuuaucucacuuacca

SEQ ID NO: 1365 - RNA, 22 nt, Homo sapiens
gcugcuguuuaguuucuccugg

SEQ ID NO: 1366 - RNA, 22 nt, Homo sapiens
ggccugaugaaauguuagagua

SEQ ID NO: 1367 - RNA, 22 nt, Homo sapiens
ucacuauagaaaacagugugga

SEQ ID NO: 1368 - RNA, 22 nt, Homo sapiens
cuagaguguaguuuucuuagga

SEQ ID NO: 1369 - RNA, 22 nt, Homo sapiens
cugacucagacacauguauaug

SEQ ID NO: 1370 - RNA, 20 nt, Homo sapiens
agcauugguuagaacaguag

SEQ ID NO: 1371 - RNA, 22 nt, Homo sapiens
acuguauagauggaguugauuu

SEQ ID NO: 1372 - RNA, 22 nt, Homo sapiens
ugccuaggcuggaaugcaaugg

SEQ ID NO: 1373 - RNA, 22 nt, Homo sapiens
gaggcauugaaauauugcuuau

SEQ ID NO: 1374 - RNA, 22 nt, Homo sapiens
gcaagaugagagcccgggcagu

SEQ ID NO: 1375 - RNA, 22 nt, Homo sapiens
ugaauaguuugacagaacucuu

SEQ ID NO: 1376 - RNA, 22 nt, Homo sapiens
augagaucugugaacaccuguc

SEQ ID NO: 1377 - RNA, 22 nt, Homo sapiens
auggccuaugacagguauguug

SEQ ID NO: 1378 - RNA, 22 nt, Homo sapiens
uaguaucauugaaacggcuugu

SEQ ID NO: 1379 - RNA, 22 nt, Homo sapiens
cauugguuggacaguucucucu

SEQ ID NO: 1380 - RNA, 22 nt, Homo sapiens
uugauauguaguuggacuugau

SEQ ID NO: 1381 - RNA, 22 nt, Homo sapiens
ucugagaugagacuuugaauuu

SEQ ID NO: 1382 - RNA, 22 nt, Homo sapiens
aucuuuggugaguucuuugguc

SEQ ID NO: 1383 - RNA, 22 nt, Homo sapiens
uuggucacugacauguuugaaa

SEQ ID NO: 1384 - RNA, 22 nt, Homo sapiens
gugucccagugugcauacaggu

SEQ ID NO: 1385 - RNA, 22 nt, Homo sapiens
uuccgcuguaguuguugguacc

SEQ ID NO: 1386 - RNA, 22 nt, Homo sapiens
ugaguaauguugaucuuugaua

SEQ ID NO: 1387 - RNA, 22 nt, Homo sapiens
cuauuagguuggugcaaaagua

SEQ ID NO: 1388 - RNA, 23 nt, Homo sapiens
ucuuguacuuugagugagcaugg

SEQ ID NO: 1389 - RNA, 22 nt, Homo sapiens
gguaacaguggggcuaugcuua

SEQ ID NO: 1390 - RNA, 16 nt, Homo sapiens
uacaacagugaguaug

SEQ ID NO: 1391 - RNA, 22 nt, Homo sapiens
aucccuguaacuagcagccccu

SEQ ID NO: 1392 - RNA, 22 nt, Homo sapiens
auaucacaggaaaggaagauac

SEQ ID NO: 1393 - RNA, 22 nt, Homo sapiens
uccauuuguucagcuucaggaa

SEQ ID NO: 1394 - RNA, 20 nt, Homo sapiens
auuugcauuauggagcaccc

SEQ ID NO: 1395 - RNA, 21 nt, Homo sapiens
ggauagaaaacuuggcuguau

SEQ ID NO: 1396 - RNA, 22 nt, Homo sapiens
auugcacuccagccuagguaac

SEQ ID NO: 1397 - RNA, 22 nt, Homo sapiens
gugagauaucuagacuagggaa

SEQ ID NO: 1398 - RNA, 21 nt, Homo sapiens
ucacaucguuuagcugugccu

SEQ ID NO: 1399 - RNA, 22 nt, Homo sapiens
augugcaaaguuaagaucccag

SEQ ID NO: 1400 - RNA, 21 nt, Homo sapiens
uaucccagucacaucuaccca

SEQ ID NO: 1401 - RNA, 22 nt, Homo sapiens
uugguaguuucugucuuuagau

SEQ ID NO: 1402 - RNA, 22 nt, Homo sapiens
agcaagauugauggccugcagg

SEQ ID NO: 1403 - RNA, 22 nt, Homo sapiens
agagcuguguuuuaacuuuuua

SEQ ID NO: 1404 - RNA, 22 nt, Homo sapiens
auggaguguaauauugagagcu

SEQ ID NO: 1405 - RNA, 22 nt, Homo sapiens
auugcacaccagucugggcaaa

SEQ ID NO: 1406 - RNA, 22 nt, Homo sapiens
uuauuagguuagugcaaaaguu

SEQ ID NO: 1407 - RNA, 22 nt, Homo sapiens
auagcuguccuuacuagcuagg

SEQ ID NO: 1408 - RNA, 22 nt, Homo sapiens
ugcagugucaauaauaauuagu

SEQ ID NO: 1409 - RNA, 22 nt, Homo sapiens
uugagggaaacauucacaucau

SEQ ID NO: 1410 - RNA, 22 nt, Homo sapiens
acugcacuccagccugcuggau

SEQ ID NO: 1411 - RNA, 22 nt, Homo sapiens
agaugauguuucuggcacauga

SEQ ID NO: 1412 - RNA, 20 nt, Homo sapiens
ucuggguuuuggccacgccc

SEQ ID NO: 1413 - RNA, 22 nt, Homo sapiens
auagugcugcaauaaacauaca

SEQ ID NO: 1414 - RNA, 22 nt, Homo sapiens
guuaugcagcuuagaaaaugaa

SEQ ID NO: 1415 - RNA, 22 nt, Homo sapiens
augaugcugcaguuguugccaa

SEQ ID NO: 1416 - RNA, 22 nt, Homo sapiens
gucuguuuggggaccuguggcc

SEQ ID NO: 1417 - RNA, 22 nt, Homo sapiens
auacugucucuugcuccugccc

SEQ ID NO: 1418 - RNA, 21 nt, Homo sapiens
aggauaguagauuaaauauuu

SEQ ID NO: 1419 - RNA, 22 nt, Homo sapiens
cugacuaguuuuaaugcagauu

SEQ ID NO: 1420 - RNA, 22 nt, Homo sapiens
ugacucagauagguguguauuc

SEQ ID NO: 1421 - RNA, 22 nt, Homo sapiens
uaggucuuuuaugaaauauauu

SEQ ID NO: 1422 - RNA, 22 nt, Homo sapiens
ugaggaaugaccccgugugguc

SEQ ID NO: 1423 - RNA, 22 nt, Homo sapiens
uaaagagcuuuugaggugucau

SEQ ID NO: 1424 - RNA, 22 nt, Homo sapiens
uaccaugaagguggagagagaa

SEQ ID NO: 1425 - RNA, 21 nt, Homo sapiens
ugacagaaaauugaguuugcu

SEQ ID NO: 1426 - RNA, 22 nt, Homo sapiens
gaaggagcuuaucugccauuuc

SEQ ID NO: 1427 - RNA, 22 nt, Homo sapiens
ugcauagcaaaauaggauuaga

SEQ ID NO: 1428 - RNA, 22 nt, Homo sapiens
aauggcuuucagcuuuucccca

SEQ ID NO: 1429 - RNA, 22 nt, Homo sapiens
ucauacaggccaccagggaagu

SEQ ID NO: 1430 - RNA, 17 nt, Homo sapiens
gcaguacuuaguaagga

SEQ ID NO: 1431 - RNA, 22 nt, Homo sapiens
ugccagaugugcccucuccacc

SEQ ID NO: 1432 - RNA, 22 nt, Homo sapiens
ugacuagggacauucuuccacg

SEQ ID NO: 1433 - RNA, 19 nt, Homo sapiens
gugcauaguuauuaaagag

SEQ ID NO: 1434 - RNA, 20 nt, Homo sapiens
gggaaugcaaauucucaucc

SEQ ID NO: 1435 - RNA, 22 nt, Homo sapiens
uuuugcauuggcugaggagugu

SEQ ID NO: 1436 - RNA, 22 nt, Homo sapiens
gugcgggaggcgcgccuaggug

SEQ ID NO: 1437 - RNA, 22 nt, Homo sapiens
uuuggucccaaugugauaaggu

SEQ ID NO: 1438 - RNA, 22 nt, Homo sapiens
uuuugguuaggauggguggcau

SEQ ID NO: 1439 - RNA, 22 nt, Homo sapiens
uagaaugucagcuucuugaggg

SEQ ID NO: 1440 - RNA, 22 nt, Homo sapiens
uucuggccccucccaaucucau

SEQ ID NO: 1441 - RNA, 22 nt, Homo sapiens
acaauggaauggaguggaaagu

SEQ ID NO: 1442 - RNA, 22 nt, Homo sapiens
uuggaaauguguuugcauucag

SEQ ID NO: 1443 - RNA, 17 nt, Homo sapiens
uuauugcuauaagcuga

SEQ ID NO: 1444 - RNA, 22 nt, Homo sapiens
gagaucuucguguggggagaca

SEQ ID NO: 1445 - RNA, 22 nt, Homo sapiens
gugcauguccacuaguccauau

SEQ ID NO: 1446 - RNA, 22 nt, Homo sapiens
cucacaugcucaccugguguuc

SEQ ID NO: 1447 - RNA, 22 nt, Homo sapiens
caccauguguucagaaggauug

SEQ ID NO: 1448 - RNA, 20 nt, Homo sapiens
ucagugcagauuguccaagu

SEQ ID NO: 1449 - RNA, 17 nt, Homo sapiens
uucucaguucugaucuc

SEQ ID NO: 1450 - RNA, 22 nt, Homo sapiens
ugucaccauuuguaggugagga

SEQ ID NO: 1451 - RNA, 22 nt, Homo sapiens
uuuuuauggccaauccucagaa

SEQ ID NO: 1452 - RNA, 22 nt, Homo sapiens
ucacugugguuuugaugugcau

SEQ ID NO: 1453 - RNA, 22 nt, Homo sapiens
aaaugcccuaaaauggagcauc

SEQ ID NO: 1454 - RNA, 22 nt, Homo sapiens
uguugguuaaaucagguuuuaa

SEQ ID NO: 1455 - RNA, 22 nt, Homo sapiens
auaauaccugccucagagaguu

SEQ ID NO: 1456 - RNA, 22 nt, Homo sapiens
auaugccacugaacuguaccca

SEQ ID NO: 1457 - RNA, 22 nt, Homo sapiens
auacccucugggugguuaguug

SEQ ID NO: 1458 - RNA, 22 nt, Homo sapiens
gaggaguagggcacaaagccuu

SEQ ID NO: 1459 - RNA, 18 nt, Homo sapiens
cugagucauuccuggguc

SEQ ID NO: 1460 - RNA, 22 nt, Homo sapiens
uuguccccacccaaaugucauc

SEQ ID NO: 1461 - RNA, 22 nt, Homo sapiens
uauaagacuagcagcugaauug

SEQ ID NO: 1462 - RNA, 22 nt, Homo sapiens
aagugcuuuuuagauaugguuu

SEQ ID NO: 1463 - RNA, 22 nt, Homo sapiens
uaagacuguguaauuuaugaag

SEQ ID NO: 1464 - RNA, 20 nt, Homo sapiens
gaaacaucuauccucuccuu

SEQ ID NO: 1465 - RNA, 22 nt, Homo sapiens
cauugucccucaaugacuauga

SEQ ID NO: 1466 - RNA, 22 nt, Homo sapiens
gagcuaguguaauauuuugggg

SEQ ID NO: 1467 - RNA, 22 nt, Homo sapiens
uauucaagccaaauucaagcca

SEQ ID NO: 1468 - RNA, 22 nt, Homo sapiens
acacauuggcaauucuggagca

SEQ ID NO: 1469 - RNA, 22 nt, Homo sapiens
uggacauguacauauguguaug

SEQ ID NO: 1470 - RNA, 22 nt, Homo sapiens
ugaguucuuuguagauucugug

SEQ ID NO: 1471 - RNA, 22 nt, Homo sapiens
acaaaguauggaauguuggugu

SEQ ID NO: 1472 - RNA, 22 nt, Homo sapiens
uggaaggucauuguucauuuga

SEQ ID NO: 1473 - RNA, 22 nt, Homo sapiens
ugacaagaguagagagggugcc

SEQ ID NO: 1474 - RNA, 22 nt, Homo sapiens
uugcacuccagccugggugaca

SEQ ID NO: 1475 - RNA, 22 nt, Homo sapiens
ugcccguaauuccagcacuuug

SEQ ID NO: 1476 - RNA, 22 nt, Homo sapiens
uagacaacugaaacacugugca

SEQ ID NO: 1477 - RNA, 22 nt, Homo sapiens
uuugagcuagagucucacucug

SEQ ID NO: 1478 - RNA, 22 nt, Homo sapiens
gucauggacaaggugugagcca

SEQ ID NO: 1479 - RNA, 16 nt, Homo sapiens
ugccuucuucuguauu

SEQ ID NO: 1480 - RNA, 22 nt, Homo sapiens
ucucaguuuucaagcugucgau

SEQ ID NO: 1481 - RNA, 22 nt, Homo sapiens
guauuugauuauagcaugcuua

SEQ ID NO: 1482 - RNA, 22 nt, Homo sapiens
cuagcagacaggcugggagcag

SEQ ID NO: 1483 - RNA, 22 nt, Homo sapiens
uuagcagugucccacuccuugg

SEQ ID NO: 1484 - RNA, 22 nt, Homo sapiens
gucgguguuuccugagaacgaa

SEQ ID NO: 1485 - RNA, 22 nt, Homo sapiens
ggcaaguucuaaugauuagaau

SEQ ID NO: 1486 - RNA, 22 nt, Homo sapiens
acacaugugaaaaaaauguuac

SEQ ID NO: 1487 - RNA, 22 nt, Homo sapiens
ggaugugugcacgcgcacaugc

SEQ ID NO: 1488 - RNA, 22 nt, Homo sapiens
cagaaguauugguaugcucugu

SEQ ID NO: 1489 - RNA, 22 nt, Homo sapiens
auaagugagugauucaguguua

SEQ ID NO: 1490 - RNA, 21 nt, Homo sapiens
uggucccuucagaucggauuu

SEQ ID NO: 1491 - RNA, 22 nt, Homo sapiens
uuaguaguagugcuguaauuuu

SEQ ID NO: 1492 - RNA, 22 nt, Homo sapiens
cugaaagagcauguaacacagu

SEQ ID NO: 1493 - RNA, 22 nt, Homo sapiens
cacugcacuccaguuucgguaa

SEQ ID NO: 1494 - RNA, 22 nt, Homo sapiens
gucauugagucagggaguaucu

SEQ ID NO: 1495 - RNA, 22 nt, Homo sapiens
uauugcuuuacucucuuauccu

SEQ ID NO: 1496 - RNA, 22 nt, Homo sapiens
ucugggguuagucaaagguaug

SEQ ID NO: 1497 - RNA, 22 nt, Homo sapiens
gagguagggucccacuauguug

SEQ ID NO: 1498 - RNA, 22 nt, Homo sapiens
ugacuaggaggcuggaggauga

SEQ ID NO: 1499 - RNA, 22 nt, Homo sapiens
agcucuauuagaagccgugggu

SEQ ID NO: 1500 - RNA, 22 nt, Homo sapiens
cucaguguuucagcugcucaga

SEQ ID NO: 1501 - RNA, 22 nt, Homo sapiens
cuggugagaugucuuuccucuu

SEQ ID NO: 1502 - RNA, 22 nt, Homo sapiens
ggagauuauuaguguuucaugc

SEQ ID NO: 1503 - RNA, 22 nt, Homo sapiens
auccguugcaagggaagaauga

SEQ ID NO: 1504 - RNA, 22 nt, Homo sapiens
accacagugcuuccugcucacg

SEQ ID NO: 1505 - RNA, 22 nt, Homo sapiens
aucacugugauuucuacugugc

SEQ ID NO: 1506 - RNA, 22 nt, Homo sapiens
uugaggacugguugaaagcuuu

SEQ ID NO: 1507 - RNA, 22 nt, Homo sapiens
augcaacuugaaauuuuccgga

SEQ ID NO: 1508 - RNA, 22 nt, Homo sapiens
cacugcaauuacuuuugcacca

SEQ ID NO: 1509 - RNA, 21 nt, Homo sapiens
uccagcuuugagaguuguggu

SEQ ID NO: 1510 - RNA, 22 nt, Homo sapiens
caagagagcugaugguuuuaaa

SEQ ID NO: 1511 - RNA, 22 nt, Homo sapiens
acuguacuccagccugggugac

SEQ ID NO: 1512 - RNA, 22 nt, Homo sapiens
gagauauuuagaaauguguucu

SEQ ID NO: 1513 - RNA, 21 nt, Homo sapiens
uucaccauggcuccacacucu

SEQ ID NO: 1514 - RNA, 22 nt, Homo sapiens
ugccauagagauuuguggaacu

SEQ ID NO: 1515 - RNA, 22 nt, Homo sapiens
guagcagcuacuaaguugcugu

SEQ ID NO: 1516 - RNA, 22 nt, Homo sapiens
gaucaauuggcugaagacacgu

SEQ ID NO: 1517 - RNA, 22 nt, Homo sapiens
ucuuuggaggcgaucuguuuga

SEQ ID NO: 1518 - RNA, 22 nt, Homo sapiens
acugcacuccagccugccgaca

SEQ ID NO: 1519 - RNA, 22 nt, Homo sapiens
uucauggugguacaaaagcaau

SEQ ID NO: 1520 - RNA, 22 nt, Homo sapiens
uauuguccacuuugcacugugu

SEQ ID NO: 1521 - RNA, 22 nt, Homo sapiens
uaagacucuggacucuaauguu

SEQ ID NO: 1522 - RNA, 22 nt, Homo sapiens
uuucagagucaucugcccaagu

SEQ ID NO: 1523 - RNA, 22 nt, Homo sapiens
cugaucuaugaacacaggauau

SEQ ID NO: 1524 - RNA, 22 nt, Homo sapiens
uccauaguugcacucuggagcc

SEQ ID NO: 1525 - RNA, 22 nt, Homo sapiens
auuugguagaguucgauaccug

SEQ ID NO: 1526 - RNA, 22 nt, Homo sapiens
guugcuuauuccuguaauccca

SEQ ID NO: 1527 - RNA, 21 nt, Homo sapiens
caaugacacuguagcugugcu

SEQ ID NO: 1528 - RNA, 22 nt, Homo sapiens
uucauaguauuuuucuccaaau

SEQ ID NO: 1529 - RNA, 22 nt, Homo sapiens
cuuuguguaggugccucuggcu

SEQ ID NO: 1530 - RNA, 22 nt, Homo sapiens
ccucaguguuuaucauuauuuu

SEQ ID NO: 1531 - RNA, 22 nt, Homo sapiens
agagcacuguggguccaaauau

SEQ ID NO: 1532 - RNA, 22 nt, Homo sapiens
uuguaaaguucucucccgaaaa

SEQ ID NO: 1533 - RNA, 22 nt, Homo sapiens
cugcaauguuugaaauggcaaa

SEQ ID NO: 1534 - RNA, 22 nt, Homo sapiens
auaacauggaguuugucauuua

SEQ ID NO: 1535 - RNA, 22 nt, Homo sapiens
uucagguaguuuaacuguucca

SEQ ID NO: 1536 - RNA, 22 nt, Homo sapiens
cgaguguaguaggccauaugaa

SEQ ID NO: 1537 - RNA, 22 nt, Homo sapiens
ucacuauugacaacagugugga

SEQ ID NO: 1538 - RNA, 22 nt, Homo sapiens
agcagcaugcaaauggacuaau

SEQ ID NO: 1539 - RNA, 22 nt, Homo sapiens
aagugcuuccuuucagaggguu

SEQ ID NO: 1540 - RNA, 22 nt, Homo sapiens
agguuaugauuauagagcgagg

SEQ ID NO: 1541 - RNA, 22 nt, Homo sapiens
ucaaugggcuacacauugagug

SEQ ID NO: 1542 - RNA, 22 nt, Homo sapiens
ucugacagugugaauauugacu

SEQ ID NO: 1543 - RNA, 22 nt, Homo sapiens
uuaaucugucuaugauuuuggu

SEQ ID NO: 1544 - RNA, 22 nt, Homo sapiens
auggcauggugcaggguuuaag

SEQ ID NO: 1545 - RNA, 23 nt, Homo sapiens
acugcaauuacguuugcaccaac

SEQ ID NO: 1546 - RNA, 22 nt, Homo sapiens
cuaacacagggcaagucaggcu

SEQ ID NO: 1547 - RNA, 22 nt, Homo sapiens
uagguuaucaaauugguaggca

SEQ ID NO: 1548 - RNA, 22 nt, Homo sapiens
uucuagagagaagacuuaagcu

SEQ ID NO: 1549 - RNA, 22 nt, Homo sapiens
ggagucuugcuauguugccaag

SEQ ID NO: 1550 - RNA, 22 nt, Homo sapiens
aucaaaguaucucaauauggua

SEQ ID NO: 1551 - RNA, 22 nt, Homo sapiens
uucacaugacagggugaagcau

SEQ ID NO: 1552 - RNA, 22 nt, Homo sapiens
ugauccuguccuuaugauguua

SEQ ID NO: 1553 - RNA, 20 nt, Homo sapiens
gucuugcuccguugcccagg

SEQ ID NO: 1554 - RNA, 19 nt, Homo sapiens
augccucaguuuuguacuu

SEQ ID NO: 1555 - RNA, 20 nt, Homo sapiens
ucuggccccuccaaaucuca

SEQ ID NO: 1556 - RNA, 21 nt, Homo sapiens
uucacuggucuauuucccuuu

SEQ ID NO: 1557 - RNA, 22 nt, Homo sapiens
uugcacucugaagaccuacugu

SEQ ID NO: 1558 - RNA, 22 nt, Homo sapiens
uugagauggaguuucacucugu

SEQ ID NO: 1559 - RNA, 22 nt, Homo sapiens
ucuggccuccuaugagaaucga

SEQ ID NO: 1560 - RNA, 22 nt, Homo sapiens
uaguuaguagacucugauuauu

SEQ ID NO: 1561 - RNA, 21 nt, Homo sapiens
cacugcacuugccuucugggu

SEQ ID NO: 1562 - RNA, 22 nt, Homo sapiens
ugaaugcauggggccaagaagg

SEQ ID NO: 1563 - RNA, 22 nt, Homo sapiens
uugagaugaagucuugcucucu

SEQ ID NO: 1564 - RNA, 22 nt, Homo sapiens
uugagaugaaguuuugcucuuu

SEQ ID NO: 1565 - RNA, 22 nt, Homo sapiens
uugugccugguacauggagaaa

SEQ ID NO: 1566 - RNA, 22 nt, Homo sapiens
uagauuaucuaugaggcuucca

SEQ ID NO: 1567 - RNA, 22 nt, Homo sapiens
aucaaguaguuauacguaaagg

SEQ ID NO: 1568 - RNA, 22 nt, Homo sapiens
uuuuauguuuguucccugccaa

SEQ ID NO: 1569 - RNA, 22 nt, Homo sapiens
ggaauuaaggcaauugaaagcu

SEQ ID NO: 1570 - RNA, 17 nt, Homo sapiens
agcagcccauaucccca

SEQ ID NO: 1571 - RNA, 21 nt, Homo sapiens
ucagaagcucccagggaggac

SEQ ID NO: 1572 - RNA, 22 nt, Homo sapiens
aaagugcugggaucacacugaa

SEQ ID NO: 1573 - RNA, 22 nt, Homo sapiens
cuagcacauuuaucuuuauaca

SEQ ID NO: 1574 - RNA, 22 nt, Homo sapiens
ugguuaucauagcuaugcuacu

SEQ ID NO: 1575 - RNA, 22 nt, Homo sapiens
gugugacagcuauagacaugau

SEQ ID NO: 1576 - RNA, 22 nt, Homo sapiens
uaugucacuugguuuggugcua

SEQ ID NO: 1577 - RNA, 22 nt, Homo sapiens
cucacugugguguccuuaggua

SEQ ID NO: 1578 - RNA, 23 nt, Homo sapiens
cuuuguacagcuugacuacuggg

SEQ ID NO: 1579 - RNA, 22 nt, Homo sapiens
ugagauggaguuucacuuuugu

SEQ ID NO: 1580 - RNA, 22 nt, Homo sapiens
ugaacuguaagguauaggugau

SEQ ID NO: 1581 - RNA, 22 nt, Homo sapiens
uaaugcacauuuauuuuaccuu

SEQ ID NO: 1582 - RNA, 22 nt, Homo sapiens
auaaagccaugagcuugagaug

SEQ ID NO: 1583 - RNA, 22 nt, Homo sapiens
uauugcacuccucaugcauuug

SEQ ID NO: 1584 - RNA, 22 nt, Homo sapiens
guggcuuuaaguacgauugagg

SEQ ID NO: 1585 - RNA, 22 nt, Homo sapiens
guacuuuguuauaacccacagg

SEQ ID NO: 1586 - RNA, 20 nt, Homo sapiens
uguagguguacaguaaggag

SEQ ID NO: 1587 - RNA, 22 nt, Homo sapiens
cuagcagcaugagaauggacca

SEQ ID NO: 1588 - RNA, 22 nt, Homo sapiens
auguuuagagagggugucaaau

SEQ ID NO: 1589 - RNA, 22 nt, Homo sapiens
cgaggaguaucuuugugguguu

SEQ ID NO: 1590 - RNA, 22 nt, Homo sapiens
acugcacuccagcuccagggug

SEQ ID NO: 1591 - RNA, 22 nt, Homo sapiens
ucagguagugccaugauugauu

SEQ ID NO: 1592 - RNA, 22 nt, Homo sapiens
cuguaauguaaugagacuacau

SEQ ID NO: 1593 - RNA, 22 nt, Homo sapiens
cuaugagucugcagaucuauua

SEQ ID NO: 1594 - RNA, 22 nt, Homo sapiens
guggcauuucccaaaguauucu

SEQ ID NO: 1595 - RNA, 22 nt, Homo sapiens
uaccuguagcucuucuaggcug

SEQ ID NO: 1596 - RNA, 22 nt, Homo sapiens
cugagguauuuaggugaaagaa

SEQ ID NO: 1597 - RNA, 22 nt, Homo sapiens
uagcacccucuccuaguccugc

SEQ ID NO: 1598 - RNA, 22 nt, Homo sapiens
accccguagagucugcagcuac

SEQ ID NO: 1599 - RNA, 21 nt, Homo sapiens
uacuugagacagggucuugcu

SEQ ID NO: 1600 - RNA, 22 nt, Homo sapiens
cuguggguuuuacuguuuuacu

SEQ ID NO: 1601 - RNA, 21 nt, Homo sapiens
uuuuggucauucaggaagaaa

SEQ ID NO: 1602 - RNA, 21 nt, Homo sapiens
uuucacugugaguuuuucugu

SEQ ID NO: 1603 - RNA, 22 nt, Homo sapiens
gucucccagccuacaucuuucu

SEQ ID NO: 1604 - RNA, 22 nt, Homo sapiens
ggcagcgugcacuuucgccacu

SEQ ID NO: 1605 - RNA, 22 nt, Homo sapiens
uacaucagccugaaagagcucg

SEQ ID NO: 1606 - RNA, 21 nt, Homo sapiens
ucaccuguugcgaugaagcug

SEQ ID NO: 1607 - RNA, 16 nt, Homo sapiens
ucagcgagggagccag

SEQ ID NO: 1608 - RNA, 22 nt, Homo sapiens
uguauguugggucaaaguacau

SEQ ID NO: 1609 - RNA, 22 nt, Homo sapiens
uggugagaaaagaugucuuugu

SEQ ID NO: 1610 - RNA, 22 nt, Homo sapiens
ucucaauuugauuacauucaua

SEQ ID NO: 1611 - RNA, 22 nt, Homo sapiens
uaacacagagcuccuaaucccu

SEQ ID NO: 1612 - RNA, 22 nt, Homo sapiens
uugcucaggcuagaguucagcu

SEQ ID NO: 1613 - RNA, 22 nt, Homo sapiens
cacugcauucuccaccucccag

SEQ ID NO: 1614 - RNA, 21 nt, Homo sapiens
gaggauauuuuuauguuugga

SEQ ID NO: 1615 - RNA, 22 nt, Homo sapiens
uuugagcaagaggugacauuau

SEQ ID NO: 1616 - RNA, 22 nt, Homo sapiens
uaucagcacaguggguucaugg

SEQ ID NO: 1617 - RNA, 22 nt, Homo sapiens
gaggcacucuguacaaaucugc

SEQ ID NO: 1618 - RNA, 22 nt, Homo sapiens
ugcaagaaacauauuccacaag

SEQ ID NO: 1619 - RNA, 22 nt, Homo sapiens
uauccugaagcuuuauuuaagu

SEQ ID NO: 1620 - RNA, 22 nt, Homo sapiens
uucaccuugcccacagcagucu

SEQ ID NO: 1621 - RNA, 22 nt, Homo sapiens
uggcuuuucauccugggacauu

SEQ ID NO: 1622 - RNA, 22 nt, Homo sapiens
uauaugauugguagacccugca

SEQ ID NO: 1623 - RNA, 22 nt, Homo sapiens
uugagguagcuuugauggaggu

SEQ ID NO: 1624 - RNA, 22 nt, Homo sapiens
auagcacacuauagcuucaaac

SEQ ID NO: 1625 - RNA, 22 nt, Homo sapiens
auaugcacgugcauacacacuu

SEQ ID NO: 1626 - RNA, 22 nt, Homo sapiens
uaccacaggcuggguaaucuau

SEQ ID NO: 1627 - RNA, 22 nt, Homo sapiens
cagcacauagcaguugcucagu

SEQ ID NO: 1628 - RNA, 22 nt, Homo sapiens
uaggugauugaagguggaaugu

SEQ ID NO: 1629 - RNA, 18 nt, Homo sapiens
ccagugcaaggaaagccc

SEQ ID NO: 1630 - RNA, 22 nt, Homo sapiens
gagcuacacugauucauuuguu

SEQ ID NO: 1631 - RNA, 19 nt, Homo sapiens
aaguacuugucuuuugaag

SEQ ID NO: 1632 - RNA, 22 nt, Homo sapiens
ugcuauguuuucccuccuuauc

SEQ ID NO: 1633 - RNA, 22 nt, Homo sapiens
acuggcuuaaggaugggccacu

SEQ ID NO: 1634 - RNA, 22 nt, Homo sapiens
uuucaucagccagggucagucu

SEQ ID NO: 1635 - RNA, 22 nt, Homo sapiens
ugaugcuacuaccugggcugaa

SEQ ID NO: 1636 - RNA, 22 nt, Homo sapiens
uagcauggaggcggccauagug

SEQ ID NO: 1637 - RNA, 23 nt, Homo sapiens
acacuugcugaguaaaucaaaua

SEQ ID NO: 1638 - RNA, 22 nt, Homo sapiens
uuugaagcaauugugaauggga

SEQ ID NO: 1639 - RNA, 21 nt, Homo sapiens
ucagugcaauucuauggggaa

SEQ ID NO: 1640 - RNA, 22 nt, Homo sapiens
augaccuuggggaaccaugucu

SEQ ID NO: 1641 - RNA, 22 nt, Homo sapiens
ugagacugagucuugcucuauu

SEQ ID NO: 1642 - RNA, 20 nt, Homo sapiens
ugagaacaugugguauuugg

SEQ ID NO: 1643 - RNA, 22 nt, Homo sapiens
cuggagaucuugacauugaagu

SEQ ID NO: 1644 - RNA, 22 nt, Homo sapiens
ucgcagugcacucuuuuagcuu

SEQ ID NO: 1645 - RNA, 22 nt, Homo sapiens
uacuggccuugaacucuggugu

SEQ ID NO: 1646 - RNA, 22 nt, Homo sapiens
augaagaucaugaagacggcuu

SEQ ID NO: 1647 - RNA, 22 nt, Homo sapiens
aagugcuggccuacucaaucga

SEQ ID NO: 1648 - RNA, 22 nt, Homo sapiens
uguuuuguuagcacucugggaa

SEQ ID NO: 1649 - RNA, 22 nt, Homo sapiens
ucccauugucucugaccuugcc

SEQ ID NO: 1650 - RNA, 22 nt, Homo sapiens
gaucuguuguuuggaaguauca

SEQ ID NO: 1651 - RNA, 22 nt, Homo sapiens
augaacucaucauuuuuauggc

SEQ ID NO: 1652 - RNA, 22 nt, Homo sapiens
uuuccaagaugcuuacuuucuc

SEQ ID NO: 1653 - RNA, 22 nt, Homo sapiens
uuuacugucuucagucccucug

SEQ ID NO: 1654 - RNA, 20 nt, Homo sapiens
augagguguaugacacugaa

SEQ ID NO: 1655 - RNA, 16 nt, Homo sapiens
aguaguuuuacagauu

SEQ ID NO: 1656 - RNA, 22 nt, Homo sapiens
auugcagauucgcuuuguguug

SEQ ID NO: 1657 - RNA, 22 nt, Homo sapiens
ugucauguugguguacugcacc

SEQ ID NO: 1658 - RNA, 22 nt, Homo sapiens
aauggcacuuuauaaauguuaa

SEQ ID NO: 1659 - RNA, 22 nt, Homo sapiens
uuugauguugauacuaccuuca

SEQ ID NO: 1660 - RNA, 21 nt, Homo sapiens
cgucauggagauguguuguac

SEQ ID NO: 1661 - RNA, 22 nt, Homo sapiens
auaugacuuuccucuacuuccu

SEQ ID NO: 1662 - RNA, 22 nt, Homo sapiens
auugcacuccagccugagcaaa

SEQ ID NO: 1663 - RNA, 22 nt, Homo sapiens
aggacacugagcaugggagguu

SEQ ID NO: 1664 - RNA, 22 nt, Homo sapiens
auccaguuuuaggagauuucua

SEQ ID NO: 1665 - RNA, 22 nt, Homo sapiens
augaagucguuacuaccaauug

SEQ ID NO: 1666 - RNA, 22 nt, Homo sapiens
ugaaugcaucauguagggcuca

SEQ ID NO: 1667 - RNA, 22 nt, Homo sapiens
uaugaacacuuuugggaggcau

SEQ ID NO: 1668 - RNA, 22 nt, Homo sapiens
uaucacccuuucauuguucuuc

SEQ ID NO: 1669 - RNA, 22 nt, Homo sapiens
uguggcuuuuucuuggcugagg

SEQ ID NO: 1670 - RNA, 22 nt, Homo sapiens
ucuuaguuuagauuagcaauuc

SEQ ID NO: 1671 - RNA, 17 nt, Homo sapiens
gaaguguuucuucauga

SEQ ID NO: 1672 - RNA, 22 nt, Homo sapiens
cugagguagcucaggguauugc

SEQ ID NO: 1673 - RNA, 22 nt, Homo sapiens
cuggcaaaaagagggcaauaau

SEQ ID NO: 1674 - RNA, 22 nt, Homo sapiens
agcccugugauuacuuuuauaa

SEQ ID NO: 1675 - RNA, 22 nt, Homo sapiens
uagagccauugcagauguuuga

SEQ ID NO: 1676 - RNA, 22 nt, Homo sapiens
uuauacuacuauaaagagguag

SEQ ID NO: 1677 - RNA, 22 nt, Homo sapiens
ucagguaucucuauagcaaugu

SEQ ID NO: 1678 - RNA, 22 nt, Homo sapiens
uggaagacucuagucucuugag

SEQ ID NO: 1679 - RNA, 22 nt, Homo sapiens
uguaaaucugguuaauuggaua

SEQ ID NO: 1680 - RNA, 19 nt, Homo sapiens
ucacaggguugacuugagg

SEQ ID NO: 1681 - RNA, 22 nt, Homo sapiens
aucuuuggauacuugauauagu

SEQ ID NO: 1682 - RNA, 22 nt, Homo sapiens
gauagugaaccaagggguaauu

SEQ ID NO: 1683 - RNA, 22 nt, Homo sapiens
cuuguucuccuaagaugaaugc

SEQ ID NO: 1684 - RNA, 22 nt, Homo sapiens
uacucacauucuguuucuugcu

SEQ ID NO: 1685 - RNA, 22 nt, Homo sapiens
acccugacacgauucuucacuu

SEQ ID NO: 1686 - RNA, 22 nt, Homo sapiens
uugcacucuccagccucggcaa

SEQ ID NO: 1687 - RNA, 22 nt, Homo sapiens
auuccaguuugugagaagcugu

SEQ ID NO: 1688 - RNA, 22 nt, Homo sapiens
aguaagauggcaacucuccaca

SEQ ID NO: 1689 - RNA, 22 nt, Homo sapiens
agagccacauuaaauaugggaa

SEQ ID NO: 1690 - RNA, 22 nt, Homo sapiens
uuguagaucuucaguugcuaca

SEQ ID NO: 1691 - RNA, 22 nt, Homo sapiens
aaagucacuggagaaggaauau

SEQ ID NO: 1692 - RNA, 22 nt, Homo sapiens
ugacaagaacuuuccauaguaa

SEQ ID NO: 1693 - RNA, 20 nt, Homo sapiens
uugacagagggaaaguugcu

SEQ ID NO: 1694 - RNA, 23 nt, Homo sapiens
aagagguaugacuaugaagugga

SEQ ID NO: 1695 - RNA, 22 nt, Homo sapiens
ucucaguuuucuggggaagaaa

SEQ ID NO: 1696 - RNA, 22 nt, Homo sapiens
cuuuuggcuuagaauugucuug

SEQ ID NO: 1697 - RNA, 22 nt, Homo sapiens
cugccuagauguuguagggggu

SEQ ID NO: 1698 - RNA, 20 nt, Homo sapiens
gacauggaggaggauuauua

SEQ ID NO: 1699 - RNA, 22 nt, Homo sapiens
gggaagugugguuucuuuacag

SEQ ID NO: 1700 - RNA, 19 nt, Homo sapiens
accagauugcauucuugga

SEQ ID NO: 1701 - RNA, 22 nt, Homo sapiens
gaagauaucuaguaccauuguc

SEQ ID NO: 1702 - RNA, 22 nt, Homo sapiens
caacugguuuuauacaguuuag

SEQ ID NO: 1703 - RNA, 22 nt, Homo sapiens
gcucugguuacaaaggcaaauu

SEQ ID NO: 1704 - RNA, 22 nt, Homo sapiens
ugacucuagagcugccuguggc

SEQ ID NO: 1705 - RNA, 22 nt, Homo sapiens
uccuuuggguagcuguucagau

SEQ ID NO: 1706 - RNA, 22 nt, Homo sapiens
auggcagcaccccacucuacug

SEQ ID NO: 1707 - RNA, 22 nt, Homo sapiens
gcacugagagaagccccaagua

SEQ ID NO: 1708 - RNA, 22 nt, Homo sapiens
uguacacauaugugggguacau

SEQ ID NO: 1709 - RNA, 22 nt, Homo sapiens
ugucuugagagaggacaugacu

SEQ ID NO: 1710 - RNA, 22 nt, Homo sapiens
augcaagaaauaucucuuuuuc

SEQ ID NO: 1711 - RNA, 20 nt, Homo sapiens
cuugaagacuaugcugcuga

SEQ ID NO: 1712 - RNA, 22 nt, Homo sapiens
aauuugucaccucucucccuuu

SEQ ID NO: 1713 - RNA, 22 nt, Homo sapiens
ugggaagaugcugcuucuuccu

SEQ ID NO: 1714 - RNA, 22 nt, Homo sapiens
uauagcacugagaauguaauuc

SEQ ID NO: 1715 - RNA, 22 nt, Homo sapiens
aacugguauuucccaugaauuu

SEQ ID NO: 1716 - RNA, 22 nt, Homo sapiens
ugccuuauuccaacugagcucu

SEQ ID NO: 1717 - RNA, 22 nt, Homo sapiens
caaauacuuucauguugucuug

SEQ ID NO: 1718 - RNA, 22 nt, Homo sapiens
augcuacugaccccuacuuaca

SEQ ID NO: 1719 - RNA, 22 nt, Homo sapiens
cuuuagcaaggauauggggaug

SEQ ID NO: 1720 - RNA, 22 nt, Homo sapiens
gagacggagucacgcccuguca

SEQ ID NO: 1721 - RNA, 22 nt, Homo sapiens
gaugaaacaucuuuggaaacug

SEQ ID NO: 1722 - RNA, 23 nt, Homo sapiens
uuuggcauuccagaaauuuucau

SEQ ID NO: 1723 - RNA, 22 nt, Homo sapiens
ucuuggcaaagaauuuuuggcu

SEQ ID NO: 1724 - RNA, 20 nt, Homo sapiens
uuauugcggcaucauucaug

SEQ ID NO: 1725 - RNA, 22 nt, Homo sapiens
augcagacacaaguuauaguaa

SEQ ID NO: 1726 - RNA, 22 nt, Homo sapiens
caacagucagcccauccacaga

SEQ ID NO: 1727 - RNA, 22 nt, Homo sapiens
aggauacugguaugggcugaau

SEQ ID NO: 1728 - RNA, 22 nt, Homo sapiens
gagaucacuucuguauucuaca

SEQ ID NO: 1729 - RNA, 22 nt, Homo sapiens
uaaguaguuucuggauauucuc

SEQ ID NO: 1730 - RNA, 21 nt, Homo sapiens
uggaccccuuccagucaucau

SEQ ID NO: 1731 - RNA, 22 nt, Homo sapiens
uagcagcaccccacucuacugg

SEQ ID NO: 1732 - RNA, 22 nt, Homo sapiens
auaucaagugacuggaguucca

SEQ ID NO: 1733 - RNA, 22 nt, Homo sapiens
gcuguguucucgaggcggggga

SEQ ID NO: 1734 - RNA, 22 nt, Homo sapiens
uuggacuucuaacugacaugga

SEQ ID NO: 1735 - RNA, 19 nt, Homo sapiens
guaaugugcuucaguagca

SEQ ID NO: 1736 - RNA, 22 nt, Homo sapiens
ugucauggugcucugggcccug

SEQ ID NO: 1737 - RNA, 22 nt, Homo sapiens
auaaagcaagucucuggccuca

SEQ ID NO: 1738 - RNA, 22 nt, Homo sapiens
uugcacauugauuuuguauccu

SEQ ID NO: 1739 - RNA, 22 nt, Homo sapiens
ugacaucugcuugugcccagga

SEQ ID NO: 1740 - RNA, 22 nt, Homo sapiens
uuuguacugagccaagauggua

SEQ ID NO: 1741 - RNA, 22 nt, Homo sapiens
ugacauggaagauguucaugau

SEQ ID NO: 1742 - RNA, 22 nt, Homo sapiens
augacuuuucugaaaaccacca

SEQ ID NO: 1743 - RNA, 18 nt, Homo sapiens
uuaccagcauaccuacac

SEQ ID NO: 1744 - RNA, 20 nt, Homo sapiens
uggaaggcaucugcauuauu

SEQ ID NO: 1745 - RNA, 22 nt, Homo sapiens
uagauuguaauaugcagaaugg

SEQ ID NO: 1746 - RNA, 22 nt, Homo sapiens
uggagguaggacgaagaacucu

SEQ ID NO: 1747 - RNA, 22 nt, Homo sapiens
agccgguguccacgaagaagag

SEQ ID NO: 1748 - RNA, 19 nt, Homo sapiens
ugucccagccauagaggca

SEQ ID NO: 1749 - RNA, 22 nt, Homo sapiens
ucgugcugugucaucuuguggc

SEQ ID NO: 1750 - RNA, 20 nt, Homo sapiens
ucaaggcacgaauaaaaguu

SEQ ID NO: 1751 - RNA, 17 nt, Homo sapiens
guugaguuugagucaag

SEQ ID NO: 1752 - RNA, 19 nt, Homo sapiens
ccaguguucugauugcacu

SEQ ID NO: 1753 - RNA, 22 nt, Homo sapiens
gggaugaaguugauguagaaag

SEQ ID NO: 1754 - RNA, 22 nt, Homo sapiens
auguauacauagauacgugugu

SEQ ID NO: 1755 - RNA, 22 nt, Homo sapiens
aagagcauuauuuaguaauuuc

SEQ ID NO: 1756 - RNA, 22 nt, Homo sapiens
cugagguacccacuucaucuca

SEQ ID NO: 1757 - RNA, 22 nt, Homo sapiens
uuaagccaggugugguggcaca

SEQ ID NO: 1758 - RNA, 22 nt, Homo sapiens
ucugugcauuacacuuuucuca

SEQ ID NO: 1759 - RNA, 22 nt, Homo sapiens
augaccaaagaaaugcuauagg

SEQ ID NO: 1760 - RNA, 21 nt, Homo sapiens
cacugguguugcuauaucaaa

SEQ ID NO: 1761 - RNA, 22 nt, Homo sapiens
ugagcaagaucuuuauaauuag

SEQ ID NO: 1762 - RNA, 22 nt, Homo sapiens
caggcagugggagacaaaacug

SEQ ID NO: 1763 - RNA, 23 nt, Homo sapiens
agcaccaccccaggucacaagug

SEQ ID NO: 1764 - RNA, 22 nt, Homo sapiens
augccacugcacuucagccugc

SEQ ID NO: 1765 - RNA, 22 nt, Homo sapiens
uagcaacauucagcucagguac

SEQ ID NO: 1766 - RNA, 22 nt, Homo sapiens
cauguaacaucccgcuguagga

SEQ ID NO: 1767 - RNA, 18 nt, Homo sapiens
uuguggccccuacaaauu

SEQ ID NO: 1768 - RNA, 22 nt, Homo sapiens
uugagauggagucuuguucucu

SEQ ID NO: 1769 - RNA, 22 nt, Homo sapiens
ggagaucuuuaggaguuggacu

SEQ ID NO: 1770 - RNA, 22 nt, Homo sapiens
gauuggccaaacuaaagaacug

SEQ ID NO: 1771 - RNA, 20 nt, Homo sapiens
ugaaacacauggacuggggu

SEQ ID NO: 1772 - RNA, 22 nt, Homo sapiens
gcuguauuguugaaggaaaugu

SEQ ID NO: 1773 - RNA, 22 nt, Homo sapiens
ucagucuuuuuuuggcaagcau

SEQ ID NO: 1774 - RNA, 22 nt, Homo sapiens
ucuuugguaugugcaugugcuu

SEQ ID NO: 1775 - RNA, 22 nt, Homo sapiens
caccagcuggcauugaauaccu

SEQ ID NO: 1776 - RNA, 22 nt, Homo sapiens
uaaugcuguggucugguuuaaa

SEQ ID NO: 1777 - RNA, 22 nt, Homo sapiens
guucagucacgugcccaaguuc

SEQ ID NO: 1778 - RNA, 22 nt, Homo sapiens
auagguuuucacuguagauucu

SEQ ID NO: 1779 - RNA, 20 nt, Homo sapiens
uauuacagaguaauggugga

SEQ ID NO: 1780 - RNA, 22 nt, Homo sapiens
uuggaaacaccuggugagguua

SEQ ID NO: 1781 - RNA, 22 nt, Homo sapiens
cugacaugcagccacugcaccu

SEQ ID NO: 1782 - RNA, 22 nt, Homo sapiens
ugugagaaaugcagaaucucag

SEQ ID NO: 1783 - RNA, 19 nt, Homo sapiens
gggucaguuugaaugauua

SEQ ID NO: 1784 - RNA, 17 nt, Homo sapiens
acccagucuuuuugcac

SEQ ID NO: 1785 - RNA, 22 nt, Homo sapiens
cuguauguuucuaugaauguga

SEQ ID NO: 1786 - RNA, 22 nt, Homo sapiens
uguugcacugguaauguacuga

SEQ ID NO: 1787 - RNA, 22 nt, Homo sapiens
ggcaagugggagggaguguuuc

SEQ ID NO: 1788 - RNA, 22 nt, Homo sapiens
uaucacuuuuccagcccagcuu

SEQ ID NO: 1789 - RNA, 22 nt, Homo sapiens
agcuaaaucucauguugaauug

SEQ ID NO: 1790 - RNA, 22 nt, Homo sapiens
gucauggacaguuugcuaauug

SEQ ID NO: 1791 - RNA, 22 nt, Homo sapiens
aggcagcuguuauauacugagu

SEQ ID NO: 1792 - RNA, 22 nt, Homo sapiens
uuuugguauauacggggguccu

SEQ ID NO: 1793 - RNA, 22 nt, Homo sapiens
acacaguguuuauugugguuag

SEQ ID NO: 1794 - RNA, 22 nt, Homo sapiens
uuacaugucuugguaagguuag

SEQ ID NO: 1795 - RNA, 22 nt, Homo sapiens
gcuccauuuuccauuucucuaa

SEQ ID NO: 1796 - RNA, 22 nt, Homo sapiens
agcauuaguugugaagccuuua

SEQ ID NO: 1797 - RNA, 22 nt, Homo sapiens
auggcucaguguguaucuauca

SEQ ID NO: 1798 - RNA, 22 nt, Homo sapiens
ugucaaguugugguucaauuuu

SEQ ID NO: 1799 - RNA, 23 nt, Homo sapiens
uacuaguaagcguguucuuugca

SEQ ID NO: 1800 - RNA, 22 nt, Homo sapiens
agugcaguggcacaaucuuggc

SEQ ID NO: 1801 - RNA, 22 nt, Homo sapiens
gucuuuggaaagacaaaguuca

SEQ ID NO: 1802 - RNA, 22 nt, Homo sapiens
ggagauuauugaaucaugaggg

SEQ ID NO: 1803 - RNA, 22 nt, Homo sapiens
agcaacauggaguuugugcgca

SEQ ID NO: 1804 - RNA, 22 nt, Homo sapiens
uuuaugagguagagugguuuau

SEQ ID NO: 1805 - RNA, 22 nt, Homo sapiens
aagcuggcauucaugagauuac

SEQ ID NO: 1806 - RNA, 22 nt, Homo sapiens
augaucacuguggaaauucagc

SEQ ID NO: 1807 - RNA, 19 nt, Homo sapiens
gcagagaugugguagcuug

SEQ ID NO: 1808 - RNA, 22 nt, Homo sapiens
ugaugguguuaccaucuuuacu

SEQ ID NO: 1809 - RNA, 22 nt, Homo sapiens
uggaguguuggggcaggaucuc

SEQ ID NO: 1810 - RNA, 21 nt, Homo sapiens
aguagcacugugucuuacaaa

SEQ ID NO: 1811 - RNA, 22 nt, Homo sapiens
uuuguguccccacccaaaucuc

SEQ ID NO: 1812 - RNA, 22 nt, Homo sapiens
auagccaguagagagcuguuag

SEQ ID NO: 1813 - RNA, 22 nt, Homo sapiens
gagacauguuugccaauaauuu

SEQ ID NO: 1814 - RNA, 22 nt, Homo sapiens
gacuggccauugauacagaggu

SEQ ID NO: 1815 - RNA, 22 nt, Homo sapiens
uuaaucacagugucuuccuuca

SEQ ID NO: 1816 - RNA, 22 nt, Homo sapiens
uagagcacaagguagauuucua

SEQ ID NO: 1817 - RNA, 22 nt, Homo sapiens
aaaagcauucagagugcugggc

SEQ ID NO: 1818 - RNA, 22 nt, Homo sapiens
uuggcagaauguuagaaacuua

SEQ ID NO: 1819 - RNA, 22 nt, Homo sapiens
acacauacacauaugguguaua

SEQ ID NO: 1820 - RNA, 22 nt, Homo sapiens
acagauagacauauauagcuca

SEQ ID NO: 1821 - RNA, 22 nt, Homo sapiens
uugugucccugcggcugaggag

SEQ ID NO: 1822 - RNA, 22 nt, Homo sapiens
gugguuuuuaaaguaccugugg

SEQ ID NO: 1823 - RNA, 19 nt, Homo sapiens
uaugagcuaugacaugcau

SEQ ID NO: 1824 - RNA, 22 nt, Homo sapiens
guaaucucagcuacuugggagu

SEQ ID NO: 1825 - RNA, 22 nt, Homo sapiens
augguacuggguaaaagugggg

SEQ ID NO: 1826 - RNA, 22 nt, Homo sapiens
ugagaacauggagaacccccca

SEQ ID NO: 1827 - RNA, 22 nt, Homo sapiens
gcugugguuuaguagaaagaag

SEQ ID NO: 1828 - RNA, 22 nt, Homo sapiens
gugcaguuuugagugaguuucu

SEQ ID NO: 1829 - RNA, 22 nt, Homo sapiens
uagguuguguucugagccucag

SEQ ID NO: 1830 - RNA, 22 nt, Homo sapiens
aauggcuuuuaauauccauaau

SEQ ID NO: 1831 - RNA, 22 nt, Homo sapiens
guguauauccuauuaguucugu

SEQ ID NO: 1832 - RNA, 22 nt, Homo sapiens
cugacacuucaaaacugccaau

SEQ ID NO: 1833 - RNA, 22 nt, Homo sapiens
uccuggcuccacuguuuauucc

SEQ ID NO: 1834 - RNA, 23 nt, Homo sapiens
uuuauacguugucauuuaucagg

SEQ ID NO: 1835 - RNA, 22 nt, Homo sapiens
acacaugcuccacuguggccuc

SEQ ID NO: 1836 - RNA, 22 nt, Homo sapiens
ugccuaguagaaggugaacaug

SEQ ID NO: 1837 - RNA, 22 nt, Homo sapiens
ccaguuuuucauuuauacuagu

SEQ ID NO: 1838 - RNA, 20 nt, Homo sapiens
uggaaugcagccuccuucug

SEQ ID NO: 1839 - RNA, 22 nt, Homo sapiens
uuacagcagugccccacuccca

SEQ ID NO: 1840 - RNA, 22 nt, Homo sapiens
acccuacauaguagauccuaca

SEQ ID NO: 1841 - RNA, 22 nt, Homo sapiens
augauaugagaaaggaucaaca

SEQ ID NO: 1842 - RNA, 22 nt, Homo sapiens
gucagcaaaguucuccugcaga

SEQ ID NO: 1843 - RNA, 22 nt, Homo sapiens
acccugucagcuggccugggca

SEQ ID NO: 1844 - RNA, 21 nt, Homo sapiens
ucaucaagcuguagacaugau

SEQ ID NO: 1845 - RNA, 22 nt, Homo sapiens
auaaugacuuccaguuccacuc

SEQ ID NO: 1846 - RNA, 22 nt, Homo sapiens
agugcuuguacaaaccccgagg

SEQ ID NO: 1847 - RNA, 22 nt, Homo sapiens
uugauaacauucugcauccuau

SEQ ID NO: 1848 - RNA, 22 nt, Homo sapiens
uuccuguagcgauuuuaguaau

SEQ ID NO: 1849 - RNA, 22 nt, Homo sapiens
auuguacucuagccucugggca

SEQ ID NO: 1850 - RNA, 21 nt, Homo sapiens
uguauacauauguuaggugca

SEQ ID NO: 1851 - RNA, 22 nt, Homo sapiens
augcaaacagcuaucuggcugg

SEQ ID NO: 1852 - RNA, 21 nt, Homo sapiens
ugauguugaccuaaguaguga

SEQ ID NO: 1853 - RNA, 22 nt, Homo sapiens
accuguagcagacuuaauauuu

SEQ ID NO: 1854 - RNA, 22 nt, Homo sapiens
uguagggagagggaguugcacc

SEQ ID NO: 1855 - RNA, 22 nt, Homo sapiens
caguagcaugccucagaaugag

SEQ ID NO: 1856 - RNA, 22 nt, Homo sapiens
ggagcucaucuagcauagaggu

SEQ ID NO: 1857 - RNA, 22 nt, Homo sapiens
cuagaguagaguuuccuuagga

SEQ ID NO: 1858 - RNA, 22 nt, Homo sapiens
cuacagaguaucuaaagaggua

SEQ ID NO: 1859 - RNA, 22 nt, Homo sapiens
uacaccaauuuaaucaaaagca

SEQ ID NO: 1860 - RNA, 22 nt, Homo sapiens
ugugaucauuucaggaauuuug

SEQ ID NO: 1861 - RNA, 22 nt, Homo sapiens
uugaaagcuaucagagauucca

SEQ ID NO: 1862 - RNA, 22 nt, Homo sapiens
auaaguauuuggacuuuacugu

SEQ ID NO: 1863 - RNA, 22 nt, Homo sapiens
uuuguucuucguuccugagcca

SEQ ID NO: 1864 - RNA, 22 nt, Homo sapiens
uuuguccugccaugguuuauuu

SEQ ID NO: 1865 - RNA, 22 nt, Homo sapiens
uagcugcccagcacgaaguugg

SEQ ID NO: 1866 - RNA, 22 nt, Homo sapiens
uaucacagguggacugcacacc

SEQ ID NO: 1867 - RNA, 22 nt, Homo sapiens
uucauaguguuuccuuccagug

SEQ ID NO: 1868 - RNA, 20 nt, Homo sapiens
uuggcagagucuuuagggua

SEQ ID NO: 1869 - RNA, 19 nt, Homo sapiens
uaggugguuuuccccucac

SEQ ID NO: 1870 - RNA, 22 nt, Homo sapiens
uuugugucccuacccgaaucuc

SEQ ID NO: 1871 - RNA, 20 nt, Homo sapiens
aagcaagcauuugcaaucau

SEQ ID NO: 1872 - RNA, 18 nt, Homo sapiens
ucucacagcaaucuguca

SEQ ID NO: 1873 - RNA, 22 nt, Homo sapiens
guaaucuguaguaaagcaccau

SEQ ID NO: 1874 - RNA, 22 nt, Homo sapiens
gcagugugaucacagcuuacug

SEQ ID NO: 1875 - RNA, 22 nt, Homo sapiens
uauggguguuauugcaugggag

SEQ ID NO: 1876 - RNA, 21 nt, Homo sapiens
uaaaacuguaacuuuguccug

SEQ ID NO: 1877 - RNA, 22 nt, Homo sapiens
uguggcugguggcaccuuuucc

SEQ ID NO: 1878 - RNA, 22 nt, Homo sapiens
cauugcacuccagccugaguga

SEQ ID NO: 1879 - RNA, 22 nt, Homo sapiens
ugcauauguucaaaguauucug

SEQ ID NO: 1880 - RNA, 22 nt, Homo sapiens
aguggauuuuauuugacaacua

SEQ ID NO: 1881 - RNA, 20 nt, Homo sapiens
uuggugaccuguuugguauu

SEQ ID NO: 1882 - RNA, 22 nt, Homo sapiens
augagagugagagcagccccuu

SEQ ID NO: 1883 - RNA, 22 nt, Homo sapiens
gaucugagaaagugucauaaca

SEQ ID NO: 1884 - RNA, 22 nt, Homo sapiens
uuucacagagggcuucuuucua

SEQ ID NO: 1885 - RNA, 22 nt, Homo sapiens
ugccuagagagaaccauaacug

SEQ ID NO: 1886 - RNA, 22 nt, Homo sapiens
uggcggagacauggacuucaga

SEQ ID NO: 1887 - RNA, 22 nt, Homo sapiens
uguaugaguuguuuauaaauuu

SEQ ID NO: 1888 - RNA, 22 nt, Homo sapiens
ucaaguaguaacuaacugugac

SEQ ID NO: 1889 - RNA, 22 nt, Homo sapiens
uacaguaauguuaaucuuugug

SEQ ID NO: 1890 - RNA, 22 nt, Homo sapiens
ucuugcauuuuuaaauagugcu

SEQ ID NO: 1891 - RNA, 22 nt, Homo sapiens
agugauauguuugccuugaggg

SEQ ID NO: 1892 - RNA, 22 nt, Homo sapiens
gaggcaaguggccaccgagucu

SEQ ID NO: 1893 - RNA, 22 nt, Homo sapiens
aucgcaauguuuagaauuuugu

SEQ ID NO: 1894 - RNA, 18 nt, Homo sapiens
uggauuggaaaaguuccu

SEQ ID NO: 1895 - RNA, 22 nt, Homo sapiens
ugagauggcugaauucagaaua

SEQ ID NO: 1896 - RNA, 22 nt, Homo sapiens
agauggucuucauaaguuuuaa

SEQ ID NO: 1897 - RNA, 22 nt, Homo sapiens
uuggaauguacucuagccuaug

SEQ ID NO: 1898 - RNA, 22 nt, Homo sapiens
auuaaguuaggauuuugagaua

SEQ ID NO: 1899 - RNA, 22 nt, Homo sapiens
acacuggaguuaaaggugauuu

SEQ ID NO: 1900 - RNA, 22 nt, Homo sapiens
uuggaagagaagggagauaaac

SEQ ID NO: 1901 - RNA, 22 nt, Homo sapiens
uucacagccgcaccccaucacu

SEQ ID NO: 1902 - RNA, 22 nt, Homo sapiens
uagcaccaggguugacugaccu

SEQ ID NO: 1903 - RNA, 22 nt, Homo sapiens
ugagacggagucuugcucuguc

SEQ ID NO: 1904 - RNA, 22 nt, Homo sapiens
ugagacggagucucgcucuguu

SEQ ID NO: 1905 - RNA, 22 nt, Homo sapiens
uuugauugguguaccugaaagu

SEQ ID NO: 1906 - RNA, 22 nt, Homo sapiens
ucagcaucacaggcagugagug

SEQ ID NO: 1907 - RNA, 22 nt, Homo sapiens
guggcaaacucagcaugcccca

SEQ ID NO: 1908 - RNA, 22 nt, Homo sapiens
gaauagugcugcaaugaacaua

SEQ ID NO: 1909 - RNA, 22 nt, Homo sapiens
auggaagaaacgauuuucugga

SEQ ID NO: 1910 - RNA, 22 nt, Homo sapiens
ccaggguugagacccacugacu

SEQ ID NO: 1911 - RNA, 22 nt, Homo sapiens
aguuuugguugaguuacuagca

SEQ ID NO: 1912 - RNA, 22 nt, Homo sapiens
uggcaaagugugacgugggggu

SEQ ID NO: 1913 - RNA, 22 nt, Homo sapiens
cuugccuuugucuucaaaggcu

SEQ ID NO: 1914 - RNA, 22 nt, Homo sapiens
guacaguaguaaaagugaauga

SEQ ID NO: 1915 - RNA, 22 nt, Homo sapiens
uucagagagggagggauaccua

SEQ ID NO: 1916 - RNA, 22 nt, Homo sapiens
uucacagaguuauuuuuaugcu

SEQ ID NO: 1917 - RNA, 22 nt, Homo sapiens
uguguaaauaugauagaggaau

SEQ ID NO: 1918 - RNA, 22 nt, Homo sapiens
uaacaagagagucagucagucc

SEQ ID NO: 1919 - RNA, 22 nt, Homo sapiens
uugauuagugacuggcuacacg

SEQ ID NO: 1920 - RNA, 22 nt, Homo sapiens
augacugagacuaacuuacuuu

SEQ ID NO: 1921 - RNA, 22 nt, Homo sapiens
ggucaggagaaugguaacugag

SEQ ID NO: 1922 - RNA, 22 nt, Homo sapiens
aggaaugucaaugguaguuuaa

SEQ ID NO: 1923 - RNA, 22 nt, Homo sapiens
augcuaugugugacuucuuaug

SEQ ID NO: 1924 - RNA, 22 nt, Homo sapiens
agugaaaugucaccuuuuagga

SEQ ID NO: 1925 - RNA, 22 nt, Homo sapiens
auauuacagagaggaccuggga

SEQ ID NO: 1926 - RNA, 23 nt, Homo sapiens
aagucauggaaucaaaugaggug

SEQ ID NO: 1927 - RNA, 22 nt, Homo sapiens
ccccugaaacucacucauuauc

SEQ ID NO: 1928 - RNA, 22 nt, Homo sapiens
uugaccacugggcacaguaagu

SEQ ID NO: 1929 - RNA, 22 nt, Homo sapiens
uucacugagccagacuaagaca

SEQ ID NO: 1930 - RNA, 22 nt, Homo sapiens
uacugcuuaagggcaugggccc

SEQ ID NO: 1931 - RNA, 22 nt, Homo sapiens
uacacacguguguauauauaca

SEQ ID NO: 1932 - RNA, 22 nt, Homo sapiens
ccacuguuuaaauggcugagga

SEQ ID NO: 1933 - RNA, 20 nt, Homo sapiens
uacaggacugagaaucugug

SEQ ID NO: 1934 - RNA, 22 nt, Homo sapiens
uugugcaaaaguaauugcgguu

SEQ ID NO: 1935 - RNA, 22 nt, Homo sapiens
uuaugguuuuucugugagaugg

SEQ ID NO: 1936 - RNA, 22 nt, Homo sapiens
acugcacuccagccucgugaca

SEQ ID NO: 1937 - RNA, 22 nt, Homo sapiens
aaagcacugaauaaauuugcuu

SEQ ID NO: 1938 - RNA, 22 nt, Homo sapiens
uauuccacacuguuggugggau

SEQ ID NO: 1939 - RNA, 22 nt, Homo sapiens
uugucucacuggaguuuaguaa

SEQ ID NO: 1940 - RNA, 22 nt, Homo sapiens
uugguaaugggcugguauaacc

SEQ ID NO: 1941 - RNA, 22 nt, Homo sapiens
uuccuuaguuauuugguccccu

SEQ ID NO: 1942 - RNA, 22 nt, Homo sapiens
gugcagugugauccuuccguau

SEQ ID NO: 1943 - RNA, 22 nt, Homo sapiens
ggugagaaagggauuccuguuc

SEQ ID NO: 1944 - RNA, 22 nt, Homo sapiens
ccacccuuccacacccugggua

SEQ ID NO: 1945 - RNA, 22 nt, Homo sapiens
uggauugcaaaaucuuuuugag

SEQ ID NO: 1946 - RNA, 22 nt, Homo sapiens
ugugaaugaagaaugcuaaccu

SEQ ID NO: 1947 - RNA, 22 nt, Homo sapiens
aguacacuguuaaaaagaagug

SEQ ID NO: 1948 - RNA, 22 nt, Homo sapiens
uggagugcaauggugagaucuu

SEQ ID NO: 1949 - RNA, 22 nt, Homo sapiens
uuggggcacggccucuguugcc

SEQ ID NO: 1950 - RNA, 21 nt, Homo sapiens
ugagauuauauuaacauggua

SEQ ID NO: 1951 - RNA, 22 nt, Homo sapiens
auuuccuguaggggcuugcgaa

SEQ ID NO: 1952 - RNA, 22 nt, Homo sapiens
auggcagagucagaaagucagg

SEQ ID NO: 1953 - RNA, 22 nt, Homo sapiens
uuugcacuggagauucaauggg

SEQ ID NO: 1954 - RNA, 22 nt, Homo sapiens
uggaaauuaacagggauugucc

SEQ ID NO: 1955 - RNA, 22 nt, Homo sapiens
ugaagcuuguuucuguaccuuu

SEQ ID NO: 1956 - RNA, 19 nt, Homo sapiens
uacugcaccucaaccuggg

SEQ ID NO: 1957 - RNA, 22 nt, Homo sapiens
uuggacuacagauuacuucauc

SEQ ID NO: 1958 - RNA, 22 nt, Homo sapiens
augcagugugcaacagauuaag

SEQ ID NO: 1959 - RNA, 22 nt, Homo sapiens
uaacaguauaugugguaucuau

SEQ ID NO: 1960 - RNA, 22 nt, Homo sapiens
ugaguuccuuucccaguccagu

SEQ ID NO: 1961 - RNA, 22 nt, Homo sapiens
uuggaccacuugauuucugguc

SEQ ID NO: 1962 - RNA, 22 nt, Homo sapiens
gcaccacugcacucucagcuug

SEQ ID NO: 1963 - RNA, 22 nt, Homo sapiens
uaagcuguguggacuaugccuc

SEQ ID NO: 1964 - RNA, 20 nt, Homo sapiens
uauugcacuccagucugggc

SEQ ID NO: 1965 - RNA, 22 nt, Homo sapiens
uugagauaggaacucacuaugc

SEQ ID NO: 1966 - RNA, 22 nt, Homo sapiens
acccagaguuccuugucuuuca

SEQ ID NO: 1967 - RNA, 22 nt, Homo sapiens
guacccaguagauaguuuuuca

SEQ ID NO: 1968 - RNA, 22 nt, Homo sapiens
acuggcuuauuucacuuagcau

SEQ ID NO: 1969 - RNA, 22 nt, Homo sapiens
uccgaguguuagagagcugugu

SEQ ID NO: 1970 - RNA, 22 nt, Homo sapiens
cuacuauguagagauauugaau

SEQ ID NO: 1971 - RNA, 22 nt, Homo sapiens
cugcaaauacuugugggauuuu

SEQ ID NO: 1972 - RNA, 22 nt, Homo sapiens
uaucaugggggguguacacucc

SEQ ID NO: 1973 - RNA, 22 nt, Homo sapiens
ucauccauacaguuagcaaagg

SEQ ID NO: 1974 - RNA, 23 nt, Homo sapiens
uucuaucaggcccaggagcccug

SEQ ID NO: 1975 - RNA, 16 nt, Homo sapiens
gacaugaucuuguuua

SEQ ID NO: 1976 - RNA, 22 nt, Homo sapiens
aaaguucugcguuagggcuaaa

SEQ ID NO: 1977 - RNA, 22 nt, Homo sapiens
ggcuagauauucacauauggcu

SEQ ID NO: 1978 - RNA, 22 nt, Homo sapiens
ugggcagugggacagcuuugug

SEQ ID NO: 1979 - RNA, 22 nt, Homo sapiens
uaggcaguguucucacuuguaa

SEQ ID NO: 1980 - RNA, 22 nt, Homo sapiens
agagguagaagauaggcuacag

SEQ ID NO: 1981 - RNA, 22 nt, Homo sapiens
cuaaucuagccuuauaaguauu

SEQ ID NO: 1982 - RNA, 22 nt, Homo sapiens
uagcagugugaaaacagacuaa

SEQ ID NO: 1983 - RNA, 20 nt, Homo sapiens
uaagugcuugagacuucuga

SEQ ID NO: 1984 - RNA, 22 nt, Homo sapiens
uaugucuggaguuacugagcug

SEQ ID NO: 1985 - RNA, 22 nt, Homo sapiens
ugcuuaggcuuccuuacaguau

SEQ ID NO: 1986 - RNA, 22 nt, Homo sapiens
acugagaucuuuaaauaaauaa

SEQ ID NO: 1987 - RNA, 22 nt, Homo sapiens
gaucacauuguuucauacauau

SEQ ID NO: 1988 - RNA, 22 nt, Homo sapiens
uauagcuauuguuaauggaacu

SEQ ID NO: 1989 - RNA, 22 nt, Homo sapiens
uccccugagucaccugcuucuc

SEQ ID NO: 1990 - RNA, 22 nt, Homo sapiens
uuggcuauagauacauggauua

SEQ ID NO: 1991 - RNA, 22 nt, Homo sapiens
uguuaguuguucauguuaagag

SEQ ID NO: 1992 - RNA, 22 nt, Homo sapiens
guuuggcuuucucucuauccug

SEQ ID NO: 1993 - RNA, 18 nt, Homo sapiens
aagagcucagcacagguu

SEQ ID NO: 1994 - RNA, 22 nt, Homo sapiens
ugcauggagauauacaguuuuu

SEQ ID NO: 1995 - RNA, 22 nt, Homo sapiens
uugcauauucucugaggcagga

SEQ ID NO: 1996 - RNA, 22 nt, Homo sapiens
gacuauguuaccuuacacauca

SEQ ID NO: 1997 - RNA, 22 nt, Homo sapiens
uucagcacaguguggaucauuc

SEQ ID NO: 1998 - RNA, 22 nt, Homo sapiens
uuagcccaucuugaggaaagua

SEQ ID NO: 1999 - RNA, 21 nt, Homo sapiens
ccugaugaccucugagaguua

SEQ ID NO: 2000 - RNA, 22 nt, Homo sapiens
aagugcaaauucccaggcucug

SEQ ID NO: 2001 - RNA, 22 nt, Homo sapiens
ucuggcuuuuaacaucuauaaa

SEQ ID NO: 2002 - RNA, 22 nt, Homo sapiens
uguuacagugacuaauguuuua

SEQ ID NO: 2003 - RNA, 22 nt, Homo sapiens
accuggguguauguucaguuug

SEQ ID NO: 2004 - RNA, 22 nt, Homo sapiens
uagcuguuggugggaagucaga

SEQ ID NO: 2005 - RNA, 22 nt, Homo sapiens
cacugaaugugagguuggggag

SEQ ID NO: 2006 - RNA, 22 nt, Homo sapiens
acaucuguacaguggguguggu

SEQ ID NO: 2007 - RNA, 22 nt, Homo sapiens
cuuuugcugggucagcgguggu

SEQ ID NO: 2008 - RNA, 22 nt, Homo sapiens
ugagcaauaaaguuacacaguu

SEQ ID NO: 2009 - RNA, 22 nt, Homo sapiens
gggaacauggaaauucugcucu

SEQ ID NO: 2010 - RNA, 22 nt, Homo sapiens
cuuuuggugguucugaugcagg

SEQ ID NO: 2011 - RNA, 22 nt, Homo sapiens
uugauaauguuaacuuugguca

SEQ ID NO: 2012 - RNA, 19 nt, Homo sapiens
ucuuuagucacauuuuuau

SEQ ID NO: 2013 - RNA, 22 nt, Homo sapiens
uucguuuguaauccuuacagca

SEQ ID NO: 2014 - RNA, 22 nt, Homo sapiens
aguccagguuuuguaauggcaa

SEQ ID NO: 2015 - RNA, 22 nt, Homo sapiens
ucucuguuugucuguuacuggu

SEQ ID NO: 2016 - RNA, 22 nt, Homo sapiens
ucacagaugaggcgagaggcag

SEQ ID NO: 2017 - RNA, 23 nt, Homo sapiens
ugguuuguaagagauggacugga

SEQ ID NO: 2018 - RNA, 22 nt, Homo sapiens
aagugcauguauuaguguaguc

SEQ ID NO: 2019 - RNA, 22 nt, Homo sapiens
ucacuggagguuccugaaguuc

SEQ ID NO: 2020 - RNA, 22 nt, Homo sapiens
acagugcuuucaauguucagua

SEQ ID NO: 2021 - RNA, 22 nt, Homo sapiens
aguucaaugcucuuucuacuau

SEQ ID NO: 2022 - RNA, 22 nt, Homo sapiens
cacagugaacugguggguuuuu

SEQ ID NO: 2023 - RNA, 22 nt, Homo sapiens
auaguacuauugcaguguuaua

SEQ ID NO: 2024 - RNA, 22 nt, Homo sapiens
gugcucauuuagagagaagcac

SEQ ID NO: 2025 - RNA, 22 nt, Homo sapiens
ugugaacugagcauuaacuaca

SEQ ID NO: 2026 - RNA, 22 nt, Homo sapiens
uugugaagaugugaagcaagca

SEQ ID NO: 2027 - RNA, 22 nt, Homo sapiens
ucacuggaggagaggaagugga

SEQ ID NO: 2028 - RNA, 22 nt, Homo sapiens
uuuugcuugugaauagccacau

SEQ ID NO: 2029 - RNA, 22 nt, Homo sapiens
uuagaugguucaccaugaguag

SEQ ID NO: 2030 - RNA, 22 nt, Homo sapiens
uugucacuauaaauaagcauuu

SEQ ID NO: 2031 - RNA, 21 nt, Homo sapiens
ugaaguguaaccgugcagggc

SEQ ID NO: 2032 - RNA, 22 nt, Homo sapiens
uucugccaaucaacccacaucc

SEQ ID NO: 2033 - RNA, 22 nt, Homo sapiens
auggaggccuacagaauuuugg

SEQ ID NO: 2034 - RNA, 22 nt, Homo sapiens
uuugccuguagacacuuacccu

SEQ ID NO: 2035 - RNA, 22 nt, Homo sapiens
aaagugcacuuggaagagggcc

SEQ ID NO: 2036 - RNA, 18 nt, Homo sapiens
cuaugccacuuuauauca

SEQ ID NO: 2037 - RNA, 21 nt, Homo sapiens
agcugguuucuucuuacuccu

SEQ ID NO: 2038 - RNA, 22 nt, Homo sapiens
gguaucuuggagagagaaguga

SEQ ID NO: 2039 - RNA, 22 nt, Homo sapiens
auguaauguuaaauugcuaauu

SEQ ID NO: 2040 - RNA, 15 nt, Homo sapiens
aaacccugucucaag

SEQ ID NO: 2041 - RNA, 18 nt, Homo sapiens
uucaucaguccucagcug

SEQ ID NO: 2042 - RNA, 22 nt, Homo sapiens
augggcaaauguuggaaauucc

SEQ ID NO: 2043 - RNA, 19 nt, Homo sapiens
caauacuucuuggcauaca

SEQ ID NO: 2044 - RNA, 22 nt, Homo sapiens
gucaaagugauuguaauuaggu

SEQ ID NO: 2045 - RNA, 22 nt, Homo sapiens
uaagaugcagauuugggcgggg

SEQ ID NO: 2046 - RNA, 22 nt, Homo sapiens
ugagcucagcuuucuuuuucac

SEQ ID NO: 2047 - RNA, 22 nt, Homo sapiens
ucaccaccugcugauuguagag

SEQ ID NO: 2048 - RNA, 21 nt, Homo sapiens
ggaauguugccagcagccaga

SEQ ID NO: 2049 - RNA, 22 nt, Homo sapiens
gagcuccuccccuuggcuuuca

SEQ ID NO: 2050 - RNA, 23 nt, Homo sapiens
ggaguguaaauuauuucaaccau

SEQ ID NO: 2051 - RNA, 22 nt, Homo sapiens
cauugcacuccagcucugggcg

SEQ ID NO: 2052 - RNA, 20 nt, Homo sapiens
aaacucugucuucuuuauca

SEQ ID NO: 2053 - RNA, 22 nt, Homo sapiens
caaguguuggcuuguauacaaa

SEQ ID NO: 2054 - RNA, 22 nt, Homo sapiens
ugagaucaaggugggcccuggg

SEQ ID NO: 2055 - RNA, 23 nt, Homo sapiens
ggaguguauuggcacgaucucag

SEQ ID NO: 2056 - RNA, 23 nt, Homo sapiens
uucaucagggauauuggccugaa

SEQ ID NO: 2057 - RNA, 22 nt, Homo sapiens
uugaaguaguacuuuauuauag

SEQ ID NO: 2058 - RNA, 20 nt, Homo sapiens
guucacaggcuuccuuucag

SEQ ID NO: 2059 - RNA, 19 nt, Homo sapiens
uauguaguugucaagggag

SEQ ID NO: 2060 - RNA, 22 nt, Homo sapiens
gacacugucuucugcucuuaaa

SEQ ID NO: 2061 - RNA, 22 nt, Homo sapiens
auuacaugucuauccaugaaca

SEQ ID NO: 2062 - RNA, 22 nt, Homo sapiens
cuuagguuaaucaugaaccuuu

SEQ ID NO: 2063 - RNA, 18 nt, Homo sapiens
uuuacaguagaaggacuu

SEQ ID NO: 2064 - RNA, 22 nt, Homo sapiens
uugagucguuaccuauaacaga

SEQ ID NO: 2065 - RNA, 22 nt, Homo sapiens
ugugcguguaagagaucuaggu

SEQ ID NO: 2066 - RNA, 22 nt, Homo sapiens
caguaaauaucugagcgagguc

SEQ ID NO: 2067 - RNA, 22 nt, Homo sapiens
aaggcaagagaaaauuucgagu

SEQ ID NO: 2068 - RNA, 22 nt, Homo sapiens
ggcaagauagauaucaguguca

SEQ ID NO: 2069 - RNA, 22 nt, Homo sapiens
ugaaaugucuuuaggaggcuuc

SEQ ID NO: 2070 - RNA, 21 nt, Homo sapiens
gugcaaacaucauagaaugua

SEQ ID NO: 2071 - RNA, 22 nt, Homo sapiens
accuucauuguugccaugucca

SEQ ID NO: 2072 - RNA, 22 nt, Homo sapiens
gaaugcuaccagcaucuagugg

SEQ ID NO: 2073 - RNA, 22 nt, Homo sapiens
uacagugcuuuuugguggagaa

SEQ ID NO: 2074 - RNA, 22 nt, Homo sapiens
acccguuacuuagcagaccagg

SEQ ID NO: 2075 - RNA, 22 nt, Homo sapiens
uugacguaggaggauguugaga

SEQ ID NO: 2076 - RNA, 22 nt, Homo sapiens
uggcagcgugaaagacuuuuuc

SEQ ID NO: 2077 - RNA, 22 nt, Homo sapiens
augaccauuucaauugauaugg

SEQ ID NO: 2078 - RNA, 22 nt, Homo sapiens
guguucaaagcugauugagauu

SEQ ID NO: 2079 - RNA, 22 nt, Homo sapiens
uuagcacauuuccagcacaugg

SEQ ID NO: 2080 - RNA, 22 nt, Homo sapiens
guggacguguguccccauggcu

SEQ ID NO: 2081 - RNA, 22 nt, Homo sapiens
auauuagguuggugccaaagua

SEQ ID NO: 2082 - RNA, 16 nt, Homo sapiens
gugcuguguuguuagg

SEQ ID NO: 2083 - RNA, 22 nt, Homo sapiens
ucagucauguuuaccagacgua

SEQ ID NO: 2084 - RNA, 22 nt, Homo sapiens
ugagcuguuugaagaagcauuu

SEQ ID NO: 2085 - RNA, 22 nt, Homo sapiens
uucaaaguguugguuuugggcu

SEQ ID NO: 2086 - RNA, 22 nt, Homo sapiens
aguauuuguuggaauaccuguu

SEQ ID NO: 2087 - RNA, 22 nt, Homo sapiens
uagugcuguaauucuaaugaaa

SEQ ID NO: 2088 - RNA, 22 nt, Homo sapiens
acuuuuugaugaggucguuugu

SEQ ID NO: 2089 - RNA, 19 nt, Homo sapiens
acauggauuuugugcaaac

SEQ ID NO: 2090 - RNA, 22 nt, Homo sapiens
cuuggguugauugauaaugcca

SEQ ID NO: 2091 - RNA, 22 nt, Homo sapiens
ucuggcuuuagcaugugggaag

SEQ ID NO: 2092 - RNA, 22 nt, Homo sapiens
cuaucugcacaggguggaaauu

SEQ ID NO: 2093 - RNA, 22 nt, Homo sapiens
gagugcaauggugcuaucucgg

SEQ ID NO: 2094 - RNA, 22 nt, Homo sapiens
auaaguagaaugauggucaaaa

SEQ ID NO: 2095 - RNA, 22 nt, Homo sapiens
uuggcaaaugucacaaaucagg

SEQ ID NO: 2096 - RNA, 22 nt, Homo sapiens
gaauuguacugcaaucagggga

SEQ ID NO: 2097 - RNA, 22 nt, Homo sapiens
gaucacauguguacucaaugug

SEQ ID NO: 2098 - RNA, 22 nt, Homo sapiens
aggcaugaguucagaggguaug

SEQ ID NO: 2099 - RNA, 22 nt, Homo sapiens
uggguaggcccucauuggacag

SEQ ID NO: 2100 - RNA, 22 nt, Homo sapiens
uauagcuugaaggaauggucau

SEQ ID NO: 2101 - RNA, 22 nt, Homo sapiens
gugaacaagcaaaggcaggagg

SEQ ID NO: 2102 - RNA, 22 nt, Homo sapiens
uauaugucuucuuguaauuggc

SEQ ID NO: 2103 - RNA, 22 nt, Homo sapiens
aaguguaaguuaauguuuaggu

SEQ ID NO: 2104 - RNA, 22 nt, Homo sapiens
aagugcuuuacacaugcaugau

SEQ ID NO: 2105 - RNA, 22 nt, Homo sapiens
agccauacaacguaugcaugua

SEQ ID NO: 2106 - RNA, 19 nt, Homo sapiens
cauuggacuugcuuuugcc

SEQ ID NO: 2107 - RNA, 22 nt, Homo sapiens
acccgugcugaauauguaggug

SEQ ID NO: 2108 - RNA, 22 nt, Homo sapiens
gagagaguacuugauauaauuu

SEQ ID NO: 2109 - RNA, 22 nt, Homo sapiens
cuauucacaggcaauauguaca

SEQ ID NO: 2110 - RNA, 22 nt, Homo sapiens
augugcaugcuguucugccaga

SEQ ID NO: 2111 - RNA, 20 nt, Homo sapiens
agagaucaguaauucaucaa

SEQ ID NO: 2112 - RNA, 22 nt, Homo sapiens
ucacaguguuaaaccuuucuuu

SEQ ID NO: 2113 - RNA, 22 nt, Homo sapiens
aucaaagccaugcucaguuuuc

SEQ ID NO: 2114 - RNA, 22 nt, Homo sapiens
uugauuagauccaguugauuga

SEQ ID NO: 2115 - RNA, 22 nt, Homo sapiens
ugacauguccaggugguccugu

SEQ ID NO: 2116 - RNA, 22 nt, Homo sapiens
ugccugcugucuaauauauucu

SEQ ID NO: 2117 - RNA, 22 nt, Homo sapiens
acugcacuccaucuuagguggc

SEQ ID NO: 2118 - RNA, 22 nt, Homo sapiens
uucugcuagucugucagaucuu

SEQ ID NO: 2119 - RNA, 22 nt, Homo sapiens
cacugcacuccagucuggcgac

SEQ ID NO: 2120 - RNA, 22 nt, Homo sapiens
uucuuccagccuugaggggccc

SEQ ID NO: 2121 - RNA, 23 nt, Homo sapiens
ucuggaucauucguagugccagc

SEQ ID NO: 2122 - RNA, 22 nt, Homo sapiens
cuggagauuaaccaauugccau

SEQ ID NO: 2123 - RNA, 22 nt, Homo sapiens
gugauuuaguagaugcuaguua

SEQ ID NO: 2124 - RNA, 22 nt, Homo sapiens
ucgugcaaacguaauugugguu

SEQ ID NO: 2125 - RNA, 22 nt, Homo sapiens
cugaggugggaggauuggcuug

SEQ ID NO: 2126 - RNA, 22 nt, Homo sapiens
ucaaaugcacguagagaaaaua

SEQ ID NO: 2127 - RNA, 22 nt, Homo sapiens
augucacagguccuagccaagu

SEQ ID NO: 2128 - RNA, 22 nt, Homo sapiens
gggcaaaacuguacugccaagg

SEQ ID NO: 2129 - RNA, 22 nt, Homo sapiens
uuguccucuccaaaucucaugu

SEQ ID NO: 2130 - RNA, 22 nt, Homo sapiens
aaaugcucuguggguaguaaug

SEQ ID NO: 2131 - RNA, 22 nt, Homo sapiens
uucaguauugcaccuggagucc

SEQ ID NO: 2132 - RNA, 20 nt, Homo sapiens
aaaguaggcuaauaccaaaa

SEQ ID NO: 2133 - RNA, 22 nt, Homo sapiens
uuguccuugagauaguuugcug

SEQ ID NO: 2134 - RNA, 20 nt, Homo sapiens
uaugaccugucuuuucucuc

SEQ ID NO: 2135 - RNA, 22 nt, Homo sapiens
ucucaguggugcuggcagggga

SEQ ID NO: 2136 - RNA, 22 nt, Homo sapiens
auggagguguggggagugaguu

SEQ ID NO: 2137 - RNA, 22 nt, Homo sapiens
aagauaguaaacauuuucugcu

SEQ ID NO: 2138 - RNA, 22 nt, Homo sapiens
ucucaauggguuguagacaaag

SEQ ID NO: 2139 - RNA, 22 nt, Homo sapiens
uauugcuaaauucuuuuccuag

SEQ ID NO: 2140 - RNA, 20 nt, Homo sapiens
ugauugaccagagcaguuuu

SEQ ID NO: 2141 - RNA, 22 nt, Homo sapiens
uuauuagcacccuaccaugugg

SEQ ID NO: 2142 - RNA, 23 nt, Homo sapiens
gugugguaggcuauaccaucuag

SEQ ID NO: 2143 - RNA, 22 nt, Homo sapiens
agcuuguuuucccauaacuaga

SEQ ID NO: 2144 - RNA, 19 nt, Homo sapiens
aucagcacaagugugcuuu

SEQ ID NO: 2145 - RNA, 22 nt, Homo sapiens
auuguacuccagccugggcugc

SEQ ID NO: 2146 - RNA, 22 nt, Homo sapiens
auggauuuugaacuugagaguu

SEQ ID NO: 2147 - RNA, 22 nt, Homo sapiens
aucauaucaucugcaaacaaag

SEQ ID NO: 2148 - RNA, 22 nt, Homo sapiens
augauauggucacccuuaugaa

SEQ ID NO: 2149 - RNA, 22 nt, Homo sapiens
uauugcauguugagcaguaccu

SEQ ID NO: 2150 - RNA, 22 nt, Homo sapiens
cacugcauccuccaccugccag

SEQ ID NO: 2151 - RNA, 22 nt, Homo sapiens
aaguacuguuuaaauugcagaa

SEQ ID NO: 2152 - RNA, 22 nt, Homo sapiens
uugcaccccuacuauuugccaa

SEQ ID NO: 2153 - RNA, 22 nt, Homo sapiens
uauuagguuggugcaaaaguaa

SEQ ID NO: 2154 - RNA, 22 nt, Homo sapiens
ucaguacuuuggagcucacaua

SEQ ID NO: 2155 - RNA, 22 nt, Homo sapiens
ugcuagaagaucacacacauca

SEQ ID NO: 2156 - RNA, 22 nt, Homo sapiens
aucuggcuccuuuugacaaugc

SEQ ID NO: 2157 - RNA, 22 nt, Homo sapiens
agagacauugcuccaacucacc

SEQ ID NO: 2158 - RNA, 21 nt, Homo sapiens
aagugcucugggacucuaaau

SEQ ID NO: 2159 - RNA, 21 nt, Homo sapiens
ggcaugaauggaaaagugaga

SEQ ID NO: 2160 - RNA, 22 nt, Homo sapiens
uuuauguggagcacuugacaca

SEQ ID NO: 2161 - RNA, 22 nt, Homo sapiens
aacugcuguuuggguacuggug

SEQ ID NO: 2162 - RNA, 22 nt, Homo sapiens
ucagauguuugagaaguauacu

SEQ ID NO: 2163 - RNA, 22 nt, Homo sapiens
uuggccccuuucauccacagcu

SEQ ID NO: 2164 - RNA, 22 nt, Homo sapiens
uuggcaaagaggaaugccacuu

SEQ ID NO: 2165 - RNA, 22 nt, Homo sapiens
aucuuuaguggcuguuuucaga

SEQ ID NO: 2166 - RNA, 22 nt, Homo sapiens
augcaugucaaauuuguagguu

SEQ ID NO: 2167 - RNA, 22 nt, Homo sapiens
ugagcccauuguccugguuuau

SEQ ID NO: 2168 - RNA, 22 nt, Homo sapiens
ucuuugauguucugaaagaugg

SEQ ID NO: 2169 - RNA, 22 nt, Homo sapiens
cuggcaagagugaaccagcugu

SEQ ID NO: 2170 - RNA, 22 nt, Homo sapiens
ucacauaguuuucgggaccuug

SEQ ID NO: 2171 - RNA, 22 nt, Homo sapiens
ugcaguagugugaucuuggcuc

SEQ ID NO: 2172 - RNA, 22 nt, Homo sapiens
uguagcaaauaaaagucuggau

SEQ ID NO: 2173 - RNA, 22 nt, Homo sapiens
ugccaguguuuuguugaagauu

SEQ ID NO: 2174 - RNA, 22 nt, Homo sapiens
uuggacagaugguuacauuuuu

SEQ ID NO: 2175 - RNA, 22 nt, Homo sapiens
gauuccacuuucugucucuaug

SEQ ID NO: 2176 - RNA, 20 nt, Homo sapiens
ugcagauucaaccaacugug

SEQ ID NO: 2177 - RNA, 22 nt, Homo sapiens
ucuagcacuuacuggcugugug

SEQ ID NO: 2178 - RNA, 22 nt, Homo sapiens
aaggcaugcaguacguuucuau

SEQ ID NO: 2179 - RNA, 20 nt, Homo sapiens
augucagaguguggguacgg

SEQ ID NO: 2180 - RNA, 22 nt, Homo sapiens
gaaucaauugaucuaugugucu

SEQ ID NO: 2181 - RNA, 22 nt, Homo sapiens
uuggaguguucugguccgggcu

SEQ ID NO: 2182 - RNA, 20 nt, Homo sapiens
uuggaaaugugaauugggag

SEQ ID NO: 2183 - RNA, 22 nt, Homo sapiens
ggguucccuucuggcucagggu

SEQ ID NO: 2184 - RNA, 22 nt, Homo sapiens
uagugcugugauuaacauaaug

SEQ ID NO: 2185 - RNA, 21 nt, Homo sapiens
uuuggcauuaugucaccagag

SEQ ID NO: 2186 - RNA, 22 nt, Homo sapiens
gugagaccaauguacuaccuuc

SEQ ID NO: 2187 - RNA, 22 nt, Homo sapiens
ggcuguguguuaaaauaggcuu

SEQ ID NO: 2188 - RNA, 18 nt, Homo sapiens
acucuguauguggagugg

SEQ ID NO: 2189 - RNA, 22 nt, Homo sapiens
uugcacauuuuuucuggcagaa

SEQ ID NO: 2190 - RNA, 20 nt, Homo sapiens
uauugccuaaauaccagaau

SEQ ID NO: 2191 - RNA, 16 nt, Homo sapiens
uucacauggcagcagg

SEQ ID NO: 2192 - RNA, 22 nt, Homo sapiens
gcagaucucuucauuucucuua

SEQ ID NO: 2193 - RNA, 20 nt, Homo sapiens
uguaacaaucuggauguugc

SEQ ID NO: 2194 - RNA, 22 nt, Homo sapiens
ucauagaucaaguaauaagaca

SEQ ID NO: 2195 - RNA, 22 nt, Homo sapiens
guuggcuuuuuaaggaaauugc

SEQ ID NO: 2196 - RNA, 22 nt, Homo sapiens
augugcaacugcuggaacaguc

SEQ ID NO: 2197 - RNA, 22 nt, Homo sapiens
ggaagccuggaaaaaauuguga

SEQ ID NO: 2198 - RNA, 22 nt, Homo sapiens
gcacaguuaaagggucauguga

SEQ ID NO: 2199 - RNA, 22 nt, Homo sapiens
auaggucaucaugggaguggga

SEQ ID NO: 2200 - RNA, 22 nt, Homo sapiens
aauagugcugugcagugagugg

SEQ ID NO: 2201 - RNA, 22 nt, Homo sapiens
guggaagucuuugguauuggua

SEQ ID NO: 2202 - RNA, 22 nt, Homo sapiens
agcaauaugacauugcuacauc

SEQ ID NO: 2203 - RNA, 21 nt, Homo sapiens
aggugucuuggguucccuggc

SEQ ID NO: 2204 - RNA, 22 nt, Homo sapiens
uauugacuugaugagggagggu

SEQ ID NO: 2205 - RNA, 21 nt, Homo sapiens
auugcacaauauacccaugua

SEQ ID NO: 2206 - RNA, 22 nt, Homo sapiens
ugagacggagucucacucuguu

SEQ ID NO: 2207 - RNA, 22 nt, Homo sapiens
aucauggaguauuugcaagucu

SEQ ID NO: 2208 - RNA, 18 nt, Homo sapiens
cauagcacuucagcacau

SEQ ID NO: 2209 - RNA, 22 nt, Homo sapiens
cuaaaugcacugucaaaggaag

SEQ ID NO: 2210 - RNA, 22 nt, Homo sapiens
auaaaugccuguuguuuuaagc

SEQ ID NO: 2211 - RNA, 23 nt, Homo sapiens
aggaauggaaaaccaaguaucau

SEQ ID NO: 2212 - RNA, 22 nt, Homo sapiens
gacagacacaauugauccauga

SEQ ID NO: 2213 - RNA, 22 nt, Homo sapiens
uagaagcugagaauguccucag

SEQ ID NO: 2214 - RNA, 22 nt, Homo sapiens
gucuuuguuauuaugaaucaac

SEQ ID NO: 2215 - RNA, 22 nt, Homo sapiens
ugaggugagauggcuaccccaa

SEQ ID NO: 2216 - RNA, 22 nt, Homo sapiens
uggacuuuaauaaaagggaaau

SEQ ID NO: 2217 - RNA, 22 nt, Homo sapiens
uuugauguccaccucagcccac

SEQ ID NO: 2218 - RNA, 22 nt, Homo sapiens
auacacuagggcuccugcagaa

SEQ ID NO: 2219 - RNA, 21 nt, Homo sapiens
ucuugguauguauuuaggagg

SEQ ID NO: 2220 - RNA, 20 nt, Homo sapiens
auuuggcauaguuuaagcaa

SEQ ID NO: 2221 - RNA, 22 nt, Homo sapiens
ucagguaucuucauagcaaugc

SEQ ID NO: 2222 - RNA, 22 nt, Homo sapiens
uguauguugauguuauauucug

SEQ ID NO: 2223 - RNA, 20 nt, Homo sapiens
uggaaucugaagaucucagu

SEQ ID NO: 2224 - RNA, 22 nt, Homo sapiens
acauaugaguacaugugccaug

SEQ ID NO: 2225 - RNA, 22 nt, Homo sapiens
uugugaauggugcugcaguaaa

SEQ ID NO: 2226 - RNA, 22 nt, Homo sapiens
cugguuguucuggaugggcagg

SEQ ID NO: 2227 - RNA, 22 nt, Homo sapiens
uggcuauuucgucaugcucccc

SEQ ID NO: 2228 - RNA, 22 nt, Homo sapiens
gccagauuguccaguuuuuuau

SEQ ID NO: 2229 - RNA, 22 nt, Homo sapiens
ucaaguaagaagugggcauaaa

SEQ ID NO: 2230 - RNA, 22 nt, Homo sapiens
uggauagaacuaagugcuuaga

SEQ ID NO: 2231 - RNA, 22 nt, Homo sapiens
uaccucuguaaguaaagauuca

SEQ ID NO: 2232 - RNA, 17 nt, Homo sapiens
uuacaggugcugagagu

SEQ ID NO: 2233 - RNA, 22 nt, Homo sapiens
caaaugcuucuauggacugucu

SEQ ID NO: 2234 - RNA, 22 nt, Homo sapiens
auuccuuaggcccuuugguuag

SEQ ID NO: 2235 - RNA, 22 nt, Homo sapiens
uuggcauaguugcacuuacuag

SEQ ID NO: 2236 - RNA, 22 nt, Homo sapiens
uuauagcuaacaucugugaaaa

SEQ ID NO: 2237 - RNA, 22 nt, Homo sapiens
augagaugaauaccgacgaugu

SEQ ID NO: 2238 - RNA, 21 nt, Homo sapiens
uauccacuugcaacagagaag

SEQ ID NO: 2239 - RNA, 22 nt, Homo sapiens
uuggcuguguuucccuacaaau

SEQ ID NO: 2240 - RNA, 22 nt, Homo sapiens
uaacuguggaaaugacuuuaaa

SEQ ID NO: 2241 - RNA, 22 nt, Homo sapiens
gcucguuuuugccucugguugc

SEQ ID NO: 2242 - RNA, 22 nt, Homo sapiens
auccagaugggcuuaauguaau

SEQ ID NO: 2243 - RNA, 22 nt, Homo sapiens
ugagaggugaauggcaggcuca

SEQ ID NO: 2244 - RNA, 22 nt, Homo sapiens
agcuucauucugaauagguuga

SEQ ID NO: 2245 - RNA, 19 nt, Homo sapiens
uucacguaggagaaagaag

SEQ ID NO: 2246 - RNA, 22 nt, Homo sapiens
uggauauguuuauauguugucu

SEQ ID NO: 2247 - RNA, 16 nt, Homo sapiens
ugagaacaugugauau

SEQ ID NO: 2248 - RNA, 22 nt, Homo sapiens
aggugaauggauaaacuguggg

SEQ ID NO: 2249 - RNA, 22 nt, Homo sapiens
guggcuauuguucccugguugc

SEQ ID NO: 2250 - RNA, 22 nt, Homo sapiens
aucccuagaaaaaucagcacau

SEQ ID NO: 2251 - RNA, 22 nt, Homo sapiens
aaaguacugggauuggccgggu

SEQ ID NO: 2252 - RNA, 22 nt, Homo sapiens
uggugccgugguccuggggcca

SEQ ID NO: 2253 - RNA, 22 nt, Homo sapiens
auaauguuuauccagaggaguu

SEQ ID NO: 2254 - RNA, 22 nt, Homo sapiens
acccggagagcaggcgagaagg

SEQ ID NO: 2255 - RNA, 22 nt, Homo sapiens
uaaagccuagaacuuucagccc

SEQ ID NO: 2256 - RNA, 22 nt, Homo sapiens
uagauuaucuguaugugcucuu

SEQ ID NO: 2257 - RNA, 22 nt, Homo sapiens
aagugguguuuguauuuaugca

SEQ ID NO: 2258 - RNA, 16 nt, Homo sapiens
uguccaaauaaauaca

SEQ ID NO: 2259 - RNA, 22 nt, Homo sapiens
gugucacuguugagaaguccac

SEQ ID NO: 2260 - RNA, 22 nt, Homo sapiens
uggcaaguuacuggcaaaaucu

SEQ ID NO: 2261 - RNA, 22 nt, Homo sapiens
ggucagaaagacaggcauucag

SEQ ID NO: 2262 - RNA, 22 nt, Homo sapiens
cuuugguucuguuuauaugcug

SEQ ID NO: 2263 - RNA, 22 nt, Homo sapiens
uagaauguauaauauuuuacuu

SEQ ID NO: 2264 - RNA, 22 nt, Homo sapiens
aucuuggauuaccugggugggu

SEQ ID NO: 2265 - RNA, 18 nt, Homo sapiens
uugcacuccugccugggu

SEQ ID NO: 2266 - RNA, 22 nt, Homo sapiens
uuaaggcagugcaucuggaguu

SEQ ID NO: 2267 - RNA, 22 nt, Homo sapiens
ugagacaaaguuguuggauguu

SEQ ID NO: 2268 - RNA, 22 nt, Homo sapiens
uuaaacugcuugaauuggguuu

SEQ ID NO: 2269 - RNA, 22 nt, Homo sapiens
uugagauggugccacuguacuc

SEQ ID NO: 2270 - RNA, 22 nt, Homo sapiens
uagaauggaagguugagaagaa

SEQ ID NO: 2271 - RNA, 22 nt, Homo sapiens
agcugcauucguaucauauugu

SEQ ID NO: 2272 - RNA, 22 nt, Homo sapiens
gugccacugcacuccggccugg

SEQ ID NO: 2273 - RNA, 22 nt, Homo sapiens
guguauguuucucccugucccu

SEQ ID NO: 2274 - RNA, 22 nt, Homo sapiens
ugugccuacugauagagccaag

SEQ ID NO: 2275 - RNA, 22 nt, Homo sapiens
ugggaucaugagcaccgcuucc

SEQ ID NO: 2276 - RNA, 22 nt, Homo sapiens
auuguuccccggucauuuuugu

SEQ ID NO: 2277 - RNA, 22 nt, Homo sapiens
uggagggcuagucauuucuuuu

SEQ ID NO: 2278 - RNA, 22 nt, Homo sapiens
auugagucauuucaaauccaag

SEQ ID NO: 2279 - RNA, 22 nt, Homo sapiens
aacagugcauucagggauauau

SEQ ID NO: 2280 - RNA, 19 nt, Homo sapiens
agcuagugcucagcuguca

SEQ ID NO: 2281 - RNA, 23 nt, Homo sapiens
cuuuguccccacccaaaucucau

SEQ ID NO: 2282 - RNA, 22 nt, Homo sapiens
auugcacuccagccugggugag

SEQ ID NO: 2283 - RNA, 22 nt, Homo sapiens
acacuacuggguauauguguuu

SEQ ID NO: 2284 - RNA, 22 nt, Homo sapiens
aauaaguugagaugaggucaua

SEQ ID NO: 2285 - RNA, 22 nt, Homo sapiens
ucaguguugauggcugcugacu

SEQ ID NO: 2286 - RNA, 20 nt, Homo sapiens
cuuggcuuucuugguguuaa

SEQ ID NO: 2287 - RNA, 22 nt, Homo sapiens
ccagaguggagccuuugcgagg

SEQ ID NO: 2288 - RNA, 22 nt, Homo sapiens
augugcagauguuacaaauugu

SEQ ID NO: 2289 - RNA, 22 nt, Homo sapiens
uuggauuuugguggcaacucau

SEQ ID NO: 2290 - RNA, 22 nt, Homo sapiens
ugcauuguuuuugguucccagg

SEQ ID NO: 2291 - RNA, 22 nt, Homo sapiens
ucauauugguuaaaauaguggg

SEQ ID NO: 2292 - RNA, 22 nt, Homo sapiens
uugagauggagucuuguucuuu

SEQ ID NO: 2293 - RNA, 22 nt, Homo sapiens
cauuacacuuguaagguuuuuc

SEQ ID NO: 2294 - RNA, 22 nt, Homo sapiens
auggcaguuucacucugggauu

SEQ ID NO: 2295 - RNA, 22 nt, Homo sapiens
ugagaucugucuuuauaguauu

SEQ ID NO: 2296 - RNA, 22 nt, Homo sapiens
caaagugcuggccgggcgcagu

SEQ ID NO: 2297 - RNA, 19 nt, Homo sapiens
aaccgggagugcacauguu

SEQ ID NO: 2298 - RNA, 22 nt, Homo sapiens
uugccuaggcuggagugcagua

SEQ ID NO: 2299 - RNA, 22 nt, Homo sapiens
gcccuguugcccaggcuggagu

SEQ ID NO: 2300 - RNA, 22 nt, Homo sapiens
gugucacagcuuccaucucggu

SEQ ID NO: 2301 - RNA, 22 nt, Homo sapiens
gaggucuuacauuuuaauauuu

SEQ ID NO: 2302 - RNA, 21 nt, Homo sapiens
agccugugggucauaguugcc

SEQ ID NO: 2303 - RNA, 22 nt, Homo sapiens
uguauaguugagucaaguuuca

SEQ ID NO: 2304 - RNA, 20 nt, Homo sapiens
ggagagugacauaauucugg

SEQ ID NO: 2305 - RNA, 22 nt, Homo sapiens
uagcaccaaacauauacucagu

SEQ ID NO: 2306 - RNA, 17 nt, Homo sapiens
gacgaucaucaggaggc

SEQ ID NO: 2307 - RNA, 22 nt, Homo sapiens
agcaguguggccuuagacccgg

SEQ ID NO: 2308 - RNA, 22 nt, Homo sapiens
ccuugguaauguguuuuauucu

SEQ ID NO: 2309 - RNA, 22 nt, Homo sapiens
uugugacacagcugggccuaua

SEQ ID NO: 2310 - RNA, 20 nt, Homo sapiens
gcaguguucacuguauuccu

SEQ ID NO: 2311 - RNA, 22 nt, Homo sapiens
ugugcaaggcucucaaccugug

SEQ ID NO: 2312 - RNA, 22 nt, Homo sapiens
uguguaaauagcuacggaucug

SEQ ID NO: 2313 - RNA, 21 nt, Homo sapiens
ggcaagugugagguuuggggu

SEQ ID NO: 2314 - RNA, 19 nt, Homo sapiens
augagaacagacuccauuu

SEQ ID NO: 2315 - RNA, 22 nt, Homo sapiens
uaacuauagagaauguugagua

SEQ ID NO: 2316 - RNA, 22 nt, Homo sapiens
acugcacuccagccuggcggac

SEQ ID NO: 2317 - RNA, 22 nt, Homo sapiens
uggauuguaacauagaguaaau

SEQ ID NO: 2318 - RNA, 22 nt, Homo sapiens
uuucauagccuucuaaugaguu

SEQ ID NO: 2319 - RNA, 20 nt, Homo sapiens
ucaaaguaugcucugcacua

SEQ ID NO: 2320 - RNA, 22 nt, Homo sapiens
ugucuuguagacugaaggcuuc

SEQ ID NO: 2321 - RNA, 22 nt, Homo sapiens
augcuauguagaugagggccca

SEQ ID NO: 2322 - RNA, 17 nt, Homo sapiens
ggcaagaaguggaacuc

SEQ ID NO: 2323 - RNA, 22 nt, Homo sapiens
uuccugucuuccaagagagauu

SEQ ID NO: 2324 - RNA, 22 nt, Homo sapiens
gagauacacccagugcagaggc

SEQ ID NO: 2325 - RNA, 22 nt, Homo sapiens
aauugcaucuguucuuugccag

SEQ ID NO: 2326 - RNA, 22 nt, Homo sapiens
ugagauauugggaguaauguca

SEQ ID NO: 2327 - RNA, 22 nt, Homo sapiens
agaacacugaguucagggucag

SEQ ID NO: 2328 - RNA, 22 nt, Homo sapiens
uuggaauuuuacuucuguaaga

SEQ ID NO: 2329 - RNA, 22 nt, Homo sapiens
cagagaacauucagagcuguag

SEQ ID NO: 2330 - RNA, 22 nt, Homo sapiens
gauagcauucaauuaucuguug

SEQ ID NO: 2331 - RNA, 22 nt, Homo sapiens
uacaccugaguuugugguuuuc

SEQ ID NO: 2332 - RNA, 22 nt, Homo sapiens
ugucuuggagaauccuggguuu

SEQ ID NO: 2333 - RNA, 22 nt, Homo sapiens
ugaugucuugagauggagcuua

SEQ ID NO: 2334 - RNA, 22 nt, Homo sapiens
gucauggaacaacuuaaaguca

SEQ ID NO: 2335 - RNA, 22 nt, Homo sapiens
ugagugaaagaagcacuaagga

SEQ ID NO: 2336 - RNA, 22 nt, Homo sapiens
uugaggaggcagucuguccguu

SEQ ID NO: 2337 - RNA, 22 nt, Homo sapiens
uagguaggugucauaauccaug

SEQ ID NO: 2338 - RNA, 22 nt, Homo sapiens
uuugcuuguguaaaaaucugga

SEQ ID NO: 2339 - RNA, 22 nt, Homo sapiens
ucaaacacuccauaucgcgauu

SEQ ID NO: 2340 - RNA, 22 nt, Homo sapiens
uugugcauaucagagguuugcu

SEQ ID NO: 2341 - RNA, 22 nt, Homo sapiens
ugaauggauccaauucuuagua

SEQ ID NO: 2342 - RNA, 19 nt, Homo sapiens
cugugcauuucuguggaag

SEQ ID NO: 2343 - RNA, 22 nt, Homo sapiens
caccgagguuggagugcagugg

SEQ ID NO: 2344 - RNA, 22 nt, Homo sapiens
aguggcacuauucucagaguca

SEQ ID NO: 2345 - RNA, 22 nt, Homo sapiens
uaucucauccuccuugauccca

SEQ ID NO: 2346 - RNA, 22 nt, Homo sapiens
gugugcaaauguguaccuacau

SEQ ID NO: 2347 - RNA, 22 nt, Homo sapiens
aagaguuaguaaaauuuccucu

SEQ ID NO: 2348 - RNA, 22 nt, Homo sapiens
uccacugagcuagaccacuugg

SEQ ID NO: 2349 - RNA, 22 nt, Homo sapiens
aaauuguccuacugguuugagu

SEQ ID NO: 2350 - RNA, 22 nt, Homo sapiens
acacugucucuugcugaccaug

SEQ ID NO: 2351 - RNA, 22 nt, Homo sapiens
aaugugcuguucagaggagucc

SEQ ID NO: 2352 - RNA, 22 nt, Homo sapiens
gugcaaauguuauugagguuuu

SEQ ID NO: 2353 - RNA, 22 nt, Homo sapiens
cagauguaguauuuuagugaaa

SEQ ID NO: 2354 - RNA, 22 nt, Homo sapiens
agguccacuuacuacuccuguu

SEQ ID NO: 2355 - RNA, 22 nt, Homo sapiens
aauggcacaccuagcccuaacc

SEQ ID NO: 2356 - RNA, 22 nt, Homo sapiens
gcaugcacaugugaaaaaauga

SEQ ID NO: 2357 - RNA, 22 nt, Homo sapiens
uaggagcacaaacccuacugug

SEQ ID NO: 2358 - RNA, 22 nt, Homo sapiens
uggcaacaucuggggacauguu

SEQ ID NO: 2359 - RNA, 22 nt, Homo sapiens
uggagucuugaugauuuucaaa

SEQ ID NO: 2360 - RNA, 22 nt, Homo sapiens
aaugugcuuucuuucacacagu

SEQ ID NO: 2361 - RNA, 22 nt, Homo sapiens
uuucccuuuagcuuagugauuu

SEQ ID NO: 2362 - RNA, 22 nt, Homo sapiens
uaguguuuuucauuggcagagg

SEQ ID NO: 2363 - RNA, 22 nt, Homo sapiens
uucaucagggguauuggccaau

SEQ ID NO: 2364 - RNA, 22 nt, Homo sapiens
ugauuggagaacaaacugcaua

SEQ ID NO: 2365 - RNA, 22 nt, Homo sapiens
ucuuugagugcccugagucccu

SEQ ID NO: 2366 - RNA, 22 nt, Homo sapiens
guggugucuuuuuugauuagga

SEQ ID NO: 2367 - RNA, 20 nt, Homo sapiens
cugauacagccugagcucuc

SEQ ID NO: 2368 - RNA, 22 nt, Homo sapiens
ucuacagccaguucaggaagaa

SEQ ID NO: 2369 - RNA, 20 nt, Homo sapiens
cuauugacauuuggggcuag

SEQ ID NO: 2370 - RNA, 22 nt, Homo sapiens
auggaagacuccucuuugggua

SEQ ID NO: 2371 - RNA, 22 nt, Homo sapiens
gugcacaaugugcagguuuguu

SEQ ID NO: 2372 - RNA, 22 nt, Homo sapiens
gugcacaacgugcaggcuuguu

SEQ ID NO: 2373 - RNA, 22 nt, Homo sapiens
augugcacaugcuuacauguga

SEQ ID NO: 2374 - RNA, 22 nt, Homo sapiens
uuucucaguguuucaggguagg

SEQ ID NO: 2375 - RNA, 22 nt, Homo sapiens
ugagacggagucuugcuaaguu

SEQ ID NO: 2376 - RNA, 18 nt, Homo sapiens
acagugcuggcaugagau

SEQ ID NO: 2377 - RNA, 22 nt, Homo sapiens
augcuuguguuggggcagugga

SEQ ID NO: 2378 - RNA, 22 nt, Homo sapiens
gaucugugugauuggaugcauu

SEQ ID NO: 2379 - RNA, 22 nt, Homo sapiens
gugaaacuggguggugagagac

SEQ ID NO: 2380 - RNA, 22 nt, Homo sapiens
gagcuguugguuugaaagaauu

SEQ ID NO: 2381 - RNA, 22 nt, Homo sapiens
uuuggcuuugagaagcagugga

SEQ ID NO: 2382 - RNA, 22 nt, Homo sapiens
ugguccaguucugugauauugc

SEQ ID NO: 2383 - RNA, 22 nt, Homo sapiens
uaugacuuguuuucuggucugc

SEQ ID NO: 2384 - RNA, 22 nt, Homo sapiens
cagaguuaguagccuuugacaa

SEQ ID NO: 2385 - RNA, 22 nt, Homo sapiens
auuugguaauauuuaaggacuu

SEQ ID NO: 2386 - RNA, 22 nt, Homo sapiens
guggaauggaaugauuguguau

SEQ ID NO: 2387 - RNA, 22 nt, Homo sapiens
cuggagcauugguggauuuguu

SEQ ID NO: 2388 - RNA, 23 nt, Homo sapiens
aagugagcuccaauugggugaga

SEQ ID NO: 2389 - RNA, 22 nt, Homo sapiens
ugaagacucaauuauuaugaac

SEQ ID NO: 2390 - RNA, 22 nt, Homo sapiens
uggauugagaagcuguggcuca

SEQ ID NO: 2391 - RNA, 22 nt, Homo sapiens
cuggaguaugauguuagcguug

SEQ ID NO: 2392 - RNA, 22 nt, Homo sapiens
uggaagguaaguuuugagcauu

SEQ ID NO: 2393 - RNA, 16 nt, Homo sapiens
auuggcaagaugccuu

SEQ ID NO: 2394 - RNA, 22 nt, Homo sapiens
ucaguagcaugaaaacagacua

SEQ ID NO: 2395 - RNA, 22 nt, Homo sapiens
aaccuauaguauugaaaucaag

SEQ ID NO: 2396 - RNA, 22 nt, Homo sapiens
auugcacacagaaucaggguaa

SEQ ID NO: 2397 - RNA, 21 nt, Homo sapiens
ucuggccccuccaaaucucau

SEQ ID NO: 2398 - RNA, 22 nt, Homo sapiens
uugguuaucaucauuucagcaa

SEQ ID NO: 2399 - RNA, 22 nt, Homo sapiens
ucacaguaaauccagaagaaau

SEQ ID NO: 2400 - RNA, 22 nt, Homo sapiens
uuagcacuugggaguauuuauu

SEQ ID NO: 2401 - RNA, 22 nt, Homo sapiens
uguaacaggaggaaaaugugaa

SEQ ID NO: 2402 - RNA, 22 nt, Homo sapiens
gauggaguaauguaaucuugag

SEQ ID NO: 2403 - RNA, 22 nt, Homo sapiens
gggaaaaugucuauugaaugaa

SEQ ID NO: 2404 - RNA, 22 nt, Homo sapiens
ucagaugauucuguuguugugu

SEQ ID NO: 2405 - RNA, 22 nt, Homo sapiens
uugaauguguugggaagcccuu

SEQ ID NO: 2406 - RNA, 20 nt, Homo sapiens
acaguauguuuggaugcaua

SEQ ID NO: 2407 - RNA, 22 nt, Homo sapiens
uaugaaucugagagaucuggaa

SEQ ID NO: 2408 - RNA, 19 nt, Homo sapiens
ugagaugaagacagggguu

SEQ ID NO: 2409 - RNA, 22 nt, Homo sapiens
caugucuuuuaaacauucaacu

SEQ ID NO: 2410 - RNA, 22 nt, Homo sapiens
uauagcagccugaacaaaguaa

SEQ ID NO: 2411 - RNA, 22 nt, Homo sapiens
gcuacugucuaucugugcuucu

SEQ ID NO: 2412 - RNA, 22 nt, Homo sapiens
agugcacugcccgcuuccuguc

SEQ ID NO: 2413 - RNA, 22 nt, Homo sapiens
guggucagaaaucucaguggca

SEQ ID NO: 2414 - RNA, 22 nt, Homo sapiens
agcaccauugcacuccagccug

SEQ ID NO: 2415 - RNA, 22 nt, Homo sapiens
cuaugagcuuuuuuaagccuca

SEQ ID NO: 2416 - RNA, 22 nt, Homo sapiens
uuuugcaguuacagagagugag

SEQ ID NO: 2417 - RNA, 22 nt, Homo sapiens
ucaugagacacacuggaaagga

SEQ ID NO: 2418 - RNA, 22 nt, Homo sapiens
uuugccacugcaggcuguuuaa

SEQ ID NO: 2419 - RNA, 22 nt, Homo sapiens
agugaaaucugaagaaggucau

SEQ ID NO: 2420 - RNA, 19 nt, Homo sapiens
acugcacuccuccuugggu

SEQ ID NO: 2421 - RNA, 22 nt, Homo sapiens
uuacagucaccugggggacaua

SEQ ID NO: 2422 - RNA, 22 nt, Homo sapiens
uguugcaccugccuugcuuuag

SEQ ID NO: 2423 - RNA, 22 nt, Homo sapiens
ucuggccccucucaaaucucau

SEQ ID NO: 2424 - RNA, 22 nt, Homo sapiens
uggacaagauagguucuauauu

SEQ ID NO: 2425 - RNA, 22 nt, Homo sapiens
uucugagguuauauucucucaa

SEQ ID NO: 2426 - RNA, 22 nt, Homo sapiens
ucuucuagcggaacccucuugu

SEQ ID NO: 2427 - RNA, 22 nt, Homo sapiens
gauauguucugagaaaugcauu

SEQ ID NO: 2428 - RNA, 18 nt, Homo sapiens
acagugucauggcucaau

SEQ ID NO: 2429 - RNA, 21 nt, Homo sapiens
ugagaugcaaucaccagggag

SEQ ID NO: 2430 - RNA, 22 nt, Homo sapiens
uuagaugaaugucucuuaaaca

SEQ ID NO: 2431 - RNA, 22 nt, Homo sapiens
agagccacacucuccuaacuca

SEQ ID NO: 2432 - RNA, 20 nt, Homo sapiens
cagucauagacaucagaguc

SEQ ID NO: 2433 - RNA, 22 nt, Homo sapiens
uauggccugcguccagugguau

SEQ ID NO: 2434 - RNA, 22 nt, Homo sapiens
ccaguucaaugauauggaaacu

SEQ ID NO: 2435 - RNA, 22 nt, Homo sapiens
ugcauacuguaugcgugcauac

SEQ ID NO: 2436 - RNA, 22 nt, Homo sapiens
uaaacugcuugaggguaaguac

SEQ ID NO: 2437 - RNA, 22 nt, Homo sapiens
gagugcaagguuuuucugagug

SEQ ID NO: 2438 - RNA, 22 nt, Homo sapiens
cagugacacugaaaaguucggg

SEQ ID NO: 2439 - RNA, 22 nt, Homo sapiens
uuugcuucacuguuuggcaaaa

SEQ ID NO: 2440 - RNA, 22 nt, Homo sapiens
aaggcaugcaaagaacauuuua

SEQ ID NO: 2441 - RNA, 22 nt, Homo sapiens
agugcaauaaggauguagaacu

SEQ ID NO: 2442 - RNA, 22 nt, Homo sapiens
ucuuugguucugugcagccuau

SEQ ID NO: 2443 - RNA, 22 nt, Homo sapiens
augucaacauagacaguagagu

SEQ ID NO: 2444 - RNA, 22 nt, Homo sapiens
ugacauggugcucuuucaggca

SEQ ID NO: 2445 - RNA, 22 nt, Homo sapiens
auaaagccaggagacguaauug

SEQ ID NO: 2446 - RNA, 22 nt, Homo sapiens
cugauacucuccuuuuagagag

SEQ ID NO: 2447 - RNA, 22 nt, Homo sapiens
augugcuuauagguguauguuu

SEQ ID NO: 2448 - RNA, 22 nt, Homo sapiens
gaggucaggacauuuuugcuuu

SEQ ID NO: 2449 - RNA, 22 nt, Homo sapiens
aguacaauguugaguagaagug

SEQ ID NO: 2450 - RNA, 22 nt, Homo sapiens
ggagaauugcuuggacccggga

SEQ ID NO: 2451 - RNA, 22 nt, Homo sapiens
uuagcagcaugagaauggacua

SEQ ID NO: 2452 - RNA, 22 nt, Homo sapiens
uacaguauuaugagugauugaa

SEQ ID NO: 2453 - RNA, 22 nt, Homo sapiens
uggaagucaugcugcaagaaca

SEQ ID NO: 2454 - RNA, 22 nt, Homo sapiens
cugucacugggaggggcagcag

SEQ ID NO: 2455 - RNA, 22 nt, Homo sapiens
gacuaguuaggucucucacaga

SEQ ID NO: 2456 - RNA, 22 nt, Homo sapiens
uaucagauugcugccaucugcu

SEQ ID NO: 2457 - RNA, 22 nt, Homo sapiens
ugacuuaugcaacucugaugug

SEQ ID NO: 2458 - RNA, 22 nt, Homo sapiens
ugagacaucacaaaauccucaa

SEQ ID NO: 2459 - RNA, 22 nt, Homo sapiens
ggcaaguugcuauucuuuaaug

SEQ ID NO: 2460 - RNA, 22 nt, Homo sapiens
uugagaagugucuguucauguc

SEQ ID NO: 2461 - RNA, 22 nt, Homo sapiens
cuguuugguaaggaugccucag

SEQ ID NO: 2462 - RNA, 22 nt, Homo sapiens
uucauugaaugauuuuuagaag

SEQ ID NO: 2463 - RNA, 22 nt, Homo sapiens
auugcacuccagccugggggac

SEQ ID NO: 2464 - RNA, 19 nt, Homo sapiens
ugaccagggacagaaacca

SEQ ID NO: 2465 - RNA, 22 nt, Homo sapiens
cccagugguuacauaaggagua

SEQ ID NO: 2466 - RNA, 22 nt, Homo sapiens
cugaauguuucacucugaaaug

SEQ ID NO: 2467 - RNA, 20 nt, Homo sapiens
ucccucaaacuuuuccacug

SEQ ID NO: 2468 - RNA, 21 nt, Homo sapiens
augucauggaugacuaauuca

SEQ ID NO: 2469 - RNA, 22 nt, Homo sapiens
uguggcuucuuugguucaguau

SEQ ID NO: 2470 - RNA, 22 nt, Homo sapiens
accaugcaguccaauaugcaca

SEQ ID NO: 2471 - RNA, 22 nt, Homo sapiens
gucuggcacagggaaaguacaa

SEQ ID NO: 2472 - RNA, 22 nt, Homo sapiens
cuucaaguaauucugauggcua

SEQ ID NO: 2473 - RNA, 21 nt, Homo sapiens
guauggcauugauuaguuacu

SEQ ID NO: 2474 - RNA, 22 nt, Homo sapiens
ucgagcaauugucaugucucag

SEQ ID NO: 2475 - RNA, 20 nt, Homo sapiens
acugggcuaccgaaguaagg

SEQ ID NO: 2476 - RNA, 22 nt, Homo sapiens
ucuuuggucagaaagauuacac

SEQ ID NO: 2477 - RNA, 22 nt, Homo sapiens
auggcugugagaucgacuuauu

SEQ ID NO: 2478 - RNA, 22 nt, Homo sapiens
gucagcuuguccagagacucug

SEQ ID NO: 2479 - RNA, 22 nt, Homo sapiens
cuuuuugcuagagucuaggguc

SEQ ID NO: 2480 - RNA, 22 nt, Homo sapiens
uugcagagccccacacugggcu

SEQ ID NO: 2481 - RNA, 22 nt, Homo sapiens
uaucaaguguuagggagaugug

SEQ ID NO: 2482 - RNA, 22 nt, Homo sapiens
aucugcuccuggugaggguuuc

SEQ ID NO: 2483 - RNA, 22 nt, Homo sapiens
acccugguagcuaugaagucuu

SEQ ID NO: 2484 - RNA, 22 nt, Homo sapiens
uaaguacuuuacagacauuauc

SEQ ID NO: 2485 - RNA, 22 nt, Homo sapiens
auggaacuggagaucauuaugu

SEQ ID NO: 2486 - RNA, 22 nt, Homo sapiens
auauccaugccauagguuuuga

SEQ ID NO: 2487 - RNA, 22 nt, Homo sapiens
uugauauggcugcuuaccauaa

SEQ ID NO: 2488 - RNA, 22 nt, Homo sapiens
gugagcaaacuuaccuaagguu

SEQ ID NO: 2489 - RNA, 22 nt, Homo sapiens
uuugagcuugacucagcuggag

SEQ ID NO: 2490 - RNA, 22 nt, Homo sapiens
cuuuagcaauugauuaugccau

SEQ ID NO: 2491 - RNA, 22 nt, Homo sapiens
ccagucuuggugucuguagcac

SEQ ID NO: 2492 - RNA, 22 nt, Homo sapiens
uauuaguuguaugauucccaag

SEQ ID NO: 2493 - RNA, 22 nt, Homo sapiens
uaucacagcaaggacccauuau

SEQ ID NO: 2494 - RNA, 22 nt, Homo sapiens
ugagcugagaucuuaccacugc

SEQ ID NO: 2495 - RNA, 22 nt, Homo sapiens
gaguuccuuugagccugagagg

SEQ ID NO: 2496 - RNA, 22 nt, Homo sapiens
caaaugaucugcuggccucagc

SEQ ID NO: 2497 - RNA, 22 nt, Homo sapiens
aucagaaucucuugagaguguu

SEQ ID NO: 2498 - RNA, 22 nt, Homo sapiens
augaaacuggcuaauuuuugua

SEQ ID NO: 2499 - RNA, 22 nt, Homo sapiens
gagaucauuaugucagggguca

SEQ ID NO: 2500 - RNA, 22 nt, Homo sapiens
uagcaguuguuguuacuuguau

SEQ ID NO: 2501 - RNA, 22 nt, Homo sapiens
uaaguaauugcagcaauuugcc

SEQ ID NO: 2502 - RNA, 20 nt, Homo sapiens
uagagagauauggggguucc

SEQ ID NO: 2503 - RNA, 22 nt, Homo sapiens
uccagcuuuuucuaauucugug

SEQ ID NO: 2504 - RNA, 22 nt, Homo sapiens
augaacucaucaucuagguuuu

SEQ ID NO: 2505 - RNA, 22 nt, Homo sapiens
augacauagcauggugccugcu

SEQ ID NO: 2506 - RNA, 22 nt, Homo sapiens
gaugguuuuuuaagaagagccu

SEQ ID NO: 2507 - RNA, 22 nt, Homo sapiens
uaucacaguagaacucuuucca

SEQ ID NO: 2508 - RNA, 22 nt, Homo sapiens
ggcaauauauucugaauucagu

SEQ ID NO: 2509 - RNA, 22 nt, Homo sapiens
uaagugaauuucacuacugagu

SEQ ID NO: 2510 - RNA, 22 nt, Homo sapiens
uggcauggucugcccaaguuuc

SEQ ID NO: 2511 - RNA, 22 nt, Homo sapiens
ucacugagcuagaucacuugac

SEQ ID NO: 2512 - RNA, 22 nt, Homo sapiens
acugcacuccggccuggcaaca

SEQ ID NO: 2513 - RNA, 22 nt, Homo sapiens
auugcacuccagccuggugaca

SEQ ID NO: 2514 - RNA, 22 nt, Homo sapiens
acacgugcagauuuauauaaau

SEQ ID NO: 2515 - RNA, 21 nt, Homo sapiens
cuuuuuacucguucauaugca

SEQ ID NO: 2516 - RNA, 22 nt, Homo sapiens
augcagcugaggguaguggagc

SEQ ID NO: 2517 - RNA, 22 nt, Homo sapiens
auuauauguguaugugcauacc

SEQ ID NO: 2518 - RNA, 19 nt, Homo sapiens
gcugguuguccacucucuc

SEQ ID NO: 2519 - RNA, 22 nt, Homo sapiens
auguaguugcucugccuguuuu

SEQ ID NO: 2520 - RNA, 22 nt, Homo sapiens
uacucuuuagcuccuuaaggaa

SEQ ID NO: 2521 - RNA, 22 nt, Homo sapiens
cuucccguuauugcccuugggu

SEQ ID NO: 2522 - RNA, 19 nt, Homo sapiens
uaagaugaagcugucuggg

SEQ ID NO: 2523 - RNA, 22 nt, Homo sapiens
aagguaguuuucuuuaaugcug

SEQ ID NO: 2524 - RNA, 20 nt, Homo sapiens
ggcaagacccaaagugugug

SEQ ID NO: 2525 - RNA, 22 nt, Homo sapiens
uucauagucacauucgaugucu

SEQ ID NO: 2526 - RNA, 22 nt, Homo sapiens
uagccgggugugguggaacucc

SEQ ID NO: 2527 - RNA, 22 nt, Homo sapiens
ugccuaguggaaggagagcaaa

SEQ ID NO: 2528 - RNA, 22 nt, Homo sapiens
cccuggacacacacuuuuauuc

SEQ ID NO: 2529 - RNA, 22 nt, Homo sapiens
ucuggcuucugacuuaggggac

SEQ ID NO: 2530 - RNA, 22 nt, Homo sapiens
ugagugccuggagggcagggac

SEQ ID NO: 2531 - RNA, 22 nt, Homo sapiens
gcaagauguuaccauuagggaa

SEQ ID NO: 2532 - RNA, 22 nt, Homo sapiens
ugcaccacuacacuccaggcug

SEQ ID NO: 2533 - RNA, 22 nt, Homo sapiens
uguagauauucuuucaguuuuu

SEQ ID NO: 2534 - RNA, 22 nt, Homo sapiens
uggcauggaguggauggcccca

SEQ ID NO: 2535 - RNA, 22 nt, Homo sapiens
aacagaccuagauaguauaguc

SEQ ID NO: 2536 - RNA, 22 nt, Homo sapiens
augaggugcagaggaaaugagu

SEQ ID NO: 2537 - RNA, 22 nt, Homo sapiens
cuugcacucagaagauucaguu

SEQ ID NO: 2538 - RNA, 18 nt, Homo sapiens
cccagugacuuauggccu

SEQ ID NO: 2539 - RNA, 22 nt, Homo sapiens
uuaauagcaaagaguuuagacu

SEQ ID NO: 2540 - RNA, 22 nt, Homo sapiens
gguaauguaacugguauucugu

SEQ ID NO: 2541 - RNA, 22 nt, Homo sapiens
agucaaaugcuuauguauaaag

SEQ ID NO: 2542 - RNA, 22 nt, Homo sapiens
cuuggcuucuuuauguggcuau

SEQ ID NO: 2543 - RNA, 19 nt, Homo sapiens
caccgccugcccccugcug

SEQ ID NO: 2544 - RNA, 22 nt, Homo sapiens
gcaugguaguaaccuacauuug

SEQ ID NO: 2545 - RNA, 22 nt, Homo sapiens
uccuugaaacaggaagaauuca

SEQ ID NO: 2546 - RNA, 22 nt, Homo sapiens
uuggacugagaguuccaccauu

SEQ ID NO: 2547 - RNA, 22 nt, Homo sapiens
uagguagugugugcaugagagg

SEQ ID NO: 2548 - RNA, 22 nt, Homo sapiens
uuuugcaaauuccaguggccau

SEQ ID NO: 2549 - RNA, 22 nt, Homo sapiens
ucaaugaaugaugguugguaug

SEQ ID NO: 2550 - RNA, 22 nt, Homo sapiens
ucucacagccauuucucccucu

SEQ ID NO: 2551 - RNA, 22 nt, Homo sapiens
guaaucucagcuacucaggagg

SEQ ID NO: 2552 - RNA, 22 nt, Homo sapiens
gcagugugugaggaauuugggu

SEQ ID NO: 2553 - RNA, 22 nt, Homo sapiens
uagcagacuauuuugugauaau

SEQ ID NO: 2554 - RNA, 22 nt, Homo sapiens
uacugcacuccagccugccaac

SEQ ID NO: 2555 - RNA, 22 nt, Homo sapiens
uugcacagugguuuagagccug

SEQ ID NO: 2556 - RNA, 19 nt, Homo sapiens
uggcaaugucagcagagau

SEQ ID NO: 2557 - RNA, 22 nt, Homo sapiens
uuggagagaaaggcaguuccug

SEQ ID NO: 2558 - RNA, 22 nt, Homo sapiens
aaauucaugucaccucuaggua

SEQ ID NO: 2559 - RNA, 23 nt, Homo sapiens
auggcccuggugggagugucuuu

SEQ ID NO: 2560 - RNA, 22 nt, Homo sapiens
uagcacagugucauucuaggua

SEQ ID NO: 2561 - RNA, 22 nt, Homo sapiens
aucacaguuuuaccauuuggua

SEQ ID NO: 2562 - RNA, 20 nt, Homo sapiens
uggcaagauggcagaauaga

SEQ ID NO: 2563 - RNA, 22 nt, Homo sapiens
acccuguaguuagaaacuuuca

SEQ ID NO: 2564 - RNA, 22 nt, Homo sapiens
ccaguuuucaagauaaugguuu

SEQ ID NO: 2565 - RNA, 22 nt, Homo sapiens
aguacacuguugaacagaagug

SEQ ID NO: 2566 - RNA, 22 nt, Homo sapiens
uuaagacaccaaucauuggauu

SEQ ID NO: 2567 - RNA, 22 nt, Homo sapiens
uaguaggacaggauuucaguua

SEQ ID NO: 2568 - RNA, 22 nt, Homo sapiens
uguggcuuuacagcaugguuca

SEQ ID NO: 2569 - RNA, 22 nt, Homo sapiens
ugucaaggaaugucauugguuu

SEQ ID NO: 2570 - RNA, 22 nt, Homo sapiens
gcugcuguggcagauuggauuc

SEQ ID NO: 2571 - RNA, 22 nt, Homo sapiens
ucacaagugagaggaauuagau

SEQ ID NO: 2572 - RNA, 22 nt, Homo sapiens
augaaugcagcacuguuuuucu

SEQ ID NO: 2573 - RNA, 20 nt, Homo sapiens
guucacagagguuaugauua

SEQ ID NO: 2574 - RNA, 22 nt, Homo sapiens
ggcagcacaauuuucugaugga

SEQ ID NO: 2575 - RNA, 22 nt, Homo sapiens
ugcgccauugaacuccuccugg

SEQ ID NO: 2576 - RNA, 22 nt, Homo sapiens
auaucacaaacaagucuguacu

SEQ ID NO: 2577 - RNA, 22 nt, Homo sapiens
uugagauaggagcuguuguucu

SEQ ID NO: 2578 - RNA, 22 nt, Homo sapiens
ucaaggacucagagagggauua

SEQ ID NO: 2579 - RNA, 22 nt, Homo sapiens
ugaucuguguaacauaggaguc

SEQ ID NO: 2580 - RNA, 22 nt, Homo sapiens
auggcuuuaagagugucugaau

SEQ ID NO: 2581 - RNA, 22 nt, Homo sapiens
uuugugcuccugugagaaucua

SEQ ID NO: 2582 - RNA, 21 nt, Homo sapiens
ucagggaccugcuguacugau

SEQ ID NO: 2583 - RNA, 22 nt, Homo sapiens
ucgcagcacgagcaugcaaggu

SEQ ID NO: 2584 - RNA, 22 nt, Homo sapiens
uugagcaauccuccugccaugu

SEQ ID NO: 2585 - RNA, 22 nt, Homo sapiens
cuguggauguauugcacagucu

SEQ ID NO: 2586 - RNA, 22 nt, Homo sapiens
guagggcaggcugagaaauaua

SEQ ID NO: 2587 - RNA, 22 nt, Homo sapiens
guugguauuacagaaauuaguu

SEQ ID NO: 2588 - RNA, 18 nt, Homo sapiens
uugccuauucacucugau

SEQ ID NO: 2589 - RNA, 22 nt, Homo sapiens
aucacagaguuaaaacuuucuu

SEQ ID NO: 2590 - RNA, 22 nt, Homo sapiens
acugcacuccagcccaggugac

SEQ ID NO: 2591 - RNA, 22 nt, Homo sapiens
uugcugguuuucauaugagcag

SEQ ID NO: 2592 - RNA, 22 nt, Homo sapiens
ugguuagucuguguguauauau

SEQ ID NO: 2593 - RNA, 21 nt, Homo sapiens
aguucacauggcuccuguguu

SEQ ID NO: 2594 - RNA, 22 nt, Homo sapiens
uuacaguggugaccuuguauug

SEQ ID NO: 2595 - RNA, 22 nt, Homo sapiens
ccccuguaucucagcgucuuca

SEQ ID NO: 2596 - RNA, 22 nt, Homo sapiens
ucaagcaauucgccugucucag

SEQ ID NO: 2597 - RNA, 22 nt, Homo sapiens
ugagauguagauauggauuaga

SEQ ID NO: 2598 - RNA, 22 nt, Homo sapiens
ugccagaugcuggugugagggg

SEQ ID NO: 2599 - RNA, 22 nt, Homo sapiens
ugcaccaauucuaaacaguucu

SEQ ID NO: 2600 - RNA, 23 nt, Homo sapiens
uucaaauguucucugguugucag

SEQ ID NO: 2601 - RNA, 22 nt, Homo sapiens
auugcacaaagagggaaacuga

SEQ ID NO: 2602 - RNA, 22 nt, Homo sapiens
uuguuaagaugcagauucugga

SEQ ID NO: 2603 - RNA, 22 nt, Homo sapiens
uuugguuauauauauacacucu

SEQ ID NO: 2604 - RNA, 22 nt, Homo sapiens
uggaagauggaguuuuaucauu

SEQ ID NO: 2605 - RNA, 22 nt, Homo sapiens
ugucaugucaacuauggaauuu

SEQ ID NO: 2606 - RNA, 22 nt, Homo sapiens
uuuggauagugugguccuuuua

SEQ ID NO: 2607 - RNA, 22 nt, Homo sapiens
uacugcacuccaggcucaccug

SEQ ID NO: 2608 - RNA, 23 nt, Homo sapiens
gagaccagcuucagaaagcacga

SEQ ID NO: 2609 - RNA, 22 nt, Homo sapiens
gguauuuaaaguaccugucugc

SEQ ID NO: 2610 - RNA, 22 nt, Homo sapiens
auaaccuauggaucuacucggg

SEQ ID NO: 2611 - RNA, 22 nt, Homo sapiens
uuugccaauauuuuacugagga

SEQ ID NO: 2612 - RNA, 22 nt, Homo sapiens
uggucuucuggccuccagaacc

SEQ ID NO: 2613 - RNA, 19 nt, Homo sapiens
ugcugcauugugaccuugc

SEQ ID NO: 2614 - RNA, 22 nt, Homo sapiens
auaagcuaagaguuucugggcu

SEQ ID NO: 2615 - RNA, 22 nt, Homo sapiens
ugaugacauugucacagucuga

SEQ ID NO: 2616 - RNA, 22 nt, Homo sapiens
ugaaugugauggguuucaugug

SEQ ID NO: 2617 - RNA, 22 nt, Homo sapiens
guguaauacauuagcaaaccaa

SEQ ID NO: 2618 - RNA, 22 nt, Homo sapiens
gucaagauuuguaggacagaga

SEQ ID NO: 2619 - RNA, 20 nt, Homo sapiens
uccaguuuuggagacauucu

SEQ ID NO: 2620 - RNA, 22 nt, Homo sapiens
auggagaugugcgaacugagua

SEQ ID NO: 2621 - RNA, 22 nt, Homo sapiens
ucaaagugcuauggcucagguu

SEQ ID NO: 2622 - RNA, 22 nt, Homo sapiens
ggaaugagaaauauuacacaau

SEQ ID NO: 2623 - RNA, 22 nt, Homo sapiens
cuagacuagacccaaauugaag

SEQ ID NO: 2624 - RNA, 22 nt, Homo sapiens
aggugcuugaaucuaugagcuc

SEQ ID NO: 2625 - RNA, 23 nt, Homo sapiens
uggaacugaauuucuuagcauuu

SEQ ID NO: 2626 - RNA, 23 nt, Homo sapiens
ugacagaccuucuggaagaaguc

SEQ ID NO: 2627 - RNA, 22 nt, Homo sapiens
uggguagaugaauccauuccaa

SEQ ID NO: 2628 - RNA, 22 nt, Homo sapiens
uuggccagugucuuuuuuuccu

SEQ ID NO: 2629 - RNA, 22 nt, Homo sapiens
gugguucuagaauugaguaucc

SEQ ID NO: 2630 - RNA, 22 nt, Homo sapiens
cagguaguguguagcacagcag

SEQ ID NO: 2631 - RNA, 18 nt, Homo sapiens
uaaaggcacuguguuguu

SEQ ID NO: 2632 - RNA, 22 nt, Homo sapiens
aaagugauugcgguuuuugcca

SEQ ID NO: 2633 - RNA, 22 nt, Homo sapiens
uuguacuagaaaauuauucuuu

SEQ ID NO: 2634 - RNA, 22 nt, Homo sapiens
ucuggcuccacacuuuauuaac

SEQ ID NO: 2635 - RNA, 22 nt, Homo sapiens
uggagcaaaguugaggccaagc

SEQ ID NO: 2636 - RNA, 22 nt, Homo sapiens
ucuacccugugagggacacagu

SEQ ID NO: 2637 - RNA, 22 nt, Homo sapiens
cuuuggucaaaauaaguaaguu

SEQ ID NO: 2638 - RNA, 22 nt, Homo sapiens
ugguaucuaagaugcacguugu

SEQ ID NO: 2639 - RNA, 22 nt, Homo sapiens
uuccuugagagcuugauaucac

SEQ ID NO: 2640 - RNA, 22 nt, Homo sapiens
gugggauggaaaugggcuucag

SEQ ID NO: 2641 - RNA, 22 nt, Homo sapiens
gagcaucauucaacaaaagucu

SEQ ID NO: 2642 - RNA, 22 nt, Homo sapiens
ucccuguagugccuagaucaga

SEQ ID NO: 2643 - RNA, 22 nt, Homo sapiens
guguaaaucugcugugaacauu

SEQ ID NO: 2644 - RNA, 22 nt, Homo sapiens
ucacaguagagcuucuuucaga

SEQ ID NO: 2645 - RNA, 21 nt, Homo sapiens
gaccccuagaucuuuuuccag

SEQ ID NO: 2646 - RNA, 22 nt, Homo sapiens
augccacagaaauaaccaaaau

SEQ ID NO: 2647 - RNA, 22 nt, Homo sapiens
uaugcagacauuguuccaacca

SEQ ID NO: 2648 - RNA, 22 nt, Homo sapiens
cuccgggugcgucggcgcccug

SEQ ID NO: 2649 - RNA, 22 nt, Homo sapiens
auggcccugcuaccacuuuucu

SEQ ID NO: 2650 - RNA, 20 nt, Homo sapiens
agcaucauugcaauuuguca

SEQ ID NO: 2651 - RNA, 22 nt, Homo sapiens
ucacaugggugcaauauaauca

SEQ ID NO: 2652 - RNA, 22 nt, Homo sapiens
uaccugagaaagaaagcccucg

SEQ ID NO: 2653 - RNA, 22 nt, Homo sapiens
augaucacaccacugcacucca

SEQ ID NO: 2654 - RNA, 22 nt, Homo sapiens
ucaaaucaucuuuuccaaagcu

SEQ ID NO: 2655 - RNA, 20 nt, Homo sapiens
ugagcuuguaaacacuguuu

SEQ ID NO: 2656 - RNA, 22 nt, Homo sapiens
aaguagcagaggcaagacuuga

SEQ ID NO: 2657 - RNA, 22 nt, Homo sapiens
aaaugcagucuuuguucugggc

SEQ ID NO: 2658 - RNA, 22 nt, Homo sapiens
aaggaguagacaacauggcgcc

SEQ ID NO: 2659 - RNA, 22 nt, Homo sapiens
uaacugccuacugugcaaauau

SEQ ID NO: 2660 - RNA, 22 nt, Homo sapiens
uuucaguguggcaggcauagcu

SEQ ID NO: 2661 - RNA, 22 nt, Homo sapiens
uucuacaggcuguucaagaagc

SEQ ID NO: 2662 - RNA, 22 nt, Homo sapiens
auucacuguggguccuuuggau

SEQ ID NO: 2663 - RNA, 16 nt, Homo sapiens
ugucuguuugggcaca

SEQ ID NO: 2664 - RNA, 19 nt, Homo sapiens
uggcacuugacguccggau

SEQ ID NO: 2665 - RNA, 22 nt, Homo sapiens
uccaguguuccucagucacccc

SEQ ID NO: 2666 - RNA, 22 nt, Homo sapiens
cauugcacuccagccugcugac

SEQ ID NO: 2667 - RNA, 22 nt, Homo sapiens
uugcuagaugaaaaugguaccu

SEQ ID NO: 2668 - RNA, 22 nt, Homo sapiens
uagguucuccacagguucucca

SEQ ID NO: 2669 - RNA, 22 nt, Homo sapiens
ggaaauguuuagcauccacuuu

SEQ ID NO: 2670 - RNA, 22 nt, Homo sapiens
aucagugcauguuuguugagcu

SEQ ID NO: 2671 - RNA, 22 nt, Homo sapiens
auugcaacaguguugagaggug

SEQ ID NO: 2672 - RNA, 22 nt, Homo sapiens
ugaaauggaagaagucccuuuu

SEQ ID NO: 2673 - RNA, 22 nt, Homo sapiens
ucauucacucccuugaaguuag

SEQ ID NO: 2674 - RNA, 22 nt, Homo sapiens
ugaggcacucccuagcggggug

SEQ ID NO: 2675 - RNA, 22 nt, Homo sapiens
acucagagagaacugucauuug

SEQ ID NO: 2676 - RNA, 22 nt, Homo sapiens
aauucuguauuguuuagggacu

SEQ ID NO: 2677 - RNA, 23 nt, Homo sapiens
uuuguaguagcaugauuuauaau

SEQ ID NO: 2678 - RNA, 22 nt, Homo sapiens
uaucacaggucaggaaucuugc

SEQ ID NO: 2679 - RNA, 22 nt, Homo sapiens
uugugguaggcauguaagauga

SEQ ID NO: 2680 - RNA, 22 nt, Homo sapiens
ugacuggagucuugcucugucg

SEQ ID NO: 2681 - RNA, 22 nt, Homo sapiens
uugaucaaaucugagugagaau

SEQ ID NO: 2682 - RNA, 22 nt, Homo sapiens
ucucacagaguugaauguuucu

SEQ ID NO: 2683 - RNA, 22 nt, Homo sapiens
guucacagugguugccuuccag

SEQ ID NO: 2684 - RNA, 21 nt, Homo sapiens
ugagaugauccugcaugcaug

SEQ ID NO: 2685 - RNA, 22 nt, Homo sapiens
uugaaagucauggcacaggcaa

SEQ ID NO: 2686 - RNA, 22 nt, Homo sapiens
ugaaauacuuaauuucuccaug

SEQ ID NO: 2687 - RNA, 22 nt, Homo sapiens
ucaguagagacaggauuucacc

SEQ ID NO: 2688 - RNA, 22 nt, Homo sapiens
gauagcagccauucuuuuuauu

SEQ ID NO: 2689 - RNA, 19 nt, Homo sapiens
ugauuguaagcuuggugag

SEQ ID NO: 2690 - RNA, 22 nt, Homo sapiens
ucuuuuguaaaaugaggaggug

SEQ ID NO: 2691 - RNA, 22 nt, Homo sapiens
ugaauuguuuacgagaugugag

SEQ ID NO: 2692 - RNA, 22 nt, Homo sapiens
gcuuuguuaaaacacagccaca

SEQ ID NO: 2693 - RNA, 22 nt, Homo sapiens
cuagguucucaaaccagcguca

SEQ ID NO: 2694 - RNA, 22 nt, Homo sapiens
ucuccauuuguaaggguuucuc

SEQ ID NO: 2695 - RNA, 22 nt, Homo sapiens
uuaaggaguagugucugguauu

SEQ ID NO: 2696 - RNA, 22 nt, Homo sapiens
ucuugcuuguuguucccuucau

SEQ ID NO: 2697 - RNA, 19 nt, Homo sapiens
aaaguguuuuaaagaggau

SEQ ID NO: 2698 - RNA, 22 nt, Homo sapiens
uauuccacuauuaguccagaug

SEQ ID NO: 2699 - RNA, 22 nt, Homo sapiens
cucucaguugucuaauuaguuu

SEQ ID NO: 2700 - RNA, 22 nt, Homo sapiens
uuauguguuuaauguuucugaa

SEQ ID NO: 2701 - RNA, 22 nt, Homo sapiens
ugauauguggauucagcucaaa

SEQ ID NO: 2702 - RNA, 22 nt, Homo sapiens
uaucacacaucaugguaaaucu

SEQ ID NO: 2703 - RNA, 20 nt, Homo sapiens
uguggcacuguaucucucag

SEQ ID NO: 2704 - RNA, 22 nt, Homo sapiens
auggucccauucauucacguau

SEQ ID NO: 2705 - RNA, 22 nt, Homo sapiens
auugacacugauuuuucuuuaa

SEQ ID NO: 2706 - RNA, 22 nt, Homo sapiens
caucucauugaauugcugagca

SEQ ID NO: 2707 - RNA, 22 nt, Homo sapiens
uuaguaguugugauagguaccu

SEQ ID NO: 2708 - RNA, 22 nt, Homo sapiens
caggcacgcuugggagacacac

SEQ ID NO: 2709 - RNA, 22 nt, Homo sapiens
caacccgugcagagcgcuuagu

SEQ ID NO: 2710 - RNA, 22 nt, Homo sapiens
gacugcauuugccccaucgaau

SEQ ID NO: 2711 - RNA, 22 nt, Homo sapiens
cacuagagaauagguaguucug

SEQ ID NO: 2712 - RNA, 22 nt, Homo sapiens
auaaauaguaguugugguggcc

SEQ ID NO: 2713 - RNA, 22 nt, Homo sapiens
ugagacugagucucgcucuugu

SEQ ID NO: 2714 - RNA, 22 nt, Homo sapiens
uugcaggugguuuaugcaagac

SEQ ID NO: 2715 - RNA, 22 nt, Homo sapiens
uugaaugucuauuaaguuguuu

SEQ ID NO: 2716 - RNA, 19 nt, Homo sapiens
acagugucucuauaaugau

SEQ ID NO: 2717 - RNA, 22 nt, Homo sapiens
uggcagaugcucuuggugccca

SEQ ID NO: 2718 - RNA, 22 nt, Homo sapiens
uacuuaguagcuuauccugugg

SEQ ID NO: 2719 - RNA, 22 nt, Homo sapiens
uauuacuguuauuccuaucaaa

SEQ ID NO: 2720 - RNA, 22 nt, Homo sapiens
aagcugccuugcugaggagaaa

SEQ ID NO: 2721 - RNA, 22 nt, Homo sapiens
ugcgccauugcacuccagccug

SEQ ID NO: 2722 - RNA, 22 nt, Homo sapiens
uugacuucagagcugauucaag

SEQ ID NO: 2723 - RNA, 22 nt, Homo sapiens
guuuggauuuucuaauuucugu

SEQ ID NO: 2724 - RNA, 22 nt, Homo sapiens
auucaaagugcauguucccacu

SEQ ID NO: 2725 - RNA, 18 nt, Homo sapiens
ugacaucauuuagaaagg

SEQ ID NO: 2726 - RNA, 22 nt, Homo sapiens
uacauguauccauuguuuuugg

SEQ ID NO: 2727 - RNA, 18 nt, Homo sapiens
ugcaauggagaugcagcc

SEQ ID NO: 2728 - RNA, 22 nt, Homo sapiens
auucaagugaugugauucuucu

SEQ ID NO: 2729 - RNA, 22 nt, Homo sapiens
cuacagcagcccaguccccgaa

SEQ ID NO: 2730 - RNA, 22 nt, Homo sapiens
cugugguguaacucuuggggcg

SEQ ID NO: 2731 - RNA, 22 nt, Homo sapiens
uguggcacuguguccagagaaa

SEQ ID NO: 2732 - RNA, 21 nt, Homo sapiens
ugagauuaaguuguuuagaag

SEQ ID NO: 2733 - RNA, 22 nt, Homo sapiens
ucuguacuccuugaguagugcu

SEQ ID NO: 2734 - RNA, 21 nt, Homo sapiens
uuaacagacaagugucuuccc

SEQ ID NO: 2735 - RNA, 22 nt, Homo sapiens
uccagaguggugaugcuggggc

SEQ ID NO: 2736 - RNA, 22 nt, Homo sapiens
acugcacuccagcccgggugac

SEQ ID NO: 2737 - RNA, 22 nt, Homo sapiens
agguauauuggacagauguaaa

SEQ ID NO: 2738 - RNA, 22 nt, Homo sapiens
ugauuuguuucaggaguuuucu

SEQ ID NO: 2739 - RNA, 22 nt, Homo sapiens
cugggaugugacuguugccccc

SEQ ID NO: 2740 - RNA, 22 nt, Homo sapiens
uaguuuaucuucuggauggaca

SEQ ID NO: 2741 - RNA, 22 nt, Homo sapiens
ugagggaugccugguuuguuuu

SEQ ID NO: 2742 - RNA, 22 nt, Homo sapiens
aaaugcagcacucaagugggaa

SEQ ID NO: 2743 - RNA, 22 nt, Homo sapiens
uucccuugcaggaugaucugga

SEQ ID NO: 2744 - RNA, 17 nt, Homo sapiens
aaaguccuuugcuaucu

SEQ ID NO: 2745 - RNA, 22 nt, Homo sapiens
gaccuggugguccacccgccuu

SEQ ID NO: 2746 - RNA, 22 nt, Homo sapiens
ugagaucuguaaagucugacau

SEQ ID NO: 2747 - RNA, 22 nt, Homo sapiens
ugcaauuuaaugugucccaauu

SEQ ID NO: 2748 - RNA, 22 nt, Homo sapiens
uccucaguggauuggauggugc

SEQ ID NO: 2749 - RNA, 22 nt, Homo sapiens
ugcaccauggcacuccaggcug

SEQ ID NO: 2750 - RNA, 18 nt, Homo sapiens
ucacggggagcagcagcc

SEQ ID NO: 2751 - RNA, 22 nt, Homo sapiens
uuagcacugucuacucuggauu

SEQ ID NO: 2752 - RNA, 22 nt, Homo sapiens
gucuuagguuuaaucacuucua

SEQ ID NO: 2753 - RNA, 22 nt, Homo sapiens
uuugacuaccaggaauguucuu

SEQ ID NO: 2754 - RNA, 22 nt, Homo sapiens
aggagcacuggccuuggaguca

SEQ ID NO: 2755 - RNA, 22 nt, Homo sapiens
ucuuuuguucuauucaggccuu

SEQ ID NO: 2756 - RNA, 23 nt, Homo sapiens
uaagacacuaacuuuaugcuuug

SEQ ID NO: 2757 - RNA, 22 nt, Homo sapiens
uugcaacuuagaaaaaucauuu

SEQ ID NO: 2758 - RNA, 22 nt, Homo sapiens
auguccauggaaucuguagcaa

SEQ ID NO: 2759 - RNA, 22 nt, Homo sapiens
agugaacacagcuucuuugguu

SEQ ID NO: 2760 - RNA, 22 nt, Homo sapiens
cagcuagcaugcguaacuuucu

SEQ ID NO: 2761 - RNA, 22 nt, Homo sapiens
uuguacaggaguguaagcuuca

SEQ ID NO: 2762 - RNA, 22 nt, Homo sapiens
gucaggaccucgguggcauucu

SEQ ID NO: 2763 - RNA, 22 nt, Homo sapiens
ucagguugcuaaguauaauauu

SEQ ID NO: 2764 - RNA, 22 nt, Homo sapiens
uagcagccaggaagggcuggcu

SEQ ID NO: 2765 - RNA, 22 nt, Homo sapiens
uuaagugcucaguuacucaguu

SEQ ID NO: 2766 - RNA, 22 nt, Homo sapiens
uauggguaguacaaaguguaua

SEQ ID NO: 2767 - RNA, 22 nt, Homo sapiens
uaagcagugcaagaauggaaua

SEQ ID NO: 2768 - RNA, 22 nt, Homo sapiens
uuggucagcucaauggagaggg

SEQ ID NO: 2769 - RNA, 22 nt, Homo sapiens
augcaacugcacuccagccugg

SEQ ID NO: 2770 - RNA, 22 nt, Homo sapiens
uggaggucauuggaucaugggg

SEQ ID NO: 2771 - RNA, 22 nt, Homo sapiens
aauaaagcugaauccuuccuga

SEQ ID NO: 2772 - RNA, 22 nt, Homo sapiens
gagacugagucuugcucugucg

SEQ ID NO: 2773 - RNA, 20 nt, Homo sapiens
ugacuggauacccuuuggcu

SEQ ID NO: 2774 - RNA, 23 nt, Homo sapiens
ggacuguaagggauauaaagguu

SEQ ID NO: 2775 - RNA, 22 nt, Homo sapiens
aguuccuacuggcuguaaagaa

SEQ ID NO: 2776 - RNA, 22 nt, Homo sapiens
ugaaacacacagagaagggaga

SEQ ID NO: 2777 - RNA, 17 nt, Homo sapiens
uauguaguacuuauaaa

SEQ ID NO: 2778 - RNA, 22 nt, Homo sapiens
uucaaaucuuuggcucccacua

SEQ ID NO: 2779 - RNA, 20 nt, Homo sapiens
ugucuauggggguucucugc

SEQ ID NO: 2780 - RNA, 22 nt, Homo sapiens
aagagaacugacaguaccuggg

SEQ ID NO: 2781 - RNA, 22 nt, Homo sapiens
gaaagugcugcaaggccaugca

SEQ ID NO: 2782 - RNA, 22 nt, Homo sapiens
uugagcuaugaguuaauaggac

SEQ ID NO: 2783 - RNA, 22 nt, Homo sapiens
uguaugagagacauggcugcuu

SEQ ID NO: 2784 - RNA, 23 nt, Homo sapiens
uuuguacuaugucaguuuagaua

SEQ ID NO: 2785 - RNA, 22 nt, Homo sapiens
uggaaugcucuccccacggacu

SEQ ID NO: 2786 - RNA, 22 nt, Homo sapiens
ugacaguguccucauucccaac

SEQ ID NO: 2787 - RNA, 22 nt, Homo sapiens
aucccuguguccagcaccugug

SEQ ID NO: 2788 - RNA, 22 nt, Homo sapiens
uuccauuuguucggugucgcca

SEQ ID NO: 2789 - RNA, 22 nt, Homo sapiens
aucaggaaccuuuuuggugugu

SEQ ID NO: 2790 - RNA, 22 nt, Homo sapiens
uguaaacauguauguguuuaug

SEQ ID NO: 2791 - RNA, 22 nt, Homo sapiens
uacugcuaccuccagcuucugg

SEQ ID NO: 2792 - RNA, 22 nt, Homo sapiens
ccuaggcacugggguccagccc

SEQ ID NO: 2793 - RNA, 21 nt, Homo sapiens
acugcacuccaaccucaacag

SEQ ID NO: 2794 - RNA, 22 nt, Homo sapiens
auggcuucuuacucuucugcau

SEQ ID NO: 2795 - RNA, 22 nt, Homo sapiens
uugggaauguccuaauaucucg

SEQ ID NO: 2796 - RNA, 22 nt, Homo sapiens
gagauucaucuagguccagaga

SEQ ID NO: 2797 - RNA, 22 nt, Homo sapiens
ugauaucugaauagauacacaa

SEQ ID NO: 2798 - RNA, 22 nt, Homo sapiens
guggguaaaucucuggggcucu

SEQ ID NO: 2799 - RNA, 22 nt, Homo sapiens
ugugaauggugcugccgugaag

SEQ ID NO: 2800 - RNA, 22 nt, Homo sapiens
acugcacugcagccuggccaac

SEQ ID NO: 2801 - RNA, 22 nt, Homo sapiens
acugcacuccagccugcccaac

SEQ ID NO: 2802 - RNA, 22 nt, Homo sapiens
cacagucuugcaauauugagau

SEQ ID NO: 2803 - RNA, 21 nt, Homo sapiens
ccucuuugagggaagaaaggg

SEQ ID NO: 2804 - RNA, 22 nt, Homo sapiens
uuugcaucuuagaaaguucucc

SEQ ID NO: 2805 - RNA, 22 nt, Homo sapiens
uauuccauuugugaaaggaagu

SEQ ID NO: 2806 - RNA, 22 nt, Homo sapiens
guacccuggaacaacccaauuu

SEQ ID NO: 2807 - RNA, 22 nt, Homo sapiens
ugaucuguccaccucagcuucc

SEQ ID NO: 2808 - RNA, 18 nt, Homo sapiens
cugccagugugcucuccg

SEQ ID NO: 2809 - RNA, 19 nt, Homo sapiens
uugagaugugaacucacac

SEQ ID NO: 2810 - RNA, 22 nt, Homo sapiens
augcuuguugcagccugagccu

SEQ ID NO: 2811 - RNA, 16 nt, Homo sapiens
uaacacaguucccacc

SEQ ID NO: 2812 - RNA, 22 nt, Homo sapiens
acccuguaggugcuggcagaga

SEQ ID NO: 2813 - RNA, 22 nt, Homo sapiens
uugagauggagucuugcucugu

SEQ ID NO: 2814 - RNA, 22 nt, Homo sapiens
uuugguccaguguucagguccu

SEQ ID NO: 2815 - RNA, 22 nt, Homo sapiens
augggacugggugccguggagc

SEQ ID NO: 2816 - RNA, 22 nt, Homo sapiens
guggaauacuaugaugguggau

SEQ ID NO: 2817 - RNA, 18 nt, Homo sapiens
uaaggcacuauaggcauu

SEQ ID NO: 2818 - RNA, 22 nt, Homo sapiens
auuguucuuguguccuuuuccu

SEQ ID NO: 2819 - RNA, 23 nt, Homo sapiens
ugguaacauguuguggcagggga

SEQ ID NO: 2820 - RNA, 22 nt, Homo sapiens
ucaacagugggcacuguaaaug

SEQ ID NO: 2821 - RNA, 22 nt, Homo sapiens
aagggaaugcgcugccuguguu

SEQ ID NO: 2822 - RNA, 22 nt, Homo sapiens
augacaagagccuucuuuccuu

SEQ ID NO: 2823 - RNA, 21 nt, Homo sapiens
ugacauguugguuugcugcac

SEQ ID NO: 2824 - RNA, 22 nt, Homo sapiens
ugcaccacugcuagccugggua

SEQ ID NO: 2825 - RNA, 22 nt, Homo sapiens
accuguauaacaagugggaaau

SEQ ID NO: 2826 - RNA, 22 nt, Homo sapiens
gaagcgaggugauuagcagaca

SEQ ID NO: 2827 - RNA, 22 nt, Homo sapiens
guaauacuggacaggguaucag

SEQ ID NO: 2828 - RNA, 22 nt, Homo sapiens
uugagauguggcaguuuaugag

SEQ ID NO: 2829 - RNA, 22 nt, Homo sapiens
gccugagaggauaugauccccu

SEQ ID NO: 2830 - RNA, 22 nt, Homo sapiens
auagugaacuuugugagaacaa

SEQ ID NO: 2831 - RNA, 22 nt, Homo sapiens
augacuggaacggcacuuuaca

SEQ ID NO: 2832 - RNA, 22 nt, Homo sapiens
ggaauguauuaaggcauugggc

SEQ ID NO: 2833 - RNA, 22 nt, Homo sapiens
aucaagcuugacuccuuaaagg

SEQ ID NO: 2834 - RNA, 17 nt, Homo sapiens
ugagggaugccugguuc

SEQ ID NO: 2835 - RNA, 22 nt, Homo sapiens
gagcacauguggagagucuggg

SEQ ID NO: 2836 - RNA, 22 nt, Homo sapiens
caugucuuuuauucugugugau

SEQ ID NO: 2837 - RNA, 22 nt, Homo sapiens
uucgcagcucaguucaacuagg

SEQ ID NO: 2838 - RNA, 17 nt, Homo sapiens
augaacucaucauuuuu

SEQ ID NO: 2839 - RNA, 18 nt, Homo sapiens
uacugcacucuccagccu

SEQ ID NO: 2840 - RNA, 22 nt, Homo sapiens
uagugcugugauauuuuuggcc

SEQ ID NO: 2841 - RNA, 22 nt, Homo sapiens
guguccucgaguacacaucagg

SEQ ID NO: 2842 - RNA, 22 nt, Homo sapiens
cucuuuuguuuagcugagaggg

SEQ ID NO: 2843 - RNA, 22 nt, Homo sapiens
uugggcauugggcuaaacuccc

SEQ ID NO: 2844 - RNA, 22 nt, Homo sapiens
uaggaaguuuucuugcugggcc

SEQ ID NO: 2845 - RNA, 22 nt, Homo sapiens
caccccuaccugagucaggagu

SEQ ID NO: 2846 - RNA, 22 nt, Homo sapiens
uugcccuuuagguaacuauaua

SEQ ID NO: 2847 - RNA, 22 nt, Homo sapiens
uggcccccucccaaaucucaua

SEQ ID NO: 2848 - RNA, 22 nt, Homo sapiens
cugcccguaauccucuccccag

SEQ ID NO: 2849 - RNA, 22 nt, Homo sapiens
auggcguggagauauggucagc

SEQ ID NO: 2850 - RNA, 22 nt, Homo sapiens
aagcugccuugugaaggcauuc

SEQ ID NO: 2851 - RNA, 22 nt, Homo sapiens
uccccuuuguaagauggaaacg

SEQ ID NO: 2852 - RNA, 22 nt, Homo sapiens
aguaacauuucuaguagagagu

SEQ ID NO: 2853 - RNA, 22 nt, Homo sapiens
uagguagauuuaaagauuuucu

SEQ ID NO: 2854 - RNA, 22 nt, Homo sapiens
uaccagugucagcuuccugugu

SEQ ID NO: 2855 - RNA, 22 nt, Homo sapiens
ugagaagacaucagcuuucgga

SEQ ID NO: 2856 - RNA, 22 nt, Homo sapiens
ugagucuguuccaaagaaauaa

SEQ ID NO: 2857 - RNA, 22 nt, Homo sapiens
agcaaccagaggagaugaggcu

SEQ ID NO: 2858 - RNA, 22 nt, Homo sapiens
ugcaccacugcacuccagcuug

SEQ ID NO: 2859 - RNA, 22 nt, Homo sapiens
agaagacuauucuggguugggc

SEQ ID NO: 2860 - RNA, 16 nt, Homo sapiens
gacuaauacaaaggaa

SEQ ID NO: 2861 - RNA, 22 nt, Homo sapiens
uaucagcagagucauacuucaa

SEQ ID NO: 2862 - RNA, 22 nt, Homo sapiens
uugagaguggaggcuauaucuu

SEQ ID NO: 2863 - RNA, 22 nt, Homo sapiens
gacuagagagccaaccgucagg

SEQ ID NO: 2864 - RNA, 22 nt, Homo sapiens
cucaaguaauccucccgccuug

SEQ ID NO: 2865 - RNA, 22 nt, Homo sapiens
ucagugaauacauguacucaug

SEQ ID NO: 2866 - RNA, 22 nt, Homo sapiens
uagaggaaggauuggaaacgca

SEQ ID NO: 2867 - RNA, 22 nt, Homo sapiens
uuugggccaugcuucccgguca

SEQ ID NO: 2868 - RNA, 22 nt, Homo sapiens
cugugaacaugggagaaauggc

SEQ ID NO: 2869 - RNA, 22 nt, Homo sapiens
uuaaagugaucauaaggauagu

SEQ ID NO: 2870 - RNA, 22 nt, Homo sapiens
gagguaugauugacauauaaaa

SEQ ID NO: 2871 - RNA, 22 nt, Homo sapiens
uggaaggcuucauauguaaaga

SEQ ID NO: 2872 - RNA, 22 nt, Homo sapiens
gagcuguuuuucacuagaccaa

SEQ ID NO: 2873 - RNA, 21 nt, Homo sapiens
aaucacaguuguucugccuuc

SEQ ID NO: 2874 - RNA, 22 nt, Homo sapiens
uuuccaguuggaaagccuguuu

SEQ ID NO: 2875 - RNA, 22 nt, Homo sapiens
ugucaaaugcagugauauuuga

SEQ ID NO: 2876 - RNA, 22 nt, Homo sapiens
ugcaaugugaaauaagcacauc

SEQ ID NO: 2877 - RNA, 22 nt, Homo sapiens
cucaguguucccauucuaccuu

SEQ ID NO: 2878 - RNA, 22 nt, Homo sapiens
uaacagucaagguuugaccagg

SEQ ID NO: 2879 - RNA, 22 nt, Homo sapiens
ugaggaauguguguuaaagaua

SEQ ID NO: 2880 - RNA, 22 nt, Homo sapiens
agcuaguggucauucaauccuu

SEQ ID NO: 2881 - RNA, 22 nt, Homo sapiens
uuggaaacauuuaugguaacag

SEQ ID NO: 2882 - RNA, 22 nt, Homo sapiens
guaugauacuguaacagugggu

SEQ ID NO: 2883 - RNA, 22 nt, Homo sapiens
gagaacugacauuaucguguau

SEQ ID NO: 2884 - RNA, 22 nt, Homo sapiens
uggcauggaacuacuuugaaac

SEQ ID NO: 2885 - RNA, 22 nt, Homo sapiens
ucccuggacagccuugccuggg

SEQ ID NO: 2886 - RNA, 22 nt, Homo sapiens
acaguuaugugagggccaccag

SEQ ID NO: 2887 - RNA, 22 nt, Homo sapiens
cauagcacugagcucuacccuc

SEQ ID NO: 2888 - RNA, 22 nt, Homo sapiens
agcaccaccguugcucuauccc

SEQ ID NO: 2889 - RNA, 22 nt, Homo sapiens
uacagugggcacuggcgcccug

SEQ ID NO: 2890 - RNA, 22 nt, Homo sapiens
uagguugucaucagucuccacu

SEQ ID NO: 2891 - RNA, 23 nt, Homo sapiens
uggcauuuuuggcaaugccuucu

SEQ ID NO: 2892 - RNA, 22 nt, Homo sapiens
agagguuuugcacugguucuuu

SEQ ID NO: 2893 - RNA, 22 nt, Homo sapiens
aaugcacauauauuuccuuauu

SEQ ID NO: 2894 - RNA, 21 nt, Homo sapiens
agacacuuggaagguuuuaga

SEQ ID NO: 2895 - RNA, 22 nt, Homo sapiens
uuaaggaaggagucuuaaaugg

SEQ ID NO: 2896 - RNA, 22 nt, Homo sapiens
gucauggaaaucuacauuguua

SEQ ID NO: 2897 - RNA, 22 nt, Homo sapiens
auacuguauaggauuguagccu

SEQ ID NO: 2898 - RNA, 22 nt, Homo sapiens
gagaacagaagcauuccuaauu

SEQ ID NO: 2899 - RNA, 19 nt, Homo sapiens
caaaguguucuucuuugcc

SEQ ID NO: 2900 - RNA, 22 nt, Homo sapiens
auggcccccuguuugugaacau

SEQ ID NO: 2901 - RNA, 22 nt, Homo sapiens
uugaacuagaaccugcaaauuu

SEQ ID NO: 2902 - RNA, 22 nt, Homo sapiens
uuagcacaguucauucauguua

SEQ ID NO: 2903 - RNA, 22 nt, Homo sapiens
ugacuacaaccuccaccucccg

SEQ ID NO: 2904 - RNA, 22 nt, Homo sapiens
aacaccguagaaacacaaggga

SEQ ID NO: 2905 - RNA, 20 nt, Homo sapiens
agcuguuguuaugagguuua

SEQ ID NO: 2906 - RNA, 22 nt, Homo sapiens
cuaagggaggaagcugugcagg

SEQ ID NO: 2907 - RNA, 19 nt, Homo sapiens
uguccuagaggaguucaca

SEQ ID NO: 2908 - RNA, 22 nt, Homo sapiens
uuacuugagaugaguuggacaa

SEQ ID NO: 2909 - RNA, 22 nt, Homo sapiens
uugagagaaaaggccaugccuu

SEQ ID NO: 2910 - RNA, 22 nt, Homo sapiens
ucucacauuucacagggauggg

SEQ ID NO: 2911 - RNA, 22 nt, Homo sapiens
aaaguaauugcaguuuuugcaa

SEQ ID NO: 2912 - RNA, 22 nt, Homo sapiens
ugccuaggcuggaguguagugg

SEQ ID NO: 2913 - RNA, 22 nt, Homo sapiens
auagugcuguauuaaacauacg

SEQ ID NO: 2914 - RNA, 22 nt, Homo sapiens
uucaguacuucaaaaucuuuaa

SEQ ID NO: 2915 - RNA, 22 nt, Homo sapiens
ugggcggagacgugcagccgcc

SEQ ID NO: 2916 - RNA, 22 nt, Homo sapiens
aaagugacuuagugccccauuu

SEQ ID NO: 2917 - RNA, 22 nt, Homo sapiens
uuguaccacagggcaugaagug

SEQ ID NO: 2918 - RNA, 22 nt, Homo sapiens
ggacuguaguuucccgggcugg

SEQ ID NO: 2919 - RNA, 22 nt, Homo sapiens
auaagugcuuguugaauaauag

SEQ ID NO: 2920 - RNA, 22 nt, Homo sapiens
ugagguaacagaagcgagcauu

SEQ ID NO: 2921 - RNA, 22 nt, Homo sapiens
uaugacuguuugcucauucagg

SEQ ID NO: 2922 - RNA, 22 nt, Homo sapiens
augacagagauaugugaauuuu

SEQ ID NO: 2923 - RNA, 16 nt, Homo sapiens
agccaccauuuacuug

SEQ ID NO: 2924 - RNA, 22 nt, Homo sapiens
uucaagucaacaagcacuugag

SEQ ID NO: 2925 - RNA, 22 nt, Homo sapiens
aagaucaucauagagggcauga

SEQ ID NO: 2926 - RNA, 22 nt, Homo sapiens
uacaaguauuuuuauuagugcc

SEQ ID NO: 2927 - RNA, 22 nt, Homo sapiens
auccaucagacggcaggcguug

SEQ ID NO: 2928 - RNA, 22 nt, Homo sapiens
uauacugucuuuguaugccuag

SEQ ID NO: 2929 - RNA, 22 nt, Homo sapiens
auuauguuguauuuccuugcag

SEQ ID NO: 2930 - RNA, 22 nt, Homo sapiens
ucuauuugggguaccuguggua

SEQ ID NO: 2931 - RNA, 22 nt, Homo sapiens
cuguuuguuuaggguacucaga

SEQ ID NO: 2932 - RNA, 22 nt, Homo sapiens
uauugacuuuuuuguuaggagg

SEQ ID NO: 2933 - RNA, 22 nt, Homo sapiens
uggcacuggagauacauuaaua

SEQ ID NO: 2934 - RNA, 22 nt, Homo sapiens
auauuggccuaaaauucucuuu

SEQ ID NO: 2935 - RNA, 22 nt, Homo sapiens
gaguucaauuuccagcuguucu

SEQ ID NO: 2936 - RNA, 22 nt, Homo sapiens
uuuagcaaugcuguggggaagu

SEQ ID NO: 2937 - RNA, 22 nt, Homo sapiens
acaguguguguguucaccuaga

SEQ ID NO: 2938 - RNA, 22 nt, Homo sapiens
aaagugcuaggauuaccugggg

SEQ ID NO: 2939 - RNA, 22 nt, Homo sapiens
ucccuggagcaagagaagaagg

SEQ ID NO: 2940 - RNA, 22 nt, Homo sapiens
uccagugcauucagacacuugg

SEQ ID NO: 2941 - RNA, 22 nt, Homo sapiens
ugaguagagaauucagcuaagg

SEQ ID NO: 2942 - RNA, 22 nt, Homo sapiens
augacugucagggcagucauug

SEQ ID NO: 2943 - RNA, 22 nt, Homo sapiens
uuugcacuuuuguaauaugguu

SEQ ID NO: 2944 - RNA, 21 nt, Homo sapiens
uacacuacugguggaaaugca

SEQ ID NO: 2945 - RNA, 22 nt, Homo sapiens
aaggaacuggaauauuuugaac

SEQ ID NO: 2946 - RNA, 22 nt, Homo sapiens
cucauugcaaucucugccuccc

SEQ ID NO: 2947 - RNA, 22 nt, Homo sapiens
uuagcagcucuaauaacugcua

SEQ ID NO: 2948 - RNA, 22 nt, Homo sapiens
aaguagugcuugugcucaucuc

SEQ ID NO: 2949 - RNA, 19 nt, Homo sapiens
ccugcuguucuuuugcacc

SEQ ID NO: 2950 - RNA, 22 nt, Homo sapiens
guaugaguuuucugaugugugg

SEQ ID NO: 2951 - RNA, 22 nt, Homo sapiens
gcacauauguaaauagcugccu

SEQ ID NO: 2952 - RNA, 22 nt, Homo sapiens
uaagcuauagugaauaaauugc

SEQ ID NO: 2953 - RNA, 22 nt, Homo sapiens
auggcuuguuaugcauuaguac

SEQ ID NO: 2954 - RNA, 22 nt, Homo sapiens
ugcauauucuaggauuuuguau

SEQ ID NO: 2955 - RNA, 22 nt, Homo sapiens
aggcagucucugccggcugagg

SEQ ID NO: 2956 - RNA, 22 nt, Homo sapiens
uuugguccuccuacagggcagg

SEQ ID NO: 2957 - RNA, 22 nt, Homo sapiens
agguauuuuuuauccuccagca

SEQ ID NO: 2958 - RNA, 22 nt, Homo sapiens
uauccuguagcucauccaccgc

SEQ ID NO: 2959 - RNA, 22 nt, Homo sapiens
uaaagcgaggucuccuacaaga

SEQ ID NO: 2960 - RNA, 22 nt, Homo sapiens
ucacauuguuauguaaauguuu

SEQ ID NO: 2961 - RNA, 22 nt, Homo sapiens
gagauagguauuucauuuaccc

SEQ ID NO: 2962 - RNA, 22 nt, Homo sapiens
guggcuuuauuuagaagcaggg

SEQ ID NO: 2963 - RNA, 22 nt, Homo sapiens
uugagauggagucucgcucugu

SEQ ID NO: 2964 - RNA, 22 nt, Homo sapiens
uacaugcaugggcaugugugca

SEQ ID NO: 2965 - RNA, 22 nt, Homo sapiens
gagaaccuccagcaagguagua

SEQ ID NO: 2966 - RNA, 22 nt, Homo sapiens
uauugcuuuugauucaaggcag

SEQ ID NO: 2967 - RNA, 22 nt, Homo sapiens
cuugauagugguaaucauuuuu

SEQ ID NO: 2968 - RNA, 21 nt, Homo sapiens
uagcauacauuuugcaucuua

SEQ ID NO: 2969 - RNA, 22 nt, Homo sapiens
ugacauggaaguagguauacau

SEQ ID NO: 2970 - RNA, 22 nt, Homo sapiens
ucugagacuguuucuaacaagc

SEQ ID NO: 2971 - RNA, 22 nt, Homo sapiens
agucauuguugagaugguguca

SEQ ID NO: 2972 - RNA, 22 nt, Homo sapiens
ugcagugugauuuucuggcuga

SEQ ID NO: 2973 - RNA, 22 nt, Homo sapiens
uaucaaucuagggaaacuccaa

SEQ ID NO: 2974 - RNA, 22 nt, Homo sapiens
gcacagucaacacuuauucacc

SEQ ID NO: 2975 - RNA, 22 nt, Homo sapiens
gaaugguuuacaaguguaaucu

SEQ ID NO: 2976 - RNA, 22 nt, Homo sapiens
gauuccauugcgaauuuucaga

SEQ ID NO: 2977 - RNA, 22 nt, Homo sapiens
uaaucucagcuacucaggaggc

SEQ ID NO: 2978 - RNA, 22 nt, Homo sapiens
ugagugugacuuagcagaagga

SEQ ID NO: 2979 - RNA, 19 nt, Homo sapiens
agaagugcauggucuagag

SEQ ID NO: 2980 - RNA, 22 nt, Homo sapiens
uuuugguaaugaacuuaggaag

SEQ ID NO: 2981 - RNA, 22 nt, Homo sapiens
agucaagaugagauuugggugg

SEQ ID NO: 2982 - RNA, 22 nt, Homo sapiens
ggacagugaaugccacuccucc

SEQ ID NO: 2983 - RNA, 22 nt, Homo sapiens
cuuuuggucuaucagagaagca

SEQ ID NO: 2984 - RNA, 22 nt, Homo sapiens
gagagugaaguuugcuaccugu

SEQ ID NO: 2985 - RNA, 22 nt, Homo sapiens
uugggauaaucacaaaguaaaa

SEQ ID NO: 2986 - RNA, 22 nt, Homo sapiens
gaguauuuuacaucguguaauu

SEQ ID NO: 2987 - RNA, 22 nt, Homo sapiens
ugaauauguuaauuagcaucau

SEQ ID NO: 2988 - RNA, 22 nt, Homo sapiens
aaacuugucuaauuauaagcau

SEQ ID NO: 2989 - RNA, 22 nt, Homo sapiens
gcaagauuguguggcugaagua

SEQ ID NO: 2990 - RNA, 23 nt, Homo sapiens
cagugguguuagagaaaucuuuu

SEQ ID NO: 2991 - RNA, 22 nt, Homo sapiens
cuacagguaugaaagggaguau

SEQ ID NO: 2992 - RNA, 22 nt, Homo sapiens
cugugguauuauuagaaauauc

SEQ ID NO: 2993 - RNA, 22 nt, Homo sapiens
uuguauacucuauuuuagcagu

SEQ ID NO: 2994 - RNA, 18 nt, Homo sapiens
cuaauacuauucaacaag

SEQ ID NO: 2995 - RNA, 22 nt, Homo sapiens
auuauaguguauacuugaaauu

SEQ ID NO: 2996 - RNA, 22 nt, Homo sapiens
gggaugaagaagaauaguucgu

SEQ ID NO: 2997 - RNA, 16 nt, Homo sapiens
ugagaacaugcagcau

SEQ ID NO: 2998 - RNA, 22 nt, Homo sapiens
uaucuacauguagguauguaug

SEQ ID NO: 2999 - RNA, 22 nt, Homo sapiens
aggaccccucaucagcaccagu

SEQ ID NO: 3000 - RNA, 22 nt, Homo sapiens
uauuguccaauaggauguuccu

SEQ ID NO: 3001 - RNA, 22 nt, Homo sapiens
aagugaaugaugugaaguguaa

SEQ ID NO: 3002 - RNA, 22 nt, Homo sapiens
aaagugucuguuccuagcauga

SEQ ID NO: 3003 - RNA, 22 nt, Homo sapiens
acugagccuuuaaaugacuuca

SEQ ID NO: 3004 - RNA, 22 nt, Homo sapiens
guaaaguaaagcacaucaaggu

SEQ ID NO: 3005 - RNA, 22 nt, Homo sapiens
ugauguguuuuguaguucaacu

SEQ ID NO: 3006 - RNA, 20 nt, Homo sapiens
cugcuccccuacaaaucuca

SEQ ID NO: 3007 - RNA, 22 nt, Homo sapiens
cuaaaggaaucugagccccuga

SEQ ID NO: 3008 - RNA, 22 nt, Homo sapiens
ucugugcauuguaacaacuaaa

SEQ ID NO: 3009 - RNA, 22 nt, Homo sapiens
uggcgagaaaccauaugcuuuc

SEQ ID NO: 3010 - RNA, 22 nt, Homo sapiens
uccuugagccuuaaauuauaaa

SEQ ID NO: 3011 - RNA, 22 nt, Homo sapiens
ucugugguaagaaacgcauguc

SEQ ID NO: 3012 - RNA, 22 nt, Homo sapiens
gaagcagcauucugguuuuugg

SEQ ID NO: 3013 - RNA, 18 nt, Homo sapiens
uaucauguagggaaguug

SEQ ID NO: 3014 - RNA, 22 nt, Homo sapiens
cuccacugagcaggugggaggc

SEQ ID NO: 3015 - RNA, 22 nt, Homo sapiens
aaaugguguuaguagaucuuua

SEQ ID NO: 3016 - RNA, 22 nt, Homo sapiens
uacauacuucacagacuuuaaa

SEQ ID NO: 3017 - RNA, 22 nt, Homo sapiens
uuggaaaaauccaccuugaucu

SEQ ID NO: 3018 - RNA, 22 nt, Homo sapiens
uuucauggcaguuuggggccug

SEQ ID NO: 3019 - RNA, 19 nt, Homo sapiens
gacaugagauuuggugggg

SEQ ID NO: 3020 - RNA, 22 nt, Homo sapiens
ugugccacuguucuguaaagug

SEQ ID NO: 3021 - RNA, 22 nt, Homo sapiens
uucccuuuuuucuaguagguag

SEQ ID NO: 3022 - RNA, 22 nt, Homo sapiens
uggcagcgugaauguggcugaa

SEQ ID NO: 3023 - RNA, 22 nt, Homo sapiens
auggaagaaaguuggguucuug

SEQ ID NO: 3024 - RNA, 19 nt, Homo sapiens
ucuugcacaugugaacuca

SEQ ID NO: 3025 - RNA, 22 nt, Homo sapiens
cugugcuaggcaaugugguaga

SEQ ID NO: 3026 - RNA, 22 nt, Homo sapiens
uggagacugaucccucuuuccu

SEQ ID NO: 3027 - RNA, 22 nt, Homo sapiens
guagagguagacuuccuugucu

SEQ ID NO: 3028 - RNA, 22 nt, Homo sapiens
uguaaaccucugaguacaagcu

SEQ ID NO: 3029 - RNA, 22 nt, Homo sapiens
guggcgaagauggauugaguca

SEQ ID NO: 3030 - RNA, 22 nt, Homo sapiens
auuuugguuacauaguugagcu

SEQ ID NO: 3031 - RNA, 22 nt, Homo sapiens
uagucagcaauguucauguucu

SEQ ID NO: 3032 - RNA, 22 nt, Homo sapiens
agagugaagcuuuuuauauucu

SEQ ID NO: 3033 - RNA, 22 nt, Homo sapiens
augugcaaauuuccaaacucuu

SEQ ID NO: 3034 - RNA, 22 nt, Homo sapiens
acacugucugaugaaaguaguu

SEQ ID NO: 3035 - RNA, 22 nt, Homo sapiens
uggcagaugagccgcgcuccaa

SEQ ID NO: 3036 - RNA, 22 nt, Homo sapiens
auggcuuugggcugcucugccc

SEQ ID NO: 3037 - RNA, 20 nt, Homo sapiens
agagugcugucuguccugag

SEQ ID NO: 3038 - RNA, 22 nt, Homo sapiens
ugugccugagguuaacauuguu

SEQ ID NO: 3039 - RNA, 22 nt, Homo sapiens
caggcagucuggcucccaagug

SEQ ID NO: 3040 - RNA, 17 nt, Homo sapiens
uguggcucuuaugcuga

SEQ ID NO: 3041 - RNA, 22 nt, Homo sapiens
aggcacggugucucaugccugu

SEQ ID NO: 3042 - RNA, 20 nt, Homo sapiens
aucccauuccugaagauacu

SEQ ID NO: 3043 - RNA, 22 nt, Homo sapiens
acaccauugcauuccagccugg

SEQ ID NO: 3044 - RNA, 22 nt, Homo sapiens
uugcaguacuucuggcuuuaca

SEQ ID NO: 3045 - RNA, 22 nt, Homo sapiens
acuccauuucauuuuagcucuu

SEQ ID NO: 3046 - RNA, 22 nt, Homo sapiens
uuugucuccuaagacucugugg

SEQ ID NO: 3047 - RNA, 19 nt, Homo sapiens
uguuuggcuauaggucuaa

SEQ ID NO: 3048 - RNA, 22 nt, Homo sapiens
uccugcauucugacuugcuuuc

SEQ ID NO: 3049 - RNA, 22 nt, Homo sapiens
uguaaacuuuugagauugacuu

SEQ ID NO: 3050 - RNA, 22 nt, Homo sapiens
uggaauaucaugagaguuuguu

SEQ ID NO: 3051 - RNA, 22 nt, Homo sapiens
ucaaguacuuugcauagugccg

SEQ ID NO: 3052 - RNA, 22 nt, Homo sapiens
aaggcaagaaugcgugcuuuca

SEQ ID NO: 3053 - RNA, 22 nt, Homo sapiens
uuuggcauuagagagacuugca

SEQ ID NO: 3054 - RNA, 22 nt, Homo sapiens
uuaauuguaucuauagauguca

SEQ ID NO: 3055 - RNA, 22 nt, Homo sapiens
uuggcaauugcuaugauuugaa

SEQ ID NO: 3056 - RNA, 22 nt, Homo sapiens
uucccugugggaguaggaaagu

SEQ ID NO: 3057 - RNA, 22 nt, Homo sapiens
caggugcuuacuuaauagccau

SEQ ID NO: 3058 - RNA, 23 nt, Homo sapiens
ucugcggguguggacccuagugc

SEQ ID NO: 3059 - RNA, 20 nt, Homo sapiens
cugugguagggaccaggaau

SEQ ID NO: 3060 - RNA, 22 nt, Homo sapiens
uauuguacauauccucccuuca

SEQ ID NO: 3061 - RNA, 22 nt, Homo sapiens
aagugacauugugcccauuuga

SEQ ID NO: 3062 - RNA, 22 nt, Homo sapiens
gugacauuauuucagcuacaug

SEQ ID NO: 3063 - RNA, 22 nt, Homo sapiens
uccaccgugggcugcggggcuc

SEQ ID NO: 3064 - RNA, 22 nt, Homo sapiens
uugacugugguaauggaagcug

SEQ ID NO: 3065 - RNA, 22 nt, Homo sapiens
auggaggaggaagcugaaacaa

SEQ ID NO: 3066 - RNA, 22 nt, Homo sapiens
auugcacuccggccugggugac

SEQ ID NO: 3067 - RNA, 22 nt, Homo sapiens
cauugcacuccagccuagccaa

SEQ ID NO: 3068 - RNA, 20 nt, Homo sapiens
aggacuacagaggguaggau

SEQ ID NO: 3069 - RNA, 19 nt, Homo sapiens
uccacagugguugaacuag

SEQ ID NO: 3070 - RNA, 22 nt, Homo sapiens
cuguaguuagcagaugaugaau

SEQ ID NO: 3071 - RNA, 22 nt, Homo sapiens
ugaggaguauguucuguagacc

SEQ ID NO: 3072 - RNA, 22 nt, Homo sapiens
aacuacaucucuuugaggcagg

SEQ ID NO: 3073 - RNA, 18 nt, Homo sapiens
uggcaauaugguucuacc

SEQ ID NO: 3074 - RNA, 22 nt, Homo sapiens
ugagaucacuaagagguaaugg

SEQ ID NO: 3075 - RNA, 22 nt, Homo sapiens
aagaccuaugcaggaagaaaug

SEQ ID NO: 3076 - RNA, 22 nt, Homo sapiens
uuucaagugcugucuuagcugu

SEQ ID NO: 3077 - RNA, 22 nt, Homo sapiens
uggaagacuuuagaggcuuaua

SEQ ID NO: 3078 - RNA, 22 nt, Homo sapiens
agcuucauuccaacuuccuucu

SEQ ID NO: 3079 - RNA, 22 nt, Homo sapiens
augaggagauauuaaauaccau

SEQ ID NO: 3080 - RNA, 23 nt, Homo sapiens
acugagcaauguuuacauacuug

SEQ ID NO: 3081 - RNA, 22 nt, Homo sapiens
uacguaucagucguuucuguga

SEQ ID NO: 3082 - RNA, 22 nt, Homo sapiens
acugcacuccagccuucaggac

SEQ ID NO: 3083 - RNA, 22 nt, Homo sapiens
cuuacagucuaucagccacaac

SEQ ID NO: 3084 - RNA, 22 nt, Homo sapiens
aaggcuuuuugcugacguccuu

SEQ ID NO: 3085 - RNA, 22 nt, Homo sapiens
ugugcaccucuucacacaggga

SEQ ID NO: 3086 - RNA, 22 nt, Homo sapiens
cucagggugguggacucuaaua

SEQ ID NO: 3087 - RNA, 22 nt, Homo sapiens
gagguaguuaaugcauucacua

SEQ ID NO: 3088 - RNA, 22 nt, Homo sapiens
ugugcaguuuuagcguauuuua

SEQ ID NO: 3089 - RNA, 22 nt, Homo sapiens
uaugacauaguccuuaacccuc

SEQ ID NO: 3090 - RNA, 22 nt, Homo sapiens
cuacagcacugagcugugugca

SEQ ID NO: 3091 - RNA, 22 nt, Homo sapiens
uuguucaggagguuggggaugc

SEQ ID NO: 3092 - RNA, 22 nt, Homo sapiens
guggaagguaaugcagcuuacu

SEQ ID NO: 3093 - RNA, 22 nt, Homo sapiens
auggcccugaguucaauauauu

SEQ ID NO: 3094 - RNA, 22 nt, Homo sapiens
uugauacuagagucuuucugac

SEQ ID NO: 3095 - RNA, 22 nt, Homo sapiens
uuaguugcauucaugugagagu

SEQ ID NO: 3096 - RNA, 22 nt, Homo sapiens
auggcaguguaugauuauauua

SEQ ID NO: 3097 - RNA, 20 nt, Homo sapiens
gugggcaaauccuuuccucu

SEQ ID NO: 3098 - RNA, 22 nt, Homo sapiens
cacauagucccugcuaaucuuc

SEQ ID NO: 3099 - RNA, 22 nt, Homo sapiens
ugauaucucuugccuccaaaug

SEQ ID NO: 3100 - RNA, 22 nt, Homo sapiens
uuuuacacuucgguugugugca

SEQ ID NO: 3101 - RNA, 22 nt, Homo sapiens
ugagaacucaugaaucuuucca

SEQ ID NO: 3102 - RNA, 22 nt, Homo sapiens
acugcacuccaguuccgggcaa

SEQ ID NO: 3103 - RNA, 22 nt, Homo sapiens
uugagagcugaugaaagauaaa

SEQ ID NO: 3104 - RNA, 22 nt, Homo sapiens
ucacaauucucaauuugugaaa

SEQ ID NO: 3105 - RNA, 22 nt, Homo sapiens
uguagucauuugaaggaugucc

SEQ ID NO: 3106 - RNA, 22 nt, Homo sapiens
agauauguuauugauguuaaug

SEQ ID NO: 3107 - RNA, 22 nt, Homo sapiens
uuaucagcagcaugaaaauaga

SEQ ID NO: 3108 - RNA, 22 nt, Homo sapiens
uuagugcuuacgaugagcuaag

SEQ ID NO: 3109 - RNA, 22 nt, Homo sapiens
cuggaguuugaggcugcaguga

SEQ ID NO: 3110 - RNA, 22 nt, Homo sapiens
cugagauacacuaauagucucu

SEQ ID NO: 3111 - RNA, 21 nt, Homo sapiens
gugguucuagagaaacagaau

SEQ ID NO: 3112 - RNA, 22 nt, Homo sapiens
guggcacaauuaaguagcuauu

SEQ ID NO: 3113 - RNA, 22 nt, Homo sapiens
ucacugggagaccaaagccauc

SEQ ID NO: 3114 - RNA, 22 nt, Homo sapiens
cuugcacuugaaauuccaguuu

SEQ ID NO: 3115 - RNA, 22 nt, Homo sapiens
uguauacauauguauguuuugu

SEQ ID NO: 3116 - RNA, 22 nt, Homo sapiens
agucaaguuuuuucagagaaua

SEQ ID NO: 3117 - RNA, 22 nt, Homo sapiens
ugagaaacuaaguaaugaguaa

SEQ ID NO: 3118 - RNA, 21 nt, Homo sapiens
ugaaugucuaggcagaaguuu

SEQ ID NO: 3119 - RNA, 18 nt, Homo sapiens
agguuauuucccaagacu

SEQ ID NO: 3120 - RNA, 22 nt, Homo sapiens
aaagcacuggagucaucaucua

SEQ ID NO: 3121 - RNA, 22 nt, Homo sapiens
uccugagacucacaggcucccc

SEQ ID NO: 3122 - RNA, 20 nt, Homo sapiens
agcuugguuuggaugaucac

SEQ ID NO: 3123 - RNA, 22 nt, Homo sapiens
auuguacuccagccugggcagc

SEQ ID NO: 3124 - RNA, 22 nt, Homo sapiens
aucugugaaugaaguuauuuug

SEQ ID NO: 3125 - RNA, 22 nt, Homo sapiens
ggaguguguuuuccaacuuggu

SEQ ID NO: 3126 - RNA, 22 nt, Homo sapiens
aucacuagaucauagguaaaca

SEQ ID NO: 3127 - RNA, 22 nt, Homo sapiens
ggggcauugugucuggguuccu

SEQ ID NO: 3128 - RNA, 22 nt, Homo sapiens
ugcccuuugucagaugaguagg

SEQ ID NO: 3129 - RNA, 22 nt, Homo sapiens
acgaagacuauucaaaagguua

SEQ ID NO: 3130 - RNA, 22 nt, Homo sapiens
ugcaaagaaauuuuggugacca

SEQ ID NO: 3131 - RNA, 22 nt, Homo sapiens
ugugguagugcuuaccugcagu

SEQ ID NO: 3132 - RNA, 23 nt, Homo sapiens
cucccugaacaugacacaccaga

SEQ ID NO: 3133 - RNA, 22 nt, Homo sapiens
uccaguuuuguuaacauauggu

SEQ ID NO: 3134 - RNA, 22 nt, Homo sapiens
uaacaguguagaggccuauugg

SEQ ID NO: 3135 - RNA, 22 nt, Homo sapiens
uugcagagaaauuucugguuua

SEQ ID NO: 3136 - RNA, 22 nt, Homo sapiens
uacagcuaugugcaugcaugcu

SEQ ID NO: 3137 - RNA, 22 nt, Homo sapiens
cccaguuuugccacuuacuagc

SEQ ID NO: 3138 - RNA, 22 nt, Homo sapiens
uggcuuuuauuauguugaggua

SEQ ID NO: 3139 - RNA, 22 nt, Homo sapiens
ggaucacugugaaccgugucag

SEQ ID NO: 3140 - RNA, 22 nt, Homo sapiens
aagguggugucagagagcuuau

SEQ ID NO: 3141 - RNA, 22 nt, Homo sapiens
ugcucaccugcugcucaccucc

SEQ ID NO: 3142 - RNA, 22 nt, Homo sapiens
cacaguguuccagcuauuugaa

SEQ ID NO: 3143 - RNA, 22 nt, Homo sapiens
ugacagugugagacuuugucuc

SEQ ID NO: 3144 - RNA, 22 nt, Homo sapiens
uuaagcugaauuuaagcuucgg

SEQ ID NO: 3145 - RNA, 22 nt, Homo sapiens
gagugcugagcccacuuccuug

SEQ ID NO: 3146 - RNA, 22 nt, Homo sapiens
auugcuuacccuguauuagauc

SEQ ID NO: 3147 - RNA, 18 nt, Homo sapiens
ugaguucauuagacuucc

SEQ ID NO: 3148 - RNA, 22 nt, Homo sapiens
gaggaucucuugagcccagaag

SEQ ID NO: 3149 - RNA, 20 nt, Homo sapiens
caaauugcuuucuugguuuu

SEQ ID NO: 3150 - RNA, 19 nt, Homo sapiens
ccucaaguacuaauauguu

SEQ ID NO: 3151 - RNA, 22 nt, Homo sapiens
ugcagguaggcaguaucauuua

SEQ ID NO: 3152 - RNA, 22 nt, Homo sapiens
uugccauagugcugccagauau

SEQ ID NO: 3153 - RNA, 22 nt, Homo sapiens
ggcucuguugcuaccaauuaag

SEQ ID NO: 3154 - RNA, 20 nt, Homo sapiens
cucacagacagcuucuuucu

SEQ ID NO: 3155 - RNA, 22 nt, Homo sapiens
cuggauggugagauaaagaaaa

SEQ ID NO: 3156 - RNA, 22 nt, Homo sapiens
gagcacauaugacauuuucuuc

SEQ ID NO: 3157 - RNA, 22 nt, Homo sapiens
cacuggguuagaacaugcuccu

SEQ ID NO: 3158 - RNA, 21 nt, Homo sapiens
ucaggcuuuuugagugccaau

SEQ ID NO: 3159 - RNA, 19 nt, Homo sapiens
gggcaaaucuggaaauuua

SEQ ID NO: 3160 - RNA, 22 nt, Homo sapiens
aauggcacaagacaugaagaag

SEQ ID NO: 3161 - RNA, 22 nt, Homo sapiens
uugagcacauguguuaaggggu

SEQ ID NO: 3162 - RNA, 22 nt, Homo sapiens
uggaaguagauagauuguguca

SEQ ID NO: 3163 - RNA, 22 nt, Homo sapiens
auugcacuccagccugggcgac

SEQ ID NO: 3164 - RNA, 22 nt, Homo sapiens
ggcaugcauuguacuaguaugc

SEQ ID NO: 3165 - RNA, 22 nt, Homo sapiens
uucccuuuguuaaauuggaaga

SEQ ID NO: 3166 - RNA, 22 nt, Homo sapiens
gugcuuguauuuaaaucaugug

SEQ ID NO: 3167 - RNA, 22 nt, Homo sapiens
auaucaacaucgugucauuagu

SEQ ID NO: 3168 - RNA, 22 nt, Homo sapiens
uuacugcucuuuugucaugagu

SEQ ID NO: 3169 - RNA, 22 nt, Homo sapiens
auagcccauuuguugguccugg

SEQ ID NO: 3170 - RNA, 22 nt, Homo sapiens
ucacauuguauauguaccuauc

SEQ ID NO: 3171 - RNA, 22 nt, Homo sapiens
guuauguuauguuauguuaugu

SEQ ID NO: 3172 - RNA, 22 nt, Homo sapiens
uuggcuguguuccucaaggagu

SEQ ID NO: 3173 - RNA, 22 nt, Homo sapiens
ugaugcugaugccugccagaag

SEQ ID NO: 3174 - RNA, 22 nt, Homo sapiens
gugccuuuucugagcaaugagc

SEQ ID NO: 3175 - RNA, 22 nt, Homo sapiens
cauugcauuuucuuuguaccuu

SEQ ID NO: 3176 - RNA, 22 nt, Homo sapiens
cuagcuccauauaaagcaggau

SEQ ID NO: 3177 - RNA, 22 nt, Homo sapiens
agaugccuaugaagagaaauua

SEQ ID NO: 3178 - RNA, 22 nt, Homo sapiens
uggucaguugugccucaauucc

SEQ ID NO: 3179 - RNA, 20 nt, Homo sapiens
augagcucaucuugaaaacc

SEQ ID NO: 3180 - RNA, 19 nt, Homo sapiens
aaagguaguaaccucugau

SEQ ID NO: 3181 - RNA, 22 nt, Homo sapiens
uaaaagucaucacaacuggagu

SEQ ID NO: 3182 - RNA, 22 nt, Homo sapiens
agaugguuuuguucacagcucu

SEQ ID NO: 3183 - RNA, 19 nt, Homo sapiens
cuugccccauucauccucu

SEQ ID NO: 3184 - RNA, 20 nt, Homo sapiens
ugccaagaaaugaggguauu

SEQ ID NO: 3185 - RNA, 22 nt, Homo sapiens
uggacugagauuucagcugcca

SEQ ID NO: 3186 - RNA, 22 nt, Homo sapiens
uuccagagucaccuuucugucg

SEQ ID NO: 3187 - RNA, 18 nt, Homo sapiens
aaaaagugcucaggccua

SEQ ID NO: 3188 - RNA, 20 nt, Homo sapiens
agguagauagaugauagaua

SEQ ID NO: 3189 - RNA, 23 nt, Homo sapiens
uugacuguggguacaaugugaua

SEQ ID NO: 3190 - RNA, 22 nt, Homo sapiens
cuggaauauuagcuggucuuaa

SEQ ID NO: 3191 - RNA, 22 nt, Homo sapiens
ggagaucauuuccuauuugaag

SEQ ID NO: 3192 - RNA, 22 nt, Homo sapiens
acacagugucuguguauuuaaa

SEQ ID NO: 3193 - RNA, 22 nt, Homo sapiens
uauggguuucagagggugauag

SEQ ID NO: 3194 - RNA, 19 nt, Homo sapiens
ggcaagaguuguucugugu

SEQ ID NO: 3195 - RNA, 19 nt, Homo sapiens
uggauuguuagagcagugu

SEQ ID NO: 3196 - RNA, 22 nt, Homo sapiens
aaauccauuuguucagcuaugc

SEQ ID NO: 3197 - RNA, 22 nt, Homo sapiens
gcgugguguuagaaugagaagu

SEQ ID NO: 3198 - RNA, 22 nt, Homo sapiens
uucauggaguugagaaggcuaa

SEQ ID NO: 3199 - RNA, 22 nt, Homo sapiens
aguggauguuguggccugggag

SEQ ID NO: 3200 - RNA, 22 nt, Homo sapiens
auugaacuuacuaucuaaacua

SEQ ID NO: 3201 - RNA, 22 nt, Homo sapiens
ugaggauaguguugaaggcagg

SEQ ID NO: 3202 - RNA, 19 nt, Homo sapiens
ugagauccacugaagauuc

SEQ ID NO: 3203 - RNA, 22 nt, Homo sapiens
agcugccagucuuguaaggccu

SEQ ID NO: 3204 - RNA, 18 nt, Homo sapiens
gauguaguauggugugga

SEQ ID NO: 3205 - RNA, 22 nt, Homo sapiens
agucgguguuacugacagaaug

SEQ ID NO: 3206 - RNA, 22 nt, Homo sapiens
ucagaaccuccuagcaguguuc

SEQ ID NO: 3207 - RNA, 22 nt, Homo sapiens
uaguuauggaguaauuuuaagc

SEQ ID NO: 3208 - RNA, 22 nt, Homo sapiens
uaggcaaaugcaagaguagaac

SEQ ID NO: 3209 - RNA, 22 nt, Homo sapiens
acugcacuccagccucguggac

SEQ ID NO: 3210 - RNA, 23 nt, Homo sapiens
agggcacuauagauguuauucua

SEQ ID NO: 3211 - RNA, 22 nt, Homo sapiens
aggacacugauagucuuuggca

SEQ ID NO: 3212 - RNA, 22 nt, Homo sapiens
cuggauauguugcaacauuucc

SEQ ID NO: 3213 - RNA, 22 nt, Homo sapiens
uuauacucgucugaaugauucu

SEQ ID NO: 3214 - RNA, 22 nt, Homo sapiens
auaaagacacuuggcaugauuu

SEQ ID NO: 3215 - RNA, 18 nt, Homo sapiens
uugaauaguguccaaucu

SEQ ID NO: 3216 - RNA, 22 nt, Homo sapiens
uuacguaguuuuggagaucaua

SEQ ID NO: 3217 - RNA, 22 nt, Homo sapiens
aucacguguguuuaugcuacgc

SEQ ID NO: 3218 - RNA, 22 nt, Homo sapiens
ugacauguauuagcucagugcu

SEQ ID NO: 3219 - RNA, 22 nt, Homo sapiens
agcuggucugauacuuaccucc

SEQ ID NO: 3220 - RNA, 22 nt, Homo sapiens
aagagguagcagucacaaaaga

SEQ ID NO: 3221 - RNA, 22 nt, Homo sapiens
gugauuguuaaacugccucucu

SEQ ID NO: 3222 - RNA, 22 nt, Homo sapiens
ucgguacuugagagagacacag

SEQ ID NO: 3223 - RNA, 21 nt, Homo sapiens
aucgcacaauauaccccugua

SEQ ID NO: 3224 - RNA, 22 nt, Homo sapiens
uauggcuuuuauuauguuguag

SEQ ID NO: 3225 - RNA, 22 nt, Homo sapiens
aagucaaggagagaggcgucag

SEQ ID NO: 3226 - RNA, 22 nt, Homo sapiens
augugcaauguguacguagccc

SEQ ID NO: 3227 - RNA, 22 nt, Homo sapiens
ugugcaaucagcuucauuacau

SEQ ID NO: 3228 - RNA, 22 nt, Homo sapiens
ugagaucaguuguuauaauucu

SEQ ID NO: 3229 - RNA, 22 nt, Homo sapiens
uuuggguuuuauguaacagcua

SEQ ID NO: 3230 - RNA, 22 nt, Homo sapiens
gagcaccagucccugucagugc

SEQ ID NO: 3231 - RNA, 20 nt, Homo sapiens
ugagauuggugugguauaag

SEQ ID NO: 3232 - RNA, 22 nt, Homo sapiens
cuuuuacacugcuggugggaau

SEQ ID NO: 3233 - RNA, 22 nt, Homo sapiens
cugagaauguaaaugaagcuuu

SEQ ID NO: 3234 - RNA, 22 nt, Homo sapiens
auaaacugucaguggagaguaa

SEQ ID NO: 3235 - RNA, 20 nt, Homo sapiens
cauugcacuccagccugcug

SEQ ID NO: 3236 - RNA, 18 nt, Homo sapiens
augacucuggguguuccu

SEQ ID NO: 3237 - RNA, 22 nt, Homo sapiens
cugaaauguccaucgacugaug

SEQ ID NO: 3238 - RNA, 22 nt, Homo sapiens
augggcuaguaaagacaaacuu

SEQ ID NO: 3239 - RNA, 22 nt, Homo sapiens
ggucacauuggacuaucaaguu

SEQ ID NO: 3240 - RNA, 22 nt, Homo sapiens
ugaguuguugcauucuuggugu

SEQ ID NO: 3241 - RNA, 22 nt, Homo sapiens
cucucugagccccagacaccuu

SEQ ID NO: 3242 - RNA, 20 nt, Homo sapiens
uucacggaggccgcgccccc

SEQ ID NO: 3243 - RNA, 22 nt, Homo sapiens
agcaugacauauuguagagaaa

SEQ ID NO: 3244 - RNA, 22 nt, Homo sapiens
uguuuuggaggccagaagucca

SEQ ID NO: 3245 - RNA, 22 nt, Homo sapiens
uuagguacuuuggagagauuca

SEQ ID NO: 3246 - RNA, 22 nt, Homo sapiens
aucccugagaacuuuuaauguu

SEQ ID NO: 3247 - RNA, 22 nt, Homo sapiens
ugcguaggcuagagugcagugg

SEQ ID NO: 3248 - RNA, 22 nt, Homo sapiens
ugcaccacugcacugccugggu

SEQ ID NO: 3249 - RNA, 22 nt, Homo sapiens
cugaggaaguucuuuaacaguu

SEQ ID NO: 3250 - RNA, 22 nt, Homo sapiens
cugagacacucuuaucugcaua

SEQ ID NO: 3251 - RNA, 22 nt, Homo sapiens
uuggcaaguuucugucagcaaa

SEQ ID NO: 3252 - RNA, 22 nt, Homo sapiens
uugaaguagcauuucaugucua

SEQ ID NO: 3253 - RNA, 22 nt, Homo sapiens
augacauguauuuccaggauuu

SEQ ID NO: 3254 - RNA, 22 nt, Homo sapiens
uuggauauucaguuuuuccauc

SEQ ID NO: 3255 - RNA, 22 nt, Homo sapiens
acugaucaauguuaaggcuuau

SEQ ID NO: 3256 - RNA, 16 nt, Homo sapiens
gcucauguuuguguag

SEQ ID NO: 3257 - RNA, 22 nt, Homo sapiens
auggauugucuccuugugccau

SEQ ID NO: 3258 - RNA, 22 nt, Homo sapiens
uuccacaauggcugaacuaguu

SEQ ID NO: 3259 - RNA, 23 nt, Homo sapiens
uuggucucccaaaguguugagau

SEQ ID NO: 3260 - RNA, 22 nt, Homo sapiens
uuccaguggacuacuucauccu

SEQ ID NO: 3261 - RNA, 22 nt, Homo sapiens
uauuugauuaacaagagccuaa

SEQ ID NO: 3262 - RNA, 19 nt, Homo sapiens
ccacaaugguugaacuaga

SEQ ID NO: 3263 - RNA, 22 nt, Homo sapiens
augcaaacaucugaagagacau

SEQ ID NO: 3264 - RNA, 19 nt, Homo sapiens
guauuugacuuucuuguuu

SEQ ID NO: 3265 - RNA, 21 nt, Homo sapiens
uuuccuggagcguauggcuuc

SEQ ID NO: 3266 - RNA, 22 nt, Homo sapiens
guauaaguugacucaaucuuug

SEQ ID NO: 3267 - RNA, 22 nt, Homo sapiens
cagugcauaggaucuaaaauuu

SEQ ID NO: 3268 - RNA, 22 nt, Homo sapiens
auuagguagugagaugcugcug

SEQ ID NO: 3269 - RNA, 17 nt, Homo sapiens
ugcuuagagagccucag

SEQ ID NO: 3270 - RNA, 20 nt, Homo sapiens
ucaaggcaggaacuguacau

SEQ ID NO: 3271 - RNA, 22 nt, Homo sapiens
aagauagcuaagcuucuucuaa

SEQ ID NO: 3272 - RNA, 22 nt, Homo sapiens
uauugcuuaugaugcugaauua

SEQ ID NO: 3273 - RNA, 19 nt, Homo sapiens
uuauauaguuucugaggcu

SEQ ID NO: 3274 - RNA, 22 nt, Homo sapiens
ugccaugaagagaggaagcagu

SEQ ID NO: 3275 - RNA, 19 nt, Homo sapiens
aacuggugugagaugauau

SEQ ID NO: 3276 - RNA, 21 nt, Homo sapiens
uaaagcuuagcuauaguggcu

SEQ ID NO: 3277 - RNA, 22 nt, Homo sapiens
ugaaauggugcggucugcagca

SEQ ID NO: 3278 - RNA, 22 nt, Homo sapiens
auuacacuuucuauucaaugag

SEQ ID NO: 3279 - RNA, 22 nt, Homo sapiens
aucacaguggucagguauagau

SEQ ID NO: 3280 - RNA, 22 nt, Homo sapiens
gaaggugcuuggugaaugcauu

SEQ ID NO: 3281 - RNA, 18 nt, Homo sapiens
cucacaguaacuuuuaag

SEQ ID NO: 3282 - RNA, 22 nt, Homo sapiens
uauugcauauuauucuaguggc

SEQ ID NO: 3283 - RNA, 22 nt, Homo sapiens
ccaucacaggccucagugggaa

SEQ ID NO: 3284 - RNA, 22 nt, Homo sapiens
cugagaucugaaccaggagugu

SEQ ID NO: 3285 - RNA, 22 nt, Homo sapiens
guugccuaggcuggagugcagu

SEQ ID NO: 3286 - RNA, 22 nt, Homo sapiens
uuaaagcuggcguuacaguuug

SEQ ID NO: 3287 - RNA, 22 nt, Homo sapiens
ugagaacucaugggucugcugg

SEQ ID NO: 3288 - RNA, 22 nt, Homo sapiens
cuccccuuuaguuucuuaauaa

SEQ ID NO: 3289 - RNA, 22 nt, Homo sapiens
gagagugugucagaggcugcga

SEQ ID NO: 3290 - RNA, 22 nt, Homo sapiens
cuggaauuacaggguugagcua

SEQ ID NO: 3291 - RNA, 22 nt, Homo sapiens
auugucacccgggcaguaagca

SEQ ID NO: 3292 - RNA, 22 nt, Homo sapiens
gaagacauuugcugcacguccu

SEQ ID NO: 3293 - RNA, 22 nt, Homo sapiens
ugagaaugaugauugguaaacc

SEQ ID NO: 3294 - RNA, 22 nt, Homo sapiens
ucacugaaacuguccuggguua

SEQ ID NO: 3295 - RNA, 19 nt, Homo sapiens
cauggcuuauaauuuuaau

SEQ ID NO: 3296 - RNA, 22 nt, Homo sapiens
augcacaguccagcccaugugg

SEQ ID NO: 3297 - RNA, 22 nt, Homo sapiens
ggacacguagaugccgacuagc

SEQ ID NO: 3298 - RNA, 22 nt, Homo sapiens
augcaaacaucauagaguguac

SEQ ID NO: 3299 - RNA, 22 nt, Homo sapiens
uucaaguaagaaagacaucagg

SEQ ID NO: 3300 - RNA, 16 nt, Homo sapiens
aauccauuggcccugc

SEQ ID NO: 3301 - RNA, 20 nt, Homo sapiens
ugugagacugguuuugaacu

SEQ ID NO: 3302 - RNA, 22 nt, Homo sapiens
uaacaguguauuuacuacuucc

SEQ ID NO: 3303 - RNA, 22 nt, Homo sapiens
agcaccguucaaacccagguua

SEQ ID NO: 3304 - RNA, 23 nt, Homo sapiens
cccaguuaauccuuaaucuccac

SEQ ID NO: 3305 - RNA, 22 nt, Homo sapiens
gccuaguguuaauguguguuca

SEQ ID NO: 3306 - RNA, 22 nt, Homo sapiens
aucauaucauuggugaacagug

SEQ ID NO: 3307 - RNA, 22 nt, Homo sapiens
aucacuuugcucuccagugugg

SEQ ID NO: 3308 - RNA, 17 nt, Homo sapiens
gcauauguugaaccagc

SEQ ID NO: 3309 - RNA, 22 nt, Homo sapiens
uaagucuuuuuggaguuuauaa

SEQ ID NO: 3310 - RNA, 22 nt, Homo sapiens
ugaugguuuuauaagggagagu

SEQ ID NO: 3311 - RNA, 22 nt, Homo sapiens
augguaucauuacuguuuuauu

SEQ ID NO: 3312 - RNA, 22 nt, Homo sapiens
cucaaguacaugggauuacagg

SEQ ID NO: 3313 - RNA, 22 nt, Homo sapiens
cccugagcagccugaguuuccc

SEQ ID NO: 3314 - RNA, 22 nt, Homo sapiens
uuuugcuccuggcaaacucaua

SEQ ID NO: 3315 - RNA, 22 nt, Homo sapiens
gucagugugauaucugcagggg

SEQ ID NO: 3316 - RNA, 22 nt, Homo sapiens
cuggucaugggggcacccucug

SEQ ID NO: 3317 - RNA, 22 nt, Homo sapiens
auagaagcuauguauaggggcc

SEQ ID NO: 3318 - RNA, 22 nt, Homo sapiens
uguagacaccaaagacagcaua

SEQ ID NO: 3319 - RNA, 23 nt, Homo sapiens
ugauguccacuuagggucuaggu

SEQ ID NO: 3320 - RNA, 22 nt, Homo sapiens
aagagcgcugauaacauguuug

SEQ ID NO: 3321 - RNA, 22 nt, Homo sapiens
cagcugguguuacaaaccagag

SEQ ID NO: 3322 - RNA, 20 nt, Homo sapiens
ugaaggaggucauuuauacc

SEQ ID NO: 3323 - RNA, 22 nt, Homo sapiens
uuggaacuguucguauugaaau

SEQ ID NO: 3324 - RNA, 22 nt, Homo sapiens
guaagauaguauguuuaaccca

SEQ ID NO: 3325 - RNA, 22 nt, Homo sapiens
uggaaugucagcuacaagaggg

SEQ ID NO: 3326 - RNA, 19 nt, Homo sapiens
gcuuguccacgugagauaa

SEQ ID NO: 3327 - RNA, 22 nt, Homo sapiens
uuugucccccguaguucauaua

SEQ ID NO: 3328 - RNA, 22 nt, Homo sapiens
ggcaacaaagacauuucaacau

SEQ ID NO: 3329 - RNA, 22 nt, Homo sapiens
aagugcuguccuaccuuuggga

SEQ ID NO: 3330 - RNA, 22 nt, Homo sapiens
aacacggcccgcagagcaagcu

SEQ ID NO: 3331 - RNA, 22 nt, Homo sapiens
augcagaucacauuuuucuguc

SEQ ID NO: 3332 - RNA, 22 nt, Homo sapiens
uguagcagccauaaacacagug

SEQ ID NO: 3333 - RNA, 22 nt, Homo sapiens
uggcuacugaccugcuaggggg

SEQ ID NO: 3334 - RNA, 22 nt, Homo sapiens
cuuaaguaguuguggaaugaau

SEQ ID NO: 3335 - RNA, 22 nt, Homo sapiens
uuagacacacauacauuuaucu

SEQ ID NO: 3336 - RNA, 22 nt, Homo sapiens
gaaaguaauuaacgauuguugc

SEQ ID NO: 3337 - RNA, 22 nt, Homo sapiens
uugaguccauucgaugcugauu

SEQ ID NO: 3338 - RNA, 22 nt, Homo sapiens
cagagaucaugcaacugcucgc

SEQ ID NO: 3339 - RNA, 22 nt, Homo sapiens
ccauugaacaugaaggaaugug

SEQ ID NO: 3340 - RNA, 22 nt, Homo sapiens
auuuggcauagaguaucauucu

SEQ ID NO: 3341 - RNA, 20 nt, Homo sapiens
agcaucacagagccgggugu

SEQ ID NO: 3342 - RNA, 22 nt, Homo sapiens
uuuaauacugcaucuuuacucu

SEQ ID NO: 3343 - RNA, 22 nt, Homo sapiens
augccauugcacuccagccugg

SEQ ID NO: 3344 - RNA, 22 nt, Homo sapiens
augccacugcacucuagccugg

SEQ ID NO: 3345 - RNA, 22 nt, Homo sapiens
uggcaaaugaagucagcuguac

SEQ ID NO: 3346 - RNA, 21 nt, Homo sapiens
aagcacauugaguguguguga

SEQ ID NO: 3347 - RNA, 22 nt, Homo sapiens
uuuguacuugguguucuggaaa

SEQ ID NO: 3348 - RNA, 22 nt, Homo sapiens
auggcucuguuuuuuaugcucu

SEQ ID NO: 3349 - RNA, 22 nt, Homo sapiens
uuccuacugugcaaaguugcaa

SEQ ID NO: 3350 - RNA, 22 nt, Homo sapiens
auacuguuuuacaucauugccu

SEQ ID NO: 3351 - RNA, 22 nt, Homo sapiens
uacccguugaggguuugccagc

SEQ ID NO: 3352 - RNA, 21 nt, Homo sapiens
ucucauuacugaugagccaga

SEQ ID NO: 3353 - RNA, 22 nt, Homo sapiens
gucacagaggcuaagaccccac

SEQ ID NO: 3354 - RNA, 22 nt, Homo sapiens
aauuaggcuagaauguuauuaa

SEQ ID NO: 3355 - RNA, 22 nt, Homo sapiens
aggaaaucuuagcugaggggau

SEQ ID NO: 3356 - RNA, 22 nt, Homo sapiens
ugagugaaugugaaggcuaggg

SEQ ID NO: 3357 - RNA, 19 nt, Homo sapiens
gcggcacuggagacacagc

SEQ ID NO: 3358 - RNA, 22 nt, Homo sapiens
uuagauuauugguguuuugcaa

SEQ ID NO: 3359 - RNA, 22 nt, Homo sapiens
uucccagagccugggagugagg

SEQ ID NO: 3360 - RNA, 22 nt, Homo sapiens
aucagcagcaugaaaacaggcu

SEQ ID NO: 3361 - RNA, 22 nt, Homo sapiens
guccauuuguuuccagagcacu

SEQ ID NO: 3362 - RNA, 22 nt, Homo sapiens
cacaaccuccgccuccuggguu

SEQ ID NO: 3363 - RNA, 20 nt, Homo sapiens
cagucaugaagaacugugag

SEQ ID NO: 3364 - RNA, 22 nt, Homo sapiens
ucggcucagugcaagcucugcc

SEQ ID NO: 3365 - RNA, 22 nt, Homo sapiens
ggaaguauaaacuuaguggagu

SEQ ID NO: 3366 - RNA, 22 nt, Homo sapiens
cagguauagucacuugcccaag

SEQ ID NO: 3367 - RNA, 22 nt, Homo sapiens
uagguucucaggaaugagcuuc

SEQ ID NO: 3368 - RNA, 21 nt, Homo sapiens
cauaaugcuacuuauuuuaug

SEQ ID NO: 3369 - RNA, 22 nt, Homo sapiens
uuuagcaauggagggugacuuu

SEQ ID NO: 3370 - RNA, 22 nt, Homo sapiens
cagugaauuucaggucaagagu

SEQ ID NO: 3371 - RNA, 22 nt, Homo sapiens
cugaagugugaaagucuuuuuu

SEQ ID NO: 3372 - RNA, 22 nt, Homo sapiens
ggugucuuguuuaauacucauu

SEQ ID NO: 3373 - RNA, 19 nt, Homo sapiens
uacccagaagcagcauugu

SEQ ID NO: 3374 - RNA, 22 nt, Homo sapiens
acaggugaaguauuacacuaag

SEQ ID NO: 3375 - RNA, 22 nt, Homo sapiens
agcccagagacuguguaaauuu

SEQ ID NO: 3376 - RNA, 22 nt, Homo sapiens
gugucucagcccagaccuauuu

SEQ ID NO: 3377 - RNA, 19 nt, Homo sapiens
agcagaacaaauguguggg

SEQ ID NO: 3378 - RNA, 22 nt, Homo sapiens
uggaugaagagaugguaguugc

SEQ ID NO: 3379 - RNA, 22 nt, Homo sapiens
cuuuacacauccuaaccagugu

SEQ ID NO: 3380 - RNA, 21 nt, Homo sapiens
ugacuagauuccagauuggcc

SEQ ID NO: 3381 - RNA, 22 nt, Homo sapiens
ugaaggcaggagggagaaaagu

SEQ ID NO: 3382 - RNA, 20 nt, Homo sapiens
ugguaauguaagagaggaga

SEQ ID NO: 3383 - RNA, 22 nt, Homo sapiens
ucacuagggaucacuuuacccg

SEQ ID NO: 3384 - RNA, 22 nt, Homo sapiens
aaaguaguagcaguuucugcca

SEQ ID NO: 3385 - RNA, 22 nt, Homo sapiens
uucaaaguaaaaauguguucac

SEQ ID NO: 3386 - RNA, 22 nt, Homo sapiens
auuagguauuuguccuaaauau

SEQ ID NO: 3387 - RNA, 22 nt, Homo sapiens
auagugcuuuuuagaaccugga

SEQ ID NO: 3388 - RNA, 22 nt, Homo sapiens
uucacccugguuguagauggac

SEQ ID NO: 3389 - RNA, 22 nt, Homo sapiens
uugucacucuuccuaggguagg

SEQ ID NO: 3390 - RNA, 22 nt, Homo sapiens
aaggaagcuagcaggaauuggu

SEQ ID NO: 3391 - RNA, 22 nt, Homo sapiens
uaguaacacauugaacgaucgc

SEQ ID NO: 3392 - RNA, 22 nt, Homo sapiens
ucaucaguggggaugugguuga

SEQ ID NO: 3393 - RNA, 22 nt, Homo sapiens
aauugugcuuguaggccaggca

SEQ ID NO: 3394 - RNA, 21 nt, Homo sapiens
ugucaagaugacugcugcggc

SEQ ID NO: 3395 - RNA, 22 nt, Homo sapiens
auggcaauaauagcuaccauuu

SEQ ID NO: 3396 - RNA, 22 nt, Homo sapiens
auuguacuagguccuagggcuu

SEQ ID NO: 3397 - RNA, 22 nt, Homo sapiens
gccauugcacuccagccuaggu

SEQ ID NO: 3398 - RNA, 22 nt, Homo sapiens
ugcauaucuuguggaauaucuc

SEQ ID NO: 3399 - RNA, 22 nt, Homo sapiens
agcaaccuugaauagcccuuuc

SEQ ID NO: 3400 - RNA, 22 nt, Homo sapiens
ucuuuguuuucugauccugaag

SEQ ID NO: 3401 - RNA, 22 nt, Homo sapiens
guuaagggaagccuggguaaga

SEQ ID NO: 3402 - RNA, 22 nt, Homo sapiens
aauugcucuccuccaaggucuu

SEQ ID NO: 3403 - RNA, 22 nt, Homo sapiens
ugccuacuuugcaucugucagg

SEQ ID NO: 3404 - RNA, 22 nt, Homo sapiens
uugaguaguaagugguucaccg

SEQ ID NO: 3405 - RNA, 22 nt, Homo sapiens
uguguacugcagaguauucugu

SEQ ID NO: 3406 - RNA, 22 nt, Homo sapiens
guucaaggaauguuggcuucuc

SEQ ID NO: 3407 - RNA, 22 nt, Homo sapiens
uaguucguguuugaacuagauc

SEQ ID NO: 3408 - RNA, 22 nt, Homo sapiens
augacugucuugcagaggcuau

SEQ ID NO: 3409 - RNA, 22 nt, Homo sapiens
uaugacuuuugaauacagaugg

SEQ ID NO: 3410 - RNA, 22 nt, Homo sapiens
ugagaucuuuuguggcugagaa

SEQ ID NO: 3411 - RNA, 22 nt, Homo sapiens
guuuuuggggucacuauuaccg

SEQ ID NO: 3412 - RNA, 22 nt, Homo sapiens
cuaauccugugguagcacucaa

SEQ ID NO: 3413 - RNA, 22 nt, Homo sapiens
aaguggaauguuuguggcacaa

SEQ ID NO: 3414 - RNA, 22 nt, Homo sapiens
uguuaacauggucucagucugu

SEQ ID NO: 3415 - RNA, 22 nt, Homo sapiens
cuuugcacaucucugcuuuccc

SEQ ID NO: 3416 - RNA, 22 nt, Homo sapiens
uucccagagagggacuucuaau

SEQ ID NO: 3417 - RNA, 23 nt, Homo sapiens
uguaaagcuaugaauuauucuuu

SEQ ID NO: 3418 - RNA, 22 nt, Homo sapiens
auccuguagagaugagggugga

SEQ ID NO: 3419 - RNA, 21 nt, Homo sapiens
uuagccuguaagcacuuugca

SEQ ID NO: 3420 - RNA, 22 nt, Homo sapiens
acaguacuuuuggauuugugaa

SEQ ID NO: 3421 - RNA, 22 nt, Homo sapiens
ggucaguuuuuuuaaccaucca

SEQ ID NO: 3422 - RNA, 22 nt, Homo sapiens
uaacaggcuacucuugcauugc

SEQ ID NO: 3423 - RNA, 22 nt, Homo sapiens
uggauagugauaagguagauga

SEQ ID NO: 3424 - RNA, 22 nt, Homo sapiens
uugcaaaucucuuguguuuggu

SEQ ID NO: 3425 - RNA, 22 nt, Homo sapiens
cauggucaccuuccaaguuauu

SEQ ID NO: 3426 - RNA, 22 nt, Homo sapiens
acagucuggagaaugggugcuc

SEQ ID NO: 3427 - RNA, 22 nt, Homo sapiens
uuaauucugucugcccucaucc

SEQ ID NO: 3428 - RNA, 22 nt, Homo sapiens
gagauaaauaggucacaguucu

SEQ ID NO: 3429 - RNA, 22 nt, Homo sapiens
uuccuugguucagggaaggucc

SEQ ID NO: 3430 - RNA, 19 nt, Homo sapiens
augaccauuuccauaguau

SEQ ID NO: 3431 - RNA, 22 nt, Homo sapiens
auggacagacacuggccuucug

SEQ ID NO: 3432 - RNA, 22 nt, Homo sapiens
acugcacuccagccuccugaca

SEQ ID NO: 3433 - RNA, 22 nt, Homo sapiens
gcuaggagaucugcugcucucu

SEQ ID NO: 3434 - RNA, 22 nt, Homo sapiens
gagugcaauggcagaucuccgc

SEQ ID NO: 3435 - RNA, 22 nt, Homo sapiens
augaguuccuuccuugccuagg

SEQ ID NO: 3436 - RNA, 22 nt, Homo sapiens
aauaaugucacaggggguuagc

SEQ ID NO: 3437 - RNA, 22 nt, Homo sapiens
cguugcacuccagccugggcaa

SEQ ID NO: 3438 - RNA, 19 nt, Homo sapiens
aagugguuuaaacuuguau

SEQ ID NO: 3439 - RNA, 22 nt, Homo sapiens
aaagugauguccaggcuuucag

SEQ ID NO: 3440 - RNA, 22 nt, Homo sapiens
gauuccacuuacuuagcauucc

SEQ ID NO: 3441 - RNA, 22 nt, Homo sapiens
aauggcucugauguuguuguga

SEQ ID NO: 3442 - RNA, 22 nt, Homo sapiens
ucacagccuaguuuuauacauu

SEQ ID NO: 3443 - RNA, 21 nt, Homo sapiens
uguauacauggaagaaugguc

SEQ ID NO: 3444 - RNA, 22 nt, Homo sapiens
cuucuugcuguguccucacaug

SEQ ID NO: 3445 - RNA, 22 nt, Homo sapiens
ucauugcacuccagccugggug

SEQ ID NO: 3446 - RNA, 22 nt, Homo sapiens
ugaauguacuuaacacuggauu

SEQ ID NO: 3447 - RNA, 22 nt, Homo sapiens
ggauccaucuggaaauguggga

SEQ ID NO: 3448 - RNA, 22 nt, Homo sapiens
ucuuugguagaagcuauuuuau

SEQ ID NO: 3449 - RNA, 19 nt, Homo sapiens
cucaaagugguauuuggag

SEQ ID NO: 3450 - RNA, 22 nt, Homo sapiens
auugcugagacauugcuaaucu

SEQ ID NO: 3451 - RNA, 22 nt, Homo sapiens
uuauugcuccagaggcugauuu

SEQ ID NO: 3452 - RNA, 22 nt, Homo sapiens
uuuguacacuguugguaggauu

SEQ ID NO: 3453 - RNA, 22 nt, Homo sapiens
acugcacuucagccuuggcuac

SEQ ID NO: 3454 - RNA, 22 nt, Homo sapiens
acaguagaaaacaauggauuug

SEQ ID NO: 3455 - RNA, 22 nt, Homo sapiens
augaggcacugcgcccuacuga

SEQ ID NO: 3456 - RNA, 22 nt, Homo sapiens
cagugcuuguuauuguucuauu

SEQ ID NO: 3457 - RNA, 16 nt, Homo sapiens
gcuguuguuuuguccu

SEQ ID NO: 3458 - RNA, 22 nt, Homo sapiens
uacaaguaauaagggaagaauu

SEQ ID NO: 3459 - RNA, 22 nt, Homo sapiens
uuggauccauccugucuucucu

SEQ ID NO: 3460 - RNA, 22 nt, Homo sapiens
cacugcauggccacccauguua

SEQ ID NO: 3461 - RNA, 22 nt, Homo sapiens
ugagacugagucuugcucuugu

SEQ ID NO: 3462 - RNA, 21 nt, Homo sapiens
acuuuguugggggcugaggca

SEQ ID NO: 3463 - RNA, 22 nt, Homo sapiens
uaaugcaucagugguaguucuu

SEQ ID NO: 3464 - RNA, 22 nt, Homo sapiens
uaccucagccaaugcccagaag

SEQ ID NO: 3465 - RNA, 22 nt, Homo sapiens
ucucagcacagucagggcgccu

SEQ ID NO: 3466 - RNA, 22 nt, Homo sapiens
ucuuggacuuuugugagaaauc

SEQ ID NO: 3467 - RNA, 22 nt, Homo sapiens
aaggcaugcugaguccuaaaag

SEQ ID NO: 3468 - RNA, 22 nt, Homo sapiens
cugcauuagucuguuuaguguu

SEQ ID NO: 3469 - RNA, 22 nt, Homo sapiens
uggcauauaauauagaagacua

SEQ ID NO: 3470 - RNA, 22 nt, Homo sapiens
augagaucaaauuuaagcuguu

SEQ ID NO: 3471 - RNA, 22 nt, Homo sapiens
guugccuaggcuggcgugcagu

SEQ ID NO: 3472 - RNA, 22 nt, Homo sapiens
ugaauucuguccaaaauaacug

SEQ ID NO: 3473 - RNA, 21 nt, Homo sapiens
auugcgcuccagccuccuggg

SEQ ID NO: 3474 - RNA, 22 nt, Homo sapiens
uuaagaugcauuuugaaguuaa

SEQ ID NO: 3475 - RNA, 22 nt, Homo sapiens
caguuacuuuugcaccaaccua

SEQ ID NO: 3476 - RNA, 23 nt, Homo sapiens
ggaaauguuuaagggguugggag

SEQ ID NO: 3477 - RNA, 22 nt, Homo sapiens
uucucaguuccuacuuugguga

SEQ ID NO: 3478 - RNA, 22 nt, Homo sapiens
uucuagcacuuugggagacuga

SEQ ID NO: 3479 - RNA, 22 nt, Homo sapiens
uugugcuccuaugagaaucuaa

SEQ ID NO: 3480 - RNA, 21 nt, Homo sapiens
gugcagacacacauauaggcu

SEQ ID NO: 3481 - RNA, 22 nt, Homo sapiens
auagcagacauuucaaggcagg

SEQ ID NO: 3482 - RNA, 22 nt, Homo sapiens
aagcccauuguaaguugaggag

SEQ ID NO: 3483 - RNA, 22 nt, Homo sapiens
ccagugaacugcaagguuuuuc

SEQ ID NO: 3484 - RNA, 22 nt, Homo sapiens
caugccacugcacuccaaccug

SEQ ID NO: 3485 - RNA, 22 nt, Homo sapiens
uggaagacauuuuggaccuugg

SEQ ID NO: 3486 - RNA, 22 nt, Homo sapiens
augauacugaguugaguucuca

SEQ ID NO: 3487 - RNA, 22 nt, Homo sapiens
aucagcacugaucauacagcuu

SEQ ID NO: 3488 - RNA, 19 nt, Homo sapiens
uuguccccucuaaaucuca

SEQ ID NO: 3489 - RNA, 22 nt, Homo sapiens
gaucacauggccauuucuagcu

SEQ ID NO: 3490 - RNA, 22 nt, Homo sapiens
uagcaucagauuccauauucua

SEQ ID NO: 3491 - RNA, 22 nt, Homo sapiens
uugccuauucacucugaugaua

SEQ ID NO: 3492 - RNA, 22 nt, Homo sapiens
ggagcuuugaaaguuuccgguu

SEQ ID NO: 3493 - RNA, 22 nt, Homo sapiens
uugcuuagucaugaaucacuga

SEQ ID NO: 3494 - RNA, 22 nt, Homo sapiens
gagagguaguuuuuuggucguc

SEQ ID NO: 3495 - RNA, 22 nt, Homo sapiens
uuuguagcucacucugagcuga

SEQ ID NO: 3496 - RNA, 22 nt, Homo sapiens
ggagucugaacuggacaaugac

SEQ ID NO: 3497 - RNA, 22 nt, Homo sapiens
ggcauguauucuuauuauuccu

SEQ ID NO: 3498 - RNA, 22 nt, Homo sapiens
ugacuacacacaauuugucaag

SEQ ID NO: 3499 - RNA, 22 nt, Homo sapiens
ugaguacugauuuaagauacac

SEQ ID NO: 3500 - RNA, 22 nt, Homo sapiens
auagugcuggaauaaauauacg

SEQ ID NO: 3501 - RNA, 21 nt, Homo sapiens
ugucuagaccucauccuacag

SEQ ID NO: 3502 - RNA, 22 nt, Homo sapiens
gcaagaauggaacaggagagcc

SEQ ID NO: 3503 - RNA, 22 nt, Homo sapiens
uguggaaauggugcuacgaaca

SEQ ID NO: 3504 - RNA, 22 nt, Homo sapiens
gcaauacugacagcauuaguuu

SEQ ID NO: 3505 - RNA, 22 nt, Homo sapiens
ucugugcuugucauaugcuuug

SEQ ID NO: 3506 - RNA, 22 nt, Homo sapiens
ugagucccuaagacccucaggu

SEQ ID NO: 3507 - RNA, 22 nt, Homo sapiens
acuguacucuacccugggcaac

SEQ ID NO: 3508 - RNA, 22 nt, Homo sapiens
uuacuguacugcucuuaaccug

SEQ ID NO: 3509 - RNA, 22 nt, Homo sapiens
ugagaacugcagggagcugcau

SEQ ID NO: 3510 - RNA, 21 nt, Homo sapiens
uuaucccagugucucugcagg

SEQ ID NO: 3511 - RNA, 22 nt, Homo sapiens
ugagacugauaggacauuuucu

SEQ ID NO: 3512 - RNA, 15 nt, Homo sapiens
ucuggcucugucacu

SEQ ID NO: 3513 - RNA, 22 nt, Homo sapiens
gagaaugaugauuuccaauuuc

SEQ ID NO: 3514 - RNA, 22 nt, Homo sapiens
uuaaggcuuucccuauguaaaa

SEQ ID NO: 3515 - RNA, 22 nt, Homo sapiens
caaggugcugagacaggagccc

SEQ ID NO: 3516 - RNA, 22 nt, Homo sapiens
ugagaucgagucucgcucuguc

SEQ ID NO: 3517 - RNA, 22 nt, Homo sapiens
uguuggcauugcugcugacccu

SEQ ID NO: 3518 - RNA, 17 nt, Homo sapiens
ucccauguuucuucuac

SEQ ID NO: 3519 - RNA, 22 nt, Homo sapiens
uucagcuacuuggaaacagcaa

SEQ ID NO: 3520 - RNA, 22 nt, Homo sapiens
gaugagcuaaguucucacagca

SEQ ID NO: 3521 - RNA, 22 nt, Homo sapiens
auccuguagucucacagcccca

SEQ ID NO: 3522 - RNA, 20 nt, Homo sapiens
uacugcacuccaaccuaggc

SEQ ID NO: 3523 - RNA, 20 nt, Homo sapiens
uucaugggagcaaagaggcc

SEQ ID NO: 3524 - RNA, 22 nt, Homo sapiens
uggcaagugggaccuaguuaaa

SEQ ID NO: 3525 - RNA, 22 nt, Homo sapiens
auugcucaaaucaguacuugag

SEQ ID NO: 3526 - RNA, 22 nt, Homo sapiens
guucaguuugcugaugcguuga

SEQ ID NO: 3527 - RNA, 22 nt, Homo sapiens
augaauacugcugcaaugaaca

SEQ ID NO: 3528 - RNA, 22 nt, Homo sapiens
uucuuuggauaaaguuuuaugc

SEQ ID NO: 3529 - RNA, 22 nt, Homo sapiens
gagugcaaagguccugaggugg

SEQ ID NO: 3530 - RNA, 22 nt, Homo sapiens
ugagucaugcuggagucauggc

SEQ ID NO: 3531 - RNA, 22 nt, Homo sapiens
ugaguauuugggggaccagaga

SEQ ID NO: 3532 - RNA, 18 nt, Homo sapiens
augugcaauuuuguauuu

SEQ ID NO: 3533 - RNA, 21 nt, Homo sapiens
uuguccccacccaaaucucau

SEQ ID NO: 3534 - RNA, 22 nt, Homo sapiens
uucccgggguggaaugcaguga

SEQ ID NO: 3535 - RNA, 22 nt, Homo sapiens
auagauucauuugaggagauuu

SEQ ID NO: 3536 - RNA, 22 nt, Homo sapiens
cgaguagcacaaugugugugau

SEQ ID NO: 3537 - RNA, 22 nt, Homo sapiens
ggugacagugguuaaaauuugu

SEQ ID NO: 3538 - RNA, 21 nt, Homo sapiens
ggcaagaaacacaaucaagua

SEQ ID NO: 3539 - RNA, 22 nt, Homo sapiens
uggaauuaauccuccugguuuc

SEQ ID NO: 3540 - RNA, 21 nt, Homo sapiens
uuagugcucaguuugacaaaa

SEQ ID NO: 3541 - RNA, 22 nt, Homo sapiens
gaccugagagguacauguauuu

SEQ ID NO: 3542 - RNA, 22 nt, Homo sapiens
auguaaacauuuggucuaaauu

SEQ ID NO: 3543 - RNA, 19 nt, Homo sapiens
caucacagagucuuccauu

SEQ ID NO: 3544 - RNA, 22 nt, Homo sapiens
uugguacuaaaaaguagggugu

SEQ ID NO: 3545 - RNA, 22 nt, Homo sapiens
cuggaagaaaaucacgccaucu

SEQ ID NO: 3546 - RNA, 22 nt, Homo sapiens
ugagguuggguaauuuaugaag

SEQ ID NO: 3547 - RNA, 22 nt, Homo sapiens
ucugcaagucuaaacuagccau

SEQ ID NO: 3548 - RNA, 21 nt, Homo sapiens
ggaaaguuaaggaaauacccc

SEQ ID NO: 3549 - RNA, 22 nt, Homo sapiens
ucuuuugguuucuagaggccgc

SEQ ID NO: 3550 - RNA, 18 nt, Homo sapiens
uuuguacuuuuucuaaug

SEQ ID NO: 3551 - RNA, 22 nt, Homo sapiens
gagcuagugcuuaugcaccacu

SEQ ID NO: 3552 - RNA, 22 nt, Homo sapiens
aauggcauugguccuuuuggau

SEQ ID NO: 3553 - RNA, 22 nt, Homo sapiens
uagugaauguuggcuauuaaua

SEQ ID NO: 3554 - RNA, 22 nt, Homo sapiens
caguguuuuuaacaggugcccg

SEQ ID NO: 3555 - RNA, 18 nt, Homo sapiens
cugagcacugcuuuauga

SEQ ID NO: 3556 - RNA, 22 nt, Homo sapiens
acccaguguucagacuaccugu

SEQ ID NO: 3557 - RNA, 19 nt, Homo sapiens
gggaggaugcgucuucagg

SEQ ID NO: 3558 - RNA, 22 nt, Homo sapiens
gagcuagcauuuagacaucugg

SEQ ID NO: 3559 - RNA, 22 nt, Homo sapiens
ggaaagauguaauauuaucuaa

SEQ ID NO: 3560 - RNA, 22 nt, Homo sapiens
guuuaacugguacuucaagucu

SEQ ID NO: 3561 - RNA, 22 nt, Homo sapiens
cuuuguaugucaugacaacugu

SEQ ID NO: 3562 - RNA, 22 nt, Homo sapiens
ugagaugagucucgcucuguca

SEQ ID NO: 3563 - RNA, 22 nt, Homo sapiens
gcuguguugugcccagcaucau

SEQ ID NO: 3564 - RNA, 22 nt, Homo sapiens
cugacuuauguggacuauuuca

SEQ ID NO: 3565 - RNA, 20 nt, Homo sapiens
uggucaccuucaggagguuc

SEQ ID NO: 3566 - RNA, 22 nt, Homo sapiens
aaagugcugggauuuuaggcau

SEQ ID NO: 3567 - RNA, 22 nt, Homo sapiens
uuuuaacagccaggggacggcc

SEQ ID NO: 3568 - RNA, 22 nt, Homo sapiens
cuaauacaguuguccaagcugg

SEQ ID NO: 3569 - RNA, 19 nt, Homo sapiens
uggagucaucaugcugcua

SEQ ID NO: 3570 - RNA, 22 nt, Homo sapiens
ugacuacagauuugcugccaga

SEQ ID NO: 3571 - RNA, 22 nt, Homo sapiens
uuucaccguguuggccaggcug

SEQ ID NO: 3572 - RNA, 22 nt, Homo sapiens
uagauuauuccuuugaauggcc

SEQ ID NO: 3573 - RNA, 22 nt, Homo sapiens
cuuccaguggcagccgggcaug

SEQ ID NO: 3574 - RNA, 22 nt, Homo sapiens
uauggcauuauuuugauagaca

SEQ ID NO: 3575 - RNA, 22 nt, Homo sapiens
uucauggagccauccuuugauc

SEQ ID NO: 3576 - RNA, 23 nt, Homo sapiens
aaucugucuuuguuauagggguc

SEQ ID NO: 3577 - RNA, 22 nt, Homo sapiens
auugucauuuauaacuguguag

SEQ ID NO: 3578 - RNA, 22 nt, Homo sapiens
cuugguacucugugucccagcu

SEQ ID NO: 3579 - RNA, 22 nt, Homo sapiens
gucagugccugucccaggcuuu

SEQ ID NO: 3580 - RNA, 22 nt, Homo sapiens
cuuuuguggaucuucuguugcu

SEQ ID NO: 3581 - RNA, 22 nt, Homo sapiens
gagcuaguguuuacuugccacu

SEQ ID NO: 3582 - RNA, 19 nt, Homo sapiens
aucuggaguuccuggggcu

SEQ ID NO: 3583 - RNA, 22 nt, Homo sapiens
gugcaauucacuguuaugucug

SEQ ID NO: 3584 - RNA, 22 nt, Homo sapiens
uaccuuugucaguuacucaccu

SEQ ID NO: 3585 - RNA, 23 nt, Homo sapiens
aaguucaugcucaucuguuacac

SEQ ID NO: 3586 - RNA, 22 nt, Homo sapiens
agcagguguccacaauguuugc

SEQ ID NO: 3587 - RNA, 22 nt, Homo sapiens
auggcucuguuccaugugucuu

SEQ ID NO: 3588 - RNA, 22 nt, Homo sapiens
agguaauuuucccagagggaaa

SEQ ID NO: 3589 - RNA, 22 nt, Homo sapiens
agcuguguugucugaagucaga

SEQ ID NO: 3590 - RNA, 22 nt, Homo sapiens
aaagucuagaggaucaugugug

SEQ ID NO: 3591 - RNA, 22 nt, Homo sapiens
gaggcuagauggggaugugucc

SEQ ID NO: 3592 - RNA, 22 nt, Homo sapiens
uuagaguguagcaggaagaggc

SEQ ID NO: 3593 - RNA, 22 nt, Homo sapiens
uugaagguaauugguuuuauga

SEQ ID NO: 3594 - RNA, 22 nt, Homo sapiens
gccaacauggcgcuccauucuu

SEQ ID NO: 3595 - RNA, 22 nt, Homo sapiens
ugcugcaaacaggcaucugugg

SEQ ID NO: 3596 - RNA, 22 nt, Homo sapiens
ccauugcacuucagccuaggug

SEQ ID NO: 3597 - RNA, 22 nt, Homo sapiens
uuguauccaucuuucaggcaac

SEQ ID NO: 3598 - RNA, 22 nt, Homo sapiens
ucuugguuuauugugguaugaa

SEQ ID NO: 3599 - RNA, 22 nt, Homo sapiens
ugagucagucucacucugcugc

SEQ ID NO: 3600 - RNA, 22 nt, Homo sapiens
uucaguaguacauucccguguu

SEQ ID NO: 3601 - RNA, 22 nt, Homo sapiens
gugaaucauaugccagucaugc

SEQ ID NO: 3602 - RNA, 22 nt, Homo sapiens
auggcggugugaucuuggcuca

SEQ ID NO: 3603 - RNA, 22 nt, Homo sapiens
uugcaucagcaggcauaauugg

SEQ ID NO: 3604 - RNA, 22 nt, Homo sapiens
auagcagugugaaaauguacua

SEQ ID NO: 3605 - RNA, 19 nt, Homo sapiens
cccagugucagagaagggu

SEQ ID NO: 3606 - RNA, 22 nt, Homo sapiens
ugaauguaagaugucugcuggu

SEQ ID NO: 3607 - RNA, 22 nt, Homo sapiens
ugccuaggcccaguccucagaa

SEQ ID NO: 3608 - RNA, 22 nt, Homo sapiens
cgcuggugaucuagacccccaa

SEQ ID NO: 3609 - RNA, 22 nt, Homo sapiens
aggcaagugggagacagcauuu

SEQ ID NO: 3610 - RNA, 22 nt, Homo sapiens
uauggguauuuuauacauaacc

SEQ ID NO: 3611 - RNA, 22 nt, Homo sapiens
uugacuuuuauucacucugcua

SEQ ID NO: 3612 - RNA, 20 nt, Homo sapiens
gagcaucacaggccucugcu

SEQ ID NO: 3613 - RNA, 22 nt, Homo sapiens
ugaaaugcuaauucguagcuaa

SEQ ID NO: 3614 - RNA, 22 nt, Homo sapiens
auagcagugugaggacagacua

SEQ ID NO: 3615 - RNA, 22 nt, Homo sapiens
auaagguuagcucugagaaagu

SEQ ID NO: 3616 - RNA, 22 nt, Homo sapiens
ugacuaggggcccuggcuucuu

SEQ ID NO: 3617 - RNA, 19 nt, Homo sapiens
guugacacuggcucuucag

SEQ ID NO: 3618 - RNA, 22 nt, Homo sapiens
uuugaagacuacugggagugaa

SEQ ID NO: 3619 - RNA, 22 nt, Homo sapiens
cuugagcauauucuauauuaaa

SEQ ID NO: 3620 - RNA, 22 nt, Homo sapiens
augucaaggugggugauaguuu

SEQ ID NO: 3621 - RNA, 22 nt, Homo sapiens
auuauuagucggccagcuguua

SEQ ID NO: 3622 - RNA, 22 nt, Homo sapiens
ggcaagaagagaguuuaaacau

SEQ ID NO: 3623 - RNA, 22 nt, Homo sapiens
cccugagagcagggucuuucuc

SEQ ID NO: 3624 - RNA, 22 nt, Homo sapiens
uuuggcauauuuuaagcugguu

SEQ ID NO: 3625 - RNA, 22 nt, Homo sapiens
auauaccuaggcuacaugguuu

SEQ ID NO: 3626 - RNA, 22 nt, Homo sapiens
uuggcagcauuccagccaagca

SEQ ID NO: 3627 - RNA, 18 nt, Homo sapiens
auuuuugcaguccacaug

SEQ ID NO: 3628 - RNA, 22 nt, Homo sapiens
uugcacaauccugugagugagu

SEQ ID NO: 3629 - RNA, 22 nt, Homo sapiens
auugagcaaggucuccuaguau

SEQ ID NO: 3630 - RNA, 22 nt, Homo sapiens
uuagugaaugcaccacuucuga

SEQ ID NO: 3631 - RNA, 20 nt, Homo sapiens
acacugugcuaaggauuuuc

SEQ ID NO: 3632 - RNA, 22 nt, Homo sapiens
cauggcacauauauaucuaggu

SEQ ID NO: 3633 - RNA, 22 nt, Homo sapiens
ugcugguauuuggaccagccug

SEQ ID NO: 3634 - RNA, 22 nt, Homo sapiens
ccaccuguacuuaagucacuuu

SEQ ID NO: 3635 - RNA, 22 nt, Homo sapiens
ugaucucagcucacugguugaa

SEQ ID NO: 3636 - RNA, 22 nt, Homo sapiens
uacaguaggauuuucagggucu

SEQ ID NO: 3637 - RNA, 22 nt, Homo sapiens
aacugcucuaauguggugggag

SEQ ID NO: 3638 - RNA, 22 nt, Homo sapiens
uucccuuucugaaaaucucauu

SEQ ID NO: 3639 - RNA, 22 nt, Homo sapiens
uuggcuuguaaaaugaaaagcu

SEQ ID NO: 3640 - RNA, 22 nt, Homo sapiens
cuagucacauuuucaucaaaua

SEQ ID NO: 3641 - RNA, 22 nt, Homo sapiens
uuugaaccauuugaagaaugau

SEQ ID NO: 3642 - RNA, 22 nt, Homo sapiens
auacaagcaguccaacuccaua

SEQ ID NO: 3643 - RNA, 22 nt, Homo sapiens
ugagaugaaagcagaaagacuu

SEQ ID NO: 3644 - RNA, 20 nt, Homo sapiens
ucacauccucucccaacaug

SEQ ID NO: 3645 - RNA, 22 nt, Homo sapiens
auuuguccugccuuuuccuccu

SEQ ID NO: 3646 - RNA, 22 nt, Homo sapiens
ggauuuguuggcauuagugaug

SEQ ID NO: 3647 - RNA, 19 nt, Homo sapiens
ugaaguauagggcuucuga

SEQ ID NO: 3648 - RNA, 22 nt, Homo sapiens
ccuuuuuguaguggaaguagga

SEQ ID NO: 3649 - RNA, 22 nt, Homo sapiens
acggaacugcuccauucuuugc

SEQ ID NO: 3650 - RNA, 22 nt, Homo sapiens
uuaguaguuugauaggaauagc

SEQ ID NO: 3651 - RNA, 22 nt, Homo sapiens
gcugaguaguauuucauuguau

SEQ ID NO: 3652 - RNA, 22 nt, Homo sapiens
ugauggcaauggcauucauuuu

SEQ ID NO: 3653 - RNA, 22 nt, Homo sapiens
ucagcaaugcugcacucuacug

SEQ ID NO: 3654 - RNA, 22 nt, Homo sapiens
cuaugguuucuccauaucauca

SEQ ID NO: 3655 - RNA, 22 nt, Homo sapiens
ugcauaugcagcauuuaugauu

SEQ ID NO: 3656 - RNA, 22 nt, Homo sapiens
gcauugcacuuggcauagacug

SEQ ID NO: 3657 - RNA, 22 nt, Homo sapiens
cucacagucagaagggacuugc

SEQ ID NO: 3658 - RNA, 22 nt, Homo sapiens
ggcacuguugccggccugaauu

SEQ ID NO: 3659 - RNA, 22 nt, Homo sapiens
uucacuguagccucagccucuu

SEQ ID NO: 3660 - RNA, 22 nt, Homo sapiens
aucugugguuguaugcauauua

SEQ ID NO: 3661 - RNA, 22 nt, Homo sapiens
cugagguaauuuuccagauaau

SEQ ID NO: 3662 - RNA, 22 nt, Homo sapiens
uggcuguuguuacuaacaguuc

SEQ ID NO: 3663 - RNA, 22 nt, Homo sapiens
augugaugguuaauuuuaugug

SEQ ID NO: 3664 - RNA, 22 nt, Homo sapiens
acacaguaaauauugucuccuc

SEQ ID NO: 3665 - RNA, 22 nt, Homo sapiens
ucuugguaaugucacauuuccu

SEQ ID NO: 3666 - RNA, 22 nt, Homo sapiens
ugcauauguauacaugugccau

SEQ ID NO: 3667 - RNA, 22 nt, Homo sapiens
ugagaucaagguuaauauaauc

SEQ ID NO: 3668 - RNA, 22 nt, Homo sapiens
uucaccuugggucccacuugcu

SEQ ID NO: 3669 - RNA, 22 nt, Homo sapiens
aacuccauuuuagacccuagau

SEQ ID NO: 3670 - RNA, 22 nt, Homo sapiens
uuaccacagugccugucuaaug

SEQ ID NO: 3671 - RNA, 22 nt, Homo sapiens
uuacauaguguguggguucggg

SEQ ID NO: 3672 - RNA, 22 nt, Homo sapiens
uagcaagaugaauuugugcaaa

SEQ ID NO: 3673 - RNA, 23 nt, Homo sapiens
ugaauguaucgaaugugggaaag

SEQ ID NO: 3674 - RNA, 22 nt, Homo sapiens
ugucccguuuucgaggcugcag

SEQ ID NO: 3675 - RNA, 22 nt, Homo sapiens
aauaucacaguuggguguacac

SEQ ID NO: 3676 - RNA, 22 nt, Homo sapiens
agcugcacgugguaaauguaaa

SEQ ID NO: 3677 - RNA, 22 nt, Homo sapiens
ucagaacugauacuagaacuuu

SEQ ID NO: 3678 - RNA, 22 nt, Homo sapiens
aaugccaucagagaaaacucuu

SEQ ID NO: 3679 - RNA, 22 nt, Homo sapiens
aguggguguuccauuggauaaa

SEQ ID NO: 3680 - RNA, 22 nt, Homo sapiens
ugacaucguugccauguuaugc

SEQ ID NO: 3681 - RNA, 22 nt, Homo sapiens
agccuagagagccacuuugaga

SEQ ID NO: 3682 - RNA, 21 nt, Homo sapiens
uuggcacucuucucuccuuau

SEQ ID NO: 3683 - RNA, 22 nt, Homo sapiens
guaucauuggcauguaaccaga

SEQ ID NO: 3684 - RNA, 19 nt, Homo sapiens
acagauagaauguucuaca

SEQ ID NO: 3685 - RNA, 22 nt, Homo sapiens
uuuacaguuuucuaggcuacca

SEQ ID NO: 3686 - RNA, 22 nt, Homo sapiens
aauugcauaugcaguagaucua

SEQ ID NO: 3687 - RNA, 22 nt, Homo sapiens
uacugcaucuacuuagagccag

SEQ ID NO: 3688 - RNA, 21 nt, Homo sapiens
uagugcugaggcaguauggga

SEQ ID NO: 3689 - RNA, 22 nt, Homo sapiens
uucacuguaaaaugaagagggu

SEQ ID NO: 3690 - RNA, 22 nt, Homo sapiens
ucuaucacagugauguuccaga

SEQ ID NO: 3691 - RNA, 22 nt, Homo sapiens
ucaugugagcaaguugggcuca

SEQ ID NO: 3692 - RNA, 22 nt, Homo sapiens
ucacuguugaugggcaugcagg

SEQ ID NO: 3693 - RNA, 22 nt, Homo sapiens
uuaaggccugaagcucauaaag

SEQ ID NO: 3694 - RNA, 22 nt, Homo sapiens
gagugcaauggcgcgaucucgg

SEQ ID NO: 3695 - RNA, 22 nt, Homo sapiens
uguguaaagcuuguuccagaaa

SEQ ID NO: 3696 - RNA, 22 nt, Homo sapiens
auagugcugcaagaaacauacg

SEQ ID NO: 3697 - RNA, 22 nt, Homo sapiens
ugagcagagaucacggcauugu

SEQ ID NO: 3698 - RNA, 22 nt, Homo sapiens
uuacauguggugugaagaagag

SEQ ID NO: 3699 - RNA, 22 nt, Homo sapiens
cuccaggugucauccaccuccu

SEQ ID NO: 3700 - RNA, 22 nt, Homo sapiens
uuaccagucugauuccuguuag

SEQ ID NO: 3701 - RNA, 22 nt, Homo sapiens
ugaggcaagauacugauuucau

SEQ ID NO: 3702 - RNA, 21 nt, Homo sapiens
uuagcauccauguucaucaac

SEQ ID NO: 3703 - RNA, 22 nt, Homo sapiens
augagauuguuugugugaaaua

SEQ ID NO: 3704 - RNA, 22 nt, Homo sapiens
uugaguauuggacugguaucuu

SEQ ID NO: 3705 - RNA, 22 nt, Homo sapiens
aggcaagaaugcuuguuucacc

SEQ ID NO: 3706 - RNA, 22 nt, Homo sapiens
acaugguacugauuuacgaaau

SEQ ID NO: 3707 - RNA, 22 nt, Homo sapiens
uguauugcuugaagagugaauu

SEQ ID NO: 3708 - RNA, 22 nt, Homo sapiens
cucaauuuggaauugucaguaa

SEQ ID NO: 3709 - RNA, 22 nt, Homo sapiens
ugggaugauguuaaacguacuc

SEQ ID NO: 3710 - RNA, 22 nt, Homo sapiens
guaaggcuucuggucaacagca

SEQ ID NO: 3711 - RNA, 22 nt, Homo sapiens
ugcgccauugcacucuagccug

SEQ ID NO: 3712 - RNA, 17 nt, Homo sapiens
augaacucaucguucuu

SEQ ID NO: 3713 - RNA, 22 nt, Homo sapiens
uuaacagcacuacguggggauc

SEQ ID NO: 3714 - RNA, 23 nt, Homo sapiens
ccgugagagaguucauagaaagc

SEQ ID NO: 3715 - RNA, 22 nt, Homo sapiens
uuuguggaaugcccuuauuuau

SEQ ID NO: 3716 - RNA, 22 nt, Homo sapiens
ggacacaucaugugaccaaggu

SEQ ID NO: 3717 - RNA, 22 nt, Homo sapiens
guguaaguccugaguuuggaua

SEQ ID NO: 3718 - RNA, 22 nt, Homo sapiens
ugcuuuguuauauggggauucu

SEQ ID NO: 3719 - RNA, 22 nt, Homo sapiens
uggacuaaagaaacauuccgug

SEQ ID NO: 3720 - RNA, 21 nt, Homo sapiens
uagauaguugguucugaaucu

SEQ ID NO: 3721 - RNA, 22 nt, Homo sapiens
ucacaugugcguuuuggcaugu

SEQ ID NO: 3722 - RNA, 22 nt, Homo sapiens
ugcauacacaagcauacaugua

SEQ ID NO: 3723 - RNA, 22 nt, Homo sapiens
uguguuuuuauguaaaauggaa

SEQ ID NO: 3724 - RNA, 22 nt, Homo sapiens
gaaauguuuuucaugugggcaa

SEQ ID NO: 3725 - RNA, 22 nt, Homo sapiens
gugcacaacgugcagguuuguu

SEQ ID NO: 3726 - RNA, 22 nt, Homo sapiens
augccacugcacuucagccugg

SEQ ID NO: 3727 - RNA, 22 nt, Homo sapiens
ggaauauaaaacuuuugacagg

SEQ ID NO: 3728 - RNA, 22 nt, Homo sapiens
caugcacugagagggucucggc

SEQ ID NO: 3729 - RNA, 23 nt, Homo sapiens
uuguucccuuccacucagucucc

SEQ ID NO: 3730 - RNA, 22 nt, Homo sapiens
uuagcagcaugaaaauggacug

SEQ ID NO: 3731 - RNA, 22 nt, Homo sapiens
uuugguuauuugaaacuagcau

SEQ ID NO: 3732 - RNA, 22 nt, Homo sapiens
ggcaagaagaacuauaacuuuu

SEQ ID NO: 3733 - RNA, 22 nt, Homo sapiens
ucuguacugccaaguuucuuua

SEQ ID NO: 3734 - RNA, 22 nt, Homo sapiens
uugaagguaggaugugcuauca

SEQ ID NO: 3735 - RNA, 22 nt, Homo sapiens
aggcaacgugcauuucuggugu

SEQ ID NO: 3736 - RNA, 22 nt, Homo sapiens
auagugcagugaugaaccuagg

SEQ ID NO: 3737 - RNA, 22 nt, Homo sapiens
gugagcaauugauacuugaagu

SEQ ID NO: 3738 - RNA, 22 nt, Homo sapiens
agcgguguuaggaaggugaggg

SEQ ID NO: 3739 - RNA, 22 nt, Homo sapiens
ugucuagaucugaauguaauug

SEQ ID NO: 3740 - RNA, 22 nt, Homo sapiens
guaugcaagugauaugacauau

SEQ ID NO: 3741 - RNA, 22 nt, Homo sapiens
guaaucucagcuacuugggagg

SEQ ID NO: 3742 - RNA, 22 nt, Homo sapiens
ugagcauauugugauaccuaaa

SEQ ID NO: 3743 - RNA, 22 nt, Homo sapiens
ggagauguuuaaccuuuuaucu

SEQ ID NO: 3744 - RNA, 22 nt, Homo sapiens
uaugggucuuaaaucacuuagu

SEQ ID NO: 3745 - RNA, 19 nt, Homo sapiens
aggacuaaagacuagaagu

SEQ ID NO: 3746 - RNA, 22 nt, Homo sapiens
uucuggcuuuuaaagaaauguu

SEQ ID NO: 3747 - RNA, 20 nt, Homo sapiens
augccacugagcagugguga

SEQ ID NO: 3748 - RNA, 22 nt, Homo sapiens
aaucacaggucuuggcugcaug

SEQ ID NO: 3749 - RNA, 22 nt, Homo sapiens
cacgugcuuucuuuucauuuag

SEQ ID NO: 3750 - RNA, 22 nt, Homo sapiens
uugaauguacuuguucucacua

SEQ ID NO: 3751 - RNA, 22 nt, Homo sapiens
aaacgugcagagaucaauagca

SEQ ID NO: 3752 - RNA, 22 nt, Homo sapiens
uagaguguuuuguuaggcagca

SEQ ID NO: 3753 - RNA, 17 nt, Homo sapiens
ucccuguuuuuucaguc

SEQ ID NO: 3754 - RNA, 22 nt, Homo sapiens
gugagguaauuagcucccuuag

SEQ ID NO: 3755 - RNA, 22 nt, Homo sapiens
gauguguuuccaggauuuguuu

SEQ ID NO: 3756 - RNA, 22 nt, Homo sapiens
ugugcaaucuuccauuuuuagg

SEQ ID NO: 3757 - RNA, 22 nt, Homo sapiens
auaggcacauuaggaacuuuug

SEQ ID NO: 3758 - RNA, 22 nt, Homo sapiens
ucccacugucuucucgugcucg

SEQ ID NO: 3759 - RNA, 22 nt, Homo sapiens
uuucugggggugcugauggaaa

SEQ ID NO: 3760 - RNA, 22 nt, Homo sapiens
uggucccaugaacuuuagguca

SEQ ID NO: 3761 - RNA, 19 nt, Homo sapiens
ucuuugcuuuucuaagagg

SEQ ID NO: 3762 - RNA, 22 nt, Homo sapiens
uaacaaugucuuaugggcuuaa

SEQ ID NO: 3763 - RNA, 22 nt, Homo sapiens
ugcauuguuccgaauguguccu

SEQ ID NO: 3764 - RNA, 22 nt, Homo sapiens
ucacuaaagaaaauggcaugga

SEQ ID NO: 3765 - RNA, 20 nt, Homo sapiens
aagugaguguuaaacugaac

SEQ ID NO: 3766 - RNA, 22 nt, Homo sapiens
auugccuagccuggucucaaaa

SEQ ID NO: 3767 - RNA, 22 nt, Homo sapiens
gacgauaucaaggaaaugaagu

SEQ ID NO: 3768 - RNA, 22 nt, Homo sapiens
guagaccauuuaucuggggagu

SEQ ID NO: 3769 - RNA, 22 nt, Homo sapiens
cuggcaagaggauaaaguccua

SEQ ID NO: 3770 - RNA, 22 nt, Homo sapiens
uuggcaagcuguuaauuauaaa

SEQ ID NO: 3771 - RNA, 21 nt, Homo sapiens
ucuggcccccucaaaucucau

SEQ ID NO: 3772 - RNA, 22 nt, Homo sapiens
agugaacaaagaagugcagaua

SEQ ID NO: 3773 - RNA, 21 nt, Homo sapiens
uggaccccuuucuuacaccgu

SEQ ID NO: 3774 - RNA, 22 nt, Homo sapiens
uaccuaguguugacuucucuuc

SEQ ID NO: 3775 - RNA, 22 nt, Homo sapiens
gucauugcacuccagccuggac

SEQ ID NO: 3776 - RNA, 22 nt, Homo sapiens
cauauaguaggugcucuguguu

SEQ ID NO: 3777 - RNA, 22 nt, Homo sapiens
agcagguauuuaagaaacucag

SEQ ID NO: 3778 - RNA, 22 nt, Homo sapiens
gguuagaaacagguccucagga

SEQ ID NO: 3779 - RNA, 22 nt, Homo sapiens
uugcagugguuucacuggcaaa

SEQ ID NO: 3780 - RNA, 22 nt, Homo sapiens
auggacuuuuuguucagugucu

SEQ ID NO: 3781 - RNA, 22 nt, Homo sapiens
uguccuagagggaugucacccc

SEQ ID NO: 3782 - RNA, 21 nt, Homo sapiens
auuccacuuuuccuucaggga

SEQ ID NO: 3783 - RNA, 22 nt, Homo sapiens
gugagguugaaaauaauggaaa

SEQ ID NO: 3784 - RNA, 18 nt, Homo sapiens
cuuugguccccgcacccu

SEQ ID NO: 3785 - RNA, 22 nt, Homo sapiens
ucaaggcacauuugacauuuuc

SEQ ID NO: 3786 - RNA, 22 nt, Homo sapiens
auuaaguaaugguuccaauaau

SEQ ID NO: 3787 - RNA, 22 nt, Homo sapiens
ucucccauccaugaacuucugu

SEQ ID NO: 3788 - RNA, 22 nt, Homo sapiens
cucaggcacucugauuccagug

SEQ ID NO: 3789 - RNA, 22 nt, Homo sapiens
uugugaaugaugucgcaauaaa

SEQ ID NO: 3790 - RNA, 22 nt, Homo sapiens
ggcgguguugauggcccccaca

SEQ ID NO: 3791 - RNA, 22 nt, Homo sapiens
uggaauuuacuuauuuaggggc

SEQ ID NO: 3792 - RNA, 22 nt, Homo sapiens
uacagucacauuccugaccaua

SEQ ID NO: 3793 - RNA, 22 nt, Homo sapiens
gcagugaugugaucauagcuca

SEQ ID NO: 3794 - RNA, 22 nt, Homo sapiens
ugacagagaagcauugaguuca

SEQ ID NO: 3795 - RNA, 22 nt, Homo sapiens
uccacaguggugaggugcagca

SEQ ID NO: 3796 - RNA, 22 nt, Homo sapiens
uugcauauguugaaccaagcgu

SEQ ID NO: 3797 - RNA, 22 nt, Homo sapiens
agacccuguauguguuuaguuu

SEQ ID NO: 3798 - RNA, 22 nt, Homo sapiens
cucugguuucgcaggaaauaga

SEQ ID NO: 3799 - RNA, 22 nt, Homo sapiens
uccccgaggcuggagugcagug

SEQ ID NO: 3800 - RNA, 22 nt, Homo sapiens
acuacugucagacugccacuga

SEQ ID NO: 3801 - RNA, 22 nt, Homo sapiens
agugccaaaucgagggcucuga

SEQ ID NO: 3802 - RNA, 22 nt, Homo sapiens
ucauauguaugugcaauuuugu

SEQ ID NO: 3803 - RNA, 22 nt, Homo sapiens
uugaauaggcucaugcuuauca

SEQ ID NO: 3804 - RNA, 22 nt, Homo sapiens
uucaugucuuggcuguuagagu

SEQ ID NO: 3805 - RNA, 20 nt, Homo sapiens
gcuaaggcacgggaauuacu

SEQ ID NO: 3806 - RNA, 22 nt, Homo sapiens
gucucauugcaguuagaccugu

SEQ ID NO: 3807 - RNA, 22 nt, Homo sapiens
uuggcuuuuaugcagcuuaggu

SEQ ID NO: 3808 - RNA, 22 nt, Homo sapiens
uugcaccuuaugucuguucucu

SEQ ID NO: 3809 - RNA, 21 nt, Homo sapiens
gugcacaguaguguuuaauag

SEQ ID NO: 3810 - RNA, 22 nt, Homo sapiens
ucccaguuuuucugaauaguca

SEQ ID NO: 3811 - RNA, 22 nt, Homo sapiens
uccugauacgguugcaguucuc

SEQ ID NO: 3812 - RNA, 22 nt, Homo sapiens
uagaccauucuauuuccuaugc

SEQ ID NO: 3813 - RNA, 22 nt, Homo sapiens
augacuauugcacuuuccuggu

SEQ ID NO: 3814 - RNA, 22 nt, Homo sapiens
guaauacuuuugggauauuaga

SEQ ID NO: 3815 - RNA, 22 nt, Homo sapiens
uugguccccuucaaccagcugu

SEQ ID NO: 3816 - RNA, 22 nt, Homo sapiens
ugucacguugcuuuucuguugu

SEQ ID NO: 3817 - RNA, 22 nt, Homo sapiens
cagugucugcauuuggaacuca

SEQ ID NO: 3818 - RNA, 21 nt, Homo sapiens
gaauggcaccauuagcauaua

SEQ ID NO: 3819 - RNA, 22 nt, Homo sapiens
ggugauauguugagguuuuggg

SEQ ID NO: 3820 - RNA, 22 nt, Homo sapiens
cuaggugcaugagccguacagu

SEQ ID NO: 3821 - RNA, 22 nt, Homo sapiens
ucguggccugugaguccucccc

SEQ ID NO: 3822 - RNA, 22 nt, Homo sapiens
uugguaaaaugaccacagacau

SEQ ID NO: 3823 - RNA, 18 nt, Homo sapiens
ugcauauguugaaccagc

SEQ ID NO: 3824 - RNA, 20 nt, Homo sapiens
aucucugggcaaaggaaaau

SEQ ID NO: 3825 - RNA, 22 nt, Homo sapiens
ugagacgucuucucuucuucaa

SEQ ID NO: 3826 - RNA, 22 nt, Homo sapiens
auugugauugcugcuaggccua

SEQ ID NO: 3827 - RNA, 22 nt, Homo sapiens
uaguucauuauguguugcucag

SEQ ID NO: 3828 - RNA, 22 nt, Homo sapiens
aggcagaugagguccucagcug

SEQ ID NO: 3829 - RNA, 22 nt, Homo sapiens
augaaaacaugauuugccuguu

SEQ ID NO: 3830 - RNA, 22 nt, Homo sapiens
gugcuaggugcuaggaagauag

SEQ ID NO: 3831 - RNA, 22 nt, Homo sapiens
aaugucaugaguccaaccagaa

SEQ ID NO: 3832 - RNA, 22 nt, Homo sapiens
gucagugucuuugcagcucaga

SEQ ID NO: 3833 - RNA, 22 nt, Homo sapiens
ucaagcaauucuccugccucag

SEQ ID NO: 3834 - RNA, 22 nt, Homo sapiens
gcuuuguugauggugagucugu

SEQ ID NO: 3835 - RNA, 21 nt, Homo sapiens
uuuguccaccuguguucacca

SEQ ID NO: 3836 - RNA, 22 nt, Homo sapiens
augauguccacagggguguuca

SEQ ID NO: 3837 - RNA, 22 nt, Homo sapiens
uuaagugguagguggugcccaa

SEQ ID NO: 3838 - RNA, 22 nt, Homo sapiens
acucagagugggccccuagaua

SEQ ID NO: 3839 - RNA, 22 nt, Homo sapiens
uuuguaauaccugaggcugggu

SEQ ID NO: 3840 - RNA, 21 nt, Homo sapiens
cuuugguuucugacuugcaua

SEQ ID NO: 3841 - RNA, 22 nt, Homo sapiens
uaagugacuuugagauuccuca

SEQ ID NO: 3842 - RNA, 22 nt, Homo sapiens
uggcaugaaguguguuuuaucu

SEQ ID NO: 3843 - RNA, 22 nt, Homo sapiens
cuguacucaucccauaugcacu

SEQ ID NO: 3844 - RNA, 22 nt, Homo sapiens
aaggaguauugaaugaccaagu

SEQ ID NO: 3845 - RNA, 22 nt, Homo sapiens
ugcauggaggagcuccccgcag

SEQ ID NO: 3846 - RNA, 22 nt, Homo sapiens
guagaugcauggauuuacuucu

SEQ ID NO: 3847 - RNA, 22 nt, Homo sapiens
cagaucaucuugagcuuaggaa

SEQ ID NO: 3848 - RNA, 22 nt, Homo sapiens
cuuagcaaugucguguacucac

SEQ ID NO: 3849 - RNA, 22 nt, Homo sapiens
uggugagaaacuagauauuuuu

SEQ ID NO: 3850 - RNA, 22 nt, Homo sapiens
ggaguguaauggcgccaucuca

SEQ ID NO: 3851 - RNA, 22 nt, Homo sapiens
uucacugcauuucagccugggc

SEQ ID NO: 3852 - RNA, 22 nt, Homo sapiens
cucuuuuguuccuaguuugauc

SEQ ID NO: 3853 - RNA, 16 nt, Homo sapiens
ugagaacaugugacau

SEQ ID NO: 3854 - RNA, 19 nt, Homo sapiens
uuacacaaccuaguggggc

SEQ ID NO: 3855 - RNA, 22 nt, Homo sapiens
aaauugcaaugcgaggcagagg

SEQ ID NO: 3856 - RNA, 20 nt, Homo sapiens
uucagcaaaggaaugggagu

SEQ ID NO: 3857 - RNA, 22 nt, Homo sapiens
guggcaugaaagcaucugugau

SEQ ID NO: 3858 - RNA, 22 nt, Homo sapiens
ugucauagauugcuuggaaaaa

SEQ ID NO: 3859 - RNA, 21 nt, Homo sapiens
uaauggcaugaucucggcuca

SEQ ID NO: 3860 - RNA, 22 nt, Homo sapiens
auaaguaguaaagcagugacua

SEQ ID NO: 3861 - RNA, 22 nt, Homo sapiens
ugucaucuagguauuaagcccc

SEQ ID NO: 3862 - RNA, 22 nt, Homo sapiens
uuuacugugggguuucuuagag

SEQ ID NO: 3863 - RNA, 22 nt, Homo sapiens
ugcugcacuuauggcucugagg

SEQ ID NO: 3864 - RNA, 22 nt, Homo sapiens
gaggaaguagcuacugucuuuc

SEQ ID NO: 3865 - RNA, 22 nt, Homo sapiens
accccugagaucgaaucaugcu

SEQ ID NO: 3866 - RNA, 22 nt, Homo sapiens
cuguuugauuaagugguggaaa

SEQ ID NO: 3867 - RNA, 22 nt, Homo sapiens
uaucugcaucccauuuuuauca

SEQ ID NO: 3868 - RNA, 22 nt, Homo sapiens
auagaagcugccaacguuucag

SEQ ID NO: 3869 - RNA, 22 nt, Homo sapiens
uuaugccagugauuauaagggc

SEQ ID NO: 3870 - RNA, 22 nt, Homo sapiens
auaacagcauuauugcauacgu

SEQ ID NO: 3871 - RNA, 22 nt, Homo sapiens
ccagaguucuaggcauuggaaa

SEQ ID NO: 3872 - RNA, 22 nt, Homo sapiens
auuccauagugucuguggcaga

SEQ ID NO: 3873 - RNA, 22 nt, Homo sapiens
uuaaagugcacacgggucaggc

SEQ ID NO: 3874 - RNA, 22 nt, Homo sapiens
augugacagugguuuuaagcgu

SEQ ID NO: 3875 - RNA, 22 nt, Homo sapiens
aaagggcuuuguaaacuucaag

SEQ ID NO: 3876 - RNA, 22 nt, Homo sapiens
cucaugcugucuucugggguaa

SEQ ID NO: 3877 - RNA, 22 nt, Homo sapiens
ucuuggguuuguccuucuccua

SEQ ID NO: 3878 - RNA, 22 nt, Homo sapiens
uaaggaguagaauaguaaggca

SEQ ID NO: 3879 - RNA, 20 nt, Homo sapiens
gacauagagacucucaaaaa

SEQ ID NO: 3880 - RNA, 22 nt, Homo sapiens
cccacaguggccucauauccuu

SEQ ID NO: 3881 - RNA, 22 nt, Homo sapiens
guagcagcaauuuacuccauac

SEQ ID NO: 3882 - RNA, 22 nt, Homo sapiens
ugauuuguccauguggcacgug

SEQ ID NO: 3883 - RNA, 22 nt, Homo sapiens
ggcaaaauauugucugguauag

SEQ ID NO: 3884 - RNA, 22 nt, Homo sapiens
gagaaccauuuggagaaaaagu

SEQ ID NO: 3885 - RNA, 22 nt, Homo sapiens
uugaggacugcuaagcauuuga

SEQ ID NO: 3886 - RNA, 22 nt, Homo sapiens
ucaccucgugaucugcccacuu

SEQ ID NO: 3887 - RNA, 21 nt, Homo sapiens
ugcagugugguugcccugcug

SEQ ID NO: 3888 - RNA, 22 nt, Homo sapiens
gugucaugagggggacaggaag

SEQ ID NO: 3889 - RNA, 22 nt, Homo sapiens
gucaccauugagucauuuccuc

SEQ ID NO: 3890 - RNA, 22 nt, Homo sapiens
uuuaauagcagggacuuccggg

SEQ ID NO: 3891 - RNA, 22 nt, Homo sapiens
ugaguagaacuagucuagagcu

SEQ ID NO: 3892 - RNA, 22 nt, Homo sapiens
gugcacaugguagguauugagu

SEQ ID NO: 3893 - RNA, 22 nt, Homo sapiens
ugacuauaggauaacaugcauu

SEQ ID NO: 3894 - RNA, 22 nt, Homo sapiens
auagcacuuauagauuuggucu

SEQ ID NO: 3895 - RNA, 22 nt, Homo sapiens
gaagguaguuuauagauguggu

SEQ ID NO: 3896 - RNA, 22 nt, Homo sapiens
guuuaggaaugagaauauuuag

SEQ ID NO: 3897 - RNA, 22 nt, Homo sapiens
ucuuuugggccucuugucagac

SEQ ID NO: 3898 - RNA, 22 nt, Homo sapiens
guguauguuguccauggaugcg

SEQ ID NO: 3899 - RNA, 23 nt, Homo sapiens
aaauuugccuauuauuccuaugg

SEQ ID NO: 3900 - RNA, 22 nt, Homo sapiens
uggcauuuugugugaauuagaa

SEQ ID NO: 3901 - RNA, 22 nt, Homo sapiens
gcuggugaaggcugaaaagugg

SEQ ID NO: 3902 - RNA, 22 nt, Homo sapiens
ccauggcuauucuguaaggguu

SEQ ID NO: 3903 - RNA, 22 nt, Homo sapiens
ugcuggcguuacucuccaucag

SEQ ID NO: 3904 - RNA, 21 nt, Homo sapiens
guccaaaacaguguccaaugc

SEQ ID NO: 3905 - RNA, 22 nt, Homo sapiens
uaggugguuugaaauacucaag

SEQ ID NO: 3906 - RNA, 22 nt, Homo sapiens
uucauaguucuuuuagucauua

SEQ ID NO: 3907 - RNA, 22 nt, Homo sapiens
cuugcacuagugcagaggcgcu

SEQ ID NO: 3908 - RNA, 22 nt, Homo sapiens
uccccugauaccaaccaccaug

SEQ ID NO: 3909 - RNA, 22 nt, Homo sapiens
augugaacaucauagaaugcac

SEQ ID NO: 3910 - RNA, 22 nt, Homo sapiens
uuccugagagggcugggugcag

SEQ ID NO: 3911 - RNA, 22 nt, Homo sapiens
cuauucacaauagccaagauuu

SEQ ID NO: 3912 - RNA, 22 nt, Homo sapiens
uugaacuguaagggucugugug

SEQ ID NO: 3913 - RNA, 22 nt, Homo sapiens
ucucaaccuccacacuacaaua

SEQ ID NO: 3914 - RNA, 22 nt, Homo sapiens
cuccagugcaaagucaugauca

SEQ ID NO: 3915 - RNA, 22 nt, Homo sapiens
gugacgucauuguuccuggcuc

SEQ ID NO: 3916 - RNA, 20 nt, Homo sapiens
cucagguauuugaggcugca

SEQ ID NO: 3917 - RNA, 22 nt, Homo sapiens
gggauauguagauuuuuaucuu

SEQ ID NO: 3918 - RNA, 22 nt, Homo sapiens
ucaugugagcacagagcaagau

SEQ ID NO: 3919 - RNA, 22 nt, Homo sapiens
ugauggcacagugaguuccagg

SEQ ID NO: 3920 - RNA, 23 nt, Homo sapiens
uucaguauugaaugauggcgcug

SEQ ID NO: 3921 - RNA, 22 nt, Homo sapiens
guaucacacuuauugaccugca

SEQ ID NO: 3922 - RNA, 22 nt, Homo sapiens
uagagguaggucuucgagucuc

SEQ ID NO: 3923 - RNA, 23 nt, Homo sapiens
cuccaugagccguccagggccug

SEQ ID NO: 3924 - RNA, 22 nt, Homo sapiens
aaucacacuugauguugagcaa

SEQ ID NO: 3925 - RNA, 22 nt, Homo sapiens
auggcacuaaugggaguuuacu

SEQ ID NO: 3926 - RNA, 22 nt, Homo sapiens
gaauagugcugcaauaaacaua

SEQ ID NO: 3927 - RNA, 22 nt, Homo sapiens
ggaguguaguggcuccaucucg

SEQ ID NO: 3928 - RNA, 22 nt, Homo sapiens
uagggcaaggaacaguuaaaaa

SEQ ID NO: 3929 - RNA, 22 nt, Homo sapiens
ugagauguugcucugaaacaag

SEQ ID NO: 3930 - RNA, 22 nt, Homo sapiens
auguaguauuaaugagagauaa

SEQ ID NO: 3931 - RNA, 22 nt, Homo sapiens
gaacuguuucuggugaaagagu

SEQ ID NO: 3932 - RNA, 22 nt, Homo sapiens
uggcaacuugcaaccucauucu

SEQ ID NO: 3933 - RNA, 22 nt, Homo sapiens
ugagccauggcaccuugucuaa

SEQ ID NO: 3934 - RNA, 22 nt, Homo sapiens
uucuucaguuacaacaaggggg

SEQ ID NO: 3935 - RNA, 22 nt, Homo sapiens
uccaagaugcuggcagcuacag

SEQ ID NO: 3936 - RNA, 22 nt, Homo sapiens
ggcaagugucagcagcaacacc

SEQ ID NO: 3937 - RNA, 22 nt, Homo sapiens
ugugcuauguuauucacauggg

SEQ ID NO: 3938 - RNA, 22 nt, Homo sapiens
gugagauggagucuugcuuugu

SEQ ID NO: 3939 - RNA, 22 nt, Homo sapiens
uuugcuuaguaaauguagaaaa

SEQ ID NO: 3940 - RNA, 22 nt, Homo sapiens
ugaauacugugcaaaggauuug

SEQ ID NO: 3941 - RNA, 22 nt, Homo sapiens
gaauucugucgcuuacuagaug

SEQ ID NO: 3942 - RNA, 20 nt, Homo sapiens
aagcauggguuuuaggguca

SEQ ID NO: 3943 - RNA, 21 nt, Homo sapiens
gaguggcuuuuguuucaccag

SEQ ID NO: 3944 - RNA, 22 nt, Homo sapiens
uacccgucuacuuugaacaaaa

SEQ ID NO: 3945 - RNA, 22 nt, Homo sapiens
gcuggugacuuuaaguugaagc

SEQ ID NO: 3946 - RNA, 22 nt, Homo sapiens
uugacuguaagauggcuauuac

SEQ ID NO: 3947 - RNA, 22 nt, Homo sapiens
cugauguagguggucugugauc

SEQ ID NO: 3948 - RNA, 22 nt, Homo sapiens
gugguucuaaaccuuuuuuggu

SEQ ID NO: 3949 - RNA, 22 nt, Homo sapiens
agagaacuggcuucaccauucu

SEQ ID NO: 3950 - RNA, 22 nt, Homo sapiens
uauugcucaugcauuuaauuuc

SEQ ID NO: 3951 - RNA, 22 nt, Homo sapiens
ucccugagguccuggauuauug

SEQ ID NO: 3952 - RNA, 22 nt, Homo sapiens
ucacuggcaaauauauccguug

SEQ ID NO: 3953 - RNA, 22 nt, Homo sapiens
guugcucaggcugaagugcagu

SEQ ID NO: 3954 - RNA, 22 nt, Homo sapiens
gugauauuuagggggccgggau

SEQ ID NO: 3955 - RNA, 22 nt, Homo sapiens
uauagcagugugagaacagacu

SEQ ID NO: 3956 - RNA, 22 nt, Homo sapiens
ucuuuggucaucaugggaagca

SEQ ID NO: 3957 - RNA, 22 nt, Homo sapiens
aagugauguuauugggugacuc

SEQ ID NO: 3958 - RNA, 22 nt, Homo sapiens
ugggauguagccuucuauuuuc

SEQ ID NO: 3959 - RNA, 22 nt, Homo sapiens
guacaguacugaaugaauguau

SEQ ID NO: 3960 - RNA, 22 nt, Homo sapiens
uuucugaggccucaccagaagc

SEQ ID NO: 3961 - RNA, 20 nt, Homo sapiens
uugugcauugggccauuggg

SEQ ID NO: 3962 - RNA, 22 nt, Homo sapiens
ucuaaggcaccuagagucauca

SEQ ID NO: 3963 - RNA, 22 nt, Homo sapiens
gucccaguggaaccuccaagcu

SEQ ID NO: 3964 - RNA, 22 nt, Homo sapiens
ucacccugacaugcggccgaac

SEQ ID NO: 3965 - RNA, 22 nt, Homo sapiens
ucaugaccaugguauagaccac

SEQ ID NO: 3966 - RNA, 22 nt, Homo sapiens
uuuagguaauauuaaguagcug

SEQ ID NO: 3967 - RNA, 22 nt, Homo sapiens
gcacaguguuacuugauauauu

SEQ ID NO: 3968 - RNA, 22 nt, Homo sapiens
ggcaagaaagaaaucaucuguc

SEQ ID NO: 3969 - RNA, 22 nt, Homo sapiens
aguuggugauugauugggucug

SEQ ID NO: 3970 - RNA, 22 nt, Homo sapiens
cuguaacagaauaaauuuguuu

SEQ ID NO: 3971 - RNA, 16 nt, Homo sapiens
uugaggcaugucucag

SEQ ID NO: 3972 - RNA, 22 nt, Homo sapiens
uggaauguaacuugaaacuuuu

SEQ ID NO: 3973 - RNA, 22 nt, Homo sapiens
acagcagugccccacucuacug

SEQ ID NO: 3974 - RNA, 20 nt, Homo sapiens
ucaaauucuuggccuccagc

SEQ ID NO: 3975 - RNA, 20 nt, Homo sapiens
auagcauugauggacucaaa

SEQ ID NO: 3976 - RNA, 22 nt, Homo sapiens
uugcagcaacauggaugaaacu

SEQ ID NO: 3977 - RNA, 22 nt, Homo sapiens
auuggcuauuuggugagugauu

SEQ ID NO: 3978 - RNA, 23 nt, Homo sapiens
auugauagugccuuugugcuaau

SEQ ID NO: 3979 - RNA, 22 nt, Homo sapiens
uaauauguauacagacagauac

SEQ ID NO: 3980 - RNA, 19 nt, Homo sapiens
ucuguaguuagggcuacag

SEQ ID NO: 3981 - RNA, 22 nt, Homo sapiens
ugcaacacauugccccugcucu

SEQ ID NO: 3982 - RNA, 22 nt, Homo sapiens
cuaagguaggagaaucacucaa

SEQ ID NO: 3983 - RNA, 22 nt, Homo sapiens
aaugcuaucuggaacauuguug

SEQ ID NO: 3984 - RNA, 21 nt, Homo sapiens
uggauuguacacccuaucauu

SEQ ID NO: 3985 - RNA, 22 nt, Homo sapiens
auggacucauugaauuaagucc

SEQ ID NO: 3986 - RNA, 22 nt, Homo sapiens
ucagaucauauucuucgcugcu

SEQ ID NO: 3987 - RNA, 17 nt, Homo sapiens
agugagaucauggcuua

SEQ ID NO: 3988 - RNA, 22 nt, Homo sapiens
aggaacuguaacuaugucucug

SEQ ID NO: 3989 - RNA, 22 nt, Homo sapiens
uaccugagacaacuuugaggaa

SEQ ID NO: 3990 - RNA, 22 nt, Homo sapiens
ugagauguaaucucgcucuguc

SEQ ID NO: 3991 - RNA, 22 nt, Homo sapiens
uuuggcuuaagauugacugcaa

SEQ ID NO: 3992 - RNA, 22 nt, Homo sapiens
ucaggguacuuguggccaaagu

SEQ ID NO: 3993 - RNA, 22 nt, Homo sapiens
gauuagugacguugagcacugu

SEQ ID NO: 3994 - RNA, 18 nt, Homo sapiens
gggaauauggggaguuga

SEQ ID NO: 3995 - RNA, 22 nt, Homo sapiens
gagguaaguggauuaugagguc

SEQ ID NO: 3996 - RNA, 22 nt, Homo sapiens
cucgagagaaaaugcuucacug

SEQ ID NO: 3997 - RNA, 22 nt, Homo sapiens
augacaguaugacuccaaaagu

SEQ ID NO: 3998 - RNA, 22 nt, Homo sapiens
gucugcaugucauaugauagua

SEQ ID NO: 3999 - RNA, 22 nt, Homo sapiens
ucagcaccauguaacaauugau

SEQ ID NO: 4000 - RNA, 22 nt, Homo sapiens
cauggcccugggcugggcgaac

SEQ ID NO: 4001 - RNA, 22 nt, Homo sapiens
agguuuucagccccagccuagg

SEQ ID NO: 4002 - RNA, 22 nt, Homo sapiens
ccaucccuuucugagcaguucc

SEQ ID NO: 4003 - RNA, 22 nt, Homo sapiens
ggcaacaauuccuacuucuuuu

SEQ ID NO: 4004 - RNA, 22 nt, Homo sapiens
gagguagugagcagcugaacua

SEQ ID NO: 4005 - RNA, 22 nt, Homo sapiens
ucaguaaucuuagcugugcaga

SEQ ID NO: 4006 - RNA, 22 nt, Homo sapiens
acuggacuuaaugaugaauugu

SEQ ID NO: 4007 - RNA, 22 nt, Homo sapiens
ucuuugaguuauugugcagacu

SEQ ID NO: 4008 - RNA, 22 nt, Homo sapiens
ucuuucacuuagcaugauguuu

SEQ ID NO: 4009 - RNA, 22 nt, Homo sapiens
cuaaaguucuucugagagaaca

SEQ ID NO: 4010 - RNA, 22 nt, Homo sapiens
auggacauuaaagcgauguaga

SEQ ID NO: 4011 - RNA, 22 nt, Homo sapiens
auacaugugccauguugguuug

SEQ ID NO: 4012 - RNA, 22 nt, Homo sapiens
aucuaaucaucgcaaccuucaa

SEQ ID NO: 4013 - RNA, 22 nt, Homo sapiens
acugcauuugguaaagucaaga

SEQ ID NO: 4014 - RNA, 22 nt, Homo sapiens
auggcaucgucaccuuuucagu

SEQ ID NO: 4015 - RNA, 15 nt, Homo sapiens
auuucacuuagcaug

SEQ ID NO: 4016 - RNA, 22 nt, Homo sapiens
ugaauagacacuaaagacugua

SEQ ID NO: 4017 - RNA, 19 nt, Homo sapiens
uggguaguuuucuggcugg

SEQ ID NO: 4018 - RNA, 22 nt, Homo sapiens
uucucagcccccugacagucag

SEQ ID NO: 4019 - RNA, 22 nt, Homo sapiens
guuauggaguauaugugaacug

SEQ ID NO: 4020 - RNA, 23 nt, Homo sapiens
ugagcaauauucuacuauugagu

SEQ ID NO: 4021 - RNA, 22 nt, Homo sapiens
cucugagccugagguuccuacu

SEQ ID NO: 4022 - RNA, 22 nt, Homo sapiens
agugggccccuagaggugaggu

SEQ ID NO: 4023 - RNA, 21 nt, Homo sapiens
uggaaucuauagaggcaguag

SEQ ID NO: 4024 - RNA, 22 nt, Homo sapiens
agagauuauccuggcuucucug

SEQ ID NO: 4025 - RNA, 22 nt, Homo sapiens
agcuucacaaugcagagggcag

SEQ ID NO: 4026 - RNA, 22 nt, Homo sapiens
aagagugcucgugggacucagc

SEQ ID NO: 4027 - RNA, 22 nt, Homo sapiens
auggccuuuacaauuugguaug

SEQ ID NO: 4028 - RNA, 22 nt, Homo sapiens
auuccacuuccacuaguuucuc

SEQ ID NO: 4029 - RNA, 21 nt, Homo sapiens
uauaugacuuacuauugccuc

SEQ ID NO: 4030 - RNA, 22 nt, Homo sapiens
uuucccagugguacaguuuaua

SEQ ID NO: 4031 - RNA, 22 nt, Homo sapiens
uucacacugggccuacucugug

SEQ ID NO: 4032 - RNA, 22 nt, Homo sapiens
ugucagcacaacucagguuccu

SEQ ID NO: 4033 - RNA, 22 nt, Homo sapiens
ccuggcacugggccccguggcu

SEQ ID NO: 4034 - RNA, 22 nt, Homo sapiens
uuaccuguguuuugggcccaga

SEQ ID NO: 4035 - RNA, 22 nt, Homo sapiens
uuaucagcagcaugaaacugga

SEQ ID NO: 4036 - RNA, 22 nt, Homo sapiens
uauggccacugucuuugaguca

SEQ ID NO: 4037 - RNA, 22 nt, Homo sapiens
gugacuaagauucuuugauaug

SEQ ID NO: 4038 - RNA, 22 nt, Homo sapiens
acaguggaauguaggguuugag

SEQ ID NO: 4039 - RNA, 22 nt, Homo sapiens
ucuguaacauccaccuucuggg

SEQ ID NO: 4040 - RNA, 22 nt, Homo sapiens
uaguugcaucuuaggucuguga

SEQ ID NO: 4041 - RNA, 22 nt, Homo sapiens
gggaguagagaguuucucugac

SEQ ID NO: 4042 - RNA, 20 nt, Homo sapiens
gcaaauggaucccacaagcc

SEQ ID NO: 4043 - RNA, 22 nt, Homo sapiens
ccugcauaguucaccgcugaua

SEQ ID NO: 4044 - RNA, 22 nt, Homo sapiens
auauuguuggcugcuggcugau

SEQ ID NO: 4045 - RNA, 22 nt, Homo sapiens
ugagaugaagucuugcucuguu

SEQ ID NO: 4046 - RNA, 22 nt, Homo sapiens
agaauguuuuagaccaauacaa

SEQ ID NO: 4047 - RNA, 22 nt, Homo sapiens
aacugguauugaauuuaggaag

SEQ ID NO: 4048 - RNA, 20 nt, Homo sapiens
uggaaguaagaauauaggug

SEQ ID NO: 4049 - RNA, 22 nt, Homo sapiens
uuugagcaggcuaaucaauaua

SEQ ID NO: 4050 - RNA, 19 nt, Homo sapiens
uaugggauuuuuagggugu

SEQ ID NO: 4051 - RNA, 22 nt, Homo sapiens
agcagugugaaaauggacuaau

SEQ ID NO: 4052 - RNA, 22 nt, Homo sapiens
gagugcaauggcaagaucuugg

SEQ ID NO: 4053 - RNA, 22 nt, Homo sapiens
caagugcuacagagaaaucuuu

SEQ ID NO: 4054 - RNA, 22 nt, Homo sapiens
cauugggugagaacaugcuccu

SEQ ID NO: 4055 - RNA, 22 nt, Homo sapiens
aaggcuagagaagaagggcauc

SEQ ID NO: 4056 - RNA, 22 nt, Homo sapiens
ucacaugaauugucuuguucca

SEQ ID NO: 4057 - RNA, 18 nt, Homo sapiens
cccgggugggcuguuccc

SEQ ID NO: 4058 - RNA, 22 nt, Homo sapiens
ucaguggacuuagucuuucccc

SEQ ID NO: 4059 - RNA, 22 nt, Homo sapiens
ggacuagggacauggggagcug

SEQ ID NO: 4060 - RNA, 23 nt, Homo sapiens
agucuguguuuacaggcucucug

SEQ ID NO: 4061 - RNA, 22 nt, Homo sapiens
ucaggugcaguggcucaugcuu

SEQ ID NO: 4062 - RNA, 22 nt, Homo sapiens
gauaguugugagaacucuuacu

SEQ ID NO: 4063 - RNA, 22 nt, Homo sapiens
uucacuggagcccaggaguugg

SEQ ID NO: 4064 - RNA, 20 nt, Homo sapiens
uggaaaguaagucaugauau

SEQ ID NO: 4065 - RNA, 22 nt, Homo sapiens
ugucaugaaauauguuuuucua

SEQ ID NO: 4066 - RNA, 22 nt, Homo sapiens
uggcauguaaugcagaaguugc

SEQ ID NO: 4067 - RNA, 22 nt, Homo sapiens
auaaaagcaggucuaggucagg

SEQ ID NO: 4068 - RNA, 22 nt, Homo sapiens
uugguaugaaaaggaauuagac

SEQ ID NO: 4069 - RNA, 22 nt, Homo sapiens
gggcgagaaucggcugcucagc

SEQ ID NO: 4070 - RNA, 22 nt, Homo sapiens
uaacuucaucauaagucaagaa

SEQ ID NO: 4071 - RNA, 22 nt, Homo sapiens
cuauggcucugguuauggcugu

SEQ ID NO: 4072 - RNA, 22 nt, Homo sapiens
uaccacccuuuuuccagaagcc

SEQ ID NO: 4073 - RNA, 19 nt, Homo sapiens
uagagguuuaagaaaagaa

SEQ ID NO: 4074 - RNA, 22 nt, Homo sapiens
agagaacugauuggaugugggc

SEQ ID NO: 4075 - RNA, 22 nt, Homo sapiens
ucauacuguuaaaugguuuagu

SEQ ID NO: 4076 - RNA, 22 nt, Homo sapiens
caguguaugcuucuauuuuugg

SEQ ID NO: 4077 - RNA, 22 nt, Homo sapiens
ccugugguuaaccagcuagaug

SEQ ID NO: 4078 - RNA, 22 nt, Homo sapiens
acaccuguggucccaguaacuu

SEQ ID NO: 4079 - RNA, 18 nt, Homo sapiens
uucauaguagcaugauuu

SEQ ID NO: 4080 - RNA, 22 nt, Homo sapiens
uuuugguuuuauccagggucuc

SEQ ID NO: 4081 - RNA, 22 nt, Homo sapiens
ucaccagugucagggaacugcu

SEQ ID NO: 4082 - RNA, 22 nt, Homo sapiens
cuaaaguauugagugguaaaga

SEQ ID NO: 4083 - RNA, 17 nt, Homo sapiens
aaguggcuuguucacca

SEQ ID NO: 4084 - RNA, 23 nt, Homo sapiens
auagagcuaggaugcagacagau

SEQ ID NO: 4085 - RNA, 22 nt, Homo sapiens
cacugggugccauauguuugcu

SEQ ID NO: 4086 - RNA, 21 nt, Homo sapiens
cucauauugcuuuuccauggu

SEQ ID NO: 4087 - RNA, 22 nt, Homo sapiens
acugcacuccagccuaggcgac

SEQ ID NO: 4088 - RNA, 22 nt, Homo sapiens
cuagauuguuuccauaaugaca

SEQ ID NO: 4089 - RNA, 22 nt, Homo sapiens
augcacuguuguuauuggauaa

SEQ ID NO: 4090 - RNA, 22 nt, Homo sapiens
agugccuauugauggaaagaua

SEQ ID NO: 4091 - RNA, 22 nt, Homo sapiens
aggcaaguugcucaaaugcaaa

SEQ ID NO: 4092 - RNA, 22 nt, Homo sapiens
aauugcacuggaaguaacugag

SEQ ID NO: 4093 - RNA, 22 nt, Homo sapiens
gaccccuagagauaggaggaac

SEQ ID NO: 4094 - RNA, 22 nt, Homo sapiens
uuuuaagcuacaagagacauau

SEQ ID NO: 4095 - RNA, 22 nt, Homo sapiens
aauaagaaguggaagggaccgg

SEQ ID NO: 4096 - RNA, 22 nt, Homo sapiens
ccuucuuuuguaaggcugaaua

SEQ ID NO: 4097 - RNA, 22 nt, Homo sapiens
acagaccuauuucaaucauuua

SEQ ID NO: 4098 - RNA, 21 nt, Homo sapiens
uggcuauuucuguggcauaca

SEQ ID NO: 4099 - RNA, 22 nt, Homo sapiens
uucuacaugggucgucggugag

SEQ ID NO: 4100 - RNA, 20 nt, Homo sapiens
ugcagcacgggcccuuucca

SEQ ID NO: 4101 - RNA, 22 nt, Homo sapiens
ucacaauggcugaacuaauuua

SEQ ID NO: 4102 - RNA, 22 nt, Homo sapiens
uagcagucucagaaugcauggu

SEQ ID NO: 4103 - RNA, 22 nt, Homo sapiens
guuugugguuaaagccuuucau

SEQ ID NO: 4104 - RNA, 23 nt, Homo sapiens
ggaguguaaugacucgaucucgg

SEQ ID NO: 4105 - RNA, 22 nt, Homo sapiens
ugagaugagggaagccuaggca

SEQ ID NO: 4106 - RNA, 22 nt, Homo sapiens
auguuugguagugaauauggua

SEQ ID NO: 4107 - RNA, 20 nt, Homo sapiens
uaagugcuuuauauugauua

SEQ ID NO: 4108 - RNA, 23 nt, Homo sapiens
gaaaugucuuagugaaauugcuu

SEQ ID NO: 4109 - RNA, 22 nt, Homo sapiens
uaucagugaaucuuauuuugcc

SEQ ID NO: 4110 - RNA, 22 nt, Homo sapiens
ugcaagacacuguccugggcau

SEQ ID NO: 4111 - RNA, 20 nt, Homo sapiens
cagugcacuuucccacuggu

SEQ ID NO: 4112 - RNA, 22 nt, Homo sapiens
auuggaguuguacgcacgcuca

SEQ ID NO: 4113 - RNA, 22 nt, Homo sapiens
cauuuugcaguuucugucucca

SEQ ID NO: 4114 - RNA, 22 nt, Homo sapiens
acuaaggcacaauuuucucaua

SEQ ID NO: 4115 - RNA, 22 nt, Homo sapiens
ucucuguuuauuuuugguguau

SEQ ID NO: 4116 - RNA, 18 nt, Homo sapiens
ugcaccaguuuacacuuc

SEQ ID NO: 4117 - RNA, 22 nt, Homo sapiens
uucugugguugaaaggagagau

SEQ ID NO: 4118 - RNA, 22 nt, Homo sapiens
cucuuuggaugccuuaggguua

SEQ ID NO: 4119 - RNA, 22 nt, Homo sapiens
auggucccuguuccaugcuccu

SEQ ID NO: 4120 - RNA, 22 nt, Homo sapiens
augaaugcacugcggguggaug

SEQ ID NO: 4121 - RNA, 22 nt, Homo sapiens
uuguaacaguucugcgagcagc

SEQ ID NO: 4122 - RNA, 22 nt, Homo sapiens
gugucacuguauaauauuuauu

SEQ ID NO: 4123 - RNA, 22 nt, Homo sapiens
uauagcaguguaagaaucgagu

SEQ ID NO: 4124 - RNA, 22 nt, Homo sapiens
acugcacuccagccugcugaca

SEQ ID NO: 4125 - RNA, 22 nt, Homo sapiens
acugcacuucagccuguugaca

SEQ ID NO: 4126 - RNA, 22 nt, Homo sapiens
ugaacagcaccuccuagaguug

SEQ ID NO: 4127 - RNA, 20 nt, Homo sapiens
ugauaaguugcacuuuccuu

SEQ ID NO: 4128 - RNA, 22 nt, Homo sapiens
augagauauuuuauaagaucau

SEQ ID NO: 4129 - RNA, 22 nt, Homo sapiens
uagaauguaacaguuaaaagca

SEQ ID NO: 4130 - RNA, 22 nt, Homo sapiens
gggucaguuuugagaaagcgug

SEQ ID NO: 4131 - RNA, 22 nt, Homo sapiens
cacuguggauggaacuauguga

SEQ ID NO: 4132 - RNA, 22 nt, Homo sapiens
uuguccuggagguucuugcaag

SEQ ID NO: 4133 - RNA, 22 nt, Homo sapiens
ggugagauguucagacgaacug

SEQ ID NO: 4134 - RNA, 22 nt, Homo sapiens
uggcacaaugacccuugugggc

SEQ ID NO: 4135 - RNA, 22 nt, Homo sapiens
augccaagaugagcacgcgucu

SEQ ID NO: 4136 - RNA, 18 nt, Homo sapiens
uagcaugaugcugagugc

SEQ ID NO: 4137 - RNA, 20 nt, Homo sapiens
uggaguuguggcaguuugga

SEQ ID NO: 4138 - RNA, 22 nt, Homo sapiens
auggaacugaagugcugcccuu

SEQ ID NO: 4139 - RNA, 22 nt, Homo sapiens
guauacuucugaaaauagcuau

SEQ ID NO: 4140 - RNA, 18 nt, Homo sapiens
gacuccauuucagccaga

SEQ ID NO: 4141 - RNA, 22 nt, Homo sapiens
gagaucaguuaaugaagugagc

SEQ ID NO: 4142 - RNA, 22 nt, Homo sapiens
ugcaaagucgaaacugcaguuu

SEQ ID NO: 4143 - RNA, 22 nt, Homo sapiens
agucacggugguuugcacuugu

SEQ ID NO: 4144 - RNA, 22 nt, Homo sapiens
acugguguaugggaggucccaa

SEQ ID NO: 4145 - RNA, 22 nt, Homo sapiens
ucugugaaugaacacuugaaaa

SEQ ID NO: 4146 - RNA, 22 nt, Homo sapiens
aggcaagagugacuacgugaaa

SEQ ID NO: 4147 - RNA, 22 nt, Homo sapiens
caccacagccauuauugucccc

SEQ ID NO: 4148 - RNA, 22 nt, Homo sapiens
cagcagguuuuuaucaguuaag

SEQ ID NO: 4149 - RNA, 22 nt, Homo sapiens
gcauggagcauacauuucuguu

SEQ ID NO: 4150 - RNA, 22 nt, Homo sapiens
aaggcuguucauuuagcacagu

SEQ ID NO: 4151 - RNA, 22 nt, Homo sapiens
uagcagcagugguguauuuaga

SEQ ID NO: 4152 - RNA, 22 nt, Homo sapiens
guggagcuguguggccuugggc

SEQ ID NO: 4153 - RNA, 22 nt, Homo sapiens
ugacaugaugagcaauaauggc

SEQ ID NO: 4154 - RNA, 22 nt, Homo sapiens
ugucuaguuuugaaguauagca

SEQ ID NO: 4155 - RNA, 22 nt, Homo sapiens
augacccugaccuaagccaauc

SEQ ID NO: 4156 - RNA, 22 nt, Homo sapiens
uucaaauguucuuucaccaccc

SEQ ID NO: 4157 - RNA, 22 nt, Homo sapiens
uucacaauuaaaugugguuauu

SEQ ID NO: 4158 - RNA, 22 nt, Homo sapiens
auugcacuccagccccggggac

SEQ ID NO: 4159 - RNA, 22 nt, Homo sapiens
ggugagauaucugcugauguuu

SEQ ID NO: 4160 - RNA, 22 nt, Homo sapiens
gaguaucuuuaaggugguuugg

SEQ ID NO: 4161 - RNA, 22 nt, Homo sapiens
gugcaaugaguguggcaaagcc

SEQ ID NO: 4162 - RNA, 22 nt, Homo sapiens
uuguguccccacccaaauuuca

SEQ ID NO: 4163 - RNA, 22 nt, Homo sapiens
uuaaagcgacucucaugccuca

SEQ ID NO: 4164 - RNA, 22 nt, Homo sapiens
aucccaguucagccucugacac

SEQ ID NO: 4165 - RNA, 22 nt, Homo sapiens
uggcuguuuauuucaccugggc

SEQ ID NO: 4166 - RNA, 20 nt, Homo sapiens
ugucaaggaauucccaaauc

SEQ ID NO: 4167 - RNA, 22 nt, Homo sapiens
cacugcaguguaauuaagguug

SEQ ID NO: 4168 - RNA, 23 nt, Homo sapiens
uucaacagguagacccucccugc

SEQ ID NO: 4169 - RNA, 22 nt, Homo sapiens
uagacacugcauauuuuuuuaa

SEQ ID NO: 4170 - RNA, 21 nt, Homo sapiens
uugagaagaauuagcucuucc

SEQ ID NO: 4171 - RNA, 22 nt, Homo sapiens
acacuguuuuguggagaaugua

SEQ ID NO: 4172 - RNA, 22 nt, Homo sapiens
auccacauucauggaccagucc

SEQ ID NO: 4173 - RNA, 22 nt, Homo sapiens
cagguaagaugcuuucucuuau

SEQ ID NO: 4174 - RNA, 22 nt, Homo sapiens
ucuauugguugaaauugcuuuu

SEQ ID NO: 4175 - RNA, 22 nt, Homo sapiens
acugcacuccagccugagccug

SEQ ID NO: 4176 - RNA, 19 nt, Homo sapiens
ucccuuuguauggacauac

SEQ ID NO: 4177 - RNA, 22 nt, Homo sapiens
auacaugugcaggucagguuac

SEQ ID NO: 4178 - RNA, 22 nt, Homo sapiens
ugugaucaauuagugaugucug

SEQ ID NO: 4179 - RNA, 22 nt, Homo sapiens
acugcauaaauauguguaauau

SEQ ID NO: 4180 - RNA, 22 nt, Homo sapiens
acugagucauugggugcccaga

SEQ ID NO: 4181 - RNA, 22 nt, Homo sapiens
cuguuauguuugauggaugaau

SEQ ID NO: 4182 - RNA, 22 nt, Homo sapiens
uagcugcuguauguacacggau

SEQ ID NO: 4183 - RNA, 22 nt, Homo sapiens
ugaguagucagugggcaggaag

SEQ ID NO: 4184 - RNA, 22 nt, Homo sapiens
uguaaacuaugagcugauuauu

SEQ ID NO: 4185 - RNA, 22 nt, Homo sapiens
aauugcuucuguauuuuggaca

SEQ ID NO: 4186 - RNA, 22 nt, Homo sapiens
ucauaggucacuguaaccucgu

SEQ ID NO: 4187 - RNA, 22 nt, Homo sapiens
agucacagugaccuugucugac

SEQ ID NO: 4188 - RNA, 22 nt, Homo sapiens
uuggauaguuuaugaaaaaugg

SEQ ID NO: 4189 - RNA, 22 nt, Homo sapiens
uaugcuuauaaacauuugucag

SEQ ID NO: 4190 - RNA, 22 nt, Homo sapiens
uggcagauagaaaugugguuaa

SEQ ID NO: 4191 - RNA, 22 nt, Homo sapiens
aacagugcuucauucacacauu

SEQ ID NO: 4192 - RNA, 22 nt, Homo sapiens
uucuagcaauggcagagugucu

SEQ ID NO: 4193 - RNA, 22 nt, Homo sapiens
uugcauaauaagagggauacgu

SEQ ID NO: 4194 - RNA, 22 nt, Homo sapiens
ucauacuguccaauucuagugg

SEQ ID NO: 4195 - RNA, 22 nt, Homo sapiens
aucagcaugcagaagucggggg

SEQ ID NO: 4196 - RNA, 22 nt, Homo sapiens
gacuggauagauaaaguuaguu

SEQ ID NO: 4197 - RNA, 22 nt, Homo sapiens
uggguaguguaaagcacuccag

SEQ ID NO: 4198 - RNA, 22 nt, Homo sapiens
acuguacuccauccugggugac

SEQ ID NO: 4199 - RNA, 22 nt, Homo sapiens
uugaaagaaaggagacugaguu

SEQ ID NO: 4200 - RNA, 22 nt, Homo sapiens
gauacaccauuuucuagcuauu

SEQ ID NO: 4201 - RNA, 20 nt, Homo sapiens
uggaggucaucugucacuac

SEQ ID NO: 4202 - RNA, 22 nt, Homo sapiens
uucagacugggugaagagggua

SEQ ID NO: 4203 - RNA, 22 nt, Homo sapiens
ucaccuggagccuucacauucu

SEQ ID NO: 4204 - RNA, 20 nt, Homo sapiens
gagauguugaucagggcuau

SEQ ID NO: 4205 - RNA, 22 nt, Homo sapiens
gggagcaaaaaugaugcccaag

SEQ ID NO: 4206 - RNA, 22 nt, Homo sapiens
ucaaaguaaagccucaggaugg

SEQ ID NO: 4207 - RNA, 22 nt, Homo sapiens
ucacagacugagccaaauagag

SEQ ID NO: 4208 - RNA, 19 nt, Homo sapiens
caccagugcaugcuacuau

SEQ ID NO: 4209 - RNA, 22 nt, Homo sapiens
ggggucaucagagaaucuaccc

SEQ ID NO: 4210 - RNA, 22 nt, Homo sapiens
uagcccagugagguugauuugg

SEQ ID NO: 4211 - RNA, 22 nt, Homo sapiens
auggucuuuucccuggauuaua

SEQ ID NO: 4212 - RNA, 20 nt, Homo sapiens
aucguggccugaggagauac

SEQ ID NO: 4213 - RNA, 22 nt, Homo sapiens
cccucgagaaaccaucugcuga

SEQ ID NO: 4214 - RNA, 22 nt, Homo sapiens
uaagugcaacauaaguguuaaa

SEQ ID NO: 4215 - RNA, 22 nt, Homo sapiens
uugagaucuacuacuguaggag

SEQ ID NO: 4216 - RNA, 22 nt, Homo sapiens
auugcacuccagccuaggcaac

SEQ ID NO: 4217 - RNA, 23 nt, Homo sapiens
uuugccacuuauuagcugggagg

SEQ ID NO: 4218 - RNA, 22 nt, Homo sapiens
ucuuggguuugccuugcugcug

SEQ ID NO: 4219 - RNA, 22 nt, Homo sapiens
gauauguucuuucacguuggug

SEQ ID NO: 4220 - RNA, 22 nt, Homo sapiens
auuucuacuccuguguccagaa

SEQ ID NO: 4221 - RNA, 22 nt, Homo sapiens
ugugggugguaaaauacaauga

SEQ ID NO: 4222 - RNA, 22 nt, Homo sapiens
aaaugccucccauucuacugac

SEQ ID NO: 4223 - RNA, 19 nt, Homo sapiens
uccccaguuuuccguucag

SEQ ID NO: 4224 - RNA, 22 nt, Homo sapiens
gcaaaguguuuuuaggaagucu

SEQ ID NO: 4225 - RNA, 22 nt, Homo sapiens
ugaaagcuacaggaaaguauuu

SEQ ID NO: 4226 - RNA, 22 nt, Homo sapiens
guugaggcaggagaauuacuug

SEQ ID NO: 4227 - RNA, 22 nt, Homo sapiens
cagccgggugagguggcuuguu

SEQ ID NO: 4228 - RNA, 22 nt, Homo sapiens
aagguuguauuuaauauacugu

SEQ ID NO: 4229 - RNA, 22 nt, Homo sapiens
gaaguaggugcuguuauuaucu

SEQ ID NO: 4230 - RNA, 22 nt, Homo sapiens
cggugcaaauguaauugcaguu

SEQ ID NO: 4231 - RNA, 22 nt, Homo sapiens
uugauaugaauggcuguuugug

SEQ ID NO: 4232 - RNA, 21 nt, Homo sapiens
cuacccuguauuagagaaaga

SEQ ID NO: 4233 - RNA, 22 nt, Homo sapiens
uuggcagugguucugacggacc

SEQ ID NO: 4234 - RNA, 18 nt, Homo sapiens
aaacugcuuccuuggccu

SEQ ID NO: 4235 - RNA, 22 nt, Homo sapiens
uggagugucaguuuccagaguu

SEQ ID NO: 4236 - RNA, 23 nt, Homo sapiens
uaucacacuuucucugugccaca

SEQ ID NO: 4237 - RNA, 22 nt, Homo sapiens
uagguacuuaagaucucagcua

SEQ ID NO: 4238 - RNA, 22 nt, Homo sapiens
auucaagugaugcagcuguuuu

SEQ ID NO: 4239 - RNA, 22 nt, Homo sapiens
ucucuguuuagagccagcaauu

SEQ ID NO: 4240 - RNA, 22 nt, Homo sapiens
gcugagguucaagaagguuaaa

SEQ ID NO: 4241 - RNA, 22 nt, Homo sapiens
ucacaagcuccugccuuugcuu

SEQ ID NO: 4242 - RNA, 18 nt, Homo sapiens
uuagaugguuuuaaaacu

SEQ ID NO: 4243 - RNA, 22 nt, Homo sapiens
ccccggguucugucugcccuug

SEQ ID NO: 4244 - RNA, 23 nt, Homo sapiens
guggccuuuggccaguccgaguc

SEQ ID NO: 4245 - RNA, 22 nt, Homo sapiens
auaagaguaguacauaugagac

SEQ ID NO: 4246 - RNA, 22 nt, Homo sapiens
auggcaguuucagcuauaguuu

SEQ ID NO: 4247 - RNA, 22 nt, Homo sapiens
ggaagguaauugucagcucaua

SEQ ID NO: 4248 - RNA, 22 nt, Homo sapiens
auuaagagcacauguucugggu

SEQ ID NO: 4249 - RNA, 22 nt, Homo sapiens
aucugcauuagggugaagaccu

SEQ ID NO: 4250 - RNA, 22 nt, Homo sapiens
acuggcuuuugagaaaaacacu

SEQ ID NO: 4251 - RNA, 22 nt, Homo sapiens
gggaagauauaggcugggcacc

SEQ ID NO: 4252 - RNA, 22 nt, Homo sapiens
uugggacuggaaggaguaaggg

SEQ ID NO: 4253 - RNA, 22 nt, Homo sapiens
cugcuaagagaaugagacuuag

SEQ ID NO: 4254 - RNA, 22 nt, Homo sapiens
gagguauggauaucuggagagg

SEQ ID NO: 4255 - RNA, 23 nt, Homo sapiens
uguauacacccugugcaucuggg

SEQ ID NO: 4256 - RNA, 22 nt, Homo sapiens
ucauggcuuuuauuauguugag

SEQ ID NO: 4257 - RNA, 20 nt, Homo sapiens
gcaguguucugaccugaauc

SEQ ID NO: 4258 - RNA, 22 nt, Homo sapiens
ugugacagcacagcaucucuuu

SEQ ID NO: 4259 - RNA, 22 nt, Homo sapiens
gcgagcauuguaggaaguucag

SEQ ID NO: 4260 - RNA, 22 nt, Homo sapiens
cuacaguucuuaauuaaguagu

SEQ ID NO: 4261 - RNA, 22 nt, Homo sapiens
gaugugaaaucauaguuucuag

SEQ ID NO: 4262 - RNA, 22 nt, Homo sapiens
gaaucauuguuucuaaguuugu

SEQ ID NO: 4263 - RNA, 22 nt, Homo sapiens
acacugcugaguaaauaauuuu

SEQ ID NO: 4264 - RNA, 23 nt, Homo sapiens
ugcuccccucauggaugaauaaa

SEQ ID NO: 4265 - RNA, 22 nt, Homo sapiens
ucuugaacuucugcacacucag

SEQ ID NO: 4266 - RNA, 22 nt, Homo sapiens
aggaauguuaguacuucuuagu

SEQ ID NO: 4267 - RNA, 20 nt, Homo sapiens
uaguggaaaucagguccucu

SEQ ID NO: 4268 - RNA, 23 nt, Homo sapiens
uaaguucaucucuaauaggugga

SEQ ID NO: 4269 - RNA, 22 nt, Homo sapiens
acccguuacuuagcagaccggg

SEQ ID NO: 4270 - RNA, 22 nt, Homo sapiens
ggcaguuuggcaguuucauaaa

SEQ ID NO: 4271 - RNA, 22 nt, Homo sapiens
uggcaguuucacauggcucaac

SEQ ID NO: 4272 - RNA, 22 nt, Homo sapiens
uuaaaguauaguuccucugguu

SEQ ID NO: 4273 - RNA, 22 nt, Homo sapiens
ucuuauggagaaaggugguugg

SEQ ID NO: 4274 - RNA, 20 nt, Homo sapiens
uuugaauguaaagcauguca

SEQ ID NO: 4275 - RNA, 22 nt, Homo sapiens
ugugcugaucgggcacgguguc

SEQ ID NO: 4276 - RNA, 22 nt, Homo sapiens
gcccacuguuaaauuuguuuua

SEQ ID NO: 4277 - RNA, 22 nt, Homo sapiens
uucaaaguuggaggacaaacug

SEQ ID NO: 4278 - RNA, 22 nt, Homo sapiens
ugagauaguuguagauguacau

SEQ ID NO: 4279 - RNA, 22 nt, Homo sapiens
ccuaaguaauggcaguuuuugc

SEQ ID NO: 4280 - RNA, 22 nt, Homo sapiens
auaagaagugaaccagacgucu

SEQ ID NO: 4281 - RNA, 22 nt, Homo sapiens
uguacuucaagauuaugguuua

SEQ ID NO: 4282 - RNA, 22 nt, Homo sapiens
agcaaaucuaugaauguauauu

SEQ ID NO: 4283 - RNA, 22 nt, Homo sapiens
ugcaccacugcacuccaggcug

SEQ ID NO: 4284 - RNA, 22 nt, Homo sapiens
uuggaauguauggcaucuugcg

SEQ ID NO: 4285 - RNA, 22 nt, Homo sapiens
auugagcuuuuuaaaauauagu

SEQ ID NO: 4286 - RNA, 22 nt, Homo sapiens
auggaguguggaacugggaauc

SEQ ID NO: 4287 - RNA, 22 nt, Homo sapiens
auggccuuuuuaucucaccaag

SEQ ID NO: 4288 - RNA, 22 nt, Homo sapiens
aaagugcugagucuaggcgggg

SEQ ID NO: 4289 - RNA, 22 nt, Homo sapiens
aaaggcaucauuaguaccaagu

SEQ ID NO: 4290 - RNA, 22 nt, Homo sapiens
gcacauggccacuaggaauaaa

SEQ ID NO: 4291 - RNA, 21 nt, Homo sapiens
uguccagcuuuuggaauauaa

SEQ ID NO: 4292 - RNA, 22 nt, Homo sapiens
auguuugguaagaauauuguua

SEQ ID NO: 4293 - RNA, 19 nt, Homo sapiens
auaaaugccuacaagggug

SEQ ID NO: 4294 - RNA, 22 nt, Homo sapiens
cuuugguuaauaggauauggca

SEQ ID NO: 4295 - RNA, 22 nt, Homo sapiens
ugagaagcauaccagugucugu

SEQ ID NO: 4296 - RNA, 19 nt, Homo sapiens
ugagaacaugugguauuug

SEQ ID NO: 4297 - RNA, 22 nt, Homo sapiens
cuucugauugaaaauggaguag

SEQ ID NO: 4298 - RNA, 21 nt, Homo sapiens
gagaaucuuuucagggcaaac

SEQ ID NO: 4299 - RNA, 22 nt, Homo sapiens
gcauggauguugauggcugcug

SEQ ID NO: 4300 - RNA, 22 nt, Homo sapiens
uugacuccagagugaguaaaug

SEQ ID NO: 4301 - RNA, 22 nt, Homo sapiens
cuugaauguaaauaauguacag

SEQ ID NO: 4302 - RNA, 22 nt, Homo sapiens
ugauauuuuugauccuuaaguu

SEQ ID NO: 4303 - RNA, 18 nt, Homo sapiens
gucauagaaugaugguuc

SEQ ID NO: 4304 - RNA, 22 nt, Homo sapiens
uugaauggaauguuggaacuau

SEQ ID NO: 4305 - RNA, 22 nt, Homo sapiens
ugccauugcacuccagccuggg

SEQ ID NO: 4306 - RNA, 17 nt, Homo sapiens
cuaaggcaagagucugc

SEQ ID NO: 4307 - RNA, 22 nt, Homo sapiens
caccaaccucaguagcaucugu

SEQ ID NO: 4308 - RNA, 22 nt, Homo sapiens
agcaucacaugggcugcuuggg

SEQ ID NO: 4309 - RNA, 22 nt, Homo sapiens
uaacauugucuugcuuaguuuu

SEQ ID NO: 4310 - RNA, 22 nt, Homo sapiens
uugcaaaguuugccuccuguag

SEQ ID NO: 4311 - RNA, 22 nt, Homo sapiens
auggcuuuguguucagagcuga

SEQ ID NO: 4312 - RNA, 22 nt, Homo sapiens
ucagcagucacuccuaugacaa

SEQ ID NO: 4313 - RNA, 22 nt, Homo sapiens
cacccgugcucccuccagcugc

SEQ ID NO: 4314 - RNA, 22 nt, Homo sapiens
ugacagguugauaggugcagca

SEQ ID NO: 4315 - RNA, 22 nt, Homo sapiens
ugugaacaugacagugggcuag

SEQ ID NO: 4316 - RNA, 22 nt, Homo sapiens
ccaaaucucauguugaaaugug

SEQ ID NO: 4317 - RNA, 22 nt, Homo sapiens
uucaguccauuuccuuggucac

SEQ ID NO: 4318 - RNA, 22 nt, Homo sapiens
cugagguacugggggccaggau

SEQ ID NO: 4319 - RNA, 22 nt, Homo sapiens
gagguaguuuaguuuuggggaa

SEQ ID NO: 4320 - RNA, 22 nt, Homo sapiens
agcaucauguuuucgagguuca

SEQ ID NO: 4321 - RNA, 22 nt, Homo sapiens
uucugacuggugugagauggua

SEQ ID NO: 4322 - RNA, 21 nt, Homo sapiens
gugcagaugccacagucacuc

SEQ ID NO: 4323 - RNA, 22 nt, Homo sapiens
uuucugagaccaaaacuuguaa

SEQ ID NO: 4324 - RNA, 22 nt, Homo sapiens
guaaccuauaguuaccaauagu

SEQ ID NO: 4325 - RNA, 22 nt, Homo sapiens
ugccagaugcaguguucaacaa

SEQ ID NO: 4326 - RNA, 22 nt, Homo sapiens
uugggcuuuuagguccuuaaca

SEQ ID NO: 4327 - RNA, 22 nt, Homo sapiens
gaugacagcugacucccuugcu

SEQ ID NO: 4328 - RNA, 22 nt, Homo sapiens
ucacauggggaagggacuagcu

SEQ ID NO: 4329 - RNA, 22 nt, Homo sapiens
uggucccucugaaaauugggug

SEQ ID NO: 4330 - RNA, 22 nt, Homo sapiens
ggcaaggugcuacagacaguga

SEQ ID NO: 4331 - RNA, 22 nt, Homo sapiens
aagggaauguuguagcugguuu

SEQ ID NO: 4332 - RNA, 22 nt, Homo sapiens
uuccaguuauuauaccucuuaa

SEQ ID NO: 4333 - RNA, 22 nt, Homo sapiens
uccucugaacuccagacccaua

SEQ ID NO: 4334 - RNA, 23 nt, Homo sapiens
ucaguagucauugggaaagugug

SEQ ID NO: 4335 - RNA, 23 nt, Homo sapiens
ugacagugcuugaaauugcucuu

SEQ ID NO: 4336 - RNA, 22 nt, Homo sapiens
cugguaguguuuauaaggguau

SEQ ID NO: 4337 - RNA, 22 nt, Homo sapiens
gugcaaauuccagcucaacucc

SEQ ID NO: 4338 - RNA, 22 nt, Homo sapiens
ugggguaggccugguuaugugc

SEQ ID NO: 4339 - RNA, 22 nt, Homo sapiens
uaaagcuuagauccaugguggc

SEQ ID NO: 4340 - RNA, 22 nt, Homo sapiens
cuaagugaguauaauuuuaaga

SEQ ID NO: 4341 - RNA, 22 nt, Homo sapiens
uugccuuuguuggaaacaagug

SEQ ID NO: 4342 - RNA, 22 nt, Homo sapiens
uccuugagucugaacuuuggau

SEQ ID NO: 4343 - RNA, 22 nt, Homo sapiens
ugcagagucuguccugccugcc

SEQ ID NO: 4344 - RNA, 22 nt, Homo sapiens
gaacuggcuuagugaaacuucc

SEQ ID NO: 4345 - RNA, 17 nt, Homo sapiens
gaucacagucgucuccu

SEQ ID NO: 4346 - RNA, 22 nt, Homo sapiens
ugugcgcaucggggccugcuuc

SEQ ID NO: 4347 - RNA, 22 nt, Homo sapiens
uucugcuugaucuaguguguug

SEQ ID NO: 4348 - RNA, 22 nt, Homo sapiens
gaucuguuuuccuauuguuugu

SEQ ID NO: 4349 - RNA, 22 nt, Homo sapiens
uguuaucauuacguucuuaguu

SEQ ID NO: 4350 - RNA, 22 nt, Homo sapiens
ugcugguguuuaggaauaagaa

SEQ ID NO: 4351 - RNA, 21 nt, Homo sapiens
ugaaugcuuuaaauauuagaa

SEQ ID NO: 4352 - RNA, 23 nt, Homo sapiens
augaacucaucauuuuuuauggc

SEQ ID NO: 4353 - RNA, 22 nt, Homo sapiens
ucuggcaagauauccauugcuu

SEQ ID NO: 4354 - RNA, 22 nt, Homo sapiens
uaacauuguugauuauacuaag

SEQ ID NO: 4355 - RNA, 20 nt, Homo sapiens
agcuccauuccugaaggcug

SEQ ID NO: 4356 - RNA, 22 nt, Homo sapiens
uucagguaucccuugucuauag

SEQ ID NO: 4357 - RNA, 22 nt, Homo sapiens
ugugcucaucucagucaacugu

SEQ ID NO: 4358 - RNA, 22 nt, Homo sapiens
guauuugguuauugcagccuga

SEQ ID NO: 4359 - RNA, 23 nt, Homo sapiens
ugcucgguguugacagucacauc

SEQ ID NO: 4360 - RNA, 19 nt, Homo sapiens
cuaaaugggucccuagugg

SEQ ID NO: 4361 - RNA, 18 nt, Homo sapiens
uggacagugauuauccau

SEQ ID NO: 4362 - RNA, 22 nt, Homo sapiens
ugugccaaucauagggcuuggu

SEQ ID NO: 4363 - RNA, 22 nt, Homo sapiens
gucacugacaagagagaagaac

SEQ ID NO: 4364 - RNA, 23 nt, Homo sapiens
aaagacuagucaggugcaguggu

SEQ ID NO: 4365 - RNA, 22 nt, Homo sapiens
uugagacugagucucgcccugu

SEQ ID NO: 4366 - RNA, 22 nt, Homo sapiens
auggacguagauucucaaggau

SEQ ID NO: 4367 - RNA, 22 nt, Homo sapiens
agcuagcauucauaguuugagg

SEQ ID NO: 4368 - RNA, 22 nt, Homo sapiens
uuuggucacugccgccgccagc

SEQ ID NO: 4369 - RNA, 22 nt, Homo sapiens
ugcucaguuuaaaacuuuugag

SEQ ID NO: 4370 - RNA, 20 nt, Homo sapiens
augucaggaagggagucagg

SEQ ID NO: 4371 - RNA, 22 nt, Homo sapiens
ucagggacgcuugacacaagcc

SEQ ID NO: 4372 - RNA, 22 nt, Homo sapiens
gucagugcauguaaacauaaaa

SEQ ID NO: 4373 - RNA, 21 nt, Homo sapiens
aggagcauucaugacgagguu

SEQ ID NO: 4374 - RNA, 22 nt, Homo sapiens
ggauacauuuuuccuccucuuc

SEQ ID NO: 4375 - RNA, 21 nt, Homo sapiens
uugucuagagaaauauaucuc

SEQ ID NO: 4376 - RNA, 22 nt, Homo sapiens
cucagcaguggauuuaccacca

SEQ ID NO: 4377 - RNA, 22 nt, Homo sapiens
ugccaaaaugggcuuuauaccg

SEQ ID NO: 4378 - RNA, 22 nt, Homo sapiens
auuccagauggaguugaggguu

SEQ ID NO: 4379 - RNA, 20 nt, Homo sapiens
ucagcagucuggagcagagg

SEQ ID NO: 4380 - RNA, 22 nt, Homo sapiens
cacaaugucuaagauguuucua

SEQ ID NO: 4381 - RNA, 22 nt, Homo sapiens
aagcaucacuggaggcagccau

SEQ ID NO: 4382 - RNA, 22 nt, Homo sapiens
uguauacauguguguucacgca

SEQ ID NO: 4383 - RNA, 22 nt, Homo sapiens
cuggacaaaucuggaaagaacc

SEQ ID NO: 4384 - RNA, 22 nt, Homo sapiens
uugcacuguaauuuauuuaugu

SEQ ID NO: 4385 - RNA, 22 nt, Homo sapiens
ucaaaaucucuuagcugugucu

SEQ ID NO: 4386 - RNA, 22 nt, Homo sapiens
agcaccauuuauugaaaagaca

SEQ ID NO: 4387 - RNA, 18 nt, Homo sapiens
aaggugcuucuguucuga

SEQ ID NO: 4388 - RNA, 22 nt, Homo sapiens
ggacagaaaggguucaccaaac

SEQ ID NO: 4389 - RNA, 22 nt, Homo sapiens
gauggauuuuuuaggcagagcu

SEQ ID NO: 4390 - RNA, 22 nt, Homo sapiens
uuugugcuccucucaguaugug

SEQ ID NO: 4391 - RNA, 22 nt, Homo sapiens
aagugcacuguaagugcaggau

SEQ ID NO: 4392 - RNA, 22 nt, Homo sapiens
ugagaucugauaggccuggguu

SEQ ID NO: 4393 - RNA, 22 nt, Homo sapiens
cuggcaccauuuugaucaaagg

SEQ ID NO: 4394 - RNA, 22 nt, Homo sapiens
gugauaucacuguaucacucca

SEQ ID NO: 4395 - RNA, 22 nt, Homo sapiens
guggugucuuguuuaauauaua

SEQ ID NO: 4396 - RNA, 22 nt, Homo sapiens
agguuaugauuguagagcgagg

SEQ ID NO: 4397 - RNA, 22 nt, Homo sapiens
ccacagucuaugcaacaagguc

SEQ ID NO: 4398 - RNA, 22 nt, Homo sapiens
gaaagugcugcuugacugggau

SEQ ID NO: 4399 - RNA, 22 nt, Homo sapiens
guuuacagucgacuugggaaua

SEQ ID NO: 4400 - RNA, 22 nt, Homo sapiens
gcuuuugcaggaaaggaagaau

SEQ ID NO: 4401 - RNA, 19 nt, Homo sapiens
ccccuguggauaccgaggg

SEQ ID NO: 4402 - RNA, 22 nt, Homo sapiens
cuauucacaauggugaagauau

SEQ ID NO: 4403 - RNA, 22 nt, Homo sapiens
auggcacugccuggcuucaugg

SEQ ID NO: 4404 - RNA, 22 nt, Homo sapiens
aagaugcagaagcccagauguu

SEQ ID NO: 4405 - RNA, 22 nt, Homo sapiens
agcuccauuguaaucaccuggu

SEQ ID NO: 4406 - RNA, 22 nt, Homo sapiens
uugcuagagaugagggaugugu

SEQ ID NO: 4407 - RNA, 22 nt, Homo sapiens
ucuggauuuuugaggcaauaua

SEQ ID NO: 4408 - RNA, 22 nt, Homo sapiens
uucaguggacuuaguagugcuu

SEQ ID NO: 4409 - RNA, 22 nt, Homo sapiens
uugugguagugaaugagucuca

SEQ ID NO: 4410 - RNA, 22 nt, Homo sapiens
guggaggagaaagaagcauuuc

SEQ ID NO: 4411 - RNA, 22 nt, Homo sapiens
caguaguagccccuuagaugga

SEQ ID NO: 4412 - RNA, 22 nt, Homo sapiens
uaccaguaaugguucuagagga

SEQ ID NO: 4413 - RNA, 22 nt, Homo sapiens
uggauauguuuauuacccugaa

SEQ ID NO: 4414 - RNA, 22 nt, Homo sapiens
ucuccauugaaauggacauaau

SEQ ID NO: 4415 - RNA, 22 nt, Homo sapiens
acugaaucaucagguguguuug

SEQ ID NO: 4416 - RNA, 22 nt, Homo sapiens
uugacaaggagccauugcaucu

SEQ ID NO: 4417 - RNA, 22 nt, Homo sapiens
augagcaaagagaugagacccu

SEQ ID NO: 4418 - RNA, 22 nt, Homo sapiens
ucacaggguguuauuagaauua

SEQ ID NO: 4419 - RNA, 22 nt, Homo sapiens
ucagugaauauauaacagcgau

SEQ ID NO: 4420 - RNA, 22 nt, Homo sapiens
uaaucacagagguuuggccuca

SEQ ID NO: 4421 - RNA, 22 nt, Homo sapiens
aguguuuuucaugggauacuuu

SEQ ID NO: 4422 - RNA, 22 nt, Homo sapiens
ggacuagaggugaaaagaagac

SEQ ID NO: 4423 - RNA, 22 nt, Homo sapiens
gaucauggaguuggguucaagg

SEQ ID NO: 4424 - RNA, 22 nt, Homo sapiens
guuguauaggcauggggagaau

SEQ ID NO: 4425 - RNA, 22 nt, Homo sapiens
aaagugcuuccuuuuugagggu

SEQ ID NO: 4426 - RNA, 22 nt, Homo sapiens
ugccugauacccucugucucuc

SEQ ID NO: 4427 - RNA, 20 nt, Homo sapiens
cucccugacaaauguggaaa

SEQ ID NO: 4428 - RNA, 19 nt, Homo sapiens
auaugggguuugaacugug

SEQ ID NO: 4429 - RNA, 18 nt, Homo sapiens
cuaagacacuuggcagag

SEQ ID NO: 4430 - RNA, 22 nt, Homo sapiens
uuguccuugagauaguuugcag

SEQ ID NO: 4431 - RNA, 22 nt, Homo sapiens
uaggacauugcccuuguggaga

SEQ ID NO: 4432 - RNA, 22 nt, Homo sapiens
uugauauucuuucuggauccca

SEQ ID NO: 4433 - RNA, 22 nt, Homo sapiens
gcaccauugacaagaaauaggu

SEQ ID NO: 4434 - RNA, 22 nt, Homo sapiens
gagaugugguucaaggguguuu

SEQ ID NO: 4435 - RNA, 22 nt, Homo sapiens
ggcauguaauuauucaaagugg

SEQ ID NO: 4436 - RNA, 22 nt, Homo sapiens
uuguguccccacccaaaucuca

SEQ ID NO: 4437 - RNA, 22 nt, Homo sapiens
uuauauguuacucccucuagca

SEQ ID NO: 4438 - RNA, 22 nt, Homo sapiens
ugagguugguauuacugucucu

SEQ ID NO: 4439 - RNA, 22 nt, Homo sapiens
uugcuacuuggauguacaugug

SEQ ID NO: 4440 - RNA, 23 nt, Homo sapiens
auugaacacuuucauaugugagg

SEQ ID NO: 4441 - RNA, 19 nt, Homo sapiens
gaguugggguuuacuguaa

SEQ ID NO: 4442 - RNA, 22 nt, Homo sapiens
ggugagaaaaacauagucucag

SEQ ID NO: 4443 - RNA, 19 nt, Homo sapiens
acauugcauuuguaggcuu

SEQ ID NO: 4444 - RNA, 22 nt, Homo sapiens
gagcugaucuuuucugauucca

SEQ ID NO: 4445 - RNA, 22 nt, Homo sapiens
gccauugcacucuagccuaggu

SEQ ID NO: 4446 - RNA, 21 nt, Homo sapiens
ccuccauuuguauucuugccc

SEQ ID NO: 4447 - RNA, 22 nt, Homo sapiens
cugauugugcagagguguaauu

SEQ ID NO: 4448 - RNA, 22 nt, Homo sapiens
auugucacugugcuccaccagu

SEQ ID NO: 4449 - RNA, 22 nt, Homo sapiens
auuugacacugagagccucagu

SEQ ID NO: 4450 - RNA, 22 nt, Homo sapiens
uaucacagcgggguguacaccc

SEQ ID NO: 4451 - RNA, 22 nt, Homo sapiens
gugcaugcaucuuuauaguagc

SEQ ID NO: 4452 - RNA, 22 nt, Homo sapiens
uugucauggucuugauccauua

SEQ ID NO: 4453 - RNA, 22 nt, Homo sapiens
ugacagagcaggacuucaucuc

SEQ ID NO: 4454 - RNA, 22 nt, Homo sapiens
auccuacaguccauucuuugug

SEQ ID NO: 4455 - RNA, 22 nt, Homo sapiens
aaggaguaucuguuuucucacc

SEQ ID NO: 4456 - RNA, 22 nt, Homo sapiens
uuggacuggaacuauaccauug

SEQ ID NO: 4457 - RNA, 22 nt, Homo sapiens
uuuacagucucauagguggaag

SEQ ID NO: 4458 - RNA, 22 nt, Homo sapiens
ugagaugauagauauguuaauu

SEQ ID NO: 4459 - RNA, 22 nt, Homo sapiens
uuuaugcuacauguguuggaaa

SEQ ID NO: 4460 - RNA, 22 nt, Homo sapiens
aauuggugaccaagggaaggac

SEQ ID NO: 4461 - RNA, 22 nt, Homo sapiens
gucaugcaggguucgccagccc

SEQ ID NO: 4462 - RNA, 22 nt, Homo sapiens
ugacagugugagauccugucuc

SEQ ID NO: 4463 - RNA, 22 nt, Homo sapiens
uuuuggcacuuugucugauucu

SEQ ID NO: 4464 - RNA, 22 nt, Homo sapiens
ucucacaggguuauugaggggg

SEQ ID NO: 4465 - RNA, 22 nt, Homo sapiens
ugugacagcacgguucaacugc

SEQ ID NO: 4466 - RNA, 22 nt, Homo sapiens
ugagguguauugggggaaauuc

SEQ ID NO: 4467 - RNA, 22 nt, Homo sapiens
ggcuagagacaaguugcugaga

SEQ ID NO: 4468 - RNA, 21 nt, Homo sapiens
cugcaaaugcugcugccugau

SEQ ID NO: 4469 - RNA, 22 nt, Homo sapiens
auucacagggggagaaggguau

SEQ ID NO: 4470 - RNA, 22 nt, Homo sapiens
ugagagcugguuguuuaaagga

SEQ ID NO: 4471 - RNA, 22 nt, Homo sapiens
aucucaaugcuuuuguaggcca

SEQ ID NO: 4472 - RNA, 22 nt, Homo sapiens
ugugauaguuggcuaaagcagu

SEQ ID NO: 4473 - RNA, 18 nt, Homo sapiens
aguuguuuuauccugccc

SEQ ID NO: 4474 - RNA, 22 nt, Homo sapiens
auagugcugcauuaaacauacg

SEQ ID NO: 4475 - RNA, 22 nt, Homo sapiens
ugacagguuggaauuaugggag

SEQ ID NO: 4476 - RNA, 22 nt, Homo sapiens
uuacagauggcacacucaaggg

SEQ ID NO: 4477 - RNA, 22 nt, Homo sapiens
aaagugcugagacagacuggga

SEQ ID NO: 4478 - RNA, 22 nt, Homo sapiens
ugucaucauuugagagaagaaa

SEQ ID NO: 4479 - RNA, 22 nt, Homo sapiens
uuuuugaguaaauauaaauugu

SEQ ID NO: 4480 - RNA, 22 nt, Homo sapiens
ucaccuuacuugcuucugaacu

SEQ ID NO: 4481 - RNA, 22 nt, Homo sapiens
uuaaguaaucagagaagagaac

SEQ ID NO: 4482 - RNA, 22 nt, Homo sapiens
ucuugguugaaaauucauaaua

SEQ ID NO: 4483 - RNA, 22 nt, Homo sapiens
uacuagaguagugcagagggga

SEQ ID NO: 4484 - RNA, 22 nt, Homo sapiens
auggcacuccagccugggcaac

SEQ ID NO: 4485 - RNA, 22 nt, Homo sapiens
ucucagugaauguggaaaaagc

SEQ ID NO: 4486 - RNA, 22 nt, Homo sapiens
uuuguguccccacccaaacauc

SEQ ID NO: 4487 - RNA, 22 nt, Homo sapiens
ggacuaggagcuaggaagaucu

SEQ ID NO: 4488 - RNA, 17 nt, Homo sapiens
ucagugcauuuaagaga

SEQ ID NO: 4489 - RNA, 18 nt, Homo sapiens
uuugugcuccacaaagga

SEQ ID NO: 4490 - RNA, 22 nt, Homo sapiens
ggccggguggccauggcugccc

SEQ ID NO: 4491 - RNA, 22 nt, Homo sapiens
gugagacugguccugaacccag

SEQ ID NO: 4492 - RNA, 22 nt, Homo sapiens
uuguagcaaauauauuuuggaa

SEQ ID NO: 4493 - RNA, 22 nt, Homo sapiens
acagaacugggcuugcuuuugg

SEQ ID NO: 4494 - RNA, 22 nt, Homo sapiens
guaguaccauuaggauauuucu

SEQ ID NO: 4495 - RNA, 22 nt, Homo sapiens
caaugcagcuuuuggagagaaa

SEQ ID NO: 4496 - RNA, 22 nt, Homo sapiens
caaaguaauuacgguuuuggcc

SEQ ID NO: 4497 - RNA, 22 nt, Homo sapiens
ugugacagguagguaauuuuug

SEQ ID NO: 4498 - RNA, 17 nt, Homo sapiens
uauagcacuucucacau

SEQ ID NO: 4499 - RNA, 23 nt, Homo sapiens
uucaccguguuggccaggcuggu

SEQ ID NO: 4500 - RNA, 22 nt, Homo sapiens
auucccuuagcugccucagccu

SEQ ID NO: 4501 - RNA, 20 nt, Homo sapiens
gcaguacuuuuaguucuaag

SEQ ID NO: 4502 - RNA, 22 nt, Homo sapiens
ccauggcuucugcauucuguca

SEQ ID NO: 4503 - RNA, 22 nt, Homo sapiens
ugcuuguguucagguaaccuuu

SEQ ID NO: 4504 - RNA, 22 nt, Homo sapiens
guccuguuuuuaagguucauag

SEQ ID NO: 4505 - RNA, 22 nt, Homo sapiens
uauagcacaucuguguguacau

SEQ ID NO: 4506 - RNA, 22 nt, Homo sapiens
ccuugguugugcuucaacuucu

SEQ ID NO: 4507 - RNA, 22 nt, Homo sapiens
uguguauaucacugcaugagug

SEQ ID NO: 4508 - RNA, 22 nt, Homo sapiens
ugagacacuucccagaucccuu

SEQ ID NO: 4509 - RNA, 22 nt, Homo sapiens
uuguagcuuuuuaaugugcugc

SEQ ID NO: 4510 - RNA, 22 nt, Homo sapiens
cuauaguauaguuugaagucag

SEQ ID NO: 4511 - RNA, 22 nt, Homo sapiens
augccauugcacuccagccuag

SEQ ID NO: 4512 - RNA, 22 nt, Homo sapiens
auccacaugcaguuggaaacag

SEQ ID NO: 4513 - RNA, 22 nt, Homo sapiens
ugauauguagguggcaagcaua

SEQ ID NO: 4514 - RNA, 22 nt, Homo sapiens
ugugcacauaacauuuuuuuag

SEQ ID NO: 4515 - RNA, 22 nt, Homo sapiens
auacagcuaaaauauuaaguua

SEQ ID NO: 4516 - RNA, 22 nt, Homo sapiens
ggaaugcuaaaauaggaugcug

SEQ ID NO: 4517 - RNA, 22 nt, Homo sapiens
uaucucagaguguacaagauua

SEQ ID NO: 4518 - RNA, 22 nt, Homo sapiens
uugagcaaugucacugaggcuu

SEQ ID NO: 4519 - RNA, 22 nt, Homo sapiens
uauugccucagugacuuugggg

SEQ ID NO: 4520 - RNA, 22 nt, Homo sapiens
gcuguugugaacuauacaucua

SEQ ID NO: 4521 - RNA, 21 nt, Homo sapiens
auguaacugggaaugugagag

SEQ ID NO: 4522 - RNA, 22 nt, Homo sapiens
acacuguagcugagggcaugcg

SEQ ID NO: 4523 - RNA, 22 nt, Homo sapiens
gaguaaaugucacuguugcugu

SEQ ID NO: 4524 - RNA, 22 nt, Homo sapiens
agcaccauuucucuaaagcacu

SEQ ID NO: 4525 - RNA, 22 nt, Homo sapiens
ugucauauagaauguucuauga

SEQ ID NO: 4526 - RNA, 22 nt, Homo sapiens
uuguuugguugaguauggaagu

SEQ ID NO: 4527 - RNA, 22 nt, Homo sapiens
uagguugucuguucacucugau

SEQ ID NO: 4528 - RNA, 22 nt, Homo sapiens
ugccuaggcuggagugcagugg

SEQ ID NO: 4529 - RNA, 22 nt, Homo sapiens
ucagaguggccucucuugaaga

SEQ ID NO: 4530 - RNA, 22 nt, Homo sapiens
cuguuugaggguuugcuuucag

SEQ ID NO: 4531 - RNA, 22 nt, Homo sapiens
cuucaaaguuggcuaggagaca

SEQ ID NO: 4532 - RNA, 22 nt, Homo sapiens
cugagaagaaacagguaaggac

SEQ ID NO: 4533 - RNA, 22 nt, Homo sapiens
gacucgugagguccccaggagg

SEQ ID NO: 4534 - RNA, 20 nt, Homo sapiens
cuuaaugcagcauuucucag

SEQ ID NO: 4535 - RNA, 22 nt, Homo sapiens
aggcaacaugguaaaacccugu

SEQ ID NO: 4536 - RNA, 22 nt, Homo sapiens
agauggugauaaaugugguacc

SEQ ID NO: 4537 - RNA, 22 nt, Homo sapiens
aauaaagccugucucuuuagag

SEQ ID NO: 4538 - RNA, 22 nt, Homo sapiens
gcaaaauugagaagggaauaua

SEQ ID NO: 4539 - RNA, 21 nt, Homo sapiens
acaguacuugagaucuuuuga

SEQ ID NO: 4540 - RNA, 22 nt, Homo sapiens
acauguagacaacggacaaagu

SEQ ID NO: 4541 - RNA, 22 nt, Homo sapiens
acaugacauugggguggggaua

SEQ ID NO: 4542 - RNA, 22 nt, Homo sapiens
uucuggccuccauuuuucuccu

SEQ ID NO: 4543 - RNA, 22 nt, Homo sapiens
ugauaacauuucuucugguaca

SEQ ID NO: 4544 - RNA, 22 nt, Homo sapiens
uagcaaaucaauggaauugaag

SEQ ID NO: 4545 - RNA, 22 nt, Homo sapiens
guagagagaaauacaaagcugu

SEQ ID NO: 4546 - RNA, 22 nt, Homo sapiens
gucauuguguggacauggagaa

SEQ ID NO: 4547 - RNA, 22 nt, Homo sapiens
gucacuggcugucuuguaugau

SEQ ID NO: 4548 - RNA, 22 nt, Homo sapiens
gagcacugaauacugugguggu

SEQ ID NO: 4549 - RNA, 22 nt, Homo sapiens
gggguaguuacuguuguucuuu

SEQ ID NO: 4550 - RNA, 22 nt, Homo sapiens
uaugucuucuuuagagaaaugu

SEQ ID NO: 4551 - RNA, 22 nt, Homo sapiens
ucugugcauuguaggauguuua

SEQ ID NO: 4552 - RNA, 22 nt, Homo sapiens
uggaugccuaauaaaugcagac

SEQ ID NO: 4553 - RNA, 20 nt, Homo sapiens
uggugucuuggaaagagcuc

SEQ ID NO: 4554 - RNA, 22 nt, Homo sapiens
aagaguaguaguggcacucucu

SEQ ID NO: 4555 - RNA, 22 nt, Homo sapiens
guggaagaaaucagguuauuug

SEQ ID NO: 4556 - RNA, 22 nt, Homo sapiens
uuagagcacugaucugcucuuu

SEQ ID NO: 4557 - RNA, 22 nt, Homo sapiens
auggcacuaaguucaacacuua

SEQ ID NO: 4558 - RNA, 22 nt, Homo sapiens
gguagacucuguaagugaucau

SEQ ID NO: 4559 - RNA, 22 nt, Homo sapiens
gaauacuguccaagagugaugg

SEQ ID NO: 4560 - RNA, 22 nt, Homo sapiens
uccauguagaugcuauguuguc

SEQ ID NO: 4561 - RNA, 22 nt, Homo sapiens
uuugacuuuuagaauaugaguu

SEQ ID NO: 4562 - RNA, 22 nt, Homo sapiens
uuguaauguuaggguguccaug

SEQ ID NO: 4563 - RNA, 22 nt, Homo sapiens
cuacacaugcaggcucccugcc

SEQ ID NO: 4564 - RNA, 22 nt, Homo sapiens
augugcauaugaagcacagaca

SEQ ID NO: 4565 - RNA, 22 nt, Homo sapiens
uguaaaccauauauguauguag

SEQ ID NO: 4566 - RNA, 22 nt, Homo sapiens
gaagugcaguggcacagucaug

SEQ ID NO: 4567 - RNA, 22 nt, Homo sapiens
agaaugucaguauuggcuaaaa

SEQ ID NO: 4568 - RNA, 22 nt, Homo sapiens
augaacacuccaauuguacucc

SEQ ID NO: 4569 - RNA, 22 nt, Homo sapiens
uugaaguauagaguuuaagaac

SEQ ID NO: 4570 - RNA, 22 nt, Homo sapiens
gagguagguuugguuacaaaag

SEQ ID NO: 4571 - RNA, 22 nt, Homo sapiens
uaaggauuuuggugauuacacu

SEQ ID NO: 4572 - RNA, 22 nt, Homo sapiens
agcuccaugauaguaugucugu

SEQ ID NO: 4573 - RNA, 22 nt, Homo sapiens
auaucacucccaauaucgcagg

SEQ ID NO: 4574 - RNA, 22 nt, Homo sapiens
uuggucagcuagauuauucccu

SEQ ID NO: 4575 - RNA, 19 nt, Homo sapiens
uagcagcaugauuuauaau

SEQ ID NO: 4576 - RNA, 22 nt, Homo sapiens
ugggcaaaacuaagagcugugg

SEQ ID NO: 4577 - RNA, 22 nt, Homo sapiens
uuaaaguguuuucaaaauguca

SEQ ID NO: 4578 - RNA, 22 nt, Homo sapiens
aggcugguauuuacaaaagcuc

SEQ ID NO: 4579 - RNA, 23 nt, Homo sapiens
uggucccguguucuggcuuuagg

SEQ ID NO: 4580 - RNA, 22 nt, Homo sapiens
agccaguauuuccacagagugg

SEQ ID NO: 4581 - RNA, 22 nt, Homo sapiens
uauuuggugaaugaaugcaugu

SEQ ID NO: 4582 - RNA, 22 nt, Homo sapiens
ugugaauguaagaaaauccaac

SEQ ID NO: 4583 - RNA, 19 nt, Homo sapiens
uaacacaguuguguuugag

SEQ ID NO: 4584 - RNA, 22 nt, Homo sapiens
uuauaugcuaaacaaggggugg

SEQ ID NO: 4585 - RNA, 22 nt, Homo sapiens
acugcacuguccuagaguccuc

SEQ ID NO: 4586 - RNA, 22 nt, Homo sapiens
uggaaaacaugcacauuggauu

SEQ ID NO: 4587 - RNA, 21 nt, Homo sapiens
cagagaucaucucuguuuuaa

SEQ ID NO: 4588 - RNA, 22 nt, Homo sapiens
caugcauuggucuauuauguga

SEQ ID NO: 4589 - RNA, 21 nt, Homo sapiens
cuucuuggggcagggcagggu

SEQ ID NO: 4590 - RNA, 22 nt, Homo sapiens
uuauucugucuuuggucucaau

SEQ ID NO: 4591 - RNA, 22 nt, Homo sapiens
uacccuguaaucugaaacauga

SEQ ID NO: 4592 - RNA, 22 nt, Homo sapiens
cauagcacacguauaccuaugu

SEQ ID NO: 4593 - RNA, 22 nt, Homo sapiens
auggcauugaagaguugucccu

SEQ ID NO: 4594 - RNA, 21 nt, Homo sapiens
auugagcacaugaaacauggc

SEQ ID NO: 4595 - RNA, 22 nt, Homo sapiens
ugagcuaggauccugucacugu

SEQ ID NO: 4596 - RNA, 17 nt, Homo sapiens
augugaauguucaaaua

SEQ ID NO: 4597 - RNA, 22 nt, Homo sapiens
aagaugcagucauacuggagga

SEQ ID NO: 4598 - RNA, 22 nt, Homo sapiens
ucuaugguuuauuuccaagugu

SEQ ID NO: 4599 - RNA, 22 nt, Homo sapiens
ugagaugaguugcuggcucuga

SEQ ID NO: 4600 - RNA, 22 nt, Homo sapiens
gucugguacuuguuuguaaggg

SEQ ID NO: 4601 - RNA, 22 nt, Homo sapiens
gugggagugucccguuuuucca

SEQ ID NO: 4602 - RNA, 22 nt, Homo sapiens
gauuucacuuucuggaugugca

SEQ ID NO: 4603 - RNA, 22 nt, Homo sapiens
uuauuagguuaaccuauagcua

SEQ ID NO: 4604 - RNA, 18 nt, Homo sapiens
ucauuggugagcaccucc

SEQ ID NO: 4605 - RNA, 22 nt, Homo sapiens
uacuauugcaucggugauuagg

SEQ ID NO: 4606 - RNA, 17 nt, Homo sapiens
cugaccucauuguguac

SEQ ID NO: 4607 - RNA, 22 nt, Homo sapiens
auugcacuccagccuggggaac

SEQ ID NO: 4608 - RNA, 22 nt, Homo sapiens
gaucuggagguuuuccucauga

SEQ ID NO: 4609 - RNA, 22 nt, Homo sapiens
uggauagauacuauccaggacu

SEQ ID NO: 4610 - RNA, 22 nt, Homo sapiens
uuuauagucaggaacuugagga

SEQ ID NO: 4611 - RNA, 22 nt, Homo sapiens
uggccaagagcacagauauugg

SEQ ID NO: 4612 - RNA, 22 nt, Homo sapiens
aagugguuuuuacaaagacaga

SEQ ID NO: 4613 - RNA, 22 nt, Homo sapiens
ucuguuguuaucauaauauuga

SEQ ID NO: 4614 - RNA, 22 nt, Homo sapiens
cuuuggugauagauaccccaua

SEQ ID NO: 4615 - RNA, 22 nt, Homo sapiens
cugagguauaucccauuagaag

SEQ ID NO: 4616 - RNA, 22 nt, Homo sapiens
ugagagcuuuuuugccugguga

SEQ ID NO: 4617 - RNA, 22 nt, Homo sapiens
gugaaagacauauaugguuuga

SEQ ID NO: 4618 - RNA, 22 nt, Homo sapiens
gugggaugaucgcuugagccca

SEQ ID NO: 4619 - RNA, 22 nt, Homo sapiens
ugagaugaucaaaguauaggcu

SEQ ID NO: 4620 - RNA, 22 nt, Homo sapiens
uugagcaaugaacgauucaggg

SEQ ID NO: 4621 - RNA, 22 nt, Homo sapiens
uaauagcaguguuacuaggacu

SEQ ID NO: 4622 - RNA, 22 nt, Homo sapiens
ccugagaucauacuguuaguaa

SEQ ID NO: 4623 - RNA, 22 nt, Homo sapiens
guaggcacugaguguuuuacag

SEQ ID NO: 4624 - RNA, 22 nt, Homo sapiens
auuagguuagugcaaaaguaau

SEQ ID NO: 4625 - RNA, 22 nt, Homo sapiens
uacucaguaagugcuggcugcu

SEQ ID NO: 4626 - RNA, 17 nt, Homo sapiens
uggugcuugaaaguugc

SEQ ID NO: 4627 - RNA, 22 nt, Homo sapiens
uaaaugcuuaauugaaugugga

SEQ ID NO: 4628 - RNA, 22 nt, Homo sapiens
cuguugguuaaauuccaugcag

SEQ ID NO: 4629 - RNA, 22 nt, Homo sapiens
uaggugauccauuuguauuuua

SEQ ID NO: 4630 - RNA, 22 nt, Homo sapiens
gaaggcaugcugcauggccaga

SEQ ID NO: 4631 - RNA, 22 nt, Homo sapiens
ggcccugauacaaguaaggucu

SEQ ID NO: 4632 - RNA, 22 nt, Homo sapiens
guacaagugcaguuucguuaca

SEQ ID NO: 4633 - RNA, 22 nt, Homo sapiens
augagcuauggagcucccaccu

SEQ ID NO: 4634 - RNA, 22 nt, Homo sapiens
gagcugccuugccuaugcaaga

SEQ ID NO: 4635 - RNA, 22 nt, Homo sapiens
acugccuaaugacuuauguuuu

SEQ ID NO: 4636 - RNA, 22 nt, Homo sapiens
cauggcuuuuauaacaagaaau

SEQ ID NO: 4637 - RNA, 22 nt, Homo sapiens
uggauccaucacgccucuuccc

SEQ ID NO: 4638 - RNA, 22 nt, Homo sapiens
uacugcacuccagccucgguga

SEQ ID NO: 4639 - RNA, 22 nt, Homo sapiens
gagaucaaugggauggaauuga

SEQ ID NO: 4640 - RNA, 22 nt, Homo sapiens
aucucaguuaauuccaucuuuc

SEQ ID NO: 4641 - RNA, 22 nt, Homo sapiens
aauagcacuguagauggaggaa

SEQ ID NO: 4642 - RNA, 22 nt, Homo sapiens
gucuuggcaugugcagcuggga

SEQ ID NO: 4643 - RNA, 22 nt, Homo sapiens
uagcugguucuccaggagcuag

SEQ ID NO: 4644 - RNA, 22 nt, Homo sapiens
aucacuggccuuuuuaaaugcu

SEQ ID NO: 4645 - RNA, 22 nt, Homo sapiens
uguucaauucccaccuaugagu

SEQ ID NO: 4646 - RNA, 23 nt, Homo sapiens
cuguggugaggcccuagaaucug

SEQ ID NO: 4647 - RNA, 19 nt, Homo sapiens
acaguauugugcacagguu

SEQ ID NO: 4648 - RNA, 22 nt, Homo sapiens
agcagcaucgggaaguuggcca

SEQ ID NO: 4649 - RNA, 22 nt, Homo sapiens
ugagggaugcguacccuaugcc

SEQ ID NO: 4650 - RNA, 22 nt, Homo sapiens
ugcauauucaaggcaggccauu

SEQ ID NO: 4651 - RNA, 18 nt, Homo sapiens
ucccucagaauuauagaa

SEQ ID NO: 4652 - RNA, 22 nt, Homo sapiens
agggaagugugcuaugcauuua

SEQ ID NO: 4653 - RNA, 22 nt, Homo sapiens
acugcacuccagccugugagac

SEQ ID NO: 4654 - RNA, 22 nt, Homo sapiens
auguuagcaucuggcacuaugg

SEQ ID NO: 4655 - RNA, 20 nt, Homo sapiens
ugagcucaugacauuuuucu

SEQ ID NO: 4656 - RNA, 22 nt, Homo sapiens
uaggcagccagcuguggauuga

SEQ ID NO: 4657 - RNA, 21 nt, Homo sapiens
cuuuugcacuccagccugggu

SEQ ID NO: 4658 - RNA, 22 nt, Homo sapiens
uaggcaauguacauaucggccc

SEQ ID NO: 4659 - RNA, 22 nt, Homo sapiens
uacuguguaguuagaccucaga

SEQ ID NO: 4660 - RNA, 22 nt, Homo sapiens
gucagucugucccugccuggcg

SEQ ID NO: 4661 - RNA, 22 nt, Homo sapiens
ugccuaggcuggaaugcagugg

SEQ ID NO: 4662 - RNA, 22 nt, Homo sapiens
agagcuaguauuuacggagcau

SEQ ID NO: 4663 - RNA, 21 nt, Homo sapiens
ggcauugugcccuugcucuag

SEQ ID NO: 4664 - RNA, 22 nt, Homo sapiens
ugucauguugagaaacuuggau

SEQ ID NO: 4665 - RNA, 20 nt, Homo sapiens
uaugacacugucauaaaaau

SEQ ID NO: 4666 - RNA, 22 nt, Homo sapiens
augcauggucugaagucaaccu

SEQ ID NO: 4667 - RNA, 22 nt, Homo sapiens
uguauaacucacauugaaguuu

SEQ ID NO: 4668 - RNA, 22 nt, Homo sapiens
aggugguuuuucaacacacacu

SEQ ID NO: 4669 - RNA, 22 nt, Homo sapiens
acacuguccaguuaggcuacau

SEQ ID NO: 4670 - RNA, 20 nt, Homo sapiens
ucauacuguggaguaccagg

SEQ ID NO: 4671 - RNA, 22 nt, Homo sapiens
auggcuauucuucuuuugucag

SEQ ID NO: 4672 - RNA, 22 nt, Homo sapiens
aaguauuagcuaauugugcuua

SEQ ID NO: 4673 - RNA, 22 nt, Homo sapiens
ucacauagcauaaugucugcaa

SEQ ID NO: 4674 - RNA, 22 nt, Homo sapiens
ugaaguagguucucguaucgcc

SEQ ID NO: 4675 - RNA, 22 nt, Homo sapiens
uugaggaaugugauuucaaaua

SEQ ID NO: 4676 - RNA, 22 nt, Homo sapiens
auagugcuuuugaaucuuguug

SEQ ID NO: 4677 - RNA, 22 nt, Homo sapiens
uuugaauguaaugagcaggaag

SEQ ID NO: 4678 - RNA, 22 nt, Homo sapiens
gucaaguaaauguuaugguuau

SEQ ID NO: 4679 - RNA, 21 nt, Homo sapiens
uaacccugaaggagcucugga

SEQ ID NO: 4680 - RNA, 22 nt, Homo sapiens
aggcaugauuguauuuugcucu

SEQ ID NO: 4681 - RNA, 22 nt, Homo sapiens
gugaaguuuuuugcugagaguc

SEQ ID NO: 4682 - RNA, 22 nt, Homo sapiens
uacagugcauagaggcaugaua

SEQ ID NO: 4683 - RNA, 22 nt, Homo sapiens
uaagcuagcauagggguaaauu

SEQ ID NO: 4684 - RNA, 22 nt, Homo sapiens
ugacuaggaaauuagaacuuuu

SEQ ID NO: 4685 - RNA, 21 nt, Homo sapiens
gugaggaguuacuggcuuuga

SEQ ID NO: 4686 - RNA, 22 nt, Homo sapiens
aaagucuguuacagcuauuucu

SEQ ID NO: 4687 - RNA, 22 nt, Homo sapiens
ugagacggaguuucgcucuugu

SEQ ID NO: 4688 - RNA, 22 nt, Homo sapiens
ugagacugaguuucucucuugu

SEQ ID NO: 4689 - RNA, 22 nt, Homo sapiens
guucucacuggugcugguaagu

SEQ ID NO: 4690 - RNA, 22 nt, Homo sapiens
auaaaguucugcuggcauauau

SEQ ID NO: 4691 - RNA, 22 nt, Homo sapiens
ucuuuugugagucagccucucc

SEQ ID NO: 4692 - RNA, 22 nt, Homo sapiens
auggaacuggagaugguuauau

SEQ ID NO: 4693 - RNA, 18 nt, Homo sapiens
ugcuaugagauuauuuua

SEQ ID NO: 4694 - RNA, 22 nt, Homo sapiens
uuugacuguggagucgaugcuu

SEQ ID NO: 4695 - RNA, 22 nt, Homo sapiens
ucacugugcacauaugauaggu

SEQ ID NO: 4696 - RNA, 22 nt, Homo sapiens
uugagauggagucucgcugugu

SEQ ID NO: 4697 - RNA, 22 nt, Homo sapiens
agaucacagucuuugguuuuag

SEQ ID NO: 4698 - RNA, 22 nt, Homo sapiens
aaguaaaucuuaugucagggag

SEQ ID NO: 4699 - RNA, 22 nt, Homo sapiens
uaacauugcuggacuaccugcu

SEQ ID NO: 4700 - RNA, 22 nt, Homo sapiens
ugagaugugaagaucacaugaa

SEQ ID NO: 4701 - RNA, 20 nt, Homo sapiens
ucacugaguaucuacgauua

SEQ ID NO: 4702 - RNA, 22 nt, Homo sapiens
cugugcaugcgcggagcugaaa

SEQ ID NO: 4703 - RNA, 22 nt, Homo sapiens
auagugcugcaaaaaacauacg

SEQ ID NO: 4704 - RNA, 22 nt, Homo sapiens
ugagauggaguuucgcccuugu

SEQ ID NO: 4705 - RNA, 18 nt, Homo sapiens
agagcuaugaacauaugc

SEQ ID NO: 4706 - RNA, 22 nt, Homo sapiens
guggcacgaugaucugggcuca

SEQ ID NO: 4707 - RNA, 22 nt, Homo sapiens
uucacaaugccuuguugauggu

SEQ ID NO: 4708 - RNA, 22 nt, Homo sapiens
uaauacauucaaggugguaguu

SEQ ID NO: 4709 - RNA, 22 nt, Homo sapiens
aggcuuauuaagauucccuuau

SEQ ID NO: 4710 - RNA, 22 nt, Homo sapiens
gagauguuuguuucacugucac

SEQ ID NO: 4711 - RNA, 22 nt, Homo sapiens
ucuggucccugcacauauuuuc

SEQ ID NO: 4712 - RNA, 22 nt, Homo sapiens
gugcauauaaguuguuucuagu

SEQ ID NO: 4713 - RNA, 22 nt, Homo sapiens
uucuugguuggcaaccaacagu

SEQ ID NO: 4714 - RNA, 22 nt, Homo sapiens
ggaaagcuagguguggguguac

SEQ ID NO: 4715 - RNA, 22 nt, Homo sapiens
augauacuguucuaagauuuuu

SEQ ID NO: 4716 - RNA, 22 nt, Homo sapiens
cucugagguuauucguaauauu

SEQ ID NO: 4717 - RNA, 22 nt, Homo sapiens
uggucuggagagucccgcccag

SEQ ID NO: 4718 - RNA, 22 nt, Homo sapiens
uccccggaugacggccgcuuca

SEQ ID NO: 4719 - RNA, 22 nt, Homo sapiens
aaugugccuacagugggcuguu

SEQ ID NO: 4720 - RNA, 22 nt, Homo sapiens
aucgcacuccauccugggcaac

SEQ ID NO: 4721 - RNA, 19 nt, Homo sapiens
uucugguguuuuaagccaa

SEQ ID NO: 4722 - RNA, 22 nt, Homo sapiens
gguaaacauaagagagcugacu

SEQ ID NO: 4723 - RNA, 22 nt, Homo sapiens
uuaggcucuuugaggugcccag

SEQ ID NO: 4724 - RNA, 22 nt, Homo sapiens
cacaguugccuaucuccugaag

SEQ ID NO: 4725 - RNA, 22 nt, Homo sapiens
ucaguuuguauuucagguugca

SEQ ID NO: 4726 - RNA, 19 nt, Homo sapiens
ugcauaggguuacauacuc

SEQ ID NO: 4727 - RNA, 21 nt, Homo sapiens
uggaauguucugacuucaggg

SEQ ID NO: 4728 - RNA, 23 nt, Homo sapiens
ucagugucuggauccugcucagu

SEQ ID NO: 4729 - RNA, 22 nt, Homo sapiens
gcauaaagcuaauaagacgaag

SEQ ID NO: 4730 - RNA, 22 nt, Homo sapiens
gauaugugauaagaguuaucuu

SEQ ID NO: 4731 - RNA, 19 nt, Homo sapiens
uacaguacacaacaccuuu

SEQ ID NO: 4732 - RNA, 22 nt, Homo sapiens
auggcagcccucuuuauccaug

SEQ ID NO: 4733 - RNA, 19 nt, Homo sapiens
ucaguagugcacauaagcc

SEQ ID NO: 4734 - RNA, 22 nt, Homo sapiens
uuucauggacgcaaugccuuuu

SEQ ID NO: 4735 - RNA, 22 nt, Homo sapiens
gaggaaguaauuuuaggccugu

SEQ ID NO: 4736 - RNA, 22 nt, Homo sapiens
ucagugccauugccauaugagu

SEQ ID NO: 4737 - RNA, 22 nt, Homo sapiens
cgugaauguuuuggucuuucac

SEQ ID NO: 4738 - RNA, 22 nt, Homo sapiens
ucccugaguaucuaauguguuu

SEQ ID NO: 4739 - RNA, 22 nt, Homo sapiens
cuuuuggcuuaagauugucuug

SEQ ID NO: 4740 - RNA, 22 nt, Homo sapiens
uggacuagagggugggcgaggu

SEQ ID NO: 4741 - RNA, 22 nt, Homo sapiens
aaugugcuuugaaaagagcuga

SEQ ID NO: 4742 - RNA, 22 nt, Homo sapiens
aucagaaucucuagaggacugu

SEQ ID NO: 4743 - RNA, 22 nt, Homo sapiens
uauucacuguaucauugauggg

SEQ ID NO: 4744 - RNA, 22 nt, Homo sapiens
ugaaaucuaaaauguuccaaga

SEQ ID NO: 4745 - RNA, 22 nt, Homo sapiens
gugaugguaguuuguauuucug

SEQ ID NO: 4746 - RNA, 22 nt, Homo sapiens
uauucacaggugugggacaaag

SEQ ID NO: 4747 - RNA, 22 nt, Homo sapiens
uaucaccuugcaguggaugcua

SEQ ID NO: 4748 - RNA, 19 nt, Homo sapiens
ugagagcacaacugaacaa

SEQ ID NO: 4749 - RNA, 22 nt, Homo sapiens
acacuuucuagacaagggaaua

SEQ ID NO: 4750 - RNA, 22 nt, Homo sapiens
gguauguaggucuacgguacaa

SEQ ID NO: 4751 - RNA, 22 nt, Homo sapiens
ugccaagauuucaggaauuaag

SEQ ID NO: 4752 - RNA, 22 nt, Homo sapiens
uccagguuuggcuuuauaacuu

SEQ ID NO: 4753 - RNA, 22 nt, Homo sapiens
gccgagagauuuggaaugggga

SEQ ID NO: 4754 - RNA, 19 nt, Homo sapiens
uuguguccccacaaaauuc

SEQ ID NO: 4755 - RNA, 22 nt, Homo sapiens
cauugcacuccagccuaggcaa

SEQ ID NO: 4756 - RNA, 22 nt, Homo sapiens
aaugugcacuuggagccuugcu

SEQ ID NO: 4757 - RNA, 17 nt, Homo sapiens
ccccugagcgaugcagu

SEQ ID NO: 4758 - RNA, 22 nt, Homo sapiens
ucacaguagcaaauguuagaaa

SEQ ID NO: 4759 - RNA, 22 nt, Homo sapiens
gucuuuaguugaaacauguggu

SEQ ID NO: 4760 - RNA, 22 nt, Homo sapiens
uugaucuguguuagaagcuaag

SEQ ID NO: 4761 - RNA, 22 nt, Homo sapiens
ugugcaugaaauuuaccuuuaa

SEQ ID NO: 4762 - RNA, 22 nt, Homo sapiens
augacauagaagcaauccccua

SEQ ID NO: 4763 - RNA, 21 nt, Homo sapiens
caauggcacaaucucugcuca

SEQ ID NO: 4764 - RNA, 22 nt, Homo sapiens
guaucaugaaguuucuucauuu

SEQ ID NO: 4765 - RNA, 22 nt, Homo sapiens
gucaugaacuguacuacuccua

SEQ ID NO: 4766 - RNA, 22 nt, Homo sapiens
ugguaucauuuuaucugcucua

SEQ ID NO: 4767 - RNA, 22 nt, Homo sapiens
acgguauagauuguauccuagg

SEQ ID NO: 4768 - RNA, 22 nt, Homo sapiens
gugcaguuuuaagugaguuucu

SEQ ID NO: 4769 - RNA, 22 nt, Homo sapiens
aaucacaguguucuugugaggg

SEQ ID NO: 4770 - RNA, 22 nt, Homo sapiens
auagugcugcaaugaacauaca

SEQ ID NO: 4771 - RNA, 22 nt, Homo sapiens
auagugcugcaauaaacauacg

SEQ ID NO: 4772 - RNA, 22 nt, Homo sapiens
ugaagugaaugguaaguaugcc

SEQ ID NO: 4773 - RNA, 22 nt, Homo sapiens
gaaugcagcagugacagggcug

SEQ ID NO: 4774 - RNA, 22 nt, Homo sapiens
guucaucagggauacuggcuua

SEQ ID NO: 4775 - RNA, 22 nt, Homo sapiens
cagauaguuguagguguguggc

SEQ ID NO: 4776 - RNA, 22 nt, Homo sapiens
uuacaguguuuguucuguuacu

SEQ ID NO: 4777 - RNA, 22 nt, Homo sapiens
uugugguuuuaucuaccuuugg

SEQ ID NO: 4778 - RNA, 22 nt, Homo sapiens
auuauuaguuguugaaugaagu

SEQ ID NO: 4779 - RNA, 22 nt, Homo sapiens
gagcugaauugcugccauuugc

SEQ ID NO: 4780 - RNA, 22 nt, Homo sapiens
uauugcagaaugugaguuggca

SEQ ID NO: 4781 - RNA, 22 nt, Homo sapiens
ugugacugguugucccgcuuuc

SEQ ID NO: 4782 - RNA, 21 nt, Homo sapiens
aucaccgugcaguucuccagg

SEQ ID NO: 4783 - RNA, 22 nt, Homo sapiens
uaagggcacuaaucccauuuau

SEQ ID NO: 4784 - RNA, 22 nt, Homo sapiens
gucuugcacuuaccuaagaacu

SEQ ID NO: 4785 - RNA, 22 nt, Homo sapiens
guuacagucuuguguaagguua

SEQ ID NO: 4786 - RNA, 19 nt, Homo sapiens
augauugucuauggaggaa

SEQ ID NO: 4787 - RNA, 22 nt, Homo sapiens
uuaguaguagcugcaugucagu

SEQ ID NO: 4788 - RNA, 22 nt, Homo sapiens
ugaggugaggguaucaaaugcu

SEQ ID NO: 4789 - RNA, 19 nt, Homo sapiens
uaaguagaugacugaugcu

SEQ ID NO: 4790 - RNA, 19 nt, Homo sapiens
gauaucuagggggagguuc

SEQ ID NO: 4791 - RNA, 21 nt, Homo sapiens
augagguguacuguggugaaa

SEQ ID NO: 4792 - RNA, 22 nt, Homo sapiens
aaaguucuugcugaaggauuau

SEQ ID NO: 4793 - RNA, 22 nt, Homo sapiens
ugagcugagaaaugcagcagcu

SEQ ID NO: 4794 - RNA, 22 nt, Homo sapiens
uuugacacugggagugugggug

SEQ ID NO: 4795 - RNA, 22 nt, Homo sapiens
uuagauuauugagcauccacug

SEQ ID NO: 4796 - RNA, 22 nt, Homo sapiens
guucagguauucuggaacagag

SEQ ID NO: 4797 - RNA, 22 nt, Homo sapiens
cuucaugggagaaccacaggua

SEQ ID NO: 4798 - RNA, 22 nt, Homo sapiens
ugagguguuaacuuuacuuuua

SEQ ID NO: 4799 - RNA, 22 nt, Homo sapiens
auuagguaauauaaucauggca

SEQ ID NO: 4800 - RNA, 22 nt, Homo sapiens
uggcuagaugagauguacugca

SEQ ID NO: 4801 - RNA, 21 nt, Homo sapiens
ugcauugucuugaguuuaaau

SEQ ID NO: 4802 - RNA, 22 nt, Homo sapiens
uuccaguuuuauggguauagag

SEQ ID NO: 4803 - RNA, 22 nt, Homo sapiens
acugcacuccagccuugagagc

SEQ ID NO: 4804 - RNA, 22 nt, Homo sapiens
cuuguguuacauauuuaagaga

SEQ ID NO: 4805 - RNA, 22 nt, Homo sapiens
auaugcauguacccacacaggc

SEQ ID NO: 4806 - RNA, 22 nt, Homo sapiens
caaaugacaucauuucauucaa

SEQ ID NO: 4807 - RNA, 22 nt, Homo sapiens
uuaugaaguagguuaagagcag

SEQ ID NO: 4808 - RNA, 22 nt, Homo sapiens
acccugugagagaguuaauauu

SEQ ID NO: 4809 - RNA, 21 nt, Homo sapiens
uauggauuugccuauucugga

SEQ ID NO: 4810 - RNA, 22 nt, Homo sapiens
ggugaucauugucucuaguaug

SEQ ID NO: 4811 - RNA, 22 nt, Homo sapiens
uuggcagucugaggcacagacu

SEQ ID NO: 4812 - RNA, 21 nt, Homo sapiens
augggguagaagagaaggcuu

SEQ ID NO: 4813 - RNA, 22 nt, Homo sapiens
uggaguguaauuagccaucagu

SEQ ID NO: 4814 - RNA, 22 nt, Homo sapiens
augaucauggaagugcacccau

SEQ ID NO: 4815 - RNA, 22 nt, Homo sapiens
ugaaugauuuuaaaagccucuc

SEQ ID NO: 4816 - RNA, 20 nt, Homo sapiens
uugcugguguuagaggaggc

SEQ ID NO: 4817 - RNA, 22 nt, Homo sapiens
gcagguguuaugcaaacaacug

SEQ ID NO: 4818 - RNA, 18 nt, Homo sapiens
ucuggcuucuuuguucca

SEQ ID NO: 4819 - RNA, 22 nt, Homo sapiens
uuugcuaaucaacacuggccug

SEQ ID NO: 4820 - RNA, 22 nt, Homo sapiens
ugguaugucuuucuuccuguag

SEQ ID NO: 4821 - RNA, 22 nt, Homo sapiens
uacuagaggaauugcuauaacu

SEQ ID NO: 4822 - RNA, 22 nt, Homo sapiens
agcugguauuuguuagggaguu

SEQ ID NO: 4823 - RNA, 22 nt, Homo sapiens
gccaagauugguuuaauauucc

SEQ ID NO: 4824 - RNA, 22 nt, Homo sapiens
cucauggagauagagaauagaa

SEQ ID NO: 4825 - RNA, 22 nt, Homo sapiens
uacaauagugacaaaucagcau

SEQ ID NO: 4826 - RNA, 22 nt, Homo sapiens
gugaguaaagguucauugaauu

SEQ ID NO: 4827 - RNA, 22 nt, Homo sapiens
auuugucaauacacuucuucca

SEQ ID NO: 4828 - RNA, 22 nt, Homo sapiens
uggaagacaaguguuagcaugg

SEQ ID NO: 4829 - RNA, 22 nt, Homo sapiens
caucagagugagauauaagauc

SEQ ID NO: 4830 - RNA, 22 nt, Homo sapiens
aaauucaucaaaugguuuguau

SEQ ID NO: 4831 - RNA, 22 nt, Homo sapiens
augaauucaucugguuuuggga

SEQ ID NO: 4832 - RNA, 19 nt, Homo sapiens
augacauuuggggguggac

SEQ ID NO: 4833 - RNA, 19 nt, Homo sapiens
uccuugauugcaccacugc

SEQ ID NO: 4834 - RNA, 22 nt, Homo sapiens
uuuguagcuacaaagugagaug

SEQ ID NO: 4835 - RNA, 22 nt, Homo sapiens
ucugugcggucuguguuaugaa

SEQ ID NO: 4836 - RNA, 22 nt, Homo sapiens
uucacugcaugaaaaggacagc

SEQ ID NO: 4837 - RNA, 22 nt, Homo sapiens
acugguuguuuaacugaauuga

SEQ ID NO: 4838 - RNA, 22 nt, Homo sapiens
agcaccaauaacaguuucuagc

SEQ ID NO: 4839 - RNA, 22 nt, Homo sapiens
gaaguaauaaauggauucuuaa

SEQ ID NO: 4840 - RNA, 20 nt, Homo sapiens
aucagagccggugaaagggc

SEQ ID NO: 4841 - RNA, 23 nt, Homo sapiens
uuucauggggauuuacucauucc

SEQ ID NO: 4842 - RNA, 22 nt, Homo sapiens
auuuggccuuuguaugcaguau

SEQ ID NO: 4843 - RNA, 22 nt, Homo sapiens
cucuggauauuccugucuaaaa

SEQ ID NO: 4844 - RNA, 22 nt, Homo sapiens
cuggcaaauaguagagccagga

SEQ ID NO: 4845 - RNA, 22 nt, Homo sapiens
cuauggcagccacggccuggag

SEQ ID NO: 4846 - RNA, 22 nt, Homo sapiens
gcacaggguuacauucuaaggu

SEQ ID NO: 4847 - RNA, 22 nt, Homo sapiens
ggcacgguggcucacgccugua

SEQ ID NO: 4848 - RNA, 22 nt, Homo sapiens
uucucgcuuuuuccaccuguau

SEQ ID NO: 4849 - RNA, 20 nt, Homo sapiens
aucaaagacuuagaggggga

SEQ ID NO: 4850 - RNA, 22 nt, Homo sapiens
cuauggcuguaaggauaguaac

SEQ ID NO: 4851 - RNA, 22 nt, Homo sapiens
ugucaaacauuaugaugcucua

SEQ ID NO: 4852 - RNA, 22 nt, Homo sapiens
ucagugucugugcaccgcugga

SEQ ID NO: 4853 - RNA, 22 nt, Homo sapiens
uuuggguuaguuuuccaaucuu

SEQ ID NO: 4854 - RNA, 22 nt, Homo sapiens
uugaaugaaauuggugugggga

SEQ ID NO: 4855 - RNA, 22 nt, Homo sapiens
augagcagaugcuccugccucu

SEQ ID NO: 4856 - RNA, 22 nt, Homo sapiens
ugauucccucaagugccuuaug

SEQ ID NO: 4857 - RNA, 19 nt, Homo sapiens
aggcauugugcucaucugu

SEQ ID NO: 4858 - RNA, 22 nt, Homo sapiens
uagcacagggaauugguucucu

SEQ ID NO: 4859 - RNA, 22 nt, Homo sapiens
gagauggaguuucacuucgcuc

SEQ ID NO: 4860 - RNA, 22 nt, Homo sapiens
ucaagugcauugauucaguauu

SEQ ID NO: 4861 - RNA, 22 nt, Homo sapiens
aaugucacugugguccuccagu

SEQ ID NO: 4862 - RNA, 22 nt, Homo sapiens
auggcuguuuaagaguuucauu

SEQ ID NO: 4863 - RNA, 22 nt, Homo sapiens
cacauugcaggaaaguucauua

SEQ ID NO: 4864 - RNA, 17 nt, Homo sapiens
uagcacagugccuggua

SEQ ID NO: 4865 - RNA, 22 nt, Homo sapiens
ucucccuaccugagccgagcca

SEQ ID NO: 4866 - RNA, 22 nt, Homo sapiens
auuccagguggcgccauucaca

SEQ ID NO: 4867 - RNA, 22 nt, Homo sapiens
uaucauggaaagauguugaaau

SEQ ID NO: 4868 - RNA, 19 nt, Homo sapiens
agacuggcccaggcgggug

SEQ ID NO: 4869 - RNA, 19 nt, Homo sapiens
uuugcauagugagaauaua

SEQ ID NO: 4870 - RNA, 22 nt, Homo sapiens
uggccaguugaagacaaugcuc

SEQ ID NO: 4871 - RNA, 22 nt, Homo sapiens
ugagauaaggaaauugaggcuc

SEQ ID NO: 4872 - RNA, 22 nt, Homo sapiens
gugagaauugacacccuugucu

SEQ ID NO: 4873 - RNA, 22 nt, Homo sapiens
aacuaggccuagaaguugagua

SEQ ID NO: 4874 - RNA, 22 nt, Homo sapiens
cucuuggguagauuuugcagag

SEQ ID NO: 4875 - RNA, 22 nt, Homo sapiens
gaagaacuaggugagaucuaga

SEQ ID NO: 4876 - RNA, 19 nt, Homo sapiens
cuguuguacuccaggcauu

SEQ ID NO: 4877 - RNA, 22 nt, Homo sapiens
ugagaacuuugucuuuuacucu

SEQ ID NO: 4878 - RNA, 22 nt, Homo sapiens
ucuaaugcucugagaacagugc

SEQ ID NO: 4879 - RNA, 22 nt, Homo sapiens
gaaagauuuuaacugggagacu

SEQ ID NO: 4880 - RNA, 23 nt, Homo sapiens
agaugcauucuuguaggauauau

SEQ ID NO: 4881 - RNA, 22 nt, Homo sapiens
agugcaaugauccggugcuggg

SEQ ID NO: 4882 - RNA, 22 nt, Homo sapiens
gcugucuggagucuguucaaug

SEQ ID NO: 4883 - RNA, 22 nt, Homo sapiens
aggaauggaaacuuuugauggu

SEQ ID NO: 4884 - RNA, 22 nt, Homo sapiens
uagaaaguagggaagguaggau

SEQ ID NO: 4885 - RNA, 22 nt, Homo sapiens
uuccagugggacgagaugugga

SEQ ID NO: 4886 - RNA, 20 nt, Homo sapiens
auagaagacuagugcagcag

SEQ ID NO: 4887 - RNA, 22 nt, Homo sapiens
gugagaggaggcagcuuuuaca

SEQ ID NO: 4888 - RNA, 21 nt, Homo sapiens
auagcacuucacuugguuaga

SEQ ID NO: 4889 - RNA, 22 nt, Homo sapiens
ucuguacuuccguaccuaaagu

SEQ ID NO: 4890 - RNA, 22 nt, Homo sapiens
ugggcaaaugcuuuuuagucaa

SEQ ID NO: 4891 - RNA, 22 nt, Homo sapiens
cugauauuuuucuggcuugugu

SEQ ID NO: 4892 - RNA, 19 nt, Homo sapiens
auaauuagcagugaggaca

SEQ ID NO: 4893 - RNA, 22 nt, Homo sapiens
ugacuggaacuuuagugagucu

SEQ ID NO: 4894 - RNA, 22 nt, Homo sapiens
uugaguagaaguaugucaguau

SEQ ID NO: 4895 - RNA, 22 nt, Homo sapiens
cuaggcacgccugggucuccag

SEQ ID NO: 4896 - RNA, 22 nt, Homo sapiens
uuaaggcauucuuugucuucau

SEQ ID NO: 4897 - RNA, 22 nt, Homo sapiens
caacauccaccuccuggguuca

SEQ ID NO: 4898 - RNA, 22 nt, Homo sapiens
auuacuuugcaccaaccuaaua

SEQ ID NO: 4899 - RNA, 22 nt, Homo sapiens
agcgacauugguugcuuugguu

SEQ ID NO: 4900 - RNA, 22 nt, Homo sapiens
ucuuuguucaggagccaacucc

SEQ ID NO: 4901 - RNA, 22 nt, Homo sapiens
uuuggcaguuauuuacucagug

SEQ ID NO: 4902 - RNA, 22 nt, Homo sapiens
uuuccacauggacuuaccuucg

SEQ ID NO: 4903 - RNA, 23 nt, Homo sapiens
uacagcugcagaaucaggcuaag

SEQ ID NO: 4904 - RNA, 22 nt, Homo sapiens
auagcauaucccacaugucaga

SEQ ID NO: 4905 - RNA, 22 nt, Homo sapiens
ucuuugguuucugucucuguaa

SEQ ID NO: 4906 - RNA, 22 nt, Homo sapiens
auauguaguauggaaacauugu

SEQ ID NO: 4907 - RNA, 22 nt, Homo sapiens
auaugucuguuuagucuguaau

SEQ ID NO: 4908 - RNA, 22 nt, Homo sapiens
uaugaaccuguuaucuagguuu

SEQ ID NO: 4909 - RNA, 22 nt, Homo sapiens
ugcaguacauucagcauccucu

SEQ ID NO: 4910 - RNA, 22 nt, Homo sapiens
ugagcaucauucacaccuuggu

SEQ ID NO: 4911 - RNA, 22 nt, Homo sapiens
auagguuauuagagcaaagcuu

SEQ ID NO: 4912 - RNA, 22 nt, Homo sapiens
uauagcaaugccccacuccuga

SEQ ID NO: 4913 - RNA, 22 nt, Homo sapiens
uuggaauauaaccuguuucuaa

SEQ ID NO: 4914 - RNA, 22 nt, Homo sapiens
ugaguguccaaguaaggugaaa

SEQ ID NO: 4915 - RNA, 22 nt, Homo sapiens
ucauuagagacagggugucacu

SEQ ID NO: 4916 - RNA, 22 nt, Homo sapiens
acugcacucuagccuuggcaac

SEQ ID NO: 4917 - RNA, 22 nt, Homo sapiens
gugagauaaugucucauugugg

SEQ ID NO: 4918 - RNA, 22 nt, Homo sapiens
gguaaaucuucacuaagacuga

SEQ ID NO: 4919 - RNA, 22 nt, Homo sapiens
gccaguguuuuauugagaauuu

SEQ ID NO: 4920 - RNA, 17 nt, Homo sapiens
gucuuugguugaguuua

SEQ ID NO: 4921 - RNA, 22 nt, Homo sapiens
aagugguagggucaggauugga

SEQ ID NO: 4922 - RNA, 22 nt, Homo sapiens
auugcacuccagucugggcaac

SEQ ID NO: 4923 - RNA, 22 nt, Homo sapiens
aauuggcagugcucuugccaca

SEQ ID NO: 4924 - RNA, 22 nt, Homo sapiens
ugagauaaucaugugauuucau

SEQ ID NO: 4925 - RNA, 22 nt, Homo sapiens
uuuuagcuuuucccaggacucc

SEQ ID NO: 4926 - RNA, 22 nt, Homo sapiens
cagagcacuaaagguaaaaggc

SEQ ID NO: 4927 - RNA, 22 nt, Homo sapiens
agagcaaugggugaauauuaaa

SEQ ID NO: 4928 - RNA, 22 nt, Homo sapiens
auagcaucauuucuugaaaaga

SEQ ID NO: 4929 - RNA, 17 nt, Homo sapiens
ugcaauuuaagcuagau

SEQ ID NO: 4930 - RNA, 22 nt, Homo sapiens
uaggcaauguggcgaaacucug

SEQ ID NO: 4931 - RNA, 22 nt, Homo sapiens
augaucauggaaguuuuccugu

SEQ ID NO: 4932 - RNA, 22 nt, Homo sapiens
acugcaauuacuguuguaccaa

SEQ ID NO: 4933 - RNA, 22 nt, Homo sapiens
agugagcuggagaaaagaaacu

SEQ ID NO: 4934 - RNA, 22 nt, Homo sapiens
uggaauuaauuaaaauauacug

SEQ ID NO: 4935 - RNA, 22 nt, Homo sapiens
guaugugacuggaacaguagga

SEQ ID NO: 4936 - RNA, 22 nt, Homo sapiens
gucccguugugacuuacaaugg

SEQ ID NO: 4937 - RNA, 22 nt, Homo sapiens
ucucaagaugguagaugggaau

SEQ ID NO: 4938 - RNA, 22 nt, Homo sapiens
aaacucuguagcagagacagau

SEQ ID NO: 4939 - RNA, 22 nt, Homo sapiens
gcuaaggcaggagcauugcuug

SEQ ID NO: 4940 - RNA, 21 nt, Homo sapiens
uagugcagugggguaugacuu

SEQ ID NO: 4941 - RNA, 20 nt, Homo sapiens
cugaaugucaaggcagaggu

SEQ ID NO: 4942 - RNA, 22 nt, Homo sapiens
cugagcaugacaucaugugacu

SEQ ID NO: 4943 - RNA, 18 nt, Homo sapiens
cuuccuuagucugguuaa

SEQ ID NO: 4944 - RNA, 22 nt, Homo sapiens
agagguauuggaaggaguguca

SEQ ID NO: 4945 - RNA, 22 nt, Homo sapiens
cuucaagucuuuggauaauuag

SEQ ID NO: 4946 - RNA, 22 nt, Homo sapiens
auaaggcuaguguaggagccag

SEQ ID NO: 4947 - RNA, 22 nt, Homo sapiens
gagaacuaaugauguacuaggc

SEQ ID NO: 4948 - RNA, 23 nt, Homo sapiens
caccaguauaauuagcuuuuaaa

SEQ ID NO: 4949 - RNA, 22 nt, Homo sapiens
uaucaccuugcaggagcuauga

SEQ ID NO: 4950 - RNA, 22 nt, Homo sapiens
uugaggacuggaacacaggucu

SEQ ID NO: 4951 - RNA, 20 nt, Homo sapiens
uggcaagugggaauuguggg

SEQ ID NO: 4952 - RNA, 17 nt, Homo sapiens
ugagcuaugauccuguc

SEQ ID NO: 4953 - RNA, 22 nt, Homo sapiens
gagaaugaacagacugccucuu

SEQ ID NO: 4954 - RNA, 22 nt, Homo sapiens
uuuguacucccuuuagauaaaa

SEQ ID NO: 4955 - RNA, 21 nt, Homo sapiens
uggagugaagaguuuauugac

SEQ ID NO: 4956 - RNA, 22 nt, Homo sapiens
acagugcuguuguguuuucacg

SEQ ID NO: 4957 - RNA, 17 nt, Homo sapiens
uccagauuucaauugaa

SEQ ID NO: 4958 - RNA, 22 nt, Homo sapiens
ugaauguaacuaaaccugugaa

SEQ ID NO: 4959 - RNA, 22 nt, Homo sapiens
auauaugcacacgugugcauau

SEQ ID NO: 4960 - RNA, 22 nt, Homo sapiens
augaaacuggagcgccuggagg

SEQ ID NO: 4961 - RNA, 22 nt, Homo sapiens
uccaguuguucucgaagcuccu

SEQ ID NO: 4962 - RNA, 22 nt, Homo sapiens
caguccuaugauaaccauuuac

SEQ ID NO: 4963 - RNA, 16 nt, Homo sapiens
ucaucacagucucugg

SEQ ID NO: 4964 - RNA, 22 nt, Homo sapiens
auaugcaaauccauagagacag

SEQ ID NO: 4965 - RNA, 22 nt, Homo sapiens
uugugauggugcauacugagcu

SEQ ID NO: 4966 - RNA, 22 nt, Homo sapiens
uauagcacugcaauauuucccu

SEQ ID NO: 4967 - RNA, 23 nt, Homo sapiens
uugcauugcccuccauaguacuc

SEQ ID NO: 4968 - RNA, 22 nt, Homo sapiens
guuuggauauuaggcaagagua

SEQ ID NO: 4969 - RNA, 22 nt, Homo sapiens
auauuggacucugugcuaggaa

SEQ ID NO: 4970 - RNA, 22 nt, Homo sapiens
cccuguagcagcauucuuaaau

SEQ ID NO: 4971 - RNA, 22 nt, Homo sapiens
uuaauagugacucauuuuccac

SEQ ID NO: 4972 - RNA, 22 nt, Homo sapiens
gagaucuuuaagaacuacugcu

SEQ ID NO: 4973 - RNA, 22 nt, Homo sapiens
guuggaauuaaaaggcaaguau

SEQ ID NO: 4974 - RNA, 22 nt, Homo sapiens
gugagauuuucuccagguucag

SEQ ID NO: 4975 - RNA, 22 nt, Homo sapiens
gaagguauauucuguuaaugcu

SEQ ID NO: 4976 - RNA, 22 nt, Homo sapiens
ucagguagcuagauuaugugag

SEQ ID NO: 4977 - RNA, 22 nt, Homo sapiens
ugcauauuuuauaaagauggaa

SEQ ID NO: 4978 - RNA, 22 nt, Homo sapiens
ugucucagugauuggcuuucug

SEQ ID NO: 4979 - RNA, 22 nt, Homo sapiens
ucaauugcuuaugaagauacau

SEQ ID NO: 4980 - RNA, 20 nt, Homo sapiens
auuagacuugccuuauccuu

SEQ ID NO: 4981 - RNA, 22 nt, Homo sapiens
cuuuggauggaaccucucuuuc

SEQ ID NO: 4982 - RNA, 18 nt, Homo sapiens
cagugcaauacaggagag

SEQ ID NO: 4983 - RNA, 21 nt, Homo sapiens
uugguccacaugucauaguua

SEQ ID NO: 4984 - RNA, 23 nt, Homo sapiens
gggauuguaaaauaugagggcag

SEQ ID NO: 4985 - RNA, 22 nt, Homo sapiens
acccuggagagugcuguaguaa

SEQ ID NO: 4986 - RNA, 22 nt, Homo sapiens
auugaggcauguaccaaugguc

SEQ ID NO: 4987 - RNA, 22 nt, Homo sapiens
ccauuugguuauguaucgaaac

SEQ ID NO: 4988 - RNA, 22 nt, Homo sapiens
agcacuacugcacuccagccug

SEQ ID NO: 4989 - RNA, 22 nt, Homo sapiens
uuaccucagaccugcucugugu

SEQ ID NO: 4990 - RNA, 22 nt, Homo sapiens
ugauauguuagaaucuugcaag

SEQ ID NO: 4991 - RNA, 22 nt, Homo sapiens
gaaugcuaaguuuccucccuau

SEQ ID NO: 4992 - RNA, 22 nt, Homo sapiens
ccagugguucccuguggccuga

SEQ ID NO: 4993 - RNA, 20 nt, Homo sapiens
ccccguguuuagcauaucau

SEQ ID NO: 4994 - RNA, 22 nt, Homo sapiens
uuguauguuguuugucagagaa

SEQ ID NO: 4995 - RNA, 22 nt, Homo sapiens
uauugccucuuuuguaaaagug

SEQ ID NO: 4996 - RNA, 22 nt, Homo sapiens
ugagauuguuagaucaaauggu

SEQ ID NO: 4997 - RNA, 22 nt, Homo sapiens
ggcaguuucucaggcaggggua

SEQ ID NO: 4998 - RNA, 22 nt, Homo sapiens
uucagugucauuaacacaguag

SEQ ID NO: 4999 - RNA, 22 nt, Homo sapiens
cuugugcaugaccccagguggg

SEQ ID NO: 5000 - RNA, 22 nt, Homo sapiens
uucuugcuguauccucacaugg

SEQ ID NO: 5001 - RNA, 22 nt, Homo sapiens
guucuauguugggaguucacua

SEQ ID NO: 5002 - RNA, 22 nt, Homo sapiens
auuguaauuuuagagaaagugg

SEQ ID NO: 5003 - RNA, 22 nt, Homo sapiens
augagauucuuagagaagucug

SEQ ID NO: 5004 - RNA, 22 nt, Homo sapiens
uguuauguauggagugauccca

SEQ ID NO: 5005 - RNA, 22 nt, Homo sapiens
guguaauacacacauauaugca

SEQ ID NO: 5006 - RNA, 22 nt, Homo sapiens
aagccagugugacaggaaacuu

SEQ ID NO: 5007 - RNA, 19 nt, Homo sapiens
gacuccagaguugugugcu

SEQ ID NO: 5008 - RNA, 20 nt, Homo sapiens
uacugcacuuuccucauggu

SEQ ID NO: 5009 - RNA, 22 nt, Homo sapiens
auaucccuguauaagugaaugu

SEQ ID NO: 5010 - RNA, 22 nt, Homo sapiens
augccacugcacuucagcuugg

SEQ ID NO: 5011 - RNA, 22 nt, Homo sapiens
gugacaucagcuccagguauaa

SEQ ID NO: 5012 - RNA, 22 nt, Homo sapiens
aagggaaugugguagcugguuu

SEQ ID NO: 5013 - RNA, 22 nt, Homo sapiens
uguuacaguguaggccuugggu

SEQ ID NO: 5014 - RNA, 22 nt, Homo sapiens
uacaguggugugaucucagcuc

SEQ ID NO: 5015 - RNA, 23 nt, Homo sapiens
uaacauugcaugauuaccugcau

SEQ ID NO: 5016 - RNA, 22 nt, Homo sapiens
cuaggcacugauaguuguauuu

SEQ ID NO: 5017 - RNA, 22 nt, Homo sapiens
ggugagcacagaaugcccugag

SEQ ID NO: 5018 - RNA, 22 nt, Homo sapiens
uuuaagguauguggugaaaauu

SEQ ID NO: 5019 - RNA, 22 nt, Homo sapiens
ugagaucaugccacugcacuuc

SEQ ID NO: 5020 - RNA, 22 nt, Homo sapiens
gagguaggggccuuaaagaugc

SEQ ID NO: 5021 - RNA, 22 nt, Homo sapiens
cuagguagcuuuucugucaugu

SEQ ID NO: 5022 - RNA, 22 nt, Homo sapiens
augaggaagucaggcccagggg

SEQ ID NO: 5023 - RNA, 22 nt, Homo sapiens
auacagugaauaucuggggcag

SEQ ID NO: 5024 - RNA, 22 nt, Homo sapiens
ccuggaucauugucauucccaa

SEQ ID NO: 5025 - RNA, 22 nt, Homo sapiens
gaaagacuuucugcuguggaua

SEQ ID NO: 5026 - RNA, 22 nt, Homo sapiens
ugggaucauuaugcauagugua

SEQ ID NO: 5027 - RNA, 22 nt, Homo sapiens
aaugacagccagauucuucucu

SEQ ID NO: 5028 - RNA, 22 nt, Homo sapiens
ugagguaggugaagaaugcacg

SEQ ID NO: 5029 - RNA, 22 nt, Homo sapiens
uugguaguaaucccucacaaaa

SEQ ID NO: 5030 - RNA, 20 nt, Homo sapiens
uuccagcacauuagggaagc

SEQ ID NO: 5031 - RNA, 22 nt, Homo sapiens
gcucaugggcagugugauuguu

SEQ ID NO: 5032 - RNA, 22 nt, Homo sapiens
agaauaauguccccccaaggga

SEQ ID NO: 5033 - RNA, 22 nt, Homo sapiens
ugacaguguccuccuccugaga

SEQ ID NO: 5034 - RNA, 22 nt, Homo sapiens
ucacagucacugucacguugaa

SEQ ID NO: 5035 - RNA, 22 nt, Homo sapiens
agcuggcuguagcugcaagucu

SEQ ID NO: 5036 - RNA, 22 nt, Homo sapiens
gacauguuuucaagauuuauaa

SEQ ID NO: 5037 - RNA, 22 nt, Homo sapiens
ucacugaggucugagcuuuaug

SEQ ID NO: 5038 - RNA, 16 nt, Homo sapiens
ugugucuugggcccug

SEQ ID NO: 5039 - RNA, 22 nt, Homo sapiens
uauggaaaucuuaccuuauggu

SEQ ID NO: 5040 - RNA, 22 nt, Homo sapiens
auuuuugguugucagcacuagg

SEQ ID NO: 5041 - RNA, 22 nt, Homo sapiens
ugacuacaccacacgguuaagg

SEQ ID NO: 5042 - RNA, 22 nt, Homo sapiens
uguggcauuuucagaaaggaug

SEQ ID NO: 5043 - RNA, 16 nt, Homo sapiens
uaaagcuaaucacuuu

SEQ ID NO: 5044 - RNA, 22 nt, Homo sapiens
gaaauggaucagagcaagcuuu

SEQ ID NO: 5045 - RNA, 22 nt, Homo sapiens
aaaugcuuucuuggaccauuug

SEQ ID NO: 5046 - RNA, 22 nt, Homo sapiens
aagcuggcauucauucguucuu

SEQ ID NO: 5047 - RNA, 22 nt, Homo sapiens
uagagcuacagcccucacuguc

SEQ ID NO: 5048 - RNA, 22 nt, Homo sapiens
uagcaguaaagaaugugauguu

SEQ ID NO: 5049 - RNA, 22 nt, Homo sapiens
gacuuagagauguuguauuugg

SEQ ID NO: 5050 - RNA, 22 nt, Homo sapiens
uauacagcaaguuacugugcug

SEQ ID NO: 5051 - RNA, 22 nt, Homo sapiens
ugacuucauuugguaauugggu

SEQ ID NO: 5052 - RNA, 22 nt, Homo sapiens
ucaguguuuuauccuccagagc

SEQ ID NO: 5053 - RNA, 22 nt, Homo sapiens
auucacagcuuuaaaaggcgug

SEQ ID NO: 5054 - RNA, 22 nt, Homo sapiens
acugcacuccagcuuuggguga

SEQ ID NO: 5055 - RNA, 22 nt, Homo sapiens
gaagauucaaccaaaccagaac

SEQ ID NO: 5056 - RNA, 22 nt, Homo sapiens
aaaugggacugggguccuuuga

SEQ ID NO: 5057 - RNA, 22 nt, Homo sapiens
uaguaguuuuguguauaauaau

SEQ ID NO: 5058 - RNA, 22 nt, Homo sapiens
ugagaugaguucucgcucuguc

SEQ ID NO: 5059 - RNA, 22 nt, Homo sapiens
ccucuuuguugagacuucacca

SEQ ID NO: 5060 - RNA, 21 nt, Homo sapiens
ggaguauaaggcaaaggagug

SEQ ID NO: 5061 - RNA, 22 nt, Homo sapiens
uaucacugucaggcccucauau

SEQ ID NO: 5062 - RNA, 17 nt, Homo sapiens
aguacugucccauccuu

SEQ ID NO: 5063 - RNA, 22 nt, Homo sapiens
uggaguguguugcagaugaagg

SEQ ID NO: 5064 - RNA, 22 nt, Homo sapiens
uggaucuguucuauuuaucuga

SEQ ID NO: 5065 - RNA, 22 nt, Homo sapiens
uggacuguaaauuggggacucu

SEQ ID NO: 5066 - RNA, 20 nt, Homo sapiens
uuguacuccugggcucaagc

SEQ ID NO: 5067 - RNA, 22 nt, Homo sapiens
uugacagagaaaagugugacuu

SEQ ID NO: 5068 - RNA, 20 nt, Homo sapiens
uucacugggcucucuguugg

SEQ ID NO: 5069 - RNA, 22 nt, Homo sapiens
aagguauuuuugucuauaucuu

SEQ ID NO: 5070 - RNA, 22 nt, Homo sapiens
uuagcaauagccugcaucugca

SEQ ID NO: 5071 - RNA, 20 nt, Homo sapiens
gcauaugucuuuauggcagc

SEQ ID NO: 5072 - RNA, 22 nt, Homo sapiens
cuuuggcacuuccuaagugcca

SEQ ID NO: 5073 - RNA, 19 nt, Homo sapiens
uggaaugaaauguuagggg

SEQ ID NO: 5074 - RNA, 22 nt, Homo sapiens
accaccauugcacugaacuuuc

SEQ ID NO: 5075 - RNA, 22 nt, Homo sapiens
ggauugugauaauuguugcaaa

SEQ ID NO: 5076 - RNA, 22 nt, Homo sapiens
uacacgugcacaacgugcacgu

SEQ ID NO: 5077 - RNA, 19 nt, Homo sapiens
acugagcuaccugggggca

SEQ ID NO: 5078 - RNA, 22 nt, Homo sapiens
guuugugcuccuaugagaaccu

SEQ ID NO: 5079 - RNA, 22 nt, Homo sapiens
uuguguacuacaguaugccaca

SEQ ID NO: 5080 - RNA, 22 nt, Homo sapiens
aguggcuuuuuaguggcagaug

SEQ ID NO: 5081 - RNA, 22 nt, Homo sapiens
uuuugcaauauguuccugaaua

SEQ ID NO: 5082 - RNA, 18 nt, Homo sapiens
gaaaugccucuugcuuac

SEQ ID NO: 5083 - RNA, 22 nt, Homo sapiens
auauguucucauucauaugugg

SEQ ID NO: 5084 - RNA, 22 nt, Homo sapiens
acuggcuguuaggaauuaccuc

SEQ ID NO: 5085 - RNA, 22 nt, Homo sapiens
auuguguagucuuacugcuugc

SEQ ID NO: 5086 - RNA, 19 nt, Homo sapiens
cauugcacuccacccuggg

SEQ ID NO: 5087 - RNA, 21 nt, Homo sapiens
acugagagaucuggggcacau

SEQ ID NO: 5088 - RNA, 22 nt, Homo sapiens
ugguaagaucagaacuggaguc

SEQ ID NO: 5089 - RNA, 22 nt, Homo sapiens
guacaugcauaguuuauuucug

SEQ ID NO: 5090 - RNA, 22 nt, Homo sapiens
ucugugcugagaguugaaaguu

SEQ ID NO: 5091 - RNA, 22 nt, Homo sapiens
uggcaaauguaguacccaauag

SEQ ID NO: 5092 - RNA, 22 nt, Homo sapiens
acacuguaacucuuugagggca

SEQ ID NO: 5093 - RNA, 22 nt, Homo sapiens
uuaggcuuuauugaaaacaaua

SEQ ID NO: 5094 - RNA, 22 nt, Homo sapiens
ugaguagaacaucaagucauac

SEQ ID NO: 5095 - RNA, 22 nt, Homo sapiens
uuuuugagaauuggugaaacac

SEQ ID NO: 5096 - RNA, 19 nt, Homo sapiens
caucccugagcugaagugg

SEQ ID NO: 5097 - RNA, 22 nt, Homo sapiens
ggaagguaauuggcuaaugaga

SEQ ID NO: 5098 - RNA, 22 nt, Homo sapiens
uaccaccauuguaguuuggaaa

SEQ ID NO: 5099 - RNA, 22 nt, Homo sapiens
agugcauuugcaucucaauaua

SEQ ID NO: 5100 - RNA, 22 nt, Homo sapiens
ucaacugcuugagaucacaaau

SEQ ID NO: 5101 - RNA, 22 nt, Homo sapiens
uggaagugaacaaccaaggcag

SEQ ID NO: 5102 - RNA, 20 nt, Homo sapiens
ucagguagaucuuugagguc

SEQ ID NO: 5103 - RNA, 22 nt, Homo sapiens
uuugcacauauuugggcaaaag

SEQ ID NO: 5104 - RNA, 22 nt, Homo sapiens
uauugaacgugggauauugaag

SEQ ID NO: 5105 - RNA, 22 nt, Homo sapiens
ggaguaugaaacccacuccaau

SEQ ID NO: 5106 - RNA, 22 nt, Homo sapiens
gauggcaugugcugccaccaag

SEQ ID NO: 5107 - RNA, 22 nt, Homo sapiens
uccacuuuugugcugaauugga

SEQ ID NO: 5108 - RNA, 22 nt, Homo sapiens
uucuuugcaugaucucaaaguc

SEQ ID NO: 5109 - RNA, 22 nt, Homo sapiens
uuugcacucaguaagugggagc

SEQ ID NO: 5110 - RNA, 22 nt, Homo sapiens
uauaaugcacauucccaaaucu

SEQ ID NO: 5111 - RNA, 19 nt, Homo sapiens
agaguauuguuacuucucu

SEQ ID NO: 5112 - RNA, 22 nt, Homo sapiens
auguagauaucaagaggcauau

SEQ ID NO: 5113 - RNA, 22 nt, Homo sapiens
uuuugcaggcauuggaaguuua

SEQ ID NO: 5114 - RNA, 22 nt, Homo sapiens
auaaugcuggaacuagagggca

SEQ ID NO: 5115 - RNA, 22 nt, Homo sapiens
guugcaugucugggaggccagc

SEQ ID NO: 5116 - RNA, 22 nt, Homo sapiens
gcaggaauuucucugcagaccc

SEQ ID NO: 5117 - RNA, 22 nt, Homo sapiens
acacuguacuuauguuuugcag

SEQ ID NO: 5118 - RNA, 22 nt, Homo sapiens
gugagcgaggaaacgacggcgc

SEQ ID NO: 5119 - RNA, 22 nt, Homo sapiens
ugaguuguagcuauaguuucuu

SEQ ID NO: 5120 - RNA, 22 nt, Homo sapiens
uauuugguuacuugaauagcua

SEQ ID NO: 5121 - RNA, 22 nt, Homo sapiens
ugaaauguuaaacaaguggcuc

SEQ ID NO: 5122 - RNA, 22 nt, Homo sapiens
cucaguacuugcacagaagaac

SEQ ID NO: 5123 - RNA, 22 nt, Homo sapiens
caagacuguccaacauauuggg

SEQ ID NO: 5124 - RNA, 22 nt, Homo sapiens
agccccauuuguugaaaagacg

SEQ ID NO: 5125 - RNA, 22 nt, Homo sapiens
uaugggcuuuguuuuguacuag

SEQ ID NO: 5126 - RNA, 19 nt, Homo sapiens
augccuggagaugguuaua

SEQ ID NO: 5127 - RNA, 22 nt, Homo sapiens
uuccauagucauagugcugaug

SEQ ID NO: 5128 - RNA, 22 nt, Homo sapiens
uaucauggaaugagguuggaca

SEQ ID NO: 5129 - RNA, 22 nt, Homo sapiens
auaaucacacccagguuaaaug

SEQ ID NO: 5130 - RNA, 22 nt, Homo sapiens
cuuggauuauaauggaauauuu

SEQ ID NO: 5131 - RNA, 22 nt, Homo sapiens
gcaucacagcuccugugcuggc

SEQ ID NO: 5132 - RNA, 22 nt, Homo sapiens
aaaugcugcuuuggccucuucu

SEQ ID NO: 5133 - RNA, 22 nt, Homo sapiens
ucuaauguaaccugcaaauauu

SEQ ID NO: 5134 - RNA, 22 nt, Homo sapiens
uuugugugugauuauaaaaggu

SEQ ID NO: 5135 - RNA, 22 nt, Homo sapiens
guguuugauugcaaauaaucua

SEQ ID NO: 5136 - RNA, 22 nt, Homo sapiens
uuguuuagagacuggaauuaaa

SEQ ID NO: 5137 - RNA, 22 nt, Homo sapiens
augccucugacaauuggauucu

SEQ ID NO: 5138 - RNA, 22 nt, Homo sapiens
guagaauguauacaguauacag

SEQ ID NO: 5139 - RNA, 22 nt, Homo sapiens
ugcaguaggcccagcgggaggc

SEQ ID NO: 5140 - RNA, 22 nt, Homo sapiens
caagguacuuuuacaauuuccc

SEQ ID NO: 5141 - RNA, 22 nt, Homo sapiens
uuggucaggcuaaucucgaacg

SEQ ID NO: 5142 - RNA, 22 nt, Homo sapiens
auugcacucuaaccuaggugac

SEQ ID NO: 5143 - RNA, 22 nt, Homo sapiens
auguaacaguauuuggagaugu

SEQ ID NO: 5144 - RNA, 22 nt, Homo sapiens
ugacaagaaagcgucuucuuuu

SEQ ID NO: 5145 - RNA, 21 nt, Homo sapiens
ugaugcaauccgcuaggucgc

SEQ ID NO: 5146 - RNA, 22 nt, Homo sapiens
ugugggaggugcuaauguaaau

SEQ ID NO: 5147 - RNA, 22 nt, Homo sapiens
cuuccauauucuaggacaggcu

SEQ ID NO: 5148 - RNA, 22 nt, Homo sapiens
augagggagggguggugccgca

SEQ ID NO: 5149 - RNA, 22 nt, Homo sapiens
uaagaauucuguccgguauacu

SEQ ID NO: 5150 - RNA, 22 nt, Homo sapiens
ugccaguauuuuauugagcauu

SEQ ID NO: 5151 - RNA, 22 nt, Homo sapiens
gugaccucuguugcugucacua

SEQ ID NO: 5152 - RNA, 22 nt, Homo sapiens
uauugccugucuccaaaaauca

SEQ ID NO: 5153 - RNA, 22 nt, Homo sapiens
uugcacucuagccugggugaca

SEQ ID NO: 5154 - RNA, 21 nt, Homo sapiens
acauguacacauguaugcaca

SEQ ID NO: 5155 - RNA, 22 nt, Homo sapiens
uguaugcuuuugagagauauuu

SEQ ID NO: 5156 - RNA, 22 nt, Homo sapiens
uugaggucagagguucgagacc

SEQ ID NO: 5157 - RNA, 22 nt, Homo sapiens
cuuugugugggccaagggcugg

SEQ ID NO: 5158 - RNA, 19 nt, Homo sapiens
cugucacugaggaagacug

SEQ ID NO: 5159 - RNA, 19 nt, Homo sapiens
gcuuuguggggaaggagcc

SEQ ID NO: 5160 - RNA, 22 nt, Homo sapiens
uuggaauuagacaagugguggu

SEQ ID NO: 5161 - RNA, 23 nt, Homo sapiens
aggaaguaacuaucuuuucuguc

SEQ ID NO: 5162 - RNA, 22 nt, Homo sapiens
cuccaggugagguuaagggacu

SEQ ID NO: 5163 - RNA, 22 nt, Homo sapiens
uguggcuuuguaaccauggguc

SEQ ID NO: 5164 - RNA, 22 nt, Homo sapiens
uacagccacauaauguaugauu

SEQ ID NO: 5165 - RNA, 22 nt, Homo sapiens
cuguaaaguaagagguaaguua

SEQ ID NO: 5166 - RNA, 22 nt, Homo sapiens
uaugugcaaauuaauugcuaga

SEQ ID NO: 5167 - RNA, 22 nt, Homo sapiens
gggugguuuuauuaucagugac

SEQ ID NO: 5168 - RNA, 22 nt, Homo sapiens
ucccugaagcugcagcaacaca

SEQ ID NO: 5169 - RNA, 22 nt, Homo sapiens
ugagaccaacagauuccaguuc

SEQ ID NO: 5170 - RNA, 22 nt, Homo sapiens
uaugagguagguaugacuauca

SEQ ID NO: 5171 - RNA, 22 nt, Homo sapiens
gaaaugcucauuuuggauccuu

SEQ ID NO: 5172 - RNA, 22 nt, Homo sapiens
ugacuaaaacugaguuucauua

SEQ ID NO: 5173 - RNA, 22 nt, Homo sapiens
agcuggacuugauaaaugaaua

SEQ ID NO: 5174 - RNA, 22 nt, Homo sapiens
agacagcugggaaauggagugu

SEQ ID NO: 5175 - RNA, 17 nt, Homo sapiens
gagguaguuuacuuuca

SEQ ID NO: 5176 - RNA, 22 nt, Homo sapiens
guguuauugagaaauagggugu

SEQ ID NO: 5177 - RNA, 22 nt, Homo sapiens
uguuuugguugucccuggccag

SEQ ID NO: 5178 - RNA, 22 nt, Homo sapiens
ugucaugguguuaauuuuccug

SEQ ID NO: 5179 - RNA, 22 nt, Homo sapiens
guaaguagcuuuagauauaaau

SEQ ID NO: 5180 - RNA, 22 nt, Homo sapiens
acugcauuugucccuuuugaac

SEQ ID NO: 5181 - RNA, 22 nt, Homo sapiens
gagacugagucuugcucuguca

SEQ ID NO: 5182 - RNA, 22 nt, Homo sapiens
aucacagugagcauaugucuau

SEQ ID NO: 5183 - RNA, 20 nt, Homo sapiens
ccaucaguccucucuuguuc

SEQ ID NO: 5184 - RNA, 22 nt, Homo sapiens
uacuuuguagagugugagaauu

SEQ ID NO: 5185 - RNA, 22 nt, Homo sapiens
ucugucacugguggacgaucac

SEQ ID NO: 5186 - RNA, 22 nt, Homo sapiens
gaccacagacuggaaagagggc

SEQ ID NO: 5187 - RNA, 22 nt, Homo sapiens
augguugguuaaaucuguguau

SEQ ID NO: 5188 - RNA, 18 nt, Homo sapiens
uaggaacauugauuggag

SEQ ID NO: 5189 - RNA, 22 nt, Homo sapiens
ccaguuuucccagcaccauuaa

SEQ ID NO: 5190 - RNA, 22 nt, Homo sapiens
uguggccccuagcuacuagaga

SEQ ID NO: 5191 - RNA, 22 nt, Homo sapiens
gcaugcauuuuccuaacuagaa

SEQ ID NO: 5192 - RNA, 22 nt, Homo sapiens
uccacagugguugaacuaguaa

SEQ ID NO: 5193 - RNA, 22 nt, Homo sapiens
uugagggaggccucaguuuaca

SEQ ID NO: 5194 - RNA, 22 nt, Homo sapiens
guauuagguuggggcaaaagua

SEQ ID NO: 5195 - RNA, 22 nt, Homo sapiens
uaaacugcuugaaaugguguca

SEQ ID NO: 5196 - RNA, 22 nt, Homo sapiens
uagaaagcaugaccuucagaua

SEQ ID NO: 5197 - RNA, 22 nt, Homo sapiens
uucaucaguuauauuggccuga

SEQ ID NO: 5198 - RNA, 22 nt, Homo sapiens
uugacugggccagacagagauc

SEQ ID NO: 5199 - RNA, 22 nt, Homo sapiens
auaguggcaugaucauagcuca

SEQ ID NO: 5200 - RNA, 22 nt, Homo sapiens
uauccacgugaaaaagauugaa

SEQ ID NO: 5201 - RNA, 22 nt, Homo sapiens
uagcuccagugggguuacugcu

SEQ ID NO: 5202 - RNA, 23 nt, Homo sapiens
aagcaugcacagcuguuuguggu

SEQ ID NO: 5203 - RNA, 22 nt, Homo sapiens
agguauguaugucuguacagcg

SEQ ID NO: 5204 - RNA, 22 nt, Homo sapiens
ugucaggaguuuuagaaucuua

SEQ ID NO: 5205 - RNA, 19 nt, Homo sapiens
ugugacugggccagccuag

SEQ ID NO: 5206 - RNA, 22 nt, Homo sapiens
gaguuguuuuaaggcacugacu

SEQ ID NO: 5207 - RNA, 21 nt, Homo sapiens
ugagaugugaccagggcauca

SEQ ID NO: 5208 - RNA, 22 nt, Homo sapiens
uagguacuuuacauguuaucuc

SEQ ID NO: 5209 - RNA, 22 nt, Homo sapiens
cugaagugcuugccacauaaaa

SEQ ID NO: 5210 - RNA, 22 nt, Homo sapiens
agucaagugguuucugaguugg

SEQ ID NO: 5211 - RNA, 22 nt, Homo sapiens
gagacauugacuuuguuccaga

SEQ ID NO: 5212 - RNA, 22 nt, Homo sapiens
ugcaccacacuccauccugggc

SEQ ID NO: 5213 - RNA, 22 nt, Homo sapiens
uguaauuuaaaugauccuugga

SEQ ID NO: 5214 - RNA, 22 nt, Homo sapiens
ugguaaguuuaacaugcauccc

SEQ ID NO: 5215 - RNA, 22 nt, Homo sapiens
auagguagcauagcaggaauau

SEQ ID NO: 5216 - RNA, 22 nt, Homo sapiens
uuauaggcaggugguguagaug

SEQ ID NO: 5217 - RNA, 21 nt, Homo sapiens
acaguaguaauaguguagcca

SEQ ID NO: 5218 - RNA, 22 nt, Homo sapiens
aggaaguaauaaguuugguucu

SEQ ID NO: 5219 - RNA, 22 nt, Homo sapiens
uaucacggaguacauguucugu

SEQ ID NO: 5220 - RNA, 22 nt, Homo sapiens
auacuguacugaaguacccauu

SEQ ID NO: 5221 - RNA, 22 nt, Homo sapiens
aaucacauugaaucugcuaccu

SEQ ID NO: 5222 - RNA, 22 nt, Homo sapiens
uuggcaauucagauucuuuuau

SEQ ID NO: 5223 - RNA, 22 nt, Homo sapiens
aaucaccaugcacuacagccuu

SEQ ID NO: 5224 - RNA, 22 nt, Homo sapiens
cuggcucuguuagaagaaccag

SEQ ID NO: 5225 - RNA, 22 nt, Homo sapiens
uugagauggagucucgcacugu

SEQ ID NO: 5226 - RNA, 22 nt, Homo sapiens
gauaugaguagucgcauugaug

SEQ ID NO: 5227 - RNA, 22 nt, Homo sapiens
uagcagugucuagguaggccau

SEQ ID NO: 5228 - RNA, 22 nt, Homo sapiens
uugagauggagucuugcucuug

SEQ ID NO: 5229 - RNA, 22 nt, Homo sapiens
uaucaaacccaaggaggggguu

SEQ ID NO: 5230 - RNA, 22 nt, Homo sapiens
guaugguacuuuaugguuagug

SEQ ID NO: 5231 - RNA, 22 nt, Homo sapiens
uacaugugccauguugguuugc

SEQ ID NO: 5232 - RNA, 22 nt, Homo sapiens
uagcauaauuuguagaaaauca

SEQ ID NO: 5233 - RNA, 22 nt, Homo sapiens
ggaagccugcacucgggcaggg

SEQ ID NO: 5234 - RNA, 22 nt, Homo sapiens
ccagaguuucugauucagcagg

SEQ ID NO: 5235 - RNA, 22 nt, Homo sapiens
auggcucuuauuauuuugaggu

SEQ ID NO: 5236 - RNA, 22 nt, Homo sapiens
agcuaguauuuuguuaaggauu

SEQ ID NO: 5237 - RNA, 22 nt, Homo sapiens
caaggcacagccccuacuuccu

SEQ ID NO: 5238 - RNA, 22 nt, Homo sapiens
ugugccaaaucccauaauaaau

SEQ ID NO: 5239 - RNA, 22 nt, Homo sapiens
auagugcuauggcagaccuuga

SEQ ID NO: 5240 - RNA, 22 nt, Homo sapiens
auauggguauuaagaaucaaaa

SEQ ID NO: 5241 - RNA, 23 nt, Homo sapiens
cacagggugaacaccccuaaucc

SEQ ID NO: 5242 - RNA, 21 nt, Homo sapiens
ugcauauuggaacuuucucuc

SEQ ID NO: 5243 - RNA, 22 nt, Homo sapiens
augugucaaaucuaggccaaag

SEQ ID NO: 5244 - RNA, 22 nt, Homo sapiens
uacucaguagucuguugcuguc

SEQ ID NO: 5245 - RNA, 22 nt, Homo sapiens
gcauauguuuggguguguauau

SEQ ID NO: 5246 - RNA, 22 nt, Homo sapiens
aaggauuguaaaguugacaaau

SEQ ID NO: 5247 - RNA, 22 nt, Homo sapiens
uugguaagguggaugaugaaua

SEQ ID NO: 5248 - RNA, 22 nt, Homo sapiens
uugccgggugcaguggcucaug

SEQ ID NO: 5249 - RNA, 22 nt, Homo sapiens
acuuggcaaaguuuuaaacagc

SEQ ID NO: 5250 - RNA, 22 nt, Homo sapiens
uuaaggugaaguucucagaugc

SEQ ID NO: 5251 - RNA, 22 nt, Homo sapiens
uuugauguugagacuauaaagc

SEQ ID NO: 5252 - RNA, 22 nt, Homo sapiens
gcugguauuacaggcaugagcc

SEQ ID NO: 5253 - RNA, 22 nt, Homo sapiens
gagauuaacauuugaggagcug

SEQ ID NO: 5254 - RNA, 22 nt, Homo sapiens
ugguauguguucuaaaauuaug

SEQ ID NO: 5255 - RNA, 22 nt, Homo sapiens
ugugccacugcacucccgccug

SEQ ID NO: 5256 - RNA, 22 nt, Homo sapiens
accugagauuacaggugcuggc

SEQ ID NO: 5257 - RNA, 22 nt, Homo sapiens
ucaucagaaucccuuagggaug

SEQ ID NO: 5258 - RNA, 22 nt, Homo sapiens
acuggauguuagggauuuuauu

SEQ ID NO: 5259 - RNA, 22 nt, Homo sapiens
agaugguauuauagguuucugu

SEQ ID NO: 5260 - RNA, 17 nt, Homo sapiens
uugaaugcauuacuugg

SEQ ID NO: 5261 - RNA, 22 nt, Homo sapiens
aauggcucuguuggcccaagac

SEQ ID NO: 5262 - RNA, 22 nt, Homo sapiens
cucagguaguuccuuauagcaa

SEQ ID NO: 5263 - RNA, 22 nt, Homo sapiens
aucuacuugcugggucucugga

SEQ ID NO: 5264 - RNA, 22 nt, Homo sapiens
uagcacugucuugcaccugugc

SEQ ID NO: 5265 - RNA, 22 nt, Homo sapiens
uucaacagugauggccuuugua

SEQ ID NO: 5266 - RNA, 22 nt, Homo sapiens
ugcaccacuguacuccagucug

SEQ ID NO: 5267 - RNA, 22 nt, Homo sapiens
guggcaugaaagcagauaccac

SEQ ID NO: 5268 - RNA, 22 nt, Homo sapiens
ccucacaaccuuuauugaagag

SEQ ID NO: 5269 - RNA, 20 nt, Homo sapiens
uggaaauuaaccuuucaggu

SEQ ID NO: 5270 - RNA, 22 nt, Homo sapiens
aucacagguacuauggcugaca

SEQ ID NO: 5271 - RNA, 22 nt, Homo sapiens
gugcacuguagaacccuuuguu

SEQ ID NO: 5272 - RNA, 22 nt, Homo sapiens
ugaguuaggagaguguggcucu

SEQ ID NO: 5273 - RNA, 22 nt, Homo sapiens
augaggugggagaaucacuuga

SEQ ID NO: 5274 - RNA, 22 nt, Homo sapiens
cuggaaagaaacccuuaauucu

SEQ ID NO: 5275 - RNA, 22 nt, Homo sapiens
ucuccauuguccagaugaggaa

SEQ ID NO: 5276 - RNA, 22 nt, Homo sapiens
ugccaguauuuuguugaggauu

SEQ ID NO: 5277 - RNA, 22 nt, Homo sapiens
auagcaaugccccauucccagu

SEQ ID NO: 5278 - RNA, 22 nt, Homo sapiens
ucauguacuuguagucccggcu

SEQ ID NO: 5279 - RNA, 22 nt, Homo sapiens
uuggaagauuacuuaguuuucu

SEQ ID NO: 5280 - RNA, 22 nt, Homo sapiens
aggauaguaaugauagagaggc

SEQ ID NO: 5281 - RNA, 22 nt, Homo sapiens
gaauaaacuagagaggacugag

SEQ ID NO: 5282 - RNA, 22 nt, Homo sapiens
ugugguuuuaguaaaacuaugu

SEQ ID NO: 5283 - RNA, 22 nt, Homo sapiens
gugggaugcaaguaaaauuguc

SEQ ID NO: 5284 - RNA, 22 nt, Homo sapiens
gcggguguuuuacccuugcaga

SEQ ID NO: 5285 - RNA, 22 nt, Homo sapiens
ucccuagagaagugauuuuuga

SEQ ID NO: 5286 - RNA, 22 nt, Homo sapiens
cagucacagugacaggaugugg

SEQ ID NO: 5287 - RNA, 22 nt, Homo sapiens
ugcugcaaucucggcacuuugg

SEQ ID NO: 5288 - RNA, 22 nt, Homo sapiens
ggaguaaaagaguaggaggaau

SEQ ID NO: 5289 - RNA, 22 nt, Homo sapiens
gcuggcaaaugguuauaaggcc

SEQ ID NO: 5290 - RNA, 22 nt, Homo sapiens
ugcaguguucuuuagaggaaau

SEQ ID NO: 5291 - RNA, 20 nt, Homo sapiens
auggaacugugagccaauua

SEQ ID NO: 5292 - RNA, 22 nt, Homo sapiens
ucuuggguggauucauucuuuc

SEQ ID NO: 5293 - RNA, 22 nt, Homo sapiens
agacaguauuggcaaagugugu

SEQ ID NO: 5294 - RNA, 22 nt, Homo sapiens
uuugcugagucauuccaugcug

SEQ ID NO: 5295 - RNA, 22 nt, Homo sapiens
uaugagacugguuaauuuuugu

SEQ ID NO: 5296 - RNA, 22 nt, Homo sapiens
agagaugaagauggggcucccg

SEQ ID NO: 5297 - RNA, 22 nt, Homo sapiens
ggcaaauucuuguaugccuacu

SEQ ID NO: 5298 - RNA, 22 nt, Homo sapiens
uugugagggagcuaagaugagu

SEQ ID NO: 5299 - RNA, 22 nt, Homo sapiens
ugagcagaaguuuugauuggcg

SEQ ID NO: 5300 - RNA, 22 nt, Homo sapiens
uauggcuucuauaaggaagcuu

SEQ ID NO: 5301 - RNA, 22 nt, Homo sapiens
ucgcugcgaccuccaccucccg

SEQ ID NO: 5302 - RNA, 22 nt, Homo sapiens
uuaaauacagcaugguguuucu

SEQ ID NO: 5303 - RNA, 22 nt, Homo sapiens
aagcaucacauaauggaucaug

SEQ ID NO: 5304 - RNA, 22 nt, Homo sapiens
aucagugaaagugaaaucuccg

SEQ ID NO: 5305 - RNA, 21 nt, Homo sapiens
augagauguuagacuuuagac

SEQ ID NO: 5306 - RNA, 22 nt, Homo sapiens
uguugcacucuagccugggcaa

SEQ ID NO: 5307 - RNA, 22 nt, Homo sapiens
aucauauccuagauauaacuuc

SEQ ID NO: 5308 - RNA, 22 nt, Homo sapiens
uggcaagcuuuaauugacucuu

SEQ ID NO: 5309 - RNA, 22 nt, Homo sapiens
auguguucaucacagcacaauu

SEQ ID NO: 5310 - RNA, 22 nt, Homo sapiens
ugagucauguaauaaugcugcu

SEQ ID NO: 5311 - RNA, 21 nt, Homo sapiens
ucauaagcucaacaucuguag

SEQ ID NO: 5312 - RNA, 22 nt, Homo sapiens
uuggcagaaaaggucggggguu

SEQ ID NO: 5313 - RNA, 21 nt, Homo sapiens
gugaggucauugggcuuucug

SEQ ID NO: 5314 - RNA, 22 nt, Homo sapiens
gagaucaaugccuauggcuuuc

SEQ ID NO: 5315 - RNA, 22 nt, Homo sapiens
ggaucacagccagcucccagaa

SEQ ID NO: 5316 - RNA, 22 nt, Homo sapiens
uggguaggaccagaaaugcacu

SEQ ID NO: 5317 - RNA, 21 nt, Homo sapiens
ucaaauugaaauuaggucauu

SEQ ID NO: 5318 - RNA, 22 nt, Homo sapiens
auacacgugccauguugguaug

SEQ ID NO: 5319 - RNA, 22 nt, Homo sapiens
caggaccucuugccuggaagcc

SEQ ID NO: 5320 - RNA, 22 nt, Homo sapiens
guguaugguuguuguagagaga

SEQ ID NO: 5321 - RNA, 22 nt, Homo sapiens
uucuugaggcaugccgcuggga

SEQ ID NO: 5322 - RNA, 22 nt, Homo sapiens
ucauaggucugagaagaaaaua

SEQ ID NO: 5323 - RNA, 23 nt, Homo sapiens
cagcucauuuggguccccuuguc

SEQ ID NO: 5324 - RNA, 22 nt, Homo sapiens
uuccacaaugguugaacuagcu

SEQ ID NO: 5325 - RNA, 22 nt, Homo sapiens
uagauaauuagaggguuuuaag

SEQ ID NO: 5326 - RNA, 22 nt, Homo sapiens
auagcagcaccccacuaccuca

SEQ ID NO: 5327 - RNA, 22 nt, Homo sapiens
gucaugucuugaaauucaguuu

SEQ ID NO: 5328 - RNA, 22 nt, Homo sapiens
ugaacacuggauaaggagucag

SEQ ID NO: 5329 - RNA, 22 nt, Homo sapiens
uauuucacaucuaugaagugag

SEQ ID NO: 5330 - RNA, 22 nt, Homo sapiens
ucauugcuuauuuguuggugga

SEQ ID NO: 5331 - RNA, 22 nt, Homo sapiens
ucauggcacugaugagaguuuc

SEQ ID NO: 5332 - RNA, 22 nt, Homo sapiens
gagguaggaggauugcuuaagg

SEQ ID NO: 5333 - RNA, 21 nt, Homo sapiens
ucacugagcaucaugguuuca

SEQ ID NO: 5334 - RNA, 22 nt, Homo sapiens
ugugucuccugaaaauucacau

SEQ ID NO: 5335 - RNA, 22 nt, Homo sapiens
gucuggcaauggcagacuggca

SEQ ID NO: 5336 - RNA, 22 nt, Homo sapiens
uggucuuuucaacaaaugguau

SEQ ID NO: 5337 - RNA, 22 nt, Homo sapiens
gugaggcacugcugcuuuccag

SEQ ID NO: 5338 - RNA, 21 nt, Homo sapiens
ggugagaaaggagacauagac

SEQ ID NO: 5339 - RNA, 22 nt, Homo sapiens
gcccugagauucuuggauucug

SEQ ID NO: 5340 - RNA, 22 nt, Homo sapiens
gagcucguuuuugcugacucuu

SEQ ID NO: 5341 - RNA, 22 nt, Homo sapiens
uuugcacuugaaaacacucuca

SEQ ID NO: 5342 - RNA, 22 nt, Homo sapiens
uggaaaauuaggggagguuaua

SEQ ID NO: 5343 - RNA, 22 nt, Homo sapiens
ucacauguguaaauugguguaa

SEQ ID NO: 5344 - RNA, 22 nt, Homo sapiens
uuuacccugaggaaucuauuuu

SEQ ID NO: 5345 - RNA, 22 nt, Homo sapiens
cauagguugggcguuugauuuu

SEQ ID NO: 5346 - RNA, 22 nt, Homo sapiens
ugggaacaugaagguuaaagag

SEQ ID NO: 5347 - RNA, 22 nt, Homo sapiens
ugacaguaucuacagcuucuua

SEQ ID NO: 5348 - RNA, 22 nt, Homo sapiens
uaaggcacauaggccuggaaac

SEQ ID NO: 5349 - RNA, 22 nt, Homo sapiens
ucuuuagugacaguugugcaag

SEQ ID NO: 5350 - RNA, 20 nt, Homo sapiens
uaagccacacagucuaaggu

SEQ ID NO: 5351 - RNA, 22 nt, Homo sapiens
aaggaguguggugaucuugggc

SEQ ID NO: 5352 - RNA, 18 nt, Homo sapiens
uugcaucauuuuguuguu

SEQ ID NO: 5353 - RNA, 22 nt, Homo sapiens
uuuaaagcaugacgagaagaag

SEQ ID NO: 5354 - RNA, 22 nt, Homo sapiens
uucugugcugaaucaaagacug

SEQ ID NO: 5355 - RNA, 22 nt, Homo sapiens
ugcauaauuccuugcaccagaa

SEQ ID NO: 5356 - RNA, 22 nt, Homo sapiens
gacaaguuugauuuauuccaag

SEQ ID NO: 5357 - RNA, 22 nt, Homo sapiens
ucucagugacugcugggucccc

SEQ ID NO: 5358 - RNA, 19 nt, Homo sapiens
cuuugguugagcguguugg

SEQ ID NO: 5359 - RNA, 22 nt, Homo sapiens
ugucacaguuuguacuuuauag

SEQ ID NO: 5360 - RNA, 22 nt, Homo sapiens
auccauugucuaaugcuaagau

SEQ ID NO: 5361 - RNA, 22 nt, Homo sapiens
uuguacuucagacaugccaaag

SEQ ID NO: 5362 - RNA, 22 nt, Homo sapiens
ugaggaucucuaggaauuuauc

SEQ ID NO: 5363 - RNA, 22 nt, Homo sapiens
uaauauguuuugaaaucaggaa

SEQ ID NO: 5364 - RNA, 18 nt, Homo sapiens
uggagauaagaagaacuu

SEQ ID NO: 5365 - RNA, 21 nt, Homo sapiens
uaaaugucauacaaagcaaug

SEQ ID NO: 5366 - RNA, 21 nt, Homo sapiens
ggauucaucccucaugaauuu

SEQ ID NO: 5367 - RNA, 22 nt, Homo sapiens
uucuacagugacugcagccaua

SEQ ID NO: 5368 - RNA, 22 nt, Homo sapiens
aagugcuucagaagacaauauu

SEQ ID NO: 5369 - RNA, 22 nt, Homo sapiens
ugauaguugucagugggggacc

SEQ ID NO: 5370 - RNA, 22 nt, Homo sapiens
uaguaaacagcucugccacaau

SEQ ID NO: 5371 - RNA, 22 nt, Homo sapiens
ugagagaugaacuauucuugaa

SEQ ID NO: 5372 - RNA, 22 nt, Homo sapiens
gugcaagagugauugcaguuuu

SEQ ID NO: 5373 - RNA, 22 nt, Homo sapiens
aucagucuguuggaauaucgcu

SEQ ID NO: 5374 - RNA, 22 nt, Homo sapiens
uccuugguugauccugugcaga

SEQ ID NO: 5375 - RNA, 22 nt, Homo sapiens
ugcaaaugucaaggguuagugu

SEQ ID NO: 5376 - RNA, 22 nt, Homo sapiens
ucugagguaggugcauggauac

SEQ ID NO: 5377 - RNA, 22 nt, Homo sapiens
ucaccuggagagcuugcuaaua

SEQ ID NO: 5378 - RNA, 20 nt, Homo sapiens
acugcacuccaggcugccca

SEQ ID NO: 5379 - RNA, 22 nt, Homo sapiens
guucucacuggacugugaaaau

SEQ ID NO: 5380 - RNA, 22 nt, Homo sapiens
aucacauggccagguaguaauc

SEQ ID NO: 5381 - RNA, 22 nt, Homo sapiens
uggcucauuucuaaacccagcu

SEQ ID NO: 5382 - RNA, 22 nt, Homo sapiens
auugugucuuguagagagauau

SEQ ID NO: 5383 - RNA, 22 nt, Homo sapiens
auggccuuguauaccuggcaaa

SEQ ID NO: 5384 - RNA, 22 nt, Homo sapiens
ugcaucacaguacuccagccug

SEQ ID NO: 5385 - RNA, 22 nt, Homo sapiens
uugaggacugagacagaccaag

SEQ ID NO: 5386 - RNA, 20 nt, Homo sapiens
ucuugggaauguagccuagg

SEQ ID NO: 5387 - RNA, 17 nt, Homo sapiens
guacacuucuucuguga

SEQ ID NO: 5388 - RNA, 22 nt, Homo sapiens
uaugaccuuguccccucucgcc

SEQ ID NO: 5389 - RNA, 22 nt, Homo sapiens
ucacagcuaaaaugaaaguagu

SEQ ID NO: 5390 - RNA, 22 nt, Homo sapiens
aaggcagucacuaaauagugag

SEQ ID NO: 5391 - RNA, 23 nt, Homo sapiens
uuccaccauugacuaguuacaua

SEQ ID NO: 5392 - RNA, 22 nt, Homo sapiens
uuuuagcagccaugacaaagau

SEQ ID NO: 5393 - RNA, 22 nt, Homo sapiens
ugucacagagauuuugguaugu

SEQ ID NO: 5394 - RNA, 22 nt, Homo sapiens
ugacugucuagauagagcuugg

SEQ ID NO: 5395 - RNA, 21 nt, Homo sapiens
gucacuggggcuggauaauuc

SEQ ID NO: 5396 - RNA, 22 nt, Homo sapiens
auggaucauauucuugaggagg

SEQ ID NO: 5397 - RNA, 22 nt, Homo sapiens
uuugugcugcaauuaauuuccc

SEQ ID NO: 5398 - RNA, 22 nt, Homo sapiens
ugcuaugucagccaggcugguc

SEQ ID NO: 5399 - RNA, 22 nt, Homo sapiens
uguaagcagcagagacuauccu

SEQ ID NO: 5400 - RNA, 22 nt, Homo sapiens
cugagcaagucauuuuguuaaa

SEQ ID NO: 5401 - RNA, 22 nt, Homo sapiens
uagauuaucccugauuugucca

SEQ ID NO: 5402 - RNA, 22 nt, Homo sapiens
agcuuguauuuguagccuguug

SEQ ID NO: 5403 - RNA, 22 nt, Homo sapiens
gucugguuggaguaguuuucag

SEQ ID NO: 5404 - RNA, 22 nt, Homo sapiens
cgccgggggaugggcaccagcg

SEQ ID NO: 5405 - RNA, 22 nt, Homo sapiens
guggaaaucucugugugacuua

SEQ ID NO: 5406 - RNA, 22 nt, Homo sapiens
uuuguucaccucaaggauggga

SEQ ID NO: 5407 - RNA, 22 nt, Homo sapiens
ugaugucuugcaggcacgagau

SEQ ID NO: 5408 - RNA, 22 nt, Homo sapiens
uuaagguaugugggcauuuugu

SEQ ID NO: 5409 - RNA, 22 nt, Homo sapiens
aggaagcuagcauuuguucagu

SEQ ID NO: 5410 - RNA, 22 nt, Homo sapiens
augugcaaagcacuguucagca

SEQ ID NO: 5411 - RNA, 22 nt, Homo sapiens
uggauguaauugauucauguug

SEQ ID NO: 5412 - RNA, 22 nt, Homo sapiens
cucauuggucagacgcgucggu

SEQ ID NO: 5413 - RNA, 22 nt, Homo sapiens
auuagguuggugcaaaacuuuc

SEQ ID NO: 5414 - RNA, 17 nt, Homo sapiens
acagugcuuugcuuucc

SEQ ID NO: 5415 - RNA, 22 nt, Homo sapiens
ggucauggauguuuauaguaca

SEQ ID NO: 5416 - RNA, 22 nt, Homo sapiens
ugugcuuguaaaggccagagca

SEQ ID NO: 5417 - RNA, 22 nt, Homo sapiens
uauggcucuauuuccuugucua

SEQ ID NO: 5418 - RNA, 22 nt, Homo sapiens
gucaggcaccgauacaguuuuu

SEQ ID NO: 5419 - RNA, 22 nt, Homo sapiens
auggauuuuaggauacaguuga

SEQ ID NO: 5420 - RNA, 21 nt, Homo sapiens
uuuguaguagcaugauuuaua

SEQ ID NO: 5421 - RNA, 22 nt, Homo sapiens
uucauggguuaauuuguucgau

SEQ ID NO: 5422 - RNA, 22 nt, Homo sapiens
cauugcacucuagccucggcaa

SEQ ID NO: 5423 - RNA, 22 nt, Homo sapiens
uugucacugcacuccagucugg

SEQ ID NO: 5424 - RNA, 22 nt, Homo sapiens
acccaguagucauucaggagca

SEQ ID NO: 5425 - RNA, 22 nt, Homo sapiens
uaagaugaaggcucaccuagaa

SEQ ID NO: 5426 - RNA, 22 nt, Homo sapiens
uacagcacugugcauagugguu

SEQ ID NO: 5427 - RNA, 22 nt, Homo sapiens
uuguaagaaucuagcucuuuau

SEQ ID NO: 5428 - RNA, 22 nt, Homo sapiens
uauacgugcagaucacagggga

SEQ ID NO: 5429 - RNA, 22 nt, Homo sapiens
ugguucaguugcacaggcuguu

SEQ ID NO: 5430 - RNA, 22 nt, Homo sapiens
cugacaagauucaucacucagu

SEQ ID NO: 5431 - RNA, 22 nt, Homo sapiens
ugagauuaucguaauguaucuc

SEQ ID NO: 5432 - RNA, 22 nt, Homo sapiens
gucauguuuaacuucuugagga

SEQ ID NO: 5433 - RNA, 22 nt, Homo sapiens
ugucaagaaaucaaggugugag

SEQ ID NO: 5434 - RNA, 22 nt, Homo sapiens
caugaacacugugcggcuuccu

SEQ ID NO: 5435 - RNA, 22 nt, Homo sapiens
guaacugguuuucuucccucuc

SEQ ID NO: 5436 - RNA, 22 nt, Homo sapiens
uucauggaugcauuugaggggu

SEQ ID NO: 5437 - RNA, 22 nt, Homo sapiens
aagguucuugcuugcaugacug

SEQ ID NO: 5438 - RNA, 22 nt, Homo sapiens
aggcacacaacccuggaccuga

SEQ ID NO: 5439 - RNA, 22 nt, Homo sapiens
uauugugcauguugaauaacua

SEQ ID NO: 5440 - RNA, 22 nt, Homo sapiens
auacagugaauacuuacagugu

SEQ ID NO: 5441 - RNA, 22 nt, Homo sapiens
uuguacuauuuuuaucagugau

SEQ ID NO: 5442 - RNA, 21 nt, Homo sapiens
agugagucauuuggaaagcaa

SEQ ID NO: 5443 - RNA, 22 nt, Homo sapiens
ucacugggagcauuugagccuu

SEQ ID NO: 5444 - RNA, 22 nt, Homo sapiens
uacaagcaggaaaugguauaug

SEQ ID NO: 5445 - RNA, 22 nt, Homo sapiens
caaauugcuugucuguagugga

SEQ ID NO: 5446 - RNA, 22 nt, Homo sapiens
aaguuaauguuuaagacuccua

SEQ ID NO: 5447 - RNA, 22 nt, Homo sapiens
agaaugucagcuggauucagcu

SEQ ID NO: 5448 - RNA, 20 nt, Homo sapiens
cagcacgcacaugagacugu

SEQ ID NO: 5449 - RNA, 22 nt, Homo sapiens
uagcaccuuagcauuucuagug

SEQ ID NO: 5450 - RNA, 22 nt, Homo sapiens
gagacugagucuugcuuuguca

SEQ ID NO: 5451 - RNA, 22 nt, Homo sapiens
guggaguaugaaaacugacuuu

SEQ ID NO: 5452 - RNA, 22 nt, Homo sapiens
cacuuugguucaccugaguuuc

SEQ ID NO: 5453 - RNA, 22 nt, Homo sapiens
uggagagucauuuauaguauuu

SEQ ID NO: 5454 - RNA, 22 nt, Homo sapiens
uugaaaucuuccacagcccaag

SEQ ID NO: 5455 - RNA, 22 nt, Homo sapiens
ugucuuggacuugaaucucauu

SEQ ID NO: 5456 - RNA, 22 nt, Homo sapiens
gcugacagugguuauacuuaga

SEQ ID NO: 5457 - RNA, 22 nt, Homo sapiens
uugagcaucauguuagcacuca

SEQ ID NO: 5458 - RNA, 22 nt, Homo sapiens
auugaguaaaaaauagugaugu

SEQ ID NO: 5459 - RNA, 22 nt, Homo sapiens
aucuguagauucagcacaagcu

SEQ ID NO: 5460 - RNA, 16 nt, Homo sapiens
ucuggcucuacaguuc

SEQ ID NO: 5461 - RNA, 22 nt, Homo sapiens
uucaguaaauguucuuacuaua

SEQ ID NO: 5462 - RNA, 22 nt, Homo sapiens
gagcacccuuuguugauugcaa

SEQ ID NO: 5463 - RNA, 22 nt, Homo sapiens
guauuagguuggugcaaaauug

SEQ ID NO: 5464 - RNA, 22 nt, Homo sapiens
guccagagaagucauuacuuca

SEQ ID NO: 5465 - RNA, 22 nt, Homo sapiens
gaggucauucugugguacccag

SEQ ID NO: 5466 - RNA, 22 nt, Homo sapiens
uuugugcuaaugcuagauuacu

SEQ ID NO: 5467 - RNA, 22 nt, Homo sapiens
ucugacaaugaacaaucuauag

SEQ ID NO: 5468 - RNA, 22 nt, Homo sapiens
uggaguaggccuaagaaugaca

SEQ ID NO: 5469 - RNA, 22 nt, Homo sapiens
ugugacugguugucccacuuuc

SEQ ID NO: 5470 - RNA, 22 nt, Homo sapiens
guagcaugcaauauuauagaga

SEQ ID NO: 5471 - RNA, 22 nt, Homo sapiens
ucauucauucuucaguggguac

SEQ ID NO: 5472 - RNA, 22 nt, Homo sapiens
aaauugcuuuugaagacuuagu

SEQ ID NO: 5473 - RNA, 22 nt, Homo sapiens
ucugacucugugaugggcccaa

SEQ ID NO: 5474 - RNA, 22 nt, Homo sapiens
aaccugaagaaaauauuugcug

SEQ ID NO: 5475 - RNA, 22 nt, Homo sapiens
uugucaugguuaauuuuaugua

SEQ ID NO: 5476 - RNA, 22 nt, Homo sapiens
guucagcaggggcuucaauggu

SEQ ID NO: 5477 - RNA, 22 nt, Homo sapiens
acccuguugguggaucagauug

SEQ ID NO: 5478 - RNA, 22 nt, Homo sapiens
guaauaacuguggaaaaagguu

SEQ ID NO: 5479 - RNA, 22 nt, Homo sapiens
gcaaaguaauuguuguuuuugc

SEQ ID NO: 5480 - RNA, 22 nt, Homo sapiens
auuugucacuauguggcuaaua

SEQ ID NO: 5481 - RNA, 21 nt, Homo sapiens
uggaaugaauggccaacaugg

SEQ ID NO: 5482 - RNA, 22 nt, Homo sapiens
agugcaguggugccaucauaac

SEQ ID NO: 5483 - RNA, 22 nt, Homo sapiens
uuugcaccuuccuaguggcuga

SEQ ID NO: 5484 - RNA, 22 nt, Homo sapiens
ugagaugaagcuagaagaaugg

SEQ ID NO: 5485 - RNA, 22 nt, Homo sapiens
gcuuguguucaaggaacaccua

SEQ ID NO: 5486 - RNA, 22 nt, Homo sapiens
uuuugguucaauuaauuugcua

SEQ ID NO: 5487 - RNA, 22 nt, Homo sapiens
cagcuguuguugggguauagga

SEQ ID NO: 5488 - RNA, 22 nt, Homo sapiens
uagguagucagcagugcuuaca

SEQ ID NO: 5489 - RNA, 22 nt, Homo sapiens
gucccagagauauugugucuuu

SEQ ID NO: 5490 - RNA, 22 nt, Homo sapiens
auuccaguggguuuacauccca

SEQ ID NO: 5491 - RNA, 22 nt, Homo sapiens
gugagaugauggguauguuaau

SEQ ID NO: 5492 - RNA, 22 nt, Homo sapiens
uaugaggaguauaacccgguga

SEQ ID NO: 5493 - RNA, 22 nt, Homo sapiens
uuauucauuaauugcuaagguu

SEQ ID NO: 5494 - RNA, 22 nt, Homo sapiens
uguauguuucuuaggccugaga

SEQ ID NO: 5495 - RNA, 22 nt, Homo sapiens
guuccuuguagaugcuggauau

SEQ ID NO: 5496 - RNA, 22 nt, Homo sapiens
uuuggcagaugacccucaaguu

SEQ ID NO: 5497 - RNA, 20 nt, Homo sapiens
ugugauuauuuaguugcaug

SEQ ID NO: 5498 - RNA, 22 nt, Homo sapiens
guggaaguguaaaagcucuugg

SEQ ID NO: 5499 - RNA, 22 nt, Homo sapiens
ugggaugaugcuugagaauauc

SEQ ID NO: 5500 - RNA, 20 nt, Homo sapiens
uauuugguuauuuccauggu

SEQ ID NO: 5501 - RNA, 22 nt, Homo sapiens
uuaugguuuauuagcaggguua

SEQ ID NO: 5502 - RNA, 22 nt, Homo sapiens
aaacauugaccucauccuggca

SEQ ID NO: 5503 - RNA, 22 nt, Homo sapiens
uauugcuccuaauaucacggug

SEQ ID NO: 5504 - RNA, 18 nt, Homo sapiens
augaacucaucaguucuu

SEQ ID NO: 5505 - RNA, 22 nt, Homo sapiens
cuccaguuucagaaucccaugu

SEQ ID NO: 5506 - RNA, 22 nt, Homo sapiens
ugugucuuuuaucacacaaugu

SEQ ID NO: 5507 - RNA, 22 nt, Homo sapiens
ucagaguggagucugcagccuu

SEQ ID NO: 5508 - RNA, 22 nt, Homo sapiens
uuuaguucauuaaggaaucucc

SEQ ID NO: 5509 - RNA, 22 nt, Homo sapiens
ugcaccacugcacuccacccug

SEQ ID NO: 5510 - RNA, 22 nt, Homo sapiens
aucacagaacuuugagcagaga

SEQ ID NO: 5511 - RNA, 22 nt, Homo sapiens
auguaaacagaugugcagcuug

SEQ ID NO: 5512 - RNA, 22 nt, Homo sapiens
augaucaucugaaagcuuuuac

SEQ ID NO: 5513 - RNA, 22 nt, Homo sapiens
aaggcaguggcagaagauguca

SEQ ID NO: 5514 - RNA, 22 nt, Homo sapiens
gugugauguaaagaacugggga

SEQ ID NO: 5515 - RNA, 22 nt, Homo sapiens
cucacggcccugcgcacuggca

SEQ ID NO: 5516 - RNA, 22 nt, Homo sapiens
uugcacagucuagcuccaccuu

SEQ ID NO: 5517 - RNA, 22 nt, Homo sapiens
uucaauacuguugauccuuaug

SEQ ID NO: 5518 - RNA, 22 nt, Homo sapiens
gugacauuuuuacugaugagag

SEQ ID NO: 5519 - RNA, 22 nt, Homo sapiens
agugguauaauauuauuuugaa

SEQ ID NO: 5520 - RNA, 19 nt, Homo sapiens
uugguugguuauuucuuac

SEQ ID NO: 5521 - RNA, 22 nt, Homo sapiens
auagaucauugucauuuuagau

SEQ ID NO: 5522 - RNA, 18 nt, Homo sapiens
auuguaagauguauggga

SEQ ID NO: 5523 - RNA, 18 nt, Homo sapiens
gacaguguggcgauuccu

SEQ ID NO: 5524 - RNA, 22 nt, Homo sapiens
uaucaucauguuuuugcugugu

SEQ ID NO: 5525 - RNA, 22 nt, Homo sapiens
ucucacaccccucucauauacc

SEQ ID NO: 5526 - RNA, 20 nt, Homo sapiens
cagggcaaugaggagguaaa

SEQ ID NO: 5527 - RNA, 22 nt, Homo sapiens
auaucccagugaugauugauag

SEQ ID NO: 5528 - RNA, 22 nt, Homo sapiens
ugcaccacugcaccccagucug

SEQ ID NO: 5529 - RNA, 22 nt, Homo sapiens
uugacuagaccaucuuucuaga

SEQ ID NO: 5530 - RNA, 22 nt, Homo sapiens
aucagaaucucuagugggacca

SEQ ID NO: 5531 - RNA, 22 nt, Homo sapiens
uggagagugauaaguaaaugga

SEQ ID NO: 5532 - RNA, 22 nt, Homo sapiens
gaugauauuugagucauuagaa

SEQ ID NO: 5533 - RNA, 17 nt, Homo sapiens
auaaacucaucauuuuu

SEQ ID NO: 5534 - RNA, 22 nt, Homo sapiens
gcacauuacaaguauuagcuca

SEQ ID NO: 5535 - RNA, 22 nt, Homo sapiens
guuaggcagugugguauagcag

SEQ ID NO: 5536 - RNA, 22 nt, Homo sapiens
uaacuaaagagaagucaauguc

SEQ ID NO: 5537 - RNA, 22 nt, Homo sapiens
cuugcagaggcccuggggagag

SEQ ID NO: 5538 - RNA, 22 nt, Homo sapiens
auggagcaaaacagauuuggga

SEQ ID NO: 5539 - RNA, 22 nt, Homo sapiens
aagcuguugguggauguaccau

SEQ ID NO: 5540 - RNA, 22 nt, Homo sapiens
uucagcuacuugggaggcugaa

SEQ ID NO: 5541 - RNA, 22 nt, Homo sapiens
gcccuguaguauaguuugaagu

SEQ ID NO: 5542 - RNA, 22 nt, Homo sapiens
acauugcagauguguuuaaugu

SEQ ID NO: 5543 - RNA, 22 nt, Homo sapiens
uucaucacagucuccgaugccc

SEQ ID NO: 5544 - RNA, 22 nt, Homo sapiens
ccuguguuaugguuucuaaugu

SEQ ID NO: 5545 - RNA, 22 nt, Homo sapiens
uuagaaaguagaaaagcugguu

SEQ ID NO: 5546 - RNA, 22 nt, Homo sapiens
uagugguaguuauggauuugcu

SEQ ID NO: 5547 - RNA, 22 nt, Homo sapiens
auguuagcaucaauauucauca

SEQ ID NO: 5548 - RNA, 22 nt, Homo sapiens
cugagaguugaugaaauauggu

SEQ ID NO: 5549 - RNA, 23 nt, Homo sapiens
caugaacuaguuugcagccauga

SEQ ID NO: 5550 - RNA, 17 nt, Homo sapiens
gaaguguuucagcagcu

SEQ ID NO: 5551 - RNA, 22 nt, Homo sapiens
ccacaaccuccauauccugggu

SEQ ID NO: 5552 - RNA, 18 nt, Homo sapiens
ugugauggauauguuaau

SEQ ID NO: 5553 - RNA, 22 nt, Homo sapiens
guccaagacuaggaguuggcag

SEQ ID NO: 5554 - RNA, 22 nt, Homo sapiens
aucacagagucacgggcaacuu

SEQ ID NO: 5555 - RNA, 22 nt, Homo sapiens
agacuagaaaucauuuguugag

SEQ ID NO: 5556 - RNA, 22 nt, Homo sapiens
cugacaagugaucacagcagca

SEQ ID NO: 5557 - RNA, 22 nt, Homo sapiens
ugagaauauuuuccaugucuca

SEQ ID NO: 5558 - RNA, 19 nt, Homo sapiens
aauaaugccagaugucugu

SEQ ID NO: 5559 - RNA, 18 nt, Homo sapiens
uagagcacaagcuuuggc

SEQ ID NO: 5560 - RNA, 19 nt, Homo sapiens
ucagugcuauguaauguag

SEQ ID NO: 5561 - RNA, 22 nt, Homo sapiens
aacuggcauaugaacuuguucu

SEQ ID NO: 5562 - RNA, 22 nt, Homo sapiens
uccugagaauagaguugcaugu

SEQ ID NO: 5563 - RNA, 22 nt, Homo sapiens
ugguuguuuuaaaugucgucug

SEQ ID NO: 5564 - RNA, 22 nt, Homo sapiens
aauggcagaugaaauugucauu

SEQ ID NO: 5565 - RNA, 22 nt, Homo sapiens
uucaugcaucuguagugguuaa

SEQ ID NO: 5566 - RNA, 22 nt, Homo sapiens
ucuauugguaggggcugaggca

SEQ ID NO: 5567 - RNA, 22 nt, Homo sapiens
uugaucaucagcuuugucaucu

SEQ ID NO: 5568 - RNA, 22 nt, Homo sapiens
uuacaguaugaguaagaguucu

SEQ ID NO: 5569 - RNA, 19 nt, Homo sapiens
caugugcacuacuggcuuc

SEQ ID NO: 5570 - RNA, 23 nt, Homo sapiens
ugacuuaggccucaacuaugacu

SEQ ID NO: 5571 - RNA, 22 nt, Homo sapiens
ugaauagaaguuuacuccuuuu

SEQ ID NO: 5572 - RNA, 22 nt, Homo sapiens
caaagugcugggaugggccagg

SEQ ID NO: 5573 - RNA, 22 nt, Homo sapiens
ugagauggaguuucgcucuugu

SEQ ID NO: 5574 - RNA, 22 nt, Homo sapiens
ugagacggaguuuugcucuugu

SEQ ID NO: 5575 - RNA, 22 nt, Homo sapiens
uaugaagccaggauuuauuauu

SEQ ID NO: 5576 - RNA, 22 nt, Homo sapiens
agauggugugcuaggaaaugua

SEQ ID NO: 5577 - RNA, 22 nt, Homo sapiens
cauugcaguggaguggggaaga

SEQ ID NO: 5578 - RNA, 19 nt, Homo sapiens
gucaaagucgguauucaaa

SEQ ID NO: 5579 - RNA, 22 nt, Homo sapiens
guaaugaacuugaaagccuguu

SEQ ID NO: 5580 - RNA, 22 nt, Homo sapiens
uuacagcugggugugucuggua

SEQ ID NO: 5581 - RNA, 22 nt, Homo sapiens
uagcugcacuuacaagugagaa

SEQ ID NO: 5582 - RNA, 22 nt, Homo sapiens
agagguaagcaguggcaagugc

SEQ ID NO: 5583 - RNA, 22 nt, Homo sapiens
agcuuuuugggaggccuuagga

SEQ ID NO: 5584 - RNA, 22 nt, Homo sapiens
gugcacauuguuuaugucuguu

SEQ ID NO: 5585 - RNA, 22 nt, Homo sapiens
uaaguagaggaaucauuuugug

SEQ ID NO: 5586 - RNA, 22 nt, Homo sapiens
agcaguacauaaaaagcauccu

SEQ ID NO: 5587 - RNA, 18 nt, Homo sapiens
augcauauuuuaaguugu

SEQ ID NO: 5588 - RNA, 22 nt, Homo sapiens
uguacccuuagagagugaucga

SEQ ID NO: 5589 - RNA, 22 nt, Homo sapiens
gagauauucugguuuacuaaau

SEQ ID NO: 5590 - RNA, 22 nt, Homo sapiens
ucuaaaacuagauugugaugau

SEQ ID NO: 5591 - RNA, 22 nt, Homo sapiens
uaucacagaggguauccuagag

SEQ ID NO: 5592 - RNA, 19 nt, Homo sapiens
augccacagugaggucaga

SEQ ID NO: 5593 - RNA, 22 nt, Homo sapiens
aggagcacaauggucaugugga

SEQ ID NO: 5594 - RNA, 22 nt, Homo sapiens
guacauguaugcaugcaugcau

SEQ ID NO: 5595 - RNA, 22 nt, Homo sapiens
gcagguaguuucugacuuuuac

SEQ ID NO: 5596 - RNA, 22 nt, Homo sapiens
uugcauuguacuugguacggcu

SEQ ID NO: 5597 - RNA, 22 nt, Homo sapiens
cugagaucaagucuugcucugu

SEQ ID NO: 5598 - RNA, 22 nt, Homo sapiens
auaagagcaggcuucuggccag

SEQ ID NO: 5599 - RNA, 22 nt, Homo sapiens
guauugcuugagcccaggaguu

SEQ ID NO: 5600 - RNA, 22 nt, Homo sapiens
uugaggaagugguuccccagag

SEQ ID NO: 5601 - RNA, 22 nt, Homo sapiens
gccaagaagugucuaagcagga

SEQ ID NO: 5602 - RNA, 22 nt, Homo sapiens
uugauugacaugucucuguuca

SEQ ID NO: 5603 - RNA, 22 nt, Homo sapiens
guaaauguccccugugauauug

SEQ ID NO: 5604 - RNA, 22 nt, Homo sapiens
cuugggcagugugcauguguau

SEQ ID NO: 5605 - RNA, 22 nt, Homo sapiens
aaaugcauaucaagauugcccu

SEQ ID NO: 5606 - RNA, 22 nt, Homo sapiens
gacugcagugcagcuguuaggc

SEQ ID NO: 5607 - RNA, 22 nt, Homo sapiens
cauugcaguuuuugguguaucu

SEQ ID NO: 5608 - RNA, 22 nt, Homo sapiens
accaguguuuaccaaguagcau

SEQ ID NO: 5609 - RNA, 22 nt, Homo sapiens
ugucaggagcaaugauaaauuu

SEQ ID NO: 5610 - RNA, 22 nt, Homo sapiens
uguguuugauaaguccauaguu

SEQ ID NO: 5611 - RNA, 22 nt, Homo sapiens
gugggguaggugacuugaugag

SEQ ID NO: 5612 - RNA, 22 nt, Homo sapiens
cuggaaagcaaguccauugcuc

SEQ ID NO: 5613 - RNA, 19 nt, Homo sapiens
auggauacauuuucugcua

SEQ ID NO: 5614 - RNA, 19 nt, Homo sapiens
agcuuuggcuaacuuucuc

SEQ ID NO: 5615 - RNA, 22 nt, Homo sapiens
uaggcauuuuucugauaaacua

SEQ ID NO: 5616 - RNA, 22 nt, Homo sapiens
ggagggugagaucaauuuggga

SEQ ID NO: 5617 - RNA, 17 nt, Homo sapiens
ugaggcacuaguaucac

SEQ ID NO: 5618 - RNA, 22 nt, Homo sapiens
uccuuuggucaguauucuuuug

SEQ ID NO: 5619 - RNA, 20 nt, Homo sapiens
uacacguaugagcacaugug

SEQ ID NO: 5620 - RNA, 22 nt, Homo sapiens
uaagacuguuggcaauuuuugc

SEQ ID NO: 5621 - RNA, 22 nt, Homo sapiens
uaucaagaugacaaacuuugcu

SEQ ID NO: 5622 - RNA, 22 nt, Homo sapiens
agagaacugauuggaguugggc

SEQ ID NO: 5623 - RNA, 22 nt, Homo sapiens
ggcacugugaugugagggggua

SEQ ID NO: 5624 - RNA, 22 nt, Homo sapiens
uggacuguaauuuuauaggcau

SEQ ID NO: 5625 - RNA, 22 nt, Homo sapiens
cuuaaagcgaauauugguggua

SEQ ID NO: 5626 - RNA, 22 nt, Homo sapiens
ugaugugucaucugagagagug

SEQ ID NO: 5627 - RNA, 22 nt, Homo sapiens
ucacuggagauagcaaucuggu

SEQ ID NO: 5628 - RNA, 21 nt, Homo sapiens
uggaaucuauuauuccaguuu

SEQ ID NO: 5629 - RNA, 22 nt, Homo sapiens
caagagaccugagugucauucu

SEQ ID NO: 5630 - RNA, 22 nt, Homo sapiens
ugagacaugugaauauuuguac

SEQ ID NO: 5631 - RNA, 22 nt, Homo sapiens
ucugugguuguugcauggaaug

SEQ ID NO: 5632 - RNA, 22 nt, Homo sapiens
gacuaggagagcagcugcccau

SEQ ID NO: 5633 - RNA, 22 nt, Homo sapiens
ugacagaggucuuuuaauagcu

SEQ ID NO: 5634 - RNA, 22 nt, Homo sapiens
ugcuggugauuaaauccugaag

SEQ ID NO: 5635 - RNA, 22 nt, Homo sapiens
ucacugaaaccuccgccuucug

SEQ ID NO: 5636 - RNA, 21 nt, Homo sapiens
uuggggaauggagagguuuuc

SEQ ID NO: 5637 - RNA, 22 nt, Homo sapiens
guggcaagaugacuacucacug

SEQ ID NO: 5638 - RNA, 22 nt, Homo sapiens
cuugugauugcacggcugccug

SEQ ID NO: 5639 - RNA, 20 nt, Homo sapiens
ucacugagugguccacagua

SEQ ID NO: 5640 - RNA, 22 nt, Homo sapiens
gagauaauagcuauaggaucuu

SEQ ID NO: 5641 - RNA, 22 nt, Homo sapiens
augccacuguccuccugccuag

SEQ ID NO: 5642 - RNA, 22 nt, Homo sapiens
uaucacaaacuuagcaguuuaa

SEQ ID NO: 5643 - RNA, 18 nt, Homo sapiens
auauugcauuggauggau

SEQ ID NO: 5644 - RNA, 22 nt, Homo sapiens
cuccacgugaaugccaaguauu

SEQ ID NO: 5645 - RNA, 22 nt, Homo sapiens
uugguccguugugaaaaggccu

SEQ ID NO: 5646 - RNA, 22 nt, Homo sapiens
cuuuguggggucuuuccucaaa

SEQ ID NO: 5647 - RNA, 22 nt, Homo sapiens
cauugcaugcauauggcuuggu

SEQ ID NO: 5648 - RNA, 22 nt, Homo sapiens
agcagcaugaggggacuucugc

SEQ ID NO: 5649 - RNA, 22 nt, Homo sapiens
uuuggcuauguuguaucuuucc

SEQ ID NO: 5650 - RNA, 22 nt, Homo sapiens
aaacccguagauccgaucuugu

SEQ ID NO: 5651 - RNA, 20 nt, Homo sapiens
auuccacuuguuugagguac

SEQ ID NO: 5652 - RNA, 22 nt, Homo sapiens
uuggaaguguguauguauagcu

SEQ ID NO: 5653 - RNA, 22 nt, Homo sapiens
gugagcuccucucuauguguca

SEQ ID NO: 5654 - RNA, 23 nt, Homo sapiens
ucagguaguuucagaggaccuug

SEQ ID NO: 5655 - RNA, 20 nt, Homo sapiens
aggcauguugguuugcgugu

SEQ ID NO: 5656 - RNA, 22 nt, Homo sapiens
gaugagauguucucauggauug

SEQ ID NO: 5657 - RNA, 22 nt, Homo sapiens
uucacagagagaacucaaacca

SEQ ID NO: 5658 - RNA, 22 nt, Homo sapiens
uugaagacuauaugauucuuca

SEQ ID NO: 5659 - RNA, 22 nt, Homo sapiens
cucuuugcuucuggcaucauug

SEQ ID NO: 5660 - RNA, 22 nt, Homo sapiens
uuguacuuuuaguagagacggg

SEQ ID NO: 5661 - RNA, 20 nt, Homo sapiens
cugaggugggagaaucgcuu

SEQ ID NO: 5662 - RNA, 22 nt, Homo sapiens
gagacggagucucgcucuguca

SEQ ID NO: 5663 - RNA, 20 nt, Homo sapiens
uuugcagaaucuaagaagag

SEQ ID NO: 5664 - RNA, 22 nt, Homo sapiens
ugggguagaauagaauugauau

SEQ ID NO: 5665 - RNA, 22 nt, Homo sapiens
uuugaauggaaguuuugugaaa

SEQ ID NO: 5666 - RNA, 22 nt, Homo sapiens
cauacagcuaguaaguguaaga

SEQ ID NO: 5667 - RNA, 22 nt, Homo sapiens
gcaguguggguagagggcaaga

SEQ ID NO: 5668 - RNA, 22 nt, Homo sapiens
gucagugcuuuaguucaggaug

SEQ ID NO: 5669 - RNA, 22 nt, Homo sapiens
uugucuccuagacgaccaggcg

SEQ ID NO: 5670 - RNA, 19 nt, Homo sapiens
augcaaugucacaggcugc

SEQ ID NO: 5671 - RNA, 22 nt, Homo sapiens
uugcuccccaggaaaggaagca

SEQ ID NO: 5672 - RNA, 22 nt, Homo sapiens
gcaguacacuguugguaggaau

SEQ ID NO: 5673 - RNA, 22 nt, Homo sapiens
cugaucuguagcagccaccaca

SEQ ID NO: 5674 - RNA, 22 nt, Homo sapiens
ucaggcacucagcuuagagucu

SEQ ID NO: 5675 - RNA, 19 nt, Homo sapiens
uggaacauaaaaguugguu

SEQ ID NO: 5676 - RNA, 22 nt, Homo sapiens
gagguacgaaauacacuguacu

SEQ ID NO: 5677 - RNA, 22 nt, Homo sapiens
gaugacuaagaauuuuauaauu

SEQ ID NO: 5678 - RNA, 22 nt, Homo sapiens
ugucaguuucaguguuagccuu

SEQ ID NO: 5679 - RNA, 23 nt, Homo sapiens
uaugacagaggaagggggagcug

SEQ ID NO: 5680 - RNA, 22 nt, Homo sapiens
cuggucguuauuuaucuucuca

SEQ ID NO: 5681 - RNA, 22 nt, Homo sapiens
uuaggacacuguggguggguca

SEQ ID NO: 5682 - RNA, 22 nt, Homo sapiens
ugaaguguuuauuuuggccuuc

SEQ ID NO: 5683 - RNA, 22 nt, Homo sapiens
auggauaugcuuccaacugccu

SEQ ID NO: 5684 - RNA, 22 nt, Homo sapiens
gugagaauauuuuaaauacuaa

SEQ ID NO: 5685 - RNA, 22 nt, Homo sapiens
ugcaaucauuuggaggagaaga

SEQ ID NO: 5686 - RNA, 22 nt, Homo sapiens
ugagcaacauuucaaaacucca

SEQ ID NO: 5687 - RNA, 22 nt, Homo sapiens
aaagcuagagaagcugcuguca

SEQ ID NO: 5688 - RNA, 22 nt, Homo sapiens
acugcacugucaaccuccuggg

SEQ ID NO: 5689 - RNA, 22 nt, Homo sapiens
auugaacacuucugugugccag

SEQ ID NO: 5690 - RNA, 20 nt, Homo sapiens
acagcacugguuucaagcaa

SEQ ID NO: 5691 - RNA, 22 nt, Homo sapiens
uaaagcacuuuuuucugcaugg

SEQ ID NO: 5692 - RNA, 21 nt, Homo sapiens
ucaaggaguauacguaugcca

SEQ ID NO: 5693 - RNA, 22 nt, Homo sapiens
gagcaaugagcugccugcugag

SEQ ID NO: 5694 - RNA, 22 nt, Homo sapiens
ucuuaggugaugauugauguga

SEQ ID NO: 5695 - RNA, 22 nt, Homo sapiens
auggcagcugguuuuacccuag

SEQ ID NO: 5696 - RNA, 22 nt, Homo sapiens
uuuguacuccuuggccagcuuc

SEQ ID NO: 5697 - RNA, 22 nt, Homo sapiens
uuugggaaugaguuuaucauuu

SEQ ID NO: 5698 - RNA, 22 nt, Homo sapiens
cuuguuguggaggggagugcag

SEQ ID NO: 5699 - RNA, 22 nt, Homo sapiens
uugaaugaaaugaugucauuug

SEQ ID NO: 5700 - RNA, 22 nt, Homo sapiens
uggcauguguuugaaugaguau

SEQ ID NO: 5701 - RNA, 22 nt, Homo sapiens
ugcgguagugcaaucauggcuc

SEQ ID NO: 5702 - RNA, 22 nt, Homo sapiens
uucccugaaguguuacucuaga

SEQ ID NO: 5703 - RNA, 22 nt, Homo sapiens
uguagauaucuaucaggucaau

SEQ ID NO: 5704 - RNA, 22 nt, Homo sapiens
uagguaagauguuaacagcuga

SEQ ID NO: 5705 - RNA, 22 nt, Homo sapiens
cagugcaaagccucugcccaga

SEQ ID NO: 5706 - RNA, 22 nt, Homo sapiens
uggcauuuuguuuuagaauuag

SEQ ID NO: 5707 - RNA, 22 nt, Homo sapiens
ucgcauggucuccaggcagcuc

SEQ ID NO: 5708 - RNA, 21 nt, Homo sapiens
gauaugacauggguaaaacca

SEQ ID NO: 5709 - RNA, 22 nt, Homo sapiens
gucucagugcgaaucucaaaga

SEQ ID NO: 5710 - RNA, 22 nt, Homo sapiens
gauguguugggaagauuucaag

SEQ ID NO: 5711 - RNA, 22 nt, Homo sapiens
auaugguuuuuggaagcauauc

SEQ ID NO: 5712 - RNA, 22 nt, Homo sapiens
uuaagcuaguuuauucaggaaa

SEQ ID NO: 5713 - RNA, 22 nt, Homo sapiens
uuccacagggauuugcauugau

SEQ ID NO: 5714 - RNA, 23 nt, Homo sapiens
gugccuucugagccuagucucca

SEQ ID NO: 5715 - RNA, 22 nt, Homo sapiens
aaucugucuuuuguuauugagg

SEQ ID NO: 5716 - RNA, 22 nt, Homo sapiens
agaguaguuucuauauucuuca

SEQ ID NO: 5717 - RNA, 22 nt, Homo sapiens
ugaaaugauuauaugguguuug

SEQ ID NO: 5718 - RNA, 22 nt, Homo sapiens
uuaaggcuccuguuggcuuuua

SEQ ID NO: 5719 - RNA, 22 nt, Homo sapiens
ucacccuguguuuugcguuugc

SEQ ID NO: 5720 - RNA, 20 nt, Homo sapiens
gugagguagaggguuaccug

SEQ ID NO: 5721 - RNA, 22 nt, Homo sapiens
ugaguuauuaguagaggcuaug

SEQ ID NO: 5722 - RNA, 22 nt, Homo sapiens
ugugguauuagguguaguaucu

SEQ ID NO: 5723 - RNA, 22 nt, Homo sapiens
ccccauuugaacuccuucaacu

SEQ ID NO: 5724 - RNA, 22 nt, Homo sapiens
uagcaguauggagcgaggccca

SEQ ID NO: 5725 - RNA, 23 nt, Homo sapiens
ccauugcacuccagccucaguga

SEQ ID NO: 5726 - RNA, 22 nt, Homo sapiens
auauagcucuggcuggaugacu

SEQ ID NO: 5727 - RNA, 23 nt, Homo sapiens
gcagcaaugucacagggguccgg

SEQ ID NO: 5728 - RNA, 22 nt, Homo sapiens
gucacugagcaauagaaaguuu

SEQ ID NO: 5729 - RNA, 22 nt, Homo sapiens
auuccaguuguaagguuuuuca

SEQ ID NO: 5730 - RNA, 21 nt, Homo sapiens
uaucacauuggugauuaaguu

SEQ ID NO: 5731 - RNA, 22 nt, Homo sapiens
aagugaauguuugguagcagug

SEQ ID NO: 5732 - RNA, 19 nt, Homo sapiens
uuucaauguaaggauggag

SEQ ID NO: 5733 - RNA, 22 nt, Homo sapiens
auggcuuuugcccuaaauggau

SEQ ID NO: 5734 - RNA, 22 nt, Homo sapiens
caacaguaaagcauuuuuaagu

SEQ ID NO: 5735 - RNA, 22 nt, Homo sapiens
uugagcccuggaggcagaggcu

SEQ ID NO: 5736 - RNA, 19 nt, Homo sapiens
ugacacuguuggugggagg

SEQ ID NO: 5737 - RNA, 22 nt, Homo sapiens
uugccuaggcuggagugcagug

SEQ ID NO: 5738 - RNA, 22 nt, Homo sapiens
auguuaagauggaacaugggaa

SEQ ID NO: 5739 - RNA, 22 nt, Homo sapiens
aguguuuuuacaagcacucugg

SEQ ID NO: 5740 - RNA, 22 nt, Homo sapiens
uugaagguagaaguucucaauu

SEQ ID NO: 5741 - RNA, 22 nt, Homo sapiens
guagaucucaacacuggaagua

SEQ ID NO: 5742 - RNA, 22 nt, Homo sapiens
ggcgguguccuccaagugcuuc

SEQ ID NO: 5743 - RNA, 22 nt, Homo sapiens
auagaaucaucugugcacuagu

SEQ ID NO: 5744 - RNA, 22 nt, Homo sapiens
ucccagugcuaugcaaaagccu

SEQ ID NO: 5745 - RNA, 22 nt, Homo sapiens
uaacaguauauuuaccaaaccu

SEQ ID NO: 5746 - RNA, 21 nt, Homo sapiens
cugaucacaggugagcugccu

SEQ ID NO: 5747 - RNA, 22 nt, Homo sapiens
gugucuccugccuucaugcagc

SEQ ID NO: 5748 - RNA, 22 nt, Homo sapiens
uaggaaugaacgauuuauuggu

SEQ ID NO: 5749 - RNA, 22 nt, Homo sapiens
ucccugacagucacagagcuac

SEQ ID NO: 5750 - RNA, 22 nt, Homo sapiens
ugcaguacuuugaaauauacug

SEQ ID NO: 5751 - RNA, 22 nt, Homo sapiens
aauaucacaguggguguacacc

SEQ ID NO: 5752 - RNA, 22 nt, Homo sapiens
ucaaaugcuguauuguaguaau

SEQ ID NO: 5753 - RNA, 22 nt, Homo sapiens
uauggcuuuuaacugucguaug

SEQ ID NO: 5754 - RNA, 22 nt, Homo sapiens
uucauagugaaaaauucaaagu

SEQ ID NO: 5755 - RNA, 22 nt, Homo sapiens
ugugaauguaaccuuauuugga

SEQ ID NO: 5756 - RNA, 22 nt, Homo sapiens
gugcaaacuccaggucucuuca

SEQ ID NO: 5757 - RNA, 19 nt, Homo sapiens
cugcaugagacaguugguu

SEQ ID NO: 5758 - RNA, 22 nt, Homo sapiens
uugugaauggugccucaguaaa

SEQ ID NO: 5759 - RNA, 22 nt, Homo sapiens
ugagaucuucgcucuucacaga

SEQ ID NO: 5760 - RNA, 22 nt, Homo sapiens
ugacauuacagucacuugcugu

SEQ ID NO: 5761 - RNA, 22 nt, Homo sapiens
uggucaccugaauuaugcaugu

SEQ ID NO: 5762 - RNA, 22 nt, Homo sapiens
acugagacugagaauguuucuu

SEQ ID NO: 5763 - RNA, 22 nt, Homo sapiens
ccaaaguauuuucacugauauc

SEQ ID NO: 5764 - RNA, 22 nt, Homo sapiens
uguuacagcagaauugaaagag

SEQ ID NO: 5765 - RNA, 22 nt, Homo sapiens
uauuacagaccauaucgccggg

SEQ ID NO: 5766 - RNA, 23 nt, Homo sapiens
cccucagaagugcagggagagaa

SEQ ID NO: 5767 - RNA, 22 nt, Homo sapiens
uucagauugcauaccgaaagua

SEQ ID NO: 5768 - RNA, 22 nt, Homo sapiens
ugcugguauuauguuauccaga

SEQ ID NO: 5769 - RNA, 22 nt, Homo sapiens
uguaaagaaagcuguuguugua

SEQ ID NO: 5770 - RNA, 22 nt, Homo sapiens
uauuggcucuguuucucugaag

SEQ ID NO: 5771 - RNA, 22 nt, Homo sapiens
cugcaauggagaaagugagacu

SEQ ID NO: 5772 - RNA, 22 nt, Homo sapiens
agagguuuaauugauucacagu

SEQ ID NO: 5773 - RNA, 19 nt, Homo sapiens
uccaccgcgugcaccucua

SEQ ID NO: 5774 - RNA, 22 nt, Homo sapiens
uacuuagagauuccaggaacuc

SEQ ID NO: 5775 - RNA, 19 nt, Homo sapiens
ggcacugugugagugagga

SEQ ID NO: 5776 - RNA, 22 nt, Homo sapiens
ugagcauuguuuggacuuggau

SEQ ID NO: 5777 - RNA, 20 nt, Homo sapiens
cuggaugucgaggcagaggu

SEQ ID NO: 5778 - RNA, 22 nt, Homo sapiens
ugacuggagaccucaguagggu

SEQ ID NO: 5779 - RNA, 22 nt, Homo sapiens
ugugccacugcacuccugccug

SEQ ID NO: 5780 - RNA, 22 nt, Homo sapiens
uuggacuaagaacuuaaaauaa

SEQ ID NO: 5781 - RNA, 22 nt, Homo sapiens
gcaacugguuucaguuuuucag

SEQ ID NO: 5782 - RNA, 22 nt, Homo sapiens
cuuuguccuucaagguguguca

SEQ ID NO: 5783 - RNA, 21 nt, Homo sapiens
uucacaagggaaguagggggc

SEQ ID NO: 5784 - RNA, 22 nt, Homo sapiens
gagguaggaauaaacauuugaa

SEQ ID NO: 5785 - RNA, 22 nt, Homo sapiens
uggcaguuuuugccuucaauac

SEQ ID NO: 5786 - RNA, 22 nt, Homo sapiens
augugcaagaucauuaaagcuc

SEQ ID NO: 5787 - RNA, 16 nt, Homo sapiens
acaaagcuggcuaucu

SEQ ID NO: 5788 - RNA, 22 nt, Homo sapiens
gugguaguagaauuucggaaau

SEQ ID NO: 5789 - RNA, 22 nt, Homo sapiens
uguuuuggaguggacuuugcau

SEQ ID NO: 5790 - RNA, 22 nt, Homo sapiens
gucagugucuuaacagagauua

SEQ ID NO: 5791 - RNA, 21 nt, Homo sapiens
ccugauguucacuuggccuuc

SEQ ID NO: 5792 - RNA, 22 nt, Homo sapiens
acugcacuuauccuccaauguu

SEQ ID NO: 5793 - RNA, 22 nt, Homo sapiens
ccaccgggucccagcucugcuc

SEQ ID NO: 5794 - RNA, 22 nt, Homo sapiens
acagaauucucagaacugggag

SEQ ID NO: 5795 - RNA, 22 nt, Homo sapiens
cucacugcauuucaguuuuguu

SEQ ID NO: 5796 - RNA, 22 nt, Homo sapiens
uugauauguguauagcaugugg

SEQ ID NO: 5797 - RNA, 22 nt, Homo sapiens
ugaacucauccuuucuuauggc

SEQ ID NO: 5798 - RNA, 22 nt, Homo sapiens
ucuggugugcucuggacuugca

SEQ ID NO: 5799 - RNA, 22 nt, Homo sapiens
uaucccuguggacuucccaaca

SEQ ID NO: 5800 - RNA, 22 nt, Homo sapiens
ccagugauuguauggugaaggu

SEQ ID NO: 5801 - RNA, 22 nt, Homo sapiens
uauugcuaacaucccuuaugua

SEQ ID NO: 5802 - RNA, 19 nt, Homo sapiens
ggugcuugaauauuccucc

SEQ ID NO: 5803 - RNA, 22 nt, Homo sapiens
ugauaggucuguuuugaaaagg

SEQ ID NO: 5804 - RNA, 19 nt, Homo sapiens
augaacucauucuuuuuau

SEQ ID NO: 5805 - RNA, 22 nt, Homo sapiens
ugaguguguaugugcauacaca

SEQ ID NO: 5806 - RNA, 22 nt, Homo sapiens
ugcuaugucuucucucacagag

SEQ ID NO: 5807 - RNA, 22 nt, Homo sapiens
uauuacauccauaggcucugcu

SEQ ID NO: 5808 - RNA, 22 nt, Homo sapiens
agagaucaauaugaaggaaaug

SEQ ID NO: 5809 - RNA, 22 nt, Homo sapiens
cuucuguuaguucugauaacuu

SEQ ID NO: 5810 - RNA, 22 nt, Homo sapiens
ugaaagacugaaagcuuuucuu

SEQ ID NO: 5811 - RNA, 22 nt, Homo sapiens
guuaugcagcaauugauaaucu

SEQ ID NO: 5812 - RNA, 22 nt, Homo sapiens
guucaucaggaauauuggccua

SEQ ID NO: 5813 - RNA, 22 nt, Homo sapiens
uggcaagagauaugugucuaua

SEQ ID NO: 5814 - RNA, 22 nt, Homo sapiens
caguuacuugacacaaccaauu

SEQ ID NO: 5815 - RNA, 20 nt, Homo sapiens
uugagaucuguaucugguuu

SEQ ID NO: 5816 - RNA, 18 nt, Homo sapiens
ucccugacucaaauucuu

SEQ ID NO: 5817 - RNA, 22 nt, Homo sapiens
acuguacuacagccugggugac

SEQ ID NO: 5818 - RNA, 22 nt, Homo sapiens
aucacaggucaaaucauuauuu

SEQ ID NO: 5819 - RNA, 22 nt, Homo sapiens
gccauugcacuccagcuugggc

SEQ ID NO: 5820 - RNA, 22 nt, Homo sapiens
uuggaaauauguuaagugucau

SEQ ID NO: 5821 - RNA, 22 nt, Homo sapiens
uaaggaaggcugugugcuuuua

SEQ ID NO: 5822 - RNA, 22 nt, Homo sapiens
uaugaugcuguuuagaaucucu

SEQ ID NO: 5823 - RNA, 22 nt, Homo sapiens
uuuugguguacaauucuaugga

SEQ ID NO: 5824 - RNA, 22 nt, Homo sapiens
uugugucccugcccaaaucuca

SEQ ID NO: 5825 - RNA, 19 nt, Homo sapiens
uaccagcacaguguuugag

SEQ ID NO: 5826 - RNA, 23 nt, Homo sapiens
ucacacuuaagagaaaugcagcu

SEQ ID NO: 5827 - RNA, 22 nt, Homo sapiens
uuagccggguguguuggcgggc

SEQ ID NO: 5828 - RNA, 22 nt, Homo sapiens
uauugaacuggaucagaaggcc

SEQ ID NO: 5829 - RNA, 22 nt, Homo sapiens
cugugcauguuguccaauucuu

SEQ ID NO: 5830 - RNA, 22 nt, Homo sapiens
uuaugucuuugagcaaugcugu

SEQ ID NO: 5831 - RNA, 22 nt, Homo sapiens
uuucacuagccagcccuuuauu

SEQ ID NO: 5832 - RNA, 23 nt, Homo sapiens
uaugucuauucuaaugccagcac

SEQ ID NO: 5833 - RNA, 22 nt, Homo sapiens
uguaaaucuauuuuuaguguuu

SEQ ID NO: 5834 - RNA, 22 nt, Homo sapiens
ugacagcaucaggauuggagag

SEQ ID NO: 5835 - RNA, 22 nt, Homo sapiens
aggaagugugcaauuaauuucu

SEQ ID NO: 5836 - RNA, 22 nt, Homo sapiens
uaucagcgugcaaaucuuugga

SEQ ID NO: 5837 - RNA, 20 nt, Homo sapiens
uuaaaucuagugcagacuca

SEQ ID NO: 5838 - RNA, 22 nt, Homo sapiens
aacuggucuuuggaggaggagg

SEQ ID NO: 5839 - RNA, 22 nt, Homo sapiens
cugagugcaagugauccuccca

SEQ ID NO: 5840 - RNA, 22 nt, Homo sapiens
ugagcaagaaauagaaacagau

SEQ ID NO: 5841 - RNA, 22 nt, Homo sapiens
uuuagcagcaaagagccaugcu

SEQ ID NO: 5842 - RNA, 22 nt, Homo sapiens
ugauaugacagcucugcugcca

SEQ ID NO: 5843 - RNA, 22 nt, Homo sapiens
cuauaacagugugguuuggaga

SEQ ID NO: 5844 - RNA, 22 nt, Homo sapiens
aaguaaacauuuuguacaauaa

SEQ ID NO: 5845 - RNA, 22 nt, Homo sapiens
uuggguagugaguuccuccagg

SEQ ID NO: 5846 - RNA, 22 nt, Homo sapiens
ugacaacugauuaacuccuuua

SEQ ID NO: 5847 - RNA, 22 nt, Homo sapiens
agugguguugccuguugaccua

SEQ ID NO: 5848 - RNA, 22 nt, Homo sapiens
ucuaguaaugagaggcaggaga

SEQ ID NO: 5849 - RNA, 22 nt, Homo sapiens
ugguaugucuagauggggaagu

SEQ ID NO: 5850 - RNA, 19 nt, Homo sapiens
agccaguuuucccagcacc

SEQ ID NO: 5851 - RNA, 22 nt, Homo sapiens
ucacugcgaccuccgccucccg

SEQ ID NO: 5852 - RNA, 22 nt, Homo sapiens
uggacacuggagauucgucagu

SEQ ID NO: 5853 - RNA, 22 nt, Homo sapiens
gacaucauuaugagauuuaaac

SEQ ID NO: 5854 - RNA, 22 nt, Homo sapiens
cuaauucuggccaaagggauaa

SEQ ID NO: 5855 - RNA, 22 nt, Homo sapiens
auuggauagucuuuaucuguug

SEQ ID NO: 5856 - RNA, 19 nt, Homo sapiens
acagugcuuugucagaagc

SEQ ID NO: 5857 - RNA, 22 nt, Homo sapiens
ugucauguauauaccacuucca

SEQ ID NO: 5858 - RNA, 22 nt, Homo sapiens
gggcauguggacuuguauguuu

SEQ ID NO: 5859 - RNA, 22 nt, Homo sapiens
agcuaguguucaccagagguca

SEQ ID NO: 5860 - RNA, 19 nt, Homo sapiens
ugcaaagucagugaagggu

SEQ ID NO: 5861 - RNA, 20 nt, Homo sapiens
uuuguaucucuggguacugg

SEQ ID NO: 5862 - RNA, 22 nt, Homo sapiens
ugcauccauucuagacucaucu

SEQ ID NO: 5863 - RNA, 19 nt, Homo sapiens
acuuuggugauuagaggga

SEQ ID NO: 5864 - RNA, 22 nt, Homo sapiens
uaguucauuuuucuugcuuaga

SEQ ID NO: 5865 - RNA, 22 nt, Homo sapiens
ugcaagacugcaguuacuuuug

SEQ ID NO: 5866 - RNA, 22 nt, Homo sapiens
uggcauuguccaauaaaauuuu

SEQ ID NO: 5867 - RNA, 18 nt, Homo sapiens
augagucauuguggaaau

SEQ ID NO: 5868 - RNA, 22 nt, Homo sapiens
acagugacagaaagcugauuau

SEQ ID NO: 5869 - RNA, 22 nt, Homo sapiens
ugaugacacugauuucuucaau

SEQ ID NO: 5870 - RNA, 22 nt, Homo sapiens
cuuuuugcaaauacaacucuga

SEQ ID NO: 5871 - RNA, 22 nt, Homo sapiens
uugaggugaauuugcaggaugc

SEQ ID NO: 5872 - RNA, 22 nt, Homo sapiens
gcaaggaugagugcccaugaga

SEQ ID NO: 5873 - RNA, 22 nt, Homo sapiens
auggcaaugcgauggugacuga

SEQ ID NO: 5874 - RNA, 22 nt, Homo sapiens
uugaaccauucuuuugauagag

SEQ ID NO: 5875 - RNA, 22 nt, Homo sapiens
augaggauagguuucuauuagg

SEQ ID NO: 5876 - RNA, 22 nt, Homo sapiens
uagggcauuuagaggcuauuaa

SEQ ID NO: 5877 - RNA, 22 nt, Homo sapiens
uugaaagacaucaccuacugcu

SEQ ID NO: 5878 - RNA, 22 nt, Homo sapiens
acucacagcaaccuccgccucc

SEQ ID NO: 5879 - RNA, 22 nt, Homo sapiens
cauugcacuccagccuuggcaa

SEQ ID NO: 5880 - RNA, 22 nt, Homo sapiens
uuggacugggauggccgaggcu

SEQ ID NO: 5881 - RNA, 22 nt, Homo sapiens
uagcaaguguuuaagcacuuuu

SEQ ID NO: 5882 - RNA, 22 nt, Homo sapiens
ucucugguuuucaaagcaguau

SEQ ID NO: 5883 - RNA, 22 nt, Homo sapiens
cccuggacauucaucauuaugu

SEQ ID NO: 5884 - RNA, 18 nt, Homo sapiens
uucaguuuguaucugggg

SEQ ID NO: 5885 - RNA, 22 nt, Homo sapiens
uugccuaggcuggauugcagug

SEQ ID NO: 5886 - RNA, 22 nt, Homo sapiens
uucacaguguuucucacgguua

SEQ ID NO: 5887 - RNA, 22 nt, Homo sapiens
augggucuccugaauacagcac

SEQ ID NO: 5888 - RNA, 22 nt, Homo sapiens
uuagcagcacaaaagcagacua

SEQ ID NO: 5889 - RNA, 22 nt, Homo sapiens
gccauagucauagauggcaggg

SEQ ID NO: 5890 - RNA, 22 nt, Homo sapiens
ggauacaucuggacagccgaau

SEQ ID NO: 5891 - RNA, 22 nt, Homo sapiens
uuguuuuggagaugagcuaaaa

SEQ ID NO: 5892 - RNA, 22 nt, Homo sapiens
uccuugagucuuugcucagaug

SEQ ID NO: 5893 - RNA, 22 nt, Homo sapiens
uuaugccuauugugccuuggau

SEQ ID NO: 5894 - RNA, 20 nt, Homo sapiens
cagcaaccugcucucuuccu

SEQ ID NO: 5895 - RNA, 22 nt, Homo sapiens
agaaccauuagagggagauauu

SEQ ID NO: 5896 - RNA, 22 nt, Homo sapiens
uuaauaccgucacauggcugaa

SEQ ID NO: 5897 - RNA, 22 nt, Homo sapiens
guugaaaucaucacuuggcaug

SEQ ID NO: 5898 - RNA, 22 nt, Homo sapiens
ucugccacugucauugugugau

SEQ ID NO: 5899 - RNA, 22 nt, Homo sapiens
cuagcacauaguuauucacuca

SEQ ID NO: 5900 - RNA, 19 nt, Homo sapiens
uuacagugugcccuuuuag

SEQ ID NO: 5901 - RNA, 22 nt, Homo sapiens
ucccagugaaaccccaccuuca

SEQ ID NO: 5902 - RNA, 22 nt, Homo sapiens
uuaggaucacagaaaauccucu

SEQ ID NO: 5903 - RNA, 22 nt, Homo sapiens
gucuguuugauccagaucaaaa

SEQ ID NO: 5904 - RNA, 22 nt, Homo sapiens
aaucucagcauuuugggcugag

SEQ ID NO: 5905 - RNA, 22 nt, Homo sapiens
ugagaugaugggauaagagggc

SEQ ID NO: 5906 - RNA, 22 nt, Homo sapiens
ugaccuguuugaaauugccaau

SEQ ID NO: 5907 - RNA, 22 nt, Homo sapiens
aucuuguccugagguuuuauug

SEQ ID NO: 5908 - RNA, 22 nt, Homo sapiens
gugugauuauuucaauugaugc

SEQ ID NO: 5909 - RNA, 18 nt, Homo sapiens
uguuugguucugcgccuc

SEQ ID NO: 5910 - RNA, 22 nt, Homo sapiens
auagcagugugaaaauggacua

SEQ ID NO: 5911 - RNA, 22 nt, Homo sapiens
cauggguuuucucaaguaguca

SEQ ID NO: 5912 - RNA, 22 nt, Homo sapiens
ggaguucaucaggugaggggua

SEQ ID NO: 5913 - RNA, 22 nt, Homo sapiens
uuaugggucuuggaaugcaaua

SEQ ID NO: 5914 - RNA, 22 nt, Homo sapiens
ucacaucucagguuucuugaca

SEQ ID NO: 5915 - RNA, 22 nt, Homo sapiens
uuuugcacauugauuugguauc

SEQ ID NO: 5916 - RNA, 22 nt, Homo sapiens
uaacuccauuuggacucaguau

SEQ ID NO: 5917 - RNA, 22 nt, Homo sapiens
ucaguggagagcuuccaggauu

SEQ ID NO: 5918 - RNA, 22 nt, Homo sapiens
cuuugcuaauccaacccucauc

SEQ ID NO: 5919 - RNA, 22 nt, Homo sapiens
auggccugaugcaccuguccca

SEQ ID NO: 5920 - RNA, 22 nt, Homo sapiens
cacaguguucauagccaucagg

SEQ ID NO: 5921 - RNA, 22 nt, Homo sapiens
cucaaagugcugggacuggcug

SEQ ID NO: 5922 - RNA, 22 nt, Homo sapiens
ugacucaguuucucagguagua

SEQ ID NO: 5923 - RNA, 22 nt, Homo sapiens
uucccuuugugcauaggauuug

SEQ ID NO: 5924 - RNA, 22 nt, Homo sapiens
aaauccaucucuuggggcauug

SEQ ID NO: 5925 - RNA, 22 nt, Homo sapiens
uugcuucuuucgucuggcccca

SEQ ID NO: 5926 - RNA, 22 nt, Homo sapiens
augauccagugaguuucaguuc

SEQ ID NO: 5927 - RNA, 22 nt, Homo sapiens
gacauguuucucucuguuuacu

SEQ ID NO: 5928 - RNA, 22 nt, Homo sapiens
ugauugucucuccugccccauc

SEQ ID NO: 5929 - RNA, 22 nt, Homo sapiens
uugagcacaggaguuugagacc

SEQ ID NO: 5930 - RNA, 22 nt, Homo sapiens
uccuuggugacauuucuugucu

SEQ ID NO: 5931 - RNA, 19 nt, Homo sapiens
augagucugcaagaaccag

SEQ ID NO: 5932 - RNA, 22 nt, Homo sapiens
uaucaucauuggcaggugagaa

SEQ ID NO: 5933 - RNA, 22 nt, Homo sapiens
uaccugagcccucugcugaguu

SEQ ID NO: 5934 - RNA, 21 nt, Homo sapiens
uguaacugcaaaccucagauu

SEQ ID NO: 5935 - RNA, 22 nt, Homo sapiens
caugacacauguuuaccuaugu

SEQ ID NO: 5936 - RNA, 23 nt, Homo sapiens
uggcuagacguccuuuccugaug

SEQ ID NO: 5937 - RNA, 21 nt, Homo sapiens
cuuugcacugcuccucagcuc

SEQ ID NO: 5938 - RNA, 22 nt, Homo sapiens
uaacaccuuugauagcacuuuu

SEQ ID NO: 5939 - RNA, 22 nt, Homo sapiens
cuugacaaugcuucaggcugaa

SEQ ID NO: 5940 - RNA, 22 nt, Homo sapiens
uaagguguagacuggucacaag

SEQ ID NO: 5941 - RNA, 23 nt, Homo sapiens
uuuugcaauaagucacuggaaua

SEQ ID NO: 5942 - RNA, 22 nt, Homo sapiens
ugcaaguggauuuuuccccaga

SEQ ID NO: 5943 - RNA, 22 nt, Homo sapiens
uacaguacagugacaccauuau

SEQ ID NO: 5944 - RNA, 21 nt, Homo sapiens
agaggacugaccacagcccua

SEQ ID NO: 5945 - RNA, 22 nt, Homo sapiens
uaaguuguagaacguuuucuua

SEQ ID NO: 5946 - RNA, 22 nt, Homo sapiens
aauaaagcagcuuuuugggacu

SEQ ID NO: 5947 - RNA, 20 nt, Homo sapiens
uggaaucuaggcggagguuu

SEQ ID NO: 5948 - RNA, 22 nt, Homo sapiens
ugagagucacugaccugguaua

SEQ ID NO: 5949 - RNA, 21 nt, Homo sapiens
uggaacgcaaaugagaugaau

SEQ ID NO: 5950 - RNA, 22 nt, Homo sapiens
gagguauagaacaccuuucaag

SEQ ID NO: 5951 - RNA, 22 nt, Homo sapiens
auguuacggaguuuuuauccag

SEQ ID NO: 5952 - RNA, 22 nt, Homo sapiens
gagaugaucaugugguuuuguc

SEQ ID NO: 5953 - RNA, 22 nt, Homo sapiens
uagcaggaaaccuguguugagg

SEQ ID NO: 5954 - RNA, 22 nt, Homo sapiens
aacagacugucacauaaaauug

SEQ ID NO: 5955 - RNA, 20 nt, Homo sapiens
ucacuauggagcucuuucuu

SEQ ID NO: 5956 - RNA, 22 nt, Homo sapiens
uauggauuugccuauucuguau

SEQ ID NO: 5957 - RNA, 22 nt, Homo sapiens
gcacgugcucauuugaggucuu

SEQ ID NO: 5958 - RNA, 22 nt, Homo sapiens
auaugcacaguggaguacuauu

SEQ ID NO: 5959 - RNA, 22 nt, Homo sapiens
uguucauggauccaguggcuuc

SEQ ID NO: 5960 - RNA, 22 nt, Homo sapiens
ugacuauaguuuucuugacaca

SEQ ID NO: 5961 - RNA, 22 nt, Homo sapiens
cuacaguuauguuuuaaaugug

SEQ ID NO: 5962 - RNA, 22 nt, Homo sapiens
uauuagguugguggaaaaguaa

SEQ ID NO: 5963 - RNA, 22 nt, Homo sapiens
ggcaguuuguucuugcuccuuu

SEQ ID NO: 5964 - RNA, 22 nt, Homo sapiens
ucagugcuuggcacagagagcu

SEQ ID NO: 5965 - RNA, 22 nt, Homo sapiens
caaagugcugaaagaggccagg

SEQ ID NO: 5966 - RNA, 22 nt, Homo sapiens
agucugguguucucacacuagu

SEQ ID NO: 5967 - RNA, 20 nt, Homo sapiens
aaucuacuugcccauuuagc

SEQ ID NO: 5968 - RNA, 23 nt, Homo sapiens
ugcagcacacugaugggucuuga

SEQ ID NO: 5969 - RNA, 22 nt, Homo sapiens
ugcgauaguuugcugguaaauu

SEQ ID NO: 5970 - RNA, 22 nt, Homo sapiens
uuaccagucuagggcucaguuu

SEQ ID NO: 5971 - RNA, 22 nt, Homo sapiens
caugccacugcacgccauccug

SEQ ID NO: 5972 - RNA, 22 nt, Homo sapiens
uacuggccccaaaguagguagu

SEQ ID NO: 5973 - RNA, 22 nt, Homo sapiens
cugugaucuuuuuucauguggu

SEQ ID NO: 5974 - RNA, 22 nt, Homo sapiens
gcccagcguucagggaggggcu

SEQ ID NO: 5975 - RNA, 22 nt, Homo sapiens
ucauacuguugugaaacaaaac

SEQ ID NO: 5976 - RNA, 22 nt, Homo sapiens
gucuccggcuguccuuugaggu

SEQ ID NO: 5977 - RNA, 22 nt, Homo sapiens
uuaauccugccuuauuucagua

SEQ ID NO: 5978 - RNA, 22 nt, Homo sapiens
aaguaaacauugagagacaaga

SEQ ID NO: 5979 - RNA, 22 nt, Homo sapiens
uugauguaggcauucaaggcua

SEQ ID NO: 5980 - RNA, 22 nt, Homo sapiens
ucuucagucauauuggccugga

SEQ ID NO: 5981 - RNA, 22 nt, Homo sapiens
uguagcaaaucgauacuauugg

SEQ ID NO: 5982 - RNA, 22 nt, Homo sapiens
gaaguaguaaaauuuauugcag

SEQ ID NO: 5983 - RNA, 22 nt, Homo sapiens
ucuauggaguuugaaugagaaa

SEQ ID NO: 5984 - RNA, 22 nt, Homo sapiens
uuuagcucauucaauuucaguc

SEQ ID NO: 5985 - RNA, 22 nt, Homo sapiens
ucauaaaguuguuuuaauggga

SEQ ID NO: 5986 - RNA, 22 nt, Homo sapiens
ugaggugaaguaauauucuaag

SEQ ID NO: 5987 - RNA, 22 nt, Homo sapiens
auuaagugcuugcagaagucca

SEQ ID NO: 5988 - RNA, 22 nt, Homo sapiens
agguauguauguaugggagaaa

SEQ ID NO: 5989 - RNA, 22 nt, Homo sapiens
uuugaguaggcuuauauuuugg

SEQ ID NO: 5990 - RNA, 22 nt, Homo sapiens
augugcuuuuuaaacagaugcu

SEQ ID NO: 5991 - RNA, 22 nt, Homo sapiens
cugggauggaggagaauuagag

SEQ ID NO: 5992 - RNA, 22 nt, Homo sapiens
ugauguugaauuguucagcguc

SEQ ID NO: 5993 - RNA, 22 nt, Homo sapiens
cugucuggaggccugcaaauaa

SEQ ID NO: 5994 - RNA, 22 nt, Homo sapiens
gugagaugaggucucacucugu

SEQ ID NO: 5995 - RNA, 22 nt, Homo sapiens
uuuguacuucauacaauaacuc

SEQ ID NO: 5996 - RNA, 22 nt, Homo sapiens
uuaagguuuuuguagcaaggau

SEQ ID NO: 5997 - RNA, 22 nt, Homo sapiens
accugguuuuaacauuguauua

SEQ ID NO: 5998 - RNA, 22 nt, Homo sapiens
uagcauccuucucuaaacagga

SEQ ID NO: 5999 - RNA, 22 nt, Homo sapiens
cacugcacucuucuucugggca

SEQ ID NO: 6000 - RNA, 21 nt, Homo sapiens
ucuaccuacugcucacaggcu

SEQ ID NO: 6001 - RNA, 22 nt, Homo sapiens
ccugagacugauugacucacaa

SEQ ID NO: 6002 - RNA, 21 nt, Homo sapiens
uugcaaaugcugcugccugau

SEQ ID NO: 6003 - RNA, 22 nt, Homo sapiens
cuagacacugacguuccuccga

SEQ ID NO: 6004 - RNA, 22 nt, Homo sapiens
ugaaacacaccuccucuccauc

SEQ ID NO: 6005 - RNA, 22 nt, Homo sapiens
cuggcaaauguuuucuguaaag

SEQ ID NO: 6006 - RNA, 19 nt, Homo sapiens
gaugcaaugcacugagguc

SEQ ID NO: 6007 - RNA, 22 nt, Homo sapiens
auugcauuuucagguuggucug

SEQ ID NO: 6008 - RNA, 22 nt, Homo sapiens
ggaguaggaaggaaauguuaaa

SEQ ID NO: 6009 - RNA, 22 nt, Homo sapiens
aucaaguaaucugaguaagagu

SEQ ID NO: 6010 - RNA, 22 nt, Homo sapiens
ucacacugucuugguuacucuu

SEQ ID NO: 6011 - RNA, 22 nt, Homo sapiens
uuggucucaucaagagcagcuu

SEQ ID NO: 6012 - RNA, 22 nt, Homo sapiens
uuggucucuuaaucacacuuuu

SEQ ID NO: 6013 - RNA, 22 nt, Homo sapiens
uuuagcaaagcaauuuacacca

SEQ ID NO: 6014 - RNA, 22 nt, Homo sapiens
auugcacuccagccugggcaac

SEQ ID NO: 6015 - RNA, 22 nt, Homo sapiens
guucccaguugaaaugauuagu

SEQ ID NO: 6016 - RNA, 22 nt, Homo sapiens
agaaacacagguggaauugcuu

SEQ ID NO: 6017 - RNA, 22 nt, Homo sapiens
gugggaagcuggaacucccucc

SEQ ID NO: 6018 - RNA, 22 nt, Homo sapiens
cuuccugaguccugggcucaca

SEQ ID NO: 6019 - RNA, 22 nt, Homo sapiens
uacaguagaaugucuuucaaaa

SEQ ID NO: 6020 - RNA, 22 nt, Homo sapiens
uuuaggcaauauauucaugucu

SEQ ID NO: 6021 - RNA, 18 nt, Homo sapiens
guaaauguaucuauugcc

SEQ ID NO: 6022 - RNA, 22 nt, Homo sapiens
auacacgugcagaacaugcagg

SEQ ID NO: 6023 - RNA, 22 nt, Homo sapiens
ugcgccauugcauuccagccug

SEQ ID NO: 6024 - RNA, 22 nt, Homo sapiens
aucauguuuauguguaggauau

SEQ ID NO: 6025 - RNA, 22 nt, Homo sapiens
uggcaaaugaaagaaagccagu

SEQ ID NO: 6026 - RNA, 22 nt, Homo sapiens
aagcucauugcucugguuuuaa

SEQ ID NO: 6027 - RNA, 22 nt, Homo sapiens
ucaguagcauugcuuauacagu

SEQ ID NO: 6028 - RNA, 22 nt, Homo sapiens
ugugcacaaugugcagguuuga

SEQ ID NO: 6029 - RNA, 22 nt, Homo sapiens
gagacugagucuugcccuguca

SEQ ID NO: 6030 - RNA, 22 nt, Homo sapiens
cugagguuguucuucucagugg

SEQ ID NO: 6031 - RNA, 22 nt, Homo sapiens
agcaggucuuaacuugugaggu

SEQ ID NO: 6032 - RNA, 22 nt, Homo sapiens
aaugcaucuagaaaggugaauu

SEQ ID NO: 6033 - RNA, 22 nt, Homo sapiens
uuuggccauaauuuuaauuggc

SEQ ID NO: 6034 - RNA, 22 nt, Homo sapiens
aagcuguugguggaucuaccau

SEQ ID NO: 6035 - RNA, 22 nt, Homo sapiens
aucccugagccugacucucaga

SEQ ID NO: 6036 - RNA, 20 nt, Homo sapiens
uggcuucuuaauugcaggca

SEQ ID NO: 6037 - RNA, 19 nt, Homo sapiens
agugggcuagaaaucaggg

SEQ ID NO: 6038 - RNA, 22 nt, Homo sapiens
aaagugcaguacuucguauauu

SEQ ID NO: 6039 - RNA, 21 nt, Homo sapiens
uggaugccuaggcagaaguuu

SEQ ID NO: 6040 - RNA, 22 nt, Homo sapiens
uuggcuguguuuauaugcugga

SEQ ID NO: 6041 - RNA, 22 nt, Homo sapiens
uugaguagauaccuaggaauag

SEQ ID NO: 6042 - RNA, 19 nt, Homo sapiens
aacuggugugagaugguau

SEQ ID NO: 6043 - RNA, 22 nt, Homo sapiens
augccacuguuuaugucacuua

SEQ ID NO: 6044 - RNA, 22 nt, Homo sapiens
uguugccacuguuauuaaccua

SEQ ID NO: 6045 - RNA, 22 nt, Homo sapiens
uacugcauuccaaucugggcga

SEQ ID NO: 6046 - RNA, 19 nt, Homo sapiens
uggagauauccccuucaca

SEQ ID NO: 6047 - RNA, 22 nt, Homo sapiens
uacauguauacaggguuuacuu

SEQ ID NO: 6048 - RNA, 22 nt, Homo sapiens
aaugcacuccagccugggcgac

SEQ ID NO: 6049 - RNA, 22 nt, Homo sapiens
ucuuggcauggcugaagauucc

SEQ ID NO: 6050 - RNA, 22 nt, Homo sapiens
agagguguuaaagucucuuuua

SEQ ID NO: 6051 - RNA, 22 nt, Homo sapiens
cuggauagucaggagauauaua

SEQ ID NO: 6052 - RNA, 22 nt, Homo sapiens
ugguauguauacuagcgacacu

SEQ ID NO: 6053 - RNA, 20 nt, Homo sapiens
cauugcacuccagcuugggc

SEQ ID NO: 6054 - RNA, 22 nt, Homo sapiens
gugcaagcaucauggaguguac

SEQ ID NO: 6055 - RNA, 22 nt, Homo sapiens
uugagauggagucucguucugu

SEQ ID NO: 6056 - RNA, 16 nt, Homo sapiens
ucccugugacaugugc

SEQ ID NO: 6057 - RNA, 22 nt, Homo sapiens
gagguggauacauuaaauaaug

SEQ ID NO: 6058 - RNA, 22 nt, Homo sapiens
auuagggcaggagcaaguacgg

SEQ ID NO: 6059 - RNA, 22 nt, Homo sapiens
augagggaagcucacgugucca

SEQ ID NO: 6060 - RNA, 22 nt, Homo sapiens
gugguucuagagggacagaaug

SEQ ID NO: 6061 - RNA, 22 nt, Homo sapiens
uugggauggaaauuuguacccc

SEQ ID NO: 6062 - RNA, 22 nt, Homo sapiens
uaccacagucauuacacuugua

SEQ ID NO: 6063 - RNA, 22 nt, Homo sapiens
gccaguguguguuguucuccgc

SEQ ID NO: 6064 - RNA, 22 nt, Homo sapiens
gugcaaccaucaccacugacuc

SEQ ID NO: 6065 - RNA, 22 nt, Homo sapiens
uuauauguuucuuagggacaga

SEQ ID NO: 6066 - RNA, 22 nt, Homo sapiens
ucuuaggugggccaucacccca

SEQ ID NO: 6067 - RNA, 22 nt, Homo sapiens
ucacugagaaugauguuucuga

SEQ ID NO: 6068 - RNA, 22 nt, Homo sapiens
cacugcauccuccauauccugg

SEQ ID NO: 6069 - RNA, 18 nt, Homo sapiens
cuugucaaaucuuuccuc

SEQ ID NO: 6070 - RNA, 22 nt, Homo sapiens
auggucuuuguuucuaauucug

SEQ ID NO: 6071 - RNA, 22 nt, Homo sapiens
cuuuuggugugaagaagcucuu

SEQ ID NO: 6072 - RNA, 22 nt, Homo sapiens
ugaauugucucucacuggguuc

SEQ ID NO: 6073 - RNA, 22 nt, Homo sapiens
uucaguugcaucaguugaccag

SEQ ID NO: 6074 - RNA, 22 nt, Homo sapiens
uacagucauaaugccuagugac

SEQ ID NO: 6075 - RNA, 23 nt, Homo sapiens
ugccuagaugcugcccugggaca

SEQ ID NO: 6076 - RNA, 22 nt, Homo sapiens
cccugaagacuccaccgucaug

SEQ ID NO: 6077 - RNA, 22 nt, Homo sapiens
gcugugauucuguguagauagu

SEQ ID NO: 6078 - RNA, 20 nt, Homo sapiens
gaacugguguauguuuaacu

SEQ ID NO: 6079 - RNA, 22 nt, Homo sapiens
uagacccauuguucagagagug

SEQ ID NO: 6080 - RNA, 20 nt, Homo sapiens
uaucacaggucagaaacccu

SEQ ID NO: 6081 - RNA, 22 nt, Homo sapiens
ugaaauguguuaucugggccug

SEQ ID NO: 6082 - RNA, 22 nt, Homo sapiens
gucuuugcuuuuaaccagaggu

SEQ ID NO: 6083 - RNA, 22 nt, Homo sapiens
ugcaagaugauuucaauugaua

SEQ ID NO: 6084 - RNA, 22 nt, Homo sapiens
agccaguauuuugaguuggucu

SEQ ID NO: 6085 - RNA, 22 nt, Homo sapiens
uauugcuuuuaacccaaucucu

SEQ ID NO: 6086 - RNA, 22 nt, Homo sapiens
guuugccuuuuagauaggaaug

SEQ ID NO: 6087 - RNA, 22 nt, Homo sapiens
uucagagugguaugaagugaug

SEQ ID NO: 6088 - RNA, 21 nt, Homo sapiens
cugguguuagcacuucuuccc

SEQ ID NO: 6089 - RNA, 22 nt, Homo sapiens
aacauguuuagcagauaccugu

SEQ ID NO: 6090 - RNA, 22 nt, Homo sapiens
gaguuaggaucucacuguguca

SEQ ID NO: 6091 - RNA, 22 nt, Homo sapiens
uccagguuuugugaguuuaaau

SEQ ID NO: 6092 - RNA, 22 nt, Homo sapiens
guggacagagacuaaauguugu

SEQ ID NO: 6093 - RNA, 22 nt, Homo sapiens
uaaaugcucuuuaaaagugcuu

SEQ ID NO: 6094 - RNA, 16 nt, Homo sapiens
auugacaguggguguu

SEQ ID NO: 6095 - RNA, 17 nt, Homo sapiens
uuguucccauuaaaaag

SEQ ID NO: 6096 - RNA, 22 nt, Homo sapiens
augacaaugaaucccuguuuca

SEQ ID NO: 6097 - RNA, 22 nt, Homo sapiens
uuagcaccacacacuuuagagg

SEQ ID NO: 6098 - RNA, 22 nt, Homo sapiens
ugaaaaguuguugaaggcuuca

SEQ ID NO: 6099 - RNA, 22 nt, Homo sapiens
ucaagcaauucuccucucagcc

SEQ ID NO: 6100 - RNA, 22 nt, Homo sapiens
ugucauggggaaaauaacagac

SEQ ID NO: 6101 - RNA, 22 nt, Homo sapiens
uuaggcuuuucagacacuucau

SEQ ID NO: 6102 - RNA, 20 nt, Homo sapiens
uuggugaccuacagaugugg

SEQ ID NO: 6103 - RNA, 19 nt, Homo sapiens
aucaccagucuuuccacug

SEQ ID NO: 6104 - RNA, 22 nt, Homo sapiens
aaaagagcugagagguauucuu

SEQ ID NO: 6105 - RNA, 22 nt, Homo sapiens
gugucuccuguggagcuaugua

SEQ ID NO: 6106 - RNA, 22 nt, Homo sapiens
cugaggcacggcgaccuuaagu

SEQ ID NO: 6107 - RNA, 22 nt, Homo sapiens
uaucaagauggauaaggauaga

SEQ ID NO: 6108 - RNA, 23 nt, Homo sapiens
ugacuggagacuguugauccuuu

SEQ ID NO: 6109 - RNA, 22 nt, Homo sapiens
auaguagcaugcacuggugcug

SEQ ID NO: 6110 - RNA, 22 nt, Homo sapiens
acccuggaggucuacagugcag

SEQ ID NO: 6111 - RNA, 22 nt, Homo sapiens
cuacagugggucuguaguccuu

SEQ ID NO: 6112 - RNA, 22 nt, Homo sapiens
acugcacuccaccuugggcaac

SEQ ID NO: 6113 - RNA, 22 nt, Homo sapiens
gcuuuggcauguagauguaugg

SEQ ID NO: 6114 - RNA, 22 nt, Homo sapiens
cugguaugcuucauaugcaaac

SEQ ID NO: 6115 - RNA, 20 nt, Homo sapiens
augaaggcaggugugaguuu

SEQ ID NO: 6116 - RNA, 22 nt, Homo sapiens
gggugguuuuaucucuucccuu

SEQ ID NO: 6117 - RNA, 18 nt, Homo sapiens
uagaauauaggucauucu

SEQ ID NO: 6118 - RNA, 22 nt, Homo sapiens
gugaauugagagaacuguguua

SEQ ID NO: 6119 - RNA, 22 nt, Homo sapiens
aucccugugauccaaucacuuc

SEQ ID NO: 6120 - RNA, 22 nt, Homo sapiens
ugcaaacuuccuugggcagcau

SEQ ID NO: 6121 - RNA, 22 nt, Homo sapiens
gaugacagugaguaaccccaac

SEQ ID NO: 6122 - RNA, 22 nt, Homo sapiens
ugcauggauguuugaacacacu

SEQ ID NO: 6123 - RNA, 22 nt, Homo sapiens
auguggcuuuccuagaucuuag

SEQ ID NO: 6124 - RNA, 22 nt, Homo sapiens
ccugaugacacgggagauguac

SEQ ID NO: 6125 - RNA, 22 nt, Homo sapiens
cuuccagcuggguucagucagu

SEQ ID NO: 6126 - RNA, 22 nt, Homo sapiens
auaauacugggaagaugagcau

SEQ ID NO: 6127 - RNA, 22 nt, Homo sapiens
agaauacugucuauucauggua

SEQ ID NO: 6128 - RNA, 22 nt, Homo sapiens
acugcacucuagcauggguaau

SEQ ID NO: 6129 - RNA, 21 nt, Homo sapiens
ugaauauuuggguugugucca

SEQ ID NO: 6130 - RNA, 22 nt, Homo sapiens
caccuagacuggagugcagugg

SEQ ID NO: 6131 - RNA, 22 nt, Homo sapiens
uaugcacaugugccugggugug

SEQ ID NO: 6132 - RNA, 22 nt, Homo sapiens
aucauccugucaggagcuguga

SEQ ID NO: 6133 - RNA, 22 nt, Homo sapiens
uuuggccauguuggucaggcug

SEQ ID NO: 6134 - RNA, 22 nt, Homo sapiens
ugcugguuuucaucaucagugg

SEQ ID NO: 6135 - RNA, 22 nt, Homo sapiens
auugcaguuucaacuccagggc

SEQ ID NO: 6136 - RNA, 22 nt, Homo sapiens
cauugcacucuagucuggguga

SEQ ID NO: 6137 - RNA, 22 nt, Homo sapiens
gauauguguuuuagucaggguu

SEQ ID NO: 6138 - RNA, 22 nt, Homo sapiens
gggaacaugagaaugugaauga

SEQ ID NO: 6139 - RNA, 22 nt, Homo sapiens
aaaugcucucuacacguuucug

SEQ ID NO: 6140 - RNA, 22 nt, Homo sapiens
uuaaguuguagcuacaaauaca

SEQ ID NO: 6141 - RNA, 22 nt, Homo sapiens
auucaagggauuucaggaggcu

SEQ ID NO: 6142 - RNA, 22 nt, Homo sapiens
auuaagugcuugccagugcugg

SEQ ID NO: 6143 - RNA, 22 nt, Homo sapiens
guaauagucucaaacuccugga

SEQ ID NO: 6144 - RNA, 22 nt, Homo sapiens
ucucuugguugaacaguuugga

SEQ ID NO: 6145 - RNA, 22 nt, Homo sapiens
gacauguaaggcucucucuguu

SEQ ID NO: 6146 - RNA, 22 nt, Homo sapiens
uguccuguaggaggcagaacaa

SEQ ID NO: 6147 - RNA, 22 nt, Homo sapiens
ccagugguugggccggagacgg

SEQ ID NO: 6148 - RNA, 22 nt, Homo sapiens
uggggugugagggagaaagaaa

SEQ ID NO: 6149 - RNA, 22 nt, Homo sapiens
uugacaaugcacugugcuaagu

SEQ ID NO: 6150 - RNA, 22 nt, Homo sapiens
uaaugcauguaaugggcugaua

SEQ ID NO: 6151 - RNA, 22 nt, Homo sapiens
augacuaaaggguuuauguuga

SEQ ID NO: 6152 - RNA, 22 nt, Homo sapiens
guggaaggucaugaauguucuu

SEQ ID NO: 6153 - RNA, 22 nt, Homo sapiens
caugggacugucuuggcuauac

SEQ ID NO: 6154 - RNA, 22 nt, Homo sapiens
uugagguguauuguacagcaca

SEQ ID NO: 6155 - RNA, 20 nt, Homo sapiens
auugcagcaugauuuauaau

SEQ ID NO: 6156 - RNA, 22 nt, Homo sapiens
aaagugcugggauuggcugggc

SEQ ID NO: 6157 - RNA, 22 nt, Homo sapiens
ugacuaguuggauaaccuagga

SEQ ID NO: 6158 - RNA, 20 nt, Homo sapiens
uaucacauggggagaaaccu

SEQ ID NO: 6159 - RNA, 17 nt, Homo sapiens
gcauauguugaaccagu

SEQ ID NO: 6160 - RNA, 17 nt, Homo sapiens
gcauaugucgaaccagc

SEQ ID NO: 6161 - RNA, 22 nt, Homo sapiens
uacaaaucuagguuuguuacug

SEQ ID NO: 6162 - RNA, 22 nt, Homo sapiens
ugaguacuacuaguuacugcua

SEQ ID NO: 6163 - RNA, 22 nt, Homo sapiens
auuguacuccagccugggcgac

SEQ ID NO: 6164 - RNA, 22 nt, Homo sapiens
agguuguguuugugauuagaua

SEQ ID NO: 6165 - RNA, 20 nt, Homo sapiens
ugaugcaaaucuuuaaaagu

SEQ ID NO: 6166 - RNA, 22 nt, Homo sapiens
ucaacaggucaauugcauagaa

SEQ ID NO: 6167 - RNA, 22 nt, Homo sapiens
aaucugucaguuuuguguuaau

SEQ ID NO: 6168 - RNA, 22 nt, Homo sapiens
uugcagcaaagagggaggggca

SEQ ID NO: 6169 - RNA, 22 nt, Homo sapiens
ugugcacaugauauaucacaua

SEQ ID NO: 6170 - RNA, 22 nt, Homo sapiens
ucacuaggcuggagugcagugg

SEQ ID NO: 6171 - RNA, 21 nt, Homo sapiens
ccuugagaacaucaauuugcu

SEQ ID NO: 6172 - RNA, 22 nt, Homo sapiens
uugcaugucugcuucuccuccu

SEQ ID NO: 6173 - RNA, 20 nt, Homo sapiens
ucucauagagguagagaaua

SEQ ID NO: 6174 - RNA, 22 nt, Homo sapiens
uucacugcacuccagccugagc

SEQ ID NO: 6175 - RNA, 22 nt, Homo sapiens
augcacaugcgaaaacuugugu

SEQ ID NO: 6176 - RNA, 22 nt, Homo sapiens
cacagcacaggcaugaguguca

SEQ ID NO: 6177 - RNA, 23 nt, Homo sapiens
gagugcaaugacaugaucucgga

SEQ ID NO: 6178 - RNA, 22 nt, Homo sapiens
agugcaguggcauggucauaac

SEQ ID NO: 6179 - RNA, 21 nt, Homo sapiens
auguaaugaagaagccacugg

SEQ ID NO: 6180 - RNA, 22 nt, Homo sapiens
cugaugaaguauuuguucugga

SEQ ID NO: 6181 - RNA, 22 nt, Homo sapiens
auaaagguaagcacuauccuga

SEQ ID NO: 6182 - RNA, 22 nt, Homo sapiens
gaggucauguggcaggcagcca

SEQ ID NO: 6183 - RNA, 22 nt, Homo sapiens
uguucaugaguucucauuuuua

SEQ ID NO: 6184 - RNA, 22 nt, Homo sapiens
gugagaacugugucuuauaaac

SEQ ID NO: 6185 - RNA, 22 nt, Homo sapiens
cagugguuuucucaguucagca

SEQ ID NO: 6186 - RNA, 22 nt, Homo sapiens
ugagagacaguuuguuaaaauu

SEQ ID NO: 6187 - RNA, 22 nt, Homo sapiens
gagauugucaugauuacauugu

SEQ ID NO: 6188 - RNA, 22 nt, Homo sapiens
gcaauguuacugaauguguuuu

SEQ ID NO: 6189 - RNA, 22 nt, Homo sapiens
uagugguauuagcgauacuacu

SEQ ID NO: 6190 - RNA, 22 nt, Homo sapiens
ugcauaucuucuuuugagaaau

SEQ ID NO: 6191 - RNA, 22 nt, Homo sapiens
ugacuugaguaacuggcucagg

SEQ ID NO: 6192 - RNA, 22 nt, Homo sapiens
ccaagugcuuaaaauuucauuu

SEQ ID NO: 6193 - RNA, 22 nt, Homo sapiens
auugcacuccagccuggccaac

SEQ ID NO: 6194 - RNA, 22 nt, Homo sapiens
gauaaaguauuggguacuaugc

SEQ ID NO: 6195 - RNA, 20 nt, Homo sapiens
ugccaagaugacuauagcuc

SEQ ID NO: 6196 - RNA, 22 nt, Homo sapiens
gaugaugcuagguguuagggcu

SEQ ID NO: 6197 - RNA, 22 nt, Homo sapiens
caggugaaugccucuccuucug

SEQ ID NO: 6198 - RNA, 22 nt, Homo sapiens
aucagcauucccaaaugaugug

SEQ ID NO: 6199 - RNA, 19 nt, Homo sapiens
auaguguaggaaaacagcu

SEQ ID NO: 6200 - RNA, 22 nt, Homo sapiens
auuguacuuaagccugggugaa

SEQ ID NO: 6201 - RNA, 22 nt, Homo sapiens
aaaugcaguugguggggauaug

SEQ ID NO: 6202 - RNA, 22 nt, Homo sapiens
gucccugaggaacauccagggc

SEQ ID NO: 6203 - RNA, 22 nt, Homo sapiens
caggcagucuggggguguaucc

SEQ ID NO: 6204 - RNA, 22 nt, Homo sapiens
aagcucuuguugaaucuuguca

SEQ ID NO: 6205 - RNA, 22 nt, Homo sapiens
uuugccaaucagaggcaucuug

SEQ ID NO: 6206 - RNA, 22 nt, Homo sapiens
augaucuagaguaggaaacaga

SEQ ID NO: 6207 - RNA, 18 nt, Homo sapiens
uuaaggcaggacuuuaag

SEQ ID NO: 6208 - RNA, 22 nt, Homo sapiens
cauugcuaaaagucauauauaa

SEQ ID NO: 6209 - RNA, 22 nt, Homo sapiens
uuaaggaaagcauuuaauucag

SEQ ID NO: 6210 - RNA, 22 nt, Homo sapiens
ugacuugauacauguuuuugaa

SEQ ID NO: 6211 - RNA, 20 nt, Homo sapiens
uggaguuugaguucuuggag

SEQ ID NO: 6212 - RNA, 22 nt, Homo sapiens
acugcacuccagccucggggac

SEQ ID NO: 6213 - RNA, 22 nt, Homo sapiens
uuaagucacacuagacaacuga

SEQ ID NO: 6214 - RNA, 22 nt, Homo sapiens
uuguguaguaccucucacauug

SEQ ID NO: 6215 - RNA, 22 nt, Homo sapiens
uucuugguguaguaguugaaaa

SEQ ID NO: 6216 - RNA, 22 nt, Homo sapiens
ugaccagaaaacaaauuaguuu

SEQ ID NO: 6217 - RNA, 22 nt, Homo sapiens
cauggcuuucacaguaaagccu

SEQ ID NO: 6218 - RNA, 22 nt, Homo sapiens
uggaaaucuaaguuuggauuga

SEQ ID NO: 6219 - RNA, 22 nt, Homo sapiens
gggucauggaugugaagcuaga

SEQ ID NO: 6220 - RNA, 22 nt, Homo sapiens
uuuuacacaucaccgcucgugu

SEQ ID NO: 6221 - RNA, 17 nt, Homo sapiens
gacauaggaaaaggaga

SEQ ID NO: 6222 - RNA, 22 nt, Homo sapiens
acugcacuccagccucggcaau

SEQ ID NO: 6223 - RNA, 23 nt, Homo sapiens
uuuuuguguuucauggaaauagg

SEQ ID NO: 6224 - RNA, 22 nt, Homo sapiens
uucaccagggaagucucaacuc

SEQ ID NO: 6225 - RNA, 22 nt, Homo sapiens
gaauugcacaaaaacugcuugu

SEQ ID NO: 6226 - RNA, 22 nt, Homo sapiens
ggggcaaaaugccacgagucuc

SEQ ID NO: 6227 - RNA, 22 nt, Homo sapiens
gucugguugacagcauguggcc

SEQ ID NO: 6228 - RNA, 22 nt, Homo sapiens
ucacgcugcugcaaccagccug

SEQ ID NO: 6229 - RNA, 22 nt, Homo sapiens
guguaugguaggaugacggagu

SEQ ID NO: 6230 - RNA, 22 nt, Homo sapiens
cuagguuauacucugaaauggu

SEQ ID NO: 6231 - RNA, 22 nt, Homo sapiens
cugugcauguaugcgugaguuc

SEQ ID NO: 6232 - RNA, 22 nt, Homo sapiens
auugcacuccagccuggccgag

SEQ ID NO: 6233 - RNA, 22 nt, Homo sapiens
uggucauggggcagcugacacu

SEQ ID NO: 6234 - RNA, 22 nt, Homo sapiens
aucaaagugaaauauuaguuau

SEQ ID NO: 6235 - RNA, 22 nt, Homo sapiens
uuggcacuugauaauauucugg

SEQ ID NO: 6236 - RNA, 22 nt, Homo sapiens
uucucauggaacaucuguacug

SEQ ID NO: 6237 - RNA, 22 nt, Homo sapiens
acauccauuugcuuuauuugcu

SEQ ID NO: 6238 - RNA, 22 nt, Homo sapiens
gagguuauuggggugcuugugu

SEQ ID NO: 6239 - RNA, 22 nt, Homo sapiens
uaauacucuucucauuuuacag

SEQ ID NO: 6240 - RNA, 22 nt, Homo sapiens
ugucaguggacugugaaaggca

SEQ ID NO: 6241 - RNA, 22 nt, Homo sapiens
uucagguacuauaggcuguugg

SEQ ID NO: 6242 - RNA, 22 nt, Homo sapiens
gugcuuguguuaauauguagcu

SEQ ID NO: 6243 - RNA, 22 nt, Homo sapiens
aaucucagagauaucugugucc

SEQ ID NO: 6244 - RNA, 22 nt, Homo sapiens
gauggugucccaggcucaggcu

SEQ ID NO: 6245 - RNA, 20 nt, Homo sapiens
gacuugagagugggagagua

SEQ ID NO: 6246 - RNA, 22 nt, Homo sapiens
uugguacuacacuucuaaucuu

SEQ ID NO: 6247 - RNA, 22 nt, Homo sapiens
ggugccuacugugugucaggca

SEQ ID NO: 6248 - RNA, 22 nt, Homo sapiens
uuucccauuguucugcucugug

SEQ ID NO: 6249 - RNA, 22 nt, Homo sapiens
agcuuguagugauuugugguaa

SEQ ID NO: 6250 - RNA, 22 nt, Homo sapiens
uggcaaaaaaacgcaauuacgu

SEQ ID NO: 6251 - RNA, 22 nt, Homo sapiens
gcagucaucugaaggcuuaacu

SEQ ID NO: 6252 - RNA, 22 nt, Homo sapiens
uugcagcaaauaggaaugagga

SEQ ID NO: 6253 - RNA, 22 nt, Homo sapiens
augccacuguacucuagccuag

SEQ ID NO: 6254 - RNA, 22 nt, Homo sapiens
uaugucacuggacauaaguucu

SEQ ID NO: 6255 - RNA, 22 nt, Homo sapiens
uugugaaugaugucgcaguaaa

SEQ ID NO: 6256 - RNA, 22 nt, Homo sapiens
uuaacagcacaugcugucccuu

SEQ ID NO: 6257 - RNA, 22 nt, Homo sapiens
gaggcagucugacccuuagcag

SEQ ID NO: 6258 - RNA, 22 nt, Homo sapiens
aucauuaguuguggaauucuug

SEQ ID NO: 6259 - RNA, 22 nt, Homo sapiens
auggcuguuccugggaguucua

SEQ ID NO: 6260 - RNA, 22 nt, Homo sapiens
augauauguuuguagcuaucuc

SEQ ID NO: 6261 - RNA, 22 nt, Homo sapiens
augcuacuggauuuguauaaau

SEQ ID NO: 6262 - RNA, 22 nt, Homo sapiens
guccuggagaagcguggaccgg

SEQ ID NO: 6263 - RNA, 20 nt, Homo sapiens
auaugcauguguuuucacuu

SEQ ID NO: 6264 - RNA, 22 nt, Homo sapiens
uccccugagaccccucagcacu

SEQ ID NO: 6265 - RNA, 22 nt, Homo sapiens
uuagcagccuucaagcuccaag

SEQ ID NO: 6266 - RNA, 22 nt, Homo sapiens
ucaucuggcgaaugugaagagu

SEQ ID NO: 6267 - RNA, 22 nt, Homo sapiens
augagauaaaccaucucuuaag

SEQ ID NO: 6268 - RNA, 22 nt, Homo sapiens
auaccugguagucuugcuacac

SEQ ID NO: 6269 - RNA, 22 nt, Homo sapiens
ccucauggagaaccucugcuag

SEQ ID NO: 6270 - RNA, 20 nt, Homo sapiens
cagagcaaagcaguccuggc

SEQ ID NO: 6271 - RNA, 22 nt, Homo sapiens
uaccagugaauuccaggggcua

SEQ ID NO: 6272 - RNA, 17 nt, Homo sapiens
gcugauguuugcauuuu

SEQ ID NO: 6273 - RNA, 22 nt, Homo sapiens
uuuugguuguuggguaagagua

SEQ ID NO: 6274 - RNA, 22 nt, Homo sapiens
auuucacuucgcaugguguccg

SEQ ID NO: 6275 - RNA, 22 nt, Homo sapiens
cugggucaguuucugauuauug

SEQ ID NO: 6276 - RNA, 22 nt, Homo sapiens
gggagcacaagaaauguuucau

SEQ ID NO: 6277 - RNA, 22 nt, Homo sapiens
uccugagucagcauccguuugu

SEQ ID NO: 6278 - RNA, 22 nt, Homo sapiens
cggaaugaaaauguccuucagu

SEQ ID NO: 6279 - RNA, 22 nt, Homo sapiens
ugugcuugcuucuucuccuagu

SEQ ID NO: 6280 - RNA, 22 nt, Homo sapiens
acccgcccagguguggccggga

SEQ ID NO: 6281 - RNA, 22 nt, Homo sapiens
augugaacugaauuaauucaca

SEQ ID NO: 6282 - RNA, 22 nt, Homo sapiens
gaaugcaugaggggaucagaug

SEQ ID NO: 6283 - RNA, 22 nt, Homo sapiens
gcuggguucagagugggcugcg

SEQ ID NO: 6284 - RNA, 21 nt, Homo sapiens
ugacauuauuucaugucagua

SEQ ID NO: 6285 - RNA, 22 nt, Homo sapiens
agagcaccauuuagcaagguga

SEQ ID NO: 6286 - RNA, 21 nt, Homo sapiens
ugacauguuggugugcugcac

SEQ ID NO: 6287 - RNA, 22 nt, Homo sapiens
caagugcucuaggauccugagu

SEQ ID NO: 6288 - RNA, 22 nt, Homo sapiens
gugguuguuggaguggcaauuu

SEQ ID NO: 6289 - RNA, 22 nt, Homo sapiens
cuuguacuacuuaggaucugga

SEQ ID NO: 6290 - RNA, 22 nt, Homo sapiens
ugggccgcugcaggaugguccc

SEQ ID NO: 6291 - RNA, 22 nt, Homo sapiens
auagacugaguggcuuaaacca

SEQ ID NO: 6292 - RNA, 22 nt, Homo sapiens
gauuucaucuuuagaggaagga

SEQ ID NO: 6293 - RNA, 22 nt, Homo sapiens
gaguagugcugcaguaaacaua

SEQ ID NO: 6294 - RNA, 22 nt, Homo sapiens
aaggagcaguggacggguccua

SEQ ID NO: 6295 - RNA, 20 nt, Homo sapiens
augacuagaggacaugguaa

SEQ ID NO: 6296 - RNA, 22 nt, Homo sapiens
uaauaguuucagaaguuguuuu

SEQ ID NO: 6297 - RNA, 22 nt, Homo sapiens
uucaaguguucaggagcuacag

SEQ ID NO: 6298 - RNA, 22 nt, Homo sapiens
ugagauagcauaagggacagaa

SEQ ID NO: 6299 - RNA, 22 nt, Homo sapiens
auugcacugcagccugggcaac

SEQ ID NO: 6300 - RNA, 22 nt, Homo sapiens
gucaugucugcacauaguaaaa

SEQ ID NO: 6301 - RNA, 22 nt, Homo sapiens
ugaauacuucguucaaagauaa

SEQ ID NO: 6302 - RNA, 22 nt, Homo sapiens
uaccuaguaggagggaggugga

SEQ ID NO: 6303 - RNA, 20 nt, Homo sapiens
aguauucacuuuuuucaugg

SEQ ID NO: 6304 - RNA, 22 nt, Homo sapiens
ugugauugauuaaugugugcua

SEQ ID NO: 6305 - RNA, 22 nt, Homo sapiens
ugacuugaaacgugaacagauc

SEQ ID NO: 6306 - RNA, 22 nt, Homo sapiens
ugagaugcauauucuggcuccu

SEQ ID NO: 6307 - RNA, 22 nt, Homo sapiens
auggcagugagucucuaguauu

SEQ ID NO: 6308 - RNA, 22 nt, Homo sapiens
ugacaugauguuccuacacugu

SEQ ID NO: 6309 - RNA, 22 nt, Homo sapiens
augaggagguaugauuuucuga

SEQ ID NO: 6310 - RNA, 22 nt, Homo sapiens
uuacaguagaugaggguauaau

SEQ ID NO: 6311 - RNA, 22 nt, Homo sapiens
ugauguaggacauuauuauuuc

SEQ ID NO: 6312 - RNA, 22 nt, Homo sapiens
acaguauaaugcuguagggaga

SEQ ID NO: 6313 - RNA, 23 nt, Homo sapiens
augugugcuuggagagcaggaug

SEQ ID NO: 6314 - RNA, 22 nt, Homo sapiens
cugcaagaugcauaggaauuuu

SEQ ID NO: 6315 - RNA, 22 nt, Homo sapiens
uuaccucuguggcucucggacu

SEQ ID NO: 6316 - RNA, 22 nt, Homo sapiens
ucaccaguggcacuccagccug

SEQ ID NO: 6317 - RNA, 22 nt, Homo sapiens
ccaguguuuuugaauuccagga

SEQ ID NO: 6318 - RNA, 22 nt, Homo sapiens
cuggagucugacugacacaagg

SEQ ID NO: 6319 - RNA, 22 nt, Homo sapiens
aaaugcuucuauguggcauguu

SEQ ID NO: 6320 - RNA, 22 nt, Homo sapiens
gauuugagagaggguguuuaua

SEQ ID NO: 6321 - RNA, 22 nt, Homo sapiens
ugagguuguccacuauaaucca

SEQ ID NO: 6322 - RNA, 22 nt, Homo sapiens
uuuggcagaaaacaagaaucug

SEQ ID NO: 6323 - RNA, 22 nt, Homo sapiens
ucauuguccaacuucuuucagu

SEQ ID NO: 6324 - RNA, 22 nt, Homo sapiens
guggaaugcaguguugauucaa

SEQ ID NO: 6325 - RNA, 22 nt, Homo sapiens
cuggaggccugaacauaaaugg

SEQ ID NO: 6326 - RNA, 22 nt, Homo sapiens
uaugcccauuuaaauugaacaa

SEQ ID NO: 6327 - RNA, 22 nt, Homo sapiens
ggggaguguggacaucacccug

SEQ ID NO: 6328 - RNA, 23 nt, Homo sapiens
uuugagugugauaaacacuguca

SEQ ID NO: 6329 - RNA, 22 nt, Homo sapiens
auagcuguugaauggaauauuc

SEQ ID NO: 6330 - RNA, 22 nt, Homo sapiens
gcugagacauugguuuucuccu

SEQ ID NO: 6331 - RNA, 22 nt, Homo sapiens
uuugggaaaugaaguugguaga

SEQ ID NO: 6332 - RNA, 18 nt, Homo sapiens
cuuggcgaugccaacaua

SEQ ID NO: 6333 - RNA, 23 nt, Homo sapiens
ucccaagauggaccagaccaagg

SEQ ID NO: 6334 - RNA, 22 nt, Homo sapiens
augaugaaguaagugcuuagga

SEQ ID NO: 6335 - RNA, 22 nt, Homo sapiens
uuauggcuauugaugacaauug

SEQ ID NO: 6336 - RNA, 22 nt, Homo sapiens
aacaccuugcagggauuaugac

SEQ ID NO: 6337 - RNA, 22 nt, Homo sapiens
uagggaguguccuuucgggaaa

SEQ ID NO: 6338 - RNA, 22 nt, Homo sapiens
uagcaguauugaaagaugaggg

SEQ ID NO: 6339 - RNA, 22 nt, Homo sapiens
ucucagugugguaaaaguuuuu

SEQ ID NO: 6340 - RNA, 22 nt, Homo sapiens
aguacugucugguuaccugaca

SEQ ID NO: 6341 - RNA, 22 nt, Homo sapiens
uugacaaggagugggguugaga

SEQ ID NO: 6342 - RNA, 22 nt, Homo sapiens
ugugcaguuuugagugaauuuc

SEQ ID NO: 6343 - RNA, 22 nt, Homo sapiens
gggaguguguaggacccagugu

SEQ ID NO: 6344 - RNA, 22 nt, Homo sapiens
uuugguaguuuguugggaccca

SEQ ID NO: 6345 - RNA, 22 nt, Homo sapiens
cacugcacuccagucccgucuc

SEQ ID NO: 6346 - RNA, 22 nt, Homo sapiens
uagcagucaagauagucauuau

SEQ ID NO: 6347 - RNA, 23 nt, Homo sapiens
uugggcaaaucacugagggcaga

SEQ ID NO: 6348 - RNA, 22 nt, Homo sapiens
aaugcauaauuuguaugaggua

SEQ ID NO: 6349 - RNA, 22 nt, Homo sapiens
ucccguuauuaaccccugccuu

SEQ ID NO: 6350 - RNA, 22 nt, Homo sapiens
auccucaguggcuuaaguauag

SEQ ID NO: 6351 - RNA, 22 nt, Homo sapiens
ucacuggucuaaguggaggggg

SEQ ID NO: 6352 - RNA, 22 nt, Homo sapiens
uaaagcuacaguauaugguauu

SEQ ID NO: 6353 - RNA, 22 nt, Homo sapiens
cuagaacuagaacugcuggggu

SEQ ID NO: 6354 - RNA, 22 nt, Homo sapiens
auacaugugccaugcuggugug

SEQ ID NO: 6355 - RNA, 22 nt, Homo sapiens
cuauuugguuggugaaaaaagu

SEQ ID NO: 6356 - RNA, 22 nt, Homo sapiens
ugauuagagcccaagcuuugaa

SEQ ID NO: 6357 - RNA, 22 nt, Homo sapiens
uggaguguagaagccagccucc

SEQ ID NO: 6358 - RNA, 22 nt, Homo sapiens
uuuggcccccagcucaggacau

SEQ ID NO: 6359 - RNA, 22 nt, Homo sapiens
agcaggauuguuacaauaguaa

SEQ ID NO: 6360 - RNA, 22 nt, Homo sapiens
gauuagcacuucaguuacagua

SEQ ID NO: 6361 - RNA, 22 nt, Homo sapiens
gugaaguuuuugugaggccuaa

SEQ ID NO: 6362 - RNA, 22 nt, Homo sapiens
uuugguuuuuguuaucacucau

SEQ ID NO: 6363 - RNA, 23 nt, Homo sapiens
ggcacggaauucaaagaggcauu

SEQ ID NO: 6364 - RNA, 23 nt, Homo sapiens
ugagauuauaaucuuuuacuucu

SEQ ID NO: 6365 - RNA, 22 nt, Homo sapiens
ugauaauguuaggcuuuauuca

SEQ ID NO: 6366 - RNA, 22 nt, Homo sapiens
ugagguaacaaacuaugaguua

SEQ ID NO: 6367 - RNA, 23 nt, Homo sapiens
ugaguagguccacguaugugagu

SEQ ID NO: 6368 - RNA, 22 nt, Homo sapiens
ugacauggagagagaagccuuu

SEQ ID NO: 6369 - RNA, 19 nt, Homo sapiens
uacauaguauuuaguggca

SEQ ID NO: 6370 - RNA, 22 nt, Homo sapiens
uguagguagggucuguuuuuga

SEQ ID NO: 6371 - RNA, 23 nt, Homo sapiens
uucggcaaaugcccuuuaggcag

SEQ ID NO: 6372 - RNA, 22 nt, Homo sapiens
gcuugguccccacccaaaucgc

SEQ ID NO: 6373 - RNA, 22 nt, Homo sapiens
agcagugugaaaugauuuaagg

SEQ ID NO: 6374 - RNA, 22 nt, Homo sapiens
uacugcacuccacccuggguga

SEQ ID NO: 6375 - RNA, 22 nt, Homo sapiens
uugaaguaggaaaggaggaggu

SEQ ID NO: 6376 - RNA, 22 nt, Homo sapiens
acaugccucccugguccgcugu

SEQ ID NO: 6377 - RNA, 22 nt, Homo sapiens
uggaacugauauugauggaaaa

SEQ ID NO: 6378 - RNA, 22 nt, Homo sapiens
cauugcacuccagccuggccaa

SEQ ID NO: 6379 - RNA, 22 nt, Homo sapiens
augagaugcaagauuagauggg

SEQ ID NO: 6380 - RNA, 22 nt, Homo sapiens
uucaccaguuuugucacgaaug

SEQ ID NO: 6381 - RNA, 18 nt, Homo sapiens
gacuuggaguuuacagug

SEQ ID NO: 6382 - RNA, 22 nt, Homo sapiens
auucaaggagucuucgucccaa

SEQ ID NO: 6383 - RNA, 22 nt, Homo sapiens
uuggcagcuguggaaucugggc

SEQ ID NO: 6384 - RNA, 22 nt, Homo sapiens
uuuugguauaugcaggggucuu

SEQ ID NO: 6385 - RNA, 22 nt, Homo sapiens
cuggaaaguagacaaucuaaaa

SEQ ID NO: 6386 - RNA, 19 nt, Homo sapiens
cuugugccugaagcuuggg

SEQ ID NO: 6387 - RNA, 22 nt, Homo sapiens
uggcaagcaggacuaaagcacc

SEQ ID NO: 6388 - RNA, 20 nt, Homo sapiens
ggcaagguagcauuucuucu

SEQ ID NO: 6389 - RNA, 23 nt, Homo sapiens
uugggcaaaucacuaacgucucc

SEQ ID NO: 6390 - RNA, 22 nt, Homo sapiens
ggugacugguuuaucuggcagu

SEQ ID NO: 6391 - RNA, 22 nt, Homo sapiens
auuaucacaguuuugcauaugg

SEQ ID NO: 6392 - RNA, 22 nt, Homo sapiens
ugagauggaucuuggauuugaa

SEQ ID NO: 6393 - RNA, 22 nt, Homo sapiens
ucaaaugcucuuugcagagagg

SEQ ID NO: 6394 - RNA, 22 nt, Homo sapiens
ucugguguuauucauguaguuu

SEQ ID NO: 6395 - RNA, 22 nt, Homo sapiens
uuccugugacuguguggcaccc

SEQ ID NO: 6396 - RNA, 22 nt, Homo sapiens
uuggcaauauuuacugaaguug

SEQ ID NO: 6397 - RNA, 22 nt, Homo sapiens
ugagaacggauacuaagggcug

SEQ ID NO: 6398 - RNA, 22 nt, Homo sapiens
caggcauuguccaugcugaagg

SEQ ID NO: 6399 - RNA, 22 nt, Homo sapiens
uugcauagaggugaguauagua

SEQ ID NO: 6400 - RNA, 22 nt, Homo sapiens
acacuggaggagagcuguugcu

SEQ ID NO: 6401 - RNA, 20 nt, Homo sapiens
gcaaaguuuagcucccacua

SEQ ID NO: 6402 - RNA, 22 nt, Homo sapiens
ucuguguuugaucaagauugua

SEQ ID NO: 6403 - RNA, 22 nt, Homo sapiens
aucugacuuuuaauuugaaaac

SEQ ID NO: 6404 - RNA, 22 nt, Homo sapiens
uugaaagucuaggcuuacagua

SEQ ID NO: 6405 - RNA, 22 nt, Homo sapiens
caccuugugauccacccgccuu

SEQ ID NO: 6406 - RNA, 22 nt, Homo sapiens
gggcaagaagucuuguaguuuu

SEQ ID NO: 6407 - RNA, 22 nt, Homo sapiens
acccuguaggacuauucuaauc

SEQ ID NO: 6408 - RNA, 22 nt, Homo sapiens
ucagguaaucuauuugucuuuu

SEQ ID NO: 6409 - RNA, 23 nt, Homo sapiens
uggaagacuccucucuuggcugc

SEQ ID NO: 6410 - RNA, 22 nt, Homo sapiens
auggaaugccauuuauaaugga

SEQ ID NO: 6411 - RNA, 20 nt, Homo sapiens
uguugcacucuagccugggu

SEQ ID NO: 6412 - RNA, 22 nt, Homo sapiens
augcauagugggaugcucugug

SEQ ID NO: 6413 - RNA, 20 nt, Homo sapiens
uagcagcagacagagggagg

SEQ ID NO: 6414 - RNA, 22 nt, Homo sapiens
cuuugguugugcucuccacuuu

SEQ ID NO: 6415 - RNA, 22 nt, Homo sapiens
cuauggcucugucuuuuaaguu

SEQ ID NO: 6416 - RNA, 22 nt, Homo sapiens
aucacugggagcagccauuaau

SEQ ID NO: 6417 - RNA, 22 nt, Homo sapiens
uguauuuguuguuaaauggaga

SEQ ID NO: 6418 - RNA, 22 nt, Homo sapiens
uggauugugaagaccaugggaa

SEQ ID NO: 6419 - RNA, 22 nt, Homo sapiens
uagcagcauuuuuguagaguau

SEQ ID NO: 6420 - RNA, 19 nt, Homo sapiens
agcaucauuauuguuuugg

SEQ ID NO: 6421 - RNA, 22 nt, Homo sapiens
agcugguccugugacuugcuuc

SEQ ID NO: 6422 - RNA, 22 nt, Homo sapiens
ucaauugcaucaacaguguaca

SEQ ID NO: 6423 - RNA, 22 nt, Homo sapiens
ugcuugagacacauaugaauuu

SEQ ID NO: 6424 - RNA, 22 nt, Homo sapiens
uucaucaggaauauugaccugu

SEQ ID NO: 6425 - RNA, 19 nt, Homo sapiens
acccuguccccaccuuuac

SEQ ID NO: 6426 - RNA, 21 nt, Homo sapiens
caauggcacgaucuuggcuca

SEQ ID NO: 6427 - RNA, 20 nt, Homo sapiens
ucuuucgguuaccaggcagu

SEQ ID NO: 6428 - RNA, 22 nt, Homo sapiens
ggcaguguauuacuuaggguuc

SEQ ID NO: 6429 - RNA, 22 nt, Homo sapiens
gaugaggcuagagacaugugua

SEQ ID NO: 6430 - RNA, 20 nt, Homo sapiens
uaaaugccucaugcuuuauu

SEQ ID NO: 6431 - RNA, 22 nt, Homo sapiens
uaaggcuuaugguaaaguccug

SEQ ID NO: 6432 - RNA, 22 nt, Homo sapiens
augauucugaucuagagcuugg

SEQ ID NO: 6433 - RNA, 22 nt, Homo sapiens
accgaguuagccaggauggucu

SEQ ID NO: 6434 - RNA, 17 nt, Homo sapiens
gguacguuuuguucugu

SEQ ID NO: 6435 - RNA, 22 nt, Homo sapiens
caagugaauaguugcucucaga

SEQ ID NO: 6436 - RNA, 22 nt, Homo sapiens
uugagaucugugcuuuugcguu

SEQ ID NO: 6437 - RNA, 22 nt, Homo sapiens
cuuuaugagguuggauggaucu

SEQ ID NO: 6438 - RNA, 22 nt, Homo sapiens
uggcuguuuauuucaccugggu

SEQ ID NO: 6439 - RNA, 22 nt, Homo sapiens
cauggcccuggguccauaggaa

SEQ ID NO: 6440 - RNA, 22 nt, Homo sapiens
ucacaguagccccucccaucau

SEQ ID NO: 6441 - RNA, 21 nt, Homo sapiens
acugauguuugaaauucgcug

SEQ ID NO: 6442 - RNA, 22 nt, Homo sapiens
ugcagauucguuuugaggggua

SEQ ID NO: 6443 - RNA, 22 nt, Homo sapiens
ugagcuacuacacccagcuugg

SEQ ID NO: 6444 - RNA, 22 nt, Homo sapiens
cuuuugugauuccucaguuacu

SEQ ID NO: 6445 - RNA, 22 nt, Homo sapiens
caaugguuuuuuaguauaagua

SEQ ID NO: 6446 - RNA, 21 nt, Homo sapiens
uugagcuuuuaguacagacag

SEQ ID NO: 6447 - RNA, 22 nt, Homo sapiens
uaacauagucauauacuugcuu

SEQ ID NO: 6448 - RNA, 22 nt, Homo sapiens
auagcagugugaaaauugacug

SEQ ID NO: 6449 - RNA, 22 nt, Homo sapiens
guaucucaguucucgugauuag

SEQ ID NO: 6450 - RNA, 22 nt, Homo sapiens
gucuuugcauguauguucauga

SEQ ID NO: 6451 - RNA, 22 nt, Homo sapiens
uuggcauugccaaacugucaac

SEQ ID NO: 6452 - RNA, 22 nt, Homo sapiens
uucccucagaaacacacagccc

SEQ ID NO: 6453 - RNA, 22 nt, Homo sapiens
guucacucuggagaauauugac

SEQ ID NO: 6454 - RNA, 22 nt, Homo sapiens
augugccauucucauggcgcuu

SEQ ID NO: 6455 - RNA, 22 nt, Homo sapiens
auggcacagaguagaugcucaa

SEQ ID NO: 6456 - RNA, 22 nt, Homo sapiens
caucacuguugguacaaguaau

SEQ ID NO: 6457 - RNA, 23 nt, Homo sapiens
uuguacacuaagaaucgcagaug

SEQ ID NO: 6458 - RNA, 22 nt, Homo sapiens
gagaucaaguauucuccacuaa

SEQ ID NO: 6459 - RNA, 20 nt, Homo sapiens
gaaugguuucgggguucuug

SEQ ID NO: 6460 - RNA, 21 nt, Homo sapiens
uguagcagcauaauuuauaau

SEQ ID NO: 6461 - RNA, 22 nt, Homo sapiens
uuaccagucugauaaacagaaa

SEQ ID NO: 6462 - RNA, 22 nt, Homo sapiens
uugaguaguaaggauauuaucu

SEQ ID NO: 6463 - RNA, 20 nt, Homo sapiens
uuuugcacuccuacuaaggu

SEQ ID NO: 6464 - RNA, 22 nt, Homo sapiens
agaguauacaugugagugagau

SEQ ID NO: 6465 - RNA, 22 nt, Homo sapiens
uaugugcacaugcccuggugac

SEQ ID NO: 6466 - RNA, 22 nt, Homo sapiens
ucccaagaugagaugggggcug

SEQ ID NO: 6467 - RNA, 22 nt, Homo sapiens
ucauacgucuccuugugccacc

SEQ ID NO: 6468 - RNA, 22 nt, Homo sapiens
cuugcagagucauucuaauuuc

SEQ ID NO: 6469 - RNA, 23 nt, Homo sapiens
ugccuagaccaucagccugaggu

SEQ ID NO: 6470 - RNA, 22 nt, Homo sapiens
ggagaugaaaugagcuacuuaa

SEQ ID NO: 6471 - RNA, 22 nt, Homo sapiens
ccgugcacggaaaggcauauuu

SEQ ID NO: 6472 - RNA, 22 nt, Homo sapiens
cuugcauagaguuauugcccuu

SEQ ID NO: 6473 - RNA, 22 nt, Homo sapiens
uacaaagcuacucgagggcagg

SEQ ID NO: 6474 - RNA, 22 nt, Homo sapiens
auagucaguagucucauaauga

SEQ ID NO: 6475 - RNA, 22 nt, Homo sapiens
ugcugguuuaaaaugcaaauuc

SEQ ID NO: 6476 - RNA, 22 nt, Homo sapiens
aggucccauguccucccugacc

SEQ ID NO: 6477 - RNA, 22 nt, Homo sapiens
uaauucugacaacaguggcguu

SEQ ID NO: 6478 - RNA, 22 nt, Homo sapiens
uugagauggaguuucacucuug

SEQ ID NO: 6479 - RNA, 19 nt, Homo sapiens
uugugggaggacagagggg

SEQ ID NO: 6480 - RNA, 22 nt, Homo sapiens
uaaugcacuuuccuccaaggcu

SEQ ID NO: 6481 - RNA, 22 nt, Homo sapiens
augucuuucauagagacccaga

SEQ ID NO: 6482 - RNA, 22 nt, Homo sapiens
ucuuuuggguauggagccauca

SEQ ID NO: 6483 - RNA, 22 nt, Homo sapiens
uugacauaaucauuucacagug

SEQ ID NO: 6484 - RNA, 22 nt, Homo sapiens
cugugcauaucuuggacugugu

SEQ ID NO: 6485 - RNA, 22 nt, Homo sapiens
cacaguguuacugguaugaagu

SEQ ID NO: 6486 - RNA, 22 nt, Homo sapiens
ucaccuggagacaugaagacug

SEQ ID NO: 6487 - RNA, 22 nt, Homo sapiens
uagccucacaaagugcuuaaga

SEQ ID NO: 6488 - RNA, 22 nt, Homo sapiens
cagguacuucugggcugagcag

SEQ ID NO: 6489 - RNA, 22 nt, Homo sapiens
ucaaacugcuugaggccauuua

SEQ ID NO: 6490 - RNA, 22 nt, Homo sapiens
uauuccauuugggucaggauga

SEQ ID NO: 6491 - RNA, 22 nt, Homo sapiens
uuaaugacaucauaggugaagu

SEQ ID NO: 6492 - RNA, 22 nt, Homo sapiens
auccuugagaaaauaaaugacc

SEQ ID NO: 6493 - RNA, 22 nt, Homo sapiens
cuucaugucuucaauggggggg

SEQ ID NO: 6494 - RNA, 22 nt, Homo sapiens
uggaaguuaaauuaguugauga

SEQ ID NO: 6495 - RNA, 22 nt, Homo sapiens
uagcugagacuacaguaggugc

SEQ ID NO: 6496 - RNA, 22 nt, Homo sapiens
uucacaguggugggagacguca

SEQ ID NO: 6497 - RNA, 22 nt, Homo sapiens
acaacaguuuuaucaccccaga

SEQ ID NO: 6498 - RNA, 17 nt, Homo sapiens
acaaauugccagcuagg

SEQ ID NO: 6499 - RNA, 22 nt, Homo sapiens
ucugucuuguccucacccuaga

SEQ ID NO: 6500 - RNA, 22 nt, Homo sapiens
uauugcuggcucugucuucauu

SEQ ID NO: 6501 - RNA, 22 nt, Homo sapiens
aacuggccuggcgugcagaggg

SEQ ID NO: 6502 - RNA, 22 nt, Homo sapiens
gucauugcuuaaggguucaugc

SEQ ID NO: 6503 - RNA, 22 nt, Homo sapiens
ugagauaggaucuugcucuguu

SEQ ID NO: 6504 - RNA, 22 nt, Homo sapiens
cauugcaaugaggucuugcagu

SEQ ID NO: 6505 - RNA, 22 nt, Homo sapiens
gcacaaugccugacgaguccug

SEQ ID NO: 6506 - RNA, 22 nt, Homo sapiens
uugugguuuucagcuuauauau

SEQ ID NO: 6507 - RNA, 18 nt, Homo sapiens
aaauucugucccuucuuc

SEQ ID NO: 6508 - RNA, 22 nt, Homo sapiens
ugacacagugggggauccuuuu

SEQ ID NO: 6509 - RNA, 22 nt, Homo sapiens
auaugguacuuaugcucaaacu

SEQ ID NO: 6510 - RNA, 22 nt, Homo sapiens
uaugaauuuuauccaggauaua

SEQ ID NO: 6511 - RNA, 22 nt, Homo sapiens
gcuaggagauccacugcucucu

SEQ ID NO: 6512 - RNA, 22 nt, Homo sapiens
ggcauugaguggguaggaguca

SEQ ID NO: 6513 - RNA, 22 nt, Homo sapiens
caaagugguuuauacaugauug

SEQ ID NO: 6514 - RNA, 22 nt, Homo sapiens
uuacaagaugucuguccaacac

SEQ ID NO: 6515 - RNA, 22 nt, Homo sapiens
auguccaugagcacauguauca

SEQ ID NO: 6516 - RNA, 22 nt, Homo sapiens
gacguagagaaaugugaaaugg

SEQ ID NO: 6517 - RNA, 22 nt, Homo sapiens
uucauagucuaauuuuuuccac

SEQ ID NO: 6518 - RNA, 22 nt, Homo sapiens
acaguggugcgaucucggcuca

SEQ ID NO: 6519 - RNA, 22 nt, Homo sapiens
guaguggcaugaucuuggcuca

SEQ ID NO: 6520 - RNA, 22 nt, Homo sapiens
auguuauguucuucucuguaua

SEQ ID NO: 6521 - RNA, 20 nt, Homo sapiens
gacauaggcugguaucuggc

SEQ ID NO: 6522 - RNA, 22 nt, Homo sapiens
aaucugggguuguuuggggagu

SEQ ID NO: 6523 - RNA, 19 nt, Homo sapiens
auugcacuccaaccugggu

SEQ ID NO: 6524 - RNA, 22 nt, Homo sapiens
uagcaguucauuguugugugaa

SEQ ID NO: 6525 - RNA, 22 nt, Homo sapiens
cuggacguugaggcugcaguga

SEQ ID NO: 6526 - RNA, 22 nt, Homo sapiens
ugagacugagucucccucuguc

SEQ ID NO: 6527 - RNA, 22 nt, Homo sapiens
uucaagucaauuuuugaaugac

SEQ ID NO: 6528 - RNA, 22 nt, Homo sapiens
cuguuaacauguuguggauaau

SEQ ID NO: 6529 - RNA, 22 nt, Homo sapiens
uuuccaguuguucuagaaagcu

SEQ ID NO: 6530 - RNA, 22 nt, Homo sapiens
agguaagucucuaauuaugaau

SEQ ID NO: 6531 - RNA, 22 nt, Homo sapiens
cauugcacugcuucuugggugu

SEQ ID NO: 6532 - RNA, 20 nt, Homo sapiens
guuaaggcagcauuacucuu

SEQ ID NO: 6533 - RNA, 22 nt, Homo sapiens
uucuaugguuaccaggcuaguc

SEQ ID NO: 6534 - RNA, 22 nt, Homo sapiens
agcgccauugcacuccagccuu

SEQ ID NO: 6535 - RNA, 22 nt, Homo sapiens
uugagauguauguauauaaugu

SEQ ID NO: 6536 - RNA, 22 nt, Homo sapiens
cuuugguuaucuagcuguauga

SEQ ID NO: 6537 - RNA, 22 nt, Homo sapiens
gugacacagcaagacuccgucu

SEQ ID NO: 6538 - RNA, 22 nt, Homo sapiens
cugaaaucagccaguuaguuuc

SEQ ID NO: 6539 - RNA, 22 nt, Homo sapiens
uauggacuuuaggauagcuuuu

SEQ ID NO: 6540 - RNA, 21 nt, Homo sapiens
cacuggguucaggcuugugga

SEQ ID NO: 6541 - RNA, 22 nt, Homo sapiens
gcaagaguauuucaaggaagau

SEQ ID NO: 6542 - RNA, 22 nt, Homo sapiens
auuucacugagacaugugccca

SEQ ID NO: 6543 - RNA, 22 nt, Homo sapiens
uuuuuggguaaugauuaucaau

SEQ ID NO: 6544 - RNA, 22 nt, Homo sapiens
auuggaacugaaauaauaacuu

SEQ ID NO: 6545 - RNA, 22 nt, Homo sapiens
uucacugugaauaaaggcuccc

SEQ ID NO: 6546 - RNA, 22 nt, Homo sapiens
ucugguuccugcauucauucaa

SEQ ID NO: 6547 - RNA, 22 nt, Homo sapiens
aagugcucuugugggaagagag

SEQ ID NO: 6548 - RNA, 22 nt, Homo sapiens
aauaucuguguauagauggggg

SEQ ID NO: 6549 - RNA, 22 nt, Homo sapiens
acuggcaauggcagaaauaguu

SEQ ID NO: 6550 - RNA, 22 nt, Homo sapiens
aucacaguuaagaggugaugaa

SEQ ID NO: 6551 - RNA, 22 nt, Homo sapiens
acuuaguauggggcuuuugaga

SEQ ID NO: 6552 - RNA, 18 nt, Homo sapiens
acagugucuuacaccugu

SEQ ID NO: 6553 - RNA, 22 nt, Homo sapiens
uaaugcauacagaagguguuuu

SEQ ID NO: 6554 - RNA, 22 nt, Homo sapiens
aguaacacaccugcauggugug

SEQ ID NO: 6555 - RNA, 22 nt, Homo sapiens
auuugggaaugugcauuauacu

SEQ ID NO: 6556 - RNA, 22 nt, Homo sapiens
gcaaaugcuaugccauuuuaua

SEQ ID NO: 6557 - RNA, 23 nt, Homo sapiens
ugagacauuggaaaguuaggcag

SEQ ID NO: 6558 - RNA, 22 nt, Homo sapiens
ucagguauuucuuuuagcugug

SEQ ID NO: 6559 - RNA, 22 nt, Homo sapiens
auugcauugugaucuucccaga

SEQ ID NO: 6560 - RNA, 22 nt, Homo sapiens
acuuuuugcaaccauuuggacc

SEQ ID NO: 6561 - RNA, 22 nt, Homo sapiens
agcagcuuugcauggccugugg

SEQ ID NO: 6562 - RNA, 22 nt, Homo sapiens
auguaguagauauuuauggaaa

SEQ ID NO: 6563 - RNA, 22 nt, Homo sapiens
cugaucuguuauacuuuucuau

SEQ ID NO: 6564 - RNA, 22 nt, Homo sapiens
aaguauguaucaagucauacuu

SEQ ID NO: 6565 - RNA, 22 nt, Homo sapiens
aaaugcacaaagauuuugcacu

SEQ ID NO: 6566 - RNA, 22 nt, Homo sapiens
augagguaguagaaagucaggu

SEQ ID NO: 6567 - RNA, 22 nt, Homo sapiens
gaauagugcugcaguaaacaua

SEQ ID NO: 6568 - RNA, 22 nt, Homo sapiens
uaacuacuucugcuucagagua

SEQ ID NO: 6569 - RNA, 22 nt, Homo sapiens
uucuaugguuuaauaguuuggg

SEQ ID NO: 6570 - RNA, 22 nt, Homo sapiens
uucacuguagcuuggauguuua

SEQ ID NO: 6571 - RNA, 22 nt, Homo sapiens
uggcauggggcagaacauuaca

SEQ ID NO: 6572 - RNA, 22 nt, Homo sapiens
uggccuguaacgcugucucagc

SEQ ID NO: 6573 - RNA, 22 nt, Homo sapiens
aaucacuaugccaugaaguaca

SEQ ID NO: 6574 - RNA, 22 nt, Homo sapiens
gcaaaucuuauguccucacauu

SEQ ID NO: 6575 - RNA, 19 nt, Homo sapiens
ucacacuguggcuucuuua

SEQ ID NO: 6576 - RNA, 22 nt, Homo sapiens
guggaaucuagagaggcaguag

SEQ ID NO: 6577 - RNA, 22 nt, Homo sapiens
augagcuguuuggaagacacuu

SEQ ID NO: 6578 - RNA, 17 nt, Homo sapiens
uuuuggauuagaaaucc

SEQ ID NO: 6579 - RNA, 22 nt, Homo sapiens
aaauggauuaaguucacuugcu

SEQ ID NO: 6580 - RNA, 22 nt, Homo sapiens
uaaguauuaggccccaggcugg

SEQ ID NO: 6581 - RNA, 22 nt, Homo sapiens
uuagggaggcucaggacaagag

SEQ ID NO: 6582 - RNA, 20 nt, Homo sapiens
uuacuauguaguauuggcuc

SEQ ID NO: 6583 - RNA, 22 nt, Homo sapiens
aguuagcaaaacucccaaaggu

SEQ ID NO: 6584 - RNA, 22 nt, Homo sapiens
gagcuuguagugugaaugguau

SEQ ID NO: 6585 - RNA, 22 nt, Homo sapiens
gaugagguaguguaccuagucu

SEQ ID NO: 6586 - RNA, 22 nt, Homo sapiens
cacaaaguagauuagucuucca

SEQ ID NO: 6587 - RNA, 20 nt, Homo sapiens
ucauagggugguggcagugg

SEQ ID NO: 6588 - RNA, 22 nt, Homo sapiens
ggcacuguggcucaagccugua

SEQ ID NO: 6589 - RNA, 22 nt, Homo sapiens
ugucaauauguaauaacugaau

SEQ ID NO: 6590 - RNA, 22 nt, Homo sapiens
uuugucacccugaauguaagau

SEQ ID NO: 6591 - RNA, 21 nt, Homo sapiens
auccuucuuuuucaaccugug

SEQ ID NO: 6592 - RNA, 22 nt, Homo sapiens
cucucugagccauggcugcccu

SEQ ID NO: 6593 - RNA, 22 nt, Homo sapiens
ggaagagugaauuaucuugacu

SEQ ID NO: 6594 - RNA, 22 nt, Homo sapiens
uaucucuuuucauguguaaaug

SEQ ID NO: 6595 - RNA, 20 nt, Homo sapiens
gaucaguuuggaguaagugc

SEQ ID NO: 6596 - RNA, 22 nt, Homo sapiens
augggugaguaugaguugacuu

SEQ ID NO: 6597 - RNA, 22 nt, Homo sapiens
uugaaguguguauacauugugg

SEQ ID NO: 6598 - RNA, 22 nt, Homo sapiens
uuagcccagugggugcuucucu

SEQ ID NO: 6599 - RNA, 22 nt, Homo sapiens
uugagcucaucuucagggguga

SEQ ID NO: 6600 - RNA, 22 nt, Homo sapiens
ucacaugcacaucucuggaacc

SEQ ID NO: 6601 - RNA, 22 nt, Homo sapiens
guuggaauguauugcuacuucu

SEQ ID NO: 6602 - RNA, 22 nt, Homo sapiens
uccuuuggcuaacuuucuaagu

SEQ ID NO: 6603 - RNA, 22 nt, Homo sapiens
augagguaauaaguccuuggaa

SEQ ID NO: 6604 - RNA, 22 nt, Homo sapiens
uuggccuuucucuaaauacuuu

SEQ ID NO: 6605 - RNA, 22 nt, Homo sapiens
uuaucauagugcaguuuucuga

SEQ ID NO: 6606 - RNA, 22 nt, Homo sapiens
caggcuuuuccacacauggguu

SEQ ID NO: 6607 - RNA, 22 nt, Homo sapiens
uuauucauuaacagggaccaaa

SEQ ID NO: 6608 - RNA, 22 nt, Homo sapiens
uggcaagagaacaacaucucuc

SEQ ID NO: 6609 - RNA, 22 nt, Homo sapiens
uccauguagaagacaggggaga

SEQ ID NO: 6610 - RNA, 22 nt, Homo sapiens
cuuguggugcuuuuacgugggc

SEQ ID NO: 6611 - RNA, 18 nt, Homo sapiens
ggaagauuggcuaugugc

SEQ ID NO: 6612 - RNA, 22 nt, Homo sapiens
uugccugagaagccaagaauaa

SEQ ID NO: 6613 - RNA, 22 nt, Homo sapiens
uguaagugugcaauucagugau

SEQ ID NO: 6614 - RNA, 22 nt, Homo sapiens
cacugcacuccagcuugugggc

SEQ ID NO: 6615 - RNA, 22 nt, Homo sapiens
aauauguccaguguuuugggag

SEQ ID NO: 6616 - RNA, 22 nt, Homo sapiens
ccacccuuccauucuuccucuu

SEQ ID NO: 6617 - RNA, 22 nt, Homo sapiens
ucccuugguaauucuguuccuu

SEQ ID NO: 6618 - RNA, 22 nt, Homo sapiens
ugagaacagcagcuugggacac

SEQ ID NO: 6619 - RNA, 22 nt, Homo sapiens
uuguccaagucccauuuguuga

SEQ ID NO: 6620 - RNA, 21 nt, Homo sapiens
gacuacaccaggaugcuaguu

SEQ ID NO: 6621 - RNA, 22 nt, Homo sapiens
ucauguguugcacugaggaccu

SEQ ID NO: 6622 - RNA, 22 nt, Homo sapiens
agauggguuuucacauguuggc

SEQ ID NO: 6623 - RNA, 22 nt, Homo sapiens
cuaaugcagucaggagaaggaa

SEQ ID NO: 6624 - RNA, 22 nt, Homo sapiens
uuugagaaugcuaccagagaag

SEQ ID NO: 6625 - RNA, 21 nt, Homo sapiens
uauaguaguaugauuuacaau

SEQ ID NO: 6626 - RNA, 22 nt, Homo sapiens
uguugcacuccagccugggcaa

SEQ ID NO: 6627 - RNA, 23 nt, Homo sapiens
uggcaagaauucuuaccgugugg

SEQ ID NO: 6628 - RNA, 22 nt, Homo sapiens
agcaagacauggcuuccaaaug

SEQ ID NO: 6629 - RNA, 22 nt, Homo sapiens
uugagugaaggcuguguucuug

SEQ ID NO: 6630 - RNA, 22 nt, Homo sapiens
ucagaguagcugucugaggugc

SEQ ID NO: 6631 - RNA, 22 nt, Homo sapiens
uagccuguggugaauguuucug

SEQ ID NO: 6632 - RNA, 22 nt, Homo sapiens
auggaguguucugaauccuuug

SEQ ID NO: 6633 - RNA, 22 nt, Homo sapiens
uguuugcuguguggaguagcag

SEQ ID NO: 6634 - RNA, 22 nt, Homo sapiens
ugacugaguaguauuccacuau

SEQ ID NO: 6635 - RNA, 22 nt, Homo sapiens
aggcaugugugcagacugucug

SEQ ID NO: 6636 - RNA, 22 nt, Homo sapiens
auagcacugguuuuucuugguu

SEQ ID NO: 6637 - RNA, 17 nt, Homo sapiens
ggcaggaauuaauguca

SEQ ID NO: 6638 - RNA, 18 nt, Homo sapiens
uggauaguuguuggcaga

SEQ ID NO: 6639 - RNA, 22 nt, Homo sapiens
gugagaacugcuggggccacag

SEQ ID NO: 6640 - RNA, 22 nt, Homo sapiens
ugacuauugauuuagacgugcu

SEQ ID NO: 6641 - RNA, 22 nt, Homo sapiens
cccaguuuugcuucucaugagg

SEQ ID NO: 6642 - RNA, 22 nt, Homo sapiens
ugcacaguccagugcccacuga

SEQ ID NO: 6643 - RNA, 22 nt, Homo sapiens
uggcuacagaaaguacuaguga

SEQ ID NO: 6644 - RNA, 22 nt, Homo sapiens
ccauugcacucuggccuaggug

SEQ ID NO: 6645 - RNA, 22 nt, Homo sapiens
uaaggcuagcaagaugagaaua

SEQ ID NO: 6646 - RNA, 22 nt, Homo sapiens
gugcacauauggugcauaagug

SEQ ID NO: 6647 - RNA, 22 nt, Homo sapiens
ugagguaaaacaaggauuggau

SEQ ID NO: 6648 - RNA, 21 nt, Homo sapiens
acuuucuguggcaguccauuc

SEQ ID NO: 6649 - RNA, 22 nt, Homo sapiens
ucucugguuuguggaaucuuag

SEQ ID NO: 6650 - RNA, 22 nt, Homo sapiens
guggaagugucuggggccaggg

SEQ ID NO: 6651 - RNA, 22 nt, Homo sapiens
cauugcacuccagcuugggcga

SEQ ID NO: 6652 - RNA, 22 nt, Homo sapiens
auggccauuacuaagaauguuu

SEQ ID NO: 6653 - RNA, 22 nt, Homo sapiens
augcuacuggacaauggugacu

SEQ ID NO: 6654 - RNA, 22 nt, Homo sapiens
ucacugcgaccuccaccucccg

SEQ ID NO: 6655 - RNA, 22 nt, Homo sapiens
gucauggugcuagcgggaaugu

SEQ ID NO: 6656 - RNA, 22 nt, Homo sapiens
ugaaaugcugucuaggggaaau

SEQ ID NO: 6657 - RNA, 22 nt, Homo sapiens
acuauacuguaacuguauucag

SEQ ID NO: 6658 - RNA, 22 nt, Homo sapiens
cuggauguaaaugaaacuacag

SEQ ID NO: 6659 - RNA, 22 nt, Homo sapiens
uuugugacacaaacacauauau

SEQ ID NO: 6660 - RNA, 22 nt, Homo sapiens
uaaguugcagguugugauucca

SEQ ID NO: 6661 - RNA, 22 nt, Homo sapiens
aauauagcuauguacaugucca

SEQ ID NO: 6662 - RNA, 22 nt, Homo sapiens
auucacuuuuauagacaggucu

SEQ ID NO: 6663 - RNA, 22 nt, Homo sapiens
gauuagaacagaagucagauua

SEQ ID NO: 6664 - RNA, 22 nt, Homo sapiens
ugcaggauguucaguaauuucc

SEQ ID NO: 6665 - RNA, 22 nt, Homo sapiens
ugugaugauuugauaaacguau

SEQ ID NO: 6666 - RNA, 22 nt, Homo sapiens
ccaguguucuggaaggcugagu

SEQ ID NO: 6667 - RNA, 22 nt, Homo sapiens
uugugaucuucagaaaguggcu

SEQ ID NO: 6668 - RNA, 22 nt, Homo sapiens
ugagcuagagaguuuaguguca

SEQ ID NO: 6669 - RNA, 22 nt, Homo sapiens
uacuguacugcaguucugcaaa

SEQ ID NO: 6670 - RNA, 17 nt, Homo sapiens
agccccauuagcuaguu

SEQ ID NO: 6671 - RNA, 22 nt, Homo sapiens
ugauggcauuucauguuuguaa

SEQ ID NO: 6672 - RNA, 22 nt, Homo sapiens
uaagugcuguguuguuaccuaa

SEQ ID NO: 6673 - RNA, 22 nt, Homo sapiens
ugaaaugaucaguuugguuacu

SEQ ID NO: 6674 - RNA, 22 nt, Homo sapiens
ucaguuaaugcugccugcugga

SEQ ID NO: 6675 - RNA, 22 nt, Homo sapiens
uggugccguccugcaauccugg

SEQ ID NO: 6676 - RNA, 22 nt, Homo sapiens
ugaaugguuuuuagagaacaau

SEQ ID NO: 6677 - RNA, 22 nt, Homo sapiens
caaagucuucucauuaugucuu

SEQ ID NO: 6678 - RNA, 22 nt, Homo sapiens
ggcucaguuuccuccgucugcu

SEQ ID NO: 6679 - RNA, 22 nt, Homo sapiens
ggaguaggcuguccggcaccca

SEQ ID NO: 6680 - RNA, 22 nt, Homo sapiens
cacagcgacuuccgccuaccgg

SEQ ID NO: 6681 - RNA, 22 nt, Homo sapiens
gauuagagaaauacugcugcua

SEQ ID NO: 6682 - RNA, 22 nt, Homo sapiens
cugagcacugagauccucuagc

SEQ ID NO: 6683 - RNA, 22 nt, Homo sapiens
auugcagaaaugacagagcgcc

SEQ ID NO: 6684 - RNA, 22 nt, Homo sapiens
acugcacuccagccuggacgac

SEQ ID NO: 6685 - RNA, 22 nt, Homo sapiens
cucccauugcaaacaacagaag

SEQ ID NO: 6686 - RNA, 20 nt, Homo sapiens
cuuuuugcugugcugggagc

SEQ ID NO: 6687 - RNA, 17 nt, Homo sapiens
ucucccaucccuuucuc

SEQ ID NO: 6688 - RNA, 22 nt, Homo sapiens
uuggaauacuuguuaaagucca

SEQ ID NO: 6689 - RNA, 22 nt, Homo sapiens
uauauguucuugcacuggaaag

SEQ ID NO: 6690 - RNA, 22 nt, Homo sapiens
ucagcguguggacggccaucuu

SEQ ID NO: 6691 - RNA, 22 nt, Homo sapiens
gucacaggaaacuaauaugcgc

SEQ ID NO: 6692 - RNA, 22 nt, Homo sapiens
cuacaguaugaaaccuuuacuc

SEQ ID NO: 6693 - RNA, 20 nt, Homo sapiens
cuucacagaaguggaaucau

SEQ ID NO: 6694 - RNA, 22 nt, Homo sapiens
gcaacccgucaucuagguuuua

SEQ ID NO: 6695 - RNA, 22 nt, Homo sapiens
aucucaguuaaugacccuaugc

SEQ ID NO: 6696 - RNA, 22 nt, Homo sapiens
aacagcuaguaccaauccacua

SEQ ID NO: 6697 - RNA, 22 nt, Homo sapiens
gcaugacaaugauugcucuuca

SEQ ID NO: 6698 - RNA, 22 nt, Homo sapiens
acccuguaacauacaagugguu

SEQ ID NO: 6699 - RNA, 22 nt, Homo sapiens
uuugugaaugucauaagcucca

SEQ ID NO: 6700 - RNA, 22 nt, Homo sapiens
ugaauagaaguggcaggaguag

SEQ ID NO: 6701 - RNA, 22 nt, Homo sapiens
uauuccagcccuggugagccag

SEQ ID NO: 6702 - RNA, 22 nt, Homo sapiens
uuacagucucaagagugcugca

SEQ ID NO: 6703 - RNA, 22 nt, Homo sapiens
guggaucacuugagguuagaag

SEQ ID NO: 6704 - RNA, 22 nt, Homo sapiens
aggagaauugguucuucuugau

SEQ ID NO: 6705 - RNA, 22 nt, Homo sapiens
auuggcaagauagcauaugagg

SEQ ID NO: 6706 - RNA, 22 nt, Homo sapiens
uuucuugguuguauuuagacuu

SEQ ID NO: 6707 - RNA, 22 nt, Homo sapiens
gucacagcacuuuuaguaagug

SEQ ID NO: 6708 - RNA, 20 nt, Homo sapiens
cugagguugggguccuuccc

SEQ ID NO: 6709 - RNA, 19 nt, Homo sapiens
auaagugaaucacgggggc

SEQ ID NO: 6710 - RNA, 22 nt, Homo sapiens
ucacacugaaacuaggguguga

SEQ ID NO: 6711 - RNA, 22 nt, Homo sapiens
cugauaguucucuuuagaguuu

SEQ ID NO: 6712 - RNA, 22 nt, Homo sapiens
ucuguguugaugcucauuaauu

SEQ ID NO: 6713 - RNA, 22 nt, Homo sapiens
guggaucacuugaggucaagag

SEQ ID NO: 6714 - RNA, 22 nt, Homo sapiens
augauguguguuuaagaugucu

SEQ ID NO: 6715 - RNA, 22 nt, Homo sapiens
agguguuguugaggagauuuca

SEQ ID NO: 6716 - RNA, 22 nt, Homo sapiens
gaugagaucauaaguguggagc

SEQ ID NO: 6717 - RNA, 22 nt, Homo sapiens
auccugaugacacagugcugca

SEQ ID NO: 6718 - RNA, 22 nt, Homo sapiens
aauugcauaaaauucaacucug

SEQ ID NO: 6719 - RNA, 22 nt, Homo sapiens
gagagugcuuuggguguaggcc

SEQ ID NO: 6720 - RNA, 22 nt, Homo sapiens
guggcagcacauauagguuguu

SEQ ID NO: 6721 - RNA, 21 nt, Homo sapiens
ucaugccacugcacuuuagcc

SEQ ID NO: 6722 - RNA, 22 nt, Homo sapiens
ucaccggcagacguggccugau

SEQ ID NO: 6723 - RNA, 22 nt, Homo sapiens
ucaaacugucagguugaccaga

SEQ ID NO: 6724 - RNA, 22 nt, Homo sapiens
uccagugugcaggcaaguuuga

SEQ ID NO: 6725 - RNA, 22 nt, Homo sapiens
uaucacaguugcauauuuaagg

SEQ ID NO: 6726 - RNA, 22 nt, Homo sapiens
ggucuagagagagggguggacu

SEQ ID NO: 6727 - RNA, 22 nt, Homo sapiens
guaagugguagagcugggcuau

SEQ ID NO: 6728 - RNA, 22 nt, Homo sapiens
uuugcuuaaaucuuaaucagau

SEQ ID NO: 6729 - RNA, 22 nt, Homo sapiens
uuuggcaacguuggaucccuca

SEQ ID NO: 6730 - RNA, 22 nt, Homo sapiens
acagucauagcagccuuuguua

SEQ ID NO: 6731 - RNA, 22 nt, Homo sapiens
uggagaacugaugucuccaaga

SEQ ID NO: 6732 - RNA, 22 nt, Homo sapiens
agagaacuguuuacacguuaau

SEQ ID NO: 6733 - RNA, 20 nt, Homo sapiens
agcaucguuguguuauagcc

SEQ ID NO: 6734 - RNA, 22 nt, Homo sapiens
cugacguguuuuccagaccuuu

SEQ ID NO: 6735 - RNA, 22 nt, Homo sapiens
uaaguaauuguuaauagggaag

SEQ ID NO: 6736 - RNA, 22 nt, Homo sapiens
uugugcuuuugagcugagauga

SEQ ID NO: 6737 - RNA, 22 nt, Homo sapiens
gcaggaaucuugagaaggauuc

SEQ ID NO: 6738 - RNA, 22 nt, Homo sapiens
uggauggugauuggaucaugga

SEQ ID NO: 6739 - RNA, 22 nt, Homo sapiens
auggaucuuucugcuuuugaau

SEQ ID NO: 6740 - RNA, 22 nt, Homo sapiens
acugcacuccagccuugauggc

SEQ ID NO: 6741 - RNA, 22 nt, Homo sapiens
cugaggugauauauacauauuu

SEQ ID NO: 6742 - RNA, 22 nt, Homo sapiens
cauggauuuuuuugaauggcag

SEQ ID NO: 6743 - RNA, 22 nt, Homo sapiens
cagauggucuuaaggcagccuu

SEQ ID NO: 6744 - RNA, 22 nt, Homo sapiens
aaucauauugucugccaagagg

SEQ ID NO: 6745 - RNA, 22 nt, Homo sapiens
ggaucuauuucaugauaaccuu

SEQ ID NO: 6746 - RNA, 18 nt, Homo sapiens
ugcaaacauguguguguu

SEQ ID NO: 6747 - RNA, 22 nt, Homo sapiens
ugugccacugcacuucagccug

SEQ ID NO: 6748 - RNA, 22 nt, Homo sapiens
ugcugaguguuaccggacaccg

SEQ ID NO: 6749 - RNA, 22 nt, Homo sapiens
cugaguauaacugaccuuauga

SEQ ID NO: 6750 - RNA, 22 nt, Homo sapiens
guuauugcucucgaagacucuc

SEQ ID NO: 6751 - RNA, 22 nt, Homo sapiens
ugaaaugguuaugugaggagau

SEQ ID NO: 6752 - RNA, 22 nt, Homo sapiens
ucgcgccauucuccugccucag

SEQ ID NO: 6753 - RNA, 22 nt, Homo sapiens
gaugaacugucuuacuacucac

SEQ ID NO: 6754 - RNA, 22 nt, Homo sapiens
uggaggacugcagaacugaggc

SEQ ID NO: 6755 - RNA, 22 nt, Homo sapiens
acggcaguguggugcggucagg

SEQ ID NO: 6756 - RNA, 22 nt, Homo sapiens
uacaugugcacaacgugcaggu

SEQ ID NO: 6757 - RNA, 22 nt, Homo sapiens
uugucaaacucauucuccaucc

SEQ ID NO: 6758 - RNA, 22 nt, Homo sapiens
aggcaagcaucuugcucccuuc

SEQ ID NO: 6759 - RNA, 22 nt, Homo sapiens
gauuuuccaguggcccugauca

SEQ ID NO: 6760 - RNA, 22 nt, Homo sapiens
cccagugugcugggugacagcu

SEQ ID NO: 6761 - RNA, 22 nt, Homo sapiens
uguuaaggcagagauaauacau

SEQ ID NO: 6762 - RNA, 22 nt, Homo sapiens
gcagugacaugugccaguuuau

SEQ ID NO: 6763 - RNA, 22 nt, Homo sapiens
augagauacuacaaaugaguuu

SEQ ID NO: 6764 - RNA, 22 nt, Homo sapiens
ggcccugagacaggaaaaagcu

SEQ ID NO: 6765 - RNA, 22 nt, Homo sapiens
uauuugauugacuuuagcagga

SEQ ID NO: 6766 - RNA, 22 nt, Homo sapiens
ucagugcuguaccaucuaagga

SEQ ID NO: 6767 - RNA, 22 nt, Homo sapiens
aacugcauuuucugauugugug

SEQ ID NO: 6768 - RNA, 22 nt, Homo sapiens
uauagcagugaguauugacuaa

SEQ ID NO: 6769 - RNA, 22 nt, Homo sapiens
uuggaaugcacacugagccugc

SEQ ID NO: 6770 - RNA, 22 nt, Homo sapiens
uuuggcauuagauaauugugua

SEQ ID NO: 6771 - RNA, 22 nt, Homo sapiens
cuacugauuaaaagaacagguc

SEQ ID NO: 6772 - RNA, 22 nt, Homo sapiens
uuaguggaugcugaauaaagaa

SEQ ID NO: 6773 - RNA, 22 nt, Homo sapiens
cugacugaggaucaguucauca

SEQ ID NO: 6774 - RNA, 22 nt, Homo sapiens
auucacugugcuuggccaaauu

SEQ ID NO: 6775 - RNA, 22 nt, Homo sapiens
uucccauuguuggccagcaugu

SEQ ID NO: 6776 - RNA, 22 nt, Homo sapiens
gcagcagugugggcugaaccua

SEQ ID NO: 6777 - RNA, 22 nt, Homo sapiens
auggcuauuccauaggcagagc

SEQ ID NO: 6778 - RNA, 22 nt, Homo sapiens
aacuggcauauucugguugcgg

SEQ ID NO: 6779 - RNA, 22 nt, Homo sapiens
augccuagagucaguggaggug

SEQ ID NO: 6780 - RNA, 22 nt, Homo sapiens
aggcaugaaauacaugcauuga

SEQ ID NO: 6781 - RNA, 22 nt, Homo sapiens
gugagguaagaguugcuuugcu

SEQ ID NO: 6782 - RNA, 22 nt, Homo sapiens
augugcuuaaaaaugcagagaa

SEQ ID NO: 6783 - RNA, 22 nt, Homo sapiens
ucagcgcauggucgugcggcau

SEQ ID NO: 6784 - RNA, 22 nt, Homo sapiens
cugagaucguggggcugcuguc

SEQ ID NO: 6785 - RNA, 22 nt, Homo sapiens
uaacccugaggggcuuggggac

SEQ ID NO: 6786 - RNA, 22 nt, Homo sapiens
gaauagugcugcaagaaacaua

SEQ ID NO: 6787 - RNA, 22 nt, Homo sapiens
ugagaacugguagcacuuguga

SEQ ID NO: 6788 - RNA, 22 nt, Homo sapiens
guuggcaaguggcugagcuggg

SEQ ID NO: 6789 - RNA, 22 nt, Homo sapiens
agugcaguggcucaaaaugccu

SEQ ID NO: 6790 - RNA, 18 nt, Homo sapiens
ugacauugagcugagaaa

SEQ ID NO: 6791 - RNA, 23 nt, Homo sapiens
uuguccccuccaaagcucauguu

SEQ ID NO: 6792 - RNA, 22 nt, Homo sapiens
uguuuuggagguccucacuaga

SEQ ID NO: 6793 - RNA, 22 nt, Homo sapiens
ggguaaaucucuuuucauggcu

SEQ ID NO: 6794 - RNA, 22 nt, Homo sapiens
aaggaaguaauuugguuuauag

SEQ ID NO: 6795 - RNA, 22 nt, Homo sapiens
agcaugauugggguugggcaca

SEQ ID NO: 6796 - RNA, 21 nt, Homo sapiens
uuaggcagugucagaggugag

SEQ ID NO: 6797 - RNA, 21 nt, Homo sapiens
gugucacagacaugacagaug

SEQ ID NO: 6798 - RNA, 22 nt, Homo sapiens
gauaaaucuuggcuagucuaag

SEQ ID NO: 6799 - RNA, 22 nt, Homo sapiens
gagugcaauggcgcgaucuggg

SEQ ID NO: 6800 - RNA, 22 nt, Homo sapiens
cucucuguuugucuguuauugg

SEQ ID NO: 6801 - RNA, 22 nt, Homo sapiens
ugaguaugaguucaggaaaggc

SEQ ID NO: 6802 - RNA, 22 nt, Homo sapiens
aaccacauggcucaguggacau

SEQ ID NO: 6803 - RNA, 22 nt, Homo sapiens
uuucaggcaagggugacccuga

SEQ ID NO: 6804 - RNA, 22 nt, Homo sapiens
uugcacuuccgccugggugaca

SEQ ID NO: 6805 - RNA, 22 nt, Homo sapiens
uugagauggaguuuugcucuug

SEQ ID NO: 6806 - RNA, 22 nt, Homo sapiens
gugaccauuugacauauccuug

SEQ ID NO: 6807 - RNA, 22 nt, Homo sapiens
agaaagcgcuucccuuugcugg

SEQ ID NO: 6808 - RNA, 22 nt, Homo sapiens
uuggccauggagcacuuuucua

SEQ ID NO: 6809 - RNA, 22 nt, Homo sapiens
ugaggucauucaugugggcgca

SEQ ID NO: 6810 - RNA, 22 nt, Homo sapiens
ucccuacugggguacugccuag

SEQ ID NO: 6811 - RNA, 20 nt, Homo sapiens
augaagugaaguuagggaac

SEQ ID NO: 6812 - RNA, 22 nt, Homo sapiens
auggacagaaaaaaauagaugu

SEQ ID NO: 6813 - RNA, 22 nt, Homo sapiens
acauacuucuuuacauuccaua

SEQ ID NO: 6814 - RNA, 22 nt, Homo sapiens
cuggaguaugaaccauguauca

SEQ ID NO: 6815 - RNA, 22 nt, Homo sapiens
augaugcugagguuugggguau

SEQ ID NO: 6816 - RNA, 22 nt, Homo sapiens
uuucauggagaaucuucuuacu

SEQ ID NO: 6817 - RNA, 21 nt, Homo sapiens
ugaucacaugaaaaccaugca

SEQ ID NO: 6818 - RNA, 22 nt, Homo sapiens
ucaugcaaugagucaggaggca

SEQ ID NO: 6819 - RNA, 22 nt, Homo sapiens
uacagaauugcagguguggcag

SEQ ID NO: 6820 - RNA, 22 nt, Homo sapiens
uagauuauccggcugggacaau

SEQ ID NO: 6821 - RNA, 22 nt, Homo sapiens
acaugcauauguuggaagaaag

SEQ ID NO: 6822 - RNA, 22 nt, Homo sapiens
ccagccgggugcaguggcucac

SEQ ID NO: 6823 - RNA, 22 nt, Homo sapiens
ggcaagcucaggccucaggugu

SEQ ID NO: 6824 - RNA, 20 nt, Homo sapiens
ugacaucagcaauguaauaa

SEQ ID NO: 6825 - RNA, 22 nt, Homo sapiens
gagauggagucuuuuucuguca

SEQ ID NO: 6826 - RNA, 22 nt, Homo sapiens
ugcaagacaucguauuuugguc

SEQ ID NO: 6827 - RNA, 19 nt, Homo sapiens
uuuugcucuuuauaccuau

SEQ ID NO: 6828 - RNA, 20 nt, Homo sapiens
cagugcaccuggcguguuga

SEQ ID NO: 6829 - RNA, 22 nt, Homo sapiens
uugaugauguuucugccuugcc

SEQ ID NO: 6830 - RNA, 19 nt, Homo sapiens
uagcacuacagaguuuagc

SEQ ID NO: 6831 - RNA, 22 nt, Homo sapiens
uagucacacacucaacuuuuca

SEQ ID NO: 6832 - RNA, 22 nt, Homo sapiens
auuguacuccagccuuggggac

SEQ ID NO: 6833 - RNA, 22 nt, Homo sapiens
auuggcaauccauauauuuucu

SEQ ID NO: 6834 - RNA, 22 nt, Homo sapiens
uugagguauaaagguagguugu

SEQ ID NO: 6835 - RNA, 22 nt, Homo sapiens
uugaggucuucaggaucaggcu

SEQ ID NO: 6836 - RNA, 22 nt, Homo sapiens
uugguauguguuucauacucaa

SEQ ID NO: 6837 - RNA, 22 nt, Homo sapiens
ucugagcaugcaucuugccugg

SEQ ID NO: 6838 - RNA, 22 nt, Homo sapiens
uggcaagaacugcaauugcuuu

SEQ ID NO: 6839 - RNA, 22 nt, Homo sapiens
gugcacaaaucuuaaauguaca

SEQ ID NO: 6840 - RNA, 22 nt, Homo sapiens
caaucugucuuuuagggggcca

SEQ ID NO: 6841 - RNA, 22 nt, Homo sapiens
uggaaguuaaaugacucuuucu

SEQ ID NO: 6842 - RNA, 18 nt, Homo sapiens
uguaaacuaccucaaccu

SEQ ID NO: 6843 - RNA, 22 nt, Homo sapiens
ugauauguaugugaccuagaaa

SEQ ID NO: 6844 - RNA, 22 nt, Homo sapiens
uucaugugagucuguauuaacu

SEQ ID NO: 6845 - RNA, 17 nt, Homo sapiens
uauggcuauguuuagau

SEQ ID NO: 6846 - RNA, 22 nt, Homo sapiens
uucuuugguacaagggccgacc

SEQ ID NO: 6847 - RNA, 22 nt, Homo sapiens
ccauugcacuccauccugggca

SEQ ID NO: 6848 - RNA, 22 nt, Homo sapiens
cauuuuacuuuccagacgugga

SEQ ID NO: 6849 - RNA, 19 nt, Homo sapiens
uuaagguacuuagaugugu

SEQ ID NO: 6850 - RNA, 22 nt, Homo sapiens
gcaucacagggagacaggccuc

SEQ ID NO: 6851 - RNA, 22 nt, Homo sapiens
agugcauugcaucucugcuuca

SEQ ID NO: 6852 - RNA, 22 nt, Homo sapiens
gccauugcacuccagccucggg

SEQ ID NO: 6853 - RNA, 22 nt, Homo sapiens
agacaucauuugauggugggag

SEQ ID NO: 6854 - RNA, 22 nt, Homo sapiens
gcacgugcacccacaugcacgu

SEQ ID NO: 6855 - RNA, 22 nt, Homo sapiens
augagaacugucaaugagagcu

SEQ ID NO: 6856 - RNA, 22 nt, Homo sapiens
aaagugguuuuucagacuuuga

SEQ ID NO: 6857 - RNA, 22 nt, Homo sapiens
gugguuuuacaaagagaaagau

SEQ ID NO: 6858 - RNA, 22 nt, Homo sapiens
uggcagcugcuucaugggaugc

SEQ ID NO: 6859 - RNA, 22 nt, Homo sapiens
gugucaugggcauguccuuaac

SEQ ID NO: 6860 - RNA, 22 nt, Homo sapiens
ugagauaauuuacuuguugagg

SEQ ID NO: 6861 - RNA, 22 nt, Homo sapiens
uucuacuccucauggcagguug

SEQ ID NO: 6862 - RNA, 22 nt, Homo sapiens
acacuuucuggagcugcacaua

SEQ ID NO: 6863 - RNA, 22 nt, Homo sapiens
cuaacacagagguuuauuucuc

SEQ ID NO: 6864 - RNA, 22 nt, Homo sapiens
aucucauuccuucugggcugau

SEQ ID NO: 6865 - RNA, 22 nt, Homo sapiens
aaucacaguuaguaagggagaa

SEQ ID NO: 6866 - RNA, 22 nt, Homo sapiens
uggcaguuuugauguggagaga

SEQ ID NO: 6867 - RNA, 22 nt, Homo sapiens
agccgauguugacaccagggga

SEQ ID NO: 6868 - RNA, 21 nt, Homo sapiens
uacaaugcacaggagagccuc

SEQ ID NO: 6869 - RNA, 22 nt, Homo sapiens
auggcuuuuccugucuugcaug

SEQ ID NO: 6870 - RNA, 23 nt, Homo sapiens
uuuaagcuucauguccuaacauc

SEQ ID NO: 6871 - RNA, 22 nt, Homo sapiens
auguaguagcagaaaauauuuu

SEQ ID NO: 6872 - RNA, 22 nt, Homo sapiens
auacaugugccauguugguaug

SEQ ID NO: 6873 - RNA, 22 nt, Homo sapiens
uucaucaguugagcugguugcu

SEQ ID NO: 6874 - RNA, 22 nt, Homo sapiens
uaagguuacaaaggacuucaua

SEQ ID NO: 6875 - RNA, 22 nt, Homo sapiens
aguaucacaggcaaaacagaau

SEQ ID NO: 6876 - RNA, 21 nt, Homo sapiens
ugagaacaacaggucaagcag

SEQ ID NO: 6877 - RNA, 22 nt, Homo sapiens
gugaaucuguuuucuucuguuc

SEQ ID NO: 6878 - RNA, 22 nt, Homo sapiens
uauugcuacuuugccuuccaaa

SEQ ID NO: 6879 - RNA, 22 nt, Homo sapiens
guuauguuaaauuguuguaugc

SEQ ID NO: 6880 - RNA, 22 nt, Homo sapiens
ucugggguuuccacuuuuacuu

SEQ ID NO: 6881 - RNA, 22 nt, Homo sapiens
ugacagcugaggcccagaguac

SEQ ID NO: 6882 - RNA, 22 nt, Homo sapiens
auguccuggacccagacaaagc

SEQ ID NO: 6883 - RNA, 22 nt, Homo sapiens
cuagcuuuuuaugacaaucuug

SEQ ID NO: 6884 - RNA, 22 nt, Homo sapiens
uuagcacaucuuucuauguaag

SEQ ID NO: 6885 - RNA, 19 nt, Homo sapiens
uaugcuauuuauuagaagu

SEQ ID NO: 6886 - RNA, 22 nt, Homo sapiens
uuggaaaccucugcagguguuu

SEQ ID NO: 6887 - RNA, 20 nt, Homo sapiens
uauucacucuccagucuugc

SEQ ID NO: 6888 - RNA, 22 nt, Homo sapiens
uugcacuucauguaggccaaag

SEQ ID NO: 6889 - RNA, 22 nt, Homo sapiens
uggguagagcacugggggcgag

SEQ ID NO: 6890 - RNA, 22 nt, Homo sapiens
uugacacuuuguaagaaagggg

SEQ ID NO: 6891 - RNA, 22 nt, Homo sapiens
uaaaguuauugccccucaguua

SEQ ID NO: 6892 - RNA, 22 nt, Homo sapiens
ugugcacaauguacagguuagu

SEQ ID NO: 6893 - RNA, 22 nt, Homo sapiens
cuaagugaacugucacugagaa

SEQ ID NO: 6894 - RNA, 22 nt, Homo sapiens
uccaugaguccauuagaaaaaa

SEQ ID NO: 6895 - RNA, 22 nt, Homo sapiens
uguaagcauugggcaugcaguc

SEQ ID NO: 6896 - RNA, 20 nt, Homo sapiens
uugacaguggguuguuaaag

SEQ ID NO: 6897 - RNA, 22 nt, Homo sapiens
cugcaguaaacuuucccauuca

SEQ ID NO: 6898 - RNA, 22 nt, Homo sapiens
cauacaugugcuugucuuaugc

SEQ ID NO: 6899 - RNA, 22 nt, Homo sapiens
auggcucuuauuauuugaggua

SEQ ID NO: 6900 - RNA, 22 nt, Homo sapiens
uggagauccuucauuuuggugu

SEQ ID NO: 6901 - RNA, 22 nt, Homo sapiens
uucaguagucuccauagaaccg

SEQ ID NO: 6902 - RNA, 22 nt, Homo sapiens
ugaagugaagcaguaguguggg

SEQ ID NO: 6903 - RNA, 22 nt, Homo sapiens
augccacugcgcucuagccugg

SEQ ID NO: 6904 - RNA, 22 nt, Homo sapiens
cugaaaguuauucaggggcaag

SEQ ID NO: 6905 - RNA, 22 nt, Homo sapiens
ucucaugaagguggagaguagg

SEQ ID NO: 6906 - RNA, 22 nt, Homo sapiens
aggugcaauggugguuuugugg

SEQ ID NO: 6907 - RNA, 21 nt, Homo sapiens
ugaugcuuuucuuaaccuugc

SEQ ID NO: 6908 - RNA, 22 nt, Homo sapiens
ugggaugugagucuucgcuuuc

SEQ ID NO: 6909 - RNA, 19 nt, Homo sapiens
cuauugcacauagcugaag

SEQ ID NO: 6910 - RNA, 22 nt, Homo sapiens
uuccugcacuugcuugccuaug

SEQ ID NO: 6911 - RNA, 22 nt, Homo sapiens
ucgcauuucccucuguagcuuc

SEQ ID NO: 6912 - RNA, 22 nt, Homo sapiens
cucagaguacuuuucccacuuc

SEQ ID NO: 6913 - RNA, 22 nt, Homo sapiens
uuaugcuugugugaauuuuccc

SEQ ID NO: 6914 - RNA, 22 nt, Homo sapiens
gagauguuuuguuaucaaagga

SEQ ID NO: 6915 - RNA, 22 nt, Homo sapiens
acagugucugacacguaggaag

SEQ ID NO: 6916 - RNA, 23 nt, Homo sapiens
guaguuugaugcaauccacuugu

SEQ ID NO: 6917 - RNA, 22 nt, Homo sapiens
caucagcaauguaugaggguuc

SEQ ID NO: 6918 - RNA, 22 nt, Homo sapiens
uuuuuugguaauugaacaauga

SEQ ID NO: 6919 - RNA, 22 nt, Homo sapiens
uggaaguauagauaauugaaag

SEQ ID NO: 6920 - RNA, 22 nt, Homo sapiens
aaaagucuguagugaaagguga

SEQ ID NO: 6921 - RNA, 22 nt, Homo sapiens
auaauacuuuuauuuugaggaa

SEQ ID NO: 6922 - RNA, 22 nt, Homo sapiens
uaucauuguguuauuucuucca

SEQ ID NO: 6923 - RNA, 22 nt, Homo sapiens
gugguaaaauggcauagagcua

SEQ ID NO: 6924 - RNA, 22 nt, Homo sapiens
auguauggcagguuugggguuu

SEQ ID NO: 6925 - RNA, 20 nt, Homo sapiens
guggaagauaaguagccuga

SEQ ID NO: 6926 - RNA, 22 nt, Homo sapiens
uuucacagcaauugccuauugu

SEQ ID NO: 6927 - RNA, 22 nt, Homo sapiens
cuggauagagauugaugaugcu

SEQ ID NO: 6928 - RNA, 22 nt, Homo sapiens
uugcucaggcuggaguacaaug

SEQ ID NO: 6929 - RNA, 22 nt, Homo sapiens
aguaccauuccguuggagcugg

SEQ ID NO: 6930 - RNA, 22 nt, Homo sapiens
guucaucaggcuuucucuagag

SEQ ID NO: 6931 - RNA, 22 nt, Homo sapiens
cuguugcaguuauggcugcagg

SEQ ID NO: 6932 - RNA, 22 nt, Homo sapiens
guugaaauccuaacccccuagu

SEQ ID NO: 6933 - RNA, 22 nt, Homo sapiens
uauggcuacuacgaauaaugcu

SEQ ID NO: 6934 - RNA, 22 nt, Homo sapiens
guggaagcacaggccuccugga

SEQ ID NO: 6935 - RNA, 22 nt, Homo sapiens
ucccgaggacaucugggggcaa

SEQ ID NO: 6936 - RNA, 22 nt, Homo sapiens
accugagacuaggcauuuuaua

SEQ ID NO: 6937 - RNA, 22 nt, Homo sapiens
ugauuagaggaaugguagauua

SEQ ID NO: 6938 - RNA, 22 nt, Homo sapiens
uugacuuagacauucaguugga

SEQ ID NO: 6939 - RNA, 22 nt, Homo sapiens
auuguacuccagccuaggcaac

SEQ ID NO: 6940 - RNA, 22 nt, Homo sapiens
uugagugaaugaaugauuaaau

SEQ ID NO: 6941 - RNA, 22 nt, Homo sapiens
uauuguuaaagauguuaaugau

SEQ ID NO: 6942 - RNA, 20 nt, Homo sapiens
ucaggcuccgcauuaacuua

SEQ ID NO: 6943 - RNA, 22 nt, Homo sapiens
aguaagucucaagguaggguag

SEQ ID NO: 6944 - RNA, 22 nt, Homo sapiens
ggaguguguaggagaaagguaa

SEQ ID NO: 6945 - RNA, 22 nt, Homo sapiens
cuauggauuuacuguauagggu

SEQ ID NO: 6946 - RNA, 22 nt, Homo sapiens
uucccagagaaaaggguuucuu

SEQ ID NO: 6947 - RNA, 22 nt, Homo sapiens
uaugauuuuugggagaggucaa

SEQ ID NO: 6948 - RNA, 22 nt, Homo sapiens
guauaggcuuucaccacgccau

SEQ ID NO: 6949 - RNA, 22 nt, Homo sapiens
gugguuuuuuucugccuuauag

SEQ ID NO: 6950 - RNA, 22 nt, Homo sapiens
uuucccuuugcuuugucagcca

SEQ ID NO: 6951 - RNA, 22 nt, Homo sapiens
guucacaguucagccuguaaca

SEQ ID NO: 6952 - RNA, 22 nt, Homo sapiens
ugaaauaguuaaguugccuagu

SEQ ID NO: 6953 - RNA, 22 nt, Homo sapiens
ugaguuaaucucuacgauagaa

SEQ ID NO: 6954 - RNA, 22 nt, Homo sapiens
uucgucccuuuuggaauccucu

SEQ ID NO: 6955 - RNA, 22 nt, Homo sapiens
caaugguccccauuggcaggaa

SEQ ID NO: 6956 - RNA, 22 nt, Homo sapiens
uuugugcaaacuaggauugcga

SEQ ID NO: 6957 - RNA, 22 nt, Homo sapiens
gcagugcuggagcccccgugug

SEQ ID NO: 6958 - RNA, 22 nt, Homo sapiens
uugagauacauaauuaugaaug

SEQ ID NO: 6959 - RNA, 22 nt, Homo sapiens
uucaagugguucagaagucuga

SEQ ID NO: 6960 - RNA, 22 nt, Homo sapiens
gagcugaaguuuccauuuguac

SEQ ID NO: 6961 - RNA, 21 nt, Homo sapiens
auggacaugguuaggcuuugu

SEQ ID NO: 6962 - RNA, 22 nt, Homo sapiens
aguauuaggugaguguauuuca

SEQ ID NO: 6963 - RNA, 22 nt, Homo sapiens
uuucaucaagcacagaguagau

SEQ ID NO: 6964 - RNA, 22 nt, Homo sapiens
uggcaagaccccaucucuacaa

SEQ ID NO: 6965 - RNA, 22 nt, Homo sapiens
aucaagcugcuuguuugaaucu

SEQ ID NO: 6966 - RNA, 22 nt, Homo sapiens
gaguucaaaucucagcucuguu

SEQ ID NO: 6967 - RNA, 22 nt, Homo sapiens
cacuggcacuguguuuagaugg

SEQ ID NO: 6968 - RNA, 22 nt, Homo sapiens
agcaguagugaaaguagacuua

SEQ ID NO: 6969 - RNA, 22 nt, Homo sapiens
augcagauauuuuugugguugc

SEQ ID NO: 6970 - RNA, 22 nt, Homo sapiens
agcagcaccaaacagacuaaga

SEQ ID NO: 6971 - RNA, 22 nt, Homo sapiens
uguaaugaucaaaucagaguaa

SEQ ID NO: 6972 - RNA, 22 nt, Homo sapiens
guugagcaagcuuuggagccua

SEQ ID NO: 6973 - RNA, 23 nt, Homo sapiens
uuucaguaguuguauccuguugc

SEQ ID NO: 6974 - RNA, 22 nt, Homo sapiens
ucuuuaguaauuucuguaaggc

SEQ ID NO: 6975 - RNA, 22 nt, Homo sapiens
augcacaucagcuccagggacc

SEQ ID NO: 6976 - RNA, 22 nt, Homo sapiens
ugauuuccaugagaacaugccu

SEQ ID NO: 6977 - RNA, 21 nt, Homo sapiens
uagagagcaauaccuccagag

SEQ ID NO: 6978 - RNA, 22 nt, Homo sapiens
aaggaguagaauagaugcaccu

SEQ ID NO: 6979 - RNA, 22 nt, Homo sapiens
ugugcaaauguuaaacuaacuu

SEQ ID NO: 6980 - RNA, 22 nt, Homo sapiens
ugucuggaguccauagaagugu

SEQ ID NO: 6981 - RNA, 22 nt, Homo sapiens
cucacaaccuuaugaagcauga

SEQ ID NO: 6982 - RNA, 22 nt, Homo sapiens
acuggcauagggcgggcacagu

SEQ ID NO: 6983 - RNA, 22 nt, Homo sapiens
guaagucucaugagaucugaug

SEQ ID NO: 6984 - RNA, 22 nt, Homo sapiens
ucugagcaauaaacaacauauu

SEQ ID NO: 6985 - RNA, 22 nt, Homo sapiens
aauaauggcaccaaagcacaag

SEQ ID NO: 6986 - RNA, 22 nt, Homo sapiens
acauguauauaaugcauagcga

SEQ ID NO: 6987 - RNA, 22 nt, Homo sapiens
aucuagagaggcagucuggccg

SEQ ID NO: 6988 - RNA, 22 nt, Homo sapiens
guccaugagaugaauccacaca

SEQ ID NO: 6989 - RNA, 22 nt, Homo sapiens
ugagagucauacaaauaaaaau

SEQ ID NO: 6990 - RNA, 20 nt, Homo sapiens
ucugauugcaacugcaugag

SEQ ID NO: 6991 - RNA, 22 nt, Homo sapiens
cucugauggagauauacaagga

SEQ ID NO: 6992 - RNA, 22 nt, Homo sapiens
aaggagugugauucuucaguuu

SEQ ID NO: 6993 - RNA, 22 nt, Homo sapiens
ugaauguccauugauguuuuga

SEQ ID NO: 6994 - RNA, 22 nt, Homo sapiens
cacaccuacuagggccgugggc

SEQ ID NO: 6995 - RNA, 22 nt, Homo sapiens
cuuuuacacugguggugggaau

SEQ ID NO: 6996 - RNA, 22 nt, Homo sapiens
cuuguacacuguuggugggaau

SEQ ID NO: 6997 - RNA, 22 nt, Homo sapiens
aguaaagccagaccuguuaauu

SEQ ID NO: 6998 - RNA, 22 nt, Homo sapiens
uacuuuguagauuguuuccuuu

SEQ ID NO: 6999 - RNA, 17 nt, Homo sapiens
ugugauugaagucaucc

SEQ ID NO: 7000 - RNA, 22 nt, Homo sapiens
guaacacucuaaagggaugcac

SEQ ID NO: 7001 - RNA, 18 nt, Homo sapiens
acuggauguaaagggucc

SEQ ID NO: 7002 - RNA, 18 nt, Homo sapiens
aaugggacuacaaagcca

SEQ ID NO: 7003 - RNA, 22 nt, Homo sapiens
aucagauaccuguugggaaaug

SEQ ID NO: 7004 - RNA, 22 nt, Homo sapiens
uuuggcucugugucccacccaa

SEQ ID NO: 7005 - RNA, 22 nt, Homo sapiens
uagcccauuuguuuagggaaag

SEQ ID NO: 7006 - RNA, 22 nt, Homo sapiens
uuagucaaguguacugugaaug

SEQ ID NO: 7007 - RNA, 22 nt, Homo sapiens
acaagcacaaaugcauagaugg

SEQ ID NO: 7008 - RNA, 22 nt, Homo sapiens
gagauuuucagcuugacuggga

SEQ ID NO: 7009 - RNA, 22 nt, Homo sapiens
gagcuagguuuugaauccagac

SEQ ID NO: 7010 - RNA, 22 nt, Homo sapiens
uucaagcuacaguggcaggguu

SEQ ID NO: 7011 - RNA, 22 nt, Homo sapiens
ucacuguguauguauaugcagg

SEQ ID NO: 7012 - RNA, 19 nt, Homo sapiens
gcugauguuacauucuugc

SEQ ID NO: 7013 - RNA, 22 nt, Homo sapiens
auuuaacuggucuaggggccca

SEQ ID NO: 7014 - RNA, 22 nt, Homo sapiens
agcuacuguuagucuaguuagg

SEQ ID NO: 7015 - RNA, 22 nt, Homo sapiens
ugguaagaucugugagccaggc

SEQ ID NO: 7016 - RNA, 22 nt, Homo sapiens
uagauuguuuaaguggcacaca

SEQ ID NO: 7017 - RNA, 22 nt, Homo sapiens
ugagaugugaucaccugaaggg

SEQ ID NO: 7018 - RNA, 22 nt, Homo sapiens
ucugguggugaugagagacagu

SEQ ID NO: 7019 - RNA, 22 nt, Homo sapiens
gcugagaucucuugccugaacu

SEQ ID NO: 7020 - RNA, 23 nt, Homo sapiens
ugagccaugggacuccaagggag

SEQ ID NO: 7021 - RNA, 22 nt, Homo sapiens
gaggcggugugaugucacaugc

SEQ ID NO: 7022 - RNA, 22 nt, Homo sapiens
aauggccuuuuucauuauacug

SEQ ID NO: 7023 - RNA, 22 nt, Homo sapiens
ugcuguuguuugaugaaguaau

SEQ ID NO: 7024 - RNA, 22 nt, Homo sapiens
ugagcacagcgugugggagagc

SEQ ID NO: 7025 - RNA, 22 nt, Homo sapiens
aucagauuccagaggcagcacc

SEQ ID NO: 7026 - RNA, 22 nt, Homo sapiens
auggagcuugacaguuguagag

SEQ ID NO: 7027 - RNA, 18 nt, Homo sapiens
uaauaacugugaccuuga

SEQ ID NO: 7028 - RNA, 22 nt, Homo sapiens
uuaaggcagugucuaugccagu

SEQ ID NO: 7029 - RNA, 22 nt, Homo sapiens
cucauugcaaucuccaccuccc

SEQ ID NO: 7030 - RNA, 22 nt, Homo sapiens
augaggugaggucaguaaggua

SEQ ID NO: 7031 - RNA, 22 nt, Homo sapiens
agcugcacaaauggaugugagg

SEQ ID NO: 7032 - RNA, 19 nt, Homo sapiens
augaacucaucauuucuca

SEQ ID NO: 7033 - RNA, 22 nt, Homo sapiens
auugcaacuuccgccuccuggg

SEQ ID NO: 7034 - RNA, 22 nt, Homo sapiens
auaucacagguguuuaccugau

SEQ ID NO: 7035 - RNA, 22 nt, Homo sapiens
caucgcacuccagccugggcaa

SEQ ID NO: 7036 - RNA, 22 nt, Homo sapiens
cauuacacuccagccuggguga

SEQ ID NO: 7037 - RNA, 22 nt, Homo sapiens
auggcuugugacccaugcuuca

SEQ ID NO: 7038 - RNA, 22 nt, Homo sapiens
gucguggagucucuggcuugua

SEQ ID NO: 7039 - RNA, 22 nt, Homo sapiens
auuccacuuauaugagguaucu

SEQ ID NO: 7040 - RNA, 22 nt, Homo sapiens
auggucuuuauuguguugagug

SEQ ID NO: 7041 - RNA, 22 nt, Homo sapiens
uugugcauguauauuaguucac

SEQ ID NO: 7042 - RNA, 22 nt, Homo sapiens
uucauuggauguuacacugugu

SEQ ID NO: 7043 - RNA, 20 nt, Homo sapiens
uaugacaaagccuagugagu

SEQ ID NO: 7044 - RNA, 22 nt, Homo sapiens
auacaguguauguauaguacau

SEQ ID NO: 7045 - RNA, 22 nt, Homo sapiens
cacuaggcuggagugcaguggc

SEQ ID NO: 7046 - RNA, 22 nt, Homo sapiens
guuggugaccugaagagaguaa

SEQ ID NO: 7047 - RNA, 20 nt, Homo sapiens
uaagacaugguccacaugcc

SEQ ID NO: 7048 - RNA, 20 nt, Homo sapiens
aggagcauuuacauuggcuc

SEQ ID NO: 7049 - RNA, 22 nt, Homo sapiens
uuggucugcucugauguuuucu

SEQ ID NO: 7050 - RNA, 22 nt, Homo sapiens
agugcaauggugccaucauagc

SEQ ID NO: 7051 - RNA, 22 nt, Homo sapiens
aucaugcacaugcauagguaug

SEQ ID NO: 7052 - RNA, 22 nt, Homo sapiens
aggagguaggaauugugcuagg

SEQ ID NO: 7053 - RNA, 22 nt, Homo sapiens
accaguuuuuuauacaucuucu

SEQ ID NO: 7054 - RNA, 22 nt, Homo sapiens
gugagguagagcaugugaaaga

SEQ ID NO: 7055 - RNA, 22 nt, Homo sapiens
gccccaguacaggcuccuuaga

SEQ ID NO: 7056 - RNA, 22 nt, Homo sapiens
uuaaagccauaccugagagagu

SEQ ID NO: 7057 - RNA, 22 nt, Homo sapiens
gucauugaaguggaaucaucca

SEQ ID NO: 7058 - RNA, 22 nt, Homo sapiens
gguggcaaaucugaguggcgcu

SEQ ID NO: 7059 - RNA, 22 nt, Homo sapiens
uccaguuguuauuuuuauaaag

SEQ ID NO: 7060 - RNA, 22 nt, Homo sapiens
uaaugugcuucucuaccauagg

SEQ ID NO: 7061 - RNA, 22 nt, Homo sapiens
augugcuuuuggugagagauuu

SEQ ID NO: 7062 - RNA, 18 nt, Homo sapiens
auggguguuggaaaauga

SEQ ID NO: 7063 - RNA, 22 nt, Homo sapiens
gcuuguguuuacuguaguuacu

SEQ ID NO: 7064 - RNA, 22 nt, Homo sapiens
uaacagcucuacagcugcucuu

SEQ ID NO: 7065 - RNA, 22 nt, Homo sapiens
uaucugcacauacacuuauagc

SEQ ID NO: 7066 - RNA, 19 nt, Homo sapiens
gugugcauaucacagagca

SEQ ID NO: 7067 - RNA, 22 nt, Homo sapiens
ggcagaguggacauuuaaaugu

SEQ ID NO: 7068 - RNA, 22 nt, Homo sapiens
cucagcuacuugggaagcugag

SEQ ID NO: 7069 - RNA, 22 nt, Homo sapiens
agacuagagggaaaugaguugg

SEQ ID NO: 7070 - RNA, 22 nt, Homo sapiens
cuggugauugguuucauucagu

SEQ ID NO: 7071 - RNA, 22 nt, Homo sapiens
auggaagucucuguuaaguuuc

SEQ ID NO: 7072 - RNA, 22 nt, Homo sapiens
ggcaccauggaaggacgggagc

SEQ ID NO: 7073 - RNA, 22 nt, Homo sapiens
ucccugaaaauuagcauuuuaa

SEQ ID NO: 7074 - RNA, 22 nt, Homo sapiens
uucugcacaucgaucacaagau

SEQ ID NO: 7075 - RNA, 21 nt, Homo sapiens
auagugcuagagaguagcagg

SEQ ID NO: 7076 - RNA, 22 nt, Homo sapiens
ucaguaguuuuuuuacuaggug

SEQ ID NO: 7077 - RNA, 19 nt, Homo sapiens
uucaaugcagcauugccac

SEQ ID NO: 7078 - RNA, 22 nt, Homo sapiens
aggauuagagacuucucuaccu

SEQ ID NO: 7079 - RNA, 23 nt, Homo sapiens
uccuugguuggcgcccuaugugu

SEQ ID NO: 7080 - RNA, 22 nt, Homo sapiens
caggugguauuugguuuucugu

SEQ ID NO: 7081 - RNA, 22 nt, Homo sapiens
uuuggcaauaaacuccccuaac

SEQ ID NO: 7082 - RNA, 22 nt, Homo sapiens
ggaagacuggcuuguuuaccca

SEQ ID NO: 7083 - RNA, 22 nt, Homo sapiens
uguggucaucacuugaagguaa

SEQ ID NO: 7084 - RNA, 22 nt, Homo sapiens
cucaguuuugccuuguuuaagg

SEQ ID NO: 7085 - RNA, 21 nt, Homo sapiens
aagcaugguguaucuuuccau

SEQ ID NO: 7086 - RNA, 22 nt, Homo sapiens
uauggcuuucuacuugaguucu

SEQ ID NO: 7087 - RNA, 22 nt, Homo sapiens
gugauagaucugggauucagaa

SEQ ID NO: 7088 - RNA, 22 nt, Homo sapiens
ugucagaaucuagaggcugcua

SEQ ID NO: 7089 - RNA, 22 nt, Homo sapiens
cuugacacugucacucaggcca

SEQ ID NO: 7090 - RNA, 22 nt, Homo sapiens
caucacaucugcaugguaagua

SEQ ID NO: 7091 - RNA, 22 nt, Homo sapiens
uggaucauucuuucuugcaggg

SEQ ID NO: 7092 - RNA, 22 nt, Homo sapiens
uuguccauggacagcaccacag

SEQ ID NO: 7093 - RNA, 22 nt, Homo sapiens
agacuguaaugcauaauuuacu

SEQ ID NO: 7094 - RNA, 22 nt, Homo sapiens
uggacuguaagugccuugagua

SEQ ID NO: 7095 - RNA, 22 nt, Homo sapiens
uagagcacagugauuagaccua

SEQ ID NO: 7096 - RNA, 22 nt, Homo sapiens
ucauguaauuuugugucuauga

SEQ ID NO: 7097 - RNA, 22 nt, Homo sapiens
ugagacugguuaauugauaaag

SEQ ID NO: 7098 - RNA, 22 nt, Homo sapiens
ugagaccugaucuugguacugc

SEQ ID NO: 7099 - RNA, 22 nt, Homo sapiens
auuccacuuagugacucauuug

SEQ ID NO: 7100 - RNA, 22 nt, Homo sapiens
uagcacaucccuaaaaugcugu

SEQ ID NO: 7101 - RNA, 22 nt, Homo sapiens
aucugcauucccauguuuauug

SEQ ID NO: 7102 - RNA, 22 nt, Homo sapiens
augaaugucuuauuuugagaaa

SEQ ID NO: 7103 - RNA, 20 nt, Homo sapiens
gucugucuccgaguagaauu

SEQ ID NO: 7104 - RNA, 22 nt, Homo sapiens
uuuuuuaguuagcugggcauga

SEQ ID NO: 7105 - RNA, 22 nt, Homo sapiens
aaagugcugggauuaggccagg

SEQ ID NO: 7106 - RNA, 22 nt, Homo sapiens
uugaguagugugaugcaugucu

SEQ ID NO: 7107 - RNA, 22 nt, Homo sapiens
caaggaauucucaauagaguua

SEQ ID NO: 7108 - RNA, 22 nt, Homo sapiens
ugagaugacgacacaccucagu

SEQ ID NO: 7109 - RNA, 22 nt, Homo sapiens
ucugugguucaaaccagcaacu

SEQ ID NO: 7110 - RNA, 22 nt, Homo sapiens
gaugguguuuugauaggaauug

SEQ ID NO: 7111 - RNA, 22 nt, Homo sapiens
uugcacuugcugaggagugauu

SEQ ID NO: 7112 - RNA, 22 nt, Homo sapiens
cagagcaaugcuuuugcuuuga

SEQ ID NO: 7113 - RNA, 22 nt, Homo sapiens
uauaugucuuuguuauguugag

SEQ ID NO: 7114 - RNA, 22 nt, Homo sapiens
ucaacagugauggaaaguuaua

SEQ ID NO: 7115 - RNA, 22 nt, Homo sapiens
gucauucauucagcaagcacug

SEQ ID NO: 7116 - RNA, 22 nt, Homo sapiens
uaaggcuugaucuuggugagau

SEQ ID NO: 7117 - RNA, 22 nt, Homo sapiens
aguccaguguuaugaucaguag

SEQ ID NO: 7118 - RNA, 19 nt, Homo sapiens
ucucacagcucuacuaugu

SEQ ID NO: 7119 - RNA, 20 nt, Homo sapiens
ucucccaaacagcaggcccu

SEQ ID NO: 7120 - RNA, 21 nt, Homo sapiens
uaauaaugucucagacaccua

SEQ ID NO: 7121 - RNA, 21 nt, Homo sapiens
auggaaagacugccucuucaa

SEQ ID NO: 7122 - RNA, 22 nt, Homo sapiens
gugucaaggaugccugucaggc

SEQ ID NO: 7123 - RNA, 22 nt, Homo sapiens
agcuggauguggaugacccugu

SEQ ID NO: 7124 - RNA, 22 nt, Homo sapiens
uggcaauaaaaugcaguuacuu

SEQ ID NO: 7125 - RNA, 22 nt, Homo sapiens
agcucuuguuaguauuagcagu

SEQ ID NO: 7126 - RNA, 22 nt, Homo sapiens
augcacauggcuaacuuuuuuc

SEQ ID NO: 7127 - RNA, 22 nt, Homo sapiens
caugcagcacacaugucugugc

SEQ ID NO: 7128 - RNA, 22 nt, Homo sapiens
uccccaguaggcaauuaacacc

SEQ ID NO: 7129 - RNA, 22 nt, Homo sapiens
guugcaauugauguaugucuga

SEQ ID NO: 7130 - RNA, 18 nt, Homo sapiens
uuagguaggucuuugugu

SEQ ID NO: 7131 - RNA, 22 nt, Homo sapiens
uuugugagguggauagauugca

SEQ ID NO: 7132 - RNA, 22 nt, Homo sapiens
acuuuuugauggggagaacauu

SEQ ID NO: 7133 - RNA, 22 nt, Homo sapiens
agucauaggagagauaucacug

SEQ ID NO: 7134 - RNA, 19 nt, Homo sapiens
uaucacuucccuggaaaca

SEQ ID NO: 7135 - RNA, 23 nt, Homo sapiens
agcuagagaggcuggggauacag

SEQ ID NO: 7136 - RNA, 22 nt, Homo sapiens
auguaauugagguuuuugccau

SEQ ID NO: 7137 - RNA, 21 nt, Homo sapiens
cugguccccuuuauguaugug

SEQ ID NO: 7138 - RNA, 22 nt, Homo sapiens
gacugaguaagcagaagcaauu

SEQ ID NO: 7139 - RNA, 22 nt, Homo sapiens
acacuguauccuucuguccuuu

SEQ ID NO: 7140 - RNA, 22 nt, Homo sapiens
ugcauaggcuaaaauccuggcc

SEQ ID NO: 7141 - RNA, 22 nt, Homo sapiens
ucuuuguguaggucaaucuggc

SEQ ID NO: 7142 - RNA, 19 nt, Homo sapiens
ugcuuaguuuuauguguaa

SEQ ID NO: 7143 - RNA, 22 nt, Homo sapiens
uggcuguuuauuucacaugggu

SEQ ID NO: 7144 - RNA, 22 nt, Homo sapiens
uaggggcacacuucgguuagca

SEQ ID NO: 7145 - RNA, 22 nt, Homo sapiens
ugugauaguugcuguucugggc

SEQ ID NO: 7146 - RNA, 22 nt, Homo sapiens
ucaggucauuccaggagggcca

SEQ ID NO: 7147 - RNA, 22 nt, Homo sapiens
guguucaaacccaggucugucu

SEQ ID NO: 7148 - RNA, 22 nt, Homo sapiens
uaggguaguaauaguuguuuca

SEQ ID NO: 7149 - RNA, 22 nt, Homo sapiens
uucaagcuauggugaucuuuuc

SEQ ID NO: 7150 - RNA, 22 nt, Homo sapiens
ugauuuguuuagugccaaguuu

SEQ ID NO: 7151 - RNA, 22 nt, Homo sapiens
guacauagucacacauauacau

SEQ ID NO: 7152 - RNA, 22 nt, Homo sapiens
gugaaauacauaaucccaagug

SEQ ID NO: 7153 - RNA, 22 nt, Homo sapiens
ugaugacccugcaguucucaag

SEQ ID NO: 7154 - RNA, 22 nt, Homo sapiens
uuaggcaggauaguuacauauu

SEQ ID NO: 7155 - RNA, 22 nt, Homo sapiens
uugugcuuaaugaguguaaggu

SEQ ID NO: 7156 - RNA, 20 nt, Homo sapiens
ucagugauugguuuaguuau

SEQ ID NO: 7157 - RNA, 18 nt, Homo sapiens
augaagucaucacuuuua

SEQ ID NO: 7158 - RNA, 22 nt, Homo sapiens
aagcagacauguucauuuugaa

SEQ ID NO: 7159 - RNA, 22 nt, Homo sapiens
cugagcaauauagugagaucuu

SEQ ID NO: 7160 - RNA, 22 nt, Homo sapiens
augagcaucaccagaaucaaua

SEQ ID NO: 7161 - RNA, 21 nt, Homo sapiens
uaucagagacauugagaggca

SEQ ID NO: 7162 - RNA, 22 nt, Homo sapiens
auugcacuccagccuggcagca

SEQ ID NO: 7163 - RNA, 22 nt, Homo sapiens
aauccauuugccgucuauccau

SEQ ID NO: 7164 - RNA, 22 nt, Homo sapiens
uuggaagguaaucaaaaguucu

SEQ ID NO: 7165 - RNA, 22 nt, Homo sapiens
ugcaccauuacacuccaggcug

SEQ ID NO: 7166 - RNA, 18 nt, Homo sapiens
uauuccucuuccucuauc

SEQ ID NO: 7167 - RNA, 22 nt, Homo sapiens
auauggcuaugugagcauacca

SEQ ID NO: 7168 - RNA, 22 nt, Homo sapiens
agcaccacauacuacagagaua

SEQ ID NO: 7169 - RNA, 22 nt, Homo sapiens
auuggcaauagcuuucuuacua

SEQ ID NO: 7170 - RNA, 23 nt, Homo sapiens
ugauaugccuaggaguauauuuu

SEQ ID NO: 7171 - RNA, 22 nt, Homo sapiens
ggcaaggaggggcacuuucacu

SEQ ID NO: 7172 - RNA, 22 nt, Homo sapiens
ugucauggucacaggcauuuca

SEQ ID NO: 7173 - RNA, 22 nt, Homo sapiens
uagaacauuccaggugauguug

SEQ ID NO: 7174 - RNA, 22 nt, Homo sapiens
ugucaggaggguccagagaaaa

SEQ ID NO: 7175 - RNA, 22 nt, Homo sapiens
ucccuuuguccaacggauccac

SEQ ID NO: 7176 - RNA, 22 nt, Homo sapiens
uacugcacuccagccuugccaa

SEQ ID NO: 7177 - RNA, 22 nt, Homo sapiens
guauaugccucaguuauagcac

SEQ ID NO: 7178 - RNA, 20 nt, Homo sapiens
uaaguuguauuugucaugaa

SEQ ID NO: 7179 - RNA, 22 nt, Homo sapiens
guucacaguuucuaaucccagc

SEQ ID NO: 7180 - RNA, 22 nt, Homo sapiens
ugaaaucauguaguuauugcaa

SEQ ID NO: 7181 - RNA, 22 nt, Homo sapiens
cauuuugguuaaauagguagcu

SEQ ID NO: 7182 - RNA, 22 nt, Homo sapiens
ugagcaucucuaaaaggagcaa

SEQ ID NO: 7183 - RNA, 22 nt, Homo sapiens
uagcuccacagcuauauauaau

SEQ ID NO: 7184 - RNA, 21 nt, Homo sapiens
uaaaggcuccaauuauacccc

SEQ ID NO: 7185 - RNA, 22 nt, Homo sapiens
uugagauggaaucucgcuuugu

SEQ ID NO: 7186 - RNA, 22 nt, Homo sapiens
uagguuguccaucucuagaagc

SEQ ID NO: 7187 - RNA, 22 nt, Homo sapiens
uggcuagauauccagaguucug

SEQ ID NO: 7188 - RNA, 22 nt, Homo sapiens
ugauagucuuugcuggugaccu

SEQ ID NO: 7189 - RNA, 22 nt, Homo sapiens
agcugguaugaaaaucucccca

SEQ ID NO: 7190 - RNA, 23 nt, Homo sapiens
augaauguaaagaaugugggaag

SEQ ID NO: 7191 - RNA, 22 nt, Homo sapiens
ugguaauguaauuuggagaagg

SEQ ID NO: 7192 - RNA, 22 nt, Homo sapiens
ugcaccauugcauuccagccug

SEQ ID NO: 7193 - RNA, 22 nt, Homo sapiens
ucaugguuuuauaacccucuug

SEQ ID NO: 7194 - RNA, 22 nt, Homo sapiens
auagccuguaggccuuaaggug

SEQ ID NO: 7195 - RNA, 22 nt, Homo sapiens
cagacaugucuuguggccgugg

SEQ ID NO: 7196 - RNA, 22 nt, Homo sapiens
gacuagaaauuauuuagugagc

SEQ ID NO: 7197 - RNA, 22 nt, Homo sapiens
uuauugcacuccagccugggua

SEQ ID NO: 7198 - RNA, 22 nt, Homo sapiens
agugagcuguuuuuacuuucug

SEQ ID NO: 7199 - RNA, 22 nt, Homo sapiens
uugagcaccaugccuggccaug

SEQ ID NO: 7200 - RNA, 22 nt, Homo sapiens
augagacaguucccuuuaucuu

SEQ ID NO: 7201 - RNA, 22 nt, Homo sapiens
cacccagucaucuuggguuuuu

SEQ ID NO: 7202 - RNA, 22 nt, Homo sapiens
gguguuccccuuaccucuuggc

SEQ ID NO: 7203 - RNA, 22 nt, Homo sapiens
aaacugcuuuccaugguggcug

SEQ ID NO: 7204 - RNA, 22 nt, Homo sapiens
acucauugcucauaccuuaucu

SEQ ID NO: 7205 - RNA, 22 nt, Homo sapiens
agaguacaggcaaguuagucau

SEQ ID NO: 7206 - RNA, 22 nt, Homo sapiens
uagagguagccuacuacacacc

SEQ ID NO: 7207 - RNA, 22 nt, Homo sapiens
augucaaagaggaaaacuggau

SEQ ID NO: 7208 - RNA, 22 nt, Homo sapiens
agggagcaaaguggucuuucuc

SEQ ID NO: 7209 - RNA, 22 nt, Homo sapiens
auaagagugggguguuagggau

SEQ ID NO: 7210 - RNA, 22 nt, Homo sapiens
uagaugauucacuuuacuucca

SEQ ID NO: 7211 - RNA, 18 nt, Homo sapiens
augaacucaucauuuuuu

SEQ ID NO: 7212 - RNA, 16 nt, Homo sapiens
gugagagaugacaaac

SEQ ID NO: 7213 - RNA, 22 nt, Homo sapiens
gugugcauggagggggcaguga

SEQ ID NO: 7214 - RNA, 22 nt, Homo sapiens
gggaauggaagacauuaugaug

SEQ ID NO: 7215 - RNA, 22 nt, Homo sapiens
ugucccaguuggguauugaauu

SEQ ID NO: 7216 - RNA, 22 nt, Homo sapiens
ugaagugaagacucacagaagg

SEQ ID NO: 7217 - RNA, 22 nt, Homo sapiens
uuacacguaauaguaagccugg

SEQ ID NO: 7218 - RNA, 22 nt, Homo sapiens
caaguacugggcuauggauauu

SEQ ID NO: 7219 - RNA, 22 nt, Homo sapiens
uuugggccaugguuuguguaua

SEQ ID NO: 7220 - RNA, 22 nt, Homo sapiens
ugagacugaguuucgcucuugu

SEQ ID NO: 7221 - RNA, 22 nt, Homo sapiens
gagaucauguacuagaacaccu

SEQ ID NO: 7222 - RNA, 21 nt, Homo sapiens
aagguuuuuagugcuugacuu

SEQ ID NO: 7223 - RNA, 22 nt, Homo sapiens
guaaucucagcuccucaugagg

SEQ ID NO: 7224 - RNA, 22 nt, Homo sapiens
ucaugggagcccccaucaugag

SEQ ID NO: 7225 - RNA, 22 nt, Homo sapiens
ugagaucaugucauuugcacuc

SEQ ID NO: 7226 - RNA, 22 nt, Homo sapiens
ucaccaccugcugaucauagag

SEQ ID NO: 7227 - RNA, 22 nt, Homo sapiens
cacagucugggcuuguuuguac

SEQ ID NO: 7228 - RNA, 22 nt, Homo sapiens
uuccuagagauuagcaagcugc

SEQ ID NO: 7229 - RNA, 22 nt, Homo sapiens
ugugaaacacgaaagucuaaaa

SEQ ID NO: 7230 - RNA, 22 nt, Homo sapiens
uaggucuccuuuuugccuaaau

SEQ ID NO: 7231 - RNA, 23 nt, Homo sapiens
ugugguauuauuccauuuauagg

SEQ ID NO: 7232 - RNA, 22 nt, Homo sapiens
cugucuguuucaaaagugguua

SEQ ID NO: 7233 - RNA, 22 nt, Homo sapiens
uaucaccuugagagaccuuauc

SEQ ID NO: 7234 - RNA, 23 nt, Homo sapiens
agagugcaauggugccaucucgg

SEQ ID NO: 7235 - RNA, 22 nt, Homo sapiens
agaucacaguaccguaaggcug

SEQ ID NO: 7236 - RNA, 23 nt, Homo sapiens
auaaugcaaguggugguaaucug

SEQ ID NO: 7237 - RNA, 22 nt, Homo sapiens
augugacuuuuuccugugccuu

SEQ ID NO: 7238 - RNA, 22 nt, Homo sapiens
uggagguagagaugggaucucc

SEQ ID NO: 7239 - RNA, 22 nt, Homo sapiens
uaggcgagauguguguuucaug

SEQ ID NO: 7240 - RNA, 22 nt, Homo sapiens
uuuagguagucaaagguuaguc

SEQ ID NO: 7241 - RNA, 22 nt, Homo sapiens
auccuguacuaagguuuuccca

SEQ ID NO: 7242 - RNA, 18 nt, Homo sapiens
uuggacggagagucaaau

SEQ ID NO: 7243 - RNA, 22 nt, Homo sapiens
cuuugugcccuucugcccauca

SEQ ID NO: 7244 - RNA, 22 nt, Homo sapiens
ugcauuguauuguugacucgcc

SEQ ID NO: 7245 - RNA, 22 nt, Homo sapiens
gugcaguuuacaguuacccagu

SEQ ID NO: 7246 - RNA, 22 nt, Homo sapiens
uuguaacucugaauacauccua

SEQ ID NO: 7247 - RNA, 22 nt, Homo sapiens
gagaacugagugugcuggcgga

SEQ ID NO: 7248 - RNA, 21 nt, Homo sapiens
acaaagcuggagggagacugc

SEQ ID NO: 7249 - RNA, 22 nt, Homo sapiens
guaagguuguauuucaagaaac

SEQ ID NO: 7250 - RNA, 22 nt, Homo sapiens
aaugacuaagaugguacauuuu

SEQ ID NO: 7251 - RNA, 22 nt, Homo sapiens
uagauucaucuguuccuuuuga

SEQ ID NO: 7252 - RNA, 22 nt, Homo sapiens
aacaccaucccuuugaugcuuu

SEQ ID NO: 7253 - RNA, 22 nt, Homo sapiens
guuggcaagaggugcuguacac

SEQ ID NO: 7254 - RNA, 22 nt, Homo sapiens
guaugugcauuguaaauuuuga

SEQ ID NO: 7255 - RNA, 22 nt, Homo sapiens
uuacuugagauggggugucacu

SEQ ID NO: 7256 - RNA, 22 nt, Homo sapiens
ugcaguacugucagacuucuua

SEQ ID NO: 7257 - RNA, 22 nt, Homo sapiens
ugacuauaucucuguauaaacu

SEQ ID NO: 7258 - RNA, 22 nt, Homo sapiens
augguaguagaugugugguuuu

SEQ ID NO: 7259 - RNA, 22 nt, Homo sapiens
gagcaucaguggccucaucuca

SEQ ID NO: 7260 - RNA, 22 nt, Homo sapiens
uguguagagaaauauuacuuau

SEQ ID NO: 7261 - RNA, 22 nt, Homo sapiens
guauggcaugcaugagaauuuc

SEQ ID NO: 7262 - RNA, 22 nt, Homo sapiens
cauuccacauguaggacaauuu

SEQ ID NO: 7263 - RNA, 20 nt, Homo sapiens
gugauuggucacugguuguu

SEQ ID NO: 7264 - RNA, 19 nt, Homo sapiens
uggugccuuguucuuggau

SEQ ID NO: 7265 - RNA, 22 nt, Homo sapiens
aauaugguuuuaugaagcaauu

SEQ ID NO: 7266 - RNA, 22 nt, Homo sapiens
caacucuguaggauccaggugg

SEQ ID NO: 7267 - RNA, 22 nt, Homo sapiens
ugagaugagaaucaguucuaau

SEQ ID NO: 7268 - RNA, 22 nt, Homo sapiens
agagaugauuaacauuuuggua

SEQ ID NO: 7269 - RNA, 22 nt, Homo sapiens
uccagguacucagggggcugag

SEQ ID NO: 7270 - RNA, 18 nt, Homo sapiens
augagagccgauuccugg

SEQ ID NO: 7271 - RNA, 20 nt, Homo sapiens
ugacaagugagaauuauggg

SEQ ID NO: 7272 - RNA, 18 nt, Homo sapiens
ggcggguguuuuauucac

SEQ ID NO: 7273 - RNA, 22 nt, Homo sapiens
acuagaugauuauguuccauug

SEQ ID NO: 7274 - RNA, 22 nt, Homo sapiens
cugagauaggacucugcuggcu

SEQ ID NO: 7275 - RNA, 21 nt, Homo sapiens
cacauggaggcagagagugua

SEQ ID NO: 7276 - RNA, 22 nt, Homo sapiens
guuauuaguugauauuaaguuc

SEQ ID NO: 7277 - RNA, 22 nt, Homo sapiens
uuuccaguuggaagaaggggga

SEQ ID NO: 7278 - RNA, 22 nt, Homo sapiens
auggcacuuuggacugcuagau

SEQ ID NO: 7279 - RNA, 22 nt, Homo sapiens
ucccauguagcuaggauuacag

SEQ ID NO: 7280 - RNA, 20 nt, Homo sapiens
gagcugguguacugccgggc

SEQ ID NO: 7281 - RNA, 22 nt, Homo sapiens
ugugcaaaaacaauugcgguuu

SEQ ID NO: 7282 - RNA, 22 nt, Homo sapiens
auauuacuggccauaucgcagg

SEQ ID NO: 7283 - RNA, 22 nt, Homo sapiens
uagcagucuguuaaaacuuuua

SEQ ID NO: 7284 - RNA, 22 nt, Homo sapiens
augagaauguaaguuaaugaaa

SEQ ID NO: 7285 - RNA, 20 nt, Homo sapiens
cugagguacgaggguuaaau

SEQ ID NO: 7286 - RNA, 20 nt, Homo sapiens
aucacuggagaaggaaaccu

SEQ ID NO: 7287 - RNA, 22 nt, Homo sapiens
aaguggccuagagcgaccauuu

SEQ ID NO: 7288 - RNA, 20 nt, Homo sapiens
uuucuccccuauaaaucuca

SEQ ID NO: 7289 - RNA, 22 nt, Homo sapiens
uucaagaauuaaaguggcuuuu

SEQ ID NO: 7290 - RNA, 22 nt, Homo sapiens
uggcuuuuccuugaaucugccu

SEQ ID NO: 7291 - RNA, 18 nt, Homo sapiens
ugagaucagcaucaaggg

SEQ ID NO: 7292 - RNA, 18 nt, Homo sapiens
gcuguugucagagcacau

SEQ ID NO: 7293 - RNA, 22 nt, Homo sapiens
gucaacauauuaauuauguucu

SEQ ID NO: 7294 - RNA, 22 nt, Homo sapiens
gggaucauuuuucauccuacag

SEQ ID NO: 7295 - RNA, 22 nt, Homo sapiens
gucagguauguuccaaaggcgg

SEQ ID NO: 7296 - RNA, 22 nt, Homo sapiens
aaagguaguacuucuagaaggg

SEQ ID NO: 7297 - RNA, 21 nt, Homo sapiens
ucagugcugugggcaaggugc

SEQ ID NO: 7298 - RNA, 21 nt, Homo sapiens
cuaucucaguguuuacauuug

SEQ ID NO: 7299 - RNA, 19 nt, Homo sapiens
uuauacuguauuguuuagg

SEQ ID NO: 7300 - RNA, 22 nt, Homo sapiens
gcccuacuguuuauacauagga

SEQ ID NO: 7301 - RNA, 21 nt, Homo sapiens
aucugugagaccuuggggguu

SEQ ID NO: 7302 - RNA, 22 nt, Homo sapiens
uaaggcccggccuuuccaagca

SEQ ID NO: 7303 - RNA, 22 nt, Homo sapiens
uaagugaauguuggcuacugaa

SEQ ID NO: 7304 - RNA, 22 nt, Homo sapiens
uggaacacauaaauagcauagu

SEQ ID NO: 7305 - RNA, 22 nt, Homo sapiens
auugaacuguuggagagguuuu

SEQ ID NO: 7306 - RNA, 22 nt, Homo sapiens
guaugguuuauagggaaauugu

SEQ ID NO: 7307 - RNA, 22 nt, Homo sapiens
gugcccacugucuguccuguag

SEQ ID NO: 7308 - RNA, 22 nt, Homo sapiens
agcuugugauucuccaucaugu

SEQ ID NO: 7309 - RNA, 22 nt, Homo sapiens
agcuggaauuuaagguagauag

SEQ ID NO: 7310 - RNA, 23 nt, Homo sapiens
uauaugugucuaggagcuauggu

SEQ ID NO: 7311 - RNA, 22 nt, Homo sapiens
ugugaguguguacuaguuauca

SEQ ID NO: 7312 - RNA, 22 nt, Homo sapiens
uucucugggacauaggucgggu

SEQ ID NO: 7313 - RNA, 22 nt, Homo sapiens
auugcacuccagcccgggugac

SEQ ID NO: 7314 - RNA, 23 nt, Homo sapiens
ugcauaguacccaauacuuuauc

SEQ ID NO: 7315 - RNA, 22 nt, Homo sapiens
agccuauccaauaucagugaga

SEQ ID NO: 7316 - RNA, 22 nt, Homo sapiens
uuaucccacuuucuguuccugu

SEQ ID NO: 7317 - RNA, 22 nt, Homo sapiens
ugugaaauguuaucccgucgug

SEQ ID NO: 7318 - RNA, 22 nt, Homo sapiens
uggcaaaugugagaugagaacu

SEQ ID NO: 7319 - RNA, 22 nt, Homo sapiens
cucuuugaggugagcugcccau

SEQ ID NO: 7320 - RNA, 22 nt, Homo sapiens
cuuuccauuguuggagcauaaa

SEQ ID NO: 7321 - RNA, 22 nt, Homo sapiens
uaucacacuguuggauuugauu

SEQ ID NO: 7322 - RNA, 22 nt, Homo sapiens
aaguaagcauccaauaaauguu

SEQ ID NO: 7323 - RNA, 22 nt, Homo sapiens
ucagaugcauccauaccccacu

SEQ ID NO: 7324 - RNA, 22 nt, Homo sapiens
augaucacugugccuccuguga

SEQ ID NO: 7325 - RNA, 22 nt, Homo sapiens
aagggaaugcuuccaguuugug

SEQ ID NO: 7326 - RNA, 22 nt, Homo sapiens
aauaaagcuuugagcuuugcug

SEQ ID NO: 7327 - RNA, 22 nt, Homo sapiens
uuccugaggccuccccagaagc

SEQ ID NO: 7328 - RNA, 22 nt, Homo sapiens
guccuugaggcuuugacugugg

SEQ ID NO: 7329 - RNA, 22 nt, Homo sapiens
aagucacugagacuuguggcug

SEQ ID NO: 7330 - RNA, 22 nt, Homo sapiens
aagagguuguaccuaaaguguu

SEQ ID NO: 7331 - RNA, 22 nt, Homo sapiens
auugccucaauuccaagacugc

SEQ ID NO: 7332 - RNA, 23 nt, Homo sapiens
ccacacuguuuagaauggcauca

SEQ ID NO: 7333 - RNA, 22 nt, Homo sapiens
augugacugauguaaucagaca

SEQ ID NO: 7334 - RNA, 22 nt, Homo sapiens
ugauuguucuguccccaggggc

SEQ ID NO: 7335 - RNA, 22 nt, Homo sapiens
aaagugcugagauuguaggcau

SEQ ID NO: 7336 - RNA, 22 nt, Homo sapiens
ugugauguggagggcagaucca

SEQ ID NO: 7337 - RNA, 22 nt, Homo sapiens
ugacuucauuuuuggccaugag

SEQ ID NO: 7338 - RNA, 22 nt, Homo sapiens
aagcagauguguugaaaguacu

SEQ ID NO: 7339 - RNA, 22 nt, Homo sapiens
aaaugcaugaggugggaagaaa

SEQ ID NO: 7340 - RNA, 22 nt, Homo sapiens
auucaacuaauuauugaagaug

SEQ ID NO: 7341 - RNA, 22 nt, Homo sapiens
ucauacaguaguccucacuugu

SEQ ID NO: 7342 - RNA, 22 nt, Homo sapiens
guaucacguuguuuuggugaaa

SEQ ID NO: 7343 - RNA, 22 nt, Homo sapiens
ugugucuugcuggugccugcau

SEQ ID NO: 7344 - RNA, 22 nt, Homo sapiens
ucccagaaacgcauauguucau

SEQ ID NO: 7345 - RNA, 22 nt, Homo sapiens
ggaagaauaaugggccuuagag

SEQ ID NO: 7346 - RNA, 22 nt, Homo sapiens
ucuggcacugaugugggaugcu

SEQ ID NO: 7347 - RNA, 22 nt, Homo sapiens
ucccuacuggggcacugccuag

SEQ ID NO: 7348 - RNA, 22 nt, Homo sapiens
uuugaaugcaacaaaugcggga

SEQ ID NO: 7349 - RNA, 21 nt, Homo sapiens
guucaagugauccuccugucu

SEQ ID NO: 7350 - RNA, 22 nt, Homo sapiens
ugaguucauggucauuugucac

SEQ ID NO: 7351 - RNA, 22 nt, Homo sapiens
ugaugcugaguggcuauuugaa

SEQ ID NO: 7352 - RNA, 22 nt, Homo sapiens
uaggacacagaccuggauggaa

SEQ ID NO: 7353 - RNA, 22 nt, Homo sapiens
acaauguauauuuuacuguagg

SEQ ID NO: 7354 - RNA, 22 nt, Homo sapiens
cagagagcuugcccuuguauau

SEQ ID NO: 7355 - RNA, 22 nt, Homo sapiens
uagagcacauuaucauuuccaa

SEQ ID NO: 7356 - RNA, 22 nt, Homo sapiens
ucaaggcacuagcugagcugca

SEQ ID NO: 7357 - RNA, 22 nt, Homo sapiens
uuggucuucuaauguaccuguu

SEQ ID NO: 7358 - RNA, 22 nt, Homo sapiens
ugaaggaguauggauaagucgu

SEQ ID NO: 7359 - RNA, 22 nt, Homo sapiens
cugucuggaguccuucgugugc

SEQ ID NO: 7360 - RNA, 22 nt, Homo sapiens
cauggcacaucuuuucugacua

SEQ ID NO: 7361 - RNA, 20 nt, Homo sapiens
uugaggucaggaguuuggga

SEQ ID NO: 7362 - RNA, 22 nt, Homo sapiens
cugcaguaaccacuguaggugu

SEQ ID NO: 7363 - RNA, 22 nt, Homo sapiens
gcucaguuuccucagcugcaaa

SEQ ID NO: 7364 - RNA, 22 nt, Homo sapiens
uugagccaaggauugucuuucc

SEQ ID NO: 7365 - RNA, 21 nt, Homo sapiens
ugggccccuuccuuacaucau

SEQ ID NO: 7366 - RNA, 22 nt, Homo sapiens
gucaaaugcacagaaccauuaa

SEQ ID NO: 7367 - RNA, 22 nt, Homo sapiens
agagugcaauggcaccaucucg

SEQ ID NO: 7368 - RNA, 22 nt, Homo sapiens
uucauggauggaaaugauuuug

SEQ ID NO: 7369 - RNA, 22 nt, Homo sapiens
auccuuuagacuguccaguuga

SEQ ID NO: 7370 - RNA, 21 nt, Homo sapiens
ugcagccauucagcccuaugc

SEQ ID NO: 7371 - RNA, 22 nt, Homo sapiens
ugaaagcuacagucuccuagga

SEQ ID NO: 7372 - RNA, 20 nt, Homo sapiens
gggaaucguaauagaauauu

SEQ ID NO: 7373 - RNA, 22 nt, Homo sapiens
gacauguuuacaguguugagag

SEQ ID NO: 7374 - RNA, 22 nt, Homo sapiens
gugaacagcagaugagugagug

SEQ ID NO: 7375 - RNA, 22 nt, Homo sapiens
acacuugcuugcaauagccucc

SEQ ID NO: 7376 - RNA, 22 nt, Homo sapiens
gauguaggugcauuugcacgug

SEQ ID NO: 7377 - RNA, 22 nt, Homo sapiens
guggaauauaaagcaucgugua

SEQ ID NO: 7378 - RNA, 22 nt, Homo sapiens
ucucagcacaaacaaaauugcu

SEQ ID NO: 7379 - RNA, 22 nt, Homo sapiens
gugaaauguguagaggaucugg

SEQ ID NO: 7380 - RNA, 22 nt, Homo sapiens
caguucaugguaggcaccauag

SEQ ID NO: 7381 - RNA, 22 nt, Homo sapiens
uuccacuuuuuccuugugcucc

SEQ ID NO: 7382 - RNA, 22 nt, Homo sapiens
ugagauggcuuuauugcugaau

SEQ ID NO: 7383 - RNA, 22 nt, Homo sapiens
uucagcaguggccaguggaaau

SEQ ID NO: 7384 - RNA, 22 nt, Homo sapiens
gugggaugaucacaguucacug

SEQ ID NO: 7385 - RNA, 22 nt, Homo sapiens
gaaaauccauccccagggagua

SEQ ID NO: 7386 - RNA, 22 nt, Homo sapiens
aacaggcuccuaggggugcacc

SEQ ID NO: 7387 - RNA, 22 nt, Homo sapiens
uaccaucauuauacguagaaau

SEQ ID NO: 7388 - RNA, 20 nt, Homo sapiens
ugaacugguuacuuucuguc

SEQ ID NO: 7389 - RNA, 22 nt, Homo sapiens
uugcaaacaucuuguuucacau

SEQ ID NO: 7390 - RNA, 22 nt, Homo sapiens
ggaucacagagcuugggaaagg

SEQ ID NO: 7391 - RNA, 23 nt, Homo sapiens
ucucauuccuugaaaauaaugac

SEQ ID NO: 7392 - RNA, 22 nt, Homo sapiens
aaggcaacgugaguuguugauu

SEQ ID NO: 7393 - RNA, 22 nt, Homo sapiens
aucaccagaugcuucaagcaga

SEQ ID NO: 7394 - RNA, 22 nt, Homo sapiens
ccaggguuccacgccuggcugu

SEQ ID NO: 7395 - RNA, 22 nt, Homo sapiens
ugcagguacuugacaacuuggg

SEQ ID NO: 7396 - RNA, 22 nt, Homo sapiens
ucacaguaucaugggggacaga

SEQ ID NO: 7397 - RNA, 20 nt, Homo sapiens
ucuugaacuuagucaacagg

SEQ ID NO: 7398 - RNA, 22 nt, Homo sapiens
ugagaaugacugggcaugcugc

SEQ ID NO: 7399 - RNA, 22 nt, Homo sapiens
caagugcuuucuuggggauuua

SEQ ID NO: 7400 - RNA, 22 nt, Homo sapiens
augcauagcaucugcaaauguu

SEQ ID NO: 7401 - RNA, 22 nt, Homo sapiens
agcaacauagaaauuugggugg

SEQ ID NO: 7402 - RNA, 22 nt, Homo sapiens
gcacagaugaggagaggucuca

SEQ ID NO: 7403 - RNA, 22 nt, Homo sapiens
guguaaaacaauuagaggauuu

SEQ ID NO: 7404 - RNA, 17 nt, Homo sapiens
gggucaccuugcaggua

SEQ ID NO: 7405 - RNA, 22 nt, Homo sapiens
caucaggugaggauucaaugca

SEQ ID NO: 7406 - RNA, 22 nt, Homo sapiens
gucacaguguuuguucauccca

SEQ ID NO: 7407 - RNA, 22 nt, Homo sapiens
cuacucuggagagugacaauca

SEQ ID NO: 7408 - RNA, 22 nt, Homo sapiens
gcagcagugcccuggauggaaa

SEQ ID NO: 7409 - RNA, 22 nt, Homo sapiens
ugggcaagugacuuggcuucuc

SEQ ID NO: 7410 - RNA, 22 nt, Homo sapiens
cacugcauccuccaccuccugg

SEQ ID NO: 7411 - RNA, 22 nt, Homo sapiens
uuggaauuaaccuggugcugga

SEQ ID NO: 7412 - RNA, 23 nt, Homo sapiens
ugcagcuacauguggccaugugc

SEQ ID NO: 7413 - RNA, 23 nt, Homo sapiens
uaugccuguuucaaacaaacuuu

SEQ ID NO: 7414 - RNA, 22 nt, Homo sapiens
auggaagcugauuagauaguac

SEQ ID NO: 7415 - RNA, 22 nt, Homo sapiens
uuugcgacuucugaguuaaugu

SEQ ID NO: 7416 - RNA, 22 nt, Homo sapiens
ugucagggaggcucggccgcac

SEQ ID NO: 7417 - RNA, 22 nt, Homo sapiens
gugagauuaccauuuaaaucag

SEQ ID NO: 7418 - RNA, 20 nt, Homo sapiens
uuucaguacuuucuacuggc

SEQ ID NO: 7419 - RNA, 22 nt, Homo sapiens
gacagugagaugucaugugaaa

SEQ ID NO: 7420 - RNA, 22 nt, Homo sapiens
uccauaguacuagaaacugacc

SEQ ID NO: 7421 - RNA, 20 nt, Homo sapiens
ucauagcuuuuuccacuuua

SEQ ID NO: 7422 - RNA, 22 nt, Homo sapiens
ucacaguauggggggugguuau

SEQ ID NO: 7423 - RNA, 22 nt, Homo sapiens
gcugcacuuuaaggcauccccu

SEQ ID NO: 7424 - RNA, 22 nt, Homo sapiens
auugaacuuaaaagacuugcca

SEQ ID NO: 7425 - RNA, 22 nt, Homo sapiens
uugagauguaagauguuaauau

SEQ ID NO: 7426 - RNA, 18 nt, Homo sapiens
uucagugaauucuuuuga

SEQ ID NO: 7427 - RNA, 22 nt, Homo sapiens
auugcaaugggaaacuaugaaa

SEQ ID NO: 7428 - RNA, 22 nt, Homo sapiens
gagaugaugagauguucacagu

SEQ ID NO: 7429 - RNA, 22 nt, Homo sapiens
guauacgugcaggucacagggg

SEQ ID NO: 7430 - RNA, 22 nt, Homo sapiens
ugguaccuuuuaaugacuaauu

SEQ ID NO: 7431 - RNA, 22 nt, Homo sapiens
uauugcagauacccaggaaguu

SEQ ID NO: 7432 - RNA, 22 nt, Homo sapiens
uuuggcaaagaucaacauguua

SEQ ID NO: 7433 - RNA, 22 nt, Homo sapiens
aucauguaguaagacacauuua

SEQ ID NO: 7434 - RNA, 22 nt, Homo sapiens
cauugcacugcauucugggcaa

SEQ ID NO: 7435 - RNA, 22 nt, Homo sapiens
cagcccuacacagacugacuca

SEQ ID NO: 7436 - RNA, 22 nt, Homo sapiens
gaaugguaaacuuccaugacug

SEQ ID NO: 7437 - RNA, 22 nt, Homo sapiens
uucugauggaguaguccacaga

SEQ ID NO: 7438 - RNA, 22 nt, Homo sapiens
ucauaguacuuuguuuugaaaa

SEQ ID NO: 7439 - RNA, 21 nt, Homo sapiens
aggcaagacuuuuagguuugu

SEQ ID NO: 7440 - RNA, 22 nt, Homo sapiens
cucaccuugugauccacccgcc

SEQ ID NO: 7441 - RNA, 22 nt, Homo sapiens
gcccugauacauucuucugccu

SEQ ID NO: 7442 - RNA, 22 nt, Homo sapiens
cugagcccauucuggggagaag

SEQ ID NO: 7443 - RNA, 22 nt, Homo sapiens
ggccagaugcgguggcucacac

SEQ ID NO: 7444 - RNA, 22 nt, Homo sapiens
ugacuugagcuggagccugccu

SEQ ID NO: 7445 - RNA, 22 nt, Homo sapiens
ugagcuauguucuucuuguuuu

SEQ ID NO: 7446 - RNA, 22 nt, Homo sapiens
uuucagcguggggugcugaaga

SEQ ID NO: 7447 - RNA, 22 nt, Homo sapiens
uagagcuagggacucgcaaugu

SEQ ID NO: 7448 - RNA, 22 nt, Homo sapiens
aucauugcacaucacagccuca

SEQ ID NO: 7449 - RNA, 22 nt, Homo sapiens
acacaguaaauauguauugaau

SEQ ID NO: 7450 - RNA, 22 nt, Homo sapiens
uugauauuaaguacugaagugg

SEQ ID NO: 7451 - RNA, 22 nt, Homo sapiens
ugagaucuuaucagaaauggug

SEQ ID NO: 7452 - RNA, 21 nt, Homo sapiens
ugcuauguuguccaggcuggc

SEQ ID NO: 7453 - RNA, 22 nt, Homo sapiens
augacauuccacagccguagag

SEQ ID NO: 7454 - RNA, 22 nt, Homo sapiens
uaugcacacguguccaugugca

SEQ ID NO: 7455 - RNA, 22 nt, Homo sapiens
uaugaucauuauguuauugcag

SEQ ID NO: 7456 - RNA, 22 nt, Homo sapiens
ggcagagucuugcaucuuuaga

SEQ ID NO: 7457 - RNA, 22 nt, Homo sapiens
cugcuguuguuaacuuuuggag

SEQ ID NO: 7458 - RNA, 22 nt, Homo sapiens
gaggaguauuuugucgaauguc

SEQ ID NO: 7459 - RNA, 22 nt, Homo sapiens
uguccugcagagguguuugccu

SEQ ID NO: 7460 - RNA, 22 nt, Homo sapiens
ugacuauaguaaucacuucaca

SEQ ID NO: 7461 - RNA, 22 nt, Homo sapiens
aagccacuguaccugucucuua

SEQ ID NO: 7462 - RNA, 22 nt, Homo sapiens
uaugccuuucucacuaagcuua

SEQ ID NO: 7463 - RNA, 22 nt, Homo sapiens
guggaaugauaucucauugugg

SEQ ID NO: 7464 - RNA, 22 nt, Homo sapiens
cuagcaacauuucagugaguuu

SEQ ID NO: 7465 - RNA, 22 nt, Homo sapiens
aagugaguaauacgucaguugu

SEQ ID NO: 7466 - RNA, 23 nt, Homo sapiens
ggcaagaucucagcucacugcaa

SEQ ID NO: 7467 - RNA, 22 nt, Homo sapiens
uuagaacagugcucaccacaaa

SEQ ID NO: 7468 - RNA, 22 nt, Homo sapiens
ucauguauuaucauuagugggu

SEQ ID NO: 7469 - RNA, 22 nt, Homo sapiens
ugagauuauauuucuuaacaga

SEQ ID NO: 7470 - RNA, 23 nt, Homo sapiens
ucugguguugucaaaugcugguu

SEQ ID NO: 7471 - RNA, 22 nt, Homo sapiens
aggaggauugcuuucaucuuuu

SEQ ID NO: 7472 - RNA, 22 nt, Homo sapiens
uugauaguguccucuuuggcag

SEQ ID NO: 7473 - RNA, 22 nt, Homo sapiens
aacaccuugcgugggcgucaau

SEQ ID NO: 7474 - RNA, 23 nt, Homo sapiens
ucgcagcauucaauaccaggcag

SEQ ID NO: 7475 - RNA, 19 nt, Homo sapiens
ugcaaauucuaaaaacuga

SEQ ID NO: 7476 - RNA, 22 nt, Homo sapiens
uuuuggacuucaauuugacacu

SEQ ID NO: 7477 - RNA, 22 nt, Homo sapiens
aggcaugguggcacauacaugu

SEQ ID NO: 7478 - RNA, 22 nt, Homo sapiens
caguacaauguugauuagaagu

SEQ ID NO: 7479 - RNA, 22 nt, Homo sapiens
cagggaauguuauuuaauagca

SEQ ID NO: 7480 - RNA, 22 nt, Homo sapiens
caugcacugaguccaccucugg

SEQ ID NO: 7481 - RNA, 23 nt, Homo sapiens
uuaaggugaugucuuugugccuc

SEQ ID NO: 7482 - RNA, 22 nt, Homo sapiens
uaggcuuuucugggaugugggc

SEQ ID NO: 7483 - RNA, 22 nt, Homo sapiens
ggaaaucaucauucucgguaua

SEQ ID NO: 7484 - RNA, 22 nt, Homo sapiens
guauggcacuauccucucugau

SEQ ID NO: 7485 - RNA, 22 nt, Homo sapiens
agcaccauuagcguugggccgg

SEQ ID NO: 7486 - RNA, 22 nt, Homo sapiens
ugacaagcucccucugcaccuu

SEQ ID NO: 7487 - RNA, 22 nt, Homo sapiens
cauugguuaguuaacuuuaaga

SEQ ID NO: 7488 - RNA, 22 nt, Homo sapiens
ggaaaucucugaggcucccuuc

SEQ ID NO: 7489 - RNA, 22 nt, Homo sapiens
ugaguauguaggaugugucuua

SEQ ID NO: 7490 - RNA, 22 nt, Homo sapiens
uuuuugaguagcuggagagcag

SEQ ID NO: 7491 - RNA, 22 nt, Homo sapiens
uucauguagucaucauccugcu

SEQ ID NO: 7492 - RNA, 22 nt, Homo sapiens
uaccauguaucugggaugcuuu

SEQ ID NO: 7493 - RNA, 22 nt, Homo sapiens
aacccugagucaugagucuaga

SEQ ID NO: 7494 - RNA, 22 nt, Homo sapiens
ggcagcgugguggauugaaaau

SEQ ID NO: 7495 - RNA, 22 nt, Homo sapiens
auggcagcugacacuuccgucu

SEQ ID NO: 7496 - RNA, 22 nt, Homo sapiens
gagaugaagugucaauaaggau

SEQ ID NO: 7497 - RNA, 22 nt, Homo sapiens
ucagauguuucuuuaacgcaug

SEQ ID NO: 7498 - RNA, 22 nt, Homo sapiens
acaguagugggcuacagaauca

SEQ ID NO: 7499 - RNA, 18 nt, Homo sapiens
uacagaacuggaguagaa

SEQ ID NO: 7500 - RNA, 22 nt, Homo sapiens
auugcacucugaucugcacucc

SEQ ID NO: 7501 - RNA, 22 nt, Homo sapiens
agauaugucugcuauuugcugu

SEQ ID NO: 7502 - RNA, 22 nt, Homo sapiens
ugagaugauuuaauggagccca

SEQ ID NO: 7503 - RNA, 22 nt, Homo sapiens
uugagggaggcagggcuugucu

SEQ ID NO: 7504 - RNA, 22 nt, Homo sapiens
ugagggcguauccuucauuaag

SEQ ID NO: 7505 - RNA, 22 nt, Homo sapiens
uuccacgugaaguauucuaaag

SEQ ID NO: 7506 - RNA, 20 nt, Homo sapiens
gccacaguuaagcuucugcc

SEQ ID NO: 7507 - RNA, 22 nt, Homo sapiens
caauugguguuuauggggaagu

SEQ ID NO: 7508 - RNA, 22 nt, Homo sapiens
ugucagaaucugagacgacaac

SEQ ID NO: 7509 - RNA, 22 nt, Homo sapiens
caaaggcuguuauaggccagga

SEQ ID NO: 7510 - RNA, 22 nt, Homo sapiens
auaaaugcauugagaacugcug

SEQ ID NO: 7511 - RNA, 22 nt, Homo sapiens
uucccaguggaacauguaguca

SEQ ID NO: 7512 - RNA, 22 nt, Homo sapiens
uuuguguggccuuggccuggca

SEQ ID NO: 7513 - RNA, 20 nt, Homo sapiens
guucuugcucguguaucuuc

SEQ ID NO: 7514 - RNA, 16 nt, Homo sapiens
gacugggcugaggaau

SEQ ID NO: 7515 - RNA, 22 nt, Homo sapiens
uacaaccucugccucccaaguu

SEQ ID NO: 7516 - RNA, 22 nt, Homo sapiens
gauggcauuucuggaucugaca

SEQ ID NO: 7517 - RNA, 22 nt, Homo sapiens
uuaauacucuucuaaguagucc

SEQ ID NO: 7518 - RNA, 22 nt, Homo sapiens
uuaugucacuguucagucuccc

SEQ ID NO: 7519 - RNA, 20 nt, Homo sapiens
aacaguguguaaguuuccuu

SEQ ID NO: 7520 - RNA, 22 nt, Homo sapiens
guggcgagaucauagcucauug

SEQ ID NO: 7521 - RNA, 22 nt, Homo sapiens
ucucuuggugacuuaaaauguu

SEQ ID NO: 7522 - RNA, 22 nt, Homo sapiens
augaagaucucugccuuguguc

SEQ ID NO: 7523 - RNA, 22 nt, Homo sapiens
cugagguaggcccugagaauau

SEQ ID NO: 7524 - RNA, 22 nt, Homo sapiens
gugagucaugucccaucugauu

SEQ ID NO: 7525 - RNA, 22 nt, Homo sapiens
uuggagcccuaacucucaguac

SEQ ID NO: 7526 - RNA, 18 nt, Homo sapiens
ugucacuggauaaugguc

SEQ ID NO: 7527 - RNA, 22 nt, Homo sapiens
uuggucaggagccucccucuuu

SEQ ID NO: 7528 - RNA, 23 nt, Homo sapiens
ucuuuggcucuaauauaccuugu

SEQ ID NO: 7529 - RNA, 22 nt, Homo sapiens
aagcuggagugcaguggugcga

SEQ ID NO: 7530 - RNA, 22 nt, Homo sapiens
aagagguuauagaguguauacu

SEQ ID NO: 7531 - RNA, 22 nt, Homo sapiens
aagcuacuuuggugguuccuua

SEQ ID NO: 7532 - RNA, 22 nt, Homo sapiens
aucuuguguugaauggugcaga

SEQ ID NO: 7533 - RNA, 23 nt, Homo sapiens
agcugguacuagaggcuugcgcc

SEQ ID NO: 7534 - RNA, 22 nt, Homo sapiens
ugucucccuucccauuaggaag

SEQ ID NO: 7535 - RNA, 22 nt, Homo sapiens
ucauucuuucuguggaggggcu

SEQ ID NO: 7536 - RNA, 22 nt, Homo sapiens
cuuuggcaaugucauuuucaau

SEQ ID NO: 7537 - RNA, 22 nt, Homo sapiens
cauugcacuccagccucggcaa

SEQ ID NO: 7538 - RNA, 22 nt, Homo sapiens
uauugcacuccagccuuggcaa

SEQ ID NO: 7539 - RNA, 22 nt, Homo sapiens
accccgagacugccaagaaucc

SEQ ID NO: 7540 - RNA, 22 nt, Homo sapiens
uggauggucagaggguuucugu

SEQ ID NO: 7541 - RNA, 22 nt, Homo sapiens
uagaagcacuaucccuccuagu

SEQ ID NO: 7542 - RNA, 22 nt, Homo sapiens
auggagagaauuauucucucag

SEQ ID NO: 7543 - RNA, 22 nt, Homo sapiens
augguacuagaguaagaauugu

SEQ ID NO: 7544 - RNA, 23 nt, Homo sapiens
uggcaagauuuguauugccugga

SEQ ID NO: 7545 - RNA, 22 nt, Homo sapiens
uuuuugauuaauggguagacca

SEQ ID NO: 7546 - RNA, 22 nt, Homo sapiens
uucuauggucacagaugcuuga

SEQ ID NO: 7547 - RNA, 22 nt, Homo sapiens
ugagguagaggugaacuugacc

SEQ ID NO: 7548 - RNA, 22 nt, Homo sapiens
aacuggccuccuugggaaauua

SEQ ID NO: 7549 - RNA, 22 nt, Homo sapiens
auugugauggucaaaggaaaua

SEQ ID NO: 7550 - RNA, 22 nt, Homo sapiens
uagaucaauuaauuguuacuug

SEQ ID NO: 7551 - RNA, 22 nt, Homo sapiens
uuccagcugggggcaacucugc

SEQ ID NO: 7552 - RNA, 22 nt, Homo sapiens
aguggaauuaagaaacugaauu

SEQ ID NO: 7553 - RNA, 22 nt, Homo sapiens
aauggccacugaccuguguuga

SEQ ID NO: 7554 - RNA, 22 nt, Homo sapiens
aggugguguuggguuccagccc

SEQ ID NO: 7555 - RNA, 19 nt, Homo sapiens
ucagaugcauuagggguua

SEQ ID NO: 7556 - RNA, 22 nt, Homo sapiens
ugguaaacaacaggagaacuug

SEQ ID NO: 7557 - RNA, 22 nt, Homo sapiens
ugcaccaucuugcuucuguggu

SEQ ID NO: 7558 - RNA, 22 nt, Homo sapiens
cugacaucuucaagugaggaga

SEQ ID NO: 7559 - RNA, 22 nt, Homo sapiens
guucaucagggauauuggcuua

SEQ ID NO: 7560 - RNA, 22 nt, Homo sapiens
uguuggacuuacuuggcagauu

SEQ ID NO: 7561 - RNA, 22 nt, Homo sapiens
uggcaauauccacaauuacuuu

SEQ ID NO: 7562 - RNA, 22 nt, Homo sapiens
uugguccccacuccccugccaa

SEQ ID NO: 7563 - RNA, 23 nt, Homo sapiens
uuggccuccuugugucuagggcu

SEQ ID NO: 7564 - RNA, 22 nt, Homo sapiens
uuggcagugcccgaugcugggg

SEQ ID NO: 7565 - RNA, 22 nt, Homo sapiens
uaacaggcaaggucacaccuug

SEQ ID NO: 7566 - RNA, 22 nt, Homo sapiens
uuuaaggcacuucaugguuuca

SEQ ID NO: 7567 - RNA, 22 nt, Homo sapiens
uguaaaaagcccagccgcugag

SEQ ID NO: 7568 - RNA, 22 nt, Homo sapiens
uaguggauguucagagauuuga

SEQ ID NO: 7569 - RNA, 22 nt, Homo sapiens
uacauacuguaugguucuguuu

SEQ ID NO: 7570 - RNA, 19 nt, Homo sapiens
uuuguauguuuccaguaau

SEQ ID NO: 7571 - RNA, 22 nt, Homo sapiens
uauuugguagcuauuuugcagu

SEQ ID NO: 7572 - RNA, 22 nt, Homo sapiens
ugagaugauaucuuauuguaau

SEQ ID NO: 7573 - RNA, 22 nt, Homo sapiens
uagguagguggaaaaguaauug

SEQ ID NO: 7574 - RNA, 19 nt, Homo sapiens
uuaagugugauaucucagu

SEQ ID NO: 7575 - RNA, 22 nt, Homo sapiens
aggcauguugcuucgggcuuug

SEQ ID NO: 7576 - RNA, 22 nt, Homo sapiens
aucuggguccguucugcuucuc

SEQ ID NO: 7577 - RNA, 22 nt, Homo sapiens
ugaucucauuagcaccuuuagc

SEQ ID NO: 7578 - RNA, 22 nt, Homo sapiens
uugauuuguagaaugccccaac

SEQ ID NO: 7579 - RNA, 22 nt, Homo sapiens
ucuguguugaucacacugggag

SEQ ID NO: 7580 - RNA, 22 nt, Homo sapiens
uuuagguacgcaccggcucagu

SEQ ID NO: 7581 - RNA, 20 nt, Homo sapiens
aucagguagggccccauuau

SEQ ID NO: 7582 - RNA, 20 nt, Homo sapiens
uccugagauucccaguucuc

SEQ ID NO: 7583 - RNA, 22 nt, Homo sapiens
ucucuuggcggaaguugcagug

SEQ ID NO: 7584 - RNA, 22 nt, Homo sapiens
cuaggugauccacugcucucuu

SEQ ID NO: 7585 - RNA, 22 nt, Homo sapiens
gagguaugugggcagacauuua

SEQ ID NO: 7586 - RNA, 22 nt, Homo sapiens
ucuuugguaggaguaggaggcc

SEQ ID NO: 7587 - RNA, 22 nt, Homo sapiens
guugagcaaacagcuuaacagu

SEQ ID NO: 7588 - RNA, 22 nt, Homo sapiens
uggacacugguggauauggaau

SEQ ID NO: 7589 - RNA, 22 nt, Homo sapiens
gaugaucaugaccuacagaugg

SEQ ID NO: 7590 - RNA, 22 nt, Homo sapiens
gagcuuggguuaaaguugccuu

SEQ ID NO: 7591 - RNA, 22 nt, Homo sapiens
acgagguuaggaguuaaaggcu

SEQ ID NO: 7592 - RNA, 18 nt, Homo sapiens
aggaaugguaauacuuca

SEQ ID NO: 7593 - RNA, 22 nt, Homo sapiens
ugagauaaucaugugguuuuug

SEQ ID NO: 7594 - RNA, 22 nt, Homo sapiens
gacuaaugaaagagugugauau

SEQ ID NO: 7595 - RNA, 22 nt, Homo sapiens
guggggucaucucauuugugga

SEQ ID NO: 7596 - RNA, 22 nt, Homo sapiens
gugauugugaaaacauuaagaa

SEQ ID NO: 7597 - RNA, 22 nt, Homo sapiens
caguugcacuagccccguuuca

SEQ ID NO: 7598 - RNA, 22 nt, Homo sapiens
uugguccucccaugcucaagag

SEQ ID NO: 7599 - RNA, 22 nt, Homo sapiens
uggcuuuuguuauuuggaagcu

SEQ ID NO: 7600 - RNA, 22 nt, Homo sapiens
aauggagcuguuuggaugacuu

SEQ ID NO: 7601 - RNA, 22 nt, Homo sapiens
cugaaauggaaugugugcacag

SEQ ID NO: 7602 - RNA, 22 nt, Homo sapiens
gaggucaugucgggccccagga

SEQ ID NO: 7603 - RNA, 22 nt, Homo sapiens
augaggcuauaauuuuuaugua

SEQ ID NO: 7604 - RNA, 22 nt, Homo sapiens
ccacugggcaguuuauuaucag

SEQ ID NO: 7605 - RNA, 22 nt, Homo sapiens
ucuuuggguagauauguagcug

SEQ ID NO: 7606 - RNA, 22 nt, Homo sapiens
gauggcacuuaagagcaagagc

SEQ ID NO: 7607 - RNA, 22 nt, Homo sapiens
ugcagugugaaagagccugaca

SEQ ID NO: 7608 - RNA, 22 nt, Homo sapiens
agcagguguggcuuauccugaa

SEQ ID NO: 7609 - RNA, 22 nt, Homo sapiens
ggcagcaugggugccuuuguga

SEQ ID NO: 7610 - RNA, 22 nt, Homo sapiens
ggcaaggauguuuuucuggcaa

SEQ ID NO: 7611 - RNA, 22 nt, Homo sapiens
ccggcuguguggagaggccccu

SEQ ID NO: 7612 - RNA, 20 nt, Homo sapiens
acugcacuccaaccuuugug

SEQ ID NO: 7613 - RNA, 22 nt, Homo sapiens
auggcagugucuagggguguuu

SEQ ID NO: 7614 - RNA, 22 nt, Homo sapiens
guccaguacucuuuccugaaaa

SEQ ID NO: 7615 - RNA, 21 nt, Homo sapiens
uucuaaguaaauguuggacau

SEQ ID NO: 7616 - RNA, 22 nt, Homo sapiens
agaaugauccuucucagaggca

SEQ ID NO: 7617 - RNA, 22 nt, Homo sapiens
uggcuuuuaucuacucucaacu

SEQ ID NO: 7618 - RNA, 22 nt, Homo sapiens
cagugcacugggauuauaagug

SEQ ID NO: 7619 - RNA, 22 nt, Homo sapiens
uuagugcaaacucuucaaugcu

SEQ ID NO: 7620 - RNA, 22 nt, Homo sapiens
ugagacggagucuggcacuguc

SEQ ID NO: 7621 - RNA, 22 nt, Homo sapiens
ugaucuguguauauugaaccag

SEQ ID NO: 7622 - RNA, 22 nt, Homo sapiens
gggauguaugauauauguuggu

SEQ ID NO: 7623 - RNA, 22 nt, Homo sapiens
ugcauaggagcagggucuaugu

SEQ ID NO: 7624 - RNA, 22 nt, Homo sapiens
ucacauguguaugagcuuugau

SEQ ID NO: 7625 - RNA, 22 nt, Homo sapiens
acucuguugucuggccuuccug

SEQ ID NO: 7626 - RNA, 18 nt, Homo sapiens
uguugguguucacucacu

SEQ ID NO: 7627 - RNA, 22 nt, Homo sapiens
aucagugcagugggaacuagaa

SEQ ID NO: 7628 - RNA, 22 nt, Homo sapiens
auacuggcuuuccaauugugau

SEQ ID NO: 7629 - RNA, 22 nt, Homo sapiens
ugucauucaggaaauucuaagu

SEQ ID NO: 7630 - RNA, 21 nt, Homo sapiens
agucauaggaguacauaaugc

SEQ ID NO: 7631 - RNA, 22 nt, Homo sapiens
auagcagcagcuaguagugaua

SEQ ID NO: 7632 - RNA, 22 nt, Homo sapiens
aagcuagugagacagugguacu

SEQ ID NO: 7633 - RNA, 22 nt, Homo sapiens
auccugagacuuugcugaaguu

SEQ ID NO: 7634 - RNA, 22 nt, Homo sapiens
acugcacuccagccuucgugac

SEQ ID NO: 7635 - RNA, 22 nt, Homo sapiens
uuuaaggcaggucuggugguga

SEQ ID NO: 7636 - RNA, 22 nt, Homo sapiens
uccacaauggcugaacuagauu

SEQ ID NO: 7637 - RNA, 22 nt, Homo sapiens
gggcuagaauccgcgucucuug

SEQ ID NO: 7638 - RNA, 18 nt, Homo sapiens
gacagugugaagauuccu

SEQ ID NO: 7639 - RNA, 20 nt, Homo sapiens
uggcucuuugcugcuaaagu

SEQ ID NO: 7640 - RNA, 22 nt, Homo sapiens
augcagguguuuugcacugagu

SEQ ID NO: 7641 - RNA, 22 nt, Homo sapiens
aucauagcucacugcagccucg

SEQ ID NO: 7642 - RNA, 22 nt, Homo sapiens
uuaccuuuuuaagacagguuag

SEQ ID NO: 7643 - RNA, 22 nt, Homo sapiens
uugcaaagaccucuucacuucc

SEQ ID NO: 7644 - RNA, 22 nt, Homo sapiens
ugaauauguuucuaaaagugca

SEQ ID NO: 7645 - RNA, 22 nt, Homo sapiens
cacauguucaggagcacuuaga

SEQ ID NO: 7646 - RNA, 22 nt, Homo sapiens
uuaccaguggugcuguaaacuu

SEQ ID NO: 7647 - RNA, 22 nt, Homo sapiens
acccugucaaaacggaccaauc

SEQ ID NO: 7648 - RNA, 22 nt, Homo sapiens
ucuguggucagcauccgccacu

SEQ ID NO: 7649 - RNA, 22 nt, Homo sapiens
gcaguguugugauccaggucuu

SEQ ID NO: 7650 - RNA, 22 nt, Homo sapiens
uuugagcaugcagauugccagg

SEQ ID NO: 7651 - RNA, 22 nt, Homo sapiens
uuucuauguugaccagucuaga

SEQ ID NO: 7652 - RNA, 22 nt, Homo sapiens
cagcaaaucauccuauuugagc

SEQ ID NO: 7653 - RNA, 22 nt, Homo sapiens
ucugugguucuagcuacuuugg

SEQ ID NO: 7654 - RNA, 18 nt, Homo sapiens
augaacucaucauuuuua

SEQ ID NO: 7655 - RNA, 19 nt, Homo sapiens
cagguagugugcugacaug

SEQ ID NO: 7656 - RNA, 22 nt, Homo sapiens
uuuaaaguuagaaggaaagggc

SEQ ID NO: 7657 - RNA, 22 nt, Homo sapiens
cuggaaagcaaagggugcauug

SEQ ID NO: 7658 - RNA, 22 nt, Homo sapiens
gugcaguuugaaaguagaaaca

SEQ ID NO: 7659 - RNA, 22 nt, Homo sapiens
gaccuuguagaaucucaugauu

SEQ ID NO: 7660 - RNA, 21 nt, Homo sapiens
aaugguguugccaacaaggug

SEQ ID NO: 7661 - RNA, 22 nt, Homo sapiens
aucuguguuuaaggucccagaa

SEQ ID NO: 7662 - RNA, 22 nt, Homo sapiens
ucacugaaaccgccuccaccuc

SEQ ID NO: 7663 - RNA, 22 nt, Homo sapiens
uugauauguggaauauuuaucu

SEQ ID NO: 7664 - RNA, 22 nt, Homo sapiens
auuuugcauugcuguaaaggaa

SEQ ID NO: 7665 - RNA, 22 nt, Homo sapiens
uuaacaguuaauucuuuggcaa

SEQ ID NO: 7666 - RNA, 22 nt, Homo sapiens
guuacugucuuccugauugcuu

SEQ ID NO: 7667 - RNA, 20 nt, Homo sapiens
aucaccacagcucguucaug

SEQ ID NO: 7668 - RNA, 22 nt, Homo sapiens
uaaggaacucugauaucuggaa

SEQ ID NO: 7669 - RNA, 22 nt, Homo sapiens
auugaacuuuugucacugacau

SEQ ID NO: 7670 - RNA, 22 nt, Homo sapiens
aaucuguagaaggugcacauuc

SEQ ID NO: 7671 - RNA, 22 nt, Homo sapiens
uaauugaaugcagacaccaggg

SEQ ID NO: 7672 - RNA, 21 nt, Homo sapiens
agcuuguguguaucacagugu

SEQ ID NO: 7673 - RNA, 22 nt, Homo sapiens
ucacacuguuuugauuauuaua

SEQ ID NO: 7674 - RNA, 22 nt, Homo sapiens
aguagcacaugccacccugucu

SEQ ID NO: 7675 - RNA, 22 nt, Homo sapiens
gagugcaauggugccaucucgg

SEQ ID NO: 7676 - RNA, 22 nt, Homo sapiens
auguuauguuaaugauaaugga

SEQ ID NO: 7677 - RNA, 22 nt, Homo sapiens
ucacaguucagcauggcugagg

SEQ ID NO: 7678 - RNA, 22 nt, Homo sapiens
ucucaaguaacugggacaauaa

SEQ ID NO: 7679 - RNA, 22 nt, Homo sapiens
gaaaucucuacuauuuugaucu

SEQ ID NO: 7680 - RNA, 22 nt, Homo sapiens
auugcucagucagggagcucgg

SEQ ID NO: 7681 - RNA, 22 nt, Homo sapiens
aaacugucuucugacaguuucc

SEQ ID NO: 7682 - RNA, 22 nt, Homo sapiens
auagaucuauuuauguaucccu

SEQ ID NO: 7683 - RNA, 22 nt, Homo sapiens
acuacuucuaaguuuuggaaga

SEQ ID NO: 7684 - RNA, 22 nt, Homo sapiens
auuauaugucaucacagacacc

SEQ ID NO: 7685 - RNA, 22 nt, Homo sapiens
ucuuuggguguauuucacagcc

SEQ ID NO: 7686 - RNA, 20 nt, Homo sapiens
acccucuaggaugauuucuu

SEQ ID NO: 7687 - RNA, 22 nt, Homo sapiens
uugauaucugaugccuauggaa

SEQ ID NO: 7688 - RNA, 22 nt, Homo sapiens
aaauugcauugagcugcuuauu

SEQ ID NO: 7689 - RNA, 19 nt, Homo sapiens
gcucaccuugcugcuccag

SEQ ID NO: 7690 - RNA, 22 nt, Homo sapiens
uuaaucacagcugaacucaaac

SEQ ID NO: 7691 - RNA, 22 nt, Homo sapiens
cuggcagugcuuguuauccugg

SEQ ID NO: 7692 - RNA, 22 nt, Homo sapiens
uugugguuuuagcacuguggau

SEQ ID NO: 7693 - RNA, 22 nt, Homo sapiens
aacugccucugacauaggcagg

SEQ ID NO: 7694 - RNA, 22 nt, Homo sapiens
augagaaucauuucagcuugua

SEQ ID NO: 7695 - RNA, 20 nt, Homo sapiens
ugcugcacuuaagcaugggc

SEQ ID NO: 7696 - RNA, 21 nt, Homo sapiens
agcuaaauuggaaauuucugu

SEQ ID NO: 7697 - RNA, 22 nt, Homo sapiens
auuaagugaaugaaguuguucc

SEQ ID NO: 7698 - RNA, 22 nt, Homo sapiens
gugcaugucugugacgacccug

SEQ ID NO: 7699 - RNA, 20 nt, Homo sapiens
aaaggcugugagaacgagau

SEQ ID NO: 7700 - RNA, 22 nt, Homo sapiens
ugagaacugccuguauuuaucu

SEQ ID NO: 7701 - RNA, 22 nt, Homo sapiens
agcugcaaagggagagaugauu

SEQ ID NO: 7702 - RNA, 16 nt, Homo sapiens
ugaacagagaggauuc

SEQ ID NO: 7703 - RNA, 21 nt, Homo sapiens
ugcuccauuuucuagccugaa

SEQ ID NO: 7704 - RNA, 22 nt, Homo sapiens
ggcauguguggguuauuaaaga

SEQ ID NO: 7705 - RNA, 22 nt, Homo sapiens
ugcaaauguuaggugucauuau

SEQ ID NO: 7706 - RNA, 22 nt, Homo sapiens
uuaagcaguggauuagaauuuu

SEQ ID NO: 7707 - RNA, 22 nt, Homo sapiens
gccuaaaguagugguuuaggcu

SEQ ID NO: 7708 - RNA, 22 nt, Homo sapiens
aaugggacugacgccucccaga

SEQ ID NO: 7709 - RNA, 20 nt, Homo sapiens
uaucuacuugcaaaugccau

SEQ ID NO: 7710 - RNA, 20 nt, Homo sapiens
ugccugacacucuuugcuuc

SEQ ID NO: 7711 - RNA, 18 nt, Homo sapiens
aaacagugucucuuucug

SEQ ID NO: 7712 - RNA, 22 nt, Homo sapiens
uauggucuuugagaggugacug

SEQ ID NO: 7713 - RNA, 22 nt, Homo sapiens
uugugaagaaaccagaaaaguu

SEQ ID NO: 7714 - RNA, 22 nt, Homo sapiens
aagagcucucuguagcauguga

SEQ ID NO: 7715 - RNA, 22 nt, Homo sapiens
ggaaaguccuucuguaggcucc

SEQ ID NO: 7716 - RNA, 19 nt, Homo sapiens
acaguaccuggcaugaggu

SEQ ID NO: 7717 - RNA, 22 nt, Homo sapiens
acauggcuuaugaauuuggaga

SEQ ID NO: 7718 - RNA, 23 nt, Homo sapiens
ucacaguggcugcuuaauuguga

SEQ ID NO: 7719 - RNA, 22 nt, Homo sapiens
augagacauuaaaguguguuug

SEQ ID NO: 7720 - RNA, 22 nt, Homo sapiens
acugcacuccagccugcuggca

SEQ ID NO: 7721 - RNA, 22 nt, Homo sapiens
cucuuugaguuccuccuggugu

SEQ ID NO: 7722 - RNA, 22 nt, Homo sapiens
uugaccuggagaguacuuugac

SEQ ID NO: 7723 - RNA, 22 nt, Homo sapiens
aauaaaguaggaggugaggaaa

SEQ ID NO: 7724 - RNA, 23 nt, Homo sapiens
agguuaugauuauagagcgagga

SEQ ID NO: 7725 - RNA, 22 nt, Homo sapiens
ugccaugaaguaauggcaaaaa

SEQ ID NO: 7726 - RNA, 22 nt, Homo sapiens
uugcuuuguuacugcaguuucc

SEQ ID NO: 7727 - RNA, 22 nt, Homo sapiens
ucacuagaucaagggagagaaa

SEQ ID NO: 7728 - RNA, 22 nt, Homo sapiens
ucagcaaugaccuaagcaaaua

SEQ ID NO: 7729 - RNA, 22 nt, Homo sapiens
auacaguaaugucuuaggcugu

SEQ ID NO: 7730 - RNA, 22 nt, Homo sapiens
ugagagacauuuguuguagagu

SEQ ID NO: 7731 - RNA, 22 nt, Homo sapiens
agucaaggaggccuuucagaug

SEQ ID NO: 7732 - RNA, 20 nt, Homo sapiens
ucacagucacacauaauccu

SEQ ID NO: 7733 - RNA, 22 nt, Homo sapiens
uuaguaucauccuucugcauuc

SEQ ID NO: 7734 - RNA, 22 nt, Homo sapiens
caguacaauguggaaaaggagu

SEQ ID NO: 7735 - RNA, 22 nt, Homo sapiens
ugucuggaaggguggccuccug

SEQ ID NO: 7736 - RNA, 22 nt, Homo sapiens
uuggcaacauagugagaccccc

SEQ ID NO: 7737 - RNA, 22 nt, Homo sapiens
gucguggagcucacagugugcc

SEQ ID NO: 7738 - RNA, 22 nt, Homo sapiens
cuguucaaauuguuugugaagu

SEQ ID NO: 7739 - RNA, 20 nt, Homo sapiens
guucccuguaggugugcgga

SEQ ID NO: 7740 - RNA, 22 nt, Homo sapiens
uggugcccuguccuucuguggc

SEQ ID NO: 7741 - RNA, 22 nt, Homo sapiens
acaucauugggggcuacaggug

SEQ ID NO: 7742 - RNA, 22 nt, Homo sapiens
uggguagugucagcugauccau

SEQ ID NO: 7743 - RNA, 22 nt, Homo sapiens
auuggcuuuugaaagucugcga

SEQ ID NO: 7744 - RNA, 22 nt, Homo sapiens
agucacagguucuugggauuag

SEQ ID NO: 7745 - RNA, 22 nt, Homo sapiens
uugauauguuguuggauucacu

SEQ ID NO: 7746 - RNA, 22 nt, Homo sapiens
uagguaggauagucuuuauuuu

SEQ ID NO: 7747 - RNA, 22 nt, Homo sapiens
ggacaaaguauuuucaaaugua

SEQ ID NO: 7748 - RNA, 19 nt, Homo sapiens
ugcaaagucuuuuccuauu

SEQ ID NO: 7749 - RNA, 22 nt, Homo sapiens
uucagaugcacacuguagucua

SEQ ID NO: 7750 - RNA, 22 nt, Homo sapiens
uaaggcaaguuuuuaguggaca

SEQ ID NO: 7751 - RNA, 22 nt, Homo sapiens
ggagugucccaaucucagcuca

SEQ ID NO: 7752 - RNA, 22 nt, Homo sapiens
ggagaucuuguuaaaguacaga

SEQ ID NO: 7753 - RNA, 22 nt, Homo sapiens
ugccaacugguuucuuuuaguu

SEQ ID NO: 7754 - RNA, 22 nt, Homo sapiens
cagugguuuucaacccugguug

SEQ ID NO: 7755 - RNA, 22 nt, Homo sapiens
uugauagaucagggauuugauu

SEQ ID NO: 7756 - RNA, 19 nt, Homo sapiens
aucaaacugcucuuugagg

SEQ ID NO: 7757 - RNA, 22 nt, Homo sapiens
uuggcgacugcugcuaaucagg

SEQ ID NO: 7758 - RNA, 22 nt, Homo sapiens
ucuggcaagagccgagggcagu

SEQ ID NO: 7759 - RNA, 22 nt, Homo sapiens
aggcuuguuuuacuaacuggua

SEQ ID NO: 7760 - RNA, 22 nt, Homo sapiens
ucugucacugaaucccugucac

SEQ ID NO: 7761 - RNA, 21 nt, Homo sapiens
uucuucaggcagaaggauuau

SEQ ID NO: 7762 - RNA, 22 nt, Homo sapiens
gcuagcauucaaaugugcagcc

SEQ ID NO: 7763 - RNA, 22 nt, Homo sapiens
gcagaguauagagggcugggcc

SEQ ID NO: 7764 - RNA, 22 nt, Homo sapiens
acugugcuguuuuaauuauuga

SEQ ID NO: 7765 - RNA, 22 nt, Homo sapiens
auuuagcaauggagguagugua

SEQ ID NO: 7766 - RNA, 22 nt, Homo sapiens
gucucuuguuaucauuucugag

SEQ ID NO: 7767 - RNA, 22 nt, Homo sapiens
uagcagaauaacuugccagccu

SEQ ID NO: 7768 - RNA, 22 nt, Homo sapiens
cuucaugagacuuuuggaaggc

SEQ ID NO: 7769 - RNA, 22 nt, Homo sapiens
uugaggccugauaacacacuga

SEQ ID NO: 7770 - RNA, 21 nt, Homo sapiens
gccaguguggcaauuuuucaa

SEQ ID NO: 7771 - RNA, 22 nt, Homo sapiens
cagggcaugugggucuauuggc

SEQ ID NO: 7772 - RNA, 21 nt, Homo sapiens
gcaaaggaauugccuaagcuu

SEQ ID NO: 7773 - RNA, 22 nt, Homo sapiens
agcauuacaugguacagagaag

SEQ ID NO: 7774 - RNA, 22 nt, Homo sapiens
uuuggcuuuuguaauaacugcc

SEQ ID NO: 7775 - RNA, 22 nt, Homo sapiens
uagguaguuuucccguauccaa

SEQ ID NO: 7776 - RNA, 22 nt, Homo sapiens
caacacagugaaacccgucucu

SEQ ID NO: 7777 - RNA, 22 nt, Homo sapiens
acugcacuccuccuugggugac

SEQ ID NO: 7778 - RNA, 22 nt, Homo sapiens
uggcagacaaauuugagcauau

SEQ ID NO: 7779 - RNA, 22 nt, Homo sapiens
gugacugggaguggugaagaua

SEQ ID NO: 7780 - RNA, 22 nt, Homo sapiens
aaguaauugagguuuuugcugu

SEQ ID NO: 7781 - RNA, 22 nt, Homo sapiens
uuuaaacugucuuggguuugga

SEQ ID NO: 7782 - RNA, 22 nt, Homo sapiens
uagcugaucuuuuaaagaauga

SEQ ID NO: 7783 - RNA, 22 nt, Homo sapiens
gaccaaagaggcaggcauuaga

SEQ ID NO: 7784 - RNA, 22 nt, Homo sapiens
guuauguaucuugauugggugg

SEQ ID NO: 7785 - RNA, 22 nt, Homo sapiens
gauauguacagcucucuaggau

SEQ ID NO: 7786 - RNA, 23 nt, Homo sapiens
aguggucuccugggcccagcugu

SEQ ID NO: 7787 - RNA, 18 nt, Homo sapiens
uuucaggguggacaugag

SEQ ID NO: 7788 - RNA, 16 nt, Homo sapiens
uacauuuguuacaugg

SEQ ID NO: 7789 - RNA, 22 nt, Homo sapiens
ugaaauguaaguugucuagucu

SEQ ID NO: 7790 - RNA, 22 nt, Homo sapiens
auacaugugucauguugguuug

SEQ ID NO: 7791 - RNA, 22 nt, Homo sapiens
aacagauugcugagccccaccc

SEQ ID NO: 7792 - RNA, 22 nt, Homo sapiens
ugauugacauucuuuggaguau

SEQ ID NO: 7793 - RNA, 22 nt, Homo sapiens
ucugagguuaaauuuuauaguu

SEQ ID NO: 7794 - RNA, 22 nt, Homo sapiens
uucccaguuggggaaagcgacc

SEQ ID NO: 7795 - RNA, 22 nt, Homo sapiens
cuugagcuugagauccuuucug

SEQ ID NO: 7796 - RNA, 22 nt, Homo sapiens
ucuuaguuugggguggggauag

SEQ ID NO: 7797 - RNA, 22 nt, Homo sapiens
aacagcacacccgcugcuucca

SEQ ID NO: 7798 - RNA, 21 nt, Homo sapiens
uguuaacaugcagauuacugg

SEQ ID NO: 7799 - RNA, 22 nt, Homo sapiens
aaucacagccagcuuccgcuau

SEQ ID NO: 7800 - RNA, 22 nt, Homo sapiens
cuaaggcaguagccugaauaau

SEQ ID NO: 7801 - RNA, 22 nt, Homo sapiens
aucaagcuggcauauguaguuc

SEQ ID NO: 7802 - RNA, 22 nt, Homo sapiens
auuggugaccugcggcaguaug

SEQ ID NO: 7803 - RNA, 22 nt, Homo sapiens
uuaggcuaguugauauaguuug

SEQ ID NO: 7804 - RNA, 22 nt, Homo sapiens
aauuaguuggcugggugcggug

SEQ ID NO: 7805 - RNA, 22 nt, Homo sapiens
auggcguguggcuuggaggcug

SEQ ID NO: 7806 - RNA, 23 nt, Homo sapiens
uagaucaucaaguuuacugugcu

SEQ ID NO: 7807 - RNA, 20 nt, Homo sapiens
auucauggaggagcaauugg

SEQ ID NO: 7808 - RNA, 22 nt, Homo sapiens
ugguccuuuccauuggagacac

SEQ ID NO: 7809 - RNA, 22 nt, Homo sapiens
gaaagcugguauagauacauua

SEQ ID NO: 7810 - RNA, 18 nt, Homo sapiens
acaucccaugcuggggug

SEQ ID NO: 7811 - RNA, 22 nt, Homo sapiens
gauugguugaaaguagaauacu

SEQ ID NO: 7812 - RNA, 22 nt, Homo sapiens
uaagccaccgugccuggccuaa

SEQ ID NO: 7813 - RNA, 22 nt, Homo sapiens
ucgcagcucacuggagccucga

SEQ ID NO: 7814 - RNA, 22 nt, Homo sapiens
uuagaacaguguuugccucgcu

SEQ ID NO: 7815 - RNA, 22 nt, Homo sapiens
ugacaggagauuaugugauguu

SEQ ID NO: 7816 - RNA, 22 nt, Homo sapiens
agaugcauugguggcauauuca

SEQ ID NO: 7817 - RNA, 22 nt, Homo sapiens
aucccuuucucuggcuaggggg

SEQ ID NO: 7818 - RNA, 22 nt, Homo sapiens
caccuguagucccagcugaggc

SEQ ID NO: 7819 - RNA, 18 nt, Homo sapiens
gacaguguggcaauuccu

SEQ ID NO: 7820 - RNA, 22 nt, Homo sapiens
uucaagucaaggaaagaggucu

SEQ ID NO: 7821 - RNA, 18 nt, Homo sapiens
guauuccagccugaguga

SEQ ID NO: 7822 - RNA, 16 nt, Homo sapiens
agcagguguuagguga

SEQ ID NO: 7823 - RNA, 22 nt, Homo sapiens
gugguaggaaagugcaaaugua

SEQ ID NO: 7824 - RNA, 22 nt, Homo sapiens
uguugcacuccauccugggcga

SEQ ID NO: 7825 - RNA, 22 nt, Homo sapiens
aaaugcacagaaaggaugugga

SEQ ID NO: 7826 - RNA, 22 nt, Homo sapiens
auuagguuguugcaaaaguaau

SEQ ID NO: 7827 - RNA, 20 nt, Homo sapiens
auagcagcaugauuuauaau

SEQ ID NO: 7828 - RNA, 22 nt, Homo sapiens
uggcaugcauuguggguaauua

SEQ ID NO: 7829 - RNA, 22 nt, Homo sapiens
aaaagugguguuguuucuaaau

SEQ ID NO: 7830 - RNA, 22 nt, Homo sapiens
auacaaggaaugaagagauuug

SEQ ID NO: 7831 - RNA, 22 nt, Homo sapiens
guggguaaaucucuguucgagg

SEQ ID NO: 7832 - RNA, 22 nt, Homo sapiens
uuugagcauuagggcaaaggca

SEQ ID NO: 7833 - RNA, 22 nt, Homo sapiens
ugauuugucucucagcccuacu

SEQ ID NO: 7834 - RNA, 22 nt, Homo sapiens
guucaucagggacacugguuug

SEQ ID NO: 7835 - RNA, 22 nt, Homo sapiens
uuggacaagauugcagagaauu

SEQ ID NO: 7836 - RNA, 22 nt, Homo sapiens
ugugucuacugagaugaucaug

SEQ ID NO: 7837 - RNA, 20 nt, Homo sapiens
uaguggcaugcaccuguagc

SEQ ID NO: 7838 - RNA, 22 nt, Homo sapiens
acccugucaaaauggaccaauc

SEQ ID NO: 7839 - RNA, 22 nt, Homo sapiens
uuggauuguuucuagauugggg

SEQ ID NO: 7840 - RNA, 22 nt, Homo sapiens
aagagagccagcugguauauuu

SEQ ID NO: 7841 - RNA, 22 nt, Homo sapiens
cugaaaugaauuauuuucuuuc

SEQ ID NO: 7842 - RNA, 22 nt, Homo sapiens
uggagugaaaacacacuaaucu

SEQ ID NO: 7843 - RNA, 22 nt, Homo sapiens
auugacuugauauauagcugau

SEQ ID NO: 7844 - RNA, 18 nt, Homo sapiens
ugaaacacauuuuuuccu

SEQ ID NO: 7845 - RNA, 22 nt, Homo sapiens
uguuuguuugauaugggauaaa

SEQ ID NO: 7846 - RNA, 22 nt, Homo sapiens
guacaggugcaggaugggcagg

SEQ ID NO: 7847 - RNA, 22 nt, Homo sapiens
ugcaaugucuucugaggggagc

SEQ ID NO: 7848 - RNA, 22 nt, Homo sapiens
agguaaguauguuauuacuuuu

SEQ ID NO: 7849 - RNA, 22 nt, Homo sapiens
augugaccaucucuccacuaau

SEQ ID NO: 7850 - RNA, 22 nt, Homo sapiens
guguuugguugauagagccacu

SEQ ID NO: 7851 - RNA, 22 nt, Homo sapiens
guauccugaaguucucagcacu

SEQ ID NO: 7852 - RNA, 22 nt, Homo sapiens
gagaugugugugauuauauaau

SEQ ID NO: 7853 - RNA, 20 nt, Homo sapiens
acugcacuucagccugcugg

SEQ ID NO: 7854 - RNA, 22 nt, Homo sapiens
gagcucaccuuaccucuggagc

SEQ ID NO: 7855 - RNA, 22 nt, Homo sapiens
uaagugaauauggacaguuagc

SEQ ID NO: 7856 - RNA, 16 nt, Homo sapiens
cuaaaaugucuacuug

SEQ ID NO: 7857 - RNA, 22 nt, Homo sapiens
ugucuuugguucaggcaaggag

SEQ ID NO: 7858 - RNA, 22 nt, Homo sapiens
aauaaagucugaagugugcuua

SEQ ID NO: 7859 - RNA, 22 nt, Homo sapiens
gccaagaucugaauaauuaaga

SEQ ID NO: 7860 - RNA, 22 nt, Homo sapiens
ugcugcuguuaucauuuuacca

SEQ ID NO: 7861 - RNA, 22 nt, Homo sapiens
uuaguagagacgagcguuccac

SEQ ID NO: 7862 - RNA, 22 nt, Homo sapiens
uacauugucauauucucucucu

SEQ ID NO: 7863 - RNA, 20 nt, Homo sapiens
ugcaaguugccuuuggaggc

SEQ ID NO: 7864 - RNA, 22 nt, Homo sapiens
auuagaugguuauaggugugag

SEQ ID NO: 7865 - RNA, 22 nt, Homo sapiens
auggcuuucaggacguggcgag

SEQ ID NO: 7866 - RNA, 22 nt, Homo sapiens
agguagguugagaugggcauca

SEQ ID NO: 7867 - RNA, 22 nt, Homo sapiens
ugaauguuguugguugagauau

SEQ ID NO: 7868 - RNA, 22 nt, Homo sapiens
aucagagccugugugcccugaa

SEQ ID NO: 7869 - RNA, 16 nt, Homo sapiens
agcuggaauuacaggc

SEQ ID NO: 7870 - RNA, 22 nt, Homo sapiens
uaaacugucuuuggagcuuugc

SEQ ID NO: 7871 - RNA, 22 nt, Homo sapiens
guagaaagcauuucagauuugc

SEQ ID NO: 7872 - RNA, 22 nt, Homo sapiens
auagcacauggcauccucucuu

SEQ ID NO: 7873 - RNA, 22 nt, Homo sapiens
cugacuuuagaacccaaaaagu

SEQ ID NO: 7874 - RNA, 22 nt, Homo sapiens
aucccuguaguaauauucuagc

SEQ ID NO: 7875 - RNA, 22 nt, Homo sapiens
aacucugucuccuucaaguuca

SEQ ID NO: 7876 - RNA, 22 nt, Homo sapiens
uccugagagcagacccucuaua

SEQ ID NO: 7877 - RNA, 22 nt, Homo sapiens
ucagcagugugaaaauggacua

SEQ ID NO: 7878 - RNA, 22 nt, Homo sapiens
ugaguauguuuaaugugacaau

SEQ ID NO: 7879 - RNA, 22 nt, Homo sapiens
gugacugcauauaaguguaugu

SEQ ID NO: 7880 - RNA, 22 nt, Homo sapiens
gagcccauuucacuuguccagc

SEQ ID NO: 7881 - RNA, 22 nt, Homo sapiens
uuugcacuuuaauauaauguga

SEQ ID NO: 7882 - RNA, 22 nt, Homo sapiens
gagcuuguggucuucguguuau

SEQ ID NO: 7883 - RNA, 22 nt, Homo sapiens
cauugcuuuuggugguuuagac

SEQ ID NO: 7884 - RNA, 22 nt, Homo sapiens
gcaaaguguuuuccaacuuggu

SEQ ID NO: 7885 - RNA, 22 nt, Homo sapiens
ugaggagugaacuauuucugau

SEQ ID NO: 7886 - RNA, 21 nt, Homo sapiens
cuuuaugcuguguuagaaaag

SEQ ID NO: 7887 - RNA, 22 nt, Homo sapiens
agcagcuuugcauggccuguga

SEQ ID NO: 7888 - RNA, 23 nt, Homo sapiens
uagcaacaguuggaggugaggua

SEQ ID NO: 7889 - RNA, 22 nt, Homo sapiens
auacaugugccauguucgugug

SEQ ID NO: 7890 - RNA, 16 nt, Homo sapiens
uuguggcuuuugcaca

SEQ ID NO: 7891 - RNA, 22 nt, Homo sapiens
uaagagcuaggauuuuaaauca

SEQ ID NO: 7892 - RNA, 22 nt, Homo sapiens
uuuggcccugagggauggcaua

SEQ ID NO: 7893 - RNA, 22 nt, Homo sapiens
gugauugcauuaugaauauuau

SEQ ID NO: 7894 - RNA, 22 nt, Homo sapiens
uugacaguggcuuaaauugguu

SEQ ID NO: 7895 - RNA, 20 nt, Homo sapiens
agacagcugcagcccacauc

SEQ ID NO: 7896 - RNA, 22 nt, Homo sapiens
gaaugcuaagcaugugggaguu

SEQ ID NO: 7897 - RNA, 22 nt, Homo sapiens
ugagguaucauugcccaggcug

SEQ ID NO: 7898 - RNA, 22 nt, Homo sapiens
acaccaugucuguuucugguuu

SEQ ID NO: 7899 - RNA, 22 nt, Homo sapiens
agccaguuuggcuaauuuuggc

SEQ ID NO: 7900 - RNA, 22 nt, Homo sapiens
auagaggacugaggugaucuuu

SEQ ID NO: 7901 - RNA, 20 nt, Homo sapiens
aagcagacauuuggaugaaa

SEQ ID NO: 7902 - RNA, 22 nt, Homo sapiens
uugaucaauagaauacaacaga

SEQ ID NO: 7903 - RNA, 22 nt, Homo sapiens
auauugcuugaggccaggaggu

SEQ ID NO: 7904 - RNA, 19 nt, Homo sapiens
aaaugugcacuguuuucca

SEQ ID NO: 7905 - RNA, 22 nt, Homo sapiens
uggcaugucagguuucuggguu

SEQ ID NO: 7906 - RNA, 20 nt, Homo sapiens
ugggaaauguccaggacaua

SEQ ID NO: 7907 - RNA, 22 nt, Homo sapiens
accagucucagguaugucuuua

SEQ ID NO: 7908 - RNA, 22 nt, Homo sapiens
gcgcagugggcugugccaucca

SEQ ID NO: 7909 - RNA, 22 nt, Homo sapiens
auauccguacaguggaauauua

SEQ ID NO: 7910 - RNA, 21 nt, Homo sapiens
auugcccaaaguggaggggaa

SEQ ID NO: 7911 - RNA, 22 nt, Homo sapiens
gaugguuuuucuccgauuuaua

SEQ ID NO: 7912 - RNA, 22 nt, Homo sapiens
uggcaguuuacagcuuuaggag

SEQ ID NO: 7913 - RNA, 22 nt, Homo sapiens
ucucauggcucacccugcauag

SEQ ID NO: 7914 - RNA, 22 nt, Homo sapiens
gcaugauuuuauaucuauguaa

SEQ ID NO: 7915 - RNA, 22 nt, Homo sapiens
gugaacaauguuuuauccuggg

SEQ ID NO: 7916 - RNA, 22 nt, Homo sapiens
uggaauguagcguugacacgag

SEQ ID NO: 7917 - RNA, 22 nt, Homo sapiens
uuucauagccuuugucgucuga

SEQ ID NO: 7918 - RNA, 22 nt, Homo sapiens
aaggcaagauacugguugcuga

SEQ ID NO: 7919 - RNA, 18 nt, Homo sapiens
uuucauugagugugauau

SEQ ID NO: 7920 - RNA, 22 nt, Homo sapiens
auacaguguucugggaagaagu

SEQ ID NO: 7921 - RNA, 22 nt, Homo sapiens
acccgguuagggggcaguggau

SEQ ID NO: 7922 - RNA, 22 nt, Homo sapiens
gugaaagauuaaaccagugugu

SEQ ID NO: 7923 - RNA, 22 nt, Homo sapiens
uauggcauuguuggugaugaua

SEQ ID NO: 7924 - RNA, 22 nt, Homo sapiens
caaaggcuucugaaacugcaga

SEQ ID NO: 7925 - RNA, 22 nt, Homo sapiens
gcugagcuaugccauauaugcc

SEQ ID NO: 7926 - RNA, 22 nt, Homo sapiens
ugccaugucauagguuaagccu

SEQ ID NO: 7927 - RNA, 22 nt, Homo sapiens
agagagcuuuugguugcccuaa

SEQ ID NO: 7928 - RNA, 22 nt, Homo sapiens
augccacuucucuaagucaugu

SEQ ID NO: 7929 - RNA, 22 nt, Homo sapiens
auuggucuauuaaaccuaaguu

SEQ ID NO: 7930 - RNA, 22 nt, Homo sapiens
ugaacucagcauccagggccaa

SEQ ID NO: 7931 - RNA, 23 nt, Homo sapiens
uagcacuuuuuacauauggacau

SEQ ID NO: 7932 - RNA, 19 nt, Homo sapiens
aagaugauguuugggcuaa

SEQ ID NO: 7933 - RNA, 22 nt, Homo sapiens
uuuaaugcugcccagucauggg

SEQ ID NO: 7934 - RNA, 20 nt, Homo sapiens
gugacacucguuaaccucug

SEQ ID NO: 7935 - RNA, 22 nt, Homo sapiens
uugcuccucugccaggaccugu

SEQ ID NO: 7936 - RNA, 22 nt, Homo sapiens
ugcagaaucccuucagauccga

SEQ ID NO: 7937 - RNA, 22 nt, Homo sapiens
augguguccuguuuccccagga

SEQ ID NO: 7938 - RNA, 22 nt, Homo sapiens
uaauacugcugugcuugaguug

SEQ ID NO: 7939 - RNA, 22 nt, Homo sapiens
uggaaugggauuggaaauuuug

SEQ ID NO: 7940 - RNA, 22 nt, Homo sapiens
ugaaaguaauugcaguuuuuac

SEQ ID NO: 7941 - RNA, 18 nt, Homo sapiens
gccaacauguaaacaggu

SEQ ID NO: 7942 - RNA, 22 nt, Homo sapiens
uucagggacuuuagacaagaga

SEQ ID NO: 7943 - RNA, 20 nt, Homo sapiens
ucuggccccucuaaaucuca

SEQ ID NO: 7944 - RNA, 22 nt, Homo sapiens
uaucauagucacuuccaguuug

SEQ ID NO: 7945 - RNA, 22 nt, Homo sapiens
ugugcacaacgugcagguuugu

SEQ ID NO: 7946 - RNA, 23 nt, Homo sapiens
uuaagcaacggcugcuuuucaga

SEQ ID NO: 7947 - RNA, 17 nt, Homo sapiens
uauugaccuuuguaugu

SEQ ID NO: 7948 - RNA, 22 nt, Homo sapiens
ucccuugagccuggcuucucac

SEQ ID NO: 7949 - RNA, 22 nt, Homo sapiens
ugaagaucuuaggagcugaggg

SEQ ID NO: 7950 - RNA, 22 nt, Homo sapiens
ugagaucgaguuucgcucuugu

SEQ ID NO: 7951 - RNA, 23 nt, Homo sapiens
ugacagucucccgauggcuaggc

SEQ ID NO: 7952 - RNA, 22 nt, Homo sapiens
gacucuguagacaaucacaucu

SEQ ID NO: 7953 - RNA, 17 nt, Homo sapiens
ggaagccuuugguuuaa

SEQ ID NO: 7954 - RNA, 22 nt, Homo sapiens
agcagcauuaguggaaucuugu

SEQ ID NO: 7955 - RNA, 22 nt, Homo sapiens
uuugugauugcacacucaagau

SEQ ID NO: 7956 - RNA, 22 nt, Homo sapiens
gggaggucauuguaaggucuua

SEQ ID NO: 7957 - RNA, 17 nt, Homo sapiens
acaugagacuggauucu

SEQ ID NO: 7958 - RNA, 22 nt, Homo sapiens
uucaguucugcucugaucuuag

SEQ ID NO: 7959 - RNA, 22 nt, Homo sapiens
auaacauccuuucuuaucguug

SEQ ID NO: 7960 - RNA, 22 nt, Homo sapiens
guguaaaucaaucuguugucuu

SEQ ID NO: 7961 - RNA, 22 nt, Homo sapiens
aaaccaccauuacuuuugcacc

SEQ ID NO: 7962 - RNA, 22 nt, Homo sapiens
ucuuaguuggaaugggauaagg

SEQ ID NO: 7963 - RNA, 23 nt, Homo sapiens
uagcuucucccagaccugcuccc

SEQ ID NO: 7964 - RNA, 22 nt, Homo sapiens
auagaguuagaaagaaauguuu

SEQ ID NO: 7965 - RNA, 21 nt, Homo sapiens
uauagcagcacgauuuauagu

SEQ ID NO: 7966 - RNA, 22 nt, Homo sapiens
auagcagugccccaaacuccug

SEQ ID NO: 7967 - RNA, 22 nt, Homo sapiens
uggcauguauuuuguguauuaa

SEQ ID NO: 7968 - RNA, 22 nt, Homo sapiens
uugcugagucuuucuagguugc

SEQ ID NO: 7969 - RNA, 22 nt, Homo sapiens
acaguacucugcucuuuugauu

SEQ ID NO: 7970 - RNA, 22 nt, Homo sapiens
cuccaugagauuguugaaguag

SEQ ID NO: 7971 - RNA, 22 nt, Homo sapiens
gugagggaugugaaaaagguca

SEQ ID NO: 7972 - RNA, 22 nt, Homo sapiens
ugagguuggggucagggcuagc

SEQ ID NO: 7973 - RNA, 22 nt, Homo sapiens
gauggaguugucgccugggcug

SEQ ID NO: 7974 - RNA, 22 nt, Homo sapiens
uccuuugguggagucuuuaggg

SEQ ID NO: 7975 - RNA, 22 nt, Homo sapiens
ugcauggaagggagggaaagag

SEQ ID NO: 7976 - RNA, 22 nt, Homo sapiens
uagugcugagauugagaagccc

SEQ ID NO: 7977 - RNA, 20 nt, Homo sapiens
ucaguauauuguuuccacag

SEQ ID NO: 7978 - RNA, 22 nt, Homo sapiens
cugagcuaguagcauuguguca

SEQ ID NO: 7979 - RNA, 22 nt, Homo sapiens
ugacuaguuuugcuguuguuau

SEQ ID NO: 7980 - RNA, 22 nt, Homo sapiens
guuguacuaccucucguauuag

SEQ ID NO: 7981 - RNA, 22 nt, Homo sapiens
gcuguugguaaaaaggacauga

SEQ ID NO: 7982 - RNA, 22 nt, Homo sapiens
augcuggugcuagaaacuggaa

SEQ ID NO: 7983 - RNA, 22 nt, Homo sapiens
gagcacugauuuauuuuugucu

SEQ ID NO: 7984 - RNA, 22 nt, Homo sapiens
uguuucuacugucucuguagua

SEQ ID NO: 7985 - RNA, 22 nt, Homo sapiens
caaauccucaccucaucaugaa

SEQ ID NO: 7986 - RNA, 17 nt, Homo sapiens
uagcucuauuucuagcc

SEQ ID NO: 7987 - RNA, 22 nt, Homo sapiens
ugagaucacgccacugcacucc

SEQ ID NO: 7988 - RNA, 20 nt, Homo sapiens
auaccacagacuggguaguu

SEQ ID NO: 7989 - RNA, 20 nt, Homo sapiens
uucuaguacuucuguuucca

SEQ ID NO: 7990 - RNA, 22 nt, Homo sapiens
uggaauguuauggcuuuaaucu

SEQ ID NO: 7991 - RNA, 22 nt, Homo sapiens
cuccauagucuucgaagaauga

SEQ ID NO: 7992 - RNA, 22 nt, Homo sapiens
uacaggcaccuggcuaauuuuu

SEQ ID NO: 7993 - RNA, 22 nt, Homo sapiens
gguauguagcaaaagaggugcu

SEQ ID NO: 7994 - RNA, 22 nt, Homo sapiens
uaacugcaaccucugccugcug

SEQ ID NO: 7995 - RNA, 22 nt, Homo sapiens
ugacaagauauggucuuaucaa

SEQ ID NO: 7996 - RNA, 20 nt, Homo sapiens
ucaaagacauggcugucaga

SEQ ID NO: 7997 - RNA, 22 nt, Homo sapiens
gugugauuguuaauuuuaggug

SEQ ID NO: 7998 - RNA, 22 nt, Homo sapiens
acaguguagugacugccaacuu

SEQ ID NO: 7999 - RNA, 22 nt, Homo sapiens
gauuugguguucuggcucaaga

SEQ ID NO: 8000 - RNA, 22 nt, Homo sapiens
ugacuugaggcucgcacaaguu

SEQ ID NO: 8001 - RNA, 22 nt, Homo sapiens
aggugcugacaggauagguuuc

SEQ ID NO: 8002 - RNA, 18 nt, Homo sapiens
gaguggugcuucccuugu

SEQ ID NO: 8003 - RNA, 20 nt, Homo sapiens
ugauauuuucugagcaggaa

SEQ ID NO: 8004 - RNA, 20 nt, Homo sapiens
ugagauccacgugaaguaug

SEQ ID NO: 8005 - RNA, 22 nt, Homo sapiens
uuagcaguggauggguggagaa

SEQ ID NO: 8006 - RNA, 22 nt, Homo sapiens
cugaggguagaaggaucacuug

SEQ ID NO: 8007 - RNA, 21 nt, Homo sapiens
uauagcagcacgauuuauaau

SEQ ID NO: 8008 - RNA, 22 nt, Homo sapiens
ugcaagaaucagccuaucauua

SEQ ID NO: 8009 - RNA, 22 nt, Homo sapiens
uagcugcaaaauauagacuucu

SEQ ID NO: 8010 - RNA, 22 nt, Homo sapiens
uuauguaggcuauagcucugca

SEQ ID NO: 8011 - RNA, 22 nt, Homo sapiens
gacucagaacuaaggguguuuc

SEQ ID NO: 8012 - RNA, 22 nt, Homo sapiens
uggcaaaauauuuugguuucug

SEQ ID NO: 8013 - RNA, 20 nt, Homo sapiens
ucucauggagggaaagagca

SEQ ID NO: 8014 - RNA, 22 nt, Homo sapiens
gccaagauuuaauucaucaguu

SEQ ID NO: 8015 - RNA, 22 nt, Homo sapiens
gagcaaugauugagccacugua

SEQ ID NO: 8016 - RNA, 22 nt, Homo sapiens
uucucaauggcaacuuguugcu

SEQ ID NO: 8017 - RNA, 22 nt, Homo sapiens
augaaagguauguuuucuguga

SEQ ID NO: 8018 - RNA, 22 nt, Homo sapiens
auugcacuccagccugcggaac

SEQ ID NO: 8019 - RNA, 22 nt, Homo sapiens
uucuuagucaaguuguauuuca

SEQ ID NO: 8020 - RNA, 22 nt, Homo sapiens
uguaaaucuuucacaguugaug

SEQ ID NO: 8021 - RNA, 22 nt, Homo sapiens
ggcaaaucugcaauuacuuuug

SEQ ID NO: 8022 - RNA, 22 nt, Homo sapiens
gacuacaacuucuauuauucag

SEQ ID NO: 8023 - RNA, 22 nt, Homo sapiens
cauggcuuuauuuucagcuucu

SEQ ID NO: 8024 - RNA, 22 nt, Homo sapiens
ugagguugaaggacauuuuuau

SEQ ID NO: 8025 - RNA, 22 nt, Homo sapiens
auacguacauaugcacauaugg

SEQ ID NO: 8026 - RNA, 22 nt, Homo sapiens
ugaugacucuguggccccaggc

SEQ ID NO: 8027 - RNA, 22 nt, Homo sapiens
gcuguuugccgccaucgcagac

SEQ ID NO: 8028 - RNA, 22 nt, Homo sapiens
aaagagaucuaugggcacuaug

SEQ ID NO: 8029 - RNA, 22 nt, Homo sapiens
auggauuuuggggccagaggca

SEQ ID NO: 8030 - RNA, 22 nt, Homo sapiens
uugacacuaauuauuauaggug

SEQ ID NO: 8031 - RNA, 22 nt, Homo sapiens
ugcauaugucuuuauaguagca

SEQ ID NO: 8032 - RNA, 22 nt, Homo sapiens
uggcaagagcaaaauguacagu

SEQ ID NO: 8033 - RNA, 22 nt, Homo sapiens
aagcuaggguuaauuuauuauu

SEQ ID NO: 8034 - RNA, 22 nt, Homo sapiens
ugaggugcagcaauccucaugu

SEQ ID NO: 8035 - RNA, 21 nt, Homo sapiens
uguuuuugcuguguaucucuc

SEQ ID NO: 8036 - RNA, 22 nt, Homo sapiens
cugagcucauuucuuuugcuac

SEQ ID NO: 8037 - RNA, 22 nt, Homo sapiens
aacauugaacuuggcacaccca

SEQ ID NO: 8038 - RNA, 21 nt, Homo sapiens
gucuuacagccagaugccucu

SEQ ID NO: 8039 - RNA, 22 nt, Homo sapiens
gauauguaguaguugaaaaaga

SEQ ID NO: 8040 - RNA, 22 nt, Homo sapiens
uggagagugagggccuccuuaa

SEQ ID NO: 8041 - RNA, 22 nt, Homo sapiens
gacccuguugggguuuagggcu

SEQ ID NO: 8042 - RNA, 22 nt, Homo sapiens
uguauacugucuaauauguugu

SEQ ID NO: 8043 - RNA, 22 nt, Homo sapiens
guguagagaaauagccugaagg

SEQ ID NO: 8044 - RNA, 20 nt, Homo sapiens
ucacccugacaucugcccag

SEQ ID NO: 8045 - RNA, 22 nt, Homo sapiens
uuaguaguaguuugcauuuacc

SEQ ID NO: 8046 - RNA, 17 nt, Homo sapiens
aaucagauuucugagga

SEQ ID NO: 8047 - RNA, 22 nt, Homo sapiens
gccccgggugaugcagccguca

SEQ ID NO: 8048 - RNA, 22 nt, Homo sapiens
uucccagugccaggcacuggga

SEQ ID NO: 8049 - RNA, 22 nt, Homo sapiens
gaagauguugcuuaccuuggag

SEQ ID NO: 8050 - RNA, 22 nt, Homo sapiens
auacacuggagcaaaccuggag

SEQ ID NO: 8051 - RNA, 22 nt, Homo sapiens
cuuuggucaauugcugugggga

SEQ ID NO: 8052 - RNA, 18 nt, Homo sapiens
guggagugucuuccugga

SEQ ID NO: 8053 - RNA, 22 nt, Homo sapiens
uugcaugcacaguucucaauag

SEQ ID NO: 8054 - RNA, 22 nt, Homo sapiens
aggcuagacuuugagaauuuuu

SEQ ID NO: 8055 - RNA, 22 nt, Homo sapiens
agcaucauaccaaucugguccu

SEQ ID NO: 8056 - RNA, 21 nt, Homo sapiens
acccucuaguuuucaacaggc

SEQ ID NO: 8057 - RNA, 22 nt, Homo sapiens
gagaucaucuaaucuggccucu

SEQ ID NO: 8058 - RNA, 22 nt, Homo sapiens
aucaccuggaguagcccguccc

SEQ ID NO: 8059 - RNA, 22 nt, Homo sapiens
ucaggcaccuuccucuuaucug

SEQ ID NO: 8060 - RNA, 22 nt, Homo sapiens
uggcaagagcugcauucaucug

SEQ ID NO: 8061 - RNA, 22 nt, Homo sapiens
uugcagcauucugguuccuggu

SEQ ID NO: 8062 - RNA, 22 nt, Homo sapiens
ucaggugccuuggcuaauuguu

SEQ ID NO: 8063 - RNA, 22 nt, Homo sapiens
uugcauagugcugagguucggg

SEQ ID NO: 8064 - RNA, 22 nt, Homo sapiens
uggacagacaagguuauagauc

SEQ ID NO: 8065 - RNA, 22 nt, Homo sapiens
ggagugucugugcuggucaaag

SEQ ID NO: 8066 - RNA, 22 nt, Homo sapiens
ggcagacuguggaguucuuucu

SEQ ID NO: 8067 - RNA, 22 nt, Homo sapiens
aauacugagaugugagguacua

SEQ ID NO: 8068 - RNA, 21 nt, Homo sapiens
uggucccauaagauuacaaug

SEQ ID NO: 8069 - RNA, 22 nt, Homo sapiens
uguaauggcagacuccggugga

SEQ ID NO: 8070 - RNA, 22 nt, Homo sapiens
agcccauguggcugaggcuucu

SEQ ID NO: 8071 - RNA, 22 nt, Homo sapiens
ugaacacagccugccucugcca

SEQ ID NO: 8072 - RNA, 22 nt, Homo sapiens
cugaaucauugcauuaucaagg

SEQ ID NO: 8073 - RNA, 22 nt, Homo sapiens
uuaaguguaaguggugugggac

SEQ ID NO: 8074 - RNA, 22 nt, Homo sapiens
ugacaagagaccccuccgcagg

SEQ ID NO: 8075 - RNA, 18 nt, Homo sapiens
gugagaaugacuguucug

SEQ ID NO: 8076 - RNA, 22 nt, Homo sapiens
agcuguaguuugguggauguaa

SEQ ID NO: 8077 - RNA, 22 nt, Homo sapiens
uaccaugcagguguauguuugu

SEQ ID NO: 8078 - RNA, 20 nt, Homo sapiens
uucuacagucacaggaagau

SEQ ID NO: 8079 - RNA, 22 nt, Homo sapiens
auggcacuguguauuuuucugu

SEQ ID NO: 8080 - RNA, 22 nt, Homo sapiens
acagauagcacuaagggaucug

SEQ ID NO: 8081 - RNA, 22 nt, Homo sapiens
auuuuugguugguaggcuauua

SEQ ID NO: 8082 - RNA, 22 nt, Homo sapiens
gagugcauugguggucaggugu

SEQ ID NO: 8083 - RNA, 20 nt, Homo sapiens
ugaaaucuucacuaagucuc

SEQ ID NO: 8084 - RNA, 18 nt, Homo sapiens
auugcacaccagccuggg

SEQ ID NO: 8085 - RNA, 23 nt, Homo sapiens
agaugcaucuggcugcgaggcaa

SEQ ID NO: 8086 - RNA, 22 nt, Homo sapiens
auugcuucugauuuuaaaugag

SEQ ID NO: 8087 - RNA, 22 nt, Homo sapiens
ugugcuugaaauucaguuuuga

SEQ ID NO: 8088 - RNA, 22 nt, Homo sapiens
cuugaccuauggaucuguuuuu

SEQ ID NO: 8089 - RNA, 22 nt, Homo sapiens
uucagcaaugacagccuauaua

SEQ ID NO: 8090 - RNA, 22 nt, Homo sapiens
aagggaauguuguggcugguuu

SEQ ID NO: 8091 - RNA, 22 nt, Homo sapiens
accgggauguacuuggcggguu

SEQ ID NO: 8092 - RNA, 22 nt, Homo sapiens
ugacuacauaaguaaucucaaa

SEQ ID NO: 8093 - RNA, 22 nt, Homo sapiens
augguauuuaacagucuuucua

SEQ ID NO: 8094 - RNA, 22 nt, Homo sapiens
ugagaguagggguugggauugg

SEQ ID NO: 8095 - RNA, 19 nt, Homo sapiens
gcaguauugaaggccaguc

SEQ ID NO: 8096 - RNA, 22 nt, Homo sapiens
gucugguuccugggagauuucu

SEQ ID NO: 8097 - RNA, 22 nt, Homo sapiens
aacuggucuuaugcaagcacua

SEQ ID NO: 8098 - RNA, 22 nt, Homo sapiens
uuguaaucaacacaucauuggg

SEQ ID NO: 8099 - RNA, 21 nt, Homo sapiens
gaccuguaguaagcauucaca

SEQ ID NO: 8100 - RNA, 22 nt, Homo sapiens
uuggcacugggaaaaugaccac

SEQ ID NO: 8101 - RNA, 22 nt, Homo sapiens
agcuguuguucucagaggcuuu

SEQ ID NO: 8102 - RNA, 22 nt, Homo sapiens
uugaaggaggugcucacucucg

SEQ ID NO: 8103 - RNA, 22 nt, Homo sapiens
cugggaucaguucuagucagaa

SEQ ID NO: 8104 - RNA, 22 nt, Homo sapiens
uuccguguaguugagcaguuuu

SEQ ID NO: 8105 - RNA, 22 nt, Homo sapiens
ugcauagcauauauuguagagu

SEQ ID NO: 8106 - RNA, 22 nt, Homo sapiens
aaggauuguaacaccaagguua

SEQ ID NO: 8107 - RNA, 22 nt, Homo sapiens
ucacaguugauugaaacacagc

SEQ ID NO: 8108 - RNA, 22 nt, Homo sapiens
uguuuguuugugauacgguaca

SEQ ID NO: 8109 - RNA, 22 nt, Homo sapiens
cagagguauugcaaaagccuag

SEQ ID NO: 8110 - RNA, 22 nt, Homo sapiens
aucuuuggucaucacagcuaga

SEQ ID NO: 8111 - RNA, 22 nt, Homo sapiens
augcagagaaaucuaaaauaug

SEQ ID NO: 8112 - RNA, 22 nt, Homo sapiens
acugcacuccagccucggugac

SEQ ID NO: 8113 - RNA, 23 nt, Homo sapiens
ugaauguuuauucucggugcaga

SEQ ID NO: 8114 - RNA, 22 nt, Homo sapiens
aauggcaguagauggaugggua

SEQ ID NO: 8115 - RNA, 22 nt, Homo sapiens
gagaacaguguuguauuuuuuc

SEQ ID NO: 8116 - RNA, 22 nt, Homo sapiens
cuauuagguuggggcgaaagua

SEQ ID NO: 8117 - RNA, 22 nt, Homo sapiens
uucccuuucugccuugaaucuu

SEQ ID NO: 8118 - RNA, 22 nt, Homo sapiens
ccuggguuacaggugugagcca

SEQ ID NO: 8119 - RNA, 22 nt, Homo sapiens
cucuuagauuagccauccuaau

SEQ ID NO: 8120 - RNA, 19 nt, Homo sapiens
caacccugcagagaaagga

SEQ ID NO: 8121 - RNA, 22 nt, Homo sapiens
augacuggaacagcaauuuaca

SEQ ID NO: 8122 - RNA, 22 nt, Homo sapiens
ucagugauugguuauuuuaggc

SEQ ID NO: 8123 - RNA, 22 nt, Homo sapiens
uuggccccuccaaaucucaugu

SEQ ID NO: 8124 - RNA, 22 nt, Homo sapiens
caucagauugagaucaucuaag

SEQ ID NO: 8125 - RNA, 22 nt, Homo sapiens
aucuuugcugagaugcauggca

SEQ ID NO: 8126 - RNA, 22 nt, Homo sapiens
uguagucauuuggaguccagcu

SEQ ID NO: 8127 - RNA, 22 nt, Homo sapiens
guagcagucacauagcagauug

SEQ ID NO: 8128 - RNA, 22 nt, Homo sapiens
uucagcuaccugggaugcugaa

SEQ ID NO: 8129 - RNA, 22 nt, Homo sapiens
aauccuguagauucuaauuccu

SEQ ID NO: 8130 - RNA, 22 nt, Homo sapiens
gcaguguucaaaucaugcccau

SEQ ID NO: 8131 - RNA, 22 nt, Homo sapiens
ugagauccaugcuauuugggcu

SEQ ID NO: 8132 - RNA, 22 nt, Homo sapiens
aagaugauguuguguuuucacu

SEQ ID NO: 8133 - RNA, 22 nt, Homo sapiens
ugaagagucuaaaucugucuuc

SEQ ID NO: 8134 - RNA, 22 nt, Homo sapiens
gugagauuaguucuggaccugg

SEQ ID NO: 8135 - RNA, 22 nt, Homo sapiens
uacugcacuccagccuggguga

SEQ ID NO: 8136 - RNA, 22 nt, Homo sapiens
ggacuggaagcauauuuauuuu

SEQ ID NO: 8137 - RNA, 22 nt, Homo sapiens
gcccuguguuuggguaugguca

SEQ ID NO: 8138 - RNA, 22 nt, Homo sapiens
ggcaaagaugaccauuacuuuu

SEQ ID NO: 8139 - RNA, 22 nt, Homo sapiens
auuggucuugaaaccagagaga

SEQ ID NO: 8140 - RNA, 22 nt, Homo sapiens
auaggacuauugugaggauuaa

SEQ ID NO: 8141 - RNA, 22 nt, Homo sapiens
uagguaucuugguauaucagga

SEQ ID NO: 8142 - RNA, 22 nt, Homo sapiens
agaucacucagguuucucccug

SEQ ID NO: 8143 - RNA, 22 nt, Homo sapiens
ucagaugaucugguaagaacuu

SEQ ID NO: 8144 - RNA, 22 nt, Homo sapiens
auagcauagucagcuucgcuga

SEQ ID NO: 8145 - RNA, 22 nt, Homo sapiens
cucauggaauacuucacagcca

SEQ ID NO: 8146 - RNA, 22 nt, Homo sapiens
gauuccauuuguggcuauuuac

SEQ ID NO: 8147 - RNA, 22 nt, Homo sapiens
cauccccugcaccaaccuuuac

SEQ ID NO: 8148 - RNA, 22 nt, Homo sapiens
cauaaaucuuguugaauagcac

SEQ ID NO: 8149 - RNA, 22 nt, Homo sapiens
agcagguauucgggucaugggg

SEQ ID NO: 8150 - RNA, 22 nt, Homo sapiens
cuggcucugagguguuuagggc

SEQ ID NO: 8151 - RNA, 17 nt, Homo sapiens
agcauguguuugagauu

SEQ ID NO: 8152 - RNA, 22 nt, Homo sapiens
augaguaguugcuaaauauuga

SEQ ID NO: 8153 - RNA, 22 nt, Homo sapiens
uugucauuuucagaguguuacg

SEQ ID NO: 8154 - RNA, 22 nt, Homo sapiens
uaacacccuucuccagguacau

SEQ ID NO: 8155 - RNA, 22 nt, Homo sapiens
gugagcuccucuucugcugcag

SEQ ID NO: 8156 - RNA, 22 nt, Homo sapiens
ugcugcacaguucuuaagauua

SEQ ID NO: 8157 - RNA, 22 nt, Homo sapiens
ugacuuuagaauuuuauccaga

SEQ ID NO: 8158 - RNA, 20 nt, Homo sapiens
gugugcauuucagauuuugg

SEQ ID NO: 8159 - RNA, 22 nt, Homo sapiens
ugauugacauacauaggugugg

SEQ ID NO: 8160 - RNA, 20 nt, Homo sapiens
aagugcaucguugugucugc

SEQ ID NO: 8161 - RNA, 23 nt, Homo sapiens
agucaguaugcuccuuggauccc

SEQ ID NO: 8162 - RNA, 22 nt, Homo sapiens
uuacagugguugcuauugugaa

SEQ ID NO: 8163 - RNA, 22 nt, Homo sapiens
uugcuagucucuguuucaggau

SEQ ID NO: 8164 - RNA, 18 nt, Homo sapiens
ugacagcacaugugggga

SEQ ID NO: 8165 - RNA, 22 nt, Homo sapiens
uuaggcuaguuucuuaaacucu

SEQ ID NO: 8166 - RNA, 22 nt, Homo sapiens
uggcagcgcaguugaaaaagaa

SEQ ID NO: 8167 - RNA, 22 nt, Homo sapiens
ugccaucauuaauauuaggcau

SEQ ID NO: 8168 - RNA, 21 nt, Homo sapiens
aaaugcacauuacugcuggug

SEQ ID NO: 8169 - RNA, 23 nt, Homo sapiens
augagguaucugagcccagaaau

SEQ ID NO: 8170 - RNA, 20 nt, Homo sapiens
ucacugugaacuucuugagg

SEQ ID NO: 8171 - RNA, 16 nt, Homo sapiens
uuauugcauucuucuc

SEQ ID NO: 8172 - RNA, 22 nt, Homo sapiens
uuccauaggcuagaucaaccag

SEQ ID NO: 8173 - RNA, 22 nt, Homo sapiens
uugaaaguguucacaaugguau

SEQ ID NO: 8174 - RNA, 22 nt, Homo sapiens
guggaagaccagacuuuccaac

SEQ ID NO: 8175 - RNA, 22 nt, Homo sapiens
ggcucaguugcaaaucaguuca

SEQ ID NO: 8176 - RNA, 22 nt, Homo sapiens
aaugcuguucuuugcuuaaguu

SEQ ID NO: 8177 - RNA, 22 nt, Homo sapiens
aaagggcacugugcuuuggcaa

SEQ ID NO: 8178 - RNA, 19 nt, Homo sapiens
uggaacugauucaguucug

SEQ ID NO: 8179 - RNA, 22 nt, Homo sapiens
uggguagagaaucaggaucuua

SEQ ID NO: 8180 - RNA, 22 nt, Homo sapiens
uagcugauguuugucuaguagc

SEQ ID NO: 8181 - RNA, 22 nt, Homo sapiens
acagcacugccaagugacccau

SEQ ID NO: 8182 - RNA, 22 nt, Homo sapiens
ugugaacagaauuagucaccua

SEQ ID NO: 8183 - RNA, 22 nt, Homo sapiens
uuuguggaaugcucauguguag

SEQ ID NO: 8184 - RNA, 22 nt, Homo sapiens
acugcacuccagccuuggagac

SEQ ID NO: 8185 - RNA, 22 nt, Homo sapiens
caacacuguuuauuggauagcc

SEQ ID NO: 8186 - RNA, 22 nt, Homo sapiens
aaguauagcuaugauaaacauu

SEQ ID NO: 8187 - RNA, 22 nt, Homo sapiens
agugguuuuggaauggaauuca

SEQ ID NO: 8188 - RNA, 22 nt, Homo sapiens
guacaaguaagaaaauugccca

SEQ ID NO: 8189 - RNA, 22 nt, Homo sapiens
uuacagguggagaaguaaggcu

SEQ ID NO: 8190 - RNA, 22 nt, Homo sapiens
uccaugugaaaaggucgugaua

SEQ ID NO: 8191 - RNA, 22 nt, Homo sapiens
auuaaguugugccugaaaacuu

SEQ ID NO: 8192 - RNA, 22 nt, Homo sapiens
auagcagugugagaaugaacua

SEQ ID NO: 8193 - RNA, 22 nt, Homo sapiens
ggugagguaggaaaaguuagga

SEQ ID NO: 8194 - RNA, 20 nt, Homo sapiens
agccccauguaaaccacaug

SEQ ID NO: 8195 - RNA, 22 nt, Homo sapiens
ugagucaauggaggcucagagc

SEQ ID NO: 8196 - RNA, 22 nt, Homo sapiens
uuacuagaacauuuagggaacu

SEQ ID NO: 8197 - RNA, 22 nt, Homo sapiens
aacccugacacaagcagaauuu

SEQ ID NO: 8198 - RNA, 22 nt, Homo sapiens
gauugcuaaauuguccuucugu

SEQ ID NO: 8199 - RNA, 17 nt, Homo sapiens
ucaaaugcucccaguga

SEQ ID NO: 8200 - RNA, 18 nt, Homo sapiens
guuagguaguaugaugcu

SEQ ID NO: 8201 - RNA, 22 nt, Homo sapiens
uuggaaaugguaaaggguuaau

SEQ ID NO: 8202 - RNA, 22 nt, Homo sapiens
gauggauuuuaagugaaugaaa

SEQ ID NO: 8203 - RNA, 22 nt, Homo sapiens
aucugcacaucuguguuuuugu

SEQ ID NO: 8204 - RNA, 22 nt, Homo sapiens
aaguaauggaguuauuuuauga

SEQ ID NO: 8205 - RNA, 22 nt, Homo sapiens
cugucucagugaauugguuuua

SEQ ID NO: 8206 - RNA, 22 nt, Homo sapiens
auagugcugcaauaaccauggg

SEQ ID NO: 8207 - RNA, 22 nt, Homo sapiens
cccagugaagagaaccuuacga

SEQ ID NO: 8208 - RNA, 22 nt, Homo sapiens
ugacuugaucacccccuaaggg

SEQ ID NO: 8209 - RNA, 22 nt, Homo sapiens
uugaagagaaccgcggcuuauu

SEQ ID NO: 8210 - RNA, 21 nt, Homo sapiens
uagagcaacacacgcccucuc

SEQ ID NO: 8211 - RNA, 22 nt, Homo sapiens
aggaucauugacuauuauaagg

SEQ ID NO: 8212 - RNA, 22 nt, Homo sapiens
gugauaucugagccugccccag

SEQ ID NO: 8213 - RNA, 22 nt, Homo sapiens
agcuuuggauaccugcuguucc

SEQ ID NO: 8214 - RNA, 22 nt, Homo sapiens
uugccaucaucucuuacucagu

SEQ ID NO: 8215 - RNA, 22 nt, Homo sapiens
uguggcauugaauaaccuugga

SEQ ID NO: 8216 - RNA, 22 nt, Homo sapiens
uugguaggcuggccucucucag

SEQ ID NO: 8217 - RNA, 22 nt, Homo sapiens
guauugacuaucaaucaugugc

SEQ ID NO: 8218 - RNA, 22 nt, Homo sapiens
uggcauauaaagauguguucaa

SEQ ID NO: 8219 - RNA, 22 nt, Homo sapiens
ugccugagcccagcccuguagu

SEQ ID NO: 8220 - RNA, 16 nt, Homo sapiens
aggcaagaauugaggu

SEQ ID NO: 8221 - RNA, 22 nt, Homo sapiens
ugggaucgucaagugaggcucg

SEQ ID NO: 8222 - RNA, 22 nt, Homo sapiens
uucccugagcaucuguugagcc

SEQ ID NO: 8223 - RNA, 22 nt, Homo sapiens
ugauauauugaaugaugaaaca

SEQ ID NO: 8224 - RNA, 21 nt, Homo sapiens
aaggugguggugauugagaug

SEQ ID NO: 8225 - RNA, 20 nt, Homo sapiens
acacuggcuuugagauuuag

SEQ ID NO: 8226 - RNA, 22 nt, Homo sapiens
auuuggcaauuuugaagaugcc

SEQ ID NO: 8227 - RNA, 22 nt, Homo sapiens
uugauauuacucaguaacagau

SEQ ID NO: 8228 - RNA, 22 nt, Homo sapiens
uagauaguaaagccauuagcuu

SEQ ID NO: 8229 - RNA, 22 nt, Homo sapiens
aaacugaucugaaggccaggcu

SEQ ID NO: 8230 - RNA, 19 nt, Homo sapiens
ucgcgccauucuccugccu

SEQ ID NO: 8231 - RNA, 22 nt, Homo sapiens
auauuacuggcuauaucgcaag

SEQ ID NO: 8232 - RNA, 22 nt, Homo sapiens
guacaguuuagugcuuugagaa

SEQ ID NO: 8233 - RNA, 22 nt, Homo sapiens
uuaugacauugacaguuuuuag

SEQ ID NO: 8234 - RNA, 17 nt, Homo sapiens
agcuggaauuacgggag

SEQ ID NO: 8235 - RNA, 22 nt, Homo sapiens
uagcaguauacguacugggucc

SEQ ID NO: 8236 - RNA, 22 nt, Homo sapiens
auugcuuuuacugggagcuuug

SEQ ID NO: 8237 - RNA, 22 nt, Homo sapiens
uucaauuaauauuauacucuca

SEQ ID NO: 8238 - RNA, 22 nt, Homo sapiens
gugagagaaugacuauguguuu

SEQ ID NO: 8239 - RNA, 22 nt, Homo sapiens
gagugcaauggcaccgucucgg

SEQ ID NO: 8240 - RNA, 22 nt, Homo sapiens
uccugcauucauccugguguug

SEQ ID NO: 8241 - RNA, 22 nt, Homo sapiens
ugagguagaaugauucuaauau

SEQ ID NO: 8242 - RNA, 18 nt, Homo sapiens
uuugacugguguccuuau

SEQ ID NO: 8243 - RNA, 22 nt, Homo sapiens
aaggaauacuggugguugcuau

SEQ ID NO: 8244 - RNA, 22 nt, Homo sapiens
auugcuauuauuugaccauugu

SEQ ID NO: 8245 - RNA, 22 nt, Homo sapiens
auuggacagcauuucuagacuu

SEQ ID NO: 8246 - RNA, 22 nt, Homo sapiens
augauagucuugagaagcauuu

SEQ ID NO: 8247 - RNA, 22 nt, Homo sapiens
guaaucucagcuacgcgggagg

SEQ ID NO: 8248 - RNA, 22 nt, Homo sapiens
ucuggcuugugaacugucuucu

SEQ ID NO: 8249 - RNA, 22 nt, Homo sapiens
gugacuggacucugaagaaaau

SEQ ID NO: 8250 - RNA, 22 nt, Homo sapiens
uaaaugcuugagaugauggaua

SEQ ID NO: 8251 - RNA, 22 nt, Homo sapiens
uagguuauucauucaucauuua

SEQ ID NO: 8252 - RNA, 22 nt, Homo sapiens
uauugauuaauugugauuaggc

SEQ ID NO: 8253 - RNA, 22 nt, Homo sapiens
uggagguagacauugggaagag

SEQ ID NO: 8254 - RNA, 22 nt, Homo sapiens
ugagaauauuugaagauguuag

SEQ ID NO: 8255 - RNA, 22 nt, Homo sapiens
uugagauuauuguguuccuuua

SEQ ID NO: 8256 - RNA, 21 nt, Homo sapiens
uggagugcaacacuagguaua

SEQ ID NO: 8257 - RNA, 22 nt, Homo sapiens
acuacaugugaugucaguauau

SEQ ID NO: 8258 - RNA, 22 nt, Homo sapiens
ucacuguggaacucaaaaagcu

SEQ ID NO: 8259 - RNA, 22 nt, Homo sapiens
guugcucaggccggagugcagu

SEQ ID NO: 8260 - RNA, 22 nt, Homo sapiens
gggaugaagcccuaggguuggu

SEQ ID NO: 8261 - RNA, 22 nt, Homo sapiens
ugaguagcuaagacgauaggca

SEQ ID NO: 8262 - RNA, 22 nt, Homo sapiens
caguggacuaaauggggaauau

SEQ ID NO: 8263 - RNA, 22 nt, Homo sapiens
uggaguuugacaugccuuuggg

SEQ ID NO: 8264 - RNA, 22 nt, Homo sapiens
uccuguaaucccagcuaccaga

SEQ ID NO: 8265 - RNA, 22 nt, Homo sapiens
uuacauugcuucaaauucagug

SEQ ID NO: 8266 - RNA, 20 nt, Homo sapiens
cagugcauugcuucugauuu

SEQ ID NO: 8267 - RNA, 22 nt, Homo sapiens
gggaaugaagagaaccuuccca

SEQ ID NO: 8268 - RNA, 22 nt, Homo sapiens
ugugccuaguaauguguccaga

SEQ ID NO: 8269 - RNA, 22 nt, Homo sapiens
ugcauuguuuagaaacacuggg

SEQ ID NO: 8270 - RNA, 22 nt, Homo sapiens
acagugcuguggucaugggucu

SEQ ID NO: 8271 - RNA, 22 nt, Homo sapiens
uuugcuugaggucuagcuaccc

SEQ ID NO: 8272 - RNA, 22 nt, Homo sapiens
aaguauuaagacuaagaggcuu

SEQ ID NO: 8273 - RNA, 22 nt, Homo sapiens
gucucacaggcaugaugccagc

SEQ ID NO: 8274 - RNA, 20 nt, Homo sapiens
gcaagcaugaagaguagaga

SEQ ID NO: 8275 - RNA, 22 nt, Homo sapiens
cuuuggucaauugcugcgggga

SEQ ID NO: 8276 - RNA, 23 nt, Homo sapiens
gugcaguggcgagauuucggcuc

SEQ ID NO: 8277 - RNA, 22 nt, Homo sapiens
uucaaguaguucucaugccuca

SEQ ID NO: 8278 - RNA, 19 nt, Homo sapiens
augcugguguugcucaaac

SEQ ID NO: 8279 - RNA, 21 nt, Homo sapiens
agagucaucucuaucuguacc

SEQ ID NO: 8280 - RNA, 22 nt, Homo sapiens
gaguggugguucugaaacuuuu

SEQ ID NO: 8281 - RNA, 21 nt, Homo sapiens
uuuuugguggucauggauaga

SEQ ID NO: 8282 - RNA, 22 nt, Homo sapiens
ugaauguauuuauuaccauuca

SEQ ID NO: 8283 - RNA, 22 nt, Homo sapiens
agcagagcaguggauuuuguga

SEQ ID NO: 8284 - RNA, 22 nt, Homo sapiens
gcaaaaaguagugcugguuagg

SEQ ID NO: 8285 - RNA, 23 nt, Homo sapiens
uuaguaaacucaaugacaccaca

SEQ ID NO: 8286 - RNA, 23 nt, Homo sapiens
uuagaucuuuaaggaaucuccac

SEQ ID NO: 8287 - RNA, 22 nt, Homo sapiens
uuaugacaggcucaggagcccc

SEQ ID NO: 8288 - RNA, 22 nt, Homo sapiens
uugcacaguguguacagcacca

SEQ ID NO: 8289 - RNA, 22 nt, Homo sapiens
uuagcauccauaggagauuggu

SEQ ID NO: 8290 - RNA, 22 nt, Homo sapiens
auagcacaguguguguacacca

SEQ ID NO: 8291 - RNA, 22 nt, Homo sapiens
uaugaaacucuaagauucacau

SEQ ID NO: 8292 - RNA, 20 nt, Homo sapiens
ugucccaaccccauggguuc

SEQ ID NO: 8293 - RNA, 21 nt, Homo sapiens
uuucugggggagcauggcagg

SEQ ID NO: 8294 - RNA, 22 nt, Homo sapiens
accccauuugcacugagcccuu

SEQ ID NO: 8295 - RNA, 22 nt, Homo sapiens
aggagaugaagcuuuaucuaaa

SEQ ID NO: 8296 - RNA, 22 nt, Homo sapiens
uuacuauguuucaaagugucuc

SEQ ID NO: 8297 - RNA, 22 nt, Homo sapiens
cagagcacugauacuggguucu

SEQ ID NO: 8298 - RNA, 22 nt, Homo sapiens
ugguaaaaugucauuuaccaga

SEQ ID NO: 8299 - RNA, 22 nt, Homo sapiens
uaccagcauuucucuuuaagua

SEQ ID NO: 8300 - RNA, 22 nt, Homo sapiens
gugaccaaagauagcucaaguu

SEQ ID NO: 8301 - RNA, 22 nt, Homo sapiens
ugaggucuuuauuuagugcuca

SEQ ID NO: 8302 - RNA, 22 nt, Homo sapiens
augagauaggaacaaacuuaca

SEQ ID NO: 8303 - RNA, 22 nt, Homo sapiens
aagugcuguaugggagccuagg

SEQ ID NO: 8304 - RNA, 22 nt, Homo sapiens
gucagcuuuuccuuacuuuagg

SEQ ID NO: 8305 - RNA, 22 nt, Homo sapiens
gcaucaaugucuauaguguuug

SEQ ID NO: 8306 - RNA, 22 nt, Homo sapiens
ucuggagugugaaguggauaug

SEQ ID NO: 8307 - RNA, 22 nt, Homo sapiens
uccauagugagcagucaaugua

SEQ ID NO: 8308 - RNA, 22 nt, Homo sapiens
cuccuggugauuggagugugaa

SEQ ID NO: 8309 - RNA, 22 nt, Homo sapiens
gugagcauucaaggaaggagcu

SEQ ID NO: 8310 - RNA, 22 nt, Homo sapiens
cuuugauuauaaaaggguguuu

SEQ ID NO: 8311 - RNA, 22 nt, Homo sapiens
ucagaucauuaagguagguuua

SEQ ID NO: 8312 - RNA, 20 nt, Homo sapiens
uggaacuuaauugauggaca

SEQ ID NO: 8313 - RNA, 22 nt, Homo sapiens
aaccuucauuccuuucccugcc

SEQ ID NO: 8314 - RNA, 20 nt, Homo sapiens
augugcuaauauuaauaugu

SEQ ID NO: 8315 - RNA, 22 nt, Homo sapiens
uagguagaacccagaaaucuga

SEQ ID NO: 8316 - RNA, 22 nt, Homo sapiens
ugcauaugucuuuauagcagca

SEQ ID NO: 8317 - RNA, 22 nt, Homo sapiens
cccuugcacuucagagcugcau

SEQ ID NO: 8318 - RNA, 22 nt, Homo sapiens
uguccuggugaugcccaaauuc

SEQ ID NO: 8319 - RNA, 22 nt, Homo sapiens
uaucugguuuuguuacagguuc

SEQ ID NO: 8320 - RNA, 15 nt, Homo sapiens
ggguccucucccaaa

SEQ ID NO: 8321 - RNA, 22 nt, Homo sapiens
cugugguuuaaggaauuuugac

SEQ ID NO: 8322 - RNA, 22 nt, Homo sapiens
guucaucagggauacuggccug

SEQ ID NO: 8323 - RNA, 22 nt, Homo sapiens
gccauugcacucuagccugagc

SEQ ID NO: 8324 - RNA, 17 nt, Homo sapiens
ccaguuuucccucagug

SEQ ID NO: 8325 - RNA, 18 nt, Homo sapiens
ucacagguaauuaggauu

SEQ ID NO: 8326 - RNA, 22 nt, Homo sapiens
ucuuuuugagucaguuucggua

SEQ ID NO: 8327 - RNA, 22 nt, Homo sapiens
ugagauaaugcaugugaagauc

SEQ ID NO: 8328 - RNA, 22 nt, Homo sapiens
acuacauaugacaucuucuuua

SEQ ID NO: 8329 - RNA, 22 nt, Homo sapiens
gcccagauguuuggggucaugg

SEQ ID NO: 8330 - RNA, 22 nt, Homo sapiens
cuuuuacacuguuggcaggauu

SEQ ID NO: 8331 - RNA, 22 nt, Homo sapiens
uuuuugugguauauugcaacaa

SEQ ID NO: 8332 - RNA, 22 nt, Homo sapiens
ccauugcacuccagccucggca

SEQ ID NO: 8333 - RNA, 22 nt, Homo sapiens
uugugaaaucuaggcagagguu

SEQ ID NO: 8334 - RNA, 22 nt, Homo sapiens
ugugaucaugcuccaggcgaga

SEQ ID NO: 8335 - RNA, 22 nt, Homo sapiens
guagugcaguuugagaaucagu

SEQ ID NO: 8336 - RNA, 22 nt, Homo sapiens
aguuaguguugugauaaaucca

SEQ ID NO: 8337 - RNA, 22 nt, Homo sapiens
cuggugugugacuuuucauuau

SEQ ID NO: 8338 - RNA, 22 nt, Homo sapiens
aagcugccaggcaugguggcug

SEQ ID NO: 8339 - RNA, 22 nt, Homo sapiens
uuuauugcucuaaaguugccau

SEQ ID NO: 8340 - RNA, 22 nt, Homo sapiens
uauuucaguugugcagguaguu

SEQ ID NO: 8341 - RNA, 22 nt, Homo sapiens
cagcuugugguauugcugguug

SEQ ID NO: 8342 - RNA, 22 nt, Homo sapiens
ugagaucuuugcuguccucacc

SEQ ID NO: 8343 - RNA, 23 nt, Homo sapiens
uaguaccauauuguuggcagcac

SEQ ID NO: 8344 - RNA, 22 nt, Homo sapiens
uauagcuugauuauggugaugg

SEQ ID NO: 8345 - RNA, 22 nt, Homo sapiens
cagauaguuguagauaugcagc

SEQ ID NO: 8346 - RNA, 22 nt, Homo sapiens
uauugacauuacagugggucuu

SEQ ID NO: 8347 - RNA, 22 nt, Homo sapiens
cugauauuuuaaaauuggcugg

SEQ ID NO: 8348 - RNA, 19 nt, Homo sapiens
uuucacacucgccuacuuc

SEQ ID NO: 8349 - RNA, 22 nt, Homo sapiens
aaugacccugauuggcaaguug

SEQ ID NO: 8350 - RNA, 22 nt, Homo sapiens
ucgcugggaaccagagguaaag

SEQ ID NO: 8351 - RNA, 22 nt, Homo sapiens
uguagcuuuugagauuuauauu

SEQ ID NO: 8352 - RNA, 22 nt, Homo sapiens
uuagcagugugaaaaaagacua

SEQ ID NO: 8353 - RNA, 22 nt, Homo sapiens
uauggcuuuguucaacagccuc

SEQ ID NO: 8354 - RNA, 22 nt, Homo sapiens
gggaugauuaugguucacuaca

SEQ ID NO: 8355 - RNA, 22 nt, Homo sapiens
gauauguugaguagaguuuuug

SEQ ID NO: 8356 - RNA, 22 nt, Homo sapiens
cugguuguuacaaagagccugg

SEQ ID NO: 8357 - RNA, 22 nt, Homo sapiens
agaaauguuuacucacccccuu

SEQ ID NO: 8358 - RNA, 22 nt, Homo sapiens
ugggaugaauacaaugggauca

SEQ ID NO: 8359 - RNA, 21 nt, Homo sapiens
uggcuguuuucaugcuagaac

SEQ ID NO: 8360 - RNA, 22 nt, Homo sapiens
uggugagaaaugagaugcuuuu

SEQ ID NO: 8361 - RNA, 22 nt, Homo sapiens
accaccacucccgcauucuaaa

SEQ ID NO: 8362 - RNA, 22 nt, Homo sapiens
ugagauauauauauuugagaca

SEQ ID NO: 8363 - RNA, 22 nt, Homo sapiens
ugugaaccucuggccaagauga

SEQ ID NO: 8364 - RNA, 22 nt, Homo sapiens
ccuuggcaauggcuggggcuga

SEQ ID NO: 8365 - RNA, 20 nt, Homo sapiens
gcaacauggccagagugaau

SEQ ID NO: 8366 - RNA, 22 nt, Homo sapiens
uaucacacuggaagaaguuaag

SEQ ID NO: 8367 - RNA, 22 nt, Homo sapiens
uuuuggcucuugguaggucaga

SEQ ID NO: 8368 - RNA, 22 nt, Homo sapiens
uucacaguguguacaccagggg

SEQ ID NO: 8369 - RNA, 22 nt, Homo sapiens
uacaguagagaucagcaaacua

SEQ ID NO: 8370 - RNA, 22 nt, Homo sapiens
agcugauggucuuguaugaugu

SEQ ID NO: 8371 - RNA, 22 nt, Homo sapiens
ucgcaccauugcacuccagcca

SEQ ID NO: 8372 - RNA, 21 nt, Homo sapiens
ucacuaguaaaaggugaacug

SEQ ID NO: 8373 - RNA, 22 nt, Homo sapiens
agcauggucacuuugggcccca

SEQ ID NO: 8374 - RNA, 22 nt, Homo sapiens
augaguugaagcuacaagaggc

SEQ ID NO: 8375 - RNA, 22 nt, Homo sapiens
cuuuggcauuagccuguauaga

SEQ ID NO: 8376 - RNA, 20 nt, Homo sapiens
uuuuagcacuuguuauggug

SEQ ID NO: 8377 - RNA, 22 nt, Homo sapiens
augaaaucuuuccugugaggau

SEQ ID NO: 8378 - RNA, 22 nt, Homo sapiens
agcugauuuuaaguccuugucc

SEQ ID NO: 8379 - RNA, 22 nt, Homo sapiens
auagcagcauauguaauguuga

SEQ ID NO: 8380 - RNA, 22 nt, Homo sapiens
ugagagcuuugaugcacuguuu

SEQ ID NO: 8381 - RNA, 22 nt, Homo sapiens
uauggcccuuaaguauugguug

SEQ ID NO: 8382 - RNA, 22 nt, Homo sapiens
ugagccaaugauuugaauagag

SEQ ID NO: 8383 - RNA, 22 nt, Homo sapiens
augauauuauucuagcccagag

SEQ ID NO: 8384 - RNA, 22 nt, Homo sapiens
uggcaaauuccaaaguuaauuc

SEQ ID NO: 8385 - RNA, 22 nt, Homo sapiens
auaagaucauuugcuaagaggg

SEQ ID NO: 8386 - RNA, 22 nt, Homo sapiens
auaucaaggccauuuucuaaau

SEQ ID NO: 8387 - RNA, 20 nt, Homo sapiens
uagucaugagauucuccaag

SEQ ID NO: 8388 - RNA, 22 nt, Homo sapiens
guucaucagggauauuggccug

SEQ ID NO: 8389 - RNA, 22 nt, Homo sapiens
uacugcacucuagccuggguga

SEQ ID NO: 8390 - RNA, 22 nt, Homo sapiens
uuuaugguuuucugggagauug

SEQ ID NO: 8391 - RNA, 17 nt, Homo sapiens
ucuugugguucuugaau

SEQ ID NO: 8392 - RNA, 22 nt, Homo sapiens
ucacaaagcuuggccugcuucu

SEQ ID NO: 8393 - RNA, 22 nt, Homo sapiens
uguaagcauuauauaauuguug

SEQ ID NO: 8394 - RNA, 22 nt, Homo sapiens
cagcuguuguuccagucuuuua

SEQ ID NO: 8395 - RNA, 22 nt, Homo sapiens
gucacugagauugguauuaaug

SEQ ID NO: 8396 - RNA, 22 nt, Homo sapiens
acccugucaaaauagaccaauc

SEQ ID NO: 8397 - RNA, 22 nt, Homo sapiens
uuccaguguguucauccucaga

SEQ ID NO: 8398 - RNA, 23 nt, Homo sapiens
uggguucccuaagcgcaugcugc

SEQ ID NO: 8399 - RNA, 22 nt, Homo sapiens
agagugcuauagauuagauuuc

SEQ ID NO: 8400 - RNA, 22 nt, Homo sapiens
gagguaaguaagaauggcaagc

SEQ ID NO: 8401 - RNA, 22 nt, Homo sapiens
ucacaccauucuucuacuucag

SEQ ID NO: 8402 - RNA, 22 nt, Homo sapiens
aaaaugcugauauugggcccca

SEQ ID NO: 8403 - RNA, 22 nt, Homo sapiens
aagcaggugugggaggaaaugg

SEQ ID NO: 8404 - RNA, 22 nt, Homo sapiens
aucauccagccccagaagggag

SEQ ID NO: 8405 - RNA, 22 nt, Homo sapiens
ccagguuucuagaauaauuccu

SEQ ID NO: 8406 - RNA, 22 nt, Homo sapiens
uugagaaucuuucgaauguucu

SEQ ID NO: 8407 - RNA, 22 nt, Homo sapiens
ucacaugaagauuuuaguauac

SEQ ID NO: 8408 - RNA, 22 nt, Homo sapiens
cuuuggguauucucccuugggg

SEQ ID NO: 8409 - RNA, 22 nt, Homo sapiens
gcaguagugugaucuuggcuca

SEQ ID NO: 8410 - RNA, 22 nt, Homo sapiens
aauaugucugcuaauuguuucu

SEQ ID NO: 8411 - RNA, 22 nt, Homo sapiens
ccagugcugugcaguguaugag

SEQ ID NO: 8412 - RNA, 22 nt, Homo sapiens
cucaguggauuagauaaugcac

SEQ ID NO: 8413 - RNA, 22 nt, Homo sapiens
acaaaguguuuucugaaggccu

SEQ ID NO: 8414 - RNA, 22 nt, Homo sapiens
augagauuauguaaagagacca

SEQ ID NO: 8415 - RNA, 22 nt, Homo sapiens
cugccugagaaaauggagggca

SEQ ID NO: 8416 - RNA, 22 nt, Homo sapiens
gcuauggccugaauguuugugu

SEQ ID NO: 8417 - RNA, 22 nt, Homo sapiens
gagguggugguggaggcauagc

SEQ ID NO: 8418 - RNA, 22 nt, Homo sapiens
uucucaauggaugugggaccag

SEQ ID NO: 8419 - RNA, 23 nt, Homo sapiens
auucaaguagugagagugguuau

SEQ ID NO: 8420 - RNA, 22 nt, Homo sapiens
uccauggagacacauuuuauau

SEQ ID NO: 8421 - RNA, 19 nt, Homo sapiens
ugugaagaaaugcugcaag

SEQ ID NO: 8422 - RNA, 21 nt, Homo sapiens
uuuuugggcuuucauaguguu

SEQ ID NO: 8423 - RNA, 22 nt, Homo sapiens
aauugcaccaucuagaucaaga

SEQ ID NO: 8424 - RNA, 19 nt, Homo sapiens
aauauugacaguggugucu

SEQ ID NO: 8425 - RNA, 22 nt, Homo sapiens
ugacuccagagacugugcuguc

SEQ ID NO: 8426 - RNA, 22 nt, Homo sapiens
uuugugcaugaagagggggugc

SEQ ID NO: 8427 - RNA, 22 nt, Homo sapiens
uuuugggggugauucacacagu

SEQ ID NO: 8428 - RNA, 22 nt, Homo sapiens
uuaaaugcuagaauuuucuuug

SEQ ID NO: 8429 - RNA, 22 nt, Homo sapiens
uucaguucugcacugaucuuag

SEQ ID NO: 8430 - RNA, 22 nt, Homo sapiens
ucucugagaaaaguuucuccca

SEQ ID NO: 8431 - RNA, 22 nt, Homo sapiens
ugaggucacuuguuuuaugcuu

SEQ ID NO: 8432 - RNA, 22 nt, Homo sapiens
ucacugcgaccuccaccuccug

SEQ ID NO: 8433 - RNA, 22 nt, Homo sapiens
uuuguacacgugggugaauugu

SEQ ID NO: 8434 - RNA, 23 nt, Homo sapiens
uuauggcuuuuauuauguugagg

SEQ ID NO: 8435 - RNA, 22 nt, Homo sapiens
uacacaugugaguucuuuucua

SEQ ID NO: 8436 - RNA, 22 nt, Homo sapiens
uaucuuggaguuugacaaccaa

SEQ ID NO: 8437 - RNA, 22 nt, Homo sapiens
aaaaggcuagcuaguaacagaa

SEQ ID NO: 8438 - RNA, 22 nt, Homo sapiens
uauugcaacagaagaaagaguc

SEQ ID NO: 8439 - RNA, 22 nt, Homo sapiens
uaacaccuugcucugucaauaa

SEQ ID NO: 8440 - RNA, 22 nt, Homo sapiens
ccugagacuugagggggcuucu

SEQ ID NO: 8441 - RNA, 22 nt, Homo sapiens
gugcaaugucaggagaugcagc

SEQ ID NO: 8442 - RNA, 22 nt, Homo sapiens
uacaccauuugauucuuuaagc

SEQ ID NO: 8443 - RNA, 19 nt, Homo sapiens
ugugacugguugucucgcu

SEQ ID NO: 8444 - RNA, 22 nt, Homo sapiens
uguaacacacacuguuuacucc

SEQ ID NO: 8445 - RNA, 21 nt, Homo sapiens
gcaaguacuaucaucauuauc

SEQ ID NO: 8446 - RNA, 22 nt, Homo sapiens
gucuaugagucccugaauuuaa

SEQ ID NO: 8447 - RNA, 22 nt, Homo sapiens
ugaguagugcugcaauaaacau

SEQ ID NO: 8448 - RNA, 22 nt, Homo sapiens
guuugguugcauggaaaauuua

SEQ ID NO: 8449 - RNA, 23 nt, Homo sapiens
ucaugguagcaccaacaauaacu

SEQ ID NO: 8450 - RNA, 22 nt, Homo sapiens
ccccuguaaacuggcuucccug

SEQ ID NO: 8451 - RNA, 22 nt, Homo sapiens
cugugcauaugacuuuauugga

SEQ ID NO: 8452 - RNA, 22 nt, Homo sapiens
cugagagaugagaccucucacu

SEQ ID NO: 8453 - RNA, 22 nt, Homo sapiens
gaaagcuaaugacuuuggguga

SEQ ID NO: 8454 - RNA, 22 nt, Homo sapiens
gagugcaucguggccauuuuaa

SEQ ID NO: 8455 - RNA, 22 nt, Homo sapiens
gguggucuuccccuggaguucg

SEQ ID NO: 8456 - RNA, 16 nt, Homo sapiens
gggcaugugaagccua

SEQ ID NO: 8457 - RNA, 22 nt, Homo sapiens
gcugcguguagaguucucacug

SEQ ID NO: 8458 - RNA, 22 nt, Homo sapiens
cagagaacugaguuauuuucuu

SEQ ID NO: 8459 - RNA, 22 nt, Homo sapiens
uguugcauuugucaaggucaag

SEQ ID NO: 8460 - RNA, 22 nt, Homo sapiens
uaaggcacucuucugugugccu

SEQ ID NO: 8461 - RNA, 20 nt, Homo sapiens
gacaaaccuagaugguacag

SEQ ID NO: 8462 - RNA, 23 nt, Homo sapiens
ucauguauucccuguaaugggua

SEQ ID NO: 8463 - RNA, 22 nt, Homo sapiens
cauguaguagaaggagccagac

SEQ ID NO: 8464 - RNA, 22 nt, Homo sapiens
uggaauguuuaucaaaacagua

SEQ ID NO: 8465 - RNA, 22 nt, Homo sapiens
uuacacaguugguaggggcaga

SEQ ID NO: 8466 - RNA, 22 nt, Homo sapiens
ugacauggagguggaggaagau

SEQ ID NO: 8467 - RNA, 22 nt, Homo sapiens
cucauggagaaccucugcuagg

SEQ ID NO: 8468 - RNA, 22 nt, Homo sapiens
ugagagcugcauucuugaaagc

SEQ ID NO: 8469 - RNA, 22 nt, Homo sapiens
acugaguguugauuuagauuaa

SEQ ID NO: 8470 - RNA, 22 nt, Homo sapiens
acugcacuccagccuccugggu

SEQ ID NO: 8471 - RNA, 22 nt, Homo sapiens
ugugucuuguuuuuucccaggc

SEQ ID NO: 8472 - RNA, 22 nt, Homo sapiens
gccuagagaguuaucaggcugu

SEQ ID NO: 8473 - RNA, 22 nt, Homo sapiens
gauuuguuggccugugagcuag

SEQ ID NO: 8474 - RNA, 22 nt, Homo sapiens
ugucacugugaguuugacugcu

SEQ ID NO: 8475 - RNA, 22 nt, Homo sapiens
uucaaaggauagauuaagauca

SEQ ID NO: 8476 - RNA, 22 nt, Homo sapiens
caguggaugauguuuucugugg

SEQ ID NO: 8477 - RNA, 22 nt, Homo sapiens
gugaucucagcucacuggaacc

SEQ ID NO: 8478 - RNA, 22 nt, Homo sapiens
uaagcaguaaaugaagucuugc

SEQ ID NO: 8479 - RNA, 19 nt, Homo sapiens
uacaggacugagcugaggu

SEQ ID NO: 8480 - RNA, 22 nt, Homo sapiens
cuugggccccacccaaaucuua

SEQ ID NO: 8481 - RNA, 22 nt, Homo sapiens
ucuugguuaggggaaauaggca

SEQ ID NO: 8482 - RNA, 19 nt, Homo sapiens
caguaucauugcacauagu

SEQ ID NO: 8483 - RNA, 22 nt, Homo sapiens
auggcugugaaaugguaggugg

SEQ ID NO: 8484 - RNA, 22 nt, Homo sapiens
aacaccauucucuguaacaaga

SEQ ID NO: 8485 - RNA, 22 nt, Homo sapiens
gugcaacaucccuccauaauuu

SEQ ID NO: 8486 - RNA, 22 nt, Homo sapiens
ccuggcaagagacugaagauag

SEQ ID NO: 8487 - RNA, 20 nt, Homo sapiens
uggaccagagagguggggac

SEQ ID NO: 8488 - RNA, 22 nt, Homo sapiens
guuugugcuccuaugagaaucu

SEQ ID NO: 8489 - RNA, 22 nt, Homo sapiens
ucugucuuugccuaaguuuguc

SEQ ID NO: 8490 - RNA, 22 nt, Homo sapiens
uuucaacuaauuuuuuggugag

SEQ ID NO: 8491 - RNA, 22 nt, Homo sapiens
ucaaaugguccacgugaacauu

SEQ ID NO: 8492 - RNA, 22 nt, Homo sapiens
aguaucacaagguguacaccca

SEQ ID NO: 8493 - RNA, 17 nt, Homo sapiens
uuagagguagacucauu

SEQ ID NO: 8494 - RNA, 22 nt, Homo sapiens
acugcacuccagcuuuggugac

SEQ ID NO: 8495 - RNA, 22 nt, Homo sapiens
gcaaaugcuacaccauuuugua

SEQ ID NO: 8496 - RNA, 22 nt, Homo sapiens
caucacaugcuuauuuuccuca

SEQ ID NO: 8497 - RNA, 22 nt, Homo sapiens
gcugcuuuugaugacaaaaaca

SEQ ID NO: 8498 - RNA, 22 nt, Homo sapiens
aagcuacauuuuauuuauguca

SEQ ID NO: 8499 - RNA, 18 nt, Homo sapiens
auguuauguuuguagaag

SEQ ID NO: 8500 - RNA, 18 nt, Homo sapiens
cucaaccucaugcagggc

SEQ ID NO: 8501 - RNA, 22 nt, Homo sapiens
aagucaaggagagaagcuucag

SEQ ID NO: 8502 - RNA, 22 nt, Homo sapiens
ucacugcacuccagccuuuaug

SEQ ID NO: 8503 - RNA, 22 nt, Homo sapiens
gagaugguacacauacgauucu

SEQ ID NO: 8504 - RNA, 22 nt, Homo sapiens
uuagcagcucuggugacaaggu

SEQ ID NO: 8505 - RNA, 22 nt, Homo sapiens
gaacuuucuacauuaccucuuu

SEQ ID NO: 8506 - RNA, 22 nt, Homo sapiens
aucucauggagguagagaguaa

SEQ ID NO: 8507 - RNA, 22 nt, Homo sapiens
ucacaguccuguuuaggagagg

SEQ ID NO: 8508 - RNA, 22 nt, Homo sapiens
guacagugcucacaaugagagc

SEQ ID NO: 8509 - RNA, 22 nt, Homo sapiens
uauuuguccccuccaaaaguca

SEQ ID NO: 8510 - RNA, 22 nt, Homo sapiens
uugagaucuugauauguuugaa

SEQ ID NO: 8511 - RNA, 22 nt, Homo sapiens
cuaugucuuucauauuuugggg

SEQ ID NO: 8512 - RNA, 22 nt, Homo sapiens
ccagugcauggaucccaggggg

SEQ ID NO: 8513 - RNA, 22 nt, Homo sapiens
aaugaucaauguuugaggugau

SEQ ID NO: 8514 - RNA, 21 nt, Homo sapiens
uagauacuguauuaaaccuag

SEQ ID NO: 8515 - RNA, 20 nt, Homo sapiens
gacuucagaagcuucagagu

SEQ ID NO: 8516 - RNA, 22 nt, Homo sapiens
uugaucacuguacuaugacuau

SEQ ID NO: 8517 - RNA, 22 nt, Homo sapiens
ugggguaggcuguauacucugu

SEQ ID NO: 8518 - RNA, 21 nt, Homo sapiens
auggacugugugacccugcac

SEQ ID NO: 8519 - RNA, 22 nt, Homo sapiens
ucaguaccugagagugggcaga

SEQ ID NO: 8520 - RNA, 22 nt, Homo sapiens
ucaccggagguggguugaccag

SEQ ID NO: 8521 - RNA, 22 nt, Homo sapiens
uuugggcuuuuaaucuagagca

SEQ ID NO: 8522 - RNA, 22 nt, Homo sapiens
gcacacuuacacgaaccuagau

SEQ ID NO: 8523 - RNA, 22 nt, Homo sapiens
aaacugucuggaugcuugugga

SEQ ID NO: 8524 - RNA, 22 nt, Homo sapiens
ugacccuguggcagcgucuaag

SEQ ID NO: 8525 - RNA, 22 nt, Homo sapiens
caucauugcacccuauagagaa

SEQ ID NO: 8526 - RNA, 22 nt, Homo sapiens
ugugcauauaaguguguauaua

SEQ ID NO: 8527 - RNA, 22 nt, Homo sapiens
uucagcacugaaaauaugucau

SEQ ID NO: 8528 - RNA, 22 nt, Homo sapiens
ccaaguguucucauuguucaau

SEQ ID NO: 8529 - RNA, 22 nt, Homo sapiens
uacaguccaugcauuauccucc

SEQ ID NO: 8530 - RNA, 22 nt, Homo sapiens
uucauacaguggcugcacucca

SEQ ID NO: 8531 - RNA, 22 nt, Homo sapiens
cagugcauagaugugccacauu

SEQ ID NO: 8532 - RNA, 22 nt, Homo sapiens
cuugucacuguuggcuuuagaa

SEQ ID NO: 8533 - RNA, 22 nt, Homo sapiens
uguguacaucucuacacacaug

SEQ ID NO: 8534 - RNA, 22 nt, Homo sapiens
uuucauccggcuguguauuaug

SEQ ID NO: 8535 - RNA, 18 nt, Homo sapiens
agagcacugaguuuuaga

SEQ ID NO: 8536 - RNA, 22 nt, Homo sapiens
augguuagauguauccuuucca

SEQ ID NO: 8537 - RNA, 22 nt, Homo sapiens
agcagcauauuuuuauaaugua

SEQ ID NO: 8538 - RNA, 22 nt, Homo sapiens
ucacagugcaggaucaguuaau

SEQ ID NO: 8539 - RNA, 22 nt, Homo sapiens
cuggaaugcagcuuuaggggcu

SEQ ID NO: 8540 - RNA, 22 nt, Homo sapiens
aauaucacaggguguacacuca

SEQ ID NO: 8541 - RNA, 22 nt, Homo sapiens
aauacuggcacugaagaccaug

SEQ ID NO: 8542 - RNA, 22 nt, Homo sapiens
ugguauguugucucuuuguucu

SEQ ID NO: 8543 - RNA, 22 nt, Homo sapiens
uacuagaggaaaacuugaagac

SEQ ID NO: 8544 - RNA, 22 nt, Homo sapiens
ucuggguuuuguaccgugcucg

SEQ ID NO: 8545 - RNA, 22 nt, Homo sapiens
uaggucacugcucugugucuaa

SEQ ID NO: 8546 - RNA, 22 nt, Homo sapiens
auagcaggagaauggucauggg

SEQ ID NO: 8547 - RNA, 22 nt, Homo sapiens
auggcuuuugaccugguaggau

SEQ ID NO: 8548 - RNA, 22 nt, Homo sapiens
auccccugcacggggugucauu

SEQ ID NO: 8549 - RNA, 18 nt, Homo sapiens
acagugcugucacugcuu

SEQ ID NO: 8550 - RNA, 22 nt, Homo sapiens
gaggaaguuuacaaagcaucug

SEQ ID NO: 8551 - RNA, 22 nt, Homo sapiens
auguaacacagugcggcugggc

SEQ ID NO: 8552 - RNA, 22 nt, Homo sapiens
gcugaaauguuuaauuugggag

SEQ ID NO: 8553 - RNA, 22 nt, Homo sapiens
gugggauaauuuuuggugcugu

SEQ ID NO: 8554 - RNA, 22 nt, Homo sapiens
agucaacaucaugaaguggaaa

SEQ ID NO: 8555 - RNA, 22 nt, Homo sapiens
guggacggagguugcagugagc

SEQ ID NO: 8556 - RNA, 22 nt, Homo sapiens
augagcuaauauggguaaguug

SEQ ID NO: 8557 - RNA, 22 nt, Homo sapiens
ggcaagaggagauucugcuccc

SEQ ID NO: 8558 - RNA, 17 nt, Homo sapiens
uggaaugucuaagccug

SEQ ID NO: 8559 - RNA, 22 nt, Homo sapiens
uagagguauguauaguauucuu

SEQ ID NO: 8560 - RNA, 22 nt, Homo sapiens
agcaucacguagacuuuaccau

SEQ ID NO: 8561 - RNA, 22 nt, Homo sapiens
ucaccuggagaagauggaucau

SEQ ID NO: 8562 - RNA, 22 nt, Homo sapiens
ggcacaguuaagugcuaccuaa

SEQ ID NO: 8563 - RNA, 22 nt, Homo sapiens
uuucugugguccucuugaaggu

SEQ ID NO: 8564 - RNA, 23 nt, Homo sapiens
cuuugguaggaaauuugaauuau

SEQ ID NO: 8565 - RNA, 21 nt, Homo sapiens
uucuauggucagaauucaaua

SEQ ID NO: 8566 - RNA, 22 nt, Homo sapiens
aagcaacacaucugccccgguu

SEQ ID NO: 8567 - RNA, 22 nt, Homo sapiens
uggcagauaggauacaggacua

SEQ ID NO: 8568 - RNA, 22 nt, Homo sapiens
gugaccagaugggcaggggugu

SEQ ID NO: 8569 - RNA, 22 nt, Homo sapiens
ucaaugcaaccuccaccucugg

SEQ ID NO: 8570 - RNA, 22 nt, Homo sapiens
aacuggcauagccagacuucuc

SEQ ID NO: 8571 - RNA, 22 nt, Homo sapiens
uagaacaauugcuggauccgaa

SEQ ID NO: 8572 - RNA, 22 nt, Homo sapiens
gugagcuauguccugguuuggg

SEQ ID NO: 8573 - RNA, 22 nt, Homo sapiens
ucacugugugucucuguaucug

SEQ ID NO: 8574 - RNA, 22 nt, Homo sapiens
ugggaagauucuguguuuuucc

SEQ ID NO: 8575 - RNA, 22 nt, Homo sapiens
uaagugaauuugacagguaaug

SEQ ID NO: 8576 - RNA, 23 nt, Homo sapiens
cacugggcagcagguguucccag

SEQ ID NO: 8577 - RNA, 22 nt, Homo sapiens
uaugagagcugguagguagaga

SEQ ID NO: 8578 - RNA, 22 nt, Homo sapiens
uugaaguaugaccgcugagaau

SEQ ID NO: 8579 - RNA, 22 nt, Homo sapiens
ugagaucguugcgugagcgugu

SEQ ID NO: 8580 - RNA, 22 nt, Homo sapiens
agcuuguguuugucugccuggg

SEQ ID NO: 8581 - RNA, 22 nt, Homo sapiens
acucagagaacauucccagucu

SEQ ID NO: 8582 - RNA, 22 nt, Homo sapiens
aguggaguguaaagcgucuuuu

SEQ ID NO: 8583 - RNA, 22 nt, Homo sapiens
uuauggauuuauauucuguagu

SEQ ID NO: 8584 - RNA, 19 nt, Homo sapiens
uucagcagugucugcucuu

SEQ ID NO: 8585 - RNA, 22 nt, Homo sapiens
uugcuaguguuugguugauggu

SEQ ID NO: 8586 - RNA, 22 nt, Homo sapiens
cacagcuaacaacuguuucuuc

SEQ ID NO: 8587 - RNA, 22 nt, Homo sapiens
cacagugaaugucaucauugcc

SEQ ID NO: 8588 - RNA, 16 nt, Homo sapiens
uuucuauguuuuacua

SEQ ID NO: 8589 - RNA, 22 nt, Homo sapiens
ugguauguuuauaaguauagga

SEQ ID NO: 8590 - RNA, 22 nt, Homo sapiens
uaacauucacaugcugcaaaaa

SEQ ID NO: 8591 - RNA, 22 nt, Homo sapiens
uuuacagucuuuugugugaguc

SEQ ID NO: 8592 - RNA, 22 nt, Homo sapiens
cauugcaauccagccugggcaa

SEQ ID NO: 8593 - RNA, 22 nt, Homo sapiens
uuuguuugaagucgagacaacu

SEQ ID NO: 8594 - RNA, 22 nt, Homo sapiens
uuaaggccccgcccauucaggc

SEQ ID NO: 8595 - RNA, 22 nt, Homo sapiens
augauuuuuguaucgccugaug

SEQ ID NO: 8596 - RNA, 22 nt, Homo sapiens
acucagagauuagcacauguuu

SEQ ID NO: 8597 - RNA, 21 nt, Homo sapiens
cauccccugccauuguggucu

SEQ ID NO: 8598 - RNA, 22 nt, Homo sapiens
cugccaguuugauucgggccac

SEQ ID NO: 8599 - RNA, 22 nt, Homo sapiens
uugagaucaugcuacugcacuc

SEQ ID NO: 8600 - RNA, 22 nt, Homo sapiens
ccuuuguuuaguugaauuguau

SEQ ID NO: 8601 - RNA, 22 nt, Homo sapiens
cacugcaguggaagauuaagaa

SEQ ID NO: 8602 - RNA, 22 nt, Homo sapiens
guaaucucagcuacuugggagc

SEQ ID NO: 8603 - RNA, 22 nt, Homo sapiens
ucucugauuaaacaagauagug

SEQ ID NO: 8604 - RNA, 22 nt, Homo sapiens
auguuguaguaugagucaaaau

SEQ ID NO: 8605 - RNA, 22 nt, Homo sapiens
auauagcaaugaaagagaugaa

SEQ ID NO: 8606 - RNA, 22 nt, Homo sapiens
cuguaagcauuauaaagagaua

SEQ ID NO: 8607 - RNA, 22 nt, Homo sapiens
ugucaggaugcuccuuuuggcu

SEQ ID NO: 8608 - RNA, 21 nt, Homo sapiens
ugucgugcaggaucuguggga

SEQ ID NO: 8609 - RNA, 22 nt, Homo sapiens
auggcuugugggaacuuuuaaa

SEQ ID NO: 8610 - RNA, 22 nt, Homo sapiens
acuccacuuucaccacagcgga

SEQ ID NO: 8611 - RNA, 22 nt, Homo sapiens
aggguaguaggcuugggauugg

SEQ ID NO: 8612 - RNA, 22 nt, Homo sapiens
uucccuagaacacauggaggga

SEQ ID NO: 8613 - RNA, 22 nt, Homo sapiens
accuuguagcaaaccuaacaua

SEQ ID NO: 8614 - RNA, 22 nt, Homo sapiens
augccacugcacuccaaccugg

SEQ ID NO: 8615 - RNA, 22 nt, Homo sapiens
uguacaaauuucugugguggug

SEQ ID NO: 8616 - RNA, 22 nt, Homo sapiens
uuaguagcacagaguaucagca

SEQ ID NO: 8617 - RNA, 22 nt, Homo sapiens
acuguacuccagccugggcaac

SEQ ID NO: 8618 - RNA, 22 nt, Homo sapiens
ucaucaggcucauucaagcuga

SEQ ID NO: 8619 - RNA, 22 nt, Homo sapiens
cucaaagugcuaagauuaggcu

SEQ ID NO: 8620 - RNA, 22 nt, Homo sapiens
gaacuguaaagaaauucuaagg

SEQ ID NO: 8621 - RNA, 23 nt, Homo sapiens
augugguuuuagguguugaacug

SEQ ID NO: 8622 - RNA, 22 nt, Homo sapiens
cauggagcuaggcuugaucccu

SEQ ID NO: 8623 - RNA, 22 nt, Homo sapiens
ucaaauguuuguuuaaggcuua

SEQ ID NO: 8624 - RNA, 22 nt, Homo sapiens
acuggaguuuguucaagaaaua

SEQ ID NO: 8625 - RNA, 22 nt, Homo sapiens
ugccaguauuuuguugaagauu

SEQ ID NO: 8626 - RNA, 22 nt, Homo sapiens
gggaugaauuagguauguuuau

SEQ ID NO: 8627 - RNA, 22 nt, Homo sapiens
augaaaagcauaaacgcugaag

SEQ ID NO: 8628 - RNA, 22 nt, Homo sapiens
cauauucacuuuacagagcugu

SEQ ID NO: 8629 - RNA, 22 nt, Homo sapiens
ggagucugauuuuuauguugcu

SEQ ID NO: 8630 - RNA, 22 nt, Homo sapiens
uacauugcacuuuauuagauac

SEQ ID NO: 8631 - RNA, 19 nt, Homo sapiens
uggaccccuuccuuacacc

SEQ ID NO: 8632 - RNA, 22 nt, Homo sapiens
uaucacagcauugucuauaaua

SEQ ID NO: 8633 - RNA, 22 nt, Homo sapiens
uugcaugcuccuuaugagaauc

SEQ ID NO: 8634 - RNA, 22 nt, Homo sapiens
auggcuuuggucucccagugau

SEQ ID NO: 8635 - RNA, 22 nt, Homo sapiens
uauugucaccaucccuguuuua

SEQ ID NO: 8636 - RNA, 20 nt, Homo sapiens
guucauguaauuaguucagg

SEQ ID NO: 8637 - RNA, 22 nt, Homo sapiens
uagcaguagacagacuuuggcu

SEQ ID NO: 8638 - RNA, 22 nt, Homo sapiens
augcccauuuguuuucugaaag

SEQ ID NO: 8639 - RNA, 22 nt, Homo sapiens
gagccauggagaaaacagcuau

SEQ ID NO: 8640 - RNA, 22 nt, Homo sapiens
cuuugguguauuuucagagacc

SEQ ID NO: 8641 - RNA, 22 nt, Homo sapiens
gaguaaauguccuagcuucuug

SEQ ID NO: 8642 - RNA, 22 nt, Homo sapiens
ucuuugauaagauccagaagaa

SEQ ID NO: 8643 - RNA, 22 nt, Homo sapiens
ugagacugguaauguguagggc

SEQ ID NO: 8644 - RNA, 21 nt, Homo sapiens
ugcauuguugcugagagcagg

SEQ ID NO: 8645 - RNA, 22 nt, Homo sapiens
ucccagucuagagccggauugg

SEQ ID NO: 8646 - RNA, 22 nt, Homo sapiens
acagauugcugggccccagccc

SEQ ID NO: 8647 - RNA, 22 nt, Homo sapiens
cugacagucucauugauuugcu

SEQ ID NO: 8648 - RNA, 21 nt, Homo sapiens
ucaucagucaaagacaauggu

SEQ ID NO: 8649 - RNA, 22 nt, Homo sapiens
auaaaugcuuccagucauuaaa

SEQ ID NO: 8650 - RNA, 22 nt, Homo sapiens
ccuuuguggggcgguggguaau

SEQ ID NO: 8651 - RNA, 22 nt, Homo sapiens
auacagacacagucagaggggu

SEQ ID NO: 8652 - RNA, 22 nt, Homo sapiens
ucagcagugugaaaacaaacua

SEQ ID NO: 8653 - RNA, 22 nt, Homo sapiens
cuacugcacaucaucugaguua

SEQ ID NO: 8654 - RNA, 22 nt, Homo sapiens
augugacagcaacccccagccc

SEQ ID NO: 8655 - RNA, 22 nt, Homo sapiens
augaaagugauaaaugucucua

SEQ ID NO: 8656 - RNA, 22 nt, Homo sapiens
uuggaaugcaacagaaggauaa

SEQ ID NO: 8657 - RNA, 22 nt, Homo sapiens
gauaagagaugauuuugccaug

SEQ ID NO: 8658 - RNA, 21 nt, Homo sapiens
gaaauacugccuuaggagcug

SEQ ID NO: 8659 - RNA, 22 nt, Homo sapiens
uuacaguugugagccaccaugc

SEQ ID NO: 8660 - RNA, 22 nt, Homo sapiens
ccugguguuuugauggucgggu

SEQ ID NO: 8661 - RNA, 22 nt, Homo sapiens
uuauagguuucuacaggacuau

SEQ ID NO: 8662 - RNA, 22 nt, Homo sapiens
uauggcugugacuuaucuuguu

SEQ ID NO: 8663 - RNA, 22 nt, Homo sapiens
aagguagcugagugaagugguu

SEQ ID NO: 8664 - RNA, 22 nt, Homo sapiens
ucccaguggucuugaaacaggg

SEQ ID NO: 8665 - RNA, 22 nt, Homo sapiens
ugccaacaugccuggcuguuuu

SEQ ID NO: 8666 - RNA, 22 nt, Homo sapiens
uucaaggacuaaggauuuuugg

SEQ ID NO: 8667 - RNA, 22 nt, Homo sapiens
uucacugggugugguggcucac

SEQ ID NO: 8668 - RNA, 22 nt, Homo sapiens
uuagguauuuuguuaugucagc

SEQ ID NO: 8669 - RNA, 23 nt, Homo sapiens
aagugguuuugaacccggacccu

SEQ ID NO: 8670 - RNA, 22 nt, Homo sapiens
aguaaacuucagaguucuuccu

SEQ ID NO: 8671 - RNA, 22 nt, Homo sapiens
aaugcaagauguuaauuauagg

SEQ ID NO: 8672 - RNA, 22 nt, Homo sapiens
agcccauuuugcacugagaugc

SEQ ID NO: 8673 - RNA, 22 nt, Homo sapiens
augggauaguaucaguggaaua

SEQ ID NO: 8674 - RNA, 22 nt, Homo sapiens
augugugcuugugacacagccu

SEQ ID NO: 8675 - RNA, 22 nt, Homo sapiens
aaucacguagcaguagggagaa

SEQ ID NO: 8676 - RNA, 22 nt, Homo sapiens
uuuaucaggccuuuggaaaaau

SEQ ID NO: 8677 - RNA, 22 nt, Homo sapiens
auccaguguuuucuuuugucac

SEQ ID NO: 8678 - RNA, 22 nt, Homo sapiens
gugagucaaucugagggguuca

SEQ ID NO: 8679 - RNA, 22 nt, Homo sapiens
uggcaucuguucuacacauaaa

SEQ ID NO: 8680 - RNA, 22 nt, Homo sapiens
uacagaauauuucugcccugag

SEQ ID NO: 8681 - RNA, 22 nt, Homo sapiens
uuccaugugggcuugucaagua

SEQ ID NO: 8682 - RNA, 22 nt, Homo sapiens
uugugauugagugauccuuguu

SEQ ID NO: 8683 - RNA, 22 nt, Homo sapiens
ccccguuacagccucagugccu

SEQ ID NO: 8684 - RNA, 22 nt, Homo sapiens
cauugcacuccagccuugguga

SEQ ID NO: 8685 - RNA, 22 nt, Homo sapiens
cccagcguucggcauggcugag

SEQ ID NO: 8686 - RNA, 22 nt, Homo sapiens
cuacugacacuacugcaaucau

SEQ ID NO: 8687 - RNA, 22 nt, Homo sapiens
cucagagcacaguuuaugacag

SEQ ID NO: 8688 - RNA, 22 nt, Homo sapiens
uugaauaguggugaaaguuuga

SEQ ID NO: 8689 - RNA, 22 nt, Homo sapiens
uuacauguuuauggggguacau

SEQ ID NO: 8690 - RNA, 17 nt, Homo sapiens
uugggcaagguagguga

SEQ ID NO: 8691 - RNA, 22 nt, Homo sapiens
cucugguuaaggcugaacuaua

SEQ ID NO: 8692 - RNA, 22 nt, Homo sapiens
uguacuagaaauuaaggcaggg

SEQ ID NO: 8693 - RNA, 22 nt, Homo sapiens
uugcauuuucuaggagggcaaa

SEQ ID NO: 8694 - RNA, 22 nt, Homo sapiens
uaagucguggaugauucuucgg

SEQ ID NO: 8695 - RNA, 21 nt, Homo sapiens
aacacggugaaaucccgucuc

SEQ ID NO: 8696 - RNA, 22 nt, Homo sapiens
uucagugccuggaagucgugcu

SEQ ID NO: 8697 - RNA, 22 nt, Homo sapiens
uucccagucaaacgaaggacuu

SEQ ID NO: 8698 - RNA, 22 nt, Homo sapiens
uuggacuucucaaggcaauaaa

SEQ ID NO: 8699 - RNA, 22 nt, Homo sapiens
aucuuuggcgggaauaucacag

SEQ ID NO: 8700 - RNA, 22 nt, Homo sapiens
aggcuaagaugacuccaccccc

SEQ ID NO: 8701 - RNA, 22 nt, Homo sapiens
auugcacuggggguuagaauuu

SEQ ID NO: 8702 - RNA, 22 nt, Homo sapiens
uuacuguauagaaucaucuuga

SEQ ID NO: 8703 - RNA, 22 nt, Homo sapiens
acccugcuaaacagcccccugc

SEQ ID NO: 8704 - RNA, 19 nt, Homo sapiens
ucugugcuugucccccugu

SEQ ID NO: 8705 - RNA, 22 nt, Homo sapiens
acaugcaucauuaggugguuua

SEQ ID NO: 8706 - RNA, 22 nt, Homo sapiens
ugugaugaaggcauagggaugu

SEQ ID NO: 8707 - RNA, 17 nt, Homo sapiens
accagugcaugugcuuu

SEQ ID NO: 8708 - RNA, 22 nt, Homo sapiens
guaagugauagaauuaggauuc

SEQ ID NO: 8709 - RNA, 22 nt, Homo sapiens
gcugauggugcaguucuagccu

SEQ ID NO: 8710 - RNA, 22 nt, Homo sapiens
uugugaauggaguagcaggauc

SEQ ID NO: 8711 - RNA, 22 nt, Homo sapiens
gucuagaacuucugaccuuagg

SEQ ID NO: 8712 - RNA, 22 nt, Homo sapiens
gaucacaugggagaaugagagu

SEQ ID NO: 8713 - RNA, 22 nt, Homo sapiens
gcaugaugaauaauaucacaag

SEQ ID NO: 8714 - RNA, 22 nt, Homo sapiens
ucauggggugcuuugcuagauu

SEQ ID NO: 8715 - RNA, 22 nt, Homo sapiens
uauuacuugucugugucucaau

SEQ ID NO: 8716 - RNA, 22 nt, Homo sapiens
cuaaaguagccaggacugcagg

SEQ ID NO: 8717 - RNA, 22 nt, Homo sapiens
guccaaauccaugggauguaca

SEQ ID NO: 8718 - RNA, 22 nt, Homo sapiens
cauugcacuccagccugaccaa

SEQ ID NO: 8719 - RNA, 22 nt, Homo sapiens
ugagguagguaccauuaucacu

SEQ ID NO: 8720 - RNA, 22 nt, Homo sapiens
aguaucaagccacacaugguca

SEQ ID NO: 8721 - RNA, 22 nt, Homo sapiens
ugaaauggaaagaguguagacu

SEQ ID NO: 8722 - RNA, 22 nt, Homo sapiens
uaugccucuucauaaaguauga

SEQ ID NO: 8723 - RNA, 22 nt, Homo sapiens
uuccaguugugagcuauccggg

SEQ ID NO: 8724 - RNA, 21 nt, Homo sapiens
ggcaagagaauacaacauaaa

SEQ ID NO: 8725 - RNA, 22 nt, Homo sapiens
uuggguccucugguccuugguu

SEQ ID NO: 8726 - RNA, 22 nt, Homo sapiens
aaagcuacaggaccugcucauu

SEQ ID NO: 8727 - RNA, 22 nt, Homo sapiens
gcuguaguugaggauuuuaaga

SEQ ID NO: 8728 - RNA, 22 nt, Homo sapiens
augagagcuaacuguggguaca

SEQ ID NO: 8729 - RNA, 22 nt, Homo sapiens
ucucugagaccacuccaaacuc

SEQ ID NO: 8730 - RNA, 22 nt, Homo sapiens
cuugcacuccacuguucuccug

SEQ ID NO: 8731 - RNA, 22 nt, Homo sapiens
augucuggcagaagacuucuca

SEQ ID NO: 8732 - RNA, 22 nt, Homo sapiens
ucaguaguaaauggauuuggaa

SEQ ID NO: 8733 - RNA, 22 nt, Homo sapiens
ggauaacagccaggucaaacaa

SEQ ID NO: 8734 - RNA, 22 nt, Homo sapiens
uugagauaucuuggccuuugca

SEQ ID NO: 8735 - RNA, 22 nt, Homo sapiens
auacccauacauauuggugacu

SEQ ID NO: 8736 - RNA, 22 nt, Homo sapiens
augguuuuacugcaaaauggga

SEQ ID NO: 8737 - RNA, 22 nt, Homo sapiens
cuugacaucugucaguuccuca

SEQ ID NO: 8738 - RNA, 22 nt, Homo sapiens
ugcaagauaggcaguuugcacu

SEQ ID NO: 8739 - RNA, 22 nt, Homo sapiens
uuuugugacuauuguaaauggg

SEQ ID NO: 8740 - RNA, 22 nt, Homo sapiens
agaaauguuuauucaaacccgu

SEQ ID NO: 8741 - RNA, 22 nt, Homo sapiens
ugagaucuuggaggcuuuguga

SEQ ID NO: 8742 - RNA, 22 nt, Homo sapiens
cucaaguagugguuuucauuga

SEQ ID NO: 8743 - RNA, 18 nt, Homo sapiens
agaugcaugcucacuaca

SEQ ID NO: 8744 - RNA, 22 nt, Homo sapiens
gaggcagucuguccauucucag

SEQ ID NO: 8745 - RNA, 21 nt, Homo sapiens
uuggucuucucugugauucuu

SEQ ID NO: 8746 - RNA, 22 nt, Homo sapiens
auaaaccuacauuuucacuucu

SEQ ID NO: 8747 - RNA, 22 nt, Homo sapiens
accuuguaucuguuaggauugc

SEQ ID NO: 8748 - RNA, 20 nt, Homo sapiens
ugugaacuguagauagucuu

SEQ ID NO: 8749 - RNA, 22 nt, Homo sapiens
gugaucuucauggaaggugaaa

SEQ ID NO: 8750 - RNA, 22 nt, Homo sapiens
auauucaagugaggauggcuaa

SEQ ID NO: 8751 - RNA, 22 nt, Homo sapiens
uuguauguuuguucuuucagau

SEQ ID NO: 8752 - RNA, 22 nt, Homo sapiens
cugacugugcaugcccagcccc

SEQ ID NO: 8753 - RNA, 22 nt, Homo sapiens
ugugccacuccagcucuagcuu

SEQ ID NO: 8754 - RNA, 22 nt, Homo sapiens
cacugcacuccagucugacgac

SEQ ID NO: 8755 - RNA, 22 nt, Homo sapiens
cuugaccaauauggugaaaccc

SEQ ID NO: 8756 - RNA, 23 nt, Homo sapiens
uuuguguccccacccaaaucuca

SEQ ID NO: 8757 - RNA, 18 nt, Homo sapiens
guguauggauggaggcca

SEQ ID NO: 8758 - RNA, 22 nt, Homo sapiens
uacugcaguugcagcuugagga

SEQ ID NO: 8759 - RNA, 22 nt, Homo sapiens
uagcagcauaaauggacuaaga

SEQ ID NO: 8760 - RNA, 21 nt, Homo sapiens
uguggcaauggccucacagau

SEQ ID NO: 8761 - RNA, 22 nt, Homo sapiens
cacugcgacguccgccucccgg

SEQ ID NO: 8762 - RNA, 22 nt, Homo sapiens
acacugucaugucucacaggca

SEQ ID NO: 8763 - RNA, 22 nt, Homo sapiens
gcaagagguaucuuauuuuccc

SEQ ID NO: 8764 - RNA, 22 nt, Homo sapiens
uuggagagagaggacucccggc

SEQ ID NO: 8765 - RNA, 22 nt, Homo sapiens
ugaucaaagugcuggaauuaca

SEQ ID NO: 8766 - RNA, 22 nt, Homo sapiens
cugugcacaucuggcggcccga

SEQ ID NO: 8767 - RNA, 22 nt, Homo sapiens
ggagugucagaaacaguguccu

SEQ ID NO: 8768 - RNA, 22 nt, Homo sapiens
acacaugugcguagacucuuua

SEQ ID NO: 8769 - RNA, 20 nt, Homo sapiens
cugcaaaugcugcugcugau

SEQ ID NO: 8770 - RNA, 22 nt, Homo sapiens
uugacauauguguguccacaua

SEQ ID NO: 8771 - RNA, 22 nt, Homo sapiens
ugccuaguguguugagaguuuu

SEQ ID NO: 8772 - RNA, 22 nt, Homo sapiens
guccugaagaccuuccucugga

SEQ ID NO: 8773 - RNA, 22 nt, Homo sapiens
ugggaagagggagcgauuuugg

SEQ ID NO: 8774 - RNA, 22 nt, Homo sapiens
uucaagcugggcaaauaagggg

SEQ ID NO: 8775 - RNA, 22 nt, Homo sapiens
gagauaauuugaaucauggggg

SEQ ID NO: 8776 - RNA, 22 nt, Homo sapiens
acaaagcgcuucucuuuagagu

SEQ ID NO: 8777 - RNA, 20 nt, Homo sapiens
aacagcacugucugaagcuu

SEQ ID NO: 8778 - RNA, 22 nt, Homo sapiens
uuuaggcaugcaguucuauuua

SEQ ID NO: 8779 - RNA, 20 nt, Homo sapiens
ucagguagggcuucaacauu

SEQ ID NO: 8780 - RNA, 22 nt, Homo sapiens
uaugacguuuuauuggcgcagu

SEQ ID NO: 8781 - RNA, 22 nt, Homo sapiens
gagguagagacuauguauuaga

SEQ ID NO: 8782 - RNA, 22 nt, Homo sapiens
ucagacacugagcaaacgacua

SEQ ID NO: 8783 - RNA, 22 nt, Homo sapiens
cauugcacuccacuccugaaca

SEQ ID NO: 8784 - RNA, 22 nt, Homo sapiens
cauggcuuuaagcaacaccaag

SEQ ID NO: 8785 - RNA, 22 nt, Homo sapiens
gaguuuguaaacuauucacuaa

SEQ ID NO: 8786 - RNA, 22 nt, Homo sapiens
ugugacaaauuuaguggacugu

SEQ ID NO: 8787 - RNA, 22 nt, Homo sapiens
ugaguaucuugaugaauuugaa

SEQ ID NO: 8788 - RNA, 22 nt, Homo sapiens
ucagguccuuacugugcucccu

SEQ ID NO: 8789 - RNA, 20 nt, Homo sapiens
ggaagagugacacaagguau

SEQ ID NO: 8790 - RNA, 22 nt, Homo sapiens
cagugcaaccuccaucucucgg

SEQ ID NO: 8791 - RNA, 22 nt, Homo sapiens
uaaggcuuuuguucagcguggg

SEQ ID NO: 8792 - RNA, 22 nt, Homo sapiens
uguagauaucauuagugcugug

SEQ ID NO: 8793 - RNA, 22 nt, Homo sapiens
cugucacaguuuuggaggccag

SEQ ID NO: 8794 - RNA, 22 nt, Homo sapiens
cuaaagugcugagauuauaggu

SEQ ID NO: 8795 - RNA, 22 nt, Homo sapiens
augagggcggacgcccuggaga

SEQ ID NO: 8796 - RNA, 22 nt, Homo sapiens
uaccucaguucaauaacagaua

SEQ ID NO: 8797 - RNA, 22 nt, Homo sapiens
acugcacuccagccuuugcgau

SEQ ID NO: 8798 - RNA, 22 nt, Homo sapiens
ugcguucauuuggccaguggcg

SEQ ID NO: 8799 - RNA, 22 nt, Homo sapiens
auguuaacaucuuaguuuucau

SEQ ID NO: 8800 - RNA, 22 nt, Homo sapiens
gucuuuguuuugauuuaccaga

SEQ ID NO: 8801 - RNA, 22 nt, Homo sapiens
cuagcaggcaagauaagauuca

SEQ ID NO: 8802 - RNA, 22 nt, Homo sapiens
uuuagcgaaugcuugcuccugu

SEQ ID NO: 8803 - RNA, 22 nt, Homo sapiens
uucuggaaaucagcagagggug

SEQ ID NO: 8804 - RNA, 22 nt, Homo sapiens
caccagguuggagugcaguggu

SEQ ID NO: 8805 - RNA, 22 nt, Homo sapiens
ugagacggagucucgcuguguc

SEQ ID NO: 8806 - RNA, 22 nt, Homo sapiens
cuaucucaggcccaggcccuug

SEQ ID NO: 8807 - RNA, 18 nt, Homo sapiens
ugacuguccagguggacc

SEQ ID NO: 8808 - RNA, 21 nt, Homo sapiens
aggcaagguguuauuauugaa

SEQ ID NO: 8809 - RNA, 22 nt, Homo sapiens
uuguacuccagccugggugaca

SEQ ID NO: 8810 - RNA, 19 nt, Homo sapiens
uccccgggucuagugcagc

SEQ ID NO: 8811 - RNA, 17 nt, Homo sapiens
uagcuucacauuaggaa

SEQ ID NO: 8812 - RNA, 22 nt, Homo sapiens
cuguaugugagaaauaauaagu

SEQ ID NO: 8813 - RNA, 22 nt, Homo sapiens
guuuugguuauauggaucaguu

SEQ ID NO: 8814 - RNA, 22 nt, Homo sapiens
cauaugguuuuauguucuucau

SEQ ID NO: 8815 - RNA, 22 nt, Homo sapiens
auggccuuucuggcacauuucc

SEQ ID NO: 8816 - RNA, 22 nt, Homo sapiens
augaaauguaugagucuggguu

SEQ ID NO: 8817 - RNA, 22 nt, Homo sapiens
uucaggguggagaguaugaggu

SEQ ID NO: 8818 - RNA, 22 nt, Homo sapiens
cauugguuuauagauggggaaa

SEQ ID NO: 8819 - RNA, 21 nt, Homo sapiens
uuugaucauuaaaagugaauc

SEQ ID NO: 8820 - RNA, 23 nt, Homo sapiens
uggccaagauaaucucaguuuuc

SEQ ID NO: 8821 - RNA, 22 nt, Homo sapiens
guaugucuugucuauggcugcu

SEQ ID NO: 8822 - RNA, 22 nt, Homo sapiens
uaguugcauuggcugcuaugcu

SEQ ID NO: 8823 - RNA, 22 nt, Homo sapiens
aauccugucuugccauccaaua

SEQ ID NO: 8824 - RNA, 22 nt, Homo sapiens
aacuggccugagaugaaaagug

SEQ ID NO: 8825 - RNA, 18 nt, Homo sapiens
auaaccuggugcuuucaa

SEQ ID NO: 8826 - RNA, 22 nt, Homo sapiens
cugucuagagggcacaugaugc

SEQ ID NO: 8827 - RNA, 22 nt, Homo sapiens
aacaccauuuuucugcagccuu

SEQ ID NO: 8828 - RNA, 22 nt, Homo sapiens
uuuagguauuugguauagcagu

SEQ ID NO: 8829 - RNA, 22 nt, Homo sapiens
augaauguaaagaaugugggaa

SEQ ID NO: 8830 - RNA, 20 nt, Homo sapiens
cagcuagugguaggagucgg

SEQ ID NO: 8831 - RNA, 22 nt, Homo sapiens
uaucaccuugguagucuugggg

SEQ ID NO: 8832 - RNA, 22 nt, Homo sapiens
cuguagacauuaggccugcacu

SEQ ID NO: 8833 - RNA, 22 nt, Homo sapiens
uguggcaaauggucaggaagaa

SEQ ID NO: 8834 - RNA, 22 nt, Homo sapiens
cauugcaguaagagugggcucu

SEQ ID NO: 8835 - RNA, 22 nt, Homo sapiens
uuaugucauuuuuggauguuaa

SEQ ID NO: 8836 - RNA, 22 nt, Homo sapiens
uuuugcaauaguccuggccugu

SEQ ID NO: 8837 - RNA, 21 nt, Homo sapiens
ucacaaugaacagcagcagaa

SEQ ID NO: 8838 - RNA, 22 nt, Homo sapiens
uguggcagugcuuuaugaaacc

SEQ ID NO: 8839 - RNA, 22 nt, Homo sapiens
aggcuuuuguuuuggucucagg

SEQ ID NO: 8840 - RNA, 20 nt, Homo sapiens
uguaaaggagauugcagcug

SEQ ID NO: 8841 - RNA, 18 nt, Homo sapiens
uuuuugaggcacagggga

SEQ ID NO: 8842 - RNA, 22 nt, Homo sapiens
ugugcaaauuagcacaacccga

SEQ ID NO: 8843 - RNA, 22 nt, Homo sapiens
gggcaugugugugcacacacau

SEQ ID NO: 8844 - RNA, 22 nt, Homo sapiens
gugugcacaaucuggcaugugc

SEQ ID NO: 8845 - RNA, 22 nt, Homo sapiens
gucagggagucucuaucagugg

SEQ ID NO: 8846 - RNA, 22 nt, Homo sapiens
auauuugguuaccugugggucu

SEQ ID NO: 8847 - RNA, 22 nt, Homo sapiens
ugggaaauguagccuagcugug

SEQ ID NO: 8848 - RNA, 22 nt, Homo sapiens
uugacauugcuguaguguccag

SEQ ID NO: 8849 - RNA, 22 nt, Homo sapiens
aaaggcacugugacuuuauagg

SEQ ID NO: 8850 - RNA, 22 nt, Homo sapiens
ucgacacugaccuaguucagca

SEQ ID NO: 8851 - RNA, 22 nt, Homo sapiens
uugugguuuuuaaaacuaggug

SEQ ID NO: 8852 - RNA, 22 nt, Homo sapiens
ugacauggagggugcggcugca

SEQ ID NO: 8853 - RNA, 22 nt, Homo sapiens
agugaauguuggaaaguuauuu

SEQ ID NO: 8854 - RNA, 22 nt, Homo sapiens
aucugggguuggcaaaguuugg

SEQ ID NO: 8855 - RNA, 17 nt, Homo sapiens
ucuggcuuucacaccug

SEQ ID NO: 8856 - RNA, 18 nt, Homo sapiens
uaucucauuucuuagguc

SEQ ID NO: 8857 - RNA, 22 nt, Homo sapiens
uuagguagucucugucagaggg

SEQ ID NO: 8858 - RNA, 22 nt, Homo sapiens
uugcauugacacaugaagcuca

SEQ ID NO: 8859 - RNA, 16 nt, Homo sapiens
cacauugcugcauggc

SEQ ID NO: 8860 - RNA, 21 nt, Homo sapiens
uuaaguaauuacccaacucuc

SEQ ID NO: 8861 - RNA, 22 nt, Homo sapiens
aucaaacugcaaggcagcagca

SEQ ID NO: 8862 - RNA, 22 nt, Homo sapiens
agagauaauuagguuaaaugag

SEQ ID NO: 8863 - RNA, 22 nt, Homo sapiens
cugauuguuugccucuaaaauc

SEQ ID NO: 8864 - RNA, 22 nt, Homo sapiens
gcuuguguucaagucacccuua

SEQ ID NO: 8865 - RNA, 22 nt, Homo sapiens
cauugcacugcagcccgggcaa

SEQ ID NO: 8866 - RNA, 22 nt, Homo sapiens
auaauguuugauugagcagaua

SEQ ID NO: 8867 - RNA, 23 nt, Homo sapiens
auuccaguggcaauuggagaaac

SEQ ID NO: 8868 - RNA, 22 nt, Homo sapiens
auggcccaguuugcuaucccua

SEQ ID NO: 8869 - RNA, 22 nt, Homo sapiens
augaauccauuccugccacaga

SEQ ID NO: 8870 - RNA, 22 nt, Homo sapiens
agucaugggagagaugugaucg

SEQ ID NO: 8871 - RNA, 22 nt, Homo sapiens
uauauaagcugaugagccacaa

SEQ ID NO: 8872 - RNA, 22 nt, Homo sapiens
uuggaagacaaugcugauucuc

SEQ ID NO: 8873 - RNA, 22 nt, Homo sapiens
gagcuacauggauagucugcau

SEQ ID NO: 8874 - RNA, 22 nt, Homo sapiens
auugcucuuagaaauauuucuu

SEQ ID NO: 8875 - RNA, 22 nt, Homo sapiens
aagugcaaaucuguggcugaaa

SEQ ID NO: 8876 - RNA, 21 nt, Homo sapiens
ugugacuguugcauuugucgu

SEQ ID NO: 8877 - RNA, 22 nt, Homo sapiens
ugagguaaugcuguagcuguga

SEQ ID NO: 8878 - RNA, 22 nt, Homo sapiens
uggcaugauauauauucguuug

SEQ ID NO: 8879 - RNA, 22 nt, Homo sapiens
uuauaacucugcagccugguau

SEQ ID NO: 8880 - RNA, 22 nt, Homo sapiens
gcuaugguuuuuagcuccauca

SEQ ID NO: 8881 - RNA, 22 nt, Homo sapiens
auucaucagggauauuggucug

SEQ ID NO: 8882 - RNA, 19 nt, Homo sapiens
ccuugguuagguauauucc

SEQ ID NO: 8883 - RNA, 22 nt, Homo sapiens
uaaguaauugugguuucugcca

SEQ ID NO: 8884 - RNA, 22 nt, Homo sapiens
ucucugguuaugucauuaagca

SEQ ID NO: 8885 - RNA, 22 nt, Homo sapiens
cugaggucugaauccagguauc

SEQ ID NO: 8886 - RNA, 22 nt, Homo sapiens
uuguaguguuuauucugucaac

SEQ ID NO: 8887 - RNA, 22 nt, Homo sapiens
gcuaaaugcaugaggcgaugug

SEQ ID NO: 8888 - RNA, 22 nt, Homo sapiens
cucagugucuggcacacagaaa

SEQ ID NO: 8889 - RNA, 22 nt, Homo sapiens
cuaacaacacagcagauuagaa

SEQ ID NO: 8890 - RNA, 22 nt, Homo sapiens
aucugguguauuggugcugggu

SEQ ID NO: 8891 - RNA, 22 nt, Homo sapiens
uagguagaacuuuagacccugu

SEQ ID NO: 8892 - RNA, 22 nt, Homo sapiens
aagcaguguggacuaaugggaa

SEQ ID NO: 8893 - RNA, 22 nt, Homo sapiens
ggagaugauuaugaaucacuua

SEQ ID NO: 8894 - RNA, 22 nt, Homo sapiens
agaugauguuuacugagcauca

SEQ ID NO: 8895 - RNA, 22 nt, Homo sapiens
aauugaaugcagaugccaggga

SEQ ID NO: 8896 - RNA, 22 nt, Homo sapiens
uucauguaaucaaggcagcuaa

SEQ ID NO: 8897 - RNA, 22 nt, Homo sapiens
guucaagugauucuacugccuc

SEQ ID NO: 8898 - RNA, 22 nt, Homo sapiens
cugagcaaaguucuauuuaugg

SEQ ID NO: 8899 - RNA, 22 nt, Homo sapiens
uauguguuuuauggucagggag

SEQ ID NO: 8900 - RNA, 22 nt, Homo sapiens
uaucugguuauugcugcugauu

SEQ ID NO: 8901 - RNA, 22 nt, Homo sapiens
gcaccguggaguauggggagga

SEQ ID NO: 8902 - RNA, 18 nt, Homo sapiens
augaccugcggguuauau

SEQ ID NO: 8903 - RNA, 22 nt, Homo sapiens
ugggagcauugcauuagaagcc

SEQ ID NO: 8904 - RNA, 22 nt, Homo sapiens
auagugcugcaacaaauauacg

SEQ ID NO: 8905 - RNA, 22 nt, Homo sapiens
acuauacugaagcaaauuaaca

SEQ ID NO: 8906 - RNA, 21 nt, Homo sapiens
uuuggcuucucugcugcagcc

SEQ ID NO: 8907 - RNA, 22 nt, Homo sapiens
gcagcaguggcaguuaauauuu

SEQ ID NO: 8908 - RNA, 22 nt, Homo sapiens
augaguauguucuguauuuuca

SEQ ID NO: 8909 - RNA, 22 nt, Homo sapiens
uauauguucugugucccuuucg

SEQ ID NO: 8910 - RNA, 22 nt, Homo sapiens
ugagcagagggagaaguaaauu

SEQ ID NO: 8911 - RNA, 22 nt, Homo sapiens
uuugguguauauguaaacuaug

SEQ ID NO: 8912 - RNA, 22 nt, Homo sapiens
guaaggaguaguguaacagugc

SEQ ID NO: 8913 - RNA, 22 nt, Homo sapiens
ugucaugguagcaaggacgagg

SEQ ID NO: 8914 - RNA, 19 nt, Homo sapiens
gguucaguuuauaaagaug

SEQ ID NO: 8915 - RNA, 22 nt, Homo sapiens
uagcaccucuuuggccuuucgu

SEQ ID NO: 8916 - RNA, 22 nt, Homo sapiens
uaugcacuaggcacuguguuug

SEQ ID NO: 8917 - RNA, 22 nt, Homo sapiens
gaaucacaguuauuagagcagc

SEQ ID NO: 8918 - RNA, 22 nt, Homo sapiens
gucauugucaauugacaauugu

SEQ ID NO: 8919 - RNA, 22 nt, Homo sapiens
uuuuaguggaauauuuacaguu

SEQ ID NO: 8920 - RNA, 22 nt, Homo sapiens
ucccaguauucauuuacagaag

SEQ ID NO: 8921 - RNA, 21 nt, Homo sapiens
gugcuuguagccucacuucug

SEQ ID NO: 8922 - RNA, 20 nt, Homo sapiens
ucacaagccaagaucacguc

SEQ ID NO: 8923 - RNA, 20 nt, Homo sapiens
ugacuuguccgagguccccc

SEQ ID NO: 8924 - RNA, 22 nt, Homo sapiens
auggaguuuacuuaguguaaua

SEQ ID NO: 8925 - RNA, 20 nt, Homo sapiens
cuaaucaucccagaagaaau

SEQ ID NO: 8926 - RNA, 22 nt, Homo sapiens
uugaggaggcagucuucccauu

SEQ ID NO: 8927 - RNA, 22 nt, Homo sapiens
uggucagaaaauuacuugauau

SEQ ID NO: 8928 - RNA, 18 nt, Homo sapiens
uauugcuugguuuggaga

SEQ ID NO: 8929 - RNA, 22 nt, Homo sapiens
uggacaugaagggcacaggagg

SEQ ID NO: 8930 - RNA, 18 nt, Homo sapiens
aucagggugaagagagga

SEQ ID NO: 8931 - RNA, 23 nt, Homo sapiens
cagugcauuguggcauucagcau

SEQ ID NO: 8932 - RNA, 22 nt, Homo sapiens
guggagucaucacucagagugg

SEQ ID NO: 8933 - RNA, 22 nt, Homo sapiens
augugugcuugauguaaaaagu

SEQ ID NO: 8934 - RNA, 22 nt, Homo sapiens
uggaagauucuagaagauucca

SEQ ID NO: 8935 - RNA, 22 nt, Homo sapiens
gugagcuagaccacuuggcucc

SEQ ID NO: 8936 - RNA, 22 nt, Homo sapiens
ugggaacugaggugaaaagaca

SEQ ID NO: 8937 - RNA, 22 nt, Homo sapiens
uuauugaguaaaaagaaugguu

SEQ ID NO: 8938 - RNA, 22 nt, Homo sapiens
agugacaugggaucaaaucuga

SEQ ID NO: 8939 - RNA, 23 nt, Homo sapiens
uggccagaaacuucuuuucaucc

SEQ ID NO: 8940 - RNA, 22 nt, Homo sapiens
agugcauugagacuugugaguu

SEQ ID NO: 8941 - RNA, 22 nt, Homo sapiens
ugguauguaugauuaacaugga

SEQ ID NO: 8942 - RNA, 22 nt, Homo sapiens
cugacauuguugaucacagcca

SEQ ID NO: 8943 - RNA, 22 nt, Homo sapiens
aauuacauggcaauugggaaau

SEQ ID NO: 8944 - RNA, 22 nt, Homo sapiens
gagguugggaugagggauacag

SEQ ID NO: 8945 - RNA, 22 nt, Homo sapiens
aaucacuuugcuacaaggcagu

SEQ ID NO: 8946 - RNA, 22 nt, Homo sapiens
uucaggcaccauggucauugau

SEQ ID NO: 8947 - RNA, 22 nt, Homo sapiens
aagugcuucuuuccucgagaag

SEQ ID NO: 8948 - RNA, 22 nt, Homo sapiens
augcuacugauaagcaaucauu

SEQ ID NO: 8949 - RNA, 22 nt, Homo sapiens
auggaaagcuguuccuacacaa

SEQ ID NO: 8950 - RNA, 22 nt, Homo sapiens
uguucuggagaguuuagucugg

SEQ ID NO: 8951 - RNA, 22 nt, Homo sapiens
acacuguugacauuuuguagug

SEQ ID NO: 8952 - RNA, 22 nt, Homo sapiens
uugaauagacagccagcuuuaa

SEQ ID NO: 8953 - RNA, 22 nt, Homo sapiens
aaucccugagcuagacacaaag

SEQ ID NO: 8954 - RNA, 22 nt, Homo sapiens
uggauuguuucucuugguauga

SEQ ID NO: 8955 - RNA, 22 nt, Homo sapiens
uuucuacagggcuugccaggua

SEQ ID NO: 8956 - RNA, 22 nt, Homo sapiens
uaaguacaugcuagauggaaug

SEQ ID NO: 8957 - RNA, 22 nt, Homo sapiens
caugucacuuccucucugaugg

SEQ ID NO: 8958 - RNA, 22 nt, Homo sapiens
ugauaggucacucaacagugag

SEQ ID NO: 8959 - RNA, 19 nt, Homo sapiens
ugaguaucuuuacacaucu

SEQ ID NO: 8960 - RNA, 18 nt, Homo sapiens
uccaguuuucccagcauc

SEQ ID NO: 8961 - RNA, 18 nt, Homo sapiens
ugcuccccugggugagca

SEQ ID NO: 8962 - RNA, 23 nt, Homo sapiens
agagguuuaaucaggcaguugcu

SEQ ID NO: 8963 - RNA, 22 nt, Homo sapiens
cccugagaugugaauuucagag

SEQ ID NO: 8964 - RNA, 22 nt, Homo sapiens
uugaagacuaauuuagauaaug

SEQ ID NO: 8965 - RNA, 22 nt, Homo sapiens
ugguaagaaaaccauuauuagc

SEQ ID NO: 8966 - RNA, 22 nt, Homo sapiens
uugccacuucucuugccccauu

SEQ ID NO: 8967 - RNA, 22 nt, Homo sapiens
cguauccuguuuagcucuccca

SEQ ID NO: 8968 - RNA, 22 nt, Homo sapiens
acccgugcucacugccucugcc

SEQ ID NO: 8969 - RNA, 22 nt, Homo sapiens
caauugcacucuuagguguaca

SEQ ID NO: 8970 - RNA, 22 nt, Homo sapiens
ugggaucauucaaugacgaaau

SEQ ID NO: 8971 - RNA, 22 nt, Homo sapiens
uuccugagaucagaauucaaau

SEQ ID NO: 8972 - RNA, 22 nt, Homo sapiens
aaucagauuccagugguuggaa

SEQ ID NO: 8973 - RNA, 22 nt, Homo sapiens
ugagaagacaucuuugcuuugu

SEQ ID NO: 8974 - RNA, 22 nt, Homo sapiens
uuguaaaguucuuaggaagcuc

SEQ ID NO: 8975 - RNA, 22 nt, Homo sapiens
uguccugaagcuuuguuaugua

SEQ ID NO: 8976 - RNA, 22 nt, Homo sapiens
ugagaugagggcugcacucaaa

SEQ ID NO: 8977 - RNA, 18 nt, Homo sapiens
aaguauagagagcccuua

SEQ ID NO: 8978 - RNA, 22 nt, Homo sapiens
ugucucggagaucucucaaagu

SEQ ID NO: 8979 - RNA, 22 nt, Homo sapiens
uaaagaugcugggaaggcuagg

SEQ ID NO: 8980 - RNA, 22 nt, Homo sapiens
cugaauguuuucuucuauucug

SEQ ID NO: 8981 - RNA, 19 nt, Homo sapiens
gugguauuaccuuuugauu

SEQ ID NO: 8982 - RNA, 22 nt, Homo sapiens
ucucauagaggcagagaguaaa

SEQ ID NO: 8983 - RNA, 22 nt, Homo sapiens
guagaagcacagggccuguauu

SEQ ID NO: 8984 - RNA, 22 nt, Homo sapiens
cacugcauggucuagcuggguu

SEQ ID NO: 8985 - RNA, 18 nt, Homo sapiens
uccauugcagcauuauuu

SEQ ID NO: 8986 - RNA, 22 nt, Homo sapiens
cuccuugauuagaguauagagu

SEQ ID NO: 8987 - RNA, 21 nt, Homo sapiens
uggcaacgaggugugcauuau

SEQ ID NO: 8988 - RNA, 23 nt, Homo sapiens
uggaggacaagcauggauaguga

SEQ ID NO: 8989 - RNA, 22 nt, Homo sapiens
cauggcuacugcagauguaggg

SEQ ID NO: 8990 - RNA, 22 nt, Homo sapiens
gugggcaaagcuaguguguaga

SEQ ID NO: 8991 - RNA, 22 nt, Homo sapiens
uacagcacaggugcagguguug

SEQ ID NO: 8992 - RNA, 22 nt, Homo sapiens
aaagcagcaggugguuuucaau

SEQ ID NO: 8993 - RNA, 22 nt, Homo sapiens
ugcgccauugaacuccaggcug

SEQ ID NO: 8994 - RNA, 22 nt, Homo sapiens
gagaugucuauuucagagaugu

SEQ ID NO: 8995 - RNA, 22 nt, Homo sapiens
uuggcuuggagaguugaaaugu

SEQ ID NO: 8996 - RNA, 22 nt, Homo sapiens
aguguuuuuaacaagaaagggu

SEQ ID NO: 8997 - RNA, 22 nt, Homo sapiens
cuucaguucuguaaggacagca

SEQ ID NO: 8998 - RNA, 22 nt, Homo sapiens
cacugcauccuugaccuucugg

SEQ ID NO: 8999 - RNA, 22 nt, Homo sapiens
acugcacuccagccugugcgua

SEQ ID NO: 9000 - RNA, 22 nt, Homo sapiens
gcuccuuugaguagcuucugug

SEQ ID NO: 9001 - RNA, 22 nt, Homo sapiens
auugauagaucauaugguaggu

SEQ ID NO: 9002 - RNA, 19 nt, Homo sapiens
uugcaguauccuauauguu

SEQ ID NO: 9003 - RNA, 22 nt, Homo sapiens
uuccacaggguugaacuaguuu

SEQ ID NO: 9004 - RNA, 19 nt, Homo sapiens
uugucuuagaguugucauu

SEQ ID NO: 9005 - RNA, 22 nt, Homo sapiens
acugcauuugucugucucaauu

SEQ ID NO: 9006 - RNA, 22 nt, Homo sapiens
caaugguacuagauaucuucag

SEQ ID NO: 9007 - RNA, 22 nt, Homo sapiens
uggauaguaauaaacauauagg

SEQ ID NO: 9008 - RNA, 22 nt, Homo sapiens
uuaaguagcugggcaugguggu

SEQ ID NO: 9009 - RNA, 22 nt, Homo sapiens
uggugcaaauguaauugugguu

SEQ ID NO: 9010 - RNA, 22 nt, Homo sapiens
uuacagauggauggcagcuggc

SEQ ID NO: 9011 - RNA, 22 nt, Homo sapiens
cuugugccugaucuuagggggc

SEQ ID NO: 9012 - RNA, 22 nt, Homo sapiens
gagaaguaaauuuauuugcaaa

SEQ ID NO: 9013 - RNA, 22 nt, Homo sapiens
uuuccuggagaaucuuaacaaa

SEQ ID NO: 9014 - RNA, 22 nt, Homo sapiens
uuguccccuuccaaaucucaug

SEQ ID NO: 9015 - RNA, 22 nt, Homo sapiens
gucaagagaacuuucuaucacu

SEQ ID NO: 9016 - RNA, 22 nt, Homo sapiens
uuugcagugucagcuucugugu

SEQ ID NO: 9017 - RNA, 22 nt, Homo sapiens
uugagauggagucuugcacugu

SEQ ID NO: 9018 - RNA, 22 nt, Homo sapiens
uguuugguggucucuucacaug

SEQ ID NO: 9019 - RNA, 22 nt, Homo sapiens
guugcagaguucuuccuccuga

SEQ ID NO: 9020 - RNA, 22 nt, Homo sapiens
ucaguauaugaaucuggggcag

SEQ ID NO: 9021 - RNA, 22 nt, Homo sapiens
gcagguauuagagagccugaaa

SEQ ID NO: 9022 - RNA, 22 nt, Homo sapiens
uugaauagcauguuuagugcau

SEQ ID NO: 9023 - RNA, 22 nt, Homo sapiens
cucaguagaaaauacauggacu

SEQ ID NO: 9024 - RNA, 22 nt, Homo sapiens
uggagacaaagauagaaaagca

SEQ ID NO: 9025 - RNA, 22 nt, Homo sapiens
uuucgugucuggucugugaugg

SEQ ID NO: 9026 - RNA, 22 nt, Homo sapiens
agguaaacauggggacugcuac

SEQ ID NO: 9027 - RNA, 22 nt, Homo sapiens
gucacugugaggaggggccagg

SEQ ID NO: 9028 - RNA, 22 nt, Homo sapiens
auggagaugaauaucaucuguu

SEQ ID NO: 9029 - RNA, 20 nt, Homo sapiens
aaggcuuucgaguuccaggg

SEQ ID NO: 9030 - RNA, 22 nt, Homo sapiens
uugccuaggcuggaguucagug

SEQ ID NO: 9031 - RNA, 21 nt, Homo sapiens
uucuacuccggcguuguuuuu

SEQ ID NO: 9032 - RNA, 20 nt, Homo sapiens
ugaauguaauuacagaugua

SEQ ID NO: 9033 - RNA, 22 nt, Homo sapiens
uugcaacauuguaaguuuauau

SEQ ID NO: 9034 - RNA, 22 nt, Homo sapiens
augaacgugugcauauaagcag

SEQ ID NO: 9035 - RNA, 22 nt, Homo sapiens
aucagauguuuguauaggagua

SEQ ID NO: 9036 - RNA, 22 nt, Homo sapiens
cugugguuacguucuuugugcu

SEQ ID NO: 9037 - RNA, 22 nt, Homo sapiens
auauugguuaaauauuauguga

SEQ ID NO: 9038 - RNA, 22 nt, Homo sapiens
gcagaauugacucuguuuuuuc

SEQ ID NO: 9039 - RNA, 22 nt, Homo sapiens
uuauccucuagacauagguuua

SEQ ID NO: 9040 - RNA, 22 nt, Homo sapiens
uacuacagccugagcgacugag

SEQ ID NO: 9041 - RNA, 22 nt, Homo sapiens
gauaauucuagcagauacaggc

SEQ ID NO: 9042 - RNA, 19 nt, Homo sapiens
cugcaagguaauaggucag

SEQ ID NO: 9043 - RNA, 22 nt, Homo sapiens
gaugcaaauuaagcuugggaca

SEQ ID NO: 9044 - RNA, 22 nt, Homo sapiens
gacccucuagauggaagcacug

SEQ ID NO: 9045 - RNA, 19 nt, Homo sapiens
ucauggcuuuuucagcugu

SEQ ID NO: 9046 - RNA, 22 nt, Homo sapiens
gugagcuaguuucuuugcugug

SEQ ID NO: 9047 - RNA, 20 nt, Homo sapiens
auggcccugcugggaguguc

SEQ ID NO: 9048 - RNA, 22 nt, Homo sapiens
uuucuacagugaacgauuucua

SEQ ID NO: 9049 - RNA, 22 nt, Homo sapiens
uguauguaaagacaggauaaca

SEQ ID NO: 9050 - RNA, 22 nt, Homo sapiens
uuacagucaaguuacauuucuc

SEQ ID NO: 9051 - RNA, 20 nt, Homo sapiens
aagugcuuccuuuuagaggg

SEQ ID NO: 9052 - RNA, 22 nt, Homo sapiens
ugucauguaaagaguaaauggu

SEQ ID NO: 9053 - RNA, 22 nt, Homo sapiens
agucacaugcauuuucuucaau

SEQ ID NO: 9054 - RNA, 22 nt, Homo sapiens
uacagucuggaggccuguguug

SEQ ID NO: 9055 - RNA, 22 nt, Homo sapiens
uagaggaaugaauuuggccaga

SEQ ID NO: 9056 - RNA, 22 nt, Homo sapiens
uuuugucccaugggcuguuccc

SEQ ID NO: 9057 - RNA, 22 nt, Homo sapiens
ugagucgagauugcgccacugu

SEQ ID NO: 9058 - RNA, 21 nt, Homo sapiens
uuacaguugguugugaggugg

SEQ ID NO: 9059 - RNA, 22 nt, Homo sapiens
uguccguuuuguuucaggcuca

SEQ ID NO: 9060 - RNA, 22 nt, Homo sapiens
gauauguuucuucaauaccuag

SEQ ID NO: 9061 - RNA, 22 nt, Homo sapiens
auagaauguaauguaccuccuu

SEQ ID NO: 9062 - RNA, 22 nt, Homo sapiens
augcuguuuuguagcucccucu

SEQ ID NO: 9063 - RNA, 22 nt, Homo sapiens
ucagcaguggacagaaugguag

SEQ ID NO: 9064 - RNA, 22 nt, Homo sapiens
uaugguuuuaagguuaaggacu

SEQ ID NO: 9065 - RNA, 22 nt, Homo sapiens
aaagugaauguaucccguaagu

SEQ ID NO: 9066 - RNA, 22 nt, Homo sapiens
auccugaagcuuuacugaauuc

SEQ ID NO: 9067 - RNA, 18 nt, Homo sapiens
cuaguguuucuugaauca

SEQ ID NO: 9068 - RNA, 22 nt, Homo sapiens
uucaagauggcaccagugagug

SEQ ID NO: 9069 - RNA, 22 nt, Homo sapiens
augugcacauucugguaaauau

SEQ ID NO: 9070 - RNA, 22 nt, Homo sapiens
ugagaaugcagaaucucgugca

SEQ ID NO: 9071 - RNA, 22 nt, Homo sapiens
ugaaagacugaagaauaggcau

SEQ ID NO: 9072 - RNA, 22 nt, Homo sapiens
gugaggugguacaauauuaacu

SEQ ID NO: 9073 - RNA, 22 nt, Homo sapiens
uugcaagaaaugcagauucuca

SEQ ID NO: 9074 - RNA, 22 nt, Homo sapiens
augugggaggacuuggcuguug

SEQ ID NO: 9075 - RNA, 22 nt, Homo sapiens
uugacaaguuguccaguaugag

SEQ ID NO: 9076 - RNA, 22 nt, Homo sapiens
cuacaguagagaggauguagaa

SEQ ID NO: 9077 - RNA, 21 nt, Homo sapiens
uagcaaauugcuauuaaggca

SEQ ID NO: 9078 - RNA, 22 nt, Homo sapiens
uacugcagucagacuccugggc

SEQ ID NO: 9079 - RNA, 22 nt, Homo sapiens
auuuuuggauauagggaaggau

SEQ ID NO: 9080 - RNA, 18 nt, Homo sapiens
uggaauguuuggguuaau

SEQ ID NO: 9081 - RNA, 22 nt, Homo sapiens
auggaaaugaagggcuggcccu

SEQ ID NO: 9082 - RNA, 22 nt, Homo sapiens
uucauggaauauugaccauuuu

SEQ ID NO: 9083 - RNA, 22 nt, Homo sapiens
gagagugcuuggcaucugcuga

SEQ ID NO: 9084 - RNA, 21 nt, Homo sapiens
ugcuacugucacuuccuuugu

SEQ ID NO: 9085 - RNA, 22 nt, Homo sapiens
guugcaaaguaauugugguuuu

SEQ ID NO: 9086 - RNA, 22 nt, Homo sapiens
ugcaucaggcugcuuauuacaa

SEQ ID NO: 9087 - RNA, 22 nt, Homo sapiens
aucaucacaguuguguguaaug

SEQ ID NO: 9088 - RNA, 22 nt, Homo sapiens
agcuaugucugaugccugauua

SEQ ID NO: 9089 - RNA, 21 nt, Homo sapiens
aggucaugaagauguucuaau

SEQ ID NO: 9090 - RNA, 22 nt, Homo sapiens
gugagacugguucugaacccag

SEQ ID NO: 9091 - RNA, 22 nt, Homo sapiens
cugugcuugauuauaugagugu

SEQ ID NO: 9092 - RNA, 22 nt, Homo sapiens
uuguccuccacauuugaucagu

SEQ ID NO: 9093 - RNA, 22 nt, Homo sapiens
uuaugucuuuuguguucagcua

SEQ ID NO: 9094 - RNA, 22 nt, Homo sapiens
uggguagauaucauaguugccc

SEQ ID NO: 9095 - RNA, 22 nt, Homo sapiens
ugacuugaucauuacacauucu

SEQ ID NO: 9096 - RNA, 17 nt, Homo sapiens
uaaagccagucaaguca

SEQ ID NO: 9097 - RNA, 22 nt, Homo sapiens
cuuuggugagggauaaauuuca

SEQ ID NO: 9098 - RNA, 22 nt, Homo sapiens
ugaucacagcuugacuaaagga

SEQ ID NO: 9099 - RNA, 22 nt, Homo sapiens
ugggagacuacauuuuuaacaa

SEQ ID NO: 9100 - RNA, 22 nt, Homo sapiens
ugccuacagaaggggcucagca

SEQ ID NO: 9101 - RNA, 22 nt, Homo sapiens
ucguuggcuacuuguucauuuc

SEQ ID NO: 9102 - RNA, 22 nt, Homo sapiens
gacuucaucauacuaugugugg

SEQ ID NO: 9103 - RNA, 22 nt, Homo sapiens
uguuuguuugagauggagucuc

SEQ ID NO: 9104 - RNA, 22 nt, Homo sapiens
ccccauguucucucugcagcuc

SEQ ID NO: 9105 - RNA, 22 nt, Homo sapiens
cucagauacuugggagguugag

SEQ ID NO: 9106 - RNA, 22 nt, Homo sapiens
augcaaggaugguuagauauau

SEQ ID NO: 9107 - RNA, 22 nt, Homo sapiens
ugaugguuuuauuaauaggacc

SEQ ID NO: 9108 - RNA, 22 nt, Homo sapiens
ugugaugaagaguccaagaaca

SEQ ID NO: 9109 - RNA, 22 nt, Homo sapiens
uccacguggucuaucuguccuu

SEQ ID NO: 9110 - RNA, 18 nt, Homo sapiens
ucuuuggcugaacuguag

SEQ ID NO: 9111 - RNA, 22 nt, Homo sapiens
ugcuuaguuguauguuccacau

SEQ ID NO: 9112 - RNA, 20 nt, Homo sapiens
ucaucaguuggugcucgcug

SEQ ID NO: 9113 - RNA, 22 nt, Homo sapiens
uugauaguccuguaucuauuuu

SEQ ID NO: 9114 - RNA, 22 nt, Homo sapiens
gugacuacaggccacaguuugg

SEQ ID NO: 9115 - RNA, 23 nt, Homo sapiens
auauaguagaugugcaguaacau

SEQ ID NO: 9116 - RNA, 22 nt, Homo sapiens
ucaugacacuggcaggagcuaa

SEQ ID NO: 9117 - RNA, 22 nt, Homo sapiens
uugaaaguaaacaucacaaaga

SEQ ID NO: 9118 - RNA, 22 nt, Homo sapiens
aaagugcaguauuugggcagaa

SEQ ID NO: 9119 - RNA, 22 nt, Homo sapiens
uagagcuaguuuuuaaucuaac

SEQ ID NO: 9120 - RNA, 22 nt, Homo sapiens
aucauacuguuuugauuacugu

SEQ ID NO: 9121 - RNA, 22 nt, Homo sapiens
agugguuugaucacagcucacu

SEQ ID NO: 9122 - RNA, 22 nt, Homo sapiens
uagaaguaggcuacgugucugg

SEQ ID NO: 9123 - RNA, 22 nt, Homo sapiens
uguucuggagccgguucaaaug

SEQ ID NO: 9124 - RNA, 22 nt, Homo sapiens
uucccugugugcagaugggugu

SEQ ID NO: 9125 - RNA, 23 nt, Homo sapiens
uugcauagacauccucauagauu

SEQ ID NO: 9126 - RNA, 22 nt, Homo sapiens
uuguguuuuuaguagggaaggg

SEQ ID NO: 9127 - RNA, 22 nt, Homo sapiens
aagcaccguugccuccccugca

SEQ ID NO: 9128 - RNA, 22 nt, Homo sapiens
uagaauggaaggcauguuugcc

SEQ ID NO: 9129 - RNA, 22 nt, Homo sapiens
cuaggcuguagagaaguucagu

SEQ ID NO: 9130 - RNA, 19 nt, Homo sapiens
agaguauugaauuugcccu

SEQ ID NO: 9131 - RNA, 22 nt, Homo sapiens
uaaguauuaugugcugcauuuu

SEQ ID NO: 9132 - RNA, 22 nt, Homo sapiens
agcaacauuuuugaccuuucuu

SEQ ID NO: 9133 - RNA, 22 nt, Homo sapiens
gucacggagauauggauucgga

SEQ ID NO: 9134 - RNA, 19 nt, Homo sapiens
ugccaagaaagucagcuua

SEQ ID NO: 9135 - RNA, 22 nt, Homo sapiens
uccaauguaaucaucauugaau

SEQ ID NO: 9136 - RNA, 22 nt, Homo sapiens
cuagaguacuuaccacagcaug

SEQ ID NO: 9137 - RNA, 22 nt, Homo sapiens
ugaagacucaguuugagggaca

SEQ ID NO: 9138 - RNA, 22 nt, Homo sapiens
uucuucaggccacaaaaauggu

SEQ ID NO: 9139 - RNA, 22 nt, Homo sapiens
ugugaaacauggauagaacugg

SEQ ID NO: 9140 - RNA, 17 nt, Homo sapiens
ugaccacugauucuacu

SEQ ID NO: 9141 - RNA, 19 nt, Homo sapiens
aaaguacucugaugccucu

SEQ ID NO: 9142 - RNA, 22 nt, Homo sapiens
uuuucaguggccauaguggaga

SEQ ID NO: 9143 - RNA, 22 nt, Homo sapiens
ucaaaugauucuccugccucag

SEQ ID NO: 9144 - RNA, 22 nt, Homo sapiens
uacugguuuuauauauuucucc

SEQ ID NO: 9145 - RNA, 22 nt, Homo sapiens
uaugaugcugagguuuggagug

SEQ ID NO: 9146 - RNA, 22 nt, Homo sapiens
agacuagagcagagcccucucu

SEQ ID NO: 9147 - RNA, 22 nt, Homo sapiens
auuguaguacauuuggugguca

SEQ ID NO: 9148 - RNA, 19 nt, Homo sapiens
cuaugaccaugugauuuuu

SEQ ID NO: 9149 - RNA, 22 nt, Homo sapiens
agccuucauucugacaguagga

SEQ ID NO: 9150 - RNA, 22 nt, Homo sapiens
acagugcuuggcacacaguaau

SEQ ID NO: 9151 - RNA, 22 nt, Homo sapiens
uggcagauggugacaccauuag

SEQ ID NO: 9152 - RNA, 22 nt, Homo sapiens
ugugaugguuuggaagcuucuu

SEQ ID NO: 9153 - RNA, 22 nt, Homo sapiens
aguggcacaauuuugacucccc

SEQ ID NO: 9154 - RNA, 22 nt, Homo sapiens
ccucccuuuguugcaagggaaa

SEQ ID NO: 9155 - RNA, 22 nt, Homo sapiens
uucaggcuuuuauuuacugaua

SEQ ID NO: 9156 - RNA, 22 nt, Homo sapiens
acacgugcguauauguacguau

SEQ ID NO: 9157 - RNA, 22 nt, Homo sapiens
aucuaaaucucauaugggcaca

SEQ ID NO: 9158 - RNA, 21 nt, Homo sapiens
ucucauugugguuuuaauugg

SEQ ID NO: 9159 - RNA, 17 nt, Homo sapiens
guucccaguggcauuug

SEQ ID NO: 9160 - RNA, 22 nt, Homo sapiens
ucacgugcucuuguguguucug

SEQ ID NO: 9161 - RNA, 19 nt, Homo sapiens
ugagaauguuaccaggucc

SEQ ID NO: 9162 - RNA, 22 nt, Homo sapiens
ugaauaggcaguuaaguuuaug

SEQ ID NO: 9163 - RNA, 22 nt, Homo sapiens
agcaguagaauuccugcaucac

SEQ ID NO: 9164 - RNA, 22 nt, Homo sapiens
cuuccaaguggggcacgugcca

SEQ ID NO: 9165 - RNA, 22 nt, Homo sapiens
cucccacccucauuuuuaggca

SEQ ID NO: 9166 - RNA, 22 nt, Homo sapiens
aaguggcauugaggaaaaaaau

SEQ ID NO: 9167 - RNA, 22 nt, Homo sapiens
gagccggugugauggggcuucu

SEQ ID NO: 9168 - RNA, 22 nt, Homo sapiens
uuguaacaugcuuucacuucag

SEQ ID NO: 9169 - RNA, 21 nt, Homo sapiens
uagcugcacccaggccuccuu

SEQ ID NO: 9170 - RNA, 22 nt, Homo sapiens
gaucacuuugaugccaggaacu

SEQ ID NO: 9171 - RNA, 22 nt, Homo sapiens
uucccuuugaauuggaaaggug

SEQ ID NO: 9172 - RNA, 22 nt, Homo sapiens
ggagauaauccagggagggacu

SEQ ID NO: 9173 - RNA, 22 nt, Homo sapiens
ucuucguuuaaagcaguggaag

SEQ ID NO: 9174 - RNA, 22 nt, Homo sapiens
agugaauuguucaacaggagga

SEQ ID NO: 9175 - RNA, 22 nt, Homo sapiens
ggcucagugaucuguuucugua

SEQ ID NO: 9176 - RNA, 22 nt, Homo sapiens
ugccuaguggccuuaugaguau

SEQ ID NO: 9177 - RNA, 22 nt, Homo sapiens
accauugcacuccaaccugggc

SEQ ID NO: 9178 - RNA, 22 nt, Homo sapiens
ugaauacuucaaaaaaauagcu

SEQ ID NO: 9179 - RNA, 22 nt, Homo sapiens
cauugcacuccauccuuggcaa

SEQ ID NO: 9180 - RNA, 22 nt, Homo sapiens
gucuuuguuuggucuguaucag

SEQ ID NO: 9181 - RNA, 22 nt, Homo sapiens
auugagcaauuccuaugugcuu

SEQ ID NO: 9182 - RNA, 22 nt, Homo sapiens
ucagaucaugcuuaugauggga

SEQ ID NO: 9183 - RNA, 22 nt, Homo sapiens
uacguuaucagguaugcaagag

SEQ ID NO: 9184 - RNA, 20 nt, Homo sapiens
uaagcauaguugucaggguc

SEQ ID NO: 9185 - RNA, 22 nt, Homo sapiens
uugugcuucaucaccuagcaga

SEQ ID NO: 9186 - RNA, 22 nt, Homo sapiens
agagauaaagauuuuaauuuug

SEQ ID NO: 9187 - RNA, 19 nt, Homo sapiens
gauauguugagcacccuuu

SEQ ID NO: 9188 - RNA, 22 nt, Homo sapiens
aucaccauguguacauuagacc

SEQ ID NO: 9189 - RNA, 22 nt, Homo sapiens
cuugaacaaagagauuccauua

SEQ ID NO: 9190 - RNA, 22 nt, Homo sapiens
auugcuaacugaaauaagacca

SEQ ID NO: 9191 - RNA, 22 nt, Homo sapiens
uuuuacagaggagguugcugau

SEQ ID NO: 9192 - RNA, 22 nt, Homo sapiens
cacaccuaccucauuauggaca

SEQ ID NO: 9193 - RNA, 22 nt, Homo sapiens
ugggugaguaucuauuauucag

SEQ ID NO: 9194 - RNA, 22 nt, Homo sapiens
uauuacugucaauaucacagaa

SEQ ID NO: 9195 - RNA, 22 nt, Homo sapiens
ugccaguuuuuacauuuccugu

SEQ ID NO: 9196 - RNA, 22 nt, Homo sapiens
ucugugcauuuucuuuuagacu

SEQ ID NO: 9197 - RNA, 22 nt, Homo sapiens
uucauguaauauauuucaggcc

SEQ ID NO: 9198 - RNA, 22 nt, Homo sapiens
cugagguaggugaucagugcuu

SEQ ID NO: 9199 - RNA, 22 nt, Homo sapiens
augaaugcaucuaucaaagcau

SEQ ID NO: 9200 - RNA, 22 nt, Homo sapiens
ugauauggcuuggcuaugucac

SEQ ID NO: 9201 - RNA, 22 nt, Homo sapiens
gugaaagacagcauuaauggcu

SEQ ID NO: 9202 - RNA, 22 nt, Homo sapiens
uauauguuuucauaaggcuaga

SEQ ID NO: 9203 - RNA, 22 nt, Homo sapiens
gguauuauuugccuuuuacuga

SEQ ID NO: 9204 - RNA, 22 nt, Homo sapiens
aagcuggauuucgcauccuguu

SEQ ID NO: 9205 - RNA, 22 nt, Homo sapiens
uuguguccccacucaaauuaca

SEQ ID NO: 9206 - RNA, 22 nt, Homo sapiens
guauuagaugguauuugaagau

SEQ ID NO: 9207 - RNA, 22 nt, Homo sapiens
agacaguguguguauauauggu

SEQ ID NO: 9208 - RNA, 22 nt, Homo sapiens
acaaagugccuccuuuuagagu

SEQ ID NO: 9209 - RNA, 22 nt, Homo sapiens
acgcagcacauucacagcuaug

SEQ ID NO: 9210 - RNA, 20 nt, Homo sapiens
gcugugcuuaauacacuuuc

SEQ ID NO: 9211 - RNA, 21 nt, Homo sapiens
aggcaaaugaagcagccgcuc

SEQ ID NO: 9212 - RNA, 22 nt, Homo sapiens
uauuguacauguuauagauuuu

SEQ ID NO: 9213 - RNA, 22 nt, Homo sapiens
cauauaguaguacuguuagguu

SEQ ID NO: 9214 - RNA, 22 nt, Homo sapiens
ugaggugagggguuaggugcua

SEQ ID NO: 9215 - RNA, 22 nt, Homo sapiens
uauggguuuuucauaaauaggu

SEQ ID NO: 9216 - RNA, 22 nt, Homo sapiens
caaagugcuggaauuggccggg

SEQ ID NO: 9217 - RNA, 22 nt, Homo sapiens
cuucaaguuggaagggaccuaa

SEQ ID NO: 9218 - RNA, 22 nt, Homo sapiens
uagguugucuucccagaguuuu

SEQ ID NO: 9219 - RNA, 22 nt, Homo sapiens
augacauugaaaagcaagugga

SEQ ID NO: 9220 - RNA, 22 nt, Homo sapiens
aggaagugucuucuuuuaggca

SEQ ID NO: 9221 - RNA, 22 nt, Homo sapiens
cagcugcuuuggaaaauauuuu

SEQ ID NO: 9222 - RNA, 22 nt, Homo sapiens
cucugacagugguuagcacugu

SEQ ID NO: 9223 - RNA, 22 nt, Homo sapiens
caaagucuauucuacccuuacc

SEQ ID NO: 9224 - RNA, 22 nt, Homo sapiens
gugguauaaguaccuccuuuca

SEQ ID NO: 9225 - RNA, 22 nt, Homo sapiens
gucgugcagaccucacagcauu

SEQ ID NO: 9226 - RNA, 22 nt, Homo sapiens
ugugaugguuuagcauuuucuu

SEQ ID NO: 9227 - RNA, 22 nt, Homo sapiens
uaaggcuugcuucagucuugaa

SEQ ID NO: 9228 - RNA, 22 nt, Homo sapiens
augugcuaguaucaaacgagac

SEQ ID NO: 9229 - RNA, 22 nt, Homo sapiens
uauacuguuuucuauaguggcu

SEQ ID NO: 9230 - RNA, 22 nt, Homo sapiens
ucaaccggugagagcuuccucc

SEQ ID NO: 9231 - RNA, 22 nt, Homo sapiens
uaggacacagauggagaaaagc

SEQ ID NO: 9232 - RNA, 22 nt, Homo sapiens
ccauugcacuccagccuaggca

SEQ ID NO: 9233 - RNA, 22 nt, Homo sapiens
guauuguacuacaagcucuuua

SEQ ID NO: 9234 - RNA, 22 nt, Homo sapiens
gaucccauuggcugccaugugg

SEQ ID NO: 9235 - RNA, 22 nt, Homo sapiens
uacguuguuugagggcaggagu

SEQ ID NO: 9236 - RNA, 22 nt, Homo sapiens
ugcauaucuucagccgggcacg

SEQ ID NO: 9237 - RNA, 21 nt, Homo sapiens
ugaacacuggacugagugucc

SEQ ID NO: 9238 - RNA, 22 nt, Homo sapiens
acaaccauuguaagggcuuugg

SEQ ID NO: 9239 - RNA, 22 nt, Homo sapiens
cagcaagucucuaagaguucau

SEQ ID NO: 9240 - RNA, 22 nt, Homo sapiens
augugggaggaauguguuucca

SEQ ID NO: 9241 - RNA, 22 nt, Homo sapiens
uguuauuuuguguuagggcaca

SEQ ID NO: 9242 - RNA, 22 nt, Homo sapiens
cccugagaaaacuuuguccuua

SEQ ID NO: 9243 - RNA, 22 nt, Homo sapiens
ugggaaacauccagcacauacu

SEQ ID NO: 9244 - RNA, 22 nt, Homo sapiens
ugccuagucuauugagagucuu

SEQ ID NO: 9245 - RNA, 22 nt, Homo sapiens
uugagaaucuuugcuaaaggaa

SEQ ID NO: 9246 - RNA, 22 nt, Homo sapiens
uaaggcccauucuaugaagcag

SEQ ID NO: 9247 - RNA, 22 nt, Homo sapiens
uugccuaggcuggaguguggug

SEQ ID NO: 9248 - RNA, 21 nt, Homo sapiens
uucaucuggccguauuccagg

SEQ ID NO: 9249 - RNA, 22 nt, Homo sapiens
uugguucucuuuauaugcugga

SEQ ID NO: 9250 - RNA, 22 nt, Homo sapiens
gaucugucuuuccuuauagucu

SEQ ID NO: 9251 - RNA, 22 nt, Homo sapiens
uuggaaaguuguuguaguuauu

SEQ ID NO: 9252 - RNA, 22 nt, Homo sapiens
uucaccuggguuggccaucauu

SEQ ID NO: 9253 - RNA, 22 nt, Homo sapiens
augugaaugugaucggauaguc

SEQ ID NO: 9254 - RNA, 22 nt, Homo sapiens
ugagcucaugcauucuugagga

SEQ ID NO: 9255 - RNA, 22 nt, Homo sapiens
ugagcugagaucgugccauugu

SEQ ID NO: 9256 - RNA, 22 nt, Homo sapiens
uaggucccguuucagacugaga

SEQ ID NO: 9257 - RNA, 22 nt, Homo sapiens
uagacuguaagauccaggagag

SEQ ID NO: 9258 - RNA, 22 nt, Homo sapiens
caugacacuggcauguuucuuu

SEQ ID NO: 9259 - RNA, 21 nt, Homo sapiens
gucauaugucucugauuagug

SEQ ID NO: 9260 - RNA, 22 nt, Homo sapiens
ggcaacauggugaaacucuguc

SEQ ID NO: 9261 - RNA, 22 nt, Homo sapiens
ugcaaguaauuggcgaggaguu

SEQ ID NO: 9262 - RNA, 22 nt, Homo sapiens
uuggucaggcuagaguguggug

SEQ ID NO: 9263 - RNA, 21 nt, Homo sapiens
ugcauaucucuaaugaccagu

SEQ ID NO: 9264 - RNA, 21 nt, Homo sapiens
ucuggcuuucauuccccuucu

SEQ ID NO: 9265 - RNA, 22 nt, Homo sapiens
acagaucagagauauuuagguu

SEQ ID NO: 9266 - RNA, 22 nt, Homo sapiens
uagaguaguggcgugaucucgg

SEQ ID NO: 9267 - RNA, 22 nt, Homo sapiens
aauacucuauaagggaagcugu

SEQ ID NO: 9268 - RNA, 19 nt, Homo sapiens
aguggguguuuucuguuug

SEQ ID NO: 9269 - RNA, 22 nt, Homo sapiens
ucaccuggggcacagcugaaga

SEQ ID NO: 9270 - RNA, 22 nt, Homo sapiens
auaugcauacccucaccaacua

SEQ ID NO: 9271 - RNA, 22 nt, Homo sapiens
uauggcacacguuuaccuaugu

SEQ ID NO: 9272 - RNA, 22 nt, Homo sapiens
auguaacugggacacaagccuc

SEQ ID NO: 9273 - RNA, 17 nt, Homo sapiens
auguauacauccaugua

SEQ ID NO: 9274 - RNA, 22 nt, Homo sapiens
ggaacaccauuuuuccugccuu

SEQ ID NO: 9275 - RNA, 22 nt, Homo sapiens
uaugaucacuacagcagggaug

SEQ ID NO: 9276 - RNA, 22 nt, Homo sapiens
ccccagugguugcaacagcaga

SEQ ID NO: 9277 - RNA, 22 nt, Homo sapiens
acagugcuuuuguuccucuccu

SEQ ID NO: 9278 - RNA, 22 nt, Homo sapiens
auaacaggaaauacagggcuuu

SEQ ID NO: 9279 - RNA, 22 nt, Homo sapiens
uuugguguauaaaaaugcuagu

SEQ ID NO: 9280 - RNA, 22 nt, Homo sapiens
agcaagauuguucccauuuucu

SEQ ID NO: 9281 - RNA, 22 nt, Homo sapiens
gaucacaguuccucacgggcau

SEQ ID NO: 9282 - RNA, 22 nt, Homo sapiens
uggcacuaugugacaagguuuu

SEQ ID NO: 9283 - RNA, 22 nt, Homo sapiens
gugagacugaguuucgcucuug

SEQ ID NO: 9284 - RNA, 22 nt, Homo sapiens
uuuguacacuguuggugguuau

SEQ ID NO: 9285 - RNA, 20 nt, Homo sapiens
cucugguugugaauugucuu

SEQ ID NO: 9286 - RNA, 22 nt, Homo sapiens
ugucucaguuucuguggguuag

SEQ ID NO: 9287 - RNA, 22 nt, Homo sapiens
gucccugcgauugugggauccu

SEQ ID NO: 9288 - RNA, 22 nt, Homo sapiens
uaggccuuuuuaugucaauauc

SEQ ID NO: 9289 - RNA, 22 nt, Homo sapiens
ucagaugauuccguugacgaga

SEQ ID NO: 9290 - RNA, 22 nt, Homo sapiens
ucacauggaaaaguccaguaaa

SEQ ID NO: 9291 - RNA, 22 nt, Homo sapiens
augacagugagugagcucucac

SEQ ID NO: 9292 - RNA, 22 nt, Homo sapiens
gagacugagucucacucuguca

SEQ ID NO: 9293 - RNA, 22 nt, Homo sapiens
uuggaauacucaaaagguuggg

SEQ ID NO: 9294 - RNA, 22 nt, Homo sapiens
caccgagugugccaucuucuca

SEQ ID NO: 9295 - RNA, 22 nt, Homo sapiens
ggcaaugaggcggaccagcagg

SEQ ID NO: 9296 - RNA, 22 nt, Homo sapiens
uuguggcuuaucucauuuagcg

SEQ ID NO: 9297 - RNA, 22 nt, Homo sapiens
auuggcaaucgucuccauuuuu

SEQ ID NO: 9298 - RNA, 20 nt, Homo sapiens
uggaagccuggugcuaucuu

SEQ ID NO: 9299 - RNA, 22 nt, Homo sapiens
aguaaauuucugugcuuucaua

SEQ ID NO: 9300 - RNA, 22 nt, Homo sapiens
auauguaguuucagaaguggaa

SEQ ID NO: 9301 - RNA, 22 nt, Homo sapiens
ggucauggagcuuuacuuuaug

SEQ ID NO: 9302 - RNA, 22 nt, Homo sapiens
ugagacggagucucgcucuguc

SEQ ID NO: 9303 - RNA, 22 nt, Homo sapiens
caugaugcuagguauggaugaa

SEQ ID NO: 9304 - RNA, 22 nt, Homo sapiens
uaccacugccgagaaaacagau

SEQ ID NO: 9305 - RNA, 22 nt, Homo sapiens
uuggucaucucccuccuuuuag

SEQ ID NO: 9306 - RNA, 22 nt, Homo sapiens
ccaaguguuuucauuguuccau

SEQ ID NO: 9307 - RNA, 21 nt, Homo sapiens
ugcugcacuucuuuugcugug

SEQ ID NO: 9308 - RNA, 22 nt, Homo sapiens
guaggcacuggcucagcuuauc

SEQ ID NO: 9309 - RNA, 22 nt, Homo sapiens
ugaguagugccacaauaagcau

SEQ ID NO: 9310 - RNA, 22 nt, Homo sapiens
ggaguguuccauuugucacauu

SEQ ID NO: 9311 - RNA, 22 nt, Homo sapiens
agccaguauuuuauugaggauu

SEQ ID NO: 9312 - RNA, 22 nt, Homo sapiens
uugacauguaaguacucuauag

SEQ ID NO: 9313 - RNA, 20 nt, Homo sapiens
ucacuggagcucauuugauu

SEQ ID NO: 9314 - RNA, 22 nt, Homo sapiens
uugucaacaugaaacuguguuu

SEQ ID NO: 9315 - RNA, 22 nt, Homo sapiens
cuauuagguuggugcaaaaguc

SEQ ID NO: 9316 - RNA, 22 nt, Homo sapiens
uaagguccuuaaauguguaacc

SEQ ID NO: 9317 - RNA, 21 nt, Homo sapiens
gagauagguaccgaagcuuag

SEQ ID NO: 9318 - RNA, 22 nt, Homo sapiens
agcuggcuguggagaaaccccu

SEQ ID NO: 9319 - RNA, 19 nt, Homo sapiens
acuguacuccagucugggc

SEQ ID NO: 9320 - RNA, 22 nt, Homo sapiens
uagguaguuacacagcaaugua

SEQ ID NO: 9321 - RNA, 22 nt, Homo sapiens
auuguacugccccccuguugcu

SEQ ID NO: 9322 - RNA, 22 nt, Homo sapiens
uggagucuugcucuguugccca

SEQ ID NO: 9323 - RNA, 22 nt, Homo sapiens
aguguuuuuaucaugaaagggu

SEQ ID NO: 9324 - RNA, 22 nt, Homo sapiens
uggcaaauauuuuguuuuguaa

SEQ ID NO: 9325 - RNA, 22 nt, Homo sapiens
ugggcaagagagcaugacccug

SEQ ID NO: 9326 - RNA, 22 nt, Homo sapiens
uguccauuuuuaugcuuauggu

SEQ ID NO: 9327 - RNA, 22 nt, Homo sapiens
uuccaguaauagcacagcauug

SEQ ID NO: 9328 - RNA, 22 nt, Homo sapiens
cacuggucucauggcaugagag

SEQ ID NO: 9329 - RNA, 22 nt, Homo sapiens
agaagaacauagggugacugaa

SEQ ID NO: 9330 - RNA, 22 nt, Homo sapiens
gucuuggagaacucagcuuggc

SEQ ID NO: 9331 - RNA, 22 nt, Homo sapiens
uuaugguuguuaucuugguucg

SEQ ID NO: 9332 - RNA, 22 nt, Homo sapiens
uuugcugagucugacuucaugg

SEQ ID NO: 9333 - RNA, 22 nt, Homo sapiens
uuugugcuauguuauauauucu

SEQ ID NO: 9334 - RNA, 22 nt, Homo sapiens
auaaggcugguauagacauuca

SEQ ID NO: 9335 - RNA, 22 nt, Homo sapiens
ggcaaguauguuuuaggaugcu

SEQ ID NO: 9336 - RNA, 22 nt, Homo sapiens
auggaggacaaugucaccuuca

SEQ ID NO: 9337 - RNA, 22 nt, Homo sapiens
acccuggauucguggccuugaa

SEQ ID NO: 9338 - RNA, 22 nt, Homo sapiens
gaugagguaggccugcuuugaa

SEQ ID NO: 9339 - RNA, 15 nt, Homo sapiens
auauaugcaaugugu

SEQ ID NO: 9340 - RNA, 22 nt, Homo sapiens
gaagacauuuacaugggagacc

SEQ ID NO: 9341 - RNA, 22 nt, Homo sapiens
uaaguacugucagaauuggacu

SEQ ID NO: 9342 - RNA, 22 nt, Homo sapiens
auggaauggcacuuugaagauu

SEQ ID NO: 9343 - RNA, 22 nt, Homo sapiens
uuaccagagaagacgaggggga

SEQ ID NO: 9344 - RNA, 22 nt, Homo sapiens
gauggcacuaagccauguagga

SEQ ID NO: 9345 - RNA, 22 nt, Homo sapiens
agagaccuguaaaguucaggca

SEQ ID NO: 9346 - RNA, 22 nt, Homo sapiens
aacacuguuuccagucaugauc

SEQ ID NO: 9347 - RNA, 22 nt, Homo sapiens
gugguagaaaguaccaaacuag

SEQ ID NO: 9348 - RNA, 22 nt, Homo sapiens
ccuugcacuucccaagugaggc

SEQ ID NO: 9349 - RNA, 22 nt, Homo sapiens
auacacgguaggcacauauuua

SEQ ID NO: 9350 - RNA, 22 nt, Homo sapiens
uuauaacagagacuccugugcu

SEQ ID NO: 9351 - RNA, 22 nt, Homo sapiens
cuucaccaguuuggcagucuca

SEQ ID NO: 9352 - RNA, 22 nt, Homo sapiens
uucacaugguugccuuuugauc

SEQ ID NO: 9353 - RNA, 22 nt, Homo sapiens
uuaaacucaucacccagguagu

SEQ ID NO: 9354 - RNA, 22 nt, Homo sapiens
cuuucugaggagaauagagaac

SEQ ID NO: 9355 - RNA, 22 nt, Homo sapiens
uuaguucauugugacuggacuc

SEQ ID NO: 9356 - RNA, 19 nt, Homo sapiens
ucccaagaugcucauacau

SEQ ID NO: 9357 - RNA, 22 nt, Homo sapiens
cuggaaagaaucaggcuaaacu

SEQ ID NO: 9358 - RNA, 22 nt, Homo sapiens
uuaauguaauugauugauugac

SEQ ID NO: 9359 - RNA, 22 nt, Homo sapiens
ugagauggguaauuaaauggug

SEQ ID NO: 9360 - RNA, 22 nt, Homo sapiens
ggaucgauuccaaauguagauc

SEQ ID NO: 9361 - RNA, 20 nt, Homo sapiens
uuuuggcuuaaagcagucug

SEQ ID NO: 9362 - RNA, 22 nt, Homo sapiens
ucacuggacagaaauaaaggug

SEQ ID NO: 9363 - RNA, 22 nt, Homo sapiens
guaauaccuuccccugcuggag

SEQ ID NO: 9364 - RNA, 23 nt, Homo sapiens
gagaucauucuggaauuagagug

SEQ ID NO: 9365 - RNA, 23 nt, Homo sapiens
uagaauguuuuuccauguuucuu

SEQ ID NO: 9366 - RNA, 22 nt, Homo sapiens
uaaguaguguugagacaaguuu

SEQ ID NO: 9367 - RNA, 21 nt, Homo sapiens
ugaaccccugcucucaagaaa

SEQ ID NO: 9368 - RNA, 22 nt, Homo sapiens
uggcaagagggaugcaagguuu

SEQ ID NO: 9369 - RNA, 22 nt, Homo sapiens
cuggccagagacauucauuaaa

SEQ ID NO: 9370 - RNA, 20 nt, Homo sapiens
ugauauuucuggaaguggag

SEQ ID NO: 9371 - RNA, 22 nt, Homo sapiens
uggaacacaucuaaggaagcag

SEQ ID NO: 9372 - RNA, 22 nt, Homo sapiens
ccaguuuucucacuguugcagu

SEQ ID NO: 9373 - RNA, 22 nt, Homo sapiens
ugcaaauuauugggccccaacu

SEQ ID NO: 9374 - RNA, 17 nt, Homo sapiens
aaggugcuucgaccucc

SEQ ID NO: 9375 - RNA, 22 nt, Homo sapiens
agcuauauugaggaugccauuc

SEQ ID NO: 9376 - RNA, 22 nt, Homo sapiens
uaacuagaaaggagacaguugc

SEQ ID NO: 9377 - RNA, 22 nt, Homo sapiens
agauucauccaaguuguugcau

SEQ ID NO: 9378 - RNA, 22 nt, Homo sapiens
aagugguucuaugaguuugcaa

SEQ ID NO: 9379 - RNA, 22 nt, Homo sapiens
gugugaacaucauagaguguau

SEQ ID NO: 9380 - RNA, 22 nt, Homo sapiens
gaagaucacacuguagaucuau

SEQ ID NO: 9381 - RNA, 22 nt, Homo sapiens
aaagcugucaaggcaggaggcu

SEQ ID NO: 9382 - RNA, 22 nt, Homo sapiens
acacuggguaacauaucuguua

SEQ ID NO: 9383 - RNA, 20 nt, Homo sapiens
gagcucaucuucuuuaccac

SEQ ID NO: 9384 - RNA, 22 nt, Homo sapiens
aaucugauguuaucagcuuaag

SEQ ID NO: 9385 - RNA, 22 nt, Homo sapiens
ugagaccuuucauuucucagug

SEQ ID NO: 9386 - RNA, 22 nt, Homo sapiens
aagcugguuuuauaucugugag

SEQ ID NO: 9387 - RNA, 22 nt, Homo sapiens
uaccuuaucccuaacuucccau

SEQ ID NO: 9388 - RNA, 22 nt, Homo sapiens
uguucuugagccuuuagaccua

SEQ ID NO: 9389 - RNA, 22 nt, Homo sapiens
gcacuacugcacuccagucuag

SEQ ID NO: 9390 - RNA, 22 nt, Homo sapiens
uggcagugggagauauuuuauu

SEQ ID NO: 9391 - RNA, 18 nt, Homo sapiens
ccauucaacagauuuguc

SEQ ID NO: 9392 - RNA, 23 nt, Homo sapiens
gaaguauagcaugcacauggaaa

SEQ ID NO: 9393 - RNA, 22 nt, Homo sapiens
uucaccuguagcaugcccuugg

SEQ ID NO: 9394 - RNA, 22 nt, Homo sapiens
ggagaucuuugaaguguugugc

SEQ ID NO: 9395 - RNA, 18 nt, Homo sapiens
gugcauagccauggcagc

SEQ ID NO: 9396 - RNA, 22 nt, Homo sapiens
uuccuuguuuauuuacaggagg

SEQ ID NO: 9397 - RNA, 22 nt, Homo sapiens
uaaguucauucaugaaacuuag

SEQ ID NO: 9398 - RNA, 22 nt, Homo sapiens
cauggccuuuggaaugugucua

SEQ ID NO: 9399 - RNA, 22 nt, Homo sapiens
cuuugggaccgcgguuuauacu

SEQ ID NO: 9400 - RNA, 22 nt, Homo sapiens
auagcagaacagugucucacug

SEQ ID NO: 9401 - RNA, 22 nt, Homo sapiens
guacacguggcuguguaggagu

SEQ ID NO: 9402 - RNA, 22 nt, Homo sapiens
agcaagaugaaguugagcuagg

SEQ ID NO: 9403 - RNA, 22 nt, Homo sapiens
uuuugcucuucauagguccugu

SEQ ID NO: 9404 - RNA, 22 nt, Homo sapiens
uugaucuggagagaggcccgug

SEQ ID NO: 9405 - RNA, 21 nt, Homo sapiens
ccugaagaagugaccucugag

SEQ ID NO: 9406 - RNA, 22 nt, Homo sapiens
uaucucaguguacaggaugaua

SEQ ID NO: 9407 - RNA, 22 nt, Homo sapiens
gagguaagagaauaaacaguuu

SEQ ID NO: 9408 - RNA, 22 nt, Homo sapiens
uauuccacucuguuggagguaa

SEQ ID NO: 9409 - RNA, 22 nt, Homo sapiens
ugagauaguacuuuuuuaaagg

SEQ ID NO: 9410 - RNA, 22 nt, Homo sapiens
gaugaucucuggugguaaagac

SEQ ID NO: 9411 - RNA, 22 nt, Homo sapiens
ugagaugaagugauguaaaaca

SEQ ID NO: 9412 - RNA, 20 nt, Homo sapiens
ucacuggguucuugaagucu

SEQ ID NO: 9413 - RNA, 22 nt, Homo sapiens
agucaguggaguaaauguaauu

SEQ ID NO: 9414 - RNA, 22 nt, Homo sapiens
agacagcugguagcacuuccug

SEQ ID NO: 9415 - RNA, 20 nt, Homo sapiens
agcuguuguuaaaaaggagg

SEQ ID NO: 9416 - RNA, 22 nt, Homo sapiens
ugaagugcugugggccaggcgu

SEQ ID NO: 9417 - RNA, 22 nt, Homo sapiens
ugggaaugaaauuacauagcuu

SEQ ID NO: 9418 - RNA, 22 nt, Homo sapiens
ugguguuugagaagcugauguc

SEQ ID NO: 9419 - RNA, 22 nt, Homo sapiens
aguuggccccuacugggaggug

SEQ ID NO: 9420 - RNA, 21 nt, Homo sapiens
uuugcacuuugcaaaucccua

SEQ ID NO: 9421 - RNA, 22 nt, Homo sapiens
ugagcauauuuaagguaugcua

SEQ ID NO: 9422 - RNA, 22 nt, Homo sapiens
ugagaagugauauagaaguuaa

SEQ ID NO: 9423 - RNA, 22 nt, Homo sapiens
uggcagaugggugagcuggaga

SEQ ID NO: 9424 - RNA, 22 nt, Homo sapiens
ugagugaggcugggcagucccu

SEQ ID NO: 9425 - RNA, 22 nt, Homo sapiens
aacacuaucugccuuacaggga

SEQ ID NO: 9426 - RNA, 22 nt, Homo sapiens
guggcuagaaugaagguagcug

SEQ ID NO: 9427 - RNA, 22 nt, Homo sapiens
ugacuagagacagaaacuaaaa

SEQ ID NO: 9428 - RNA, 22 nt, Homo sapiens
ggcaugaggccauaaaaguaag

SEQ ID NO: 9429 - RNA, 22 nt, Homo sapiens
aucugcaaauaaugaagauugg

SEQ ID NO: 9430 - RNA, 22 nt, Homo sapiens
cauugcacuccaccuuggguaa

SEQ ID NO: 9431 - RNA, 19 nt, Homo sapiens
uaucaaguaugcacuguac

SEQ ID NO: 9432 - RNA, 22 nt, Homo sapiens
aagcaucauuuggaauuugaga

SEQ ID NO: 9433 - RNA, 23 nt, Homo sapiens
gcaaauaucguagagugucccug

SEQ ID NO: 9434 - RNA, 22 nt, Homo sapiens
uuguacuagucauauuuugaaa

SEQ ID NO: 9435 - RNA, 15 nt, Homo sapiens
guuuuuggauacaau

SEQ ID NO: 9436 - RNA, 21 nt, Homo sapiens
auggugagaaaguagugucaa

SEQ ID NO: 9437 - RNA, 22 nt, Homo sapiens
uucauaguguaccugaaggcac

SEQ ID NO: 9438 - RNA, 22 nt, Homo sapiens
ggaugcauucaacuuccaguuc

SEQ ID NO: 9439 - RNA, 21 nt, Homo sapiens
auuaaugcucugguuagaggc

SEQ ID NO: 9440 - RNA, 22 nt, Homo sapiens
uauaugcaacauaguguaugug

SEQ ID NO: 9441 - RNA, 22 nt, Homo sapiens
uauaaccauuucuucucucuuc

SEQ ID NO: 9442 - RNA, 22 nt, Homo sapiens
cugagauuaagauauugggagu

SEQ ID NO: 9443 - RNA, 22 nt, Homo sapiens
auacacgugccauguuggugug

SEQ ID NO: 9444 - RNA, 19 nt, Homo sapiens
uugauaugauuaggagcac

SEQ ID NO: 9445 - RNA, 22 nt, Homo sapiens
cucaccuugugauccuccugcc

SEQ ID NO: 9446 - RNA, 22 nt, Homo sapiens
uugcaagauguucaugggcugu

SEQ ID NO: 9447 - RNA, 22 nt, Homo sapiens
uugcuacauugauugccucuuu

SEQ ID NO: 9448 - RNA, 22 nt, Homo sapiens
gcucguccccuccugacucugc

SEQ ID NO: 9449 - RNA, 22 nt, Homo sapiens
auauggcuuuuauuauguugag

SEQ ID NO: 9450 - RNA, 20 nt, Homo sapiens
acaaaugcauucugugacau

SEQ ID NO: 9451 - RNA, 22 nt, Homo sapiens
uuggcauuuuuagucaugggaa

SEQ ID NO: 9452 - RNA, 22 nt, Homo sapiens
ugucaguggucuggaugcagcc

SEQ ID NO: 9453 - RNA, 22 nt, Homo sapiens
cuguuugguuaucuuuuccugu

SEQ ID NO: 9454 - RNA, 19 nt, Homo sapiens
agcaguguggagauuucuc

SEQ ID NO: 9455 - RNA, 22 nt, Homo sapiens
guuggucucguauaaaucaagg

SEQ ID NO: 9456 - RNA, 22 nt, Homo sapiens
augcacauauguacugcccuau

SEQ ID NO: 9457 - RNA, 22 nt, Homo sapiens
ucacauagcugaguaaaaugga

SEQ ID NO: 9458 - RNA, 20 nt, Homo sapiens
auguaauguaugauauguac

SEQ ID NO: 9459 - RNA, 19 nt, Homo sapiens
uuccugagaacaagggcuu

SEQ ID NO: 9460 - RNA, 22 nt, Homo sapiens
agagguuuaacuggcuuauggu

SEQ ID NO: 9461 - RNA, 22 nt, Homo sapiens
uuguaguagcauuauuuauaau

SEQ ID NO: 9462 - RNA, 22 nt, Homo sapiens
gaccuguaguuuaguugccugu

SEQ ID NO: 9463 - RNA, 22 nt, Homo sapiens
aggcaaaugccagcaaucacac

SEQ ID NO: 9464 - RNA, 22 nt, Homo sapiens
augaaagguugucuuaagccau

SEQ ID NO: 9465 - RNA, 22 nt, Homo sapiens
uuggcacgugguggggcucgga

SEQ ID NO: 9466 - RNA, 22 nt, Homo sapiens
cauagcacugcacuucagccug

SEQ ID NO: 9467 - RNA, 22 nt, Homo sapiens
uuauauguuagacauggugggu

SEQ ID NO: 9468 - RNA, 22 nt, Homo sapiens
aagugcucuugaaacugccuua

SEQ ID NO: 9469 - RNA, 22 nt, Homo sapiens
augucuagagugauacugaagc

SEQ ID NO: 9470 - RNA, 22 nt, Homo sapiens
ugggugugaccgcucaaggggg

SEQ ID NO: 9471 - RNA, 22 nt, Homo sapiens
auggcuuuuuaaaucauguugu

SEQ ID NO: 9472 - RNA, 22 nt, Homo sapiens
agcagcacaucccuuucuggcc

SEQ ID NO: 9473 - RNA, 22 nt, Homo sapiens
auagcaaugccccaauccuugg

SEQ ID NO: 9474 - RNA, 20 nt, Homo sapiens
ucuuuuuguggccccagagu

SEQ ID NO: 9475 - RNA, 22 nt, Homo sapiens
uuuaaagcuccaagcaugucug

SEQ ID NO: 9476 - RNA, 22 nt, Homo sapiens
agagaucaacugaauuacugga

SEQ ID NO: 9477 - RNA, 22 nt, Homo sapiens
gggguuuuaccuucguauucuu

SEQ ID NO: 9478 - RNA, 22 nt, Homo sapiens
ggcagcauugccuuugcaguga

SEQ ID NO: 9479 - RNA, 19 nt, Homo sapiens
ucagaucagcccaagggau

SEQ ID NO: 9480 - RNA, 22 nt, Homo sapiens
gaugagguagaagacucagcaa

SEQ ID NO: 9481 - RNA, 22 nt, Homo sapiens
cucagugucuggggccccaggg

SEQ ID NO: 9482 - RNA, 22 nt, Homo sapiens
ugccagagacguagggaauauu

SEQ ID NO: 9483 - RNA, 22 nt, Homo sapiens
ucugccuacugagcacacagug

SEQ ID NO: 9484 - RNA, 22 nt, Homo sapiens
ugaguuaauuuuuguaucaugu

SEQ ID NO: 9485 - RNA, 22 nt, Homo sapiens
ggcagaucauuggccucaguuu

SEQ ID NO: 9486 - RNA, 22 nt, Homo sapiens
gccuagggacaaaccguccgac

SEQ ID NO: 9487 - RNA, 22 nt, Homo sapiens
aucacuggucaugagagaagua

SEQ ID NO: 9488 - RNA, 22 nt, Homo sapiens
uauggauauuacuccacaaaga

SEQ ID NO: 9489 - RNA, 22 nt, Homo sapiens
cuugagcaaacaaaggugguag

SEQ ID NO: 9490 - RNA, 22 nt, Homo sapiens
gugccacaguguuaagggauuc

SEQ ID NO: 9491 - RNA, 22 nt, Homo sapiens
ucaccuagacucgaucauguag

SEQ ID NO: 9492 - RNA, 19 nt, Homo sapiens
guaaucucaguacuuuggu

SEQ ID NO: 9493 - RNA, 22 nt, Homo sapiens
agguagaguguuuuguucuucu

SEQ ID NO: 9494 - RNA, 22 nt, Homo sapiens
ugaaaucuuugaugguggcauu

SEQ ID NO: 9495 - RNA, 22 nt, Homo sapiens
uugucaguguucacucaaagcu

SEQ ID NO: 9496 - RNA, 22 nt, Homo sapiens
uuggaaggcuccuaaugaaugg

SEQ ID NO: 9497 - RNA, 22 nt, Homo sapiens
ucacugaaaccacugccuccug

SEQ ID NO: 9498 - RNA, 22 nt, Homo sapiens
gguauugguugagauuaacuuu

SEQ ID NO: 9499 - RNA, 22 nt, Homo sapiens
gugcaugucuaugcgagucuaa

SEQ ID NO: 9500 - RNA, 20 nt, Homo sapiens
acuggcacugguaggugugg

SEQ ID NO: 9501 - RNA, 22 nt, Homo sapiens
agugagcugcagucuggggucc

SEQ ID NO: 9502 - RNA, 22 nt, Homo sapiens
ggcauguugauagguagaugua

SEQ ID NO: 9503 - RNA, 22 nt, Homo sapiens
uuagcacugagaauggcuugcu

SEQ ID NO: 9504 - RNA, 22 nt, Homo sapiens
cuaaaacuuucugagugcagca

SEQ ID NO: 9505 - RNA, 22 nt, Homo sapiens
augguauggaaggucuggagga

SEQ ID NO: 9506 - RNA, 22 nt, Homo sapiens
ucacagucuccucuagggaggg

SEQ ID NO: 9507 - RNA, 22 nt, Homo sapiens
ucccuagacuccugccuuucag

SEQ ID NO: 9508 - RNA, 22 nt, Homo sapiens
agagaacugauucagggaaaau

SEQ ID NO: 9509 - RNA, 22 nt, Homo sapiens
cuuccauaguauuuuuacaaaa

SEQ ID NO: 9510 - RNA, 22 nt, Homo sapiens
augacauugaugcucuggcugg

SEQ ID NO: 9511 - RNA, 22 nt, Homo sapiens
aagagguagucugucccuuagc

SEQ ID NO: 9512 - RNA, 21 nt, Homo sapiens
gcaaaguggcuaccuugcucc

SEQ ID NO: 9513 - RNA, 22 nt, Homo sapiens
uaguacccuugaagcagacaua

SEQ ID NO: 9514 - RNA, 22 nt, Homo sapiens
uugugcacauguacccuagaac

SEQ ID NO: 9515 - RNA, 22 nt, Homo sapiens
caugguacugccacagaagagu

SEQ ID NO: 9516 - RNA, 23 nt, Homo sapiens
gugaucauuguuguggguugaau

SEQ ID NO: 9517 - RNA, 22 nt, Homo sapiens
uuucccuuacuuaaacuuacuc

SEQ ID NO: 9518 - RNA, 22 nt, Homo sapiens
ugacaugauuguauauuuagaa

SEQ ID NO: 9519 - RNA, 22 nt, Homo sapiens
uucugaguggcuuucaacacug

SEQ ID NO: 9520 - RNA, 22 nt, Homo sapiens
ugagcacaggugcgcgguuacu

SEQ ID NO: 9521 - RNA, 22 nt, Homo sapiens
uauugcuugaggaaaugguaau

SEQ ID NO: 9522 - RNA, 22 nt, Homo sapiens
aagugguguuugggagcuggac

SEQ ID NO: 9523 - RNA, 22 nt, Homo sapiens
cuguaaggcacuaagcauaugu

SEQ ID NO: 9524 - RNA, 21 nt, Homo sapiens
uaucauggugaaacccugucu

SEQ ID NO: 9525 - RNA, 22 nt, Homo sapiens
auccugagacuuuucugaaguu

SEQ ID NO: 9526 - RNA, 16 nt, Homo sapiens
uguaaauguuuugcau

SEQ ID NO: 9527 - RNA, 17 nt, Homo sapiens
ucuucuguuacuguggc

SEQ ID NO: 9528 - RNA, 22 nt, Homo sapiens
uagugcacuacuugugggaaug

SEQ ID NO: 9529 - RNA, 22 nt, Homo sapiens
uuggagagugauauucagaugc

SEQ ID NO: 9530 - RNA, 22 nt, Homo sapiens
gggauuguaauacugaguuggu

SEQ ID NO: 9531 - RNA, 22 nt, Homo sapiens
ugugcuaaaaugggacuucuaa

SEQ ID NO: 9532 - RNA, 22 nt, Homo sapiens
gucuggagacuugggucaucaa

SEQ ID NO: 9533 - RNA, 22 nt, Homo sapiens
uggaaucaucaacgaaugaaau

SEQ ID NO: 9534 - RNA, 22 nt, Homo sapiens
ugccaggaugaggucaauguuu

SEQ ID NO: 9535 - RNA, 22 nt, Homo sapiens
uacugcugucagugccaaguag

SEQ ID NO: 9536 - RNA, 22 nt, Homo sapiens
auuccauuuguguggaauggcu

SEQ ID NO: 9537 - RNA, 22 nt, Homo sapiens
ucuuugguauuuguggggaauu

SEQ ID NO: 9538 - RNA, 22 nt, Homo sapiens
uggaauggagagagggugcacg

SEQ ID NO: 9539 - RNA, 17 nt, Homo sapiens
augggguuguagcccca

SEQ ID NO: 9540 - RNA, 22 nt, Homo sapiens
gcugacacugggcuauagaucu

SEQ ID NO: 9541 - RNA, 22 nt, Homo sapiens
aaugccuagugugugacaggug

SEQ ID NO: 9542 - RNA, 22 nt, Homo sapiens
uuuaaugcaucccaaaauguag

SEQ ID NO: 9543 - RNA, 22 nt, Homo sapiens
uuugggacuguauuaaaugccu

SEQ ID NO: 9544 - RNA, 22 nt, Homo sapiens
aucccugaggaauuucugcacu

SEQ ID NO: 9545 - RNA, 22 nt, Homo sapiens
uuuguacuugaaacccagggcc

SEQ ID NO: 9546 - RNA, 19 nt, Homo sapiens
uuacauccauugcauuuca

SEQ ID NO: 9547 - RNA, 22 nt, Homo sapiens
aaaugcauugagggaaaaggca

SEQ ID NO: 9548 - RNA, 21 nt, Homo sapiens
uagagcuuggcacagaguaga

SEQ ID NO: 9549 - RNA, 22 nt, Homo sapiens
gcccaguagcaguacaucccuu

SEQ ID NO: 9550 - RNA, 22 nt, Homo sapiens
agaauguaacucuaugaaggca

SEQ ID NO: 9551 - RNA, 22 nt, Homo sapiens
uugugguaaucugugacagcag

SEQ ID NO: 9552 - RNA, 15 nt, Homo sapiens
uggugguguugagac

SEQ ID NO: 9553 - RNA, 19 nt, Homo sapiens
uuucccugcagaccuacua

SEQ ID NO: 9554 - RNA, 22 nt, Homo sapiens
uucauuggacuuguguucuuga

SEQ ID NO: 9555 - RNA, 22 nt, Homo sapiens
ugagaaccucugugugcccacu

SEQ ID NO: 9556 - RNA, 22 nt, Homo sapiens
guggcaguuuuaaauaugaaaa

SEQ ID NO: 9557 - RNA, 18 nt, Homo sapiens
ugauaucaaugauagcca

SEQ ID NO: 9558 - RNA, 22 nt, Homo sapiens
aggaaucuaagguaucagguua

SEQ ID NO: 9559 - RNA, 22 nt, Homo sapiens
ucuuugguauugugaauagugu

SEQ ID NO: 9560 - RNA, 23 nt, Homo sapiens
cagugcaugacuguauaugcaaa

SEQ ID NO: 9561 - RNA, 19 nt, Homo sapiens
auacacguguauacauaca

SEQ ID NO: 9562 - RNA, 21 nt, Homo sapiens
aggagcauuguugugguggag

SEQ ID NO: 9563 - RNA, 22 nt, Homo sapiens
uccugagacugaggagcuuugg

SEQ ID NO: 9564 - RNA, 20 nt, Homo sapiens
gucuuguagcucaaguuauu

SEQ ID NO: 9565 - RNA, 22 nt, Homo sapiens
ucacacucucaccaacauuugg

SEQ ID NO: 9566 - RNA, 22 nt, Homo sapiens
aaucagcacacugugcuuucca

SEQ ID NO: 9567 - RNA, 22 nt, Homo sapiens
uguuaacauuuuagagugggaa

SEQ ID NO: 9568 - RNA, 22 nt, Homo sapiens
acauaaagaagcaggacauugu

SEQ ID NO: 9569 - RNA, 22 nt, Homo sapiens
agaaagugcuucccuuugguga

SEQ ID NO: 9570 - RNA, 22 nt, Homo sapiens
ugagaucagaaggauuucucug

SEQ ID NO: 9571 - RNA, 22 nt, Homo sapiens
ucauucauucauccagcuugag

SEQ ID NO: 9572 - RNA, 19 nt, Homo sapiens
uuggcccugguucucuucu

SEQ ID NO: 9573 - RNA, 22 nt, Homo sapiens
cuccuguagccccaucaucuuu

SEQ ID NO: 9574 - RNA, 22 nt, Homo sapiens
uuggaagacauucugucugcua

SEQ ID NO: 9575 - RNA, 22 nt, Homo sapiens
ucaucagguaugucagcggagu

SEQ ID NO: 9576 - RNA, 22 nt, Homo sapiens
ugaauauuugcuacucacucuu

SEQ ID NO: 9577 - RNA, 22 nt, Homo sapiens
uuuguacuaugguuuuucacua

SEQ ID NO: 9578 - RNA, 22 nt, Homo sapiens
acccagaagucauucaggaaca

SEQ ID NO: 9579 - RNA, 22 nt, Homo sapiens
aagagccgcaagggugaagggu

SEQ ID NO: 9580 - RNA, 22 nt, Homo sapiens
augugccaauuaggauuccaag

SEQ ID NO: 9581 - RNA, 22 nt, Homo sapiens
aagacuguaauccaucuugagu

SEQ ID NO: 9582 - RNA, 22 nt, Homo sapiens
cuugggauauguguuacucugu

SEQ ID NO: 9583 - RNA, 18 nt, Homo sapiens
ucacagguaaaguugaca

SEQ ID NO: 9584 - RNA, 22 nt, Homo sapiens
ucuuauuuggggaaaggguccu

SEQ ID NO: 9585 - RNA, 22 nt, Homo sapiens
ugagaagaugaacuccuugguc

SEQ ID NO: 9586 - RNA, 22 nt, Homo sapiens
uuuuuggaggagguuagaucau

SEQ ID NO: 9587 - RNA, 22 nt, Homo sapiens
auaauaucagguugugaugaug

SEQ ID NO: 9588 - RNA, 22 nt, Homo sapiens
acaagacuucuuguauucuagu

SEQ ID NO: 9589 - RNA, 22 nt, Homo sapiens
acaucccaugccuggguacucc

SEQ ID NO: 9590 - RNA, 19 nt, Homo sapiens
ucaccaguacacaauacaa

SEQ ID NO: 9591 - RNA, 17 nt, Homo sapiens
augacuucuucagugug

SEQ ID NO: 9592 - RNA, 22 nt, Homo sapiens
uugauaagaaaaauauaccaga

SEQ ID NO: 9593 - RNA, 22 nt, Homo sapiens
aaaugcauggacagcuggucuu

SEQ ID NO: 9594 - RNA, 21 nt, Homo sapiens
uagcucagugguguugccaua

SEQ ID NO: 9595 - RNA, 21 nt, Homo sapiens
ucaccuguagcugcauguucu

SEQ ID NO: 9596 - RNA, 22 nt, Homo sapiens
uaacccacgcagaauggacaag

SEQ ID NO: 9597 - RNA, 22 nt, Homo sapiens
uuuauccagccucuagcaaggu

SEQ ID NO: 9598 - RNA, 22 nt, Homo sapiens
uaccauguauguuucuccauug

SEQ ID NO: 9599 - RNA, 22 nt, Homo sapiens
uugagauggagucuugcgcugu

SEQ ID NO: 9600 - RNA, 22 nt, Homo sapiens
guauagaucguagaccaauaaa

SEQ ID NO: 9601 - RNA, 22 nt, Homo sapiens
uggucucuuugcuuuagucauc

SEQ ID NO: 9602 - RNA, 22 nt, Homo sapiens
uuugugcuaacuuuaacucuua

SEQ ID NO: 9603 - RNA, 22 nt, Homo sapiens
uguuacagcagcacaaaaugga

SEQ ID NO: 9604 - RNA, 22 nt, Homo sapiens
auauuggacugugcuaguuaga

SEQ ID NO: 9605 - RNA, 22 nt, Homo sapiens
gagcucauuaaaaauguagaau

SEQ ID NO: 9606 - RNA, 22 nt, Homo sapiens
ucuccaguuuccuucgucuauc

SEQ ID NO: 9607 - RNA, 22 nt, Homo sapiens
ugagaacauuccucuuccuggc

SEQ ID NO: 9608 - RNA, 22 nt, Homo sapiens
uucacagugugaucuaugggca

SEQ ID NO: 9609 - RNA, 22 nt, Homo sapiens
cuagaggcacagccuaggcacu

SEQ ID NO: 9610 - RNA, 22 nt, Homo sapiens
gagaccauuuacugccuacuua

SEQ ID NO: 9611 - RNA, 22 nt, Homo sapiens
aucccaguaaaaauggcuucua

SEQ ID NO: 9612 - RNA, 22 nt, Homo sapiens
uugaagacuaccuaccauacuu

SEQ ID NO: 9613 - RNA, 22 nt, Homo sapiens
aaauuguccuauugguuuaagc

SEQ ID NO: 9614 - RNA, 22 nt, Homo sapiens
auauugacuuucucuuagauca

SEQ ID NO: 9615 - RNA, 22 nt, Homo sapiens
aauugguuaagauaagaucaua

SEQ ID NO: 9616 - RNA, 22 nt, Homo sapiens
acugcacuccagccucaugaca

SEQ ID NO: 9617 - RNA, 22 nt, Homo sapiens
uuugagugugauaucgauugga

SEQ ID NO: 9618 - RNA, 22 nt, Homo sapiens
gugauagguugucacugucacu

SEQ ID NO: 9619 - RNA, 22 nt, Homo sapiens
uagcagcaucucuggcuucuac

SEQ ID NO: 9620 - RNA, 22 nt, Homo sapiens
guugaucuauguugcuggcagu

SEQ ID NO: 9621 - RNA, 22 nt, Homo sapiens
uugugguugauacacguaggaa

SEQ ID NO: 9622 - RNA, 22 nt, Homo sapiens
aucuugcauuugcuaaaaugca

SEQ ID NO: 9623 - RNA, 22 nt, Homo sapiens
uggcaccauccaggugucucua

SEQ ID NO: 9624 - RNA, 23 nt, Homo sapiens
ucaucacagcauuuccugguauu

SEQ ID NO: 9625 - RNA, 22 nt, Homo sapiens
gucauaugcucggaaaauguua

SEQ ID NO: 9626 - RNA, 22 nt, Homo sapiens
auuggcaauggcaaagcagagu

SEQ ID NO: 9627 - RNA, 22 nt, Homo sapiens
uccaaaucucuggcacugggau

SEQ ID NO: 9628 - RNA, 19 nt, Homo sapiens
uuggaauuuuagaguuuga

SEQ ID NO: 9629 - RNA, 22 nt, Homo sapiens
uggcaauaaggacuccuuaggu

SEQ ID NO: 9630 - RNA, 20 nt, Homo sapiens
gacaugacuaggagauagcc

SEQ ID NO: 9631 - RNA, 22 nt, Homo sapiens
guaacguaaugucaaaaucuau

SEQ ID NO: 9632 - RNA, 22 nt, Homo sapiens
ugguagugugagucuaaauugg

SEQ ID NO: 9633 - RNA, 22 nt, Homo sapiens
uuggagugugcucauaacugcu

SEQ ID NO: 9634 - RNA, 22 nt, Homo sapiens
uuccugugacccccaagcccac

SEQ ID NO: 9635 - RNA, 23 nt, Homo sapiens
caauacugaccucacguuaauag

SEQ ID NO: 9636 - RNA, 22 nt, Homo sapiens
cauugguugaacagauuguguu

SEQ ID NO: 9637 - RNA, 22 nt, Homo sapiens
uaugucuuuugcuugcaaauag

SEQ ID NO: 9638 - RNA, 19 nt, Homo sapiens
ucugacagccccagucaac

SEQ ID NO: 9639 - RNA, 22 nt, Homo sapiens
ugugccuacugugggagcguca

SEQ ID NO: 9640 - RNA, 22 nt, Homo sapiens
uaucauaguuuggacuuucauu

SEQ ID NO: 9641 - RNA, 22 nt, Homo sapiens
augucuguuugcugagcccggc

SEQ ID NO: 9642 - RNA, 22 nt, Homo sapiens
auugcacuccagcccugcugac

SEQ ID NO: 9643 - RNA, 22 nt, Homo sapiens
cugagagugguauguuuaagug

SEQ ID NO: 9644 - RNA, 22 nt, Homo sapiens
guggguaaaucucuguuugagg

SEQ ID NO: 9645 - RNA, 18 nt, Homo sapiens
uagcucuuguugguccau

SEQ ID NO: 9646 - RNA, 22 nt, Homo sapiens
agaguauagcaacuuaguaaaa

SEQ ID NO: 9647 - RNA, 22 nt, Homo sapiens
gaaucacagauuaugaguaucu

SEQ ID NO: 9648 - RNA, 22 nt, Homo sapiens
uugcaccuugaagccaauagca

SEQ ID NO: 9649 - RNA, 18 nt, Homo sapiens
auacaagcagcagagauu

SEQ ID NO: 9650 - RNA, 22 nt, Homo sapiens
uacugguuuuggugggcaggug

SEQ ID NO: 9651 - RNA, 22 nt, Homo sapiens
uaugagcaaaaugaggguuagu

SEQ ID NO: 9652 - RNA, 22 nt, Homo sapiens
caguugguguacauauauguau

SEQ ID NO: 9653 - RNA, 22 nt, Homo sapiens
uuccauguaguugaacgguuuu

SEQ ID NO: 9654 - RNA, 22 nt, Homo sapiens
gccaaaaugcugggauuacagg

SEQ ID NO: 9655 - RNA, 22 nt, Homo sapiens
ugcgaucuuuuuccuuguuccu

SEQ ID NO: 9656 - RNA, 22 nt, Homo sapiens
uugugcuuuuuaaauagcuucc

SEQ ID NO: 9657 - RNA, 22 nt, Homo sapiens
uggggcuuuuucuuguauucuc

SEQ ID NO: 9658 - RNA, 22 nt, Homo sapiens
ugucaugugagggaacuuguuc

SEQ ID NO: 9659 - RNA, 22 nt, Homo sapiens
aaagugcuguagacugggcgca

SEQ ID NO: 9660 - RNA, 22 nt, Homo sapiens
augaaagucaauccccaagugu

SEQ ID NO: 9661 - RNA, 22 nt, Homo sapiens
augcauauuuuaccuagaagag

SEQ ID NO: 9662 - RNA, 22 nt, Homo sapiens
cuagauuauccaacuuauuagc

SEQ ID NO: 9663 - RNA, 22 nt, Homo sapiens
uacugcacauaugaagguuccc

SEQ ID NO: 9664 - RNA, 22 nt, Homo sapiens
gucaguggagaaaaggacaugu

SEQ ID NO: 9665 - RNA, 21 nt, Homo sapiens
gggcaaaucuuuauccuaagc

SEQ ID NO: 9666 - RNA, 22 nt, Homo sapiens
augauguaggccauggguuucu

SEQ ID NO: 9667 - RNA, 22 nt, Homo sapiens
ugugcauaugucuuuauaguag

SEQ ID NO: 9668 - RNA, 22 nt, Homo sapiens
auauggguuuuauauuaggcuc

SEQ ID NO: 9669 - RNA, 22 nt, Homo sapiens
ucaguuuagguguaacggccac

SEQ ID NO: 9670 - RNA, 22 nt, Homo sapiens
ugggaagcugcauuuuaacaag

SEQ ID NO: 9671 - RNA, 22 nt, Homo sapiens
uuaggcucuuuaucaguuaacu

SEQ ID NO: 9672 - RNA, 22 nt, Homo sapiens
aucaccuggaggugaucacuug

SEQ ID NO: 9673 - RNA, 22 nt, Homo sapiens
acugcacuccagccuguugaca

SEQ ID NO: 9674 - RNA, 22 nt, Homo sapiens
uccuuuagacugaauccugaga

SEQ ID NO: 9675 - RNA, 22 nt, Homo sapiens
ucacugugagaguuuauccugu

SEQ ID NO: 9676 - RNA, 22 nt, Homo sapiens
ugagaagugacgcagcaggguu

SEQ ID NO: 9677 - RNA, 22 nt, Homo sapiens
uuguauaguucuauguguuuug

SEQ ID NO: 9678 - RNA, 22 nt, Homo sapiens
aucacaauuguacguaggagcc

SEQ ID NO: 9679 - RNA, 20 nt, Homo sapiens
ugaggucaggaguuacagac

SEQ ID NO: 9680 - RNA, 22 nt, Homo sapiens
uugguacuagcugaucgcagag

SEQ ID NO: 9681 - RNA, 22 nt, Homo sapiens
aauacugcuuugauguaagcua

SEQ ID NO: 9682 - RNA, 22 nt, Homo sapiens
ugacaucaccaccuccgucauc

SEQ ID NO: 9683 - RNA, 22 nt, Homo sapiens
gggcauugugggcagagggcag

SEQ ID NO: 9684 - RNA, 23 nt, Homo sapiens
ucaguacuccacuuucaauagug

SEQ ID NO: 9685 - RNA, 22 nt, Homo sapiens
gacuggccuauaauggcgaauu

SEQ ID NO: 9686 - RNA, 22 nt, Homo sapiens
cuguuagguuaaggaauggcaa

SEQ ID NO: 9687 - RNA, 22 nt, Homo sapiens
guagguaaguacuucuggugag

SEQ ID NO: 9688 - RNA, 22 nt, Homo sapiens
cacacugucuucauuacuguag

SEQ ID NO: 9689 - RNA, 22 nt, Homo sapiens
uugagcuccucucaaccuaagg

SEQ ID NO: 9690 - RNA, 22 nt, Homo sapiens
ugugaaugauggagugucgaau

SEQ ID NO: 9691 - RNA, 22 nt, Homo sapiens
ugggaugaugaaaaggcuuucu

SEQ ID NO: 9692 - RNA, 22 nt, Homo sapiens
uucagugguuauuugugagauu

SEQ ID NO: 9693 - RNA, 22 nt, Homo sapiens
ugagguugucagugucauucuu

SEQ ID NO: 9694 - RNA, 22 nt, Homo sapiens
uccaguuuggaggcuugaugug

SEQ ID NO: 9695 - RNA, 21 nt, Homo sapiens
uggucaguuuucucacuagga

SEQ ID NO: 9696 - RNA, 22 nt, Homo sapiens
aucaccugagcaguauacacug

SEQ ID NO: 9697 - RNA, 22 nt, Homo sapiens
cuacccuuaaguuucugugggg

SEQ ID NO: 9698 - RNA, 20 nt, Homo sapiens
ugccagugugucaauuuaua

SEQ ID NO: 9699 - RNA, 22 nt, Homo sapiens
auggugugugaauuaaauguua

SEQ ID NO: 9700 - RNA, 22 nt, Homo sapiens
guaguagcacgagcucugucuc

SEQ ID NO: 9701 - RNA, 22 nt, Homo sapiens
uugcacauugcaccuuuuguau

SEQ ID NO: 9702 - RNA, 22 nt, Homo sapiens
aagcucauugagaucuauggcu

SEQ ID NO: 9703 - RNA, 22 nt, Homo sapiens
uugcaugggagcugggugaagc

SEQ ID NO: 9704 - RNA, 22 nt, Homo sapiens
aucacuguuuugaugcucggac

SEQ ID NO: 9705 - RNA, 23 nt, Homo sapiens
agcaaaugcucuagcacuccaac

SEQ ID NO: 9706 - RNA, 22 nt, Homo sapiens
gagcagacaugaggaccgcugg

SEQ ID NO: 9707 - RNA, 22 nt, Homo sapiens
cauggcacuguaugaaaugugc

SEQ ID NO: 9708 - RNA, 22 nt, Homo sapiens
augagcucauaaagagugauuu

SEQ ID NO: 9709 - RNA, 22 nt, Homo sapiens
auuggcuuuauacauaagaaua

SEQ ID NO: 9710 - RNA, 22 nt, Homo sapiens
ggucagugcauucuaaaggcaa

SEQ ID NO: 9711 - RNA, 22 nt, Homo sapiens
gaaauguugauagugggcauug

SEQ ID NO: 9712 - RNA, 22 nt, Homo sapiens
uuacaguauugcaaggacuagg

SEQ ID NO: 9713 - RNA, 22 nt, Homo sapiens
caugggcacugacuugcauucg

SEQ ID NO: 9714 - RNA, 22 nt, Homo sapiens
auuguacuccagccugggugac

SEQ ID NO: 9715 - RNA, 22 nt, Homo sapiens
acauaguagacacugaaaauau

SEQ ID NO: 9716 - RNA, 22 nt, Homo sapiens
cauggcaucuguguggccucca

SEQ ID NO: 9717 - RNA, 22 nt, Homo sapiens
acuguacugucuggggcagucu

SEQ ID NO: 9718 - RNA, 22 nt, Homo sapiens
uugaggugaagggcagagcagc

SEQ ID NO: 9719 - RNA, 21 nt, Homo sapiens
ugcauacuucucagaugauua

SEQ ID NO: 9720 - RNA, 22 nt, Homo sapiens
uacugcacuccagcuuaggaga

SEQ ID NO: 9721 - RNA, 22 nt, Homo sapiens
augagucacuuauuauuggggu

SEQ ID NO: 9722 - RNA, 23 nt, Homo sapiens
ugggucaguuuuucugacaucau

SEQ ID NO: 9723 - RNA, 22 nt, Homo sapiens
uugaaugcguuguguggcccgu

SEQ ID NO: 9724 - RNA, 22 nt, Homo sapiens
uaacaguguauuccuuuggaca

SEQ ID NO: 9725 - RNA, 22 nt, Homo sapiens
ggggaauguuaaagaauuugca

SEQ ID NO: 9726 - RNA, 22 nt, Homo sapiens
aauagcauugaaucuaccaauu

SEQ ID NO: 9727 - RNA, 22 nt, Homo sapiens
ugacuagagggcuuuuguguag

SEQ ID NO: 9728 - RNA, 22 nt, Homo sapiens
uuuaauguuacaguauugguau

SEQ ID NO: 9729 - RNA, 22 nt, Homo sapiens
ugcaccacugcacuucagccug

SEQ ID NO: 9730 - RNA, 22 nt, Homo sapiens
guucaguuuugaaauguuaauu

SEQ ID NO: 9731 - RNA, 22 nt, Homo sapiens
gaaaacugcuucucuggguuuc

SEQ ID NO: 9732 - RNA, 22 nt, Homo sapiens
guugcugagucccaucaccaga

SEQ ID NO: 9733 - RNA, 22 nt, Homo sapiens
ugguguccugucucugcgcuug

SEQ ID NO: 9734 - RNA, 22 nt, Homo sapiens
cauaaagauggaggaggccagg

SEQ ID NO: 9735 - RNA, 22 nt, Homo sapiens
uuugauuguacuaaaauuguac

SEQ ID NO: 9736 - RNA, 22 nt, Homo sapiens
acaucccuuucccacccuucac

SEQ ID NO: 9737 - RNA, 22 nt, Homo sapiens
uugagaugauggauaugcuaau

SEQ ID NO: 9738 - RNA, 22 nt, Homo sapiens
auugaauuugguuugcuaagaa

SEQ ID NO: 9739 - RNA, 22 nt, Homo sapiens
cagauacuggaguccugaaguu

SEQ ID NO: 9740 - RNA, 22 nt, Homo sapiens
aaguauuaugaguccuuguuuu

SEQ ID NO: 9741 - RNA, 22 nt, Homo sapiens
cauugcauuccagucugggcaa

SEQ ID NO: 9742 - RNA, 22 nt, Homo sapiens
gcucaugagacaagcaggagua

SEQ ID NO: 9743 - RNA, 22 nt, Homo sapiens
gagaacauacggcauuugguuu

SEQ ID NO: 9744 - RNA, 22 nt, Homo sapiens
ucagauuggugcaaaaguaauu

SEQ ID NO: 9745 - RNA, 18 nt, Homo sapiens
gacucaguuucuaaggca

SEQ ID NO: 9746 - RNA, 22 nt, Homo sapiens
gaguucauaucuaugagugugc

SEQ ID NO: 9747 - RNA, 22 nt, Homo sapiens
uaugcacacacguguuuaugug

SEQ ID NO: 9748 - RNA, 22 nt, Homo sapiens
gcugucaugagcaacacaugaa

SEQ ID NO: 9749 - RNA, 22 nt, Homo sapiens
auggaacauuauagauguaaaa

SEQ ID NO: 9750 - RNA, 22 nt, Homo sapiens
ugucaaagagacaucugcacuc

SEQ ID NO: 9751 - RNA, 18 nt, Homo sapiens
cuuugcagcuuccagagg

SEQ ID NO: 9752 - RNA, 22 nt, Homo sapiens
uuuuaguggacaaagguauuua

SEQ ID NO: 9753 - RNA, 23 nt, Homo sapiens
gugcaugagucuuuauaguagca

SEQ ID NO: 9754 - RNA, 22 nt, Homo sapiens
uaucauugccucaaucuguauu

SEQ ID NO: 9755 - RNA, 22 nt, Homo sapiens
uccaguagaauuuuauucaaca

SEQ ID NO: 9756 - RNA, 22 nt, Homo sapiens
cuacauuguagguauucaaacu

SEQ ID NO: 9757 - RNA, 22 nt, Homo sapiens
cccugugaauauuaccuuauuu

SEQ ID NO: 9758 - RNA, 22 nt, Homo sapiens
uugguucucuuagccaucuuaa

SEQ ID NO: 9759 - RNA, 22 nt, Homo sapiens
ugcaguguggcucacgccugua

SEQ ID NO: 9760 - RNA, 22 nt, Homo sapiens
auugugcuaaaguaauaaguca

SEQ ID NO: 9761 - RNA, 17 nt, Homo sapiens
ugugaucaucacccuug

SEQ ID NO: 9762 - RNA, 22 nt, Homo sapiens
uaagggacauguguugccuaag

SEQ ID NO: 9763 - RNA, 22 nt, Homo sapiens
ugcaagcacacccagggauugu

SEQ ID NO: 9764 - RNA, 17 nt, Homo sapiens
cuucaaauaauuucccc

SEQ ID NO: 9765 - RNA, 21 nt, Homo sapiens
uuggccuggaggccugaaugu

SEQ ID NO: 9766 - RNA, 22 nt, Homo sapiens
uuauagacacguuguaacaaac

SEQ ID NO: 9767 - RNA, 22 nt, Homo sapiens
ccucuguaguccugcaagagga

SEQ ID NO: 9768 - RNA, 22 nt, Homo sapiens
ugaagcuaacuugauugugaug

SEQ ID NO: 9769 - RNA, 20 nt, Homo sapiens
acuuuuugaugaggucguuu

SEQ ID NO: 9770 - RNA, 22 nt, Homo sapiens
uuauugcucauuugggcauucu

SEQ ID NO: 9771 - RNA, 22 nt, Homo sapiens
ugucauggauucugagucuggg

SEQ ID NO: 9772 - RNA, 23 nt, Homo sapiens
gaaguaauaaauggauucuuaac

SEQ ID NO: 9773 - RNA, 22 nt, Homo sapiens
accauugcacuccagccugggc

SEQ ID NO: 9774 - RNA, 22 nt, Homo sapiens
agauauuuguuaggucugucag

SEQ ID NO: 9775 - RNA, 17 nt, Homo sapiens
uuucagaguggaagugu

SEQ ID NO: 9776 - RNA, 22 nt, Homo sapiens
uuggaacacauguuuuucuacc

SEQ ID NO: 9777 - RNA, 22 nt, Homo sapiens
uauugacuugagaagggauuag

SEQ ID NO: 9778 - RNA, 20 nt, Homo sapiens
uagguuuucacagaauugcc

SEQ ID NO: 9779 - RNA, 22 nt, Homo sapiens
ucagguauuuauagcaaugcaa

SEQ ID NO: 9780 - RNA, 22 nt, Homo sapiens
uucacuguuaagcaguuaaacu

SEQ ID NO: 9781 - RNA, 22 nt, Homo sapiens
uagguugucucuucacucugau

SEQ ID NO: 9782 - RNA, 22 nt, Homo sapiens
ugccaagaacauuuucuguuuu

SEQ ID NO: 9783 - RNA, 16 nt, Homo sapiens
ggcauguaauaagcaa

SEQ ID NO: 9784 - RNA, 22 nt, Homo sapiens
agcuuguuuuauagaaagucaa

SEQ ID NO: 9785 - RNA, 22 nt, Homo sapiens
uucauguaauuccauaagguaa

SEQ ID NO: 9786 - RNA, 22 nt, Homo sapiens
ucaggcuuuucccagagugaug

SEQ ID NO: 9787 - RNA, 22 nt, Homo sapiens
acccaguaacauaugggaggga

SEQ ID NO: 9788 - RNA, 22 nt, Homo sapiens
accauugcacuccagccuuggc

SEQ ID NO: 9789 - RNA, 22 nt, Homo sapiens
ugcauugccgugauuacugucu

SEQ ID NO: 9790 - RNA, 22 nt, Homo sapiens
uuaugcaucuuccacacucauu

SEQ ID NO: 9791 - RNA, 22 nt, Homo sapiens
ucaagcaauucugcugccucag

SEQ ID NO: 9792 - RNA, 22 nt, Homo sapiens
uuccuugugacuaguagugacc

SEQ ID NO: 9793 - RNA, 22 nt, Homo sapiens
ggcauugugaacauuucccugc

SEQ ID NO: 9794 - RNA, 22 nt, Homo sapiens
cuggcacccuugcuuaggaaga

SEQ ID NO: 9795 - RNA, 22 nt, Homo sapiens
cccugacauucggagauguagu

SEQ ID NO: 9796 - RNA, 22 nt, Homo sapiens
ugggaugaaaauagcuucuucc

SEQ ID NO: 9797 - RNA, 22 nt, Homo sapiens
gucagggagggauagaugauua

SEQ ID NO: 9798 - RNA, 22 nt, Homo sapiens
ucacugcacuucaggcuuucuc

SEQ ID NO: 9799 - RNA, 22 nt, Homo sapiens
gugaaaugaaacgcuaugucuu

SEQ ID NO: 9800 - RNA, 22 nt, Homo sapiens
uugguuauccugucgguaauuc

SEQ ID NO: 9801 - RNA, 22 nt, Homo sapiens
ugucaaauucuggguuaaaaca

SEQ ID NO: 9802 - RNA, 22 nt, Homo sapiens
auagagcuaccauagaauccag

SEQ ID NO: 9803 - RNA, 22 nt, Homo sapiens
guaugaaaaucggagauugggu

SEQ ID NO: 9804 - RNA, 23 nt, Homo sapiens
auugcagaaucacagagguagug

SEQ ID NO: 9805 - RNA, 22 nt, Homo sapiens
uuucgguuaucuagcuuuauga

SEQ ID NO: 9806 - RNA, 22 nt, Homo sapiens
cacaguagaauagagcacuagg

SEQ ID NO: 9807 - RNA, 21 nt, Homo sapiens
uugguucccucugacaggucu

SEQ ID NO: 9808 - RNA, 22 nt, Homo sapiens
ucuggcuuauuucacuuagcau

SEQ ID NO: 9809 - RNA, 22 nt, Homo sapiens
ugagcuaggaucacaccugcau

SEQ ID NO: 9810 - RNA, 22 nt, Homo sapiens
auggcuuuuuucuugggcacuc

SEQ ID NO: 9811 - RNA, 23 nt, Homo sapiens
uuugugucccucuagaauucaug

SEQ ID NO: 9812 - RNA, 22 nt, Homo sapiens
gaaucacugugguaucccaugc

SEQ ID NO: 9813 - RNA, 22 nt, Homo sapiens
uuagaacuagaggaguuugagu

SEQ ID NO: 9814 - RNA, 19 nt, Homo sapiens
auauaacauccaggagcag

SEQ ID NO: 9815 - RNA, 22 nt, Homo sapiens
cccagaguucuuaaauacugag

SEQ ID NO: 9816 - RNA, 22 nt, Homo sapiens
auccauguggauaaauguguau

SEQ ID NO: 9817 - RNA, 22 nt, Homo sapiens
ugucucaguucccuucucugga

SEQ ID NO: 9818 - RNA, 22 nt, Homo sapiens
cugaauagagcacacugauggg

SEQ ID NO: 9819 - RNA, 20 nt, Homo sapiens
agaugcaugcacauaaacac

SEQ ID NO: 9820 - RNA, 22 nt, Homo sapiens
ucaaaguagaaaaggggcaauu

SEQ ID NO: 9821 - RNA, 22 nt, Homo sapiens
gugaugacauucagagaugaag

SEQ ID NO: 9822 - RNA, 22 nt, Homo sapiens
uugcgaugaagacaaaacaugc

SEQ ID NO: 9823 - RNA, 21 nt, Homo sapiens
uccuuggugaugcccugcagu

SEQ ID NO: 9824 - RNA, 22 nt, Homo sapiens
gauuuugguuagggaaggauac

SEQ ID NO: 9825 - RNA, 22 nt, Homo sapiens
gugaucucauuuggaauuagag

SEQ ID NO: 9826 - RNA, 19 nt, Homo sapiens
ucagcaguaaucaacuuca

SEQ ID NO: 9827 - RNA, 22 nt, Homo sapiens
uaauucacauaaagcacuuaga

SEQ ID NO: 9828 - RNA, 21 nt, Homo sapiens
gugucaugguugacuuuggca

SEQ ID NO: 9829 - RNA, 22 nt, Homo sapiens
uggcaugauguguucauugaaa

SEQ ID NO: 9830 - RNA, 22 nt, Homo sapiens
ugacugguguuuaaugagucaa

SEQ ID NO: 9831 - RNA, 22 nt, Homo sapiens
agucauggaucacaguagccuc

SEQ ID NO: 9832 - RNA, 19 nt, Homo sapiens
ugcagcaauguaaaagaca

SEQ ID NO: 9833 - RNA, 22 nt, Homo sapiens
aagcacccagccucacgccugc

SEQ ID NO: 9834 - RNA, 22 nt, Homo sapiens
auagcagcucacuuauuuaugg

SEQ ID NO: 9835 - RNA, 22 nt, Homo sapiens
uaucagaucccaauuucuggcc

SEQ ID NO: 9836 - RNA, 22 nt, Homo sapiens
ucagucauucaauuguugaaug

SEQ ID NO: 9837 - RNA, 22 nt, Homo sapiens
ugaacagagaaacacuggccau

SEQ ID NO: 9838 - RNA, 22 nt, Homo sapiens
uuacccuuuaacccuuuaaagu

SEQ ID NO: 9839 - RNA, 22 nt, Homo sapiens
uuuauggagagauauuuauggu

SEQ ID NO: 9840 - RNA, 22 nt, Homo sapiens
uauggcuucuuauucuuucccg

SEQ ID NO: 9841 - RNA, 22 nt, Homo sapiens
acccagaauucagucuuaggcc

SEQ ID NO: 9842 - RNA, 22 nt, Homo sapiens
ccuugucacugaguggaaugaa

SEQ ID NO: 9843 - RNA, 22 nt, Homo sapiens
aaagcuaccagauucuguugga

SEQ ID NO: 9844 - RNA, 22 nt, Homo sapiens
ugcuguguugcuggcuuaaaga

SEQ ID NO: 9845 - RNA, 22 nt, Homo sapiens
uugucaaugggugagugcagag

SEQ ID NO: 9846 - RNA, 22 nt, Homo sapiens
auguguauuaccucgauuguga

SEQ ID NO: 9847 - RNA, 22 nt, Homo sapiens
ccaugaacuagaauagaacaug

SEQ ID NO: 9848 - RNA, 22 nt, Homo sapiens
aaugacacugagcaucuuucau

SEQ ID NO: 9849 - RNA, 22 nt, Homo sapiens
uggcuaaguuaaucaaggagau

SEQ ID NO: 9850 - RNA, 22 nt, Homo sapiens
uucuugcacuuaacugacauuc

SEQ ID NO: 9851 - RNA, 20 nt, Homo sapiens
uaaagcugcucagggggcuc

SEQ ID NO: 9852 - RNA, 22 nt, Homo sapiens
acagccauuccagccaaauacu

SEQ ID NO: 9853 - RNA, 22 nt, Homo sapiens
cuuuggccauagcuaaaugauu

SEQ ID NO: 9854 - RNA, 22 nt, Homo sapiens
ucagacacuguggccuuuggac

SEQ ID NO: 9855 - RNA, 22 nt, Homo sapiens
ugaaugcaucuagaaauuuauu

SEQ ID NO: 9856 - RNA, 22 nt, Homo sapiens
uuugcaguguaguuggccagca

SEQ ID NO: 9857 - RNA, 22 nt, Homo sapiens
aggugcuaucugguuuuauagu

SEQ ID NO: 9858 - RNA, 22 nt, Homo sapiens
agacucauuuccauagucagcu

SEQ ID NO: 9859 - RNA, 22 nt, Homo sapiens
uugagauggagucucgcucuuu

SEQ ID NO: 9860 - RNA, 22 nt, Homo sapiens
uugagacggagucuugcucuuu

SEQ ID NO: 9861 - RNA, 22 nt, Homo sapiens
auugaguaaaugaaaauugccu

SEQ ID NO: 9862 - RNA, 22 nt, Homo sapiens
uaauaauguuaggcuuacucaa

SEQ ID NO: 9863 - RNA, 22 nt, Homo sapiens
cuuugguggagucuuuagguuc

SEQ ID NO: 9864 - RNA, 22 nt, Homo sapiens
ugaauagugucacaauaaacau

SEQ ID NO: 9865 - RNA, 22 nt, Homo sapiens
acccauacacacauauuuaugu

SEQ ID NO: 9866 - RNA, 23 nt, Homo sapiens
aucacuguuaacaauuucuuccu

SEQ ID NO: 9867 - RNA, 22 nt, Homo sapiens
ucauaucauuagaucuacugua

SEQ ID NO: 9868 - RNA, 22 nt, Homo sapiens
ugauaagugagauagcaaguga

SEQ ID NO: 9869 - RNA, 22 nt, Homo sapiens
ugcauggagcucucuuuggacu

SEQ ID NO: 9870 - RNA, 22 nt, Homo sapiens
cuuuguguggacauuucaggca

SEQ ID NO: 9871 - RNA, 22 nt, Homo sapiens
uuccaggugggcgugggccugg

SEQ ID NO: 9872 - RNA, 22 nt, Homo sapiens
ucagguaugucuuuaacagcag

SEQ ID NO: 9873 - RNA, 21 nt, Homo sapiens
ugagacaauccuggucaauau

SEQ ID NO: 9874 - RNA, 22 nt, Homo sapiens
ucuaaguaguagcuggucagaa

SEQ ID NO: 9875 - RNA, 22 nt, Homo sapiens
uagugguaguagcaguaauauu

SEQ ID NO: 9876 - RNA, 22 nt, Homo sapiens
acgugcaugcacacacaugcgc

SEQ ID NO: 9877 - RNA, 22 nt, Homo sapiens
uugaguuugaguauucuaaagc

SEQ ID NO: 9878 - RNA, 22 nt, Homo sapiens
caauggcaaugaaauagugaga

SEQ ID NO: 9879 - RNA, 22 nt, Homo sapiens
caccgagugacaguagccauca

SEQ ID NO: 9880 - RNA, 22 nt, Homo sapiens
auuccauuuguuaucacacccg

SEQ ID NO: 9881 - RNA, 22 nt, Homo sapiens
agcccuuagauggcuccuucca

SEQ ID NO: 9882 - RNA, 22 nt, Homo sapiens
cuauggcuguagucccugugua

SEQ ID NO: 9883 - RNA, 22 nt, Homo sapiens
uuggcauuuauucuaaggucaa

SEQ ID NO: 9884 - RNA, 22 nt, Homo sapiens
cgcuggugucuaagcgacagcu

SEQ ID NO: 9885 - RNA, 22 nt, Homo sapiens
ugucaugucuuuguguaucaau

SEQ ID NO: 9886 - RNA, 19 nt, Homo sapiens
ucugucacuggggguauuc

SEQ ID NO: 9887 - RNA, 19 nt, Homo sapiens
uacugcacuccagucuggg

SEQ ID NO: 9888 - RNA, 22 nt, Homo sapiens
gcuuguguauuaaaccuugcag

SEQ ID NO: 9889 - RNA, 21 nt, Homo sapiens
ugucaagugggaaaacaugua

SEQ ID NO: 9890 - RNA, 22 nt, Homo sapiens
ggccuguaggguauugguaggg

SEQ ID NO: 9891 - RNA, 22 nt, Homo sapiens
cugaggacaucagggaagcauc

SEQ ID NO: 9892 - RNA, 22 nt, Homo sapiens
caauggcacuauuggaaaaggu

SEQ ID NO: 9893 - RNA, 22 nt, Homo sapiens
gugguuuuuagauuucuacagu

SEQ ID NO: 9894 - RNA, 22 nt, Homo sapiens
acacucuaguguucuuaaucag

SEQ ID NO: 9895 - RNA, 22 nt, Homo sapiens
uugugcuuguaacuacauucag

SEQ ID NO: 9896 - RNA, 22 nt, Homo sapiens
uuagacucauuuuggucaagga

SEQ ID NO: 9897 - RNA, 22 nt, Homo sapiens
uaaguguaaugucugaaguuug

SEQ ID NO: 9898 - RNA, 22 nt, Homo sapiens
uugucccauggggucuuccuuu

SEQ ID NO: 9899 - RNA, 22 nt, Homo sapiens
aggugaaugcucacauucuaau

SEQ ID NO: 9900 - RNA, 22 nt, Homo sapiens
augguacuccagagaagcagaa

SEQ ID NO: 9901 - RNA, 22 nt, Homo sapiens
ucaucucaguuucuugccguac

SEQ ID NO: 9902 - RNA, 22 nt, Homo sapiens
uacucaguagacacucauaugu

SEQ ID NO: 9903 - RNA, 20 nt, Homo sapiens
uugaguauugccagggaggc

SEQ ID NO: 9904 - RNA, 22 nt, Homo sapiens
ugggucaguagcauguaugucu

SEQ ID NO: 9905 - RNA, 22 nt, Homo sapiens
uaccaguaaugggucaaaggca

SEQ ID NO: 9906 - RNA, 22 nt, Homo sapiens
uagagguauuaacaguagaaga

SEQ ID NO: 9907 - RNA, 22 nt, Homo sapiens
uugagcaacauagugagacugu

SEQ ID NO: 9908 - RNA, 22 nt, Homo sapiens
uuaguuuaucagugguuucuga

SEQ ID NO: 9909 - RNA, 19 nt, Homo sapiens
ucaugugcauacauuuggg

SEQ ID NO: 9910 - RNA, 21 nt, Homo sapiens
aggagauguuuguccuuuuag

SEQ ID NO: 9911 - RNA, 22 nt, Homo sapiens
ucugugcauggcagaggaauga

SEQ ID NO: 9912 - RNA, 22 nt, Homo sapiens
caggucaucugaguuuaguucu

SEQ ID NO: 9913 - RNA, 22 nt, Homo sapiens
acugcacuccaaccuguugggc

SEQ ID NO: 9914 - RNA, 22 nt, Homo sapiens
cagguaguauuugguuacauaa

SEQ ID NO: 9915 - RNA, 22 nt, Homo sapiens
cuggcaccauacacuguuguug

SEQ ID NO: 9916 - RNA, 22 nt, Homo sapiens
gucaccagcuguguuagccccu

SEQ ID NO: 9917 - RNA, 20 nt, Homo sapiens
ugagaugcauugggauguuu

SEQ ID NO: 9918 - RNA, 22 nt, Homo sapiens
ggacuagaucucccggcuucua

SEQ ID NO: 9919 - RNA, 22 nt, Homo sapiens
ugucauguuucuacugaccaaa

SEQ ID NO: 9920 - RNA, 23 nt, Homo sapiens
ugagguguuaagcagacuugucu

SEQ ID NO: 9921 - RNA, 22 nt, Homo sapiens
aauauguccuugaaauggugcu

SEQ ID NO: 9922 - RNA, 22 nt, Homo sapiens
cacacugucuucaauggguggu

SEQ ID NO: 9923 - RNA, 22 nt, Homo sapiens
uuaaggcuuguacuuguuuucu

SEQ ID NO: 9924 - RNA, 22 nt, Homo sapiens
ugagauccugagaguugggacu

SEQ ID NO: 9925 - RNA, 22 nt, Homo sapiens
guaucccuugcuaucugaaucu

SEQ ID NO: 9926 - RNA, 19 nt, Homo sapiens
ggugagaaauuaugggucu

SEQ ID NO: 9927 - RNA, 22 nt, Homo sapiens
ggcccaguugcgggugguaccg

SEQ ID NO: 9928 - RNA, 22 nt, Homo sapiens
gccaagaugcugcccacagaca

SEQ ID NO: 9929 - RNA, 22 nt, Homo sapiens
uguguaaauacaagugcuugaa

SEQ ID NO: 9930 - RNA, 22 nt, Homo sapiens
uucaggcuccugugagaaucua

SEQ ID NO: 9931 - RNA, 22 nt, Homo sapiens
aacaguaucuaacgagugauga

SEQ ID NO: 9932 - RNA, 23 nt, Homo sapiens
ggauucaucuguuuguucgcugu

SEQ ID NO: 9933 - RNA, 18 nt, Homo sapiens
agaugguguugcuucugu

SEQ ID NO: 9934 - RNA, 22 nt, Homo sapiens
augcauggagucuuucacaagu

SEQ ID NO: 9935 - RNA, 22 nt, Homo sapiens
caucccugucgucaagucucug

SEQ ID NO: 9936 - RNA, 22 nt, Homo sapiens
gauggaauuaaaaucagaauca

SEQ ID NO: 9937 - RNA, 22 nt, Homo sapiens
uccuugagccucccagacucag

SEQ ID NO: 9938 - RNA, 22 nt, Homo sapiens
uuugggaaugguuugucuccca

SEQ ID NO: 9939 - RNA, 22 nt, Homo sapiens
guaacuggccuucaauuucuuc

SEQ ID NO: 9940 - RNA, 22 nt, Homo sapiens
uuuguccccgcccagaucucau

SEQ ID NO: 9941 - RNA, 22 nt, Homo sapiens
ugaauagacagucacugccucc

SEQ ID NO: 9942 - RNA, 22 nt, Homo sapiens
aucagugagugguuagugaaug

SEQ ID NO: 9943 - RNA, 19 nt, Homo sapiens
aagugaaugcuuuguucac

SEQ ID NO: 9944 - RNA, 22 nt, Homo sapiens
uucaucagcuguagaugucaug

SEQ ID NO: 9945 - RNA, 22 nt, Homo sapiens
uagagauccuucacuaggggca

SEQ ID NO: 9946 - RNA, 22 nt, Homo sapiens
cucuuacaguguguggugaaag

SEQ ID NO: 9947 - RNA, 22 nt, Homo sapiens
uuaaaagcuaucuccaagguca

SEQ ID NO: 9948 - RNA, 22 nt, Homo sapiens
aggcuagaaucuuccaucuugg

SEQ ID NO: 9949 - RNA, 21 nt, Homo sapiens
caucaaauugucauggugggu

SEQ ID NO: 9950 - RNA, 22 nt, Homo sapiens
ugugaucaugguauuaaucugc

SEQ ID NO: 9951 - RNA, 22 nt, Homo sapiens
uuggcuucuggacuauugugca

SEQ ID NO: 9952 - RNA, 22 nt, Homo sapiens
ugaggaguguauuucauucgcu

SEQ ID NO: 9953 - RNA, 22 nt, Homo sapiens
gagauguaagaauuuauuuguu

SEQ ID NO: 9954 - RNA, 22 nt, Homo sapiens
gccauugcacuccagccugagc

SEQ ID NO: 9955 - RNA, 17 nt, Homo sapiens
cccuaguagcugggacu

SEQ ID NO: 9956 - RNA, 22 nt, Homo sapiens
uuagagguaggauuucaccaug

SEQ ID NO: 9957 - RNA, 22 nt, Homo sapiens
ucugccaaccacaaaauuuauu

SEQ ID NO: 9958 - RNA, 22 nt, Homo sapiens
gucacggaauguaaguggaagu

SEQ ID NO: 9959 - RNA, 22 nt, Homo sapiens
auggagugagaauggagguucc

SEQ ID NO: 9960 - RNA, 22 nt, Homo sapiens
ugugaucaaccugcagggcugg

SEQ ID NO: 9961 - RNA, 22 nt, Homo sapiens
auaccuuguagugcuauuugau

SEQ ID NO: 9962 - RNA, 22 nt, Homo sapiens
cuguucaggaggcauuuggugg

SEQ ID NO: 9963 - RNA, 22 nt, Homo sapiens
gauggaguugacuaagacaaca

SEQ ID NO: 9964 - RNA, 22 nt, Homo sapiens
auaaauucauuuaagcuccuua

SEQ ID NO: 9965 - RNA, 22 nt, Homo sapiens
aguggcaaugugauguccugaa

SEQ ID NO: 9966 - RNA, 22 nt, Homo sapiens
cuauauacugccugcugauuag

SEQ ID NO: 9967 - RNA, 22 nt, Homo sapiens
gucauugcuuaucugcugacgu

SEQ ID NO: 9968 - RNA, 22 nt, Homo sapiens
uuugacuagaguguuuuacaac

SEQ ID NO: 9969 - RNA, 22 nt, Homo sapiens
ugugcacauugugcagguugau

SEQ ID NO: 9970 - RNA, 22 nt, Homo sapiens
agcuugugcuguaugaagggcc

SEQ ID NO: 9971 - RNA, 22 nt, Homo sapiens
cauggcucuuugcugcuaaagu

SEQ ID NO: 9972 - RNA, 22 nt, Homo sapiens
cuaagauugucuuaguguguug

SEQ ID NO: 9973 - RNA, 22 nt, Homo sapiens
augagcacuuguuuugggcaca

SEQ ID NO: 9974 - RNA, 22 nt, Homo sapiens
uugauagacacauauccaugug

SEQ ID NO: 9975 - RNA, 22 nt, Homo sapiens
ucccuuagccaaauccccagcc

SEQ ID NO: 9976 - RNA, 22 nt, Homo sapiens
agacacugaaauguauugaaga

SEQ ID NO: 9977 - RNA, 22 nt, Homo sapiens
uaauaguuggcacuggagaaag

SEQ ID NO: 9978 - RNA, 22 nt, Homo sapiens
guaacagucucaacaguggucu

SEQ ID NO: 9979 - RNA, 22 nt, Homo sapiens
uugugaauggugccgcaauaaa

SEQ ID NO: 9980 - RNA, 22 nt, Homo sapiens
gaugauguugaauguucucacc

SEQ ID NO: 9981 - RNA, 22 nt, Homo sapiens
ugagacaaucucaucucaguga

SEQ ID NO: 9982 - RNA, 16 nt, Homo sapiens
uuugcaagaucagaag

SEQ ID NO: 9983 - RNA, 22 nt, Homo sapiens
acccaguguucaacauucacau

SEQ ID NO: 9984 - RNA, 22 nt, Homo sapiens
guggcagugugaggauccugcu

SEQ ID NO: 9985 - RNA, 22 nt, Homo sapiens
cagagugcauguuuagaugagu

SEQ ID NO: 9986 - RNA, 22 nt, Homo sapiens
aauaagcauaguaccugauagg

SEQ ID NO: 9987 - RNA, 19 nt, Homo sapiens
uugcauauguugaaccagc

SEQ ID NO: 9988 - RNA, 22 nt, Homo sapiens
caaaggcuuccacugcauccuu

SEQ ID NO: 9989 - RNA, 22 nt, Homo sapiens
ugagcugagacaauaaguuuuu

SEQ ID NO: 9990 - RNA, 22 nt, Homo sapiens
uuaaagugcuguuuuugccggg

SEQ ID NO: 9991 - RNA, 22 nt, Homo sapiens
aaaugcaugaauaagcucgugu

SEQ ID NO: 9992 - RNA, 22 nt, Homo sapiens
gugagcauuacucaugggauca

SEQ ID NO: 9993 - RNA, 22 nt, Homo sapiens
uggaaauaaaugugccaagauc

SEQ ID NO: 9994 - RNA, 22 nt, Homo sapiens
ggugaggaaaguugaguuucua

SEQ ID NO: 9995 - RNA, 22 nt, Homo sapiens
uagcaguauaugagagcuauug

SEQ ID NO: 9996 - RNA, 22 nt, Homo sapiens
uugcauguacguacagagagag

SEQ ID NO: 9997 - RNA, 22 nt, Homo sapiens
uggucaaaugccaaucuguagu

SEQ ID NO: 9998 - RNA, 22 nt, Homo sapiens
cugugcauucuuaaaucaggaa

SEQ ID NO: 9999 - RNA, 22 nt, Homo sapiens
auauuagguuggugcaaaagua

SEQ ID NO: 10000 - RNA, 22 nt, Homo sapiens
gugauauguuaggaucuaaguc

SEQ ID NO: 10001 - RNA, 22 nt, Homo sapiens
uguauguuuaaggccaguggaa

SEQ ID NO: 10002 - RNA, 22 nt, Homo sapiens
ccagaauucucauuggaaggaa

SEQ ID NO: 10003 - RNA, 20 nt, Homo sapiens
auaaauguauagguguacau

SEQ ID NO: 10004 - RNA, 22 nt, Homo sapiens
aguggaaucuguuauacuaacu

SEQ ID NO: 10005 - RNA, 22 nt, Homo sapiens
ucauggggugagcuacaggcac

SEQ ID NO: 10006 - RNA, 22 nt, Homo sapiens
cuaaagugcuuaaaaucucauu

SEQ ID NO: 10007 - RNA, 22 nt, Homo sapiens
cugagcuaugccuggaaaggca

SEQ ID NO: 10008 - RNA, 22 nt, Homo sapiens
uggaagcauagcagcgugugug

SEQ ID NO: 10009 - RNA, 22 nt, Homo sapiens
uacagguaugugucuauauaca

SEQ ID NO: 10010 - RNA, 22 nt, Homo sapiens
aggagguagucugucccuuagc

SEQ ID NO: 10011 - RNA, 22 nt, Homo sapiens
aguggauuuuagacugagauuu

SEQ ID NO: 10012 - RNA, 22 nt, Homo sapiens
ccuucacaggcacugguucaga

SEQ ID NO: 10013 - RNA, 22 nt, Homo sapiens
acagguacaagggauuaggaug

SEQ ID NO: 10014 - RNA, 22 nt, Homo sapiens
gaggacauuaugcuaaguggaa

SEQ ID NO: 10015 - RNA, 22 nt, Homo sapiens
gcaggcaugacauuucacucuu

SEQ ID NO: 10016 - RNA, 22 nt, Homo sapiens
ggguucccugaugagaguuagu

SEQ ID NO: 10017 - RNA, 22 nt, Homo sapiens
uaucacuauucauccuagcucc

SEQ ID NO: 10018 - RNA, 22 nt, Homo sapiens
uuggagagucacuaguuagugc

SEQ ID NO: 10019 - RNA, 22 nt, Homo sapiens
uucuguguuuaggucacggcua

SEQ ID NO: 10020 - RNA, 21 nt, Homo sapiens
uaucucaguuuuccuuugugg

SEQ ID NO: 10021 - RNA, 22 nt, Homo sapiens
uccacaguaaggacccugccuu

SEQ ID NO: 10022 - RNA, 22 nt, Homo sapiens
aaggugcucucuuauguagaaa

SEQ ID NO: 10023 - RNA, 22 nt, Homo sapiens
uucuggcucaggucaacacuuc

SEQ ID NO: 10024 - RNA, 22 nt, Homo sapiens
cugagcaucauggcagaaucuu

SEQ ID NO: 10025 - RNA, 22 nt, Homo sapiens
uuugaugcaucucuacuuuguu

SEQ ID NO: 10026 - RNA, 22 nt, Homo sapiens
gcagcacaugacuguauguaua

SEQ ID NO: 10027 - RNA, 22 nt, Homo sapiens
gcaguguucugggcaggaagaa

SEQ ID NO: 10028 - RNA, 22 nt, Homo sapiens
ggagagcuaggcagagguuugu

SEQ ID NO: 10029 - RNA, 17 nt, Homo sapiens
auguaauccucaucucu

SEQ ID NO: 10030 - RNA, 22 nt, Homo sapiens
auacugcacauuuagggaggga

SEQ ID NO: 10031 - RNA, 22 nt, Homo sapiens
auugcacuccagccucggugac

SEQ ID NO: 10032 - RNA, 22 nt, Homo sapiens
uaugcacaugcaugcuugaaua

SEQ ID NO: 10033 - RNA, 22 nt, Homo sapiens
aaggagcuaagagaucauacau

SEQ ID NO: 10034 - RNA, 22 nt, Homo sapiens
uggcaguuuuaugugguucaac

SEQ ID NO: 10035 - RNA, 22 nt, Homo sapiens
auucaagucaucucuccgcauu

SEQ ID NO: 10036 - RNA, 22 nt, Homo sapiens
guacugagagacaguuacuguu

SEQ ID NO: 10037 - RNA, 22 nt, Homo sapiens
guggcagaaaagagaagcaaug

SEQ ID NO: 10038 - RNA, 22 nt, Homo sapiens
uguaauguuucaucauuauuaa

SEQ ID NO: 10039 - RNA, 22 nt, Homo sapiens
uuuaucuguuuaaaacuguuca

SEQ ID NO: 10040 - RNA, 18 nt, Homo sapiens
cuggaaggcuacuacagu

SEQ ID NO: 10041 - RNA, 22 nt, Homo sapiens
ucagagucuagaucacucacug

SEQ ID NO: 10042 - RNA, 22 nt, Homo sapiens
gugagguguuaaccaaccugug

SEQ ID NO: 10043 - RNA, 21 nt, Homo sapiens
caucacauuacucaaaguccu

SEQ ID NO: 10044 - RNA, 22 nt, Homo sapiens
uugagggagccuguuagucccg

SEQ ID NO: 10045 - RNA, 22 nt, Homo sapiens
gccauugcacuccgcccugggc

SEQ ID NO: 10046 - RNA, 22 nt, Homo sapiens
ucaggcacuaguaagaaaaagg

SEQ ID NO: 10047 - RNA, 22 nt, Homo sapiens
gucagugauugauuuaaagacg

SEQ ID NO: 10048 - RNA, 22 nt, Homo sapiens
uuaugcagcaaagugcuugaaa

SEQ ID NO: 10049 - RNA, 22 nt, Homo sapiens
guacaguggguguagggaccag

SEQ ID NO: 10050 - RNA, 22 nt, Homo sapiens
uucgagagaaaaggcauauaug

SEQ ID NO: 10051 - RNA, 22 nt, Homo sapiens
guggaaaacauaugcuuguuga

SEQ ID NO: 10052 - RNA, 22 nt, Homo sapiens
cugggcaaugcggcuggauaga

SEQ ID NO: 10053 - RNA, 22 nt, Homo sapiens
aaaguggugggauuccaggcau

SEQ ID NO: 10054 - RNA, 22 nt, Homo sapiens
auggccgggugcgguggcucac

SEQ ID NO: 10055 - RNA, 22 nt, Homo sapiens
ugugucuuguuuauagcuuucu

SEQ ID NO: 10056 - RNA, 22 nt, Homo sapiens
uuauauguuucuguuuggaggc

SEQ ID NO: 10057 - RNA, 22 nt, Homo sapiens
uaggucaguuuuggcuuggcuu

SEQ ID NO: 10058 - RNA, 22 nt, Homo sapiens
gcugcuguuauucaucagaacu

SEQ ID NO: 10059 - RNA, 22 nt, Homo sapiens
ugagacugaguuuugcucguug

SEQ ID NO: 10060 - RNA, 22 nt, Homo sapiens
auauucacagguaucagagauu

SEQ ID NO: 10061 - RNA, 22 nt, Homo sapiens
uuaaucaggccguuuccuaaga

SEQ ID NO: 10062 - RNA, 22 nt, Homo sapiens
uccugcauucugaaauacaagu

SEQ ID NO: 10063 - RNA, 22 nt, Homo sapiens
ugagccaaguucacaccauugc

SEQ ID NO: 10064 - RNA, 22 nt, Homo sapiens
ucacacgugaacucaucacaga

SEQ ID NO: 10065 - RNA, 22 nt, Homo sapiens
aucaaguacuguacugaaagug

SEQ ID NO: 10066 - RNA, 20 nt, Homo sapiens
cuuuguccuccugcugugcu

SEQ ID NO: 10067 - RNA, 22 nt, Homo sapiens
ucugacacagugauuaguaaau

SEQ ID NO: 10068 - RNA, 22 nt, Homo sapiens
agcuacguuggggaaguucuca

SEQ ID NO: 10069 - RNA, 22 nt, Homo sapiens
gagcucauuaaaguaggaccua

SEQ ID NO: 10070 - RNA, 22 nt, Homo sapiens
uggauguauacaugcaggucac

SEQ ID NO: 10071 - RNA, 19 nt, Homo sapiens
cuuaggugaccaguuccca

SEQ ID NO: 10072 - RNA, 21 nt, Homo sapiens
uagcuacacugugauucaugg

SEQ ID NO: 10073 - RNA, 23 nt, Homo sapiens
gcagucauuuggaaaagguugaa

SEQ ID NO: 10074 - RNA, 21 nt, Homo sapiens
uauaccuagaagagggauugc

SEQ ID NO: 10075 - RNA, 22 nt, Homo sapiens
ugaaauuuuuuauucguuggcu

SEQ ID NO: 10076 - RNA, 22 nt, Homo sapiens
guugccuaggcuggucuugaac

SEQ ID NO: 10077 - RNA, 22 nt, Homo sapiens
guggcuuguaggggucaaggga

SEQ ID NO: 10078 - RNA, 20 nt, Homo sapiens
uggagugcuguguugagaag

SEQ ID NO: 10079 - RNA, 22 nt, Homo sapiens
caugugcaugcuuucuuaugug

SEQ ID NO: 10080 - RNA, 22 nt, Homo sapiens
gaggguguuguguugcuuaaua

SEQ ID NO: 10081 - RNA, 22 nt, Homo sapiens
gcagcacauggcagaacauauu

SEQ ID NO: 10082 - RNA, 22 nt, Homo sapiens
agugcacuccagccugggcaac

SEQ ID NO: 10083 - RNA, 22 nt, Homo sapiens
agucaagaaucucagcaucuuu

SEQ ID NO: 10084 - RNA, 22 nt, Homo sapiens
ucuagaugaaguauaaaguagu

SEQ ID NO: 10085 - RNA, 22 nt, Homo sapiens
acuggguuaauuugaagguuga

SEQ ID NO: 10086 - RNA, 22 nt, Homo sapiens
cuagaauguauaaaaccaagcu

SEQ ID NO: 10087 - RNA, 22 nt, Homo sapiens
auuggcagaaaucuuuauagua

SEQ ID NO: 10088 - RNA, 22 nt, Homo sapiens
agcuguuuuugugggcauguga

SEQ ID NO: 10089 - RNA, 22 nt, Homo sapiens
cucagucuaugauacuuugcua

SEQ ID NO: 10090 - RNA, 22 nt, Homo sapiens
caagaggcuguguauaaagcca

SEQ ID NO: 10091 - RNA, 22 nt, Homo sapiens
cucacuggguguaaaacaugua

SEQ ID NO: 10092 - RNA, 22 nt, Homo sapiens
agguagcauagcgggaauauca

SEQ ID NO: 10093 - RNA, 22 nt, Homo sapiens
uggcgagaaucacauucuaauu

SEQ ID NO: 10094 - RNA, 21 nt, Homo sapiens
auauuacuguuagaggacugc

SEQ ID NO: 10095 - RNA, 22 nt, Homo sapiens
uaacugcaaccuccgccucccg

SEQ ID NO: 10096 - RNA, 22 nt, Homo sapiens
ucuuugauuuuguuacuaagac

SEQ ID NO: 10097 - RNA, 22 nt, Homo sapiens
cucagcuacuugagaggcuuag

SEQ ID NO: 10098 - RNA, 15 nt, Homo sapiens
augaguuuuauggag

SEQ ID NO: 10099 - RNA, 22 nt, Homo sapiens
auaugucuuaguuaccuugggc

SEQ ID NO: 10100 - RNA, 19 nt, Homo sapiens
ucuuugguacgugcuuuga

SEQ ID NO: 10101 - RNA, 21 nt, Homo sapiens
gagcacauuguccucuaacgc

SEQ ID NO: 10102 - RNA, 22 nt, Homo sapiens
uguuaagaugucaauuuuccac

SEQ ID NO: 10103 - RNA, 22 nt, Homo sapiens
gugaagaugugcaucagaucca

SEQ ID NO: 10104 - RNA, 22 nt, Homo sapiens
auagcagugucccacuccuugg

SEQ ID NO: 10105 - RNA, 22 nt, Homo sapiens
uagagcaaugacucuggaaacc

SEQ ID NO: 10106 - RNA, 22 nt, Homo sapiens
ucuggccuagaacaauuaauua

SEQ ID NO: 10107 - RNA, 22 nt, Homo sapiens
gaaauguauuaaugaguugaaa

SEQ ID NO: 10108 - RNA, 22 nt, Homo sapiens
ccaguuuuuggcaaugaugaau

SEQ ID NO: 10109 - RNA, 22 nt, Homo sapiens
ucuugucacugcauccccagcu

SEQ ID NO: 10110 - RNA, 22 nt, Homo sapiens
ggcaaagagacaugcaucgggg

SEQ ID NO: 10111 - RNA, 22 nt, Homo sapiens
augcuacauucuacaauuaggc

SEQ ID NO: 10112 - RNA, 22 nt, Homo sapiens
cugaaggcagguagaauagaga

SEQ ID NO: 10113 - RNA, 20 nt, Homo sapiens
uguaacacauggagaacucu

SEQ ID NO: 10114 - RNA, 22 nt, Homo sapiens
uagguagcuuuggcguuucuug

SEQ ID NO: 10115 - RNA, 22 nt, Homo sapiens
uauggccuuuuuaaugauauug

SEQ ID NO: 10116 - RNA, 22 nt, Homo sapiens
agcugguuuaauaugcugucug

SEQ ID NO: 10117 - RNA, 22 nt, Homo sapiens
cagcucuuguuaaaacuaacua

SEQ ID NO: 10118 - RNA, 22 nt, Homo sapiens
uccaguacaggucucucauuuc

SEQ ID NO: 10119 - RNA, 22 nt, Homo sapiens
gucaugggguacuacacauggg

SEQ ID NO: 10120 - RNA, 22 nt, Homo sapiens
gugaggucagggcuguggacag

SEQ ID NO: 10121 - RNA, 22 nt, Homo sapiens
aacagaauccucuuuuccuggg

SEQ ID NO: 10122 - RNA, 22 nt, Homo sapiens
aggcaacgcuucuuucucaggu

SEQ ID NO: 10123 - RNA, 22 nt, Homo sapiens
uugggacccuguccuguaacaa

SEQ ID NO: 10124 - RNA, 22 nt, Homo sapiens
gccauugcacuccagccuagcg

SEQ ID NO: 10125 - RNA, 22 nt, Homo sapiens
uauggccccuacaugugcaaaa

SEQ ID NO: 10126 - RNA, 22 nt, Homo sapiens
uugugcuugcuguguucuaugc

SEQ ID NO: 10127 - RNA, 22 nt, Homo sapiens
uagguuaugauccaucuuggcu

SEQ ID NO: 10128 - RNA, 22 nt, Homo sapiens
ucauauugcgguucauugacuu

SEQ ID NO: 10129 - RNA, 22 nt, Homo sapiens
gagguaagaugauucguguccu

SEQ ID NO: 10130 - RNA, 22 nt, Homo sapiens
uugguauguaauuuauauugua

SEQ ID NO: 10131 - RNA, 22 nt, Homo sapiens
uggaagaugggaccucaguuuu

SEQ ID NO: 10132 - RNA, 22 nt, Homo sapiens
gauaucuuuuguauggugagcu

SEQ ID NO: 10133 - RNA, 22 nt, Homo sapiens
uaaaugacugucaguagaugaa

SEQ ID NO: 10134 - RNA, 22 nt, Homo sapiens
uguauauguuuguacauauguc

SEQ ID NO: 10135 - RNA, 22 nt, Homo sapiens
ugaguucuuccuaucucugccu

SEQ ID NO: 10136 - RNA, 22 nt, Homo sapiens
ucugugguucaggcuggagugc

SEQ ID NO: 10137 - RNA, 22 nt, Homo sapiens
ugacuaguuugaggacauuaua

SEQ ID NO: 10138 - RNA, 22 nt, Homo sapiens
auaauaguguuuagauuuggga

SEQ ID NO: 10139 - RNA, 22 nt, Homo sapiens
guugggcccauagacugccagu

SEQ ID NO: 10140 - RNA, 21 nt, Homo sapiens
agcagaguggcagcucuuuug

SEQ ID NO: 10141 - RNA, 18 nt, Homo sapiens
uugcaaauucuucccugu

SEQ ID NO: 10142 - RNA, 22 nt, Homo sapiens
uagcacuauuuuucacuauccu

SEQ ID NO: 10143 - RNA, 22 nt, Homo sapiens
augaggaaggagccuuugucug

SEQ ID NO: 10144 - RNA, 22 nt, Homo sapiens
cagcaucauucaucugggguaa

SEQ ID NO: 10145 - RNA, 22 nt, Homo sapiens
uugaucuaugugucuguuuuua

SEQ ID NO: 10146 - RNA, 22 nt, Homo sapiens
aucaagcuacacccuuuggaaa

SEQ ID NO: 10147 - RNA, 22 nt, Homo sapiens
uaaguggugcauuguuaaaugg

SEQ ID NO: 10148 - RNA, 21 nt, Homo sapiens
uaagcuaaacauucaguuaac

SEQ ID NO: 10149 - RNA, 22 nt, Homo sapiens
aaugugcuucuggcugugguca

SEQ ID NO: 10150 - RNA, 22 nt, Homo sapiens
uucaauaugucauuggcaggca

SEQ ID NO: 10151 - RNA, 22 nt, Homo sapiens
agcacagccuuguguuuucuug

SEQ ID NO: 10152 - RNA, 22 nt, Homo sapiens
uauggcuuuguuaacauuuucu

SEQ ID NO: 10153 - RNA, 22 nt, Homo sapiens
guaccugggugacaggauuauu

SEQ ID NO: 10154 - RNA, 22 nt, Homo sapiens
gugagauacuagagauauagug

SEQ ID NO: 10155 - RNA, 22 nt, Homo sapiens
uccauagacauuuuaagguagu

SEQ ID NO: 10156 - RNA, 22 nt, Homo sapiens
cugucucagccucuccaguagc

SEQ ID NO: 10157 - RNA, 22 nt, Homo sapiens
uugcacauugauuuuguaucuu

SEQ ID NO: 10158 - RNA, 22 nt, Homo sapiens
uugagcccuggagguggaggcu

SEQ ID NO: 10159 - RNA, 22 nt, Homo sapiens
uagcagguguuccacaaauauu

SEQ ID NO: 10160 - RNA, 22 nt, Homo sapiens
uauggcuucuuuaaauugaggu

SEQ ID NO: 10161 - RNA, 22 nt, Homo sapiens
aaugguuuuaucagcguccaaa

SEQ ID NO: 10162 - RNA, 22 nt, Homo sapiens
ugggcaaauugugagggaggua

SEQ ID NO: 10163 - RNA, 22 nt, Homo sapiens
uuaagggaggagcuucaagaug

SEQ ID NO: 10164 - RNA, 22 nt, Homo sapiens
ucugccuacugguuggaggaac

SEQ ID NO: 10165 - RNA, 22 nt, Homo sapiens
uaggugaauguaguaagguguu

SEQ ID NO: 10166 - RNA, 22 nt, Homo sapiens
uugagauggaguuucaauauug

SEQ ID NO: 10167 - RNA, 22 nt, Homo sapiens
uguaguuugaaagcucccucug

SEQ ID NO: 10168 - RNA, 23 nt, Homo sapiens
cagcuucauugaacauaacuccu

SEQ ID NO: 10169 - RNA, 18 nt, Homo sapiens
ucacauggccgagagaga

SEQ ID NO: 10170 - RNA, 22 nt, Homo sapiens
ugaacugagacuagacuuguuc

SEQ ID NO: 10171 - RNA, 22 nt, Homo sapiens
ugugccacuccaaccuggguga

SEQ ID NO: 10172 - RNA, 22 nt, Homo sapiens
gcuuggugugcaagugguacua

SEQ ID NO: 10173 - RNA, 22 nt, Homo sapiens
aagcacccuuugucuggacaug

SEQ ID NO: 10174 - RNA, 22 nt, Homo sapiens
uggcaaguuucaauccgaggga

SEQ ID NO: 10175 - RNA, 22 nt, Homo sapiens
gcuggauguuucaauacaaaua

SEQ ID NO: 10176 - RNA, 22 nt, Homo sapiens
aaauugcaguuaggaugauggu

SEQ ID NO: 10177 - RNA, 22 nt, Homo sapiens
ugaccacugucuaagauaggug

SEQ ID NO: 10178 - RNA, 22 nt, Homo sapiens
ugagcagugaguguggugcagg

SEQ ID NO: 10179 - RNA, 22 nt, Homo sapiens
gccaguauuuuauugagaauuu

SEQ ID NO: 10180 - RNA, 22 nt, Homo sapiens
ucccuguguuccuuuugaauug

SEQ ID NO: 10181 - RNA, 22 nt, Homo sapiens
gugaucuuucaggcuugaccau

SEQ ID NO: 10182 - RNA, 22 nt, Homo sapiens
gaugacacugggucaaaucuca

SEQ ID NO: 10183 - RNA, 21 nt, Homo sapiens
ucacagccuaggaccugaaga

SEQ ID NO: 10184 - RNA, 21 nt, Homo sapiens
aggcaagauuacuuacgagca

SEQ ID NO: 10185 - RNA, 19 nt, Homo sapiens
cugcacugagaaaaggagg

SEQ ID NO: 10186 - RNA, 20 nt, Homo sapiens
uuggcauuuagacaagaguu

SEQ ID NO: 10187 - RNA, 22 nt, Homo sapiens
ucauucauuugcucacuccaca

SEQ ID NO: 10188 - RNA, 22 nt, Homo sapiens
gauauuacuuccaauauugcaa

SEQ ID NO: 10189 - RNA, 22 nt, Homo sapiens
ucugacucuggagucucagguu

SEQ ID NO: 10190 - RNA, 22 nt, Homo sapiens
aguacaucuggcuggauagaua

SEQ ID NO: 10191 - RNA, 22 nt, Homo sapiens
uggagagcaaagaauuuguuag

SEQ ID NO: 10192 - RNA, 19 nt, Homo sapiens
uagcacagggucccagacu

SEQ ID NO: 10193 - RNA, 22 nt, Homo sapiens
ucugugaaaucauuuccuguaa

SEQ ID NO: 10194 - RNA, 22 nt, Homo sapiens
agcaccagaaucugaguuauuc

SEQ ID NO: 10195 - RNA, 22 nt, Homo sapiens
ugauauguaacuacuccuuaua

SEQ ID NO: 10196 - RNA, 22 nt, Homo sapiens
ugcaguuuaggaacugguaaca

SEQ ID NO: 10197 - RNA, 22 nt, Homo sapiens
aagcaggugaugagugggugug

SEQ ID NO: 10198 - RNA, 22 nt, Homo sapiens
cuccauuuaucugaaauuuuau

SEQ ID NO: 10199 - RNA, 22 nt, Homo sapiens
aagauauguuaguuauaaacuc

SEQ ID NO: 10200 - RNA, 22 nt, Homo sapiens
uggcaagaacgaaauguagggu

SEQ ID NO: 10201 - RNA, 22 nt, Homo sapiens
uuaauguaucuaucacaucaca

SEQ ID NO: 10202 - RNA, 22 nt, Homo sapiens
cagggcauuggcugguaccugg

SEQ ID NO: 10203 - RNA, 22 nt, Homo sapiens
uucucacaguacagggagcucu

SEQ ID NO: 10204 - RNA, 22 nt, Homo sapiens
ccauacugucaaauagauuucc

SEQ ID NO: 10205 - RNA, 22 nt, Homo sapiens
cugugccaagcuugcgaugugc

SEQ ID NO: 10206 - RNA, 22 nt, Homo sapiens
uugagauggagucucacucuug

SEQ ID NO: 10207 - RNA, 22 nt, Homo sapiens
cugcuauauugguucaggcuug

SEQ ID NO: 10208 - RNA, 22 nt, Homo sapiens
uugagauggaguuucacucucg

SEQ ID NO: 10209 - RNA, 22 nt, Homo sapiens
uuuccuguagggggcaaggccu

SEQ ID NO: 10210 - RNA, 23 nt, Homo sapiens
uaccacauuccuucuuuccuguu

SEQ ID NO: 10211 - RNA, 22 nt, Homo sapiens
guccaguuguuuucugagguug

SEQ ID NO: 10212 - RNA, 21 nt, Homo sapiens
ugcccaguggcuuggggucag

SEQ ID NO: 10213 - RNA, 22 nt, Homo sapiens
cuauuugcauucagaggcaugu

SEQ ID NO: 10214 - RNA, 22 nt, Homo sapiens
gagguguagucaugccaagauc

SEQ ID NO: 10215 - RNA, 22 nt, Homo sapiens
uucaucuggcaauucagagauu

SEQ ID NO: 10216 - RNA, 22 nt, Homo sapiens
gugcacaacaugcaguuuuguu

SEQ ID NO: 10217 - RNA, 22 nt, Homo sapiens
aucucaguucaggcuggccaca

SEQ ID NO: 10218 - RNA, 22 nt, Homo sapiens
uuguaaagaucauaugcuguuc

SEQ ID NO: 10219 - RNA, 22 nt, Homo sapiens
ugaaagacacagaaguugccca

SEQ ID NO: 10220 - RNA, 22 nt, Homo sapiens
uuaacacugccauugauacugu

SEQ ID NO: 10221 - RNA, 22 nt, Homo sapiens
aaucaacauuguuuuaagucaa

SEQ ID NO: 10222 - RNA, 22 nt, Homo sapiens
uuggcuuaguugaccacagucu

SEQ ID NO: 10223 - RNA, 22 nt, Homo sapiens
uugugcaaaguugugguuucug

SEQ ID NO: 10224 - RNA, 22 nt, Homo sapiens
uguucuggagaggcaggccaca

SEQ ID NO: 10225 - RNA, 18 nt, Homo sapiens
aauggcucuggguucuaa

SEQ ID NO: 10226 - RNA, 22 nt, Homo sapiens
cugugacugcagggcauauuug

SEQ ID NO: 10227 - RNA, 22 nt, Homo sapiens
auuaaggaguggguucauggug

SEQ ID NO: 10228 - RNA, 22 nt, Homo sapiens
uuauggcuuugcgguguuagca

SEQ ID NO: 10229 - RNA, 22 nt, Homo sapiens
auugagcacugacucugugcca

SEQ ID NO: 10230 - RNA, 22 nt, Homo sapiens
agcacagugguuaaguuucuua

SEQ ID NO: 10231 - RNA, 20 nt, Homo sapiens
ugguguuugaacagugaaug

SEQ ID NO: 10232 - RNA, 22 nt, Homo sapiens
uugggcuugagggugcccaguc

SEQ ID NO: 10233 - RNA, 22 nt, Homo sapiens
uugaggcuuuugaccucaugug

SEQ ID NO: 10234 - RNA, 19 nt, Homo sapiens
gaaguguuguccuccagua

SEQ ID NO: 10235 - RNA, 22 nt, Homo sapiens
cagugguuuuuagcuugcuggg

SEQ ID NO: 10236 - RNA, 22 nt, Homo sapiens
accuggcacuuagcaaaucuga

SEQ ID NO: 10237 - RNA, 22 nt, Homo sapiens
ugaggagugagaaauugguuuc

SEQ ID NO: 10238 - RNA, 22 nt, Homo sapiens
ucagagugcagggaguagcagc

SEQ ID NO: 10239 - RNA, 22 nt, Homo sapiens
ugauguaggcauuuaagguuau

SEQ ID NO: 10240 - RNA, 22 nt, Homo sapiens
aacuaugucaaauaaaaugagg

SEQ ID NO: 10241 - RNA, 16 nt, Homo sapiens
cacuggucuuaccaug

SEQ ID NO: 10242 - RNA, 22 nt, Homo sapiens
ucacagaggagaagaccuuuaa

SEQ ID NO: 10243 - RNA, 21 nt, Homo sapiens
uuauaguggcaugauuuauaa

SEQ ID NO: 10244 - RNA, 22 nt, Homo sapiens
gaggcaauaugagggaggcuuc

SEQ ID NO: 10245 - RNA, 22 nt, Homo sapiens
uuccucuagacugucgguuucu

SEQ ID NO: 10246 - RNA, 22 nt, Homo sapiens
ugugaagauggacuaauauagu

SEQ ID NO: 10247 - RNA, 22 nt, Homo sapiens
uucugguuaauacuugcaaaaa

SEQ ID NO: 10248 - RNA, 22 nt, Homo sapiens
uucagguucauuugcugcuauu

SEQ ID NO: 10249 - RNA, 22 nt, Homo sapiens
gaaagauuuccugagcuagaaa

SEQ ID NO: 10250 - RNA, 22 nt, Homo sapiens
auggaauguaaguuauguuugc

SEQ ID NO: 10251 - RNA, 22 nt, Homo sapiens
acugggauauuauugguaauau

SEQ ID NO: 10252 - RNA, 22 nt, Homo sapiens
guauugccugugugccagccac

SEQ ID NO: 10253 - RNA, 22 nt, Homo sapiens
uuauuacuccuauuuuguagau

SEQ ID NO: 10254 - RNA, 22 nt, Homo sapiens
ugagacauauuauacugcuuuu

SEQ ID NO: 10255 - RNA, 22 nt, Homo sapiens
uuugcagagacuuguuaggaau

SEQ ID NO: 10256 - RNA, 22 nt, Homo sapiens
uagcagcaaagcaggaucugcu

SEQ ID NO: 10257 - RNA, 22 nt, Homo sapiens
auagcccuuuucuaacuaugug

SEQ ID NO: 10258 - RNA, 22 nt, Homo sapiens
caucacagcaaguagggagugg

SEQ ID NO: 10259 - RNA, 22 nt, Homo sapiens
uguccaaaucagagguaccaaa

SEQ ID NO: 10260 - RNA, 22 nt, Homo sapiens
uucuuugcuuggaagcggggga

SEQ ID NO: 10261 - RNA, 22 nt, Homo sapiens
auggaaugguugggucauaagg

SEQ ID NO: 10262 - RNA, 23 nt, Homo sapiens
cuacagugccugucucuuuggcc

SEQ ID NO: 10263 - RNA, 22 nt, Homo sapiens
guguuauuuugcugggaaugau

SEQ ID NO: 10264 - RNA, 20 nt, Homo sapiens
ugagaucaggauuaaggcua

SEQ ID NO: 10265 - RNA, 22 nt, Homo sapiens
uguucacaguguuucuuugaga

SEQ ID NO: 10266 - RNA, 22 nt, Homo sapiens
guacauggaaugaaauucaaaa

SEQ ID NO: 10267 - RNA, 22 nt, Homo sapiens
gauuagucccauuuuacaggug

SEQ ID NO: 10268 - RNA, 18 nt, Homo sapiens
gauaacaguggacuaugc

SEQ ID NO: 10269 - RNA, 22 nt, Homo sapiens
gaguuagguugucaaugucuua

SEQ ID NO: 10270 - RNA, 22 nt, Homo sapiens
aaagugcugggauuggccgggc

SEQ ID NO: 10271 - RNA, 22 nt, Homo sapiens
auggcaauguaagucagaaaaa

SEQ ID NO: 10272 - RNA, 22 nt, Homo sapiens
uaaucucagcugagcugagauu

SEQ ID NO: 10273 - RNA, 22 nt, Homo sapiens
cuuuugugauucuucaguugcu

SEQ ID NO: 10274 - RNA, 22 nt, Homo sapiens
acgugguaguacaguauuuuaa

SEQ ID NO: 10275 - RNA, 22 nt, Homo sapiens
gacccucuagagggaagcgcuu

SEQ ID NO: 10276 - RNA, 22 nt, Homo sapiens
uaucacaguaucuagcacagug

SEQ ID NO: 10277 - RNA, 22 nt, Homo sapiens
uuauguaaaucaaucuggaauc

SEQ ID NO: 10278 - RNA, 22 nt, Homo sapiens
auuagguacugugguuuccaga

SEQ ID NO: 10279 - RNA, 22 nt, Homo sapiens
ucugacagugagagaaaucuga

SEQ ID NO: 10280 - RNA, 22 nt, Homo sapiens
gcaccccuuaccgggcuggguu

SEQ ID NO: 10281 - RNA, 20 nt, Homo sapiens
ugauguccaggcagagguuu

SEQ ID NO: 10282 - RNA, 19 nt, Homo sapiens
gcaucauuaguugcuuuuc

SEQ ID NO: 10283 - RNA, 22 nt, Homo sapiens
uucccagugguuagcucugguc

SEQ ID NO: 10284 - RNA, 22 nt, Homo sapiens
aguaucaucuuguuggccaggc

SEQ ID NO: 10285 - RNA, 22 nt, Homo sapiens
caaaagugguucuuauccuuuu

SEQ ID NO: 10286 - RNA, 19 nt, Homo sapiens
ugagauuguaugaggagau

SEQ ID NO: 10287 - RNA, 22 nt, Homo sapiens
ggucacccugaugcuggugguc

SEQ ID NO: 10288 - RNA, 22 nt, Homo sapiens
aauugcacuaagcauaguccag

SEQ ID NO: 10289 - RNA, 22 nt, Homo sapiens
ugaucuuuuuaauguccauggg

SEQ ID NO: 10290 - RNA, 22 nt, Homo sapiens
ggaagacaguguggugauuccu

SEQ ID NO: 10291 - RNA, 22 nt, Homo sapiens
ugucaucuagguuuuaagccuu

SEQ ID NO: 10292 - RNA, 22 nt, Homo sapiens
agaaugugaacaucuugaaagu

SEQ ID NO: 10293 - RNA, 22 nt, Homo sapiens
ugaaugcuaaaggaaaacagua

SEQ ID NO: 10294 - RNA, 22 nt, Homo sapiens
auggcacuacugggaaugucuu

SEQ ID NO: 10295 - RNA, 22 nt, Homo sapiens
uggcaguuuacaaaugccauga

SEQ ID NO: 10296 - RNA, 22 nt, Homo sapiens
uuagaugaagucacagaaccca

SEQ ID NO: 10297 - RNA, 22 nt, Homo sapiens
ucaaaugaucugcccgccuugg

SEQ ID NO: 10298 - RNA, 22 nt, Homo sapiens
gacacagugaagucucuacuug

SEQ ID NO: 10299 - RNA, 22 nt, Homo sapiens
aaagcgcuguuaagaagacuga

SEQ ID NO: 10300 - RNA, 22 nt, Homo sapiens
auauccuggagcauuuuugcaa

SEQ ID NO: 10301 - RNA, 20 nt, Homo sapiens
gugaauacauuugguuucau

SEQ ID NO: 10302 - RNA, 22 nt, Homo sapiens
ugagcugguacuaauauuauca

SEQ ID NO: 10303 - RNA, 22 nt, Homo sapiens
ggaaauguuggugucaugaguu

SEQ ID NO: 10304 - RNA, 22 nt, Homo sapiens
ccaaggcacugauucuguacuc

SEQ ID NO: 10305 - RNA, 22 nt, Homo sapiens
ugagcucaguauuucauaaaca

SEQ ID NO: 10306 - RNA, 22 nt, Homo sapiens
ggcauugugauccaccagccuu

SEQ ID NO: 10307 - RNA, 21 nt, Homo sapiens
uagaugguguucuagagagaa

SEQ ID NO: 10308 - RNA, 18 nt, Homo sapiens
cacugagcccuucacucu

SEQ ID NO: 10309 - RNA, 22 nt, Homo sapiens
uaguugcauucaggauaugacg

SEQ ID NO: 10310 - RNA, 22 nt, Homo sapiens
uaagggacgcccccuucucucu

SEQ ID NO: 10311 - RNA, 22 nt, Homo sapiens
uuggcauagaggcucucaagcu

SEQ ID NO: 10312 - RNA, 22 nt, Homo sapiens
ugauaugcuuugaacucucugg

SEQ ID NO: 10313 - RNA, 23 nt, Homo sapiens
ugacugaguauauguuuggugcu

SEQ ID NO: 10314 - RNA, 22 nt, Homo sapiens
ugcauauguugaaccagccuug

SEQ ID NO: 10315 - RNA, 22 nt, Homo sapiens
auggaaucauccuccugggagc

SEQ ID NO: 10316 - RNA, 22 nt, Homo sapiens
augaauacagcuaugcgugcau

SEQ ID NO: 10317 - RNA, 22 nt, Homo sapiens
gaagaaguacaagacaaauuuu

SEQ ID NO: 10318 - RNA, 22 nt, Homo sapiens
uuacaucaucacauuaguuugc

SEQ ID NO: 10319 - RNA, 22 nt, Homo sapiens
ucacauuaagcuguuauuucuu

SEQ ID NO: 10320 - RNA, 22 nt, Homo sapiens
ucccugagugauugaaaauaaa

SEQ ID NO: 10321 - RNA, 22 nt, Homo sapiens
ugaauacagcacacccaugggu

SEQ ID NO: 10322 - RNA, 22 nt, Homo sapiens
cacauguuuuagcauggcuguu

SEQ ID NO: 10323 - RNA, 21 nt, Homo sapiens
uacaagcuguagcacaugcca

SEQ ID NO: 10324 - RNA, 22 nt, Homo sapiens
ugugagcuauggaguuguagag

SEQ ID NO: 10325 - RNA, 22 nt, Homo sapiens
uuaauacugcuuaacuuuagga

SEQ ID NO: 10326 - RNA, 22 nt, Homo sapiens
gcuaaaucuguaaaaugaggag

SEQ ID NO: 10327 - RNA, 22 nt, Homo sapiens
aggcaggugaaagauaguuuua

SEQ ID NO: 10328 - RNA, 22 nt, Homo sapiens
agcaacauagugagacccccau

SEQ ID NO: 10329 - RNA, 22 nt, Homo sapiens
uaacucugccuagugacauggu

SEQ ID NO: 10330 - RNA, 22 nt, Homo sapiens
agugguaguacaggagauaccg

SEQ ID NO: 10331 - RNA, 19 nt, Homo sapiens
uuuuggaaaugugaacagc

SEQ ID NO: 10332 - RNA, 22 nt, Homo sapiens
cagcugaugucgaaugcacucu

SEQ ID NO: 10333 - RNA, 22 nt, Homo sapiens
uaggaaguacaucucagaaucu

SEQ ID NO: 10334 - RNA, 22 nt, Homo sapiens
ggacagaugggcucccgggucu

SEQ ID NO: 10335 - RNA, 20 nt, Homo sapiens
ugucauuaagcacugugcca

SEQ ID NO: 10336 - RNA, 22 nt, Homo sapiens
ccugagguagaguuuauauuga

SEQ ID NO: 10337 - RNA, 19 nt, Homo sapiens
uguaccagcaagucuuuuc

SEQ ID NO: 10338 - RNA, 22 nt, Homo sapiens
ugacuugaacuucuaugucacc

SEQ ID NO: 10339 - RNA, 22 nt, Homo sapiens
caggcaaggugaaguguacugg

SEQ ID NO: 10340 - RNA, 18 nt, Homo sapiens
auauugccuucagacuag

SEQ ID NO: 10341 - RNA, 17 nt, Homo sapiens
gugaaaucaucauuuuu

SEQ ID NO: 10342 - RNA, 22 nt, Homo sapiens
gugcaaaucucugaguaucuuu

SEQ ID NO: 10343 - RNA, 22 nt, Homo sapiens
ugcauguucuuacucauacaug

SEQ ID NO: 10344 - RNA, 22 nt, Homo sapiens
uacauccauccugcugggcagu

SEQ ID NO: 10345 - RNA, 22 nt, Homo sapiens
cuuagguuaugauaaauuuagu

SEQ ID NO: 10346 - RNA, 22 nt, Homo sapiens
ugcaauagcuucaggagaaggg

SEQ ID NO: 10347 - RNA, 22 nt, Homo sapiens
ugcagcacuguucacaauagcc

SEQ ID NO: 10348 - RNA, 22 nt, Homo sapiens
cacugcacuccaguuuggauga

SEQ ID NO: 10349 - RNA, 22 nt, Homo sapiens
ccugcauugucaaggccaagcc

SEQ ID NO: 10350 - RNA, 22 nt, Homo sapiens
auauugcuccuaauaccacggu

SEQ ID NO: 10351 - RNA, 22 nt, Homo sapiens
agcuugugauuuagagugagag

SEQ ID NO: 10352 - RNA, 22 nt, Homo sapiens
auacaugugccauggugguuug

SEQ ID NO: 10353 - RNA, 22 nt, Homo sapiens
ugaugcuaccuaaagcaaccau

SEQ ID NO: 10354 - RNA, 22 nt, Homo sapiens
uuggccccucccaaauuucaug

SEQ ID NO: 10355 - RNA, 22 nt, Homo sapiens
gugagcauaggaggcuucuguu

SEQ ID NO: 10356 - RNA, 22 nt, Homo sapiens
gaauagugcugcagcaaacaua

SEQ ID NO: 10357 - RNA, 19 nt, Homo sapiens
uagggcacgaggcagaguc

SEQ ID NO: 10358 - RNA, 22 nt, Homo sapiens
gcgguuuuaagugaguuucuua

SEQ ID NO: 10359 - RNA, 22 nt, Homo sapiens
uacuuagagacaugcagcacug

SEQ ID NO: 10360 - RNA, 19 nt, Homo sapiens
auagggcuagcauauacug

SEQ ID NO: 10361 - RNA, 22 nt, Homo sapiens
ucuugcuuuugcagagcuucuc

SEQ ID NO: 10362 - RNA, 22 nt, Homo sapiens
cauuugguggcuacagaguaac

SEQ ID NO: 10363 - RNA, 22 nt, Homo sapiens
uagaauguaaauuccaagggca

SEQ ID NO: 10364 - RNA, 19 nt, Homo sapiens
gcuucuugaggacgaugac

SEQ ID NO: 10365 - RNA, 22 nt, Homo sapiens
auagguaguugaggagauuuca

SEQ ID NO: 10366 - RNA, 22 nt, Homo sapiens
agugcaauggcgugaucuuggc

SEQ ID NO: 10367 - RNA, 20 nt, Homo sapiens
auucauggugguacguuguc

SEQ ID NO: 10368 - RNA, 22 nt, Homo sapiens
uauagcuagugauuguguguau

SEQ ID NO: 10369 - RNA, 22 nt, Homo sapiens
auggauauugccuaggguagua

SEQ ID NO: 10370 - RNA, 22 nt, Homo sapiens
auacgugcaggucacaggggau

SEQ ID NO: 10371 - RNA, 22 nt, Homo sapiens
cccaguagagauugccgaauug

SEQ ID NO: 10372 - RNA, 22 nt, Homo sapiens
aauuacucgugucuuuacugcu

SEQ ID NO: 10373 - RNA, 20 nt, Homo sapiens
uuuuagcuuuuauugaaagc

SEQ ID NO: 10374 - RNA, 22 nt, Homo sapiens
ucagcaucacgugggcucccgu

SEQ ID NO: 10375 - RNA, 23 nt, Homo sapiens
cuguggauaugaguuguaaaugg

SEQ ID NO: 10376 - RNA, 22 nt, Homo sapiens
ugagugugaggaagaauuagaa

SEQ ID NO: 10377 - RNA, 22 nt, Homo sapiens
acccucaagggacugacagaau

SEQ ID NO: 10378 - RNA, 22 nt, Homo sapiens
ucuuuguuggaguccaaggaua

SEQ ID NO: 10379 - RNA, 22 nt, Homo sapiens
acacagucaaauccacuuggcu

SEQ ID NO: 10380 - RNA, 22 nt, Homo sapiens
acccaguguugggcagaacugu

SEQ ID NO: 10381 - RNA, 22 nt, Homo sapiens
auguaugagaguuccagcugau

SEQ ID NO: 10382 - RNA, 22 nt, Homo sapiens
gagagcaugugcuggcaucagu

SEQ ID NO: 10383 - RNA, 21 nt, Homo sapiens
ugucuuggagccagacgccag

SEQ ID NO: 10384 - RNA, 21 nt, Homo sapiens
uugaaugguuuuccuugggag

SEQ ID NO: 10385 - RNA, 22 nt, Homo sapiens
uagacacuagauaugugacuga

SEQ ID NO: 10386 - RNA, 20 nt, Homo sapiens
uagacagcuagauuagauag

SEQ ID NO: 10387 - RNA, 22 nt, Homo sapiens
acugcacuucagccuugggaaa

SEQ ID NO: 10388 - RNA, 19 nt, Homo sapiens
cccuggcacauggaaaaug

SEQ ID NO: 10389 - RNA, 22 nt, Homo sapiens
agugguuuuaaguagagcauac

SEQ ID NO: 10390 - RNA, 22 nt, Homo sapiens
cauugcacuccagccuggcaac

SEQ ID NO: 10391 - RNA, 22 nt, Homo sapiens
uguaauguuugguagguuaggu

SEQ ID NO: 10392 - RNA, 22 nt, Homo sapiens
augauggaggccgugauggacg

SEQ ID NO: 10393 - RNA, 22 nt, Homo sapiens
auagcaauuugggaaucagacu

SEQ ID NO: 10394 - RNA, 22 nt, Homo sapiens
uauugcagugagauccaucugg

SEQ ID NO: 10395 - RNA, 21 nt, Homo sapiens
cugcauccauuucugagugau

SEQ ID NO: 10396 - RNA, 22 nt, Homo sapiens
gccaguauuuuauugaggauuu

SEQ ID NO: 10397 - RNA, 22 nt, Homo sapiens
ugugaagauguuucuuaauuga

SEQ ID NO: 10398 - RNA, 22 nt, Homo sapiens
caccaggugcccagcacggcca

SEQ ID NO: 10399 - RNA, 23 nt, Homo sapiens
acagucuaguuugaagucaggua

SEQ ID NO: 10400 - RNA, 22 nt, Homo sapiens
aagcuaguguuccagugaacag

SEQ ID NO: 10401 - RNA, 22 nt, Homo sapiens
gugcagaugucuuuauaguagc

SEQ ID NO: 10402 - RNA, 23 nt, Homo sapiens
ggcauuguggcucacaucuguaa

SEQ ID NO: 10403 - RNA, 22 nt, Homo sapiens
uuugugacuugcuucucagaau

SEQ ID NO: 10404 - RNA, 21 nt, Homo sapiens
cucucugcuuaugaauaguga

SEQ ID NO: 10405 - RNA, 22 nt, Homo sapiens
auaaagcaaauaggacuauugc

SEQ ID NO: 10406 - RNA, 22 nt, Homo sapiens
aauaugucuugaaauuggguaa

SEQ ID NO: 10407 - RNA, 22 nt, Homo sapiens
gucugugcauuaauacgugcug

SEQ ID NO: 10408 - RNA, 22 nt, Homo sapiens
acugcacuucaaccucauugac

SEQ ID NO: 10409 - RNA, 22 nt, Homo sapiens
uacaaaguaacaguuccuguau

SEQ ID NO: 10410 - RNA, 22 nt, Homo sapiens
aagugcccuauuuggcccuuga

SEQ ID NO: 10411 - RNA, 22 nt, Homo sapiens
cagccggguggcuccuagggua

SEQ ID NO: 10412 - RNA, 22 nt, Homo sapiens
acagguacacagaauauccaga

SEQ ID NO: 10413 - RNA, 22 nt, Homo sapiens
gacauguuuucauguauuugga

SEQ ID NO: 10414 - RNA, 22 nt, Homo sapiens
uagaucuuuaaaaggugcuaga

SEQ ID NO: 10415 - RNA, 22 nt, Homo sapiens
cuagcagaacaauacaauucgg

SEQ ID NO: 10416 - RNA, 19 nt, Homo sapiens
uauguaguuuucucaauau

SEQ ID NO: 10417 - RNA, 22 nt, Homo sapiens
gaguuuguacuaauuuguugua

SEQ ID NO: 10418 - RNA, 22 nt, Homo sapiens
ugugcacaaugugcagguuugu

SEQ ID NO: 10419 - RNA, 22 nt, Homo sapiens
ugugucuugaauuuuguaugua

SEQ ID NO: 10420 - RNA, 22 nt, Homo sapiens
gacauguuuuuuaagguuuaug

SEQ ID NO: 10421 - RNA, 22 nt, Homo sapiens
gucauugguucuguuuauguga

SEQ ID NO: 10422 - RNA, 22 nt, Homo sapiens
cuacaguguauuuauggagggu

SEQ ID NO: 10423 - RNA, 22 nt, Homo sapiens
ggucaagcuagauuuuaaugau

SEQ ID NO: 10424 - RNA, 21 nt, Homo sapiens
aucauaugcucacuccuagaa

SEQ ID NO: 10425 - RNA, 21 nt, Homo sapiens
ggcucuguggucucagguuuc

SEQ ID NO: 10426 - RNA, 22 nt, Homo sapiens
uaauacuguaauggugguuccg

SEQ ID NO: 10427 - RNA, 22 nt, Homo sapiens
uuaaaaguauaggccuggcaua

SEQ ID NO: 10428 - RNA, 22 nt, Homo sapiens
auagugcugugaugaacauaca

SEQ ID NO: 10429 - RNA, 22 nt, Homo sapiens
ugugucacugcacuccagcgug

SEQ ID NO: 10430 - RNA, 22 nt, Homo sapiens
ugaguagucuagaguggaaugu

SEQ ID NO: 10431 - RNA, 22 nt, Homo sapiens
aaaugcagauuccuaggcccca

SEQ ID NO: 10432 - RNA, 22 nt, Homo sapiens
cuagagagaagcugugugaccu

SEQ ID NO: 10433 - RNA, 21 nt, Homo sapiens
gugugcuugagugaugggauu

SEQ ID NO: 10434 - RNA, 22 nt, Homo sapiens
auggcucaauucuuucccugaa

SEQ ID NO: 10435 - RNA, 22 nt, Homo sapiens
augucaaggugaagaaagauca

SEQ ID NO: 10436 - RNA, 22 nt, Homo sapiens
gcaagacaugucuaagguuuaa

SEQ ID NO: 10437 - RNA, 22 nt, Homo sapiens
uuggauuuuaacaaacuaggug

SEQ ID NO: 10438 - RNA, 22 nt, Homo sapiens
auuggggaaugguggcuuuagu

SEQ ID NO: 10439 - RNA, 22 nt, Homo sapiens
uaucaacaggguggccagugua

SEQ ID NO: 10440 - RNA, 22 nt, Homo sapiens
aaaggcaucugcucggcucccu

SEQ ID NO: 10441 - RNA, 22 nt, Homo sapiens
uguuugcuguuuucuccaauga

SEQ ID NO: 10442 - RNA, 19 nt, Homo sapiens
ggaaugcuauucaaccuuu

SEQ ID NO: 10443 - RNA, 22 nt, Homo sapiens
aagcacaauuucaccuucuugu

SEQ ID NO: 10444 - RNA, 22 nt, Homo sapiens
cugagcaaagaagugauaauga

SEQ ID NO: 10445 - RNA, 18 nt, Homo sapiens
auaaacucaucauuuuua

SEQ ID NO: 10446 - RNA, 22 nt, Homo sapiens
uggaaauaaaauagaguuugcc

SEQ ID NO: 10447 - RNA, 22 nt, Homo sapiens
aaguuguaguuagagaguugcu

SEQ ID NO: 10448 - RNA, 22 nt, Homo sapiens
uccacaauggagaagaguauga

SEQ ID NO: 10449 - RNA, 16 nt, Homo sapiens
auaugacuuuaggagg

SEQ ID NO: 10450 - RNA, 22 nt, Homo sapiens
uuggcaguaucuacuacagcua

SEQ ID NO: 10451 - RNA, 22 nt, Homo sapiens
uuugugucccucuaaaauuuau

SEQ ID NO: 10452 - RNA, 22 nt, Homo sapiens
cgugaggaaaacagaggguguu

SEQ ID NO: 10453 - RNA, 20 nt, Homo sapiens
uagaaaguagaguggugguu

SEQ ID NO: 10454 - RNA, 22 nt, Homo sapiens
uugcuuuguugucuggggaaua

SEQ ID NO: 10455 - RNA, 23 nt, Homo sapiens
agcaccuuuccuccacuaucugc

SEQ ID NO: 10456 - RNA, 21 nt, Homo sapiens
ugagauaauauguuucugaug

SEQ ID NO: 10457 - RNA, 22 nt, Homo sapiens
auacaguugccauuucuugugc

SEQ ID NO: 10458 - RNA, 22 nt, Homo sapiens
ugagaugguaaauuuuuguugu

SEQ ID NO: 10459 - RNA, 22 nt, Homo sapiens
uaauucuguauguaucagaguu

SEQ ID NO: 10460 - RNA, 22 nt, Homo sapiens
auucaaggacuggauugcggga

SEQ ID NO: 10461 - RNA, 22 nt, Homo sapiens
agcugguuuauuucucacaaca

SEQ ID NO: 10462 - RNA, 22 nt, Homo sapiens
aucacagauauggguuuaaauc

SEQ ID NO: 10463 - RNA, 22 nt, Homo sapiens
cugaggauauucagccucugug

SEQ ID NO: 10464 - RNA, 22 nt, Homo sapiens
ugcgauuauuaugucacuuccu

SEQ ID NO: 10465 - RNA, 23 nt, Homo sapiens
aguacuguaguaauugaggggaa

SEQ ID NO: 10466 - RNA, 22 nt, Homo sapiens
aauugccucaagugaucauggc

SEQ ID NO: 10467 - RNA, 22 nt, Homo sapiens
gaaacugcauuucuaacaagcu

SEQ ID NO: 10468 - RNA, 22 nt, Homo sapiens
gugugcaacuuucauuaauauu

SEQ ID NO: 10469 - RNA, 22 nt, Homo sapiens
uuuauucggcuaggagcuucgg

SEQ ID NO: 10470 - RNA, 22 nt, Homo sapiens
cuauggcuguaugacgugcaug

SEQ ID NO: 10471 - RNA, 22 nt, Homo sapiens
ggcaaaaucgcaauuacuuuug

SEQ ID NO: 10472 - RNA, 22 nt, Homo sapiens
ucaucaggaaacuuaugcagug

SEQ ID NO: 10473 - RNA, 22 nt, Homo sapiens
uuaguucccucauucuugacuu

SEQ ID NO: 10474 - RNA, 22 nt, Homo sapiens
gggcaguauggucauuuucaca

SEQ ID NO: 10475 - RNA, 22 nt, Homo sapiens
agguaguguuauuugcagcuga

SEQ ID NO: 10476 - RNA, 22 nt, Homo sapiens
uggcauggaaagcuuuucauac

SEQ ID NO: 10477 - RNA, 22 nt, Homo sapiens
ugccaugaagaucccugaaaug

SEQ ID NO: 10478 - RNA, 22 nt, Homo sapiens
ggauauguagggcauaucuaca

SEQ ID NO: 10479 - RNA, 22 nt, Homo sapiens
uugcaugucauaacugauggaa

SEQ ID NO: 10480 - RNA, 22 nt, Homo sapiens
auaacucuguuuuuuucaugca

SEQ ID NO: 10481 - RNA, 22 nt, Homo sapiens
uugauauauugcaugggcuacu

SEQ ID NO: 10482 - RNA, 17 nt, Homo sapiens
guuuggguacuggguaa

SEQ ID NO: 10483 - RNA, 21 nt, Homo sapiens
ucucauagaguuucacuuucu

SEQ ID NO: 10484 - RNA, 22 nt, Homo sapiens
gugaggcuuuuccuguuagacu

SEQ ID NO: 10485 - RNA, 21 nt, Homo sapiens
ucuuggguugaauucucccag

SEQ ID NO: 10486 - RNA, 22 nt, Homo sapiens
ugagcuaggucuugcucuguca

SEQ ID NO: 10487 - RNA, 22 nt, Homo sapiens
uuaucaaacccuaggagguggu

SEQ ID NO: 10488 - RNA, 19 nt, Homo sapiens
uccccuguggauaccaaga

SEQ ID NO: 10489 - RNA, 22 nt, Homo sapiens
ucacuuuggguacuauggaaau

SEQ ID NO: 10490 - RNA, 22 nt, Homo sapiens
augcaauggaaaggacaauuac

SEQ ID NO: 10491 - RNA, 22 nt, Homo sapiens
agcagagcauauucauucgggg

SEQ ID NO: 10492 - RNA, 18 nt, Homo sapiens
ugaggaaaggguuugcua

SEQ ID NO: 10493 - RNA, 22 nt, Homo sapiens
ggugagguaguaagguacaaua

SEQ ID NO: 10494 - RNA, 22 nt, Homo sapiens
agauacaucuaugugucugugu

SEQ ID NO: 10495 - RNA, 22 nt, Homo sapiens
cugguaagaaggucuaagucaa

SEQ ID NO: 10496 - RNA, 22 nt, Homo sapiens
ucccuuucuggaguuucccaag

SEQ ID NO: 10497 - RNA, 22 nt, Homo sapiens
caagugacugagccgccucggc

SEQ ID NO: 10498 - RNA, 22 nt, Homo sapiens
gauuguguucauaggcauguua

SEQ ID NO: 10499 - RNA, 22 nt, Homo sapiens
auugcaauuaguccauagaguu

SEQ ID NO: 10500 - RNA, 21 nt, Homo sapiens
ugccuuuguaguaggugucuu

SEQ ID NO: 10501 - RNA, 22 nt, Homo sapiens
auggcuguuuuuuauguuacag

SEQ ID NO: 10502 - RNA, 22 nt, Homo sapiens
gaugccuuuuuguccucaguua

SEQ ID NO: 10503 - RNA, 22 nt, Homo sapiens
cuucacggugccuacuuguguc

SEQ ID NO: 10504 - RNA, 22 nt, Homo sapiens
gcugauguuuucagguaauucu

SEQ ID NO: 10505 - RNA, 22 nt, Homo sapiens
auguaaacuacagauuuugggu

SEQ ID NO: 10506 - RNA, 22 nt, Homo sapiens
ggacuguaauaccaugaggaca

SEQ ID NO: 10507 - RNA, 22 nt, Homo sapiens
auggagaugaacuuggguaaag

SEQ ID NO: 10508 - RNA, 22 nt, Homo sapiens
auuccacaguuaacacagaccg

SEQ ID NO: 10509 - RNA, 18 nt, Homo sapiens
ucaagcaauugucaugcc

SEQ ID NO: 10510 - RNA, 22 nt, Homo sapiens
uuuuggcuagaaauauaccucc

SEQ ID NO: 10511 - RNA, 20 nt, Homo sapiens
acacuggaguaucaaggccc

SEQ ID NO: 10512 - RNA, 22 nt, Homo sapiens
aaguaguuaggaacauucucuc

SEQ ID NO: 10513 - RNA, 22 nt, Homo sapiens
cgccugagcugaggaagcugca

SEQ ID NO: 10514 - RNA, 21 nt, Homo sapiens
auaugugcuguggaagucagc

SEQ ID NO: 10515 - RNA, 22 nt, Homo sapiens
guguggaacucaauacaacgca

SEQ ID NO: 10516 - RNA, 22 nt, Homo sapiens
uuagaguacaggggaaucaagg

SEQ ID NO: 10517 - RNA, 22 nt, Homo sapiens
ccugagacgaauggagugaaca

SEQ ID NO: 10518 - RNA, 22 nt, Homo sapiens
uugaaagcuaucucaaaucgcu

SEQ ID NO: 10519 - RNA, 19 nt, Homo sapiens
ugugaacaucacagagugu

SEQ ID NO: 10520 - RNA, 22 nt, Homo sapiens
uagcagguggugaccacauuuu

SEQ ID NO: 10521 - RNA, 22 nt, Homo sapiens
gacauagcuagauaaccucaug

SEQ ID NO: 10522 - RNA, 22 nt, Homo sapiens
ugccuacugagacuggguggcc

SEQ ID NO: 10523 - RNA, 22 nt, Homo sapiens
uugagauggagucucacugugu

SEQ ID NO: 10524 - RNA, 22 nt, Homo sapiens
uagcaccacaaucaagauacag

SEQ ID NO: 10525 - RNA, 20 nt, Homo sapiens
aagagcucaccagaauaucu

SEQ ID NO: 10526 - RNA, 23 nt, Homo sapiens
auugcccuugaaggcuaaacucu

SEQ ID NO: 10527 - RNA, 23 nt, Homo sapiens
ugacuuguccagugauaguucgu

SEQ ID NO: 10528 - RNA, 20 nt, Homo sapiens
agacaguguggagauuccuu

SEQ ID NO: 10529 - RNA, 22 nt, Homo sapiens
aguugcaagucuugaguaaaga

SEQ ID NO: 10530 - RNA, 22 nt, Homo sapiens
uuggagucaucucuguacugua

SEQ ID NO: 10531 - RNA, 22 nt, Homo sapiens
gagcaucaauggcaugugggaa

SEQ ID NO: 10532 - RNA, 22 nt, Homo sapiens
aucaaaguuucccagaaguugu

SEQ ID NO: 10533 - RNA, 22 nt, Homo sapiens
gggaagugugcagaguucucuu

SEQ ID NO: 10534 - RNA, 22 nt, Homo sapiens
uauugccuugccuacuuuucca

SEQ ID NO: 10535 - RNA, 22 nt, Homo sapiens
gaugcaguaagaaugcauagcg

SEQ ID NO: 10536 - RNA, 22 nt, Homo sapiens
ucuuugauuaugcagauggguu

SEQ ID NO: 10537 - RNA, 22 nt, Homo sapiens
cacugcauccucugccuggcgg

SEQ ID NO: 10538 - RNA, 22 nt, Homo sapiens
uauagcacugaccuuccaggac

SEQ ID NO: 10539 - RNA, 22 nt, Homo sapiens
ucacuuuguuuuuggauaaguu

SEQ ID NO: 10540 - RNA, 20 nt, Homo sapiens
auagaccauugguagguagg

SEQ ID NO: 10541 - RNA, 22 nt, Homo sapiens
cgcaguguuugugucccugggu

SEQ ID NO: 10542 - RNA, 22 nt, Homo sapiens
gagugcaauggcaugaucuggg

SEQ ID NO: 10543 - RNA, 22 nt, Homo sapiens
uaguacuggcauguauuuccca

SEQ ID NO: 10544 - RNA, 22 nt, Homo sapiens
aaagcaucacuuuuccuacuuu

SEQ ID NO: 10545 - RNA, 22 nt, Homo sapiens
uauugcuggcacauaguagguc

SEQ ID NO: 10546 - RNA, 22 nt, Homo sapiens
gugauuauuaugcacugcaugc

SEQ ID NO: 10547 - RNA, 22 nt, Homo sapiens
uuucaguagagacacgguuuug

SEQ ID NO: 10548 - RNA, 22 nt, Homo sapiens
uaagccuaggucugugcucuuc

SEQ ID NO: 10549 - RNA, 22 nt, Homo sapiens
gugugcucaucacaugcaauag

SEQ ID NO: 10550 - RNA, 22 nt, Homo sapiens
aaaagcuuagaugggcuuguau

SEQ ID NO: 10551 - RNA, 22 nt, Homo sapiens
gcccuuugugucuggcuggggu

SEQ ID NO: 10552 - RNA, 22 nt, Homo sapiens
acagguauagaaagcuaaaggg

SEQ ID NO: 10553 - RNA, 22 nt, Homo sapiens
ggaagaauauuaggggauuucg

SEQ ID NO: 10554 - RNA, 22 nt, Homo sapiens
auugcagcccacccugggugau

SEQ ID NO: 10555 - RNA, 22 nt, Homo sapiens
auguugcaguuuaauuauccua

SEQ ID NO: 10556 - RNA, 22 nt, Homo sapiens
gucucccaaccccugugcccag

SEQ ID NO: 10557 - RNA, 22 nt, Homo sapiens
uuccuucaugcuugaaggguau

SEQ ID NO: 10558 - RNA, 22 nt, Homo sapiens
ucagugcuguuugcccucguuu

SEQ ID NO: 10559 - RNA, 22 nt, Homo sapiens
auaaaugcaaugguauuuuuga

SEQ ID NO: 10560 - RNA, 22 nt, Homo sapiens
uggauugaaagcuuuaauauug

SEQ ID NO: 10561 - RNA, 22 nt, Homo sapiens
cucgcuccauuucggugaucaa

SEQ ID NO: 10562 - RNA, 22 nt, Homo sapiens
ugauacguaggaauuaugggag

SEQ ID NO: 10563 - RNA, 22 nt, Homo sapiens
uauuccacuggcacugcauuug

SEQ ID NO: 10564 - RNA, 22 nt, Homo sapiens
cucaaaugguccagcuaguggu

SEQ ID NO: 10565 - RNA, 21 nt, Homo sapiens
ccccugauacuuagucaagag

SEQ ID NO: 10566 - RNA, 22 nt, Homo sapiens
augaccaaugggcagagcuaga

SEQ ID NO: 10567 - RNA, 22 nt, Homo sapiens
uggguucccugucuguccuuga

SEQ ID NO: 10568 - RNA, 20 nt, Homo sapiens
cuggaucaucaguaaaguua

SEQ ID NO: 10569 - RNA, 22 nt, Homo sapiens
cuuugguuuacuuggugcuagu

SEQ ID NO: 10570 - RNA, 22 nt, Homo sapiens
uagagaucuuauauuuuaugac

SEQ ID NO: 10571 - RNA, 22 nt, Homo sapiens
cauugcacuccagucugggcaa

SEQ ID NO: 10572 - RNA, 22 nt, Homo sapiens
ugagacggagucuugcccuguc

SEQ ID NO: 10573 - RNA, 22 nt, Homo sapiens
aagugcugggauuggccgggca

SEQ ID NO: 10574 - RNA, 22 nt, Homo sapiens
auugcacaucugcacuacagcc

SEQ ID NO: 10575 - RNA, 22 nt, Homo sapiens
gugagaaucaaacuacauaaau

SEQ ID NO: 10576 - RNA, 22 nt, Homo sapiens
uucuuaguggcaccacuuuuuu

SEQ ID NO: 10577 - RNA, 21 nt, Homo sapiens
ugcuuuggucauacuucuucc

SEQ ID NO: 10578 - RNA, 22 nt, Homo sapiens
guauuagguuggugcaaaauaa

SEQ ID NO: 10579 - RNA, 22 nt, Homo sapiens
ucuuuggcugugaagaauaaug

SEQ ID NO: 10580 - RNA, 22 nt, Homo sapiens
auuguacauacaccggugugua

SEQ ID NO: 10581 - RNA, 22 nt, Homo sapiens
caugaaagacugaggaauugga

SEQ ID NO: 10582 - RNA, 22 nt, Homo sapiens
aacagucuccaguuguauccau

SEQ ID NO: 10583 - RNA, 22 nt, Homo sapiens
aaugcuguguuauuucaugacc

SEQ ID NO: 10584 - RNA, 22 nt, Homo sapiens
aucgcgccauuguacuccagcc

SEQ ID NO: 10585 - RNA, 23 nt, Homo sapiens
ucgguccccuuggcugcccucgg

SEQ ID NO: 10586 - RNA, 22 nt, Homo sapiens
uauggauuugcauuccccaugu

SEQ ID NO: 10587 - RNA, 22 nt, Homo sapiens
uaugcacuauggaaguagcuca

SEQ ID NO: 10588 - RNA, 22 nt, Homo sapiens
uauggcguaugaauuauaucuc

SEQ ID NO: 10589 - RNA, 22 nt, Homo sapiens
gcguugcacuccagccugggua

SEQ ID NO: 10590 - RNA, 22 nt, Homo sapiens
augagcuaggacagaaugucag

SEQ ID NO: 10591 - RNA, 22 nt, Homo sapiens
uggcuuuguaagguuucauuuu

SEQ ID NO: 10592 - RNA, 22 nt, Homo sapiens
ucccuguuguuucauaauuuua

SEQ ID NO: 10593 - RNA, 20 nt, Homo sapiens
ggagguguuggauuucuagu

SEQ ID NO: 10594 - RNA, 19 nt, Homo sapiens
auugauuaaguuugcuguc

SEQ ID NO: 10595 - RNA, 22 nt, Homo sapiens
cacugcauuggaugguuccucc

SEQ ID NO: 10596 - RNA, 22 nt, Homo sapiens
uuuggcacuauagguaaauuug

SEQ ID NO: 10597 - RNA, 22 nt, Homo sapiens
uaggagcacagcagcauguggg

SEQ ID NO: 10598 - RNA, 22 nt, Homo sapiens
gacaccugguguggaacuggag

SEQ ID NO: 10599 - RNA, 20 nt, Homo sapiens
ugauaugguuuggcuguguu

SEQ ID NO: 10600 - RNA, 22 nt, Homo sapiens
ucuugggugaguuugugaauaa

SEQ ID NO: 10601 - RNA, 22 nt, Homo sapiens
aaggcauucucaaacuaguucu

SEQ ID NO: 10602 - RNA, 22 nt, Homo sapiens
auagagugcuucaucaguagua

SEQ ID NO: 10603 - RNA, 22 nt, Homo sapiens
gcaguagugcgaucucagcuca

SEQ ID NO: 10604 - RNA, 22 nt, Homo sapiens
ucagaguguuuuccaacuuggu

SEQ ID NO: 10605 - RNA, 22 nt, Homo sapiens
uacguguauuguuuucacaaga

SEQ ID NO: 10606 - RNA, 22 nt, Homo sapiens
ugugauagagaaugguggagaa

SEQ ID NO: 10607 - RNA, 19 nt, Homo sapiens
uuuuguacucugugacuug

SEQ ID NO: 10608 - RNA, 22 nt, Homo sapiens
ggcaugaaguagcccacaggca

SEQ ID NO: 10609 - RNA, 22 nt, Homo sapiens
cagacagugucccgagucccug

SEQ ID NO: 10610 - RNA, 22 nt, Homo sapiens
ugugcgugugccuguaagaauu

SEQ ID NO: 10611 - RNA, 22 nt, Homo sapiens
ugaauguuugcagcuuauacca

SEQ ID NO: 10612 - RNA, 22 nt, Homo sapiens
uuucauggaauauagucauuuu

SEQ ID NO: 10613 - RNA, 22 nt, Homo sapiens
auugcacuccagcuugggugac

SEQ ID NO: 10614 - RNA, 22 nt, Homo sapiens
acugcacucuagcuugggugac

SEQ ID NO: 10615 - RNA, 22 nt, Homo sapiens
agaguaguuuauuaugcuaagg

SEQ ID NO: 10616 - RNA, 22 nt, Homo sapiens
agugcauuuguucugugucagg

SEQ ID NO: 10617 - RNA, 22 nt, Homo sapiens
gugcauaucugugguuggcuga

SEQ ID NO: 10618 - RNA, 22 nt, Homo sapiens
gugcuuuguuguggcaguggca

SEQ ID NO: 10619 - RNA, 18 nt, Homo sapiens
ucaccuugaugcuggguc

SEQ ID NO: 10620 - RNA, 22 nt, Homo sapiens
gugauaucuuacaauucucuuu

SEQ ID NO: 10621 - RNA, 22 nt, Homo sapiens
uggcaagaucacaauuacuuuu

SEQ ID NO: 10622 - RNA, 22 nt, Homo sapiens
aaggaauucaaauuuucucugg

SEQ ID NO: 10623 - RNA, 22 nt, Homo sapiens
auaggagcacgaacucuagugu

SEQ ID NO: 10624 - RNA, 22 nt, Homo sapiens
uuagugaaugggugugauuugu

SEQ ID NO: 10625 - RNA, 22 nt, Homo sapiens
uuggccauaugacuugcuuugg

SEQ ID NO: 10626 - RNA, 22 nt, Homo sapiens
gauauugacuuauucuauguuu

SEQ ID NO: 10627 - RNA, 22 nt, Homo sapiens
uacuacuuucucuucugggaaa

SEQ ID NO: 10628 - RNA, 22 nt, Homo sapiens
gcaggauuggagccucucugaa

SEQ ID NO: 10629 - RNA, 19 nt, Homo sapiens
uucucugguuguacuaccc

SEQ ID NO: 10630 - RNA, 22 nt, Homo sapiens
guggcagagucagagggaaaug

SEQ ID NO: 10631 - RNA, 22 nt, Homo sapiens
auggauagucucacucacauac

SEQ ID NO: 10632 - RNA, 22 nt, Homo sapiens
gugcgguauuagcaagccaaca

SEQ ID NO: 10633 - RNA, 22 nt, Homo sapiens
uugcuaagucaagagaaaugau

SEQ ID NO: 10634 - RNA, 23 nt, Homo sapiens
ugcugagaccuagauccuaaaga

SEQ ID NO: 10635 - RNA, 22 nt, Homo sapiens
uagggaguuuuggggugcagaa

SEQ ID NO: 10636 - RNA, 22 nt, Homo sapiens
cuucacuuuguuaaacuccaau

SEQ ID NO: 10637 - RNA, 22 nt, Homo sapiens
ugagaucucauuaugguuuuaa

SEQ ID NO: 10638 - RNA, 22 nt, Homo sapiens
gucucugguugcuuuuguacca

SEQ ID NO: 10639 - RNA, 22 nt, Homo sapiens
ugugaacagcuccaaaugugga

SEQ ID NO: 10640 - RNA, 21 nt, Homo sapiens
aacagugcugaacagacaccu

SEQ ID NO: 10641 - RNA, 19 nt, Homo sapiens
ugucaaaugucuccugggg

SEQ ID NO: 10642 - RNA, 22 nt, Homo sapiens
uacccaguaacaaguauuuugg

SEQ ID NO: 10643 - RNA, 17 nt, Homo sapiens
uuaugagacuucuuagc

SEQ ID NO: 10644 - RNA, 22 nt, Homo sapiens
uagucaaaucugaaggaaauuu

SEQ ID NO: 10645 - RNA, 22 nt, Homo sapiens
ggucauguguccaggagguagc

SEQ ID NO: 10646 - RNA, 22 nt, Homo sapiens
agaucauaugcaguaaugaacu

SEQ ID NO: 10647 - RNA, 22 nt, Homo sapiens
uugcaucagcuccugauguacu

SEQ ID NO: 10648 - RNA, 18 nt, Homo sapiens
ucuagacacugugucuau

SEQ ID NO: 10649 - RNA, 22 nt, Homo sapiens
augaaaucacugugaugcccua

SEQ ID NO: 10650 - RNA, 21 nt, Homo sapiens
augggacuaacugaugggucu

SEQ ID NO: 10651 - RNA, 22 nt, Homo sapiens
cauugcccuccagccugggcaa

SEQ ID NO: 10652 - RNA, 22 nt, Homo sapiens
augggcacugauguauucugug

SEQ ID NO: 10653 - RNA, 22 nt, Homo sapiens
uuccuugagaaaguacaaggcu

SEQ ID NO: 10654 - RNA, 22 nt, Homo sapiens
guugauguugcagucuugagga

SEQ ID NO: 10655 - RNA, 21 nt, Homo sapiens
ugucaugcagagacccuggag

SEQ ID NO: 10656 - RNA, 22 nt, Homo sapiens
ugagguauuuuguuaugcagcc

SEQ ID NO: 10657 - RNA, 23 nt, Homo sapiens
ugagucacuuugcuggggucucu

SEQ ID NO: 10658 - RNA, 22 nt, Homo sapiens
cuggaaacaucuuaggaaugca

SEQ ID NO: 10659 - RNA, 22 nt, Homo sapiens
uauugcaaauggugaucccagg

SEQ ID NO: 10660 - RNA, 22 nt, Homo sapiens
cagcuaguaauuuauugaagau

SEQ ID NO: 10661 - RNA, 22 nt, Homo sapiens
aaauaacugucagguucuggaa

SEQ ID NO: 10662 - RNA, 22 nt, Homo sapiens
ugucaugaacucacauucuggg

SEQ ID NO: 10663 - RNA, 22 nt, Homo sapiens
ggcaagaaccagggauuugcgu

SEQ ID NO: 10664 - RNA, 22 nt, Homo sapiens
uccuuggucaaaaagaaagugu

SEQ ID NO: 10665 - RNA, 22 nt, Homo sapiens
ugucuacugaugauguaguuaa

SEQ ID NO: 10666 - RNA, 22 nt, Homo sapiens
caucgcacuccagcuugggcaa

SEQ ID NO: 10667 - RNA, 22 nt, Homo sapiens
gguggcuuuuugugauggcuga

SEQ ID NO: 10668 - RNA, 21 nt, Homo sapiens
cagguagugucugaagccaga

SEQ ID NO: 10669 - RNA, 19 nt, Homo sapiens
ggcucagucaacugacugu

SEQ ID NO: 10670 - RNA, 22 nt, Homo sapiens
cuccauuuaguccuuuuagaag

SEQ ID NO: 10671 - RNA, 22 nt, Homo sapiens
ucuuggccaugaauggcaaggc

SEQ ID NO: 10672 - RNA, 22 nt, Homo sapiens
uugcacauguugaaccagcaaa

SEQ ID NO: 10673 - RNA, 23 nt, Homo sapiens
cagguaguucuuuauaguagugu

SEQ ID NO: 10674 - RNA, 22 nt, Homo sapiens
agcacacuggguggcuuaaaca

SEQ ID NO: 10675 - RNA, 22 nt, Homo sapiens
cuggcagucugccucuucacug

SEQ ID NO: 10676 - RNA, 21 nt, Homo sapiens
uugagguaaaauccuauggga

SEQ ID NO: 10677 - RNA, 22 nt, Homo sapiens
agagauacauucugagaagugc

SEQ ID NO: 10678 - RNA, 22 nt, Homo sapiens
uggagcccuaaacuucuaauau

SEQ ID NO: 10679 - RNA, 22 nt, Homo sapiens
ucaaagacacacaaggagaagg

SEQ ID NO: 10680 - RNA, 22 nt, Homo sapiens
gugagggagcuggaauauuuau

SEQ ID NO: 10681 - RNA, 22 nt, Homo sapiens
gucacugagcagaaggaagcga

SEQ ID NO: 10682 - RNA, 22 nt, Homo sapiens
gagaucauugugggccaagcug

SEQ ID NO: 10683 - RNA, 20 nt, Homo sapiens
cauuccacuuuccugucagu

SEQ ID NO: 10684 - RNA, 22 nt, Homo sapiens
acaugcauccaugugaagagac

SEQ ID NO: 10685 - RNA, 22 nt, Homo sapiens
guguccuaugaaacaggaucca

SEQ ID NO: 10686 - RNA, 22 nt, Homo sapiens
guggcuaaagauuuggaaucug

SEQ ID NO: 10687 - RNA, 22 nt, Homo sapiens
guggcagaacagguaggguucu

SEQ ID NO: 10688 - RNA, 22 nt, Homo sapiens
uacaaagcuuugaugugucuuu

SEQ ID NO: 10689 - RNA, 22 nt, Homo sapiens
uggaauacaugucgcugagcug

SEQ ID NO: 10690 - RNA, 22 nt, Homo sapiens
augacgagaugguguuuggcuu

SEQ ID NO: 10691 - RNA, 22 nt, Homo sapiens
aggaauuuaauguaugauaaua

SEQ ID NO: 10692 - RNA, 22 nt, Homo sapiens
auguggaaagcagcaugauaug

SEQ ID NO: 10693 - RNA, 22 nt, Homo sapiens
cagcugguggcaagaagacaga

SEQ ID NO: 10694 - RNA, 22 nt, Homo sapiens
uaaguagugugcauguauguau

SEQ ID NO: 10695 - RNA, 22 nt, Homo sapiens
gucuugaaggcugaguaccugu

SEQ ID NO: 10696 - RNA, 23 nt, Homo sapiens
ucagugaaggaacaacuaaauag

SEQ ID NO: 10697 - RNA, 22 nt, Homo sapiens
augguaagcugaaaauaucgaa

SEQ ID NO: 10698 - RNA, 22 nt, Homo sapiens
cuguaaaguucucauuguagcc

SEQ ID NO: 10699 - RNA, 18 nt, Homo sapiens
agcucaguguuugcuuac

SEQ ID NO: 10700 - RNA, 22 nt, Homo sapiens
uacaguggcaugucaggugcuu

SEQ ID NO: 10701 - RNA, 22 nt, Homo sapiens
ugaugguaguucagucaaugua

SEQ ID NO: 10702 - RNA, 22 nt, Homo sapiens
guauacaguugacccuugaacc

SEQ ID NO: 10703 - RNA, 22 nt, Homo sapiens
augaucuguagaacuaguccuu

SEQ ID NO: 10704 - RNA, 22 nt, Homo sapiens
gcuuugcaauggcauugaccau

SEQ ID NO: 10705 - RNA, 22 nt, Homo sapiens
uauaugcacucagguguaugug

SEQ ID NO: 10706 - RNA, 19 nt, Homo sapiens
ggucacagggguuacaagg

SEQ ID NO: 10707 - RNA, 22 nt, Homo sapiens
uuaccugagaaggugacauuug

SEQ ID NO: 10708 - RNA, 22 nt, Homo sapiens
gaggugauaucucauugugguu

SEQ ID NO: 10709 - RNA, 22 nt, Homo sapiens
uuauucagcaccugcuguguuc

SEQ ID NO: 10710 - RNA, 22 nt, Homo sapiens
aauggcauuugccagggcaaag

SEQ ID NO: 10711 - RNA, 21 nt, Homo sapiens
augaacucaucauuuuuuaug

SEQ ID NO: 10712 - RNA, 22 nt, Homo sapiens
gaucuggucuuugauuagacac

SEQ ID NO: 10713 - RNA, 23 nt, Homo sapiens
auugcagucuugaacuccugggc

SEQ ID NO: 10714 - RNA, 22 nt, Homo sapiens
aucagauggcuaaaacagaaga

SEQ ID NO: 10715 - RNA, 22 nt, Homo sapiens
guuaugacacucuuuuuaucau

SEQ ID NO: 10716 - RNA, 22 nt, Homo sapiens
gauauguaaaaauuauaucuga

SEQ ID NO: 10717 - RNA, 22 nt, Homo sapiens
uaacccuuaguaucuguggguu

SEQ ID NO: 10718 - RNA, 22 nt, Homo sapiens
ugagcuaagugccaauauuaau

SEQ ID NO: 10719 - RNA, 22 nt, Homo sapiens
ucaaauuccaagucuagguagg

SEQ ID NO: 10720 - RNA, 22 nt, Homo sapiens
ucaccaguacuccaaauugagg

SEQ ID NO: 10721 - RNA, 22 nt, Homo sapiens
uagucccauaugauuuagugaa

SEQ ID NO: 10722 - RNA, 22 nt, Homo sapiens
cauuugcacugagacucagcuu

SEQ ID NO: 10723 - RNA, 22 nt, Homo sapiens
uaguccauuuucaugcugcuau

SEQ ID NO: 10724 - RNA, 22 nt, Homo sapiens
uuuccauguuggugaaaugagg

SEQ ID NO: 10725 - RNA, 22 nt, Homo sapiens
uaggcaguggagaaauaaacag

SEQ ID NO: 10726 - RNA, 22 nt, Homo sapiens
gaugcagcuaggauuugugaca

SEQ ID NO: 10727 - RNA, 22 nt, Homo sapiens
uucaaaguaaagggauggagac

SEQ ID NO: 10728 - RNA, 22 nt, Homo sapiens
acccuggaguaguaggaaucug

SEQ ID NO: 10729 - RNA, 22 nt, Homo sapiens
aucuagagacauaguaaagaau

SEQ ID NO: 10730 - RNA, 23 nt, Homo sapiens
ucacuagaguccuggaguuugag

SEQ ID NO: 10731 - RNA, 22 nt, Homo sapiens
uagaaugaaacaagcugugccu

SEQ ID NO: 10732 - RNA, 22 nt, Homo sapiens
uugagauggagucucacgcauu

SEQ ID NO: 10733 - RNA, 22 nt, Homo sapiens
auggcacugaagcguauugaca

SEQ ID NO: 10734 - RNA, 22 nt, Homo sapiens
ugacaagugauuaaggcauauu

SEQ ID NO: 10735 - RNA, 22 nt, Homo sapiens
cugggaugauguaaauaggcua

SEQ ID NO: 10736 - RNA, 22 nt, Homo sapiens
aucugcaaagcugggcugagac

SEQ ID NO: 10737 - RNA, 22 nt, Homo sapiens
guugacuaggagcuacuacuac

SEQ ID NO: 10738 - RNA, 22 nt, Homo sapiens
uuagggaggacaguuacaacag

SEQ ID NO: 10739 - RNA, 22 nt, Homo sapiens
agggcuuaucuguguagaguuc

SEQ ID NO: 10740 - RNA, 22 nt, Homo sapiens
ggagaucuuuguuaucuuuuga

SEQ ID NO: 10741 - RNA, 22 nt, Homo sapiens
auagggcacgagaugugagccu

SEQ ID NO: 10742 - RNA, 22 nt, Homo sapiens
uauuagguuggggcaaaaguaa

SEQ ID NO: 10743 - RNA, 22 nt, Homo sapiens
guauagcacauaauacuugaug

SEQ ID NO: 10744 - RNA, 22 nt, Homo sapiens
uggagaacauucauuugcaaga

SEQ ID NO: 10745 - RNA, 22 nt, Homo sapiens
uggcucuuucuagacuuaauua

SEQ ID NO: 10746 - RNA, 22 nt, Homo sapiens
auucacuguggcuuucucugau

SEQ ID NO: 10747 - RNA, 22 nt, Homo sapiens
cugauugucuauuuaguucacu

SEQ ID NO: 10748 - RNA, 20 nt, Homo sapiens
auuccacuuauaugaggucc

SEQ ID NO: 10749 - RNA, 22 nt, Homo sapiens
gucacugccugaggcugaugca

SEQ ID NO: 10750 - RNA, 19 nt, Homo sapiens
uggguagugaugagacaua

SEQ ID NO: 10751 - RNA, 22 nt, Homo sapiens
gucauccaggcuggagugaagc

SEQ ID NO: 10752 - RNA, 22 nt, Homo sapiens
auccuguaggcuaguagacagu

SEQ ID NO: 10753 - RNA, 22 nt, Homo sapiens
aaaugcagauucugcuuagguu

SEQ ID NO: 10754 - RNA, 22 nt, Homo sapiens
aacugcucuuaccagauggguc

SEQ ID NO: 10755 - RNA, 22 nt, Homo sapiens
uggaguguguuaacuuuacaag

SEQ ID NO: 10756 - RNA, 22 nt, Homo sapiens
uugagcacugucugugugcagu

SEQ ID NO: 10757 - RNA, 22 nt, Homo sapiens
uaagugguguucauucuuuuga

SEQ ID NO: 10758 - RNA, 22 nt, Homo sapiens
ugggaucuuuccuauuagcgag

SEQ ID NO: 10759 - RNA, 19 nt, Homo sapiens
uacuggcucgggaauuuuc

SEQ ID NO: 10760 - RNA, 19 nt, Homo sapiens
uuccuagugguugggaagu

SEQ ID NO: 10761 - RNA, 22 nt, Homo sapiens
acauugcucuuaccaaguuugu

SEQ ID NO: 10762 - RNA, 22 nt, Homo sapiens
uuguagcaaauguguaaacaaa

SEQ ID NO: 10763 - RNA, 22 nt, Homo sapiens
accauugcacuccagcccaggc

SEQ ID NO: 10764 - RNA, 22 nt, Homo sapiens
auaauagcugaucauuuagaag

SEQ ID NO: 10765 - RNA, 22 nt, Homo sapiens
uuccauguugauacgugaaguu

SEQ ID NO: 10766 - RNA, 22 nt, Homo sapiens
ugucaucauuggaaucugccuc

SEQ ID NO: 10767 - RNA, 22 nt, Homo sapiens
gaagagacagguucccacaaaa

SEQ ID NO: 10768 - RNA, 22 nt, Homo sapiens
accucagcccggggaaguugag

SEQ ID NO: 10769 - RNA, 22 nt, Homo sapiens
uagugcaguggcuccaucucag

SEQ ID NO: 10770 - RNA, 22 nt, Homo sapiens
ugugacucugcauuuuggguuc

SEQ ID NO: 10771 - RNA, 22 nt, Homo sapiens
uugcacuccagcucuaggugac

SEQ ID NO: 10772 - RNA, 22 nt, Homo sapiens
agcaucacacacuacagggaaa

SEQ ID NO: 10773 - RNA, 22 nt, Homo sapiens
gucuggcuccugucuaaucacu

SEQ ID NO: 10774 - RNA, 22 nt, Homo sapiens
ugugauggaguuucauggacug

SEQ ID NO: 10775 - RNA, 22 nt, Homo sapiens
cauaaugcuaagagcugccccu

SEQ ID NO: 10776 - RNA, 22 nt, Homo sapiens
aauugcuuuuauuuagggccag

SEQ ID NO: 10777 - RNA, 22 nt, Homo sapiens
ugaggcacucuagacuuauuca

SEQ ID NO: 10778 - RNA, 23 nt, Homo sapiens
uguaaaagcauuugucagccugg

SEQ ID NO: 10779 - RNA, 22 nt, Homo sapiens
aagucauggagaagguggaggu

SEQ ID NO: 10780 - RNA, 22 nt, Homo sapiens
augaacucaucauuuuuuaugg

SEQ ID NO: 10781 - RNA, 22 nt, Homo sapiens
uauugcccugcuuuguucuaaa

SEQ ID NO: 10782 - RNA, 22 nt, Homo sapiens
ugagauuaucuugaucuugaaa

SEQ ID NO: 10783 - RNA, 22 nt, Homo sapiens
uacaggugcucuacagacagga

SEQ ID NO: 10784 - RNA, 22 nt, Homo sapiens
cugaggugggagaaucacauaa

SEQ ID NO: 10785 - RNA, 22 nt, Homo sapiens
ggcacaaugucagcucacugca

SEQ ID NO: 10786 - RNA, 22 nt, Homo sapiens
gacauuaucagguuuguuuucu

SEQ ID NO: 10787 - RNA, 22 nt, Homo sapiens
uugucuugcagcuuaggcauca

SEQ ID NO: 10788 - RNA, 22 nt, Homo sapiens
cuuggguaagucauuaaaauua

SEQ ID NO: 10789 - RNA, 22 nt, Homo sapiens
uuccauguaguugagcaguuuu

SEQ ID NO: 10790 - RNA, 18 nt, Homo sapiens
ugagauacuagaauaggu

SEQ ID NO: 10791 - RNA, 20 nt, Homo sapiens
uuagaguaguaugauuuaua

SEQ ID NO: 10792 - RNA, 16 nt, Homo sapiens
auaccacagugacaca

SEQ ID NO: 10793 - RNA, 22 nt, Homo sapiens
ccagaguugccucagguuucug

SEQ ID NO: 10794 - RNA, 19 nt, Homo sapiens
ucaccuugcccugcacaca

SEQ ID NO: 10795 - RNA, 22 nt, Homo sapiens
gcuuuuggaggaacuuaagauu

SEQ ID NO: 10796 - RNA, 22 nt, Homo sapiens
augggguagguagcucggggaa

SEQ ID NO: 10797 - RNA, 20 nt, Homo sapiens
uucccucagccuugagggua

SEQ ID NO: 10798 - RNA, 22 nt, Homo sapiens
guaguuuaucagaaagaauagg

SEQ ID NO: 10799 - RNA, 22 nt, Homo sapiens
uacccucuggauacccuuguuc

SEQ ID NO: 10800 - RNA, 22 nt, Homo sapiens
uguugcacuccagccuagguga

SEQ ID NO: 10801 - RNA, 22 nt, Homo sapiens
uugacuacaccaugccaggaac

SEQ ID NO: 10802 - RNA, 22 nt, Homo sapiens
gguccgccugccuuggccuccc

SEQ ID NO: 10803 - RNA, 22 nt, Homo sapiens
ucugagucaucacaaaugaugc

SEQ ID NO: 10804 - RNA, 22 nt, Homo sapiens
cuucucagugcucaucuuauuu

SEQ ID NO: 10805 - RNA, 19 nt, Homo sapiens
auuugaucaucaggcacag

SEQ ID NO: 10806 - RNA, 22 nt, Homo sapiens
acaucccuugcucggggccccu

SEQ ID NO: 10807 - RNA, 22 nt, Homo sapiens
gcaguguuggggccggaggcug

SEQ ID NO: 10808 - RNA, 22 nt, Homo sapiens
uauugcauuugagguugguuga

SEQ ID NO: 10809 - RNA, 23 nt, Homo sapiens
cagcuggugauuuuaaguugaag

SEQ ID NO: 10810 - RNA, 22 nt, Homo sapiens
gugcacaacgugcaaguuuguu

SEQ ID NO: 10811 - RNA, 21 nt, Homo sapiens
cuaggaccaguucuguaauuc

SEQ ID NO: 10812 - RNA, 22 nt, Homo sapiens
uugaggugggaggaucacuuga

SEQ ID NO: 10813 - RNA, 22 nt, Homo sapiens
uuaucacauugacugauuugca

SEQ ID NO: 10814 - RNA, 22 nt, Homo sapiens
accaucuagauuuguguaggua

SEQ ID NO: 10815 - RNA, 22 nt, Homo sapiens
gucugucuuuugucuuugaaau

SEQ ID NO: 10816 - RNA, 22 nt, Homo sapiens
ugagugaacgcugagaccaaau

SEQ ID NO: 10817 - RNA, 22 nt, Homo sapiens
uggagugauaugguuauauggg

SEQ ID NO: 10818 - RNA, 20 nt, Homo sapiens
cugcacauccacucuacuuc

SEQ ID NO: 10819 - RNA, 22 nt, Homo sapiens
aagaugguauuucauuaguuuu

SEQ ID NO: 10820 - RNA, 22 nt, Homo sapiens
uagguaucuuuauagcaguagc

SEQ ID NO: 10821 - RNA, 22 nt, Homo sapiens
uaauacuugucauaaaggcauu

SEQ ID NO: 10822 - RNA, 22 nt, Homo sapiens
uugauguugaggacauaaaccu

SEQ ID NO: 10823 - RNA, 22 nt, Homo sapiens
uggcaugggguaguagcgcugg

SEQ ID NO: 10824 - RNA, 22 nt, Homo sapiens
guaaucucaccuacuugggagg

SEQ ID NO: 10825 - RNA, 22 nt, Homo sapiens
ugagauggaguuucgcuuuugu

SEQ ID NO: 10826 - RNA, 22 nt, Homo sapiens
ucuuuggugaauggucauccag

SEQ ID NO: 10827 - RNA, 22 nt, Homo sapiens
aucaccuuucccuuucugaauc

SEQ ID NO: 10828 - RNA, 22 nt, Homo sapiens
gucaaggaauuuauccauuucu

SEQ ID NO: 10829 - RNA, 22 nt, Homo sapiens
uccuuggucauggaagagacag

SEQ ID NO: 10830 - RNA, 22 nt, Homo sapiens
augaaugcuuuuggauguaucu

SEQ ID NO: 10831 - RNA, 22 nt, Homo sapiens
ugugacaguuaguuugguguua

SEQ ID NO: 10832 - RNA, 22 nt, Homo sapiens
uugguaaucccuagugucuaga

SEQ ID NO: 10833 - RNA, 22 nt, Homo sapiens
uggcaugucguuuuucauagga

SEQ ID NO: 10834 - RNA, 22 nt, Homo sapiens
aucugguguggcugugauccuc

SEQ ID NO: 10835 - RNA, 22 nt, Homo sapiens
uugaauagaagguuuuuuguuc

SEQ ID NO: 10836 - RNA, 22 nt, Homo sapiens
ucucacagaguugaacuuucuu

SEQ ID NO: 10837 - RNA, 22 nt, Homo sapiens
ugagauguguccagaucuaguu

SEQ ID NO: 10838 - RNA, 22 nt, Homo sapiens
ugugaacagcagcugggcuuug

SEQ ID NO: 10839 - RNA, 22 nt, Homo sapiens
ugugccacugcacucuggccug

SEQ ID NO: 10840 - RNA, 22 nt, Homo sapiens
uauacaugugggcaucaggaga

SEQ ID NO: 10841 - RNA, 22 nt, Homo sapiens
gaaaugucugagauguggcuca

SEQ ID NO: 10842 - RNA, 22 nt, Homo sapiens
acugcacuccagccucccgucu

SEQ ID NO: 10843 - RNA, 22 nt, Homo sapiens
uaaguuguugacauuaggggaa

SEQ ID NO: 10844 - RNA, 22 nt, Homo sapiens
uaaaccuagcauuuugcauaug

SEQ ID NO: 10845 - RNA, 22 nt, Homo sapiens
cuugacacugcaguuuuccugg

SEQ ID NO: 10846 - RNA, 22 nt, Homo sapiens
gagguguaaggacaacagagac

SEQ ID NO: 10847 - RNA, 22 nt, Homo sapiens
gagcuaguagauuuuaaauauu

SEQ ID NO: 10848 - RNA, 17 nt, Homo sapiens
agucaguaguuuguauu

SEQ ID NO: 10849 - RNA, 22 nt, Homo sapiens
aacucacauucuuucuugguac

SEQ ID NO: 10850 - RNA, 22 nt, Homo sapiens
agucauagaguuugcccuucuc

SEQ ID NO: 10851 - RNA, 22 nt, Homo sapiens
ugguuccauauuaauuuuagga

SEQ ID NO: 10852 - RNA, 22 nt, Homo sapiens
auuaacaucuagaguuuuggug

SEQ ID NO: 10853 - RNA, 22 nt, Homo sapiens
gugcaguguuugcauggaauca

SEQ ID NO: 10854 - RNA, 17 nt, Homo sapiens
guggauagaacaaugaa

SEQ ID NO: 10855 - RNA, 22 nt, Homo sapiens
uaccgcagugacauuccuugau

SEQ ID NO: 10856 - RNA, 22 nt, Homo sapiens
aauucacuuguggcagauccuu

SEQ ID NO: 10857 - RNA, 22 nt, Homo sapiens
ucccuguguccugggggcaccu

SEQ ID NO: 10858 - RNA, 22 nt, Homo sapiens
cacaaugucugguaggccacuu

SEQ ID NO: 10859 - RNA, 22 nt, Homo sapiens
aggugguauuuaaaauuauuug

SEQ ID NO: 10860 - RNA, 22 nt, Homo sapiens
aguaaagcaucagcuagaugug

SEQ ID NO: 10861 - RNA, 22 nt, Homo sapiens
guaaucucagcuucuugggagg

SEQ ID NO: 10862 - RNA, 22 nt, Homo sapiens
cuugcagagcccauggauguca

SEQ ID NO: 10863 - RNA, 22 nt, Homo sapiens
aaauggcuuugaggguaggaca

SEQ ID NO: 10864 - RNA, 22 nt, Homo sapiens
agcuaacauuuuuccucuucca

SEQ ID NO: 10865 - RNA, 22 nt, Homo sapiens
uuuagcaauucauuuugugucu

SEQ ID NO: 10866 - RNA, 22 nt, Homo sapiens
uuuuggucuccaguuucugcug

SEQ ID NO: 10867 - RNA, 22 nt, Homo sapiens
ugacacagcaagauggaaccau

SEQ ID NO: 10868 - RNA, 22 nt, Homo sapiens
uacagugcuugguaucuaguaa

SEQ ID NO: 10869 - RNA, 22 nt, Homo sapiens
uuugcaucuuuugcuuccugga

SEQ ID NO: 10870 - RNA, 22 nt, Homo sapiens
cacccuuagaguuggaaguggg

SEQ ID NO: 10871 - RNA, 22 nt, Homo sapiens
uugacagaccuuggucauaucc

SEQ ID NO: 10872 - RNA, 22 nt, Homo sapiens
uaaggcauuuuuuugaguugca

SEQ ID NO: 10873 - RNA, 21 nt, Homo sapiens
auuugguggcugugugacacu

SEQ ID NO: 10874 - RNA, 22 nt, Homo sapiens
cuaaaugucucuacuaaguuua

SEQ ID NO: 10875 - RNA, 22 nt, Homo sapiens
agugaucauuugaauugaugau

SEQ ID NO: 10876 - RNA, 22 nt, Homo sapiens
gugaagaucccuguccuguucc

SEQ ID NO: 10877 - RNA, 22 nt, Homo sapiens
gauguagaaagagugggcugga

SEQ ID NO: 10878 - RNA, 22 nt, Homo sapiens
ucacccacacaggagacaggga

SEQ ID NO: 10879 - RNA, 22 nt, Homo sapiens
cugauugucaucaauauuauua

SEQ ID NO: 10880 - RNA, 22 nt, Homo sapiens
cugcauuugaugacguauggug

SEQ ID NO: 10881 - RNA, 22 nt, Homo sapiens
gugggauauaaucaguccugua

SEQ ID NO: 10882 - RNA, 22 nt, Homo sapiens
uuauggcaaugccccacuccua

SEQ ID NO: 10883 - RNA, 22 nt, Homo sapiens
acuuuguuauggcaacccuaag

SEQ ID NO: 10884 - RNA, 23 nt, Homo sapiens
uacuacacuuuucccaagguuuu

SEQ ID NO: 10885 - RNA, 22 nt, Homo sapiens
uaaugcaucaugguuggcaaac

SEQ ID NO: 10886 - RNA, 20 nt, Homo sapiens
ugacaguuaagggauagaag

SEQ ID NO: 10887 - RNA, 19 nt, Homo sapiens
acagcugguuuugguuucu

SEQ ID NO: 10888 - RNA, 22 nt, Homo sapiens
acccugucauccacauggugcu

SEQ ID NO: 10889 - RNA, 22 nt, Homo sapiens
cugucaucauuucuaugugcca

SEQ ID NO: 10890 - RNA, 21 nt, Homo sapiens
auuuuugcagagcugguagug

SEQ ID NO: 10891 - RNA, 22 nt, Homo sapiens
auucauagugcuaagguguauc

SEQ ID NO: 10892 - RNA, 22 nt, Homo sapiens
uuauggccauucuuguaggagu

SEQ ID NO: 10893 - RNA, 22 nt, Homo sapiens
uagauuaucucaccacucgagu

SEQ ID NO: 10894 - RNA, 21 nt, Homo sapiens
agguaguuuuccuuuuggagu

SEQ ID NO: 10895 - RNA, 22 nt, Homo sapiens
ugaacuguugggggaaauucag

SEQ ID NO: 10896 - RNA, 22 nt, Homo sapiens
ucucuggauaucuacuuauguu

SEQ ID NO: 10897 - RNA, 22 nt, Homo sapiens
uugcacauggcaggugcucaau

SEQ ID NO: 10898 - RNA, 22 nt, Homo sapiens
cauuaguugaagugcagggaga

SEQ ID NO: 10899 - RNA, 22 nt, Homo sapiens
gucagaaucucagaugacaacg

SEQ ID NO: 10900 - RNA, 22 nt, Homo sapiens
gauuggcauugcugcaccugag

SEQ ID NO: 10901 - RNA, 22 nt, Homo sapiens
auuuggcaacguagggaggcau

SEQ ID NO: 10902 - RNA, 19 nt, Homo sapiens
augcacgugaaaugcauuu

SEQ ID NO: 10903 - RNA, 21 nt, Homo sapiens
ucugagucauucaguggccug

SEQ ID NO: 10904 - RNA, 22 nt, Homo sapiens
ugugacucuggcacauggugag

SEQ ID NO: 10905 - RNA, 22 nt, Homo sapiens
ugaaagguauagguucuggagg

SEQ ID NO: 10906 - RNA, 22 nt, Homo sapiens
uggcaauguggaaugguccagg

SEQ ID NO: 10907 - RNA, 22 nt, Homo sapiens
ucagugccucaguuuuuaaaga

SEQ ID NO: 10908 - RNA, 21 nt, Homo sapiens
ucauugguuggcugcccugua

SEQ ID NO: 10909 - RNA, 22 nt, Homo sapiens
auauauguuuucugggaagaaa

SEQ ID NO: 10910 - RNA, 22 nt, Homo sapiens
acauacacuagggauguggugu

SEQ ID NO: 10911 - RNA, 22 nt, Homo sapiens
aggcauugugcaucgaugauuu

SEQ ID NO: 10912 - RNA, 22 nt, Homo sapiens
gguguguaaauuacuuaucucu

SEQ ID NO: 10913 - RNA, 22 nt, Homo sapiens
uguguaauaccuuugacuauau

SEQ ID NO: 10914 - RNA, 22 nt, Homo sapiens
auauucacuauaugcagaacca

SEQ ID NO: 10915 - RNA, 22 nt, Homo sapiens
acugcacucccgcccgggugac

SEQ ID NO: 10916 - RNA, 22 nt, Homo sapiens
uagagcucaucuucuuuaaacu

SEQ ID NO: 10917 - RNA, 21 nt, Homo sapiens
ugcuuacugaauguuaauuuc

SEQ ID NO: 10918 - RNA, 22 nt, Homo sapiens
uugagcucuucuagcaauucua

SEQ ID NO: 10919 - RNA, 22 nt, Homo sapiens
cuggagauauuggaagaaagaa

SEQ ID NO: 10920 - RNA, 22 nt, Homo sapiens
aucucugagauguucugauuuu

SEQ ID NO: 10921 - RNA, 22 nt, Homo sapiens
ccaguguuuggauuagggaugc

SEQ ID NO: 10922 - RNA, 22 nt, Homo sapiens
aucgcaccauugcacuccagca

SEQ ID NO: 10923 - RNA, 19 nt, Homo sapiens
accuguagaaaguacaaca

SEQ ID NO: 10924 - RNA, 22 nt, Homo sapiens
augagacuguucuuccucauug

SEQ ID NO: 10925 - RNA, 22 nt, Homo sapiens
uugauguguuuccaggauuugu

SEQ ID NO: 10926 - RNA, 22 nt, Homo sapiens
uggacagagagaccggcauuuu

SEQ ID NO: 10927 - RNA, 22 nt, Homo sapiens
ccccaguguguaaaggccuugc

SEQ ID NO: 10928 - RNA, 22 nt, Homo sapiens
uauugcugaaaaugcuaaugau

SEQ ID NO: 10929 - RNA, 20 nt, Homo sapiens
ggagguguugauuuuucuuu

SEQ ID NO: 10930 - RNA, 22 nt, Homo sapiens
uaaauggauaaaugaauaccua

SEQ ID NO: 10931 - RNA, 22 nt, Homo sapiens
gugugauggcgcacacagggug

SEQ ID NO: 10932 - RNA, 19 nt, Homo sapiens
uagguacauucaagucucc

SEQ ID NO: 10933 - RNA, 22 nt, Homo sapiens
ucuugcacaaauuauuuuaacu

SEQ ID NO: 10934 - RNA, 22 nt, Homo sapiens
aggagcacaggacuuugauuau

SEQ ID NO: 10935 - RNA, 22 nt, Homo sapiens
ccagugucugacagacacggcg

SEQ ID NO: 10936 - RNA, 22 nt, Homo sapiens
auagcagaagaagggacaauuc

SEQ ID NO: 10937 - RNA, 22 nt, Homo sapiens
ucuagccuaugaagcuugucca

SEQ ID NO: 10938 - RNA, 22 nt, Homo sapiens
cuccauuuggaacagauguccu

SEQ ID NO: 10939 - RNA, 22 nt, Homo sapiens
guggaaaauuauugcuguuuuu

SEQ ID NO: 10940 - RNA, 22 nt, Homo sapiens
uugcacuccggccuggguaaca

SEQ ID NO: 10941 - RNA, 22 nt, Homo sapiens
agacuagacagaugaacagcac

SEQ ID NO: 10942 - RNA, 22 nt, Homo sapiens
uauggccugaauuagaaaagug

SEQ ID NO: 10943 - RNA, 22 nt, Homo sapiens
uggaccccugcucgggagcccu

SEQ ID NO: 10944 - RNA, 20 nt, Homo sapiens
ccagcaucauuagauucugg

SEQ ID NO: 10945 - RNA, 18 nt, Homo sapiens
uuucaagucuuaggugac

SEQ ID NO: 10946 - RNA, 22 nt, Homo sapiens
auagcacaugugcaaauggcug

SEQ ID NO: 10947 - RNA, 22 nt, Homo sapiens
uuauaaacaugaagauuugggg

SEQ ID NO: 10948 - RNA, 22 nt, Homo sapiens
ugacuagugugauguaguaaau

SEQ ID NO: 10949 - RNA, 22 nt, Homo sapiens
uugagacugaacauuuguguac

SEQ ID NO: 10950 - RNA, 22 nt, Homo sapiens
gauuccacuuucaaauucaaau

SEQ ID NO: 10951 - RNA, 22 nt, Homo sapiens
uucacagacaacuggucccuua

SEQ ID NO: 10952 - RNA, 22 nt, Homo sapiens
uacauaguagauauaggguuua

SEQ ID NO: 10953 - RNA, 22 nt, Homo sapiens
gagaucuauuccucacccuucu

SEQ ID NO: 10954 - RNA, 22 nt, Homo sapiens
cggcaguggguaagccaagcuu

SEQ ID NO: 10955 - RNA, 22 nt, Homo sapiens
auggccuaugaccguuauguug

SEQ ID NO: 10956 - RNA, 22 nt, Homo sapiens
acccacuagaugccaguggcac

SEQ ID NO: 10957 - RNA, 21 nt, Homo sapiens
agguuguguuuccucuuacuu

SEQ ID NO: 10958 - RNA, 22 nt, Homo sapiens
caccacauuccauugaucaggc

SEQ ID NO: 10959 - RNA, 22 nt, Homo sapiens
ugagagaugauaaaauguuugu

SEQ ID NO: 10960 - RNA, 22 nt, Homo sapiens
aucuggcuucuuuuaguccaca

SEQ ID NO: 10961 - RNA, 22 nt, Homo sapiens
uacugcacuugaccuccugggc

SEQ ID NO: 10962 - RNA, 22 nt, Homo sapiens
ugcaaccauuguuaagugugca

SEQ ID NO: 10963 - RNA, 22 nt, Homo sapiens
aauacuuccaaaucuagucauu

SEQ ID NO: 10964 - RNA, 22 nt, Homo sapiens
gcauggccuuuaaaugucacag

SEQ ID NO: 10965 - RNA, 22 nt, Homo sapiens
ugaaauuauucuuaccaaggug

SEQ ID NO: 10966 - RNA, 23 nt, Homo sapiens
aggcauuguacaguaauggaaaa

SEQ ID NO: 10967 - RNA, 21 nt, Homo sapiens
uggaccccuacuucucaccau

SEQ ID NO: 10968 - RNA, 22 nt, Homo sapiens
auugcauaaacacauuucuuau

SEQ ID NO: 10969 - RNA, 22 nt, Homo sapiens
ucacaauggagacucgggcgga

SEQ ID NO: 10970 - RNA, 22 nt, Homo sapiens
ugacagucaccaggacccacag

SEQ ID NO: 10971 - RNA, 22 nt, Homo sapiens
uauaucuagagcggaccaggcu

SEQ ID NO: 10972 - RNA, 22 nt, Homo sapiens
acugcacuccggccucgugaca

SEQ ID NO: 10973 - RNA, 22 nt, Homo sapiens
augggguaggcuuugcugcagu

SEQ ID NO: 10974 - RNA, 22 nt, Homo sapiens
uucucagugaaguuuagaacau

SEQ ID NO: 10975 - RNA, 22 nt, Homo sapiens
cucugguggaagcagggggcaa

SEQ ID NO: 10976 - RNA, 19 nt, Homo sapiens
augugguuagcaugacugc

SEQ ID NO: 10977 - RNA, 22 nt, Homo sapiens
ucuguugguucuuugaggagga

SEQ ID NO: 10978 - RNA, 22 nt, Homo sapiens
uggaagacaggcuguauuuuaa

SEQ ID NO: 10979 - RNA, 22 nt, Homo sapiens
aauugaaugauaugggacauuu

SEQ ID NO: 10980 - RNA, 22 nt, Homo sapiens
ucuuuggagacaaccccagucu

SEQ ID NO: 10981 - RNA, 20 nt, Homo sapiens
uggugguuuuaugugguuua

SEQ ID NO: 10982 - RNA, 22 nt, Homo sapiens
gcacauggccccaucgugccga

SEQ ID NO: 10983 - RNA, 22 nt, Homo sapiens
ucuugcaauuuccuuaguggug

SEQ ID NO: 10984 - RNA, 22 nt, Homo sapiens
cuagaagguaagagcuggaugc

SEQ ID NO: 10985 - RNA, 22 nt, Homo sapiens
uggaaacuuauguucuucugug

SEQ ID NO: 10986 - RNA, 22 nt, Homo sapiens
cuuuuacacuguuggugggaau

SEQ ID NO: 10987 - RNA, 22 nt, Homo sapiens
ccaggguugcuuuagauucuga

SEQ ID NO: 10988 - RNA, 22 nt, Homo sapiens
aucccugugacgagcaucccua

SEQ ID NO: 10989 - RNA, 17 nt, Homo sapiens
acuuuuugaggaggcau

SEQ ID NO: 10990 - RNA, 22 nt, Homo sapiens
ugagcaaaauuuuggacauaga

SEQ ID NO: 10991 - RNA, 22 nt, Homo sapiens
ucuggaauguaaaguuuauggg

SEQ ID NO: 10992 - RNA, 18 nt, Homo sapiens
uaagaugcagccuauucc

SEQ ID NO: 10993 - RNA, 22 nt, Homo sapiens
gugaccucauuacggggccugc

SEQ ID NO: 10994 - RNA, 22 nt, Homo sapiens
auugcacuccagccugggugac

SEQ ID NO: 10995 - RNA, 22 nt, Homo sapiens
acugcacuccagccugcugggu

SEQ ID NO: 10996 - RNA, 22 nt, Homo sapiens
cugaggugggaguuuuucucau

SEQ ID NO: 10997 - RNA, 22 nt, Homo sapiens
cuguccugcagagucagaauga

SEQ ID NO: 10998 - RNA, 21 nt, Homo sapiens
ugaauacugcugcucccuuug

SEQ ID NO: 10999 - RNA, 22 nt, Homo sapiens
gugagcagagaucgcgugauug

SEQ ID NO: 11000 - RNA, 22 nt, Homo sapiens
ggaaagacaccuuacuauguua

SEQ ID NO: 11001 - RNA, 18 nt, Homo sapiens
uagcagacaucauugggg

SEQ ID NO: 11002 - RNA, 22 nt, Homo sapiens
cagcccguaaucccagcacuuu

SEQ ID NO: 11003 - RNA, 22 nt, Homo sapiens
ugucuaaagaauggcagacuca

SEQ ID NO: 11004 - RNA, 22 nt, Homo sapiens
gagagucacagugaauguggca

SEQ ID NO: 11005 - RNA, 22 nt, Homo sapiens
guuggcuguuucccccaaguga

SEQ ID NO: 11006 - RNA, 19 nt, Homo sapiens
ggucauggagguuguguga

SEQ ID NO: 11007 - RNA, 22 nt, Homo sapiens
ugaguuagguaauaauaaauau

SEQ ID NO: 11008 - RNA, 22 nt, Homo sapiens
ugacuagcagagugagaaacuc

SEQ ID NO: 11009 - RNA, 22 nt, Homo sapiens
uugcuggugguucgagcaacac

SEQ ID NO: 11010 - RNA, 19 nt, Homo sapiens
caugauacugcucccucuc

SEQ ID NO: 11011 - RNA, 22 nt, Homo sapiens
ucaguggauuauuaaagucacc

SEQ ID NO: 11012 - RNA, 22 nt, Homo sapiens
ugagaguauaaauugaugcagc

SEQ ID NO: 11013 - RNA, 22 nt, Homo sapiens
ugagaucgaguaucgcugucac

SEQ ID NO: 11014 - RNA, 22 nt, Homo sapiens
ucuuugguaauggaugucugau

SEQ ID NO: 11015 - RNA, 22 nt, Homo sapiens
ggugaauuguaccccauaggau

SEQ ID NO: 11016 - RNA, 22 nt, Homo sapiens
ucucaguggcuuccucacuuuu

SEQ ID NO: 11017 - RNA, 22 nt, Homo sapiens
cuaauacguaguauauccauga

SEQ ID NO: 11018 - RNA, 22 nt, Homo sapiens
uggguaauggagaaauaaaucu

SEQ ID NO: 11019 - RNA, 22 nt, Homo sapiens
cucucaagaugcugggauuaca

SEQ ID NO: 11020 - RNA, 22 nt, Homo sapiens
cucuuugaugugaaccgugguu

SEQ ID NO: 11021 - RNA, 20 nt, Homo sapiens
aaaugcuguaauguuuggga

SEQ ID NO: 11022 - RNA, 22 nt, Homo sapiens
uuagguaggugcuuuuuucaca

SEQ ID NO: 11023 - RNA, 22 nt, Homo sapiens
uaaagcauguaauuagguuaga

SEQ ID NO: 11024 - RNA, 20 nt, Homo sapiens
uuuuggacuaaaggcauccc

SEQ ID NO: 11025 - RNA, 22 nt, Homo sapiens
ccccauuguugugguuuuaucu

SEQ ID NO: 11026 - RNA, 22 nt, Homo sapiens
gcaaagaaugcagauuugccuc

SEQ ID NO: 11027 - RNA, 22 nt, Homo sapiens
uauucaucuuaagcuuuggcuu

SEQ ID NO: 11028 - RNA, 22 nt, Homo sapiens
ugacuagacuugcaagguugca

SEQ ID NO: 11029 - RNA, 22 nt, Homo sapiens
ugauggcauuuggaguugggac

SEQ ID NO: 11030 - RNA, 23 nt, Homo sapiens
aagguaagcuagaaagauguaga

SEQ ID NO: 11031 - RNA, 22 nt, Homo sapiens
aagcuggauuuaguguggagca

SEQ ID NO: 11032 - RNA, 22 nt, Homo sapiens
cuucggugaguagauggguuaa

SEQ ID NO: 11033 - RNA, 22 nt, Homo sapiens
gcuaaggcagggcaaucauuug

SEQ ID NO: 11034 - RNA, 21 nt, Homo sapiens
uuuugcacacuaugcagcuuu

SEQ ID NO: 11035 - RNA, 22 nt, Homo sapiens
uucagugagacgaaaacaacaa

SEQ ID NO: 11036 - RNA, 22 nt, Homo sapiens
aauguguuuugaaaucaggaag

SEQ ID NO: 11037 - RNA, 22 nt, Homo sapiens
auuguacuccagccuguggagc

SEQ ID NO: 11038 - RNA, 22 nt, Homo sapiens
agguucccuuuuggccugggau

SEQ ID NO: 11039 - RNA, 22 nt, Homo sapiens
ucagauugaugcauacuuaaau

SEQ ID NO: 11040 - RNA, 22 nt, Homo sapiens
guacaguuuucaguguucacug

SEQ ID NO: 11041 - RNA, 22 nt, Homo sapiens
aauuaguugucgugagaguggu

SEQ ID NO: 11042 - RNA, 22 nt, Homo sapiens
aauggcaaauguuuucuguuga

SEQ ID NO: 11043 - RNA, 22 nt, Homo sapiens
uaggacaaugguacagcagaaa

SEQ ID NO: 11044 - RNA, 22 nt, Homo sapiens
cugauacugagaccuuggguua

SEQ ID NO: 11045 - RNA, 22 nt, Homo sapiens
ucacauuguacaaacagguaag

SEQ ID NO: 11046 - RNA, 22 nt, Homo sapiens
cacugcacuccagccuaagagg

SEQ ID NO: 11047 - RNA, 22 nt, Homo sapiens
uggucuccuuuguacccugggc

SEQ ID NO: 11048 - RNA, 22 nt, Homo sapiens
uugagauggagccucacucugc

SEQ ID NO: 11049 - RNA, 22 nt, Homo sapiens
uggaaugugaauaacuuccuuc

SEQ ID NO: 11050 - RNA, 22 nt, Homo sapiens
acaguaaugggccccuuuuccu

SEQ ID NO: 11051 - RNA, 22 nt, Homo sapiens
agcagcauggguauaaaucucc

SEQ ID NO: 11052 - RNA, 18 nt, Homo sapiens
uugaauagagccaagcac

SEQ ID NO: 11053 - RNA, 22 nt, Homo sapiens
ugucauguggcuaacgauucau

SEQ ID NO: 11054 - RNA, 22 nt, Homo sapiens
aucacauuuauaguggcacgca

SEQ ID NO: 11055 - RNA, 18 nt, Homo sapiens
aaagugaugucauucuuu

SEQ ID NO: 11056 - RNA, 22 nt, Homo sapiens
uagguagaaucuugaagccauu

SEQ ID NO: 11057 - RNA, 22 nt, Homo sapiens
uugagggaagccagaggucugc

SEQ ID NO: 11058 - RNA, 22 nt, Homo sapiens
ucagauacuggugacaugaaug

SEQ ID NO: 11059 - RNA, 22 nt, Homo sapiens
uucaguggagaggcugaguggu

SEQ ID NO: 11060 - RNA, 23 nt, Homo sapiens
uugaaaagucaguagccucugau

SEQ ID NO: 11061 - RNA, 22 nt, Homo sapiens
uucauccccuccaaaucucaug

SEQ ID NO: 11062 - RNA, 22 nt, Homo sapiens
augaggcaggaaaggcguaucu

SEQ ID NO: 11063 - RNA, 22 nt, Homo sapiens
uugaguuuaucuaaagaccugg

SEQ ID NO: 11064 - RNA, 22 nt, Homo sapiens
ugugagacugguucugaaccca

SEQ ID NO: 11065 - RNA, 18 nt, Homo sapiens
uuugguccuuuauaaaca

SEQ ID NO: 11066 - RNA, 22 nt, Homo sapiens
ggcaaugucagcuaaugaugga

SEQ ID NO: 11067 - RNA, 22 nt, Homo sapiens
ggucuuggagaauuguccuggg

SEQ ID NO: 11068 - RNA, 22 nt, Homo sapiens
auacaguauggagggcccagcu

SEQ ID NO: 11069 - RNA, 22 nt, Homo sapiens
auuguaccccaauguacaauau

SEQ ID NO: 11070 - RNA, 22 nt, Homo sapiens
aagcugugucuugucagcuacc

SEQ ID NO: 11071 - RNA, 22 nt, Homo sapiens
aaggcaagguggauaaugaagc

SEQ ID NO: 11072 - RNA, 22 nt, Homo sapiens
cuuggcuuguuguccccugcuc

SEQ ID NO: 11073 - RNA, 22 nt, Homo sapiens
acauggcacugcgggcuucuug

SEQ ID NO: 11074 - RNA, 22 nt, Homo sapiens
uccuucauuugucaacucuagu

SEQ ID NO: 11075 - RNA, 22 nt, Homo sapiens
uugcaaggugcagcuuaugcaa

SEQ ID NO: 11076 - RNA, 21 nt, Homo sapiens
uuuguguccccacccaaaucu

SEQ ID NO: 11077 - RNA, 22 nt, Homo sapiens
uuuggcagaaaacuaaaaggua

SEQ ID NO: 11078 - RNA, 22 nt, Homo sapiens
aaggcagugugcacauaacacu

SEQ ID NO: 11079 - RNA, 22 nt, Homo sapiens
guaaauguccugcuacagagug

SEQ ID NO: 11080 - RNA, 22 nt, Homo sapiens
uccaguggacagacauaccaug

SEQ ID NO: 11081 - RNA, 22 nt, Homo sapiens
auuggguuaaaggauaugaaca

SEQ ID NO: 11082 - RNA, 18 nt, Homo sapiens
uaaauugcuucaccugag

SEQ ID NO: 11083 - RNA, 22 nt, Homo sapiens
acuagguaguaaucugcagaga

SEQ ID NO: 11084 - RNA, 22 nt, Homo sapiens
auccacagugucaauguuguga

SEQ ID NO: 11085 - RNA, 22 nt, Homo sapiens
uaggauaguccuccugagaccu

SEQ ID NO: 11086 - RNA, 21 nt, Homo sapiens
uuugcauauguugaaccagcc

SEQ ID NO: 11087 - RNA, 22 nt, Homo sapiens
ugcuuuguugaaaaucauuugg

SEQ ID NO: 11088 - RNA, 22 nt, Homo sapiens
acccugucacucccaucaauuu

SEQ ID NO: 11089 - RNA, 22 nt, Homo sapiens
uggcgggaaaguugggagaaga

SEQ ID NO: 11090 - RNA, 22 nt, Homo sapiens
gugcacaugcgugcgcacauau

SEQ ID NO: 11091 - RNA, 22 nt, Homo sapiens
ugaacagcuaucuugucagugu

SEQ ID NO: 11092 - RNA, 22 nt, Homo sapiens
acugcacuucagccuugugaca

SEQ ID NO: 11093 - RNA, 22 nt, Homo sapiens
uucaagugaacaaaaugaggag

SEQ ID NO: 11094 - RNA, 22 nt, Homo sapiens
gucuaugguucaggguggagug

SEQ ID NO: 11095 - RNA, 21 nt, Homo sapiens
cuuugguagaguuuuuagggu

SEQ ID NO: 11096 - RNA, 22 nt, Homo sapiens
gucuccgagccguguggagccg

SEQ ID NO: 11097 - RNA, 22 nt, Homo sapiens
guagaagcacaggugaguuggu

SEQ ID NO: 11098 - RNA, 22 nt, Homo sapiens
uugcagagucaguuauuuugcc

SEQ ID NO: 11099 - RNA, 22 nt, Homo sapiens
aaaugcaccacucuggugcagg

SEQ ID NO: 11100 - RNA, 22 nt, Homo sapiens
ucucauggagguagagaguaaa

SEQ ID NO: 11101 - RNA, 19 nt, Homo sapiens
ucuaaaucucuugauagac

SEQ ID NO: 11102 - RNA, 22 nt, Homo sapiens
aacugcacuaggacagguuuuu

SEQ ID NO: 11103 - RNA, 22 nt, Homo sapiens
uaggacacaggacauauguaga

SEQ ID NO: 11104 - RNA, 22 nt, Homo sapiens
uuggcgugaaacagccuuacau

SEQ ID NO: 11105 - RNA, 19 nt, Homo sapiens
ucucugguguuggagggga

SEQ ID NO: 11106 - RNA, 21 nt, Homo sapiens
uggaauuaauggagagguguu

SEQ ID NO: 11107 - RNA, 22 nt, Homo sapiens
ugagaauguagggcucucccag

SEQ ID NO: 11108 - RNA, 22 nt, Homo sapiens
uggaugacuguuauaugcauau

SEQ ID NO: 11109 - RNA, 18 nt, Homo sapiens
agcaucacugaucauccu

SEQ ID NO: 11110 - RNA, 22 nt, Homo sapiens
uugggguaggaauauggaauga

SEQ ID NO: 11111 - RNA, 22 nt, Homo sapiens
uaggagugugaacccuguuuug

SEQ ID NO: 11112 - RNA, 22 nt, Homo sapiens
agcugugucuucuuaaagauuu

SEQ ID NO: 11113 - RNA, 22 nt, Homo sapiens
ugggcaguauggucauuuucgu

SEQ ID NO: 11114 - RNA, 22 nt, Homo sapiens
ucacauggaggugauaguugaa

SEQ ID NO: 11115 - RNA, 19 nt, Homo sapiens
uuuuccccuuucuuaagac

SEQ ID NO: 11116 - RNA, 22 nt, Homo sapiens
ugcugcauuggggauuaaguuu

SEQ ID NO: 11117 - RNA, 22 nt, Homo sapiens
ggcaagaucuuggcucacugaa

SEQ ID NO: 11118 - RNA, 20 nt, Homo sapiens
guggaaguagaaacauaugu

SEQ ID NO: 11119 - RNA, 22 nt, Homo sapiens
cucagugaagggcaagaggcaa

SEQ ID NO: 11120 - RNA, 22 nt, Homo sapiens
gagaacugagauaagugauauu

SEQ ID NO: 11121 - RNA, 22 nt, Homo sapiens
accgggcugagcgcaggccccg

SEQ ID NO: 11122 - RNA, 22 nt, Homo sapiens
gucaugaaguuuugaaugaaau

SEQ ID NO: 11123 - RNA, 22 nt, Homo sapiens
agugcacucuuuccucucuuac

SEQ ID NO: 11124 - RNA, 22 nt, Homo sapiens
cauugcucuuacagagugagua

SEQ ID NO: 11125 - RNA, 22 nt, Homo sapiens
gcuguguguuaucagaaauugc

SEQ ID NO: 11126 - RNA, 22 nt, Homo sapiens
aagcuggagugcaguggugcaa

SEQ ID NO: 11127 - RNA, 22 nt, Homo sapiens
uccacagugguugaacuaguuu

SEQ ID NO: 11128 - RNA, 22 nt, Homo sapiens
ugagaugcucgccggccagcau

SEQ ID NO: 11129 - RNA, 22 nt, Homo sapiens
uggaccccuucuccuauuaaaa

SEQ ID NO: 11130 - RNA, 22 nt, Homo sapiens
uguacaugggacaggaggagag

SEQ ID NO: 11131 - RNA, 23 nt, Homo sapiens
uaucucaaugcacagagaggaaa

SEQ ID NO: 11132 - RNA, 22 nt, Homo sapiens
guaagacuuauuuucuuuauca

SEQ ID NO: 11133 - RNA, 22 nt, Homo sapiens
gguagacaucgugcucugugau

SEQ ID NO: 11134 - RNA, 22 nt, Homo sapiens
ugguagguuuauaaagaauuua

SEQ ID NO: 11135 - RNA, 22 nt, Homo sapiens
guauugaguaaauguuuauugg

SEQ ID NO: 11136 - RNA, 22 nt, Homo sapiens
uuggcauugaguuucaaaucau

SEQ ID NO: 11137 - RNA, 22 nt, Homo sapiens
cgugaggaguauuuuuaggugc

SEQ ID NO: 11138 - RNA, 22 nt, Homo sapiens
ugaauauguuaaauaauguucu

SEQ ID NO: 11139 - RNA, 22 nt, Homo sapiens
uugaggaggcagucucuccauu

SEQ ID NO: 11140 - RNA, 21 nt, Homo sapiens
uuugugguuacugugugagcu

SEQ ID NO: 11141 - RNA, 22 nt, Homo sapiens
ugaauguaacuaaaggacuuuu

SEQ ID NO: 11142 - RNA, 22 nt, Homo sapiens
ugaggcuagucagaucagauga

SEQ ID NO: 11143 - RNA, 22 nt, Homo sapiens
uugcaggcaugagccaccgugc

SEQ ID NO: 11144 - RNA, 22 nt, Homo sapiens
augaacucaucauuuuuugugg

SEQ ID NO: 11145 - RNA, 22 nt, Homo sapiens
aguaccauuugacaugggaccc

SEQ ID NO: 11146 - RNA, 22 nt, Homo sapiens
gagacggagucuugcucuguug

SEQ ID NO: 11147 - RNA, 22 nt, Homo sapiens
gagacggagucucgcucugucg

SEQ ID NO: 11148 - RNA, 22 nt, Homo sapiens
cugagagaggagcuaaaacugc

SEQ ID NO: 11149 - RNA, 22 nt, Homo sapiens
uugaggcaaugaggagaagcug

SEQ ID NO: 11150 - RNA, 22 nt, Homo sapiens
cagagguaagcaagucagcauu

SEQ ID NO: 11151 - RNA, 22 nt, Homo sapiens
gggcagaugucuggacaccuca

SEQ ID NO: 11152 - RNA, 22 nt, Homo sapiens
ugaaucauuucuugucuucagu

SEQ ID NO: 11153 - RNA, 22 nt, Homo sapiens
auugaacaugccauauguacca

SEQ ID NO: 11154 - RNA, 22 nt, Homo sapiens
uacucugcaguaauuccagccc

SEQ ID NO: 11155 - RNA, 22 nt, Homo sapiens
cuuguaccccugagucccauaa

SEQ ID NO: 11156 - RNA, 20 nt, Homo sapiens
guugaugcugaaguugcuua

SEQ ID NO: 11157 - RNA, 22 nt, Homo sapiens
uuugcauaauaagauuagggug

SEQ ID NO: 11158 - RNA, 22 nt, Homo sapiens
aagcugguguugcugcucuguu

SEQ ID NO: 11159 - RNA, 16 nt, Homo sapiens
uguuauggagacagcu

SEQ ID NO: 11160 - RNA, 22 nt, Homo sapiens
ugauuugucugcaggaauagug

SEQ ID NO: 11161 - RNA, 22 nt, Homo sapiens
uuaaugaacuuuauuuuguaga

SEQ ID NO: 11162 - RNA, 22 nt, Homo sapiens
guuugcacuccuaugagaaucu

SEQ ID NO: 11163 - RNA, 22 nt, Homo sapiens
ggagguagguuugugauuugua

SEQ ID NO: 11164 - RNA, 23 nt, Homo sapiens
aauugcacauuccuugcuggcag

SEQ ID NO: 11165 - RNA, 22 nt, Homo sapiens
ggugcagcacaccaacauggca

SEQ ID NO: 11166 - RNA, 22 nt, Homo sapiens
cacuggucagugaaacaguauu

SEQ ID NO: 11167 - RNA, 18 nt, Homo sapiens
uggauaugaaauucugga

SEQ ID NO: 11168 - RNA, 22 nt, Homo sapiens
ugacuagugcccuuugcugccu

SEQ ID NO: 11169 - RNA, 22 nt, Homo sapiens
uguuuaguuaagacauagaauu

SEQ ID NO: 11170 - RNA, 22 nt, Homo sapiens
uaaggcucuuguuauuuugagg

SEQ ID NO: 11171 - RNA, 22 nt, Homo sapiens
ugagucaauucuaacaauggca

SEQ ID NO: 11172 - RNA, 22 nt, Homo sapiens
ugacuugauccauggggcucca

SEQ ID NO: 11173 - RNA, 22 nt, Homo sapiens
gugugguaggauugguuacuca

SEQ ID NO: 11174 - RNA, 22 nt, Homo sapiens
guggaaaaguaguugcgguuuu

SEQ ID NO: 11175 - RNA, 23 nt, Homo sapiens
ucuggcuuugggaugcucaaggg

SEQ ID NO: 11176 - RNA, 22 nt, Homo sapiens
acaaaguaggcagugggcugga

SEQ ID NO: 11177 - RNA, 22 nt, Homo sapiens
accccuuacaucagcucuggua

SEQ ID NO: 11178 - RNA, 21 nt, Homo sapiens
uuuacuguggacccauugcuu

SEQ ID NO: 11179 - RNA, 22 nt, Homo sapiens
ugcaagaggagacuguacucag

SEQ ID NO: 11180 - RNA, 22 nt, Homo sapiens
guuugcagaucaugaagaaccc

SEQ ID NO: 11181 - RNA, 22 nt, Homo sapiens
uguuauugagguuacuuauaag

SEQ ID NO: 11182 - RNA, 22 nt, Homo sapiens
ucauugguugcguaauuugauu

SEQ ID NO: 11183 - RNA, 22 nt, Homo sapiens
ucagugucugugauggagaggu

SEQ ID NO: 11184 - RNA, 22 nt, Homo sapiens
uaaauggauauugccaucuccu

SEQ ID NO: 11185 - RNA, 22 nt, Homo sapiens
gcaugugaauguguaagaaaau

SEQ ID NO: 11186 - RNA, 22 nt, Homo sapiens
uugguaccccugguguacuaau

SEQ ID NO: 11187 - RNA, 21 nt, Homo sapiens
ugcucaugaguaaugcaguga

SEQ ID NO: 11188 - RNA, 22 nt, Homo sapiens
gucauauaggguuuaccuguau

SEQ ID NO: 11189 - RNA, 22 nt, Homo sapiens
auagaauguauuaguaaauuug

SEQ ID NO: 11190 - RNA, 22 nt, Homo sapiens
cuguguaguacuagauugagca

SEQ ID NO: 11191 - RNA, 21 nt, Homo sapiens
guggccuuuggagcaugucag

SEQ ID NO: 11192 - RNA, 22 nt, Homo sapiens
uugagauggauagacauagcau

SEQ ID NO: 11193 - RNA, 22 nt, Homo sapiens
ccagcaccauuuauuaaauagg

SEQ ID NO: 11194 - RNA, 17 nt, Homo sapiens
guggaaugucaugucaa

SEQ ID NO: 11195 - RNA, 22 nt, Homo sapiens
auuaauguaauuaguaaaguug

SEQ ID NO: 11196 - RNA, 20 nt, Homo sapiens
ucucauggagguagagaaua

SEQ ID NO: 11197 - RNA, 22 nt, Homo sapiens
ucacaugugacauauauauuug

SEQ ID NO: 11198 - RNA, 21 nt, Homo sapiens
uuacaauggcuccuugaaggu

SEQ ID NO: 11199 - RNA, 22 nt, Homo sapiens
guacacauacauauaugugugu

SEQ ID NO: 11200 - RNA, 22 nt, Homo sapiens
ugacuauaaauaagcaagggcu

SEQ ID NO: 11201 - RNA, 22 nt, Homo sapiens
ugacagcugaagauguugaacc

SEQ ID NO: 11202 - RNA, 22 nt, Homo sapiens
uaguagugucccugacuaucac

SEQ ID NO: 11203 - RNA, 23 nt, Homo sapiens
uuucuugggcaugcuaugucagu

SEQ ID NO: 11204 - RNA, 22 nt, Homo sapiens
augggaaaaucagaaggccugg

SEQ ID NO: 11205 - RNA, 22 nt, Homo sapiens
ccuccauuugugucaggaaguc

SEQ ID NO: 11206 - RNA, 22 nt, Homo sapiens
ggcagguaaggagugggagccu

SEQ ID NO: 11207 - RNA, 22 nt, Homo sapiens
agcacgauggggucacgaugag

SEQ ID NO: 11208 - RNA, 22 nt, Homo sapiens
ugauaacauugggggaagcuga

SEQ ID NO: 11209 - RNA, 20 nt, Homo sapiens
agcuggguguguuggugcau

SEQ ID NO: 11210 - RNA, 22 nt, Homo sapiens
ugaguucuuuuagggauauugc

SEQ ID NO: 11211 - RNA, 22 nt, Homo sapiens
uugagguauugauaaaacauuu

SEQ ID NO: 11212 - RNA, 23 nt, Homo sapiens
uggguucauucuugaagucagug

SEQ ID NO: 11213 - RNA, 22 nt, Homo sapiens
aauggcucuuccuggaguugug

SEQ ID NO: 11214 - RNA, 22 nt, Homo sapiens
ugaaaugcagaacuuuaggucu

SEQ ID NO: 11215 - RNA, 22 nt, Homo sapiens
uaaugcuaucugggccaggggu

SEQ ID NO: 11216 - RNA, 18 nt, Homo sapiens
uacuaguaaggcuucuga

SEQ ID NO: 11217 - RNA, 22 nt, Homo sapiens
uaguagcauaccuaaguauacu

SEQ ID NO: 11218 - RNA, 19 nt, Homo sapiens
ucucaguguuggucaggug

SEQ ID NO: 11219 - RNA, 22 nt, Homo sapiens
agagugcaaagguuggggcugg

SEQ ID NO: 11220 - RNA, 17 nt, Homo sapiens
aaugagacauuucugcu

SEQ ID NO: 11221 - RNA, 22 nt, Homo sapiens
agaugccucauguucuagguuc

SEQ ID NO: 11222 - RNA, 22 nt, Homo sapiens
gauguguuuuaggaucucagca

SEQ ID NO: 11223 - RNA, 22 nt, Homo sapiens
gagacagugucagccauugaaa

SEQ ID NO: 11224 - RNA, 22 nt, Homo sapiens
gugcauacucuggagacauugu

SEQ ID NO: 11225 - RNA, 22 nt, Homo sapiens
ugagccaugggguaaaugugau

SEQ ID NO: 11226 - RNA, 22 nt, Homo sapiens
ugaggcaggagaacggcuugaa

SEQ ID NO: 11227 - RNA, 22 nt, Homo sapiens
aguuuuugcugauagcaugcuu

SEQ ID NO: 11228 - RNA, 18 nt, Homo sapiens
acauucagcuugaagaua

SEQ ID NO: 11229 - RNA, 22 nt, Homo sapiens
aaugauacuguguacaagggca

SEQ ID NO: 11230 - RNA, 22 nt, Homo sapiens
cagcucauugcagucucgaccu

SEQ ID NO: 11231 - RNA, 22 nt, Homo sapiens
uagaucaacuuugguaagagaa

SEQ ID NO: 11232 - RNA, 21 nt, Homo sapiens
ugaaaugcaugugcacauuaa

SEQ ID NO: 11233 - RNA, 22 nt, Homo sapiens
ggagcugugauuugaguccaga

SEQ ID NO: 11234 - RNA, 22 nt, Homo sapiens
guuggaguuaagcaguaaugaa

SEQ ID NO: 11235 - RNA, 22 nt, Homo sapiens
ucucagugaaauaaauuauuuu

SEQ ID NO: 11236 - RNA, 22 nt, Homo sapiens
aucaaagugaauuaaugagaau

SEQ ID NO: 11237 - RNA, 22 nt, Homo sapiens
cuuugcaaauggccuuuccaag

SEQ ID NO: 11238 - RNA, 22 nt, Homo sapiens
uggaaucuuaggugaaggcuuu

SEQ ID NO: 11239 - RNA, 22 nt, Homo sapiens
ggccagaugaucuaugaaggaa

SEQ ID NO: 11240 - RNA, 22 nt, Homo sapiens
ucuuagugcggcugcugcagcc

SEQ ID NO: 11241 - RNA, 21 nt, Homo sapiens
auagggcuuguugauaguuaa

SEQ ID NO: 11242 - RNA, 22 nt, Homo sapiens
acacuauugagguuuguuugca

SEQ ID NO: 11243 - RNA, 22 nt, Homo sapiens
gucucuugguuuagagcauuua

SEQ ID NO: 11244 - RNA, 22 nt, Homo sapiens
aagggagcugcauaaucuugug

SEQ ID NO: 11245 - RNA, 22 nt, Homo sapiens
guguuauggagccaaacuacua

SEQ ID NO: 11246 - RNA, 22 nt, Homo sapiens
ugaguguccaccccuuucacag

SEQ ID NO: 11247 - RNA, 22 nt, Homo sapiens
ugcaccauugucaccuggguga

SEQ ID NO: 11248 - RNA, 22 nt, Homo sapiens
agagaucauuuuguuucaaauc

SEQ ID NO: 11249 - RNA, 22 nt, Homo sapiens
uuacccuuugcauuaccaacaa

SEQ ID NO: 11250 - RNA, 22 nt, Homo sapiens
guuauuguccauuuauuuagca

SEQ ID NO: 11251 - RNA, 22 nt, Homo sapiens
gucagcaucaccaugucuauga

SEQ ID NO: 11252 - RNA, 22 nt, Homo sapiens
ucuaagacuaagggcuagcuuc

SEQ ID NO: 11253 - RNA, 22 nt, Homo sapiens
uaucccaguggauguaccccau

SEQ ID NO: 11254 - RNA, 22 nt, Homo sapiens
ugaauuguuucauucuuuacau

SEQ ID NO: 11255 - RNA, 22 nt, Homo sapiens
aggaagguaaacuaacuugccu

SEQ ID NO: 11256 - RNA, 22 nt, Homo sapiens
cuggcacagugucagaaacaca

SEQ ID NO: 11257 - RNA, 22 nt, Homo sapiens
cccagagacagaaugauaaacu

SEQ ID NO: 11258 - RNA, 22 nt, Homo sapiens
ugagauuguucuaugucugguu

SEQ ID NO: 11259 - RNA, 22 nt, Homo sapiens
ugcaugcaucuuuuauaguagc

SEQ ID NO: 11260 - RNA, 22 nt, Homo sapiens
uugcauauguugaaccagccuu

SEQ ID NO: 11261 - RNA, 22 nt, Homo sapiens
gagauggagacuuggccuuaaa

SEQ ID NO: 11262 - RNA, 22 nt, Homo sapiens
auggcaaaauguuccuaguggu

SEQ ID NO: 11263 - RNA, 22 nt, Homo sapiens
auguggcauuucucauucauuu

SEQ ID NO: 11264 - RNA, 22 nt, Homo sapiens
cuggcuaagugcuugagugugc

SEQ ID NO: 11265 - RNA, 20 nt, Homo sapiens
ugaguuccuuguucagaagc

SEQ ID NO: 11266 - RNA, 22 nt, Homo sapiens
uuuggcauuuaaauaugcaugg

SEQ ID NO: 11267 - RNA, 22 nt, Homo sapiens
ugaacacaucuccugguaccug

SEQ ID NO: 11268 - RNA, 22 nt, Homo sapiens
ugccaguguugccuuucacuag

SEQ ID NO: 11269 - RNA, 22 nt, Homo sapiens
accugcacagccgaacauagac

SEQ ID NO: 11270 - RNA, 22 nt, Homo sapiens
accuugcacugagccgagauug

SEQ ID NO: 11271 - RNA, 17 nt, Homo sapiens
accccuaccucagaagc

SEQ ID NO: 11272 - RNA, 22 nt, Homo sapiens
ugucaugagucuccuccaucuu

SEQ ID NO: 11273 - RNA, 22 nt, Homo sapiens
uaugagcacauauguaucuaug

SEQ ID NO: 11274 - RNA, 22 nt, Homo sapiens
uacaaagcuuucugcaaaucau

SEQ ID NO: 11275 - RNA, 22 nt, Homo sapiens
ucacauucaauuguaauccccg

SEQ ID NO: 11276 - RNA, 22 nt, Homo sapiens
gugaaauauuuaacguccaggu

SEQ ID NO: 11277 - RNA, 22 nt, Homo sapiens
uggucaguugaguccuugccaa

SEQ ID NO: 11278 - RNA, 22 nt, Homo sapiens
aagcuggcuuucauugagugcu

SEQ ID NO: 11279 - RNA, 20 nt, Homo sapiens
augguaguagcaccuuuaca

SEQ ID NO: 11280 - RNA, 21 nt, Homo sapiens
augguacugucucuggagaua

SEQ ID NO: 11281 - RNA, 22 nt, Homo sapiens
gggcaugauggugcacacaugu

SEQ ID NO: 11282 - RNA, 22 nt, Homo sapiens
acugcacuccagccuuggcaac

SEQ ID NO: 11283 - RNA, 22 nt, Homo sapiens
agcuuuuugggcagcuauugac

SEQ ID NO: 11284 - RNA, 22 nt, Homo sapiens
uacuaguaagggugguuuggcu

SEQ ID NO: 11285 - RNA, 21 nt, Homo sapiens
ucuuuggucaccaguuuucau

SEQ ID NO: 11286 - RNA, 22 nt, Homo sapiens
uuuggcauuuuacuacucaaau

SEQ ID NO: 11287 - RNA, 22 nt, Homo sapiens
ucuuuggucuacuuucauaugu

SEQ ID NO: 11288 - RNA, 22 nt, Homo sapiens
uucacgguguucacgggggucc

SEQ ID NO: 11289 - RNA, 22 nt, Homo sapiens
guauuaguuaucuacugcugug

SEQ ID NO: 11290 - RNA, 22 nt, Homo sapiens
ucugucuuugucaggaccagag

SEQ ID NO: 11291 - RNA, 22 nt, Homo sapiens
uugcacuauuaguauagauguc

SEQ ID NO: 11292 - RNA, 22 nt, Homo sapiens
uuuuggcuuaaagagaauguau

SEQ ID NO: 11293 - RNA, 22 nt, Homo sapiens
ggauuagagauguuauuaagag

SEQ ID NO: 11294 - RNA, 22 nt, Homo sapiens
guucacacuugcaaccccagca

SEQ ID NO: 11295 - RNA, 22 nt, Homo sapiens
caaagcacuuggcuuggaagau

SEQ ID NO: 11296 - RNA, 22 nt, Homo sapiens
auagucaaaucucauuaccccc

SEQ ID NO: 11297 - RNA, 22 nt, Homo sapiens
ugguuaucacuuuccuuccauc

SEQ ID NO: 11298 - RNA, 22 nt, Homo sapiens
ucagugacugcugcuuguauac

SEQ ID NO: 11299 - RNA, 22 nt, Homo sapiens
uagcaguaucccaccaucuggu

SEQ ID NO: 11300 - RNA, 22 nt, Homo sapiens
agugauuuuaacuuccagcaau

SEQ ID NO: 11301 - RNA, 23 nt, Homo sapiens
uauaacuuuuaauuuacuggccu

SEQ ID NO: 11302 - RNA, 22 nt, Homo sapiens
augugcacaacgugcagguuug

SEQ ID NO: 11303 - RNA, 20 nt, Homo sapiens
agguaguuauacaaaugugu

SEQ ID NO: 11304 - RNA, 22 nt, Homo sapiens
augcuguuuugaauucucuaga

SEQ ID NO: 11305 - RNA, 22 nt, Homo sapiens
auagcugcucaggcuuuccuca

SEQ ID NO: 11306 - RNA, 20 nt, Homo sapiens
acagcauagccuuuuaaagc

SEQ ID NO: 11307 - RNA, 22 nt, Homo sapiens
cccucauucauucauccuaugu

SEQ ID NO: 11308 - RNA, 22 nt, Homo sapiens
agaauguauauucuguaguugu

SEQ ID NO: 11309 - RNA, 22 nt, Homo sapiens
gaucagagugaaccuuguuaug

SEQ ID NO: 11310 - RNA, 22 nt, Homo sapiens
uagcagugugaaaacggacuaa

SEQ ID NO: 11311 - RNA, 22 nt, Homo sapiens
agaugguguuggcugaguguau

SEQ ID NO: 11312 - RNA, 21 nt, Homo sapiens
cacugcaucacaggacagcau

SEQ ID NO: 11313 - RNA, 22 nt, Homo sapiens
uuccacaaugguugaacuaguu

SEQ ID NO: 11314 - RNA, 20 nt, Homo sapiens
ucuugguuggaggucuuuua

SEQ ID NO: 11315 - RNA, 22 nt, Homo sapiens
ugcuaucauugauuagugaugu

SEQ ID NO: 11316 - RNA, 22 nt, Homo sapiens
aucaccgugggagauccugccu

SEQ ID NO: 11317 - RNA, 22 nt, Homo sapiens
augugcuugagggaaaucaguu

SEQ ID NO: 11318 - RNA, 22 nt, Homo sapiens
uggaaaguacugagguccaccu

SEQ ID NO: 11319 - RNA, 22 nt, Homo sapiens
uuccaguguuugacucaccuuu

SEQ ID NO: 11320 - RNA, 22 nt, Homo sapiens
augguuugugcuccuauaagaa

SEQ ID NO: 11321 - RNA, 22 nt, Homo sapiens
ugucacccuuuauccauuuccu

SEQ ID NO: 11322 - RNA, 22 nt, Homo sapiens
uauuugcacucccaucauggug

SEQ ID NO: 11323 - RNA, 22 nt, Homo sapiens
uaugguuuuggaauccugcaga

SEQ ID NO: 11324 - RNA, 22 nt, Homo sapiens
cagugcauguggcacucuccag

SEQ ID NO: 11325 - RNA, 22 nt, Homo sapiens
uuuugugcauggcccaguggua

SEQ ID NO: 11326 - RNA, 20 nt, Homo sapiens
ugagcucaauuguugcaagu

SEQ ID NO: 11327 - RNA, 19 nt, Homo sapiens
ggucagcaaagucuagcug

SEQ ID NO: 11328 - RNA, 20 nt, Homo sapiens
gggaugugagguacacucuu

SEQ ID NO: 11329 - RNA, 22 nt, Homo sapiens
uggaaaguccaagccaaccggg

SEQ ID NO: 11330 - RNA, 22 nt, Homo sapiens
ggagagugacauauuucuaggc

SEQ ID NO: 11331 - RNA, 22 nt, Homo sapiens
cagcacauuacaaguacuuggu

SEQ ID NO: 11332 - RNA, 22 nt, Homo sapiens
cuggaaucuagaaaagguaagg

SEQ ID NO: 11333 - RNA, 23 nt, Homo sapiens
acaguggugugaucuuggcucag

SEQ ID NO: 11334 - RNA, 22 nt, Homo sapiens
uuuuaugggcuauuugcauuag

SEQ ID NO: 11335 - RNA, 22 nt, Homo sapiens
uugaauagaaguguugaaagug

SEQ ID NO: 11336 - RNA, 21 nt, Homo sapiens
guggaaauggaauuuacuaau

SEQ ID NO: 11337 - RNA, 22 nt, Homo sapiens
uguuacagcagaauugauugca

SEQ ID NO: 11338 - RNA, 22 nt, Homo sapiens
ugaguugagauaagguuacauu

SEQ ID NO: 11339 - RNA, 21 nt, Homo sapiens
aggcuguuguuuugggaugga

SEQ ID NO: 11340 - RNA, 22 nt, Homo sapiens
uguaaccauccagagucccagg

SEQ ID NO: 11341 - RNA, 22 nt, Homo sapiens
ugcauugcacuugcaugagaua

SEQ ID NO: 11342 - RNA, 22 nt, Homo sapiens
uagcacuauguuaucacauacu

SEQ ID NO: 11343 - RNA, 22 nt, Homo sapiens
ugaaucaugcugcuauaaagac

SEQ ID NO: 11344 - RNA, 21 nt, Homo sapiens
ugucaguuuccagaguucaac

SEQ ID NO: 11345 - RNA, 23 nt, Homo sapiens
uggcauuuuaguuagcuucagug

SEQ ID NO: 11346 - RNA, 22 nt, Homo sapiens
uggaaguaaccaugaauggaau

SEQ ID NO: 11347 - RNA, 19 nt, Homo sapiens
agaaucuaaauuauuucug

SEQ ID NO: 11348 - RNA, 22 nt, Homo sapiens
uuauugcuuuugugcaggugag

SEQ ID NO: 11349 - RNA, 22 nt, Homo sapiens
agaaugugaccuuauuuggaga

SEQ ID NO: 11350 - RNA, 22 nt, Homo sapiens
gacagugugauacuuagucuca

SEQ ID NO: 11351 - RNA, 22 nt, Homo sapiens
uggugcuugaugaggguggagc

SEQ ID NO: 11352 - RNA, 22 nt, Homo sapiens
ugagaugcuccucuugcaaagc

SEQ ID NO: 11353 - RNA, 22 nt, Homo sapiens
uuaaaguguuugcagacaggug

SEQ ID NO: 11354 - RNA, 22 nt, Homo sapiens
auacugguuuuugucaugugga

SEQ ID NO: 11355 - RNA, 22 nt, Homo sapiens
ugagcuccuucauaaaaaggca

SEQ ID NO: 11356 - RNA, 22 nt, Homo sapiens
guaaaucucuguuuucauggac

SEQ ID NO: 11357 - RNA, 22 nt, Homo sapiens
ugcauagaauguucuguaaaua

SEQ ID NO: 11358 - RNA, 22 nt, Homo sapiens
guguaacaacagcacuccacug

SEQ ID NO: 11359 - RNA, 22 nt, Homo sapiens
acuguguguuugucuagcacag

SEQ ID NO: 11360 - RNA, 19 nt, Homo sapiens
ucacuggacagcacacuca

SEQ ID NO: 11361 - RNA, 22 nt, Homo sapiens
ugucuguuugcgaaauugcuuc

SEQ ID NO: 11362 - RNA, 22 nt, Homo sapiens
uugugaaaaaccucucguggaa

SEQ ID NO: 11363 - RNA, 22 nt, Homo sapiens
uuguguuugaugcugacacgca

SEQ ID NO: 11364 - RNA, 22 nt, Homo sapiens
aauuaguaaccuaauuccaucu

SEQ ID NO: 11365 - RNA, 22 nt, Homo sapiens
aaucccauuucucuguguuuuu

SEQ ID NO: 11366 - RNA, 22 nt, Homo sapiens
uacucagugacugguggaucaa

SEQ ID NO: 11367 - RNA, 22 nt, Homo sapiens
cacaaucuccuuguguaagguu

SEQ ID NO: 11368 - RNA, 22 nt, Homo sapiens
uggagugcgugucugaguuuuu

SEQ ID NO: 11369 - RNA, 22 nt, Homo sapiens
acuuuguguuacccagcaagga

SEQ ID NO: 11370 - RNA, 22 nt, Homo sapiens
agagguauacauuugagagcca

SEQ ID NO: 11371 - RNA, 22 nt, Homo sapiens
uggagguaggugauauguagca

SEQ ID NO: 11372 - RNA, 22 nt, Homo sapiens
ggcaagaaaaugcaauuacugu

SEQ ID NO: 11373 - RNA, 22 nt, Homo sapiens
ggaaugugugucaugcuuuugc

SEQ ID NO: 11374 - RNA, 22 nt, Homo sapiens
cugugguugagcuuugccauga

SEQ ID NO: 11375 - RNA, 22 nt, Homo sapiens
gggccagaugcauuuguuauuu

SEQ ID NO: 11376 - RNA, 20 nt, Homo sapiens
uuauaacuuuuguucugggg

SEQ ID NO: 11377 - RNA, 22 nt, Homo sapiens
auauaguguuuuuugguacgcu

SEQ ID NO: 11378 - RNA, 22 nt, Homo sapiens
augauugugaauaugugguuuu

SEQ ID NO: 11379 - RNA, 19 nt, Homo sapiens
ggcaauacuuucuuguugg

SEQ ID NO: 11380 - RNA, 22 nt, Homo sapiens
uugaaggaacgcuguucccuug

SEQ ID NO: 11381 - RNA, 17 nt, Homo sapiens
uggcaugaggguguggg

SEQ ID NO: 11382 - RNA, 22 nt, Homo sapiens
uauuaagcuaguugucagugcu

SEQ ID NO: 11383 - RNA, 22 nt, Homo sapiens
uauggcugcuuucacacuacaa

SEQ ID NO: 11384 - RNA, 22 nt, Homo sapiens
uggccagugucggaggccagga

SEQ ID NO: 11385 - RNA, 22 nt, Homo sapiens
ugagguaugugaugucuuuuag

SEQ ID NO: 11386 - RNA, 23 nt, Homo sapiens
aaaugcucucaggugccaguaga

SEQ ID NO: 11387 - RNA, 22 nt, Homo sapiens
uugagauggagcuucacucuug

SEQ ID NO: 11388 - RNA, 22 nt, Homo sapiens
aacagucaauugcugaugaccu

SEQ ID NO: 11389 - RNA, 22 nt, Homo sapiens
ucagaguagaaacacuuccaua

SEQ ID NO: 11390 - RNA, 22 nt, Homo sapiens
cacagggcuaacauuuuugccc

SEQ ID NO: 11391 - RNA, 22 nt, Homo sapiens
uagcugcauccugugcacucaa

SEQ ID NO: 11392 - RNA, 21 nt, Homo sapiens
auauggaacuggugacguguu

SEQ ID NO: 11393 - RNA, 22 nt, Homo sapiens
uugaggaggcagucugcccauu

SEQ ID NO: 11394 - RNA, 22 nt, Homo sapiens
uaacuaguggaauuugauuuca

SEQ ID NO: 11395 - RNA, 18 nt, Homo sapiens
ucaauguggauguucuuu

SEQ ID NO: 11396 - RNA, 22 nt, Homo sapiens
cuaaagauagugacaugauuug

SEQ ID NO: 11397 - RNA, 22 nt, Homo sapiens
gcagugugauguuuuaaucuau

SEQ ID NO: 11398 - RNA, 23 nt, Homo sapiens
gucuggucccugguuggaaacca

SEQ ID NO: 11399 - RNA, 22 nt, Homo sapiens
gauauguuguuggauucgguua

SEQ ID NO: 11400 - RNA, 22 nt, Homo sapiens
ugggauauaaaaaacgcuauuc

SEQ ID NO: 11401 - RNA, 22 nt, Homo sapiens
ggaaguuaauacagauagagua

SEQ ID NO: 11402 - RNA, 17 nt, Homo sapiens
cugugaugaucuugucu

SEQ ID NO: 11403 - RNA, 22 nt, Homo sapiens
aagaggccuaggaaucuguauu

SEQ ID NO: 11404 - RNA, 22 nt, Homo sapiens
augaaaugcauguuaaguccgu

SEQ ID NO: 11405 - RNA, 22 nt, Homo sapiens
ucacagaugcuugacccauuuc

SEQ ID NO: 11406 - RNA, 22 nt, Homo sapiens
uaucacuuugauaguuuaaaug

SEQ ID NO: 11407 - RNA, 21 nt, Homo sapiens
uguauauguuuauacacacac

SEQ ID NO: 11408 - RNA, 22 nt, Homo sapiens
gugacagaguaagacccuguau

SEQ ID NO: 11409 - RNA, 22 nt, Homo sapiens
gaacccuggaggcggagguugc

SEQ ID NO: 11410 - RNA, 22 nt, Homo sapiens
aggaagacauauagaacuaaaa

SEQ ID NO: 11411 - RNA, 22 nt, Homo sapiens
gugucaugaagguuuuaugcag

SEQ ID NO: 11412 - RNA, 22 nt, Homo sapiens
ggcaaaugaagauggagaggcu

SEQ ID NO: 11413 - RNA, 19 nt, Homo sapiens
aaguaguugugacagaugc

SEQ ID NO: 11414 - RNA, 22 nt, Homo sapiens
gucuuggagacauugccauuga

SEQ ID NO: 11415 - RNA, 22 nt, Homo sapiens
uuugcuauagugaauagugcug

SEQ ID NO: 11416 - RNA, 20 nt, Homo sapiens
cguugcacuccagccugggc

SEQ ID NO: 11417 - RNA, 22 nt, Homo sapiens
gauggcagugcagccccuggcu

SEQ ID NO: 11418 - RNA, 22 nt, Homo sapiens
uuguccacugcuagccucugca

SEQ ID NO: 11419 - RNA, 22 nt, Homo sapiens
ugagaugaguugcgcucugucg

SEQ ID NO: 11420 - RNA, 22 nt, Homo sapiens
auugcacuccagccugggcuag

SEQ ID NO: 11421 - RNA, 22 nt, Homo sapiens
ugugaacauuuuguauauauua

SEQ ID NO: 11422 - RNA, 22 nt, Homo sapiens
uucacagucacccuucuccaug

SEQ ID NO: 11423 - RNA, 22 nt, Homo sapiens
agugccauggcugcuagauggc

SEQ ID NO: 11424 - RNA, 22 nt, Homo sapiens
uauugcuggauguauuacaugu

SEQ ID NO: 11425 - RNA, 22 nt, Homo sapiens
cugcauuggguuaugcauuuuu

SEQ ID NO: 11426 - RNA, 22 nt, Homo sapiens
uggaaguaaucaugagguagca

SEQ ID NO: 11427 - RNA, 22 nt, Homo sapiens
ugugcacuggaccuugucuucu

SEQ ID NO: 11428 - RNA, 22 nt, Homo sapiens
gcuaugucuguugcucuugggc

SEQ ID NO: 11429 - RNA, 22 nt, Homo sapiens
uugucaccucuaaaucucauau

SEQ ID NO: 11430 - RNA, 22 nt, Homo sapiens
agagcacugcugcaggguucug

SEQ ID NO: 11431 - RNA, 22 nt, Homo sapiens
ugaguauguuuagaaguaaagg

SEQ ID NO: 11432 - RNA, 21 nt, Homo sapiens
gacauggcgauacuccgucuc

SEQ ID NO: 11433 - RNA, 22 nt, Homo sapiens
ugaaaguuauauugugaaauuc

SEQ ID NO: 11434 - RNA, 22 nt, Homo sapiens
gagguagagaguuuugauucug

SEQ ID NO: 11435 - RNA, 22 nt, Homo sapiens
uaaagccagugauuaugucucu

SEQ ID NO: 11436 - RNA, 22 nt, Homo sapiens
cuggcgagacagcuccaucacu

SEQ ID NO: 11437 - RNA, 22 nt, Homo sapiens
gagguguagagauauaccugaa

SEQ ID NO: 11438 - RNA, 22 nt, Homo sapiens
ggcucagugggguccugguucu

SEQ ID NO: 11439 - RNA, 22 nt, Homo sapiens
ucacugagcacaggagaugugc

SEQ ID NO: 11440 - RNA, 17 nt, Homo sapiens
gugagguauccucaaaa

SEQ ID NO: 11441 - RNA, 22 nt, Homo sapiens
uugcgcuuuuccuauguugccc

SEQ ID NO: 11442 - RNA, 22 nt, Homo sapiens
uaugucuauuauguagcaggaa

SEQ ID NO: 11443 - RNA, 22 nt, Homo sapiens
aucucagagaaaauuacuaaga

SEQ ID NO: 11444 - RNA, 22 nt, Homo sapiens
gcaugcacuguauuuaaguauc

SEQ ID NO: 11445 - RNA, 22 nt, Homo sapiens
caugguguuaggcacugggaau

SEQ ID NO: 11446 - RNA, 22 nt, Homo sapiens
ggagugcuguuguuacacaagg

SEQ ID NO: 11447 - RNA, 22 nt, Homo sapiens
agaugguguuuucucaccagau

SEQ ID NO: 11448 - RNA, 22 nt, Homo sapiens
cugaugguuuuacacaagggca

SEQ ID NO: 11449 - RNA, 22 nt, Homo sapiens
ucuguuguuguuuuaagagaca

SEQ ID NO: 11450 - RNA, 22 nt, Homo sapiens
cacucaguuugugguacuuugu

SEQ ID NO: 11451 - RNA, 20 nt, Homo sapiens
uuuggcacugagugguauaa

SEQ ID NO: 11452 - RNA, 19 nt, Homo sapiens
uugcauagguugaaccagc

SEQ ID NO: 11453 - RNA, 22 nt, Homo sapiens
aaccuguaaccauaugaucagu

SEQ ID NO: 11454 - RNA, 17 nt, Homo sapiens
ugacagaaacuuguugu

SEQ ID NO: 11455 - RNA, 20 nt, Homo sapiens
cauuacacuccaaccugggu

SEQ ID NO: 11456 - RNA, 22 nt, Homo sapiens
augcaauucuagauugauagua

SEQ ID NO: 11457 - RNA, 22 nt, Homo sapiens
gagaacuggcgugaacugcacg

SEQ ID NO: 11458 - RNA, 19 nt, Homo sapiens
uggucccccgcaaucucau

SEQ ID NO: 11459 - RNA, 17 nt, Homo sapiens
ugauaagugugagguga

SEQ ID NO: 11460 - RNA, 22 nt, Homo sapiens
uuggcagaguuaauuuguugag

SEQ ID NO: 11461 - RNA, 22 nt, Homo sapiens
gcaagugucugagguuuuguau

SEQ ID NO: 11462 - RNA, 22 nt, Homo sapiens
ugucuuguagacaauguauagu

SEQ ID NO: 11463 - RNA, 22 nt, Homo sapiens
ugacuggaaacaguguuauuug

SEQ ID NO: 11464 - RNA, 22 nt, Homo sapiens
auagcagcuugucagggcagac

SEQ ID NO: 11465 - RNA, 22 nt, Homo sapiens
uuguucccuucuggcuuuuaug

SEQ ID NO: 11466 - RNA, 22 nt, Homo sapiens
auagagguagacagaggggaaa

SEQ ID NO: 11467 - RNA, 22 nt, Homo sapiens
uuucugcuugagagaauugcug

SEQ ID NO: 11468 - RNA, 20 nt, Homo sapiens
ugagccccuggacucaagcg

SEQ ID NO: 11469 - RNA, 22 nt, Homo sapiens
cucaguguuaaggccaccucug

SEQ ID NO: 11470 - RNA, 22 nt, Homo sapiens
aucuugggugggaacugagaau

SEQ ID NO: 11471 - RNA, 22 nt, Homo sapiens
ugugacuaguggugaaugacgc

SEQ ID NO: 11472 - RNA, 22 nt, Homo sapiens
ugagauaaagcauguacugugu

SEQ ID NO: 11473 - RNA, 22 nt, Homo sapiens
cauuggugauuagugaaugaac

SEQ ID NO: 11474 - RNA, 22 nt, Homo sapiens
cuagcugcacuuccugcuacug

SEQ ID NO: 11475 - RNA, 22 nt, Homo sapiens
gugagaagaaaaauauggcugu

SEQ ID NO: 11476 - RNA, 22 nt, Homo sapiens
uggcaaaaaaccgcaguugccu

SEQ ID NO: 11477 - RNA, 21 nt, Homo sapiens
cucaaaguacugauauuacag

SEQ ID NO: 11478 - RNA, 22 nt, Homo sapiens
ucacagauaaauaaagaugauu

SEQ ID NO: 11479 - RNA, 22 nt, Homo sapiens
aagaugauguucuuuuucuuag

SEQ ID NO: 11480 - RNA, 22 nt, Homo sapiens
acugcacuccacccuuggcagc

SEQ ID NO: 11481 - RNA, 22 nt, Homo sapiens
uuaaaggcauguacacuagagu

SEQ ID NO: 11482 - RNA, 22 nt, Homo sapiens
gugcaauguuaauuacuugacu

SEQ ID NO: 11483 - RNA, 22 nt, Homo sapiens
agagauccucauuuuauagaca

SEQ ID NO: 11484 - RNA, 22 nt, Homo sapiens
gagauggugugcuguuggaagu

SEQ ID NO: 11485 - RNA, 21 nt, Homo sapiens
uggcuuauuugaaucuggcuu

SEQ ID NO: 11486 - RNA, 22 nt, Homo sapiens
uuaaguagaugaaugugaaugu

SEQ ID NO: 11487 - RNA, 22 nt, Homo sapiens
ucuauggauaaaaugcccucau

SEQ ID NO: 11488 - RNA, 22 nt, Homo sapiens
uuggaaagagguguuuaugacu

SEQ ID NO: 11489 - RNA, 22 nt, Homo sapiens
ugucugagacuguuuuacuuuc

SEQ ID NO: 11490 - RNA, 22 nt, Homo sapiens
gccauggaggauuuauagaggc

SEQ ID NO: 11491 - RNA, 22 nt, Homo sapiens
acugggucaaaguagaaaacua

SEQ ID NO: 11492 - RNA, 22 nt, Homo sapiens
ucagugucaucuggguuguuug

SEQ ID NO: 11493 - RNA, 22 nt, Homo sapiens
uucacacuagccacucugguag

SEQ ID NO: 11494 - RNA, 22 nt, Homo sapiens
acccuugaguguguuucaggca

SEQ ID NO: 11495 - RNA, 22 nt, Homo sapiens
ucucaaccucccaaguagcugg

SEQ ID NO: 11496 - RNA, 21 nt, Homo sapiens
gcuuuuucggaagucuuuggc

SEQ ID NO: 11497 - RNA, 22 nt, Homo sapiens
uaccaaaguuucggccucuguu

SEQ ID NO: 11498 - RNA, 22 nt, Homo sapiens
auggcuuuuauuguguugaggu

SEQ ID NO: 11499 - RNA, 17 nt, Homo sapiens
cacugggugcaagagga

SEQ ID NO: 11500 - RNA, 22 nt, Homo sapiens
augugacuugugaaaaguucag

SEQ ID NO: 11501 - RNA, 22 nt, Homo sapiens
guauuuuguuagggugugguau

SEQ ID NO: 11502 - RNA, 22 nt, Homo sapiens
augacuggauaauggacacaca

SEQ ID NO: 11503 - RNA, 22 nt, Homo sapiens
gagcaacaguggcagugguggg

SEQ ID NO: 11504 - RNA, 22 nt, Homo sapiens
uaaggcacccuucugaguagag

SEQ ID NO: 11505 - RNA, 19 nt, Homo sapiens
uggaauggauuuaaaugug

SEQ ID NO: 11506 - RNA, 16 nt, Homo sapiens
uuaggcagugugauac

SEQ ID NO: 11507 - RNA, 22 nt, Homo sapiens
cucacggugcaggcuucuggga

SEQ ID NO: 11508 - RNA, 22 nt, Homo sapiens
ugagacggaguuucacucuugu

SEQ ID NO: 11509 - RNA, 22 nt, Homo sapiens
agucauggcagaaggcaccucu

SEQ ID NO: 11510 - RNA, 22 nt, Homo sapiens
ugcuauagcuauaucaucuccu

SEQ ID NO: 11511 - RNA, 18 nt, Homo sapiens
uuauaugcauguguagga

SEQ ID NO: 11512 - RNA, 22 nt, Homo sapiens
ugcuauguaacacauuaccuuu

SEQ ID NO: 11513 - RNA, 22 nt, Homo sapiens
aagggaauguuguggcugguug

SEQ ID NO: 11514 - RNA, 22 nt, Homo sapiens
ucacaguuggccuggccuuuua

SEQ ID NO: 11515 - RNA, 22 nt, Homo sapiens
auauuagcacuaaugucacgau

SEQ ID NO: 11516 - RNA, 20 nt, Homo sapiens
uggcauguugguaugcaccc

SEQ ID NO: 11517 - RNA, 17 nt, Homo sapiens
cucucugguuuaaagca

SEQ ID NO: 11518 - RNA, 22 nt, Homo sapiens
aggucaccucaggaaauacuga

SEQ ID NO: 11519 - RNA, 22 nt, Homo sapiens
ggacugucagggcuauuaguca

SEQ ID NO: 11520 - RNA, 22 nt, Homo sapiens
uggcaggugcacuggcuuugaa

SEQ ID NO: 11521 - RNA, 22 nt, Homo sapiens
auagcagcaccucacucuacug

SEQ ID NO: 11522 - RNA, 22 nt, Homo sapiens
uggagucgugcccuugcauuua

SEQ ID NO: 11523 - RNA, 22 nt, Homo sapiens
cuccauguggcuaacuuuuaaa

SEQ ID NO: 11524 - RNA, 16 nt, Homo sapiens
ugugaucuuuuuucuu

SEQ ID NO: 11525 - RNA, 22 nt, Homo sapiens
auugucacuuaaaagugcaugu

SEQ ID NO: 11526 - RNA, 22 nt, Homo sapiens
uaaagcuauuauaguuauguuu

SEQ ID NO: 11527 - RNA, 22 nt, Homo sapiens
uucucagugaacuccagcuugu

SEQ ID NO: 11528 - RNA, 22 nt, Homo sapiens
gacaagagaacacugcuauauu

SEQ ID NO: 11529 - RNA, 22 nt, Homo sapiens
aaagugcuuacuaaguugccaa

SEQ ID NO: 11530 - RNA, 22 nt, Homo sapiens
uguccaguguuccucagaagaa

SEQ ID NO: 11531 - RNA, 23 nt, Homo sapiens
uuugugacacucuccaucuccag

SEQ ID NO: 11532 - RNA, 19 nt, Homo sapiens
cucauggagaaggagaaua

SEQ ID NO: 11533 - RNA, 22 nt, Homo sapiens
ugagauuaaucuuuaaguaaga

SEQ ID NO: 11534 - RNA, 20 nt, Homo sapiens
auuguccuugauuacacaga

SEQ ID NO: 11535 - RNA, 22 nt, Homo sapiens
ugauaugaucgcccuagcuuga

SEQ ID NO: 11536 - RNA, 22 nt, Homo sapiens
guggaaagaacacaaaauuagg

SEQ ID NO: 11537 - RNA, 18 nt, Homo sapiens
uggccaauggcaaacaga

SEQ ID NO: 11538 - RNA, 21 nt, Homo sapiens
ugaguagcuagaacuaggggc

SEQ ID NO: 11539 - RNA, 22 nt, Homo sapiens
uucugugguuucauuuaccugu

SEQ ID NO: 11540 - RNA, 22 nt, Homo sapiens
guagcagaacauguuccuugua

SEQ ID NO: 11541 - RNA, 22 nt, Homo sapiens
agaauguaaacagaauagagga

SEQ ID NO: 11542 - RNA, 22 nt, Homo sapiens
cuggcccaguucugcguuuugc

SEQ ID NO: 11543 - RNA, 22 nt, Homo sapiens
uggaagacauugggugaagggu

SEQ ID NO: 11544 - RNA, 22 nt, Homo sapiens
acaugcauggcaugcauuguac

SEQ ID NO: 11545 - RNA, 21 nt, Homo sapiens
cucugguuugcauuggauuau

SEQ ID NO: 11546 - RNA, 22 nt, Homo sapiens
agagugcuuuauuagauguagc

SEQ ID NO: 11547 - RNA, 22 nt, Homo sapiens
ugugauuggccuggcguggguc

SEQ ID NO: 11548 - RNA, 22 nt, Homo sapiens
caguuguuuuaugacauaagau

SEQ ID NO: 11549 - RNA, 18 nt, Homo sapiens
ugaauaguguccccauga

SEQ ID NO: 11550 - RNA, 22 nt, Homo sapiens
uaggugaaugcuggaagaaaug

SEQ ID NO: 11551 - RNA, 18 nt, Homo sapiens
ucugugguguaaauacgu

SEQ ID NO: 11552 - RNA, 22 nt, Homo sapiens
uguaugucuucuuuagauaagu

SEQ ID NO: 11553 - RNA, 22 nt, Homo sapiens
uggauggagaggcuugugaugc

SEQ ID NO: 11554 - RNA, 22 nt, Homo sapiens
auuccauaguacagugaugagu

SEQ ID NO: 11555 - RNA, 22 nt, Homo sapiens
gcgguagcauagacugcaggac

SEQ ID NO: 11556 - RNA, 23 nt, Homo sapiens
aauugcuuuugaggacuuaguug

SEQ ID NO: 11557 - RNA, 22 nt, Homo sapiens
uggggcaaugaacauuuuugca

SEQ ID NO: 11558 - RNA, 22 nt, Homo sapiens
ggagucugauguucuaaggcag

SEQ ID NO: 11559 - RNA, 22 nt, Homo sapiens
ccccggguggauguacauguga

SEQ ID NO: 11560 - RNA, 18 nt, Homo sapiens
uauuaagcuagauauuau

SEQ ID NO: 11561 - RNA, 22 nt, Homo sapiens
auuccacuuacaugaaguaccu

SEQ ID NO: 11562 - RNA, 22 nt, Homo sapiens
uauaaaguaauuucuaggggcu

SEQ ID NO: 11563 - RNA, 22 nt, Homo sapiens
ucccugagcaaaguuuucugua

SEQ ID NO: 11564 - RNA, 22 nt, Homo sapiens
cuuuaguuaaaauugggguugu

SEQ ID NO: 11565 - RNA, 22 nt, Homo sapiens
uaguagagauggggcacaugcc

SEQ ID NO: 11566 - RNA, 22 nt, Homo sapiens
agcagauguuuagugagcgccu

SEQ ID NO: 11567 - RNA, 20 nt, Homo sapiens
auaugguugugagugauuuu

SEQ ID NO: 11568 - RNA, 22 nt, Homo sapiens
uugaagacuaaguuaucaggau

SEQ ID NO: 11569 - RNA, 22 nt, Homo sapiens
uugggguagaauugcaacauau

SEQ ID NO: 11570 - RNA, 22 nt, Homo sapiens
gugugacuagucaugccugaau

SEQ ID NO: 11571 - RNA, 22 nt, Homo sapiens
gugggguaggcaauuccuagug

SEQ ID NO: 11572 - RNA, 22 nt, Homo sapiens
uggcaagaaggauuuauuccuu

SEQ ID NO: 11573 - RNA, 22 nt, Homo sapiens
cuuucucagugagacccgagau

SEQ ID NO: 11574 - RNA, 22 nt, Homo sapiens
aaggagcuuaagugacuuguac

SEQ ID NO: 11575 - RNA, 23 nt, Homo sapiens
gcuaggagagaugaaacacaggu

SEQ ID NO: 11576 - RNA, 22 nt, Homo sapiens
uauuagugucuuuugguuagaa

SEQ ID NO: 11577 - RNA, 23 nt, Homo sapiens
cauggcuguuaacacuguuugag

SEQ ID NO: 11578 - RNA, 22 nt, Homo sapiens
aaauucauuucagcucugggua

SEQ ID NO: 11579 - RNA, 22 nt, Homo sapiens
ugaauagagcugcaguggacau

SEQ ID NO: 11580 - RNA, 21 nt, Homo sapiens
ucauauguaucuuugugccuc

SEQ ID NO: 11581 - RNA, 22 nt, Homo sapiens
uucuauugguaauauuuucugu

SEQ ID NO: 11582 - RNA, 22 nt, Homo sapiens
aucagagugaugguuuaaguau

SEQ ID NO: 11583 - RNA, 22 nt, Homo sapiens
uaaguaguauaagguuuuuuga

SEQ ID NO: 11584 - RNA, 22 nt, Homo sapiens
augccaagagacaaagggaauc

SEQ ID NO: 11585 - RNA, 22 nt, Homo sapiens
aacaggguguuugcaguuucuu

SEQ ID NO: 11586 - RNA, 22 nt, Homo sapiens
cuuaggguacuuuggugcauca

SEQ ID NO: 11587 - RNA, 22 nt, Homo sapiens
uugcacuccagccuggaugaca

SEQ ID NO: 11588 - RNA, 22 nt, Homo sapiens
uuggaagcacauuguuuaauua

SEQ ID NO: 11589 - RNA, 19 nt, Homo sapiens
guauuugguaaacucucca

SEQ ID NO: 11590 - RNA, 22 nt, Homo sapiens
uggugcuuaaauaaggcuuuca

SEQ ID NO: 11591 - RNA, 22 nt, Homo sapiens
uccccgucacacgcaggcuuac

SEQ ID NO: 11592 - RNA, 22 nt, Homo sapiens
gugggguaggaggaguacuucc

SEQ ID NO: 11593 - RNA, 22 nt, Homo sapiens
uccuucacucuacaucuuuguu

SEQ ID NO: 11594 - RNA, 22 nt, Homo sapiens
uugaguccccacacuggguccc

SEQ ID NO: 11595 - RNA, 22 nt, Homo sapiens
cucauuggcuacugaggcuugu

SEQ ID NO: 11596 - RNA, 22 nt, Homo sapiens
ucaguaaaugcuguucucuuuu

SEQ ID NO: 11597 - RNA, 22 nt, Homo sapiens
auuagguuaggcaaacuucugu

SEQ ID NO: 11598 - RNA, 22 nt, Homo sapiens
uugccaauauuuuacugagaag

SEQ ID NO: 11599 - RNA, 22 nt, Homo sapiens
ugagcagagaagugcccugcgc

SEQ ID NO: 11600 - RNA, 22 nt, Homo sapiens
cccugaagaaagccuaggacau

SEQ ID NO: 11601 - RNA, 21 nt, Homo sapiens
ugcaugguagucacaugauuc

SEQ ID NO: 11602 - RNA, 22 nt, Homo sapiens
uugcacuauaggaaaauguguc

SEQ ID NO: 11603 - RNA, 22 nt, Homo sapiens
uugagaguggcagagguggaac

SEQ ID NO: 11604 - RNA, 22 nt, Homo sapiens
uuuguacuugaagaaucuuuau

SEQ ID NO: 11605 - RNA, 22 nt, Homo sapiens
cuuggcuugguaucaaauaacc

SEQ ID NO: 11606 - RNA, 22 nt, Homo sapiens
uugccaacauggugaacuccca

SEQ ID NO: 11607 - RNA, 22 nt, Homo sapiens
uuggacuuuaagauagagaugu

SEQ ID NO: 11608 - RNA, 22 nt, Homo sapiens
agugcaaggacauuuagguugu

SEQ ID NO: 11609 - RNA, 22 nt, Homo sapiens
gcauggagaaggggacugauuc

SEQ ID NO: 11610 - RNA, 22 nt, Homo sapiens
ugaauucaucucacagaguuaa

SEQ ID NO: 11611 - RNA, 22 nt, Homo sapiens
ucuguaguuaacagcuucagcu

SEQ ID NO: 11612 - RNA, 22 nt, Homo sapiens
uuuggacuucuagccuccagag

SEQ ID NO: 11613 - RNA, 22 nt, Homo sapiens
cuuuuugcugcagcaauacugg

SEQ ID NO: 11614 - RNA, 22 nt, Homo sapiens
ggagauccucugcgggcaaaga

SEQ ID NO: 11615 - RNA, 22 nt, Homo sapiens
ugucaaugggaauuuguuuuag

SEQ ID NO: 11616 - RNA, 22 nt, Homo sapiens
gaucaguuucuggagauacgua

SEQ ID NO: 11617 - RNA, 22 nt, Homo sapiens
uagaucauauucagugcuuacu

SEQ ID NO: 11618 - RNA, 22 nt, Homo sapiens
cugagaaugaugauuuccaguu

SEQ ID NO: 11619 - RNA, 17 nt, Homo sapiens
augagcucaucauuuuu

SEQ ID NO: 11620 - RNA, 22 nt, Homo sapiens
ugcuacccuucgucucucuggu

SEQ ID NO: 11621 - RNA, 22 nt, Homo sapiens
uagcuggaauuacuugcaccug

SEQ ID NO: 11622 - RNA, 22 nt, Homo sapiens
gucuuugagauaggguuauuuu

SEQ ID NO: 11623 - RNA, 22 nt, Homo sapiens
gugguuuuaucccagaaauuaa

SEQ ID NO: 11624 - RNA, 22 nt, Homo sapiens
uccuuuguuacaguuggcucug

SEQ ID NO: 11625 - RNA, 22 nt, Homo sapiens
ucauugcauuccagcccaagca

SEQ ID NO: 11626 - RNA, 22 nt, Homo sapiens
gagaggucguauaugauuucug

SEQ ID NO: 11627 - RNA, 19 nt, Homo sapiens
ugaguauauuguauucauu

SEQ ID NO: 11628 - RNA, 22 nt, Homo sapiens
uaagacuuuuugggaauauaga

SEQ ID NO: 11629 - RNA, 22 nt, Homo sapiens
ucugucaaaucuuauguuguag

SEQ ID NO: 11630 - RNA, 22 nt, Homo sapiens
ugugcuugaauuuaguagcuua

SEQ ID NO: 11631 - RNA, 22 nt, Homo sapiens
uacagguauagauguguguucu

SEQ ID NO: 11632 - RNA, 18 nt, Homo sapiens
uguggcuguuuuccaaua

SEQ ID NO: 11633 - RNA, 16 nt, Homo sapiens
uacaauguagaaaaca

SEQ ID NO: 11634 - RNA, 22 nt, Homo sapiens
cuggaauucaaaaucugaauuu

SEQ ID NO: 11635 - RNA, 22 nt, Homo sapiens
ugcaagaaucuuucaggcuagc

SEQ ID NO: 11636 - RNA, 22 nt, Homo sapiens
uagagguucuaagauucucaga

SEQ ID NO: 11637 - RNA, 22 nt, Homo sapiens
ugcauggucauacauggcaccc

SEQ ID NO: 11638 - RNA, 21 nt, Homo sapiens
augacccuggguguccuuucc

SEQ ID NO: 11639 - RNA, 22 nt, Homo sapiens
ugcaaaucuuguguaguuguga

SEQ ID NO: 11640 - RNA, 22 nt, Homo sapiens
auuuggguuuuacaucaggcua

SEQ ID NO: 11641 - RNA, 22 nt, Homo sapiens
agcucauugcaaccuccgccuc

SEQ ID NO: 11642 - RNA, 22 nt, Homo sapiens
uagguuaucucaaguguaauuu

SEQ ID NO: 11643 - RNA, 22 nt, Homo sapiens
aucaaaucuccagaaccugucu

SEQ ID NO: 11644 - RNA, 22 nt, Homo sapiens
aaguugcuuuagguaagucaau

SEQ ID NO: 11645 - RNA, 22 nt, Homo sapiens
augaaguguguguucaagucuu

SEQ ID NO: 11646 - RNA, 22 nt, Homo sapiens
ugagcugagaucaugcuauugu

SEQ ID NO: 11647 - RNA, 22 nt, Homo sapiens
ucagcagugagagaccucaccc

SEQ ID NO: 11648 - RNA, 22 nt, Homo sapiens
agugcauaugucuuuuuggaag

SEQ ID NO: 11649 - RNA, 22 nt, Homo sapiens
ucagcgggaguggaaagucaga

SEQ ID NO: 11650 - RNA, 22 nt, Homo sapiens
gugugacugcucuauuagggcg

SEQ ID NO: 11651 - RNA, 18 nt, Homo sapiens
auguggcuuuugaaggcu

SEQ ID NO: 11652 - RNA, 22 nt, Homo sapiens
aaggcgguguggauccuacagc

SEQ ID NO: 11653 - RNA, 22 nt, Homo sapiens
uuugcagagucuuucgcugggc

SEQ ID NO: 11654 - RNA, 22 nt, Homo sapiens
uagaauguaacuuccaugucau

SEQ ID NO: 11655 - RNA, 22 nt, Homo sapiens
ucacaauguaaaugaggguugg

SEQ ID NO: 11656 - RNA, 19 nt, Homo sapiens
ggaaugcaccaguccuugc

SEQ ID NO: 11657 - RNA, 22 nt, Homo sapiens
uagggagugucuucauuuugua

SEQ ID NO: 11658 - RNA, 21 nt, Homo sapiens
uucggcaauaugaaccaaugu

SEQ ID NO: 11659 - RNA, 22 nt, Homo sapiens
ucaagugauucuugugccuuag

SEQ ID NO: 11660 - RNA, 22 nt, Homo sapiens
uagcuaguauuuugcugaggau

SEQ ID NO: 11661 - RNA, 22 nt, Homo sapiens
ucagcacauucaaggccugccu

SEQ ID NO: 11662 - RNA, 22 nt, Homo sapiens
gaguagugcugcaguaaacaca

SEQ ID NO: 11663 - RNA, 22 nt, Homo sapiens
gucuuccagccuccaucuuucu

SEQ ID NO: 11664 - RNA, 21 nt, Homo sapiens
ugugaaaucuaggcagagguu

SEQ ID NO: 11665 - RNA, 22 nt, Homo sapiens
gcaugguacuggaugguaguau

SEQ ID NO: 11666 - RNA, 22 nt, Homo sapiens
ugaaugguaaagaaaagcacug

SEQ ID NO: 11667 - RNA, 22 nt, Homo sapiens
guuagcuaguagacaauuuucc

SEQ ID NO: 11668 - RNA, 22 nt, Homo sapiens
uaaagcuaucacauuggugauu

SEQ ID NO: 11669 - RNA, 22 nt, Homo sapiens
ugacauguagagaacuucucau

SEQ ID NO: 11670 - RNA, 22 nt, Homo sapiens
ugacucaguuguuagucuucau

SEQ ID NO: 11671 - RNA, 22 nt, Homo sapiens
ugacuagggcucuaaacagcuc

SEQ ID NO: 11672 - RNA, 22 nt, Homo sapiens
uugugaucauugucaaauagug

SEQ ID NO: 11673 - RNA, 22 nt, Homo sapiens
gaacuuguguugcuucacaugu

SEQ ID NO: 11674 - RNA, 22 nt, Homo sapiens
aaaccacagugugcugcugggg

SEQ ID NO: 11675 - RNA, 22 nt, Homo sapiens
auggcuguuucugcaaugucua

SEQ ID NO: 11676 - RNA, 22 nt, Homo sapiens
gugguguuugagcugccaggga

SEQ ID NO: 11677 - RNA, 22 nt, Homo sapiens
uccuugagccugggaguuauag

SEQ ID NO: 11678 - RNA, 22 nt, Homo sapiens
gaggugaaggucucaauaaaua

SEQ ID NO: 11679 - RNA, 22 nt, Homo sapiens
aauuaguugaaagucugcuuuu

SEQ ID NO: 11680 - RNA, 22 nt, Homo sapiens
ucugauggaguugccagggaga

SEQ ID NO: 11681 - RNA, 19 nt, Homo sapiens
uuggucccuuuggguucuu

SEQ ID NO: 11682 - RNA, 22 nt, Homo sapiens
agccuguagugagcugugauug

SEQ ID NO: 11683 - RNA, 22 nt, Homo sapiens
uugagauggaguguugcucugu

SEQ ID NO: 11684 - RNA, 22 nt, Homo sapiens
uugagauggagucuugcucucu

SEQ ID NO: 11685 - RNA, 21 nt, Homo sapiens
agcagcuuugguugaagcaga

SEQ ID NO: 11686 - RNA, 22 nt, Homo sapiens
auuugguuauucaguuguucag

SEQ ID NO: 11687 - RNA, 22 nt, Homo sapiens
uauggauuuucagauucuuauc

SEQ ID NO: 11688 - RNA, 22 nt, Homo sapiens
ugguccacuaacccucaguauc

SEQ ID NO: 11689 - RNA, 22 nt, Homo sapiens
uggcaauaauucagugugggcu

SEQ ID NO: 11690 - RNA, 22 nt, Homo sapiens
uuuaaguguuuguuccugaaaa

SEQ ID NO: 11691 - RNA, 22 nt, Homo sapiens
gauggcauuucuggaucugccc

SEQ ID NO: 11692 - RNA, 22 nt, Homo sapiens
auaagucaauggaacagauuaa

SEQ ID NO: 11693 - RNA, 22 nt, Homo sapiens
ggcauguuuaguagaauguggu

SEQ ID NO: 11694 - RNA, 18 nt, Homo sapiens
cucacacccuaaucagga

SEQ ID NO: 11695 - RNA, 22 nt, Homo sapiens
uaacccuuacaacuacacucgu

SEQ ID NO: 11696 - RNA, 22 nt, Homo sapiens
agcaggacaauaugggaucagg

SEQ ID NO: 11697 - RNA, 22 nt, Homo sapiens
uucuugguugcucacacccauc

SEQ ID NO: 11698 - RNA, 22 nt, Homo sapiens
gucacugucuacuguaauagcc

SEQ ID NO: 11699 - RNA, 22 nt, Homo sapiens
ugcuuagucuugcuuuagcuau

SEQ ID NO: 11700 - RNA, 19 nt, Homo sapiens
uucuuuguugugggggcug

SEQ ID NO: 11701 - RNA, 22 nt, Homo sapiens
uugcauaaguugaaccagccuu

SEQ ID NO: 11702 - RNA, 22 nt, Homo sapiens
uagugcuagaugacuuugccau

SEQ ID NO: 11703 - RNA, 22 nt, Homo sapiens
uccaguguuauaauaugcgucu

SEQ ID NO: 11704 - RNA, 22 nt, Homo sapiens
uguguaauacucuaaugaugca

SEQ ID NO: 11705 - RNA, 22 nt, Homo sapiens
aacacuggcugcucgaguucuc

SEQ ID NO: 11706 - RNA, 22 nt, Homo sapiens
uuuggcauuugaguuuguagga

SEQ ID NO: 11707 - RNA, 22 nt, Homo sapiens
gagauuaauacacaucaaaugc

SEQ ID NO: 11708 - RNA, 22 nt, Homo sapiens
cggugcaauucuccugucucag

SEQ ID NO: 11709 - RNA, 22 nt, Homo sapiens
ugacauugggagugaagugaag

SEQ ID NO: 11710 - RNA, 22 nt, Homo sapiens
uuaaaguaauugaaauggccuu

SEQ ID NO: 11711 - RNA, 22 nt, Homo sapiens
ucauuagucaccuagccagcuu

SEQ ID NO: 11712 - RNA, 22 nt, Homo sapiens
aaguaaauauccgguaguccca

SEQ ID NO: 11713 - RNA, 19 nt, Homo sapiens
cuguggucauuauuuugcu

SEQ ID NO: 11714 - RNA, 18 nt, Homo sapiens
guccauuuguugguacac

SEQ ID NO: 11715 - RNA, 22 nt, Homo sapiens
guggcaaagaugccuucuccaa

SEQ ID NO: 11716 - RNA, 22 nt, Homo sapiens
aaaguacucaguucaguuccgu

SEQ ID NO: 11717 - RNA, 20 nt, Homo sapiens
uaaggcacugugcuuuuagg

SEQ ID NO: 11718 - RNA, 22 nt, Homo sapiens
acugcacuccaguuugggcagc

SEQ ID NO: 11719 - RNA, 22 nt, Homo sapiens
gugaugguccagggaaucucuu

SEQ ID NO: 11720 - RNA, 22 nt, Homo sapiens
ccuggcacugagcaguguucua

SEQ ID NO: 11721 - RNA, 22 nt, Homo sapiens
caaagucuucaguugauucuga

SEQ ID NO: 11722 - RNA, 19 nt, Homo sapiens
agugagccaagauccuacc

SEQ ID NO: 11723 - RNA, 22 nt, Homo sapiens
cugugcauggauuuuaagauug

SEQ ID NO: 11724 - RNA, 22 nt, Homo sapiens
guguagagaaaaguaccauuuu

SEQ ID NO: 11725 - RNA, 22 nt, Homo sapiens
aggcuguguggauaauauuggg

SEQ ID NO: 11726 - RNA, 22 nt, Homo sapiens
auccuagguuagagaacaaaac

SEQ ID NO: 11727 - RNA, 22 nt, Homo sapiens
uuugggccauggcuuuuccacg

SEQ ID NO: 11728 - RNA, 21 nt, Homo sapiens
agcugguuuccacagugugcu

SEQ ID NO: 11729 - RNA, 21 nt, Homo sapiens
gagaaucaucauggcugcaua

SEQ ID NO: 11730 - RNA, 22 nt, Homo sapiens
uugugccauucuucugccucag

SEQ ID NO: 11731 - RNA, 22 nt, Homo sapiens
ugauagaucugggcaaaguaaa

SEQ ID NO: 11732 - RNA, 22 nt, Homo sapiens
gcuggucugccguaguaggugc

SEQ ID NO: 11733 - RNA, 18 nt, Homo sapiens
ucaccuugcuuuuagaac

SEQ ID NO: 11734 - RNA, 22 nt, Homo sapiens
cugaccauagacuacucugggc

SEQ ID NO: 11735 - RNA, 22 nt, Homo sapiens
ugagcacuguacuuuaucaggu

SEQ ID NO: 11736 - RNA, 22 nt, Homo sapiens
gagauaacuacuggauuaaguu

SEQ ID NO: 11737 - RNA, 22 nt, Homo sapiens
accacaggguaaaguuagauau

SEQ ID NO: 11738 - RNA, 22 nt, Homo sapiens
aucugguguccucgugggaguc

SEQ ID NO: 11739 - RNA, 22 nt, Homo sapiens
gggcacgugugugcugugcuca

SEQ ID NO: 11740 - RNA, 22 nt, Homo sapiens
ucacuuggugaacacauuaugu

SEQ ID NO: 11741 - RNA, 22 nt, Homo sapiens
uuguauguugaaugaugguaua

SEQ ID NO: 11742 - RNA, 21 nt, Homo sapiens
gugaucaugucacugcacucc

SEQ ID NO: 11743 - RNA, 22 nt, Homo sapiens
augcauaugucuuuauaguggc

SEQ ID NO: 11744 - RNA, 22 nt, Homo sapiens
uugauaugcuugucaguccauu

SEQ ID NO: 11745 - RNA, 22 nt, Homo sapiens
gaugguggucuacccuuucccu

SEQ ID NO: 11746 - RNA, 22 nt, Homo sapiens
uuccuugaaacagucaagagaa

SEQ ID NO: 11747 - RNA, 22 nt, Homo sapiens
uugaaauguuuagaaguuugga

SEQ ID NO: 11748 - RNA, 22 nt, Homo sapiens
uuuaugcgucuguaauuucuuu

SEQ ID NO: 11749 - RNA, 22 nt, Homo sapiens
auacauguucaagggcauauau

SEQ ID NO: 11750 - RNA, 22 nt, Homo sapiens
gagugguucuauauguaauugg

SEQ ID NO: 11751 - RNA, 18 nt, Homo sapiens
gggcaaguugccuggcuu

SEQ ID NO: 11752 - RNA, 22 nt, Homo sapiens
aucauugugugaguugauggga

SEQ ID NO: 11753 - RNA, 22 nt, Homo sapiens
cacugcacuccagcuuugguga

SEQ ID NO: 11754 - RNA, 22 nt, Homo sapiens
ugagauuaucuguacauaggag

SEQ ID NO: 11755 - RNA, 22 nt, Homo sapiens
uaggagcacaaaccccauugug

SEQ ID NO: 11756 - RNA, 21 nt, Homo sapiens
uuguagcagcauaaucccaga

SEQ ID NO: 11757 - RNA, 22 nt, Homo sapiens
uacugcacuccagccugggaga

SEQ ID NO: 11758 - RNA, 22 nt, Homo sapiens
ugagugaaggggcucuguugug

SEQ ID NO: 11759 - RNA, 23 nt, Homo sapiens
cuuuugcaaugugaucuugccac

SEQ ID NO: 11760 - RNA, 22 nt, Homo sapiens
uugagauagaauaggaauggga

SEQ ID NO: 11761 - RNA, 22 nt, Homo sapiens
caugugcaugagcacauacgug

SEQ ID NO: 11762 - RNA, 22 nt, Homo sapiens
uacaggauagacaauuuauuaa

SEQ ID NO: 11763 - RNA, 20 nt, Homo sapiens
ccccuggaguggggcugcuu

SEQ ID NO: 11764 - RNA, 22 nt, Homo sapiens
aaaaguucuuugagccuugaca

SEQ ID NO: 11765 - RNA, 22 nt, Homo sapiens
cugauuguagagccccagggcu

SEQ ID NO: 11766 - RNA, 21 nt, Homo sapiens
uucucaggguguguccuaccc

SEQ ID NO: 11767 - RNA, 17 nt, Homo sapiens
cucacugagaacagcua

SEQ ID NO: 11768 - RNA, 22 nt, Homo sapiens
gauacaguaugcaugugguauu

SEQ ID NO: 11769 - RNA, 22 nt, Homo sapiens
uaaagcacaaguaaagaauacu

SEQ ID NO: 11770 - RNA, 22 nt, Homo sapiens
uucacugugcuuaaauucugcu

SEQ ID NO: 11771 - RNA, 22 nt, Homo sapiens
agcggcuguuccccuggucuau

SEQ ID NO: 11772 - RNA, 22 nt, Homo sapiens
ugaggcaaggcugaaugaaggc

SEQ ID NO: 11773 - RNA, 22 nt, Homo sapiens
caggcauuguauuguaaucccc

SEQ ID NO: 11774 - RNA, 22 nt, Homo sapiens
gcuagcacauugucaccucuca

SEQ ID NO: 11775 - RNA, 22 nt, Homo sapiens
ugcagcucagcugcggaguuuu

SEQ ID NO: 11776 - RNA, 22 nt, Homo sapiens
ugagcuagggccuggaauaggg

SEQ ID NO: 11777 - RNA, 22 nt, Homo sapiens
guauugccacuuuugaacaguu

SEQ ID NO: 11778 - RNA, 22 nt, Homo sapiens
caagggguggaaaugguagugu

SEQ ID NO: 11779 - RNA, 22 nt, Homo sapiens
aaggcaauuuguugugaggauu

SEQ ID NO: 11780 - RNA, 22 nt, Homo sapiens
guggaguacugagggucacuua

SEQ ID NO: 11781 - RNA, 22 nt, Homo sapiens
guggaagauaguguguuaaugu

SEQ ID NO: 11782 - RNA, 22 nt, Homo sapiens
aaucacuuuggcaccaaccuaa

SEQ ID NO: 11783 - RNA, 22 nt, Homo sapiens
gacuggguuaguuugaaagacu

SEQ ID NO: 11784 - RNA, 22 nt, Homo sapiens
uugagcauugguauagguuuua

SEQ ID NO: 11785 - RNA, 20 nt, Homo sapiens
ccaguguuauuuauguucua

SEQ ID NO: 11786 - RNA, 22 nt, Homo sapiens
uacaguggaaguuaaccccauu

SEQ ID NO: 11787 - RNA, 22 nt, Homo sapiens
ucaugacacagcauacugacuu

SEQ ID NO: 11788 - RNA, 19 nt, Homo sapiens
auaaacuagaacugucccc

SEQ ID NO: 11789 - RNA, 23 nt, Homo sapiens
gggcuagaugagagcuuccuggg

SEQ ID NO: 11790 - RNA, 22 nt, Homo sapiens
cuggcaguguuucuugugggcu

SEQ ID NO: 11791 - RNA, 22 nt, Homo sapiens
uuggauuauaaacugagauuug

SEQ ID NO: 11792 - RNA, 22 nt, Homo sapiens
aucacagugaaaacagucaauu

SEQ ID NO: 11793 - RNA, 22 nt, Homo sapiens
auuguacuuauugccagaauuu

SEQ ID NO: 11794 - RNA, 22 nt, Homo sapiens
uuaagccacucaagagauagag

SEQ ID NO: 11795 - RNA, 22 nt, Homo sapiens
ugucacugugcagucaugcauu

SEQ ID NO: 11796 - RNA, 22 nt, Homo sapiens
augccaguguccagaguggguu

SEQ ID NO: 11797 - RNA, 22 nt, Homo sapiens
ucuugcaguucccaaauucaca

SEQ ID NO: 11798 - RNA, 22 nt, Homo sapiens
auuguucuuacaugcugucauc

SEQ ID NO: 11799 - RNA, 22 nt, Homo sapiens
auugcacuccagccuugggcaa

SEQ ID NO: 11800 - RNA, 22 nt, Homo sapiens
uacauagucuucuuuugguuau

SEQ ID NO: 11801 - RNA, 22 nt, Homo sapiens
gucacugggugcugcgccuguc

SEQ ID NO: 11802 - RNA, 22 nt, Homo sapiens
cauugcaugccagccugggcaa

SEQ ID NO: 11803 - RNA, 22 nt, Homo sapiens
cauugcacuccagcccuggcaa

SEQ ID NO: 11804 - RNA, 22 nt, Homo sapiens
auggaacauaacuauuugggga

SEQ ID NO: 11805 - RNA, 22 nt, Homo sapiens
auaugugacuucaugcaaggcu

SEQ ID NO: 11806 - RNA, 22 nt, Homo sapiens
uguuagguuggugcaaaaguga

SEQ ID NO: 11807 - RNA, 22 nt, Homo sapiens
uugguuaccuucagaaaugagu

SEQ ID NO: 11808 - RNA, 22 nt, Homo sapiens
augaccuuguccucagugucau

SEQ ID NO: 11809 - RNA, 22 nt, Homo sapiens
uuuggcuuuugugauacguaau

SEQ ID NO: 11810 - RNA, 22 nt, Homo sapiens
uguauguagugaccagggccag

SEQ ID NO: 11811 - RNA, 21 nt, Homo sapiens
uuuugugcaugugcagccugc

SEQ ID NO: 11812 - RNA, 22 nt, Homo sapiens
gcuggguugccagguuacuuaa

SEQ ID NO: 11813 - RNA, 22 nt, Homo sapiens
uccaguuuucuuuccuagggcu

SEQ ID NO: 11814 - RNA, 22 nt, Homo sapiens
cuuuuacacuguuagugggaau

SEQ ID NO: 11815 - RNA, 18 nt, Homo sapiens
ucacaaccacagugcugu

SEQ ID NO: 11816 - RNA, 22 nt, Homo sapiens
uuaaugugaaucaggaugcauu

SEQ ID NO: 11817 - RNA, 22 nt, Homo sapiens
uguggccuuuguuucaguuggg

SEQ ID NO: 11818 - RNA, 22 nt, Homo sapiens
aggacacugauguaugcugugg

SEQ ID NO: 11819 - RNA, 22 nt, Homo sapiens
gauguguuuguuucuggaggag

SEQ ID NO: 11820 - RNA, 22 nt, Homo sapiens
uuuugcaggucaggggcagaga

SEQ ID NO: 11821 - RNA, 22 nt, Homo sapiens
aaaggcuucggaucagaaggua

SEQ ID NO: 11822 - RNA, 22 nt, Homo sapiens
aucagcagcaugaaaagcaacu

SEQ ID NO: 11823 - RNA, 22 nt, Homo sapiens
aaucagagcccucugagcuuca

SEQ ID NO: 11824 - RNA, 23 nt, Homo sapiens
caucacauagaggaaagaggaca

SEQ ID NO: 11825 - RNA, 22 nt, Homo sapiens
uuugcaagaugaaaaaguucua

SEQ ID NO: 11826 - RNA, 22 nt, Homo sapiens
uuguauguaaccauuuggcaaa

SEQ ID NO: 11827 - RNA, 22 nt, Homo sapiens
agacacuguugaaaaggcccca

SEQ ID NO: 11828 - RNA, 22 nt, Homo sapiens
auagugcugcaauaaacacacg

SEQ ID NO: 11829 - RNA, 22 nt, Homo sapiens
acaggagugggauuugaguccu

SEQ ID NO: 11830 - RNA, 22 nt, Homo sapiens
augagcuauggagacagggcca

SEQ ID NO: 11831 - RNA, 22 nt, Homo sapiens
uugaccucaucacuucccaaag

SEQ ID NO: 11832 - RNA, 22 nt, Homo sapiens
ugauguccaguucauagaaacu

SEQ ID NO: 11833 - RNA, 22 nt, Homo sapiens
aagaggcuguaggauaaugccu

SEQ ID NO: 11834 - RNA, 22 nt, Homo sapiens
gaguauauuugcacuguuaugu

SEQ ID NO: 11835 - RNA, 22 nt, Homo sapiens
ucuuugaguggagcgaggcaga

SEQ ID NO: 11836 - RNA, 22 nt, Homo sapiens
gacacuggguguuuguuggcgu

SEQ ID NO: 11837 - RNA, 22 nt, Homo sapiens
uaacugucucccuugguccuga

SEQ ID NO: 11838 - RNA, 22 nt, Homo sapiens
aucaaaguaggcauauguuuuu

SEQ ID NO: 11839 - RNA, 18 nt, Homo sapiens
uccuuuugggguaggaga

SEQ ID NO: 11840 - RNA, 21 nt, Homo sapiens
uagcagcguuguugcaaaugu

SEQ ID NO: 11841 - RNA, 23 nt, Homo sapiens
ucugauguuauaaaauucuuugg

SEQ ID NO: 11842 - RNA, 22 nt, Homo sapiens
auacaugugugagcgaagaugu

SEQ ID NO: 11843 - RNA, 22 nt, Homo sapiens
caaugcauuauucucccacuuc

SEQ ID NO: 11844 - RNA, 22 nt, Homo sapiens
gaugauguuacucuuuuuccuu

SEQ ID NO: 11845 - RNA, 22 nt, Homo sapiens
aaaguucuguugauagugcuga

SEQ ID NO: 11846 - RNA, 22 nt, Homo sapiens
ggcagcucaggccccgcgcuga

SEQ ID NO: 11847 - RNA, 22 nt, Homo sapiens
auuacauagucaaggugucuca

SEQ ID NO: 11848 - RNA, 23 nt, Homo sapiens
ucaguacucuauaagugccagcu

SEQ ID NO: 11849 - RNA, 22 nt, Homo sapiens
ucuaaagcauccagauugcuuc

SEQ ID NO: 11850 - RNA, 22 nt, Homo sapiens
cuuuuugguagagcaggugugc

SEQ ID NO: 11851 - RNA, 22 nt, Homo sapiens
ugucuuggaugaggauuaacag

SEQ ID NO: 11852 - RNA, 22 nt, Homo sapiens
uugcacagugcuuucuuugccc

SEQ ID NO: 11853 - RNA, 22 nt, Homo sapiens
ggauaucauuauuucuagggcu

SEQ ID NO: 11854 - RNA, 22 nt, Homo sapiens
uugaaguagguaccguucaauu

SEQ ID NO: 11855 - RNA, 22 nt, Homo sapiens
gagaacuggcugauucaaggac

SEQ ID NO: 11856 - RNA, 22 nt, Homo sapiens
ucacuagggagaaacugaggcu

SEQ ID NO: 11857 - RNA, 22 nt, Homo sapiens
augagagcaacaccuucacuug

SEQ ID NO: 11858 - RNA, 22 nt, Homo sapiens
ucagugcuuuuuguugucauca

SEQ ID NO: 11859 - RNA, 18 nt, Homo sapiens
gagcaccuuuuuugcaga

SEQ ID NO: 11860 - RNA, 22 nt, Homo sapiens
uuugggccucugauuucuuugg

SEQ ID NO: 11861 - RNA, 22 nt, Homo sapiens
uugagacggagucucacucugu

SEQ ID NO: 11862 - RNA, 21 nt, Homo sapiens
uucauaaggcuucucuccugu

SEQ ID NO: 11863 - RNA, 22 nt, Homo sapiens
uuagcucaguuggugagagcgu

SEQ ID NO: 11864 - RNA, 22 nt, Homo sapiens
gaucuguuucaauugucuuagu

SEQ ID NO: 11865 - RNA, 23 nt, Homo sapiens
uacugcauccuccgccucuaggg

SEQ ID NO: 11866 - RNA, 22 nt, Homo sapiens
uugagacgaagucucacucuug

SEQ ID NO: 11867 - RNA, 22 nt, Homo sapiens
ucuggccccucccaaaucucau

SEQ ID NO: 11868 - RNA, 22 nt, Homo sapiens
acuugacacuuauauuacucac

SEQ ID NO: 11869 - RNA, 22 nt, Homo sapiens
uuagcagcaucccuggccugua

SEQ ID NO: 11870 - RNA, 22 nt, Homo sapiens
gugcuuauccccauucuggagg

SEQ ID NO: 11871 - RNA, 22 nt, Homo sapiens
aagguggaguugacaauuuuca

SEQ ID NO: 11872 - RNA, 23 nt, Homo sapiens
augaauguaaggaguguaagaaa

SEQ ID NO: 11873 - RNA, 22 nt, Homo sapiens
aauggcaucuacguuaaauguc

SEQ ID NO: 11874 - RNA, 22 nt, Homo sapiens
cugagauuuuuagauccuggcg

SEQ ID NO: 11875 - RNA, 22 nt, Homo sapiens
gaucagauggcuguuggugugu

SEQ ID NO: 11876 - RNA, 22 nt, Homo sapiens
ggugucaguuggccccuacugg

SEQ ID NO: 11877 - RNA, 22 nt, Homo sapiens
uggaguguagcggcaccuauua

SEQ ID NO: 11878 - RNA, 23 nt, Homo sapiens
auccacauucuaguccuuuaugc

SEQ ID NO: 11879 - RNA, 22 nt, Homo sapiens
uugagauggagucucacucugc

SEQ ID NO: 11880 - RNA, 22 nt, Homo sapiens
uacuacuuucugacaucuuuaa

SEQ ID NO: 11881 - RNA, 22 nt, Homo sapiens
guagaaaguuugcugucacaug

SEQ ID NO: 11882 - RNA, 22 nt, Homo sapiens
uuaucucagugaacugagugga

SEQ ID NO: 11883 - RNA, 22 nt, Homo sapiens
uuccagaugggaguucuauucu

SEQ ID NO: 11884 - RNA, 22 nt, Homo sapiens
uauagcuuuuuagggaauuugg

SEQ ID NO: 11885 - RNA, 22 nt, Homo sapiens
uucuccugguggacccuaaacg

SEQ ID NO: 11886 - RNA, 23 nt, Homo sapiens
ucuugguuauagaaaaauaguug

SEQ ID NO: 11887 - RNA, 22 nt, Homo sapiens
uuugaagcuaaggugcuugguu

SEQ ID NO: 11888 - RNA, 22 nt, Homo sapiens
ugaacagucaucucucuuguau

SEQ ID NO: 11889 - RNA, 20 nt, Homo sapiens
uucuugaguuaacaaguuac

SEQ ID NO: 11890 - RNA, 22 nt, Homo sapiens
uuccaugagaugcaucaaagcu

SEQ ID NO: 11891 - RNA, 22 nt, Homo sapiens
auagcagaauuuggucaagucu

SEQ ID NO: 11892 - RNA, 22 nt, Homo sapiens
ugaguaggauugguauuucuuc

SEQ ID NO: 11893 - RNA, 22 nt, Homo sapiens
caucacuuuuccuuuuacagau

SEQ ID NO: 11894 - RNA, 19 nt, Homo sapiens
gauagacaucacagugcca

SEQ ID NO: 11895 - RNA, 21 nt, Homo sapiens
guaugguugaagugacaagcc

SEQ ID NO: 11896 - RNA, 22 nt, Homo sapiens
ccaagccucaguuucccucugu

SEQ ID NO: 11897 - RNA, 20 nt, Homo sapiens
auucaaguaugccuugagaa

SEQ ID NO: 11898 - RNA, 19 nt, Homo sapiens
uuucauguuuuuggugaga

SEQ ID NO: 11899 - RNA, 22 nt, Homo sapiens
acguaguagguuuauaauauua

SEQ ID NO: 11900 - RNA, 22 nt, Homo sapiens
cugcauaaucaucucucugcau

SEQ ID NO: 11901 - RNA, 22 nt, Homo sapiens
cacaggccugucucuuucuaac

SEQ ID NO: 11902 - RNA, 22 nt, Homo sapiens
gauugcaauuuaggugagagag

SEQ ID NO: 11903 - RNA, 22 nt, Homo sapiens
uuaugcuuauugguguacggua

SEQ ID NO: 11904 - RNA, 20 nt, Homo sapiens
uuagucuccucugcccuguc

SEQ ID NO: 11905 - RNA, 18 nt, Homo sapiens
gacaguguggugauuccu

SEQ ID NO: 11906 - RNA, 21 nt, Homo sapiens
uugagcaacuaggguuauagg

SEQ ID NO: 11907 - RNA, 22 nt, Homo sapiens
ugacaagggaaaugcaaaaugu

SEQ ID NO: 11908 - RNA, 22 nt, Homo sapiens
ugugucacugcacuccagccug

SEQ ID NO: 11909 - RNA, 22 nt, Homo sapiens
cuaucacuguuuugaugcccgg

SEQ ID NO: 11910 - RNA, 22 nt, Homo sapiens
uccuuugguucuugucacccca

SEQ ID NO: 11911 - RNA, 22 nt, Homo sapiens
gagaacauuaauaguuaauuuu

SEQ ID NO: 11912 - RNA, 19 nt, Homo sapiens
uuuguccugcccuuucuca

SEQ ID NO: 11913 - RNA, 22 nt, Homo sapiens
gauuauagaaguaauggguuua

SEQ ID NO: 11914 - RNA, 22 nt, Homo sapiens
uucagcaggccaggcccugacu

SEQ ID NO: 11915 - RNA, 22 nt, Homo sapiens
agguaauagcacaugauaccuu

SEQ ID NO: 11916 - RNA, 22 nt, Homo sapiens
guugugcuuaagccuauugauu

SEQ ID NO: 11917 - RNA, 22 nt, Homo sapiens
gucacaguggccagugauguuc

SEQ ID NO: 11918 - RNA, 22 nt, Homo sapiens
ugguacuucaugcucacagaua

SEQ ID NO: 11919 - RNA, 22 nt, Homo sapiens
acugcacuccagccuuagugac

SEQ ID NO: 11920 - RNA, 22 nt, Homo sapiens
guugaacaauagauucauauca

SEQ ID NO: 11921 - RNA, 22 nt, Homo sapiens
ugugauuauuuauagacaguca

SEQ ID NO: 11922 - RNA, 18 nt, Homo sapiens
gugcaaugaauagcagag

SEQ ID NO: 11923 - RNA, 22 nt, Homo sapiens
aagaugcagucauacuggagua

SEQ ID NO: 11924 - RNA, 22 nt, Homo sapiens
aagcgguguugaauuuuguuga

SEQ ID NO: 11925 - RNA, 22 nt, Homo sapiens
agagcauugaguuaaugguuca

SEQ ID NO: 11926 - RNA, 22 nt, Homo sapiens
agagcaauguuaucagucucug

SEQ ID NO: 11927 - RNA, 22 nt, Homo sapiens
gggauuauugugauuucauguu

SEQ ID NO: 11928 - RNA, 22 nt, Homo sapiens
uugagagaaaaaauuuauuggu

SEQ ID NO: 11929 - RNA, 18 nt, Homo sapiens
auucuacaggccuuuuga

SEQ ID NO: 11930 - RNA, 22 nt, Homo sapiens
uugcauaagugcauucugugau

SEQ ID NO: 11931 - RNA, 22 nt, Homo sapiens
uuugguugucacaacuggggga

SEQ ID NO: 11932 - RNA, 22 nt, Homo sapiens
acaguacaugauaaauaaggua

SEQ ID NO: 11933 - RNA, 22 nt, Homo sapiens
uacugagagaggaauauugaaa

SEQ ID NO: 11934 - RNA, 22 nt, Homo sapiens
uugauagacaucugaguuguug

SEQ ID NO: 11935 - RNA, 22 nt, Homo sapiens
guagcaucauuugcaauuucau

SEQ ID NO: 11936 - RNA, 22 nt, Homo sapiens
agguacuuucccaaccauacug

SEQ ID NO: 11937 - RNA, 22 nt, Homo sapiens
ugaagacauuuuugggugugua

SEQ ID NO: 11938 - RNA, 22 nt, Homo sapiens
ugugccacuccaggaggcuguu

SEQ ID NO: 11939 - RNA, 22 nt, Homo sapiens
gacaguuuggugaggaagacga

SEQ ID NO: 11940 - RNA, 22 nt, Homo sapiens
ugagacaucucuccugagacag

SEQ ID NO: 11941 - RNA, 22 nt, Homo sapiens
uugauaugacuaucuuuuaugu

SEQ ID NO: 11942 - RNA, 22 nt, Homo sapiens
uugaggguggcauauauugauu

SEQ ID NO: 11943 - RNA, 22 nt, Homo sapiens
uaguaaacauuuuucuaucauu

SEQ ID NO: 11944 - RNA, 22 nt, Homo sapiens
ugcuggugauucagauucaaau

SEQ ID NO: 11945 - RNA, 22 nt, Homo sapiens
cucacagugacacgaaccccca

SEQ ID NO: 11946 - RNA, 22 nt, Homo sapiens
ccaucacgugcaguggccccac

SEQ ID NO: 11947 - RNA, 22 nt, Homo sapiens
ucucagugaauugguuuugucu

SEQ ID NO: 11948 - RNA, 22 nt, Homo sapiens
cacugugcaaccuccaccuccc

SEQ ID NO: 11949 - RNA, 22 nt, Homo sapiens
accuuuacaacuuguuagagua

SEQ ID NO: 11950 - RNA, 22 nt, Homo sapiens
uuugcacuucugagugugacau

SEQ ID NO: 11951 - RNA, 22 nt, Homo sapiens
gcugguguugugaaucaggccg

SEQ ID NO: 11952 - RNA, 22 nt, Homo sapiens
ugagacugagucucgcucuauu

SEQ ID NO: 11953 - RNA, 22 nt, Homo sapiens
acugcacuccagccuucggaca

SEQ ID NO: 11954 - RNA, 22 nt, Homo sapiens
uauuccacaauaugauuuuuaa

SEQ ID NO: 11955 - RNA, 22 nt, Homo sapiens
aggcaugauggcuccagaucau

SEQ ID NO: 11956 - RNA, 22 nt, Homo sapiens
gucucacagcuagcugcuuuau

SEQ ID NO: 11957 - RNA, 22 nt, Homo sapiens
cuaaggaaggacugaaaggaca

SEQ ID NO: 11958 - RNA, 22 nt, Homo sapiens
uuuagugcaucagacacccucu

SEQ ID NO: 11959 - RNA, 22 nt, Homo sapiens
aaggugcuguaagcauccaugu

SEQ ID NO: 11960 - RNA, 22 nt, Homo sapiens
ggcaugguggugugugccuaua

SEQ ID NO: 11961 - RNA, 22 nt, Homo sapiens
uuagcgccuuucuuccucuccu

SEQ ID NO: 11962 - RNA, 22 nt, Homo sapiens
uucuggcuuauaaacgugacuu

SEQ ID NO: 11963 - RNA, 22 nt, Homo sapiens
uaucacacgccuugcuucauuu

SEQ ID NO: 11964 - RNA, 20 nt, Homo sapiens
uaugagacugggagaaguuc

SEQ ID NO: 11965 - RNA, 22 nt, Homo sapiens
ugucaguuuuaacuagggaaua

SEQ ID NO: 11966 - RNA, 22 nt, Homo sapiens
uuuucaguuuuccagguagccg

SEQ ID NO: 11967 - RNA, 19 nt, Homo sapiens
ugcuuauccagagaaacuu

SEQ ID NO: 11968 - RNA, 22 nt, Homo sapiens
auaggcaagaugagguuuuuau

SEQ ID NO: 11969 - RNA, 22 nt, Homo sapiens
uuugaggaaaggcauaaguagg

SEQ ID NO: 11970 - RNA, 22 nt, Homo sapiens
cuucuugagacuuaggcuuugg

SEQ ID NO: 11971 - RNA, 23 nt, Homo sapiens
ucaugaggccauucaaauccauu

SEQ ID NO: 11972 - RNA, 22 nt, Homo sapiens
uuugucaauaacuaccaacagg

SEQ ID NO: 11973 - RNA, 20 nt, Homo sapiens
ugcagcacugggaaugcagu

SEQ ID NO: 11974 - RNA, 22 nt, Homo sapiens
aaagggcuugaauacucuuuuu

SEQ ID NO: 11975 - RNA, 22 nt, Homo sapiens
guuauccugucuuuacauacaa

SEQ ID NO: 11976 - RNA, 22 nt, Homo sapiens
uggaugacauccuuguaugcag

SEQ ID NO: 11977 - RNA, 18 nt, Homo sapiens
ggcugguguuuuaguaua

SEQ ID NO: 11978 - RNA, 22 nt, Homo sapiens
cugaauguccaggcagagguuu

SEQ ID NO: 11979 - RNA, 22 nt, Homo sapiens
ucuuuguuagaacccucuccuu

SEQ ID NO: 11980 - RNA, 22 nt, Homo sapiens
uaagacacauguguucccaggc

SEQ ID NO: 11981 - RNA, 22 nt, Homo sapiens
auugcccaggcuggagugcagu

SEQ ID NO: 11982 - RNA, 23 nt, Homo sapiens
ugacauguaauucaguccagcag

SEQ ID NO: 11983 - RNA, 22 nt, Homo sapiens
uuagguuguugccauugaaagu

SEQ ID NO: 11984 - RNA, 22 nt, Homo sapiens
auugucccucuuaaucccagca

SEQ ID NO: 11985 - RNA, 22 nt, Homo sapiens
ugauaugucacuugaucauggu

SEQ ID NO: 11986 - RNA, 22 nt, Homo sapiens
uggcaugaagaccccauccuuu

SEQ ID NO: 11987 - RNA, 22 nt, Homo sapiens
gaauggaacugacuauagcuga

SEQ ID NO: 11988 - RNA, 22 nt, Homo sapiens
ucaugucuuguuguauuuauuu

SEQ ID NO: 11989 - RNA, 22 nt, Homo sapiens
aauacugugauaucgagcgauu

SEQ ID NO: 11990 - RNA, 22 nt, Homo sapiens
cucugcuuaaugucccacuuga

SEQ ID NO: 11991 - RNA, 22 nt, Homo sapiens
ugagguaugacuuauuauucuu

SEQ ID NO: 11992 - RNA, 22 nt, Homo sapiens
uauaugcauugugggguacuga

SEQ ID NO: 11993 - RNA, 22 nt, Homo sapiens
uuaaucuguucucuguauucua

SEQ ID NO: 11994 - RNA, 22 nt, Homo sapiens
aauagcuguccuuagaagugug

SEQ ID NO: 11995 - RNA, 22 nt, Homo sapiens
uuggcaaauagguuuuauugca

SEQ ID NO: 11996 - RNA, 22 nt, Homo sapiens
augauguguucuguguucccau

SEQ ID NO: 11997 - RNA, 22 nt, Homo sapiens
uucaagucuuggcuuugccacc

SEQ ID NO: 11998 - RNA, 22 nt, Homo sapiens
agcuuguuuuccugcaacuaga

SEQ ID NO: 11999 - RNA, 22 nt, Homo sapiens
ugucacuuugccuucuggacuu

SEQ ID NO: 12000 - RNA, 22 nt, Homo sapiens
ucaaagucuucucaaguaacau

SEQ ID NO: 12001 - RNA, 22 nt, Homo sapiens
ugagcugagaucacacuacugu

SEQ ID NO: 12002 - RNA, 22 nt, Homo sapiens
gugagauggaguuggugucuuu

SEQ ID NO: 12003 - RNA, 22 nt, Homo sapiens
cugagaucuuauuagaaaugca

SEQ ID NO: 12004 - RNA, 22 nt, Homo sapiens
uucuggcuaugggauacuaaau

SEQ ID NO: 12005 - RNA, 22 nt, Homo sapiens
gacuagggaaaauuauuuuguu

SEQ ID NO: 12006 - RNA, 22 nt, Homo sapiens
ugagcuaugaucccaccucugu

SEQ ID NO: 12007 - RNA, 22 nt, Homo sapiens
uugcauuagugugguacauuug

SEQ ID NO: 12008 - RNA, 22 nt, Homo sapiens
cuuggcaugaagaauaauuuuu

SEQ ID NO: 12009 - RNA, 22 nt, Homo sapiens
uuuuagcaaagagacugguggc

SEQ ID NO: 12010 - RNA, 22 nt, Homo sapiens
gugcacaacgugcagguuaguu

SEQ ID NO: 12011 - RNA, 22 nt, Homo sapiens
gacuagagcugaucauguuacu

SEQ ID NO: 12012 - RNA, 22 nt, Homo sapiens
cccuuagacuacuaauaugagc

SEQ ID NO: 12013 - RNA, 22 nt, Homo sapiens
guaugucuuuauagcagugugg

SEQ ID NO: 12014 - RNA, 22 nt, Homo sapiens
ucaagguacguugccucagauu

SEQ ID NO: 12015 - RNA, 22 nt, Homo sapiens
cacuggacauguugaagcuuuu

SEQ ID NO: 12016 - RNA, 22 nt, Homo sapiens
ggcuacauuguuacaauuagua

SEQ ID NO: 12017 - RNA, 22 nt, Homo sapiens
uugcggcaguacagcccaggua

SEQ ID NO: 12018 - RNA, 22 nt, Homo sapiens
uauugucacuaaaggaagcugg

SEQ ID NO: 12019 - RNA, 22 nt, Homo sapiens
ccagcaccauuuguugaauagg

SEQ ID NO: 12020 - RNA, 22 nt, Homo sapiens
ucccuuaaugaugaacaaugag

SEQ ID NO: 12021 - RNA, 17 nt, Homo sapiens
ugagaacaugugguauu

SEQ ID NO: 12022 - RNA, 22 nt, Homo sapiens
uuuggcauuaagaugcuguauc

SEQ ID NO: 12023 - RNA, 19 nt, Homo sapiens
caugccacugcacuugagu

SEQ ID NO: 12024 - RNA, 20 nt, Homo sapiens
gcagcaccauauuucuaaga

SEQ ID NO: 12025 - RNA, 22 nt, Homo sapiens
gcuucauggaggcugggcgcag

SEQ ID NO: 12026 - RNA, 22 nt, Homo sapiens
uuguuguggauuaaauuugcau

SEQ ID NO: 12027 - RNA, 22 nt, Homo sapiens
uagcaguaagaaacugacauug

SEQ ID NO: 12028 - RNA, 22 nt, Homo sapiens
guagagguagauucuguuuuga

SEQ ID NO: 12029 - RNA, 22 nt, Homo sapiens
auacauguuucauguuggugug

SEQ ID NO: 12030 - RNA, 22 nt, Homo sapiens
uucuaugguuuuuaugguguua

SEQ ID NO: 12031 - RNA, 22 nt, Homo sapiens
augguacucucuugucugcaaa

SEQ ID NO: 12032 - RNA, 22 nt, Homo sapiens
uucuaaacaucuuacaaugcau

SEQ ID NO: 12033 - RNA, 22 nt, Homo sapiens
uugaaauguguaagcuccgaaa

SEQ ID NO: 12034 - RNA, 20 nt, Homo sapiens
uugcacagagaaggaggcag

SEQ ID NO: 12035 - RNA, 22 nt, Homo sapiens
ugagauucuuacuccugaguuc

SEQ ID NO: 12036 - RNA, 22 nt, Homo sapiens
uuaagaagugauuuuccucauu

SEQ ID NO: 12037 - RNA, 22 nt, Homo sapiens
ucacugugcaugaaggaugcug

SEQ ID NO: 12038 - RNA, 22 nt, Homo sapiens
acaucaggcuugugaugauuac

SEQ ID NO: 12039 - RNA, 22 nt, Homo sapiens
gucaaagucuauuggcuaauuc

SEQ ID NO: 12040 - RNA, 22 nt, Homo sapiens
ugagcauuguguuugacuguga

SEQ ID NO: 12041 - RNA, 22 nt, Homo sapiens
aucuucucuugaagggugggga

SEQ ID NO: 12042 - RNA, 22 nt, Homo sapiens
ugaguauagaucaguucaagug

SEQ ID NO: 12043 - RNA, 22 nt, Homo sapiens
auaagaugaaggaagccauauc

SEQ ID NO: 12044 - RNA, 22 nt, Homo sapiens
acccgggaggcaggagucauag

SEQ ID NO: 12045 - RNA, 22 nt, Homo sapiens
uccuuugguuauaggcaccucu

SEQ ID NO: 12046 - RNA, 22 nt, Homo sapiens
gcccauuguuccuaggcuacaa

SEQ ID NO: 12047 - RNA, 22 nt, Homo sapiens
gggagugugcacacaugguaua

SEQ ID NO: 12048 - RNA, 22 nt, Homo sapiens
ugagacugaguuuugccuuugu

SEQ ID NO: 12049 - RNA, 22 nt, Homo sapiens
agcacaguuaaaugaggcuucu

SEQ ID NO: 12050 - RNA, 22 nt, Homo sapiens
agcacauauauuucccaaaaca

SEQ ID NO: 12051 - RNA, 22 nt, Homo sapiens
ugagcagaguuguuucuccuga

SEQ ID NO: 12052 - RNA, 22 nt, Homo sapiens
aggaccauuguguagcagacau

SEQ ID NO: 12053 - RNA, 22 nt, Homo sapiens
aucagugauugauuuaaagacg

SEQ ID NO: 12054 - RNA, 20 nt, Homo sapiens
ugagauaguaauccccuaca

SEQ ID NO: 12055 - RNA, 22 nt, Homo sapiens
gucauggguuaaagguggauac

SEQ ID NO: 12056 - RNA, 22 nt, Homo sapiens
aaagugauuguaguuuuugcca

SEQ ID NO: 12057 - RNA, 23 nt, Homo sapiens
aggccaguuuuuccugcuugcug

SEQ ID NO: 12058 - RNA, 22 nt, Homo sapiens
aaguguaugaaacaguccaugg

SEQ ID NO: 12059 - RNA, 22 nt, Homo sapiens
guucacaguuaggacaacugcu

SEQ ID NO: 12060 - RNA, 22 nt, Homo sapiens
uugaaagacagaggggcaaguu

SEQ ID NO: 12061 - RNA, 22 nt, Homo sapiens
cugaauagucaacgauggacug

SEQ ID NO: 12062 - RNA, 22 nt, Homo sapiens
uugugcaugaugcauacauggu

SEQ ID NO: 12063 - RNA, 22 nt, Homo sapiens
auggaaacauaagaguauagau

SEQ ID NO: 12064 - RNA, 22 nt, Homo sapiens
guaaugcacucccaaagaucca

SEQ ID NO: 12065 - RNA, 22 nt, Homo sapiens
agagagcuuuaacuacccauuu

SEQ ID NO: 12066 - RNA, 22 nt, Homo sapiens
auacuaugagauaauaaagacu

SEQ ID NO: 12067 - RNA, 22 nt, Homo sapiens
gcauaugucuuuauagcagcau

SEQ ID NO: 12068 - RNA, 22 nt, Homo sapiens
ggagcaaugccucauucucacu

SEQ ID NO: 12069 - RNA, 22 nt, Homo sapiens
uucuugguuuaucgcuuuaaaa

SEQ ID NO: 12070 - RNA, 22 nt, Homo sapiens
aucaaagcagcauggcccaguc

SEQ ID NO: 12071 - RNA, 22 nt, Homo sapiens
ugagaugugugcauucaacuca

SEQ ID NO: 12072 - RNA, 22 nt, Homo sapiens
uacacagucaaaaauuuccagg

SEQ ID NO: 12073 - RNA, 22 nt, Homo sapiens
ugccaguauuuuacugaggauu

SEQ ID NO: 12074 - RNA, 22 nt, Homo sapiens
agugcagugguuaggagccagg

SEQ ID NO: 12075 - RNA, 22 nt, Homo sapiens
ugaguagaagugaagauagugg

SEQ ID NO: 12076 - RNA, 22 nt, Homo sapiens
aaugacugugauauuuuucuuc

SEQ ID NO: 12077 - RNA, 22 nt, Homo sapiens
cauugcacuccagccugcacga

SEQ ID NO: 12078 - RNA, 20 nt, Homo sapiens
agguuauuauaauuagaaga

SEQ ID NO: 12079 - RNA, 22 nt, Homo sapiens
uuuugguauacacaaggguccu

SEQ ID NO: 12080 - RNA, 17 nt, Homo sapiens
cuuguugugguaguuug

SEQ ID NO: 12081 - RNA, 22 nt, Homo sapiens
augagaaugaagccuggcgugu

SEQ ID NO: 12082 - RNA, 22 nt, Homo sapiens
gugaaaagaugagcaccauaca

SEQ ID NO: 12083 - RNA, 22 nt, Homo sapiens
ugagaugcuuguaaauucauuu

SEQ ID NO: 12084 - RNA, 22 nt, Homo sapiens
aucacuguccacucaucuuucu

SEQ ID NO: 12085 - RNA, 22 nt, Homo sapiens
gugugcaauuuugugggaggca

SEQ ID NO: 12086 - RNA, 22 nt, Homo sapiens
ugucaacauuuaucaaguuauu

SEQ ID NO: 12087 - RNA, 22 nt, Homo sapiens
uggcaugugugaagugcccagc

SEQ ID NO: 12088 - RNA, 22 nt, Homo sapiens
ugauaagugaaagugcucuauc

SEQ ID NO: 12089 - RNA, 22 nt, Homo sapiens
ugacucgaggcgccuccagucc

SEQ ID NO: 12090 - RNA, 22 nt, Homo sapiens
agggcuuguuuaacuaucauua

SEQ ID NO: 12091 - RNA, 22 nt, Homo sapiens
caaaguaauugugguuuugcca

SEQ ID NO: 12092 - RNA, 22 nt, Homo sapiens
ugaugaaguauaggaagggcuu

SEQ ID NO: 12093 - RNA, 22 nt, Homo sapiens
uuuaguccucugaaaaucuaua

SEQ ID NO: 12094 - RNA, 22 nt, Homo sapiens
cugaauguucuauagaagccgc

SEQ ID NO: 12095 - RNA, 22 nt, Homo sapiens
uuuagguuacauauaauccaaa

SEQ ID NO: 12096 - RNA, 22 nt, Homo sapiens
auggaaggagaauggucuuuga

SEQ ID NO: 12097 - RNA, 22 nt, Homo sapiens
gucuggguuuguuuguacuugc

SEQ ID NO: 12098 - RNA, 22 nt, Homo sapiens
uuggcaagaaccuucuuccaag

SEQ ID NO: 12099 - RNA, 22 nt, Homo sapiens
auaucccaguguguaaacacug

SEQ ID NO: 12100 - RNA, 20 nt, Homo sapiens
augaauguccuugauggcau

SEQ ID NO: 12101 - RNA, 22 nt, Homo sapiens
augaaauugcuaucgcaguacu

SEQ ID NO: 12102 - RNA, 22 nt, Homo sapiens
uaugugguuaauaggaauuugu

SEQ ID NO: 12103 - RNA, 22 nt, Homo sapiens
agcuuguccuccacccacacug

SEQ ID NO: 12104 - RNA, 22 nt, Homo sapiens
aucacaguuauaacauccuuuu

SEQ ID NO: 12105 - RNA, 22 nt, Homo sapiens
ugacuagagcaauuggaaacaa

SEQ ID NO: 12106 - RNA, 22 nt, Homo sapiens
uaaagcuagaauuguuccagca

SEQ ID NO: 12107 - RNA, 20 nt, Homo sapiens
uuaguucauuuagaagguuu

SEQ ID NO: 12108 - RNA, 22 nt, Homo sapiens
uggagugcaauggcaccaucuu

SEQ ID NO: 12109 - RNA, 22 nt, Homo sapiens
cuugagacauuguuuuccaagu

SEQ ID NO: 12110 - RNA, 22 nt, Homo sapiens
acacguguugaaauuuaauugc

SEQ ID NO: 12111 - RNA, 22 nt, Homo sapiens
ggucaaguaauccuggguguca

SEQ ID NO: 12112 - RNA, 22 nt, Homo sapiens
gaguuacauuguaauugccgag

SEQ ID NO: 12113 - RNA, 22 nt, Homo sapiens
ucuuugaguguauacuuagauu

SEQ ID NO: 12114 - RNA, 22 nt, Homo sapiens
augagugugaccugccaagaga

SEQ ID NO: 12115 - RNA, 22 nt, Homo sapiens
agggcuuuugagcugagauggu

SEQ ID NO: 12116 - RNA, 21 nt, Homo sapiens
acccccacaccuccuuaguuc

SEQ ID NO: 12117 - RNA, 22 nt, Homo sapiens
ucagcagugccccacucuacug

SEQ ID NO: 12118 - RNA, 22 nt, Homo sapiens
uuguauugucuugaugaguuga

SEQ ID NO: 12119 - RNA, 22 nt, Homo sapiens
cugagcaaaaugaagacacgau

SEQ ID NO: 12120 - RNA, 22 nt, Homo sapiens
auugagguauaauugcuaugca

SEQ ID NO: 12121 - RNA, 21 nt, Homo sapiens
agaaaaucuuaugggaaacau

SEQ ID NO: 12122 - RNA, 21 nt, Homo sapiens
uuguaugguugaacuugauac

SEQ ID NO: 12123 - RNA, 21 nt, Homo sapiens
uacuggagauacagucugcaa

SEQ ID NO: 12124 - RNA, 22 nt, Homo sapiens
ucaccuggggaucuuguuuaca

SEQ ID NO: 12125 - RNA, 22 nt, Homo sapiens
gugcaacaugccuggcuaauuu

SEQ ID NO: 12126 - RNA, 18 nt, Homo sapiens
uaacagucucucaggauc

SEQ ID NO: 12127 - RNA, 22 nt, Homo sapiens
gcaagcuugcugggccugacuc

SEQ ID NO: 12128 - RNA, 22 nt, Homo sapiens
cauggcauuugcagaguugaaa

SEQ ID NO: 12129 - RNA, 21 nt, Homo sapiens
ugucugagagaggagaucuac

SEQ ID NO: 12130 - RNA, 18 nt, Homo sapiens
cacuuggcuuugccccuc

SEQ ID NO: 12131 - RNA, 22 nt, Homo sapiens
ccucauggagaacuucugcuag

SEQ ID NO: 12132 - RNA, 22 nt, Homo sapiens
uuuuacacuguugguuggaaug

SEQ ID NO: 12133 - RNA, 22 nt, Homo sapiens
uuuuggcucugucuguaucuuu

SEQ ID NO: 12134 - RNA, 22 nt, Homo sapiens
ccugucuugaagagauccuccu

SEQ ID NO: 12135 - RNA, 22 nt, Homo sapiens
uugauaguuuuaaaauuaaucu

SEQ ID NO: 12136 - RNA, 22 nt, Homo sapiens
ugauaugucccucgacaucagg

SEQ ID NO: 12137 - RNA, 22 nt, Homo sapiens
ugguggcuuuucguagguucac

SEQ ID NO: 12138 - RNA, 22 nt, Homo sapiens
guccaaagugggagaggugggg

SEQ ID NO: 12139 - RNA, 22 nt, Homo sapiens
uuguuugguuagaugggcaagu

SEQ ID NO: 12140 - RNA, 22 nt, Homo sapiens
uaugcacuauagcauauguggu

SEQ ID NO: 12141 - RNA, 22 nt, Homo sapiens
uuggagcacuggggcacugaca

SEQ ID NO: 12142 - RNA, 22 nt, Homo sapiens
uuaacaguugcaugagacugag

SEQ ID NO: 12143 - RNA, 22 nt, Homo sapiens
cuaguaaugucugucuuaugga

SEQ ID NO: 12144 - RNA, 23 nt, Homo sapiens
uaacauguuuuuaagggaagcuu

SEQ ID NO: 12145 - RNA, 22 nt, Homo sapiens
gucugguuuuuuauauccucac

SEQ ID NO: 12146 - RNA, 22 nt, Homo sapiens
ugagauaucauuucacacccag

SEQ ID NO: 12147 - RNA, 22 nt, Homo sapiens
cacauguuugcuacauuuuucu

SEQ ID NO: 12148 - RNA, 23 nt, Homo sapiens
agccuguugccuaggcagcucau

SEQ ID NO: 12149 - RNA, 22 nt, Homo sapiens
cauugcacuccaucuugggcaa

SEQ ID NO: 12150 - RNA, 22 nt, Homo sapiens
auaggagugugcacagaguagg

SEQ ID NO: 12151 - RNA, 22 nt, Homo sapiens
aagcugguguguauuauucacu

SEQ ID NO: 12152 - RNA, 22 nt, Homo sapiens
ugagacugaguuuccaucuugu

SEQ ID NO: 12153 - RNA, 22 nt, Homo sapiens
aggugguauuucaaaguggcag

SEQ ID NO: 12154 - RNA, 22 nt, Homo sapiens
uaguagcaccucucaugagcuu

SEQ ID NO: 12155 - RNA, 22 nt, Homo sapiens
uaccugagucuagagucuagaa

SEQ ID NO: 12156 - RNA, 22 nt, Homo sapiens
uaaggcuucuuggaauacugca

SEQ ID NO: 12157 - RNA, 22 nt, Homo sapiens
ucaacauugcugucaggcaucu

SEQ ID NO: 12158 - RNA, 23 nt, Homo sapiens
ugugcacauuuacauauauacac

SEQ ID NO: 12159 - RNA, 22 nt, Homo sapiens
acuuugcuuagagggcauuaaa

SEQ ID NO: 12160 - RNA, 22 nt, Homo sapiens
aagagaugaagguccugacugu

SEQ ID NO: 12161 - RNA, 22 nt, Homo sapiens
cucccugagccagggcuuugac

SEQ ID NO: 12162 - RNA, 20 nt, Homo sapiens
uuaugucguuucuugcuuau

SEQ ID NO: 12163 - RNA, 22 nt, Homo sapiens
cuuugaugagaaaauacuuugu

SEQ ID NO: 12164 - RNA, 22 nt, Homo sapiens
uuaaaugcucacauaaagguag

SEQ ID NO: 12165 - RNA, 22 nt, Homo sapiens
uauuagugccuaagucuuaggg

SEQ ID NO: 12166 - RNA, 22 nt, Homo sapiens
ucuuuguguucaggagccacgu

SEQ ID NO: 12167 - RNA, 22 nt, Homo sapiens
aucuuugauuagacugauggau

SEQ ID NO: 12168 - RNA, 21 nt, Homo sapiens
gauaucuuuauucccaagagc

SEQ ID NO: 12169 - RNA, 22 nt, Homo sapiens
aaccuacauucuuaacuguugc

SEQ ID NO: 12170 - RNA, 22 nt, Homo sapiens
gauguuguuuagccuuugaugu

SEQ ID NO: 12171 - RNA, 22 nt, Homo sapiens
gacuggagcuguaugugguuac

SEQ ID NO: 12172 - RNA, 22 nt, Homo sapiens
agaagugcuggguucaggcugg

SEQ ID NO: 12173 - RNA, 22 nt, Homo sapiens
gagcaguugagagugcuggcca

SEQ ID NO: 12174 - RNA, 22 nt, Homo sapiens
uuuuggacuugcuccccugucc

SEQ ID NO: 12175 - RNA, 22 nt, Homo sapiens
gugaguggacgugaccaauaaa

SEQ ID NO: 12176 - RNA, 22 nt, Homo sapiens
auaaucaugucugaaaccuuug

SEQ ID NO: 12177 - RNA, 22 nt, Homo sapiens
ugggagugugcacaauuucagc

SEQ ID NO: 12178 - RNA, 22 nt, Homo sapiens
gcaagaaugagaaggauuaauu

SEQ ID NO: 12179 - RNA, 22 nt, Homo sapiens
uugguucaguuuaacgaguaau

SEQ ID NO: 12180 - RNA, 22 nt, Homo sapiens
cugaaagagcauuugaaugggu

SEQ ID NO: 12181 - RNA, 22 nt, Homo sapiens
gaggcauuauucccaucuuaca

SEQ ID NO: 12182 - RNA, 22 nt, Homo sapiens
uacaagcacaggcagcaggcug

SEQ ID NO: 12183 - RNA, 22 nt, Homo sapiens
ucaucagugcuugcaaauuauu

SEQ ID NO: 12184 - RNA, 22 nt, Homo sapiens
uugagguaguacuuauuauugg

SEQ ID NO: 12185 - RNA, 22 nt, Homo sapiens
gugccuucuagcuaugguuggc

SEQ ID NO: 12186 - RNA, 22 nt, Homo sapiens
uuaauuguccauuauucuguuc

SEQ ID NO: 12187 - RNA, 22 nt, Homo sapiens
guuaaagacauccacauaggag

SEQ ID NO: 12188 - RNA, 22 nt, Homo sapiens
cuuuacaguuggacucacgagg

SEQ ID NO: 12189 - RNA, 22 nt, Homo sapiens
uguauguuguaagacuuagacc

SEQ ID NO: 12190 - RNA, 22 nt, Homo sapiens
uggcuacuguacuugagcuauu

SEQ ID NO: 12191 - RNA, 22 nt, Homo sapiens
cagagucaagcucuuguuccau

SEQ ID NO: 12192 - RNA, 22 nt, Homo sapiens
cugagaacaucauucagauauu

SEQ ID NO: 12193 - RNA, 22 nt, Homo sapiens
uagagguagguguaugaacuag

SEQ ID NO: 12194 - RNA, 19 nt, Homo sapiens
ggacugucauggaguaguu

SEQ ID NO: 12195 - RNA, 22 nt, Homo sapiens
ggcuagagaauagugccacuaa

SEQ ID NO: 12196 - RNA, 22 nt, Homo sapiens
agccucauucuacauguuaaug

SEQ ID NO: 12197 - RNA, 18 nt, Homo sapiens
ugauaucaucacaauuga

SEQ ID NO: 12198 - RNA, 22 nt, Homo sapiens
acccugugaauauuuaaacuuc

SEQ ID NO: 12199 - RNA, 22 nt, Homo sapiens
uugagauggaguucauuuuugu

SEQ ID NO: 12200 - RNA, 22 nt, Homo sapiens
agcgccacugcacuccagccug

SEQ ID NO: 12201 - RNA, 22 nt, Homo sapiens
ugcauuguggaucuaaaugcau

SEQ ID NO: 12202 - RNA, 22 nt, Homo sapiens
aggcuuuuggagaacacugcac

SEQ ID NO: 12203 - RNA, 17 nt, Homo sapiens
uugagaguauaucuuac

SEQ ID NO: 12204 - RNA, 22 nt, Homo sapiens
ugauaagaaauuguucauguag

SEQ ID NO: 12205 - RNA, 23 nt, Homo sapiens
uuaagugcuuuucugaaacucuu

SEQ ID NO: 12206 - RNA, 22 nt, Homo sapiens
agaggucuuaucaaacaugcuu

SEQ ID NO: 12207 - RNA, 22 nt, Homo sapiens
ucaaaguauucuucugagaacc

SEQ ID NO: 12208 - RNA, 22 nt, Homo sapiens
agcagugugagaauggacuaau

SEQ ID NO: 12209 - RNA, 22 nt, Homo sapiens
aucaucaugcacuacagccugg

SEQ ID NO: 12210 - RNA, 23 nt, Homo sapiens
ggugaggaguacagagucuucau

SEQ ID NO: 12211 - RNA, 22 nt, Homo sapiens
uguuauguuguuugagaaaguc

SEQ ID NO: 12212 - RNA, 21 nt, Homo sapiens
uucuuugcucaguguuagagu

SEQ ID NO: 12213 - RNA, 22 nt, Homo sapiens
uugugcuuaauaaaaaguggua

SEQ ID NO: 12214 - RNA, 22 nt, Homo sapiens
aucuccaggugccagcugcgcc

SEQ ID NO: 12215 - RNA, 22 nt, Homo sapiens
cugcccuuucuauaugauguaa

SEQ ID NO: 12216 - RNA, 18 nt, Homo sapiens
ugggaagaaauucuucuc

SEQ ID NO: 12217 - RNA, 22 nt, Homo sapiens
auaaagcuauuccucucuuuuu

SEQ ID NO: 12218 - RNA, 22 nt, Homo sapiens
aagcuguguguaagcucucaca

SEQ ID NO: 12219 - RNA, 22 nt, Homo sapiens
uuucauguuuuucugugaggca

SEQ ID NO: 12220 - RNA, 21 nt, Homo sapiens
uaacagcuccacuccauucuc

SEQ ID NO: 12221 - RNA, 22 nt, Homo sapiens
cacugcaguaaauugcgucggu

SEQ ID NO: 12222 - RNA, 22 nt, Homo sapiens
agcaacauuguucauaauagcu

SEQ ID NO: 12223 - RNA, 22 nt, Homo sapiens
caccacuacaccccaggcuggg

SEQ ID NO: 12224 - RNA, 22 nt, Homo sapiens
auauuguacugcuacugguucu

SEQ ID NO: 12225 - RNA, 22 nt, Homo sapiens
cuguagcuuuuauaugcuuagc

SEQ ID NO: 12226 - RNA, 22 nt, Homo sapiens
agugccuacuauguagaugcug

SEQ ID NO: 12227 - RNA, 20 nt, Homo sapiens
cauugcccuccagccugggc

SEQ ID NO: 12228 - RNA, 22 nt, Homo sapiens
ugagaugagagaaugcuugccu

SEQ ID NO: 12229 - RNA, 22 nt, Homo sapiens
gucaguggauacugucucuguc

SEQ ID NO: 12230 - RNA, 22 nt, Homo sapiens
guguucaaauucugacagagag

SEQ ID NO: 12231 - RNA, 20 nt, Homo sapiens
uuagcagcaugauuuauaau

SEQ ID NO: 12232 - RNA, 22 nt, Homo sapiens
aauauugucaaaauggauucca

SEQ ID NO: 12233 - RNA, 22 nt, Homo sapiens
aaagaagucagccuguccuuug

SEQ ID NO: 12234 - RNA, 22 nt, Homo sapiens
ugugaagaugagaugacgcccu

SEQ ID NO: 12235 - RNA, 22 nt, Homo sapiens
ugauaauuuugucagguuuugg

SEQ ID NO: 12236 - RNA, 22 nt, Homo sapiens
aauaagcugagagaauucuaca

SEQ ID NO: 12237 - RNA, 22 nt, Homo sapiens
ugcuggugucaucaaggcuuug

SEQ ID NO: 12238 - RNA, 22 nt, Homo sapiens
aauccaugugcuuuaccauuuu

SEQ ID NO: 12239 - RNA, 22 nt, Homo sapiens
cauuguacauaaguauggagua

SEQ ID NO: 12240 - RNA, 22 nt, Homo sapiens
aagugacuagacuaugaaaccu

SEQ ID NO: 12241 - RNA, 22 nt, Homo sapiens
ugagcgaugggaggaagugaua

SEQ ID NO: 12242 - RNA, 22 nt, Homo sapiens
uguguaaauauauacacacgug

SEQ ID NO: 12243 - RNA, 22 nt, Homo sapiens
aagcaggugucugugucuguaa

SEQ ID NO: 12244 - RNA, 20 nt, Homo sapiens
agaagcauugcucucuucag

SEQ ID NO: 12245 - RNA, 22 nt, Homo sapiens
uuccuugagaaaggcacaaguu

SEQ ID NO: 12246 - RNA, 22 nt, Homo sapiens
gcaauggaaucccuugaucaau

SEQ ID NO: 12247 - RNA, 22 nt, Homo sapiens
uauaacacccacauauagucuu

SEQ ID NO: 12248 - RNA, 22 nt, Homo sapiens
gagaucuuggccaaguuucuua

SEQ ID NO: 12249 - RNA, 22 nt, Homo sapiens
ggacugagaggacuacagugua

SEQ ID NO: 12250 - RNA, 22 nt, Homo sapiens
auacaaguuauuugaacugcgg

SEQ ID NO: 12251 - RNA, 22 nt, Homo sapiens
caucccugaaccccagaaaucu

SEQ ID NO: 12252 - RNA, 22 nt, Homo sapiens
guacaguauaguaauaggauuu

SEQ ID NO: 12253 - RNA, 19 nt, Homo sapiens
ugucaucaucuuuucuugc

SEQ ID NO: 12254 - RNA, 22 nt, Homo sapiens
uuacagucuuaggcagugcuuu

SEQ ID NO: 12255 - RNA, 22 nt, Homo sapiens
agggcacuguagguccugccuc

SEQ ID NO: 12256 - RNA, 22 nt, Homo sapiens
cauugcacucugcauuccaguc

SEQ ID NO: 12257 - RNA, 22 nt, Homo sapiens
guacacaacaugcagguuuguu

SEQ ID NO: 12258 - RNA, 22 nt, Homo sapiens
uaggcuguguggccguggggcu

SEQ ID NO: 12259 - RNA, 22 nt, Homo sapiens
gagguaagaguuuuccauuucu

SEQ ID NO: 12260 - RNA, 22 nt, Homo sapiens
uagagagcuguuugaaagcagg

SEQ ID NO: 12261 - RNA, 22 nt, Homo sapiens
uaggagugugaacccuaugaac

SEQ ID NO: 12262 - RNA, 21 nt, Homo sapiens
uggcaaaaugggcaguggguu

SEQ ID NO: 12263 - RNA, 22 nt, Homo sapiens
aagugaaugugcuggaauagcu

SEQ ID NO: 12264 - RNA, 22 nt, Homo sapiens
ugaagugggaaaugaguauuaa

SEQ ID NO: 12265 - RNA, 22 nt, Homo sapiens
uuauuugguugcugacuuggaa

SEQ ID NO: 12266 - RNA, 22 nt, Homo sapiens
caguggaugaacaagaagugau

SEQ ID NO: 12267 - RNA, 22 nt, Homo sapiens
gccauggugucuuauuuuugug

SEQ ID NO: 12268 - RNA, 22 nt, Homo sapiens
ggcuagaauagggauagaccuu

SEQ ID NO: 12269 - RNA, 22 nt, Homo sapiens
uuucuuggagcucuuagggucg

SEQ ID NO: 12270 - RNA, 22 nt, Homo sapiens
cuagcuuuugauguaaagugag

SEQ ID NO: 12271 - RNA, 22 nt, Homo sapiens
agcaccacaauuuccugccuaa

SEQ ID NO: 12272 - RNA, 22 nt, Homo sapiens
uuggcaaagugucuggcauuua

SEQ ID NO: 12273 - RNA, 22 nt, Homo sapiens
gaggcaagaguaguuaaguuag

SEQ ID NO: 12274 - RNA, 22 nt, Homo sapiens
uuacaugagacugucgcuaguu

SEQ ID NO: 12275 - RNA, 22 nt, Homo sapiens
gggaauguagcaaaucugcaau

SEQ ID NO: 12276 - RNA, 22 nt, Homo sapiens
uucuggcucgauucucugaccg

SEQ ID NO: 12277 - RNA, 22 nt, Homo sapiens
uuaaaggcaugguuagacaugg

SEQ ID NO: 12278 - RNA, 22 nt, Homo sapiens
ggaauguuaaagacuacacuga

SEQ ID NO: 12279 - RNA, 22 nt, Homo sapiens
uugcaaaguugccaaggaagga

SEQ ID NO: 12280 - RNA, 22 nt, Homo sapiens
uggagugagaacuucaaugaug

SEQ ID NO: 12281 - RNA, 22 nt, Homo sapiens
ugaaauacuuuggcucuuuguu

SEQ ID NO: 12282 - RNA, 22 nt, Homo sapiens
aaugacucugccuaaauuucac

SEQ ID NO: 12283 - RNA, 22 nt, Homo sapiens
ucacaaguguauagacaugucc

SEQ ID NO: 12284 - RNA, 22 nt, Homo sapiens
gugucacugugaggauauugua

SEQ ID NO: 12285 - RNA, 22 nt, Homo sapiens
uuguaauguuaccaaauggugu

SEQ ID NO: 12286 - RNA, 22 nt, Homo sapiens
cucaaaguacuuugguuauugu

SEQ ID NO: 12287 - RNA, 22 nt, Homo sapiens
uucccugugggcuggugcucca

SEQ ID NO: 12288 - RNA, 22 nt, Homo sapiens
uaagguauuuacauuucuguuu

SEQ ID NO: 12289 - RNA, 22 nt, Homo sapiens
cugugcuugagagaugacacag

SEQ ID NO: 12290 - RNA, 22 nt, Homo sapiens
auggcaccauguuaugauaaua

SEQ ID NO: 12291 - RNA, 22 nt, Homo sapiens
cccgggcugaaaucagauuugu

SEQ ID NO: 12292 - RNA, 22 nt, Homo sapiens
ucagguagcauuuuggaaacag

SEQ ID NO: 12293 - RNA, 22 nt, Homo sapiens
uuaagcucauuuccauucuaca

SEQ ID NO: 12294 - RNA, 22 nt, Homo sapiens
auaaacagcuuauccucuauuc

SEQ ID NO: 12295 - RNA, 22 nt, Homo sapiens
agugcaguugucacgugccuuc

SEQ ID NO: 12296 - RNA, 21 nt, Homo sapiens
ucuguguugaucucacuggga

SEQ ID NO: 12297 - RNA, 22 nt, Homo sapiens
uauuugguuauaugaguaaguu

SEQ ID NO: 12298 - RNA, 22 nt, Homo sapiens
uacaagguaucagugaccguaa

SEQ ID NO: 12299 - RNA, 22 nt, Homo sapiens
ucaguggagcuacaauucuggg

SEQ ID NO: 12300 - RNA, 22 nt, Homo sapiens
gcucaaguaauggcaguuuugc

SEQ ID NO: 12301 - RNA, 22 nt, Homo sapiens
ucauugcacucccagacacccu

SEQ ID NO: 12302 - RNA, 20 nt, Homo sapiens
uacacguguagcauucucua

SEQ ID NO: 12303 - RNA, 22 nt, Homo sapiens
aauggcuucuuauugugguuca

SEQ ID NO: 12304 - RNA, 22 nt, Homo sapiens
ccuucauucauuaauuuagccc

SEQ ID NO: 12305 - RNA, 22 nt, Homo sapiens
agcacgaaaccaaauucuguga

SEQ ID NO: 12306 - RNA, 22 nt, Homo sapiens
ggacuagagaugagauuuuuca

SEQ ID NO: 12307 - RNA, 22 nt, Homo sapiens
aaaguguguuuccaaccugugg

SEQ ID NO: 12308 - RNA, 22 nt, Homo sapiens
uugagaucuuuuaggccuuugu

SEQ ID NO: 12309 - RNA, 22 nt, Homo sapiens
augacuagaggagggauggcca

SEQ ID NO: 12310 - RNA, 22 nt, Homo sapiens
guaugguuguaugaggacccau

SEQ ID NO: 12311 - RNA, 18 nt, Homo sapiens
ugucagaguggauuguaa

SEQ ID NO: 12312 - RNA, 22 nt, Homo sapiens
guugcccuuagcacuucagccu

SEQ ID NO: 12313 - RNA, 22 nt, Homo sapiens
aaugcacauaaaauccuccagg

SEQ ID NO: 12314 - RNA, 22 nt, Homo sapiens
uuagaucaacauggaacucuau

SEQ ID NO: 12315 - RNA, 22 nt, Homo sapiens
aaaugucauggaguguuucccc

SEQ ID NO: 12316 - RNA, 23 nt, Homo sapiens
ggaaacauccagucuuucaccau

SEQ ID NO: 12317 - RNA, 22 nt, Homo sapiens
acaugagacuggguuuguaggg

SEQ ID NO: 12318 - RNA, 22 nt, Homo sapiens
cgacuggccuagacuaguguuu

SEQ ID NO: 12319 - RNA, 22 nt, Homo sapiens
aaacagucuucuccugagggac

SEQ ID NO: 12320 - RNA, 22 nt, Homo sapiens
aucccuuucugauacuuucccu

SEQ ID NO: 12321 - RNA, 22 nt, Homo sapiens
uaugucaugggguuuuugagau

SEQ ID NO: 12322 - RNA, 21 nt, Homo sapiens
auagcacaucagauuuuauua

SEQ ID NO: 12323 - RNA, 22 nt, Homo sapiens
auagccucauucuucagaugag

SEQ ID NO: 12324 - RNA, 22 nt, Homo sapiens
uuuguaauccuauuccaaagga

SEQ ID NO: 12325 - RNA, 22 nt, Homo sapiens
uacaggaaugucagguugcugu

SEQ ID NO: 12326 - RNA, 22 nt, Homo sapiens
uuuggucuuuuguaaguuaucu

SEQ ID NO: 12327 - RNA, 22 nt, Homo sapiens
agguagugugaugcuccuguuu

SEQ ID NO: 12328 - RNA, 22 nt, Homo sapiens
auugcccauaaggauauuguca

SEQ ID NO: 12329 - RNA, 17 nt, Homo sapiens
gcccuuugugccucuuc

SEQ ID NO: 12330 - RNA, 22 nt, Homo sapiens
uggacuguaauagagaacagaa

SEQ ID NO: 12331 - RNA, 22 nt, Homo sapiens
ucuuuaguuaagggacauuuua

SEQ ID NO: 12332 - RNA, 22 nt, Homo sapiens
agcaccauuguacuccagccug

SEQ ID NO: 12333 - RNA, 22 nt, Homo sapiens
uucuacuucauuaggaggauug

SEQ ID NO: 12334 - RNA, 22 nt, Homo sapiens
agaugcuguuaucaacuguagc

SEQ ID NO: 12335 - RNA, 22 nt, Homo sapiens
uugagggcugaauaccaaucag

SEQ ID NO: 12336 - RNA, 22 nt, Homo sapiens
uuauuauguuggugcaaaggua

SEQ ID NO: 12337 - RNA, 22 nt, Homo sapiens
uauugcacgccagccugagcaa

SEQ ID NO: 12338 - RNA, 22 nt, Homo sapiens
ugauaugaaucaaucacucuuc

SEQ ID NO: 12339 - RNA, 22 nt, Homo sapiens
aaucugucuagacaaggagucu

SEQ ID NO: 12340 - RNA, 22 nt, Homo sapiens
gucagauaauuugcauccaucu

SEQ ID NO: 12341 - RNA, 22 nt, Homo sapiens
gaauagugcugcgauaaacaua

SEQ ID NO: 12342 - RNA, 22 nt, Homo sapiens
cacagcuagucaaugguagaca

SEQ ID NO: 12343 - RNA, 22 nt, Homo sapiens
ucagagugguuguaccauuuga

SEQ ID NO: 12344 - RNA, 22 nt, Homo sapiens
ugacaggauggagaucgguauu

SEQ ID NO: 12345 - RNA, 21 nt, Homo sapiens
ccaugggacggaaugaauaca

SEQ ID NO: 12346 - RNA, 22 nt, Homo sapiens
uagagauaucaauuucauggug

SEQ ID NO: 12347 - RNA, 22 nt, Homo sapiens
ucucauugauucuggggugaug

SEQ ID NO: 12348 - RNA, 22 nt, Homo sapiens
uccuacaugcaguacauucaaa

SEQ ID NO: 12349 - RNA, 22 nt, Homo sapiens
guggacugggagagauaguucc

SEQ ID NO: 12350 - RNA, 22 nt, Homo sapiens
ccauggcaauggucagucuauu

SEQ ID NO: 12351 - RNA, 17 nt, Homo sapiens
ccagugaucccuuuugu

SEQ ID NO: 12352 - RNA, 22 nt, Homo sapiens
auacaugcauuugcacgagagu

SEQ ID NO: 12353 - RNA, 22 nt, Homo sapiens
gauauguguaucuauguacaug

SEQ ID NO: 12354 - RNA, 20 nt, Homo sapiens
uuuugaacuuggcaaccugu

SEQ ID NO: 12355 - RNA, 18 nt, Homo sapiens
uuagagugcauuacuuug

SEQ ID NO: 12356 - RNA, 22 nt, Homo sapiens
uccuugagaggacagagccaua

SEQ ID NO: 12357 - RNA, 22 nt, Homo sapiens
auugcaaagcguagacucuaaa

SEQ ID NO: 12358 - RNA, 22 nt, Homo sapiens
uucccuuucuuaaagaguuagg

SEQ ID NO: 12359 - RNA, 22 nt, Homo sapiens
uaauccuagcacuuuggaagac

SEQ ID NO: 12360 - RNA, 22 nt, Homo sapiens
gaaccagcagacuuugacaggu

SEQ ID NO: 12361 - RNA, 22 nt, Homo sapiens
ucugccuuuucaugugggaugg

SEQ ID NO: 12362 - RNA, 22 nt, Homo sapiens
uaaugcuugguuguuuggaaaa

SEQ ID NO: 12363 - RNA, 22 nt, Homo sapiens
cagagaaugucuuuuuuaacca

SEQ ID NO: 12364 - RNA, 22 nt, Homo sapiens
ggcgccauugcacuccagccug

SEQ ID NO: 12365 - RNA, 22 nt, Homo sapiens
augaggugaguaaauaaaugaa

SEQ ID NO: 12366 - RNA, 22 nt, Homo sapiens
uugucacauggggcggcugccc

SEQ ID NO: 12367 - RNA, 21 nt, Homo sapiens
uucaucagccagaaaucaagc

SEQ ID NO: 12368 - RNA, 22 nt, Homo sapiens
cauggcuuguauaagauucuca

SEQ ID NO: 12369 - RNA, 20 nt, Homo sapiens
uagcaggugucaggugauau

SEQ ID NO: 12370 - RNA, 22 nt, Homo sapiens
augauacuggcuucauagaaug

SEQ ID NO: 12371 - RNA, 22 nt, Homo sapiens
ugugaagaaagucauugguagc

SEQ ID NO: 12372 - RNA, 22 nt, Homo sapiens
uugugaauggugccacaauaaa

SEQ ID NO: 12373 - RNA, 22 nt, Homo sapiens
uugugaguggugccgcaauaaa

SEQ ID NO: 12374 - RNA, 22 nt, Homo sapiens
acaaagcuagggaauccaucuu

SEQ ID NO: 12375 - RNA, 22 nt, Homo sapiens
agcuucauuguuaugaauguca

SEQ ID NO: 12376 - RNA, 22 nt, Homo sapiens
ucaccaguaauaaagagccugc

SEQ ID NO: 12377 - RNA, 22 nt, Homo sapiens
agggccuuuguagauguacuca

SEQ ID NO: 12378 - RNA, 22 nt, Homo sapiens
ucagauguuuuguuuaucugcu

SEQ ID NO: 12379 - RNA, 22 nt, Homo sapiens
gaggcagucugucccuuagcag

SEQ ID NO: 12380 - RNA, 19 nt, Homo sapiens
uacaugcagcaggcacgca

SEQ ID NO: 12381 - RNA, 22 nt, Homo sapiens
uccuucaguccaguggguuuug

SEQ ID NO: 12382 - RNA, 19 nt, Homo sapiens
uggcaugaaugugaacuaa

SEQ ID NO: 12383 - RNA, 22 nt, Homo sapiens
ggaaugcagugagcauuagaua

SEQ ID NO: 12384 - RNA, 22 nt, Homo sapiens
ucauugguucuggguguuguug

SEQ ID NO: 12385 - RNA, 22 nt, Homo sapiens
agaaaugcagcaugaggcggca

SEQ ID NO: 12386 - RNA, 22 nt, Homo sapiens
auggaauguggaaugguaagua

SEQ ID NO: 12387 - RNA, 19 nt, Homo sapiens
ugagaaccucuacagaguc

SEQ ID NO: 12388 - RNA, 22 nt, Homo sapiens
aucuacagccagucugguuugu

SEQ ID NO: 12389 - RNA, 18 nt, Homo sapiens
uggauuguacuguguucu

SEQ ID NO: 12390 - RNA, 22 nt, Homo sapiens
ugugauugauauauuuacagaa

SEQ ID NO: 12391 - RNA, 22 nt, Homo sapiens
ggaaauguaaacaauggggcua

SEQ ID NO: 12392 - RNA, 22 nt, Homo sapiens
uaucucagagaaucagauuuac

SEQ ID NO: 12393 - RNA, 22 nt, Homo sapiens
uugaagugaagaacaauaucac

SEQ ID NO: 12394 - RNA, 21 nt, Homo sapiens
gagcuaggugaggcuguaaug

SEQ ID NO: 12395 - RNA, 22 nt, Homo sapiens
cuugcacauuacagaucugcau

SEQ ID NO: 12396 - RNA, 22 nt, Homo sapiens
uugcuuaggcuggagugcagug

SEQ ID NO: 12397 - RNA, 22 nt, Homo sapiens
ucacauuguguagccugcucac

SEQ ID NO: 12398 - RNA, 22 nt, Homo sapiens
uaggacuuuucuugagagugac

SEQ ID NO: 12399 - RNA, 22 nt, Homo sapiens
uggcaaaucagaggcauggaca

SEQ ID NO: 12400 - RNA, 22 nt, Homo sapiens
uaaguaucaguuuagcuaugau

SEQ ID NO: 12401 - RNA, 22 nt, Homo sapiens
gagauauuauuucccuuucaca

SEQ ID NO: 12402 - RNA, 22 nt, Homo sapiens
gacagguuuucuguuucugaaa

SEQ ID NO: 12403 - RNA, 22 nt, Homo sapiens
gacaguuucucaggcuuccuua

SEQ ID NO: 12404 - RNA, 22 nt, Homo sapiens
uugugguaggaugaagagauga

SEQ ID NO: 12405 - RNA, 22 nt, Homo sapiens
gccuguagaagaguagaugacc

SEQ ID NO: 12406 - RNA, 22 nt, Homo sapiens
aagagcucauccauaguuguca

SEQ ID NO: 12407 - RNA, 22 nt, Homo sapiens
gaucuguguuuguaugcauaag

SEQ ID NO: 12408 - RNA, 22 nt, Homo sapiens
uuuaagccaggugcaguggcuc

SEQ ID NO: 12409 - RNA, 20 nt, Homo sapiens
uggcaugaaauuuuccaagc

SEQ ID NO: 12410 - RNA, 22 nt, Homo sapiens
uguccguuuuggcuuucucccu

SEQ ID NO: 12411 - RNA, 22 nt, Homo sapiens
ugacaugaagaaaaacagauuu

SEQ ID NO: 12412 - RNA, 22 nt, Homo sapiens
ggguaggcaagcggaugucaga

SEQ ID NO: 12413 - RNA, 22 nt, Homo sapiens
ugucuagaaaagccugccuucu

SEQ ID NO: 12414 - RNA, 22 nt, Homo sapiens
ugugucacugaggguuagugua

SEQ ID NO: 12415 - RNA, 22 nt, Homo sapiens
ugauuggagaugaauuucguuu

SEQ ID NO: 12416 - RNA, 22 nt, Homo sapiens
uuuagcagcaaagagcuguguu

SEQ ID NO: 12417 - RNA, 22 nt, Homo sapiens
agcagcauuaugauauaucuua

SEQ ID NO: 12418 - RNA, 22 nt, Homo sapiens
ucaaagugacaaaguugcagca

SEQ ID NO: 12419 - RNA, 22 nt, Homo sapiens
ugagcagagaucuauuacugug

SEQ ID NO: 12420 - RNA, 22 nt, Homo sapiens
gucuuugaugucuaugugcuuc

SEQ ID NO: 12421 - RNA, 22 nt, Homo sapiens
ucagugucugcauucuuauugu

SEQ ID NO: 12422 - RNA, 22 nt, Homo sapiens
uuucauggaggauuugcuucuu

SEQ ID NO: 12423 - RNA, 22 nt, Homo sapiens
gagagcauuaagccaucaucau

SEQ ID NO: 12424 - RNA, 22 nt, Homo sapiens
aucgcugagaaagggacuuuca

SEQ ID NO: 12425 - RNA, 22 nt, Homo sapiens
auaugcuaauuuuuagucgagc

SEQ ID NO: 12426 - RNA, 22 nt, Homo sapiens
uguugcuuaagccacccagucu

SEQ ID NO: 12427 - RNA, 20 nt, Homo sapiens
ggaauagucuacacucugac

SEQ ID NO: 12428 - RNA, 21 nt, Homo sapiens
uggaaacuucuagcuuacgua

SEQ ID NO: 12429 - RNA, 22 nt, Homo sapiens
gcuuugguucaaccaggcaauu

SEQ ID NO: 12430 - RNA, 22 nt, Homo sapiens
uauauagcuaugucuguccauu

SEQ ID NO: 12431 - RNA, 22 nt, Homo sapiens
ucaaguaauacucccaucuugg

SEQ ID NO: 12432 - RNA, 22 nt, Homo sapiens
ucucaugaagauagagaauaga

SEQ ID NO: 12433 - RNA, 22 nt, Homo sapiens
aauggguaguacugugguaaca

SEQ ID NO: 12434 - RNA, 22 nt, Homo sapiens
uaaggcaaaccuuggcugcagu

SEQ ID NO: 12435 - RNA, 22 nt, Homo sapiens
uggcaugauccuagauucaaca

SEQ ID NO: 12436 - RNA, 22 nt, Homo sapiens
agcagcaauuuuguaugguuua

SEQ ID NO: 12437 - RNA, 22 nt, Homo sapiens
gaaugugcuguuggcugggcgu

SEQ ID NO: 12438 - RNA, 22 nt, Homo sapiens
ccuggaagaaaggugcuaaaua

SEQ ID NO: 12439 - RNA, 22 nt, Homo sapiens
ucagugcaggaauuuccuuaga

SEQ ID NO: 12440 - RNA, 22 nt, Homo sapiens
gguaggcacuggugggaagaga

SEQ ID NO: 12441 - RNA, 22 nt, Homo sapiens
auaucagugucuuacuguuuuu

SEQ ID NO: 12442 - RNA, 22 nt, Homo sapiens
caucacaguacuaaucgucaua

SEQ ID NO: 12443 - RNA, 22 nt, Homo sapiens
gagaugaaguuaaggaucuuua

SEQ ID NO: 12444 - RNA, 19 nt, Homo sapiens
agugucauggucauuauuu

SEQ ID NO: 12445 - RNA, 22 nt, Homo sapiens
uacaacacugguucgacaugug

SEQ ID NO: 12446 - RNA, 22 nt, Homo sapiens
cagguacauuuuaaagggcuca

SEQ ID NO: 12447 - RNA, 22 nt, Homo sapiens
auggcucuggauagaaugcagg

SEQ ID NO: 12448 - RNA, 22 nt, Homo sapiens
aagcuguuguucauccugaauu

SEQ ID NO: 12449 - RNA, 22 nt, Homo sapiens
auagcagugugaaaacagacug

SEQ ID NO: 12450 - RNA, 22 nt, Homo sapiens
aaacugccuuccuuguaggugc

SEQ ID NO: 12451 - RNA, 22 nt, Homo sapiens
auucaccauggaccaggggccu

SEQ ID NO: 12452 - RNA, 22 nt, Homo sapiens
ucgcugggaagacugaaguguc

SEQ ID NO: 12453 - RNA, 22 nt, Homo sapiens
augaagacaucgucugggauua

SEQ ID NO: 12454 - RNA, 19 nt, Homo sapiens
uguugcacauaucaauaug

SEQ ID NO: 12455 - RNA, 20 nt, Homo sapiens
ugucaagaaacauuacuuau

SEQ ID NO: 12456 - RNA, 23 nt, Homo sapiens
uagguuauuugguaaauauaugu

SEQ ID NO: 12457 - RNA, 22 nt, Homo sapiens
uagacugguuuagcacugaaua

SEQ ID NO: 12458 - RNA, 22 nt, Homo sapiens
cugguaugugugacugcauuga

SEQ ID NO: 12459 - RNA, 21 nt, Homo sapiens
uguagcagcaugauuuauaau

SEQ ID NO: 12460 - RNA, 22 nt, Homo sapiens
ucauaugucauaguaugaucuu

SEQ ID NO: 12461 - RNA, 22 nt, Homo sapiens
uuuuguacaacagcucugggga

SEQ ID NO: 12462 - RNA, 22 nt, Homo sapiens
uucuucaggcauucccagaagc

SEQ ID NO: 12463 - RNA, 22 nt, Homo sapiens
auagugcugcaauaaacauaug

SEQ ID NO: 12464 - RNA, 22 nt, Homo sapiens
gauaaagauagcaauagggaca

SEQ ID NO: 12465 - RNA, 18 nt, Homo sapiens
ucaccuugugagagagag

SEQ ID NO: 12466 - RNA, 22 nt, Homo sapiens
cccaguguuuauuuugagccaa

SEQ ID NO: 12467 - RNA, 18 nt, Homo sapiens
gagguuagguucugacag

SEQ ID NO: 12468 - RNA, 22 nt, Homo sapiens
uagagugcugucaaagacuugu

SEQ ID NO: 12469 - RNA, 22 nt, Homo sapiens
aagucaguuugggagaagcuau

SEQ ID NO: 12470 - RNA, 22 nt, Homo sapiens
aagugguuuuaaucuggugagu

SEQ ID NO: 12471 - RNA, 22 nt, Homo sapiens
uggauaguucuucuacuagagu

SEQ ID NO: 12472 - RNA, 22 nt, Homo sapiens
caaauugcuuguggaggauaau

SEQ ID NO: 12473 - RNA, 22 nt, Homo sapiens
uagugcugugauaaacauauau

SEQ ID NO: 12474 - RNA, 22 nt, Homo sapiens
agcuacaucuugcucugggaug

SEQ ID NO: 12475 - RNA, 22 nt, Homo sapiens
uaucacuguuguuuguuuaagg

SEQ ID NO: 12476 - RNA, 22 nt, Homo sapiens
aucagagugaaacaugggagau

SEQ ID NO: 12477 - RNA, 22 nt, Homo sapiens
auugcacuccagccuugugaca

SEQ ID NO: 12478 - RNA, 22 nt, Homo sapiens
acugcacuccagccuugcgaca

SEQ ID NO: 12479 - RNA, 20 nt, Homo sapiens
uucaucaggauauuggucua

SEQ ID NO: 12480 - RNA, 22 nt, Homo sapiens
gagagcuaggccacuggggcuu

SEQ ID NO: 12481 - RNA, 22 nt, Homo sapiens
uucacagcuuaauaaggcucag

SEQ ID NO: 12482 - RNA, 18 nt, Homo sapiens
uucuuguguugauauuuu

SEQ ID NO: 12483 - RNA, 21 nt, Homo sapiens
caagugaugcuucugcuuuaa

SEQ ID NO: 12484 - RNA, 22 nt, Homo sapiens
uaguauguuuauagcauugagu

SEQ ID NO: 12485 - RNA, 22 nt, Homo sapiens
auacccaguaguggaauugcua

SEQ ID NO: 12486 - RNA, 21 nt, Homo sapiens
ugacauguugguguucugcac

SEQ ID NO: 12487 - RNA, 22 nt, Homo sapiens
auugccuaugauugagguacua

SEQ ID NO: 12488 - RNA, 22 nt, Homo sapiens
aaaguggugugaguauguaucu

SEQ ID NO: 12489 - RNA, 22 nt, Homo sapiens
uaguggucccccagucccagcu

SEQ ID NO: 12490 - RNA, 22 nt, Homo sapiens
uucccugaaauauucacuuuca

SEQ ID NO: 12491 - RNA, 22 nt, Homo sapiens
aauugcaauggacaaugcagca

SEQ ID NO: 12492 - RNA, 22 nt, Homo sapiens
agcuugucuuauacuacuucau

SEQ ID NO: 12493 - RNA, 22 nt, Homo sapiens
ucauugcaaucucugccucccg

SEQ ID NO: 12494 - RNA, 22 nt, Homo sapiens
uugagcaaaacauuaauauuag

SEQ ID NO: 12495 - RNA, 22 nt, Homo sapiens
ugaguggagaucgcaccauugc

SEQ ID NO: 12496 - RNA, 19 nt, Homo sapiens
uaaugccacugccuggcau

SEQ ID NO: 12497 - RNA, 22 nt, Homo sapiens
agcuggucuuggggaagaguag

SEQ ID NO: 12498 - RNA, 22 nt, Homo sapiens
uugcaugguuuuuaucugaaau

SEQ ID NO: 12499 - RNA, 18 nt, Homo sapiens
uuuugcuuaacugcgcca

SEQ ID NO: 12500 - RNA, 22 nt, Homo sapiens
cgcccuguagcuagcuagaggu

SEQ ID NO: 12501 - RNA, 22 nt, Homo sapiens
ugaguucaauguuaaugaagca

SEQ ID NO: 12502 - RNA, 22 nt, Homo sapiens
uuccaagugggaaacaaaaaug

SEQ ID NO: 12503 - RNA, 22 nt, Homo sapiens
uauugcuaaaacucaugguugc

SEQ ID NO: 12504 - RNA, 22 nt, Homo sapiens
guguauacauagaauuguguau

SEQ ID NO: 12505 - RNA, 22 nt, Homo sapiens
aggcagucugaguuuugaaagg

SEQ ID NO: 12506 - RNA, 22 nt, Homo sapiens
uugcaagugccguaacuaccaa

SEQ ID NO: 12507 - RNA, 22 nt, Homo sapiens
ucauggguuuugguccaagcaa

SEQ ID NO: 12508 - RNA, 22 nt, Homo sapiens
guuaagaaguguaacuuaaguu

SEQ ID NO: 12509 - RNA, 21 nt, Homo sapiens
ugacuagggauaugugccacu

SEQ ID NO: 12510 - RNA, 22 nt, Homo sapiens
ugaagaucauacugguggaggg

SEQ ID NO: 12511 - RNA, 20 nt, Homo sapiens
ugguccccugagucuggcuu

SEQ ID NO: 12512 - RNA, 22 nt, Homo sapiens
uaaguauagguaacagaagcaa

SEQ ID NO: 12513 - RNA, 19 nt, Homo sapiens
aaaguucuucccuuuggag

SEQ ID NO: 12514 - RNA, 22 nt, Homo sapiens
uagguaaguaauauacagauga

SEQ ID NO: 12515 - RNA, 22 nt, Homo sapiens
ugaugguuuuaaaaagaggagu

SEQ ID NO: 12516 - RNA, 22 nt, Homo sapiens
uacaggcagguguucccugguu

SEQ ID NO: 12517 - RNA, 22 nt, Homo sapiens
cuugguuacauuuuccuagaaa

SEQ ID NO: 12518 - RNA, 22 nt, Homo sapiens
ucuguguuuagacccaggguag

SEQ ID NO: 12519 - RNA, 22 nt, Homo sapiens
gugagaugguaucucauugugg

SEQ ID NO: 12520 - RNA, 21 nt, Homo sapiens
agagaacugaaacaugugacu

SEQ ID NO: 12521 - RNA, 22 nt, Homo sapiens
agggcaagacuuguuaagaaca

SEQ ID NO: 12522 - RNA, 19 nt, Homo sapiens
acugcacuccaaccuccug

SEQ ID NO: 12523 - RNA, 22 nt, Homo sapiens
uaggcaaguugcccaaucucuc

SEQ ID NO: 12524 - RNA, 22 nt, Homo sapiens
ggugauguuugaguugagacag

SEQ ID NO: 12525 - RNA, 22 nt, Homo sapiens
uauagcuaugggauguauuugc

SEQ ID NO: 12526 - RNA, 22 nt, Homo sapiens
auggcaagaagagcaauuauuu

SEQ ID NO: 12527 - RNA, 22 nt, Homo sapiens
uaaacugucuugcaguuacaug

SEQ ID NO: 12528 - RNA, 22 nt, Homo sapiens
auguaacuaucugagccauggg

SEQ ID NO: 12529 - RNA, 22 nt, Homo sapiens
augcuaucauucaggauuuguu

SEQ ID NO: 12530 - RNA, 22 nt, Homo sapiens
uaaauugcauaaguacaaauga

SEQ ID NO: 12531 - RNA, 22 nt, Homo sapiens
uuuggcacuguaaauuucucuu

SEQ ID NO: 12532 - RNA, 22 nt, Homo sapiens
guggaaguuaagugacuuucug

SEQ ID NO: 12533 - RNA, 22 nt, Homo sapiens
uguaauaguaggcucacauuug

SEQ ID NO: 12534 - RNA, 22 nt, Homo sapiens
aucacuguaaguuuacacuuug

SEQ ID NO: 12535 - RNA, 21 nt, Homo sapiens
gagaggauucgccagccucuu

SEQ ID NO: 12536 - RNA, 22 nt, Homo sapiens
uugagggagcauuuguuuugag

SEQ ID NO: 12537 - RNA, 22 nt, Homo sapiens
aaggcacugaacuuaaauucug

SEQ ID NO: 12538 - RNA, 22 nt, Homo sapiens
uugaccccuucuaauagccuca

SEQ ID NO: 12539 - RNA, 22 nt, Homo sapiens
uucagguacugggggaguaugg

SEQ ID NO: 12540 - RNA, 22 nt, Homo sapiens
guagcaccagugcucuucucaa

SEQ ID NO: 12541 - RNA, 22 nt, Homo sapiens
auuguacuccagccugggcaaa

SEQ ID NO: 12542 - RNA, 22 nt, Homo sapiens
uauggauucuagcucaguaggu

SEQ ID NO: 12543 - RNA, 22 nt, Homo sapiens
agccaagacucuguuccccuug

SEQ ID NO: 12544 - RNA, 22 nt, Homo sapiens
auagcaaugccccacuccuugg

SEQ ID NO: 12545 - RNA, 22 nt, Homo sapiens
ucuggccuacaucauuuuuccg

SEQ ID NO: 12546 - RNA, 22 nt, Homo sapiens
ugugcaugacagcauacaaacg

SEQ ID NO: 12547 - RNA, 22 nt, Homo sapiens
aagugaauucauuguguuauau

SEQ ID NO: 12548 - RNA, 22 nt, Homo sapiens
cuuuugugauucuucaguuacu

SEQ ID NO: 12549 - RNA, 16 nt, Homo sapiens
gcucuuguucucuguu

SEQ ID NO: 12550 - RNA, 20 nt, Homo sapiens
uucacaggcagcuucuuucu

SEQ ID NO: 12551 - RNA, 22 nt, Homo sapiens
aagugucagaguugcuaaugac

SEQ ID NO: 12552 - RNA, 22 nt, Homo sapiens
ugaguucaauuguauuuuauua

SEQ ID NO: 12553 - RNA, 22 nt, Homo sapiens
uuguacucucaccguaucccag

SEQ ID NO: 12554 - RNA, 22 nt, Homo sapiens
uucucauggugauggcaaaauc

SEQ ID NO: 12555 - RNA, 22 nt, Homo sapiens
uauaguguuuucaaaaguaugu

SEQ ID NO: 12556 - RNA, 22 nt, Homo sapiens
aggugcugagcagagaauccug

SEQ ID NO: 12557 - RNA, 22 nt, Homo sapiens
ugcauacugggagguugggugu

SEQ ID NO: 12558 - RNA, 22 nt, Homo sapiens
caaaagugauugcgguuuuugc

SEQ ID NO: 12559 - RNA, 18 nt, Homo sapiens
ugcauacuaucugauuuu

SEQ ID NO: 12560 - RNA, 22 nt, Homo sapiens
auguggugguagccaggacagg

SEQ ID NO: 12561 - RNA, 22 nt, Homo sapiens
guugaguuugaccugaacucug

SEQ ID NO: 12562 - RNA, 20 nt, Homo sapiens
agagugcuggacugaggagc

SEQ ID NO: 12563 - RNA, 22 nt, Homo sapiens
aauacugaaaguauuuucaaau

SEQ ID NO: 12564 - RNA, 19 nt, Homo sapiens
gccaccuggugcguguucu

SEQ ID NO: 12565 - RNA, 22 nt, Homo sapiens
cuggaaucuauggauaacaucg

SEQ ID NO: 12566 - RNA, 22 nt, Homo sapiens
uagauuauuggcugauuugauc

SEQ ID NO: 12567 - RNA, 22 nt, Homo sapiens
ugaagggcauuguuuugccaaa

SEQ ID NO: 12568 - RNA, 18 nt, Homo sapiens
ucccuuuguagaugaccc

SEQ ID NO: 12569 - RNA, 22 nt, Homo sapiens
ucugugaaugugaccuuauuug

SEQ ID NO: 12570 - RNA, 22 nt, Homo sapiens
uaguaucacauggucuuaauua

SEQ ID NO: 12571 - RNA, 22 nt, Homo sapiens
agucagauuggcauuuguuggg

SEQ ID NO: 12572 - RNA, 22 nt, Homo sapiens
uagcagcuuuauugagguaaau

SEQ ID NO: 12573 - RNA, 22 nt, Homo sapiens
aaguugguguaugagacagaag

SEQ ID NO: 12574 - RNA, 22 nt, Homo sapiens
cagaugcaugaccugggcuugg

SEQ ID NO: 12575 - RNA, 22 nt, Homo sapiens
ucucuagagagccugguguuca

SEQ ID NO: 12576 - RNA, 22 nt, Homo sapiens
uuggaauauuauuauugggcag

SEQ ID NO: 12577 - RNA, 22 nt, Homo sapiens
cuuggacaccucaugcccaccu

SEQ ID NO: 12578 - RNA, 22 nt, Homo sapiens
ugugaccaaaaucaacauaccu

SEQ ID NO: 12579 - RNA, 19 nt, Homo sapiens
ucccuguagaccacagugc

SEQ ID NO: 12580 - RNA, 22 nt, Homo sapiens
uugagauuuuccucaaauauuu

SEQ ID NO: 12581 - RNA, 22 nt, Homo sapiens
auggaagcauaguauucuauug

SEQ ID NO: 12582 - RNA, 22 nt, Homo sapiens
uuaaaccugucuucucacuaau

SEQ ID NO: 12583 - RNA, 22 nt, Homo sapiens
uccaugaggcuacaguaaucuc

SEQ ID NO: 12584 - RNA, 22 nt, Homo sapiens
guagcagccacacuugauaacu

SEQ ID NO: 12585 - RNA, 22 nt, Homo sapiens
cuagcagcauaagaaucaccaa

SEQ ID NO: 12586 - RNA, 22 nt, Homo sapiens
uagauuaucuuaaggagcauca

SEQ ID NO: 12587 - RNA, 22 nt, Homo sapiens
aagugcucuugaaacugucuua

SEQ ID NO: 12588 - RNA, 22 nt, Homo sapiens
ucaggugcagagaagaaauggg

SEQ ID NO: 12589 - RNA, 22 nt, Homo sapiens
gugcacaaucgugcauuccuug

SEQ ID NO: 12590 - RNA, 22 nt, Homo sapiens
aucaugucuucccagugauucu

SEQ ID NO: 12591 - RNA, 22 nt, Homo sapiens
uuguauguuucugugcacauga

SEQ ID NO: 12592 - RNA, 22 nt, Homo sapiens
auugaacacagaguagcuuucc

SEQ ID NO: 12593 - RNA, 22 nt, Homo sapiens
acuggcucugcuuuacaaacag

SEQ ID NO: 12594 - RNA, 22 nt, Homo sapiens
augugguaggcccaugagucau

SEQ ID NO: 12595 - RNA, 22 nt, Homo sapiens
acugcacuccagccucgcaaca

SEQ ID NO: 12596 - RNA, 22 nt, Homo sapiens
gagguagaauguuuuucagcug

SEQ ID NO: 12597 - RNA, 20 nt, Homo sapiens
acugcacuccagccuuccag

SEQ ID NO: 12598 - RNA, 22 nt, Homo sapiens
gacuugaagaaucuaagggagg

SEQ ID NO: 12599 - RNA, 22 nt, Homo sapiens
aagagguuuaacugacucacag

SEQ ID NO: 12600 - RNA, 22 nt, Homo sapiens
aauaaagcaggguccuugcacu

SEQ ID NO: 12601 - RNA, 22 nt, Homo sapiens
gcccuguugcccugaauacaua

SEQ ID NO: 12602 - RNA, 22 nt, Homo sapiens
uucaccggggaccccuggcugu

SEQ ID NO: 12603 - RNA, 22 nt, Homo sapiens
ugaauguuugcuuacuuccaua

SEQ ID NO: 12604 - RNA, 22 nt, Homo sapiens
ucuuugguuguuuagggugcau

SEQ ID NO: 12605 - RNA, 22 nt, Homo sapiens
cuggcucauuucauuuagcaua

SEQ ID NO: 12606 - RNA, 22 nt, Homo sapiens
gucagagcacugaguugugggc

SEQ ID NO: 12607 - RNA, 21 nt, Homo sapiens
ugcaagaaucaggaagcugcc

SEQ ID NO: 12608 - RNA, 22 nt, Homo sapiens
uucauggacucaauaguuucgc

SEQ ID NO: 12609 - RNA, 22 nt, Homo sapiens
aaaugcaucauuaggugauuuu

SEQ ID NO: 12610 - RNA, 22 nt, Homo sapiens
gauggcacuguagcaacacaaa

SEQ ID NO: 12611 - RNA, 23 nt, Homo sapiens
ugacaagagcgagacuuggucuc

SEQ ID NO: 12612 - RNA, 22 nt, Homo sapiens
ugagaggugauaaagcaagggu

SEQ ID NO: 12613 - RNA, 22 nt, Homo sapiens
aauugcauugaauuuguagcuu

SEQ ID NO: 12614 - RNA, 18 nt, Homo sapiens
acuggaauuaaacuuuuu

SEQ ID NO: 12615 - RNA, 22 nt, Homo sapiens
ucagugcaggaaucucuagcca

SEQ ID NO: 12616 - RNA, 22 nt, Homo sapiens
gugcacgucuuaggaggucacg

SEQ ID NO: 12617 - RNA, 22 nt, Homo sapiens
gagaugaaaucuugcucuguca

SEQ ID NO: 12618 - RNA, 22 nt, Homo sapiens
guucaucagggauacuggccuu

SEQ ID NO: 12619 - RNA, 22 nt, Homo sapiens
gagcugaucuuuauguaaauuc

SEQ ID NO: 12620 - RNA, 22 nt, Homo sapiens
ugacuucagacugaaaugauuc

SEQ ID NO: 12621 - RNA, 22 nt, Homo sapiens
ugagacugaaauuaggaaacug

SEQ ID NO: 12622 - RNA, 22 nt, Homo sapiens
gugauaguucuuacuccaaagu

SEQ ID NO: 12623 - RNA, 22 nt, Homo sapiens
cucacugggaccacucugaagu

SEQ ID NO: 12624 - RNA, 22 nt, Homo sapiens
ugagguaauagauaauauuuuu

SEQ ID NO: 12625 - RNA, 22 nt, Homo sapiens
cucccagagccaguuauaggcu

SEQ ID NO: 12626 - RNA, 22 nt, Homo sapiens
gugguuuuaauauucagucuag

SEQ ID NO: 12627 - RNA, 22 nt, Homo sapiens
gugacaguggagacuuacuuca

SEQ ID NO: 12628 - RNA, 22 nt, Homo sapiens
uugccuaguuuaggucugugcu

SEQ ID NO: 12629 - RNA, 22 nt, Homo sapiens
ugugaacaaaauuuguugcaua

SEQ ID NO: 12630 - RNA, 22 nt, Homo sapiens
ugguugaucccaucacccaggu

SEQ ID NO: 12631 - RNA, 22 nt, Homo sapiens
uaauacuagugaauagcaggau

SEQ ID NO: 12632 - RNA, 22 nt, Homo sapiens
auggcuagauuguaugguaguu

SEQ ID NO: 12633 - RNA, 22 nt, Homo sapiens
augugacugauggagaauaugu

SEQ ID NO: 12634 - RNA, 22 nt, Homo sapiens
aucacuaugcaggugucucggg

SEQ ID NO: 12635 - RNA, 22 nt, Homo sapiens
uaaagccauugucaaguuugua

SEQ ID NO: 12636 - RNA, 22 nt, Homo sapiens
uuggauugugaaaguauucucu

SEQ ID NO: 12637 - RNA, 22 nt, Homo sapiens
gugugcauaugucuuuauagua

SEQ ID NO: 12638 - RNA, 22 nt, Homo sapiens
auugcacuccagccuuggggau

SEQ ID NO: 12639 - RNA, 22 nt, Homo sapiens
ugauaugaaguuagcuggcugu

SEQ ID NO: 12640 - RNA, 22 nt, Homo sapiens
aaaugcacgcuacccagcuaga

SEQ ID NO: 12641 - RNA, 22 nt, Homo sapiens
acacgggugccggcaucagcac

SEQ ID NO: 12642 - RNA, 22 nt, Homo sapiens
ucuugguuuauugauggagagg

SEQ ID NO: 12643 - RNA, 23 nt, Homo sapiens
auaagccuuuucuuucugcccca

SEQ ID NO: 12644 - RNA, 22 nt, Homo sapiens
cccugagaugcuguuaaucugu

SEQ ID NO: 12645 - RNA, 22 nt, Homo sapiens
aucccgagacuuugcugaaguu

SEQ ID NO: 12646 - RNA, 22 nt, Homo sapiens
ccuucauugcaucuuuaagaga

SEQ ID NO: 12647 - RNA, 21 nt, Homo sapiens
uggucccauaagauuauaaug

SEQ ID NO: 12648 - RNA, 22 nt, Homo sapiens
ugagaugaggucucacucuguu

SEQ ID NO: 12649 - RNA, 22 nt, Homo sapiens
ugggcuagaugcuuugggguca

SEQ ID NO: 12650 - RNA, 22 nt, Homo sapiens
ugugccacugcacucugggcaa

SEQ ID NO: 12651 - RNA, 22 nt, Homo sapiens
aacugcacauauuuguaugggu

SEQ ID NO: 12652 - RNA, 22 nt, Homo sapiens
uagaagcuacucuucuuguggc

SEQ ID NO: 12653 - RNA, 22 nt, Homo sapiens
cuacucugugguguauuugcau

SEQ ID NO: 12654 - RNA, 22 nt, Homo sapiens
auuauugacucauagaaaggau

SEQ ID NO: 12655 - RNA, 22 nt, Homo sapiens
uacugcauuucacuguuaaaga

SEQ ID NO: 12656 - RNA, 22 nt, Homo sapiens
uaaaccacguuuacauuugaga

SEQ ID NO: 12657 - RNA, 22 nt, Homo sapiens
uugagcuaguugcaccagcagg

SEQ ID NO: 12658 - RNA, 22 nt, Homo sapiens
uugcagaucccacacucacccu

SEQ ID NO: 12659 - RNA, 22 nt, Homo sapiens
uucuuagguuaaggcugagaga

SEQ ID NO: 12660 - RNA, 22 nt, Homo sapiens
cuagcccagugcuccuggauca

SEQ ID NO: 12661 - RNA, 19 nt, Homo sapiens
ugugagcauuagcauuuag

SEQ ID NO: 12662 - RNA, 22 nt, Homo sapiens
uauaagguuaggaaaaauuucu

SEQ ID NO: 12663 - RNA, 22 nt, Homo sapiens
augagacuagaagagaauaaua

SEQ ID NO: 12664 - RNA, 22 nt, Homo sapiens
uaugaaagcuacuucucacaau

SEQ ID NO: 12665 - RNA, 22 nt, Homo sapiens
acuuauuguggcugacccaaac

SEQ ID NO: 12666 - RNA, 20 nt, Homo sapiens
uggagugaagguucuggacc

SEQ ID NO: 12667 - RNA, 22 nt, Homo sapiens
uggcaagaacaacaauuacuuu

SEQ ID NO: 12668 - RNA, 22 nt, Homo sapiens
agacaagauggcuugagguuca

SEQ ID NO: 12669 - RNA, 22 nt, Homo sapiens
ugagauguggcuagagagguug

SEQ ID NO: 12670 - RNA, 22 nt, Homo sapiens
ugagaacuuauggugauuuuuu

SEQ ID NO: 12671 - RNA, 22 nt, Homo sapiens
ugugccacugcacuccugggug

SEQ ID NO: 12672 - RNA, 22 nt, Homo sapiens
uguggcucuucuguucuccacu

SEQ ID NO: 12673 - RNA, 22 nt, Homo sapiens
ggcuuggaggaaugugagggcu

SEQ ID NO: 12674 - RNA, 22 nt, Homo sapiens
ugauaguguccugugccacauu

SEQ ID NO: 12675 - RNA, 22 nt, Homo sapiens
uuguaauggagcaaacagguug

SEQ ID NO: 12676 - RNA, 22 nt, Homo sapiens
ggcacgguggcucacaccugua

SEQ ID NO: 12677 - RNA, 22 nt, Homo sapiens
augagcucauugggugacuggg

SEQ ID NO: 12678 - RNA, 22 nt, Homo sapiens
aauucacuucuuuuaggcaggg

SEQ ID NO: 12679 - RNA, 22 nt, Homo sapiens
ugugacacugaauggcagaacu

SEQ ID NO: 12680 - RNA, 18 nt, Homo sapiens
ugcuuagucauuuucaau

SEQ ID NO: 12681 - RNA, 22 nt, Homo sapiens
uacugcaucgaaaugcuuuuau

SEQ ID NO: 12682 - RNA, 22 nt, Homo sapiens
gagaacauuuaagccacucagg

SEQ ID NO: 12683 - RNA, 22 nt, Homo sapiens
aucagagugaauaaugacaaaa

SEQ ID NO: 12684 - RNA, 17 nt, Homo sapiens
ucacaguguuaggauga

SEQ ID NO: 12685 - RNA, 22 nt, Homo sapiens
uaugagacugugagugagaaau

SEQ ID NO: 12686 - RNA, 22 nt, Homo sapiens
ugcauuguaggauguuuagcag

SEQ ID NO: 12687 - RNA, 22 nt, Homo sapiens
ucaucagaguuuacaagcucag

SEQ ID NO: 12688 - RNA, 22 nt, Homo sapiens
uauugcacaugaggagacauug

SEQ ID NO: 12689 - RNA, 18 nt, Homo sapiens
aucauugcacugucuugc

SEQ ID NO: 12690 - RNA, 19 nt, Homo sapiens
ucaauucugucaauggcuu

SEQ ID NO: 12691 - RNA, 22 nt, Homo sapiens
ggucauggauugucuuuucuug

SEQ ID NO: 12692 - RNA, 22 nt, Homo sapiens
aaauggcaccggcucuucccuc

SEQ ID NO: 12693 - RNA, 22 nt, Homo sapiens
gugagcaguguccuugggggca

SEQ ID NO: 12694 - RNA, 22 nt, Homo sapiens
uuuggucuuuuauuuaaagcag

SEQ ID NO: 12695 - RNA, 22 nt, Homo sapiens
auaugucuauuauuagggcagg

SEQ ID NO: 12696 - RNA, 22 nt, Homo sapiens
ggacaagaucuuccaccauuca

SEQ ID NO: 12697 - RNA, 22 nt, Homo sapiens
auugcaugucauguuuagugua

SEQ ID NO: 12698 - RNA, 22 nt, Homo sapiens
guaccucaguuggaaaugcaga

SEQ ID NO: 12699 - RNA, 22 nt, Homo sapiens
cuagcagacacuuccagagagu

SEQ ID NO: 12700 - RNA, 22 nt, Homo sapiens
ccacacugucuuggugggaaac

SEQ ID NO: 12701 - RNA, 22 nt, Homo sapiens
uaucucuguggguagugcugaa

SEQ ID NO: 12702 - RNA, 22 nt, Homo sapiens
ugcagugugcuggggucuccau

SEQ ID NO: 12703 - RNA, 22 nt, Homo sapiens
auguguaaagcuuuucuuuguu

SEQ ID NO: 12704 - RNA, 22 nt, Homo sapiens
augauggagguagauuguccau

SEQ ID NO: 12705 - RNA, 23 nt, Homo sapiens
uuugcacuugcuccuucuauggc

SEQ ID NO: 12706 - RNA, 22 nt, Homo sapiens
ugaguuaguguggugcuuggaa

SEQ ID NO: 12707 - RNA, 22 nt, Homo sapiens
uuggcucuggcugggcuccagc

SEQ ID NO: 12708 - RNA, 22 nt, Homo sapiens
ucucccauccguacacggauug

SEQ ID NO: 12709 - RNA, 22 nt, Homo sapiens
uagagguagagugacuucccca

SEQ ID NO: 12710 - RNA, 22 nt, Homo sapiens
ucuggcauuuucucugcuugca

SEQ ID NO: 12711 - RNA, 22 nt, Homo sapiens
ugagaacaugugauauuuggug

SEQ ID NO: 12712 - RNA, 22 nt, Homo sapiens
uggucaugaggugaggcuucuc

SEQ ID NO: 12713 - RNA, 22 nt, Homo sapiens
uuuuggcuuuuccucagcaagc

SEQ ID NO: 12714 - RNA, 22 nt, Homo sapiens
uuuguguccccacccacaucuc

SEQ ID NO: 12715 - RNA, 18 nt, Homo sapiens
uuauacuccccaggcaau

SEQ ID NO: 12716 - RNA, 22 nt, Homo sapiens
uugcacauggcuggggaggccu

SEQ ID NO: 12717 - RNA, 22 nt, Homo sapiens
ucaggcaugcagcaaugcagug

SEQ ID NO: 12718 - RNA, 20 nt, Homo sapiens
ugaggucugagaaagaauga

SEQ ID NO: 12719 - RNA, 22 nt, Homo sapiens
agcuccuuugcuuuuuccagga

SEQ ID NO: 12720 - RNA, 21 nt, Homo sapiens
ugguugauccuccuagugccu

SEQ ID NO: 12721 - RNA, 22 nt, Homo sapiens
ugacaguuuccagggcugucuc

SEQ ID NO: 12722 - RNA, 22 nt, Homo sapiens
ugugguuuuauaaacgugaccu

SEQ ID NO: 12723 - RNA, 22 nt, Homo sapiens
cugaaaagcaucugcauagcug

SEQ ID NO: 12724 - RNA, 22 nt, Homo sapiens
ugauagugccuuuuauaucucu

SEQ ID NO: 12725 - RNA, 22 nt, Homo sapiens
guacaguucucuuuguugucag

SEQ ID NO: 12726 - RNA, 22 nt, Homo sapiens
ugacaaguaaacagucagcacc

SEQ ID NO: 12727 - RNA, 20 nt, Homo sapiens
agcugguuuuaugaaucuuu

SEQ ID NO: 12728 - RNA, 22 nt, Homo sapiens
caccuguacauggcaguguccu

SEQ ID NO: 12729 - RNA, 22 nt, Homo sapiens
uuuggaaugaaacagcagagcc

SEQ ID NO: 12730 - RNA, 22 nt, Homo sapiens
acacuguuggugggaguguaaa

SEQ ID NO: 12731 - RNA, 19 nt, Homo sapiens
ccuuugguuuccaugacau

SEQ ID NO: 12732 - RNA, 22 nt, Homo sapiens
ucauuggaugucugaaaugauu

SEQ ID NO: 12733 - RNA, 20 nt, Homo sapiens
uaucucaguuuguccuaaac

SEQ ID NO: 12734 - RNA, 23 nt, Homo sapiens
cuguacacauauacaucuaagua

SEQ ID NO: 12735 - RNA, 22 nt, Homo sapiens
gagauucuucaauauuuauucu

SEQ ID NO: 12736 - RNA, 22 nt, Homo sapiens
ugagauguuuguuucagugccu

SEQ ID NO: 12737 - RNA, 22 nt, Homo sapiens
ugagaacagauggcuuuauuau

SEQ ID NO: 12738 - RNA, 22 nt, Homo sapiens
ugacuagcgauccccuuucuag

SEQ ID NO: 12739 - RNA, 19 nt, Homo sapiens
aucaccauuauuuggaaca

SEQ ID NO: 12740 - RNA, 22 nt, Homo sapiens
uggcgagcugaaauuauaaaag

SEQ ID NO: 12741 - RNA, 22 nt, Homo sapiens
ucaucaguuuuuuauaugugau

SEQ ID NO: 12742 - RNA, 22 nt, Homo sapiens
ggcaacaugaugaaaugccauc

SEQ ID NO: 12743 - RNA, 22 nt, Homo sapiens
gcuggaauuaacauagaugugc

SEQ ID NO: 12744 - RNA, 22 nt, Homo sapiens
ugagugagguucuacucuguga

SEQ ID NO: 12745 - RNA, 22 nt, Homo sapiens
uacugcauucuccgccuccggg

SEQ ID NO: 12746 - RNA, 22 nt, Homo sapiens
gugcacaucuguguuccagcua

SEQ ID NO: 12747 - RNA, 22 nt, Homo sapiens
guagagugcugggcacuggcuc

SEQ ID NO: 12748 - RNA, 22 nt, Homo sapiens
uuaaugcuuggggaguaguucu

SEQ ID NO: 12749 - RNA, 22 nt, Homo sapiens
uauagcauuuugauccuguaga

SEQ ID NO: 12750 - RNA, 22 nt, Homo sapiens
cuugcauuuuggagaaugcuga

SEQ ID NO: 12751 - RNA, 22 nt, Homo sapiens
cucuuuaguaagcaguugauga

SEQ ID NO: 12752 - RNA, 22 nt, Homo sapiens
ugaauguacacgcguacuuguu

SEQ ID NO: 12753 - RNA, 22 nt, Homo sapiens
auugcacucuagccugggugac

SEQ ID NO: 12754 - RNA, 22 nt, Homo sapiens
aggcaagugauagcugcguaau

SEQ ID NO: 12755 - RNA, 18 nt, Homo sapiens
ugugacauugagcauguc

SEQ ID NO: 12756 - RNA, 22 nt, Homo sapiens
cuauggguuauaauucauuagu

SEQ ID NO: 12757 - RNA, 22 nt, Homo sapiens
uuguauaggcucaguaagaauc

SEQ ID NO: 12758 - RNA, 22 nt, Homo sapiens
auaccuuuuaggggaacguucu

SEQ ID NO: 12759 - RNA, 22 nt, Homo sapiens
ucacaguagggaacugacaaag

SEQ ID NO: 12760 - RNA, 22 nt, Homo sapiens
acccugaagccaugaguggaac

SEQ ID NO: 12761 - RNA, 22 nt, Homo sapiens
gaucucaguggauacugugaug

SEQ ID NO: 12762 - RNA, 22 nt, Homo sapiens
uguauguaauugaaguuaaguu

SEQ ID NO: 12763 - RNA, 22 nt, Homo sapiens
uuuaaugcgucucugaguuuug

SEQ ID NO: 12764 - RNA, 22 nt, Homo sapiens
aaagugcuucucuuuggugggu

SEQ ID NO: 12765 - RNA, 22 nt, Homo sapiens
gaguucauuuugaaaccuugau

SEQ ID NO: 12766 - RNA, 22 nt, Homo sapiens
ucacagucaaaguaaucauaga

SEQ ID NO: 12767 - RNA, 22 nt, Homo sapiens
uuggauggucuuuauauaguau

SEQ ID NO: 12768 - RNA, 22 nt, Homo sapiens
gagcuggacuucuuaccuuuuc

SEQ ID NO: 12769 - RNA, 22 nt, Homo sapiens
aggcuuuauuacagggucucag

SEQ ID NO: 12770 - RNA, 22 nt, Homo sapiens
cuucacuggagucccuggauuc

SEQ ID NO: 12771 - RNA, 19 nt, Homo sapiens
augaguuaggggaaauuuc

SEQ ID NO: 12772 - RNA, 22 nt, Homo sapiens
agguauuuucaacuuagaaugg

SEQ ID NO: 12773 - RNA, 22 nt, Homo sapiens
gucaguuugguuaaucauucca

SEQ ID NO: 12774 - RNA, 19 nt, Homo sapiens
ucccugagucuuagcuuga

SEQ ID NO: 12775 - RNA, 22 nt, Homo sapiens
ugauaucugaucauccuugaua

SEQ ID NO: 12776 - RNA, 22 nt, Homo sapiens
augucugguagccaccuggagg

SEQ ID NO: 12777 - RNA, 22 nt, Homo sapiens
ucagugacuggguauuaaauca

SEQ ID NO: 12778 - RNA, 22 nt, Homo sapiens
gaauguuuacuuuguuuaauac

SEQ ID NO: 12779 - RNA, 22 nt, Homo sapiens
uuaaaugcauagaauguguagu

SEQ ID NO: 12780 - RNA, 19 nt, Homo sapiens
cugaaacacagagagggcu

SEQ ID NO: 12781 - RNA, 22 nt, Homo sapiens
acacaguauaugacaaugcuuu

SEQ ID NO: 12782 - RNA, 22 nt, Homo sapiens
ucagaccauuucauuacagacu

SEQ ID NO: 12783 - RNA, 22 nt, Homo sapiens
acugagucauugaggcccucuc

SEQ ID NO: 12784 - RNA, 22 nt, Homo sapiens
uggaagacacauaccugauaac

SEQ ID NO: 12785 - RNA, 22 nt, Homo sapiens
uauugaauuugagcugucucuu

SEQ ID NO: 12786 - RNA, 22 nt, Homo sapiens
uggaaaguaguucuaaucuaag

SEQ ID NO: 12787 - RNA, 22 nt, Homo sapiens
ugagagacagacauuaucuuau

SEQ ID NO: 12788 - RNA, 21 nt, Homo sapiens
aucucacuugaauguaaaagc

SEQ ID NO: 12789 - RNA, 22 nt, Homo sapiens
cacccaguaagcaugaggcccu

SEQ ID NO: 12790 - RNA, 22 nt, Homo sapiens
ugaaugcuucaugucugggcug

SEQ ID NO: 12791 - RNA, 22 nt, Homo sapiens
aauuaguuggcugccuaugauu

SEQ ID NO: 12792 - RNA, 22 nt, Homo sapiens
gugcacaacaugcagguuuguu

SEQ ID NO: 12793 - RNA, 19 nt, Homo sapiens
cucuuuggugucucuucuu

SEQ ID NO: 12794 - RNA, 22 nt, Homo sapiens
gcagaucuucgcgguaaguguu

SEQ ID NO: 12795 - RNA, 22 nt, Homo sapiens
uggucaaaucugaugugagaaa

SEQ ID NO: 12796 - RNA, 22 nt, Homo sapiens
augcuggugguucacaugcgca

SEQ ID NO: 12797 - RNA, 22 nt, Homo sapiens
ugcaaguaauuccagcuacuga

SEQ ID NO: 12798 - RNA, 22 nt, Homo sapiens
auugaguaacaauuuuguucaa

SEQ ID NO: 12799 - RNA, 22 nt, Homo sapiens
gagacucuuagauuggaaaucu

SEQ ID NO: 12800 - RNA, 22 nt, Homo sapiens
ucacauggcagagaagaagcuc

SEQ ID NO: 12801 - RNA, 22 nt, Homo sapiens
cugauuuguccccagccucaug

SEQ ID NO: 12802 - RNA, 16 nt, Homo sapiens
uaagccccacgugcau

SEQ ID NO: 12803 - RNA, 22 nt, Homo sapiens
uugugcuccagagacgggcucg

SEQ ID NO: 12804 - RNA, 22 nt, Homo sapiens
ugaaguguuuuuucaggcaugu

SEQ ID NO: 12805 - RNA, 22 nt, Homo sapiens
ucacugcacuagguaaugccac

SEQ ID NO: 12806 - RNA, 22 nt, Homo sapiens
ugaguagaacuccuggagaugu

SEQ ID NO: 12807 - RNA, 19 nt, Homo sapiens
ccaguguugccagagcuga

SEQ ID NO: 12808 - RNA, 22 nt, Homo sapiens
uucaagauggccccagugagcc

SEQ ID NO: 12809 - RNA, 22 nt, Homo sapiens
auuugguuauggucauggacac

SEQ ID NO: 12810 - RNA, 22 nt, Homo sapiens
gugauacugcuuauuaauuuaa

SEQ ID NO: 12811 - RNA, 22 nt, Homo sapiens
uuccuuguagcaaaugcgauga

SEQ ID NO: 12812 - RNA, 22 nt, Homo sapiens
cagcuggugggagcuggguucc

SEQ ID NO: 12813 - RNA, 22 nt, Homo sapiens
ugaguggagacuguguguagag

SEQ ID NO: 12814 - RNA, 22 nt, Homo sapiens
agguuguugcaugcuccuuagg

SEQ ID NO: 12815 - RNA, 22 nt, Homo sapiens
gugguguccugcaccuauaguc

SEQ ID NO: 12816 - RNA, 22 nt, Homo sapiens
ugaaugccauucuguguuagcu

SEQ ID NO: 12817 - RNA, 20 nt, Homo sapiens
agucaguuuauuuucucucu

SEQ ID NO: 12818 - RNA, 22 nt, Homo sapiens
gugguuuucaacuccaccugca

SEQ ID NO: 12819 - RNA, 22 nt, Homo sapiens
auagugcugcacuaaacauaca

SEQ ID NO: 12820 - RNA, 21 nt, Homo sapiens
gugugcuugaauucagcuguc

SEQ ID NO: 12821 - RNA, 22 nt, Homo sapiens
uaucacaguaaaucugggugca

SEQ ID NO: 12822 - RNA, 22 nt, Homo sapiens
caugaaagugagaaacuccugg

SEQ ID NO: 12823 - RNA, 22 nt, Homo sapiens
uauaugucugagacugggggau

SEQ ID NO: 12824 - RNA, 18 nt, Homo sapiens
ugauugacuuauuuaggu

SEQ ID NO: 12825 - RNA, 22 nt, Homo sapiens
uuggaugauaaagaagccuaag

SEQ ID NO: 12826 - RNA, 22 nt, Homo sapiens
gggcaacauugaguacccugaa

SEQ ID NO: 12827 - RNA, 22 nt, Homo sapiens
aaguuguuggaguuccauuguu

SEQ ID NO: 12828 - RNA, 22 nt, Homo sapiens
acaagcacaaauuuaauccugu

SEQ ID NO: 12829 - RNA, 22 nt, Homo sapiens
ugauauguggcuauugagauug

SEQ ID NO: 12830 - RNA, 22 nt, Homo sapiens
ccccagguuucaauaaagccca

SEQ ID NO: 12831 - RNA, 21 nt, Homo sapiens
aauaaagcaaccuuaugccau

SEQ ID NO: 12832 - RNA, 22 nt, Homo sapiens
uaucucacauauucaguagguu

SEQ ID NO: 12833 - RNA, 22 nt, Homo sapiens
uaugccuuuuggcucaagaaac

SEQ ID NO: 12834 - RNA, 19 nt, Homo sapiens
ugggaauguaaauuaguuc

SEQ ID NO: 12835 - RNA, 22 nt, Homo sapiens
cagugcauccauguucagcagu

SEQ ID NO: 12836 - RNA, 22 nt, Homo sapiens
uguggcaaagucuugugaauau

SEQ ID NO: 12837 - RNA, 22 nt, Homo sapiens
cugucuaugagccaggaagcca

SEQ ID NO: 12838 - RNA, 22 nt, Homo sapiens
uauggcuaugggaacugggagu

SEQ ID NO: 12839 - RNA, 22 nt, Homo sapiens
uggccagugucuauugguuucc

SEQ ID NO: 12840 - RNA, 22 nt, Homo sapiens
ugagcucagcuaguugaggugu

SEQ ID NO: 12841 - RNA, 22 nt, Homo sapiens
ucuaagaauucauuuauaagcc

SEQ ID NO: 12842 - RNA, 22 nt, Homo sapiens
auucccuguagaauaaggaugg

SEQ ID NO: 12843 - RNA, 22 nt, Homo sapiens
ugauggccuguucuccauaugu

SEQ ID NO: 12844 - RNA, 22 nt, Homo sapiens
cuaccuggguggcucaugacuu

SEQ ID NO: 12845 - RNA, 22 nt, Homo sapiens
uuggcacugagcaagaacaggg

SEQ ID NO: 12846 - RNA, 22 nt, Homo sapiens
ucacacugcaucuguuggaauu

SEQ ID NO: 12847 - RNA, 22 nt, Homo sapiens
ugaguucaugcuuguaguucua

SEQ ID NO: 12848 - RNA, 22 nt, Homo sapiens
uucucuggucagaggggagguu

SEQ ID NO: 12849 - RNA, 22 nt, Homo sapiens
aaaugcucuuuaugaaguugga

SEQ ID NO: 12850 - RNA, 22 nt, Homo sapiens
ccacccuggagaauuugagguc

SEQ ID NO: 12851 - RNA, 22 nt, Homo sapiens
gaguaacagcauaaauuuguga

SEQ ID NO: 12852 - RNA, 22 nt, Homo sapiens
uaaguagcugggaguacaggca

SEQ ID NO: 12853 - RNA, 22 nt, Homo sapiens
uugacauguaggcagggaaugg

SEQ ID NO: 12854 - RNA, 22 nt, Homo sapiens
uuaugugccuuuuugccauuca

SEQ ID NO: 12855 - RNA, 17 nt, Homo sapiens
ucuaauaauaugcauuu

SEQ ID NO: 12856 - RNA, 22 nt, Homo sapiens
cauugguuuuucaggaguauau

SEQ ID NO: 12857 - RNA, 22 nt, Homo sapiens
ugaaagguuuaauucugugaga

SEQ ID NO: 12858 - RNA, 22 nt, Homo sapiens
augguuuauuuguaagcagagu

SEQ ID NO: 12859 - RNA, 22 nt, Homo sapiens
acugcacucuagccccugcgac

SEQ ID NO: 12860 - RNA, 22 nt, Homo sapiens
uucuuagucauguaauagucca

SEQ ID NO: 12861 - RNA, 22 nt, Homo sapiens
accgaguguucucccgcagcgg

SEQ ID NO: 12862 - RNA, 22 nt, Homo sapiens
gcuggcaaguggccuacuuugu

SEQ ID NO: 12863 - RNA, 22 nt, Homo sapiens
ucgugccacugcacuccagccu

SEQ ID NO: 12864 - RNA, 22 nt, Homo sapiens
uaaguuagugugagaauuuugc

SEQ ID NO: 12865 - RNA, 22 nt, Homo sapiens
auggcacuguguccugggguca

SEQ ID NO: 12866 - RNA, 22 nt, Homo sapiens
uauuauagugauaggucuacug

SEQ ID NO: 12867 - RNA, 22 nt, Homo sapiens
gguaaacauacugcugucuucu

SEQ ID NO: 12868 - RNA, 22 nt, Homo sapiens
ugcacuguggucugagagacag

SEQ ID NO: 12869 - RNA, 22 nt, Homo sapiens
gugucaguggggagugaucuuc

SEQ ID NO: 12870 - RNA, 22 nt, Homo sapiens
caggugcauuggcugacaccug

SEQ ID NO: 12871 - RNA, 22 nt, Homo sapiens
ugcccaguggacagaaagucau

SEQ ID NO: 12872 - RNA, 22 nt, Homo sapiens
uaagggcaugcugcaugagagu

SEQ ID NO: 12873 - RNA, 22 nt, Homo sapiens
cugugcauuggaugucucccug

SEQ ID NO: 12874 - RNA, 16 nt, Homo sapiens
uuucaucaguuuuaau

SEQ ID NO: 12875 - RNA, 22 nt, Homo sapiens
uucauagaggacauuacuggag

SEQ ID NO: 12876 - RNA, 21 nt, Homo sapiens
auuugguguuagaaauaaauu

SEQ ID NO: 12877 - RNA, 22 nt, Homo sapiens
ucacuggccaaauucuggguga

SEQ ID NO: 12878 - RNA, 20 nt, Homo sapiens
cuuuggcaaugagaacaggg

SEQ ID NO: 12879 - RNA, 22 nt, Homo sapiens
gaacugggguuggguugcgaua

SEQ ID NO: 12880 - RNA, 22 nt, Homo sapiens
uucaaaaccucugcuuaagccc

SEQ ID NO: 12881 - RNA, 22 nt, Homo sapiens
auucuugcuugaacuuggugca

SEQ ID NO: 12882 - RNA, 22 nt, Homo sapiens
uucaggcuccgugccagcuccg

SEQ ID NO: 12883 - RNA, 22 nt, Homo sapiens
ucccugaaagcugagauuggaa

SEQ ID NO: 12884 - RNA, 22 nt, Homo sapiens
uuucauagaucaugcuuuugga

SEQ ID NO: 12885 - RNA, 22 nt, Homo sapiens
uuugagaucuuuagaaucaggc

SEQ ID NO: 12886 - RNA, 22 nt, Homo sapiens
gagggcacugcuuuccuuucaa

SEQ ID NO: 12887 - RNA, 22 nt, Homo sapiens
uucaguggguggaugaauauga

SEQ ID NO: 12888 - RNA, 22 nt, Homo sapiens
uauuucaguugcguuucccgag

SEQ ID NO: 12889 - RNA, 22 nt, Homo sapiens
uauacacgugugcauauauaca

SEQ ID NO: 12890 - RNA, 22 nt, Homo sapiens
gagauguagucuugcccuguca

SEQ ID NO: 12891 - RNA, 22 nt, Homo sapiens
agcggguuuuagauuucuccug

SEQ ID NO: 12892 - RNA, 22 nt, Homo sapiens
ccuugguggccacaagacauug

SEQ ID NO: 12893 - RNA, 22 nt, Homo sapiens
cuuggcauuguguugauagaag

SEQ ID NO: 12894 - RNA, 22 nt, Homo sapiens
auaucugcauugccauuuaugu

SEQ ID NO: 12895 - RNA, 22 nt, Homo sapiens
acacacgugcauguaugcguau

SEQ ID NO: 12896 - RNA, 20 nt, Homo sapiens
aaccccuauagagaaaccau

SEQ ID NO: 12897 - RNA, 22 nt, Homo sapiens
uggggucguaggugcccgccag

SEQ ID NO: 12898 - RNA, 22 nt, Homo sapiens
uuccccgugaaacuuucucauu

SEQ ID NO: 12899 - RNA, 22 nt, Homo sapiens
ggaaugggauuugaagucuggc

SEQ ID NO: 12900 - RNA, 22 nt, Homo sapiens
caggaaugugaggguucccugc

SEQ ID NO: 12901 - RNA, 22 nt, Homo sapiens
ugugcaaaaguaauugcgguuu

SEQ ID NO: 12902 - RNA, 22 nt, Homo sapiens
acuuugcuuaucccaggcacug

SEQ ID NO: 12903 - RNA, 17 nt, Homo sapiens
ugcagcacacugauggg

SEQ ID NO: 12904 - RNA, 22 nt, Homo sapiens
augugugaaucccagaaccugu

SEQ ID NO: 12905 - RNA, 22 nt, Homo sapiens
ugaaaugccuugagauuuugac

SEQ ID NO: 12906 - RNA, 22 nt, Homo sapiens
ggaucauaugauagcucaauuu

SEQ ID NO: 12907 - RNA, 22 nt, Homo sapiens
agcuuguggugaauacugcuag

SEQ ID NO: 12908 - RNA, 22 nt, Homo sapiens
cugaccuaugauuuggcucaaa

SEQ ID NO: 12909 - RNA, 22 nt, Homo sapiens
uugagauauccauaaaugggaa

SEQ ID NO: 12910 - RNA, 22 nt, Homo sapiens
aucucuugccagucagaauggu

SEQ ID NO: 12911 - RNA, 22 nt, Homo sapiens
uucaggcaccauugucauugau

SEQ ID NO: 12912 - RNA, 22 nt, Homo sapiens
cuaugguuucucaaacuccuga

SEQ ID NO: 12913 - RNA, 22 nt, Homo sapiens
uuuccagguggccaacauuuua

SEQ ID NO: 12914 - RNA, 22 nt, Homo sapiens
ugacugugcagcuccaucaggg

SEQ ID NO: 12915 - RNA, 22 nt, Homo sapiens
ucugagguuacugcuuuguaga

SEQ ID NO: 12916 - RNA, 20 nt, Homo sapiens
gugacugagcacgggcacag

SEQ ID NO: 12917 - RNA, 22 nt, Homo sapiens
agugacuagaauaugaauuuua

SEQ ID NO: 12918 - RNA, 22 nt, Homo sapiens
ugacggaggacaccugcggaau

SEQ ID NO: 12919 - RNA, 22 nt, Homo sapiens
augcaagcacacaagaggaaau

SEQ ID NO: 12920 - RNA, 22 nt, Homo sapiens
uggaucaugcgaggccuccccu

SEQ ID NO: 12921 - RNA, 22 nt, Homo sapiens
auaaagguaauaauaguugcau

SEQ ID NO: 12922 - RNA, 22 nt, Homo sapiens
gagacugaguuuugcucuuguu

SEQ ID NO: 12923 - RNA, 20 nt, Homo sapiens
uaugaaacaguguagagcaa

SEQ ID NO: 12924 - RNA, 22 nt, Homo sapiens
cuuuaguugucuccucaagggu

SEQ ID NO: 12925 - RNA, 20 nt, Homo sapiens
ucguugguagagagcagggc

SEQ ID NO: 12926 - RNA, 22 nt, Homo sapiens
aucccagaaacucggguuucuc

SEQ ID NO: 12927 - RNA, 22 nt, Homo sapiens
agucacaugccagcacacccag

SEQ ID NO: 12928 - RNA, 22 nt, Homo sapiens
uuugguugcauucacauauuuc

SEQ ID NO: 12929 - RNA, 22 nt, Homo sapiens
uggaagucuucauuauguauag

SEQ ID NO: 12930 - RNA, 22 nt, Homo sapiens
auguaguaugaagaagaugcuu

SEQ ID NO: 12931 - RNA, 22 nt, Homo sapiens
uaugucacagguuuuggugaaa

SEQ ID NO: 12932 - RNA, 22 nt, Homo sapiens
gccccugagacuugccucgggc

SEQ ID NO: 12933 - RNA, 20 nt, Homo sapiens
uuauagcuacaucuugacug

SEQ ID NO: 12934 - RNA, 22 nt, Homo sapiens
uugagcacaggaguuuugagac

SEQ ID NO: 12935 - RNA, 19 nt, Homo sapiens
ugugauaguugaaccugcc

SEQ ID NO: 12936 - RNA, 22 nt, Homo sapiens
auggcauuuuuagggcugggug

SEQ ID NO: 12937 - RNA, 22 nt, Homo sapiens
uugggagugucucuggacugca

SEQ ID NO: 12938 - RNA, 22 nt, Homo sapiens
gcaagaaucugggaguaaaauu

SEQ ID NO: 12939 - RNA, 22 nt, Homo sapiens
ggagugugauucaguauaauau

SEQ ID NO: 12940 - RNA, 22 nt, Homo sapiens
uuucauaguuugcauagggcau

SEQ ID NO: 12941 - RNA, 22 nt, Homo sapiens
uacagaucaguuauuuuguaga

SEQ ID NO: 12942 - RNA, 22 nt, Homo sapiens
uuugaaguguggcacugaguuu

SEQ ID NO: 12943 - RNA, 22 nt, Homo sapiens
acuaugagacgaaugcaucagu

SEQ ID NO: 12944 - RNA, 22 nt, Homo sapiens
caugauauugcagaauguuggu

SEQ ID NO: 12945 - RNA, 22 nt, Homo sapiens
ugcaaucaucgcuguuggccac

SEQ ID NO: 12946 - RNA, 22 nt, Homo sapiens
ucagaucaguuccacaagaacu

SEQ ID NO: 12947 - RNA, 22 nt, Homo sapiens
auguagugugauuuucacuaga

SEQ ID NO: 12948 - RNA, 19 nt, Homo sapiens
gcuuagagacaaaacauug

SEQ ID NO: 12949 - RNA, 22 nt, Homo sapiens
ugaaugguaauuuaguaggcac

SEQ ID NO: 12950 - RNA, 22 nt, Homo sapiens
ugagauaacuaaaaacauuuug

SEQ ID NO: 12951 - RNA, 22 nt, Homo sapiens
accauugcacuccuuucugggc

SEQ ID NO: 12952 - RNA, 20 nt, Homo sapiens
cccuaagccagaugcugggg

SEQ ID NO: 12953 - RNA, 22 nt, Homo sapiens
ucgcaguuaauaaugaugugcg

SEQ ID NO: 12954 - RNA, 22 nt, Homo sapiens
auuagguuggugcaaaaguaau

SEQ ID NO: 12955 - RNA, 22 nt, Homo sapiens
augauauggguugucaguugua

SEQ ID NO: 12956 - RNA, 22 nt, Homo sapiens
uaggagcauaggauuguuugag

SEQ ID NO: 12957 - RNA, 22 nt, Homo sapiens
aucaggcacacauuggaguuug

SEQ ID NO: 12958 - RNA, 22 nt, Homo sapiens
ucacuggacucuagccugggug

SEQ ID NO: 12959 - RNA, 22 nt, Homo sapiens
uauagcaaugugccacucucug

SEQ ID NO: 12960 - RNA, 22 nt, Homo sapiens
ggcaacaugccgaaaccacguc

SEQ ID NO: 12961 - RNA, 22 nt, Homo sapiens
aucacagcccuccucuuggaug

SEQ ID NO: 12962 - RNA, 22 nt, Homo sapiens
ccuugcacuucccaggugaggc

SEQ ID NO: 12963 - RNA, 22 nt, Homo sapiens
auaugguguuugcuauucagcu

SEQ ID NO: 12964 - RNA, 22 nt, Homo sapiens
ugaguagcuaauguuuacugag

SEQ ID NO: 12965 - RNA, 22 nt, Homo sapiens
ugcugguaguuuaugacuaauu

SEQ ID NO: 12966 - RNA, 22 nt, Homo sapiens
augauagguuuagguuuagaca

SEQ ID NO: 12967 - RNA, 22 nt, Homo sapiens
ucacacugaauuugaagcaaug

SEQ ID NO: 12968 - RNA, 22 nt, Homo sapiens
cugugcuuggagucccccuagg

SEQ ID NO: 12969 - RNA, 22 nt, Homo sapiens
uauggcaaugcauaggaaggaa

SEQ ID NO: 12970 - RNA, 22 nt, Homo sapiens
ucacugcgaccucugccucccg

SEQ ID NO: 12971 - RNA, 22 nt, Homo sapiens
cuucagcaauauauccccuggg

SEQ ID NO: 12972 - RNA, 22 nt, Homo sapiens
acugcacuccagccuggacgaa

SEQ ID NO: 12973 - RNA, 22 nt, Homo sapiens
uucuucugguuaugaaauuuga

SEQ ID NO: 12974 - RNA, 23 nt, Homo sapiens
ggcagguuggucuaggucuauuc

SEQ ID NO: 12975 - RNA, 22 nt, Homo sapiens
uucacugugugacccugggcca

SEQ ID NO: 12976 - RNA, 22 nt, Homo sapiens
uuggcagcacgcaguccagagg

SEQ ID NO: 12977 - RNA, 22 nt, Homo sapiens
uauaucacaugcacucauuuuc

SEQ ID NO: 12978 - RNA, 22 nt, Homo sapiens
guaagagcauguaguggcucua

SEQ ID NO: 12979 - RNA, 22 nt, Homo sapiens
cccagugugaacuuggcauuuu

SEQ ID NO: 12980 - RNA, 22 nt, Homo sapiens
augagcugauuuccuuaccaua

SEQ ID NO: 12981 - RNA, 20 nt, Homo sapiens
aauggcauguuggacaacug

SEQ ID NO: 12982 - RNA, 22 nt, Homo sapiens
ugagauuacguucggcccacuu

SEQ ID NO: 12983 - RNA, 17 nt, Homo sapiens
auaugucugcuggggga

SEQ ID NO: 12984 - RNA, 21 nt, Homo sapiens
ugugaacauguuggguggcau

SEQ ID NO: 12985 - RNA, 22 nt, Homo sapiens
aaaugcugucugugagccucau

SEQ ID NO: 12986 - RNA, 22 nt, Homo sapiens
ggaauaguauaaauaccacaaa

SEQ ID NO: 12987 - RNA, 22 nt, Homo sapiens
uagguuguucuauuaucuuaca

SEQ ID NO: 12988 - RNA, 22 nt, Homo sapiens
caauacuguuaccugaaauagg

SEQ ID NO: 12989 - RNA, 20 nt, Homo sapiens
agcugcagauauaaauccgc

SEQ ID NO: 12990 - RNA, 22 nt, Homo sapiens
ggaauguaguaauuugguuagu

SEQ ID NO: 12991 - RNA, 22 nt, Homo sapiens
augacaagaguguucagggaga

SEQ ID NO: 12992 - RNA, 22 nt, Homo sapiens
uuuccuguaggaaggaaauaga

SEQ ID NO: 12993 - RNA, 22 nt, Homo sapiens
guacccuauggauauagaugaa

SEQ ID NO: 12994 - RNA, 22 nt, Homo sapiens
uggcuaagaugcacacuucacu

SEQ ID NO: 12995 - RNA, 22 nt, Homo sapiens
cuagcagacaugggcugaacca

SEQ ID NO: 12996 - RNA, 21 nt, Homo sapiens
ucucucaaccaggaagugggc

SEQ ID NO: 12997 - RNA, 22 nt, Homo sapiens
aggaagacugaaauugcuguuc

SEQ ID NO: 12998 - RNA, 22 nt, Homo sapiens
caccgguuaaucuguuuuuucu

SEQ ID NO: 12999 - RNA, 22 nt, Homo sapiens
ugguauuuaauauaugagaguu

SEQ ID NO: 13000 - RNA, 22 nt, Homo sapiens
guaugcacauauguguauguau

SEQ ID NO: 13001 - RNA, 22 nt, Homo sapiens
agagcaaugacaugcuaugugg

SEQ ID NO: 13002 - RNA, 22 nt, Homo sapiens
gaugauguuggaaacuuggugc

SEQ ID NO: 13003 - RNA, 22 nt, Homo sapiens
uagagcuugacacuuuccaugg

SEQ ID NO: 13004 - RNA, 22 nt, Homo sapiens
uucagagcauugguuuuuugaa

SEQ ID NO: 13005 - RNA, 22 nt, Homo sapiens
guuagugcuuauuaaauaguau

SEQ ID NO: 13006 - RNA, 20 nt, Homo sapiens
gugagucauuaguaaccaaa

SEQ ID NO: 13007 - RNA, 22 nt, Homo sapiens
ucagagcaaagacacuuuauca

SEQ ID NO: 13008 - RNA, 22 nt, Homo sapiens
guggaauuauagagacaucuug

SEQ ID NO: 13009 - RNA, 20 nt, Homo sapiens
cucuaguaauaaaguuuccc

SEQ ID NO: 13010 - RNA, 22 nt, Homo sapiens
uggcaguuucauaugguucaac

SEQ ID NO: 13011 - RNA, 22 nt, Homo sapiens
ugauaggagauuuucaucugua

SEQ ID NO: 13012 - RNA, 22 nt, Homo sapiens
auugcacuccagucucaccagg

SEQ ID NO: 13013 - RNA, 22 nt, Homo sapiens
uuugagguguauggcaaguuga

SEQ ID NO: 13014 - RNA, 22 nt, Homo sapiens
cugccuaaagaaaaagacguug

SEQ ID NO: 13015 - RNA, 22 nt, Homo sapiens
gugggauggagagaagguauga

SEQ ID NO: 13016 - RNA, 23 nt, Homo sapiens
cuuuggucucugguugacuucag

SEQ ID NO: 13017 - RNA, 19 nt, Homo sapiens
ugacuauagccugaucagu

SEQ ID NO: 13018 - RNA, 22 nt, Homo sapiens
uugauauucugagaagcugaag

SEQ ID NO: 13019 - RNA, 22 nt, Homo sapiens
ggaucacuugagaccaggaguu

SEQ ID NO: 13020 - RNA, 22 nt, Homo sapiens
guauacacccugugauauuauu

SEQ ID NO: 13021 - RNA, 22 nt, Homo sapiens
cuguaaagaucacagagcuggu

SEQ ID NO: 13022 - RNA, 22 nt, Homo sapiens
gcuggcaagaugcugaugcaac

SEQ ID NO: 13023 - RNA, 22 nt, Homo sapiens
uugagauccuuuugcucaucag

SEQ ID NO: 13024 - RNA, 22 nt, Homo sapiens
acagucacaauuuguaccuuuu

SEQ ID NO: 13025 - RNA, 18 nt, Homo sapiens
gucucacaugguggaagc

SEQ ID NO: 13026 - RNA, 22 nt, Homo sapiens
ucacugcgcuucagccugggug

SEQ ID NO: 13027 - RNA, 18 nt, Homo sapiens
ugagaacauguguacaca

SEQ ID NO: 13028 - RNA, 23 nt, Homo sapiens
uggcgagacagaaaacuuuuaga

SEQ ID NO: 13029 - RNA, 23 nt, Homo sapiens
caccaguagaaugugugggaggg

SEQ ID NO: 13030 - RNA, 22 nt, Homo sapiens
ucaugugaggauaacaauagug

SEQ ID NO: 13031 - RNA, 22 nt, Homo sapiens
uggaauguggacucuuaugggg

SEQ ID NO: 13032 - RNA, 22 nt, Homo sapiens
cacauugaauuucugaugacaa

SEQ ID NO: 13033 - RNA, 22 nt, Homo sapiens
uccacagugguggaauuguuca

SEQ ID NO: 13034 - RNA, 22 nt, Homo sapiens
uacucugcagccauaaaacaga

SEQ ID NO: 13035 - RNA, 22 nt, Homo sapiens
cuuggcuccgacuccccuccaa

SEQ ID NO: 13036 - RNA, 22 nt, Homo sapiens
cagcgaggucugcgucacauug

SEQ ID NO: 13037 - RNA, 21 nt, Homo sapiens
aggaagacuaugaucaauugg

SEQ ID NO: 13038 - RNA, 22 nt, Homo sapiens
uaagugcaugauuacaugcaua

SEQ ID NO: 13039 - RNA, 22 nt, Homo sapiens
ggggucauuaaauuccgcuggu

SEQ ID NO: 13040 - RNA, 22 nt, Homo sapiens
cuggaaugugagccccaaaaag

SEQ ID NO: 13041 - RNA, 23 nt, Homo sapiens
guucaucagggauauuggccuga

SEQ ID NO: 13042 - RNA, 22 nt, Homo sapiens
ucacgugguucauaaggcagaa

SEQ ID NO: 13043 - RNA, 22 nt, Homo sapiens
ugacauagcuauuaagugaugc

SEQ ID NO: 13044 - RNA, 22 nt, Homo sapiens
uuagaauggaaaugcgagguua

SEQ ID NO: 13045 - RNA, 22 nt, Homo sapiens
ugcaccauugcacuccagccug

SEQ ID NO: 13046 - RNA, 22 nt, Homo sapiens
cagcuaaauuguuaaauccaag

SEQ ID NO: 13047 - RNA, 22 nt, Homo sapiens
aacaucaaccaugaggguugga

SEQ ID NO: 13048 - RNA, 22 nt, Homo sapiens
auacaucugccauguuggugug

SEQ ID NO: 13049 - RNA, 22 nt, Homo sapiens
uaucaaggccacucauuuuaug

SEQ ID NO: 13050 - RNA, 22 nt, Homo sapiens
cucaccuugugauccacccacc

SEQ ID NO: 13051 - RNA, 22 nt, Homo sapiens
uuuaguacugcuuuaugugugu

SEQ ID NO: 13052 - RNA, 23 nt, Homo sapiens
ggaaugaaaccugguuaugauau

SEQ ID NO: 13053 - RNA, 22 nt, Homo sapiens
uucccguacugguguugccuau

SEQ ID NO: 13054 - RNA, 22 nt, Homo sapiens
agagaucacugaaucacggggg

SEQ ID NO: 13055 - RNA, 22 nt, Homo sapiens
acuuugguuaucauacuuucag

SEQ ID NO: 13056 - RNA, 22 nt, Homo sapiens
uagauucauuuuagcaaaaguu

SEQ ID NO: 13057 - RNA, 22 nt, Homo sapiens
ugacacuugcccuuagaaacau

SEQ ID NO: 13058 - RNA, 22 nt, Homo sapiens
ugagauagggucucacucuguc

SEQ ID NO: 13059 - RNA, 23 nt, Homo sapiens
acacaguaaacuaaaagcuagcu

SEQ ID NO: 13060 - RNA, 22 nt, Homo sapiens
gagugcaauggcaugaucuugg

SEQ ID NO: 13061 - RNA, 22 nt, Homo sapiens
acccggcaguaauccugcgcgc

SEQ ID NO: 13062 - RNA, 22 nt, Homo sapiens
aauugcacuacugcacucccac

SEQ ID NO: 13063 - RNA, 22 nt, Homo sapiens
ugagcagugagugugcugcagg

SEQ ID NO: 13064 - RNA, 22 nt, Homo sapiens
guucuggagauaaagccaaggu

SEQ ID NO: 13065 - RNA, 22 nt, Homo sapiens
ggcagcuguguccuucguaagg

SEQ ID NO: 13066 - RNA, 22 nt, Homo sapiens
augagcuccucaaggucagaga

SEQ ID NO: 13067 - RNA, 22 nt, Homo sapiens
auggcaguuuggucucugugcu

SEQ ID NO: 13068 - RNA, 22 nt, Homo sapiens
aaagggcuguuucuugacuugg

SEQ ID NO: 13069 - RNA, 22 nt, Homo sapiens
uauaucuguccauggcccugcu

SEQ ID NO: 13070 - RNA, 22 nt, Homo sapiens
ugaucugucacuuaucacauuu

SEQ ID NO: 13071 - RNA, 22 nt, Homo sapiens
cucugguucugcagugcacccu

SEQ ID NO: 13072 - RNA, 22 nt, Homo sapiens
caaagugcugggacuggccggg

SEQ ID NO: 13073 - RNA, 22 nt, Homo sapiens
augagcagaagagauacacugu

SEQ ID NO: 13074 - RNA, 17 nt, Homo sapiens
ugauauuuucccagaua

SEQ ID NO: 13075 - RNA, 22 nt, Homo sapiens
caaaccuguaggggccaagagg

SEQ ID NO: 13076 - RNA, 20 nt, Homo sapiens
uggcuaaaugaaugauagca

SEQ ID NO: 13077 - RNA, 22 nt, Homo sapiens
ccggcugugugacugugggcag

SEQ ID NO: 13078 - RNA, 22 nt, Homo sapiens
uggcaaaaaucacaaguaccuu

SEQ ID NO: 13079 - RNA, 22 nt, Homo sapiens
uacagucuagaggagaaucagg

SEQ ID NO: 13080 - RNA, 22 nt, Homo sapiens
ugggaagaagguuuacuugcca

SEQ ID NO: 13081 - RNA, 23 nt, Homo sapiens
auugcacuccagccuaccugggc

SEQ ID NO: 13082 - RNA, 22 nt, Homo sapiens
aucugguguuuccuucacauug

SEQ ID NO: 13083 - RNA, 22 nt, Homo sapiens
ggcaagaaccacaauuacuuuu

SEQ ID NO: 13084 - RNA, 20 nt, Homo sapiens
acaguagaagggauuucaaa

SEQ ID NO: 13085 - RNA, 22 nt, Homo sapiens
augaggugauaucuggaaauua

SEQ ID NO: 13086 - RNA, 22 nt, Homo sapiens
uccucauggagaaccucugcua

SEQ ID NO: 13087 - RNA, 22 nt, Homo sapiens
aaaguggacuaagugaauauga

SEQ ID NO: 13088 - RNA, 22 nt, Homo sapiens
guuagguagaaguuuacuuuga

SEQ ID NO: 13089 - RNA, 22 nt, Homo sapiens
cauaguacuugcauaguacuau

SEQ ID NO: 13090 - RNA, 23 nt, Homo sapiens
cuugagacaaaugcgugugugca

SEQ ID NO: 13091 - RNA, 20 nt, Homo sapiens
uuuggcaauaggguuuuugu

SEQ ID NO: 13092 - RNA, 22 nt, Homo sapiens
gggaaauguaaagucauaagau

SEQ ID NO: 13093 - RNA, 22 nt, Homo sapiens
gaggugguagguucacagcagc

SEQ ID NO: 13094 - RNA, 22 nt, Homo sapiens
uacccuuauguaaucauuauac

SEQ ID NO: 13095 - RNA, 22 nt, Homo sapiens
ugugacagguauccuguguucu

SEQ ID NO: 13096 - RNA, 19 nt, Homo sapiens
ugaaugacaucuaaagucc

SEQ ID NO: 13097 - RNA, 22 nt, Homo sapiens
uaucucagaugagacuuguaac

SEQ ID NO: 13098 - RNA, 22 nt, Homo sapiens
uauugguuacuguugaucgcca

SEQ ID NO: 13099 - RNA, 22 nt, Homo sapiens
ggggcauugugacauaucucug

SEQ ID NO: 13100 - RNA, 22 nt, Homo sapiens
uacuagaaccuuauucagagug

SEQ ID NO: 13101 - RNA, 20 nt, Homo sapiens
uaugguuuuagguauagcau

SEQ ID NO: 13102 - RNA, 18 nt, Homo sapiens
aggagcauagugcuauga

SEQ ID NO: 13103 - RNA, 22 nt, Homo sapiens
uaacagcauuugugucuaguag

SEQ ID NO: 13104 - RNA, 22 nt, Homo sapiens
uugggccacuuuaguuuccuua

SEQ ID NO: 13105 - RNA, 18 nt, Homo sapiens
accuucauuccuuugccu

SEQ ID NO: 13106 - RNA, 22 nt, Homo sapiens
gcagugcaugacgguauauaua

SEQ ID NO: 13107 - RNA, 22 nt, Homo sapiens
gcugguguagagugcagaaagg

SEQ ID NO: 13108 - RNA, 22 nt, Homo sapiens
auugaaugaaauggcagacacu

SEQ ID NO: 13109 - RNA, 21 nt, Homo sapiens
ucauugggugcagcccacccu

SEQ ID NO: 13110 - RNA, 22 nt, Homo sapiens
ugacaggucuaauuuacugaca

SEQ ID NO: 13111 - RNA, 22 nt, Homo sapiens
uuugagauaucuuccaucagua

SEQ ID NO: 13112 - RNA, 22 nt, Homo sapiens
uuacaccuguaauccagcacuu

SEQ ID NO: 13113 - RNA, 22 nt, Homo sapiens
ugucucaguuacggcaauucca

SEQ ID NO: 13114 - RNA, 22 nt, Homo sapiens
uggcauuuucucuguucuuaga

SEQ ID NO: 13115 - RNA, 22 nt, Homo sapiens
augccuaagacccuguggggga

SEQ ID NO: 13116 - RNA, 22 nt, Homo sapiens
ugagcacagagccugggguggc

SEQ ID NO: 13117 - RNA, 22 nt, Homo sapiens
uggguaguuucuuacaacucug

SEQ ID NO: 13118 - RNA, 22 nt, Homo sapiens
uuuuaguugcucagguauucuc

SEQ ID NO: 13119 - RNA, 22 nt, Homo sapiens
agaacuguccauucagcaugaa

SEQ ID NO: 13120 - RNA, 20 nt, Homo sapiens
uuccuuaggcauuggaagaa

SEQ ID NO: 13121 - RNA, 22 nt, Homo sapiens
guaaaugcagaugcaugaccuu

SEQ ID NO: 13122 - RNA, 22 nt, Homo sapiens
augacacugcagagauguccca

SEQ ID NO: 13123 - RNA, 22 nt, Homo sapiens
cugggguaggacuggcuuuuga

SEQ ID NO: 13124 - RNA, 22 nt, Homo sapiens
aucgugucuggcccugaaugcu

SEQ ID NO: 13125 - RNA, 22 nt, Homo sapiens
uuccaguggaguaaauggacaa

SEQ ID NO: 13126 - RNA, 22 nt, Homo sapiens
uaccuguagacuacagcuucag

SEQ ID NO: 13127 - RNA, 22 nt, Homo sapiens
gauggcaucugagaguguuaga

SEQ ID NO: 13128 - RNA, 23 nt, Homo sapiens
guaauacuagucauaguagcagg

SEQ ID NO: 13129 - RNA, 22 nt, Homo sapiens
uuagcagcaccccacucuacug

SEQ ID NO: 13130 - RNA, 21 nt, Homo sapiens
ccauggcaaugguaaacugac

SEQ ID NO: 13131 - RNA, 22 nt, Homo sapiens
auagguauuuuuaaaugacugu

SEQ ID NO: 13132 - RNA, 22 nt, Homo sapiens
acaagugaauacaggauucucu

SEQ ID NO: 13133 - RNA, 22 nt, Homo sapiens
agcuuaugcuuggaagagauga

SEQ ID NO: 13134 - RNA, 22 nt, Homo sapiens
ucacuuugacggccaacuucua

SEQ ID NO: 13135 - RNA, 22 nt, Homo sapiens
ugcuagaugaaguuugaguuuu

SEQ ID NO: 13136 - RNA, 22 nt, Homo sapiens
uguauaggcaaauuuccucaug

SEQ ID NO: 13137 - RNA, 22 nt, Homo sapiens
ugagguaagauguucauuuuuc

SEQ ID NO: 13138 - RNA, 21 nt, Homo sapiens
gagguagggauuaaagaccuc

SEQ ID NO: 13139 - RNA, 22 nt, Homo sapiens
gaggagauauucugcuggaugg

SEQ ID NO: 13140 - RNA, 22 nt, Homo sapiens
uucccguugcugugcuccugcc

SEQ ID NO: 13141 - RNA, 22 nt, Homo sapiens
ugucaguguacuguaagaauua

SEQ ID NO: 13142 - RNA, 22 nt, Homo sapiens
gagaugguguuccacugccagu

SEQ ID NO: 13143 - RNA, 22 nt, Homo sapiens
ggaaaguaacccauucucuuac

SEQ ID NO: 13144 - RNA, 22 nt, Homo sapiens
uggauuuuaauuauucugucau

SEQ ID NO: 13145 - RNA, 22 nt, Homo sapiens
ggcagaauugcugaggaugcua

SEQ ID NO: 13146 - RNA, 22 nt, Homo sapiens
augaguaugagaauacauuaag

SEQ ID NO: 13147 - RNA, 22 nt, Homo sapiens
uuacugcuagcugugugcucuu

SEQ ID NO: 13148 - RNA, 22 nt, Homo sapiens
cagguacaugcaugugugugca

SEQ ID NO: 13149 - RNA, 22 nt, Homo sapiens
aaagugcugagaguucuaacuu

SEQ ID NO: 13150 - RNA, 22 nt, Homo sapiens
gagguuuuagugagucccacug

SEQ ID NO: 13151 - RNA, 22 nt, Homo sapiens
gucacuguuuccuauuauauuu

SEQ ID NO: 13152 - RNA, 22 nt, Homo sapiens
ucaguggagccucacucugugg

SEQ ID NO: 13153 - RNA, 18 nt, Homo sapiens
uggcaaguuuaguagcac

SEQ ID NO: 13154 - RNA, 22 nt, Homo sapiens
gccauugcacuccagccucggc

SEQ ID NO: 13155 - RNA, 22 nt, Homo sapiens
cuuggcacgugauagguguuga

SEQ ID NO: 13156 - RNA, 22 nt, Homo sapiens
aggcaaugugagaguuuauuca

SEQ ID NO: 13157 - RNA, 22 nt, Homo sapiens
auguccuagagagauggugguc

SEQ ID NO: 13158 - RNA, 22 nt, Homo sapiens
uggcaagaagagcaugagacca

SEQ ID NO: 13159 - RNA, 19 nt, Homo sapiens
uuagagaucaucugcuuca

SEQ ID NO: 13160 - RNA, 22 nt, Homo sapiens
acucuguauaaacauugcugua

SEQ ID NO: 13161 - RNA, 22 nt, Homo sapiens
ugacagugaauaagucucuuaa

SEQ ID NO: 13162 - RNA, 16 nt, Homo sapiens
ugcagaguaggugaau

SEQ ID NO: 13163 - RNA, 22 nt, Homo sapiens
uugcaugggagcugggugaggc

SEQ ID NO: 13164 - RNA, 22 nt, Homo sapiens
guaugacacaggaagcuuaacc

SEQ ID NO: 13165 - RNA, 22 nt, Homo sapiens
uugagcucaucaagauagagaa

SEQ ID NO: 13166 - RNA, 22 nt, Homo sapiens
uuccugagccuuguaucuagua

SEQ ID NO: 13167 - RNA, 22 nt, Homo sapiens
ugagacauacuuacaggggaug

SEQ ID NO: 13168 - RNA, 22 nt, Homo sapiens
uggauguacagucaguauuugu

SEQ ID NO: 13169 - RNA, 22 nt, Homo sapiens
gcuuuggauaaaugucaguuua

SEQ ID NO: 13170 - RNA, 19 nt, Homo sapiens
ugagaucuuuacuggguuu

SEQ ID NO: 13171 - RNA, 22 nt, Homo sapiens
auaacagcugcaaggcaaaagc

SEQ ID NO: 13172 - RNA, 22 nt, Homo sapiens
aagagcauuggauggggagauu

SEQ ID NO: 13173 - RNA, 19 nt, Homo sapiens
uugcauauguugaaccagg

SEQ ID NO: 13174 - RNA, 22 nt, Homo sapiens
uugagauggagucucacucuuc

SEQ ID NO: 13175 - RNA, 22 nt, Homo sapiens
cccuucauucaaggguugugag

SEQ ID NO: 13176 - RNA, 22 nt, Homo sapiens
uuuugguguauuguauaaggua

SEQ ID NO: 13177 - RNA, 22 nt, Homo sapiens
ucgguauuuuagaauugagacu

SEQ ID NO: 13178 - RNA, 22 nt, Homo sapiens
guucaagcaauucugcugccuc

SEQ ID NO: 13179 - RNA, 22 nt, Homo sapiens
gugagcuaagcaaauaugagcc

SEQ ID NO: 13180 - RNA, 22 nt, Homo sapiens
ucuggccuacaaguaauuuuau

SEQ ID NO: 13181 - RNA, 22 nt, Homo sapiens
agagagguggguggagccccca

SEQ ID NO: 13182 - RNA, 21 nt, Homo sapiens
gaccacagcagggaaugucag

SEQ ID NO: 13183 - RNA, 22 nt, Homo sapiens
ugccuucuguuaaacgaggaug

SEQ ID NO: 13184 - RNA, 22 nt, Homo sapiens
gaaucauuggguugauucaaga

SEQ ID NO: 13185 - RNA, 22 nt, Homo sapiens
cagcaguuguuucggauuggga

SEQ ID NO: 13186 - RNA, 22 nt, Homo sapiens
augagguguuuauuguauccug

SEQ ID NO: 13187 - RNA, 22 nt, Homo sapiens
uacugaccugaaggccauggaa

SEQ ID NO: 13188 - RNA, 22 nt, Homo sapiens
auacacauuccugggccucacc

SEQ ID NO: 13189 - RNA, 22 nt, Homo sapiens
aguaaucaucugagggcagaaa

SEQ ID NO: 13190 - RNA, 22 nt, Homo sapiens
uaacugucucaggccaugggcg

SEQ ID NO: 13191 - RNA, 22 nt, Homo sapiens
gugaugcaguacguagaggaga

SEQ ID NO: 13192 - RNA, 19 nt, Homo sapiens
agagacucauuguagcauu

SEQ ID NO: 13193 - RNA, 15 nt, Homo sapiens
auagaaugaaaggga

SEQ ID NO: 13194 - RNA, 22 nt, Homo sapiens
ugagcagaaagcugcaaggucg

SEQ ID NO: 13195 - RNA, 22 nt, Homo sapiens
uccagguuucaugcucuuuauu

SEQ ID NO: 13196 - RNA, 22 nt, Homo sapiens
uggucagaugcugaguggaucu

SEQ ID NO: 13197 - RNA, 22 nt, Homo sapiens
ugcaaauguuaguaacaccacu

SEQ ID NO: 13198 - RNA, 22 nt, Homo sapiens
uaugcuuauugucucauccacu

SEQ ID NO: 13199 - RNA, 22 nt, Homo sapiens
aaggcucuuucaacguaaauua

SEQ ID NO: 13200 - RNA, 22 nt, Homo sapiens
gucacauugaugcccauggugg

SEQ ID NO: 13201 - RNA, 22 nt, Homo sapiens
ucuuugucuacauccuguuaaa

SEQ ID NO: 13202 - RNA, 22 nt, Homo sapiens
aggugguuuuaggcagagacau

SEQ ID NO: 13203 - RNA, 22 nt, Homo sapiens
uauuaguuuucuguggauuaca

SEQ ID NO: 13204 - RNA, 19 nt, Homo sapiens
ucuuugaggcaucgcccuc

SEQ ID NO: 13205 - RNA, 22 nt, Homo sapiens
uauggauuuuggaauauguggg

SEQ ID NO: 13206 - RNA, 22 nt, Homo sapiens
ugcaaauguuauuuugguuucu

SEQ ID NO: 13207 - RNA, 21 nt, Homo sapiens
aagaaagcuggacuugccgcu

SEQ ID NO: 13208 - RNA, 22 nt, Homo sapiens
uucacaguacucccuggaauua

SEQ ID NO: 13209 - RNA, 20 nt, Homo sapiens
uauagcaauuuuuuucuccu

SEQ ID NO: 13210 - RNA, 22 nt, Homo sapiens
uuugguugccucuaugagccug

SEQ ID NO: 13211 - RNA, 22 nt, Homo sapiens
ugaaggacauucuaugguagau

SEQ ID NO: 13212 - RNA, 22 nt, Homo sapiens
guuagaucauguuuggauaucu

SEQ ID NO: 13213 - RNA, 22 nt, Homo sapiens
ucaaguacuuauuugauaauua

SEQ ID NO: 13214 - RNA, 22 nt, Homo sapiens
uugcacaauggaauuuaucuuu

SEQ ID NO: 13215 - RNA, 22 nt, Homo sapiens
auacaagugccauguuggugug

SEQ ID NO: 13216 - RNA, 22 nt, Homo sapiens
ugccaguauuuuauugaagauu

SEQ ID NO: 13217 - RNA, 22 nt, Homo sapiens
uauuccuuuugcauuuccacau

SEQ ID NO: 13218 - RNA, 22 nt, Homo sapiens
gagaucaugcugguucucucau

SEQ ID NO: 13219 - RNA, 22 nt, Homo sapiens
uugcaagaaaucagagccuucc

SEQ ID NO: 13220 - RNA, 22 nt, Homo sapiens
agacagcuggaguaucauagcu

SEQ ID NO: 13221 - RNA, 22 nt, Homo sapiens
aagugaccuaacaaugaaggcc

SEQ ID NO: 13222 - RNA, 22 nt, Homo sapiens
uggcuguuuauuucaccuggau

SEQ ID NO: 13223 - RNA, 22 nt, Homo sapiens
uggaguguaaauuaguucagcc

SEQ ID NO: 13224 - RNA, 16 nt, Homo sapiens
uuuuugcagaaaugac

SEQ ID NO: 13225 - RNA, 22 nt, Homo sapiens
gacugaggaagcgcucucuccu

SEQ ID NO: 13226 - RNA, 22 nt, Homo sapiens
ugagguacaacauggacugaag

SEQ ID NO: 13227 - RNA, 22 nt, Homo sapiens
cuucaaguguggccaccugacc

SEQ ID NO: 13228 - RNA, 22 nt, Homo sapiens
uugcaagauguuaacauuggag

SEQ ID NO: 13229 - RNA, 22 nt, Homo sapiens
gcacccugucaaaauggaccaa

SEQ ID NO: 13230 - RNA, 22 nt, Homo sapiens
ucugcauaucaugcagaacuau

SEQ ID NO: 13231 - RNA, 19 nt, Homo sapiens
uguacacuguaaaccugug

SEQ ID NO: 13232 - RNA, 20 nt, Homo sapiens
cucaccagguguaggcugag

SEQ ID NO: 13233 - RNA, 22 nt, Homo sapiens
ggcaguguuauuauauuuuugg

SEQ ID NO: 13234 - RNA, 22 nt, Homo sapiens
auuccacagccgauaccaugac

SEQ ID NO: 13235 - RNA, 22 nt, Homo sapiens
uguuaagauguguuuuguggcu

SEQ ID NO: 13236 - RNA, 22 nt, Homo sapiens
augcaagacaccacgugagaau

SEQ ID NO: 13237 - RNA, 22 nt, Homo sapiens
augaccagagagugcgcagggu

SEQ ID NO: 13238 - RNA, 22 nt, Homo sapiens
uggccagagggcaauuagcugu

SEQ ID NO: 13239 - RNA, 22 nt, Homo sapiens
uucugugcuuguggaugaagug

SEQ ID NO: 13240 - RNA, 22 nt, Homo sapiens
uguaugagagugaaagcauuuc

SEQ ID NO: 13241 - RNA, 21 nt, Homo sapiens
uaagacugccaguagggcugu

SEQ ID NO: 13242 - RNA, 22 nt, Homo sapiens
gucccugugucuuuauguggcc

SEQ ID NO: 13243 - RNA, 22 nt, Homo sapiens
uuucacagcugucuuccgucuc

SEQ ID NO: 13244 - RNA, 20 nt, Homo sapiens
acugauauguuccuguucuc

SEQ ID NO: 13245 - RNA, 21 nt, Homo sapiens
ucaacccuugcgucaccaagc

SEQ ID NO: 13246 - RNA, 22 nt, Homo sapiens
ugccuacugaauuuaccuggcu

SEQ ID NO: 13247 - RNA, 22 nt, Homo sapiens
uuacaugcaugacaaggugcca

SEQ ID NO: 13248 - RNA, 22 nt, Homo sapiens
cugaucuggaggugucugggga

SEQ ID NO: 13249 - RNA, 22 nt, Homo sapiens
aaaacgcauccucacaggucug

SEQ ID NO: 13250 - RNA, 22 nt, Homo sapiens
gagaacagagauaauuuuacuu

SEQ ID NO: 13251 - RNA, 22 nt, Homo sapiens
uaaagugaggauggcaguaggu

SEQ ID NO: 13252 - RNA, 22 nt, Homo sapiens
acccauguaggugggauuacag

SEQ ID NO: 13253 - RNA, 22 nt, Homo sapiens
cuuaagcauugacuuuggacag

SEQ ID NO: 13254 - RNA, 22 nt, Homo sapiens
caaaggauucauuuccaggagu

SEQ ID NO: 13255 - RNA, 22 nt, Homo sapiens
ugauauguguaaacaauguaua

SEQ ID NO: 13256 - RNA, 22 nt, Homo sapiens
ucucaaguggucgcaguuagau

SEQ ID NO: 13257 - RNA, 22 nt, Homo sapiens
agcuguuguuaauuaacucauu

SEQ ID NO: 13258 - RNA, 22 nt, Homo sapiens
guguaguuugagguaugggggc

SEQ ID NO: 13259 - RNA, 22 nt, Homo sapiens
uuagguuguuucuggucuuagg

SEQ ID NO: 13260 - RNA, 22 nt, Homo sapiens
gaauacugacuauuucaucugg

SEQ ID NO: 13261 - RNA, 22 nt, Homo sapiens
uugagcucuuccagccuggagc

SEQ ID NO: 13262 - RNA, 21 nt, Homo sapiens
augaauguaaagaauguggga

SEQ ID NO: 13263 - RNA, 22 nt, Homo sapiens
aauucugugagauggugcagau

SEQ ID NO: 13264 - RNA, 22 nt, Homo sapiens
uaagugcuugacuuugauguuu

SEQ ID NO: 13265 - RNA, 22 nt, Homo sapiens
uaucaaguuggaagagaaguaa

SEQ ID NO: 13266 - RNA, 22 nt, Homo sapiens
ugagagacaguuucgucggagg

SEQ ID NO: 13267 - RNA, 22 nt, Homo sapiens
ucccugacagggucugagcuuu

SEQ ID NO: 13268 - RNA, 22 nt, Homo sapiens
ucuuagguaagaaauuuuaaca

SEQ ID NO: 13269 - RNA, 22 nt, Homo sapiens
uaagcuaauguguuuucucuua

SEQ ID NO: 13270 - RNA, 22 nt, Homo sapiens
augaugucauuuuaauuucuaa

SEQ ID NO: 13271 - RNA, 22 nt, Homo sapiens
uagaaucuaacucgcaugaaaa

SEQ ID NO: 13272 - RNA, 22 nt, Homo sapiens
cagcuggugcugcaccaguggg

SEQ ID NO: 13273 - RNA, 22 nt, Homo sapiens
ggaauugcaucaaaugcaggua

SEQ ID NO: 13274 - RNA, 22 nt, Homo sapiens
uuagacaguggugcacugcacu

SEQ ID NO: 13275 - RNA, 22 nt, Homo sapiens
ugugagaucucagaauugaacu

SEQ ID NO: 13276 - RNA, 22 nt, Homo sapiens
ucaguccccucgcugagucuac

SEQ ID NO: 13277 - RNA, 22 nt, Homo sapiens
ggacaagagacugggacacuga

SEQ ID NO: 13278 - RNA, 22 nt, Homo sapiens
augacagcaucugugaaguugu

SEQ ID NO: 13279 - RNA, 22 nt, Homo sapiens
uucccugaguaucuuaccaugg

SEQ ID NO: 13280 - RNA, 22 nt, Homo sapiens
uggccaguguuuuuccugggcu

SEQ ID NO: 13281 - RNA, 16 nt, Homo sapiens
uacuacugccuauuau

SEQ ID NO: 13282 - RNA, 22 nt, Homo sapiens
uacaguaguaucuucauuuguu

SEQ ID NO: 13283 - RNA, 22 nt, Homo sapiens
uuggaaacgucaccuuuuccuu

SEQ ID NO: 13284 - RNA, 22 nt, Homo sapiens
ggagugugauuguucucuguua

SEQ ID NO: 13285 - RNA, 22 nt, Homo sapiens
agucaagugggguuagauaguu

SEQ ID NO: 13286 - RNA, 22 nt, Homo sapiens
uugagauggagucucacuccuu

SEQ ID NO: 13287 - RNA, 22 nt, Homo sapiens
ucagugggcuauguaauuaacu

SEQ ID NO: 13288 - RNA, 22 nt, Homo sapiens
uugguuccuuagccuaggacua

SEQ ID NO: 13289 - RNA, 22 nt, Homo sapiens
ggcuagagagcucagggauaug

SEQ ID NO: 13290 - RNA, 22 nt, Homo sapiens
gugagguauacugggaucacua

SEQ ID NO: 13291 - RNA, 22 nt, Homo sapiens
uggucauggaaauagaaugcac

SEQ ID NO: 13292 - RNA, 22 nt, Homo sapiens
uuguaaacaucuguacauugcu

SEQ ID NO: 13293 - RNA, 22 nt, Homo sapiens
agauacauuggauaaugguggg

SEQ ID NO: 13294 - RNA, 22 nt, Homo sapiens
cugaggugggaggauuacuuga

SEQ ID NO: 13295 - RNA, 22 nt, Homo sapiens
guaacucugucacuuacuaguu

SEQ ID NO: 13296 - RNA, 22 nt, Homo sapiens
agcagcucaugccuuugggagg

SEQ ID NO: 13297 - RNA, 22 nt, Homo sapiens
agcucauugcuguccuggagga

SEQ ID NO: 13298 - RNA, 22 nt, Homo sapiens
augacaguguggauuauuguaa

SEQ ID NO: 13299 - RNA, 19 nt, Homo sapiens
uggcacauguauacuuaug

SEQ ID NO: 13300 - RNA, 22 nt, Homo sapiens
auaguagcaugaaacagccauu

SEQ ID NO: 13301 - RNA, 20 nt, Homo sapiens
ccuaguguucuuaggcugca

SEQ ID NO: 13302 - RNA, 22 nt, Homo sapiens
ucaccguguaucauuucauccg

SEQ ID NO: 13303 - RNA, 19 nt, Homo sapiens
uuugccuaggcacauggcc

SEQ ID NO: 13304 - RNA, 22 nt, Homo sapiens
cccgugucuuggucuagggccu

SEQ ID NO: 13305 - RNA, 22 nt, Homo sapiens
gaguugagagaguuguuauuuc

SEQ ID NO: 13306 - RNA, 22 nt, Homo sapiens
aaagagcugagaccugguggag

SEQ ID NO: 13307 - RNA, 22 nt, Homo sapiens
uuuaaagcacggaguuuguggc

SEQ ID NO: 13308 - RNA, 22 nt, Homo sapiens
cucauggagaacaucugcuagg

SEQ ID NO: 13309 - RNA, 22 nt, Homo sapiens
uacugcacuccaaccugagaga

SEQ ID NO: 13310 - RNA, 22 nt, Homo sapiens
aauggcuauuucaugugguagg

SEQ ID NO: 13311 - RNA, 22 nt, Homo sapiens
uucuugcacuuggcccucauua

SEQ ID NO: 13312 - RNA, 22 nt, Homo sapiens
uucagguaauuaugguuugucu

SEQ ID NO: 13313 - RNA, 22 nt, Homo sapiens
acaguguuacuugauaguguau

SEQ ID NO: 13314 - RNA, 22 nt, Homo sapiens
uugggcaaguggcaugaccaug

SEQ ID NO: 13315 - RNA, 22 nt, Homo sapiens
aggugcuauauuucgaggauag

SEQ ID NO: 13316 - RNA, 22 nt, Homo sapiens
ugugagacugacagggcagggu

SEQ ID NO: 13317 - RNA, 22 nt, Homo sapiens
gcuaguguuugccagcguagcc

SEQ ID NO: 13318 - RNA, 22 nt, Homo sapiens
gucacuguggagaagaaagugg

SEQ ID NO: 13319 - RNA, 21 nt, Homo sapiens
aaaugugcuuuaguacccuca

SEQ ID NO: 13320 - RNA, 22 nt, Homo sapiens
auaaaguguuuaguauaggcaa

SEQ ID NO: 13321 - RNA, 22 nt, Homo sapiens
augcacuguuuucuugaugaga

SEQ ID NO: 13322 - RNA, 22 nt, Homo sapiens
gaguauguauaugagugugucu

SEQ ID NO: 13323 - RNA, 22 nt, Homo sapiens
uaaugguuuugcaccaucccuc

SEQ ID NO: 13324 - RNA, 22 nt, Homo sapiens
cucaccuugugauccaccggcc

SEQ ID NO: 13325 - RNA, 22 nt, Homo sapiens
uuguaugucuucauuugaaaaa

SEQ ID NO: 13326 - RNA, 22 nt, Homo sapiens
aagugagaugcaguggaguucc

SEQ ID NO: 13327 - RNA, 22 nt, Homo sapiens
uucgucaugagacagaugcuga

SEQ ID NO: 13328 - RNA, 22 nt, Homo sapiens
uuuguaagaugcauagauugca

SEQ ID NO: 13329 - RNA, 22 nt, Homo sapiens
cuaacuaugucucaggaugucc

SEQ ID NO: 13330 - RNA, 22 nt, Homo sapiens
uugaccuaugggaguuugacua

SEQ ID NO: 13331 - RNA, 20 nt, Homo sapiens
auagcaccagacagcccuag

SEQ ID NO: 13332 - RNA, 22 nt, Homo sapiens
uugugaauggugccgcgauaaa

SEQ ID NO: 13333 - RNA, 22 nt, Homo sapiens
gugauguguuucaacagcuccu

SEQ ID NO: 13334 - RNA, 22 nt, Homo sapiens
aguggugucugaguggccaggg

SEQ ID NO: 13335 - RNA, 22 nt, Homo sapiens
uacugcuuaaaagucaauuacu

SEQ ID NO: 13336 - RNA, 19 nt, Homo sapiens
agucaugugaggacccuug

SEQ ID NO: 13337 - RNA, 22 nt, Homo sapiens
uuuaaggcaugccuguacaugc

SEQ ID NO: 13338 - RNA, 20 nt, Homo sapiens
guaaacucucagcauagaug

SEQ ID NO: 13339 - RNA, 22 nt, Homo sapiens
cuuucacacuguuggugggaau

SEQ ID NO: 13340 - RNA, 22 nt, Homo sapiens
uucagggagaaggcaaacguug

SEQ ID NO: 13341 - RNA, 22 nt, Homo sapiens
guggaggacuggauaaagaaaa

SEQ ID NO: 13342 - RNA, 20 nt, Homo sapiens
ugagaacauguggcauuugg

SEQ ID NO: 13343 - RNA, 22 nt, Homo sapiens
uuuuggugguuaugugucaaug

SEQ ID NO: 13344 - RNA, 16 nt, Homo sapiens
aggaagacuuagagau

SEQ ID NO: 13345 - RNA, 22 nt, Homo sapiens
ucacacggugaugauuccuaga

SEQ ID NO: 13346 - RNA, 22 nt, Homo sapiens
ugugccuucuaagaaggagucu

SEQ ID NO: 13347 - RNA, 22 nt, Homo sapiens
aggagguugguaccaucuguuu

SEQ ID NO: 13348 - RNA, 22 nt, Homo sapiens
uguagacagcacguaguugagu

SEQ ID NO: 13349 - RNA, 22 nt, Homo sapiens
uauugcugaugcugaagggaag

SEQ ID NO: 13350 - RNA, 20 nt, Homo sapiens
gcaugagucuuuauaguaga

SEQ ID NO: 13351 - RNA, 22 nt, Homo sapiens
ccuuggcacuacugacauugua

SEQ ID NO: 13352 - RNA, 22 nt, Homo sapiens
uugcacugagauuuugcuuaca

SEQ ID NO: 13353 - RNA, 20 nt, Homo sapiens
uaagugcuugaugaaugaac

SEQ ID NO: 13354 - RNA, 22 nt, Homo sapiens
auaggagcagaaaccguauuuu

SEQ ID NO: 13355 - RNA, 21 nt, Homo sapiens
gucugguguuuuaaugaggac

SEQ ID NO: 13356 - RNA, 22 nt, Homo sapiens
cucccuuugcugaauguuuuuc

SEQ ID NO: 13357 - RNA, 15 nt, Homo sapiens
uuucaguacagauuc

SEQ ID NO: 13358 - RNA, 19 nt, Homo sapiens
ccauggcaaugaucugaug

SEQ ID NO: 13359 - RNA, 22 nt, Homo sapiens
uccccugagaacuugcuagaaa

SEQ ID NO: 13360 - RNA, 22 nt, Homo sapiens
caccaguuuuucagugauucaa

SEQ ID NO: 13361 - RNA, 16 nt, Homo sapiens
ucccaccauugcuugu

SEQ ID NO: 13362 - RNA, 22 nt, Homo sapiens
cuuggcauugccccuggaauuu

SEQ ID NO: 13363 - RNA, 22 nt, Homo sapiens
ggaauggaacaaagucuugaaa

SEQ ID NO: 13364 - RNA, 22 nt, Homo sapiens
uccaguuauccuguggggagga

SEQ ID NO: 13365 - RNA, 22 nt, Homo sapiens
uacauguauguguuuauggcug

SEQ ID NO: 13366 - RNA, 22 nt, Homo sapiens
uuuuccagugggacucccauua

SEQ ID NO: 13367 - RNA, 22 nt, Homo sapiens
caaagcuauagcaccagaggga

SEQ ID NO: 13368 - RNA, 22 nt, Homo sapiens
aguacugucagcaggguguuga

SEQ ID NO: 13369 - RNA, 22 nt, Homo sapiens
gacauagagccuugacuucauu

SEQ ID NO: 13370 - RNA, 22 nt, Homo sapiens
uaaugugaauagugcuguaaug

SEQ ID NO: 13371 - RNA, 22 nt, Homo sapiens
auggcauggugaagucuuugga

SEQ ID NO: 13372 - RNA, 22 nt, Homo sapiens
ugagaugaggucucgcucuguc

SEQ ID NO: 13373 - RNA, 22 nt, Homo sapiens
uacucugcagagaugcauaaca

SEQ ID NO: 13374 - RNA, 21 nt, Homo sapiens
cuugucuugcuuagaauagac

SEQ ID NO: 13375 - RNA, 22 nt, Homo sapiens
gucaucaggacgggucaucugc

SEQ ID NO: 13376 - RNA, 18 nt, Homo sapiens
uuuggcuguucaugacuc

SEQ ID NO: 13377 - RNA, 22 nt, Homo sapiens
ugaaauuguuugcaaggauagg

SEQ ID NO: 13378 - RNA, 22 nt, Homo sapiens
gugagccaugauuuuaccacug

SEQ ID NO: 13379 - RNA, 22 nt, Homo sapiens
uuauauguuuguacuuaggccu

SEQ ID NO: 13380 - RNA, 22 nt, Homo sapiens
gagguaucauuauguugcccag

SEQ ID NO: 13381 - RNA, 22 nt, Homo sapiens
gugggcaagucacuucaguucu

SEQ ID NO: 13382 - RNA, 18 nt, Homo sapiens
ugaauacagcguugggaa

SEQ ID NO: 13383 - RNA, 22 nt, Homo sapiens
uagcugguauuaggaguugugu

SEQ ID NO: 13384 - RNA, 22 nt, Homo sapiens
cuuugcaaaacauugagaccuc

SEQ ID NO: 13385 - RNA, 22 nt, Homo sapiens
ugcauuagucuguucucacacu

SEQ ID NO: 13386 - RNA, 22 nt, Homo sapiens
uuguaacaguuuauugacucga

SEQ ID NO: 13387 - RNA, 18 nt, Homo sapiens
acugcacuccauccuagg

SEQ ID NO: 13388 - RNA, 22 nt, Homo sapiens
gugacacuggagcuggcacaau

SEQ ID NO: 13389 - RNA, 22 nt, Homo sapiens
gaaagguaggaacagggugcag

SEQ ID NO: 13390 - RNA, 22 nt, Homo sapiens
ccucauggagaacaucugcuag

SEQ ID NO: 13391 - RNA, 22 nt, Homo sapiens
ucccuguuaggcacagauuuau

SEQ ID NO: 13392 - RNA, 22 nt, Homo sapiens
uuugugaggugauggauauguc

SEQ ID NO: 13393 - RNA, 19 nt, Homo sapiens
ugagguauuuguugggaga

SEQ ID NO: 13394 - RNA, 22 nt, Homo sapiens
uuuauggcaugcucccucucaa

SEQ ID NO: 13395 - RNA, 20 nt, Homo sapiens
uaucacaguucaggaacucu

SEQ ID NO: 13396 - RNA, 22 nt, Homo sapiens
acugcacuccagccugaugaaa

SEQ ID NO: 13397 - RNA, 22 nt, Homo sapiens
uagaucacucaggcaauaaaag

SEQ ID NO: 13398 - RNA, 22 nt, Homo sapiens
uaccaaguauuuucacaugaac

SEQ ID NO: 13399 - RNA, 22 nt, Homo sapiens
augauaacagccaggcacggug

SEQ ID NO: 13400 - RNA, 20 nt, Homo sapiens
aagacacuguccccacugga

SEQ ID NO: 13401 - RNA, 22 nt, Homo sapiens
auacagguauacaaugcauaau

SEQ ID NO: 13402 - RNA, 18 nt, Homo sapiens
ugcagcuuugugauuggc

SEQ ID NO: 13403 - RNA, 19 nt, Homo sapiens
ucccuuuguagguaaccug

SEQ ID NO: 13404 - RNA, 22 nt, Homo sapiens
gugcaagagugacugcaguuuu

SEQ ID NO: 13405 - RNA, 22 nt, Homo sapiens
cauugcagauccuucaaaugac

SEQ ID NO: 13406 - RNA, 22 nt, Homo sapiens
ggaauauaaaaagccccagaau

SEQ ID NO: 13407 - RNA, 22 nt, Homo sapiens
aguccauuugaugaugauucca

SEQ ID NO: 13408 - RNA, 23 nt, Homo sapiens
uuucaggcaggugaaagaccagc

SEQ ID NO: 13409 - RNA, 21 nt, Homo sapiens
agcugcguuuaggcauuuucc

SEQ ID NO: 13410 - RNA, 22 nt, Homo sapiens
auuguacuccagccugggcuaa

SEQ ID NO: 13411 - RNA, 22 nt, Homo sapiens
ugacacauguagacaucuggug

SEQ ID NO: 13412 - RNA, 22 nt, Homo sapiens
cauuguccuccuggggcuauuu

SEQ ID NO: 13413 - RNA, 20 nt, Homo sapiens
ucuaccuguagguaauuggu

SEQ ID NO: 13414 - RNA, 22 nt, Homo sapiens
acauagaguagcuaccuguaga

SEQ ID NO: 13415 - RNA, 22 nt, Homo sapiens
uuugaagugugaugccuugaug

SEQ ID NO: 13416 - RNA, 22 nt, Homo sapiens
uagcacaucuucuuggccugca

SEQ ID NO: 13417 - RNA, 22 nt, Homo sapiens
ugcagcauguaggcacguuauu

SEQ ID NO: 13418 - RNA, 22 nt, Homo sapiens
ucagaugaugucccuguucuaa

SEQ ID NO: 13419 - RNA, 22 nt, Homo sapiens
uauggguuuauuucuggucuca

SEQ ID NO: 13420 - RNA, 22 nt, Homo sapiens
cuagccuggagugcaguggugc

SEQ ID NO: 13421 - RNA, 22 nt, Homo sapiens
ugccuacucucugccaggaaug

SEQ ID NO: 13422 - RNA, 19 nt, Homo sapiens
auugacauugggguguuca

SEQ ID NO: 13423 - RNA, 23 nt, Homo sapiens
gaguggagacucauugauuuccu

SEQ ID NO: 13424 - RNA, 22 nt, Homo sapiens
auuuggcagugaagggaucaca

SEQ ID NO: 13425 - RNA, 22 nt, Homo sapiens
gugugcaugucuuuuuaguagg

SEQ ID NO: 13426 - RNA, 22 nt, Homo sapiens
cugagacuggugauuuaugaag

SEQ ID NO: 13427 - RNA, 23 nt, Homo sapiens
uuacaguggcaugaucucugcuc

SEQ ID NO: 13428 - RNA, 22 nt, Homo sapiens
auaauagguugauugacauugc

SEQ ID NO: 13429 - RNA, 22 nt, Homo sapiens
aacagcauaguacccgugauaa

SEQ ID NO: 13430 - RNA, 22 nt, Homo sapiens
acccucagaccaguuucccugg

SEQ ID NO: 13431 - RNA, 22 nt, Homo sapiens
uugugucaaauggcaauuagca

SEQ ID NO: 13432 - RNA, 23 nt, Homo sapiens
ugucaucaagaugaggucacacu

SEQ ID NO: 13433 - RNA, 22 nt, Homo sapiens
agccuguguugaauuauagaaa

SEQ ID NO: 13434 - RNA, 22 nt, Homo sapiens
augacguugugggcucucaagc

SEQ ID NO: 13435 - RNA, 18 nt, Homo sapiens
ugucccuuugcuguucau

SEQ ID NO: 13436 - RNA, 22 nt, Homo sapiens
aaccuguggauuuugguaucug

SEQ ID NO: 13437 - RNA, 20 nt, Homo sapiens
uaagugcauaggauauuucu

SEQ ID NO: 13438 - RNA, 22 nt, Homo sapiens
uucauagucuaugcaaguaaga

SEQ ID NO: 13439 - RNA, 22 nt, Homo sapiens
aucugauggagagcguguggcu

SEQ ID NO: 13440 - RNA, 22 nt, Homo sapiens
aucugguguuuuucucccucgu

SEQ ID NO: 13441 - RNA, 22 nt, Homo sapiens
cugcacugagacccucuuugcu

SEQ ID NO: 13442 - RNA, 22 nt, Homo sapiens
uacuucauucuugaccuugcau

SEQ ID NO: 13443 - RNA, 22 nt, Homo sapiens
auggcccuguguggagcugcug

SEQ ID NO: 13444 - RNA, 22 nt, Homo sapiens
ggaaagacuauuguaaaggaug

SEQ ID NO: 13445 - RNA, 22 nt, Homo sapiens
uauugcaauuggcagagugcua

SEQ ID NO: 13446 - RNA, 22 nt, Homo sapiens
aaaugacuuuuuaugcagagua

SEQ ID NO: 13447 - RNA, 22 nt, Homo sapiens
ggucagauggcagcugggccug

SEQ ID NO: 13448 - RNA, 22 nt, Homo sapiens
uuauaguuuuucaccuggagaa

SEQ ID NO: 13449 - RNA, 22 nt, Homo sapiens
cuggguacccuuuaaacaggaa

SEQ ID NO: 13450 - RNA, 22 nt, Homo sapiens
uccuuuaguuaauaaagacaag

SEQ ID NO: 13451 - RNA, 22 nt, Homo sapiens
auggcaaugcgaugaugacuga

SEQ ID NO: 13452 - RNA, 22 nt, Homo sapiens
ugauccagugcucaguuggagu

SEQ ID NO: 13453 - RNA, 22 nt, Homo sapiens
uugcaaggugcucgaagggcuc

SEQ ID NO: 13454 - RNA, 22 nt, Homo sapiens
ccacaguagucuugggaugggc

SEQ ID NO: 13455 - RNA, 22 nt, Homo sapiens
aucaaaugcuggcagagugccu

SEQ ID NO: 13456 - RNA, 22 nt, Homo sapiens
agauauguuuaguuucaaaaug

SEQ ID NO: 13457 - RNA, 18 nt, Homo sapiens
uccacgugcuuuccagau

SEQ ID NO: 13458 - RNA, 22 nt, Homo sapiens
cugugauagguuagucaugaau

SEQ ID NO: 13459 - RNA, 22 nt, Homo sapiens
uauaggacuugguguaguuucu

SEQ ID NO: 13460 - RNA, 22 nt, Homo sapiens
uuuagggcaggccuggugguga

SEQ ID NO: 13461 - RNA, 22 nt, Homo sapiens
uuucauggaggcauuuuagauu

SEQ ID NO: 13462 - RNA, 22 nt, Homo sapiens
uuaacagugucaaucuguagua

SEQ ID NO: 13463 - RNA, 18 nt, Homo sapiens
gaagaaguaggcauggca

SEQ ID NO: 13464 - RNA, 22 nt, Homo sapiens
guaagagaauggguuacuuucc

SEQ ID NO: 13465 - RNA, 22 nt, Homo sapiens
uaaguaaaugaaagguugauuu

SEQ ID NO: 13466 - RNA, 22 nt, Homo sapiens
gaacacaucuuugguuagagga

SEQ ID NO: 13467 - RNA, 22 nt, Homo sapiens
uuacugcauaauuccugggaag

SEQ ID NO: 13468 - RNA, 20 nt, Homo sapiens
augaccuauggugguauaag

SEQ ID NO: 13469 - RNA, 23 nt, Homo sapiens
accugugguuauuuuacucuucc

SEQ ID NO: 13470 - RNA, 22 nt, Homo sapiens
uuauuugguuauuguaauuggg

SEQ ID NO: 13471 - RNA, 22 nt, Homo sapiens
guaccugagaaguuccagggga

SEQ ID NO: 13472 - RNA, 22 nt, Homo sapiens
uucccuguaucuucugccaugu

SEQ ID NO: 13473 - RNA, 22 nt, Homo sapiens
cacauagcuagucaguagugaa

SEQ ID NO: 13474 - RNA, 22 nt, Homo sapiens
cugagaucaugggucagguggu

SEQ ID NO: 13475 - RNA, 22 nt, Homo sapiens
gugagcauauuaguauugcacu

SEQ ID NO: 13476 - RNA, 20 nt, Homo sapiens
aagugcuauuucuuuugugg

SEQ ID NO: 13477 - RNA, 22 nt, Homo sapiens
ucacucagaccuggugauaugc

SEQ ID NO: 13478 - RNA, 22 nt, Homo sapiens
uuugaguuugaggugcugauga

SEQ ID NO: 13479 - RNA, 22 nt, Homo sapiens
ugucaguuucuugagauggaac

SEQ ID NO: 13480 - RNA, 22 nt, Homo sapiens
cuuugcguugaacaaagccaua

SEQ ID NO: 13481 - RNA, 20 nt, Homo sapiens
cuuuuagcagcagcaagaga

SEQ ID NO: 13482 - RNA, 22 nt, Homo sapiens
gucuggcuccuucuacuacaug

SEQ ID NO: 13483 - RNA, 22 nt, Homo sapiens
uaguaccauucccaaaccaacu

SEQ ID NO: 13484 - RNA, 22 nt, Homo sapiens
ggcaguggaagugccaguuucu

SEQ ID NO: 13485 - RNA, 22 nt, Homo sapiens
uuagcagugugagcacagacua

SEQ ID NO: 13486 - RNA, 22 nt, Homo sapiens
cucauggauggucuggcagcca

SEQ ID NO: 13487 - RNA, 22 nt, Homo sapiens
gucaggugcuuacgcggagauc

SEQ ID NO: 13488 - RNA, 22 nt, Homo sapiens
gcuuuguuguugaugggaaauc

SEQ ID NO: 13489 - RNA, 22 nt, Homo sapiens
uuggccaauggugauucccggc

SEQ ID NO: 13490 - RNA, 22 nt, Homo sapiens
cugucagugggaguucaggcuu

SEQ ID NO: 13491 - RNA, 21 nt, Homo sapiens
aaacuggcccaauuguuccau

SEQ ID NO: 13492 - RNA, 22 nt, Homo sapiens
auccucugagaucuaggcagag

SEQ ID NO: 13493 - RNA, 22 nt, Homo sapiens
agugauggagccaggauuuaau

SEQ ID NO: 13494 - RNA, 20 nt, Homo sapiens
ccccaguuuuucuauuagcu

SEQ ID NO: 13495 - RNA, 22 nt, Homo sapiens
ggaugcauuuuugguugucaca

SEQ ID NO: 13496 - RNA, 22 nt, Homo sapiens
ggaauguuaaggcgcuguuggu

SEQ ID NO: 13497 - RNA, 22 nt, Homo sapiens
gacuggcuguuuucuuuauuau

SEQ ID NO: 13498 - RNA, 22 nt, Homo sapiens
auguugcuugaaggcauuuugu

SEQ ID NO: 13499 - RNA, 22 nt, Homo sapiens
aguuggcacugagcugugauug

SEQ ID NO: 13500 - RNA, 22 nt, Homo sapiens
uaaugcacucgaaucauggaau

SEQ ID NO: 13501 - RNA, 22 nt, Homo sapiens
agcuggucucaggugcccugcu

SEQ ID NO: 13502 - RNA, 22 nt, Homo sapiens
auuugguguuguuuggagccua

SEQ ID NO: 13503 - RNA, 22 nt, Homo sapiens
uacauaguaagcaucuccugug

SEQ ID NO: 13504 - RNA, 22 nt, Homo sapiens
uugaaagucauuucuucuaagu

SEQ ID NO: 13505 - RNA, 22 nt, Homo sapiens
ugcauauucgaguuauuuuggg

SEQ ID NO: 13506 - RNA, 22 nt, Homo sapiens
aucgcauaaucucuaaaaagca

SEQ ID NO: 13507 - RNA, 22 nt, Homo sapiens
uggucaccuucuugcucugucu

SEQ ID NO: 13508 - RNA, 22 nt, Homo sapiens
auugcuaauaugcuucaggcaa

SEQ ID NO: 13509 - RNA, 22 nt, Homo sapiens
agugcuuaauagauguccagca

SEQ ID NO: 13510 - RNA, 22 nt, Homo sapiens
ccacaguggauuaaaguuacug

SEQ ID NO: 13511 - RNA, 22 nt, Homo sapiens
ugugcacaaccugcagguuugu

SEQ ID NO: 13512 - RNA, 20 nt, Homo sapiens
uugcagagcccaacccugga

SEQ ID NO: 13513 - RNA, 20 nt, Homo sapiens
agguacacugacaugccuuc

SEQ ID NO: 13514 - RNA, 22 nt, Homo sapiens
uugacuuuuaggaggaaaauga

SEQ ID NO: 13515 - RNA, 22 nt, Homo sapiens
aaucucaacacuuugggaggcu

SEQ ID NO: 13516 - RNA, 22 nt, Homo sapiens
gacuuugguaaacucgguggca

SEQ ID NO: 13517 - RNA, 22 nt, Homo sapiens
ugauagucauucaauuuagcca

SEQ ID NO: 13518 - RNA, 22 nt, Homo sapiens
ucaggugcaguggcucugaccu

SEQ ID NO: 13519 - RNA, 22 nt, Homo sapiens
aacuugcacuugauugagagcu

SEQ ID NO: 13520 - RNA, 22 nt, Homo sapiens
uagagguauaccaaaaaggcau

SEQ ID NO: 13521 - RNA, 22 nt, Homo sapiens
ugggaccccuacucuuuccaca

SEQ ID NO: 13522 - RNA, 22 nt, Homo sapiens
auucccuuggucaacggaugca

SEQ ID NO: 13523 - RNA, 22 nt, Homo sapiens
ucuuugggauauucugaaaggg

SEQ ID NO: 13524 - RNA, 22 nt, Homo sapiens
uacagaguauccauuugaguuc

SEQ ID NO: 13525 - RNA, 22 nt, Homo sapiens
ugauaugaaagggaaauaagug

SEQ ID NO: 13526 - RNA, 20 nt, Homo sapiens
aucagagacuaggauugcca

SEQ ID NO: 13527 - RNA, 20 nt, Homo sapiens
uguacacaguguacccacau

SEQ ID NO: 13528 - RNA, 18 nt, Homo sapiens
gugucugguuaugggagu

SEQ ID NO: 13529 - RNA, 22 nt, Homo sapiens
uugugguaggaguugccauguu

SEQ ID NO: 13530 - RNA, 22 nt, Homo sapiens
guguuaaucucaaguacucuca

SEQ ID NO: 13531 - RNA, 22 nt, Homo sapiens
ugccaguauuuuauuaagaauu

SEQ ID NO: 13532 - RNA, 22 nt, Homo sapiens
augggagugugguuagagaccu

SEQ ID NO: 13533 - RNA, 22 nt, Homo sapiens
uguauagaucugauucaucucc

SEQ ID NO: 13534 - RNA, 22 nt, Homo sapiens
ccacauuggaaaggaucccccc

SEQ ID NO: 13535 - RNA, 22 nt, Homo sapiens
acauguaauugauuuuguguua

SEQ ID NO: 13536 - RNA, 22 nt, Homo sapiens
uuagugcugaguggaauguucu

SEQ ID NO: 13537 - RNA, 21 nt, Homo sapiens
uggaaguguacaauuauaccc

SEQ ID NO: 13538 - RNA, 22 nt, Homo sapiens
guaacccuguaggccuaaagua

SEQ ID NO: 13539 - RNA, 22 nt, Homo sapiens
aaaugcuguuccaggaccuauc

SEQ ID NO: 13540 - RNA, 22 nt, Homo sapiens
uucauggaacaaguggguucaa

SEQ ID NO: 13541 - RNA, 22 nt, Homo sapiens
aaagcuaagguagcauuggaga

SEQ ID NO: 13542 - RNA, 22 nt, Homo sapiens
agcaagaaugaacucucccaga

SEQ ID NO: 13543 - RNA, 22 nt, Homo sapiens
gagaucacuguuuauauucucu

SEQ ID NO: 13544 - RNA, 22 nt, Homo sapiens
auugaaucuaaaaugagucucu

SEQ ID NO: 13545 - RNA, 22 nt, Homo sapiens
auaugcuuauuagcaagaaaua

SEQ ID NO: 13546 - RNA, 22 nt, Homo sapiens
gugguacuaucuuugguuucag

SEQ ID NO: 13547 - RNA, 22 nt, Homo sapiens
uggauaguuuacugaagagugg

SEQ ID NO: 13548 - RNA, 22 nt, Homo sapiens
aggagaucagccucccugcaac

SEQ ID NO: 13549 - RNA, 22 nt, Homo sapiens
uuuuucacuuaaguuaggcuca

SEQ ID NO: 13550 - RNA, 20 nt, Homo sapiens
aauaacagccccagggaggu

SEQ ID NO: 13551 - RNA, 22 nt, Homo sapiens
acacaguaagcacaguguagau

SEQ ID NO: 13552 - RNA, 22 nt, Homo sapiens
ugagauguuuagauuguugucu

SEQ ID NO: 13553 - RNA, 20 nt, Homo sapiens
uccacugagcgucacggcag

SEQ ID NO: 13554 - RNA, 22 nt, Homo sapiens
uuggcuaugaguccuaugugca

SEQ ID NO: 13555 - RNA, 22 nt, Homo sapiens
gugcauacgucuuuauaguagc

SEQ ID NO: 13556 - RNA, 22 nt, Homo sapiens
uuauagcagugcccaacuccug

SEQ ID NO: 13557 - RNA, 22 nt, Homo sapiens
ucuuuggauggaaauuggaguc

SEQ ID NO: 13558 - RNA, 22 nt, Homo sapiens
augaaaucuuuggcagaucuua

SEQ ID NO: 13559 - RNA, 22 nt, Homo sapiens
uuuccaguuuggaggaugcauu

SEQ ID NO: 13560 - RNA, 22 nt, Homo sapiens
ucugcauauucuagggcaccaa

SEQ ID NO: 13561 - RNA, 22 nt, Homo sapiens
uggaagacucaagguggugaau

SEQ ID NO: 13562 - RNA, 22 nt, Homo sapiens
ucaguucauggaggugucugcu

SEQ ID NO: 13563 - RNA, 22 nt, Homo sapiens
ugcugcuguuguuguuacuagc

SEQ ID NO: 13564 - RNA, 22 nt, Homo sapiens
uggcuagaccugcauaacagcu

SEQ ID NO: 13565 - RNA, 22 nt, Homo sapiens
cugagauaauuucuagguguca

SEQ ID NO: 13566 - RNA, 22 nt, Homo sapiens
auucaucagggauacuggccug

SEQ ID NO: 13567 - RNA, 22 nt, Homo sapiens
uagcugcugcuaggcuaaggau

SEQ ID NO: 13568 - RNA, 22 nt, Homo sapiens
aaggcauggugacuauuuaggc

SEQ ID NO: 13569 - RNA, 22 nt, Homo sapiens
ucagucauucacucacucggac

SEQ ID NO: 13570 - RNA, 22 nt, Homo sapiens
ggacauguauauauaugugugu

SEQ ID NO: 13571 - RNA, 22 nt, Homo sapiens
uaugccuuuugguucaagcaac

SEQ ID NO: 13572 - RNA, 22 nt, Homo sapiens
ucauugcauguuaauuaaacag

SEQ ID NO: 13573 - RNA, 22 nt, Homo sapiens
auacccugucgugagucagaga

SEQ ID NO: 13574 - RNA, 22 nt, Homo sapiens
ugugcacaacaugcagguuugu

SEQ ID NO: 13575 - RNA, 22 nt, Homo sapiens
uggcgagaugcucgugugcaga

SEQ ID NO: 13576 - RNA, 22 nt, Homo sapiens
gacugacgaccgcucuaccugc

SEQ ID NO: 13577 - RNA, 22 nt, Homo sapiens
acugcacuccagcuugggugac

SEQ ID NO: 13578 - RNA, 22 nt, Homo sapiens
augcaagacaccgauuagcuuu

SEQ ID NO: 13579 - RNA, 19 nt, Homo sapiens
uuugaauauaaugcagcua

SEQ ID NO: 13580 - RNA, 22 nt, Homo sapiens
uugagauguggguuggugacuu

SEQ ID NO: 13581 - RNA, 22 nt, Homo sapiens
cugauuguucuugcugggccuu

SEQ ID NO: 13582 - RNA, 22 nt, Homo sapiens
aguaucacaguggguguauacc

SEQ ID NO: 13583 - RNA, 22 nt, Homo sapiens
auggaauguauagucauguagg

SEQ ID NO: 13584 - RNA, 22 nt, Homo sapiens
auguauacaugcaggucacagg

SEQ ID NO: 13585 - RNA, 22 nt, Homo sapiens
cauugcacuccagccugaggga

SEQ ID NO: 13586 - RNA, 22 nt, Homo sapiens
gucagguaccugaaagcagcca

SEQ ID NO: 13587 - RNA, 22 nt, Homo sapiens
uucccugugguauagaagccgu

SEQ ID NO: 13588 - RNA, 22 nt, Homo sapiens
uuggacugugagguuucguggg

SEQ ID NO: 13589 - RNA, 22 nt, Homo sapiens
ugagauuguaucugcaaugugu

SEQ ID NO: 13590 - RNA, 22 nt, Homo sapiens
uucaguagucaaaagauaaggg

SEQ ID NO: 13591 - RNA, 22 nt, Homo sapiens
ugcugcaaacaugagaggaagu

SEQ ID NO: 13592 - RNA, 22 nt, Homo sapiens
uuucacaguguucucccccaga

SEQ ID NO: 13593 - RNA, 17 nt, Homo sapiens
ugagcuaagauuacccc

SEQ ID NO: 13594 - RNA, 22 nt, Homo sapiens
aggugguuuugaugagcaggua

SEQ ID NO: 13595 - RNA, 22 nt, Homo sapiens
gucuuuugcuagccagagagcu

SEQ ID NO: 13596 - RNA, 22 nt, Homo sapiens
ugucaagaugguuugauguugu

SEQ ID NO: 13597 - RNA, 22 nt, Homo sapiens
cagauacuggccuggagcugug

SEQ ID NO: 13598 - RNA, 22 nt, Homo sapiens
gugugucuugaccaggaucgga

SEQ ID NO: 13599 - RNA, 22 nt, Homo sapiens
ucacauggauuaacucauuuau

SEQ ID NO: 13600 - RNA, 22 nt, Homo sapiens
auggcaaaaaaugcaauuacuu

SEQ ID NO: 13601 - RNA, 22 nt, Homo sapiens
agcuguuguacacuuuaccuuu

SEQ ID NO: 13602 - RNA, 22 nt, Homo sapiens
agugccacugcacucuagccug

SEQ ID NO: 13603 - RNA, 22 nt, Homo sapiens
uuuugcucuugguaaugaaaga

SEQ ID NO: 13604 - RNA, 22 nt, Homo sapiens
ucaacguauuuauauagcagag

SEQ ID NO: 13605 - RNA, 22 nt, Homo sapiens
uugcagagccccugcaaggguc

SEQ ID NO: 13606 - RNA, 22 nt, Homo sapiens
aacugggcaagcauuacauggu

SEQ ID NO: 13607 - RNA, 17 nt, Homo sapiens
ggcaggauccaggaucc

SEQ ID NO: 13608 - RNA, 19 nt, Homo sapiens
ucacgugcagcagccacac

SEQ ID NO: 13609 - RNA, 22 nt, Homo sapiens
agcagcuuugaucugaaugauu

SEQ ID NO: 13610 - RNA, 22 nt, Homo sapiens
uacaguguuuugguauuccaca

SEQ ID NO: 13611 - RNA, 22 nt, Homo sapiens
gagccuguaggaggagaggugg

SEQ ID NO: 13612 - RNA, 22 nt, Homo sapiens
ucucacacugaauguguguggg

SEQ ID NO: 13613 - RNA, 22 nt, Homo sapiens
ggugcuugaggaacggaggcug

SEQ ID NO: 13614 - RNA, 23 nt, Homo sapiens
auaaacugucaaaagccagcccu

SEQ ID NO: 13615 - RNA, 22 nt, Homo sapiens
agcugcaauguuuaguauaaua

SEQ ID NO: 13616 - RNA, 22 nt, Homo sapiens
guucaguaguucauucauuuau

SEQ ID NO: 13617 - RNA, 22 nt, Homo sapiens
gagauaguguggguacagcuau

SEQ ID NO: 13618 - RNA, 22 nt, Homo sapiens
guaugguugaagugacaagcca

SEQ ID NO: 13619 - RNA, 22 nt, Homo sapiens
ugcauuaucagauguuugcuuu

SEQ ID NO: 13620 - RNA, 22 nt, Homo sapiens
ucagucuuuuaccauuaaguau

SEQ ID NO: 13621 - RNA, 22 nt, Homo sapiens
agguacuugagauucugaacug

SEQ ID NO: 13622 - RNA, 17 nt, Homo sapiens
uuagacagacauccugc

SEQ ID NO: 13623 - RNA, 22 nt, Homo sapiens
ggucugguguugaaauucuuca

SEQ ID NO: 13624 - RNA, 22 nt, Homo sapiens
uaucacagauauuaugggccaa

SEQ ID NO: 13625 - RNA, 22 nt, Homo sapiens
uucaaguagguaggaccacagg

SEQ ID NO: 13626 - RNA, 22 nt, Homo sapiens
uauggauguuaagguucacagc

SEQ ID NO: 13627 - RNA, 22 nt, Homo sapiens
ugacagcuguugaggcauuuau

SEQ ID NO: 13628 - RNA, 22 nt, Homo sapiens
cauugcacacauuuaccuaugu

SEQ ID NO: 13629 - RNA, 22 nt, Homo sapiens
ugaauaguaauguguuuggucu

SEQ ID NO: 13630 - RNA, 22 nt, Homo sapiens
agucaguguguauugauggcac

SEQ ID NO: 13631 - RNA, 22 nt, Homo sapiens
uugugcuccugugagaaucuag

SEQ ID NO: 13632 - RNA, 22 nt, Homo sapiens
agagagcuugggguguuaaauu

SEQ ID NO: 13633 - RNA, 22 nt, Homo sapiens
gagauaggauucacuuucaugu

SEQ ID NO: 13634 - RNA, 22 nt, Homo sapiens
cuggcucugggcuaaagaaaua

SEQ ID NO: 13635 - RNA, 22 nt, Homo sapiens
gucaucaucaguccucugugca

SEQ ID NO: 13636 - RNA, 22 nt, Homo sapiens
cuagucacaggaguugaaggau

SEQ ID NO: 13637 - RNA, 22 nt, Homo sapiens
aaguccaugaagucuugugggu

SEQ ID NO: 13638 - RNA, 22 nt, Homo sapiens
ugagacgaagucucguucugua

SEQ ID NO: 13639 - RNA, 21 nt, Homo sapiens
ugauaugguagaagagagaca

SEQ ID NO: 13640 - RNA, 22 nt, Homo sapiens
uagagcuaguugcucacugcuu

SEQ ID NO: 13641 - RNA, 22 nt, Homo sapiens
uagcaggaaaggggucagaucu

SEQ ID NO: 13642 - RNA, 20 nt, Homo sapiens
uacugcacuccauccugggu

SEQ ID NO: 13643 - RNA, 22 nt, Homo sapiens
ucuugcaccuacaugcuuuguc

SEQ ID NO: 13644 - RNA, 22 nt, Homo sapiens
gauacuggcuuuauagaaugau

SEQ ID NO: 13645 - RNA, 22 nt, Homo sapiens
uguuauguuuuagagguuucaa

SEQ ID NO: 13646 - RNA, 22 nt, Homo sapiens
auggauguucuagggaugugau

SEQ ID NO: 13647 - RNA, 22 nt, Homo sapiens
auguauggagauauuuuugguu

SEQ ID NO: 13648 - RNA, 22 nt, Homo sapiens
acugcacuccagccuuggcggc

SEQ ID NO: 13649 - RNA, 22 nt, Homo sapiens
gugagguacgugucaagaacca

SEQ ID NO: 13650 - RNA, 19 nt, Homo sapiens
uggucaguucugggagcug

SEQ ID NO: 13651 - RNA, 22 nt, Homo sapiens
guacaugcauacaugcacaucu

SEQ ID NO: 13652 - RNA, 22 nt, Homo sapiens
uggacaagugcccuccaccuca

SEQ ID NO: 13653 - RNA, 22 nt, Homo sapiens
ucauuggauggaaugcucugua

SEQ ID NO: 13654 - RNA, 22 nt, Homo sapiens
gugaucuguccuucauagccug

SEQ ID NO: 13655 - RNA, 22 nt, Homo sapiens
ugaccucugauagcaguaggug

SEQ ID NO: 13656 - RNA, 19 nt, Homo sapiens
augagcaauaguuuuaauc

SEQ ID NO: 13657 - RNA, 23 nt, Homo sapiens
ucacggagaccugcaagaccaau

SEQ ID NO: 13658 - RNA, 22 nt, Homo sapiens
ugugaugcagggccugggccuc

SEQ ID NO: 13659 - RNA, 22 nt, Homo sapiens
gggggagugugguacccagcau

SEQ ID NO: 13660 - RNA, 19 nt, Homo sapiens
ggucccucucaagucauuc

SEQ ID NO: 13661 - RNA, 22 nt, Homo sapiens
aaguagcuggaugcaguggcac

SEQ ID NO: 13662 - RNA, 22 nt, Homo sapiens
uaaagugcugagaugaggcugg

SEQ ID NO: 13663 - RNA, 22 nt, Homo sapiens
acugcacuccagccuuggccac

SEQ ID NO: 13664 - RNA, 22 nt, Homo sapiens
gacuagggaccaugagcaaucc

SEQ ID NO: 13665 - RNA, 22 nt, Homo sapiens
ccacauuaccuugcuugcucca

SEQ ID NO: 13666 - RNA, 22 nt, Homo sapiens
aaagucuguuuugucagagacu

SEQ ID NO: 13667 - RNA, 22 nt, Homo sapiens
ucagugaauguuggccacuacu

SEQ ID NO: 13668 - RNA, 20 nt, Homo sapiens
uacauaguaaacugagagca

SEQ ID NO: 13669 - RNA, 22 nt, Homo sapiens
uagcaguaccccaguauccugg

SEQ ID NO: 13670 - RNA, 22 nt, Homo sapiens
agucagucuguccugugcugag

SEQ ID NO: 13671 - RNA, 22 nt, Homo sapiens
gggcaugaugucuuaugccuau

SEQ ID NO: 13672 - RNA, 22 nt, Homo sapiens
uugaccaaagaagagucauugc

SEQ ID NO: 13673 - RNA, 22 nt, Homo sapiens
uuggaauuaagagauauuuucu

SEQ ID NO: 13674 - RNA, 22 nt, Homo sapiens
cuauaugucuguuuugguacca

SEQ ID NO: 13675 - RNA, 19 nt, Homo sapiens
uugagcacugccggaguua

SEQ ID NO: 13676 - RNA, 22 nt, Homo sapiens
cauggcucuuguuuacucccag

SEQ ID NO: 13677 - RNA, 20 nt, Homo sapiens
auugaacucaguauucugaa

SEQ ID NO: 13678 - RNA, 22 nt, Homo sapiens
uuacagcugcuccccaucacuc

SEQ ID NO: 13679 - RNA, 22 nt, Homo sapiens
augucacugcacuccugccugg

SEQ ID NO: 13680 - RNA, 22 nt, Homo sapiens
gacagagcaagacccuauuuaa

SEQ ID NO: 13681 - RNA, 20 nt, Homo sapiens
gcauaugucuuuauagcaga

SEQ ID NO: 13682 - RNA, 22 nt, Homo sapiens
acugcacuccaaccuuggugac

SEQ ID NO: 13683 - RNA, 22 nt, Homo sapiens
uuuguacuucauugguucuacu

SEQ ID NO: 13684 - RNA, 22 nt, Homo sapiens
gagacauguuugcuuaucugag

SEQ ID NO: 13685 - RNA, 22 nt, Homo sapiens
uugaaagaugaacuggauugga

SEQ ID NO: 13686 - RNA, 22 nt, Homo sapiens
aggcaguuucagugagagguga

SEQ ID NO: 13687 - RNA, 22 nt, Homo sapiens
uuacuacucucuaugaccaguu

SEQ ID NO: 13688 - RNA, 22 nt, Homo sapiens
auaagauaguggaagugggauu

SEQ ID NO: 13689 - RNA, 22 nt, Homo sapiens
gauacuguauccuaaaagcuuu

SEQ ID NO: 13690 - RNA, 22 nt, Homo sapiens
guaccugauacaggcgcacggu

SEQ ID NO: 13691 - RNA, 22 nt, Homo sapiens
aggagcuuuggggaaaacagau

SEQ ID NO: 13692 - RNA, 22 nt, Homo sapiens
gugguaucauuuaaccauuaga

SEQ ID NO: 13693 - RNA, 22 nt, Homo sapiens
uaggcacuguguuuguaggagu

SEQ ID NO: 13694 - RNA, 22 nt, Homo sapiens
gggauguaaaagugggcacauu

SEQ ID NO: 13695 - RNA, 22 nt, Homo sapiens
uuauuagagauauuugguuagg

SEQ ID NO: 13696 - RNA, 21 nt, Homo sapiens
auugcacuccagccugggcga

SEQ ID NO: 13697 - RNA, 20 nt, Homo sapiens
augugcaguguggcaaccaa

SEQ ID NO: 13698 - RNA, 22 nt, Homo sapiens
ugagauagaaaacauaggagaa

SEQ ID NO: 13699 - RNA, 17 nt, Homo sapiens
guacucagugaccaugg

SEQ ID NO: 13700 - RNA, 22 nt, Homo sapiens
ucuggcuuucuuuacuuaaugu

SEQ ID NO: 13701 - RNA, 22 nt, Homo sapiens
agcugcacugguauaggagaaa

SEQ ID NO: 13702 - RNA, 23 nt, Homo sapiens
ugagaugucugauugcgaggguc

SEQ ID NO: 13703 - RNA, 22 nt, Homo sapiens
uugugcuugauuugccuagcug

SEQ ID NO: 13704 - RNA, 22 nt, Homo sapiens
ggcaagaacuucacucacuuuu

SEQ ID NO: 13705 - RNA, 22 nt, Homo sapiens
cuagugcaauccuuugauggua

SEQ ID NO: 13706 - RNA, 22 nt, Homo sapiens
cauggcacugagcagguaugca

SEQ ID NO: 13707 - RNA, 22 nt, Homo sapiens
guguugcacauucuguggaugu

SEQ ID NO: 13708 - RNA, 22 nt, Homo sapiens
augaaaguguguggaaacuuga

SEQ ID NO: 13709 - RNA, 22 nt, Homo sapiens
ucaagaccucacauagaggaga

SEQ ID NO: 13710 - RNA, 22 nt, Homo sapiens
uauaccacugauuuuauucuga

SEQ ID NO: 13711 - RNA, 22 nt, Homo sapiens
cuuaacagugguauugaugacc

SEQ ID NO: 13712 - RNA, 22 nt, Homo sapiens
cauggcacagagaauguguucu

SEQ ID NO: 13713 - RNA, 22 nt, Homo sapiens
ccaaauccauccaaaucauaga

SEQ ID NO: 13714 - RNA, 22 nt, Homo sapiens
cagcuguguuauaaacuaccau

SEQ ID NO: 13715 - RNA, 22 nt, Homo sapiens
agauggauuuuguagccccagc

SEQ ID NO: 13716 - RNA, 22 nt, Homo sapiens
uuguugcacugcuuuccuggcc

SEQ ID NO: 13717 - RNA, 22 nt, Homo sapiens
uuugccaaugggaauuuuccua

SEQ ID NO: 13718 - RNA, 22 nt, Homo sapiens
uacaccugcacucuagccuggg

SEQ ID NO: 13719 - RNA, 22 nt, Human adenovirus A
gaacaguguuuucagcaauuac

SEQ ID NO: 13720 - RNA, 21 nt, Human adenovirus A
gcgugcgcagucuugaaugcu

SEQ ID NO: 13721 - RNA, 22 nt, Human adenovirus B (HAdV-B)
uggaauggguuacuauggaagc

SEQ ID NO: 13722 - RNA, 21 nt, Human adenovirus B (HAdV-B)
cuuccucuaauaacccuucua

SEQ ID NO: 13723 - RNA, 22 nt, Human adenovirus B (HAdV-B)
ucauuugguuauugcccgcacu

SEQ ID NO: 13724 - RNA, 22 nt, Human adenovirus B (HAdV-B)
gguggaaugugaaacuguuugc

SEQ ID NO: 13725 - RNA, 22 nt, Human adenovirus B (HAdV-B)
acacaccccgaaacugcgucac

SEQ ID NO: 13726 - RNA, 22 nt, Human adenovirus C
gaccgcuggcggcacggcgcag

SEQ ID NO: 13727 - RNA, 22 nt, Human adenovirus C
cuguuagagcucuguuccagca

SEQ ID NO: 13728 - RNA, 22 nt, Human adenovirus C
ggcuagguccaggugauaccug

SEQ ID NO: 13729 - RNA, 22 nt, Human adenovirus C
cuccgggcugcgcgcuggccag

SEQ ID NO: 13730 - RNA, 22 nt, Human adenovirus C
cuccccuggacccgccguuugu

SEQ ID NO: 13731 - RNA, 22 nt, Human adenovirus C
guugcgcgcggucauguccagc

SEQ ID NO: 13732 - RNA, 22 nt, Human adenovirus C
cuggcacgggcagcggcgauag

SEQ ID NO: 13733 - RNA, 22 nt, Human adenovirus C
uccggccguccgccgugaucca

SEQ ID NO: 13734 - RNA, 22 nt, Human adenovirus C
cgcgagauugagcuccacgugc

SEQ ID NO: 13735 - RNA, 22 nt, Human adenovirus C
cguagucguugcaaguccgcac

SEQ ID NO: 13736 - RNA, 19 nt, Human adenovirus C
ugagauaccagaguuggga

SEQ ID NO: 13737 - RNA, 22 nt, Human adenovirus C
gagcaggucuacuggucguugc

SEQ ID NO: 13738 - RNA, 22 nt, Human adenovirus C
ugcagguuuaccucgcauagcc

SEQ ID NO: 13739 - RNA, 22 nt, Human adenovirus C
ccgccggcucacgcucacggcc

SEQ ID NO: 13740 - RNA, 22 nt, Human adenovirus C
ugcaaaauuuccaacguggagc

SEQ ID NO: 13741 - RNA, 22 nt, Human adenovirus C
cagcgcguuuacgaucgccagc

SEQ ID NO: 13742 - RNA, 22 nt, Human adenovirus C
cgcccgcgaugccgaagggggc

SEQ ID NO: 13743 - RNA, 22 nt, Human adenovirus C
gugagugcgcccauggacauaa

SEQ ID NO: 13744 - RNA, 22 nt, Human adenovirus C
augaaaaaauucauagauugga

SEQ ID NO: 13745 - RNA, 22 nt, Human adenovirus C
ggcggacggaagacaacaguag

SEQ ID NO: 13746 - RNA, 22 nt, Human adenovirus C
cacuccaguaggccgucaccgc

SEQ ID NO: 13747 - RNA, 22 nt, Human adenovirus C
gcugggcguuaccccgucgcgc

SEQ ID NO: 13748 - RNA, 22 nt, Human adenovirus C
uaaacuuuggagaaaguuugca

SEQ ID NO: 13749 - RNA, 18 nt, Human adenovirus C
uccgggguaggggagauc

SEQ ID NO: 13750 - RNA, 22 nt, Human adenovirus C
ggcgccgggcccggcacuaccu

SEQ ID NO: 13751 - RNA, 22 nt, Human adenovirus C
uggaucugcgccagcagguuuc

SEQ ID NO: 13752 - RNA, 22 nt, Human adenovirus C
uugccugggaggagccccacag

SEQ ID NO: 13753 - RNA, 22 nt, Human adenovirus C
ggaugcuguuucuccccccggu

SEQ ID NO: 13754 - RNA, 17 nt, Human adenovirus C
ugcggcggcggcuggcg

SEQ ID NO: 13755 - RNA, 22 nt, Human adenovirus C
gguaucauggcggacgaccggg

SEQ ID NO: 13756 - RNA, 22 nt, Human adenovirus C
gaucaugucuaccugcggggcg

SEQ ID NO: 13757 - RNA, 22 nt, Human adenovirus C
cgcggcgagacuaugcccaggg

SEQ ID NO: 13758 - RNA, 22 nt, Human adenovirus C
uccccgcggcgacggcgcaugg

SEQ ID NO: 13759 - RNA, 22 nt, Human adenovirus C
ugagauaccagaguugggagga

SEQ ID NO: 13760 - RNA, 22 nt, Human adenovirus C
gggaacuuaaugucguuucuca

SEQ ID NO: 13761 - RNA, 22 nt, Human adenovirus C
ccgcggaggcacaaacggcggg

SEQ ID NO: 13762 - RNA, 18 nt, Human adenovirus D
gacuggugcugcgcgcgc

SEQ ID NO: 13763 - RNA, 22 nt, Human adenovirus D
cgggguuguggacuuccgcgua

SEQ ID NO: 13764 - RNA, 22 nt, Human adenovirus D
agcgccagucccucauccuccg

SEQ ID NO: 13765 - RNA, 22 nt, Human adenovirus D
ugagaggagugugauaugcaca

SEQ ID NO: 13766 - RNA, 22 nt, Human adenovirus D
ccguggccucuucgcccgaccg

SEQ ID NO: 13767 - RNA, 22 nt, Human adenovirus E
cgccucagcaaccugcugggca

SEQ ID NO: 13768 - RNA, 18 nt, Human adenovirus F
cagcugcggagcauuugc

SEQ ID NO: 13769 - RNA, 22 nt, Human adenovirus F
aacguaugcuguuccgcccuuc

SEQ ID NO: 13770 - RNA, 21 nt, Human adenovirus F
aggacguugcgaggaaccgcc

SEQ ID NO: 13771 - RNA, 22 nt, Human adenovirus F
cgcccucuucugcaccugcacg

SEQ ID NO: 13772 - RNA, 22 nt, Human adenovirus F
agcugcgggugagcgaacggag

SEQ ID NO: 13773 - RNA, 22 nt, Human adenovirus F
gguguuuucuccaaacguuucg

SEQ ID NO: 13774 - RNA, 22 nt, Human adenovirus F
ggagggacguggagcgccugca

SEQ ID NO: 13775 - RNA, 22 nt, Human adenovirus F
caccuguaccgggucuuggaaa

SEQ ID NO: 13776 - RNA, 22 nt, Human adenovirus F
ugcagagccaccggaggcuggc

SEQ ID NO: 13777 - RNA, 22 nt, Human adenovirus F
gcgugcgcugcaguuggucuuc

SEQ ID NO: 13778 - RNA, 22 nt, Human adenovirus F
cacggccagcguaaagcgcacu

SEQ ID NO: 13779 - RNA, 22 nt, Human adenovirus F
uccaccgguccuagaccugacg

SEQ ID NO: 13780 - RNA, 22 nt, Human adenovirus F
aguaggcgguuuccucgcgguc

SEQ ID NO: 13781 - RNA, 22 nt, Human adenovirus F
uuaauauccuucagagcauugu

SEQ ID NO: 13782 - RNA, 22 nt, Human adenovirus F
uuuaaacgaccgcgacaggugg

SEQ ID NO: 13783 - RNA, 22 nt, Human adenovirus F
uccuccagcgugcgcugcaguu

SEQ ID NO: 13784 - RNA, 22 nt, Human astrovirus
acagguuugacaucauagacac

SEQ ID NO: 13785 - RNA, 20 nt, Human coronavirus 229E
aucuucaaguugaaucugca

SEQ ID NO: 13786 - RNA, 22 nt, Human coronavirus OC43 (HCoV-OC43)
aagaccauaagccacaauauuc

SEQ ID NO: 13787 - RNA, 22 nt, Human coronavirus OC43 (HCoV-OC43)
aucuacuugguacugcuaagaa

SEQ ID NO: 13788 - RNA, 22 nt, Human coronavirus OC43 (HCoV-OC43)
uacuuuuaauuuccuuaccaac

SEQ ID NO: 13789 - RNA, 19 nt, Human coronavirus OC43 (HCoV-OC43)
aauacaaaguauuaugaug

SEQ ID NO: 13790 - RNA, 22 nt, Human herpesvirus 1
uggggaccacgcccccaacacg

SEQ ID NO: 13791 - RNA, 22 nt, Human herpesvirus 1
cacccggagguuccggaggcgc

SEQ ID NO: 13792 - RNA, 22 nt, Human herpesvirus 1
ggggcgagcugugcccgcguga

SEQ ID NO: 13793 - RNA, 22 nt, Human herpesvirus 1
ccacgggccgcagcggcaccgu

SEQ ID NO: 13794 - RNA, 22 nt, Human herpesvirus 1
ggacggccuggacguugcgagc

SEQ ID NO: 13795 - RNA, 22 nt, Human herpesvirus 1
cccgcgcgucgacgggacccag

SEQ ID NO: 13796 - RNA, 22 nt, Human herpesvirus 1
cagcggccggccggcgcuuagg

SEQ ID NO: 13797 - RNA, 22 nt, Human herpesvirus 1
gcuggccgagggcuucgacggc

SEQ ID NO: 13798 - RNA, 23 nt, Human herpesvirus 1
cggccggccgccauggcguagcc

SEQ ID NO: 13799 - RNA, 22 nt, Human herpesvirus 1
guacucuggguucccuagguuc

SEQ ID NO: 13800 - RNA, 22 nt, Human herpesvirus 1
cggggugaaugagcugggcggc

SEQ ID NO: 13801 - RNA, 22 nt, Human herpesvirus 1
acccaggcggcgaacgggggcc

SEQ ID NO: 13802 - RNA, 22 nt, Human herpesvirus 1
cgacccgacgcgggaccgccag

SEQ ID NO: 13803 - RNA, 22 nt, Human herpesvirus 1
ccgccgcuugaucauuaucacc

SEQ ID NO: 13804 - RNA, 23 nt, Human herpesvirus 1
gcggucccgcgucgggucgugga

SEQ ID NO: 13805 - RNA, 22 nt, Human herpesvirus 1
gggcguggccgcuauuauaaaa

SEQ ID NO: 13806 - RNA, 22 nt, Human herpesvirus 1
cgaacgcacaacggcgcugcuc

SEQ ID NO: 13807 - RNA, 22 nt, Human herpesvirus 1
uccggacucaaccgccgaaccc

SEQ ID NO: 13808 - RNA, 22 nt, Human herpesvirus 1
gguccggagaucaugcgcgggu

SEQ ID NO: 13809 - RNA, 22 nt, Human herpesvirus 1
gcgcccgaggccucgaaccggc

SEQ ID NO: 13810 - RNA, 17 nt, Human herpesvirus 1
cggccggccgccauggc

SEQ ID NO: 13811 - RNA, 22 nt, Human herpesvirus 1
ccggaucgagguaccgucggug

SEQ ID NO: 13812 - RNA, 23 nt, Human herpesvirus 1
cgguccauggcgucgcgggcguc

SEQ ID NO: 13813 - RNA, 22 nt, Human herpesvirus 1
gcccggcucgcgccgugcugac

SEQ ID NO: 13814 - RNA, 22 nt, Human herpesvirus 1
cguggccccacggucagucugg

SEQ ID NO: 13815 - RNA, 22 nt, Human herpesvirus 1
gucgcggcguccuggaucgacg

SEQ ID NO: 13816 - RNA, 22 nt, Human herpesvirus 1
ggcccccguucgccgccugggu

SEQ ID NO: 13817 - RNA, 22 nt, Human herpesvirus 1
gggcccggaacgggaggccaca

SEQ ID NO: 13818 - RNA, 22 nt, Human herpesvirus 1
uccccugugguguuuuugguua

SEQ ID NO: 13819 - RNA, 22 nt, Human herpesvirus 1
ggcagggcguuguucuggucaa

SEQ ID NO: 13820 - RNA, 22 nt, Human herpesvirus 1
cuccccugcggcguugcgacau

SEQ ID NO: 13821 - RNA, 22 nt, Human herpesvirus 1
ucucgucgacaaacagggggaa

SEQ ID NO: 13822 - RNA, 22 nt, Human herpesvirus 1
uggccgucgagugccuggccgc

SEQ ID NO: 13823 - RNA, 23 nt, Human herpesvirus 1
ggccagcgccgaggacagcagcg

SEQ ID NO: 13824 - RNA, 22 nt, Human herpesvirus 1
ccggagagcggcuuggugcgga

SEQ ID NO: 13825 - RNA, 22 nt, Human herpesvirus 1
cgccggggcugcccggccguga

SEQ ID NO: 13826 - RNA, 22 nt, Human herpesvirus 1
gucccgccgaacgcauacaugc

SEQ ID NO: 13827 - RNA, 22 nt, Human herpesvirus 1
aggccccuaggucgcgacggcu

SEQ ID NO: 13828 - RNA, 22 nt, Human herpesvirus 1
uguggccucaccugaccaaccu

SEQ ID NO: 13829 - RNA, 22 nt, Human herpesvirus 1
cucauggccacggcggccgccg

SEQ ID NO: 13830 - RNA, 22 nt, Human herpesvirus 1
cgaucucgaccgccuggcggaa

SEQ ID NO: 13831 - RNA, 18 nt, Human herpesvirus 1
gccgucgccaucgccacg

SEQ ID NO: 13832 - RNA, 22 nt, Human herpesvirus 1
guauuggucccaauggggucuc

SEQ ID NO: 13833 - RNA, 22 nt, Human herpesvirus 1
ccacaacauggagcauacgcuc

SEQ ID NO: 13834 - RNA, 19 nt, Human herpesvirus 1
gcucggcuugcgccugccc

SEQ ID NO: 13835 - RNA, 22 nt, Human herpesvirus 1
accccaggcgugccgggggaac

SEQ ID NO: 13836 - RNA, 23 nt, Human herpesvirus 1
uggccgucaggagcucggcgcag

SEQ ID NO: 13837 - RNA, 20 nt, Human herpesvirus 1
ggcuggcuucgaaggccgug

SEQ ID NO: 13838 - RNA, 22 nt, Human herpesvirus 1
ggcgcgacacgaacaccgggcg

SEQ ID NO: 13839 - RNA, 20 nt, Human herpesvirus 1
ugcgucgcccgcgucuggac

SEQ ID NO: 13840 - RNA, 22 nt, Human herpesvirus 1
gcggucccgcgucgggucgugg

SEQ ID NO: 13841 - RNA, 22 nt, Human herpesvirus 1
cgcccgcggagccaucggcguc

SEQ ID NO: 13842 - RNA, 22 nt, Human herpesvirus 1
acgcccucccggugcagcugca

SEQ ID NO: 13843 - RNA, 22 nt, Human herpesvirus 1
gcaggccgugugcaggcccugc

SEQ ID NO: 13844 - RNA, 22 nt, Human herpesvirus 1
agugcucgcacuucgcccuaau

SEQ ID NO: 13845 - RNA, 22 nt, Human herpesvirus 1
gcgugcaggaggcggacggccc

SEQ ID NO: 13846 - RNA, 22 nt, Human herpesvirus 1
gggcccccgcuuccggaugcga

SEQ ID NO: 13847 - RNA, 22 nt, Human herpesvirus 1
ggccggggcccgcgcgcugaug

SEQ ID NO: 13848 - RNA, 17 nt, Human herpesvirus 1
gcggcggccgccguggc

SEQ ID NO: 13849 - RNA, 22 nt, Human herpesvirus 1
gcgcagacugucgacggccccc

SEQ ID NO: 13850 - RNA, 22 nt, Human herpesvirus 1
gaaggaggaggccgucccgccg

SEQ ID NO: 13851 - RNA, 22 nt, Human herpesvirus 1
gccgaccgaguccgcgguccac

SEQ ID NO: 13852 - RNA, 22 nt, Human herpesvirus 1
uguccgucggcgccugggaucg

SEQ ID NO: 13853 - RNA, 22 nt, Human herpesvirus 1
agaugggcugcgcugggcgcca

SEQ ID NO: 13854 - RNA, 21 nt, Human herpesvirus 1
gcgacaccuucccgugcaugc

SEQ ID NO: 13855 - RNA, 22 nt, Human herpesvirus 1
gguguuuacgaacgaguuugac

SEQ ID NO: 13856 - RNA, 22 nt, Human herpesvirus 1
auaauuuuauuggugggucguu

SEQ ID NO: 13857 - RNA, 22 nt, Human herpesvirus 1
uggaggccggauggacgaucuc

SEQ ID NO: 13858 - RNA, 19 nt, Human herpesvirus 1
gcacggccgacgccgcggu

SEQ ID NO: 13859 - RNA, 22 nt, Human herpesvirus 1
gucgcucgguauucgaggccac

SEQ ID NO: 13860 - RNA, 22 nt, Human herpesvirus 1
cguccgaggccgccaaggcgcg

SEQ ID NO: 13861 - RNA, 22 nt, Human herpesvirus 1
gggccuaccguggacuccauuu

SEQ ID NO: 13862 - RNA, 22 nt, Human herpesvirus 1
gggagugagggucgcgucgucu

SEQ ID NO: 13863 - RNA, 22 nt, Human herpesvirus 1
cgcagaacgcccucgagucgcc

SEQ ID NO: 13864 - RNA, 22 nt, Human herpesvirus 1
gcccacggcgucgcccugaaca

SEQ ID NO: 13865 - RNA, 23 nt, Human herpesvirus 1
guggaccugggaccgcgccgccc

SEQ ID NO: 13866 - RNA, 22 nt, Human herpesvirus 1
caucaacaggaggucagugucc

SEQ ID NO: 13867 - RNA, 22 nt, Human herpesvirus 1
cggacgucuucggaggccccgc

SEQ ID NO: 13868 - RNA, 22 nt, Human herpesvirus 1
gcgcgugguccccggggacgug

SEQ ID NO: 13869 - RNA, 22 nt, Human herpesvirus 1
ggucccgacgccaacccaggcc

SEQ ID NO: 13870 - RNA, 22 nt, Human herpesvirus 1
acgcgcgauagagucgacgacc

SEQ ID NO: 13871 - RNA, 22 nt, Human herpesvirus 1
acgccgccaucgcgcccuuucg

SEQ ID NO: 13872 - RNA, 22 nt, Human herpesvirus 1
ggcggacguggugccucagcgu

SEQ ID NO: 13873 - RNA, 22 nt, Human herpesvirus 1
ggucgucggcgggcugacgauc

SEQ ID NO: 13874 - RNA, 22 nt, Human herpesvirus 1
gugccgggcgcgugcgacggug

SEQ ID NO: 13875 - RNA, 22 nt, Human herpesvirus 1
cuuugguugcagaccccuuucu

SEQ ID NO: 13876 - RNA, 22 nt, Human herpesvirus 1
aaugcgcgcgauagagucgacg

SEQ ID NO: 13877 - RNA, 22 nt, Human herpesvirus 1
ccucgagacggccgccagcgcu

SEQ ID NO: 13878 - RNA, 22 nt, Human herpesvirus 1
uggguuuggcgcgcguaugcgu

SEQ ID NO: 13879 - RNA, 22 nt, Human herpesvirus 1
ccuuggccgccccggcugcagg

SEQ ID NO: 13880 - RNA, 22 nt, Human herpesvirus 1
ggguggcagcagcgccgggucu

SEQ ID NO: 13881 - RNA, 22 nt, Human herpesvirus 1
uggcgcacccggacguggggcg

SEQ ID NO: 13882 - RNA, 22 nt, Human herpesvirus 1
gacgucgacucuaucgcgcgca

SEQ ID NO: 13883 - RNA, 20 nt, Human herpesvirus 1
ugugucgcagggcggcccgc

SEQ ID NO: 13884 - RNA, 22 nt, Human herpesvirus 1
guucccccggcacgccuggggu

SEQ ID NO: 13885 - RNA, 22 nt, Human herpesvirus 1
ggggggccuccgacggugcguu

SEQ ID NO: 13886 - RNA, 22 nt, Human herpesvirus 1
acgggcgcuuuggcacccaguc

SEQ ID NO: 13887 - RNA, 22 nt, Human herpesvirus 1
ggggggugcucugauagucucg

SEQ ID NO: 13888 - RNA, 23 nt, Human herpesvirus 1
cggggugaaugagcugggcggcc

SEQ ID NO: 13889 - RNA, 22 nt, Human herpesvirus 1
ccgcgugggccccgcuggcguu

SEQ ID NO: 13890 - RNA, 22 nt, Human herpesvirus 1
uccgcggaagacccaggccgcc

SEQ ID NO: 13891 - RNA, 22 nt, Human herpesvirus 1
uguugggggcggcgugcgugac

SEQ ID NO: 13892 - RNA, 22 nt, Human herpesvirus 1
agcgcgcucgucugacguuugg

SEQ ID NO: 13893 - RNA, 22 nt, Human herpesvirus 1
gacccggacgccgaucccgacu

SEQ ID NO: 13894 - RNA, 22 nt, Human herpesvirus 1
uguaggcgaugcgggucccccg

SEQ ID NO: 13895 - RNA, 22 nt, Human herpesvirus 1
cgcccccucccuguuugucgcc

SEQ ID NO: 13896 - RNA, 22 nt, Human herpesvirus 1
gagggcgagcggcuccugggca

SEQ ID NO: 13897 - RNA, 22 nt, Human herpesvirus 1
ugcgcaggugcaugccccaggu

SEQ ID NO: 13898 - RNA, 23 nt, Human herpesvirus 1
cgucgacucuaucgcgcgugccg

SEQ ID NO: 13899 - RNA, 22 nt, Human herpesvirus 1
gccauggcggccggccgcuucg

SEQ ID NO: 13900 - RNA, 18 nt, Human herpesvirus 1
gacaacaacgcccauguu

SEQ ID NO: 13901 - RNA, 22 nt, Human herpesvirus 1
cggguguuuccucauggccccu

SEQ ID NO: 13902 - RNA, 22 nt, Human herpesvirus 1
ccggccuggccgcccugugucu

SEQ ID NO: 13903 - RNA, 22 nt, Human herpesvirus 1
agcguucgcacuucgucccaau

SEQ ID NO: 13904 - RNA, 22 nt, Human herpesvirus 1
cgucccccgacgaccucuugca

SEQ ID NO: 13905 - RNA, 22 nt, Human herpesvirus 1
gagugccagcccugggaccgaa

SEQ ID NO: 13906 - RNA, 22 nt, Human herpesvirus 1
ccaggugccggccgccgugaaa

SEQ ID NO: 13907 - RNA, 22 nt, Human herpesvirus 1
uggucccgacgccaacccaggc

SEQ ID NO: 13908 - RNA, 22 nt, Human herpesvirus 1
ucgucgucagcaccgucaucca

SEQ ID NO: 13909 - RNA, 22 nt, Human herpesvirus 1
ggccgucguagauggugcgggu

SEQ ID NO: 13910 - RNA, 22 nt, Human herpesvirus 1
ggucggcgucggugauccccaa

SEQ ID NO: 13911 - RNA, 22 nt, Human herpesvirus 1
ucgucgagcguaccgacgggcg

SEQ ID NO: 13912 - RNA, 22 nt, Human herpesvirus 1
ugccggacacccaggggcgauu

SEQ ID NO: 13913 - RNA, 22 nt, Human herpesvirus 1
gggacgcgaguacccacguuaa

SEQ ID NO: 13914 - RNA, 22 nt, Human herpesvirus 1
cgugacgggcggggcgucucac

SEQ ID NO: 13915 - RNA, 22 nt, Human herpesvirus 1
ccccagcgugcaggcugcggcc

SEQ ID NO: 13916 - RNA, 22 nt, Human herpesvirus 1
guacgcgaccguguugguguga

SEQ ID NO: 13917 - RNA, 22 nt, Human herpesvirus 1
ccggcgcgccggacuucugcga

SEQ ID NO: 13918 - RNA, 22 nt, Human herpesvirus 2
gccgucagcgggggagcccugg

SEQ ID NO: 13919 - RNA, 22 nt, Human herpesvirus 2
gcggccgcgacaugucccacag

SEQ ID NO: 13920 - RNA, 22 nt, Human herpesvirus 2
guccucgcccggcagcggcgag

SEQ ID NO: 13921 - RNA, 22 nt, Human herpesvirus 2
caccucggucuccuccuccgag

SEQ ID NO: 13922 - RNA, 22 nt, Human herpesvirus 2
ggucgcgccugcccggcccaga

SEQ ID NO: 13923 - RNA, 22 nt, Human herpesvirus 2
ucgaccccgccguucgggcggu

SEQ ID NO: 13924 - RNA, 19 nt, Human herpesvirus 2
ggccuccgccucgacccgc

SEQ ID NO: 13925 - RNA, 22 nt, Human herpesvirus 2
aaggccgugguguugcggagcg

SEQ ID NO: 13926 - RNA, 22 nt, Human herpesvirus 2
gaggauggaagggcagaagaug

SEQ ID NO: 13927 - RNA, 22 nt, Human herpesvirus 2
gcagggcguuucguuggucuag

SEQ ID NO: 13928 - RNA, 22 nt, Human herpesvirus 2
cacgagcucgcggcaccccggc

SEQ ID NO: 13929 - RNA, 22 nt, Human herpesvirus 2
ggcgcccggggacguggcgcug

SEQ ID NO: 13930 - RNA, 22 nt, Human herpesvirus 2
cugcgcggcggagaccgggacg

SEQ ID NO: 13931 - RNA, 22 nt, Human herpesvirus 2
gucccggucgccgccgcaccag

SEQ ID NO: 13932 - RNA, 22 nt, Human herpesvirus 2
gcuggcagcgguggccguggau

SEQ ID NO: 13933 - RNA, 22 nt, Human herpesvirus 2
gcccgguucgaggccucgggcg

SEQ ID NO: 13934 - RNA, 22 nt, Human herpesvirus 2
gcagaccgucacgcgaauggug

SEQ ID NO: 13935 - RNA, 22 nt, Human herpesvirus 2
gccuccagggcgugggcgcgcu

SEQ ID NO: 13936 - RNA, 22 nt, Human herpesvirus 2
cgcccgugugggcgcccgagcu

SEQ ID NO: 13937 - RNA, 22 nt, Human herpesvirus 2
cguucauggcccggccggcggu

SEQ ID NO: 13938 - RNA, 22 nt, Human herpesvirus 2
aaaguccgggaggggccgcagg

SEQ ID NO: 13939 - RNA, 22 nt, Human herpesvirus 2
uggccccgaacacaaccggcuc

SEQ ID NO: 13940 - RNA, 22 nt, Human herpesvirus 2
cccugggcucucggggaacccg

SEQ ID NO: 13941 - RNA, 22 nt, Human herpesvirus 2
ugccgagugaacucucccgccc

SEQ ID NO: 13942 - RNA, 22 nt, Human herpesvirus 2
ugggcgucgacgaggcgucggc

SEQ ID NO: 13943 - RNA, 22 nt, Human herpesvirus 2
cccgcggcgucgcgacagacca

SEQ ID NO: 13944 - RNA, 16 nt, Human herpesvirus 2
ccaucuccgugauggc

SEQ ID NO: 13945 - RNA, 22 nt, Human herpesvirus 2
cgcccggaggacggccguggcg

SEQ ID NO: 13946 - RNA, 22 nt, Human herpesvirus 2
cgccgcugccgggcgaggaccu

SEQ ID NO: 13947 - RNA, 22 nt, Human herpesvirus 2
gcggaccuggugcccggacguc

SEQ ID NO: 13948 - RNA, 23 nt, Human herpesvirus 2
ccgggcgugcguggccgccaggc

SEQ ID NO: 13949 - RNA, 22 nt, Human herpesvirus 2
ugggccgggcaggcgcgaccga

SEQ ID NO: 13950 - RNA, 22 nt, Human herpesvirus 2
cagggcguggaggcagucgcgc

SEQ ID NO: 13951 - RNA, 22 nt, Human herpesvirus 2
cccggcgcgccggacuucugcg

SEQ ID NO: 13952 - RNA, 22 nt, Human herpesvirus 2
gugggccgugaugcgcgggcgg

SEQ ID NO: 13953 - RNA, 22 nt, Human herpesvirus 2
cgcgcacguccuccgggucggg

SEQ ID NO: 13954 - RNA, 22 nt, Human herpesvirus 2
cacggccgacguccccagcgug

SEQ ID NO: 13955 - RNA, 17 nt, Human herpesvirus 2
acgcggugucggcggug

SEQ ID NO: 13956 - RNA, 22 nt, Human herpesvirus 2
ccagggcgccaugcgcccgcac

SEQ ID NO: 13957 - RNA, 22 nt, Human herpesvirus 2
gcgggcgagggcgucuaaggcc

SEQ ID NO: 13958 - RNA, 22 nt, Human herpesvirus 2
gagaggccguggagcuugccag

SEQ ID NO: 13959 - RNA, 22 nt, Human herpesvirus 2
cacgaagccccggcggguuugu

SEQ ID NO: 13960 - RNA, 22 nt, Human herpesvirus 2
gucggcgcggggguggccaaac

SEQ ID NO: 13961 - RNA, 23 nt, Human herpesvirus 2
gccacgugcgugccgggcacgag

SEQ ID NO: 13962 - RNA, 22 nt, Human herpesvirus 2
agcgcgccuccggagcgagcuc

SEQ ID NO: 13963 - RNA, 22 nt, Human herpesvirus 2
guucgcacuuuguccuaauaau

SEQ ID NO: 13964 - RNA, 22 nt, Human herpesvirus 2
ggggcgcgucccuucagccacu

SEQ ID NO: 13965 - RNA, 22 nt, Human herpesvirus 2
gugcggcggcgaccgggacgcc

SEQ ID NO: 13966 - RNA, 22 nt, Human herpesvirus 2
agaggcuguccgccgggcguga

SEQ ID NO: 13967 - RNA, 22 nt, Human herpesvirus 2
ggucgcgcaugacccaggcuca

SEQ ID NO: 13968 - RNA, 22 nt, Human herpesvirus 2
ggacgccggcacccccgaagcc

SEQ ID NO: 13969 - RNA, 22 nt, Human herpesvirus 2
cccgcgccgggcgcuaaugaga

SEQ ID NO: 13970 - RNA, 22 nt, Human herpesvirus 2
cgggggcugcagucggcgcuga

SEQ ID NO: 13971 - RNA, 22 nt, Human herpesvirus 2
cccgccccguacguugugcacg

SEQ ID NO: 13972 - RNA, 18 nt, Human herpesvirus 2
cccgcgaugcuaaugaga

SEQ ID NO: 13973 - RNA, 22 nt, Human herpesvirus 2
ugcccgacccggaggacgugcg

SEQ ID NO: 13974 - RNA, 22 nt, Human herpesvirus 2
ccucggagguggagucgcggug

SEQ ID NO: 13975 - RNA, 22 nt, Human herpesvirus 2
ggcuccaggccgccacgcuggg

SEQ ID NO: 13976 - RNA, 20 nt, Human herpesvirus 2
aacgcccugggguugccgug

SEQ ID NO: 13977 - RNA, 22 nt, Human herpesvirus 2
gguccccggcacgagggugagc

SEQ ID NO: 13978 - RNA, 22 nt, Human herpesvirus 2
agaccugguuuuuggugccccu

SEQ ID NO: 13979 - RNA, 22 nt, Human herpesvirus 2
gccccggcgcgucguccgucac

SEQ ID NO: 13980 - RNA, 22 nt, Human herpesvirus 2
cggccaucugcaucgugggccc

SEQ ID NO: 13981 - RNA, 22 nt, Human herpesvirus 2
gccugcgugggugccaucgcuc

SEQ ID NO: 13982 - RNA, 22 nt, Human herpesvirus 2
ucguacccgggcaccacguggc

SEQ ID NO: 13983 - RNA, 22 nt, Human herpesvirus 2
cucggggcuccgccagggcgcc

SEQ ID NO: 13984 - RNA, 22 nt, Human herpesvirus 2
uugacgagcuucgcgguacuac

SEQ ID NO: 13985 - RNA, 22 nt, Human herpesvirus 2
gcucgguggccgcgcgguacgu

SEQ ID NO: 13986 - RNA, 22 nt, Human herpesvirus 2
ccgacgccgguggucccggcga

SEQ ID NO: 13987 - RNA, 17 nt, Human herpesvirus 2
gacgccgccauggccgc

SEQ ID NO: 13988 - RNA, 22 nt, Human herpesvirus 2
uggcggcguagaugcgucucuc

SEQ ID NO: 13989 - RNA, 22 nt, Human herpesvirus 2
ugggagucugcgguugggagcg

SEQ ID NO: 13990 - RNA, 19 nt, Human herpesvirus 2
ggcggggagccgacgaucc

SEQ ID NO: 13991 - RNA, 22 nt, Human herpesvirus 3
uucuaggauucgaacgacgaca

SEQ ID NO: 13992 - RNA, 22 nt, Human herpesvirus 3
uuuaucaugccaaugggagugu

SEQ ID NO: 13993 - RNA, 22 nt, Human herpesvirus 3
aucgggguucuggaucgcggca

SEQ ID NO: 13994 - RNA, 22 nt, Human herpesvirus 3
gccguguuacugguaauggcgg

SEQ ID NO: 13995 - RNA, 22 nt, Human herpesvirus 3
gguugugucggucucuccaagc

SEQ ID NO: 13996 - RNA, 15 nt, Human herpesvirus 3
agagcccacacaauc

SEQ ID NO: 13997 - RNA, 22 nt, Human herpesvirus 3
uugaagacagggauacggaggg

SEQ ID NO: 13998 - RNA, 22 nt, Human herpesvirus 3
ggauacuuggcucuguauuaaa

SEQ ID NO: 13999 - RNA, 22 nt, Human herpesvirus 3
gcauguugcucgaagagcacau

SEQ ID NO: 14000 - RNA, 22 nt, Human herpesvirus 3
guguuguuguuuccaaacggaa

SEQ ID NO: 14001 - RNA, 22 nt, Human herpesvirus 3
uccccggacgguccaaaccgca

SEQ ID NO: 14002 - RNA, 22 nt, Human herpesvirus 3
cuaauuuaauagggcuaugucc

SEQ ID NO: 14003 - RNA, 23 nt, Human herpesvirus 4 (Epstein-Barr virus)
aaugauggugggggaaccaccgg

SEQ ID NO: 14004 - RNA, 22 nt, Human herpesvirus 4 (Epstein-Barr virus)
ccuggguagucacguucagccg

SEQ ID NO: 14005 - RNA, 22 nt, Human herpesvirus 4 (Epstein-Barr virus)
ucagugguuuuguuuccuugau

SEQ ID NO: 14006 - RNA, 22 nt, Human herpesvirus 4 (Epstein-Barr virus)
cguagcaccacguggcugccga

SEQ ID NO: 14007 - RNA, 22 nt, Human herpesvirus 4 (Epstein-Barr virus)
acgaagcuguccgccucgagcg

SEQ ID NO: 14008 - RNA, 22 nt, Human herpesvirus 4 (Epstein-Barr virus)
cagccucccuucaucuccagca

SEQ ID NO: 14009 - RNA, 22 nt, Human herpesvirus 4 (Epstein-Barr virus)
ccagcaagcuccgcuuccuaga

SEQ ID NO: 14010 - RNA, 22 nt, Human herpesvirus 4 (Epstein-Barr virus)
uucacgguggcaugcucucguc

SEQ ID NO: 14011 - RNA, 22 nt, Human herpesvirus 4 (Epstein-Barr virus)
aaggagcgauuuggagaaaaua

SEQ ID NO: 14012 - RNA, 22 nt, Human herpesvirus 4 (Epstein-Barr virus)
gccgccuccagauggccgaggc

SEQ ID NO: 14013 - RNA, 22 nt, Human herpesvirus 4 (Epstein-Barr virus)
cauccccugcuugggacccgac

SEQ ID NO: 14014 - RNA, 22 nt, Human herpesvirus 4 (Epstein-Barr virus)
gggauccgccagggucugcagg

SEQ ID NO: 14015 - RNA, 22 nt, Human herpesvirus 4 (Epstein-Barr virus)
gaguagagcuggguagaccugu

SEQ ID NO: 14016 - RNA, 22 nt, Human herpesvirus 4 (Epstein-Barr virus)
cuguacauccagcugcuguaug

SEQ ID NO: 14017 - RNA, 17 nt, Human herpesvirus 4 (Epstein-Barr virus)
ggccacaggggaggugg

SEQ ID NO: 14018 - RNA, 22 nt, Human herpesvirus 4 (Epstein-Barr virus)
gcuguugacaugagcauggaag

SEQ ID NO: 14019 - RNA, 22 nt, Human herpesvirus 4 (Epstein-Barr virus)
ucuggagaacguagcgagcgua

SEQ ID NO: 14020 - RNA, 22 nt, Human herpesvirus 4 (Epstein-Barr virus)
ggagggaaacaugaccaccuga

SEQ ID NO: 14021 - RNA, 22 nt, Human herpesvirus 4 (Epstein-Barr virus)
gcggcuggagagaaggaugccc

SEQ ID NO: 14022 - RNA, 23 nt, Human herpesvirus 4 (Epstein-Barr virus)
gggccuccaucucugccgccauc

SEQ ID NO: 14023 - RNA, 22 nt, Human herpesvirus 4 (Epstein-Barr virus)
ugggggugcgccgugaaggcgg

SEQ ID NO: 14024 - RNA, 22 nt, Human herpesvirus 4 (Epstein-Barr virus)
cuggcguggaaguuaaugucca

SEQ ID NO: 14025 - RNA, 22 nt, Human herpesvirus 4 (Epstein-Barr virus)
ccaccuguugaggugaccgugg

SEQ ID NO: 14026 - RNA, 22 nt, Human herpesvirus 4 (Epstein-Barr virus)
cuggccuugagggcgcugagga

SEQ ID NO: 14027 - RNA, 22 nt, Human herpesvirus 4 (Epstein-Barr virus)
uggaggggccguugguaccaga

SEQ ID NO: 14028 - RNA, 22 nt, Human herpesvirus 4 (Epstein-Barr virus)
augaguccggugaaggugacgu

SEQ ID NO: 14029 - RNA, 22 nt, Human herpesvirus 4 (Epstein-Barr virus)
gguggagugggacacaguuaga

SEQ ID NO: 14030 - RNA, 22 nt, Human herpesvirus 4 (Epstein-Barr virus)
uccaggggcgcgacugaccugg

SEQ ID NO: 14031 - RNA, 22 nt, Human herpesvirus 4 (Epstein-Barr virus)
accguuccucauuuugugugcc

SEQ ID NO: 14032 - RNA, 22 nt, Human herpesvirus 4 (Epstein-Barr virus)
ugaccgcguugaacaugcugua

SEQ ID NO: 14033 - RNA, 22 nt, Human herpesvirus 4 (Epstein-Barr virus)
caaggccaucccucgcagcacc

SEQ ID NO: 14034 - RNA, 22 nt, Human herpesvirus 4 (Epstein-Barr virus)
caucagcucucuuuuccccggg

SEQ ID NO: 14035 - RNA, 22 nt, Human herpesvirus 4 (Epstein-Barr virus)
cccuggagcugaaguugaugga

SEQ ID NO: 14036 - RNA, 22 nt, Human herpesvirus 4 (Epstein-Barr virus)
agauuauccucgcuagucugug

SEQ ID NO: 14037 - RNA, 22 nt, Human herpesvirus 4 (Epstein-Barr virus)
agcugcugcuugucgaggaugg

SEQ ID NO: 14038 - RNA, 22 nt, Human herpesvirus 4 (Epstein-Barr virus)
gcauggccuccguguuugccug

SEQ ID NO: 14039 - RNA, 22 nt, Human herpesvirus 4 (Epstein-Barr virus)
agcacaucacguaggcaccagg

SEQ ID NO: 14040 - RNA, 22 nt, Human herpesvirus 4 (Epstein-Barr virus)
aacaggaggcgcagccugucau

SEQ ID NO: 14041 - RNA, 22 nt, Human herpesvirus 4 (Epstein-Barr virus)
uccagcggggccgcaguuugcu

SEQ ID NO: 14042 - RNA, 22 nt, Human herpesvirus 4 (Epstein-Barr virus)
ccugccgcggggccuccugccg

SEQ ID NO: 14043 - RNA, 22 nt, Human herpesvirus 4 (Epstein-Barr virus)
ggugccccaggaggccuuugug

SEQ ID NO: 14044 - RNA, 22 nt, Human herpesvirus 4 (Epstein-Barr virus)
ccgcacggacccggcuggcucu

SEQ ID NO: 14045 - RNA, 22 nt, Human herpesvirus 4 (Epstein-Barr virus)
augcgcaagggucacauugggg

SEQ ID NO: 14046 - RNA, 22 nt, Human herpesvirus 4 (Epstein-Barr virus)
cauagcaccgcuauccacuaug

SEQ ID NO: 14047 - RNA, 22 nt, Human herpesvirus 4 (Epstein-Barr virus)
gugacccggggcuccgggguga

SEQ ID NO: 14048 - RNA, 22 nt, Human herpesvirus 4 (Epstein-Barr virus)
gcguccacccuggccucccggc

SEQ ID NO: 14049 - RNA, 22 nt, Human herpesvirus 4 (Epstein-Barr virus)
gaggcccacgguggcggcagac

SEQ ID NO: 14050 - RNA, 22 nt, Human herpesvirus 4 (Epstein-Barr virus)
aucuuuugcggcagaaauugaa

SEQ ID NO: 14051 - RNA, 22 nt, Human herpesvirus 4 (Epstein-Barr virus)
cgcaccacuagucaccaggugu

SEQ ID NO: 14052 - RNA, 22 nt, Human herpesvirus 4 (Epstein-Barr virus)
gauggaggccaucucgugaugc

SEQ ID NO: 14053 - RNA, 22 nt, Human herpesvirus 4 (Epstein-Barr virus)
cauccggcggccaggguuugca

SEQ ID NO: 14054 - RNA, 22 nt, Human herpesvirus 4 (Epstein-Barr virus)
cgagacaguaaugucaaauguc

SEQ ID NO: 14055 - RNA, 22 nt, Human herpesvirus 4 (Epstein-Barr virus)
acacgccgcucguggaccacgc

SEQ ID NO: 14056 - RNA, 21 nt, Human herpesvirus 4 (Epstein-Barr virus)
ccucgcaggccgccagcagcu

SEQ ID NO: 14057 - RNA, 22 nt, Human herpesvirus 5
ccggcgagcugacgaguggcgg

SEQ ID NO: 14058 - RNA, 22 nt, Human herpesvirus 5
gacggcgucuucggucucgagc

SEQ ID NO: 14059 - RNA, 22 nt, Human herpesvirus 5
acuucuuucgcucccucgaccc

SEQ ID NO: 14060 - RNA, 22 nt, Human herpesvirus 5
ugacaagccugacgagagcguu

SEQ ID NO: 14061 - RNA, 22 nt, Human herpesvirus 5
uacgucggccaacaaccacggc

SEQ ID NO: 14062 - RNA, 22 nt, Human herpesvirus 5
agccgcgcaugacgcaggugag

SEQ ID NO: 14063 - RNA, 21 nt, Human herpesvirus 5
acgcacgucgccguccauguc

SEQ ID NO: 14064 - RNA, 22 nt, Human herpesvirus 5
gagcagccggagcccgcacacu

SEQ ID NO: 14065 - RNA, 22 nt, Human herpesvirus 5
uccgccguguuucucggcguac

SEQ ID NO: 14066 - RNA, 22 nt, Human herpesvirus 5
ggcacggaccgcaacgugcugc

SEQ ID NO: 14067 - RNA, 22 nt, Human herpesvirus 5
cuggacacguuguuaagcggcg

SEQ ID NO: 14068 - RNA, 22 nt, Human herpesvirus 5
uucuggucguuuugcugcucau

SEQ ID NO: 14069 - RNA, 22 nt, Human herpesvirus 5
acaccuccguuuugagcguguu

SEQ ID NO: 14070 - RNA, 22 nt, Human herpesvirus 5
caccaccgcagucggaggagga

SEQ ID NO: 14071 - RNA, 22 nt, Human herpesvirus 5
aguauacuaauaugaagcgucg

SEQ ID NO: 14072 - RNA, 22 nt, Human herpesvirus 5
agacgcagugguccgucggugu

SEQ ID NO: 14073 - RNA, 22 nt, Human herpesvirus 5
uaccgccgcgucgucucguauu

SEQ ID NO: 14074 - RNA, 22 nt, Human herpesvirus 5
gaggcgcggaccgugaguuaua

SEQ ID NO: 14075 - RNA, 22 nt, Human herpesvirus 5
acuuggaacgccgcggcgcaca

SEQ ID NO: 14076 - RNA, 22 nt, Human herpesvirus 5
agcagcgugugcaguucggcgu

SEQ ID NO: 14077 - RNA, 22 nt, Human herpesvirus 5
cgcacgauggccaugcgcguca

SEQ ID NO: 14078 - RNA, 22 nt, Human herpesvirus 5
ggcgcgcacagccuccugucga

SEQ ID NO: 14079 - RNA, 22 nt, Human herpesvirus 5
caacaccguaaagccguugcgc

SEQ ID NO: 14080 - RNA, 22 nt, Human herpesvirus 5
ugcgcuguuacacggaauccag

SEQ ID NO: 14081 - RNA, 22 nt, Human herpesvirus 5
cggacgugucaucucgcccgga

SEQ ID NO: 14082 - RNA, 22 nt, Human herpesvirus 5
ggagcggggcguccgaaggcga

SEQ ID NO: 14083 - RNA, 22 nt, Human herpesvirus 5
uacuaguggaauaguuaacggu

SEQ ID NO: 14084 - RNA, 22 nt, Human herpesvirus 5
cuggagaacgccggggcagcag

SEQ ID NO: 14085 - RNA, 22 nt, Human herpesvirus 5
cggcgguuucgccaccgcugac

SEQ ID NO: 14086 - RNA, 20 nt, Human herpesvirus 5
ugcgccagguaguaaagcac

SEQ ID NO: 14087 - RNA, 22 nt, Human herpesvirus 5
caccgcccauggguuccugcug

SEQ ID NO: 14088 - RNA, 22 nt, Human herpesvirus 5
cacggccagcgccuugucgcgg

SEQ ID NO: 14089 - RNA, 22 nt, Human herpesvirus 5
ucgcggcggcucccucucggcg

SEQ ID NO: 14090 - RNA, 22 nt, Human herpesvirus 5
ugucggagcugucggcgcuggg

SEQ ID NO: 14091 - RNA, 22 nt, Human herpesvirus 5
uuccuuuccuguuuuguacucg

SEQ ID NO: 14092 - RNA, 22 nt, Human herpesvirus 5
uuucucaucaaccugucgaugg

SEQ ID NO: 14093 - RNA, 22 nt, Human herpesvirus 5
acuuccccgucguacuggcggc

SEQ ID NO: 14094 - RNA, 22 nt, Human herpesvirus 5
cgcguaaccguuguccguuaua

SEQ ID NO: 14095 - RNA, 22 nt, Human herpesvirus 5
ccgacugugggaagcuguccac

SEQ ID NO: 14096 - RNA, 22 nt, Human herpesvirus 5
aaauaacgguacagagcgcgaa

SEQ ID NO: 14097 - RNA, 22 nt, Human herpesvirus 5
ucgccgcgauaacgacagguca

SEQ ID NO: 14098 - RNA, 22 nt, Human herpesvirus 5
uagcuccggcauggugcugccg

SEQ ID NO: 14099 - RNA, 22 nt, Human herpesvirus 5
ugcccgucuacgcgguccacgg

SEQ ID NO: 14100 - RNA, 22 nt, Human herpesvirus 5
ccaacgcaacagaccuaggcac

SEQ ID NO: 14101 - RNA, 22 nt, Human herpesvirus 5
ggugcacguugaugcuggggau

SEQ ID NO: 14102 - RNA, 22 nt, Human herpesvirus 5
cgcgcccacgguccgggcacaa

SEQ ID NO: 14103 - RNA, 22 nt, Human herpesvirus 5
agcgcgaggcgucggagcucgg

SEQ ID NO: 14104 - RNA, 22 nt, Human herpesvirus 5
guucccaggccgagaacgcgca

SEQ ID NO: 14105 - RNA, 22 nt, Human herpesvirus 5
gugacguagcaauuaucguauu

SEQ ID NO: 14106 - RNA, 22 nt, Human herpesvirus 5
gcgccuggacguugcacgcggc

SEQ ID NO: 14107 - RNA, 22 nt, Human herpesvirus 5
aucggcuuccaagacgaccuag

SEQ ID NO: 14108 - RNA, 22 nt, Human herpesvirus 5
cugcaggaaccaguugugcgga

SEQ ID NO: 14109 - RNA, 22 nt, Human herpesvirus 5
gacaacgugguccaguacgucc

SEQ ID NO: 14110 - RNA, 22 nt, Human herpesvirus 5
uugcgcguuaaguugcaauuuu

SEQ ID NO: 14111 - RNA, 22 nt, Human herpesvirus 5
gccgaggacgccgugggcggcg

SEQ ID NO: 14112 - RNA, 22 nt, Human herpesvirus 5
ucuaacuagccuucccgugaga

SEQ ID NO: 14113 - RNA, 22 nt, Human herpesvirus 5
gagccgcagauccgagagccuc

SEQ ID NO: 14114 - RNA, 22 nt, Human herpesvirus 5
cuguggcgggucgcgacgacga

SEQ ID NO: 14115 - RNA, 22 nt, Human herpesvirus 5
cauacguuuuugggaaaguugg

SEQ ID NO: 14116 - RNA, 22 nt, Human herpesvirus 5
guggccgcuaaauauggcgacg

SEQ ID NO: 14117 - RNA, 22 nt, Human herpesvirus 5
guuuuccgacuuagccuuuggu

SEQ ID NO: 14118 - RNA, 22 nt, Human herpesvirus 5
acgcuguuuccgaauaccggga

SEQ ID NO: 14119 - RNA, 22 nt, Human herpesvirus 5
gguuugcuuccuauauagugga

SEQ ID NO: 14120 - RNA, 22 nt, Human herpesvirus 5
ugcucacggccacgggcugcug

SEQ ID NO: 14121 - RNA, 22 nt, Human herpesvirus 5
accgcuauccacgcccauugau

SEQ ID NO: 14122 - RNA, 22 nt, Human herpesvirus 5
gggcgagucgcgggcaccgccu

SEQ ID NO: 14123 - RNA, 22 nt, Human herpesvirus 5
gugcucuuugucgacgacgugg

SEQ ID NO: 14124 - RNA, 22 nt, Human herpesvirus 5
uccgcguguaaugcacgcggug

SEQ ID NO: 14125 - RNA, 22 nt, Human herpesvirus 5
acgucgcgagaccugguguuug

SEQ ID NO: 14126 - RNA, 22 nt, Human herpesvirus 5
aggcgaguccgcggucgccgcc

SEQ ID NO: 14127 - RNA, 22 nt, Human herpesvirus 5
acggcgugauugagcaccugcg

SEQ ID NO: 14128 - RNA, 22 nt, Human herpesvirus 5
gugcaacagcccgugucgcgca

SEQ ID NO: 14129 - RNA, 22 nt, Human herpesvirus 5
agugacggugagauccaggcug

SEQ ID NO: 14130 - RNA, 22 nt, Human herpesvirus 5
uacguggcuauguuugccaguu

SEQ ID NO: 14131 - RNA, 19 nt, Human herpesvirus 5
cgcgagcggcggacuuggc

SEQ ID NO: 14132 - RNA, 23 nt, Human herpesvirus 5
cgccucgucugagccggggugcc

SEQ ID NO: 14133 - RNA, 22 nt, Human herpesvirus 5
cgacgaagaugcgucgaaucgc

SEQ ID NO: 14134 - RNA, 23 nt, Human herpesvirus 5
gcgguucgccgucaucguugucg

SEQ ID NO: 14135 - RNA, 22 nt, Human herpesvirus 5
aggcggacgagguagagguuug

SEQ ID NO: 14136 - RNA, 17 nt, Human herpesvirus 5
uuuggcuacgguggugu

SEQ ID NO: 14137 - RNA, 22 nt, Human herpesvirus 5
acgugguuuuugcuuccgagcu

SEQ ID NO: 14138 - RNA, 22 nt, Human herpesvirus 5
ucgcgcguacggacgaguggaa

SEQ ID NO: 14139 - RNA, 22 nt, Human herpesvirus 5
agcggucguuuuaaccgcaggu

SEQ ID NO: 14140 - RNA, 22 nt, Human herpesvirus 5
ugugcucggaccgugacggugg

SEQ ID NO: 14141 - RNA, 22 nt, Human herpesvirus 5
gggucccggcacgggccgagga

SEQ ID NO: 14142 - RNA, 22 nt, Human herpesvirus 5
cugcugugaaaacgggcacggu

SEQ ID NO: 14143 - RNA, 22 nt, Human herpesvirus 5
gaugagcagcuccaacagcgug

SEQ ID NO: 14144 - RNA, 22 nt, Human herpesvirus 5
ugcugauaacuguuguacugua

SEQ ID NO: 14145 - RNA, 22 nt, Human herpesvirus 5
cacgaacguguccucggugaag

SEQ ID NO: 14146 - RNA, 22 nt, Human herpesvirus 5
ccaccgauccgcacgaccgcga

SEQ ID NO: 14147 - RNA, 22 nt, Human herpesvirus 5
aacgacguggacuuuugguuac

SEQ ID NO: 14148 - RNA, 22 nt, Human herpesvirus 5
ggagaacuauuuucuuugucaa

SEQ ID NO: 14149 - RNA, 22 nt, Human herpesvirus 5
ccacggaaaacgguaguuuugu

SEQ ID NO: 14150 - RNA, 22 nt, Human herpesvirus 5
cgaggccgacagccuggagaug

SEQ ID NO: 14151 - RNA, 22 nt, Human herpesvirus 5
accagccguagccaaucccgau

SEQ ID NO: 14152 - RNA, 22 nt, Human herpesvirus 5
uguacucaagagagcgauuggu

SEQ ID NO: 14153 - RNA, 22 nt, Human herpesvirus 5
ggcgugcgcgaccccuagucgg

SEQ ID NO: 14154 - RNA, 22 nt, Human herpesvirus 5
ucggcgucagguaggcgcgcag

SEQ ID NO: 14155 - RNA, 22 nt, Human herpesvirus 5
cggagaauggccggcgcugcgc

SEQ ID NO: 14156 - RNA, 22 nt, Human herpesvirus 5
gcgacggucuuuuuugccuggg

SEQ ID NO: 14157 - RNA, 22 nt, Human herpesvirus 5
acgucugagcgccgcugacagu

SEQ ID NO: 14158 - RNA, 22 nt, Human herpesvirus 5
ccgcgugucuaaaccgcgugcu

SEQ ID NO: 14159 - RNA, 22 nt, Human herpesvirus 5
gagacgcacgacaguauacgug

SEQ ID NO: 14160 - RNA, 22 nt, Human herpesvirus 5
accucgucaaucuugacgcgac

SEQ ID NO: 14161 - RNA, 22 nt, Human herpesvirus 5
gcagcgagccgcguaacgucug

SEQ ID NO: 14162 - RNA, 22 nt, Human herpesvirus 5
gauaggugugacgaugucuuua

SEQ ID NO: 14163 - RNA, 22 nt, Human herpesvirus 5
agcggcgugaugauacggagcg

SEQ ID NO: 14164 - RNA, 22 nt, Human herpesvirus 5
gugaucuacgaacugguguagg

SEQ ID NO: 14165 - RNA, 22 nt, Human herpesvirus 5
cgggaagaggagggugguucau

SEQ ID NO: 14166 - RNA, 22 nt, Human herpesvirus 5
uuuuuccacugggcggccgcac

SEQ ID NO: 14167 - RNA, 22 nt, Human herpesvirus 5
cagggcgcuuuggcaaaaggcg

SEQ ID NO: 14168 - RNA, 22 nt, Human herpesvirus 5
aucuugagcggcagcgcguaca

SEQ ID NO: 14169 - RNA, 18 nt, Human herpesvirus 5
ucgacucguccgagaccc

SEQ ID NO: 14170 - RNA, 22 nt, Human herpesvirus 5
uuccaccgugguguaaccgcga

SEQ ID NO: 14171 - RNA, 22 nt, Human herpesvirus 5
gccgucugcguguccucgcugg

SEQ ID NO: 14172 - RNA, 22 nt, Human herpesvirus 5
ccccucuuucugcgucguggcu

SEQ ID NO: 14173 - RNA, 23 nt, Human herpesvirus 5
ucugcggaggaacagcaacggcg

SEQ ID NO: 14174 - RNA, 22 nt, Human herpesvirus 5
cuucagaucguggacguguuug

SEQ ID NO: 14175 - RNA, 22 nt, Human herpesvirus 5
aacgcuuucgucguguuuuuca

SEQ ID NO: 14176 - RNA, 22 nt, Human herpesvirus 5
cacgccguccuugacgacgcag

SEQ ID NO: 14177 - RNA, 22 nt, Human herpesvirus 5
aggccagaggcuaagccgaaac

SEQ ID NO: 14178 - RNA, 22 nt, Human herpesvirus 5
cagccgccgucgcuggugggca

SEQ ID NO: 14179 - RNA, 22 nt, Human herpesvirus 5
cacguuaaugcgcgagacggcg

SEQ ID NO: 14180 - RNA, 22 nt, Human herpesvirus 5
ucgccgucgaguacgugcugau

SEQ ID NO: 14181 - RNA, 22 nt, Human herpesvirus 5
ucuuuccagguguuuucaacgu

SEQ ID NO: 14182 - RNA, 22 nt, Human herpesvirus 5
aucaccaugguaauagcgauga

SEQ ID NO: 14183 - RNA, 22 nt, Human herpesvirus 5
cgcguugcgaacggugucguua

SEQ ID NO: 14184 - RNA, 22 nt, Human herpesvirus 5
aguggcaggcccggguucgcga

SEQ ID NO: 14185 - RNA, 22 nt, Human herpesvirus 5
ggaggcuuucgccacaccuauc

SEQ ID NO: 14186 - RNA, 22 nt, Human herpesvirus 5
uugaccagcagcuugcagcgcu

SEQ ID NO: 14187 - RNA, 22 nt, Human herpesvirus 5
ucucaccagaaugcuaguuugu

SEQ ID NO: 14188 - RNA, 22 nt, Human herpesvirus 5
ggucugcgcgacauuuuggguc

SEQ ID NO: 14189 - RNA, 22 nt, Human herpesvirus 5
gacguuugugcugcuggucaua

SEQ ID NO: 14190 - RNA, 22 nt, Human herpesvirus 5
cgagcugucggaauccucgucg

SEQ ID NO: 14191 - RNA, 22 nt, Human herpesvirus 5
gucacagagcgugcugacgugg

SEQ ID NO: 14192 - RNA, 22 nt, Human herpesvirus 5
caaaacugucagcggcgcucag

SEQ ID NO: 14193 - RNA, 22 nt, Human herpesvirus 5
gcgccggcacgaugcagcuggc

SEQ ID NO: 14194 - RNA, 22 nt, Human herpesvirus 5
ucuuuccaggugucuucaacga

SEQ ID NO: 14195 - RNA, 22 nt, Human herpesvirus 5
uccaaggaucggaaaguagcgu

SEQ ID NO: 14196 - RNA, 22 nt, Human herpesvirus 5
gucaacgguggcgacaccguac

SEQ ID NO: 14197 - RNA, 22 nt, Human herpesvirus 5
aaagcaaggcacguucauaaug

SEQ ID NO: 14198 - RNA, 22 nt, Human herpesvirus 5
gacguugaccguuguggggauu

SEQ ID NO: 14199 - RNA, 22 nt, Human herpesvirus 5
ugguuugggguggcauccaaac

SEQ ID NO: 14200 - RNA, 22 nt, Human herpesvirus 5
cgagcugcugaugugccgucgc

SEQ ID NO: 14201 - RNA, 23 nt, Human herpesvirus 5
gccggcaaaauguagguggcguu

SEQ ID NO: 14202 - RNA, 22 nt, Human herpesvirus 5
ccaagucagagcagcgucgguc

SEQ ID NO: 14203 - RNA, 23 nt, Human herpesvirus 5
cucgggcgccugugacaugaggc

SEQ ID NO: 14204 - RNA, 23 nt, Human herpesvirus 6
ucgaaaucgcggaugaauugcgg

SEQ ID NO: 14205 - RNA, 22 nt, Human herpesvirus 6
gaagaucacuuuguuucugaac

SEQ ID NO: 14206 - RNA, 16 nt, Human herpesvirus 6
ccuggcgauuuucgau

SEQ ID NO: 14207 - RNA, 21 nt, Human herpesvirus 6
aucgcaaaauugauacaaacg

SEQ ID NO: 14208 - RNA, 22 nt, Human herpesvirus 6
aguaaauauuuaucugcaugua

SEQ ID NO: 14209 - RNA, 22 nt, Human herpesvirus 6
uuuaaaucuaauauucaucggc

SEQ ID NO: 14210 - RNA, 21 nt, Human herpesvirus 6
auggugucguuuaauuucaca

SEQ ID NO: 14211 - RNA, 22 nt, Human herpesvirus 6
uaagcagccgcgaacucguuaa

SEQ ID NO: 14212 - RNA, 22 nt, Human herpesvirus 6
guacaaaugauuuaauuucgcu

SEQ ID NO: 14213 - RNA, 22 nt, Human herpesvirus 6
acguagaaaaucgucaauggug

SEQ ID NO: 14214 - RNA, 21 nt, Human herpesvirus 6
guuucgugucaguucuguggu

SEQ ID NO: 14215 - RNA, 22 nt, Human herpesvirus 6
gcaggaagagggaguccaacaa

SEQ ID NO: 14216 - RNA, 22 nt, Human herpesvirus 6
gccgcagaguugcaagaaaugu

SEQ ID NO: 14217 - RNA, 22 nt, Human herpesvirus 6
gauugauaaguuuccgacaugc

SEQ ID NO: 14218 - RNA, 23 nt, Human herpesvirus 6
aagaaaaacaggaacugcgguug

SEQ ID NO: 14219 - RNA, 21 nt, Human herpesvirus 6
acuuagcagauauucuagauu

SEQ ID NO: 14220 - RNA, 22 nt, Human herpesvirus 6
cacacacggcgugagacgccgc

SEQ ID NO: 14221 - RNA, 22 nt, Human herpesvirus 6
uuuggcgacuguuugaaauauu

SEQ ID NO: 14222 - RNA, 22 nt, Human herpesvirus 6
gggugucuaaacgagucuggag

SEQ ID NO: 14223 - RNA, 22 nt, Human herpesvirus 6
cggcggauggagcccgcucggu

SEQ ID NO: 14224 - RNA, 22 nt, Human herpesvirus 6
uuuagaauuaaggaauugguau

SEQ ID NO: 14225 - RNA, 22 nt, Human herpesvirus 6
cggcgguugccuguauaggcag

SEQ ID NO: 14226 - RNA, 22 nt, Human herpesvirus 6
cggcgaggcggccggagagccg

SEQ ID NO: 14227 - RNA, 22 nt, Human herpesvirus 6
gaguaaaucgaacgauacuuac

SEQ ID NO: 14228 - RNA, 22 nt, Human herpesvirus 6
aucgauaauccucgggccaggg

SEQ ID NO: 14229 - RNA, 22 nt, Human herpesvirus 6
ugcuuugccaguauaacuguuu

SEQ ID NO: 14230 - RNA, 22 nt, Human herpesvirus 6
aaucuggguuccugcuuaguua

SEQ ID NO: 14231 - RNA, 22 nt, Human herpesvirus 6
gugccuauugcugcuaugccug

SEQ ID NO: 14232 - RNA, 19 nt, Human herpesvirus 6B
gguuccacuugugcacggu

SEQ ID NO: 14233 - RNA, 22 nt, Human herpesvirus 6B
guacaaaugauuuaauuucgcu

SEQ ID NO: 14234 - RNA, 22 nt, Human herpesvirus 6B
ugguuuuauaagcucaagaggg

SEQ ID NO: 14235 - RNA, 22 nt, Human herpesvirus 6B
gaucccgcucggagcucucuca

SEQ ID NO: 14236 - RNA, 22 nt, Human herpesvirus 6B
ugaugcguauucucacucaaug

SEQ ID NO: 14237 - RNA, 22 nt, Human herpesvirus 6B
cggaagguagcgucagauucga

SEQ ID NO: 14238 - RNA, 23 nt, Human herpesvirus 6B
agagauucuggaaucgagcacuc

SEQ ID NO: 14239 - RNA, 21 nt, Human herpesvirus 6B
uggcgccgacccugccgcggc

SEQ ID NO: 14240 - RNA, 22 nt, Human herpesvirus 6B
acauuucugaagaugaucuccu

SEQ ID NO: 14241 - RNA, 22 nt, Human herpesvirus 6B
ucuuugaaggacuaucugagac

SEQ ID NO: 14242 - RNA, 22 nt, Human herpesvirus 6B
uaagaauuggugucauucgugg

SEQ ID NO: 14243 - RNA, 22 nt, Human herpesvirus 6B
gcaggaagagggaguccaacaa

SEQ ID NO: 14244 - RNA, 22 nt, Human herpesvirus 6B
agccauuugaaaaauuuccaga

SEQ ID NO: 14245 - RNA, 19 nt, Human herpesvirus 6B
auucucauuaguguuauuc

SEQ ID NO: 14246 - RNA, 22 nt, Human herpesvirus 6B
gcugauaguuaaauguuauaag

SEQ ID NO: 14247 - RNA, 22 nt, Human herpesvirus 6B
ggcgaacaauuggauuuucaga

SEQ ID NO: 14248 - RNA, 22 nt, Human herpesvirus 6B
gggcuccggcuuccucuccguc

SEQ ID NO: 14249 - RNA, 22 nt, Human herpesvirus 6B
cggcggauggagcccgcucggu

SEQ ID NO: 14250 - RNA, 22 nt, Human herpesvirus 6B
uggcgccgacccugccgcggca

SEQ ID NO: 14251 - RNA, 22 nt, Human herpesvirus 6B
gggugucuaaaugagucuggag

SEQ ID NO: 14252 - RNA, 23 nt, Human herpesvirus 6B
gagagcuacaaugucuuuuacgg

SEQ ID NO: 14253 - RNA, 22 nt, Human herpesvirus 6B
cgucuauuagauaagagaguuu

SEQ ID NO: 14254 - RNA, 22 nt, Human herpesvirus 6B
aauucucauuuaaaagcgauag

SEQ ID NO: 14255 - RNA, 20 nt, Human herpesvirus 6B
uuucugagaucgcuuuuacg

SEQ ID NO: 14256 - RNA, 21 nt, Human herpesvirus 6B
cuaugcuuuuguacucgcuua

SEQ ID NO: 14257 - RNA, 22 nt, Human herpesvirus 6B
ccuaagaaauauugcaugcauu

SEQ ID NO: 14258 - RNA, 22 nt, Human herpesvirus 6B
ucgaacaacgcguuggcgaaau

SEQ ID NO: 14259 - RNA, 22 nt, Human herpesvirus 6B
ugaaaauggcugaauaauauua

SEQ ID NO: 14260 - RNA, 21 nt, Human herpesvirus 6B
auacgucucccaguucguuaa

SEQ ID NO: 14261 - RNA, 22 nt, Human herpesvirus 6B
agaaugacaagcuaauguaugc

SEQ ID NO: 14262 - RNA, 23 nt, Human herpesvirus 6B
agaaaaacaggaacugcgguugc

SEQ ID NO: 14263 - RNA, 22 nt, Human herpesvirus 7
ugugauuauugcauuugcuuca

SEQ ID NO: 14264 - RNA, 22 nt, Human herpesvirus 7
uuauagacguggaauuucuugg

SEQ ID NO: 14265 - RNA, 22 nt, Human herpesvirus 7
cacuggagaaugucgaggucuu

SEQ ID NO: 14266 - RNA, 22 nt, Human herpesvirus 7
gcaauugacacauuuuacggug

SEQ ID NO: 14267 - RNA, 21 nt, Human herpesvirus 7
aaaaagauugugagcaauuua

SEQ ID NO: 14268 - RNA, 22 nt, Human herpesvirus 7
uaauuucugguauggaauuggc

SEQ ID NO: 14269 - RNA, 22 nt, Human herpesvirus 7
aagacguauuggucaauauaau

SEQ ID NO: 14270 - RNA, 22 nt, Human herpesvirus 7
aucuucuagaguuauugccgug

SEQ ID NO: 14271 - RNA, 22 nt, Human herpesvirus 7
ugccauugaaugcguuggaaau

SEQ ID NO: 14272 - RNA, 22 nt, Human herpesvirus 7
acauuuguggccaggcaauuga

SEQ ID NO: 14273 - RNA, 22 nt, Human herpesvirus 7
ugucaucguaauaauggaaacu

SEQ ID NO: 14274 - RNA, 22 nt, Human herpesvirus 7
uagaucgcuuuaaaaucuuauu

SEQ ID NO: 14275 - RNA, 22 nt, Human herpesvirus 7
aagaggaauagcacgucgcgga

SEQ ID NO: 14276 - RNA, 22 nt, Human herpesvirus 7
cguagagagcauuagcauuaaa

SEQ ID NO: 14277 - RNA, 22 nt, Human herpesvirus 7
aaucaaguauuucagucuguag

SEQ ID NO: 14278 - RNA, 22 nt, Human herpesvirus 7
ugauauuuuuaacacaauggca

SEQ ID NO: 14279 - RNA, 22 nt, Human herpesvirus 7
uuggagucguucuauguaugaa

SEQ ID NO: 14280 - RNA, 22 nt, Human herpesvirus 7
acacugaaacauaguacaaggg

SEQ ID NO: 14281 - RNA, 22 nt, Human herpesvirus 7
uucaugcucaucgucuccaagc

SEQ ID NO: 14282 - RNA, 22 nt, Human herpesvirus 7
uuccuauguguguaugaugaua

SEQ ID NO: 14283 - RNA, 22 nt, Human herpesvirus 7
aggauguagauucgacauucuc

SEQ ID NO: 14284 - RNA, 22 nt, Human herpesvirus 7
uauugguacauaucuuuaugag

SEQ ID NO: 14285 - RNA, 22 nt, Human herpesvirus 7
gauauuuuggguaauaugucuu

SEQ ID NO: 14286 - RNA, 22 nt, Human herpesvirus 8 (Kaposi`s sarcoma-associated h
uuuuaaaacuucauuguucucc

SEQ ID NO: 14287 - RNA, 22 nt, Human herpesvirus 8 (Kaposi`s sarcoma-associated h
agucccgacuaaugaggacaau

SEQ ID NO: 14288 - RNA, 19 nt, Human herpesvirus 8 (Kaposi`s sarcoma-associated h
ccaggguguguggucgccc

SEQ ID NO: 14289 - RNA, 22 nt, Human herpesvirus 8 (Kaposi`s sarcoma-associated h
uggcgcuggaagaaggcugucg

SEQ ID NO: 14290 - RNA, 22 nt, Human herpesvirus 8 (Kaposi`s sarcoma-associated h
gggucuccugcggaggccaaua

SEQ ID NO: 14291 - RNA, 22 nt, Human herpesvirus 8 (Kaposi`s sarcoma-associated h
uggcugcgcaguccaagggcga

SEQ ID NO: 14292 - RNA, 22 nt, Human herpesvirus 8 (Kaposi`s sarcoma-associated h
ggggacugucauccuguugguc

SEQ ID NO: 14293 - RNA, 22 nt, Human herpesvirus 8 (Kaposi`s sarcoma-associated h
uaacagaucccggucguccacc

SEQ ID NO: 14294 - RNA, 22 nt, Human herpesvirus 8 (Kaposi`s sarcoma-associated h
aaaaauguauguugccaccgga

SEQ ID NO: 14295 - RNA, 22 nt, Human herpesvirus 8 (Kaposi`s sarcoma-associated h
agcgggguuuacgcagcugggu

SEQ ID NO: 14296 - RNA, 22 nt, Human herpesvirus 8 (Kaposi`s sarcoma-associated h
ggaaugguggccugguugacac

SEQ ID NO: 14297 - RNA, 22 nt, Human herpesvirus 8 (Kaposi`s sarcoma-associated h
agggccagguguucuacaacca

SEQ ID NO: 14298 - RNA, 22 nt, Human herpesvirus 8 (Kaposi`s sarcoma-associated h
uccgguucccacccacacauuu

SEQ ID NO: 14299 - RNA, 19 nt, Human herpesvirus 8 (Kaposi`s sarcoma-associated h
agggcggguuauuggcagu

SEQ ID NO: 14300 - RNA, 22 nt, Human herpesvirus 8 (Kaposi`s sarcoma-associated h
aaugcuuccggaaauaccaccu

SEQ ID NO: 14301 - RNA, 22 nt, Human herpesvirus 8 (Kaposi`s sarcoma-associated h
cgccagaugcccgccuucgugc

SEQ ID NO: 14302 - RNA, 22 nt, Human herpesvirus 8 (Kaposi`s sarcoma-associated h
ucuguuuuauauagugaggguu

SEQ ID NO: 14303 - RNA, 22 nt, Human herpesvirus 8 (Kaposi`s sarcoma-associated h
cagggggugucuccgucugcuc

SEQ ID NO: 14304 - RNA, 22 nt, Human herpesvirus 8 (Kaposi`s sarcoma-associated h
gugccuuugucuuucguucucg

SEQ ID NO: 14305 - RNA, 22 nt, Human herpesvirus 8 (Kaposi`s sarcoma-associated h
auuguccccgguugaagccugc

SEQ ID NO: 14306 - RNA, 22 nt, Human herpesvirus 8 (Kaposi`s sarcoma-associated h
ggugccccuaaagaccgucugu

SEQ ID NO: 14307 - RNA, 22 nt, Human herpesvirus 8 (Kaposi`s sarcoma-associated h
ugugucaaccagggcacccucc

SEQ ID NO: 14308 - RNA, 22 nt, Human herpesvirus 8 (Kaposi`s sarcoma-associated h
auuguaaaagauccgauccuca

SEQ ID NO: 14309 - RNA, 17 nt, Human metapneumovirus
uuaguuuuaauaccuca

SEQ ID NO: 14310 - RNA, 22 nt, Human parainfluenza virus 1 strain Washington/1964
auugauaugaauuauuggucug

SEQ ID NO: 14311 - RNA, 22 nt, Human respiratory syncytial virus
cucaucuuauagauguuuuugu

SEQ ID NO: 14312 - RNA, 22 nt, Influenza A virus (A/Hong Kong/1073/99(H9N2))
caucccagugcggggaaggacc

SEQ ID NO: 14313 - RNA, 22 nt, Influenza A virus (A/Puerto Rico/8/34/Mount Sinai(
ccaugcucauacccaagcagaa

SEQ ID NO: 14314 - RNA, 22 nt, Influenza B virus (B/Memphis/12/97)
guauugaagggaggaggagaaa

SEQ ID NO: 14315 - RNA, 22 nt, Influenza B virus (B/Memphis/12/97)
ccauggcucuuuacaauauggc

SEQ ID NO: 14316 - RNA, 22 nt, Japanese encephalitis virus
aagcucaugagcaaaccuuggg

SEQ ID NO: 14317 - RNA, 22 nt, Japanese encephalitis virus
acccuuuucagcugggccuucu

SEQ ID NO: 14318 - RNA, 22 nt, Molluscum contagiosum virus
cacgggcgcggagaacugcacc

SEQ ID NO: 14319 - RNA, 22 nt, Molluscum contagiosum virus
acauguccaagcugcaggaacg

SEQ ID NO: 14320 - RNA, 22 nt, Molluscum contagiosum virus
gggcgcugaacuuagcgcgcag

SEQ ID NO: 14321 - RNA, 22 nt, Molluscum contagiosum virus
ucucgacggggccguaguaggg

SEQ ID NO: 14322 - RNA, 22 nt, Molluscum contagiosum virus
ugcgcgcguggugugcuaccag

SEQ ID NO: 14323 - RNA, 22 nt, Molluscum contagiosum virus
ggucuaagcgcaagccagagcu

SEQ ID NO: 14324 - RNA, 22 nt, Molluscum contagiosum virus
cgcgacauggacaucgccagug

SEQ ID NO: 14325 - RNA, 22 nt, Molluscum contagiosum virus
caugggcucguccuguacuggc

SEQ ID NO: 14326 - RNA, 21 nt, Molluscum contagiosum virus
cgcgcagguccagcugcgaga

SEQ ID NO: 14327 - RNA, 20 nt, Molluscum contagiosum virus
ccagcgccuguccgugggcg

SEQ ID NO: 14328 - RNA, 22 nt, Molluscum contagiosum virus
ggugcucguacuccucaugaau

SEQ ID NO: 14329 - RNA, 22 nt, Molluscum contagiosum virus
uuccaugcgcaacgugcugcgu

SEQ ID NO: 14330 - RNA, 22 nt, Molluscum contagiosum virus
gccgcgacaucuuccgcuuccu

SEQ ID NO: 14331 - RNA, 22 nt, Molluscum contagiosum virus
ggucgagucguucucgcgguac

SEQ ID NO: 14332 - RNA, 22 nt, Molluscum contagiosum virus
auggccaccgggaugcgcaugg

SEQ ID NO: 14333 - RNA, 22 nt, Molluscum contagiosum virus
agcgccuucuugaccagcacca

SEQ ID NO: 14334 - RNA, 22 nt, Molluscum contagiosum virus
gcucacggccuucgcguuccgg

SEQ ID NO: 14335 - RNA, 22 nt, Molluscum contagiosum virus
gaggauccgcauccucuaggcg

SEQ ID NO: 14336 - RNA, 22 nt, Molluscum contagiosum virus
gcggugcagcugccgcagagcc

SEQ ID NO: 14337 - RNA, 19 nt, Molluscum contagiosum virus
uggaagaaucggacucgga

SEQ ID NO: 14338 - RNA, 22 nt, Molluscum contagiosum virus
ggaaggccacuggcgagcguac

SEQ ID NO: 14339 - RNA, 22 nt, Molluscum contagiosum virus
gcacagcucgcgcugcgucugc

SEQ ID NO: 14340 - RNA, 22 nt, Molluscum contagiosum virus
cgcuggugucgcuuccaugggc

SEQ ID NO: 14341 - RNA, 22 nt, Molluscum contagiosum virus
ggcgccucgagcgcgcuggacu

SEQ ID NO: 14342 - RNA, 22 nt, Molluscum contagiosum virus
gggcuugucggaauuucugucu

SEQ ID NO: 14343 - RNA, 22 nt, Molluscum contagiosum virus
gcgccacuugagacucgcaugu

SEQ ID NO: 14344 - RNA, 22 nt, Molluscum contagiosum virus
cagacgcgacaccuuccgagcc

SEQ ID NO: 14345 - RNA, 22 nt, Molluscum contagiosum virus
gaugcucauggacgcgcucggg

SEQ ID NO: 14346 - RNA, 22 nt, Molluscum contagiosum virus
gcggcgcuaccugcacaaggag

SEQ ID NO: 14347 - RNA, 21 nt, Molluscum contagiosum virus
ucggagggucggagccugagc

SEQ ID NO: 14348 - RNA, 19 nt, Molluscum contagiosum virus
ucuagcagcugcgccagcg

SEQ ID NO: 14349 - RNA, 22 nt, Molluscum contagiosum virus
gaugcgugcacgucgagcacgg

SEQ ID NO: 14350 - RNA, 22 nt, Molluscum contagiosum virus
cuccgcacacgugcucguugcc

SEQ ID NO: 14351 - RNA, 22 nt, Molluscum contagiosum virus
ccagcgccgccaggacagcauu

SEQ ID NO: 14352 - RNA, 22 nt, Molluscum contagiosum virus
cuggacgacgugcagcaugcca

SEQ ID NO: 14353 - RNA, 22 nt, Molluscum contagiosum virus
ucgugcucuaggugugagggug

SEQ ID NO: 14354 - RNA, 22 nt, Molluscum contagiosum virus
ggccugugcugugcagaacuuc

SEQ ID NO: 14355 - RNA, 21 nt, Molluscum contagiosum virus
ggaagcgggcgagaucguggc

SEQ ID NO: 14356 - RNA, 23 nt, Molluscum contagiosum virus
ugauggacauguacacgcgcgcg

SEQ ID NO: 14357 - RNA, 22 nt, Molluscum contagiosum virus
cgcgcccgaugaucugcuugag

SEQ ID NO: 14358 - RNA, 22 nt, Molluscum contagiosum virus
uuguaguugcgguggugcaucc

SEQ ID NO: 14359 - RNA, 22 nt, Molluscum contagiosum virus
acguguucgaacugcucgcguu

SEQ ID NO: 14360 - RNA, 20 nt, Molluscum contagiosum virus
gcagucguacgugagcaugc

SEQ ID NO: 14361 - RNA, 22 nt, Molluscum contagiosum virus
gugccgucagcacccaccaaga

SEQ ID NO: 14362 - RNA, 22 nt, Molluscum contagiosum virus
auguuggccagguagguguucu

SEQ ID NO: 14363 - RNA, 22 nt, Molluscum contagiosum virus
gugcgucgcugcgcgugguggg

SEQ ID NO: 14364 - RNA, 18 nt, Molluscum contagiosum virus
gugcgcagcccgcugccc

SEQ ID NO: 14365 - RNA, 22 nt, Molluscum contagiosum virus
uagcucugcucgcucugcgaga

SEQ ID NO: 14366 - RNA, 22 nt, Molluscum contagiosum virus
agagaaacauguagaaggccag

SEQ ID NO: 14367 - RNA, 22 nt, Molluscum contagiosum virus
ccuugcgcuugugcguacgcgc

SEQ ID NO: 14368 - RNA, 22 nt, Molluscum contagiosum virus
cugcaugcugugcuucguggag

SEQ ID NO: 14369 - RNA, 22 nt, Molluscum contagiosum virus
cugggagcaccgcguggcgcgc

SEQ ID NO: 14370 - RNA, 22 nt, Molluscum contagiosum virus
uuccuggacacgcgcaucgugu

SEQ ID NO: 14371 - RNA, 22 nt, Molluscum contagiosum virus
agcgguguugcugacgacugcg

SEQ ID NO: 14372 - RNA, 22 nt, Molluscum contagiosum virus
gggcagcguguagcggcacacc

SEQ ID NO: 14373 - RNA, 22 nt, Molluscum contagiosum virus
ugcuggccgcccuggcgcuguu

SEQ ID NO: 14374 - RNA, 22 nt, Molluscum contagiosum virus
aaagcggaaaaaugcacgcccg

SEQ ID NO: 14375 - RNA, 22 nt, Molluscum contagiosum virus
gcgccacgagcuugucccgcca

SEQ ID NO: 14376 - RNA, 21 nt, Molluscum contagiosum virus
ugcggcuugggcaccgcgcgg

SEQ ID NO: 14377 - RNA, 22 nt, Molluscum contagiosum virus
caugcacagccgcuuucugggc

SEQ ID NO: 14378 - RNA, 22 nt, Molluscum contagiosum virus
ugguguagaggaagcgcaggug

SEQ ID NO: 14379 - RNA, 22 nt, Molluscum contagiosum virus
gcacgcgcgcgugucuuccagc

SEQ ID NO: 14380 - RNA, 21 nt, Molluscum contagiosum virus
ugugcgaggacguggcgcugc

SEQ ID NO: 14381 - RNA, 21 nt, Molluscum contagiosum virus
ugaucguguccaaguucaaga

SEQ ID NO: 14382 - RNA, 22 nt, Molluscum contagiosum virus
gcggucgacgggaacgagguca

SEQ ID NO: 14383 - RNA, 22 nt, Molluscum contagiosum virus
cgugcgcaccugcgcaagaugu

SEQ ID NO: 14384 - RNA, 22 nt, Molluscum contagiosum virus
gugagcacaguguagcgcgcgc

SEQ ID NO: 14385 - RNA, 22 nt, Molluscum contagiosum virus
guccugcgagcucgacaugucc

SEQ ID NO: 14386 - RNA, 22 nt, Molluscum contagiosum virus
ggcgacaucuucaugguuacgg

SEQ ID NO: 14387 - RNA, 23 nt, Molluscum contagiosum virus
gcgcgcagacguggugcucgugg

SEQ ID NO: 14388 - RNA, 22 nt, Molluscum contagiosum virus
ucgcccguguucgcggagcugu

SEQ ID NO: 14389 - RNA, 18 nt, Molluscum contagiosum virus
gcguucucggcaaugccc

SEQ ID NO: 14390 - RNA, 22 nt, Molluscum contagiosum virus
gcucauccaggcgccgcgcucg

SEQ ID NO: 14391 - RNA, 19 nt, Molluscum contagiosum virus
gcgagcauguucugcgcga

SEQ ID NO: 14392 - RNA, 22 nt, Molluscum contagiosum virus
cuacgugcuggaacaggugcac

SEQ ID NO: 14393 - RNA, 18 nt, Molluscum contagiosum virus
uccagcagcaguguugcc

SEQ ID NO: 14394 - RNA, 22 nt, Molluscum contagiosum virus
gcgcacacgggcucgagcucgg

SEQ ID NO: 14395 - RNA, 22 nt, Molluscum contagiosum virus
aaggcgucgggagcaccgucag

SEQ ID NO: 14396 - RNA, 19 nt, Molluscum contagiosum virus
cagcagugccagcgcuguc

SEQ ID NO: 14397 - RNA, 22 nt, Molluscum contagiosum virus
acguaaagacggcgauucgugc

SEQ ID NO: 14398 - RNA, 22 nt, Molluscum contagiosum virus
ggcaacgcaugcagucgacggc

SEQ ID NO: 14399 - RNA, 22 nt, Molluscum contagiosum virus
cuggcgggcagcucugcuggca

SEQ ID NO: 14400 - RNA, 18 nt, Molluscum contagiosum virus
gggccugccagccggcgc

SEQ ID NO: 14401 - RNA, 22 nt, Molluscum contagiosum virus
uguccgagcgaaccgcggcagc

SEQ ID NO: 14402 - RNA, 22 nt, Molluscum contagiosum virus
cugugcgcgcaggccacggggu

SEQ ID NO: 14403 - RNA, 22 nt, Molluscum contagiosum virus
cugccgcggggcuagcgcugca

SEQ ID NO: 14404 - RNA, 22 nt, Molluscum contagiosum virus
cucgggcggguuguuggcgugg

SEQ ID NO: 14405 - RNA, 22 nt, Molluscum contagiosum virus
uccggcgaaaagccgcucgcgu

SEQ ID NO: 14406 - RNA, 22 nt, Molluscum contagiosum virus
gugggcggcagagagccggcgc

SEQ ID NO: 14407 - RNA, 23 nt, Molluscum contagiosum virus
uccaggccacgucguugcggcac

SEQ ID NO: 14408 - RNA, 22 nt, Molluscum contagiosum virus
ugcuggcguucguucgcgccag

SEQ ID NO: 14409 - RNA, 22 nt, Molluscum contagiosum virus
ggcacgcuggcacuugcgggug

SEQ ID NO: 14410 - RNA, 22 nt, Molluscum contagiosum virus
ugucggucucgagcgccgccau

SEQ ID NO: 14411 - RNA, 22 nt, Molluscum contagiosum virus
gacccaguggcguuugccguga

SEQ ID NO: 14412 - RNA, 22 nt, Molluscum contagiosum virus
guuccagcuagaagaggccguc

SEQ ID NO: 14413 - RNA, 22 nt, Molluscum contagiosum virus
gcgcugcuccgcucguucagca

SEQ ID NO: 14414 - RNA, 22 nt, Molluscum contagiosum virus
ccugcacguucacgcgcuccag

SEQ ID NO: 14415 - RNA, 22 nt, Molluscum contagiosum virus
gcgcccugcgccgcacguaugg

SEQ ID NO: 14416 - RNA, 22 nt, Molluscum contagiosum virus
gcugagcgcggagcuggcguug

SEQ ID NO: 14417 - RNA, 22 nt, Molluscum contagiosum virus
gagugucgcgaccguagaagau

SEQ ID NO: 14418 - RNA, 22 nt, Molluscum contagiosum virus
uguccacguaccugucgagugc

SEQ ID NO: 14419 - RNA, 23 nt, Molluscum contagiosum virus
gggaagcgugucacuuuccgaug

SEQ ID NO: 14420 - RNA, 22 nt, Molluscum contagiosum virus
uuacggacgcccuccucgaccu

SEQ ID NO: 14421 - RNA, 22 nt, Molluscum contagiosum virus
ugccuccugcacgcgguccauc

SEQ ID NO: 14422 - RNA, 22 nt, Molluscum contagiosum virus
gggaccggcaccugcuacuccc

SEQ ID NO: 14423 - RNA, 22 nt, Molluscum contagiosum virus
cgccggcuggcaauguagcgua

SEQ ID NO: 14424 - RNA, 22 nt, Molluscum contagiosum virus
gugcgcuuugaggaacuagugc

SEQ ID NO: 14425 - RNA, 23 nt, Molluscum contagiosum virus
auuucccugccggugcguuggca

SEQ ID NO: 14426 - RNA, 22 nt, Molluscum contagiosum virus
cgcgggagcggccuccggagaa

SEQ ID NO: 14427 - RNA, 22 nt, Molluscum contagiosum virus
gcacgagcgaaaacgcgugucu

SEQ ID NO: 14428 - RNA, 22 nt, Molluscum contagiosum virus
gcuccgcguggcagugcgcggg

SEQ ID NO: 14429 - RNA, 22 nt, Molluscum contagiosum virus
agugaaggucgcguuccaggug

SEQ ID NO: 14430 - RNA, 22 nt, Molluscum contagiosum virus
ucgcggcgccgcuguccuguga

SEQ ID NO: 14431 - RNA, 22 nt, Molluscum contagiosum virus
ugccggcguccucuucccgcgg

SEQ ID NO: 14432 - RNA, 22 nt, Molluscum contagiosum virus
uagugcucuuuguggaccgcgg

SEQ ID NO: 14433 - RNA, 22 nt, Molluscum contagiosum virus
uggccgugcccgccgacugccg

SEQ ID NO: 14434 - RNA, 22 nt, Molluscum contagiosum virus
ggaagcgcucuagguugggugu

SEQ ID NO: 14435 - RNA, 22 nt, Molluscum contagiosum virus
ugugugugcgcucacacggaac

SEQ ID NO: 14436 - RNA, 22 nt, Molluscum contagiosum virus
gcgccgcgccuguguccgucuc

SEQ ID NO: 14437 - RNA, 22 nt, Molluscum contagiosum virus
ucgcguggaacuugacgccgua

SEQ ID NO: 14438 - RNA, 22 nt, Molluscum contagiosum virus
uggcuucucgacuggagggggc

SEQ ID NO: 14439 - RNA, 22 nt, Molluscum contagiosum virus
gcggcccuucguguucgcggac

SEQ ID NO: 14440 - RNA, 19 nt, Molluscum contagiosum virus
gccgucgaugcgcaccagc

SEQ ID NO: 14441 - RNA, 22 nt, Molluscum contagiosum virus
gucgugcuccacgcgcagcuuc

SEQ ID NO: 14442 - RNA, 17 nt, Molluscum contagiosum virus
gacggaaugcgagcgcc

SEQ ID NO: 14443 - RNA, 22 nt, Molluscum contagiosum virus
gcgcaagacgaguagugcgcga

SEQ ID NO: 14444 - RNA, 22 nt, Molluscum contagiosum virus
cguggcgccgcugcuggaacag

SEQ ID NO: 14445 - RNA, 22 nt, Molluscum contagiosum virus
accuugucacugucgcgacaac

SEQ ID NO: 14446 - RNA, 22 nt, Molluscum contagiosum virus
ugucaagcacggaaaggaagug

SEQ ID NO: 14447 - RNA, 22 nt, Molluscum contagiosum virus
cgucaggcugggcgcgcgagcu

SEQ ID NO: 14448 - RNA, 22 nt, Molluscum contagiosum virus
agcgacucggacucgagcgacu

SEQ ID NO: 14449 - RNA, 22 nt, Molluscum contagiosum virus
gcgucccggcucugcucgucca

SEQ ID NO: 14450 - RNA, 22 nt, Murray Valley encephalitis virus
acagcuuggaugguguugcgag

SEQ ID NO: 14451 - RNA, 22 nt, Puumala virus
ugagauaagugauguauuggau

SEQ ID NO: 14452 - RNA, 22 nt, SARS coronavirus
agcuguaaagauaacagagcau

SEQ ID NO: 14453 - RNA, 22 nt, SARS coronavirus
uacauagucuacucuugugcag

SEQ ID NO: 14454 - RNA, 22 nt, Seoul virus
aaagaugaaauuaugugcaauc

SEQ ID NO: 14455 - RNA, 22 nt, Seoul virus
uaguaguagacuccgcaagaaa

SEQ ID NO: 14456 - RNA, 22 nt, Sin Nombre virus
uauaagaucacauuugauguug

SEQ ID NO: 14457 - RNA, 22 nt, Homo sapiens
acugagccuuuaaaugacuuca

SEQ ID NO: 14458 - RNA, 22 nt, Homo sapiens
aggaacuguaacuaugucucug

SEQ ID NO: 14459 - RNA, 20 nt, Homo sapiens
auaccacagacuggguaguu

SEQ ID NO: 14460 - RNA, 16 nt, Homo sapiens
auaccacagugacaca

SEQ ID NO: 14461 - RNA, 22 nt, Homo sapiens
auauccuggagcauuuuugcaa

SEQ ID NO: 14462 - RNA, 22 nt, Homo sapiens
caccacagccauuauugucccc

SEQ ID NO: 14463 - RNA, 22 nt, Homo sapiens
cagccgggugagguggcuuguu

SEQ ID NO: 14464 - RNA, 22 nt, Homo sapiens
cagcuguuguuaugucugcagg

SEQ ID NO: 14465 - RNA, 22 nt, Homo sapiens
cagcuguuguuccagucuuuua

SEQ ID NO: 14466 - RNA, 21 nt, Homo sapiens
cucauauugcuuuuccauggu

SEQ ID NO: 14467 - RNA, 22 nt, Homo sapiens
cugauuuguccccagccucaug

SEQ ID NO: 14468 - RNA, 22 nt, Homo sapiens
cuguuugguuaucuuuuccugu

SEQ ID NO: 14469 - RNA, 22 nt, Homo sapiens
cuuuggccauagcuaaaugauu

SEQ ID NO: 14470 - RNA, 22 nt, Homo sapiens
gauugguugaaaguagaauacu

SEQ ID NO: 14471 - RNA, 22 nt, Homo sapiens
ggcccugagacaggaaaaagcu

SEQ ID NO: 14472 - RNA, 22 nt, Homo sapiens
ggcccugauacaaguaaggucu

SEQ ID NO: 14473 - RNA, 22 nt, Homo sapiens
guguuugguugauagagccacu

SEQ ID NO: 14474 - RNA, 22 nt, Homo sapiens
guuguggcuugugauuaagcac

SEQ ID NO: 14475 - RNA, 22 nt, Homo sapiens
ugauccuguccuuaugauguua

SEQ ID NO: 14476 - RNA, 22 nt, Homo sapiens
uggaacugauauugauggaaaa

SEQ ID NO: 14477 - RNA, 22 nt, Homo sapiens
uguuuugguugucccuggccag

SEQ ID NO: 14478 - RNA, 22 nt, Homo sapiens
uuaucacauugacugauuugca

SEQ ID NO: 14479 - RNA, 17 nt, Homo sapiens
uucucaguucugaucuc

SEQ ID NO: 14480 - RNA, 22 nt, Homo sapiens
uucuuagucaaguuguauuuca

SEQ ID NO: 14481 - RNA, 22 nt, Homo sapiens
uuggcccugcugaccauucccu

SEQ ID NO: 14482 - RNA, 22 nt, Homo sapiens
uuucuuggagcucuuagggucg

SEQ ID NO: 14483 - RNA, 22 nt, Homo sapiens
uuuggcccccagcucaggacau

SEQ ID NO: 14484 - RNA, 22 nt, Homo sapiens
uuuggcccugagggauggcaua

SEQ ID NO: 14485 - RNA, 22 nt, Homo sapiens
uuuguucuucguuccugagcca

SEQ ID NO: 14486 - RNA, 22 nt, Homo sapiens
aauccugucuugccauccaaua

SEQ ID NO: 14487 - RNA, 22 nt, Homo sapiens
aucccuguaguaauauucuagc

SEQ ID NO: 14488 - RNA, 22 nt, Homo sapiens
augcuguuuuguagcucccucu

SEQ ID NO: 14489 - RNA, 22 nt, Homo sapiens
auggcccugaguucaauauauu

SEQ ID NO: 14490 - RNA, 22 nt, Homo sapiens
auggcccugcuaccacuuuucu

SEQ ID NO: 14491 - RNA, 20 nt, Homo sapiens
auggcccugcugggaguguc

SEQ ID NO: 14492 - RNA, 22 nt, Homo sapiens
auggcccugggaaaggaggcau

SEQ ID NO: 14493 - RNA, 22 nt, Homo sapiens
auggcccuguguggagcugcug

SEQ ID NO: 14494 - RNA, 22 nt, Homo sapiens
auguuugguagugaauauggua

SEQ ID NO: 14495 - RNA, 22 nt, Homo sapiens
cagcuguuguugggguauagga

SEQ ID NO: 14496 - RNA, 22 nt, Homo sapiens
caguguaugcuucuauuuuugg

SEQ ID NO: 14497 - RNA, 17 nt, Homo sapiens
ccccugagcgaugcagu

SEQ ID NO: 14498 - RNA, 22 nt, Homo sapiens
cccugagcagccugaguuuccc

SEQ ID NO: 14499 - RNA, 22 nt, Homo sapiens
cgccgggggaugggcaccagcg

SEQ ID NO: 14500 - RNA, 22 nt, Homo sapiens
cgccugagcugaggaagcugca

SEQ ID NO: 14501 - RNA, 22 nt, Homo sapiens
cugauugucuauuuaguucacu

SEQ ID NO: 14502 - RNA, 22 nt, Homo sapiens
cuguuugguaaggaugccucag

SEQ ID NO: 14503 - RNA, 22 nt, Homo sapiens
gcuguuugccgccaucgcagac

SEQ ID NO: 14504 - RNA, 22 nt, Homo sapiens
gucuuggcaugugcagcuggga

SEQ ID NO: 14505 - RNA, 22 nt, Homo sapiens
uaccacaggcuggguaaucuau

SEQ ID NO: 14506 - RNA, 19 nt, Homo sapiens
uaccagcacaguguuugag

SEQ ID NO: 14507 - RNA, 22 nt, Homo sapiens
uacugcuuaaaagucaauuacu

SEQ ID NO: 14508 - RNA, 22 nt, Homo sapiens
uagccgggugugguggaacucc

SEQ ID NO: 14509 - RNA, 20 nt, Homo sapiens
uagccggguguugugucaug

SEQ ID NO: 14510 - RNA, 22 nt, Homo sapiens
uauuucaguugcguuucccgag

SEQ ID NO: 14511 - RNA, 22 nt, Homo sapiens
ucucuguuugucuguuacuggu

SEQ ID NO: 14512 - RNA, 22 nt, Homo sapiens
ucuuggccaugaauggcaaggc

SEQ ID NO: 14513 - RNA, 22 nt, Homo sapiens
ugaaacauacacucugaugggg

SEQ ID NO: 14514 - RNA, 22 nt, Homo sapiens
uuaccacagugccugucuaaug

SEQ ID NO: 14515 - RNA, 21 nt, Homo sapiens
uucaucuggccguauuccagg

SEQ ID NO: 14516 - RNA, 22 nt, Homo sapiens
uugagcccuggaggcagaggcu

SEQ ID NO: 14517 - RNA, 22 nt, Homo sapiens
uugagcccuggagguggaggcu

SEQ ID NO: 14518 - RNA, 23 nt, Homo sapiens
uuucuugggcaugcuaugucagu

SEQ ID NO: 14519 - RNA, 22 nt, Homo sapiens
uuucuugguuguauuuagacuu

SEQ ID NO: 14520 - RNA, 18 nt, Homo sapiens
aaacugcuuccuuggccu

SEQ ID NO: 14521 - RNA, 22 nt, Homo sapiens
aaacugcuuuccaugguggcug

SEQ ID NO: 14522 - RNA, 22 nt, Homo sapiens
aagcuguugguggauguaccau

SEQ ID NO: 14523 - RNA, 22 nt, Homo sapiens
aagcuguuguucauccugaauu

SEQ ID NO: 14524 - RNA, 22 nt, Homo sapiens
aaggaacuggaauauuuugaac

SEQ ID NO: 14525 - RNA, 22 nt, Homo sapiens
aauccuguagauucuaauuccu

SEQ ID NO: 14526 - RNA, 22 nt, Homo sapiens
auggcccaguuugcuaucccua

SEQ ID NO: 14527 - RNA, 23 nt, Homo sapiens
auggcccuggugggagugucuuu

SEQ ID NO: 14528 - RNA, 22 nt, Homo sapiens
auguuugguaagaauauuguua

SEQ ID NO: 14529 - RNA, 22 nt, Homo sapiens
cuggcccaguucugcguuuugc

SEQ ID NO: 14530 - RNA, 22 nt, Homo sapiens
gaaacugcauuucuaacaagcu

SEQ ID NO: 14531 - RNA, 22 nt, Homo sapiens
gaaaugcucauuuuggauccuu

SEQ ID NO: 14532 - RNA, 22 nt, Homo sapiens
gaccacagacuggaaagagggc

SEQ ID NO: 14533 - RNA, 22 nt, Homo sapiens
gagcuguuuuucacuagaccaa

SEQ ID NO: 14534 - RNA, 22 nt, Homo sapiens
ggagaucuuuguuaucuuuuga

SEQ ID NO: 14535 - RNA, 22 nt, Homo sapiens
uaccacagucauuacacuugua

SEQ ID NO: 14536 - RNA, 23 nt, Homo sapiens
uaccacauuccuucuuuccuguu

SEQ ID NO: 14537 - RNA, 22 nt, Homo sapiens
uaccaccauuguaguuuggaaa

SEQ ID NO: 14538 - RNA, 22 nt, Homo sapiens
uacugcuuaagggcaugggccc

SEQ ID NO: 14539 - RNA, 22 nt, Homo sapiens
uagcuguuggugggaagucaga

SEQ ID NO: 14540 - RNA, 22 nt, Homo sapiens
uaucacagaggguauccuagag

SEQ ID NO: 14541 - RNA, 22 nt, Homo sapiens
uauccuguagcucauccaccgc

SEQ ID NO: 14542 - RNA, 22 nt, Homo sapiens
ucccugagcaaaguuuucugua

SEQ ID NO: 14543 - RNA, 22 nt, Homo sapiens
ucccugagguccuggauuauug

SEQ ID NO: 14544 - RNA, 22 nt, Homo sapiens
ucccugaguaucuaauguguuu

SEQ ID NO: 14545 - RNA, 19 nt, Homo sapiens
ucccugagucuuagcuuga

SEQ ID NO: 14546 - RNA, 17 nt, Homo sapiens
ucccuguuuuuucaguc

SEQ ID NO: 14547 - RNA, 22 nt, Homo sapiens
ugagacggagucuggcacuguc

SEQ ID NO: 14548 - RNA, 22 nt, Homo sapiens
uguucuugagccuuuagaccua

SEQ ID NO: 14549 - RNA, 22 nt, Homo sapiens
uguucuugaguugggaguacaa

SEQ ID NO: 14550 - RNA, 22 nt, Homo sapiens
uuauucagcaccugcuguguuc

SEQ ID NO: 14551 - RNA, 20 nt, Homo sapiens
uucuauggugaugaguccug

SEQ ID NO: 14552 - RNA, 22 nt, Homo sapiens
uucuuugcuuggaagcggggga

SEQ ID NO: 14553 - RNA, 22 nt, Homo sapiens
aagcuguugguggaucuaccau

SEQ ID NO: 14554 - RNA, 22 nt, Homo sapiens
auucacuguggcuuucucugau

SEQ ID NO: 14555 - RNA, 22 nt, Homo sapiens
auuggccccguuuuaaauguca

SEQ ID NO: 14556 - RNA, 22 nt, Homo sapiens
auuuggccuuuguaugcaguau

SEQ ID NO: 14557 - RNA, 22 nt, Homo sapiens
cagccggguggcuccuagggua

SEQ ID NO: 14558 - RNA, 21 nt, Homo sapiens
cuucuuggggcagggcagggu

SEQ ID NO: 14559 - RNA, 22 nt, Homo sapiens
cuuuuugguagagcaggugugc

SEQ ID NO: 14560 - RNA, 21 nt, Homo sapiens
gaccacagcagggaaugucag

SEQ ID NO: 14561 - RNA, 22 nt, Homo sapiens
gagcuguugguuugaaagaauu

SEQ ID NO: 14562 - RNA, 22 nt, Homo sapiens
gcccugagauucuuggauucug

SEQ ID NO: 14563 - RNA, 17 nt, Homo sapiens
ggcaggaauuaauguca

SEQ ID NO: 14564 - RNA, 22 nt, Homo sapiens
ggcaugaaguagcccacaggca

SEQ ID NO: 14565 - RNA, 22 nt, Homo sapiens
guauccugaaguucucagcacu

SEQ ID NO: 14566 - RNA, 22 nt, Homo sapiens
guccuguuuuuaagguucauag

SEQ ID NO: 14567 - RNA, 19 nt, Homo sapiens
uaacacaguuguguuugag

SEQ ID NO: 14568 - RNA, 22 nt, Homo sapiens
ucccugagugauugaaaauaaa

SEQ ID NO: 14569 - RNA, 23 nt, Homo sapiens
uggaacugaauuucuuagcauuu

SEQ ID NO: 14570 - RNA, 19 nt, Homo sapiens
uggaacugauucaguucug

SEQ ID NO: 14571 - RNA, 19 nt, Homo sapiens
uguuuggcuauaggucuaa

SEQ ID NO: 14572 - RNA, 19 nt, Homo sapiens
uuggcccugguucucuucu

SEQ ID NO: 14573 - RNA, 22 nt, Homo sapiens
uugugccccuucucagucgggc

SEQ ID NO: 14574 - RNA, 22 nt, Homo sapiens
uuguuugguuagaugggcaagu

SEQ ID NO: 14575 - RNA, 22 nt, Homo sapiens
uuguuugguugaguauggaagu

SEQ ID NO: 14576 - RNA, 22 nt, Homo sapiens
uuacagauggcacacucaaggg

SEQ ID NO: 14577 - RNA, 18 nt, Homo sapiens
ugaauacagcguugggaa

SEQ ID NO: 14578 - RNA, 22 nt, Homo sapiens
uauccacgugaaaaagauugaa

SEQ ID NO: 14579 - RNA, 22 nt, Homo sapiens
cucugguggaagcagggggcaa

SEQ ID NO: 14580 - RNA, 19 nt, Homo sapiens
auugauuaaguuugcuguc

SEQ ID NO: 14581 - RNA, 22 nt, Homo sapiens
auacaagcaguccaacuccaua

SEQ ID NO: 14582 - RNA, 22 nt, Homo sapiens
uuaguaucauccuucugcauuc

SEQ ID NO: 14583 - RNA, 22 nt, Homo sapiens
uaucugguuauugcugcugauu

SEQ ID NO: 14584 - RNA, 22 nt, Homo sapiens
gucagguauguuccaaaggcgg

SEQ ID NO: 14585 - RNA, 22 nt, Homo sapiens
ucagguaucuucauagcaaugc

SEQ ID NO: 14586 - RNA, 22 nt, Homo sapiens
ucagguaucuuuauagcgaugc

SEQ ID NO: 14587 - RNA, 22 nt, Homo sapiens
ucagguauuucuuuuagcugug

SEQ ID NO: 14588 - RNA, 22 nt, Homo sapiens
ucagguauuuuaucacaugaag

SEQ ID NO: 14589 - RNA, 22 nt, Homo sapiens
uagguaucuuuauagcaguagc

SEQ ID NO: 14590 - RNA, 22 nt, Homo sapiens
uaucugguuuuguuacagguuc

SEQ ID NO: 14591 - RNA, 22 nt, Homo sapiens
uauugauuuucaguguucagcu

SEQ ID NO: 14592 - RNA, 21 nt, Homo sapiens
gucugguguuuuaaugaggac

SEQ ID NO: 14593 - RNA, 22 nt, Homo sapiens
aucugguguccucgugggaguc

SEQ ID NO: 14594 - RNA, 22 nt, Homo sapiens
aucugguguuuuucucccucgu

SEQ ID NO: 14595 - RNA, 22 nt, Homo sapiens
agugccaaaucgagggcucuga

SEQ ID NO: 14596 - RNA, 22 nt, Homo sapiens
uuacagauggauggcagcuggc

SEQ ID NO: 14597 - RNA, 22 nt, Homo sapiens
ucagguaucucuauagcaaugu

SEQ ID NO: 14598 - RNA, 22 nt, Homo sapiens
ucagguaugucuuuaacagcag

SEQ ID NO: 14599 - RNA, 22 nt, Homo sapiens
ucagguauuuauagcaaugcaa

SEQ ID NO: 14600 - RNA, 22 nt, Homo sapiens
uauugauuaauugugauuaggc

SEQ ID NO: 14601 - RNA, 22 nt, Homo sapiens
aucugguguauuggugcugggu

SEQ ID NO: 14602 - RNA, 22 nt, Homo sapiens
aucugguguggcugugauccuc

SEQ ID NO: 14603 - RNA, 22 nt, Homo sapiens
aucugguguuuccuucacauug

SEQ ID NO: 14604 - RNA, 22 nt, Homo sapiens
augagucacuuauuauuggggu

SEQ ID NO: 14605 - RNA, 22 nt, Homo sapiens
augcuguuuugaauucucuaga

SEQ ID NO: 14606 - RNA, 22 nt, Homo sapiens
auauuguacugcuacugguucu

SEQ ID NO: 14607 - RNA, 22 nt, Homo sapiens
aucagagugaugguuuaaguau

SEQ ID NO: 14608 - RNA, 21 nt, Homo sapiens
agguuguguuuccucuuacuu

SEQ ID NO: 14609 - RNA, 23 nt, Homo sapiens
aaguucaugcucaucuguuacac

SEQ ID NO: 14610 - RNA, 22 nt, Homo sapiens
aaguuguaguuagagaguugcu

SEQ ID NO: 14611 - RNA, 22 nt, Homo sapiens
aaaaguucuuugagccuugaca

SEQ ID NO: 14612 - RNA, 22 nt, Homo sapiens
uaugccucuucauaaaguauga

SEQ ID NO: 14613 - RNA, 22 nt, Homo sapiens
uagguucucaggaaugagcuuc

SEQ ID NO: 14614 - RNA, 22 nt, Homo sapiens
uagguuguccaucucuagaagc

SEQ ID NO: 14615 - RNA, 22 nt, Homo sapiens
uagguuguguucugagccucag

SEQ ID NO: 14616 - RNA, 22 nt, Homo sapiens
uagguuguucuauuaucuuaca

SEQ ID NO: 14617 - RNA, 22 nt, Homo sapiens
uaauaguuggcacuggagaaag

SEQ ID NO: 14618 - RNA, 22 nt, Homo sapiens
uacauaguagauauaggguuua

SEQ ID NO: 14619 - RNA, 19 nt, Homo sapiens
uacauaguauuuaguggca

SEQ ID NO: 14620 - RNA, 22 nt, Homo sapiens
guguaguuugagguaugggggc

SEQ ID NO: 14621 - RNA, 22 nt, Homo sapiens
gugcaguuuugagugaguuucu

SEQ ID NO: 14622 - RNA, 22 nt, Homo sapiens
gaguauauuugcacuguuaugu

SEQ ID NO: 14623 - RNA, 22 nt, Homo sapiens
cuuccauauucuaggacaggcu

SEQ ID NO: 14624 - RNA, 22 nt, Homo sapiens
cuaggugauccacugcucucuu

SEQ ID NO: 14625 - RNA, 22 nt, Homo sapiens
caguucaugguaggcaccauag

SEQ ID NO: 14626 - RNA, 22 nt, Homo sapiens
ugagguugguauuacugucucu

SEQ ID NO: 14627 - RNA, 22 nt, Homo sapiens
uguuaucauuacguucuuaguu

SEQ ID NO: 14628 - RNA, 22 nt, Homo sapiens
uucucaguaauuccagauuuuu

SEQ ID NO: 14629 - RNA, 22 nt, Homo sapiens
uucauagugaaaaauucaaagu

SEQ ID NO: 14630 - RNA, 22 nt, Homo sapiens
uucauaguuuauacugauauuu

SEQ ID NO: 14631 - RNA, 22 nt, Homo sapiens
uuccauagucauagugcugaug

SEQ ID NO: 14632 - RNA, 22 nt, Homo sapiens
uugugguagugaaugagucuca

SEQ ID NO: 14633 - RNA, 22 nt, Homo sapiens
agcuucauuguuaugaauguca

SEQ ID NO: 14634 - RNA, 22 nt, Homo sapiens
augcuguuuuguagcucccucu

SEQ ID NO: 14635 - RNA, 22 nt, Homo sapiens
aauuaguuggcugccuaugauu

SEQ ID NO: 14636 - RNA, 22 nt, Homo sapiens
aauuaguugaaagucugcuuuu

SEQ ID NO: 14637 - RNA, 22 nt, Homo sapiens
aaguaguuaggaacauucucuc

SEQ ID NO: 14638 - RNA, 21 nt, Homo sapiens
acugauguuugaaauucgcug

SEQ ID NO: 14639 - RNA, 22 nt, Homo sapiens
cuguaguuagcagaugaugaau

SEQ ID NO: 14640 - RNA, 22 nt, Homo sapiens
gagaaccuccagcaagguagua

SEQ ID NO: 14641 - RNA, 22 nt, Homo sapiens
gaguucauaucuaugagugugc

SEQ ID NO: 14642 - RNA, 18 nt, Homo sapiens
gauguaguauggugugga

SEQ ID NO: 14643 - RNA, 22 nt, Homo sapiens
auuguaguacauuuggugguca

SEQ ID NO: 14644 - RNA, 22 nt, Homo sapiens
gugcaguuuuaagugaguuucu

SEQ ID NO: 14645 - RNA, 22 nt, Homo sapiens
gcuguaguugaggauuuuaaga

SEQ ID NO: 14646 - RNA, 19 nt, Homo sapiens
uaucaaguaugcacuguac

SEQ ID NO: 14647 - RNA, 22 nt, Homo sapiens
uagguucuccacagguucucca

SEQ ID NO: 14648 - RNA, 22 nt, Homo sapiens
uaguucauuuuucuugcuuaga

SEQ ID NO: 14649 - RNA, 22 nt, Homo sapiens
uaguugcauucaggauaugacg

SEQ ID NO: 14650 - RNA, 22 nt, Homo sapiens
uacauagucuucuuuugguuau

SEQ ID NO: 14651 - RNA, 22 nt, Homo sapiens
uccauagugagcagucaaugua

SEQ ID NO: 14652 - RNA, 18 nt, Homo sapiens
ugaauaguguccccauga

SEQ ID NO: 14653 - RNA, 22 nt, Homo sapiens
ucuguaguuaacagcuucagcu

SEQ ID NO: 14654 - RNA, 22 nt, Homo sapiens
ugagacugaguuuugcucguug

SEQ ID NO: 14655 - RNA, 22 nt, Homo sapiens
ugaguucaauuguauuuuauua

SEQ ID NO: 14656 - RNA, 22 nt, Homo sapiens
uggcaguuuacaaaugccauga

SEQ ID NO: 14657 - RNA, 22 nt, Homo sapiens
uugugguaggcauguaagauga

SEQ ID NO: 14658 - RNA, 22 nt, Homo sapiens
uucauccccuccaaaucucaug

SEQ ID NO: 14659 - RNA, 18 nt, Homo sapiens
uucauaguagcaugauuu

SEQ ID NO: 14660 - RNA, 22 nt, Homo sapiens
uuauguaggcuauagcucugca

SEQ ID NO: 14661 - RNA, 21 nt, Homo sapiens
ugucaguuuccagaguucaac

SEQ ID NO: 14662 - RNA, 22 nt, Homo sapiens
ugucaguuucuugagauggaac

SEQ ID NO: 14663 - RNA, 22 nt, Homo sapiens
ugucuaguuuugaaguauagca

SEQ ID NO: 14664 - RNA, 22 nt, Homo sapiens
gucucagugcgaaucucaaaga

SEQ ID NO: 14665 - RNA, 22 nt, Homo sapiens
ggcaguuuguuugugaggucca

SEQ ID NO: 14666 - RNA, 22 nt, Homo sapiens
guugcagaguucuuccuccuga

SEQ ID NO: 14667 - RNA, 22 nt, Homo sapiens
uaucauggggacugcagccuag

SEQ ID NO: 14668 - RNA, 22 nt, Homo sapiens
uaguaucacauggucuuaauua

SEQ ID NO: 14669 - RNA, 18 nt, Homo sapiens
uagugcuguucucaugau

SEQ ID NO: 14670 - RNA, 22 nt, Homo sapiens
uaguuauggaguaauuuuaagc

SEQ ID NO: 14671 - RNA, 22 nt, Homo sapiens
uaguucauuauguguugcucag

SEQ ID NO: 14672 - RNA, 22 nt, Homo sapiens
uaguugcauuggcugcuaugcu

SEQ ID NO: 14673 - RNA, 22 nt, Homo sapiens
gaguucauuuugaaaccuugau

SEQ ID NO: 14674 - RNA, 22 nt, Homo sapiens
uugaggguggcauauauugauu

SEQ ID NO: 14675 - RNA, 22 nt, Homo sapiens
uugugauggugcauacugagcu

SEQ ID NO: 14676 - RNA, 22 nt, Homo sapiens
ugagacugguaauguguagggc

SEQ ID NO: 14677 - RNA, 22 nt, Homo sapiens
ugagacugguuaauugauaaag

SEQ ID NO: 14678 - RNA, 22 nt, Homo sapiens
ucccuuaaugaugaacaaugag

SEQ ID NO: 14679 - RNA, 22 nt, Homo sapiens
agcaagaaugaacucucccaga

SEQ ID NO: 14680 - RNA, 22 nt, Homo sapiens
aguugcaagucuugaguaaaga

SEQ ID NO: 14681 - RNA, 22 nt, Homo sapiens
aauauugucaaaauggauucca

SEQ ID NO: 14682 - RNA, 22 nt, Homo sapiens
auaauaguguuuagauuuggga

SEQ ID NO: 14683 - RNA, 22 nt, Homo sapiens
agguuguguuugugauuagaua

SEQ ID NO: 14684 - RNA, 22 nt, Homo sapiens
aguuuugguugaguuacuagca

SEQ ID NO: 14685 - RNA, 22 nt, Homo sapiens
augagacuguucuuccucauug

SEQ ID NO: 14686 - RNA, 22 nt, Homo sapiens
augcagugugcaacagauuaag

SEQ ID NO: 14687 - RNA, 22 nt, Homo sapiens
auggaauggcacuuugaagauu

SEQ ID NO: 14688 - RNA, 22 nt, Homo sapiens
auggaaugccauuuauaaugga

SEQ ID NO: 14689 - RNA, 22 nt, Homo sapiens
augggguagguagcucggggaa

SEQ ID NO: 14690 - RNA, 22 nt, Homo sapiens
auguaguugcucugccuguuuu

SEQ ID NO: 14691 - RNA, 22 nt, Homo sapiens
cucagucuaugauacuuugcua

SEQ ID NO: 14692 - RNA, 22 nt, Homo sapiens
cuguguaguacuagauugagca

SEQ ID NO: 14693 - RNA, 22 nt, Homo sapiens
cugggcaaugcggcuggauaga

SEQ ID NO: 14694 - RNA, 22 nt, Homo sapiens
gauaguugugagaacucuuacu

SEQ ID NO: 14695 - RNA, 22 nt, Homo sapiens
gaugcaguaagaaugcauagcg

SEQ ID NO: 14696 - RNA, 20 nt, Homo sapiens
gcaugagucuuuauaguaga

SEQ ID NO: 14697 - RNA, 22 nt, Homo sapiens
uaucauagucacuuccaguuug

SEQ ID NO: 14698 - RNA, 22 nt, Homo sapiens
uaguaguuuuguguauaauaau

SEQ ID NO: 14699 - RNA, 22 nt, Homo sapiens
uagucccauaugauuuagugaa

SEQ ID NO: 14700 - RNA, 17 nt, Homo sapiens
uauguaguacuuauaaa

SEQ ID NO: 14701 - RNA, 19 nt, Homo sapiens
uauguaguugucaagggag

SEQ ID NO: 14702 - RNA, 19 nt, Homo sapiens
uauguaguuuucucaauau

SEQ ID NO: 14703 - RNA, 22 nt, Homo sapiens
uaauaguuucagaaguuguuuu

SEQ ID NO: 14704 - RNA, 22 nt, Homo sapiens
guucagucacgugcccaaguuc

SEQ ID NO: 14705 - RNA, 22 nt, Homo sapiens
guaauagucucaaacuccugga

SEQ ID NO: 14706 - RNA, 22 nt, Homo sapiens
ggaguucaucaggugaggggua

SEQ ID NO: 14707 - RNA, 22 nt, Homo sapiens
ggaagccuggaaaaaauuguga

SEQ ID NO: 14708 - RNA, 22 nt, Homo sapiens
ugaagugaagacucacagaagg

SEQ ID NO: 14709 - RNA, 22 nt, Homo sapiens
ucuuaguuggaaugggauaagg

SEQ ID NO: 14710 - RNA, 22 nt, Homo sapiens
ucuuaguuugggguggggauag

SEQ ID NO: 14711 - RNA, 22 nt, Homo sapiens
uggcaguuucauaugguucaac

SEQ ID NO: 14712 - RNA, 22 nt, Homo sapiens
uggcaguuuuaugugguucaac

SEQ ID NO: 14713 - RNA, 22 nt, Homo sapiens
uggcaguuuuugccuucaauac

SEQ ID NO: 14714 - RNA, 22 nt, Homo sapiens
ugauguaggcauuuaagguuau

SEQ ID NO: 14715 - RNA, 23 nt, Homo sapiens
ugcauaguacccaauacuuuauc

SEQ ID NO: 14716 - RNA, 22 nt, Homo sapiens
uuacagucucaagagugcugca

SEQ ID NO: 14717 - RNA, 23 nt, Homo sapiens
uuuguaguagcaugauuuauaau

SEQ ID NO: 14718 - RNA, 22 nt, Homo sapiens
uugauguaggcauucaaggcua

SEQ ID NO: 14719 - RNA, 22 nt, Homo sapiens
uuagguacuuuggagagauuca

SEQ ID NO: 14720 - RNA, 22 nt, Homo sapiens
ugauaagugaaagugcucuauc

SEQ ID NO: 14721 - RNA, 22 nt, Homo sapiens
uccugcauucauccugguguug

SEQ ID NO: 14722 - RNA, 22 nt, Homo sapiens
guaagucucaugagaucugaug

SEQ ID NO: 14723 - RNA, 19 nt, Homo sapiens
ggucacagggguuacaagg

SEQ ID NO: 14724 - RNA, 22 nt, Homo sapiens
uaagucuuuuuggaguuuauaa

SEQ ID NO: 14725 - RNA, 22 nt, Homo sapiens
auugcacaucugcacuacagcc

SEQ ID NO: 14726 - RNA, 22 nt, Homo sapiens
auaagucaauggaacagauuaa

SEQ ID NO: 14727 - RNA, 22 nt, Homo sapiens
auacagcuaaaauauuaaguua

SEQ ID NO: 14728 - RNA, 22 nt, Homo sapiens
uggaagucauugagguguguua

SEQ ID NO: 14729 - RNA, 22 nt, Homo sapiens
uggaugacuguuauaugcauau

SEQ ID NO: 14730 - RNA, 22 nt, Homo sapiens
uguuuaguuaagacauagaauu

SEQ ID NO: 14731 - RNA, 22 nt, Homo sapiens
cauugucccucaaugucuauga

SEQ ID NO: 14732 - RNA, 17 nt, Homo sapiens
cuaaggcaagagucugc

SEQ ID NO: 14733 - RNA, 22 nt, Homo sapiens
cagcaaaucauccuauuugagc

SEQ ID NO: 14734 - RNA, 22 nt, Homo sapiens
uauaucuguccauggcccugcu

SEQ ID NO: 14735 - RNA, 22 nt, Homo sapiens
uacugcaucuacuuagagccag

SEQ ID NO: 14736 - RNA, 22 nt, Homo sapiens
uaagcuguguggacuaugccuc

SEQ ID NO: 14737 - RNA, 22 nt, Homo sapiens
uguaugucuucuuuagauaagu

SEQ ID NO: 14738 - RNA, 22 nt, Homo sapiens
uuacugcauaauuccugggaag

SEQ ID NO: 14739 - RNA, 22 nt, Homo sapiens
uugucucacuggaguuuaguaa

SEQ ID NO: 14740 - RNA, 22 nt, Homo sapiens
ugagauaacuaaaaacauuuug

SEQ ID NO: 14741 - RNA, 23 nt, Homo sapiens
uacugcauccuccgccucuaggg

SEQ ID NO: 14742 - RNA, 20 nt, Homo sapiens
uaacuguggcuucuuuuggc

SEQ ID NO: 14743 - RNA, 22 nt, Homo sapiens
uaagacuguuggcaauuuuugc

SEQ ID NO: 14744 - RNA, 22 nt, Homo sapiens
uagguucucaggaaugagcuuc

SEQ ID NO: 14745 - RNA, 22 nt, Homo sapiens
uaguggauguucagagauuuga

SEQ ID NO: 14746 - RNA, 22 nt, Homo sapiens
cuuuggugagggauaaauuuca

SEQ ID NO: 14747 - RNA, 22 nt, Homo sapiens
uuugaguuugaggugcugauga

SEQ ID NO: 14748 - RNA, 22 nt, Homo sapiens
uuauaguuuuucaccuggagaa

SEQ ID NO: 14749 - RNA, 22 nt, Homo sapiens
uuaccacagugccugucuaaug

SEQ ID NO: 14750 - RNA, 22 nt, Homo sapiens
ugugcugaucgggcacgguguc

SEQ ID NO: 14751 - RNA, 22 nt, Homo sapiens
ucauuguccaacuucuuucagu

SEQ ID NO: 14752 - RNA, 22 nt, Homo sapiens
cuuugguggagucuuuagguuc

SEQ ID NO: 14753 - RNA, 22 nt, Homo sapiens
uacaggaaugucagguugcugu

SEQ ID NO: 14754 - RNA, 22 nt, Homo sapiens
uaauacugcugugcuugaguug

SEQ ID NO: 14755 - RNA, 22 nt, Homo sapiens
uaaugcauacagaagguguuuu

SEQ ID NO: 14756 - RNA, 22 nt, Homo sapiens
aaagucuguuuugucagagacu

SEQ ID NO: 14757 - RNA, 22 nt, Homo sapiens
aggaagugugcaauuaauuucu

SEQ ID NO: 14758 - RNA, 22 nt, Homo sapiens
auacccauacauauuggugacu

SEQ ID NO: 14759 - RNA, 22 nt, Homo sapiens
agucaagugguuucugaguugg

SEQ ID NO: 14760 - RNA, 22 nt, Homo sapiens
uagcaguaaagaaugugauguu

SEQ ID NO: 14761 - RNA, 22 nt, Homo sapiens
uaucaguauggauucauggauu

SEQ ID NO: 14762 - RNA, 22 nt, Homo sapiens
ucagugacugcugcuuguauac

SEQ ID NO: 14763 - RNA, 22 nt, Homo sapiens
ugacaugauuguauauuuagaa

SEQ ID NO: 14764 - RNA, 22 nt, Homo sapiens
uguaacaggaggaaaaugugaa

SEQ ID NO: 14765 - RNA, 22 nt, Homo sapiens
cucaauuuggaauugucaguaa

SEQ ID NO: 14766 - RNA, 23 nt, Homo sapiens
agagugcaauggugccaucucgg

SEQ ID NO: 14767 - RNA, 20 nt, Homo sapiens
agcaucguuguguuauagcc

SEQ ID NO: 14768 - RNA, 17 nt, Homo sapiens
agucaguaguuuguauu

SEQ ID NO: 14769 - RNA, 22 nt, Homo sapiens
agucaguguguauugauggcac

SEQ ID NO: 14770 - RNA, 22 nt, Homo sapiens
uaaagccagugauuaugucucu

SEQ ID NO: 14771 - RNA, 22 nt, Homo sapiens
uaacagcauuugugucuaguag

SEQ ID NO: 14772 - RNA, 22 nt, Homo sapiens
guaacagucucaacaguggucu

SEQ ID NO: 14773 - RNA, 22 nt, Homo sapiens
uugagauacauaauuaugaaug

SEQ ID NO: 14774 - RNA, 22 nt, Homo sapiens
uugagauaggaacucacuaugc

SEQ ID NO: 14775 - RNA, 22 nt, Homo sapiens
aaauccauuuguucagcuaugc

SEQ ID NO: 14776 - RNA, 22 nt, Homo sapiens
aguaaacuucagaguucuuccu

SEQ ID NO: 14777 - RNA, 22 nt, Homo sapiens
acaguagaaaacaauggauuug

SEQ ID NO: 14778 - RNA, 22 nt, Homo sapiens
gauaaaguauuggguacuaugc

SEQ ID NO: 14779 - RNA, 22 nt, Homo sapiens
ugagaauauuugaagauguuag

SEQ ID NO: 14780 - RNA, 22 nt, Homo sapiens
ugcauccauucuagacucaucu

SEQ ID NO: 14781 - RNA, 22 nt, Homo sapiens
uccuucaguccaguggguuuug

SEQ ID NO: 14782 - RNA, 22 nt, Homo sapiens
uccacuuuugugcugaauugga

SEQ ID NO: 14783 - RNA, 22 nt, Homo sapiens
ucuuuggugaauggucauccag

SEQ ID NO: 14784 - RNA, 22 nt, Homo sapiens
ucuuugguuucugucucuguaa

SEQ ID NO: 14785 - RNA, 22 nt, Homo sapiens
ugacuauaggauaacaugcauu

SEQ ID NO: 14786 - RNA, 22 nt, Homo sapiens
ugacuauaguaaucacuucaca

SEQ ID NO: 14787 - RNA, 22 nt, Homo sapiens
ugacuauaguuuucuugacaca

SEQ ID NO: 14788 - RNA, 22 nt, Homo sapiens
guaauacuuuugggauauuaga

SEQ ID NO: 14789 - RNA, 22 nt, Homo sapiens
gcagucacagggagauggugac

SEQ ID NO: 14790 - RNA, 22 nt, Homo sapiens
gauuuuuggggaagccucuuau

SEQ ID NO: 14791 - RNA, 22 nt, Homo sapiens
cuggcucugagguguuuagggc

SEQ ID NO: 14792 - RNA, 22 nt, Homo sapiens
cuuggcuucuuuauguggcuau

SEQ ID NO: 14793 - RNA, 22 nt, Homo sapiens
auugaguaacaauuuuguucaa

SEQ ID NO: 14794 - RNA, 22 nt, Homo sapiens
auuuggguaaugagugcaaggg

SEQ ID NO: 14795 - RNA, 23 nt, Homo sapiens
ccuguagaaugucugugauacuu

SEQ ID NO: 14796 - RNA, 22 nt, Homo sapiens
ccuugguugugcuucaacuucu

SEQ ID NO: 14797 - RNA, 22 nt, Homo sapiens
acuacauaugacaucuucuuua

SEQ ID NO: 14798 - RNA, 22 nt, Homo sapiens
aaugacuaagaugguacauuuu

SEQ ID NO: 14799 - RNA, 22 nt, Homo sapiens
acuuugguuuauagaauuuagg

SEQ ID NO: 14800 - RNA, 22 nt, Homo sapiens
agcuggucugauacuuaccucc

SEQ ID NO: 14801 - RNA, 22 nt, Homo sapiens
auaucaaggccauuuucuaaau

SEQ ID NO: 14802 - RNA, 22 nt, Homo sapiens
auguaauugagguuuuugccau

SEQ ID NO: 14803 - RNA, 22 nt, Homo sapiens
uucguuuguaauccuuacagca

SEQ ID NO: 14804 - RNA, 22 nt, Homo sapiens
uucugcuugaucuaguguguug

SEQ ID NO: 14805 - RNA, 22 nt, Homo sapiens
uugccgggugcaguggcucaug

SEQ ID NO: 14806 - RNA, 22 nt, Homo sapiens
uuggaauuaaccuggugcugga

SEQ ID NO: 14807 - RNA, 22 nt, Homo sapiens
uugaguuugaguauucuaaagc

SEQ ID NO: 14808 - RNA, 22 nt, Homo sapiens
uuggacuucuaacugacaugga

SEQ ID NO: 14809 - RNA, 22 nt, Homo sapiens
uuggauugugaaaguauucucu

SEQ ID NO: 14810 - RNA, 20 nt, Homo sapiens
uuuguaucucuggguacugg

SEQ ID NO: 14811 - RNA, 22 nt, Homo sapiens
uuuguacucccuuuagauaaaa

SEQ ID NO: 14812 - RNA, 23 nt, Homo sapiens
uuuguacuaugucaguuuagaua

SEQ ID NO: 14813 - RNA, 22 nt, Homo sapiens
uuuggcacuguaaauuucucuu

SEQ ID NO: 14814 - RNA, 22 nt, Homo sapiens
aaaugcacgcuacccagcuaga

SEQ ID NO: 14815 - RNA, 22 nt, Homo sapiens
aaaugcagucuuuguucugggc

SEQ ID NO: 14816 - RNA, 22 nt, Homo sapiens
acauacuucuuuacauuccaua

SEQ ID NO: 14817 - RNA, 22 nt, Homo sapiens
auggcccugaguucaauauauu

SEQ ID NO: 14818 - RNA, 22 nt, Homo sapiens
uugagauggagucucacucuug

SEQ ID NO: 14819 - RNA, 22 nt, Homo sapiens
uugagauggagucucgcucuuu

SEQ ID NO: 14820 - RNA, 22 nt, Homo sapiens
uugagauggaguuucacucuug

SEQ ID NO: 14821 - RNA, 22 nt, Homo sapiens
uugagauggaguuucgcucuuu

SEQ ID NO: 14822 - RNA, 22 nt, Homo sapiens
uugaacuagaaccugcaaauuu

SEQ ID NO: 14823 - RNA, 22 nt, Homo sapiens
uuauuugguugcugacuuggaa

SEQ ID NO: 14824 - RNA, 22 nt, Homo sapiens
uuuaauacugcaucuuuacucu

SEQ ID NO: 14825 - RNA, 22 nt, Homo sapiens
uugauacuagagucuuucugac

SEQ ID NO: 14826 - RNA, 22 nt, Homo sapiens
uuggacugugagguuucguggg

SEQ ID NO: 14827 - RNA, 22 nt, Homo sapiens
uugggagugucucuggacugca

SEQ ID NO: 14828 - RNA, 22 nt, Homo sapiens
uuuggacuucuagccuccagag

SEQ ID NO: 14829 - RNA, 22 nt, Homo sapiens
uuuguacuucauugguucuacu

SEQ ID NO: 14830 - RNA, 22 nt, Homo sapiens
uuuguacuugguguucuggaaa

SEQ ID NO: 14831 - RNA, 22 nt, Homo sapiens
uuuugccggcauguugggcuuc

SEQ ID NO: 14832 - RNA, 22 nt, Homo sapiens
uuuuuuaguuagcugggcauga

SEQ ID NO: 14833 - RNA, 22 nt, Homo sapiens
aagcuagugagacagugguacu

SEQ ID NO: 14834 - RNA, 23 nt, Homo sapiens
ugcucgguguugacagucacauc

SEQ ID NO: 14835 - RNA, 22 nt, Homo sapiens
uccuacaugcaguacauucaaa

SEQ ID NO: 14836 - RNA, 18 nt, Homo sapiens
ucuagacacugugucuau

SEQ ID NO: 14837 - RNA, 22 nt, Homo sapiens
ucucuuggcggaaguugcagug

SEQ ID NO: 14838 - RNA, 22 nt, Homo sapiens
ucuguugguucuuugaggagga

SEQ ID NO: 14839 - RNA, 22 nt, Homo sapiens
ucuugcuuuugcagagcuucuc

SEQ ID NO: 14840 - RNA, 22 nt, Homo sapiens
ucuuggguuuguccuucuccua

SEQ ID NO: 14841 - RNA, 17 nt, Homo sapiens
ucuugugguucuugaau

SEQ ID NO: 14842 - RNA, 22 nt, Homo sapiens
ugagacugaguuuugcucuugu

SEQ ID NO: 14843 - RNA, 22 nt, Homo sapiens
ugagacugagucuugcucuugu

SEQ ID NO: 14844 - RNA, 17 nt, Homo sapiens
ugaggcacuaguaucac

SEQ ID NO: 14845 - RNA, 23 nt, Homo sapiens
guaauacuagucauaguagcagg

SEQ ID NO: 14846 - RNA, 22 nt, Homo sapiens
guauacuucugaaaauagcuau

SEQ ID NO: 14847 - RNA, 22 nt, Homo sapiens
guaucauugccuaaugcucuca

SEQ ID NO: 14848 - RNA, 22 nt, Homo sapiens
guuuugguuauauggaucaguu

SEQ ID NO: 14849 - RNA, 20 nt, Homo sapiens
uaguuggugauacagugcau

SEQ ID NO: 14850 - RNA, 21 nt, Homo sapiens
cucucugcuuaugaauaguga

SEQ ID NO: 14851 - RNA, 22 nt, Homo sapiens
gaggcagucuguccauucucag

SEQ ID NO: 14852 - RNA, 22 nt, Homo sapiens
augcaauucuagauugauagua

SEQ ID NO: 14853 - RNA, 22 nt, Homo sapiens
augacauugaaaagcaagugga

SEQ ID NO: 14854 - RNA, 22 nt, Homo sapiens
cuacaguaugaaaccuuuacuc

SEQ ID NO: 14855 - RNA, 22 nt, Homo sapiens
cuuggguugauugauaaugcca

SEQ ID NO: 14856 - RNA, 22 nt, Homo sapiens
gagauaguguggguacagcuau

SEQ ID NO: 14857 - RNA, 18 nt, Homo sapiens
cagugcaauacaggagag

SEQ ID NO: 14858 - RNA, 21 nt, Homo sapiens
uagcauacauuuugcaucuua

SEQ ID NO: 14859 - RNA, 22 nt, Homo sapiens
uaucucuguggguagugcugaa

SEQ ID NO: 14860 - RNA, 22 nt, Homo sapiens
uaugacuuuggaaaaauuacuu

SEQ ID NO: 14861 - RNA, 22 nt, Homo sapiens
uauggccccuacaugugcaaaa

SEQ ID NO: 14862 - RNA, 22 nt, Homo sapiens
uauggcccuuaaguauugguug

SEQ ID NO: 14863 - RNA, 22 nt, Homo sapiens
guuugguugcauggaaaauuua

SEQ ID NO: 14864 - RNA, 22 nt, Homo sapiens
guuggaguuaagcaguaaugaa

SEQ ID NO: 14865 - RNA, 22 nt, Homo sapiens
gcugcuuuugaugacaaaaaca

SEQ ID NO: 14866 - RNA, 22 nt, Homo sapiens
gcuuuuggaggaacuuaagauu

SEQ ID NO: 14867 - RNA, 22 nt, Homo sapiens
ggugauguuugaguugagacag

SEQ ID NO: 14868 - RNA, 19 nt, Homo sapiens
ggugcuugaauauuccucc

SEQ ID NO: 14869 - RNA, 22 nt, Homo sapiens
gugggguagcaggcuccuaucu

SEQ ID NO: 14870 - RNA, 22 nt, Homo sapiens
ugagacugaguuuugcucguug

SEQ ID NO: 14871 - RNA, 22 nt, Homo sapiens
ugagacugaguuuccaucuugu

SEQ ID NO: 14872 - RNA, 22 nt, Homo sapiens
ugcuggugucaucaaggcuuug

SEQ ID NO: 14873 - RNA, 22 nt, Homo sapiens
ucugggguuuccacuuuuacuu

SEQ ID NO: 14874 - RNA, 22 nt, Homo sapiens
ucuuggguuugccuugcugcug

SEQ ID NO: 14875 - RNA, 22 nt, Homo sapiens
ucuuggguggauucauucuuuc

SEQ ID NO: 14876 - RNA, 22 nt, Homo sapiens
ucuuggguuguuggcuucuccu

SEQ ID NO: 14877 - RNA, 22 nt, Homo sapiens
uugagauggaguuucgcucuug

SEQ ID NO: 14878 - RNA, 20 nt, Homo sapiens
uuacuauguaguauuggcuc

SEQ ID NO: 14879 - RNA, 22 nt, Homo sapiens
ugucuggaaggguggccuccug

SEQ ID NO: 14880 - RNA, 22 nt, Homo sapiens
ugguguuugagaagcugauguc

SEQ ID NO: 14881 - RNA, 22 nt, Homo sapiens
uuuuggcucugucuguaucuuu

SEQ ID NO: 14882 - RNA, 22 nt, Homo sapiens
uuuugguauacacaaggguccu

SEQ ID NO: 14883 - RNA, 22 nt, Homo sapiens
uuuugguguacaauucuaugga

SEQ ID NO: 14884 - RNA, 22 nt, Homo sapiens
uuuugguuaggauggguggcau

SEQ ID NO: 14885 - RNA, 19 nt, Homo sapiens
uuuuguacucugugacuug

SEQ ID NO: 14886 - RNA, 22 nt, Homo sapiens
ugugucuugaauuuuguaugua

SEQ ID NO: 14887 - RNA, 22 nt, Homo sapiens
ugugucuugcuggugccugcau

SEQ ID NO: 14888 - RNA, 19 nt, Homo sapiens
uucucugguuguacuaccc

SEQ ID NO: 14889 - RNA, 19 nt, Homo sapiens
uuggcccugguucucuucu

SEQ ID NO: 14890 - RNA, 22 nt, Homo sapiens
uugcccuuuagguaacuauaua

SEQ ID NO: 14891 - RNA, 22 nt, Homo sapiens
uugcugguuuucauaugagcag

SEQ ID NO: 14892 - RNA, 22 nt, Homo sapiens
ucuuugguaugugcaugugcuu

SEQ ID NO: 14893 - RNA, 22 nt, Homo sapiens
uccuuugguggagucuuuaggg

SEQ ID NO: 14894 - RNA, 22 nt, Homo sapiens
uaugacuuuugaauacagaugg

SEQ ID NO: 14895 - RNA, 22 nt, Homo sapiens
uauggcacacguuuaccuaugu

SEQ ID NO: 14896 - RNA, 22 nt, Homo sapiens
uacuacuuucugacaucuuuaa

SEQ ID NO: 14897 - RNA, 22 nt, Homo sapiens
uacucugcaguaauuccagccc

SEQ ID NO: 14898 - RNA, 22 nt, Homo sapiens
cuuuggugagggauaaauuuca

SEQ ID NO: 14899 - RNA, 22 nt, Homo sapiens
cuuugguucuguuuauaugcug

SEQ ID NO: 14900 - RNA, 22 nt, Homo sapiens
cuugguacucugugucccagcu

SEQ ID NO: 14901 - RNA, 22 nt, Homo sapiens
cuguuugguuaucuuuuccugu

SEQ ID NO: 14902 - RNA, 22 nt, Homo sapiens
auuguguagucuuacugcuugc

SEQ ID NO: 14903 - RNA, 22 nt, Homo sapiens
auuuggguuuuacaucaggcua

SEQ ID NO: 14904 - RNA, 22 nt, Homo sapiens
augcaugucaaauuuguagguu

SEQ ID NO: 14905 - RNA, 22 nt, Homo sapiens
uuacaguaugaguaagaguucu

SEQ ID NO: 14906 - RNA, 22 nt, Homo sapiens
uggcuguguccucucccaaauc

SEQ ID NO: 14907 - RNA, 18 nt, Homo sapiens
uuuacaguagaaggacuu

SEQ ID NO: 14908 - RNA, 22 nt, Homo sapiens
cuuuacaguuggacucacgagg

SEQ ID NO: 14909 - RNA, 22 nt, Homo sapiens
ucauguguugcacugaggaccu

SEQ ID NO: 14910 - RNA, 22 nt, Homo sapiens
uuuacagucucauagguggaag

SEQ ID NO: 14911 - RNA, 22 nt, Homo sapiens
ggcuguguguuaaaauaggcuu

SEQ ID NO: 14912 - RNA, 22 nt, Homo sapiens
uuacaguagaugaggguauaau

SEQ ID NO: 14913 - RNA, 22 nt, Homo sapiens
uuuacaguuuucuaggcuacca

SEQ ID NO: 14914 - RNA, 22 nt, Homo sapiens
ugugggugguaaaauacaauga

SEQ ID NO: 14915 - RNA, 18 nt, Homo sapiens
uguggcuguuuuccaaua

SEQ ID NO: 14916 - RNA, 22 nt, Homo sapiens
uguggcugguggcaccuuuucc

SEQ ID NO: 14917 - RNA, 22 nt, Homo sapiens
guguaugugagaaugcucaugu

SEQ ID NO: 14918 - RNA, 22 nt, Homo sapiens
uucuguguuuaggucacggcua

SEQ ID NO: 14919 - RNA, 22 nt, Homo sapiens
acaguauaaugcuguagggaga

SEQ ID NO: 14920 - RNA, 22 nt, Homo sapiens
uacaguauuaugagugauugaa

SEQ ID NO: 14921 - RNA, 22 nt, Homo sapiens
uuuacagucuuuugugugaguc

SEQ ID NO: 14922 - RNA, 22 nt, Homo sapiens
uaugcaugucucuguacacgug

SEQ ID NO: 14923 - RNA, 22 nt, Homo sapiens
uuucugugguccucuugaaggu

SEQ ID NO: 14924 - RNA, 22 nt, Homo sapiens
uuacaguauugcaaggacuagg

SEQ ID NO: 14925 - RNA, 22 nt, Homo sapiens
gcuguguguuaucagaaauugc

SEQ ID NO: 14926 - RNA, 22 nt, Homo sapiens
ugaguguguaugugcauacaca

SEQ ID NO: 14927 - RNA, 22 nt, Homo sapiens
acuguguguuugucuagcacag

SEQ ID NO: 14928 - RNA, 23 nt, Homo sapiens
uuuugcaauaagucacuggaaua

SEQ ID NO: 14929 - RNA, 22 nt, Homo sapiens
uuugagcuugacucagcuggag

SEQ ID NO: 14930 - RNA, 22 nt, Homo sapiens
uuuaaagcuaaaauauguuuau

SEQ ID NO: 14931 - RNA, 22 nt, Homo sapiens
uuuguaauccuauuccaaagga

SEQ ID NO: 14932 - RNA, 22 nt, Homo sapiens
uuguacuagucauauuuugaaa

SEQ ID NO: 14933 - RNA, 22 nt, Homo sapiens
uugugaaugaugccgcaauaaa

SEQ ID NO: 14934 - RNA, 22 nt, Homo sapiens
uugugaauggugccacaauaaa

SEQ ID NO: 14935 - RNA, 22 nt, Homo sapiens
uugugaaugaugucgcaauaaa

SEQ ID NO: 14936 - RNA, 22 nt, Homo sapiens
uugcaugguggaacuuggagcu

SEQ ID NO: 14937 - RNA, 22 nt, Homo sapiens
uuacaguaugaguaagaguucu

SEQ ID NO: 14938 - RNA, 22 nt, Homo sapiens
uuaaaguguuuucaaaauguca

SEQ ID NO: 14939 - RNA, 22 nt, Homo sapiens
uguuugcuuaacguggagccag

SEQ ID NO: 14940 - RNA, 22 nt, Homo sapiens
uguuacagugacuaauguuuua

SEQ ID NO: 14941 - RNA, 22 nt, Homo sapiens
uguuaugaagaugccugguaca

SEQ ID NO: 14942 - RNA, 22 nt, Homo sapiens
ugugacagcacagcaucucuuu

SEQ ID NO: 14943 - RNA, 22 nt, Homo sapiens
auguauacaugcaggucacagg

SEQ ID NO: 14944 - RNA, 22 nt, Homo sapiens
auggaagcauaguauucuauug

SEQ ID NO: 14945 - RNA, 20 nt, Homo sapiens
augccacugagcagugguga

SEQ ID NO: 14946 - RNA, 22 nt, Homo sapiens
augauacuggcuucauagaaug

SEQ ID NO: 14947 - RNA, 22 nt, Homo sapiens
augagcagaugcuccugccucu

SEQ ID NO: 14948 - RNA, 22 nt, Homo sapiens
augagauauuuuauaagaucau

SEQ ID NO: 14949 - RNA, 22 nt, Homo sapiens
auauauguuuucugggaagaaa

SEQ ID NO: 14950 - RNA, 22 nt, Homo sapiens
auagcacugguuuuucuugguu

SEQ ID NO: 14951 - RNA, 22 nt, Homo sapiens
auagcacuuauagauuuggucu

SEQ ID NO: 14952 - RNA, 21 nt, Homo sapiens
auagcacuucacuugguuaga

SEQ ID NO: 14953 - RNA, 22 nt, Homo sapiens
auagcagcaccccacuaccuca

SEQ ID NO: 14954 - RNA, 22 nt, Homo sapiens
auagcagcaccucacucuacug

SEQ ID NO: 14955 - RNA, 22 nt, Homo sapiens
auagcagcagcuaguagugaua

SEQ ID NO: 14956 - RNA, 22 nt, Homo sapiens
auaguagcaugaaacagccauu

SEQ ID NO: 14957 - RNA, 22 nt, Homo sapiens
auauagcaaugaaagagaugaa

SEQ ID NO: 14958 - RNA, 22 nt, Homo sapiens
aucacaggucaaaucauuauuu

SEQ ID NO: 14959 - RNA, 22 nt, Homo sapiens
agguauuuuuuauccuccagca

SEQ ID NO: 14960 - RNA, 22 nt, Homo sapiens
agguuuucagccccagccuagg

SEQ ID NO: 14961 - RNA, 22 nt, Homo sapiens
auaaacagcuuauccucuauuc

SEQ ID NO: 14962 - RNA, 22 nt, Homo sapiens
agcuuuuugggcagcuauugac

SEQ ID NO: 14963 - RNA, 22 nt, Homo sapiens
agcuaaaucucauguugaauug

SEQ ID NO: 14964 - RNA, 23 nt, Homo sapiens
agcuagagaggcuggggauacag

SEQ ID NO: 14965 - RNA, 22 nt, Homo sapiens
agcuagcauucauaguuugagg

SEQ ID NO: 14966 - RNA, 22 nt, Homo sapiens
acugccuaaugacuuauguuuu

SEQ ID NO: 14967 - RNA, 22 nt, Homo sapiens
agcagcaccaaacagacuaaga

SEQ ID NO: 14968 - RNA, 22 nt, Homo sapiens
agcagcauauuuuuauaaugua

SEQ ID NO: 14969 - RNA, 23 nt, Homo sapiens
agccuguugccuaggcagcucau

SEQ ID NO: 14970 - RNA, 22 nt, Homo sapiens
aaucugucuuuuguuauugagg

SEQ ID NO: 14971 - RNA, 22 nt, Homo sapiens
acagaacugggcuugcuuuugg

SEQ ID NO: 14972 - RNA, 22 nt, Homo sapiens
acgcagcacauucacagcuaug

SEQ ID NO: 14973 - RNA, 22 nt, Homo sapiens
acaugcauggcaugcauuguac

SEQ ID NO: 14974 - RNA, 22 nt, Homo sapiens
acccuguaggacuauucuaauc

SEQ ID NO: 14975 - RNA, 22 nt, Homo sapiens
cccaguagagauugccgaauug

SEQ ID NO: 14976 - RNA, 21 nt, Homo sapiens
ccugaagaagugaccucugag

SEQ ID NO: 14977 - RNA, 22 nt, Homo sapiens
ccuggcaagagacugaagauag

SEQ ID NO: 14978 - RNA, 22 nt, Homo sapiens
cuaugagcuuuuuuaagccuca

SEQ ID NO: 14979 - RNA, 22 nt, Homo sapiens
cauguauagauuccauaguggu

SEQ ID NO: 14980 - RNA, 22 nt, Homo sapiens
cauugcacuccagcccuggcaa

SEQ ID NO: 14981 - RNA, 22 nt, Homo sapiens
cauugcacuccagccuagccaa

SEQ ID NO: 14982 - RNA, 22 nt, Homo sapiens
cauugcacuccagccugaccaa

SEQ ID NO: 14983 - RNA, 22 nt, Homo sapiens
cauugcacuccagccugccugg

SEQ ID NO: 14984 - RNA, 20 nt, Homo sapiens
cauugcacuccagccugcug

SEQ ID NO: 14985 - RNA, 22 nt, Homo sapiens
cauugcacuccagccuggcaac

SEQ ID NO: 14986 - RNA, 22 nt, Homo sapiens
cauugcacuccagccuggccaa

SEQ ID NO: 14987 - RNA, 22 nt, Homo sapiens
cauugcacuccagccuuggcaa

SEQ ID NO: 14988 - RNA, 22 nt, Homo sapiens
cauugcacucuaucccgguggg

SEQ ID NO: 14989 - RNA, 22 nt, Homo sapiens
cauugcuaaaagucauauauaa

SEQ ID NO: 14990 - RNA, 22 nt, Homo sapiens
cccagagacagaaugauaaacu

SEQ ID NO: 14991 - RNA, 22 nt, Homo sapiens
auuggcaauguacauaucuugc

SEQ ID NO: 14992 - RNA, 22 nt, Homo sapiens
auugcacaucugcacuacagcc

SEQ ID NO: 14993 - RNA, 22 nt, Homo sapiens
auugcacuccacccugggcaac

SEQ ID NO: 14994 - RNA, 22 nt, Homo sapiens
auugcacuccagcccugcugac

SEQ ID NO: 14995 - RNA, 22 nt, Homo sapiens
auugcacuccagccuaggcaac

SEQ ID NO: 14996 - RNA, 22 nt, Homo sapiens
cagauacuccuggucucaggag

SEQ ID NO: 14997 - RNA, 22 nt, Homo sapiens
cuuuuacacuguuggcaggauu

SEQ ID NO: 14998 - RNA, 22 nt, Homo sapiens
gaaagcugguauagauacauua

SEQ ID NO: 14999 - RNA, 22 nt, Homo sapiens
gaaaugcucagggguuuuccag

SEQ ID NO: 15000 - RNA, 22 nt, Homo sapiens
gaaauguauuaaugaguugaaa

SEQ ID NO: 15001 - RNA, 22 nt, Homo sapiens
gaagauaucuaguaccauuguc

SEQ ID NO: 15002 - RNA, 22 nt, Homo sapiens
gaagcauugauccacaggcgug

SEQ ID NO: 15003 - RNA, 22 nt, Homo sapiens
cugguaugugugacugcauuga

SEQ ID NO: 15004 - RNA, 21 nt, Homo sapiens
cugguguuagcacuucuuccc

SEQ ID NO: 15005 - RNA, 22 nt, Homo sapiens
cuuccauauucuaggacaggcu

SEQ ID NO: 15006 - RNA, 22 nt, Homo sapiens
gcaaagaaugcagauuugccuc

SEQ ID NO: 15007 - RNA, 23 nt, Homo sapiens
gcagcaaugucacagggguccgg

SEQ ID NO: 15008 - RNA, 22 nt, Homo sapiens
gcauggaguggaaauucuuggg

SEQ ID NO: 15009 - RNA, 22 nt, Homo sapiens
gauagcauucaauuaucuguug

SEQ ID NO: 15010 - RNA, 22 nt, Homo sapiens
gauauguacagcucucuaggau

SEQ ID NO: 15011 - RNA, 22 nt, Homo sapiens
guagcagcuacuaaguugcugu

SEQ ID NO: 15012 - RNA, 22 nt, Homo sapiens
guauacaguugacccuugaacc

SEQ ID NO: 15013 - RNA, 22 nt, Homo sapiens
guauagcacauaauacuugaug

SEQ ID NO: 15014 - RNA, 22 nt, Homo sapiens
guauggcaugcaugagaauuuc

SEQ ID NO: 15015 - RNA, 22 nt, Homo sapiens
guauuguacuacaagcucuuua

SEQ ID NO: 15016 - RNA, 18 nt, Homo sapiens
guaaauguaucuauugcc

SEQ ID NO: 15017 - RNA, 22 nt, Homo sapiens
guaaauguccccugugauauug

SEQ ID NO: 15018 - RNA, 21 nt, Homo sapiens
ggauucaucccucaugaauuu

SEQ ID NO: 15019 - RNA, 22 nt, Homo sapiens
ggccugaugaaauguuagagua

SEQ ID NO: 15020 - RNA, 22 nt, Homo sapiens
guggcaaagaugccuucuccaa

SEQ ID NO: 15021 - RNA, 22 nt, Homo sapiens
uaaucacagagguuuggccuca

SEQ ID NO: 15022 - RNA, 22 nt, Homo sapiens
uacaagcacaggcagcaggcug

SEQ ID NO: 15023 - RNA, 22 nt, Homo sapiens
uaaggaaccagaaguggguagc

SEQ ID NO: 15024 - RNA, 22 nt, Homo sapiens
uaagguuuuugauaugcugcug

SEQ ID NO: 15025 - RNA, 22 nt, Homo sapiens
uaaaugcucuuuaaaagugcuu

SEQ ID NO: 15026 - RNA, 22 nt, Homo sapiens
uacagaauauuucugcccugag

SEQ ID NO: 15027 - RNA, 22 nt, Homo sapiens
uacagaauucugucccuugagu

SEQ ID NO: 15028 - RNA, 22 nt, Homo sapiens
uacagaauugcagguguggcag

SEQ ID NO: 15029 - RNA, 19 nt, Homo sapiens
uagcacuacagaguuuagc

SEQ ID NO: 15030 - RNA, 22 nt, Homo sapiens
uauguuaucaaaaagcuaagga

SEQ ID NO: 15031 - RNA, 22 nt, Homo sapiens
uauuacuugucugugucucaau

SEQ ID NO: 15032 - RNA, 22 nt, Homo sapiens
uauucacaggugugggacaaag

SEQ ID NO: 15033 - RNA, 22 nt, Homo sapiens
uauuguacauguuauagauuuu

SEQ ID NO: 15034 - RNA, 22 nt, Homo sapiens
uagcagcaaagcaggaucugcu

SEQ ID NO: 15035 - RNA, 22 nt, Homo sapiens
uagcagcaccccacucuacugg

SEQ ID NO: 15036 - RNA, 20 nt, Homo sapiens
uagcagcagacagagggagg

SEQ ID NO: 15037 - RNA, 22 nt, Homo sapiens
uagcagcauuuuuguagaguau

SEQ ID NO: 15038 - RNA, 22 nt, Homo sapiens
uagcaguaccccaguauccugg

SEQ ID NO: 15039 - RNA, 22 nt, Homo sapiens
uagcaguauaugagagcuauug

SEQ ID NO: 15040 - RNA, 22 nt, Homo sapiens
uaucccaauguaauaucacaaa

SEQ ID NO: 15041 - RNA, 22 nt, Homo sapiens
uauagcagccugaacaaaguaa

SEQ ID NO: 15042 - RNA, 22 nt, Homo sapiens
uauagcagugaguauugacuaa

SEQ ID NO: 15043 - RNA, 22 nt, Homo sapiens
uauagcaguguaagaaucgagu

SEQ ID NO: 15044 - RNA, 22 nt, Homo sapiens
ugacuaaaacugaguuucauua

SEQ ID NO: 15045 - RNA, 22 nt, Homo sapiens
ugaauacugugcaaaggauuug

SEQ ID NO: 15046 - RNA, 22 nt, Homo sapiens
ugacauggaaguagguauacau

SEQ ID NO: 15047 - RNA, 22 nt, Homo sapiens
ucuuuguugcauaggcuuguuc

SEQ ID NO: 15048 - RNA, 22 nt, Homo sapiens
ucuacagccaguucaggaagaa

SEQ ID NO: 15049 - RNA, 22 nt, Homo sapiens
uccuucauuugucaacucuagu

SEQ ID NO: 15050 - RNA, 22 nt, Homo sapiens
uccugcauucugacuugcuuuc

SEQ ID NO: 15051 - RNA, 22 nt, Homo sapiens
uccugcauucauccugguguug

SEQ ID NO: 15052 - RNA, 22 nt, Homo sapiens
ucagcaaugaccuaagcaaaua

SEQ ID NO: 15053 - RNA, 20 nt, Homo sapiens
ucaguauauuguuuccacag

SEQ ID NO: 15054 - RNA, 22 nt, Homo sapiens
ugcauauuuuauaaagauggaa

SEQ ID NO: 15055 - RNA, 19 nt, Homo sapiens
ugcagcaauguaaaagaca

SEQ ID NO: 15056 - RNA, 22 nt, Homo sapiens
ugauauauugaaugaugaaaca

SEQ ID NO: 15057 - RNA, 22 nt, Homo sapiens
ugaggacugagaggcacugugg

SEQ ID NO: 15058 - RNA, 22 nt, Homo sapiens
uggcaagagaacaacaucucuc

SEQ ID NO: 15059 - RNA, 22 nt, Homo sapiens
ugcauggagcucucuuuggacu

SEQ ID NO: 15060 - RNA, 22 nt, Homo sapiens
uggaagcauagcagcgugugug

SEQ ID NO: 15061 - RNA, 22 nt, Homo sapiens
uggaagcaugcaaucugugggg

SEQ ID NO: 15062 - RNA, 22 nt, Homo sapiens
gaggaaguaauuuuaggccugu

SEQ ID NO: 15063 - RNA, 20 nt, Homo sapiens
gacauggaggaggauuauua

SEQ ID NO: 15064 - RNA, 20 nt, Homo sapiens
gacuucagaagcuucagagu

SEQ ID NO: 15065 - RNA, 22 nt, Homo sapiens
gaaaugcucauuuuggauccuu

SEQ ID NO: 15066 - RNA, 22 nt, Homo sapiens
gaaauggaucagagcaagcuuu

SEQ ID NO: 15067 - RNA, 22 nt, Homo sapiens
gaaagacuuucugcuguggaua

SEQ ID NO: 15068 - RNA, 22 nt, Homo sapiens
gauggauuuuaagugaaugaaa

SEQ ID NO: 15069 - RNA, 22 nt, Homo sapiens
gauggcacuuaagagcaagagc

SEQ ID NO: 15070 - RNA, 20 nt, Homo sapiens
ggagagugacauaauucugg

SEQ ID NO: 15071 - RNA, 22 nt, Homo sapiens
cugagauaggacucugcuggcu

SEQ ID NO: 15072 - RNA, 22 nt, Homo sapiens
cugagcuaguagcauuguguca

SEQ ID NO: 15073 - RNA, 22 nt, Homo sapiens
cuguaaagaucacagagcuggu

SEQ ID NO: 15074 - RNA, 22 nt, Homo sapiens
cuguaaaguaagagguaaguua

SEQ ID NO: 15075 - RNA, 22 nt, Homo sapiens
cugcuauauugguucaggcuug

SEQ ID NO: 15076 - RNA, 22 nt, Homo sapiens
cuggaauucaaaaucugaauuu

SEQ ID NO: 15077 - RNA, 22 nt, Homo sapiens
cuacagcagcccaguccccgaa

SEQ ID NO: 15078 - RNA, 22 nt, Homo sapiens
cuagcagcauaagaaucaccaa

SEQ ID NO: 15079 - RNA, 22 nt, Homo sapiens
cuagcagcaugagaauggacca

SEQ ID NO: 15080 - RNA, 22 nt, Homo sapiens
caguagcaugccucagaaugag

SEQ ID NO: 15081 - RNA, 19 nt, Homo sapiens
cauugcacuccacccuggg

SEQ ID NO: 15082 - RNA, 22 nt, Homo sapiens
cauugcacuccagccuaggcaa

SEQ ID NO: 15083 - RNA, 22 nt, Homo sapiens
cauugcacuccagccucggcaa

SEQ ID NO: 15084 - RNA, 22 nt, Homo sapiens
cauugcacuccagccugcacga

SEQ ID NO: 15085 - RNA, 22 nt, Homo sapiens
cauugcacuccagccugcugac

SEQ ID NO: 15086 - RNA, 22 nt, Homo sapiens
cauugcacuccauccuuggcaa

SEQ ID NO: 15087 - RNA, 22 nt, Homo sapiens
cauugcacucuagccucggcaa

SEQ ID NO: 15088 - RNA, 22 nt, Homo sapiens
cauugcacugcagcccgggcaa

SEQ ID NO: 15089 - RNA, 18 nt, Homo sapiens
auugcacuccugccuggg

SEQ ID NO: 15090 - RNA, 22 nt, Homo sapiens
cagauaguuguagauaugcagc

SEQ ID NO: 15091 - RNA, 19 nt, Homo sapiens
uacccagaagcagcauugu

SEQ ID NO: 15092 - RNA, 22 nt, Homo sapiens
uaucacaaacuuagcaguuuaa

SEQ ID NO: 15093 - RNA, 22 nt, Homo sapiens
uaugguuuuggaauccugcaga

SEQ ID NO: 15094 - RNA, 21 nt, Homo sapiens
uaaaggcuccaauuauacccc

SEQ ID NO: 15095 - RNA, 22 nt, Homo sapiens
uaaaugcuuaauugaaugugga

SEQ ID NO: 15096 - RNA, 22 nt, Homo sapiens
uaaaugcuugagaugauggaua

SEQ ID NO: 15097 - RNA, 22 nt, Homo sapiens
gucagcaaagaggaauaguuug

SEQ ID NO: 15098 - RNA, 22 nt, Homo sapiens
guauagcaaugccccacaccug

SEQ ID NO: 15099 - RNA, 22 nt, Homo sapiens
guauaugccucaguuauagcac

SEQ ID NO: 15100 - RNA, 22 nt, Homo sapiens
guagcagccacacuugauaacu

SEQ ID NO: 15101 - RNA, 20 nt, Homo sapiens
guaacagcacuuucccaaag

SEQ ID NO: 15102 - RNA, 22 nt, Homo sapiens
guaagauaguauguuuaaccca

SEQ ID NO: 15103 - RNA, 22 nt, Homo sapiens
ggcaugcauuguacuaguaugc

SEQ ID NO: 15104 - RNA, 22 nt, Homo sapiens
ucuuuuguucuauucaggccuu

SEQ ID NO: 15105 - RNA, 17 nt, Homo sapiens
ugacagaaacuuguugu

SEQ ID NO: 15106 - RNA, 22 nt, Homo sapiens
ugacuagagcaauuggaaacaa

SEQ ID NO: 15107 - RNA, 17 nt, Homo sapiens
ugagaacaugugguauu

SEQ ID NO: 15108 - RNA, 18 nt, Homo sapiens
ugagaacauguguacaca

SEQ ID NO: 15109 - RNA, 22 nt, Homo sapiens
ucuucaugcuugaaauaauagc

SEQ ID NO: 15110 - RNA, 22 nt, Homo sapiens
ugcugcuguuguuguuacuagc

SEQ ID NO: 15111 - RNA, 22 nt, Homo sapiens
ugcuguuguuugaugaaguaau

SEQ ID NO: 15112 - RNA, 22 nt, Homo sapiens
uggccuguaacgcugucucagc

SEQ ID NO: 15113 - RNA, 22 nt, Homo sapiens
uguauacauauguauguuuugu

SEQ ID NO: 15114 - RNA, 21 nt, Homo sapiens
uguauacauggaagaaugguc

SEQ ID NO: 15115 - RNA, 22 nt, Homo sapiens
uguauguuuaaggccaguggaa

SEQ ID NO: 15116 - RNA, 22 nt, Homo sapiens
uguauuuguuguuaaauggaga

SEQ ID NO: 15117 - RNA, 22 nt, Homo sapiens
aagcaggugucugugucuguaa

SEQ ID NO: 15118 - RNA, 22 nt, Homo sapiens
uuuuugauuaauggguagacca

SEQ ID NO: 15119 - RNA, 22 nt, Homo sapiens
aagagcauuauuuaguaauuuc

SEQ ID NO: 15120 - RNA, 22 nt, Homo sapiens
uuugcugagucugacuucaugg

SEQ ID NO: 15121 - RNA, 22 nt, Homo sapiens
uuugcuaaucaacacuggccug

SEQ ID NO: 15122 - RNA, 22 nt, Homo sapiens
uuguaaaguucuuaggaagcuc

SEQ ID NO: 15123 - RNA, 22 nt, Homo sapiens
uugauaagaaaaauauaccaga

SEQ ID NO: 15124 - RNA, 22 nt, Homo sapiens
uuuaauacugcaucuuuacucu

SEQ ID NO: 15125 - RNA, 22 nt, Homo sapiens
uuuagcagcaaagagccaugcu

SEQ ID NO: 15126 - RNA, 22 nt, Homo sapiens
uugugaauggugccgcaauaaa

SEQ ID NO: 15127 - RNA, 22 nt, Homo sapiens
uucagcacugaaaauaugucau

SEQ ID NO: 15128 - RNA, 22 nt, Homo sapiens
uucuacagugacugcagccaua

SEQ ID NO: 15129 - RNA, 22 nt, Homo sapiens
uugacauguaggcagggaaugg

SEQ ID NO: 15130 - RNA, 22 nt, Homo sapiens
uguugcauuugucaaggucaag

SEQ ID NO: 15131 - RNA, 22 nt, Homo sapiens
uuaaugaacuuuauuuuguaga

SEQ ID NO: 15132 - RNA, 22 nt, Homo sapiens
uuauagcacuaagaagguaaua

SEQ ID NO: 15133 - RNA, 22 nt, Homo sapiens
uuauuacuccuauuuuguagau

SEQ ID NO: 15134 - RNA, 22 nt, Homo sapiens
uuagcagcaugagaauggacua

SEQ ID NO: 15135 - RNA, 22 nt, Homo sapiens
uuagcacuugggaguauuuauu

SEQ ID NO: 15136 - RNA, 22 nt, Homo sapiens
uuagcagccuucaagcuccaag

SEQ ID NO: 15137 - RNA, 22 nt, Homo sapiens
auggcagcugguuuuacccuag

SEQ ID NO: 15138 - RNA, 22 nt, Homo sapiens
auggcaaaauguuccuaguggu

SEQ ID NO: 15139 - RNA, 22 nt, Homo sapiens
auuccauaguacagugaugagu

SEQ ID NO: 15140 - RNA, 22 nt, Homo sapiens
auuccauagugucuguggcaga

SEQ ID NO: 15141 - RNA, 22 nt, Homo sapiens
auugcacaaagagggaaacuga

SEQ ID NO: 15142 - RNA, 22 nt, Homo sapiens
auugcacacagaaucaggguaa

SEQ ID NO: 15143 - RNA, 22 nt, Homo sapiens
auugcacuccagccugagcaaa

SEQ ID NO: 15144 - RNA, 22 nt, Homo sapiens
auugcacuccagccuggcagca

SEQ ID NO: 15145 - RNA, 22 nt, Homo sapiens
auugcacuccagccuggccaac

SEQ ID NO: 15146 - RNA, 22 nt, Homo sapiens
auugcacuccagccugggcaac

SEQ ID NO: 15147 - RNA, 22 nt, Homo sapiens
auaagaucauuugcuaagaggg

SEQ ID NO: 15148 - RNA, 22 nt, Homo sapiens
auagcccuuuucuaacuaugug

SEQ ID NO: 15149 - RNA, 22 nt, Homo sapiens
auauuacagagaggaccuggga

SEQ ID NO: 15150 - RNA, 21 nt, Homo sapiens
auauuacuguuagaggacugc

SEQ ID NO: 15151 - RNA, 22 nt, Homo sapiens
aucacugggcaagauaucauga

SEQ ID NO: 15152 - RNA, 22 nt, Homo sapiens
augagauacuacaaaugaguuu

SEQ ID NO: 15153 - RNA, 17 nt, Homo sapiens
acaugagacuggauucu

SEQ ID NO: 15154 - RNA, 22 nt, Homo sapiens
accaugcaguccaauaugcaca

SEQ ID NO: 15155 - RNA, 23 nt, Homo sapiens
agaugcauucuuguaggauauau

SEQ ID NO: 15156 - RNA, 22 nt, Homo sapiens
auaaaugccuguuguuuuaagc

SEQ ID NO: 15157 - RNA, 22 nt, Homo sapiens
auaaaugcuuagaucuguauau

SEQ ID NO: 15158 - RNA, 22 nt, Homo sapiens
aguggauuuuauuugacaacua

SEQ ID NO: 15159 - RNA, 22 nt, Homo sapiens
agugguuuuaaguagagcauac

SEQ ID NO: 15160 - RNA, 22 nt, Homo sapiens
aguguuuuuaacaagaaagggu

SEQ ID NO: 15161 - RNA, 22 nt, Homo sapiens
agguagcauagcgggaauauca

SEQ ID NO: 15162 - RNA, 22 nt, Homo sapiens
agcacagccuuguguuuucuug

SEQ ID NO: 15163 - RNA, 20 nt, Homo sapiens
agccccauguaaaccacaug

SEQ ID NO: 15164 - RNA, 22 nt, Homo sapiens
agccccauuuguugaaaagacg

SEQ ID NO: 15165 - RNA, 22 nt, Homo sapiens
agcuguuguucucagaggcuuu

SEQ ID NO: 15166 - RNA, 22 nt, Homo sapiens
aggcaagcaucuugcucccuuc

SEQ ID NO: 15167 - RNA, 22 nt, Homo sapiens
aaaugcauugagggaaaaggca

SEQ ID NO: 15168 - RNA, 22 nt, Homo sapiens
aaacugaucugaaggccaggcu

SEQ ID NO: 15169 - RNA, 22 nt, Homo sapiens
aaaugcugucaaauuguguucu

SEQ ID NO: 15170 - RNA, 22 nt, Homo sapiens
aaauucaugucaccucuaggua

SEQ ID NO: 15171 - RNA, 22 nt, Homo sapiens
aacagaauccucuuuuccuggg

SEQ ID NO: 15172 - RNA, 22 nt, Homo sapiens
aagaggcuguaggauaaugccu

SEQ ID NO: 15173 - RNA, 22 nt, Homo sapiens
aaagaagucagccuguccuuug

SEQ ID NO: 15174 - RNA, 22 nt, Homo sapiens
aaaaggcuagcuaguaacagaa

SEQ ID NO: 15175 - RNA, 22 nt, Homo sapiens
aaaaugcugauauugggcccca

SEQ ID NO: 15176 - RNA, 18 nt, Homo sapiens
aaacagugucucuuucug

SEQ ID NO: 15177 - RNA, 22 nt, Homo sapiens
uuuuguacgccuguguccauca

SEQ ID NO: 15178 - RNA, 16 nt, Homo sapiens
uuuuugcagaaaugac

SEQ ID NO: 15179 - RNA, 22 nt, Homo sapiens
uuugcugagucauuccaugcug

SEQ ID NO: 15180 - RNA, 23 nt, Homo sapiens
uguaaaagcauuugucagccugg

SEQ ID NO: 15181 - RNA, 22 nt, Homo sapiens
uguaaaccauauauguauguag

SEQ ID NO: 15182 - RNA, 23 nt, Homo sapiens
uguaaagcuaugaauuauucuuu

SEQ ID NO: 15183 - RNA, 22 nt, Homo sapiens
uguauacugucuaauauguugu

SEQ ID NO: 15184 - RNA, 22 nt, Homo sapiens
uguaugcuuuugagagauauuu

SEQ ID NO: 15185 - RNA, 22 nt, Homo sapiens
uguauguaaagacaggauaaca

SEQ ID NO: 15186 - RNA, 20 nt, Homo sapiens
ugucaagaaacauuacuuau

SEQ ID NO: 15187 - RNA, 22 nt, Homo sapiens
uuauugcuaaaucaugaccaca

SEQ ID NO: 15188 - RNA, 22 nt, Homo sapiens
uuagcacugagaauggcuugcu

SEQ ID NO: 15189 - RNA, 22 nt, Homo sapiens
uuagcacugucuacucuggauu

SEQ ID NO: 15190 - RNA, 22 nt, Homo sapiens
uuagcagcacaaaagcagacua

SEQ ID NO: 15191 - RNA, 22 nt, Homo sapiens
uuagcagcaccccacucuacug

SEQ ID NO: 15192 - RNA, 22 nt, Homo sapiens
uuagcagcaucccuggccugua

SEQ ID NO: 15193 - RNA, 22 nt, Homo sapiens
uuagcagcaugaaaauggacug

SEQ ID NO: 15194 - RNA, 20 nt, Homo sapiens
uuagcagcaugauuuauaau

SEQ ID NO: 15195 - RNA, 22 nt, Homo sapiens
uuagcagcucuaauaacugcua

SEQ ID NO: 15196 - RNA, 22 nt, Homo sapiens
uuagcagcucuggugacaaggu

SEQ ID NO: 15197 - RNA, 22 nt, Homo sapiens
uuauagcagugcaggaacagac

SEQ ID NO: 15198 - RNA, 22 nt, Homo sapiens
uuauagcagugcccaacuccug

SEQ ID NO: 15199 - RNA, 22 nt, Homo sapiens
uugagauuauuguguuccuuua

SEQ ID NO: 15200 - RNA, 21 nt, Homo sapiens
uugagcuuuuaguacagacag

SEQ ID NO: 15201 - RNA, 21 nt, Homo sapiens
uugagguaaaauccuauggga

SEQ ID NO: 15202 - RNA, 22 nt, Homo sapiens
uugcaagaaaugcagauucuca

SEQ ID NO: 15203 - RNA, 22 nt, Homo sapiens
uugcaagauguucaugggcugu

SEQ ID NO: 15204 - RNA, 20 nt, Homo sapiens
uucuugaguuaacaaguuac

SEQ ID NO: 15205 - RNA, 22 nt, Homo sapiens
uuuagcacugugauugacaaaa

SEQ ID NO: 15206 - RNA, 22 nt, Homo sapiens
uuguaaagaucauaugcuguuc

SEQ ID NO: 15207 - RNA, 22 nt, Homo sapiens
uuguaaagucugucucagucag

SEQ ID NO: 15208 - RNA, 22 nt, Homo sapiens
uuguaaaguucucucccgaaaa

SEQ ID NO: 15209 - RNA, 22 nt, Homo sapiens
ucugugcugagaguugaaaguu

SEQ ID NO: 15210 - RNA, 22 nt, Homo sapiens
ucuuuagguguuauaguucaag

SEQ ID NO: 15211 - RNA, 19 nt, Homo sapiens
ucuuuagucacauuuuuau

SEQ ID NO: 15212 - RNA, 22 nt, Homo sapiens
ugaauucuguccaaaauaacug

SEQ ID NO: 15213 - RNA, 22 nt, Homo sapiens
ucuggguuuuguaccgugcucg

SEQ ID NO: 15214 - RNA, 22 nt, Homo sapiens
ucucugauuauugcauuucauu

SEQ ID NO: 15215 - RNA, 22 nt, Homo sapiens
ucugagaucaugucugugcugu

SEQ ID NO: 15216 - RNA, 19 nt, Homo sapiens
ucccaagaugcucauacau

SEQ ID NO: 15217 - RNA, 22 nt, Homo sapiens
uccaugaguccauuagaaaaaa

SEQ ID NO: 15218 - RNA, 22 nt, Homo sapiens
ucaggugccuuggcuaauuguu

SEQ ID NO: 15219 - RNA, 22 nt, Homo sapiens
uauugcacaugaggagacauug

SEQ ID NO: 15220 - RNA, 22 nt, Homo sapiens
uauuuguccccuccaaaaguca

SEQ ID NO: 15221 - RNA, 22 nt, Homo sapiens
ugcuuuguugaaaaucauuugg

SEQ ID NO: 15222 - RNA, 22 nt, Homo sapiens
uggcaagagcugcauucaucug

SEQ ID NO: 15223 - RNA, 22 nt, Homo sapiens
ugauucccucaagugccuuaug

SEQ ID NO: 15224 - RNA, 22 nt, Homo sapiens
ugcuauguuuucccuccuuauc

SEQ ID NO: 15225 - RNA, 22 nt, Homo sapiens
ugcugcauuggggauuaaguuu

SEQ ID NO: 15226 - RNA, 22 nt, Homo sapiens
ugagauaaagcauguacugugu

SEQ ID NO: 15227 - RNA, 23 nt, Homo sapiens
ugauaugccuaggaguauauuuu

SEQ ID NO: 15228 - RNA, 20 nt, Homo sapiens
ugauauuuucugagcaggaa

SEQ ID NO: 15229 - RNA, 22 nt, Homo sapiens
ugauauuuuugauccuuaaguu

SEQ ID NO: 15230 - RNA, 22 nt, Homo sapiens
ugagguuguccacuauaaucca

SEQ ID NO: 15231 - RNA, 22 nt, Homo sapiens
ugaguagugccacaauaagcau

SEQ ID NO: 15232 - RNA, 22 nt, Homo sapiens
guggaaaucucugugugacuua

SEQ ID NO: 15233 - RNA, 22 nt, Homo sapiens
gucuuuaguugaaacauguggu

SEQ ID NO: 15234 - RNA, 22 nt, Homo sapiens
guagaagcacaggugaguuggu

SEQ ID NO: 15235 - RNA, 22 nt, Homo sapiens
ggagagugacauauuucuaggc

SEQ ID NO: 15236 - RNA, 22 nt, Homo sapiens
ggcagcacaauuuucugaugga

SEQ ID NO: 15237 - RNA, 23 nt, Homo sapiens
ggaaacauccagucuuucaccau

SEQ ID NO: 15238 - RNA, 22 nt, Homo sapiens
gcugcuuuugaugacaaaaaca

SEQ ID NO: 15239 - RNA, 22 nt, Homo sapiens
guuugugguuaaagccuuucau

SEQ ID NO: 15240 - RNA, 22 nt, Homo sapiens
uaccucuguaaguaaagauuca

SEQ ID NO: 15241 - RNA, 22 nt, Homo sapiens
uacaucagccugaaagagcucg

SEQ ID NO: 15242 - RNA, 22 nt, Homo sapiens
uacaguggcaugucaggugcuu

SEQ ID NO: 15243 - RNA, 22 nt, Homo sapiens
uacaguggaaguuaaccccauu

SEQ ID NO: 15244 - RNA, 22 nt, Homo sapiens
uauugaacgugggauauugaag

SEQ ID NO: 15245 - RNA, 21 nt, Homo sapiens
uaugguuucuaauucugcagg

SEQ ID NO: 15246 - RNA, 22 nt, Homo sapiens
uauagcaaugccccacuccuga

SEQ ID NO: 15247 - RNA, 22 nt, Homo sapiens
uauagcaaugugccacucucug

SEQ ID NO: 15248 - RNA, 22 nt, Homo sapiens
uagccuguggugaauguuucug

SEQ ID NO: 15249 - RNA, 22 nt, Homo sapiens
uaggagcacaaaccccauugug

SEQ ID NO: 15250 - RNA, 22 nt, Homo sapiens
uaggagcacaaacccuacugug

SEQ ID NO: 15251 - RNA, 20 nt, Homo sapiens
uagguuuucacagaauugcc

SEQ ID NO: 15252 - RNA, 20 nt, Homo sapiens
uauaacaguuuggacccagu

SEQ ID NO: 15253 - RNA, 22 nt, Homo sapiens
cagguaagaugcuuucucuuau

SEQ ID NO: 15254 - RNA, 22 nt, Homo sapiens
cuaagguaggagaaucacucaa

SEQ ID NO: 15255 - RNA, 22 nt, Homo sapiens
ccagaauucucauuggaaggaa

SEQ ID NO: 15256 - RNA, 22 nt, Homo sapiens
auugcacuccagccugcggaac

SEQ ID NO: 15257 - RNA, 22 nt, Homo sapiens
auugcacuccagccuggcaaua

SEQ ID NO: 15258 - RNA, 22 nt, Homo sapiens
auugcacuccagccugggcagc

SEQ ID NO: 15259 - RNA, 21 nt, Homo sapiens
auugcacuccagccugggcga

SEQ ID NO: 15260 - RNA, 22 nt, Homo sapiens
auugcacuccagucugggcaac

SEQ ID NO: 15261 - RNA, 22 nt, Homo sapiens
auugcacuccauccugggcaau

SEQ ID NO: 15262 - RNA, 22 nt, Homo sapiens
auugcacucugaucugcacucc

SEQ ID NO: 15263 - RNA, 22 nt, Homo sapiens
auugcacugcagccugggcaac

SEQ ID NO: 15264 - RNA, 22 nt, Homo sapiens
auugugauugcugcuaggccua

SEQ ID NO: 15265 - RNA, 22 nt, Homo sapiens
caaaggcuguuauaggccagga

SEQ ID NO: 15266 - RNA, 22 nt, Homo sapiens
caaaggcuuccacugcauccuu

SEQ ID NO: 15267 - RNA, 22 nt, Homo sapiens
augugcuuauagguguauguuu

SEQ ID NO: 15268 - RNA, 22 nt, Homo sapiens
gagaaguaaauuuauuugcaaa

SEQ ID NO: 15269 - RNA, 22 nt, Homo sapiens
gacaagagaacacugcuauauu

SEQ ID NO: 15270 - RNA, 22 nt, Homo sapiens
cuguaauguaaugagacuacau

SEQ ID NO: 15271 - RNA, 22 nt, Homo sapiens
cuguuugauuaagugguggaaa

SEQ ID NO: 15272 - RNA, 22 nt, Homo sapiens
cuggaaucuauggauaacaucg

SEQ ID NO: 15273 - RNA, 22 nt, Homo sapiens
cuguaaaguucucauuguagcc

SEQ ID NO: 15274 - RNA, 22 nt, Homo sapiens
cuacagcacugagcugugugca

SEQ ID NO: 15275 - RNA, 22 nt, Homo sapiens
cuacaguguauuuauggagggu

SEQ ID NO: 15276 - RNA, 22 nt, Homo sapiens
cugagauacacuaauagucucu

SEQ ID NO: 15277 - RNA, 22 nt, Homo sapiens
cugagaucuuauuagaaaugca

SEQ ID NO: 15278 - RNA, 22 nt, Homo sapiens
cugcuguuguuaacuuuuggag

SEQ ID NO: 15279 - RNA, 22 nt, Homo sapiens
cugagcuagaccacuuggcucc

SEQ ID NO: 15280 - RNA, 22 nt, Homo sapiens
cugauauuuuucuggcuugugu

SEQ ID NO: 15281 - RNA, 22 nt, Homo sapiens
augacccugaccuaagccaauc

SEQ ID NO: 15282 - RNA, 22 nt, Homo sapiens
augaaacuggagcgccuggagg

SEQ ID NO: 15283 - RNA, 22 nt, Homo sapiens
augcaaggaugguuagauauau

SEQ ID NO: 15284 - RNA, 22 nt, Homo sapiens
augcuacuggauuuguauaaau

SEQ ID NO: 15285 - RNA, 22 nt, Homo sapiens
auggcaaaaaaugcaauuacuu

SEQ ID NO: 15286 - RNA, 22 nt, Homo sapiens
aucuuuaguggcuguuuucaga

SEQ ID NO: 15287 - RNA, 22 nt, Homo sapiens
aucugcauucccauguuuauug

SEQ ID NO: 15288 - RNA, 22 nt, Homo sapiens
auccuguacuaagguuuuccca

SEQ ID NO: 15289 - RNA, 22 nt, Homo sapiens
aucgcaauguuuagaauuuugu

SEQ ID NO: 15290 - RNA, 20 nt, Homo sapiens
aucucugggcaaaggaaaau

SEQ ID NO: 15291 - RNA, 22 nt, Homo sapiens
auaugguacuuaugcucaaacu

SEQ ID NO: 15292 - RNA, 22 nt, Homo sapiens
aguggauguuguggccugggag

SEQ ID NO: 15293 - RNA, 22 nt, Homo sapiens
agcuguuguuuuaagauacuaa

SEQ ID NO: 15294 - RNA, 22 nt, Homo sapiens
auaaagcuauuccucucuuuuu

SEQ ID NO: 15295 - RNA, 19 nt, Homo sapiens
auaaaugccuacaagggug

SEQ ID NO: 15296 - RNA, 22 nt, Homo sapiens
auagcagcauauguaauguuga

SEQ ID NO: 15297 - RNA, 20 nt, Homo sapiens
auagcagcaugauuuauaau

SEQ ID NO: 15298 - RNA, 22 nt, Homo sapiens
auagcagcucacuuauuuaugg

SEQ ID NO: 15299 - RNA, 22 nt, Homo sapiens
agauauuuguuaggucugucag

SEQ ID NO: 15300 - RNA, 22 nt, Homo sapiens
agaugcauugguggcauauuca

SEQ ID NO: 15301 - RNA, 20 nt, Homo sapiens
agaagcauugcucucuucag

SEQ ID NO: 15302 - RNA, 22 nt, Homo sapiens
agaauguaacucuaugaaggca

SEQ ID NO: 15303 - RNA, 22 nt, Homo sapiens
agacacuguugaaaaggcccca

SEQ ID NO: 15304 - RNA, 20 nt, Homo sapiens
agcagccacagauuccucag

SEQ ID NO: 15305 - RNA, 22 nt, Homo sapiens
acccagaagucauucaggaaca

SEQ ID NO: 15306 - RNA, 19 nt, Homo sapiens
aaguacuugucuuuugaag

SEQ ID NO: 15307 - RNA, 21 nt, Homo sapiens
aagguuuuuagugcuugacuu

SEQ ID NO: 15308 - RNA, 22 nt, Homo sapiens
acaauguauauuuuacuguagg

SEQ ID NO: 15309 - RNA, 20 nt, Homo sapiens
acaguagaagggauuucaaa

SEQ ID NO: 15310 - RNA, 20 nt, Homo sapiens
acaguauguuuggaugcaua

SEQ ID NO: 15311 - RNA, 22 nt, Homo sapiens
aauguguuuugaaaucaggaag

SEQ ID NO: 15312 - RNA, 21 nt, Homo sapiens
auuuuugcagagcugguagug

SEQ ID NO: 15313 - RNA, 20 nt, Homo sapiens
auuagacuugccuuauccuu

SEQ ID NO: 15314 - RNA, 22 nt, Homo sapiens
auuauugacucauagaaaggau

SEQ ID NO: 15315 - RNA, 22 nt, Homo sapiens
cagcugcuuuggaaaauauuuu

SEQ ID NO: 15316 - RNA, 22 nt, Homo sapiens
cagcuagcaugcguaacuuucu

SEQ ID NO: 15317 - RNA, 20 nt, Homo sapiens
cagcacgcacaugagacugu

SEQ ID NO: 15318 - RNA, 22 nt, Homo sapiens
caaaggcuucugaaacugcaga

SEQ ID NO: 15319 - RNA, 22 nt, Homo sapiens
caaaugcuucuauggacugucu

SEQ ID NO: 15320 - RNA, 22 nt, Homo sapiens
ccugcauugucaaggccaagcc

SEQ ID NO: 15321 - RNA, 22 nt, Homo sapiens
ccuucauccuccagcaggcuag

SEQ ID NO: 15322 - RNA, 22 nt, Homo sapiens
cucacagucagaagggacuugc

SEQ ID NO: 15323 - RNA, 22 nt, Homo sapiens
cucacugcauuucaguuuuguu

SEQ ID NO: 15324 - RNA, 22 nt, Homo sapiens
cucuuuaguaagcaguugauga

SEQ ID NO: 15325 - RNA, 22 nt, Homo sapiens
cucuuuuguuccuaguuugauc

SEQ ID NO: 15326 - RNA, 22 nt, Homo sapiens
cucuuuuguuuagcugagaggg

SEQ ID NO: 15327 - RNA, 22 nt, Homo sapiens
cauagguugggcguuugauuuu

SEQ ID NO: 15328 - RNA, 22 nt, Homo sapiens
cccuucauucaaggguugugag

SEQ ID NO: 15329 - RNA, 22 nt, Homo sapiens
cuguugguguuuaaucacugca

SEQ ID NO: 15330 - RNA, 22 nt, Homo sapiens
cugauauuuuaaaauuggcugg

SEQ ID NO: 15331 - RNA, 22 nt, Homo sapiens
cuuccauaguauuuuuacaaaa

SEQ ID NO: 15332 - RNA, 22 nt, Homo sapiens
cuuccauaguuacacccaggga

SEQ ID NO: 15333 - RNA, 22 nt, Homo sapiens
cuucuguuaguucugauaacuu

SEQ ID NO: 15334 - RNA, 22 nt, Homo sapiens
gaagauucaaccaaaccagaac

SEQ ID NO: 15335 - RNA, 22 nt, Homo sapiens
cuuuagcaauugauuaugccau

SEQ ID NO: 15336 - RNA, 22 nt, Homo sapiens
cuuugcaaaacauugagaccuc

SEQ ID NO: 15337 - RNA, 22 nt, Homo sapiens
gaaucacaguuauuagagcagc

SEQ ID NO: 15338 - RNA, 22 nt, Homo sapiens
gaaucauuguuucuaaguuugu

SEQ ID NO: 15339 - RNA, 22 nt, Homo sapiens
gagguuuuagugagucccacug

SEQ ID NO: 15340 - RNA, 22 nt, Homo sapiens
gauagcagccauucuuuuuauu

SEQ ID NO: 15341 - RNA, 22 nt, Homo sapiens
gauauguaaaaauuauaucuga

SEQ ID NO: 15342 - RNA, 22 nt, Homo sapiens
gauauuacuuccaauauugcaa

SEQ ID NO: 15343 - RNA, 22 nt, Homo sapiens
gaucucaguggauacugugaug

SEQ ID NO: 15344 - RNA, 22 nt, Homo sapiens
gcccuacuguuuauacauagga

SEQ ID NO: 15345 - RNA, 22 nt, Homo sapiens
gcuggcaaguggccuacuuugu

SEQ ID NO: 15346 - RNA, 22 nt, Homo sapiens
gcugguguagagugcagaaagg

SEQ ID NO: 15347 - RNA, 22 nt, Homo sapiens
uacuagaggaaaacuugaagac

SEQ ID NO: 15348 - RNA, 22 nt, Homo sapiens
uacaugcaugggcaugugugca

SEQ ID NO: 15349 - RNA, 22 nt, Homo sapiens
uagagcuacagcccucacuguc

SEQ ID NO: 15350 - RNA, 22 nt, Homo sapiens
uacagcacugugcauagugguu

SEQ ID NO: 15351 - RNA, 22 nt, Homo sapiens
uacagugggcacuggcgcccug

SEQ ID NO: 15352 - RNA, 22 nt, Homo sapiens
uacaggauagacaauuuauuaa

SEQ ID NO: 15353 - RNA, 22 nt, Homo sapiens
uacaguaauguuaaucuuugug

SEQ ID NO: 15354 - RNA, 22 nt, Homo sapiens
uacaguaguaucuucauuuguu

SEQ ID NO: 15355 - RNA, 22 nt, Homo sapiens
uacaguauuaugagugauugaa

SEQ ID NO: 15356 - RNA, 22 nt, Homo sapiens
uaaugcuguggucugguuuaaa

SEQ ID NO: 15357 - RNA, 22 nt, Homo sapiens
uaauauguauacagacagauac

SEQ ID NO: 15358 - RNA, 22 nt, Homo sapiens
uaauaguuucagaaguuguuuu

SEQ ID NO: 15359 - RNA, 22 nt, Homo sapiens
uaagucuuuuuggaguuuauaa

SEQ ID NO: 15360 - RNA, 22 nt, Homo sapiens
uauggccugcguccagugguau

SEQ ID NO: 15361 - RNA, 22 nt, Homo sapiens
uaugcacuaggcacuguguuug

SEQ ID NO: 15362 - RNA, 22 nt, Homo sapiens
uauuugauuaacaagagccuaa

SEQ ID NO: 15363 - RNA, 22 nt, Homo sapiens
uauuccacuggcacugcauuug

SEQ ID NO: 15364 - RNA, 22 nt, Homo sapiens
uagcaguaaagaaugugauguu

SEQ ID NO: 15365 - RNA, 22 nt, Homo sapiens
uagcagccaggaagggcuggcu

SEQ ID NO: 15366 - RNA, 19 nt, Homo sapiens
uagcagcaugauuuauaau

SEQ ID NO: 15367 - RNA, 22 nt, Homo sapiens
uagcagcuuuauugagguaaau

SEQ ID NO: 15368 - RNA, 23 nt, Homo sapiens
uagcacuuuuuacauauggacau

SEQ ID NO: 15369 - RNA, 22 nt, Homo sapiens
uagcagcagugguguauuuaga

SEQ ID NO: 15370 - RNA, 22 nt, Homo sapiens
uagcagcauaaauggacuaaga

SEQ ID NO: 15371 - RNA, 22 nt, Homo sapiens
uagcagcaucucuggcuucuac

SEQ ID NO: 15372 - RNA, 22 nt, Homo sapiens
uaguagcaccucucaugagcuu

SEQ ID NO: 15373 - RNA, 21 nt, Homo sapiens
uauagcagcacgauuuauaau

SEQ ID NO: 15374 - RNA, 21 nt, Homo sapiens
uauagcagcacgauuuauagu

SEQ ID NO: 15375 - RNA, 22 nt, Homo sapiens
uauagcagugugagaacagacu

SEQ ID NO: 15376 - RNA, 22 nt, Homo sapiens
guggcuagaaugaagguagcug

SEQ ID NO: 15377 - RNA, 23 nt, Homo sapiens
ggaaugaaaccugguuaugauau

SEQ ID NO: 15378 - RNA, 22 nt, Homo sapiens
guagaagcacagggccuguauu

SEQ ID NO: 15379 - RNA, 22 nt, Homo sapiens
guagcagcaauuuacuccauac

SEQ ID NO: 15380 - RNA, 22 nt, Homo sapiens
guaugguuuauagggaaauugu

SEQ ID NO: 15381 - RNA, 22 nt, Homo sapiens
ucuuuaguuaagggacauuuua

SEQ ID NO: 15382 - RNA, 22 nt, Homo sapiens
ucuuugauguucugaaagaugg

SEQ ID NO: 15383 - RNA, 22 nt, Homo sapiens
ugaauacuucguucaaagauaa

SEQ ID NO: 15384 - RNA, 22 nt, Homo sapiens
ugacauggaagauguucaugau

SEQ ID NO: 15385 - RNA, 22 nt, Homo sapiens
ugacauggagagagaagccuuu

SEQ ID NO: 15386 - RNA, 22 nt, Homo sapiens
ugacauggagggugcggcugca

SEQ ID NO: 15387 - RNA, 22 nt, Homo sapiens
ugacauggagguggaggaagau

SEQ ID NO: 15388 - RNA, 21 nt, Homo sapiens
ugaauauuuggguugugucca

SEQ ID NO: 15389 - RNA, 22 nt, Homo sapiens
ucagcaaugcugcacucuacug

SEQ ID NO: 15390 - RNA, 22 nt, Homo sapiens
ucauugcaaucucugccucccg

SEQ ID NO: 15391 - RNA, 22 nt, Homo sapiens
uccugcauucugaaauacaagu

SEQ ID NO: 15392 - RNA, 22 nt, Homo sapiens
uccuguaaucccagcuaccaga

SEQ ID NO: 15393 - RNA, 22 nt, Homo sapiens
ugagcugagaucuuaccacugc

SEQ ID NO: 15394 - RNA, 22 nt, Homo sapiens
ugagcuguuugaagaagcauuu

SEQ ID NO: 15395 - RNA, 22 nt, Homo sapiens
ugauaggucacucaacagugag

SEQ ID NO: 15396 - RNA, 22 nt, Homo sapiens
ugaccucugauagcaguaggug

SEQ ID NO: 15397 - RNA, 22 nt, Homo sapiens
ugauauguagguggcaagcaua

SEQ ID NO: 15398 - RNA, 22 nt, Homo sapiens
ugauauguguaaacaauguaua

SEQ ID NO: 15399 - RNA, 17 nt, Homo sapiens
ugauauuuucccagaua

SEQ ID NO: 15400 - RNA, 22 nt, Homo sapiens
ugauggcacagugaguuccagg

SEQ ID NO: 15401 - RNA, 17 nt, Homo sapiens
ugcaauuuaagcuagau

SEQ ID NO: 15402 - RNA, 22 nt, Homo sapiens
ugcaauuuaaugugucccaauu

SEQ ID NO: 15403 - RNA, 21 nt, Homo sapiens
ugcauacuucucagaugauua

SEQ ID NO: 15404 - RNA, 22 nt, Homo sapiens
uggcaacuugcaaccucauucu

SEQ ID NO: 15405 - RNA, 22 nt, Homo sapiens
uggcaagaucacaauuacuuuu

SEQ ID NO: 15406 - RNA, 22 nt, Homo sapiens
uugcuagucucuguuucaggau

SEQ ID NO: 15407 - RNA, 22 nt, Homo sapiens
uugcaugggagcugggugaagc

SEQ ID NO: 15408 - RNA, 22 nt, Homo sapiens
uugcaugggagcugggugaggc

SEQ ID NO: 15409 - RNA, 22 nt, Homo sapiens
uugcacagugguuuagagccug

SEQ ID NO: 15410 - RNA, 22 nt, Homo sapiens
uuugagaucuuuagaaucaggc

SEQ ID NO: 15411 - RNA, 22 nt, Homo sapiens
uuugggcuuuuaaucuagagca

SEQ ID NO: 15412 - RNA, 23 nt, Homo sapiens
uuugugacacucuccaucuccag

SEQ ID NO: 15413 - RNA, 22 nt, Homo sapiens
uuuagggcagggacaguucuuc

SEQ ID NO: 15414 - RNA, 21 nt, Homo sapiens
uuucacugugaguuuuucugu

SEQ ID NO: 15415 - RNA, 20 nt, Homo sapiens
uucaucaggauauuggucua

SEQ ID NO: 15416 - RNA, 22 nt, Homo sapiens
uuacagcagugccccacuccca

SEQ ID NO: 15417 - RNA, 22 nt, Homo sapiens
uuacaguauugcaaggacuagg

SEQ ID NO: 15418 - RNA, 22 nt, Homo sapiens
uuauggccauucuuguaggagu

SEQ ID NO: 15419 - RNA, 22 nt, Homo sapiens
uucaguaguacauucccguguu

SEQ ID NO: 15420 - RNA, 22 nt, Homo sapiens
uuaagguuuuuguagcaaggau

SEQ ID NO: 15421 - RNA, 21 nt, Homo sapiens
uuaacagacaagugucuuccc

SEQ ID NO: 15422 - RNA, 22 nt, Homo sapiens
uuaaagccauaccugagagagu

SEQ ID NO: 15423 - RNA, 22 nt, Homo sapiens
uguggaaauuguuguauuuaau

SEQ ID NO: 15424 - RNA, 22 nt, Homo sapiens
agucaagaugagauuugggugg

SEQ ID NO: 15425 - RNA, 22 nt, Homo sapiens
auacagugaauaucuggggcag

SEQ ID NO: 15426 - RNA, 20 nt, Homo sapiens
auagcaccagacagcccuag

SEQ ID NO: 15427 - RNA, 20 nt, Homo sapiens
auagcagcaugauuuauagu

SEQ ID NO: 15428 - RNA, 22 nt, Homo sapiens
auagcagcuugucagggcagac

SEQ ID NO: 15429 - RNA, 22 nt, Homo sapiens
auaucacaaacaagucuguacu

SEQ ID NO: 15430 - RNA, 22 nt, Homo sapiens
auccucugagaucuaggcagag

SEQ ID NO: 15431 - RNA, 22 nt, Homo sapiens
aucuaaaucucauaugggcaca

SEQ ID NO: 15432 - RNA, 22 nt, Homo sapiens
aucuacagccagucugguuugu

SEQ ID NO: 15433 - RNA, 22 nt, Homo sapiens
augcuguuuugaauucucuaga

SEQ ID NO: 15434 - RNA, 22 nt, Homo sapiens
augcacauggcuaacuuuuuuc

SEQ ID NO: 15435 - RNA, 22 nt, Homo sapiens
augcauaugucuuuauaguggc

SEQ ID NO: 15436 - RNA, 22 nt, Homo sapiens
augauuuuuguaucgccugaug

SEQ ID NO: 15437 - RNA, 22 nt, Homo sapiens
augagcagaagagauacacugu

SEQ ID NO: 15438 - RNA, 22 nt, Homo sapiens
auguaguaugaagaagaugcuu

SEQ ID NO: 15439 - RNA, 22 nt, Homo sapiens
aggcauggagacuaaaauuaua

SEQ ID NO: 15440 - RNA, 22 nt, Homo sapiens
aaaugcugcuuuggccucuucu

SEQ ID NO: 15441 - RNA, 22 nt, Homo sapiens
agcugcauucguaucauauugu

SEQ ID NO: 15442 - RNA, 20 nt, Homo sapiens
aaaugcuguaauguuuggga

SEQ ID NO: 15443 - RNA, 22 nt, Homo sapiens
aaaugcugucugugagccucau

SEQ ID NO: 15444 - RNA, 22 nt, Homo sapiens
aaauggauuaaguucacuugcu

SEQ ID NO: 15445 - RNA, 22 nt, Homo sapiens
acuguauagauggaguugauuu

SEQ ID NO: 15446 - RNA, 22 nt, Homo sapiens
agaauucugucauguuuauauu

SEQ ID NO: 15447 - RNA, 22 nt, Homo sapiens
agcagcaauuuuguaugguuua

SEQ ID NO: 15448 - RNA, 22 nt, Homo sapiens
agcagcacaucccuuucuggcc

SEQ ID NO: 15449 - RNA, 22 nt, Homo sapiens
agcagcaugcaaauggacuaau

SEQ ID NO: 15450 - RNA, 22 nt, Homo sapiens
agcagcauggguauaaaucucc

SEQ ID NO: 15451 - RNA, 21 nt, Homo sapiens
agcagcuuugguugaagcaga

SEQ ID NO: 15452 - RNA, 22 nt, Homo sapiens
acaguaaugggccccuuuuccu

SEQ ID NO: 15453 - RNA, 22 nt, Homo sapiens
acugcacuccaucuuagguggc

SEQ ID NO: 15454 - RNA, 20 nt, Homo sapiens
acugcauuuaguccucagga

SEQ ID NO: 15455 - RNA, 22 nt, Homo sapiens
accuuguaucuguuaggauugc

SEQ ID NO: 15456 - RNA, 22 nt, Homo sapiens
aaagugcugagaguucuaacuu

SEQ ID NO: 15457 - RNA, 22 nt, Homo sapiens
aagagguuguaccuaaaguguu

SEQ ID NO: 15458 - RNA, 22 nt, Homo sapiens
aaggcaagaaaauggauucucc

SEQ ID NO: 15459 - RNA, 22 nt, Homo sapiens
uguggaguguaugugacagaga

SEQ ID NO: 15460 - RNA, 22 nt, Homo sapiens
uucaggcuccugugagaaucua

SEQ ID NO: 15461 - RNA, 22 nt, Homo sapiens
uucccuuucugccuugaaucuu

SEQ ID NO: 15462 - RNA, 22 nt, Homo sapiens
uucuggcuuuuaaagaaauguu

SEQ ID NO: 15463 - RNA, 22 nt, Homo sapiens
uugcccuuuagguaacuauaua

SEQ ID NO: 15464 - RNA, 22 nt, Homo sapiens
uggcuagaccugcauaacagcu

SEQ ID NO: 15465 - RNA, 22 nt, Homo sapiens
uggcuagauauccagaguucug

SEQ ID NO: 15466 - RNA, 19 nt, Homo sapiens
uggcuagagcagauauccu

SEQ ID NO: 15467 - RNA, 22 nt, Homo sapiens
uggcuagaugagauguacugca

SEQ ID NO: 15468 - RNA, 22 nt, Homo sapiens
ugggugugaccgcucaaggggg

SEQ ID NO: 15469 - RNA, 22 nt, Homo sapiens
ugcccuuugucagaugaguagg

SEQ ID NO: 15470 - RNA, 20 nt, Homo sapiens
ucuuucgguuaccaggcagu

SEQ ID NO: 15471 - RNA, 22 nt, Homo sapiens
aacaggguggugccugguccau

SEQ ID NO: 15472 - RNA, 22 nt, Homo sapiens
ggucuagagagagggguggacu

SEQ ID NO: 15473 - RNA, 22 nt, Homo sapiens
gggcaagaagucuuguaguuuu

SEQ ID NO: 15474 - RNA, 23 nt, Homo sapiens
gggcuagaugagagcuuccuggg

SEQ ID NO: 15475 - RNA, 22 nt, Homo sapiens
gugggaugaucacaguucacug

SEQ ID NO: 15476 - RNA, 22 nt, Homo sapiens
aguggguguuccauuggauaaa

SEQ ID NO: 15477 - RNA, 19 nt, Homo sapiens
aguggguguuuucuguuug

SEQ ID NO: 15478 - RNA, 22 nt, Homo sapiens
cuacccuuaaguuucugugggg

SEQ ID NO: 15479 - RNA, 22 nt, Homo sapiens
guggcuagaaugaagguagcug

SEQ ID NO: 15480 - RNA, 22 nt, Homo sapiens
gugggaugaucgcuugagccca

SEQ ID NO: 15481 - RNA, 22 nt, Homo sapiens
ugaggugcagcaauccucaugu

SEQ ID NO: 15482 - RNA, 22 nt, Homo sapiens
uggagugcaauggugagaucuu

SEQ ID NO: 15483 - RNA, 22 nt, Homo sapiens
ucuggccuccuaugagaaucga

SEQ ID NO: 15484 - RNA, 22 nt, Homo sapiens
uuuagggcaggccuggugguga

SEQ ID NO: 15485 - RNA, 22 nt, Homo sapiens
uuucugggggugcugauggaaa

SEQ ID NO: 15486 - RNA, 23 nt, Homo sapiens
uggcuagacguccuuuccugaug

SEQ ID NO: 15487 - RNA, 19 nt, Homo sapiens
uggcuagaggccaggcguu

SEQ ID NO: 15488 - RNA, 18 nt, Homo sapiens
uguugguguucacucacu

SEQ ID NO: 15489 - RNA, 22 nt, Homo sapiens
ugggcuagaugcuuugggguca

SEQ ID NO: 15490 - RNA, 21 nt, Homo sapiens
uggagugcaacacuagguaua

SEQ ID NO: 15491 - RNA, 22 nt, Homo sapiens
uggagugcaauggcaccaucuu

SEQ ID NO: 15492 - RNA, 22 nt, Homo sapiens
ugcuagaagaucacacacauca

SEQ ID NO: 15493 - RNA, 18 nt, Homo sapiens
guggagugucuuccugga

SEQ ID NO: 15494 - RNA, 22 nt, Homo sapiens
cuagcaacauuucagugaguuu

SEQ ID NO: 15495 - RNA, 22 nt, Homo sapiens
cuagaacuagaacugcuggggu

SEQ ID NO: 15496 - RNA, 22 nt, Homo sapiens
cuagaagguaagagcuggaugc

SEQ ID NO: 15497 - RNA, 22 nt, Homo sapiens
cuagacacugacguuccuccga

SEQ ID NO: 15498 - RNA, 22 nt, Homo sapiens
cugcccuuucuauaugauguaa

SEQ ID NO: 15499 - RNA, 22 nt, Homo sapiens
ucccuuucuggaguuucccaag

SEQ ID NO: 15500 - RNA, 22 nt, Homo sapiens
ggcuagaauagggauagaccuu

SEQ ID NO: 15501 - RNA, 22 nt, Homo sapiens
gggcuagaauccgcgucucuug

SEQ ID NO: 15502 - RNA, 21 nt, Homo sapiens
ggauagaaaacuuggcuguau

SEQ ID NO: 15503 - RNA, 22 nt, Homo sapiens
gcggguguuuuacccuugcaga

SEQ ID NO: 15504 - RNA, 22 nt, Homo sapiens
gcccuguugcccaggcuggagu

SEQ ID NO: 15505 - RNA, 22 nt, Homo sapiens
gcccuuugugucuggcuggggu

SEQ ID NO: 15506 - RNA, 22 nt, Homo sapiens
cuguggguuuuacuguuuuacu

SEQ ID NO: 15507 - RNA, 22 nt, Homo sapiens
aggcuagaaucuuccaucuugg

SEQ ID NO: 15508 - RNA, 22 nt, Homo sapiens
aggcuagacuuugagaauuuuu

SEQ ID NO: 15509 - RNA, 22 nt, Homo sapiens
aggugcucuuccuguaggucac

SEQ ID NO: 15510 - RNA, 22 nt, Homo sapiens
ugugcgugugccuguaagaauu

SEQ ID NO: 15511 - RNA, 22 nt, Homo sapiens
uucagcaguggccaguggaaau

SEQ ID NO: 15512 - RNA, 19 nt, Homo sapiens
uucagcagugucugcucuu

SEQ ID NO: 15513 - RNA, 21 nt, Homo sapiens
uucucaggguguguccuaccc

SEQ ID NO: 15514 - RNA, 22 nt, Homo sapiens
auagagcuaccauagaauccag

SEQ ID NO: 15515 - RNA, 22 nt, Homo sapiens
aucagcagcaugaaaagcaacu

SEQ ID NO: 15516 - RNA, 22 nt, Homo sapiens
aucagcagcaugaaaacggacu

SEQ ID NO: 15517 - RNA, 22 nt, Homo sapiens
agcagcaugcaaauggacuaau

SEQ ID NO: 15518 - RNA, 19 nt, Homo sapiens
ggucagcaaagucuagcug

SEQ ID NO: 15519 - RNA, 22 nt, Homo sapiens
guggcagcacauauagguuguu

SEQ ID NO: 15520 - RNA, 22 nt, Homo sapiens
ucucagcacagucagggcgccu

SEQ ID NO: 15521 - RNA, 22 nt, Homo sapiens
ugaccacugucuaagauaggug

SEQ ID NO: 15522 - RNA, 22 nt, Homo sapiens
cugaggacaucagggaagcauc

SEQ ID NO: 15523 - RNA, 22 nt, Homo sapiens
caagagagcugaugguuuuaaa

SEQ ID NO: 15524 - RNA, 22 nt, Homo sapiens
gacuagggaaaauuauuuuguu

SEQ ID NO: 15525 - RNA, 22 nt, Homo sapiens
gacuagggaccaugagcaaucc

SEQ ID NO: 15526 - RNA, 22 nt, Homo sapiens
gaggcaaguggccaccgagucu

SEQ ID NO: 15527 - RNA, 21 nt, Homo sapiens
ggcaagagaauacaacauaaa

SEQ ID NO: 15528 - RNA, 19 nt, Homo sapiens
ggcaagaguuguucugugu

SEQ ID NO: 15529 - RNA, 22 nt, Homo sapiens
gucagcaucaccaugucuauga

SEQ ID NO: 15530 - RNA, 22 nt, Homo sapiens
gucagggagggauagaugauua

SEQ ID NO: 15531 - RNA, 22 nt, Homo sapiens
ucaaggacucagagagggauua

SEQ ID NO: 15532 - RNA, 18 nt, Homo sapiens
ucacggggagcagcagcc

SEQ ID NO: 15533 - RNA, 22 nt, Homo sapiens
uaagagagcuccaucuuuuccu

SEQ ID NO: 15534 - RNA, 22 nt, Homo sapiens
uagcucagcccagcuaagcuca

SEQ ID NO: 15535 - RNA, 21 nt, Homo sapiens
uagcucagugguguugccaua

SEQ ID NO: 15536 - RNA, 22 nt, Homo sapiens
ugcaagaggagacuguacucag

SEQ ID NO: 15537 - RNA, 22 nt, Homo sapiens
ugcauguucuuacucauacaug

SEQ ID NO: 15538 - RNA, 22 nt, Homo sapiens
uggcauuuugugugaauuagaa

SEQ ID NO: 15539 - RNA, 22 nt, Homo sapiens
uggcggagacauggacuucaga

SEQ ID NO: 15540 - RNA, 22 nt, Homo sapiens
ugucagcacaacucagguuccu

SEQ ID NO: 15541 - RNA, 22 nt, Homo sapiens
ugucaggaguuuuagaaucuua

SEQ ID NO: 15542 - RNA, 22 nt, Homo sapiens
ugagagcuuuuuugccugguga

SEQ ID NO: 15543 - RNA, 22 nt, Homo sapiens
uucagcaggccaggcccugacu

SEQ ID NO: 15544 - RNA, 22 nt, Homo sapiens
aagagaacugacaguaccuggg

SEQ ID NO: 15545 - RNA, 18 nt, Homo sapiens
aagagcucagcacagguu

SEQ ID NO: 15546 - RNA, 22 nt, Homo sapiens
aagagcucauccauaguuguca

SEQ ID NO: 15547 - RNA, 22 nt, Homo sapiens
aagagcucucuguagcauguga

SEQ ID NO: 15548 - RNA, 20 nt, Homo sapiens
aagagcucaccagaauaucu

SEQ ID NO: 15549 - RNA, 22 nt, Homo sapiens
agagaugaagauggggcucccg

SEQ ID NO: 15550 - RNA, 22 nt, Homo sapiens
ugucaggaggguccagagaaaa

SEQ ID NO: 15551 - RNA, 22 nt, Homo sapiens
ugucaggaugcuccuuuuggcu

SEQ ID NO: 15552 - RNA, 22 nt, Homo sapiens
ugucucagugauuggcuuucug

SEQ ID NO: 15553 - RNA, 22 nt, Homo sapiens
ugucucaguuacggcaauucca

SEQ ID NO: 15554 - RNA, 22 nt, Homo sapiens
ugucucaguuucuguggguuag

SEQ ID NO: 15555 - RNA, 22 nt, Homo sapiens
uuagcagccuucaagcuccaag

SEQ ID NO: 15556 - RNA, 22 nt, Homo sapiens
uuagcagcacaaaagcagacua

SEQ ID NO: 15557 - RNA, 22 nt, Homo sapiens
ugugguuuuauaaacgugaccu

SEQ ID NO: 15558 - RNA, 22 nt, Homo sapiens
uggcagcgugaauguggcugaa

SEQ ID NO: 15559 - RNA, 22 nt, Homo sapiens
ggcaagaggagauucugcuccc

SEQ ID NO: 15560 - RNA, 22 nt, Homo sapiens
ggucaggagaaugguaacugag

SEQ ID NO: 15561 - RNA, 22 nt, Homo sapiens
cucagcaguggauuuaccacca

SEQ ID NO: 15562 - RNA, 22 nt, Homo sapiens
agcagcuuugcauggccugugg

SEQ ID NO: 15563 - RNA, 22 nt, Homo sapiens
agcagcuuugcauggccuguga

SEQ ID NO: 15564 - RNA, 22 nt, Homo sapiens
ggugucaguuggccccuacugg

SEQ ID NO: 15565 - RNA, 22 nt, Homo sapiens
gucaucaggacgggucaucugc

SEQ ID NO: 15566 - RNA, 22 nt, Homo sapiens
uagcagcuuuauugagguaaau

SEQ ID NO: 15567 - RNA, 19 nt, Homo sapiens
uacaggacugagcugaggu

SEQ ID NO: 15568 - RNA, 22 nt, Homo sapiens
uagagcucaucuucuuuaaacu

SEQ ID NO: 15569 - RNA, 22 nt, Homo sapiens
gagguaagaaagucaguccuuc

SEQ ID NO: 15570 - RNA, 22 nt, Homo sapiens
caccaggugcccagcacggcca

SEQ ID NO: 15571 - RNA, 22 nt, Homo sapiens
cacuaggcuggagugcaguggc

SEQ ID NO: 15572 - RNA, 20 nt, Homo sapiens
ucagcagucuggagcagagg

SEQ ID NO: 15573 - RNA, 22 nt, Homo sapiens
ucagcaucacaggcagugagug

SEQ ID NO: 15574 - RNA, 22 nt, Homo sapiens
uuggcagcacgcaguccagagg

SEQ ID NO: 15575 - RNA, 22 nt, Homo sapiens
uucucagcccccugacagucag

SEQ ID NO: 15576 - RNA, 22 nt, Homo sapiens
uucauacaguggcugcacucca

SEQ ID NO: 15577 - RNA, 22 nt, Homo sapiens
agcaggucuuaacuugugaggu

SEQ ID NO: 15578 - RNA, 22 nt, Homo sapiens
agcagcucaugccuuugggagg

SEQ ID NO: 15579 - RNA, 22 nt, Homo sapiens
augagcuccucaaggucagaga

SEQ ID NO: 15580 - RNA, 22 nt, Homo sapiens
aucagcagcaugaaaacaggcu

SEQ ID NO: 15581 - RNA, 23 nt, Homo sapiens
auagagcuaggaugcagacagau

SEQ ID NO: 15582 - RNA, 17 nt, Homo sapiens
auaugaauuuuggagau

SEQ ID NO: 15583 - RNA, 22 nt, Homo sapiens
acugcacuuauccuccaauguu

SEQ ID NO: 15584 - RNA, 22 nt, Homo sapiens
acugcacugcagccuggccaac

SEQ ID NO: 15585 - RNA, 21 nt, Homo sapiens
uucuuugcucaguguuagagu

SEQ ID NO: 15586 - RNA, 18 nt, Homo sapiens
uugaaugcgucccagaga

SEQ ID NO: 15587 - RNA, 22 nt, Homo sapiens
uugaauguacuuguucucacua

SEQ ID NO: 15588 - RNA, 22 nt, Homo sapiens
uugaaugcguuguguggcccgu

SEQ ID NO: 15589 - RNA, 23 nt, Homo sapiens
uuugccacuuauuagcugggagg

SEQ ID NO: 15590 - RNA, 22 nt, Homo sapiens
uuugacacugggagugugggug

SEQ ID NO: 15591 - RNA, 22 nt, Homo sapiens
uuugaauggaaguuuugugaaa

SEQ ID NO: 15592 - RNA, 17 nt, Homo sapiens
ucccauguuucuucuac

SEQ ID NO: 15593 - RNA, 22 nt, Homo sapiens
aacagucaauugcugaugaccu

SEQ ID NO: 15594 - RNA, 20 nt, Homo sapiens
ugaauguaauuacagaugua

SEQ ID NO: 15595 - RNA, 22 nt, Homo sapiens
auuacuuugcaccaaccuaaua

SEQ ID NO: 15596 - RNA, 22 nt, Homo sapiens
auuugguuauucaguuguucag

SEQ ID NO: 15597 - RNA, 22 nt, Homo sapiens
auuguacugccccccuguugcu

SEQ ID NO: 15598 - RNA, 22 nt, Homo sapiens
auuguacuagguccuagggcuu

SEQ ID NO: 15599 - RNA, 22 nt, Homo sapiens
auuguacuccagccuaggcaac

SEQ ID NO: 15600 - RNA, 22 nt, Homo sapiens
auuguacuccagccugggcgac

SEQ ID NO: 15601 - RNA, 22 nt, Homo sapiens
auuguacuccagccugggcugc

SEQ ID NO: 15602 - RNA, 22 nt, Homo sapiens
cucaauuuggaauugucaguaa

SEQ ID NO: 15603 - RNA, 22 nt, Homo sapiens
guccauuuguuuccagagcacu

SEQ ID NO: 15604 - RNA, 22 nt, Homo sapiens
acugcacuccagacucugucuc

SEQ ID NO: 15605 - RNA, 22 nt, Homo sapiens
acugcacuccggccuggcaaca

SEQ ID NO: 15606 - RNA, 22 nt, Homo sapiens
acugcacucuagccuuggcaac

SEQ ID NO: 15607 - RNA, 22 nt, Homo sapiens
acugcacuucagccuugugaca

SEQ ID NO: 15608 - RNA, 20 nt, Homo sapiens
aucucugggcaaaggaaaau

SEQ ID NO: 15609 - RNA, 22 nt, Homo sapiens
augcuguuuugaauucucuaga

SEQ ID NO: 15610 - RNA, 21 nt, Homo sapiens
cuuugguuucugacuugcaua

SEQ ID NO: 15611 - RNA, 22 nt, Homo sapiens
augugcuaguaucaaacgagac

SEQ ID NO: 15612 - RNA, 22 nt, Homo sapiens
auuccauuuguuaucacacccg

SEQ ID NO: 15613 - RNA, 22 nt, Homo sapiens
uaugaauuuuauccaggauaua

SEQ ID NO: 15614 - RNA, 22 nt, Homo sapiens
uaauaauguuaggcuuacucaa

SEQ ID NO: 15615 - RNA, 22 nt, Homo sapiens
uggaauguuauggcuuuaaucu

SEQ ID NO: 15616 - RNA, 22 nt, Homo sapiens
ucccagugaaaccccaccuuca

SEQ ID NO: 15617 - RNA, 23 nt, Homo sapiens
ugaauguaucgaaugugggaaag

SEQ ID NO: 15618 - RNA, 22 nt, Homo sapiens
ugaauguacuuaacacuggauu

SEQ ID NO: 15619 - RNA, 22 nt, Homo sapiens
uuagcccagugggugcuucucu

SEQ ID NO: 15620 - RNA, 21 nt, Homo sapiens
ugucaagugggaaaacaugua

SEQ ID NO: 15621 - RNA, 22 nt, Homo sapiens
ugucaauauguaauaacugaau

SEQ ID NO: 15622 - RNA, 22 nt, Homo sapiens
uugguucucuuuauaugcugga

SEQ ID NO: 15623 - RNA, 22 nt, Homo sapiens
uuggaagagaagggagauaaac

SEQ ID NO: 15624 - RNA, 17 nt, Homo sapiens
uugaaugcauuacuugg

SEQ ID NO: 15625 - RNA, 22 nt, Homo sapiens
acugcacuccagccugcccaac

SEQ ID NO: 15626 - RNA, 22 nt, Homo sapiens
acugcacuccagccuguugaca

SEQ ID NO: 15627 - RNA, 22 nt, Homo sapiens
acugcacuccagccucgcaaca

SEQ ID NO: 15628 - RNA, 22 nt, Homo sapiens
augaauuuucugauguugggua

SEQ ID NO: 15629 - RNA, 22 nt, Homo sapiens
auagugcugcaauaaacacacg

SEQ ID NO: 15630 - RNA, 22 nt, Homo sapiens
aaucccugagcuagacacaaag

SEQ ID NO: 15631 - RNA, 22 nt, Homo sapiens
uuuuuggaggagguuagaucau

SEQ ID NO: 15632 - RNA, 22 nt, Homo sapiens
uuuccaagaugcuuacuuucuc

SEQ ID NO: 15633 - RNA, 22 nt, Homo sapiens
ucucugauuaaacaagauagug

SEQ ID NO: 15634 - RNA, 22 nt, Homo sapiens
uccuacaugcaguacauucaaa

SEQ ID NO: 15635 - RNA, 22 nt, Homo sapiens
uccucauggagaaccucugcua

SEQ ID NO: 15636 - RNA, 22 nt, Homo sapiens
uggaauguaacuugaaacuuuu

SEQ ID NO: 15637 - RNA, 22 nt, Homo sapiens
uggaauguggacucuuaugggg

SEQ ID NO: 15638 - RNA, 18 nt, Homo sapiens
uggaauguuuggguuaau

SEQ ID NO: 15639 - RNA, 22 nt, Homo sapiens
uaucauuguguuauuucuucca

SEQ ID NO: 15640 - RNA, 22 nt, Homo sapiens
gugugcaacuuucauuaauauu

SEQ ID NO: 15641 - RNA, 22 nt, Homo sapiens
guugauguugcagucuugagga

SEQ ID NO: 15642 - RNA, 22 nt, Homo sapiens
gagcugaaguuuccauuuguac

SEQ ID NO: 15643 - RNA, 22 nt, Homo sapiens
cuuuugugauucuucaguuacu

SEQ ID NO: 15644 - RNA, 22 nt, Homo sapiens
gcugcacuuuaaggcauccccu

SEQ ID NO: 15645 - RNA, 22 nt, Homo sapiens
gcuuuuggaggaacuuaagauu

SEQ ID NO: 15646 - RNA, 22 nt, Homo sapiens
cacauagucccugcuaaucuuc

SEQ ID NO: 15647 - RNA, 22 nt, Homo sapiens
caucccugaaccccagaaaucu

SEQ ID NO: 15648 - RNA, 22 nt, Homo sapiens
cugacuuuagaacccaaaaagu

SEQ ID NO: 15649 - RNA, 22 nt, Homo sapiens
cugagacuggugauuuaugaag

SEQ ID NO: 15650 - RNA, 22 nt, Homo sapiens
ucacaauggcugaacuaauuua

SEQ ID NO: 15651 - RNA, 22 nt, Homo sapiens
gugugauuguuaauuuuaggug

SEQ ID NO: 15652 - RNA, 22 nt, Homo sapiens
guagaucucaacacuggaagua

SEQ ID NO: 15653 - RNA, 22 nt, Homo sapiens
guagcaucauuugcaauuucau

SEQ ID NO: 15654 - RNA, 22 nt, Homo sapiens
uauugguuacuguugaucgcca

SEQ ID NO: 15655 - RNA, 17 nt, Homo sapiens
guugaguuugagucaag

SEQ ID NO: 15656 - RNA, 22 nt, Homo sapiens
acugcacuccagccucgugaca

SEQ ID NO: 15657 - RNA, 22 nt, Homo sapiens
acugcacuccagccugccgaca

SEQ ID NO: 15658 - RNA, 22 nt, Homo sapiens
acugcacuccagccugcugaca

SEQ ID NO: 15659 - RNA, 22 nt, Homo sapiens
acugcacuccagccugugcgua

SEQ ID NO: 15660 - RNA, 22 nt, Homo sapiens
aaugcuguucuuugcuuaaguu

SEQ ID NO: 15661 - RNA, 22 nt, Homo sapiens
auagugcugcaaaaaacauacg

SEQ ID NO: 15662 - RNA, 22 nt, Homo sapiens
auagugcugcaagaaacauacg

SEQ ID NO: 15663 - RNA, 22 nt, Homo sapiens
auagugcugcaauaaacauacg

SEQ ID NO: 15664 - RNA, 22 nt, Homo sapiens
auagugcugcaauaaacauaug

SEQ ID NO: 15665 - RNA, 22 nt, Homo sapiens
auagugcugcaaugaacauaca

SEQ ID NO: 15666 - RNA, 22 nt, Homo sapiens
auagugcugcacuaaacauaca

SEQ ID NO: 15667 - RNA, 22 nt, Homo sapiens
auagugcugcauuaaacauacg

SEQ ID NO: 15668 - RNA, 22 nt, Homo sapiens
auagugcuguauuaaacauacg

SEQ ID NO: 15669 - RNA, 22 nt, Homo sapiens
auagugcuuuuuagaaccugga

SEQ ID NO: 15670 - RNA, 21 nt, Homo sapiens
auuuuugcagagcugguagug

SEQ ID NO: 15671 - RNA, 18 nt, Homo sapiens
auuuuugcaguccacaug

SEQ ID NO: 15672 - RNA, 22 nt, Homo sapiens
cacaaugucugguaggccacuu

SEQ ID NO: 15673 - RNA, 22 nt, Homo sapiens
augucuuucauagagacccaga

SEQ ID NO: 15674 - RNA, 22 nt, Homo sapiens
cauugguuuuucaggaguauau

SEQ ID NO: 15675 - RNA, 22 nt, Homo sapiens
uuccaagugggaaacaaaaaug

SEQ ID NO: 15676 - RNA, 22 nt, Homo sapiens
uguuaucauuacguucuuaguu

SEQ ID NO: 15677 - RNA, 21 nt, Homo sapiens
uguuuuugcuguguaucucuc

SEQ ID NO: 15678 - RNA, 22 nt, Homo sapiens
uuggaauguauggcaucuugcg

SEQ ID NO: 15679 - RNA, 22 nt, Homo sapiens
uuugaauguaaugagcaggaag

SEQ ID NO: 15680 - RNA, 22 nt, Homo sapiens
uugauagacaucugaguuguug

SEQ ID NO: 15681 - RNA, 22 nt, Homo sapiens
cugagcccauucuggggagaag

SEQ ID NO: 15682 - RNA, 22 nt, Homo sapiens
ucucauggagucaggagcagaa

SEQ ID NO: 15683 - RNA, 22 nt, Homo sapiens
gugaccagaugggcaggggugu

SEQ ID NO: 15684 - RNA, 22 nt, Homo sapiens
cugaggguagaaggaucacuug

SEQ ID NO: 15685 - RNA, 18 nt, Homo sapiens
ugaggaaaggguuugcua

SEQ ID NO: 15686 - RNA, 22 nt, Homo sapiens
uucugcuagucugucagaucuu

SEQ ID NO: 15687 - RNA, 22 nt, Homo sapiens
auucauagugcuaagguguauc

SEQ ID NO: 15688 - RNA, 22 nt, Homo sapiens
uggagguaggacgaagaacucu

SEQ ID NO: 15689 - RNA, 22 nt, Homo sapiens
caaugcagcuuuuggagagaaa

SEQ ID NO: 15690 - RNA, 22 nt, Homo sapiens
ugaguagaacuccuggagaugu

SEQ ID NO: 15691 - RNA, 22 nt, Homo sapiens
uuacagucuuaggcagugcuuu

SEQ ID NO: 15692 - RNA, 22 nt, Homo sapiens
agcuccaugauaguaugucugu

SEQ ID NO: 15693 - RNA, 22 nt, Homo sapiens
uagcagcuuuauugagguaaau

SEQ ID NO: 15694 - RNA, 22 nt, Homo sapiens
uuggaaggcuccuaaugaaugg

SEQ ID NO: 15695 - RNA, 22 nt, Homo sapiens
ugaguguccaccccuuucacag

SEQ ID NO: 15696 - RNA, 22 nt, Homo sapiens
cuccauagucuucgaagaauga

SEQ ID NO: 15697 - RNA, 22 nt, Homo sapiens
ccacccuuccacacccugggua

SEQ ID NO: 15698 - RNA, 21 nt, Homo sapiens
aggucaugaagauguucuaau

SEQ ID NO: 15699 - RNA, 22 nt, Homo sapiens
acagugcuucugauaugaugcc

SEQ ID NO: 15700 - RNA, 21 nt, Homo sapiens
uaucacauuggugauuaaguu

SEQ ID NO: 15701 - RNA, 23 nt, Homo sapiens
uucuaucaggcccaggagcccug

SEQ ID NO: 15702 - RNA, 22 nt, Homo sapiens
agagguaagcaguggcaagugc

SEQ ID NO: 15703 - RNA, 22 nt, Homo sapiens
gauuuuuggggaagccucuuau

SEQ ID NO: 15704 - RNA, 23 nt, Homo sapiens
ugguuuguaagagauggacugga

SEQ ID NO: 15705 - RNA, 22 nt, Homo sapiens
uucuagcaauggcagagugucu

SEQ ID NO: 15706 - RNA, 22 nt, Homo sapiens
acacuugcuugcaauagccucc

SEQ ID NO: 15707 - RNA, 22 nt, Homo sapiens
cagugucugcauuuggaacuca

SEQ ID NO: 15708 - RNA, 22 nt, Homo sapiens
augaggaaggagccuuugucug

SEQ ID NO: 15709 - RNA, 22 nt, Homo sapiens
agaugauguuuacugagcauca

SEQ ID NO: 15710 - RNA, 22 nt, Homo sapiens
ucucccauccaugaacuucugu

SEQ ID NO: 15711 - RNA, 22 nt, Homo sapiens
ugagaugguaaauuuuuguugu

SEQ ID NO: 15712 - RNA, 20 nt, Homo sapiens
ugagccccuggacucaagcg

SEQ ID NO: 15713 - RNA, 22 nt, Homo sapiens
ucuggccuagaacaauuaauua

SEQ ID NO: 15714 - RNA, 22 nt, Homo sapiens
ggcaaaugaagauggagaggcu

SEQ ID NO: 15715 - RNA, 22 nt, Homo sapiens
uauggcuucuuauucuuucccg

SEQ ID NO: 15716 - RNA, 22 nt, Homo sapiens
guagagguagacuuccuugucu

SEQ ID NO: 15717 - RNA, 22 nt, Homo sapiens
ugggguaggcuguauacucugu

SEQ ID NO: 15718 - RNA, 22 nt, Homo sapiens
ugcaacacauugccccugcucu

SEQ ID NO: 15719 - RNA, 22 nt, Homo sapiens
ccacccuuccauucuuccucuu

SEQ ID NO: 15720 - RNA, 22 nt, Homo sapiens
ccagucuuggugucuguagcac

SEQ ID NO: 15721 - RNA, 22 nt, Homo sapiens
aucccgagacuuugcugaaguu

SEQ ID NO: 15722 - RNA, 21 nt, Homo sapiens
uggcacuauucacaauagcaa

SEQ ID NO: 15723 - RNA, 22 nt, Homo sapiens
ugagguguauugggggaaauuc

SEQ ID NO: 15724 - RNA, 22 nt, Homo sapiens
ugagguuggggucagggcuagc

SEQ ID NO: 15725 - RNA, 22 nt, Homo sapiens
augagggcggacgcccuggaga

SEQ ID NO: 15726 - RNA, 22 nt, Homo sapiens
ccucccuuuguugcaagggaaa

SEQ ID NO: 15727 - RNA, 22 nt, Homo sapiens
uggagguaggugauauguagca

SEQ ID NO: 15728 - RNA, 22 nt, Homo sapiens
uguaaugaucaaaucagaguaa

SEQ ID NO: 15729 - RNA, 22 nt, Homo sapiens
acagcagugccccacucuacug

SEQ ID NO: 15730 - RNA, 22 nt, Homo sapiens
uugagauggagucuugcucugu

SEQ ID NO: 15731 - RNA, 22 nt, Homo sapiens
uucauaguucuuuuagucauua

SEQ ID NO: 15732 - RNA, 22 nt, Homo sapiens
auggagagaauuauucucucag

SEQ ID NO: 15733 - RNA, 22 nt, Homo sapiens
aucacauggccagguaguaauc

SEQ ID NO: 15734 - RNA, 22 nt, Homo sapiens
acaugagacuggguuuguaggg

SEQ ID NO: 15735 - RNA, 22 nt, Homo sapiens
gggaagauauaggcugggcacc

SEQ ID NO: 15736 - RNA, 22 nt, Homo sapiens
auguaacaguauuuggagaugu

SEQ ID NO: 15737 - RNA, 20 nt, Homo sapiens
agguagauagaugauagaua

SEQ ID NO: 15738 - RNA, 22 nt, Homo sapiens
aagcuccauuucugccaugaga

SEQ ID NO: 15739 - RNA, 22 nt, Homo sapiens
cacugcgacguccgccucccgg

SEQ ID NO: 15740 - RNA, 23 nt, Homo sapiens
gaguacauuaaaagcccagacug

SEQ ID NO: 15741 - RNA, 22 nt, Homo sapiens
ugacaagugauuaaggcauauu

SEQ ID NO: 15742 - RNA, 22 nt, Homo sapiens
cacagucugggcuuguuuguac

SEQ ID NO: 15743 - RNA, 22 nt, Homo sapiens
auggccugaugcaccuguccca

SEQ ID NO: 15744 - RNA, 22 nt, Homo sapiens
ucagguaguuugugggagauga

SEQ ID NO: 15745 - RNA, 21 nt, Homo sapiens
uugagaagaauuagcucuucc

SEQ ID NO: 15746 - RNA, 22 nt, Homo sapiens
gauaguugugagaacucuuacu

SEQ ID NO: 15747 - RNA, 22 nt, Homo sapiens
ugccugagcccagcccuguagu

SEQ ID NO: 15748 - RNA, 22 nt, Homo sapiens
uuuuggcuuaaagagaauguau

SEQ ID NO: 15749 - RNA, 22 nt, Homo sapiens
cugguuguucuggaugggcagg

SEQ ID NO: 15750 - RNA, 22 nt, Homo sapiens
uacaagcaggaaaugguauaug

SEQ ID NO: 15751 - RNA, 22 nt, Homo sapiens
uagaucuuuaaaaggugcuaga

SEQ ID NO: 15752 - RNA, 22 nt, Homo sapiens
ugagguaaugcuguagcuguga

SEQ ID NO: 15753 - RNA, 22 nt, Homo sapiens
auagcagcaccccacuaccuca

SEQ ID NO: 15754 - RNA, 22 nt, Homo sapiens
agguuguguuugugauuagaua

SEQ ID NO: 15755 - RNA, 22 nt, Homo sapiens
ucaaggcacauuugacauuuuc

SEQ ID NO: 15756 - RNA, 22 nt, Homo sapiens
cugagagaggagcuaaaacugc

SEQ ID NO: 15757 - RNA, 22 nt, Homo sapiens
uggaguguuggggcaggaucuc

SEQ ID NO: 15758 - RNA, 22 nt, Homo sapiens
augucaacauagacaguagagu

SEQ ID NO: 15759 - RNA, 22 nt, Homo sapiens
ugaaggacauaaggcagaguga

SEQ ID NO: 15760 - RNA, 22 nt, Homo sapiens
aacuggccuggcgugcagaggg

SEQ ID NO: 15761 - RNA, 22 nt, Homo sapiens
agccgguguccacgaagaagag

SEQ ID NO: 15762 - RNA, 22 nt, Homo sapiens
aggagcacaauggucaugugga

SEQ ID NO: 15763 - RNA, 20 nt, Homo sapiens
uaugaaacaguguagagcaa

SEQ ID NO: 15764 - RNA, 22 nt, Homo sapiens
uugagggaagccagaggucugc

SEQ ID NO: 15765 - RNA, 22 nt, Homo sapiens
aagccacuguaccugucucuua

SEQ ID NO: 15766 - RNA, 22 nt, Homo sapiens
uggcaaaugaagucagcuguac

SEQ ID NO: 15767 - RNA, 22 nt, Homo sapiens
cuucuugcuguguccucacaug

SEQ ID NO: 15768 - RNA, 22 nt, Homo sapiens
cauagcacugcacuucagccug

SEQ ID NO: 15769 - RNA, 22 nt, Homo sapiens
uucaggcuccugugagaaucua

SEQ ID NO: 15770 - RNA, 22 nt, Homo sapiens
ucuuuggaggcgaucuguuuga

SEQ ID NO: 15771 - RNA, 22 nt, Homo sapiens
gagccuguaggaggagaggugg

SEQ ID NO: 15772 - RNA, 22 nt, Homo sapiens
uugagacggaguuuugcucuug

SEQ ID NO: 15773 - RNA, 22 nt, Homo sapiens
auugcacuccagccuugugaca

SEQ ID NO: 15774 - RNA, 22 nt, Homo sapiens
caugaaagugagaaacuccugg

SEQ ID NO: 15775 - RNA, 22 nt, Homo sapiens
aggcaugauggcuccagaucau

SEQ ID NO: 15776 - RNA, 22 nt, Homo sapiens
aggagguagggugugaaacagc

SEQ ID NO: 15777 - RNA, 22 nt, Homo sapiens
ggaaagaucagcuaaauguaag

SEQ ID NO: 15778 - RNA, 22 nt, Homo sapiens
ucugaguggcagaaugagcuga

SEQ ID NO: 15779 - RNA, 22 nt, Homo sapiens
auacuguacugaaguacccauu

SEQ ID NO: 15780 - RNA, 22 nt, Homo sapiens
uuugguugcauucacauauuuc

SEQ ID NO: 15781 - RNA, 17 nt, Homo sapiens
augagcucaucauuuuu

SEQ ID NO: 15782 - RNA, 19 nt, Homo sapiens
cugcaugagacaguugguu

SEQ ID NO: 15783 - RNA, 22 nt, Homo sapiens
ugagaugacgacacaccucagu

SEQ ID NO: 15784 - RNA, 22 nt, Homo sapiens
uucucugggacauaggucgggu

SEQ ID NO: 15785 - RNA, 22 nt, Homo sapiens
ugagguaacaaacuaugaguua

SEQ ID NO: 15786 - RNA, 22 nt, Homo sapiens
ucuccggguggcggcgaaggga

SEQ ID NO: 15787 - RNA, 22 nt, Homo sapiens
aucacagaguuaaaacuuucuu

SEQ ID NO: 15788 - RNA, 22 nt, Homo sapiens
gagcuguugguuugaaagaauu

SEQ ID NO: 15789 - RNA, 22 nt, Homo sapiens
guguccucgaguacacaucagg

SEQ ID NO: 15790 - RNA, 22 nt, Homo sapiens
uuugcacuuuuguaauaugguu

SEQ ID NO: 15791 - RNA, 22 nt, Homo sapiens
cuuuuggucuaucagagaagca

SEQ ID NO: 15792 - RNA, 22 nt, Homo sapiens
uuguacuuuuaguagagacggg

SEQ ID NO: 15793 - RNA, 20 nt, Homo sapiens
ugggaaauguccaggacaua

SEQ ID NO: 15794 - RNA, 22 nt, Homo sapiens
ugugccacugcacucccgccug

SEQ ID NO: 15795 - RNA, 22 nt, Homo sapiens
caaaggcuuccacugcauccuu

SEQ ID NO: 15796 - RNA, 22 nt, Homo sapiens
uggcuuuuguuauuuggaagcu

SEQ ID NO: 15797 - RNA, 23 nt, Homo sapiens
aauugcacauuccuugcuggcag

SEQ ID NO: 15798 - RNA, 22 nt, Homo sapiens
ugggcaagugacuuggcuucuc

SEQ ID NO: 15799 - RNA, 22 nt, Homo sapiens
uggacugagauuucagcugcca

SEQ ID NO: 15800 - RNA, 20 nt, Homo sapiens
uucaugggagcaaagaggcc

SEQ ID NO: 15801 - RNA, 22 nt, Homo sapiens
uugagagaaaaggccaugccuu

SEQ ID NO: 15802 - RNA, 22 nt, Homo sapiens
aacagcacacccgcugcuucca

SEQ ID NO: 15803 - RNA, 22 nt, Homo sapiens
ucaguagagacaggauuucacc

SEQ ID NO: 15804 - RNA, 22 nt, Homo sapiens
uuggcagaaaaggucggggguu

SEQ ID NO: 15805 - RNA, 22 nt, Homo sapiens
gucucuuguuaucauuucugag

SEQ ID NO: 15806 - RNA, 22 nt, Homo sapiens
uguaauaguaggcucacauuug

SEQ ID NO: 15807 - RNA, 19 nt, Homo sapiens
uagaugucuuugcauagau

SEQ ID NO: 15808 - RNA, 23 nt, Homo sapiens
uuggaaugagaccuaagaguuuu

SEQ ID NO: 15809 - RNA, 22 nt, Homo sapiens
aagaggcuguaggauaaugccu

SEQ ID NO: 15810 - RNA, 22 nt, Homo sapiens
uugaggacugcuaagcauuuga

SEQ ID NO: 15811 - RNA, 23 nt, Homo sapiens
augagguaucugagcccagaaau

SEQ ID NO: 15812 - RNA, 22 nt, Homo sapiens
augccaagagacaaagggaauc

SEQ ID NO: 15813 - RNA, 22 nt, Homo sapiens
agucagauuggcauuuguuggg

SEQ ID NO: 15814 - RNA, 22 nt, Homo sapiens
cuagcccagugcuccuggauca

SEQ ID NO: 15815 - RNA, 22 nt, Homo sapiens
accacagugcuuccugcucacg

SEQ ID NO: 15816 - RNA, 22 nt, Homo sapiens
ucacaaagcuuggccugcuucu

SEQ ID NO: 15817 - RNA, 23 nt, Homo sapiens
uucaaauguucucugguugucag

SEQ ID NO: 15818 - RNA, 22 nt, Homo sapiens
ucacagacauugaggggaccuu

SEQ ID NO: 15819 - RNA, 22 nt, Homo sapiens
ugagguaauagauaauauuuuu

SEQ ID NO: 15820 - RNA, 20 nt, Homo sapiens
ucucccaaacagcaggcccu

SEQ ID NO: 15821 - RNA, 22 nt, Homo sapiens
ugacaaguaaacagucagcacc

SEQ ID NO: 15822 - RNA, 20 nt, Homo sapiens
cucagauuauucugaagcaa

SEQ ID NO: 15823 - RNA, 22 nt, Homo sapiens
ugucacuuugccuucuggacuu

SEQ ID NO: 15824 - RNA, 22 nt, Homo sapiens
ggagucugauguucuaaggcag

SEQ ID NO: 15825 - RNA, 22 nt, Homo sapiens
ucuucagucauauuggccugga

SEQ ID NO: 15826 - RNA, 22 nt, Homo sapiens
caaagcacuuggcuuggaagau

SEQ ID NO: 15827 - RNA, 22 nt, Homo sapiens
acaguacuuuuggauuugugaa

SEQ ID NO: 15828 - RNA, 22 nt, Homo sapiens
ucagucuuuuuuuggcaagcau

SEQ ID NO: 15829 - RNA, 22 nt, Homo sapiens
gcacaggguuacauucuaaggu

SEQ ID NO: 15830 - RNA, 22 nt, Homo sapiens
uugaggaaugucauuuguguuu

SEQ ID NO: 15831 - RNA, 22 nt, Homo sapiens
augaaugcuuuuggauguaucu

SEQ ID NO: 15832 - RNA, 22 nt, Homo sapiens
caucccauucgaggggcacagc

SEQ ID NO: 15833 - RNA, 22 nt, Homo sapiens
augagaugaggaauggcccucc

SEQ ID NO: 15834 - RNA, 23 nt, Homo sapiens
uugcauagacauccucauagauu

SEQ ID NO: 15835 - RNA, 22 nt, Homo sapiens
gcaugaugaauaauaucacaag

SEQ ID NO: 15836 - RNA, 22 nt, Homo sapiens
aguuuuugcugauagcaugcuu

SEQ ID NO: 15837 - RNA, 21 nt, Homo sapiens
ccucuuugagggaagaaaggg

SEQ ID NO: 15838 - RNA, 22 nt, Homo sapiens
uagaagcacuaucccuccuagu

SEQ ID NO: 15839 - RNA, 22 nt, Homo sapiens
aaggcaagguggauaaugaagc

SEQ ID NO: 15840 - RNA, 23 nt, Homo sapiens
uuugcacuugcuccuucuauggc

SEQ ID NO: 15841 - RNA, 22 nt, Homo sapiens
uggcuuuucauccugggacauu

SEQ ID NO: 15842 - RNA, 22 nt, Homo sapiens
uaaggaguagaauaguaaggca

SEQ ID NO: 15843 - RNA, 22 nt, Homo sapiens
acacauacacauaugguguaua

SEQ ID NO: 15844 - RNA, 22 nt, Homo sapiens
uguuuuggagguccucacuaga

SEQ ID NO: 15845 - RNA, 22 nt, Homo sapiens
augccaagaugagcacgcgucu

SEQ ID NO: 15846 - RNA, 22 nt, Homo sapiens
cuucucagugcucaucuuauuu

SEQ ID NO: 15847 - RNA, 22 nt, Homo sapiens
uugguaagguggaugaugaaua

SEQ ID NO: 15848 - RNA, 22 nt, Homo sapiens
guguauguuguccauggaugcg

SEQ ID NO: 15849 - RNA, 22 nt, Homo sapiens
ugagagaugaacucugauaugu

SEQ ID NO: 15850 - RNA, 22 nt, Homo sapiens
uaaggcacccuucugaguagag

SEQ ID NO: 15851 - RNA, 20 nt, Homo sapiens
ucucauggagggaaagagca

SEQ ID NO: 15852 - RNA, 21 nt, Homo sapiens
agccaguguuccuuguggcuc

SEQ ID NO: 15853 - RNA, 22 nt, Homo sapiens
uguugcauuugucaaggucaag

SEQ ID NO: 15854 - RNA, 22 nt, Homo sapiens
aucucuugccagucagaauggu

SEQ ID NO: 15855 - RNA, 22 nt, Homo sapiens
uucccgggguggaaugcaguga

SEQ ID NO: 15856 - RNA, 22 nt, Homo sapiens
gcugauggugcaguucuagccu

SEQ ID NO: 15857 - RNA, 23 nt, Homo sapiens
ugagguguuaagcagacuugucu

SEQ ID NO: 15858 - RNA, 22 nt, Homo sapiens
uaaggcacuacuuuaggcuuuc

SEQ ID NO: 15859 - RNA, 22 nt, Homo sapiens
ccuucuuuuguaaggcugaaua

SEQ ID NO: 15860 - RNA, 22 nt, Homo sapiens
gagguaugugggcagacauuua

SEQ ID NO: 15861 - RNA, 22 nt, Homo sapiens
aauugcacuacugcacucccac

SEQ ID NO: 15862 - RNA, 22 nt, Homo sapiens
cagcugaugucgaaugcacucu

SEQ ID NO: 15863 - RNA, 17 nt, Homo sapiens
ggaaugaauuccagccc

SEQ ID NO: 15864 - RNA, 22 nt, Homo sapiens
ucagauugaugcauacuuaaau

SEQ ID NO: 15865 - RNA, 22 nt, Homo sapiens
gaugccuuuuuguccucaguua

SEQ ID NO: 15866 - RNA, 22 nt, Homo sapiens
aucacagauauggguuuaaauc

SEQ ID NO: 15867 - RNA, 22 nt, Homo sapiens
gagagguaguuuuuuggucguc

SEQ ID NO: 15868 - RNA, 22 nt, Homo sapiens
uugagggaggcagggcuugucu

SEQ ID NO: 15869 - RNA, 23 nt, Homo sapiens
ggaguguaaugacucgaucucgg

SEQ ID NO: 15870 - RNA, 21 nt, Homo sapiens
uggaauuaauggagagguguu

SEQ ID NO: 15871 - RNA, 22 nt, Homo sapiens
uuacagauggauggcagcuggc

SEQ ID NO: 15872 - RNA, 22 nt, Homo sapiens
uagauuaucucaccacucgagu

SEQ ID NO: 15873 - RNA, 22 nt, Homo sapiens
cuggcgagacagcuccaucacu

SEQ ID NO: 15874 - RNA, 22 nt, Homo sapiens
uugguaaaaugaccacagacau

SEQ ID NO: 15875 - RNA, 22 nt, Homo sapiens
ugaguuaauuuuuguaucaugu

SEQ ID NO: 15876 - RNA, 22 nt, Homo sapiens
acagugcuguuguguuuucacg

SEQ ID NO: 15877 - RNA, 22 nt, Homo sapiens
cuuuguguaggugccucuggcu

SEQ ID NO: 15878 - RNA, 22 nt, Homo sapiens
uugagauggaguuuugcucuug

SEQ ID NO: 15879 - RNA, 19 nt, Homo sapiens
auaguguaggaaaacagcu

SEQ ID NO: 15880 - RNA, 22 nt, Homo sapiens
ucccaguggucuugaaacaggg

SEQ ID NO: 15881 - RNA, 22 nt, Homo sapiens
uagugcuguaauucuaaugaaa

SEQ ID NO: 15882 - RNA, 22 nt, Homo sapiens
cucucaagaugcugggauuaca

SEQ ID NO: 15883 - RNA, 22 nt, Homo sapiens
cucaguagaaaauacauggacu

SEQ ID NO: 15884 - RNA, 22 nt, Homo sapiens
ugguaagaucagaacuggaguc

SEQ ID NO: 15885 - RNA, 22 nt, Homo sapiens
augcagagucccagccccuagc

SEQ ID NO: 15886 - RNA, 22 nt, Homo sapiens
uuuuggucuccaguuucugcug

SEQ ID NO: 15887 - RNA, 23 nt, Homo sapiens
uuucaguaguuguauccuguugc

SEQ ID NO: 15888 - RNA, 22 nt, Homo sapiens
gcaguguuggggccggaggcug

SEQ ID NO: 15889 - RNA, 22 nt, Homo sapiens
uugagaugaaguuuugcucuuu

SEQ ID NO: 15890 - RNA, 22 nt, Homo sapiens
uugagaugaagucuugcucucu

SEQ ID NO: 15891 - RNA, 22 nt, Homo sapiens
ucucauggagguagagaguaaa

SEQ ID NO: 15892 - RNA, 22 nt, Homo sapiens
cauggcacuguaugaaaugugc

SEQ ID NO: 15893 - RNA, 22 nt, Homo sapiens
uggagacaaagauagaaaagca

SEQ ID NO: 15894 - RNA, 22 nt, Homo sapiens
cccugagcagccugaguuuccc

SEQ ID NO: 15895 - RNA, 20 nt, Homo sapiens
ucaaggcacgaauaaaaguu

SEQ ID NO: 15896 - RNA, 22 nt, Homo sapiens
acuaugcuuuucuuagaauuaa

SEQ ID NO: 15897 - RNA, 22 nt, Homo sapiens
ugagguaagauguucauuuuuc

SEQ ID NO: 15898 - RNA, 22 nt, Homo sapiens
uuggcaaagaggaaugccacuu

SEQ ID NO: 15899 - RNA, 22 nt, Homo sapiens
uuacagucucaagagugcugca

SEQ ID NO: 15900 - RNA, 22 nt, Homo sapiens
augagcucauaaagagugauuu

SEQ ID NO: 15901 - RNA, 22 nt, Homo sapiens
agcaccacaauuuccugccuaa

SEQ ID NO: 15902 - RNA, 22 nt, Homo sapiens
augagggagggguggugccgca

SEQ ID NO: 15903 - RNA, 22 nt, Homo sapiens
ugauggcauuucauguuuguaa

SEQ ID NO: 15904 - RNA, 22 nt, Homo sapiens
agaagaacauagggugacugaa

SEQ ID NO: 15905 - RNA, 22 nt, Homo sapiens
ugaguagauccaagacuguccu

SEQ ID NO: 15906 - RNA, 22 nt, Homo sapiens
cauggcacugagcagguaugca

SEQ ID NO: 15907 - RNA, 22 nt, Homo sapiens
uucagauugcauaccgaaagua

SEQ ID NO: 15908 - RNA, 22 nt, Homo sapiens
gugucccagugugcauacaggu

SEQ ID NO: 15909 - RNA, 22 nt, Homo sapiens
uacuguacugcaguucugcaaa

SEQ ID NO: 15910 - RNA, 22 nt, Homo sapiens
ucuucuagcggaacccucuugu

SEQ ID NO: 15911 - RNA, 19 nt, Homo sapiens
ugucccagccauagaggca

SEQ ID NO: 15912 - RNA, 22 nt, Homo sapiens
augucaaggugggugauaguuu

SEQ ID NO: 15913 - RNA, 22 nt, Homo sapiens
uuggagagugauauucagaugc

SEQ ID NO: 15914 - RNA, 22 nt, Homo sapiens
acacaaugguaaguguuugugu

SEQ ID NO: 15915 - RNA, 21 nt, Homo sapiens
agccugugggucauaguugcc

SEQ ID NO: 15916 - RNA, 22 nt, Homo sapiens
uaugaugcuguuuagaaucucu

SEQ ID NO: 15917 - RNA, 22 nt, Homo sapiens
guuuugguuauauggaucaguu

SEQ ID NO: 15918 - RNA, 21 nt, Homo sapiens
auguaaugaagaagccacugg

SEQ ID NO: 15919 - RNA, 22 nt, Homo sapiens
ucaaggcaguggccuuccuucu

SEQ ID NO: 15920 - RNA, 21 nt, Homo sapiens
gcuuuuucggaagucuuuggc

SEQ ID NO: 15921 - RNA, 22 nt, Homo sapiens
ugguuguuuuaaaugucgucug

SEQ ID NO: 15922 - RNA, 22 nt, Homo sapiens
guguaugugagaaugcucaugu

SEQ ID NO: 15923 - RNA, 22 nt, Homo sapiens
uaccaaaguuucggccucuguu

SEQ ID NO: 15924 - RNA, 22 nt, Homo sapiens
uuggucacugacauguuugaaa

SEQ ID NO: 15925 - RNA, 19 nt, Homo sapiens
ugccaagaaagucagcuua

SEQ ID NO: 15926 - RNA, 22 nt, Homo sapiens
cucauggauggucuggcagcca

SEQ ID NO: 15927 - RNA, 22 nt, Homo sapiens
uggauagauacuauccaggacu

SEQ ID NO: 15928 - RNA, 22 nt, Homo sapiens
ccacugcacuccagcccggcaa

SEQ ID NO: 15929 - RNA, 22 nt, Homo sapiens
ucacuauugacaacagugugga

SEQ ID NO: 15930 - RNA, 22 nt, Homo sapiens
caugggacugucuuggcuauac

SEQ ID NO: 15931 - RNA, 18 nt, Homo sapiens
ccagugcaaggaaagccc

SEQ ID NO: 15932 - RNA, 22 nt, Homo sapiens
cugaaagagcauuugaaugggu

SEQ ID NO: 15933 - RNA, 22 nt, Homo sapiens
aguggcacaauuuugacucccc

SEQ ID NO: 15934 - RNA, 22 nt, Homo sapiens
agguauguauguaugggagaaa

SEQ ID NO: 15935 - RNA, 17 nt, Homo sapiens
cuaaggcaagagucugc

SEQ ID NO: 15936 - RNA, 22 nt, Homo sapiens
uuucgguuaucuagcuuuauga

SEQ ID NO: 15937 - RNA, 22 nt, Homo sapiens
augagagugagagcagccccuu

SEQ ID NO: 15938 - RNA, 22 nt, Homo sapiens
gggaaauguaaagucauaagau

SEQ ID NO: 15939 - RNA, 20 nt, Homo sapiens
auguucuggaggacagaagc

SEQ ID NO: 15940 - RNA, 22 nt, Homo sapiens
uugggacuggaaggaguaaggg

SEQ ID NO: 15941 - RNA, 22 nt, Homo sapiens
uccagugcauucagacacuugg

SEQ ID NO: 15942 - RNA, 22 nt, Homo sapiens
gcagcacauggcagaacauauu

SEQ ID NO: 15943 - RNA, 22 nt, Homo sapiens
ucaugggagcccccaucaugag

SEQ ID NO: 15944 - RNA, 22 nt, Homo sapiens
cugggaucaguucuagucagaa

SEQ ID NO: 15945 - RNA, 22 nt, Homo sapiens
uccugagagcagacccucuaua

SEQ ID NO: 15946 - RNA, 23 nt, Homo sapiens
ggaguguauuggcacgaucucag

SEQ ID NO: 15947 - RNA, 22 nt, Homo sapiens
aaagagcugagaccugguggag

SEQ ID NO: 15948 - RNA, 22 nt, Homo sapiens
uugaauagugacuuugauucug

SEQ ID NO: 15949 - RNA, 21 nt, Homo sapiens
uggaaucuauagaggcaguag

SEQ ID NO: 15950 - RNA, 22 nt, Homo sapiens
guggcagagucagagggaaaug

SEQ ID NO: 15951 - RNA, 22 nt, Homo sapiens
ugggaaugaaauuacauagcuu

SEQ ID NO: 15952 - RNA, 22 nt, Homo sapiens
uuuggauagugugguccuuuua

SEQ ID NO: 15953 - RNA, 22 nt, Homo sapiens
gucucuugguuuagagcauuua

SEQ ID NO: 15954 - RNA, 22 nt, Homo sapiens
ucucugagaccacuccaaacuc

SEQ ID NO: 15955 - RNA, 22 nt, Homo sapiens
agcugccagucuuguaaggccu

SEQ ID NO: 15956 - RNA, 22 nt, Homo sapiens
ugguguccugucucugcgcuug

SEQ ID NO: 15957 - RNA, 22 nt, Homo sapiens
uugaauaguggugaaaguuuga

SEQ ID NO: 15958 - RNA, 22 nt, Homo sapiens
ccauggcaauggucagucuauu

SEQ ID NO: 15959 - RNA, 22 nt, Homo sapiens
uugaauaggcucaugcuuauca

SEQ ID NO: 15960 - RNA, 19 nt, Homo sapiens
augccacagugaggucaga

SEQ ID NO: 15961 - RNA, 22 nt, Homo sapiens
augauauggucacccuuaugaa

SEQ ID NO: 15962 - RNA, 22 nt, Homo sapiens
aggcaaaugccagcaaucacac

SEQ ID NO: 15963 - RNA, 22 nt, Homo sapiens
uugagauggagucuugcucucu

SEQ ID NO: 15964 - RNA, 22 nt, Homo sapiens
uugagauggaguguugcucugu

SEQ ID NO: 15965 - RNA, 22 nt, Homo sapiens
ugcauggaagggagggaaagag

SEQ ID NO: 15966 - RNA, 22 nt, Homo sapiens
aggagcacuggccuuggaguca

SEQ ID NO: 15967 - RNA, 17 nt, Homo sapiens
cucacugagaacagcua

SEQ ID NO: 15968 - RNA, 22 nt, Homo sapiens
cauagcacugagcucuacccuc

SEQ ID NO: 15969 - RNA, 21 nt, Homo sapiens
ccaugggacggaaugaauaca

SEQ ID NO: 15970 - RNA, 22 nt, Homo sapiens
ugggaaauguagccuagcugug

SEQ ID NO: 15971 - RNA, 22 nt, Homo sapiens
uugucacucuuccuaggguagg

SEQ ID NO: 15972 - RNA, 22 nt, Homo sapiens
gagguaugauugacauauaaaa

SEQ ID NO: 15973 - RNA, 20 nt, Homo sapiens
uggcauguugguaugcaccc

SEQ ID NO: 15974 - RNA, 18 nt, Homo sapiens
cucacaguaacuuuuaag

SEQ ID NO: 15975 - RNA, 19 nt, Homo sapiens
aauaaugccagaugucugu

SEQ ID NO: 15976 - RNA, 22 nt, Homo sapiens
auugucauuuucugagaaguaa

SEQ ID NO: 15977 - RNA, 22 nt, Homo sapiens
ugacuugauacauguuuuugaa

SEQ ID NO: 15978 - RNA, 18 nt, Homo sapiens
uugcauaguguauccaaa

SEQ ID NO: 15979 - RNA, 21 nt, Homo sapiens
caauggcacaaucucugcuca

SEQ ID NO: 15980 - RNA, 22 nt, Homo sapiens
uuccuucaugcuugaaggguau

SEQ ID NO: 15981 - RNA, 22 nt, Homo sapiens
uaugccucuucauaaaguauga

SEQ ID NO: 15982 - RNA, 22 nt, Homo sapiens
uugaaagacaucaccuacugcu

SEQ ID NO: 15983 - RNA, 22 nt, Homo sapiens
cuuuuggugguucugaugcagg

SEQ ID NO: 15984 - RNA, 22 nt, Homo sapiens
acugagccuuuaaaugacuuca

SEQ ID NO: 15985 - RNA, 22 nt, Homo sapiens
augauggagguagauuguccau

SEQ ID NO: 15986 - RNA, 22 nt, Homo sapiens
uccacaauggcugaacuagauu

SEQ ID NO: 15987 - RNA, 22 nt, Homo sapiens
gagaaccauuuggagaaaaagu

SEQ ID NO: 15988 - RNA, 22 nt, Homo sapiens
cuugggauauguguuacucugu

SEQ ID NO: 15989 - RNA, 22 nt, Homo sapiens
guggaagaccagacuuuccaac

SEQ ID NO: 15990 - RNA, 22 nt, Homo sapiens
gagauggagucuuuuucuguca

SEQ ID NO: 15991 - RNA, 22 nt, Homo sapiens
ggcaaagagacaugcaucgggg

SEQ ID NO: 15992 - RNA, 22 nt, Homo sapiens
augaggugaggucaguaaggua

SEQ ID NO: 15993 - RNA, 22 nt, Homo sapiens
uagauuguaauaugcagaaugg

SEQ ID NO: 15994 - RNA, 22 nt, Homo sapiens
ccaucacacugugauuauuauc

SEQ ID NO: 15995 - RNA, 22 nt, Homo sapiens
augaggaagucaggcccagggg

SEQ ID NO: 15996 - RNA, 22 nt, Homo sapiens
uuuguacugagccaagauggua

SEQ ID NO: 15997 - RNA, 22 nt, Homo sapiens
ucacagacugagccaaauagag

SEQ ID NO: 15998 - RNA, 20 nt, Homo sapiens
ucacugugaacuucuugagg

SEQ ID NO: 15999 - RNA, 23 nt, Homo sapiens
uuaaggugaugucuuugugccuc

SEQ ID NO: 16000 - RNA, 22 nt, Homo sapiens
augguauggaaggucuggagga

SEQ ID NO: 16001 - RNA, 22 nt, Homo sapiens
gugaaugaaugggugaauacau

SEQ ID NO: 16002 - RNA, 22 nt, Homo sapiens
uggcaagaacgaaauguagggu

SEQ ID NO: 16003 - RNA, 22 nt, Homo sapiens
gcacaguguuacuugauauauu

SEQ ID NO: 16004 - RNA, 22 nt, Homo sapiens
uucaggguggagaguaugaggu

SEQ ID NO: 16005 - RNA, 21 nt, Homo sapiens
acaguacuugagaucuuuuga

SEQ ID NO: 16006 - RNA, 22 nt, Homo sapiens
cccugaagaaagccuaggacau

SEQ ID NO: 16007 - RNA, 22 nt, Homo sapiens
aagagccgcaagggugaagggu

SEQ ID NO: 16008 - RNA, 22 nt, Homo sapiens
ccaagccucaguuucccucugu

SEQ ID NO: 16009 - RNA, 22 nt, Homo sapiens
aucugcauucccauguuuauug

SEQ ID NO: 16010 - RNA, 22 nt, Homo sapiens
acagugcuuucaauguucagua

SEQ ID NO: 16011 - RNA, 22 nt, Homo sapiens
cugauaguucucuuuagaguuu

SEQ ID NO: 16012 - RNA, 22 nt, Homo sapiens
ugucuaaagaauggcagacuca

SEQ ID NO: 16013 - RNA, 22 nt, Homo sapiens
uacagucauaaugccuagugac

SEQ ID NO: 16014 - RNA, 22 nt, Homo sapiens
ugaguagagaauucagcuaagg

SEQ ID NO: 16015 - RNA, 23 nt, Homo sapiens
aagagguaugacuaugaagugga

SEQ ID NO: 16016 - RNA, 22 nt, Homo sapiens
guuggugaccugaagagaguaa

SEQ ID NO: 16017 - RNA, 21 nt, Homo sapiens
gugucacagacaugacagaug

SEQ ID NO: 16018 - RNA, 22 nt, Homo sapiens
cuucaucugguuugugaacuuu

SEQ ID NO: 16019 - RNA, 22 nt, Homo sapiens
auuccacaguuaacacagaccg

SEQ ID NO: 16020 - RNA, 22 nt, Homo sapiens
gagagcaugugcuggcaucagu

SEQ ID NO: 16021 - RNA, 22 nt, Homo sapiens
uugagacggagucuugcucuuu

SEQ ID NO: 16022 - RNA, 22 nt, Homo sapiens
gucccugcgauugugggauccu

SEQ ID NO: 16023 - RNA, 20 nt, Homo sapiens
ugaguagaggaguucuauca

SEQ ID NO: 16024 - RNA, 22 nt, Homo sapiens
gcaguguucaaaucaugcccau

SEQ ID NO: 16025 - RNA, 22 nt, Homo sapiens
gacugaggaagcgcucucuccu

SEQ ID NO: 16026 - RNA, 22 nt, Homo sapiens
gagaugguacacauacgauucu

SEQ ID NO: 16027 - RNA, 23 nt, Homo sapiens
ugagucacuuugcuggggucucu

SEQ ID NO: 16028 - RNA, 23 nt, Homo sapiens
aaggacacugaacacuucccagc

SEQ ID NO: 16029 - RNA, 22 nt, Homo sapiens
ugauaugaaguuagcuggcugu

SEQ ID NO: 16030 - RNA, 22 nt, Homo sapiens
uggacaagugcccuccaccuca

SEQ ID NO: 16031 - RNA, 22 nt, Homo sapiens
aaagagaucuaugggcacuaug

SEQ ID NO: 16032 - RNA, 22 nt, Homo sapiens
agguguuguugaggagauuuca

SEQ ID NO: 16033 - RNA, 22 nt, Homo sapiens
ugccuaggcuggagugcagugg

SEQ ID NO: 16034 - RNA, 22 nt, Homo sapiens
uggcaaaugaaagaaagccagu

SEQ ID NO: 16035 - RNA, 22 nt, Homo sapiens
auggcacuuuggacugcuagau

SEQ ID NO: 16036 - RNA, 22 nt, Homo sapiens
gccaaaaugcugggauuacagg

SEQ ID NO: 16037 - RNA, 22 nt, Homo sapiens
cuuuuggugugaagaagcucuu

SEQ ID NO: 16038 - RNA, 22 nt, Homo sapiens
ucaggguacuuguggccaaagu

SEQ ID NO: 16039 - RNA, 20 nt, Homo sapiens
agccccauguaaaccacaug

SEQ ID NO: 16040 - RNA, 22 nt, Homo sapiens
aucagauuccacauuuuaucag

SEQ ID NO: 16041 - RNA, 22 nt, Homo sapiens
ucagucuuuuaccauuaaguau

SEQ ID NO: 16042 - RNA, 22 nt, Homo sapiens
ucagaguagcugucugaggugc

SEQ ID NO: 16043 - RNA, 22 nt, Homo sapiens
ugagauggaguuucacuuuugu

SEQ ID NO: 16044 - RNA, 22 nt, Homo sapiens
ucagggacgcuugacacaagcc

SEQ ID NO: 16045 - RNA, 22 nt, Homo sapiens
aggugcugagcagagaauccug

SEQ ID NO: 16046 - RNA, 22 nt, Homo sapiens
ggcaaggauguuuuucuggcaa

SEQ ID NO: 16047 - RNA, 22 nt, Homo sapiens
ccaaguguuuucauuguuccau

SEQ ID NO: 16048 - RNA, 22 nt, Homo sapiens
auccugaagcuuuacugaauuc

SEQ ID NO: 16049 - RNA, 22 nt, Homo sapiens
uacaacacugguucgacaugug

SEQ ID NO: 16050 - RNA, 22 nt, Homo sapiens
uauugcuuuacucucuuauccu

SEQ ID NO: 16051 - RNA, 22 nt, Homo sapiens
uggccagagggcaauuagcugu

SEQ ID NO: 16052 - RNA, 22 nt, Homo sapiens
ugccuucuguuaaacgaggaug

SEQ ID NO: 16053 - RNA, 22 nt, Homo sapiens
uacucuuuagcuccuuaaggaa

SEQ ID NO: 16054 - RNA, 22 nt, Homo sapiens
auugcauugugaucuucccaga

SEQ ID NO: 16055 - RNA, 22 nt, Homo sapiens
aacagucuccaguuguauccau

SEQ ID NO: 16056 - RNA, 22 nt, Homo sapiens
gagguagagacuauguauuaga

SEQ ID NO: 16057 - RNA, 22 nt, Homo sapiens
uuggaaugcacacugagccugc

SEQ ID NO: 16058 - RNA, 22 nt, Homo sapiens
ugugaacagcuccaaaugugga

SEQ ID NO: 16059 - RNA, 22 nt, Homo sapiens
ccuaggcacugggguccagccc

SEQ ID NO: 16060 - RNA, 22 nt, Homo sapiens
uggcaagugggaccuaguuaaa

SEQ ID NO: 16061 - RNA, 22 nt, Homo sapiens
ugagguguuauccagaguucuu

SEQ ID NO: 16062 - RNA, 22 nt, Homo sapiens
uagaaugaaacaagcugugccu

SEQ ID NO: 16063 - RNA, 22 nt, Homo sapiens
acacuguauccuucuguccuuu

SEQ ID NO: 16064 - RNA, 22 nt, Homo sapiens
augagcagaugcuccugccucu

SEQ ID NO: 16065 - RNA, 19 nt, Homo sapiens
ccauggcaaugaucugaug

SEQ ID NO: 16066 - RNA, 22 nt, Homo sapiens
uaaggcacauaggccuggaaac

SEQ ID NO: 16067 - RNA, 22 nt, Homo sapiens
gugcacaacgugcagguuaguu

SEQ ID NO: 16068 - RNA, 22 nt, Homo sapiens
ugccuaggcuggaaugcagugg

SEQ ID NO: 16069 - RNA, 22 nt, Homo sapiens
uugagauggagucuugcucuug

SEQ ID NO: 16070 - RNA, 22 nt, Homo sapiens
uaaggcacucuucugugugccu

SEQ ID NO: 16071 - RNA, 22 nt, Homo sapiens
uugaaagaaaggagacugaguu

SEQ ID NO: 16072 - RNA, 22 nt, Homo sapiens
uugaauagacagccagcuuuaa

SEQ ID NO: 16073 - RNA, 22 nt, Homo sapiens
ucucaugaagguggagaguagg

SEQ ID NO: 16074 - RNA, 22 nt, Homo sapiens
gugagggaugugaaaaagguca

SEQ ID NO: 16075 - RNA, 22 nt, Homo sapiens
ccaucacaggccucagugggaa

SEQ ID NO: 16076 - RNA, 20 nt, Homo sapiens
cuuaucaguggcaaguauaa

SEQ ID NO: 16077 - RNA, 22 nt, Homo sapiens
uugcauagacaauauuaaucuu

SEQ ID NO: 16078 - RNA, 22 nt, Homo sapiens
augauggaggccgugauggacg

SEQ ID NO: 16079 - RNA, 22 nt, Homo sapiens
uuccacagggauuugcauugau

SEQ ID NO: 16080 - RNA, 22 nt, Homo sapiens
ggugucaguuggccccuacugg

SEQ ID NO: 16081 - RNA, 22 nt, Homo sapiens
uacagucuggaggccuguguug

SEQ ID NO: 16082 - RNA, 22 nt, Homo sapiens
aucagauuccagaggcagcacc

SEQ ID NO: 16083 - RNA, 22 nt, Homo sapiens
uugagagagaacauuuguuaca

SEQ ID NO: 16084 - RNA, 22 nt, Homo sapiens
uugagauggagucuugcacugu

SEQ ID NO: 16085 - RNA, 22 nt, Homo sapiens
uugagggagccuguuagucccg

SEQ ID NO: 16086 - RNA, 22 nt, Homo sapiens
uauugcauauuauucuaguggc

SEQ ID NO: 16087 - RNA, 22 nt, Homo sapiens
augaagugcaugauaguugguu

SEQ ID NO: 16088 - RNA, 22 nt, Homo sapiens
uggcuaagaugcacacuucacu

SEQ ID NO: 16089 - RNA, 22 nt, Homo sapiens
ugaggauaguguugaaggcagg

SEQ ID NO: 16090 - RNA, 22 nt, Homo sapiens
ucccugacagggucugagcuuu

SEQ ID NO: 16091 - RNA, 22 nt, Homo sapiens
ugacauggagguggaggaagau

SEQ ID NO: 16092 - RNA, 22 nt, Homo sapiens
cugagguacugggggccaggau

SEQ ID NO: 16093 - RNA, 22 nt, Homo sapiens
ucucaugaagauagagaauaga

SEQ ID NO: 16094 - RNA, 22 nt, Homo sapiens
ucaguuuguauuucagguugca

SEQ ID NO: 16095 - RNA, 22 nt, Homo sapiens
auguuugguagugaauauggua

SEQ ID NO: 16096 - RNA, 17 nt, Homo sapiens
acaugagacuggauucu

SEQ ID NO: 16097 - RNA, 22 nt, Homo sapiens
auccucugagaucuaggcagag

SEQ ID NO: 16098 - RNA, 22 nt, Homo sapiens
gcaguguucugggcaggaagaa

SEQ ID NO: 16099 - RNA, 22 nt, Homo sapiens
augagggagggcaccugaccuu

SEQ ID NO: 16100 - RNA, 22 nt, Homo sapiens
agaaccauuagagggagauauu

SEQ ID NO: 16101 - RNA, 22 nt, Homo sapiens
cugugaucuuuuuucauguggu

SEQ ID NO: 16102 - RNA, 22 nt, Homo sapiens
uugaaugaaauuggugugggga

SEQ ID NO: 16103 - RNA, 22 nt, Homo sapiens
cugacagaugacugccacugua

SEQ ID NO: 16104 - RNA, 22 nt, Homo sapiens
augugggaggacuuggcuguug

SEQ ID NO: 16105 - RNA, 22 nt, Homo sapiens
ucucuuggugacuuaaaauguu

SEQ ID NO: 16106 - RNA, 22 nt, Homo sapiens
uuaaguagcugggcaugguggu

SEQ ID NO: 16107 - RNA, 22 nt, Homo sapiens
aaugacccugauuggcaaguug

SEQ ID NO: 16108 - RNA, 22 nt, Homo sapiens
accccauuugcacugagcccuu

SEQ ID NO: 16109 - RNA, 22 nt, Homo sapiens
ugagguaggugaagaaugcacg

SEQ ID NO: 16110 - RNA, 18 nt, Homo sapiens
aagagcucagcacagguu

SEQ ID NO: 16111 - RNA, 22 nt, Homo sapiens
cauugcaacuucugccucccag

SEQ ID NO: 16112 - RNA, 22 nt, Homo sapiens
gaagauaucuaguaccauuguc

SEQ ID NO: 16113 - RNA, 22 nt, Homo sapiens
aucacuuucuauuucugugcca

SEQ ID NO: 16114 - RNA, 20 nt, Homo sapiens
ucaaggcaggaacuguacau

SEQ ID NO: 16115 - RNA, 21 nt, Homo sapiens
uaaaacuguaacuuuguccug

SEQ ID NO: 16116 - RNA, 22 nt, Homo sapiens
ugauaauguuaggcuuuauuca

SEQ ID NO: 16117 - RNA, 18 nt, Homo sapiens
uaacagucucucaggauc

SEQ ID NO: 16118 - RNA, 17 nt, Homo sapiens
agcauguguuugagauu

SEQ ID NO: 16119 - RNA, 22 nt, Homo sapiens
ugagguaaaacaaggauuggau

SEQ ID NO: 16120 - RNA, 22 nt, Homo sapiens
auacugucucuugcuccugccc

SEQ ID NO: 16121 - RNA, 22 nt, Homo sapiens
ucuuuuugagucaguuucggua

SEQ ID NO: 16122 - RNA, 22 nt, Homo sapiens
aacagaccuagauaguauaguc

SEQ ID NO: 16123 - RNA, 22 nt, Homo sapiens
gugucuccuguggagcuaugua

SEQ ID NO: 16124 - RNA, 22 nt, Homo sapiens
uucugcuugaucuaguguguug

SEQ ID NO: 16125 - RNA, 21 nt, Homo sapiens
uuuuugguggucauggauaga

SEQ ID NO: 16126 - RNA, 17 nt, Homo sapiens
ucucccaucccuuucuc

SEQ ID NO: 16127 - RNA, 22 nt, Homo sapiens
auacaagcaguccaacuccaua

SEQ ID NO: 16128 - RNA, 22 nt, Homo sapiens
aaaugcugcuuuggccucuucu

SEQ ID NO: 16129 - RNA, 22 nt, Homo sapiens
aucugugguuguaugcauauua

SEQ ID NO: 16130 - RNA, 21 nt, Homo sapiens
uggauugagaaccccaggagg

SEQ ID NO: 16131 - RNA, 22 nt, Homo sapiens
uuacagcagugccccacuccca

SEQ ID NO: 16132 - RNA, 22 nt, Homo sapiens
uucagggagaaggcaaacguug

SEQ ID NO: 16133 - RNA, 22 nt, Homo sapiens
ccaaggcacugauucuguacuc

SEQ ID NO: 16134 - RNA, 22 nt, Homo sapiens
cuacagcagcccaguccccgaa

SEQ ID NO: 16135 - RNA, 22 nt, Homo sapiens
agcuguuguuuuaagauacuaa

SEQ ID NO: 16136 - RNA, 22 nt, Homo sapiens
cgccugagcugaggaagcugca

SEQ ID NO: 16137 - RNA, 22 nt, Homo sapiens
uggagguagacauugggaagag

SEQ ID NO: 16138 - RNA, 22 nt, Homo sapiens
ugccuaggcccaguccucagaa

SEQ ID NO: 16139 - RNA, 23 nt, Homo sapiens
ucaugaggccauucaaauccauu

SEQ ID NO: 16140 - RNA, 22 nt, Homo sapiens
uagagguauuaacaguagaaga

SEQ ID NO: 16141 - RNA, 22 nt, Homo sapiens
uaauugcaguucuguguuauau

SEQ ID NO: 16142 - RNA, 18 nt, Homo sapiens
cauagcacuucagcacau

SEQ ID NO: 16143 - RNA, 22 nt, Homo sapiens
ugguaagaggcccugaguuugu

SEQ ID NO: 16144 - RNA, 22 nt, Homo sapiens
ugauggcauuuggaguugggac

SEQ ID NO: 16145 - RNA, 22 nt, Homo sapiens
uuggcaaguuucugucagcaaa

SEQ ID NO: 16146 - RNA, 22 nt, Homo sapiens
ugacaggagauuaugugauguu

SEQ ID NO: 16147 - RNA, 22 nt, Homo sapiens
auggcacugaagcguauugaca

SEQ ID NO: 16148 - RNA, 22 nt, Homo sapiens
guuuggauauuaggcaagagua

SEQ ID NO: 16149 - RNA, 20 nt, Homo sapiens
ucucauggagguagagaaua

SEQ ID NO: 16150 - RNA, 22 nt, Homo sapiens
guguuugguugauagagccacu

SEQ ID NO: 16151 - RNA, 20 nt, Homo sapiens
ucacugagugguccacagua

SEQ ID NO: 16152 - RNA, 22 nt, Homo sapiens
ugaguggagacuguguguagag

SEQ ID NO: 16153 - RNA, 22 nt, Homo sapiens
uggcaagaagagcaugagacca

SEQ ID NO: 16154 - RNA, 22 nt, Homo sapiens
aagcuggauuucgcauccuguu

SEQ ID NO: 16155 - RNA, 22 nt, Homo sapiens
agauauuuguuaggucugucag

SEQ ID NO: 16156 - RNA, 22 nt, Homo sapiens
ugagagaugaacuauucuugaa

SEQ ID NO: 16157 - RNA, 22 nt, Homo sapiens
auuuugguuacauaguugagcu

SEQ ID NO: 16158 - RNA, 22 nt, Homo sapiens
ugccuaggcuggaguguagugg

SEQ ID NO: 16159 - RNA, 22 nt, Homo sapiens
agugccacugcacucuagccug

SEQ ID NO: 16160 - RNA, 23 nt, Homo sapiens
agccuguugccuaggcagcucau

SEQ ID NO: 16161 - RNA, 22 nt, Homo sapiens
cuauggcuguaaggauaguaac

SEQ ID NO: 16162 - RNA, 22 nt, Homo sapiens
uuuuuugguaauugaacaauga

SEQ ID NO: 16163 - RNA, 19 nt, Homo sapiens
uugcauagguugaaccagc

SEQ ID NO: 16164 - RNA, 22 nt, Homo sapiens
uacagucuagaggagaaucagg

SEQ ID NO: 16165 - RNA, 22 nt, Homo sapiens
gacagugugauacuuagucuca

SEQ ID NO: 16166 - RNA, 22 nt, Homo sapiens
ggagucugacuuauaggaaccu

SEQ ID NO: 16167 - RNA, 22 nt, Homo sapiens
ugagaugaugggauaagagggc

SEQ ID NO: 16168 - RNA, 22 nt, Homo sapiens
uugagggaggccucaguuuaca

SEQ ID NO: 16169 - RNA, 22 nt, Homo sapiens
gggaaugaagagaaccuuccca

SEQ ID NO: 16170 - RNA, 22 nt, Homo sapiens
guguaugguuguuguagagaga

SEQ ID NO: 16171 - RNA, 20 nt, Homo sapiens
ucuugggaauguagccuagg

SEQ ID NO: 16172 - RNA, 22 nt, Homo sapiens
uuuuugguugguaggcuauuaa

SEQ ID NO: 16173 - RNA, 22 nt, Homo sapiens
uccugagacucacaggcucccc

SEQ ID NO: 16174 - RNA, 22 nt, Homo sapiens
auucccuuagcugccucagccu

SEQ ID NO: 16175 - RNA, 22 nt, Homo sapiens
uaugagagcugguagguagaga

SEQ ID NO: 16176 - RNA, 22 nt, Homo sapiens
ugaguagaagugaagauagugg

SEQ ID NO: 16177 - RNA, 22 nt, Homo sapiens
ucaaggcacuagcugagcugca

SEQ ID NO: 16178 - RNA, 22 nt, Homo sapiens
cacagucuugcaauauugagau

SEQ ID NO: 16179 - RNA, 22 nt, Homo sapiens
uuggaaaccucugcagguguuu

SEQ ID NO: 16180 - RNA, 22 nt, Homo sapiens
uaauagcaguguuacuaggacu

SEQ ID NO: 16181 - RNA, 22 nt, Homo sapiens
uugaaagaugaacuggauugga

SEQ ID NO: 16182 - RNA, 22 nt, Homo sapiens
ugccaaggagucagucccuaga

SEQ ID NO: 16183 - RNA, 22 nt, Homo sapiens
ugagagacaguuucgucggagg

SEQ ID NO: 16184 - RNA, 22 nt, Homo sapiens
aacauguuuagcagauaccugu

SEQ ID NO: 16185 - RNA, 22 nt, Homo sapiens
gagguggugguggaggcauagc

SEQ ID NO: 16186 - RNA, 22 nt, Homo sapiens
auugaacuguuggagagguuuu

SEQ ID NO: 16187 - RNA, 19 nt, Homo sapiens
augagaacagacuccauuu

SEQ ID NO: 16188 - RNA, 22 nt, Homo sapiens
gagauuuucagcuugacuggga

SEQ ID NO: 16189 - RNA, 22 nt, Homo sapiens
ucacagauaaauaaagaugauu

SEQ ID NO: 16190 - RNA, 22 nt, Homo sapiens
uugaauagaagguuuuuuguuc

SEQ ID NO: 16191 - RNA, 22 nt, Homo sapiens
cucaaguacaugggauuacagg

SEQ ID NO: 16192 - RNA, 22 nt, Homo sapiens
cugagagaugagaccucucacu

SEQ ID NO: 16193 - RNA, 22 nt, Homo sapiens
cagagguauugcaaaagccuag

SEQ ID NO: 16194 - RNA, 17 nt, Homo sapiens
agcaccacacucucuug

SEQ ID NO: 16195 - RNA, 22 nt, Homo sapiens
uucuugcuguauccucacaugg

SEQ ID NO: 16196 - RNA, 19 nt, Homo sapiens
uaugcaacuuauagugcug

SEQ ID NO: 16197 - RNA, 22 nt, Homo sapiens
cggcaguggguaagccaagcuu

SEQ ID NO: 16198 - RNA, 22 nt, Homo sapiens
agguaaacauggggacugcuac

SEQ ID NO: 16199 - RNA, 22 nt, Homo sapiens
ugaguagaacaucaagucauac

SEQ ID NO: 16200 - RNA, 22 nt, Homo sapiens
gagguuauuggggugcuugugu

SEQ ID NO: 16201 - RNA, 22 nt, Homo sapiens
agagguagaagauaggcuacag

SEQ ID NO: 16202 - RNA, 22 nt, Homo sapiens
gcaguguugugauccaggucuu

SEQ ID NO: 16203 - RNA, 22 nt, Homo sapiens
uuacagucaaguuacauuucuc

SEQ ID NO: 16204 - RNA, 22 nt, Homo sapiens
ugccugagccagguuuuaggag

SEQ ID NO: 16205 - RNA, 22 nt, Homo sapiens
agagacauugcuccaacucacc

SEQ ID NO: 16206 - RNA, 19 nt, Homo sapiens
cucauggagaaggagaaua

SEQ ID NO: 16207 - RNA, 22 nt, Homo sapiens
ggucauagagaauucaccagga

SEQ ID NO: 16208 - RNA, 22 nt, Homo sapiens
uuucauagaucaugcuuuugga

SEQ ID NO: 16209 - RNA, 22 nt, Homo sapiens
uagagguagguguaugaacuag

SEQ ID NO: 16210 - RNA, 20 nt, Homo sapiens
aaaugcuguaauguuuggga

SEQ ID NO: 16211 - RNA, 22 nt, Homo sapiens
ggagggugagaucaauuuggga

SEQ ID NO: 16212 - RNA, 22 nt, Homo sapiens
uacauacuguaugguucuguuu

SEQ ID NO: 16213 - RNA, 20 nt, Homo sapiens
uuggcagagucuuuagggua

SEQ ID NO: 16214 - RNA, 22 nt, Homo sapiens
ggcaugaggccauaaaaguaag

SEQ ID NO: 16215 - RNA, 22 nt, Homo sapiens
cacaggccugucucuuucuaac

SEQ ID NO: 16216 - RNA, 18 nt, Homo sapiens
ugucccuuugcuguucau

SEQ ID NO: 16217 - RNA, 22 nt, Homo sapiens
cauggagcuaggcuugaucccu

SEQ ID NO: 16218 - RNA, 22 nt, Homo sapiens
cucauggaauacuucacagcca

SEQ ID NO: 16219 - RNA, 20 nt, Homo sapiens
uggaaucuaggcggagguuu

SEQ ID NO: 16220 - RNA, 22 nt, Homo sapiens
ugagaugagggcugcacucaaa

SEQ ID NO: 16221 - RNA, 22 nt, Homo sapiens
ggccagaugaucuaugaaggaa

SEQ ID NO: 16222 - RNA, 22 nt, Homo sapiens
cucugacagugguuagcacugu

SEQ ID NO: 16223 - RNA, 22 nt, Homo sapiens
aggaagcuagcauuuguucagu

SEQ ID NO: 16224 - RNA, 22 nt, Homo sapiens
uuucugggggugcugauggaaa

SEQ ID NO: 16225 - RNA, 22 nt, Homo sapiens
ucaugagacacacuggaaagga

SEQ ID NO: 16226 - RNA, 22 nt, Homo sapiens
gcagcacaugacuguauguaua

SEQ ID NO: 16227 - RNA, 20 nt, Homo sapiens
ugguaauguaagagaggaga

SEQ ID NO: 16228 - RNA, 22 nt, Homo sapiens
cauggcuuuauuuucagcuucu

SEQ ID NO: 16229 - RNA, 22 nt, Homo sapiens
aagcaggugugggaggaaaugg

SEQ ID NO: 16230 - RNA, 22 nt, Homo sapiens
uuggacuuuaagauagagaugu

SEQ ID NO: 16231 - RNA, 21 nt, Homo sapiens
caucacauuacucaaaguccu

SEQ ID NO: 16232 - RNA, 22 nt, Homo sapiens
agcagauguuuagugagcgccu

SEQ ID NO: 16233 - RNA, 21 nt, Homo sapiens
ucucauagaguuucacuuucu

SEQ ID NO: 16234 - RNA, 22 nt, Homo sapiens
uugaggaguacugauuagguau

SEQ ID NO: 16235 - RNA, 22 nt, Homo sapiens
augagagcaacaccuucacuug

SEQ ID NO: 16236 - RNA, 22 nt, Homo sapiens
uuugaguuugaggugcugauga

SEQ ID NO: 16237 - RNA, 17 nt, Homo sapiens
accccuaccucagaagc

SEQ ID NO: 16238 - RNA, 22 nt, Homo sapiens
ugaauacagcacacccaugggu

SEQ ID NO: 16239 - RNA, 22 nt, Homo sapiens
ugagugugaggaagaauuagaa

SEQ ID NO: 16240 - RNA, 22 nt, Homo sapiens
uauggauguuaagguucacagc

SEQ ID NO: 16241 - RNA, 22 nt, Homo sapiens
ucagggacuuacaaaccagaag

SEQ ID NO: 16242 - RNA, 22 nt, Homo sapiens
augagguauccaagcccagaaa

SEQ ID NO: 16243 - RNA, 22 nt, Homo sapiens
aagagguaggaaauggucauuu

SEQ ID NO: 16244 - RNA, 22 nt, Homo sapiens
cugagguauuuaggugaaagaa

SEQ ID NO: 16245 - RNA, 21 nt, Homo sapiens
aggcaaaugaagcagccgcuc

SEQ ID NO: 16246 - RNA, 21 nt, Homo sapiens
ugcauggagaacacugagggu

SEQ ID NO: 16247 - RNA, 20 nt, Homo sapiens
augagguguaugacacugaa

SEQ ID NO: 16248 - RNA, 22 nt, Homo sapiens
agaugauguuucuggcacauga

SEQ ID NO: 16249 - RNA, 22 nt, Homo sapiens
uuugcaauguugugauggugaa

SEQ ID NO: 16250 - RNA, 22 nt, Homo sapiens
uugaaguaguacuuuauuauag

SEQ ID NO: 16251 - RNA, 22 nt, Homo sapiens
uuuaaguguuuguuccugaaaa

SEQ ID NO: 16252 - RNA, 22 nt, Homo sapiens
uuacuugagaugaguuggacaa

SEQ ID NO: 16253 - RNA, 19 nt, Homo sapiens
uuaagugugauaucucagu

SEQ ID NO: 16254 - RNA, 22 nt, Homo sapiens
uauugcaaauggugaucccagg

SEQ ID NO: 16255 - RNA, 22 nt, Homo sapiens
ugaguagaagugaagauagugg

SEQ ID NO: 16256 - RNA, 21 nt, Homo sapiens
ugagaugauccugcaugcaug

SEQ ID NO: 16257 - RNA, 22 nt, Homo sapiens
auggcggugugggcggugcagc

SEQ ID NO: 16258 - RNA, 22 nt, Homo sapiens
auugcacuggggguuagaauuu

SEQ ID NO: 16259 - RNA, 22 nt, Homo sapiens
guuaagaaguguaacuuaaguu

SEQ ID NO: 16260 - RNA, 22 nt, Homo sapiens
uaagguuacaaaggacuucaua

SEQ ID NO: 16261 - RNA, 22 nt, Homo sapiens
uaaguaguguugagacaaguuu

SEQ ID NO: 16262 - RNA, 22 nt, Homo sapiens
uaauugaaugcagacaccaggg

SEQ ID NO: 16263 - RNA, 22 nt, Homo sapiens
gagaacuggcgugaacugcacg

SEQ ID NO: 16264 - RNA, 22 nt, Homo sapiens
gagaacugagauaagugauauu

SEQ ID NO: 16265 - RNA, 23 nt, Homo sapiens
gaaguauagcaugcacauggaaa

SEQ ID NO: 16266 - RNA, 22 nt, Homo sapiens
uuauggauuuauauucuguagu

SEQ ID NO: 16267 - RNA, 22 nt, Homo sapiens
acacuggaguuaaaggugauuu

SEQ ID NO: 16268 - RNA, 22 nt, Homo sapiens
auagcagugugaaaacagacug

SEQ ID NO: 16269 - RNA, 22 nt, Homo sapiens
aaggaaguaauuugguuuauag

SEQ ID NO: 16270 - RNA, 22 nt, Homo sapiens
uugaguauuggacugguaucuu

SEQ ID NO: 16271 - RNA, 22 nt, Homo sapiens
auuauugacucauagaaaggau

SEQ ID NO: 16272 - RNA, 22 nt, Homo sapiens
auugcaaugggaaacuaugaaa

SEQ ID NO: 16273 - RNA, 22 nt, Homo sapiens
cagauaguuguagauaugcagc

SEQ ID NO: 16274 - RNA, 22 nt, Homo sapiens
cagcaaaucauccuauuugagc

SEQ ID NO: 16275 - RNA, 22 nt, Homo sapiens
gcaugguaguaaccuacauuug

SEQ ID NO: 16276 - RNA, 22 nt, Homo sapiens
uaaguaaaugaaagguugauuu

SEQ ID NO: 16277 - RNA, 22 nt, Homo sapiens
uaaguauuaggccccaggcugg

SEQ ID NO: 16278 - RNA, 22 nt, Homo sapiens
uagcaguaagaaacugacauug

SEQ ID NO: 16279 - RNA, 22 nt, Homo sapiens
ggcaaaugaagauggagaggcu

SEQ ID NO: 16280 - RNA, 22 nt, Homo sapiens
ugacuugaaacgugaacagauc

SEQ ID NO: 16281 - RNA, 22 nt, Homo sapiens
cauugcaguuuuugguguaucu

SEQ ID NO: 16282 - RNA, 22 nt, Homo sapiens
gccaguauuuuauugaggauuu

SEQ ID NO: 16283 - RNA, 22 nt, Homo sapiens
guaaugaacuugaaagccuguu

SEQ ID NO: 16284 - RNA, 22 nt, Homo sapiens
uauugcaauuggggaaacuggg

SEQ ID NO: 16285 - RNA, 22 nt, Homo sapiens
uauugcacuuuuccauaggagu

SEQ ID NO: 16286 - RNA, 22 nt, Homo sapiens
ugcaaaugucaaggguuagugu

SEQ ID NO: 16287 - RNA, 22 nt, Homo sapiens
ugagaugaucaaaguauaggcu

SEQ ID NO: 16288 - RNA, 22 nt, Homo sapiens
ugagaugaagcuagaagaaugg

SEQ ID NO: 16289 - RNA, 22 nt, Homo sapiens
uugagaugauggauaugcuaau

SEQ ID NO: 16290 - RNA, 22 nt, Homo sapiens
uuaaguguaaguggugugggac

SEQ ID NO: 16291 - RNA, 22 nt, Homo sapiens
uuaaugaacuuuauuuuguaga

SEQ ID NO: 16292 - RNA, 19 nt, Homo sapiens
aaaguguuuuaaagaggau

SEQ ID NO: 16293 - RNA, 22 nt, Homo sapiens
auagguuauuagagcaaagcuu

SEQ ID NO: 16294 - RNA, 22 nt, Homo sapiens
auugcaauuaguccauagaguu

SEQ ID NO: 16295 - RNA, 23 nt, Homo sapiens
auugaacacuuucauaugugagg

SEQ ID NO: 16296 - RNA, 22 nt, Homo sapiens
auugaacaugccauauguacca

SEQ ID NO: 16297 - RNA, 22 nt, Homo sapiens
auggcggugugaucuuggcuca

SEQ ID NO: 16298 - RNA, 22 nt, Homo sapiens
aggcaagugggagacagcauuu

SEQ ID NO: 16299 - RNA, 22 nt, Homo sapiens
aggcaaguugcucaaaugcaaa

SEQ ID NO: 16300 - RNA, 22 nt, Homo sapiens
agcacagugaaugguuuacuca

SEQ ID NO: 16301 - RNA, 22 nt, Homo sapiens
agcuagcauucauaguuugagg

SEQ ID NO: 16302 - RNA, 22 nt, Homo sapiens
auauggcuuuuauuauguugag

SEQ ID NO: 16303 - RNA, 20 nt, Homo sapiens
uucuauggugaugaguccug

SEQ ID NO: 16304 - RNA, 22 nt, Homo sapiens
ugacuacacacaauuugucaag

SEQ ID NO: 16305 - RNA, 18 nt, Homo sapiens
ucaauguggauguucuuu

SEQ ID NO: 16306 - RNA, 22 nt, Homo sapiens
ucacagugcaggaucaguuaau

SEQ ID NO: 16307 - RNA, 21 nt, Homo sapiens
uaacagcuccacuccauucuc

SEQ ID NO: 16308 - RNA, 22 nt, Homo sapiens
gcuucauggaggcugggcgcag

SEQ ID NO: 16309 - RNA, 22 nt, Homo sapiens
gagcuacauggauagucugcau

SEQ ID NO: 16310 - RNA, 22 nt, Homo sapiens
caucgcacuccagcuugggcaa

SEQ ID NO: 16311 - RNA, 22 nt, Homo sapiens
cacaguguucauagccaucagg

SEQ ID NO: 16312 - RNA, 18 nt, Homo sapiens
cugccagugugcucuccg

SEQ ID NO: 16313 - RNA, 22 nt, Homo sapiens
ugagcuacuacacccagcuugg

SEQ ID NO: 16314 - RNA, 22 nt, Homo sapiens
uaucaccuugcaguggaugcua

SEQ ID NO: 16315 - RNA, 22 nt, Homo sapiens
uaugguuuuggaauccugcaga

SEQ ID NO: 16316 - RNA, 21 nt, Homo sapiens
uacaagcuguagcacaugcca

SEQ ID NO: 16317 - RNA, 22 nt, Homo sapiens
cuaugagcuuuuuuaagccuca

SEQ ID NO: 16318 - RNA, 22 nt, Homo sapiens
cuaucucaggcccaggcccuug

SEQ ID NO: 16319 - RNA, 22 nt, Homo sapiens
uggucuccuuuguacccugggc

SEQ ID NO: 16320 - RNA, 22 nt, Homo sapiens
uuccaguguuugacucaccuuu

SEQ ID NO: 16321 - RNA, 19 nt, Homo sapiens
uucucugguuguacuaccc

SEQ ID NO: 16322 - RNA, 22 nt, Homo sapiens
uuacagcugcuccccaucacuc

SEQ ID NO: 16323 - RNA, 22 nt, Homo sapiens
auacagcuaaaauauuaaguua

SEQ ID NO: 16324 - RNA, 22 nt, Homo sapiens
acucacagcaaccuccgccucc

SEQ ID NO: 16325 - RNA, 22 nt, Homo sapiens
uucucugggacauaggucgggu

SEQ ID NO: 16326 - RNA, 22 nt, Homo sapiens
uuacacguaauaucacggugug

SEQ ID NO: 16327 - RNA, 22 nt, Homo sapiens
uuugggccauggcuuuuccacg

SEQ ID NO: 16328 - RNA, 22 nt, Homo sapiens
uugcucaggcuggaguacaaug

SEQ ID NO: 16329 - RNA, 22 nt, Homo sapiens
ucccagugcuaugcaaaagccu

SEQ ID NO: 16330 - RNA, 23 nt, Homo sapiens
ucagguaguuucagaggaccuug

SEQ ID NO: 16331 - RNA, 22 nt, Homo sapiens
ucaucaggaaacuuaugcagug

SEQ ID NO: 16332 - RNA, 22 nt, Homo sapiens
ugagcugagaaaugcagcagcu

SEQ ID NO: 16333 - RNA, 22 nt, Homo sapiens
cccagcguucggcauggcugag

SEQ ID NO: 16334 - RNA, 22 nt, Homo sapiens
ggugagcacagaaugcccugag

SEQ ID NO: 16335 - RNA, 22 nt, Homo sapiens
guacaguuuagugcuuugagaa

SEQ ID NO: 16336 - RNA, 17 nt, Homo sapiens
augacuucuucagugug

SEQ ID NO: 16337 - RNA, 22 nt, Homo sapiens
uuuuacacuguugguuggaaug

SEQ ID NO: 16338 - RNA, 23 nt, Homo sapiens
ucacaguuacuuuugcaucaacc

SEQ ID NO: 16339 - RNA, 22 nt, Homo sapiens
uaaagcuuagauccaugguggc

SEQ ID NO: 16340 - RNA, 22 nt, Homo sapiens
gcuauggccugaauguuugugu

SEQ ID NO: 16341 - RNA, 22 nt, Homo sapiens
uucaccuugcccacagcagucu

SEQ ID NO: 16342 - RNA, 22 nt, Homo sapiens
uguaugcuuuugagagauauuu

SEQ ID NO: 16343 - RNA, 22 nt, Dobrava virus
uaguaguagacuccgcaagaaa

SEQ ID NO: 16344 - RNA, 22 nt, Homo sapiens
aauacuuccaaaucuagucauu

SEQ ID NO: 16345 - RNA, 22 nt, Homo sapiens
aagcuguugguggauguaccau

SEQ ID NO: 16346 - RNA, 22 nt, Homo sapiens
aaguaaauauccgguaguccca

SEQ ID NO: 16347 - RNA, 19 nt, Homo sapiens
aaguaguugugacagaugc

SEQ ID NO: 16348 - RNA, 22 nt, Homo sapiens
caguaguagccccuuagaugga

SEQ ID NO: 16349 - RNA, 22 nt, Homo sapiens
gaccccuagagauaggaggaac

SEQ ID NO: 16350 - RNA, 22 nt, Homo sapiens
ggagguagucuuucccuuauca

SEQ ID NO: 16351 - RNA, 22 nt, Homo sapiens
uauuacauccauaggcucugcu

SEQ ID NO: 16352 - RNA, 22 nt, Homo sapiens
uagcauaauuuguagaaaauca

SEQ ID NO: 16353 - RNA, 22 nt, Homo sapiens
uagcaguauugaaagaugaggg

SEQ ID NO: 16354 - RNA, 22 nt, Homo sapiens
uagcaguucauuguugugugaa

SEQ ID NO: 16355 - RNA, 22 nt, Homo sapiens
uagcaguuguuguuacuuguau

SEQ ID NO: 16356 - RNA, 22 nt, Homo sapiens
ugagguagaggugaacuugacc

SEQ ID NO: 16357 - RNA, 22 nt, Homo sapiens
ugaguuaggagaguguggcucu

SEQ ID NO: 16358 - RNA, 20 nt, Homo sapiens
ugaggucaggaguuacagac

SEQ ID NO: 16359 - RNA, 22 nt, Homo sapiens
uguaugcuuuugagagauauuu

SEQ ID NO: 16360 - RNA, 22 nt, Homo sapiens
ugggguagaauagaauugauau

SEQ ID NO: 16361 - RNA, 22 nt, Homo sapiens
uugagguagcuuugauggaggu

SEQ ID NO: 16362 - RNA, 22 nt, Homo sapiens
uugagguaguacuuauuauugg

SEQ ID NO: 16363 - RNA, 22 nt, Homo sapiens
uugagguauugauaaaacauuu

SEQ ID NO: 16364 - RNA, 22 nt, Homo sapiens
uguuuaguuaagacauagaauu

SEQ ID NO: 16365 - RNA, 20 nt, Homo sapiens
uuagaguaguaugauuuaua

SEQ ID NO: 16366 - RNA, 22 nt, Homo sapiens
uuagugcaaacucuucaaugcu

SEQ ID NO: 16367 - RNA, 22 nt, Homo sapiens
uuaguaguuugauaggaauagc

SEQ ID NO: 16368 - RNA, 18 nt, Homo sapiens
uuagguaggucuuugugu

SEQ ID NO: 16369 - RNA, 22 nt, Homo sapiens
uuagguagucucugucagaggg

SEQ ID NO: 16370 - RNA, 22 nt, Homo sapiens
uuacaguauugcaaggacuagg

SEQ ID NO: 16371 - RNA, 22 nt, Homo sapiens
uugaguagugugaugcaugucu

SEQ ID NO: 16372 - RNA, 22 nt, Homo sapiens
uuugagguguauggcaaguuga

SEQ ID NO: 16373 - RNA, 22 nt, Homo sapiens
gagguaguuaaugcauucacua

SEQ ID NO: 16374 - RNA, 22 nt, Homo sapiens
gagguaguuuaguuuuggggaa

SEQ ID NO: 16375 - RNA, 23 nt, Homo sapiens
auauaguagaugugcaguaacau

SEQ ID NO: 16376 - RNA, 22 nt, Homo sapiens
agguauguaugucuguacagcg

SEQ ID NO: 16377 - RNA, 21 nt, Homo sapiens
agguaguuuuccuuuuggagu

SEQ ID NO: 16378 - RNA, 22 nt, Homo sapiens
auguaguugcucugccuguuuu

SEQ ID NO: 16379 - RNA, 22 nt, Homo sapiens
augggguaggcuuugcugcagu

SEQ ID NO: 16380 - RNA, 22 nt, Homo sapiens
aaggaguaucuguuuucucacc

SEQ ID NO: 16381 - RNA, 22 nt, Homo sapiens
agagguagaagauaggcuacag

SEQ ID NO: 16382 - RNA, 22 nt, Homo sapiens
aggauaguaaugauagagaggc

SEQ ID NO: 16383 - RNA, 22 nt, Homo sapiens
agcuaguauuuuguuaaggauu

SEQ ID NO: 16384 - RNA, 22 nt, Homo sapiens
uaaguaguguugagacaaguuu

SEQ ID NO: 16385 - RNA, 22 nt, Homo sapiens
ucaaaucaucuuuuccaaagcu

SEQ ID NO: 16386 - RNA, 22 nt, Homo sapiens
uaguagcauaccuaaguauacu

SEQ ID NO: 16387 - RNA, 22 nt, Homo sapiens
gugagauuaccauuuaaaucag

SEQ ID NO: 16388 - RNA, 20 nt, Homo sapiens
gugagguagaggguuaccug

SEQ ID NO: 16389 - RNA, 17 nt, Homo sapiens
gugagguauccucaaaa

SEQ ID NO: 16390 - RNA, 22 nt, Homo sapiens
ugagcuagagaguuuaguguca

SEQ ID NO: 16391 - RNA, 22 nt, Homo sapiens
ugagguagguaccauuaucacu

SEQ ID NO: 16392 - RNA, 22 nt, Homo sapiens
ugagguagaaugauucuaauau

SEQ ID NO: 16393 - RNA, 22 nt, Homo sapiens
ugagguaugugaugucuuuuag

SEQ ID NO: 16394 - RNA, 22 nt, Homo sapiens
ugaggucauguucugucagguu

SEQ ID NO: 16395 - RNA, 22 nt, Homo sapiens
ugaguuguugcauucuuggugu

SEQ ID NO: 16396 - RNA, 22 nt, Homo sapiens
ugggguaggccugguuaugugc

SEQ ID NO: 16397 - RNA, 22 nt, Homo sapiens
uuaaguaaucagagaagagaac

SEQ ID NO: 16398 - RNA, 22 nt, Homo sapiens
uugugguuuuuaaaacuaggug

SEQ ID NO: 16399 - RNA, 22 nt, Homo sapiens
uugaagguaggaugugcuauca

SEQ ID NO: 16400 - RNA, 22 nt, Homo sapiens
uugacauaguuucugaaauaga

SEQ ID NO: 16401 - RNA, 22 nt, Homo sapiens
uugacguaggaggauguugaga

SEQ ID NO: 16402 - RNA, 21 nt, Homo sapiens
uugagguaaaauccuauggga

SEQ ID NO: 16403 - RNA, 22 nt, Homo sapiens
uugagguauaaagguagguugu

SEQ ID NO: 16404 - RNA, 22 nt, Homo sapiens
ggaaagaucagcuaaauguaag

SEQ ID NO: 16405 - RNA, 22 nt, Homo sapiens
ggagguagguuugugauuugua

SEQ ID NO: 16406 - RNA, 22 nt, Homo sapiens
uaguuguugcagguaggaugua

SEQ ID NO: 16407 - RNA, 22 nt, Homo sapiens
uagguagucagcagugcuuaca

SEQ ID NO: 16408 - RNA, 23 nt, Homo sapiens
ucaguagucauugggaaagugug

SEQ ID NO: 16409 - RNA, 22 nt, Homo sapiens
ugaaauacuuaauuucuccaug

SEQ ID NO: 16410 - RNA, 22 nt, Homo sapiens
ugagauaggaucuugcucuguu

SEQ ID NO: 16411 - RNA, 22 nt, Homo sapiens
ugaggugagggguuaggugcua

SEQ ID NO: 16412 - RNA, 22 nt, Homo sapiens
ugagauuauauuucuuaacaga

SEQ ID NO: 16413 - RNA, 22 nt, Homo sapiens
ugcaaauguuaguaacaccacu

SEQ ID NO: 16414 - RNA, 22 nt, Homo sapiens
aaguauagcuaugauaaacauu

SEQ ID NO: 16415 - RNA, 22 nt, Homo sapiens
aauagcauugaaucuaccaauu

SEQ ID NO: 16416 - RNA, 22 nt, Homo sapiens
agagaucaauaugaaggaaaug

SEQ ID NO: 16417 - RNA, 22 nt, Homo sapiens
auuccauaguacagugaugagu

SEQ ID NO: 16418 - RNA, 22 nt, Homo sapiens
auuccagguggcgccauucaca

SEQ ID NO: 16419 - RNA, 22 nt, Homo sapiens
cagguaguguguagcacagcag

SEQ ID NO: 16420 - RNA, 22 nt, Homo sapiens
gagaacuaaugguuugauaagg

SEQ ID NO: 16421 - RNA, 22 nt, Homo sapiens
gaucacaugggagaaugagagu

SEQ ID NO: 16422 - RNA, 22 nt, Homo sapiens
gaggucaggacauuuuugcuuu

SEQ ID NO: 16423 - RNA, 22 nt, Homo sapiens
cugagguaauuuuccagauaau

SEQ ID NO: 16424 - RNA, 22 nt, Homo sapiens
cugagguacugggggccaggau

SEQ ID NO: 16425 - RNA, 22 nt, Homo sapiens
cugagguagcucaggguauugc

SEQ ID NO: 16426 - RNA, 22 nt, Homo sapiens
cugagguaggcccugagaauau

SEQ ID NO: 16427 - RNA, 22 nt, Homo sapiens
cugagguauaucccauuagaag

SEQ ID NO: 16428 - RNA, 22 nt, Homo sapiens
gugagguaagaguugcuuugcu

SEQ ID NO: 16429 - RNA, 22 nt, Homo sapiens
gugagguagagcaugugaaaga

SEQ ID NO: 16430 - RNA, 22 nt, Homo sapiens
uaauaguuucagaaguuguuuu

SEQ ID NO: 16431 - RNA, 20 nt, Homo sapiens
uaaguuguauuugucaugaa

SEQ ID NO: 16432 - RNA, 22 nt, Homo sapiens
uagguaguuacacagcaaugua

SEQ ID NO: 16433 - RNA, 22 nt, Homo sapiens
uaguagagauggggcacaugcc

SEQ ID NO: 16434 - RNA, 22 nt, Homo sapiens
uaugccucuucauaaaguauga

SEQ ID NO: 16435 - RNA, 17 nt, Homo sapiens
ccccugagcgaugcagu

SEQ ID NO: 16436 - RNA, 22 nt, Homo sapiens
gaagguaguuuauagauguggu

SEQ ID NO: 16437 - RNA, 22 nt, Homo sapiens
gagguagugagcagcugaacua

SEQ ID NO: 16438 - RNA, 22 nt, Homo sapiens
ugagcuaggucuugcucuguca

SEQ ID NO: 16439 - RNA, 21 nt, Homo sapiens
ugagauuauauuaacauggua

SEQ ID NO: 16440 - RNA, 22 nt, Homo sapiens
ugaguaugaguucaggaaaggc

SEQ ID NO: 16441 - RNA, 22 nt, Homo sapiens
ugaguauguuuagaaguaaagg

SEQ ID NO: 16442 - RNA, 22 nt, Homo sapiens
uggaaaauuaggggagguuaua

SEQ ID NO: 16443 - RNA, 20 nt, Homo sapiens
ucagguagaucuuugagguc

SEQ ID NO: 16444 - RNA, 23 nt, Homo sapiens
uugcauugcccuccauaguacuc

SEQ ID NO: 16445 - RNA, 22 nt, Homo sapiens
uugaaguaguacuuuauuauag

SEQ ID NO: 16446 - RNA, 22 nt, Homo sapiens
uugcauaauaagagggauacgu

SEQ ID NO: 16447 - RNA, 22 nt, Homo sapiens
uguuagguuggugcaaaaguga

SEQ ID NO: 16448 - RNA, 22 nt, Homo sapiens
uuacaguagaugaggguauaau

SEQ ID NO: 16449 - RNA, 22 nt, Homo sapiens
uucagguaucccuugucuauag

SEQ ID NO: 16450 - RNA, 22 nt, Homo sapiens
agcauuacaugguacagagaag

SEQ ID NO: 16451 - RNA, 22 nt, Homo sapiens
aguagcauuggggggcauccuc

SEQ ID NO: 16452 - RNA, 23 nt, Homo sapiens
auaaugcaaguggugguaaucug

SEQ ID NO: 16453 - RNA, 22 nt, Homo sapiens
auagaauguauuaguaaauuug

SEQ ID NO: 16454 - RNA, 22 nt, Homo sapiens
augagguaauaaguccuuggaa

SEQ ID NO: 16455 - RNA, 22 nt, Homo sapiens
augagguaguagaaagucaggu

SEQ ID NO: 16456 - RNA, 22 nt, Homo sapiens
augcaaaucuuaaguaugugug

SEQ ID NO: 16457 - RNA, 22 nt, Homo sapiens
augcaaggaugguuagauauau

SEQ ID NO: 16458 - RNA, 22 nt, Homo sapiens
auguaguaugaagaagaugcuu

SEQ ID NO: 16459 - RNA, 22 nt, Eastern equine encephalitis virus
caagucacugcaaagaugcuuu

SEQ ID NO: 16460 - RNA, 22 nt, Homo sapiens
uagaccaauuggcauauaguaa

SEQ ID NO: 16461 - RNA, 17 nt, Homo sapiens
uuucucagcccucuucu

SEQ ID NO: 16462 - RNA, 22 nt, Homo sapiens
uuuugcuugugaauagccacau

SEQ ID NO: 16463 - RNA, 22 nt, Homo sapiens
ucucauggcucacccugcauag

SEQ ID NO: 16464 - RNA, 22 nt, Homo sapiens
cacugcaguaaauugcgucggu

SEQ ID NO: 16465 - RNA, 22 nt, Homo sapiens
uccuuuguuacaguuggcucug

SEQ ID NO: 16466 - RNA, 19 nt, Homo sapiens
agcaguguggagauuucuc

SEQ ID NO: 16467 - RNA, 18 nt, Homo sapiens
ugacagcacaugugggga

SEQ ID NO: 16468 - RNA, 23 nt, Homo sapiens
agccugguuucccugcuucuccc

SEQ ID NO: 16469 - RNA, 22 nt, Homo sapiens
ugacugucuagauagagcuugg

SEQ ID NO: 16470 - RNA, 22 nt, Homo sapiens
gcaccacugcacucucagcuug

SEQ ID NO: 16471 - RNA, 22 nt, Homo sapiens
aucauaucauuggugaacagug

SEQ ID NO: 16472 - RNA, 22 nt, Homo sapiens
agagagguggguggagccccca

SEQ ID NO: 16473 - RNA, 22 nt, Homo sapiens
uugugcuuguaacuacauucag

SEQ ID NO: 16474 - RNA, 21 nt, Homo sapiens
agagucaucucuaucuguacc

SEQ ID NO: 16475 - RNA, 22 nt, Homo sapiens
agaguaguaggaugaauggacu

SEQ ID NO: 16476 - RNA, 22 nt, Homo sapiens
gaaagguaggaacagggugcag

SEQ ID NO: 16477 - RNA, 22 nt, Homo sapiens
ggccggguggccauggcugccc

SEQ ID NO: 16478 - RNA, 22 nt, Homo sapiens
uacuauugcaucggugauuagg

SEQ ID NO: 16479 - RNA, 22 nt, Homo sapiens
ucuaagaauucauuuauaagcc

SEQ ID NO: 16480 - RNA, 22 nt, Homo sapiens
agcagcuuugcauggccugugg

SEQ ID NO: 16481 - RNA, 22 nt, Homo sapiens
ccaaguguuuucauuguuccau

SEQ ID NO: 16482 - RNA, 21 nt, Homo sapiens
uagauaguugguucugaaucu

SEQ ID NO: 16483 - RNA, 22 nt, Homo sapiens
ugcauauguauacaugugccau

SEQ ID NO: 16484 - RNA, 22 nt, Homo sapiens
uucuugguguaguaguugaaaa

SEQ ID NO: 16485 - RNA, 22 nt, Homo sapiens
cuuugggaccgcgguuuauacu

SEQ ID NO: 16486 - RNA, 22 nt, Homo sapiens
ccaucacacugugauuauuauc

SEQ ID NO: 16487 - RNA, 22 nt, Homo sapiens
ugagguugaaggacauuuuuau

SEQ ID NO: 16488 - RNA, 22 nt, Homo sapiens
ugagauaucauuucacacccag

SEQ ID NO: 16489 - RNA, 22 nt, Homo sapiens
ugcucaccugcugcucaccucc

SEQ ID NO: 16490 - RNA, 22 nt, Homo sapiens
aggcaggugaaagauaguuuua

SEQ ID NO: 16491 - RNA, 22 nt, Homo sapiens
ucuggccuagaacaauuaauua

SEQ ID NO: 16492 - RNA, 22 nt, Homo sapiens
cuauucacaauagccaagauuu

SEQ ID NO: 16493 - RNA, 22 nt, Homo sapiens
aagcugcauuuucuagaugcuu

SEQ ID NO: 16494 - RNA, 22 nt, Homo sapiens
cauggcacaucuuuucugacua

SEQ ID NO: 16495 - RNA, 22 nt, Homo sapiens
aucaaauugucauuuuaaggau

SEQ ID NO: 16496 - RNA, 22 nt, Homo sapiens
cugaggugggagaaucacauaa

SEQ ID NO: 16497 - RNA, 22 nt, Homo sapiens
gcagugugauguuuuaaucuau

SEQ ID NO: 16498 - RNA, 22 nt, Homo sapiens
uccuucacucuacaucuuuguu

SEQ ID NO: 16499 - RNA, 22 nt, Homo sapiens
ugcauugcacuugcaugagaua

SEQ ID NO: 16500 - RNA, 21 nt, Homo sapiens
uagcaaauugcuauuaaggca

SEQ ID NO: 16501 - RNA, 22 nt, Homo sapiens
ucugucuuugucaggaccagag

SEQ ID NO: 16502 - RNA, 21 nt, Homo sapiens
uucuacuccggcguuguuuuu

SEQ ID NO: 16503 - RNA, 21 nt, Homo sapiens
cuucuuggggcagggcagggu

SEQ ID NO: 16504 - RNA, 19 nt, Homo sapiens
uuucacacucgccuacuuc

SEQ ID NO: 16505 - RNA, 23 nt, Homo sapiens
acacuugcugaguaaaucaaaua

SEQ ID NO: 16506 - RNA, 22 nt, Homo sapiens
uuuuugagaauuggugaaacac

SEQ ID NO: 16507 - RNA, 22 nt, Homo sapiens
aucauuaguuguggaauucuug

SEQ ID NO: 16508 - RNA, 22 nt, Homo sapiens
ucugucuuguccucacccuaga

SEQ ID NO: 16509 - RNA, 22 nt, Homo sapiens
ucugguggugaugagagacagu

SEQ ID NO: 16510 - RNA, 22 nt, Homo sapiens
guucacacuugcaaccccagca

SEQ ID NO: 16511 - RNA, 22 nt, Homo sapiens
uuucuacagugaacgauuucua

SEQ ID NO: 16512 - RNA, 22 nt, Homo sapiens
ucuuugauguucugaaagaugg

SEQ ID NO: 16513 - RNA, 22 nt, Homo sapiens
uggguagagaaucaggaucuua

SEQ ID NO: 16514 - RNA, 22 nt, Homo sapiens
augggaaaaucagaaggccugg

SEQ ID NO: 16515 - RNA, 22 nt, Homo sapiens
ccuucauugcaucuuuaagaga

SEQ ID NO: 16516 - RNA, 22 nt, Homo sapiens
auuuuuggauauagggaaggau

SEQ ID NO: 16517 - RNA, 22 nt, Homo sapiens
uguggcuuuuucuuggcugagg

SEQ ID NO: 16518 - RNA, 22 nt, Homo sapiens
ucuggccuacaaguaauuuuau

SEQ ID NO: 16519 - RNA, 22 nt, Homo sapiens
ugagacggagucucacucuguu

SEQ ID NO: 16520 - RNA, 22 nt, Homo sapiens
aaacauugaccucauccuggca

SEQ ID NO: 16521 - RNA, 22 nt, Homo sapiens
guugcacagucuuuccuggacu

SEQ ID NO: 16522 - RNA, 22 nt, Homo sapiens
ggaaagauguaauauuaucuaa

SEQ ID NO: 16523 - RNA, 22 nt, Homo sapiens
auuaaguugugccugaaaacuu

SEQ ID NO: 16524 - RNA, 22 nt, Homo sapiens
uaagaauucuguccgguauacu

SEQ ID NO: 16525 - RNA, 22 nt, Homo sapiens
uaugcacaugcaugcuugaaua

SEQ ID NO: 16526 - RNA, 22 nt, Homo sapiens
aagagguuauagaguguauacu

SEQ ID NO: 16527 - RNA, 22 nt, Homo sapiens
uacaguagagaucagcaaacua

SEQ ID NO: 16528 - RNA, 21 nt, Homo sapiens
ugagaugcaaucaccagggag

SEQ ID NO: 16529 - RNA, 22 nt, Homo sapiens
uggucaccugaauuaugcaugu

SEQ ID NO: 16530 - RNA, 22 nt, Homo sapiens
uuggaaggcugaauggccucuc

SEQ ID NO: 16531 - RNA, 22 nt, Homo sapiens
gucuuccagccuccaucuuucu

SEQ ID NO: 16532 - RNA, 22 nt, Homo sapiens
ucagugacuggguauuaaauca

SEQ ID NO: 16533 - RNA, 22 nt, Homo sapiens
guaacacaugcugcucucuggu

SEQ ID NO: 16534 - RNA, 22 nt, Homo sapiens
augugcauaugaagcacagaca

SEQ ID NO: 16535 - RNA, 22 nt, Homo sapiens
ucagauacuggugacaugaaug

SEQ ID NO: 16536 - RNA, 22 nt, Homo sapiens
cagugcuuuaucaaguccucca

SEQ ID NO: 16537 - RNA, 22 nt, Homo sapiens
gugaauugagagaacuguguua

SEQ ID NO: 16538 - RNA, 22 nt, Homo sapiens
ucccuuucuggaguuucccaag

SEQ ID NO: 16539 - RNA, 19 nt, Homo sapiens
ucaccaguacacaauacaa

SEQ ID NO: 16540 - RNA, 22 nt, Homo sapiens
auugcucaaaucaguacuugag

SEQ ID NO: 16541 - RNA, 22 nt, Homo sapiens
uucauguagucaucauccugcu

SEQ ID NO: 16542 - RNA, 22 nt, Homo sapiens
uggaugaagagaugguaguugc

SEQ ID NO: 16543 - RNA, 22 nt, Homo sapiens
ugaggcuaggauaggcugauuc

SEQ ID NO: 16544 - RNA, 22 nt, Homo sapiens
uggcaggugcacuggcuuugaa

SEQ ID NO: 16545 - RNA, 22 nt, Homo sapiens
uuagcaccacacacuuuagagg

SEQ ID NO: 16546 - RNA, 22 nt, Homo sapiens
cugcaagaaucguaguauuuga

SEQ ID NO: 16547 - RNA, 20 nt, Homo sapiens
uugcugguguuagaggaggc

SEQ ID NO: 16548 - RNA, 22 nt, Homo sapiens
ucuguggucagaguccuuggcc

SEQ ID NO: 16549 - RNA, 22 nt, Homo sapiens
ugagcacagcgugugggagagc

SEQ ID NO: 16550 - RNA, 22 nt, Homo sapiens
ggucugguguugaaauucuuca

SEQ ID NO: 16551 - RNA, 22 nt, Homo sapiens
gugguuuuacaaagagaaagau

SEQ ID NO: 16552 - RNA, 22 nt, Homo sapiens
ugugcuugaaauucaguuuuga

SEQ ID NO: 16553 - RNA, 22 nt, Homo sapiens
ugauggcaauggcauucauuuu

SEQ ID NO: 16554 - RNA, 22 nt, Homo sapiens
aaaguggugugaguauguaucu

SEQ ID NO: 16555 - RNA, 22 nt, Homo sapiens
uuugugacuugcuucucagaau

SEQ ID NO: 16556 - RNA, 22 nt, Homo sapiens
uuucacaguguucucccccaga

SEQ ID NO: 16557 - RNA, 22 nt, Homo sapiens
gccaagauuuaauucaucaguu

SEQ ID NO: 16558 - RNA, 22 nt, Homo sapiens
auggcacagaguagaugcucaa

SEQ ID NO: 16559 - RNA, 22 nt, Homo sapiens
caaaguaauugcuguuuugcca

SEQ ID NO: 16560 - RNA, 22 nt, Homo sapiens
ucacugaaaccuccaccucucg

SEQ ID NO: 16561 - RNA, 22 nt, Homo sapiens
auguggugguagccaggacagg

SEQ ID NO: 16562 - RNA, 22 nt, Homo sapiens
gucugcaugucauaugauagua

SEQ ID NO: 16563 - RNA, 22 nt, Homo sapiens
agccauacaacguaugcaugua

SEQ ID NO: 16564 - RNA, 22 nt, Homo sapiens
uaucaucauguuuuugcugugu

SEQ ID NO: 16565 - RNA, 22 nt, Homo sapiens
cugccuagauguuguagggggu

SEQ ID NO: 16566 - RNA, 22 nt, Homo sapiens
auaacauggaguuugucauuua

SEQ ID NO: 16567 - RNA, 22 nt, Homo sapiens
cucagcuacuugggaagcugag

SEQ ID NO: 16568 - RNA, 21 nt, Homo sapiens
ugcugcacuucuuuugcugug

SEQ ID NO: 16569 - RNA, 22 nt, Homo sapiens
augaccaugauccuugccgacc

SEQ ID NO: 16570 - RNA, 22 nt, Homo sapiens
caugguguuaggcacugggaau

SEQ ID NO: 16571 - RNA, 22 nt, Homo sapiens
ucaaguacugccuugcucuggc

SEQ ID NO: 16572 - RNA, 23 nt, Homo sapiens
uacagcugcagaaucaggcuaag

SEQ ID NO: 16573 - RNA, 22 nt, Homo sapiens
auccauguggauaaauguguau

SEQ ID NO: 16574 - RNA, 22 nt, Homo sapiens
acugcaaugucgaauagagaug

SEQ ID NO: 16575 - RNA, 22 nt, Homo sapiens
aagcuggauuuaguguggagca

SEQ ID NO: 16576 - RNA, 22 nt, Homo sapiens
gucacaguguuuguucauccca

SEQ ID NO: 16577 - RNA, 22 nt, Homo sapiens
ggaaugagaaauauuacacaau

SEQ ID NO: 16578 - RNA, 19 nt, Homo sapiens
cuugccccauucauccucu

SEQ ID NO: 16579 - RNA, 22 nt, Homo sapiens
aaugcacauaaaauccuccagg

SEQ ID NO: 16580 - RNA, 23 nt, Homo sapiens
ggugaggaguacagagucuucau

SEQ ID NO: 16581 - RNA, 22 nt, Homo sapiens
gggcaugauggugcacacaugu

SEQ ID NO: 16582 - RNA, 22 nt, Homo sapiens
ucagcaaugaccuaagcaaaua

SEQ ID NO: 16583 - RNA, 22 nt, Homo sapiens
agagguaagcaguggcaagugc

SEQ ID NO: 16584 - RNA, 21 nt, Homo sapiens
ggcaagaaacacaaucaagua

SEQ ID NO: 16585 - RNA, 22 nt, Homo sapiens
uccuuuggucaguauucuuuug

SEQ ID NO: 16586 - RNA, 22 nt, Homo sapiens
cuagcccagugcuccuggauca

SEQ ID NO: 16587 - RNA, 22 nt, Homo sapiens
agugcauugcaucucugcuuca

SEQ ID NO: 16588 - RNA, 22 nt, Homo sapiens
auggcagcccucuuuauccaug

SEQ ID NO: 16589 - RNA, 21 nt, Homo sapiens
uugaguugaagcaaggaggga

SEQ ID NO: 16590 - RNA, 22 nt, Homo sapiens
ucacauagcugaguaaaaugga

SEQ ID NO: 16591 - RNA, 22 nt, Homo sapiens
uccauguagaugcuauguuguc

SEQ ID NO: 16592 - RNA, 22 nt, Homo sapiens
uuauccucuagacauagguuua

SEQ ID NO: 16593 - RNA, 22 nt, Homo sapiens
uuugucuccuaagacucugugg

SEQ ID NO: 16594 - RNA, 22 nt, Homo sapiens
aaaagucuguagugaaagguga

SEQ ID NO: 16595 - RNA, 22 nt, Homo sapiens
acccuggauucguggccuugaa

SEQ ID NO: 16596 - RNA, 22 nt, Homo sapiens
cugagauacacuaauagucucu

SEQ ID NO: 16597 - RNA, 22 nt, Homo sapiens
ugugccacugcacucuggccug

SEQ ID NO: 16598 - RNA, 22 nt, Homo sapiens
ggagugucccaaucucagcuca

SEQ ID NO: 16599 - RNA, 18 nt, Homo sapiens
ugcagcuuugugauuggc

SEQ ID NO: 16600 - RNA, 22 nt, Homo sapiens
uuuuuggguaaugauuaucaau

SEQ ID NO: 16601 - RNA, 22 nt, Homo sapiens
gagugcaucguggccauuuuaa

SEQ ID NO: 16602 - RNA, 22 nt, Homo sapiens
ggagcugugauuugaguccaga

SEQ ID NO: 16603 - RNA, 22 nt, Homo sapiens
ggcaagugucagcagcaacacc

SEQ ID NO: 16604 - RNA, 22 nt, Homo sapiens
uuuuugugguauauugcaacaa

SEQ ID NO: 16605 - RNA, 22 nt, Homo sapiens
ccugagaucauacuguuaguaa

SEQ ID NO: 16606 - RNA, 22 nt, Homo sapiens
cauuugguggcuacagaguaac

SEQ ID NO: 16607 - RNA, 22 nt, Homo sapiens
ugagguaucauugcccaggcug

SEQ ID NO: 16608 - RNA, 22 nt, Homo sapiens
agaauguauauucuguaguugu

SEQ ID NO: 16609 - RNA, 22 nt, Homo sapiens
ucacacugucuugguuacucuu

SEQ ID NO: 16610 - RNA, 22 nt, Homo sapiens
cagccggguggcuccuagggua

SEQ ID NO: 16611 - RNA, 21 nt, Homo sapiens
ucacauggccagaguaggaac

SEQ ID NO: 16612 - RNA, 22 nt, Homo sapiens
caaugugcuuggggcacaugag

SEQ ID NO: 16613 - RNA, 23 nt, Homo sapiens
cagcucauuuggguccccuuguc

SEQ ID NO: 16614 - RNA, 22 nt, Homo sapiens
uagagaucuuauauuuuaugac

SEQ ID NO: 16615 - RNA, 22 nt, Homo sapiens
aggcuagacuuugagaauuuuu

SEQ ID NO: 16616 - RNA, 22 nt, Homo sapiens
gagcugccuugccuaugcaaga

SEQ ID NO: 16617 - RNA, 22 nt, Homo sapiens
cacugcacuccagucuggcgac

SEQ ID NO: 16618 - RNA, 22 nt, Homo sapiens
uucaagcugggcaaauaagggg

SEQ ID NO: 16619 - RNA, 22 nt, Homo sapiens
gagaaugcaugaaagacuuaca

SEQ ID NO: 16620 - RNA, 20 nt, Homo sapiens
uucuugaguuaacaaguuac

SEQ ID NO: 16621 - RNA, 22 nt, Homo sapiens
ugcuugagacacauaugaauuu

SEQ ID NO: 16622 - RNA, 22 nt, Homo sapiens
cacuggucagugaaacaguauu

SEQ ID NO: 16623 - RNA, 17 nt, Homo sapiens
cugugaugaucuugucu

SEQ ID NO: 16624 - RNA, 22 nt, Homo sapiens
ucacacugcaucuguuggaauu

SEQ ID NO: 16625 - RNA, 22 nt, Homo sapiens
ucaccuggagacaugaagacug

SEQ ID NO: 16626 - RNA, 22 nt, Homo sapiens
uaucaaguuggaagagaaguaa

SEQ ID NO: 16627 - RNA, 22 nt, Homo sapiens
uucucugggacauaggucgggu

SEQ ID NO: 16628 - RNA, 22 nt, Homo sapiens
ugauggcacagugaguuccagg

SEQ ID NO: 16629 - RNA, 22 nt, Homo sapiens
acagugacagaaagcugauuau

SEQ ID NO: 16630 - RNA, 22 nt, Homo sapiens
acaguagcgcaaucucggcuca

SEQ ID NO: 16631 - RNA, 19 nt, Homo sapiens
ggucauggagguuguguga

SEQ ID NO: 16632 - RNA, 22 nt, Homo sapiens
gcuuuggcauguagauguaugg

SEQ ID NO: 16633 - RNA, 22 nt, Homo sapiens
augugugaaucccagaaccugu

SEQ ID NO: 16634 - RNA, 22 nt, Homo sapiens
ucacugcacucuccgccuugcg

SEQ ID NO: 16635 - RNA, 22 nt, Homo sapiens
uaugcacacacguguuuaugug

SEQ ID NO: 16636 - RNA, 22 nt, Homo sapiens
caaaugcuucuauggacugucu

SEQ ID NO: 16637 - RNA, 22 nt, Homo sapiens
auacaguaaugucuuaggcugu

SEQ ID NO: 16638 - RNA, 20 nt, Homo sapiens
ucucauggagguagagaaua

SEQ ID NO: 16639 - RNA, 22 nt, Homo sapiens
uggaggacugcagaacugaggc

SEQ ID NO: 16640 - RNA, 22 nt, Homo sapiens
uaucccaguggauguaccccau

SEQ ID NO: 16641 - RNA, 20 nt, Homo sapiens
gcugugcuuaauacacuuuc

SEQ ID NO: 16642 - RNA, 22 nt, Homo sapiens
gggguaguuacuguuguucuuu

SEQ ID NO: 16643 - RNA, 22 nt, Homo sapiens
ugucaaggaaugucauugguuu

SEQ ID NO: 16644 - RNA, 22 nt, Homo sapiens
gacaccugguguggaacuggag

SEQ ID NO: 16645 - RNA, 22 nt, Homo sapiens
agaucacagucuuugguuuuag

SEQ ID NO: 16646 - RNA, 22 nt, Homo sapiens
uugugaucuucagaaaguggcu

SEQ ID NO: 16647 - RNA, 17 nt, Homo sapiens
augaacucaucauuuuu

SEQ ID NO: 16648 - RNA, 22 nt, Homo sapiens
auaguacuauugcaguguuaua

SEQ ID NO: 16649 - RNA, 22 nt, Homo sapiens
augaguaugagaauacauuaag

SEQ ID NO: 16650 - RNA, 22 nt, Homo sapiens
acugcacuccagcccaggugac

SEQ ID NO: 16651 - RNA, 22 nt, Homo sapiens
uuuuugaguaaauauaaauugu

SEQ ID NO: 16652 - RNA, 22 nt, Homo sapiens
ugcagcauguaggcacguuauu

SEQ ID NO: 16653 - RNA, 22 nt, Homo sapiens
uggaguaggccuaagaaugaca

SEQ ID NO: 16654 - RNA, 22 nt, Homo sapiens
ucugcauaucaugcagaacuau

SEQ ID NO: 16655 - RNA, 22 nt, Homo sapiens
gaugauguugaauguucucacc

SEQ ID NO: 16656 - RNA, 22 nt, Homo sapiens
caaagucuucaguugauucuga

SEQ ID NO: 16657 - RNA, 22 nt, Homo sapiens
gugcacaacguguagguuuguu

SEQ ID NO: 16658 - RNA, 22 nt, Homo sapiens
guggcagaaaagagaagcaaug

SEQ ID NO: 16659 - RNA, 22 nt, Homo sapiens
auuguguuugaaugaggcucca

SEQ ID NO: 16660 - RNA, 22 nt, Homo sapiens
ugaaggaguauggauaagucgu

SEQ ID NO: 16661 - RNA, 22 nt, Homo sapiens
cagugguuuucaacccugguug

SEQ ID NO: 16662 - RNA, 19 nt, Homo sapiens
auuugaucaucaggcacag

SEQ ID NO: 16663 - RNA, 21 nt, Homo sapiens
uagagagcaauaccuccagag

SEQ ID NO: 16664 - RNA, 22 nt, Homo sapiens
agcaucaugcaguugcuauuca

SEQ ID NO: 16665 - RNA, 22 nt, Homo sapiens
gcaagaguauuucaaggaagau

SEQ ID NO: 16666 - RNA, 22 nt, Homo sapiens
gcauggaguggaaauucuuggg

SEQ ID NO: 16667 - RNA, 22 nt, Homo sapiens
ucacauuguuauguaaauguuu

SEQ ID NO: 16668 - RNA, 22 nt, Homo sapiens
cauggucaccuuccaaguuauu

SEQ ID NO: 16669 - RNA, 22 nt, Homo sapiens
agacuagacagaugaacagcac

SEQ ID NO: 16670 - RNA, 22 nt, Homo sapiens
ugacuucauuuuuggccaugag

SEQ ID NO: 16671 - RNA, 17 nt, Homo sapiens
agccccauuagcuaguu

SEQ ID NO: 16672 - RNA, 22 nt, Homo sapiens
gcuguauugacuuuguaucaua

SEQ ID NO: 16673 - RNA, 22 nt, Homo sapiens
ugggaagauucuguguuuuucc

SEQ ID NO: 16674 - RNA, 22 nt, Homo sapiens
uugucccauggggucuuccuuu

SEQ ID NO: 16675 - RNA, 22 nt, Homo sapiens
uuggaagacaaugcugauucuc

SEQ ID NO: 16676 - RNA, 22 nt, Homo sapiens
ugaggagugaacuauuucugau

SEQ ID NO: 16677 - RNA, 22 nt, Homo sapiens
cugugcauaugacuuuauugga

SEQ ID NO: 16678 - RNA, 22 nt, Homo sapiens
ucuugguuuauugugguaugaa

SEQ ID NO: 16679 - RNA, 22 nt, Homo sapiens
uucaagauggccccagugagcc

SEQ ID NO: 16680 - RNA, 22 nt, Homo sapiens
cccucgagaaaccaucugcuga

SEQ ID NO: 16681 - RNA, 22 nt, Homo sapiens
gggcaacauugaguacccugaa

SEQ ID NO: 16682 - RNA, 22 nt, Homo sapiens
gagguaagagaauaaacaguuu

SEQ ID NO: 16683 - RNA, 22 nt, Homo sapiens
uagcaccucuuuggccuuucgu

SEQ ID NO: 16684 - RNA, 22 nt, Homo sapiens
ucacugaaaccacugccuccug

SEQ ID NO: 16685 - RNA, 22 nt, Homo sapiens
ucagaguaguuccuggcagaaa

SEQ ID NO: 16686 - RNA, 22 nt, Homo sapiens
gugcacaacaugcagguuuguu

SEQ ID NO: 16687 - RNA, 22 nt, Homo sapiens
uaccuguagacuacagcuucag

SEQ ID NO: 16688 - RNA, 22 nt, Homo sapiens
ucacaugugcguuuuggcaugu

SEQ ID NO: 16689 - RNA, 22 nt, Homo sapiens
auacccucugggugguuaguug

SEQ ID NO: 16690 - RNA, 22 nt, Homo sapiens
agcagcauggguauaaaucucc

SEQ ID NO: 16691 - RNA, 22 nt, Homo sapiens
aaaugcacgcuacccagcuaga

SEQ ID NO: 16692 - RNA, 22 nt, Homo sapiens
augggagugugguuagagaccu

SEQ ID NO: 16693 - RNA, 22 nt, Homo sapiens
uugaggugaauuugcaggaugc

SEQ ID NO: 16694 - RNA, 22 nt, Homo sapiens
gggaugaagaagaauaguucgu

SEQ ID NO: 16695 - RNA, 22 nt, Homo sapiens
aaagagaucuaugggcacuaug

SEQ ID NO: 16696 - RNA, 19 nt, Homo sapiens
ucugucacuggggguauuc

SEQ ID NO: 16697 - RNA, 22 nt, Homo sapiens
gagcugaaguuuccauuuguac

SEQ ID NO: 16698 - RNA, 20 nt, Homo sapiens
ugguccccugagucuggcuu

SEQ ID NO: 16699 - RNA, 22 nt, Homo sapiens
gugagggagcuggaauauuuau

SEQ ID NO: 16700 - RNA, 22 nt, Homo sapiens
cuggauagagauugaugaugcu

SEQ ID NO: 16701 - RNA, 22 nt, Homo sapiens
cagcuguuguuaugucugcagg

SEQ ID NO: 16702 - RNA, 22 nt, Homo sapiens
uuuuacacaucaccgcucgugu

SEQ ID NO: 16703 - RNA, 22 nt, Homo sapiens
gucuuuguuuggucuguaucag

SEQ ID NO: 16704 - RNA, 22 nt, Homo sapiens
ucuggccuccuaugagaaucga

SEQ ID NO: 16705 - RNA, 22 nt, Homo sapiens
gcuaaaugcaugaggcgaugug

SEQ ID NO: 16706 - RNA, 23 nt, Homo sapiens
acaguggugugaucuuggcucag

SEQ ID NO: 16707 - RNA, 22 nt, Homo sapiens
gauaaaguauuggguacuaugc

SEQ ID NO: 16708 - RNA, 22 nt, Homo sapiens
gucucacagcuagcugcuuuau

SEQ ID NO: 16709 - RNA, 22 nt, Homo sapiens
uccucaguggauuggauggugc

SEQ ID NO: 16710 - RNA, 22 nt, Homo sapiens
cuuucacacuguuggugggaau

SEQ ID NO: 16711 - RNA, 23 nt, Homo sapiens
ggacuguaagggauauaaagguu

SEQ ID NO: 16712 - RNA, 18 nt, Homo sapiens
acaucccaugcuggggug

SEQ ID NO: 16713 - RNA, 22 nt, Homo sapiens
ugaagugaaugguaaguaugcc

SEQ ID NO: 16714 - RNA, 22 nt, Homo sapiens
ugaagcuaacuugauugugaug

SEQ ID NO: 16715 - RNA, 22 nt, Homo sapiens
aaacugaucugaaggccaggcu

SEQ ID NO: 16716 - RNA, 22 nt, Homo sapiens
cacugcauggucuagcuggguu

SEQ ID NO: 16717 - RNA, 22 nt, Homo sapiens
agaaagugcuucccuuugguga

SEQ ID NO: 16718 - RNA, 22 nt, Homo sapiens
ucucugguuuucaaagcaguau

SEQ ID NO: 16719 - RNA, 19 nt, Homo sapiens
caugugcacuacuggcuuc

SEQ ID NO: 16720 - RNA, 22 nt, Homo sapiens
cuggcccaguucugcguuuugc

SEQ ID NO: 16721 - RNA, 22 nt, Homo sapiens
ucaagugauucuugugccuuag

SEQ ID NO: 16722 - RNA, 19 nt, Homo sapiens
gcuucuugaggacgaugac

SEQ ID NO: 16723 - RNA, 22 nt, Homo sapiens
guucaucagggauauuggcuua

SEQ ID NO: 16724 - RNA, 22 nt, Homo sapiens
ucgcaguuaauaaugaugugcg

SEQ ID NO: 16725 - RNA, 22 nt, Homo sapiens
uccaguuguuauuuuuauaaag

SEQ ID NO: 16726 - RNA, 22 nt, Homo sapiens
aagcuggcauucauucguucuu

SEQ ID NO: 16727 - RNA, 22 nt, Homo sapiens
agcagagcaguggauuuuguga

SEQ ID NO: 16728 - RNA, 22 nt, Homo sapiens
uaucucaguguacaggaugaua

SEQ ID NO: 16729 - RNA, 22 nt, Homo sapiens
cugagacacucuuaucugcaua

SEQ ID NO: 16730 - RNA, 22 nt, Homo sapiens
ugugcaugacagcauacaaacg

SEQ ID NO: 16731 - RNA, 22 nt, Homo sapiens
uagaucauauacuugccaugac

SEQ ID NO: 16732 - RNA, 21 nt, Homo sapiens
uaucauggccauccucuucuc

SEQ ID NO: 16733 - RNA, 22 nt, Homo sapiens
uacagugggcacuggcgcccug

SEQ ID NO: 16734 - RNA, 22 nt, Homo sapiens
ucugucacugguggacgaucac

SEQ ID NO: 16735 - RNA, 22 nt, Homo sapiens
uaagggacgcccccuucucucu

SEQ ID NO: 16736 - RNA, 22 nt, Homo sapiens
auccuguacuaagguuuuccca

SEQ ID NO: 16737 - RNA, 22 nt, Homo sapiens
ccacccuggagaauuugagguc

SEQ ID NO: 16738 - RNA, 22 nt, Homo sapiens
cacauagcuagucaguagugaa

SEQ ID NO: 16739 - RNA, 22 nt, Homo sapiens
cucugagccugagguuccuacu

SEQ ID NO: 16740 - RNA, 22 nt, Homo sapiens
cugagaacaucauucagauauu

SEQ ID NO: 16741 - RNA, 22 nt, Homo sapiens
ugccugagcccagcccuguagu

SEQ ID NO: 16742 - RNA, 22 nt, Homo sapiens
gaucacuuugaugccaggaacu

SEQ ID NO: 16743 - RNA, 22 nt, Homo sapiens
ugcuguuguuugaugaaguaau

SEQ ID NO: 16744 - RNA, 22 nt, Homo sapiens
uuccuuguagcaaaugcgauga

SEQ ID NO: 16745 - RNA, 22 nt, Homo sapiens
augcacuuggcaggaugauucc

SEQ ID NO: 16746 - RNA, 22 nt, Homo sapiens
guauacaugucaaaacucacau

SEQ ID NO: 16747 - RNA, 22 nt, Homo sapiens
ucuuuguucaggagccaacucc

SEQ ID NO: 16748 - RNA, 22 nt, Homo sapiens
uagaaguaggcuacgugucugg

SEQ ID NO: 16749 - RNA, 22 nt, Homo sapiens
cuguaugugagaaauaauaagu

SEQ ID NO: 16750 - RNA, 19 nt, Homo sapiens
agcagaacaaauguguggg

SEQ ID NO: 16751 - RNA, 22 nt, Homo sapiens
uauggcugcuuucacacuacaa

SEQ ID NO: 16752 - RNA, 22 nt, Homo sapiens
gagcugaauugcugccauuugc

SEQ ID NO: 16753 - RNA, 22 nt, Homo sapiens
auugcagaaaugacagagcgcc

SEQ ID NO: 16754 - RNA, 22 nt, Homo sapiens
auggcacuacugggaaugucuu

SEQ ID NO: 16755 - RNA, 22 nt, Homo sapiens
cuuccauaguuacacccaggga

SEQ ID NO: 16756 - RNA, 22 nt, Homo sapiens
uccugagacugaggagcuuugg

SEQ ID NO: 16757 - RNA, 20 nt, Homo sapiens
uggcaugaaauuuuccaagc

SEQ ID NO: 16758 - RNA, 23 nt, Homo sapiens
aaauuugccuauuauuccuaugg

SEQ ID NO: 16759 - RNA, 22 nt, Homo sapiens
ccugucuugauuaaauuacuua

SEQ ID NO: 16760 - RNA, 22 nt, Homo sapiens
gcaguagugugaucuuggcuca

SEQ ID NO: 16761 - RNA, 22 nt, Homo sapiens
ugucucaguucccuucucugga

SEQ ID NO: 16762 - RNA, 22 nt, Homo sapiens
uucaaguaagaaagacaucagg

SEQ ID NO: 16763 - RNA, 22 nt, Homo sapiens
gaacuguaaagaaauucuaagg

SEQ ID NO: 16764 - RNA, 22 nt, Homo sapiens
uaagcagugcaagaauggaaua

SEQ ID NO: 16765 - RNA, 22 nt, Homo sapiens
ggucagaaagacaggcauucag

SEQ ID NO: 16766 - RNA, 22 nt, Homo sapiens
caaaguaauugugguuuugcca

SEQ ID NO: 16767 - RNA, 22 nt, Homo sapiens
gaguaacagcauaaauuuguga

SEQ ID NO: 16768 - RNA, 22 nt, Homo sapiens
uaacuguggaaaugacuuuaaa

SEQ ID NO: 16769 - RNA, 22 nt, Homo sapiens
agggcuuuugagcugagauggu

SEQ ID NO: 16770 - RNA, 22 nt, Homo sapiens
gugaaagacauauaugguuuga

SEQ ID NO: 16771 - RNA, 22 nt, Homo sapiens
uggagcccuaguuccucauaac

SEQ ID NO: 16772 - RNA, 22 nt, Homo sapiens
uuccuugagagcuugauaucac

SEQ ID NO: 16773 - RNA, 22 nt, Homo sapiens
ucgcaccauugcacuccagcca

SEQ ID NO: 16774 - RNA, 22 nt, Homo sapiens
uuauggcuauugaugacaauug

SEQ ID NO: 16775 - RNA, 22 nt, Homo sapiens
auugcuauuauuugaccauugu

SEQ ID NO: 16776 - RNA, 22 nt, Homo sapiens
aacacuggcugcucgaguucuc

SEQ ID NO: 16777 - RNA, 22 nt, Homo sapiens
uuaggaucacagaaaauccucu

SEQ ID NO: 16778 - RNA, 22 nt, Homo sapiens
cuucaccaguuuggcagucuca

SEQ ID NO: 16779 - RNA, 22 nt, Homo sapiens
caacagucagcccauccacaga

SEQ ID NO: 16780 - RNA, 22 nt, Homo sapiens
augauagguuuagguuuagaca

SEQ ID NO: 16781 - RNA, 22 nt, Homo sapiens
aacagagcuggugacuccaggu

SEQ ID NO: 16782 - RNA, 22 nt, Homo sapiens
uagcaagaugaauuugugcaaa

SEQ ID NO: 16783 - RNA, 22 nt, Homo sapiens
cacugcacuccagucccgucuc

SEQ ID NO: 16784 - RNA, 22 nt, Homo sapiens
agcagguguggcuuauccugaa

SEQ ID NO: 16785 - RNA, 22 nt, Homo sapiens
aucaaaguaggcauauguuuuu

SEQ ID NO: 16786 - RNA, 22 nt, Homo sapiens
agacaucauuugauggugggag

SEQ ID NO: 16787 - RNA, 22 nt, Homo sapiens
guguauguuguccauggaugcg

SEQ ID NO: 16788 - RNA, 19 nt, Homo sapiens
aaguacuugucuuuugaag

SEQ ID NO: 16789 - RNA, 22 nt, Homo sapiens
uugcauguacguacagagagag

SEQ ID NO: 16790 - RNA, 22 nt, Homo sapiens
gugauuauuaugcacugcaugc

SEQ ID NO: 16791 - RNA, 22 nt, Homo sapiens
ccuuggcacuacugacauugua

SEQ ID NO: 16792 - RNA, 20 nt, Homo sapiens
cucaccagguguaggcugag

SEQ ID NO: 16793 - RNA, 22 nt, Homo sapiens
guggaggacuggauaaagaaaa

SEQ ID NO: 16794 - RNA, 19 nt, Homo sapiens
agcuguguugccugugaga

SEQ ID NO: 16795 - RNA, 22 nt, Homo sapiens
aaugccuagugugugacaggug

SEQ ID NO: 16796 - RNA, 22 nt, Homo sapiens
auggcacugccuggcuucaugg

SEQ ID NO: 16797 - RNA, 22 nt, Homo sapiens
uucuagcaauggcagagugucu

SEQ ID NO: 16798 - RNA, 22 nt, Homo sapiens
caaguguuggcuuguauacaaa

SEQ ID NO: 16799 - RNA, 22 nt, Homo sapiens
ugagucccuaagacccucaggu

SEQ ID NO: 16800 - RNA, 22 nt, Homo sapiens
guuauguaucuugauugggugg

SEQ ID NO: 16801 - RNA, 22 nt, Homo sapiens
caaagugcugggaugggccagg

SEQ ID NO: 16802 - RNA, 20 nt, Homo sapiens
gcauaugucuuuauagcaga

SEQ ID NO: 16803 - RNA, 22 nt, Homo sapiens
uaaugugaauagugcuguaaug

SEQ ID NO: 16804 - RNA, 22 nt, Homo sapiens
uuggagcccuaacucucaguac

SEQ ID NO: 16805 - RNA, 22 nt, Homo sapiens
cacagcacaggcaugaguguca

SEQ ID NO: 16806 - RNA, 22 nt, Homo sapiens
agcuucauuguuaugaauguca

SEQ ID NO: 16807 - RNA, 22 nt, Homo sapiens
aacaucaaccaugaggguugga

SEQ ID NO: 16808 - RNA, 20 nt, Homo sapiens
uguaacacauggagaacucu

SEQ ID NO: 16809 - RNA, 22 nt, Homo sapiens
accugagauuacaggugcuggc

SEQ ID NO: 16810 - RNA, 22 nt, Homo sapiens
uucccugugggcuggugcucca

SEQ ID NO: 16811 - RNA, 22 nt, Homo sapiens
cuacucuggagagugacaauca

SEQ ID NO: 16812 - RNA, 22 nt, Homo sapiens
gugguuuuaauauucagucuag

SEQ ID NO: 16813 - RNA, 22 nt, Homo sapiens
uuuuggcuuaaagagaauguau

SEQ ID NO: 16814 - RNA, 22 nt, Homo sapiens
acuggaguuuguucaagaaaua

SEQ ID NO: 16815 - RNA, 22 nt, Homo sapiens
gugcaguguuugcauggaauca

SEQ ID NO: 16816 - RNA, 22 nt, Homo sapiens
aaugguguuuccguuaagcuga

SEQ ID NO: 16817 - RNA, 22 nt, Homo sapiens
aaggaguguggugaucuugggc

SEQ ID NO: 16818 - RNA, 18 nt, Homo sapiens
gagguuagguucugacag

SEQ ID NO: 16819 - RNA, 21 nt, Homo sapiens
uugagacggagucucacucug

SEQ ID NO: 16820 - RNA, 22 nt, Homo sapiens
gcuuguguuuacuguaguuacu

SEQ ID NO: 16821 - RNA, 22 nt, Homo sapiens
cacaaugucuaagauguuucua

SEQ ID NO: 16822 - RNA, 22 nt, Homo sapiens
ggaucacuugagaccaggaguu

SEQ ID NO: 16823 - RNA, 22 nt, Homo sapiens
uaaugcacauuuauuuuaccuu

SEQ ID NO: 16824 - RNA, 20 nt, Homo sapiens
augagguguaugacacugaa

SEQ ID NO: 16825 - RNA, 22 nt, Homo sapiens
cucacuggguguaaaacaugua

SEQ ID NO: 16826 - RNA, 22 nt, Homo sapiens
uguucuugaguugggaguacaa

SEQ ID NO: 16827 - RNA, 22 nt, Homo sapiens
cuggaauucaaaaucugaauuu

SEQ ID NO: 16828 - RNA, 22 nt, Homo sapiens
gaaucacaguuauuagagcagc

SEQ ID NO: 16829 - RNA, 22 nt, Homo sapiens
cacagggcuaacauuuuugccc

SEQ ID NO: 16830 - RNA, 22 nt, Homo sapiens
acaccuguggucccaguaacuu

SEQ ID NO: 16831 - RNA, 22 nt, Homo sapiens
uugcaaggugcucgaagggcuc

SEQ ID NO: 16832 - RNA, 22 nt, Homo sapiens
ucaauguaucuccaagaauuga

SEQ ID NO: 16833 - RNA, 22 nt, Homo sapiens
gugagcuccucuucugcugcag

SEQ ID NO: 16834 - RNA, 22 nt, Homo sapiens
caugugcaugcuuucuuaugug

SEQ ID NO: 16835 - RNA, 22 nt, Homo sapiens
uugugguuuuagcacuguggau

SEQ ID NO: 16836 - RNA, 20 nt, Homo sapiens
cagagcaaagcaguccuggc

SEQ ID NO: 16837 - RNA, 22 nt, Homo sapiens
gugacuacaggccacaguuugg

SEQ ID NO: 16838 - RNA, 22 nt, Homo sapiens
cagcucauugcagucucgaccu

SEQ ID NO: 16839 - RNA, 22 nt, Homo sapiens
gcaaaugcuaugccauuuuaua

SEQ ID NO: 16840 - RNA, 22 nt, Homo sapiens
uuguguccccacucaaauuaca

SEQ ID NO: 16841 - RNA, 19 nt, Homo sapiens
ucacaggguugacuugagg

SEQ ID NO: 16842 - RNA, 22 nt, Homo sapiens
uuggaaauguguuugcauucag

SEQ ID NO: 16843 - RNA, 20 nt, Homo sapiens
uggucaccuucaggagguuc

SEQ ID NO: 16844 - RNA, 22 nt, Homo sapiens
agcagagcauauucauucgggg

SEQ ID NO: 16845 - RNA, 22 nt, Homo sapiens
ugguaucauuuuaucugcucua

SEQ ID NO: 16846 - RNA, 22 nt, Homo sapiens
ucucaguggcuuccucacuuuu

SEQ ID NO: 16847 - RNA, 22 nt, Homo sapiens
agugguuuuggaauggaauuca

SEQ ID NO: 16848 - RNA, 19 nt, Homo sapiens
aguggguguuuucuguuug

SEQ ID NO: 16849 - RNA, 22 nt, Homo sapiens
gugguuuuuuucugccuuauag

SEQ ID NO: 16850 - RNA, 20 nt, Homo sapiens
gcaguguucacuguauuccu

SEQ ID NO: 16851 - RNA, 22 nt, Homo sapiens
uguuacacugugcacuaaauuu

SEQ ID NO: 16852 - RNA, 22 nt, Homo sapiens
ugugucacugcacuccagcgug

SEQ ID NO: 16853 - RNA, 22 nt, Homo sapiens
auuuaugguuaauauaggaagu

SEQ ID NO: 16854 - RNA, 22 nt, Homo sapiens
auacguacauaugcacauaugg

SEQ ID NO: 16855 - RNA, 19 nt, Homo sapiens
accuguagaaaguacaaca

SEQ ID NO: 16856 - RNA, 22 nt, Homo sapiens
guggaaggucaugaauguucuu

SEQ ID NO: 16857 - RNA, 22 nt, Homo sapiens
ugcucaguuuaaaacuuuugag

SEQ ID NO: 16858 - RNA, 22 nt, Homo sapiens
ugagcagugagugugcugcagg

SEQ ID NO: 16859 - RNA, 22 nt, Homo sapiens
uugugcaugaugcauacauggu

SEQ ID NO: 16860 - RNA, 22 nt, Homo sapiens
gcaaaguguuuuuaggaagucu

SEQ ID NO: 16861 - RNA, 22 nt, Homo sapiens
auuguucuuacaugcugucauc

SEQ ID NO: 16862 - RNA, 22 nt, Homo sapiens
gucacauugaugcccauggugg

SEQ ID NO: 16863 - RNA, 22 nt, Homo sapiens
ugugaacagcuccaaaugugga

SEQ ID NO: 16864 - RNA, 22 nt, Homo sapiens
cucgagagaaaaugcuucacug

SEQ ID NO: 16865 - RNA, 19 nt, Homo sapiens
ugcaaagucuuuuccuauu

SEQ ID NO: 16866 - RNA, 22 nt, Homo sapiens
ugggaucauucaaugacgaaau

SEQ ID NO: 16867 - RNA, 22 nt, Homo sapiens
cugucuguuucaaaagugguua

SEQ ID NO: 16868 - RNA, 22 nt, Homo sapiens
ucauggggugcuuugcuagauu

SEQ ID NO: 16869 - RNA, 22 nt, Homo sapiens
acaguggugcgaucucggcuca

SEQ ID NO: 16870 - RNA, 22 nt, Homo sapiens
uuguccuggagguucuugcaag

SEQ ID NO: 16871 - RNA, 22 nt, Homo sapiens
uagaaucuaacucgcaugaaaa

SEQ ID NO: 16872 - RNA, 22 nt, Homo sapiens
uugcacaauggaauuuaucuuu

SEQ ID NO: 16873 - RNA, 22 nt, Homo sapiens
ucuuuguuuucugauccugaag

SEQ ID NO: 16874 - RNA, 21 nt, Homo sapiens
ugcagccauucagcccuaugc

SEQ ID NO: 16875 - RNA, 22 nt, Homo sapiens
caaauugcuuguggaggauaau

SEQ ID NO: 16876 - RNA, 22 nt, Homo sapiens
uguggcagugcuuuaugaaacc

SEQ ID NO: 16877 - RNA, 20 nt, Homo sapiens
gaaugguuucgggguucuug

SEQ ID NO: 16878 - RNA, 21 nt, Homo sapiens
ggcaagagaauacaacauaaa

SEQ ID NO: 16879 - RNA, 22 nt, Homo sapiens
uuccuggaggggaaguguccaa

SEQ ID NO: 16880 - RNA, 22 nt, Homo sapiens
uuaagucacacuagacaacuga

SEQ ID NO: 16881 - RNA, 21 nt, Homo sapiens
uuuguccaccuguguucacca

SEQ ID NO: 16882 - RNA, 18 nt, Homo sapiens
cuucauugcuguuuugcu

SEQ ID NO: 16883 - RNA, 22 nt, Homo sapiens
gugaaugcauuaagaaggggga

SEQ ID NO: 16884 - RNA, 22 nt, Homo sapiens
ccugugguuaaccagcuagaug

SEQ ID NO: 16885 - RNA, 20 nt, Homo sapiens
gugagucauuaguaaccaaa

SEQ ID NO: 16886 - RNA, 22 nt, Homo sapiens
ugagguguuauccagaguucuu

SEQ ID NO: 16887 - RNA, 22 nt, Homo sapiens
gagguugggaugagggauacag

SEQ ID NO: 16888 - RNA, 22 nt, Homo sapiens
ccugagacuugagggggcuucu

SEQ ID NO: 16889 - RNA, 22 nt, Homo sapiens
uuuugcaguuacagagagugag

SEQ ID NO: 16890 - RNA, 17 nt, Homo sapiens
ugagggaugccugguuc

SEQ ID NO: 16891 - RNA, 22 nt, Homo sapiens
aagcugugucuugucagcuacc

SEQ ID NO: 16892 - RNA, 22 nt, Homo sapiens
auuggaguuguacgcacgcuca

SEQ ID NO: 16893 - RNA, 22 nt, Homo sapiens
uucuugcuguauccucacaugg

SEQ ID NO: 16894 - RNA, 22 nt, Homo sapiens
ucaccuggagaagauggaucau

SEQ ID NO: 16895 - RNA, 22 nt, Homo sapiens
uugcagugugacgacuauauuu

SEQ ID NO: 16896 - RNA, 18 nt, Homo sapiens
ugcuccccugggugagca

SEQ ID NO: 16897 - RNA, 22 nt, Homo sapiens
ugcagugugauuuucuggcuga

SEQ ID NO: 16898 - RNA, 22 nt, Homo sapiens
auaaaguguuuaguauaggcaa

SEQ ID NO: 16899 - RNA, 22 nt, Homo sapiens
cuucuugcuguguccucacaug

SEQ ID NO: 16900 - RNA, 22 nt, Homo sapiens
agaaacauucucuugccuccuu

SEQ ID NO: 16901 - RNA, 22 nt, Homo sapiens
uaugugcacaugcccuggugac

SEQ ID NO: 16902 - RNA, 20 nt, Homo sapiens
augucagaguguggguacgg

SEQ ID NO: 16903 - RNA, 22 nt, Homo sapiens
uguauguugauguuauauucug

SEQ ID NO: 16904 - RNA, 20 nt, Homo sapiens
aagcaagcauuugcaaucau

SEQ ID NO: 16905 - RNA, 17 nt, Homo sapiens
uggcaugaggguguggg

SEQ ID NO: 16906 - RNA, 22 nt, Homo sapiens
cacauguuuuagcauggcuguu

SEQ ID NO: 16907 - RNA, 22 nt, Homo sapiens
ucacagugcaggaucaguuaau

SEQ ID NO: 16908 - RNA, 22 nt, Homo sapiens
auguaguauuaaugagagauaa

SEQ ID NO: 16909 - RNA, 20 nt, Homo sapiens
ucucauagagguagagaaua

SEQ ID NO: 16910 - RNA, 22 nt, Homo sapiens
gagagcaugugcuggcaucagu

SEQ ID NO: 16911 - RNA, 22 nt, Homo sapiens
auugcucagucagggagcucgg

SEQ ID NO: 16912 - RNA, 21 nt, Homo sapiens
cucucugcuuaugaauaguga

SEQ ID NO: 16913 - RNA, 22 nt, Homo sapiens
uucuaaacaucuuacaaugcau

SEQ ID NO: 16914 - RNA, 22 nt, Homo sapiens
uaucacaaacuuagcaguuuaa

SEQ ID NO: 16915 - RNA, 22 nt, Homo sapiens
gagguaaguggauuaugagguc

SEQ ID NO: 16916 - RNA, 22 nt, Homo sapiens
auuuuugguuucaccugcacgc

SEQ ID NO: 16917 - RNA, 22 nt, Homo sapiens
gugaccucuguugcugucacua

SEQ ID NO: 16918 - RNA, 20 nt, Homo sapiens
ucuuuuuguggccccagagu

SEQ ID NO: 16919 - RNA, 22 nt, Homo sapiens
uaaucacagagguuuggccuca

SEQ ID NO: 16920 - RNA, 22 nt, Homo sapiens
ccuguguuaugguuucuaaugu

SEQ ID NO: 16921 - RNA, 21 nt, Homo sapiens
uuggccuggaggccugaaugu

SEQ ID NO: 16922 - RNA, 21 nt, Homo sapiens
cacugcacuugccuucugggu

SEQ ID NO: 16923 - RNA, 22 nt, Homo sapiens
ccucuuuguugagacuucacca

SEQ ID NO: 16924 - RNA, 22 nt, Homo sapiens
gugcuuguguuaauauguagcu

SEQ ID NO: 16925 - RNA, 17 nt, Homo sapiens
ccccugagcgaugcagu

SEQ ID NO: 16926 - RNA, 22 nt, Homo sapiens
uaugaaucuggcuacuccaggg

SEQ ID NO: 16927 - RNA, 22 nt, Homo sapiens
ucauggggugagcuacaggcac

SEQ ID NO: 16928 - RNA, 20 nt, Homo sapiens
cugaggugggagaaucgcuu

SEQ ID NO: 16929 - RNA, 22 nt, Homo sapiens
ucuauggaguuugaaugagaaa

SEQ ID NO: 16930 - RNA, 22 nt, Homo sapiens
ugugguuuuuuucuccaauagg

SEQ ID NO: 16931 - RNA, 22 nt, Homo sapiens
gugaacagaaccugggaucgaa

SEQ ID NO: 16932 - RNA, 22 nt, Homo sapiens
aacagugccugucauuuaguag

SEQ ID NO: 16933 - RNA, 22 nt, Homo sapiens
auggcagcugacacuuccgucu

SEQ ID NO: 16934 - RNA, 22 nt, Homo sapiens
ugugcuauguuauucacauggg

SEQ ID NO: 16935 - RNA, 22 nt, Homo sapiens
agcagcauauuuuuauaaugua

SEQ ID NO: 16936 - RNA, 22 nt, Homo sapiens
ugugagacugguucugaaccca

SEQ ID NO: 16937 - RNA, 23 nt, Homo sapiens
cuguggugaggcccuagaaucug

SEQ ID NO: 16938 - RNA, 22 nt, Homo sapiens
agccccauuuguugaaaagacg

SEQ ID NO: 16939 - RNA, 22 nt, Homo sapiens
uuguauguuguuugucagagaa

SEQ ID NO: 16940 - RNA, 22 nt, Homo sapiens
auggcagcaccccacucuacug

SEQ ID NO: 16941 - RNA, 22 nt, Homo sapiens
cuggcucugggcuaaagaaaua

SEQ ID NO: 16942 - RNA, 22 nt, Homo sapiens
cacugcacuccaguuucgguaa

SEQ ID NO: 16943 - RNA, 22 nt, Homo sapiens
uggugcuuaaauaaggcuuuca

SEQ ID NO: 16944 - RNA, 22 nt, Homo sapiens
cucaaguaauccucccgccuug

SEQ ID NO: 16945 - RNA, 20 nt, Homo sapiens
ugaaggaggucauuuauacc

SEQ ID NO: 16946 - RNA, 22 nt, Homo sapiens
uggacuguaagugccuugagua

SEQ ID NO: 16947 - RNA, 21 nt, Homo sapiens
aggugucuuggguucccuggc

SEQ ID NO: 16948 - RNA, 22 nt, Homo sapiens
uuuccuguagggggcaaggccu

SEQ ID NO: 16949 - RNA, 22 nt, Homo sapiens
aucaaaugcuggcagagugccu

SEQ ID NO: 16950 - RNA, 22 nt, Homo sapiens
gagaucauucugauccagaguc

SEQ ID NO: 16951 - RNA, 22 nt, Homo sapiens
cugugcuuggagucccccuagg

SEQ ID NO: 16952 - RNA, 22 nt, Homo sapiens
guagaagcacagggccuguauu

SEQ ID NO: 16953 - RNA, 22 nt, Homo sapiens
uuugcuucacuguuuggcaaaa

SEQ ID NO: 16954 - RNA, 22 nt, Homo sapiens
gugcauaugcaugugcaugcac

SEQ ID NO: 16955 - RNA, 22 nt, Homo sapiens
aacagacugucacauaaaauug

SEQ ID NO: 16956 - RNA, 20 nt, Homo sapiens
agagugcuggacugaggagc

SEQ ID NO: 16957 - RNA, 22 nt, Homo sapiens
auugagcaaggucuccuaguau

SEQ ID NO: 16958 - RNA, 22 nt, Homo sapiens
gugugaacaucauagaguguau

SEQ ID NO: 16959 - RNA, 22 nt, Homo sapiens
agcuaguguucaccagagguca

SEQ ID NO: 16960 - RNA, 22 nt, Homo sapiens
ugagagucauacaaauaaaaau

SEQ ID NO: 16961 - RNA, 22 nt, Homo sapiens
agaauucugucauguuuauauu

SEQ ID NO: 16962 - RNA, 22 nt, Homo sapiens
guauaguaguacaaaaguuuuu

SEQ ID NO: 16963 - RNA, 20 nt, Homo sapiens
ugugagacugguuuugaacu

SEQ ID NO: 16964 - RNA, 22 nt, Homo sapiens
uucauggaacaaguggguucaa

SEQ ID NO: 16965 - RNA, 22 nt, Homo sapiens
uucaagaauuaaaguggcuuuu

SEQ ID NO: 16966 - RNA, 22 nt, Homo sapiens
uuuggcccugagggauggcaua

SEQ ID NO: 16967 - RNA, 22 nt, Homo sapiens
ugcaaucauuuggaggagaaga

SEQ ID NO: 16968 - RNA, 22 nt, Homo sapiens
aaggugcucucuuauguagaaa

SEQ ID NO: 16969 - RNA, 23 nt, Homo sapiens
aagagguaugacuaugaagugga

SEQ ID NO: 16970 - RNA, 22 nt, Homo sapiens
ucccugaguaucuaauguguuu

SEQ ID NO: 16971 - RNA, 22 nt, Homo sapiens
gugaaguuuuugugaggccuaa

SEQ ID NO: 16972 - RNA, 22 nt, Homo sapiens
ggucaacaucaucaugguaagu

SEQ ID NO: 16973 - RNA, 22 nt, Homo sapiens
cuagcagaacaauacaauucgg

SEQ ID NO: 16974 - RNA, 20 nt, Homo sapiens
gagcucaucuucuuuaccac

SEQ ID NO: 16975 - RNA, 22 nt, Homo sapiens
cacugcacuccagcuugugggc

SEQ ID NO: 16976 - RNA, 22 nt, Homo sapiens
ggugagguaguaagguacaaua

SEQ ID NO: 16977 - RNA, 22 nt, Homo sapiens
acaguacuguuguuugcugcca

SEQ ID NO: 16978 - RNA, 22 nt, Homo sapiens
guauuugauuauagcaugcuua

SEQ ID NO: 16979 - RNA, 21 nt, Homo sapiens
agguaguuuuccuuuuggagu

SEQ ID NO: 16980 - RNA, 22 nt, Homo sapiens
uacauacuucacagacuuuaaa

SEQ ID NO: 16981 - RNA, 22 nt, Homo sapiens
cuagcagacaugggcugaacca

SEQ ID NO: 16982 - RNA, 22 nt, Homo sapiens
uucaagauggcaccagugagug

SEQ ID NO: 16983 - RNA, 22 nt, Homo sapiens
cugcaguaaccacuguaggugu

SEQ ID NO: 16984 - RNA, 22 nt, Homo sapiens
gagcucauuguugcuaaagaga

SEQ ID NO: 16985 - RNA, 23 nt, Homo sapiens
ugacagaccuucuggaagaaguc

SEQ ID NO: 16986 - RNA, 18 nt, Homo sapiens
ucacaaccacagugcugu

SEQ ID NO: 16987 - RNA, 22 nt, Homo sapiens
agagugcaaagguuggggcugg

SEQ ID NO: 16988 - RNA, 21 nt, Homo sapiens
uguuaacaugcagauuacugg

SEQ ID NO: 16989 - RNA, 22 nt, Homo sapiens
uugugauugagugauccuuguu

SEQ ID NO: 16990 - RNA, 19 nt, Homo sapiens
ugugacugggccagccuag

SEQ ID NO: 16991 - RNA, 22 nt, Homo sapiens
cauggcacugagcagguaugca

SEQ ID NO: 16992 - RNA, 21 nt, Homo sapiens
uaucccagucacaucuaccca

SEQ ID NO: 16993 - RNA, 22 nt, Homo sapiens
auccccugcacggggugucauu

SEQ ID NO: 16994 - RNA, 22 nt, Homo sapiens
ugucaaaugcagugauauuuga

SEQ ID NO: 16995 - RNA, 22 nt, Homo sapiens
ugucuuguagacaauguauagu

SEQ ID NO: 16996 - RNA, 22 nt, Homo sapiens
aagcuguguguaagcucucaca

SEQ ID NO: 16997 - RNA, 22 nt, Homo sapiens
gcacugggccacauuuauuuuc

SEQ ID NO: 16998 - RNA, 22 nt, Homo sapiens
caacucuguaggauccaggugg

SEQ ID NO: 16999 - RNA, 19 nt, Homo sapiens
agcuuuggcuaacuuucuc

SEQ ID NO: 17000 - RNA, 22 nt, Homo sapiens
uugacaguggcuuaaauugguu

SEQ ID NO: 17001 - RNA, 22 nt, Homo sapiens
ugcuuuguugaaaaucauuugg

SEQ ID NO: 17002 - RNA, 22 nt, Homo sapiens
uauaacaaugcaagaauggccu

SEQ ID NO: 17003 - RNA, 22 nt, Homo sapiens
uggauuuuaauuauucugucau

SEQ ID NO: 17004 - RNA, 22 nt, Homo sapiens
agcugugucuucuuaaagauuu

SEQ ID NO: 17005 - RNA, 22 nt, Homo sapiens
uccagguuuugugaguuuaaau

SEQ ID NO: 17006 - RNA, 22 nt, Homo sapiens
cgcuggugucuaagcgacagcu

SEQ ID NO: 17007 - RNA, 22 nt, Homo sapiens
ccuuuuuguaguggaaguagga

SEQ ID NO: 17008 - RNA, 19 nt, Homo sapiens
ugagaucuuuacuggguuu

SEQ ID NO: 17009 - RNA, 22 nt, Homo sapiens
uuuguucuucguuccugagcca

SEQ ID NO: 17010 - RNA, 23 nt, Homo sapiens
cauggcuguuaacacuguuugag

SEQ ID NO: 17011 - RNA, 22 nt, Homo sapiens
uuucccuuugcuuugucagcca

SEQ ID NO: 17012 - RNA, 21 nt, Homo sapiens
gugaggucauugggcuuucug

SEQ ID NO: 17013 - RNA, 22 nt, Homo sapiens
ucagaguagcugucugaggugc

SEQ ID NO: 17014 - RNA, 22 nt, Homo sapiens
uuccuugguucagggaaggucc

SEQ ID NO: 17015 - RNA, 22 nt, Homo sapiens
ucacauggauuaacucauuuau

SEQ ID NO: 17016 - RNA, 21 nt, Homo sapiens
ugagaguaguguauuauucuc

SEQ ID NO: 17017 - RNA, 22 nt, Homo sapiens
ucacauuguauauguaccuauc

SEQ ID NO: 17018 - RNA, 22 nt, Homo sapiens
guggcagugugaggauccugcu

SEQ ID NO: 17019 - RNA, 22 nt, Homo sapiens
gcaaaugcuacaccauuuugua

SEQ ID NO: 17020 - RNA, 22 nt, Homo sapiens
auguugcuugaaggcauuuugu

SEQ ID NO: 17021 - RNA, 22 nt, Homo sapiens
aacucugucuccuucaaguuca

SEQ ID NO: 17022 - RNA, 22 nt, Homo sapiens
aagcuggagugcaguggugcaa

SEQ ID NO: 17023 - RNA, 22 nt, Homo sapiens
gugagaccaauguacuaccuuc

SEQ ID NO: 17024 - RNA, 22 nt, Homo sapiens
uucaucaggaauauugaccugu

SEQ ID NO: 17025 - RNA, 22 nt, Homo sapiens
uagucaaaucugaaggaaauuu

SEQ ID NO: 17026 - RNA, 22 nt, Homo sapiens
caguagcaugccucagaaugag

SEQ ID NO: 17027 - RNA, 22 nt, Homo sapiens
ugcauauguugagaugcauauu

SEQ ID NO: 17028 - RNA, 22 nt, Homo sapiens
caccaggugcccagcacggcca

SEQ ID NO: 17029 - RNA, 22 nt, Homo sapiens
aucucuugccagucagaauggu

SEQ ID NO: 17030 - RNA, 23 nt, Homo sapiens
ugacagucucccgauggcuaggc

SEQ ID NO: 17031 - RNA, 22 nt, Homo sapiens
ugagaacucaugaaucuuucca

SEQ ID NO: 17032 - RNA, 22 nt, Homo sapiens
uccaguacaggucucucauuuc

SEQ ID NO: 17033 - RNA, 22 nt, Homo sapiens
uuggaagguaaucaaaaguucu

SEQ ID NO: 17034 - RNA, 17 nt, Homo sapiens
aaggugcuucgaccucc

SEQ ID NO: 17035 - RNA, 22 nt, Homo sapiens
ucacugggagaccaaagccauc

SEQ ID NO: 17036 - RNA, 22 nt, Homo sapiens
auacaguauggagggcccagcu

SEQ ID NO: 17037 - RNA, 22 nt, Homo sapiens
guagcagccacacuugauaacu

SEQ ID NO: 17038 - RNA, 22 nt, Homo sapiens
agcuggaauuuaagguagauag

SEQ ID NO: 17039 - RNA, 22 nt, Homo sapiens
gcugagcuaugccauauaugcc

SEQ ID NO: 17040 - RNA, 22 nt, Homo sapiens
ugcauuguuuagaaacacuggg

SEQ ID NO: 17041 - RNA, 22 nt, Homo sapiens
ccacacugucuuggugggaaac

SEQ ID NO: 17042 - RNA, 23 nt, Homo sapiens
ucaguacuccacuuucaauagug

SEQ ID NO: 17043 - RNA, 22 nt, Homo sapiens
cauccccugcaccaaccuuuac

SEQ ID NO: 17044 - RNA, 22 nt, Homo sapiens
uagcugcugcuaggcuaaggau

SEQ ID NO: 17045 - RNA, 21 nt, Homo sapiens
ugggccccuuccuuacaucau

SEQ ID NO: 17046 - RNA, 18 nt, Homo sapiens
uaauaacugugaccuuga

SEQ ID NO: 17047 - RNA, 22 nt, Homo sapiens
ggcuagaauagggauagaccuu

SEQ ID NO: 17048 - RNA, 18 nt, Homo sapiens
uuuuugaggcacagggga

SEQ ID NO: 17049 - RNA, 22 nt, Homo sapiens
auggagacaaauaaaggagagu

SEQ ID NO: 17050 - RNA, 22 nt, Homo sapiens
cucaugcugucuucugggguaa

SEQ ID NO: 17051 - RNA, 22 nt, Homo sapiens
ggguaaaucucuuuucauggcu

SEQ ID NO: 17052 - RNA, 22 nt, Homo sapiens
uuacccuuuaacccuuuaaagu

SEQ ID NO: 17053 - RNA, 22 nt, Homo sapiens
ggaaagaucagcuaaauguaag

SEQ ID NO: 17054 - RNA, 22 nt, Homo sapiens
guaugcacauauguguauguau

SEQ ID NO: 17055 - RNA, 22 nt, Homo sapiens
gacauagcuagauaaccucaug

SEQ ID NO: 17056 - RNA, 22 nt, Homo sapiens
aacaggguguuugcaguuucuu

SEQ ID NO: 17057 - RNA, 22 nt, Homo sapiens
guaagagcauguaguggcucua

SEQ ID NO: 17058 - RNA, 22 nt, Homo sapiens
guggguaaaucucuguucgagg

SEQ ID NO: 17059 - RNA, 22 nt, Homo sapiens
augucaaggugggugauaguuu

SEQ ID NO: 17060 - RNA, 23 nt, Homo sapiens
ucuggcuuugggaugcucaaggg

SEQ ID NO: 17061 - RNA, 22 nt, Homo sapiens
agucaguguguauugauggcac

SEQ ID NO: 17062 - RNA, 22 nt, Homo sapiens
cugaggugggaguuuuucucau

SEQ ID NO: 17063 - RNA, 18 nt, Homo sapiens
ucacauggccgagagaga

SEQ ID NO: 17064 - RNA, 22 nt, Homo sapiens
augaagucguuacuaccaauug

SEQ ID NO: 17065 - RNA, 22 nt, Homo sapiens
gugcacaacgugcagguuaguu

SEQ ID NO: 17066 - RNA, 22 nt, Homo sapiens
uaauacuguaauggugguuccg

SEQ ID NO: 17067 - RNA, 22 nt, Homo sapiens
ugauaacauuucuucugguaca

SEQ ID NO: 17068 - RNA, 20 nt, Homo sapiens
cuuuggcaaugagaacaggg

SEQ ID NO: 17069 - RNA, 19 nt, Homo sapiens
ccugcuguucuuuugcacc

SEQ ID NO: 17070 - RNA, 22 nt, Homo sapiens
uuaaguuguagcuacaaauaca

SEQ ID NO: 17071 - RNA, 22 nt, Homo sapiens
uucagcaguggccaguggaaau

SEQ ID NO: 17072 - RNA, 22 nt, Homo sapiens
cugaauagucaacgauggacug

SEQ ID NO: 17073 - RNA, 22 nt, Homo sapiens
uuccauguaguugagcaguuuu

SEQ ID NO: 17074 - RNA, 22 nt, Homo sapiens
cccugagaugugaauuucagag

SEQ ID NO: 17075 - RNA, 21 nt, Homo sapiens
auggugagaaaguagugucaa

SEQ ID NO: 17076 - RNA, 22 nt, Homo sapiens
ucugugcauuacacuuuucuca

SEQ ID NO: 17077 - RNA, 22 nt, Homo sapiens
gugggaugaucacaguucacug

SEQ ID NO: 17078 - RNA, 22 nt, Homo sapiens
uccaaaucucuggcacugggau

SEQ ID NO: 17079 - RNA, 22 nt, Homo sapiens
aacaguguuuuggguuuucugg

SEQ ID NO: 17080 - RNA, 22 nt, Homo sapiens
ggcaugguggugugugccuaua

SEQ ID NO: 17081 - RNA, 18 nt, Homo sapiens
cuggaaggcuacuacagu

SEQ ID NO: 17082 - RNA, 22 nt, Homo sapiens
acaugacauugggguggggaua

SEQ ID NO: 17083 - RNA, 22 nt, Homo sapiens
caccgagguuggagugcagugg

SEQ ID NO: 17084 - RNA, 22 nt, Homo sapiens
auccucugagaucuaggcagag

SEQ ID NO: 17085 - RNA, 22 nt, Homo sapiens
cuaagauugucuuaguguguug

SEQ ID NO: 17086 - RNA, 22 nt, Homo sapiens
gugugcauaugucuuuauagua

SEQ ID NO: 17087 - RNA, 22 nt, Homo sapiens
agugcagugguuaggagccagg

SEQ ID NO: 17088 - RNA, 21 nt, Homo sapiens
gucuuacagccagaugccucu

SEQ ID NO: 17089 - RNA, 22 nt, Homo sapiens
uauagcuaugggauguauuugc

SEQ ID NO: 17090 - RNA, 22 nt, Homo sapiens
agcuggcuguggagaaaccccu

SEQ ID NO: 17091 - RNA, 22 nt, Homo sapiens
uuguaugucuucauuugaaaaa

SEQ ID NO: 17092 - RNA, 21 nt, Homo sapiens
aggagcauucaugacgagguu

SEQ ID NO: 17093 - RNA, 22 nt, Homo sapiens
ugucaccuugcucauccucgga

SEQ ID NO: 17094 - RNA, 18 nt, Homo sapiens
aguuguuuuauccugccc

SEQ ID NO: 17095 - RNA, 22 nt, Homo sapiens
gucacaguggccagugauguuc

SEQ ID NO: 17096 - RNA, 22 nt, Homo sapiens
acuguguguuugucuagcacag

SEQ ID NO: 17097 - RNA, 22 nt, Homo sapiens
ugucaguggucuggaugcagcc

SEQ ID NO: 17098 - RNA, 20 nt, Homo sapiens
gucuuguagcucaaguuauu

SEQ ID NO: 17099 - RNA, 22 nt, Homo sapiens
auggcaaaaaaugcaauuacuu

SEQ ID NO: 17100 - RNA, 22 nt, Homo sapiens
uggggcuuuuucuuguauucuc

SEQ ID NO: 17101 - RNA, 21 nt, Homo sapiens
gcuuuuucggaagucuuuggc

SEQ ID NO: 17102 - RNA, 22 nt, Homo sapiens
acccugucauccacauggugcu

SEQ ID NO: 17103 - RNA, 22 nt, Homo sapiens
ucacacugaaacuaggguguga

SEQ ID NO: 17104 - RNA, 22 nt, Homo sapiens
ucauucauuugcucacuccaca

SEQ ID NO: 17105 - RNA, 22 nt, Homo sapiens
uccauguaguugagcggcuuug

SEQ ID NO: 17106 - RNA, 22 nt, Homo sapiens
aaucacuuuggcaccaaccuaa

SEQ ID NO: 17107 - RNA, 22 nt, Homo sapiens
aacuggcauaugaacuuguucu

SEQ ID NO: 17108 - RNA, 22 nt, Homo sapiens
agucacaugcauuuucuucaau

SEQ ID NO: 17109 - RNA, 22 nt, Homo sapiens
agcuuaugcuuggaagagauga

SEQ ID NO: 17110 - RNA, 22 nt, Homo sapiens
ucacagccuaguuuuauacauu

SEQ ID NO: 17111 - RNA, 22 nt, Homo sapiens
ugugguuuuucacauuuagaga

SEQ ID NO: 17112 - RNA, 22 nt, Homo sapiens
ugagcacagagccugggguggc

SEQ ID NO: 17113 - RNA, 20 nt, Homo sapiens
uuccuuaggcauuggaagaa

SEQ ID NO: 17114 - RNA, 21 nt, Homo sapiens
aaaugcacauuacugcuggug

SEQ ID NO: 17115 - RNA, 22 nt, Homo sapiens
uuuuaguggaauauuuacaguu

SEQ ID NO: 17116 - RNA, 22 nt, Homo sapiens
ucacauguguaaauugguguaa

SEQ ID NO: 17117 - RNA, 22 nt, Homo sapiens
ugauggcauuuggaguugggac

SEQ ID NO: 17118 - RNA, 22 nt, Homo sapiens
ggcaacaaagacauuucaacau

SEQ ID NO: 17119 - RNA, 22 nt, Homo sapiens
uucaagucaaggaaagaggucu

SEQ ID NO: 17120 - RNA, 22 nt, Homo sapiens
uccccgucacacgcaggcuuac

SEQ ID NO: 17121 - RNA, 22 nt, Homo sapiens
uuugcugagucauuccaugcug

SEQ ID NO: 17122 - RNA, 22 nt, Homo sapiens
uuacuguauagaaucaucuuga

SEQ ID NO: 17123 - RNA, 20 nt, Homo sapiens
gagauguugaucagggcuau

SEQ ID NO: 17124 - RNA, 18 nt, Homo sapiens
uuugugcuccacaaagga

SEQ ID NO: 17125 - RNA, 18 nt, Homo sapiens
uaaggcacuauaggcauu

SEQ ID NO: 17126 - RNA, 22 nt, Homo sapiens
ugagaugaucaaaguauaggcu

SEQ ID NO: 17127 - RNA, 22 nt, Homo sapiens
ucauuguccaacuucuuucagu

SEQ ID NO: 17128 - RNA, 23 nt, Homo sapiens
ucacacuuaagagaaaugcagcu

SEQ ID NO: 17129 - RNA, 23 nt, Homo sapiens
uuacaguggcaugaucucugcuc

SEQ ID NO: 17130 - RNA, 22 nt, Homo sapiens
cacugaaugugagguuggggag

SEQ ID NO: 17131 - RNA, 22 nt, Homo sapiens
aguaaacuucagaguucuuccu

SEQ ID NO: 17132 - RNA, 22 nt, Homo sapiens
guugcugagucccaucaccaga

SEQ ID NO: 17133 - RNA, 22 nt, Homo sapiens
uaugaaucugagagaucuggaa

SEQ ID NO: 17134 - RNA, 18 nt, Homo sapiens
ucccucagaauuauagaa

SEQ ID NO: 17135 - RNA, 22 nt, Homo sapiens
uuccaagugggaaacaaaaaug

SEQ ID NO: 17136 - RNA, 22 nt, Homo sapiens
ucaggcacucagcuuagagucu

SEQ ID NO: 17137 - RNA, 22 nt, Homo sapiens
agugcauuuguucugugucagg

SEQ ID NO: 17138 - RNA, 22 nt, Homo sapiens
cacugcauccuccauauccugg

SEQ ID NO: 17139 - RNA, 22 nt, Homo sapiens
gugcacaaaucuuaaauguaca

SEQ ID NO: 17140 - RNA, 22 nt, Homo sapiens
ucaugggagcccccaucaugag

SEQ ID NO: 17141 - RNA, 22 nt, Homo sapiens
uaagacuuuuugggaauauaga

SEQ ID NO: 17142 - RNA, 22 nt, Homo sapiens
uuguauguuuguucuuucagau

SEQ ID NO: 17143 - RNA, 22 nt, Homo sapiens
gcaucacagggagacaggccuc

SEQ ID NO: 17144 - RNA, 22 nt, Homo sapiens
uaaugcuaucugggccaggggu

SEQ ID NO: 17145 - RNA, 21 nt, Homo sapiens
cccagguucucugaggguaga

SEQ ID NO: 17146 - RNA, 22 nt, Homo sapiens
gcugguguagagugcagaaagg

SEQ ID NO: 17147 - RNA, 22 nt, Homo sapiens
ucuuuagugacaguugugcaag

SEQ ID NO: 17148 - RNA, 22 nt, Homo sapiens
gagaacuggcugauucaaggac

SEQ ID NO: 17149 - RNA, 22 nt, Homo sapiens
agcuucacaaugcagagggcag

SEQ ID NO: 17150 - RNA, 22 nt, Homo sapiens
ucacaugaauugucuuguucca

SEQ ID NO: 17151 - RNA, 22 nt, Homo sapiens
aagagcauuauuuaguaauuuc

SEQ ID NO: 17152 - RNA, 22 nt, Homo sapiens
ucaguguugauggcugcugacu

SEQ ID NO: 17153 - RNA, 22 nt, Homo sapiens
gcuguguguuaucagaaauugc

SEQ ID NO: 17154 - RNA, 22 nt, Homo sapiens
ucaaaugcucuuugcagagagg

SEQ ID NO: 17155 - RNA, 22 nt, Homo sapiens
agcucauugcuguccuggagga

SEQ ID NO: 17156 - RNA, 22 nt, Homo sapiens
ccaaguguucucauuguucaau

SEQ ID NO: 17157 - RNA, 22 nt, Homo sapiens
caaaugacaucauuucauucaa

SEQ ID NO: 17158 - RNA, 20 nt, Homo sapiens
agcuguuguuaaaaaggagg

SEQ ID NO: 17159 - RNA, 20 nt, Homo sapiens
uccugagauucccaguucuc

SEQ ID NO: 17160 - RNA, 22 nt, Homo sapiens
uugugaucauugucaaauagug

SEQ ID NO: 17161 - RNA, 22 nt, Homo sapiens
augaagaucucugccuuguguc

SEQ ID NO: 17162 - RNA, 22 nt, Homo sapiens
cuuuccauuguuggagcauaaa

SEQ ID NO: 17163 - RNA, 22 nt, Homo sapiens
uucccuuugugcauaggauuug

SEQ ID NO: 17164 - RNA, 21 nt, Homo sapiens
acugagagaucuggggcacau

SEQ ID NO: 17165 - RNA, 22 nt, Homo sapiens
cuacaguaugaaaccuuuacuc

SEQ ID NO: 17166 - RNA, 22 nt, Homo sapiens
cuccauguggcuaacuuuuaaa

SEQ ID NO: 17167 - RNA, 22 nt, Homo sapiens
ugugucacugaggguuagugua

SEQ ID NO: 17168 - RNA, 22 nt, Homo sapiens
aaagucuguuuugucagagacu

SEQ ID NO: 17169 - RNA, 22 nt, Homo sapiens
uuugugcaugaagagggggugc

SEQ ID NO: 17170 - RNA, 22 nt, Homo sapiens
auguccaugagcacauguauca

SEQ ID NO: 17171 - RNA, 22 nt, Homo sapiens
ugagugugacuuagcagaagga

SEQ ID NO: 17172 - RNA, 22 nt, Homo sapiens
auuggcaagauagcauaugagg

SEQ ID NO: 17173 - RNA, 22 nt, Homo sapiens
cuugccuaaucugcaugauuuu

SEQ ID NO: 17174 - RNA, 22 nt, Homo sapiens
uucccuuugaauuggaaaggug

SEQ ID NO: 17175 - RNA, 22 nt, Homo sapiens
ucagcagugugaaaacaaacua

SEQ ID NO: 17176 - RNA, 22 nt, Homo sapiens
guguguaaauggcagugagcuc

SEQ ID NO: 17177 - RNA, 22 nt, Homo sapiens
uccuuuggguagcuguucagau

SEQ ID NO: 17178 - RNA, 22 nt, Homo sapiens
ucugagguuaaauuuuauaguu

SEQ ID NO: 17179 - RNA, 22 nt, Homo sapiens
gaaguaguaaaauuuauugcag

SEQ ID NO: 17180 - RNA, 22 nt, Homo sapiens
cagcaucauucaucugggguaa

SEQ ID NO: 17181 - RNA, 22 nt, Homo sapiens
uggccuguaacgcugucucagc

SEQ ID NO: 17182 - RNA, 22 nt, Homo sapiens
uuagaacagugcucaccacaaa

SEQ ID NO: 17183 - RNA, 22 nt, Homo sapiens
ugcauuagucuguucucacacu

SEQ ID NO: 17184 - RNA, 22 nt, Homo sapiens
gcacaggguuacauucuaaggu

SEQ ID NO: 17185 - RNA, 22 nt, Homo sapiens
ugccaacaugccuggcuguuuu

SEQ ID NO: 17186 - RNA, 22 nt, Homo sapiens
cuugucacuguuggcuuuagaa

SEQ ID NO: 17187 - RNA, 19 nt, Homo sapiens
caccgccugcccccugcug

SEQ ID NO: 17188 - RNA, 22 nt, Homo sapiens
gagcacauguggagagucuggg

SEQ ID NO: 17189 - RNA, 22 nt, Homo sapiens
cagagaacugaguuauuuucuu

SEQ ID NO: 17190 - RNA, 22 nt, Homo sapiens
aaaugcaccacucuggugcagg

SEQ ID NO: 17191 - RNA, 22 nt, Homo sapiens
guggaucacuugaggucaagag

SEQ ID NO: 17192 - RNA, 20 nt, Homo sapiens
aacaguguguaaguuuccuu

SEQ ID NO: 17193 - RNA, 22 nt, Homo sapiens
auuacaugucuauccaugaaca

SEQ ID NO: 17194 - RNA, 22 nt, Homo sapiens
auggcuguuucugcaaugucua

SEQ ID NO: 17195 - RNA, 22 nt, Homo sapiens
uggcaaaauggaauauguuggg

SEQ ID NO: 17196 - RNA, 22 nt, Homo sapiens
cagggcaugugggucuauuggc

SEQ ID NO: 17197 - RNA, 22 nt, Homo sapiens
uaacaccuuugauagcacuuuu

SEQ ID NO: 17198 - RNA, 22 nt, Homo sapiens
auucccuuagcugccucagccu

SEQ ID NO: 17199 - RNA, 22 nt, Homo sapiens
uggcagcugcuucaugggaugc

SEQ ID NO: 17200 - RNA, 22 nt, Homo sapiens
gauguaggugcauuugcacgug

SEQ ID NO: 17201 - RNA, 22 nt, Homo sapiens
aagcuggagugcaguggugcga

SEQ ID NO: 17202 - RNA, 22 nt, Homo sapiens
ucacuuuguuuuuggauaaguu

SEQ ID NO: 17203 - RNA, 22 nt, Homo sapiens
ccacugcacuccagcccggcaa

SEQ ID NO: 17204 - RNA, 22 nt, Homo sapiens
uaggggcacacuucgguuagca

SEQ ID NO: 17205 - RNA, 22 nt, Homo sapiens
acugcacuccagccuucaggac

SEQ ID NO: 17206 - RNA, 22 nt, Homo sapiens
auagugcugcaauaaccauggg

SEQ ID NO: 17207 - RNA, 22 nt, Homo sapiens
cccugagaugcuguuaaucugu

SEQ ID NO: 17208 - RNA, 21 nt, Homo sapiens
gagaggauucgccagccucuu

SEQ ID NO: 17209 - RNA, 22 nt, Homo sapiens
ggucacccugaugcuggugguc

SEQ ID NO: 17210 - RNA, 17 nt, Homo sapiens
uuucagaguggaagugu

SEQ ID NO: 17211 - RNA, 22 nt, Homo sapiens
uggacugagauuucagcugcca

SEQ ID NO: 17212 - RNA, 22 nt, Homo sapiens
cugaggugauauauacauauuu

SEQ ID NO: 17213 - RNA, 22 nt, Homo sapiens
ugagaacugccuguauuuaucu

SEQ ID NO: 17214 - RNA, 22 nt, Homo sapiens
uuacaguagaugaggguauaau

SEQ ID NO: 17215 - RNA, 20 nt, Homo sapiens
acaaaugcauucugugacau

SEQ ID NO: 17216 - RNA, 22 nt, Homo sapiens
uuuggaagaugccacuguauca

SEQ ID NO: 17217 - RNA, 22 nt, Homo sapiens
uccacugagcuagaccacuugg

SEQ ID NO: 17218 - RNA, 22 nt, Homo sapiens
gugcacaaucgugcauuccuug

SEQ ID NO: 17219 - RNA, 22 nt, Homo sapiens
aguacugucugguuaccugaca

SEQ ID NO: 17220 - RNA, 22 nt, Homo sapiens
gaaagauuuccugagcuagaaa

SEQ ID NO: 17221 - RNA, 22 nt, Homo sapiens
ugagaguagggguugggauugg

SEQ ID NO: 17222 - RNA, 22 nt, Homo sapiens
gcagguguuaugcaaacaacug

SEQ ID NO: 17223 - RNA, 22 nt, Homo sapiens
gcagugcaugacgguauauaua

SEQ ID NO: 17224 - RNA, 22 nt, Homo sapiens
ugguccccaauacuucuauaga

SEQ ID NO: 17225 - RNA, 22 nt, Homo sapiens
cucaaguacaugggauuacagg

SEQ ID NO: 17226 - RNA, 22 nt, Homo sapiens
caccagcuggcauugaauaccu

SEQ ID NO: 17227 - RNA, 22 nt, Homo sapiens
ugagaugcaaaaugagaauugu

SEQ ID NO: 17228 - RNA, 22 nt, Homo sapiens
ucucccauccaugaacuucugu

SEQ ID NO: 17229 - RNA, 20 nt, Homo sapiens
gacuugagagugggagagua

SEQ ID NO: 17230 - RNA, 22 nt, Homo sapiens
uuacaugagacugucgcuaguu

SEQ ID NO: 17231 - RNA, 22 nt, Homo sapiens
gccuguagaagaguagaugacc

SEQ ID NO: 17232 - RNA, 22 nt, Homo sapiens
uggcagaugagccgcgcuccaa

SEQ ID NO: 17233 - RNA, 18 nt, Homo sapiens
ugagaucagcaucaaggg

SEQ ID NO: 17234 - RNA, 22 nt, Homo sapiens
uguaugucugcucuuuggaacu

SEQ ID NO: 17235 - RNA, 22 nt, Homo sapiens
ucagguauuuauagcaaugcaa

SEQ ID NO: 17236 - RNA, 22 nt, Homo sapiens
augguacuggguaaaagugggg

SEQ ID NO: 17237 - RNA, 22 nt, Homo sapiens
uugucucacuggaguuuaguaa

SEQ ID NO: 17238 - RNA, 22 nt, Homo sapiens
guggguaaaucucuguuugagg

SEQ ID NO: 17239 - RNA, 22 nt, Homo sapiens
aagccagugugacaggaaacuu

SEQ ID NO: 17240 - RNA, 22 nt, Homo sapiens
caauggcacuauuggaaaaggu

SEQ ID NO: 17241 - RNA, 22 nt, Homo sapiens
cucaguuuugccuuguuuaagg

SEQ ID NO: 17242 - RNA, 22 nt, Homo sapiens
cagccgggugagguggcuuguu

SEQ ID NO: 17243 - RNA, 23 nt, Homo sapiens
cagugguguuagagaaaucuuuu

SEQ ID NO: 17244 - RNA, 22 nt, Homo sapiens
agugaauuguucaacaggagga

SEQ ID NO: 17245 - RNA, 22 nt, Homo sapiens
uuuugcuuuuccucggucccac

SEQ ID NO: 17246 - RNA, 22 nt, Homo sapiens
cugaauagagcacacugauggg

SEQ ID NO: 17247 - RNA, 22 nt, Homo sapiens
uggcaacaucuggggacauguu

SEQ ID NO: 17248 - RNA, 22 nt, Homo sapiens
gucagggagggauagaugauua

SEQ ID NO: 17249 - RNA, 22 nt, Homo sapiens
gaaggugcuuggugaaugcauu

SEQ ID NO: 17250 - RNA, 22 nt, Homo sapiens
gcauugcacuuggcauagacug

SEQ ID NO: 17251 - RNA, 22 nt, Homo sapiens
acccugucagcuggccugggca

SEQ ID NO: 17252 - RNA, 20 nt, Homo sapiens
gaucaguuuggaguaagugc

SEQ ID NO: 17253 - RNA, 22 nt, Homo sapiens
cacacugucuucaauggguggu

SEQ ID NO: 17254 - RNA, 19 nt, Homo sapiens
caugccacugcacuugagu

SEQ ID NO: 17255 - RNA, 22 nt, Homo sapiens
gccuagagaguuaucaggcugu

SEQ ID NO: 17256 - RNA, 22 nt, Homo sapiens
cugaggguagaaggaucacuug

SEQ ID NO: 17257 - RNA, 22 nt, Homo sapiens
uguuuuggagguccucacuaga

SEQ ID NO: 17258 - RNA, 22 nt, Homo sapiens
augaauccauuccugccacaga

SEQ ID NO: 17259 - RNA, 22 nt, Homo sapiens
uucauacaguggcugcacucca

SEQ ID NO: 17260 - RNA, 22 nt, Homo sapiens
ugaagagucuaaaucugucuuc

SEQ ID NO: 17261 - RNA, 22 nt, Homo sapiens
ugaggaucucuaggaauuuauc

SEQ ID NO: 17262 - RNA, 22 nt, Homo sapiens
cacauugcaggaaaguucauua

SEQ ID NO: 17263 - RNA, 22 nt, Homo sapiens
aaugacuaagaugguacauuuu

SEQ ID NO: 17264 - RNA, 22 nt, Homo sapiens
auggaaggagaauggucuuuga

SEQ ID NO: 17265 - RNA, 22 nt, Homo sapiens
uugcucaccugagaagaauaga

SEQ ID NO: 17266 - RNA, 21 nt, Homo sapiens
ggugagaaaggagacauagac

SEQ ID NO: 17267 - RNA, 22 nt, Homo sapiens
guacaguuuucaguguucacug

SEQ ID NO: 17268 - RNA, 22 nt, Homo sapiens
gugucaguggggagugaucuuc

SEQ ID NO: 17269 - RNA, 22 nt, Homo sapiens
uggccaguugaagacaaugcuc

SEQ ID NO: 17270 - RNA, 22 nt, Homo sapiens
uccagguuuggcuuuauaacuu

SEQ ID NO: 17271 - RNA, 22 nt, Homo sapiens
aucgcaccauugcacuccagca

SEQ ID NO: 17272 - RNA, 22 nt, Homo sapiens
acacugucaugucucacaggca

SEQ ID NO: 17273 - RNA, 22 nt, Homo sapiens
gugguuuuuaaaguaccugugg

SEQ ID NO: 17274 - RNA, 22 nt, Homo sapiens
ugaugucuugcaggcacgagau

SEQ ID NO: 17275 - RNA, 22 nt, Homo sapiens
gugacacagcaagacuccgucu

SEQ ID NO: 17276 - RNA, 22 nt, Homo sapiens
gugacagaguaagacccuguau

SEQ ID NO: 17277 - RNA, 22 nt, Homo sapiens
aagcugccuugugaaggcauuc

SEQ ID NO: 17278 - RNA, 22 nt, Homo sapiens
ucuuuguguaggucaaucuggc

SEQ ID NO: 17279 - RNA, 22 nt, Homo sapiens
uugagauggagucucacugugu

SEQ ID NO: 17280 - RNA, 22 nt, Homo sapiens
gggaagaaggagugguuuacuc

SEQ ID NO: 17281 - RNA, 22 nt, Homo sapiens
uccugagacucacaggcucccc

SEQ ID NO: 17282 - RNA, 22 nt, Homo sapiens
uccauguagaagacaggggaga

SEQ ID NO: 17283 - RNA, 22 nt, Homo sapiens
aguaacauuucuaguagagagu

SEQ ID NO: 17284 - RNA, 22 nt, Homo sapiens
ugagcuauguucuucuuguuuu

SEQ ID NO: 17285 - RNA, 19 nt, Homo sapiens
ggucacagggguuacaagg

SEQ ID NO: 17286 - RNA, 22 nt, Homo sapiens
caccugagcgggaugcucgccu

SEQ ID NO: 17287 - RNA, 22 nt, Homo sapiens
uuuugcucuugguaaugaaaga

SEQ ID NO: 17288 - RNA, 22 nt, Homo sapiens
ggagcucaucuagcauagaggu

SEQ ID NO: 17289 - RNA, 22 nt, Homo sapiens
aguguuuuuaucaugaaagggu

SEQ ID NO: 17290 - RNA, 22 nt, Homo sapiens
cucugacagugguuagcacugu

SEQ ID NO: 17291 - RNA, 22 nt, Homo sapiens
gagaacuaaugguuugauaagg

SEQ ID NO: 17292 - RNA, 22 nt, Homo sapiens
guacaguucucuuuguugucag

SEQ ID NO: 17293 - RNA, 22 nt, Homo sapiens
gagugcuguuagcccuggguuu

SEQ ID NO: 17294 - RNA, 21 nt, Homo sapiens
ucaucaagcuguagacaugau

SEQ ID NO: 17295 - RNA, 22 nt, Homo sapiens
ugaaaguuauauugugaaauuc

SEQ ID NO: 17296 - RNA, 20 nt, Homo sapiens
ugguccccaccaaaucucau

SEQ ID NO: 17297 - RNA, 22 nt, Homo sapiens
uugagcaccaugccuggccaug

SEQ ID NO: 17298 - RNA, 22 nt, Homo sapiens
cuguagcuuuuauaugcuuagc

SEQ ID NO: 17299 - RNA, 22 nt, Homo sapiens
uuuaaugcaucccaaaauguag

SEQ ID NO: 17300 - RNA, 22 nt, Homo sapiens
uucagcaggccaggcccugacu

SEQ ID NO: 17301 - RNA, 22 nt, Homo sapiens
ucccuguguuccuuuugaauug

SEQ ID NO: 17302 - RNA, 22 nt, Homo sapiens
uggcauauaaagauguguucaa

SEQ ID NO: 17303 - RNA, 22 nt, Homo sapiens
cccugagaaaacuuuguccuua

SEQ ID NO: 17304 - RNA, 19 nt, Homo sapiens
agugagccaagauccuacc

SEQ ID NO: 17305 - RNA, 22 nt, Homo sapiens
auagugcuuuugaaucuuguug

SEQ ID NO: 17306 - RNA, 22 nt, Homo sapiens
augugcacaugcuuacauguga

SEQ ID NO: 17307 - RNA, 22 nt, Homo sapiens
acacugucugaugaaaguaguu

SEQ ID NO: 17308 - RNA, 23 nt, Homo sapiens
gcagcaaugucacagggguccgg

SEQ ID NO: 17309 - RNA, 22 nt, Homo sapiens
uagagcaugugccauacguaca

SEQ ID NO: 17310 - RNA, 22 nt, Homo sapiens
ucucagugaauugguuuugucu

SEQ ID NO: 17311 - RNA, 22 nt, Homo sapiens
ugcuagaagaucacacacauca

SEQ ID NO: 17312 - RNA, 22 nt, Homo sapiens
uuaacagugucaaucuguagua

SEQ ID NO: 17313 - RNA, 22 nt, Homo sapiens
uucucauggaacaucuguacug

SEQ ID NO: 17314 - RNA, 22 nt, Homo sapiens
augaggugggagaaucacuuga

SEQ ID NO: 17315 - RNA, 19 nt, Homo sapiens
cccuggcacauggaaaaug

SEQ ID NO: 17316 - RNA, 20 nt, Homo sapiens
guggaaguagaaacauaugu

SEQ ID NO: 17317 - RNA, 20 nt, Homo sapiens
ucaaggcacgaauaaaaguu

SEQ ID NO: 17318 - RNA, 22 nt, Homo sapiens
cugagauaauuucuagguguca

SEQ ID NO: 17319 - RNA, 22 nt, Homo sapiens
uggagugcaauggcaccaucuu

SEQ ID NO: 17320 - RNA, 22 nt, Homo sapiens
uuccauguaguugaacgguuuu

SEQ ID NO: 17321 - RNA, 22 nt, Homo sapiens
cacugcacucuucuucugggca

SEQ ID NO: 17322 - RNA, 22 nt, Homo sapiens
ucacagaugcuugacccauuuc

SEQ ID NO: 17323 - RNA, 22 nt, Homo sapiens
ucacaggguguuauuagaauua

SEQ ID NO: 17324 - RNA, 22 nt, Homo sapiens
cacugcgaccuccaccucccgg

SEQ ID NO: 17325 - RNA, 23 nt, Homo sapiens
uggguucauucuugaagucagug

SEQ ID NO: 17326 - RNA, 22 nt, Homo sapiens
aacugggcaagcauuacauggu

SEQ ID NO: 17327 - RNA, 19 nt, Homo sapiens
uuguguccccacaaaauuc

SEQ ID NO: 17328 - RNA, 22 nt, Homo sapiens
ugacuaaaacugaguuucauua

SEQ ID NO: 17329 - RNA, 22 nt, Homo sapiens
uucaaauguucuuucaccaccc

SEQ ID NO: 17330 - RNA, 22 nt, Homo sapiens
agccuucauucugacaguagga

SEQ ID NO: 17331 - RNA, 22 nt, Homo sapiens
acaaagcgcuucucuuuagagu

SEQ ID NO: 17332 - RNA, 19 nt, Homo sapiens
agugggcuagaaaucaggg

SEQ ID NO: 17333 - RNA, 19 nt, Homo sapiens
uuccuagugguugggaagu

SEQ ID NO: 17334 - RNA, 22 nt, Homo sapiens
uuugauguugagacuauaaagc

SEQ ID NO: 17335 - RNA, 22 nt, Homo sapiens
uuugugcuccucucaguaugug

SEQ ID NO: 17336 - RNA, 22 nt, Homo sapiens
gugguuuucaacuccaccugca

SEQ ID NO: 17337 - RNA, 20 nt, Homo sapiens
acacuggaguaucaaggccc

SEQ ID NO: 17338 - RNA, 19 nt, Homo sapiens
agcaucauuauuguuuugg

SEQ ID NO: 17339 - RNA, 22 nt, Homo sapiens
guacagugcucacaaugagagc

SEQ ID NO: 17340 - RNA, 22 nt, Homo sapiens
ugggaucauuaugcauagugua

SEQ ID NO: 17341 - RNA, 22 nt, Homo sapiens
aucagcaugcagaagucggggg

SEQ ID NO: 17342 - RNA, 22 nt, Homo sapiens
aaagcuacaggaccugcucauu

SEQ ID NO: 17343 - RNA, 23 nt, Homo sapiens
agagugcaauggugccaucucgg

SEQ ID NO: 17344 - RNA, 18 nt, Homo sapiens
gugucugguuaugggagu

SEQ ID NO: 17345 - RNA, 22 nt, Homo sapiens
augaaaacaugauuugccuguu

SEQ ID NO: 17346 - RNA, 22 nt, Homo sapiens
auggccugaugcaccuguccca

SEQ ID NO: 17347 - RNA, 22 nt, Homo sapiens
cauguaacaucccgcuguagga

SEQ ID NO: 17348 - RNA, 22 nt, Homo sapiens
uggucagaugcugaguggaucu

SEQ ID NO: 17349 - RNA, 22 nt, Homo sapiens
ccucauggagaaccucugcuag

SEQ ID NO: 17350 - RNA, 22 nt, Homo sapiens
uuaaaccugucuucucacuaau

SEQ ID NO: 17351 - RNA, 22 nt, Homo sapiens
cauggguuuucucaaguaguca

SEQ ID NO: 17352 - RNA, 22 nt, Homo sapiens
uggaaaacaugcacauuggauu

SEQ ID NO: 17353 - RNA, 22 nt, Homo sapiens
ugagaacuuauggugauuuuuu

SEQ ID NO: 17354 - RNA, 22 nt, Homo sapiens
uauaguguuuucaaaaguaugu

SEQ ID NO: 17355 - RNA, 22 nt, Homo sapiens
auggcagcugguuuuacccuag

SEQ ID NO: 17356 - RNA, 22 nt, Homo sapiens
uacacaugugaguucuuuucua

SEQ ID NO: 17357 - RNA, 22 nt, Homo sapiens
aggcagcuguuauauacugagu

SEQ ID NO: 17358 - RNA, 18 nt, Homo sapiens
ucagucacugccuggcuu

SEQ ID NO: 17359 - RNA, 22 nt, Homo sapiens
cuggcagucugccucuucacug

SEQ ID NO: 17360 - RNA, 22 nt, Homo sapiens
cuagguuauacucugaaauggu

SEQ ID NO: 17361 - RNA, 22 nt, Homo sapiens
augugcacaacgugcagguuug

SEQ ID NO: 17362 - RNA, 22 nt, Homo sapiens
aaaugcacaaagauuuugcacu

SEQ ID NO: 17363 - RNA, 22 nt, Homo sapiens
gagguagugagcagcugaacua

SEQ ID NO: 17364 - RNA, 22 nt, Homo sapiens
gagauucaucuagguccagaga

SEQ ID NO: 17365 - RNA, 22 nt, Homo sapiens
ucucuagagagccugguguuca

SEQ ID NO: 17366 - RNA, 22 nt, Homo sapiens
aguaccauuugacaugggaccc

SEQ ID NO: 17367 - RNA, 22 nt, Homo sapiens
cuuuggccauagcuaaaugauu

SEQ ID NO: 17368 - RNA, 20 nt, Homo sapiens
uuuugaacuuggcaaccugu

SEQ ID NO: 17369 - RNA, 22 nt, Homo sapiens
uuuagcaaugcuguggggaagu

SEQ ID NO: 17370 - RNA, 22 nt, Homo sapiens
cacugcacuccagccuaagagg

SEQ ID NO: 17371 - RNA, 21 nt, Homo sapiens
uuauaguggcaugauuuauaa

SEQ ID NO: 17372 - RNA, 20 nt, Homo sapiens
uaaggcacugugcuuuuagg

SEQ ID NO: 17373 - RNA, 22 nt, Homo sapiens
uugcauaagugcauucugugau

SEQ ID NO: 17374 - RNA, 20 nt, Homo sapiens
uuuggcacugagugguauaa

SEQ ID NO: 17375 - RNA, 22 nt, Homo sapiens
ggagaugauuaugaaucacuua

SEQ ID NO: 17376 - RNA, 22 nt, Homo sapiens
auugcacaucugcacuacagcc

SEQ ID NO: 17377 - RNA, 22 nt, Homo sapiens
augaccuuguccucagugucau

SEQ ID NO: 17378 - RNA, 22 nt, Homo sapiens
cugugguguaacucuuggggcg

SEQ ID NO: 17379 - RNA, 22 nt, Homo sapiens
gugagggaugugaaaaagguca

SEQ ID NO: 17380 - RNA, 22 nt, Homo sapiens
aguuggccccuacugggaggug

SEQ ID NO: 17381 - RNA, 22 nt, Homo sapiens
uaacaguguauuccuuuggaca

SEQ ID NO: 17382 - RNA, 22 nt, Homo sapiens
augucuguuugcugagcccggc

SEQ ID NO: 17383 - RNA, 22 nt, Homo sapiens
ggagguagguuugugauuugua

SEQ ID NO: 17384 - RNA, 22 nt, Homo sapiens
cucacugugguguccuuaggua

SEQ ID NO: 17385 - RNA, 22 nt, Homo sapiens
uccuucaguccaguggguuuug

SEQ ID NO: 17386 - RNA, 22 nt, Homo sapiens
uugugcuuaaugaguguaaggu

SEQ ID NO: 17387 - RNA, 22 nt, Homo sapiens
gugcccacugucuguccuguag

SEQ ID NO: 17388 - RNA, 21 nt, Homo sapiens
uugguccacaugucauaguua

SEQ ID NO: 17389 - RNA, 22 nt, Homo sapiens
uggcagauaggauacaggacua

SEQ ID NO: 17390 - RNA, 22 nt, Homo sapiens
gagcucauuaaaaauguagaau

SEQ ID NO: 17391 - RNA, 22 nt, Homo sapiens
gcaggcaugacauuucacucuu

SEQ ID NO: 17392 - RNA, 19 nt, Homo sapiens
ucacacuguggcuucuuua

SEQ ID NO: 17393 - RNA, 22 nt, Homo sapiens
uuucgugucuggucugugaugg

SEQ ID NO: 17394 - RNA, 23 nt, Homo sapiens
cagcuucauugaacauaacuccu

SEQ ID NO: 17395 - RNA, 22 nt, Homo sapiens
cuccagugcaaagucaugauca

SEQ ID NO: 17396 - RNA, 22 nt, Homo sapiens
uggugcccuguccuucuguggc

SEQ ID NO: 17397 - RNA, 22 nt, Homo sapiens
uugagcaaugucacugaggcuu

SEQ ID NO: 17398 - RNA, 22 nt, Homo sapiens
caaagugcuggccgggcgcagu

SEQ ID NO: 17399 - RNA, 22 nt, Homo sapiens
ugucagcacaacucagguuccu

SEQ ID NO: 17400 - RNA, 22 nt, Homo sapiens
gggaugaagcccuaggguuggu

SEQ ID NO: 17401 - RNA, 22 nt, Homo sapiens
gucaagauuuguaggacagaga

SEQ ID NO: 17402 - RNA, 22 nt, Homo sapiens
gugguuuuuagauuucuacagu

SEQ ID NO: 17403 - RNA, 22 nt, Homo sapiens
aagagcauuggauggggagauu

SEQ ID NO: 17404 - RNA, 22 nt, Homo sapiens
uugcagagaaauuucugguuua

SEQ ID NO: 17405 - RNA, 20 nt, Homo sapiens
acacuggcuuugagauuuag

SEQ ID NO: 17406 - RNA, 22 nt, Homo sapiens
agcucauugcaaccuccgccuc

SEQ ID NO: 17407 - RNA, 21 nt, Homo sapiens
uccugagagaggaguaacucu

SEQ ID NO: 17408 - RNA, 22 nt, Homo sapiens
uaagucuuuuuggaguuuauaa

SEQ ID NO: 17409 - RNA, 22 nt, Homo sapiens
ucucaaccuccacacuacaaua

SEQ ID NO: 17410 - RNA, 22 nt, Homo sapiens
augaagcuagcugauugcugau

SEQ ID NO: 17411 - RNA, 22 nt, Homo sapiens
aucugcaaauaaugaagauugg

SEQ ID NO: 17412 - RNA, 22 nt, Homo sapiens
agagugcaauggcaccaucucg

SEQ ID NO: 17413 - RNA, 22 nt, Homo sapiens
uaccuuugucaguuacucaccu

SEQ ID NO: 17414 - RNA, 22 nt, Homo sapiens
uugaaaucuuccacagcccaag

SEQ ID NO: 17415 - RNA, 19 nt, Homo sapiens
uacuggcucgggaauuuuc

SEQ ID NO: 17416 - RNA, 22 nt, Homo sapiens
acauggcacugcgggcuucuug

SEQ ID NO: 17417 - RNA, 22 nt, Homo sapiens
aagcaggugucugugucuguaa

SEQ ID NO: 17418 - RNA, 22 nt, Homo sapiens
uucacacugggccuacucugug

SEQ ID NO: 17419 - RNA, 22 nt, Homo sapiens
ugucauguaaagaguaaauggu

SEQ ID NO: 17420 - RNA, 23 nt, Homo sapiens
gugcaguggcgagauuucggcuc

SEQ ID NO: 17421 - RNA, 22 nt, Homo sapiens
uugcacauuuuuucuggcagaa

SEQ ID NO: 17422 - RNA, 22 nt, Homo sapiens
ccucauggagaacuucugcuag

SEQ ID NO: 17423 - RNA, 22 nt, Homo sapiens
aucugguguauuggugcugggu

SEQ ID NO: 17424 - RNA, 22 nt, Homo sapiens
uaacccagugucugugaugggu

SEQ ID NO: 17425 - RNA, 22 nt, Homo sapiens
ucacauaguuuucgggaccuug

SEQ ID NO: 17426 - RNA, 22 nt, Homo sapiens
auuggauagucuuuaucuguug

SEQ ID NO: 17427 - RNA, 22 nt, Homo sapiens
ucaccuggggcacagcugaaga

SEQ ID NO: 17428 - RNA, 22 nt, Homo sapiens
gauuccauuuguggcuauuuac

SEQ ID NO: 17429 - RNA, 22 nt, Homo sapiens
uuaaggcagugcaucuggaguu

SEQ ID NO: 17430 - RNA, 22 nt, Homo sapiens
auuuuugguugucagcacuagg

SEQ ID NO: 17431 - RNA, 22 nt, Homo sapiens
aagucaaggagagaagcuucag

SEQ ID NO: 17432 - RNA, 22 nt, Homo sapiens
uuuauagucaggaacuugagga

SEQ ID NO: 17433 - RNA, 22 nt, Homo sapiens
uagcagcuuuauugagguaaau

SEQ ID NO: 17434 - RNA, 22 nt, Homo sapiens
ugccuggagagcuccuacauau

SEQ ID NO: 17435 - RNA, 22 nt, Homo sapiens
uggagcccuaaacuucuaauau

SEQ ID NO: 17436 - RNA, 22 nt, Homo sapiens
uggacuguaauuuuauaggcau

SEQ ID NO: 17437 - RNA, 22 nt, Homo sapiens
auucuugcuugaacuuggugca

SEQ ID NO: 17438 - RNA, 22 nt, Homo sapiens
gugacaguggagacuuacuuca

SEQ ID NO: 17439 - RNA, 22 nt, Homo sapiens
gugugacugcucuauuagggcg

SEQ ID NO: 17440 - RNA, 22 nt, Homo sapiens
uagaagcuacucuucuuguggc

SEQ ID NO: 17441 - RNA, 22 nt, Homo sapiens
ggggcauugugucuggguuccu

SEQ ID NO: 17442 - RNA, 22 nt, Homo sapiens
uggaaauaaaauagaguuugcc

SEQ ID NO: 17443 - RNA, 22 nt, Homo sapiens
caccuagacuggagugcagugg

SEQ ID NO: 17444 - RNA, 22 nt, Homo sapiens
auaagucaauggaacagauuaa

SEQ ID NO: 17445 - RNA, 22 nt, Homo sapiens
gugagcauauuaguauugcacu

SEQ ID NO: 17446 - RNA, 22 nt, Homo sapiens
cucauggagauagagaauagaa

SEQ ID NO: 17447 - RNA, 22 nt, Homo sapiens
augugugcuugugacacagccu

SEQ ID NO: 17448 - RNA, 22 nt, Homo sapiens
cacaguguuccagcuauuugaa

SEQ ID NO: 17449 - RNA, 22 nt, Homo sapiens
caaaggugcuuuccagguccaa

SEQ ID NO: 17450 - RNA, 22 nt, Homo sapiens
aaaugcagcacucaagugggaa

SEQ ID NO: 17451 - RNA, 21 nt, Homo sapiens
ucaacccuugcgucaccaagc

SEQ ID NO: 17452 - RNA, 22 nt, Homo sapiens
guccauuuguuuccagagcacu

SEQ ID NO: 17453 - RNA, 22 nt, Homo sapiens
aagcucuuguugaaucuuguca

SEQ ID NO: 17454 - RNA, 23 nt, Homo sapiens
ucuuuggcucuaauauaccuugu

SEQ ID NO: 17455 - RNA, 22 nt, Homo sapiens
aauacuggcacugaagaccaug

SEQ ID NO: 17456 - RNA, 22 nt, Homo sapiens
uuggcuguguuccucaaggagu

SEQ ID NO: 17457 - RNA, 22 nt, Homo sapiens
agcagguguccacaauguuugc

SEQ ID NO: 17458 - RNA, 21 nt, Homo sapiens
gugaucaugucacugcacucc

SEQ ID NO: 17459 - RNA, 22 nt, Homo sapiens
uuggcagcuguggaaucugggc

SEQ ID NO: 17460 - RNA, 20 nt, Homo sapiens
aagugcaucguugugucugc

SEQ ID NO: 17461 - RNA, 22 nt, Homo sapiens
uucuggccccucccaaucucau

SEQ ID NO: 17462 - RNA, 22 nt, Homo sapiens
auuucuacuccuguguccagaa

SEQ ID NO: 17463 - RNA, 22 nt, Homo sapiens
guagcagaauaucagauaauuu

SEQ ID NO: 17464 - RNA, 22 nt, Homo sapiens
uuugugcuaaugcuagauuacu

SEQ ID NO: 17465 - RNA, 22 nt, Homo sapiens
auauucaagugaggauggcuaa

SEQ ID NO: 17466 - RNA, 22 nt, Homo sapiens
ggaaaguaacccauucucuuac

SEQ ID NO: 17467 - RNA, 22 nt, Homo sapiens
cugucacugggaggggcagcag

SEQ ID NO: 17468 - RNA, 22 nt, Homo sapiens
uaaugcacuuuccuccaaggcu

SEQ ID NO: 17469 - RNA, 22 nt, Homo sapiens
uuaaggcagugucuaugccagu

SEQ ID NO: 17470 - RNA, 22 nt, Homo sapiens
auagaucuauuuauguaucccu

SEQ ID NO: 17471 - RNA, 20 nt, Homo sapiens
agagugcugucuguccugag

SEQ ID NO: 17472 - RNA, 22 nt, Homo sapiens
ucaaaugcacguagagaaaaua

SEQ ID NO: 17473 - RNA, 22 nt, Homo sapiens
caugucuuuuauucugugugau

SEQ ID NO: 17474 - RNA, 20 nt, Homo sapiens
uucagcaaaggaaugggagu

SEQ ID NO: 17475 - RNA, 20 nt, Homo sapiens
cucacagacagcuucuuucu

SEQ ID NO: 17476 - RNA, 22 nt, Homo sapiens
uaucauaguuuggacuuucauu

SEQ ID NO: 17477 - RNA, 22 nt, Homo sapiens
ggccuguaaacuagagacccug

SEQ ID NO: 17478 - RNA, 22 nt, Homo sapiens
ugugcaguuuuagcguauuuua

SEQ ID NO: 17479 - RNA, 22 nt, Homo sapiens
agaugguguuuucucaccagau

SEQ ID NO: 17480 - RNA, 22 nt, Homo sapiens
uaauugcaguucuguguuauau

SEQ ID NO: 17481 - RNA, 22 nt, Homo sapiens
gugguuuuaucccagaaauuaa

SEQ ID NO: 17482 - RNA, 22 nt, Homo sapiens
uuauguaaaucaaucuggaauc

SEQ ID NO: 17483 - RNA, 22 nt, Homo sapiens
cagugguuuuuagcuugcuggg

SEQ ID NO: 17484 - RNA, 22 nt, Homo sapiens
acucugucuaguuguaaaauuu

SEQ ID NO: 17485 - RNA, 22 nt, Homo sapiens
uggacuguaaauuggggacucu

SEQ ID NO: 17486 - RNA, 22 nt, Homo sapiens
ugcuggugucaucaaggcuuug

SEQ ID NO: 17487 - RNA, 22 nt, Homo sapiens
ugcauggauguuugaacacacu

SEQ ID NO: 17488 - RNA, 22 nt, Homo sapiens
cacuggucucauggcaugagag

SEQ ID NO: 17489 - RNA, 22 nt, Homo sapiens
ccaagccucaguuucccucugu

SEQ ID NO: 17490 - RNA, 22 nt, Homo sapiens
aaagaagucagccuguccuuug

SEQ ID NO: 17491 - RNA, 22 nt, Homo sapiens
acugcacuccaccuugggcaac

SEQ ID NO: 17492 - RNA, 22 nt, Homo sapiens
uuugguuuuuguuaucacucau

SEQ ID NO: 17493 - RNA, 22 nt, Homo sapiens
auagcagcaccucacucuacug

SEQ ID NO: 17494 - RNA, 22 nt, Homo sapiens
gugauaucacuguaucacucca

SEQ ID NO: 17495 - RNA, 21 nt, Homo sapiens
acccccacaccuccuuaguuc

SEQ ID NO: 17496 - RNA, 22 nt, Homo sapiens
caugucacuuccucucugaugg

SEQ ID NO: 17497 - RNA, 22 nt, Homo sapiens
uccccugagaacuugcuagaaa

SEQ ID NO: 17498 - RNA, 21 nt, Homo sapiens
ugcccaguggcuuggggucag

SEQ ID NO: 17499 - RNA, 22 nt, Homo sapiens
ccuuggcaauggcuggggcuga

SEQ ID NO: 17500 - RNA, 22 nt, Homo sapiens
augguuuuacugcaaaauggga

SEQ ID NO: 17501 - RNA, 22 nt, Homo sapiens
ugagucauuuccuuaugcuacu

SEQ ID NO: 17502 - RNA, 22 nt, Homo sapiens
uuuuaguggacaaagguauuua

SEQ ID NO: 17503 - RNA, 22 nt, Homo sapiens
uggcaguuucacauggcucaac

SEQ ID NO: 17504 - RNA, 21 nt, Homo sapiens
uugugccaaacccuggaggga

SEQ ID NO: 17505 - RNA, 22 nt, Homo sapiens
cagauacuggaguccugaaguu

SEQ ID NO: 17506 - RNA, 22 nt, Homo sapiens
ucagugcuuuuuguugucauca

SEQ ID NO: 17507 - RNA, 22 nt, Homo sapiens
aagcucauugagaucuauggcu

SEQ ID NO: 17508 - RNA, 22 nt, Homo sapiens
uugagauaggaacucacuaugc

SEQ ID NO: 17509 - RNA, 22 nt, Homo sapiens
uuggaaggcuccuaaugaaugg

SEQ ID NO: 17510 - RNA, 21 nt, Homo sapiens
gucugguguuuuaaugaggac

SEQ ID NO: 17511 - RNA, 22 nt, Homo sapiens
ucaaaugcuguauuguaguaau

SEQ ID NO: 17512 - RNA, 22 nt, Homo sapiens
gagauuaauacacaucaaaugc

SEQ ID NO: 17513 - RNA, 22 nt, Homo sapiens
auugcuuaagucccuguauuag

SEQ ID NO: 17514 - RNA, 19 nt, Homo sapiens
ugugagcauuagcauuuag

SEQ ID NO: 17515 - RNA, 22 nt, Homo sapiens
uugaguauuggacugguaucuu

SEQ ID NO: 17516 - RNA, 22 nt, Homo sapiens
cuggaaggaaaaacaaccacag

SEQ ID NO: 17517 - RNA, 20 nt, Homo sapiens
agcaucauugcaauuuguca

SEQ ID NO: 17518 - RNA, 22 nt, Homo sapiens
gggugguuuuauuaucagugac

SEQ ID NO: 17519 - RNA, 19 nt, Homo sapiens
gugagcacagacaauacaa

SEQ ID NO: 17520 - RNA, 22 nt, Homo sapiens
auucaccauggaccaggggccu

SEQ ID NO: 17521 - RNA, 22 nt, Homo sapiens
cucaccuugugauccacccacc

SEQ ID NO: 17522 - RNA, 22 nt, Homo sapiens
ucugucacugaaucccugucac

SEQ ID NO: 17523 - RNA, 22 nt, Homo sapiens
caauggcaaugaaauagugaga

SEQ ID NO: 17524 - RNA, 22 nt, Homo sapiens
cacacugucuuucagaaugguu

SEQ ID NO: 17525 - RNA, 21 nt, Homo sapiens
ccucuuugagggaagaaaggg

SEQ ID NO: 17526 - RNA, 22 nt, Homo sapiens
ucacauagcauaaugucugcaa

SEQ ID NO: 17527 - RNA, 22 nt, Homo sapiens
uguuauugagguuacuuauaag

SEQ ID NO: 17528 - RNA, 18 nt, Homo sapiens
ugugacauugagcauguc

SEQ ID NO: 17529 - RNA, 22 nt, Homo sapiens
gagacugagucucgcucugccg

SEQ ID NO: 17530 - RNA, 22 nt, Homo sapiens
gagcaucaguggccucaucuca

SEQ ID NO: 17531 - RNA, 22 nt, Homo sapiens
aagugagaugcaguggaguucc

SEQ ID NO: 17532 - RNA, 22 nt, Homo sapiens
ugucuggaaggguggccuccug

SEQ ID NO: 17533 - RNA, 22 nt, Homo sapiens
ugcauguucuuacucauacaug

SEQ ID NO: 17534 - RNA, 22 nt, Homo sapiens
guauggaagucaguuuguuggc

SEQ ID NO: 17535 - RNA, 22 nt, Homo sapiens
uggcuuuuauuauguugaggua

SEQ ID NO: 17536 - RNA, 20 nt, Homo sapiens
uuucuccccuauaaaucuca

SEQ ID NO: 17537 - RNA, 22 nt, Homo sapiens
cugugcacaucuggcggcccga

SEQ ID NO: 17538 - RNA, 22 nt, Homo sapiens
gggagcaaaaaugaugcccaag

SEQ ID NO: 17539 - RNA, 22 nt, Homo sapiens
agcagcuuugaucugaaugauu

SEQ ID NO: 17540 - RNA, 22 nt, Homo sapiens
gcccugagauucuuggauucug

SEQ ID NO: 17541 - RNA, 22 nt, Homo sapiens
aggcauguggcucuguucugac

SEQ ID NO: 17542 - RNA, 21 nt, Homo sapiens
auagcacuucacuugguuaga

SEQ ID NO: 17543 - RNA, 22 nt, Homo sapiens
uugcagagccccacacugggcu

SEQ ID NO: 17544 - RNA, 22 nt, Homo sapiens
uuuuggcuuuuccucagcaagc

SEQ ID NO: 17545 - RNA, 22 nt, Homo sapiens
aucacagaacuuugagcagaga

SEQ ID NO: 17546 - RNA, 22 nt, Homo sapiens
gugagucaugucccaucugauu

SEQ ID NO: 17547 - RNA, 22 nt, Homo sapiens
agauauguuauugauguuaaug

SEQ ID NO: 17548 - RNA, 17 nt, Homo sapiens
augugaauguucaaaua

SEQ ID NO: 17549 - RNA, 22 nt, Homo sapiens
uccuacaugcaguacauucaaa

SEQ ID NO: 17550 - RNA, 22 nt, Homo sapiens
aucaaaguuucccagaaguugu

SEQ ID NO: 17551 - RNA, 21 nt, Homo sapiens
uagagcuuggcacagaguaga

SEQ ID NO: 17552 - RNA, 22 nt, Homo sapiens
agugccacugcacucuagccug

SEQ ID NO: 17553 - RNA, 22 nt, Homo sapiens
aauacugugauaucgagcgauu

SEQ ID NO: 17554 - RNA, 22 nt, Homo sapiens
cugagaucguggggcugcuguc

SEQ ID NO: 17555 - RNA, 22 nt, Homo sapiens
ugcuaugucagccaggcugguc

SEQ ID NO: 17556 - RNA, 19 nt, Homo sapiens
uacaggacugagcugaggu

SEQ ID NO: 17557 - RNA, 22 nt, Homo sapiens
gggaugaauuagguauguuuau

SEQ ID NO: 17558 - RNA, 22 nt, Homo sapiens
ugagauagggucucacucuguc

SEQ ID NO: 17559 - RNA, 22 nt, Homo sapiens
acccuggaguaguaggaaucug

SEQ ID NO: 17560 - RNA, 22 nt, Homo sapiens
ugggaugaauacaaugggauca

SEQ ID NO: 17561 - RNA, 22 nt, Homo sapiens
uuggcauagaggcucucaagcu

SEQ ID NO: 17562 - RNA, 22 nt, Homo sapiens
ucccuugguaauucuguuccuu

SEQ ID NO: 17563 - RNA, 22 nt, Homo sapiens
ugugguuuuaguaaaacuaugu

SEQ ID NO: 17564 - RNA, 22 nt, Homo sapiens
acacuggaggagagcuguugcu

SEQ ID NO: 17565 - RNA, 23 nt, Homo sapiens
uuggccuccuugugucuagggcu

SEQ ID NO: 17566 - RNA, 22 nt, Homo sapiens
ugagaggugaauggcaggcuca

SEQ ID NO: 17567 - RNA, 22 nt, Homo sapiens
guacaguauaguaauaggauuu

SEQ ID NO: 17568 - RNA, 22 nt, Homo sapiens
uggacuguaauagagaacagaa

SEQ ID NO: 17569 - RNA, 22 nt, Homo sapiens
uuauaacagagacuccugugcu

SEQ ID NO: 17570 - RNA, 18 nt, Homo sapiens
cucacacccuaaucagga

SEQ ID NO: 17571 - RNA, 22 nt, Homo sapiens
gagggcacugcuuuccuuucaa

SEQ ID NO: 17572 - RNA, 22 nt, Homo sapiens
agcagugucauuuucuggugag

SEQ ID NO: 17573 - RNA, 22 nt, Homo sapiens
accagucucagguaugucuuua

SEQ ID NO: 17574 - RNA, 22 nt, Homo sapiens
uguauguuguaagacuuagacc

SEQ ID NO: 17575 - RNA, 22 nt, Homo sapiens
acucauugcucauaccuuaucu

SEQ ID NO: 17576 - RNA, 22 nt, Homo sapiens
uuguauguaaccauuuggcaaa

SEQ ID NO: 17577 - RNA, 22 nt, Homo sapiens
uguauguagugaccagggccag

SEQ ID NO: 17578 - RNA, 22 nt, Homo sapiens
ucucauggagguagagaguaaa

SEQ ID NO: 17579 - RNA, 20 nt, Homo sapiens
cccuaagccagaugcugggg

SEQ ID NO: 17580 - RNA, 22 nt, Homo sapiens
ccuggaagaaaggugcuaaaua

SEQ ID NO: 17581 - RNA, 22 nt, Homo sapiens
augugcacauucugguaaauau

SEQ ID NO: 17582 - RNA, 22 nt, Homo sapiens
uguggcuuuacagcaugguuca

SEQ ID NO: 17583 - RNA, 22 nt, Homo sapiens
uagcaaaucaauggaauugaag

SEQ ID NO: 17584 - RNA, 22 nt, Homo sapiens
ugauuuccaugagaacaugccu

SEQ ID NO: 17585 - RNA, 22 nt, Homo sapiens
agcagcuuugcauggccuguga

SEQ ID NO: 17586 - RNA, 22 nt, Homo sapiens
agagcuguguuuuaacuuuuua

SEQ ID NO: 17587 - RNA, 22 nt, Homo sapiens
cucucugagccauggcugcccu

SEQ ID NO: 17588 - RNA, 22 nt, Homo sapiens
caucaaaguggagggaaggacc

SEQ ID NO: 17589 - RNA, 22 nt, Homo sapiens
uuggaagauuacuuaguuuucu

SEQ ID NO: 17590 - RNA, 22 nt, Homo sapiens
ugcaagaaucagccuaucauua

SEQ ID NO: 17591 - RNA, 22 nt, Homo sapiens
gcuguauuguugaaggaaaugu

SEQ ID NO: 17592 - RNA, 22 nt, Homo sapiens
aagcuggauuucgcauccuguu

SEQ ID NO: 17593 - RNA, 23 nt, Homo sapiens
uaugacagaggaagggggagcug

SEQ ID NO: 17594 - RNA, 17 nt, Homo sapiens
ugacagaaacuuguugu

SEQ ID NO: 17595 - RNA, 22 nt, Homo sapiens
cuacaguguauuuauggagggu

SEQ ID NO: 17596 - RNA, 22 nt, Homo sapiens
gugucacagcuuccaucucggu

SEQ ID NO: 17597 - RNA, 22 nt, Homo sapiens
uguauguaauugaaguuaaguu

SEQ ID NO: 17598 - RNA, 22 nt, Homo sapiens
cucauggauggucuggcagcca

SEQ ID NO: 17599 - RNA, 22 nt, Homo sapiens
uaagcaguaaaugaagucuugc

SEQ ID NO: 17600 - RNA, 21 nt, Homo sapiens
ugcuauguuguccaggcuggc

SEQ ID NO: 17601 - RNA, 22 nt, Homo sapiens
ugucauguggcuaacgauucau

SEQ ID NO: 17602 - RNA, 22 nt, Homo sapiens
auaugucuguuuagucuguaau

SEQ ID NO: 17603 - RNA, 22 nt, Homo sapiens
ugucauguauauaccacuucca

SEQ ID NO: 17604 - RNA, 19 nt, Homo sapiens
ugugaagaaaugcugcaag

SEQ ID NO: 17605 - RNA, 22 nt, Homo sapiens
acaucauugggggcuacaggug

SEQ ID NO: 17606 - RNA, 22 nt, Homo sapiens
uaaggcuagcaagaugagaaua

SEQ ID NO: 17607 - RNA, 22 nt, Homo sapiens
acaguacuuuuggauuugugaa

SEQ ID NO: 17608 - RNA, 22 nt, Homo sapiens
ucucacauuucacagggauggg

SEQ ID NO: 17609 - RNA, 19 nt, Homo sapiens
aagugguuuaaacuuguau

SEQ ID NO: 17610 - RNA, 22 nt, Homo sapiens
auggcacagacucuuggucaag

SEQ ID NO: 17611 - RNA, 22 nt, Homo sapiens
ucucccauccguacacggauug

SEQ ID NO: 17612 - RNA, 22 nt, Homo sapiens
auacauguucaagggcauauau

SEQ ID NO: 17613 - RNA, 22 nt, Homo sapiens
uacauugucauauucucucucu

SEQ ID NO: 17614 - RNA, 20 nt, Homo sapiens
ucucccaaacagcaggcccu

SEQ ID NO: 17615 - RNA, 18 nt, Homo sapiens
auguuauguuuguagaag

SEQ ID NO: 17616 - RNA, 22 nt, Homo sapiens
guacaguaguaaaagugaauga

SEQ ID NO: 17617 - RNA, 22 nt, Homo sapiens
uucauggacucaauaguuucgc

SEQ ID NO: 17618 - RNA, 21 nt, Homo sapiens
auguaacugggaaugugagag

SEQ ID NO: 17619 - RNA, 20 nt, Homo sapiens
gaaacaucuauccucuccuu

SEQ ID NO: 17620 - RNA, 22 nt, Homo sapiens
auuccuuaggcccuuugguuag

SEQ ID NO: 17621 - RNA, 22 nt, Homo sapiens
uccugagagcagacccucuaua

SEQ ID NO: 17622 - RNA, 21 nt, Homo sapiens
gagcacauuguccucuaacgc

SEQ ID NO: 17623 - RNA, 22 nt, Homo sapiens
guacaguacugaaugaauguau

SEQ ID NO: 17624 - RNA, 21 nt, Homo sapiens
augugcacuaugucauuuaau

SEQ ID NO: 17625 - RNA, 22 nt, Homo sapiens
ugugacacugaauggcagaacu

SEQ ID NO: 17626 - RNA, 22 nt, Homo sapiens
aaagugcacuuggaagagggcc

SEQ ID NO: 17627 - RNA, 22 nt, Homo sapiens
ugugagacugacagggcagggu

SEQ ID NO: 17628 - RNA, 22 nt, Homo sapiens
aagaugauguuguguuuucacu

SEQ ID NO: 17629 - RNA, 22 nt, Homo sapiens
ugaaaaguuguugaaggcuuca

SEQ ID NO: 17630 - RNA, 22 nt, Homo sapiens
ugcaccaucuugcuucuguggu

SEQ ID NO: 17631 - RNA, 22 nt, Homo sapiens
uucuugcugaauugugcccuuc

SEQ ID NO: 17632 - RNA, 22 nt, Homo sapiens
caccuguacauggcaguguccu

SEQ ID NO: 17633 - RNA, 22 nt, Homo sapiens
auggucccuguuccaugcuccu

SEQ ID NO: 17634 - RNA, 22 nt, Homo sapiens
cacuuugguucaccugaguuuc

SEQ ID NO: 17635 - RNA, 22 nt, Homo sapiens
gugcagugugauccuuccguau

SEQ ID NO: 17636 - RNA, 22 nt, Homo sapiens
uaacuagaaaggagacaguugc

SEQ ID NO: 17637 - RNA, 22 nt, Homo sapiens
uugugcuugauuugccuagcug

SEQ ID NO: 17638 - RNA, 22 nt, Homo sapiens
agcuugugcuguaugaagggcc

SEQ ID NO: 17639 - RNA, 22 nt, Homo sapiens
gucauucauucagcaagcacug

SEQ ID NO: 17640 - RNA, 22 nt, Homo sapiens
gucucccagccuacauauuucu

SEQ ID NO: 17641 - RNA, 22 nt, Homo sapiens
ucacuaggcuggagugcagugg

SEQ ID NO: 17642 - RNA, 22 nt, Homo sapiens
aaucacaguguucuugugaggg

SEQ ID NO: 17643 - RNA, 22 nt, Homo sapiens
uuugugcuauguuauauauucu

SEQ ID NO: 17644 - RNA, 22 nt, Homo sapiens
guggcagcacauauagguuguu

SEQ ID NO: 17645 - RNA, 20 nt, Homo sapiens
uggcuucuuaauugcaggca

SEQ ID NO: 17646 - RNA, 22 nt, Homo sapiens
ggcaacauggugaaacucuguc

SEQ ID NO: 17647 - RNA, 22 nt, Homo sapiens
gugcacaacaugcaguuuuguu

SEQ ID NO: 17648 - RNA, 22 nt, Homo sapiens
accugagacuaggcauuuuaua

SEQ ID NO: 17649 - RNA, 19 nt, Homo sapiens
cugugcauuucuguggaag

SEQ ID NO: 17650 - RNA, 22 nt, Homo sapiens
ucaggcaccuuccucuuaucug

SEQ ID NO: 17651 - RNA, 17 nt, Homo sapiens
gggucaccuugcaggua

SEQ ID NO: 17652 - RNA, 23 nt, Homo sapiens
uuuugcaauaagucacuggaaua

SEQ ID NO: 17653 - RNA, 22 nt, Homo sapiens
uuggcagcauuccagccaagca

SEQ ID NO: 17654 - RNA, 22 nt, Homo sapiens
acagugucaugucguguucccc

SEQ ID NO: 17655 - RNA, 22 nt, Homo sapiens
ugaauguauuuauuaccauuca

SEQ ID NO: 17656 - RNA, 22 nt, Homo sapiens
acacucuaguguucuuaaucag

SEQ ID NO: 17657 - RNA, 22 nt, Homo sapiens
guaaaguaaagcacaucaaggu

SEQ ID NO: 17658 - RNA, 22 nt, Homo sapiens
ucugucuugugguuugagugcc

SEQ ID NO: 17659 - RNA, 22 nt, Homo sapiens
uggucaccuucuugcucugucu

SEQ ID NO: 17660 - RNA, 22 nt, Homo sapiens
uuggccuccuggucauauccag

SEQ ID NO: 17661 - RNA, 22 nt, Homo sapiens
cuuuuggugguucugaugcagg

SEQ ID NO: 17662 - RNA, 22 nt, Homo sapiens
aaagggcacugugcuuuggcaa

SEQ ID NO: 17663 - RNA, 22 nt, Homo sapiens
cucauuaguuguuuuaagauga

SEQ ID NO: 17664 - RNA, 22 nt, Homo sapiens
uuauucagcaccugcuguguuc

SEQ ID NO: 17665 - RNA, 22 nt, Homo sapiens
aaggagugugauucuucaguuu

SEQ ID NO: 17666 - RNA, 22 nt, Homo sapiens
cugagauaggacucugcuggcu

SEQ ID NO: 17667 - RNA, 19 nt, Homo sapiens
acccuguccccaccuuuac

SEQ ID NO: 17668 - RNA, 22 nt, Homo sapiens
gcacugagagaagccccaagua

SEQ ID NO: 17669 - RNA, 22 nt, Homo sapiens
aaagcacuggagucaucaucua

SEQ ID NO: 17670 - RNA, 22 nt, Homo sapiens
gugaaguuuuuugcugagaguc

SEQ ID NO: 17671 - RNA, 22 nt, Homo sapiens
uuccauguugauacgugaaguu

SEQ ID NO: 17672 - RNA, 22 nt, Homo sapiens
uuaucucaguguuuguaaacaa

SEQ ID NO: 17673 - RNA, 22 nt, Homo sapiens
ccuuggcacuuugccacagugc

SEQ ID NO: 17674 - RNA, 22 nt, Homo sapiens
cacugcauucuccaccucccag

SEQ ID NO: 17675 - RNA, 22 nt, Homo sapiens
ugagugaggcugggcagucccu

SEQ ID NO: 17676 - RNA, 22 nt, Homo sapiens
gucaccagcuguguuagccccu

SEQ ID NO: 17677 - RNA, 22 nt, Homo sapiens
ugugccacugcacuccugccug

SEQ ID NO: 17678 - RNA, 22 nt, Homo sapiens
ugaucucauuagcaccuuuagc

SEQ ID NO: 17679 - RNA, 22 nt, Homo sapiens
uuacaccuguaauccagcacuu

SEQ ID NO: 17680 - RNA, 22 nt, Homo sapiens
uagagguucuaagauucucaga

SEQ ID NO: 17681 - RNA, 22 nt, Homo sapiens
gaaucacagauuaugaguaucu

SEQ ID NO: 17682 - RNA, 22 nt, Homo sapiens
aucaccugagcaguauacacug

SEQ ID NO: 17683 - RNA, 22 nt, Homo sapiens
auauucacuauaugcagaacca

SEQ ID NO: 17684 - RNA, 22 nt, Homo sapiens
ucacacuguuuugauuauuaua

SEQ ID NO: 17685 - RNA, 22 nt, Homo sapiens
uacugguuuuauauauuucucc

SEQ ID NO: 17686 - RNA, 22 nt, Homo sapiens
uaugcacacucucccaggaggg

SEQ ID NO: 17687 - RNA, 22 nt, Homo sapiens
uuccaugugggcuugucaagua

SEQ ID NO: 17688 - RNA, 22 nt, Homo sapiens
cuaaaugcacugucaaaggaag

SEQ ID NO: 17689 - RNA, 22 nt, Homo sapiens
cucacugggaccacucugaagu

SEQ ID NO: 17690 - RNA, 22 nt, Homo sapiens
guagaagcacaggugaguuggu

SEQ ID NO: 17691 - RNA, 22 nt, Homo sapiens
aaaugcacagaaaggaugugga

SEQ ID NO: 17692 - RNA, 22 nt, Homo sapiens
gagacugagucucacucuguca

SEQ ID NO: 17693 - RNA, 20 nt, Homo sapiens
agguuauuauaauuagaaga

SEQ ID NO: 17694 - RNA, 22 nt, Homo sapiens
ucacugaaaccuccgccuucug

SEQ ID NO: 17695 - RNA, 22 nt, Homo sapiens
cuagccuggagugcaguggugc

SEQ ID NO: 17696 - RNA, 22 nt, Homo sapiens
aaagguaguacuucuagaaggg

SEQ ID NO: 17697 - RNA, 22 nt, Homo sapiens
augcagugugcaacagauuaag

SEQ ID NO: 17698 - RNA, 17 nt, Homo sapiens
ggaaugaauuccagccc

SEQ ID NO: 17699 - RNA, 22 nt, Homo sapiens
gucauuguguggacauggagaa

SEQ ID NO: 17700 - RNA, 22 nt, Homo sapiens
ugaguuguugcauucuuggugu

SEQ ID NO: 17701 - RNA, 22 nt, Homo sapiens
cacagagugagacccugucucu

SEQ ID NO: 17702 - RNA, 22 nt, Homo sapiens
uaucacacgccuugcuucauuu

SEQ ID NO: 17703 - RNA, 22 nt, Homo sapiens
uuggcuguguuucccuacaaau

SEQ ID NO: 17704 - RNA, 21 nt, Homo sapiens
uaucacauuggugauuaaguu

SEQ ID NO: 17705 - RNA, 22 nt, Homo sapiens
gugcacaacgugcaaguuuguu

SEQ ID NO: 17706 - RNA, 22 nt, Homo sapiens
aaguugcuuuagguaagucaau

SEQ ID NO: 17707 - RNA, 22 nt, Homo sapiens
agaguaguuuauuaugcuaagg

SEQ ID NO: 17708 - RNA, 22 nt, Homo sapiens
uugcaggugguuuaugcaagac

SEQ ID NO: 17709 - RNA, 22 nt, Homo sapiens
gcagugugugaggaauuugggu

SEQ ID NO: 17710 - RNA, 19 nt, Homo sapiens
uccuugauugcaccacugc

SEQ ID NO: 17711 - RNA, 22 nt, Homo sapiens
aucaggaaccuuuuuggugugu

SEQ ID NO: 17712 - RNA, 23 nt, Homo sapiens
uuggucucccaaaguguugagau

SEQ ID NO: 17713 - RNA, 22 nt, Homo sapiens
cacugcacuccagcuuugguga

SEQ ID NO: 17714 - RNA, 22 nt, Homo sapiens
auugcaguuagaacagaagucu

SEQ ID NO: 17715 - RNA, 22 nt, Homo sapiens
uugcuauguugcccagucugga

SEQ ID NO: 17716 - RNA, 21 nt, Homo sapiens
ucauugggugcagcccacccu

SEQ ID NO: 17717 - RNA, 22 nt, Homo sapiens
uuggcaacauagugagaccccc

SEQ ID NO: 17718 - RNA, 22 nt, Homo sapiens
uaucucauccuccuugauccca

SEQ ID NO: 17719 - RNA, 21 nt, Homo sapiens
augguacugucucuggagaua

SEQ ID NO: 17720 - RNA, 20 nt, Homo sapiens
agcugcagauauaaauccgc

SEQ ID NO: 17721 - RNA, 22 nt, Homo sapiens
caaagucuauucuacccuuacc

SEQ ID NO: 17722 - RNA, 22 nt, Homo sapiens
gugugcacaaucuggcaugugc

SEQ ID NO: 17723 - RNA, 22 nt, Homo sapiens
gggcaaaacuguacugccaagg

SEQ ID NO: 17724 - RNA, 22 nt, Homo sapiens
uguggcuuuguaaccauggguc

SEQ ID NO: 17725 - RNA, 20 nt, Homo sapiens
ggagguuguauaaguacauc

SEQ ID NO: 17726 - RNA, 22 nt, Homo sapiens
aagagguaauaacaaagcuucu

SEQ ID NO: 17727 - RNA, 22 nt, Homo sapiens
aaaguggacuaagugaauauga

SEQ ID NO: 17728 - RNA, 19 nt, Homo sapiens
uuuuccccuuucuuaagac

SEQ ID NO: 17729 - RNA, 22 nt, Homo sapiens
agaauguaaacagaauagagga

SEQ ID NO: 17730 - RNA, 22 nt, Homo sapiens
uaaaugcucuuuaaaagugcuu

SEQ ID NO: 17731 - RNA, 22 nt, Homo sapiens
ugcugcacaguucuuaagauua

SEQ ID NO: 17732 - RNA, 22 nt, Homo sapiens
uuucaucagccagggucagucu

SEQ ID NO: 17733 - RNA, 22 nt, Homo sapiens
gugcacuguagaacccuuuguu

SEQ ID NO: 17734 - RNA, 22 nt, Homo sapiens
gugggauggagagaagguauga

SEQ ID NO: 17735 - RNA, 22 nt, Homo sapiens
aucauccugucaggagcuguga

SEQ ID NO: 17736 - RNA, 22 nt, Homo sapiens
ucuuuguuggaguccaaggaua

SEQ ID NO: 17737 - RNA, 22 nt, Homo sapiens
ccugucuugaagagauccuccu

SEQ ID NO: 17738 - RNA, 22 nt, Homo sapiens
uuuccuguaggaaggaaauaga

SEQ ID NO: 17739 - RNA, 22 nt, Homo sapiens
cuaacacagggcaagucaggcu

SEQ ID NO: 17740 - RNA, 22 nt, Homo sapiens
agugcaguggcacaaucuuggc

SEQ ID NO: 17741 - RNA, 22 nt, Homo sapiens
cuuuuugcaaauacaacucuga

SEQ ID NO: 17742 - RNA, 22 nt, Homo sapiens
gagagugcuuggcaucugcuga

SEQ ID NO: 17743 - RNA, 22 nt, Homo sapiens
cuuuugcugggucagcgguggu

SEQ ID NO: 17744 - RNA, 22 nt, Homo sapiens
uuacaguauugcaaggacuagg

SEQ ID NO: 17745 - RNA, 22 nt, Homo sapiens
uuccauugugucaucuuggugg

SEQ ID NO: 17746 - RNA, 22 nt, Homo sapiens
auggagagaauuauucucucag

SEQ ID NO: 17747 - RNA, 22 nt, Homo sapiens
ucugucuuugccuaaguuuguc

SEQ ID NO: 17748 - RNA, 22 nt, Homo sapiens
ucagggacgcuugacacaagcc

SEQ ID NO: 17749 - RNA, 22 nt, Homo sapiens
aagcucauugcucugguuuuaa

SEQ ID NO: 17750 - RNA, 22 nt, Homo sapiens
uugugcacauguacccuagaac

SEQ ID NO: 17751 - RNA, 22 nt, Homo sapiens
ucauccauacaguuagcaaagg

SEQ ID NO: 17752 - RNA, 22 nt, Homo sapiens
acagugcuuuuguuccucuccu

SEQ ID NO: 17753 - RNA, 22 nt, Homo sapiens
acauagaguagcuaccuguaga

SEQ ID NO: 17754 - RNA, 22 nt, Homo sapiens
agcagcauuaguggaaucuugu

SEQ ID NO: 17755 - RNA, 22 nt, Homo sapiens
uaguaaacauaguucuuuugcu

SEQ ID NO: 17756 - RNA, 22 nt, Homo sapiens
ugugagaaaugcagaaucucag

SEQ ID NO: 17757 - RNA, 22 nt, Homo sapiens
uggagagugauaaguaaaugga

SEQ ID NO: 17758 - RNA, 22 nt, Homo sapiens
uggcaugauccuagauucaaca

SEQ ID NO: 17759 - RNA, 19 nt, Homo sapiens
gugugcauaucacagagca

SEQ ID NO: 17760 - RNA, 20 nt, Homo sapiens
ugguguuugaacagugaaug

SEQ ID NO: 17761 - RNA, 22 nt, Homo sapiens
uugcacaauccugugagugagu

SEQ ID NO: 17762 - RNA, 22 nt, Homo sapiens
ugagguuggggucagggcuagc

SEQ ID NO: 17763 - RNA, 18 nt, Homo sapiens
acagugucauggcucaau

SEQ ID NO: 17764 - RNA, 22 nt, Homo sapiens
gucucuuguuaucauuucugag

SEQ ID NO: 17765 - RNA, 22 nt, Homo sapiens
guuauuguccauuuauuuagca

SEQ ID NO: 17766 - RNA, 22 nt, Homo sapiens
aucuacagccagucugguuugu

SEQ ID NO: 17767 - RNA, 22 nt, Homo sapiens
uucccuguaucuucugccaugu

SEQ ID NO: 17768 - RNA, 22 nt, Homo sapiens
cugaauguccaggcagagguuu

SEQ ID NO: 17769 - RNA, 22 nt, Homo sapiens
uaucauggaaagauguugaaau

SEQ ID NO: 17770 - RNA, 22 nt, Homo sapiens
aagugguuuuaaucuggugagu

SEQ ID NO: 17771 - RNA, 22 nt, Homo sapiens
gugcaugucuaugcgagucuaa

SEQ ID NO: 17772 - RNA, 22 nt, Homo sapiens
auagcacaguguguguacacca

SEQ ID NO: 17773 - RNA, 22 nt, Homo sapiens
uggaaauaaaugugccaagauc

SEQ ID NO: 17774 - RNA, 22 nt, Homo sapiens
uugaaagacaucaccuacugcu

SEQ ID NO: 17775 - RNA, 21 nt, Homo sapiens
agcuuguguguaucacagugu

SEQ ID NO: 17776 - RNA, 22 nt, Homo sapiens
acugcacuccaguuugggcagc

SEQ ID NO: 17777 - RNA, 22 nt, Homo sapiens
ucacauguguaugagcuuugau

SEQ ID NO: 17778 - RNA, 22 nt, Homo sapiens
augucauagaagccugugaacc

SEQ ID NO: 17779 - RNA, 22 nt, Homo sapiens
ucacugaaacuguccuggguua

SEQ ID NO: 17780 - RNA, 22 nt, Homo sapiens
ccucuguaguccugcaagagga

SEQ ID NO: 17781 - RNA, 20 nt, Homo sapiens
ugcaguguccucacuuguca

SEQ ID NO: 17782 - RNA, 22 nt, Homo sapiens
uauuugauuaacaagagccuaa

SEQ ID NO: 17783 - RNA, 22 nt, Homo sapiens
ucuggccuacaucauuuuuccg

SEQ ID NO: 17784 - RNA, 22 nt, Homo sapiens
acgugcaugcacacacaugcgc

SEQ ID NO: 17785 - RNA, 22 nt, Homo sapiens
agauggugauaaaugugguacc

SEQ ID NO: 17786 - RNA, 22 nt, Homo sapiens
ggcaguggaagugccaguuucu

SEQ ID NO: 17787 - RNA, 22 nt, Homo sapiens
ccauggcaauggucagucuauu

SEQ ID NO: 17788 - RNA, 22 nt, Homo sapiens
ggugaguggugcuuaaguucag

SEQ ID NO: 17789 - RNA, 20 nt, Homo sapiens
agcuguuguuaugagguuua

SEQ ID NO: 17790 - RNA, 22 nt, Homo sapiens
aaaagcauucagagugcugggc

SEQ ID NO: 17791 - RNA, 22 nt, Homo sapiens
cugggcaaugcggcuggauaga

SEQ ID NO: 17792 - RNA, 22 nt, Homo sapiens
uguacuucaagauuaugguuua

SEQ ID NO: 17793 - RNA, 22 nt, Homo sapiens
augaaaucuuuggcagaucuua

SEQ ID NO: 17794 - RNA, 22 nt, Homo sapiens
aaaugcuuucuuggaccauuug

SEQ ID NO: 17795 - RNA, 22 nt, Homo sapiens
ggcaagaaaaugcaauuacugu

SEQ ID NO: 17796 - RNA, 22 nt, Homo sapiens
auacaguaucuucuggcaagca

SEQ ID NO: 17797 - RNA, 22 nt, Homo sapiens
ugagucaugcuggagucauggc

SEQ ID NO: 17798 - RNA, 22 nt, Homo sapiens
gacaguguggcgauuccucaag

SEQ ID NO: 17799 - RNA, 22 nt, Homo sapiens
auugcugagacauugcuaaucu

SEQ ID NO: 17800 - RNA, 22 nt, Homo sapiens
aguaaaucacuaauggcuuccg

SEQ ID NO: 17801 - RNA, 22 nt, Homo sapiens
gacucuguagacaaucacaucu

SEQ ID NO: 17802 - RNA, 22 nt, Homo sapiens
gugaugguaguuuguauuucug

SEQ ID NO: 17803 - RNA, 18 nt, Homo sapiens
acagugcugucacugcuu

SEQ ID NO: 17804 - RNA, 22 nt, Homo sapiens
agcagcauuaugauauaucuua

SEQ ID NO: 17805 - RNA, 22 nt, Homo sapiens
gcuggugacuuuaaguugaagc

SEQ ID NO: 17806 - RNA, 22 nt, Homo sapiens
gcaacugguuucaguuuuucag

SEQ ID NO: 17807 - RNA, 22 nt, Homo sapiens
gucuaugguucaggguggagug

SEQ ID NO: 17808 - RNA, 22 nt, Homo sapiens
ucagcaaugcugcacucuacug

SEQ ID NO: 17809 - RNA, 17 nt, Homo sapiens
ugagaacaugugguauu

SEQ ID NO: 17810 - RNA, 22 nt, Homo sapiens
cugugcauggauuuuaagauug

SEQ ID NO: 17811 - RNA, 22 nt, Homo sapiens
uucagcacaguguggaucauuc

SEQ ID NO: 17812 - RNA, 22 nt, Homo sapiens
ugagcugagauuaagcugcugc

SEQ ID NO: 17813 - RNA, 22 nt, Homo sapiens
ucuguaacauccaccuucuggg

SEQ ID NO: 17814 - RNA, 22 nt, Homo sapiens
agguagaguguuuuguucuucu

SEQ ID NO: 17815 - RNA, 22 nt, Homo sapiens
uuucugugguccucuugaaggu

SEQ ID NO: 17816 - RNA, 22 nt, Homo sapiens
cugaggugggaggauuggcuug

SEQ ID NO: 17817 - RNA, 22 nt, Homo sapiens
ucacauuguacaaacagguaag

SEQ ID NO: 17818 - RNA, 22 nt, Homo sapiens
ugggaugaugcuugagaauauc

SEQ ID NO: 17819 - RNA, 22 nt, Homo sapiens
uugaaagacagaggggcaaguu

SEQ ID NO: 17820 - RNA, 22 nt, Homo sapiens
acccuggagagugcuguaguaa

SEQ ID NO: 17821 - RNA, 22 nt, Homo sapiens
cccugagagcagggucuuucuc

SEQ ID NO: 17822 - RNA, 20 nt, Homo sapiens
aaacucugucuucuuuauca

SEQ ID NO: 17823 - RNA, 22 nt, Homo sapiens
auaucaaggccauuuucuaaau

SEQ ID NO: 17824 - RNA, 22 nt, Homo sapiens
auccucugagagaguuucauaa

SEQ ID NO: 17825 - RNA, 22 nt, Homo sapiens
auaaaguucugcuggcauauau

SEQ ID NO: 17826 - RNA, 22 nt, Homo sapiens
uucaccuugcccacagcagucu

SEQ ID NO: 17827 - RNA, 22 nt, Homo sapiens
gucucccagccuacaucuuucu

SEQ ID NO: 17828 - RNA, 22 nt, Homo sapiens
ugacacauguagacaucuggug

SEQ ID NO: 17829 - RNA, 22 nt, Homo sapiens
ugaauucaucucacagaguuaa

SEQ ID NO: 17830 - RNA, 22 nt, Homo sapiens
uaguccauuuucaugcugcuau

SEQ ID NO: 17831 - RNA, 22 nt, Homo sapiens
ucugagcaauagauguggauau

SEQ ID NO: 17832 - RNA, 22 nt, Homo sapiens
uuggggcacggccucuguugcc

SEQ ID NO: 17833 - RNA, 22 nt, Homo sapiens
cugacauuguugaucacagcca

SEQ ID NO: 17834 - RNA, 22 nt, Homo sapiens
auggaaggagaggaaugaauga

SEQ ID NO: 17835 - RNA, 20 nt, Homo sapiens
ucucauggagggaaagagca

SEQ ID NO: 17836 - RNA, 22 nt, Homo sapiens
uacaaaguaacaguuccuguau

SEQ ID NO: 17837 - RNA, 21 nt, Homo sapiens
agcagcuuugguugaagcaga

SEQ ID NO: 17838 - RNA, 22 nt, Homo sapiens
uauuguccacuuugcacugugu

SEQ ID NO: 17839 - RNA, 22 nt, Homo sapiens
ugguuguuuuaaaugucgucug

SEQ ID NO: 17840 - RNA, 22 nt, Homo sapiens
ccagccgggugcaguggcucac

SEQ ID NO: 17841 - RNA, 21 nt, Homo sapiens
agacacuuggaagguuuuaga

SEQ ID NO: 17842 - RNA, 22 nt, Homo sapiens
uugauguguuuccaggauuugu

SEQ ID NO: 17843 - RNA, 22 nt, Homo sapiens
aucacuuucuauuucugugcca

SEQ ID NO: 17844 - RNA, 22 nt, Homo sapiens
agucacaugccagcacacccag

SEQ ID NO: 17845 - RNA, 19 nt, Homo sapiens
ccauggcaaugaucugaug

SEQ ID NO: 17846 - RNA, 22 nt, Homo sapiens
ucacacugaauuugaagcaaug

SEQ ID NO: 17847 - RNA, 22 nt, Homo sapiens
guggaagguaaugcagcuuacu

SEQ ID NO: 17848 - RNA, 22 nt, Homo sapiens
acccugcuaaacagcccccugc

SEQ ID NO: 17849 - RNA, 22 nt, Homo sapiens
guggguaaaucucuggggcucu

SEQ ID NO: 17850 - RNA, 22 nt, Homo sapiens
gcaagaaucugggaguaaaauu

SEQ ID NO: 17851 - RNA, 22 nt, Homo sapiens
aauccugucuugccauccaaua

SEQ ID NO: 17852 - RNA, 23 nt, Homo sapiens
uaucacacuuucucugugccaca

SEQ ID NO: 17853 - RNA, 22 nt, Homo sapiens
cugagguaggcccugagaauau

SEQ ID NO: 17854 - RNA, 22 nt, Homo sapiens
uguuauuuuguguuagggcaca

SEQ ID NO: 17855 - RNA, 19 nt, Homo sapiens
uuuguauguuuccaguaau

SEQ ID NO: 17856 - RNA, 22 nt, Homo sapiens
cacugcacuccagucugacgac

SEQ ID NO: 17857 - RNA, 22 nt, Homo sapiens
gagugcaauggcaagaucuugg

SEQ ID NO: 17858 - RNA, 22 nt, Homo sapiens
cuugacaaugcuucaggcugaa

SEQ ID NO: 17859 - RNA, 22 nt, Homo sapiens
acacaugugcguagacucuuua

SEQ ID NO: 17860 - RNA, 20 nt, Homo sapiens
ugcagcacugggaaugcagu

SEQ ID NO: 17861 - RNA, 22 nt, Homo sapiens
cucccacccucauuuuuaggca

SEQ ID NO: 17862 - RNA, 18 nt, Homo sapiens
uuagaugguuuuaaaacu

SEQ ID NO: 17863 - RNA, 17 nt, Homo sapiens
gagguaguuuacuuuca

SEQ ID NO: 17864 - RNA, 22 nt, Homo sapiens
cuauucacaggcaauauguaca

SEQ ID NO: 17865 - RNA, 22 nt, Homo sapiens
uggcaagaccccaucucuacaa

SEQ ID NO: 17866 - RNA, 22 nt, Homo sapiens
cagagguauugcaaaagccuag

SEQ ID NO: 17867 - RNA, 22 nt, Homo sapiens
uucuuccagccuugaggggccc

SEQ ID NO: 17868 - RNA, 22 nt, Homo sapiens
aaggugcuguaagcauccaugu

SEQ ID NO: 17869 - RNA, 22 nt, Homo sapiens
agcuguguugucugaagucaga

SEQ ID NO: 17870 - RNA, 22 nt, Homo sapiens
uuuuccagugggacucccauua

SEQ ID NO: 17871 - RNA, 22 nt, Homo sapiens
ucagcacauucaaggccugccu

SEQ ID NO: 17872 - RNA, 22 nt, Homo sapiens
agaguaguuucuauauucuuca

SEQ ID NO: 17873 - RNA, 22 nt, Homo sapiens
caugacacuggcauguuucuuu

SEQ ID NO: 17874 - RNA, 22 nt, Homo sapiens
auagcagcagcuaguagugaua

SEQ ID NO: 17875 - RNA, 22 nt, Homo sapiens
cccagaguucuuaaauacugag

SEQ ID NO: 17876 - RNA, 22 nt, Homo sapiens
auugucacccgggcaguaagca

SEQ ID NO: 17877 - RNA, 18 nt, Homo sapiens
uuagguaggucuuugugu

SEQ ID NO: 17878 - RNA, 22 nt, Homo sapiens
ugcaagaaucuuucaggcuagc

SEQ ID NO: 17879 - RNA, 22 nt, Homo sapiens
ucaaaugauucuccugccucag

SEQ ID NO: 17880 - RNA, 22 nt, Homo sapiens
gagagcauuaagccaucaucau

SEQ ID NO: 17881 - RNA, 22 nt, Homo sapiens
gagcucaccuuaccucuggagc

SEQ ID NO: 17882 - RNA, 22 nt, Homo sapiens
uaugcacacguguccaugugca

SEQ ID NO: 17883 - RNA, 22 nt, Homo sapiens
cuggaguaugaaccauguauca

SEQ ID NO: 17884 - RNA, 22 nt, Homo sapiens
auugugcuaaaguaauaaguca

SEQ ID NO: 17885 - RNA, 22 nt, Homo sapiens
cacuaggcuggagugcaguggc

SEQ ID NO: 17886 - RNA, 22 nt, Homo sapiens
ugucagaaucuagaggcugcua

SEQ ID NO: 17887 - RNA, 22 nt, Homo sapiens
agucaaaugcuuauguauaaag

SEQ ID NO: 17888 - RNA, 22 nt, Homo sapiens
uugaggugggaggaucacuuga

SEQ ID NO: 17889 - RNA, 22 nt, Homo sapiens
uuagaaaguagaaaagcugguu

SEQ ID NO: 17890 - RNA, 22 nt, Homo sapiens
cuuuguguggacauuucaggca

SEQ ID NO: 17891 - RNA, 22 nt, Homo sapiens
cugaggacaucagggaagcauc

SEQ ID NO: 17892 - RNA, 22 nt, Homo sapiens
uguaagcagcagagacuauccu

SEQ ID NO: 17893 - RNA, 22 nt, Homo sapiens
caaaguaauuacgguuuuggcc

SEQ ID NO: 17894 - RNA, 22 nt, Homo sapiens
agugcacucuuuccucucuuac

SEQ ID NO: 17895 - RNA, 22 nt, Homo sapiens
ucucauggagucaggagcagaa

SEQ ID NO: 17896 - RNA, 22 nt, Homo sapiens
uucucauggugauggcaaaauc

SEQ ID NO: 17897 - RNA, 22 nt, Homo sapiens
uguauguaaagacaggauaaca

SEQ ID NO: 17898 - RNA, 17 nt, Homo sapiens
uuuuggauuagaaaucc

SEQ ID NO: 17899 - RNA, 22 nt, Homo sapiens
cucauugcaaucuccaccuccc

SEQ ID NO: 17900 - RNA, 22 nt, Homo sapiens
ucuuuguuagaacccucuccuu

SEQ ID NO: 17901 - RNA, 22 nt, Homo sapiens
acaguauaaugcuguagggaga

SEQ ID NO: 17902 - RNA, 22 nt, Homo sapiens
uugguucucuuagccaucuuaa

SEQ ID NO: 17903 - RNA, 22 nt, Homo sapiens
augguacuccagagaagcagaa

SEQ ID NO: 17904 - RNA, 22 nt, Homo sapiens
guucacaguuucuaaucccagc

SEQ ID NO: 17905 - RNA, 21 nt, Homo sapiens
uuaaguaauuacccaacucuc

SEQ ID NO: 17906 - RNA, 22 nt, Homo sapiens
uucucacaguacagggagcucu

SEQ ID NO: 17907 - RNA, 22 nt, Homo sapiens
uacaguagaaugucuuucaaaa

SEQ ID NO: 17908 - RNA, 22 nt, Homo sapiens
ugccauugcacuccagccuggg

SEQ ID NO: 17909 - RNA, 22 nt, Homo sapiens
uagaucauauucagugcuuacu

SEQ ID NO: 17910 - RNA, 22 nt, Homo sapiens
cccagcguucggcauggcugag

SEQ ID NO: 17911 - RNA, 22 nt, Homo sapiens
agucacagccuuuuacuuuaga

SEQ ID NO: 17912 - RNA, 22 nt, Homo sapiens
uuuagguuacauauaauccaaa

SEQ ID NO: 17913 - RNA, 22 nt, Homo sapiens
gaguuguuuuaaggcacugacu

SEQ ID NO: 17914 - RNA, 22 nt, Homo sapiens
cuuuaugagguuggauggaucu

SEQ ID NO: 17915 - RNA, 22 nt, Homo sapiens
uugaagacuaccuaccauacuu

SEQ ID NO: 17916 - RNA, 19 nt, Homo sapiens
ucucugguguuggagggga

SEQ ID NO: 17917 - RNA, 22 nt, Homo sapiens
ugcauuaguaaguaauuuuaau

SEQ ID NO: 17918 - RNA, 18 nt, Homo sapiens
ggcugguguuuuaguaua

SEQ ID NO: 17919 - RNA, 22 nt, Homo sapiens
aggugcucuuccuguaggucac

SEQ ID NO: 17920 - RNA, 22 nt, Homo sapiens
gagagugugucagaggcugcga

SEQ ID NO: 17921 - RNA, 17 nt, Homo sapiens
cacugggugcaagagga

SEQ ID NO: 17922 - RNA, 22 nt, Homo sapiens
ugauguugacuguaggcagaga

SEQ ID NO: 17923 - RNA, 22 nt, Homo sapiens
ucaaagucuucucaaguaacau

SEQ ID NO: 17924 - RNA, 22 nt, Homo sapiens
ugggcaaaacuaagagcugugg

SEQ ID NO: 17925 - RNA, 20 nt, Homo sapiens
agacuagggagcagaaagcc

SEQ ID NO: 17926 - RNA, 22 nt, Homo sapiens
ugaacacagccugccucugcca

SEQ ID NO: 17927 - RNA, 20 nt, Homo sapiens
aucacuggagaaggaaaccu

SEQ ID NO: 17928 - RNA, 22 nt, Homo sapiens
uuuggcauuuaaauaugcaugg

SEQ ID NO: 17929 - RNA, 22 nt, Homo sapiens
ugccugagccagguuuuaggag

SEQ ID NO: 17930 - RNA, 22 nt, Homo sapiens
ucccuggacagccuugccuggg

SEQ ID NO: 17931 - RNA, 22 nt, Homo sapiens
aaaugguguuaguagaucuuua

SEQ ID NO: 17932 - RNA, 22 nt, Homo sapiens
aauccaugugcuuuaccauuuu

SEQ ID NO: 17933 - RNA, 22 nt, Homo sapiens
uaaggcacuacuuuaggcuuuc

SEQ ID NO: 17934 - RNA, 22 nt, Homo sapiens
uuuggucuuuuguaaguuaucu

SEQ ID NO: 17935 - RNA, 22 nt, Homo sapiens
ugaguucaauguuaaugaagca

SEQ ID NO: 17936 - RNA, 22 nt, Homo sapiens
uuuggccauguuggucaggcug

SEQ ID NO: 17937 - RNA, 22 nt, Homo sapiens
uguguacaucucuacacacaug

SEQ ID NO: 17938 - RNA, 22 nt, Homo sapiens
ugauggcauuucauguuuguaa

SEQ ID NO: 17939 - RNA, 17 nt, Homo sapiens
uagcuucacauuaggaa

SEQ ID NO: 17940 - RNA, 18 nt, Homo sapiens
gagcaccuuuuuugcaga

SEQ ID NO: 17941 - RNA, 18 nt, Homo sapiens
uagcucuuguugguccau

SEQ ID NO: 17942 - RNA, 19 nt, Homo sapiens
augcugguguugcucaaac

SEQ ID NO: 17943 - RNA, 22 nt, Homo sapiens
ucaucuggcgaaugugaagagu

SEQ ID NO: 17944 - RNA, 22 nt, Homo sapiens
gaugcaguaagaaugcauagcg

SEQ ID NO: 17945 - RNA, 22 nt, Homo sapiens
cuacaguagagaggauguagaa

SEQ ID NO: 17946 - RNA, 22 nt, Homo sapiens
ucauucacucccuugaaguuag

SEQ ID NO: 17947 - RNA, 22 nt, Homo sapiens
cuuuguggggucuuuccucaaa

SEQ ID NO: 17948 - RNA, 22 nt, Homo sapiens
uuuguuugaagucgagacaacu

SEQ ID NO: 17949 - RNA, 22 nt, Homo sapiens
cacuguggauggaacuauguga

SEQ ID NO: 17950 - RNA, 22 nt, Homo sapiens
auaugcacgugcauacacacuu

SEQ ID NO: 17951 - RNA, 22 nt, Homo sapiens
cugagauggagucucgcauugu

SEQ ID NO: 17952 - RNA, 22 nt, Homo sapiens
gugugacagcuauagacaugau

SEQ ID NO: 17953 - RNA, 22 nt, Homo sapiens
ugugcauaugucuuuauaguag

SEQ ID NO: 17954 - RNA, 20 nt, Homo sapiens
cuuccaguggccccaucuuu

SEQ ID NO: 17955 - RNA, 22 nt, Homo sapiens
uuccguguaguugagcaguuuu

SEQ ID NO: 17956 - RNA, 22 nt, Homo sapiens
caugcagcacacaugucugugc

SEQ ID NO: 17957 - RNA, 22 nt, Homo sapiens
cuguaaggcacuaagcauaugu

SEQ ID NO: 17958 - RNA, 22 nt, Homo sapiens
aucacagguacuauggcugaca

SEQ ID NO: 17959 - RNA, 22 nt, Homo sapiens
auuccacaguuaacacagaccg

SEQ ID NO: 17960 - RNA, 18 nt, Homo sapiens
cagugcaauacaggagag

SEQ ID NO: 17961 - RNA, 18 nt, Homo sapiens
acuggaauuaaacuuuuu

SEQ ID NO: 17962 - RNA, 22 nt, Homo sapiens
uugagauggagucucgcugugu

SEQ ID NO: 17963 - RNA, 22 nt, Homo sapiens
ugcaguaggcccagcgggaggc

SEQ ID NO: 17964 - RNA, 22 nt, Homo sapiens
ugaucucagcucacugguugaa

SEQ ID NO: 17965 - RNA, 22 nt, Homo sapiens
cauggcacauauauaucuaggu

SEQ ID NO: 17966 - RNA, 22 nt, Homo sapiens
uucccuagaacacauggaggga

SEQ ID NO: 17967 - RNA, 22 nt, Homo sapiens
aucacauuuauaguggcacgca

SEQ ID NO: 17968 - RNA, 18 nt, Homo sapiens
uguugguguucacucacu

SEQ ID NO: 17969 - RNA, 22 nt, Homo sapiens
aaucuguagaaggugcacauuc

SEQ ID NO: 17970 - RNA, 22 nt, Homo sapiens
uuggaaguguguauguauagcu

SEQ ID NO: 17971 - RNA, 22 nt, Homo sapiens
ucacacgugaacucaucacaga

SEQ ID NO: 17972 - RNA, 21 nt, Homo sapiens
uagugcagugggguaugacuu

SEQ ID NO: 17973 - RNA, 22 nt, Homo sapiens
ucacaccauucuucuacuucag

SEQ ID NO: 17974 - RNA, 22 nt, Homo sapiens
cuggaaagcaaagggugcauug

SEQ ID NO: 17975 - RNA, 22 nt, Homo sapiens
uggguaguguaaagcacuccag

SEQ ID NO: 17976 - RNA, 22 nt, Homo sapiens
gggaugaaguugauguagaaag

SEQ ID NO: 17977 - RNA, 22 nt, Homo sapiens
aaguauuaugaguccuuguuuu

SEQ ID NO: 17978 - RNA, 22 nt, Homo sapiens
auuuggccuuuguaugcaguau

SEQ ID NO: 17979 - RNA, 22 nt, Homo sapiens
acccugucacucccaucaauuu

SEQ ID NO: 17980 - RNA, 22 nt, Homo sapiens
agcuugugauuuagagugagag

SEQ ID NO: 17981 - RNA, 22 nt, Homo sapiens
agacccuguauguguuuaguuu

SEQ ID NO: 17982 - RNA, 19 nt, Homo sapiens
uuuugcucuuuauaccuau

SEQ ID NO: 17983 - RNA, 22 nt, Homo sapiens
guucaucaggaauauuggccua

SEQ ID NO: 17984 - RNA, 22 nt, Homo sapiens
uaaaguuauugccccucaguua

SEQ ID NO: 17985 - RNA, 22 nt, Homo sapiens
accauugcacuccagccugggc

SEQ ID NO: 17986 - RNA, 22 nt, Homo sapiens
gugaaaagaugagcaccauaca

SEQ ID NO: 17987 - RNA, 22 nt, Homo sapiens
caccuguagucccagcugaggc

SEQ ID NO: 17988 - RNA, 22 nt, Homo sapiens
ugugcauauaaguguguauaua

SEQ ID NO: 17989 - RNA, 22 nt, Homo sapiens
uagccgggugugguggaacucc

SEQ ID NO: 17990 - RNA, 23 nt, Homo sapiens
ugagguguuaagcagacuugucu

SEQ ID NO: 17991 - RNA, 22 nt, Homo sapiens
agagugcuauagauuagauuuc

SEQ ID NO: 17992 - RNA, 22 nt, Homo sapiens
auggcuucuuacucuucugcau

SEQ ID NO: 17993 - RNA, 22 nt, Homo sapiens
auagaggacugaggugaucuuu

SEQ ID NO: 17994 - RNA, 22 nt, Homo sapiens
gcaagaaugagaaggauuaauu

SEQ ID NO: 17995 - RNA, 22 nt, Homo sapiens
uaucaagaugacaaacuuugcu

SEQ ID NO: 17996 - RNA, 22 nt, Homo sapiens
gugugacuagucaugccugaau

SEQ ID NO: 17997 - RNA, 22 nt, Homo sapiens
cgccugagcugaggaagcugca

SEQ ID NO: 17998 - RNA, 19 nt, Homo sapiens
caguaucauugcacauagu

SEQ ID NO: 17999 - RNA, 22 nt, Homo sapiens
gugucccagugugcauacaggu

SEQ ID NO: 18000 - RNA, 22 nt, Homo sapiens
gagcacauaugacauuuucuuc

SEQ ID NO: 18001 - RNA, 16 nt, Homo sapiens
ugagaacaugcagcau

SEQ ID NO: 18002 - RNA, 22 nt, Homo sapiens
guaugucuugucuauggcugcu

SEQ ID NO: 18003 - RNA, 22 nt, Homo sapiens
cuuugguugugcucuccacuuu

SEQ ID NO: 18004 - RNA, 22 nt, Homo sapiens
agcuugugauucuccaucaugu

SEQ ID NO: 18005 - RNA, 22 nt, Homo sapiens
ggacagugaaugccacuccucc

SEQ ID NO: 18006 - RNA, 22 nt, Homo sapiens
gggguauguaagugagugagug

SEQ ID NO: 18007 - RNA, 22 nt, Homo sapiens
uggaaguaaccaugaauggaau

SEQ ID NO: 18008 - RNA, 19 nt, Homo sapiens
cucauggagaaggagaaua

SEQ ID NO: 18009 - RNA, 22 nt, Homo sapiens
cuguccugcagagucagaauga

SEQ ID NO: 18010 - RNA, 22 nt, Homo sapiens
cacugcacuccaguuuggauga

SEQ ID NO: 18011 - RNA, 22 nt, Homo sapiens
cagaaguauugguaugcucugu

SEQ ID NO: 18012 - RNA, 22 nt, Homo sapiens
uucuugcacuuaacugacauuc

SEQ ID NO: 18013 - RNA, 22 nt, Homo sapiens
ugccugauacccucugucucuc

SEQ ID NO: 18014 - RNA, 22 nt, Homo sapiens
gaauagugcugcaagaaacaua

SEQ ID NO: 18015 - RNA, 22 nt, Homo sapiens
gugagcauaggaggcuucuguu

SEQ ID NO: 18016 - RNA, 22 nt, Homo sapiens
aaugcacauauauuuccuuauu

SEQ ID NO: 18017 - RNA, 22 nt, Homo sapiens
ucuuggccaugaauggcaaggc

SEQ ID NO: 18018 - RNA, 22 nt, Homo sapiens
ucaguguuuggaaucucaauuu

SEQ ID NO: 18019 - RNA, 22 nt, Homo sapiens
ggcagcacaauuuucugaugga

SEQ ID NO: 18020 - RNA, 22 nt, Homo sapiens
uaucucagagaaucagauuuac

SEQ ID NO: 18021 - RNA, 22 nt, Homo sapiens
auuggcaauggcaaagcagagu

SEQ ID NO: 18022 - RNA, 22 nt, Homo sapiens
uggaagacacauaccugauaac

SEQ ID NO: 18023 - RNA, 22 nt, Homo sapiens
gucuuuggaaagacaaaguuca

SEQ ID NO: 18024 - RNA, 19 nt, Homo sapiens
guauuugacuuucuuguuu

SEQ ID NO: 18025 - RNA, 22 nt, Homo sapiens
gcacccugucaaaauggaccaa

SEQ ID NO: 18026 - RNA, 22 nt, Homo sapiens
uauuagugucuuuugguuagaa

SEQ ID NO: 18027 - RNA, 22 nt, Homo sapiens
aguauuuguuggaauaccuguu

SEQ ID NO: 18028 - RNA, 22 nt, Homo sapiens
gucagauaauuugcauccaucu

SEQ ID NO: 18029 - RNA, 21 nt, Homo sapiens
uggcaacauggauggauucug

SEQ ID NO: 18030 - RNA, 20 nt, Homo sapiens
gcaaauggaucccacaagcc

SEQ ID NO: 18031 - RNA, 22 nt, Homo sapiens
ugcaaauguuaguaacaccacu

SEQ ID NO: 18032 - RNA, 22 nt, Homo sapiens
ugagaugauaucuuauuguaau

SEQ ID NO: 18033 - RNA, 22 nt, Homo sapiens
uacaguggaaguuaaccccauu

SEQ ID NO: 18034 - RNA, 22 nt, Homo sapiens
gcuguugugaacuauacaucua

SEQ ID NO: 18035 - RNA, 22 nt, Homo sapiens
uaugcacaugugccugggugug

SEQ ID NO: 18036 - RNA, 22 nt, Homo sapiens
uguaagcauugggcaugcaguc

SEQ ID NO: 18037 - RNA, 22 nt, Homo sapiens
accugcacagccgaacauagac

SEQ ID NO: 18038 - RNA, 22 nt, Homo sapiens
cucauugcaaucucugccuccc

SEQ ID NO: 18039 - RNA, 22 nt, Homo sapiens
augugcuuauagguguauguuu

SEQ ID NO: 18040 - RNA, 22 nt, Homo sapiens
ggcaugaaguagcccacaggca

SEQ ID NO: 18041 - RNA, 22 nt, Homo sapiens
uuccauuuguucggugucgcca

SEQ ID NO: 18042 - RNA, 22 nt, Homo sapiens
cauuuugcaguuucugucucca

SEQ ID NO: 18043 - RNA, 22 nt, Homo sapiens
ucaaaguagaaaaggggcaauu

SEQ ID NO: 18044 - RNA, 22 nt, Homo sapiens
cuguaguuagcagaugaugaau

SEQ ID NO: 18045 - RNA, 21 nt, Homo sapiens
ggcaagugugagguuuggggu

SEQ ID NO: 18046 - RNA, 22 nt, Homo sapiens
ggugagauguucagacgaacug

SEQ ID NO: 18047 - RNA, 22 nt, Homo sapiens
gccaagaagugucuaagcagga

SEQ ID NO: 18048 - RNA, 22 nt, Homo sapiens
uacuacuuucugacaucuuuaa

SEQ ID NO: 18049 - RNA, 22 nt, Homo sapiens
uugugaagaaaccagaaaaguu

SEQ ID NO: 18050 - RNA, 22 nt, Homo sapiens
auaggacuauugugaggauuaa

SEQ ID NO: 18051 - RNA, 22 nt, Homo sapiens
gugcauguccacuaguccauau

SEQ ID NO: 18052 - RNA, 22 nt, Homo sapiens
ugugucacugcacuccagccug

SEQ ID NO: 18053 - RNA, 22 nt, Homo sapiens
auuccaguuguaagguuuuuca

SEQ ID NO: 18054 - RNA, 22 nt, Homo sapiens
uggagggcuagucauuucuuuu

SEQ ID NO: 18055 - RNA, 22 nt, Homo sapiens
gcucuuuugggguaauucugag

SEQ ID NO: 18056 - RNA, 22 nt, Homo sapiens
gacagugugauacuuagucuca

SEQ ID NO: 18057 - RNA, 22 nt, Homo sapiens
agaugguguuggcugaguguau

SEQ ID NO: 18058 - RNA, 19 nt, Homo sapiens
agaguauuguuacuucucu

SEQ ID NO: 18059 - RNA, 22 nt, Homo sapiens
caguaguagccccuuagaugga

SEQ ID NO: 18060 - RNA, 16 nt, Homo sapiens
agcagguguuagguga

SEQ ID NO: 18061 - RNA, 22 nt, Homo sapiens
ucacauuguguagccugcucac

SEQ ID NO: 18062 - RNA, 22 nt, Homo sapiens
augagagugagagcagccccuu

SEQ ID NO: 18063 - RNA, 22 nt, Homo sapiens
auuaaguuaggauuuugagaua

SEQ ID NO: 18064 - RNA, 22 nt, Homo sapiens
uggaagugaacaaccaaggcag

SEQ ID NO: 18065 - RNA, 22 nt, Homo sapiens
uacaguguuuugguauuccaca

SEQ ID NO: 18066 - RNA, 22 nt, Homo sapiens
ccagugcauggaucccaggggg

SEQ ID NO: 18067 - RNA, 22 nt, Homo sapiens
ucacugaaaccgccuccaccuc

SEQ ID NO: 18068 - RNA, 22 nt, Homo sapiens
cuguauguuucuaugaauguga

SEQ ID NO: 18069 - RNA, 22 nt, Homo sapiens
uacuagaggaaaacuugaagac

SEQ ID NO: 18070 - RNA, 22 nt, Homo sapiens
uuggcagcacgcaguccagagg

SEQ ID NO: 18071 - RNA, 22 nt, Homo sapiens
gugucucagcccagaccuauuu

SEQ ID NO: 18072 - RNA, 22 nt, Homo sapiens
ugugucuugaauuuuguaugua

SEQ ID NO: 18073 - RNA, 22 nt, Homo sapiens
ugaugcugaugccugccagaag

SEQ ID NO: 18074 - RNA, 18 nt, Homo sapiens
auuguaagauguauggga

SEQ ID NO: 18075 - RNA, 22 nt, Homo sapiens
gucagugugauaucugcagggg

SEQ ID NO: 18076 - RNA, 21 nt, Homo sapiens
gugucacagacaugacagaug

SEQ ID NO: 18077 - RNA, 22 nt, Homo sapiens
gugcacaacgugcagguuuguu

SEQ ID NO: 18078 - RNA, 21 nt, Homo sapiens
uugagaagaauuagcucuucc

SEQ ID NO: 18079 - RNA, 17 nt, Homo sapiens
cuuguugugguaguuug

SEQ ID NO: 18080 - RNA, 22 nt, Homo sapiens
uugaggugaagggcagagcagc

SEQ ID NO: 18081 - RNA, 22 nt, Homo sapiens
cagugcauaggaucuaaaauuu

SEQ ID NO: 18082 - RNA, 22 nt, Homo sapiens
augaagugcaugauaguugguu

SEQ ID NO: 18083 - RNA, 22 nt, Homo sapiens
gugugguauuauaacuagguau

SEQ ID NO: 18084 - RNA, 22 nt, Homo sapiens
uccccugagucaccugcuucuc

SEQ ID NO: 18085 - RNA, 20 nt, Homo sapiens
auucauggaggagcaauugg

SEQ ID NO: 18086 - RNA, 22 nt, Homo sapiens
gucugguugacagcauguggcc

SEQ ID NO: 18087 - RNA, 22 nt, Homo sapiens
uaauagagucauuauuauuguu

SEQ ID NO: 18088 - RNA, 22 nt, Homo sapiens
aggucaccucaggaaauacuga

SEQ ID NO: 18089 - RNA, 22 nt, Homo sapiens
cuuguuguggaggggagugcag

SEQ ID NO: 18090 - RNA, 22 nt, Homo sapiens
uccauugucuagauguaacaca

SEQ ID NO: 18091 - RNA, 22 nt, Homo sapiens
gcaagaauggaacaggagagcc

SEQ ID NO: 18092 - RNA, 23 nt, Homo sapiens
ccacacuguuuagaauggcauca

SEQ ID NO: 18093 - RNA, 22 nt, Homo sapiens
acaguguuacuugauaguguau

SEQ ID NO: 18094 - RNA, 22 nt, Homo sapiens
uuugcugagucugacuucaugg

SEQ ID NO: 18095 - RNA, 22 nt, Homo sapiens
aggguaguaggcuugggauugg

SEQ ID NO: 18096 - RNA, 22 nt, Homo sapiens
gccugagaggauaugauccccu

SEQ ID NO: 18097 - RNA, 22 nt, Homo sapiens
uagucccauaugauuuagugaa

SEQ ID NO: 18098 - RNA, 22 nt, Homo sapiens
uuguagcaaauauauuuuggaa

SEQ ID NO: 18099 - RNA, 17 nt, Homo sapiens
ucucccaucccuuucuc

SEQ ID NO: 18100 - RNA, 22 nt, Homo sapiens
ucaccuggagccuucacauucu

SEQ ID NO: 18101 - RNA, 21 nt, Homo sapiens
acaaagcuggagggagacugc

SEQ ID NO: 18102 - RNA, 22 nt, Homo sapiens
cugaggugggaggauuacuuga

SEQ ID NO: 18103 - RNA, 23 nt, Homo sapiens
cccaguuaauccuuaaucuccac

SEQ ID NO: 18104 - RNA, 22 nt, Homo sapiens
uccaugaggcuacaguaaucuc

SEQ ID NO: 18105 - RNA, 22 nt, Homo sapiens
uucagcaaugacagccuauaua

SEQ ID NO: 18106 - RNA, 22 nt, Homo sapiens
uuacaguaugaguaagaguucu

SEQ ID NO: 18107 - RNA, 22 nt, Homo sapiens
guggcagagucagagggaaaug

SEQ ID NO: 18108 - RNA, 22 nt, Homo sapiens
gucagugucuuaacagagauua

SEQ ID NO: 18109 - RNA, 22 nt, Homo sapiens
cugagguuaggaguuugagacc

SEQ ID NO: 18110 - RNA, 22 nt, Homo sapiens
aggcaugaguucagaggguaug

SEQ ID NO: 18111 - RNA, 21 nt, Homo sapiens
auggaaagacugccucuucaa

SEQ ID NO: 18112 - RNA, 20 nt, Homo sapiens
gucuugcuccguugcccagg

SEQ ID NO: 18113 - RNA, 22 nt, Homo sapiens
gcugagguucaagaagguuaaa

SEQ ID NO: 18114 - RNA, 22 nt, Homo sapiens
uugucaguguucacucaaagcu

SEQ ID NO: 18115 - RNA, 22 nt, Homo sapiens
agucugguguucucacacuagu

SEQ ID NO: 18116 - RNA, 23 nt, Homo sapiens
uugcauagacauccucauagauu

SEQ ID NO: 18117 - RNA, 22 nt, Homo sapiens
auggcacugaagcguauugaca

SEQ ID NO: 18118 - RNA, 22 nt, Homo sapiens
ugcauuguuccgaauguguccu

SEQ ID NO: 18119 - RNA, 22 nt, Homo sapiens
cucccuuugcugaauguuuuuc

SEQ ID NO: 18120 - RNA, 22 nt, Homo sapiens
ugugcaguuuugagugaauuuc

SEQ ID NO: 18121 - RNA, 22 nt, Homo sapiens
auuaaauguuggacguauacau

SEQ ID NO: 18122 - RNA, 22 nt, Homo sapiens
caaagucuucucauuaugucuu

SEQ ID NO: 18123 - RNA, 22 nt, Homo sapiens
uagccucacaaagugcuuaaga

SEQ ID NO: 18124 - RNA, 21 nt, Homo sapiens
caucaaauugucauggugggu

SEQ ID NO: 18125 - RNA, 22 nt, Homo sapiens
cucugcuuaaugucccacuuga

SEQ ID NO: 18126 - RNA, 22 nt, Homo sapiens
ugugcacaauguacagguuagu

SEQ ID NO: 18127 - RNA, 22 nt, Homo sapiens
augugacuggaucauggggacg

SEQ ID NO: 18128 - RNA, 22 nt, Homo sapiens
gucucccaaccccugugcccag

SEQ ID NO: 18129 - RNA, 22 nt, Homo sapiens
cacugcaauuacuuuugcacca

SEQ ID NO: 18130 - RNA, 22 nt, Homo sapiens
gagauacacccagugcagaggc

SEQ ID NO: 18131 - RNA, 22 nt, Homo sapiens
uuucauggaauauagucauuuu

SEQ ID NO: 18132 - RNA, 22 nt, Homo sapiens
aauugcauugaauuuguagcuu

SEQ ID NO: 18133 - RNA, 22 nt, Homo sapiens
ucuuuugugagucagccucucc

SEQ ID NO: 18134 - RNA, 16 nt, Homo sapiens
gacugggcugaggaau

SEQ ID NO: 18135 - RNA, 22 nt, Homo sapiens
ugaguucaugcuuguaguucua

SEQ ID NO: 18136 - RNA, 22 nt, Homo sapiens
uagcugcacuuacaagugagaa

SEQ ID NO: 18137 - RNA, 22 nt, Homo sapiens
uccauuuguucagcuucaggaa

SEQ ID NO: 18138 - RNA, 22 nt, Homo sapiens
ucaucagaaucccuuagggaug

SEQ ID NO: 18139 - RNA, 22 nt, Homo sapiens
ugaucuguccaccucagcuucc

SEQ ID NO: 18140 - RNA, 22 nt, Homo sapiens
acagugcuguuguguuuucacg

SEQ ID NO: 18141 - RNA, 22 nt, Homo sapiens
ugagaugaaagcagaaagacuu

SEQ ID NO: 18142 - RNA, 22 nt, Homo sapiens
gcagagaaacaggucuaaggag

SEQ ID NO: 18143 - RNA, 22 nt, Homo sapiens
ucaaaugguccacgugaacauu

SEQ ID NO: 18144 - RNA, 22 nt, Homo sapiens
auguccauggaaucuguagcaa

SEQ ID NO: 18145 - RNA, 22 nt, Homo sapiens
gaucaguuucuggagauacgua

SEQ ID NO: 18146 - RNA, 22 nt, Homo sapiens
ucagggacuuacaaaccagaag

SEQ ID NO: 18147 - RNA, 22 nt, Homo sapiens
uguccuguaggaggcagaacaa

SEQ ID NO: 18148 - RNA, 22 nt, Homo sapiens
gagaaugagaggggaaggccac

SEQ ID NO: 18149 - RNA, 19 nt, Homo sapiens
aaaguguuuuaaagaggau

SEQ ID NO: 18150 - RNA, 22 nt, Homo sapiens
guucacucuggagaauauugac

SEQ ID NO: 18151 - RNA, 22 nt, Homo sapiens
uugagacgaagucucacucuug

SEQ ID NO: 18152 - RNA, 22 nt, Homo sapiens
ugaugaaguauaggaagggcuu

SEQ ID NO: 18153 - RNA, 22 nt, Homo sapiens
caucacaucugcaugguaagua

SEQ ID NO: 18154 - RNA, 22 nt, Homo sapiens
ugagaacuuugucuuuuacucu

SEQ ID NO: 18155 - RNA, 22 nt, Homo sapiens
aucugcaaagcugggcugagac

SEQ ID NO: 18156 - RNA, 22 nt, Homo sapiens
aaaccaccauuacuuuugcacc

SEQ ID NO: 18157 - RNA, 22 nt, Homo sapiens
cacaaaguagauuagucuucca

SEQ ID NO: 18158 - RNA, 22 nt, Homo sapiens
uguucuugagccuuuagaccua

SEQ ID NO: 18159 - RNA, 22 nt, Homo sapiens
ggugaucauugucucuaguaug

SEQ ID NO: 18160 - RNA, 21 nt, Homo sapiens
ugacagaaaauugaguuugcu

SEQ ID NO: 18161 - RNA, 22 nt, Homo sapiens
uugcuccccaggaaaggaagca

SEQ ID NO: 18162 - RNA, 22 nt, Homo sapiens
gugggauggaaaugggcuucag

SEQ ID NO: 18163 - RNA, 17 nt, Homo sapiens
ucaaaugcucccaguga

SEQ ID NO: 18164 - RNA, 22 nt, Homo sapiens
ugugccacuguucuguaaagug

SEQ ID NO: 18165 - RNA, 22 nt, Homo sapiens
uugugguugauacacguaggaa

SEQ ID NO: 18166 - RNA, 19 nt, Homo sapiens
uggucccccgcaaucucau

SEQ ID NO: 18167 - RNA, 22 nt, Homo sapiens
ugagcagagaucuauuacugug

SEQ ID NO: 18168 - RNA, 22 nt, Homo sapiens
gugagguugaaaauaauggaaa

SEQ ID NO: 18169 - RNA, 22 nt, Homo sapiens
cucuuuuguuuagcugagaggg

SEQ ID NO: 18170 - RNA, 22 nt, Homo sapiens
ucagugggcuauguaauuaacu

SEQ ID NO: 18171 - RNA, 22 nt, Homo sapiens
auaaaugccuguuguuuuaagc

SEQ ID NO: 18172 - RNA, 22 nt, Homo sapiens
uugauguugaggacauaaaccu

SEQ ID NO: 18173 - RNA, 22 nt, Homo sapiens
uugaauggaauguuggaacuau

SEQ ID NO: 18174 - RNA, 22 nt, Homo sapiens
uugauaguuuaauuaaugcuag

SEQ ID NO: 18175 - RNA, 22 nt, Homo sapiens
ugugauggaguuucauggacug

SEQ ID NO: 18176 - RNA, 22 nt, Homo sapiens
aguccauuugaugaugauucca

SEQ ID NO: 18177 - RNA, 22 nt, Homo sapiens
gucaugcaggguucgccagccc

SEQ ID NO: 18178 - RNA, 22 nt, Homo sapiens
ugaggucauguucugucagguu

SEQ ID NO: 18179 - RNA, 22 nt, Homo sapiens
uugcagugguuucacuggcaaa

SEQ ID NO: 18180 - RNA, 22 nt, Homo sapiens
aauaaagucugaagugugcuua

SEQ ID NO: 18181 - RNA, 22 nt, Homo sapiens
ugagacaucugagauuuuaagc

SEQ ID NO: 18182 - RNA, 22 nt, Homo sapiens
gcugucaugagcaacacaugaa

SEQ ID NO: 18183 - RNA, 20 nt, Homo sapiens
uuuaagacaugcugaauuga

SEQ ID NO: 18184 - RNA, 22 nt, Homo sapiens
uuaauccugccuuauuucagua

SEQ ID NO: 18185 - RNA, 22 nt, Homo sapiens
aauacuuccaaaucuagucauu

SEQ ID NO: 18186 - RNA, 22 nt, Homo sapiens
ucacugcacuccagccuuuaug

SEQ ID NO: 18187 - RNA, 18 nt, Homo sapiens
ucaagcaauugucaugcc

SEQ ID NO: 18188 - RNA, 22 nt, Homo sapiens
ugagcuguuugaagaagcauuu

SEQ ID NO: 18189 - RNA, 21 nt, Homo sapiens
aguucacauggcuccuguguu

SEQ ID NO: 18190 - RNA, 22 nt, Homo sapiens
cauugcauuuucuuuguaccuu

SEQ ID NO: 18191 - RNA, 22 nt, Homo sapiens
uggggugugagggagaaagaaa

SEQ ID NO: 18192 - RNA, 22 nt, Homo sapiens
uaucauagucacuuccaguuug

SEQ ID NO: 18193 - RNA, 22 nt, Homo sapiens
ccucauggagaacaucugcuag

SEQ ID NO: 18194 - RNA, 22 nt, Homo sapiens
cuccauuuggaacagauguccu

SEQ ID NO: 18195 - RNA, 22 nt, Homo sapiens
gcucaugggcagugugauuguu

SEQ ID NO: 18196 - RNA, 22 nt, Homo sapiens
gugggcaaagcuaguguguaga

SEQ ID NO: 18197 - RNA, 22 nt, Homo sapiens
guaguaccauuaggauauuucu

SEQ ID NO: 18198 - RNA, 22 nt, Homo sapiens
gugcacaaugugcagguuuguu

SEQ ID NO: 18199 - RNA, 22 nt, Homo sapiens
gugcacaacgugcaggcuuguu

SEQ ID NO: 18200 - RNA, 22 nt, Homo sapiens
ggggucauuaaauuccgcuggu

SEQ ID NO: 18201 - RNA, 22 nt, Homo sapiens
cuucaaguguggccaccugacc

SEQ ID NO: 18202 - RNA, 22 nt, Homo sapiens
gagaacaguguuguauuuuuuc

SEQ ID NO: 18203 - RNA, 22 nt, Homo sapiens
ucuuugauuuuguuacuaagac

SEQ ID NO: 18204 - RNA, 23 nt, Homo sapiens
aguggucuccugggcccagcugu

SEQ ID NO: 18205 - RNA, 22 nt, Homo sapiens
uguaugaguuguuuauaaauuu

SEQ ID NO: 18206 - RNA, 22 nt, Homo sapiens
uucucuggucagaggggagguu

SEQ ID NO: 18207 - RNA, 22 nt, Homo sapiens
uaagggacauguguugccuaag

SEQ ID NO: 18208 - RNA, 22 nt, Homo sapiens
auacaugugugagcgaagaugu

SEQ ID NO: 18209 - RNA, 22 nt, Homo sapiens
guagcagcuacuaaguugcugu

SEQ ID NO: 18210 - RNA, 22 nt, Homo sapiens
cauggcauuugcagaguugaaa

SEQ ID NO: 18211 - RNA, 22 nt, Homo sapiens
guguccucgaguacacaucagg

SEQ ID NO: 18212 - RNA, 22 nt, Homo sapiens
ccaucacaggccucagugggaa

SEQ ID NO: 18213 - RNA, 19 nt, Homo sapiens
acugagcuaccugggggca

SEQ ID NO: 18214 - RNA, 22 nt, Homo sapiens
acuagagaugcauuuguaguuu

SEQ ID NO: 18215 - RNA, 22 nt, Homo sapiens
ugcaagacacuguccugggcau

SEQ ID NO: 18216 - RNA, 22 nt, Homo sapiens
guccaaagugggagaggugggg

SEQ ID NO: 18217 - RNA, 22 nt, Homo sapiens
uuaaguaaucagagaagagaac

SEQ ID NO: 18218 - RNA, 22 nt, Homo sapiens
uugagacggagucucacucugu

SEQ ID NO: 18219 - RNA, 22 nt, Homo sapiens
gauuggcauugcugcaccugag

SEQ ID NO: 18220 - RNA, 22 nt, Homo sapiens
uccugagaauagaguugcaugu

SEQ ID NO: 18221 - RNA, 22 nt, Homo sapiens
agcugccagucuuguaaggccu

SEQ ID NO: 18222 - RNA, 22 nt, Homo sapiens
ugacaucugcuugugcccagga

SEQ ID NO: 18223 - RNA, 22 nt, Homo sapiens
guucaucagggauauuggccug

SEQ ID NO: 18224 - RNA, 22 nt, Homo sapiens
gguggcuuuuugugauggcuga

SEQ ID NO: 18225 - RNA, 22 nt, Homo sapiens
uuggaccacuugauuucugguc

SEQ ID NO: 18226 - RNA, 23 nt, Homo sapiens
caugaacuaguuugcagccauga

SEQ ID NO: 18227 - RNA, 20 nt, Homo sapiens
uagccggguguugugucaug

SEQ ID NO: 18228 - RNA, 17 nt, Homo sapiens
auaaacucaucauuuuu

SEQ ID NO: 18229 - RNA, 22 nt, Homo sapiens
uacuguguaguuagaccucaga

SEQ ID NO: 18230 - RNA, 22 nt, Homo sapiens
ucauguguugcacugaggaccu

SEQ ID NO: 18231 - RNA, 22 nt, Homo sapiens
uaaugcacucgaaucauggaau

SEQ ID NO: 18232 - RNA, 15 nt, Homo sapiens
aaacccugucucaag

SEQ ID NO: 18233 - RNA, 21 nt, Homo sapiens
uccagcuuugagaguuguggu

SEQ ID NO: 18234 - RNA, 22 nt, Homo sapiens
cugagauuuuuagauccuggcg

SEQ ID NO: 18235 - RNA, 22 nt, Homo sapiens
uucaauuaauauuauacucuca

SEQ ID NO: 18236 - RNA, 22 nt, Homo sapiens
guccaagacuaggaguuggcag

SEQ ID NO: 18237 - RNA, 22 nt, Homo sapiens
ucacugaggucugagcuuuaug

SEQ ID NO: 18238 - RNA, 22 nt, Homo sapiens
uuguguuuuuaguagggaaggg

SEQ ID NO: 18239 - RNA, 22 nt, Homo sapiens
uugauauauugcaugggcuacu

SEQ ID NO: 18240 - RNA, 22 nt, Homo sapiens
uugauauguggaauauuuaucu

SEQ ID NO: 18241 - RNA, 23 nt, Homo sapiens
uugcauugcccuccauaguacuc

SEQ ID NO: 18242 - RNA, 22 nt, Homo sapiens
uugcauuagugugguacauuug

SEQ ID NO: 18243 - RNA, 22 nt, Homo sapiens
uuaguaguuugauaggaauagc

SEQ ID NO: 18244 - RNA, 23 nt, Homo sapiens
uucugccacugaaaaugccucag

SEQ ID NO: 18245 - RNA, 22 nt, Homo sapiens
uuccuguagcgauuuuaguaau

SEQ ID NO: 18246 - RNA, 22 nt, Homo sapiens
uggauugcaaaaucuuuuugag

SEQ ID NO: 18247 - RNA, 22 nt, Homo sapiens
guguaguuugagguaugggggc

SEQ ID NO: 18248 - RNA, 22 nt, Homo sapiens
guguauauccuauuaguucugu

SEQ ID NO: 18249 - RNA, 22 nt, Homo sapiens
guuaugcagcaauugauaaucu

SEQ ID NO: 18250 - RNA, 22 nt, Homo sapiens
guuaugcagcuuagaaaaugaa

SEQ ID NO: 18251 - RNA, 22 nt, Homo sapiens
gugugguauuauaacuagguau

SEQ ID NO: 18252 - RNA, 22 nt, Homo sapiens
guguguaaauggcagugagcuc

SEQ ID NO: 18253 - RNA, 22 nt, Homo sapiens
gcccuguaguauaguuugaagu

SEQ ID NO: 18254 - RNA, 22 nt, Homo sapiens
guagcagcaauuuacuccauac

SEQ ID NO: 18255 - RNA, 22 nt, Homo sapiens
uauaguguuuucaaaaguaugu

SEQ ID NO: 18256 - RNA, 22 nt, Homo sapiens
uauaugcacucagguguaugug

SEQ ID NO: 18257 - RNA, 19 nt, Homo sapiens
uaugcaacuuauagugcug

SEQ ID NO: 18258 - RNA, 22 nt, Homo sapiens
uaugcacuaggcacuguguuug

SEQ ID NO: 18259 - RNA, 22 nt, Homo sapiens
guucucacuggugcugguaagu

SEQ ID NO: 18260 - RNA, 22 nt, Homo sapiens
agcugcauuuacuuuugcacaa

SEQ ID NO: 18261 - RNA, 22 nt, Homo sapiens
agguacuuucccaaccauacug

SEQ ID NO: 18262 - RNA, 22 nt, Homo sapiens
acugccuaaugacuuauguuuu

SEQ ID NO: 18263 - RNA, 22 nt, Homo sapiens
agccuguagugagcugugauug

SEQ ID NO: 18264 - RNA, 22 nt, Homo sapiens
acugcacuccagccugugcgua

SEQ ID NO: 18265 - RNA, 19 nt, Homo sapiens
accuguagaaaguacaaca

SEQ ID NO: 18266 - RNA, 22 nt, Homo sapiens
accuguagcagacuuaauauuu

SEQ ID NO: 18267 - RNA, 22 nt, Homo sapiens
auaauguuugauugagcagaua

SEQ ID NO: 18268 - RNA, 22 nt, Homo sapiens
auauuagcacuaaugucacgau

SEQ ID NO: 18269 - RNA, 22 nt, Homo sapiens
gauuuuuggggaagccucuuau

SEQ ID NO: 18270 - RNA, 18 nt, Homo sapiens
cuaguguuucuugaauca

SEQ ID NO: 18271 - RNA, 22 nt, Homo sapiens
auugcauuuucagguuggucug

SEQ ID NO: 18272 - RNA, 22 nt, Homo sapiens
uuauacacugugggaguguaaa

SEQ ID NO: 18273 - RNA, 22 nt, Homo sapiens
uuauggcuuugcgguguuagca

SEQ ID NO: 18274 - RNA, 22 nt, Homo sapiens
uuagcagcaugagaauggacua

SEQ ID NO: 18275 - RNA, 23 nt, Homo sapiens
uuuguaguagcaugauuuauaau

SEQ ID NO: 18276 - RNA, 21 nt, Homo sapiens
aagaaagcuggacuugccgcu

SEQ ID NO: 18277 - RNA, 22 nt, Homo sapiens
uuguuauguaucucaagauaaa

SEQ ID NO: 18278 - RNA, 22 nt, Homo sapiens
uuguuauguuggucaguaaugu

SEQ ID NO: 18279 - RNA, 22 nt, Homo sapiens
uuguugcacugcuuuccuggcc

SEQ ID NO: 18280 - RNA, 22 nt, Homo sapiens
uugauaugacuaucuuuuaugu

SEQ ID NO: 18281 - RNA, 22 nt, Homo sapiens
uugauauguuguuagauucagu

SEQ ID NO: 18282 - RNA, 22 nt, Homo sapiens
uguauauguuuguacauauguc

SEQ ID NO: 18283 - RNA, 22 nt, Homo sapiens
ugcaggauguucaguaauuucc

SEQ ID NO: 18284 - RNA, 22 nt, Homo sapiens
ugagaagcauaccagugucugu

SEQ ID NO: 18285 - RNA, 22 nt, Homo sapiens
uagugguaguuauggauuugcu

SEQ ID NO: 18286 - RNA, 22 nt, Homo sapiens
uauaugcaacauaguguaugug

SEQ ID NO: 18287 - RNA, 23 nt, Homo sapiens
uauaugugucuaggagcuauggu

SEQ ID NO: 18288 - RNA, 22 nt, Homo sapiens
uaccuguagcucuucuaggcug

SEQ ID NO: 18289 - RNA, 22 nt, Homo sapiens
uauugcacgccagccugagcaa

SEQ ID NO: 18290 - RNA, 22 nt, Homo sapiens
ucaaccggugagagcuuccucc

SEQ ID NO: 18291 - RNA, 18 nt, Homo sapiens
ucacauggccgagagaga

SEQ ID NO: 18292 - RNA, 22 nt, Homo sapiens
gugugguaggauugguuacuca

SEQ ID NO: 18293 - RNA, 19 nt, Homo sapiens
gugguauuaccuuuugauu

SEQ ID NO: 18294 - RNA, 22 nt, Homo sapiens
gugauauguuaggaucuaaguc

SEQ ID NO: 18295 - RNA, 22 nt, Homo sapiens
guauaugccucaguuauagcac

SEQ ID NO: 18296 - RNA, 22 nt, Homo sapiens
caugcacugagagggucucggc

SEQ ID NO: 18297 - RNA, 22 nt, Homo sapiens
auugcacucuagccuuggcgac

SEQ ID NO: 18298 - RNA, 22 nt, Homo sapiens
aaugcacuccagccugggcgac

SEQ ID NO: 18299 - RNA, 22 nt, Homo sapiens
auauguauuuuaacguguaagg

SEQ ID NO: 18300 - RNA, 22 nt, Homo sapiens
augagaaugauucuguuauggu

SEQ ID NO: 18301 - RNA, 22 nt, Homo sapiens
auggcacuaaugggaguuuacu

SEQ ID NO: 18302 - RNA, 22 nt, Homo sapiens
agccuucauucugacaguagga

SEQ ID NO: 18303 - RNA, 22 nt, Homo sapiens
agcccuuagauggcuccuucca

SEQ ID NO: 18304 - RNA, 22 nt, Homo sapiens
agcuguuguuuuaagauacuaa

SEQ ID NO: 18305 - RNA, 22 nt, Homo sapiens
aguguuuuuaacaagaaagggu

SEQ ID NO: 18306 - RNA, 22 nt, Homo sapiens
acugcacuccagccuguugaca

SEQ ID NO: 18307 - RNA, 22 nt, Homo sapiens
acugcacuccagccuuagugac

SEQ ID NO: 18308 - RNA, 22 nt, Homo sapiens
acugcacuccagccugcuggau

SEQ ID NO: 18309 - RNA, 22 nt, Homo sapiens
acugcacuccagccugcugggu

SEQ ID NO: 18310 - RNA, 22 nt, Homo sapiens
acugcacuccagccugcuggca

SEQ ID NO: 18311 - RNA, 19 nt, Homo sapiens
uugcaguauccuauauguu

SEQ ID NO: 18312 - RNA, 20 nt, Homo sapiens
uuagcagcaugauuuauaau

SEQ ID NO: 18313 - RNA, 21 nt, Homo sapiens
uuauaguggcaugauuuauaa

SEQ ID NO: 18314 - RNA, 22 nt, Homo sapiens
uuaugacauugacaguuuuuag

SEQ ID NO: 18315 - RNA, 22 nt, Homo sapiens
uuaugcagcaaagugcuugaaa

SEQ ID NO: 18316 - RNA, 22 nt, Homo sapiens
uguaauguuugguagguuaggu

SEQ ID NO: 18317 - RNA, 22 nt, Homo sapiens
cugcccuuucuauaugauguaa

SEQ ID NO: 18318 - RNA, 22 nt, Homo sapiens
cugccugagaaaauggagggca

SEQ ID NO: 18319 - RNA, 22 nt, Homo sapiens
cugcaguaaccacuguaggugu

SEQ ID NO: 18320 - RNA, 22 nt, Homo sapiens
cuguaguuagcagaugaugaau

SEQ ID NO: 18321 - RNA, 22 nt, Homo sapiens
auuaauguaauuaguaaaguug

SEQ ID NO: 18322 - RNA, 22 nt, Homo sapiens
auguguauuaccucgauuguga

SEQ ID NO: 18323 - RNA, 22 nt, Homo sapiens
agagagcuuuugguugcccuaa

SEQ ID NO: 18324 - RNA, 22 nt, Homo sapiens
acugcauaaauauguguaauau

SEQ ID NO: 18325 - RNA, 22 nt, Homo sapiens
acugcacucuagcuugggugac

SEQ ID NO: 18326 - RNA, 21 nt, Homo sapiens
uuuugcacacuaugcagcuuu

SEQ ID NO: 18327 - RNA, 22 nt, Homo sapiens
aucaccuggaggugaucacuug

SEQ ID NO: 18328 - RNA, 22 nt, Homo sapiens
auaggagcagaaaccguauuuu

SEQ ID NO: 18329 - RNA, 22 nt, Homo sapiens
auaugcacaguggaguacuauu

SEQ ID NO: 18330 - RNA, 22 nt, Homo sapiens
ugcauugcacuugcaugagaua

SEQ ID NO: 18331 - RNA, 16 nt, Homo sapiens
ugccuuauuccagcuc

SEQ ID NO: 18332 - RNA, 22 nt, Homo sapiens
ucucugauuaaacaagauagug

SEQ ID NO: 18333 - RNA, 22 nt, Homo sapiens
uauugcacuuuuccauaggagu

SEQ ID NO: 18334 - RNA, 22 nt, Homo sapiens
uagugguaguagcaguaauauu

SEQ ID NO: 18335 - RNA, 22 nt, Homo sapiens
uauagcacaucuguguguacau

SEQ ID NO: 18336 - RNA, 22 nt, Homo sapiens
gcuguaguugaggauuuuaaga

SEQ ID NO: 18337 - RNA, 22 nt, Homo sapiens
auguagugugauuuucacuaga

SEQ ID NO: 18338 - RNA, 22 nt, Homo sapiens
augcacuguuguuauuggauaa

SEQ ID NO: 18339 - RNA, 22 nt, Homo sapiens
augcagcugaggguaguggagc

SEQ ID NO: 18340 - RNA, 22 nt, Homo sapiens
auauaugcacacgugugcauau

SEQ ID NO: 18341 - RNA, 21 nt, Homo sapiens
agcagcuuugguugaagcaga

SEQ ID NO: 18342 - RNA, 22 nt, Homo sapiens
aaauugcuuuugaagacuuagu

SEQ ID NO: 18343 - RNA, 22 nt, Homo sapiens
acugcacuccaucuuagguggc

SEQ ID NO: 18344 - RNA, 22 nt, Homo sapiens
acugcacuccagcuuuggugac

SEQ ID NO: 18345 - RNA, 22 nt, Homo sapiens
acugcacuccagcuuuggguga

SEQ ID NO: 18346 - RNA, 22 nt, Homo sapiens
uuaugccuauugugccuuggau

SEQ ID NO: 18347 - RNA, 22 nt, Homo sapiens
uguguaauaccuuugacuauau

SEQ ID NO: 18348 - RNA, 22 nt, Homo sapiens
uugcaguagucugaaagcaaua

SEQ ID NO: 18349 - RNA, 22 nt, Homo sapiens
uugcaggugguuuaugcaagac

SEQ ID NO: 18350 - RNA, 22 nt, Homo sapiens
uuugugcaaacuaggauugcga

SEQ ID NO: 18351 - RNA, 22 nt, Homo sapiens
uuuaugcgucuguaauuucuuu

SEQ ID NO: 18352 - RNA, 22 nt, Homo sapiens
uuguaguagcauuauuuauaau

SEQ ID NO: 18353 - RNA, 19 nt, Homo sapiens
ucuguaguuagggcuacag

SEQ ID NO: 18354 - RNA, 22 nt, Homo sapiens
ugccuaguguguugagaguuuu

SEQ ID NO: 18355 - RNA, 22 nt, Homo sapiens
ugccuaguggccuuaugaguau

SEQ ID NO: 18356 - RNA, 19 nt, Homo sapiens
ugaguauauuguauucauu

SEQ ID NO: 18357 - RNA, 22 nt, Homo sapiens
gaauacuguccaagagugaugg

SEQ ID NO: 18358 - RNA, 23 nt, Homo sapiens
auugcagucuugaacuccugggc

SEQ ID NO: 18359 - RNA, 22 nt, Homo sapiens
uaugcacuauggaaguagcuca

SEQ ID NO: 18360 - RNA, 22 nt, Homo sapiens
uauuagugucuuuugguuagaa

SEQ ID NO: 18361 - RNA, 20 nt, Homo sapiens
uauucacucuccagucuugc

SEQ ID NO: 18362 - RNA, 22 nt, Homo sapiens
uaguuguugcagguaggaugua

SEQ ID NO: 18363 - RNA, 21 nt, Homo sapiens
uauagcagcacgauuuauaau

SEQ ID NO: 18364 - RNA, 22 nt, Homo sapiens
uauagcacugagaauguaauuc

SEQ ID NO: 18365 - RNA, 21 nt, Homo sapiens
uauaguaguaugauuuacaau

SEQ ID NO: 18366 - RNA, 22 nt, Homo sapiens
uacugcacuccagccucgguga

SEQ ID NO: 18367 - RNA, 22 nt, Homo sapiens
guguaauaaucguggacuaugu

SEQ ID NO: 18368 - RNA, 22 nt, Homo sapiens
guguaauacacacauauaugca

SEQ ID NO: 18369 - RNA, 21 nt, Homo sapiens
gggcaaaucuuuauccuaagc

SEQ ID NO: 18370 - RNA, 22 nt, Homo sapiens
gcuaaaugcaugaggcgaugug

SEQ ID NO: 18371 - RNA, 20 nt, Homo sapiens
gcaaauggaucccacaagcc

SEQ ID NO: 18372 - RNA, 20 nt, Homo sapiens
acaaaugcauucugugacau

SEQ ID NO: 18373 - RNA, 22 nt, Homo sapiens
aaaugcugucugugagccucau

SEQ ID NO: 18374 - RNA, 17 nt, Homo sapiens
agcagcccauaucccca

SEQ ID NO: 18375 - RNA, 22 nt, Homo sapiens
augaggcaggaaaggcguaucu

SEQ ID NO: 18376 - RNA, 22 nt, Homo sapiens
aaaugcagauuccuaggcccca

SEQ ID NO: 18377 - RNA, 22 nt, Homo sapiens
aaaugcagcacucaagugggaa

SEQ ID NO: 18378 - RNA, 22 nt, Homo sapiens
uaggggcacacuucgguuagca

SEQ ID NO: 18379 - RNA, 22 nt, Homo sapiens
ucugggguuuccacuuuuacuu

SEQ ID NO: 18380 - RNA, 22 nt, Homo sapiens
ugcaaauguuaguaacaccacu

SEQ ID NO: 18381 - RNA, 22 nt, Homo sapiens
caaagugcugaaagaggccagg

SEQ ID NO: 18382 - RNA, 22 nt, Homo sapiens
cauaaugcuaagagcugccccu

SEQ ID NO: 18383 - RNA, 22 nt, Homo sapiens
cuuggguugauugauaaugcca

SEQ ID NO: 18384 - RNA, 20 nt, Homo sapiens
cugcaaaugcugcugcugau

SEQ ID NO: 18385 - RNA, 22 nt, Homo sapiens
gcaagauguuaccauuagggaa

SEQ ID NO: 18386 - RNA, 22 nt, Homo sapiens
uuaggcucuuugaggugcccag

SEQ ID NO: 18387 - RNA, 22 nt, Homo sapiens
uugcggcaguacagcccaggua

SEQ ID NO: 18388 - RNA, 23 nt, Homo sapiens
agcaaaugcucuagcacuccaac

SEQ ID NO: 18389 - RNA, 22 nt, Homo sapiens
aaaugcaguugguggggauaug

SEQ ID NO: 18390 - RNA, 22 nt, Homo sapiens
aaaugcuguuccaggaccuauc

SEQ ID NO: 18391 - RNA, 22 nt, Homo sapiens
cuaaaugcacugucaaaggaag

SEQ ID NO: 18392 - RNA, 22 nt, Homo sapiens
gcacaaugccugacgaguccug

SEQ ID NO: 18393 - RNA, 22 nt, Homo sapiens
gaguuagguugucaaugucuua

SEQ ID NO: 18394 - RNA, 22 nt, Homo sapiens
gcaagaugagagcccgggcagu

SEQ ID NO: 18395 - RNA, 22 nt, Homo sapiens
gaccaaagaggcaggcauuaga

SEQ ID NO: 18396 - RNA, 22 nt, Homo sapiens
guauaggcuuucaccacgccau

SEQ ID NO: 18397 - RNA, 22 nt, Homo sapiens
ggcagcacaauuuucugaugga

SEQ ID NO: 18398 - RNA, 22 nt, Homo sapiens
ucaaaugcacguagagaaaaua

SEQ ID NO: 18399 - RNA, 17 nt, Homo sapiens
ucaaaugcucccaguga

SEQ ID NO: 18400 - RNA, 22 nt, Homo sapiens
ucugggguuagucaaagguaug

SEQ ID NO: 18401 - RNA, 22 nt, Homo sapiens
ugcaaaugucaaggguuagugu

SEQ ID NO: 18402 - RNA, 22 nt, Homo sapiens
ugcaaauguuaggugucauuau

SEQ ID NO: 18403 - RNA, 22 nt, Homo sapiens
ugcaaauguuauuuugguuucu

SEQ ID NO: 18404 - RNA, 22 nt, Homo sapiens
ccugguguuuugauggucgggu

SEQ ID NO: 18405 - RNA, 22 nt, Homo sapiens
cagcccuacacagacugacuca

SEQ ID NO: 18406 - RNA, 22 nt, Homo sapiens
gcaaaugcuacaccauuuugua

SEQ ID NO: 18407 - RNA, 22 nt, Homo sapiens
gcaaaugcuaugccauuuuaua

SEQ ID NO: 18408 - RNA, 17 nt, Homo sapiens
augggguuguagcccca

SEQ ID NO: 18409 - RNA, 22 nt, Homo sapiens
ucaaaugcucuuugcagagagg

SEQ ID NO: 18410 - RNA, 22 nt, Homo sapiens
ggcaaaugaagauggagaggcu

SEQ ID NO: 18411 - RNA, 22 nt, Homo sapiens
guuagugcuuauuaaauaguau

SEQ ID NO: 18412 - RNA, 22 nt, Homo sapiens
guggcagcacauauagguuguu

SEQ ID NO: 18413 - RNA, 22 nt, Homo sapiens
guuauauguuuggaaugaggaa

SEQ ID NO: 18414 - RNA, 22 nt, Homo sapiens
gugauaguucuuacuccaaagu

SEQ ID NO: 18415 - RNA, 22 nt, Homo sapiens
ggauacauuuuuccuccucuuc

SEQ ID NO: 18416 - RNA, 22 nt, Homo sapiens
ggauuagagauguuauuaagag

SEQ ID NO: 18417 - RNA, 22 nt, Homo sapiens
ggcaguuuggcaguuucauaaa

SEQ ID NO: 18418 - RNA, 22 nt, Homo sapiens
ggugucuuguuuaauacucauu

SEQ ID NO: 18419 - RNA, 19 nt, Homo sapiens
uagaugucuuugcauagau

SEQ ID NO: 18420 - RNA, 22 nt, Homo sapiens
ugagcuaagugccaauauuaau

SEQ ID NO: 18421 - RNA, 22 nt, Homo sapiens
ugagcagagggagaaguaaauu

SEQ ID NO: 18422 - RNA, 22 nt, Homo sapiens
ugagcaagaucuuuauaauuag

SEQ ID NO: 18423 - RNA, 19 nt, Homo sapiens
ugacuauagccugaucagu

SEQ ID NO: 18424 - RNA, 18 nt, Homo sapiens
ugaauacagcguugggaa

SEQ ID NO: 18425 - RNA, 22 nt, Homo sapiens
ucuagaugaaguauaaaguagu

SEQ ID NO: 18426 - RNA, 20 nt, Homo sapiens
ucaaggcacgaauaaaaguu

SEQ ID NO: 18427 - RNA, 22 nt, Homo sapiens
ucagaugaucugguaagaacuu

SEQ ID NO: 18428 - RNA, 22 nt, Homo sapiens
uccccgaggcuggagugcagug

SEQ ID NO: 18429 - RNA, 19 nt, Homo sapiens
uccccgggucuagugcagc

SEQ ID NO: 18430 - RNA, 22 nt, Homo sapiens
auauaugcuaagugcuaauaaa

SEQ ID NO: 18431 - RNA, 22 nt, Homo sapiens
auagcagaagaagggacaauuc

SEQ ID NO: 18432 - RNA, 22 nt, Homo sapiens
aucacauggccagguaguaauc

SEQ ID NO: 18433 - RNA, 21 nt, Homo sapiens
aggucaugaagauguucuaau

SEQ ID NO: 18434 - RNA, 21 nt, Homo sapiens
acccucuaguuuucaacaggc

SEQ ID NO: 18435 - RNA, 22 nt, Homo sapiens
aaggagcuaagagaucauacau

SEQ ID NO: 18436 - RNA, 22 nt, Homo sapiens
aaggcgguguggauccuacagc

SEQ ID NO: 18437 - RNA, 22 nt, Homo sapiens
acacuuucuagacaagggaaua

SEQ ID NO: 18438 - RNA, 22 nt, Homo sapiens
aggagcuuuggggaaaacagau

SEQ ID NO: 18439 - RNA, 20 nt, Homo sapiens
gcaaaguuuagcucccacua

SEQ ID NO: 18440 - RNA, 22 nt, Homo sapiens
gauaagagaugauuuugccaug

SEQ ID NO: 18441 - RNA, 22 nt, Homo sapiens
gaugacuaagaauuuuauaauu

SEQ ID NO: 18442 - RNA, 22 nt, Homo sapiens
gacuagagcugaucauguuacu

SEQ ID NO: 18443 - RNA, 22 nt, Homo sapiens
cuuccauaguauuuuuacaaaa

SEQ ID NO: 18444 - RNA, 22 nt, Homo sapiens
gaaucacagauuaugaguaucu

SEQ ID NO: 18445 - RNA, 22 nt, Homo sapiens
gaaucacaguuauuagagcagc

SEQ ID NO: 18446 - RNA, 22 nt, Homo sapiens
auuauaugucaucacagacacc

SEQ ID NO: 18447 - RNA, 22 nt, Homo sapiens
uucucagugaaguuuagaacau

SEQ ID NO: 18448 - RNA, 22 nt, Homo sapiens
uucaauacuguugauccuuaug

SEQ ID NO: 18449 - RNA, 23 nt, Homo sapiens
uuaagcaacggcugcuuuucaga

SEQ ID NO: 18450 - RNA, 22 nt, Homo sapiens
uugauauggcugcuuaccauaa

SEQ ID NO: 18451 - RNA, 22 nt, Homo sapiens
uugauaguccuguaucuauuuu

SEQ ID NO: 18452 - RNA, 22 nt, Homo sapiens
ucuaaguaguagcuggucagaa

SEQ ID NO: 18453 - RNA, 22 nt, Homo sapiens
ucuacccugugagggacacagu

SEQ ID NO: 18454 - RNA, 22 nt, Homo sapiens
ucagaugaugucccuguucuaa

SEQ ID NO: 18455 - RNA, 22 nt, Homo sapiens
ugacuaaaacugaguuucauua

SEQ ID NO: 18456 - RNA, 22 nt, Homo sapiens
ugacuauaguaaucacuucaca

SEQ ID NO: 18457 - RNA, 23 nt, Homo sapiens
ugacuuaggccucaacuaugacu

SEQ ID NO: 18458 - RNA, 22 nt, Homo sapiens
uugauauguguauagcaugugg

SEQ ID NO: 18459 - RNA, 22 nt, Homo sapiens
uuguaagaaucuagcucuuuau

SEQ ID NO: 18460 - RNA, 23 nt, Homo sapiens
uuguccccuccaaagcucauguu

SEQ ID NO: 18461 - RNA, 22 nt, Homo sapiens
aagcuaccauuuguauauaaag

SEQ ID NO: 18462 - RNA, 22 nt, Homo sapiens
uuaggcucuuugaggugcccag

SEQ ID NO: 18463 - RNA, 22 nt, Homo sapiens
uguugcauuugucaaggucaag

SEQ ID NO: 18464 - RNA, 21 nt, Homo sapiens
uucuaaguaaauguuggacau

SEQ ID NO: 18465 - RNA, 22 nt, Homo sapiens
ucaagcaauucuccucucagcc

SEQ ID NO: 18466 - RNA, 21 nt, Homo sapiens
ucaaggaguauacguaugcca

SEQ ID NO: 18467 - RNA, 22 nt, Homo sapiens
uagaagcacuaucccuccuagu

SEQ ID NO: 18468 - RNA, 22 nt, Homo sapiens
uaacccuuacaacuacacucgu

SEQ ID NO: 18469 - RNA, 20 nt, Homo sapiens
uagucaugagauucuccaag

SEQ ID NO: 18470 - RNA, 22 nt, Homo sapiens
uagguacuuuacauguuaucuc

SEQ ID NO: 18471 - RNA, 22 nt, Homo sapiens
gugacauuauuucagcuacaug

SEQ ID NO: 18472 - RNA, 20 nt, Homo sapiens
guguaagagcaagcuuccua

SEQ ID NO: 18473 - RNA, 22 nt, Homo sapiens
uaacauuguugauuauacuaag

SEQ ID NO: 18474 - RNA, 22 nt, Homo sapiens
guugacuaggagcuacuacuac

SEQ ID NO: 18475 - RNA, 22 nt, Homo sapiens
gaacacaucuuugguuagagga

SEQ ID NO: 18476 - RNA, 22 nt, Homo sapiens
ggauacaucuggacagccgaau

SEQ ID NO: 18477 - RNA, 22 nt, Homo sapiens
ggcaaaaucgcaauuacuuuug

SEQ ID NO: 18478 - RNA, 22 nt, Homo sapiens
ggcaaaauauugucugguauag

SEQ ID NO: 18479 - RNA, 22 nt, Homo sapiens
cuaagggaggaagcugugcagg

SEQ ID NO: 18480 - RNA, 22 nt, Homo sapiens
cuacaguuauguuuuaaaugug

SEQ ID NO: 18481 - RNA, 22 nt, Homo sapiens
aagacuguaauccaucuugagu

SEQ ID NO: 18482 - RNA, 22 nt, Homo sapiens
aaaguucuguugauagugcuga

SEQ ID NO: 18483 - RNA, 22 nt, Homo sapiens
aaaggauucuaauggaaaugcu

SEQ ID NO: 18484 - RNA, 22 nt, Homo sapiens
aaugacuaagaugguacauuuu

SEQ ID NO: 18485 - RNA, 20 nt, Homo sapiens
aaucuacuugcccauuuagc

SEQ ID NO: 18486 - RNA, 22 nt, Homo sapiens
aagcuguguguaagcucucaca

SEQ ID NO: 18487 - RNA, 22 nt, Homo sapiens
agauacauuggauaaugguggg

SEQ ID NO: 18488 - RNA, 21 nt, Homo sapiens
agagucaucucuaucuguacc

SEQ ID NO: 18489 - RNA, 22 nt, Homo sapiens
agauacaucuaugugucugugu

SEQ ID NO: 18490 - RNA, 22 nt, Homo sapiens
aggagguugguaccaucuguuu

SEQ ID NO: 18491 - RNA, 22 nt, Homo sapiens
aggcaagugggagacagcauuu

SEQ ID NO: 18492 - RNA, 22 nt, Homo sapiens
agccaguuuggcuaauuuuggc

SEQ ID NO: 18493 - RNA, 20 nt, Homo sapiens
augacuagaggacaugguaa

SEQ ID NO: 18494 - RNA, 22 nt, Homo sapiens
auccagaugggcuuaauguaau

SEQ ID NO: 18495 - RNA, 22 nt, Homo sapiens
uugcauagaggugaguauagua

SEQ ID NO: 18496 - RNA, 22 nt, Homo sapiens
uuguccacugcuagccucugca

SEQ ID NO: 18497 - RNA, 22 nt, Homo sapiens
uuguccccacccaaaugucauc

SEQ ID NO: 18498 - RNA, 22 nt, Homo sapiens
uugagcaaaacauuaauauuag

SEQ ID NO: 18499 - RNA, 18 nt, Homo sapiens
uucauaguagcaugauuu

SEQ ID NO: 18500 - RNA, 22 nt, Homo sapiens
uucauagucacauucgaugucu

SEQ ID NO: 18501 - RNA, 22 nt, Homo sapiens
uucauaguaacaguaacuaugg

SEQ ID NO: 18502 - RNA, 22 nt, Homo sapiens
gagaacauuuaagccacucagg

SEQ ID NO: 18503 - RNA, 22 nt, Homo sapiens
cugauguagguggucugugauc

SEQ ID NO: 18504 - RNA, 22 nt, Homo sapiens
cuaaaggaaucugagccccuga

SEQ ID NO: 18505 - RNA, 22 nt, Homo sapiens
ccuaaguaauggcaguuuuugc

SEQ ID NO: 18506 - RNA, 22 nt, Homo sapiens
caaaggauucauuuccaggagu

SEQ ID NO: 18507 - RNA, 22 nt, Homo sapiens
agugacuagaauaugaauuuua

SEQ ID NO: 18508 - RNA, 22 nt, Homo sapiens
aucucagagaaaauuacuaaga

SEQ ID NO: 18509 - RNA, 22 nt, Homo sapiens
augacuaaaggguuuauguuga

SEQ ID NO: 18510 - RNA, 19 nt, Homo sapiens
uuuuccccuuucuuaagac

SEQ ID NO: 18511 - RNA, 22 nt, Homo sapiens
agaaacauucucuugccuccuu

SEQ ID NO: 18512 - RNA, 21 nt, Homo sapiens
ugagaugauccugcaugcaug

SEQ ID NO: 18513 - RNA, 22 nt, Homo sapiens
ugagaugaugggauaagagggc

SEQ ID NO: 18514 - RNA, 22 nt, Homo sapiens
ucaaaaucucuuagcugugucu

SEQ ID NO: 18515 - RNA, 22 nt, Homo sapiens
uauucacuguaucauugauggg

SEQ ID NO: 18516 - RNA, 22 nt, Homo sapiens
uaacccuuaguaucuguggguu

SEQ ID NO: 18517 - RNA, 22 nt, Homo sapiens
guuguacuaccucucguauuag

SEQ ID NO: 18518 - RNA, 22 nt, Homo sapiens
uaauacauucaaggugguaguu

SEQ ID NO: 18519 - RNA, 22 nt, Homo sapiens
uaaguuguagaacguuuucuua

SEQ ID NO: 18520 - RNA, 22 nt, Homo sapiens
uacccuuuaguauaaaaucaga

SEQ ID NO: 18521 - RNA, 22 nt, Homo sapiens
gugacuaagauucuuugauaug

SEQ ID NO: 18522 - RNA, 22 nt, Homo sapiens
acuagaugauuauguuccauug

SEQ ID NO: 18523 - RNA, 22 nt, Homo sapiens
acccuuuagguuggaugaggau

SEQ ID NO: 18524 - RNA, 22 nt, Homo sapiens
gaauacuguccaagagugaugg

SEQ ID NO: 18525 - RNA, 22 nt, Homo sapiens
gaacuuucuacauuaccucuuu

SEQ ID NO: 18526 - RNA, 22 nt, Homo sapiens
auuauauguguaugugcauacc

SEQ ID NO: 18527 - RNA, 22 nt, Homo sapiens
cauacaugugcuugucuuaugc

SEQ ID NO: 18528 - RNA, 19 nt, Homo sapiens
cuauugcacauagcugaag

SEQ ID NO: 18529 - RNA, 22 nt, Homo sapiens
uacuacuuucugacaucuuuaa

SEQ ID NO: 18530 - RNA, 22 nt, Homo sapiens
uaauagcucggauaaacaugau

SEQ ID NO: 18531 - RNA, 22 nt, Homo sapiens
uauacaugugccauguuggugu

SEQ ID NO: 18532 - RNA, 22 nt, Homo sapiens
uauacaugugggcaucaggaga

SEQ ID NO: 18533 - RNA, 22 nt, Homo sapiens
uaugcagacauuguuccaacca

SEQ ID NO: 18534 - RNA, 22 nt, Homo sapiens
ugagcagaaagcugcaaggucg

SEQ ID NO: 18535 - RNA, 20 nt, Homo sapiens
ugaugcaaaucuuuaaaagu

SEQ ID NO: 18536 - RNA, 22 nt, Homo sapiens
ugaugacucuguggccccaggc

SEQ ID NO: 18537 - RNA, 22 nt, Homo sapiens
ucauagaucaaguaauaagaca

SEQ ID NO: 18538 - RNA, 22 nt, Homo sapiens
uuugagcaggcuaaucaauaua

SEQ ID NO: 18539 - RNA, 22 nt, Homo sapiens
uuauagcagugcccaacuccug

SEQ ID NO: 18540 - RNA, 22 nt, Homo sapiens
uucacacugggccuacucugug

SEQ ID NO: 18541 - RNA, 22 nt, Homo sapiens
uuccuaguccugagucucugcg

SEQ ID NO: 18542 - RNA, 22 nt, Homo sapiens
uucauaguuuauacugauauuu

SEQ ID NO: 18543 - RNA, 22 nt, Homo sapiens
uucauaguucuuuuagucauua

SEQ ID NO: 18544 - RNA, 18 nt, Homo sapiens
uucauauguugaaccaga

SEQ ID NO: 18545 - RNA, 22 nt, Homo sapiens
ucagcgcauggucgugcggcau

SEQ ID NO: 18546 - RNA, 22 nt, Homo sapiens
ugaugacucuguggccccaggc

SEQ ID NO: 18547 - RNA, 21 nt, Homo sapiens
uggaccccuuccagucaucau

SEQ ID NO: 18548 - RNA, 21 nt, Homo sapiens
uggaccccuuucuuacaccgu

SEQ ID NO: 18549 - RNA, 22 nt, Homo sapiens
uaucacagaggguauccuagag

SEQ ID NO: 18550 - RNA, 22 nt, Homo sapiens
uaucacagguggacugcacacc

SEQ ID NO: 18551 - RNA, 22 nt, Homo sapiens
uaagguuacaaaggacuucaua

SEQ ID NO: 18552 - RNA, 22 nt, Homo sapiens
uacuacuuucugacaucuuuaa

SEQ ID NO: 18553 - RNA, 22 nt, Homo sapiens
uacugcacuccagccugccaac

SEQ ID NO: 18554 - RNA, 22 nt, Homo sapiens
uacugcacuccagccuugccaa

SEQ ID NO: 18555 - RNA, 20 nt, Homo sapiens
uacugcacuccauccugggu

SEQ ID NO: 18556 - RNA, 22 nt, Homo sapiens
uacaucagccugaaagagcucg

SEQ ID NO: 18557 - RNA, 22 nt, Homo sapiens
cuuuagcaauugauuaugccau

SEQ ID NO: 18558 - RNA, 18 nt, Homo sapiens
cuuccuuagucugguuaa

SEQ ID NO: 18559 - RNA, 22 nt, Homo sapiens
gaugauguuacucuuuuuccuu

SEQ ID NO: 18560 - RNA, 22 nt, Homo sapiens
acuacuucuaaguuuuggaaga

SEQ ID NO: 18561 - RNA, 22 nt, Homo sapiens
auggcuuuuuucuugggcacuc

SEQ ID NO: 18562 - RNA, 22 nt, Homo sapiens
auggacuuuuuguucagugucu

SEQ ID NO: 18563 - RNA, 22 nt, Homo sapiens
uaggccuuuuuaugucaauauc

SEQ ID NO: 18564 - RNA, 22 nt, Homo sapiens
ucaguuaaugcugccugcugga

SEQ ID NO: 18565 - RNA, 17 nt, Homo sapiens
aaguggcuuguucacca

SEQ ID NO: 18566 - RNA, 22 nt, Homo sapiens
aauggccuuuuucauuauacug

SEQ ID NO: 18567 - RNA, 22 nt, Homo sapiens
augacauagaagcaauccccua

SEQ ID NO: 18568 - RNA, 22 nt, Homo sapiens
uucuugguugcucacacccauc

SEQ ID NO: 18569 - RNA, 22 nt, Homo sapiens
uuacugcucuuuugucaugagu

SEQ ID NO: 18570 - RNA, 22 nt, Homo sapiens
uuuuuuaguuagcugggcauga

SEQ ID NO: 18571 - RNA, 22 nt, Homo sapiens
auggcaaugcgaugaugacuga

SEQ ID NO: 18572 - RNA, 17 nt, Homo sapiens
accccuaccucagaagc

SEQ ID NO: 18573 - RNA, 22 nt, Homo sapiens
aauggcuucuuauugugguuca

SEQ ID NO: 18574 - RNA, 22 nt, Homo sapiens
aaugacuaagaugguacauuuu

SEQ ID NO: 18575 - RNA, 22 nt, Homo sapiens
aaugaucaauguuugaggugau

SEQ ID NO: 18576 - RNA, 21 nt, Homo sapiens
caauggcacgaucuuggcuca

SEQ ID NO: 18577 - RNA, 19 nt, Homo sapiens
uagaugucuuugcauagau

SEQ ID NO: 18578 - RNA, 22 nt, Homo sapiens
ucacaccauucuucuacuucag

SEQ ID NO: 18579 - RNA, 22 nt, Homo sapiens
uuccuuaguuauuugguccccu

SEQ ID NO: 18580 - RNA, 22 nt, Homo sapiens
uuacuacucucuaugaccaguu

SEQ ID NO: 18581 - RNA, 22 nt, Homo sapiens
uuauuagguuaaccuauagcua

SEQ ID NO: 18582 - RNA, 22 nt, Homo sapiens
uuugccuuugugauauggucua

SEQ ID NO: 18583 - RNA, 20 nt, Homo sapiens
ugacaucagcaauguaauaa

SEQ ID NO: 18584 - RNA, 22 nt, Homo sapiens
ugucuuguagacaauguauagu

SEQ ID NO: 18585 - RNA, 22 nt, Homo sapiens
ugucuuguagacugaaggcuuc

SEQ ID NO: 18586 - RNA, 22 nt, Homo sapiens
uguuauuuuguguuagggcaca

SEQ ID NO: 18587 - RNA, 22 nt, Homo sapiens
ugucuuuguuaguuguccuagu

SEQ ID NO: 18588 - RNA, 22 nt, Homo sapiens
auggucuuuucccuggauuaua

SEQ ID NO: 18589 - RNA, 22 nt, Homo sapiens
ugacuuaugcaacucugaugug

SEQ ID NO: 18590 - RNA, 22 nt, Homo sapiens
ugaggacugagaggcacugugg

SEQ ID NO: 18591 - RNA, 21 nt, Homo sapiens
uggaccccuuccuuacaucau

SEQ ID NO: 18592 - RNA, 22 nt, Homo sapiens
uacuacuuucucuucugggaaa

SEQ ID NO: 18593 - RNA, 22 nt, Homo sapiens
guugcaauugauguaugucuga

SEQ ID NO: 18594 - RNA, 17 nt, Homo sapiens
uauguaguacuuauaaa

SEQ ID NO: 18595 - RNA, 22 nt, Homo sapiens
uauguuaucaaaaagcuaagga

SEQ ID NO: 18596 - RNA, 23 nt, Homo sapiens
ugauaacagcauaugaagauucu

SEQ ID NO: 18597 - RNA, 22 nt, Homo sapiens
aggaauuuaauguaugauaaua

SEQ ID NO: 18598 - RNA, 22 nt, Homo sapiens
acagaccuauuucaaucauuua

SEQ ID NO: 18599 - RNA, 22 nt, Homo sapiens
cagcaaaucauccuauuugagc

SEQ ID NO: 18600 - RNA, 22 nt, Homo sapiens
uguuaagauguguuuuguggcu

SEQ ID NO: 18601 - RNA, 22 nt, Homo sapiens
uuaaggaaagcauuuaauucag

SEQ ID NO: 18602 - RNA, 22 nt, Homo sapiens
uuguuaagaugcagauucugga

SEQ ID NO: 18603 - RNA, 22 nt, Homo sapiens
ucuaagaauucauuuauaagcc

SEQ ID NO: 18604 - RNA, 22 nt, Homo sapiens
aaccuacauucuuaacuguugc

SEQ ID NO: 18605 - RNA, 22 nt, Homo sapiens
aaguaaacauuuuguacaauaa

SEQ ID NO: 18606 - RNA, 22 nt, Homo sapiens
acccagaauucagucuuaggcc

SEQ ID NO: 18607 - RNA, 22 nt, Homo sapiens
uuaaugaacuuuauuuuguaga

SEQ ID NO: 18608 - RNA, 22 nt, Homo sapiens
uucacugagccagacuaagaca

SEQ ID NO: 18609 - RNA, 22 nt, Homo sapiens
auaagaagugaaccagacgucu

SEQ ID NO: 18610 - RNA, 22 nt, Homo sapiens
aauaagcauaguaccugauagg

SEQ ID NO: 18611 - RNA, 22 nt, Homo sapiens
aaguaaacauugagagacaaga

SEQ ID NO: 18612 - RNA, 20 nt, Homo sapiens
gacaaaccuagaugguacag

SEQ ID NO: 18613 - RNA, 22 nt, Homo sapiens
ugaucaaagugcuggaauuaca

SEQ ID NO: 18614 - RNA, 22 nt, Homo sapiens
uaccucagccaaugcccagaag

SEQ ID NO: 18615 - RNA, 22 nt, Homo sapiens
gaauaaacuagagaggacugag

SEQ ID NO: 18616 - RNA, 23 nt, Homo sapiens
cccucagaagugcagggagagaa

SEQ ID NO: 18617 - RNA, 22 nt, Homo sapiens
guuaagaaguguaacuuaaguu

SEQ ID NO: 18618 - RNA, 22 nt, Homo sapiens
guagaauguauacaguauacag

SEQ ID NO: 18619 - RNA, 22 nt, Homo sapiens
guuuaacugguacuucaagucu

SEQ ID NO: 18620 - RNA, 21 nt, Homo sapiens
uaauaaugucucagacaccua

SEQ ID NO: 18621 - RNA, 22 nt, Homo sapiens
uaauaauguuaggcuuacucaa

SEQ ID NO: 18622 - RNA, 22 nt, Homo sapiens
uauugaauuugagcugucucuu

SEQ ID NO: 18623 - RNA, 22 nt, Homo sapiens
uauugauuaauugugauuaggc

SEQ ID NO: 18624 - RNA, 22 nt, Homo sapiens
uauugcuuuugauucaaggcag

SEQ ID NO: 18625 - RNA, 22 nt, Homo sapiens
gacagagcaagacccuauuuaa

SEQ ID NO: 18626 - RNA, 22 nt, Homo sapiens
cuuguacacuguuggugggaau

SEQ ID NO: 18627 - RNA, 20 nt, Homo sapiens
gcuaaggcacgggaauuacu

SEQ ID NO: 18628 - RNA, 22 nt, Homo sapiens
ugcccaguggacagaaagucau

SEQ ID NO: 18629 - RNA, 22 nt, Homo sapiens
ugaaggcaggagggagaaaagu

SEQ ID NO: 18630 - RNA, 22 nt, Homo sapiens
ugaacacuggauaaggagucag

SEQ ID NO: 18631 - RNA, 22 nt, Homo sapiens
uucccugagcaucuguugagcc

SEQ ID NO: 18632 - RNA, 22 nt, Homo sapiens
uuaaaggcaugguuagacaugg

SEQ ID NO: 18633 - RNA, 22 nt, Homo sapiens
uuuguaagaugcauagauugca

SEQ ID NO: 18634 - RNA, 15 nt, Homo sapiens
auagaaugaaaggga

SEQ ID NO: 18635 - RNA, 22 nt, Homo sapiens
auacagguauacaaugcauaau

SEQ ID NO: 18636 - RNA, 22 nt, Homo sapiens
aauugcuuuuauuuagggccag

SEQ ID NO: 18637 - RNA, 22 nt, Homo sapiens
aauaaagcagcuuuuugggacu

SEQ ID NO: 18638 - RNA, 22 nt, Homo sapiens
aauaaagccugucucuuuagag

SEQ ID NO: 18639 - RNA, 22 nt, Homo sapiens
aaguuaauguuuaagacuccua

SEQ ID NO: 18640 - RNA, 22 nt, Homo sapiens
agagauaaagauuuuaauuuug

SEQ ID NO: 18641 - RNA, 22 nt, Homo sapiens
aguacacuguugaacagaagug

SEQ ID NO: 18642 - RNA, 22 nt, Homo sapiens
aaaugccucccauucuacugac

SEQ ID NO: 18643 - RNA, 22 nt, Homo sapiens
aaggcaagguggauaaugaagc

SEQ ID NO: 18644 - RNA, 22 nt, Homo sapiens
aaagugccugacucauaguuag

SEQ ID NO: 18645 - RNA, 22 nt, Homo sapiens
guguaaaugagugcugaaggag

SEQ ID NO: 18646 - RNA, 17 nt, Homo sapiens
uaaagccagucaaguca

SEQ ID NO: 18647 - RNA, 22 nt, Homo sapiens
uauauguuuucauaaggcuaga

SEQ ID NO: 18648 - RNA, 22 nt, Homo sapiens
guagaauguauguauaacgcaa

SEQ ID NO: 18649 - RNA, 22 nt, Homo sapiens
gucuuccagccuccaucuuucu

SEQ ID NO: 18650 - RNA, 22 nt, Homo sapiens
gcugagguucaagaagguuaaa

SEQ ID NO: 18651 - RNA, 21 nt, Homo sapiens
ucagaagcucccagggaggac

SEQ ID NO: 18652 - RNA, 22 nt, Homo sapiens
ucaggcaugcagcaaugcagug

SEQ ID NO: 18653 - RNA, 22 nt, Homo sapiens
ugaaugccauucuguguuagcu

SEQ ID NO: 18654 - RNA, 22 nt, Homo sapiens
gcaagaauggaacaggagagcc

SEQ ID NO: 18655 - RNA, 22 nt, Homo sapiens
gauauguucugagaaaugcauu

SEQ ID NO: 18656 - RNA, 23 nt, Homo sapiens
auugaacacuuucauaugugagg

SEQ ID NO: 18657 - RNA, 22 nt, Homo sapiens
auuguguagucuuacugcuugc

SEQ ID NO: 18658 - RNA, 17 nt, Homo sapiens
cuaaggcaagagucugc

SEQ ID NO: 18659 - RNA, 22 nt, Homo sapiens
cuaaggcaguagccugaauaau

SEQ ID NO: 18660 - RNA, 22 nt, Homo sapiens
ccacauuaccuugcuugcucca

SEQ ID NO: 18661 - RNA, 22 nt, Homo sapiens
aauaaagcuuugagcuuugcug

SEQ ID NO: 18662 - RNA, 22 nt, Homo sapiens
aauagcuguccuuagaagugug

SEQ ID NO: 18663 - RNA, 22 nt, Homo sapiens
aauagcuguuuuuaauuccugc

SEQ ID NO: 18664 - RNA, 22 nt, Homo sapiens
agaaagcgcuucccuuugcugg

SEQ ID NO: 18665 - RNA, 22 nt, Homo sapiens
auagaaucaucugugcacuagu

SEQ ID NO: 18666 - RNA, 22 nt, Homo sapiens
uuaaucuguucucuguauucua

SEQ ID NO: 18667 - RNA, 22 nt, Homo sapiens
uuaaugacaucauaggugaagu

SEQ ID NO: 18668 - RNA, 20 nt, Homo sapiens
uguaaaggagauugcagcug

SEQ ID NO: 18669 - RNA, 16 nt, Homo sapiens
uguaaauguuuugcau

SEQ ID NO: 18670 - RNA, 22 nt, Homo sapiens
ugucaaaugcagugauauuuga

SEQ ID NO: 18671 - RNA, 20 nt, Homo sapiens
uugacaguggguuguuaaag

SEQ ID NO: 18672 - RNA, 18 nt, Homo sapiens
uugaaugcgucccagaga

SEQ ID NO: 18673 - RNA, 22 nt, Homo sapiens
uugcuuagucaugaaucacuga

SEQ ID NO: 18674 - RNA, 22 nt, Homo sapiens
uuuaauacugcaucuuuacucu

SEQ ID NO: 18675 - RNA, 19 nt, Homo sapiens
acauugcauuuguaggcuu

SEQ ID NO: 18676 - RNA, 22 nt, Homo sapiens
agaaagugcuucccuuugguga

SEQ ID NO: 18677 - RNA, 22 nt, Homo sapiens
agugcauaugucuuuuuggaag

SEQ ID NO: 18678 - RNA, 22 nt, Homo sapiens
auugaacaugccauauguacca

SEQ ID NO: 18679 - RNA, 22 nt, Homo sapiens
auauguauuuuaacguguaagg

SEQ ID NO: 18680 - RNA, 22 nt, Homo sapiens
auagcuguccuuacuagcuagg

SEQ ID NO: 18681 - RNA, 22 nt, Homo sapiens
auaauagcugaucauuuagaag

SEQ ID NO: 18682 - RNA, 22 nt, Homo sapiens
uuaccuguguuuugggcccaga

SEQ ID NO: 18683 - RNA, 19 nt, Homo sapiens
ugugaacaucacagagugu

SEQ ID NO: 18684 - RNA, 22 nt, Homo sapiens
uugacauaguuucugaaauaga

SEQ ID NO: 18685 - RNA, 22 nt, Homo sapiens
uugacauaaucauuucacagug

SEQ ID NO: 18686 - RNA, 22 nt, Homo sapiens
ugugaacacagaggcuauggca

SEQ ID NO: 18687 - RNA, 21 nt, Homo sapiens
ugucugagagaggagaucuac

SEQ ID NO: 18688 - RNA, 22 nt, Homo sapiens
uggagugcgugucugaguuuuu

SEQ ID NO: 18689 - RNA, 20 nt, Homo sapiens
uggagugcuguguugagaag

SEQ ID NO: 18690 - RNA, 22 nt, Homo sapiens
ugcuugagacacauaugaauuu

SEQ ID NO: 18691 - RNA, 22 nt, Homo sapiens
uaaggcaaguuuuuaguggaca

SEQ ID NO: 18692 - RNA, 18 nt, Homo sapiens
uaaggcacuauaggcauu

SEQ ID NO: 18693 - RNA, 22 nt, Homo sapiens
uauauguucuugcacuggaaag

SEQ ID NO: 18694 - RNA, 22 nt, Homo sapiens
uaaaguuauugccccucaguua

SEQ ID NO: 18695 - RNA, 22 nt, Homo sapiens
guguaaaucaaucuguugucuu

SEQ ID NO: 18696 - RNA, 17 nt, Homo sapiens
ggcaagaaguggaacuc

SEQ ID NO: 18697 - RNA, 22 nt, Homo sapiens
cacagggcuaacauuuuugccc

SEQ ID NO: 18698 - RNA, 22 nt, Homo sapiens
caugaaagacugaggaauugga

SEQ ID NO: 18699 - RNA, 19 nt, Homo sapiens
gcuuagagacaaaacauug

SEQ ID NO: 18700 - RNA, 22 nt, Homo sapiens
gagauugucaugauuacauugu

SEQ ID NO: 18701 - RNA, 22 nt, Homo sapiens
uucuuccagccuugaggggccc

SEQ ID NO: 18702 - RNA, 20 nt, Homo sapiens
uugccgagagaaagguguua

SEQ ID NO: 18703 - RNA, 22 nt, Homo sapiens
uuaacaguugcaugagacugag

SEQ ID NO: 18704 - RNA, 22 nt, Homo sapiens
uuccuugagucuuuuuccugag

SEQ ID NO: 18705 - RNA, 22 nt, Homo sapiens
cugaaggcagguagaauagaga

SEQ ID NO: 18706 - RNA, 22 nt, Homo sapiens
gcaagaaucugggaguaaaauu

SEQ ID NO: 18707 - RNA, 22 nt, Homo sapiens
gauuguguucauaggcauguua

SEQ ID NO: 18708 - RNA, 22 nt, Homo sapiens
acagguauagaaagcuaaaggg

SEQ ID NO: 18709 - RNA, 21 nt, Homo sapiens
aggagcauucaugacgagguu

SEQ ID NO: 18710 - RNA, 20 nt, Homo sapiens
agcauugguuagaacaguag

SEQ ID NO: 18711 - RNA, 22 nt, Homo sapiens
augcauauuccugggccucacu

SEQ ID NO: 18712 - RNA, 22 nt, Homo sapiens
ugacuugauacauguuuuugaa

SEQ ID NO: 18713 - RNA, 22 nt, Homo sapiens
uaaaugacugucaguagaugaa

SEQ ID NO: 18714 - RNA, 22 nt, Homo sapiens
uaaggauuuuggugauuacacu

SEQ ID NO: 18715 - RNA, 22 nt, Homo sapiens
uaaggcccauucuaugaagcag

SEQ ID NO: 18716 - RNA, 22 nt, Homo sapiens
uaaugcaucaugguuggcaaac

SEQ ID NO: 18717 - RNA, 22 nt, Homo sapiens
uagacccauuacguaguuucca

SEQ ID NO: 18718 - RNA, 21 nt, Homo sapiens
ggcaugaauggaaaagugaga

SEQ ID NO: 18719 - RNA, 22 nt, Homo sapiens
ggagugcuguuguuacacaagg

SEQ ID NO: 18720 - RNA, 22 nt, Homo sapiens
guccagagaagucauuacuuca

SEQ ID NO: 18721 - RNA, 22 nt, Homo sapiens
gucaggaugauuuggggaggug

SEQ ID NO: 18722 - RNA, 22 nt, Homo sapiens
ggagugugauuguucucuguua

SEQ ID NO: 18723 - RNA, 22 nt, Homo sapiens
agcagauguuuagugagcgccu

SEQ ID NO: 18724 - RNA, 20 nt, Homo sapiens
cagggcaaugaggagguaaa

SEQ ID NO: 18725 - RNA, 22 nt, Homo sapiens
accccgagacugccaagaaucc

SEQ ID NO: 18726 - RNA, 22 nt, Homo sapiens
caucaaaguggagggaaggacc

SEQ ID NO: 18727 - RNA, 22 nt, Homo sapiens
cacaggucauccuggaucaagg

SEQ ID NO: 18728 - RNA, 22 nt, Homo sapiens
ucacuuggugaacacauuaugu

SEQ ID NO: 18729 - RNA, 22 nt, Homo sapiens
aggcaugauggcuccagaucau

SEQ ID NO: 18730 - RNA, 22 nt, Homo sapiens
agcaggauuguuacaauaguaa

SEQ ID NO: 18731 - RNA, 22 nt, Homo sapiens
ugguaaacaacaggagaacuug

SEQ ID NO: 18732 - RNA, 22 nt, Homo sapiens
cccucgagaaaccaucugcuga

SEQ ID NO: 18733 - RNA, 22 nt, Homo sapiens
caccuagacuggagugcagugg

SEQ ID NO: 18734 - RNA, 22 nt, Homo sapiens
ggaagguaauugucagcucaua

SEQ ID NO: 18735 - RNA, 22 nt, Homo sapiens
gugcgggaggcgcgccuaggug

SEQ ID NO: 18736 - RNA, 22 nt, Homo sapiens
gaagcgaggugauuagcagaca

SEQ ID NO: 18737 - RNA, 19 nt, Homo sapiens
caacccugcagagaaagga

SEQ ID NO: 18738 - RNA, 22 nt, Homo sapiens
caacucuguaggauccaggugg

SEQ ID NO: 18739 - RNA, 19 nt, Homo sapiens
ugucccagccauagaggca

SEQ ID NO: 18740 - RNA, 22 nt, Homo sapiens
uccgaguguuagagagcugugu

SEQ ID NO: 18741 - RNA, 22 nt, Hepatitis E virus
cgcagcggcgguuccggcggug

SEQ ID NO: 18742 - RNA, 20 nt, Homo sapiens
aaaguaggcuaauaccaaaa

SEQ ID NO: 18743 - RNA, 22 nt, Homo sapiens
auauagcaaugaaagagaugaa

SEQ ID NO: 18744 - RNA, 22 nt, Homo sapiens
ggaaugcagugagcauuagaua

SEQ ID NO: 18745 - RNA, 22 nt, Homo sapiens
ggccggguggccauggcugccc

SEQ ID NO: 18746 - RNA, 20 nt, Homo sapiens
uggaccagagagguggggac

SEQ ID NO: 18747 - RNA, 22 nt, Homo sapiens
uggugccguccugcaauccugg

SEQ ID NO: 18748 - RNA, 22 nt, Homo sapiens
uucuucaggcauucccagaagc

SEQ ID NO: 18749 - RNA, 22 nt, Homo sapiens
uuagggaggcucaggacaagag

SEQ ID NO: 18750 - RNA, 22 nt, Homo sapiens
uuucagcguggggugcugaaga

SEQ ID NO: 18751 - RNA, 22 nt, Homo sapiens
uucauggaguugagaaggcuaa

SEQ ID NO: 18752 - RNA, 22 nt, Homo sapiens
auuguaccccaauguacaauau

SEQ ID NO: 18753 - RNA, 22 nt, Homo sapiens
cauaaagauggaggaggccagg

SEQ ID NO: 18754 - RNA, 22 nt, Homo sapiens
cuagaagcauauucagaacaga

SEQ ID NO: 18755 - RNA, 22 nt, Homo sapiens
aauaagcauaguaccugauagg

SEQ ID NO: 18756 - RNA, 22 nt, Homo sapiens
aaguaagcauccaauaaauguu

SEQ ID NO: 18757 - RNA, 22 nt, Homo sapiens
ucagggacuuacaaaccagaag

SEQ ID NO: 18758 - RNA, 22 nt, Homo sapiens
ucagggacgcuugacacaagcc

SEQ ID NO: 18759 - RNA, 22 nt, Homo sapiens
ggugcagcacaccaacauggca

SEQ ID NO: 18760 - RNA, 22 nt, Homo sapiens
gucagggagggauagaugauua

SEQ ID NO: 18761 - RNA, 22 nt, Homo sapiens
guaccugggugacaggauuauu

SEQ ID NO: 18762 - RNA, 22 nt, Homo sapiens
uagguuaugauccaucuuggcu

SEQ ID NO: 18763 - RNA, 22 nt, Homo sapiens
ucaguggauuauuaaagucacc

SEQ ID NO: 18764 - RNA, 22 nt, Homo sapiens
ugaggaauguguguuaaagaua

SEQ ID NO: 18765 - RNA, 22 nt, Homo sapiens
ugagcaauaaaguuacacaguu

SEQ ID NO: 18766 - RNA, 22 nt, Homo sapiens
ugggcggagacgugcagccgcc

SEQ ID NO: 18767 - RNA, 22 nt, Homo sapiens
gcccagcguucagggaggggcu

SEQ ID NO: 18768 - RNA, 22 nt, Homo sapiens
gguauugguugagauuaacuuu

SEQ ID NO: 18769 - RNA, 22 nt, Homo sapiens
uagcaacauucagcucagguac

SEQ ID NO: 18770 - RNA, 22 nt, Homo sapiens
agcggcuguuccccuggucuau

SEQ ID NO: 18771 - RNA, 22 nt, Homo sapiens
aggagaugaagcuuuaucuaaa

SEQ ID NO: 18772 - RNA, 22 nt, Homo sapiens
auaagucaauggaacagauuaa

SEQ ID NO: 18773 - RNA, 18 nt, Homo sapiens
uuucaggguggacaugag

SEQ ID NO: 18774 - RNA, 22 nt, Homo sapiens
uuucagguauuuaagggccguu

SEQ ID NO: 18775 - RNA, 22 nt, Homo sapiens
acaucaggcuugugaugauuac

SEQ ID NO: 18776 - RNA, 22 nt, Homo sapiens
agcaaccagaggagaugaggcu

SEQ ID NO: 18777 - RNA, 22 nt, Homo sapiens
aucaugucuucccagugauucu

SEQ ID NO: 18778 - RNA, 22 nt, Homo sapiens
gagaugguguuccacugccagu

SEQ ID NO: 18779 - RNA, 22 nt, Homo sapiens
gauggcaugugcugccaccaag

SEQ ID NO: 18780 - RNA, 20 nt, Homo sapiens
uaagcauaguugucaggguc

SEQ ID NO: 18781 - RNA, 23 nt, Homo sapiens
uagcaacaguuggaggugaggua

SEQ ID NO: 18782 - RNA, 22 nt, Homo sapiens
ugaaaugauuauaugguguuug

SEQ ID NO: 18783 - RNA, 22 nt, Homo sapiens
ugaaaugaucaguuugguuacu

SEQ ID NO: 18784 - RNA, 22 nt, Homo sapiens
ugagauaaugcaugugaagauc

SEQ ID NO: 18785 - RNA, 22 nt, Homo sapiens
gagcuacauggauagucugcau

SEQ ID NO: 18786 - RNA, 22 nt, Homo sapiens
accaccacucccgcauucuaaa

SEQ ID NO: 18787 - RNA, 22 nt, Homo sapiens
ugagcuaggucuugcucuguca

SEQ ID NO: 18788 - RNA, 22 nt, Homo sapiens
ggagaucuuuaggaguuggacu

SEQ ID NO: 18789 - RNA, 22 nt, Homo sapiens
ugagaucuuuuguggcugagaa

SEQ ID NO: 18790 - RNA, 23 nt, Homo sapiens
auugcagaaucacagagguagug

SEQ ID NO: 18791 - RNA, 22 nt, Homo sapiens
uugcagagaaauuucugguuua

SEQ ID NO: 18792 - RNA, 22 nt, Homo sapiens
uagagauccuucacuaggggca

SEQ ID NO: 18793 - RNA, 22 nt, Homo sapiens
uagagaucuuauauuuuaugac

SEQ ID NO: 18794 - RNA, 22 nt, Homo sapiens
gagguagguacaauugccacca

SEQ ID NO: 18795 - RNA, 22 nt, Homo sapiens
auacugcacauuuagggaggga

SEQ ID NO: 18796 - RNA, 19 nt, Homo sapiens
uccccuguggauaccaaga

SEQ ID NO: 18797 - RNA, 22 nt, Homo sapiens
ucacccacacaggagacaggga

SEQ ID NO: 18798 - RNA, 22 nt, Homo sapiens
aagcaccguugccuccccugca

SEQ ID NO: 18799 - RNA, 22 nt, Homo sapiens
ggucacccugaugcuggugguc

SEQ ID NO: 18800 - RNA, 22 nt, Homo sapiens
acccugucaaaacggaccaauc

SEQ ID NO: 18801 - RNA, 19 nt, Homo sapiens
caccgccugcccccugcug

SEQ ID NO: 18802 - RNA, 22 nt, Homo sapiens
ucacuggcaaauauauccguug

SEQ ID NO: 18803 - RNA, 22 nt, Homo sapiens
gucacugggugcugcgccuguc

SEQ ID NO: 18804 - RNA, 22 nt, Homo sapiens
uguggcacuguguccagagaaa

SEQ ID NO: 18805 - RNA, 22 nt, Homo sapiens
aacuggccuggcgugcagaggg

SEQ ID NO: 18806 - RNA, 22 nt, Homo sapiens
acugcacuccagccugugagac

SEQ ID NO: 18807 - RNA, 20 nt, Homo sapiens
ucacccugacaucugcccag

SEQ ID NO: 18808 - RNA, 22 nt, Homo sapiens
gucaaaugcacagaaccauuaa

SEQ ID NO: 18809 - RNA, 22 nt, Homo sapiens
uuccugagccuuguaucuagua

SEQ ID NO: 18810 - RNA, 22 nt, Homo sapiens
uacuggccuugaacucuggugu

SEQ ID NO: 18811 - RNA, 22 nt, Homo sapiens
aggcacacaacccuggaccuga

SEQ ID NO: 18812 - RNA, 22 nt, Homo sapiens
gagacucuuagauuggaaaucu

SEQ ID NO: 18813 - RNA, 22 nt, Homo sapiens
uggaggacugcagaacugaggc

SEQ ID NO: 18814 - RNA, 22 nt, Homo sapiens
ucugagucaucacaaaugaugc

SEQ ID NO: 18815 - RNA, 22 nt, Homo sapiens
uggcaccauccaggugucucua

SEQ ID NO: 18816 - RNA, 22 nt, Homo sapiens
cauggcccugggcugggcgaac

SEQ ID NO: 18817 - RNA, 22 nt, Homo sapiens
cacugcacuccagcuugugggc

SEQ ID NO: 18818 - RNA, 22 nt, Homo sapiens
acccugucaaaauggaccaauc

SEQ ID NO: 18819 - RNA, 20 nt, Homo sapiens
uguggcacuguaucucucag

SEQ ID NO: 18820 - RNA, 22 nt, Homo sapiens
gcaccacugcacucucagcuug

SEQ ID NO: 18821 - RNA, 22 nt, Homo sapiens
cuccacugagcaggugggaggc

SEQ ID NO: 18822 - RNA, 22 nt, Homo sapiens
uugggacccuguccuguaacaa

SEQ ID NO: 18823 - RNA, 22 nt, Homo sapiens
cugagcccauucuggggagaag

SEQ ID NO: 18824 - RNA, 21 nt, Homo sapiens
uuuccuggagcguauggcuuc

SEQ ID NO: 18825 - RNA, 22 nt, Homo sapiens
acugcacuccagacucugucuc

SEQ ID NO: 18826 - RNA, 22 nt, Homo sapiens
ggcaccauggaaggacgggagc

SEQ ID NO: 18827 - RNA, 22 nt, Homo sapiens
aacuggccugagaugaaaagug

SEQ ID NO: 18828 - RNA, 22 nt, Homo sapiens
gaggucauucugugguacccag

SEQ ID NO: 18829 - RNA, 19 nt, Homo sapiens
uuccugagaacaagggcuu

SEQ ID NO: 18830 - RNA, 22 nt, Homo sapiens
gacuggccuauaauggcgaauu

SEQ ID NO: 18831 - RNA, 22 nt, Homo sapiens
ucaugggagcccccaucaugag

SEQ ID NO: 18832 - RNA, 22 nt, Homo sapiens
acugcacuccagccuucaggac

SEQ ID NO: 18833 - RNA, 22 nt, Homo sapiens
gcauggccuuuaaaugucacag

SEQ ID NO: 18834 - RNA, 22 nt, Homo sapiens
ggcaccacagacgccaggcgug

SEQ ID NO: 18835 - RNA, 21 nt, Homo sapiens
ucaggaccucuaguuagccag

SEQ ID NO: 18836 - RNA, 22 nt, Homo sapiens
gugacacagcaagacuccgucu

SEQ ID NO: 18837 - RNA, 22 nt, Homo sapiens
gaggucaugucgggccccagga

SEQ ID NO: 18838 - RNA, 22 nt, Homo sapiens
ucacuggccaaauucuggguga

SEQ ID NO: 18839 - RNA, 22 nt, Homo sapiens
aguggcacuauucucagaguca

SEQ ID NO: 18840 - RNA, 22 nt, Homo sapiens
acagcacugccaagugacccau

SEQ ID NO: 18841 - RNA, 22 nt, Homo sapiens
gcaccccuuaccgggcuggguu

SEQ ID NO: 18842 - RNA, 22 nt, Homo sapiens
acugcacuccagcuccagggug

SEQ ID NO: 18843 - RNA, 22 nt, Homo sapiens
caccaggugcccagcacggcca

SEQ ID NO: 18844 - RNA, 22 nt, Homo sapiens
aguggcacaauuuugacucccc

SEQ ID NO: 18845 - RNA, 22 nt, Homo sapiens
uacuggccccaaaguagguagu

SEQ ID NO: 18846 - RNA, 22 nt, Homo sapiens
gcacccugucaaaauggaccaa

SEQ ID NO: 18847 - RNA, 20 nt, Homo sapiens
acacuggcuuugagauuuag

SEQ ID NO: 18848 - RNA, 22 nt, Homo sapiens
cucucugagccauggcugcccu

SEQ ID NO: 18849 - RNA, 22 nt, Homo sapiens
ugagcugguacuaauauuauca

SEQ ID NO: 18850 - RNA, 22 nt, Homo sapiens
acccugucacucccaucaauuu

SEQ ID NO: 18851 - RNA, 22 nt, Homo sapiens
gacuggccauugauacagaggu

SEQ ID NO: 18852 - RNA, 19 nt, Homo sapiens
agagacucauuguagcauu

SEQ ID NO: 18853 - RNA, 22 nt, Homo sapiens
caccagguuggagugcaguggu

SEQ ID NO: 18854 - RNA, 22 nt, Homo sapiens
aacuggccuccuugggaaauua

SEQ ID NO: 18855 - RNA, 17 nt, Homo sapiens
gcacuggcguaucccac

SEQ ID NO: 18856 - RNA, 22 nt, Homo sapiens
uuuuuggaggagguuagaucau

SEQ ID NO: 18857 - RNA, 22 nt, Homo sapiens
uuuuuggauaaugguacaugua

SEQ ID NO: 18858 - RNA, 22 nt, Homo sapiens
uuuuggcuagaaauauaccucc

SEQ ID NO: 18859 - RNA, 22 nt, Homo sapiens
uuuuggcucugucuguaucuuu

SEQ ID NO: 18860 - RNA, 22 nt, Homo sapiens
uuugcaagaugaaaaaguucua

SEQ ID NO: 18861 - RNA, 22 nt, Homo sapiens
uuugaagugugaugccuugaug

SEQ ID NO: 18862 - RNA, 22 nt, Homo sapiens
uuugaaugcaacaaaugcggga

SEQ ID NO: 18863 - RNA, 22 nt, Homo sapiens
uuugcagagacuuguuaggaau

SEQ ID NO: 18864 - RNA, 22 nt, Homo sapiens
uuuugcaggucaggggcagaga

SEQ ID NO: 18865 - RNA, 18 nt, Homo sapiens
uuuugcuuaacugcgcca

SEQ ID NO: 18866 - RNA, 22 nt, Homo sapiens
uucauggaguugagaaggcuaa

SEQ ID NO: 18867 - RNA, 22 nt, Homo sapiens
uucauggauggaaaugauuuug

SEQ ID NO: 18868 - RNA, 22 nt, Homo sapiens
uucuugcuguauccucacaugg

SEQ ID NO: 18869 - RNA, 22 nt, Homo sapiens
uucuuuggauaaaguuuuaugc

SEQ ID NO: 18870 - RNA, 22 nt, Homo sapiens
uugaaagacaucaccuacugcu

SEQ ID NO: 18871 - RNA, 22 nt, Homo sapiens
uugaaagucauuucuucuaagu

SEQ ID NO: 18872 - RNA, 22 nt, Homo sapiens
uucacuguuaagcaguuaaacu

SEQ ID NO: 18873 - RNA, 22 nt, Homo sapiens
uucaucacagucuccgaugccc

SEQ ID NO: 18874 - RNA, 22 nt, Homo sapiens
uugaauagaaguguugaaagug

SEQ ID NO: 18875 - RNA, 22 nt, Homo sapiens
uugaauaguggugaaaguuuga

SEQ ID NO: 18876 - RNA, 22 nt, Homo sapiens
uugaagugaagaacaauaucac

SEQ ID NO: 18877 - RNA, 22 nt, Homo sapiens
uugaaguguguauacauugugg

SEQ ID NO: 18878 - RNA, 22 nt, Homo sapiens
uugacugugguaauggaagcug

SEQ ID NO: 18879 - RNA, 22 nt, Homo sapiens
uugacuguaagauggcuauuac

SEQ ID NO: 18880 - RNA, 23 nt, Homo sapiens
uugacuguggguacaaugugaua

SEQ ID NO: 18881 - RNA, 22 nt, Homo sapiens
uugagcucuuccagccuggagc

SEQ ID NO: 18882 - RNA, 21 nt, Homo sapiens
uugcaaaugcugcugccugau

SEQ ID NO: 18883 - RNA, 22 nt, Homo sapiens
uugcacugagauuuugcuuaca

SEQ ID NO: 18884 - RNA, 22 nt, Homo sapiens
uugcacuuccgccugggugaca

SEQ ID NO: 18885 - RNA, 22 nt, Homo sapiens
uugcagaucccacacucacccu

SEQ ID NO: 18886 - RNA, 21 nt, Homo sapiens
uuucacugugaguuuuucugu

SEQ ID NO: 18887 - RNA, 22 nt, Homo sapiens
uuuauagucaggaacuugagga

SEQ ID NO: 18888 - RNA, 22 nt, Homo sapiens
uugugcuuuuuaaauagcuucc

SEQ ID NO: 18889 - RNA, 23 nt, Homo sapiens
uugcauagacauccucauagauu

SEQ ID NO: 18890 - RNA, 22 nt, Homo sapiens
uugcauauguugaaccaagcgu

SEQ ID NO: 18891 - RNA, 22 nt, Homo sapiens
uuggaagacaaugcugauucuc

SEQ ID NO: 18892 - RNA, 22 nt, Homo sapiens
uugggaauguccuaauaucucg

SEQ ID NO: 18893 - RNA, 22 nt, Homo sapiens
uugguacuaaaaaguagggugu

SEQ ID NO: 18894 - RNA, 22 nt, Homo sapiens
uuguaauguuaccaaauggugu

SEQ ID NO: 18895 - RNA, 22 nt, Homo sapiens
uugucaccucuaaaucucauau

SEQ ID NO: 18896 - RNA, 22 nt, Homo sapiens
uugguuauccugucgguaauuc

SEQ ID NO: 18897 - RNA, 22 nt, Homo sapiens
uuggucagcuagauuauucccu

SEQ ID NO: 18898 - RNA, 22 nt, Homo sapiens
uucacugggugugguggcucac

SEQ ID NO: 18899 - RNA, 22 nt, Homo sapiens
uuauuacuccuauuuuguagau

SEQ ID NO: 18900 - RNA, 22 nt, Homo sapiens
uuaagugcucaguuacucaguu

SEQ ID NO: 18901 - RNA, 22 nt, Homo sapiens
ugugguccucugaaggcuuuuc

SEQ ID NO: 18902 - RNA, 22 nt, Homo sapiens
ugugguuuuucacauuuagaga

SEQ ID NO: 18903 - RNA, 22 nt, Homo sapiens
ugugcaccucuucacacaggga

SEQ ID NO: 18904 - RNA, 22 nt, Homo sapiens
uguccaguguuccucagaagaa

SEQ ID NO: 18905 - RNA, 22 nt, Homo sapiens
ugucagaaucuagaggcugcua

SEQ ID NO: 18906 - RNA, 22 nt, Homo sapiens
uguauguugggucaaaguacau

SEQ ID NO: 18907 - RNA, 22 nt, Homo sapiens
uguccugaagcuuuguuaugua

SEQ ID NO: 18908 - RNA, 19 nt, Homo sapiens
ugugacugggccagccuag

SEQ ID NO: 18909 - RNA, 22 nt, Homo sapiens
ugugacugguugucccgcuuuc

SEQ ID NO: 18910 - RNA, 22 nt, Homo sapiens
uggcuguguccucucccaaauc

SEQ ID NO: 18911 - RNA, 22 nt, Homo sapiens
uggcuguuuauuucaccugggc

SEQ ID NO: 18912 - RNA, 22 nt, Homo sapiens
uggcuguuuauuucaccugggu

SEQ ID NO: 18913 - RNA, 22 nt, Homo sapiens
uggugcccuguccuucuguggc

SEQ ID NO: 18914 - RNA, 23 nt, Homo sapiens
ugguuuguaagagauggacugga

SEQ ID NO: 18915 - RNA, 22 nt, Homo sapiens
ugguuaucauagcuaugcuacu

SEQ ID NO: 18916 - RNA, 20 nt, Homo sapiens
uggugguuuuaugugguuua

SEQ ID NO: 18917 - RNA, 22 nt, Homo sapiens
auugcagcccacccugggugau

SEQ ID NO: 18918 - RNA, 22 nt, Homo sapiens
auuguguagucuuacugcuugc

SEQ ID NO: 18919 - RNA, 21 nt, Homo sapiens
auuguauguaaaccaaaugag

SEQ ID NO: 18920 - RNA, 22 nt, Homo sapiens
caaauugcuugucuguagugga

SEQ ID NO: 18921 - RNA, 22 nt, Homo sapiens
cacauugcaggaaaguucauua

SEQ ID NO: 18922 - RNA, 22 nt, Homo sapiens
caaagucuucucauuaugucuu

SEQ ID NO: 18923 - RNA, 15 nt, Homo sapiens
auuucacuuagcaug

SEQ ID NO: 18924 - RNA, 22 nt, Homo sapiens
auuucacuucgcaugguguccg

SEQ ID NO: 18925 - RNA, 22 nt, Homo sapiens
auguuaagauggaacaugggaa

SEQ ID NO: 18926 - RNA, 22 nt, Homo sapiens
auuaaauguuggacguauacau

SEQ ID NO: 18927 - RNA, 22 nt, Homo sapiens
auuaagugcuugccagugcugg

SEQ ID NO: 18928 - RNA, 22 nt, Homo sapiens
auuacacuuucuauucaaugag

SEQ ID NO: 18929 - RNA, 20 nt, Homo sapiens
auucauggaggagcaauugg

SEQ ID NO: 18930 - RNA, 20 nt, Homo sapiens
auuccacuuguuugagguac

SEQ ID NO: 18931 - RNA, 22 nt, Homo sapiens
auuccauuuguuaucacacccg

SEQ ID NO: 18932 - RNA, 22 nt, Homo sapiens
auuccauuuguguggaauggcu

SEQ ID NO: 18933 - RNA, 23 nt, Homo sapiens
auggcccuggugggagugucuuu

SEQ ID NO: 18934 - RNA, 22 nt, Homo sapiens
auggccuaugacagguauguug

SEQ ID NO: 18935 - RNA, 22 nt, Homo sapiens
auggccauuacuaagaauguuu

SEQ ID NO: 18936 - RNA, 22 nt, Homo sapiens
augugcuuaaaaaugcagagaa

SEQ ID NO: 18937 - RNA, 22 nt, Homo sapiens
auggcuuuaagagugucugaau

SEQ ID NO: 18938 - RNA, 22 nt, Homo sapiens
augugccaauuaggauuccaag

SEQ ID NO: 18939 - RNA, 22 nt, Homo sapiens
cagugucugcauuuggaacuca

SEQ ID NO: 18940 - RNA, 22 nt, Homo sapiens
cauaugguuuuauguucuucau

SEQ ID NO: 18941 - RNA, 22 nt, Homo sapiens
caucagauugagaucaucuaag

SEQ ID NO: 18942 - RNA, 22 nt, Homo sapiens
caggugguauuugguuuucugu

SEQ ID NO: 18943 - RNA, 19 nt, Homo sapiens
cagguagugugcugacaug

SEQ ID NO: 18944 - RNA, 22 nt, Homo sapiens
cagcugaugucgaaugcacucu

SEQ ID NO: 18945 - RNA, 22 nt, Homo sapiens
cagcuggugcugcaccaguggg

SEQ ID NO: 18946 - RNA, 22 nt, Homo sapiens
caccacuacaccccaggcuggg

SEQ ID NO: 18947 - RNA, 22 nt, Homo sapiens
caccauguguucagaaggauug

SEQ ID NO: 18948 - RNA, 22 nt, Homo sapiens
ccacacugucuuggugggaaac

SEQ ID NO: 18949 - RNA, 22 nt, Homo sapiens
ccacugggcaguuuauuaucag

SEQ ID NO: 18950 - RNA, 22 nt, Homo sapiens
caucccugaaccccagaaaucu

SEQ ID NO: 18951 - RNA, 22 nt, Homo sapiens
cauggcacauauauaucuaggu

SEQ ID NO: 18952 - RNA, 22 nt, Homo sapiens
cuagaagcauauucagaacaga

SEQ ID NO: 18953 - RNA, 22 nt, Homo sapiens
cuacauuguagguauucaaacu

SEQ ID NO: 18954 - RNA, 22 nt, Homo sapiens
cucacugggaccacucugaagu

SEQ ID NO: 18955 - RNA, 22 nt, Homo sapiens
cucacugucaacauguauuugg

SEQ ID NO: 18956 - RNA, 22 nt, Homo sapiens
cucaaaguacuuugguuauugu

SEQ ID NO: 18957 - RNA, 19 nt, Homo sapiens
cucaaagugguauuuggag

SEQ ID NO: 18958 - RNA, 22 nt, Homo sapiens
cucaaagugcuaagauuaggcu

SEQ ID NO: 18959 - RNA, 22 nt, Homo sapiens
cucaaguaauccucccgccuug

SEQ ID NO: 18960 - RNA, 22 nt, Homo sapiens
cucaaguacaugggauuacagg

SEQ ID NO: 18961 - RNA, 22 nt, Homo sapiens
cucaaguagugguuuucauuga

SEQ ID NO: 18962 - RNA, 22 nt, Homo sapiens
cugcaauguuugaaauggcaaa

SEQ ID NO: 18963 - RNA, 22 nt, Homo sapiens
cugcauuggguuaugcauuuuu

SEQ ID NO: 18964 - RNA, 22 nt, Homo sapiens
cugcccuuucuauaugauguaa

SEQ ID NO: 18965 - RNA, 18 nt, Homo sapiens
cuugucaaaucuuuccuc

SEQ ID NO: 18966 - RNA, 18 nt, Homo sapiens
cuucauugcuguuuugcu

SEQ ID NO: 18967 - RNA, 22 nt, Homo sapiens
cuuacagucuaucagccacaac

SEQ ID NO: 18968 - RNA, 22 nt, Homo sapiens
cuucaaguaauucugauggcua

SEQ ID NO: 18969 - RNA, 20 nt, Homo sapiens
cuucacagaaguggaaucau

SEQ ID NO: 18970 - RNA, 22 nt, Homo sapiens
cuucacuggagucccuggauuc

SEQ ID NO: 18971 - RNA, 18 nt, Homo sapiens
cuuugcagcuuccagagg

SEQ ID NO: 18972 - RNA, 22 nt, Homo sapiens
cuuugcguugaacaaagccaua

SEQ ID NO: 18973 - RNA, 22 nt, Homo sapiens
cuguaguuagcagaugaugaau

SEQ ID NO: 18974 - RNA, 22 nt, Homo sapiens
cuguuugguaaggaugccucag

SEQ ID NO: 18975 - RNA, 22 nt, Homo sapiens
cuguaaagaucacagagcuggu

SEQ ID NO: 18976 - RNA, 22 nt, Homo sapiens
cuggauauguugcaacauuucc

SEQ ID NO: 18977 - RNA, 22 nt, Homo sapiens
cuggaauuacaggguugagcua

SEQ ID NO: 18978 - RNA, 22 nt, Homo sapiens
cuggagaucuugacauugaagu

SEQ ID NO: 18979 - RNA, 22 nt, Homo sapiens
cuggagcauugguggauuuguu

SEQ ID NO: 18980 - RNA, 18 nt, Homo sapiens
gagguuagguucugacag

SEQ ID NO: 18981 - RNA, 22 nt, Homo sapiens
gagcaaugauugagccacugua

SEQ ID NO: 18982 - RNA, 22 nt, Homo sapiens
gaggugauaucucauugugguu

SEQ ID NO: 18983 - RNA, 19 nt, Homo sapiens
gaucuguugaucaaugugu

SEQ ID NO: 18984 - RNA, 22 nt, Homo sapiens
gaugguuuucaccugcaugcuu

SEQ ID NO: 18985 - RNA, 22 nt, Homo sapiens
gaauuguacugcaaucagggga

SEQ ID NO: 18986 - RNA, 22 nt, Homo sapiens
gacacuggguguuuguuggcgu

SEQ ID NO: 18987 - RNA, 22 nt, Homo sapiens
gacugcagugcagcuguuaggc

SEQ ID NO: 18988 - RNA, 22 nt, Homo sapiens
gagagugaaguuugcuaccugu

SEQ ID NO: 18989 - RNA, 22 nt, Homo sapiens
gagaucaaugccuauggcuuuc

SEQ ID NO: 18990 - RNA, 22 nt, Homo sapiens
gagaucaguuaaugaagugagc

SEQ ID NO: 18991 - RNA, 19 nt, Homo sapiens
aaguacuugucuuuugaag

SEQ ID NO: 18992 - RNA, 22 nt, Homo sapiens
aaguaaacauugagagacaaga

SEQ ID NO: 18993 - RNA, 22 nt, Homo sapiens
aagguggugucagagagcuuau

SEQ ID NO: 18994 - RNA, 22 nt, Homo sapiens
aaggugcucucuuauguagaaa

SEQ ID NO: 18995 - RNA, 22 nt, Homo sapiens
uuuuacacuucgguugugugca

SEQ ID NO: 18996 - RNA, 20 nt, Homo sapiens
uuuuagcuuuuauugaaagc

SEQ ID NO: 18997 - RNA, 22 nt, Homo sapiens
uuuuaguggaauauuuacaguu

SEQ ID NO: 18998 - RNA, 22 nt, Homo sapiens
aauaagcauaguaccugauagg

SEQ ID NO: 18999 - RNA, 22 nt, Homo sapiens
aauaagcugagagaauucuaca

SEQ ID NO: 19000 - RNA, 22 nt, Homo sapiens
aauagcacugcuaugguuugaa

SEQ ID NO: 19001 - RNA, 22 nt, Homo sapiens
aagugguuuuaaucuggugagu

SEQ ID NO: 19002 - RNA, 22 nt, Homo sapiens
aauaaagcauggcuacuccaua

SEQ ID NO: 19003 - RNA, 22 nt, Homo sapiens
aagucaaggagagaggcgucag

SEQ ID NO: 19004 - RNA, 22 nt, Homo sapiens
aagugacauugugcccauuuga

SEQ ID NO: 19005 - RNA, 22 nt, Homo sapiens
aagugcucuugugggaagagag

SEQ ID NO: 19006 - RNA, 22 nt, Homo sapiens
aauaucacaguggguguacacc

SEQ ID NO: 19007 - RNA, 22 nt, Homo sapiens
aauggguaguacugugguaaca

SEQ ID NO: 19008 - RNA, 22 nt, Homo sapiens
aaugugcuguucagaggagucc

SEQ ID NO: 19009 - RNA, 20 nt, Homo sapiens
acaguagaagggauuucaaa

SEQ ID NO: 19010 - RNA, 22 nt, Homo sapiens
acacuggguaacauaucuguua

SEQ ID NO: 19011 - RNA, 22 nt, Homo sapiens
agaaccaaucccacauggauac

SEQ ID NO: 19012 - RNA, 22 nt, Homo sapiens
acugcacuuauccuccaauguu

SEQ ID NO: 19013 - RNA, 22 nt, Homo sapiens
acugcacuccagccucccgucu

SEQ ID NO: 19014 - RNA, 22 nt, Homo sapiens
acugcacuccagccuuggccac

SEQ ID NO: 19015 - RNA, 22 nt, Homo sapiens
accaugcaguccaauaugcaca

SEQ ID NO: 19016 - RNA, 22 nt, Homo sapiens
acaguguuccuuuguugugacu

SEQ ID NO: 19017 - RNA, 22 nt, Homo sapiens
acauugcagauguguuuaaugu

SEQ ID NO: 19018 - RNA, 22 nt, Homo sapiens
acaguguuacuugauaguguau

SEQ ID NO: 19019 - RNA, 21 nt, Homo sapiens
acugauguuugaaauucgcug

SEQ ID NO: 19020 - RNA, 23 nt, Homo sapiens
acugagcaauguuuacauacuug

SEQ ID NO: 19021 - RNA, 22 nt, Homo sapiens
acucauugcucauaccuuaucu

SEQ ID NO: 19022 - RNA, 22 nt, Homo sapiens
agaugcauugguggcauauuca

SEQ ID NO: 19023 - RNA, 18 nt, Homo sapiens
agaugcaugcucacuaca

SEQ ID NO: 19024 - RNA, 20 nt, Homo sapiens
agaugcaugcacauaaacac

SEQ ID NO: 19025 - RNA, 22 nt, Homo sapiens
agcacagugaaugguuuacuca

SEQ ID NO: 19026 - RNA, 22 nt, Homo sapiens
agcagugucauuuucuggugag

SEQ ID NO: 19027 - RNA, 22 nt, Homo sapiens
auagaagcugccaacguuucag

SEQ ID NO: 19028 - RNA, 22 nt, Homo sapiens
auacuguuuuacaucauugccu

SEQ ID NO: 19029 - RNA, 22 nt, Homo sapiens
auaggagugugcacagaguagg

SEQ ID NO: 19030 - RNA, 22 nt, Homo sapiens
auagccuguaggccuuaaggug

SEQ ID NO: 19031 - RNA, 22 nt, Homo sapiens
auagguagcauagcaggaauau

SEQ ID NO: 19032 - RNA, 22 nt, Homo sapiens
auacagugaauaucuggggcag

SEQ ID NO: 19033 - RNA, 19 nt, Homo sapiens
auaaaugccuacaagggug

SEQ ID NO: 19034 - RNA, 22 nt, Homo sapiens
auaaagguaagcacuauccuga

SEQ ID NO: 19035 - RNA, 22 nt, Homo sapiens
agugguguugccuguugaccua

SEQ ID NO: 19036 - RNA, 22 nt, Homo sapiens
agugguuugaucacagcucacu

SEQ ID NO: 19037 - RNA, 22 nt, Homo sapiens
agugagcugcagucuggggucc

SEQ ID NO: 19038 - RNA, 23 nt, Homo sapiens
agucaguaugcuccuuggauccc

SEQ ID NO: 19039 - RNA, 22 nt, Homo sapiens
agugauauguuugccuugaggg

SEQ ID NO: 19040 - RNA, 22 nt, Homo sapiens
agugauguggaguuuggaugga

SEQ ID NO: 19041 - RNA, 22 nt, Homo sapiens
agugcaguggcauggucauaac

SEQ ID NO: 19042 - RNA, 20 nt, Homo sapiens
aguauucacuuuuuucaugg

SEQ ID NO: 19043 - RNA, 22 nt, Homo sapiens
agcuguuguuaauuaacucauu

SEQ ID NO: 19044 - RNA, 22 nt, Homo sapiens
agcuguuguucucagaggcuuu

SEQ ID NO: 19045 - RNA, 22 nt, Homo sapiens
augacagcaucugugaaguugu

SEQ ID NO: 19046 - RNA, 22 nt, Homo sapiens
augacaguguggauuauuguaa

SEQ ID NO: 19047 - RNA, 22 nt, Homo sapiens
augaaaacaugauuugccuguu

SEQ ID NO: 19048 - RNA, 22 nt, Homo sapiens
augacaagagccuucuuuccuu

SEQ ID NO: 19049 - RNA, 22 nt, Homo sapiens
augacuggaacagcaauuuaca

SEQ ID NO: 19050 - RNA, 22 nt, Homo sapiens
augacuggaacggcacuuuaca

SEQ ID NO: 19051 - RNA, 22 nt, Homo sapiens
augacugucagggcagucauug

SEQ ID NO: 19052 - RNA, 22 nt, Homo sapiens
augaucacuguggaaauucagc

SEQ ID NO: 19053 - RNA, 22 nt, Homo sapiens
augauggaggccgugauggacg

SEQ ID NO: 19054 - RNA, 22 nt, Homo sapiens
augcuggugguucacaugcgca

SEQ ID NO: 19055 - RNA, 22 nt, Homo sapiens
augcaauucuagauugauagua

SEQ ID NO: 19056 - RNA, 22 nt, Homo sapiens
augcaauggaaaggacaauuac

SEQ ID NO: 19057 - RNA, 22 nt, Homo sapiens
augccuagagucaguggaggug

SEQ ID NO: 19058 - RNA, 22 nt, Homo sapiens
auggaagaauugucggggaugu

SEQ ID NO: 19059 - RNA, 22 nt, Homo sapiens
auggaagaaaguuggguucuug

SEQ ID NO: 19060 - RNA, 22 nt, Homo sapiens
auggcacuguguccugggguca

SEQ ID NO: 19061 - RNA, 22 nt, Homo sapiens
aucucagagaaaauuacuaaga

SEQ ID NO: 19062 - RNA, 22 nt, Homo sapiens
aucugcaaauaaugaagauugg

SEQ ID NO: 19063 - RNA, 22 nt, Homo sapiens
aucuggcuucuuuuaguccaca

SEQ ID NO: 19064 - RNA, 22 nt, Homo sapiens
aucuggcuccuuuugacaaugc

SEQ ID NO: 19065 - RNA, 22 nt, Homo sapiens
auauguaguauggaaacauugu

SEQ ID NO: 19066 - RNA, 19 nt, Homo sapiens
aucaccauuauuuggaaca

SEQ ID NO: 19067 - RNA, 22 nt, Homo sapiens
auccacagugucaauguuguga

SEQ ID NO: 19068 - RNA, 22 nt, Homo sapiens
ugagauaaucaugugguuuuug

SEQ ID NO: 19069 - RNA, 22 nt, Homo sapiens
ugagaugacgacacaccucagu

SEQ ID NO: 19070 - RNA, 22 nt, Homo sapiens
ugagaugaggucucgcucuguc

SEQ ID NO: 19071 - RNA, 22 nt, Homo sapiens
ugagaugaguucucgcucuguc

SEQ ID NO: 19072 - RNA, 22 nt, Homo sapiens
ugagauaacuaaaaacauuuug

SEQ ID NO: 19073 - RNA, 22 nt, Homo sapiens
ugagagcuuugaugcacuguuu

SEQ ID NO: 19074 - RNA, 22 nt, Homo sapiens
ugacacagugggggauccuuuu

SEQ ID NO: 19075 - RNA, 17 nt, Homo sapiens
ugacagaaacuuguugu

SEQ ID NO: 19076 - RNA, 23 nt, Homo sapiens
ugacagaccuucuggaagaaguc

SEQ ID NO: 19077 - RNA, 22 nt, Homo sapiens
ugacaguaaacagucuugauua

SEQ ID NO: 19078 - RNA, 22 nt, Homo sapiens
ugacaguaucuacagcuucuua

SEQ ID NO: 19079 - RNA, 22 nt, Homo sapiens
ugauguugacuguaggcagaga

SEQ ID NO: 19080 - RNA, 22 nt, Homo sapiens
ugauauggcuuggcuaugucac

SEQ ID NO: 19081 - RNA, 22 nt, Homo sapiens
ugagucauuuccuuaugcuacu

SEQ ID NO: 19082 - RNA, 22 nt, Homo sapiens
ugaggugaggguaucaaaugcu

SEQ ID NO: 19083 - RNA, 22 nt, Homo sapiens
ugaggugcagcaauccucaugu

SEQ ID NO: 19084 - RNA, 22 nt, Homo sapiens
ugagguuguccacuauaaucca

SEQ ID NO: 19085 - RNA, 22 nt, Homo sapiens
ugagguguuauccagaguucuu

SEQ ID NO: 19086 - RNA, 22 nt, Homo sapiens
ugagguugaaggacauuuuuau

SEQ ID NO: 19087 - RNA, 22 nt, Homo sapiens
ugaguaugaguucaggaaaggc

SEQ ID NO: 19088 - RNA, 22 nt, Homo sapiens
ugauuguucuguccccaggggc

SEQ ID NO: 19089 - RNA, 22 nt, Homo sapiens
ugcaagucaucuguccuucaga

SEQ ID NO: 19090 - RNA, 22 nt, Homo sapiens
ugcaauauccucuacuauaggu

SEQ ID NO: 19091 - RNA, 17 nt, Homo sapiens
ugcaauuuaagcuagau

SEQ ID NO: 19092 - RNA, 18 nt, Homo sapiens
ugcaauggagaugcagcc

SEQ ID NO: 19093 - RNA, 22 nt, Homo sapiens
ugcaauuuaaugugucccaauu

SEQ ID NO: 19094 - RNA, 20 nt, Homo sapiens
ugcauguccucacuuacuug

SEQ ID NO: 19095 - RNA, 22 nt, Homo sapiens
ugcugcauuggggauuaaguuu

SEQ ID NO: 19096 - RNA, 22 nt, Homo sapiens
ugcgccauugaacuccaggcug

SEQ ID NO: 19097 - RNA, 22 nt, Homo sapiens
ugcgccauugaacuccuccugg

SEQ ID NO: 19098 - RNA, 22 nt, Homo sapiens
ugcuguuguuugaugaaguaau

SEQ ID NO: 19099 - RNA, 22 nt, Homo sapiens
ugcugguuuucaucaucagugg

SEQ ID NO: 19100 - RNA, 22 nt, Homo sapiens
uggcagcugcuucaugggaugc

SEQ ID NO: 19101 - RNA, 22 nt, Homo sapiens
uggccuguaacccucucauagg

SEQ ID NO: 19102 - RNA, 22 nt, Homo sapiens
uggauggagaggcuugugaugc

SEQ ID NO: 19103 - RNA, 22 nt, Homo sapiens
ucacuuuggguacuauggaaau

SEQ ID NO: 19104 - RNA, 22 nt, Homo sapiens
ucaguguuuggaaucucaauuu

SEQ ID NO: 19105 - RNA, 22 nt, Homo sapiens
ucauacaguaguccucacuugu

SEQ ID NO: 19106 - RNA, 22 nt, Homo sapiens
ucauaguagucacuuaauaaau

SEQ ID NO: 19107 - RNA, 22 nt, Homo sapiens
uccauguagaagacaggggaga

SEQ ID NO: 19108 - RNA, 22 nt, Homo sapiens
uccauuuguagguagugagaca

SEQ ID NO: 19109 - RNA, 22 nt, Homo sapiens
uccaguuuuguuaacauauggu

SEQ ID NO: 19110 - RNA, 22 nt, Homo sapiens
uccaguuauccuguggggagga

SEQ ID NO: 19111 - RNA, 22 nt, Homo sapiens
uccaguguuauaauaugcgucu

SEQ ID NO: 19112 - RNA, 22 nt, Homo sapiens
ucaucuggcgaaugugaagagu

SEQ ID NO: 19113 - RNA, 22 nt, Homo sapiens
ucauggggugagcuacaggcac

SEQ ID NO: 19114 - RNA, 22 nt, Homo sapiens
ucaugguuuuauaacccucuug

SEQ ID NO: 19115 - RNA, 22 nt, Homo sapiens
ucaugucuuguuguauuuauuu

SEQ ID NO: 19116 - RNA, 22 nt, Homo sapiens
ucacuggucuaaguggaggggg

SEQ ID NO: 19117 - RNA, 22 nt, Homo sapiens
ucacugugcacauaugauaggu

SEQ ID NO: 19118 - RNA, 22 nt, Homo sapiens
ucacugcgaccucugccucccg

SEQ ID NO: 19119 - RNA, 22 nt, Homo sapiens
ucacugcgcuucagccugggug

SEQ ID NO: 19120 - RNA, 22 nt, Homo sapiens
ucacaguugauugaaacacagc

SEQ ID NO: 19121 - RNA, 22 nt, Homo sapiens
ucacauuaagcuguuauuucuu

SEQ ID NO: 19122 - RNA, 22 nt, Homo sapiens
ucaaacugcuugaggccauuua

SEQ ID NO: 19123 - RNA, 22 nt, Homo sapiens
ugaauguaagaugucugcuggu

SEQ ID NO: 19124 - RNA, 22 nt, Homo sapiens
ugaauguuguugguugagauau

SEQ ID NO: 19125 - RNA, 22 nt, Homo sapiens
ugaauuguuuacgagaugugag

SEQ ID NO: 19126 - RNA, 22 nt, Homo sapiens
ugacaacugauuaacuccuuua

SEQ ID NO: 19127 - RNA, 22 nt, Homo sapiens
ugaaaguuauauugugaaauuc

SEQ ID NO: 19128 - RNA, 22 nt, Homo sapiens
ucuuuagugacaguugugcaag

SEQ ID NO: 19129 - RNA, 22 nt, Homo sapiens
ucucuguuuauuuuugguguau

SEQ ID NO: 19130 - RNA, 22 nt, Homo sapiens
ucugagcaauagauguggauau

SEQ ID NO: 19131 - RNA, 22 nt, Homo sapiens
ucucauagaggcagagaguaaa

SEQ ID NO: 19132 - RNA, 22 nt, Homo sapiens
ucuccauugaaauggacauaau

SEQ ID NO: 19133 - RNA, 22 nt, Homo sapiens
ggcaagugggagggaguguuuc

SEQ ID NO: 19134 - RNA, 22 nt, Homo sapiens
ggcaagugucagcagcaacacc

SEQ ID NO: 19135 - RNA, 21 nt, Homo sapiens
ggcaagugugagguuuggggu

SEQ ID NO: 19136 - RNA, 22 nt, Homo sapiens
ggugauguuugaguugagacag

SEQ ID NO: 19137 - RNA, 22 nt, Homo sapiens
ggcucguguuuucuguccaguu

SEQ ID NO: 19138 - RNA, 22 nt, Homo sapiens
gggaguagagaguuucucugac

SEQ ID NO: 19139 - RNA, 22 nt, Homo sapiens
gcugacagugguuauacuuaga

SEQ ID NO: 19140 - RNA, 22 nt, Homo sapiens
gcaagcuugcugggccugacuc

SEQ ID NO: 19141 - RNA, 22 nt, Homo sapiens
gcacaaugccugacgaguccug

SEQ ID NO: 19142 - RNA, 22 nt, Homo sapiens
ggaaaucaucauucucgguaua

SEQ ID NO: 19143 - RNA, 23 nt, Homo sapiens
ggaaacauccagucuuucaccau

SEQ ID NO: 19144 - RNA, 22 nt, Homo sapiens
gcuuuguuguugaugggaaauc

SEQ ID NO: 19145 - RNA, 21 nt, Homo sapiens
gcuuuuucggaagucuuuggc

SEQ ID NO: 19146 - RNA, 22 nt, Homo sapiens
guagaagcacagggccuguauu

SEQ ID NO: 19147 - RNA, 22 nt, Homo sapiens
guacaguuuucaguguucacug

SEQ ID NO: 19148 - RNA, 22 nt, Homo sapiens
guacauguaugcaugcaugcau

SEQ ID NO: 19149 - RNA, 22 nt, Homo sapiens
ggugaucauugucucuaguaug

SEQ ID NO: 19150 - RNA, 22 nt, Homo sapiens
guagagagaaauacaaagcugu

SEQ ID NO: 19151 - RNA, 22 nt, Homo sapiens
gucaucaucaguccucugugca

SEQ ID NO: 19152 - RNA, 21 nt, Homo sapiens
gucuuacagccagaugccucu

SEQ ID NO: 19153 - RNA, 20 nt, Homo sapiens
gucuugcuccguugcccagg

SEQ ID NO: 19154 - RNA, 22 nt, Homo sapiens
gucugguugacagcauguggcc

SEQ ID NO: 19155 - RNA, 21 nt, Homo sapiens
gucugguguuuuaaugaggac

SEQ ID NO: 19156 - RNA, 22 nt, Homo sapiens
gugaaagacauauaugguuuga

SEQ ID NO: 19157 - RNA, 22 nt, Homo sapiens
gugcaauucacuguuaugucug

SEQ ID NO: 19158 - RNA, 22 nt, Homo sapiens
guggcuuuauuuagaagcaggg

SEQ ID NO: 19159 - RNA, 22 nt, Homo sapiens
guggcuuuaaguacgauugagg

SEQ ID NO: 19160 - RNA, 22 nt, Homo sapiens
gugcaguuuacaguuacccagu

SEQ ID NO: 19161 - RNA, 22 nt, Homo sapiens
gugccacugcacuccggccugg

SEQ ID NO: 19162 - RNA, 21 nt, Homo sapiens
gugcuuguagccucacuucug

SEQ ID NO: 19163 - RNA, 22 nt, Homo sapiens
uaggugguuugaaauacucaag

SEQ ID NO: 19164 - RNA, 22 nt, Homo sapiens
uagguaguuuucccguauccaa

SEQ ID NO: 19165 - RNA, 22 nt, Homo sapiens
uagguaucuugguauaucagga

SEQ ID NO: 19166 - RNA, 22 nt, Homo sapiens
uagggaguguccuuucgggaaa

SEQ ID NO: 19167 - RNA, 22 nt, Homo sapiens
uagggcauuuagaggcuauuaa

SEQ ID NO: 19168 - RNA, 22 nt, Homo sapiens
uagguacuuaagaucucagcua

SEQ ID NO: 19169 - RNA, 22 nt, Homo sapiens
uaguuguugcagguaggaugua

SEQ ID NO: 19170 - RNA, 22 nt, Homo sapiens
uaggacacaggacauauguaga

SEQ ID NO: 19171 - RNA, 21 nt, Homo sapiens
uagcugaugauguaggggaug

SEQ ID NO: 19172 - RNA, 22 nt, Homo sapiens
uagcuggaguuuuuguuauagg

SEQ ID NO: 19173 - RNA, 21 nt, Homo sapiens
uagcauacauuuugcaucuua

SEQ ID NO: 19174 - RNA, 23 nt, Homo sapiens
uaugacagaggaagggggagcug

SEQ ID NO: 19175 - RNA, 22 nt, Homo sapiens
uaucugcaucccauuuuuauca

SEQ ID NO: 19176 - RNA, 23 nt, Homo sapiens
uaucucaaugcacagagaggaaa

SEQ ID NO: 19177 - RNA, 21 nt, Homo sapiens
uaugguuucuaauucugcagg

SEQ ID NO: 19178 - RNA, 22 nt, Homo sapiens
uauucaucuuaagcuuuggcuu

SEQ ID NO: 19179 - RNA, 22 nt, Homo sapiens
uauuccuuuugcauuuccacau

SEQ ID NO: 19180 - RNA, 22 nt, Homo sapiens
uaaacugcuugaaaugguguca

SEQ ID NO: 19181 - RNA, 22 nt, Homo sapiens
uaaagcauguaauuagguuaga

SEQ ID NO: 19182 - RNA, 21 nt, Homo sapiens
uaaaacuguaacuuuguccug

SEQ ID NO: 19183 - RNA, 22 nt, Homo sapiens
uaacuaaagagaagucaauguc

SEQ ID NO: 19184 - RNA, 22 nt, Homo sapiens
uaaagcuuagauccaugguggc

SEQ ID NO: 19185 - RNA, 22 nt, Homo sapiens
gugguuuuuuucugccuuauag

SEQ ID NO: 19186 - RNA, 22 nt, Homo sapiens
gugguuuuaauauucagucuag

SEQ ID NO: 19187 - RNA, 22 nt, Homo sapiens
gugguuuucaacuccaccugca

SEQ ID NO: 19188 - RNA, 22 nt, Homo sapiens
guuuacagucgacuugggaaua

SEQ ID NO: 19189 - RNA, 22 nt, Homo sapiens
guugcucaggccggagugcagu

SEQ ID NO: 19190 - RNA, 22 nt, Homo sapiens
guugcucaggcuggagugcagu

SEQ ID NO: 19191 - RNA, 22 nt, Homo sapiens
uacugcuuaaaagucaauuacu

SEQ ID NO: 19192 - RNA, 22 nt, Homo sapiens
uaccaucauuauacguagaaau

SEQ ID NO: 19193 - RNA, 22 nt, Homo sapiens
uaccauguaucugggaugcuuu

SEQ ID NO: 19194 - RNA, 22 nt, Homo sapiens
uacagugcuugguaucuaguaa

SEQ ID NO: 19195 - RNA, 22 nt, Homo sapiens
uacaguggcaugucaggugcuu

SEQ ID NO: 19196 - RNA, 22 nt, Homo sapiens
uacaucagccugaaagagcucg

SEQ ID NO: 19197 - RNA, 22 nt, Homo sapiens
uaauagcaguguuacuaggacu

SEQ ID NO: 19198 - RNA, 22 nt, Homo sapiens
uaauaguuggcacuggagaaag

SEQ ID NO: 19199 - RNA, 22 nt, Homo sapiens
auacugguuuuugucaugugga

SEQ ID NO: 19200 - RNA, 22 nt, Homo sapiens
auagaagcuauguauaggggcc

SEQ ID NO: 19201 - RNA, 22 nt, Homo sapiens
auagcagcaccucacucuacug

SEQ ID NO: 19202 - RNA, 22 nt, Homo sapiens
auagcagaagaagggacaauuc

SEQ ID NO: 19203 - RNA, 22 nt, Homo sapiens
auagcaaugccccacuccuugg

SEQ ID NO: 19204 - RNA, 22 nt, Homo sapiens
auagcagaauuuggucaagucu

SEQ ID NO: 19205 - RNA, 22 nt, Homo sapiens
auacacuggagcaaaccuggag

SEQ ID NO: 19206 - RNA, 18 nt, Homo sapiens
auacaagcagcagagauu

SEQ ID NO: 19207 - RNA, 22 nt, Homo sapiens
aucaaguaaucugaguaagagu

SEQ ID NO: 19208 - RNA, 22 nt, Homo sapiens
aucaaguacuguacugaaagug

SEQ ID NO: 19209 - RNA, 22 nt, Homo sapiens
aucaaguaguuauacguaaagg

SEQ ID NO: 19210 - RNA, 22 nt, Homo sapiens
aucaaaguuucccagaaguugu

SEQ ID NO: 19211 - RNA, 22 nt, Homo sapiens
aucaaaucuccagaaccugucu

SEQ ID NO: 19212 - RNA, 22 nt, Homo sapiens
aucagugcagugggaacuagaa

SEQ ID NO: 19213 - RNA, 22 nt, Homo sapiens
aucagugcauguuuguugagcu

SEQ ID NO: 19214 - RNA, 22 nt, Homo sapiens
aucauacuguuuugauuacugu

SEQ ID NO: 19215 - RNA, 22 nt, Homo sapiens
aucuacagccagucugguuugu

SEQ ID NO: 19216 - RNA, 21 nt, Homo sapiens
aucucacuugaauguaaaagc

SEQ ID NO: 19217 - RNA, 22 nt, Homo sapiens
auggaacuggagaugguuauau

SEQ ID NO: 19218 - RNA, 22 nt, Homo sapiens
auggcuuugggcugcucugccc

SEQ ID NO: 19219 - RNA, 22 nt, Homo sapiens
auggcuuuguguucagagcuga

SEQ ID NO: 19220 - RNA, 22 nt, Homo sapiens
auggcuuuuauuguguugaggu

SEQ ID NO: 19221 - RNA, 22 nt, Homo sapiens
auggcuuuuccugucuugcaug

SEQ ID NO: 19222 - RNA, 22 nt, Homo sapiens
auggcuuuugaccugguaggau

SEQ ID NO: 19223 - RNA, 22 nt, Homo sapiens
augucaaagaggaaaacuggau

SEQ ID NO: 19224 - RNA, 22 nt, Homo sapiens
augucauagaagccugugaacc

SEQ ID NO: 19225 - RNA, 22 nt, Homo sapiens
augugcuugagggaaaucaguu

SEQ ID NO: 19226 - RNA, 22 nt, Homo sapiens
auuaagugaaugaaguuguucc

SEQ ID NO: 19227 - RNA, 22 nt, Homo sapiens
augaggagauauuaaauaccau

SEQ ID NO: 19228 - RNA, 22 nt, Homo sapiens
augaggugcagaggaaaugagu

SEQ ID NO: 19229 - RNA, 22 nt, Homo sapiens
augaggugggagaaucacuuga

SEQ ID NO: 19230 - RNA, 22 nt, Homo sapiens
augcauggucugaagucaaccu

SEQ ID NO: 19231 - RNA, 22 nt, Homo sapiens
augcaacugcacuccagccugg

SEQ ID NO: 19232 - RNA, 22 nt, Homo sapiens
augcuguuuugaauucucuaga

SEQ ID NO: 19233 - RNA, 22 nt, Homo sapiens
augcuacuggacaauggugacu

SEQ ID NO: 19234 - RNA, 22 nt, Homo sapiens
augcuuguugcagccugagccu

SEQ ID NO: 19235 - RNA, 22 nt, Homo sapiens
augccacugcacucuagccugg

SEQ ID NO: 19236 - RNA, 22 nt, Homo sapiens
augccacugcacuucagccugc

SEQ ID NO: 19237 - RNA, 22 nt, Homo sapiens
augccacugcacuucagcuugg

SEQ ID NO: 19238 - RNA, 22 nt, Homo sapiens
augccacuguuuaugucacuua

SEQ ID NO: 19239 - RNA, 22 nt, Homo sapiens
agcagauguuuagugagcgccu

SEQ ID NO: 19240 - RNA, 22 nt, Homo sapiens
agcugauggucuuguaugaugu

SEQ ID NO: 19241 - RNA, 22 nt, Homo sapiens
agcagugugaaaugauuuaagg

SEQ ID NO: 19242 - RNA, 19 nt, Homo sapiens
agcaguguggagauuucuc

SEQ ID NO: 19243 - RNA, 22 nt, Homo sapiens
agacccuguauguguuuaguuu

SEQ ID NO: 19244 - RNA, 22 nt, Homo sapiens
agacaagauggcuugagguuca

SEQ ID NO: 19245 - RNA, 22 nt, Homo sapiens
agacacuguugaaaaggcccca

SEQ ID NO: 19246 - RNA, 22 nt, Homo sapiens
acuguacugucuggggcagucu

SEQ ID NO: 19247 - RNA, 22 nt, Homo sapiens
aggagcacaauggucaugugga

SEQ ID NO: 19248 - RNA, 22 nt, Homo sapiens
agcugcauuuacuuuugcacaa

SEQ ID NO: 19249 - RNA, 21 nt, Homo sapiens
agcugguuuccacagugugcu

SEQ ID NO: 19250 - RNA, 22 nt, Homo sapiens
agcuuguuuucccauaacuaga

SEQ ID NO: 19251 - RNA, 22 nt, Homo sapiens
agcuuuggauaccugcuguucc

SEQ ID NO: 19252 - RNA, 20 nt, Homo sapiens
agguucaaaucccaaucaug

SEQ ID NO: 19253 - RNA, 22 nt, Homo sapiens
aaauggauuaaguucacuugcu

SEQ ID NO: 19254 - RNA, 22 nt, Homo sapiens
aaaugggacugggguccuuuga

SEQ ID NO: 19255 - RNA, 22 nt, Homo sapiens
aaauucaucaaaugguuuguau

SEQ ID NO: 19256 - RNA, 22 nt, Homo sapiens
aacaccaucccuuugaugcuuu

SEQ ID NO: 19257 - RNA, 19 nt, Homo sapiens
aagugguuuaaacuuguau

SEQ ID NO: 19258 - RNA, 22 nt, Homo sapiens
aauaaagccugucucuuuagag

SEQ ID NO: 19259 - RNA, 22 nt, Homo sapiens
aauuaguaaccuaauuccaucu

SEQ ID NO: 19260 - RNA, 22 nt, Homo sapiens
aauuacucgugucuuuacugcu

SEQ ID NO: 19261 - RNA, 22 nt, Homo sapiens
aauugcacuggaaguaacugag

SEQ ID NO: 19262 - RNA, 22 nt, Homo sapiens
acacuguaacucuuugagggca

SEQ ID NO: 19263 - RNA, 22 nt, Homo sapiens
acacuguacuuauguuuugcag

SEQ ID NO: 19264 - RNA, 22 nt, Homo sapiens
acacuguagcugagggcaugcg

SEQ ID NO: 19265 - RNA, 22 nt, Homo sapiens
acacuguugacauuuuguagug

SEQ ID NO: 19266 - RNA, 22 nt, Homo sapiens
acaccaugucuguuucugguuu

SEQ ID NO: 19267 - RNA, 22 nt, Homo sapiens
acaguacucugcucuuuugauu

SEQ ID NO: 19268 - RNA, 22 nt, Homo sapiens
acagucacaauuuguaccuuuu

SEQ ID NO: 19269 - RNA, 22 nt, Homo sapiens
acagcagugccccacucuacug

SEQ ID NO: 19270 - RNA, 22 nt, Homo sapiens
acaggugaaguauuacacuaag

SEQ ID NO: 19271 - RNA, 22 nt, Homo sapiens
acuccauuuggacucugggagg

SEQ ID NO: 19272 - RNA, 22 nt, Homo sapiens
acaguggugcgaucucggcuca

SEQ ID NO: 19273 - RNA, 23 nt, Homo sapiens
acaguggugugaucuuggcucag

SEQ ID NO: 19274 - RNA, 18 nt, Homo sapiens
acugcacuccauccuagg

SEQ ID NO: 19275 - RNA, 22 nt, Homo sapiens
acugcacugcagccuggccaac

SEQ ID NO: 19276 - RNA, 22 nt, Homo sapiens
acugcacucuagccuuggcaac

SEQ ID NO: 19277 - RNA, 22 nt, Homo sapiens
acugcacuucaaccucauugac

SEQ ID NO: 19278 - RNA, 22 nt, Homo sapiens
acugcacuccagacucugucuc

SEQ ID NO: 19279 - RNA, 22 nt, Homo sapiens
acugcacuccacccuuggcagc

SEQ ID NO: 19280 - RNA, 22 nt, Homo sapiens
acugcacuccagccuugcgaca

SEQ ID NO: 19281 - RNA, 22 nt, Homo sapiens
acugcacuccagccuuggcaac

SEQ ID NO: 19282 - RNA, 22 nt, Homo sapiens
aaaggcaucugcucggcucccu

SEQ ID NO: 19283 - RNA, 22 nt, Homo sapiens
aaagugcugagaguucuaacuu

SEQ ID NO: 19284 - RNA, 22 nt, Homo sapiens
aaagugcugggaucacacugaa

SEQ ID NO: 19285 - RNA, 22 nt, Homo sapiens
aaagugcaguacuucguauauu

SEQ ID NO: 19286 - RNA, 22 nt, Homo sapiens
aaagugcugggauuuuaggcau

SEQ ID NO: 19287 - RNA, 22 nt, Homo sapiens
aaaguguuucugcaguagguuu

SEQ ID NO: 19288 - RNA, 19 nt, Homo sapiens
aaaguguuuuaaagaggau

SEQ ID NO: 19289 - RNA, 22 nt, Homo sapiens
aaaagcauucagagugcugggc

SEQ ID NO: 19290 - RNA, 22 nt, Homo sapiens
aaggcaagauacugguugcuga

SEQ ID NO: 19291 - RNA, 22 nt, Homo sapiens
aagugguucuaugaguuugcaa

SEQ ID NO: 19292 - RNA, 22 nt, Homo sapiens
aacagagcuggugacuccaggu

SEQ ID NO: 19293 - RNA, 20 nt, Homo sapiens
aacagcacugucugaagcuu

SEQ ID NO: 19294 - RNA, 22 nt, Homo sapiens
aaaugcagucuuuguucugggc

SEQ ID NO: 19295 - RNA, 22 nt, Homo sapiens
aagaguuaguaaaauuuccucu

SEQ ID NO: 19296 - RNA, 22 nt, Homo sapiens
aaccuauaguauugaaaucaag

SEQ ID NO: 19297 - RNA, 22 nt, Homo sapiens
gaugaucucuggugguaaagac

SEQ ID NO: 19298 - RNA, 17 nt, Homo sapiens
gaucacagucgucuccu

SEQ ID NO: 19299 - RNA, 22 nt, Homo sapiens
gcuaaaugcaugaggcgaugug

SEQ ID NO: 19300 - RNA, 22 nt, Homo sapiens
gcugcuguuauucaucagaacu

SEQ ID NO: 19301 - RNA, 22 nt, Homo sapiens
gcuguaguugaggauuuuaaga

SEQ ID NO: 19302 - RNA, 22 nt, Homo sapiens
gcauaugucuuuauagcagcau

SEQ ID NO: 19303 - RNA, 22 nt, Homo sapiens
gcccauuguuccuaggcuacaa

SEQ ID NO: 19304 - RNA, 22 nt, Homo sapiens
gauuccauugcgaauuuucaga

SEQ ID NO: 19305 - RNA, 22 nt, Homo sapiens
gcauaaagcuaauaagacgaag

SEQ ID NO: 19306 - RNA, 22 nt, Homo sapiens
gaauacugacuauuucaucugg

SEQ ID NO: 19307 - RNA, 22 nt, Homo sapiens
cuuguucuccuaagaugaaugc

SEQ ID NO: 19308 - RNA, 17 nt, Homo sapiens
cuuguugugguaguuug

SEQ ID NO: 19309 - RNA, 21 nt, Homo sapiens
gagaaucaucauggcugcaua

SEQ ID NO: 19310 - RNA, 18 nt, Homo sapiens
gacagugugaagauuccu

SEQ ID NO: 19311 - RNA, 22 nt, Homo sapiens
gagaccauuuacugccuacuua

SEQ ID NO: 19312 - RNA, 18 nt, Homo sapiens
cuuggcgaugccaacaua

SEQ ID NO: 19313 - RNA, 22 nt, Homo sapiens
cuuccauaguauuuuuacaaaa

SEQ ID NO: 19314 - RNA, 22 nt, Homo sapiens
cugagguaggugaucagugcuu

SEQ ID NO: 19315 - RNA, 20 nt, Homo sapiens
cugcacauccacucuacuuc

SEQ ID NO: 19316 - RNA, 22 nt, Homo sapiens
cuguugcaguuauggcugcagg

SEQ ID NO: 19317 - RNA, 19 nt, Homo sapiens
cuguuguacuccaggcauu

SEQ ID NO: 19318 - RNA, 22 nt, Homo sapiens
cuuaaagcgaauauugguggua

SEQ ID NO: 19319 - RNA, 22 nt, Homo sapiens
cuucaaguguggccaccugacc

SEQ ID NO: 19320 - RNA, 22 nt, Homo sapiens
caccagcuggcauugaauaccu

SEQ ID NO: 19321 - RNA, 22 nt, Homo sapiens
caaauugcuuguggaggauaau

SEQ ID NO: 19322 - RNA, 22 nt, Homo sapiens
caaagugguuuauacaugauug

SEQ ID NO: 19323 - RNA, 22 nt, Homo sapiens
cagugguuuuuagcuugcuggg

SEQ ID NO: 19324 - RNA, 22 nt, Homo sapiens
caguuguuuuaugacauaagau

SEQ ID NO: 19325 - RNA, 22 nt, Homo sapiens
cauacagcuaguaaguguaaga

SEQ ID NO: 19326 - RNA, 22 nt, Homo sapiens
auuagguuggugcaaaaguaau

SEQ ID NO: 19327 - RNA, 22 nt, Homo sapiens
auugccuagccuggucucaaaa

SEQ ID NO: 19328 - RNA, 22 nt, Homo sapiens
auugcugagacauugcuaaucu

SEQ ID NO: 19329 - RNA, 22 nt, Homo sapiens
auuggcaaucgucuccauuuuu

SEQ ID NO: 19330 - RNA, 22 nt, Homo sapiens
auuggcaauggcaaagcagagu

SEQ ID NO: 19331 - RNA, 22 nt, Homo sapiens
auuggcagaaaucuuuauagua

SEQ ID NO: 19332 - RNA, 22 nt, Homo sapiens
auuucacugagacaugugccca

SEQ ID NO: 19333 - RNA, 22 nt, Homo sapiens
cccgugucuuggucuagggccu

SEQ ID NO: 19334 - RNA, 21 nt, Homo sapiens
ccuccauuuguauucuugccc

SEQ ID NO: 19335 - RNA, 22 nt, Homo sapiens
cccagcguucggcauggcugag

SEQ ID NO: 19336 - RNA, 22 nt, Homo sapiens
ccauugaacaugaaggaaugug

SEQ ID NO: 19337 - RNA, 22 nt, Homo sapiens
caucacauucugagauacugag

SEQ ID NO: 19338 - RNA, 22 nt, Homo sapiens
caucaggugaggauucaaugca

SEQ ID NO: 19339 - RNA, 22 nt, Homo sapiens
ccaaaguauuuucacugauauc

SEQ ID NO: 19340 - RNA, 19 nt, Homo sapiens
ccacaaugguugaacuaga

SEQ ID NO: 19341 - RNA, 23 nt, Homo sapiens
ccacaaugguugaacuagauuac

SEQ ID NO: 19342 - RNA, 22 nt, Homo sapiens
ccagaguuucugauucagcagg

SEQ ID NO: 19343 - RNA, 20 nt, Homo sapiens
ccaucaguccucucuuguuc

SEQ ID NO: 19344 - RNA, 22 nt, Homo sapiens
cuaugucuuucauauuuugggg

SEQ ID NO: 19345 - RNA, 21 nt, Homo sapiens
cucaaaguacugauauuacag

SEQ ID NO: 19346 - RNA, 22 nt, Homo sapiens
cuaggcacugauaguuguauuu

SEQ ID NO: 19347 - RNA, 22 nt, Homo sapiens
ccuuggcacuacugacauugua

SEQ ID NO: 19348 - RNA, 22 nt, Homo sapiens
cucacuggguguaaaacaugua

SEQ ID NO: 19349 - RNA, 22 nt, Homo sapiens
cucauggaauacuucacagcca

SEQ ID NO: 19350 - RNA, 22 nt, Homo sapiens
cucauggagaacaucugcuagg

SEQ ID NO: 19351 - RNA, 22 nt, Homo sapiens
cugaaaagcaucugcauagcug

SEQ ID NO: 19352 - RNA, 22 nt, Homo sapiens
cugaaagagcauguaacacagu

SEQ ID NO: 19353 - RNA, 22 nt, Homo sapiens
cucauggagauagagaauagaa

SEQ ID NO: 19354 - RNA, 22 nt, Homo sapiens
uagagagcuguuugaaagcagg

SEQ ID NO: 19355 - RNA, 22 nt, Homo sapiens
uagaccaauuggcauauaguaa

SEQ ID NO: 19356 - RNA, 22 nt, Homo sapiens
uagaccauucuauuuccuaugc

SEQ ID NO: 19357 - RNA, 22 nt, Homo sapiens
uacucugcagccauaaaacaga

SEQ ID NO: 19358 - RNA, 22 nt, Homo sapiens
uacaguggugugaucucagcuc

SEQ ID NO: 19359 - RNA, 22 nt, Homo sapiens
uacaccugcacucuagccuggg

SEQ ID NO: 19360 - RNA, 22 nt, Homo sapiens
uacaccauuugauucuuuaagc

SEQ ID NO: 19361 - RNA, 22 nt, Homo sapiens
uaaucucagcuacucaggaggc

SEQ ID NO: 19362 - RNA, 22 nt, Homo sapiens
uaauucuguauguaucagaguu

SEQ ID NO: 19363 - RNA, 22 nt, Homo sapiens
uacaaagugggaaacgaagguu

SEQ ID NO: 19364 - RNA, 22 nt, Homo sapiens
guuggcaagaggugcuguacac

SEQ ID NO: 19365 - RNA, 22 nt, Homo sapiens
guuggugaccugaagagaguaa

SEQ ID NO: 19366 - RNA, 22 nt, Homo sapiens
uaaguaaaugaaagguugauuu

SEQ ID NO: 19367 - RNA, 22 nt, Homo sapiens
uaagugaugucuuuuugugugc

SEQ ID NO: 19368 - RNA, 22 nt, Homo sapiens
uauuuggauagucuggaaaaaa

SEQ ID NO: 19369 - RNA, 22 nt, Homo sapiens
uauuccauuugggucaggauga

SEQ ID NO: 19370 - RNA, 22 nt, Homo sapiens
uauuccauuugugaaaggaagu

SEQ ID NO: 19371 - RNA, 22 nt, Homo sapiens
uauggacuuuaggauagcuuuu

SEQ ID NO: 19372 - RNA, 22 nt, Homo sapiens
uauaacaaugcaagaauggccu

SEQ ID NO: 19373 - RNA, 22 nt, Homo sapiens
uagguaggugucauaauccaug

SEQ ID NO: 19374 - RNA, 21 nt, Homo sapiens
uagcagcguuguugcaaaugu

SEQ ID NO: 19375 - RNA, 22 nt, Homo sapiens
uagcaguaccccaguauccugg

SEQ ID NO: 19376 - RNA, 22 nt, Homo sapiens
uagcagcaaagcaggaucugcu

SEQ ID NO: 19377 - RNA, 19 nt, Homo sapiens
ggcucagucaacugacugu

SEQ ID NO: 19378 - RNA, 22 nt, Homo sapiens
ggaauaguauaaauaccacaaa

SEQ ID NO: 19379 - RNA, 22 nt, Homo sapiens
ggaagaauauuaggggauuucg

SEQ ID NO: 19380 - RNA, 22 nt, Homo sapiens
ggaaaguccuucuguaggcucc

SEQ ID NO: 19381 - RNA, 22 nt, Homo sapiens
gggaagaaggagugguuuacuc

SEQ ID NO: 19382 - RNA, 22 nt, Homo sapiens
gggaagauauaggcugggcacc

SEQ ID NO: 19383 - RNA, 22 nt, Homo sapiens
gggaaugaagagaaccuuccca

SEQ ID NO: 19384 - RNA, 22 nt, Homo sapiens
gguaaaucuucacuaagacuga

SEQ ID NO: 19385 - RNA, 22 nt, Homo sapiens
guagaagcacaggugaguuggu

SEQ ID NO: 19386 - RNA, 22 nt, Homo sapiens
guaugcacauauguguauguau

SEQ ID NO: 19387 - RNA, 22 nt, Homo sapiens
guaugucuugucuauggcugcu

SEQ ID NO: 19388 - RNA, 22 nt, Homo sapiens
guaugucuuuauagcagugugg

SEQ ID NO: 19389 - RNA, 22 nt, Homo sapiens
guagaaaguuugcugucacaug

SEQ ID NO: 19390 - RNA, 22 nt, Homo sapiens
guaaagacacaugcacacguau

SEQ ID NO: 19391 - RNA, 22 nt, Homo sapiens
ggugcuugaggaacggaggcug

SEQ ID NO: 19392 - RNA, 22 nt, Homo sapiens
gugccuuuucugagcaaugagc

SEQ ID NO: 19393 - RNA, 22 nt, Homo sapiens
gugguaaaauggcauagagcua

SEQ ID NO: 19394 - RNA, 22 nt, Homo sapiens
guguaguuugagguaugggggc

SEQ ID NO: 19395 - RNA, 22 nt, Homo sapiens
gugggagugucccguuuuucca

SEQ ID NO: 19396 - RNA, 22 nt, Homo sapiens
gugggaagcuggaacucccucc

SEQ ID NO: 19397 - RNA, 22 nt, Homo sapiens
guuacagucuuguguaagguua

SEQ ID NO: 19398 - RNA, 22 nt, Homo sapiens
gugucacagcuuccaucucggu

SEQ ID NO: 19399 - RNA, 22 nt, Homo sapiens
guucaucagggacacugguuug

SEQ ID NO: 19400 - RNA, 22 nt, Homo sapiens
guugcucaggcugaagugcagu

SEQ ID NO: 19401 - RNA, 21 nt, Homo sapiens
gugaggaguuacuggcuuuga

SEQ ID NO: 19402 - RNA, 22 nt, Homo sapiens
gugcaguuuugagugaguuucu

SEQ ID NO: 19403 - RNA, 22 nt, Homo sapiens
gugcaguuuuaagugaguuucu

SEQ ID NO: 19404 - RNA, 22 nt, Homo sapiens
guccauuuguuuccagagcacu

SEQ ID NO: 19405 - RNA, 22 nt, Homo sapiens
gugagauuaccauuuaaaucag

SEQ ID NO: 19406 - RNA, 22 nt, Homo sapiens
gugagauuuucuccagguucag

SEQ ID NO: 19407 - RNA, 22 nt, Homo sapiens
gugagcagagaucgcgugauug

SEQ ID NO: 19408 - RNA, 20 nt, Homo sapiens
guccauuugcugccauugcu

SEQ ID NO: 19409 - RNA, 22 nt, Homo sapiens
guccaugagaugaauccacaca

SEQ ID NO: 19410 - RNA, 22 nt, Homo sapiens
uugcauauguugaaccagccuu

SEQ ID NO: 19411 - RNA, 22 nt, Homo sapiens
uugcacagugcuuucuuugccc

SEQ ID NO: 19412 - RNA, 22 nt, Homo sapiens
uugcaaugugaugugauuugga

SEQ ID NO: 19413 - RNA, 22 nt, Homo sapiens
uugcacuugcugaggagugauu

SEQ ID NO: 19414 - RNA, 22 nt, Homo sapiens
uugaauagcauguuuagugcau

SEQ ID NO: 19415 - RNA, 22 nt, Homo sapiens
uugaauguacuuguucucacua

SEQ ID NO: 19416 - RNA, 22 nt, Homo sapiens
uugauguugaggacauaaaccu

SEQ ID NO: 19417 - RNA, 22 nt, Homo sapiens
uugccaauauuuuacugagaag

SEQ ID NO: 19418 - RNA, 22 nt, Homo sapiens
uugccuaggcuggagugcagua

SEQ ID NO: 19419 - RNA, 22 nt, Homo sapiens
uugccuaggcuggaguucagug

SEQ ID NO: 19420 - RNA, 22 nt, Homo sapiens
uugccuaggcuggauugcagug

SEQ ID NO: 19421 - RNA, 22 nt, Homo sapiens
uugcaugguggaacuuggagcu

SEQ ID NO: 19422 - RNA, 22 nt, Homo sapiens
uugcaugguuuuuaucugaaau

SEQ ID NO: 19423 - RNA, 22 nt, Homo sapiens
uugcuauguugcccagucugga

SEQ ID NO: 19424 - RNA, 22 nt, Homo sapiens
uuggaaauguguuugcauucag

SEQ ID NO: 19425 - RNA, 22 nt, Homo sapiens
uuggaaauauguuaagugucau

SEQ ID NO: 19426 - RNA, 22 nt, Homo sapiens
uuggaagacauucugucugcua

SEQ ID NO: 19427 - RNA, 22 nt, Homo sapiens
uuggaagagaagggagauaaac

SEQ ID NO: 19428 - RNA, 22 nt, Homo sapiens
uuggaagauuacuuaguuuucu

SEQ ID NO: 19429 - RNA, 22 nt, Homo sapiens
uuggcaagcuguuaauuauaaa

SEQ ID NO: 19430 - RNA, 22 nt, Homo sapiens
uuggcaauauuuacugaaguug

SEQ ID NO: 19431 - RNA, 22 nt, Homo sapiens
uugguauguguuucauacucaa

SEQ ID NO: 19432 - RNA, 22 nt, Homo sapiens
uuugugaaugucauaagcucca

SEQ ID NO: 19433 - RNA, 22 nt, Homo sapiens
uuugguuuuuguuaucacucau

SEQ ID NO: 19434 - RNA, 22 nt, Homo sapiens
uuuggguuuuauguaacagcua

SEQ ID NO: 19435 - RNA, 22 nt, Homo sapiens
uuugguaauguuucauugcaga

SEQ ID NO: 19436 - RNA, 22 nt, Homo sapiens
uuuggucuuuuauuuaaagcag

SEQ ID NO: 19437 - RNA, 21 nt, Homo sapiens
uuuggcuucucugcugcagcc

SEQ ID NO: 19438 - RNA, 22 nt, Homo sapiens
uuugggaaaugaaguugguaga

SEQ ID NO: 19439 - RNA, 22 nt, Homo sapiens
uuugggaaugguuugucuccca

SEQ ID NO: 19440 - RNA, 18 nt, Homo sapiens
uuuggcuguucaugacuc

SEQ ID NO: 19441 - RNA, 22 nt, Homo sapiens
uuugagaucuuuagaaucaggc

SEQ ID NO: 19442 - RNA, 22 nt, Homo sapiens
uuugaaaguaauuugguuggug

SEQ ID NO: 19443 - RNA, 21 nt, Homo sapiens
uuugaucauuaaaagugaauc

SEQ ID NO: 19444 - RNA, 16 nt, Homo sapiens
uuugcaagaucagaag

SEQ ID NO: 19445 - RNA, 22 nt, Homo sapiens
uuugcagagucuuucgcugggc

SEQ ID NO: 19446 - RNA, 22 nt, Homo sapiens
uuugcaguguaguuggccagca

SEQ ID NO: 19447 - RNA, 22 nt, Homo sapiens
uuugcauauguugaaccagccu

SEQ ID NO: 19448 - RNA, 22 nt, Homo sapiens
uuguaguguuuauucugucaac

SEQ ID NO: 19449 - RNA, 22 nt, Homo sapiens
uuguauguuguuugucagagaa

SEQ ID NO: 19450 - RNA, 22 nt, Homo sapiens
uuucucaguguuucaggguagg

SEQ ID NO: 19451 - RNA, 22 nt, Homo sapiens
uucuucaggccacaaaaauggu

SEQ ID NO: 19452 - RNA, 22 nt, Homo sapiens
uucuucaguuacaacaaggggg

SEQ ID NO: 19453 - RNA, 22 nt, Homo sapiens
uuccuaguccugagucucugcg

SEQ ID NO: 19454 - RNA, 22 nt, Homo sapiens
uuccguguaguugagcaguuuu

SEQ ID NO: 19455 - RNA, 22 nt, Homo sapiens
uucccugugggcuggugcucca

SEQ ID NO: 19456 - RNA, 22 nt, Homo sapiens
uuccauuuguucggugucgcca

SEQ ID NO: 19457 - RNA, 20 nt, Homo sapiens
uucaugggagcaaagaggcc

SEQ ID NO: 19458 - RNA, 22 nt, Homo sapiens
uucaugucuuggcuguuagagu

SEQ ID NO: 19459 - RNA, 22 nt, Homo sapiens
uucauuggacuuguguucuuga

SEQ ID NO: 19460 - RNA, 22 nt, Homo sapiens
uucaucuggcaauucagagauu

SEQ ID NO: 19461 - RNA, 22 nt, Homo sapiens
uucauggugguacaaaagcaau

SEQ ID NO: 19462 - RNA, 22 nt, Homo sapiens
uucaaaguaaaaauguguucac

SEQ ID NO: 19463 - RNA, 22 nt, Homo sapiens
uucaaaguguugguuuugggcu

SEQ ID NO: 19464 - RNA, 23 nt, Homo sapiens
uucaacagguagacccucccugc

SEQ ID NO: 19465 - RNA, 22 nt, Homo sapiens
uucaagauggccccagugagcc

SEQ ID NO: 19466 - RNA, 22 nt, Homo sapiens
uucacagccgcaccccaucacu

SEQ ID NO: 19467 - RNA, 22 nt, Homo sapiens
uucaguucugcacugaucuuag

SEQ ID NO: 19468 - RNA, 22 nt, Homo sapiens
uucaguauugcaccuggagucc

SEQ ID NO: 19469 - RNA, 18 nt, Homo sapiens
uuauaugcauguguagga

SEQ ID NO: 19470 - RNA, 22 nt, Homo sapiens
uuauauguuagacauggugggu

SEQ ID NO: 19471 - RNA, 22 nt, Homo sapiens
uguaauaguaggcucacauuug

SEQ ID NO: 19472 - RNA, 22 nt, Homo sapiens
uguagauaucauuagugcugug

SEQ ID NO: 19473 - RNA, 22 nt, Homo sapiens
uguagcaaaucgauacuauugg

SEQ ID NO: 19474 - RNA, 22 nt, Homo sapiens
uguagcaaauaaaagucuggau

SEQ ID NO: 19475 - RNA, 22 nt, Homo sapiens
ugugaugugaugagaaguuccu

SEQ ID NO: 19476 - RNA, 22 nt, Homo sapiens
ugugguuuuaguaaaacuaugu

SEQ ID NO: 19477 - RNA, 22 nt, Homo sapiens
ugugcucaucucagucaacugu

SEQ ID NO: 19478 - RNA, 22 nt, Homo sapiens
ugugcgcaucggggccugcuuc

SEQ ID NO: 19479 - RNA, 22 nt, Homo sapiens
uuaaaggcaugguuagacaugg

SEQ ID NO: 19480 - RNA, 22 nt, Homo sapiens
uuaaggcagugcaucuggaguu

SEQ ID NO: 19481 - RNA, 22 nt, Homo sapiens
uuaagacaccaaucauuggauu

SEQ ID NO: 19482 - RNA, 22 nt, Homo sapiens
uuaagcaguggauuagaauuuu

SEQ ID NO: 19483 - RNA, 22 nt, Homo sapiens
uguguuuuuauguaaaauggaa

SEQ ID NO: 19484 - RNA, 22 nt, Homo sapiens
uguuaacauggucucagucugu

SEQ ID NO: 19485 - RNA, 22 nt, Homo sapiens
uguuacacugugcacuaaauuu

SEQ ID NO: 19486 - RNA, 22 nt, Homo sapiens
uggacuguaauuuuauaggcau

SEQ ID NO: 19487 - RNA, 22 nt, Homo sapiens
uggaagauucuagaagauucca

SEQ ID NO: 19488 - RNA, 22 nt, Homo sapiens
uggagaacauucauuugcaaga

SEQ ID NO: 19489 - RNA, 22 nt, Homo sapiens
uggagagugauaaguaaaugga

SEQ ID NO: 19490 - RNA, 19 nt, Homo sapiens
ugccauguagcacaugguc

SEQ ID NO: 19491 - RNA, 22 nt, Homo sapiens
ugccauagagauuuguggaacu

SEQ ID NO: 19492 - RNA, 22 nt, Homo sapiens
ugccuaguguguugagaguuuu

SEQ ID NO: 19493 - RNA, 22 nt, Homo sapiens
ugccugcugucuaauauauucu

SEQ ID NO: 19494 - RNA, 20 nt, Homo sapiens
uggaaauuaaccuuucaggu

SEQ ID NO: 19495 - RNA, 23 nt, Homo sapiens
uggguucccuaagcgcaugcugc

SEQ ID NO: 19496 - RNA, 22 nt, Homo sapiens
ugguaaguuuaacaugcauccc

SEQ ID NO: 19497 - RNA, 19 nt, Homo sapiens
uggguaguuuucuggcugg

SEQ ID NO: 19498 - RNA, 22 nt, Homo sapiens
uggguaguuuuucagcucuugc

SEQ ID NO: 19499 - RNA, 22 nt, Homo sapiens
uggcuuuuccuugaaucugccu

SEQ ID NO: 19500 - RNA, 22 nt, Homo sapiens
uggcuguuuauuucaccuggau

SEQ ID NO: 19501 - RNA, 22 nt, Homo sapiens
uggcuuuuaucuacucucaacu

SEQ ID NO: 19502 - RNA, 22 nt, Homo sapiens
uggcaguuuuaugugguucaac

SEQ ID NO: 19503 - RNA, 22 nt, Homo sapiens
uggcaguuucauaugguucaac

SEQ ID NO: 19504 - RNA, 19 nt, Homo sapiens
uggcacauguauacauaug

SEQ ID NO: 19505 - RNA, 22 nt, Homo sapiens
uggcaagaacaacaauuacuuu

SEQ ID NO: 19506 - RNA, 22 nt, Homo sapiens
uggcaagaacugcaauugcuuu

SEQ ID NO: 19507 - RNA, 22 nt, Homo sapiens
uggcaaaauauuuugguuucug

SEQ ID NO: 19508 - RNA, 22 nt, Homo sapiens
ugauccagugcucaguuggagu

SEQ ID NO: 19509 - RNA, 22 nt, Homo sapiens
ugauguguuuuguaguucaacu

SEQ ID NO: 19510 - RNA, 22 nt, Homo sapiens
ugcauaucuucagccgggcacg

SEQ ID NO: 19511 - RNA, 22 nt, Homo sapiens
ugcacacucuguaugagaaucu

SEQ ID NO: 19512 - RNA, 22 nt, Homo sapiens
ugauaggagauuuucaucugua

SEQ ID NO: 19513 - RNA, 22 nt, Homo sapiens
ugagguugucagugucauucuu

SEQ ID NO: 19514 - RNA, 22 nt, Homo sapiens
ugaaauguuaaacaaguggcuc

SEQ ID NO: 19515 - RNA, 22 nt, Homo sapiens
ugaauaguuugacagaacucuu

SEQ ID NO: 19516 - RNA, 22 nt, Homo sapiens
ugaauguaacuaaaccugugaa

SEQ ID NO: 19517 - RNA, 22 nt, Homo sapiens
ugaauguaacuaaaggacuuuu

SEQ ID NO: 19518 - RNA, 22 nt, Homo sapiens
ugacaagacuacauaucccauu

SEQ ID NO: 19519 - RNA, 22 nt, Homo sapiens
aacagcacacccgcugcuucca

SEQ ID NO: 19520 - RNA, 21 nt, Homo sapiens
uccuuggugaugcccugcagu

SEQ ID NO: 19521 - RNA, 22 nt, Homo sapiens
ucgcagcacgagcaugcaaggu

SEQ ID NO: 19522 - RNA, 18 nt, Homo sapiens
ucucacagcaaucuguca

SEQ ID NO: 19523 - RNA, 19 nt, Homo sapiens
ucucacagcucuacuaugu

SEQ ID NO: 19524 - RNA, 22 nt, Homo sapiens
ucucaugaagauagagaauaga

SEQ ID NO: 19525 - RNA, 22 nt, Homo sapiens
ucuccauuguccagaugaggaa

SEQ ID NO: 19526 - RNA, 22 nt, Homo sapiens
ucugguuccugcauucauucaa

SEQ ID NO: 19527 - RNA, 22 nt, Homo sapiens
ucugucaaaucuuauguuguag

SEQ ID NO: 19528 - RNA, 22 nt, Homo sapiens
ucagaugauucuguuguugugu

SEQ ID NO: 19529 - RNA, 22 nt, Homo sapiens
uauuuggugaaugaaugcaugu

SEQ ID NO: 19530 - RNA, 22 nt, Homo sapiens
ucaggcaccuuccucuuaucug

SEQ ID NO: 19531 - RNA, 22 nt, Homo sapiens
ucaggcacuaguaagaaaaagg

SEQ ID NO: 19532 - RNA, 21 nt, Homo sapiens
ucaggcuuuuugagugccaau

SEQ ID NO: 19533 - RNA, 22 nt, Homo sapiens
ucauaucauuagaucuacugua

SEQ ID NO: 19534 - RNA, 20 nt, Homo sapiens
ucaucaguuggugcucgcug

SEQ ID NO: 19535 - RNA, 22 nt, Homo sapiens
ucaucucaguuucuugccguac

SEQ ID NO: 19536 - RNA, 22 nt, Homo sapiens
ucagugcgugcauagccuggau

SEQ ID NO: 19537 - RNA, 22 nt, Homo sapiens
uccuguaaucccagcuaccaga

SEQ ID NO: 19538 - RNA, 19 nt, Homo sapiens
uccuugauugcaccacugc

SEQ ID NO: 19539 - RNA, 20 nt, Homo sapiens
uccaguuuuggagacauucu

SEQ ID NO: 19540 - RNA, 19 nt, Homo sapiens
uccaugagcccacagugau

SEQ ID NO: 19541 - RNA, 22 nt, Homo sapiens
ucauugcauuccagcccaagca

SEQ ID NO: 19542 - RNA, 22 nt, Homo sapiens
ucauguaauuuugugucuauga

SEQ ID NO: 19543 - RNA, 22 nt, Homo sapiens
ucauuggaugucugaaaugauu

SEQ ID NO: 19544 - RNA, 19 nt, Homo sapiens
uccaccgcgugcaccucua

SEQ ID NO: 19545 - RNA, 17 nt, Homo sapiens
uccagauuucaauugaa

SEQ ID NO: 19546 - RNA, 22 nt, Homo sapiens
uuucauagccuucuaaugaguu

SEQ ID NO: 19547 - RNA, 22 nt, Homo sapiens
uuucaucaagcacagaguagau

SEQ ID NO: 19548 - RNA, 22 nt, Homo sapiens
uuuaaagcuaaaauauguuuau

SEQ ID NO: 19549 - RNA, 22 nt, Homo sapiens
uuuaaacugucuuggguuugga

SEQ ID NO: 19550 - RNA, 22 nt, Homo sapiens
uuguuauguuggucaguaaugu

SEQ ID NO: 19551 - RNA, 22 nt, Homo sapiens
uugugcuccagagacgggcucg

SEQ ID NO: 19552 - RNA, 22 nt, Homo sapiens
uuugauguugagacuauaaagc

SEQ ID NO: 19553 - RNA, 22 nt, Homo sapiens
uuuggcagaaaacaagaaucug

SEQ ID NO: 19554 - RNA, 22 nt, Homo sapiens
uuuggcagaaaacuaaaaggua

SEQ ID NO: 19555 - RNA, 22 nt, Homo sapiens
uuuggaagaugccacuguauca

SEQ ID NO: 19556 - RNA, 22 nt, Homo sapiens
uuuguaauaccugaggcugggu

SEQ ID NO: 19557 - RNA, 22 nt, Homo sapiens
uuuggccauguuggucaggcug

SEQ ID NO: 19558 - RNA, 22 nt, Homo sapiens
uuugggaaugaguuuaucauuu

SEQ ID NO: 19559 - RNA, 22 nt, Homo sapiens
uuuggguuaguuuuccaaucuu

SEQ ID NO: 19560 - RNA, 19 nt, Homo sapiens
uuuguauguuuccaguaau

SEQ ID NO: 19561 - RNA, 22 nt, Homo sapiens
uuuguggaaugcucauguguag

SEQ ID NO: 19562 - RNA, 22 nt, Homo sapiens
uuuuaagcuacaagagacauau

SEQ ID NO: 19563 - RNA, 22 nt, Homo sapiens
uugccuaggcuggagugcagug

SEQ ID NO: 19564 - RNA, 22 nt, Homo sapiens
uuggaauuaagagauauuuucu

SEQ ID NO: 19565 - RNA, 22 nt, Homo sapiens
uugauguaggcauucaaggcua

SEQ ID NO: 19566 - RNA, 22 nt, Homo sapiens
uugauguguuuccaggauuugu

SEQ ID NO: 19567 - RNA, 22 nt, Homo sapiens
uugauagacacauauccaugug

SEQ ID NO: 19568 - RNA, 22 nt, Homo sapiens
uugauaagaaaaauauaccaga

SEQ ID NO: 19569 - RNA, 22 nt, Homo sapiens
uugauauuaaguacugaagugg

SEQ ID NO: 19570 - RNA, 22 nt, Homo sapiens
uugauauuacucaguaacagau

SEQ ID NO: 19571 - RNA, 22 nt, Homo sapiens
uugauauucugagaagcugaag

SEQ ID NO: 19572 - RNA, 22 nt, Homo sapiens
uugucacccuacauaacaggga

SEQ ID NO: 19573 - RNA, 22 nt, Homo sapiens
uuguauguuuguucuuucagau

SEQ ID NO: 19574 - RNA, 22 nt, Homo sapiens
uuguaguagcauuauuuauaau

SEQ ID NO: 19575 - RNA, 22 nt, Homo sapiens
uuggcuaugaguccuaugugca

SEQ ID NO: 19576 - RNA, 22 nt, Homo sapiens
uuggcaauucagauucuuuuau

SEQ ID NO: 19577 - RNA, 22 nt, Homo sapiens
uuccuuguagcaaaugcgauga

SEQ ID NO: 19578 - RNA, 22 nt, Homo sapiens
uucuacaggcuguucaagaagc

SEQ ID NO: 19579 - RNA, 22 nt, Homo sapiens
uucuacagugacugcagccaua

SEQ ID NO: 19580 - RNA, 22 nt, Homo sapiens
uuccuugugacuaguagugacc

SEQ ID NO: 19581 - RNA, 22 nt, Homo sapiens
uuccuuguuuauuuacaggagg

SEQ ID NO: 19582 - RNA, 22 nt, Homo sapiens
uucucaauggaugugggaccag

SEQ ID NO: 19583 - RNA, 22 nt, Homo sapiens
uucugagguuauauucucucaa

SEQ ID NO: 19584 - RNA, 22 nt, Homo sapiens
uuccugcacuugcuugccuaug

SEQ ID NO: 19585 - RNA, 22 nt, Homo sapiens
uucccuuucugccuugaaucuu

SEQ ID NO: 19586 - RNA, 22 nt, Homo sapiens
uucccuuucuuaaagaguuagg

SEQ ID NO: 19587 - RNA, 22 nt, Homo sapiens
uuccauguaguugagcaguuuu

SEQ ID NO: 19588 - RNA, 22 nt, Homo sapiens
uuccagaugggaguucuauucu

SEQ ID NO: 19589 - RNA, 22 nt, Homo sapiens
uucagcuaccugggaugcugaa

SEQ ID NO: 19590 - RNA, 22 nt, Homo sapiens
uucagauugcauaccgaaagua

SEQ ID NO: 19591 - RNA, 22 nt, Homo sapiens
uucaagauggcaccagugagug

SEQ ID NO: 19592 - RNA, 22 nt, Homo sapiens
uucaaguaguucucaugccuca

SEQ ID NO: 19593 - RNA, 22 nt, Homo sapiens
uucaguggacuuaguagugcuu

SEQ ID NO: 19594 - RNA, 22 nt, Homo sapiens
uucaguucugcucugaucuuag

SEQ ID NO: 19595 - RNA, 22 nt, Homo sapiens
uucauguaauauuucacagcuu

SEQ ID NO: 19596 - RNA, 22 nt, Homo sapiens
uucauguaaucaaggcagcuaa

SEQ ID NO: 19597 - RNA, 22 nt, Homo sapiens
uuaagccaggugugguggcaca

SEQ ID NO: 19598 - RNA, 22 nt, Homo sapiens
uuaauuguaucuauagauguca

SEQ ID NO: 19599 - RNA, 22 nt, Homo sapiens
uuaauuguccauuauucuguuc

SEQ ID NO: 19600 - RNA, 22 nt, Homo sapiens
uuaaaugucuguagaugugcug

SEQ ID NO: 19601 - RNA, 21 nt, Homo sapiens
uuaacagacaagugucuuccc

SEQ ID NO: 19602 - RNA, 22 nt, Homo sapiens
uguuaguuguucauguuaagag

SEQ ID NO: 19603 - RNA, 22 nt, Homo sapiens
uguuauguuuuagagguuucaa

SEQ ID NO: 19604 - RNA, 19 nt, Homo sapiens
uguuuggcuauaggucuaa

SEQ ID NO: 19605 - RNA, 22 nt, Homo sapiens
uguugcacuccagccuagguga

SEQ ID NO: 19606 - RNA, 22 nt, Homo sapiens
uguugcacuccagccugggcaa

SEQ ID NO: 19607 - RNA, 22 nt, Homo sapiens
uguugcacucuagccugggcaa

SEQ ID NO: 19608 - RNA, 22 nt, Homo sapiens
uguugcuuaagccacccagucu

SEQ ID NO: 19609 - RNA, 22 nt, Homo sapiens
uguuucuacugucucuguagua

SEQ ID NO: 19610 - RNA, 22 nt, Homo sapiens
ugguccuuuccauuggagacac

SEQ ID NO: 19611 - RNA, 22 nt, Homo sapiens
ugugaagauggacuaauauagu

SEQ ID NO: 19612 - RNA, 22 nt, Homo sapiens
uguggcauugaauaaccuugga

SEQ ID NO: 19613 - RNA, 22 nt, Homo sapiens
uguggcauuuucagaaaggaug

SEQ ID NO: 19614 - RNA, 22 nt, Homo sapiens
ugugucuuguuuauagcuuucu

SEQ ID NO: 19615 - RNA, 22 nt, Homo sapiens
ucacaauggcugaacuaauuua

SEQ ID NO: 19616 - RNA, 22 nt, Homo sapiens
ucaccucgugaucugcccacuu

SEQ ID NO: 19617 - RNA, 22 nt, Homo sapiens
ucaguauaugaaucuggggcag

SEQ ID NO: 19618 - RNA, 20 nt, Homo sapiens
ucagugauugguuuaguuau

SEQ ID NO: 19619 - RNA, 19 nt, Homo sapiens
uccccgggucuagugcagc

SEQ ID NO: 19620 - RNA, 23 nt, Homo sapiens
uccccgggagcaccagcuuguug

SEQ ID NO: 19621 - RNA, 22 nt, Homo sapiens
uccacaguggugaggugcagca

SEQ ID NO: 19622 - RNA, 22 nt, Homo sapiens
ucccuuucuggaguuucccaag

SEQ ID NO: 19623 - RNA, 17 nt, Homo sapiens
ucccuguuuuuucaguc

SEQ ID NO: 19624 - RNA, 22 nt, Homo sapiens
uccuugguugauccugugcaga

SEQ ID NO: 19625 - RNA, 22 nt, Homo sapiens
ucgcaguuaauaaugaugugcg

SEQ ID NO: 19626 - RNA, 22 nt, Homo sapiens
ugaccuguuugaaauugccaau

SEQ ID NO: 19627 - RNA, 22 nt, Homo sapiens
ugaaguaauguuuuauucuauu

SEQ ID NO: 19628 - RNA, 22 nt, Homo sapiens
ugaacagcuaucuugucagugu

SEQ ID NO: 19629 - RNA, 22 nt, Homo sapiens
ugaacagucaucucucuuguau

SEQ ID NO: 19630 - RNA, 22 nt, Homo sapiens
ugaagagucuaaaucugucuuc

SEQ ID NO: 19631 - RNA, 21 nt, Homo sapiens
ugacauuauuucaugucagua

SEQ ID NO: 19632 - RNA, 22 nt, Homo sapiens
ugacagugugagacuuugucuc

SEQ ID NO: 19633 - RNA, 22 nt, Homo sapiens
ugacagugugagauccugucuc

SEQ ID NO: 19634 - RNA, 20 nt, Homo sapiens
ugacaguuaagggauagaag

SEQ ID NO: 19635 - RNA, 22 nt, Homo sapiens
ucucacagaguugaauguuucu

SEQ ID NO: 19636 - RNA, 17 nt, Homo sapiens
ucuucuguuacuguggc

SEQ ID NO: 19637 - RNA, 20 nt, Homo sapiens
ucuugaacuuagucaacagg

SEQ ID NO: 19638 - RNA, 22 nt, Homo sapiens
ucuguuguuaucauaauauuga

SEQ ID NO: 19639 - RNA, 22 nt, Homo sapiens
ucuuuguucaggagccaacucc

SEQ ID NO: 19640 - RNA, 22 nt, Homo sapiens
ucuugaacuucugcacacucag

SEQ ID NO: 19641 - RNA, 22 nt, Homo sapiens
ugagguagaaugauucuaauau

SEQ ID NO: 19642 - RNA, 22 nt, Homo sapiens
ugagguaugacuuauuauucuu

SEQ ID NO: 19643 - RNA, 22 nt, Homo sapiens
ugauaagugaaagugcucuauc

SEQ ID NO: 19644 - RNA, 22 nt, Homo sapiens
ugcacuguggucugagagacag

SEQ ID NO: 19645 - RNA, 22 nt, Homo sapiens
ugaugugucaucugagagagug

SEQ ID NO: 19646 - RNA, 22 nt, Homo sapiens
ugcacaguccagugcccacuga

SEQ ID NO: 19647 - RNA, 22 nt, Homo sapiens
ugauggcacagugaguuccagg

SEQ ID NO: 19648 - RNA, 22 nt, Homo sapiens
ugaugucuugagauggagcuua

SEQ ID NO: 19649 - RNA, 21 nt, Homo sapiens
ugaugcuuuucuuaaccuugc

SEQ ID NO: 19650 - RNA, 22 nt, Homo sapiens
ugggaugaugcuugagaauauc

SEQ ID NO: 19651 - RNA, 22 nt, Homo sapiens
uggguucccugucuguccuuga

SEQ ID NO: 19652 - RNA, 22 nt, Homo sapiens
ugguaagaucagaacuggaguc

SEQ ID NO: 19653 - RNA, 22 nt, Homo sapiens
ugguaagaggcccugaguuugu

SEQ ID NO: 19654 - RNA, 22 nt, Homo sapiens
uggcaguuuuugccuucaauac

SEQ ID NO: 19655 - RNA, 20 nt, Homo sapiens
uggcauguugguaugcaccc

SEQ ID NO: 19656 - RNA, 21 nt, Homo sapiens
uggcuguuuucaugcuagaac

SEQ ID NO: 19657 - RNA, 22 nt, Homo sapiens
uggcuuuguaagguuucauuuu

SEQ ID NO: 19658 - RNA, 22 nt, Homo sapiens
uggcuuuuccaggcauuacgau

SEQ ID NO: 19659 - RNA, 22 nt, Homo sapiens
ugggaagaagguuuacuugcca

SEQ ID NO: 19660 - RNA, 22 nt, Homo sapiens
uggagagucauuuauaguauuu

SEQ ID NO: 19661 - RNA, 22 nt, Homo sapiens
uggacacugguggauauggaau

SEQ ID NO: 19662 - RNA, 20 nt, Homo sapiens
uggaggucaucugucacuac

SEQ ID NO: 19663 - RNA, 22 nt, Homo sapiens
uggcaaaaaucacaaguaccuu

SEQ ID NO: 19664 - RNA, 21 nt, Homo sapiens
ugcaugguagucacaugauuc

SEQ ID NO: 19665 - RNA, 22 nt, Homo sapiens
ugccaguguugccuuucacuag

SEQ ID NO: 19666 - RNA, 20 nt, Homo sapiens
ugccagugugucaauuuaua

SEQ ID NO: 19667 - RNA, 22 nt, Homo sapiens
ugccuagucuauugagagucuu

SEQ ID NO: 19668 - RNA, 23 nt, Homo sapiens
uggaacugaauuucuuagcauuu

SEQ ID NO: 19669 - RNA, 22 nt, Homo sapiens
ugccugauacccucugucucuc

SEQ ID NO: 19670 - RNA, 22 nt, Homo sapiens
uagauuaucucaccacucgagu

SEQ ID NO: 19671 - RNA, 21 nt, Homo sapiens
uagcaaauugcuauuaaggca

SEQ ID NO: 19672 - RNA, 23 nt, Homo sapiens
uagaucaucaaguuuacugugcu

SEQ ID NO: 19673 - RNA, 22 nt, Homo sapiens
uagcacaucccuaaaaugcugu

SEQ ID NO: 19674 - RNA, 22 nt, Homo sapiens
uagcacagggaauugguucucu

SEQ ID NO: 19675 - RNA, 22 nt, Homo sapiens
uacaauagugacaaaucagcau

SEQ ID NO: 19676 - RNA, 22 nt, Homo sapiens
uacaccugaguuugugguuuuc

SEQ ID NO: 19677 - RNA, 22 nt, Homo sapiens
uacacaugugaguucuuuucua

SEQ ID NO: 19678 - RNA, 22 nt, Homo sapiens
uacagccacauaauguaugauu

SEQ ID NO: 19679 - RNA, 22 nt, Homo sapiens
uaauaguuucagaaguuguuuu

SEQ ID NO: 19680 - RNA, 22 nt, Homo sapiens
uacaaaguaacaguuccuguau

SEQ ID NO: 19681 - RNA, 22 nt, Homo sapiens
uaagguuacaaaggacuucaua

SEQ ID NO: 19682 - RNA, 22 nt, Homo sapiens
uaaauugcauaaguacaaauga

SEQ ID NO: 19683 - RNA, 22 nt, Homo sapiens
guugcaugucugggaggccagc

SEQ ID NO: 19684 - RNA, 22 nt, Homo sapiens
uauuaguuuucuguggauuaca

SEQ ID NO: 19685 - RNA, 19 nt, Homo sapiens
uauguaguugucaagggag

SEQ ID NO: 19686 - RNA, 22 nt, Homo sapiens
uaugguuuuggaauccugcaga

SEQ ID NO: 19687 - RNA, 19 nt, Homo sapiens
uauguaguuuucucaauau

SEQ ID NO: 19688 - RNA, 22 nt, Homo sapiens
uaugucuucuuuagagaaaugu

SEQ ID NO: 19689 - RNA, 22 nt, Homo sapiens
uaugagguagguaugacuauca

SEQ ID NO: 19690 - RNA, 17 nt, Homo sapiens
ucaaaugcucccaguga

SEQ ID NO: 19691 - RNA, 22 nt, Homo sapiens
ucaaaugguccacgugaacauu

SEQ ID NO: 19692 - RNA, 22 nt, Homo sapiens
ucaacagugggcacuguaaaug

SEQ ID NO: 19693 - RNA, 20 nt, Homo sapiens
ucaaaguaugcucugcacua

SEQ ID NO: 19694 - RNA, 22 nt, Homo sapiens
uaucaccauguccguuuuaaaa

SEQ ID NO: 19695 - RNA, 22 nt, Homo sapiens
uaguaucacauggucuuaauua

SEQ ID NO: 19696 - RNA, 22 nt, Homo sapiens
uagcaguauacguacugggucc

SEQ ID NO: 19697 - RNA, 20 nt, Homo sapiens
uagcaggugucaggugauau

SEQ ID NO: 19698 - RNA, 22 nt, Homo sapiens
guaaacuuccccucaugaauga

SEQ ID NO: 19699 - RNA, 22 nt, Homo sapiens
ggguucccuucuggcucagggu

SEQ ID NO: 19700 - RNA, 22 nt, Homo sapiens
gguaaguuuggggcuaauuugu

SEQ ID NO: 19701 - RNA, 22 nt, Homo sapiens
gguaggcacuggugggaagaga

SEQ ID NO: 19702 - RNA, 22 nt, Homo sapiens
guaagucucaugagaucugaug

SEQ ID NO: 19703 - RNA, 22 nt, Homo sapiens
guagcagcuacuaaguugcugu

SEQ ID NO: 19704 - RNA, 22 nt, Homo sapiens
guaguagcacgagcucugucuc

SEQ ID NO: 19705 - RNA, 22 nt, Homo sapiens
guaguuuaucagaaagaauagg

SEQ ID NO: 19706 - RNA, 22 nt, Homo sapiens
guauacacccugugauauuauu

SEQ ID NO: 19707 - RNA, 22 nt, Homo sapiens
guauuaguuaucuacugcugug

SEQ ID NO: 19708 - RNA, 22 nt, Homo sapiens
guauuugguuauugcagccuga

SEQ ID NO: 19709 - RNA, 22 nt, Homo sapiens
gcgguagcauagacugcaggac

SEQ ID NO: 19710 - RNA, 20 nt, Homo sapiens
ggaauagucuacacucugac

SEQ ID NO: 19711 - RNA, 22 nt, Homo sapiens
ggcuacauuguuacaauuagua

SEQ ID NO: 19712 - RNA, 22 nt, Homo sapiens
ggccggguggccauggcugccc

SEQ ID NO: 19713 - RNA, 22 nt, Homo sapiens
ggcaacaaagacauuucaacau

SEQ ID NO: 19714 - RNA, 22 nt, Homo sapiens
ggcaacaugaugaaaugccauc

SEQ ID NO: 19715 - RNA, 22 nt, Homo sapiens
ggcagcuguguccuucguaagg

SEQ ID NO: 19716 - RNA, 22 nt, Homo sapiens
gucacuguuuccuauuauauuu

SEQ ID NO: 19717 - RNA, 18 nt, Homo sapiens
guccauuuguugguacac

SEQ ID NO: 19718 - RNA, 22 nt, Homo sapiens
guggaagaccagacuuuccaac

SEQ ID NO: 19719 - RNA, 20 nt, Homo sapiens
guggaagauaaguagccuga

SEQ ID NO: 19720 - RNA, 17 nt, Homo sapiens
gugagguggguaguauc

SEQ ID NO: 19721 - RNA, 22 nt, Homo sapiens
gugagguguuaaccaaccugug

SEQ ID NO: 19722 - RNA, 22 nt, Homo sapiens
gugagcaguguccuugggggca

SEQ ID NO: 19723 - RNA, 22 nt, Homo sapiens
guucagguauucuggaacagag

SEQ ID NO: 19724 - RNA, 22 nt, Homo sapiens
guguuauugagaaauagggugu

SEQ ID NO: 19725 - RNA, 22 nt, Homo sapiens
guggcagaaaagagaagcaaug

SEQ ID NO: 19726 - RNA, 22 nt, Homo sapiens
auaagucaauggaacagauuaa

SEQ ID NO: 19727 - RNA, 18 nt, Homo sapiens
auaaacucaucauuuuua

SEQ ID NO: 19728 - RNA, 17 nt, Homo sapiens
auaaacucaucauuuuu

SEQ ID NO: 19729 - RNA, 22 nt, Homo sapiens
auagcaaugccccaauccuugg

SEQ ID NO: 19730 - RNA, 22 nt, Homo sapiens
auagcacauggcauccucucuu

SEQ ID NO: 19731 - RNA, 22 nt, Homo sapiens
aggugcucuuccuguaggucac

SEQ ID NO: 19732 - RNA, 20 nt, Homo sapiens
agguuauuauaauuagaaga

SEQ ID NO: 19733 - RNA, 22 nt, Homo sapiens
aguguuuuuaacaagaaagggu

SEQ ID NO: 19734 - RNA, 22 nt, Homo sapiens
aguugcaagucuugaguaaaga

SEQ ID NO: 19735 - RNA, 22 nt, Homo sapiens
aucacacucaccuucuguccuu

SEQ ID NO: 19736 - RNA, 22 nt, Homo sapiens
aucaaaguaggcauauguuuuu

SEQ ID NO: 19737 - RNA, 22 nt, Homo sapiens
aucaaaguaucucaauauggua

SEQ ID NO: 19738 - RNA, 22 nt, Homo sapiens
aucaaagugaaauauuaguuau

SEQ ID NO: 19739 - RNA, 22 nt, Homo sapiens
aucaaagugaauuaaugagaau

SEQ ID NO: 19740 - RNA, 22 nt, Homo sapiens
auauagcaaugaaagagaugaa

SEQ ID NO: 19741 - RNA, 22 nt, Homo sapiens
auauaccuaggcuacaugguuu

SEQ ID NO: 19742 - RNA, 22 nt, Homo sapiens
auaugucuauuauuagggcagg

SEQ ID NO: 19743 - RNA, 17 nt, Homo sapiens
auaugucugcuggggga

SEQ ID NO: 19744 - RNA, 22 nt, Homo sapiens
augcagcugaggguaguggagc

SEQ ID NO: 19745 - RNA, 21 nt, Homo sapiens
augagguguacuguggugaaa

SEQ ID NO: 19746 - RNA, 22 nt, Homo sapiens
augagguguuuauuguauccug

SEQ ID NO: 19747 - RNA, 22 nt, Homo sapiens
augagcuauggagacagggcca

SEQ ID NO: 19748 - RNA, 22 nt, Homo sapiens
augagcuauggagcucccaccu

SEQ ID NO: 19749 - RNA, 22 nt, Homo sapiens
augaggugaggucaguaaggua

SEQ ID NO: 19750 - RNA, 22 nt, Homo sapiens
augaggugauaucuggaaauua

SEQ ID NO: 19751 - RNA, 22 nt, Homo sapiens
augagauuauguaaagagacca

SEQ ID NO: 19752 - RNA, 17 nt, Homo sapiens
augaagucaucauuuuu

SEQ ID NO: 19753 - RNA, 22 nt, Homo sapiens
aucaugucuucccagugauucu

SEQ ID NO: 19754 - RNA, 22 nt, Homo sapiens
aucauggaguauuugcaagucu

SEQ ID NO: 19755 - RNA, 22 nt, Homo sapiens
auggucuuuucccuggauuaua

SEQ ID NO: 19756 - RNA, 22 nt, Homo sapiens
augguugguuaaaucuguguau

SEQ ID NO: 19757 - RNA, 22 nt, Homo sapiens
augggaaaaucagaaggccugg

SEQ ID NO: 19758 - RNA, 22 nt, Homo sapiens
augggucuccugaauacagcac

SEQ ID NO: 19759 - RNA, 22 nt, Homo sapiens
augguauuuaacagucuuucua

SEQ ID NO: 19760 - RNA, 22 nt, Homo sapiens
auguaguugcucugccuguuuu

SEQ ID NO: 19761 - RNA, 22 nt, Homo sapiens
auguaauugagguuuuugccau

SEQ ID NO: 19762 - RNA, 21 nt, Homo sapiens
auguaaugaagaagccacugg

SEQ ID NO: 19763 - RNA, 22 nt, Homo sapiens
augccacugcacuucagccugg

SEQ ID NO: 19764 - RNA, 22 nt, Homo sapiens
augccacugcgcucuagccugg

SEQ ID NO: 19765 - RNA, 22 nt, Homo sapiens
augccacuguacucuagccuag

SEQ ID NO: 19766 - RNA, 22 nt, Homo sapiens
augccacuguccuccugccuag

SEQ ID NO: 19767 - RNA, 20 nt, Homo sapiens
auggaccuggauuaacagca

SEQ ID NO: 19768 - RNA, 22 nt, Homo sapiens
auggauaugcuuccaacugccu

SEQ ID NO: 19769 - RNA, 22 nt, Homo sapiens
auggaucuuucugcuuuugaau

SEQ ID NO: 19770 - RNA, 22 nt, Homo sapiens
auggcuuuggucucccagugau

SEQ ID NO: 19771 - RNA, 22 nt, Homo sapiens
auggcuuucaggacguggcgag

SEQ ID NO: 19772 - RNA, 22 nt, Homo sapiens
auggcuuuugcccuaaauggau

SEQ ID NO: 19773 - RNA, 22 nt, Homo sapiens
auggcuuuuuaaaucauguugu

SEQ ID NO: 19774 - RNA, 22 nt, Homo sapiens
auggcuuuuuucuugggcacuc

SEQ ID NO: 19775 - RNA, 22 nt, Homo sapiens
aggagguagggugugaaacagc

SEQ ID NO: 19776 - RNA, 22 nt, Homo sapiens
aggauaguaaugauagagaggc

SEQ ID NO: 19777 - RNA, 22 nt, Homo sapiens
aggcaagugggagacagcauuu

SEQ ID NO: 19778 - RNA, 22 nt, Homo sapiens
agcuuguuuuccugcaacuaga

SEQ ID NO: 19779 - RNA, 22 nt, Homo sapiens
agcuuguuuuauagaaagucaa

SEQ ID NO: 19780 - RNA, 22 nt, Homo sapiens
agcugccagucuuguaaggccu

SEQ ID NO: 19781 - RNA, 22 nt, Homo sapiens
agcugcauucguaucauauugu

SEQ ID NO: 19782 - RNA, 22 nt, Homo sapiens
agcuacaucuugcucugggaug

SEQ ID NO: 19783 - RNA, 21 nt, Homo sapiens
agcuaaauuggaaauuucugu

SEQ ID NO: 19784 - RNA, 17 nt, Homo sapiens
agcauguguuugagauu

SEQ ID NO: 19785 - RNA, 22 nt, Homo sapiens
agcauuacaugguacagagaag

SEQ ID NO: 19786 - RNA, 22 nt, Homo sapiens
agccaguauuuccacagagugg

SEQ ID NO: 19787 - RNA, 21 nt, Homo sapiens
agccaguguuccuuguggcuc

SEQ ID NO: 19788 - RNA, 22 nt, Homo sapiens
agccaguuuggcuaauuuuggc

SEQ ID NO: 19789 - RNA, 22 nt, Homo sapiens
acuggcuuaaggaugggccacu

SEQ ID NO: 19790 - RNA, 22 nt, Homo sapiens
acuggcuuuugagaaaaacacu

SEQ ID NO: 19791 - RNA, 22 nt, Homo sapiens
acuggguuaauuugaagguuga

SEQ ID NO: 19792 - RNA, 22 nt, Homo sapiens
acaucacuguuugauugauuga

SEQ ID NO: 19793 - RNA, 22 nt, Homo sapiens
acaucaggcuugugaugauuac

SEQ ID NO: 19794 - RNA, 18 nt, Homo sapiens
acaucccaugcuggggug

SEQ ID NO: 19795 - RNA, 22 nt, Homo sapiens
acauguauauaaugcauagcga

SEQ ID NO: 19796 - RNA, 22 nt, Homo sapiens
accuggguguauguucaguuug

SEQ ID NO: 19797 - RNA, 22 nt, Homo sapiens
accuucauuguugccaugucca

SEQ ID NO: 19798 - RNA, 22 nt, Homo sapiens
acugcacuccagccugccgaca

SEQ ID NO: 19799 - RNA, 22 nt, Homo sapiens
acagauagacauauauagcuca

SEQ ID NO: 19800 - RNA, 20 nt, Homo sapiens
acagcacugguuucaagcaa

SEQ ID NO: 19801 - RNA, 22 nt, Homo sapiens
acagcacugccaagugacccau

SEQ ID NO: 19802 - RNA, 19 nt, Homo sapiens
acagcugguuuugguuucu

SEQ ID NO: 19803 - RNA, 22 nt, Homo sapiens
acacuguuuuaguuauuauagc

SEQ ID NO: 19804 - RNA, 22 nt, Homo sapiens
acacuguauccuucuguccuuu

SEQ ID NO: 19805 - RNA, 22 nt, Homo sapiens
acacuguuggugggaguguaaa

SEQ ID NO: 19806 - RNA, 22 nt, Homo sapiens
aauugcaauggacaaugcagca

SEQ ID NO: 19807 - RNA, 22 nt, Homo sapiens
aauugcauaaaauucaacucug

SEQ ID NO: 19808 - RNA, 22 nt, Homo sapiens
acaaagcgcuucucuuuagagu

SEQ ID NO: 19809 - RNA, 22 nt, Homo sapiens
aaggcagugugcacauaacacu

SEQ ID NO: 19810 - RNA, 22 nt, Homo sapiens
aaggaguauugaaugaccaagu

SEQ ID NO: 19811 - RNA, 22 nt, Homo sapiens
aaugacacugagcaucuuucau

SEQ ID NO: 19812 - RNA, 22 nt, Homo sapiens
aaucucaacacuuugggaggcu

SEQ ID NO: 19813 - RNA, 22 nt, Homo sapiens
aaugacagugcuaaagaacccu

SEQ ID NO: 19814 - RNA, 22 nt, Homo sapiens
gauggcauuucuggaucugccc

SEQ ID NO: 19815 - RNA, 22 nt, Homo sapiens
gauuccauuuguggcuauuuac

SEQ ID NO: 19816 - RNA, 22 nt, Homo sapiens
gaugauguuggaaacuuggugc

SEQ ID NO: 19817 - RNA, 22 nt, Homo sapiens
gccaaaaugcugggauuacagg

SEQ ID NO: 19818 - RNA, 22 nt, Homo sapiens
gcauggccuuuaaaugucacag

SEQ ID NO: 19819 - RNA, 22 nt, Homo sapiens
gccagugugaugugaucauggc

SEQ ID NO: 19820 - RNA, 22 nt, Homo sapiens
gcagguaguuucugacuuuuac

SEQ ID NO: 19821 - RNA, 17 nt, Homo sapiens
gacgaucaucaggaggc

SEQ ID NO: 19822 - RNA, 22 nt, Homo sapiens
gacuauguuaccuuacacauca

SEQ ID NO: 19823 - RNA, 22 nt, Homo sapiens
gagcuuguagugugaaugguau

SEQ ID NO: 19824 - RNA, 22 nt, Homo sapiens
gagcugccuugccuaugcaaga

SEQ ID NO: 19825 - RNA, 22 nt, Homo sapiens
gagcugaucuuuauguaaauuc

SEQ ID NO: 19826 - RNA, 22 nt, Homo sapiens
gaggcauugaaauauugcuuau

SEQ ID NO: 19827 - RNA, 22 nt, Homo sapiens
gaugagaucauaaguguggagc

SEQ ID NO: 19828 - RNA, 22 nt, Homo sapiens
gaugacagcugacucccuugcu

SEQ ID NO: 19829 - RNA, 22 nt, Homo sapiens
gaugacagugaguaaccccaac

SEQ ID NO: 19830 - RNA, 22 nt, Homo sapiens
gaugagguaguguaccuagucu

SEQ ID NO: 19831 - RNA, 22 nt, Homo sapiens
gagguaagaguuuuccauuucu

SEQ ID NO: 19832 - RNA, 20 nt, Homo sapiens
cugaaugucaaggcagaggu

SEQ ID NO: 19833 - RNA, 22 nt, Homo sapiens
cucugacagugguuagcacugu

SEQ ID NO: 19834 - RNA, 22 nt, Homo sapiens
cugacagaugacugccacugua

SEQ ID NO: 19835 - RNA, 22 nt, Homo sapiens
cugaccauagacuacucugggc

SEQ ID NO: 19836 - RNA, 22 nt, Homo sapiens
cugacugugcaugcccagcccc

SEQ ID NO: 19837 - RNA, 22 nt, Homo sapiens
cuuccauaguuacacccaggga

SEQ ID NO: 19838 - RNA, 22 nt, Homo sapiens
cuuccauauucuaggacaggcu

SEQ ID NO: 19839 - RNA, 22 nt, Homo sapiens
cuugacacugguuuucugaaua

SEQ ID NO: 19840 - RNA, 21 nt, Homo sapiens
cugguguuagcacuucuuccc

SEQ ID NO: 19841 - RNA, 22 nt, Homo sapiens
gaaugaauguuuauccuuagau

SEQ ID NO: 19842 - RNA, 22 nt, Homo sapiens
gacccuguugggguuuagggcu

SEQ ID NO: 19843 - RNA, 21 nt, Homo sapiens
gaccuguaguaagcauucaca

SEQ ID NO: 19844 - RNA, 22 nt, Homo sapiens
gaaguaauaaauggauucuuaa

SEQ ID NO: 19845 - RNA, 23 nt, Homo sapiens
gaaguaauaaauggauucuuaac

SEQ ID NO: 19846 - RNA, 22 nt, Homo sapiens
gaaguaggugcuguuauuaucu

SEQ ID NO: 19847 - RNA, 22 nt, Homo sapiens
gaacuguaaagaaauucuaagg

SEQ ID NO: 19848 - RNA, 21 nt, Homo sapiens
gaaauacugccuuaggagcug

SEQ ID NO: 19849 - RNA, 22 nt, Homo sapiens
gaaacugcauuucuaacaagcu

SEQ ID NO: 19850 - RNA, 22 nt, Homo sapiens
gaaaacugcuucucuggguuuc

SEQ ID NO: 19851 - RNA, 22 nt, Homo sapiens
cuuuuacacuguuggcaggauu

SEQ ID NO: 19852 - RNA, 16 nt, Homo sapiens
cacuggucuuaccaug

SEQ ID NO: 19853 - RNA, 22 nt, Homo sapiens
cagaaguauugguaugcucugu

SEQ ID NO: 19854 - RNA, 22 nt, Homo sapiens
cagacagugucccgagucccug

SEQ ID NO: 19855 - RNA, 22 nt, Homo sapiens
cacuaggcuggagugcaguggc

SEQ ID NO: 19856 - RNA, 22 nt, Homo sapiens
caaugcauuauucucccacuuc

SEQ ID NO: 19857 - RNA, 22 nt, Homo sapiens
caagggguggaaaugguagugu

SEQ ID NO: 19858 - RNA, 22 nt, Homo sapiens
caaguacugggcuauggauauu

SEQ ID NO: 19859 - RNA, 22 nt, Homo sapiens
caagugcuugaugaaugaucaa

SEQ ID NO: 19860 - RNA, 22 nt, Homo sapiens
auuugucacuauguggcuaaua

SEQ ID NO: 19861 - RNA, 22 nt, Homo sapiens
auuagguuguugcaaaaguaau

SEQ ID NO: 19862 - RNA, 22 nt, Homo sapiens
auuagguuagugcaaaaguaau

SEQ ID NO: 19863 - RNA, 22 nt, Homo sapiens
auucaagugaugugauucuucu

SEQ ID NO: 19864 - RNA, 22 nt, Homo sapiens
auucacagggggagaaggguau

SEQ ID NO: 19865 - RNA, 22 nt, Homo sapiens
auucauagugcuaagguguauc

SEQ ID NO: 19866 - RNA, 22 nt, Homo sapiens
auuggcaauagcuuucuuacua

SEQ ID NO: 19867 - RNA, 22 nt, Homo sapiens
auuggauagucuuuaucuguug

SEQ ID NO: 19868 - RNA, 22 nt, Homo sapiens
cagcaagucucuaagaguucau

SEQ ID NO: 19869 - RNA, 22 nt, Homo sapiens
cagcccguaaucccagcacuuu

SEQ ID NO: 19870 - RNA, 20 nt, Homo sapiens
cagcuagugguaggagucgg

SEQ ID NO: 19871 - RNA, 22 nt, Homo sapiens
cauguaguagaaggagccagac

SEQ ID NO: 19872 - RNA, 22 nt, Homo sapiens
caugucuuuuaaacauucaacu

SEQ ID NO: 19873 - RNA, 22 nt, Homo sapiens
caugucacuuccucucugaugg

SEQ ID NO: 19874 - RNA, 20 nt, Homo sapiens
cauuacacuccaaccugggu

SEQ ID NO: 19875 - RNA, 22 nt, Homo sapiens
ccagguuucuagaauaauuccu

SEQ ID NO: 19876 - RNA, 22 nt, Homo sapiens
ccagugguugggccggagacgg

SEQ ID NO: 19877 - RNA, 22 nt, Homo sapiens
ccuugguaauguguuuuauucu

SEQ ID NO: 19878 - RNA, 22 nt, Homo sapiens
cuagcugcacuuccugcuacug

SEQ ID NO: 19879 - RNA, 22 nt, Homo sapiens
ccugcauaguucaccgcugaua

SEQ ID NO: 19880 - RNA, 22 nt, Homo sapiens
ccccauuugaacuccuucaacu

SEQ ID NO: 19881 - RNA, 22 nt, Homo sapiens
cccaguuuugccacuuacuagc

SEQ ID NO: 19882 - RNA, 21 nt, Homo sapiens
cuaucucaguguuuacauuug

SEQ ID NO: 19883 - RNA, 22 nt, Homo sapiens
cuaucugcacaggguggaaauu

SEQ ID NO: 19884 - RNA, 22 nt, Homo sapiens
cuauggcucugguuauggcugu

SEQ ID NO: 19885 - RNA, 22 nt, Homo sapiens
cucauggagaaccucugcuagg

SEQ ID NO: 19886 - RNA, 22 nt, Homo sapiens
cuccauuuaucugaaauuuuau

SEQ ID NO: 19887 - RNA, 22 nt, Homo sapiens
cuccgggugcgucggcgcccug

SEQ ID NO: 19888 - RNA, 22 nt, Homo sapiens
aagcugcauuuucuagaugcuu

SEQ ID NO: 19889 - RNA, 22 nt, Homo sapiens
aagcugccuugcugaggagaaa

SEQ ID NO: 19890 - RNA, 22 nt, Homo sapiens
aagcuggcauucauucguucuu

SEQ ID NO: 19891 - RNA, 23 nt, Homo sapiens
aagagguaugacuaugaagugga

SEQ ID NO: 19892 - RNA, 22 nt, Homo sapiens
aagagguuauagaguguauacu

SEQ ID NO: 19893 - RNA, 22 nt, Homo sapiens
aagagguuguaccuaaaguguu

SEQ ID NO: 19894 - RNA, 22 nt, Homo sapiens
aacugcacuaggacagguuuuu

SEQ ID NO: 19895 - RNA, 22 nt, Homo sapiens
aacugcauuuucugauugugug

SEQ ID NO: 19896 - RNA, 22 nt, Homo sapiens
uuugcuucacuguuuggcaaaa

SEQ ID NO: 19897 - RNA, 22 nt, Homo sapiens
uuuggcagaugacccucaaguu

SEQ ID NO: 19898 - RNA, 22 nt, Homo sapiens
uuuggcaguuauuuacucagug

SEQ ID NO: 19899 - RNA, 23 nt, Homo sapiens
uuuguaguagcaugauuuauaau

SEQ ID NO: 19900 - RNA, 22 nt, Homo sapiens
uuuugcauuggcugaggagugu

SEQ ID NO: 19901 - RNA, 22 nt, Homo sapiens
uuuguauguuggagauuggaga

SEQ ID NO: 19902 - RNA, 22 nt, Homo sapiens
uuugucaauaacuaccaacagg

SEQ ID NO: 19903 - RNA, 22 nt, Homo sapiens
uuuugcuugugaauagccacau

SEQ ID NO: 19904 - RNA, 22 nt, Homo sapiens
uuuugcuuuuccucggucccac

SEQ ID NO: 19905 - RNA, 23 nt, Homo sapiens
uuguccccuccaaagcucauguu

SEQ ID NO: 19906 - RNA, 22 nt, Homo sapiens
uugugaagaugugaagcaagca

SEQ ID NO: 19907 - RNA, 22 nt, Homo sapiens
uugugcuucaucaccuagcaga

SEQ ID NO: 19908 - RNA, 22 nt, Homo sapiens
uugugcuugauuugccuagcug

SEQ ID NO: 19909 - RNA, 22 nt, Homo sapiens
uuguuaugggguggcuugaaag

SEQ ID NO: 19910 - RNA, 22 nt, Homo sapiens
uuguucaggagguuggggaugc

SEQ ID NO: 19911 - RNA, 22 nt, Homo sapiens
uuuaaagcacggaguuuguggc

SEQ ID NO: 19912 - RNA, 22 nt, Homo sapiens
uuguuauguaucucaagauaaa

SEQ ID NO: 19913 - RNA, 23 nt, Homo sapiens
uuucaguaguuguauccuguugc

SEQ ID NO: 19914 - RNA, 22 nt, Homo sapiens
uuuagcaaugcuguggggaagu

SEQ ID NO: 19915 - RNA, 22 nt, Homo sapiens
uuuagcaauucauuuugugucu

SEQ ID NO: 19916 - RNA, 20 nt, Homo sapiens
uuuaagacaugcugaauuga

SEQ ID NO: 19917 - RNA, 22 nt, Homo sapiens
uugguaaaaugaccacagacau

SEQ ID NO: 19918 - RNA, 22 nt, Homo sapiens
uuggcuuuuaugcagcuuaggu

SEQ ID NO: 19919 - RNA, 22 nt, Homo sapiens
uuggcuguguuucccuacaaau

SEQ ID NO: 19920 - RNA, 21 nt, Homo sapiens
uuggggaauggagagguuuuc

SEQ ID NO: 19921 - RNA, 22 nt, Homo sapiens
uuggcgacugcugcuaaucagg

SEQ ID NO: 19922 - RNA, 22 nt, Homo sapiens
uuggcuguguuccucaaggagu

SEQ ID NO: 19923 - RNA, 22 nt, Homo sapiens
uugauauauugcaugggcuacu

SEQ ID NO: 19924 - RNA, 22 nt, Homo sapiens
uuggaauuuuacuucuguaaga

SEQ ID NO: 19925 - RNA, 22 nt, Homo sapiens
uugacauaguuucugaaauaga

SEQ ID NO: 19926 - RNA, 22 nt, Homo sapiens
uugagaaucuuucgaauguucu

SEQ ID NO: 19927 - RNA, 21 nt, Homo sapiens
uugagacggagucucacucug

SEQ ID NO: 19928 - RNA, 17 nt, Homo sapiens
uugagaguauaucuuac

SEQ ID NO: 19929 - RNA, 22 nt, Homo sapiens
uuccuggaggggaaguguccaa

SEQ ID NO: 19930 - RNA, 22 nt, Homo sapiens
uuccuugagucuuuuuccugag

SEQ ID NO: 19931 - RNA, 22 nt, Homo sapiens
uugaagacuauaugauucuuca

SEQ ID NO: 19932 - RNA, 22 nt, Homo sapiens
uugaaagaaaggagacugaguu

SEQ ID NO: 19933 - RNA, 22 nt, Homo sapiens
uugaaaguguucacaaugguau

SEQ ID NO: 19934 - RNA, 22 nt, Homo sapiens
uugaaauguuuagaaguuugga

SEQ ID NO: 19935 - RNA, 22 nt, Homo sapiens
uugaaaguaaacaucacaaaga

SEQ ID NO: 19936 - RNA, 22 nt, Homo sapiens
uugaaagucauggcacaggcaa

SEQ ID NO: 19937 - RNA, 22 nt, Homo sapiens
uugaaagucuaggcuuacagua

SEQ ID NO: 19938 - RNA, 23 nt, Homo sapiens
uuccaccauugacuaguuacaua

SEQ ID NO: 19939 - RNA, 22 nt, Homo sapiens
uucagagugguaugaagugaug

SEQ ID NO: 19940 - RNA, 22 nt, Homo sapiens
uucacugugcuuaaauucugcu

SEQ ID NO: 19941 - RNA, 22 nt, Homo sapiens
uucacugagccagacuaagaca

SEQ ID NO: 19942 - RNA, 22 nt, Homo sapiens
uucacugcaugaaaaggacagc

SEQ ID NO: 19943 - RNA, 22 nt, Homo sapiens
ugugaaccucuggccaagauga

SEQ ID NO: 19944 - RNA, 22 nt, Homo sapiens
ugugaagaaagucauugguagc

SEQ ID NO: 19945 - RNA, 22 nt, Homo sapiens
ugugacacugaauggcagaacu

SEQ ID NO: 19946 - RNA, 23 nt, Homo sapiens
ugugacacuuccgucaguucauu

SEQ ID NO: 19947 - RNA, 22 nt, Homo sapiens
uuaaugugaaucaggaugcauu

SEQ ID NO: 19948 - RNA, 22 nt, Homo sapiens
uuaauguaauugauugauugac

SEQ ID NO: 19949 - RNA, 22 nt, Homo sapiens
uuaaucucaggaguuugggacc

SEQ ID NO: 19950 - RNA, 22 nt, Homo sapiens
uguugcacuccauccugggcga

SEQ ID NO: 19951 - RNA, 22 nt, Homo sapiens
uguuugcuuaacguggagccag

SEQ ID NO: 19952 - RNA, 22 nt, Homo sapiens
uuauucagcaccugcuguguuc

SEQ ID NO: 19953 - RNA, 22 nt, Homo sapiens
uuauguaggcuauagcucugca

SEQ ID NO: 19954 - RNA, 22 nt, Homo sapiens
uuaugucuuugagcaaugcugu

SEQ ID NO: 19955 - RNA, 22 nt, Homo sapiens
uuaugucuuuuguguucagcua

SEQ ID NO: 19956 - RNA, 22 nt, Homo sapiens
uuauaacagagacuccugugcu

SEQ ID NO: 19957 - RNA, 20 nt, Homo sapiens
uuauaacuuuuguucugggg

SEQ ID NO: 19958 - RNA, 22 nt, Homo sapiens
uuagucaaguguacugugaaug

SEQ ID NO: 19959 - RNA, 22 nt, Homo sapiens
uuagcaauugauucucauaagc

SEQ ID NO: 19960 - RNA, 22 nt, Homo sapiens
uuagcucaguuggugagagcgu

SEQ ID NO: 19961 - RNA, 21 nt, Homo sapiens
uuagccuguaagcacuuugca

SEQ ID NO: 19962 - RNA, 22 nt, Homo sapiens
ugagaugaaagcagaaagacuu

SEQ ID NO: 19963 - RNA, 22 nt, Homo sapiens
ugaggcaggagaacggcuugaa

SEQ ID NO: 19964 - RNA, 17 nt, Homo sapiens
ugaggcacuaguaucac

SEQ ID NO: 19965 - RNA, 21 nt, Homo sapiens
ugagaugauccugcaugcaug

SEQ ID NO: 19966 - RNA, 22 nt, Homo sapiens
ugagauaaucaugugauuucau

SEQ ID NO: 19967 - RNA, 22 nt, Homo sapiens
ugaaauaguuaaguugccuagu

SEQ ID NO: 19968 - RNA, 22 nt, Homo sapiens
ucuuuguguucaggagccacgu

SEQ ID NO: 19969 - RNA, 22 nt, Homo sapiens
ucuuuguuuucugauccugaag

SEQ ID NO: 19970 - RNA, 22 nt, Homo sapiens
ugaaauggaaagaguguagacu

SEQ ID NO: 19971 - RNA, 22 nt, Homo sapiens
ugacacagcaagauggaaccau

SEQ ID NO: 19972 - RNA, 22 nt, Homo sapiens
ugacugugcagcuccaucaggg

SEQ ID NO: 19973 - RNA, 22 nt, Homo sapiens
ucguggccugugaguccucccc

SEQ ID NO: 19974 - RNA, 22 nt, Homo sapiens
ucgcagcucacuggagccucga

SEQ ID NO: 19975 - RNA, 19 nt, Homo sapiens
ucacuggacagcacacuca

SEQ ID NO: 19976 - RNA, 22 nt, Homo sapiens
ucacuggagauagcaaucuggu

SEQ ID NO: 19977 - RNA, 22 nt, Homo sapiens
ucacuuuguuuuuggauaaguu

SEQ ID NO: 19978 - RNA, 22 nt, Homo sapiens
ucugagcaauaaacaacauauu

SEQ ID NO: 19979 - RNA, 22 nt, Homo sapiens
ucugcaagucuaaacuagccau

SEQ ID NO: 19980 - RNA, 22 nt, Homo sapiens
ucuuggguggauucauucuuuc

SEQ ID NO: 19981 - RNA, 19 nt, Homo sapiens
ucuugcacaugugaacuca

SEQ ID NO: 19982 - RNA, 22 nt, Homo sapiens
uggaaaacaugcacauuggauu

SEQ ID NO: 19983 - RNA, 18 nt, Homo sapiens
ugcuaugagauuauuuua

SEQ ID NO: 19984 - RNA, 22 nt, Homo sapiens
ugccaguguuuuguugaagauu

SEQ ID NO: 19985 - RNA, 22 nt, Homo sapiens
ugcgccauugcacuccagccug

SEQ ID NO: 19986 - RNA, 22 nt, Homo sapiens
ugcgccauugcauuccagccug

SEQ ID NO: 19987 - RNA, 22 nt, Homo sapiens
ugccagaugcaguguucaacaa

SEQ ID NO: 19988 - RNA, 22 nt, Homo sapiens
ugccagaugugcccucuccacc

SEQ ID NO: 19989 - RNA, 22 nt, Homo sapiens
ugccaguauuuuauugaggauu

SEQ ID NO: 19990 - RNA, 22 nt, Homo sapiens
ugccaguauuuuguugaggauu

SEQ ID NO: 19991 - RNA, 23 nt, Homo sapiens
ugcucgguguugacagucacauc

SEQ ID NO: 19992 - RNA, 22 nt, Homo sapiens
ugagguaugugaugucuuuuag

SEQ ID NO: 19993 - RNA, 22 nt, Homo sapiens
ugagguguuaacuuuacuuuua

SEQ ID NO: 19994 - RNA, 23 nt, Homo sapiens
ugagguguuaagcagacuugucu

SEQ ID NO: 19995 - RNA, 22 nt, Homo sapiens
ugcagguacuugacaacuuggg

SEQ ID NO: 19996 - RNA, 22 nt, Homo sapiens
ugcauuguaggauguuuagcag

SEQ ID NO: 19997 - RNA, 22 nt, Homo sapiens
ugcaagaugagauuuuggaugg

SEQ ID NO: 19998 - RNA, 22 nt, Homo sapiens
ugcaaguggauuuuuccccaga

SEQ ID NO: 19999 - RNA, 22 nt, Homo sapiens
ugucccguuuucgaggcugcag

SEQ ID NO: 20000 - RNA, 22 nt, Homo sapiens
uguauuuguuguuaaauggaga

SEQ ID NO: 20001 - RNA, 22 nt, Homo sapiens
uguauguuucuuaggccugaga

SEQ ID NO: 20002 - RNA, 22 nt, Homo sapiens
uguauguuguaagacuuagacc

SEQ ID NO: 20003 - RNA, 22 nt, Homo sapiens
ugucaaauucuggguuaaaaca

SEQ ID NO: 20004 - RNA, 22 nt, Homo sapiens
ugucaaggaaugucauugguuu

SEQ ID NO: 20005 - RNA, 20 nt, Homo sapiens
ugucaaggaauucccaaauc

SEQ ID NO: 20006 - RNA, 21 nt, Homo sapiens
ugucaagugggaaaacaugua

SEQ ID NO: 20007 - RNA, 22 nt, Homo sapiens
ugucaauauguaauaacugaau

SEQ ID NO: 20008 - RNA, 22 nt, Homo sapiens
ugucaguuucuugagauggaac

SEQ ID NO: 20009 - RNA, 19 nt, Homo sapiens
ugucaucaucuuuucuugc

SEQ ID NO: 20010 - RNA, 22 nt, Homo sapiens
ugucaucauuugagagaagaaa

SEQ ID NO: 20011 - RNA, 22 nt, Homo sapiens
uguaaaccauauauguauguag

SEQ ID NO: 20012 - RNA, 20 nt, Homo sapiens
uggugucuuggaaagagcuc

SEQ ID NO: 20013 - RNA, 20 nt, Homo sapiens
uggcuaaaugaaugauagca

SEQ ID NO: 20014 - RNA, 18 nt, Homo sapiens
ugggaagaaauucuucuc

SEQ ID NO: 20015 - RNA, 22 nt, Homo sapiens
ugggaagaugcugcuucuuccu

SEQ ID NO: 20016 - RNA, 22 nt, Homo sapiens
ugggaagauucuguguuuuucc

SEQ ID NO: 20017 - RNA, 22 nt, Homo sapiens
ugggaagagggagcgauuuugg

SEQ ID NO: 20018 - RNA, 18 nt, Homo sapiens
uggccaauggcaaacaga

SEQ ID NO: 20019 - RNA, 22 nt, Homo sapiens
uggaugaagagaugguaguugc

SEQ ID NO: 20020 - RNA, 22 nt, Homo sapiens
gagcaguugagagugcuggcca

SEQ ID NO: 20021 - RNA, 22 nt, Homo sapiens
gagcugaucuuuucugauucca

SEQ ID NO: 20022 - RNA, 22 nt, Homo sapiens
gacugcauuugccccaucgaau

SEQ ID NO: 20023 - RNA, 22 nt, Homo sapiens
gacaguuuggugaggaagacga

SEQ ID NO: 20024 - RNA, 20 nt, Homo sapiens
gacauagagacucucaaaaa

SEQ ID NO: 20025 - RNA, 22 nt, Homo sapiens
gaaagauuuuaacugggagacu

SEQ ID NO: 20026 - RNA, 22 nt, Homo sapiens
gaaagauuuccugagcuagaaa

SEQ ID NO: 20027 - RNA, 21 nt, Homo sapiens
cuuuuuacucguucauaugca

SEQ ID NO: 20028 - RNA, 22 nt, Homo sapiens
cugucacuggggcacauguccc

SEQ ID NO: 20029 - RNA, 22 nt, Homo sapiens
gauggcaugugcugccaccaag

SEQ ID NO: 20030 - RNA, 22 nt, Homo sapiens
gauguaggugcauuugcacgug

SEQ ID NO: 20031 - RNA, 18 nt, Homo sapiens
gauguaguauggugugga

SEQ ID NO: 20032 - RNA, 22 nt, Homo sapiens
gcaagauuguguggcugaagua

SEQ ID NO: 20033 - RNA, 22 nt, Homo sapiens
gcaagugucugagguuuuguau

SEQ ID NO: 20034 - RNA, 22 nt, Homo sapiens
gauggcaucugagaguguuaga

SEQ ID NO: 20035 - RNA, 22 nt, Homo sapiens
gauaaagauagcaauagggaca

SEQ ID NO: 20036 - RNA, 22 nt, Homo sapiens
gauaauucuagcagauacaggc

SEQ ID NO: 20037 - RNA, 22 nt, Homo sapiens
gcacaguuaaagggucauguga

SEQ ID NO: 20038 - RNA, 22 nt, Homo sapiens
gcacuacugcacuccagucuag

SEQ ID NO: 20039 - RNA, 22 nt, Homo sapiens
gccaguguguguuguucuccgc

SEQ ID NO: 20040 - RNA, 22 nt, Homo sapiens
gccaguguuuuauugagaauuu

SEQ ID NO: 20041 - RNA, 22 nt, Homo sapiens
gcaugguaguaaccuacauuug

SEQ ID NO: 20042 - RNA, 22 nt, Homo sapiens
ggaguguaguggcuccaucucg

SEQ ID NO: 20043 - RNA, 23 nt, Homo sapiens
ggaguguauuggcacgaucucag

SEQ ID NO: 20044 - RNA, 22 nt, Homo sapiens
ggagaugugccugcucugcucu

SEQ ID NO: 20045 - RNA, 21 nt, Homo sapiens
cagguagugucugaagccaga

SEQ ID NO: 20046 - RNA, 22 nt, Homo sapiens
cagguaguguguagcacagcag

SEQ ID NO: 20047 - RNA, 22 nt, Homo sapiens
cagcuugugguauugcugguug

SEQ ID NO: 20048 - RNA, 22 nt, Homo sapiens
cauugcaguuuuugguguaucu

SEQ ID NO: 20049 - RNA, 22 nt, Homo sapiens
cauugcacuccacuccugaaca

SEQ ID NO: 20050 - RNA, 22 nt, Homo sapiens
cauuacacuuguaagguuuuuc

SEQ ID NO: 20051 - RNA, 22 nt, Homo sapiens
caugucuuuuauucugugugau

SEQ ID NO: 20052 - RNA, 22 nt, Homo sapiens
cacagucugggcuuguuuguac

SEQ ID NO: 20053 - RNA, 22 nt, Homo sapiens
caacugguuuuauacaguuuag

SEQ ID NO: 20054 - RNA, 23 nt, Homo sapiens
caauacugaccucacguuaauag

SEQ ID NO: 20055 - RNA, 22 nt, Homo sapiens
cacaguguuccagcuauuugaa

SEQ ID NO: 20056 - RNA, 22 nt, Homo sapiens
cacugcauccuccaccuccugg

SEQ ID NO: 20057 - RNA, 22 nt, Homo sapiens
cacugcauccuccauauccugg

SEQ ID NO: 20058 - RNA, 22 nt, Homo sapiens
cacugcauccucugccuggcgg

SEQ ID NO: 20059 - RNA, 22 nt, Homo sapiens
cacugcauccuugaccuucugg

SEQ ID NO: 20060 - RNA, 22 nt, Homo sapiens
cuacacaugcaggcucccugcc

SEQ ID NO: 20061 - RNA, 22 nt, Homo sapiens
cuaagugaguauaauuuuaaga

SEQ ID NO: 20062 - RNA, 22 nt, Homo sapiens
cuccauuuaguccuuuuagaag

SEQ ID NO: 20063 - RNA, 22 nt, Homo sapiens
cuccauuuggaacagauguccu

SEQ ID NO: 20064 - RNA, 22 nt, Homo sapiens
cauugcagauccuucaaaugac

SEQ ID NO: 20065 - RNA, 21 nt, Homo sapiens
ccagugguuggaaacuauggg

SEQ ID NO: 20066 - RNA, 22 nt, Homo sapiens
ccaguuuuucauuuauacuagu

SEQ ID NO: 20067 - RNA, 22 nt, Homo sapiens
ccaucacaggccucagugggaa

SEQ ID NO: 20068 - RNA, 22 nt, Homo sapiens
cuaaagauagugacaugauuug

SEQ ID NO: 20069 - RNA, 22 nt, Homo sapiens
cugccaguuugauucgggccac

SEQ ID NO: 20070 - RNA, 22 nt, Homo sapiens
cugcauaaucaucucucugcau

SEQ ID NO: 20071 - RNA, 22 nt, Homo sapiens
cuguaaaguucucauuguagcc

SEQ ID NO: 20072 - RNA, 22 nt, Homo sapiens
uagauuaucuuaaggagcauca

SEQ ID NO: 20073 - RNA, 22 nt, Homo sapiens
uagauucauuuuagcaaaaguu

SEQ ID NO: 20074 - RNA, 22 nt, Homo sapiens
uagaaguaggcuacgugucugg

SEQ ID NO: 20075 - RNA, 22 nt, Homo sapiens
uaccucaguucaauaacagaua

SEQ ID NO: 20076 - RNA, 22 nt, Homo sapiens
uacugcaucuacuuagagccag

SEQ ID NO: 20077 - RNA, 22 nt, Homo sapiens
uacugcuuaagggcaugggccc

SEQ ID NO: 20078 - RNA, 22 nt, Homo sapiens
uacaugugcacaacgugcaggu

SEQ ID NO: 20079 - RNA, 22 nt, Homo sapiens
uaucaagauggauaaggauaga

SEQ ID NO: 20080 - RNA, 22 nt, Homo sapiens
uauaucuagagcggaccaggcu

SEQ ID NO: 20081 - RNA, 22 nt, Homo sapiens
uagcagugucuagguaggccau

SEQ ID NO: 20082 - RNA, 22 nt, Homo sapiens
uagcaguauugaaagaugaggg

SEQ ID NO: 20083 - RNA, 22 nt, Homo sapiens
uagcauaauuuguagaaaauca

SEQ ID NO: 20084 - RNA, 22 nt, Homo sapiens
uagcugauguuugucuaguagc

SEQ ID NO: 20085 - RNA, 22 nt, Homo sapiens
uagcugcaaaauauagacuucu

SEQ ID NO: 20086 - RNA, 22 nt, Homo sapiens
uagcugaucuuuuaaagaauga

SEQ ID NO: 20087 - RNA, 22 nt, Homo sapiens
uaggagcacagcagcauguggg

SEQ ID NO: 20088 - RNA, 22 nt, Homo sapiens
uaggagcauaggauuguuugag

SEQ ID NO: 20089 - RNA, 22 nt, Homo sapiens
uagggaguuuuggggugcagaa

SEQ ID NO: 20090 - RNA, 22 nt, Homo sapiens
ucacaccauucuucuacuucag

SEQ ID NO: 20091 - RNA, 18 nt, Homo sapiens
ucaauguggauguucuuu

SEQ ID NO: 20092 - RNA, 22 nt, Homo sapiens
ucaagugcauugauucaguauu

SEQ ID NO: 20093 - RNA, 22 nt, Homo sapiens
ucacaucucagguuucuugaca

SEQ ID NO: 20094 - RNA, 22 nt, Homo sapiens
ucaccuggagagcuugcuaaua

SEQ ID NO: 20095 - RNA, 22 nt, Homo sapiens
ucaaagugagcuccuucucacu

SEQ ID NO: 20096 - RNA, 22 nt, Homo sapiens
uauugcagugagauccaucugg

SEQ ID NO: 20097 - RNA, 21 nt, Homo sapiens
uaucccagucacaucuaccca

SEQ ID NO: 20098 - RNA, 22 nt, Homo sapiens
uaucuacauguagguauguaug

SEQ ID NO: 20099 - RNA, 22 nt, Homo sapiens
uaucaaucuagggaaacuccaa

SEQ ID NO: 20100 - RNA, 22 nt, Homo sapiens
uaucacacgccuugcuucauuu

SEQ ID NO: 20101 - RNA, 17 nt, Homo sapiens
uauguaguacuuauaaa

SEQ ID NO: 20102 - RNA, 22 nt, Homo sapiens
uaugucuuuugcuugcaaauag

SEQ ID NO: 20103 - RNA, 21 nt, Homo sapiens
ggcaagaaacacaaucaagua

SEQ ID NO: 20104 - RNA, 22 nt, Homo sapiens
ggcaaguugcuauucuuuaaug

SEQ ID NO: 20105 - RNA, 22 nt, Homo sapiens
ggcaaugucagcuaaugaugga

SEQ ID NO: 20106 - RNA, 22 nt, Homo sapiens
ggcacaguuaagugcuaccuaa

SEQ ID NO: 20107 - RNA, 22 nt, Homo sapiens
ggcaguguggcugcauauagca

SEQ ID NO: 20108 - RNA, 22 nt, Homo sapiens
guaucacacuuauugaccugca

SEQ ID NO: 20109 - RNA, 22 nt, Homo sapiens
guacacaacaugcagguuuguu

SEQ ID NO: 20110 - RNA, 22 nt, Homo sapiens
gugacagucaaagacaugacuu

SEQ ID NO: 20111 - RNA, 22 nt, Homo sapiens
gucagcaucaccaugucuauga

SEQ ID NO: 20112 - RNA, 22 nt, Homo sapiens
gucaccauugagucauuuccuc

SEQ ID NO: 20113 - RNA, 22 nt, Homo sapiens
guaucucaguucucgugauuag

SEQ ID NO: 20114 - RNA, 22 nt, Homo sapiens
guaugacacaggaagcuuaacc

SEQ ID NO: 20115 - RNA, 22 nt, Homo sapiens
guguaaaacaauuagaggauuu

SEQ ID NO: 20116 - RNA, 22 nt, Homo sapiens
guguguaaauggcagugagcuc

SEQ ID NO: 20117 - RNA, 22 nt, Homo sapiens
gugguuuuacaaagagaaagau

SEQ ID NO: 20118 - RNA, 22 nt, Homo sapiens
gugguuuuaucccagaaauuaa

SEQ ID NO: 20119 - RNA, 22 nt, Homo sapiens
gugguuuuuaaaguaccugugg

SEQ ID NO: 20120 - RNA, 22 nt, Homo sapiens
guggaaaucucugugugacuua

SEQ ID NO: 20121 - RNA, 21 nt, Homo sapiens
guggaaauggaauuuacuaau

SEQ ID NO: 20122 - RNA, 22 nt, Homo sapiens
guggaagaaaucagguuauuug

SEQ ID NO: 20123 - RNA, 22 nt, Homo sapiens
guggaagauaguguguuaaugu

SEQ ID NO: 20124 - RNA, 22 nt, Homo sapiens
uaaaugacugucaguagaugaa

SEQ ID NO: 20125 - RNA, 22 nt, Homo sapiens
uaaaguguuuguuauuaaaggu

SEQ ID NO: 20126 - RNA, 22 nt, Homo sapiens
uaaaugcuugagaugauggaua

SEQ ID NO: 20127 - RNA, 21 nt, Homo sapiens
uaaaugucauacaaagcaaug

SEQ ID NO: 20128 - RNA, 21 nt, Homo sapiens
uaaagcuuagcuauaguggcu

SEQ ID NO: 20129 - RNA, 22 nt, Homo sapiens
uaaagccauugucaaguuugua

SEQ ID NO: 20130 - RNA, 22 nt, Homo sapiens
uaaagauaaggcucgcuuggau

SEQ ID NO: 20131 - RNA, 22 nt, Homo sapiens
uaacccacgcagaauggacaag

SEQ ID NO: 20132 - RNA, 22 nt, Homo sapiens
uaacaccuuugauagcacuuuu

SEQ ID NO: 20133 - RNA, 22 nt, Homo sapiens
uaacagcauuugugucuaguag

SEQ ID NO: 20134 - RNA, 22 nt, Homo sapiens
uaacaaugucuuaugggcuuaa

SEQ ID NO: 20135 - RNA, 22 nt, Homo sapiens
guugcaauugauguaugucuga

SEQ ID NO: 20136 - RNA, 22 nt, Homo sapiens
guuccuuguagaugcuggauau

SEQ ID NO: 20137 - RNA, 22 nt, Homo sapiens
guugaggcaggagaauuacuug

SEQ ID NO: 20138 - RNA, 22 nt, Homo sapiens
guuuggcuuucucucuauccug

SEQ ID NO: 20139 - RNA, 22 nt, Homo sapiens
uaaaagucaucacaacuggagu

SEQ ID NO: 20140 - RNA, 22 nt, Homo sapiens
uaaacugcuugaggguaaguac

SEQ ID NO: 20141 - RNA, 22 nt, Homo sapiens
uaaacugucuugcaguuacaug

SEQ ID NO: 20142 - RNA, 22 nt, Homo sapiens
accaguguuuaccaaguagcau

SEQ ID NO: 20143 - RNA, 22 nt, Homo sapiens
accaguuuuuuauacaucuucu

SEQ ID NO: 20144 - RNA, 22 nt, Homo sapiens
acccaguaacauaugggaggga

SEQ ID NO: 20145 - RNA, 19 nt, Homo sapiens
accagauugcauucuugga

SEQ ID NO: 20146 - RNA, 22 nt, Homo sapiens
acccugucagcuggccugggca

SEQ ID NO: 20147 - RNA, 22 nt, Homo sapiens
acaucccaugccuggguacucc

SEQ ID NO: 20148 - RNA, 22 nt, Homo sapiens
aauggcuuucagcuuuucccca

SEQ ID NO: 20149 - RNA, 19 nt, Homo sapiens
aauggcuuuuccuguuccc

SEQ ID NO: 20150 - RNA, 22 nt, Homo sapiens
aaugccuagugugugacaggug

SEQ ID NO: 20151 - RNA, 22 nt, Homo sapiens
aauggcaucuacguuaaauguc

SEQ ID NO: 20152 - RNA, 22 nt, Homo sapiens
acauacacuagggauguggugu

SEQ ID NO: 20153 - RNA, 22 nt, Homo sapiens
agagugcuauagauuagauuuc

SEQ ID NO: 20154 - RNA, 21 nt, Homo sapiens
agagucaucucuaucuguacc

SEQ ID NO: 20155 - RNA, 23 nt, Homo sapiens
agagguuuaaucaggcaguugcu

SEQ ID NO: 20156 - RNA, 22 nt, Homo sapiens
agagcauugaguuaaugguuca

SEQ ID NO: 20157 - RNA, 22 nt, Homo sapiens
agaggucuuaucaaacaugcuu

SEQ ID NO: 20158 - RNA, 22 nt, Homo sapiens
agaaaugcagcaugaggcggca

SEQ ID NO: 20159 - RNA, 22 nt, Homo sapiens
agaagugcuggguucaggcugg

SEQ ID NO: 20160 - RNA, 21 nt, Homo sapiens
agaaaaucuuaugggaaacau

SEQ ID NO: 20161 - RNA, 22 nt, Homo sapiens
agaaacauucucuugccuccuu

SEQ ID NO: 20162 - RNA, 22 nt, Homo sapiens
acugcacuccagccugcccaac

SEQ ID NO: 20163 - RNA, 20 nt, Homo sapiens
acugcacuccagccuuccag

SEQ ID NO: 20164 - RNA, 22 nt, Homo sapiens
acugcacuccagccuucggaca

SEQ ID NO: 20165 - RNA, 22 nt, Homo sapiens
acuuugcuuagagggcauuaaa

SEQ ID NO: 20166 - RNA, 22 nt, Homo sapiens
agugcaguggugccaucauaac

SEQ ID NO: 20167 - RNA, 19 nt, Homo sapiens
agucaugugaggacccuug

SEQ ID NO: 20168 - RNA, 20 nt, Homo sapiens
aggcauguugguuugcgugu

SEQ ID NO: 20169 - RNA, 22 nt, Homo sapiens
aggcuuguuuuacuaacuggua

SEQ ID NO: 20170 - RNA, 22 nt, Homo sapiens
aguguuuuuaucaugaaagggu

SEQ ID NO: 20171 - RNA, 22 nt, Homo sapiens
auaaaugcuuccagucauuaaa

SEQ ID NO: 20172 - RNA, 22 nt, Homo sapiens
auaaaugccuguuguuuuaagc

SEQ ID NO: 20173 - RNA, 22 nt, Homo sapiens
auaaacugucaguggagaguaa

SEQ ID NO: 20174 - RNA, 19 nt, Homo sapiens
agccaguuuucccagcacc

SEQ ID NO: 20175 - RNA, 22 nt, Homo sapiens
agccccauuuguugaaaagacg

SEQ ID NO: 20176 - RNA, 22 nt, Homo sapiens
agcaccacauacuacagagaua

SEQ ID NO: 20177 - RNA, 23 nt, Homo sapiens
agcaccaccccaggucacaagug

SEQ ID NO: 20178 - RNA, 22 nt, Homo sapiens
agcacaguuaaaugaggcuucu

SEQ ID NO: 20179 - RNA, 22 nt, Homo sapiens
agcacagugguuaaguuucuua

SEQ ID NO: 20180 - RNA, 22 nt, Homo sapiens
agcuguuguacacuuuaccuuu

SEQ ID NO: 20181 - RNA, 22 nt, Homo sapiens
aggcaaaugccagcaaucacac

SEQ ID NO: 20182 - RNA, 22 nt, Homo sapiens
aggcaacaugguaaaacccugu

SEQ ID NO: 20183 - RNA, 22 nt, Homo sapiens
aacaccauuuuucugcagccuu

SEQ ID NO: 20184 - RNA, 22 nt, Homo sapiens
agcuguuguuuuaagauacuaa

SEQ ID NO: 20185 - RNA, 20 nt, Homo sapiens
agcuguuguuaugagguuua

SEQ ID NO: 20186 - RNA, 22 nt, Homo sapiens
agcuucauuguuaugaauguca

SEQ ID NO: 20187 - RNA, 22 nt, Homo sapiens
agcuuguauuuguagccuguug

SEQ ID NO: 20188 - RNA, 22 nt, Homo sapiens
agcuugugauucuccaucaugu

SEQ ID NO: 20189 - RNA, 22 nt, Homo sapiens
agcuugugauuuagagugagag

SEQ ID NO: 20190 - RNA, 22 nt, Homo sapiens
aucaucaugcacuacagccugg

SEQ ID NO: 20191 - RNA, 22 nt, Homo sapiens
aucauccugucaggagcuguga

SEQ ID NO: 20192 - RNA, 22 nt, Homo sapiens
aucauguaguaagacacauuua

SEQ ID NO: 20193 - RNA, 22 nt, Homo sapiens
augaaagugauaaaugucucua

SEQ ID NO: 20194 - RNA, 22 nt, Homo sapiens
augacuggauaauggacacaca

SEQ ID NO: 20195 - RNA, 22 nt, Homo sapiens
augaccaaagaaaugcuauagg

SEQ ID NO: 20196 - RNA, 22 nt, Homo sapiens
augacugucuugcagaggcuau

SEQ ID NO: 20197 - RNA, 22 nt, Homo sapiens
augagagugagagcagccccuu

SEQ ID NO: 20198 - RNA, 22 nt, Homo sapiens
augacagugagugagcucucac

SEQ ID NO: 20199 - RNA, 22 nt, Homo sapiens
augacauagaagcaauccccua

SEQ ID NO: 20200 - RNA, 22 nt, Homo sapiens
augaccaaugggcagagcuaga

SEQ ID NO: 20201 - RNA, 22 nt, Homo sapiens
auagcauagucagcuucgcuga

SEQ ID NO: 20202 - RNA, 22 nt, Homo sapiens
auagcauaucccacaugucaga

SEQ ID NO: 20203 - RNA, 22 nt, Homo sapiens
auauguaguuucagaaguggaa

SEQ ID NO: 20204 - RNA, 22 nt, Homo sapiens
auaugucuguuuagucuguaau

SEQ ID NO: 20205 - RNA, 22 nt, Homo sapiens
auaugucuuaguuaccuugggc

SEQ ID NO: 20206 - RNA, 22 nt, Homo sapiens
auaugguacuuaugcucaaacu

SEQ ID NO: 20207 - RNA, 22 nt, Homo sapiens
aucacugggcaagauaucauga

SEQ ID NO: 20208 - RNA, 22 nt, Homo sapiens
aucacagguacuauggcugaca

SEQ ID NO: 20209 - RNA, 22 nt, Homo sapiens
auuccauaguacagugaugagu

SEQ ID NO: 20210 - RNA, 22 nt, Homo sapiens
auugaguaacaauuuuguucaa

SEQ ID NO: 20211 - RNA, 22 nt, Homo sapiens
auguuguaguaugagucaaaau

SEQ ID NO: 20212 - RNA, 23 nt, Homo sapiens
auucaaguagugagagugguuau

SEQ ID NO: 20213 - RNA, 22 nt, Homo sapiens
auucaagugaugcagcuguuuu

SEQ ID NO: 20214 - RNA, 22 nt, Homo sapiens
auucacugugcuuggccaaauu

SEQ ID NO: 20215 - RNA, 22 nt, Homo sapiens
auucacuguggcuuucucugau

SEQ ID NO: 20216 - RNA, 22 nt, Homo sapiens
auucacuguggguccuuuggau

SEQ ID NO: 20217 - RNA, 22 nt, Homo sapiens
augguuagauguauccuuucca

SEQ ID NO: 20218 - RNA, 22 nt, Homo sapiens
augauguguguuuaagaugucu

SEQ ID NO: 20219 - RNA, 22 nt, Homo sapiens
augauguguucuguguucccau

SEQ ID NO: 20220 - RNA, 22 nt, Homo sapiens
augauauuauucuagcccagag

SEQ ID NO: 20221 - RNA, 22 nt, Homo sapiens
auggccuaugaccguuauguug

SEQ ID NO: 20222 - RNA, 22 nt, Homo sapiens
auggcaguuuauucuaaaucaa

SEQ ID NO: 20223 - RNA, 22 nt, Homo sapiens
auggucuuuauuguguugagug

SEQ ID NO: 20224 - RNA, 22 nt, Homo sapiens
aaguaaacauuuuguacaauaa

SEQ ID NO: 20225 - RNA, 23 nt, Homo sapiens
aagucauggaaucaaaugaggug

SEQ ID NO: 20226 - RNA, 22 nt, Homo sapiens
aagugcaaauucccaggcucug

SEQ ID NO: 20227 - RNA, 22 nt, Homo sapiens
aauaaguugagaugaggucaua

SEQ ID NO: 20228 - RNA, 22 nt, Homo sapiens
aagcuguguguaagcucucaca

SEQ ID NO: 20229 - RNA, 22 nt, Homo sapiens
aagcugugucuugucagcuacc

SEQ ID NO: 20230 - RNA, 22 nt, Homo sapiens
aagcugccaggcaugguggcug

SEQ ID NO: 20231 - RNA, 22 nt, Homo sapiens
aagcuggcuuucauugagugcu

SEQ ID NO: 20232 - RNA, 22 nt, Homo sapiens
aaugacagccagauucuucucu

SEQ ID NO: 20233 - RNA, 22 nt, Homo sapiens
aaucuguagaaggugcacauuc

SEQ ID NO: 20234 - RNA, 22 nt, Homo sapiens
aaucugucuuuuguuauugagg

SEQ ID NO: 20235 - RNA, 22 nt, Homo sapiens
aauagcacuguagauggaggaa

SEQ ID NO: 20236 - RNA, 22 nt, Homo sapiens
aauaugguuuuaugaagcaauu

SEQ ID NO: 20237 - RNA, 22 nt, Homo sapiens
aaagcaucacuuuuccuacuuu

SEQ ID NO: 20238 - RNA, 22 nt, Homo sapiens
aaacugucuucugacaguuucc

SEQ ID NO: 20239 - RNA, 22 nt, Homo sapiens
aaacuugucuaauuauaagcau

SEQ ID NO: 20240 - RNA, 22 nt, Homo sapiens
aaacugcuuuccaugguggcug

SEQ ID NO: 20241 - RNA, 22 nt, Homo sapiens
aaaccacagugugcugcugggg

SEQ ID NO: 20242 - RNA, 22 nt, Homo sapiens
aaaugcaguugguggggauaug

SEQ ID NO: 20243 - RNA, 22 nt, Homo sapiens
aaaugcaugaauaagcucgugu

SEQ ID NO: 20244 - RNA, 22 nt, Homo sapiens
aaaugcagauucugcuuagguu

SEQ ID NO: 20245 - RNA, 22 nt, Homo sapiens
aaaguacugggauuggccgggu

SEQ ID NO: 20246 - RNA, 22 nt, Homo sapiens
aacugcacauauuuguaugggu

SEQ ID NO: 20247 - RNA, 22 nt, Homo sapiens
aaauggcaccggcucuucccuc

SEQ ID NO: 20248 - RNA, 22 nt, Homo sapiens
aaauugcacaaguggugauuug

SEQ ID NO: 20249 - RNA, 22 nt, Homo sapiens
aacacuguuuccagucaugauc

SEQ ID NO: 20250 - RNA, 22 nt, Homo sapiens
aaccuguggauuuugguaucug

SEQ ID NO: 20251 - RNA, 22 nt, Homo sapiens
aaaacgcauccucacaggucug

SEQ ID NO: 20252 - RNA, 22 nt, Human adenovirus A
gaacaguguuuucagcaauuac

SEQ ID NO: 20253 - RNA, 21 nt, Human adenovirus A
gcgugcgcagucuugaaugcu

SEQ ID NO: 20254 - RNA, 22 nt, Homo sapiens
ucacuggccaaauucuggguga

SEQ ID NO: 20255 - RNA, 22 nt, Homo sapiens
gaggucauucugugguacccag

SEQ ID NO: 20256 - RNA, 22 nt, Homo sapiens
gugacacagcaagacuccgucu

SEQ ID NO: 20257 - RNA, 20 nt, Homo sapiens
uguggcacuguaucucucag

SEQ ID NO: 20258 - RNA, 21 nt, Homo sapiens
uuuccuggagcguauggcuuc

SEQ ID NO: 20259 - RNA, 22 nt, Homo sapiens
ucaugggagcccccaucaugag

SEQ ID NO: 20260 - RNA, 19 nt, Homo sapiens
agagacucauuguagcauu

SEQ ID NO: 20261 - RNA, 22 nt, Homo sapiens
gcaccacugcacucucagcuug

SEQ ID NO: 20262 - RNA, 22 nt, Homo sapiens
acccugucaaaacggaccaauc

SEQ ID NO: 20263 - RNA, 22 nt, Homo sapiens
cucucugagccauggcugcccu

SEQ ID NO: 20264 - RNA, 22 nt, Homo sapiens
cacugcacuccagcuugugggc

SEQ ID NO: 20265 - RNA, 22 nt, Homo sapiens
acccugucaaaauggaccaauc

SEQ ID NO: 20266 - RNA, 22 nt, Homo sapiens
aacuggccugagaugaaaagug

SEQ ID NO: 20267 - RNA, 20 nt, Homo sapiens
ucacccugacaucugcccag

SEQ ID NO: 20268 - RNA, 20 nt, Homo sapiens
acacuggcuuugagauuuag

SEQ ID NO: 20269 - RNA, 22 nt, Homo sapiens
uggaggacugcagaacugaggc

SEQ ID NO: 20270 - RNA, 22 nt, Homo sapiens
ggucacccugaugcuggugguc

SEQ ID NO: 20271 - RNA, 22 nt, Homo sapiens
acagcacugccaagugacccau

SEQ ID NO: 20272 - RNA, 22 nt, Homo sapiens
ucugagucaucacaaaugaugc

SEQ ID NO: 20273 - RNA, 22 nt, Homo sapiens
gacuggccuauaauggcgaauu

SEQ ID NO: 20274 - RNA, 22 nt, Homo sapiens
gacuggccauugauacagaggu

SEQ ID NO: 20275 - RNA, 21 nt, Homo sapiens
ucaggaccucuaguuagccag

SEQ ID NO: 20276 - RNA, 22 nt, Homo sapiens
uguggcacuguguccagagaaa

SEQ ID NO: 20277 - RNA, 22 nt, Homo sapiens
gaggucaugucgggccccagga

SEQ ID NO: 20278 - RNA, 22 nt, Homo sapiens
gucacugggugcugcgccuguc

SEQ ID NO: 20279 - RNA, 22 nt, Homo sapiens
acugcacuccagccugugagac

SEQ ID NO: 20280 - RNA, 22 nt, Homo sapiens
ggcaccacagacgccaggcgug

SEQ ID NO: 20281 - RNA, 22 nt, Homo sapiens
caccaggugcccagcacggcca

SEQ ID NO: 20282 - RNA, 22 nt, Homo sapiens
acccugucacucccaucaauuu

SEQ ID NO: 20283 - RNA, 22 nt, Homo sapiens
caccagguuggagugcaguggu

SEQ ID NO: 20284 - RNA, 22 nt, Homo sapiens
uuccugagccuuguaucuagua

SEQ ID NO: 20285 - RNA, 22 nt, Homo sapiens
aacuggccuccuugggaaauua

SEQ ID NO: 20286 - RNA, 22 nt, Homo sapiens
acugcacuccagacucugucuc

SEQ ID NO: 20287 - RNA, 19 nt, Homo sapiens
uuccugagaacaagggcuu

SEQ ID NO: 20288 - RNA, 22 nt, Homo sapiens
ugagcugguacuaauauuauca

SEQ ID NO: 20289 - RNA, 22 nt, Homo sapiens
cauggcccugggcugggcgaac

SEQ ID NO: 20290 - RNA, 17 nt, Homo sapiens
gcacuggcguaucccac

SEQ ID NO: 20291 - RNA, 22 nt, Homo sapiens
aguggcacaauuuugacucccc

SEQ ID NO: 20292 - RNA, 22 nt, Homo sapiens
ggcaccauggaaggacgggagc

SEQ ID NO: 20293 - RNA, 22 nt, Homo sapiens
gucaaaugcacagaaccauuaa

SEQ ID NO: 20294 - RNA, 22 nt, Homo sapiens
gcaccccuuaccgggcuggguu

SEQ ID NO: 20295 - RNA, 19 nt, Homo sapiens
caccgccugcccccugcug

SEQ ID NO: 20296 - RNA, 22 nt, Homo sapiens
aacuggccuggcgugcagaggg

SEQ ID NO: 20297 - RNA, 22 nt, Homo sapiens
gcacccugucaaaauggaccaa

SEQ ID NO: 20298 - RNA, 22 nt, Homo sapiens
acugcacuccagcuccagggug

SEQ ID NO: 20299 - RNA, 22 nt, Homo sapiens
cuccacugagcaggugggaggc

SEQ ID NO: 20300 - RNA, 22 nt, Homo sapiens
uacuggccccaaaguagguagu

SEQ ID NO: 20301 - RNA, 22 nt, Homo sapiens
ucacuggcaaauauauccguug

SEQ ID NO: 20302 - RNA, 22 nt, Homo sapiens
cugagcccauucuggggagaag

SEQ ID NO: 20303 - RNA, 22 nt, Homo sapiens
aggcacacaacccuggaccuga

SEQ ID NO: 20304 - RNA, 22 nt, Homo sapiens
gagacucuuagauuggaaaucu

SEQ ID NO: 20305 - RNA, 22 nt, Homo sapiens
uugggacccuguccuguaacaa

SEQ ID NO: 20306 - RNA, 22 nt, Homo sapiens
uacuggccuugaacucuggugu

SEQ ID NO: 20307 - RNA, 22 nt, Homo sapiens
aguggcacuauucucagaguca

SEQ ID NO: 20308 - RNA, 22 nt, Homo sapiens
gcauggccuuuaaaugucacag

SEQ ID NO: 20309 - RNA, 22 nt, Homo sapiens
acugcacuccagccuucaggac

SEQ ID NO: 20310 - RNA, 22 nt, Homo sapiens
uggcaccauccaggugucucua

SEQ ID NO: 20311 - RNA, 22 nt, Homo sapiens
uuuuccagugggacucccauua

SEQ ID NO: 20312 - RNA, 22 nt, Homo sapiens
uguuaacauggucucagucugu

SEQ ID NO: 20313 - RNA, 22 nt, Homo sapiens
ugugguagugcuuaccugcagu

SEQ ID NO: 20314 - RNA, 22 nt, Homo sapiens
ugugaauguaagaaaauccaac

SEQ ID NO: 20315 - RNA, 19 nt, Homo sapiens
ugugaagaaaugcugcaag

SEQ ID NO: 20316 - RNA, 22 nt, Homo sapiens
ugugccacugcacuccugggug

SEQ ID NO: 20317 - RNA, 22 nt, Homo sapiens
ugugccacugcacucugggcaa

SEQ ID NO: 20318 - RNA, 22 nt, Homo sapiens
uggugagaaaagaugucuuugu

SEQ ID NO: 20319 - RNA, 22 nt, Homo sapiens
ugucaucuagguuuuaagccuu

SEQ ID NO: 20320 - RNA, 22 nt, Homo sapiens
ugucuuguagacugaaggcuuc

SEQ ID NO: 20321 - RNA, 22 nt, Homo sapiens
ugugaacaaaauuuguugcaua

SEQ ID NO: 20322 - RNA, 22 nt, Homo sapiens
ugugaacagcagcugggcuuug

SEQ ID NO: 20323 - RNA, 19 nt, Homo sapiens
ugugaacaucacagagugu

SEQ ID NO: 20324 - RNA, 22 nt, Homo sapiens
ugugaacauuuuguauauauua

SEQ ID NO: 20325 - RNA, 22 nt, Homo sapiens
ugucauguugagaaacuuggau

SEQ ID NO: 20326 - RNA, 22 nt, Homo sapiens
ugucauguuucuacugaccaaa

SEQ ID NO: 20327 - RNA, 22 nt, Homo sapiens
uguccaaaucagagguaccaaa

SEQ ID NO: 20328 - RNA, 22 nt, Homo sapiens
ugucuuguagacaauguauagu

SEQ ID NO: 20329 - RNA, 22 nt, Homo sapiens
uguuucuacugucucuguagua

SEQ ID NO: 20330 - RNA, 22 nt, Homo sapiens
uguuuguuugauaugggauaaa

SEQ ID NO: 20331 - RNA, 22 nt, Homo sapiens
uuaacacugccauugauacugu

SEQ ID NO: 20332 - RNA, 22 nt, Homo sapiens
uuaaaugcauagaauguguagu

SEQ ID NO: 20333 - RNA, 22 nt, Homo sapiens
uuaaagugcuguuuuugccggg

SEQ ID NO: 20334 - RNA, 22 nt, Homo sapiens
uuaaagcuggcguuacaguuug

SEQ ID NO: 20335 - RNA, 22 nt, Homo sapiens
uuaaagugaucauaaggauagu

SEQ ID NO: 20336 - RNA, 22 nt, Homo sapiens
uuaaagugcacacgggucaggc

SEQ ID NO: 20337 - RNA, 22 nt, Homo sapiens
uguuuguuugagauggagucuc

SEQ ID NO: 20338 - RNA, 22 nt, Homo sapiens
uuacaagaugucuguccaacac

SEQ ID NO: 20339 - RNA, 22 nt, Homo sapiens
uuaacaguuaauucuuuggcaa

SEQ ID NO: 20340 - RNA, 22 nt, Homo sapiens
uuaacaguugcaugagacugag

SEQ ID NO: 20341 - RNA, 22 nt, Homo sapiens
uuaagaagugauuuuccucauu

SEQ ID NO: 20342 - RNA, 22 nt, Homo sapiens
uuaacagugaccccugguggcc

SEQ ID NO: 20343 - RNA, 22 nt, Homo sapiens
uucauguagucaucauccugcu

SEQ ID NO: 20344 - RNA, 22 nt, Homo sapiens
uucaguggguggaugaauauga

SEQ ID NO: 20345 - RNA, 22 nt, Homo sapiens
uucaaguaguucucaugccuca

SEQ ID NO: 20346 - RNA, 22 nt, Homo sapiens
uucaauacuguugauccuuaug

SEQ ID NO: 20347 - RNA, 22 nt, Homo sapiens
uuaguucccucauucuugacuu

SEQ ID NO: 20348 - RNA, 22 nt, Homo sapiens
uuaguuuaucagugguuucuga

SEQ ID NO: 20349 - RNA, 22 nt, Homo sapiens
uuauacucgucugaaugauucu

SEQ ID NO: 20350 - RNA, 22 nt, Homo sapiens
uuauuugguuauuguaauuggg

SEQ ID NO: 20351 - RNA, 22 nt, Homo sapiens
uuauuugguugcugacuuggaa

SEQ ID NO: 20352 - RNA, 22 nt, Homo sapiens
uuccaugagaugcaucaaagcu

SEQ ID NO: 20353 - RNA, 22 nt, Homo sapiens
uuccaguguuugacucaccuuu

SEQ ID NO: 20354 - RNA, 22 nt, Homo sapiens
uuccaguggacuacuucauccu

SEQ ID NO: 20355 - RNA, 22 nt, Homo sapiens
uuccaguguguucauccucaga

SEQ ID NO: 20356 - RNA, 20 nt, Homo sapiens
uuccagcacauuagggaagc

SEQ ID NO: 20357 - RNA, 21 nt, Homo sapiens
uuccagugagccuagaugccu

SEQ ID NO: 20358 - RNA, 22 nt, Homo sapiens
uuccagugggacgagaugugga

SEQ ID NO: 20359 - RNA, 22 nt, Homo sapiens
uucccuuucuuaaagaguuagg

SEQ ID NO: 20360 - RNA, 22 nt, Homo sapiens
uuccuguagcgauuuuaguaau

SEQ ID NO: 20361 - RNA, 22 nt, Homo sapiens
uuccauugugucaucuuggugg

SEQ ID NO: 20362 - RNA, 22 nt, Homo sapiens
uucccauuguuggccagcaugu

SEQ ID NO: 20363 - RNA, 22 nt, Homo sapiens
uucccgggguggaaugcaguga

SEQ ID NO: 20364 - RNA, 22 nt, Homo sapiens
uucccuguaucuucugccaugu

SEQ ID NO: 20365 - RNA, 22 nt, Homo sapiens
uucucgcuuuuuccaccuguau

SEQ ID NO: 20366 - RNA, 22 nt, Homo sapiens
uucucugggacauaggucgggu

SEQ ID NO: 20367 - RNA, 22 nt, Homo sapiens
uuccugaggccuccccagaagc

SEQ ID NO: 20368 - RNA, 21 nt, Homo sapiens
uucucaggguguguccuaccc

SEQ ID NO: 20369 - RNA, 22 nt, Homo sapiens
uucucagcccccugacagucag

SEQ ID NO: 20370 - RNA, 22 nt, Homo sapiens
uucugguuaauacuugcaaaaa

SEQ ID NO: 20371 - RNA, 22 nt, Homo sapiens
uucuaguacucccuggagcugg

SEQ ID NO: 20372 - RNA, 22 nt, Homo sapiens
uucgcagcucaguucaacuagg

SEQ ID NO: 20373 - RNA, 22 nt, Homo sapiens
uuggcaauucagauucuuuuau

SEQ ID NO: 20374 - RNA, 22 nt, Homo sapiens
uuggcagcacgcaguccagagg

SEQ ID NO: 20375 - RNA, 22 nt, Homo sapiens
uuggauuuuaacaaacuaggug

SEQ ID NO: 20376 - RNA, 22 nt, Homo sapiens
uuggagcacuggggcacugaca

SEQ ID NO: 20377 - RNA, 22 nt, Homo sapiens
uuggagcccuaacucucaguac

SEQ ID NO: 20378 - RNA, 22 nt, Homo sapiens
uuggagagucacuaguuagugc

SEQ ID NO: 20379 - RNA, 22 nt, Homo sapiens
uuggauauucaguuuuuccauc

SEQ ID NO: 20380 - RNA, 22 nt, Homo sapiens
uuguacuauuuuuaucagugau

SEQ ID NO: 20381 - RNA, 22 nt, Homo sapiens
uuguauguuucugugcacauga

SEQ ID NO: 20382 - RNA, 22 nt, Homo sapiens
uuguauugucuugaugaguuga

SEQ ID NO: 20383 - RNA, 22 nt, Homo sapiens
uuguauguaaccauuuggcaaa

SEQ ID NO: 20384 - RNA, 22 nt, Homo sapiens
uugugaagaaaccagaaaaguu

SEQ ID NO: 20385 - RNA, 22 nt, Homo sapiens
uugugaagaugugaagcaagca

SEQ ID NO: 20386 - RNA, 22 nt, Homo sapiens
uugugaaugaugccgcaauaaa

SEQ ID NO: 20387 - RNA, 22 nt, Homo sapiens
uugugaauggugcugcaguaaa

SEQ ID NO: 20388 - RNA, 22 nt, Homo sapiens
uugauauuaaguacugaagugg

SEQ ID NO: 20389 - RNA, 22 nt, Homo sapiens
uugaguagugugaugcaugucu

SEQ ID NO: 20390 - RNA, 20 nt, Homo sapiens
uugaggugugaggggcagag

SEQ ID NO: 20391 - RNA, 22 nt, Homo sapiens
uugcaugucauaacugauggaa

SEQ ID NO: 20392 - RNA, 22 nt, Homo sapiens
uuggacuggaacuauaccauug

SEQ ID NO: 20393 - RNA, 22 nt, Homo sapiens
uugcauugacacaugaagcuca

SEQ ID NO: 20394 - RNA, 22 nt, Homo sapiens
uugcauuguacuugguacggcu

SEQ ID NO: 20395 - RNA, 22 nt, Homo sapiens
uugcauuuucuaggagggcaaa

SEQ ID NO: 20396 - RNA, 22 nt, Homo sapiens
uuuguauguuggagauuggaga

SEQ ID NO: 20397 - RNA, 20 nt, Homo sapiens
uuuguaucucuggguacugg

SEQ ID NO: 20398 - RNA, 22 nt, Homo sapiens
uuugucauagcagcaggaaugg

SEQ ID NO: 20399 - RNA, 23 nt, Homo sapiens
uuugugacacucuccaucuccag

SEQ ID NO: 20400 - RNA, 22 nt, Homo sapiens
uuuggcucugugucccacccaa

SEQ ID NO: 20401 - RNA, 22 nt, Homo sapiens
uuuguaauaccugaggcugggu

SEQ ID NO: 20402 - RNA, 22 nt, Homo sapiens
uuuggucacugccgccgccagc

SEQ ID NO: 20403 - RNA, 22 nt, Homo sapiens
uuugagauaucuuccaucagua

SEQ ID NO: 20404 - RNA, 22 nt, Homo sapiens
uuugagcuagagucucacucug

SEQ ID NO: 20405 - RNA, 23 nt, Homo sapiens
uuucauggggauuuacucauucc

SEQ ID NO: 20406 - RNA, 22 nt, Homo sapiens
uuucccugaaggcucugaaguc

SEQ ID NO: 20407 - RNA, 22 nt, Homo sapiens
uuguuauguaucucaagauaaa

SEQ ID NO: 20408 - RNA, 22 nt, Homo sapiens
uugugcuugauuugccuagcug

SEQ ID NO: 20409 - RNA, 22 nt, Homo sapiens
uugugcuucaucaccuagcaga

SEQ ID NO: 20410 - RNA, 22 nt, Homo sapiens
uuguuguggauuaaauuugcau

SEQ ID NO: 20411 - RNA, 22 nt, Homo sapiens
uuucauagaucaugcuuuugga

SEQ ID NO: 20412 - RNA, 22 nt, Homo sapiens
uuucauccggcuguguauuaug

SEQ ID NO: 20413 - RNA, 22 nt, Homo sapiens
cuccuggugauuggagugugaa

SEQ ID NO: 20414 - RNA, 22 nt, Homo sapiens
cuccauuuaucugaaauuuuau

SEQ ID NO: 20415 - RNA, 22 nt, Homo sapiens
cuccccuuuaguuucuuaauaa

SEQ ID NO: 20416 - RNA, 22 nt, Homo sapiens
cucauuggucagacgcgucggu

SEQ ID NO: 20417 - RNA, 22 nt, Homo sapiens
cuccaguuucagaaucccaugu

SEQ ID NO: 20418 - RNA, 22 nt, Homo sapiens
cuccagugcaaagucaugauca

SEQ ID NO: 20419 - RNA, 22 nt, Homo sapiens
cucagugaagggcaagaggcaa

SEQ ID NO: 20420 - RNA, 22 nt, Homo sapiens
cucagugucuggcacacagaaa

SEQ ID NO: 20421 - RNA, 22 nt, Homo sapiens
cuauggcuguaaggauaguaac

SEQ ID NO: 20422 - RNA, 22 nt, Homo sapiens
cuauggcuguaugacgugcaug

SEQ ID NO: 20423 - RNA, 22 nt, Homo sapiens
cuaggugcaugagccguacagu

SEQ ID NO: 20424 - RNA, 21 nt, Homo sapiens
cccagguucucugaggguaga

SEQ ID NO: 20425 - RNA, 22 nt, Homo sapiens
ccugagacugauugacucacaa

SEQ ID NO: 20426 - RNA, 22 nt, Homo sapiens
ccugaugacacgggagauguac

SEQ ID NO: 20427 - RNA, 22 nt, Homo sapiens
cuagcagcaugagaauggacca

SEQ ID NO: 20428 - RNA, 22 nt, Homo sapiens
ccugugguuaaccagcuagaug

SEQ ID NO: 20429 - RNA, 22 nt, Homo sapiens
ccuucauccuccagcaggcuag

SEQ ID NO: 20430 - RNA, 22 nt, Homo sapiens
ccagugguucccuguggccuga

SEQ ID NO: 20431 - RNA, 22 nt, Homo sapiens
ccagugcugugcaguguaugag

SEQ ID NO: 20432 - RNA, 22 nt, Homo sapiens
ccaguuuucucacuguugcagu

SEQ ID NO: 20433 - RNA, 21 nt, Homo sapiens
ccauggcaaugguaaacugac

SEQ ID NO: 20434 - RNA, 22 nt, Homo sapiens
cauggguuuucucaaguaguca

SEQ ID NO: 20435 - RNA, 22 nt, Homo sapiens
cagcacauagcaguugcucagu

SEQ ID NO: 20436 - RNA, 20 nt, Homo sapiens
cagcacgcacaugagacugu

SEQ ID NO: 20437 - RNA, 22 nt, Homo sapiens
cagcagguuuuuaucaguuaag

SEQ ID NO: 20438 - RNA, 22 nt, Homo sapiens
auuuccuguaggggcuugcgaa

SEQ ID NO: 20439 - RNA, 18 nt, Homo sapiens
auuguaagauguauggga

SEQ ID NO: 20440 - RNA, 22 nt, Homo sapiens
auuucuacuccuguguccagaa

SEQ ID NO: 20441 - RNA, 22 nt, Homo sapiens
auugcauugugaucuucccaga

SEQ ID NO: 20442 - RNA, 22 nt, Homo sapiens
auugcccauaaggauauuguca

SEQ ID NO: 20443 - RNA, 21 nt, Homo sapiens
auugcacaauauacccaugua

SEQ ID NO: 20444 - RNA, 22 nt, Homo sapiens
auugaguaaaugaaaauugccu

SEQ ID NO: 20445 - RNA, 23 nt, Homo sapiens
auugauagugccuuugugcuaau

SEQ ID NO: 20446 - RNA, 22 nt, Homo sapiens
augugcaauguguacguagccc

SEQ ID NO: 20447 - RNA, 22 nt, Homo sapiens
augugcagauguuacaaauugu

SEQ ID NO: 20448 - RNA, 22 nt, Homo sapiens
auuugucacuuaacagccauua

SEQ ID NO: 20449 - RNA, 22 nt, Homo sapiens
auuuugguuacauaguugagcu

SEQ ID NO: 20450 - RNA, 21 nt, Homo sapiens
auuugguguuagaaauaaauu

SEQ ID NO: 20451 - RNA, 22 nt, Homo sapiens
caagggguggaaaugguagugu

SEQ ID NO: 20452 - RNA, 22 nt, Homo sapiens
auuugucaauacacuucuucca

SEQ ID NO: 20453 - RNA, 21 nt, Homo sapiens
caauggcacaaucucugcuca

SEQ ID NO: 20454 - RNA, 22 nt, Homo sapiens
caauggcacgaucucgucucac

SEQ ID NO: 20455 - RNA, 21 nt, Homo sapiens
caauggcacgaucuuggcuca

SEQ ID NO: 20456 - RNA, 19 nt, Homo sapiens
caccgccugcccccugcug

SEQ ID NO: 20457 - RNA, 22 nt, Homo sapiens
cacugcauccuugaccuucugg

SEQ ID NO: 20458 - RNA, 22 nt, Homo sapiens
cuuggcuccgacuccccuccaa

SEQ ID NO: 20459 - RNA, 22 nt, Homo sapiens
cuugcagagucauucuaauuuc

SEQ ID NO: 20460 - RNA, 22 nt, Homo sapiens
cuuuuacacuguuagugggaau

SEQ ID NO: 20461 - RNA, 22 nt, Homo sapiens
cuuuuacacuguuggugggaau

SEQ ID NO: 20462 - RNA, 21 nt, Homo sapiens
cuuuuuacucguucauaugca

SEQ ID NO: 20463 - RNA, 18 nt, Homo sapiens
gaagaaguaggcauggca

SEQ ID NO: 20464 - RNA, 22 nt, Homo sapiens
gaaauguauuaaugaguugaaa

SEQ ID NO: 20465 - RNA, 22 nt, Homo sapiens
gaaauguugauagugggcauug

SEQ ID NO: 20466 - RNA, 22 nt, Homo sapiens
gaagugcaguggcacagucaug

SEQ ID NO: 20467 - RNA, 22 nt, Homo sapiens
gaauagugcugcaaugaacaua

SEQ ID NO: 20468 - RNA, 22 nt, Homo sapiens
gaagaucacacuguagaucuau

SEQ ID NO: 20469 - RNA, 22 nt, Homo sapiens
gaaucacaguuauuagagcagc

SEQ ID NO: 20470 - RNA, 22 nt, Homo sapiens
gaaugcagcagugacagggcug

SEQ ID NO: 20471 - RNA, 21 nt, Homo sapiens
cugguguuagcacuucuuccc

SEQ ID NO: 20472 - RNA, 22 nt, Homo sapiens
cugguuguuacaugcuugccag

SEQ ID NO: 20473 - RNA, 22 nt, Homo sapiens
cuggcugagugguaaguagagg

SEQ ID NO: 20474 - RNA, 22 nt, Homo sapiens
cugacuuauguggacuauuuca

SEQ ID NO: 20475 - RNA, 22 nt, Homo sapiens
cuggcaaaaagagggcaauaau

SEQ ID NO: 20476 - RNA, 22 nt, Homo sapiens
cucugagccugagguuccuacu

SEQ ID NO: 20477 - RNA, 22 nt, Homo sapiens
cucugguuaaggcugaacuaua

SEQ ID NO: 20478 - RNA, 20 nt, Homo sapiens
cucugguugugaauugucuu

SEQ ID NO: 20479 - RNA, 22 nt, Homo sapiens
cucugguuucgcaggaaauaga

SEQ ID NO: 20480 - RNA, 21 nt, Homo sapiens
cucugguuugcauuggauuau

SEQ ID NO: 20481 - RNA, 22 nt, Homo sapiens
cugaaagagcauguaacacagu

SEQ ID NO: 20482 - RNA, 22 nt, Homo sapiens
gauacaguaugcaugugguauu

SEQ ID NO: 20483 - RNA, 22 nt, Homo sapiens
gaugaugcuagguguuagggcu

SEQ ID NO: 20484 - RNA, 22 nt, Homo sapiens
gaugacacugggucaaaucuca

SEQ ID NO: 20485 - RNA, 22 nt, Homo sapiens
gauauguaaaaauuauaucuga

SEQ ID NO: 20486 - RNA, 22 nt, Homo sapiens
gagcucauuaaaguaggaccua

SEQ ID NO: 20487 - RNA, 22 nt, Homo sapiens
gagcuacauggauagucugcau

SEQ ID NO: 20488 - RNA, 22 nt, Homo sapiens
gcaguagugcgaucucagcuca

SEQ ID NO: 20489 - RNA, 22 nt, Homo sapiens
gccauugcacuccgcccugggc

SEQ ID NO: 20490 - RNA, 22 nt, Homo sapiens
gccauugcacuccagccucggg

SEQ ID NO: 20491 - RNA, 20 nt, Homo sapiens
gcaacauggccagagugaau

SEQ ID NO: 20492 - RNA, 22 nt, Homo sapiens
gcaacugguuucaguuuuucag

SEQ ID NO: 20493 - RNA, 22 nt, Homo sapiens
gcagcagugugggcugaaccua

SEQ ID NO: 20494 - RNA, 22 nt, Homo sapiens
gcaaaucuuauguccucacauu

SEQ ID NO: 20495 - RNA, 21 nt, Homo sapiens
gcaaacauccuuugaugccag

SEQ ID NO: 20496 - RNA, 23 nt, Homo sapiens
aaucugucuuuguuauagggguc

SEQ ID NO: 20497 - RNA, 22 nt, Homo sapiens
aaugcacauaaaauccuccagg

SEQ ID NO: 20498 - RNA, 22 nt, Homo sapiens
aaugcauaauuuguaugaggua

SEQ ID NO: 20499 - RNA, 22 nt, Homo sapiens
aaugccacugugccugccaagg

SEQ ID NO: 20500 - RNA, 22 nt, Homo sapiens
aaugacagccagauucuucucu

SEQ ID NO: 20501 - RNA, 22 nt, Homo sapiens
aagcugguguguauuauucacu

SEQ ID NO: 20502 - RNA, 22 nt, Homo sapiens
aagcugugucuugucagcuacc

SEQ ID NO: 20503 - RNA, 22 nt, Homo sapiens
aaggauuguaaaguugacaaau

SEQ ID NO: 20504 - RNA, 22 nt, Homo sapiens
acaagcacaaaugcauagaugg

SEQ ID NO: 20505 - RNA, 22 nt, Homo sapiens
acacuguauccuucuguccuuu

SEQ ID NO: 20506 - RNA, 22 nt, Homo sapiens
acacugucugaugaaaguaguu

SEQ ID NO: 20507 - RNA, 22 nt, Homo sapiens
acuagagaugcauuuguaguuu

SEQ ID NO: 20508 - RNA, 22 nt, Homo sapiens
acuagaugauuauguuccauug

SEQ ID NO: 20509 - RNA, 18 nt, Homo sapiens
accuucauuccuuugccu

SEQ ID NO: 20510 - RNA, 22 nt, Homo sapiens
acccgugcucacugccucugcc

SEQ ID NO: 20511 - RNA, 22 nt, Homo sapiens
acccuggaggucuacagugcag

SEQ ID NO: 20512 - RNA, 22 nt, Homo sapiens
acccuggaguaguaggaaucug

SEQ ID NO: 20513 - RNA, 22 nt, Homo sapiens
acccuguaggugcuggcagaga

SEQ ID NO: 20514 - RNA, 22 nt, Homo sapiens
acccugucaaaauggaccaauc

SEQ ID NO: 20515 - RNA, 22 nt, Homo sapiens
acaucccaugccuggguacucc

SEQ ID NO: 20516 - RNA, 22 nt, Homo sapiens
acaucccuuucccacccuucac

SEQ ID NO: 20517 - RNA, 22 nt, Homo sapiens
acaugcauggcaugcauuguac

SEQ ID NO: 20518 - RNA, 22 nt, Homo sapiens
acaugagacuggguuuguaggg

SEQ ID NO: 20519 - RNA, 22 nt, Homo sapiens
acaugcauccaugugaagagac

SEQ ID NO: 20520 - RNA, 22 nt, Homo sapiens
acaguagaaaacaauggauuug

SEQ ID NO: 20521 - RNA, 22 nt, Homo sapiens
acuggguuaauuugaagguuga

SEQ ID NO: 20522 - RNA, 22 nt, Homo sapiens
agagcaaugacaugcuaugugg

SEQ ID NO: 20523 - RNA, 20 nt, Homo sapiens
agcauugguuagaacaguag

SEQ ID NO: 20524 - RNA, 22 nt, Homo sapiens
agcgccauugcacuccagccuu

SEQ ID NO: 20525 - RNA, 22 nt, Homo sapiens
agcagauguuuagugagcgccu

SEQ ID NO: 20526 - RNA, 22 nt, Homo sapiens
agcagcaauuuuguaugguuua

SEQ ID NO: 20527 - RNA, 22 nt, Homo sapiens
agagguuuuggggcugagagcu

SEQ ID NO: 20528 - RNA, 22 nt, Homo sapiens
agcaccacauacuacagagaua

SEQ ID NO: 20529 - RNA, 22 nt, Homo sapiens
agcaccaccguugcucuauccc

SEQ ID NO: 20530 - RNA, 22 nt, Homo sapiens
agcugauuuuaaguccuugucc

SEQ ID NO: 20531 - RNA, 20 nt, Homo sapiens
agcuggguguguuggugcau

SEQ ID NO: 20532 - RNA, 22 nt, Homo sapiens
agcuuguguuugucugccuggg

SEQ ID NO: 20533 - RNA, 22 nt, Homo sapiens
aggaagugugcaauuaauuucu

SEQ ID NO: 20534 - RNA, 22 nt, Homo sapiens
aggaagacugaaauugcuguuc

SEQ ID NO: 20535 - RNA, 22 nt, Homo sapiens
aggaagcuagcauuuguucagu

SEQ ID NO: 20536 - RNA, 22 nt, Homo sapiens
aggcaagugggagacagcauuu

SEQ ID NO: 20537 - RNA, 22 nt, Homo sapiens
agguagcauagcgggaauauca

SEQ ID NO: 20538 - RNA, 22 nt, Homo sapiens
agguaauuuucccagagggaaa

SEQ ID NO: 20539 - RNA, 22 nt, Homo sapiens
auggacuuuuuguucagugucu

SEQ ID NO: 20540 - RNA, 22 nt, Homo sapiens
auggagguguggggagugaguu

SEQ ID NO: 20541 - RNA, 22 nt, Homo sapiens
auggaagcauaguauucuauug

SEQ ID NO: 20542 - RNA, 22 nt, Homo sapiens
auggaagcugauuagauaguac

SEQ ID NO: 20543 - RNA, 22 nt, Homo sapiens
auggaagucucuguuaaguuuc

SEQ ID NO: 20544 - RNA, 22 nt, Homo sapiens
augccacuguuuaugucacuua

SEQ ID NO: 20545 - RNA, 22 nt, Homo sapiens
augccacugcacuucagccugg

SEQ ID NO: 20546 - RNA, 19 nt, Homo sapiens
augccacagugaggucaga

SEQ ID NO: 20547 - RNA, 22 nt, Homo sapiens
augcagguguuuugcacugagu

SEQ ID NO: 20548 - RNA, 22 nt, Homo sapiens
augcauggagucuuucacaagu

SEQ ID NO: 20549 - RNA, 22 nt, Homo sapiens
augcaugucaaauuuguagguu

SEQ ID NO: 20550 - RNA, 22 nt, Homo sapiens
auguaauugagguuuuugccau

SEQ ID NO: 20551 - RNA, 17 nt, Homo sapiens
auguauacauccaugua

SEQ ID NO: 20552 - RNA, 22 nt, Homo sapiens
auguccaugagcacauguauca

SEQ ID NO: 20553 - RNA, 22 nt, Homo sapiens
augggugaguaugaguugacuu

SEQ ID NO: 20554 - RNA, 22 nt, Homo sapiens
augguaagcugaaaauaucgaa

SEQ ID NO: 20555 - RNA, 22 nt, Homo sapiens
augguugguuaaaucuguguau

SEQ ID NO: 20556 - RNA, 22 nt, Homo sapiens
aucaugucuucccagugauucu

SEQ ID NO: 20557 - RNA, 22 nt, Homo sapiens
aucauguaguaagacacauuua

SEQ ID NO: 20558 - RNA, 22 nt, Homo sapiens
aucaucaugcacuacagccugg

SEQ ID NO: 20559 - RNA, 18 nt, Homo sapiens
augaacucaucaguucuu

SEQ ID NO: 20560 - RNA, 22 nt, Homo sapiens
augaaguguguguucaagucuu

SEQ ID NO: 20561 - RNA, 22 nt, Homo sapiens
augagaugcaagauuagauggg

SEQ ID NO: 20562 - RNA, 22 nt, Homo sapiens
augagggcggacgcccuggaga

SEQ ID NO: 20563 - RNA, 22 nt, Homo sapiens
augagcuauggagacagggcca

SEQ ID NO: 20564 - RNA, 22 nt, Homo sapiens
augagcagaagagauacacugu

SEQ ID NO: 20565 - RNA, 22 nt, Homo sapiens
augaguaguugcuaaauauuga

SEQ ID NO: 20566 - RNA, 19 nt, Homo sapiens
augagucugcaagaaccag

SEQ ID NO: 20567 - RNA, 22 nt, Homo sapiens
augcacuuggcaggaugauucc

SEQ ID NO: 20568 - RNA, 22 nt, Homo sapiens
augauagucuugagaagcauuu

SEQ ID NO: 20569 - RNA, 22 nt, Homo sapiens
augcauagcaucugcaaauguu

SEQ ID NO: 20570 - RNA, 22 nt, Homo sapiens
augcauaugucuuuauaguggc

SEQ ID NO: 20571 - RNA, 22 nt, Homo sapiens
auauuggucuucaagaccugug

SEQ ID NO: 20572 - RNA, 22 nt, Homo sapiens
auagugaacuuugugagaacaa

SEQ ID NO: 20573 - RNA, 22 nt, Homo sapiens
aucaagcugcuuguuugaaucu

SEQ ID NO: 20574 - RNA, 22 nt, Homo sapiens
aucaaaguaggcauauguuuuu

SEQ ID NO: 20575 - RNA, 22 nt, Homo sapiens
aucacagcuacuccucugucuu

SEQ ID NO: 20576 - RNA, 22 nt, Homo sapiens
aucacaguuuuaccauuuggua

SEQ ID NO: 20577 - RNA, 22 nt, Homo sapiens
aucaccauguguacauuagacc

SEQ ID NO: 20578 - RNA, 22 nt, Homo sapiens
auaaaagcaggucuaggucagg

SEQ ID NO: 20579 - RNA, 22 nt, Homo sapiens
aguucaaugcucuuucuacuau

SEQ ID NO: 20580 - RNA, 22 nt, Homo sapiens
aguuaguguugugauaaaucca

SEQ ID NO: 20581 - RNA, 22 nt, Homo sapiens
aguaccauuccguuggagcugg

SEQ ID NO: 20582 - RNA, 22 nt, Homo sapiens
aguaccacgugaugccauuuuc

SEQ ID NO: 20583 - RNA, 22 nt, Homo sapiens
agguguuguugaggagauuuca

SEQ ID NO: 20584 - RNA, 22 nt, Homo sapiens
aggugcugagcagagaauccug

SEQ ID NO: 20585 - RNA, 22 nt, Homo sapiens
aggugguauuuaaaauuauuug

SEQ ID NO: 20586 - RNA, 22 nt, Homo sapiens
aggugcugacaggauagguuuc

SEQ ID NO: 20587 - RNA, 22 nt, Homo sapiens
aggucccauguccucccugacc

SEQ ID NO: 20588 - RNA, 22 nt, Homo sapiens
auagcacaguguguguacacca

SEQ ID NO: 20589 - RNA, 22 nt, Homo sapiens
auagcaagaugauugauccauu

SEQ ID NO: 20590 - RNA, 22 nt, Homo sapiens
auacacauuccugggccucacc

SEQ ID NO: 20591 - RNA, 17 nt, Homo sapiens
auaaacucaucauuuuu

SEQ ID NO: 20592 - RNA, 22 nt, Homo sapiens
auaaacagcuuauccucuauuc

SEQ ID NO: 20593 - RNA, 23 nt, Homo sapiens
auaaugcaaguggugguaaucug

SEQ ID NO: 20594 - RNA, 20 nt, Homo sapiens
guggaaguagaaacauaugu

SEQ ID NO: 20595 - RNA, 22 nt, Homo sapiens
guggaauuauagagacaucuug

SEQ ID NO: 20596 - RNA, 22 nt, Homo sapiens
guggacguguguccccauggcu

SEQ ID NO: 20597 - RNA, 22 nt, Homo sapiens
gugucaugagggggacaggaag

SEQ ID NO: 20598 - RNA, 22 nt, Homo sapiens
guguucaaagcugauugagauu

SEQ ID NO: 20599 - RNA, 22 nt, Homo sapiens
guguugcacauucuguggaugu

SEQ ID NO: 20600 - RNA, 22 nt, Homo sapiens
guuagaucauguuuggauaucu

SEQ ID NO: 20601 - RNA, 22 nt, Homo sapiens
gugugcauaugucuuuauagua

SEQ ID NO: 20602 - RNA, 22 nt, Homo sapiens
gugugcaaauguguaccuacau

SEQ ID NO: 20603 - RNA, 22 nt, Homo sapiens
gugugcaugucuuuuuaguagg

SEQ ID NO: 20604 - RNA, 20 nt, Homo sapiens
gugugcauuucagauuuugg

SEQ ID NO: 20605 - RNA, 22 nt, Homo sapiens
guucaguaguucauucauuuau

SEQ ID NO: 20606 - RNA, 22 nt, Homo sapiens
guuauguuaaauuguuguaugc

SEQ ID NO: 20607 - RNA, 22 nt, Homo sapiens
gugagcgaggaaacgacggcgc

SEQ ID NO: 20608 - RNA, 22 nt, Homo sapiens
gugaggugguacaauauuaacu

SEQ ID NO: 20609 - RNA, 17 nt, Homo sapiens
gugagguggguaguauc

SEQ ID NO: 20610 - RNA, 22 nt, Homo sapiens
gugagggaugugaaaaagguca

SEQ ID NO: 20611 - RNA, 22 nt, Homo sapiens
gugauugcauuaugaauauuau

SEQ ID NO: 20612 - RNA, 22 nt, Homo sapiens
gugaugguccagggaaucucuu

SEQ ID NO: 20613 - RNA, 22 nt, Homo sapiens
gugauuauccacgucuuuguga

SEQ ID NO: 20614 - RNA, 22 nt, Homo sapiens
gugauaucugagccugccccag

SEQ ID NO: 20615 - RNA, 22 nt, Homo sapiens
gugaucucauuuggaauuagag

SEQ ID NO: 20616 - RNA, 22 nt, Homo sapiens
guccaguguuggagguuuuacc

SEQ ID NO: 20617 - RNA, 22 nt, Homo sapiens
guccuugaggcuuugacugugg

SEQ ID NO: 20618 - RNA, 22 nt, Homo sapiens
gucacugggugcugcgccuguc

SEQ ID NO: 20619 - RNA, 22 nt, Homo sapiens
gucacagcacuuuuaguaagug

SEQ ID NO: 20620 - RNA, 21 nt, Homo sapiens
ggcaagaaacacaaucaagua

SEQ ID NO: 20621 - RNA, 22 nt, Homo sapiens
ggcauguauucuuauuauuccu

SEQ ID NO: 20622 - RNA, 22 nt, Homo sapiens
ggaaugugugucaugcuuuugc

SEQ ID NO: 20623 - RNA, 22 nt, Homo sapiens
ggaauguuaaggcgcuguuggu

SEQ ID NO: 20624 - RNA, 20 nt, Homo sapiens
ggaauguuaaucuccaugau

SEQ ID NO: 20625 - RNA, 21 nt, Homo sapiens
ggaauuuagggaaugauuuag

SEQ ID NO: 20626 - RNA, 22 nt, Homo sapiens
ggacagaaaggguucaccaaac

SEQ ID NO: 20627 - RNA, 22 nt, Homo sapiens
gcggguguuuuacccuugcaga

SEQ ID NO: 20628 - RNA, 19 nt, Homo sapiens
guauuugguaaacucucca

SEQ ID NO: 20629 - RNA, 22 nt, Homo sapiens
gucaaagugauuguaauuaggu

SEQ ID NO: 20630 - RNA, 22 nt, Homo sapiens
guauuaguuaucuacugcugug

SEQ ID NO: 20631 - RNA, 22 nt, Homo sapiens
guauuagguuggugcaaaauaa

SEQ ID NO: 20632 - RNA, 22 nt, Homo sapiens
guauuagguuggugcaaaauug

SEQ ID NO: 20633 - RNA, 22 nt, Homo sapiens
guagguaaguacuucuggugag

SEQ ID NO: 20634 - RNA, 22 nt, Homo sapiens
guagcagccacacuugauaacu

SEQ ID NO: 20635 - RNA, 22 nt, Homo sapiens
guaaguagcuuuagauauaaau

SEQ ID NO: 20636 - RNA, 22 nt, Homo sapiens
guaaaguaaagcacaucaaggu

SEQ ID NO: 20637 - RNA, 22 nt, Homo sapiens
gguuagaaacagguccucagga

SEQ ID NO: 20638 - RNA, 19 nt, Homo sapiens
ggucagcaaagucuagcug

SEQ ID NO: 20639 - RNA, 22 nt, Homo sapiens
ggucagaaagacaggcauucag

SEQ ID NO: 20640 - RNA, 20 nt, Homo sapiens
uagcaggugucaggugauau

SEQ ID NO: 20641 - RNA, 22 nt, Homo sapiens
uaguagagauggggcacaugcc

SEQ ID NO: 20642 - RNA, 22 nt, Homo sapiens
uaguagcaccucucaugagcuu

SEQ ID NO: 20643 - RNA, 23 nt, Homo sapiens
uaguaccauauuguuggcagcac

SEQ ID NO: 20644 - RNA, 22 nt, Homo sapiens
uagugaaugucacuggcuguug

SEQ ID NO: 20645 - RNA, 22 nt, Homo sapiens
uagugaauguuggcuauuaaua

SEQ ID NO: 20646 - RNA, 22 nt, Homo sapiens
uaucacuauucauccuagcucc

SEQ ID NO: 20647 - RNA, 21 nt, Homo sapiens
uaucagagacauugagaggca

SEQ ID NO: 20648 - RNA, 22 nt, Homo sapiens
uaucagaguuacacugaagacu

SEQ ID NO: 20649 - RNA, 22 nt, Homo sapiens
uaucauuguguuauuucuucca

SEQ ID NO: 20650 - RNA, 22 nt, Homo sapiens
uauaugcacucagguguaugug

SEQ ID NO: 20651 - RNA, 22 nt, Homo sapiens
uauaugcaacauaguguaugug

SEQ ID NO: 20652 - RNA, 22 nt, Homo sapiens
uauagcagugugagaacagacu

SEQ ID NO: 20653 - RNA, 22 nt, Homo sapiens
uauucaagccaaauucaagcca

SEQ ID NO: 20654 - RNA, 22 nt, Homo sapiens
uauuauuguccuucuauaccca

SEQ ID NO: 20655 - RNA, 22 nt, Homo sapiens
uauugcagugagauccaucugg

SEQ ID NO: 20656 - RNA, 22 nt, Homo sapiens
uauugcagauacccaggaaguu

SEQ ID NO: 20657 - RNA, 22 nt, Homo sapiens
uauugcauauuauucuaguggc

SEQ ID NO: 20658 - RNA, 22 nt, Homo sapiens
uauugcuaaaacucaugguugc

SEQ ID NO: 20659 - RNA, 22 nt, Homo sapiens
uaugcagacauuguuccaacca

SEQ ID NO: 20660 - RNA, 22 nt, Homo sapiens
uaugcccauuuaaauugaacaa

SEQ ID NO: 20661 - RNA, 22 nt, Homo sapiens
uauuagguugguggaaaaguaa

SEQ ID NO: 20662 - RNA, 22 nt, Homo sapiens
uaaaugcuugagaugauggaua

SEQ ID NO: 20663 - RNA, 22 nt, Homo sapiens
uaaaugcucuuuaaaagugcuu

SEQ ID NO: 20664 - RNA, 19 nt, Homo sapiens
uaacacaguuguguuugag

SEQ ID NO: 20665 - RNA, 22 nt, Homo sapiens
uaacaagagagucagucagucc

SEQ ID NO: 20666 - RNA, 22 nt, Homo sapiens
uaagguauuuacauuucuguuu

SEQ ID NO: 20667 - RNA, 22 nt, Homo sapiens
uaaggcuucuuggaauacugca

SEQ ID NO: 20668 - RNA, 22 nt, Homo sapiens
uaaggcuuaugguaaaguccug

SEQ ID NO: 20669 - RNA, 22 nt, Homo sapiens
uaaguaauugugguuucugcca

SEQ ID NO: 20670 - RNA, 22 nt, Homo sapiens
uaaguaauuguuaauagggaag

SEQ ID NO: 20671 - RNA, 22 nt, Homo sapiens
uaauucuguauguaucagaguu

SEQ ID NO: 20672 - RNA, 22 nt, Homo sapiens
uacaacacugguucgacaugug

SEQ ID NO: 20673 - RNA, 22 nt, Homo sapiens
uaaugcaucagugguaguucuu

SEQ ID NO: 20674 - RNA, 22 nt, Homo sapiens
uaaugcacucgaaucauggaau

SEQ ID NO: 20675 - RNA, 23 nt, Homo sapiens
uacuaguaagcguguucuuugca

SEQ ID NO: 20676 - RNA, 22 nt, Homo sapiens
uacuacagccugagcgacugag

SEQ ID NO: 20677 - RNA, 19 nt, Homo sapiens
uacugcacuccagucuggg

SEQ ID NO: 20678 - RNA, 22 nt, Homo sapiens
uagcaagaugaauuugugcaaa

SEQ ID NO: 20679 - RNA, 22 nt, Homo sapiens
uagcaccacaaucaagauacag

SEQ ID NO: 20680 - RNA, 22 nt, Homo sapiens
uagauuaucuuaaggagcauca

SEQ ID NO: 20681 - RNA, 22 nt, Homo sapiens
uagagccauugcagauguuuga

SEQ ID NO: 20682 - RNA, 22 nt, Homo sapiens
uagaggaaggauuggaaacgca

SEQ ID NO: 20683 - RNA, 22 nt, Homo sapiens
uagauaauuagaggguuuuaag

SEQ ID NO: 20684 - RNA, 20 nt, Homo sapiens
ugccugacacucuuugcuuc

SEQ ID NO: 20685 - RNA, 22 nt, Homo sapiens
uggaaaauuaggggagguuaua

SEQ ID NO: 20686 - RNA, 20 nt, Homo sapiens
uggaaaguaagucaugauau

SEQ ID NO: 20687 - RNA, 22 nt, Homo sapiens
uggaaaguaguucuaaucuaag

SEQ ID NO: 20688 - RNA, 22 nt, Homo sapiens
uggaaaguacuugaguuuguau

SEQ ID NO: 20689 - RNA, 22 nt, Homo sapiens
uggaagacacauaccugauaac

SEQ ID NO: 20690 - RNA, 22 nt, Homo sapiens
ugccuacuuugcaucugucagg

SEQ ID NO: 20691 - RNA, 22 nt, Homo sapiens
ugccaugaaguaauggcaaaaa

SEQ ID NO: 20692 - RNA, 22 nt, Homo sapiens
ugccaugaagaucccugaaaug

SEQ ID NO: 20693 - RNA, 22 nt, Homo sapiens
ugccagaugugcccucuccacc

SEQ ID NO: 20694 - RNA, 22 nt, Homo sapiens
ugcauaggcuaaaauccuggcc

SEQ ID NO: 20695 - RNA, 22 nt, Homo sapiens
ugcaugcaucuuuuauaguagc

SEQ ID NO: 20696 - RNA, 22 nt, Homo sapiens
uggcaaaaaaccgcaguugccu

SEQ ID NO: 20697 - RNA, 22 nt, Homo sapiens
uggacagacaagguuauagauc

SEQ ID NO: 20698 - RNA, 23 nt, Homo sapiens
uggaagacuccucucuuggcugc

SEQ ID NO: 20699 - RNA, 22 nt, Homo sapiens
uggaagacuuuagaggcuuaua

SEQ ID NO: 20700 - RNA, 22 nt, Homo sapiens
uggaauuuacuuauuuaggggc

SEQ ID NO: 20701 - RNA, 22 nt, Homo sapiens
uggacuguaauuuuauaggcau

SEQ ID NO: 20702 - RNA, 22 nt, Homo sapiens
uggagaacauucauuugcaaga

SEQ ID NO: 20703 - RNA, 22 nt, Homo sapiens
uggagaacugaugucuccaaga

SEQ ID NO: 20704 - RNA, 20 nt, Homo sapiens
ugggaacaugugguauaugg

SEQ ID NO: 20705 - RNA, 22 nt, Homo sapiens
ugggaagcugcugaacuacagu

SEQ ID NO: 20706 - RNA, 22 nt, Homo sapiens
ugggaagaugcugcuucuuccu

SEQ ID NO: 20707 - RNA, 19 nt, Homo sapiens
ugggaauguaaauuaguuc

SEQ ID NO: 20708 - RNA, 20 nt, Homo sapiens
uggcauguugguaugcaccc

SEQ ID NO: 20709 - RNA, 22 nt, Homo sapiens
uggcauggaacuacuuugaaac

SEQ ID NO: 20710 - RNA, 22 nt, Homo sapiens
ugguauguaugauuaacaugga

SEQ ID NO: 20711 - RNA, 22 nt, Homo sapiens
ugguaagaucagaacuggaguc

SEQ ID NO: 20712 - RNA, 22 nt, Homo sapiens
uggguucccugucuguccuuga

SEQ ID NO: 20713 - RNA, 23 nt, Homo sapiens
uggguucccuaagcgcaugcugc

SEQ ID NO: 20714 - RNA, 22 nt, Homo sapiens
uggucauggaaauagaaugcac

SEQ ID NO: 20715 - RNA, 22 nt, Homo sapiens
ugggccgcugcaggaugguccc

SEQ ID NO: 20716 - RNA, 22 nt, Homo sapiens
uggguagagaaucaggaucuua

SEQ ID NO: 20717 - RNA, 22 nt, Homo sapiens
uggguagauaucauaguugccc

SEQ ID NO: 20718 - RNA, 22 nt, Homo sapiens
ugaucuguguaacauaggaguc

SEQ ID NO: 20719 - RNA, 22 nt, Homo sapiens
ugaucuuuuuaauguccauggg

SEQ ID NO: 20720 - RNA, 22 nt, Homo sapiens
ugcaccacugcacuccaggcug

SEQ ID NO: 20721 - RNA, 22 nt, Homo sapiens
ugcauaggagcagggucuaugu

SEQ ID NO: 20722 - RNA, 22 nt, Homo sapiens
ugcauaucuucagccgggcacg

SEQ ID NO: 20723 - RNA, 22 nt, Homo sapiens
ugcaguacugucagacuucuua

SEQ ID NO: 20724 - RNA, 22 nt, Homo sapiens
ugcaguacauucagcauccucu

SEQ ID NO: 20725 - RNA, 22 nt, Homo sapiens
ugcagugcaugacuguguuaug

SEQ ID NO: 20726 - RNA, 22 nt, Homo sapiens
ugauaggagauuuucaucugua

SEQ ID NO: 20727 - RNA, 22 nt, Homo sapiens
ugauaucugaauagauacacaa

SEQ ID NO: 20728 - RNA, 22 nt, Homo sapiens
ugagguaggugaagaaugcacg

SEQ ID NO: 20729 - RNA, 22 nt, Homo sapiens
ugaggcuaggauaggcugauuc

SEQ ID NO: 20730 - RNA, 22 nt, Homo sapiens
ugaggcaagauacugauuucau

SEQ ID NO: 20731 - RNA, 22 nt, Homo sapiens
ugagccaaguucacaccauugc

SEQ ID NO: 20732 - RNA, 22 nt, Homo sapiens
ugagccaaugauuugaauagag

SEQ ID NO: 20733 - RNA, 22 nt, Homo sapiens
ugagcaucauucacaccuuggu

SEQ ID NO: 20734 - RNA, 22 nt, Homo sapiens
ugagaagcauaccagugucugu

SEQ ID NO: 20735 - RNA, 22 nt, Homo sapiens
ucuugcaauuuccuuaguggug

SEQ ID NO: 20736 - RNA, 22 nt, Homo sapiens
ucuugcaccuacaugcuuuguc

SEQ ID NO: 20737 - RNA, 19 nt, Homo sapiens
ucuuugguacgugcuuuga

SEQ ID NO: 20738 - RNA, 22 nt, Homo sapiens
ucuuuggucaucaugggaagca

SEQ ID NO: 20739 - RNA, 22 nt, Homo sapiens
ucuuuguugcauaggcuuguuc

SEQ ID NO: 20740 - RNA, 22 nt, Homo sapiens
ucuuugguuucugucucuguaa

SEQ ID NO: 20741 - RNA, 22 nt, Homo sapiens
ucuuuguuuucugauccugaag

SEQ ID NO: 20742 - RNA, 22 nt, Homo sapiens
ucuuuuguaaaaugaggaggug

SEQ ID NO: 20743 - RNA, 22 nt, Homo sapiens
ucuuuuguucuauucaggccuu

SEQ ID NO: 20744 - RNA, 21 nt, Homo sapiens
ugaacacuggacugagugucc

SEQ ID NO: 20745 - RNA, 22 nt, Homo sapiens
ucuguuguuaucauaauauuga

SEQ ID NO: 20746 - RNA, 22 nt, Homo sapiens
ucuucagucauauuggccugga

SEQ ID NO: 20747 - RNA, 22 nt, Homo sapiens
ucugugguuguugcauggaaug

SEQ ID NO: 20748 - RNA, 22 nt, Homo sapiens
ucucaaguaacugggacaauaa

SEQ ID NO: 20749 - RNA, 22 nt, Homo sapiens
ucucaaguggucgcaguuagau

SEQ ID NO: 20750 - RNA, 22 nt, Homo sapiens
ucgugcugugucaucuuguggc

SEQ ID NO: 20751 - RNA, 22 nt, Homo sapiens
ucguuggcuacuuguucauuuc

SEQ ID NO: 20752 - RNA, 20 nt, Homo sapiens
ugacaucagcaauguaauaa

SEQ ID NO: 20753 - RNA, 22 nt, Homo sapiens
ugacauuacagucacuugcugu

SEQ ID NO: 20754 - RNA, 22 nt, Homo sapiens
ugaaguagguucucguaucgcc

SEQ ID NO: 20755 - RNA, 22 nt, Homo sapiens
ugacuaaaacugaguuucauua

SEQ ID NO: 20756 - RNA, 22 nt, Homo sapiens
ugacuacaaccuccaccucccg

SEQ ID NO: 20757 - RNA, 23 nt, Homo sapiens
ugacuuguccagugauaguucgu

SEQ ID NO: 20758 - RNA, 22 nt, Homo sapiens
ucggcucagugcaagcucugcc

SEQ ID NO: 20759 - RNA, 22 nt, Homo sapiens
uccuugagaggacagagccaua

SEQ ID NO: 20760 - RNA, 22 nt, Homo sapiens
uccuugagccuuaaauuauaaa

SEQ ID NO: 20761 - RNA, 22 nt, Homo sapiens
uccuuuguuacaguuggcucug

SEQ ID NO: 20762 - RNA, 22 nt, Homo sapiens
ucgagcaauugucaugucucag

SEQ ID NO: 20763 - RNA, 22 nt, Homo sapiens
uccacaguggugaggugcagca

SEQ ID NO: 20764 - RNA, 22 nt, Homo sapiens
uccacaguaaggacccugccuu

SEQ ID NO: 20765 - RNA, 21 nt, Homo sapiens
ucauugguuggcugcccugua

SEQ ID NO: 20766 - RNA, 22 nt, Homo sapiens
uccacagugguugaacuaguaa

SEQ ID NO: 20767 - RNA, 22 nt, Homo sapiens
uccacagugguugaacuaguuu

SEQ ID NO: 20768 - RNA, 18 nt, Homo sapiens
uccacgugcuuuccagau

SEQ ID NO: 20769 - RNA, 22 nt, Homo sapiens
ucagugguuaaaagauucuaga

SEQ ID NO: 20770 - RNA, 18 nt, Homo sapiens
ucauuggugagcaccucc

SEQ ID NO: 20771 - RNA, 22 nt, Homo sapiens
uccccuuuguaagauggaaacg

SEQ ID NO: 20772 - RNA, 18 nt, Homo sapiens
ucccucagaauuauagaa

SEQ ID NO: 20773 - RNA, 19 nt, Homo sapiens
ucccuguagaccacagugc

SEQ ID NO: 20774 - RNA, 20 nt, Homo sapiens
ucagugcagauuguccaagu

SEQ ID NO: 20775 - RNA, 22 nt, Homo sapiens
ucagugcaggaauuuccuuaga

SEQ ID NO: 20776 - RNA, 17 nt, Homo sapiens
ucagugcauuuaagaga

SEQ ID NO: 20777 - RNA, 22 nt, Homo sapiens
ucagcagucacuccuaugacaa

SEQ ID NO: 20778 - RNA, 19 nt, Homo sapiens
ucagcaguaaucaacuuca

SEQ ID NO: 20779 - RNA, 20 nt, Homo sapiens
ucagcagucuggagcagagg

SEQ ID NO: 20780 - RNA, 22 nt, Homo sapiens
ucagcagugagagaccucaccc

SEQ ID NO: 20781 - RNA, 22 nt, Homo sapiens
ucacgguggaaucccagauccc

SEQ ID NO: 20782 - RNA, 22 nt, Homo sapiens
ucaaguaauacucccaucuugg

SEQ ID NO: 20783 - RNA, 18 nt, Homo sapiens
ucacaaccacagugcugu

SEQ ID NO: 20784 - RNA, 22 nt, Homo sapiens
ucaaugcaaccuccaccucugg

SEQ ID NO: 20785 - RNA, 22 nt, Homo sapiens
aaacauugaccucauccuggca

SEQ ID NO: 20786 - RNA, 22 nt, Homo sapiens
aaagaguucagguagauuucaa

SEQ ID NO: 20787 - RNA, 22 nt, Homo sapiens
aaagcgcuguuaagaagacuga

SEQ ID NO: 20788 - RNA, 22 nt, Homo sapiens
aaacuugucuaauuauaagcau

SEQ ID NO: 20789 - RNA, 22 nt, Homo sapiens
aacucugucuccuucaaguuca

SEQ ID NO: 20790 - RNA, 22 nt, Homo sapiens
aagacuguaauccaucuugagu

SEQ ID NO: 20791 - RNA, 22 nt, Homo sapiens
aaauccauuuguucagcuaugc

SEQ ID NO: 20792 - RNA, 22 nt, Homo sapiens
aaaugcagcacucaagugggaa

SEQ ID NO: 20793 - RNA, 22 nt, Homo sapiens
aaaugcaccacucuggugcagg

SEQ ID NO: 20794 - RNA, 22 nt, Homo sapiens
aaaugcucuuuaugaaguugga

SEQ ID NO: 20795 - RNA, 22 nt, Homo sapiens
aaacccauauaccagcugugcu

SEQ ID NO: 20796 - RNA, 22 nt, Homo sapiens
aaaguucuguugauagugcuga

SEQ ID NO: 20797 - RNA, 19 nt, Homo sapiens
aauauugacaguggugucu

SEQ ID NO: 20798 - RNA, 22 nt, Homo sapiens
aaucagagcccucugagcuuca

SEQ ID NO: 20799 - RNA, 22 nt, Homo sapiens
aaugacagugcuaaagaacccu

SEQ ID NO: 20800 - RNA, 22 nt, Homo sapiens
aaugcaagauguuaauuauagg

SEQ ID NO: 20801 - RNA, 22 nt, Homo sapiens
aagcugcauuuucuagaugcuu

SEQ ID NO: 20802 - RNA, 22 nt, Homo sapiens
aaguaaacauugagagacaaga

SEQ ID NO: 20803 - RNA, 22 nt, Homo sapiens
aagcuggcauucaugagauuac

SEQ ID NO: 20804 - RNA, 22 nt, Homo sapiens
aagugacauugugcccauuuga

SEQ ID NO: 20805 - RNA, 22 nt, Homo sapiens
aagugcaaaucuguggcugaaa

SEQ ID NO: 20806 - RNA, 23 nt, Homo sapiens
aagucauggaaucaaaugaggug

SEQ ID NO: 20807 - RNA, 22 nt, Homo sapiens
aagucauggagaagguggaggu

SEQ ID NO: 20808 - RNA, 19 nt, Homo sapiens
aaguacuugucuuuugaag

SEQ ID NO: 20809 - RNA, 22 nt, Homo sapiens
auggucuuuguuucuaauucug

SEQ ID NO: 20810 - RNA, 22 nt, Homo sapiens
auggucuuuuuguuaugagaga

SEQ ID NO: 20811 - RNA, 22 nt, Homo sapiens
auggcucuguuccaugugucuu

SEQ ID NO: 20812 - RNA, 22 nt, Homo sapiens
auggcuucuuacucuucugcau

SEQ ID NO: 20813 - RNA, 22 nt, Homo sapiens
auggcuugugacccaugcuuca

SEQ ID NO: 20814 - RNA, 22 nt, Homo sapiens
augguaucauuacuguuuuauu

SEQ ID NO: 20815 - RNA, 22 nt, Homo sapiens
auggcaguuuggucucugugcu

SEQ ID NO: 20816 - RNA, 22 nt, Homo sapiens
auggcacugccuggcuucaugg

SEQ ID NO: 20817 - RNA, 22 nt, Homo sapiens
auggccugaugcaccuguccca

SEQ ID NO: 20818 - RNA, 22 nt, Homo sapiens
auggccgggugcgguggcucac

SEQ ID NO: 20819 - RNA, 22 nt, Homo sapiens
augagauauuuuauaagaucau

SEQ ID NO: 20820 - RNA, 22 nt, Homo sapiens
augaugcaguacuuugggaaca

SEQ ID NO: 20821 - RNA, 22 nt, Homo sapiens
augauguccacagggguguuca

SEQ ID NO: 20822 - RNA, 22 nt, Homo sapiens
auggauuuguaguacaugguug

SEQ ID NO: 20823 - RNA, 22 nt, Homo sapiens
auggcacagacucuuggucaag

SEQ ID NO: 20824 - RNA, 18 nt, Homo sapiens
auggcagaacaauuuaca

SEQ ID NO: 20825 - RNA, 22 nt, Homo sapiens
auggcagaaucaagccgacagc

SEQ ID NO: 20826 - RNA, 22 nt, Homo sapiens
auggcaagaagagcaauuauuu

SEQ ID NO: 20827 - RNA, 22 nt, Homo sapiens
auggcaaugcgauggugacuga

SEQ ID NO: 20828 - RNA, 22 nt, Homo sapiens
auggauuuuaggauacaguuga

SEQ ID NO: 20829 - RNA, 22 nt, Homo sapiens
auguaaacauuuggucuaaauu

SEQ ID NO: 20830 - RNA, 20 nt, Homo sapiens
auguaauguaugauauguac

SEQ ID NO: 20831 - RNA, 22 nt, Homo sapiens
augugguaggcccaugagucau

SEQ ID NO: 20832 - RNA, 22 nt, Homo sapiens
augugguaguuauagugauaag

SEQ ID NO: 20833 - RNA, 23 nt, Homo sapiens
augugugcuuggagagcaggaug

SEQ ID NO: 20834 - RNA, 22 nt, Homo sapiens
auguguucaucacagcacaauu

SEQ ID NO: 20835 - RNA, 22 nt, Homo sapiens
auguuauguucuucucuguaua

SEQ ID NO: 20836 - RNA, 22 nt, Homo sapiens
auuccacuuacaugaaguaccu

SEQ ID NO: 20837 - RNA, 22 nt, Homo sapiens
auuccacuuagugacucauuug

SEQ ID NO: 20838 - RNA, 22 nt, Homo sapiens
auguuguaguaugagucaaaau

SEQ ID NO: 20839 - RNA, 22 nt, Homo sapiens
auguugcaguuuaauuauccua

SEQ ID NO: 20840 - RNA, 22 nt, Homo sapiens
auugcaauuaguccauagaguu

SEQ ID NO: 20841 - RNA, 19 nt, Homo sapiens
auugauuaaguuugcuguc

SEQ ID NO: 20842 - RNA, 19 nt, Homo sapiens
auugcacuccaaccugggu

SEQ ID NO: 20843 - RNA, 22 nt, Homo sapiens
auuccauaguacagugaugagu

SEQ ID NO: 20844 - RNA, 22 nt, Homo sapiens
auuccagauggaguugaggguu

SEQ ID NO: 20845 - RNA, 22 nt, Homo sapiens
auuccauuuguguggaauggcu

SEQ ID NO: 20846 - RNA, 22 nt, Homo sapiens
aucacagguacuauggcugaca

SEQ ID NO: 20847 - RNA, 22 nt, Homo sapiens
auauuggacucugugcuaggaa

SEQ ID NO: 20848 - RNA, 22 nt, Homo sapiens
auauuggccuaaaauucucuuu

SEQ ID NO: 20849 - RNA, 22 nt, Homo sapiens
aucacagugaaaacagucaauu

SEQ ID NO: 20850 - RNA, 22 nt, Homo sapiens
aucacagugagcauaugucuau

SEQ ID NO: 20851 - RNA, 22 nt, Homo sapiens
aucaccuuucccuuucugaauc

SEQ ID NO: 20852 - RNA, 20 nt, Homo sapiens
auaugcauguguuuucacuu

SEQ ID NO: 20853 - RNA, 22 nt, Homo sapiens
auauuacagagaggaccuggga

SEQ ID NO: 20854 - RNA, 22 nt, Homo sapiens
auagugcagugaugaaccuagg

SEQ ID NO: 20855 - RNA, 22 nt, Homo sapiens
auaagugcuuguugaauaauag

SEQ ID NO: 20856 - RNA, 18 nt, Homo sapiens
auaaccuggugcuuucaa

SEQ ID NO: 20857 - RNA, 22 nt, Homo sapiens
augacacugcagagauguccca

SEQ ID NO: 20858 - RNA, 22 nt, Homo sapiens
augagaaugauucuguuauggu

SEQ ID NO: 20859 - RNA, 22 nt, Homo sapiens
augagaauguaaguuaaugaaa

SEQ ID NO: 20860 - RNA, 19 nt, Homo sapiens
augaccauuuccauaguau

SEQ ID NO: 20861 - RNA, 22 nt, Homo sapiens
augacguugugggcucucaagc

SEQ ID NO: 20862 - RNA, 22 nt, Homo sapiens
augaacagagccuugagaaccu

SEQ ID NO: 20863 - RNA, 17 nt, Homo sapiens
augaacucaucauuuuu

SEQ ID NO: 20864 - RNA, 22 nt, Homo sapiens
auccauugucuaaugcuaagau

SEQ ID NO: 20865 - RNA, 22 nt, Homo sapiens
aucauugugugaguugauggga

SEQ ID NO: 20866 - RNA, 22 nt, Homo sapiens
auccacagugucaauguuguga

SEQ ID NO: 20867 - RNA, 22 nt, Homo sapiens
auccagaugggcuuaauguaau

SEQ ID NO: 20868 - RNA, 22 nt, Homo sapiens
auccacauucauggaccagucc

SEQ ID NO: 20869 - RNA, 23 nt, Homo sapiens
auccacauucuaguccuuuaugc

SEQ ID NO: 20870 - RNA, 22 nt, Homo sapiens
agcuugugauuuagagugagag

SEQ ID NO: 20871 - RNA, 22 nt, Homo sapiens
agcuguuguucucagaggcuuu

SEQ ID NO: 20872 - RNA, 22 nt, Homo sapiens
aggagguagggugugaaacagc

SEQ ID NO: 20873 - RNA, 22 nt, Homo sapiens
aggauaguaaugauagagaggc

SEQ ID NO: 20874 - RNA, 22 nt, Homo sapiens
aacaccuugcagggauuaugac

SEQ ID NO: 20875 - RNA, 22 nt, Homo sapiens
aggcagucugaguuuugaaagg

SEQ ID NO: 20876 - RNA, 22 nt, Homo sapiens
aggcaaaugccagcaaucacac

SEQ ID NO: 20877 - RNA, 22 nt, Homo sapiens
aggcagcuguuauauacugagu

SEQ ID NO: 20878 - RNA, 21 nt, Homo sapiens
agcugguuucuucuuacuccu

SEQ ID NO: 20879 - RNA, 22 nt, Homo sapiens
agccuauccaauaucagugaga

SEQ ID NO: 20880 - RNA, 22 nt, Homo sapiens
agcaccacaauuuccugccuaa

SEQ ID NO: 20881 - RNA, 22 nt, Homo sapiens
agcaagaaugaacucucccaga

SEQ ID NO: 20882 - RNA, 22 nt, Homo sapiens
agcaagacauggcuuccaaaug

SEQ ID NO: 20883 - RNA, 22 nt, Homo sapiens
agcaagaugaaguugagcuagg

SEQ ID NO: 20884 - RNA, 22 nt, Homo sapiens
auaaagcuauuccucucuuuuu

SEQ ID NO: 20885 - RNA, 22 nt, Homo sapiens
agugguaguacaggagauaccg

SEQ ID NO: 20886 - RNA, 22 nt, Homo sapiens
aguggugucugaguggccaggg

SEQ ID NO: 20887 - RNA, 17 nt, Homo sapiens
agucaguaguuuguauu

SEQ ID NO: 20888 - RNA, 21 nt, Homo sapiens
agucauaggaguacauaaugc

SEQ ID NO: 20889 - RNA, 22 nt, Homo sapiens
agugauauguuugccuugaggg

SEQ ID NO: 20890 - RNA, 22 nt, Homo sapiens
acuugacacuuauauuacucac

SEQ ID NO: 20891 - RNA, 21 nt, Homo sapiens
agaaaaucuuaugggaaacau

SEQ ID NO: 20892 - RNA, 22 nt, Homo sapiens
agagauccucauuuuauagaca

SEQ ID NO: 20893 - RNA, 20 nt, Homo sapiens
agaagcauugcucucuucag

SEQ ID NO: 20894 - RNA, 22 nt, Homo sapiens
agagguuuaauugauucacagu

SEQ ID NO: 20895 - RNA, 22 nt, Homo sapiens
agagugcuauagauuagauuuc

SEQ ID NO: 20896 - RNA, 22 nt, Homo sapiens
agaucaauugcugauucgcucu

SEQ ID NO: 20897 - RNA, 22 nt, Homo sapiens
agcaacauuguucauaauagcu

SEQ ID NO: 20898 - RNA, 22 nt, Homo sapiens
agaugguguuggcugaguguau

SEQ ID NO: 20899 - RNA, 22 nt, Homo sapiens
agauguuguucaucugauuguu

SEQ ID NO: 20900 - RNA, 22 nt, Homo sapiens
aaugugcacuauuagggugaua

SEQ ID NO: 20901 - RNA, 22 nt, Homo sapiens
aauggguaguacugugguaaca

SEQ ID NO: 20902 - RNA, 22 nt, Homo sapiens
aauggcauugguccuuuuggau

SEQ ID NO: 20903 - RNA, 22 nt, Homo sapiens
acauaugaguacaugugccaug

SEQ ID NO: 20904 - RNA, 22 nt, Homo sapiens
acauaguagacacugaaaauau

SEQ ID NO: 20905 - RNA, 22 nt, Homo sapiens
acaugcauauguuggaagaaag

SEQ ID NO: 20906 - RNA, 22 nt, Homo sapiens
acaugcaucauuaggugguuua

SEQ ID NO: 20907 - RNA, 19 nt, Homo sapiens
acauggauuuugugcaaac

SEQ ID NO: 20908 - RNA, 22 nt, Homo sapiens
acauggcuuaugaauuuggaga

SEQ ID NO: 20909 - RNA, 22 nt, Homo sapiens
acccuggauucguggccuugaa

SEQ ID NO: 20910 - RNA, 22 nt, Homo sapiens
acccugucaaaacggaccaauc

SEQ ID NO: 20911 - RNA, 22 nt, Homo sapiens
accaugcaguccaauaugcaca

SEQ ID NO: 20912 - RNA, 22 nt, Homo sapiens
uaaacugucuuuggagcuuugc

SEQ ID NO: 20913 - RNA, 22 nt, Homo sapiens
uaaaccuagcauuuugcauaug

SEQ ID NO: 20914 - RNA, 22 nt, Homo sapiens
uaaacacucacuucauagccau

SEQ ID NO: 20915 - RNA, 22 nt, Homo sapiens
guugcaauugauguaugucuga

SEQ ID NO: 20916 - RNA, 22 nt, Homo sapiens
guguucaaacccaggucugucu

SEQ ID NO: 20917 - RNA, 22 nt, Homo sapiens
guguucaaauucugacagagag

SEQ ID NO: 20918 - RNA, 22 nt, Homo sapiens
uaaagugcugagaugaggcugg

SEQ ID NO: 20919 - RNA, 22 nt, Homo sapiens
uaacauugcuggacuaccugcu

SEQ ID NO: 20920 - RNA, 22 nt, Homo sapiens
uaaagcacuuuuuucugcaugg

SEQ ID NO: 20921 - RNA, 18 nt, Homo sapiens
uaaaggcacuguguuguu

SEQ ID NO: 20922 - RNA, 22 nt, Homo sapiens
uaaaugcuuaauugaaugugga

SEQ ID NO: 20923 - RNA, 22 nt, Homo sapiens
guggaaggucaugaauguucuu

SEQ ID NO: 20924 - RNA, 22 nt, Homo sapiens
guggaagucuuugguauuggua

SEQ ID NO: 20925 - RNA, 22 nt, Homo sapiens
guggaaaucucugugugacuua

SEQ ID NO: 20926 - RNA, 22 nt, Homo sapiens
gugauugucuaaucaagauaca

SEQ ID NO: 20927 - RNA, 22 nt, Homo sapiens
gugauaucuuacaauucucuuu

SEQ ID NO: 20928 - RNA, 22 nt, Homo sapiens
gugguuuuuuucugccuuauag

SEQ ID NO: 20929 - RNA, 22 nt, Homo sapiens
gugguuuucaacuccaccugca

SEQ ID NO: 20930 - RNA, 22 nt, Homo sapiens
gugguuuuacaaagagaaagau

SEQ ID NO: 20931 - RNA, 22 nt, Homo sapiens
gugguuuuaauauucagucuag

SEQ ID NO: 20932 - RNA, 18 nt, Homo sapiens
guggagugucuuccugga

SEQ ID NO: 20933 - RNA, 17 nt, Homo sapiens
guggauagaacaaugaa

SEQ ID NO: 20934 - RNA, 22 nt, Homo sapiens
guguaaguccugaguuuggaua

SEQ ID NO: 20935 - RNA, 22 nt, Homo sapiens
gugugauuauuucaauugaugc

SEQ ID NO: 20936 - RNA, 22 nt, Homo sapiens
gugugcauggagggggcaguga

SEQ ID NO: 20937 - RNA, 22 nt, Homo sapiens
gucacggaauguaaguggaagu

SEQ ID NO: 20938 - RNA, 22 nt, Homo sapiens
gucacggagauauggauucgga

SEQ ID NO: 20939 - RNA, 22 nt, Homo sapiens
gucagaugcagauuccaguucu

SEQ ID NO: 20940 - RNA, 22 nt, Homo sapiens
gucacuguggagaagaaagugg

SEQ ID NO: 20941 - RNA, 22 nt, Homo sapiens
gucacuguuuccuauuauauuu

SEQ ID NO: 20942 - RNA, 22 nt, Homo sapiens
gucagagcacugaguugugggc

SEQ ID NO: 20943 - RNA, 22 nt, Homo sapiens
gucuggcacagggaaaguacaa

SEQ ID NO: 20944 - RNA, 22 nt, Homo sapiens
gucuggcuccuucuacuacaug

SEQ ID NO: 20945 - RNA, 22 nt, Homo sapiens
gucuggcuuaucucacuuacca

SEQ ID NO: 20946 - RNA, 22 nt, Homo sapiens
gugaaucauaugccagucaugc

SEQ ID NO: 20947 - RNA, 22 nt, Homo sapiens
gucuuuggaaagacaaaguuca

SEQ ID NO: 20948 - RNA, 19 nt, Homo sapiens
guaaucucaguacuuuggu

SEQ ID NO: 20949 - RNA, 22 nt, Homo sapiens
guagugcaguuugagaaucagu

SEQ ID NO: 20950 - RNA, 22 nt, Homo sapiens
guaguggcaugaucuuggcuca

SEQ ID NO: 20951 - RNA, 22 nt, Homo sapiens
guauaguaguacaaaaguuuuu

SEQ ID NO: 20952 - RNA, 22 nt, Homo sapiens
guaaucucagcuacuugggagg

SEQ ID NO: 20953 - RNA, 22 nt, Homo sapiens
guaaucucaccuacuugggagg

SEQ ID NO: 20954 - RNA, 22 nt, Homo sapiens
guaaggaguaguguaacagugc

SEQ ID NO: 20955 - RNA, 22 nt, Homo sapiens
ggcauguuuaguagaauguggu

SEQ ID NO: 20956 - RNA, 22 nt, Homo sapiens
ggcauguugauagguagaugua

SEQ ID NO: 20957 - RNA, 22 nt, Homo sapiens
ggcagcgugguggauugaaaau

SEQ ID NO: 20958 - RNA, 22 nt, Homo sapiens
ggcaaguugcuauucuuuaaug

SEQ ID NO: 20959 - RNA, 22 nt, Homo sapiens
ggcaauauauucugaauucagu

SEQ ID NO: 20960 - RNA, 23 nt, Homo sapiens
uaugucuauucuaaugccagcac

SEQ ID NO: 20961 - RNA, 22 nt, Homo sapiens
uauggguuuuugucuguuuacu

SEQ ID NO: 20962 - RNA, 22 nt, Homo sapiens
uaucucauccuccuugauccca

SEQ ID NO: 20963 - RNA, 22 nt, Homo sapiens
uauugcauuugagguugguuga

SEQ ID NO: 20964 - RNA, 22 nt, Homo sapiens
uauugcaauuggggaaacuggg

SEQ ID NO: 20965 - RNA, 22 nt, Homo sapiens
uauuagguuggggcaaaaguaa

SEQ ID NO: 20966 - RNA, 22 nt, Homo sapiens
uauuagguuggugcaaaaguaa

SEQ ID NO: 20967 - RNA, 22 nt, Homo sapiens
uauuagguuggugcaaaaguua

SEQ ID NO: 20968 - RNA, 22 nt, Homo sapiens
uauuacauccauaggcucugcu

SEQ ID NO: 20969 - RNA, 22 nt, Homo sapiens
uauugcuggcacauaguagguc

SEQ ID NO: 20970 - RNA, 20 nt, Homo sapiens
ucaaagacauggcugucaga

SEQ ID NO: 20971 - RNA, 22 nt, Homo sapiens
ucaccaccuuccaggaccacug

SEQ ID NO: 20972 - RNA, 22 nt, Homo sapiens
ucacauucaauuguaauccccg

SEQ ID NO: 20973 - RNA, 22 nt, Homo sapiens
ucaccaccugcugaucauagag

SEQ ID NO: 20974 - RNA, 22 nt, Homo sapiens
ucaccaccugcugauuguagag

SEQ ID NO: 20975 - RNA, 22 nt, Homo sapiens
ucaauugcaucaacaguguaca

SEQ ID NO: 20976 - RNA, 22 nt, Homo sapiens
ucaauugcuuaugaagauacau

SEQ ID NO: 20977 - RNA, 18 nt, Homo sapiens
ucaagcaauugucaugcc

SEQ ID NO: 20978 - RNA, 22 nt, Homo sapiens
uaggcacacaucuacuacaaau

SEQ ID NO: 20979 - RNA, 22 nt, Homo sapiens
uagcugcaaaauauagacuucu

SEQ ID NO: 20980 - RNA, 22 nt, Homo sapiens
uagcugcacuuacaagugagaa

SEQ ID NO: 20981 - RNA, 22 nt, Homo sapiens
uagcagugugaaaacggacuaa

SEQ ID NO: 20982 - RNA, 18 nt, Homo sapiens
uagcucuuguugguccau

SEQ ID NO: 20983 - RNA, 22 nt, Homo sapiens
uagcagugucuagguaggccau

SEQ ID NO: 20984 - RNA, 22 nt, Homo sapiens
uauaugcauugugggguacuga

SEQ ID NO: 20985 - RNA, 22 nt, Homo sapiens
uaaggcaaguuuuuaguggaca

SEQ ID NO: 20986 - RNA, 22 nt, Homo sapiens
uaccagugucagcuuccugugu

SEQ ID NO: 20987 - RNA, 19 nt, Homo sapiens
uaccagcacaguguuugag

SEQ ID NO: 20988 - RNA, 16 nt, Homo sapiens
uaagccccacgugcau

SEQ ID NO: 20989 - RNA, 22 nt, Homo sapiens
uaacuccauuuggacucaguau

SEQ ID NO: 20990 - RNA, 22 nt, Homo sapiens
uacugcauucuccgccuccggg

SEQ ID NO: 20991 - RNA, 18 nt, Homo sapiens
uagaauauaggucauucu

SEQ ID NO: 20992 - RNA, 22 nt, Homo sapiens
uacuguguaguuagaccucaga

SEQ ID NO: 20993 - RNA, 22 nt, Homo sapiens
uagcaaaucaauggaauugaag

SEQ ID NO: 20994 - RNA, 22 nt, Homo sapiens
uagauuauccggcugggacaau

SEQ ID NO: 20995 - RNA, 22 nt, Homo sapiens
uagauuaucucaccacucgagu

SEQ ID NO: 20996 - RNA, 21 nt, Homo sapiens
uagaugguguucuagagagaa

SEQ ID NO: 20997 - RNA, 22 nt, Homo sapiens
cuggcccaguucugcguuuugc

SEQ ID NO: 20998 - RNA, 22 nt, Homo sapiens
cuggcacagugucagaaacaca

SEQ ID NO: 20999 - RNA, 22 nt, Homo sapiens
cuggcagucugccucuucacug

SEQ ID NO: 21000 - RNA, 22 nt, Homo sapiens
cugggaugauguaaauaggcua

SEQ ID NO: 21001 - RNA, 22 nt, Homo sapiens
cuggaaagcaaguccauugcuc

SEQ ID NO: 21002 - RNA, 22 nt, Homo sapiens
cuggaguuugaggcugcaguga

SEQ ID NO: 21003 - RNA, 22 nt, Homo sapiens
cuggauguaaaugaaacuacag

SEQ ID NO: 21004 - RNA, 19 nt, Homo sapiens
cuggcaaaugcuuuggcca

SEQ ID NO: 21005 - RNA, 22 nt, Homo sapiens
cugcauuugaugacguauggug

SEQ ID NO: 21006 - RNA, 22 nt, Homo sapiens
cugaccauagacuacucugggc

SEQ ID NO: 21007 - RNA, 22 nt, Homo sapiens
cuaaaguagccaggacugcagg

SEQ ID NO: 21008 - RNA, 22 nt, Homo sapiens
cuaaaguauugagugguaaaga

SEQ ID NO: 21009 - RNA, 22 nt, Homo sapiens
ccaguuuuucauuuauacuagu

SEQ ID NO: 21010 - RNA, 22 nt, Homo sapiens
ccaguuuucaagauaaugguuu

SEQ ID NO: 21011 - RNA, 22 nt, Homo sapiens
cauuggugauuagugaaugaac

SEQ ID NO: 21012 - RNA, 22 nt, Homo sapiens
cauugucccucaaugacuauga

SEQ ID NO: 21013 - RNA, 22 nt, Homo sapiens
cauugucccucaaugucuauga

SEQ ID NO: 21014 - RNA, 22 nt, Homo sapiens
cuccaugagauuguugaaguag

SEQ ID NO: 21015 - RNA, 23 nt, Homo sapiens
cuccaugagccguccagggccug

SEQ ID NO: 21016 - RNA, 22 nt, Homo sapiens
cuaaugcagucaggagaaggaa

SEQ ID NO: 21017 - RNA, 22 nt, Homo sapiens
cuaauucuggccaaagggauaa

SEQ ID NO: 21018 - RNA, 22 nt, Homo sapiens
cuacaguagagaggauguagaa

SEQ ID NO: 21019 - RNA, 22 nt, Homo sapiens
cagagcacuaaagguaaaaggc

SEQ ID NO: 21020 - RNA, 21 nt, Homo sapiens
cagagaucaucucuguuuuaa

SEQ ID NO: 21021 - RNA, 22 nt, Homo sapiens
cagagaucaugcaacugcucgc

SEQ ID NO: 21022 - RNA, 22 nt, Homo sapiens
caaucugucuuuuagggggcca

SEQ ID NO: 21023 - RNA, 22 nt, Homo sapiens
caagugaauaguugcucucaga

SEQ ID NO: 21024 - RNA, 22 nt, Homo sapiens
caacucuguaggauccaggugg

SEQ ID NO: 21025 - RNA, 22 nt, Homo sapiens
cacagcacaggcaugaguguca

SEQ ID NO: 21026 - RNA, 22 nt, Homo sapiens
cacagcgacuuccgccuaccgg

SEQ ID NO: 21027 - RNA, 22 nt, Homo sapiens
caaugguuuuuuaguauaagua

SEQ ID NO: 21028 - RNA, 22 nt, Homo sapiens
caaugugcuuggggcacaugag

SEQ ID NO: 21029 - RNA, 22 nt, Homo sapiens
caugccacugcacuccaaccug

SEQ ID NO: 21030 - RNA, 22 nt, Homo sapiens
cauggcccugggcugggcgaac

SEQ ID NO: 21031 - RNA, 22 nt, Homo sapiens
cauggcccuggguccauaggaa

SEQ ID NO: 21032 - RNA, 22 nt, Homo sapiens
caugugcaugcuuucuuaugug

SEQ ID NO: 21033 - RNA, 22 nt, Homo sapiens
cauugcaugcauauggcuuggu

SEQ ID NO: 21034 - RNA, 22 nt, Homo sapiens
caggcagugggagacaaaacug

SEQ ID NO: 21035 - RNA, 22 nt, Homo sapiens
caggcauuguauuguaaucccc

SEQ ID NO: 21036 - RNA, 22 nt, Homo sapiens
cagcaaaucauccuauuugagc

SEQ ID NO: 21037 - RNA, 22 nt, Homo sapiens
cagauguaguauuuuagugaaa

SEQ ID NO: 21038 - RNA, 22 nt, Homo sapiens
caggugcuuacuuaauagccau

SEQ ID NO: 21039 - RNA, 22 nt, Homo sapiens
caucccauucgaggggcacagc

SEQ ID NO: 21040 - RNA, 22 nt, Homo sapiens
ggagcugugauuugaguccaga

SEQ ID NO: 21041 - RNA, 22 nt, Homo sapiens
ggagggugagaucaauuuggga

SEQ ID NO: 21042 - RNA, 21 nt, Homo sapiens
ggauagaaaacuuggcuguau

SEQ ID NO: 21043 - RNA, 22 nt, Homo sapiens
ggauaucauuauuucuagggcu

SEQ ID NO: 21044 - RNA, 22 nt, Homo sapiens
gcuguuugccgccaucgcagac

SEQ ID NO: 21045 - RNA, 21 nt, Homo sapiens
gcuuuuucggaagucuuuggc

SEQ ID NO: 21046 - RNA, 18 nt, Homo sapiens
ggaaaacuuuucuaagua

SEQ ID NO: 21047 - RNA, 22 nt, Homo sapiens
ggaaagauguaauauuaucuaa

SEQ ID NO: 21048 - RNA, 22 nt, Homo sapiens
gcugcacuuuaaggcauccccu

SEQ ID NO: 21049 - RNA, 17 nt, Homo sapiens
gcugauguuugcauuuu

SEQ ID NO: 21050 - RNA, 22 nt, Homo sapiens
gcuguugugaacuauacaucua

SEQ ID NO: 21051 - RNA, 22 nt, Homo sapiens
gcuccauuuuccauuucucuaa

SEQ ID NO: 21052 - RNA, 22 nt, Homo sapiens
gcugacacugggcuauagaucu

SEQ ID NO: 21053 - RNA, 22 nt, Homo sapiens
gccaaaaugcugggauuacagg

SEQ ID NO: 21054 - RNA, 22 nt, Homo sapiens
gccaagaagugucuaagcagga

SEQ ID NO: 21055 - RNA, 22 nt, Homo sapiens
gcaugauuuuauaucuauguaa

SEQ ID NO: 21056 - RNA, 22 nt, Homo sapiens
gcaugcauuuuccuaacuagaa

SEQ ID NO: 21057 - RNA, 22 nt, Homo sapiens
gcucaaguaauggcaguuuugc

SEQ ID NO: 21058 - RNA, 22 nt, Homo sapiens
gcucaugagacaagcaggagua

SEQ ID NO: 21059 - RNA, 22 nt, Homo sapiens
gccaagaucugaauaauuaaga

SEQ ID NO: 21060 - RNA, 22 nt, Homo sapiens
gcaugaugaauaauaucacaag

SEQ ID NO: 21061 - RNA, 22 nt, Homo sapiens
gcacaaugccugacgaguccug

SEQ ID NO: 21062 - RNA, 22 nt, Homo sapiens
gcaauguuacugaauguguuuu

SEQ ID NO: 21063 - RNA, 22 nt, Homo sapiens
gcacagucaacacuuauucacc

SEQ ID NO: 21064 - RNA, 22 nt, Homo sapiens
gauggcacuaagccauguagga

SEQ ID NO: 21065 - RNA, 22 nt, Homo sapiens
gauguaggugcauuugcacgug

SEQ ID NO: 21066 - RNA, 22 nt, Homo sapiens
gauggcaugugcugccaccaag

SEQ ID NO: 21067 - RNA, 22 nt, Homo sapiens
cugucuggaggccugcaaauaa

SEQ ID NO: 21068 - RNA, 20 nt, Homo sapiens
cuuuguccuccugcugugcu

SEQ ID NO: 21069 - RNA, 22 nt, Homo sapiens
gaaagauuuccugagcuagaaa

SEQ ID NO: 21070 - RNA, 22 nt, Homo sapiens
gaaaauccauccccagggagua

SEQ ID NO: 21071 - RNA, 22 nt, Homo sapiens
cuuuuacacugguggugggaau

SEQ ID NO: 21072 - RNA, 22 nt, Homo sapiens
cuuuuacacuguuggcaggauu

SEQ ID NO: 21073 - RNA, 22 nt, Homo sapiens
gaaagugcugcuugacugggau

SEQ ID NO: 21074 - RNA, 22 nt, Homo sapiens
gaaaguguugagauuacaggca

SEQ ID NO: 21075 - RNA, 22 nt, Homo sapiens
gacaguuuggugaggaagacga

SEQ ID NO: 21076 - RNA, 22 nt, Homo sapiens
gacauagagccuugacuucauu

SEQ ID NO: 21077 - RNA, 22 nt, Homo sapiens
gaaauguuuuucaugugggcaa

SEQ ID NO: 21078 - RNA, 22 nt, Homo sapiens
gagaugucuauuucagagaugu

SEQ ID NO: 21079 - RNA, 22 nt, Homo sapiens
gagauguagucuugcccuguca

SEQ ID NO: 21080 - RNA, 22 nt, Homo sapiens
gagauguuuguuucacugucac

SEQ ID NO: 21081 - RNA, 22 nt, Homo sapiens
gacauguuuucauguauuugga

SEQ ID NO: 21082 - RNA, 22 nt, Homo sapiens
gacuauguuaccuuacacauca

SEQ ID NO: 21083 - RNA, 22 nt, Homo sapiens
gagcugccuugccuaugcaaga

SEQ ID NO: 21084 - RNA, 22 nt, Homo sapiens
gaggagauauucugcuggaugg

SEQ ID NO: 21085 - RNA, 22 nt, Homo sapiens
gagcuuguagugugaaugguau

SEQ ID NO: 21086 - RNA, 22 nt, Homo sapiens
gagcaguugagagugcuggcca

SEQ ID NO: 21087 - RNA, 22 nt, Homo sapiens
gagauuuucagcuugacuggga

SEQ ID NO: 21088 - RNA, 22 nt, Homo sapiens
uggaguguguuaacuuuacaag

SEQ ID NO: 21089 - RNA, 22 nt, Homo sapiens
uggauagaaauguacuguuuuc

SEQ ID NO: 21090 - RNA, 22 nt, Homo sapiens
uggauguaauugauucauguug

SEQ ID NO: 21091 - RNA, 22 nt, Homo sapiens
uggcauggaguggauggcccca

SEQ ID NO: 21092 - RNA, 22 nt, Homo sapiens
uggccuguaacccucucauagg

SEQ ID NO: 21093 - RNA, 22 nt, Homo sapiens
uggcgagaaucacauucuaauu

SEQ ID NO: 21094 - RNA, 22 nt, Homo sapiens
ugggaagagggagcgauuuugg

SEQ ID NO: 21095 - RNA, 22 nt, Homo sapiens
ugggaagcugcauuuuaacaag

SEQ ID NO: 21096 - RNA, 22 nt, Homo sapiens
ugggaauaugauacaggucuuu

SEQ ID NO: 21097 - RNA, 22 nt, Homo sapiens
ugggaaugaaauuacauagcuu

SEQ ID NO: 21098 - RNA, 22 nt, Homo sapiens
ugggaagauucuguguuuuucc

SEQ ID NO: 21099 - RNA, 18 nt, Homo sapiens
ugggaagaaauucuucuc

SEQ ID NO: 21100 - RNA, 22 nt, Homo sapiens
ugggaagaagguuuacuugcca

SEQ ID NO: 21101 - RNA, 20 nt, Homo sapiens
ugguguuugaacagugaaug

SEQ ID NO: 21102 - RNA, 22 nt, Homo sapiens
uggggcuuuuucuuguauucuc

SEQ ID NO: 21103 - RNA, 22 nt, Homo sapiens
uguaaaccauauauguauguag

SEQ ID NO: 21104 - RNA, 22 nt, Homo sapiens
ugucaucuagguauuaagcccc

SEQ ID NO: 21105 - RNA, 21 nt, Homo sapiens
ugucaguuuccagaguucaac

SEQ ID NO: 21106 - RNA, 22 nt, Homo sapiens
ugucaguuucaguguuagccuu

SEQ ID NO: 21107 - RNA, 22 nt, Homo sapiens
ugucauauagaauguucuauga

SEQ ID NO: 21108 - RNA, 22 nt, Homo sapiens
ugucaaacauuaugaugcucua

SEQ ID NO: 21109 - RNA, 20 nt, Homo sapiens
ugucauuaagcacugugcca

SEQ ID NO: 21110 - RNA, 22 nt, Homo sapiens
ugugaacacagaggcuauggca

SEQ ID NO: 21111 - RNA, 22 nt, Homo sapiens
ugugaaacauggauagaacugg

SEQ ID NO: 21112 - RNA, 22 nt, Homo sapiens
ugcaagucaucuguccuucaga

SEQ ID NO: 21113 - RNA, 17 nt, Homo sapiens
ugcagcacacugauggg

SEQ ID NO: 21114 - RNA, 21 nt, Homo sapiens
ugcauugucuugaguuuaaau

SEQ ID NO: 21115 - RNA, 22 nt, Homo sapiens
ugcagguacuugacaacuuggg

SEQ ID NO: 21116 - RNA, 22 nt, Homo sapiens
ugcaguagugugaucuuggcuc

SEQ ID NO: 21117 - RNA, 22 nt, Homo sapiens
ugagugugacuuagcagaagga

SEQ ID NO: 21118 - RNA, 22 nt, Homo sapiens
ugcaagaaucuuucaggcuagc

SEQ ID NO: 21119 - RNA, 22 nt, Homo sapiens
ugauaagaaauuguucauguag

SEQ ID NO: 21120 - RNA, 22 nt, Homo sapiens
ugcugcauuggggauuaaguuu

SEQ ID NO: 21121 - RNA, 22 nt, Homo sapiens
ugcugcuguuguuguuacuagc

SEQ ID NO: 21122 - RNA, 19 nt, Homo sapiens
ugcugcauugugaccuugc

SEQ ID NO: 21123 - RNA, 22 nt, Homo sapiens
ugcauuguuuuugguucccagg

SEQ ID NO: 21124 - RNA, 22 nt, Homo sapiens
ugccaacaugccuggcuguuuu

SEQ ID NO: 21125 - RNA, 22 nt, Homo sapiens
uggaaaacaugcacauuggauu

SEQ ID NO: 21126 - RNA, 20 nt, Homo sapiens
uggaaguaagaauauaggug

SEQ ID NO: 21127 - RNA, 22 nt, Homo sapiens
uggaaguuaaaugacucuuucu

SEQ ID NO: 21128 - RNA, 22 nt, Homo sapiens
ugcugguuuaaaaugcaaauuc

SEQ ID NO: 21129 - RNA, 22 nt, Homo sapiens
ugcugguuuucaucaucagugg

SEQ ID NO: 21130 - RNA, 22 nt, Homo sapiens
uggagugauaugguuauauggg

SEQ ID NO: 21131 - RNA, 21 nt, Homo sapiens
uggagugaagaguuuauugac

SEQ ID NO: 21132 - RNA, 22 nt, Homo sapiens
uggaaugucagcuacaagaggg

SEQ ID NO: 21133 - RNA, 22 nt, Homo sapiens
uggaaugugaauaacuuccuuc

SEQ ID NO: 21134 - RNA, 22 nt, Homo sapiens
ucuugcuuuugcagagcuucuc

SEQ ID NO: 21135 - RNA, 22 nt, Homo sapiens
ucuuuggugaauggucauccag

SEQ ID NO: 21136 - RNA, 22 nt, Homo sapiens
ucuuugguucugugcagccuau

SEQ ID NO: 21137 - RNA, 22 nt, Homo sapiens
ucugagguaggugcauggauac

SEQ ID NO: 21138 - RNA, 22 nt, Homo sapiens
ucugagacuguuucuaacaagc

SEQ ID NO: 21139 - RNA, 19 nt, Homo sapiens
ucugacagccccagucaac

SEQ ID NO: 21140 - RNA, 22 nt, Homo sapiens
ucugugguaagaaacgcauguc

SEQ ID NO: 21141 - RNA, 22 nt, Homo sapiens
ucuguggucagaguccuuggcc

SEQ ID NO: 21142 - RNA, 22 nt, Homo sapiens
ucugugguucaggcuggagugc

SEQ ID NO: 21143 - RNA, 22 nt, Homo sapiens
ucagaguagaaacacuuccaua

SEQ ID NO: 21144 - RNA, 20 nt, Homo sapiens
ucacuggguucuugaagucu

SEQ ID NO: 21145 - RNA, 22 nt, Homo sapiens
ucacugugguuugggaaagugc

SEQ ID NO: 21146 - RNA, 22 nt, Homo sapiens
ucccuguagugccuagaucaga

SEQ ID NO: 21147 - RNA, 20 nt, Homo sapiens
ucccucaaacuuuuccacug

SEQ ID NO: 21148 - RNA, 22 nt, Homo sapiens
ucuacccugugagggacacagu

SEQ ID NO: 21149 - RNA, 21 nt, Homo sapiens
ucuaccuacugcucacaggcu

SEQ ID NO: 21150 - RNA, 22 nt, Homo sapiens
ucuauguuuuugcuaguagugu

SEQ ID NO: 21151 - RNA, 22 nt, Homo sapiens
ucucugagaccacuccaaacuc

SEQ ID NO: 21152 - RNA, 18 nt, Homo sapiens
ugacaguuucuuuauauu

SEQ ID NO: 21153 - RNA, 22 nt, Homo sapiens
ugacaucaccaccuccgucauc

SEQ ID NO: 21154 - RNA, 22 nt, Homo sapiens
ugacaguguccuccuccugaga

SEQ ID NO: 21155 - RNA, 20 nt, Homo sapiens
ugacaagugagaauuauggg

SEQ ID NO: 21156 - RNA, 21 nt, Homo sapiens
ugacagaaaauugaguuugcu

SEQ ID NO: 21157 - RNA, 23 nt, Homo sapiens
ugacagaccuucuggaagaaguc

SEQ ID NO: 21158 - RNA, 22 nt, Homo sapiens
ugacagcugaagauguugaacc

SEQ ID NO: 21159 - RNA, 22 nt, Homo sapiens
ugacagcugaggcccagaguac

SEQ ID NO: 21160 - RNA, 22 nt, Homo sapiens
ugaaaugauuauaugguguuug

SEQ ID NO: 21161 - RNA, 22 nt, Homo sapiens
ugaaacauacacucugaugggg

SEQ ID NO: 21162 - RNA, 22 nt, Homo sapiens
ugaaaguaauugcaguuuuuac

SEQ ID NO: 21163 - RNA, 22 nt, Homo sapiens
ugagaguauaaauugaugcagc

SEQ ID NO: 21164 - RNA, 22 nt, Homo sapiens
ugagagucauacaaauaaaaau

SEQ ID NO: 21165 - RNA, 22 nt, Homo sapiens
ugagagaugaacuauucuugaa

SEQ ID NO: 21166 - RNA, 22 nt, Homo sapiens
ugagagaugauaaaauguuugu

SEQ ID NO: 21167 - RNA, 22 nt, Homo sapiens
ugagacugguuaauugauaaag

SEQ ID NO: 21168 - RNA, 22 nt, Homo sapiens
ugagggaugcguacccuaugcc

SEQ ID NO: 21169 - RNA, 22 nt, Homo sapiens
ugagguacaacauggacugaag

SEQ ID NO: 21170 - RNA, 19 nt, Homo sapiens
ugagauccacugaagauuc

SEQ ID NO: 21171 - RNA, 22 nt, Homo sapiens
ugagaucuuugcuguccucacc

SEQ ID NO: 21172 - RNA, 22 nt, Homo sapiens
ugagauccugagaguugggacu

SEQ ID NO: 21173 - RNA, 22 nt, Homo sapiens
uuagaacuagaggaguuugagu

SEQ ID NO: 21174 - RNA, 22 nt, Homo sapiens
uuauguaggcuauagcucugca

SEQ ID NO: 21175 - RNA, 19 nt, Homo sapiens
uguuuggcuauaggucuaa

SEQ ID NO: 21176 - RNA, 22 nt, Homo sapiens
uuaagucacacuagacaacuga

SEQ ID NO: 21177 - RNA, 22 nt, Homo sapiens
uguugcacugguaauguacuga

SEQ ID NO: 21178 - RNA, 22 nt, Homo sapiens
uguugcauuugucaaggucaag

SEQ ID NO: 21179 - RNA, 22 nt, Homo sapiens
uuaaugaacuuuauuuuguaga

SEQ ID NO: 21180 - RNA, 22 nt, Homo sapiens
uuaaucacagcugaacucaaac

SEQ ID NO: 21181 - RNA, 21 nt, Homo sapiens
uuacaauggcuccuugaaggu

SEQ ID NO: 21182 - RNA, 22 nt, Homo sapiens
uuacuagaacauuuagggaacu

SEQ ID NO: 21183 - RNA, 22 nt, Homo sapiens
ugugaagaaagucauugguagc

SEQ ID NO: 21184 - RNA, 22 nt, Homo sapiens
ugugaacagaauuagucaccua

SEQ ID NO: 21185 - RNA, 22 nt, Homo sapiens
uguucuugaguugggaguacaa

SEQ ID NO: 21186 - RNA, 19 nt, Homo sapiens
ugugauaguugaaccugcc

SEQ ID NO: 21187 - RNA, 22 nt, Homo sapiens
ugugauaguugcuguucugggc

SEQ ID NO: 21188 - RNA, 22 nt, Homo sapiens
uucacugcacuccagccugggu

SEQ ID NO: 21189 - RNA, 23 nt, Homo sapiens
uuccaccauugacuaguuacaua

SEQ ID NO: 21190 - RNA, 22 nt, Homo sapiens
uuccacaaugguugaacuaguu

SEQ ID NO: 21191 - RNA, 22 nt, Homo sapiens
uuccacaggguugaacuaguuu

SEQ ID NO: 21192 - RNA, 22 nt, Homo sapiens
uuccacaauggcugaacuaguu

SEQ ID NO: 21193 - RNA, 22 nt, Homo sapiens
uuccacaaugguugaacuaauu

SEQ ID NO: 21194 - RNA, 22 nt, Homo sapiens
uuccacaaugguugaacuagcu

SEQ ID NO: 21195 - RNA, 22 nt, Homo sapiens
uuccagagucaccuuucugucg

SEQ ID NO: 21196 - RNA, 22 nt, Homo sapiens
uuccagaugggaguucuauucu

SEQ ID NO: 21197 - RNA, 22 nt, Homo sapiens
uuccaguaauagcacagcauug

SEQ ID NO: 21198 - RNA, 22 nt, Homo sapiens
uuccaguauuugggcaagcgca

SEQ ID NO: 21199 - RNA, 22 nt, Homo sapiens
uuccaguggaguaaauggacaa

SEQ ID NO: 21200 - RNA, 22 nt, Homo sapiens
uugaaagacagaggggcaaguu

SEQ ID NO: 21201 - RNA, 19 nt, Homo sapiens
uucuuuguugugggggcug

SEQ ID NO: 21202 - RNA, 22 nt, Homo sapiens
uuccugagaucagaauucaaau

SEQ ID NO: 21203 - RNA, 22 nt, Homo sapiens
uugagaucuuuuaggccuuugu

SEQ ID NO: 21204 - RNA, 22 nt, Homo sapiens
uugagauccuuuugcucaucag

SEQ ID NO: 21205 - RNA, 22 nt, Homo sapiens
uugagaucuugauauguuugaa

SEQ ID NO: 21206 - RNA, 22 nt, Homo sapiens
uugacuguaagauggcuauuac

SEQ ID NO: 21207 - RNA, 22 nt, Homo sapiens
uugacauugcuguaguguccag

SEQ ID NO: 21208 - RNA, 22 nt, Homo sapiens
uugacaaugcacugugcuaagu

SEQ ID NO: 21209 - RNA, 22 nt, Homo sapiens
uugaggucagagguucgagacc

SEQ ID NO: 21210 - RNA, 22 nt, Homo sapiens
uugaggugaauuugcaggaugc

SEQ ID NO: 21211 - RNA, 22 nt, Homo sapiens
uugagauggauagacauagcau

SEQ ID NO: 21212 - RNA, 22 nt, Homo sapiens
uugagauuuuccucaaauauuu

SEQ ID NO: 21213 - RNA, 22 nt, Homo sapiens
uuggaauuagacaagugguggu

SEQ ID NO: 21214 - RNA, 22 nt, Homo sapiens
uuggaauauuauuauugggcag

SEQ ID NO: 21215 - RNA, 23 nt, Homo sapiens
uuggaaugagaccuaagaguuuu

SEQ ID NO: 21216 - RNA, 22 nt, Homo sapiens
uuggaauguauggcaucuugcg

SEQ ID NO: 21217 - RNA, 22 nt, Homo sapiens
uuggagagugauauucagaugc

SEQ ID NO: 21218 - RNA, 22 nt, Homo sapiens
uuggagugugcucauaacugcu

SEQ ID NO: 21219 - RNA, 22 nt, Homo sapiens
uuggauugugaaaguauucucu

SEQ ID NO: 21220 - RNA, 22 nt, Homo sapiens
uugauaauguuaacuuugguca

SEQ ID NO: 21221 - RNA, 22 nt, Homo sapiens
uuggcuguguuccucaaggagu

SEQ ID NO: 21222 - RNA, 22 nt, Homo sapiens
uuggcuguguuuauaugcugga

SEQ ID NO: 21223 - RNA, 22 nt, Homo sapiens
uuggcaaauagguuuuauugca

SEQ ID NO: 21224 - RNA, 21 nt, Homo sapiens
uuggccuggaggccugaaugu

SEQ ID NO: 21225 - RNA, 22 nt, Homo sapiens
uuggcuguguuucccuacaaau

SEQ ID NO: 21226 - RNA, 22 nt, Homo sapiens
uuguaaagaucauaugcuguuc

SEQ ID NO: 21227 - RNA, 22 nt, Homo sapiens
uuggguccucugguccuugguu

SEQ ID NO: 21228 - RNA, 22 nt, Homo sapiens
uuguaaaguucuuaggaagcuc

SEQ ID NO: 21229 - RNA, 22 nt, Homo sapiens
uuguaauguuaccaaauggugu

SEQ ID NO: 21230 - RNA, 22 nt, Homo sapiens
uuuaaaguuagaaggaaagggc

SEQ ID NO: 21231 - RNA, 22 nt, Homo sapiens
uuuaaagcacggaguuuguggc

SEQ ID NO: 21232 - RNA, 22 nt, Homo sapiens
uuguugcacugcuuuccuggcc

SEQ ID NO: 21233 - RNA, 22 nt, Homo sapiens
uuguucccuucuggcuuuuaug

SEQ ID NO: 21234 - RNA, 22 nt, Homo sapiens
uugugaauggugccacaauaaa

SEQ ID NO: 21235 - RNA, 22 nt, Homo sapiens
uugugaguggugccgcaauaaa

SEQ ID NO: 21236 - RNA, 22 nt, Homo sapiens
uugugacacagcugggccuaua

SEQ ID NO: 21237 - RNA, 22 nt, Homo sapiens
uugugcauaucagagguuugcu

SEQ ID NO: 21238 - RNA, 22 nt, Homo sapiens
uugugcauguauauuaguucac

SEQ ID NO: 21239 - RNA, 22 nt, Homo sapiens
uugugaauggugccgcaauaaa

SEQ ID NO: 21240 - RNA, 22 nt, Homo sapiens
uugugaaaucuaggcagagguu

SEQ ID NO: 21241 - RNA, 22 nt, Homo sapiens
uugugaaugaugucgcaauaaa

SEQ ID NO: 21242 - RNA, 20 nt, Homo sapiens
uuuuggacuaaaggcauccc

SEQ ID NO: 21243 - RNA, 22 nt, Homo sapiens
uuuguaauccuauuccaaagga

SEQ ID NO: 21244 - RNA, 22 nt, Homo sapiens
uuuggcauuugaguuuguagga

SEQ ID NO: 21245 - RNA, 22 nt, Homo sapiens
uuugcuuguguaaaaaucugga

SEQ ID NO: 21246 - RNA, 22 nt, Homo sapiens
uuuccaguuggaaagccuguuu

SEQ ID NO: 21247 - RNA, 22 nt, Homo sapiens
uuuccaguuguucuagaaagcu

SEQ ID NO: 21248 - RNA, 21 nt, Homo sapiens
uuuccuggagcguauggcuuc

SEQ ID NO: 21249 - RNA, 22 nt, Homo sapiens
uuucauagccuucuaaugaguu

SEQ ID NO: 21250 - RNA, 22 nt, Homo sapiens
uuucauggacgcaaugccuuuu

SEQ ID NO: 21251 - RNA, 22 nt, Homo sapiens
uuucauggaauauagucauuuu

SEQ ID NO: 21252 - RNA, 18 nt, Homo sapiens
uuucauugagugugauau

SEQ ID NO: 21253 - RNA, 22 nt, Homo sapiens
aaccuacauucuuaacuguugc

SEQ ID NO: 21254 - RNA, 22 nt, Homo sapiens
uuuuuauggccaauccucagaa

SEQ ID NO: 21255 - RNA, 22 nt, Homo sapiens
aagaugcagaagcccagauguu

SEQ ID NO: 21256 - RNA, 22 nt, Homo sapiens
aagcucuuguugaaucuuguca

SEQ ID NO: 21257 - RNA, 22 nt, Homo sapiens
aagcuacuuuggugguuccuua

SEQ ID NO: 21258 - RNA, 23 nt, Homo sapiens
aagcaugcacagcuguuuguggu

SEQ ID NO: 21259 - RNA, 22 nt, Homo sapiens
aagcaggugucugugucuguaa

SEQ ID NO: 21260 - RNA, 22 nt, Homo sapiens
aagcagauguguugaaaguacu

SEQ ID NO: 21261 - RNA, 22 nt, Homo sapiens
uuuugcauuggcugaggagugu

SEQ ID NO: 21262 - RNA, 22 nt, Homo sapiens
uuuugguguacaauucuaugga

SEQ ID NO: 21263 - RNA, 22 nt, Homo sapiens
uuuuguacgccuguguccauca

SEQ ID NO: 21264 - RNA, 22 nt, Homo sapiens
uuuuggugguuaugugucaaug

SEQ ID NO: 21265 - RNA, 22 nt, Homo sapiens
uuuugguucaauuaauuugcua

SEQ ID NO: 21266 - RNA, 22 nt, Homo sapiens
ugguuaucauagcuaugcuacu

SEQ ID NO: 21267 - RNA, 22 nt, Homo sapiens
ugguuccauauuaauuuuagga

SEQ ID NO: 21268 - RNA, 22 nt, Homo sapiens
uguaaacauguauguguuuaug

SEQ ID NO: 21269 - RNA, 22 nt, Homo sapiens
uguaaaaagcccagccgcugag

SEQ ID NO: 21270 - RNA, 22 nt, Homo sapiens
uggugcuuaaauaaggcuuuca

SEQ ID NO: 21271 - RNA, 22 nt, Homo sapiens
uggcuacagaaaguacuaguga

SEQ ID NO: 21272 - RNA, 22 nt, Homo sapiens
uguaaaucuuucacaguugaug

SEQ ID NO: 21273 - RNA, 20 nt, Homo sapiens
uguaacaaucuggauguugc

SEQ ID NO: 21274 - RNA, 22 nt, Homo sapiens
uguaaaccucugaguacaagcu

SEQ ID NO: 21275 - RNA, 22 nt, Homo sapiens
uguaauuuaaaugauccuugga

SEQ ID NO: 21276 - RNA, 22 nt, Homo sapiens
uguaagcauugggcaugcaguc

SEQ ID NO: 21277 - RNA, 21 nt, Homo sapiens
uguauauguuuauacacacac

SEQ ID NO: 21278 - RNA, 22 nt, Homo sapiens
uguagacagcacguaguugagu

SEQ ID NO: 21279 - RNA, 22 nt, Homo sapiens
uguagcaaaucgauacuauugg

SEQ ID NO: 21280 - RNA, 22 nt, Homo sapiens
uguagggagagggaguugcacc

SEQ ID NO: 21281 - RNA, 22 nt, Homo sapiens
ugugagcuauggaguuguagag

SEQ ID NO: 21282 - RNA, 22 nt, Homo sapiens
ugugauaguuggcuaaagcagu

SEQ ID NO: 21283 - RNA, 22 nt, Homo sapiens
uguccugcagagguguuugccu

SEQ ID NO: 21284 - RNA, 22 nt, Homo sapiens
uguauguugauguuauauucug

SEQ ID NO: 21285 - RNA, 22 nt, Homo sapiens
ugucaagaaaucaaggugugag

SEQ ID NO: 21286 - RNA, 18 nt, Homo sapiens
ugucacuggauaaugguc

SEQ ID NO: 21287 - RNA, 22 nt, Homo sapiens
ugucacagagauuuugguaugu

SEQ ID NO: 21288 - RNA, 22 nt, Homo sapiens
ugucacaguuuguacuuuauag

SEQ ID NO: 21289 - RNA, 22 nt, Homo sapiens
ugucauagauugcuuggaaaaa

SEQ ID NO: 21290 - RNA, 22 nt, Homo sapiens
ugugccacuccaaccuggguga

SEQ ID NO: 21291 - RNA, 22 nt, Homo sapiens
ugugguauuagguguaguaucu

SEQ ID NO: 21292 - RNA, 22 nt, Homo sapiens
ugugauugauauauuuacagaa

SEQ ID NO: 21293 - RNA, 22 nt, Homo sapiens
ugugcaaucagcuucauuacau

SEQ ID NO: 21294 - RNA, 22 nt, Homo sapiens
ugugcaaucuuccauuuuuagg

SEQ ID NO: 21295 - RNA, 22 nt, Homo sapiens
uguguaauaccuuugacuauau

SEQ ID NO: 21296 - RNA, 22 nt, Homo sapiens
uguguaaauacaagugcuugaa

SEQ ID NO: 21297 - RNA, 22 nt, Homo sapiens
ugugucacugaggguuagugua

SEQ ID NO: 21298 - RNA, 22 nt, Homo sapiens
uuaaguuguagcuacaaauaca

SEQ ID NO: 21299 - RNA, 22 nt, Homo sapiens
uuacugcucuuuugucaugagu

SEQ ID NO: 21300 - RNA, 20 nt, Homo sapiens
uuacuauguaguauuggcuc

SEQ ID NO: 21301 - RNA, 22 nt, Homo sapiens
uuacugcuuaagugauucaaca

SEQ ID NO: 21302 - RNA, 22 nt, Homo sapiens
uuacuggcuuucacugguguua

SEQ ID NO: 21303 - RNA, 22 nt, Homo sapiens
uuacugcuagcugugugcucuu

SEQ ID NO: 21304 - RNA, 22 nt, Homo sapiens
uuaugguuuuuagcagaguaau

SEQ ID NO: 21305 - RNA, 22 nt, Homo sapiens
uucacugcauuucagccugggc

SEQ ID NO: 21306 - RNA, 22 nt, Homo sapiens
uuaggcucuuuaucaguuaacu

SEQ ID NO: 21307 - RNA, 17 nt, Homo sapiens
uuaugagacuucuuagc

SEQ ID NO: 21308 - RNA, 22 nt, Homo sapiens
uuaucaaacccuaggagguggu

SEQ ID NO: 21309 - RNA, 22 nt, Homo sapiens
uuagaugguucaccaugaguag

SEQ ID NO: 21310 - RNA, 22 nt, Homo sapiens
uuggucagcuagauuauucccu

SEQ ID NO: 21311 - RNA, 22 nt, Homo sapiens
uuggucaggagccucccucuuu

SEQ ID NO: 21312 - RNA, 22 nt, Homo sapiens
uugguaguaaucccucacaaaa

SEQ ID NO: 21313 - RNA, 22 nt, Homo sapiens
uuguaaacaucuguacauugcu

SEQ ID NO: 21314 - RNA, 22 nt, Homo sapiens
uuguaagaaucuagcucuuuau

SEQ ID NO: 21315 - RNA, 22 nt, Homo sapiens
uuguaauguuaggguguccaug

SEQ ID NO: 21316 - RNA, 22 nt, Homo sapiens
uuguaaucaacacaucauuggg

SEQ ID NO: 21317 - RNA, 22 nt, Homo sapiens
uugucauggucuugauccauua

SEQ ID NO: 21318 - RNA, 22 nt, Homo sapiens
uugguaaaaugaccacagacau

SEQ ID NO: 21319 - RNA, 22 nt, Homo sapiens
uuggguagugaguuccuccagg

SEQ ID NO: 21320 - RNA, 22 nt, Homo sapiens
uugguaaucccuagugucuaga

SEQ ID NO: 21321 - RNA, 22 nt, Homo sapiens
uugggaauguccuaauaucucg

SEQ ID NO: 21322 - RNA, 21 nt, Homo sapiens
uuggggaauggagagguuuuc

SEQ ID NO: 21323 - RNA, 22 nt, Homo sapiens
uuggaagacaaugcugauucuc

SEQ ID NO: 21324 - RNA, 20 nt, Homo sapiens
uuggaaaugugaauugggag

SEQ ID NO: 21325 - RNA, 22 nt, Homo sapiens
uuggaaguguguauguauagcu

SEQ ID NO: 21326 - RNA, 22 nt, Homo sapiens
uugcauaaguugaaccagccuu

SEQ ID NO: 21327 - RNA, 22 nt, Homo sapiens
uuggaaacauuuaugguaacag

SEQ ID NO: 21328 - RNA, 22 nt, Homo sapiens
uuggaaaccucugcagguguuu

SEQ ID NO: 21329 - RNA, 22 nt, Homo sapiens
uugugcuuuugagcugagauga

SEQ ID NO: 21330 - RNA, 22 nt, Homo sapiens
uugugguagugaaugagucuca

SEQ ID NO: 21331 - RNA, 22 nt, Homo sapiens
uugugguuuuagcacuguggau

SEQ ID NO: 21332 - RNA, 22 nt, Homo sapiens
uuuacagucuuuugugugaguc

SEQ ID NO: 21333 - RNA, 22 nt, Homo sapiens
uuuauagucaggaacuugagga

SEQ ID NO: 21334 - RNA, 19 nt, Homo sapiens
uuucaauguaaggauggag

SEQ ID NO: 21335 - RNA, 22 nt, Homo sapiens
uuucacagcaauugccuauugu

SEQ ID NO: 21336 - RNA, 23 nt, Homo sapiens
uuucacagaaggauuguagggcc

SEQ ID NO: 21337 - RNA, 22 nt, Homo sapiens
uuucacagagggcuucuuucua

SEQ ID NO: 21338 - RNA, 22 nt, Homo sapiens
uugcacauugauuuuguauccu

SEQ ID NO: 21339 - RNA, 22 nt, Homo sapiens
uugcaaacaucuuguuucacau

SEQ ID NO: 21340 - RNA, 22 nt, Homo sapiens
uugcaagauguucaugggcugu

SEQ ID NO: 21341 - RNA, 22 nt, Homo sapiens
uugagaguggcagagguggaac

SEQ ID NO: 21342 - RNA, 22 nt, Homo sapiens
uugagaaucuuucgaauguucu

SEQ ID NO: 21343 - RNA, 22 nt, Homo sapiens
uugagacggagucuugcucuuu

SEQ ID NO: 21344 - RNA, 22 nt, Homo sapiens
uugaaguagguaccguucaauu

SEQ ID NO: 21345 - RNA, 22 nt, Homo sapiens
uucaucuggcaauucagagauu

SEQ ID NO: 21346 - RNA, 22 nt, Homo sapiens
uucagaugcacacuguagucua

SEQ ID NO: 21347 - RNA, 22 nt, Homo sapiens
uugaaaguaaacaucacaaaga

SEQ ID NO: 21348 - RNA, 20 nt, Homo sapiens
uucuugaguuaacaaguuac

SEQ ID NO: 21349 - RNA, 22 nt, Homo sapiens
uaagugaauguuggcuacugaa

SEQ ID NO: 21350 - RNA, 22 nt, Homo sapiens
uaagugaauuucacuacugagu

SEQ ID NO: 21351 - RNA, 22 nt, Homo sapiens
uaagugcaugauuacaugcaua

SEQ ID NO: 21352 - RNA, 22 nt, Homo sapiens
uaccauguauguuucuccauug

SEQ ID NO: 21353 - RNA, 22 nt, Homo sapiens
uacaugcaugggcaugugugca

SEQ ID NO: 21354 - RNA, 23 nt, Homo sapiens
uacugcauccuccgccucuaggg

SEQ ID NO: 21355 - RNA, 22 nt, Homo sapiens
uaccucagccaaugcccagaag

SEQ ID NO: 21356 - RNA, 20 nt, Homo sapiens
uagaaaguagaguggugguu

SEQ ID NO: 21357 - RNA, 22 nt, Homo sapiens
uagaaaguagggaagguaggau

SEQ ID NO: 21358 - RNA, 22 nt, Homo sapiens
guuggaguuaagcaguaaugaa

SEQ ID NO: 21359 - RNA, 22 nt, Homo sapiens
guuggcuuuuuaaggaaauugc

SEQ ID NO: 21360 - RNA, 22 nt, Homo sapiens
guuguggagucuucuguucugg

SEQ ID NO: 21361 - RNA, 22 nt, Homo sapiens
gugguuuuaucccagaaauuaa

SEQ ID NO: 21362 - RNA, 22 nt, Homo sapiens
gugguuuuuaaaguaccugugg

SEQ ID NO: 21363 - RNA, 22 nt, Homo sapiens
guguaaaacaauuagaggauuu

SEQ ID NO: 21364 - RNA, 20 nt, Homo sapiens
guguaagagcaagcuuccua

SEQ ID NO: 21365 - RNA, 22 nt, Homo sapiens
gugguaucauuuaaccauuaga

SEQ ID NO: 21366 - RNA, 22 nt, Homo sapiens
gugguuguuggaguggcaauuu

SEQ ID NO: 21367 - RNA, 22 nt, Homo sapiens
uaaagcuauuauaguuauguuu

SEQ ID NO: 21368 - RNA, 23 nt, Homo sapiens
uaacauugcaugauuaccugcau

SEQ ID NO: 21369 - RNA, 21 nt, Homo sapiens
uaacccugaaggagcucugga

SEQ ID NO: 21370 - RNA, 22 nt, Homo sapiens
uaacugcaaccucugccugcug

SEQ ID NO: 21371 - RNA, 22 nt, Homo sapiens
uaagagagcuccaucuuuuccu

SEQ ID NO: 21372 - RNA, 22 nt, Homo sapiens
uaacugucucccuugguccuga

SEQ ID NO: 21373 - RNA, 21 nt, Homo sapiens
uaaagcuagaaccuuagcuuu

SEQ ID NO: 21374 - RNA, 22 nt, Homo sapiens
uaaagcuagaauuguuccagca

SEQ ID NO: 21375 - RNA, 22 nt, Homo sapiens
uaaagcuaucacauuggugauu

SEQ ID NO: 21376 - RNA, 22 nt, Homo sapiens
uauugauuuucaguguucagcu

SEQ ID NO: 21377 - RNA, 22 nt, Homo sapiens
uauggguuucagagggugauag

SEQ ID NO: 21378 - RNA, 22 nt, Homo sapiens
uauggcccuuaaguauugguug

SEQ ID NO: 21379 - RNA, 17 nt, Homo sapiens
uauggcuauguuuagau

SEQ ID NO: 21380 - RNA, 22 nt, Homo sapiens
uauggcuucuuauucuuucccg

SEQ ID NO: 21381 - RNA, 22 nt, Homo sapiens
uaugagagcugguagguagaga

SEQ ID NO: 21382 - RNA, 22 nt, Homo sapiens
uaugagacugguuaauuuuugu

SEQ ID NO: 21383 - RNA, 22 nt, Homo sapiens
uauggcauuguuggugaugaua

SEQ ID NO: 21384 - RNA, 22 nt, Homo sapiens
uaucacaguaucuagcacagug

SEQ ID NO: 21385 - RNA, 20 nt, Homo sapiens
uaugacaaagccuagugagu

SEQ ID NO: 21386 - RNA, 22 nt, Homo sapiens
uauacugucuuuguaugccuag

SEQ ID NO: 21387 - RNA, 22 nt, Homo sapiens
uauacuguuuucuauaguggcu

SEQ ID NO: 21388 - RNA, 22 nt, Homo sapiens
uaucaacaggguggccagugua

SEQ ID NO: 21389 - RNA, 22 nt, Homo sapiens
uagaagcacuaucccuccuagu

SEQ ID NO: 21390 - RNA, 22 nt, Homo sapiens
uagcuggaguuuuuguuauagg

SEQ ID NO: 21391 - RNA, 21 nt, Homo sapiens
uagcugcacccaggccuccuu

SEQ ID NO: 21392 - RNA, 22 nt, Homo sapiens
uagcugcauccugugcacucaa

SEQ ID NO: 21393 - RNA, 22 nt, Homo sapiens
uaggacauugcccuuguggaga

SEQ ID NO: 21394 - RNA, 22 nt, Homo sapiens
uaggagcacagcagcauguggg

SEQ ID NO: 21395 - RNA, 22 nt, Homo sapiens
uaggcaaaugcaagaguagaac

SEQ ID NO: 21396 - RNA, 22 nt, Homo sapiens
uaguugcauucaggauaugacg

SEQ ID NO: 21397 - RNA, 22 nt, Homo sapiens
uaguuaguagacucugauuauu

SEQ ID NO: 21398 - RNA, 20 nt, Homo sapiens
uaguggcaugcaccuguagc

SEQ ID NO: 21399 - RNA, 22 nt, Homo sapiens
uagugguaguagcaguaauauu

SEQ ID NO: 21400 - RNA, 22 nt, Homo sapiens
uagugguauuagcgauacuacu

SEQ ID NO: 21401 - RNA, 22 nt, Homo sapiens
uagggcaaggaacaguuaaaaa

SEQ ID NO: 21402 - RNA, 22 nt, Homo sapiens
uaggcgagauguguguuucaug

SEQ ID NO: 21403 - RNA, 22 nt, Homo sapiens
uaggugguuugaaauacucaag

SEQ ID NO: 21404 - RNA, 22 nt, Homo sapiens
guggaaaacauaugcuuguuga

SEQ ID NO: 21405 - RNA, 22 nt, Homo sapiens
gugccacaguguuaagggauuc

SEQ ID NO: 21406 - RNA, 22 nt, Homo sapiens
gugcagugugauccuuccguau

SEQ ID NO: 21407 - RNA, 22 nt, Homo sapiens
gugcauguccacuaguccauau

SEQ ID NO: 21408 - RNA, 22 nt, Homo sapiens
guggcgagaucauagcucauug

SEQ ID NO: 21409 - RNA, 21 nt, Homo sapiens
guggaaauggaauuuacuaau

SEQ ID NO: 21410 - RNA, 22 nt, Homo sapiens
gugggaagcuggaacucccucc

SEQ ID NO: 21411 - RNA, 22 nt, Homo sapiens
gugcaagagugacugcaguuuu

SEQ ID NO: 21412 - RNA, 22 nt, Homo sapiens
gugaaucuguuuucuucuguuc

SEQ ID NO: 21413 - RNA, 22 nt, Homo sapiens
gugaaguuuuugugaggccuaa

SEQ ID NO: 21414 - RNA, 22 nt, Homo sapiens
gucuuuguuuggucuguaucag

SEQ ID NO: 21415 - RNA, 22 nt, Homo sapiens
guccaaauccaugggauguaca

SEQ ID NO: 21416 - RNA, 22 nt, Homo sapiens
gucucuugguuuagagcauuua

SEQ ID NO: 21417 - RNA, 22 nt, Homo sapiens
gucuugcacuuaccuaagaacu

SEQ ID NO: 21418 - RNA, 22 nt, Homo sapiens
gucaucaucaguccucugugca

SEQ ID NO: 21419 - RNA, 22 nt, Homo sapiens
gucaguggauacugucucuguc

SEQ ID NO: 21420 - RNA, 22 nt, Homo sapiens
guaaucucagcuacuugggagc

SEQ ID NO: 21421 - RNA, 22 nt, Homo sapiens
guaaucucagcuacuugggagu

SEQ ID NO: 21422 - RNA, 22 nt, Homo sapiens
guaaucucagcuucuugggagg

SEQ ID NO: 21423 - RNA, 22 nt, Homo sapiens
guacacaacaugcagguuuguu

SEQ ID NO: 21424 - RNA, 22 nt, Homo sapiens
guacacauacauauaugugugu

SEQ ID NO: 21425 - RNA, 22 nt, Homo sapiens
guagaagcacagggccuguauu

SEQ ID NO: 21426 - RNA, 22 nt, Homo sapiens
ggaaauguuggugucaugaguu

SEQ ID NO: 21427 - RNA, 22 nt, Homo sapiens
gcugugguuuaguagaaagaag

SEQ ID NO: 21428 - RNA, 22 nt, Homo sapiens
gcguugcacuccagccugggua

SEQ ID NO: 21429 - RNA, 22 nt, Homo sapiens
gcuacugucuaucugugcuucu

SEQ ID NO: 21430 - RNA, 22 nt, Homo sapiens
gcugauggugcaguucuagccu

SEQ ID NO: 21431 - RNA, 22 nt, Homo sapiens
gcucguuuuugccucugguugc

SEQ ID NO: 21432 - RNA, 22 nt, Homo sapiens
gggaugauuaugguucacuaca

SEQ ID NO: 21433 - RNA, 20 nt, Homo sapiens
gggaugugagguacacucuu

SEQ ID NO: 21434 - RNA, 22 nt, Homo sapiens
gggcaagaagucuuguaguuuu

SEQ ID NO: 21435 - RNA, 22 nt, Homo sapiens
ggcucguguuuucuguccaguu

SEQ ID NO: 21436 - RNA, 22 nt, Homo sapiens
ggcugguuuucaguuacugagu

SEQ ID NO: 21437 - RNA, 22 nt, Homo sapiens
ggcuuggaggaaugugagggcu

SEQ ID NO: 21438 - RNA, 22 nt, Homo sapiens
gggaagugugguuucuuuacag

SEQ ID NO: 21439 - RNA, 22 nt, Homo sapiens
gggaggucauuguaaggucuua

SEQ ID NO: 21440 - RNA, 22 nt, Homo sapiens
ggucuuggagaauuguccuggg

SEQ ID NO: 21441 - RNA, 22 nt, Homo sapiens
ggugcagcacaccaacauggca

SEQ ID NO: 21442 - RNA, 22 nt, Homo sapiens
ggucauagagaauucaccagga

SEQ ID NO: 21443 - RNA, 22 nt, Homo sapiens
ggcaaggugcuacagacaguga

SEQ ID NO: 21444 - RNA, 20 nt, Homo sapiens
ggagagugacauaauucugg

SEQ ID NO: 21445 - RNA, 22 nt, Homo sapiens
ucucaugaagguggagaguagg

SEQ ID NO: 21446 - RNA, 22 nt, Homo sapiens
ucucuguuugucuguuacuggu

SEQ ID NO: 21447 - RNA, 22 nt, Homo sapiens
ucugguguuauucauguaguuu

SEQ ID NO: 21448 - RNA, 23 nt, Homo sapiens
ucugguguugucaaaugcugguu

SEQ ID NO: 21449 - RNA, 22 nt, Homo sapiens
ucugggguuagucaaagguaug

SEQ ID NO: 21450 - RNA, 21 nt, Homo sapiens
ucugagucauucaguggccug

SEQ ID NO: 21451 - RNA, 22 nt, Homo sapiens
ucuuuaguaauuucuguaaggc

SEQ ID NO: 21452 - RNA, 22 nt, Homo sapiens
ucuguggucagcauccgccacu

SEQ ID NO: 21453 - RNA, 22 nt, Homo sapiens
ucuugguaaugucacauuuccu

SEQ ID NO: 21454 - RNA, 22 nt, Homo sapiens
ucuugcauuuuuaaauagugcu

SEQ ID NO: 21455 - RNA, 22 nt, Homo sapiens
ugaaugugauggguuucaugug

SEQ ID NO: 21456 - RNA, 22 nt, Homo sapiens
ugaaaugcagaacuuuaggucu

SEQ ID NO: 21457 - RNA, 22 nt, Homo sapiens
ugaauauguuaauuagcaucau

SEQ ID NO: 21458 - RNA, 22 nt, Homo sapiens
ugaaauuuuuuauucguuggcu

SEQ ID NO: 21459 - RNA, 22 nt, Homo sapiens
ucacacucucaccaacauuugg

SEQ ID NO: 21460 - RNA, 22 nt, Homo sapiens
ucacagaggagaagaccuuuaa

SEQ ID NO: 21461 - RNA, 22 nt, Homo sapiens
ucacagauaaauaaagaugauu

SEQ ID NO: 21462 - RNA, 20 nt, Homo sapiens
uauuugguuauuuccauggu

SEQ ID NO: 21463 - RNA, 22 nt, Homo sapiens
uauuugguagcuauuuugcagu

SEQ ID NO: 21464 - RNA, 22 nt, Homo sapiens
uauugcacgccagccugagcaa

SEQ ID NO: 21465 - RNA, 22 nt, Homo sapiens
ucacauggaaaaguccaguaaa

SEQ ID NO: 21466 - RNA, 22 nt, Homo sapiens
ucacugugcacauaugauaggu

SEQ ID NO: 21467 - RNA, 22 nt, Homo sapiens
ucacugugguuuugaugugcau

SEQ ID NO: 21468 - RNA, 22 nt, Homo sapiens
ucacuauagaaaacagugugga

SEQ ID NO: 21469 - RNA, 22 nt, Homo sapiens
ucacugagcuagaucacuugac

SEQ ID NO: 21470 - RNA, 22 nt, Homo sapiens
ucauggguuuugguccaagcaa

SEQ ID NO: 21471 - RNA, 21 nt, Homo sapiens
ucaugccacugcacuuuagcc

SEQ ID NO: 21472 - RNA, 20 nt, Homo sapiens
ucaugccacugcgcuccagc

SEQ ID NO: 21473 - RNA, 23 nt, Homo sapiens
ucaucacagcauuuccugguauu

SEQ ID NO: 21474 - RNA, 22 nt, Homo sapiens
ucauauugcgguucauugacuu

SEQ ID NO: 21475 - RNA, 22 nt, Homo sapiens
ucauugcauguuaauuaaacag

SEQ ID NO: 21476 - RNA, 22 nt, Homo sapiens
ucauuagucaccuagccagcuu

SEQ ID NO: 21477 - RNA, 22 nt, Homo sapiens
uccauguaguugagcggcuuug

SEQ ID NO: 21478 - RNA, 22 nt, Homo sapiens
uccaugagaauaguuaggcucu

SEQ ID NO: 21479 - RNA, 20 nt, Homo sapiens
ucauagcuuuuuccacuuua

SEQ ID NO: 21480 - RNA, 22 nt, Homo sapiens
ucagugucugugcaccgcugga

SEQ ID NO: 21481 - RNA, 22 nt, Homo sapiens
ucagguugcuaaguauaauauu

SEQ ID NO: 21482 - RNA, 23 nt, Homo sapiens
ucaguacucuauaagugccagcu

SEQ ID NO: 21483 - RNA, 22 nt, Homo sapiens
uggauggagaggcuugugaugc

SEQ ID NO: 21484 - RNA, 22 nt, Homo sapiens
uggauggugauuggaucaugga

SEQ ID NO: 21485 - RNA, 22 nt, Homo sapiens
uggaugaagagaugguaguugc

SEQ ID NO: 21486 - RNA, 22 nt, Homo sapiens
uggcaagagggaugcaagguuu

SEQ ID NO: 21487 - RNA, 22 nt, Homo sapiens
uggagugucaguuuccagaguu

SEQ ID NO: 21488 - RNA, 22 nt, Homo sapiens
uggccuguaacgcugucucagc

SEQ ID NO: 21489 - RNA, 20 nt, Homo sapiens
uggcaagauggcagaauaga

SEQ ID NO: 21490 - RNA, 22 nt, Homo sapiens
uggcaauaaaaugcaguuacuu

SEQ ID NO: 21491 - RNA, 22 nt, Homo sapiens
uggcacuggagauacauuaaua

SEQ ID NO: 21492 - RNA, 19 nt, Homo sapiens
ugcuuauccagagaaacuu

SEQ ID NO: 21493 - RNA, 22 nt, Homo sapiens
uggaauguuauggcuuuaaucu

SEQ ID NO: 21494 - RNA, 17 nt, Homo sapiens
uggaaugucuaagccug

SEQ ID NO: 21495 - RNA, 22 nt, Homo sapiens
uggaaugucuauguuuuugauu

SEQ ID NO: 21496 - RNA, 22 nt, Homo sapiens
uggaauguggacucuuaugggg

SEQ ID NO: 21497 - RNA, 22 nt, Homo sapiens
uggaauguagcguugacacgag

SEQ ID NO: 21498 - RNA, 22 nt, Homo sapiens
uggaauguuuaucaaaacagua

SEQ ID NO: 21499 - RNA, 22 nt, Homo sapiens
uggaaguaaucaugagguagca

SEQ ID NO: 21500 - RNA, 22 nt, Homo sapiens
uggaagucauugagguguguua

SEQ ID NO: 21501 - RNA, 22 nt, Homo sapiens
uggaaucaucaacgaaugaaau

SEQ ID NO: 21502 - RNA, 22 nt, Homo sapiens
ugcugcaaacaggcaucugugg

SEQ ID NO: 21503 - RNA, 21 nt, Homo sapiens
ugcauuggagaauguuucuca

SEQ ID NO: 21504 - RNA, 21 nt, Homo sapiens
ugcaagaaucaggaagcugcc

SEQ ID NO: 21505 - RNA, 22 nt, Homo sapiens
ugcaagacuaaaccuuccccuc

SEQ ID NO: 21506 - RNA, 22 nt, Homo sapiens
ugcaagaugagauuuuggaugg

SEQ ID NO: 21507 - RNA, 22 nt, Homo sapiens
ugauuggagaugaauuucguuu

SEQ ID NO: 21508 - RNA, 22 nt, Homo sapiens
ugauugucucuccugccccauc

SEQ ID NO: 21509 - RNA, 22 nt, Homo sapiens
ugauuugucugcaggaauagug

SEQ ID NO: 21510 - RNA, 22 nt, Homo sapiens
ugauuagaggaaugguagauua

SEQ ID NO: 21511 - RNA, 22 nt, Homo sapiens
ugcaaauuauugggccccaacu

SEQ ID NO: 21512 - RNA, 22 nt, Homo sapiens
ugcaaacuuccuugggcagcau

SEQ ID NO: 21513 - RNA, 22 nt, Homo sapiens
ugcaaaguccucauucuuaccc

SEQ ID NO: 21514 - RNA, 22 nt, Homo sapiens
ugaguacugauuuaagauacac

SEQ ID NO: 21515 - RNA, 22 nt, Homo sapiens
ugaggugcagcaauccucaugu

SEQ ID NO: 21516 - RNA, 22 nt, Homo sapiens
ugagauguguccagaucuaguu

SEQ ID NO: 21517 - RNA, 22 nt, Homo sapiens
ugagauguuuagauuguugucu

SEQ ID NO: 21518 - RNA, 22 nt, Homo sapiens
ugaguauguuuagaaguaaagg

SEQ ID NO: 21519 - RNA, 22 nt, Homo sapiens
ugagucuguuccaaagaaauaa

SEQ ID NO: 21520 - RNA, 22 nt, Homo sapiens
ugagucauguaauaaugcugcu

SEQ ID NO: 21521 - RNA, 22 nt, Homo sapiens
ugaguguguaugugcauacaca

SEQ ID NO: 21522 - RNA, 21 nt, Homo sapiens
ugaucacaugaaaaccaugca

SEQ ID NO: 21523 - RNA, 21 nt, Homo sapiens
ugauaugguuuggauaugugu

SEQ ID NO: 21524 - RNA, 22 nt, Homo sapiens
ugacagcuguugaggcauuuau

SEQ ID NO: 21525 - RNA, 22 nt, Homo sapiens
ugacaagauauggucuuaucaa

SEQ ID NO: 21526 - RNA, 22 nt, Homo sapiens
ugacaagugauuaaggcauauu

SEQ ID NO: 21527 - RNA, 22 nt, Homo sapiens
ugagagucacugaccugguaua

SEQ ID NO: 21528 - RNA, 20 nt, Homo sapiens
ugagauccacgugaaguaug

SEQ ID NO: 21529 - RNA, 22 nt, Homo sapiens
auccacaugcaguuggaaacag

SEQ ID NO: 21530 - RNA, 21 nt, Homo sapiens
aucagagacccaggcuuccuc

SEQ ID NO: 21531 - RNA, 22 nt, Homo sapiens
auccaguguuuucuuuugucac

SEQ ID NO: 21532 - RNA, 22 nt, Homo sapiens
aucucuugccagucagaauggu

SEQ ID NO: 21533 - RNA, 22 nt, Homo sapiens
aucuuuggauacuugauauagu

SEQ ID NO: 21534 - RNA, 21 nt, Homo sapiens
auccuucuuuuucaaccugug

SEQ ID NO: 21535 - RNA, 22 nt, Homo sapiens
auggcaaaaaaugcaauuacuu

SEQ ID NO: 21536 - RNA, 22 nt, Homo sapiens
auggaagaaacgauuuucugga

SEQ ID NO: 21537 - RNA, 19 nt, Homo sapiens
augccucaguuuuguacuu

SEQ ID NO: 21538 - RNA, 22 nt, Homo sapiens
augcaauggaaaggacaauuac

SEQ ID NO: 21539 - RNA, 22 nt, Homo sapiens
augcaagaaauaucucuuuuuc

SEQ ID NO: 21540 - RNA, 22 nt, Homo sapiens
augcaagacaccacgugagaau

SEQ ID NO: 21541 - RNA, 22 nt, Homo sapiens
augcuacauucuacaauuaggc

SEQ ID NO: 21542 - RNA, 22 nt, Homo sapiens
augacugucuugcagaggcuau

SEQ ID NO: 21543 - RNA, 22 nt, Homo sapiens
augacauagcauggugccugcu

SEQ ID NO: 21544 - RNA, 22 nt, Homo sapiens
augaccaugauccuugccgacc

SEQ ID NO: 21545 - RNA, 20 nt, Homo sapiens
agcugguuuuaugaaucuuu

SEQ ID NO: 21546 - RNA, 18 nt, Homo sapiens
agcaucacugaucauccu

SEQ ID NO: 21547 - RNA, 22 nt, Homo sapiens
agcugguucuuugccuuguaga

SEQ ID NO: 21548 - RNA, 22 nt, Homo sapiens
agcugguuuaauaugcugucug

SEQ ID NO: 21549 - RNA, 22 nt, Homo sapiens
agcuucacaaugcagagggcag

SEQ ID NO: 21550 - RNA, 22 nt, Homo sapiens
agcuugugcuguaugaagggcc

SEQ ID NO: 21551 - RNA, 22 nt, Homo sapiens
agugcacucuuuccucucuuac

SEQ ID NO: 21552 - RNA, 22 nt, Homo sapiens
aguggguguuccauuggauaaa

SEQ ID NO: 21553 - RNA, 22 nt, Homo sapiens
agucauagaguuugcccuucuc

SEQ ID NO: 21554 - RNA, 22 nt, Homo sapiens
agugacuagaauaugaauuuua

SEQ ID NO: 21555 - RNA, 22 nt, Homo sapiens
agucauaggagagauaucacug

SEQ ID NO: 21556 - RNA, 22 nt, Homo sapiens
auaaagguaauaauaguugcau

SEQ ID NO: 21557 - RNA, 22 nt, Homo sapiens
auaaaguagaggugaggugcau

SEQ ID NO: 21558 - RNA, 22 nt, Homo sapiens
auaaagcaaauaggacuauugc

SEQ ID NO: 21559 - RNA, 22 nt, Homo sapiens
auagaaucaucugugcacuagu

SEQ ID NO: 21560 - RNA, 22 nt, Homo sapiens
auagcagcagcuaguagugaua

SEQ ID NO: 21561 - RNA, 22 nt, Homo sapiens
auagcaggagaauggucauggg

SEQ ID NO: 21562 - RNA, 22 nt, Homo sapiens
auagcauaucccacaugucaga

SEQ ID NO: 21563 - RNA, 22 nt, Homo sapiens
agcagguauucgggucaugggg

SEQ ID NO: 21564 - RNA, 22 nt, Homo sapiens
agcagcuuugaucugaaugauu

SEQ ID NO: 21565 - RNA, 22 nt, Homo sapiens
agauggugugcuaggaaaugua

SEQ ID NO: 21566 - RNA, 18 nt, Homo sapiens
agaugguguugcuucugu

SEQ ID NO: 21567 - RNA, 22 nt, Homo sapiens
agaugguguuuucucaccagau

SEQ ID NO: 21568 - RNA, 22 nt, Homo sapiens
agcaaaucuaugaauguauauu

SEQ ID NO: 21569 - RNA, 22 nt, Homo sapiens
agaauucugucauguuuauauu

SEQ ID NO: 21570 - RNA, 22 nt, Homo sapiens
acauugcucuuaccaaguuugu

SEQ ID NO: 21571 - RNA, 22 nt, Homo sapiens
acugcacuccagccucaugaca

SEQ ID NO: 21572 - RNA, 22 nt, Homo sapiens
acugcacucuagccccugcgac

SEQ ID NO: 21573 - RNA, 20 nt, Homo sapiens
acugcacuucagccugcugg

SEQ ID NO: 21574 - RNA, 20 nt, Homo sapiens
acugcauuuaguccucagga

SEQ ID NO: 21575 - RNA, 20 nt, Homo sapiens
agaaccuguaguguagaggg

SEQ ID NO: 21576 - RNA, 22 nt, Homo sapiens
agaaagcgcuucccuuugcugg

SEQ ID NO: 21577 - RNA, 22 nt, Homo sapiens
agaaagugcuucccuuugguga

SEQ ID NO: 21578 - RNA, 20 nt, Homo sapiens
acaguagaagggauuucaaa

SEQ ID NO: 21579 - RNA, 22 nt, Homo sapiens
acaguagugggcuacagaauca

SEQ ID NO: 21580 - RNA, 22 nt, Homo sapiens
acagugacagaaagcugauuau

SEQ ID NO: 21581 - RNA, 22 nt, Homo sapiens
acaccaugucuguuucugguuu

SEQ ID NO: 21582 - RNA, 22 nt, Homo sapiens
aaucccauuucucuguguuuuu

SEQ ID NO: 21583 - RNA, 22 nt, Homo sapiens
aaucacuuugcuacaaggcagu

SEQ ID NO: 21584 - RNA, 22 nt, Homo sapiens
aaucagcacacugugcuuucca

SEQ ID NO: 21585 - RNA, 22 nt, Homo sapiens
aaucauauugucugccaagagg

SEQ ID NO: 21586 - RNA, 23 nt, Homo sapiens
aaguucaugcucaucuguuacac

SEQ ID NO: 21587 - RNA, 22 nt, Homo sapiens
aagugguguuuguauuuaugca

SEQ ID NO: 21588 - RNA, 22 nt, Homo sapiens
aaguguaaguuaauguuuaggu

SEQ ID NO: 21589 - RNA, 22 nt, Homo sapiens
aaguggcauugaggaaaaaaau

SEQ ID NO: 21590 - RNA, 22 nt, Homo sapiens
uuuuaguugcucagguauucuc

SEQ ID NO: 21591 - RNA, 22 nt, Homo sapiens
aaggugcuguaagcauccaugu

SEQ ID NO: 21592 - RNA, 18 nt, Homo sapiens
aaggugcuucuguucuga

SEQ ID NO: 21593 - RNA, 22 nt, Homo sapiens
aaguaaaucuuaugucagggag

SEQ ID NO: 21594 - RNA, 22 nt, Homo sapiens
aaguagcuggaugcaguggcac

SEQ ID NO: 21595 - RNA, 22 nt, Homo sapiens
aaguaagcauccaauaaauguu

SEQ ID NO: 21596 - RNA, 22 nt, Homo sapiens
aaguaauugagguuuuugcugu

SEQ ID NO: 21597 - RNA, 22 nt, Homo sapiens
gagaucuauuccucacccuucu

SEQ ID NO: 21598 - RNA, 22 nt, Homo sapiens
gagaacaguguuguauuuuuuc

SEQ ID NO: 21599 - RNA, 22 nt, Homo sapiens
gagaaugaugauuuccaauuuc

SEQ ID NO: 21600 - RNA, 22 nt, Homo sapiens
gacagugagaugucaugugaaa

SEQ ID NO: 21601 - RNA, 22 nt, Homo sapiens
gacaguguggcgauuccucaag

SEQ ID NO: 21602 - RNA, 22 nt, Homo sapiens
gacaucauuaugagauuuaaac

SEQ ID NO: 21603 - RNA, 20 nt, Homo sapiens
gacaaaccuagaugguacag

SEQ ID NO: 21604 - RNA, 22 nt, Homo sapiens
cuuuuacacugcuggugggaau

SEQ ID NO: 21605 - RNA, 22 nt, Homo sapiens
gaucuguguuuguaugcauaag

SEQ ID NO: 21606 - RNA, 22 nt, Homo sapiens
gaucacauguguacucaaugug

SEQ ID NO: 21607 - RNA, 22 nt, Homo sapiens
gaucacauuguuucauacauau

SEQ ID NO: 21608 - RNA, 22 nt, Homo sapiens
gaucagagugaaccuuguuaug

SEQ ID NO: 21609 - RNA, 22 nt, Homo sapiens
gaucccauuggcugccaugugg

SEQ ID NO: 21610 - RNA, 22 nt, Homo sapiens
gauauugacuuauucuauguuu

SEQ ID NO: 21611 - RNA, 22 nt, Homo sapiens
gauuccacuuucaaauucaaau

SEQ ID NO: 21612 - RNA, 22 nt, Homo sapiens
gaugugaaaucauaguuucuag

SEQ ID NO: 21613 - RNA, 22 nt, Homo sapiens
gagguggugguggaggcauagc

SEQ ID NO: 21614 - RNA, 22 nt, Homo sapiens
gagauucuucaauauuuauucu

SEQ ID NO: 21615 - RNA, 22 nt, Homo sapiens
gagauggaguuucacuucgcuc

SEQ ID NO: 21616 - RNA, 22 nt, Homo sapiens
gagauguaagaauuuauuuguu

SEQ ID NO: 21617 - RNA, 22 nt, Homo sapiens
gagguugggaugagggauacag

SEQ ID NO: 21618 - RNA, 22 nt, Homo sapiens
gagguguagucaugccaagauc

SEQ ID NO: 21619 - RNA, 22 nt, Homo sapiens
cuggacguugaggcugcaguga

SEQ ID NO: 21620 - RNA, 22 nt, Homo sapiens
cuguaacagaauaaauuuguuu

SEQ ID NO: 21621 - RNA, 22 nt, Homo sapiens
cuguugcaguuauggcugcagg

SEQ ID NO: 21622 - RNA, 19 nt, Homo sapiens
cuguuguacuccaggcauu

SEQ ID NO: 21623 - RNA, 22 nt, Homo sapiens
cuguucaaauuguuugugaagu

SEQ ID NO: 21624 - RNA, 22 nt, Homo sapiens
cuguaugugagaaauaauaagu

SEQ ID NO: 21625 - RNA, 22 nt, Homo sapiens
cuuuggucaauugcugcgggga

SEQ ID NO: 21626 - RNA, 22 nt, Homo sapiens
cuuguucuccuaagaugaaugc

SEQ ID NO: 21627 - RNA, 22 nt, Homo sapiens
cuucaagucuuuggauaauuag

SEQ ID NO: 21628 - RNA, 22 nt, Homo sapiens
cuucaaguaauucugauggcua

SEQ ID NO: 21629 - RNA, 19 nt, Homo sapiens
cuuaggugaccaguuccca

SEQ ID NO: 21630 - RNA, 22 nt, Homo sapiens
cugcuguuguuaacuuuuggag

SEQ ID NO: 21631 - RNA, 18 nt, Homo sapiens
cugccagugugcucuccg

SEQ ID NO: 21632 - RNA, 22 nt, Homo sapiens
cugauuguuugccucuaaaauc

SEQ ID NO: 21633 - RNA, 22 nt, Homo sapiens
cugagaucguggggcugcuguc

SEQ ID NO: 21634 - RNA, 22 nt, Homo sapiens
cugagcaauauagugagaucuu

SEQ ID NO: 21635 - RNA, 22 nt, Homo sapiens
cucacugucaacauguauuugg

SEQ ID NO: 21636 - RNA, 22 nt, Homo sapiens
cugagaucuuauuagaaaugca

SEQ ID NO: 21637 - RNA, 22 nt, Homo sapiens
cuagacacugacguuccuccga

SEQ ID NO: 21638 - RNA, 22 nt, Homo sapiens
cuauguaccuggaacuguauua

SEQ ID NO: 21639 - RNA, 22 nt, Homo sapiens
cuauucacaauagccaagauuu

SEQ ID NO: 21640 - RNA, 19 nt, Homo sapiens
cuauugcacauagcugaag

SEQ ID NO: 21641 - RNA, 22 nt, Homo sapiens
caugcauuggucuauuauguga

SEQ ID NO: 21642 - RNA, 22 nt, Homo sapiens
cauuguccuccuggggcuauuu

SEQ ID NO: 21643 - RNA, 22 nt, Homo sapiens
ccaaguguuuucauuguuccau

SEQ ID NO: 21644 - RNA, 22 nt, Homo sapiens
ccagaguucuaggcauuggaaa

SEQ ID NO: 21645 - RNA, 22 nt, Homo sapiens
ccacacugucuuggugggaaac

SEQ ID NO: 21646 - RNA, 23 nt, Homo sapiens
ccacacuguuuagaauggcauca

SEQ ID NO: 21647 - RNA, 22 nt, Homo sapiens
ccacagucuaugcaacaagguc

SEQ ID NO: 21648 - RNA, 22 nt, Homo sapiens
ccacauuggaaaggaucccccc

SEQ ID NO: 21649 - RNA, 22 nt, Homo sapiens
cccgugucuuggucuagggccu

SEQ ID NO: 21650 - RNA, 22 nt, Homo sapiens
cguugcacuccagccugggcaa

SEQ ID NO: 21651 - RNA, 20 nt, Homo sapiens
cguugcacuccagccugggc

SEQ ID NO: 21652 - RNA, 19 nt, Homo sapiens
ccucaaguacuaauauguu

SEQ ID NO: 21653 - RNA, 22 nt, Homo sapiens
cagcuggugggagcuggguucc

SEQ ID NO: 21654 - RNA, 22 nt, Homo sapiens
caggugguauuugguuuucugu

SEQ ID NO: 21655 - RNA, 20 nt, Homo sapiens
cagucauagacaucagaguc

SEQ ID NO: 21656 - RNA, 22 nt, Homo sapiens
caucacuuuuccuuuuacagau

SEQ ID NO: 21657 - RNA, 22 nt, Homo sapiens
cagugguuuucucaguucagca

SEQ ID NO: 21658 - RNA, 21 nt, Homo sapiens
cauaaugcuacuuauuuuaug

SEQ ID NO: 21659 - RNA, 22 nt, Homo sapiens
auguggaaagcagcaugauaug

SEQ ID NO: 21660 - RNA, 22 nt, Homo sapiens
auggcccaguuugcuaucccua

SEQ ID NO: 21661 - RNA, 22 nt, Homo sapiens
auggcuauucuucuuuugucag

SEQ ID NO: 21662 - RNA, 22 nt, Homo sapiens
auuaaguaaugguuccaauaau

SEQ ID NO: 21663 - RNA, 22 nt, Homo sapiens
caaaguaauuacgguuuuggcc

SEQ ID NO: 21664 - RNA, 22 nt, Homo sapiens
caagacuguccaacauauuggg

SEQ ID NO: 21665 - RNA, 22 nt, Homo sapiens
auugucacugugcuccaccagu

SEQ ID NO: 21666 - RNA, 22 nt, Homo sapiens
auugucauuuucugagaaguaa

SEQ ID NO: 21667 - RNA, 22 nt, Homo sapiens
auugcacuggggguuagaauuu

SEQ ID NO: 21668 - RNA, 22 nt, Homo sapiens
auugcacucugaucugcacucc

SEQ ID NO: 21669 - RNA, 22 nt, Homo sapiens
auugcacuccagucucaccagg

SEQ ID NO: 21670 - RNA, 22 nt, Homo sapiens
auugaacuuuugucacugacau

SEQ ID NO: 21671 - RNA, 22 nt, Homo sapiens
aacagucaauugcugaugaccu

SEQ ID NO: 21672 - RNA, 22 nt, Homo sapiens
aacaguguuuuggguuuucugg

SEQ ID NO: 21673 - RNA, 21 nt, Homo sapiens
aaaugcacauuacugcuggug

SEQ ID NO: 21674 - RNA, 22 nt, Homo sapiens
aaaugcacaaagauuuugcacu

SEQ ID NO: 21675 - RNA, 22 nt, Homo sapiens
aacagagcuggugacuccaggu

SEQ ID NO: 21676 - RNA, 23 nt, Homo sapiens
aaaugcucucaggugccaguaga

SEQ ID NO: 21677 - RNA, 22 nt, Homo sapiens
aaggugcucucuuauguagaaa

SEQ ID NO: 21678 - RNA, 17 nt, Homo sapiens
aaggugcuucgaccucc

SEQ ID NO: 21679 - RNA, 22 nt, Homo sapiens
aagccagugugacaggaaacuu

SEQ ID NO: 21680 - RNA, 22 nt, Homo sapiens
aagcaucacuggaggcagccau

SEQ ID NO: 21681 - RNA, 22 nt, Homo sapiens
aagaugcagucauacuggagga

SEQ ID NO: 21682 - RNA, 22 nt, Homo sapiens
aagaugcagucauacuggagua

SEQ ID NO: 21683 - RNA, 22 nt, Homo sapiens
aagcaggugaugagugggugug

SEQ ID NO: 21684 - RNA, 22 nt, Homo sapiens
aaaagcuuagaugggcuuguau

SEQ ID NO: 21685 - RNA, 22 nt, Homo sapiens
aaaguacugggauuggccgggu

SEQ ID NO: 21686 - RNA, 17 nt, Homo sapiens
aaaguccuuugcuaucu

SEQ ID NO: 21687 - RNA, 19 nt, Homo sapiens
aaaguguuuuaaagaggau

SEQ ID NO: 21688 - RNA, 22 nt, Homo sapiens
aaaguguuucugcaguagguuu

SEQ ID NO: 21689 - RNA, 19 nt, Homo sapiens
aaaguucuucccuuuggag

SEQ ID NO: 21690 - RNA, 22 nt, Homo sapiens
aaaguucuugcugaaggauuau

SEQ ID NO: 21691 - RNA, 22 nt, Homo sapiens
aaaguucugcguuagggcuaaa

SEQ ID NO: 21692 - RNA, 22 nt, Homo sapiens
aaaguguguuuccaaccugugg

SEQ ID NO: 21693 - RNA, 22 nt, Homo sapiens
aaagugauguccaggcuuucag

SEQ ID NO: 21694 - RNA, 22 nt, Homo sapiens
aaagguaguacuucuagaaggg

SEQ ID NO: 21695 - RNA, 22 nt, Homo sapiens
aaaguaauugcaguuuuugcaa

SEQ ID NO: 21696 - RNA, 22 nt, Homo sapiens
acugcacugucaaccuccuggg

SEQ ID NO: 21697 - RNA, 22 nt, Homo sapiens
acugcacuguccuagaguccuc

SEQ ID NO: 21698 - RNA, 22 nt, Homo sapiens
acugcauuugucccuuuugaac

SEQ ID NO: 21699 - RNA, 18 nt, Homo sapiens
acugcacuccauccuagg

SEQ ID NO: 21700 - RNA, 23 nt, Homo sapiens
acaguggugugaucuuggcucag

SEQ ID NO: 21701 - RNA, 22 nt, Homo sapiens
acaguggugcgaucucggcuca

SEQ ID NO: 21702 - RNA, 22 nt, Homo sapiens
acagugcuguggucaugggucu

SEQ ID NO: 21703 - RNA, 19 nt, Homo sapiens
acagugcuuugucagaagc

SEQ ID NO: 21704 - RNA, 18 nt, Homo sapiens
acccuucagcacugggcc

SEQ ID NO: 21705 - RNA, 22 nt, Homo sapiens
acuacugucagacugccacuga

SEQ ID NO: 21706 - RNA, 22 nt, Homo sapiens
acuaugcuuuucuuagaauuaa

SEQ ID NO: 21707 - RNA, 22 nt, Homo sapiens
acggcaguguggugcggucagg

SEQ ID NO: 21708 - RNA, 19 nt, Homo sapiens
acagcugguuuugguuucu

SEQ ID NO: 21709 - RNA, 22 nt, Homo sapiens
acagcagugccccacucuacug

SEQ ID NO: 21710 - RNA, 18 nt, Homo sapiens
acagugcuggcaugagau

SEQ ID NO: 21711 - RNA, 22 nt, Homo sapiens
aauugcauaaaauucaacucug

SEQ ID NO: 21712 - RNA, 22 nt, Homo sapiens
aauugcauugaauuuguagcuu

SEQ ID NO: 21713 - RNA, 22 nt, Homo sapiens
aauugcaucuguucuuugccag

SEQ ID NO: 21714 - RNA, 22 nt, Homo sapiens
acaaaguguuuucugaaggccu

SEQ ID NO: 21715 - RNA, 22 nt, Homo sapiens
acacaguaaauauguauugaau

SEQ ID NO: 21716 - RNA, 22 nt, Homo sapiens
acacaguaaauauugucuccuc

SEQ ID NO: 21717 - RNA, 22 nt, Homo sapiens
aaguugcuuuagguaagucaau

SEQ ID NO: 21718 - RNA, 23 nt, Homo sapiens
aaauuugccuauuauuccuaugg

SEQ ID NO: 21719 - RNA, 22 nt, Homo sapiens
aaauugcauugagcugcuuauu

SEQ ID NO: 21720 - RNA, 22 nt, Homo sapiens
agguuguguuugugauuagaua

SEQ ID NO: 21721 - RNA, 22 nt, Homo sapiens
aggugcuauauuucgaggauag

SEQ ID NO: 21722 - RNA, 22 nt, Homo sapiens
aggugcuaucugguuuuauagu

SEQ ID NO: 21723 - RNA, 22 nt, Homo sapiens
aggugguauuucaaaguggcag

SEQ ID NO: 21724 - RNA, 22 nt, Homo sapiens
aggugcuugagggaagaaauua

SEQ ID NO: 21725 - RNA, 22 nt, Homo sapiens
agcuuguuuucccauaacuaga

SEQ ID NO: 21726 - RNA, 21 nt, Homo sapiens
agcugguuuccacagugugcu

SEQ ID NO: 21727 - RNA, 22 nt, Homo sapiens
agcugguuuauuucuauauccu

SEQ ID NO: 21728 - RNA, 22 nt, Homo sapiens
agcuggcuguagcugcaagucu

SEQ ID NO: 21729 - RNA, 22 nt, Homo sapiens
agcuggcuguggagaaaccccu

SEQ ID NO: 21730 - RNA, 22 nt, Homo sapiens
aggacacugauguaugcugugg

SEQ ID NO: 21731 - RNA, 22 nt, Homo sapiens
aggaccauuguguagcagacau

SEQ ID NO: 21732 - RNA, 22 nt, Homo sapiens
aaaugcucuguggguaguaaug

SEQ ID NO: 21733 - RNA, 22 nt, Homo sapiens
aggaagugucuucuuuuaggca

SEQ ID NO: 21734 - RNA, 22 nt, Homo sapiens
aggaauuuaauguaugauaaua

SEQ ID NO: 21735 - RNA, 22 nt, Homo sapiens
aggaagacauauagaacuaaaa

SEQ ID NO: 21736 - RNA, 22 nt, Homo sapiens
agcugguuuauuucucacaaca

SEQ ID NO: 21737 - RNA, 22 nt, Homo sapiens
agacacuguugaaaaggcccca

SEQ ID NO: 21738 - RNA, 22 nt, Homo sapiens
agaauguaaacagaauagagga

SEQ ID NO: 21739 - RNA, 22 nt, Homo sapiens
agaauguaacucuaugaaggca

SEQ ID NO: 21740 - RNA, 22 nt, Homo sapiens
acugguuguuuaacugaauuga

SEQ ID NO: 21741 - RNA, 22 nt, Homo sapiens
agacaguguguguauauauggu

SEQ ID NO: 21742 - RNA, 20 nt, Homo sapiens
agacaguguggagauuccuu

SEQ ID NO: 21743 - RNA, 22 nt, Homo sapiens
agagagcuuuugguugcccuaa

SEQ ID NO: 21744 - RNA, 22 nt, Homo sapiens
agcaccauuucucuaaagcacu

SEQ ID NO: 21745 - RNA, 22 nt, Homo sapiens
agcaguguggccuuagacccgg

SEQ ID NO: 21746 - RNA, 22 nt, Homo sapiens
agcaguagaauuccugcaucac

SEQ ID NO: 21747 - RNA, 22 nt, Homo sapiens
agcauagugccuugaaaacaau

SEQ ID NO: 21748 - RNA, 22 nt, Homo sapiens
agcaucacacacuacagggaaa

SEQ ID NO: 21749 - RNA, 22 nt, Homo sapiens
agcaucacguagacuuuaccau

SEQ ID NO: 21750 - RNA, 22 nt, Homo sapiens
agcaucagugauuuuguugaag

SEQ ID NO: 21751 - RNA, 22 nt, Homo sapiens
agcucuauuagaagccgugggu

SEQ ID NO: 21752 - RNA, 22 nt, Homo sapiens
agcucuuguuaguauuagcagu

SEQ ID NO: 21753 - RNA, 22 nt, Homo sapiens
agcugcaauguuuaguauaaua

SEQ ID NO: 21754 - RNA, 20 nt, Homo sapiens
agcaucacagagccgggugu

SEQ ID NO: 21755 - RNA, 16 nt, Homo sapiens
agcagguguuagguga

SEQ ID NO: 21756 - RNA, 22 nt, Homo sapiens
agcaggucuuaacuugugaggu

SEQ ID NO: 21757 - RNA, 22 nt, Homo sapiens
augccacugcacuucagccugc

SEQ ID NO: 21758 - RNA, 22 nt, Homo sapiens
augccacugcacuccaaccugg

SEQ ID NO: 21759 - RNA, 22 nt, Homo sapiens
augcuacuggacaauggugacu

SEQ ID NO: 21760 - RNA, 22 nt, Homo sapiens
augcuaugugugacuucuuaug

SEQ ID NO: 21761 - RNA, 22 nt, Homo sapiens
augcaacugcacuccagccugg

SEQ ID NO: 21762 - RNA, 22 nt, Homo sapiens
augcaagcacacaagaggaaau

SEQ ID NO: 21763 - RNA, 22 nt, Homo sapiens
augcacauggcuaacuuuuuuc

SEQ ID NO: 21764 - RNA, 22 nt, Homo sapiens
augcacaugcgaaaacuugugu

SEQ ID NO: 21765 - RNA, 22 nt, Homo sapiens
augcacauauguacugcccuau

SEQ ID NO: 21766 - RNA, 22 nt, Homo sapiens
augcauggucugaagucaaccu

SEQ ID NO: 21767 - RNA, 22 nt, Homo sapiens
augcauagugggaugcucugug

SEQ ID NO: 21768 - RNA, 22 nt, Homo sapiens
augcacuguuuucuugaugaga

SEQ ID NO: 21769 - RNA, 22 nt, Homo sapiens
augauuuuuguaucgccugaug

SEQ ID NO: 21770 - RNA, 22 nt, Homo sapiens
augagugugaccugccaagaga

SEQ ID NO: 21771 - RNA, 22 nt, Homo sapiens
augagcuaauauggguaaguug

SEQ ID NO: 21772 - RNA, 22 nt, Homo sapiens
aucuucucuugaagggugggga

SEQ ID NO: 21773 - RNA, 22 nt, Homo sapiens
aucugguguuuuucucccucgu

SEQ ID NO: 21774 - RNA, 22 nt, Homo sapiens
aucugugguuguaugcauauua

SEQ ID NO: 21775 - RNA, 22 nt, Homo sapiens
auguggcuuuucaacuguguga

SEQ ID NO: 21776 - RNA, 22 nt, Homo sapiens
auguauggcagguuugggguuu

SEQ ID NO: 21777 - RNA, 22 nt, Homo sapiens
auguccuggacccagacaaagc

SEQ ID NO: 21778 - RNA, 22 nt, Homo sapiens
augggauaguaucaguggaaua

SEQ ID NO: 21779 - RNA, 17 nt, Homo sapiens
augggguuguagcccca

SEQ ID NO: 21780 - RNA, 22 nt, Homo sapiens
auggauaugcuuccaacugccu

SEQ ID NO: 21781 - RNA, 22 nt, Homo sapiens
auggacguagauucucaaggau

SEQ ID NO: 21782 - RNA, 22 nt, Homo sapiens
auggaaugguugggucauaagg

SEQ ID NO: 21783 - RNA, 22 nt, Homo sapiens
aucucaaugcuuuuguaggcca

SEQ ID NO: 21784 - RNA, 22 nt, Homo sapiens
aucuagagaggcagucuggccg

SEQ ID NO: 21785 - RNA, 22 nt, Homo sapiens
aucucauggagguagagaguaa

SEQ ID NO: 21786 - RNA, 22 nt, Homo sapiens
auccucugagaucuaggcagag

SEQ ID NO: 21787 - RNA, 22 nt, Homo sapiens
auccguugcaagggaagaauga

SEQ ID NO: 21788 - RNA, 22 nt, Homo sapiens
aucgcaccauugcacuccagca

SEQ ID NO: 21789 - RNA, 22 nt, Homo sapiens
aucauauccuagauauaacuuc

SEQ ID NO: 21790 - RNA, 19 nt, Homo sapiens
aucagcacaagugugcuuu

SEQ ID NO: 21791 - RNA, 22 nt, Homo sapiens
aucagcagcaugaaaagcaacu

SEQ ID NO: 21792 - RNA, 22 nt, Homo sapiens
aucaaaguuucccagaaguugu

SEQ ID NO: 21793 - RNA, 22 nt, Homo sapiens
aucaaagugaaauauuaguuau

SEQ ID NO: 21794 - RNA, 20 nt, Homo sapiens
aucagagacuaggauugcca

SEQ ID NO: 21795 - RNA, 22 nt, Homo sapiens
auaucacaggaaaggaagauac

SEQ ID NO: 21796 - RNA, 22 nt, Homo sapiens
auauugguuaaauauuauguga

SEQ ID NO: 21797 - RNA, 22 nt, Homo sapiens
auacaaguuauuugaacugcgg

SEQ ID NO: 21798 - RNA, 19 nt, Homo sapiens
auacacguguauacauaca

SEQ ID NO: 21799 - RNA, 22 nt, Homo sapiens
auagcagaauuuggucaagucu

SEQ ID NO: 21800 - RNA, 22 nt, Homo sapiens
auagcaauuugggaaucagacu

SEQ ID NO: 21801 - RNA, 22 nt, Homo sapiens
auagugcuuuugaaucuuguug

SEQ ID NO: 21802 - RNA, 23 nt, Homo sapiens
auagagcuaggaugcagacagau

SEQ ID NO: 21803 - RNA, 22 nt, Homo sapiens
auacuguuuuacaucauugccu

SEQ ID NO: 21804 - RNA, 22 nt, Homo sapiens
ucauugguucuggguguuguug

SEQ ID NO: 21805 - RNA, 22 nt, Homo sapiens
ucauugguagcucauggaaccg

SEQ ID NO: 21806 - RNA, 22 nt, Homo sapiens
ucauugguugcguaauuugauu

SEQ ID NO: 21807 - RNA, 22 nt, Homo sapiens
uccacagugguggaauuguuca

SEQ ID NO: 21808 - RNA, 22 nt, Homo sapiens
ucaugcaaugagucaggaggca

SEQ ID NO: 21809 - RNA, 22 nt, Homo sapiens
ucaugcaucuuguggaauuuga

SEQ ID NO: 21810 - RNA, 22 nt, Homo sapiens
uccauuugucuauguuucuguu

SEQ ID NO: 21811 - RNA, 22 nt, Homo sapiens
uccauuuguucagcuucaggaa

SEQ ID NO: 21812 - RNA, 22 nt, Homo sapiens
uccaguuguucucgaagcuccu

SEQ ID NO: 21813 - RNA, 22 nt, Homo sapiens
ucccaguauucauuuacagaag

SEQ ID NO: 21814 - RNA, 22 nt, Homo sapiens
ucagugccauugccauaugagu

SEQ ID NO: 21815 - RNA, 22 nt, Homo sapiens
ucagucauucacucacucggac

SEQ ID NO: 21816 - RNA, 23 nt, Homo sapiens
ucagugaaggaacaacuaaauag

SEQ ID NO: 21817 - RNA, 22 nt, Homo sapiens
ucaguuuguauuucagguugca

SEQ ID NO: 21818 - RNA, 22 nt, Homo sapiens
ucauacuguccaauucuagugg

SEQ ID NO: 21819 - RNA, 20 nt, Homo sapiens
ucauacuguggaguaccagg

SEQ ID NO: 21820 - RNA, 22 nt, Homo sapiens
ucaugaccaugguauagaccac

SEQ ID NO: 21821 - RNA, 20 nt, Homo sapiens
ucaucaguuggugcucgcug

SEQ ID NO: 21822 - RNA, 22 nt, Homo sapiens
ucauauugguuaaaauaguggg

SEQ ID NO: 21823 - RNA, 22 nt, Homo sapiens
ucauagucuaagguucuuuugc

SEQ ID NO: 21824 - RNA, 22 nt, Homo sapiens
ucaguaccugagagugggcaga

SEQ ID NO: 21825 - RNA, 22 nt, Homo sapiens
ucagaugauuccguugacgaga

SEQ ID NO: 21826 - RNA, 22 nt, Homo sapiens
ucagcagugugaaaacaaacua

SEQ ID NO: 21827 - RNA, 22 nt, Homo sapiens
ucagcagugugaaaauggacua

SEQ ID NO: 21828 - RNA, 22 nt, Homo sapiens
ucagcagugccccacucuacug

SEQ ID NO: 21829 - RNA, 22 nt, Homo sapiens
ucagcaguggacagaaugguag

SEQ ID NO: 21830 - RNA, 22 nt, Homo sapiens
ucuggguuuuguaccgugcucg

SEQ ID NO: 21831 - RNA, 22 nt, Homo sapiens
ucugggguuuccacuuuuacuu

SEQ ID NO: 21832 - RNA, 21 nt, Homo sapiens
ucucauuacugaugagccaga

SEQ ID NO: 21833 - RNA, 22 nt, Homo sapiens
ucucagcggacaggccggccag

SEQ ID NO: 21834 - RNA, 22 nt, Homo sapiens
ucugugcauuguaacaacuaaa

SEQ ID NO: 21835 - RNA, 22 nt, Homo sapiens
aacaucaaccaugaggguugga

SEQ ID NO: 21836 - RNA, 22 nt, Homo sapiens
ugaauguuugcuuacuuccaua

SEQ ID NO: 21837 - RNA, 22 nt, Homo sapiens
ugaauaggcaguuaaguuuaug

SEQ ID NO: 21838 - RNA, 22 nt, Homo sapiens
ugaauguaagaugucugcuggu

SEQ ID NO: 21839 - RNA, 22 nt, Homo sapiens
ugaagugaagacucacagaagg

SEQ ID NO: 21840 - RNA, 21 nt, Homo sapiens
ugaaguagcauaggaugucaa

SEQ ID NO: 21841 - RNA, 22 nt, Homo sapiens
ugaacuguugggggaaauucag

SEQ ID NO: 21842 - RNA, 22 nt, Homo sapiens
ugaagacucauacuugaaucag

SEQ ID NO: 21843 - RNA, 22 nt, Homo sapiens
ucuuugguaauggaugucugau

SEQ ID NO: 21844 - RNA, 22 nt, Homo sapiens
ugaacagucaucucucuuguau

SEQ ID NO: 21845 - RNA, 22 nt, Homo sapiens
ugaacucauccuuucuuauggc

SEQ ID NO: 21846 - RNA, 22 nt, Homo sapiens
ugagguuggggucagggcuagc

SEQ ID NO: 21847 - RNA, 22 nt, Homo sapiens
ugaguagcuaagacgauaggca

SEQ ID NO: 21848 - RNA, 22 nt, Homo sapiens
ugaguaggauugguauuucuuc

SEQ ID NO: 21849 - RNA, 23 nt, Homo sapiens
ugaguagguccacguaugugagu

SEQ ID NO: 21850 - RNA, 22 nt, Homo sapiens
ugauaucugaucauccuugaua

SEQ ID NO: 21851 - RNA, 22 nt, Homo sapiens
ugauaugaaguuagcuggcugu

SEQ ID NO: 21852 - RNA, 22 nt, Homo sapiens
ugaguaguauucuaugguaugu

SEQ ID NO: 21853 - RNA, 22 nt, Homo sapiens
ugaguagugccacaauaagcau

SEQ ID NO: 21854 - RNA, 22 nt, Homo sapiens
ugagauuguuagaucaaauggu

SEQ ID NO: 21855 - RNA, 17 nt, Homo sapiens
ugagcuaagauuacccc

SEQ ID NO: 21856 - RNA, 22 nt, Homo sapiens
ugagcauuguuuggacuuggau

SEQ ID NO: 21857 - RNA, 22 nt, Homo sapiens
ugagaugugaucaccugaaggg

SEQ ID NO: 21858 - RNA, 22 nt, Homo sapiens
ugcaccacugcacuccagcuug

SEQ ID NO: 21859 - RNA, 22 nt, Homo sapiens
ugcaccacugcacuucagccug

SEQ ID NO: 21860 - RNA, 22 nt, Homo sapiens
ugcaccacugcuagccugggua

SEQ ID NO: 21861 - RNA, 22 nt, Homo sapiens
ugcaccacugcacugccugggu

SEQ ID NO: 21862 - RNA, 22 nt, Homo sapiens
ugcaccacuguacuccagucug

SEQ ID NO: 21863 - RNA, 22 nt, Homo sapiens
ugcaccauugcacuccagccug

SEQ ID NO: 21864 - RNA, 22 nt, Homo sapiens
ugcauaugucuuuauaguagca

SEQ ID NO: 21865 - RNA, 22 nt, Homo sapiens
ugcacaaccucacccccgcucu

SEQ ID NO: 21866 - RNA, 22 nt, Homo sapiens
ugcacaguccagugcccacuga

SEQ ID NO: 21867 - RNA, 23 nt, Homo sapiens
ugcaccacuacacacucuugggu

SEQ ID NO: 21868 - RNA, 22 nt, Homo sapiens
ugcaccacuacacuccaggcug

SEQ ID NO: 21869 - RNA, 22 nt, Homo sapiens
ugcaccacugcaccccagucug

SEQ ID NO: 21870 - RNA, 22 nt, Homo sapiens
ugcaccacugcacuccacccug

SEQ ID NO: 21871 - RNA, 22 nt, Homo sapiens
ugauuuguccauguggcacgug

SEQ ID NO: 21872 - RNA, 23 nt, Homo sapiens
ugauguccacuuagggucuaggu

SEQ ID NO: 21873 - RNA, 22 nt, Homo sapiens
ugauggccuguucuccauaugu

SEQ ID NO: 21874 - RNA, 22 nt, Homo sapiens
ugaugguguuaccaucuuuacu

SEQ ID NO: 21875 - RNA, 22 nt, Homo sapiens
ugauccagugcucaguuggagu

SEQ ID NO: 21876 - RNA, 22 nt, Homo sapiens
uggauuuuaauuauucugucau

SEQ ID NO: 21877 - RNA, 22 nt, Homo sapiens
uggcaagaacgaaauguagggu

SEQ ID NO: 21878 - RNA, 22 nt, Homo sapiens
uggcaacaucuggggacauguu

SEQ ID NO: 21879 - RNA, 19 nt, Homo sapiens
uggcacauguauacuuaug

SEQ ID NO: 21880 - RNA, 22 nt, Homo sapiens
uggcacaaugacccuugugggc

SEQ ID NO: 21881 - RNA, 22 nt, Homo sapiens
uggcaauaaggacuccuuaggu

SEQ ID NO: 21882 - RNA, 22 nt, Homo sapiens
uggcaguuucauaugguucaac

SEQ ID NO: 21883 - RNA, 22 nt, Homo sapiens
uggcaguuuacaaaugccauga

SEQ ID NO: 21884 - RNA, 22 nt, Homo sapiens
uggcaguuuuaugugguucaac

SEQ ID NO: 21885 - RNA, 22 nt, Homo sapiens
uggcuagaccugcauaacagcu

SEQ ID NO: 21886 - RNA, 22 nt, Homo sapiens
uggcuacugaccugcuaggggg

SEQ ID NO: 21887 - RNA, 23 nt, Homo sapiens
uggcuagacguccuuuccugaug

SEQ ID NO: 21888 - RNA, 22 nt, Homo sapiens
uggcuagauauccagaguucug

SEQ ID NO: 21889 - RNA, 22 nt, Homo sapiens
uggcuuucuggggcuucuguuc

SEQ ID NO: 21890 - RNA, 22 nt, Homo sapiens
ugguaagaggcccugaguuugu

SEQ ID NO: 21891 - RNA, 22 nt, Homo sapiens
ugguaucuaagaugcacguugu

SEQ ID NO: 21892 - RNA, 22 nt, Homo sapiens
ugguauguugucucuuuguucu

SEQ ID NO: 21893 - RNA, 22 nt, Homo sapiens
uggaaauuaacagggauugucc

SEQ ID NO: 21894 - RNA, 19 nt, Homo sapiens
ugccauguagcacaugguc

SEQ ID NO: 21895 - RNA, 22 nt, Homo sapiens
ugcccuguaucccacuguuuca

SEQ ID NO: 21896 - RNA, 22 nt, Homo sapiens
ugcauauucaaggcaggccauu

SEQ ID NO: 21897 - RNA, 22 nt, Homo sapiens
ugcauauuuuauaaagauggaa

SEQ ID NO: 21898 - RNA, 22 nt, Homo sapiens
ugcaucacaguacuccagccug

SEQ ID NO: 21899 - RNA, 22 nt, Homo sapiens
ugcauccauucuagacucaucu

SEQ ID NO: 21900 - RNA, 22 nt, Homo sapiens
uggagagugauaaguaaaugga

SEQ ID NO: 21901 - RNA, 22 nt, Homo sapiens
uggagagucauuuauaguauuu

SEQ ID NO: 21902 - RNA, 22 nt, Homo sapiens
uggagauguuuaaaauccacug

SEQ ID NO: 21903 - RNA, 22 nt, Homo sapiens
uggauguauacaugcaggucac

SEQ ID NO: 21904 - RNA, 20 nt, Homo sapiens
uggauugugaugggauuugc

SEQ ID NO: 21905 - RNA, 22 nt, Homo sapiens
uggcaaaaaaacgcaauuacgu

SEQ ID NO: 21906 - RNA, 22 nt, Homo sapiens
uggaagcauagcagcgugugug

SEQ ID NO: 21907 - RNA, 22 nt, Homo sapiens
uggaagcaugcaaucugugggg

SEQ ID NO: 21908 - RNA, 20 nt, Homo sapiens
uggaagccuggugcuaucuu

SEQ ID NO: 21909 - RNA, 22 nt, Homo sapiens
uggaaguaaccaugaauggaau

SEQ ID NO: 21910 - RNA, 22 nt, Homo sapiens
uggacagaaacauguuuucagu

SEQ ID NO: 21911 - RNA, 22 nt, Homo sapiens
uguucaauucccaccuaugagu

SEQ ID NO: 21912 - RNA, 22 nt, Homo sapiens
uguguaaauaugauagaggaau

SEQ ID NO: 21913 - RNA, 22 nt, Homo sapiens
uuaagaugcauuuugaaguuaa

SEQ ID NO: 21914 - RNA, 22 nt, Homo sapiens
uuaacagucacuuagcucauuu

SEQ ID NO: 21915 - RNA, 22 nt, Homo sapiens
uuaacagcacuacguggggauc

SEQ ID NO: 21916 - RNA, 22 nt, Homo sapiens
uuaaggccccgcccauucaggc

SEQ ID NO: 21917 - RNA, 22 nt, Homo sapiens
uuaaggccugaagcucauaaag

SEQ ID NO: 21918 - RNA, 22 nt, Homo sapiens
uuaaggugaaguucucagaugc

SEQ ID NO: 21919 - RNA, 22 nt, Homo sapiens
uuaaaguaauugaaauggccuu

SEQ ID NO: 21920 - RNA, 22 nt, Homo sapiens
uuaaaguauaguuccucugguu

SEQ ID NO: 21921 - RNA, 22 nt, Homo sapiens
ugugccacuccaggaggcuguu

SEQ ID NO: 21922 - RNA, 17 nt, Homo sapiens
ugugauugaagucaucc

SEQ ID NO: 21923 - RNA, 22 nt, Homo sapiens
ugugcaaauuagcacaacccga

SEQ ID NO: 21924 - RNA, 22 nt, Homo sapiens
ugugccaaaucccauaauaaau

SEQ ID NO: 21925 - RNA, 22 nt, Homo sapiens
uguggucaucacuugaagguaa

SEQ ID NO: 21926 - RNA, 22 nt, Homo sapiens
uguggaaauuguuguauuuaau

SEQ ID NO: 21927 - RNA, 22 nt, Homo sapiens
uguggcaaagucuugugaauau

SEQ ID NO: 21928 - RNA, 22 nt, Homo sapiens
uguggcugguggcaccuuuucc

SEQ ID NO: 21929 - RNA, 22 nt, Homo sapiens
ugugaugugaugagaaguuccu

SEQ ID NO: 21930 - RNA, 22 nt, Homo sapiens
uguacaaauuucugugguggug

SEQ ID NO: 21931 - RNA, 22 nt, Homo sapiens
uguaagcagcagagacuauccu

SEQ ID NO: 21932 - RNA, 22 nt, Homo sapiens
uggugcuugaugaggguggagc

SEQ ID NO: 21933 - RNA, 22 nt, Homo sapiens
uguaacacacacuguuuacucc

SEQ ID NO: 21934 - RNA, 22 nt, Homo sapiens
uguaacaguaguuacuauucuu

SEQ ID NO: 21935 - RNA, 22 nt, Homo sapiens
uggugagaaaugagaugcuuuu

SEQ ID NO: 21936 - RNA, 22 nt, Homo sapiens
uggugcaaauguaauugugguu

SEQ ID NO: 21937 - RNA, 21 nt, Homo sapiens
uuaucccagugucucugcagg

SEQ ID NO: 21938 - RNA, 22 nt, Homo sapiens
uucaguggacuuaguagugcuu

SEQ ID NO: 21939 - RNA, 22 nt, Homo sapiens
uucaguacuucaaaaucuuuaa

SEQ ID NO: 21940 - RNA, 22 nt, Homo sapiens
uucaguaguaaguuggaacucu

SEQ ID NO: 21941 - RNA, 22 nt, Homo sapiens
uucaguacacguguucucauuu

SEQ ID NO: 21942 - RNA, 22 nt, Homo sapiens
uuaugcuguuuucuggagauuu

SEQ ID NO: 21943 - RNA, 22 nt, Homo sapiens
uucacagagagaacucaaacca

SEQ ID NO: 21944 - RNA, 22 nt, Homo sapiens
uucaaggacuaaggauuuuugg

SEQ ID NO: 21945 - RNA, 22 nt, Homo sapiens
uucaaguaagaaagacaucagg

SEQ ID NO: 21946 - RNA, 22 nt, Homo sapiens
uucaaguagguaggaccacagg

SEQ ID NO: 21947 - RNA, 22 nt, Homo sapiens
uucaagugaacaaaaugaggag

SEQ ID NO: 21948 - RNA, 22 nt, Homo sapiens
uucauggugguacaaaagcaau

SEQ ID NO: 21949 - RNA, 22 nt, Homo sapiens
uucauguaauauuucacagcuu

SEQ ID NO: 21950 - RNA, 21 nt, Homo sapiens
uucaucuggccguauuccagg

SEQ ID NO: 21951 - RNA, 22 nt, Homo sapiens
uucaucaguugagcugguugcu

SEQ ID NO: 21952 - RNA, 22 nt, Homo sapiens
uucauaguucuuuuagucauua

SEQ ID NO: 21953 - RNA, 22 nt, Homo sapiens
uucauguaaucaaggcagcuaa

SEQ ID NO: 21954 - RNA, 22 nt, Homo sapiens
uuccgcuguaguuguugguacc

SEQ ID NO: 21955 - RNA, 22 nt, Homo sapiens
uucucaauggcaacuuguugcu

SEQ ID NO: 21956 - RNA, 22 nt, Homo sapiens
uucuuagucauguaauagucca

SEQ ID NO: 21957 - RNA, 22 nt, Homo sapiens
uucugcacaucgaucacaagau

SEQ ID NO: 21958 - RNA, 22 nt, Homo sapiens
uuucugggggugcugauggaaa

SEQ ID NO: 21959 - RNA, 22 nt, Homo sapiens
uuucuauguugaccagucuaga

SEQ ID NO: 21960 - RNA, 22 nt, Homo sapiens
uuucagagucaucugcccaagu

SEQ ID NO: 21961 - RNA, 18 nt, Homo sapiens
uuucaagucuuaggugac

SEQ ID NO: 21962 - RNA, 22 nt, Homo sapiens
uuucacaguguucucccccaga

SEQ ID NO: 21963 - RNA, 22 nt, Homo sapiens
uuuauucggcuaggagcuucgg

SEQ ID NO: 21964 - RNA, 22 nt, Homo sapiens
uugugguuuuuaaaacuaggug

SEQ ID NO: 21965 - RNA, 22 nt, Homo sapiens
uugugguugauacacguaggaa

SEQ ID NO: 21966 - RNA, 22 nt, Homo sapiens
uuguggcuuaucucauuuagcg

SEQ ID NO: 21967 - RNA, 22 nt, Homo sapiens
uuugcacuucugagugugacau

SEQ ID NO: 21968 - RNA, 20 nt, Homo sapiens
uuugcagaaucuaagaagag

SEQ ID NO: 21969 - RNA, 22 nt, Homo sapiens
uuugauuguacuaaaauuguac

SEQ ID NO: 21970 - RNA, 22 nt, Homo sapiens
uuucuuggagcucuuagggucg

SEQ ID NO: 21971 - RNA, 22 nt, Homo sapiens
uuucugguuaauuucuaagagc

SEQ ID NO: 21972 - RNA, 22 nt, Homo sapiens
uuugaaguguggcacugaguuu

SEQ ID NO: 21973 - RNA, 22 nt, Homo sapiens
uuugacaaugugugcuuguauu

SEQ ID NO: 21974 - RNA, 22 nt, Homo sapiens
uuugacuaccaggaauguucuu

SEQ ID NO: 21975 - RNA, 22 nt, Homo sapiens
uuugagaaugcuaccagagaag

SEQ ID NO: 21976 - RNA, 18 nt, Homo sapiens
uuuggcuguucaugacuc

SEQ ID NO: 21977 - RNA, 22 nt, Homo sapiens
uuugugauugcacacucaagau

SEQ ID NO: 21978 - RNA, 22 nt, Homo sapiens
uuugugagguggauagauugca

SEQ ID NO: 21979 - RNA, 22 nt, Homo sapiens
uuggucaggcuaaucucgaacg

SEQ ID NO: 21980 - RNA, 22 nt, Homo sapiens
uugguauguaauuuauauugua

SEQ ID NO: 21981 - RNA, 22 nt, Homo sapiens
uuggucaucucccuccuuuuag

SEQ ID NO: 21982 - RNA, 22 nt, Homo sapiens
uugguacuagcugaucgcagag

SEQ ID NO: 21983 - RNA, 22 nt, Homo sapiens
uuggaauauaaccuguuucuaa

SEQ ID NO: 21984 - RNA, 22 nt, Homo sapiens
uuggaaggcugaauggccucuc

SEQ ID NO: 21985 - RNA, 22 nt, Homo sapiens
uuggaauacucaaaagguuggg

SEQ ID NO: 21986 - RNA, 22 nt, Homo sapiens
uuggcagcauuccagccaagca

SEQ ID NO: 21987 - RNA, 22 nt, Homo sapiens
uuggcauugccaaacugucaac

SEQ ID NO: 21988 - RNA, 22 nt, Homo sapiens
uugcuucauucaacauugaggg

SEQ ID NO: 21989 - RNA, 22 nt, Homo sapiens
uugcuuagucaugaaucacuga

SEQ ID NO: 21990 - RNA, 22 nt, Homo sapiens
uugcuagaugaaaaugguaccu

SEQ ID NO: 21991 - RNA, 22 nt, Homo sapiens
uugcugguuuucauaugagcag

SEQ ID NO: 21992 - RNA, 20 nt, Homo sapiens
uugcugguguuagaggaggc

SEQ ID NO: 21993 - RNA, 22 nt, Homo sapiens
uugcuuaggcuggagugcagug

SEQ ID NO: 21994 - RNA, 22 nt, Homo sapiens
uugcaugcuccuuaugagaauc

SEQ ID NO: 21995 - RNA, 22 nt, Homo sapiens
uugcaugguggaacuuggagcu

SEQ ID NO: 21996 - RNA, 22 nt, Homo sapiens
uugcaucagcuccugauguacu

SEQ ID NO: 21997 - RNA, 18 nt, Homo sapiens
uugcaucauuuuguuguu

SEQ ID NO: 21998 - RNA, 22 nt, Homo sapiens
uugaauguacuuguucucacua

SEQ ID NO: 21999 - RNA, 22 nt, Homo sapiens
uugaaguaugaccgcugagaau

SEQ ID NO: 22000 - RNA, 22 nt, Homo sapiens
uugaaguagcauuucaugucua

SEQ ID NO: 22001 - RNA, 22 nt, Homo sapiens
uugcacauugcaccuuuuguau

SEQ ID NO: 22002 - RNA, 22 nt, Homo sapiens
uugcaaggugcucgaagggcuc

SEQ ID NO: 22003 - RNA, 22 nt, Homo sapiens
uugcaagauguuaacauuggag

SEQ ID NO: 22004 - RNA, 22 nt, Homo sapiens
uugcacauugauuuuguaucuu

SEQ ID NO: 22005 - RNA, 19 nt, Homo sapiens
uugcauagguugaaccagc

SEQ ID NO: 22006 - RNA, 22 nt, Homo sapiens
uugcauaagugcauucugugau

SEQ ID NO: 22007 - RNA, 20 nt, Homo sapiens
uugcagagcccaacccugga

SEQ ID NO: 22008 - RNA, 22 nt, Homo sapiens
uugcagagccccacacugggcu

SEQ ID NO: 22009 - RNA, 22 nt, Homo sapiens
uugcagagucaguuauuuugcc

SEQ ID NO: 22010 - RNA, 22 nt, Homo sapiens
gucauugucaauugacaauugu

SEQ ID NO: 22011 - RNA, 22 nt, Homo sapiens
gucauuguguggacauggagaa

SEQ ID NO: 22012 - RNA, 21 nt, Homo sapiens
guccaaaacaguguccaaugc

SEQ ID NO: 22013 - RNA, 22 nt, Homo sapiens
gucccaguggaaccuccaagcu

SEQ ID NO: 22014 - RNA, 22 nt, Homo sapiens
gucuaguuuuaauacauuaaga

SEQ ID NO: 22015 - RNA, 22 nt, Homo sapiens
gugcacaaaucuuaaauguaca

SEQ ID NO: 22016 - RNA, 22 nt, Homo sapiens
gugcacaaucgugcauuccuug

SEQ ID NO: 22017 - RNA, 22 nt, Homo sapiens
gugagcuccucucuauguguca

SEQ ID NO: 22018 - RNA, 22 nt, Homo sapiens
gugagccaugauuuuaccacug

SEQ ID NO: 22019 - RNA, 22 nt, Homo sapiens
gugcaagagugauugcaguuuu

SEQ ID NO: 22020 - RNA, 22 nt, Homo sapiens
gugcaaguguaauacagcuagg

SEQ ID NO: 22021 - RNA, 22 nt, Homo sapiens
guuggaauguauugcuacuucu

SEQ ID NO: 22022 - RNA, 22 nt, Homo sapiens
guuauguuauguuauguuaugu

SEQ ID NO: 22023 - RNA, 22 nt, Homo sapiens
guguaugugagaaugcucaugu

SEQ ID NO: 22024 - RNA, 21 nt, Homo sapiens
gugucacagacaugacagaug

SEQ ID NO: 22025 - RNA, 22 nt, Homo sapiens
gugucaguggggagugaucuuc

SEQ ID NO: 22026 - RNA, 22 nt, Homo sapiens
guguaguuugagguaugggggc

SEQ ID NO: 22027 - RNA, 22 nt, Homo sapiens
guggguaaaucucuguuugagg

SEQ ID NO: 22028 - RNA, 22 nt, Homo sapiens
guggguaaaucucuguucgagg

SEQ ID NO: 22029 - RNA, 22 nt, Homo sapiens
guggcaagaugacuacucacug

SEQ ID NO: 22030 - RNA, 22 nt, Homo sapiens
guggcagugugaggauccugcu

SEQ ID NO: 22031 - RNA, 22 nt, Homo sapiens
gguggugguauuucagaaaaug

SEQ ID NO: 22032 - RNA, 22 nt, Homo sapiens
gguccgccugccuuggccuccc

SEQ ID NO: 22033 - RNA, 22 nt, Homo sapiens
ggucauagagcaagcaaacagc

SEQ ID NO: 22034 - RNA, 22 nt, Homo sapiens
ggucauggauugucuuuucuug

SEQ ID NO: 22035 - RNA, 22 nt, Homo sapiens
guaaacuuccccucaugaauga

SEQ ID NO: 22036 - RNA, 20 nt, Homo sapiens
guaaacucucagcauagaug

SEQ ID NO: 22037 - RNA, 22 nt, Homo sapiens
guagaaaguuugcugucacaug

SEQ ID NO: 22038 - RNA, 22 nt, Homo sapiens
guacaugugcacagugugcagg

SEQ ID NO: 22039 - RNA, 22 nt, Homo sapiens
guauuagguuggggcaaaagua

SEQ ID NO: 22040 - RNA, 22 nt, Homo sapiens
guauggaauuugugaccuuaua

SEQ ID NO: 22041 - RNA, 22 nt, Homo sapiens
guauggcacuauccucucugau

SEQ ID NO: 22042 - RNA, 22 nt, Homo sapiens
guagagagaaauacaaagcugu

SEQ ID NO: 22043 - RNA, 22 nt, Homo sapiens
gucaguucuugugguugcauuc

SEQ ID NO: 22044 - RNA, 22 nt, Homo sapiens
guauuugguuauugcagccuga

SEQ ID NO: 22045 - RNA, 22 nt, Homo sapiens
ggggaauguuaaagaauuugca

SEQ ID NO: 22046 - RNA, 22 nt, Homo sapiens
gggcauguggacuuguauguuu

SEQ ID NO: 22047 - RNA, 22 nt, Homo sapiens
gggaagauauaggcugggcacc

SEQ ID NO: 22048 - RNA, 20 nt, Homo sapiens
gggcaaguaugugggaaguc

SEQ ID NO: 22049 - RNA, 22 nt, Homo sapiens
ggaaaguaacccauucucuuac

SEQ ID NO: 22050 - RNA, 22 nt, Homo sapiens
gcugucuggagucuguucaaug

SEQ ID NO: 22051 - RNA, 22 nt, Homo sapiens
ggaaaucaucauucucgguaua

SEQ ID NO: 22052 - RNA, 22 nt, Homo sapiens
ggaaauguuuagcauccacuuu

SEQ ID NO: 22053 - RNA, 22 nt, Homo sapiens
ggcuacauuguuacaauuagua

SEQ ID NO: 22054 - RNA, 22 nt, Homo sapiens
uagcagaauaacuugccagccu

SEQ ID NO: 22055 - RNA, 22 nt, Homo sapiens
uagcagaauauaccucuuacuu

SEQ ID NO: 22056 - RNA, 19 nt, Homo sapiens
uagcagcaugauuuauaau

SEQ ID NO: 22057 - RNA, 22 nt, Homo sapiens
uagguagguggaaaaguaauug

SEQ ID NO: 22058 - RNA, 22 nt, Homo sapiens
uaggugaaugcuggaagaaaug

SEQ ID NO: 22059 - RNA, 22 nt, Homo sapiens
uaguaccauucccaaaccaacu

SEQ ID NO: 22060 - RNA, 22 nt, Homo sapiens
uauagcuugaaggaauggucau

SEQ ID NO: 22061 - RNA, 22 nt, Homo sapiens
uauagcuugauuauggugaugg

SEQ ID NO: 22062 - RNA, 22 nt, Homo sapiens
uauggccccuacaugugcaaaa

SEQ ID NO: 22063 - RNA, 22 nt, Homo sapiens
uauggauuugcauuccccaugu

SEQ ID NO: 22064 - RNA, 22 nt, Homo sapiens
uauggauuugccuauucuguau

SEQ ID NO: 22065 - RNA, 22 nt, Homo sapiens
uauggauuuucagauucuuauc

SEQ ID NO: 22066 - RNA, 22 nt, Homo sapiens
uaugagcacauauguaucuaug

SEQ ID NO: 22067 - RNA, 22 nt, Homo sapiens
uaugaucauuauguuauugcag

SEQ ID NO: 22068 - RNA, 22 nt, Homo sapiens
uaucaucauguuuuugcugugu

SEQ ID NO: 22069 - RNA, 22 nt, Homo sapiens
uaugacguuuuauuggcgcagu

SEQ ID NO: 22070 - RNA, 22 nt, Homo sapiens
uauuccagcccuggugagccag

SEQ ID NO: 22071 - RNA, 22 nt, Homo sapiens
uauucacaggugugggacaaag

SEQ ID NO: 22072 - RNA, 22 nt, Homo sapiens
uauuguuaaagauguuaaugau

SEQ ID NO: 22073 - RNA, 22 nt, Homo sapiens
uauugcuuuuaacccaaucucu

SEQ ID NO: 22074 - RNA, 22 nt, Homo sapiens
uaagugaauauggacaguuagc

SEQ ID NO: 22075 - RNA, 22 nt, Homo sapiens
uaaguaauugcagcaauuugcc

SEQ ID NO: 22076 - RNA, 22 nt, Homo sapiens
uaaguaauugugguuuuugcca

SEQ ID NO: 22077 - RNA, 22 nt, Homo sapiens
uaaguaucaguuuagcuaugau

SEQ ID NO: 22078 - RNA, 22 nt, Homo sapiens
uaaguaaaugaaagguugauuu

SEQ ID NO: 22079 - RNA, 22 nt, Homo sapiens
guuugcauagugcugggagggg

SEQ ID NO: 22080 - RNA, 22 nt, Homo sapiens
guuggugaccugaagagaguaa

SEQ ID NO: 22081 - RNA, 22 nt, Homo sapiens
guuguauaggcauggggagaau

SEQ ID NO: 22082 - RNA, 22 nt, Homo sapiens
guugugcuuaagccuauugauu

SEQ ID NO: 22083 - RNA, 22 nt, Homo sapiens
uacaagcacaggcagcaggcug

SEQ ID NO: 22084 - RNA, 22 nt, Homo sapiens
uaaugcacuuuccuccaaggcu

SEQ ID NO: 22085 - RNA, 22 nt, Homo sapiens
uaauaguuggcacuggagaaag

SEQ ID NO: 22086 - RNA, 21 nt, Homo sapiens
uaauaaugucucagacaccua

SEQ ID NO: 22087 - RNA, 22 nt, Homo sapiens
uaaguuguagaacguuuucuua

SEQ ID NO: 22088 - RNA, 22 nt, Homo sapiens
uacaaguauuuuuauuagugcc

SEQ ID NO: 22089 - RNA, 22 nt, Homo sapiens
uacaucagccugaaagagcucg

SEQ ID NO: 22090 - RNA, 22 nt, Homo sapiens
uacaguccaugcauuauccucc

SEQ ID NO: 22091 - RNA, 22 nt, Homo sapiens
uacaguaggauuuucagggucu

SEQ ID NO: 22092 - RNA, 19 nt, Homo sapiens
uacugcaccucaaccuggg

SEQ ID NO: 22093 - RNA, 18 nt, Homo sapiens
uacuaguaaggcuucuga

SEQ ID NO: 22094 - RNA, 22 nt, Homo sapiens
uagagauccuucacuaggggca

SEQ ID NO: 22095 - RNA, 22 nt, Homo sapiens
uagaggaaugaauuuggccaga

SEQ ID NO: 22096 - RNA, 22 nt, Homo sapiens
cucuuuggaugccuuaggguua

SEQ ID NO: 22097 - RNA, 19 nt, Homo sapiens
cucuuuggugucucuucuu

SEQ ID NO: 22098 - RNA, 22 nt, Homo sapiens
cucaguacuugcacagaagaac

SEQ ID NO: 22099 - RNA, 18 nt, Homo sapiens
cucacacccuaaucagga

SEQ ID NO: 22100 - RNA, 22 nt, Homo sapiens
ccuugguaauguguuuuauucu

SEQ ID NO: 22101 - RNA, 22 nt, Homo sapiens
ccuggcaagagacugaagauag

SEQ ID NO: 22102 - RNA, 21 nt, Homo sapiens
ccugaugaccucugagaguua

SEQ ID NO: 22103 - RNA, 22 nt, Homo sapiens
cuaugcuucuuaaauuaguuau

SEQ ID NO: 22104 - RNA, 22 nt, Homo sapiens
ccagaguuucugauucagcagg

SEQ ID NO: 22105 - RNA, 22 nt, Homo sapiens
ccagaguugccucagguuucug

SEQ ID NO: 22106 - RNA, 22 nt, Homo sapiens
ccaaaguauuuucacugauauc

SEQ ID NO: 22107 - RNA, 21 nt, Homo sapiens
caucacauuacucaaaguccu

SEQ ID NO: 22108 - RNA, 22 nt, Homo sapiens
cccacaguggccucauauccuu

SEQ ID NO: 22109 - RNA, 22 nt, Homo sapiens
ccaucacaggccucagugggaa

SEQ ID NO: 22110 - RNA, 22 nt, Homo sapiens
cccagcguucggcauggcugag

SEQ ID NO: 22111 - RNA, 22 nt, Homo sapiens
ccauuugguuauguaucgaaac

SEQ ID NO: 22112 - RNA, 22 nt, Homo sapiens
ccccauuguugugguuuuaucu

SEQ ID NO: 22113 - RNA, 22 nt, Homo sapiens
cccuuagacuacuaauaugagc

SEQ ID NO: 22114 - RNA, 21 nt, Homo sapiens
cccugguguuuggaguuugag

SEQ ID NO: 22115 - RNA, 22 nt, Homo sapiens
ccccauuugaacuccuucaacu

SEQ ID NO: 22116 - RNA, 20 nt, Homo sapiens
auuugcauuauggagcaccc

SEQ ID NO: 22117 - RNA, 22 nt, Homo sapiens
auuugguugggugcgguggcuu

SEQ ID NO: 22118 - RNA, 18 nt, Homo sapiens
auuuuugcaguccacaug

SEQ ID NO: 22119 - RNA, 22 nt, Homo sapiens
auuuugcauugcuguaaaggaa

SEQ ID NO: 22120 - RNA, 22 nt, Homo sapiens
auuggcauauccacgacaaugc

SEQ ID NO: 22121 - RNA, 22 nt, Homo sapiens
auugucauuuauaacuguguag

SEQ ID NO: 22122 - RNA, 22 nt, Homo sapiens
auuguacuuauugccagaauuu

SEQ ID NO: 22123 - RNA, 22 nt, Homo sapiens
auuggaguuguacgcacgcuca

SEQ ID NO: 22124 - RNA, 22 nt, Homo sapiens
auuggcaagauagcauaugagg

SEQ ID NO: 22125 - RNA, 22 nt, Homo sapiens
auugcucuuagaaauauuucuu

SEQ ID NO: 22126 - RNA, 22 nt, Homo sapiens
auugcauuuucagguuggucug

SEQ ID NO: 22127 - RNA, 22 nt, Homo sapiens
auugcccaggcuggagugcagu

SEQ ID NO: 22128 - RNA, 22 nt, Homo sapiens
auuacacuuucuauucaaugag

SEQ ID NO: 22129 - RNA, 22 nt, Homo sapiens
auuagaugguuauaggugugag

SEQ ID NO: 22130 - RNA, 22 nt, Homo sapiens
cagcugguggcaagaagacaga

SEQ ID NO: 22131 - RNA, 22 nt, Homo sapiens
cagcuguuguuaugucugcagg

SEQ ID NO: 22132 - RNA, 22 nt, Homo sapiens
caaagugcuggaauuggccggg

SEQ ID NO: 22133 - RNA, 22 nt, Homo sapiens
caaaguaauugugguuuugcca

SEQ ID NO: 22134 - RNA, 22 nt, Homo sapiens
caaagucuucaguugauucuga

SEQ ID NO: 22135 - RNA, 22 nt, Homo sapiens
caaagucuucucauuaugucuu

SEQ ID NO: 22136 - RNA, 22 nt, Homo sapiens
caaaggcuuccacugcauccuu

SEQ ID NO: 22137 - RNA, 22 nt, Homo sapiens
caaaguaauugcuguuuugcca

SEQ ID NO: 22138 - RNA, 22 nt, Homo sapiens
caaauugcuuguggaggauaau

SEQ ID NO: 22139 - RNA, 16 nt, Homo sapiens
cacauugcugcauggc

SEQ ID NO: 22140 - RNA, 22 nt, Homo sapiens
cacucaguuugugguacuuugu

SEQ ID NO: 22141 - RNA, 22 nt, Homo sapiens
cuucaaguguggccaccugacc

SEQ ID NO: 22142 - RNA, 20 nt, Homo sapiens
cuuaucaguggcaaguauaa

SEQ ID NO: 22143 - RNA, 22 nt, Homo sapiens
cuguuugauuaagugguggaaa

SEQ ID NO: 22144 - RNA, 22 nt, Homo sapiens
cuguugguguuuaaucacugca

SEQ ID NO: 22145 - RNA, 22 nt, Homo sapiens
cugcagucaucugaagauuuug

SEQ ID NO: 22146 - RNA, 22 nt, Homo sapiens
cugauugucuauuuaguucacu

SEQ ID NO: 22147 - RNA, 22 nt, Homo sapiens
cugacaagugaucacagcagca

SEQ ID NO: 22148 - RNA, 22 nt, Homo sapiens
cuuccagcuggguucagucagu

SEQ ID NO: 22149 - RNA, 22 nt, Homo sapiens
cuucacuuuguuaaacuccaau

SEQ ID NO: 22150 - RNA, 22 nt, Homo sapiens
cuucuguuaguucugauaacuu

SEQ ID NO: 22151 - RNA, 22 nt, Homo sapiens
cuugagcauauucuauauuaaa

SEQ ID NO: 22152 - RNA, 22 nt, Homo sapiens
gagacugagucuugcuuuguca

SEQ ID NO: 22153 - RNA, 22 nt, Homo sapiens
gacagugugauacuuagucuca

SEQ ID NO: 22154 - RNA, 21 nt, Homo sapiens
gagaaucuuuucagggcaaac

SEQ ID NO: 22155 - RNA, 22 nt, Homo sapiens
gagaaugagaggggaaggccac

SEQ ID NO: 22156 - RNA, 22 nt, Homo sapiens
gaaugucuuauugcucguugua

SEQ ID NO: 22157 - RNA, 22 nt, Homo sapiens
gaauucugucgcuuacuagaug

SEQ ID NO: 22158 - RNA, 22 nt, Homo sapiens
gaauugcacaaaaacugcuugu

SEQ ID NO: 22159 - RNA, 22 nt, Homo sapiens
cuuuggugagggauaaauuuca

SEQ ID NO: 22160 - RNA, 22 nt, Homo sapiens
cuuuggucaauugcugugggga

SEQ ID NO: 22161 - RNA, 22 nt, Homo sapiens
cuuuggcacuuccuaagugcca

SEQ ID NO: 22162 - RNA, 22 nt, Homo sapiens
cuuuggcauuagccuguauaga

SEQ ID NO: 22163 - RNA, 23 nt, Homo sapiens
gaaguauagcaugcacauggaaa

SEQ ID NO: 22164 - RNA, 22 nt, Homo sapiens
gaaguaauaaauggauucuuaa

SEQ ID NO: 22165 - RNA, 23 nt, Homo sapiens
gaaguaauaaauggauucuuaac

SEQ ID NO: 22166 - RNA, 22 nt, Homo sapiens
gaagcauugauccacaggcgug

SEQ ID NO: 22167 - RNA, 22 nt, Homo sapiens
gaacuuucuacauuaccucuuu

SEQ ID NO: 22168 - RNA, 22 nt, Homo sapiens
gaagacauuuacaugggagacc

SEQ ID NO: 22169 - RNA, 22 nt, Homo sapiens
gaacuuguguugcuucacaugu

SEQ ID NO: 22170 - RNA, 22 nt, Homo sapiens
gcagugaugugaucauagcuca

SEQ ID NO: 22171 - RNA, 22 nt, Homo sapiens
gcaagaauggaacaggagagcc

SEQ ID NO: 22172 - RNA, 22 nt, Homo sapiens
gcagcagugcccuggauggaaa

SEQ ID NO: 22173 - RNA, 22 nt, Homo sapiens
gcagcaguggcaguuaauauuu

SEQ ID NO: 22174 - RNA, 22 nt, Homo sapiens
gauuccauugcgaauuuucaga

SEQ ID NO: 22175 - RNA, 22 nt, Homo sapiens
gauugguugaaaguagaauacu

SEQ ID NO: 22176 - RNA, 22 nt, Homo sapiens
gcaaaaaguagugcugguuagg

SEQ ID NO: 22177 - RNA, 22 nt, Homo sapiens
gcccagauguuuggggucaugg

SEQ ID NO: 22178 - RNA, 22 nt, Homo sapiens
gccauugcacuccagccucggc

SEQ ID NO: 22179 - RNA, 22 nt, Homo sapiens
gcuggucugccguaguaggugc

SEQ ID NO: 22180 - RNA, 22 nt, Homo sapiens
gcuggcaagaugcugaugcaac

SEQ ID NO: 22181 - RNA, 22 nt, Homo sapiens
gcugcuguuuaguuucuccugg

SEQ ID NO: 22182 - RNA, 22 nt, Homo sapiens
gcuggcaaaugguuauaaggcc

SEQ ID NO: 22183 - RNA, 22 nt, Homo sapiens
gaucacaugggagaaugagagu

SEQ ID NO: 22184 - RNA, 22 nt, Homo sapiens
gauacuguauccuaaaagcuuu

SEQ ID NO: 22185 - RNA, 22 nt, Homo sapiens
gaguaucuuuaaggugguuugg

SEQ ID NO: 22186 - RNA, 22 nt, Homo sapiens
gaugauauuugagucauuagaa

SEQ ID NO: 22187 - RNA, 22 nt, Homo sapiens
gaugauguugaauguucucacc

SEQ ID NO: 22188 - RNA, 22 nt, Homo sapiens
gaucugugugauuggaugcauu

SEQ ID NO: 22189 - RNA, 22 nt, Homo sapiens
gagguaucauuauguugcccag

SEQ ID NO: 22190 - RNA, 22 nt, Homo sapiens
gagaggucguauaugauuucug

SEQ ID NO: 22191 - RNA, 22 nt, Homo sapiens
gagagugaaguuugcuaccugu

SEQ ID NO: 22192 - RNA, 22 nt, Homo sapiens
gagaucuuggccaaguuucuua

SEQ ID NO: 22193 - RNA, 22 nt, Human adenovirus B (HAdV-B)
acacaccccgaaacugcgucac

SEQ ID NO: 22194 - RNA, 22 nt, Human adenovirus B (HAdV-B)
ucauuugguuauugcccgcacu

SEQ ID NO: 22195 - RNA, 21 nt, Human adenovirus B (HAdV-B)
cuuccucuaauaacccuucua

SEQ ID NO: 22196 - RNA, 22 nt, Human adenovirus B (HAdV-B)
uggaauggguuacuauggaagc

SEQ ID NO: 22197 - RNA, 22 nt, Human adenovirus B (HAdV-B)
gguggaaugugaaacuguuugc

SEQ ID NO: 22198 - RNA, 22 nt, Homo sapiens
acugcacuccagacucugucuc

SEQ ID NO: 22199 - RNA, 21 nt, Homo sapiens
uuuccuggagcguauggcuuc

SEQ ID NO: 22200 - RNA, 22 nt, Homo sapiens
uuccugagccuuguaucuagua

SEQ ID NO: 22201 - RNA, 22 nt, Homo sapiens
gcauggccuuuaaaugucacag

SEQ ID NO: 22202 - RNA, 22 nt, Homo sapiens
gucaaaugcacagaaccauuaa

SEQ ID NO: 22203 - RNA, 20 nt, Homo sapiens
acacuggcuuugagauuuag

SEQ ID NO: 22204 - RNA, 22 nt, Homo sapiens
caccaggugcccagcacggcca

SEQ ID NO: 22205 - RNA, 22 nt, Homo sapiens
uacuggccccaaaguagguagu

SEQ ID NO: 22206 - RNA, 22 nt, Homo sapiens
gucacugggugcugcgccuguc

SEQ ID NO: 22207 - RNA, 22 nt, Homo sapiens
acugcacuccagcuccagggug

SEQ ID NO: 22208 - RNA, 22 nt, Homo sapiens
gaggucaugucgggccccagga

SEQ ID NO: 22209 - RNA, 22 nt, Homo sapiens
gacuggccauugauacagaggu

SEQ ID NO: 22210 - RNA, 22 nt, Homo sapiens
cuccacugagcaggugggaggc

SEQ ID NO: 22211 - RNA, 22 nt, Homo sapiens
acccugucaaaacggaccaauc

SEQ ID NO: 22212 - RNA, 19 nt, Homo sapiens
caccgccugcccccugcug

SEQ ID NO: 22213 - RNA, 19 nt, Homo sapiens
agagacucauuguagcauu

SEQ ID NO: 22214 - RNA, 22 nt, Homo sapiens
gagacucuuagauuggaaaucu

SEQ ID NO: 22215 - RNA, 22 nt, Homo sapiens
aacuggccuggcgugcagaggg

SEQ ID NO: 22216 - RNA, 22 nt, Homo sapiens
ggcaccacagacgccaggcgug

SEQ ID NO: 22217 - RNA, 22 nt, Homo sapiens
acccugucaaaauggaccaauc

SEQ ID NO: 22218 - RNA, 22 nt, Homo sapiens
ugagcugguacuaauauuauca

SEQ ID NO: 22219 - RNA, 22 nt, Homo sapiens
cacugcacuccagcuugugggc

SEQ ID NO: 22220 - RNA, 22 nt, Homo sapiens
gcaccccuuaccgggcuggguu

SEQ ID NO: 22221 - RNA, 22 nt, Homo sapiens
uggaggacugcagaacugaggc

SEQ ID NO: 22222 - RNA, 22 nt, Homo sapiens
gacuggccuauaauggcgaauu

SEQ ID NO: 22223 - RNA, 22 nt, Homo sapiens
cucucugagccauggcugcccu

SEQ ID NO: 22224 - RNA, 17 nt, Homo sapiens
gcacuggcguaucccac

SEQ ID NO: 22225 - RNA, 22 nt, Homo sapiens
aggcacacaacccuggaccuga

SEQ ID NO: 22226 - RNA, 22 nt, Homo sapiens
caccagguuggagugcaguggu

SEQ ID NO: 22227 - RNA, 22 nt, Homo sapiens
aacuggccuccuugggaaauua

SEQ ID NO: 22228 - RNA, 19 nt, Homo sapiens
uuccugagaacaagggcuu

SEQ ID NO: 22229 - RNA, 22 nt, Homo sapiens
uguggcacuguguccagagaaa

SEQ ID NO: 22230 - RNA, 22 nt, Homo sapiens
gaggucauucugugguacccag

SEQ ID NO: 22231 - RNA, 21 nt, Homo sapiens
ucaggaccucuaguuagccag

SEQ ID NO: 22232 - RNA, 22 nt, Homo sapiens
gcaccacugcacucucagcuug

SEQ ID NO: 22233 - RNA, 22 nt, Homo sapiens
acccugucacucccaucaauuu

SEQ ID NO: 22234 - RNA, 22 nt, Homo sapiens
uggcaccauccaggugucucua

SEQ ID NO: 22235 - RNA, 22 nt, Homo sapiens
ucacuggccaaauucuggguga

SEQ ID NO: 22236 - RNA, 22 nt, Homo sapiens
cauggcccugggcugggcgaac

SEQ ID NO: 22237 - RNA, 22 nt, Homo sapiens
aacuggccugagaugaaaagug

SEQ ID NO: 22238 - RNA, 22 nt, Homo sapiens
acugcacuccagccugugagac

SEQ ID NO: 22239 - RNA, 22 nt, Homo sapiens
ggcaccauggaaggacgggagc

SEQ ID NO: 22240 - RNA, 22 nt, Homo sapiens
acagcacugccaagugacccau

SEQ ID NO: 22241 - RNA, 22 nt, Homo sapiens
aguggcacuauucucagaguca

SEQ ID NO: 22242 - RNA, 22 nt, Homo sapiens
aguggcacaauuuugacucccc

SEQ ID NO: 22243 - RNA, 22 nt, Homo sapiens
uacuggccuugaacucuggugu

SEQ ID NO: 22244 - RNA, 22 nt, Homo sapiens
acugcacuccagccuucaggac

SEQ ID NO: 22245 - RNA, 22 nt, Homo sapiens
ucacuggcaaauauauccguug

SEQ ID NO: 22246 - RNA, 22 nt, Homo sapiens
gcacccugucaaaauggaccaa

SEQ ID NO: 22247 - RNA, 20 nt, Homo sapiens
ucacccugacaucugcccag

SEQ ID NO: 22248 - RNA, 22 nt, Homo sapiens
ggucacccugaugcuggugguc

SEQ ID NO: 22249 - RNA, 22 nt, Homo sapiens
gugacacagcaagacuccgucu

SEQ ID NO: 22250 - RNA, 20 nt, Homo sapiens
uguggcacuguaucucucag

SEQ ID NO: 22251 - RNA, 22 nt, Homo sapiens
cugagcccauucuggggagaag

SEQ ID NO: 22252 - RNA, 22 nt, Homo sapiens
ucaugggagcccccaucaugag

SEQ ID NO: 22253 - RNA, 22 nt, Homo sapiens
ucugagucaucacaaaugaugc

SEQ ID NO: 22254 - RNA, 22 nt, Homo sapiens
uugggacccuguccuguaacaa

SEQ ID NO: 22255 - RNA, 22 nt, Homo sapiens
uugugcuugauuugccuagcug

SEQ ID NO: 22256 - RNA, 18 nt, Homo sapiens
uugugccugagaaggugg

SEQ ID NO: 22257 - RNA, 22 nt, Homo sapiens
uugugauggugcauacugagcu

SEQ ID NO: 22258 - RNA, 22 nt, Homo sapiens
uuugagcauggaaauggcauga

SEQ ID NO: 22259 - RNA, 22 nt, Homo sapiens
uuugagcaagaggugacauuau

SEQ ID NO: 22260 - RNA, 22 nt, Homo sapiens
uuugacuaccaggaauguucuu

SEQ ID NO: 22261 - RNA, 22 nt, Homo sapiens
uuugacuagaguguuuuacaac

SEQ ID NO: 22262 - RNA, 22 nt, Homo sapiens
uuuggcauauuuuaagcugguu

SEQ ID NO: 22263 - RNA, 22 nt, Homo sapiens
uuuggcaugggcuauuugcuuu

SEQ ID NO: 22264 - RNA, 22 nt, Homo sapiens
uuuguacacgugggugaauugu

SEQ ID NO: 22265 - RNA, 18 nt, Homo sapiens
uuuggcuguucaugacuc

SEQ ID NO: 22266 - RNA, 22 nt, Homo sapiens
uuuggcuguuucuggacuaaga

SEQ ID NO: 22267 - RNA, 22 nt, Homo sapiens
uuuggcauuuaaauaugcaugg

SEQ ID NO: 22268 - RNA, 22 nt, Homo sapiens
uuuggcauuugaguuuguagga

SEQ ID NO: 22269 - RNA, 22 nt, Homo sapiens
uuuggcuuaagauugacugcaa

SEQ ID NO: 22270 - RNA, 22 nt, Homo sapiens
uuugucacccugaauguaagau

SEQ ID NO: 22271 - RNA, 22 nt, Homo sapiens
uuugucacucuuggagguuguu

SEQ ID NO: 22272 - RNA, 22 nt, Homo sapiens
uuuuacacuguugguuggaaug

SEQ ID NO: 22273 - RNA, 22 nt, Homo sapiens
uuggacagaugguuacauuuuu

SEQ ID NO: 22274 - RNA, 19 nt, Homo sapiens
uugcauauguugaaccagc

SEQ ID NO: 22275 - RNA, 22 nt, Homo sapiens
uugaggucuucaggaucaggcu

SEQ ID NO: 22276 - RNA, 22 nt, Homo sapiens
uugagugaaggcuguguucuug

SEQ ID NO: 22277 - RNA, 22 nt, Homo sapiens
uucuugaggcaugccgcuggga

SEQ ID NO: 22278 - RNA, 22 nt, Homo sapiens
uucuguguuuaggucacggcua

SEQ ID NO: 22279 - RNA, 22 nt, Homo sapiens
uugucaaacucauucuccaucc

SEQ ID NO: 22280 - RNA, 22 nt, Homo sapiens
uuguaguguuuauucugucaac

SEQ ID NO: 22281 - RNA, 22 nt, Homo sapiens
uuggcucuggcugggcuccagc

SEQ ID NO: 22282 - RNA, 22 nt, Homo sapiens
uuggcucugcgucucgcggacg

SEQ ID NO: 22283 - RNA, 22 nt, Homo sapiens
uuggagcacuggggcacugaca

SEQ ID NO: 22284 - RNA, 22 nt, Homo sapiens
uuggacugggauggccgaggcu

SEQ ID NO: 22285 - RNA, 22 nt, Homo sapiens
uuggacugugagguuucguggg

SEQ ID NO: 22286 - RNA, 22 nt, Homo sapiens
uuggagagugauauucagaugc

SEQ ID NO: 22287 - RNA, 22 nt, Homo sapiens
uuggauuuuaacaaacuaggug

SEQ ID NO: 22288 - RNA, 22 nt, Homo sapiens
uuggcauuguggauggaaucau

SEQ ID NO: 22289 - RNA, 22 nt, Homo sapiens
uuccugugacuguguggcaccc

SEQ ID NO: 22290 - RNA, 22 nt, Homo sapiens
uuccuugagaaaguacaaggcu

SEQ ID NO: 22291 - RNA, 22 nt, Homo sapiens
uucuggccccucccaaucucau

SEQ ID NO: 22292 - RNA, 19 nt, Homo sapiens
uucucugguuguacuaccc

SEQ ID NO: 22293 - RNA, 22 nt, Homo sapiens
uucccugaaauauucacuuuca

SEQ ID NO: 22294 - RNA, 22 nt, Homo sapiens
uucccugagcaucuguugagcc

SEQ ID NO: 22295 - RNA, 22 nt, Homo sapiens
uuccaugugggcuugucaagua

SEQ ID NO: 22296 - RNA, 22 nt, Homo sapiens
uuccugagccuuguaucuagua

SEQ ID NO: 22297 - RNA, 22 nt, Homo sapiens
uuccugagagggcugggugcag

SEQ ID NO: 22298 - RNA, 22 nt, Homo sapiens
uuccuagagauuagcaagcugc

SEQ ID NO: 22299 - RNA, 22 nt, Homo sapiens
uuccagugggacgagaugugga

SEQ ID NO: 22300 - RNA, 21 nt, Homo sapiens
uuccagugagccuagaugccu

SEQ ID NO: 22301 - RNA, 22 nt, Homo sapiens
uuccacaaugguugaacuagcu

SEQ ID NO: 22302 - RNA, 22 nt, Homo sapiens
uucaaaguaaaaauguguucac

SEQ ID NO: 22303 - RNA, 22 nt, Homo sapiens
uuauugcuccagaggcugauuu

SEQ ID NO: 22304 - RNA, 22 nt, Homo sapiens
uuaguugcauucaugugagagu

SEQ ID NO: 22305 - RNA, 22 nt, Homo sapiens
uuacagcugggugugucuggua

SEQ ID NO: 22306 - RNA, 22 nt, Homo sapiens
uucaagucuuggcuuugccacc

SEQ ID NO: 22307 - RNA, 22 nt, Homo sapiens
uucacaaugccuuguugauggu

SEQ ID NO: 22308 - RNA, 22 nt, Homo sapiens
uucacagccgcaccccaucacu

SEQ ID NO: 22309 - RNA, 22 nt, Homo sapiens
uucagcuacuuggaaacagcaa

SEQ ID NO: 22310 - RNA, 22 nt, Homo sapiens
uucaagcugggcaaauaagggg

SEQ ID NO: 22311 - RNA, 22 nt, Homo sapiens
uucaaauguucuuucaccaccc

SEQ ID NO: 22312 - RNA, 22 nt, Homo sapiens
uucaguacuucaaaaucuuuaa

SEQ ID NO: 22313 - RNA, 22 nt, Homo sapiens
uuaagaugcauuuugaaguuaa

SEQ ID NO: 22314 - RNA, 22 nt, Homo sapiens
uuaagcugaauuuaagcuucgg

SEQ ID NO: 22315 - RNA, 22 nt, Homo sapiens
uuaagccaggugugguggcaca

SEQ ID NO: 22316 - RNA, 22 nt, Homo sapiens
uuaagcaaagguaacaugagaa

SEQ ID NO: 22317 - RNA, 18 nt, Homo sapiens
uuaaggcaggacuuuaag

SEQ ID NO: 22318 - RNA, 22 nt, Homo sapiens
uuaaacucaucacccagguagu

SEQ ID NO: 22319 - RNA, 20 nt, Homo sapiens
uuaaaucuagugcagacuca

SEQ ID NO: 22320 - RNA, 22 nt, Homo sapiens
uguucuugaguugggaguacaa

SEQ ID NO: 22321 - RNA, 22 nt, Homo sapiens
uguuauguauggagugauccca

SEQ ID NO: 22322 - RNA, 22 nt, Homo sapiens
ugugggaggugcuaauguaaau

SEQ ID NO: 22323 - RNA, 22 nt, Homo sapiens
uguucaugaguucucauuuuua

SEQ ID NO: 22324 - RNA, 22 nt, Homo sapiens
uguucuggagaguuuagucugg

SEQ ID NO: 22325 - RNA, 22 nt, Homo sapiens
uguucuggagccgguucaaaug

SEQ ID NO: 22326 - RNA, 22 nt, Homo sapiens
ugucuuguagacugaaggcuuc

SEQ ID NO: 22327 - RNA, 22 nt, Homo sapiens
ugucuuugguucaggcaaggag

SEQ ID NO: 22328 - RNA, 22 nt, Homo sapiens
ugugcgcaucggggccugcuuc

SEQ ID NO: 22329 - RNA, 22 nt, Homo sapiens
ugugacaaauuuaguggacugu

SEQ ID NO: 22330 - RNA, 22 nt, Homo sapiens
ugugaauggugcuuccuagaug

SEQ ID NO: 22331 - RNA, 22 nt, Homo sapiens
ugugaauggugcugccgugaag

SEQ ID NO: 22332 - RNA, 22 nt, Homo sapiens
ucaaguacugccuugcucuggc

SEQ ID NO: 22333 - RNA, 22 nt, Homo sapiens
ucaccguguaucauuucauccg

SEQ ID NO: 22334 - RNA, 22 nt, Homo sapiens
ucacccacacaggagacaggga

SEQ ID NO: 22335 - RNA, 22 nt, Homo sapiens
ucaccaguggcacuccagccug

SEQ ID NO: 22336 - RNA, 22 nt, Homo sapiens
ucagcaucacgugggcucccgu

SEQ ID NO: 22337 - RNA, 22 nt, Homo sapiens
ucagugcaggaaucucuagcca

SEQ ID NO: 22338 - RNA, 22 nt, Homo sapiens
ucagugaacgaggaggagggug

SEQ ID NO: 22339 - RNA, 23 nt, Homo sapiens
ucagugaaggaacaacuaaauag

SEQ ID NO: 22340 - RNA, 19 nt, Homo sapiens
ucccuguagaccacagugc

SEQ ID NO: 22341 - RNA, 22 nt, Homo sapiens
ucccugagcaaaguuuucugua

SEQ ID NO: 22342 - RNA, 22 nt, Homo sapiens
ucccugaagcugcagcaacaca

SEQ ID NO: 22343 - RNA, 22 nt, Homo sapiens
ucccugacagggucugagcuuu

SEQ ID NO: 22344 - RNA, 22 nt, Homo sapiens
uccccugagaccccucagcacu

SEQ ID NO: 22345 - RNA, 22 nt, Homo sapiens
uccccggaugacggccgcuuca

SEQ ID NO: 22346 - RNA, 18 nt, Homo sapiens
uccacgugcuuuccagau

SEQ ID NO: 22347 - RNA, 19 nt, Homo sapiens
uccaccgcgugcaccucua

SEQ ID NO: 22348 - RNA, 22 nt, Homo sapiens
uccacagugguggaauuguuca

SEQ ID NO: 22349 - RNA, 22 nt, Homo sapiens
ucgcauggucuccaggcagcuc

SEQ ID NO: 22350 - RNA, 22 nt, Homo sapiens
ugacuagugcccuuugcugccu

SEQ ID NO: 22351 - RNA, 22 nt, Homo sapiens
ugaagacauuuuugggugugua

SEQ ID NO: 22352 - RNA, 22 nt, Homo sapiens
ugacaugaugagcaauaauggc

SEQ ID NO: 22353 - RNA, 22 nt, Homo sapiens
ugacagugugagauccugucuc

SEQ ID NO: 22354 - RNA, 22 nt, Homo sapiens
ugacaugauguuccuacacugu

SEQ ID NO: 22355 - RNA, 22 nt, Homo sapiens
ucuauugguaggggcugaggca

SEQ ID NO: 22356 - RNA, 22 nt, Homo sapiens
ucucagcacagucagggcgccu

SEQ ID NO: 22357 - RNA, 22 nt, Homo sapiens
ucuuuugggccucuugucagac

SEQ ID NO: 22358 - RNA, 22 nt, Homo sapiens
ucuuuguugcauaggcuuguuc

SEQ ID NO: 22359 - RNA, 22 nt, Homo sapiens
ucuuuggguagauauguagcug

SEQ ID NO: 22360 - RNA, 22 nt, Homo sapiens
ucuuuggguguauuucacagcc

SEQ ID NO: 22361 - RNA, 22 nt, Homo sapiens
ucuuugaguggagcgaggcaga

SEQ ID NO: 22362 - RNA, 22 nt, Homo sapiens
ugagaacugcagggagcugcau

SEQ ID NO: 22363 - RNA, 22 nt, Homo sapiens
ugagcccauuguccugguuuau

SEQ ID NO: 22364 - RNA, 22 nt, Homo sapiens
ugagcuaggauccugucacugu

SEQ ID NO: 22365 - RNA, 22 nt, Homo sapiens
ugagcuccuucauaaaaaggca

SEQ ID NO: 22366 - RNA, 22 nt, Homo sapiens
ugagcugagacaauaaguuuuu

SEQ ID NO: 22367 - RNA, 22 nt, Homo sapiens
ugagguaggugaagaaugcacg

SEQ ID NO: 22368 - RNA, 22 nt, Homo sapiens
ugagguaugacuuauuauucuu

SEQ ID NO: 22369 - RNA, 22 nt, Homo sapiens
ugagguaaaacaaggauuggau

SEQ ID NO: 22370 - RNA, 22 nt, Homo sapiens
ugauagucuuugcuggugaccu

SEQ ID NO: 22371 - RNA, 22 nt, Homo sapiens
ugauagugccuuuuauaucucu

SEQ ID NO: 22372 - RNA, 22 nt, Homo sapiens
ugagguaugugaugucuuuuag

SEQ ID NO: 22373 - RNA, 21 nt, Homo sapiens
ugcagccauucagcccuaugc

SEQ ID NO: 22374 - RNA, 22 nt, Homo sapiens
ugcagguacuugacaacuuggg

SEQ ID NO: 22375 - RNA, 22 nt, Homo sapiens
ugcagguaggcaguaucauuua

SEQ ID NO: 22376 - RNA, 22 nt, Homo sapiens
ugcaccacugcaccccagucug

SEQ ID NO: 22377 - RNA, 22 nt, Homo sapiens
ugcaccacuguacuccagucug

SEQ ID NO: 22378 - RNA, 22 nt, Homo sapiens
ugaugguaguucagucaaugua

SEQ ID NO: 22379 - RNA, 20 nt, Homo sapiens
ugauguccaggcagagguuu

SEQ ID NO: 22380 - RNA, 22 nt, Homo sapiens
uggguaaaucucuguucagggc

SEQ ID NO: 22381 - RNA, 22 nt, Homo sapiens
ugggccgcugcaggaugguccc

SEQ ID NO: 22382 - RNA, 22 nt, Homo sapiens
ugggcaaaacuaagagcugugg

SEQ ID NO: 22383 - RNA, 22 nt, Homo sapiens
ugggcaaauugugagggaggua

SEQ ID NO: 22384 - RNA, 22 nt, Homo sapiens
uggucaugaggugaggcuucuc

SEQ ID NO: 22385 - RNA, 22 nt, Homo sapiens
ugggagcauugcauuagaagcc

SEQ ID NO: 22386 - RNA, 22 nt, Homo sapiens
uggagauguuuaaaauccacug

SEQ ID NO: 22387 - RNA, 22 nt, Homo sapiens
uggagcccuaaacuucuaauau

SEQ ID NO: 22388 - RNA, 22 nt, Homo sapiens
uggauuguaacauagaguaaau

SEQ ID NO: 22389 - RNA, 20 nt, Homo sapiens
uggauugugaugggauuugc

SEQ ID NO: 22390 - RNA, 19 nt, Homo sapiens
uggauuguuagagcagugu

SEQ ID NO: 22391 - RNA, 22 nt, Homo sapiens
uagacuguaagauccaggagag

SEQ ID NO: 22392 - RNA, 22 nt, Homo sapiens
uaaggcauuuuuuugaguugca

SEQ ID NO: 22393 - RNA, 22 nt, Homo sapiens
uaagggcaugcugcaugagagu

SEQ ID NO: 22394 - RNA, 22 nt, Homo sapiens
uaacauucacaugcugcaaaaa

SEQ ID NO: 22395 - RNA, 20 nt, Homo sapiens
guucccuguaggugugcgga

SEQ ID NO: 22396 - RNA, 22 nt, Homo sapiens
guugaaaucaucacuuggcaug

SEQ ID NO: 22397 - RNA, 22 nt, Homo sapiens
uaugcccauuuaaauugaacaa

SEQ ID NO: 22398 - RNA, 22 nt, Homo sapiens
uaugcuuauaaacauuugucag

SEQ ID NO: 22399 - RNA, 22 nt, Homo sapiens
uaugcacaugcaugcuugaaua

SEQ ID NO: 22400 - RNA, 17 nt, Homo sapiens
ucaaaugcucccaguga

SEQ ID NO: 22401 - RNA, 22 nt, Homo sapiens
uauaucacaugcacucauuuuc

SEQ ID NO: 22402 - RNA, 22 nt, Homo sapiens
uauaugucuucuuguaauuggc

SEQ ID NO: 22403 - RNA, 22 nt, Homo sapiens
uauagcuugauuauggugaugg

SEQ ID NO: 22404 - RNA, 22 nt, Homo sapiens
uaucagugaaucuuauuuugcc

SEQ ID NO: 22405 - RNA, 22 nt, Homo sapiens
uaucaccuugagagaccuuauc

SEQ ID NO: 22406 - RNA, 22 nt, Homo sapiens
uagcagcuuuauugagguaaau

SEQ ID NO: 22407 - RNA, 19 nt, Homo sapiens
ggucagcaaagucuagcug

SEQ ID NO: 22408 - RNA, 22 nt, Homo sapiens
ggggcauugugacauaucucug

SEQ ID NO: 22409 - RNA, 22 nt, Homo sapiens
guaggcacugaguguuuuacag

SEQ ID NO: 22410 - RNA, 22 nt, Homo sapiens
guaggcacuggcucagcuuauc

SEQ ID NO: 22411 - RNA, 22 nt, Homo sapiens
guagggcaggcugagaaauaua

SEQ ID NO: 22412 - RNA, 22 nt, Homo sapiens
guaucucaguucucgugauuag

SEQ ID NO: 22413 - RNA, 22 nt, Homo sapiens
guauggcacuauccucucugau

SEQ ID NO: 22414 - RNA, 22 nt, Homo sapiens
gcggguguuuuacccuugcaga

SEQ ID NO: 22415 - RNA, 22 nt, Homo sapiens
gcgagcauuguaggaaguucag

SEQ ID NO: 22416 - RNA, 22 nt, Homo sapiens
ggaagacaguguggugauuccu

SEQ ID NO: 22417 - RNA, 22 nt, Homo sapiens
gcccacuguuaaauuuguuuua

SEQ ID NO: 22418 - RNA, 22 nt, Homo sapiens
gccccgggugaugcagccguca

SEQ ID NO: 22419 - RNA, 22 nt, Homo sapiens
ggacaaaguauuuucaaaugua

SEQ ID NO: 22420 - RNA, 18 nt, Homo sapiens
ggcggguguuuuauucac

SEQ ID NO: 22421 - RNA, 22 nt, Homo sapiens
gucacagaaaaagauaugccaa

SEQ ID NO: 22422 - RNA, 18 nt, Homo sapiens
gucucacaugguggaagc

SEQ ID NO: 22423 - RNA, 22 nt, Homo sapiens
gugagcaguguccuugggggca

SEQ ID NO: 22424 - RNA, 22 nt, Homo sapiens
gugagcaaacuuaccuaagguu

SEQ ID NO: 22425 - RNA, 22 nt, Homo sapiens
guuauguuaaauuguuguaugc

SEQ ID NO: 22426 - RNA, 22 nt, Homo sapiens
guguguaaauggcagugagcuc

SEQ ID NO: 22427 - RNA, 22 nt, Homo sapiens
gugucuccugccuucaugcagc

SEQ ID NO: 22428 - RNA, 22 nt, Homo sapiens
guggaauuauagagacaucuug

SEQ ID NO: 22429 - RNA, 22 nt, Homo sapiens
guggcagaacagguaggguucu

SEQ ID NO: 22430 - RNA, 22 nt, Homo sapiens
auaaugcuggaacuagagggca

SEQ ID NO: 22431 - RNA, 22 nt, Homo sapiens
auaaacugucaguggagaguaa

SEQ ID NO: 22432 - RNA, 22 nt, Homo sapiens
aguacacuguuaaaaagaagug

SEQ ID NO: 22433 - RNA, 22 nt, Homo sapiens
aguaaauuucugugcuuucaua

SEQ ID NO: 22434 - RNA, 22 nt, Homo sapiens
aguaccauuagauuaggaugac

SEQ ID NO: 22435 - RNA, 22 nt, Homo sapiens
auaaaagcaggucuaggucagg

SEQ ID NO: 22436 - RNA, 22 nt, Homo sapiens
aucagcagcaugaaaagcaacu

SEQ ID NO: 22437 - RNA, 22 nt, Homo sapiens
aucauagcucacugcagccucg

SEQ ID NO: 22438 - RNA, 22 nt, Homo sapiens
aucauaucauuggugaacagug

SEQ ID NO: 22439 - RNA, 22 nt, Homo sapiens
aucacaauuguacguaggagcc

SEQ ID NO: 22440 - RNA, 22 nt, Homo sapiens
aucaaacugcaaggcagcagca

SEQ ID NO: 22441 - RNA, 22 nt, Homo sapiens
augauacugaguugaguucuca

SEQ ID NO: 22442 - RNA, 22 nt, Homo sapiens
augauacuggcuucauagaaug

SEQ ID NO: 22443 - RNA, 22 nt, Homo sapiens
augagcagaugcuccugccucu

SEQ ID NO: 22444 - RNA, 22 nt, Homo sapiens
augagacuguucuuccucauug

SEQ ID NO: 22445 - RNA, 22 nt, Homo sapiens
augaagcuagcugauugcugau

SEQ ID NO: 22446 - RNA, 17 nt, Homo sapiens
augaacucaucauuuuu

SEQ ID NO: 22447 - RNA, 18 nt, Homo sapiens
augaacucaucauuuuua

SEQ ID NO: 22448 - RNA, 22 nt, Homo sapiens
aucaugucuucccagugauucu

SEQ ID NO: 22449 - RNA, 22 nt, Homo sapiens
auguagugugauuuucacuaga

SEQ ID NO: 22450 - RNA, 22 nt, Homo sapiens
auggaagcauaguauucuauug

SEQ ID NO: 22451 - RNA, 22 nt, Homo sapiens
auggacagacacuggccuucug

SEQ ID NO: 22452 - RNA, 22 nt, Homo sapiens
auggacuuuuuguucagugucu

SEQ ID NO: 22453 - RNA, 22 nt, Homo sapiens
aggcugguauuuacaaaagcuc

SEQ ID NO: 22454 - RNA, 20 nt, Homo sapiens
aggcauguugguuugcgugu

SEQ ID NO: 22455 - RNA, 22 nt, Homo sapiens
aggcaugaguucagaggguaug

SEQ ID NO: 22456 - RNA, 22 nt, Homo sapiens
aggcaacaugguaaaacccugu

SEQ ID NO: 22457 - RNA, 22 nt, Homo sapiens
aggagcacaggacuuugauuau

SEQ ID NO: 22458 - RNA, 22 nt, Homo sapiens
aggaccauuguguagcagacau

SEQ ID NO: 22459 - RNA, 22 nt, Homo sapiens
agcucuuguuaguauuagcagu

SEQ ID NO: 22460 - RNA, 20 nt, Homo sapiens
agcugcagauauaaauccgc

SEQ ID NO: 22461 - RNA, 22 nt, Homo sapiens
agcuggacuugauaaaugaaua

SEQ ID NO: 22462 - RNA, 19 nt, Homo sapiens
agcuagugcucagcuguca

SEQ ID NO: 22463 - RNA, 22 nt, Homo sapiens
agaguacaggcaaguuagucau

SEQ ID NO: 22464 - RNA, 22 nt, Homo sapiens
agcagcaauuuuguaugguuua

SEQ ID NO: 22465 - RNA, 22 nt, Homo sapiens
agcgccacugcacuccagccug

SEQ ID NO: 22466 - RNA, 22 nt, Homo sapiens
agcggcuguuccccuggucuau

SEQ ID NO: 22467 - RNA, 22 nt, Homo sapiens
acuguguguuugucuagcacag

SEQ ID NO: 22468 - RNA, 22 nt, Homo sapiens
acugcacuccagccuucaggac

SEQ ID NO: 22469 - RNA, 20 nt, Homo sapiens
acugcacuccagccuuccag

SEQ ID NO: 22470 - RNA, 22 nt, Homo sapiens
acugcacuccagccuugagagc

SEQ ID NO: 22471 - RNA, 22 nt, Homo sapiens
acccugugaauauuuaaacuuc

SEQ ID NO: 22472 - RNA, 22 nt, Homo sapiens
acccugugagagaguuaauauu

SEQ ID NO: 22473 - RNA, 22 nt, Homo sapiens
acauguagacaacggacaaagu

SEQ ID NO: 22474 - RNA, 22 nt, Homo sapiens
accccugugacggguauuugag

SEQ ID NO: 22475 - RNA, 22 nt, Homo sapiens
accuugcacugagccgagauug

SEQ ID NO: 22476 - RNA, 22 nt, Homo sapiens
accugcacagccgaacauagac

SEQ ID NO: 22477 - RNA, 22 nt, Homo sapiens
acccuuuagguuggaugaggau

SEQ ID NO: 22478 - RNA, 22 nt, Homo sapiens
acccuuugucaaucaguacuaa

SEQ ID NO: 22479 - RNA, 22 nt, Homo sapiens
accucagcccggggaaguugag

SEQ ID NO: 22480 - RNA, 22 nt, Homo sapiens
acugcacuccagccucgcaaca

SEQ ID NO: 22481 - RNA, 22 nt, Homo sapiens
acugcacuccagccugccgaca

SEQ ID NO: 22482 - RNA, 22 nt, Homo sapiens
acugcacuccagccugagccug

SEQ ID NO: 22483 - RNA, 22 nt, Homo sapiens
acugcacuccagccuuagugac

SEQ ID NO: 22484 - RNA, 22 nt, Homo sapiens
acugcacuccagccuggcggac

SEQ ID NO: 22485 - RNA, 22 nt, Homo sapiens
acugcacuccagccugugagac

SEQ ID NO: 22486 - RNA, 22 nt, Homo sapiens
acugcacuccagccugcugaca

SEQ ID NO: 22487 - RNA, 22 nt, Homo sapiens
acugcacuccagccugcuggca

SEQ ID NO: 22488 - RNA, 22 nt, Homo sapiens
acugcacuccagccuggaccac

SEQ ID NO: 22489 - RNA, 22 nt, Homo sapiens
acugcacuccagccuggacgaa

SEQ ID NO: 22490 - RNA, 22 nt, Homo sapiens
acacuugcuugcaauagccucc

SEQ ID NO: 22491 - RNA, 22 nt, Homo sapiens
acacuuucuagacaagggaaua

SEQ ID NO: 22492 - RNA, 22 nt, Homo sapiens
acagagcaaugagcuacggucu

SEQ ID NO: 22493 - RNA, 23 nt, Homo sapiens
acacuugcugaguaaaucaaaua

SEQ ID NO: 22494 - RNA, 22 nt, Homo sapiens
acaaaguauggaauguuggugu

SEQ ID NO: 22495 - RNA, 22 nt, Homo sapiens
aauugccucaagugaucauggc

SEQ ID NO: 22496 - RNA, 22 nt, Homo sapiens
aaggcaacgugaguuguugauu

SEQ ID NO: 22497 - RNA, 22 nt, Homo sapiens
aaggcaagaagagaaccaucgg

SEQ ID NO: 22498 - RNA, 22 nt, Homo sapiens
aaugcacauaaaauccuccagg

SEQ ID NO: 22499 - RNA, 22 nt, Homo sapiens
aaugacuaagaugguacauuuu

SEQ ID NO: 22500 - RNA, 21 nt, Homo sapiens
gcaaaguggcuaccuugcucc

SEQ ID NO: 22501 - RNA, 22 nt, Homo sapiens
gauugcuaaauuguccuucugu

SEQ ID NO: 22502 - RNA, 22 nt, Homo sapiens
gcaugacaaugauugcucuuca

SEQ ID NO: 22503 - RNA, 22 nt, Homo sapiens
gcaggauuggagccucucugaa

SEQ ID NO: 22504 - RNA, 22 nt, Homo sapiens
gcagugcuggagcccccgugug

SEQ ID NO: 22505 - RNA, 20 nt, Homo sapiens
gcaguguucugaccugaauc

SEQ ID NO: 22506 - RNA, 22 nt, Homo sapiens
gagcuagcauuuagacaucugg

SEQ ID NO: 22507 - RNA, 22 nt, Homo sapiens
gagcacugaauacugugguggu

SEQ ID NO: 22508 - RNA, 22 nt, Homo sapiens
gagcaguugagagugcuggcca

SEQ ID NO: 22509 - RNA, 22 nt, Homo sapiens
gagcaucauggggccaaagcgc

SEQ ID NO: 22510 - RNA, 22 nt, Homo sapiens
gacuaggagagcagcugcccau

SEQ ID NO: 22511 - RNA, 22 nt, Homo sapiens
gagcugaucuuuauguaaauuc

SEQ ID NO: 22512 - RNA, 20 nt, Homo sapiens
gagcugguguacugccgggc

SEQ ID NO: 22513 - RNA, 22 nt, Homo sapiens
gaugacacugggucaaaucuca

SEQ ID NO: 22514 - RNA, 22 nt, Homo sapiens
gaugaugcuagguguuagggcu

SEQ ID NO: 22515 - RNA, 22 nt, Homo sapiens
gagguagguacaauugccacca

SEQ ID NO: 22516 - RNA, 19 nt, Homo sapiens
cugaaacacagagagggcu

SEQ ID NO: 22517 - RNA, 22 nt, Homo sapiens
cucuuugcuucuggcaucauug

SEQ ID NO: 22518 - RNA, 22 nt, Homo sapiens
cucugcuuaaugucccacuuga

SEQ ID NO: 22519 - RNA, 22 nt, Homo sapiens
cucuuggguagauuuugcagag

SEQ ID NO: 22520 - RNA, 22 nt, Homo sapiens
cuggcaaaaagagggcaauaau

SEQ ID NO: 22521 - RNA, 22 nt, Homo sapiens
cuggcucugagguguuuagggc

SEQ ID NO: 22522 - RNA, 22 nt, Homo sapiens
cuggcugagugguaaguagagg

SEQ ID NO: 22523 - RNA, 22 nt, Homo sapiens
cugguaagaaggucuaagucaa

SEQ ID NO: 22524 - RNA, 22 nt, Homo sapiens
cuguguaguacuagauugagca

SEQ ID NO: 22525 - RNA, 20 nt, Homo sapiens
cuuccaguggccccaucuuu

SEQ ID NO: 22526 - RNA, 22 nt, Homo sapiens
cugugguuacguucuuugugcu

SEQ ID NO: 22527 - RNA, 22 nt, Homo sapiens
cugugguguaacucuuggggcg

SEQ ID NO: 22528 - RNA, 21 nt, Homo sapiens
gaccacagcagggaaugucag

SEQ ID NO: 22529 - RNA, 22 nt, Homo sapiens
gacauguuuuuuaagguuuaug

SEQ ID NO: 22530 - RNA, 22 nt, Homo sapiens
cuuuuggucuaucagagaagca

SEQ ID NO: 22531 - RNA, 22 nt, Homo sapiens
cuugcauagaguuauugcccuu

SEQ ID NO: 22532 - RNA, 18 nt, Homo sapiens
cacugagcccuucacucu

SEQ ID NO: 22533 - RNA, 22 nt, Homo sapiens
cagagaacauucagagcuguag

SEQ ID NO: 22534 - RNA, 21 nt, Homo sapiens
cacuggguucaggcuugugga

SEQ ID NO: 22535 - RNA, 22 nt, Homo sapiens
cagagcacuaaagguaaaaggc

SEQ ID NO: 22536 - RNA, 22 nt, Homo sapiens
cagagucaagcucuuguuccau

SEQ ID NO: 22537 - RNA, 19 nt, Homo sapiens
caccgccugcccccugcug

SEQ ID NO: 22538 - RNA, 22 nt, Homo sapiens
cacccuaucagauguccagaga

SEQ ID NO: 22539 - RNA, 22 nt, Homo sapiens
cacagagugagacccugucucu

SEQ ID NO: 22540 - RNA, 22 nt, Homo sapiens
augugcaauguguacguagccc

SEQ ID NO: 22541 - RNA, 22 nt, Homo sapiens
augugaacugaauuaauucaca

SEQ ID NO: 22542 - RNA, 22 nt, Homo sapiens
augugacugauggagaauaugu

SEQ ID NO: 22543 - RNA, 22 nt, Homo sapiens
auugcucacacaaagccuguuu

SEQ ID NO: 22544 - RNA, 22 nt, Homo sapiens
auugcuuacccuguauuagauc

SEQ ID NO: 22545 - RNA, 22 nt, Homo sapiens
auugcuuuuacugggagcuuug

SEQ ID NO: 22546 - RNA, 22 nt, Homo sapiens
cagcaguuguuucggauuggga

SEQ ID NO: 22547 - RNA, 22 nt, Homo sapiens
cagcaucauucaucugggguaa

SEQ ID NO: 22548 - RNA, 22 nt, Homo sapiens
cagcacauuacaaguacuuggu

SEQ ID NO: 22549 - RNA, 22 nt, Homo sapiens
cagcacauagcaguugcucagu

SEQ ID NO: 22550 - RNA, 23 nt, Homo sapiens
cauggcuguuaacacuguuugag

SEQ ID NO: 22551 - RNA, 22 nt, Homo sapiens
caugucuuuuauucugugugau

SEQ ID NO: 22552 - RNA, 22 nt, Homo sapiens
ccauggcaauggucagucuauu

SEQ ID NO: 22553 - RNA, 22 nt, Homo sapiens
ccagugucugacagacacggcg

SEQ ID NO: 22554 - RNA, 22 nt, Homo sapiens
ccagccgggugcaguggcucac

SEQ ID NO: 22555 - RNA, 22 nt, Homo sapiens
ccuggaucauugucauucccaa

SEQ ID NO: 22556 - RNA, 22 nt, Homo sapiens
ccugagguagaguuuauauuga

SEQ ID NO: 22557 - RNA, 22 nt, Homo sapiens
ccccauuugaacuccuucaacu

SEQ ID NO: 22558 - RNA, 21 nt, Homo sapiens
cuaucucaguguuuacauuug

SEQ ID NO: 22559 - RNA, 22 nt, Homo sapiens
cuaucucauugguuuuugaaag

SEQ ID NO: 22560 - RNA, 22 nt, Homo sapiens
cuccaggugucauccaccuccu

SEQ ID NO: 22561 - RNA, 22 nt, Homo sapiens
cucauggagaacaucugcuagg

SEQ ID NO: 22562 - RNA, 20 nt, Homo sapiens
cucccugacaaauguggaaa

SEQ ID NO: 22563 - RNA, 22 nt, Homo sapiens
cuccuggugauuggagugugaa

SEQ ID NO: 22564 - RNA, 22 nt, Homo sapiens
aaagcuaagguagcauuggaga

SEQ ID NO: 22565 - RNA, 22 nt, Homo sapiens
aagugaaugaugugaaguguaa

SEQ ID NO: 22566 - RNA, 22 nt, Homo sapiens
aagcuccauuucugccaugaga

SEQ ID NO: 22567 - RNA, 22 nt, Homo sapiens
aagcuggauuucgcauccuguu

SEQ ID NO: 22568 - RNA, 22 nt, Homo sapiens
aaugacacugagcaucuuucau

SEQ ID NO: 22569 - RNA, 22 nt, Homo sapiens
aaucacuuugcuacaaggcagu

SEQ ID NO: 22570 - RNA, 22 nt, Homo sapiens
aaucacagccagcuuccgcuau

SEQ ID NO: 22571 - RNA, 22 nt, Homo sapiens
aauacuggcacugaagaccaug

SEQ ID NO: 22572 - RNA, 22 nt, Homo sapiens
aauacucaguccuggugaggcu

SEQ ID NO: 22573 - RNA, 22 nt, Homo sapiens
aaaccacagugugcugcugggg

SEQ ID NO: 22574 - RNA, 22 nt, Homo sapiens
aaacugcuuuccaugguggcug

SEQ ID NO: 22575 - RNA, 22 nt, Homo sapiens
aaaugcagucuuuguucugggc

SEQ ID NO: 22576 - RNA, 21 nt, Homo sapiens
aagaaagcuggacuugccgcu

SEQ ID NO: 22577 - RNA, 22 nt, Homo sapiens
aacuccauuuuagacccuagau

SEQ ID NO: 22578 - RNA, 20 nt, Homo sapiens
aagacacuguccccacugga

SEQ ID NO: 22579 - RNA, 22 nt, Homo sapiens
acugcacuccagccucggcaau

SEQ ID NO: 22580 - RNA, 22 nt, Homo sapiens
acugcacuccagccucggggac

SEQ ID NO: 22581 - RNA, 22 nt, Homo sapiens
aaugucaugaguccaaccagaa

SEQ ID NO: 22582 - RNA, 23 nt, Homo sapiens
agagugcaauggugccaucucgg

SEQ ID NO: 22583 - RNA, 22 nt, Homo sapiens
agaaaugcagcaugaggcggca

SEQ ID NO: 22584 - RNA, 22 nt, Homo sapiens
acugcacuccagccuucggaca

SEQ ID NO: 22585 - RNA, 22 nt, Homo sapiens
acugcacuccagccuucgugac

SEQ ID NO: 22586 - RNA, 22 nt, Homo sapiens
acugcacuccagccugugcgua

SEQ ID NO: 22587 - RNA, 22 nt, Homo sapiens
acugcacuccagccuguugaca

SEQ ID NO: 22588 - RNA, 22 nt, Homo sapiens
acugcacuccagccuggacgac

SEQ ID NO: 22589 - RNA, 22 nt, Homo sapiens
acugcacuccagccugcccaac

SEQ ID NO: 22590 - RNA, 22 nt, Homo sapiens
acugcacuccagccugaugaaa

SEQ ID NO: 22591 - RNA, 22 nt, Homo sapiens
acugcacuccagccucggugac

SEQ ID NO: 22592 - RNA, 22 nt, Homo sapiens
acugcacuccagccucgugaca

SEQ ID NO: 22593 - RNA, 22 nt, Homo sapiens
acugcacuccagccucguggac

SEQ ID NO: 22594 - RNA, 22 nt, Homo sapiens
acugcacuccagccugcugggu

SEQ ID NO: 22595 - RNA, 22 nt, Homo sapiens
acugcacuccagccugcuggau

SEQ ID NO: 22596 - RNA, 22 nt, Homo sapiens
agugcaauggcgugaucuuggc

SEQ ID NO: 22597 - RNA, 22 nt, Homo sapiens
aguccagguuuuguaauggcaa

SEQ ID NO: 22598 - RNA, 19 nt, Homo sapiens
agugagccaagauccuacc

SEQ ID NO: 22599 - RNA, 22 nt, Homo sapiens
agggagcaaaguggucuuucuc

SEQ ID NO: 22600 - RNA, 22 nt, Homo sapiens
agggcaguguuaggacugucug

SEQ ID NO: 22601 - RNA, 22 nt, Homo sapiens
agugguauaauauuauuuugaa

SEQ ID NO: 22602 - RNA, 22 nt, Homo sapiens
agcaccacaauuuccugccuaa

SEQ ID NO: 22603 - RNA, 22 nt, Homo sapiens
agccaguauuuugaguuggucu

SEQ ID NO: 22604 - RNA, 20 nt, Homo sapiens
agccccauguaaaccacaug

SEQ ID NO: 22605 - RNA, 20 nt, Homo sapiens
agcugguuuuaugaaucuuu

SEQ ID NO: 22606 - RNA, 22 nt, Homo sapiens
agcuguaguuugguggauguaa

SEQ ID NO: 22607 - RNA, 22 nt, Homo sapiens
agcuguuguacacuuuaccuuu

SEQ ID NO: 22608 - RNA, 20 nt, Homo sapiens
agcuguuguuaaaaaggagg

SEQ ID NO: 22609 - RNA, 22 nt, Homo sapiens
aggcaagugggagacagcauuu

SEQ ID NO: 22610 - RNA, 22 nt, Homo sapiens
aggcaaguugcucaaaugcaaa

SEQ ID NO: 22611 - RNA, 21 nt, Homo sapiens
aggcaagacuuuuagguuugu

SEQ ID NO: 22612 - RNA, 22 nt, Homo sapiens
aggagguagucugucccuuagc

SEQ ID NO: 22613 - RNA, 20 nt, Homo sapiens
agcuguuguuaugagguuua

SEQ ID NO: 22614 - RNA, 22 nt, Homo sapiens
agcuguuguuaauuaacucauu

SEQ ID NO: 22615 - RNA, 22 nt, Homo sapiens
aucaucaugcacuacagccugg

SEQ ID NO: 22616 - RNA, 22 nt, Homo sapiens
augaaaacaugauuugccuguu

SEQ ID NO: 22617 - RNA, 22 nt, Homo sapiens
augagauacuacaaaugaguuu

SEQ ID NO: 22618 - RNA, 22 nt, Homo sapiens
augagacuagaagagaauaaua

SEQ ID NO: 22619 - RNA, 18 nt, Homo sapiens
augaacucaucauuuuuu

SEQ ID NO: 22620 - RNA, 19 nt, Homo sapiens
augaacucaucauuucuca

SEQ ID NO: 22621 - RNA, 22 nt, Homo sapiens
auaaccuauggaucuacucggg

SEQ ID NO: 22622 - RNA, 22 nt, Homo sapiens
auagcagugugaaaauggacua

SEQ ID NO: 22623 - RNA, 22 nt, Homo sapiens
auagcagugugaaaauguacua

SEQ ID NO: 22624 - RNA, 22 nt, Homo sapiens
auagccucauucuucagaugag

SEQ ID NO: 22625 - RNA, 22 nt, Homo sapiens
auauggguauuaagaaucaaaa

SEQ ID NO: 22626 - RNA, 21 nt, Homo sapiens
auauggaacuggugacguguu

SEQ ID NO: 22627 - RNA, 22 nt, Homo sapiens
auuccacagccgauaccaugac

SEQ ID NO: 22628 - RNA, 22 nt, Homo sapiens
auugcaaagcguagacucuaaa

SEQ ID NO: 22629 - RNA, 22 nt, Homo sapiens
augagaucugugaacaccuguc

SEQ ID NO: 22630 - RNA, 22 nt, Homo sapiens
auggccugaugcaccuguccca

SEQ ID NO: 22631 - RNA, 22 nt, Homo sapiens
auggcucaguguguaucuauca

SEQ ID NO: 22632 - RNA, 22 nt, Homo sapiens
aagcucuuguugaaucuuguca

SEQ ID NO: 22633 - RNA, 22 nt, Homo sapiens
aagagguaggaaauggucauuu

SEQ ID NO: 22634 - RNA, 18 nt, Homo sapiens
aagagcucagcacagguu

SEQ ID NO: 22635 - RNA, 22 nt, Homo sapiens
aagagcucucuguagcauguga

SEQ ID NO: 22636 - RNA, 20 nt, Homo sapiens
aagagcucaccagaauaucu

SEQ ID NO: 22637 - RNA, 18 nt, Homo sapiens
uuucauugagugugauau

SEQ ID NO: 22638 - RNA, 22 nt, Homo sapiens
uuuggcagaaaacuaaaaggua

SEQ ID NO: 22639 - RNA, 22 nt, Homo sapiens
uuuguacacuguuggugguuau

SEQ ID NO: 22640 - RNA, 22 nt, Homo sapiens
uuuguacucccuuuagauaaaa

SEQ ID NO: 22641 - RNA, 22 nt, Homo sapiens
uuugucaauaacuaccaacagg

SEQ ID NO: 22642 - RNA, 21 nt, Homo sapiens
uuuugcacacuaugcagcuuu

SEQ ID NO: 22643 - RNA, 22 nt, Homo sapiens
uugugcuuuugagcugagauga

SEQ ID NO: 22644 - RNA, 22 nt, Homo sapiens
uugugccccuucucagucgggc

SEQ ID NO: 22645 - RNA, 22 nt, Homo sapiens
uugugccugguacauggagaaa

SEQ ID NO: 22646 - RNA, 22 nt, Homo sapiens
uugugcuccagagacgggcucg

SEQ ID NO: 22647 - RNA, 22 nt, Homo sapiens
uuguuaagaugcagauucugga

SEQ ID NO: 22648 - RNA, 22 nt, Homo sapiens
uuuaagguauguggugaaaauu

SEQ ID NO: 22649 - RNA, 23 nt, Homo sapiens
uuuaagcuucauguccuaacauc

SEQ ID NO: 22650 - RNA, 22 nt, Homo sapiens
uuguacuagaaaauuauucuuu

SEQ ID NO: 22651 - RNA, 22 nt, Homo sapiens
uuggcuuuuaugcagcuuaggu

SEQ ID NO: 22652 - RNA, 21 nt, Homo sapiens
uuggggaauggagagguuuuc

SEQ ID NO: 22653 - RNA, 22 nt, Homo sapiens
uuggauuuugguggcaacucau

SEQ ID NO: 22654 - RNA, 22 nt, Homo sapiens
uugauaguccuguaucuauuuu

SEQ ID NO: 22655 - RNA, 22 nt, Homo sapiens
uugauauuaaguacugaagugg

SEQ ID NO: 22656 - RNA, 22 nt, Homo sapiens
uugaucaaaucugagugagaau

SEQ ID NO: 22657 - RNA, 22 nt, Homo sapiens
uuggacuucuaacugacaugga

SEQ ID NO: 22658 - RNA, 22 nt, Homo sapiens
uuggacaagauugcagagaauu

SEQ ID NO: 22659 - RNA, 22 nt, Homo sapiens
uugagcaucauguuagcacuca

SEQ ID NO: 22660 - RNA, 22 nt, Homo sapiens
uugagcccuggaggcagaggcu

SEQ ID NO: 22661 - RNA, 22 nt, Homo sapiens
uugagcuuuuuacuuguccaau

SEQ ID NO: 22662 - RNA, 22 nt, Homo sapiens
uugaggguggcauauauugauu

SEQ ID NO: 22663 - RNA, 22 nt, Homo sapiens
uugacaaguuguccaguaugag

SEQ ID NO: 22664 - RNA, 22 nt, Homo sapiens
uugaccaaagaagagucauugc

SEQ ID NO: 22665 - RNA, 22 nt, Homo sapiens
uuccuggaggggaaguguccaa

SEQ ID NO: 22666 - RNA, 20 nt, Homo sapiens
uucuaguacuucuguuucca

SEQ ID NO: 22667 - RNA, 22 nt, Homo sapiens
uuccaggugggcgugggccugg

SEQ ID NO: 22668 - RNA, 22 nt, Homo sapiens
uuccacaauggcugaacuaguu

SEQ ID NO: 22669 - RNA, 22 nt, Homo sapiens
uucagcacaguguggaucauuc

SEQ ID NO: 22670 - RNA, 22 nt, Homo sapiens
uuccacaaugguugaacuaguu

SEQ ID NO: 22671 - RNA, 20 nt, Homo sapiens
uucacggaggccgcgccccc

SEQ ID NO: 22672 - RNA, 22 nt, Homo sapiens
uucacugugugacccugggcca

SEQ ID NO: 22673 - RNA, 22 nt, Homo sapiens
uucagcacugaaaauaugucau

SEQ ID NO: 22674 - RNA, 22 nt, Homo sapiens
ugugacugguugucccgcuuuc

SEQ ID NO: 22675 - RNA, 22 nt, Homo sapiens
ugugaacagaauuagucaccua

SEQ ID NO: 22676 - RNA, 22 nt, Homo sapiens
uuaccucagaccugcucugugu

SEQ ID NO: 22677 - RNA, 22 nt, Homo sapiens
uuaaucacagcugaacucaaac

SEQ ID NO: 22678 - RNA, 22 nt, Homo sapiens
uuagcucaguuggugagagcgu

SEQ ID NO: 22679 - RNA, 22 nt, Homo sapiens
uuagcccaucuugaggaaagua

SEQ ID NO: 22680 - RNA, 22 nt, Homo sapiens
ugagauccugagaguugggacu

SEQ ID NO: 22681 - RNA, 18 nt, Homo sapiens
ugagaucagcaucaaggg

SEQ ID NO: 22682 - RNA, 22 nt, Homo sapiens
ugagauaggaucuugcucuguu

SEQ ID NO: 22683 - RNA, 22 nt, Homo sapiens
ugagaugaagcuagaagaaugg

SEQ ID NO: 22684 - RNA, 22 nt, Homo sapiens
ugagguaacagaagcgagcauu

SEQ ID NO: 22685 - RNA, 22 nt, Homo sapiens
ugaggcaggagaacggcuugaa

SEQ ID NO: 22686 - RNA, 22 nt, Homo sapiens
ugagaugaucaaaguauaggcu

SEQ ID NO: 22687 - RNA, 22 nt, Homo sapiens
ugagacugauaggacauuuucu

SEQ ID NO: 22688 - RNA, 22 nt, Homo sapiens
ugagacugagucucgcucuugu

SEQ ID NO: 22689 - RNA, 22 nt, Homo sapiens
ugagacugaguuucacuuuugu

SEQ ID NO: 22690 - RNA, 22 nt, Homo sapiens
ugagagcuuuuuugccugguga

SEQ ID NO: 22691 - RNA, 22 nt, Homo sapiens
ugagagcuuugaugcacuguuu

SEQ ID NO: 22692 - RNA, 22 nt, Homo sapiens
ugagaggugauaaagcaagggu

SEQ ID NO: 22693 - RNA, 22 nt, Homo sapiens
ugagacaaaguuguuggauguu

SEQ ID NO: 22694 - RNA, 22 nt, Homo sapiens
ugaaaguuauauugugaaauuc

SEQ ID NO: 22695 - RNA, 22 nt, Homo sapiens
ugaaagacacagaaguugccca

SEQ ID NO: 22696 - RNA, 22 nt, Homo sapiens
ucuuuuguucuauucaggccuu

SEQ ID NO: 22697 - RNA, 22 nt, Homo sapiens
ugacaagggaaaugcaaaaugu

SEQ ID NO: 22698 - RNA, 22 nt, Homo sapiens
ugacuacagauuugcugccaga

SEQ ID NO: 22699 - RNA, 20 nt, Homo sapiens
ugacuggauacccuuuggcu

SEQ ID NO: 22700 - RNA, 22 nt, Homo sapiens
ugacuggagucuugcucugucg

SEQ ID NO: 22701 - RNA, 21 nt, Homo sapiens
ucucucaaccaggaagugggc

SEQ ID NO: 22702 - RNA, 22 nt, Homo sapiens
ucucuuggcggaaguugcagug

SEQ ID NO: 22703 - RNA, 22 nt, Homo sapiens
ucccugaguaucuaauguguuu

SEQ ID NO: 22704 - RNA, 19 nt, Homo sapiens
ucccugagucuuagcuuga

SEQ ID NO: 22705 - RNA, 22 nt, Homo sapiens
ucagagucuagaucacucacug

SEQ ID NO: 22706 - RNA, 22 nt, Homo sapiens
ucagaguagaaacacuuccaua

SEQ ID NO: 22707 - RNA, 19 nt, Homo sapiens
ucugacagccccagucaac

SEQ ID NO: 22708 - RNA, 22 nt, Homo sapiens
ucugagguaggugcauggauac

SEQ ID NO: 22709 - RNA, 22 nt, Homo sapiens
ucugagguuaaauuuuauaguu

SEQ ID NO: 22710 - RNA, 22 nt, Homo sapiens
ucugagguuacugcuuuguaga

SEQ ID NO: 22711 - RNA, 22 nt, Homo sapiens
ucugcaagucuaaacuagccau

SEQ ID NO: 22712 - RNA, 22 nt, Homo sapiens
ucuggcacugaugugggaugcu

SEQ ID NO: 22713 - RNA, 22 nt, Homo sapiens
uggaaucuuaggugaaggcuuu

SEQ ID NO: 22714 - RNA, 22 nt, Homo sapiens
ugcuguuguuugaugaaguaau

SEQ ID NO: 22715 - RNA, 18 nt, Homo sapiens
ugcuaugagauuauuuua

SEQ ID NO: 22716 - RNA, 22 nt, Homo sapiens
ugcugguauuuggaccagccug

SEQ ID NO: 22717 - RNA, 20 nt, Homo sapiens
ugcugcacuuaagcaugggc

SEQ ID NO: 22718 - RNA, 22 nt, Homo sapiens
ugcugcaaacaugagaggaagu

SEQ ID NO: 22719 - RNA, 22 nt, Homo sapiens
ugaguuaggagaguguggcucu

SEQ ID NO: 22720 - RNA, 22 nt, Homo sapiens
ugaguugagauaagguuacauu

SEQ ID NO: 22721 - RNA, 22 nt, Homo sapiens
ugauaagugaaagugcucuauc

SEQ ID NO: 22722 - RNA, 22 nt, Homo sapiens
ugagugaaagaagcacuaagga

SEQ ID NO: 22723 - RNA, 22 nt, Homo sapiens
ugagguguuauccagaguucuu

SEQ ID NO: 22724 - RNA, 22 nt, Homo sapiens
ugaggugaggguaucaaaugcu

SEQ ID NO: 22725 - RNA, 22 nt, Homo sapiens
ugaggcaaggcugaaugaaggc

SEQ ID NO: 22726 - RNA, 22 nt, Homo sapiens
ugagguauuuuguuaugcagcc

SEQ ID NO: 22727 - RNA, 22 nt, Homo sapiens
ugcagcauugcacuccagccug

SEQ ID NO: 22728 - RNA, 22 nt, Homo sapiens
ugcaagacugcaguuacuuuug

SEQ ID NO: 22729 - RNA, 22 nt, Homo sapiens
ugcaagucaucuguccuucaga

SEQ ID NO: 22730 - RNA, 20 nt, Homo sapiens
ugcaaguugccuuuggaggc

SEQ ID NO: 22731 - RNA, 22 nt, Homo sapiens
ugucauguuucuacugaccaaa

SEQ ID NO: 22732 - RNA, 19 nt, Homo sapiens
uguccuagaggaguucaca

SEQ ID NO: 22733 - RNA, 21 nt, Homo sapiens
ugucaugcagagacccuggag

SEQ ID NO: 22734 - RNA, 22 nt, Homo sapiens
ugucaugucuuuguguaucaau

SEQ ID NO: 22735 - RNA, 22 nt, Homo sapiens
ugucaagaugguuugauguugu

SEQ ID NO: 22736 - RNA, 22 nt, Homo sapiens
ugucaggaugcuccuuuuggcu

SEQ ID NO: 22737 - RNA, 22 nt, Homo sapiens
uguagucauuugaaggaugucc

SEQ ID NO: 22738 - RNA, 22 nt, Homo sapiens
ugggaagcugcugaacuacagu

SEQ ID NO: 22739 - RNA, 22 nt, Homo sapiens
ugggaagauucuguguuuuucc

SEQ ID NO: 22740 - RNA, 22 nt, Homo sapiens
uggcggagacauggacuucaga

SEQ ID NO: 22741 - RNA, 22 nt, Homo sapiens
ugggaucauuaugcauagugua

SEQ ID NO: 22742 - RNA, 22 nt, Homo sapiens
gagcaacaguggcagugguggg

SEQ ID NO: 22743 - RNA, 22 nt, Homo sapiens
gagcaaugagcugccugcugag

SEQ ID NO: 22744 - RNA, 22 nt, Homo sapiens
gagcaucaguggccucaucuca

SEQ ID NO: 22745 - RNA, 22 nt, Homo sapiens
gagcuacauggauagucugcau

SEQ ID NO: 22746 - RNA, 22 nt, Homo sapiens
gagccggugugauggggcuucu

SEQ ID NO: 22747 - RNA, 22 nt, Homo sapiens
gagugcaaagguccugaggugg

SEQ ID NO: 22748 - RNA, 22 nt, Homo sapiens
gagcuccuccccuuggcuuuca

SEQ ID NO: 22749 - RNA, 22 nt, Homo sapiens
gaccacauuccacacaggcuuu

SEQ ID NO: 22750 - RNA, 22 nt, Homo sapiens
gaccacagacuggaaagagggc

SEQ ID NO: 22751 - RNA, 22 nt, Homo sapiens
gacauguuucucucuguuuacu

SEQ ID NO: 22752 - RNA, 22 nt, Homo sapiens
gacuggcuguuuucuuuauuau

SEQ ID NO: 22753 - RNA, 22 nt, Homo sapiens
gaaaguguugagauuacaggca

SEQ ID NO: 22754 - RNA, 22 nt, Homo sapiens
gaaagugcugcuugacugggau

SEQ ID NO: 22755 - RNA, 22 nt, Homo sapiens
gaaauggaucagagcaagcuuu

SEQ ID NO: 22756 - RNA, 22 nt, Homo sapiens
gaaagauuuccugagcuagaaa

SEQ ID NO: 22757 - RNA, 19 nt, Homo sapiens
cuguggucauuauuuugcu

SEQ ID NO: 22758 - RNA, 22 nt, Homo sapiens
cugucucagccucuccaguagc

SEQ ID NO: 22759 - RNA, 22 nt, Homo sapiens
cugucuguuucaaaagugguua

SEQ ID NO: 22760 - RNA, 22 nt, Homo sapiens
gcugagguucaagaagguuaaa

SEQ ID NO: 22761 - RNA, 16 nt, Homo sapiens
gcucuuguucucuguu

SEQ ID NO: 22762 - RNA, 22 nt, Homo sapiens
gcugagaucucuugccugaacu

SEQ ID NO: 22763 - RNA, 22 nt, Homo sapiens
gcucaguuuccucagcugcaaa

SEQ ID NO: 22764 - RNA, 18 nt, Homo sapiens
gcuguugucagagcacau

SEQ ID NO: 22765 - RNA, 22 nt, Homo sapiens
gcugauggugcaguucuagccu

SEQ ID NO: 22766 - RNA, 22 nt, Homo sapiens
gcugcacuuuaaggcauccccu

SEQ ID NO: 22767 - RNA, 22 nt, Homo sapiens
gcuuuggcauguagauguaugg

SEQ ID NO: 22768 - RNA, 22 nt, Homo sapiens
gcuuuguugauggugagucugu

SEQ ID NO: 22769 - RNA, 22 nt, Homo sapiens
gcuguuugccgccaucgcagac

SEQ ID NO: 22770 - RNA, 19 nt, Homo sapiens
gcuucuugaggacgaugac

SEQ ID NO: 22771 - RNA, 22 nt, Homo sapiens
gcuugguccccacccaaaucgc

SEQ ID NO: 22772 - RNA, 22 nt, Homo sapiens
gcuuuggauaaaugucaguuua

SEQ ID NO: 22773 - RNA, 23 nt, Homo sapiens
ggaguguauuggcacgaucucag

SEQ ID NO: 22774 - RNA, 23 nt, Homo sapiens
ggaguguaaauuauuucaaccau

SEQ ID NO: 22775 - RNA, 22 nt, Homo sapiens
ggaugcauucaacuuccaguuc

SEQ ID NO: 22776 - RNA, 22 nt, Homo sapiens
ggagauuauuaguguuucaugc

SEQ ID NO: 22777 - RNA, 22 nt, Homo sapiens
ggagguagguuugugauuugua

SEQ ID NO: 22778 - RNA, 22 nt, Homo sapiens
ggagaugaaaugagcuacuuaa

SEQ ID NO: 22779 - RNA, 22 nt, Homo sapiens
ggagaauguaauugguauuuug

SEQ ID NO: 22780 - RNA, 19 nt, Homo sapiens
caguaucauugcacauagu

SEQ ID NO: 22781 - RNA, 22 nt, Homo sapiens
caugaacacugugcggcuuccu

SEQ ID NO: 22782 - RNA, 22 nt, Homo sapiens
cagauggucuuaaggcagccuu

SEQ ID NO: 22783 - RNA, 22 nt, Homo sapiens
cauggcucuuugcugcuaaagu

SEQ ID NO: 22784 - RNA, 22 nt, Homo sapiens
cacaggccugucucuuucuaac

SEQ ID NO: 22785 - RNA, 22 nt, Homo sapiens
cagagaucaugcaacugcucgc

SEQ ID NO: 22786 - RNA, 22 nt, Homo sapiens
cagagaacugaguuauuuucuu

SEQ ID NO: 22787 - RNA, 22 nt, Homo sapiens
cacuggucucauggcaugagag

SEQ ID NO: 22788 - RNA, 22 nt, Homo sapiens
cuagcagcauaagaaucaccaa

SEQ ID NO: 22789 - RNA, 22 nt, Homo sapiens
ccagcaccauuuguugaauagg

SEQ ID NO: 22790 - RNA, 21 nt, Homo sapiens
ccagugguuggaaacuauggg

SEQ ID NO: 22791 - RNA, 22 nt, Homo sapiens
ccagugguucccuguggccuga

SEQ ID NO: 22792 - RNA, 22 nt, Homo sapiens
ccagugcugugcaguguaugag

SEQ ID NO: 22793 - RNA, 19 nt, Homo sapiens
ccaguguugccagagcuga

SEQ ID NO: 22794 - RNA, 22 nt, Homo sapiens
cggcaguggguaagccaagcuu

SEQ ID NO: 22795 - RNA, 22 nt, Homo sapiens
cugacauggggauccaccuuag

SEQ ID NO: 22796 - RNA, 22 nt, Homo sapiens
cucucuguuugucuguuauugg

SEQ ID NO: 22797 - RNA, 23 nt, Homo sapiens
cucccugaacaugacacaccaga

SEQ ID NO: 22798 - RNA, 22 nt, Homo sapiens
cucccugagccagggcuuugac

SEQ ID NO: 22799 - RNA, 22 nt, Homo sapiens
cuccuguagccccaucaucuuu

SEQ ID NO: 22800 - RNA, 22 nt, Homo sapiens
cugcccguaauccucuccccag

SEQ ID NO: 22801 - RNA, 22 nt, Homo sapiens
cugagauaggacucugcuggcu

SEQ ID NO: 22802 - RNA, 22 nt, Homo sapiens
cuggcaaauaguagagccagga

SEQ ID NO: 22803 - RNA, 22 nt, Homo sapiens
cuggcaagaggauaaaguccua

SEQ ID NO: 22804 - RNA, 22 nt, Homo sapiens
cuggagcaaaggugacucuugu

SEQ ID NO: 22805 - RNA, 22 nt, Homo sapiens
cuggagcauugguggauuuguu

SEQ ID NO: 22806 - RNA, 22 nt, Homo sapiens
cugcuguuguuaacuuuuggag

SEQ ID NO: 22807 - RNA, 22 nt, Homo sapiens
uagcaaguguuuaagcacuuuu

SEQ ID NO: 22808 - RNA, 20 nt, Homo sapiens
uagaaaguagaguggugguu

SEQ ID NO: 22809 - RNA, 22 nt, Homo sapiens
uaagcagugcaagaauggaaua

SEQ ID NO: 22810 - RNA, 22 nt, Homo sapiens
uaccacugccgagaaaacagau

SEQ ID NO: 22811 - RNA, 22 nt, Homo sapiens
uaccacccuuuuuccagaagcc

SEQ ID NO: 22812 - RNA, 22 nt, Homo sapiens
uacauguauccauuguuuuugg

SEQ ID NO: 22813 - RNA, 22 nt, Homo sapiens
uacauguauguguuuauggcug

SEQ ID NO: 22814 - RNA, 22 nt, Homo sapiens
uaccacaggcuggguaaucuau

SEQ ID NO: 22815 - RNA, 22 nt, Homo sapiens
uauauguucugugucccuuucg

SEQ ID NO: 22816 - RNA, 22 nt, Homo sapiens
uagcaguuguuguuacuuguau

SEQ ID NO: 22817 - RNA, 22 nt, Homo sapiens
uagcugcacuuacaagugagaa

SEQ ID NO: 22818 - RNA, 22 nt, Homo sapiens
uaggagcacagcagcauguggg

SEQ ID NO: 22819 - RNA, 21 nt, Homo sapiens
uaggccgggugcaggaugcuu

SEQ ID NO: 22820 - RNA, 18 nt, Homo sapiens
ucaagcaauugucaugcc

SEQ ID NO: 22821 - RNA, 22 nt, Homo sapiens
ucaacugcuugagaucacaaau

SEQ ID NO: 22822 - RNA, 18 nt, Homo sapiens
ucacaaccacagugcugu

SEQ ID NO: 22823 - RNA, 22 nt, Homo sapiens
ucaagugcauugauucaguauu

SEQ ID NO: 22824 - RNA, 22 nt, Homo sapiens
ucacaauggagacucgggcgga

SEQ ID NO: 22825 - RNA, 20 nt, Homo sapiens
ucacagucacacauaauccu

SEQ ID NO: 22826 - RNA, 22 nt, Homo sapiens
ucacagucaaaguaaucauaga

SEQ ID NO: 22827 - RNA, 22 nt, Homo sapiens
ucacaggguguuauuagaauua

SEQ ID NO: 22828 - RNA, 19 nt, Homo sapiens
ucacaggguugacuugagg

SEQ ID NO: 22829 - RNA, 18 nt, Homo sapiens
ucacagguaauuaggauu

SEQ ID NO: 22830 - RNA, 22 nt, Homo sapiens
ucacauguguaugagcuuugau

SEQ ID NO: 22831 - RNA, 22 nt, Homo sapiens
ucaccuggagaagauggaucau

SEQ ID NO: 22832 - RNA, 19 nt, Homo sapiens
ucaccuugcccugcacaca

SEQ ID NO: 22833 - RNA, 22 nt, Homo sapiens
ucaaagugacaaaguugcagca

SEQ ID NO: 22834 - RNA, 22 nt, Homo sapiens
ucaaaucaucuuuuccaaagcu

SEQ ID NO: 22835 - RNA, 22 nt, Homo sapiens
uauguguuuuauggucagggag

SEQ ID NO: 22836 - RNA, 20 nt, Homo sapiens
uauugccuaaauaccagaau

SEQ ID NO: 22837 - RNA, 22 nt, Homo sapiens
uaucugcacauacacuuauagc

SEQ ID NO: 22838 - RNA, 22 nt, Homo sapiens
uaucuacauguagguauguaug

SEQ ID NO: 22839 - RNA, 22 nt, Homo sapiens
uaucucagaugagacuuguaac

SEQ ID NO: 22840 - RNA, 22 nt, Homo sapiens
ggcaccacagacgccaggcgug

SEQ ID NO: 22841 - RNA, 22 nt, Homo sapiens
ggcaaguucuaaugauuagaau

SEQ ID NO: 22842 - RNA, 21 nt, Homo sapiens
ggcaagaaacacaaucaagua

SEQ ID NO: 22843 - RNA, 17 nt, Homo sapiens
ggcaagaaguggaacuc

SEQ ID NO: 22844 - RNA, 22 nt, Homo sapiens
ggcagcuguguccuucguaagg

SEQ ID NO: 22845 - RNA, 22 nt, Homo sapiens
ggcagcauugccuuugcaguga

SEQ ID NO: 22846 - RNA, 17 nt, Homo sapiens
ggcaggaauuaauguca

SEQ ID NO: 22847 - RNA, 23 nt, Homo sapiens
ggcagguuggucuaggucuauuc

SEQ ID NO: 22848 - RNA, 22 nt, Homo sapiens
guaacacaugcugcucucuggu

SEQ ID NO: 22849 - RNA, 22 nt, Homo sapiens
guaaucucaccuacuugggagg

SEQ ID NO: 22850 - RNA, 22 nt, Homo sapiens
guaaucucagcuacucaggagg

SEQ ID NO: 22851 - RNA, 22 nt, Homo sapiens
guaaucucagcuacuugggagg

SEQ ID NO: 22852 - RNA, 22 nt, Homo sapiens
gugaaauacauaaucccaagug

SEQ ID NO: 22853 - RNA, 22 nt, Homo sapiens
gugaacuguuugaggaagagaa

SEQ ID NO: 22854 - RNA, 22 nt, Homo sapiens
guaugacacaggaagcuuaacc

SEQ ID NO: 22855 - RNA, 22 nt, Homo sapiens
guggucagaaaucucaguggca

SEQ ID NO: 22856 - RNA, 22 nt, Homo sapiens
gugguguuugagcugccaggga

SEQ ID NO: 22857 - RNA, 22 nt, Homo sapiens
guggaauauaaagcaucgugua

SEQ ID NO: 22858 - RNA, 22 nt, Homo sapiens
guggacagagacuaaauguugu

SEQ ID NO: 22859 - RNA, 23 nt, Homo sapiens
uaacauguuuuuaagggaagcuu

SEQ ID NO: 22860 - RNA, 21 nt, Homo sapiens
uaacagcuccacuccauucuc

SEQ ID NO: 22861 - RNA, 20 nt, Homo sapiens
guucauguaauuaguucagg

SEQ ID NO: 22862 - RNA, 22 nt, Homo sapiens
uaaacugcuugaggguaaguac

SEQ ID NO: 22863 - RNA, 22 nt, Homo sapiens
uaaacugcuugaaaugguguca

SEQ ID NO: 22864 - RNA, 22 nt, Homo sapiens
uuugcugagucugacuucaugg

SEQ ID NO: 22865 - RNA, 20 nt, Homo sapiens
uuugcagaaucuaagaagag

SEQ ID NO: 22866 - RNA, 22 nt, Homo sapiens
uuugcaguguaguuggccagca

SEQ ID NO: 22867 - RNA, 22 nt, Homo sapiens
uuucuuggagcucuuagggucg

SEQ ID NO: 22868 - RNA, 22 nt, Homo sapiens
uucauagucacauucgaugucu

SEQ ID NO: 22869 - RNA, 22 nt, Homo sapiens
uucauaguguuuccuuccagug

SEQ ID NO: 22870 - RNA, 18 nt, Homo sapiens
uucaucaguccucagcug

SEQ ID NO: 22871 - RNA, 18 nt, Homo sapiens
uucauauguugaaccaga

SEQ ID NO: 22872 - RNA, 22 nt, Homo sapiens
uugaagacuaccuaccauacuu

SEQ ID NO: 22873 - RNA, 22 nt, Homo sapiens
uugacaaggagccauugcaucu

SEQ ID NO: 22874 - RNA, 22 nt, Homo sapiens
uugaccuggagaguacuuugac

SEQ ID NO: 22875 - RNA, 22 nt, Homo sapiens
uugagcucaucuucagggguga

SEQ ID NO: 22876 - RNA, 22 nt, Homo sapiens
uugcaccuuaugucuguucucu

SEQ ID NO: 22877 - RNA, 22 nt, Homo sapiens
uugcaggcaugagccaccgugc

SEQ ID NO: 22878 - RNA, 21 nt, Homo sapiens
uuuccuggagcguauggcuuc

SEQ ID NO: 22879 - RNA, 22 nt, Homo sapiens
uuuaggcaauauauucaugucu

SEQ ID NO: 22880 - RNA, 22 nt, Homo sapiens
uuggaaaccucugcagguguuu

SEQ ID NO: 22881 - RNA, 22 nt, Homo sapiens
uugcagugguuucacuggcaaa

SEQ ID NO: 22882 - RNA, 22 nt, Homo sapiens
uugucaguguucacucaaagcu

SEQ ID NO: 22883 - RNA, 23 nt, Homo sapiens
uuguccccuccaaagcucauguu

SEQ ID NO: 22884 - RNA, 22 nt, Homo sapiens
uugucacucuuccuaggguagg

SEQ ID NO: 22885 - RNA, 20 nt, Homo sapiens
uuggugaccuacagaugugg

SEQ ID NO: 22886 - RNA, 22 nt, Homo sapiens
uugguaguaaucccucacaaaa

SEQ ID NO: 22887 - RNA, 22 nt, Homo sapiens
uuagaucaacauggaacucuau

SEQ ID NO: 22888 - RNA, 22 nt, Homo sapiens
uuagcaguggauggguggagaa

SEQ ID NO: 22889 - RNA, 22 nt, Homo sapiens
uuagcgccuuucuuccucuccu

SEQ ID NO: 22890 - RNA, 22 nt, Homo sapiens
uuaucucagugaacugagugga

SEQ ID NO: 22891 - RNA, 22 nt, Homo sapiens
uucacuguagccucagccucuu

SEQ ID NO: 22892 - RNA, 22 nt, Homo sapiens
uucacagucacccuucuccaug

SEQ ID NO: 22893 - RNA, 22 nt, Homo sapiens
uucacaguguguacaccagggg

SEQ ID NO: 22894 - RNA, 22 nt, Homo sapiens
uuacccuuuaacccuuuaaagu

SEQ ID NO: 22895 - RNA, 22 nt, Homo sapiens
uuacccuuugcauuaccaacaa

SEQ ID NO: 22896 - RNA, 19 nt, Homo sapiens
uuaagugugauaucucagu

SEQ ID NO: 22897 - RNA, 22 nt, Homo sapiens
ugugucuccugaaaauucacau

SEQ ID NO: 22898 - RNA, 22 nt, Homo sapiens
uuaaggcagugucuaugccagu

SEQ ID NO: 22899 - RNA, 22 nt, Homo sapiens
ugugcaaauuagcacaacccga

SEQ ID NO: 22900 - RNA, 22 nt, Homo sapiens
ugucagggaggcucggccgcac

SEQ ID NO: 22901 - RNA, 18 nt, Homo sapiens
ugucagaguggauuguaa

SEQ ID NO: 22902 - RNA, 22 nt, Homo sapiens
ugucaaacauuaugaugcucua

SEQ ID NO: 22903 - RNA, 22 nt, Homo sapiens
uguccuguaggaggcagaacaa

SEQ ID NO: 22904 - RNA, 19 nt, Homo sapiens
ugugacugggccagccuag

SEQ ID NO: 22905 - RNA, 21 nt, Homo sapiens
ugucuuggagccagacgccag

SEQ ID NO: 22906 - RNA, 16 nt, Homo sapiens
ugucuguuugggcaca

SEQ ID NO: 22907 - RNA, 22 nt, Homo sapiens
uguagucauuuggaguccagcu

SEQ ID NO: 22908 - RNA, 22 nt, Homo sapiens
uguaguuugaaagcucccucug

SEQ ID NO: 22909 - RNA, 22 nt, Homo sapiens
caaaugaucugcuggccucagc

SEQ ID NO: 22910 - RNA, 22 nt, Homo sapiens
cacauugcaggaaaguucauua

SEQ ID NO: 22911 - RNA, 22 nt, Homo sapiens
caaaggauucauuuccaggagu

SEQ ID NO: 22912 - RNA, 22 nt, Homo sapiens
caaagugguuuauacaugauug

SEQ ID NO: 22913 - RNA, 22 nt, Homo sapiens
caaaggcuguuauaggccagga

SEQ ID NO: 22914 - RNA, 22 nt, Homo sapiens
auguggugguagccaggacagg

SEQ ID NO: 22915 - RNA, 19 nt, Homo sapiens
augugguuagcaugacugc

SEQ ID NO: 22916 - RNA, 22 nt, Homo sapiens
auggccgggugcgguggcucac

SEQ ID NO: 22917 - RNA, 22 nt, Homo sapiens
augugccaauuaggauuccaag

SEQ ID NO: 22918 - RNA, 22 nt, Homo sapiens
auggcucuuauuauuuugaggu

SEQ ID NO: 22919 - RNA, 22 nt, Homo sapiens
cagugguuuucucaguucagca

SEQ ID NO: 22920 - RNA, 22 nt, Homo sapiens
cagugcauagaugugccacauu

SEQ ID NO: 22921 - RNA, 22 nt, Homo sapiens
caguggaugauguuuucugugg

SEQ ID NO: 22922 - RNA, 22 nt, Homo sapiens
cagcugguguuacaaaccagag

SEQ ID NO: 22923 - RNA, 22 nt, Homo sapiens
cagcuguguuauaaacuaccau

SEQ ID NO: 22924 - RNA, 22 nt, Homo sapiens
cagcuguuguuaugucugcagg

SEQ ID NO: 22925 - RNA, 22 nt, Homo sapiens
cagcuugugguauugcugguug

SEQ ID NO: 22926 - RNA, 22 nt, Homo sapiens
caccacauuccauugaucaggc

SEQ ID NO: 22927 - RNA, 22 nt, Homo sapiens
cgaggaguaucuuugugguguu

SEQ ID NO: 22928 - RNA, 22 nt, Homo sapiens
cgccgggggaugggcaccagcg

SEQ ID NO: 22929 - RNA, 22 nt, Homo sapiens
cgcuggugucuaagcgacagcu

SEQ ID NO: 22930 - RNA, 22 nt, Homo sapiens
ccccuguaaacuggcuucccug

SEQ ID NO: 22931 - RNA, 22 nt, Homo sapiens
ccagcaccauuuauuaaauagg

SEQ ID NO: 22932 - RNA, 22 nt, Homo sapiens
ccacacugucuuggugggaaac

SEQ ID NO: 22933 - RNA, 22 nt, Homo sapiens
ccaccgggucccagcucugcuc

SEQ ID NO: 22934 - RNA, 23 nt, Homo sapiens
ccacaaugguugaacuagauuac

SEQ ID NO: 22935 - RNA, 22 nt, Homo sapiens
ccacaaccucaacagcaucuau

SEQ ID NO: 22936 - RNA, 22 nt, Homo sapiens
cucaaaugguccagcuaguggu

SEQ ID NO: 22937 - RNA, 22 nt, Homo sapiens
cugauuguucuugcugggccuu

SEQ ID NO: 22938 - RNA, 22 nt, Homo sapiens
cugcaauggagaaagugagacu

SEQ ID NO: 22939 - RNA, 22 nt, Homo sapiens
cugcaagaugcauaggaauuuu

SEQ ID NO: 22940 - RNA, 20 nt, Homo sapiens
cuucacagaaguggaaucau

SEQ ID NO: 22941 - RNA, 22 nt, Homo sapiens
cuuccagcuggguucagucagu

SEQ ID NO: 22942 - RNA, 22 nt, Homo sapiens
cuuugauuauaaaaggguguuu

SEQ ID NO: 22943 - RNA, 22 nt, Homo sapiens
cuuugcaaaacauugagaccuc

SEQ ID NO: 22944 - RNA, 22 nt, Homo sapiens
cuguaguuagcagaugaugaau

SEQ ID NO: 22945 - RNA, 22 nt, Homo sapiens
cuggaguuugaggcugcaguga

SEQ ID NO: 22946 - RNA, 22 nt, Homo sapiens
gagugcaagguuuuucugagug

SEQ ID NO: 22947 - RNA, 22 nt, Homo sapiens
gaguucaaaucucagcucuguu

SEQ ID NO: 22948 - RNA, 22 nt, Homo sapiens
gagugcuguuagcccuggguuu

SEQ ID NO: 22949 - RNA, 22 nt, Homo sapiens
gagaugucuauuucagagaugu

SEQ ID NO: 22950 - RNA, 22 nt, Homo sapiens
gagauggugugcuguuggaagu

SEQ ID NO: 22951 - RNA, 22 nt, Homo sapiens
gagauguuuguuucacugucac

SEQ ID NO: 22952 - RNA, 22 nt, Homo sapiens
gagguguaaggacaacagagac

SEQ ID NO: 22953 - RNA, 22 nt, Homo sapiens
gcaagauuguguggcugaagua

SEQ ID NO: 22954 - RNA, 22 nt, Homo sapiens
gauggugucccaggcucaggcu

SEQ ID NO: 22955 - RNA, 22 nt, Homo sapiens
gaaugguuuacaaguguaaucu

SEQ ID NO: 22956 - RNA, 20 nt, Homo sapiens
gacaaaccuagaugguacag

SEQ ID NO: 22957 - RNA, 22 nt, Homo sapiens
gacaccauuucaguacuagguu

SEQ ID NO: 22958 - RNA, 22 nt, Homo sapiens
gacagugagaugucaugugaaa

SEQ ID NO: 22959 - RNA, 22 nt, Homo sapiens
gacugcauuugccccaucgaau

SEQ ID NO: 22960 - RNA, 22 nt, Homo sapiens
gacuugaagaaucuaagggagg

SEQ ID NO: 22961 - RNA, 22 nt, Homo sapiens
gagaaccauuuggagaaaaagu

SEQ ID NO: 22962 - RNA, 22 nt, Homo sapiens
gagacugagucucgcucugccg

SEQ ID NO: 22963 - RNA, 22 nt, Homo sapiens
gagagugugucagaggcugcga

SEQ ID NO: 22964 - RNA, 22 nt, Homo sapiens
gagauaguguggguacagcuau

SEQ ID NO: 22965 - RNA, 22 nt, Homo sapiens
aagguucuugcuugcaugacug

SEQ ID NO: 22966 - RNA, 23 nt, Homo sapiens
aagguaagcuagaaagauguaga

SEQ ID NO: 22967 - RNA, 22 nt, Homo sapiens
aaguuguuggaguuccauuguu

SEQ ID NO: 22968 - RNA, 22 nt, Homo sapiens
aagugcacuguaagugcaggau

SEQ ID NO: 22969 - RNA, 22 nt, Homo sapiens
aaucagcacacugugcuuucca

SEQ ID NO: 22970 - RNA, 22 nt, Homo sapiens
aaucacaggucuuggcugcaug

SEQ ID NO: 22971 - RNA, 22 nt, Homo sapiens
aauaucacaguggguguacacc

SEQ ID NO: 22972 - RNA, 22 nt, Homo sapiens
aauauguccaguguuuugggag

SEQ ID NO: 22973 - RNA, 19 nt, Homo sapiens
aauggcuuuuccuguuccc

SEQ ID NO: 22974 - RNA, 22 nt, Homo sapiens
acacgugcguauauguacguau

SEQ ID NO: 22975 - RNA, 22 nt, Homo sapiens
agaaccauuagagggagauauu

SEQ ID NO: 22976 - RNA, 20 nt, Homo sapiens
acugcacuucagccugcugg

SEQ ID NO: 22977 - RNA, 22 nt, Homo sapiens
acugcacuucagccuugugaca

SEQ ID NO: 22978 - RNA, 22 nt, Homo sapiens
acugcacuuauccuccaauguu

SEQ ID NO: 22979 - RNA, 22 nt, Homo sapiens
acugcacuucaaccucauugac

SEQ ID NO: 22980 - RNA, 22 nt, Homo sapiens
acugcacuucagccuguugaca

SEQ ID NO: 22981 - RNA, 22 nt, Homo sapiens
acugcacuguccuagaguccuc

SEQ ID NO: 22982 - RNA, 22 nt, Homo sapiens
acugcacugucaaccuccuggg

SEQ ID NO: 22983 - RNA, 22 nt, Homo sapiens
acugcacucuagcauggguaau

SEQ ID NO: 22984 - RNA, 22 nt, Homo sapiens
acugcacucuagccuuggcaac

SEQ ID NO: 22985 - RNA, 22 nt, Homo sapiens
acugcacuccaucuuagguggc

SEQ ID NO: 22986 - RNA, 22 nt, Homo sapiens
acugcacuccagcuugggugac

SEQ ID NO: 22987 - RNA, 20 nt, Homo sapiens
acugcacuccagucucuggg

SEQ ID NO: 22988 - RNA, 22 nt, Homo sapiens
acugcacuccaguuccgggcaa

SEQ ID NO: 22989 - RNA, 22 nt, Homo sapiens
acugcacuccagccucaugaca

SEQ ID NO: 22990 - RNA, 22 nt, Homo sapiens
acugcacuccaccuugggcaac

SEQ ID NO: 22991 - RNA, 22 nt, Homo sapiens
acugcacuccagcccaggugac

SEQ ID NO: 22992 - RNA, 22 nt, Homo sapiens
acugcacuccagacucugucuc

SEQ ID NO: 22993 - RNA, 22 nt, Homo sapiens
acugcacuccaaccuuggugac

SEQ ID NO: 22994 - RNA, 20 nt, Homo sapiens
acugcacuccaaccuuugug

SEQ ID NO: 22995 - RNA, 22 nt, Homo sapiens
acugcacuccagccuuggcaac

SEQ ID NO: 22996 - RNA, 22 nt, Homo sapiens
acugcacuccagccuuggcggc

SEQ ID NO: 22997 - RNA, 22 nt, Homo sapiens
acugcacuccagccuccugggu

SEQ ID NO: 22998 - RNA, 22 nt, Homo sapiens
acucagagagaacugucauuug

SEQ ID NO: 22999 - RNA, 22 nt, Homo sapiens
acucacagcaaccuccgccucc

SEQ ID NO: 23000 - RNA, 21 nt, Homo sapiens
acccccacaccuccuuaguuc

SEQ ID NO: 23001 - RNA, 23 nt, Homo sapiens
acugagcaauguuuacauacuug

SEQ ID NO: 23002 - RNA, 22 nt, Homo sapiens
acugcacuccaaccuguugggc

SEQ ID NO: 23003 - RNA, 22 nt, Homo sapiens
agacucauuuuuaucgagcaug

SEQ ID NO: 23004 - RNA, 18 nt, Homo sapiens
agaugcaugcucacuaca

SEQ ID NO: 23005 - RNA, 22 nt, Homo sapiens
agagagcuuuaacuacccauuu

SEQ ID NO: 23006 - RNA, 22 nt, Homo sapiens
agcaaaucuaugaauguauauu

SEQ ID NO: 23007 - RNA, 22 nt, Homo sapiens
agcagcuuugaucugaaugauu

SEQ ID NO: 23008 - RNA, 22 nt, Homo sapiens
agcaagauugauggccugcagg

SEQ ID NO: 23009 - RNA, 22 nt, Homo sapiens
agcagguauuuaagaaacucag

SEQ ID NO: 23010 - RNA, 21 nt, Homo sapiens
agcagcuuugguugaagcaga

SEQ ID NO: 23011 - RNA, 22 nt, Homo sapiens
auagcagugugaaaauugacug

SEQ ID NO: 23012 - RNA, 22 nt, Homo sapiens
auaggagugugcacagaguagg

SEQ ID NO: 23013 - RNA, 17 nt, Homo sapiens
auaugaauuuuggagau

SEQ ID NO: 23014 - RNA, 23 nt, Homo sapiens
aguggucuccugggcccagcugu

SEQ ID NO: 23015 - RNA, 22 nt, Homo sapiens
auacagugaauaucuggggcag

SEQ ID NO: 23016 - RNA, 22 nt, Homo sapiens
auacaguguucugggaagaagu

SEQ ID NO: 23017 - RNA, 19 nt, Homo sapiens
agucaugugaggacccuug

SEQ ID NO: 23018 - RNA, 22 nt, Homo sapiens
aguccaguguuaugaucaguag

SEQ ID NO: 23019 - RNA, 22 nt, Homo sapiens
aguccauuugaugaugauucca

SEQ ID NO: 23020 - RNA, 22 nt, Homo sapiens
agucagugcauaagaaugaagu

SEQ ID NO: 23021 - RNA, 22 nt, Homo sapiens
agucacagccuuuuacuuuaga

SEQ ID NO: 23022 - RNA, 22 nt, Homo sapiens
agcuuguagugauuugugguaa

SEQ ID NO: 23023 - RNA, 22 nt, Homo sapiens
agcuuguauuuguagccuguug

SEQ ID NO: 23024 - RNA, 22 nt, Homo sapiens
agcuguuguuuuaagauacuaa

SEQ ID NO: 23025 - RNA, 22 nt, Homo sapiens
agcaucacguagacuuuaccau

SEQ ID NO: 23026 - RNA, 22 nt, Homo sapiens
agcaucaugcaguugcuauuca

SEQ ID NO: 23027 - RNA, 22 nt, Homo sapiens
agcuguuguucucagaggcuuu

SEQ ID NO: 23028 - RNA, 22 nt, Homo sapiens
augaccaaagaaaugcuauagg

SEQ ID NO: 23029 - RNA, 22 nt, Homo sapiens
augaccaaugggcagagcuaga

SEQ ID NO: 23030 - RNA, 22 nt, Homo sapiens
augaccagagagugcgcagggu

SEQ ID NO: 23031 - RNA, 22 nt, Homo sapiens
augacgagaugguguuuggcuu

SEQ ID NO: 23032 - RNA, 22 nt, Homo sapiens
augauuuuuguaucgccugaug

SEQ ID NO: 23033 - RNA, 22 nt, Homo sapiens
augcaauucuagauugauagua

SEQ ID NO: 23034 - RNA, 22 nt, Homo sapiens
auggcacagaguagaugcucaa

SEQ ID NO: 23035 - RNA, 22 nt, Homo sapiens
aucgcgccauuguacuccagcc

SEQ ID NO: 23036 - RNA, 22 nt, Homo sapiens
auccucugagaucuaggcagag

SEQ ID NO: 23037 - RNA, 22 nt, Homo sapiens
aucgugucuggcccugaaugcu

SEQ ID NO: 23038 - RNA, 22 nt, Homo sapiens
aucugcaaauaaugaagauugg

SEQ ID NO: 23039 - RNA, 22 nt, Homo sapiens
auccaucagacggcaggcguug

SEQ ID NO: 23040 - RNA, 22 nt, Homo sapiens
aucccugagccugacucucaga

SEQ ID NO: 23041 - RNA, 22 nt, Homo sapiens
aucccugaggaauuucugcacu

SEQ ID NO: 23042 - RNA, 22 nt, Homo sapiens
aucagauguuuguauaggagua

SEQ ID NO: 23043 - RNA, 22 nt, Homo sapiens
aucaccuggaguagcccguccc

SEQ ID NO: 23044 - RNA, 22 nt, Homo sapiens
aucaccuuucccuuucugaauc

SEQ ID NO: 23045 - RNA, 22 nt, Homo sapiens
ugagauagcauaagggacagaa

SEQ ID NO: 23046 - RNA, 22 nt, Homo sapiens
ugagaucuuuuguggcugagaa

SEQ ID NO: 23047 - RNA, 22 nt, Homo sapiens
ugagaugaaagcagaaagacuu

SEQ ID NO: 23048 - RNA, 22 nt, Homo sapiens
ugagaucuuaucagaaauggug

SEQ ID NO: 23049 - RNA, 22 nt, Homo sapiens
ugagauccaugcuauuugggcu

SEQ ID NO: 23050 - RNA, 19 nt, Homo sapiens
ugagaucuuuacuggguuu

SEQ ID NO: 23051 - RNA, 22 nt, Homo sapiens
ugagaugaguugcuggcucuga

SEQ ID NO: 23052 - RNA, 22 nt, Homo sapiens
ugagaugaagucuugcucuguu

SEQ ID NO: 23053 - RNA, 22 nt, Homo sapiens
ugagaugagagaaugcuugccu

SEQ ID NO: 23054 - RNA, 21 nt, Homo sapiens
ugagaugauccugcaugcaug

SEQ ID NO: 23055 - RNA, 22 nt, Homo sapiens
ugagacugaguuucgcucuugu

SEQ ID NO: 23056 - RNA, 22 nt, Homo sapiens
ugagacugaguuucucucuugu

SEQ ID NO: 23057 - RNA, 22 nt, Homo sapiens
ugagacugagucuugcucuauu

SEQ ID NO: 23058 - RNA, 22 nt, Homo sapiens
ugagacugagucuugcucuugu

SEQ ID NO: 23059 - RNA, 22 nt, Homo sapiens
ugagacugaguuuugcucguug

SEQ ID NO: 23060 - RNA, 22 nt, Homo sapiens
ugagacugaguuuugcucuugu

SEQ ID NO: 23061 - RNA, 22 nt, Homo sapiens
ugagacugaguuuugccuuugu

SEQ ID NO: 23062 - RNA, 22 nt, Homo sapiens
ugaucaaagugcuggaauuaca

SEQ ID NO: 23063 - RNA, 21 nt, Homo sapiens
ugauguugaccuaaguaguga

SEQ ID NO: 23064 - RNA, 22 nt, Homo sapiens
ugaguuaguguggugcuuggaa

SEQ ID NO: 23065 - RNA, 23 nt, Homo sapiens
ugagguguuaagcagacuugucu

SEQ ID NO: 23066 - RNA, 22 nt, Homo sapiens
ugagguuguccacuauaaucca

SEQ ID NO: 23067 - RNA, 22 nt, Homo sapiens
ugaguagaagugaagauagugg

SEQ ID NO: 23068 - RNA, 22 nt, Homo sapiens
ugaguagaacuagucuagagcu

SEQ ID NO: 23069 - RNA, 22 nt, Homo sapiens
ugaguagaacaucaagucauac

SEQ ID NO: 23070 - RNA, 22 nt, Homo sapiens
ugcaagacaucguauuuugguc

SEQ ID NO: 23071 - RNA, 22 nt, Homo sapiens
ugcaauauccucuacuauaggu

SEQ ID NO: 23072 - RNA, 22 nt, Homo sapiens
ugcucaccugcugcucaccucc

SEQ ID NO: 23073 - RNA, 21 nt, Homo sapiens
ugcuccauuuucuagccugaa

SEQ ID NO: 23074 - RNA, 22 nt, Homo sapiens
ugcugcuguuaucauuuuacca

SEQ ID NO: 23075 - RNA, 22 nt, Homo sapiens
ugcgguagugcaaucauggcuc

SEQ ID NO: 23076 - RNA, 22 nt, Homo sapiens
uggaauacaugucgcugagcug

SEQ ID NO: 23077 - RNA, 22 nt, Homo sapiens
uggaaaacaugcacauuggauu

SEQ ID NO: 23078 - RNA, 22 nt, Homo sapiens
ugcugguuuucaucaucagugg

SEQ ID NO: 23079 - RNA, 22 nt, Homo sapiens
ugcugcuguuguuguuacuagc

SEQ ID NO: 23080 - RNA, 22 nt, Homo sapiens
uggcagcgugaauguggcugaa

SEQ ID NO: 23081 - RNA, 22 nt, Homo sapiens
uggcagaugagccgcgcuccaa

SEQ ID NO: 23082 - RNA, 22 nt, Homo sapiens
ucaguuaaugcugccugcugga

SEQ ID NO: 23083 - RNA, 22 nt, Homo sapiens
ucagguauuuauagcaaugcaa

SEQ ID NO: 23084 - RNA, 22 nt, Homo sapiens
ucaucaggaaacuuaugcagug

SEQ ID NO: 23085 - RNA, 22 nt, Homo sapiens
ucaugacacagcauacugacuu

SEQ ID NO: 23086 - RNA, 22 nt, Homo sapiens
ucaugacacuggcaggagcuaa

SEQ ID NO: 23087 - RNA, 22 nt, Homo sapiens
ucaugcaaugagucaggaggca

SEQ ID NO: 23088 - RNA, 22 nt, Homo sapiens
ucaugugagcaaguugggcuca

SEQ ID NO: 23089 - RNA, 19 nt, Homo sapiens
ucaccaguacacaauacaa

SEQ ID NO: 23090 - RNA, 22 nt, Homo sapiens
ucacucagaccuggugauaugc

SEQ ID NO: 23091 - RNA, 22 nt, Homo sapiens
ucacagaugcuugacccauuuc

SEQ ID NO: 23092 - RNA, 22 nt, Homo sapiens
ucacagcggucgaacuaauuug

SEQ ID NO: 23093 - RNA, 18 nt, Homo sapiens
ucacagguaaaguugaca

SEQ ID NO: 23094 - RNA, 22 nt, Homo sapiens
ugaaagcuacagucuccuagga

SEQ ID NO: 23095 - RNA, 22 nt, Homo sapiens
ucuugcauuuuuaaauagugcu

SEQ ID NO: 23096 - RNA, 18 nt, Homo sapiens
ucugugguguaaauacgu

SEQ ID NO: 23097 - RNA, 22 nt, Homo sapiens
ucugguuccuuggcuucggguc

SEQ ID NO: 23098 - RNA, 19 nt, Homo sapiens
ucuguaguuagggcuacag

SEQ ID NO: 23099 - RNA, 22 nt, Homo sapiens
ucugucuugugguuugagugcc

SEQ ID NO: 23100 - RNA, 22 nt, Homo sapiens
ucucugguuaugucauuaagca

SEQ ID NO: 23101 - RNA, 22 nt, Homo sapiens
ucucuguuuagagccagcaauu

SEQ ID NO: 23102 - RNA, 22 nt, Homo sapiens
ucugagcaauagauguggauau

SEQ ID NO: 23103 - RNA, 22 nt, Homo sapiens
ucugagcaauaaacaacauauu

SEQ ID NO: 23104 - RNA, 22 nt, Homo sapiens
ucucuugguugaacaguuugga

SEQ ID NO: 23105 - RNA, 22 nt, Homo sapiens
ucucaugaagguggagaguagg

SEQ ID NO: 23106 - RNA, 22 nt, Homo sapiens
ucucauggagucaggagcagaa

SEQ ID NO: 23107 - RNA, 22 nt, Homo sapiens
ggagaucacucuuuguagcgug

SEQ ID NO: 23108 - RNA, 22 nt, Homo sapiens
ggaguaaaagaguaggaggaau

SEQ ID NO: 23109 - RNA, 22 nt, Homo sapiens
ggcaaguugcuauucuuuaaug

SEQ ID NO: 23110 - RNA, 22 nt, Homo sapiens
ggcaagaacuucacucacuuuu

SEQ ID NO: 23111 - RNA, 22 nt, Homo sapiens
ggcaagaagaacuauaacuuuu

SEQ ID NO: 23112 - RNA, 22 nt, Homo sapiens
ggcugguuuucaguuacugagu

SEQ ID NO: 23113 - RNA, 22 nt, Homo sapiens
gggagugugcacacaugguaua

SEQ ID NO: 23114 - RNA, 22 nt, Homo sapiens
gcucguuuuugccucugguugc

SEQ ID NO: 23115 - RNA, 22 nt, Homo sapiens
gcucugguuacaaaggcaaauu

SEQ ID NO: 23116 - RNA, 22 nt, Homo sapiens
gcucguccccuccugacucugc

SEQ ID NO: 23117 - RNA, 22 nt, Homo sapiens
gcucaugggcagugugauuguu

SEQ ID NO: 23118 - RNA, 22 nt, Homo sapiens
gcugaguaguauuucauuguau

SEQ ID NO: 23119 - RNA, 22 nt, Homo sapiens
gcugcuguaccagaugugguua

SEQ ID NO: 23120 - RNA, 22 nt, Homo sapiens
gcacgugcucauuugaggucuu

SEQ ID NO: 23121 - RNA, 22 nt, Homo sapiens
gcaaugcugucugugcacagau

SEQ ID NO: 23122 - RNA, 22 nt, Homo sapiens
gcaccacugcacucucagcuug

SEQ ID NO: 23123 - RNA, 22 nt, Homo sapiens
gcuguugguaaaaaggacauga

SEQ ID NO: 23124 - RNA, 22 nt, Homo sapiens
ggaaagcuagguguggguguac

SEQ ID NO: 23125 - RNA, 19 nt, Homo sapiens
gcuuguccacgugagauaa

SEQ ID NO: 23126 - RNA, 22 nt, Homo sapiens
gcuuguguauuaaaccuugcag

SEQ ID NO: 23127 - RNA, 22 nt, Homo sapiens
guaccugagaaguuccagggga

SEQ ID NO: 23128 - RNA, 22 nt, Homo sapiens
guaaucucagcuucuugggagg

SEQ ID NO: 23129 - RNA, 22 nt, Homo sapiens
guaaucuguaguaaagcaccau

SEQ ID NO: 23130 - RNA, 22 nt, Homo sapiens
guaaucucagcuacuugggagu

SEQ ID NO: 23131 - RNA, 22 nt, Homo sapiens
guaaucucagcuacuugggagc

SEQ ID NO: 23132 - RNA, 22 nt, Homo sapiens
gguggugguauuucagaaaaug

SEQ ID NO: 23133 - RNA, 22 nt, Homo sapiens
guagaccauuuaucuggggagu

SEQ ID NO: 23134 - RNA, 22 nt, Homo sapiens
gucuguuuggggaccuguggcc

SEQ ID NO: 23135 - RNA, 22 nt, Homo sapiens
gucuggcuccuucuacuacaug

SEQ ID NO: 23136 - RNA, 22 nt, Homo sapiens
gugaccaaagauagcucaaguu

SEQ ID NO: 23137 - RNA, 22 nt, Homo sapiens
gugaccucuguugcugucacua

SEQ ID NO: 23138 - RNA, 22 nt, Homo sapiens
gugacuggacucugaagaaaau

SEQ ID NO: 23139 - RNA, 22 nt, Homo sapiens
gugcaacaugccuggcuaauuu

SEQ ID NO: 23140 - RNA, 22 nt, Homo sapiens
gugcaaccaucaccacugacuc

SEQ ID NO: 23141 - RNA, 22 nt, Homo sapiens
gugggaagcuggaacucccucc

SEQ ID NO: 23142 - RNA, 22 nt, Homo sapiens
gugggguagcaggcuccuaucu

SEQ ID NO: 23143 - RNA, 22 nt, Homo sapiens
guggcuuuaaguacgauugagg

SEQ ID NO: 23144 - RNA, 22 nt, Homo sapiens
gugcauguccacuaguccauau

SEQ ID NO: 23145 - RNA, 22 nt, Homo sapiens
uagguuaucaaauugguaggca

SEQ ID NO: 23146 - RNA, 22 nt, Homo sapiens
uagguuaucucaaguguaauuu

SEQ ID NO: 23147 - RNA, 22 nt, Homo sapiens
uagguaaguaugugugaugggg

SEQ ID NO: 23148 - RNA, 20 nt, Homo sapiens
uaggagcaaugagaguagaa

SEQ ID NO: 23149 - RNA, 22 nt, Homo sapiens
uagcaguucauuguugugugaa

SEQ ID NO: 23150 - RNA, 22 nt, Homo sapiens
uauaugucuuuguuauguugag

SEQ ID NO: 23151 - RNA, 22 nt, Homo sapiens
uaucacagcauugucuauaaua

SEQ ID NO: 23152 - RNA, 21 nt, Homo sapiens
uaucucaguuuuccuuugugg

SEQ ID NO: 23153 - RNA, 22 nt, Homo sapiens
uaugagacugguuaauuuuugu

SEQ ID NO: 23154 - RNA, 22 nt, Homo sapiens
uauggguguuauugcaugggag

SEQ ID NO: 23155 - RNA, 22 nt, Homo sapiens
uaaagcacaaguaaagaauacu

SEQ ID NO: 23156 - RNA, 22 nt, Homo sapiens
guuguggcuugugauuaagcac

SEQ ID NO: 23157 - RNA, 22 nt, Homo sapiens
guuuggauauuaggcaagagua

SEQ ID NO: 23158 - RNA, 22 nt, Homo sapiens
uacccuuuaguauaaaaucaga

SEQ ID NO: 23159 - RNA, 22 nt, Homo sapiens
uacauguauacaggguuuacuu

SEQ ID NO: 23160 - RNA, 22 nt, Homo sapiens
uacauccauccugcugggcagu

SEQ ID NO: 23161 - RNA, 19 nt, Homo sapiens
uacaggacugagcugaggu

SEQ ID NO: 23162 - RNA, 22 nt, Homo sapiens
aaagugcugggauuaggccagg

SEQ ID NO: 23163 - RNA, 22 nt, Homo sapiens
aaagugcugggauuggccgggc

SEQ ID NO: 23164 - RNA, 22 nt, Homo sapiens
aaaguggugugaguauguaucu

SEQ ID NO: 23165 - RNA, 22 nt, Homo sapiens
aaaguguuucugcaguagguuu

SEQ ID NO: 23166 - RNA, 22 nt, Homo sapiens
aagcaggugucugugucuguaa

SEQ ID NO: 23167 - RNA, 22 nt, Homo sapiens
aagcaucacuggaggcagccau

SEQ ID NO: 23168 - RNA, 22 nt, Homo sapiens
aaggagcuuaagugacuuguac

SEQ ID NO: 23169 - RNA, 22 nt, Homo sapiens
aaggaguagacaacauggcgcc

SEQ ID NO: 23170 - RNA, 21 nt, Homo sapiens
aaaugcacauuacugcuggug

SEQ ID NO: 23171 - RNA, 22 nt, Homo sapiens
aagagugucuuugugcuggccc

SEQ ID NO: 23172 - RNA, 22 nt, Homo sapiens
auagaucuauuuauguaucccu

SEQ ID NO: 23173 - RNA, 22 nt, Homo sapiens
auagcaagaugauugauccauu

SEQ ID NO: 23174 - RNA, 22 nt, Homo sapiens
agucacagugaccuugucugac

SEQ ID NO: 23175 - RNA, 22 nt, Homo sapiens
aguaccauuccguuggagcugg

SEQ ID NO: 23176 - RNA, 16 nt, Homo sapiens
aguaguuuuacagauu

SEQ ID NO: 23177 - RNA, 19 nt, Homo sapiens
auauaacauccaggagcag

SEQ ID NO: 23178 - RNA, 22 nt, Homo sapiens
aucacagaguuaaaacuuucuu

SEQ ID NO: 23179 - RNA, 22 nt, Homo sapiens
aucaagcugcuuguuugaaucu

SEQ ID NO: 23180 - RNA, 22 nt, Homo sapiens
aucagcagcaugaaaacggacu

SEQ ID NO: 23181 - RNA, 22 nt, Homo sapiens
aucagcagcaugaaaacaggcu

SEQ ID NO: 23182 - RNA, 22 nt, Homo sapiens
aucagugaaagugaaaucuccg

SEQ ID NO: 23183 - RNA, 22 nt, Homo sapiens
aucccugagaacuuuuaauguu

SEQ ID NO: 23184 - RNA, 22 nt, Homo sapiens
auggaacugaagugcugcccuu

SEQ ID NO: 23185 - RNA, 22 nt, Homo sapiens
auggagcaaaacagauuuggga

SEQ ID NO: 23186 - RNA, 22 nt, Homo sapiens
augucuuucauagagacccaga

SEQ ID NO: 23187 - RNA, 22 nt, Homo sapiens
augucaaagaggaaaacuggau

SEQ ID NO: 23188 - RNA, 22 nt, Homo sapiens
aucugguguccucgugggaguc

SEQ ID NO: 23189 - RNA, 22 nt, Homo sapiens
aucuguguuuaaggucccagaa

SEQ ID NO: 23190 - RNA, 22 nt, Homo sapiens
aucuugggugggaacugagaau

SEQ ID NO: 23191 - RNA, 22 nt, Homo sapiens
augagcagaagagauacacugu

SEQ ID NO: 23192 - RNA, 22 nt, Homo sapiens
augcaaacaucauagaguguac

SEQ ID NO: 23193 - RNA, 22 nt, Homo sapiens
augagguaguagaaagucaggu

SEQ ID NO: 23194 - RNA, 22 nt, Homo sapiens
augcagcugaggguaguggagc

SEQ ID NO: 23195 - RNA, 22 nt, Homo sapiens
augcagugugcaacagauuaag

SEQ ID NO: 23196 - RNA, 22 nt, Homo sapiens
augcuauguagaugagggccca

SEQ ID NO: 23197 - RNA, 19 nt, Homo sapiens
augccacagugaggucaga

SEQ ID NO: 23198 - RNA, 22 nt, Homo sapiens
augcccauuuguuuucugaaag

SEQ ID NO: 23199 - RNA, 22 nt, Homo sapiens
agcagguguggcuuauccugaa

SEQ ID NO: 23200 - RNA, 22 nt, Homo sapiens
agcagcuuugcauggccuguga

SEQ ID NO: 23201 - RNA, 22 nt, Homo sapiens
agcagcuuugcauggccugugg

SEQ ID NO: 23202 - RNA, 22 nt, Homo sapiens
agcaucacaugggcugcuuggg

SEQ ID NO: 23203 - RNA, 19 nt, Homo sapiens
agcaucauuauuguuuugg

SEQ ID NO: 23204 - RNA, 17 nt, Homo sapiens
agcauguguuugagauu

SEQ ID NO: 23205 - RNA, 22 nt, Homo sapiens
agagagcuuuugguugcccuaa

SEQ ID NO: 23206 - RNA, 22 nt, Homo sapiens
agacagcugguagcacuuccug

SEQ ID NO: 23207 - RNA, 18 nt, Homo sapiens
aaaugcucuucuggaaua

SEQ ID NO: 23208 - RNA, 22 nt, Homo sapiens
agcuuguguuuuucuaaguauc

SEQ ID NO: 23209 - RNA, 22 nt, Homo sapiens
aguacacuguugaacagaagug

SEQ ID NO: 23210 - RNA, 22 nt, Homo sapiens
aguaagauggcaacucuccaca

SEQ ID NO: 23211 - RNA, 22 nt, Homo sapiens
aaauggcuuugaggguaggaca

SEQ ID NO: 23212 - RNA, 22 nt, Homo sapiens
acaguagugggcuacagaauca

SEQ ID NO: 23213 - RNA, 20 nt, Homo sapiens
acaguauguuuggaugcaua

SEQ ID NO: 23214 - RNA, 22 nt, Homo sapiens
acagcagugccccacucuacug

SEQ ID NO: 23215 - RNA, 22 nt, Homo sapiens
acaccuguggucccaguaacuu

SEQ ID NO: 23216 - RNA, 22 nt, Homo sapiens
acacaugcuccacuguggccuc

SEQ ID NO: 23217 - RNA, 22 nt, Homo sapiens
acacuggaguuaaaggugauuu

SEQ ID NO: 23218 - RNA, 22 nt, Homo sapiens
acucagagaacauucccagucu

SEQ ID NO: 23219 - RNA, 18 nt, Homo sapiens
acagugucuuacaccugu

SEQ ID NO: 23220 - RNA, 22 nt, Homo sapiens
accgaguuagccaggauggucu

SEQ ID NO: 23221 - RNA, 18 nt, Homo sapiens
acugcacuccauccuagg

SEQ ID NO: 23222 - RNA, 22 nt, Homo sapiens
acugcacucccgcccgggugac

SEQ ID NO: 23223 - RNA, 22 nt, Homo sapiens
acugcacuccagcuuuggguga

SEQ ID NO: 23224 - RNA, 22 nt, Homo sapiens
acugcacuccagcuuuggugac

SEQ ID NO: 23225 - RNA, 22 nt, Homo sapiens
acugcacucuagcuugggugac

SEQ ID NO: 23226 - RNA, 22 nt, Homo sapiens
acugcacucuagccccugcgac

SEQ ID NO: 23227 - RNA, 22 nt, Homo sapiens
acugcacugcagccuggccaac

SEQ ID NO: 23228 - RNA, 22 nt, Homo sapiens
acugcacuccggccucgugaca

SEQ ID NO: 23229 - RNA, 22 nt, Homo sapiens
acugcacuccggccuggcaaca

SEQ ID NO: 23230 - RNA, 19 nt, Homo sapiens
acugcacuccuccuugggu

SEQ ID NO: 23231 - RNA, 22 nt, Homo sapiens
acugcacuccuccuugggugac

SEQ ID NO: 23232 - RNA, 22 nt, Homo sapiens
acugcacuucagccuuggcuac

SEQ ID NO: 23233 - RNA, 22 nt, Homo sapiens
acugcacuucagccuugggaaa

SEQ ID NO: 23234 - RNA, 22 nt, Homo sapiens
acugcacuccagccuuggccac

SEQ ID NO: 23235 - RNA, 22 nt, Homo sapiens
acugcacuccagccuugcgaca

SEQ ID NO: 23236 - RNA, 22 nt, Homo sapiens
acugcacuccagccuuggagac

SEQ ID NO: 23237 - RNA, 22 nt, Homo sapiens
acugcacuccagccuugugaca

SEQ ID NO: 23238 - RNA, 22 nt, Homo sapiens
acugcacuccagccuuugcgau

SEQ ID NO: 23239 - RNA, 22 nt, Homo sapiens
acugcacuccagcuccagggug

SEQ ID NO: 23240 - RNA, 22 nt, Homo sapiens
acugcacuccagcccgggugac

SEQ ID NO: 23241 - RNA, 22 nt, Homo sapiens
acugcacuccagccuaggcgac

SEQ ID NO: 23242 - RNA, 22 nt, Homo sapiens
acugcacuccagccucccgucu

SEQ ID NO: 23243 - RNA, 22 nt, Homo sapiens
acugcacuccagccuccugaca

SEQ ID NO: 23244 - RNA, 22 nt, Homo sapiens
acugcacuccagccuugauggc

SEQ ID NO: 23245 - RNA, 22 nt, Homo sapiens
acugcacuccacccuuggcagc

SEQ ID NO: 23246 - RNA, 19 nt, Homo sapiens
acugcacuccaaccuccug

SEQ ID NO: 23247 - RNA, 23 nt, Homo sapiens
acugcaauuacguuugcaccaac

SEQ ID NO: 23248 - RNA, 21 nt, Homo sapiens
acugcacuccaaccucaacag

SEQ ID NO: 23249 - RNA, 22 nt, Homo sapiens
gagauaaauaggucacaguucu

SEQ ID NO: 23250 - RNA, 22 nt, Homo sapiens
gagauacacccagugcagaggc

SEQ ID NO: 23251 - RNA, 22 nt, Homo sapiens
gagguagugagcagcugaacua

SEQ ID NO: 23252 - RNA, 22 nt, Homo sapiens
gagguagguuugguuacaaaag

SEQ ID NO: 23253 - RNA, 17 nt, Homo sapiens
gagguaguuuacuuuca

SEQ ID NO: 23254 - RNA, 22 nt, Homo sapiens
gagguaguuuaguuuuggggaa

SEQ ID NO: 23255 - RNA, 22 nt, Homo sapiens
gagguaaguaagaauggcaagc

SEQ ID NO: 23256 - RNA, 22 nt, Homo sapiens
gaucacaguuccucacgggcau

SEQ ID NO: 23257 - RNA, 22 nt, Homo sapiens
gcugcuguuuaguuucuccugg

SEQ ID NO: 23258 - RNA, 22 nt, Homo sapiens
gcuggcaagaugcugaugcaac

SEQ ID NO: 23259 - RNA, 22 nt, Homo sapiens
gcuggguucagagugggcugcg

SEQ ID NO: 23260 - RNA, 22 nt, Homo sapiens
gcugcuguggcagauuggauuc

SEQ ID NO: 23261 - RNA, 19 nt, Homo sapiens
gcugguuguccacucucuc

SEQ ID NO: 23262 - RNA, 22 nt, Homo sapiens
gcgguagcauagacugcaggac

SEQ ID NO: 23263 - RNA, 22 nt, Homo sapiens
gcaaaaaguagugcugguuagg

SEQ ID NO: 23264 - RNA, 20 nt, Homo sapiens
gcagcaccauauuucuaaga

SEQ ID NO: 23265 - RNA, 22 nt, Homo sapiens
gcaagaauggaacaggagagcc

SEQ ID NO: 23266 - RNA, 22 nt, Homo sapiens
gcagguaguuucugacuuuuac

SEQ ID NO: 23267 - RNA, 22 nt, Homo sapiens
cuuugcuaauccaacccucauc

SEQ ID NO: 23268 - RNA, 22 nt, Homo sapiens
cuuuggucaauugcugugggga

SEQ ID NO: 23269 - RNA, 22 nt, Homo sapiens
gacacuggguguuuguuggcgu

SEQ ID NO: 23270 - RNA, 22 nt, Homo sapiens
gaauacuguccaagagugaugg

SEQ ID NO: 23271 - RNA, 21 nt, Homo sapiens
cuucuuggggcagggcagggu

SEQ ID NO: 23272 - RNA, 22 nt, Homo sapiens
cuuggcuucuuuauguggcuau

SEQ ID NO: 23273 - RNA, 22 nt, Homo sapiens
cuuguggugcuuuuacgugggc

SEQ ID NO: 23274 - RNA, 22 nt, Homo sapiens
cuuggauuauaauggaauauuu

SEQ ID NO: 23275 - RNA, 22 nt, Homo sapiens
cugagguauuuaggugaaagaa

SEQ ID NO: 23276 - RNA, 22 nt, Homo sapiens
cugaggugggagaaucacauaa

SEQ ID NO: 23277 - RNA, 20 nt, Homo sapiens
cugcacauccacucuacuuc

SEQ ID NO: 23278 - RNA, 22 nt, Homo sapiens
cuucaaguaauucugauggcua

SEQ ID NO: 23279 - RNA, 22 nt, Homo sapiens
cacugaaugugagguuggggag

SEQ ID NO: 23280 - RNA, 22 nt, Homo sapiens
caccagcuggcauugaauaccu

SEQ ID NO: 23281 - RNA, 22 nt, Homo sapiens
caccacagccauuauugucccc

SEQ ID NO: 23282 - RNA, 22 nt, Homo sapiens
caccaaccucaguagcaucugu

SEQ ID NO: 23283 - RNA, 22 nt, Homo sapiens
caccauguguucagaaggauug

SEQ ID NO: 23284 - RNA, 22 nt, Homo sapiens
caacauccaccuccuggguuca

SEQ ID NO: 23285 - RNA, 22 nt, Homo sapiens
cagcugguggcaagaagacaga

SEQ ID NO: 23286 - RNA, 22 nt, Homo sapiens
cagcagguuuuuaucaguuaag

SEQ ID NO: 23287 - RNA, 22 nt, Homo sapiens
cagccgggugagguggcuuguu

SEQ ID NO: 23288 - RNA, 22 nt, Homo sapiens
auugcccaggcuggagugcagu

SEQ ID NO: 23289 - RNA, 22 nt, Homo sapiens
auugcucaaaucaguacuugag

SEQ ID NO: 23290 - RNA, 22 nt, Homo sapiens
auuugucaauacacuucuucca

SEQ ID NO: 23291 - RNA, 21 nt, Homo sapiens
auuugguguuagaaauaaauu

SEQ ID NO: 23292 - RNA, 22 nt, Homo sapiens
cccugagcagccugaguuuccc

SEQ ID NO: 23293 - RNA, 22 nt, Homo sapiens
ccccauguucucucugcagcuc

SEQ ID NO: 23294 - RNA, 22 nt, Homo sapiens
cccagcguucggcauggcugag

SEQ ID NO: 23295 - RNA, 22 nt, Homo sapiens
ccaucacaggccucagugggaa

SEQ ID NO: 23296 - RNA, 22 nt, Homo sapiens
ccauggcuucugcauucuguca

SEQ ID NO: 23297 - RNA, 23 nt, Homo sapiens
caucacagagccuuccuugacuc

SEQ ID NO: 23298 - RNA, 22 nt, Homo sapiens
ccacaguagucuugggaugggc

SEQ ID NO: 23299 - RNA, 22 nt, Homo sapiens
cuaucucaggcccaggcccuug

SEQ ID NO: 23300 - RNA, 20 nt, Homo sapiens
cuauugacauuuggggcuag

SEQ ID NO: 23301 - RNA, 22 nt, Homo sapiens
ccugagacuugagggggcuucu

SEQ ID NO: 23302 - RNA, 22 nt, Homo sapiens
ccugagacugauugacucacaa

SEQ ID NO: 23303 - RNA, 22 nt, Homo sapiens
ccuugguaauguguuuuauucu

SEQ ID NO: 23304 - RNA, 20 nt, Homo sapiens
cucacagacagcuucuuucu

SEQ ID NO: 23305 - RNA, 20 nt, Homo sapiens
cucagguauuugaggcugca

SEQ ID NO: 23306 - RNA, 22 nt, Homo sapiens
cucauggagaaccucugcuagg

SEQ ID NO: 23307 - RNA, 22 nt, Homo sapiens
cucuuuuguuccuaguuugauc

SEQ ID NO: 23308 - RNA, 22 nt, Homo sapiens
cugaaagagcauguaacacagu

SEQ ID NO: 23309 - RNA, 22 nt, Homo sapiens
cugaaaagcaucugcauagcug

SEQ ID NO: 23310 - RNA, 22 nt, Homo sapiens
uacucugcagagaugcauaaca

SEQ ID NO: 23311 - RNA, 21 nt, Homo sapiens
uacaaugcacaggagagccuc

SEQ ID NO: 23312 - RNA, 22 nt, Homo sapiens
uacagaauauuucugcccugag

SEQ ID NO: 23313 - RNA, 20 nt, Homo sapiens
uaagugcuuuauauugauua

SEQ ID NO: 23314 - RNA, 22 nt, Homo sapiens
uaaguggugcauuguuaaaugg

SEQ ID NO: 23315 - RNA, 22 nt, Homo sapiens
uaauagagucauuauuauuguu

SEQ ID NO: 23316 - RNA, 22 nt, Homo sapiens
uaaugugcuucucuaccauagg

SEQ ID NO: 23317 - RNA, 22 nt, Homo sapiens
uacaaaguaacaguuccuguau

SEQ ID NO: 23318 - RNA, 22 nt, Homo sapiens
uaaggcuagcaagaugagaaua

SEQ ID NO: 23319 - RNA, 22 nt, Homo sapiens
uaagugaaggaaguguguuuac

SEQ ID NO: 23320 - RNA, 22 nt, Homo sapiens
uauugcuuuugauucaaggcag

SEQ ID NO: 23321 - RNA, 20 nt, Homo sapiens
uaugacaaagccuagugagu

SEQ ID NO: 23322 - RNA, 22 nt, Homo sapiens
uaugcuuauugucucauccacu

SEQ ID NO: 23323 - RNA, 22 nt, Homo sapiens
uauagcuuaaaguuuagauccu

SEQ ID NO: 23324 - RNA, 22 nt, Homo sapiens
uaucacaguaucuagcacagug

SEQ ID NO: 23325 - RNA, 22 nt, Homo sapiens
uaucaccuugguagucuugggg

SEQ ID NO: 23326 - RNA, 22 nt, Homo sapiens
uaucaccuugcaggagcuauga

SEQ ID NO: 23327 - RNA, 22 nt, Homo sapiens
uauaacacccacauauagucuu

SEQ ID NO: 23328 - RNA, 19 nt, Homo sapiens
uagcagcaugauuuauaau

SEQ ID NO: 23329 - RNA, 22 nt, Homo sapiens
ggccggguggccauggcugccc

SEQ ID NO: 23330 - RNA, 21 nt, Homo sapiens
ggaauguugccagcagccaga

SEQ ID NO: 23331 - RNA, 22 nt, Homo sapiens
gcugugguuuaguagaaagaag

SEQ ID NO: 23332 - RNA, 22 nt, Homo sapiens
gggcaaaacuguacugccaagg

SEQ ID NO: 23333 - RNA, 22 nt, Homo sapiens
gggaugaagcccuaggguuggu

SEQ ID NO: 23334 - RNA, 22 nt, Homo sapiens
gggaugaaguugauguagaaag

SEQ ID NO: 23335 - RNA, 22 nt, Homo sapiens
gggcaugauggugcacacaugu

SEQ ID NO: 23336 - RNA, 22 nt, Homo sapiens
ggguaaaucucuuuucauggcu

SEQ ID NO: 23337 - RNA, 22 nt, Homo sapiens
gucaucaucaguccucugugca

SEQ ID NO: 23338 - RNA, 22 nt, Homo sapiens
guacucuggaguaggccuaauu

SEQ ID NO: 23339 - RNA, 22 nt, Homo sapiens
guagcagaauaucagauaauuu

SEQ ID NO: 23340 - RNA, 22 nt, Homo sapiens
guaccucaguuggaaaugcaga

SEQ ID NO: 23341 - RNA, 22 nt, Homo sapiens
ggugauauguugagguuuuggg

SEQ ID NO: 23342 - RNA, 22 nt, Homo sapiens
gugccacaguguuaagggauuc

SEQ ID NO: 23343 - RNA, 22 nt, Homo sapiens
gugcaugucuaugcgagucuaa

SEQ ID NO: 23344 - RNA, 22 nt, Homo sapiens
guggguaaaucucuguucgagg

SEQ ID NO: 23345 - RNA, 22 nt, Homo sapiens
gugggguaggaggaguacuucc

SEQ ID NO: 23346 - RNA, 21 nt, Homo sapiens
guggccuuuggagcaugucag

SEQ ID NO: 23347 - RNA, 22 nt, Homo sapiens
guguccucgaguacacaucagg

SEQ ID NO: 23348 - RNA, 21 nt, Homo sapiens
guucaagugauccuccugucu

SEQ ID NO: 23349 - RNA, 20 nt, Homo sapiens
guucacaggcuuccuuucag

SEQ ID NO: 23350 - RNA, 22 nt, Homo sapiens
guuauguuaguuacaaggcuag

SEQ ID NO: 23351 - RNA, 22 nt, Homo sapiens
gugagcgaggaaacgacggcgc

SEQ ID NO: 23352 - RNA, 22 nt, Homo sapiens
gugagcuccucuucugcugcag

SEQ ID NO: 23353 - RNA, 21 nt, Homo sapiens
gugcagaugccacagucacuc

SEQ ID NO: 23354 - RNA, 22 nt, Homo sapiens
gucguggagcucacagugugcc

SEQ ID NO: 23355 - RNA, 22 nt, Homo sapiens
gucucacagcuagcugcuuuau

SEQ ID NO: 23356 - RNA, 22 nt, Homo sapiens
gucucacaggcaugaugccagc

SEQ ID NO: 23357 - RNA, 22 nt, Homo sapiens
gucccugaggaacauccagggc

SEQ ID NO: 23358 - RNA, 22 nt, Homo sapiens
gugagcagagaucgcgugauug

SEQ ID NO: 23359 - RNA, 22 nt, Homo sapiens
gucaugaaguuuugaaugaaau

SEQ ID NO: 23360 - RNA, 22 nt, Homo sapiens
gucaugcaggguucgccagccc

SEQ ID NO: 23361 - RNA, 22 nt, Homo sapiens
gucauccaggcuggagugaagc

SEQ ID NO: 23362 - RNA, 19 nt, Homo sapiens
uugcauagguugaaccagc

SEQ ID NO: 23363 - RNA, 22 nt, Homo sapiens
uugcauagugcugagguucggg

SEQ ID NO: 23364 - RNA, 19 nt, Homo sapiens
uugcauauguugaaccagg

SEQ ID NO: 23365 - RNA, 22 nt, Homo sapiens
uugcacaguguguacagcacca

SEQ ID NO: 23366 - RNA, 18 nt, Homo sapiens
uucuuguguugauauuuu

SEQ ID NO: 23367 - RNA, 22 nt, Homo sapiens
uugaaugaaauuggugugggga

SEQ ID NO: 23368 - RNA, 22 nt, Homo sapiens
uugauguugaggacauaaaccu

SEQ ID NO: 23369 - RNA, 22 nt, Homo sapiens
uugccaacauggugaacuccca

SEQ ID NO: 23370 - RNA, 22 nt, Homo sapiens
uuggaauacucaaaagguuggg

SEQ ID NO: 23371 - RNA, 22 nt, Homo sapiens
uuggaagagaagggagauaaac

SEQ ID NO: 23372 - RNA, 22 nt, Homo sapiens
uuggaauauaaccuguuucuaa

SEQ ID NO: 23373 - RNA, 22 nt, Homo sapiens
uuggcaaaugucacaaaucagg

SEQ ID NO: 23374 - RNA, 22 nt, Homo sapiens
uuggccccuuucauccacagcu

SEQ ID NO: 23375 - RNA, 22 nt, Homo sapiens
uugguaguuucugucuuuagau

SEQ ID NO: 23376 - RNA, 21 nt, Homo sapiens
uuuggcuucucugcugcagcc

SEQ ID NO: 23377 - RNA, 22 nt, Homo sapiens
uuugggcuuuuaaucuagagca

SEQ ID NO: 23378 - RNA, 22 nt, Homo sapiens
uuugagcuagagucucacucug

SEQ ID NO: 23379 - RNA, 23 nt, Homo sapiens
uuucuugggcaugcuaugucagu

SEQ ID NO: 23380 - RNA, 22 nt, Homo sapiens
uuugauguugauacuaccuuca

SEQ ID NO: 23381 - RNA, 22 nt, Homo sapiens
uuugaggaaaggcauaaguagg

SEQ ID NO: 23382 - RNA, 22 nt, Homo sapiens
uugugcuuuuuaaauagcuucc

SEQ ID NO: 23383 - RNA, 18 nt, Homo sapiens
uuguggccccuacaaauu

SEQ ID NO: 23384 - RNA, 22 nt, Homo sapiens
uugugggaggugauuagaucau

SEQ ID NO: 23385 - RNA, 22 nt, Homo sapiens
uuguauguuuguucuuucagau

SEQ ID NO: 23386 - RNA, 22 nt, Homo sapiens
uucuggcucgauucucugaccg

SEQ ID NO: 23387 - RNA, 22 nt, Homo sapiens
uucuggcuuauaaacgugacuu

SEQ ID NO: 23388 - RNA, 22 nt, Homo sapiens
uucuauguuguuagacccacca

SEQ ID NO: 23389 - RNA, 22 nt, Homo sapiens
uucucugggacauaggucgggu

SEQ ID NO: 23390 - RNA, 19 nt, Homo sapiens
uuccugagaacaagggcuu

SEQ ID NO: 23391 - RNA, 22 nt, Homo sapiens
uuccauguaguugaacgguuuu

SEQ ID NO: 23392 - RNA, 22 nt, Homo sapiens
uucccugaguaucuuaccaugg

SEQ ID NO: 23393 - RNA, 22 nt, Homo sapiens
uucccugaaguguuacucuaga

SEQ ID NO: 23394 - RNA, 22 nt, Homo sapiens
uucauguaauauuucacagcuu

SEQ ID NO: 23395 - RNA, 22 nt, Homo sapiens
uucacaauuaaaugugguuauu

SEQ ID NO: 23396 - RNA, 22 nt, Homo sapiens
uucacagcuuaauaaggcucag

SEQ ID NO: 23397 - RNA, 22 nt, Homo sapiens
uucauacaguggcugcacucca

SEQ ID NO: 23398 - RNA, 22 nt, Homo sapiens
uuaucucaguguuuguaaacaa

SEQ ID NO: 23399 - RNA, 22 nt, Homo sapiens
uuacagcugcuccccaucacuc

SEQ ID NO: 23400 - RNA, 22 nt, Homo sapiens
uggugcccuguccuucuguggc

SEQ ID NO: 23401 - RNA, 22 nt, Homo sapiens
uggugagaaaagaugucuuugu

SEQ ID NO: 23402 - RNA, 22 nt, Homo sapiens
uggugccgugguccuggggcca

SEQ ID NO: 23403 - RNA, 22 nt, Homo sapiens
uguaaccauccagagucccagg

SEQ ID NO: 23404 - RNA, 22 nt, Homo sapiens
uguaagcagcagagacuauccu

SEQ ID NO: 23405 - RNA, 22 nt, Homo sapiens
uguagauaucauuagugcugug

SEQ ID NO: 23406 - RNA, 19 nt, Homo sapiens
uguacacuguaaaccugug

SEQ ID NO: 23407 - RNA, 22 nt, Homo sapiens
uguggcauuuucagaaaggaug

SEQ ID NO: 23408 - RNA, 22 nt, Homo sapiens
uguggucaucacuugaagguaa

SEQ ID NO: 23409 - RNA, 22 nt, Homo sapiens
uguguaaauagcuacggaucug

SEQ ID NO: 23410 - RNA, 18 nt, Homo sapiens
ugugcaauauuaaccacc

SEQ ID NO: 23411 - RNA, 22 nt, Homo sapiens
uuaaagcuggcguuacaguuug

SEQ ID NO: 23412 - RNA, 22 nt, Homo sapiens
uuaaaccugucuucucacuaau

SEQ ID NO: 23413 - RNA, 22 nt, Homo sapiens
uuaagcucauuuccauucuaca

SEQ ID NO: 23414 - RNA, 22 nt, Homo sapiens
uguuauguuuuagagguuucaa

SEQ ID NO: 23415 - RNA, 21 nt, Homo sapiens
uggaccccuuccuuacaucau

SEQ ID NO: 23416 - RNA, 22 nt, Homo sapiens
uggauugugaagaccaugggaa

SEQ ID NO: 23417 - RNA, 22 nt, Homo sapiens
uggucauggggcagcugacacu

SEQ ID NO: 23418 - RNA, 23 nt, Homo sapiens
ugguaacauguuguggcagggga

SEQ ID NO: 23419 - RNA, 22 nt, Homo sapiens
ugguaaguuuaacaugcauccc

SEQ ID NO: 23420 - RNA, 22 nt, Homo sapiens
ugggaaauguagccuagcugug

SEQ ID NO: 23421 - RNA, 22 nt, Homo sapiens
uggcagcgugaaagacuuuuuc

SEQ ID NO: 23422 - RNA, 22 nt, Homo sapiens
uggcagcugcuucaugggaugc

SEQ ID NO: 23423 - RNA, 22 nt, Homo sapiens
uggcaaagugugacgugggggu

SEQ ID NO: 23424 - RNA, 22 nt, Homo sapiens
ugaugacucuguggccccaggc

SEQ ID NO: 23425 - RNA, 23 nt, Homo sapiens
ugauguccacuuagggucuaggu

SEQ ID NO: 23426 - RNA, 20 nt, Homo sapiens
ugauuaguccacuuggcucu

SEQ ID NO: 23427 - RNA, 22 nt, Homo sapiens
ugcaccacuacacuccaggcug

SEQ ID NO: 23428 - RNA, 22 nt, Homo sapiens
ugcaccacacuccauccugggc

SEQ ID NO: 23429 - RNA, 22 nt, Homo sapiens
ugcaccacugcacuucagccug

SEQ ID NO: 23430 - RNA, 22 nt, Homo sapiens
ugcaccacugcacuccagcuug

SEQ ID NO: 23431 - RNA, 22 nt, Homo sapiens
ugcaccacugcacuccaggcug

SEQ ID NO: 23432 - RNA, 22 nt, Homo sapiens
ugagcagugagugugcugcagg

SEQ ID NO: 23433 - RNA, 22 nt, Homo sapiens
ugagcuaggaucacaccugcau

SEQ ID NO: 23434 - RNA, 22 nt, Homo sapiens
ugauaugaaucaaucacucuuc

SEQ ID NO: 23435 - RNA, 22 nt, Homo sapiens
ugauaugaaagggaaauaagug

SEQ ID NO: 23436 - RNA, 22 nt, Homo sapiens
ugaguagagaauucagcuaagg

SEQ ID NO: 23437 - RNA, 22 nt, Homo sapiens
ugaacuguaagguauaggugau

SEQ ID NO: 23438 - RNA, 22 nt, Homo sapiens
ugaacacuggauaaggagucag

SEQ ID NO: 23439 - RNA, 22 nt, Homo sapiens
ucuuugggauauucugaaaggg

SEQ ID NO: 23440 - RNA, 22 nt, Homo sapiens
ugaauguaagaugucugcuggu

SEQ ID NO: 23441 - RNA, 21 nt, Homo sapiens
ugaauauuuggguugugucca

SEQ ID NO: 23442 - RNA, 22 nt, Homo sapiens
ugaauucuguccaaaauaacug

SEQ ID NO: 23443 - RNA, 22 nt, Homo sapiens
ugacaagagaccccuccgcagg

SEQ ID NO: 23444 - RNA, 22 nt, Homo sapiens
ugacaugauuguauauuuagaa

SEQ ID NO: 23445 - RNA, 22 nt, Homo sapiens
aacauguuuagcagauaccugu

SEQ ID NO: 23446 - RNA, 21 nt, Homo sapiens
aacagugcugaacagacaccu

SEQ ID NO: 23447 - RNA, 22 nt, Homo sapiens
ucuuugagugcccugagucccu

SEQ ID NO: 23448 - RNA, 22 nt, Homo sapiens
ucuuuggauggaaauuggaguc

SEQ ID NO: 23449 - RNA, 22 nt, Homo sapiens
ucucagcggacaggccggccag

SEQ ID NO: 23450 - RNA, 22 nt, Homo sapiens
ucucauggcucacccugcauag

SEQ ID NO: 23451 - RNA, 22 nt, Homo sapiens
uccuugguugauccugugcaga

SEQ ID NO: 23452 - RNA, 22 nt, Homo sapiens
ucagcaccauguaacaauugau

SEQ ID NO: 23453 - RNA, 21 nt, Homo sapiens
ucaggaccucuaguuagccag

SEQ ID NO: 23454 - RNA, 22 nt, Homo sapiens
ucauaggucugagaagaaaaua

SEQ ID NO: 23455 - RNA, 23 nt, Homo sapiens
ucagugucuggauccugcucagu

SEQ ID NO: 23456 - RNA, 22 nt, Homo sapiens
uccccgucacacgcaggcuuac

SEQ ID NO: 23457 - RNA, 22 nt, Homo sapiens
uccugcauucugaaauacaagu

SEQ ID NO: 23458 - RNA, 22 nt, Homo sapiens
uccaguggacagacauaccaug

SEQ ID NO: 23459 - RNA, 22 nt, Homo sapiens
uccaugugaaaaggucgugaua

SEQ ID NO: 23460 - RNA, 22 nt, Homo sapiens
ucauggggugcuuugcuagauu

SEQ ID NO: 23461 - RNA, 22 nt, Homo sapiens
ucauucauucauccagcuugag

SEQ ID NO: 23462 - RNA, 22 nt, Homo sapiens
uccacaguggugaggugcagca

SEQ ID NO: 23463 - RNA, 22 nt, Human adenovirus C
cacuccaguaggccgucaccgc

SEQ ID NO: 23464 - RNA, 22 nt, Human adenovirus C
uggaucugcgccagcagguuuc

SEQ ID NO: 23465 - RNA, 19 nt, Human adenovirus C
ugagauaccagaguuggga

SEQ ID NO: 23466 - RNA, 22 nt, Human adenovirus C
ugagauaccagaguugggagga

SEQ ID NO: 23467 - RNA, 22 nt, Human adenovirus C
ugcaaaauuuccaacguggagc

SEQ ID NO: 23468 - RNA, 22 nt, Human adenovirus C
ugcagguuuaccucgcauagcc

SEQ ID NO: 23469 - RNA, 17 nt, Human adenovirus C
ugcggcggcggcuggcg

SEQ ID NO: 23470 - RNA, 22 nt, Human adenovirus C
gguaucauggcggacgaccggg

SEQ ID NO: 23471 - RNA, 22 nt, Human adenovirus C
gugagugcgcccauggacauaa

SEQ ID NO: 23472 - RNA, 22 nt, Human adenovirus C
cguagucguugcaaguccgcac

SEQ ID NO: 23473 - RNA, 22 nt, Human adenovirus C
gcugggcguuaccccgucgcgc

SEQ ID NO: 23474 - RNA, 22 nt, Human adenovirus C
ggaugcuguuucuccccccggu

SEQ ID NO: 23475 - RNA, 22 nt, Human adenovirus C
ggcgccgggcccggcacuaccu

SEQ ID NO: 23476 - RNA, 22 nt, Human adenovirus C
ggcggacggaagacaacaguag

SEQ ID NO: 23477 - RNA, 22 nt, Human adenovirus C
ggcuagguccaggugauaccug

SEQ ID NO: 23478 - RNA, 22 nt, Human adenovirus C
gggaacuuaaugucguuucuca

SEQ ID NO: 23479 - RNA, 22 nt, Human adenovirus C
cgcccgcgaugccgaagggggc

SEQ ID NO: 23480 - RNA, 22 nt, Human adenovirus C
cgcgagauugagcuccacgugc

SEQ ID NO: 23481 - RNA, 22 nt, Human adenovirus C
cgcggcgagacuaugcccaggg

SEQ ID NO: 23482 - RNA, 22 nt, Human adenovirus C
augaaaaaauucauagauugga

SEQ ID NO: 23483 - RNA, 22 nt, Human adenovirus C
uugccugggaggagccccacag

SEQ ID NO: 23484 - RNA, 22 nt, Human adenovirus C
uccccgcggcgacggcgcaugg

SEQ ID NO: 23485 - RNA, 22 nt, Human adenovirus C
uccggccguccgccgugaucca

SEQ ID NO: 23486 - RNA, 18 nt, Human adenovirus C
uccgggguaggggagauc

SEQ ID NO: 23487 - RNA, 22 nt, Human adenovirus C
guugcgcgcggucauguccagc

SEQ ID NO: 23488 - RNA, 22 nt, Human adenovirus C
uaaacuuuggagaaaguuugca

SEQ ID NO: 23489 - RNA, 22 nt, Human adenovirus C
gagcaggucuacuggucguugc

SEQ ID NO: 23490 - RNA, 22 nt, Human adenovirus C
gaucaugucuaccugcggggcg

SEQ ID NO: 23491 - RNA, 22 nt, Human adenovirus C
cuguuagagcucuguuccagca

SEQ ID NO: 23492 - RNA, 22 nt, Human adenovirus C
gaccgcuggcggcacggcgcag

SEQ ID NO: 23493 - RNA, 22 nt, Human adenovirus C
cuccccuggacccgccguuugu

SEQ ID NO: 23494 - RNA, 22 nt, Human adenovirus C
cuccgggcugcgcgcuggccag

SEQ ID NO: 23495 - RNA, 22 nt, Human adenovirus C
cuggcacgggcagcggcgauag

SEQ ID NO: 23496 - RNA, 22 nt, Human adenovirus C
ccgccggcucacgcucacggcc

SEQ ID NO: 23497 - RNA, 22 nt, Human adenovirus C
ccgcggaggcacaaacggcggg

SEQ ID NO: 23498 - RNA, 22 nt, Human adenovirus C
cacuccaguaggccgucaccgc

SEQ ID NO: 23499 - RNA, 22 nt, Human adenovirus C
cagcgcguuuacgaucgccagc

SEQ ID NO: 23500 - RNA, 22 nt, Homo sapiens
gcauggccuuuaaaugucacag

SEQ ID NO: 23501 - RNA, 22 nt, Homo sapiens
acugcacuccagcuccagggug

SEQ ID NO: 23502 - RNA, 22 nt, Homo sapiens
aggcacacaacccuggaccuga

SEQ ID NO: 23503 - RNA, 22 nt, Homo sapiens
cucucugagccauggcugcccu

SEQ ID NO: 23504 - RNA, 22 nt, Homo sapiens
gcacccugucaaaauggaccaa

SEQ ID NO: 23505 - RNA, 22 nt, Homo sapiens
gucaaaugcacagaaccauuaa

SEQ ID NO: 23506 - RNA, 22 nt, Homo sapiens
acugcacuccagccuucaggac

SEQ ID NO: 23507 - RNA, 22 nt, Homo sapiens
gacuggccuauaauggcgaauu

SEQ ID NO: 23508 - RNA, 22 nt, Homo sapiens
gacuggccauugauacagaggu

SEQ ID NO: 23509 - RNA, 22 nt, Homo sapiens
caccagguuggagugcaguggu

SEQ ID NO: 23510 - RNA, 22 nt, Homo sapiens
ucacuggccaaauucuggguga

SEQ ID NO: 23511 - RNA, 22 nt, Homo sapiens
ucacuggcaaauauauccguug

SEQ ID NO: 23512 - RNA, 22 nt, Homo sapiens
ggucacccugaugcuggugguc

SEQ ID NO: 23513 - RNA, 22 nt, Homo sapiens
uacuggccccaaaguagguagu

SEQ ID NO: 23514 - RNA, 22 nt, Homo sapiens
acugcacuccagccugugagac

SEQ ID NO: 23515 - RNA, 22 nt, Homo sapiens
aacuggccugagaugaaaagug

SEQ ID NO: 23516 - RNA, 22 nt, Homo sapiens
gagacucuuagauuggaaaucu

SEQ ID NO: 23517 - RNA, 22 nt, Homo sapiens
ucaugggagcccccaucaugag

SEQ ID NO: 23518 - RNA, 22 nt, Homo sapiens
gaggucaugucgggccccagga

SEQ ID NO: 23519 - RNA, 19 nt, Homo sapiens
uuccugagaacaagggcuu

SEQ ID NO: 23520 - RNA, 22 nt, Homo sapiens
uguggcacuguguccagagaaa

SEQ ID NO: 23521 - RNA, 22 nt, Homo sapiens
aguggcacaauuuugacucccc

SEQ ID NO: 23522 - RNA, 22 nt, Homo sapiens
uacuggccuugaacucuggugu

SEQ ID NO: 23523 - RNA, 22 nt, Homo sapiens
uggcaccauccaggugucucua

SEQ ID NO: 23524 - RNA, 22 nt, Homo sapiens
acagcacugccaagugacccau

SEQ ID NO: 23525 - RNA, 22 nt, Homo sapiens
uuccugagccuuguaucuagua

SEQ ID NO: 23526 - RNA, 22 nt, Homo sapiens
acccugucaaaacggaccaauc

SEQ ID NO: 23527 - RNA, 21 nt, Homo sapiens
uuuccuggagcguauggcuuc

SEQ ID NO: 23528 - RNA, 22 nt, Homo sapiens
aacuggccuccuugggaaauua

SEQ ID NO: 23529 - RNA, 22 nt, Homo sapiens
gucacugggugcugcgccuguc

SEQ ID NO: 23530 - RNA, 22 nt, Homo sapiens
acccugucaaaauggaccaauc

SEQ ID NO: 23531 - RNA, 22 nt, Homo sapiens
acugcacuccagacucugucuc

SEQ ID NO: 23532 - RNA, 17 nt, Homo sapiens
gcacuggcguaucccac

SEQ ID NO: 23533 - RNA, 22 nt, Homo sapiens
gcaccccuuaccgggcuggguu

SEQ ID NO: 23534 - RNA, 22 nt, Homo sapiens
gcaccacugcacucucagcuug

SEQ ID NO: 23535 - RNA, 22 nt, Homo sapiens
gaggucauucugugguacccag

SEQ ID NO: 23536 - RNA, 20 nt, Homo sapiens
acacuggcuuugagauuuag

SEQ ID NO: 23537 - RNA, 22 nt, Homo sapiens
caccaggugcccagcacggcca

SEQ ID NO: 23538 - RNA, 22 nt, Homo sapiens
acccugucacucccaucaauuu

SEQ ID NO: 23539 - RNA, 22 nt, Homo sapiens
uggaggacugcagaacugaggc

SEQ ID NO: 23540 - RNA, 22 nt, Homo sapiens
cuccacugagcaggugggaggc

SEQ ID NO: 23541 - RNA, 22 nt, Homo sapiens
aacuggccuggcgugcagaggg

SEQ ID NO: 23542 - RNA, 22 nt, Homo sapiens
ugagcugguacuaauauuauca

SEQ ID NO: 23543 - RNA, 22 nt, Homo sapiens
cacugcacuccagcuugugggc

SEQ ID NO: 23544 - RNA, 22 nt, Homo sapiens
ggcaccacagacgccaggcgug

SEQ ID NO: 23545 - RNA, 20 nt, Homo sapiens
uguggcacuguaucucucag

SEQ ID NO: 23546 - RNA, 20 nt, Homo sapiens
ucacccugacaucugcccag

SEQ ID NO: 23547 - RNA, 22 nt, Homo sapiens
cauggcccugggcugggcgaac

SEQ ID NO: 23548 - RNA, 22 nt, Homo sapiens
gugacacagcaagacuccgucu

SEQ ID NO: 23549 - RNA, 22 nt, Homo sapiens
aguggcacuauucucagaguca

SEQ ID NO: 23550 - RNA, 19 nt, Homo sapiens
caccgccugcccccugcug

SEQ ID NO: 23551 - RNA, 22 nt, Homo sapiens
ggcaccauggaaggacgggagc

SEQ ID NO: 23552 - RNA, 21 nt, Homo sapiens
ucaggaccucuaguuagccag

SEQ ID NO: 23553 - RNA, 22 nt, Homo sapiens
ucugagucaucacaaaugaugc

SEQ ID NO: 23554 - RNA, 19 nt, Homo sapiens
agagacucauuguagcauu

SEQ ID NO: 23555 - RNA, 22 nt, Homo sapiens
uugggacccuguccuguaacaa

SEQ ID NO: 23556 - RNA, 22 nt, Homo sapiens
cugagcccauucuggggagaag

SEQ ID NO: 23557 - RNA, 22 nt, Homo sapiens
uuugcaagaugaaaaaguucua

SEQ ID NO: 23558 - RNA, 22 nt, Homo sapiens
uuugcagagacuuguuaggaau

SEQ ID NO: 23559 - RNA, 22 nt, Homo sapiens
uuugcacuucugagugugacau

SEQ ID NO: 23560 - RNA, 22 nt, Homo sapiens
uuuugcuccuggcaaacucaua

SEQ ID NO: 23561 - RNA, 22 nt, Homo sapiens
uuuuuauggccaauccucagaa

SEQ ID NO: 23562 - RNA, 22 nt, Homo sapiens
uguaguuugaaagcucccucug

SEQ ID NO: 23563 - RNA, 22 nt, Homo sapiens
uguagcagccauaaacacagug

SEQ ID NO: 23564 - RNA, 22 nt, Homo sapiens
uguagcaaaucgauacuauugg

SEQ ID NO: 23565 - RNA, 22 nt, Homo sapiens
uguagacaccaaagacagcaua

SEQ ID NO: 23566 - RNA, 22 nt, Homo sapiens
uguacuucaagauuaugguuua

SEQ ID NO: 23567 - RNA, 22 nt, Homo sapiens
uggcuccguuguacaggcugga

SEQ ID NO: 23568 - RNA, 22 nt, Homo sapiens
ugguugaucccaucacccaggu

SEQ ID NO: 23569 - RNA, 21 nt, Homo sapiens
ugguugauccuccuagugccu

SEQ ID NO: 23570 - RNA, 22 nt, Homo sapiens
ugguuagucuguguguauauau

SEQ ID NO: 23571 - RNA, 22 nt, Homo sapiens
ugucuugagagaggacaugacu

SEQ ID NO: 23572 - RNA, 21 nt, Homo sapiens
ugugaccucugucucugaguc

SEQ ID NO: 23573 - RNA, 22 nt, Homo sapiens
ugugaucaauuagugaugucug

SEQ ID NO: 23574 - RNA, 22 nt, Homo sapiens
ugugaugauuugauaaacguau

SEQ ID NO: 23575 - RNA, 22 nt, Homo sapiens
ugugaugugaugagaaguuccu

SEQ ID NO: 23576 - RNA, 22 nt, Homo sapiens
uguauugcuugaagagugaauu

SEQ ID NO: 23577 - RNA, 22 nt, Homo sapiens
uguauguuuaaggccaguggaa

SEQ ID NO: 23578 - RNA, 22 nt, Homo sapiens
uguauguuucuuaggccugaga

SEQ ID NO: 23579 - RNA, 22 nt, Homo sapiens
uguauguugauguuauauucug

SEQ ID NO: 23580 - RNA, 22 nt, Homo sapiens
ugucaaaugcagugauauuuga

SEQ ID NO: 23581 - RNA, 21 nt, Homo sapiens
ugucaagaugacugcugcggc

SEQ ID NO: 23582 - RNA, 22 nt, Homo sapiens
ugucaaauucuggguuaaaaca

SEQ ID NO: 23583 - RNA, 22 nt, Homo sapiens
ugucagcacaacucagguuccu

SEQ ID NO: 23584 - RNA, 22 nt, Homo sapiens
uguccauuuuuaugcuuauggu

SEQ ID NO: 23585 - RNA, 22 nt, Homo sapiens
ugugcacaugauauaucacaua

SEQ ID NO: 23586 - RNA, 22 nt, Homo sapiens
ugugguauuagguguaguaucu

SEQ ID NO: 23587 - RNA, 22 nt, Homo sapiens
ugugguagugcuuaccugcagu

SEQ ID NO: 23588 - RNA, 22 nt, Homo sapiens
uguguacugcagaguauucugu

SEQ ID NO: 23589 - RNA, 22 nt, Homo sapiens
ugugguuuuauaaacgugaccu

SEQ ID NO: 23590 - RNA, 22 nt, Homo sapiens
uuaaugcuuggggaguaguucu

SEQ ID NO: 23591 - RNA, 22 nt, Homo sapiens
uuaaugcuuuugggauauuucu

SEQ ID NO: 23592 - RNA, 22 nt, Homo sapiens
uuaccaguggugcuguaaacuu

SEQ ID NO: 23593 - RNA, 22 nt, Homo sapiens
uuacuguauagaaucaucuuga

SEQ ID NO: 23594 - RNA, 22 nt, Homo sapiens
uucacaguguuucucacgguua

SEQ ID NO: 23595 - RNA, 22 nt, Homo sapiens
uuauucugucuuuggucucaau

SEQ ID NO: 23596 - RNA, 22 nt, Homo sapiens
uuaucauagugcaguuuucuga

SEQ ID NO: 23597 - RNA, 20 nt, Homo sapiens
uuauagcuacaucuugacug

SEQ ID NO: 23598 - RNA, 22 nt, Homo sapiens
uuauagguuucuacaggacuau

SEQ ID NO: 23599 - RNA, 22 nt, Homo sapiens
uuagcagugugagcacagacua

SEQ ID NO: 23600 - RNA, 22 nt, Homo sapiens
uuagcaguggauggguggagaa

SEQ ID NO: 23601 - RNA, 22 nt, Homo sapiens
uuagcagugugaaaaaagacua

SEQ ID NO: 23602 - RNA, 22 nt, Homo sapiens
uuagcacauuuccagcacaugg

SEQ ID NO: 23603 - RNA, 21 nt, Homo sapiens
uugguccacaugucauaguua

SEQ ID NO: 23604 - RNA, 22 nt, Homo sapiens
uugguucucuuagccaucuuaa

SEQ ID NO: 23605 - RNA, 22 nt, Homo sapiens
uuguaacaguuuauugacucga

SEQ ID NO: 23606 - RNA, 23 nt, Homo sapiens
uuguacacuaagaaucgcagaug

SEQ ID NO: 23607 - RNA, 22 nt, Homo sapiens
uugucauggucuugauccauua

SEQ ID NO: 23608 - RNA, 19 nt, Homo sapiens
uugcaguauccuauauguu

SEQ ID NO: 23609 - RNA, 22 nt, Homo sapiens
uugcaggugguuuaugcaagac

SEQ ID NO: 23610 - RNA, 22 nt, Homo sapiens
uugcaguagucugaaagcaaua

SEQ ID NO: 23611 - RNA, 22 nt, Homo sapiens
uuuagcacugugauugacaaaa

SEQ ID NO: 23612 - RNA, 22 nt, Homo sapiens
uuuauggagagauauuuauggu

SEQ ID NO: 23613 - RNA, 17 nt, Homo sapiens
uuucagaguggaagugu

SEQ ID NO: 23614 - RNA, 22 nt, Homo sapiens
uuuacagucuuuugugugaguc

SEQ ID NO: 23615 - RNA, 22 nt, Homo sapiens
uuuaaugcugcccagucauggg

SEQ ID NO: 23616 - RNA, 22 nt, Homo sapiens
uuuacaguuuucuaggcuacca

SEQ ID NO: 23617 - RNA, 22 nt, Homo sapiens
uugcacuguaauuuauuuaugu

SEQ ID NO: 23618 - RNA, 22 nt, Homo sapiens
uugcacuccagccuggaugaca

SEQ ID NO: 23619 - RNA, 22 nt, Homo sapiens
uugcacuccagccugggugaca

SEQ ID NO: 23620 - RNA, 22 nt, Homo sapiens
uugcacuccagcucuaggugac

SEQ ID NO: 23621 - RNA, 22 nt, Homo sapiens
uugcacucuccagccucggcaa

SEQ ID NO: 23622 - RNA, 22 nt, Homo sapiens
uugaggaggcagucugcccauu

SEQ ID NO: 23623 - RNA, 22 nt, Homo sapiens
uugaggaggcagucuguccguu

SEQ ID NO: 23624 - RNA, 22 nt, Homo sapiens
uugaggaguacugauuagguau

SEQ ID NO: 23625 - RNA, 22 nt, Homo sapiens
uugagauguggguuggugacuu

SEQ ID NO: 23626 - RNA, 17 nt, Homo sapiens
uugagaguauaucuuac

SEQ ID NO: 23627 - RNA, 22 nt, Homo sapiens
uugagaucuacuacuguaggag

SEQ ID NO: 23628 - RNA, 22 nt, Homo sapiens
uugacuacaccaugccaggaac

SEQ ID NO: 23629 - RNA, 22 nt, Homo sapiens
uugagaagugucuguucauguc

SEQ ID NO: 23630 - RNA, 22 nt, Homo sapiens
uugacaaguuguccaguaugag

SEQ ID NO: 23631 - RNA, 17 nt, Homo sapiens
uugaaugcauuacuugg

SEQ ID NO: 23632 - RNA, 22 nt, Homo sapiens
uugaaguaggaaaggaggaggu

SEQ ID NO: 23633 - RNA, 21 nt, Homo sapiens
uucaucagccagaaaucaagc

SEQ ID NO: 23634 - RNA, 23 nt, Homo sapiens
uucaucagggauauuggccugaa

SEQ ID NO: 23635 - RNA, 22 nt, Homo sapiens
uucauccccuccaaaucucaug

SEQ ID NO: 23636 - RNA, 20 nt, Homo sapiens
uucaugggagcaaagaggcc

SEQ ID NO: 23637 - RNA, 21 nt, Homo sapiens
uucuuugcucaguguuagagu

SEQ ID NO: 23638 - RNA, 20 nt, Homo sapiens
uaagugcuugaugaaugaac

SEQ ID NO: 23639 - RNA, 20 nt, Homo sapiens
uaagugcuuuauauugauua

SEQ ID NO: 23640 - RNA, 22 nt, Homo sapiens
uacauccauccugcugggcagu

SEQ ID NO: 23641 - RNA, 22 nt, Homo sapiens
uacauugucauauucucucucu

SEQ ID NO: 23642 - RNA, 22 nt, Homo sapiens
uaccauguauguuucuccauug

SEQ ID NO: 23643 - RNA, 22 nt, Homo sapiens
uaccauguaucugggaugcuuu

SEQ ID NO: 23644 - RNA, 22 nt, Homo sapiens
uacugcugucagugccaaguag

SEQ ID NO: 23645 - RNA, 22 nt, Homo sapiens
gugguucuaaaccuuuuuuggu

SEQ ID NO: 23646 - RNA, 22 nt, Homo sapiens
uaaaccuagcauuuugcauaug

SEQ ID NO: 23647 - RNA, 22 nt, Homo sapiens
uaaaagucaucacaacuggagu

SEQ ID NO: 23648 - RNA, 22 nt, Homo sapiens
uaacuguggaaaugacuuuaaa

SEQ ID NO: 23649 - RNA, 22 nt, Homo sapiens
uauggucuuugagaggugacug

SEQ ID NO: 23650 - RNA, 22 nt, Homo sapiens
uauucacuguaucauugauggg

SEQ ID NO: 23651 - RNA, 22 nt, Homo sapiens
uaugaaucuggcuacuccaggg

SEQ ID NO: 23652 - RNA, 22 nt, Homo sapiens
uaucacagguggacugcacacc

SEQ ID NO: 23653 - RNA, 22 nt, Homo sapiens
uaugaaucugagagaucuggaa

SEQ ID NO: 23654 - RNA, 22 nt, Homo sapiens
uaucacacaucaugguaaaucu

SEQ ID NO: 23655 - RNA, 22 nt, Homo sapiens
uaucacacuguuggauuugauu

SEQ ID NO: 23656 - RNA, 22 nt, Homo sapiens
uaucacagcgggguguacaccc

SEQ ID NO: 23657 - RNA, 22 nt, Homo sapiens
uagcagucaagauagucauuau

SEQ ID NO: 23658 - RNA, 22 nt, Homo sapiens
uagcaguauugaaagaugaggg

SEQ ID NO: 23659 - RNA, 22 nt, Homo sapiens
uagcagucucagaaugcauggu

SEQ ID NO: 23660 - RNA, 21 nt, Homo sapiens
uagcucagugguguugccaua

SEQ ID NO: 23661 - RNA, 22 nt, Homo sapiens
uagcauggagucaugcacggcu

SEQ ID NO: 23662 - RNA, 22 nt, Homo sapiens
uagcuggaauuacuugcaccug

SEQ ID NO: 23663 - RNA, 22 nt, Homo sapiens
uaggugauccauuuguauuuua

SEQ ID NO: 23664 - RNA, 22 nt, Homo sapiens
gugcauguccacuaguccauau

SEQ ID NO: 23665 - RNA, 23 nt, Homo sapiens
gugcaugagucuuuauaguagca

SEQ ID NO: 23666 - RNA, 22 nt, Homo sapiens
gugccacugcacuccggccugg

SEQ ID NO: 23667 - RNA, 22 nt, Homo sapiens
guggcaugaaagcaucugugau

SEQ ID NO: 23668 - RNA, 22 nt, Homo sapiens
gugggauggaaaugggcuucag

SEQ ID NO: 23669 - RNA, 22 nt, Homo sapiens
gugggauauaaucaguccugua

SEQ ID NO: 23670 - RNA, 22 nt, Homo sapiens
gugagauggaguuggugucuuu

SEQ ID NO: 23671 - RNA, 22 nt, Homo sapiens
gugauuuaguagaugcuaguua

SEQ ID NO: 23672 - RNA, 22 nt, Homo sapiens
gugaccagaugggcaggggugu

SEQ ID NO: 23673 - RNA, 22 nt, Homo sapiens
gugacagucaaagacaugacuu

SEQ ID NO: 23674 - RNA, 22 nt, Homo sapiens
gugaauguaaagucaugugacu

SEQ ID NO: 23675 - RNA, 22 nt, Homo sapiens
gugaauguuuucuuacauggua

SEQ ID NO: 23676 - RNA, 22 nt, Homo sapiens
gucuggguuuguuuguacuugc

SEQ ID NO: 23677 - RNA, 22 nt, Homo sapiens
gucugcaugucauaugauagua

SEQ ID NO: 23678 - RNA, 22 nt, Homo sapiens
gucauugcuuaaggguucaugc

SEQ ID NO: 23679 - RNA, 22 nt, Homo sapiens
gucauugcuuaucugcugacgu

SEQ ID NO: 23680 - RNA, 22 nt, Homo sapiens
gucuuuguuauuaugaaucaac

SEQ ID NO: 23681 - RNA, 22 nt, Homo sapiens
gugaaacuggguggugagagac

SEQ ID NO: 23682 - RNA, 22 nt, Homo sapiens
gucaugaacuguacuacuccua

SEQ ID NO: 23683 - RNA, 22 nt, Homo sapiens
gucauggugcuagcgggaaugu

SEQ ID NO: 23684 - RNA, 22 nt, Homo sapiens
ggacuaggagcuaggaagaucu

SEQ ID NO: 23685 - RNA, 22 nt, Homo sapiens
gcuguugguaaaaaggacauga

SEQ ID NO: 23686 - RNA, 18 nt, Homo sapiens
gcuguugucagagcacau

SEQ ID NO: 23687 - RNA, 22 nt, Homo sapiens
gcuguugugaacuauacaucua

SEQ ID NO: 23688 - RNA, 22 nt, Homo sapiens
gcuguguguuaucagaaauugc

SEQ ID NO: 23689 - RNA, 22 nt, Homo sapiens
gcuggcaaguggccuacuuugu

SEQ ID NO: 23690 - RNA, 22 nt, Homo sapiens
gcacacuuacacgaaccuagau

SEQ ID NO: 23691 - RNA, 22 nt, Homo sapiens
gcacaguguuacuugauauauu

SEQ ID NO: 23692 - RNA, 22 nt, Homo sapiens
gcaaugcugucugugcacagau

SEQ ID NO: 23693 - RNA, 22 nt, Homo sapiens
ggucauggagcuuuacuuuaug

SEQ ID NO: 23694 - RNA, 19 nt, Homo sapiens
ggucauggagguuguguga

SEQ ID NO: 23695 - RNA, 22 nt, Homo sapiens
ggucauggauugucuuuucuug

SEQ ID NO: 23696 - RNA, 19 nt, Homo sapiens
ggugcuugaauauuccucc

SEQ ID NO: 23697 - RNA, 22 nt, Homo sapiens
ggugaggaaaguugaguuucua

SEQ ID NO: 23698 - RNA, 23 nt, Homo sapiens
ggugaggaguacagagucuucau

SEQ ID NO: 23699 - RNA, 22 nt, Homo sapiens
ggugauguuugaguugagacag

SEQ ID NO: 23700 - RNA, 22 nt, Homo sapiens
ggcaagaagagaguuuaaacau

SEQ ID NO: 23701 - RNA, 22 nt, Homo sapiens
ggcaagaaagaaaucaucuguc

SEQ ID NO: 23702 - RNA, 22 nt, Homo sapiens
ggcaagaaccucaauuaccuuu

SEQ ID NO: 23703 - RNA, 22 nt, Homo sapiens
ucucccuaccugagccgagcca

SEQ ID NO: 23704 - RNA, 22 nt, Homo sapiens
ucccagugaaaccccaccuuca

SEQ ID NO: 23705 - RNA, 22 nt, Homo sapiens
ucccaguggucuugaaacaggg

SEQ ID NO: 23706 - RNA, 22 nt, Homo sapiens
ucugaaucguucccaugcagga

SEQ ID NO: 23707 - RNA, 22 nt, Homo sapiens
ucugacagugagagaaaucuga

SEQ ID NO: 23708 - RNA, 22 nt, Homo sapiens
ucugagguaggugcauggauac

SEQ ID NO: 23709 - RNA, 22 nt, Homo sapiens
ucugguuccugcauucauucaa

SEQ ID NO: 23710 - RNA, 18 nt, Homo sapiens
ucugugguguaaauacgu

SEQ ID NO: 23711 - RNA, 22 nt, Homo sapiens
ucugugcauuguaggauguuua

SEQ ID NO: 23712 - RNA, 22 nt, Homo sapiens
ucuugguaaugucacauuuccu

SEQ ID NO: 23713 - RNA, 22 nt, Homo sapiens
ugaaaguuauauugugaaauuc

SEQ ID NO: 23714 - RNA, 22 nt, Homo sapiens
ugaaaugguuaugugaggagau

SEQ ID NO: 23715 - RNA, 22 nt, Homo sapiens
ugaaaugucuuuaggaggcuuc

SEQ ID NO: 23716 - RNA, 22 nt, Homo sapiens
ugaaauguguuaucugggccug

SEQ ID NO: 23717 - RNA, 22 nt, Homo sapiens
ugaaauguuaaacaaguggcuc

SEQ ID NO: 23718 - RNA, 22 nt, Homo sapiens
ugaauuguuuacgagaugugag

SEQ ID NO: 23719 - RNA, 22 nt, Homo sapiens
ugaauauguuucuaaaagugca

SEQ ID NO: 23720 - RNA, 22 nt, Homo sapiens
ucacaguauggggggugguuau

SEQ ID NO: 23721 - RNA, 22 nt, Homo sapiens
ucaccaccuuccaggaccacug

SEQ ID NO: 23722 - RNA, 22 nt, Homo sapiens
ucaccaccugcugaucauagag

SEQ ID NO: 23723 - RNA, 22 nt, Homo sapiens
ucacauuguguagccugcucac

SEQ ID NO: 23724 - RNA, 20 nt, Homo sapiens
ucacuggguucuugaagucu

SEQ ID NO: 23725 - RNA, 22 nt, Homo sapiens
ucacaucucagguuucuugaca

SEQ ID NO: 23726 - RNA, 22 nt, Homo sapiens
ucacaugaauugucuuguucca

SEQ ID NO: 23727 - RNA, 22 nt, Homo sapiens
ucacagugcaggaucaguuaau

SEQ ID NO: 23728 - RNA, 22 nt, Homo sapiens
ucacauuguacaaacagguaag

SEQ ID NO: 23729 - RNA, 22 nt, Homo sapiens
ucacauguguaaauugguguaa

SEQ ID NO: 23730 - RNA, 22 nt, Homo sapiens
ucauguauuaucauuagugggu

SEQ ID NO: 23731 - RNA, 22 nt, Homo sapiens
ucauguacuuguagucccggcu

SEQ ID NO: 23732 - RNA, 21 nt, Homo sapiens
ucaugccacugcacuuuagcc

SEQ ID NO: 23733 - RNA, 22 nt, Homo sapiens
ucauggcuuuuauuauguugag

SEQ ID NO: 23734 - RNA, 19 nt, Homo sapiens
ucauggcuuuuucagcugu

SEQ ID NO: 23735 - RNA, 22 nt, Homo sapiens
ucaucagaguuuacaagcucag

SEQ ID NO: 23736 - RNA, 23 nt, Homo sapiens
ucaucacagcauuuccugguauu

SEQ ID NO: 23737 - RNA, 22 nt, Homo sapiens
uccauguaguugagcggcuuug

SEQ ID NO: 23738 - RNA, 18 nt, Homo sapiens
uccaguuuucccagcauc

SEQ ID NO: 23739 - RNA, 22 nt, Homo sapiens
uccagguacucagggggcugag

SEQ ID NO: 23740 - RNA, 22 nt, Homo sapiens
ucaguuaaugcugccugcugga

SEQ ID NO: 23741 - RNA, 22 nt, Homo sapiens
ucauauguaugugcaauuuugu

SEQ ID NO: 23742 - RNA, 22 nt, Homo sapiens
uggcagaugagccgcgcuccaa

SEQ ID NO: 23743 - RNA, 22 nt, Homo sapiens
uggccuguaacgcugucucagc

SEQ ID NO: 23744 - RNA, 22 nt, Homo sapiens
uggauguauacaugcaggucac

SEQ ID NO: 23745 - RNA, 19 nt, Homo sapiens
uggaugacugucugggucu

SEQ ID NO: 23746 - RNA, 22 nt, Homo sapiens
uggauggagaggcuugugaugc

SEQ ID NO: 23747 - RNA, 22 nt, Homo sapiens
ugcugcuguuguuguuacuagc

SEQ ID NO: 23748 - RNA, 22 nt, Homo sapiens
ugcuggugauuaaauccugaag

SEQ ID NO: 23749 - RNA, 22 nt, Homo sapiens
ugcugguguuuaggaauaagaa

SEQ ID NO: 23750 - RNA, 22 nt, Homo sapiens
ugcugguggucccauaugauua

SEQ ID NO: 23751 - RNA, 21 nt, Homo sapiens
uggaaucuauuauuccaguuu

SEQ ID NO: 23752 - RNA, 20 nt, Homo sapiens
uggagugaagguucuggacc

SEQ ID NO: 23753 - RNA, 22 nt, Homo sapiens
ugcguucauuuggccaguggcg

SEQ ID NO: 23754 - RNA, 22 nt, Homo sapiens
ugcgccauugaacuccaggcug

SEQ ID NO: 23755 - RNA, 22 nt, Homo sapiens
ugcugcuguuaucauuuuacca

SEQ ID NO: 23756 - RNA, 22 nt, Homo sapiens
ugcugcauuggggauuaaguuu

SEQ ID NO: 23757 - RNA, 21 nt, Homo sapiens
ugcuccauuuucuagccugaa

SEQ ID NO: 23758 - RNA, 22 nt, Homo sapiens
ugcauugccgugauuacugucu

SEQ ID NO: 23759 - RNA, 22 nt, Homo sapiens
ugcauugcacuugcaugagaua

SEQ ID NO: 23760 - RNA, 17 nt, Homo sapiens
ugcaauuuaagcuagau

SEQ ID NO: 23761 - RNA, 21 nt, Homo sapiens
ugcaugguagucacaugauuc

SEQ ID NO: 23762 - RNA, 21 nt, Homo sapiens
ugcaagaaucaggaagcugcc

SEQ ID NO: 23763 - RNA, 22 nt, Homo sapiens
ugcaagaaucagccuaucauua

SEQ ID NO: 23764 - RNA, 22 nt, Homo sapiens
ugcaaccauuguuaagugugca

SEQ ID NO: 23765 - RNA, 22 nt, Homo sapiens
ugaguagaacaucaagucauac

SEQ ID NO: 23766 - RNA, 22 nt, Homo sapiens
ugaguagaagugaagauagugg

SEQ ID NO: 23767 - RNA, 20 nt, Homo sapiens
ugagauuggugugguauaag

SEQ ID NO: 23768 - RNA, 23 nt, Homo sapiens
ugauaugccuaggaguauauuuu

SEQ ID NO: 23769 - RNA, 22 nt, Homo sapiens
ugaguauguaggaugugucuua

SEQ ID NO: 23770 - RNA, 22 nt, Homo sapiens
ugauccagugcucaguuggagu

SEQ ID NO: 23771 - RNA, 22 nt, Homo sapiens
ugauaugucacuugaucauggu

SEQ ID NO: 23772 - RNA, 22 nt, Homo sapiens
ugauaugugaguauaugguuau

SEQ ID NO: 23773 - RNA, 22 nt, Homo sapiens
ugauauguguaaacaauguaua

SEQ ID NO: 23774 - RNA, 22 nt, Homo sapiens
ugauauguuagaaucuugcaag

SEQ ID NO: 23775 - RNA, 22 nt, Homo sapiens
ugagacugagucucgcucuugu

SEQ ID NO: 23776 - RNA, 22 nt, Homo sapiens
ugagacugaguuucucucuugu

SEQ ID NO: 23777 - RNA, 22 nt, Homo sapiens
ugagacugaguuucgcucuugu

SEQ ID NO: 23778 - RNA, 22 nt, Homo sapiens
ugagacugaguuuccaucuugu

SEQ ID NO: 23779 - RNA, 22 nt, Homo sapiens
ugagaguagggguugggauugg

SEQ ID NO: 23780 - RNA, 22 nt, Homo sapiens
ugacacauguagacaucuggug

SEQ ID NO: 23781 - RNA, 23 nt, Homo sapiens
ugacagugcuugaaauugcucuu

SEQ ID NO: 23782 - RNA, 22 nt, Homo sapiens
ugacagucaccaggacccacag

SEQ ID NO: 23783 - RNA, 22 nt, Homo sapiens
ugagacugaaauuaggaaacug

SEQ ID NO: 23784 - RNA, 22 nt, Homo sapiens
ugagaugaugggauaagagggc

SEQ ID NO: 23785 - RNA, 22 nt, Homo sapiens
ugagauguaaucucgcucuguc

SEQ ID NO: 23786 - RNA, 22 nt, Homo sapiens
ugagauccugugacuacacuga

SEQ ID NO: 23787 - RNA, 22 nt, Homo sapiens
ugagaugaaagcagaaagacuu

SEQ ID NO: 23788 - RNA, 20 nt, Homo sapiens
ugagauccacgugaaguaug

SEQ ID NO: 23789 - RNA, 22 nt, Homo sapiens
aucacuguaaguuuacacuuug

SEQ ID NO: 23790 - RNA, 23 nt, Homo sapiens
aucacuguuaacaauuucuuccu

SEQ ID NO: 23791 - RNA, 22 nt, Homo sapiens
aucacuguccacucaucuuucu

SEQ ID NO: 23792 - RNA, 22 nt, Homo sapiens
aucagagccugugugcccugaa

SEQ ID NO: 23793 - RNA, 22 nt, Homo sapiens
auccacauucauggaccagucc

SEQ ID NO: 23794 - RNA, 22 nt, Homo sapiens
aucuggguccguucugcuucuc

SEQ ID NO: 23795 - RNA, 21 nt, Homo sapiens
aucugugagaccuuggggguu

SEQ ID NO: 23796 - RNA, 20 nt, Homo sapiens
aucguggccugaggagauac

SEQ ID NO: 23797 - RNA, 22 nt, Homo sapiens
auggcaaugcgaugaugacuga

SEQ ID NO: 23798 - RNA, 22 nt, Homo sapiens
auggcaguguaugauuauauua

SEQ ID NO: 23799 - RNA, 22 nt, Homo sapiens
auggaacuggagaucauuaugu

SEQ ID NO: 23800 - RNA, 22 nt, Homo sapiens
auggaacuggagaugguuauau

SEQ ID NO: 23801 - RNA, 22 nt, Homo sapiens
augcuguuuuguagcucccucu

SEQ ID NO: 23802 - RNA, 22 nt, Homo sapiens
augauuguucucacucaagaga

SEQ ID NO: 23803 - RNA, 22 nt, Homo sapiens
augacgagaugguguuuggcuu

SEQ ID NO: 23804 - RNA, 22 nt, Homo sapiens
augacugucagggcagucauug

SEQ ID NO: 23805 - RNA, 22 nt, Homo sapiens
augaucacuguggaaauucagc

SEQ ID NO: 23806 - RNA, 22 nt, Homo sapiens
augaucauggaaguuuuccugu

SEQ ID NO: 23807 - RNA, 22 nt, Homo sapiens
augacauugaaaagcaagugga

SEQ ID NO: 23808 - RNA, 22 nt, Homo sapiens
augaaacuggagcgccuggagg

SEQ ID NO: 23809 - RNA, 22 nt, Homo sapiens
augaaaagcauaaacgcugaag

SEQ ID NO: 23810 - RNA, 22 nt, Homo sapiens
agcuguuguacacuuuaccuuu

SEQ ID NO: 23811 - RNA, 22 nt, Homo sapiens
agcaucagugauuuuguugaag

SEQ ID NO: 23812 - RNA, 20 nt, Homo sapiens
agcaucacagagccgggugu

SEQ ID NO: 23813 - RNA, 22 nt, Homo sapiens
agcuguuguuuuaagauacuaa

SEQ ID NO: 23814 - RNA, 22 nt, Homo sapiens
agcuugugauucuccaucaugu

SEQ ID NO: 23815 - RNA, 22 nt, Homo sapiens
agucauggaucacaguagccuc

SEQ ID NO: 23816 - RNA, 22 nt, Homo sapiens
aguccagguuuuguaauggcaa

SEQ ID NO: 23817 - RNA, 22 nt, Homo sapiens
agucaugggagagaugugaucg

SEQ ID NO: 23818 - RNA, 22 nt, Homo sapiens
aguggauguuguggccugggag

SEQ ID NO: 23819 - RNA, 22 nt, Homo sapiens
agugauauguuugccuugaggg

SEQ ID NO: 23820 - RNA, 22 nt, Homo sapiens
auaagagcaggcuucuggccag

SEQ ID NO: 23821 - RNA, 22 nt, Homo sapiens
auaaagccaugagcuugagaug

SEQ ID NO: 23822 - RNA, 22 nt, Homo sapiens
auaaagcuauuccucucuuuuu

SEQ ID NO: 23823 - RNA, 22 nt, Homo sapiens
auaucacagguguuuaccugau

SEQ ID NO: 23824 - RNA, 22 nt, Homo sapiens
auaucacaggaaaggaagauac

SEQ ID NO: 23825 - RNA, 22 nt, Homo sapiens
auagcagugugaaaauugacug

SEQ ID NO: 23826 - RNA, 22 nt, Homo sapiens
auagcagugugaaaauguacua

SEQ ID NO: 23827 - RNA, 22 nt, Homo sapiens
auagcagugugaaaacagacug

SEQ ID NO: 23828 - RNA, 22 nt, Homo sapiens
auagcagugugagaaugaacua

SEQ ID NO: 23829 - RNA, 22 nt, Homo sapiens
agcagguauucgggucaugggg

SEQ ID NO: 23830 - RNA, 22 nt, Homo sapiens
agcagugucauuuucuggugag

SEQ ID NO: 23831 - RNA, 22 nt, Homo sapiens
agcaguagaauuccugcaucac

SEQ ID NO: 23832 - RNA, 22 nt, Homo sapiens
agcacagccuuguguuuucuug

SEQ ID NO: 23833 - RNA, 22 nt, Homo sapiens
agcacaguuaaaugaggcuucu

SEQ ID NO: 23834 - RNA, 22 nt, Homo sapiens
agacacugaaauguauugaaga

SEQ ID NO: 23835 - RNA, 22 nt, Homo sapiens
acccauguaggugggauuacag

SEQ ID NO: 23836 - RNA, 22 nt, Homo sapiens
accaugcaguccaauaugcaca

SEQ ID NO: 23837 - RNA, 22 nt, Homo sapiens
accauugcacuccagccuuggc

SEQ ID NO: 23838 - RNA, 22 nt, Homo sapiens
accauugcacuccagcccaggc

SEQ ID NO: 23839 - RNA, 22 nt, Homo sapiens
acuuuuugcaaccauuuggacc

SEQ ID NO: 23840 - RNA, 22 nt, Homo sapiens
acagucuggagaaugggugcuc

SEQ ID NO: 23841 - RNA, 19 nt, Homo sapiens
acagugcuuugucagaagc

SEQ ID NO: 23842 - RNA, 22 nt, Homo sapiens
acagugcuuuuguuccucuccu

SEQ ID NO: 23843 - RNA, 22 nt, Homo sapiens
acacuggaggagagcuguugcu

SEQ ID NO: 23844 - RNA, 22 nt, Homo sapiens
aaugugcacuauuagggugaua

SEQ ID NO: 23845 - RNA, 22 nt, Homo sapiens
aauccuguagauucuaauuccu

SEQ ID NO: 23846 - RNA, 22 nt, Homo sapiens
aauagugcugugcagugagugg

SEQ ID NO: 23847 - RNA, 22 nt, Homo sapiens
aagugcccuauuuggcccuuga

SEQ ID NO: 23848 - RNA, 23 nt, Homo sapiens
aagucauggaaucaaaugaggug

SEQ ID NO: 23849 - RNA, 22 nt, Homo sapiens
aauaaagcauggcuacuccaua

SEQ ID NO: 23850 - RNA, 21 nt, Homo sapiens
aauaaagcaaccuuaugccau

SEQ ID NO: 23851 - RNA, 22 nt, Homo sapiens
aauaaagcagcuuuuugggacu

SEQ ID NO: 23852 - RNA, 22 nt, Homo sapiens
aauaaagcuuugagcuuugcug

SEQ ID NO: 23853 - RNA, 18 nt, Homo sapiens
aaggugcuucuguucuga

SEQ ID NO: 23854 - RNA, 22 nt, Homo sapiens
aaguaaauauccgguaguccca

SEQ ID NO: 23855 - RNA, 21 nt, Homo sapiens
aagguuuuuagugcuugacuu

SEQ ID NO: 23856 - RNA, 22 nt, Homo sapiens
uuuguucuucguuccugagcca

SEQ ID NO: 23857 - RNA, 22 nt, Homo sapiens
gagauauguuggcagcugguau

SEQ ID NO: 23858 - RNA, 22 nt, Homo sapiens
gagaucuuggccaaguuucuua

SEQ ID NO: 23859 - RNA, 22 nt, Homo sapiens
gagaugcaccuugucacguuuc

SEQ ID NO: 23860 - RNA, 22 nt, Homo sapiens
gagacugagucucgcucugccg

SEQ ID NO: 23861 - RNA, 22 nt, Homo sapiens
gagacugagucuugcccuguca

SEQ ID NO: 23862 - RNA, 22 nt, Homo sapiens
gagacugagucuugcucuguca

SEQ ID NO: 23863 - RNA, 22 nt, Homo sapiens
gagaacugagauaagugauauu

SEQ ID NO: 23864 - RNA, 21 nt, Homo sapiens
gacauggcgauacuccgucuc

SEQ ID NO: 23865 - RNA, 20 nt, Homo sapiens
gacaugacuaggagauagcc

SEQ ID NO: 23866 - RNA, 22 nt, Homo sapiens
gaauucugucgcuuacuagaug

SEQ ID NO: 23867 - RNA, 22 nt, Homo sapiens
gaauguuuacuuuguuuaauac

SEQ ID NO: 23868 - RNA, 22 nt, Homo sapiens
gaucugugugauuggaugcauu

SEQ ID NO: 23869 - RNA, 22 nt, Homo sapiens
gaucugagaaagugucauaaca

SEQ ID NO: 23870 - RNA, 20 nt, Homo sapiens
gcaagcaugaagaguagaga

SEQ ID NO: 23871 - RNA, 22 nt, Homo sapiens
gagauguuuguuucacugucac

SEQ ID NO: 23872 - RNA, 22 nt, Homo sapiens
gagauggaguuucacuucgcuc

SEQ ID NO: 23873 - RNA, 22 nt, Homo sapiens
gagugcuguuagcccuggguuu

SEQ ID NO: 23874 - RNA, 22 nt, Homo sapiens
gaguucaaaucucagcucuguu

SEQ ID NO: 23875 - RNA, 22 nt, Homo sapiens
cuggaguaugaaccauguauca

SEQ ID NO: 23876 - RNA, 22 nt, Homo sapiens
cuguaguuagcagaugaugaau

SEQ ID NO: 23877 - RNA, 22 nt, Homo sapiens
cuguuugauuaagugguggaaa

SEQ ID NO: 23878 - RNA, 22 nt, Homo sapiens
cuuugaugagaaaauacuuugu

SEQ ID NO: 23879 - RNA, 17 nt, Homo sapiens
cuucaaauaauuucccc

SEQ ID NO: 23880 - RNA, 22 nt, Homo sapiens
cugcaagaugcauaggaauuuu

SEQ ID NO: 23881 - RNA, 22 nt, Homo sapiens
cugauguagguggucugugauc

SEQ ID NO: 23882 - RNA, 22 nt, Homo sapiens
cugcaaauacuugugggauuuu

SEQ ID NO: 23883 - RNA, 20 nt, Homo sapiens
cugcuccccuacaaaucuca

SEQ ID NO: 23884 - RNA, 22 nt, Homo sapiens
cugaucuguagcagccaccaca

SEQ ID NO: 23885 - RNA, 22 nt, Homo sapiens
cugaucuguuauacuuuucuau

SEQ ID NO: 23886 - RNA, 22 nt, Homo sapiens
cucaaaugguccagcuaguggu

SEQ ID NO: 23887 - RNA, 22 nt, Homo sapiens
cucaccuugugauccuccugcc

SEQ ID NO: 23888 - RNA, 22 nt, Homo sapiens
cauggcacuggugggagugucu

SEQ ID NO: 23889 - RNA, 22 nt, Homo sapiens
ccaccgggucccagcucugcuc

SEQ ID NO: 23890 - RNA, 22 nt, Homo sapiens
ccagauguuuucauucagcaag

SEQ ID NO: 23891 - RNA, 22 nt, Homo sapiens
ccacacugucuuggugggaaac

SEQ ID NO: 23892 - RNA, 19 nt, Homo sapiens
ccacaaugguugaacuaga

SEQ ID NO: 23893 - RNA, 22 nt, Homo sapiens
ccccguuacagccucagugccu

SEQ ID NO: 23894 - RNA, 22 nt, Homo sapiens
cccgugucuuggucuagggccu

SEQ ID NO: 23895 - RNA, 22 nt, Homo sapiens
cgcuggugucuaagcgacagcu

SEQ ID NO: 23896 - RNA, 22 nt, Homo sapiens
cgcuggugaucuagacccccaa

SEQ ID NO: 23897 - RNA, 20 nt, Homo sapiens
cguugcacuccagccugggc

SEQ ID NO: 23898 - RNA, 22 nt, Homo sapiens
cuaagugaguauaauuuuaaga

SEQ ID NO: 23899 - RNA, 22 nt, Homo sapiens
ccuuuuuguaguggaaguagga

SEQ ID NO: 23900 - RNA, 22 nt, Homo sapiens
ccggcugugugacugugggcag

SEQ ID NO: 23901 - RNA, 22 nt, Homo sapiens
caccacagccauuauugucccc

SEQ ID NO: 23902 - RNA, 22 nt, Homo sapiens
cagcuguuguugggguauagga

SEQ ID NO: 23903 - RNA, 22 nt, Homo sapiens
cagcuggugcugcaccaguggg

SEQ ID NO: 23904 - RNA, 22 nt, Homo sapiens
cagcugguggcaagaagacaga

SEQ ID NO: 23905 - RNA, 22 nt, Homo sapiens
cagugcauagaugugccacauu

SEQ ID NO: 23906 - RNA, 22 nt, Homo sapiens
cagugcauaggaucuaaaauuu

SEQ ID NO: 23907 - RNA, 20 nt, Homo sapiens
cagugcacuuucccacuggu

SEQ ID NO: 23908 - RNA, 22 nt, Homo sapiens
cagugcauccauguucagcagu

SEQ ID NO: 23909 - RNA, 22 nt, Homo sapiens
caucacauucugagauacugag

SEQ ID NO: 23910 - RNA, 22 nt, Homo sapiens
caucacacuuggauguaagaca

SEQ ID NO: 23911 - RNA, 22 nt, Homo sapiens
auguggauaucuauaucuggau

SEQ ID NO: 23912 - RNA, 22 nt, Homo sapiens
auggccgggugcgguggcucac

SEQ ID NO: 23913 - RNA, 22 nt, Homo sapiens
auggccuuuuuaucucaccaag

SEQ ID NO: 23914 - RNA, 22 nt, Homo sapiens
auguggugguagccaggacagg

SEQ ID NO: 23915 - RNA, 22 nt, Homo sapiens
auguuauguucuucucuguaua

SEQ ID NO: 23916 - RNA, 18 nt, Homo sapiens
auguuauguuuguagaag

SEQ ID NO: 23917 - RNA, 22 nt, Homo sapiens
auuccauuuguguggaauggcu

SEQ ID NO: 23918 - RNA, 22 nt, Homo sapiens
auuccauuuguuaucacacccg

SEQ ID NO: 23919 - RNA, 22 nt, Homo sapiens
auuccagguggcgccauucaca

SEQ ID NO: 23920 - RNA, 20 nt, Homo sapiens
auucauggaggagcaauugg

SEQ ID NO: 23921 - RNA, 22 nt, Homo sapiens
caaagugcuggccgggcgcagu

SEQ ID NO: 23922 - RNA, 22 nt, Homo sapiens
caaaguaauugcuguuuugcca

SEQ ID NO: 23923 - RNA, 22 nt, Homo sapiens
caaaguaauugugguuuugcca

SEQ ID NO: 23924 - RNA, 22 nt, Homo sapiens
cacauugcaggaaaguucauua

SEQ ID NO: 23925 - RNA, 22 nt, Homo sapiens
cacaguugccuaucuccugaag

SEQ ID NO: 23926 - RNA, 22 nt, Homo sapiens
auugaacacuucugugugccag

SEQ ID NO: 23927 - RNA, 21 nt, Homo sapiens
auuguauguaaaccaaaugag

SEQ ID NO: 23928 - RNA, 22 nt, Homo sapiens
auugcaguuagaacagaagucu

SEQ ID NO: 23929 - RNA, 22 nt, Homo sapiens
aaagucacuggagaaggaauau

SEQ ID NO: 23930 - RNA, 18 nt, Homo sapiens
aaagugaugucauucuuu

SEQ ID NO: 23931 - RNA, 22 nt, Homo sapiens
aaaguaauugcaguuuuugcaa

SEQ ID NO: 23932 - RNA, 17 nt, Homo sapiens
aaaguccuuugcuaucu

SEQ ID NO: 23933 - RNA, 22 nt, Homo sapiens
aagaucauucagggaaggcuga

SEQ ID NO: 23934 - RNA, 22 nt, Homo sapiens
aacagucaauugcugaugaccu

SEQ ID NO: 23935 - RNA, 22 nt, Homo sapiens
aaaugcaugaggugggaagaaa

SEQ ID NO: 23936 - RNA, 22 nt, Homo sapiens
aaggaauacuggugguugcuau

SEQ ID NO: 23937 - RNA, 21 nt, Homo sapiens
aagcaugguguaucuuuccau

SEQ ID NO: 23938 - RNA, 17 nt, Homo sapiens
aaggugcuucgaccucc

SEQ ID NO: 23939 - RNA, 22 nt, Homo sapiens
accgggauguacuuggcggguu

SEQ ID NO: 23940 - RNA, 22 nt, Homo sapiens
acagugcuuucaauguucagua

SEQ ID NO: 23941 - RNA, 18 nt, Homo sapiens
acagugcugucacugcuu

SEQ ID NO: 23942 - RNA, 22 nt, Homo sapiens
acacuggguaacauaucuguua

SEQ ID NO: 23943 - RNA, 22 nt, Homo sapiens
acacuguauccuucuguccuuu

SEQ ID NO: 23944 - RNA, 22 nt, Homo sapiens
acacaugugcguagacucuuua

SEQ ID NO: 23945 - RNA, 22 nt, Homo sapiens
acaccuguggucccaguaacuu

SEQ ID NO: 23946 - RNA, 22 nt, Homo sapiens
acaccaugucuguuucugguuu

SEQ ID NO: 23947 - RNA, 22 nt, Homo sapiens
acagcagugccccacucuacug

SEQ ID NO: 23948 - RNA, 22 nt, Homo sapiens
acagccauuccagccaaauacu

SEQ ID NO: 23949 - RNA, 18 nt, Homo sapiens
acagugcuggcaugagau

SEQ ID NO: 23950 - RNA, 19 nt, Homo sapiens
acaguaccuggcaugaggu

SEQ ID NO: 23951 - RNA, 22 nt, Homo sapiens
aauaaagccugucucuuuagag

SEQ ID NO: 23952 - RNA, 22 nt, Homo sapiens
agguuuucagccccagccuagg

SEQ ID NO: 23953 - RNA, 22 nt, Homo sapiens
aggugcugacaggauagguuuc

SEQ ID NO: 23954 - RNA, 22 nt, Homo sapiens
agcuuguguuuuucuaaguauc

SEQ ID NO: 23955 - RNA, 22 nt, Homo sapiens
agcuggucuuggggaagaguag

SEQ ID NO: 23956 - RNA, 22 nt, Homo sapiens
agcuggauguggaugacccugu

SEQ ID NO: 23957 - RNA, 22 nt, Homo sapiens
agcugguauuuugucaaggaua

SEQ ID NO: 23958 - RNA, 22 nt, Homo sapiens
aggcaugauggcuccagaucau

SEQ ID NO: 23959 - RNA, 19 nt, Homo sapiens
agcagaacaaauguguggg

SEQ ID NO: 23960 - RNA, 22 nt, Homo sapiens
agcagagcauauucauucgggg

SEQ ID NO: 23961 - RNA, 22 nt, Homo sapiens
acugguguaugggaggucccaa

SEQ ID NO: 23962 - RNA, 19 nt, Homo sapiens
acuguacuccagucugggc

SEQ ID NO: 23963 - RNA, 22 nt, Homo sapiens
acuguacucuacccugggcaac

SEQ ID NO: 23964 - RNA, 17 nt, Homo sapiens
agcauguguuugagauu

SEQ ID NO: 23965 - RNA, 20 nt, Homo sapiens
agcaucagugguaguguugc

SEQ ID NO: 23966 - RNA, 22 nt, Homo sapiens
agcaguagugaaaguagacuua

SEQ ID NO: 23967 - RNA, 19 nt, Homo sapiens
agcaguguggagauuucuc

SEQ ID NO: 23968 - RNA, 16 nt, Homo sapiens
agcagguguuagguga

SEQ ID NO: 23969 - RNA, 22 nt, Homo sapiens
agcaggauuguuacaauaguaa

SEQ ID NO: 23970 - RNA, 22 nt, Homo sapiens
agcaggucuuaacuugugaggu

SEQ ID NO: 23971 - RNA, 22 nt, Homo sapiens
augcacuguuuucuugaugaga

SEQ ID NO: 23972 - RNA, 22 nt, Homo sapiens
augcacaguccagcccaugugg

SEQ ID NO: 23973 - RNA, 22 nt, Homo sapiens
augaggugauuucuguucgggu

SEQ ID NO: 23974 - RNA, 22 nt, Homo sapiens
augagcagaagagauacacugu

SEQ ID NO: 23975 - RNA, 21 nt, Homo sapiens
aucuugguauagucuuauugg

SEQ ID NO: 23976 - RNA, 22 nt, Homo sapiens
aucuggcuucuuuuaguccaca

SEQ ID NO: 23977 - RNA, 22 nt, Homo sapiens
auguaguugcucugccuguuuu

SEQ ID NO: 23978 - RNA, 22 nt, Homo sapiens
auguaugagaguuccagcugau

SEQ ID NO: 23979 - RNA, 21 nt, Homo sapiens
augucauggaugacuaauuca

SEQ ID NO: 23980 - RNA, 22 nt, Homo sapiens
augugacugauguaaucagaca

SEQ ID NO: 23981 - RNA, 22 nt, Homo sapiens
augugaugguuaauuuuaugug

SEQ ID NO: 23982 - RNA, 22 nt, Homo sapiens
auggcuuuaagagugucugaau

SEQ ID NO: 23983 - RNA, 22 nt, Homo sapiens
auguaguagauauuuauggaaa

SEQ ID NO: 23984 - RNA, 22 nt, Homo sapiens
auggcuuuuccugucuugcaug

SEQ ID NO: 23985 - RNA, 22 nt, Homo sapiens
auccccugcacggggugucauu

SEQ ID NO: 23986 - RNA, 22 nt, Homo sapiens
aucaucacaguuguguguaaug

SEQ ID NO: 23987 - RNA, 22 nt, Homo sapiens
aucagcacugaucauacagcuu

SEQ ID NO: 23988 - RNA, 19 nt, Homo sapiens
aucagcacaagugugcuuu

SEQ ID NO: 23989 - RNA, 22 nt, Homo sapiens
aucagcaugcagaagucggggg

SEQ ID NO: 23990 - RNA, 21 nt, Homo sapiens
aucgcacaauauaccccugua

SEQ ID NO: 23991 - RNA, 22 nt, Homo sapiens
aucccugugauccaaucacuuc

SEQ ID NO: 23992 - RNA, 22 nt, Homo sapiens
aguauguuuugaaaccaagaag

SEQ ID NO: 23993 - RNA, 22 nt, Homo sapiens
agucacaugcauuuucuucaau

SEQ ID NO: 23994 - RNA, 22 nt, Homo sapiens
auagcaagaugauugauccauu

SEQ ID NO: 23995 - RNA, 22 nt, Homo sapiens
auagcacauggcauccucucuu

SEQ ID NO: 23996 - RNA, 22 nt, Homo sapiens
auagcagaccaccucucccacu

SEQ ID NO: 23997 - RNA, 22 nt, Homo sapiens
auagcagugucccacuccuugg

SEQ ID NO: 23998 - RNA, 22 nt, Homo sapiens
auagcagugccccaaacuccug

SEQ ID NO: 23999 - RNA, 22 nt, Homo sapiens
uccagaguggugaugcuggggc

SEQ ID NO: 24000 - RNA, 19 nt, Homo sapiens
uccaccgcgugcaccucua

SEQ ID NO: 24001 - RNA, 22 nt, Homo sapiens
ucauucauucauccagcuugag

SEQ ID NO: 24002 - RNA, 22 nt, Homo sapiens
ucauucauucuucaguggguac

SEQ ID NO: 24003 - RNA, 23 nt, Homo sapiens
ucauguauucccuguaaugggua

SEQ ID NO: 24004 - RNA, 22 nt, Homo sapiens
ucauccauacaguuagcaaagg

SEQ ID NO: 24005 - RNA, 22 nt, Homo sapiens
uccauguagaagacaggggaga

SEQ ID NO: 24006 - RNA, 22 nt, Homo sapiens
uccaguggacagacauaccaug

SEQ ID NO: 24007 - RNA, 22 nt, Homo sapiens
uccagugcauucagacacuugg

SEQ ID NO: 24008 - RNA, 22 nt, Homo sapiens
uccugcauucugaaauacaagu

SEQ ID NO: 24009 - RNA, 22 nt, Homo sapiens
uccugcauucugacuugcuuuc

SEQ ID NO: 24010 - RNA, 22 nt, Homo sapiens
uccugcauucauccugguguug

SEQ ID NO: 24011 - RNA, 22 nt, Homo sapiens
ucccauguagcuaggauuacag

SEQ ID NO: 24012 - RNA, 22 nt, Homo sapiens
ucccagugcuaugcaaaagccu

SEQ ID NO: 24013 - RNA, 19 nt, Homo sapiens
uccccaguuuuccguucag

SEQ ID NO: 24014 - RNA, 22 nt, Homo sapiens
uccccgaggcuggagugcagug

SEQ ID NO: 24015 - RNA, 20 nt, Homo sapiens
ucauagggugguggcagugg

SEQ ID NO: 24016 - RNA, 20 nt, Homo sapiens
ucaucaguuggugcucgcug

SEQ ID NO: 24017 - RNA, 22 nt, Homo sapiens
ucaucaggcucauucaagcuga

SEQ ID NO: 24018 - RNA, 22 nt, Homo sapiens
ucaucucaguuucuugccguac

SEQ ID NO: 24019 - RNA, 21 nt, Homo sapiens
ucagggaccugcuguacugau

SEQ ID NO: 24020 - RNA, 22 nt, Homo sapiens
ucaggguacuuguggccaaagu

SEQ ID NO: 24021 - RNA, 22 nt, Homo sapiens
ucagguccuuacugugcucccu

SEQ ID NO: 24022 - RNA, 22 nt, Homo sapiens
ucaggugcaguggcucaugcuu

SEQ ID NO: 24023 - RNA, 22 nt, Homo sapiens
ucaguaaucuuagcugugcaga

SEQ ID NO: 24024 - RNA, 22 nt, Homo sapiens
ucagcagucacuccuaugacaa

SEQ ID NO: 24025 - RNA, 22 nt, Homo sapiens
ucagcaucacaggcagugagug

SEQ ID NO: 24026 - RNA, 22 nt, Homo sapiens
uccuugagaggacagagccaua

SEQ ID NO: 24027 - RNA, 23 nt, Homo sapiens
ucgcagcauucaauaccaggcag

SEQ ID NO: 24028 - RNA, 22 nt, Homo sapiens
ucucauugauucuggggugaug

SEQ ID NO: 24029 - RNA, 22 nt, Homo sapiens
ucuggguuuuguaccgugcucg

SEQ ID NO: 24030 - RNA, 22 nt, Homo sapiens
ucuggucccugcacauauuuuc

SEQ ID NO: 24031 - RNA, 23 nt, Homo sapiens
ucugguguugucaaaugcugguu

SEQ ID NO: 24032 - RNA, 22 nt, Homo sapiens
aacaguguuuuggguuuucugg

SEQ ID NO: 24033 - RNA, 22 nt, Homo sapiens
aacacuggcugcucgaguucuc

SEQ ID NO: 24034 - RNA, 22 nt, Homo sapiens
ugacauggagggugcggcugca

SEQ ID NO: 24035 - RNA, 22 nt, Homo sapiens
ugaauucuguccaaaauaacug

SEQ ID NO: 24036 - RNA, 22 nt, Homo sapiens
ugaaucaugcugcuauaaagac

SEQ ID NO: 24037 - RNA, 22 nt, Homo sapiens
ugaauguaagaugucugcuggu

SEQ ID NO: 24038 - RNA, 22 nt, Homo sapiens
ugaaugcuaaaggaaaacagua

SEQ ID NO: 24039 - RNA, 22 nt, Homo sapiens
ugaaauguaaguugucuagucu

SEQ ID NO: 24040 - RNA, 21 nt, Homo sapiens
ugaaccccugcucucaagaaa

SEQ ID NO: 24041 - RNA, 22 nt, Homo sapiens
ugaagcuaacuugauugugaug

SEQ ID NO: 24042 - RNA, 22 nt, Homo sapiens
ugaguagaacuccuggagaugu

SEQ ID NO: 24043 - RNA, 18 nt, Homo sapiens
ugauaucaaugauagcca

SEQ ID NO: 24044 - RNA, 22 nt, Homo sapiens
ugagccaugguuagcuucucau

SEQ ID NO: 24045 - RNA, 22 nt, Homo sapiens
ugagaugugaucaccugaaggg

SEQ ID NO: 24046 - RNA, 21 nt, Homo sapiens
ugagaugugaccagggcauca

SEQ ID NO: 24047 - RNA, 22 nt, Homo sapiens
ugagauguuccaaugacuauua

SEQ ID NO: 24048 - RNA, 22 nt, Homo sapiens
ugacggaggacaccugcggaau

SEQ ID NO: 24049 - RNA, 22 nt, Homo sapiens
ugcauaugucuuuauaguagca

SEQ ID NO: 24050 - RNA, 22 nt, Homo sapiens
ugcauaucuucuuuugagaaau

SEQ ID NO: 24051 - RNA, 21 nt, Homo sapiens
ugcauaucucuaaugaccagu

SEQ ID NO: 24052 - RNA, 20 nt, Homo sapiens
ugauuaguccacuuggcucu

SEQ ID NO: 24053 - RNA, 22 nt, Homo sapiens
ugaugucuugagauggagcuua

SEQ ID NO: 24054 - RNA, 22 nt, Homo sapiens
ugaugucuugcaggcacgagau

SEQ ID NO: 24055 - RNA, 22 nt, Homo sapiens
ugaugcugaguggcuauuugaa

SEQ ID NO: 24056 - RNA, 22 nt, Homo sapiens
ugaucuguguaacauaggaguc

SEQ ID NO: 24057 - RNA, 22 nt, Homo sapiens
uggauuguuucucuugguauga

SEQ ID NO: 24058 - RNA, 22 nt, Homo sapiens
uggcaagagcugcauucaucug

SEQ ID NO: 24059 - RNA, 22 nt, Homo sapiens
uggcaagagcaaaauguacagu

SEQ ID NO: 24060 - RNA, 20 nt, Homo sapiens
uggcaagauggcagaauaga

SEQ ID NO: 24061 - RNA, 21 nt, Homo sapiens
uggcacuauucacaauagcaa

SEQ ID NO: 24062 - RNA, 22 nt, Homo sapiens
ugggugaguaucuauuauucag

SEQ ID NO: 24063 - RNA, 22 nt, Homo sapiens
uggcuguuguuacuaacaguuc

SEQ ID NO: 24064 - RNA, 22 nt, Homo sapiens
uggucauggggcagcugacacu

SEQ ID NO: 24065 - RNA, 22 nt, Homo sapiens
ugguaugucuuucuuccuguag

SEQ ID NO: 24066 - RNA, 21 nt, Homo sapiens
uggauugagaaccccaggagg

SEQ ID NO: 24067 - RNA, 22 nt, Homo sapiens
uggagcccuaguuccucauaac

SEQ ID NO: 24068 - RNA, 22 nt, Homo sapiens
uggacuguaauagagaacagaa

SEQ ID NO: 24069 - RNA, 22 nt, Homo sapiens
ugcaucacaguacuccagccug

SEQ ID NO: 24070 - RNA, 21 nt, Homo sapiens
ugcauggagaacacugagggu

SEQ ID NO: 24071 - RNA, 22 nt, Homo sapiens
ugccauugcacuccagccuggg

SEQ ID NO: 24072 - RNA, 23 nt, Homo sapiens
uggaacugaauuucuuagcauuu

SEQ ID NO: 24073 - RNA, 22 nt, Homo sapiens
ugccugagcccagcccuguagu

SEQ ID NO: 24074 - RNA, 22 nt, Homo sapiens
ugccugauacccucugucucuc

SEQ ID NO: 24075 - RNA, 22 nt, Homo sapiens
uguuauuuuguguuagggcaca

SEQ ID NO: 24076 - RNA, 22 nt, Homo sapiens
uguuaucauuacguucuuaguu

SEQ ID NO: 24077 - RNA, 22 nt, Homo sapiens
uguuaguuguucauguuaagag

SEQ ID NO: 24078 - RNA, 22 nt, Homo sapiens
ugugucuugaauuuuguaugua

SEQ ID NO: 24079 - RNA, 22 nt, Homo sapiens
ugugucuuguuuauagcuuucu

SEQ ID NO: 24080 - RNA, 22 nt, Homo sapiens
uuacagauggauggcagcuggc

SEQ ID NO: 24081 - RNA, 22 nt, Homo sapiens
uuaaagccauaccugagagagu

SEQ ID NO: 24082 - RNA, 22 nt, Homo sapiens
ugugcaugacagcauacaaacg

SEQ ID NO: 24083 - RNA, 22 nt, Homo sapiens
ugugcuauguuauucacauggg

SEQ ID NO: 24084 - RNA, 22 nt, Homo sapiens
uguguaaauacaagugcuugaa

SEQ ID NO: 24085 - RNA, 22 nt, Homo sapiens
ugugguuuuuuucuccaauagg

SEQ ID NO: 24086 - RNA, 22 nt, Homo sapiens
uguggucaucacuugaagguaa

SEQ ID NO: 24087 - RNA, 23 nt, Homo sapiens
ugugguauuauuccauuuauagg

SEQ ID NO: 24088 - RNA, 20 nt, Homo sapiens
ugugauuauuuaguugcaug

SEQ ID NO: 24089 - RNA, 22 nt, Homo sapiens
uguaagcauuauauaauuguug

SEQ ID NO: 24090 - RNA, 22 nt, Homo sapiens
uggucucuuugcuuuagucauc

SEQ ID NO: 24091 - RNA, 22 nt, Homo sapiens
uuacagucucaagagugcugca

SEQ ID NO: 24092 - RNA, 22 nt, Homo sapiens
uuaccacagugccugucuaaug

SEQ ID NO: 24093 - RNA, 22 nt, Homo sapiens
uuaucacauugacugauuugca

SEQ ID NO: 24094 - RNA, 22 nt, Homo sapiens
uucacaguggugggagacguca

SEQ ID NO: 24095 - RNA, 22 nt, Homo sapiens
uucaggcuccgugccagcuccg

SEQ ID NO: 24096 - RNA, 22 nt, Homo sapiens
uucacaauuaaaugugguuauu

SEQ ID NO: 24097 - RNA, 22 nt, Homo sapiens
uucaagugguucagaagucuga

SEQ ID NO: 24098 - RNA, 22 nt, Homo sapiens
uucaaguagguaggaccacagg

SEQ ID NO: 24099 - RNA, 22 nt, Homo sapiens
uucaaaguaaaaauguguucac

SEQ ID NO: 24100 - RNA, 18 nt, Homo sapiens
uucaucaguccucagcug

SEQ ID NO: 24101 - RNA, 22 nt, Homo sapiens
uucaucacagucuccgaugccc

SEQ ID NO: 24102 - RNA, 22 nt, Homo sapiens
uuccauguaguugagcaguuuu

SEQ ID NO: 24103 - RNA, 22 nt, Homo sapiens
uuccauguugauacgugaaguu

SEQ ID NO: 24104 - RNA, 22 nt, Homo sapiens
uuguauaggcucaguaagaauc

SEQ ID NO: 24105 - RNA, 22 nt, Homo sapiens
uuggucucaucaagagcagcuu

SEQ ID NO: 24106 - RNA, 22 nt, Homo sapiens
uuggucugcucugauguuuucu

SEQ ID NO: 24107 - RNA, 22 nt, Homo sapiens
uugugguaggaguugccauguu

SEQ ID NO: 24108 - RNA, 22 nt, Homo sapiens
uugugguuauagagucucccug

SEQ ID NO: 24109 - RNA, 22 nt, Homo sapiens
uuguaugucuucauuugaaaaa

SEQ ID NO: 24110 - RNA, 22 nt, Homo sapiens
uugugguuuuaucuaccuuugg

SEQ ID NO: 24111 - RNA, 23 nt, Homo sapiens
uuuauacguugucauuuaucagg

SEQ ID NO: 24112 - RNA, 22 nt, Homo sapiens
uuuauagucaggaacuugagga

SEQ ID NO: 24113 - RNA, 20 nt, Homo sapiens
uuugaauguaaagcauguca

SEQ ID NO: 24114 - RNA, 22 nt, Homo sapiens
uuugaaguguggcacugaguuu

SEQ ID NO: 24115 - RNA, 22 nt, Homo sapiens
uuugagcauuagggcaaaggca

SEQ ID NO: 24116 - RNA, 22 nt, Homo sapiens
uuugcaucuuuugcuuccugga

SEQ ID NO: 24117 - RNA, 22 nt, Homo sapiens
uuggucagcuagauuauucccu

SEQ ID NO: 24118 - RNA, 22 nt, Homo sapiens
uuggccauaugacuugcuuugg

SEQ ID NO: 24119 - RNA, 22 nt, Homo sapiens
uuggaagagaagggagauaaac

SEQ ID NO: 24120 - RNA, 21 nt, Homo sapiens
uuggcacucuucucuccuuau

SEQ ID NO: 24121 - RNA, 22 nt, Homo sapiens
uugcaugguggaacuuggagcu

SEQ ID NO: 24122 - RNA, 22 nt, Homo sapiens
uugcugagucuuucuagguugc

SEQ ID NO: 24123 - RNA, 22 nt, Homo sapiens
uugauguugaggacauaaaccu

SEQ ID NO: 24124 - RNA, 18 nt, Homo sapiens
uugaaugcgucccagaga

SEQ ID NO: 24125 - RNA, 22 nt, Homo sapiens
uugaaugucuauuaaguuguuu

SEQ ID NO: 24126 - RNA, 22 nt, Homo sapiens
uugaugauguuucugccuugcc

SEQ ID NO: 24127 - RNA, 22 nt, Homo sapiens
uugaucuguguuagaagcuaag

SEQ ID NO: 24128 - RNA, 22 nt, Homo sapiens
uugcacugagauuuugcuuaca

SEQ ID NO: 24129 - RNA, 22 nt, Homo sapiens
uugcacuccagucuggggggca

SEQ ID NO: 24130 - RNA, 22 nt, Homo sapiens
uugcacuccauccuggguugac

SEQ ID NO: 24131 - RNA, 18 nt, Homo sapiens
uugcacuccugccugggu

SEQ ID NO: 24132 - RNA, 22 nt, Homo sapiens
uugcacucuagccugggugaca

SEQ ID NO: 24133 - RNA, 22 nt, Homo sapiens
uugcauauguugaaccagccuu

SEQ ID NO: 24134 - RNA, 22 nt, Homo sapiens
uugcagagccccugcaaggguc

SEQ ID NO: 24135 - RNA, 22 nt, Homo sapiens
uugcagaucccacacucacccu

SEQ ID NO: 24136 - RNA, 22 nt, Homo sapiens
uugcagcaaauaggaaugagga

SEQ ID NO: 24137 - RNA, 21 nt, Homo sapiens
guccaaaacaguguccaaugc

SEQ ID NO: 24138 - RNA, 22 nt, Homo sapiens
gugagcaguguccuugggggca

SEQ ID NO: 24139 - RNA, 16 nt, Homo sapiens
gugagagaugacaaac

SEQ ID NO: 24140 - RNA, 22 nt, Homo sapiens
gucuaugagucccugaauuuaa

SEQ ID NO: 24141 - RNA, 22 nt, Homo sapiens
gugcacuguagaacccuuuguu

SEQ ID NO: 24142 - RNA, 21 nt, Homo sapiens
gugaggaguuacuggcuuuga

SEQ ID NO: 24143 - RNA, 22 nt, Homo sapiens
gugagggagcuggaauauuuau

SEQ ID NO: 24144 - RNA, 22 nt, Homo sapiens
gugagcgaggaaacgacggcgc

SEQ ID NO: 24145 - RNA, 22 nt, Homo sapiens
gugcaaaucucugaguaucuuu

SEQ ID NO: 24146 - RNA, 22 nt, Homo sapiens
guuauguuaguuacaaggcuag

SEQ ID NO: 24147 - RNA, 21 nt, Homo sapiens
guucaagugauccuccugucu

SEQ ID NO: 24148 - RNA, 22 nt, Homo sapiens
guucaagugauucuacugccuc

SEQ ID NO: 24149 - RNA, 22 nt, Homo sapiens
guucacaguuucuaaucccagc

SEQ ID NO: 24150 - RNA, 22 nt, Homo sapiens
guucaagcaauucugcugccuc

SEQ ID NO: 24151 - RNA, 22 nt, Homo sapiens
guucaucaggaauauuggccua

SEQ ID NO: 24152 - RNA, 22 nt, Homo sapiens
guggcauuucccaaaguauucu

SEQ ID NO: 24153 - RNA, 22 nt, Homo sapiens
gugggaugaucgcuugagccca

SEQ ID NO: 24154 - RNA, 22 nt, Homo sapiens
gugcaugucuaugcgagucuaa

SEQ ID NO: 24155 - RNA, 22 nt, Homo sapiens
gugcaugucugugacgacccug

SEQ ID NO: 24156 - RNA, 22 nt, Homo sapiens
gguggucuuccccuggaguucg

SEQ ID NO: 24157 - RNA, 22 nt, Homo sapiens
ggucauggauguuuauaguaca

SEQ ID NO: 24158 - RNA, 22 nt, Homo sapiens
ggucacauuggacuaucaaguu

SEQ ID NO: 24159 - RNA, 22 nt, Homo sapiens
gguccgccugccuuggccuccc

SEQ ID NO: 24160 - RNA, 22 nt, Homo sapiens
guaccugagaaguuccagggga

SEQ ID NO: 24161 - RNA, 22 nt, Homo sapiens
guacaugugcacagugugcagg

SEQ ID NO: 24162 - RNA, 22 nt, Homo sapiens
gucaucaggacgggucaucugc

SEQ ID NO: 24163 - RNA, 22 nt, Homo sapiens
gucauaugcucggaaaauguua

SEQ ID NO: 24164 - RNA, 22 nt, Homo sapiens
gucaguggauacugucucuguc

SEQ ID NO: 24165 - RNA, 22 nt, Homo sapiens
gucauauaggguuuaccuguau

SEQ ID NO: 24166 - RNA, 22 nt, Homo sapiens
gggggagugugguacccagcau

SEQ ID NO: 24167 - RNA, 22 nt, Homo sapiens
gggcaacauugaguacccugaa

SEQ ID NO: 24168 - RNA, 22 nt, Homo sapiens
gggguauguaagugagugagug

SEQ ID NO: 24169 - RNA, 22 nt, Homo sapiens
gggcaugauggugcacacaugu

SEQ ID NO: 24170 - RNA, 22 nt, Homo sapiens
gggcaugaugucuuaugccuau

SEQ ID NO: 24171 - RNA, 22 nt, Homo sapiens
gggcaugugugugcacacacau

SEQ ID NO: 24172 - RNA, 22 nt, Homo sapiens
gguagacucuguaagugaucau

SEQ ID NO: 24173 - RNA, 22 nt, Homo sapiens
ggcuguguguuaaaauaggcuu

SEQ ID NO: 24174 - RNA, 21 nt, Homo sapiens
ggaaaguuaaggaaauacccc

SEQ ID NO: 24175 - RNA, 22 nt, Homo sapiens
ggcauugugauccaccagccuu

SEQ ID NO: 24176 - RNA, 22 nt, Homo sapiens
ggcucguguuuucuguccaguu

SEQ ID NO: 24177 - RNA, 18 nt, Homo sapiens
ggcugguguuuuaguaua

SEQ ID NO: 24178 - RNA, 22 nt, Homo sapiens
uagcaguaccccaguauccugg

SEQ ID NO: 24179 - RNA, 22 nt, Homo sapiens
uagcagguguuccacaaauauu

SEQ ID NO: 24180 - RNA, 22 nt, Homo sapiens
uagcaggaaaggggucagaucu

SEQ ID NO: 24181 - RNA, 22 nt, Homo sapiens
uaguaacacauugaacgaucgc

SEQ ID NO: 24182 - RNA, 22 nt, Homo sapiens
uagcaguaagaaacugacauug

SEQ ID NO: 24183 - RNA, 22 nt, Homo sapiens
uagcaguagacagacuuuggcu

SEQ ID NO: 24184 - RNA, 22 nt, Homo sapiens
uagcaguauacguacugggucc

SEQ ID NO: 24185 - RNA, 22 nt, Homo sapiens
uagcaguaucccaccaucuggu

SEQ ID NO: 24186 - RNA, 22 nt, Homo sapiens
uauagcagugugagaacagacu

SEQ ID NO: 24187 - RNA, 22 nt, Homo sapiens
uauagcagugaguauugacuaa

SEQ ID NO: 24188 - RNA, 22 nt, Homo sapiens
uaucagaguuacacugaagacu

SEQ ID NO: 24189 - RNA, 22 nt, Homo sapiens
uaucagcacaguggguucaugg

SEQ ID NO: 24190 - RNA, 22 nt, Homo sapiens
uaucaccuugguagucuugggg

SEQ ID NO: 24191 - RNA, 22 nt, Homo sapiens
uauagcuuaaaguuuagauccu

SEQ ID NO: 24192 - RNA, 22 nt, Homo sapiens
uauagcaguguaagaaucgagu

SEQ ID NO: 24193 - RNA, 22 nt, Homo sapiens
uauagcuuuuuagggaauuugg

SEQ ID NO: 24194 - RNA, 22 nt, Homo sapiens
uaugcacacguguccaugugca

SEQ ID NO: 24195 - RNA, 22 nt, Homo sapiens
uauggccugcguccagugguau

SEQ ID NO: 24196 - RNA, 22 nt, Homo sapiens
uaucaucauuggcaggugagaa

SEQ ID NO: 24197 - RNA, 22 nt, Homo sapiens
uaucaguauggauucauggauu

SEQ ID NO: 24198 - RNA, 22 nt, Homo sapiens
uaugaucacuacagcagggaug

SEQ ID NO: 24199 - RNA, 22 nt, Homo sapiens
uauuauuguccuucuauaccca

SEQ ID NO: 24200 - RNA, 22 nt, Homo sapiens
uauucaucuuaagcuuuggcuu

SEQ ID NO: 24201 - RNA, 22 nt, Homo sapiens
uauuccauuugggucaggauga

SEQ ID NO: 24202 - RNA, 22 nt, Homo sapiens
uaagugaauguuggcuacugaa

SEQ ID NO: 24203 - RNA, 22 nt, Homo sapiens
uaaguaauuguuaauagggaag

SEQ ID NO: 24204 - RNA, 22 nt, Homo sapiens
uaaguaauugcagcaauuugcc

SEQ ID NO: 24205 - RNA, 22 nt, Homo sapiens
uaaguaauugugguuucugcca

SEQ ID NO: 24206 - RNA, 22 nt, Homo sapiens
uacaccugcacucuagccuggg

SEQ ID NO: 24207 - RNA, 22 nt, Homo sapiens
uacagcacaggugcagguguug

SEQ ID NO: 24208 - RNA, 22 nt, Homo sapiens
uacucugcagagaugcauaaca

SEQ ID NO: 24209 - RNA, 22 nt, Homo sapiens
uagacccauuacguaguuucca

SEQ ID NO: 24210 - RNA, 22 nt, Homo sapiens
cucaguuuugccuuguuuaagg

SEQ ID NO: 24211 - RNA, 20 nt, Homo sapiens
cucagguauuugaggcugca

SEQ ID NO: 24212 - RNA, 22 nt, Homo sapiens
ccuugguaauguguuuuauucu

SEQ ID NO: 24213 - RNA, 21 nt, Homo sapiens
cuaggaccaguucuguaauuc

SEQ ID NO: 24214 - RNA, 22 nt, Homo sapiens
cuaugagcuuuuuuaagccuca

SEQ ID NO: 24215 - RNA, 22 nt, Homo sapiens
ccaaggaauacccucccuuuuu

SEQ ID NO: 24216 - RNA, 23 nt, Homo sapiens
caucacagagccuuccuugacuc

SEQ ID NO: 24217 - RNA, 22 nt, Homo sapiens
caucacaucugcaugguaagua

SEQ ID NO: 24218 - RNA, 22 nt, Homo sapiens
ccauuucacucuuccugaagga

SEQ ID NO: 24219 - RNA, 18 nt, Homo sapiens
ccauucaacagauuuguc

SEQ ID NO: 24220 - RNA, 23 nt, Homo sapiens
ccauugcacuccagccucaguga

SEQ ID NO: 24221 - RNA, 22 nt, Homo sapiens
cccagugugaacuuggcauuuu

SEQ ID NO: 24222 - RNA, 17 nt, Homo sapiens
ccccugagcgaugcagu

SEQ ID NO: 24223 - RNA, 21 nt, Homo sapiens
auuuuugcagagcugguagug

SEQ ID NO: 24224 - RNA, 22 nt, Homo sapiens
auuugacacugagagccucagu

SEQ ID NO: 24225 - RNA, 22 nt, Homo sapiens
auuuggcaauuuugaagaugcc

SEQ ID NO: 24226 - RNA, 22 nt, Homo sapiens
auuuaugguuaauauaggaagu

SEQ ID NO: 24227 - RNA, 22 nt, Homo sapiens
auuguacuccagccugggcgac

SEQ ID NO: 24228 - RNA, 22 nt, Homo sapiens
auuggaacugaaauaauaacuu

SEQ ID NO: 24229 - RNA, 22 nt, Homo sapiens
auuauugacucauagaaaggau

SEQ ID NO: 24230 - RNA, 20 nt, Homo sapiens
auugcagcaugauuuauaau

SEQ ID NO: 24231 - RNA, 22 nt, Homo sapiens
auuauaugucaucacagacacc

SEQ ID NO: 24232 - RNA, 22 nt, Homo sapiens
auuauuagucggccagcuguua

SEQ ID NO: 24233 - RNA, 22 nt, Homo sapiens
cagcuagcaugcguaacuuucu

SEQ ID NO: 24234 - RNA, 22 nt, Homo sapiens
cagcaguuguuucggauuggga

SEQ ID NO: 24235 - RNA, 22 nt, Homo sapiens
caguggaugaacaagaagugau

SEQ ID NO: 24236 - RNA, 22 nt, Homo sapiens
cagugcaaccuccaucucucgg

SEQ ID NO: 24237 - RNA, 18 nt, Homo sapiens
cagugcaauacaggagag

SEQ ID NO: 24238 - RNA, 22 nt, Homo sapiens
cagugcauguggcacucuccag

SEQ ID NO: 24239 - RNA, 16 nt, Homo sapiens
cacauugcugcauggc

SEQ ID NO: 24240 - RNA, 22 nt, Homo sapiens
caccauguguucagaaggauug

SEQ ID NO: 24241 - RNA, 22 nt, Homo sapiens
caccagcuggcauugaauaccu

SEQ ID NO: 24242 - RNA, 19 nt, Homo sapiens
cuguuguacuccaggcauu

SEQ ID NO: 24243 - RNA, 19 nt, Homo sapiens
cugcacugagaaaaggagg

SEQ ID NO: 24244 - RNA, 22 nt, Homo sapiens
cugcacugagacccucuuugcu

SEQ ID NO: 24245 - RNA, 22 nt, Homo sapiens
cuugcacuugaaauuccaguuu

SEQ ID NO: 24246 - RNA, 22 nt, Homo sapiens
cuugcagagcccauggauguca

SEQ ID NO: 24247 - RNA, 22 nt, Homo sapiens
cuucuugcuguguccucacaug

SEQ ID NO: 24248 - RNA, 22 nt, Homo sapiens
cuucaugggagaaccacaggua

SEQ ID NO: 24249 - RNA, 22 nt, Homo sapiens
gaaucauuguuucuaaguuugu

SEQ ID NO: 24250 - RNA, 22 nt, Homo sapiens
gagacugagucuugcucugucg

SEQ ID NO: 24251 - RNA, 22 nt, Homo sapiens
gagacugaguuuugcucuuguu

SEQ ID NO: 24252 - RNA, 22 nt, Homo sapiens
cuuucacacuguuggugggaau

SEQ ID NO: 24253 - RNA, 22 nt, Homo sapiens
cuuuccauuguuggagcauaaa

SEQ ID NO: 24254 - RNA, 22 nt, Homo sapiens
gaaggagcuuaucugccauuuc

SEQ ID NO: 24255 - RNA, 20 nt, Homo sapiens
gcaguacuuuuaguucuaag

SEQ ID NO: 24256 - RNA, 22 nt, Homo sapiens
gcagucacagggagauggugac

SEQ ID NO: 24257 - RNA, 22 nt, Homo sapiens
gcaguggugugugccagccuag

SEQ ID NO: 24258 - RNA, 22 nt, Homo sapiens
gcagcagugcccuggauggaaa

SEQ ID NO: 24259 - RNA, 22 nt, Homo sapiens
gcgguagcauagacugcaggac

SEQ ID NO: 24260 - RNA, 22 nt, Homo sapiens
gcguugcacuccagccugggua

SEQ ID NO: 24261 - RNA, 22 nt, Homo sapiens
gcaguguggguagagggcaaga

SEQ ID NO: 24262 - RNA, 22 nt, Homo sapiens
gccccaguacaggcuccuuaga

SEQ ID NO: 24263 - RNA, 22 nt, Homo sapiens
gcuguauugacuuuguaucaua

SEQ ID NO: 24264 - RNA, 22 nt, Homo sapiens
gcuaaggcaggagcauugcuug

SEQ ID NO: 24265 - RNA, 22 nt, Homo sapiens
gcuggcaaaugguuauaaggcc

SEQ ID NO: 24266 - RNA, 22 nt, Homo sapiens
gaucuguuucaauugucuuagu

SEQ ID NO: 24267 - RNA, 22 nt, Homo sapiens
gaucuguuuuccuauuguuugu

SEQ ID NO: 24268 - RNA, 22 nt, Homo sapiens
gaggugauaucucauugugguu

SEQ ID NO: 24269 - RNA, 22 nt, Homo sapiens
gaggugguagguucacagcagc

SEQ ID NO: 24270 - RNA, 22 nt, Homo sapiens
gagguugggaugagggauacag

SEQ ID NO: 24271 - RNA, 22 nt, Homo sapiens
gagauacacccagugcagaggc

SEQ ID NO: 24272 - RNA, 22 nt, Homo sapiens
gagaugaaaucuugcucuguca

SEQ ID NO: 24273 - RNA, 22 nt, Homo sapiens
uuuuaugggcuauuugcauuag

SEQ ID NO: 24274 - RNA, 22 nt, Homo sapiens
uguuaacauggucucagucugu

SEQ ID NO: 24275 - RNA, 22 nt, Homo sapiens
ugucauggucacaggcauuuca

SEQ ID NO: 24276 - RNA, 22 nt, Homo sapiens
ugucaugguguuaauuuuccug

SEQ ID NO: 24277 - RNA, 22 nt, Homo sapiens
ugucauggauucugagucuggg

SEQ ID NO: 24278 - RNA, 23 nt, Homo sapiens
ugucaucaagaugaggucacacu

SEQ ID NO: 24279 - RNA, 22 nt, Homo sapiens
ugucaucauuccaucagggcuu

SEQ ID NO: 24280 - RNA, 22 nt, Homo sapiens
ugucaucauuggaaucugccuc

SEQ ID NO: 24281 - RNA, 22 nt, Homo sapiens
uguucauggauccaguggcuuc

SEQ ID NO: 24282 - RNA, 22 nt, Homo sapiens
uuaagcucauuuccauucuaca

SEQ ID NO: 24283 - RNA, 22 nt, Homo sapiens
uucaguagucaaaagauaaggg

SEQ ID NO: 24284 - RNA, 22 nt, Homo sapiens
uucauggguuaauuuguucgau

SEQ ID NO: 24285 - RNA, 22 nt, Homo sapiens
uucauggugguacaaaagcaau

SEQ ID NO: 24286 - RNA, 22 nt, Homo sapiens
uucaaauguucuuucaccaccc

SEQ ID NO: 24287 - RNA, 22 nt, Homo sapiens
uucaagcuauggugaucuuuuc

SEQ ID NO: 24288 - RNA, 22 nt, Homo sapiens
uuaguugcauucaugugagagu

SEQ ID NO: 24289 - RNA, 22 nt, Homo sapiens
uuauaacucugcagccugguau

SEQ ID NO: 24290 - RNA, 20 nt, Homo sapiens
uuauaacuuuuguucugggg

SEQ ID NO: 24291 - RNA, 22 nt, Homo sapiens
uuccagaugggaguucuauucu

SEQ ID NO: 24292 - RNA, 23 nt, Homo sapiens
uuccaccauugacuaguuacaua

SEQ ID NO: 24293 - RNA, 21 nt, Homo sapiens
uuccagugagccuagaugccu

SEQ ID NO: 24294 - RNA, 22 nt, Homo sapiens
uuccaguauuugggcaagcgca

SEQ ID NO: 24295 - RNA, 22 nt, Homo sapiens
uuccaugugggcuugucaagua

SEQ ID NO: 24296 - RNA, 22 nt, Homo sapiens
uucccauuguuggccagcaugu

SEQ ID NO: 24297 - RNA, 22 nt, Homo sapiens
uucccagagccugggagugagg

SEQ ID NO: 24298 - RNA, 22 nt, Homo sapiens
uucuccugguggacccuaaacg

SEQ ID NO: 24299 - RNA, 22 nt, Homo sapiens
uucugguuaauacuugcaaaaa

SEQ ID NO: 24300 - RNA, 22 nt, Homo sapiens
uuggccauggagcacuuuucua

SEQ ID NO: 24301 - RNA, 22 nt, Homo sapiens
uuggcacuugauaauauucugg

SEQ ID NO: 24302 - RNA, 22 nt, Homo sapiens
uuggacugggauggccgaggcu

SEQ ID NO: 24303 - RNA, 22 nt, Homo sapiens
uuguauaguucuauguguuuug

SEQ ID NO: 24304 - RNA, 22 nt, Homo sapiens
uuguauguuucugugcacauga

SEQ ID NO: 24305 - RNA, 22 nt, Homo sapiens
uucuucugguuaugaaauuuga

SEQ ID NO: 24306 - RNA, 22 nt, Homo sapiens
uugaggugggaggaucacuuga

SEQ ID NO: 24307 - RNA, 22 nt, Homo sapiens
uugaggugaauuugcaggaugc

SEQ ID NO: 24308 - RNA, 22 nt, Homo sapiens
uugcaugcacaguucucaauag

SEQ ID NO: 24309 - RNA, 22 nt, Homo sapiens
uugcaugggagcugggugaggc

SEQ ID NO: 24310 - RNA, 22 nt, Homo sapiens
uugaucacuguacuaugacuau

SEQ ID NO: 24311 - RNA, 22 nt, Homo sapiens
uugaucuggagagaggcccgug

SEQ ID NO: 24312 - RNA, 22 nt, Homo sapiens
uugaucugugucccugcccaau

SEQ ID NO: 24313 - RNA, 22 nt, Homo sapiens
uuugugcugcaauuaauuuccc

SEQ ID NO: 24314 - RNA, 22 nt, Homo sapiens
uuuguauguuggagauuggaga

SEQ ID NO: 24315 - RNA, 22 nt, Homo sapiens
uuuggcauauuuuaagcugguu

SEQ ID NO: 24316 - RNA, 21 nt, Homo sapiens
uuugaucauuaaaagugaauc

SEQ ID NO: 24317 - RNA, 22 nt, Homo sapiens
uuugacuguggagucgaugcuu

SEQ ID NO: 24318 - RNA, 22 nt, Homo sapiens
uuugacacugggagugugggug

SEQ ID NO: 24319 - RNA, 22 nt, Homo sapiens
uuucccauuguucugcucugug

SEQ ID NO: 24320 - RNA, 23 nt, Homo sapiens
uuucauggggauuuacucauucc

SEQ ID NO: 24321 - RNA, 22 nt, Homo sapiens
uuucauggcgaggcuucauggg

SEQ ID NO: 24322 - RNA, 22 nt, Homo sapiens
uuguuauguaucucaagauaaa

SEQ ID NO: 24323 - RNA, 22 nt, Homo sapiens
uuucauggaauauagucauuuu

SEQ ID NO: 24324 - RNA, 22 nt, Homo sapiens
uuucauggaggauuugcuucuu

SEQ ID NO: 24325 - RNA, 22 nt, Homo sapiens
uuucauggaggcauuuuagauu

SEQ ID NO: 24326 - RNA, 18 nt, Homo sapiens
uuucaggguggacaugag

SEQ ID NO: 24327 - RNA, 22 nt, Homo sapiens
cucgcuccauuucggugaucaa

SEQ ID NO: 24328 - RNA, 23 nt, Homo sapiens
cuccaugagccguccagggccug

SEQ ID NO: 24329 - RNA, 22 nt, Homo sapiens
ccuggaagaaaggugcuaaaua

SEQ ID NO: 24330 - RNA, 22 nt, Homo sapiens
ccccagugguugcaacagcaga

SEQ ID NO: 24331 - RNA, 22 nt, Homo sapiens
ccccauguucucucugcagcuc

SEQ ID NO: 24332 - RNA, 22 nt, Homo sapiens
cuagcccagugcuccuggauca

SEQ ID NO: 24333 - RNA, 22 nt, Homo sapiens
cuaggugauccacugcucucuu

SEQ ID NO: 24334 - RNA, 22 nt, Homo sapiens
ccagugcauggaucccaggggg

SEQ ID NO: 24335 - RNA, 22 nt, Homo sapiens
cauugcuaaaagucauauauaa

SEQ ID NO: 24336 - RNA, 22 nt, Homo sapiens
cauugcacuccagcuugggcga

SEQ ID NO: 24337 - RNA, 22 nt, Homo sapiens
ccagugucugacagacacggcg

SEQ ID NO: 24338 - RNA, 22 nt, Homo sapiens
ccaguucaaugauauggaaacu

SEQ ID NO: 24339 - RNA, 21 nt, Homo sapiens
ccaugggacggaaugaauaca

SEQ ID NO: 24340 - RNA, 22 nt, Homo sapiens
caugugcaugcuuucuuaugug

SEQ ID NO: 24341 - RNA, 22 nt, Homo sapiens
cauugcacuccagccuggccaa

SEQ ID NO: 24342 - RNA, 20 nt, Homo sapiens
cagcacgcacaugagacugu

SEQ ID NO: 24343 - RNA, 22 nt, Homo sapiens
cagcaucauucaucugggguaa

SEQ ID NO: 24344 - RNA, 22 nt, Homo sapiens
augugacugauggagaauaugu

SEQ ID NO: 24345 - RNA, 22 nt, Homo sapiens
augugcaauguguacguagccc

SEQ ID NO: 24346 - RNA, 22 nt, Homo sapiens
auucaucagggauacuggccug

SEQ ID NO: 24347 - RNA, 22 nt, Homo sapiens
auugaaucuaaaaugagucucu

SEQ ID NO: 24348 - RNA, 19 nt, Homo sapiens
auugacauugggguguuca

SEQ ID NO: 24349 - RNA, 22 nt, Homo sapiens
caaugcagcuuuuggagagaaa

SEQ ID NO: 24350 - RNA, 22 nt, Homo sapiens
cagagugcauguuuagaugagu

SEQ ID NO: 24351 - RNA, 21 nt, Homo sapiens
cacuggguucaggcuugugga

SEQ ID NO: 24352 - RNA, 23 nt, Homo sapiens
cacugggcagcagguguucccag

SEQ ID NO: 24353 - RNA, 22 nt, Homo sapiens
cagagaacauucagagcuguag

SEQ ID NO: 24354 - RNA, 22 nt, Homo sapiens
cagagaacugaguuauuuucuu

SEQ ID NO: 24355 - RNA, 22 nt, Homo sapiens
cacugcacuccagcuuugguga

SEQ ID NO: 24356 - RNA, 22 nt, Homo sapiens
cacugcacuccagucugacgac

SEQ ID NO: 24357 - RNA, 22 nt, Homo sapiens
cacugcacuccagucuggcgac

SEQ ID NO: 24358 - RNA, 22 nt, Homo sapiens
cacugcacuccaguuucgguaa

SEQ ID NO: 24359 - RNA, 22 nt, Homo sapiens
cacugcaguaaauugcgucggu

SEQ ID NO: 24360 - RNA, 22 nt, Homo sapiens
cacugcaguggaagauuaagaa

SEQ ID NO: 24361 - RNA, 22 nt, Homo sapiens
cuuuuacacuguuggcaggauu

SEQ ID NO: 24362 - RNA, 21 nt, Homo sapiens
gaccuguaguaagcauucaca

SEQ ID NO: 24363 - RNA, 22 nt, Homo sapiens
gaccuuguagaaucucaugauu

SEQ ID NO: 24364 - RNA, 23 nt, Homo sapiens
gaaguaauaaauggauucuuaac

SEQ ID NO: 24365 - RNA, 22 nt, Homo sapiens
gaaguaauaaauggauucuuaa

SEQ ID NO: 24366 - RNA, 22 nt, Homo sapiens
gaauaaacuagagaggacugag

SEQ ID NO: 24367 - RNA, 22 nt, Homo sapiens
cuuccauaguauuuuuacaaaa

SEQ ID NO: 24368 - RNA, 22 nt, Homo sapiens
cuugacaucugucaguuccuca

SEQ ID NO: 24369 - RNA, 22 nt, Homo sapiens
cuugagcaaacaaaggugguag

SEQ ID NO: 24370 - RNA, 22 nt, Homo sapiens
cuugaucaaugugguacuugau

SEQ ID NO: 24371 - RNA, 22 nt, Homo sapiens
cugugcuugauuauaugagugu

SEQ ID NO: 24372 - RNA, 17 nt, Homo sapiens
cugugaugaucuugucu

SEQ ID NO: 24373 - RNA, 22 nt, Homo sapiens
cuggcaccauacacuguuguug

SEQ ID NO: 24374 - RNA, 22 nt, Homo sapiens
cugacaucuucaagugaggaga

SEQ ID NO: 24375 - RNA, 22 nt, Homo sapiens
cucuuuuguuuagcugagaggg

SEQ ID NO: 24376 - RNA, 22 nt, Homo sapiens
cucuuuggaugccuuaggguua

SEQ ID NO: 24377 - RNA, 22 nt, Homo sapiens
cugaaauguccaucgacugaug

SEQ ID NO: 24378 - RNA, 22 nt, Homo sapiens
gaguucauuuugaaaccuugau

SEQ ID NO: 24379 - RNA, 22 nt, Homo sapiens
gauacuggcuuuauagaaugau

SEQ ID NO: 24380 - RNA, 22 nt, Homo sapiens
gaugagcuaaguucucacagca

SEQ ID NO: 24381 - RNA, 22 nt, Homo sapiens
gauagcagccauucuuuuuauu

SEQ ID NO: 24382 - RNA, 22 nt, Homo sapiens
gauaucuuuuguauggugagcu

SEQ ID NO: 24383 - RNA, 22 nt, Homo sapiens
gauaugaguagucgcauugaug

SEQ ID NO: 24384 - RNA, 22 nt, Homo sapiens
gagcucguuuuugcugacucuu

SEQ ID NO: 24385 - RNA, 22 nt, Homo sapiens
gagcuagguuuugaauccagac

SEQ ID NO: 24386 - RNA, 22 nt, Homo sapiens
gaggagauauucugcuggaugg

SEQ ID NO: 24387 - RNA, 22 nt, Homo sapiens
gagcaguugagagugcuggcca

SEQ ID NO: 24388 - RNA, 22 nt, Homo sapiens
gagcuagcauuuagacaucugg

SEQ ID NO: 24389 - RNA, 20 nt, Homo sapiens
gcaugagucuuuauaguaga

SEQ ID NO: 24390 - RNA, 22 nt, Homo sapiens
gcaucacagggagacaggccuc

SEQ ID NO: 24391 - RNA, 22 nt, Homo sapiens
gcagugcuggagcccccgugug

SEQ ID NO: 24392 - RNA, 22 nt, Homo sapiens
gcagguguuaugcaaacaacug

SEQ ID NO: 24393 - RNA, 19 nt, Homo sapiens
gccaccuggugcguguucu

SEQ ID NO: 24394 - RNA, 22 nt, Homo sapiens
gccauugcacuccgcccugggc

SEQ ID NO: 24395 - RNA, 22 nt, Homo sapiens
gccauugcacuccagccugagc

SEQ ID NO: 24396 - RNA, 22 nt, Homo sapiens
gccagugugaugugaucauggc

SEQ ID NO: 24397 - RNA, 22 nt, Homo sapiens
gauuccauuuguggcuauuuac

SEQ ID NO: 24398 - RNA, 22 nt, Homo sapiens
gaugauguuggaaacuuggugc

SEQ ID NO: 24399 - RNA, 22 nt, Homo sapiens
gaugaucaugaccuacagaugg

SEQ ID NO: 24400 - RNA, 22 nt, Homo sapiens
gaugcaguaagaaugcauagcg

SEQ ID NO: 24401 - RNA, 22 nt, Homo sapiens
gcaaaguguuuuuaggaagucu

SEQ ID NO: 24402 - RNA, 22 nt, Homo sapiens
gcagcaguggcaguuaauauuu

SEQ ID NO: 24403 - RNA, 22 nt, Homo sapiens
gcagcacaugacuguauguaua

SEQ ID NO: 24404 - RNA, 23 nt, Homo sapiens
aaucugucuuuguuauagggguc

SEQ ID NO: 24405 - RNA, 22 nt, Homo sapiens
aaugcuguguuauuucaugacc

SEQ ID NO: 24406 - RNA, 22 nt, Homo sapiens
aagcugugucuugucagcuacc

SEQ ID NO: 24407 - RNA, 22 nt, Homo sapiens
aagcuguguguaagcucucaca

SEQ ID NO: 24408 - RNA, 22 nt, Homo sapiens
acaagcacaaaugcauagaugg

SEQ ID NO: 24409 - RNA, 22 nt, Homo sapiens
acacuugcuugcaauagccucc

SEQ ID NO: 24410 - RNA, 20 nt, Homo sapiens
acacugugcuaaggauuuuc

SEQ ID NO: 24411 - RNA, 22 nt, Homo sapiens
acaugacauugggguggggaua

SEQ ID NO: 24412 - RNA, 22 nt, Homo sapiens
acauguaauugauuuuguguua

SEQ ID NO: 24413 - RNA, 22 nt, Homo sapiens
acuguacuccagccugggcaac

SEQ ID NO: 24414 - RNA, 22 nt, Homo sapiens
agagcaaugacaugcuaugugg

SEQ ID NO: 24415 - RNA, 22 nt, Homo sapiens
acugugcuguuuuaauuauuga

SEQ ID NO: 24416 - RNA, 23 nt, Homo sapiens
agagguuuaaucaggcaguugcu

SEQ ID NO: 24417 - RNA, 22 nt, Homo sapiens
agagcaauguuaucagucucug

SEQ ID NO: 24418 - RNA, 22 nt, Homo sapiens
agcggcuguuccccuggucuau

SEQ ID NO: 24419 - RNA, 22 nt, Homo sapiens
agcgccacugcacuccagccug

SEQ ID NO: 24420 - RNA, 22 nt, Homo sapiens
agccaguauuuuauugaggauu

SEQ ID NO: 24421 - RNA, 22 nt, Homo sapiens
agcagcacaucccuuucuggcc

SEQ ID NO: 24422 - RNA, 22 nt, Homo sapiens
agcagcaccaaacagacuaaga

SEQ ID NO: 24423 - RNA, 16 nt, Homo sapiens
agcuggaauuacaggc

SEQ ID NO: 24424 - RNA, 20 nt, Homo sapiens
agcugcagauauaaauccgc

SEQ ID NO: 24425 - RNA, 22 nt, Homo sapiens
agcugcacgugguaaauguaaa

SEQ ID NO: 24426 - RNA, 22 nt, Homo sapiens
agcuuguguuugucugccuggg

SEQ ID NO: 24427 - RNA, 22 nt, Homo sapiens
aggaccccucaucagcaccagu

SEQ ID NO: 24428 - RNA, 22 nt, Homo sapiens
aggagcacuggccuuggaguca

SEQ ID NO: 24429 - RNA, 22 nt, Homo sapiens
aggcagucugaguuuugaaagg

SEQ ID NO: 24430 - RNA, 22 nt, Homo sapiens
auggcuuuuuucuugggcacuc

SEQ ID NO: 24431 - RNA, 22 nt, Homo sapiens
auggcuuuuauuguguugaggu

SEQ ID NO: 24432 - RNA, 22 nt, Homo sapiens
auggcuuuggucucccagugau

SEQ ID NO: 24433 - RNA, 22 nt, Homo sapiens
auggcuuuguguucagagcuga

SEQ ID NO: 24434 - RNA, 22 nt, Homo sapiens
auggcuuugggcugcucugccc

SEQ ID NO: 24435 - RNA, 22 nt, Homo sapiens
auguagauaucaagaggcauau

SEQ ID NO: 24436 - RNA, 22 nt, Homo sapiens
auguccaugagcacauguauca

SEQ ID NO: 24437 - RNA, 22 nt, Homo sapiens
augguauggaaggucuggagga

SEQ ID NO: 24438 - RNA, 22 nt, Homo sapiens
auggucuuuguuucuaauucug

SEQ ID NO: 24439 - RNA, 22 nt, Homo sapiens
auggucuuuauuguguugagug

SEQ ID NO: 24440 - RNA, 21 nt, Homo sapiens
augggacuaacugaugggucu

SEQ ID NO: 24441 - RNA, 22 nt, Homo sapiens
aucaugucuucccagugauucu

SEQ ID NO: 24442 - RNA, 22 nt, Homo sapiens
aucauccagccccagaagggag

SEQ ID NO: 24443 - RNA, 22 nt, Homo sapiens
augaacacuccaauuguacucc

SEQ ID NO: 24444 - RNA, 22 nt, Homo sapiens
augaauacagcuaugcgugcau

SEQ ID NO: 24445 - RNA, 21 nt, Homo sapiens
augaauguaaagaauguggga

SEQ ID NO: 24446 - RNA, 22 nt, Homo sapiens
augagagugagagcagccccuu

SEQ ID NO: 24447 - RNA, 22 nt, Homo sapiens
augagcagaugcuccugccucu

SEQ ID NO: 24448 - RNA, 22 nt, Homo sapiens
augagcuaggacagaaugucag

SEQ ID NO: 24449 - RNA, 22 nt, Homo sapiens
augagcucauaaagagugauuu

SEQ ID NO: 24450 - RNA, 17 nt, Homo sapiens
augagcucaucauuuuu

SEQ ID NO: 24451 - RNA, 22 nt, Homo sapiens
augagcucauugggugacuggg

SEQ ID NO: 24452 - RNA, 22 nt, Homo sapiens
augagcuguuuggaagacacuu

SEQ ID NO: 24453 - RNA, 22 nt, Homo sapiens
augaucacaccacugcacucca

SEQ ID NO: 24454 - RNA, 22 nt, Homo sapiens
augcacuguuguuauuggauaa

SEQ ID NO: 24455 - RNA, 22 nt, Homo sapiens
aucacagagucacgggcaacuu

SEQ ID NO: 24456 - RNA, 22 nt, Homo sapiens
aucacagugaaaacagucaauu

SEQ ID NO: 24457 - RNA, 22 nt, Homo sapiens
aucaggcacacauuggaguuug

SEQ ID NO: 24458 - RNA, 22 nt, Homo sapiens
aucagcagcaugaaaagcaacu

SEQ ID NO: 24459 - RNA, 22 nt, Homo sapiens
auagcagaagaagggacaauuc

SEQ ID NO: 24460 - RNA, 17 nt, Homo sapiens
auaugucugcuggggga

SEQ ID NO: 24461 - RNA, 22 nt, Homo sapiens
auaucacaaacaagucuguacu

SEQ ID NO: 24462 - RNA, 22 nt, Homo sapiens
auaauugcuaagugaagauggu

SEQ ID NO: 24463 - RNA, 22 nt, Homo sapiens
guggaauauaaagcaucgugua

SEQ ID NO: 24464 - RNA, 22 nt, Homo sapiens
guggaaugcaguguugauucaa

SEQ ID NO: 24465 - RNA, 19 nt, Homo sapiens
gugugcauaucacagagca

SEQ ID NO: 24466 - RNA, 22 nt, Homo sapiens
gugugauggcgcacacagggug

SEQ ID NO: 24467 - RNA, 22 nt, Homo sapiens
gugucaugagggggacaggaag

SEQ ID NO: 24468 - RNA, 21 nt, Homo sapiens
gugucaugguugacuuuggca

SEQ ID NO: 24469 - RNA, 22 nt, Homo sapiens
gugucaugaagguuuuaugcag

SEQ ID NO: 24470 - RNA, 22 nt, Homo sapiens
guguaugugagaaugcucaugu

SEQ ID NO: 24471 - RNA, 22 nt, Homo sapiens
guguauguuguccauggaugcg

SEQ ID NO: 24472 - RNA, 22 nt, Homo sapiens
guuaaagacauccacauaggag

SEQ ID NO: 24473 - RNA, 22 nt, Homo sapiens
guuauguuaaauuguuguaugc

SEQ ID NO: 24474 - RNA, 22 nt, Homo sapiens
guuauguuauguuauguuaugu

SEQ ID NO: 24475 - RNA, 22 nt, Homo sapiens
guucagucacgugcccaaguuc

SEQ ID NO: 24476 - RNA, 22 nt, Homo sapiens
gugagcagagaucgcgugauug

SEQ ID NO: 24477 - RNA, 22 nt, Homo sapiens
gugagggaugugaaaaagguca

SEQ ID NO: 24478 - RNA, 22 nt, Homo sapiens
gugaucuguccuucauagccug

SEQ ID NO: 24479 - RNA, 22 nt, Homo sapiens
gugauaucuuacaauucucuuu

SEQ ID NO: 24480 - RNA, 22 nt, Homo sapiens
gugaucauuguauugggguuau

SEQ ID NO: 24481 - RNA, 22 nt, Homo sapiens
gucaggaccucgguggcauucu

SEQ ID NO: 24482 - RNA, 22 nt, Homo sapiens
guccaguguuggagguuuuacc

SEQ ID NO: 24483 - RNA, 22 nt, Homo sapiens
guccaugagaugaauccacaca

SEQ ID NO: 24484 - RNA, 22 nt, Homo sapiens
gucaauguaucuagcuguauua

SEQ ID NO: 24485 - RNA, 22 nt, Homo sapiens
gucacauugaugcccauggugg

SEQ ID NO: 24486 - RNA, 22 nt, Homo sapiens
gucacugggugcugcgccuguc

SEQ ID NO: 24487 - RNA, 18 nt, Homo sapiens
ggcggguguuuuauucac

SEQ ID NO: 24488 - RNA, 22 nt, Homo sapiens
ggcauguugauagguagaugua

SEQ ID NO: 24489 - RNA, 22 nt, Homo sapiens
ggcaagaaaaugcaauuacugu

SEQ ID NO: 24490 - RNA, 22 nt, Homo sapiens
ggcagcucaggccccgcgcuga

SEQ ID NO: 24491 - RNA, 22 nt, Homo sapiens
ggcaaagagacaugcaucgggg

SEQ ID NO: 24492 - RNA, 23 nt, Homo sapiens
ggauucaucuguuuguucgcugu

SEQ ID NO: 24493 - RNA, 22 nt, Homo sapiens
gccauugcacucuagccugagc

SEQ ID NO: 24494 - RNA, 22 nt, Homo sapiens
gccuagggacaaaccguccgac

SEQ ID NO: 24495 - RNA, 22 nt, Homo sapiens
gcggguguuuuacccuugcaga

SEQ ID NO: 24496 - RNA, 22 nt, Homo sapiens
guaugucuugucuauggcugcu

SEQ ID NO: 24497 - RNA, 22 nt, Homo sapiens
guaucacacuuauugaccugca

SEQ ID NO: 24498 - RNA, 22 nt, Homo sapiens
ggggcaaaaugccacgagucuc

SEQ ID NO: 24499 - RNA, 22 nt, Homo sapiens
gggguaggcuacacugaguucc

SEQ ID NO: 24500 - RNA, 22 nt, Homo sapiens
gggucauggaugugaagcuaga

SEQ ID NO: 24501 - RNA, 19 nt, Homo sapiens
ggucagcaaagucuagcug

SEQ ID NO: 24502 - RNA, 22 nt, Homo sapiens
guaaagacacaugcacacguau

SEQ ID NO: 24503 - RNA, 22 nt, Homo sapiens
guaacagucucaacaguggucu

SEQ ID NO: 24504 - RNA, 22 nt, Homo sapiens
uagcaguaaagaaugugauguu

SEQ ID NO: 24505 - RNA, 22 nt, Homo sapiens
uagcaguauaugagagcuauug

SEQ ID NO: 24506 - RNA, 22 nt, Homo sapiens
uagugaauguuggcuauuaaua

SEQ ID NO: 24507 - RNA, 22 nt, Homo sapiens
uaucaccuugcaguggaugcua

SEQ ID NO: 24508 - RNA, 22 nt, Homo sapiens
uaucauagacaaucaguuauug

SEQ ID NO: 24509 - RNA, 22 nt, Homo sapiens
uauagcuugaaggaauggucau

SEQ ID NO: 24510 - RNA, 22 nt, Homo sapiens
uauaucacaugcacucauuuuc

SEQ ID NO: 24511 - RNA, 22 nt, Homo sapiens
uauaucuguccauggcccugcu

SEQ ID NO: 24512 - RNA, 22 nt, Homo sapiens
uauagcagccugaacaaaguaa

SEQ ID NO: 24513 - RNA, 21 nt, Homo sapiens
uauagcagcacgauuuauaau

SEQ ID NO: 24514 - RNA, 21 nt, Homo sapiens
uauagcagcacgauuuauagu

SEQ ID NO: 24515 - RNA, 22 nt, Homo sapiens
ucaacacaguuaaauggggaaa

SEQ ID NO: 24516 - RNA, 22 nt, Homo sapiens
uauugcuuuugauucaaggcag

SEQ ID NO: 24517 - RNA, 22 nt, Homo sapiens
uaugaugcuguuuagaaucucu

SEQ ID NO: 24518 - RNA, 19 nt, Homo sapiens
uaugagcuaugacaugcau

SEQ ID NO: 24519 - RNA, 22 nt, Homo sapiens
uaugucacuugguuuggugcua

SEQ ID NO: 24520 - RNA, 19 nt, Homo sapiens
uauguaguuuucucaauau

SEQ ID NO: 24521 - RNA, 22 nt, Homo sapiens
guugagcaagcuuuggagccua

SEQ ID NO: 24522 - RNA, 22 nt, Homo sapiens
guucaucagggauauuggcuua

SEQ ID NO: 24523 - RNA, 22 nt, Homo sapiens
guugcaugucugggaggccagc

SEQ ID NO: 24524 - RNA, 22 nt, Homo sapiens
uaaaguuauugccccucaguua

SEQ ID NO: 24525 - RNA, 20 nt, Homo sapiens
guugaugcugaaguugcuua

SEQ ID NO: 24526 - RNA, 22 nt, Homo sapiens
uaaggcccauucuaugaagcag

SEQ ID NO: 24527 - RNA, 22 nt, Homo sapiens
uaaggaaggcugugugcuuuua

SEQ ID NO: 24528 - RNA, 22 nt, Homo sapiens
uaaguaauugugguuuuugcca

SEQ ID NO: 24529 - RNA, 23 nt, Homo sapiens
uaagucacacagauuaauuuauu

SEQ ID NO: 24530 - RNA, 22 nt, Homo sapiens
uaagucacuccagguuaaagug

SEQ ID NO: 24531 - RNA, 20 nt, Homo sapiens
uagcacaucuggcuguagag

SEQ ID NO: 24532 - RNA, 23 nt, Homo sapiens
uacagcugcagaaucaggcuaag

SEQ ID NO: 24533 - RNA, 20 nt, Homo sapiens
uacacguguagcauucucua

SEQ ID NO: 24534 - RNA, 16 nt, Homo sapiens
uacaauguagaaaaca

SEQ ID NO: 24535 - RNA, 18 nt, Homo sapiens
uggauuguacuguguucu

SEQ ID NO: 24536 - RNA, 22 nt, Homo sapiens
ugcauggaagggagggaaagag

SEQ ID NO: 24537 - RNA, 22 nt, Homo sapiens
ugccaguguugccuuucacuag

SEQ ID NO: 24538 - RNA, 22 nt, Homo sapiens
ugccaugaagaucccugaaaug

SEQ ID NO: 24539 - RNA, 22 nt, Homo sapiens
ugccaugaaguaauggcaaaaa

SEQ ID NO: 24540 - RNA, 19 nt, Homo sapiens
ugccauguagcacaugguc

SEQ ID NO: 24541 - RNA, 22 nt, Homo sapiens
ugccaugaagagaggaagcagu

SEQ ID NO: 24542 - RNA, 22 nt, Homo sapiens
uggcauggaguggauggcccca

SEQ ID NO: 24543 - RNA, 22 nt, Homo sapiens
uggcauggggcagaacauuaca

SEQ ID NO: 24544 - RNA, 22 nt, Homo sapiens
uggcaugggguaguagcgcugg

SEQ ID NO: 24545 - RNA, 20 nt, Homo sapiens
uggcauguugguaugcaccc

SEQ ID NO: 24546 - RNA, 22 nt, Homo sapiens
uggcaugugugaagugcccagc

SEQ ID NO: 24547 - RNA, 22 nt, Homo sapiens
uggcaugcauuguggguaauua

SEQ ID NO: 24548 - RNA, 22 nt, Homo sapiens
uggcauggaaagcuuuucauac

SEQ ID NO: 24549 - RNA, 22 nt, Homo sapiens
uggcaagagaacaacaucucuc

SEQ ID NO: 24550 - RNA, 22 nt, Homo sapiens
uggcaagaagagcaugagacca

SEQ ID NO: 24551 - RNA, 22 nt, Homo sapiens
uggucaugaggugaggcuucuc

SEQ ID NO: 24552 - RNA, 22 nt, Homo sapiens
ugguaucauuuuaucugcucua

SEQ ID NO: 24553 - RNA, 22 nt, Homo sapiens
ugguauguaugauuaacaugga

SEQ ID NO: 24554 - RNA, 22 nt, Homo sapiens
ugggcaaaacuaagagcugugg

SEQ ID NO: 24555 - RNA, 22 nt, Homo sapiens
ugggcaagugacuuggcuucuc

SEQ ID NO: 24556 - RNA, 22 nt, Homo sapiens
ugauguccaguucauagaaacu

SEQ ID NO: 24557 - RNA, 22 nt, Homo sapiens
ugaugaaguauaggaagggcuu

SEQ ID NO: 24558 - RNA, 22 nt, Homo sapiens
ugaugcuaccuaaagcaaccau

SEQ ID NO: 24559 - RNA, 22 nt, Homo sapiens
ugcaccacugcacuucagccug

SEQ ID NO: 24560 - RNA, 23 nt, Homo sapiens
ugcagcacacugaugggucuuga

SEQ ID NO: 24561 - RNA, 22 nt, Homo sapiens
ugcagcacaguagguuugcaau

SEQ ID NO: 24562 - RNA, 22 nt, Homo sapiens
ugcaccacugcacugccugggu

SEQ ID NO: 24563 - RNA, 22 nt, Homo sapiens
ugcaggauguucaguaauuucc

SEQ ID NO: 24564 - RNA, 18 nt, Homo sapiens
ugcagcuuugugauuggc

SEQ ID NO: 24565 - RNA, 20 nt, Homo sapiens
ugcagcacgggcccuuucca

SEQ ID NO: 24566 - RNA, 20 nt, Homo sapiens
ugcagcacugggaaugcagu

SEQ ID NO: 24567 - RNA, 22 nt, Homo sapiens
ugcagcacuguucacaauagcc

SEQ ID NO: 24568 - RNA, 22 nt, Homo sapiens
ugcaguacugucagacuucuua

SEQ ID NO: 24569 - RNA, 22 nt, Homo sapiens
ugcauaucuucagccgggcacg

SEQ ID NO: 24570 - RNA, 22 nt, Homo sapiens
ugcauaucuuguggaauaucuc

SEQ ID NO: 24571 - RNA, 22 nt, Homo sapiens
ugcauauguauacaugugccau

SEQ ID NO: 24572 - RNA, 22 nt, Homo sapiens
ugcauccauucuagacucaucu

SEQ ID NO: 24573 - RNA, 22 nt, Homo sapiens
ugcauauguugagaugcauauu

SEQ ID NO: 24574 - RNA, 22 nt, Homo sapiens
ugcauauguugaaccagccuug

SEQ ID NO: 24575 - RNA, 18 nt, Homo sapiens
ugauaucaucacaauuga

SEQ ID NO: 24576 - RNA, 22 nt, Homo sapiens
ugaggcacucuagacuuauuca

SEQ ID NO: 24577 - RNA, 22 nt, Homo sapiens
ugagcuagggccuggaauaggg

SEQ ID NO: 24578 - RNA, 22 nt, Homo sapiens
ugagcaucucuaaaaggagcaa

SEQ ID NO: 24579 - RNA, 22 nt, Homo sapiens
ugagcagugaguguggugcagg

SEQ ID NO: 24580 - RNA, 22 nt, Homo sapiens
ugagcagaaagcugcaaggucg

SEQ ID NO: 24581 - RNA, 22 nt, Homo sapiens
ugagacggagucucgcucuguu

SEQ ID NO: 24582 - RNA, 22 nt, Homo sapiens
ucuuugauguucugaaagaugg

SEQ ID NO: 24583 - RNA, 22 nt, Homo sapiens
ucuuugauuuuguuacuaagac

SEQ ID NO: 24584 - RNA, 22 nt, Homo sapiens
ucuuugccuaacccaaggucau

SEQ ID NO: 24585 - RNA, 22 nt, Homo sapiens
ucucacaccccucucauauacc

SEQ ID NO: 24586 - RNA, 22 nt, Homo sapiens
ucucagcggacaggccggccag

SEQ ID NO: 24587 - RNA, 22 nt, Homo sapiens
ucuguuguuaucauaauauuga

SEQ ID NO: 24588 - RNA, 22 nt, Homo sapiens
ucuguuguuguuuuaagagaca

SEQ ID NO: 24589 - RNA, 22 nt, Homo sapiens
ugacauguauuagcucagugcu

SEQ ID NO: 24590 - RNA, 22 nt, Homo sapiens
ugacauuacagucacuugcugu

SEQ ID NO: 24591 - RNA, 22 nt, Homo sapiens
ugaacagucaucucucuuguau

SEQ ID NO: 24592 - RNA, 22 nt, Homo sapiens
ugaacugagacuagacuuguuc

SEQ ID NO: 24593 - RNA, 22 nt, Homo sapiens
ugaaguaauguuuuauucuauu

SEQ ID NO: 24594 - RNA, 22 nt, Homo sapiens
ugaauacuucaaaaaaauagcu

SEQ ID NO: 24595 - RNA, 21 nt, Homo sapiens
ugaaguguaaccgugcagggc

SEQ ID NO: 24596 - RNA, 21 nt, Homo sapiens
ugacuagggauaugugccacu

SEQ ID NO: 24597 - RNA, 22 nt, Homo sapiens
ugacggaggcauuggaagcuug

SEQ ID NO: 24598 - RNA, 22 nt, Homo sapiens
ugacuucagacugaaaugauuc

SEQ ID NO: 24599 - RNA, 22 nt, Homo sapiens
ugacuggagaccucaguagggu

SEQ ID NO: 24600 - RNA, 22 nt, Homo sapiens
ucgcagcacgagcaugcaaggu

SEQ ID NO: 24601 - RNA, 22 nt, Homo sapiens
ucgcugcgaccuccaccucccg

SEQ ID NO: 24602 - RNA, 22 nt, Homo sapiens
uccuugagccucccagacucag

SEQ ID NO: 24603 - RNA, 23 nt, Homo sapiens
uccuugguuggcgcccuaugugu

SEQ ID NO: 24604 - RNA, 22 nt, Homo sapiens
uccuugagucuuugcucagaug

SEQ ID NO: 24605 - RNA, 22 nt, Homo sapiens
uccugauacgguugcaguucuc

SEQ ID NO: 24606 - RNA, 22 nt, Homo sapiens
uccuucauuugucaacucuagu

SEQ ID NO: 24607 - RNA, 22 nt, Homo sapiens
uccaccgugggcugcggggcuc

SEQ ID NO: 24608 - RNA, 22 nt, Homo sapiens
uccacaauggagaagaguauga

SEQ ID NO: 24609 - RNA, 22 nt, Homo sapiens
ucauugcuuauuuguuggugga

SEQ ID NO: 24610 - RNA, 22 nt, Homo sapiens
uccccaguaggcaauuaacacc

SEQ ID NO: 24611 - RNA, 19 nt, Homo sapiens
uccccgggucuagugcagc

SEQ ID NO: 24612 - RNA, 22 nt, Homo sapiens
ucagcagugugaaaacaaacua

SEQ ID NO: 24613 - RNA, 22 nt, Homo sapiens
ucagcguguggacggccaucuu

SEQ ID NO: 24614 - RNA, 21 nt, Homo sapiens
ucaggaccucuaguuagccag

SEQ ID NO: 24615 - RNA, 18 nt, Homo sapiens
ucagucacugccuggcuu

SEQ ID NO: 24616 - RNA, 22 nt, Homo sapiens
ucagucauguuuaccagacgua

SEQ ID NO: 24617 - RNA, 22 nt, Homo sapiens
ucagucauucaauuguugaaug

SEQ ID NO: 24618 - RNA, 22 nt, Homo sapiens
ucagucauucacucacucggac

SEQ ID NO: 24619 - RNA, 22 nt, Homo sapiens
ucagcagugccccacucuacug

SEQ ID NO: 24620 - RNA, 20 nt, Homo sapiens
ucagcagucuggagcagagg

SEQ ID NO: 24621 - RNA, 22 nt, Homo sapiens
ucagaugaucugguaagaacuu

SEQ ID NO: 24622 - RNA, 22 nt, Homo sapiens
ucagagcaaagacacuuuauca

SEQ ID NO: 24623 - RNA, 19 nt, Homo sapiens
ucagaucagcccaagggau

SEQ ID NO: 24624 - RNA, 22 nt, Homo sapiens
ucagaucaguuccacaagaacu

SEQ ID NO: 24625 - RNA, 22 nt, Homo sapiens
ucaaguacugccuugcucuggc

SEQ ID NO: 24626 - RNA, 22 nt, Homo sapiens
ucaaguacuuauuugauaauua

SEQ ID NO: 24627 - RNA, 18 nt, Homo sapiens
ucaauguggauguucuuu

SEQ ID NO: 24628 - RNA, 22 nt, Homo sapiens
aagagcauuggauggggagauu

SEQ ID NO: 24629 - RNA, 22 nt, Homo sapiens
aacuggcauguuuuaaggcuua

SEQ ID NO: 24630 - RNA, 22 nt, Homo sapiens
aaccuguggauuuugguaucug

SEQ ID NO: 24631 - RNA, 22 nt, Homo sapiens
aaaugcacgcuacccagcuaga

SEQ ID NO: 24632 - RNA, 22 nt, Homo sapiens
aaaccacagugugcugcugggg

SEQ ID NO: 24633 - RNA, 22 nt, Homo sapiens
aaagcaucacuuuuccuacuuu

SEQ ID NO: 24634 - RNA, 22 nt, Homo sapiens
aauaucacaggguguacacuca

SEQ ID NO: 24635 - RNA, 22 nt, Homo sapiens
aauaucacaguggguguacacc

SEQ ID NO: 24636 - RNA, 22 nt, Homo sapiens
aaucacacuugauguugagcaa

SEQ ID NO: 24637 - RNA, 22 nt, Homo sapiens
aauaucacaguuggguguacac

SEQ ID NO: 24638 - RNA, 23 nt, Homo sapiens
aauaucacaguggguguacaccc

SEQ ID NO: 24639 - RNA, 22 nt, Homo sapiens
aaucugggguuguuuggggagu

SEQ ID NO: 24640 - RNA, 22 nt, Homo sapiens
aagcugcauuuucuagaugcuu

SEQ ID NO: 24641 - RNA, 22 nt, Homo sapiens
aagucacugagacuuguggcug

SEQ ID NO: 24642 - RNA, 22 nt, Homo sapiens
auggccugaugcaccuguccca

SEQ ID NO: 24643 - RNA, 22 nt, Homo sapiens
auggcaguuucagcuauaguuu

SEQ ID NO: 24644 - RNA, 22 nt, Homo sapiens
auggcauggugaagucuuugga

SEQ ID NO: 24645 - RNA, 22 nt, Homo sapiens
auggccauuacuaagaauguuu

SEQ ID NO: 24646 - RNA, 22 nt, Homo sapiens
auggcucuggauagaaugcagg

SEQ ID NO: 24647 - RNA, 22 nt, Homo sapiens
auggucuuuucccuggauuaua

SEQ ID NO: 24648 - RNA, 22 nt, Homo sapiens
augagaucaaauuuaagcuguu

SEQ ID NO: 24649 - RNA, 22 nt, Homo sapiens
augaucacugugccuccuguga

SEQ ID NO: 24650 - RNA, 22 nt, Homo sapiens
augaucuguagaacuaguccuu

SEQ ID NO: 24651 - RNA, 22 nt, Homo sapiens
auggcaauguaagucagaaaaa

SEQ ID NO: 24652 - RNA, 22 nt, Homo sapiens
auggauuuuggggccagaggca

SEQ ID NO: 24653 - RNA, 22 nt, Homo sapiens
auuccacagccgauaccaugac

SEQ ID NO: 24654 - RNA, 23 nt, Homo sapiens
auuccaguggcaauuggagaaac

SEQ ID NO: 24655 - RNA, 22 nt, Homo sapiens
auugaauuugguuugcuaagaa

SEQ ID NO: 24656 - RNA, 22 nt, Homo sapiens
auugacaguuggccaguaagug

SEQ ID NO: 24657 - RNA, 22 nt, Homo sapiens
auucaaggagucuucgucccaa

SEQ ID NO: 24658 - RNA, 22 nt, Homo sapiens
auucaugggagcuacuuuaaaa

SEQ ID NO: 24659 - RNA, 20 nt, Homo sapiens
auucauggugguacguuguc

SEQ ID NO: 24660 - RNA, 22 nt, Homo sapiens
auguaacacagugcggcugggc

SEQ ID NO: 24661 - RNA, 22 nt, Homo sapiens
auguaacaguauuuggagaugu

SEQ ID NO: 24662 - RNA, 19 nt, Homo sapiens
auaugggguuugaacugug

SEQ ID NO: 24663 - RNA, 22 nt, Homo sapiens
auagugcugcaauuaacauaca

SEQ ID NO: 24664 - RNA, 22 nt, Homo sapiens
auaugucuguuuagucuguaau

SEQ ID NO: 24665 - RNA, 22 nt, Homo sapiens
aucaccuggaguagcccguccc

SEQ ID NO: 24666 - RNA, 20 nt, Homo sapiens
aucaccacagcucguucaug

SEQ ID NO: 24667 - RNA, 22 nt, Homo sapiens
aucaccagaugcuucaagcaga

SEQ ID NO: 24668 - RNA, 22 nt, Homo sapiens
aucacaguuauaacauccuuuu

SEQ ID NO: 24669 - RNA, 22 nt, Homo sapiens
aucacaguggcucacaagagcc

SEQ ID NO: 24670 - RNA, 22 nt, Homo sapiens
auagcagugugaggacagacua

SEQ ID NO: 24671 - RNA, 22 nt, Homo sapiens
auagcccauuuguugguccugg

SEQ ID NO: 24672 - RNA, 22 nt, Homo sapiens
auagcagugugaaaauggacua

SEQ ID NO: 24673 - RNA, 22 nt, Homo sapiens
auaagaagugaaccagacgucu

SEQ ID NO: 24674 - RNA, 22 nt, Homo sapiens
augacagugagugagcucucac

SEQ ID NO: 24675 - RNA, 22 nt, Homo sapiens
augaauuuucugauguugggua

SEQ ID NO: 24676 - RNA, 22 nt, Homo sapiens
augaauguaaagaaugugggaa

SEQ ID NO: 24677 - RNA, 22 nt, Homo sapiens
augagacuagaagagaauaaua

SEQ ID NO: 24678 - RNA, 22 nt, Homo sapiens
augacuauugcacuuuccuggu

SEQ ID NO: 24679 - RNA, 18 nt, Homo sapiens
augacucuggguguuccu

SEQ ID NO: 24680 - RNA, 22 nt, Homo sapiens
auccauguggauaaauguguau

SEQ ID NO: 24681 - RNA, 22 nt, Homo sapiens
aucaucaugcacuacagccugg

SEQ ID NO: 24682 - RNA, 22 nt, Homo sapiens
auccaguguuuucuuuugucac

SEQ ID NO: 24683 - RNA, 22 nt, Homo sapiens
auccaguuuuaggagauuucua

SEQ ID NO: 24684 - RNA, 22 nt, Homo sapiens
auccaucagacggcaggcguug

SEQ ID NO: 24685 - RNA, 22 nt, Homo sapiens
aucauugcacaucacagccuca

SEQ ID NO: 24686 - RNA, 22 nt, Homo sapiens
agcuguuguuaauuaacucauu

SEQ ID NO: 24687 - RNA, 20 nt, Homo sapiens
agcuguuguuaugagguuua

SEQ ID NO: 24688 - RNA, 22 nt, Homo sapiens
agcuguuguucucagaggcuuu

SEQ ID NO: 24689 - RNA, 22 nt, Homo sapiens
aggagguugguaccaucuguuu

SEQ ID NO: 24690 - RNA, 21 nt, Homo sapiens
agcuuguguguaucacagugu

SEQ ID NO: 24691 - RNA, 22 nt, Homo sapiens
aggcagucucugccggcugagg

SEQ ID NO: 24692 - RNA, 22 nt, Homo sapiens
aacaccauuuuucugcagccuu

SEQ ID NO: 24693 - RNA, 20 nt, Homo sapiens
agcuguuguuaaaaaggagg

SEQ ID NO: 24694 - RNA, 22 nt, Homo sapiens
agcuguaguuugguggauguaa

SEQ ID NO: 24695 - RNA, 20 nt, Homo sapiens
agcugguuuuaugaaucuuu

SEQ ID NO: 24696 - RNA, 20 nt, Homo sapiens
agccccauguaaaccacaug

SEQ ID NO: 24697 - RNA, 22 nt, Homo sapiens
agcaccaccguugcucuauccc

SEQ ID NO: 24698 - RNA, 22 nt, Homo sapiens
agcaccacaauuuccugccuaa

SEQ ID NO: 24699 - RNA, 17 nt, Homo sapiens
agcaccacacucucuug

SEQ ID NO: 24700 - RNA, 22 nt, Homo sapiens
agcaagaaugaacucucccaga

SEQ ID NO: 24701 - RNA, 22 nt, Homo sapiens
agugguaguacaggagauaccg

SEQ ID NO: 24702 - RNA, 22 nt, Homo sapiens
aguucaaugcucuuucuacuau

SEQ ID NO: 24703 - RNA, 22 nt, Homo sapiens
agggagcaaaguggucuuucuc

SEQ ID NO: 24704 - RNA, 17 nt, Homo sapiens
agugagaucauggcuua

SEQ ID NO: 24705 - RNA, 22 nt, Homo sapiens
agucauggcagaaggcaccucu

SEQ ID NO: 24706 - RNA, 22 nt, Homo sapiens
agucaugguaguaaauuuggac

SEQ ID NO: 24707 - RNA, 22 nt, Homo sapiens
agugcacuccagccugggcaac

SEQ ID NO: 24708 - RNA, 22 nt, Homo sapiens
agugauguggaguuuggaugga

SEQ ID NO: 24709 - RNA, 21 nt, Homo sapiens
agagucaucucuaucuguacc

SEQ ID NO: 24710 - RNA, 22 nt, Homo sapiens
agagguuuuggggcugagagcu

SEQ ID NO: 24711 - RNA, 22 nt, Homo sapiens
agaguaguuucuauauucuuca

SEQ ID NO: 24712 - RNA, 22 nt, Homo sapiens
agaugguauuauagguuucugu

SEQ ID NO: 24713 - RNA, 22 nt, Homo sapiens
agaucaauugcugauucgcucu

SEQ ID NO: 24714 - RNA, 22 nt, Homo sapiens
acauugcagauguguuuaaugu

SEQ ID NO: 24715 - RNA, 21 nt, Homo sapiens
acaucagaguugugaagguag

SEQ ID NO: 24716 - RNA, 22 nt, Homo sapiens
accccgagacugccaagaaucc

SEQ ID NO: 24717 - RNA, 17 nt, Homo sapiens
accagugcaugugcuuu

SEQ ID NO: 24718 - RNA, 22 nt, Homo sapiens
acccagaguuccuugucuuuca

SEQ ID NO: 24719 - RNA, 22 nt, Homo sapiens
acccaguguugggcagaacugu

SEQ ID NO: 24720 - RNA, 22 nt, Homo sapiens
accaccauugcacugaacuuuc

SEQ ID NO: 24721 - RNA, 22 nt, Homo sapiens
accaccacucccgcauucuaaa

SEQ ID NO: 24722 - RNA, 22 nt, Homo sapiens
uaaaccacguuuacauuugaga

SEQ ID NO: 24723 - RNA, 22 nt, Homo sapiens
guugcagcacacaggcugucag

SEQ ID NO: 24724 - RNA, 22 nt, Homo sapiens
guucaucagggauauuggccug

SEQ ID NO: 24725 - RNA, 23 nt, Homo sapiens
guucaucagggauauuggccuga

SEQ ID NO: 24726 - RNA, 22 nt, Homo sapiens
guucaucagggauacuggccuu

SEQ ID NO: 24727 - RNA, 22 nt, Homo sapiens
guucaucagggauacuggccug

SEQ ID NO: 24728 - RNA, 22 nt, Homo sapiens
uaacauucacaugcugcaaaaa

SEQ ID NO: 24729 - RNA, 22 nt, Homo sapiens
uaacccacgcagaauggacaag

SEQ ID NO: 24730 - RNA, 22 nt, Homo sapiens
uaaagcauguaauuagguuaga

SEQ ID NO: 24731 - RNA, 22 nt, Homo sapiens
guggaaggucaugaauguucuu

SEQ ID NO: 24732 - RNA, 22 nt, Homo sapiens
gugauaucugagccugccccag

SEQ ID NO: 24733 - RNA, 22 nt, Homo sapiens
gugaucucagcucacuggaacc

SEQ ID NO: 24734 - RNA, 22 nt, Homo sapiens
gugaucuuucaggcuugaccau

SEQ ID NO: 24735 - RNA, 22 nt, Homo sapiens
gugaugacauucagagaugaag

SEQ ID NO: 24736 - RNA, 22 nt, Homo sapiens
gugauuauuaugcacugcaugc

SEQ ID NO: 24737 - RNA, 22 nt, Homo sapiens
gugaggugguacaauauuaacu

SEQ ID NO: 24738 - RNA, 22 nt, Homo sapiens
gugauaucacuguaucacucca

SEQ ID NO: 24739 - RNA, 22 nt, Homo sapiens
gugguguuugagcugccaggga

SEQ ID NO: 24740 - RNA, 22 nt, Homo sapiens
gugguaucauuuaaccauuaga

SEQ ID NO: 24741 - RNA, 22 nt, Homo sapiens
gugugcauggagggggcaguga

SEQ ID NO: 24742 - RNA, 22 nt, Homo sapiens
guaucauugccuaaugcucuca

SEQ ID NO: 24743 - RNA, 22 nt, Homo sapiens
gucagcaucaccaugucuauga

SEQ ID NO: 24744 - RNA, 22 nt, Homo sapiens
gucugagcauggggccggcagg

SEQ ID NO: 24745 - RNA, 22 nt, Homo sapiens
gugacaucagcuccagguauaa

SEQ ID NO: 24746 - RNA, 22 nt, Homo sapiens
gugaaucuguuuucuucuguuc

SEQ ID NO: 24747 - RNA, 22 nt, Homo sapiens
gugaaguuuuugugaggccuaa

SEQ ID NO: 24748 - RNA, 22 nt, Homo sapiens
gucuuggcaugugcagcuggga

SEQ ID NO: 24749 - RNA, 22 nt, Homo sapiens
gucuuuguuuugauuuaccaga

SEQ ID NO: 24750 - RNA, 22 nt, Homo sapiens
guaagagcauguaguggcucua

SEQ ID NO: 24751 - RNA, 22 nt, Homo sapiens
guaguggcaugaucuuggcuca

SEQ ID NO: 24752 - RNA, 22 nt, Homo sapiens
guagcagucacauagcagauug

SEQ ID NO: 24753 - RNA, 22 nt, Homo sapiens
guacacauacauauaugugugu

SEQ ID NO: 24754 - RNA, 22 nt, Homo sapiens
ggcagcuguguccuucguaagg

SEQ ID NO: 24755 - RNA, 22 nt, Homo sapiens
ggcagcgugguggauugaaaau

SEQ ID NO: 24756 - RNA, 22 nt, Homo sapiens
ggcagcacaauuuucugaugga

SEQ ID NO: 24757 - RNA, 22 nt, Homo sapiens
ggcagagucuugcaucuuuaga

SEQ ID NO: 24758 - RNA, 22 nt, Homo sapiens
ggcaguguggcugcauauagca

SEQ ID NO: 24759 - RNA, 17 nt, Homo sapiens
ggcaagaaguggaacuc

SEQ ID NO: 24760 - RNA, 22 nt, Homo sapiens
ggcaagaagaacuauaacuuuu

SEQ ID NO: 24761 - RNA, 21 nt, Homo sapiens
ggcaagaaacacaaucaagua

SEQ ID NO: 24762 - RNA, 22 nt, Homo sapiens
ggcaagaaccacaauuacuuuu

SEQ ID NO: 24763 - RNA, 22 nt, Homo sapiens
ggcaagaaccagggauuugcgu

SEQ ID NO: 24764 - RNA, 22 nt, Homo sapiens
ggcaagaacuucacucacuuuu

SEQ ID NO: 24765 - RNA, 21 nt, Homo sapiens
uauccacuugcaacagagaag

SEQ ID NO: 24766 - RNA, 22 nt, Homo sapiens
uaucauugccucaaucuguauu

SEQ ID NO: 24767 - RNA, 22 nt, Homo sapiens
uaucacacgccuugcuucauuu

SEQ ID NO: 24768 - RNA, 22 nt, Homo sapiens
uaucacacuggaagaaguuaag

SEQ ID NO: 24769 - RNA, 22 nt, Homo sapiens
uaucauggaaagauguugaaau

SEQ ID NO: 24770 - RNA, 22 nt, Homo sapiens
uaucugcacauacacuuauagc

SEQ ID NO: 24771 - RNA, 22 nt, Homo sapiens
uauugcagugagauccaucugg

SEQ ID NO: 24772 - RNA, 18 nt, Homo sapiens
uauuaagcuagauauuau

SEQ ID NO: 24773 - RNA, 22 nt, Homo sapiens
uauugcacuccagccuuggcaa

SEQ ID NO: 24774 - RNA, 21 nt, Homo sapiens
ucaaaguguucuuuuguugaa

SEQ ID NO: 24775 - RNA, 22 nt, Homo sapiens
uauugcuuuacucucuuauccu

SEQ ID NO: 24776 - RNA, 22 nt, Homo sapiens
uauugcugaaaaugcuaaugau

SEQ ID NO: 24777 - RNA, 18 nt, Homo sapiens
ucaccuugugagagagag

SEQ ID NO: 24778 - RNA, 22 nt, Homo sapiens
ucaccuggagaagauggaucau

SEQ ID NO: 24779 - RNA, 22 nt, Homo sapiens
ucaccaguaauaaagagccugc

SEQ ID NO: 24780 - RNA, 22 nt, Homo sapiens
ucaccagugucagggaacugcu

SEQ ID NO: 24781 - RNA, 22 nt, Homo sapiens
ucacauguguaugagcuuugau

SEQ ID NO: 24782 - RNA, 22 nt, Homo sapiens
ucaccaccugcugauuguagag

SEQ ID NO: 24783 - RNA, 22 nt, Homo sapiens
ucacaugaagauuuuaguauac

SEQ ID NO: 24784 - RNA, 22 nt, Homo sapiens
ucacacgugaacucaucacaga

SEQ ID NO: 24785 - RNA, 22 nt, Homo sapiens
ucaaguacuuugcauagugccg

SEQ ID NO: 24786 - RNA, 22 nt, Homo sapiens
ucaaugcaaccuccaccucugg

SEQ ID NO: 24787 - RNA, 22 nt, Homo sapiens
uagcugcacuuacaagugagaa

SEQ ID NO: 24788 - RNA, 22 nt, Homo sapiens
uagcaguauggagcgaggccca

SEQ ID NO: 24789 - RNA, 21 nt, Homo sapiens
uagcauacauuuugcaucuua

SEQ ID NO: 24790 - RNA, 22 nt, Homo sapiens
uagcaucagauuccauauucua

SEQ ID NO: 24791 - RNA, 22 nt, Homo sapiens
uagcccagugagguugauuugg

SEQ ID NO: 24792 - RNA, 20 nt, Homo sapiens
uaguggcaugcaccuguagc

SEQ ID NO: 24793 - RNA, 22 nt, Homo sapiens
uaagcagugcaagaauggaaua

SEQ ID NO: 24794 - RNA, 22 nt, Homo sapiens
uaagcucauuccagccaugucc

SEQ ID NO: 24795 - RNA, 22 nt, Homo sapiens
uaagcuguguggacuaugccuc

SEQ ID NO: 24796 - RNA, 22 nt, Homo sapiens
uaccugagcccucugcugaguu

SEQ ID NO: 24797 - RNA, 22 nt, Homo sapiens
cugcuggucuuuaaggucuagg

SEQ ID NO: 24798 - RNA, 22 nt, Homo sapiens
cuguaacagaauaaauuuguuu

SEQ ID NO: 24799 - RNA, 22 nt, Homo sapiens
cugguuguuacaaagagccugg

SEQ ID NO: 24800 - RNA, 22 nt, Homo sapiens
cuggucaugggggcacccucug

SEQ ID NO: 24801 - RNA, 22 nt, Homo sapiens
cugagcccauucuggggagaag

SEQ ID NO: 24802 - RNA, 18 nt, Homo sapiens
cugagcacugcuuuauga

SEQ ID NO: 24803 - RNA, 22 nt, Homo sapiens
cugaggguagaaggaucacuug

SEQ ID NO: 24804 - RNA, 22 nt, Homo sapiens
cugcauuggguuaugcauuuuu

SEQ ID NO: 24805 - RNA, 21 nt, Homo sapiens
cucucugcuuaugaauaguga

SEQ ID NO: 24806 - RNA, 22 nt, Homo sapiens
cugagacacucuuaucugcaua

SEQ ID NO: 24807 - RNA, 22 nt, Homo sapiens
cggcaguggguaagccaagcuu

SEQ ID NO: 24808 - RNA, 21 nt, Homo sapiens
cgucauggagauguguuguac

SEQ ID NO: 24809 - RNA, 22 nt, Homo sapiens
cauugcaguaagagugggcucu

SEQ ID NO: 24810 - RNA, 22 nt, Homo sapiens
ccagugcugugcaguguaugag

SEQ ID NO: 24811 - RNA, 22 nt, Homo sapiens
cauuugcacugagacucagcuu

SEQ ID NO: 24812 - RNA, 22 nt, Homo sapiens
cauugcucuuacagagugagua

SEQ ID NO: 24813 - RNA, 22 nt, Homo sapiens
cuccagugcaaagucaugauca

SEQ ID NO: 24814 - RNA, 22 nt, Homo sapiens
cuacuauguagagauauugaau

SEQ ID NO: 24815 - RNA, 22 nt, Homo sapiens
cuaaaguucuucugagagaaca

SEQ ID NO: 24816 - RNA, 22 nt, Homo sapiens
cacuggucucauggcaugagag

SEQ ID NO: 24817 - RNA, 22 nt, Homo sapiens
cacugggccaucacuuaauauu

SEQ ID NO: 24818 - RNA, 22 nt, Homo sapiens
cacuggguuagaacaugcuccu

SEQ ID NO: 24819 - RNA, 22 nt, Homo sapiens
cagaguuaguagccuuugacaa

SEQ ID NO: 24820 - RNA, 22 nt, Homo sapiens
cacugcauggccacccauguua

SEQ ID NO: 24821 - RNA, 22 nt, Homo sapiens
cacaguguucauagccaucagg

SEQ ID NO: 24822 - RNA, 21 nt, Homo sapiens
cacugcacuugccuucugggu

SEQ ID NO: 24823 - RNA, 22 nt, Homo sapiens
cacaaaguagauuagucuucca

SEQ ID NO: 24824 - RNA, 22 nt, Homo sapiens
cacacugucuucauuacuguag

SEQ ID NO: 24825 - RNA, 22 nt, Homo sapiens
cauggguuuucucaaguaguca

SEQ ID NO: 24826 - RNA, 22 nt, Homo sapiens
cauggcuuuuauaacaagaaau

SEQ ID NO: 24827 - RNA, 22 nt, Homo sapiens
cauugcacucuagucuggguga

SEQ ID NO: 24828 - RNA, 22 nt, Homo sapiens
cauugcacuccaucuugggcaa

SEQ ID NO: 24829 - RNA, 22 nt, Homo sapiens
cauugcacuccagccuggcaac

SEQ ID NO: 24830 - RNA, 22 nt, Homo sapiens
cauugcacuccagcuugggcaa

SEQ ID NO: 24831 - RNA, 22 nt, Homo sapiens
cauugcaaugaggucuugcagu

SEQ ID NO: 24832 - RNA, 22 nt, Homo sapiens
cauugcacuccagccugcacga

SEQ ID NO: 24833 - RNA, 22 nt, Homo sapiens
cauugcacuccagccugaccaa

SEQ ID NO: 24834 - RNA, 22 nt, Homo sapiens
caggcuuuuccacacauggguu

SEQ ID NO: 24835 - RNA, 22 nt, Homo sapiens
caggugaaugccucuccuucug

SEQ ID NO: 24836 - RNA, 20 nt, Homo sapiens
cagggcaaugaggagguaaa

SEQ ID NO: 24837 - RNA, 22 nt, Homo sapiens
caugcacugagagggucucggc

SEQ ID NO: 24838 - RNA, 22 nt, Homo sapiens
caugcagcacacaugucugugc

SEQ ID NO: 24839 - RNA, 19 nt, Homo sapiens
caguaucauugcacauagu

SEQ ID NO: 24840 - RNA, 22 nt, Homo sapiens
caguagcaugccucagaaugag

SEQ ID NO: 24841 - RNA, 22 nt, Homo sapiens
ggaguaggcuguccggcaccca

SEQ ID NO: 24842 - RNA, 22 nt, Homo sapiens
ggagcugugauuugaguccaga

SEQ ID NO: 24843 - RNA, 22 nt, Homo sapiens
ggaucacagccagcucccagaa

SEQ ID NO: 24844 - RNA, 22 nt, Homo sapiens
gcuuggugugcaagugguacua

SEQ ID NO: 24845 - RNA, 22 nt, Homo sapiens
gcuucauggaggcugggcgcag

SEQ ID NO: 24846 - RNA, 22 nt, Homo sapiens
gcuguuugccgccaucgcagac

SEQ ID NO: 24847 - RNA, 22 nt, Homo sapiens
gcugauggugcaguucuagccu

SEQ ID NO: 24848 - RNA, 16 nt, Homo sapiens
gcuguuguuuuguccu

SEQ ID NO: 24849 - RNA, 22 nt, Homo sapiens
gcugcguguagaguucucacug

SEQ ID NO: 24850 - RNA, 22 nt, Homo sapiens
gcucugguuacaaaggcaaauu

SEQ ID NO: 24851 - RNA, 22 nt, Homo sapiens
gauggcagugcagccccuggcu

SEQ ID NO: 24852 - RNA, 22 nt, Homo sapiens
gauaaaguauuggguacuaugc

SEQ ID NO: 24853 - RNA, 22 nt, Homo sapiens
gcacaaugccugacgaguccug

SEQ ID NO: 24854 - RNA, 19 nt, Homo sapiens
gcucaccuugcugcuccag

SEQ ID NO: 24855 - RNA, 22 nt, Homo sapiens
gcaugcauuuuccuaacuagaa

SEQ ID NO: 24856 - RNA, 22 nt, Homo sapiens
gcauggauguugauggcugcug

SEQ ID NO: 24857 - RNA, 22 nt, Homo sapiens
gcaugguaguaaccuacauuug

SEQ ID NO: 24858 - RNA, 22 nt, Homo sapiens
gcaugugaauguguaagaaaau

SEQ ID NO: 24859 - RNA, 22 nt, Homo sapiens
gcauggccuuuaaaugucacag

SEQ ID NO: 24860 - RNA, 22 nt, Homo sapiens
cugucuggaguccuucgugugc

SEQ ID NO: 24861 - RNA, 22 nt, Homo sapiens
cugugcaugcgcggagcugaaa

SEQ ID NO: 24862 - RNA, 22 nt, Homo sapiens
cuuuguaugucaugacaacugu

SEQ ID NO: 24863 - RNA, 20 nt, Homo sapiens
cuuuuugcugugcugggagc

SEQ ID NO: 24864 - RNA, 19 nt, Homo sapiens
gacuccagaguugugugcu

SEQ ID NO: 24865 - RNA, 20 nt, Homo sapiens
gagauguugaucagggcuau

SEQ ID NO: 24866 - RNA, 22 nt, Homo sapiens
gagaugguguuccacugccagu

SEQ ID NO: 24867 - RNA, 16 nt, Homo sapiens
gacugggcugaggaau

SEQ ID NO: 24868 - RNA, 22 nt, Homo sapiens
gagcuccuccccuuggcuuuca

SEQ ID NO: 24869 - RNA, 22 nt, Homo sapiens
gaggaaguaauuuuaggccugu

SEQ ID NO: 24870 - RNA, 22 nt, Homo sapiens
gaggagucagacugugcaaggu

SEQ ID NO: 24871 - RNA, 22 nt, Homo sapiens
gagccauggagaaaacagcuau

SEQ ID NO: 24872 - RNA, 22 nt, Homo sapiens
uggcauggaacuacuuugaaac

SEQ ID NO: 24873 - RNA, 22 nt, Homo sapiens
ugguguccugucucugcgcuug

SEQ ID NO: 24874 - RNA, 20 nt, Homo sapiens
uguagguguacaguaaggag

SEQ ID NO: 24875 - RNA, 22 nt, Homo sapiens
ugucaccauuuguaggugagga

SEQ ID NO: 24876 - RNA, 22 nt, Homo sapiens
ugucaaugggaauuuguuuuag

SEQ ID NO: 24877 - RNA, 22 nt, Homo sapiens
uguaugagagugaaagcauuuc

SEQ ID NO: 24878 - RNA, 22 nt, Homo sapiens
uguaugucuucuuuagauaagu

SEQ ID NO: 24879 - RNA, 22 nt, Homo sapiens
uguauguugggucaaaguacau

SEQ ID NO: 24880 - RNA, 22 nt, Homo sapiens
ugucaugucaacuauggaauuu

SEQ ID NO: 24881 - RNA, 22 nt, Homo sapiens
ugucaugugagggaacuuguuc

SEQ ID NO: 24882 - RNA, 22 nt, Homo sapiens
ugucauggugcucugggcccug

SEQ ID NO: 24883 - RNA, 22 nt, Homo sapiens
ugucauggcauuuguaaacugc

SEQ ID NO: 24884 - RNA, 22 nt, Homo sapiens
ugucauggggaaaauaacagac

SEQ ID NO: 24885 - RNA, 22 nt, Homo sapiens
ugucaugguagcaaggacgagg

SEQ ID NO: 24886 - RNA, 20 nt, Homo sapiens
ugucccaaccccauggguuc

SEQ ID NO: 24887 - RNA, 22 nt, Homo sapiens
ugucauucaggaaauucuaagu

SEQ ID NO: 24888 - RNA, 22 nt, Homo sapiens
ugugaaaucagauagccuuuuu

SEQ ID NO: 24889 - RNA, 22 nt, Homo sapiens
ugcagaaucccuucagauccga

SEQ ID NO: 24890 - RNA, 17 nt, Homo sapiens
ugcagcacacugauggg

SEQ ID NO: 24891 - RNA, 22 nt, Homo sapiens
ugcaggguccauugucccaagu

SEQ ID NO: 24892 - RNA, 21 nt, Homo sapiens
ugcauugucuugaguuuaaau

SEQ ID NO: 24893 - RNA, 22 nt, Homo sapiens
ugcauggucauacauggcaccc

SEQ ID NO: 24894 - RNA, 20 nt, Homo sapiens
ugcauguccucacuuacuug

SEQ ID NO: 24895 - RNA, 22 nt, Homo sapiens
ugaggugaggguaucaaaugcu

SEQ ID NO: 24896 - RNA, 22 nt, Homo sapiens
ugcaagaaucuuucaggcuagc

SEQ ID NO: 24897 - RNA, 22 nt, Homo sapiens
ugcaagaaacauauuccacaag

SEQ ID NO: 24898 - RNA, 22 nt, Homo sapiens
ugcugcaaucucggcacuuugg

SEQ ID NO: 24899 - RNA, 22 nt, Homo sapiens
ugcugcaaacaggcaucugugg

SEQ ID NO: 24900 - RNA, 22 nt, Homo sapiens
ugcugcacuuauggcucugagg

SEQ ID NO: 24901 - RNA, 22 nt, Homo sapiens
ugcuggugauucagauucaaau

SEQ ID NO: 24902 - RNA, 22 nt, Homo sapiens
ugcuggugucaucaaggcuuug

SEQ ID NO: 24903 - RNA, 22 nt, Homo sapiens
ugcuaucauugauuagugaugu

SEQ ID NO: 24904 - RNA, 22 nt, Homo sapiens
ugccaguauuuuauugagcauu

SEQ ID NO: 24905 - RNA, 22 nt, Homo sapiens
ugcuguuguuugaugaaguaau

SEQ ID NO: 24906 - RNA, 22 nt, Homo sapiens
ucugugguucaggcuggagugc

SEQ ID NO: 24907 - RNA, 22 nt, Homo sapiens
ucugugguaagaaacgcauguc

SEQ ID NO: 24908 - RNA, 22 nt, Homo sapiens
ucuuggguuugccuugcugcug

SEQ ID NO: 24909 - RNA, 22 nt, Homo sapiens
ucuugggugaguuugugaauaa

SEQ ID NO: 24910 - RNA, 22 nt, Homo sapiens
ucuuaggugaugauugauguga

SEQ ID NO: 24911 - RNA, 22 nt, Homo sapiens
ucacugugguuggaaggcuuaa

SEQ ID NO: 24912 - RNA, 22 nt, Homo sapiens
ucacugggagaccaaagccauc

SEQ ID NO: 24913 - RNA, 22 nt, Homo sapiens
ucacugaaacuguccuggguua

SEQ ID NO: 24914 - RNA, 22 nt, Homo sapiens
uccccugagaccccucagcacu

SEQ ID NO: 24915 - RNA, 22 nt, Homo sapiens
ucucuguuugucuguuacuggu

SEQ ID NO: 24916 - RNA, 22 nt, Homo sapiens
ucugacaaugaacaaucuauag

SEQ ID NO: 24917 - RNA, 22 nt, Homo sapiens
ucgcugggaaccagagguaaag

SEQ ID NO: 24918 - RNA, 22 nt, Homo sapiens
ucgcugggaagacugaaguguc

SEQ ID NO: 24919 - RNA, 22 nt, Homo sapiens
ugacuuaugcaacucugaugug

SEQ ID NO: 24920 - RNA, 22 nt, Homo sapiens
ugacuacauaaguaaucucaaa

SEQ ID NO: 24921 - RNA, 22 nt, Homo sapiens
ugacaguguccuccuccugaga

SEQ ID NO: 24922 - RNA, 22 nt, Homo sapiens
ugacaguguccucauucccaac

SEQ ID NO: 24923 - RNA, 22 nt, Homo sapiens
ugaaaugccuuuaaugaauuua

SEQ ID NO: 24924 - RNA, 22 nt, Homo sapiens
ugacagcuguugaggcauuuau

SEQ ID NO: 24925 - RNA, 22 nt, Homo sapiens
ugaaacugcagugggcuuggca

SEQ ID NO: 24926 - RNA, 22 nt, Homo sapiens
ugagacggagucucgcucuguc

SEQ ID NO: 24927 - RNA, 22 nt, Homo sapiens
ugagacugagucucccucuguc

SEQ ID NO: 24928 - RNA, 22 nt, Homo sapiens
ugagacugagucucgcucuauu

SEQ ID NO: 24929 - RNA, 22 nt, Homo sapiens
ugagacugguaauguguagggc

SEQ ID NO: 24930 - RNA, 22 nt, Homo sapiens
ugagggcguauccuucauuaag

SEQ ID NO: 24931 - RNA, 22 nt, Homo sapiens
ugagaugagggaagccuaggca

SEQ ID NO: 24932 - RNA, 18 nt, Homo sapiens
ugagauacuagaauaggu

SEQ ID NO: 24933 - RNA, 22 nt, Homo sapiens
ugagauccugagaguugggacu

SEQ ID NO: 24934 - RNA, 22 nt, Homo sapiens
uuagcccaucuugaggaaagua

SEQ ID NO: 24935 - RNA, 22 nt, Homo sapiens
uuagcccagugggugcuucucu

SEQ ID NO: 24936 - RNA, 22 nt, Homo sapiens
uuagcagugucccacuccuugg

SEQ ID NO: 24937 - RNA, 22 nt, Homo sapiens
uuauuagcacccuaccaugugg

SEQ ID NO: 24938 - RNA, 22 nt, Homo sapiens
uguuggacuuacuuggcagauu

SEQ ID NO: 24939 - RNA, 22 nt, Homo sapiens
uuaagucacacuagacaacuga

SEQ ID NO: 24940 - RNA, 20 nt, Homo sapiens
ugugaacuguagauagucuu

SEQ ID NO: 24941 - RNA, 18 nt, Homo sapiens
ugugacauugagcauguc

SEQ ID NO: 24942 - RNA, 22 nt, Homo sapiens
ugugacugguugucccgcuuuc

SEQ ID NO: 24943 - RNA, 19 nt, Homo sapiens
ugugagcauuagcauuuag

SEQ ID NO: 24944 - RNA, 22 nt, Homo sapiens
ugugaucaugguauuaaucugc

SEQ ID NO: 24945 - RNA, 22 nt, Homo sapiens
ugugauggaguuucauggacug

SEQ ID NO: 24946 - RNA, 22 nt, Homo sapiens
uucacuggagcccaggaguugg

SEQ ID NO: 24947 - RNA, 22 nt, Homo sapiens
uucacaugguugccuuuugauc

SEQ ID NO: 24948 - RNA, 22 nt, Homo sapiens
uuccaguggaguaaauggacaa

SEQ ID NO: 24949 - RNA, 22 nt, Homo sapiens
uuccaguggacuacuucauccu

SEQ ID NO: 24950 - RNA, 22 nt, Homo sapiens
uuccagugggacgagaugugga

SEQ ID NO: 24951 - RNA, 22 nt, Homo sapiens
uuccaguguguucauccucaga

SEQ ID NO: 24952 - RNA, 22 nt, Homo sapiens
uuccaguguuugacucaccuuu

SEQ ID NO: 24953 - RNA, 22 nt, Homo sapiens
uucgcagcucaguucaacuagg

SEQ ID NO: 24954 - RNA, 22 nt, Homo sapiens
uugaaauguuuagaaguuugga

SEQ ID NO: 24955 - RNA, 23 nt, Homo sapiens
uugacuguggguacaaugugaua

SEQ ID NO: 24956 - RNA, 22 nt, Homo sapiens
uugacuuuuauucacucugcua

SEQ ID NO: 24957 - RNA, 22 nt, Homo sapiens
uugaggacugguugaaagcuuu

SEQ ID NO: 24958 - RNA, 22 nt, Homo sapiens
uugaggaggcagucucuccauu

SEQ ID NO: 24959 - RNA, 22 nt, Homo sapiens
uugaggaggcagucuucccauu

SEQ ID NO: 24960 - RNA, 22 nt, Homo sapiens
uuggacugugagguuucguggg

SEQ ID NO: 24961 - RNA, 22 nt, Homo sapiens
uuggauugugaaaguauucucu

SEQ ID NO: 24962 - RNA, 22 nt, Homo sapiens
uugauauguguauagcaugugg

SEQ ID NO: 24963 - RNA, 22 nt, Homo sapiens
uuggccuuuucaaugccucuuu

SEQ ID NO: 24964 - RNA, 22 nt, Homo sapiens
uuggggcacggccucuguugcc

SEQ ID NO: 24965 - RNA, 22 nt, Homo sapiens
uugggauggaaauuuguacccc

SEQ ID NO: 24966 - RNA, 22 nt, Homo sapiens
uugggcauugcuauaaauucuu

SEQ ID NO: 24967 - RNA, 22 nt, Homo sapiens
uugggcauugggcuaaacuccc

SEQ ID NO: 24968 - RNA, 22 nt, Homo sapiens
uuguacucucaccguaucccag

SEQ ID NO: 24969 - RNA, 22 nt, Homo sapiens
uuguaauguuaggguguccaug

SEQ ID NO: 24970 - RNA, 23 nt, Homo sapiens
uuuaagcuucauguccuaacauc

SEQ ID NO: 24971 - RNA, 18 nt, Homo sapiens
uuuacaguagaaggacuu

SEQ ID NO: 24972 - RNA, 22 nt, Homo sapiens
uuguuauguuggucaguaaugu

SEQ ID NO: 24973 - RNA, 22 nt, Homo sapiens
uuguuguggauuaaauuugcau

SEQ ID NO: 24974 - RNA, 22 nt, Homo sapiens
uugugaucauugucaaauagug

SEQ ID NO: 24975 - RNA, 22 nt, Homo sapiens
uugugauggugcauacugagcu

SEQ ID NO: 24976 - RNA, 22 nt, Homo sapiens
uuugucauagcagcaggaaugg

SEQ ID NO: 24977 - RNA, 19 nt, Homo sapiens
uuuguauguuuccaguaau

SEQ ID NO: 24978 - RNA, 22 nt, Homo sapiens
uuuguacucccuuuagauaaaa

SEQ ID NO: 24979 - RNA, 22 nt, Homo sapiens
uuuguacuccuuggccagcuuc

SEQ ID NO: 24980 - RNA, 22 nt, Homo sapiens
uuuuggacuucaauuugacacu

SEQ ID NO: 24981 - RNA, 22 nt, Homo sapiens
uuuugguguacaauucuaugga

SEQ ID NO: 24982 - RNA, 22 nt, Homo sapiens
uuucauggcaguuuggggccug

SEQ ID NO: 24983 - RNA, 22 nt, Homo sapiens
uuucauggacgcaaugccuuuu

SEQ ID NO: 24984 - RNA, 22 nt, Homo sapiens
uuucauggagaaucuucuuacu

SEQ ID NO: 24985 - RNA, 22 nt, Homo sapiens
uuucauagaucaugcuuuugga

SEQ ID NO: 24986 - RNA, 22 nt, Homo sapiens
uuuccaguuuggaggaugcauu

SEQ ID NO: 24987 - RNA, 22 nt, Homo sapiens
uuuccagguggccaacauuuua

SEQ ID NO: 24988 - RNA, 22 nt, Homo sapiens
uuuuugaguagcuggagagcag

SEQ ID NO: 24989 - RNA, 22 nt, Homo sapiens
aacugcuguuuggguacuggug

SEQ ID NO: 24990 - RNA, 22 nt, Homo sapiens
aacuggcauagccagacuucuc

SEQ ID NO: 24991 - RNA, 18 nt, Homo sapiens
aagagcucagcacagguu

SEQ ID NO: 24992 - RNA, 20 nt, Homo sapiens
aagcagacauuuggaugaaa

SEQ ID NO: 24993 - RNA, 22 nt, Homo sapiens
aagcaucacauaauggaucaug

SEQ ID NO: 24994 - RNA, 22 nt, Human adenovirus D
ccguggccucuucgcccgaccg

SEQ ID NO: 24995 - RNA, 18 nt, Human adenovirus D
gacuggugcugcgcgcgc

SEQ ID NO: 24996 - RNA, 22 nt, Human adenovirus D
ugagaggagugugauaugcaca

SEQ ID NO: 24997 - RNA, 22 nt, Human adenovirus D
agcgccagucccucauccuccg

SEQ ID NO: 24998 - RNA, 22 nt, Human adenovirus D
cgggguuguggacuuccgcgua

SEQ ID NO: 24999 - RNA, 20 nt, Homo sapiens
uguggcacuguaucucucag

SEQ ID NO: 25000 - RNA, 22 nt, Homo sapiens
gugacacagcaagacuccgucu

SEQ ID NO: 25001 - RNA, 22 nt, Homo sapiens
uguggcacuguguccagagaaa

SEQ ID NO: 25002 - RNA, 22 nt, Homo sapiens
gagacucuuagauuggaaaucu

SEQ ID NO: 25003 - RNA, 22 nt, Homo sapiens
ucacuggccaaauucuggguga

SEQ ID NO: 25004 - RNA, 22 nt, Homo sapiens
gaggucaugucgggccccagga

SEQ ID NO: 25005 - RNA, 22 nt, Homo sapiens
gcaccccuuaccgggcuggguu

SEQ ID NO: 25006 - RNA, 22 nt, Homo sapiens
acugcacuccagacucugucuc

SEQ ID NO: 25007 - RNA, 22 nt, Homo sapiens
uuccugagccuuguaucuagua

SEQ ID NO: 25008 - RNA, 22 nt, Homo sapiens
aguggcacuauucucagaguca

SEQ ID NO: 25009 - RNA, 22 nt, Homo sapiens
uacuggccccaaaguagguagu

SEQ ID NO: 25010 - RNA, 17 nt, Homo sapiens
gcacuggcguaucccac

SEQ ID NO: 25011 - RNA, 22 nt, Homo sapiens
gucaaaugcacagaaccauuaa

SEQ ID NO: 25012 - RNA, 22 nt, Homo sapiens
aacuggccuggcgugcagaggg

SEQ ID NO: 25013 - RNA, 19 nt, Homo sapiens
caccgccugcccccugcug

SEQ ID NO: 25014 - RNA, 21 nt, Homo sapiens
uuuccuggagcguauggcuuc

SEQ ID NO: 25015 - RNA, 22 nt, Homo sapiens
cacugcacuccagcuugugggc

SEQ ID NO: 25016 - RNA, 22 nt, Homo sapiens
ugagcugguacuaauauuauca

SEQ ID NO: 25017 - RNA, 22 nt, Homo sapiens
acugcacuccagccuucaggac

SEQ ID NO: 25018 - RNA, 22 nt, Homo sapiens
gcauggccuuuaaaugucacag

SEQ ID NO: 25019 - RNA, 22 nt, Homo sapiens
aggcacacaacccuggaccuga

SEQ ID NO: 25020 - RNA, 22 nt, Homo sapiens
uacuggccuugaacucuggugu

SEQ ID NO: 25021 - RNA, 22 nt, Homo sapiens
acugcacuccagcuccagggug

SEQ ID NO: 25022 - RNA, 19 nt, Homo sapiens
uuccugagaacaagggcuu

SEQ ID NO: 25023 - RNA, 22 nt, Homo sapiens
ggcaccacagacgccaggcgug

SEQ ID NO: 25024 - RNA, 22 nt, Homo sapiens
ucacuggcaaauauauccguug

SEQ ID NO: 25025 - RNA, 22 nt, Homo sapiens
aacuggccugagaugaaaagug

SEQ ID NO: 25026 - RNA, 22 nt, Homo sapiens
acugcacuccagccugugagac

SEQ ID NO: 25027 - RNA, 20 nt, Homo sapiens
ucacccugacaucugcccag

SEQ ID NO: 25028 - RNA, 22 nt, Homo sapiens
cuccacugagcaggugggaggc

SEQ ID NO: 25029 - RNA, 21 nt, Homo sapiens
ucaggaccucuaguuagccag

SEQ ID NO: 25030 - RNA, 22 nt, Homo sapiens
cauggcccugggcugggcgaac

SEQ ID NO: 25031 - RNA, 22 nt, Homo sapiens
acccugucacucccaucaauuu

SEQ ID NO: 25032 - RNA, 22 nt, Homo sapiens
cucucugagccauggcugcccu

SEQ ID NO: 25033 - RNA, 22 nt, Homo sapiens
caccagguuggagugcaguggu

SEQ ID NO: 25034 - RNA, 22 nt, Homo sapiens
gacuggccauugauacagaggu

SEQ ID NO: 25035 - RNA, 22 nt, Homo sapiens
gacuggccuauaauggcgaauu

SEQ ID NO: 25036 - RNA, 22 nt, Homo sapiens
uggaggacugcagaacugaggc

SEQ ID NO: 25037 - RNA, 22 nt, Homo sapiens
uggcaccauccaggugucucua

SEQ ID NO: 25038 - RNA, 22 nt, Homo sapiens
caccaggugcccagcacggcca

SEQ ID NO: 25039 - RNA, 22 nt, Homo sapiens
aacuggccuccuugggaaauua

SEQ ID NO: 25040 - RNA, 22 nt, Homo sapiens
gucacugggugcugcgccuguc

SEQ ID NO: 25041 - RNA, 22 nt, Homo sapiens
cugagcccauucuggggagaag

SEQ ID NO: 25042 - RNA, 20 nt, Homo sapiens
acacuggcuuugagauuuag

SEQ ID NO: 25043 - RNA, 22 nt, Homo sapiens
uugggacccuguccuguaacaa

SEQ ID NO: 25044 - RNA, 22 nt, Homo sapiens
aguggcacaauuuugacucccc

SEQ ID NO: 25045 - RNA, 22 nt, Homo sapiens
acagcacugccaagugacccau

SEQ ID NO: 25046 - RNA, 22 nt, Homo sapiens
gcaccacugcacucucagcuug

SEQ ID NO: 25047 - RNA, 22 nt, Homo sapiens
gcacccugucaaaauggaccaa

SEQ ID NO: 25048 - RNA, 22 nt, Homo sapiens
gaggucauucugugguacccag

SEQ ID NO: 25049 - RNA, 22 nt, Homo sapiens
ggcaccauggaaggacgggagc

SEQ ID NO: 25050 - RNA, 22 nt, Homo sapiens
ucugagucaucacaaaugaugc

SEQ ID NO: 25051 - RNA, 22 nt, Homo sapiens
acccugucaaaauggaccaauc

SEQ ID NO: 25052 - RNA, 22 nt, Homo sapiens
acccugucaaaacggaccaauc

SEQ ID NO: 25053 - RNA, 22 nt, Homo sapiens
ucaugggagcccccaucaugag

SEQ ID NO: 25054 - RNA, 22 nt, Homo sapiens
ggucacccugaugcuggugguc

SEQ ID NO: 25055 - RNA, 19 nt, Homo sapiens
agagacucauuguagcauu

SEQ ID NO: 25056 - RNA, 22 nt, Homo sapiens
uuuccauguuggugaaaugagg

SEQ ID NO: 25057 - RNA, 19 nt, Homo sapiens
uuucccugcagaccuacua

SEQ ID NO: 25058 - RNA, 22 nt, Homo sapiens
uuugucauagcagcaggaaugg

SEQ ID NO: 25059 - RNA, 22 nt, Homo sapiens
uuugugauugcacacucaagau

SEQ ID NO: 25060 - RNA, 22 nt, Homo sapiens
uugcaugggagcugggugaggc

SEQ ID NO: 25061 - RNA, 22 nt, Homo sapiens
uugcaugguuuuuaucugaaau

SEQ ID NO: 25062 - RNA, 22 nt, Homo sapiens
uugcaucagcuccugauguacu

SEQ ID NO: 25063 - RNA, 22 nt, Homo sapiens
uuggaaugugacugauaauauu

SEQ ID NO: 25064 - RNA, 23 nt, Homo sapiens
uuggaaugagaccuaagaguuuu

SEQ ID NO: 25065 - RNA, 22 nt, Homo sapiens
uugccauggaguagaauugaag

SEQ ID NO: 25066 - RNA, 20 nt, Homo sapiens
uugaggugugaggggcagag

SEQ ID NO: 25067 - RNA, 22 nt, Homo sapiens
uucuguguuuaggucacggcua

SEQ ID NO: 25068 - RNA, 21 nt, Homo sapiens
uuggccuggaggccugaaugu

SEQ ID NO: 25069 - RNA, 22 nt, Homo sapiens
uuggccuuuucaaugccucuuu

SEQ ID NO: 25070 - RNA, 22 nt, Homo sapiens
uuguacuuuuaguagagacggg

SEQ ID NO: 25071 - RNA, 22 nt, Homo sapiens
uuggccauggagcacuuuucua

SEQ ID NO: 25072 - RNA, 22 nt, Homo sapiens
uuggccauaugacuugcuuugg

SEQ ID NO: 25073 - RNA, 19 nt, Homo sapiens
uuggcccugguucucuucu

SEQ ID NO: 25074 - RNA, 22 nt, Homo sapiens
uuggcauuuuuagucaugggaa

SEQ ID NO: 25075 - RNA, 22 nt, Homo sapiens
uucugcuagucugucagaucuu

SEQ ID NO: 25076 - RNA, 22 nt, Homo sapiens
uucuggccccucccaaucucau

SEQ ID NO: 25077 - RNA, 22 nt, Homo sapiens
uucucgcuuuuuccaccuguau

SEQ ID NO: 25078 - RNA, 22 nt, Homo sapiens
uucugcacaucgaucacaagau

SEQ ID NO: 25079 - RNA, 22 nt, Homo sapiens
uuccuugagagcuugauaucac

SEQ ID NO: 25080 - RNA, 20 nt, Homo sapiens
uucuauggugaugaguccug

SEQ ID NO: 25081 - RNA, 22 nt, Homo sapiens
uucccaguggaacauguaguca

SEQ ID NO: 25082 - RNA, 22 nt, Homo sapiens
uuccaugugggcuugucaagua

SEQ ID NO: 25083 - RNA, 22 nt, Homo sapiens
uucccucagaaacacacagccc

SEQ ID NO: 25084 - RNA, 22 nt, Homo sapiens
uuccaugagaugcaucaaagcu

SEQ ID NO: 25085 - RNA, 23 nt, Homo sapiens
uuccaccauugacuaguuacaua

SEQ ID NO: 25086 - RNA, 22 nt, Homo sapiens
uucaagauggccccagugagcc

SEQ ID NO: 25087 - RNA, 22 nt, Homo sapiens
uucaaaucuuuggcucccacua

SEQ ID NO: 25088 - RNA, 23 nt, Homo sapiens
uucaacagguagacccucccugc

SEQ ID NO: 25089 - RNA, 22 nt, Homo sapiens
uucagcacugaaaauaugucau

SEQ ID NO: 25090 - RNA, 22 nt, Homo sapiens
uucacagcuuaauaaggcucag

SEQ ID NO: 25091 - RNA, 22 nt, Homo sapiens
uuaagaagugauuuuccucauu

SEQ ID NO: 25092 - RNA, 22 nt, Homo sapiens
uuaacagucacuuagcucauuu

SEQ ID NO: 25093 - RNA, 22 nt, Homo sapiens
uuaauucugucugcccucaucc

SEQ ID NO: 25094 - RNA, 19 nt, Homo sapiens
uguugcacauaucaauaug

SEQ ID NO: 25095 - RNA, 22 nt, Homo sapiens
ugugaaacacgaaagucuaaaa

SEQ ID NO: 25096 - RNA, 22 nt, Homo sapiens
ugugaaacauggauagaacugg

SEQ ID NO: 25097 - RNA, 22 nt, Homo sapiens
ugucauguugagaaacuuggau

SEQ ID NO: 25098 - RNA, 22 nt, Homo sapiens
ugucauguggcuaacgauucau

SEQ ID NO: 25099 - RNA, 22 nt, Homo sapiens
uguuaacauggucucagucugu

SEQ ID NO: 25100 - RNA, 22 nt, Homo sapiens
ugugucuugcuggugccugcau

SEQ ID NO: 25101 - RNA, 22 nt, Homo sapiens
uguggcuuuuucuuggcugagg

SEQ ID NO: 25102 - RNA, 18 nt, Homo sapiens
uguggcuguuuuccaaua

SEQ ID NO: 25103 - RNA, 22 nt, Homo sapiens
uguggcuucuuugguucaguau

SEQ ID NO: 25104 - RNA, 22 nt, Homo sapiens
uguggccccuagcuacuagaga

SEQ ID NO: 25105 - RNA, 22 nt, Homo sapiens
uguggccuuuguuucaguuggg

SEQ ID NO: 25106 - RNA, 22 nt, Homo sapiens
ugugcuuguaaaggccagagca

SEQ ID NO: 25107 - RNA, 22 nt, Homo sapiens
ugugcuaauacauacagugcua

SEQ ID NO: 25108 - RNA, 22 nt, Homo sapiens
ugugcuugaauuuaguagcuua

SEQ ID NO: 25109 - RNA, 18 nt, Homo sapiens
ucaauguggauguucuuu

SEQ ID NO: 25110 - RNA, 22 nt, Homo sapiens
ucacccugacaugcggccgaac

SEQ ID NO: 25111 - RNA, 22 nt, Homo sapiens
ucacccuguguuuugcguuugc

SEQ ID NO: 25112 - RNA, 22 nt, Homo sapiens
ucaccguguaucauuucauccg

SEQ ID NO: 25113 - RNA, 22 nt, Homo sapiens
ucacgguggaaucccagauccc

SEQ ID NO: 25114 - RNA, 22 nt, Homo sapiens
ucagaucaguuccacaagaacu

SEQ ID NO: 25115 - RNA, 22 nt, Homo sapiens
ucagaucacuggcgcuggcgga

SEQ ID NO: 25116 - RNA, 22 nt, Homo sapiens
ucagaugcauccauaccccacu

SEQ ID NO: 25117 - RNA, 22 nt, Homo sapiens
ucagcaaugaccuaagcaaaua

SEQ ID NO: 25118 - RNA, 20 nt, Homo sapiens
ucagcagucuggagcagagg

SEQ ID NO: 25119 - RNA, 22 nt, Homo sapiens
ucaguccccucgcugagucuac

SEQ ID NO: 25120 - RNA, 22 nt, Homo sapiens
ucagugcgugcauagccuggau

SEQ ID NO: 25121 - RNA, 22 nt, Homo sapiens
ucagugcuguaccaucuaagga

SEQ ID NO: 25122 - RNA, 22 nt, Homo sapiens
ucccugacagucacagagcuac

SEQ ID NO: 25123 - RNA, 22 nt, Homo sapiens
ucagugucugugauggagaggu

SEQ ID NO: 25124 - RNA, 22 nt, Homo sapiens
uccacaauggcugaacuagauu

SEQ ID NO: 25125 - RNA, 19 nt, Homo sapiens
uccaccgcgugcaccucua

SEQ ID NO: 25126 - RNA, 18 nt, Homo sapiens
uccacgugcuuuccagau

SEQ ID NO: 25127 - RNA, 20 nt, Homo sapiens
uccugagauucccaguucuc

SEQ ID NO: 25128 - RNA, 21 nt, Homo sapiens
uccugagagaggaguaacucu

SEQ ID NO: 25129 - RNA, 22 nt, Homo sapiens
uccucauggagaaccucugcua

SEQ ID NO: 25130 - RNA, 22 nt, Homo sapiens
ucgcagcucacuggagccucga

SEQ ID NO: 25131 - RNA, 19 nt, Homo sapiens
ugagaacaugugguauuug

SEQ ID NO: 25132 - RNA, 22 nt, Homo sapiens
ugacuccagagacugugcuguc

SEQ ID NO: 25133 - RNA, 22 nt, Homo sapiens
ugaacagcuaucuugucagugu

SEQ ID NO: 25134 - RNA, 22 nt, Homo sapiens
ugaagaucauacugguggaggg

SEQ ID NO: 25135 - RNA, 21 nt, Homo sapiens
ugacauguuggugugcugcac

SEQ ID NO: 25136 - RNA, 21 nt, Homo sapiens
ugacauguugguguucugcac

SEQ ID NO: 25137 - RNA, 22 nt, Homo sapiens
ucugugguucaggcuggagugc

SEQ ID NO: 25138 - RNA, 18 nt, Homo sapiens
ucucacagcaaucuguca

SEQ ID NO: 25139 - RNA, 21 nt, Homo sapiens
ugaacacuggacugagugucc

SEQ ID NO: 25140 - RNA, 22 nt, Homo sapiens
ugagacggagucucgcuguguc

SEQ ID NO: 25141 - RNA, 22 nt, Homo sapiens
ugagacggagucuggcacuguc

SEQ ID NO: 25142 - RNA, 22 nt, Homo sapiens
ugagacggagucuugcccuguc

SEQ ID NO: 25143 - RNA, 22 nt, Homo sapiens
ugagggaugccugguuuguuuu

SEQ ID NO: 25144 - RNA, 22 nt, Homo sapiens
ugagguaaaacaaggauuggau

SEQ ID NO: 25145 - RNA, 22 nt, Homo sapiens
ugagguaagauguucauuuuuc

SEQ ID NO: 25146 - RNA, 20 nt, Homo sapiens
ugagcucaauuguugcaagu

SEQ ID NO: 25147 - RNA, 19 nt, Homo sapiens
ugagguauuuguugggaga

SEQ ID NO: 25148 - RNA, 22 nt, Homo sapiens
ugaggucauucaugugggcgca

SEQ ID NO: 25149 - RNA, 22 nt, Homo sapiens
ugcaguaggcccagcgggaggc

SEQ ID NO: 25150 - RNA, 22 nt, Homo sapiens
ugcagugucaauaauaauuagu

SEQ ID NO: 25151 - RNA, 22 nt, Homo sapiens
ugcagugugauuuucuggcuga

SEQ ID NO: 25152 - RNA, 22 nt, Homo sapiens
ugaugucuugcaggcacgagau

SEQ ID NO: 25153 - RNA, 22 nt, Homo sapiens
ugaucugucacuuaucacauuu

SEQ ID NO: 25154 - RNA, 22 nt, Homo sapiens
ugauaugaaagggaaauaagug

SEQ ID NO: 25155 - RNA, 22 nt, Homo sapiens
ugauaugaaguucaaaccaggu

SEQ ID NO: 25156 - RNA, 22 nt, Homo sapiens
ugggcggagacgugcagccgcc

SEQ ID NO: 25157 - RNA, 22 nt, Homo sapiens
uggggugugagggagaaagaaa

SEQ ID NO: 25158 - RNA, 22 nt, Homo sapiens
uggguaggaccagaaaugcacu

SEQ ID NO: 25159 - RNA, 22 nt, Homo sapiens
ugguaugucuagauggggaagu

SEQ ID NO: 25160 - RNA, 22 nt, Homo sapiens
uggcaugucagguuucuggguu

SEQ ID NO: 25161 - RNA, 22 nt, Homo sapiens
uggcauuuugugugaauuagaa

SEQ ID NO: 25162 - RNA, 22 nt, Homo sapiens
uggcaugggguaguagcgcugg

SEQ ID NO: 25163 - RNA, 19 nt, Homo sapiens
ugccauguagcacaugguc

SEQ ID NO: 25164 - RNA, 22 nt, Homo sapiens
ugccagaugugcccucuccacc

SEQ ID NO: 25165 - RNA, 22 nt, Homo sapiens
ugcauggaggagcuccccgcag

SEQ ID NO: 25166 - RNA, 22 nt, Homo sapiens
ugcauggauguuugaacacacu

SEQ ID NO: 25167 - RNA, 20 nt, Homo sapiens
uggaacuuaauugauggaca

SEQ ID NO: 25168 - RNA, 22 nt, Homo sapiens
uggaacacaucuaaggaagcag

SEQ ID NO: 25169 - RNA, 22 nt, Homo sapiens
ugccuaggcuggagugcagugg

SEQ ID NO: 25170 - RNA, 22 nt, Homo sapiens
ugccuaggcuggaguguagugg

SEQ ID NO: 25171 - RNA, 22 nt, Homo sapiens
uggaguauuauguaauuucaau

SEQ ID NO: 25172 - RNA, 22 nt, Homo sapiens
uggaauuuacuuauuuaggggc

SEQ ID NO: 25173 - RNA, 22 nt, Homo sapiens
uacagcacaggugcagguguug

SEQ ID NO: 25174 - RNA, 22 nt, Homo sapiens
uacugcacuccaaccugagaga

SEQ ID NO: 25175 - RNA, 22 nt, Homo sapiens
uacugcacuccagccugccaac

SEQ ID NO: 25176 - RNA, 21 nt, Homo sapiens
uagauaguugguucugaaucu

SEQ ID NO: 25177 - RNA, 22 nt, Homo sapiens
uaauucugacaacaguggcguu

SEQ ID NO: 25178 - RNA, 22 nt, Homo sapiens
uaugaugcuguuuagaaucucu

SEQ ID NO: 25179 - RNA, 22 nt, Homo sapiens
uauugcuuuacucucuuauccu

SEQ ID NO: 25180 - RNA, 22 nt, Homo sapiens
uauugcuggcacauaguagguc

SEQ ID NO: 25181 - RNA, 22 nt, Homo sapiens
uauugcauauuauucuaguggc

SEQ ID NO: 25182 - RNA, 22 nt, Homo sapiens
ucaaaugaucugcccgccuugg

SEQ ID NO: 25183 - RNA, 22 nt, Homo sapiens
ucaaaucaucuuuuccaaagcu

SEQ ID NO: 25184 - RNA, 22 nt, Homo sapiens
uauaugauugguagacccugca

SEQ ID NO: 25185 - RNA, 22 nt, Homo sapiens
uaucagauugcugccaucugcu

SEQ ID NO: 25186 - RNA, 22 nt, Homo sapiens
uagucagcaauguucauguucu

SEQ ID NO: 25187 - RNA, 22 nt, Homo sapiens
uagcagcaucucuggcuucuac

SEQ ID NO: 25188 - RNA, 22 nt, Homo sapiens
uagcagcaaagcaggaucugcu

SEQ ID NO: 25189 - RNA, 22 nt, Homo sapiens
guagaugcauggauuuacuucu

SEQ ID NO: 25190 - RNA, 22 nt, Homo sapiens
ggacaagaucuuccaccauuca

SEQ ID NO: 25191 - RNA, 22 nt, Homo sapiens
ggaauguuaaggcgcuguuggu

SEQ ID NO: 25192 - RNA, 22 nt, Homo sapiens
gucacugggugcugcgccuguc

SEQ ID NO: 25193 - RNA, 22 nt, Homo sapiens
gucaggaugauuuggggaggug

SEQ ID NO: 25194 - RNA, 22 nt, Homo sapiens
guccuugaggcuuugacugugg

SEQ ID NO: 25195 - RNA, 22 nt, Homo sapiens
gucguggagcucacagugugcc

SEQ ID NO: 25196 - RNA, 22 nt, Homo sapiens
gugaucaugauccugaagcauu

SEQ ID NO: 25197 - RNA, 22 nt, Homo sapiens
gugauuauccacgucuuuguga

SEQ ID NO: 25198 - RNA, 22 nt, Homo sapiens
gugauugugaaaacauuaagaa

SEQ ID NO: 25199 - RNA, 21 nt, Homo sapiens
gugaggaguuacuggcuuuga

SEQ ID NO: 25200 - RNA, 22 nt, Homo sapiens
gugaggaaggaaaccugcuagc

SEQ ID NO: 25201 - RNA, 22 nt, Homo sapiens
guguugcacauucuguggaugu

SEQ ID NO: 25202 - RNA, 22 nt, Homo sapiens
gugugguauuauaacuagguau

SEQ ID NO: 25203 - RNA, 22 nt, Homo sapiens
gugucaguggggagugaucuuc

SEQ ID NO: 25204 - RNA, 22 nt, Homo sapiens
guggaggagaaagaagcauuuc

SEQ ID NO: 25205 - RNA, 18 nt, Homo sapiens
guggagugucuuccugga

SEQ ID NO: 25206 - RNA, 22 nt, Homo sapiens
guggaauauaaagcaucgugua

SEQ ID NO: 25207 - RNA, 22 nt, Homo sapiens
auaauugcuaagugaagauggu

SEQ ID NO: 25208 - RNA, 22 nt, Homo sapiens
auaaaccuacauuuucacuucu

SEQ ID NO: 25209 - RNA, 22 nt, Homo sapiens
auagcaaugccccacuccuugg

SEQ ID NO: 25210 - RNA, 22 nt, Homo sapiens
aguaccacgugaugccauuuuc

SEQ ID NO: 25211 - RNA, 22 nt, Homo sapiens
augagacuagaagagaauaaua

SEQ ID NO: 25212 - RNA, 22 nt, Homo sapiens
augaaugcagcacuguuuuucu

SEQ ID NO: 25213 - RNA, 22 nt, Homo sapiens
aucaucaugcacuacagccugg

SEQ ID NO: 25214 - RNA, 22 nt, Homo sapiens
aucaugcacaugcauagguaug

SEQ ID NO: 25215 - RNA, 22 nt, Homo sapiens
auggucuuuauuguguugagug

SEQ ID NO: 25216 - RNA, 22 nt, Homo sapiens
auggucuuuuuguuaugagaga

SEQ ID NO: 25217 - RNA, 20 nt, Homo sapiens
aggcauguugguuugcgugu

SEQ ID NO: 25218 - RNA, 21 nt, Homo sapiens
aggcuguuguuuugggaugga

SEQ ID NO: 25219 - RNA, 22 nt, Homo sapiens
agggagcaaaguggucuuucuc

SEQ ID NO: 25220 - RNA, 21 nt, Homo sapiens
aggagcauucaugacgagguu

SEQ ID NO: 25221 - RNA, 21 nt, Homo sapiens
aggagcauuguugugguggag

SEQ ID NO: 25222 - RNA, 22 nt, Homo sapiens
aggagaucagccucccugcaac

SEQ ID NO: 25223 - RNA, 21 nt, Homo sapiens
aggagauguuuguccuuuuag

SEQ ID NO: 25224 - RNA, 23 nt, Homo sapiens
agcugguacuagaggcuugcgcc

SEQ ID NO: 25225 - RNA, 23 nt, Homo sapiens
aggaaguaacuaucuuuucuguc

SEQ ID NO: 25226 - RNA, 18 nt, Homo sapiens
agcucaguguuugcuuac

SEQ ID NO: 25227 - RNA, 22 nt, Homo sapiens
agcagauguuuagugagcgccu

SEQ ID NO: 25228 - RNA, 19 nt, Homo sapiens
agcagaacaaauguguggg

SEQ ID NO: 25229 - RNA, 22 nt, Homo sapiens
agagguuuuggggcugagagcu

SEQ ID NO: 25230 - RNA, 22 nt, Homo sapiens
agcaccaugggcugaguaagug

SEQ ID NO: 25231 - RNA, 19 nt, Homo sapiens
agccaguuuucccagcacc

SEQ ID NO: 25232 - RNA, 22 nt, Homo sapiens
agcccauuuugcacugagaugc

SEQ ID NO: 25233 - RNA, 16 nt, Homo sapiens
agccaccauuuacuug

SEQ ID NO: 25234 - RNA, 22 nt, Homo sapiens
agccuucauucugacaguagga

SEQ ID NO: 25235 - RNA, 22 nt, Homo sapiens
acccggcaguaauccugcgcgc

SEQ ID NO: 25236 - RNA, 22 nt, Homo sapiens
acccuguaggacuauucuaauc

SEQ ID NO: 25237 - RNA, 22 nt, Homo sapiens
acccuggagagugcuguaguaa

SEQ ID NO: 25238 - RNA, 22 nt, Homo sapiens
acugcacuccagccugugagac

SEQ ID NO: 25239 - RNA, 20 nt, Homo sapiens
accgggugaaacccuaucuc

SEQ ID NO: 25240 - RNA, 22 nt, Homo sapiens
acgcagcacauucacagcuaug

SEQ ID NO: 25241 - RNA, 22 nt, Homo sapiens
aauugcauugaauuuguagcuu

SEQ ID NO: 25242 - RNA, 22 nt, Homo sapiens
aauugcauaugcaguagaucua

SEQ ID NO: 25243 - RNA, 22 nt, Homo sapiens
aauugcaucuguucuuugccag

SEQ ID NO: 25244 - RNA, 22 nt, Homo sapiens
aaggagcuaagagaucauacau

SEQ ID NO: 25245 - RNA, 22 nt, Homo sapiens
aaggaguagacaacauggcgcc

SEQ ID NO: 25246 - RNA, 22 nt, Homo sapiens
aaugccaucagagaaaacucuu

SEQ ID NO: 25247 - RNA, 22 nt, Homo sapiens
aaugcauaauuuguaugaggua

SEQ ID NO: 25248 - RNA, 22 nt, Homo sapiens
aaugcaagauguuaauuauagg

SEQ ID NO: 25249 - RNA, 20 nt, Homo sapiens
gcagcaccauauuucuaaga

SEQ ID NO: 25250 - RNA, 22 nt, Homo sapiens
gauggaguugucgccugggcug

SEQ ID NO: 25251 - RNA, 22 nt, Homo sapiens
gauuccacuuucugucucuaug

SEQ ID NO: 25252 - RNA, 22 nt, Homo sapiens
gcauggauguugauggcugcug

SEQ ID NO: 25253 - RNA, 22 nt, Homo sapiens
gcaugaugaauaauaucacaag

SEQ ID NO: 25254 - RNA, 22 nt, Homo sapiens
gcaggauuggagccucucugaa

SEQ ID NO: 25255 - RNA, 22 nt, Homo sapiens
gcaguagugugaucuuggcuca

SEQ ID NO: 25256 - RNA, 17 nt, Homo sapiens
gcauauguugaaccagc

SEQ ID NO: 25257 - RNA, 22 nt, Homo sapiens
gcaguguuggggccggaggcug

SEQ ID NO: 25258 - RNA, 22 nt, Homo sapiens
gagccggugugauggggcuucu

SEQ ID NO: 25259 - RNA, 22 nt, Homo sapiens
gagcuaguagagugcacccggc

SEQ ID NO: 25260 - RNA, 22 nt, Homo sapiens
gagcaucauggggccaaagcgc

SEQ ID NO: 25261 - RNA, 22 nt, Homo sapiens
gaggagauauucugcuggaugg

SEQ ID NO: 25262 - RNA, 22 nt, Homo sapiens
gaggaaguuuacaaagcaucug

SEQ ID NO: 25263 - RNA, 22 nt, Homo sapiens
gauauguaaaaauuauaucuga

SEQ ID NO: 25264 - RNA, 22 nt, Homo sapiens
gagguagugagcagcugaacua

SEQ ID NO: 25265 - RNA, 22 nt, Homo sapiens
gagguaugauugacauauaaaa

SEQ ID NO: 25266 - RNA, 22 nt, Homo sapiens
gagguaguuaaugcauucacua

SEQ ID NO: 25267 - RNA, 22 nt, Homo sapiens
cucugagccugagguuccuacu

SEQ ID NO: 25268 - RNA, 22 nt, Homo sapiens
cugacauggggauccaccuuag

SEQ ID NO: 25269 - RNA, 22 nt, Homo sapiens
cugguuguuacaugcuugccag

SEQ ID NO: 25270 - RNA, 22 nt, Homo sapiens
cuugacaucugucaguuccuca

SEQ ID NO: 25271 - RNA, 22 nt, Homo sapiens
cuguguaguacuagauugagca

SEQ ID NO: 25272 - RNA, 22 nt, Homo sapiens
cugugguuacguucuuugugcu

SEQ ID NO: 25273 - RNA, 21 nt, Homo sapiens
gaccacagcagggaaugucag

SEQ ID NO: 25274 - RNA, 22 nt, Homo sapiens
gaaugcagcagugacagggcug

SEQ ID NO: 25275 - RNA, 22 nt, Homo sapiens
cuuuugcugggucagcgguggu

SEQ ID NO: 25276 - RNA, 22 nt, Homo sapiens
caccugagcgggaugcucgccu

SEQ ID NO: 25277 - RNA, 22 nt, Homo sapiens
cacugggugccauauguuugcu

SEQ ID NO: 25278 - RNA, 21 nt, Homo sapiens
cacuggguucaggcuugugga

SEQ ID NO: 25279 - RNA, 22 nt, Homo sapiens
cacuggguuagaacaugcuccu

SEQ ID NO: 25280 - RNA, 22 nt, Homo sapiens
cagauguaguauuuuagugaaa

SEQ ID NO: 25281 - RNA, 22 nt, Homo sapiens
cagagaucaugcaacugcucgc

SEQ ID NO: 25282 - RNA, 23 nt, Homo sapiens
caauacugaccucacguuaauag

SEQ ID NO: 25283 - RNA, 22 nt, Homo sapiens
cacagagugagacccugucucu

SEQ ID NO: 25284 - RNA, 19 nt, Homo sapiens
caccgccugcccccugcug

SEQ ID NO: 25285 - RNA, 22 nt, Homo sapiens
auucagaggggcagcugucuug

SEQ ID NO: 25286 - RNA, 22 nt, Homo sapiens
auugcucagucagggagcucgg

SEQ ID NO: 25287 - RNA, 22 nt, Homo sapiens
auugcucaaaucaguacuugag

SEQ ID NO: 25288 - RNA, 20 nt, Homo sapiens
cagcacgcacaugagacugu

SEQ ID NO: 25289 - RNA, 22 nt, Homo sapiens
cauggcccugggcugggcgaac

SEQ ID NO: 25290 - RNA, 22 nt, Homo sapiens
caugggcacugacuugcauucg

SEQ ID NO: 25291 - RNA, 22 nt, Homo sapiens
cauguauagauuccauaguggu

SEQ ID NO: 25292 - RNA, 22 nt, Homo sapiens
ccauugaacaugaaggaaugug

SEQ ID NO: 25293 - RNA, 22 nt, Homo sapiens
ccaucacaggccucagugggaa

SEQ ID NO: 25294 - RNA, 22 nt, Homo sapiens
ccaguucaaugauauggaaacu

SEQ ID NO: 25295 - RNA, 22 nt, Homo sapiens
cauugcaugcauauggcuuggu

SEQ ID NO: 25296 - RNA, 22 nt, Homo sapiens
cuagcagacaggcugggagcag

SEQ ID NO: 25297 - RNA, 19 nt, Homo sapiens
ccuuugguuuccaugacau

SEQ ID NO: 25298 - RNA, 22 nt, Homo sapiens
ccccagugguugcaacagcaga

SEQ ID NO: 25299 - RNA, 22 nt, Homo sapiens
cccagcguucggcauggcugag

SEQ ID NO: 25300 - RNA, 22 nt, Homo sapiens
ccucaguguuuaucauuauuuu

SEQ ID NO: 25301 - RNA, 22 nt, Homo sapiens
cucauugcaaucucugccuccc

SEQ ID NO: 25302 - RNA, 22 nt, Homo sapiens
cucauugcaaucuccaccuccc

SEQ ID NO: 25303 - RNA, 22 nt, Homo sapiens
cucgagagaaaaugcuucacug

SEQ ID NO: 25304 - RNA, 20 nt, Homo sapiens
cucagugcacccccauaaaa

SEQ ID NO: 25305 - RNA, 22 nt, Homo sapiens
aaacugcuuuccaugguggcug

SEQ ID NO: 25306 - RNA, 22 nt, Homo sapiens
aagugcacuguaagugcaggau

SEQ ID NO: 25307 - RNA, 22 nt, Homo sapiens
aagucaaggagagaggcgucag

SEQ ID NO: 25308 - RNA, 22 nt, Homo sapiens
aagcuccauuucugccaugaga

SEQ ID NO: 25309 - RNA, 22 nt, Homo sapiens
aaucaacauuguuuuaagucaa

SEQ ID NO: 25310 - RNA, 22 nt, Homo sapiens
aaaguaauugcaguuuuugcaa

SEQ ID NO: 25311 - RNA, 23 nt, Homo sapiens
aaagacuagucaggugcaguggu

SEQ ID NO: 25312 - RNA, 18 nt, Homo sapiens
aagagcucagcacagguu

SEQ ID NO: 25313 - RNA, 22 nt, Homo sapiens
accaccacucccgcauucuaaa

SEQ ID NO: 25314 - RNA, 22 nt, Homo sapiens
accccugagaucgaaucaugcu

SEQ ID NO: 25315 - RNA, 22 nt, Homo sapiens
acccgcccagguguggccggga

SEQ ID NO: 25316 - RNA, 22 nt, Homo sapiens
acccugaagccaugaguggaac

SEQ ID NO: 25317 - RNA, 19 nt, Homo sapiens
acccuguccccaccuuuac

SEQ ID NO: 25318 - RNA, 22 nt, Homo sapiens
acccugcuaaacagcccccugc

SEQ ID NO: 25319 - RNA, 22 nt, Homo sapiens
acauguaauugauuuuguguua

SEQ ID NO: 25320 - RNA, 22 nt, Homo sapiens
acaugcauauguuggaagaaag

SEQ ID NO: 25321 - RNA, 22 nt, Homo sapiens
agugcaguggcacaaucuuggc

SEQ ID NO: 25322 - RNA, 22 nt, Homo sapiens
aguccagguuuuguaauggcaa

SEQ ID NO: 25323 - RNA, 22 nt, Homo sapiens
aguccaguguuaugaucaguag

SEQ ID NO: 25324 - RNA, 17 nt, Homo sapiens
agugagaucauggcuua

SEQ ID NO: 25325 - RNA, 22 nt, Homo sapiens
agucagauuggcauuuguuggg

SEQ ID NO: 25326 - RNA, 22 nt, Homo sapiens
agugguguugccuguugaccua

SEQ ID NO: 25327 - RNA, 22 nt, Homo sapiens
agugggccccuagaggugaggu

SEQ ID NO: 25328 - RNA, 22 nt, Homo sapiens
agcaagauugauggccugcagg

SEQ ID NO: 25329 - RNA, 22 nt, Homo sapiens
agccaguuuggcuaauuuuggc

SEQ ID NO: 25330 - RNA, 19 nt, Homo sapiens
agcuguguugccugugaga

SEQ ID NO: 25331 - RNA, 22 nt, Homo sapiens
aacaccauuuuucugcagccuu

SEQ ID NO: 25332 - RNA, 22 nt, Homo sapiens
aggcauguggcucuguucugac

SEQ ID NO: 25333 - RNA, 22 nt, Homo sapiens
aggcagaugagguccucagcug

SEQ ID NO: 25334 - RNA, 20 nt, Homo sapiens
aggagcauuuacauuggcuc

SEQ ID NO: 25335 - RNA, 22 nt, Homo sapiens
agcuguuguucucagaggcuuu

SEQ ID NO: 25336 - RNA, 20 nt, Homo sapiens
agcuguuguuaugagguuua

SEQ ID NO: 25337 - RNA, 22 nt, Homo sapiens
auccacaugcaguuggaaacag

SEQ ID NO: 25338 - RNA, 22 nt, Homo sapiens
auccauguggauaaauguguau

SEQ ID NO: 25339 - RNA, 22 nt, Homo sapiens
augaaacuggagcgccuggagg

SEQ ID NO: 25340 - RNA, 22 nt, Homo sapiens
augagacuguucuuccucauug

SEQ ID NO: 25341 - RNA, 22 nt, Homo sapiens
augagacaguucccuuuaucuu

SEQ ID NO: 25342 - RNA, 22 nt, Homo sapiens
augaauuuucugauguugggua

SEQ ID NO: 25343 - RNA, 22 nt, Homo sapiens
augacaagaguguucagggaga

SEQ ID NO: 25344 - RNA, 22 nt, Homo sapiens
augaagaucaugaagacggcuu

SEQ ID NO: 25345 - RNA, 22 nt, Homo sapiens
aucacagcccuccucuuggaug

SEQ ID NO: 25346 - RNA, 20 nt, Homo sapiens
aucaccacagcucguucaug

SEQ ID NO: 25347 - RNA, 22 nt, Homo sapiens
auaugcauacauguaugcagga

SEQ ID NO: 25348 - RNA, 22 nt, Homo sapiens
augugucaaaucuaggccaaag

SEQ ID NO: 25349 - RNA, 22 nt, Homo sapiens
auucaucagggauauuggucug

SEQ ID NO: 25350 - RNA, 22 nt, Homo sapiens
auuccacuuacaugaaguaccu

SEQ ID NO: 25351 - RNA, 22 nt, Homo sapiens
auucaagugaugugauucuucu

SEQ ID NO: 25352 - RNA, 22 nt, Homo sapiens
auuccagauggaguugaggguu

SEQ ID NO: 25353 - RNA, 22 nt, Homo sapiens
auuccauuuguguggaauggcu

SEQ ID NO: 25354 - RNA, 22 nt, Homo sapiens
auuccauagugucuguggcaga

SEQ ID NO: 25355 - RNA, 22 nt, Homo sapiens
auggcaauguaagucagaaaaa

SEQ ID NO: 25356 - RNA, 22 nt, Homo sapiens
augaugucauuuuaauuucuaa

SEQ ID NO: 25357 - RNA, 22 nt, Homo sapiens
augaugcaguacuuugggaaca

SEQ ID NO: 25358 - RNA, 22 nt, Homo sapiens
augauccagugaguuucaguuc

SEQ ID NO: 25359 - RNA, 22 nt, Homo sapiens
augaucacaccacugcacucca

SEQ ID NO: 25360 - RNA, 22 nt, Homo sapiens
augagaugcaagauuagauggg

SEQ ID NO: 25361 - RNA, 22 nt, Homo sapiens
augagauuauguaaagagacca

SEQ ID NO: 25362 - RNA, 22 nt, Homo sapiens
auggcucuguuccaugugucuu

SEQ ID NO: 25363 - RNA, 22 nt, Homo sapiens
augguaucauuacuguuuuauu

SEQ ID NO: 25364 - RNA, 22 nt, Homo sapiens
auggccauuacuaagaauguuu

SEQ ID NO: 25365 - RNA, 22 nt, Homo sapiens
auggcccugcuaccacuuuucu

SEQ ID NO: 25366 - RNA, 20 nt, Homo sapiens
auggcccugcugggaguguc

SEQ ID NO: 25367 - RNA, 22 nt, Homo sapiens
auggccgggugcgguggcucac

SEQ ID NO: 25368 - RNA, 23 nt, Homo sapiens
auggcccuggugggagugucuuu

SEQ ID NO: 25369 - RNA, 22 nt, Homo sapiens
auggccuuuuuaucucaccaag

SEQ ID NO: 25370 - RNA, 22 nt, Homo sapiens
auggcccugggaaaggaggcau

SEQ ID NO: 25371 - RNA, 22 nt, Homo sapiens
aagcaucacuggaggcagccau

SEQ ID NO: 25372 - RNA, 22 nt, Homo sapiens
aagcaccguugccuccccugca

SEQ ID NO: 25373 - RNA, 22 nt, Homo sapiens
aagcacccuuugucuggacaug

SEQ ID NO: 25374 - RNA, 21 nt, Homo sapiens
aagcacauugaguguguguga

SEQ ID NO: 25375 - RNA, 22 nt, Homo sapiens
aagcuggauuuaguguggagca

SEQ ID NO: 25376 - RNA, 22 nt, Homo sapiens
aagcuggauuucgcauccuguu

SEQ ID NO: 25377 - RNA, 20 nt, Homo sapiens
aagagcucaccagaauaucu

SEQ ID NO: 25378 - RNA, 22 nt, Homo sapiens
aagaugauguuguguuuucacu

SEQ ID NO: 25379 - RNA, 22 nt, Homo sapiens
aagaugauguucuuuuucuuag

SEQ ID NO: 25380 - RNA, 22 nt, Homo sapiens
uuuuugugguauauugcaacaa

SEQ ID NO: 25381 - RNA, 22 nt, Homo sapiens
uugugauugagugauccuuguu

SEQ ID NO: 25382 - RNA, 18 nt, Homo sapiens
uugugccugagaaggugg

SEQ ID NO: 25383 - RNA, 22 nt, Homo sapiens
uugugccccuucucagucgggc

SEQ ID NO: 25384 - RNA, 22 nt, Homo sapiens
uugucuccuagacgaccaggcg

SEQ ID NO: 25385 - RNA, 22 nt, Homo sapiens
uuguuaagaugcagauucugga

SEQ ID NO: 25386 - RNA, 22 nt, Homo sapiens
uuuaaaguuagaaggaaagggc

SEQ ID NO: 25387 - RNA, 22 nt, Homo sapiens
uuggcgugaaacagccuuacau

SEQ ID NO: 25388 - RNA, 22 nt, Homo sapiens
uuggcuguguuccucaaggagu

SEQ ID NO: 25389 - RNA, 22 nt, Homo sapiens
uuggcucuggcugggcuccagc

SEQ ID NO: 25390 - RNA, 22 nt, Homo sapiens
uugauauuaaguacugaagugg

SEQ ID NO: 25391 - RNA, 22 nt, Homo sapiens
uuggacugagaguuccaccauu

SEQ ID NO: 25392 - RNA, 22 nt, Homo sapiens
uuggaaugcaacagaaggauaa

SEQ ID NO: 25393 - RNA, 22 nt, Homo sapiens
uugauccucugagaaucuaucg

SEQ ID NO: 25394 - RNA, 22 nt, Homo sapiens
uugaggugaauuugcaggaugc

SEQ ID NO: 25395 - RNA, 22 nt, Homo sapiens
uugagauggaguuucgcucuug

SEQ ID NO: 25396 - RNA, 22 nt, Homo sapiens
uugaccuggagaguacuuugac

SEQ ID NO: 25397 - RNA, 22 nt, Homo sapiens
uugagauggagucucgcacugu

SEQ ID NO: 25398 - RNA, 22 nt, Homo sapiens
uugagauggagucucgcucugu

SEQ ID NO: 25399 - RNA, 22 nt, Homo sapiens
uuccaguggaguaaauggacaa

SEQ ID NO: 25400 - RNA, 22 nt, Homo sapiens
uuccaguaauagcacagcauug

SEQ ID NO: 25401 - RNA, 22 nt, Homo sapiens
uucagcacaguguggaucauuc

SEQ ID NO: 25402 - RNA, 22 nt, Homo sapiens
uucagagcauugguuuuuugaa

SEQ ID NO: 25403 - RNA, 22 nt, Homo sapiens
uucacugggugugguggcucac

SEQ ID NO: 25404 - RNA, 22 nt, Homo sapiens
ugugagaucucagaauugaacu

SEQ ID NO: 25405 - RNA, 21 nt, Homo sapiens
ugugaccucugucucugaguc

SEQ ID NO: 25406 - RNA, 22 nt, Homo sapiens
uuaaguagaugaaugugaaugu

SEQ ID NO: 25407 - RNA, 22 nt, Homo sapiens
uuaaguagcugggcaugguggu

SEQ ID NO: 25408 - RNA, 22 nt, Homo sapiens
uguugcuuaagccacccagucu

SEQ ID NO: 25409 - RNA, 22 nt, Homo sapiens
uguugcauuugucaaggucaag

SEQ ID NO: 25410 - RNA, 22 nt, Homo sapiens
uguugcacuccagccuagguga

SEQ ID NO: 25411 - RNA, 21 nt, Homo sapiens
uuacaauggcuccuugaaggu

SEQ ID NO: 25412 - RNA, 22 nt, Homo sapiens
uuaauuguccauuauucuguuc

SEQ ID NO: 25413 - RNA, 22 nt, Homo sapiens
uuaauuguaucuauagauguca

SEQ ID NO: 25414 - RNA, 22 nt, Homo sapiens
uuauugcuuuugugcaggugag

SEQ ID NO: 25415 - RNA, 22 nt, Homo sapiens
uuaugguuuuucugugagaugg

SEQ ID NO: 25416 - RNA, 20 nt, Homo sapiens
uuaguucauuuagaagguuu

SEQ ID NO: 25417 - RNA, 22 nt, Homo sapiens
uuagaguguagcaggaagaggc

SEQ ID NO: 25418 - RNA, 22 nt, Homo sapiens
ugagaucaaggugggcccuggg

SEQ ID NO: 25419 - RNA, 20 nt, Homo sapiens
ugagauccacgugaaguaug

SEQ ID NO: 25420 - RNA, 22 nt, Homo sapiens
ugagaucgaguaucgcugucac

SEQ ID NO: 25421 - RNA, 22 nt, Homo sapiens
ugagaucgaguuucgcucuugu

SEQ ID NO: 25422 - RNA, 22 nt, Homo sapiens
ugagguaacaaacuaugaguua

SEQ ID NO: 25423 - RNA, 21 nt, Homo sapiens
ugagaguaguguauuauucuc

SEQ ID NO: 25424 - RNA, 22 nt, Homo sapiens
ugagagcuuuuuugccugguga

SEQ ID NO: 25425 - RNA, 22 nt, Homo sapiens
ugagacaucugagauuuuaagc

SEQ ID NO: 25426 - RNA, 22 nt, Homo sapiens
ucgcugggaaccagagguaaag

SEQ ID NO: 25427 - RNA, 22 nt, Homo sapiens
ucgcgccauucuccugccucag

SEQ ID NO: 25428 - RNA, 22 nt, Homo sapiens
uccugagacucacaggcucccc

SEQ ID NO: 25429 - RNA, 22 nt, Homo sapiens
uccgaguguuagagagcugugu

SEQ ID NO: 25430 - RNA, 19 nt, Homo sapiens
ucgcgccauucuccugccu

SEQ ID NO: 25431 - RNA, 22 nt, Homo sapiens
uccuacaugcaguacauucaaa

SEQ ID NO: 25432 - RNA, 22 nt, Homo sapiens
ucucugauuauugcauuucauu

SEQ ID NO: 25433 - RNA, 22 nt, Homo sapiens
ucagaucaugcuuaugauggga

SEQ ID NO: 25434 - RNA, 22 nt, Homo sapiens
ucagaucauuaagguagguuua

SEQ ID NO: 25435 - RNA, 19 nt, Homo sapiens
ucagaucagcccaagggau

SEQ ID NO: 25436 - RNA, 22 nt, Homo sapiens
ucacuggacucuagccugggug

SEQ ID NO: 25437 - RNA, 20 nt, Homo sapiens
ucacuauggagcucuuucuu

SEQ ID NO: 25438 - RNA, 21 nt, Homo sapiens
ucagaagcucccagggaggac

SEQ ID NO: 25439 - RNA, 22 nt, Homo sapiens
ucuguuguuaucauaauauuga

SEQ ID NO: 25440 - RNA, 22 nt, Homo sapiens
ucuguuguuguuuuaagagaca

SEQ ID NO: 25441 - RNA, 17 nt, Homo sapiens
ucuugugguucuugaau

SEQ ID NO: 25442 - RNA, 22 nt, Homo sapiens
ucugagucaucacaaaugaugc

SEQ ID NO: 25443 - RNA, 22 nt, Homo sapiens
ugcuguuguuugaugaaguaau

SEQ ID NO: 25444 - RNA, 22 nt, Homo sapiens
ugcuuaguguugacccucugcc

SEQ ID NO: 25445 - RNA, 20 nt, Homo sapiens
uggagugaagguucuggacc

SEQ ID NO: 25446 - RNA, 22 nt, Homo sapiens
uggacaagugcccuccaccuca

SEQ ID NO: 25447 - RNA, 21 nt, Homo sapiens
uggagugcaacacuagguaua

SEQ ID NO: 25448 - RNA, 22 nt, Homo sapiens
ugcgccauugaacuccuccugg

SEQ ID NO: 25449 - RNA, 22 nt, Homo sapiens
ugcugguauuuggaccagccug

SEQ ID NO: 25450 - RNA, 22 nt, Homo sapiens
ugcugcuguuaucauuuuacca

SEQ ID NO: 25451 - RNA, 22 nt, Homo sapiens
ugcugcuguuguuguuacuagc

SEQ ID NO: 25452 - RNA, 23 nt, Homo sapiens
ugcuccccucauggaugaauaaa

SEQ ID NO: 25453 - RNA, 22 nt, Homo sapiens
ugcuauguuuucccuccuuauc

SEQ ID NO: 25454 - RNA, 22 nt, Homo sapiens
ugauaagaaauuguucauguag

SEQ ID NO: 25455 - RNA, 22 nt, Homo sapiens
ugaguucaauguuaaugaagca

SEQ ID NO: 25456 - RNA, 18 nt, Homo sapiens
ugaguucauuagacuucc

SEQ ID NO: 25457 - RNA, 22 nt, Homo sapiens
ugaguauuugggggaccagaga

SEQ ID NO: 25458 - RNA, 22 nt, Homo sapiens
ugcauguucuuacucauacaug

SEQ ID NO: 25459 - RNA, 20 nt, Homo sapiens
ugcagcacugggaaugcagu

SEQ ID NO: 25460 - RNA, 17 nt, Homo sapiens
ugcagcacacugauggg

SEQ ID NO: 25461 - RNA, 20 nt, Homo sapiens
ugcaaguugccuuuggaggc

SEQ ID NO: 25462 - RNA, 22 nt, Homo sapiens
uguccuguaggaggcagaacaa

SEQ ID NO: 25463 - RNA, 22 nt, Homo sapiens
uguccugaagcuuuguuaugua

SEQ ID NO: 25464 - RNA, 22 nt, Homo sapiens
ugucauguugguguacugcacc

SEQ ID NO: 25465 - RNA, 22 nt, Homo sapiens
uguauguugggucaaaguacau

SEQ ID NO: 25466 - RNA, 22 nt, Homo sapiens
ugucaaaugcagugauauuuga

SEQ ID NO: 25467 - RNA, 22 nt, Homo sapiens
ugucaccuugcucauccucgga

SEQ ID NO: 25468 - RNA, 22 nt, Homo sapiens
ugucagggaggcucggccgcac

SEQ ID NO: 25469 - RNA, 22 nt, Homo sapiens
ugucaggaggguccagagaaaa

SEQ ID NO: 25470 - RNA, 22 nt, Homo sapiens
ugucagcacaacucagguuccu

SEQ ID NO: 25471 - RNA, 22 nt, Homo sapiens
ugucagaaucuagaggcugcua

SEQ ID NO: 25472 - RNA, 22 nt, Homo sapiens
ugucaucauuggaaucugccuc

SEQ ID NO: 25473 - RNA, 18 nt, Homo sapiens
uguaaacuaccucaaccu

SEQ ID NO: 25474 - RNA, 22 nt, Homo sapiens
uguaaacuaugagcugauuauu

SEQ ID NO: 25475 - RNA, 22 nt, Homo sapiens
uggggucguaggugcccgccag

SEQ ID NO: 25476 - RNA, 22 nt, Homo sapiens
uggcauguauuuuguguauuaa

SEQ ID NO: 25477 - RNA, 22 nt, Homo sapiens
uggaguuugacaugccuuuggg

SEQ ID NO: 25478 - RNA, 20 nt, Homo sapiens
uggaguuugaguucuuggag

SEQ ID NO: 25479 - RNA, 22 nt, Homo sapiens
ugggagcauugcauuagaagcc

SEQ ID NO: 25480 - RNA, 22 nt, Homo sapiens
uggccuguaacccucucauagg

SEQ ID NO: 25481 - RNA, 22 nt, Homo sapiens
uggcgagaaaccauaugcuuuc

SEQ ID NO: 25482 - RNA, 22 nt, Homo sapiens
uggccuguaacgcugucucagc

SEQ ID NO: 25483 - RNA, 22 nt, Homo sapiens
gagcaucaguggccucaucuca

SEQ ID NO: 25484 - RNA, 22 nt, Homo sapiens
gagcaucauucaacaaaagucu

SEQ ID NO: 25485 - RNA, 22 nt, Homo sapiens
gagcuuguagugugaaugguau

SEQ ID NO: 25486 - RNA, 22 nt, Homo sapiens
gacuggagcuguaugugguuac

SEQ ID NO: 25487 - RNA, 21 nt, Homo sapiens
gacauggcgauacuccgucuc

SEQ ID NO: 25488 - RNA, 20 nt, Homo sapiens
cuuuuugcugugcugggagc

SEQ ID NO: 25489 - RNA, 22 nt, Homo sapiens
gaaagacuuucugcuguggaua

SEQ ID NO: 25490 - RNA, 22 nt, Homo sapiens
cuuuuguggaucuucuguugcu

SEQ ID NO: 25491 - RNA, 22 nt, Homo sapiens
gaacccuggaggcggagguugc

SEQ ID NO: 25492 - RNA, 22 nt, Homo sapiens
gacaguuucucaggcuuccuua

SEQ ID NO: 25493 - RNA, 19 nt, Homo sapiens
cuguggucauuauuuugcu

SEQ ID NO: 25494 - RNA, 23 nt, Homo sapiens
cuguggugaggcccuagaaucug

SEQ ID NO: 25495 - RNA, 22 nt, Homo sapiens
cugugguguaacucuuggggcg

SEQ ID NO: 25496 - RNA, 17 nt, Homo sapiens
cugugaugaucuugucu

SEQ ID NO: 25497 - RNA, 22 nt, Homo sapiens
gcaugauuuuauaucuauguaa

SEQ ID NO: 25498 - RNA, 22 nt, Homo sapiens
gcuaggagaucugcugcucucu

SEQ ID NO: 25499 - RNA, 21 nt, Homo sapiens
gccaguguggcaauuuuucaa

SEQ ID NO: 25500 - RNA, 22 nt, Homo sapiens
gcaccacugcacucucagcuug

SEQ ID NO: 25501 - RNA, 22 nt, Homo sapiens
gcacccugucaaaauggaccaa

SEQ ID NO: 25502 - RNA, 22 nt, Homo sapiens
gcaucaaugucuauaguguuug

SEQ ID NO: 25503 - RNA, 17 nt, Homo sapiens
gcauauguugaaccagu

SEQ ID NO: 25504 - RNA, 22 nt, Homo sapiens
gcagaauugacucuguuuuuuc

SEQ ID NO: 25505 - RNA, 22 nt, Homo sapiens
gaguggugguucugaaacuuuu

SEQ ID NO: 25506 - RNA, 22 nt, Homo sapiens
gagugguucuauauguaauugg

SEQ ID NO: 25507 - RNA, 18 nt, Homo sapiens
gauguaguauggugugga

SEQ ID NO: 25508 - RNA, 22 nt, Homo sapiens
gauguguuuaucacccaguccu

SEQ ID NO: 25509 - RNA, 22 nt, Homo sapiens
gauguguuuuaggaucucagca

SEQ ID NO: 25510 - RNA, 22 nt, Homo sapiens
gcucaguuuccucagcugcaaa

SEQ ID NO: 25511 - RNA, 16 nt, Homo sapiens
gcuguuguuuuguccu

SEQ ID NO: 25512 - RNA, 18 nt, Homo sapiens
gcuguugucagagcacau

SEQ ID NO: 25513 - RNA, 22 nt, Homo sapiens
gcugauggugcaguucuagccu

SEQ ID NO: 25514 - RNA, 22 nt, Homo sapiens
gcuuuggauaaaugucaguuua

SEQ ID NO: 25515 - RNA, 22 nt, Homo sapiens
ggagugucccaaucucagcuca

SEQ ID NO: 25516 - RNA, 22 nt, Homo sapiens
ggagcugugauuugaguccaga

SEQ ID NO: 25517 - RNA, 22 nt, Homo sapiens
ggaguaggcuguccggcaccca

SEQ ID NO: 25518 - RNA, 22 nt, Homo sapiens
ggagguagguuugugauuugua

SEQ ID NO: 25519 - RNA, 22 nt, Homo sapiens
ggagaucacucuuuguagcgug

SEQ ID NO: 25520 - RNA, 22 nt, Homo sapiens
caguagcaugccucagaaugag

SEQ ID NO: 25521 - RNA, 19 nt, Homo sapiens
caugccacugcacuugagu

SEQ ID NO: 25522 - RNA, 20 nt, Homo sapiens
cagggcaaugaggagguaaa

SEQ ID NO: 25523 - RNA, 22 nt, Homo sapiens
cagggcaugugggucuauuggc

SEQ ID NO: 25524 - RNA, 20 nt, Homo sapiens
cauuccacuuuccugucagu

SEQ ID NO: 25525 - RNA, 22 nt, Homo sapiens
cauugcaugccagccugggcaa

SEQ ID NO: 25526 - RNA, 22 nt, Homo sapiens
cauugcauuccagucugggcaa

SEQ ID NO: 25527 - RNA, 22 nt, Homo sapiens
cauugcauuuucuuuguaccuu

SEQ ID NO: 25528 - RNA, 22 nt, Homo sapiens
cauggcuuuuauaacaagaaau

SEQ ID NO: 25529 - RNA, 22 nt, Homo sapiens
cauguaacaucccgcuguagga

SEQ ID NO: 25530 - RNA, 22 nt, Homo sapiens
cauggcccuggguccauaggaa

SEQ ID NO: 25531 - RNA, 19 nt, Homo sapiens
caugauacugcucccucuc

SEQ ID NO: 25532 - RNA, 22 nt, Homo sapiens
cacagucugggcuuguuuguac

SEQ ID NO: 25533 - RNA, 22 nt, Homo sapiens
caagagaccugagugucauucu

SEQ ID NO: 25534 - RNA, 22 nt, Homo sapiens
caaugcagcuuuuggagagaaa

SEQ ID NO: 25535 - RNA, 22 nt, Homo sapiens
cacauagucccugcuaaucuuc

SEQ ID NO: 25536 - RNA, 22 nt, Homo sapiens
cagaucaucuugagcuuaggaa

SEQ ID NO: 25537 - RNA, 23 nt, Homo sapiens
cuccaugagccguccagggccug

SEQ ID NO: 25538 - RNA, 22 nt, Homo sapiens
cucccacccucauuuuuaggca

SEQ ID NO: 25539 - RNA, 22 nt, Homo sapiens
cuagcagacacuuccagagagu

SEQ ID NO: 25540 - RNA, 22 nt, Homo sapiens
ccaggguuccacgccuggcugu

SEQ ID NO: 25541 - RNA, 22 nt, Homo sapiens
ccagugaacugcaagguuuuuc

SEQ ID NO: 25542 - RNA, 20 nt, Homo sapiens
cguugcacuccagccugggc

SEQ ID NO: 25543 - RNA, 22 nt, Homo sapiens
cguugcacuccagccugggcaa

SEQ ID NO: 25544 - RNA, 22 nt, Homo sapiens
cugaccuaugauuuggcucaaa

SEQ ID NO: 25545 - RNA, 23 nt, Homo sapiens
cucccugaacaugacacaccaga

SEQ ID NO: 25546 - RNA, 22 nt, Homo sapiens
cugaggauauucagccucugug

SEQ ID NO: 25547 - RNA, 22 nt, Homo sapiens
cugagaucguggggcugcuguc

SEQ ID NO: 25548 - RNA, 22 nt, Homo sapiens
cuggaguaugauguuagcguug

SEQ ID NO: 25549 - RNA, 22 nt, Homo sapiens
uacugcagucagacuccugggc

SEQ ID NO: 25550 - RNA, 22 nt, Homo sapiens
uagaagcuacucuucuuguggc

SEQ ID NO: 25551 - RNA, 20 nt, Homo sapiens
uaagccacacagucuaaggu

SEQ ID NO: 25552 - RNA, 22 nt, Homo sapiens
uaacccuuacaacuacacucgu

SEQ ID NO: 25553 - RNA, 22 nt, Homo sapiens
uaccacagucauuacacuugua

SEQ ID NO: 25554 - RNA, 22 nt, Homo sapiens
uaccacccuuuuuccagaagcc

SEQ ID NO: 25555 - RNA, 21 nt, Homo sapiens
uagcuacacugugauucaugg

SEQ ID NO: 25556 - RNA, 22 nt, Homo sapiens
uagcugcauccugugcacucaa

SEQ ID NO: 25557 - RNA, 21 nt, Homo sapiens
uagcugcacccaggccuccuu

SEQ ID NO: 25558 - RNA, 21 nt, Homo sapiens
ucacaaugaacagcagcagaa

SEQ ID NO: 25559 - RNA, 22 nt, Homo sapiens
ucacaugucagccguggggaag

SEQ ID NO: 25560 - RNA, 22 nt, Homo sapiens
ucaccaccuuccaggaccacug

SEQ ID NO: 25561 - RNA, 20 nt, Homo sapiens
ucacccugacaucugcccag

SEQ ID NO: 25562 - RNA, 22 nt, Homo sapiens
ucaccuggggcacagcugaaga

SEQ ID NO: 25563 - RNA, 20 nt, Homo sapiens
ucaaagacauggcugucaga

SEQ ID NO: 25564 - RNA, 20 nt, Homo sapiens
ucaaaguaugcucugcacua

SEQ ID NO: 25565 - RNA, 22 nt, Homo sapiens
ucaaaugauucuccugccucag

SEQ ID NO: 25566 - RNA, 22 nt, Homo sapiens
uauugcauuugagguugguuga

SEQ ID NO: 25567 - RNA, 22 nt, Homo sapiens
uauugcauguugagcaguaccu

SEQ ID NO: 25568 - RNA, 20 nt, Homo sapiens
uaugaaacaguguagagcaa

SEQ ID NO: 25569 - RNA, 22 nt, Homo sapiens
ggcaugcauuguacuaguaugc

SEQ ID NO: 25570 - RNA, 22 nt, Homo sapiens
gucagaaucucagaugacaacg

SEQ ID NO: 25571 - RNA, 22 nt, Homo sapiens
gucaggcaccgauacaguuuuu

SEQ ID NO: 25572 - RNA, 22 nt, Homo sapiens
gucagcaaaguucuccugcaga

SEQ ID NO: 25573 - RNA, 22 nt, Homo sapiens
gucucauugcaguuagaccugu

SEQ ID NO: 25574 - RNA, 22 nt, Homo sapiens
gucagcaucaccaugucuauga

SEQ ID NO: 25575 - RNA, 22 nt, Homo sapiens
gucagaugcagauuccaguucu

SEQ ID NO: 25576 - RNA, 22 nt, Homo sapiens
gucagauaauuugcauccaucu

SEQ ID NO: 25577 - RNA, 22 nt, Homo sapiens
guguggcaggugggggcucaga

SEQ ID NO: 25578 - RNA, 22 nt, Homo sapiens
gugugucuugaccaggaucgga

SEQ ID NO: 25579 - RNA, 22 nt, Homo sapiens
guguuaaucucaaguacucuca

SEQ ID NO: 25580 - RNA, 22 nt, Homo sapiens
gugguaguagaauuucggaaau

SEQ ID NO: 25581 - RNA, 22 nt, Homo sapiens
guggaguacugagggucacuua

SEQ ID NO: 25582 - RNA, 22 nt, Homo sapiens
gugguuguuggaguggcaauuu

SEQ ID NO: 25583 - RNA, 22 nt, Homo sapiens
guggugucuuguuuaauauaua

SEQ ID NO: 25584 - RNA, 22 nt, Homo sapiens
gugaguuauuauuuauguaaac

SEQ ID NO: 25585 - RNA, 17 nt, Homo sapiens
gugagguggguaguauc

SEQ ID NO: 25586 - RNA, 22 nt, Homo sapiens
guggaagucuuugguauuggua

SEQ ID NO: 25587 - RNA, 22 nt, Homo sapiens
guggagcuguguggccuugggc

SEQ ID NO: 25588 - RNA, 22 nt, Homo sapiens
guggaggacuggauaaagaaaa

SEQ ID NO: 25589 - RNA, 22 nt, Homo sapiens
guugaacaauagauucauauca

SEQ ID NO: 25590 - RNA, 22 nt, Homo sapiens
uaaacugucuuuggagcuuugc

SEQ ID NO: 25591 - RNA, 19 nt, Homo sapiens
uuugcauagugagaauaua

SEQ ID NO: 25592 - RNA, 22 nt, Homo sapiens
uuugcauauguugaaccagccu

SEQ ID NO: 25593 - RNA, 22 nt, Homo sapiens
uuucuugguuguauuuagacuu

SEQ ID NO: 25594 - RNA, 22 nt, Homo sapiens
uucaugcaucuguagugguuaa

SEQ ID NO: 25595 - RNA, 22 nt, Homo sapiens
uugaaagucauggcacaggcaa

SEQ ID NO: 25596 - RNA, 22 nt, Homo sapiens
uucaucagcuguagaugucaug

SEQ ID NO: 25597 - RNA, 22 nt, Homo sapiens
uucaucagggagaaauaauuuc

SEQ ID NO: 25598 - RNA, 22 nt, Homo sapiens
uucagaugcacacuguagucua

SEQ ID NO: 25599 - RNA, 22 nt, Homo sapiens
uucagaucaucccagcuccacu

SEQ ID NO: 25600 - RNA, 22 nt, Homo sapiens
uugacugggccagacagagauc

SEQ ID NO: 25601 - RNA, 22 nt, Homo sapiens
uugagauggagucucgcucuuu

SEQ ID NO: 25602 - RNA, 22 nt, Homo sapiens
uugagauggagucuugcacugu

SEQ ID NO: 25603 - RNA, 22 nt, Homo sapiens
uugagauguggguuggugacuu

SEQ ID NO: 25604 - RNA, 22 nt, Homo sapiens
uugagauggaguuucgcucuuu

SEQ ID NO: 25605 - RNA, 22 nt, Homo sapiens
uugauuagugacuggcuacacg

SEQ ID NO: 25606 - RNA, 22 nt, Homo sapiens
uugcacucuccagccucggcaa

SEQ ID NO: 25607 - RNA, 22 nt, Homo sapiens
uugcacuccagccugggugaca

SEQ ID NO: 25608 - RNA, 22 nt, Homo sapiens
uugcaccuugaagccaauagca

SEQ ID NO: 25609 - RNA, 22 nt, Homo sapiens
uugcacuauuaguauagauguc

SEQ ID NO: 25610 - RNA, 22 nt, Homo sapiens
uuucuacagugaacgauuucua

SEQ ID NO: 25611 - RNA, 22 nt, Homo sapiens
uuguccuccacauuugaucagu

SEQ ID NO: 25612 - RNA, 22 nt, Homo sapiens
uuggucaggcuagaguguggug

SEQ ID NO: 25613 - RNA, 22 nt, Homo sapiens
uuagcucaguuggugagagcgu

SEQ ID NO: 25614 - RNA, 22 nt, Homo sapiens
uuaugguuuuuagcagaguaau

SEQ ID NO: 25615 - RNA, 22 nt, Homo sapiens
uuaugguuuucucucacgcagg

SEQ ID NO: 25616 - RNA, 22 nt, Homo sapiens
uuauggccauucuuguaggagu

SEQ ID NO: 25617 - RNA, 22 nt, Homo sapiens
uguguaaauauauacacacgug

SEQ ID NO: 25618 - RNA, 22 nt, Homo sapiens
ugucaguggucuggaugcagcc

SEQ ID NO: 25619 - RNA, 22 nt, Homo sapiens
ugucaguguacuguaagaauua

SEQ ID NO: 25620 - RNA, 22 nt, Homo sapiens
uguauguugauguuauauucug

SEQ ID NO: 25621 - RNA, 22 nt, Homo sapiens
ugugauggaguuucauggacug

SEQ ID NO: 25622 - RNA, 22 nt, Homo sapiens
ugugaugguuuggaagcuucuu

SEQ ID NO: 25623 - RNA, 16 nt, Homo sapiens
ugugaucuuuuuucuu

SEQ ID NO: 25624 - RNA, 22 nt, Homo sapiens
ugucucggagaucucucaaagu

SEQ ID NO: 25625 - RNA, 22 nt, Homo sapiens
uguccugcagagguguuugccu

SEQ ID NO: 25626 - RNA, 22 nt, Homo sapiens
ugguuagucuguguguauauau

SEQ ID NO: 25627 - RNA, 22 nt, Homo sapiens
uggugcuugaugaggguggagc

SEQ ID NO: 25628 - RNA, 22 nt, Homo sapiens
uggcuccguuguacaggcugga

SEQ ID NO: 25629 - RNA, 22 nt, Homo sapiens
uggcgggaaaguugggagaaga

SEQ ID NO: 25630 - RNA, 22 nt, Homo sapiens
uggugccguccugcaauccugg

SEQ ID NO: 25631 - RNA, 22 nt, Homo sapiens
uguaauuuaaaugauccuugga

SEQ ID NO: 25632 - RNA, 22 nt, Homo sapiens
uguaaaccauauauguauguag

SEQ ID NO: 25633 - RNA, 20 nt, Homo sapiens
uguagguguacaguaaggag

SEQ ID NO: 25634 - RNA, 22 nt, Homo sapiens
uguagguguacauacaugguua

SEQ ID NO: 25635 - RNA, 22 nt, Homo sapiens
auugcaguuagaacagaagucu

SEQ ID NO: 25636 - RNA, 22 nt, Homo sapiens
auuguacuccagccugggcuaa

SEQ ID NO: 25637 - RNA, 22 nt, Homo sapiens
auuguacuccagccugggcugc

SEQ ID NO: 25638 - RNA, 22 nt, Homo sapiens
auugaacacuucugugugccag

SEQ ID NO: 25639 - RNA, 22 nt, Homo sapiens
auugaacaugccauauguacca

SEQ ID NO: 25640 - RNA, 22 nt, Homo sapiens
cacagggcuaacauuuuugccc

SEQ ID NO: 25641 - RNA, 22 nt, Homo sapiens
caacagucagcccauccacaga

SEQ ID NO: 25642 - RNA, 22 nt, Homo sapiens
cacagcacaggcaugaguguca

SEQ ID NO: 25643 - RNA, 22 nt, Homo sapiens
auuccacagccgauaccaugac

SEQ ID NO: 25644 - RNA, 22 nt, Homo sapiens
auuccauaguacagugaugagu

SEQ ID NO: 25645 - RNA, 22 nt, Homo sapiens
auggccugaugcaccuguccca

SEQ ID NO: 25646 - RNA, 22 nt, Homo sapiens
auggccuuguauaccuggcaaa

SEQ ID NO: 25647 - RNA, 22 nt, Homo sapiens
auggcccuguguggagcugcug

SEQ ID NO: 25648 - RNA, 22 nt, Homo sapiens
auggcccugaguucaauauauu

SEQ ID NO: 25649 - RNA, 22 nt, Homo sapiens
caucacaguacuaaucgucaua

SEQ ID NO: 25650 - RNA, 19 nt, Homo sapiens
caucacagagucuuccauu

SEQ ID NO: 25651 - RNA, 23 nt, Homo sapiens
cagugcaugacuguauaugcaaa

SEQ ID NO: 25652 - RNA, 20 nt, Homo sapiens
cagugcauugcuucugauuu

SEQ ID NO: 25653 - RNA, 22 nt, Homo sapiens
caguucaugguaggcaccauag

SEQ ID NO: 25654 - RNA, 22 nt, Homo sapiens
caguacaauguggaaaaggagu

SEQ ID NO: 25655 - RNA, 22 nt, Homo sapiens
cagcuggugcugcaccaguggg

SEQ ID NO: 25656 - RNA, 22 nt, Homo sapiens
cagcuugugguauugcugguug

SEQ ID NO: 25657 - RNA, 22 nt, Homo sapiens
cagcuguuguuaugucugcagg

SEQ ID NO: 25658 - RNA, 19 nt, Homo sapiens
ccucaaguacuaauauguu

SEQ ID NO: 25659 - RNA, 22 nt, Homo sapiens
cgccgggggaugggcaccagcg

SEQ ID NO: 25660 - RNA, 22 nt, Homo sapiens
cuaaaacuuucugagugcagca

SEQ ID NO: 25661 - RNA, 22 nt, Homo sapiens
cgcuggugucuaagcgacagcu

SEQ ID NO: 25662 - RNA, 22 nt, Homo sapiens
cggcaguggguaagccaagcuu

SEQ ID NO: 25663 - RNA, 22 nt, Homo sapiens
cccgugucuuggucuagggccu

SEQ ID NO: 25664 - RNA, 22 nt, Homo sapiens
ccagcaccauuuguugaauagg

SEQ ID NO: 25665 - RNA, 22 nt, Homo sapiens
ccacauuaccuugcuugcucca

SEQ ID NO: 25666 - RNA, 22 nt, Homo sapiens
cauggagcuaggcuugaucccu

SEQ ID NO: 25667 - RNA, 22 nt, Homo sapiens
caugccacugcacuccaaccug

SEQ ID NO: 25668 - RNA, 23 nt, Homo sapiens
caugaacuaguuugcagccauga

SEQ ID NO: 25669 - RNA, 22 nt, Homo sapiens
caugacacuggcauguuucuuu

SEQ ID NO: 25670 - RNA, 22 nt, Homo sapiens
caugcagcacacaugucugugc

SEQ ID NO: 25671 - RNA, 22 nt, Homo sapiens
cugagagaugagaccucucacu

SEQ ID NO: 25672 - RNA, 20 nt, Homo sapiens
cucagauuauucugaagcaa

SEQ ID NO: 25673 - RNA, 22 nt, Homo sapiens
cuacugcacaucaucugaguua

SEQ ID NO: 25674 - RNA, 22 nt, Homo sapiens
cugagguaggugaucagugcuu

SEQ ID NO: 25675 - RNA, 22 nt, Homo sapiens
cugcuguuguuaacuuuuggag

SEQ ID NO: 25676 - RNA, 22 nt, Homo sapiens
cugcaagaugcauaggaauuuu

SEQ ID NO: 25677 - RNA, 22 nt, Homo sapiens
cugcaauggagaaagugagacu

SEQ ID NO: 25678 - RNA, 20 nt, Homo sapiens
cugcacauccacucuacuuc

SEQ ID NO: 25679 - RNA, 20 nt, Homo sapiens
cuuaucaguggcaaguauaa

SEQ ID NO: 25680 - RNA, 22 nt, Homo sapiens
cuuguggugcuuuuacgugggc

SEQ ID NO: 25681 - RNA, 22 nt, Homo sapiens
cuuuaguugucuccucaagggu

SEQ ID NO: 25682 - RNA, 22 nt, Homo sapiens
cuguugcaguuauggcugcagg

SEQ ID NO: 25683 - RNA, 22 nt, Homo sapiens
cuggaguuugaggcugcaguga

SEQ ID NO: 25684 - RNA, 20 nt, Homo sapiens
cuggaucaucaguaaaguua

SEQ ID NO: 25685 - RNA, 22 nt, Homo sapiens
gagugcaauggcaagaucuugg

SEQ ID NO: 25686 - RNA, 22 nt, Homo sapiens
gagucagugucuugcucuguca

SEQ ID NO: 25687 - RNA, 22 nt, Homo sapiens
gagauggugugcuguuggaagu

SEQ ID NO: 25688 - RNA, 22 nt, Homo sapiens
gagguguaaggacaacagagac

SEQ ID NO: 25689 - RNA, 22 nt, Homo sapiens
gaggugaaggucucaauaaaua

SEQ ID NO: 25690 - RNA, 22 nt, Homo sapiens
gauguguuuccaggauuuguuu

SEQ ID NO: 25691 - RNA, 22 nt, Homo sapiens
gaucacauuguuucauacauau

SEQ ID NO: 25692 - RNA, 22 nt, Homo sapiens
gacaguuuggugaggaagacga

SEQ ID NO: 25693 - RNA, 22 nt, Homo sapiens
gacugcauuugccccaucgaau

SEQ ID NO: 25694 - RNA, 22 nt, Homo sapiens
gagaugauuugccccauguauu

SEQ ID NO: 25695 - RNA, 22 nt, Homo sapiens
gagaugaaaucuugcucuguca

SEQ ID NO: 25696 - RNA, 22 nt, Homo sapiens
gagaugaugagauguucacagu

SEQ ID NO: 25697 - RNA, 22 nt, Homo sapiens
uuuguggaaugcucauguguag

SEQ ID NO: 25698 - RNA, 22 nt, Homo sapiens
uuuuaugggcuauuugcauuag

SEQ ID NO: 25699 - RNA, 22 nt, Homo sapiens
aaguaauugagguuuuugcugu

SEQ ID NO: 25700 - RNA, 22 nt, Homo sapiens
aaucagcacacugugcuuucca

SEQ ID NO: 25701 - RNA, 22 nt, Homo sapiens
aauggccuuuuucauuauacug

SEQ ID NO: 25702 - RNA, 22 nt, Homo sapiens
acacgggugccggcaucagcac

SEQ ID NO: 25703 - RNA, 22 nt, Homo sapiens
acacagucaaauccacuuggcu

SEQ ID NO: 25704 - RNA, 21 nt, Homo sapiens
acuuuguugggggcugaggca

SEQ ID NO: 25705 - RNA, 22 nt, Homo sapiens
acugcacuccagccuaggcgac

SEQ ID NO: 25706 - RNA, 22 nt, Homo sapiens
acauugcagauguguuuaaugu

SEQ ID NO: 25707 - RNA, 18 nt, Homo sapiens
acaguguguaaggguucu

SEQ ID NO: 25708 - RNA, 17 nt, Homo sapiens
accccuaccucagaagc

SEQ ID NO: 25709 - RNA, 22 nt, Homo sapiens
accccgagacugccaagaaucc

SEQ ID NO: 25710 - RNA, 22 nt, Homo sapiens
agaagaacauagggugacugaa

SEQ ID NO: 25711 - RNA, 22 nt, Homo sapiens
agaucacaguaccguaaggcug

SEQ ID NO: 25712 - RNA, 22 nt, Homo sapiens
agauacaucuaugugucugugu

SEQ ID NO: 25713 - RNA, 16 nt, Homo sapiens
agcagguguuagguga

SEQ ID NO: 25714 - RNA, 22 nt, Homo sapiens
agcagugucauuuucuggugag

SEQ ID NO: 25715 - RNA, 22 nt, Homo sapiens
agauguuguucaucugauuguu

SEQ ID NO: 25716 - RNA, 22 nt, Homo sapiens
agauggucuucauaaguuuuaa

SEQ ID NO: 25717 - RNA, 22 nt, Homo sapiens
auagcauagucagcuucgcuga

SEQ ID NO: 25718 - RNA, 20 nt, Homo sapiens
auagaagacuagugcagcag

SEQ ID NO: 25719 - RNA, 22 nt, Homo sapiens
auagcccauuuguugguccugg

SEQ ID NO: 25720 - RNA, 17 nt, Homo sapiens
auaugaauuuuggagau

SEQ ID NO: 25721 - RNA, 20 nt, Homo sapiens
auaugcauguguuuucacuu

SEQ ID NO: 25722 - RNA, 22 nt, Homo sapiens
agugucaggagacagguagcug

SEQ ID NO: 25723 - RNA, 22 nt, Homo sapiens
aguggugucugaguggccaggg

SEQ ID NO: 25724 - RNA, 22 nt, Homo sapiens
aguggauguuguggccugggag

SEQ ID NO: 25725 - RNA, 22 nt, Homo sapiens
agugguaguacaggagauaccg

SEQ ID NO: 25726 - RNA, 22 nt, Homo sapiens
agcuguuguuuuaagauacuaa

SEQ ID NO: 25727 - RNA, 22 nt, Homo sapiens
agucaaaugcuuauguauaaag

SEQ ID NO: 25728 - RNA, 22 nt, Homo sapiens
aguaucaucuuguuggccaggc

SEQ ID NO: 25729 - RNA, 22 nt, Homo sapiens
agcuggucuuggggaagaguag

SEQ ID NO: 25730 - RNA, 22 nt, Homo sapiens
agcaugauugggguugggcaca

SEQ ID NO: 25731 - RNA, 22 nt, Homo sapiens
agcuguuguacacuuuaccuuu

SEQ ID NO: 25732 - RNA, 22 nt, Homo sapiens
agcuguuguuaauuaacucauu

SEQ ID NO: 25733 - RNA, 20 nt, Homo sapiens
agcuguuguuaaaaaggagg

SEQ ID NO: 25734 - RNA, 22 nt, Homo sapiens
augaaacuggcuaauuuuugua

SEQ ID NO: 25735 - RNA, 22 nt, Homo sapiens
augaccuuguccucagugucau

SEQ ID NO: 25736 - RNA, 22 nt, Homo sapiens
augaucauggaaguuuuccugu

SEQ ID NO: 25737 - RNA, 22 nt, Homo sapiens
augaugaaguaagugcuuagga

SEQ ID NO: 25738 - RNA, 22 nt, Homo sapiens
augacguugugggcucucaagc

SEQ ID NO: 25739 - RNA, 22 nt, Homo sapiens
augaugcugcaguuguugccaa

SEQ ID NO: 25740 - RNA, 22 nt, Homo sapiens
augauguaggccauggguuucu

SEQ ID NO: 25741 - RNA, 22 nt, Homo sapiens
auggaacauaacuauuugggga

SEQ ID NO: 25742 - RNA, 22 nt, Homo sapiens
auggcagcccucuuuauccaug

SEQ ID NO: 25743 - RNA, 22 nt, Homo sapiens
auggcagcugguuuuacccuag

SEQ ID NO: 25744 - RNA, 22 nt, Homo sapiens
auggcaaugcgaugaugacuga

SEQ ID NO: 25745 - RNA, 21 nt, Homo sapiens
aucgcacaauauaccccugua

SEQ ID NO: 25746 - RNA, 22 nt, Homo sapiens
aucugcauuagggugaagaccu

SEQ ID NO: 25747 - RNA, 22 nt, Homo sapiens
auccacauucauggaccagucc

SEQ ID NO: 25748 - RNA, 22 nt, Homo sapiens
aucccgagacuuugcugaaguu

SEQ ID NO: 25749 - RNA, 22 nt, Homo sapiens
aucagauuccagaggcagcacc

SEQ ID NO: 25750 - RNA, 19 nt, Homo sapiens
aucagcacaagugugcuuu

SEQ ID NO: 25751 - RNA, 22 nt, Homo sapiens
aucagauuccacauuuuaucag

SEQ ID NO: 25752 - RNA, 22 nt, Homo sapiens
auccacagugucaauguuguga

SEQ ID NO: 25753 - RNA, 22 nt, Homo sapiens
ugagaucaguuguuauaauucu

SEQ ID NO: 25754 - RNA, 22 nt, Homo sapiens
ugagauccaugcuauuugggcu

SEQ ID NO: 25755 - RNA, 22 nt, Homo sapiens
ugagauccugagaguugggacu

SEQ ID NO: 25756 - RNA, 22 nt, Homo sapiens
ugagaugagggaagccuaggca

SEQ ID NO: 25757 - RNA, 22 nt, Homo sapiens
ugacagucaccaggacccacag

SEQ ID NO: 25758 - RNA, 22 nt, Homo sapiens
ugagacggagucuugcuaaguu

SEQ ID NO: 25759 - RNA, 22 nt, Homo sapiens
ugagacggagucuugcucuguc

SEQ ID NO: 25760 - RNA, 22 nt, Homo sapiens
ugagaguauaaauugaugcagc

SEQ ID NO: 25761 - RNA, 22 nt, Homo sapiens
ugagacugguaauguguagggc

SEQ ID NO: 25762 - RNA, 22 nt, Homo sapiens
ugauccagugcucaguuggagu

SEQ ID NO: 25763 - RNA, 22 nt, Homo sapiens
ugagucuguuccaaagaaauaa

SEQ ID NO: 25764 - RNA, 22 nt, Homo sapiens
ugaguuaaucucuacgauagaa

SEQ ID NO: 25765 - RNA, 23 nt, Homo sapiens
ugagguguuaagcagacuugucu

SEQ ID NO: 25766 - RNA, 22 nt, Homo sapiens
ugagauuaucuugaucuugaaa

SEQ ID NO: 25767 - RNA, 22 nt, Homo sapiens
ugagauguuuguuucagugccu

SEQ ID NO: 25768 - RNA, 22 nt, Homo sapiens
ugagguugucagugucauucuu

SEQ ID NO: 25769 - RNA, 22 nt, Homo sapiens
ugagauuaucguaauguaucuc

SEQ ID NO: 25770 - RNA, 22 nt, Homo sapiens
ugcaaaucuuguguaguuguga

SEQ ID NO: 25771 - RNA, 22 nt, Homo sapiens
ugcaacacauugccccugcucu

SEQ ID NO: 25772 - RNA, 22 nt, Homo sapiens
ugauuagaggaaugguagauua

SEQ ID NO: 25773 - RNA, 22 nt, Homo sapiens
ugccagaugcaguguucaacaa

SEQ ID NO: 25774 - RNA, 23 nt, Homo sapiens
ugcucgguguugacagucacauc

SEQ ID NO: 25775 - RNA, 22 nt, Homo sapiens
ugcguucauuuggccaguggcg

SEQ ID NO: 25776 - RNA, 22 nt, Homo sapiens
uggagugcaauggugagaucuu

SEQ ID NO: 25777 - RNA, 22 nt, Homo sapiens
uggaaguuaaauuaguugauga

SEQ ID NO: 25778 - RNA, 20 nt, Homo sapiens
uggaaugcagccuccuucug

SEQ ID NO: 25779 - RNA, 22 nt, Homo sapiens
ugcuggugauuaaauccugaag

SEQ ID NO: 25780 - RNA, 22 nt, Homo sapiens
ugcuggcguuacucuccaucag

SEQ ID NO: 25781 - RNA, 22 nt, Homo sapiens
uggauggugauuggaucaugga

SEQ ID NO: 25782 - RNA, 19 nt, Homo sapiens
uggaugacugucugggucu

SEQ ID NO: 25783 - RNA, 22 nt, Homo sapiens
uggaguguguugcagaugaagg

SEQ ID NO: 25784 - RNA, 22 nt, Homo sapiens
uggaucauucuuucuugcaggg

SEQ ID NO: 25785 - RNA, 22 nt, Homo sapiens
ucaguguugauggcugcugacu

SEQ ID NO: 25786 - RNA, 22 nt, Homo sapiens
ucauacaggccaccagggaagu

SEQ ID NO: 25787 - RNA, 22 nt, Homo sapiens
ucaguagagacaggauuucacc

SEQ ID NO: 25788 - RNA, 22 nt, Homo sapiens
ucagaaccuccuagcaguguuc

SEQ ID NO: 25789 - RNA, 22 nt, Homo sapiens
ucagaacugauacuagaacuuu

SEQ ID NO: 25790 - RNA, 22 nt, Homo sapiens
ucauugcacucccagacacccu

SEQ ID NO: 25791 - RNA, 22 nt, Homo sapiens
ucaucaggcucauucaagcuga

SEQ ID NO: 25792 - RNA, 22 nt, Homo sapiens
ucauguacuuguagucccggcu

SEQ ID NO: 25793 - RNA, 22 nt, Homo sapiens
ucauguaauuuugugucuauga

SEQ ID NO: 25794 - RNA, 22 nt, Homo sapiens
ucacauucaauuguaauccccg

SEQ ID NO: 25795 - RNA, 22 nt, Homo sapiens
ucacaguucagcauggcugagg

SEQ ID NO: 25796 - RNA, 18 nt, Homo sapiens
ucacagguaaaguugaca

SEQ ID NO: 25797 - RNA, 18 nt, Homo sapiens
ucacagguaauuaggauu

SEQ ID NO: 25798 - RNA, 21 nt, Homo sapiens
ucacagccuaggaccugaaga

SEQ ID NO: 25799 - RNA, 22 nt, Homo sapiens
ucaaagacacacaaggagaagg

SEQ ID NO: 25800 - RNA, 22 nt, Homo sapiens
uauuucacaucuaugaagugag

SEQ ID NO: 25801 - RNA, 22 nt, Homo sapiens
ucaaaaucucuuagcugugucu

SEQ ID NO: 25802 - RNA, 22 nt, Homo sapiens
ugaauauguuaaauaauguucu

SEQ ID NO: 25803 - RNA, 22 nt, Homo sapiens
ugaauguaacuaaaccugugaa

SEQ ID NO: 25804 - RNA, 22 nt, Homo sapiens
ugaaacacaccuccucuccauc

SEQ ID NO: 25805 - RNA, 22 nt, Homo sapiens
ucuguggucagaguccuuggcc

SEQ ID NO: 25806 - RNA, 22 nt, Homo sapiens
ucugauggaguugccagggaga

SEQ ID NO: 25807 - RNA, 22 nt, Homo sapiens
ucugccaaccacaaaauuuauu

SEQ ID NO: 25808 - RNA, 22 nt, Homo sapiens
ucuggcauuuucucugcuugca

SEQ ID NO: 25809 - RNA, 22 nt, Homo sapiens
ucucugagaccacuccaaacuc

SEQ ID NO: 25810 - RNA, 22 nt, Homo sapiens
ucccaguggucuugaaacaggg

SEQ ID NO: 25811 - RNA, 22 nt, Homo sapiens
ucccagugcuaugcaaaagccu

SEQ ID NO: 25812 - RNA, 23 nt, Homo sapiens
ucucauuccuugaaaauaaugac

SEQ ID NO: 25813 - RNA, 22 nt, Homo sapiens
ggagucugauuuuuauguugcu

SEQ ID NO: 25814 - RNA, 22 nt, Homo sapiens
ggaguaugaaacccacuccaau

SEQ ID NO: 25815 - RNA, 22 nt, Homo sapiens
ggagggugagaucaauuuggga

SEQ ID NO: 25816 - RNA, 22 nt, Homo sapiens
ggagaucuuuaggaguuggacu

SEQ ID NO: 25817 - RNA, 20 nt, Homo sapiens
ggagagugacauaauucugg

SEQ ID NO: 25818 - RNA, 22 nt, Homo sapiens
ggagaucuuguuaaaguacaga

SEQ ID NO: 25819 - RNA, 22 nt, Homo sapiens
ggagaugugccugcucugcucu

SEQ ID NO: 25820 - RNA, 22 nt, Homo sapiens
ggcagcauugccuuugcaguga

SEQ ID NO: 25821 - RNA, 22 nt, Homo sapiens
ggcagcgugcacuuucgccacu

SEQ ID NO: 25822 - RNA, 22 nt, Homo sapiens
ggugagguaggaaaaguuagga

SEQ ID NO: 25823 - RNA, 23 nt, Homo sapiens
ggugaggaguacagagucuucau

SEQ ID NO: 25824 - RNA, 22 nt, Homo sapiens
gguggucuuccccuggaguucg

SEQ ID NO: 25825 - RNA, 22 nt, Homo sapiens
gggaugauuaugguucacuaca

SEQ ID NO: 25826 - RNA, 22 nt, Homo sapiens
gggauguaugauauauguuggu

SEQ ID NO: 25827 - RNA, 22 nt, Homo sapiens
ggcuuggaggaaugugagggcu

SEQ ID NO: 25828 - RNA, 23 nt, Homo sapiens
gcuaggagagaugaaacacaggu

SEQ ID NO: 25829 - RNA, 22 nt, Homo sapiens
gcuaggagauccacugcucucu

SEQ ID NO: 25830 - RNA, 22 nt, Homo sapiens
gcguugcacuccagccugggua

SEQ ID NO: 25831 - RNA, 22 nt, Homo sapiens
gcugcacuuuaaggcauccccu

SEQ ID NO: 25832 - RNA, 22 nt, Homo sapiens
gcugagaucucuugccugaacu

SEQ ID NO: 25833 - RNA, 22 nt, Homo sapiens
gcugguguagagugcagaaagg

SEQ ID NO: 25834 - RNA, 22 nt, Homo sapiens
gcugguguugugaaucaggccg

SEQ ID NO: 25835 - RNA, 22 nt, Homo sapiens
gcugcuguggcagauuggauuc

SEQ ID NO: 25836 - RNA, 22 nt, Homo sapiens
gcugcuguuauucaucagaacu

SEQ ID NO: 25837 - RNA, 22 nt, Homo sapiens
gcuguugugaacuauacaucua

SEQ ID NO: 25838 - RNA, 22 nt, Homo sapiens
gcuguuugccgccaucgcagac

SEQ ID NO: 25839 - RNA, 22 nt, Homo sapiens
gucauguuuaacuucuugagga

SEQ ID NO: 25840 - RNA, 22 nt, Homo sapiens
gucagugucuuaacagagauua

SEQ ID NO: 25841 - RNA, 22 nt, Homo sapiens
gucaggugcuuacgcggagauc

SEQ ID NO: 25842 - RNA, 22 nt, Homo sapiens
gucaucaucaguccucugugca

SEQ ID NO: 25843 - RNA, 22 nt, Homo sapiens
gucagugucuuugcagcucaga

SEQ ID NO: 25844 - RNA, 22 nt, Homo sapiens
gguggugguauuucagaaaaug

SEQ ID NO: 25845 - RNA, 22 nt, Homo sapiens
guaaucucagcuccucaugagg

SEQ ID NO: 25846 - RNA, 22 nt, Homo sapiens
gugaaacuggguggugagagac

SEQ ID NO: 25847 - RNA, 22 nt, Homo sapiens
gucauuguguggacauggagaa

SEQ ID NO: 25848 - RNA, 22 nt, Homo sapiens
gugauuguuaaacugccucucu

SEQ ID NO: 25849 - RNA, 22 nt, Homo sapiens
gugcaacaucccuccauaauuu

SEQ ID NO: 25850 - RNA, 22 nt, Homo sapiens
gugcacgucuuaggaggucacg

SEQ ID NO: 25851 - RNA, 22 nt, Homo sapiens
gugcuauguuauccagcaagau

SEQ ID NO: 25852 - RNA, 22 nt, Homo sapiens
gugcaugucuaugcgagucuaa

SEQ ID NO: 25853 - RNA, 21 nt, Homo sapiens
uaggccgggugcaggaugcuu

SEQ ID NO: 25854 - RNA, 18 nt, Homo sapiens
uaggaacauugauuggag

SEQ ID NO: 25855 - RNA, 22 nt, Homo sapiens
uaggagcauaggauuguuugag

SEQ ID NO: 25856 - RNA, 22 nt, Homo sapiens
uaggagcacagcagcauguggg

SEQ ID NO: 25857 - RNA, 22 nt, Homo sapiens
uaggacauugcccuuguggaga

SEQ ID NO: 25858 - RNA, 21 nt, Homo sapiens
uagcauacauuuugcaucuua

SEQ ID NO: 25859 - RNA, 22 nt, Homo sapiens
uauggcaaugcauaggaaggaa

SEQ ID NO: 25860 - RNA, 22 nt, Homo sapiens
uauuccacacuguuggugggau

SEQ ID NO: 25861 - RNA, 22 nt, Homo sapiens
uauuccauuugggucaggauga

SEQ ID NO: 25862 - RNA, 22 nt, Homo sapiens
uaaaagucaucacaacuggagu

SEQ ID NO: 25863 - RNA, 22 nt, Homo sapiens
uaaacugucuugcaguuacaug

SEQ ID NO: 25864 - RNA, 22 nt, Homo sapiens
gugguucuaaaccuuuuuuggu

SEQ ID NO: 25865 - RNA, 22 nt, Homo sapiens
gugguguuugagcugccaggga

SEQ ID NO: 25866 - RNA, 22 nt, Homo sapiens
guugcucaggcugaagugcagu

SEQ ID NO: 25867 - RNA, 22 nt, Homo sapiens
uacugcugucagugccaaguag

SEQ ID NO: 25868 - RNA, 22 nt, Homo sapiens
uacugcaguugcagcuugagga

SEQ ID NO: 25869 - RNA, 20 nt, Homo sapiens
uacugcacuuuccucauggu

SEQ ID NO: 25870 - RNA, 22 nt, Homo sapiens
uacauccauccugcugggcagu

SEQ ID NO: 25871 - RNA, 22 nt, Homo sapiens
uacauaguuacuuccauuucca

SEQ ID NO: 25872 - RNA, 22 nt, Homo sapiens
uaagugaugucuuuuugugugc

SEQ ID NO: 25873 - RNA, 22 nt, Homo sapiens
uacaggacuauagaacuuuccc

SEQ ID NO: 25874 - RNA, 22 nt, Homo sapiens
uacaggauagacaauuuauuaa

SEQ ID NO: 25875 - RNA, 22 nt, Homo sapiens
uacauaguaagcaucuccugug

SEQ ID NO: 25876 - RNA, 18 nt, Homo sapiens
aaagugaugucauucuuu

SEQ ID NO: 25877 - RNA, 22 nt, Homo sapiens
aaagugauuguaguuuuugcca

SEQ ID NO: 25878 - RNA, 22 nt, Homo sapiens
aaaggcaucauuaguaccaagu

SEQ ID NO: 25879 - RNA, 22 nt, Homo sapiens
aaagugauugcgguuuuugcca

SEQ ID NO: 25880 - RNA, 22 nt, Homo sapiens
aagugguuuuaaucuggugagu

SEQ ID NO: 25881 - RNA, 23 nt, Homo sapiens
aagugguuuugaacccggacccu

SEQ ID NO: 25882 - RNA, 22 nt, Homo sapiens
aagcaucauuuggaauuugaga

SEQ ID NO: 25883 - RNA, 22 nt, Homo sapiens
aagcaucacauaauggaucaug

SEQ ID NO: 25884 - RNA, 22 nt, Homo sapiens
aagaugcagaagcccagauguu

SEQ ID NO: 25885 - RNA, 22 nt, Homo sapiens
aaauccauuuguucagcuaugc

SEQ ID NO: 25886 - RNA, 23 nt, Homo sapiens
aaaugcucucaggugccaguaga

SEQ ID NO: 25887 - RNA, 22 nt, Homo sapiens
aaaugcauggacagcuggucuu

SEQ ID NO: 25888 - RNA, 22 nt, Homo sapiens
aagagugcucgugggacucagc

SEQ ID NO: 25889 - RNA, 22 nt, Homo sapiens
aaccacauggcucaguggacau

SEQ ID NO: 25890 - RNA, 22 nt, Homo sapiens
auauaccuaggcuacaugguuu

SEQ ID NO: 25891 - RNA, 22 nt, Homo sapiens
auagcagcagcuaguagugaua

SEQ ID NO: 25892 - RNA, 22 nt, Homo sapiens
auagauucauuugaggagauuu

SEQ ID NO: 25893 - RNA, 22 nt, Homo sapiens
auacaguugccauuucuugugc

SEQ ID NO: 25894 - RNA, 22 nt, Homo sapiens
aucucauuccuucugggcugau

SEQ ID NO: 25895 - RNA, 22 nt, Homo sapiens
aucuccaggugccagcugcgcc

SEQ ID NO: 25896 - RNA, 22 nt, Homo sapiens
aucagcacugaucauacagcuu

SEQ ID NO: 25897 - RNA, 22 nt, Homo sapiens
aucccugagccugacucucaga

SEQ ID NO: 25898 - RNA, 22 nt, Homo sapiens
aucaaaucuccagaaccugucu

SEQ ID NO: 25899 - RNA, 22 nt, Homo sapiens
auauuguacugcuacugguucu

SEQ ID NO: 25900 - RNA, 22 nt, Homo sapiens
auaugacuuuccucuacuuccu

SEQ ID NO: 25901 - RNA, 22 nt, Homo sapiens
augguacucucuugucugcaaa

SEQ ID NO: 25902 - RNA, 21 nt, Homo sapiens
augggguagaagagaaggcuu

SEQ ID NO: 25903 - RNA, 22 nt, Homo sapiens
auggagcuugacaguuguagag

SEQ ID NO: 25904 - RNA, 22 nt, Homo sapiens
auguauggaguuuaggggaugg

SEQ ID NO: 25905 - RNA, 22 nt, Homo sapiens
aucugguguccucgugggaguc

SEQ ID NO: 25906 - RNA, 19 nt, Homo sapiens
aucuggaguuccuggggcu

SEQ ID NO: 25907 - RNA, 22 nt, Homo sapiens
augccaagaugagcacgcgucu

SEQ ID NO: 25908 - RNA, 22 nt, Homo sapiens
augccaguguccagaguggguu

SEQ ID NO: 25909 - RNA, 20 nt, Homo sapiens
agcagccacagauuccucag

SEQ ID NO: 25910 - RNA, 22 nt, Homo sapiens
agcaguacauaaaaagcauccu

SEQ ID NO: 25911 - RNA, 22 nt, Homo sapiens
agcaucacaugggcugcuuggg

SEQ ID NO: 25912 - RNA, 22 nt, Homo sapiens
acugggucaaaguagaaaacua

SEQ ID NO: 25913 - RNA, 22 nt, Homo sapiens
acuggcucugcuuuacaaacag

SEQ ID NO: 25914 - RNA, 22 nt, Homo sapiens
agagaccuguaaaguucaggca

SEQ ID NO: 25915 - RNA, 22 nt, Homo sapiens
agacagcugguagcacuuccug

SEQ ID NO: 25916 - RNA, 22 nt, Homo sapiens
aaaugcucucuacacguuucug

SEQ ID NO: 25917 - RNA, 22 nt, Homo sapiens
aaaugcucuguggguaguaaug

SEQ ID NO: 25918 - RNA, 22 nt, Homo sapiens
aaaugcucuuuaugaaguugga

SEQ ID NO: 25919 - RNA, 22 nt, Homo sapiens
aggagcacuggccuuggaguca

SEQ ID NO: 25920 - RNA, 22 nt, Homo sapiens
aggaaguaauaaguuugguucu

SEQ ID NO: 25921 - RNA, 22 nt, Homo sapiens
agcugguauuuguuagggaguu

SEQ ID NO: 25922 - RNA, 22 nt, Homo sapiens
agcuggcuguagcugcaagucu

SEQ ID NO: 25923 - RNA, 22 nt, Homo sapiens
agcugccagucuuguaaggccu

SEQ ID NO: 25924 - RNA, 22 nt, Homo sapiens
aggugguauuucaaaguggcag

SEQ ID NO: 25925 - RNA, 22 nt, Homo sapiens
aggugcucuuccuguaggucac

SEQ ID NO: 25926 - RNA, 22 nt, Homo sapiens
aauugcaauggacaaugcagca

SEQ ID NO: 25927 - RNA, 22 nt, Homo sapiens
acaagcacaaaugcauagaugg

SEQ ID NO: 25928 - RNA, 22 nt, Homo sapiens
acaaaguauggaauguuggugu

SEQ ID NO: 25929 - RNA, 22 nt, Homo sapiens
aauugcauaaaauucaacucug

SEQ ID NO: 25930 - RNA, 22 nt, Homo sapiens
acaguacaugauaaauaaggua

SEQ ID NO: 25931 - RNA, 19 nt, Homo sapiens
acaguauugugcacagguu

SEQ ID NO: 25932 - RNA, 20 nt, Homo sapiens
acagcacugguuucaagcaa

SEQ ID NO: 25933 - RNA, 21 nt, Homo sapiens
acugagagaucuggggcacau

SEQ ID NO: 25934 - RNA, 21 nt, Homo sapiens
acugcacuccaaccucaacag

SEQ ID NO: 25935 - RNA, 22 nt, Homo sapiens
acugcacuccagccucaugaca

SEQ ID NO: 25936 - RNA, 22 nt, Homo sapiens
acugcauaaauauguguaauau

SEQ ID NO: 25937 - RNA, 22 nt, Homo sapiens
acugcacugcagccuggccaac

SEQ ID NO: 25938 - RNA, 22 nt, Homo sapiens
gagaucuucguguggggagaca

SEQ ID NO: 25939 - RNA, 22 nt, Homo sapiens
gagguugggaugagggauacag

SEQ ID NO: 25940 - RNA, 22 nt, Homo sapiens
gaguaaauguccuagcuucuug

SEQ ID NO: 25941 - RNA, 22 nt, Homo sapiens
gaggugauaucucauugugguu

SEQ ID NO: 25942 - RNA, 22 nt, Homo sapiens
gaucuguguuuguaugcauaag

SEQ ID NO: 25943 - RNA, 22 nt, Homo sapiens
gaugaugcuagguguuagggcu

SEQ ID NO: 25944 - RNA, 22 nt, Homo sapiens
gaucacauguguacucaaugug

SEQ ID NO: 25945 - RNA, 19 nt, Homo sapiens
gcugguuguccacucucuc

SEQ ID NO: 25946 - RNA, 22 nt, Homo sapiens
gccccugagacuugccucgggc

SEQ ID NO: 25947 - RNA, 22 nt, Homo sapiens
gcccagcguucagggaggggcu

SEQ ID NO: 25948 - RNA, 22 nt, Homo sapiens
gcagcagugugggcugaaccua

SEQ ID NO: 25949 - RNA, 22 nt, Homo sapiens
gcaguggugugugccagccuag

SEQ ID NO: 25950 - RNA, 22 nt, Homo sapiens
gcaguagugcgaucucagcuca

SEQ ID NO: 25951 - RNA, 22 nt, Homo sapiens
gcaguacacuguugguaggaau

SEQ ID NO: 25952 - RNA, 22 nt, Homo sapiens
gcaaaucuuauguccucacauu

SEQ ID NO: 25953 - RNA, 22 nt, Homo sapiens
gauuccauugcgaauuuucaga

SEQ ID NO: 25954 - RNA, 22 nt, Homo sapiens
gauuccauuuguggcuauuuac

SEQ ID NO: 25955 - RNA, 22 nt, Homo sapiens
gaugcagcuaggauuugugaca

SEQ ID NO: 25956 - RNA, 22 nt, Homo sapiens
gauuccacuuucaaauucaaau

SEQ ID NO: 25957 - RNA, 22 nt, Homo sapiens
gaaggagcuuaucugccauuuc

SEQ ID NO: 25958 - RNA, 22 nt, Homo sapiens
gagaaugaacagacugccucuu

SEQ ID NO: 25959 - RNA, 22 nt, Homo sapiens
gagaaccuccagcaagguagua

SEQ ID NO: 25960 - RNA, 22 nt, Homo sapiens
gagaacugagugugcuggcgga

SEQ ID NO: 25961 - RNA, 22 nt, Homo sapiens
cuucaugggagaaccacaggua

SEQ ID NO: 25962 - RNA, 22 nt, Homo sapiens
cuuccagcuggguucagucagu

SEQ ID NO: 25963 - RNA, 22 nt, Homo sapiens
cuugaauguaaauaauguacag

SEQ ID NO: 25964 - RNA, 22 nt, Homo sapiens
cuugaacaaagagauuccauua

SEQ ID NO: 25965 - RNA, 22 nt, Homo sapiens
cuugagcuugagauccuuucug

SEQ ID NO: 25966 - RNA, 22 nt, Homo sapiens
cuugcacucagaagauucaguu

SEQ ID NO: 25967 - RNA, 22 nt, Homo sapiens
cuugcauagaguuauugcccuu

SEQ ID NO: 25968 - RNA, 20 nt, Homo sapiens
cugagguacgaggguuaaau

SEQ ID NO: 25969 - RNA, 22 nt, Homo sapiens
cugagguacugggggccaggau

SEQ ID NO: 25970 - RNA, 22 nt, Homo sapiens
cugagguagcucaggguauugc

SEQ ID NO: 25971 - RNA, 19 nt, Homo sapiens
cuguuguacuccaggcauu

SEQ ID NO: 25972 - RNA, 22 nt, Homo sapiens
cuguugguuaaauuccaugcag

SEQ ID NO: 25973 - RNA, 22 nt, Homo sapiens
cuucaccaguuuggcagucuca

SEQ ID NO: 25974 - RNA, 22 nt, Homo sapiens
caccacauuccauugaucaggc

SEQ ID NO: 25975 - RNA, 22 nt, Homo sapiens
caaaugacaucauuucauucaa

SEQ ID NO: 25976 - RNA, 22 nt, Homo sapiens
cacccuugcagggacagcuuug

SEQ ID NO: 25977 - RNA, 22 nt, Homo sapiens
cacauugaauuucugaugacaa

SEQ ID NO: 25978 - RNA, 22 nt, Homo sapiens
caacauccaccuccuggguuca

SEQ ID NO: 25979 - RNA, 22 nt, Homo sapiens
caacacuguuuauuggauagcc

SEQ ID NO: 25980 - RNA, 22 nt, Homo sapiens
caaaggcuuccacugcauccuu

SEQ ID NO: 25981 - RNA, 22 nt, Homo sapiens
cagugcauccauguucagcagu

SEQ ID NO: 25982 - RNA, 22 nt, Homo sapiens
cauaaugcuaagagcugccccu

SEQ ID NO: 25983 - RNA, 22 nt, Homo sapiens
cagcagguuuuuaucaguuaag

SEQ ID NO: 25984 - RNA, 22 nt, Homo sapiens
cagcccguaaucccagcacuuu

SEQ ID NO: 25985 - RNA, 22 nt, Homo sapiens
cagcaucauucaucugggguaa

SEQ ID NO: 25986 - RNA, 22 nt, Homo sapiens
cagcuguuguuccagucuuuua

SEQ ID NO: 25987 - RNA, 22 nt, Homo sapiens
auugcagcccacccugggugau

SEQ ID NO: 25988 - RNA, 22 nt, Homo sapiens
auuacaugucuauccaugaaca

SEQ ID NO: 25989 - RNA, 22 nt, Homo sapiens
auuacacuuucuauucaaugag

SEQ ID NO: 25990 - RNA, 22 nt, Homo sapiens
auuggacagcauuucuagacuu

SEQ ID NO: 25991 - RNA, 22 nt, Homo sapiens
auugcuuacccuguauuagauc

SEQ ID NO: 25992 - RNA, 22 nt, Homo sapiens
auugcauaaacacauuucuuau

SEQ ID NO: 25993 - RNA, 22 nt, Homo sapiens
auuggccaaugggacgucagca

SEQ ID NO: 25994 - RNA, 19 nt, Homo sapiens
auuuccuggagcuggucuc

SEQ ID NO: 25995 - RNA, 22 nt, Homo sapiens
auuuggccuuuguaugcaguau

SEQ ID NO: 25996 - RNA, 22 nt, Homo sapiens
cccuguagcagcauucuuaaau

SEQ ID NO: 25997 - RNA, 22 nt, Homo sapiens
ccggcugugugacugugggcag

SEQ ID NO: 25998 - RNA, 21 nt, Homo sapiens
ccauggcaaugguaaacugac

SEQ ID NO: 25999 - RNA, 22 nt, Homo sapiens
ccaucccuuucugagcaguucc

SEQ ID NO: 26000 - RNA, 22 nt, Homo sapiens
ccaugaacuagaauagaacaug

SEQ ID NO: 26001 - RNA, 22 nt, Homo sapiens
caucacauucugagauacugag

SEQ ID NO: 26002 - RNA, 22 nt, Homo sapiens
caucacuuuuccuuuuacagau

SEQ ID NO: 26003 - RNA, 22 nt, Homo sapiens
caucagauugagaucaucuaag

SEQ ID NO: 26004 - RNA, 23 nt, Homo sapiens
caucacagagccuuccuugacuc

SEQ ID NO: 26005 - RNA, 21 nt, Homo sapiens
caucaaauugucauggugggu

SEQ ID NO: 26006 - RNA, 22 nt, Homo sapiens
ccagcaccauuuauuaaauagg

SEQ ID NO: 26007 - RNA, 22 nt, Homo sapiens
ccacccuggagaauuugagguc

SEQ ID NO: 26008 - RNA, 22 nt, Homo sapiens
ccaccgggucccagcucugcuc

SEQ ID NO: 26009 - RNA, 19 nt, Homo sapiens
cuaugaccaugugauuuuu

SEQ ID NO: 26010 - RNA, 22 nt, Homo sapiens
cuaucugcacaggguggaaauu

SEQ ID NO: 26011 - RNA, 22 nt, Homo sapiens
cuauggcucugguuauggcugu

SEQ ID NO: 26012 - RNA, 22 nt, Homo sapiens
cucaaaguguggucuguggguu

SEQ ID NO: 26013 - RNA, 22 nt, Homo sapiens
cuauggcuguaaggauaguaac

SEQ ID NO: 26014 - RNA, 22 nt, Homo sapiens
ccuucauccuccagcaggcuag

SEQ ID NO: 26015 - RNA, 22 nt, Homo sapiens
cucaggcacucugauuccagug

SEQ ID NO: 26016 - RNA, 22 nt, Homo sapiens
cucaguacuugcacagaagaac

SEQ ID NO: 26017 - RNA, 22 nt, Homo sapiens
cucagugucuggcacacagaaa

SEQ ID NO: 26018 - RNA, 22 nt, Homo sapiens
cugaauagucaacgauggacug

SEQ ID NO: 26019 - RNA, 19 nt, Homo sapiens
uacugcaccucaaccuggg

SEQ ID NO: 26020 - RNA, 18 nt, Homo sapiens
uacugcacucuccagccu

SEQ ID NO: 26021 - RNA, 22 nt, Homo sapiens
uacugcacuccaggcucaccug

SEQ ID NO: 26022 - RNA, 22 nt, Homo sapiens
uacagaguauccauuugaguuc

SEQ ID NO: 26023 - RNA, 19 nt, Homo sapiens
uacaugcagcaggcacgca

SEQ ID NO: 26024 - RNA, 22 nt, Homo sapiens
uaagguguagacuggucacaag

SEQ ID NO: 26025 - RNA, 22 nt, Homo sapiens
uaaguagaggaaucauuuugug

SEQ ID NO: 26026 - RNA, 22 nt, Homo sapiens
guugcucaggccggagugcagu

SEQ ID NO: 26027 - RNA, 22 nt, Homo sapiens
guuugcagaucaugaagaaccc

SEQ ID NO: 26028 - RNA, 22 nt, Homo sapiens
uaauugcaguucuguguuauau

SEQ ID NO: 26029 - RNA, 22 nt, Homo sapiens
uaagugguguucauucuuuuga

SEQ ID NO: 26030 - RNA, 22 nt, Homo sapiens
uauuccuuuugcauuuccacau

SEQ ID NO: 26031 - RNA, 22 nt, Homo sapiens
uauuccacucuguuggagguaa

SEQ ID NO: 26032 - RNA, 22 nt, Homo sapiens
uauuccacuuacaugagguauc

SEQ ID NO: 26033 - RNA, 22 nt, Homo sapiens
uauuccauuugugaaaggaagu

SEQ ID NO: 26034 - RNA, 22 nt, Homo sapiens
uaugaugcugagguuuggagug

SEQ ID NO: 26035 - RNA, 22 nt, Homo sapiens
uaucaguauggauucauggauu

SEQ ID NO: 26036 - RNA, 22 nt, Homo sapiens
uaucagcagagucauacuucaa

SEQ ID NO: 26037 - RNA, 22 nt, Homo sapiens
uaucaucauguuuuugcugugu

SEQ ID NO: 26038 - RNA, 22 nt, Homo sapiens
uaucaucauuggcaggugagaa

SEQ ID NO: 26039 - RNA, 22 nt, Homo sapiens
uauggccugcguccagugguau

SEQ ID NO: 26040 - RNA, 22 nt, Homo sapiens
uauggccugaauuagaaaagug

SEQ ID NO: 26041 - RNA, 22 nt, Homo sapiens
uauggccuuuuuaaugauauug

SEQ ID NO: 26042 - RNA, 22 nt, Homo sapiens
uauggcauuuuguaagggcuug

SEQ ID NO: 26043 - RNA, 22 nt, Homo sapiens
uauggcauuguuggugaugaua

SEQ ID NO: 26044 - RNA, 22 nt, Homo sapiens
uauggcauuauuuugauagaca

SEQ ID NO: 26045 - RNA, 22 nt, Homo sapiens
uaggucaguuuuggcuuggcuu

SEQ ID NO: 26046 - RNA, 22 nt, Homo sapiens
ggccugaugaaauguuagagua

SEQ ID NO: 26047 - RNA, 22 nt, Homo sapiens
ggccuguaggguauugguaggg

SEQ ID NO: 26048 - RNA, 22 nt, Homo sapiens
ggccggguggccauggcugccc

SEQ ID NO: 26049 - RNA, 22 nt, Homo sapiens
ggccagaugaucuaugaaggaa

SEQ ID NO: 26050 - RNA, 22 nt, Homo sapiens
ggucagauggcagcugggccug

SEQ ID NO: 26051 - RNA, 22 nt, Homo sapiens
gggcaugugugugcacacacau

SEQ ID NO: 26052 - RNA, 17 nt, Homo sapiens
gggucaccuugcaggua

SEQ ID NO: 26053 - RNA, 22 nt, Homo sapiens
guagagugcugggcacuggcuc

SEQ ID NO: 26054 - RNA, 22 nt, Homo sapiens
guagagguagacuuccuugucu

SEQ ID NO: 26055 - RNA, 22 nt, Homo sapiens
guaugucuugucuauggcugcu

SEQ ID NO: 26056 - RNA, 22 nt, Homo sapiens
guacauagucacacauauacau

SEQ ID NO: 26057 - RNA, 22 nt, Homo sapiens
guaaauaccaguuucuggaaca

SEQ ID NO: 26058 - RNA, 22 nt, Homo sapiens
gguccgccugccuuggccuccc

SEQ ID NO: 26059 - RNA, 22 nt, Homo sapiens
ggucaguguuaucaccgaagga

SEQ ID NO: 26060 - RNA, 22 nt, Homo sapiens
gguggcuuuuugugauggcuga

SEQ ID NO: 26061 - RNA, 22 nt, Homo sapiens
gugcaugucugugacgacccug

SEQ ID NO: 26062 - RNA, 22 nt, Homo sapiens
guggcagugugaggauccugcu

SEQ ID NO: 26063 - RNA, 22 nt, Homo sapiens
guugcucaggcuggagugcagu

SEQ ID NO: 26064 - RNA, 22 nt, Homo sapiens
guuagugcuuauuaaauaguau

SEQ ID NO: 26065 - RNA, 18 nt, Homo sapiens
gugucugguuaugggagu

SEQ ID NO: 26066 - RNA, 18 nt, Homo sapiens
gugcaaugaauagcagag

SEQ ID NO: 26067 - RNA, 22 nt, Homo sapiens
gugagcuccucuucugcugcag

SEQ ID NO: 26068 - RNA, 22 nt, Homo sapiens
gugcauauaaguuguuucuagu

SEQ ID NO: 26069 - RNA, 22 nt, Homo sapiens
gucguggagucucuggcuugua

SEQ ID NO: 26070 - RNA, 22 nt, Homo sapiens
gucaugcaggguucgccagccc

SEQ ID NO: 26071 - RNA, 22 nt, Homo sapiens
uugcagaucccacacucacccu

SEQ ID NO: 26072 - RNA, 22 nt, Homo sapiens
uugcacuccagccuggaugaca

SEQ ID NO: 26073 - RNA, 22 nt, Homo sapiens
uugcauagacaauauuaaucuu

SEQ ID NO: 26074 - RNA, 22 nt, Homo sapiens
uugcacucuagccugggugaca

SEQ ID NO: 26075 - RNA, 22 nt, Homo sapiens
uugcacauuuuuucuggcagaa

SEQ ID NO: 26076 - RNA, 22 nt, Homo sapiens
uugcacauggcaggugcucaau

SEQ ID NO: 26077 - RNA, 22 nt, Homo sapiens
uugcaagaaaugcagauucuca

SEQ ID NO: 26078 - RNA, 22 nt, Homo sapiens
uugauuagauccaguugauuga

SEQ ID NO: 26079 - RNA, 22 nt, Homo sapiens
uugaaugaaaugaugucauuug

SEQ ID NO: 26080 - RNA, 22 nt, Homo sapiens
uugcgcuuuuccuauguugccc

SEQ ID NO: 26081 - RNA, 22 nt, Homo sapiens
uugcauuagugugguacauuug

SEQ ID NO: 26082 - RNA, 22 nt, Homo sapiens
uugcauauucucugaggcagga

SEQ ID NO: 26083 - RNA, 22 nt, Homo sapiens
uugccaacauggugaacuccca

SEQ ID NO: 26084 - RNA, 22 nt, Homo sapiens
uugcauuuucuaggagggcaaa

SEQ ID NO: 26085 - RNA, 22 nt, Homo sapiens
uugccaucaucucuuacucagu

SEQ ID NO: 26086 - RNA, 22 nt, Homo sapiens
uuggcauuguggauggaaucau

SEQ ID NO: 26087 - RNA, 22 nt, Homo sapiens
uuggcccugcugaccauucccu

SEQ ID NO: 26088 - RNA, 22 nt, Homo sapiens
uuuggguuaguuuuccaaucuu

SEQ ID NO: 26089 - RNA, 23 nt, Homo sapiens
uuucuugggcaugcuaugucagu

SEQ ID NO: 26090 - RNA, 21 nt, Homo sapiens
uuugcauauguugaaccagcc

SEQ ID NO: 26091 - RNA, 22 nt, Homo sapiens
uuugcauaauaagauuagggug

SEQ ID NO: 26092 - RNA, 22 nt, Homo sapiens
uuuagugcaucagacacccucu

SEQ ID NO: 26093 - RNA, 22 nt, Homo sapiens
uuucugugguccucuugaaggu

SEQ ID NO: 26094 - RNA, 21 nt, Homo sapiens
uuucugggggagcauggcagg

SEQ ID NO: 26095 - RNA, 22 nt, Homo sapiens
uugucacuauaaauaagcauuu

SEQ ID NO: 26096 - RNA, 22 nt, Homo sapiens
uugugcuuuugagcugagauga

SEQ ID NO: 26097 - RNA, 22 nt, Homo sapiens
uuguggcuuaucucauuuagcg

SEQ ID NO: 26098 - RNA, 22 nt, Homo sapiens
uuccauagucauagugcugaug

SEQ ID NO: 26099 - RNA, 22 nt, Homo sapiens
uucccugaaguguuacucuaga

SEQ ID NO: 26100 - RNA, 22 nt, Homo sapiens
uucccugaguaucuuaccaugg

SEQ ID NO: 26101 - RNA, 22 nt, Homo sapiens
uucccgggguggaaugcaguga

SEQ ID NO: 26102 - RNA, 23 nt, Homo sapiens
uucaucagggauauuggccugaa

SEQ ID NO: 26103 - RNA, 22 nt, Homo sapiens
uucuauguuugaaaaugccaaa

SEQ ID NO: 26104 - RNA, 22 nt, Homo sapiens
uucugugguagaaaucucaaau

SEQ ID NO: 26105 - RNA, 22 nt, Homo sapiens
uucuuccagccuugaggggccc

SEQ ID NO: 26106 - RNA, 22 nt, Homo sapiens
uucaacagugauggccuuugua

SEQ ID NO: 26107 - RNA, 22 nt, Homo sapiens
uucaagauggcaccagugagug

SEQ ID NO: 26108 - RNA, 22 nt, Homo sapiens
uucaaaucuucguuuugccaua

SEQ ID NO: 26109 - RNA, 22 nt, Homo sapiens
uucaauaugucauuggcaggca

SEQ ID NO: 26110 - RNA, 22 nt, Homo sapiens
uucaguggacuuaguagugcuu

SEQ ID NO: 26111 - RNA, 22 nt, Homo sapiens
uucaguggagaggcugaguggu

SEQ ID NO: 26112 - RNA, 22 nt, Homo sapiens
uggugccgugguccuggggcca

SEQ ID NO: 26113 - RNA, 23 nt, Homo sapiens
uggucccguguucuggcuuuagg

SEQ ID NO: 26114 - RNA, 22 nt, Homo sapiens
ugguggcuuuucguagguucac

SEQ ID NO: 26115 - RNA, 20 nt, Homo sapiens
uggugguuuuaugugguuua

SEQ ID NO: 26116 - RNA, 21 nt, Homo sapiens
uguagcagcaugauucauagu

SEQ ID NO: 26117 - RNA, 22 nt, Homo sapiens
uguagauauucuuucaguuuuu

SEQ ID NO: 26118 - RNA, 17 nt, Homo sapiens
uguggcucuuaugcuga

SEQ ID NO: 26119 - RNA, 22 nt, Homo sapiens
uguggcucuucuguucuccacu

SEQ ID NO: 26120 - RNA, 22 nt, Homo sapiens
uguggaguguaugugacagaga

SEQ ID NO: 26121 - RNA, 22 nt, Homo sapiens
ugugcguguaagagaucuaggu

SEQ ID NO: 26122 - RNA, 22 nt, Homo sapiens
ugugcauauaaguguguauaua

SEQ ID NO: 26123 - RNA, 22 nt, Homo sapiens
uuacaccuguaauccagcacuu

SEQ ID NO: 26124 - RNA, 22 nt, Homo sapiens
uuaagacaccaaucauuggauu

SEQ ID NO: 26125 - RNA, 22 nt, Homo sapiens
uuaacaguugcaugagacugag

SEQ ID NO: 26126 - RNA, 22 nt, Homo sapiens
ugccuaggcuggaaugcagugg

SEQ ID NO: 26127 - RNA, 22 nt, Homo sapiens
ugcgccauugaacuccaggcug

SEQ ID NO: 26128 - RNA, 22 nt, Homo sapiens
ugcaucacaguacuccagccug

SEQ ID NO: 26129 - RNA, 22 nt, Homo sapiens
uggacaugaagggcacaggagg

SEQ ID NO: 26130 - RNA, 22 nt, Homo sapiens
uggaagcaugcaaucugugggg

SEQ ID NO: 26131 - RNA, 22 nt, Homo sapiens
uggaagacauugggugaagggu

SEQ ID NO: 26132 - RNA, 22 nt, Homo sapiens
uggagauguuuaaaauccacug

SEQ ID NO: 26133 - RNA, 22 nt, Homo sapiens
uggagguaggugauauguagca

SEQ ID NO: 26134 - RNA, 22 nt, Homo sapiens
ugguagugugagucuaaauugg

SEQ ID NO: 26135 - RNA, 22 nt, Homo sapiens
uggcuuuuaucuacucucaacu

SEQ ID NO: 26136 - RNA, 22 nt, Homo sapiens
ugggaacugaggugaaaagaca

SEQ ID NO: 26137 - RNA, 20 nt, Homo sapiens
uggcaccugacagauagcca

SEQ ID NO: 26138 - RNA, 22 nt, Homo sapiens
uggcauauaauauagaagacua

SEQ ID NO: 26139 - RNA, 22 nt, Homo sapiens
uggcaacaucuggggacauguu

SEQ ID NO: 26140 - RNA, 22 nt, Homo sapiens
ugauauguggauucagcucaaa

SEQ ID NO: 26141 - RNA, 22 nt, Homo sapiens
ugauggcauuucauguuuguaa

SEQ ID NO: 26142 - RNA, 22 nt, Homo sapiens
ugauggccuguucuccauaugu

SEQ ID NO: 26143 - RNA, 22 nt, Homo sapiens
ugaugucuugagauggagcuua

SEQ ID NO: 26144 - RNA, 22 nt, Homo sapiens
ugcauagaauguucuguaaaua

SEQ ID NO: 26145 - RNA, 22 nt, Homo sapiens
ugcauaugcagcauuuaugauu

SEQ ID NO: 26146 - RNA, 21 nt, Homo sapiens
ugcagugugguugcccugcug

SEQ ID NO: 26147 - RNA, 22 nt, Homo sapiens
ugcaccacacuccauccugggc

SEQ ID NO: 26148 - RNA, 22 nt, Homo sapiens
ugcaccacugcacuccacccug

SEQ ID NO: 26149 - RNA, 22 nt, Homo sapiens
ugcaccacugcaccccagucug

SEQ ID NO: 26150 - RNA, 19 nt, Homo sapiens
ugaccagggacagaaacca

SEQ ID NO: 26151 - RNA, 21 nt, Homo sapiens
ugagaugugaccagggcauca

SEQ ID NO: 26152 - RNA, 22 nt, Homo sapiens
ugaguagugccacaauaagcau

SEQ ID NO: 26153 - RNA, 22 nt, Homo sapiens
ugaguagucagugggcaggaag

SEQ ID NO: 26154 - RNA, 22 nt, Homo sapiens
ugaguagucuagaguggaaugu

SEQ ID NO: 26155 - RNA, 22 nt, Homo sapiens
ugagguugguauuacugucucu

SEQ ID NO: 26156 - RNA, 22 nt, Homo sapiens
ugaguaauguugaucuuugaua

SEQ ID NO: 26157 - RNA, 23 nt, Homo sapiens
ugaguagguccacguaugugagu

SEQ ID NO: 26158 - RNA, 22 nt, Homo sapiens
ugagguuggggucagggcuagc

SEQ ID NO: 26159 - RNA, 22 nt, Homo sapiens
ugaggaguguauuucauucgcu

SEQ ID NO: 26160 - RNA, 22 nt, Homo sapiens
ugaggagugagaaauugguuuc

SEQ ID NO: 26161 - RNA, 22 nt, Homo sapiens
ugaagaucuuaggagcugaggg

SEQ ID NO: 26162 - RNA, 22 nt, Homo sapiens
ugaacuguaagguauaggugau

SEQ ID NO: 26163 - RNA, 22 nt, Homo sapiens
ugaauuguuucauucuuuacau

SEQ ID NO: 26164 - RNA, 23 nt, Homo sapiens
ugacauguaauucaguccagcag

SEQ ID NO: 26165 - RNA, 22 nt, Homo sapiens
ugacauguagagaacuucucau

SEQ ID NO: 26166 - RNA, 21 nt, Homo sapiens
ugacauguugguuugcugcac

SEQ ID NO: 26167 - RNA, 22 nt, Homo sapiens
aacacuggcugcucgaguucuc

SEQ ID NO: 26168 - RNA, 22 nt, Homo sapiens
aacaggcuccuaggggugcacc

SEQ ID NO: 26169 - RNA, 21 nt, Homo sapiens
ucucauuacugaugagccaga

SEQ ID NO: 26170 - RNA, 22 nt, Homo sapiens
ucgcaccauugcacuccagcca

SEQ ID NO: 26171 - RNA, 22 nt, Homo sapiens
ucucaguuuucaagcugucgau

SEQ ID NO: 26172 - RNA, 22 nt, Homo sapiens
ucucagcggacaggccggccag

SEQ ID NO: 26173 - RNA, 22 nt, Homo sapiens
ucagcaccauguaacaauugau

SEQ ID NO: 26174 - RNA, 22 nt, Homo sapiens
ucagcaaugcugcacucuacug

SEQ ID NO: 26175 - RNA, 22 nt, Homo sapiens
ucagauguuuuguuuaucugcu

SEQ ID NO: 26176 - RNA, 22 nt, Homo sapiens
ucaguaccugagagugggcaga

SEQ ID NO: 26177 - RNA, 22 nt, Homo sapiens
ucaguacuuuggagcucacaua

SEQ ID NO: 26178 - RNA, 23 nt, Homo sapiens
ucaucacagcauuuccugguauu

SEQ ID NO: 26179 - RNA, 22 nt, Homo sapiens
ucaucaguuuuuuauaugugau

SEQ ID NO: 26180 - RNA, 22 nt, Homo sapiens
ucaguguuuuauccuccagagc

SEQ ID NO: 26181 - RNA, 22 nt, Homo sapiens
ucaguucauggaggugucugcu

SEQ ID NO: 26182 - RNA, 22 nt, Homo sapiens
ucagugauugguuauuuuaggc

SEQ ID NO: 26183 - RNA, 20 nt, Homo sapiens
ucagugauugguuuaguuau

SEQ ID NO: 26184 - RNA, 22 nt, Homo sapiens
uccaguguuauaauaugcgucu

SEQ ID NO: 26185 - RNA, 22 nt, Homo sapiens
uccauagugagcagucaaugua

SEQ ID NO: 26186 - RNA, 23 nt, Homo sapiens
ucccaagauggaccagaccaagg

SEQ ID NO: 26187 - RNA, 19 nt, Homo sapiens
ucccaauguuuccaggcag

SEQ ID NO: 26188 - RNA, 20 nt, Homo sapiens
ucaugccacugcgcuccagc

SEQ ID NO: 26189 - RNA, 22 nt, Homo sapiens
ucaugucuuguuguauuuauuu

SEQ ID NO: 26190 - RNA, 22 nt, Homo sapiens
ucauucauuugcucacuccaca

SEQ ID NO: 26191 - RNA, 22 nt, Homo sapiens
uccagcuuuuucuaauucugug

SEQ ID NO: 26192 - RNA, 22 nt, Homo sapiens
uccacaguggugaggugcagca

SEQ ID NO: 26193 - RNA, 22 nt, Homo sapiens
uccaaaucucuggcacugggau

SEQ ID NO: 26194 - RNA, 22 nt, Homo sapiens
uccaagaugcuggcagcuacag

SEQ ID NO: 26195 - RNA, 22 nt, Human adenovirus E
cgccucagcaaccugcugggca

SEQ ID NO: 26196 - RNA, 21 nt, Homo sapiens
uuuccuggagcguauggcuuc

SEQ ID NO: 26197 - RNA, 22 nt, Homo sapiens
caccaggugcccagcacggcca

SEQ ID NO: 26198 - RNA, 22 nt, Homo sapiens
acugcacuccagacucugucuc

SEQ ID NO: 26199 - RNA, 22 nt, Homo sapiens
gugacacagcaagacuccgucu

SEQ ID NO: 26200 - RNA, 22 nt, Homo sapiens
gacuggccauugauacagaggu

SEQ ID NO: 26201 - RNA, 22 nt, Homo sapiens
acugcacuccagcuccagggug

SEQ ID NO: 26202 - RNA, 22 nt, Homo sapiens
uacuggccccaaaguagguagu

SEQ ID NO: 26203 - RNA, 22 nt, Homo sapiens
gagacucuuagauuggaaaucu

SEQ ID NO: 26204 - RNA, 17 nt, Homo sapiens
gcacuggcguaucccac

SEQ ID NO: 26205 - RNA, 22 nt, Homo sapiens
gucacugggugcugcgccuguc

SEQ ID NO: 26206 - RNA, 22 nt, Homo sapiens
uggcaccauccaggugucucua

SEQ ID NO: 26207 - RNA, 22 nt, Homo sapiens
gaggucaugucgggccccagga

SEQ ID NO: 26208 - RNA, 22 nt, Homo sapiens
acccugucacucccaucaauuu

SEQ ID NO: 26209 - RNA, 22 nt, Homo sapiens
aacuggccuccuugggaaauua

SEQ ID NO: 26210 - RNA, 22 nt, Homo sapiens
uacuggccuugaacucuggugu

SEQ ID NO: 26211 - RNA, 22 nt, Homo sapiens
uggaggacugcagaacugaggc

SEQ ID NO: 26212 - RNA, 22 nt, Homo sapiens
gcaccccuuaccgggcuggguu

SEQ ID NO: 26213 - RNA, 22 nt, Homo sapiens
gacuggccuauaauggcgaauu

SEQ ID NO: 26214 - RNA, 22 nt, Homo sapiens
ucacuggcaaauauauccguug

SEQ ID NO: 26215 - RNA, 22 nt, Homo sapiens
acccugucaaaacggaccaauc

SEQ ID NO: 26216 - RNA, 22 nt, Homo sapiens
ggcaccauggaaggacgggagc

SEQ ID NO: 26217 - RNA, 22 nt, Homo sapiens
gcacccugucaaaauggaccaa

SEQ ID NO: 26218 - RNA, 22 nt, Homo sapiens
aacuggccuggcgugcagaggg

SEQ ID NO: 26219 - RNA, 19 nt, Homo sapiens
uuccugagaacaagggcuu

SEQ ID NO: 26220 - RNA, 22 nt, Homo sapiens
acugcacuccagccuucaggac

SEQ ID NO: 26221 - RNA, 22 nt, Homo sapiens
ugagcugguacuaauauuauca

SEQ ID NO: 26222 - RNA, 22 nt, Homo sapiens
ucaugggagcccccaucaugag

SEQ ID NO: 26223 - RNA, 22 nt, Homo sapiens
aggcacacaacccuggaccuga

SEQ ID NO: 26224 - RNA, 22 nt, Homo sapiens
cugagcccauucuggggagaag

SEQ ID NO: 26225 - RNA, 20 nt, Homo sapiens
ucacccugacaucugcccag

SEQ ID NO: 26226 - RNA, 22 nt, Homo sapiens
ggucacccugaugcuggugguc

SEQ ID NO: 26227 - RNA, 20 nt, Homo sapiens
uguggcacuguaucucucag

SEQ ID NO: 26228 - RNA, 22 nt, Homo sapiens
cauggcccugggcugggcgaac

SEQ ID NO: 26229 - RNA, 22 nt, Homo sapiens
caccagguuggagugcaguggu

SEQ ID NO: 26230 - RNA, 22 nt, Homo sapiens
uuccugagccuuguaucuagua

SEQ ID NO: 26231 - RNA, 22 nt, Homo sapiens
gucaaaugcacagaaccauuaa

SEQ ID NO: 26232 - RNA, 22 nt, Homo sapiens
cucucugagccauggcugcccu

SEQ ID NO: 26233 - RNA, 22 nt, Homo sapiens
gcauggccuuuaaaugucacag

SEQ ID NO: 26234 - RNA, 22 nt, Homo sapiens
uguggcacuguguccagagaaa

SEQ ID NO: 26235 - RNA, 21 nt, Homo sapiens
ucaggaccucuaguuagccag

SEQ ID NO: 26236 - RNA, 22 nt, Homo sapiens
aguggcacuauucucagaguca

SEQ ID NO: 26237 - RNA, 22 nt, Homo sapiens
cuccacugagcaggugggaggc

SEQ ID NO: 26238 - RNA, 22 nt, Homo sapiens
acugcacuccagccugugagac

SEQ ID NO: 26239 - RNA, 19 nt, Homo sapiens
agagacucauuguagcauu

SEQ ID NO: 26240 - RNA, 22 nt, Homo sapiens
aacuggccugagaugaaaagug

SEQ ID NO: 26241 - RNA, 22 nt, Homo sapiens
ucugagucaucacaaaugaugc

SEQ ID NO: 26242 - RNA, 19 nt, Homo sapiens
caccgccugcccccugcug

SEQ ID NO: 26243 - RNA, 22 nt, Homo sapiens
ggcaccacagacgccaggcgug

SEQ ID NO: 26244 - RNA, 22 nt, Homo sapiens
gaggucauucugugguacccag

SEQ ID NO: 26245 - RNA, 22 nt, Homo sapiens
acagcacugccaagugacccau

SEQ ID NO: 26246 - RNA, 22 nt, Homo sapiens
gcaccacugcacucucagcuug

SEQ ID NO: 26247 - RNA, 22 nt, Homo sapiens
uugggacccuguccuguaacaa

SEQ ID NO: 26248 - RNA, 22 nt, Homo sapiens
aguggcacaauuuugacucccc

SEQ ID NO: 26249 - RNA, 22 nt, Homo sapiens
acccugucaaaauggaccaauc

SEQ ID NO: 26250 - RNA, 20 nt, Homo sapiens
acacuggcuuugagauuuag

SEQ ID NO: 26251 - RNA, 22 nt, Homo sapiens
cacugcacuccagcuugugggc

SEQ ID NO: 26252 - RNA, 22 nt, Homo sapiens
ucacuggccaaauucuggguga

SEQ ID NO: 26253 - RNA, 22 nt, Homo sapiens
uuuugcacuagaaccagagguu

SEQ ID NO: 26254 - RNA, 22 nt, Homo sapiens
ugugccacuguucuguaaagug

SEQ ID NO: 26255 - RNA, 19 nt, Homo sapiens
ugugaagaaaugcugcaag

SEQ ID NO: 26256 - RNA, 22 nt, Homo sapiens
ugugucuuguuuauagcuuucu

SEQ ID NO: 26257 - RNA, 22 nt, Homo sapiens
uguguuugauaaguccauaguu

SEQ ID NO: 26258 - RNA, 22 nt, Homo sapiens
uguuaacauggucucagucugu

SEQ ID NO: 26259 - RNA, 22 nt, Homo sapiens
uguuaagaugucaauuuuccac

SEQ ID NO: 26260 - RNA, 22 nt, Homo sapiens
ugugucuuguuuuuucccaggc

SEQ ID NO: 26261 - RNA, 22 nt, Homo sapiens
ugucauguggcuaacgauucau

SEQ ID NO: 26262 - RNA, 22 nt, Homo sapiens
ugugaacaugacagugggcuag

SEQ ID NO: 26263 - RNA, 21 nt, Homo sapiens
uggucaguuuucucacuagga

SEQ ID NO: 26264 - RNA, 22 nt, Homo sapiens
uguuucuacugucucuguagua

SEQ ID NO: 26265 - RNA, 22 nt, Homo sapiens
uguuugguggucucuucacaug

SEQ ID NO: 26266 - RNA, 22 nt, Homo sapiens
uguuaugaagaugccugguaca

SEQ ID NO: 26267 - RNA, 22 nt, Homo sapiens
uuacagauggcacacucaaggg

SEQ ID NO: 26268 - RNA, 22 nt, Homo sapiens
uuaacagucacuuagcucauuu

SEQ ID NO: 26269 - RNA, 22 nt, Homo sapiens
uuaaaggcauguacacuagagu

SEQ ID NO: 26270 - RNA, 22 nt, Homo sapiens
uuaacagugucaaucuguagua

SEQ ID NO: 26271 - RNA, 22 nt, Homo sapiens
uuaagagcauggugccagguug

SEQ ID NO: 26272 - RNA, 22 nt, Homo sapiens
uuaaagcuggcguuacaguuug

SEQ ID NO: 26273 - RNA, 22 nt, Homo sapiens
uuaacacugccauugauacugu

SEQ ID NO: 26274 - RNA, 21 nt, Homo sapiens
uguuuuugcuguguaucucuc

SEQ ID NO: 26275 - RNA, 22 nt, Homo sapiens
uucacagaguuauuuuuaugcu

SEQ ID NO: 26276 - RNA, 22 nt, Homo sapiens
uucaaaucuuuggcucccacua

SEQ ID NO: 26277 - RNA, 22 nt, Homo sapiens
uucaaauguucuuucaccaccc

SEQ ID NO: 26278 - RNA, 19 nt, Homo sapiens
uucauacagugagagcagc

SEQ ID NO: 26279 - RNA, 22 nt, Homo sapiens
uucaguaguaaguuggaacucu

SEQ ID NO: 26280 - RNA, 23 nt, Homo sapiens
uuacaguggcaugaucucugcuc

SEQ ID NO: 26281 - RNA, 20 nt, Homo sapiens
uuacagugggaccuuccuga

SEQ ID NO: 26282 - RNA, 22 nt, Homo sapiens
uuacaguggugaccuuguauug

SEQ ID NO: 26283 - RNA, 22 nt, Homo sapiens
uuacaguguuuguucuguuacu

SEQ ID NO: 26284 - RNA, 22 nt, Homo sapiens
uuacaucaucacauuaguuugc

SEQ ID NO: 26285 - RNA, 22 nt, Homo sapiens
uuacaugcaugacaaggugcca

SEQ ID NO: 26286 - RNA, 22 nt, Homo sapiens
uuccaagugggaaacaaaaaug

SEQ ID NO: 26287 - RNA, 22 nt, Homo sapiens
uucaugugagucuguauuaacu

SEQ ID NO: 26288 - RNA, 22 nt, Homo sapiens
uuccauguaguugaacgguuuu

SEQ ID NO: 26289 - RNA, 22 nt, Homo sapiens
uuccaguuuuauggguauagag

SEQ ID NO: 26290 - RNA, 22 nt, Homo sapiens
uuccaguauuugggcaagcgca

SEQ ID NO: 26291 - RNA, 22 nt, Homo sapiens
uuccagcugggggcaacucugc

SEQ ID NO: 26292 - RNA, 21 nt, Homo sapiens
uuccagugagccuagaugccu

SEQ ID NO: 26293 - RNA, 22 nt, Homo sapiens
uucccucagaaacacacagccc

SEQ ID NO: 26294 - RNA, 22 nt, Homo sapiens
uucccugugugcagaugggugu

SEQ ID NO: 26295 - RNA, 22 nt, Homo sapiens
uuccugagagggcugggugcag

SEQ ID NO: 26296 - RNA, 22 nt, Homo sapiens
uucuggccccucccaaucucau

SEQ ID NO: 26297 - RNA, 22 nt, Homo sapiens
uucugugcugaaucaaagacug

SEQ ID NO: 26298 - RNA, 22 nt, Homo sapiens
uuggccauaugacuugcuuugg

SEQ ID NO: 26299 - RNA, 22 nt, Homo sapiens
uuggccauggagcacuuuucua

SEQ ID NO: 26300 - RNA, 22 nt, Homo sapiens
uuggcagucugaggcacagacu

SEQ ID NO: 26301 - RNA, 22 nt, Homo sapiens
uuggacuucuaacugacaugga

SEQ ID NO: 26302 - RNA, 22 nt, Homo sapiens
uuggagagugauauucagaugc

SEQ ID NO: 26303 - RNA, 22 nt, Homo sapiens
uuggagagucacuaguuagugc

SEQ ID NO: 26304 - RNA, 22 nt, Homo sapiens
uuggcaaaugucacaaaucagg

SEQ ID NO: 26305 - RNA, 22 nt, Homo sapiens
uuggcuuaguugaccacagucu

SEQ ID NO: 26306 - RNA, 22 nt, Homo sapiens
uuguaguguuuauucugucaac

SEQ ID NO: 26307 - RNA, 22 nt, Homo sapiens
uuggccuuuucaaugccucuuu

SEQ ID NO: 26308 - RNA, 21 nt, Homo sapiens
uuggccuggaggccugaaugu

SEQ ID NO: 26309 - RNA, 22 nt, Homo sapiens
uuggcuguguuuauaugcugga

SEQ ID NO: 26310 - RNA, 22 nt, Homo sapiens
uuguauguuguuugucagagaa

SEQ ID NO: 26311 - RNA, 22 nt, Homo sapiens
uugaguagaaguaugucaguau

SEQ ID NO: 26312 - RNA, 22 nt, Homo sapiens
uugaggucuuugagcaaacgca

SEQ ID NO: 26313 - RNA, 21 nt, Homo sapiens
uugaguugaagcaaggaggga

SEQ ID NO: 26314 - RNA, 22 nt, Homo sapiens
uugauaguguccucuuuggcag

SEQ ID NO: 26315 - RNA, 22 nt, Homo sapiens
uugauaguuuaauuaaugcuag

SEQ ID NO: 26316 - RNA, 22 nt, Homo sapiens
uugcauugacacaugaagcuca

SEQ ID NO: 26317 - RNA, 23 nt, Homo sapiens
uugcauugcccuccauaguacuc

SEQ ID NO: 26318 - RNA, 22 nt, Homo sapiens
uugaucugugucccugcccaau

SEQ ID NO: 26319 - RNA, 22 nt, Homo sapiens
uuugugacucauggucuagugc

SEQ ID NO: 26320 - RNA, 21 nt, Homo sapiens
uuugugguuacugugugagcu

SEQ ID NO: 26321 - RNA, 22 nt, Homo sapiens
uuuuacacuguugguuggaaug

SEQ ID NO: 26322 - RNA, 22 nt, Homo sapiens
uuuuaguugcucagguauucuc

SEQ ID NO: 26323 - RNA, 22 nt, Homo sapiens
uuuguucaccucaaggauggga

SEQ ID NO: 26324 - RNA, 22 nt, Homo sapiens
uuuggcuuugagaagcagugga

SEQ ID NO: 26325 - RNA, 22 nt, Homo sapiens
uuugguaauguuucauugcaga

SEQ ID NO: 26326 - RNA, 22 nt, Homo sapiens
uuugguugucacaacuggggga

SEQ ID NO: 26327 - RNA, 22 nt, Homo sapiens
uuugguuuuuguuaucacucau

SEQ ID NO: 26328 - RNA, 22 nt, Homo sapiens
uuuguaagaugcauagauugca

SEQ ID NO: 26329 - RNA, 22 nt, Homo sapiens
uuuccauguuggugaaaugagg

SEQ ID NO: 26330 - RNA, 22 nt, Homo sapiens
uuuccaguuggaaagccuguuu

SEQ ID NO: 26331 - RNA, 21 nt, Homo sapiens
uuugaucauuaaaagugaauc

SEQ ID NO: 26332 - RNA, 22 nt, Homo sapiens
uuugaggaaaggcauaaguagg

SEQ ID NO: 26333 - RNA, 22 nt, Homo sapiens
uuuggcaacguuggaucccuca

SEQ ID NO: 26334 - RNA, 22 nt, Homo sapiens
uuguugcacugcuuuccuggcc

SEQ ID NO: 26335 - RNA, 22 nt, Homo sapiens
uuuaaacugucuuggguuugga

SEQ ID NO: 26336 - RNA, 22 nt, Homo sapiens
uuuaaagcacggaguuuguggc

SEQ ID NO: 26337 - RNA, 20 nt, Homo sapiens
cucagguauuugaggcugca

SEQ ID NO: 26338 - RNA, 22 nt, Homo sapiens
cucauuggucagacgcgucggu

SEQ ID NO: 26339 - RNA, 21 nt, Homo sapiens
ccuccauuuguauucuugccc

SEQ ID NO: 26340 - RNA, 21 nt, Homo sapiens
ccucuuugagggaagaaaggg

SEQ ID NO: 26341 - RNA, 22 nt, Homo sapiens
cccagcguucggcauggcugag

SEQ ID NO: 26342 - RNA, 22 nt, Homo sapiens
cccagugguuacauaaggagua

SEQ ID NO: 26343 - RNA, 22 nt, Homo sapiens
cccagugugcugggugacagcu

SEQ ID NO: 26344 - RNA, 22 nt, Homo sapiens
ccccagguuucaauaaagccca

SEQ ID NO: 26345 - RNA, 22 nt, Homo sapiens
ccuguguuaugguuucuaaugu

SEQ ID NO: 26346 - RNA, 22 nt, Homo sapiens
ccaggguugagacccacugacu

SEQ ID NO: 26347 - RNA, 22 nt, Homo sapiens
ccaguuuucaagauaaugguuu

SEQ ID NO: 26348 - RNA, 22 nt, Homo sapiens
ccagugucugacagacacggcg

SEQ ID NO: 26349 - RNA, 22 nt, Homo sapiens
caugucuuuuauucugugugau

SEQ ID NO: 26350 - RNA, 22 nt, Homo sapiens
cauuacacuuguaagguuuuuc

SEQ ID NO: 26351 - RNA, 22 nt, Homo sapiens
cagauggucuuaaggcagccuu

SEQ ID NO: 26352 - RNA, 20 nt, Homo sapiens
cagcacgcacaugagacugu

SEQ ID NO: 26353 - RNA, 22 nt, Homo sapiens
auuggcaauggcaaagcagagu

SEQ ID NO: 26354 - RNA, 22 nt, Homo sapiens
auuggcuauuuggugagugauu

SEQ ID NO: 26355 - RNA, 18 nt, Homo sapiens
auuguaagauguauggga

SEQ ID NO: 26356 - RNA, 22 nt, Homo sapiens
auugccacaucucagaggcaga

SEQ ID NO: 26357 - RNA, 21 nt, Homo sapiens
auugcccaaaguggaggggaa

SEQ ID NO: 26358 - RNA, 19 nt, Homo sapiens
auugauuaaguuugcuguc

SEQ ID NO: 26359 - RNA, 22 nt, Homo sapiens
auucaacuaauuauugaagaug

SEQ ID NO: 26360 - RNA, 22 nt, Homo sapiens
auuugguugggugcgguggcuu

SEQ ID NO: 26361 - RNA, 22 nt, Homo sapiens
cacuguggauggaacuauguga

SEQ ID NO: 26362 - RNA, 22 nt, Homo sapiens
cacugcacuccagcuugugggc

SEQ ID NO: 26363 - RNA, 22 nt, Homo sapiens
cacugcacuccagucccgucuc

SEQ ID NO: 26364 - RNA, 22 nt, Homo sapiens
cacugcauccuccaccuccugg

SEQ ID NO: 26365 - RNA, 22 nt, Homo sapiens
cacugcauccuccaccugccag

SEQ ID NO: 26366 - RNA, 22 nt, Homo sapiens
cacugcauggccacccauguua

SEQ ID NO: 26367 - RNA, 21 nt, Homo sapiens
cuuuuuacucguucauaugca

SEQ ID NO: 26368 - RNA, 22 nt, Homo sapiens
cuugcauuuuggagaaugcuga

SEQ ID NO: 26369 - RNA, 22 nt, Homo sapiens
cuugcagaggcccuggggagag

SEQ ID NO: 26370 - RNA, 22 nt, Homo sapiens
gaaauguugauagugggcauug

SEQ ID NO: 26371 - RNA, 22 nt, Homo sapiens
gaaaugucugagauguggcuca

SEQ ID NO: 26372 - RNA, 22 nt, Homo sapiens
gaaagauuuuaacugggagacu

SEQ ID NO: 26373 - RNA, 22 nt, Homo sapiens
gaaugcuaagcaugugggaguu

SEQ ID NO: 26374 - RNA, 22 nt, Homo sapiens
gaauaaacuagagaggacugag

SEQ ID NO: 26375 - RNA, 22 nt, Homo sapiens
gaaguaggugcuguuauuaucu

SEQ ID NO: 26376 - RNA, 22 nt, Homo sapiens
gaagagacagguucccacaaaa

SEQ ID NO: 26377 - RNA, 23 nt, Homo sapiens
cuguggugaggcccuagaaucug

SEQ ID NO: 26378 - RNA, 22 nt, Homo sapiens
cuggcucugggcuaaagaaaua

SEQ ID NO: 26379 - RNA, 22 nt, Homo sapiens
cugugcaaacaagugaaccccu

SEQ ID NO: 26380 - RNA, 22 nt, Homo sapiens
cuggcagucugccucuucacug

SEQ ID NO: 26381 - RNA, 22 nt, Homo sapiens
cuggcaaauguuuucuguaaag

SEQ ID NO: 26382 - RNA, 22 nt, Homo sapiens
cuggcagugcuuguuauccugg

SEQ ID NO: 26383 - RNA, 22 nt, Homo sapiens
cuggcaguguuucuugugggcu

SEQ ID NO: 26384 - RNA, 22 nt, Homo sapiens
cuggcccaguucugcguuuugc

SEQ ID NO: 26385 - RNA, 22 nt, Homo sapiens
cucugcuuaaugucccacuuga

SEQ ID NO: 26386 - RNA, 22 nt, Homo sapiens
cucuuuggaugccuuaggguua

SEQ ID NO: 26387 - RNA, 22 nt, Homo sapiens
gagguagguacaauugccacca

SEQ ID NO: 26388 - RNA, 22 nt, Homo sapiens
gaguugagagaguuguuauuuc

SEQ ID NO: 26389 - RNA, 22 nt, Homo sapiens
gaggcggugugaugucacaugc

SEQ ID NO: 26390 - RNA, 22 nt, Homo sapiens
gagguaagaugauucguguccu

SEQ ID NO: 26391 - RNA, 22 nt, Homo sapiens
gauacaguaugcaugugguauu

SEQ ID NO: 26392 - RNA, 22 nt, Homo sapiens
gauaagagaugauuuugccaug

SEQ ID NO: 26393 - RNA, 22 nt, Homo sapiens
gauaauucuagcagauacaggc

SEQ ID NO: 26394 - RNA, 22 nt, Homo sapiens
gaguuuguacuaauuuguugua

SEQ ID NO: 26395 - RNA, 20 nt, Homo sapiens
gagcugguguacugccgggc

SEQ ID NO: 26396 - RNA, 22 nt, Homo sapiens
gcauaaagcuaauaagacgaag

SEQ ID NO: 26397 - RNA, 22 nt, Homo sapiens
gcaguacacuguugguaggaau

SEQ ID NO: 26398 - RNA, 22 nt, Homo sapiens
gccaagaagugucuaagcagga

SEQ ID NO: 26399 - RNA, 22 nt, Homo sapiens
gccaguguuuuauugagaauuu

SEQ ID NO: 26400 - RNA, 22 nt, Homo sapiens
gccauagucauagauggcaggg

SEQ ID NO: 26401 - RNA, 22 nt, Homo sapiens
gccauggaggauuuauagaggc

SEQ ID NO: 26402 - RNA, 22 nt, Homo sapiens
gccauggugucuuauuuuugug

SEQ ID NO: 26403 - RNA, 22 nt, Homo sapiens
gauggcauuucuggaucugccc

SEQ ID NO: 26404 - RNA, 22 nt, Homo sapiens
gauuuuccaguggcccugauca

SEQ ID NO: 26405 - RNA, 22 nt, Homo sapiens
gauggcacuguagcaacacaaa

SEQ ID NO: 26406 - RNA, 22 nt, Homo sapiens
gauggcaugugcugccaccaag

SEQ ID NO: 26407 - RNA, 22 nt, Homo sapiens
gcaaaaaguagugcugguuagg

SEQ ID NO: 26408 - RNA, 22 nt, Homo sapiens
aaugccacugugccugccaagg

SEQ ID NO: 26409 - RNA, 22 nt, Homo sapiens
aaggaguguggugaucuugggc

SEQ ID NO: 26410 - RNA, 22 nt, Homo sapiens
aauugcauaaaauucaacucug

SEQ ID NO: 26411 - RNA, 22 nt, Homo sapiens
aaugcuaucuggaacauuguug

SEQ ID NO: 26412 - RNA, 22 nt, Homo sapiens
acacuuucuagacaagggaaua

SEQ ID NO: 26413 - RNA, 22 nt, Homo sapiens
accugugguuacagucugucuc

SEQ ID NO: 26414 - RNA, 22 nt, Homo sapiens
accuucauuguugccaugucca

SEQ ID NO: 26415 - RNA, 22 nt, Homo sapiens
accugguuuuaacauuguauua

SEQ ID NO: 26416 - RNA, 19 nt, Homo sapiens
acccuguccccaccuuuac

SEQ ID NO: 26417 - RNA, 22 nt, Homo sapiens
acugcacuccagccugcccaac

SEQ ID NO: 26418 - RNA, 22 nt, Homo sapiens
acccugucagcuggccugggca

SEQ ID NO: 26419 - RNA, 22 nt, Homo sapiens
acccugucauccacauggugcu

SEQ ID NO: 26420 - RNA, 22 nt, Homo sapiens
accccugugacggguauuugag

SEQ ID NO: 26421 - RNA, 22 nt, Homo sapiens
acaugcauggcaugcauuguac

SEQ ID NO: 26422 - RNA, 22 nt, Homo sapiens
agcggcuguuccccuggucuau

SEQ ID NO: 26423 - RNA, 22 nt, Homo sapiens
agcaccaccguugcucuauccc

SEQ ID NO: 26424 - RNA, 22 nt, Homo sapiens
agcaccacauacuacagagaua

SEQ ID NO: 26425 - RNA, 19 nt, Homo sapiens
agcagaacaaauguguggg

SEQ ID NO: 26426 - RNA, 22 nt, Homo sapiens
agagcacuguggguccaaauau

SEQ ID NO: 26427 - RNA, 22 nt, Homo sapiens
agagguuuaauugauucacagu

SEQ ID NO: 26428 - RNA, 22 nt, Homo sapiens
agagguagaagauaggcuacag

SEQ ID NO: 26429 - RNA, 22 nt, Homo sapiens
acuuugguuaucauacuuucag

SEQ ID NO: 26430 - RNA, 19 nt, Homo sapiens
acuuuggugauuagaggga

SEQ ID NO: 26431 - RNA, 22 nt, Homo sapiens
agcucauugcuguccuggagga

SEQ ID NO: 26432 - RNA, 22 nt, Homo sapiens
agcuauauugaggaugccauuc

SEQ ID NO: 26433 - RNA, 22 nt, Homo sapiens
agcugcacugguauaggagaaa

SEQ ID NO: 26434 - RNA, 21 nt, Homo sapiens
agcugcguuuaggcauuuucc

SEQ ID NO: 26435 - RNA, 22 nt, Homo sapiens
aggaagacugaaauugcuguuc

SEQ ID NO: 26436 - RNA, 21 nt, Homo sapiens
aggaagacuaugaucaauugg

SEQ ID NO: 26437 - RNA, 22 nt, Homo sapiens
agcuuuuugggaggccuuagga

SEQ ID NO: 26438 - RNA, 22 nt, Homo sapiens
aggaaauguuggucccauuucu

SEQ ID NO: 26439 - RNA, 22 nt, Homo sapiens
agcuggcuguagcugcaagucu

SEQ ID NO: 26440 - RNA, 22 nt, Homo sapiens
agcuuguuuucccauaacuaga

SEQ ID NO: 26441 - RNA, 22 nt, Homo sapiens
agcuggucugauacuuaccucc

SEQ ID NO: 26442 - RNA, 22 nt, Homo sapiens
agcuuuuugggcagcuauugac

SEQ ID NO: 26443 - RNA, 22 nt, Homo sapiens
aggacacugagcaugggagguu

SEQ ID NO: 26444 - RNA, 20 nt, Homo sapiens
aggagcauuuacauuggcuc

SEQ ID NO: 26445 - RNA, 23 nt, Homo sapiens
aggagcuuagaaguugccauugc

SEQ ID NO: 26446 - RNA, 21 nt, Homo sapiens
aggagcauucaugacgagguu

SEQ ID NO: 26447 - RNA, 21 nt, Homo sapiens
aggcaaaugaagcagccgcuc

SEQ ID NO: 26448 - RNA, 22 nt, Homo sapiens
aggcaagugggagacagcauuu

SEQ ID NO: 26449 - RNA, 22 nt, Homo sapiens
agguaaacauggggacugcuac

SEQ ID NO: 26450 - RNA, 22 nt, Homo sapiens
agguagguugagaugggcauca

SEQ ID NO: 26451 - RNA, 22 nt, Homo sapiens
auggucuuuguuucuaauucug

SEQ ID NO: 26452 - RNA, 22 nt, Homo sapiens
auguaaacauuuggucuaaauu

SEQ ID NO: 26453 - RNA, 22 nt, Homo sapiens
augggguaggcuugcuguagua

SEQ ID NO: 26454 - RNA, 22 nt, Homo sapiens
auggcuuuuccugucuugcaug

SEQ ID NO: 26455 - RNA, 22 nt, Homo sapiens
auggcuuugggcugcucugccc

SEQ ID NO: 26456 - RNA, 22 nt, Homo sapiens
auggcuuuguguucagagcuga

SEQ ID NO: 26457 - RNA, 22 nt, Homo sapiens
auggcuuuuauuguguugaggu

SEQ ID NO: 26458 - RNA, 22 nt, Homo sapiens
auggcuuucaggacguggcgag

SEQ ID NO: 26459 - RNA, 22 nt, Homo sapiens
auggcuuuuuucuugggcacuc

SEQ ID NO: 26460 - RNA, 22 nt, Homo sapiens
auggcuuuuuaaaucauguugu

SEQ ID NO: 26461 - RNA, 22 nt, Homo sapiens
auggacguagauucucaaggau

SEQ ID NO: 26462 - RNA, 22 nt, Homo sapiens
auggagguguggggagugaguu

SEQ ID NO: 26463 - RNA, 22 nt, Homo sapiens
auggaaucauccuccugggagc

SEQ ID NO: 26464 - RNA, 22 nt, Homo sapiens
augccacagaaauaaccaaaau

SEQ ID NO: 26465 - RNA, 19 nt, Homo sapiens
augccacagugaggucaga

SEQ ID NO: 26466 - RNA, 22 nt, Homo sapiens
aucauccagccccagaagggag

SEQ ID NO: 26467 - RNA, 22 nt, Homo sapiens
aucauugugcaucuucauucca

SEQ ID NO: 26468 - RNA, 22 nt, Homo sapiens
augaagaucaugaagacggcuu

SEQ ID NO: 26469 - RNA, 17 nt, Homo sapiens
augagcucaucauuuuu

SEQ ID NO: 26470 - RNA, 22 nt, Homo sapiens
aguuuuugcugauagcaugcuu

SEQ ID NO: 26471 - RNA, 22 nt, Homo sapiens
aguuggcacugagcugugauug

SEQ ID NO: 26472 - RNA, 22 nt, Homo sapiens
aguuggccccuacugggaggug

SEQ ID NO: 26473 - RNA, 22 nt, Homo sapiens
aguguuuuuaucaugaaagggu

SEQ ID NO: 26474 - RNA, 22 nt, Homo sapiens
aguguuuuucaugggauacuuu

SEQ ID NO: 26475 - RNA, 22 nt, Homo sapiens
aggugguauuucaaaguggcag

SEQ ID NO: 26476 - RNA, 22 nt, Homo sapiens
auagaguccugcucgaguugcu

SEQ ID NO: 26477 - RNA, 22 nt, Homo sapiens
auagagugcuucaucaguagua

SEQ ID NO: 26478 - RNA, 22 nt, Homo sapiens
auacacgugcagaacaugcagg

SEQ ID NO: 26479 - RNA, 22 nt, Homo sapiens
auacagguauacaaugcauaau

SEQ ID NO: 26480 - RNA, 22 nt, Homo sapiens
auaagugcuuguugaauaauag

SEQ ID NO: 26481 - RNA, 18 nt, Homo sapiens
auacaagcagcagagauu

SEQ ID NO: 26482 - RNA, 22 nt, Homo sapiens
auacaaggaaugaagagauuug

SEQ ID NO: 26483 - RNA, 22 nt, Homo sapiens
auaaucaugucugaaaccuuug

SEQ ID NO: 26484 - RNA, 22 nt, Homo sapiens
auauuggacugugcuaguuaga

SEQ ID NO: 26485 - RNA, 18 nt, Homo sapiens
auauugcauuggauggau

SEQ ID NO: 26486 - RNA, 22 nt, Homo sapiens
auauugcuugaggccaggaggu

SEQ ID NO: 26487 - RNA, 22 nt, Homo sapiens
auagcagaagaagggacaauuc

SEQ ID NO: 26488 - RNA, 19 nt, Homo sapiens
auaguguaggaaaacagcu

SEQ ID NO: 26489 - RNA, 22 nt, Homo sapiens
aucauagcucacugcagccucg

SEQ ID NO: 26490 - RNA, 22 nt, Homo sapiens
aucaaaguaggcauauguuuuu

SEQ ID NO: 26491 - RNA, 22 nt, Homo sapiens
guggcacgaugaucugggcuca

SEQ ID NO: 26492 - RNA, 22 nt, Homo sapiens
guggagucaucacucagagugg

SEQ ID NO: 26493 - RNA, 22 nt, Homo sapiens
guggcagcacauauagguuguu

SEQ ID NO: 26494 - RNA, 22 nt, Homo sapiens
guguauucaucuggcugaggua

SEQ ID NO: 26495 - RNA, 22 nt, Homo sapiens
gugugcaugucuuuuuaguagg

SEQ ID NO: 26496 - RNA, 22 nt, Homo sapiens
gugugcauaugucuuuauagua

SEQ ID NO: 26497 - RNA, 22 nt, Homo sapiens
guuacagucuuguguaagguua

SEQ ID NO: 26498 - RNA, 22 nt, Homo sapiens
guuauguuaguuacaaggcuag

SEQ ID NO: 26499 - RNA, 22 nt, Homo sapiens
guuauugcucucgaagacucuc

SEQ ID NO: 26500 - RNA, 22 nt, Homo sapiens
guucacaguucagccuguaaca

SEQ ID NO: 26501 - RNA, 22 nt, Homo sapiens
gugauuauccacgucuuuguga

SEQ ID NO: 26502 - RNA, 22 nt, Homo sapiens
guccuugaggcuuugacugugg

SEQ ID NO: 26503 - RNA, 22 nt, Homo sapiens
gucagcuuuuccuuacuuuagg

SEQ ID NO: 26504 - RNA, 22 nt, Homo sapiens
gucacugagcagaaggaagcga

SEQ ID NO: 26505 - RNA, 22 nt, Homo sapiens
gucacugccugaggcugaugca

SEQ ID NO: 26506 - RNA, 19 nt, Homo sapiens
gcggcacuggagacacagc

SEQ ID NO: 26507 - RNA, 19 nt, Homo sapiens
ggaaugcaccaguccuugc

SEQ ID NO: 26508 - RNA, 19 nt, Homo sapiens
ggaaugcuauucaaccuuu

SEQ ID NO: 26509 - RNA, 22 nt, Homo sapiens
gcccuuugugucuggcuggggu

SEQ ID NO: 26510 - RNA, 22 nt, Homo sapiens
ggcaaaauauugucugguauag

SEQ ID NO: 26511 - RNA, 22 nt, Homo sapiens
ggcaguuuggcaguuucauaaa

SEQ ID NO: 26512 - RNA, 18 nt, Homo sapiens
ggcggguguuuuauucac

SEQ ID NO: 26513 - RNA, 22 nt, Homo sapiens
guaucacacuuauugaccugca

SEQ ID NO: 26514 - RNA, 22 nt, Homo sapiens
guauacuucugaaaauagcuau

SEQ ID NO: 26515 - RNA, 22 nt, Homo sapiens
guauuugauuauagcaugcuua

SEQ ID NO: 26516 - RNA, 22 nt, Homo sapiens
guauuuuguuagggugugguau

SEQ ID NO: 26517 - RNA, 22 nt, Homo sapiens
guaagacuuauuuucuuuauca

SEQ ID NO: 26518 - RNA, 22 nt, Homo sapiens
guagagguagauucuguuuuga

SEQ ID NO: 26519 - RNA, 22 nt, Homo sapiens
guaaguauuaggugugagauuc

SEQ ID NO: 26520 - RNA, 22 nt, Homo sapiens
guaagugguagagcugggcuau

SEQ ID NO: 26521 - RNA, 22 nt, Homo sapiens
gggucauggaugugaagcuaga

SEQ ID NO: 26522 - RNA, 22 nt, Homo sapiens
gggucaguuuugagaaagcgug

SEQ ID NO: 26523 - RNA, 22 nt, Homo sapiens
uagucaaaucugaaggaaauuu

SEQ ID NO: 26524 - RNA, 21 nt, Homo sapiens
uagugcugaggcaguauggga

SEQ ID NO: 26525 - RNA, 22 nt, Homo sapiens
uaguaaacagcucugccacaau

SEQ ID NO: 26526 - RNA, 20 nt, Homo sapiens
ucaaauucuuggccuccagc

SEQ ID NO: 26527 - RNA, 22 nt, Homo sapiens
uauugcuaaauucuuuuccuag

SEQ ID NO: 26528 - RNA, 19 nt, Homo sapiens
uaaugccacugccuggcau

SEQ ID NO: 26529 - RNA, 22 nt, Homo sapiens
uaaugcauacagaagguguuuu

SEQ ID NO: 26530 - RNA, 22 nt, Homo sapiens
uaaugcaucagugguaguucuu

SEQ ID NO: 26531 - RNA, 22 nt, Homo sapiens
uaaguagcugggaguacaggca

SEQ ID NO: 26532 - RNA, 22 nt, Homo sapiens
uaaggcuuaugguaaaguccug

SEQ ID NO: 26533 - RNA, 22 nt, Homo sapiens
uaaggcuuugcuggacucaguc

SEQ ID NO: 26534 - RNA, 22 nt, Homo sapiens
guugaguuugaccugaacucug

SEQ ID NO: 26535 - RNA, 22 nt, Homo sapiens
guugcaauugauguaugucuga

SEQ ID NO: 26536 - RNA, 22 nt, Homo sapiens
guugcacagucuuuccuggacu

SEQ ID NO: 26537 - RNA, 22 nt, Homo sapiens
guugcagcacacaggcugucag

SEQ ID NO: 26538 - RNA, 22 nt, Homo sapiens
uaacaaugucuuaugggcuuaa

SEQ ID NO: 26539 - RNA, 22 nt, Homo sapiens
uagagguagguguaugaacuag

SEQ ID NO: 26540 - RNA, 22 nt, Homo sapiens
uagcaaguguuuaagcacuuuu

SEQ ID NO: 26541 - RNA, 22 nt, Homo sapiens
uagauuaucuuaaggagcauca

SEQ ID NO: 26542 - RNA, 22 nt, Homo sapiens
uacguguauuguuuucacaaga

SEQ ID NO: 26543 - RNA, 23 nt, Homo sapiens
uacuaguaagcguguucuuugca

SEQ ID NO: 26544 - RNA, 22 nt, Homo sapiens
uacucaguagucuguugcuguc

SEQ ID NO: 26545 - RNA, 22 nt, Homo sapiens
uacucagugacugguggaucaa

SEQ ID NO: 26546 - RNA, 22 nt, Homo sapiens
uggagagcaaagaauuuguuag

SEQ ID NO: 26547 - RNA, 18 nt, Homo sapiens
uggauuguacuguguucu

SEQ ID NO: 26548 - RNA, 22 nt, Homo sapiens
uggauuguuucucuugguauga

SEQ ID NO: 26549 - RNA, 22 nt, Homo sapiens
uggcaaaucagaggcauggaca

SEQ ID NO: 26550 - RNA, 22 nt, Homo sapiens
uggcaagaaccacaguuacuuu

SEQ ID NO: 26551 - RNA, 22 nt, Homo sapiens
ugcauggauguuugaacacacu

SEQ ID NO: 26552 - RNA, 19 nt, Homo sapiens
ugccauguagcacaugguc

SEQ ID NO: 26553 - RNA, 22 nt, Homo sapiens
ugccauagcaaugguaagcuga

SEQ ID NO: 26554 - RNA, 22 nt, Homo sapiens
ugcccaguggacagaaagucau

SEQ ID NO: 26555 - RNA, 18 nt, Homo sapiens
uggccaauggcaaacaga

SEQ ID NO: 26556 - RNA, 22 nt, Homo sapiens
ugguauguuuauaaguauagga

SEQ ID NO: 26557 - RNA, 22 nt, Homo sapiens
uggucaaaucugaugugagaaa

SEQ ID NO: 26558 - RNA, 22 nt, Homo sapiens
ugguauuuaauauaugagaguu

SEQ ID NO: 26559 - RNA, 22 nt, Homo sapiens
ugguaaaaugucauuuaccaga

SEQ ID NO: 26560 - RNA, 22 nt, Homo sapiens
ugggguagaauagaauugauau

SEQ ID NO: 26561 - RNA, 22 nt, Homo sapiens
ugggguaggcuguauacucugu

SEQ ID NO: 26562 - RNA, 22 nt, Homo sapiens
ugggcggagacgugcagccgcc

SEQ ID NO: 26563 - RNA, 22 nt, Homo sapiens
ugggcaaaacuaagagcugugg

SEQ ID NO: 26564 - RNA, 22 nt, Homo sapiens
ugaugcugaugccugccagaag

SEQ ID NO: 26565 - RNA, 22 nt, Homo sapiens
ugcaccacugcacugccugggu

SEQ ID NO: 26566 - RNA, 21 nt, Homo sapiens
ugcagugugguugcccugcug

SEQ ID NO: 26567 - RNA, 22 nt, Homo sapiens
ugcaguguucuuuagaggaaau

SEQ ID NO: 26568 - RNA, 22 nt, Homo sapiens
ugcagcucagcugcggaguuuu

SEQ ID NO: 26569 - RNA, 22 nt, Homo sapiens
ugcaggguccauugucccaagu

SEQ ID NO: 26570 - RNA, 20 nt, Homo sapiens
ugagcuuguaaacacuguuu

SEQ ID NO: 26571 - RNA, 22 nt, Homo sapiens
ugagcagaaguuuugauuggcg

SEQ ID NO: 26572 - RNA, 22 nt, Homo sapiens
ugagaagacaucagcuuucgga

SEQ ID NO: 26573 - RNA, 22 nt, Homo sapiens
ugagaagacaucuuugcuuugu

SEQ ID NO: 26574 - RNA, 22 nt, Homo sapiens
ucuuugguucugugcagccuau

SEQ ID NO: 26575 - RNA, 22 nt, Homo sapiens
ucuuuguugcauaggcuuguuc

SEQ ID NO: 26576 - RNA, 22 nt, Homo sapiens
ucuuuggugaauggucauccag

SEQ ID NO: 26577 - RNA, 22 nt, Homo sapiens
ucuuugguucuguuuauguaau

SEQ ID NO: 26578 - RNA, 22 nt, Homo sapiens
ucuuugauaagauccagaagaa

SEQ ID NO: 26579 - RNA, 22 nt, Homo sapiens
ucuuugaguggagcgaggcaga

SEQ ID NO: 26580 - RNA, 22 nt, Homo sapiens
ucuuugguaugugcaugugcuu

SEQ ID NO: 26581 - RNA, 22 nt, Homo sapiens
ucuuugguauugugaauagugu

SEQ ID NO: 26582 - RNA, 22 nt, Homo sapiens
ucuuuggucaucaugggaagca

SEQ ID NO: 26583 - RNA, 22 nt, Homo sapiens
ucuaaaguacuacuacuguugg

SEQ ID NO: 26584 - RNA, 22 nt, Homo sapiens
ucuguugguucuuugaggagga

SEQ ID NO: 26585 - RNA, 22 nt, Homo sapiens
ucuucaugcuugaaauaauagc

SEQ ID NO: 26586 - RNA, 22 nt, Homo sapiens
ugacauguauuagcucagugcu

SEQ ID NO: 26587 - RNA, 22 nt, Homo sapiens
ugaaguagguucucguaucgcc

SEQ ID NO: 26588 - RNA, 22 nt, Homo sapiens
ugaacucagcauccagggccaa

SEQ ID NO: 26589 - RNA, 22 nt, Homo sapiens
ugacggaggcauuggaagcuug

SEQ ID NO: 26590 - RNA, 19 nt, Homo sapiens
ugagaacaugugguauuug

SEQ ID NO: 26591 - RNA, 23 nt, Homo sapiens
ugacuuguccagugauaguucgu

SEQ ID NO: 26592 - RNA, 22 nt, Homo sapiens
ugacuugaggcucgcacaaguu

SEQ ID NO: 26593 - RNA, 22 nt, Homo sapiens
ucgcagcucacuggagccucga

SEQ ID NO: 26594 - RNA, 22 nt, Homo sapiens
uccuugagaggacagagccaua

SEQ ID NO: 26595 - RNA, 22 nt, Homo sapiens
uccuuuggcuaacuuucuaagu

SEQ ID NO: 26596 - RNA, 22 nt, Homo sapiens
uccucaguggauuggauggugc

SEQ ID NO: 26597 - RNA, 18 nt, Homo sapiens
ucccuuuguagaugaccc

SEQ ID NO: 26598 - RNA, 22 nt, Homo sapiens
ucccuguguccugggggcaccu

SEQ ID NO: 26599 - RNA, 22 nt, Homo sapiens
uccugcauucugacuugcuuuc

SEQ ID NO: 26600 - RNA, 22 nt, Homo sapiens
ucccuuuguccaacggauccac

SEQ ID NO: 26601 - RNA, 22 nt, Homo sapiens
ucagugucugugauggagaggu

SEQ ID NO: 26602 - RNA, 22 nt, Homo sapiens
ucagugucaucuggguuguuug

SEQ ID NO: 26603 - RNA, 19 nt, Homo sapiens
ucccuguagaccacagugc

SEQ ID NO: 26604 - RNA, 19 nt, Homo sapiens
uccccuguggauaccaaga

SEQ ID NO: 26605 - RNA, 22 nt, Homo sapiens
ucagcaaugaccuaagcaaaua

SEQ ID NO: 26606 - RNA, 22 nt, Homo sapiens
ucagauguuucuuuaacgcaug

SEQ ID NO: 26607 - RNA, 22 nt, Homo sapiens
ucagaccauuucauuacagacu

SEQ ID NO: 26608 - RNA, 22 nt, Homo sapiens
ucacccuguguuuugcguuugc

SEQ ID NO: 26609 - RNA, 22 nt, Homo sapiens
ucaccggagguggguugaccag

SEQ ID NO: 26610 - RNA, 17 nt, Homo sapiens
guuuggguacuggguaa

SEQ ID NO: 26611 - RNA, 22 nt, Homo sapiens
guuuugguuauauggaucaguu

SEQ ID NO: 26612 - RNA, 22 nt, Homo sapiens
guugcaaaguaauugugguuuu

SEQ ID NO: 26613 - RNA, 22 nt, Homo sapiens
guguuugauugcaaauaaucua

SEQ ID NO: 26614 - RNA, 22 nt, Homo sapiens
guugaggcaggagaauuacuug

SEQ ID NO: 26615 - RNA, 17 nt, Homo sapiens
uaaagccagucaaguca

SEQ ID NO: 26616 - RNA, 21 nt, Homo sapiens
uaaagcuagaaccuuagcuuu

SEQ ID NO: 26617 - RNA, 22 nt, Homo sapiens
uaaagcuauuauaguuauguuu

SEQ ID NO: 26618 - RNA, 22 nt, Homo sapiens
uaacaguguauuuacuacuucc

SEQ ID NO: 26619 - RNA, 22 nt, Homo sapiens
uaacaguguauuccuuuggaca

SEQ ID NO: 26620 - RNA, 22 nt, Homo sapiens
uaacaguguagaggccuauugg

SEQ ID NO: 26621 - RNA, 21 nt, Homo sapiens
uaacagcuccacuccauucuc

SEQ ID NO: 26622 - RNA, 22 nt, Homo sapiens
uaacagcucuacagcugcucuu

SEQ ID NO: 26623 - RNA, 22 nt, Homo sapiens
guggaggacuggauaaagaaaa

SEQ ID NO: 26624 - RNA, 22 nt, Homo sapiens
guggaaaacauaugcuuguuga

SEQ ID NO: 26625 - RNA, 22 nt, Homo sapiens
gugguucuagaauugaguaucc

SEQ ID NO: 26626 - RNA, 21 nt, Homo sapiens
gugguucuagagaaacagaau

SEQ ID NO: 26627 - RNA, 22 nt, Homo sapiens
gugguuuuacaaagagaaagau

SEQ ID NO: 26628 - RNA, 22 nt, Homo sapiens
gugguuuucaacuccaccugca

SEQ ID NO: 26629 - RNA, 22 nt, Homo sapiens
guggaguacugagggucacuua

SEQ ID NO: 26630 - RNA, 22 nt, Homo sapiens
gugguagaaauguagaugcuag

SEQ ID NO: 26631 - RNA, 22 nt, Homo sapiens
guguguaaauggcagugagcuc

SEQ ID NO: 26632 - RNA, 20 nt, Homo sapiens
gugugcauuucagauuuugg

SEQ ID NO: 26633 - RNA, 22 nt, Homo sapiens
gugugacugcucuauuagggcg

SEQ ID NO: 26634 - RNA, 20 nt, Homo sapiens
guguaagagcaagcuuccua

SEQ ID NO: 26635 - RNA, 22 nt, Homo sapiens
guguaaaacaauuagaggauuu

SEQ ID NO: 26636 - RNA, 22 nt, Homo sapiens
gucacaggaaacuaauaugcgc

SEQ ID NO: 26637 - RNA, 22 nt, Homo sapiens
gucagguauguuccaaaggcgg

SEQ ID NO: 26638 - RNA, 22 nt, Homo sapiens
gucugguacuuguuuguaaggg

SEQ ID NO: 26639 - RNA, 17 nt, Homo sapiens
gucuuugguugaguuua

SEQ ID NO: 26640 - RNA, 22 nt, Homo sapiens
gucuuccagccuccaucuuucu

SEQ ID NO: 26641 - RNA, 22 nt, Homo sapiens
gugaaugaaugggugaauacau

SEQ ID NO: 26642 - RNA, 22 nt, Homo sapiens
ggcaguuuguuugugaggucca

SEQ ID NO: 26643 - RNA, 22 nt, Homo sapiens
ggcagcuguguccuucguaagg

SEQ ID NO: 26644 - RNA, 22 nt, Homo sapiens
ggcaagugggagggaguguuuc

SEQ ID NO: 26645 - RNA, 23 nt, Homo sapiens
guaguuugaugcaauccacuugu

SEQ ID NO: 26646 - RNA, 22 nt, Homo sapiens
guaaggcuucuggucaacagca

SEQ ID NO: 26647 - RNA, 22 nt, Homo sapiens
guaagucucaugagaucugaug

SEQ ID NO: 26648 - RNA, 22 nt, Homo sapiens
uauugcagaaugugaguuggca

SEQ ID NO: 26649 - RNA, 22 nt, Homo sapiens
ucaaacauccccaccagggacu

SEQ ID NO: 26650 - RNA, 21 nt, Homo sapiens
ucaccuguagcugcauguucu

SEQ ID NO: 26651 - RNA, 20 nt, Homo sapiens
ucacccugacaucugcccag

SEQ ID NO: 26652 - RNA, 22 nt, Homo sapiens
ucacaugggugcaauauaauca

SEQ ID NO: 26653 - RNA, 22 nt, Homo sapiens
ucacauggauuaacucauuuau

SEQ ID NO: 26654 - RNA, 22 nt, Homo sapiens
ucacaguugauugaaacacagc

SEQ ID NO: 26655 - RNA, 20 nt, Homo sapiens
ucacauccucucccaacaug

SEQ ID NO: 26656 - RNA, 22 nt, Homo sapiens
ucacagccuaguuuuauacauu

SEQ ID NO: 26657 - RNA, 22 nt, Homo sapiens
ucacagugcaggaucaguuaau

SEQ ID NO: 26658 - RNA, 22 nt, Homo sapiens
ucacaaagcuuggccugcuucu

SEQ ID NO: 26659 - RNA, 22 nt, Homo sapiens
uagcuccagugggguuacugcu

SEQ ID NO: 26660 - RNA, 22 nt, Homo sapiens
uagcacuauuuauugaaaagga

SEQ ID NO: 26661 - RNA, 22 nt, Homo sapiens
uauaucuguccauggcccugcu

SEQ ID NO: 26662 - RNA, 22 nt, Homo sapiens
uaggguaguaauaguuguuuca

SEQ ID NO: 26663 - RNA, 20 nt, Homo sapiens
uaaggcacugugcuuuuagg

SEQ ID NO: 26664 - RNA, 22 nt, Homo sapiens
uaacccuuacaacuacacucgu

SEQ ID NO: 26665 - RNA, 21 nt, Homo sapiens
uaacccugaaggagcucugga

SEQ ID NO: 26666 - RNA, 22 nt, Homo sapiens
uaacccugaggggcuuggggac

SEQ ID NO: 26667 - RNA, 20 nt, Homo sapiens
uaagccacacagucuaaggu

SEQ ID NO: 26668 - RNA, 22 nt, Homo sapiens
cuggcacagugucagaaacaca

SEQ ID NO: 26669 - RNA, 22 nt, Homo sapiens
cugagauaggacucugcuggcu

SEQ ID NO: 26670 - RNA, 22 nt, Homo sapiens
cugagcaaagaagugauaauga

SEQ ID NO: 26671 - RNA, 22 nt, Homo sapiens
cugagcaaaguucuauuuaugg

SEQ ID NO: 26672 - RNA, 21 nt, Homo sapiens
cugcauccauuucugagugau

SEQ ID NO: 26673 - RNA, 18 nt, Homo sapiens
cugccagugugcucuccg

SEQ ID NO: 26674 - RNA, 22 nt, Homo sapiens
cuccccuuuaguuucuuaauaa

SEQ ID NO: 26675 - RNA, 22 nt, Homo sapiens
cucugacagugguuagcacugu

SEQ ID NO: 26676 - RNA, 22 nt, Homo sapiens
cucugagguuauucguaauauu

SEQ ID NO: 26677 - RNA, 22 nt, Homo sapiens
ccaguuuucucacuguugcagu

SEQ ID NO: 26678 - RNA, 19 nt, Homo sapiens
ccaguguugccagagcuga

SEQ ID NO: 26679 - RNA, 19 nt, Homo sapiens
ccaguguucugauugcacu

SEQ ID NO: 26680 - RNA, 19 nt, Homo sapiens
cuaaaugggucccuagugg

SEQ ID NO: 26681 - RNA, 22 nt, Homo sapiens
cuacaguguauuuauggagggu

SEQ ID NO: 26682 - RNA, 22 nt, Homo sapiens
cacaguguucauagccaucagg

SEQ ID NO: 26683 - RNA, 22 nt, Homo sapiens
caaugcagcuuuuggagagaaa

SEQ ID NO: 26684 - RNA, 22 nt, Homo sapiens
caaguguuuccuuaaauacuug

SEQ ID NO: 26685 - RNA, 22 nt, Homo sapiens
caaugcauuauucucccacuuc

SEQ ID NO: 26686 - RNA, 22 nt, Homo sapiens
auugcagauucgcuuuguguug

SEQ ID NO: 26687 - RNA, 22 nt, Homo sapiens
cacagugaaugucaucauugcc

SEQ ID NO: 26688 - RNA, 22 nt, Homo sapiens
cacagugaacugguggguuuuu

SEQ ID NO: 26689 - RNA, 22 nt, Homo sapiens
cauggcuuuuauaacaagaaau

SEQ ID NO: 26690 - RNA, 22 nt, Homo sapiens
cauggcuuucacaguaaagccu

SEQ ID NO: 26691 - RNA, 22 nt, Homo sapiens
cagcaagucucuaagaguucau

SEQ ID NO: 26692 - RNA, 22 nt, Homo sapiens
cagcacauagcaguugcucagu

SEQ ID NO: 26693 - RNA, 22 nt, Homo sapiens
caguagcaugccucagaaugag

SEQ ID NO: 26694 - RNA, 22 nt, Homo sapiens
ggagauaauccagggagggacu

SEQ ID NO: 26695 - RNA, 22 nt, Homo sapiens
ggaguaggcuguccggcaccca

SEQ ID NO: 26696 - RNA, 22 nt, Homo sapiens
ggagcugugauuugaguccaga

SEQ ID NO: 26697 - RNA, 22 nt, Homo sapiens
ggcaaaaucgcaauuacuuuug

SEQ ID NO: 26698 - RNA, 22 nt, Homo sapiens
gcuguuugccgccaucgcagac

SEQ ID NO: 26699 - RNA, 22 nt, Homo sapiens
gcugauggugcaguucuagccu

SEQ ID NO: 26700 - RNA, 22 nt, Homo sapiens
gcuguugguaaaaaggacauga

SEQ ID NO: 26701 - RNA, 22 nt, Homo sapiens
gcucuuuugggguaauucugag

SEQ ID NO: 26702 - RNA, 16 nt, Homo sapiens
gcucauguuuguguag

SEQ ID NO: 26703 - RNA, 22 nt, Homo sapiens
gaguucaaaucucagcucuguu

SEQ ID NO: 26704 - RNA, 22 nt, Homo sapiens
gagugguuuugauuuauagcug

SEQ ID NO: 26705 - RNA, 22 nt, Homo sapiens
gcacgugcucauuugaggucuu

SEQ ID NO: 26706 - RNA, 22 nt, Homo sapiens
gcaccacugcacucucagcuug

SEQ ID NO: 26707 - RNA, 22 nt, Homo sapiens
gcacagaugaggagaggucuca

SEQ ID NO: 26708 - RNA, 22 nt, Homo sapiens
gccaagauugguuuaauauucc

SEQ ID NO: 26709 - RNA, 22 nt, Homo sapiens
gcauggagaaggggacugauuc

SEQ ID NO: 26710 - RNA, 22 nt, Homo sapiens
gccaaaaugcugggauuacagg

SEQ ID NO: 26711 - RNA, 22 nt, Homo sapiens
cugugguguaacucuuggggcg

SEQ ID NO: 26712 - RNA, 17 nt, Homo sapiens
gacauaggaaaaggaga

SEQ ID NO: 26713 - RNA, 22 nt, Homo sapiens
gaaaugcucagggguuuuccag

SEQ ID NO: 26714 - RNA, 22 nt, Homo sapiens
cuuuuugcuagagucuaggguc

SEQ ID NO: 26715 - RNA, 20 nt, Homo sapiens
gaaacaucuauccucuccuu

SEQ ID NO: 26716 - RNA, 21 nt, Homo sapiens
gacauggcgauacuccgucuc

SEQ ID NO: 26717 - RNA, 21 nt, Homo sapiens
gacuacaccaggaugcuaguu

SEQ ID NO: 26718 - RNA, 20 nt, Homo sapiens
gacuugagagugggagagua

SEQ ID NO: 26719 - RNA, 22 nt, Homo sapiens
gagaugucuauuucagagaugu

SEQ ID NO: 26720 - RNA, 21 nt, Homo sapiens
gagcacauuguccucuaacgc

SEQ ID NO: 26721 - RNA, 22 nt, Homo sapiens
gagcacauguggagagucuggg

SEQ ID NO: 26722 - RNA, 22 nt, Homo sapiens
uggccuguaacgcugucucagc

SEQ ID NO: 26723 - RNA, 22 nt, Homo sapiens
ugggaaugaaauuacauagcuu

SEQ ID NO: 26724 - RNA, 22 nt, Homo sapiens
uggcauguaaugcagaaguugc

SEQ ID NO: 26725 - RNA, 22 nt, Homo sapiens
ugggccgcugcaggaugguccc

SEQ ID NO: 26726 - RNA, 22 nt, Homo sapiens
ugguuguuuuaaaugucgucug

SEQ ID NO: 26727 - RNA, 22 nt, Homo sapiens
uguaaaucugguuaauuggaua

SEQ ID NO: 26728 - RNA, 22 nt, Homo sapiens
ugucaguuuuaacuagggaaua

SEQ ID NO: 26729 - RNA, 22 nt, Homo sapiens
ugucaguuucaguguuagccuu

SEQ ID NO: 26730 - RNA, 22 nt, Homo sapiens
ugucagaaucuagaggcugcua

SEQ ID NO: 26731 - RNA, 21 nt, Homo sapiens
ugucaagaugacugcugcggc

SEQ ID NO: 26732 - RNA, 22 nt, Homo sapiens
uguauguuguaagacuuagacc

SEQ ID NO: 26733 - RNA, 18 nt, Homo sapiens
ugucuuagagcuugaccc

SEQ ID NO: 26734 - RNA, 22 nt, Homo sapiens
ugcaagucaucuguccuucaga

SEQ ID NO: 26735 - RNA, 22 nt, Homo sapiens
ugcaaguaauuccagcuacuga

SEQ ID NO: 26736 - RNA, 22 nt, Homo sapiens
ugcaagaggagacuguacucag

SEQ ID NO: 26737 - RNA, 22 nt, Homo sapiens
ugcaguagugugaucuuggcuc

SEQ ID NO: 26738 - RNA, 20 nt, Homo sapiens
ugcaguguccucacuuguca

SEQ ID NO: 26739 - RNA, 20 nt, Homo sapiens
ugcauguccucacuuacuug

SEQ ID NO: 26740 - RNA, 22 nt, Homo sapiens
ugcaguguggcucacgccugua

SEQ ID NO: 26741 - RNA, 22 nt, Homo sapiens
ugcagugugauuuucuggcuga

SEQ ID NO: 26742 - RNA, 22 nt, Homo sapiens
ugaguguccaccccuuucacag

SEQ ID NO: 26743 - RNA, 22 nt, Homo sapiens
ugagguguuauccagaguucuu

SEQ ID NO: 26744 - RNA, 22 nt, Homo sapiens
ugcugcauuggggauuaaguuu

SEQ ID NO: 26745 - RNA, 22 nt, Homo sapiens
ugcugcuguuaucauuuuacca

SEQ ID NO: 26746 - RNA, 22 nt, Homo sapiens
ugcgccauugaacuccuccugg

SEQ ID NO: 26747 - RNA, 18 nt, Homo sapiens
ugcuaugagauuauuuua

SEQ ID NO: 26748 - RNA, 22 nt, Homo sapiens
ugccaacaugccuggcuguuuu

SEQ ID NO: 26749 - RNA, 20 nt, Homo sapiens
uggagugaagguucuggacc

SEQ ID NO: 26750 - RNA, 22 nt, Homo sapiens
uggagugagaacuucaaugaug

SEQ ID NO: 26751 - RNA, 19 nt, Homo sapiens
uggagucaucaugcugcua

SEQ ID NO: 26752 - RNA, 22 nt, Homo sapiens
ugcuuaguguugacccucugcc

SEQ ID NO: 26753 - RNA, 22 nt, Homo sapiens
ugcuguuguuugaugaaguaau

SEQ ID NO: 26754 - RNA, 22 nt, Homo sapiens
uggaagucuucauuauguauag

SEQ ID NO: 26755 - RNA, 21 nt, Homo sapiens
uggaaguguacaauuauaccc

SEQ ID NO: 26756 - RNA, 22 nt, Homo sapiens
uggaaguauagauaauugaaag

SEQ ID NO: 26757 - RNA, 22 nt, Homo sapiens
ucugccaaccacaaaauuuauu

SEQ ID NO: 26758 - RNA, 22 nt, Homo sapiens
ucuuuggucuacuuucauaugu

SEQ ID NO: 26759 - RNA, 22 nt, Homo sapiens
ucuuugguauuuguggggaauu

SEQ ID NO: 26760 - RNA, 21 nt, Homo sapiens
ucuuuggucaccaguuuucau

SEQ ID NO: 26761 - RNA, 22 nt, Homo sapiens
ucuuuggucagaaagauuacac

SEQ ID NO: 26762 - RNA, 22 nt, Homo sapiens
ucuuugguuucugucucuguaa

SEQ ID NO: 26763 - RNA, 22 nt, Homo sapiens
ucuuugguuguuuagggugcau

SEQ ID NO: 26764 - RNA, 17 nt, Homo sapiens
ucuucuguuacuguggc

SEQ ID NO: 26765 - RNA, 22 nt, Homo sapiens
ucuugcaauuuccuuaguggug

SEQ ID NO: 26766 - RNA, 22 nt, Homo sapiens
ucacuggucuaaguggaggggg

SEQ ID NO: 26767 - RNA, 22 nt, Homo sapiens
uccccuuuguaagauggaaacg

SEQ ID NO: 26768 - RNA, 22 nt, Homo sapiens
ucuaugguuuauuuccaagugu

SEQ ID NO: 26769 - RNA, 19 nt, Homo sapiens
ucccuuuguagguaaccug

SEQ ID NO: 26770 - RNA, 19 nt, Homo sapiens
ucccuuuguauggacauac

SEQ ID NO: 26771 - RNA, 22 nt, Homo sapiens
ucgcaguuaauaaugaugugcg

SEQ ID NO: 26772 - RNA, 22 nt, Homo sapiens
ucgugcaaacguaauugugguu

SEQ ID NO: 26773 - RNA, 19 nt, Homo sapiens
ugagaaccucuacagaguc

SEQ ID NO: 26774 - RNA, 22 nt, Homo sapiens
ugagaagaugaacuccuugguc

SEQ ID NO: 26775 - RNA, 22 nt, Homo sapiens
ugagauaaggaaauugaggcuc

SEQ ID NO: 26776 - RNA, 22 nt, Homo sapiens
ugagaugaagucuugcucuguu

SEQ ID NO: 26777 - RNA, 22 nt, Homo sapiens
ugagauaaugcaugugaagauc

SEQ ID NO: 26778 - RNA, 22 nt, Homo sapiens
ugaaaguuauauugugaaauuc

SEQ ID NO: 26779 - RNA, 22 nt, Homo sapiens
ucuuuguuagaacccucuccuu

SEQ ID NO: 26780 - RNA, 22 nt, Homo sapiens
ugacagcugaagauguugaacc

SEQ ID NO: 26781 - RNA, 23 nt, Homo sapiens
ugacagaccuucuggaagaaguc

SEQ ID NO: 26782 - RNA, 17 nt, Homo sapiens
ugacagaaacuuguugu

SEQ ID NO: 26783 - RNA, 20 nt, Homo sapiens
ugacaucagcaauguaauaa

SEQ ID NO: 26784 - RNA, 22 nt, Homo sapiens
uuagaacagugcucaccacaaa

SEQ ID NO: 26785 - RNA, 22 nt, Homo sapiens
uuacuauguuucaaagugucuc

SEQ ID NO: 26786 - RNA, 22 nt, Homo sapiens
uuagcagcaugaaaauggacug

SEQ ID NO: 26787 - RNA, 22 nt, Homo sapiens
uuagcagcacaaaagcagacua

SEQ ID NO: 26788 - RNA, 22 nt, Homo sapiens
uuagcagcaccccacucuacug

SEQ ID NO: 26789 - RNA, 22 nt, Homo sapiens
uuaggcaggauaguuacauauu

SEQ ID NO: 26790 - RNA, 22 nt, Homo sapiens
uuaggcuaguuucuuaaacucu

SEQ ID NO: 26791 - RNA, 23 nt, Homo sapiens
uuaguaaacucaaugacaccaca

SEQ ID NO: 26792 - RNA, 22 nt, Homo sapiens
uuaguagcacagaguaucagca

SEQ ID NO: 26793 - RNA, 22 nt, Homo sapiens
uuaccagucugauuccuguuag

SEQ ID NO: 26794 - RNA, 22 nt, Homo sapiens
uuaccagucuagggcucaguuu

SEQ ID NO: 26795 - RNA, 19 nt, Homo sapiens
uuaaguaguuagagggucu

SEQ ID NO: 26796 - RNA, 22 nt, Homo sapiens
ugugaauguaaccuuauuugga

SEQ ID NO: 26797 - RNA, 19 nt, Homo sapiens
ugugaacaucacagagugu

SEQ ID NO: 26798 - RNA, 22 nt, Homo sapiens
ugugaagauggacuaauauagu

SEQ ID NO: 26799 - RNA, 22 nt, Homo sapiens
ugugaccaaaaucaacauaccu

SEQ ID NO: 26800 - RNA, 22 nt, Homo sapiens
uucagacugggugaagagggua

SEQ ID NO: 26801 - RNA, 22 nt, Homo sapiens
uuccacuuuuuccuugugcucc

SEQ ID NO: 26802 - RNA, 22 nt, Homo sapiens
uuccaguguguucauccucaga

SEQ ID NO: 26803 - RNA, 22 nt, Homo sapiens
uucuuuggaaacaguacuaauu

SEQ ID NO: 26804 - RNA, 22 nt, Homo sapiens
uucuuuggauaaaguuuuaugc

SEQ ID NO: 26805 - RNA, 22 nt, Homo sapiens
uucuuugguacaagggccgacc

SEQ ID NO: 26806 - RNA, 22 nt, Homo sapiens
uuccuugaaacagucaagagaa

SEQ ID NO: 26807 - RNA, 22 nt, Homo sapiens
uugacuucagagcugauucaag

SEQ ID NO: 26808 - RNA, 22 nt, Homo sapiens
uugaggaagugguuccccagag

SEQ ID NO: 26809 - RNA, 20 nt, Homo sapiens
uugaguauugccagggaggc

SEQ ID NO: 26810 - RNA, 22 nt, Homo sapiens
uugaggaggcagucuucccauu

SEQ ID NO: 26811 - RNA, 22 nt, Homo sapiens
uugaggaggcagucuguccguu

SEQ ID NO: 26812 - RNA, 22 nt, Homo sapiens
uugaggaggcagucucuccauu

SEQ ID NO: 26813 - RNA, 22 nt, Homo sapiens
uugaggaggcagucugcccauu

SEQ ID NO: 26814 - RNA, 22 nt, Homo sapiens
uuggacagaugguuacauuuuu

SEQ ID NO: 26815 - RNA, 22 nt, Homo sapiens
uuggacugugagguuucguggg

SEQ ID NO: 26816 - RNA, 22 nt, Homo sapiens
uugauaugcuugucaguccauu

SEQ ID NO: 26817 - RNA, 22 nt, Homo sapiens
uuggcucuggcugggcuccagc

SEQ ID NO: 26818 - RNA, 22 nt, Homo sapiens
uugggcuugagggugcccaguc

SEQ ID NO: 26819 - RNA, 22 nt, Homo sapiens
uugggcuuuuagguccuuaaca

SEQ ID NO: 26820 - RNA, 23 nt, Homo sapiens
uuguacacuaagaaucgcagaug

SEQ ID NO: 26821 - RNA, 22 nt, Homo sapiens
uuguaccacagggcaugaagug

SEQ ID NO: 26822 - RNA, 22 nt, Homo sapiens
uuguaauguuaccaaauggugu

SEQ ID NO: 26823 - RNA, 22 nt, Homo sapiens
uuguaagaaucuagcucuuuau

SEQ ID NO: 26824 - RNA, 20 nt, Homo sapiens
uuguacuccugggcucaagc

SEQ ID NO: 26825 - RNA, 22 nt, Homo sapiens
uugggucaguuccuugacuccu

SEQ ID NO: 26826 - RNA, 22 nt, Homo sapiens
uuuaaagcuccaagcaugucug

SEQ ID NO: 26827 - RNA, 22 nt, Homo sapiens
uuuaauacugcaucuuuacucu

SEQ ID NO: 26828 - RNA, 22 nt, Homo sapiens
uuuaaugcugcccagucauggg

SEQ ID NO: 26829 - RNA, 22 nt, Homo sapiens
uuguuaagaugcagauucugga

SEQ ID NO: 26830 - RNA, 22 nt, Homo sapiens
uuguuauguuggucaguaaugu

SEQ ID NO: 26831 - RNA, 22 nt, Homo sapiens
uuguuauguaucucaagauaaa

SEQ ID NO: 26832 - RNA, 22 nt, Homo sapiens
uuuaaagcuaaaauauguuuau

SEQ ID NO: 26833 - RNA, 23 nt, Homo sapiens
uuguccccuccaaagcucauguu

SEQ ID NO: 26834 - RNA, 22 nt, Homo sapiens
uuguagcuuuuuaaugugcugc

SEQ ID NO: 26835 - RNA, 22 nt, Homo sapiens
uugucauuuucagaguguuacg

SEQ ID NO: 26836 - RNA, 22 nt, Homo sapiens
uuguagcaaauguguaaacaaa

SEQ ID NO: 26837 - RNA, 22 nt, Homo sapiens
uugugccccuucucagucgggc

SEQ ID NO: 26838 - RNA, 21 nt, Homo sapiens
uuuuugguggucauggauaga

SEQ ID NO: 26839 - RNA, 22 nt, Homo sapiens
uuuuugguugguaggcuauuaa

SEQ ID NO: 26840 - RNA, 22 nt, Homo sapiens
uuuuguacaacagcucugggga

SEQ ID NO: 26841 - RNA, 22 nt, Homo sapiens
aacuugcacuugauugagagcu

SEQ ID NO: 26842 - RNA, 22 nt, Homo sapiens
uuuugguuuuauccagggucuc

SEQ ID NO: 26843 - RNA, 22 nt, Homo sapiens
aagauagcuaagcuucuucuaa

SEQ ID NO: 26844 - RNA, 22 nt, Homo sapiens
aagcaaacaucagcuugguuaa

SEQ ID NO: 26845 - RNA, 22 nt, Homo sapiens
aagagguaggaaauggucauuu

SEQ ID NO: 26846 - RNA, 23 nt, Homo sapiens
aagagguaugacuaugaagugga

SEQ ID NO: 26847 - RNA, 22 nt, Homo sapiens
aagagcucucuguagcauguga

SEQ ID NO: 26848 - RNA, 21 nt, Homo sapiens
aagcaugguguaucuuuccau

SEQ ID NO: 26849 - RNA, 20 nt, Homo sapiens
aagcaagcauuugcaaucau

SEQ ID NO: 26850 - RNA, 22 nt, Homo sapiens
uuuccagguggccaacauuuua

SEQ ID NO: 26851 - RNA, 22 nt, Homo sapiens
uuucccuuugcuuugucagcca

SEQ ID NO: 26852 - RNA, 22 nt, Homo sapiens
uuugcuaaucaacacuggccug

SEQ ID NO: 26853 - RNA, 22 nt, Homo sapiens
uuuggcagaaaacaagaaucug

SEQ ID NO: 26854 - RNA, 22 nt, Homo sapiens
uuuguaauaccugaggcugggu

SEQ ID NO: 26855 - RNA, 22 nt, Homo sapiens
uuuggauagugugguccuuuua

SEQ ID NO: 26856 - RNA, 22 nt, Homo sapiens
uuuugguaaugaacuuaggaag

SEQ ID NO: 26857 - RNA, 22 nt, Homo sapiens
uuuugguauacacaaggguccu

SEQ ID NO: 26858 - RNA, 22 nt, Homo sapiens
uuuugguauaugcaggggucuu

SEQ ID NO: 26859 - RNA, 22 nt, Homo sapiens
uuuugguuaggauggguggcau

SEQ ID NO: 26860 - RNA, 22 nt, Homo sapiens
uuuugguuguuggguaagagua

SEQ ID NO: 26861 - RNA, 22 nt, Homo sapiens
uuuuggcacuuugucugauucu

SEQ ID NO: 26862 - RNA, 22 nt, Homo sapiens
auggcucaguguguaucuauca

SEQ ID NO: 26863 - RNA, 22 nt, Homo sapiens
auggcccugcuaccacuuuucu

SEQ ID NO: 26864 - RNA, 22 nt, Homo sapiens
auggcagugucuagggguguuu

SEQ ID NO: 26865 - RNA, 22 nt, Homo sapiens
augauggaggccgugauggacg

SEQ ID NO: 26866 - RNA, 22 nt, Homo sapiens
auggcaauguaagucagaaaaa

SEQ ID NO: 26867 - RNA, 22 nt, Homo sapiens
auggcagaaucaagccgacagc

SEQ ID NO: 26868 - RNA, 22 nt, Homo sapiens
auugacaguuggccaguaagug

SEQ ID NO: 26869 - RNA, 23 nt, Homo sapiens
auugauagugccuuugugcuaau

SEQ ID NO: 26870 - RNA, 22 nt, Homo sapiens
auugaggcauguaccaaugguc

SEQ ID NO: 26871 - RNA, 22 nt, Homo sapiens
auguuaagauggaacaugggaa

SEQ ID NO: 26872 - RNA, 22 nt, Homo sapiens
auguaagugugcucaaauguua

SEQ ID NO: 26873 - RNA, 22 nt, Homo sapiens
aucaccuggaggugaucacuug

SEQ ID NO: 26874 - RNA, 22 nt, Homo sapiens
aucacagugaaaacagucaauu

SEQ ID NO: 26875 - RNA, 22 nt, Homo sapiens
auagcucuugcuuacccacugu

SEQ ID NO: 26876 - RNA, 22 nt, Homo sapiens
auagggcacgagaugugagccu

SEQ ID NO: 26877 - RNA, 22 nt, Homo sapiens
augaagauguugccuuuuuaau

SEQ ID NO: 26878 - RNA, 22 nt, Homo sapiens
augagauaaaccaucucuuaag

SEQ ID NO: 26879 - RNA, 22 nt, Homo sapiens
aucuuuggugcaugauacuuug

SEQ ID NO: 26880 - RNA, 22 nt, Homo sapiens
aucuuuggugaguucuuugguc

SEQ ID NO: 26881 - RNA, 22 nt, Homo sapiens
aucuuuggucaucacagcuaga

SEQ ID NO: 26882 - RNA, 22 nt, Homo sapiens
auccacaugcaguuggaaacag

SEQ ID NO: 26883 - RNA, 22 nt, Homo sapiens
aucaucaugcacuacagccugg

SEQ ID NO: 26884 - RNA, 22 nt, Homo sapiens
agcuguuguucucagaggcuuu

SEQ ID NO: 26885 - RNA, 22 nt, Homo sapiens
aggagguugguaccaucuguuu

SEQ ID NO: 26886 - RNA, 22 nt, Homo sapiens
aggagcuuuggggaaaacagau

SEQ ID NO: 26887 - RNA, 22 nt, Homo sapiens
aggaggauugcuuucaucuuuu

SEQ ID NO: 26888 - RNA, 22 nt, Homo sapiens
aggcaaguugcucaaaugcaaa

SEQ ID NO: 26889 - RNA, 20 nt, Homo sapiens
agcuccauuccugaaggcug

SEQ ID NO: 26890 - RNA, 18 nt, Homo sapiens
agcucaguguuugcuuac

SEQ ID NO: 26891 - RNA, 22 nt, Homo sapiens
agccgguguccacgaagaagag

SEQ ID NO: 26892 - RNA, 22 nt, Homo sapiens
agcuacaucuugcucugggaug

SEQ ID NO: 26893 - RNA, 22 nt, Homo sapiens
agcccauuuugcacugagaugc

SEQ ID NO: 26894 - RNA, 22 nt, Homo sapiens
agcaagauugauggccugcagg

SEQ ID NO: 26895 - RNA, 17 nt, Homo sapiens
agcaccacacucucuug

SEQ ID NO: 26896 - RNA, 22 nt, Homo sapiens
aguggguguuccauuggauaaa

SEQ ID NO: 26897 - RNA, 23 nt, Homo sapiens
aguggucuccugggcccagcugu

SEQ ID NO: 26898 - RNA, 18 nt, Homo sapiens
aguuguuuuauccugccc

SEQ ID NO: 26899 - RNA, 22 nt, Homo sapiens
auaaaccuacauuuucacuucu

SEQ ID NO: 26900 - RNA, 17 nt, Homo sapiens
auaaacucaucauuuuu

SEQ ID NO: 26901 - RNA, 18 nt, Homo sapiens
auaaacucaucauuuuua

SEQ ID NO: 26902 - RNA, 22 nt, Homo sapiens
auaaagacacuuggcaugauuu

SEQ ID NO: 26903 - RNA, 22 nt, Homo sapiens
agguagcauagcgggaauauca

SEQ ID NO: 26904 - RNA, 22 nt, Homo sapiens
agguacuugagauucugaacug

SEQ ID NO: 26905 - RNA, 22 nt, Homo sapiens
aggcuuuuguuuuggucucagg

SEQ ID NO: 26906 - RNA, 22 nt, Homo sapiens
agggcuuaucuguguagaguuc

SEQ ID NO: 26907 - RNA, 22 nt, Homo sapiens
agggcuuguuuaacuaucauua

SEQ ID NO: 26908 - RNA, 22 nt, Homo sapiens
aggcugguauuuacaaaagcuc

SEQ ID NO: 26909 - RNA, 21 nt, Homo sapiens
aggcuguuguuuugggaugga

SEQ ID NO: 26910 - RNA, 22 nt, Homo sapiens
agugcaauggugccaucauagc

SEQ ID NO: 26911 - RNA, 22 nt, Homo sapiens
acaugcauccaugugaagagac

SEQ ID NO: 26912 - RNA, 22 nt, Homo sapiens
aaugugcacuuggagccuugcu

SEQ ID NO: 26913 - RNA, 22 nt, Homo sapiens
acccuguugucagaauguggau

SEQ ID NO: 26914 - RNA, 22 nt, Homo sapiens
accacaggguaaaguuagauau

SEQ ID NO: 26915 - RNA, 22 nt, Homo sapiens
acccagaagucauucaggaaca

SEQ ID NO: 26916 - RNA, 22 nt, Homo sapiens
agauggugauaaaugugguacc

SEQ ID NO: 26917 - RNA, 22 nt, Homo sapiens
agaugguuuuguucacagcucu

SEQ ID NO: 26918 - RNA, 22 nt, Homo sapiens
acuuauuguggcugacccaaac

SEQ ID NO: 26919 - RNA, 21 nt, Homo sapiens
agaaaaucuuaugggaaacau

SEQ ID NO: 26920 - RNA, 22 nt, Homo sapiens
acuuugguuuauagaauuuagg

SEQ ID NO: 26921 - RNA, 22 nt, Homo sapiens
acuuuguguuacccagcaagga

SEQ ID NO: 26922 - RNA, 22 nt, Homo sapiens
aagagaugaagguccugacugu

SEQ ID NO: 26923 - RNA, 22 nt, Homo sapiens
aagagagcuaugugcauaauua

SEQ ID NO: 26924 - RNA, 22 nt, Homo sapiens
aagcuacauuuuauuuauguca

SEQ ID NO: 26925 - RNA, 22 nt, Homo sapiens
aaaugcugucaaauuguguucu

SEQ ID NO: 26926 - RNA, 22 nt, Homo sapiens
aaaguucuguugauagugcuga

SEQ ID NO: 26927 - RNA, 22 nt, Homo sapiens
aaauaacugucagguucuggaa

SEQ ID NO: 26928 - RNA, 22 nt, Homo sapiens
aaaugcauaucaagauugcccu

SEQ ID NO: 26929 - RNA, 22 nt, Homo sapiens
aaucaacauuguuuuaagucaa

SEQ ID NO: 26930 - RNA, 22 nt, Homo sapiens
aaucagagcccucugagcuuca

SEQ ID NO: 26931 - RNA, 22 nt, Homo sapiens
aaucugggguuguuuggggagu

SEQ ID NO: 26932 - RNA, 22 nt, Homo sapiens
aaugcaucuagaaaggugaauu

SEQ ID NO: 26933 - RNA, 22 nt, Homo sapiens
aagcuccauuucugccaugaga

SEQ ID NO: 26934 - RNA, 22 nt, Homo sapiens
aagcugcauuuucuagaugcuu

SEQ ID NO: 26935 - RNA, 22 nt, Homo sapiens
aagcucuuguugaaucuuguca

SEQ ID NO: 26936 - RNA, 22 nt, Homo sapiens
aagcuggcauucauucguucuu

SEQ ID NO: 26937 - RNA, 22 nt, Homo sapiens
aagcuggcauucaugagauuac

SEQ ID NO: 26938 - RNA, 22 nt, Homo sapiens
aagcuguguguaagcucucaca

SEQ ID NO: 26939 - RNA, 22 nt, Homo sapiens
aagcuguugguggaucuaccau

SEQ ID NO: 26940 - RNA, 22 nt, Homo sapiens
aaggaacuggaauauuuugaac

SEQ ID NO: 26941 - RNA, 22 nt, Homo sapiens
aaguagcuggaugcaguggcac

SEQ ID NO: 26942 - RNA, 22 nt, Homo sapiens
aaguaagcauccaauaaauguu

SEQ ID NO: 26943 - RNA, 20 nt, Homo sapiens
aagugcaucguugugucugc

SEQ ID NO: 26944 - RNA, 22 nt, Homo sapiens
aauaagcugagagaauucuaca

SEQ ID NO: 26945 - RNA, 22 nt, Homo sapiens
aaacugucuucugacaguuucc

SEQ ID NO: 26946 - RNA, 22 nt, Homo sapiens
aaagcagcaggugguuuucaau

SEQ ID NO: 26947 - RNA, 22 nt, Homo sapiens
aaagcuaagguagcauuggaga

SEQ ID NO: 26948 - RNA, 18 nt, Homo sapiens
aaaaagugcucaggccua

SEQ ID NO: 26949 - RNA, 22 nt, Homo sapiens
aaaagcauucagagugcugggc

SEQ ID NO: 26950 - RNA, 22 nt, Homo sapiens
aaaaguucuuugagccuugaca

SEQ ID NO: 26951 - RNA, 22 nt, Homo sapiens
uuugaaaguaauuugguuggug

SEQ ID NO: 26952 - RNA, 22 nt, Homo sapiens
uuuugcauuggcugaggagugu

SEQ ID NO: 26953 - RNA, 22 nt, Homo sapiens
uuuugcaguuacagagagugag

SEQ ID NO: 26954 - RNA, 22 nt, Homo sapiens
uuuuggacuucaauuugacacu

SEQ ID NO: 26955 - RNA, 22 nt, Homo sapiens
uuuuggacuugcuccccugucc

SEQ ID NO: 26956 - RNA, 22 nt, Homo sapiens
uuugcugagucauuccaugcug

SEQ ID NO: 26957 - RNA, 22 nt, Homo sapiens
uuugccaauauuuuacugagga

SEQ ID NO: 26958 - RNA, 22 nt, Homo sapiens
uuugccaauauuuuauugagga

SEQ ID NO: 26959 - RNA, 22 nt, Homo sapiens
uuugcuauagugaauagugcug

SEQ ID NO: 26960 - RNA, 22 nt, Homo sapiens
uuuugguauauacggggguccu

SEQ ID NO: 26961 - RNA, 20 nt, Homo sapiens
uguagguguacaguaaggag

SEQ ID NO: 26962 - RNA, 22 nt, Homo sapiens
uguagacaccaaagacagcaua

SEQ ID NO: 26963 - RNA, 22 nt, Homo sapiens
uguagcagccauaaacacagug

SEQ ID NO: 26964 - RNA, 22 nt, Homo sapiens
uguagauaucuaucaggucaau

SEQ ID NO: 26965 - RNA, 22 nt, Homo sapiens
uguauaguugagucaaguuuca

SEQ ID NO: 26966 - RNA, 22 nt, Homo sapiens
uguaaaucuuucacaguugaug

SEQ ID NO: 26967 - RNA, 22 nt, Homo sapiens
uguaagugugcaauucagugau

SEQ ID NO: 26968 - RNA, 22 nt, Homo sapiens
uggcuguuuauuucacaugggu

SEQ ID NO: 26969 - RNA, 22 nt, Homo sapiens
uggcuguuuauuucaccuggau

SEQ ID NO: 26970 - RNA, 22 nt, Homo sapiens
uggcuacuguacuugagcuauu

SEQ ID NO: 26971 - RNA, 17 nt, Homo sapiens
uggugcuugaaaguugc

SEQ ID NO: 26972 - RNA, 22 nt, Homo sapiens
ugguguuugagaagcugauguc

SEQ ID NO: 26973 - RNA, 22 nt, Homo sapiens
ugguucaguugcacaggcuguu

SEQ ID NO: 26974 - RNA, 22 nt, Homo sapiens
ugugauaguuggcuaaagcagu

SEQ ID NO: 26975 - RNA, 22 nt, Homo sapiens
ugugagcuauggaguuguagag

SEQ ID NO: 26976 - RNA, 18 nt, Homo sapiens
ugucagaguggauuguaa

SEQ ID NO: 26977 - RNA, 22 nt, Homo sapiens
uguguaaauauauacacacgug

SEQ ID NO: 26978 - RNA, 22 nt, Homo sapiens
uguggucaucacuugaagguaa

SEQ ID NO: 26979 - RNA, 22 nt, Homo sapiens
uguguaauaccuuugacuauau

SEQ ID NO: 26980 - RNA, 22 nt, Homo sapiens
uguguaauacucuaaugaugca

SEQ ID NO: 26981 - RNA, 22 nt, Homo sapiens
ugugcacaugauauaucacaua

SEQ ID NO: 26982 - RNA, 22 nt, Homo sapiens
uuagaacaguguuugccucgcu

SEQ ID NO: 26983 - RNA, 22 nt, Homo sapiens
uuaaguuguagcuacaaauaca

SEQ ID NO: 26984 - RNA, 22 nt, Homo sapiens
uuaaggccccgcccauucaggc

SEQ ID NO: 26985 - RNA, 22 nt, Homo sapiens
uuaaggcuuucccuauguaaaa

SEQ ID NO: 26986 - RNA, 22 nt, Homo sapiens
uuaagguaugugggcauuuugu

SEQ ID NO: 26987 - RNA, 22 nt, Homo sapiens
uucacaugguugccuuuugauc

SEQ ID NO: 26988 - RNA, 22 nt, Homo sapiens
uuagcagcaugagaauggacua

SEQ ID NO: 26989 - RNA, 22 nt, Homo sapiens
uuagggaggacaguuacaacag

SEQ ID NO: 26990 - RNA, 22 nt, Homo sapiens
uugguccauuacauugaugaca

SEQ ID NO: 26991 - RNA, 22 nt, Homo sapiens
uuggucaggcuaaucucgaacg

SEQ ID NO: 26992 - RNA, 22 nt, Homo sapiens
uuguaaagaucauaugcuguuc

SEQ ID NO: 26993 - RNA, 21 nt, Homo sapiens
uuggucuucucugugauucuu

SEQ ID NO: 26994 - RNA, 22 nt, Homo sapiens
uugucaguguucacucaaagcu

SEQ ID NO: 26995 - RNA, 22 nt, Homo sapiens
uugucaccucuaaaucucauau

SEQ ID NO: 26996 - RNA, 22 nt, Homo sapiens
uuguaacaguucugcgagcagc

SEQ ID NO: 26997 - RNA, 22 nt, Homo sapiens
uuguaauggagcaaacagguug

SEQ ID NO: 26998 - RNA, 22 nt, Homo sapiens
uugcuaagucaagagaaaugau

SEQ ID NO: 26999 - RNA, 22 nt, Homo sapiens
uugcucaggcuagaguucagcu

SEQ ID NO: 27000 - RNA, 22 nt, Homo sapiens
uuggaagacauucugucugcua

SEQ ID NO: 27001 - RNA, 22 nt, Homo sapiens
uuggcuuuuaugcagcuuaggu

SEQ ID NO: 27002 - RNA, 22 nt, Homo sapiens
uugggagugucucuggacugca

SEQ ID NO: 27003 - RNA, 22 nt, Homo sapiens
uugguaaaaugaccacagacau

SEQ ID NO: 27004 - RNA, 22 nt, Homo sapiens
uugguaccccugguguacuaau

SEQ ID NO: 27005 - RNA, 23 nt, Homo sapiens
uuucacaguagcuggaucagccu

SEQ ID NO: 27006 - RNA, 22 nt, Homo sapiens
uuuaaugcacuaggugguguuc

SEQ ID NO: 27007 - RNA, 17 nt, Homo sapiens
uuuaaugcuaggacucu

SEQ ID NO: 27008 - RNA, 22 nt, Homo sapiens
uuuaaaguuagaaggaaagggc

SEQ ID NO: 27009 - RNA, 22 nt, Homo sapiens
uuuaagguauguggugaaaauu

SEQ ID NO: 27010 - RNA, 22 nt, Homo sapiens
uugugguugauacacguaggaa

SEQ ID NO: 27011 - RNA, 22 nt, Homo sapiens
uugucuccuagacgaccaggcg

SEQ ID NO: 27012 - RNA, 22 nt, Homo sapiens
uugcacagugcuuucuuugccc

SEQ ID NO: 27013 - RNA, 22 nt, Homo sapiens
uugcagagaaauuucugguuua

SEQ ID NO: 27014 - RNA, 20 nt, Homo sapiens
uugcagagcccaacccugga

SEQ ID NO: 27015 - RNA, 22 nt, Homo sapiens
uugcagcauucugguuccuggu

SEQ ID NO: 27016 - RNA, 22 nt, Homo sapiens
uugcagagccccugcaaggguc

SEQ ID NO: 27017 - RNA, 22 nt, Homo sapiens
uugauugacaugucucuguuca

SEQ ID NO: 27018 - RNA, 22 nt, Homo sapiens
uugcaagaaaucagagccuucc

SEQ ID NO: 27019 - RNA, 22 nt, Homo sapiens
uugagcucaucuucagggguga

SEQ ID NO: 27020 - RNA, 22 nt, Homo sapiens
uugaagguagaaguucucaauu

SEQ ID NO: 27021 - RNA, 22 nt, Homo sapiens
uugaagagaaccgcggcuuauu

SEQ ID NO: 27022 - RNA, 22 nt, Homo sapiens
uucagaguggacagaaauuaag

SEQ ID NO: 27023 - RNA, 22 nt, Homo sapiens
uucaucuggcaauucagagauu

SEQ ID NO: 27024 - RNA, 22 nt, Homo sapiens
uugaaaguguucacaaugguau

SEQ ID NO: 27025 - RNA, 22 nt, Homo sapiens
uucuugguguaguaguugaaaa

SEQ ID NO: 27026 - RNA, 22 nt, Homo sapiens
uaauacuugucauaaaggcauu

SEQ ID NO: 27027 - RNA, 22 nt, Homo sapiens
uaagugaauauggacaguuagc

SEQ ID NO: 27028 - RNA, 22 nt, Homo sapiens
uaagugcuugacuuugauguuu

SEQ ID NO: 27029 - RNA, 22 nt, Homo sapiens
uaaguuguugacauuaggggaa

SEQ ID NO: 27030 - RNA, 22 nt, Homo sapiens
uagaaaguagggaagguaggau

SEQ ID NO: 27031 - RNA, 20 nt, Homo sapiens
uagaaaguagaguggugguu

SEQ ID NO: 27032 - RNA, 22 nt, Homo sapiens
guguaauacauuagcaaaccaa

SEQ ID NO: 27033 - RNA, 22 nt, Homo sapiens
gugguaaaauggcauagagcua

SEQ ID NO: 27034 - RNA, 22 nt, Homo sapiens
gugguuuuuuucugccuuauag

SEQ ID NO: 27035 - RNA, 22 nt, Homo sapiens
gugguuuuuaaaguaccugugg

SEQ ID NO: 27036 - RNA, 22 nt, Homo sapiens
gugguuuuaucccagaaauuaa

SEQ ID NO: 27037 - RNA, 22 nt, Homo sapiens
gugguuuuaauauucagucuag

SEQ ID NO: 27038 - RNA, 22 nt, Homo sapiens
gugguucuagagggacagaaug

SEQ ID NO: 27039 - RNA, 22 nt, Homo sapiens
uaaacugucuugcaguuacaug

SEQ ID NO: 27040 - RNA, 22 nt, Homo sapiens
uaaagagcuuuugaggugucau

SEQ ID NO: 27041 - RNA, 22 nt, Homo sapiens
uaaagcuagaauuguuccagca

SEQ ID NO: 27042 - RNA, 22 nt, Homo sapiens
uaaagccauugucaaguuugua

SEQ ID NO: 27043 - RNA, 22 nt, Homo sapiens
uaaaagucaucacaacuggagu

SEQ ID NO: 27044 - RNA, 22 nt, Homo sapiens
uaacuccauuuggacucaguau

SEQ ID NO: 27045 - RNA, 22 nt, Homo sapiens
uauggcuucuauaaggaagcuu

SEQ ID NO: 27046 - RNA, 22 nt, Homo sapiens
uauggccacugucuuugaguca

SEQ ID NO: 27047 - RNA, 22 nt, Homo sapiens
uagcuccacagcuauauauaau

SEQ ID NO: 27048 - RNA, 22 nt, Homo sapiens
uaggagugugaacccuguuuug

SEQ ID NO: 27049 - RNA, 22 nt, Homo sapiens
uaggcaguguucucacuuguaa

SEQ ID NO: 27050 - RNA, 22 nt, Homo sapiens
uagcugcugcuaggcuaaggau

SEQ ID NO: 27051 - RNA, 22 nt, Homo sapiens
uagggaguuuuggggugcagaa

SEQ ID NO: 27052 - RNA, 22 nt, Homo sapiens
uagguugucaucagucuccacu

SEQ ID NO: 27053 - RNA, 22 nt, Homo sapiens
uagguuguguucugagccucag

SEQ ID NO: 27054 - RNA, 22 nt, Homo sapiens
gugcaguuuuaagugaguuucu

SEQ ID NO: 27055 - RNA, 22 nt, Homo sapiens
gugcaguuuugagugaguuucu

SEQ ID NO: 27056 - RNA, 22 nt, Homo sapiens
gugccacaguguuaagggauuc

SEQ ID NO: 27057 - RNA, 22 nt, Homo sapiens
guggcgaagauggauugaguca

SEQ ID NO: 27058 - RNA, 22 nt, Homo sapiens
gugggauggagagaagguauga

SEQ ID NO: 27059 - RNA, 22 nt, Homo sapiens
guggggucaucucauuugugga

SEQ ID NO: 27060 - RNA, 22 nt, Homo sapiens
guggcaguuuuaaauaugaaaa

SEQ ID NO: 27061 - RNA, 22 nt, Homo sapiens
guggaagaaaucagguuauuug

SEQ ID NO: 27062 - RNA, 22 nt, Homo sapiens
gugcagaugucuuuauaguagc

SEQ ID NO: 27063 - RNA, 22 nt, Homo sapiens
gugcacaugguagguauugagu

SEQ ID NO: 27064 - RNA, 22 nt, Homo sapiens
gugcacaugcgugcgcacauau

SEQ ID NO: 27065 - RNA, 22 nt, Homo sapiens
gugcaaugucaggagaugcagc

SEQ ID NO: 27066 - RNA, 22 nt, Homo sapiens
gugcaaacuccaggucucuuca

SEQ ID NO: 27067 - RNA, 22 nt, Homo sapiens
gugaccaaagauagcucaaguu

SEQ ID NO: 27068 - RNA, 22 nt, Homo sapiens
gucuuuggaaagacaaaguuca

SEQ ID NO: 27069 - RNA, 22 nt, Homo sapiens
gucuuugcuuuuaaccagaggu

SEQ ID NO: 27070 - RNA, 22 nt, Homo sapiens
gucuuuggaaaaaaugucuguu

SEQ ID NO: 27071 - RNA, 22 nt, Homo sapiens
guaaugaacuugaaagccuguu

SEQ ID NO: 27072 - RNA, 22 nt, Homo sapiens
guacagugcucacaaugagagc

SEQ ID NO: 27073 - RNA, 22 nt, Homo sapiens
gucagugucuuaacagagauua

SEQ ID NO: 27074 - RNA, 22 nt, Homo sapiens
gucauggguuaaagguggauac

SEQ ID NO: 27075 - RNA, 22 nt, Homo sapiens
gcugcuuuugaugacaaaaaca

SEQ ID NO: 27076 - RNA, 22 nt, Homo sapiens
gcuuggugugcaagugguacua

SEQ ID NO: 27077 - RNA, 22 nt, Homo sapiens
gcuuguguuuacuguaguuacu

SEQ ID NO: 27078 - RNA, 22 nt, Homo sapiens
gcuuugguucaaccaggcaauu

SEQ ID NO: 27079 - RNA, 22 nt, Homo sapiens
gcucugguuacaaaggcaaauu

SEQ ID NO: 27080 - RNA, 22 nt, Homo sapiens
gcgguuuuaagugaguuucuua

SEQ ID NO: 27081 - RNA, 22 nt, Homo sapiens
gcgugguguuagaaugagaagu

SEQ ID NO: 27082 - RNA, 22 nt, Homo sapiens
gcacgcauuguccuucuaguca

SEQ ID NO: 27083 - RNA, 22 nt, Homo sapiens
gcacauuacaaguauuagcuca

SEQ ID NO: 27084 - RNA, 22 nt, Homo sapiens
gcacauggccccaucgugccga

SEQ ID NO: 27085 - RNA, 22 nt, Homo sapiens
ggcucaguuuccuccgucugcu

SEQ ID NO: 27086 - RNA, 22 nt, Homo sapiens
ggcuuuggucacacaggggcaa

SEQ ID NO: 27087 - RNA, 22 nt, Homo sapiens
ggugcuugaggaacggaggcug

SEQ ID NO: 27088 - RNA, 22 nt, Homo sapiens
ggcaaggaggggcacuuucacu

SEQ ID NO: 27089 - RNA, 22 nt, Homo sapiens
ggcaaggugcuacagacaguga

SEQ ID NO: 27090 - RNA, 22 nt, Homo sapiens
ggagauuauuaguguuucaugc

SEQ ID NO: 27091 - RNA, 22 nt, Homo sapiens
ggaaagacuauuguaaaggaug

SEQ ID NO: 27092 - RNA, 21 nt, Homo sapiens
ggaguauaaggcaaaggagug

SEQ ID NO: 27093 - RNA, 22 nt, Homo sapiens
ucucaguuuucuggggaagaaa

SEQ ID NO: 27094 - RNA, 22 nt, Homo sapiens
ucccaguggucuugaaacaggg

SEQ ID NO: 27095 - RNA, 22 nt, Homo sapiens
uccauaguacuagaaacugacc

SEQ ID NO: 27096 - RNA, 22 nt, Homo sapiens
ucucaguguuaucuaucugccu

SEQ ID NO: 27097 - RNA, 19 nt, Homo sapiens
ucucugguguuggagggga

SEQ ID NO: 27098 - RNA, 22 nt, Homo sapiens
ucugagguuacugcuuuguaga

SEQ ID NO: 27099 - RNA, 22 nt, Homo sapiens
ucuggcaagauauccauugcuu

SEQ ID NO: 27100 - RNA, 22 nt, Homo sapiens
ucugguuccugcauucauucaa

SEQ ID NO: 27101 - RNA, 22 nt, Homo sapiens
ucugucuuugccuaaguuuguc

SEQ ID NO: 27102 - RNA, 22 nt, Homo sapiens
ucuugguaaugucacauuuccu

SEQ ID NO: 27103 - RNA, 22 nt, Homo sapiens
ucuuggguuuguccuucuccua

SEQ ID NO: 27104 - RNA, 22 nt, Homo sapiens
ucuuggguuguuggcuucuccu

SEQ ID NO: 27105 - RNA, 22 nt, Homo sapiens
ucuuuaguuaagggacauuuua

SEQ ID NO: 27106 - RNA, 22 nt, Homo sapiens
ucuugguuaggggaaauaggca

SEQ ID NO: 27107 - RNA, 22 nt, Homo sapiens
ucuugguuuauugugguaugaa

SEQ ID NO: 27108 - RNA, 22 nt, Homo sapiens
ugaauguaacuaaaccugugaa

SEQ ID NO: 27109 - RNA, 21 nt, Homo sapiens
ugaaugucuaggcagaaguuu

SEQ ID NO: 27110 - RNA, 22 nt, Homo sapiens
ugaauaguuugacagaacucuu

SEQ ID NO: 27111 - RNA, 22 nt, Homo sapiens
ugaaaugccuugagauuuugac

SEQ ID NO: 27112 - RNA, 22 nt, Homo sapiens
ucaaaaucucuuagcugugucu

SEQ ID NO: 27113 - RNA, 20 nt, Homo sapiens
uauuugguuauuuccauggu

SEQ ID NO: 27114 - RNA, 22 nt, Homo sapiens
uauuuggauagucuggaaaaaa

SEQ ID NO: 27115 - RNA, 22 nt, Homo sapiens
ucacagucggugacuucuugcu

SEQ ID NO: 27116 - RNA, 22 nt, Homo sapiens
ucacauggaaaaguccaguaaa

SEQ ID NO: 27117 - RNA, 22 nt, Homo sapiens
ucacauuguacaaacagguaag

SEQ ID NO: 27118 - RNA, 22 nt, Homo sapiens
ucacauuguauauguaccuauc

SEQ ID NO: 27119 - RNA, 22 nt, Homo sapiens
ucacauguguaugagcuuugau

SEQ ID NO: 27120 - RNA, 22 nt, Homo sapiens
ucacauguguaaauugguguaa

SEQ ID NO: 27121 - RNA, 22 nt, Homo sapiens
ucacaugugcguuuuggcaugu

SEQ ID NO: 27122 - RNA, 18 nt, Homo sapiens
ucacauggccgagagaga

SEQ ID NO: 27123 - RNA, 22 nt, Homo sapiens
ucacaugugacauauauauuug

SEQ ID NO: 27124 - RNA, 22 nt, Homo sapiens
ucacugaaaccuccaccucucg

SEQ ID NO: 27125 - RNA, 22 nt, Homo sapiens
ucaugugagcacagagcaagau

SEQ ID NO: 27126 - RNA, 21 nt, Homo sapiens
ucaucaagcuguagacaugau

SEQ ID NO: 27127 - RNA, 22 nt, Homo sapiens
uccagguacucagggggcugag

SEQ ID NO: 27128 - RNA, 22 nt, Homo sapiens
uccagguuucaugcucuuuauu

SEQ ID NO: 27129 - RNA, 20 nt, Homo sapiens
uccaguuuuggagacauucu

SEQ ID NO: 27130 - RNA, 22 nt, Homo sapiens
uccauagacauuuuaagguagu

SEQ ID NO: 27131 - RNA, 22 nt, Homo sapiens
ucaggguacuuguggccaaagu

SEQ ID NO: 27132 - RNA, 22 nt, Homo sapiens
ucagguaaucuauuugucuuuu

SEQ ID NO: 27133 - RNA, 22 nt, Homo sapiens
ucagugucugugcaccgcugga

SEQ ID NO: 27134 - RNA, 22 nt, Homo sapiens
uggaguguaauuagccaucagu

SEQ ID NO: 27135 - RNA, 22 nt, Homo sapiens
uggcagaugggugagcuggaga

SEQ ID NO: 27136 - RNA, 22 nt, Homo sapiens
uggcacuggagauacauuaaua

SEQ ID NO: 27137 - RNA, 22 nt, Homo sapiens
uggcaauaaggacuccuuaggu

SEQ ID NO: 27138 - RNA, 19 nt, Homo sapiens
uggcaaugucagcagagau

SEQ ID NO: 27139 - RNA, 22 nt, Homo sapiens
ugcugcuguuguuguuacuagc

SEQ ID NO: 27140 - RNA, 22 nt, Homo sapiens
ugcuguguugcuggcuuaaaga

SEQ ID NO: 27141 - RNA, 22 nt, Homo sapiens
uggaaguaaccaugaauggaau

SEQ ID NO: 27142 - RNA, 18 nt, Homo sapiens
ugcuuagucauuuucaau

SEQ ID NO: 27143 - RNA, 22 nt, Homo sapiens
ugcguucauuuggccaguggcg

SEQ ID NO: 27144 - RNA, 22 nt, Homo sapiens
ugcugcaaacaugagaggaagu

SEQ ID NO: 27145 - RNA, 22 nt, Homo sapiens
ugccuucuguuaaacgaggaug

SEQ ID NO: 27146 - RNA, 20 nt, Homo sapiens
ugccaagaaaugaggguauu

SEQ ID NO: 27147 - RNA, 22 nt, Homo sapiens
ugcaaaguccucauucuuaccc

SEQ ID NO: 27148 - RNA, 22 nt, Homo sapiens
ugcaaagucgaaacugcaguuu

SEQ ID NO: 27149 - RNA, 22 nt, Homo sapiens
ugcaagacaucguauuuugguc

SEQ ID NO: 27150 - RNA, 22 nt, Homo sapiens
ugcaagauaggcaguuugcacu

SEQ ID NO: 27151 - RNA, 22 nt, Homo sapiens
ugauaugugaguauaugguuau

SEQ ID NO: 27152 - RNA, 22 nt, Homo sapiens
ugacacagugggggauccuuuu

SEQ ID NO: 27153 - RNA, 22 nt, Homo sapiens
ugagaugagggaagccuaggca

SEQ ID NO: 27154 - RNA, 21 nt, Homo sapiens
ugagaugauccugcaugcaug

SEQ ID NO: 27155 - RNA, 22 nt, Homo sapiens
ugagauagggucucacucuguc

SEQ ID NO: 27156 - RNA, 22 nt, Homo sapiens
aucacugggagcagccauuaau

SEQ ID NO: 27157 - RNA, 19 nt, Homo sapiens
auaugggguuugaacugug

SEQ ID NO: 27158 - RNA, 22 nt, Homo sapiens
aucugcaaauaaugaagauugg

SEQ ID NO: 27159 - RNA, 22 nt, Homo sapiens
aucugguauuacugcaacugua

SEQ ID NO: 27160 - RNA, 22 nt, Homo sapiens
auccugaugacacagugcugca

SEQ ID NO: 27161 - RNA, 22 nt, Homo sapiens
auggcagagucagaaagucagg

SEQ ID NO: 27162 - RNA, 22 nt, Homo sapiens
auggcaguguaugauuauauua

SEQ ID NO: 27163 - RNA, 22 nt, Homo sapiens
auggcaguuucagcuauaguuu

SEQ ID NO: 27164 - RNA, 21 nt, Homo sapiens
auggaaagacugccucuucaa

SEQ ID NO: 27165 - RNA, 22 nt, Homo sapiens
augcuguuuuguagcucccucu

SEQ ID NO: 27166 - RNA, 22 nt, Homo sapiens
augcuguuuugaauucucuaga

SEQ ID NO: 27167 - RNA, 20 nt, Homo sapiens
augacuagaggacaugguaa

SEQ ID NO: 27168 - RNA, 22 nt, Homo sapiens
augacaguaugacuccaaaagu

SEQ ID NO: 27169 - RNA, 20 nt, Homo sapiens
agcuguuguuaaaaaggagg

SEQ ID NO: 27170 - RNA, 22 nt, Homo sapiens
agcuguuguuaauuaacucauu

SEQ ID NO: 27171 - RNA, 20 nt, Homo sapiens
agcuguuguuaugagguuua

SEQ ID NO: 27172 - RNA, 22 nt, Homo sapiens
agcuguuguacacuuuaccuuu

SEQ ID NO: 27173 - RNA, 22 nt, Homo sapiens
agcaugacauauuguagagaaa

SEQ ID NO: 27174 - RNA, 22 nt, Homo sapiens
agcuguuguuuuaagauacuaa

SEQ ID NO: 27175 - RNA, 22 nt, Homo sapiens
aguagcacaugccacccugucu

SEQ ID NO: 27176 - RNA, 22 nt, Homo sapiens
agugguaguacaggagauaccg

SEQ ID NO: 27177 - RNA, 19 nt, Homo sapiens
agucaugugaggacccuug

SEQ ID NO: 27178 - RNA, 22 nt, Homo sapiens
agucauggaucacaguagccuc

SEQ ID NO: 27179 - RNA, 22 nt, Homo sapiens
agucacagccuuuuacuuuaga

SEQ ID NO: 27180 - RNA, 22 nt, Homo sapiens
agucaaguuuuuucagagaaua

SEQ ID NO: 27181 - RNA, 22 nt, Homo sapiens
agugucaggagacagguagcug

SEQ ID NO: 27182 - RNA, 22 nt, Homo sapiens
auaaagcuauuccucucuuuuu

SEQ ID NO: 27183 - RNA, 22 nt, Homo sapiens
auaacagcugcaaggcaaaagc

SEQ ID NO: 27184 - RNA, 22 nt, Homo sapiens
auaacagcauuauugcauacgu

SEQ ID NO: 27185 - RNA, 22 nt, Homo sapiens
auaagaagugaaccagacgucu

SEQ ID NO: 27186 - RNA, 22 nt, Homo sapiens
auaagaucauuugcuaagaggg

SEQ ID NO: 27187 - RNA, 22 nt, Homo sapiens
auaagguuagcucugagaaagu

SEQ ID NO: 27188 - RNA, 22 nt, Homo sapiens
auacagugaauacuuacagugu

SEQ ID NO: 27189 - RNA, 22 nt, Homo sapiens
auagaagcuauguauaggggcc

SEQ ID NO: 27190 - RNA, 22 nt, Homo sapiens
auagcagugugaggacagacua

SEQ ID NO: 27191 - RNA, 22 nt, Homo sapiens
auagcagugccccaaacuccug

SEQ ID NO: 27192 - RNA, 22 nt, Homo sapiens
agaugcuguuaucaacuguagc

SEQ ID NO: 27193 - RNA, 22 nt, Homo sapiens
agcaagauuguucccauuuucu

SEQ ID NO: 27194 - RNA, 22 nt, Homo sapiens
agaagaacauagggugacugaa

SEQ ID NO: 27195 - RNA, 20 nt, Homo sapiens
agaagcauugcucucuucag

SEQ ID NO: 27196 - RNA, 22 nt, Homo sapiens
agacucauuuuuaucgagcaug

SEQ ID NO: 27197 - RNA, 22 nt, Homo sapiens
agacucauuuccauagucagcu

SEQ ID NO: 27198 - RNA, 20 nt, Homo sapiens
acugauauguuccuguucuc

SEQ ID NO: 27199 - RNA, 18 nt, Homo sapiens
acagugucuuacaccugu

SEQ ID NO: 27200 - RNA, 17 nt, Homo sapiens
acagugucuaugaaaug

SEQ ID NO: 27201 - RNA, 22 nt, Homo sapiens
accaccacucccgcauucuaaa

SEQ ID NO: 27202 - RNA, 22 nt, Homo sapiens
acccagaauucagucuuaggcc

SEQ ID NO: 27203 - RNA, 22 nt, Homo sapiens
accacguagaugagagaguuaa

SEQ ID NO: 27204 - RNA, 21 nt, Homo sapiens
acuuuguugggggcugaggca

SEQ ID NO: 27205 - RNA, 20 nt, Homo sapiens
agaaccuguaguguagaggg

SEQ ID NO: 27206 - RNA, 22 nt, Homo sapiens
acuuuuguuauacagugugaua

SEQ ID NO: 27207 - RNA, 22 nt, Homo sapiens
acacagugucuguguauuuaaa

SEQ ID NO: 27208 - RNA, 19 nt, Homo sapiens
acagugcuuugucagaagc

SEQ ID NO: 27209 - RNA, 22 nt, Homo sapiens
acagugcuuucaauguucagua

SEQ ID NO: 27210 - RNA, 23 nt, Homo sapiens
acagucuaguuugaagucaggua

SEQ ID NO: 27211 - RNA, 22 nt, Homo sapiens
aauggccacugaccuguguuga

SEQ ID NO: 27212 - RNA, 22 nt, Homo sapiens
aauggcucuguuggcccaagac

SEQ ID NO: 27213 - RNA, 22 nt, Homo sapiens
aauccugucuugccauccaaua

SEQ ID NO: 27214 - RNA, 22 nt, Homo sapiens
aauggcuucuuauugugguuca

SEQ ID NO: 27215 - RNA, 21 nt, Homo sapiens
aaucacaguuguucugccuuc

SEQ ID NO: 27216 - RNA, 22 nt, Homo sapiens
aaguaauugagguuuuugcugu

SEQ ID NO: 27217 - RNA, 22 nt, Homo sapiens
aaguagcagaggcaagacuuga

SEQ ID NO: 27218 - RNA, 22 nt, Homo sapiens
aagguggugucagagagcuuau

SEQ ID NO: 27219 - RNA, 22 nt, Homo sapiens
aagguggaguugacaauuuuca

SEQ ID NO: 27220 - RNA, 20 nt, Homo sapiens
uuuugaacuuggcaaccugu

SEQ ID NO: 27221 - RNA, 22 nt, Homo sapiens
uuuuagcaaagagacugguggc

SEQ ID NO: 27222 - RNA, 22 nt, Homo sapiens
aauaaaguaggaggugaggaaa

SEQ ID NO: 27223 - RNA, 22 nt, Homo sapiens
aaguuguuggaguuccauuguu

SEQ ID NO: 27224 - RNA, 22 nt, Homo sapiens
aagucauggagaagguggaggu

SEQ ID NO: 27225 - RNA, 22 nt, Homo sapiens
aaguccccugacagaggggagg

SEQ ID NO: 27226 - RNA, 22 nt, Homo sapiens
aagucacugagacuuguggcug

SEQ ID NO: 27227 - RNA, 22 nt, Homo sapiens
aagucaaggagagaagcuucag

SEQ ID NO: 27228 - RNA, 22 nt, Homo sapiens
aagugcaaaucuguggcugaaa

SEQ ID NO: 27229 - RNA, 22 nt, Homo sapiens
aagugcuguccuaccuuuggga

SEQ ID NO: 27230 - RNA, 22 nt, Homo sapiens
gagaucuuuaagaacuacugcu

SEQ ID NO: 27231 - RNA, 22 nt, Homo sapiens
gagacagugucagccauugaaa

SEQ ID NO: 27232 - RNA, 22 nt, Homo sapiens
gagaacagagauaauuuuacuu

SEQ ID NO: 27233 - RNA, 22 nt, Homo sapiens
gacuuugguaaacucgguggca

SEQ ID NO: 27234 - RNA, 18 nt, Homo sapiens
gacaguguggcgauuccu

SEQ ID NO: 27235 - RNA, 22 nt, Homo sapiens
gacagacacaauugauccauga

SEQ ID NO: 27236 - RNA, 22 nt, Homo sapiens
cuuugugcccuucugcccauca

SEQ ID NO: 27237 - RNA, 22 nt, Homo sapiens
cuuugguugugcucuccacuuu

SEQ ID NO: 27238 - RNA, 20 nt, Homo sapiens
cuuuguccuccugcugugcu

SEQ ID NO: 27239 - RNA, 22 nt, Homo sapiens
cuuuggugauagauaccccaua

SEQ ID NO: 27240 - RNA, 19 nt, Homo sapiens
cuuugguugagcguguugg

SEQ ID NO: 27241 - RNA, 22 nt, Homo sapiens
gauauguuucuucaauaccuag

SEQ ID NO: 27242 - RNA, 17 nt, Homo sapiens
gaucacagucgucuccu

SEQ ID NO: 27243 - RNA, 22 nt, Homo sapiens
gauguaggugcauuugcacgug

SEQ ID NO: 27244 - RNA, 22 nt, Homo sapiens
gauuauagaaguaauggguuua

SEQ ID NO: 27245 - RNA, 22 nt, Homo sapiens
gagguggugguggaggcauagc

SEQ ID NO: 27246 - RNA, 22 nt, Homo sapiens
gagguggauacauuaaauaaug

SEQ ID NO: 27247 - RNA, 22 nt, Homo sapiens
gagguugggaugagggauacag

SEQ ID NO: 27248 - RNA, 22 nt, Homo sapiens
gaggugguagguucacagcagc

SEQ ID NO: 27249 - RNA, 22 nt, Homo sapiens
cuggaguuugaggcugcaguga

SEQ ID NO: 27250 - RNA, 22 nt, Homo sapiens
cuguucaggaggcauuuggugg

SEQ ID NO: 27251 - RNA, 19 nt, Homo sapiens
cuguuguacuccaggcauu

SEQ ID NO: 27252 - RNA, 22 nt, Homo sapiens
cuuucugaggagaauagagaac

SEQ ID NO: 27253 - RNA, 21 nt, Homo sapiens
cuuugguagaguuuuuagggu

SEQ ID NO: 27254 - RNA, 23 nt, Homo sapiens
cuuugguaggaaauuugaauuau

SEQ ID NO: 27255 - RNA, 22 nt, Homo sapiens
cuuuggcauuagccuguauaga

SEQ ID NO: 27256 - RNA, 22 nt, Homo sapiens
cuuuggcaaugucauuuucaau

SEQ ID NO: 27257 - RNA, 20 nt, Homo sapiens
cuuaaugcagcauuucucag

SEQ ID NO: 27258 - RNA, 22 nt, Homo sapiens
cuucacuuuguuaaacuccaau

SEQ ID NO: 27259 - RNA, 21 nt, Homo sapiens
cuugucuugcuuagaauagac

SEQ ID NO: 27260 - RNA, 22 nt, Homo sapiens
cugcuguuguuaacuuuuggag

SEQ ID NO: 27261 - RNA, 22 nt, Homo sapiens
cugcacugagacccucuuugcu

SEQ ID NO: 27262 - RNA, 18 nt, Homo sapiens
cugagcacugcuuuauga

SEQ ID NO: 27263 - RNA, 22 nt, Homo sapiens
cugaggugggaguuuuucucau

SEQ ID NO: 27264 - RNA, 23 nt, Homo sapiens
cuacagugccugucucuuuggcc

SEQ ID NO: 27265 - RNA, 22 nt, Homo sapiens
cuacagugggucuguaguccuu

SEQ ID NO: 27266 - RNA, 22 nt, Homo sapiens
caugcagcacacaugucugugc

SEQ ID NO: 27267 - RNA, 22 nt, Homo sapiens
cauggagcuaggcuugaucccu

SEQ ID NO: 27268 - RNA, 22 nt, Homo sapiens
cauggcacauauauaucuaggu

SEQ ID NO: 27269 - RNA, 22 nt, Homo sapiens
ccacacugucuuggugggaaac

SEQ ID NO: 27270 - RNA, 22 nt, Homo sapiens
cuaagauugucuuaguguguug

SEQ ID NO: 27271 - RNA, 19 nt, Homo sapiens
ccuuugguuuccaugacau

SEQ ID NO: 27272 - RNA, 22 nt, Homo sapiens
ccggcuguguggagaggccccu

SEQ ID NO: 27273 - RNA, 22 nt, Homo sapiens
cccuggacacacacuuuuauuc

SEQ ID NO: 27274 - RNA, 22 nt, Homo sapiens
cccugaagauacagaguuuggg

SEQ ID NO: 27275 - RNA, 22 nt, Homo sapiens
cagcuguuguuaugucugcagg

SEQ ID NO: 27276 - RNA, 22 nt, Homo sapiens
cagcuugugguauugcugguug

SEQ ID NO: 27277 - RNA, 22 nt, Homo sapiens
caggugcuuacuuaauagccau

SEQ ID NO: 27278 - RNA, 19 nt, Homo sapiens
caguaucauugcacauagu

SEQ ID NO: 27279 - RNA, 22 nt, Homo sapiens
caguugguguacauauauguau

SEQ ID NO: 27280 - RNA, 22 nt, Homo sapiens
cagugcauguggcacucuccag

SEQ ID NO: 27281 - RNA, 19 nt, Homo sapiens
caucccugagcugaagugg

SEQ ID NO: 27282 - RNA, 22 nt, Homo sapiens
auggccauuacuaagaauguuu

SEQ ID NO: 27283 - RNA, 22 nt, Homo sapiens
auggcaguuuauucuaaaucaa

SEQ ID NO: 27284 - RNA, 22 nt, Homo sapiens
auggcaguuuggucucugugcu

SEQ ID NO: 27285 - RNA, 22 nt, Homo sapiens
auggccgggugcgguggcucac

SEQ ID NO: 27286 - RNA, 22 nt, Homo sapiens
auggcggugugggcggugcagc

SEQ ID NO: 27287 - RNA, 22 nt, Homo sapiens
auggccugaugcaccuguccca

SEQ ID NO: 27288 - RNA, 22 nt, Homo sapiens
auggcuauucuucuuuugucag

SEQ ID NO: 27289 - RNA, 22 nt, Homo sapiens
auggcuuuaagagugucugaau

SEQ ID NO: 27290 - RNA, 22 nt, Homo sapiens
augugcaugcuguucugccaga

SEQ ID NO: 27291 - RNA, 22 nt, Homo sapiens
auuccagguggcgccauucaca

SEQ ID NO: 27292 - RNA, 22 nt, Homo sapiens
cacauguucaggagcacuuaga

SEQ ID NO: 27293 - RNA, 22 nt, Homo sapiens
caaaggcuguuauaggccagga

SEQ ID NO: 27294 - RNA, 22 nt, Homo sapiens
caaaccuguaggggccaagagg

SEQ ID NO: 27295 - RNA, 23 nt, Homo sapiens
auugcagaaucacagagguagug

SEQ ID NO: 27296 - RNA, 19 nt, Homo sapiens
aaccgggagugcacauguu

SEQ ID NO: 27297 - RNA, 22 nt, Homo sapiens
aagagguuuaacugacucacag

SEQ ID NO: 27298 - RNA, 22 nt, Homo sapiens
aacagugcauucagggauauau

SEQ ID NO: 27299 - RNA, 22 nt, Homo sapiens
aacauugaacuuggcacaccca

SEQ ID NO: 27300 - RNA, 22 nt, Homo sapiens
aacagacugucacauaaaauug

SEQ ID NO: 27301 - RNA, 22 nt, Homo sapiens
aaauccauuuguucagcuaugc

SEQ ID NO: 27302 - RNA, 22 nt, Homo sapiens
aaaugcaugaauaagcucgugu

SEQ ID NO: 27303 - RNA, 22 nt, Homo sapiens
aagaugcagaagcccagauguu

SEQ ID NO: 27304 - RNA, 22 nt, Homo sapiens
aagcaguguggacuaaugggaa

SEQ ID NO: 27305 - RNA, 22 nt, Homo sapiens
aaggaauacuggugguugcuau

SEQ ID NO: 27306 - RNA, 22 nt, Homo sapiens
aagugguagggucaggauugga

SEQ ID NO: 27307 - RNA, 23 nt, Homo sapiens
aagguaagcuagaaagauguaga

SEQ ID NO: 27308 - RNA, 22 nt, Homo sapiens
aaggugguuuucucuuggaguc

SEQ ID NO: 27309 - RNA, 22 nt, Homo sapiens
aagguucuugcuugcaugacug

SEQ ID NO: 27310 - RNA, 20 nt, Homo sapiens
aaggcuuucgaguuccaggg

SEQ ID NO: 27311 - RNA, 22 nt, Homo sapiens
aaagugauugcgguuuuugcca

SEQ ID NO: 27312 - RNA, 22 nt, Homo sapiens
aaagugcugggauuuuaggcau

SEQ ID NO: 27313 - RNA, 22 nt, Homo sapiens
aaagugcuaggauuaccugggg

SEQ ID NO: 27314 - RNA, 22 nt, Homo sapiens
aaagugcugagaguucuaacuu

SEQ ID NO: 27315 - RNA, 22 nt, Homo sapiens
aaaguggacuaagugaauauga

SEQ ID NO: 27316 - RNA, 22 nt, Homo sapiens
aaagguaguacuucuagaaggg

SEQ ID NO: 27317 - RNA, 22 nt, Homo sapiens
aaagugcuuacuaaguugccaa

SEQ ID NO: 27318 - RNA, 22 nt, Homo sapiens
aaaguggugugaguauguaucu

SEQ ID NO: 27319 - RNA, 22 nt, Homo sapiens
aaagugucuguuccuagcauga

SEQ ID NO: 27320 - RNA, 22 nt, Homo sapiens
aaagugauuguaguuuuugcca

SEQ ID NO: 27321 - RNA, 20 nt, Homo sapiens
aaaguaggcuaauaccaaaa

SEQ ID NO: 27322 - RNA, 22 nt, Homo sapiens
aaaagcuuagaugggcuuguau

SEQ ID NO: 27323 - RNA, 22 nt, Homo sapiens
aaacagucuucuccugagggac

SEQ ID NO: 27324 - RNA, 22 nt, Homo sapiens
acggcaguguggugcggucagg

SEQ ID NO: 27325 - RNA, 22 nt, Homo sapiens
acgagguuaggaguuaaaggcu

SEQ ID NO: 27326 - RNA, 17 nt, Homo sapiens
acagugcuuugcuuucc

SEQ ID NO: 27327 - RNA, 18 nt, Homo sapiens
acagugucauggcucaau

SEQ ID NO: 27328 - RNA, 22 nt, Homo sapiens
acagugucaugucguguucccc

SEQ ID NO: 27329 - RNA, 19 nt, Homo sapiens
acagugucucuauaaugau

SEQ ID NO: 27330 - RNA, 22 nt, Homo sapiens
acccuuugucaaucaguacuaa

SEQ ID NO: 27331 - RNA, 22 nt, Homo sapiens
acaguguuacuugauaguguau

SEQ ID NO: 27332 - RNA, 22 nt, Homo sapiens
acagugucugacacguaggaag

SEQ ID NO: 27333 - RNA, 22 nt, Homo sapiens
acaggagugggauuugaguccu

SEQ ID NO: 27334 - RNA, 22 nt, Homo sapiens
aauuggcagugcucuugccaca

SEQ ID NO: 27335 - RNA, 22 nt, Homo sapiens
aauugguuaagauaagaucaua

SEQ ID NO: 27336 - RNA, 22 nt, Homo sapiens
aaguugguguaugagacagaag

SEQ ID NO: 27337 - RNA, 22 nt, Homo sapiens
aaguguaaguuaauguuuaggu

SEQ ID NO: 27338 - RNA, 22 nt, Homo sapiens
aaguguaugaaacaguccaugg

SEQ ID NO: 27339 - RNA, 22 nt, Homo sapiens
agguuguugcaugcuccuuagg

SEQ ID NO: 27340 - RNA, 22 nt, Homo sapiens
aaauugcaaugcgaggcagagg

SEQ ID NO: 27341 - RNA, 22 nt, Homo sapiens
agcugccagucuuguaaggccu

SEQ ID NO: 27342 - RNA, 22 nt, Homo sapiens
agcugguccugugacuugcuuc

SEQ ID NO: 27343 - RNA, 22 nt, Homo sapiens
agcuuguuuuauagaaagucaa

SEQ ID NO: 27344 - RNA, 22 nt, Homo sapiens
agcuuguuuuccugcaacuaga

SEQ ID NO: 27345 - RNA, 22 nt, Homo sapiens
aggaauuuaauguaugauaaua

SEQ ID NO: 27346 - RNA, 16 nt, Homo sapiens
aggaagacuuagagau

SEQ ID NO: 27347 - RNA, 22 nt, Homo sapiens
aggaagcuagcauuuguucagu

SEQ ID NO: 27348 - RNA, 22 nt, Homo sapiens
aaaugcucucuacacguuucug

SEQ ID NO: 27349 - RNA, 22 nt, Homo sapiens
agacaguguguguauauauggu

SEQ ID NO: 27350 - RNA, 22 nt, Homo sapiens
agacuagacagaugaacagcac

SEQ ID NO: 27351 - RNA, 22 nt, Homo sapiens
agagacauugcuccaacucacc

SEQ ID NO: 27352 - RNA, 22 nt, Homo sapiens
agcugcaauguuuaguauaaua

SEQ ID NO: 27353 - RNA, 22 nt, Homo sapiens
agcugcaaagggagagaugauu

SEQ ID NO: 27354 - RNA, 20 nt, Homo sapiens
augccacugagcagugguga

SEQ ID NO: 27355 - RNA, 22 nt, Homo sapiens
augcuuguugcagccugagccu

SEQ ID NO: 27356 - RNA, 22 nt, Homo sapiens
aucuuuggauacuugauauagu

SEQ ID NO: 27357 - RNA, 22 nt, Homo sapiens
aucuuuggcgggaauaucacag

SEQ ID NO: 27358 - RNA, 22 nt, Homo sapiens
augagcucauaaagagugauuu

SEQ ID NO: 27359 - RNA, 21 nt, Homo sapiens
augucauggaugacuaauuca

SEQ ID NO: 27360 - RNA, 22 nt, Homo sapiens
augucaaggugggugauaguuu

SEQ ID NO: 27361 - RNA, 22 nt, Homo sapiens
augugcaaaguuaagaucccag

SEQ ID NO: 27362 - RNA, 22 nt, Homo sapiens
augugccauucucauggcgcuu

SEQ ID NO: 27363 - RNA, 22 nt, Homo sapiens
auggauaugcuuccaacugccu

SEQ ID NO: 27364 - RNA, 22 nt, Homo sapiens
auggcuuuugaccugguaggau

SEQ ID NO: 27365 - RNA, 22 nt, Homo sapiens
auggcuuuggucucccagugau

SEQ ID NO: 27366 - RNA, 22 nt, Homo sapiens
auggcuuuugcccuaaauggau

SEQ ID NO: 27367 - RNA, 19 nt, Homo sapiens
auauaacauccaggagcag

SEQ ID NO: 27368 - RNA, 22 nt, Homo sapiens
auauaugcacacgugugcauau

SEQ ID NO: 27369 - RNA, 22 nt, Homo sapiens
aucaaagugaauuaaugagaau

SEQ ID NO: 27370 - RNA, 22 nt, Homo sapiens
aucaagcuggcauauguaguuc

SEQ ID NO: 27371 - RNA, 22 nt, Homo sapiens
aucccugagccugacucucaga

SEQ ID NO: 27372 - RNA, 22 nt, Homo sapiens
aucccaguucagccucugacac

SEQ ID NO: 27373 - RNA, 22 nt, Homo sapiens
aucagcauucccaaaugaugug

SEQ ID NO: 27374 - RNA, 22 nt, Homo sapiens
aucuccaggugccagcugcgcc

SEQ ID NO: 27375 - RNA, 22 nt, Homo sapiens
auccucaguggcuuaaguauag

SEQ ID NO: 27376 - RNA, 22 nt, Homo sapiens
auacagugaauaucuggggcag

SEQ ID NO: 27377 - RNA, 22 nt, Homo sapiens
auacaguguauguauaguacau

SEQ ID NO: 27378 - RNA, 22 nt, Homo sapiens
auacaguguucugggaagaagu

SEQ ID NO: 27379 - RNA, 22 nt, Homo sapiens
auacagacacagucagaggggu

SEQ ID NO: 27380 - RNA, 22 nt, Homo sapiens
auacagcuaaaauauuaaguua

SEQ ID NO: 27381 - RNA, 22 nt, Homo sapiens
auagcagcagcuaguagugaua

SEQ ID NO: 27382 - RNA, 22 nt, Homo sapiens
uccacaauggcugaacuagauu

SEQ ID NO: 27383 - RNA, 22 nt, Homo sapiens
ucauuguccaacuucuuucagu

SEQ ID NO: 27384 - RNA, 21 nt, Homo sapiens
uccagcuuugagaguuguggu

SEQ ID NO: 27385 - RNA, 22 nt, Homo sapiens
uccagguuuggcuuuauaacuu

SEQ ID NO: 27386 - RNA, 22 nt, Homo sapiens
ucauggggugcuuugcuagauu

SEQ ID NO: 27387 - RNA, 16 nt, Homo sapiens
ucccaccauugcuugu

SEQ ID NO: 27388 - RNA, 22 nt, Homo sapiens
uccauuuguucagcuucaggaa

SEQ ID NO: 27389 - RNA, 22 nt, Homo sapiens
uccauuugucuauguuucuguu

SEQ ID NO: 27390 - RNA, 22 nt, Homo sapiens
uccauaguugcacucuggagcc

SEQ ID NO: 27391 - RNA, 22 nt, Homo sapiens
uccauagugagcagucaaugua

SEQ ID NO: 27392 - RNA, 22 nt, Homo sapiens
uccaguguuauaauaugcgucu

SEQ ID NO: 27393 - RNA, 22 nt, Homo sapiens
uccccgucacacgcaggcuuac

SEQ ID NO: 27394 - RNA, 22 nt, Homo sapiens
uccugagacucacaggcucccc

SEQ ID NO: 27395 - RNA, 22 nt, Homo sapiens
uccuucaguccaguggguuuug

SEQ ID NO: 27396 - RNA, 22 nt, Homo sapiens
uccuugagccucccagacucag

SEQ ID NO: 27397 - RNA, 21 nt, Homo sapiens
ucauaagcucaacaucuguag

SEQ ID NO: 27398 - RNA, 22 nt, Homo sapiens
ucagugucugcauucuuauugu

SEQ ID NO: 27399 - RNA, 23 nt, Homo sapiens
ucagugucuggauccugcucagu

SEQ ID NO: 27400 - RNA, 20 nt, Homo sapiens
ucauagggugguggcagugg

SEQ ID NO: 27401 - RNA, 22 nt, Homo sapiens
ucaggugcaguggcucaugcuu

SEQ ID NO: 27402 - RNA, 22 nt, Homo sapiens
ucgcaccauugcacuccagcca

SEQ ID NO: 27403 - RNA, 22 nt, Homo sapiens
uccuuuggguagcuguucagau

SEQ ID NO: 27404 - RNA, 22 nt, Homo sapiens
uccuugguugauccugugcaga

SEQ ID NO: 27405 - RNA, 23 nt, Homo sapiens
ucgcagcauucaauaccaggcag

SEQ ID NO: 27406 - RNA, 22 nt, Homo sapiens
ucucaaccucccaaguagcugg

SEQ ID NO: 27407 - RNA, 22 nt, Homo sapiens
ucuccauugaaauggacauaau

SEQ ID NO: 27408 - RNA, 20 nt, Homo sapiens
aacagcacugucugaagcuu

SEQ ID NO: 27409 - RNA, 21 nt, Homo sapiens
aacagugcugaacagacaccu

SEQ ID NO: 27410 - RNA, 22 nt, Homo sapiens
ucuuugaguuauugugcagacu

SEQ ID NO: 27411 - RNA, 23 nt, Homo sapiens
ugacauguaauucaguccagcag

SEQ ID NO: 27412 - RNA, 21 nt, Homo sapiens
ugacauguuggugugcugcac

SEQ ID NO: 27413 - RNA, 23 nt, Homo sapiens
ugacaaccucaugcuuugucaug

SEQ ID NO: 27414 - RNA, 22 nt, Homo sapiens
ugacaacugauuaacuccuuua

SEQ ID NO: 27415 - RNA, 22 nt, Homo sapiens
ugaaugcuaaaggaaaacagua

SEQ ID NO: 27416 - RNA, 22 nt, Homo sapiens
ugaauguaagaugucugcuggu

SEQ ID NO: 27417 - RNA, 22 nt, Homo sapiens
ugaacagcuaucuugucagugu

SEQ ID NO: 27418 - RNA, 22 nt, Homo sapiens
ucuuugguaggaguaggaggcc

SEQ ID NO: 27419 - RNA, 22 nt, Homo sapiens
ucuuuggguguauuucacagcc

SEQ ID NO: 27420 - RNA, 22 nt, Homo sapiens
ucuuugguagaagcuauuuuau

SEQ ID NO: 27421 - RNA, 22 nt, Homo sapiens
ucuuugguaauggaugucugau

SEQ ID NO: 27422 - RNA, 19 nt, Homo sapiens
ucuuugguacgugcuuuga

SEQ ID NO: 27423 - RNA, 22 nt, Homo sapiens
ugaaggcaggagggagaaaagu

SEQ ID NO: 27424 - RNA, 22 nt, Homo sapiens
ugaaggaguauggauaagucgu

SEQ ID NO: 27425 - RNA, 22 nt, Homo sapiens
ugaagggcauuguuuugccaaa

SEQ ID NO: 27426 - RNA, 22 nt, Homo sapiens
ugaaguaauguuuuauucuauu

SEQ ID NO: 27427 - RNA, 22 nt, Homo sapiens
ugaauagaaguggcaggaguag

SEQ ID NO: 27428 - RNA, 22 nt, Homo sapiens
ugaauagugucacaauaaacau

SEQ ID NO: 27429 - RNA, 22 nt, Homo sapiens
ugauaauuuugucagguuuugg

SEQ ID NO: 27430 - RNA, 18 nt, Homo sapiens
ugauaucaucacaauuga

SEQ ID NO: 27431 - RNA, 19 nt, Homo sapiens
ugaccagggacagaaacca

SEQ ID NO: 27432 - RNA, 22 nt, Homo sapiens
ugacggaggacaccugcggaau

SEQ ID NO: 27433 - RNA, 22 nt, Homo sapiens
ugcaccacugcaccccagucug

SEQ ID NO: 27434 - RNA, 22 nt, Homo sapiens
ugcaccacugcacuccacccug

SEQ ID NO: 27435 - RNA, 23 nt, Homo sapiens
ugcaccacuacacacucuugggu

SEQ ID NO: 27436 - RNA, 22 nt, Homo sapiens
ugcaauuuaaugugucccaauu

SEQ ID NO: 27437 - RNA, 22 nt, Homo sapiens
ugcauagcaaaauaggauuaga

SEQ ID NO: 27438 - RNA, 17 nt, Homo sapiens
ugauauuuucccagaua

SEQ ID NO: 27439 - RNA, 22 nt, Homo sapiens
uggcaacaucuggggacauguu

SEQ ID NO: 27440 - RNA, 22 nt, Homo sapiens
uggcaaguuucaauccgaggga

SEQ ID NO: 27441 - RNA, 19 nt, Homo sapiens
uggcacauguauacuuaug

SEQ ID NO: 27442 - RNA, 22 nt, Homo sapiens
uggcagcgugaauguggcugaa

SEQ ID NO: 27443 - RNA, 22 nt, Homo sapiens
ugggucaguagcauguaugucu

SEQ ID NO: 27444 - RNA, 23 nt, Homo sapiens
ugggucaguuuuucugacaucau

SEQ ID NO: 27445 - RNA, 22 nt, Homo sapiens
uggcuuuuaucuacucucaacu

SEQ ID NO: 27446 - RNA, 22 nt, Homo sapiens
uggcuuuguaagguuucauuuu

SEQ ID NO: 27447 - RNA, 22 nt, Homo sapiens
uggcuguuuauuucaccugggc

SEQ ID NO: 27448 - RNA, 22 nt, Homo sapiens
uggcuguuuauuucaccugggu

SEQ ID NO: 27449 - RNA, 22 nt, Homo sapiens
ugguaaacaacaggagaacuug

SEQ ID NO: 27450 - RNA, 22 nt, Homo sapiens
uggauugugaagaccaugggaa

SEQ ID NO: 27451 - RNA, 22 nt, Homo sapiens
uggauuguaacauagaguaaau

SEQ ID NO: 27452 - RNA, 19 nt, Homo sapiens
uggauuguuagagcagugu

SEQ ID NO: 27453 - RNA, 23 nt, Homo sapiens
uggaggacaagcauggauaguga

SEQ ID NO: 27454 - RNA, 22 nt, Homo sapiens
uggagguagacauugggaagag

SEQ ID NO: 27455 - RNA, 22 nt, Homo sapiens
uggaaggucauuguucauuuga

SEQ ID NO: 27456 - RNA, 22 nt, Homo sapiens
ugcauggaagggagggaaagag

SEQ ID NO: 27457 - RNA, 22 nt, Homo sapiens
ugccuacugaauuuaccuggcu

SEQ ID NO: 27458 - RNA, 22 nt, Homo sapiens
ugcgaucuuuuuccuuguuccu

SEQ ID NO: 27459 - RNA, 22 nt, Homo sapiens
uggaaaguacuugaguuuguau

SEQ ID NO: 27460 - RNA, 19 nt, Homo sapiens
uuaagguacuuagaugugu

SEQ ID NO: 27461 - RNA, 22 nt, Homo sapiens
uuaagguuuuuguagcaaggau

SEQ ID NO: 27462 - RNA, 22 nt, Homo sapiens
uuaagcucauuuccauucuaca

SEQ ID NO: 27463 - RNA, 22 nt, Homo sapiens
uuaaacucaucacccagguagu

SEQ ID NO: 27464 - RNA, 22 nt, Homo sapiens
uuaaaguguuugcagacaggug

SEQ ID NO: 27465 - RNA, 22 nt, Homo sapiens
uguuuugguugucccuggccag

SEQ ID NO: 27466 - RNA, 22 nt, Homo sapiens
uuaaaagcuaucuccaagguca

SEQ ID NO: 27467 - RNA, 22 nt, Homo sapiens
uguuuuggaguggacuuugcau

SEQ ID NO: 27468 - RNA, 22 nt, Homo sapiens
uguuuuguuagcacucugggaa

SEQ ID NO: 27469 - RNA, 22 nt, Homo sapiens
ugugucacugcacuccagcgug

SEQ ID NO: 27470 - RNA, 22 nt, Homo sapiens
uguuacagugacuaauguuuua

SEQ ID NO: 27471 - RNA, 22 nt, Homo sapiens
uguuacagcagaauugauugca

SEQ ID NO: 27472 - RNA, 22 nt, Homo sapiens
ugugccacuccaaccuggguga

SEQ ID NO: 27473 - RNA, 22 nt, Homo sapiens
ugugccacuccagcucuagcuu

SEQ ID NO: 27474 - RNA, 22 nt, Homo sapiens
uguggaaauuguuguauuuaau

SEQ ID NO: 27475 - RNA, 22 nt, Homo sapiens
ugugguuuuucacauuuagaga

SEQ ID NO: 27476 - RNA, 22 nt, Homo sapiens
uguguaaauagcuacggaucug

SEQ ID NO: 27477 - RNA, 22 nt, Homo sapiens
uguagauaucauuagugcugug

SEQ ID NO: 27478 - RNA, 22 nt, Homo sapiens
uguaauguuucaucauuauuaa

SEQ ID NO: 27479 - RNA, 22 nt, Homo sapiens
uguaaugaucaaaucagaguaa

SEQ ID NO: 27480 - RNA, 20 nt, Homo sapiens
uggugguuuuaugugguuua

SEQ ID NO: 27481 - RNA, 22 nt, Homo sapiens
ugguggcuuuucguagguucac

SEQ ID NO: 27482 - RNA, 22 nt, Homo sapiens
ugguccuuuccauuggagacac

SEQ ID NO: 27483 - RNA, 22 nt, Homo sapiens
uucaguagucuccauagaaccg

SEQ ID NO: 27484 - RNA, 19 nt, Homo sapiens
uucaaugcagcauugccac

SEQ ID NO: 27485 - RNA, 22 nt, Homo sapiens
uucacacugggccuacucugug

SEQ ID NO: 27486 - RNA, 22 nt, Homo sapiens
uucaaaguuggaggacaaacug

SEQ ID NO: 27487 - RNA, 22 nt, Homo sapiens
uuacauugcuucaaauucagug

SEQ ID NO: 27488 - RNA, 22 nt, Homo sapiens
uuacagugguugcuauugugaa

SEQ ID NO: 27489 - RNA, 19 nt, Homo sapiens
uuacagugugcccuuuuag

SEQ ID NO: 27490 - RNA, 22 nt, Homo sapiens
uuacaguauugcaaggacuagg

SEQ ID NO: 27491 - RNA, 22 nt, Homo sapiens
uuacaguaugaguaagaguucu

SEQ ID NO: 27492 - RNA, 22 nt, Homo sapiens
uucuggcuuauaaacgugacuu

SEQ ID NO: 27493 - RNA, 19 nt, Homo sapiens
uuccugagaacaagggcuu

SEQ ID NO: 27494 - RNA, 22 nt, Homo sapiens
uuccgcuguaguuguugguacc

SEQ ID NO: 27495 - RNA, 22 nt, Homo sapiens
uucucgcuuuuuccaccuguau

SEQ ID NO: 27496 - RNA, 22 nt, Homo sapiens
uucccaguaaacucuaucccuc

SEQ ID NO: 27497 - RNA, 22 nt, Homo sapiens
uucccugugguauagaagccgu

SEQ ID NO: 27498 - RNA, 22 nt, Homo sapiens
uucauguaauuccauaagguaa

SEQ ID NO: 27499 - RNA, 22 nt, Homo sapiens
uugugguagugaaugagucuca

SEQ ID NO: 27500 - RNA, 22 nt, Homo sapiens
uuguauguugaaugaugguaua

SEQ ID NO: 27501 - RNA, 21 nt, Homo sapiens
uuucugggggagcauggcagg

SEQ ID NO: 27502 - RNA, 23 nt, Homo sapiens
uuucacagaaggauuguagggcc

SEQ ID NO: 27503 - RNA, 22 nt, Homo sapiens
uuucaggcaagggugacccuga

SEQ ID NO: 27504 - RNA, 22 nt, Homo sapiens
uuucaggcagggagcuucagug

SEQ ID NO: 27505 - RNA, 23 nt, Homo sapiens
uuucaggcaggugaaagaccagc

SEQ ID NO: 27506 - RNA, 22 nt, Homo sapiens
uuuauucggcuaggagcuucgg

SEQ ID NO: 27507 - RNA, 22 nt, Homo sapiens
uuuaguacugcuuuaugugugu

SEQ ID NO: 27508 - RNA, 22 nt, Homo sapiens
uugugguuuuuaaaacuaggug

SEQ ID NO: 27509 - RNA, 22 nt, Homo sapiens
uuugcagugucagcuucugugu

SEQ ID NO: 27510 - RNA, 22 nt, Homo sapiens
uuugagcuugacucagcuggag

SEQ ID NO: 27511 - RNA, 23 nt, Homo sapiens
uuucuugggcaugcuaugucagu

SEQ ID NO: 27512 - RNA, 22 nt, Homo sapiens
uuugaaccauuugaagaaugau

SEQ ID NO: 27513 - RNA, 22 nt, Homo sapiens
uuugagaaugcuaccagagaag

SEQ ID NO: 27514 - RNA, 22 nt, Homo sapiens
uugguaggcuggccucucucag

SEQ ID NO: 27515 - RNA, 22 nt, Homo sapiens
uuggucaggcuagaguguggug

SEQ ID NO: 27516 - RNA, 22 nt, Homo sapiens
uuggcagugcccgaugcugggg

SEQ ID NO: 27517 - RNA, 22 nt, Homo sapiens
uuggcagugguucugacggacc

SEQ ID NO: 27518 - RNA, 22 nt, Homo sapiens
uuggcagaguuaauuuguugag

SEQ ID NO: 27519 - RNA, 20 nt, Homo sapiens
uuggcagagucuuuagggua

SEQ ID NO: 27520 - RNA, 22 nt, Homo sapiens
uugcuauguugcccagucugga

SEQ ID NO: 27521 - RNA, 22 nt, Homo sapiens
uugcuaguguuugguugauggu

SEQ ID NO: 27522 - RNA, 22 nt, Homo sapiens
uugcugguuuucauaugagcag

SEQ ID NO: 27523 - RNA, 22 nt, Homo sapiens
uugaaguagcauuucaugucua

SEQ ID NO: 27524 - RNA, 22 nt, Homo sapiens
uugaagguaggaugugcuauca

SEQ ID NO: 27525 - RNA, 21 nt, Homo sapiens
uucuuugcucaguguuagagu

SEQ ID NO: 27526 - RNA, 22 nt, Homo sapiens
uugaagguaauugguuuuauga

SEQ ID NO: 27527 - RNA, 22 nt, Homo sapiens
uugcaaaguuugccuccuguag

SEQ ID NO: 27528 - RNA, 20 nt, Homo sapiens
uugcacagagaaggaggcag

SEQ ID NO: 27529 - RNA, 22 nt, Homo sapiens
uugcagugguuucacuggcaaa

SEQ ID NO: 27530 - RNA, 22 nt, Homo sapiens
gucauugaaguggaaucaucca

SEQ ID NO: 27531 - RNA, 22 nt, Homo sapiens
gucucacaggcaugaugccagc

SEQ ID NO: 27532 - RNA, 21 nt, Homo sapiens
gugcagaugccacagucacuc

SEQ ID NO: 27533 - RNA, 22 nt, Homo sapiens
gugcacauuguuuaugucuguu

SEQ ID NO: 27534 - RNA, 22 nt, Homo sapiens
gugcaauguuaauuacuugacu

SEQ ID NO: 27535 - RNA, 22 nt, Homo sapiens
guuaaugcuggaauaaguuaag

SEQ ID NO: 27536 - RNA, 22 nt, Homo sapiens
gugucaguggggagugaucuuc

SEQ ID NO: 27537 - RNA, 22 nt, Homo sapiens
guuagugcuuauuaaauaguau

SEQ ID NO: 27538 - RNA, 20 nt, Homo sapiens
guucacagagguuaugauua

SEQ ID NO: 27539 - RNA, 20 nt, Homo sapiens
guucacaggcuuccuuucag

SEQ ID NO: 27540 - RNA, 22 nt, Homo sapiens
guggcagugugaggauccugcu

SEQ ID NO: 27541 - RNA, 22 nt, Homo sapiens
gugcaugcaucuuuauaguagc

SEQ ID NO: 27542 - RNA, 22 nt, Homo sapiens
gugcauguccacuaguccauau

SEQ ID NO: 27543 - RNA, 22 nt, Homo sapiens
guggcuuuaaguacgauugagg

SEQ ID NO: 27544 - RNA, 22 nt, Homo sapiens
guggcuuuauuuagaagcaggg

SEQ ID NO: 27545 - RNA, 22 nt, Homo sapiens
guggcuagaaugaagguagcug

SEQ ID NO: 27546 - RNA, 22 nt, Homo sapiens
gguggcaaaucugaguggcgcu

SEQ ID NO: 27547 - RNA, 22 nt, Homo sapiens
ggucacauuggacuaucaaguu

SEQ ID NO: 27548 - RNA, 22 nt, Homo sapiens
ggucaggagaaugguaacugag

SEQ ID NO: 27549 - RNA, 22 nt, Homo sapiens
ggucagugcauucuaaaggcaa

SEQ ID NO: 27550 - RNA, 22 nt, Homo sapiens
gguccgccugccuuggccuccc

SEQ ID NO: 27551 - RNA, 22 nt, Homo sapiens
guacaguggguguagggaccag

SEQ ID NO: 27552 - RNA, 20 nt, Homo sapiens
guaaacucucagcauagaug

SEQ ID NO: 27553 - RNA, 22 nt, Homo sapiens
guauuuguugcagcagcacuau

SEQ ID NO: 27554 - RNA, 22 nt, Homo sapiens
gguaaguuuggggcuaauuugu

SEQ ID NO: 27555 - RNA, 22 nt, Homo sapiens
gguaauguaacugguauucugu

SEQ ID NO: 27556 - RNA, 22 nt, Homo sapiens
gggaagugugcagaguucucuu

SEQ ID NO: 27557 - RNA, 23 nt, Homo sapiens
gggauuguaaaauaugagggcag

SEQ ID NO: 27558 - RNA, 21 nt, Homo sapiens
ggaaaguuaaggaaauacccc

SEQ ID NO: 27559 - RNA, 22 nt, Homo sapiens
gcuguguguuaucagaaauugc

SEQ ID NO: 27560 - RNA, 22 nt, Homo sapiens
uagguugucuucccagaguuuu

SEQ ID NO: 27561 - RNA, 22 nt, Homo sapiens
uagguuguucuauuaucuuaca

SEQ ID NO: 27562 - RNA, 22 nt, Homo sapiens
uauaaaguaauuucuaggggcu

SEQ ID NO: 27563 - RNA, 23 nt, Homo sapiens
uaugacagaggaagggggagcug

SEQ ID NO: 27564 - RNA, 22 nt, Homo sapiens
uauuccagcccuggugagccag

SEQ ID NO: 27565 - RNA, 22 nt, Homo sapiens
uaugggcuuuguuuuguacuag

SEQ ID NO: 27566 - RNA, 22 nt, Homo sapiens
uauugauuuucaguguucagcu

SEQ ID NO: 27567 - RNA, 22 nt, Homo sapiens
uauuugguagcuauuuugcagu

SEQ ID NO: 27568 - RNA, 22 nt, Homo sapiens
uaagugguguucauucuuuuga

SEQ ID NO: 27569 - RNA, 22 nt, Homo sapiens
uaaguguaaugucugaaguuug

SEQ ID NO: 27570 - RNA, 22 nt, Homo sapiens
uaauaauguuaggcuuacucaa

SEQ ID NO: 27571 - RNA, 22 nt, Homo sapiens
uaaugcaucaugguuggcaaac

SEQ ID NO: 27572 - RNA, 22 nt, Homo sapiens
uaaggcuugcuucagucuugaa

SEQ ID NO: 27573 - RNA, 22 nt, Homo sapiens
guugggcccauagacugccagu

SEQ ID NO: 27574 - RNA, 22 nt, Homo sapiens
guuggcaaguggcugagcuggg

SEQ ID NO: 27575 - RNA, 22 nt, Homo sapiens
uaagguguagacuggucacaag

SEQ ID NO: 27576 - RNA, 22 nt, Homo sapiens
uaaguacaugcuagauggaaug

SEQ ID NO: 27577 - RNA, 22 nt, Homo sapiens
uaagugaauguuggcuacugaa

SEQ ID NO: 27578 - RNA, 22 nt, Homo sapiens
uaagugcaacauaaguguuaaa

SEQ ID NO: 27579 - RNA, 20 nt, Homo sapiens
uaagugcauaggauauuucu

SEQ ID NO: 27580 - RNA, 22 nt, Homo sapiens
uaagugcaugauuacaugcaua

SEQ ID NO: 27581 - RNA, 22 nt, Homo sapiens
uacauccauccugcugggcagu

SEQ ID NO: 27582 - RNA, 22 nt, Homo sapiens
uacaucagccugaaagagcucg

SEQ ID NO: 27583 - RNA, 22 nt, Homo sapiens
uacagugcuugguaucuaguaa

SEQ ID NO: 27584 - RNA, 23 nt, Homo sapiens
uacagcugcagaaucaggcuaag

SEQ ID NO: 27585 - RNA, 22 nt, Homo sapiens
uacacaugugaguucuuuucua

SEQ ID NO: 27586 - RNA, 22 nt, Homo sapiens
uaccuuaucccuaacuucccau

SEQ ID NO: 27587 - RNA, 23 nt, Homo sapiens
uacuacacuuuucccaagguuuu

SEQ ID NO: 27588 - RNA, 22 nt, Homo sapiens
cugaaaugaauuauuuucuuuc

SEQ ID NO: 27589 - RNA, 19 nt, Homo sapiens
cucuuuggugucucuucuu

SEQ ID NO: 27590 - RNA, 22 nt, Homo sapiens
cucuuacaguguguggugaaag

SEQ ID NO: 27591 - RNA, 22 nt, Homo sapiens
cucaguguucccauucuaccuu

SEQ ID NO: 27592 - RNA, 22 nt, Homo sapiens
cuauggcuguaaggauaguaac

SEQ ID NO: 27593 - RNA, 22 nt, Homo sapiens
cuauggcuguaugacgugcaug

SEQ ID NO: 27594 - RNA, 22 nt, Homo sapiens
cuauggcucugguuauggcugu

SEQ ID NO: 27595 - RNA, 22 nt, Homo sapiens
ccacaaccucaacagcaucuau

SEQ ID NO: 27596 - RNA, 22 nt, Homo sapiens
ccacaguggauuaaaguuacug

SEQ ID NO: 27597 - RNA, 22 nt, Homo sapiens
cauacaguaggcacuauuugua

SEQ ID NO: 27598 - RNA, 22 nt, Homo sapiens
cccuggacauucaucauuaugu

SEQ ID NO: 27599 - RNA, 22 nt, Homo sapiens
ccccuguaucucagcgucuuca

SEQ ID NO: 27600 - RNA, 22 nt, Homo sapiens
auuuggguuuuacaucaggcua

SEQ ID NO: 27601 - RNA, 22 nt, Homo sapiens
auuuggguaaugagugcaaggg

SEQ ID NO: 27602 - RNA, 22 nt, Homo sapiens
auuugguagaguucgauaccug

SEQ ID NO: 27603 - RNA, 22 nt, Homo sapiens
auuugacacugagagccucagu

SEQ ID NO: 27604 - RNA, 22 nt, Homo sapiens
auuuugguuacauaguugagcu

SEQ ID NO: 27605 - RNA, 22 nt, Homo sapiens
auuugguaauauuuaaggacuu

SEQ ID NO: 27606 - RNA, 22 nt, Homo sapiens
auuugguuauucaguuguucag

SEQ ID NO: 27607 - RNA, 22 nt, Homo sapiens
auuggccaaugggacgucagca

SEQ ID NO: 27608 - RNA, 22 nt, Homo sapiens
auuguaccccaauguacaauau

SEQ ID NO: 27609 - RNA, 22 nt, Homo sapiens
auugcccaggcuggagugcagu

SEQ ID NO: 27610 - RNA, 22 nt, Homo sapiens
auugcauuuucagguuggucug

SEQ ID NO: 27611 - RNA, 22 nt, Homo sapiens
auugcuaauaugcuucaggcaa

SEQ ID NO: 27612 - RNA, 22 nt, Homo sapiens
auugcccauaaggauauuguca

SEQ ID NO: 27613 - RNA, 21 nt, Homo sapiens
auuaaugcucugguuagaggc

SEQ ID NO: 27614 - RNA, 22 nt, Homo sapiens
auuacaugucuauccaugaaca

SEQ ID NO: 27615 - RNA, 20 nt, Homo sapiens
cagucauagacaucagaguc

SEQ ID NO: 27616 - RNA, 22 nt, Homo sapiens
cagcaguuguuucggauuggga

SEQ ID NO: 27617 - RNA, 22 nt, Homo sapiens
cagcgaggucugcgucacauug

SEQ ID NO: 27618 - RNA, 22 nt, Homo sapiens
cauaaaucuuguugaauagcac

SEQ ID NO: 27619 - RNA, 22 nt, Homo sapiens
caguuguuuuaugacauaagau

SEQ ID NO: 27620 - RNA, 22 nt, Homo sapiens
cagugcauagaugugccacauu

SEQ ID NO: 27621 - RNA, 22 nt, Homo sapiens
caaaggcuucugaaacugcaga

SEQ ID NO: 27622 - RNA, 19 nt, Homo sapiens
caaaguguucuucuuugcc

SEQ ID NO: 27623 - RNA, 22 nt, Homo sapiens
caacacagugaaacccgucucu

SEQ ID NO: 27624 - RNA, 22 nt, Homo sapiens
caaaugcuucuauggacugucu

SEQ ID NO: 27625 - RNA, 22 nt, Homo sapiens
caacauccaccuccuggguuca

SEQ ID NO: 27626 - RNA, 22 nt, Homo sapiens
cacccgugacgcugucugaaau

SEQ ID NO: 27627 - RNA, 22 nt, Homo sapiens
cuuaaugcuacggcucuguguu

SEQ ID NO: 27628 - RNA, 22 nt, Homo sapiens
cuugcagagcccauggauguca

SEQ ID NO: 27629 - RNA, 22 nt, Homo sapiens
cuuguaccccugagucccauaa

SEQ ID NO: 27630 - RNA, 22 nt, Homo sapiens
cuuccaaguggggcacgugcca

SEQ ID NO: 27631 - RNA, 22 nt, Homo sapiens
cuuccaguggcagccgggcaug

SEQ ID NO: 27632 - RNA, 20 nt, Homo sapiens
cuuccaguggccccaucuuu

SEQ ID NO: 27633 - RNA, 22 nt, Homo sapiens
gacagugagaugucaugugaaa

SEQ ID NO: 27634 - RNA, 22 nt, Homo sapiens
gaauagugcugcagcaaacaua

SEQ ID NO: 27635 - RNA, 22 nt, Homo sapiens
gaauacuguccaagagugaugg

SEQ ID NO: 27636 - RNA, 19 nt, Homo sapiens
gaaguguuuguucuccaug

SEQ ID NO: 27637 - RNA, 22 nt, Homo sapiens
gaacccuggaggcggagguugc

SEQ ID NO: 27638 - RNA, 22 nt, Homo sapiens
cuuuaugagguuggauggaucu

SEQ ID NO: 27639 - RNA, 22 nt, Homo sapiens
cuuuagcaaggauauggggaug

SEQ ID NO: 27640 - RNA, 22 nt, Homo sapiens
cuuuggguauucucccuugggg

SEQ ID NO: 27641 - RNA, 20 nt, Homo sapiens
cuuuggcaaugagaacaggg

SEQ ID NO: 27642 - RNA, 22 nt, Homo sapiens
gcaaaugcuacaccauuuugua

SEQ ID NO: 27643 - RNA, 21 nt, Homo sapiens
gcaaacauccuuugaugccag

SEQ ID NO: 27644 - RNA, 20 nt, Homo sapiens
gcaaaguuuagcucccacua

SEQ ID NO: 27645 - RNA, 22 nt, Homo sapiens
gcagugcaugacgguauauaua

SEQ ID NO: 27646 - RNA, 22 nt, Homo sapiens
gcagcagugugggcugaaccua

SEQ ID NO: 27647 - RNA, 22 nt, Homo sapiens
gcagcagugcccuggauggaaa

SEQ ID NO: 27648 - RNA, 22 nt, Homo sapiens
gcaaaugcuaugccauuuuaua

SEQ ID NO: 27649 - RNA, 22 nt, Homo sapiens
gcagugugugaggaauuugggu

SEQ ID NO: 27650 - RNA, 19 nt, Homo sapiens
gcugguuguccacucucuc

SEQ ID NO: 27651 - RNA, 22 nt, Homo sapiens
gcuguauuguugaaggaaaugu

SEQ ID NO: 27652 - RNA, 22 nt, Homo sapiens
gcuguaguugaggauuuuaaga

SEQ ID NO: 27653 - RNA, 22 nt, Homo sapiens
gcuggcaagaugcugaugcaac

SEQ ID NO: 27654 - RNA, 22 nt, Homo sapiens
gauauguguuuuagucaggguu

SEQ ID NO: 27655 - RNA, 22 nt, Homo sapiens
gaugagguaguguaccuagucu

SEQ ID NO: 27656 - RNA, 22 nt, Homo sapiens
gaugagguagaagacucagcaa

SEQ ID NO: 27657 - RNA, 22 nt, Homo sapiens
gagguaguuaaugcauucacua

SEQ ID NO: 27658 - RNA, 18 nt, Homo sapiens
gagguuagguucugacag

SEQ ID NO: 27659 - RNA, 22 nt, Homo sapiens
gagguaaguaagaauggcaagc

SEQ ID NO: 27660 - RNA, 22 nt, Homo sapiens
gaggcauugaaauauugcuuau

SEQ ID NO: 27661 - RNA, 22 nt, Homo sapiens
gagguagugagcagcugaacua

SEQ ID NO: 27662 - RNA, 21 nt, Homo sapiens
gagguagggauuaaagaccuc

SEQ ID NO: 27663 - RNA, 22 nt, Homo sapiens
gagguaaguggauuaugagguc

SEQ ID NO: 27664 - RNA, 22 nt, Homo sapiens
gagauaacuacuggauuaaguu

SEQ ID NO: 27665 - RNA, 22 nt, Human adenovirus F
uccuccagcgugcgcugcaguu

SEQ ID NO: 27666 - RNA, 22 nt, Human adenovirus F
ugcagagccaccggaggcuggc

SEQ ID NO: 27667 - RNA, 22 nt, Human adenovirus F
cgcccucuucugcaccugcacg

SEQ ID NO: 27668 - RNA, 22 nt, Human adenovirus F
agcugcgggugagcgaacggag

SEQ ID NO: 27669 - RNA, 21 nt, Human adenovirus F
aggacguugcgaggaaccgcc

SEQ ID NO: 27670 - RNA, 22 nt, Human adenovirus F
aguaggcgguuuccucgcgguc

SEQ ID NO: 27671 - RNA, 22 nt, Human adenovirus F
caccuguaccgggucuuggaaa

SEQ ID NO: 27672 - RNA, 22 nt, Human adenovirus F
ggagggacguggagcgccugca

SEQ ID NO: 27673 - RNA, 22 nt, Human adenovirus F
gcgugcgcugcaguuggucuuc

SEQ ID NO: 27674 - RNA, 22 nt, Human adenovirus F
gguguuuucuccaaacguuucg

SEQ ID NO: 27675 - RNA, 22 nt, Human adenovirus F
uuuaaacgaccgcgacaggugg

SEQ ID NO: 27676 - RNA, 22 nt, Human adenovirus F
uuaauauccuucagagcauugu

SEQ ID NO: 27677 - RNA, 22 nt, Human adenovirus F
uccuccagcgugcgcugcaguu

SEQ ID NO: 27678 - RNA, 22 nt, Human adenovirus F
uccaccgguccuagaccugacg

SEQ ID NO: 27679 - RNA, 18 nt, Human adenovirus F
cagcugcggagcauuugc

SEQ ID NO: 27680 - RNA, 22 nt, Human adenovirus F
cacggccagcguaaagcgcacu

SEQ ID NO: 27681 - RNA, 22 nt, Human adenovirus F
aacguaugcuguuccgcccuuc

SEQ ID NO: 27682 - RNA, 22 nt, Homo sapiens
auuaaauguuggacguauacau

SEQ ID NO: 27683 - RNA, 22 nt, Homo sapiens
uuuguccccgcccagaucucau

SEQ ID NO: 27684 - RNA, 22 nt, Homo sapiens
uugaggaggcagucuguccguu

SEQ ID NO: 27685 - RNA, 19 nt, Homo sapiens
ugugacugguugucucgcu

SEQ ID NO: 27686 - RNA, 22 nt, Homo sapiens
ugugaucaauuagugaugucug

SEQ ID NO: 27687 - RNA, 17 nt, Homo sapiens
ugacagaaacuuguugu

SEQ ID NO: 27688 - RNA, 22 nt, Homo sapiens
ugagaauauuugaagauguuag

SEQ ID NO: 27689 - RNA, 22 nt, Homo sapiens
gacauguuuuuuaagguuuaug

SEQ ID NO: 27690 - RNA, 22 nt, Homo sapiens
cugugauagguuagucaugaau

SEQ ID NO: 27691 - RNA, 19 nt, Homo sapiens
cuaaaugggucccuagugg

SEQ ID NO: 27692 - RNA, 22 nt, Homo sapiens
gucuccggauguuguuuuuggg

SEQ ID NO: 27693 - RNA, 22 nt, Homo sapiens
uccuggcuccacuguuuauucc

SEQ ID NO: 27694 - RNA, 21 nt, Homo sapiens
ugacauguugguuugcugcac

SEQ ID NO: 27695 - RNA, 22 nt, Homo sapiens
guuccuuguagaugcuggauau

SEQ ID NO: 27696 - RNA, 22 nt, Homo sapiens
gcccuguugcccugaauacaua

SEQ ID NO: 27697 - RNA, 22 nt, Homo sapiens
gaaucaauugaucuaugugucu

SEQ ID NO: 27698 - RNA, 22 nt, Homo sapiens
cucaguagaaaauacauggacu

SEQ ID NO: 27699 - RNA, 22 nt, Homo sapiens
uuugucacucuuggagguuguu

SEQ ID NO: 27700 - RNA, 22 nt, Homo sapiens
uugugacacagcugggccuaua

SEQ ID NO: 27701 - RNA, 22 nt, Homo sapiens
uuggcuguguuuauaugcugga

SEQ ID NO: 27702 - RNA, 22 nt, Homo sapiens
ugugccacugcacuccugggug

SEQ ID NO: 27703 - RNA, 22 nt, Homo sapiens
agagaucaauaugaaggaaaug

SEQ ID NO: 27704 - RNA, 22 nt, Homo sapiens
cucaauuuggaauugucaguaa

SEQ ID NO: 27705 - RNA, 22 nt, Homo sapiens
uaugacuguuugcucauucagg

SEQ ID NO: 27706 - RNA, 22 nt, Homo sapiens
guauugacuaucaaucaugugc

SEQ ID NO: 27707 - RNA, 22 nt, Homo sapiens
uugauuuguagaaugccccaac

SEQ ID NO: 27708 - RNA, 22 nt, Homo sapiens
uugauugacaugucucuguuca

SEQ ID NO: 27709 - RNA, 22 nt, Homo sapiens
uuggucucuuaaucacacuuuu

SEQ ID NO: 27710 - RNA, 20 nt, Homo sapiens
ugugauuauuuaguugcaug

SEQ ID NO: 27711 - RNA, 22 nt, Homo sapiens
ugugccacugcacucccgccug

SEQ ID NO: 27712 - RNA, 22 nt, Homo sapiens
ugugccacugcacuccugccug

SEQ ID NO: 27713 - RNA, 22 nt, Homo sapiens
ugugccacuguucuguaaagug

SEQ ID NO: 27714 - RNA, 22 nt, Homo sapiens
ugugucuugcuggugccugcau

SEQ ID NO: 27715 - RNA, 22 nt, Homo sapiens
uuaaaugcucacauaaagguag

SEQ ID NO: 27716 - RNA, 22 nt, Homo sapiens
auuguacuccagccugggcugc

SEQ ID NO: 27717 - RNA, 22 nt, Homo sapiens
ugauugacauucuuuggaguau

SEQ ID NO: 27718 - RNA, 20 nt, Homo sapiens
ucaucaguuggugcucgcug

SEQ ID NO: 27719 - RNA, 20 nt, Homo sapiens
ucacugugaacuucuugagg

SEQ ID NO: 27720 - RNA, 22 nt, Homo sapiens
uugacauaaucauuucacagug

SEQ ID NO: 27721 - RNA, 22 nt, Homo sapiens
uugcugguuuucauaugagcag

SEQ ID NO: 27722 - RNA, 22 nt, Homo sapiens
uuacuugagaugaguuggacaa

SEQ ID NO: 27723 - RNA, 22 nt, Homo sapiens
ugugucuugaauuuuguaugua

SEQ ID NO: 27724 - RNA, 22 nt, Human astrovirus
acagguuugacaucauagacac

SEQ ID NO: 27725 - RNA, 22 nt, Homo sapiens
aagugccauguggaugggcccu

SEQ ID NO: 27726 - RNA, 22 nt, Homo sapiens
aaguauagcuaugauaaacauu

SEQ ID NO: 27727 - RNA, 22 nt, Homo sapiens
aauaucacaguggguguacacc

SEQ ID NO: 27728 - RNA, 22 nt, Homo sapiens
aauaucacaggguguacacuca

SEQ ID NO: 27729 - RNA, 20 nt, Homo sapiens
auuccacuuguuugagguac

SEQ ID NO: 27730 - RNA, 20 nt, Homo sapiens
augacuagaggacaugguaa

SEQ ID NO: 27731 - RNA, 22 nt, Homo sapiens
auaagagcaggcuucuggccag

SEQ ID NO: 27732 - RNA, 22 nt, Homo sapiens
aucaccuuucccuuucugaauc

SEQ ID NO: 27733 - RNA, 22 nt, Homo sapiens
auaugcuaauuuuuagucgagc

SEQ ID NO: 27734 - RNA, 22 nt, Homo sapiens
agcaacauuguucauaauagcu

SEQ ID NO: 27735 - RNA, 23 nt, Homo sapiens
agcaaaugcucuagcacuccaac

SEQ ID NO: 27736 - RNA, 22 nt, Homo sapiens
agcaacaucagcagcaggaaaa

SEQ ID NO: 27737 - RNA, 22 nt, Homo sapiens
agagguauacauuugagagcca

SEQ ID NO: 27738 - RNA, 21 nt, Homo sapiens
acaucagaguugugaagguag

SEQ ID NO: 27739 - RNA, 22 nt, Homo sapiens
agugccauggcugcuagauggc

SEQ ID NO: 27740 - RNA, 22 nt, Homo sapiens
guaucccuugcuaucugaaucu

SEQ ID NO: 27741 - RNA, 17 nt, Homo sapiens
gugaaaucaucauuuuu

SEQ ID NO: 27742 - RNA, 22 nt, Homo sapiens
guaacucugucacuuacuaguu

SEQ ID NO: 27743 - RNA, 22 nt, Homo sapiens
gugugcaacuuucauuaauauu

SEQ ID NO: 27744 - RNA, 22 nt, Homo sapiens
gugugguaggauugguuacuca

SEQ ID NO: 27745 - RNA, 20 nt, Homo sapiens
guucauguaauuaguucagg

SEQ ID NO: 27746 - RNA, 22 nt, Homo sapiens
guguucaaagcugauugagauu

SEQ ID NO: 27747 - RNA, 22 nt, Homo sapiens
uaaggauuuuggugauuacacu

SEQ ID NO: 27748 - RNA, 22 nt, Homo sapiens
uacuuaguagcuuauccugugg

SEQ ID NO: 27749 - RNA, 22 nt, Homo sapiens
uagcaacauucagcucagguac

SEQ ID NO: 27750 - RNA, 23 nt, Homo sapiens
uagcaacaguuggaggugaggua

SEQ ID NO: 27751 - RNA, 18 nt, Homo sapiens
ucaagcaauugucaugcc

SEQ ID NO: 27752 - RNA, 22 nt, Homo sapiens
ucacaguagccccucccaucau

SEQ ID NO: 27753 - RNA, 22 nt, Homo sapiens
ucacaguagagcuucuuucaga

SEQ ID NO: 27754 - RNA, 22 nt, Homo sapiens
ucacagccuaguuuuauacauu

SEQ ID NO: 27755 - RNA, 22 nt, Homo sapiens
ucacaauucucaauuugugaaa

SEQ ID NO: 27756 - RNA, 22 nt, Homo sapiens
uaucuacauguagguauguaug

SEQ ID NO: 27757 - RNA, 22 nt, Homo sapiens
caugcagcacacaugucugugc

SEQ ID NO: 27758 - RNA, 22 nt, Homo sapiens
caugucuuuuaaacauucaacu

SEQ ID NO: 27759 - RNA, 22 nt, Homo sapiens
caauggcacuauuggaaaaggu

SEQ ID NO: 27760 - RNA, 22 nt, Homo sapiens
cugugccaagcuugcgaugugc

SEQ ID NO: 27761 - RNA, 18 nt, Homo sapiens
gacaguguggcaauuccu

SEQ ID NO: 27762 - RNA, 22 nt, Homo sapiens
gcaauggaaucccuugaucaau

SEQ ID NO: 27763 - RNA, 22 nt, Homo sapiens
ugacuagagacagaaacuaaaa

SEQ ID NO: 27764 - RNA, 22 nt, Homo sapiens
ugacuagggacauucuuccacg

SEQ ID NO: 27765 - RNA, 22 nt, Homo sapiens
ucucugauuauugcauuucauu

SEQ ID NO: 27766 - RNA, 22 nt, Homo sapiens
ugagguauuuuguuaugcagcc

SEQ ID NO: 27767 - RNA, 22 nt, Homo sapiens
ugaguucuuuuacauuuugaau

SEQ ID NO: 27768 - RNA, 22 nt, Homo sapiens
ugcaagcacacccagggauugu

SEQ ID NO: 27769 - RNA, 22 nt, Homo sapiens
ugugaaacauggauagaacugg

SEQ ID NO: 27770 - RNA, 22 nt, Homo sapiens
uguauauguuuguacauauguc

SEQ ID NO: 27771 - RNA, 22 nt, Homo sapiens
uuaguuuaucagugguuucuga

SEQ ID NO: 27772 - RNA, 22 nt, Homo sapiens
uuaguggaugcugaauaaagaa

SEQ ID NO: 27773 - RNA, 22 nt, Homo sapiens
uuauacacugugggaguguaaa

SEQ ID NO: 27774 - RNA, 22 nt, Homo sapiens
uuagguaauauauugcugcuuu

SEQ ID NO: 27775 - RNA, 22 nt, Homo sapiens
uuagcagcucuggugacaaggu

SEQ ID NO: 27776 - RNA, 22 nt, Homo sapiens
uuagauuauugagcauccacug

SEQ ID NO: 27777 - RNA, 21 nt, Homo sapiens
uugagguaaaauccuauggga

SEQ ID NO: 27778 - RNA, 22 nt, Homo sapiens
uugacauugcuguaguguccag

SEQ ID NO: 27779 - RNA, 22 nt, Homo sapiens
uucagcaaugacagccuauaua

SEQ ID NO: 27780 - RNA, 22 nt, Homo sapiens
uugugcauguauauuaguucac

SEQ ID NO: 27781 - RNA, 22 nt, Homo sapiens
ugucauguggcuaacgauucau

SEQ ID NO: 27782 - RNA, 22 nt, Homo sapiens
uguccaaaucagagguaccaaa

SEQ ID NO: 27783 - RNA, 22 nt, Homo sapiens
uuaaggaaagcauuuaauucag

SEQ ID NO: 27784 - RNA, 22 nt, Homo sapiens
uguugcauuugucaaggucaag

SEQ ID NO: 27785 - RNA, 22 nt, Homo sapiens
uucugugcugaaucaaagacug

SEQ ID NO: 27786 - RNA, 22 nt, Homo sapiens
uucugguuaauacuugcaaaaa

SEQ ID NO: 27787 - RNA, 22 nt, Homo sapiens
uucaaaguuggaggacaaacug

SEQ ID NO: 27788 - RNA, 19 nt, Homo sapiens
uucauacagugagagcagc

SEQ ID NO: 27789 - RNA, 23 nt, Homo sapiens
uucaacagguagacccucccugc

SEQ ID NO: 27790 - RNA, 22 nt, Homo sapiens
uugugaagaugugaagcaagca

SEQ ID NO: 27791 - RNA, 22 nt, Homo sapiens
uuggacugugagguuucguggg

SEQ ID NO: 27792 - RNA, 22 nt, Homo sapiens
uuggcauugccaaacugucaac

SEQ ID NO: 27793 - RNA, 22 nt, Homo sapiens
uugauguaggcauucaaggcua

SEQ ID NO: 27794 - RNA, 22 nt, Homo sapiens
cuagcuuuugauguaaagugag

SEQ ID NO: 27795 - RNA, 22 nt, Homo sapiens
caugucuuuuauucugugugau

SEQ ID NO: 27796 - RNA, 22 nt, Homo sapiens
cagauguaguauuuuagugaaa

SEQ ID NO: 27797 - RNA, 22 nt, Homo sapiens
cagcaaaucauccuauuugagc

SEQ ID NO: 27798 - RNA, 22 nt, Homo sapiens
auugcccaggcuggagugcagu

SEQ ID NO: 27799 - RNA, 22 nt, Homo sapiens
cuggcucugagguguuuagggc

SEQ ID NO: 27800 - RNA, 22 nt, Homo sapiens
cugugguuacguucuuugugcu

SEQ ID NO: 27801 - RNA, 23 nt, Homo sapiens
gcagcaaugucacagggguccgg

SEQ ID NO: 27802 - RNA, 22 nt, Homo sapiens
gcagaauugguuucuucuaagg

SEQ ID NO: 27803 - RNA, 22 nt, Homo sapiens
aucaaagugaauuaaugagaau

SEQ ID NO: 27804 - RNA, 22 nt, Homo sapiens
aucaccauguguacauuagacc

SEQ ID NO: 27805 - RNA, 22 nt, Homo sapiens
auaguagcaugcacuggugcug

SEQ ID NO: 27806 - RNA, 22 nt, Homo sapiens
auaguggcaugaucauagcuca

SEQ ID NO: 27807 - RNA, 21 nt, Homo sapiens
auaugugcuguggaagucagc

SEQ ID NO: 27808 - RNA, 23 nt, Homo sapiens
auaaugcaaguggugguaaucug

SEQ ID NO: 27809 - RNA, 22 nt, Homo sapiens
agguauuuucaacuuagaaugg

SEQ ID NO: 27810 - RNA, 22 nt, Homo sapiens
aguuuuugcugauagcaugcuu

SEQ ID NO: 27811 - RNA, 22 nt, Homo sapiens
auaaaagcaggucuaggucagg

SEQ ID NO: 27812 - RNA, 22 nt, Homo sapiens
aguaccauuacucacuuauuuu

SEQ ID NO: 27813 - RNA, 19 nt, Homo sapiens
augcacgugaaaugcauuu

SEQ ID NO: 27814 - RNA, 22 nt, Homo sapiens
auggacuuuuuguucagugucu

SEQ ID NO: 27815 - RNA, 22 nt, Homo sapiens
agcuaguauuuuguuaaggauu

SEQ ID NO: 27816 - RNA, 22 nt, Homo sapiens
agcaccaugggcugaguaagug

SEQ ID NO: 27817 - RNA, 22 nt, Homo sapiens
agcaccauuuauugaaaagaca

SEQ ID NO: 27818 - RNA, 22 nt, Homo sapiens
acaguacucugcucuuuugauu

SEQ ID NO: 27819 - RNA, 22 nt, Homo sapiens
acauaguagacacugaaaauau

SEQ ID NO: 27820 - RNA, 22 nt, Homo sapiens
acaaagcgcuucucuuuagagu

SEQ ID NO: 27821 - RNA, 22 nt, Homo sapiens
aauugcaucuguucuuugccag

SEQ ID NO: 27822 - RNA, 22 nt, Homo sapiens
aaggauuguaaaguugacaaau

SEQ ID NO: 27823 - RNA, 22 nt, Homo sapiens
aaugcaucuagaaaggugaauu

SEQ ID NO: 27824 - RNA, 22 nt, Homo sapiens
ggcaacaauuccuacuucuuuu

SEQ ID NO: 27825 - RNA, 22 nt, Homo sapiens
guaagucucaugagaucugaug

SEQ ID NO: 27826 - RNA, 22 nt, Homo sapiens
guauugacuaucaaucaugugc

SEQ ID NO: 27827 - RNA, 22 nt, Homo sapiens
guauacacccugugauauuauu

SEQ ID NO: 27828 - RNA, 22 nt, Homo sapiens
guuaagaaguguaacuuaaguu

SEQ ID NO: 27829 - RNA, 22 nt, Homo sapiens
uaaggcaaguuuuuaguggaca

SEQ ID NO: 27830 - RNA, 22 nt, Homo sapiens
uaaggaacucugauaucuggaa

SEQ ID NO: 27831 - RNA, 22 nt, Homo sapiens
uacacagucaaaaauuuccagg

SEQ ID NO: 27832 - RNA, 22 nt, Homo sapiens
uacaaguaauaagggaagaauu

SEQ ID NO: 27833 - RNA, 22 nt, Homo sapiens
uacaagcaggaaaugguauaug

SEQ ID NO: 27834 - RNA, 22 nt, Homo sapiens
uagcaaguguuuaagcacuuuu

SEQ ID NO: 27835 - RNA, 22 nt, Homo sapiens
uagagguagagugacuucccca

SEQ ID NO: 27836 - RNA, 19 nt, Homo sapiens
uaugcaacuuauagugcug

SEQ ID NO: 27837 - RNA, 22 nt, Homo sapiens
uaugcccauuuaaauugaacaa

SEQ ID NO: 27838 - RNA, 22 nt, Homo sapiens
uaugucuucuuuagagaaaugu

SEQ ID NO: 27839 - RNA, 22 nt, Homo sapiens
uaguagcaccucucaugagcuu

SEQ ID NO: 27840 - RNA, 18 nt, Homo sapiens
ugacaguuucuuuauauu

SEQ ID NO: 27841 - RNA, 22 nt, Homo sapiens
ugacuauaggauaacaugcauu

SEQ ID NO: 27842 - RNA, 22 nt, Homo sapiens
ucuaaugcucugagaacagugc

SEQ ID NO: 27843 - RNA, 22 nt, Homo sapiens
ucagugcuuggcacagagagcu

SEQ ID NO: 27844 - RNA, 22 nt, Homo sapiens
uccaagaugcuggcagcuacag

SEQ ID NO: 27845 - RNA, 18 nt, Homo sapiens
ucaauguggauguucuuu

SEQ ID NO: 27846 - RNA, 22 nt, Homo sapiens
ucagacacuguggccuuuggac

SEQ ID NO: 27847 - RNA, 22 nt, Homo sapiens
ucagcagugccccacucuacug

SEQ ID NO: 27848 - RNA, 22 nt, Homo sapiens
ugagacaaucucaucucaguga

SEQ ID NO: 27849 - RNA, 22 nt, Homo sapiens
ugagguaucauugcccaggcug

SEQ ID NO: 27850 - RNA, 22 nt, Homo sapiens
ugaguucuuuguagauucugug

SEQ ID NO: 27851 - RNA, 22 nt, Homo sapiens
ugauaggucacucaacagugag

SEQ ID NO: 27852 - RNA, 22 nt, Homo sapiens
ugcaugaugcugagauuuggga

SEQ ID NO: 27853 - RNA, 22 nt, Homo sapiens
uguguaauaccuuugacuauau

SEQ ID NO: 27854 - RNA, 22 nt, Homo sapiens
uuacuacucucuaugaccaguu

SEQ ID NO: 27855 - RNA, 22 nt, Homo sapiens
uuagcaauugauucucauaagc

SEQ ID NO: 27856 - RNA, 22 nt, Homo sapiens
ugguucaguugcacaggcuguu

SEQ ID NO: 27857 - RNA, 21 nt, Homo sapiens
ugguucaguucguuacgugug

SEQ ID NO: 27858 - RNA, 22 nt, Homo sapiens
uugugguaaucugugacagcag

SEQ ID NO: 27859 - RNA, 22 nt, Homo sapiens
uugugguuuuuaaaacuaggug

SEQ ID NO: 27860 - RNA, 22 nt, Homo sapiens
uuucugguuaauuucuaagagc

SEQ ID NO: 27861 - RNA, 22 nt, Homo sapiens
uugaagacuaaguuaucaggau

SEQ ID NO: 27862 - RNA, 22 nt, Homo sapiens
uugagguauugauaaaacauuu

SEQ ID NO: 27863 - RNA, 22 nt, Homo sapiens
uuugcacuggagauucaauggg

SEQ ID NO: 27864 - RNA, 22 nt, Homo sapiens
ucacuggcaaauauauccguug

SEQ ID NO: 27865 - RNA, 22 nt, Homo sapiens
ucacauagcugaguaaaaugga

SEQ ID NO: 27866 - RNA, 22 nt, Homo sapiens
ugaaauggaaagaguguagacu

SEQ ID NO: 27867 - RNA, 20 nt, Homo sapiens
ugaaaucuucacuaagucuc

SEQ ID NO: 27868 - RNA, 22 nt, Homo sapiens
ugcaaccauuguuaagugugca

SEQ ID NO: 27869 - RNA, 21 nt, Homo sapiens
gucauaugucucugauuagug

SEQ ID NO: 27870 - RNA, 22 nt, Homo sapiens
gucuuggagacauugccauuga

SEQ ID NO: 27871 - RNA, 22 nt, Homo sapiens
gugcacaugguagguauugagu

SEQ ID NO: 27872 - RNA, 22 nt, Homo sapiens
uagcagugugaaaacagacuaa

SEQ ID NO: 27873 - RNA, 19 nt, Homo sapiens
uacccagaagcagcauugu

SEQ ID NO: 27874 - RNA, 22 nt, Homo sapiens
auugcauaaacacauuucuuau

SEQ ID NO: 27875 - RNA, 22 nt, Homo sapiens
caaagcuauagcaccagaggga

SEQ ID NO: 27876 - RNA, 22 nt, Homo sapiens
augugguaguuauagugauaag

SEQ ID NO: 27877 - RNA, 22 nt, Homo sapiens
auggcuguuuuuuauguuacag

SEQ ID NO: 27878 - RNA, 22 nt, Homo sapiens
auguggauaucuauaucuggau

SEQ ID NO: 27879 - RNA, 22 nt, Homo sapiens
caguaguagccccuuagaugga

SEQ ID NO: 27880 - RNA, 22 nt, Homo sapiens
caguacaauguugauuagaagu

SEQ ID NO: 27881 - RNA, 22 nt, Homo sapiens
cuaaaugcacugucaaaggaag

SEQ ID NO: 27882 - RNA, 22 nt, Homo sapiens
cuaauacaguuguccaagcugg

SEQ ID NO: 27883 - RNA, 22 nt, Homo sapiens
cauuugcacugagacucagcuu

SEQ ID NO: 27884 - RNA, 22 nt, Homo sapiens
cuagaguacuuaccacagcaug

SEQ ID NO: 27885 - RNA, 22 nt, Homo sapiens
cugagguauaucccauuagaag

SEQ ID NO: 27886 - RNA, 22 nt, Homo sapiens
gagcaaugauugagccacugua

SEQ ID NO: 27887 - RNA, 22 nt, Homo sapiens
gacuggcuguuuucuuuauuau

SEQ ID NO: 27888 - RNA, 22 nt, Homo sapiens
aaguuaauguuuaagacuccua

SEQ ID NO: 27889 - RNA, 22 nt, Homo sapiens
aaucaccaugcacuacagccuu

SEQ ID NO: 27890 - RNA, 23 nt, Homo sapiens
aauaucacaguggguguacaccc

SEQ ID NO: 27891 - RNA, 22 nt, Homo sapiens
acagucauagcagccuuuguua

SEQ ID NO: 27892 - RNA, 22 nt, Homo sapiens
acacaguaaauauugucuccuc

SEQ ID NO: 27893 - RNA, 22 nt, Homo sapiens
acacaguauaugacaaugcuuu

SEQ ID NO: 27894 - RNA, 22 nt, Homo sapiens
accaugcaguccaauaugcaca

SEQ ID NO: 27895 - RNA, 22 nt, Homo sapiens
agaucauaugcaguaaugaacu

SEQ ID NO: 27896 - RNA, 22 nt, Homo sapiens
agagaucaauaugaaggaaaug

SEQ ID NO: 27897 - RNA, 22 nt, Homo sapiens
agcaauaugacauugcuacauc

SEQ ID NO: 27898 - RNA, 22 nt, Homo sapiens
auaacagcugcaaggcaaaagc

SEQ ID NO: 27899 - RNA, 22 nt, Homo sapiens
agugcauuugcaucucaauaua

SEQ ID NO: 27900 - RNA, 22 nt, Homo sapiens
aguaucacaagguguacaccca

SEQ ID NO: 27901 - RNA, 22 nt, Homo sapiens
agucaagaaucucagcaucuuu

SEQ ID NO: 27902 - RNA, 22 nt, Homo sapiens
augaaacuggcuaauuuuugua

SEQ ID NO: 27903 - RNA, 22 nt, Homo sapiens
augcaaggaugguuagauauau

SEQ ID NO: 27904 - RNA, 22 nt, Homo sapiens
auauggguauuaagaaucaaaa

SEQ ID NO: 27905 - RNA, 22 nt, Homo sapiens
auccauugucuaaugcuaagau

SEQ ID NO: 27906 - RNA, 22 nt, Homo sapiens
uucuauguuugaaaaugccaaa

SEQ ID NO: 27907 - RNA, 22 nt, Homo sapiens
uugguucaguuuaacgaguaau

SEQ ID NO: 27908 - RNA, 20 nt, Homo sapiens
uuucaguacuuucuacuggc

SEQ ID NO: 27909 - RNA, 22 nt, Homo sapiens
uugcaaagaccucuucacuucc

SEQ ID NO: 27910 - RNA, 22 nt, Homo sapiens
uugaagguaggaugugcuauca

SEQ ID NO: 27911 - RNA, 22 nt, Homo sapiens
uugcauaagugcauucugugau

SEQ ID NO: 27912 - RNA, 22 nt, Homo sapiens
uugcauaauaagagggauacgu

SEQ ID NO: 27913 - RNA, 22 nt, Homo sapiens
ugccauagagauuuguggaacu

SEQ ID NO: 27914 - RNA, 20 nt, Homo sapiens
ugauugaccagagcaguuuu

SEQ ID NO: 27915 - RNA, 22 nt, Homo sapiens
ugcauaugucuuuauaguagca

SEQ ID NO: 27916 - RNA, 22 nt, Homo sapiens
ugaggaauguguguuaaagaua

SEQ ID NO: 27917 - RNA, 18 nt, Homo sapiens
ugaauacagcguugggaa

SEQ ID NO: 27918 - RNA, 22 nt, Homo sapiens
aacacuguuuccagucaugauc

SEQ ID NO: 27919 - RNA, 19 nt, Homo sapiens
ucucacagcucuacuaugu

SEQ ID NO: 27920 - RNA, 22 nt, Homo sapiens
ucagugaauacauguacucaug

SEQ ID NO: 27921 - RNA, 22 nt, Homo sapiens
guauuguacuacaagcucuuua

SEQ ID NO: 27922 - RNA, 22 nt, Homo sapiens
gucaguuugguuaaucauucca

SEQ ID NO: 27923 - RNA, 22 nt, Homo sapiens
gguauguaggucuacgguacaa

SEQ ID NO: 27924 - RNA, 22 nt, Homo sapiens
gugugacagcuauagacaugau

SEQ ID NO: 27925 - RNA, 22 nt, Homo sapiens
gugcacaucgugcagguuuguu

SEQ ID NO: 27926 - RNA, 22 nt, Homo sapiens
uaugagguagguaugacuauca

SEQ ID NO: 27927 - RNA, 22 nt, Homo sapiens
uauggcauuguuggugaugaua

SEQ ID NO: 27928 - RNA, 22 nt, Homo sapiens
uauagcaaugccccacuccuga

SEQ ID NO: 27929 - RNA, 22 nt, Homo sapiens
uaucaccauguccguuuuaaaa

SEQ ID NO: 27930 - RNA, 22 nt, Homo sapiens
uaucacuauucauccuagcucc

SEQ ID NO: 27931 - RNA, 22 nt, Homo sapiens
uagguucucaggaaugagcuuc

SEQ ID NO: 27932 - RNA, 22 nt, Homo sapiens
uacagcacugugcauagugguu

SEQ ID NO: 27933 - RNA, 22 nt, Homo sapiens
uaagugaaggaaguguguuuac

SEQ ID NO: 27934 - RNA, 22 nt, Homo sapiens
uacaaagcuuucugcaaaucau

SEQ ID NO: 27935 - RNA, 22 nt, Homo sapiens
uaaguugcagguugugauucca

SEQ ID NO: 27936 - RNA, 22 nt, Homo sapiens
cuauguaccuggaacuguauua

SEQ ID NO: 27937 - RNA, 22 nt, Homo sapiens
cccauuguuaaguugaguaucu

SEQ ID NO: 27938 - RNA, 22 nt, Homo sapiens
caucacauucugagauacugag

SEQ ID NO: 27939 - RNA, 22 nt, Homo sapiens
caucagauugagaucaucuaag

SEQ ID NO: 27940 - RNA, 22 nt, Homo sapiens
cagcacauagcaguugcucagu

SEQ ID NO: 27941 - RNA, 22 nt, Homo sapiens
caacagucagcccauccacaga

SEQ ID NO: 27942 - RNA, 20 nt, Homo sapiens
cagugcaccuggcguguuga

SEQ ID NO: 27943 - RNA, 22 nt, Homo sapiens
cagugaauuucaggucaagagu

SEQ ID NO: 27944 - RNA, 20 nt, Homo sapiens
cagucauagacaucagaguc

SEQ ID NO: 27945 - RNA, 22 nt, Homo sapiens
auuagguuagugcaaaaguaau

SEQ ID NO: 27946 - RNA, 22 nt, Homo sapiens
auugcauuuucagguuggucug

SEQ ID NO: 27947 - RNA, 22 nt, Homo sapiens
auuggcaauguacauaucuugc

SEQ ID NO: 27948 - RNA, 22 nt, Homo sapiens
gcaaaugcuacaccauuuugua

SEQ ID NO: 27949 - RNA, 22 nt, Homo sapiens
gaugcagcuaggauuugugaca

SEQ ID NO: 27950 - RNA, 23 nt, Homo sapiens
gaaguauagcaugcacauggaaa

SEQ ID NO: 27951 - RNA, 22 nt, Homo sapiens
cugagguaggcccugagaauau

SEQ ID NO: 27952 - RNA, 22 nt, Homo sapiens
cugaggugggagaaucacauaa

SEQ ID NO: 27953 - RNA, 22 nt, Homo sapiens
agcaccauuucucuaaagcacu

SEQ ID NO: 27954 - RNA, 22 nt, Homo sapiens
acugguuguuuaacugaauuga

SEQ ID NO: 27955 - RNA, 22 nt, Homo sapiens
agcaguacauaaaaagcauccu

SEQ ID NO: 27956 - RNA, 22 nt, Homo sapiens
agguauauuggacagauguaaa

SEQ ID NO: 27957 - RNA, 20 nt, Homo sapiens
agguuauuauaauuagaaga

SEQ ID NO: 27958 - RNA, 22 nt, Homo sapiens
aauuaguuggcugggugcggug

SEQ ID NO: 27959 - RNA, 23 nt, Homo sapiens
acacaguaaacuaaaagcuagcu

SEQ ID NO: 27960 - RNA, 22 nt, Homo sapiens
acacauuagcaagugcuguuau

SEQ ID NO: 27961 - RNA, 22 nt, Homo sapiens
acuaaggcacaauuuucucaua

SEQ ID NO: 27962 - RNA, 22 nt, Homo sapiens
aguaucacaguggguguauacc

SEQ ID NO: 27963 - RNA, 22 nt, Homo sapiens
auccuuuagacuguccaguuga

SEQ ID NO: 27964 - RNA, 22 nt, Homo sapiens
aucaaaugcuggcagagugccu

SEQ ID NO: 27965 - RNA, 22 nt, Homo sapiens
augggugaguaugaguugacuu

SEQ ID NO: 27966 - RNA, 22 nt, Homo sapiens
augugcacauucugguaaauau

SEQ ID NO: 27967 - RNA, 22 nt, Homo sapiens
augcaaacaucugaagagacau

SEQ ID NO: 27968 - RNA, 22 nt, Homo sapiens
augcuacauucuacaauuaggc

SEQ ID NO: 27969 - RNA, 22 nt, Homo sapiens
augcauauuuuaccuagaagag

SEQ ID NO: 27970 - RNA, 22 nt, Homo sapiens
aaaaggcuagcuaguaacagaa

SEQ ID NO: 27971 - RNA, 22 nt, Homo sapiens
aaagugaauguaucccguaagu

SEQ ID NO: 27972 - RNA, 22 nt, Homo sapiens
aaauccauuuguucagcuaugc

SEQ ID NO: 27973 - RNA, 20 nt, Human coronavirus 229E
aucuucaaguugaaucugca

SEQ ID NO: 27974 - RNA, 22 nt, Homo sapiens
aaauccauuuguucagcuaugc

SEQ ID NO: 27975 - RNA, 22 nt, Homo sapiens
aaccacauggcucaguggacau

SEQ ID NO: 27976 - RNA, 22 nt, Homo sapiens
aaagugccugacucauaguuag

SEQ ID NO: 27977 - RNA, 22 nt, Homo sapiens
aaagugcacuuggaagagggcc

SEQ ID NO: 27978 - RNA, 22 nt, Homo sapiens
augcauauuuuaccuagaagag

SEQ ID NO: 27979 - RNA, 23 nt, Homo sapiens
auauaguagaugugcaguaacau

SEQ ID NO: 27980 - RNA, 21 nt, Homo sapiens
auacuugcauccuuggagaga

SEQ ID NO: 27981 - RNA, 22 nt, Homo sapiens
accuuguaucuguuaggauugc

SEQ ID NO: 27982 - RNA, 22 nt, Homo sapiens
acuccauuuggacucugggagg

SEQ ID NO: 27983 - RNA, 22 nt, Homo sapiens
acugcacuucaaccucauugac

SEQ ID NO: 27984 - RNA, 22 nt, Homo sapiens
acacaguauaugacaaugcuuu

SEQ ID NO: 27985 - RNA, 22 nt, Homo sapiens
acacauacacauaugguguaua

SEQ ID NO: 27986 - RNA, 23 nt, Homo sapiens
acacaguaaacuaaaagcuagcu

SEQ ID NO: 27987 - RNA, 22 nt, Homo sapiens
aauuaguaaccuaauuccaucu

SEQ ID NO: 27988 - RNA, 22 nt, Homo sapiens
aguacacuguugaacagaagug

SEQ ID NO: 27989 - RNA, 22 nt, Homo sapiens
aggugaaugcucacauucuaau

SEQ ID NO: 27990 - RNA, 22 nt, Homo sapiens
aaauugcuuuugaagacuuagu

SEQ ID NO: 27991 - RNA, 22 nt, Homo sapiens
aacaccauucucuguaacaaga

SEQ ID NO: 27992 - RNA, 22 nt, Homo sapiens
aaauucauuucagcucugggua

SEQ ID NO: 27993 - RNA, 22 nt, Homo sapiens
aggcauggagacuaaaauuaua

SEQ ID NO: 27994 - RNA, 22 nt, Homo sapiens
acuggauguuagggauuuuauu

SEQ ID NO: 27995 - RNA, 22 nt, Homo sapiens
agaaugugaacaucuugaaagu

SEQ ID NO: 27996 - RNA, 20 nt, Homo sapiens
gaacugguguauguuuaacu

SEQ ID NO: 27997 - RNA, 22 nt, Homo sapiens
cuuuggcacuuccuaagugcca

SEQ ID NO: 27998 - RNA, 22 nt, Homo sapiens
gcauaaagcuaauaagacgaag

SEQ ID NO: 27999 - RNA, 22 nt, Homo sapiens
gcuggguugccagguuacuuaa

SEQ ID NO: 28000 - RNA, 22 nt, Homo sapiens
gagauaguguggguacagcuau

SEQ ID NO: 28001 - RNA, 22 nt, Homo sapiens
gagauauucugguuuacuaaau

SEQ ID NO: 28002 - RNA, 22 nt, Homo sapiens
gagauauuauuucccuuucaca

SEQ ID NO: 28003 - RNA, 22 nt, Homo sapiens
gaugauauuugagucauuagaa

SEQ ID NO: 28004 - RNA, 22 nt, Homo sapiens
auugcugagacauugcuaaucu

SEQ ID NO: 28005 - RNA, 22 nt, Homo sapiens
cagugaauuucaggucaagagu

SEQ ID NO: 28006 - RNA, 22 nt, Homo sapiens
cuauucacaauggugaagauau

SEQ ID NO: 28007 - RNA, 22 nt, Homo sapiens
uaauacugcugugcuugaguug

SEQ ID NO: 28008 - RNA, 16 nt, Homo sapiens
uacaacagugaguaug

SEQ ID NO: 28009 - RNA, 22 nt, Homo sapiens
uaauucacauaaagcacuuaga

SEQ ID NO: 28010 - RNA, 22 nt, Homo sapiens
uacacagucaaaaauuuccagg

SEQ ID NO: 28011 - RNA, 23 nt, Homo sapiens
uacuacacuuuucccaagguuuu

SEQ ID NO: 28012 - RNA, 22 nt, Homo sapiens
uagagguagagugacuucccca

SEQ ID NO: 28013 - RNA, 22 nt, Homo sapiens
uaguaaacagcucugccacaau

SEQ ID NO: 28014 - RNA, 22 nt, Homo sapiens
uaguaaacauuuuucuaucauu

SEQ ID NO: 28015 - RNA, 22 nt, Homo sapiens
uaguuguugcagguaggaugua

SEQ ID NO: 28016 - RNA, 22 nt, Homo sapiens
uauugaacuggaucagaaggcc

SEQ ID NO: 28017 - RNA, 22 nt, Homo sapiens
gucaugucuugaaauucaguuu

SEQ ID NO: 28018 - RNA, 22 nt, Homo sapiens
guccaguuguuuucugagguug

SEQ ID NO: 28019 - RNA, 22 nt, Homo sapiens
guggcagcacauauagguuguu

SEQ ID NO: 28020 - RNA, 19 nt, Homo sapiens
ggucagcaaagucuagcug

SEQ ID NO: 28021 - RNA, 18 nt, Homo sapiens
ggcugguguuuuaguaua

SEQ ID NO: 28022 - RNA, 17 nt, Homo sapiens
guacacuucuucuguga

SEQ ID NO: 28023 - RNA, 22 nt, Homo sapiens
uccacaauggagaagaguauga

SEQ ID NO: 28024 - RNA, 22 nt, Homo sapiens
ugaauagagcugcaguggacau

SEQ ID NO: 28025 - RNA, 22 nt, Homo sapiens
ugcaaugugaaauaagcacauc

SEQ ID NO: 28026 - RNA, 22 nt, Homo sapiens
uggauugcaaaaucuuuuugag

SEQ ID NO: 28027 - RNA, 22 nt, Homo sapiens
uugcaagaaaugcagauucuca

SEQ ID NO: 28028 - RNA, 22 nt, Homo sapiens
uugaaguaguacuuuauuauag

SEQ ID NO: 28029 - RNA, 22 nt, Homo sapiens
uugaaguagguaccguucaauu

SEQ ID NO: 28030 - RNA, 22 nt, Homo sapiens
uugaucugugucccugcccaau

SEQ ID NO: 28031 - RNA, 22 nt, Homo sapiens
uugcuuaggcuggagugcagug

SEQ ID NO: 28032 - RNA, 22 nt, Homo sapiens
uugcccuuuagguaacuauaua

SEQ ID NO: 28033 - RNA, 22 nt, Homo sapiens
uugcauuagugugguacauuug

SEQ ID NO: 28034 - RNA, 22 nt, Homo sapiens
uuggcaagaauguaugccgauc

SEQ ID NO: 28035 - RNA, 22 nt, Homo sapiens
uuggcagaauguuagaaacuua

SEQ ID NO: 28036 - RNA, 22 nt, Homo sapiens
uuguauguuucugugcacauga

SEQ ID NO: 28037 - RNA, 22 nt, Homo sapiens
uuugagcauggaaauggcauga

SEQ ID NO: 28038 - RNA, 22 nt, Homo sapiens
uuuggcuauguuguaucuuucc

SEQ ID NO: 28039 - RNA, 22 nt, Homo sapiens
uucccagagaaaaggguuucuu

SEQ ID NO: 28040 - RNA, 22 nt, Homo sapiens
uuaccagagaagacgaggggga

SEQ ID NO: 28041 - RNA, 22 nt, Homo sapiens
uuaugcaucuuccacacucauu

SEQ ID NO: 28042 - RNA, 22 nt, Homo sapiens
uucaguaguaaguuggaacucu

SEQ ID NO: 28043 - RNA, 20 nt, Homo sapiens
uuaaaucuagugcagacuca

SEQ ID NO: 28044 - RNA, 22 nt, Homo sapiens
uguggcucuucuguucuccacu

SEQ ID NO: 28045 - RNA, 22 nt, Homo sapiens
ugugaugguuuagcauuuucuu

SEQ ID NO: 28046 - RNA, 22 nt, Homo sapiens
uguaauuuaaaugauccuugga

SEQ ID NO: 28047 - RNA, 22 nt, Homo sapiens
auccagaugggcuuaauguaau

SEQ ID NO: 28048 - RNA, 22 nt, Homo sapiens
auccaguuuuaggagauuucua

SEQ ID NO: 28049 - RNA, 22 nt, Homo sapiens
auccucugagaucuaggcagag

SEQ ID NO: 28050 - RNA, 22 nt, Homo sapiens
auggcaauguaagucagaaaaa

SEQ ID NO: 28051 - RNA, 22 nt, Homo sapiens
aucuuuggugaguucuuugguc

SEQ ID NO: 28052 - RNA, 22 nt, Homo sapiens
aucuuuggugcaugauacuuug

SEQ ID NO: 28053 - RNA, 22 nt, Homo sapiens
augaaugucuuauuuugagaaa

SEQ ID NO: 28054 - RNA, 22 nt, Homo sapiens
augauuguucucacucaagaga

SEQ ID NO: 28055 - RNA, 22 nt, Homo sapiens
aguaucacaguggguguauacc

SEQ ID NO: 28056 - RNA, 22 nt, Homo sapiens
agugcacugcccgcuuccuguc

SEQ ID NO: 28057 - RNA, 22 nt, Homo sapiens
aguggaaucuguuauacuaacu

SEQ ID NO: 28058 - RNA, 20 nt, Homo sapiens
auaccacagacuggguaguu

SEQ ID NO: 28059 - RNA, 22 nt, Homo sapiens
agcauagugccuugaaaacaau

SEQ ID NO: 28060 - RNA, 22 nt, Homo sapiens
accacagugcuuccugcucacg

SEQ ID NO: 28061 - RNA, 22 nt, Homo sapiens
acauugcucuuaccaaguuugu

SEQ ID NO: 28062 - RNA, 22 nt, Homo sapiens
acugcaaugucgaauagagaug

SEQ ID NO: 28063 - RNA, 22 nt, Homo sapiens
acugaguguugauuuagauuaa

SEQ ID NO: 28064 - RNA, 22 nt, Homo sapiens
acacauuagcaagugcuguuau

SEQ ID NO: 28065 - RNA, 22 nt, Homo sapiens
aauggguaguacugugguaaca

SEQ ID NO: 28066 - RNA, 22 nt, Homo sapiens
aaguaaacauuuuguacaauaa

SEQ ID NO: 28067 - RNA, 22 nt, Homo sapiens
gagacagugucagccauugaaa

SEQ ID NO: 28068 - RNA, 22 nt, Homo sapiens
gagacauugacuuuguuccaga

SEQ ID NO: 28069 - RNA, 22 nt, Homo sapiens
gagauuaauacacaucaaaugc

SEQ ID NO: 28070 - RNA, 22 nt, Homo sapiens
gagugcaauggcgcgaucuggg

SEQ ID NO: 28071 - RNA, 22 nt, Homo sapiens
cugagguauaucccauuagaag

SEQ ID NO: 28072 - RNA, 21 nt, Homo sapiens
cuaaucucacccuuuucuggg

SEQ ID NO: 28073 - RNA, 22 nt, Homo sapiens
cuguaugugagaaauaauaagu

SEQ ID NO: 28074 - RNA, 22 nt, Homo sapiens
caguacaauguugauuagaagu

SEQ ID NO: 28075 - RNA, 22 nt, Homo sapiens
cauacagcuaguaaguguaaga

SEQ ID NO: 28076 - RNA, 22 nt, Homo sapiens
cauaaagauggaggaggccagg

SEQ ID NO: 28077 - RNA, 22 nt, Homo sapiens
auuaacaucuagaguuuuggug

SEQ ID NO: 28078 - RNA, 22 nt, Homo sapiens
auuucacuucgcaugguguccg

SEQ ID NO: 28079 - RNA, 22 nt, Homo sapiens
uaccaguaaugguucuagagga

SEQ ID NO: 28080 - RNA, 18 nt, Homo sapiens
uaauaacugugaccuuga

SEQ ID NO: 28081 - RNA, 22 nt, Homo sapiens
guugguauuacagaaauuaguu

SEQ ID NO: 28082 - RNA, 22 nt, Homo sapiens
uagcaguuguuguuacuuguau

SEQ ID NO: 28083 - RNA, 22 nt, Homo sapiens
uagcauaauuuguagaaaauca

SEQ ID NO: 28084 - RNA, 22 nt, Homo sapiens
uaggaaguacaucucagaaucu

SEQ ID NO: 28085 - RNA, 18 nt, Homo sapiens
gugcaaugaauagcagag

SEQ ID NO: 28086 - RNA, 22 nt, Homo sapiens
gucaugcaggguucgccagccc

SEQ ID NO: 28087 - RNA, 22 nt, Homo sapiens
gcuuuggcauguagauguaugg

SEQ ID NO: 28088 - RNA, 22 nt, Homo sapiens
gcuguuugccgccaucgcagac

SEQ ID NO: 28089 - RNA, 22 nt, Homo sapiens
ugcaagaaucuuucaggcuagc

SEQ ID NO: 28090 - RNA, 22 nt, Homo sapiens
uggaaguauagauaauugaaag

SEQ ID NO: 28091 - RNA, 20 nt, Homo sapiens
ugagaucaggauuaaggcua

SEQ ID NO: 28092 - RNA, 22 nt, Homo sapiens
ugagauauugggaguaauguca

SEQ ID NO: 28093 - RNA, 17 nt, Homo sapiens
ugauauuuucccagaua

SEQ ID NO: 28094 - RNA, 22 nt, Homo sapiens
ugaauagugucacaauaaacau

SEQ ID NO: 28095 - RNA, 23 nt, Homo sapiens
ucuuguacuuugagugagcaugg

SEQ ID NO: 28096 - RNA, 19 nt, Homo sapiens
ucuuuagucacauuuuuau

SEQ ID NO: 28097 - RNA, 17 nt, Homo sapiens
ucuugugguucuugaau

SEQ ID NO: 28098 - RNA, 22 nt, Homo sapiens
ucugccaaccacaaaauuuauu

SEQ ID NO: 28099 - RNA, 22 nt, Homo sapiens
ucauccauacaguuagcaaagg

SEQ ID NO: 28100 - RNA, 23 nt, Homo sapiens
ucaucacagcauuuccugguauu

SEQ ID NO: 28101 - RNA, 22 nt, Homo sapiens
uuugccaauauuuuauugagga

SEQ ID NO: 28102 - RNA, 22 nt, Homo sapiens
uugcacauugauuuuguaucuu

SEQ ID NO: 28103 - RNA, 22 nt, Homo sapiens
uugaaguagcauuucaugucua

SEQ ID NO: 28104 - RNA, 22 nt, Homo sapiens
uugaaguaugaccgcugagaau

SEQ ID NO: 28105 - RNA, 22 nt, Homo sapiens
uuuaauacugcaucuuuacucu

SEQ ID NO: 28106 - RNA, 22 nt, Homo sapiens
uugcuuagucaugaaucacuga

SEQ ID NO: 28107 - RNA, 22 nt, Homo sapiens
uguaaacuaugagcugauuauu

SEQ ID NO: 28108 - RNA, 21 nt, Homo sapiens
ugucaagaugacugcugcggc

SEQ ID NO: 28109 - RNA, 18 nt, Homo sapiens
ugugauggauauguuaau

SEQ ID NO: 28110 - RNA, 22 nt, Homo sapiens
uuagcaauugauucucauaagc

SEQ ID NO: 28111 - RNA, 22 nt, Homo sapiens
uuauagcagugcaggaacagac

SEQ ID NO: 28112 - RNA, 22 nt, Homo sapiens
uuaccaguggugcuguaaacuu

SEQ ID NO: 28113 - RNA, 22 nt, Homo sapiens
uuaaugaacuuuauuuuguaga

SEQ ID NO: 28114 - RNA, 22 nt, Homo sapiens
ugccuacuuugcaucugucagg

SEQ ID NO: 28115 - RNA, 22 nt, Homo sapiens
ugccauagagauuuguggaacu

SEQ ID NO: 28116 - RNA, 22 nt, Homo sapiens
uggaaaauuaggggagguuaua

SEQ ID NO: 28117 - RNA, 22 nt, Homo sapiens
ugcauauuuuauaaagauggaa

SEQ ID NO: 28118 - RNA, 22 nt, Homo sapiens
uccuuugguggagucuuuaggg

SEQ ID NO: 28119 - RNA, 22 nt, Homo sapiens
ucuaagaauucauuuauaagcc

SEQ ID NO: 28120 - RNA, 18 nt, Homo sapiens
ucuuuggcugaacuguag

SEQ ID NO: 28121 - RNA, 22 nt, Homo sapiens
uaguaucacauggucuuaauua

SEQ ID NO: 28122 - RNA, 22 nt, Homo sapiens
uaguagcauaccuaaguauacu

SEQ ID NO: 28123 - RNA, 22 nt, Homo sapiens
uagcagcaccccacucuacugg

SEQ ID NO: 28124 - RNA, 22 nt, Homo sapiens
uauuacuugucugugucucaau

SEQ ID NO: 28125 - RNA, 18 nt, Homo sapiens
uauugcuugguuuggaga

SEQ ID NO: 28126 - RNA, 22 nt, Homo sapiens
uagagguauguauaguauucuu

SEQ ID NO: 28127 - RNA, 22 nt, Homo sapiens
uacacacguguguauauauaca

SEQ ID NO: 28128 - RNA, 22 nt, Homo sapiens
uacagcuaugugcaugcaugcu

SEQ ID NO: 28129 - RNA, 22 nt, Homo sapiens
uacucacauucuguuucuugcu

SEQ ID NO: 28130 - RNA, 22 nt, Homo sapiens
uacguuaucagguaugcaagag

SEQ ID NO: 28131 - RNA, 22 nt, Homo sapiens
uaagucguggaugauucuucgg

SEQ ID NO: 28132 - RNA, 22 nt, Homo sapiens
uaaugcauacagaagguguuuu

SEQ ID NO: 28133 - RNA, 22 nt, Homo sapiens
uaauugaaugcagacaccaggg

SEQ ID NO: 28134 - RNA, 22 nt, Homo sapiens
uaacaccuugcucugucaauaa

SEQ ID NO: 28135 - RNA, 22 nt, Homo sapiens
gucacagcacuuuuaguaagug

SEQ ID NO: 28136 - RNA, 22 nt, Homo sapiens
gucaggcaccgauacaguuuuu

SEQ ID NO: 28137 - RNA, 22 nt, Homo sapiens
guccagagaagucauuacuuca

SEQ ID NO: 28138 - RNA, 22 nt, Homo sapiens
gugauauuuagggggccgggau

SEQ ID NO: 28139 - RNA, 22 nt, Homo sapiens
guaacaccaguuauaucaguuc

SEQ ID NO: 28140 - RNA, 22 nt, Homo sapiens
aagcugugucuugucagcuacc

SEQ ID NO: 28141 - RNA, 22 nt, Homo sapiens
aagcugguuuuauaucugugag

SEQ ID NO: 28142 - RNA, 22 nt, Homo sapiens
accuuguagcaaaccuaacaua

SEQ ID NO: 28143 - RNA, 22 nt, Homo sapiens
acugguuguuuaacugaauuga

SEQ ID NO: 28144 - RNA, 20 nt, Homo sapiens
agguacacugacaugccuuc

SEQ ID NO: 28145 - RNA, 21 nt, Homo sapiens
aggauaguagauuaaauauuu

SEQ ID NO: 28146 - RNA, 22 nt, Homo sapiens
augcauaugucuuuauaguggc

SEQ ID NO: 28147 - RNA, 22 nt, Homo sapiens
augcagugugcaacagauuaag

SEQ ID NO: 28148 - RNA, 22 nt, Homo sapiens
augaaguauuaggacacauuua

SEQ ID NO: 28149 - RNA, 22 nt, Homo sapiens
auacacauuccugggccucacc

SEQ ID NO: 28150 - RNA, 22 nt, Homo sapiens
auagugaacuuugugagaacaa

SEQ ID NO: 28151 - RNA, 20 nt, Homo sapiens
aucaccacagcucguucaug

SEQ ID NO: 28152 - RNA, 22 nt, Homo sapiens
gcagcagugcccuggauggaaa

SEQ ID NO: 28153 - RNA, 22 nt, Homo sapiens
gcaaaugcuacaccauuuugua

SEQ ID NO: 28154 - RNA, 22 nt, Homo sapiens
gauauguguuuuagucaggguu

SEQ ID NO: 28155 - RNA, 22 nt, Homo sapiens
cugugguugagcuuugccauga

SEQ ID NO: 28156 - RNA, 22 nt, Homo sapiens
cuugaccaauauggugaaaccc

SEQ ID NO: 28157 - RNA, 22 nt, Homo sapiens
cugugcauaugacuuuauugga

SEQ ID NO: 28158 - RNA, 22 nt, Homo sapiens
cuggugagaugucuuuccucuu

SEQ ID NO: 28159 - RNA, 22 nt, Homo sapiens
cucugacagugguuagcacugu

SEQ ID NO: 28160 - RNA, 22 nt, Homo sapiens
gaaugcuaaguuuccucccuau

SEQ ID NO: 28161 - RNA, 22 nt, Homo sapiens
gaaugcuaaguuuccucccugu

SEQ ID NO: 28162 - RNA, 22 nt, Homo sapiens
gaacuguaaagaaauucuaagg

SEQ ID NO: 28163 - RNA, 22 nt, Homo sapiens
auugcaauuaguccauagaguu

SEQ ID NO: 28164 - RNA, 22 nt, Homo sapiens
auugcaaugggaaacuaugaaa

SEQ ID NO: 28165 - RNA, 22 nt, Homo sapiens
auugcaaagcguagacucuaaa

SEQ ID NO: 28166 - RNA, 22 nt, Homo sapiens
auuggcaagauagcauaugagg

SEQ ID NO: 28167 - RNA, 22 nt, Homo sapiens
cagcaguuguuucggauuggga

SEQ ID NO: 28168 - RNA, 20 nt, Homo sapiens
ccagcaucauuagauucugg

SEQ ID NO: 28169 - RNA, 22 nt, Homo sapiens
uugcaucagcuccugauguacu

SEQ ID NO: 28170 - RNA, 22 nt, Homo sapiens
uugauacuagagucuuucugac

SEQ ID NO: 28171 - RNA, 22 nt, Homo sapiens
uugauauucugagaagcugaag

SEQ ID NO: 28172 - RNA, 22 nt, Homo sapiens
uuggauugugaaaguauucucu

SEQ ID NO: 28173 - RNA, 22 nt, Homo sapiens
uuuuacacuguugguuggaaug

SEQ ID NO: 28174 - RNA, 22 nt, Homo sapiens
uuuggcaguuauuuacucagug

SEQ ID NO: 28175 - RNA, 22 nt, Homo sapiens
uuucccuuacuuaaacuuacuc

SEQ ID NO: 28176 - RNA, 22 nt, Homo sapiens
uuaguagcacagaguaucagca

SEQ ID NO: 28177 - RNA, 22 nt, Homo sapiens
uucugccaaucaacccacaucc

SEQ ID NO: 28178 - RNA, 22 nt, Homo sapiens
uuccugagccuuguaucuagua

SEQ ID NO: 28179 - RNA, 22 nt, Homo sapiens
uucauuggacuuguguucuuga

SEQ ID NO: 28180 - RNA, 22 nt, Homo sapiens
uuccaagugggaaacaaaaaug

SEQ ID NO: 28181 - RNA, 22 nt, Homo sapiens
uguugccacuguuauuaaccua

SEQ ID NO: 28182 - RNA, 22 nt, Homo sapiens
uuaaggaaagcauuuaauucag

SEQ ID NO: 28183 - RNA, 22 nt, Homo sapiens
uuaaaccugucuucucacuaau

SEQ ID NO: 28184 - RNA, 20 nt, Homo sapiens
uuuugcacuccuacuaaggu

SEQ ID NO: 28185 - RNA, 22 nt, Homo sapiens
uugugcuuguaacuacauucag

SEQ ID NO: 28186 - RNA, 22 nt, Homo sapiens
uuuaacauuggaugagaucguc

SEQ ID NO: 28187 - RNA, 22 nt, Homo sapiens
uuccagagucaccuuucugucg

SEQ ID NO: 28188 - RNA, 22 nt, Homo sapiens
uuccacaggguugaacuaguuu

SEQ ID NO: 28189 - RNA, 22 nt, Homo sapiens
uucgagagaaaaggcauauaug

SEQ ID NO: 28190 - RNA, 22 nt, Homo sapiens
uugaaagucuaggcuuacagua

SEQ ID NO: 28191 - RNA, 22 nt, Homo sapiens
uugagcaucauguuagcacuca

SEQ ID NO: 28192 - RNA, 22 nt, Homo sapiens
uuaguuuaucagugguuucuga

SEQ ID NO: 28193 - RNA, 22 nt, Homo sapiens
uguaugucuucuuuagauaagu

SEQ ID NO: 28194 - RNA, 22 nt, Homo sapiens
ugccaaaaugggcuuuauaccg

SEQ ID NO: 28195 - RNA, 22 nt, Homo sapiens
ucucugauuaaacaagauagug

SEQ ID NO: 28196 - RNA, 22 nt, Homo sapiens
gagugcaauggcgcgaucucgg

SEQ ID NO: 28197 - RNA, 22 nt, Homo sapiens
gccaaaaugcugggauuacagg

SEQ ID NO: 28198 - RNA, 18 nt, Homo sapiens
gcuguugucagagcacau

SEQ ID NO: 28199 - RNA, 22 nt, Homo sapiens
gcugauggugcaguucuagccu

SEQ ID NO: 28200 - RNA, 22 nt, Homo sapiens
gcuuguguucaagucacccuua

SEQ ID NO: 28201 - RNA, 22 nt, Homo sapiens
gaaaugcucauuuuggauccuu

SEQ ID NO: 28202 - RNA, 22 nt, Homo sapiens
cuuuuacacuguuggcaggauu

SEQ ID NO: 28203 - RNA, 22 nt, Homo sapiens
gagugcaauggcaugaucuggg

SEQ ID NO: 28204 - RNA, 22 nt, Homo sapiens
caauugcacucuuagguguaca

SEQ ID NO: 28205 - RNA, 22 nt, Homo sapiens
caugccacuguggacaaagaca

SEQ ID NO: 28206 - RNA, 19 nt, Homo sapiens
caguaucauugcacauagu

SEQ ID NO: 28207 - RNA, 22 nt, Homo sapiens
caguaguagccccuuagaugga

SEQ ID NO: 28208 - RNA, 22 nt, Homo sapiens
cuaacacagagguuuauuucuc

SEQ ID NO: 28209 - RNA, 22 nt, Homo sapiens
cuaauacaguuguccaagcugg

SEQ ID NO: 28210 - RNA, 22 nt, Homo sapiens
cuacaguaugaaaccuuuacuc

SEQ ID NO: 28211 - RNA, 22 nt, Homo sapiens
cugacugaggaucaguucauca

SEQ ID NO: 28212 - RNA, 22 nt, Homo sapiens
cuccuggugauuggagugugaa

SEQ ID NO: 28213 - RNA, 22 nt, Homo sapiens
uauugcuuuacucucuuauccu

SEQ ID NO: 28214 - RNA, 22 nt, Homo sapiens
uauugcaauuggggaaacuggg

SEQ ID NO: 28215 - RNA, 22 nt, Homo sapiens
ucaagcaauucgccugucucag

SEQ ID NO: 28216 - RNA, 22 nt, Homo sapiens
ucaacguauuuauauagcagag

SEQ ID NO: 28217 - RNA, 22 nt, Homo sapiens
uaguaucauugaaacggcuugu

SEQ ID NO: 28218 - RNA, 22 nt, Homo sapiens
uagugaaugucacuggcuguug

SEQ ID NO: 28219 - RNA, 22 nt, Homo sapiens
uagcaguucauuguugugugaa

SEQ ID NO: 28220 - RNA, 22 nt, Homo sapiens
uaaaagucaucacaacuggagu

SEQ ID NO: 28221 - RNA, 22 nt, Homo sapiens
uaacagcauuugugucuaguag

SEQ ID NO: 28222 - RNA, 22 nt, Homo sapiens
uaacaagagagucagucagucc

SEQ ID NO: 28223 - RNA, 21 nt, Homo sapiens
uaaaugucauacaaagcaaug

SEQ ID NO: 28224 - RNA, 22 nt, Homo sapiens
guauacacccugugauauuauu

SEQ ID NO: 28225 - RNA, 22 nt, Homo sapiens
guauaguaguacaaaaguuuuu

SEQ ID NO: 28226 - RNA, 22 nt, Homo sapiens
guagcagcuacuaaguugcugu

SEQ ID NO: 28227 - RNA, 22 nt, Homo sapiens
acauaguagacacugaaaauau

SEQ ID NO: 28228 - RNA, 22 nt, Homo sapiens
acccugaagccaugaguggaac

SEQ ID NO: 28229 - RNA, 21 nt, Homo sapiens
auauuacuguuagaggacugc

SEQ ID NO: 28230 - RNA, 22 nt, Homo sapiens
auagucaguagucucauaauga

SEQ ID NO: 28231 - RNA, 22 nt, Homo sapiens
auagcugcucaggcuuuccuca

SEQ ID NO: 28232 - RNA, 23 nt, Homo sapiens
augaauguaaagaaugugggaag

SEQ ID NO: 28233 - RNA, 22 nt, Homo sapiens
auuccagauggaguugaggguu

SEQ ID NO: 28234 - RNA, 22 nt, Homo sapiens
auuaaauguuggacguauacau

SEQ ID NO: 28235 - RNA, 22 nt, Homo sapiens
aauacuuccaaaucuagucauu

SEQ ID NO: 28236 - RNA, 22 nt, Homo sapiens
aauaagcauaguaccugauagg

SEQ ID NO: 28237 - RNA, 22 nt, Homo sapiens
aagcuguguguaagcucucaca

SEQ ID NO: 28238 - RNA, 22 nt, Homo sapiens
aaaugcauggacagcuggucuu

SEQ ID NO: 28239 - RNA, 22 nt, Homo sapiens
aaaugccucccauucuacugac

SEQ ID NO: 28240 - RNA, 18 nt, Homo sapiens
aaauucugucccuucuuc

SEQ ID NO: 28241 - RNA, 22 nt, Homo sapiens
aacacuaucugccuuacaggga

SEQ ID NO: 28242 - RNA, 19 nt, Homo sapiens
aacuggugugagaugauau

SEQ ID NO: 28243 - RNA, 19 nt, Human coronavirus OC43 (HCoV-OC43)
aauacaaaguauuaugaug

SEQ ID NO: 28244 - RNA, 22 nt, Human coronavirus OC43 (HCoV-OC43)
aagaccauaagccacaauauuc

SEQ ID NO: 28245 - RNA, 22 nt, Human coronavirus OC43 (HCoV-OC43)
uacuuuuaauuuccuuaccaac

SEQ ID NO: 28246 - RNA, 22 nt, Human coronavirus OC43 (HCoV-OC43)
aucuacuugguacugcuaagaa

SEQ ID NO: 28247 - RNA, 22 nt, Homo sapiens
auaucaaggccauuuucuaaau

SEQ ID NO: 28248 - RNA, 22 nt, Homo sapiens
uguucauggauccaguggcuuc

SEQ ID NO: 28249 - RNA, 22 nt, Homo sapiens
uuuaagccaggugcaguggcuc

SEQ ID NO: 28250 - RNA, 22 nt, Homo sapiens
uucaugcaucuguagugguuaa

SEQ ID NO: 28251 - RNA, 22 nt, Homo sapiens
uaucaaguguuagggagaugug

SEQ ID NO: 28252 - RNA, 17 nt, Homo sapiens
accccuaccucagaagc

SEQ ID NO: 28253 - RNA, 19 nt, Homo sapiens
uaucaaguaugcacuguac

SEQ ID NO: 28254 - RNA, 22 nt, Homo sapiens
gaccccuagagauaggaggaac

SEQ ID NO: 28255 - RNA, 21 nt, Homo sapiens
gaccccuagaucuuuuuccag

SEQ ID NO: 28256 - RNA, 22 nt, Homo sapiens
ggagaauugcuuggacccggga

SEQ ID NO: 28257 - RNA, 22 nt, Homo sapiens
uguucaugaguucucauuuuua

SEQ ID NO: 28258 - RNA, 22 nt, Homo sapiens
caccccuaccugagucaggagu

SEQ ID NO: 28259 - RNA, 22 nt, Homo sapiens
uauucaagccaaauucaagcca

SEQ ID NO: 28260 - RNA, 20 nt, Homo sapiens
uaucuacuugcaaaugccau

SEQ ID NO: 28261 - RNA, 22 nt, Homo sapiens
uuggagagugauauucagaugc

SEQ ID NO: 28262 - RNA, 22 nt, Homo sapiens
cugaggcacggcgaccuuaagu

SEQ ID NO: 28263 - RNA, 22 nt, Homo sapiens
uuuaaagcacggaguuuguggc

SEQ ID NO: 28264 - RNA, 22 nt, Homo sapiens
uuaaauacagcaugguguuucu

SEQ ID NO: 28265 - RNA, 22 nt, Homo sapiens
aaaugguguuaguagaucuuua

SEQ ID NO: 28266 - RNA, 20 nt, Homo sapiens
cuggaucaucaguaaaguua

SEQ ID NO: 28267 - RNA, 23 nt, Homo sapiens
uaucucaaugcacagagaggaaa

SEQ ID NO: 28268 - RNA, 22 nt, Homo sapiens
guucacagugguugccuuccag

SEQ ID NO: 28269 - RNA, 22 nt, Homo sapiens
auucaacuaauuauugaagaug

SEQ ID NO: 28270 - RNA, 20 nt, Homo sapiens
uugcagagcccaacccugga

SEQ ID NO: 28271 - RNA, 22 nt, Homo sapiens
aucaaguacuguacugaaagug

SEQ ID NO: 28272 - RNA, 22 nt, Homo sapiens
aauaauggcaccaaagcacaag

SEQ ID NO: 28273 - RNA, 23 nt, Homo sapiens
uaagucacacagauuaauuuauu

SEQ ID NO: 28274 - RNA, 22 nt, Homo sapiens
uguccaaaucagagguaccaaa

SEQ ID NO: 28275 - RNA, 22 nt, Homo sapiens
caaaagugguucuuauccuuuu

SEQ ID NO: 28276 - RNA, 22 nt, Homo sapiens
augaaagguugucuuaagccau

SEQ ID NO: 28277 - RNA, 22 nt, Homo sapiens
gauacaccauuuucuagcuauu

SEQ ID NO: 28278 - RNA, 20 nt, Homo sapiens
uguaacaaucuggauguugc

SEQ ID NO: 28279 - RNA, 18 nt, Homo sapiens
gauaacaguggacuaugc

SEQ ID NO: 28280 - RNA, 22 nt, Homo sapiens
uauugcagauacccaggaaguu

SEQ ID NO: 28281 - RNA, 22 nt, Homo sapiens
uauagcagccugaacaaaguaa

SEQ ID NO: 28282 - RNA, 22 nt, Homo sapiens
agagguuuugcccucgagauaa

SEQ ID NO: 28283 - RNA, 22 nt, Homo sapiens
aauggcaucuacguuaaauguc

SEQ ID NO: 28284 - RNA, 22 nt, Homo sapiens
cauugcaguuuuugguguaucu

SEQ ID NO: 28285 - RNA, 22 nt, Homo sapiens
accaguuuuuuauacaucuucu

SEQ ID NO: 28286 - RNA, 22 nt, Homo sapiens
uucaucuggcaauucagagauu

SEQ ID NO: 28287 - RNA, 22 nt, Homo sapiens
cacaaaguagauuagucuucca

SEQ ID NO: 28288 - RNA, 22 nt, Homo sapiens
augaugucauuuuaauuucuaa

SEQ ID NO: 28289 - RNA, 22 nt, Homo sapiens
gcagcacauggcagaacauauu

SEQ ID NO: 28290 - RNA, 22 nt, Homo sapiens
uucacagagagaacucaaacca

SEQ ID NO: 28291 - RNA, 22 nt, Homo sapiens
auggauuuuaggauacaguuga

SEQ ID NO: 28292 - RNA, 22 nt, Homo sapiens
cauugcagauccuucaaaugac

SEQ ID NO: 28293 - RNA, 22 nt, Homo sapiens
uuuaaagcuaaaauauguuuau

SEQ ID NO: 28294 - RNA, 22 nt, Homo sapiens
ugcauacacaagcauacaugua

SEQ ID NO: 28295 - RNA, 22 nt, Homo sapiens
uuuaaugcaucccaaaauguag

SEQ ID NO: 28296 - RNA, 22 nt, Homo sapiens
ugaagacauuuuugggugugua

SEQ ID NO: 28297 - RNA, 22 nt, Homo sapiens
uaucccaauguaauaucacaaa

SEQ ID NO: 28298 - RNA, 22 nt, Homo sapiens
auuacaugucuauccaugaaca

SEQ ID NO: 28299 - RNA, 22 nt, Homo sapiens
auggcuuuuuaaaucauguugu

SEQ ID NO: 28300 - RNA, 22 nt, Homo sapiens
uucaauacuguugauccuuaug

SEQ ID NO: 28301 - RNA, 22 nt, Homo sapiens
aucugggguuggcaaaguuugg

SEQ ID NO: 28302 - RNA, 22 nt, Homo sapiens
caguacaauguggaaaaggagu

SEQ ID NO: 28303 - RNA, 22 nt, Homo sapiens
uugaaggaggugcucacucucg

SEQ ID NO: 28304 - RNA, 18 nt, Homo sapiens
ucauagaucaugacagug

SEQ ID NO: 28305 - RNA, 22 nt, Homo sapiens
uugagagaaaaaauuuauuggu

SEQ ID NO: 28306 - RNA, 22 nt, Homo sapiens
uugguccacugugaaauuggga

SEQ ID NO: 28307 - RNA, 22 nt, Homo sapiens
aauacuggcacugaagaccaug

SEQ ID NO: 28308 - RNA, 22 nt, Homo sapiens
uauugcagugagauccaucugg

SEQ ID NO: 28309 - RNA, 22 nt, Homo sapiens
auggcuuuggucucccagugau

SEQ ID NO: 28310 - RNA, 22 nt, Homo sapiens
gugauuauuaugcacugcaugc

SEQ ID NO: 28311 - RNA, 22 nt, Homo sapiens
uugaaagcuaucucaaaucgcu

SEQ ID NO: 28312 - RNA, 22 nt, Homo sapiens
uaaagccagugauuaugucucu

SEQ ID NO: 28313 - RNA, 22 nt, Homo sapiens
ucagauacuggugacaugaaug

SEQ ID NO: 28314 - RNA, 22 nt, Homo sapiens
aaagugauguccaggcuuucag

SEQ ID NO: 28315 - RNA, 22 nt, Homo sapiens
auggauuuguaguacaugguug

SEQ ID NO: 28316 - RNA, 22 nt, Homo sapiens
gugauuauccacgucuuuguga

SEQ ID NO: 28317 - RNA, 22 nt, Homo sapiens
agaaccaaucccacauggauac

SEQ ID NO: 28318 - RNA, 22 nt, Homo sapiens
ugaugcuaccuaaagcaaccau

SEQ ID NO: 28319 - RNA, 23 nt, Homo sapiens
cuuuguacagcuugacuacuggg

SEQ ID NO: 28320 - RNA, 22 nt, Homo sapiens
uuuaauacugcaucuuuacucu

SEQ ID NO: 28321 - RNA, 18 nt, Homo sapiens
cuaauacuauucaacaag

SEQ ID NO: 28322 - RNA, 22 nt, Homo sapiens
ucccaguuuuucugaauaguca

SEQ ID NO: 28323 - RNA, 22 nt, Homo sapiens
uuuaguacugcuuuaugugugu

SEQ ID NO: 28324 - RNA, 22 nt, Homo sapiens
acaaagcuagggaauccaucuu

SEQ ID NO: 28325 - RNA, 22 nt, Homo sapiens
uaaagcuaucacauuggugauu

SEQ ID NO: 28326 - RNA, 22 nt, Homo sapiens
cuuaaagcgaauauugguggua

SEQ ID NO: 28327 - RNA, 22 nt, Homo sapiens
caaauacuuucauguugucuug

SEQ ID NO: 28328 - RNA, 20 nt, Homo sapiens
guucacagagguuaugauua

SEQ ID NO: 28329 - RNA, 22 nt, Homo sapiens
aaaugcuucuauguggcauguu

SEQ ID NO: 28330 - RNA, 22 nt, Homo sapiens
aauucacuuguggcagauccuu

SEQ ID NO: 28331 - RNA, 22 nt, Homo sapiens
augaaagguauguuuucuguga

SEQ ID NO: 28332 - RNA, 22 nt, Homo sapiens
auggcuuuaagagugucugaau

SEQ ID NO: 28333 - RNA, 23 nt, Homo sapiens
gaaguaauaaauggauucuuaac

SEQ ID NO: 28334 - RNA, 20 nt, Homo sapiens
cagugcaccuggcguguuga

SEQ ID NO: 28335 - RNA, 22 nt, Homo sapiens
ucacaugaagauuuuaguauac

SEQ ID NO: 28336 - RNA, 17 nt, Homo sapiens
uaaagccagucaaguca

SEQ ID NO: 28337 - RNA, 22 nt, Homo sapiens
gcagcacaugacuguauguaua

SEQ ID NO: 28338 - RNA, 20 nt, Homo sapiens
ccccaguuuuucuauuagcu

SEQ ID NO: 28339 - RNA, 22 nt, Homo sapiens
cuguaagcauuauaaagagaua

SEQ ID NO: 28340 - RNA, 22 nt, Homo sapiens
uggcauuuuguuuuagaauuag

SEQ ID NO: 28341 - RNA, 22 nt, Homo sapiens
uuuaaagcuccaagcaugucug

SEQ ID NO: 28342 - RNA, 22 nt, Homo sapiens
uuuaggcaauauauucaugucu

SEQ ID NO: 28343 - RNA, 22 nt, Homo sapiens
aaucuguagaaggugcacauuc

SEQ ID NO: 28344 - RNA, 22 nt, Homo sapiens
aucaccagaugcuucaagcaga

SEQ ID NO: 28345 - RNA, 22 nt, Homo sapiens
gcaaaauugagaagggaauaua

SEQ ID NO: 28346 - RNA, 22 nt, Homo sapiens
aggugguuuugaugagcaggua

SEQ ID NO: 28347 - RNA, 22 nt, Homo sapiens
uuuaaagcaugacgagaagaag

SEQ ID NO: 28348 - RNA, 22 nt, Homo sapiens
uaaagcgaggucuccuacaaga

SEQ ID NO: 28349 - RNA, 20 nt, Homo sapiens
cagcaaccugcucucuuccu

SEQ ID NO: 28350 - RNA, 20 nt, Homo sapiens
uauaacaguuuggacccagu

SEQ ID NO: 28351 - RNA, 19 nt, Homo sapiens
cauggcuuauaauuuuaau

SEQ ID NO: 28352 - RNA, 22 nt, Homo sapiens
aagccagugugacaggaaacuu

SEQ ID NO: 28353 - RNA, 22 nt, Homo sapiens
uuugacuuuuagaauaugaguu

SEQ ID NO: 28354 - RNA, 22 nt, Homo sapiens
guggguaaaucucuggggcucu

SEQ ID NO: 28355 - RNA, 22 nt, Homo sapiens
augaagacaucgucugggauua

SEQ ID NO: 28356 - RNA, 22 nt, Homo sapiens
uuuaaggcaugccuguacaugc

SEQ ID NO: 28357 - RNA, 22 nt, Homo sapiens
uguauguugggucaaaguacau

SEQ ID NO: 28358 - RNA, 22 nt, Homo sapiens
uacugagagaggaauauugaaa

SEQ ID NO: 28359 - RNA, 22 nt, Homo sapiens
gaaauggaucagagcaagcuuu

SEQ ID NO: 28360 - RNA, 22 nt, Homo sapiens
auucuauaguccuaggauuggg

SEQ ID NO: 28361 - RNA, 22 nt, Homo sapiens
aguaucacaggcaaaacagaau

SEQ ID NO: 28362 - RNA, 22 nt, Homo sapiens
auggcuuuuauuguguugaggu

SEQ ID NO: 28363 - RNA, 22 nt, Homo sapiens
uaguucauuuuucuugcuuaga

SEQ ID NO: 28364 - RNA, 22 nt, Homo sapiens
uugacuucagagcugauucaag

SEQ ID NO: 28365 - RNA, 22 nt, Homo sapiens
cauugcaguggaguggggaaga

SEQ ID NO: 28366 - RNA, 20 nt, Homo sapiens
aagugaguguuaaacugaac

SEQ ID NO: 28367 - RNA, 22 nt, Homo sapiens
uuaaaugcacauacuugagaaa

SEQ ID NO: 28368 - RNA, 22 nt, Homo sapiens
aaguauagcuaugauaaacauu

SEQ ID NO: 28369 - RNA, 22 nt, Homo sapiens
ggcagagucuugcaucuuuaga

SEQ ID NO: 28370 - RNA, 22 nt, Homo sapiens
uuuggcuuaagauugacugcaa

SEQ ID NO: 28371 - RNA, 20 nt, Homo sapiens
aaaguaggcuaauaccaaaa

SEQ ID NO: 28372 - RNA, 20 nt, Homo sapiens
gacauagagacucucaaaaa

SEQ ID NO: 28373 - RNA, 22 nt, Homo sapiens
augauacuggcuucauagaaug

SEQ ID NO: 28374 - RNA, 22 nt, Homo sapiens
gauaacagauaaugucaguuau

SEQ ID NO: 28375 - RNA, 21 nt, Homo sapiens
agagucaucucuaucuguacc

SEQ ID NO: 28376 - RNA, 22 nt, Homo sapiens
caaaagugauugcgguuuuugc

SEQ ID NO: 28377 - RNA, 22 nt, Homo sapiens
uuuggcuuugagaagcagugga

SEQ ID NO: 28378 - RNA, 22 nt, Homo sapiens
ucugagacuguuucuaacaagc

SEQ ID NO: 28379 - RNA, 22 nt, Homo sapiens
agcagcaccaaacagacuaaga

SEQ ID NO: 28380 - RNA, 23 nt, Homo sapiens
uucaccguguuggccaggcuggu

SEQ ID NO: 28381 - RNA, 22 nt, Homo sapiens
augucauagaagccugugaacc

SEQ ID NO: 28382 - RNA, 22 nt, Homo sapiens
ucagaccauuucauuacagacu

SEQ ID NO: 28383 - RNA, 22 nt, Homo sapiens
uaugaaagcuacuucucacaau

SEQ ID NO: 28384 - RNA, 22 nt, Homo sapiens
ugucaauauguaauaacugaau

SEQ ID NO: 28385 - RNA, 22 nt, Homo sapiens
cugaaagguauacgcuuguuau

SEQ ID NO: 28386 - RNA, 22 nt, Homo sapiens
caguacaauguugauuagaagu

SEQ ID NO: 28387 - RNA, 22 nt, Homo sapiens
aagucaguuugggagaagcuau

SEQ ID NO: 28388 - RNA, 22 nt, Homo sapiens
uuaacacugccauugauacugu

SEQ ID NO: 28389 - RNA, 16 nt, Homo sapiens
uguccaaauaaauaca

SEQ ID NO: 28390 - RNA, 22 nt, Homo sapiens
uucacagaguuauuuuuaugcu

SEQ ID NO: 28391 - RNA, 22 nt, Homo sapiens
acaucuguacaguggguguggu

SEQ ID NO: 28392 - RNA, 21 nt, Homo sapiens
uuuggcuucucugcugcagcc

SEQ ID NO: 28393 - RNA, 22 nt, Homo sapiens
ugauaggucuguuuugaaaagg

SEQ ID NO: 28394 - RNA, 22 nt, Homo sapiens
ugagaucaagguuaauauaauc

SEQ ID NO: 28395 - RNA, 22 nt, Homo sapiens
augaaaguguguggaaacuuga

SEQ ID NO: 28396 - RNA, 22 nt, Homo sapiens
uauugcagaaugugaguuggca

SEQ ID NO: 28397 - RNA, 22 nt, Homo sapiens
cauugcaguaagagugggcucu

SEQ ID NO: 28398 - RNA, 22 nt, Homo sapiens
auaaagcaagucucuggccuca

SEQ ID NO: 28399 - RNA, 22 nt, Homo sapiens
uggaguguaaauuaguucagcc

SEQ ID NO: 28400 - RNA, 22 nt, Homo sapiens
uuugccuuugugauauggucua

SEQ ID NO: 28401 - RNA, 22 nt, Homo sapiens
uuaaggcuuuaaguaaacacag

SEQ ID NO: 28402 - RNA, 22 nt, Homo sapiens
ggaucauaugauagcucaauuu

SEQ ID NO: 28403 - RNA, 22 nt, Homo sapiens
auugcucaaaucaguacuugag

SEQ ID NO: 28404 - RNA, 22 nt, Homo sapiens
aauuaguugucgugagaguggu

SEQ ID NO: 28405 - RNA, 22 nt, Homo sapiens
uaaagccauugucaaguuugua

SEQ ID NO: 28406 - RNA, 22 nt, Homo sapiens
cagggaauguuauuuaauagca

SEQ ID NO: 28407 - RNA, 22 nt, Homo sapiens
cugaaaguuauucaggggcaag

SEQ ID NO: 28408 - RNA, 22 nt, Homo sapiens
aguccauuugaugaugauucca

SEQ ID NO: 28409 - RNA, 20 nt, Homo sapiens
aauaacagccccagggaggu

SEQ ID NO: 28410 - RNA, 22 nt, Homo sapiens
uugcgcuuuuccuauguugccc

SEQ ID NO: 28411 - RNA, 18 nt, Homo sapiens
aaaaagugcucaggccua

SEQ ID NO: 28412 - RNA, 22 nt, Homo sapiens
guuaaagacauccacauaggag

SEQ ID NO: 28413 - RNA, 22 nt, Homo sapiens
caacacuguuuauuggauagcc

SEQ ID NO: 28414 - RNA, 22 nt, Homo sapiens
uuagaucaacauggaacucuau

SEQ ID NO: 28415 - RNA, 22 nt, Homo sapiens
gcagaauugacucuguuuuuuc

SEQ ID NO: 28416 - RNA, 22 nt, Homo sapiens
uuucugguuaauuucuaagagc

SEQ ID NO: 28417 - RNA, 22 nt, Homo sapiens
uucacagacaacuggucccuua

SEQ ID NO: 28418 - RNA, 22 nt, Homo sapiens
ugagguuguccacuauaaucca

SEQ ID NO: 28419 - RNA, 22 nt, Homo sapiens
cucugguuaaggcugaacuaua

SEQ ID NO: 28420 - RNA, 20 nt, Homo sapiens
cucugguugugaauugucuu

SEQ ID NO: 28421 - RNA, 23 nt, Homo sapiens
cagugcauuguggcauucagcau

SEQ ID NO: 28422 - RNA, 20 nt, Homo sapiens
cagucauagacaucagaguc

SEQ ID NO: 28423 - RNA, 22 nt, Homo sapiens
uucugguuaauacuugcaaaaa

SEQ ID NO: 28424 - RNA, 22 nt, Homo sapiens
ucagucauguuuaccagacgua

SEQ ID NO: 28425 - RNA, 22 nt, Homo sapiens
cccacaguggccucauauccuu

SEQ ID NO: 28426 - RNA, 22 nt, Homo sapiens
gaacccuggaggcggagguugc

SEQ ID NO: 28427 - RNA, 22 nt, Homo sapiens
gacucagaacuaaggguguuuc

SEQ ID NO: 28428 - RNA, 22 nt, Homo sapiens
auauucacuauaugcagaacca

SEQ ID NO: 28429 - RNA, 22 nt, Homo sapiens
acccugguagcuaugaagucuu

SEQ ID NO: 28430 - RNA, 17 nt, Homo sapiens
uugagaguauaucuuac

SEQ ID NO: 28431 - RNA, 21 nt, Homo sapiens
acccccacaccuccuuaguuc

SEQ ID NO: 28432 - RNA, 22 nt, Homo sapiens
uuuaaagcacggaguuuguggc

SEQ ID NO: 28433 - RNA, 22 nt, Homo sapiens
caaaagugauugcgguuuuugc

SEQ ID NO: 28434 - RNA, 22 nt, Homo sapiens
aucaccagaugcuucaagcaga

SEQ ID NO: 28435 - RNA, 22 nt, Homo sapiens
aaguauagcuaugauaaacauu

SEQ ID NO: 28436 - RNA, 22 nt, Homo sapiens
auggauuuuaggauacaguuga

SEQ ID NO: 28437 - RNA, 22 nt, Homo sapiens
uuuaaagcaugacgagaagaag

SEQ ID NO: 28438 - RNA, 20 nt, Homo sapiens
ccccaguuuuucuauuagcu

SEQ ID NO: 28439 - RNA, 22 nt, Homo sapiens
uugguccacugugaaauuggga

SEQ ID NO: 28440 - RNA, 22 nt, Homo sapiens
ggcagagucuugcaucuuuaga

SEQ ID NO: 28441 - RNA, 22 nt, Homo sapiens
ugaagacauuuuugggugugua

SEQ ID NO: 28442 - RNA, 22 nt, Homo sapiens
aggugguuuugaugagcaggua

SEQ ID NO: 28443 - RNA, 22 nt, Homo sapiens
auucuauaguccuaggauuggg

SEQ ID NO: 28444 - RNA, 22 nt, Homo sapiens
augaugucauuuuaauuucuaa

SEQ ID NO: 28445 - RNA, 22 nt, Homo sapiens
uucaucuggcaauucagagauu

SEQ ID NO: 28446 - RNA, 22 nt, Homo sapiens
ucacaugaagauuuuaguauac

SEQ ID NO: 28447 - RNA, 20 nt, Homo sapiens
aagugaguguuaaacugaac

SEQ ID NO: 28448 - RNA, 22 nt, Homo sapiens
uuaaauacagcaugguguuucu

SEQ ID NO: 28449 - RNA, 22 nt, Homo sapiens
uaaagccauugucaaguuugua

SEQ ID NO: 28450 - RNA, 22 nt, Homo sapiens
caguacaauguggaaaaggagu

SEQ ID NO: 28451 - RNA, 22 nt, Homo sapiens
gaaauggaucagagcaagcuuu

SEQ ID NO: 28452 - RNA, 22 nt, Homo sapiens
agagguuuugcccucgagauaa

SEQ ID NO: 28453 - RNA, 22 nt, Homo sapiens
cuuaaagcgaauauugguggua

SEQ ID NO: 28454 - RNA, 22 nt, Homo sapiens
uguauguugggucaaaguacau

SEQ ID NO: 28455 - RNA, 22 nt, Homo sapiens
uauagcagccugaacaaaguaa

SEQ ID NO: 28456 - RNA, 22 nt, Homo sapiens
uaaagcgaggucuccuacaaga

SEQ ID NO: 28457 - RNA, 22 nt, Homo sapiens
uuuaaagcuaaaauauguuuau

SEQ ID NO: 28458 - RNA, 22 nt, Homo sapiens
aaucuguagaaggugcacauuc

SEQ ID NO: 28459 - RNA, 20 nt, Homo sapiens
cagcaaccugcucucuuccu

SEQ ID NO: 28460 - RNA, 20 nt, Homo sapiens
gacauagagacucucaaaaa

SEQ ID NO: 28461 - RNA, 22 nt, Homo sapiens
cauugcagauccuucaaaugac

SEQ ID NO: 28462 - RNA, 22 nt, Homo sapiens
uuggagagugauauucagaugc

SEQ ID NO: 28463 - RNA, 23 nt, Homo sapiens
uaucucaaugcacagagaggaaa

SEQ ID NO: 28464 - RNA, 22 nt, Homo sapiens
augauacuggcuucauagaaug

SEQ ID NO: 28465 - RNA, 22 nt, Homo sapiens
uauugcagauacccaggaaguu

SEQ ID NO: 28466 - RNA, 20 nt, Homo sapiens
uugcagagcccaacccugga

SEQ ID NO: 28467 - RNA, 22 nt, Homo sapiens
aucugggguuggcaaaguuugg

SEQ ID NO: 28468 - RNA, 22 nt, Homo sapiens
cauugcaguuuuugguguaucu

SEQ ID NO: 28469 - RNA, 22 nt, Homo sapiens
augaagacaucgucugggauua

SEQ ID NO: 28470 - RNA, 22 nt, Homo sapiens
uaucccaauguaauaucacaaa

SEQ ID NO: 28471 - RNA, 21 nt, Homo sapiens
agagucaucucuaucuguacc

SEQ ID NO: 28472 - RNA, 20 nt, Homo sapiens
uguaacaaucuggauguugc

SEQ ID NO: 28473 - RNA, 22 nt, Homo sapiens
aagccagugugacaggaaacuu

SEQ ID NO: 28474 - RNA, 22 nt, Homo sapiens
augaaagguugucuuaagccau

SEQ ID NO: 28475 - RNA, 22 nt, Homo sapiens
uuuaaggcaugccuguacaugc

SEQ ID NO: 28476 - RNA, 22 nt, Homo sapiens
uaaagcuaucacauuggugauu

SEQ ID NO: 28477 - RNA, 22 nt, Homo sapiens
ucugagacuguuucuaacaagc

SEQ ID NO: 28478 - RNA, 22 nt, Homo sapiens
gcagaauugacucuguuuuuuc

SEQ ID NO: 28479 - RNA, 22 nt, Homo sapiens
guggguaaaucucuggggcucu

SEQ ID NO: 28480 - RNA, 22 nt, Homo sapiens
uuugacuuuuagaauaugaguu

SEQ ID NO: 28481 - RNA, 22 nt, Homo sapiens
caacacuguuuauuggauagcc

SEQ ID NO: 28482 - RNA, 18 nt, Homo sapiens
gauaacaguggacuaugc

SEQ ID NO: 28483 - RNA, 22 nt, Homo sapiens
aauggcaucuacguuaaauguc

SEQ ID NO: 28484 - RNA, 22 nt, Homo sapiens
uuaacacugccauugauacugu

SEQ ID NO: 28485 - RNA, 22 nt, Homo sapiens
ugauaggucuguuuugaaaagg

SEQ ID NO: 28486 - RNA, 22 nt, Homo sapiens
agcagcaccaaacagacuaaga

SEQ ID NO: 28487 - RNA, 22 nt, Homo sapiens
auugcucaaaucaguacuugag

SEQ ID NO: 28488 - RNA, 22 nt, Homo sapiens
agaaccaaucccacauggauac

SEQ ID NO: 28489 - RNA, 22 nt, Homo sapiens
auucaacuaauuauugaagaug

SEQ ID NO: 28490 - RNA, 22 nt, Homo sapiens
cagggaauguuauuuaauagca

SEQ ID NO: 28491 - RNA, 22 nt, Homo sapiens
uugcgcuuuuccuauguugccc

SEQ ID NO: 28492 - RNA, 23 nt, Homo sapiens
uaagucacacagauuaauuuauu

SEQ ID NO: 28493 - RNA, 20 nt, Homo sapiens
aauaacagccccagggaggu

SEQ ID NO: 28494 - RNA, 22 nt, Homo sapiens
ucagauacuggugacaugaaug

SEQ ID NO: 28495 - RNA, 22 nt, Homo sapiens
auaaagcaagucucuggccuca

SEQ ID NO: 28496 - RNA, 22 nt, Homo sapiens
caaauacuuucauguugucuug

SEQ ID NO: 28497 - RNA, 22 nt, Homo sapiens
cuguaagcauuauaaagagaua

SEQ ID NO: 28498 - RNA, 22 nt, Homo sapiens
aguccauuugaugaugauucca

SEQ ID NO: 28499 - RNA, 22 nt, Homo sapiens
aaaugcuucuauguggcauguu

SEQ ID NO: 28500 - RNA, 23 nt, Homo sapiens
cuuuguacagcuugacuacuggg

SEQ ID NO: 28501 - RNA, 22 nt, Homo sapiens
cauugcaguaagagugggcucu

SEQ ID NO: 28502 - RNA, 22 nt, Homo sapiens
gauaacagauaaugucaguuau

SEQ ID NO: 28503 - RNA, 18 nt, Homo sapiens
cuaauacuauucaacaag

SEQ ID NO: 28504 - RNA, 22 nt, Homo sapiens
uucacagagagaacucaaacca

SEQ ID NO: 28505 - RNA, 22 nt, Homo sapiens
aauucacuuguggcagauccuu

SEQ ID NO: 28506 - RNA, 22 nt, Homo sapiens
uguccaaaucagagguaccaaa

SEQ ID NO: 28507 - RNA, 22 nt, Homo sapiens
cacaaaguagauuagucuucca

SEQ ID NO: 28508 - RNA, 22 nt, Homo sapiens
acaaagcuagggaauccaucuu

SEQ ID NO: 28509 - RNA, 22 nt, Homo sapiens
cugaaagguauacgcuuguuau

SEQ ID NO: 28510 - RNA, 22 nt, Homo sapiens
aagucaguuugggagaagcuau

SEQ ID NO: 28511 - RNA, 22 nt, Homo sapiens
cauugcaguggaguggggaaga

SEQ ID NO: 28512 - RNA, 20 nt, Homo sapiens
cagugcaccuggcguguuga

SEQ ID NO: 28513 - RNA, 22 nt, Homo sapiens
uugagagaaaaaauuuauuggu

SEQ ID NO: 28514 - RNA, 22 nt, Homo sapiens
ucagaccauuucauuacagacu

SEQ ID NO: 28515 - RNA, 22 nt, Homo sapiens
auggauuuguaguacaugguug

SEQ ID NO: 28516 - RNA, 22 nt, Homo sapiens
aaagugauguccaggcuuucag

SEQ ID NO: 28517 - RNA, 22 nt, Homo sapiens
auggcuuuggucucccagugau

SEQ ID NO: 28518 - RNA, 22 nt, Homo sapiens
gcaaaauugagaagggaauaua

SEQ ID NO: 28519 - RNA, 22 nt, Homo sapiens
uuuggcuuugagaagcagugga

SEQ ID NO: 28520 - RNA, 22 nt, Homo sapiens
aaaugguguuaguagaucuuua

SEQ ID NO: 28521 - RNA, 22 nt, Homo sapiens
cugaggcacggcgaccuuaagu

SEQ ID NO: 28522 - RNA, 22 nt, Homo sapiens
uuuaauacugcaucuuuacucu

SEQ ID NO: 28523 - RNA, 22 nt, Homo sapiens
auggcuuuuauuguguugaggu

SEQ ID NO: 28524 - RNA, 22 nt, Homo sapiens
auuacaugucuauccaugaaca

SEQ ID NO: 28525 - RNA, 22 nt, Homo sapiens
gcagcacauggcagaacauauu

SEQ ID NO: 28526 - RNA, 22 nt, Homo sapiens
gugauuauuaugcacugcaugc

SEQ ID NO: 28527 - RNA, 20 nt, Homo sapiens
uauaacaguuuggacccagu

SEQ ID NO: 28528 - RNA, 22 nt, Homo sapiens
acaucuguacaguggguguggu

SEQ ID NO: 28529 - RNA, 22 nt, Homo sapiens
uuuaaagcuccaagcaugucug

SEQ ID NO: 28530 - RNA, 22 nt, Homo sapiens
aguaucacaggcaaaacagaau

SEQ ID NO: 28531 - RNA, 22 nt, Homo sapiens
aauaauggcaccaaagcacaag

SEQ ID NO: 28532 - RNA, 22 nt, Homo sapiens
uuuaaugcaucccaaaauguag

SEQ ID NO: 28533 - RNA, 19 nt, Homo sapiens
cauggcuuauaauuuuaau

SEQ ID NO: 28534 - RNA, 22 nt, Homo sapiens
accaguuuuuuauacaucuucu

SEQ ID NO: 28535 - RNA, 22 nt, Homo sapiens
uucaauacuguugauccuuaug

SEQ ID NO: 28536 - RNA, 23 nt, Homo sapiens
gaaguaauaaauggauucuuaac

SEQ ID NO: 28537 - RNA, 22 nt, Homo sapiens
auggcuuuuuaaaucauguugu

SEQ ID NO: 28538 - RNA, 20 nt, Homo sapiens
aaaguaggcuaauaccaaaa

SEQ ID NO: 28539 - RNA, 22 nt, Homo sapiens
uugacuucagagcugauucaag

SEQ ID NO: 28540 - RNA, 22 nt, Homo sapiens
uaguucauuuuucuugcuuaga

SEQ ID NO: 28541 - RNA, 20 nt, Homo sapiens
guucacagagguuaugauua

SEQ ID NO: 28542 - RNA, 22 nt, Homo sapiens
ugcauacacaagcauacaugua

SEQ ID NO: 28543 - RNA, 22 nt, Homo sapiens
uuuaguacugcuuuaugugugu

SEQ ID NO: 28544 - RNA, 22 nt, Homo sapiens
augaaaguguguggaaacuuga

SEQ ID NO: 28545 - RNA, 16 nt, Homo sapiens
uguccaaauaaauaca

SEQ ID NO: 28546 - RNA, 22 nt, Homo sapiens
uugaaggaggugcucacucucg

SEQ ID NO: 28547 - RNA, 22 nt, Homo sapiens
uauugcagugagauccaucugg

SEQ ID NO: 28548 - RNA, 22 nt, Homo sapiens
gauacaccauuuucuagcuauu

SEQ ID NO: 28549 - RNA, 18 nt, Homo sapiens
aaaaagugcucaggccua

SEQ ID NO: 28550 - RNA, 22 nt, Homo sapiens
uuagaucaacauggaacucuau

SEQ ID NO: 28551 - RNA, 22 nt, Homo sapiens
auggcuuuaagagugucugaau

SEQ ID NO: 28552 - RNA, 22 nt, Homo sapiens
augaaagguauguuuucuguga

SEQ ID NO: 28553 - RNA, 21 nt, Homo sapiens
uuuggcuucucugcugcagcc

SEQ ID NO: 28554 - RNA, 22 nt, Homo sapiens
aucaaguacuguacugaaagug

SEQ ID NO: 28555 - RNA, 22 nt, Homo sapiens
gugauuauccacgucuuuguga

SEQ ID NO: 28556 - RNA, 22 nt, Homo sapiens
uaaagccagugauuaugucucu

SEQ ID NO: 28557 - RNA, 22 nt, Homo sapiens
uacugagagaggaauauugaaa

SEQ ID NO: 28558 - RNA, 22 nt, Homo sapiens
uuugccuuugugauauggucua

SEQ ID NO: 28559 - RNA, 22 nt, Homo sapiens
aauacuggcacugaagaccaug

SEQ ID NO: 28560 - RNA, 22 nt, Homo sapiens
caaaagugguucuuauccuuuu

SEQ ID NO: 28561 - RNA, 22 nt, Homo sapiens
guucacagugguugccuuccag

SEQ ID NO: 28562 - RNA, 22 nt, Homo sapiens
uuaaaugcacauacuugagaaa

SEQ ID NO: 28563 - RNA, 22 nt, Homo sapiens
ugaugcuaccuaaagcaaccau

SEQ ID NO: 28564 - RNA, 17 nt, Homo sapiens
uaaagccagucaaguca

SEQ ID NO: 28565 - RNA, 18 nt, Homo sapiens
ucauagaucaugacagug

SEQ ID NO: 28566 - RNA, 22 nt, Homo sapiens
uuuggcuuaagauugacugcaa

SEQ ID NO: 28567 - RNA, 22 nt, Homo sapiens
ugucaauauguaauaacugaau

SEQ ID NO: 28568 - RNA, 22 nt, Homo sapiens
ucccaguuuuucugaauaguca

SEQ ID NO: 28569 - RNA, 22 nt, Homo sapiens
uaugaaagcuacuucucacaau

SEQ ID NO: 28570 - RNA, 20 nt, Homo sapiens
cuggaucaucaguaaaguua

SEQ ID NO: 28571 - RNA, 22 nt, Homo sapiens
aauuaguugucgugagaguggu

SEQ ID NO: 28572 - RNA, 22 nt, Homo sapiens
uugaaagcuaucucaaaucgcu

SEQ ID NO: 28573 - RNA, 22 nt, Homo sapiens
guuaaagacauccacauaggag

SEQ ID NO: 28574 - RNA, 22 nt, Homo sapiens
uggaguguaaauuaguucagcc

SEQ ID NO: 28575 - RNA, 22 nt, Homo sapiens
uauugcagaaugugaguuggca

SEQ ID NO: 28576 - RNA, 22 nt, Homo sapiens
cugaaaguuauucaggggcaag

SEQ ID NO: 28577 - RNA, 23 nt, Homo sapiens
uucaccguguuggccaggcuggu

SEQ ID NO: 28578 - RNA, 22 nt, Homo sapiens
caguacaauguugauuagaagu

SEQ ID NO: 28579 - RNA, 22 nt, Homo sapiens
augucauagaagccugugaacc

SEQ ID NO: 28580 - RNA, 22 nt, Homo sapiens
uucacagaguuauuuuuaugcu

SEQ ID NO: 28581 - RNA, 22 nt, Homo sapiens
ugagaucaagguuaauauaauc

SEQ ID NO: 28582 - RNA, 22 nt, Homo sapiens
ggaucauaugauagcucaauuu

SEQ ID NO: 28583 - RNA, 22 nt, Homo sapiens
uuaaggcuuuaaguaaacacag

SEQ ID NO: 28584 - RNA, 22 nt, Homo sapiens
uuuaggcaauauauucaugucu

SEQ ID NO: 28585 - RNA, 22 nt, Homo sapiens
gcagcacaugacuguauguaua

SEQ ID NO: 28586 - RNA, 22 nt, Homo sapiens
uggcauuuuguuuuagaauuag

SEQ ID NO: 28587 - RNA, 22 nt, Homo sapiens
aauuaguugucgugagaguggu

SEQ ID NO: 28588 - RNA, 22 nt, Homo sapiens
ccacugcacuccagcccggcaa

SEQ ID NO: 28589 - RNA, 22 nt, Homo sapiens
aauuaguuggcugggugcggug

SEQ ID NO: 28590 - RNA, 21 nt, Homo sapiens
cacugcacuugccuucugggu

SEQ ID NO: 28591 - RNA, 22 nt, Homo sapiens
cacugcacuccagcuugugggc

SEQ ID NO: 28592 - RNA, 22 nt, Homo sapiens
uauuaguuuucuguggauuaca

SEQ ID NO: 28593 - RNA, 22 nt, Homo sapiens
uaguaucacauggucuuaauua

SEQ ID NO: 28594 - RNA, 20 nt, Homo sapiens
uacugcacuccauccugggu

SEQ ID NO: 28595 - RNA, 21 nt, Homo sapiens
acccccacaccuccuuaguuc

SEQ ID NO: 28596 - RNA, 22 nt, Homo sapiens
uuaguucauugugacuggacuc

SEQ ID NO: 28597 - RNA, 22 nt, Homo sapiens
ucacugcacuccagccuuuaug

SEQ ID NO: 28598 - RNA, 22 nt, Homo sapiens
ggagaauugcuuggacccggga

SEQ ID NO: 28599 - RNA, 22 nt, Homo sapiens
cacugcacuccagucuggcgac

SEQ ID NO: 28600 - RNA, 22 nt, Homo sapiens
cacugcacuccaguuucgguaa

SEQ ID NO: 28601 - RNA, 22 nt, Homo sapiens
cacugcacuccaguuuggauga

SEQ ID NO: 28602 - RNA, 22 nt, Homo sapiens
cacugcacuccagcuuugguga

SEQ ID NO: 28603 - RNA, 22 nt, Homo sapiens
aggugguuuugaugagcaggua

SEQ ID NO: 28604 - RNA, 22 nt, Homo sapiens
cugaaaguuauucaggggcaag

SEQ ID NO: 28605 - RNA, 20 nt, Homo sapiens
ccccaguuuuucuauuagcu

SEQ ID NO: 28606 - RNA, 22 nt, Homo sapiens
ucagauacuggugacaugaaug

SEQ ID NO: 28607 - RNA, 22 nt, Homo sapiens
auggcuuuggucucccagugau

SEQ ID NO: 28608 - RNA, 22 nt, Homo sapiens
augaaaguguguggaaacuuga

SEQ ID NO: 28609 - RNA, 22 nt, Homo sapiens
uguccaaaucagagguaccaaa

SEQ ID NO: 28610 - RNA, 22 nt, Homo sapiens
caguacaauguugauuagaagu

SEQ ID NO: 28611 - RNA, 22 nt, Homo sapiens
aaaugguguuaguagaucuuua

SEQ ID NO: 28612 - RNA, 22 nt, Homo sapiens
aaaugcuucuauguggcauguu

SEQ ID NO: 28613 - RNA, 22 nt, Homo sapiens
aauacuggcacugaagaccaug

SEQ ID NO: 28614 - RNA, 20 nt, Homo sapiens
cagugcaccuggcguguuga

SEQ ID NO: 28615 - RNA, 23 nt, Homo sapiens
uaagucacacagauuaauuuauu

SEQ ID NO: 28616 - RNA, 22 nt, Homo sapiens
uaaagccagugauuaugucucu

SEQ ID NO: 28617 - RNA, 22 nt, Homo sapiens
gugauuauccacgucuuuguga

SEQ ID NO: 28618 - RNA, 22 nt, Homo sapiens
uauugcagugagauccaucugg

SEQ ID NO: 28619 - RNA, 22 nt, Homo sapiens
gaaauggaucagagcaagcuuu

SEQ ID NO: 28620 - RNA, 22 nt, Homo sapiens
agaaccaaucccacauggauac

SEQ ID NO: 28621 - RNA, 22 nt, Homo sapiens
aguccauuugaugaugauucca

SEQ ID NO: 28622 - RNA, 20 nt, Homo sapiens
aaaguaggcuaauaccaaaa

SEQ ID NO: 28623 - RNA, 22 nt, Homo sapiens
uaaagcuaucacauuggugauu

SEQ ID NO: 28624 - RNA, 22 nt, Homo sapiens
uuaaauacagcaugguguuucu

SEQ ID NO: 28625 - RNA, 20 nt, Homo sapiens
aauaacagccccagggaggu

SEQ ID NO: 28626 - RNA, 22 nt, Homo sapiens
ucacaugaagauuuuaguauac

SEQ ID NO: 28627 - RNA, 22 nt, Homo sapiens
cauugcaguaagagugggcucu

SEQ ID NO: 28628 - RNA, 22 nt, Homo sapiens
cauugcagauccuucaaaugac

SEQ ID NO: 28629 - RNA, 18 nt, Homo sapiens
cuaauacuauucaacaag

SEQ ID NO: 28630 - RNA, 22 nt, Homo sapiens
gcagcacauggcagaacauauu

SEQ ID NO: 28631 - RNA, 22 nt, Homo sapiens
agcagcaccaaacagacuaaga

SEQ ID NO: 28632 - RNA, 22 nt, Homo sapiens
cugaaagguauacgcuuguuau

SEQ ID NO: 28633 - RNA, 22 nt, Homo sapiens
uaguucauuuuucuugcuuaga

SEQ ID NO: 28634 - RNA, 22 nt, Homo sapiens
auggcuuuuauuguguugaggu

SEQ ID NO: 28635 - RNA, 22 nt, Homo sapiens
uguauguugggucaaaguacau

SEQ ID NO: 28636 - RNA, 22 nt, Homo sapiens
ucagaccauuucauuacagacu

SEQ ID NO: 28637 - RNA, 22 nt, Homo sapiens
uaucccaauguaauaucacaaa

SEQ ID NO: 28638 - RNA, 22 nt, Homo sapiens
uugacuucagagcugauucaag

SEQ ID NO: 28639 - RNA, 22 nt, Homo sapiens
uuuggcuuaagauugacugcaa

SEQ ID NO: 28640 - RNA, 17 nt, Homo sapiens
uaaagccagucaaguca

SEQ ID NO: 28641 - RNA, 22 nt, Homo sapiens
uugaaagcuaucucaaaucgcu

SEQ ID NO: 28642 - RNA, 22 nt, Homo sapiens
ggcagagucuugcaucuuuaga

SEQ ID NO: 28643 - RNA, 22 nt, Homo sapiens
cacaaaguagauuagucuucca

SEQ ID NO: 28644 - RNA, 20 nt, Homo sapiens
cagcaaccugcucucuuccu

SEQ ID NO: 28645 - RNA, 23 nt, Homo sapiens
cuuuguacagcuugacuacuggg

SEQ ID NO: 28646 - RNA, 22 nt, Homo sapiens
ggaucauaugauagcucaauuu

SEQ ID NO: 28647 - RNA, 21 nt, Homo sapiens
uuuggcuucucugcugcagcc

SEQ ID NO: 28648 - RNA, 18 nt, Homo sapiens
gauaacaguggacuaugc

SEQ ID NO: 28649 - RNA, 20 nt, Homo sapiens
guucacagagguuaugauua

SEQ ID NO: 28650 - RNA, 22 nt, Homo sapiens
gcagaauugacucuguuuuuuc

SEQ ID NO: 28651 - RNA, 22 nt, Homo sapiens
guuaaagacauccacauaggag

SEQ ID NO: 28652 - RNA, 22 nt, Homo sapiens
caacacuguuuauuggauagcc

SEQ ID NO: 28653 - RNA, 22 nt, Homo sapiens
cugaggcacggcgaccuuaagu

SEQ ID NO: 28654 - RNA, 22 nt, Homo sapiens
guggguaaaucucuggggcucu

SEQ ID NO: 28655 - RNA, 22 nt, Homo sapiens
uuuaguacugcuuuaugugugu

SEQ ID NO: 28656 - RNA, 22 nt, Homo sapiens
aauggcaucuacguuaaauguc

SEQ ID NO: 28657 - RNA, 22 nt, Homo sapiens
uugguccacugugaaauuggga

SEQ ID NO: 28658 - RNA, 22 nt, Homo sapiens
caaaagugguucuuauccuuuu

SEQ ID NO: 28659 - RNA, 22 nt, Homo sapiens
auucaacuaauuauugaagaug

SEQ ID NO: 28660 - RNA, 22 nt, Homo sapiens
aaagugauguccaggcuuucag

SEQ ID NO: 28661 - RNA, 22 nt, Homo sapiens
aucugggguuggcaaaguuugg

SEQ ID NO: 28662 - RNA, 22 nt, Homo sapiens
aaguauagcuaugauaaacauu

SEQ ID NO: 28663 - RNA, 22 nt, Homo sapiens
gauacaccauuuucuagcuauu

SEQ ID NO: 28664 - RNA, 22 nt, Homo sapiens
ugauaggucuguuuugaaaagg

SEQ ID NO: 28665 - RNA, 22 nt, Homo sapiens
uugagagaaaaaauuuauuggu

SEQ ID NO: 28666 - RNA, 22 nt, Homo sapiens
cuuaaagcgaauauugguggua

SEQ ID NO: 28667 - RNA, 22 nt, Homo sapiens
uuuaauacugcaucuuuacucu

SEQ ID NO: 28668 - RNA, 22 nt, Homo sapiens
aauuaguugucgugagaguggu

SEQ ID NO: 28669 - RNA, 22 nt, Homo sapiens
uacugagagaggaauauugaaa

SEQ ID NO: 28670 - RNA, 22 nt, Homo sapiens
caaaagugauugcgguuuuugc

SEQ ID NO: 28671 - RNA, 22 nt, Homo sapiens
uuuaaagcacggaguuuguggc

SEQ ID NO: 28672 - RNA, 22 nt, Homo sapiens
uuuggcuuugagaagcagugga

SEQ ID NO: 28673 - RNA, 22 nt, Homo sapiens
uuuaaagcuccaagcaugucug

SEQ ID NO: 28674 - RNA, 23 nt, Homo sapiens
gaaguaauaaauggauucuuaac

SEQ ID NO: 28675 - RNA, 22 nt, Homo sapiens
caguacaauguggaaaaggagu

SEQ ID NO: 28676 - RNA, 18 nt, Homo sapiens
aaaaagugcucaggccua

SEQ ID NO: 28677 - RNA, 22 nt, Homo sapiens
accaguuuuuuauacaucuucu

SEQ ID NO: 28678 - RNA, 22 nt, Homo sapiens
cauugcaguuuuugguguaucu

SEQ ID NO: 28679 - RNA, 22 nt, Homo sapiens
cuguaagcauuauaaagagaua

SEQ ID NO: 28680 - RNA, 22 nt, Homo sapiens
aagucaguuugggagaagcuau

SEQ ID NO: 28681 - RNA, 22 nt, Homo sapiens
guucacagugguugccuuccag

SEQ ID NO: 28682 - RNA, 22 nt, Homo sapiens
gugauuauuaugcacugcaugc

SEQ ID NO: 28683 - RNA, 22 nt, Homo sapiens
ugucaauauguaauaacugaau

SEQ ID NO: 28684 - RNA, 20 nt, Homo sapiens
uauaacaguuuggacccagu

SEQ ID NO: 28685 - RNA, 22 nt, Homo sapiens
uuggagagugauauucagaugc

SEQ ID NO: 28686 - RNA, 22 nt, Homo sapiens
uuuaggcaauauauucaugucu

SEQ ID NO: 28687 - RNA, 22 nt, Homo sapiens
uggaguguaaauuaguucagcc

SEQ ID NO: 28688 - RNA, 22 nt, Homo sapiens
gcagcacaugacuguauguaua

SEQ ID NO: 28689 - RNA, 23 nt, Homo sapiens
uucaccguguuggccaggcuggu

SEQ ID NO: 28690 - RNA, 22 nt, Homo sapiens
uuugccuuugugauauggucua

SEQ ID NO: 28691 - RNA, 22 nt, Homo sapiens
ugagaucaagguuaauauaauc

SEQ ID NO: 28692 - RNA, 22 nt, Homo sapiens
acaucuguacaguggguguggu

SEQ ID NO: 28693 - RNA, 20 nt, Homo sapiens
cuggaucaucaguaaaguua

SEQ ID NO: 28694 - RNA, 22 nt, Homo sapiens
cauugcaguggaguggggaaga

SEQ ID NO: 28695 - RNA, 19 nt, Homo sapiens
cauggcuuauaauuuuaau

SEQ ID NO: 28696 - RNA, 22 nt, Homo sapiens
cagggaauguuauuuaauagca

SEQ ID NO: 28697 - RNA, 22 nt, Homo sapiens
ucugagacuguuucuaacaagc

SEQ ID NO: 28698 - RNA, 22 nt, Homo sapiens
augaugucauuuuaauuucuaa

SEQ ID NO: 28699 - RNA, 16 nt, Homo sapiens
uguccaaauaaauaca

SEQ ID NO: 28700 - RNA, 20 nt, Homo sapiens
aagugaguguuaaacugaac

SEQ ID NO: 28701 - RNA, 23 nt, Homo sapiens
uaucucaaugcacagagaggaaa

SEQ ID NO: 28702 - RNA, 22 nt, Homo sapiens
uucacagaguuauuuuuaugcu

SEQ ID NO: 28703 - RNA, 22 nt, Homo sapiens
augucauagaagccugugaacc

SEQ ID NO: 28704 - RNA, 22 nt, Homo sapiens
uuaaaugcacauacuugagaaa

SEQ ID NO: 28705 - RNA, 22 nt, Homo sapiens
agagguuuugcccucgagauaa

SEQ ID NO: 28706 - RNA, 22 nt, Homo sapiens
uaaagcgaggucuccuacaaga

SEQ ID NO: 28707 - RNA, 18 nt, Homo sapiens
ucauagaucaugacagug

SEQ ID NO: 28708 - RNA, 22 nt, Homo sapiens
gcaaaauugagaagggaauaua

SEQ ID NO: 28709 - RNA, 21 nt, Homo sapiens
agagucaucucuaucuguacc

SEQ ID NO: 28710 - RNA, 22 nt, Homo sapiens
uggcauuuuguuuuagaauuag

SEQ ID NO: 28711 - RNA, 22 nt, Homo sapiens
ugcauacacaagcauacaugua

SEQ ID NO: 28712 - RNA, 22 nt, Homo sapiens
aucaccagaugcuucaagcaga

SEQ ID NO: 28713 - RNA, 22 nt, Homo sapiens
gauaacagauaaugucaguuau

SEQ ID NO: 28714 - RNA, 22 nt, Homo sapiens
uucacagagagaacucaaacca

SEQ ID NO: 28715 - RNA, 22 nt, Homo sapiens
uucaauacuguugauccuuaug

SEQ ID NO: 28716 - RNA, 22 nt, Homo sapiens
uuuaaugcaucccaaaauguag

SEQ ID NO: 28717 - RNA, 22 nt, Homo sapiens
auuacaugucuauccaugaaca

SEQ ID NO: 28718 - RNA, 22 nt, Homo sapiens
auggcuuuuuaaaucauguugu

SEQ ID NO: 28719 - RNA, 22 nt, Homo sapiens
uuuaaagcaugacgagaagaag

SEQ ID NO: 28720 - RNA, 22 nt, Homo sapiens
augaaagguauguuuucuguga

SEQ ID NO: 28721 - RNA, 22 nt, Homo sapiens
uugcgcuuuuccuauguugccc

SEQ ID NO: 28722 - RNA, 22 nt, Homo sapiens
aauaauggcaccaaagcacaag

SEQ ID NO: 28723 - RNA, 22 nt, Homo sapiens
caaauacuuucauguugucuug

SEQ ID NO: 28724 - RNA, 22 nt, Homo sapiens
augaaagguugucuuaagccau

SEQ ID NO: 28725 - RNA, 22 nt, Homo sapiens
uugaaggaggugcucacucucg

SEQ ID NO: 28726 - RNA, 20 nt, Homo sapiens
uugcagagcccaacccugga

SEQ ID NO: 28727 - RNA, 22 nt, Homo sapiens
aucaaguacuguacugaaagug

SEQ ID NO: 28728 - RNA, 22 nt, Homo sapiens
uauugcagauacccaggaaguu

SEQ ID NO: 28729 - RNA, 22 nt, Homo sapiens
auggcuuuaagagugucugaau

SEQ ID NO: 28730 - RNA, 22 nt, Homo sapiens
uucaucuggcaauucagagauu

SEQ ID NO: 28731 - RNA, 22 nt, Homo sapiens
uuagaucaacauggaacucuau

SEQ ID NO: 28732 - RNA, 22 nt, Homo sapiens
uaaagccauugucaaguuugua

SEQ ID NO: 28733 - RNA, 22 nt, Homo sapiens
aguaucacaggcaaaacagaau

SEQ ID NO: 28734 - RNA, 22 nt, Homo sapiens
auucuauaguccuaggauuggg

SEQ ID NO: 28735 - RNA, 22 nt, Homo sapiens
uauagcagccugaacaaaguaa

SEQ ID NO: 28736 - RNA, 22 nt, Homo sapiens
ucccaguuuuucugaauaguca

SEQ ID NO: 28737 - RNA, 22 nt, Homo sapiens
auggauuuguaguacaugguug

SEQ ID NO: 28738 - RNA, 22 nt, Homo sapiens
auggauuuuaggauacaguuga

SEQ ID NO: 28739 - RNA, 22 nt, Homo sapiens
aagccagugugacaggaaacuu

SEQ ID NO: 28740 - RNA, 22 nt, Homo sapiens
uuuaaggcaugccuguacaugc

SEQ ID NO: 28741 - RNA, 22 nt, Homo sapiens
uuugacuuuuagaauaugaguu

SEQ ID NO: 28742 - RNA, 22 nt, Homo sapiens
aauucacuuguggcagauccuu

SEQ ID NO: 28743 - RNA, 22 nt, Homo sapiens
aaucuguagaaggugcacauuc

SEQ ID NO: 28744 - RNA, 20 nt, Homo sapiens
uguaacaaucuggauguugc

SEQ ID NO: 28745 - RNA, 22 nt, Homo sapiens
uauugcagaaugugaguuggca

SEQ ID NO: 28746 - RNA, 22 nt, Homo sapiens
ugaagacauuuuugggugugua

SEQ ID NO: 28747 - RNA, 22 nt, Homo sapiens
auaaagcaagucucuggccuca

SEQ ID NO: 28748 - RNA, 22 nt, Homo sapiens
uuaaggcuuuaaguaaacacag

SEQ ID NO: 28749 - RNA, 22 nt, Homo sapiens
augauacuggcuucauagaaug

SEQ ID NO: 28750 - RNA, 22 nt, Homo sapiens
auugcucaaaucaguacuugag

SEQ ID NO: 28751 - RNA, 22 nt, Homo sapiens
uaugaaagcuacuucucacaau

SEQ ID NO: 28752 - RNA, 22 nt, Homo sapiens
ugaugcuaccuaaagcaaccau

SEQ ID NO: 28753 - RNA, 22 nt, Homo sapiens
acaaagcuagggaauccaucuu

SEQ ID NO: 28754 - RNA, 22 nt, Homo sapiens
augaagacaucgucugggauua

SEQ ID NO: 28755 - RNA, 20 nt, Homo sapiens
gacauagagacucucaaaaa

SEQ ID NO: 28756 - RNA, 22 nt, Homo sapiens
uuaacacugccauugauacugu

SEQ ID NO: 28757 - RNA, 22 nt, Homo sapiens
uuuaaagcuaaaauauguuuau

SEQ ID NO: 28758 - RNA, 22 nt, Homo sapiens
uugaaagacaucaccuacugcu

SEQ ID NO: 28759 - RNA, 22 nt, Homo sapiens
uuacccuuugcauuaccaacaa

SEQ ID NO: 28760 - RNA, 22 nt, Homo sapiens
acacaguauaugacaaugcuuu

SEQ ID NO: 28761 - RNA, 17 nt, Homo sapiens
accccuaccucagaagc

SEQ ID NO: 28762 - RNA, 22 nt, Homo sapiens
agaaacauucucuugccuccuu

SEQ ID NO: 28763 - RNA, 22 nt, Homo sapiens
auaaccuauggaucuacucggg

SEQ ID NO: 28764 - RNA, 22 nt, Homo sapiens
aguaucacaggcaaaacagaau

SEQ ID NO: 28765 - RNA, 22 nt, Homo sapiens
aucagaaucucuugagaguguu

SEQ ID NO: 28766 - RNA, 22 nt, Homo sapiens
aucagaaucucuagaggacugu

SEQ ID NO: 28767 - RNA, 22 nt, Homo sapiens
caacagucagcccauccacaga

SEQ ID NO: 28768 - RNA, 22 nt, Homo sapiens
auuguaccccaauguacaauau

SEQ ID NO: 28769 - RNA, 22 nt, Homo sapiens
cccugacauucggagauguagu

SEQ ID NO: 28770 - RNA, 22 nt, Homo sapiens
uacaguauuaugagugauugaa

SEQ ID NO: 28771 - RNA, 22 nt, Homo sapiens
uacccuuauguaaucauuauac

SEQ ID NO: 28772 - RNA, 22 nt, Homo sapiens
acgguauagauuguauccuagg

SEQ ID NO: 28773 - RNA, 22 nt, Homo sapiens
auccugaagcuuuacugaauuc

SEQ ID NO: 28774 - RNA, 22 nt, Homo sapiens
aacagcuaguaccaauccacua

SEQ ID NO: 28775 - RNA, 20 nt, Homo sapiens
cagucauagacaucagaguc

SEQ ID NO: 28776 - RNA, 22 nt, Homo sapiens
uccaaaucucuggcacugggau

SEQ ID NO: 28777 - RNA, 22 nt, Homo sapiens
uacaagcaggaaaugguauaug

SEQ ID NO: 28778 - RNA, 16 nt, Homo sapiens
uacaacagugaguaug

SEQ ID NO: 28779 - RNA, 22 nt, Homo sapiens
ucaacagugggcacuguaaaug

SEQ ID NO: 28780 - RNA, 22 nt, Homo sapiens
guuaaagacauccacauaggag

SEQ ID NO: 28781 - RNA, 22 nt, Homo sapiens
ucaguauaugaaucuggggcag

SEQ ID NO: 28782 - RNA, 22 nt, Homo sapiens
ucaacagugauggaaaguuaua

SEQ ID NO: 28783 - RNA, 22 nt, Homo sapiens
caccccuaccugagucaggagu

SEQ ID NO: 28784 - RNA, 22 nt, Homo sapiens
gaccccuagagauaggaggaac

SEQ ID NO: 28785 - RNA, 21 nt, Homo sapiens
acccucuaguuuucaacaggc

SEQ ID NO: 28786 - RNA, 22 nt, Homo sapiens
accccugagaucgaaucaugcu

SEQ ID NO: 28787 - RNA, 22 nt, Homo sapiens
acccuacauaguagauccuaca

SEQ ID NO: 28788 - RNA, 22 nt, Homo sapiens
caguacaauguugauuagaagu

SEQ ID NO: 28789 - RNA, 21 nt, Homo sapiens
gaccccuagaucuuuuuccag

SEQ ID NO: 28790 - RNA, 22 nt, Homo sapiens
gagauuaauacacaucaaaugc

SEQ ID NO: 28791 - RNA, 22 nt, Homo sapiens
ucugaaucguucccaugcagga

SEQ ID NO: 28792 - RNA, 22 nt, Homo sapiens
uugaccccuucuaauagccuca

SEQ ID NO: 28793 - RNA, 22 nt, Homo sapiens
cugaggcacggcgaccuuaagu

SEQ ID NO: 28794 - RNA, 22 nt, Homo sapiens
cacaaaguagauuagucuucca

SEQ ID NO: 28795 - RNA, 22 nt, Homo sapiens
uuaaaugcacauacuugagaaa

SEQ ID NO: 28796 - RNA, 22 nt, Homo sapiens
gaaauggaucagagcaagcuuu

SEQ ID NO: 28797 - RNA, 22 nt, Homo sapiens
gauaacagauaaugucaguuau

SEQ ID NO: 28798 - RNA, 22 nt, Homo sapiens
uuggagagugauauucagaugc

SEQ ID NO: 28799 - RNA, 22 nt, Homo sapiens
uugacuucagagcugauucaag

SEQ ID NO: 28800 - RNA, 22 nt, Homo sapiens
uuuaaagcacggaguuuguggc

SEQ ID NO: 28801 - RNA, 22 nt, Homo sapiens
uaguucauuuuucuugcuuaga

SEQ ID NO: 28802 - RNA, 22 nt, Homo sapiens
aaucuguagaaggugcacauuc

SEQ ID NO: 28803 - RNA, 17 nt, Homo sapiens
uaaagccagucaaguca

SEQ ID NO: 28804 - RNA, 18 nt, Homo sapiens
ucauagaucaugacagug

SEQ ID NO: 28805 - RNA, 22 nt, Homo sapiens
uuuaggcaauauauucaugucu

SEQ ID NO: 28806 - RNA, 22 nt, Homo sapiens
uguauguugggucaaaguacau

SEQ ID NO: 28807 - RNA, 19 nt, Homo sapiens
cauggcuuauaauuuuaau

SEQ ID NO: 28808 - RNA, 22 nt, Homo sapiens
ggcagagucuugcaucuuuaga

SEQ ID NO: 28809 - RNA, 22 nt, Homo sapiens
aagucaguuugggagaagcuau

SEQ ID NO: 28810 - RNA, 22 nt, Homo sapiens
aaaugguguuaguagaucuuua

SEQ ID NO: 28811 - RNA, 22 nt, Homo sapiens
acaucuguacaguggguguggu

SEQ ID NO: 28812 - RNA, 22 nt, Homo sapiens
aauacuggcacugaagaccaug

SEQ ID NO: 28813 - RNA, 22 nt, Homo sapiens
ucacaugaagauuuuaguauac

SEQ ID NO: 28814 - RNA, 22 nt, Homo sapiens
cauugcagauccuucaaaugac

SEQ ID NO: 28815 - RNA, 21 nt, Homo sapiens
uuuggcuucucugcugcagcc

SEQ ID NO: 28816 - RNA, 22 nt, Homo sapiens
gcagcacauggcagaacauauu

SEQ ID NO: 28817 - RNA, 22 nt, Homo sapiens
gugauuauuaugcacugcaugc

SEQ ID NO: 28818 - RNA, 22 nt, Homo sapiens
ucagauacuggugacaugaaug

SEQ ID NO: 28819 - RNA, 22 nt, Homo sapiens
cauugcaguaagagugggcucu

SEQ ID NO: 28820 - RNA, 22 nt, Homo sapiens
uauugcagugagauccaucugg

SEQ ID NO: 28821 - RNA, 22 nt, Homo sapiens
uugguccacugugaaauuggga

SEQ ID NO: 28822 - RNA, 22 nt, Homo sapiens
uggaguguaaauuaguucagcc

SEQ ID NO: 28823 - RNA, 20 nt, Homo sapiens
cuggaucaucaguaaaguua

SEQ ID NO: 28824 - RNA, 22 nt, Homo sapiens
aucaccagaugcuucaagcaga

SEQ ID NO: 28825 - RNA, 22 nt, Homo sapiens
uuuggcuuaagauugacugcaa

SEQ ID NO: 28826 - RNA, 20 nt, Homo sapiens
aaaguaggcuaauaccaaaa

SEQ ID NO: 28827 - RNA, 22 nt, Homo sapiens
uaaagcgaggucuccuacaaga

SEQ ID NO: 28828 - RNA, 22 nt, Homo sapiens
aggugguuuugaugagcaggua

SEQ ID NO: 28829 - RNA, 22 nt, Homo sapiens
guucacagugguugccuuccag

SEQ ID NO: 28830 - RNA, 22 nt, Homo sapiens
auggcuuuggucucccagugau

SEQ ID NO: 28831 - RNA, 22 nt, Homo sapiens
uuaaggcuuuaaguaaacacag

SEQ ID NO: 28832 - RNA, 22 nt, Homo sapiens
uugaaagcuaucucaaaucgcu

SEQ ID NO: 28833 - RNA, 22 nt, Homo sapiens
uuugccuuugugauauggucua

SEQ ID NO: 28834 - RNA, 16 nt, Homo sapiens
uguccaaauaaauaca

SEQ ID NO: 28835 - RNA, 22 nt, Homo sapiens
cuguaagcauuauaaagagaua

SEQ ID NO: 28836 - RNA, 22 nt, Homo sapiens
ugagaucaagguuaauauaauc

SEQ ID NO: 28837 - RNA, 22 nt, Homo sapiens
uaugaaagcuacuucucacaau

SEQ ID NO: 28838 - RNA, 22 nt, Homo sapiens
uauugcagaaugugaguuggca

SEQ ID NO: 28839 - RNA, 22 nt, Homo sapiens
cauugcaguuuuugguguaucu

SEQ ID NO: 28840 - RNA, 22 nt, Homo sapiens
uuuaaugcaucccaaaauguag

SEQ ID NO: 28841 - RNA, 20 nt, Homo sapiens
uugcagagcccaacccugga

SEQ ID NO: 28842 - RNA, 22 nt, Homo sapiens
uuuaaagcaugacgagaagaag

SEQ ID NO: 28843 - RNA, 22 nt, Homo sapiens
auuacaugucuauccaugaaca

SEQ ID NO: 28844 - RNA, 22 nt, Homo sapiens
agagguuuugcccucgagauaa

SEQ ID NO: 28845 - RNA, 22 nt, Homo sapiens
accaguuuuuuauacaucuucu

SEQ ID NO: 28846 - RNA, 22 nt, Homo sapiens
caacacuguuuauuggauagcc

SEQ ID NO: 28847 - RNA, 22 nt, Homo sapiens
auggcuuuuuaaaucauguugu

SEQ ID NO: 28848 - RNA, 22 nt, Homo sapiens
uuuaauacugcaucuuuacucu

SEQ ID NO: 28849 - RNA, 22 nt, Homo sapiens
cugaaaguuauucaggggcaag

SEQ ID NO: 28850 - RNA, 22 nt, Homo sapiens
caaauacuuucauguugucuug

SEQ ID NO: 28851 - RNA, 23 nt, Homo sapiens
gaaguaauaaauggauucuuaac

SEQ ID NO: 28852 - RNA, 22 nt, Homo sapiens
auaaagcaagucucuggccuca

SEQ ID NO: 28853 - RNA, 22 nt, Homo sapiens
augaaagguugucuuaagccau

SEQ ID NO: 28854 - RNA, 22 nt, Homo sapiens
ugucaauauguaauaacugaau

SEQ ID NO: 28855 - RNA, 22 nt, Homo sapiens
acaaagcuagggaauccaucuu

SEQ ID NO: 28856 - RNA, 22 nt, Homo sapiens
aucaaguacuguacugaaagug

SEQ ID NO: 28857 - RNA, 22 nt, Homo sapiens
ugaugcuaccuaaagcaaccau

SEQ ID NO: 28858 - RNA, 22 nt, Homo sapiens
uuuaguacugcuuuaugugugu

SEQ ID NO: 28859 - RNA, 22 nt, Homo sapiens
guuaaagacauccacauaggag

SEQ ID NO: 28860 - RNA, 22 nt, Homo sapiens
aaagugauguccaggcuuucag

SEQ ID NO: 28861 - RNA, 22 nt, Homo sapiens
uuagaucaacauggaacucuau

SEQ ID NO: 28862 - RNA, 22 nt, Homo sapiens
auucaacuaauuauugaagaug

SEQ ID NO: 28863 - RNA, 22 nt, Homo sapiens
ugaagacauuuuugggugugua

SEQ ID NO: 28864 - RNA, 22 nt, Homo sapiens
cuuaaagcgaauauugguggua

SEQ ID NO: 28865 - RNA, 23 nt, Homo sapiens
cuuuguacagcuugacuacuggg

SEQ ID NO: 28866 - RNA, 22 nt, Homo sapiens
uuuaaggcaugccuguacaugc

SEQ ID NO: 28867 - RNA, 22 nt, Homo sapiens
uauugcagauacccaggaaguu

SEQ ID NO: 28868 - RNA, 22 nt, Homo sapiens
uuugacuuuuagaauaugaguu

SEQ ID NO: 28869 - RNA, 18 nt, Homo sapiens
gauaacaguggacuaugc

SEQ ID NO: 28870 - RNA, 22 nt, Homo sapiens
auucuauaguccuaggauuggg

SEQ ID NO: 28871 - RNA, 22 nt, Homo sapiens
ugcauacacaagcauacaugua

SEQ ID NO: 28872 - RNA, 22 nt, Homo sapiens
augauacuggcuucauagaaug

SEQ ID NO: 28873 - RNA, 22 nt, Homo sapiens
uugaaggaggugcucacucucg

SEQ ID NO: 28874 - RNA, 22 nt, Homo sapiens
uacugagagaggaauauugaaa

SEQ ID NO: 28875 - RNA, 22 nt, Homo sapiens
uaucccaauguaauaucacaaa

SEQ ID NO: 28876 - RNA, 22 nt, Homo sapiens
uucaucuggcaauucagagauu

SEQ ID NO: 28877 - RNA, 22 nt, Homo sapiens
caaaagugauugcgguuuuugc

SEQ ID NO: 28878 - RNA, 22 nt, Homo sapiens
aucugggguuggcaaaguuugg

SEQ ID NO: 28879 - RNA, 22 nt, Homo sapiens
guggguaaaucucuggggcucu

SEQ ID NO: 28880 - RNA, 22 nt, Homo sapiens
aauggcaucuacguuaaauguc

SEQ ID NO: 28881 - RNA, 22 nt, Homo sapiens
gcagaauugacucuguuuuuuc

SEQ ID NO: 28882 - RNA, 20 nt, Homo sapiens
gacauagagacucucaaaaa

SEQ ID NO: 28883 - RNA, 20 nt, Homo sapiens
cagcaaccugcucucuuccu

SEQ ID NO: 28884 - RNA, 20 nt, Homo sapiens
uauaacaguuuggacccagu

SEQ ID NO: 28885 - RNA, 22 nt, Homo sapiens
gcagcacaugacuguauguaua

SEQ ID NO: 28886 - RNA, 22 nt, Homo sapiens
augucauagaagccugugaacc

SEQ ID NO: 28887 - RNA, 22 nt, Homo sapiens
caguacaauguugauuagaagu

SEQ ID NO: 28888 - RNA, 22 nt, Homo sapiens
cauugcaguggaguggggaaga

SEQ ID NO: 28889 - RNA, 22 nt, Homo sapiens
gcaaaauugagaagggaauaua

SEQ ID NO: 28890 - RNA, 22 nt, Homo sapiens
gugauuauccacgucuuuguga

SEQ ID NO: 28891 - RNA, 22 nt, Homo sapiens
agaaccaaucccacauggauac

SEQ ID NO: 28892 - RNA, 20 nt, Homo sapiens
aagugaguguuaaacugaac

SEQ ID NO: 28893 - RNA, 22 nt, Homo sapiens
augaugucauuuuaauuucuaa

SEQ ID NO: 28894 - RNA, 22 nt, Homo sapiens
uucacagagagaacucaaacca

SEQ ID NO: 28895 - RNA, 22 nt, Homo sapiens
agcagcaccaaacagacuaaga

SEQ ID NO: 28896 - RNA, 22 nt, Homo sapiens
uggcauuuuguuuuagaauuag

SEQ ID NO: 28897 - RNA, 22 nt, Homo sapiens
ugauaggucuguuuugaaaagg

SEQ ID NO: 28898 - RNA, 22 nt, Homo sapiens
uuaaauacagcaugguguuucu

SEQ ID NO: 28899 - RNA, 22 nt, Homo sapiens
uaaagcuaucacauuggugauu

SEQ ID NO: 28900 - RNA, 22 nt, Homo sapiens
ggaucauaugauagcucaauuu

SEQ ID NO: 28901 - RNA, 22 nt, Homo sapiens
uaaagccagugauuaugucucu

SEQ ID NO: 28902 - RNA, 18 nt, Homo sapiens
cuaauacuauucaacaag

SEQ ID NO: 28903 - RNA, 22 nt, Homo sapiens
uucacagaguuauuuuuaugcu

SEQ ID NO: 28904 - RNA, 23 nt, Homo sapiens
uaucucaaugcacagagaggaaa

SEQ ID NO: 28905 - RNA, 22 nt, Homo sapiens
ucugagacuguuucuaacaagc

SEQ ID NO: 28906 - RNA, 22 nt, Homo sapiens
cugaaagguauacgcuuguuau

SEQ ID NO: 28907 - RNA, 20 nt, Homo sapiens
ccccaguuuuucuauuagcu

SEQ ID NO: 28908 - RNA, 23 nt, Homo sapiens
uucaccguguuggccaggcuggu

SEQ ID NO: 28909 - RNA, 22 nt, Homo sapiens
ucagaccauuucauuacagacu

SEQ ID NO: 28910 - RNA, 20 nt, Homo sapiens
cagugcaccuggcguguuga

SEQ ID NO: 28911 - RNA, 23 nt, Homo sapiens
uaagucacacagauuaauuuauu

SEQ ID NO: 28912 - RNA, 22 nt, Homo sapiens
ucccaguuuuucugaauaguca

SEQ ID NO: 28913 - RNA, 22 nt, Homo sapiens
uguccaaaucagagguaccaaa

SEQ ID NO: 28914 - RNA, 22 nt, Homo sapiens
aaaugcuucuauguggcauguu

SEQ ID NO: 28915 - RNA, 20 nt, Homo sapiens
guucacagagguuaugauua

SEQ ID NO: 28916 - RNA, 22 nt, Homo sapiens
auugcucaaaucaguacuugag

SEQ ID NO: 28917 - RNA, 22 nt, Homo sapiens
aauuaguugucgugagaguggu

SEQ ID NO: 28918 - RNA, 22 nt, Homo sapiens
uaaagccauugucaaguuugua

SEQ ID NO: 28919 - RNA, 22 nt, Homo sapiens
auggauuuguaguacaugguug

SEQ ID NO: 28920 - RNA, 22 nt, Homo sapiens
auggcuuuaagagugucugaau

SEQ ID NO: 28921 - RNA, 22 nt, Homo sapiens
augaaaguguguggaaacuuga

SEQ ID NO: 28922 - RNA, 22 nt, Homo sapiens
uuuaaagcuaaaauauguuuau

SEQ ID NO: 28923 - RNA, 22 nt, Homo sapiens
uugagagaaaaaauuuauuggu

SEQ ID NO: 28924 - RNA, 22 nt, Homo sapiens
aauucacuuguggcagauccuu

SEQ ID NO: 28925 - RNA, 22 nt, Homo sapiens
uauagcagccugaacaaaguaa

SEQ ID NO: 28926 - RNA, 22 nt, Homo sapiens
uuaacacugccauugauacugu

SEQ ID NO: 28927 - RNA, 22 nt, Homo sapiens
augaagacaucgucugggauua

SEQ ID NO: 28928 - RNA, 21 nt, Homo sapiens
agagucaucucuaucuguacc

SEQ ID NO: 28929 - RNA, 22 nt, Homo sapiens
aauaauggcaccaaagcacaag

SEQ ID NO: 28930 - RNA, 22 nt, Homo sapiens
cagggaauguuauuuaauagca

SEQ ID NO: 28931 - RNA, 22 nt, Homo sapiens
uuuggcuuugagaagcagugga

SEQ ID NO: 28932 - RNA, 22 nt, Homo sapiens
caaaagugguucuuauccuuuu

SEQ ID NO: 28933 - RNA, 20 nt, Homo sapiens
aauaacagccccagggaggu

SEQ ID NO: 28934 - RNA, 22 nt, Homo sapiens
aguccauuugaugaugauucca

SEQ ID NO: 28935 - RNA, 22 nt, Homo sapiens
auggauuuuaggauacaguuga

SEQ ID NO: 28936 - RNA, 22 nt, Homo sapiens
aguaucacaggcaaaacagaau

SEQ ID NO: 28937 - RNA, 22 nt, Homo sapiens
aaguauagcuaugauaaacauu

SEQ ID NO: 28938 - RNA, 22 nt, Homo sapiens
gauacaccauuuucuagcuauu

SEQ ID NO: 28939 - RNA, 20 nt, Homo sapiens
uguaacaaucuggauguugc

SEQ ID NO: 28940 - RNA, 22 nt, Homo sapiens
caguacaauguggaaaaggagu

SEQ ID NO: 28941 - RNA, 22 nt, Homo sapiens
auggcuuuuauuguguugaggu

SEQ ID NO: 28942 - RNA, 22 nt, Homo sapiens
augaaagguauguuuucuguga

SEQ ID NO: 28943 - RNA, 22 nt, Homo sapiens
uuuaaagcuccaagcaugucug

SEQ ID NO: 28944 - RNA, 22 nt, Homo sapiens
uucaauacuguugauccuuaug

SEQ ID NO: 28945 - RNA, 22 nt, Homo sapiens
aagccagugugacaggaaacuu

SEQ ID NO: 28946 - RNA, 22 nt, Homo sapiens
uugcgcuuuuccuauguugccc

SEQ ID NO: 28947 - RNA, 18 nt, Homo sapiens
aaaaagugcucaggccua

SEQ ID NO: 28948 - RNA, 22 nt, Homo sapiens
uuaccucuguggcucucggacu

SEQ ID NO: 28949 - RNA, 22 nt, Homo sapiens
ucuuggguuguuggcuucuccu

SEQ ID NO: 28950 - RNA, 22 nt, Homo sapiens
ucuuggguggauucauucuuuc

SEQ ID NO: 28951 - RNA, 22 nt, Homo sapiens
ucuuggguuuguccuucuccua

SEQ ID NO: 28952 - RNA, 22 nt, Homo sapiens
cuuggguugauugauaaugcca

SEQ ID NO: 28953 - RNA, 22 nt, Homo sapiens
gauuccacuuucaaauucaaau

SEQ ID NO: 28954 - RNA, 22 nt, Homo sapiens
aucuugggugggaacugagaau

SEQ ID NO: 28955 - RNA, 22 nt, Homo sapiens
uggguucccugucuguccuuga

SEQ ID NO: 28956 - RNA, 22 nt, Homo sapiens
uucugugguugaaaggagagau

SEQ ID NO: 28957 - RNA, 22 nt, Homo sapiens
cauggguuuucucaaguaguca

SEQ ID NO: 28958 - RNA, 22 nt, Homo sapiens
ucuaaugcucugagaacagugc

SEQ ID NO: 28959 - RNA, 22 nt, Homo sapiens
ucuuggguuugccuugcugcug

SEQ ID NO: 28960 - RNA, 22 nt, Homo sapiens
aaucucaacacuuugggaggcu

SEQ ID NO: 28961 - RNA, 20 nt, Homo sapiens
guucacagagguuaugauua

SEQ ID NO: 28962 - RNA, 22 nt, Homo sapiens
guucacagugguugccuuccag

SEQ ID NO: 28963 - RNA, 22 nt, Homo sapiens
aucaaguacuguacugaaagug

SEQ ID NO: 28964 - RNA, 20 nt, Homo sapiens
uugcagagcccaacccugga

SEQ ID NO: 28965 - RNA, 22 nt, Homo sapiens
uuagaucaacauggaacucuau

SEQ ID NO: 28966 - RNA, 16 nt, Homo sapiens
uguccaaauaaauaca

SEQ ID NO: 28967 - RNA, 23 nt, Homo sapiens
uucaccguguuggccaggcuggu

SEQ ID NO: 28968 - RNA, 22 nt, Homo sapiens
ucagaccauuucauuacagacu

SEQ ID NO: 28969 - RNA, 22 nt, Homo sapiens
ugagaucaagguuaauauaauc

SEQ ID NO: 28970 - RNA, 22 nt, Homo sapiens
acaucuguacaguggguguggu

SEQ ID NO: 28971 - RNA, 18 nt, Homo sapiens
ucauagaucaugacagug

SEQ ID NO: 28972 - RNA, 22 nt, Homo sapiens
aagucaguuugggagaagcuau

SEQ ID NO: 28973 - RNA, 22 nt, Homo sapiens
uaugaaagcuacuucucacaau

SEQ ID NO: 28974 - RNA, 22 nt, Homo sapiens
cuguaagcauuauaaagagaua

SEQ ID NO: 28975 - RNA, 22 nt, Homo sapiens
uggcauuuuguuuuagaauuag

SEQ ID NO: 28976 - RNA, 20 nt, Homo sapiens
cagugcaccuggcguguuga

SEQ ID NO: 28977 - RNA, 17 nt, Homo sapiens
uaaagccagucaaguca

SEQ ID NO: 28978 - RNA, 20 nt, Homo sapiens
ccccaguuuuucuauuagcu

SEQ ID NO: 28979 - RNA, 22 nt, Homo sapiens
gcagcacaugacuguauguaua

SEQ ID NO: 28980 - RNA, 22 nt, Homo sapiens
augaugucauuuuaauuucuaa

SEQ ID NO: 28981 - RNA, 22 nt, Homo sapiens
gcaaaauugagaagggaauaua

SEQ ID NO: 28982 - RNA, 22 nt, Homo sapiens
ggcagagucuugcaucuuuaga

SEQ ID NO: 28983 - RNA, 22 nt, Homo sapiens
uucacagagagaacucaaacca

SEQ ID NO: 28984 - RNA, 22 nt, Homo sapiens
uaaagcgaggucuccuacaaga

SEQ ID NO: 28985 - RNA, 22 nt, Homo sapiens
uuuggcuuaagauugacugcaa

SEQ ID NO: 28986 - RNA, 22 nt, Homo sapiens
uugaaagcuaucucaaaucgcu

SEQ ID NO: 28987 - RNA, 22 nt, Homo sapiens
agaaccaaucccacauggauac

SEQ ID NO: 28988 - RNA, 22 nt, Homo sapiens
uuugccuuugugauauggucua

SEQ ID NO: 28989 - RNA, 22 nt, Homo sapiens
gugauuauuaugcacugcaugc

SEQ ID NO: 28990 - RNA, 22 nt, Homo sapiens
uaaagccagugauuaugucucu

SEQ ID NO: 28991 - RNA, 22 nt, Homo sapiens
uuuaaagcaugacgagaagaag

SEQ ID NO: 28992 - RNA, 20 nt, Homo sapiens
uguaacaaucuggauguugc

SEQ ID NO: 28993 - RNA, 22 nt, Homo sapiens
uuggagagugauauucagaugc

SEQ ID NO: 28994 - RNA, 22 nt, Homo sapiens
uuuaaagcuccaagcaugucug

SEQ ID NO: 28995 - RNA, 22 nt, Homo sapiens
aggugguuuugaugagcaggua

SEQ ID NO: 28996 - RNA, 22 nt, Homo sapiens
aaaugguguuaguagaucuuua

SEQ ID NO: 28997 - RNA, 19 nt, Homo sapiens
cauggcuuauaauuuuaau

SEQ ID NO: 28998 - RNA, 22 nt, Homo sapiens
uuaaauacagcaugguguuucu

SEQ ID NO: 28999 - RNA, 22 nt, Homo sapiens
aagccagugugacaggaaacuu

SEQ ID NO: 29000 - RNA, 22 nt, Homo sapiens
uuuaaagcacggaguuuguggc

SEQ ID NO: 29001 - RNA, 22 nt, Homo sapiens
cugaggcacggcgaccuuaagu

SEQ ID NO: 29002 - RNA, 22 nt, Homo sapiens
auucuauaguccuaggauuggg

SEQ ID NO: 29003 - RNA, 22 nt, Homo sapiens
gcagcacauggcagaacauauu

SEQ ID NO: 29004 - RNA, 20 nt, Homo sapiens
uauaacaguuuggacccagu

SEQ ID NO: 29005 - RNA, 20 nt, Homo sapiens
cagcaaccugcucucuuccu

SEQ ID NO: 29006 - RNA, 20 nt, Homo sapiens
cuggaucaucaguaaaguua

SEQ ID NO: 29007 - RNA, 22 nt, Homo sapiens
gaaauggaucagagcaagcuuu

SEQ ID NO: 29008 - RNA, 22 nt, Homo sapiens
uauagcagccugaacaaaguaa

SEQ ID NO: 29009 - RNA, 22 nt, Homo sapiens
uugaaggaggugcucacucucg

SEQ ID NO: 29010 - RNA, 22 nt, Homo sapiens
uacugagagaggaauauugaaa

SEQ ID NO: 29011 - RNA, 22 nt, Homo sapiens
uguauguugggucaaaguacau

SEQ ID NO: 29012 - RNA, 20 nt, Homo sapiens
aaaguaggcuaauaccaaaa

SEQ ID NO: 29013 - RNA, 22 nt, Homo sapiens
ugcauacacaagcauacaugua

SEQ ID NO: 29014 - RNA, 22 nt, Homo sapiens
caaaagugauugcgguuuuugc

SEQ ID NO: 29015 - RNA, 22 nt, Homo sapiens
aucugggguuggcaaaguuugg

SEQ ID NO: 29016 - RNA, 22 nt, Homo sapiens
uuuggcuuugagaagcagugga

SEQ ID NO: 29017 - RNA, 22 nt, Homo sapiens
uuuaaagcuaaaauauguuuau

SEQ ID NO: 29018 - RNA, 22 nt, Homo sapiens
uaucccaauguaauaucacaaa

SEQ ID NO: 29019 - RNA, 21 nt, Homo sapiens
agagucaucucuaucuguacc

SEQ ID NO: 29020 - RNA, 22 nt, Homo sapiens
augauacuggcuucauagaaug

SEQ ID NO: 29021 - RNA, 22 nt, Homo sapiens
uggaguguaaauuaguucagcc

SEQ ID NO: 29022 - RNA, 22 nt, Homo sapiens
auaaagcaagucucuggccuca

SEQ ID NO: 29023 - RNA, 22 nt, Homo sapiens
ugaugcuaccuaaagcaaccau

SEQ ID NO: 29024 - RNA, 22 nt, Homo sapiens
uauugcagaaugugaguuggca

SEQ ID NO: 29025 - RNA, 22 nt, Homo sapiens
uuuaauacugcaucuuuacucu

SEQ ID NO: 29026 - RNA, 22 nt, Homo sapiens
ucccaguuuuucugaauaguca

SEQ ID NO: 29027 - RNA, 21 nt, Homo sapiens
uuuggcuucucugcugcagcc

SEQ ID NO: 29028 - RNA, 22 nt, Homo sapiens
uauugcagugagauccaucugg

SEQ ID NO: 29029 - RNA, 22 nt, Homo sapiens
aguccauuugaugaugauucca

SEQ ID NO: 29030 - RNA, 22 nt, Homo sapiens
cagggaauguuauuuaauagca

SEQ ID NO: 29031 - RNA, 22 nt, Homo sapiens
uaaagccauugucaaguuugua

SEQ ID NO: 29032 - RNA, 22 nt, Homo sapiens
auugcucaaaucaguacuugag

SEQ ID NO: 29033 - RNA, 22 nt, Homo sapiens
uuuaguacugcuuuaugugugu

SEQ ID NO: 29034 - RNA, 18 nt, Homo sapiens
aaaaagugcucaggccua

SEQ ID NO: 29035 - RNA, 22 nt, Homo sapiens
auucaacuaauuauugaagaug

SEQ ID NO: 29036 - RNA, 22 nt, Homo sapiens
caacacuguuuauuggauagcc

SEQ ID NO: 29037 - RNA, 22 nt, Homo sapiens
aauucacuuguggcagauccuu

SEQ ID NO: 29038 - RNA, 23 nt, Homo sapiens
gaaguaauaaauggauucuuaac

SEQ ID NO: 29039 - RNA, 22 nt, Homo sapiens
augaaagguauguuuucuguga

SEQ ID NO: 29040 - RNA, 22 nt, Homo sapiens
uugacuucagagcugauucaag

SEQ ID NO: 29041 - RNA, 22 nt, Homo sapiens
cauugcaguuuuugguguaucu

SEQ ID NO: 29042 - RNA, 22 nt, Homo sapiens
aauggcaucuacguuaaauguc

SEQ ID NO: 29043 - RNA, 22 nt, Homo sapiens
guggguaaaucucuggggcucu

SEQ ID NO: 29044 - RNA, 22 nt, Homo sapiens
uuuaaggcaugccuguacaugc

SEQ ID NO: 29045 - RNA, 18 nt, Homo sapiens
gauaacaguggacuaugc

SEQ ID NO: 29046 - RNA, 22 nt, Homo sapiens
aauaauggcaccaaagcacaag

SEQ ID NO: 29047 - RNA, 22 nt, Homo sapiens
uuugacuuuuagaauaugaguu

SEQ ID NO: 29048 - RNA, 22 nt, Homo sapiens
uauugcagauacccaggaaguu

SEQ ID NO: 29049 - RNA, 22 nt, Homo sapiens
uuuaggcaauauauucaugucu

SEQ ID NO: 29050 - RNA, 22 nt, Homo sapiens
aaucuguagaaggugcacauuc

SEQ ID NO: 29051 - RNA, 22 nt, Homo sapiens
ucacaugaagauuuuaguauac

SEQ ID NO: 29052 - RNA, 22 nt, Homo sapiens
uucaucuggcaauucagagauu

SEQ ID NO: 29053 - RNA, 22 nt, Homo sapiens
cauugcaguggaguggggaaga

SEQ ID NO: 29054 - RNA, 22 nt, Homo sapiens
cauugcagauccuucaaaugac

SEQ ID NO: 29055 - RNA, 23 nt, Homo sapiens
uaucucaaugcacagagaggaaa

SEQ ID NO: 29056 - RNA, 22 nt, Homo sapiens
aaaugcuucuauguggcauguu

SEQ ID NO: 29057 - RNA, 23 nt, Homo sapiens
uaagucacacagauuaauuuauu

SEQ ID NO: 29058 - RNA, 22 nt, Homo sapiens
gauacaccauuuucuagcuauu

SEQ ID NO: 29059 - RNA, 22 nt, Homo sapiens
cugaaagguauacgcuuguuau

SEQ ID NO: 29060 - RNA, 22 nt, Homo sapiens
agcagcaccaaacagacuaaga

SEQ ID NO: 29061 - RNA, 22 nt, Homo sapiens
ucugagacuguuucuaacaagc

SEQ ID NO: 29062 - RNA, 22 nt, Homo sapiens
uugagagaaaaaauuuauuggu

SEQ ID NO: 29063 - RNA, 22 nt, Homo sapiens
ucagauacuggugacaugaaug

SEQ ID NO: 29064 - RNA, 22 nt, Homo sapiens
uucacagaguuauuuuuaugcu

SEQ ID NO: 29065 - RNA, 22 nt, Homo sapiens
uuaacacugccauugauacugu

SEQ ID NO: 29066 - RNA, 22 nt, Homo sapiens
caguacaauguugauuagaagu

SEQ ID NO: 29067 - RNA, 22 nt, Homo sapiens
ugucaauauguaauaacugaau

SEQ ID NO: 29068 - RNA, 22 nt, Homo sapiens
augucauagaagccugugaacc

SEQ ID NO: 29069 - RNA, 22 nt, Homo sapiens
aucaccagaugcuucaagcaga

SEQ ID NO: 29070 - RNA, 22 nt, Homo sapiens
ugaagacauuuuugggugugua

SEQ ID NO: 29071 - RNA, 20 nt, Homo sapiens
aagugaguguuaaacugaac

SEQ ID NO: 29072 - RNA, 22 nt, Homo sapiens
aaguauagcuaugauaaacauu

SEQ ID NO: 29073 - RNA, 22 nt, Homo sapiens
uuaaaugcacauacuugagaaa

SEQ ID NO: 29074 - RNA, 22 nt, Homo sapiens
cacaaaguagauuagucuucca

SEQ ID NO: 29075 - RNA, 22 nt, Homo sapiens
auggauuuguaguacaugguug

SEQ ID NO: 29076 - RNA, 22 nt, Homo sapiens
aaagugauguccaggcuuucag

SEQ ID NO: 29077 - RNA, 22 nt, Homo sapiens
uuaaggcuuuaaguaaacacag

SEQ ID NO: 29078 - RNA, 22 nt, Homo sapiens
aauacuggcacugaagaccaug

SEQ ID NO: 29079 - RNA, 22 nt, Homo sapiens
uugguccacugugaaauuggga

SEQ ID NO: 29080 - RNA, 22 nt, Homo sapiens
ggaucauaugauagcucaauuu

SEQ ID NO: 29081 - RNA, 22 nt, Homo sapiens
auggcuuuggucucccagugau

SEQ ID NO: 29082 - RNA, 22 nt, Homo sapiens
ugauaggucuguuuugaaaagg

SEQ ID NO: 29083 - RNA, 22 nt, Homo sapiens
auggauuuuaggauacaguuga

SEQ ID NO: 29084 - RNA, 22 nt, Homo sapiens
agagguuuugcccucgagauaa

SEQ ID NO: 29085 - RNA, 22 nt, Homo sapiens
uaguucauuuuucuugcuuaga

SEQ ID NO: 29086 - RNA, 22 nt, Homo sapiens
augaagacaucgucugggauua

SEQ ID NO: 29087 - RNA, 22 nt, Homo sapiens
caguacaauguggaaaaggagu

SEQ ID NO: 29088 - RNA, 22 nt, Homo sapiens
accaguuuuuuauacaucuucu

SEQ ID NO: 29089 - RNA, 22 nt, Homo sapiens
cuuaaagcgaauauugguggua

SEQ ID NO: 29090 - RNA, 23 nt, Homo sapiens
cuuuguacagcuugacuacuggg

SEQ ID NO: 29091 - RNA, 22 nt, Homo sapiens
gugauuauccacgucuuuguga

SEQ ID NO: 29092 - RNA, 22 nt, Homo sapiens
cauugcaguaagagugggcucu

SEQ ID NO: 29093 - RNA, 22 nt, Homo sapiens
gauaacagauaaugucaguuau

SEQ ID NO: 29094 - RNA, 22 nt, Homo sapiens
uuuaaugcaucccaaaauguag

SEQ ID NO: 29095 - RNA, 20 nt, Homo sapiens
gacauagagacucucaaaaa

SEQ ID NO: 29096 - RNA, 22 nt, Homo sapiens
augaaaguguguggaaacuuga

SEQ ID NO: 29097 - RNA, 22 nt, Homo sapiens
aguaucacaggcaaaacagaau

SEQ ID NO: 29098 - RNA, 22 nt, Homo sapiens
auggcuuuuuaaaucauguugu

SEQ ID NO: 29099 - RNA, 22 nt, Homo sapiens
uucaauacuguugauccuuaug

SEQ ID NO: 29100 - RNA, 22 nt, Homo sapiens
auuacaugucuauccaugaaca

SEQ ID NO: 29101 - RNA, 22 nt, Homo sapiens
auggcuuuuauuguguugaggu

SEQ ID NO: 29102 - RNA, 20 nt, Homo sapiens
aauaacagccccagggaggu

SEQ ID NO: 29103 - RNA, 22 nt, Homo sapiens
aauuaguugucgugagaguggu

SEQ ID NO: 29104 - RNA, 18 nt, Homo sapiens
cuaauacuauucaacaag

SEQ ID NO: 29105 - RNA, 22 nt, Homo sapiens
acaaagcuagggaauccaucuu

SEQ ID NO: 29106 - RNA, 22 nt, Homo sapiens
cugaaaguuauucaggggcaag

SEQ ID NO: 29107 - RNA, 22 nt, Homo sapiens
uugcgcuuuuccuauguugccc

SEQ ID NO: 29108 - RNA, 22 nt, Homo sapiens
caaauacuuucauguugucuug

SEQ ID NO: 29109 - RNA, 22 nt, Homo sapiens
auggcuuuaagagugucugaau

SEQ ID NO: 29110 - RNA, 22 nt, Homo sapiens
uaaagcuaucacauuggugauu

SEQ ID NO: 29111 - RNA, 22 nt, Homo sapiens
gcagaauugacucuguuuuuuc

SEQ ID NO: 29112 - RNA, 22 nt, Homo sapiens
guuaaagacauccacauaggag

SEQ ID NO: 29113 - RNA, 22 nt, Homo sapiens
caaaagugguucuuauccuuuu

SEQ ID NO: 29114 - RNA, 22 nt, Homo sapiens
uguccaaaucagagguaccaaa

SEQ ID NO: 29115 - RNA, 22 nt, Homo sapiens
augaaagguugucuuaagccau

SEQ ID NO: 29116 - RNA, 22 nt, Homo sapiens
uucacaugacagggugaagcau

SEQ ID NO: 29117 - RNA, 22 nt, Homo sapiens
ugucaaauucuggguuaaaaca

SEQ ID NO: 29118 - RNA, 22 nt, Homo sapiens
uugaaagcuaucucaaaucgcu

SEQ ID NO: 29119 - RNA, 22 nt, Homo sapiens
uuucuauguugaccagucuaga

SEQ ID NO: 29120 - RNA, 22 nt, Homo sapiens
uuuaugcgucuguaauuucuuu

SEQ ID NO: 29121 - RNA, 22 nt, Homo sapiens
aucgcauaaucucuaaaaagca

SEQ ID NO: 29122 - RNA, 22 nt, Homo sapiens
augaaaagcauaaacgcugaag

SEQ ID NO: 29123 - RNA, 22 nt, Homo sapiens
caccaaccucaguagcaucugu

SEQ ID NO: 29124 - RNA, 22 nt, Homo sapiens
ugaaagacugaagaauaggcau

SEQ ID NO: 29125 - RNA, 22 nt, Homo sapiens
ugaaaugccuuuaaugaauuua

SEQ ID NO: 29126 - RNA, 22 nt, Homo sapiens
ugcaaauguuaggugucauuau

SEQ ID NO: 29127 - RNA, 17 nt, Homo sapiens
uaaagccagucaaguca

SEQ ID NO: 29128 - RNA, 22 nt, Homo sapiens
gugaaagcaucugacugugcca

SEQ ID NO: 29129 - RNA, 22 nt, Homo sapiens
uucaaaggauagauuaagauca

SEQ ID NO: 29130 - RNA, 22 nt, Homo sapiens
uuaugcaucuuccacacucauu

SEQ ID NO: 29131 - RNA, 22 nt, Homo sapiens
ugcauauguugaaccagccuug

SEQ ID NO: 29132 - RNA, 22 nt, Homo sapiens
ugcauaugucuuuauaguagca

SEQ ID NO: 29133 - RNA, 22 nt, Homo sapiens
ugcauaugcagcauuuaugauu

SEQ ID NO: 29134 - RNA, 22 nt, Homo sapiens
ccaagugcuuaaaauuucauuu

SEQ ID NO: 29135 - RNA, 22 nt, Homo sapiens
cucaaaugguccagcuaguggu

SEQ ID NO: 29136 - RNA, 22 nt, Homo sapiens
gccauugcacucuagccugagc

SEQ ID NO: 29137 - RNA, 17 nt, Homo sapiens
gcauaugucgaaccagc

SEQ ID NO: 29138 - RNA, 17 nt, Homo sapiens
cuucaaauaauuucccc

SEQ ID NO: 29139 - RNA, 22 nt, Homo sapiens
gugucucagcccagaccuauuu

SEQ ID NO: 29140 - RNA, 22 nt, Homo sapiens
uaugccucuucauaaaguauga

SEQ ID NO: 29141 - RNA, 22 nt, Homo sapiens
aaaugcauugagggaaaaggca

SEQ ID NO: 29142 - RNA, 22 nt, Homo sapiens
aucaaaugcuggcagagugccu

SEQ ID NO: 29143 - RNA, 22 nt, Homo sapiens
uucaaaguuggaggacaaacug

SEQ ID NO: 29144 - RNA, 18 nt, Homo sapiens
ugcauauguugaaccagc

SEQ ID NO: 29145 - RNA, 22 nt, Homo sapiens
ugcauauguucaaaguauucug

SEQ ID NO: 29146 - RNA, 22 nt, Homo sapiens
uauggaaaucuuaccuuauggu

SEQ ID NO: 29147 - RNA, 22 nt, Homo sapiens
auucaacuaauuauugaagaug

SEQ ID NO: 29148 - RNA, 22 nt, Homo sapiens
gccauugcacuccagccugagc

SEQ ID NO: 29149 - RNA, 22 nt, Homo sapiens
acauaugaguacaugugccaug

SEQ ID NO: 29150 - RNA, 22 nt, Homo sapiens
augaacagagccuugagaaccu

SEQ ID NO: 29151 - RNA, 22 nt, Homo sapiens
augggucuccugaauacagcac

SEQ ID NO: 29152 - RNA, 22 nt, Homo sapiens
aaaacgcauccucacaggucug

SEQ ID NO: 29153 - RNA, 22 nt, Homo sapiens
augaaugcaucuaucaaagcau

SEQ ID NO: 29154 - RNA, 22 nt, Homo sapiens
augaaaguguguggaaacuuga

SEQ ID NO: 29155 - RNA, 22 nt, Homo sapiens
auagugaacuuugugagaacaa

SEQ ID NO: 29156 - RNA, 22 nt, Homo sapiens
ugacaagcucccucugcaccuu

SEQ ID NO: 29157 - RNA, 22 nt, Homo sapiens
ugcaaauguuaguaacaccacu

SEQ ID NO: 29158 - RNA, 22 nt, Homo sapiens
uuaugggucuuggaaugcaaua

SEQ ID NO: 29159 - RNA, 22 nt, Homo sapiens
caugaaagacugaggaauugga

SEQ ID NO: 29160 - RNA, 22 nt, Homo sapiens
ucacaauggcugaacuaauuua

SEQ ID NO: 29161 - RNA, 22 nt, Homo sapiens
ucacauggaggugauaguugaa

SEQ ID NO: 29162 - RNA, 22 nt, Homo sapiens
ucaaaugcacguagagaaaaua

SEQ ID NO: 29163 - RNA, 22 nt, Homo sapiens
uaaagccauugucaaguuugua

SEQ ID NO: 29164 - RNA, 22 nt, Homo sapiens
uaaauugcauaaguacaaauga

SEQ ID NO: 29165 - RNA, 22 nt, Homo sapiens
guaagucucaugagaucugaug

SEQ ID NO: 29166 - RNA, 23 nt, Homo sapiens
ggcaagaucucagcucacugcaa

SEQ ID NO: 29167 - RNA, 22 nt, Homo sapiens
gucugucuuuugucuuugaaau

SEQ ID NO: 29168 - RNA, 22 nt, Homo sapiens
uauuacauccauaggcucugcu

SEQ ID NO: 29169 - RNA, 22 nt, Homo sapiens
uagaauguaacuuccaugucau

SEQ ID NO: 29170 - RNA, 23 nt, Homo sapiens
uacugcauccuccgccucuaggg

SEQ ID NO: 29171 - RNA, 22 nt, Homo sapiens
uaagcuguguggacuaugccuc

SEQ ID NO: 29172 - RNA, 21 nt, Homo sapiens
cacugcacuugccuucugggu

SEQ ID NO: 29173 - RNA, 22 nt, Homo sapiens
cacugcauggccacccauguua

SEQ ID NO: 29174 - RNA, 22 nt, Homo sapiens
cacaaaguagauuagucuucca

SEQ ID NO: 29175 - RNA, 23 nt, Homo sapiens
caauacugaccucacguuaauag

SEQ ID NO: 29176 - RNA, 22 nt, Homo sapiens
cuggagcaaaggugacucuugu

SEQ ID NO: 29177 - RNA, 18 nt, Homo sapiens
uuauacuccccaggcaau

SEQ ID NO: 29178 - RNA, 22 nt, Homo sapiens
uuagaugguucaccaugaguag

SEQ ID NO: 29179 - RNA, 22 nt, Homo sapiens
uguuuaguuaagacauagaauu

SEQ ID NO: 29180 - RNA, 22 nt, Homo sapiens
uuugucaauaacuaccaacagg

SEQ ID NO: 29181 - RNA, 22 nt, Homo sapiens
uuuguaauaccugaggcugggu

SEQ ID NO: 29182 - RNA, 22 nt, Homo sapiens
uuuguaagaugcauagauugca

SEQ ID NO: 29183 - RNA, 22 nt, Homo sapiens
ugauaagugaaagugcucuauc

SEQ ID NO: 29184 - RNA, 22 nt, Homo sapiens
ugcuugagacacauaugaauuu

SEQ ID NO: 29185 - RNA, 22 nt, Homo sapiens
uguccaguguuccucagaagaa

SEQ ID NO: 29186 - RNA, 22 nt, Homo sapiens
ugggcaaaugcuuuuuagucaa

SEQ ID NO: 29187 - RNA, 22 nt, Homo sapiens
ugagaaugacugggcaugcugc

SEQ ID NO: 29188 - RNA, 22 nt, Homo sapiens
auaagucaauggaacagauuaa

SEQ ID NO: 29189 - RNA, 22 nt, Homo sapiens
auugcacaucugcacuacagcc

SEQ ID NO: 29190 - RNA, 22 nt, Homo sapiens
augauguaggccauggguuucu

SEQ ID NO: 29191 - RNA, 22 nt, Homo sapiens
auggcucuuauuauuuugaggu

SEQ ID NO: 29192 - RNA, 22 nt, Homo sapiens
acugcacuccagccugcuggau

SEQ ID NO: 29193 - RNA, 22 nt, Homo sapiens
acugcacuccagccugcuggca

SEQ ID NO: 29194 - RNA, 22 nt, Homo sapiens
aauauugucaaaauggauucca

SEQ ID NO: 29195 - RNA, 22 nt, Homo sapiens
aaguaaacauuuuguacaauaa

SEQ ID NO: 29196 - RNA, 23 nt, Homo sapiens
aaauuugccuauuauuccuaugg

SEQ ID NO: 29197 - RNA, 22 nt, Homo sapiens
auaugucuguuuagucuguaau

SEQ ID NO: 29198 - RNA, 22 nt, Homo sapiens
auagcacacuauagcuucaaac

SEQ ID NO: 29199 - RNA, 22 nt, Homo sapiens
acugcacuccagccugcugggu

SEQ ID NO: 29200 - RNA, 22 nt, Homo sapiens
aagcuacauuuuauuuauguca

SEQ ID NO: 29201 - RNA, 22 nt, Homo sapiens
agcuuguguuugucugccuggg

SEQ ID NO: 29202 - RNA, 22 nt, Homo sapiens
agcuuguguuuuucuaaguauc

SEQ ID NO: 29203 - RNA, 22 nt, Homo sapiens
aggaaauguuggucccauuucu

SEQ ID NO: 29204 - RNA, 23 nt, Homo sapiens
gaaguaauaaauggauucuuaac

SEQ ID NO: 29205 - RNA, 22 nt, Homo sapiens
gaaauguauuaaugaguugaaa

SEQ ID NO: 29206 - RNA, 22 nt, Homo sapiens
cuuuuacacuguuggcaggauu

SEQ ID NO: 29207 - RNA, 22 nt, Homo sapiens
auuugguguuguuuggagccua

SEQ ID NO: 29208 - RNA, 22 nt, Homo sapiens
cacugcacuccagcuuugguga

SEQ ID NO: 29209 - RNA, 22 nt, Homo sapiens
cauugcacuccagccugaguga

SEQ ID NO: 29210 - RNA, 22 nt, Homo sapiens
uagcagaauauaccucuuacuu

SEQ ID NO: 29211 - RNA, 22 nt, Homo sapiens
uagugcugugauaaacauauau

SEQ ID NO: 29212 - RNA, 22 nt, Homo sapiens
uaaugcauacagaagguguuuu

SEQ ID NO: 29213 - RNA, 21 nt, Homo sapiens
uacaagcuguagcacaugcca

SEQ ID NO: 29214 - RNA, 22 nt, Homo sapiens
uacugcacucuagccuggguga

SEQ ID NO: 29215 - RNA, 22 nt, Homo sapiens
uacugcacuccacccuggguga

SEQ ID NO: 29216 - RNA, 22 nt, Homo sapiens
uacugcacuugaccuccugggc

SEQ ID NO: 29217 - RNA, 22 nt, Homo sapiens
gguaucuuggagagagaaguga

SEQ ID NO: 29218 - RNA, 19 nt, Homo sapiens
ugagaauguuaccaggucc

SEQ ID NO: 29219 - RNA, 22 nt, Homo sapiens
uggagagucauuuauaguauuu

SEQ ID NO: 29220 - RNA, 22 nt, Homo sapiens
uggcuuuuccuugaaucugccu

SEQ ID NO: 29221 - RNA, 20 nt, Homo sapiens
ucuuuuuguggccccagagu

SEQ ID NO: 29222 - RNA, 22 nt, Homo sapiens
ugaaguaauguuuuauucuauu

SEQ ID NO: 29223 - RNA, 19 nt, Homo sapiens
ucagugcuauguaauguag

SEQ ID NO: 29224 - RNA, 22 nt, Homo sapiens
uccuacaugcaguacauucaaa

SEQ ID NO: 29225 - RNA, 22 nt, Homo sapiens
uuauacacugugggaguguaaa

SEQ ID NO: 29226 - RNA, 22 nt, Homo sapiens
ugugcugaucgggcacgguguc

SEQ ID NO: 29227 - RNA, 22 nt, Homo sapiens
uguggcuucuuugguucaguau

SEQ ID NO: 29228 - RNA, 22 nt, Homo sapiens
uuugguguauaaaaaugcuagu

SEQ ID NO: 29229 - RNA, 22 nt, Homo sapiens
uuuguacucccuuuagauaaaa

SEQ ID NO: 29230 - RNA, 20 nt, Homo sapiens
aucaaagacuuagaggggga

SEQ ID NO: 29231 - RNA, 22 nt, Homo sapiens
acugcauuugucccuuuugaac

SEQ ID NO: 29232 - RNA, 19 nt, Homo sapiens
acugcacuccuccuugggu

SEQ ID NO: 29233 - RNA, 22 nt, Homo sapiens
acugcacuccagccuccugggu

SEQ ID NO: 29234 - RNA, 22 nt, Homo sapiens
acaagacuucuuguauucuagu

SEQ ID NO: 29235 - RNA, 22 nt, Homo sapiens
acacuguugacauuuuguagug

SEQ ID NO: 29236 - RNA, 22 nt, Homo sapiens
agcugcacgugguaaauguaaa

SEQ ID NO: 29237 - RNA, 21 nt, Homo sapiens
aacagugcugaacagacaccu

SEQ ID NO: 29238 - RNA, 22 nt, Homo sapiens
uaugcacaugcaugcuugaaua

SEQ ID NO: 29239 - RNA, 22 nt, Homo sapiens
uaugaauuuuauccaggauaua

SEQ ID NO: 29240 - RNA, 18 nt, Homo sapiens
uaguacuguucucaugau

SEQ ID NO: 29241 - RNA, 22 nt, Homo sapiens
uaggucuuuuaugaaauauauu

SEQ ID NO: 29242 - RNA, 21 nt, Homo sapiens
uagauaguugguucugaaucu

SEQ ID NO: 29243 - RNA, 22 nt, Homo sapiens
uacauaguagauauaggguuua

SEQ ID NO: 29244 - RNA, 22 nt, Homo sapiens
uaagucuuuuuggaguuuauaa

SEQ ID NO: 29245 - RNA, 22 nt, Homo sapiens
guugccuaggcuggcgugcagu

SEQ ID NO: 29246 - RNA, 19 nt, Homo sapiens
ggucauggagguuguguga

SEQ ID NO: 29247 - RNA, 19 nt, Homo sapiens
cuguuguacuccaggcauu

SEQ ID NO: 29248 - RNA, 22 nt, Homo sapiens
gagaacuggcgugaacugcacg

SEQ ID NO: 29249 - RNA, 22 nt, Homo sapiens
gauuugguguucuggcucaaga

SEQ ID NO: 29250 - RNA, 22 nt, Homo sapiens
cugaaagagcauuugaaugggu

SEQ ID NO: 29251 - RNA, 22 nt, Homo sapiens
cacugcacuccagcuugugggc

SEQ ID NO: 29252 - RNA, 22 nt, Homo sapiens
ugaugguuuuauaagggagagu

SEQ ID NO: 29253 - RNA, 22 nt, Homo sapiens
uggagagugauaaguaaaugga

SEQ ID NO: 29254 - RNA, 20 nt, Homo sapiens
uggcucuuugcugcuaaagu

SEQ ID NO: 29255 - RNA, 22 nt, Homo sapiens
ugaauguacuuaacacuggauu

SEQ ID NO: 29256 - RNA, 22 nt, Homo sapiens
uucaguagucuccauagaaccg

SEQ ID NO: 29257 - RNA, 19 nt, Homo sapiens
uucauacagugagagcagc

SEQ ID NO: 29258 - RNA, 22 nt, Homo sapiens
ugugucuugcuggugccugcau

SEQ ID NO: 29259 - RNA, 22 nt, Homo sapiens
ugugucuugaauuuuguaugua

SEQ ID NO: 29260 - RNA, 21 nt, Homo sapiens
gcuuuuucggaagucuuuggc

SEQ ID NO: 29261 - RNA, 22 nt, Homo sapiens
gcucuuuugggguaauucugag

SEQ ID NO: 29262 - RNA, 22 nt, Homo sapiens
uaagacuguuggcaauuuuugc

SEQ ID NO: 29263 - RNA, 22 nt, Homo sapiens
guugccuaggcuggagugcagu

SEQ ID NO: 29264 - RNA, 22 nt, Homo sapiens
guguaauacacacauauaugca

SEQ ID NO: 29265 - RNA, 22 nt, Homo sapiens
uacugcaucuacuuagagccag

SEQ ID NO: 29266 - RNA, 22 nt, Homo sapiens
uacauaguuacuuccauuucca

SEQ ID NO: 29267 - RNA, 22 nt, Homo sapiens
uaccaaguauuuucacaugaac

SEQ ID NO: 29268 - RNA, 22 nt, Homo sapiens
uagguucucaggaaugagcuuc

SEQ ID NO: 29269 - RNA, 22 nt, Homo sapiens
ugcuggugauuaaauccugaag

SEQ ID NO: 29270 - RNA, 22 nt, Homo sapiens
uggaugacuguuauaugcauau

SEQ ID NO: 29271 - RNA, 23 nt, Homo sapiens
ucuuguacuuugagugagcaugg

SEQ ID NO: 29272 - RNA, 22 nt, Homo sapiens
cagugcuuguuauuguucuauu

SEQ ID NO: 29273 - RNA, 22 nt, Homo sapiens
auugucacuuaaaagugcaugu

SEQ ID NO: 29274 - RNA, 22 nt, Homo sapiens
auuccacagccgauaccaugac

SEQ ID NO: 29275 - RNA, 22 nt, Homo sapiens
auggcuuuaagagugucugaau

SEQ ID NO: 29276 - RNA, 22 nt, Homo sapiens
auggcucuggauagaaugcagg

SEQ ID NO: 29277 - RNA, 19 nt, Homo sapiens
cugucacugaggaagacug

SEQ ID NO: 29278 - RNA, 22 nt, Homo sapiens
augcuacuggacaauggugacu

SEQ ID NO: 29279 - RNA, 22 nt, Homo sapiens
agcuuguggugaauacugcuag

SEQ ID NO: 29280 - RNA, 22 nt, Homo sapiens
auacugucucuugcuccugccc

SEQ ID NO: 29281 - RNA, 22 nt, Homo sapiens
acugcacugucaaccuccuggg

SEQ ID NO: 29282 - RNA, 22 nt, Homo sapiens
acugcacuccagcccaggugac

SEQ ID NO: 29283 - RNA, 22 nt, Homo sapiens
acugcacuccagccucaugaca

SEQ ID NO: 29284 - RNA, 22 nt, Homo sapiens
acugcacuccagcuuuggguga

SEQ ID NO: 29285 - RNA, 22 nt, Homo sapiens
aaugugccuacuggagcuugca

SEQ ID NO: 29286 - RNA, 22 nt, Homo sapiens
acagugcuguggucaugggucu

SEQ ID NO: 29287 - RNA, 17 nt, Homo sapiens
acagugcuuugcuuucc

SEQ ID NO: 29288 - RNA, 22 nt, Homo sapiens
aaguaaacauugagagacaaga

SEQ ID NO: 29289 - RNA, 22 nt, Homo sapiens
uuguaauggagcaaacagguug

SEQ ID NO: 29290 - RNA, 22 nt, Homo sapiens
uugcacuauuaguauagauguc

SEQ ID NO: 29291 - RNA, 22 nt, Homo sapiens
uguaugucuucuuuagauaagu

SEQ ID NO: 29292 - RNA, 22 nt, Homo sapiens
ugucacugugcagucaugcauu

SEQ ID NO: 29293 - RNA, 22 nt, Homo sapiens
uggcucuuucuagacuuaauua

SEQ ID NO: 29294 - RNA, 22 nt, Homo sapiens
uuauauguuacucccucuagca

SEQ ID NO: 29295 - RNA, 22 nt, Homo sapiens
uuacugcauaauuccugggaag

SEQ ID NO: 29296 - RNA, 22 nt, Homo sapiens
ucuaugguuuauuuccaagugu

SEQ ID NO: 29297 - RNA, 22 nt, Homo sapiens
ugcaaugugaaauaagcacauc

SEQ ID NO: 29298 - RNA, 22 nt, Homo sapiens
aaguugguguaugagacagaag

SEQ ID NO: 29299 - RNA, 22 nt, Homo sapiens
uacagucacauuccugaccaua

SEQ ID NO: 29300 - RNA, 22 nt, Homo sapiens
ugaaaucuaaaauguuccaaga

SEQ ID NO: 29301 - RNA, 22 nt, Homo sapiens
guacacauacauauaugugugu

SEQ ID NO: 29302 - RNA, 19 nt, Homo sapiens
ugcaaagucuuuuccuauu

SEQ ID NO: 29303 - RNA, 22 nt, Homo sapiens
gggcaacauugaguacccugaa

SEQ ID NO: 29304 - RNA, 22 nt, Homo sapiens
uguagcaaaucgauacuauugg

SEQ ID NO: 29305 - RNA, 22 nt, Homo sapiens
gagcuguuuuucacuagaccaa

SEQ ID NO: 29306 - RNA, 22 nt, Homo sapiens
agugcacuccagccugggcaac

SEQ ID NO: 29307 - RNA, 22 nt, Homo sapiens
guugguuuccuguaacuggaca

SEQ ID NO: 29308 - RNA, 22 nt, Homo sapiens
ugagaugaguucucgcucuguc

SEQ ID NO: 29309 - RNA, 22 nt, Homo sapiens
cugucucagugaauugguuuua

SEQ ID NO: 29310 - RNA, 22 nt, Homo sapiens
guacaguuuucaguguucacug

SEQ ID NO: 29311 - RNA, 22 nt, Homo sapiens
auggcuuuaagagugucugaau

SEQ ID NO: 29312 - RNA, 22 nt, Homo sapiens
ugagaugaacuugauuguuuua

SEQ ID NO: 29313 - RNA, 22 nt, Homo sapiens
aggcaagagugacuacgugaaa

SEQ ID NO: 29314 - RNA, 22 nt, Homo sapiens
uugcuuaggcuggagugcagug

SEQ ID NO: 29315 - RNA, 22 nt, Homo sapiens
aucuacagccagucugguuugu

SEQ ID NO: 29316 - RNA, 22 nt, Homo sapiens
auacaaguuauuugaacugcgg

SEQ ID NO: 29317 - RNA, 22 nt, Homo sapiens
ccuucauucauuaauuuagccc

SEQ ID NO: 29318 - RNA, 19 nt, Homo sapiens
uucucugguuguacuaccc

SEQ ID NO: 29319 - RNA, 22 nt, Homo sapiens
aaguauguaucaagucauacuu

SEQ ID NO: 29320 - RNA, 22 nt, Homo sapiens
ugucagaaucugagacgacaac

SEQ ID NO: 29321 - RNA, 22 nt, Homo sapiens
cauugcaauccagccugggcaa

SEQ ID NO: 29322 - RNA, 17 nt, Homo sapiens
ugagcuaagauuacccc

SEQ ID NO: 29323 - RNA, 19 nt, Homo sapiens
aguggguguuuucuguuug

SEQ ID NO: 29324 - RNA, 22 nt, Homo sapiens
uugagauggaguguugcucugu

SEQ ID NO: 29325 - RNA, 22 nt, Homo sapiens
uugagauggagucuugcucucu

SEQ ID NO: 29326 - RNA, 23 nt, Homo sapiens
aauaucacaguggguguacaccc

SEQ ID NO: 29327 - RNA, 22 nt, Homo sapiens
gcuguguugugcccagcaucau

SEQ ID NO: 29328 - RNA, 22 nt, Homo sapiens
cauugcacuccagccugaggga

SEQ ID NO: 29329 - RNA, 22 nt, Homo sapiens
uuugugauugcacacucaagau

SEQ ID NO: 29330 - RNA, 22 nt, Homo sapiens
aguaaauuucugugcuuucaua

SEQ ID NO: 29331 - RNA, 22 nt, Homo sapiens
uuaagggaggagcuucaagaug

SEQ ID NO: 29332 - RNA, 22 nt, Homo sapiens
uaccagcauuucucuuuaagua

SEQ ID NO: 29333 - RNA, 23 nt, Homo sapiens
uuaguaaacucaaugacaccaca

SEQ ID NO: 29334 - RNA, 22 nt, Homo sapiens
ucuugcuuguuguucccuucau

SEQ ID NO: 29335 - RNA, 22 nt, Homo sapiens
ugagcugagaucgugccauugu

SEQ ID NO: 29336 - RNA, 22 nt, Homo sapiens
guggacaugaauuuuggaggca

SEQ ID NO: 29337 - RNA, 22 nt, Homo sapiens
uggaagacaaguguuagcaugg

SEQ ID NO: 29338 - RNA, 22 nt, Homo sapiens
guguuauuuugcugggaaugau

SEQ ID NO: 29339 - RNA, 22 nt, Homo sapiens
caucgcacuccagccugggcaa

SEQ ID NO: 29340 - RNA, 22 nt, Homo sapiens
uugaggucagagguucgagacc

SEQ ID NO: 29341 - RNA, 22 nt, Homo sapiens
uucuuugcaugaucucaaaguc

SEQ ID NO: 29342 - RNA, 22 nt, Homo sapiens
uuggaagauuacuuaguuuucu

SEQ ID NO: 29343 - RNA, 22 nt, Homo sapiens
ucauugcacuccagccugggug

SEQ ID NO: 29344 - RNA, 22 nt, Homo sapiens
uggagugagaacuucaaugaug

SEQ ID NO: 29345 - RNA, 19 nt, Homo sapiens
cauggcuuauaauuuuaau

SEQ ID NO: 29346 - RNA, 22 nt, Homo sapiens
ugagaugacgacacaccucagu

SEQ ID NO: 29347 - RNA, 22 nt, Homo sapiens
agugaaaugucaccuuuuagga

SEQ ID NO: 29348 - RNA, 22 nt, Homo sapiens
uuugugagguggauagauugca

SEQ ID NO: 29349 - RNA, 22 nt, Homo sapiens
ugcuuaguguugacccucugcc

SEQ ID NO: 29350 - RNA, 22 nt, Homo sapiens
uucuacagugacugcagccaua

SEQ ID NO: 29351 - RNA, 22 nt, Homo sapiens
uuugugcaugaagagggggugc

SEQ ID NO: 29352 - RNA, 22 nt, Homo sapiens
aagacuguaauccaucuugagu

SEQ ID NO: 29353 - RNA, 22 nt, Homo sapiens
uugacaaggagccauugcaucu

SEQ ID NO: 29354 - RNA, 19 nt, Homo sapiens
ucuuuagucacauuuuuau

SEQ ID NO: 29355 - RNA, 21 nt, Homo sapiens
uucuaaguaaauguuggacau

SEQ ID NO: 29356 - RNA, 23 nt, Homo sapiens
aucagguuguagaauguguuugc

SEQ ID NO: 29357 - RNA, 22 nt, Homo sapiens
augugacuuuuuccugugccuu

SEQ ID NO: 29358 - RNA, 22 nt, Homo sapiens
ggggaauguuaaagaauuugca

SEQ ID NO: 29359 - RNA, 22 nt, Homo sapiens
uauggccccuacaugugcaaaa

SEQ ID NO: 29360 - RNA, 21 nt, Homo sapiens
gugcaaacaucauagaaugua

SEQ ID NO: 29361 - RNA, 22 nt, Homo sapiens
uugagauggaguuucgcucuug

SEQ ID NO: 29362 - RNA, 22 nt, Homo sapiens
gagaugaugagauguucacagu

SEQ ID NO: 29363 - RNA, 22 nt, Homo sapiens
acucagagauuagcacauguuu

SEQ ID NO: 29364 - RNA, 22 nt, Homo sapiens
uacaaaucuagguuuguuacug

SEQ ID NO: 29365 - RNA, 22 nt, Homo sapiens
aaccuacauucuuaacuguugc

SEQ ID NO: 29366 - RNA, 22 nt, Homo sapiens
auugcacaucugcacuacagcc

SEQ ID NO: 29367 - RNA, 22 nt, Homo sapiens
auuccacuuauaugagguaucu

SEQ ID NO: 29368 - RNA, 22 nt, Homo sapiens
ggcaacauggugaaacucuguc

SEQ ID NO: 29369 - RNA, 22 nt, Homo sapiens
auggauauuuuuugaacauaga

SEQ ID NO: 29370 - RNA, 22 nt, Homo sapiens
ugagccaaugauuugaauagag

SEQ ID NO: 29371 - RNA, 22 nt, Homo sapiens
uuucauggaggcauuuuagauu

SEQ ID NO: 29372 - RNA, 20 nt, Homo sapiens
uuggaaaugugaauugggag

SEQ ID NO: 29373 - RNA, 22 nt, Homo sapiens
auuccacuuacaugaaguaccu

SEQ ID NO: 29374 - RNA, 22 nt, Homo sapiens
uuaguucccucauucuugacuu

SEQ ID NO: 29375 - RNA, 22 nt, Homo sapiens
aucccuguaguaauauucuagc

SEQ ID NO: 29376 - RNA, 22 nt, Homo sapiens
uugagauggagucucgcucugu

SEQ ID NO: 29377 - RNA, 22 nt, Homo sapiens
uugcacucuccagccucggcaa

SEQ ID NO: 29378 - RNA, 22 nt, Homo sapiens
auggcagugagucucuaguauu

SEQ ID NO: 29379 - RNA, 22 nt, Homo sapiens
augagcugauuuccuuaccaua

SEQ ID NO: 29380 - RNA, 22 nt, Homo sapiens
auggcaguuucagcuauaguuu

SEQ ID NO: 29381 - RNA, 22 nt, Homo sapiens
cugagcuagaccacuuggcucc

SEQ ID NO: 29382 - RNA, 22 nt, Homo sapiens
auaugcaaauccauagagacag

SEQ ID NO: 29383 - RNA, 20 nt, Homo sapiens
uggaaucugaagaucucagu

SEQ ID NO: 29384 - RNA, 22 nt, Homo sapiens
augacaagaguguucagggaga

SEQ ID NO: 29385 - RNA, 22 nt, Homo sapiens
uuggaaaccucugcagguguuu

SEQ ID NO: 29386 - RNA, 22 nt, Homo sapiens
uuggcagucugaggcacagacu

SEQ ID NO: 29387 - RNA, 22 nt, Homo sapiens
uugacuagaccaucuuucuaga

SEQ ID NO: 29388 - RNA, 22 nt, Homo sapiens
uuggaacacauguuuuucuacc

SEQ ID NO: 29389 - RNA, 21 nt, Homo sapiens
uuuagguagcuuuucugggag

SEQ ID NO: 29390 - RNA, 22 nt, Homo sapiens
caugaaagugagaaacuccugg

SEQ ID NO: 29391 - RNA, 22 nt, Homo sapiens
uagcuguuggugggaagucaga

SEQ ID NO: 29392 - RNA, 22 nt, Homo sapiens
ggagaugaaaugagcuacuuaa

SEQ ID NO: 29393 - RNA, 22 nt, Homo sapiens
cuugguacucugugucccagcu

SEQ ID NO: 29394 - RNA, 22 nt, Homo sapiens
auuccacuuagugacucauuug

SEQ ID NO: 29395 - RNA, 22 nt, Homo sapiens
cauugcacuccagccuuggcaa

SEQ ID NO: 29396 - RNA, 22 nt, Homo sapiens
auggcaguuuauucuaaaucaa

SEQ ID NO: 29397 - RNA, 22 nt, Homo sapiens
uuucuacagugaacgauuucua

SEQ ID NO: 29398 - RNA, 22 nt, Homo sapiens
ugugggaggugcuaauguaaau

SEQ ID NO: 29399 - RNA, 22 nt, Homo sapiens
uuguaaucaacacaucauuggg

SEQ ID NO: 29400 - RNA, 21 nt, Homo sapiens
uggucaguuuucucacuagga

SEQ ID NO: 29401 - RNA, 22 nt, Homo sapiens
gauaaagauagcaauagggaca

SEQ ID NO: 29402 - RNA, 22 nt, Homo sapiens
agcaagaugaaguugagcuagg

SEQ ID NO: 29403 - RNA, 22 nt, Homo sapiens
cauggcuuguauaagauucuca

SEQ ID NO: 29404 - RNA, 22 nt, Homo sapiens
uuggucaggcuaaucucgaacg

SEQ ID NO: 29405 - RNA, 22 nt, Homo sapiens
auugcacuccagccugagcaaa

SEQ ID NO: 29406 - RNA, 20 nt, Homo sapiens
uucuacagucacaggaagau

SEQ ID NO: 29407 - RNA, 22 nt, Homo sapiens
auugcacuccagccugggcaac

SEQ ID NO: 29408 - RNA, 21 nt, Homo sapiens
ugagaugauccugcaugcaug

SEQ ID NO: 29409 - RNA, 22 nt, Homo sapiens
uucuuuggauaaaguuuuaugc

SEQ ID NO: 29410 - RNA, 22 nt, Homo sapiens
uuuccaagaugcuuacuuucuc

SEQ ID NO: 29411 - RNA, 22 nt, Homo sapiens
ggaaagaucagcuaaauguaag

SEQ ID NO: 29412 - RNA, 22 nt, Homo sapiens
aucuuuggcgggaauaucacag

SEQ ID NO: 29413 - RNA, 22 nt, Homo sapiens
acacaguguuuauugugguuag

SEQ ID NO: 29414 - RNA, 22 nt, Homo sapiens
uuggcagugguucugacggacc

SEQ ID NO: 29415 - RNA, 22 nt, Homo sapiens
ccugucuugauuaaauuacuua

SEQ ID NO: 29416 - RNA, 20 nt, Homo sapiens
uggaaauuaaccuuucaggu

SEQ ID NO: 29417 - RNA, 22 nt, Homo sapiens
acacuguagcugagggcaugcg

SEQ ID NO: 29418 - RNA, 22 nt, Homo sapiens
uggcuuuuauuauguugaggua

SEQ ID NO: 29419 - RNA, 22 nt, Homo sapiens
ugugccacugcacuccugccug

SEQ ID NO: 29420 - RNA, 22 nt, Homo sapiens
ugagccaugggguaaaugugau

SEQ ID NO: 29421 - RNA, 22 nt, Homo sapiens
uuugcauaauaagauuagggug

SEQ ID NO: 29422 - RNA, 22 nt, Homo sapiens
cauugcaugccagccugggcaa

SEQ ID NO: 29423 - RNA, 19 nt, Homo sapiens
aauggcuuuuccuguuccc

SEQ ID NO: 29424 - RNA, 22 nt, Homo sapiens
uagaccaauuggcauauaguaa

SEQ ID NO: 29425 - RNA, 20 nt, Homo sapiens
auuccacuuguuugagguac

SEQ ID NO: 29426 - RNA, 22 nt, Homo sapiens
ugagaugaagucucacucuguc

SEQ ID NO: 29427 - RNA, 22 nt, Homo sapiens
ugugcaaggcucucaaccugug

SEQ ID NO: 29428 - RNA, 20 nt, Homo sapiens
ugagaacaugugguauuugg

SEQ ID NO: 29429 - RNA, 22 nt, Homo sapiens
ggcaacaugccgaaaccacguc

SEQ ID NO: 29430 - RNA, 22 nt, Homo sapiens
gagagcauuaagccaucaucau

SEQ ID NO: 29431 - RNA, 22 nt, Homo sapiens
aucacuuucuauuucugugcca

SEQ ID NO: 29432 - RNA, 22 nt, Homo sapiens
uuauucagcaccugcuguguuc

SEQ ID NO: 29433 - RNA, 22 nt, Homo sapiens
uuugaguuugaggugcugauga

SEQ ID NO: 29434 - RNA, 22 nt, Homo sapiens
cauuuuacuuuccagacgugga

SEQ ID NO: 29435 - RNA, 22 nt, Homo sapiens
uggaaguuaaaugacucuuucu

SEQ ID NO: 29436 - RNA, 22 nt, Homo sapiens
auccaagagacugaugacuucc

SEQ ID NO: 29437 - RNA, 22 nt, Homo sapiens
uuuagcaaagcaauuuacacca

SEQ ID NO: 29438 - RNA, 22 nt, Homo sapiens
cuggcagucugccucuucacug

SEQ ID NO: 29439 - RNA, 22 nt, Homo sapiens
gagaaccuccagcaagguagua

SEQ ID NO: 29440 - RNA, 22 nt, Homo sapiens
uaaagugcugagaugaggcugg

SEQ ID NO: 29441 - RNA, 22 nt, Homo sapiens
gagcucauuaaaaauguagaau

SEQ ID NO: 29442 - RNA, 23 nt, Homo sapiens
ucaguacuccacuuucaauagug

SEQ ID NO: 29443 - RNA, 22 nt, Homo sapiens
ugacuaaaacugaguuucauua

SEQ ID NO: 29444 - RNA, 22 nt, Homo sapiens
uuugaguaggcuuauauuuugg

SEQ ID NO: 29445 - RNA, 22 nt, Homo sapiens
cuggaaacaucuuaggaaugca

SEQ ID NO: 29446 - RNA, 22 nt, Homo sapiens
auugcacuccagccuggggaac

SEQ ID NO: 29447 - RNA, 22 nt, Homo sapiens
caugccacuguggacaaagaca

SEQ ID NO: 29448 - RNA, 22 nt, Homo sapiens
auagcagaacagugucucacug

SEQ ID NO: 29449 - RNA, 22 nt, Homo sapiens
augacauugaugcucuggcugg

SEQ ID NO: 29450 - RNA, 22 nt, Homo sapiens
uguagcuuuugagauuuauauu

SEQ ID NO: 29451 - RNA, 20 nt, Homo sapiens
uaagccacacagucuaaggu

SEQ ID NO: 29452 - RNA, 22 nt, Homo sapiens
cugagacacucuuaucugcaua

SEQ ID NO: 29453 - RNA, 22 nt, Homo sapiens
ugagaugagucucgcucuguca

SEQ ID NO: 29454 - RNA, 22 nt, Homo sapiens
aagucaaggagagaagcuucag

SEQ ID NO: 29455 - RNA, 22 nt, Homo sapiens
gacacagugaagucucuacuug

SEQ ID NO: 29456 - RNA, 22 nt, Homo sapiens
caguuacuuuugcaccaaccua

SEQ ID NO: 29457 - RNA, 22 nt, Homo sapiens
ugauuggagaacaaacugcaua

SEQ ID NO: 29458 - RNA, 22 nt, Homo sapiens
uugagauggaguuucgcucuuu

SEQ ID NO: 29459 - RNA, 22 nt, Homo sapiens
accugagacuaggcauuuuaua

SEQ ID NO: 29460 - RNA, 22 nt, Homo sapiens
ccuucuuuuguaaggcugaaua

SEQ ID NO: 29461 - RNA, 22 nt, Homo sapiens
uauggcuucuuauucuuucccg

SEQ ID NO: 29462 - RNA, 22 nt, Homo sapiens
gucucccagccuacaucuuucu

SEQ ID NO: 29463 - RNA, 22 nt, Homo sapiens
uagucacacacucaacuuuuca

SEQ ID NO: 29464 - RNA, 22 nt, Homo sapiens
auuacuuugcaccaaccuaaua

SEQ ID NO: 29465 - RNA, 22 nt, Homo sapiens
aucuuuggugaguucuuugguc

SEQ ID NO: 29466 - RNA, 22 nt, Homo sapiens
uaagacacuuaaaauguuacau

SEQ ID NO: 29467 - RNA, 22 nt, Homo sapiens
aaucacuuuggcaccaaccuaa

SEQ ID NO: 29468 - RNA, 22 nt, Homo sapiens
uacaguguuuugguauuccaca

SEQ ID NO: 29469 - RNA, 22 nt, Homo sapiens
aagugccauguggaugggcccu

SEQ ID NO: 29470 - RNA, 22 nt, Homo sapiens
uguggaguguaugugacagaga

SEQ ID NO: 29471 - RNA, 22 nt, Homo sapiens
uugagauggagucuugcucugu

SEQ ID NO: 29472 - RNA, 22 nt, Homo sapiens
ugagaugaggucucacucuguu

SEQ ID NO: 29473 - RNA, 22 nt, Homo sapiens
uggagugaaaacacacuaaucu

SEQ ID NO: 29474 - RNA, 22 nt, Homo sapiens
uucauacaguggcugcacucca

SEQ ID NO: 29475 - RNA, 22 nt, Homo sapiens
uuugccaaucagaggcaucuug

SEQ ID NO: 29476 - RNA, 19 nt, Homo sapiens
uaucacuucccuggaaaca

SEQ ID NO: 29477 - RNA, 22 nt, Homo sapiens
uauuguacauauccucccuuca

SEQ ID NO: 29478 - RNA, 22 nt, Homo sapiens
cauugcacuccagccucggcaa

SEQ ID NO: 29479 - RNA, 22 nt, Homo sapiens
aaacugcuuuccaugguggcug

SEQ ID NO: 29480 - RNA, 22 nt, Homo sapiens
auugcacuccagccugggcagc

SEQ ID NO: 29481 - RNA, 22 nt, Homo sapiens
uuugugugugauuauaaaaggu

SEQ ID NO: 29482 - RNA, 22 nt, Homo sapiens
gagcucauuguugcuaaagaga

SEQ ID NO: 29483 - RNA, 21 nt, Homo sapiens
uauggauuugccuauucugga

SEQ ID NO: 29484 - RNA, 22 nt, Homo sapiens
uuucuauguugaccagucuaga

SEQ ID NO: 29485 - RNA, 22 nt, Homo sapiens
agcugguuuauuucuauauccu

SEQ ID NO: 29486 - RNA, 22 nt, Homo sapiens
gggaauguagcaaaucugcaau

SEQ ID NO: 29487 - RNA, 22 nt, Homo sapiens
ugacaaguaaacagucagcacc

SEQ ID NO: 29488 - RNA, 22 nt, Homo sapiens
cuucuguuaguucugauaacuu

SEQ ID NO: 29489 - RNA, 22 nt, Homo sapiens
uuugguugcauucacauauuuc

SEQ ID NO: 29490 - RNA, 22 nt, Homo sapiens
uguggccuuuguuucaguuggg

SEQ ID NO: 29491 - RNA, 22 nt, Homo sapiens
ugagaccugaucuugguacugc

SEQ ID NO: 29492 - RNA, 22 nt, Homo sapiens
acaguaugcuuuaaacuuuguu

SEQ ID NO: 29493 - RNA, 23 nt, Homo sapiens
ggaaugaaaccugguuaugauau

SEQ ID NO: 29494 - RNA, 22 nt, Homo sapiens
caggaaugugaggguucccugc

SEQ ID NO: 29495 - RNA, 22 nt, Homo sapiens
cauugcccuccagccugggcaa

SEQ ID NO: 29496 - RNA, 20 nt, Homo sapiens
aaacucugucuucuuuauca

SEQ ID NO: 29497 - RNA, 22 nt, Homo sapiens
uuuuaugggcuauuugcauuag

SEQ ID NO: 29498 - RNA, 22 nt, Homo sapiens
agcugauggucuuguaugaugu

SEQ ID NO: 29499 - RNA, 22 nt, Homo sapiens
uaucacuuuuccagcccagcuu

SEQ ID NO: 29500 - RNA, 22 nt, Homo sapiens
cuuuugugauucuucaguugcu

SEQ ID NO: 29501 - RNA, 22 nt, Homo sapiens
uaaucucagcuacucaggaggc

SEQ ID NO: 29502 - RNA, 20 nt, Homo sapiens
ucugauugcaacugcaugag

SEQ ID NO: 29503 - RNA, 22 nt, Homo sapiens
agaacuguccauucagcaugaa

SEQ ID NO: 29504 - RNA, 22 nt, Homo sapiens
cuuuacaguuggacucacgagg

SEQ ID NO: 29505 - RNA, 22 nt, Homo sapiens
uauggcuuuguucaacagccuc

SEQ ID NO: 29506 - RNA, 23 nt, Homo sapiens
gaaguaauaaauggauucuuaac

SEQ ID NO: 29507 - RNA, 21 nt, Homo sapiens
uauggcuuagucaguguuucc

SEQ ID NO: 29508 - RNA, 22 nt, Homo sapiens
cacuagagaauagguaguucug

SEQ ID NO: 29509 - RNA, 22 nt, Homo sapiens
gagcucaccuuaccucuggagc

SEQ ID NO: 29510 - RNA, 22 nt, Homo sapiens
uguuucuacugucucuguagua

SEQ ID NO: 29511 - RNA, 22 nt, Homo sapiens
ugauuugucucucagcccuacu

SEQ ID NO: 29512 - RNA, 22 nt, Homo sapiens
augagacuagaagagaauaaua

SEQ ID NO: 29513 - RNA, 22 nt, Homo sapiens
gaugagaugagcauuugaauug

SEQ ID NO: 29514 - RNA, 22 nt, Homo sapiens
ugagcacuguacuuuaucaggu

SEQ ID NO: 29515 - RNA, 22 nt, Homo sapiens
gugaggcacugcugcuuuccag

SEQ ID NO: 29516 - RNA, 22 nt, Homo sapiens
cuggcucugggcuaaagaaaua

SEQ ID NO: 29517 - RNA, 19 nt, Homo sapiens
ucccugagucuuagcuuga

SEQ ID NO: 29518 - RNA, 21 nt, Homo sapiens
uggagugaagaguuuauugac

SEQ ID NO: 29519 - RNA, 22 nt, Homo sapiens
auugcacuccagccuggccaac

SEQ ID NO: 29520 - RNA, 22 nt, Homo sapiens
cauugcacuccagccuggcaac

SEQ ID NO: 29521 - RNA, 22 nt, Homo sapiens
uauggaaaucuuaccuuauggu

SEQ ID NO: 29522 - RNA, 22 nt, Homo sapiens
ugcaauuuaaugugucccaauu

SEQ ID NO: 29523 - RNA, 22 nt, Homo sapiens
gugagccaugauuuuaccacug

SEQ ID NO: 29524 - RNA, 22 nt, Homo sapiens
cuacucugugguguauuugcau

SEQ ID NO: 29525 - RNA, 22 nt, Homo sapiens
uagauuguaauaugcagaaugg

SEQ ID NO: 29526 - RNA, 22 nt, Homo sapiens
acuguauagauggaguugauuu

SEQ ID NO: 29527 - RNA, 22 nt, Homo sapiens
augugcuuauagguguauguuu

SEQ ID NO: 29528 - RNA, 22 nt, Homo sapiens
ugagaugaagucuugcucuguu

SEQ ID NO: 29529 - RNA, 22 nt, Homo sapiens
ucuauguuuuugcuaguagugu

SEQ ID NO: 29530 - RNA, 18 nt, Homo sapiens
uuggacggagagucaaau

SEQ ID NO: 29531 - RNA, 21 nt, Homo sapiens
auugcacuccagccugggcga

SEQ ID NO: 29532 - RNA, 18 nt, Homo sapiens
cuaagacacuuggcagag

SEQ ID NO: 29533 - RNA, 18 nt, Homo sapiens
guaaauguaucuauugcc

SEQ ID NO: 29534 - RNA, 22 nt, Homo sapiens
ucugucuuugccuaaguuuguc

SEQ ID NO: 29535 - RNA, 22 nt, Homo sapiens
agcuggcuguagcugcaagucu

SEQ ID NO: 29536 - RNA, 22 nt, Homo sapiens
cguugcacuccagccugggcaa

SEQ ID NO: 29537 - RNA, 22 nt, Homo sapiens
ugguucaguugcacaggcuguu

SEQ ID NO: 29538 - RNA, 22 nt, Homo sapiens
uuuggucacugccgccgccagc

SEQ ID NO: 29539 - RNA, 22 nt, Homo sapiens
ugaggugaggguaucaaaugcu

SEQ ID NO: 29540 - RNA, 22 nt, Homo sapiens
uugagauggagucuugcucuug

SEQ ID NO: 29541 - RNA, 22 nt, Homo sapiens
uuauagacacguuguaacaaac

SEQ ID NO: 29542 - RNA, 22 nt, Homo sapiens
uuggcagugcccgaugcugggg

SEQ ID NO: 29543 - RNA, 22 nt, Homo sapiens
ucugucuugugguuugagugcc

SEQ ID NO: 29544 - RNA, 22 nt, Homo sapiens
aucccaguucagccucugacac

SEQ ID NO: 29545 - RNA, 22 nt, Homo sapiens
augucaacauagacaguagagu

SEQ ID NO: 29546 - RNA, 22 nt, Homo sapiens
uuauacuacuauaaagagguag

SEQ ID NO: 29547 - RNA, 22 nt, Homo sapiens
gucauugcacuccagccuggac

SEQ ID NO: 29548 - RNA, 22 nt, Homo sapiens
uaagacuguguaauuuaugaag

SEQ ID NO: 29549 - RNA, 22 nt, Homo sapiens
uaucagcagagucauacuucaa

SEQ ID NO: 29550 - RNA, 22 nt, Homo sapiens
ggcaaugucagcuaaugaugga

SEQ ID NO: 29551 - RNA, 22 nt, Homo sapiens
aaaugcuuucuuggaccauuug

SEQ ID NO: 29552 - RNA, 22 nt, Homo sapiens
cuuccaaguggggcacgugcca

SEQ ID NO: 29553 - RNA, 22 nt, Homo sapiens
uucuuugguacaagggccgacc

SEQ ID NO: 29554 - RNA, 22 nt, Homo sapiens
auguccaugagcacauguauca

SEQ ID NO: 29555 - RNA, 22 nt, Homo sapiens
gucucccagccuacauauuucu

SEQ ID NO: 29556 - RNA, 22 nt, Homo sapiens
ugacaagaacuuuccauaguaa

SEQ ID NO: 29557 - RNA, 22 nt, Homo sapiens
ucauacaguaguccucacuugu

SEQ ID NO: 29558 - RNA, 22 nt, Homo sapiens
cuacagcagcccaguccccgaa

SEQ ID NO: 29559 - RNA, 22 nt, Homo sapiens
uucaagaauuaaaguggcuuuu

SEQ ID NO: 29560 - RNA, 22 nt, Homo sapiens
ccuuggcacuuugccacagugc

SEQ ID NO: 29561 - RNA, 22 nt, Homo sapiens
uggucaguugaguccuugccaa

SEQ ID NO: 29562 - RNA, 22 nt, Homo sapiens
auggcucuuauuauuuugaggu

SEQ ID NO: 29563 - RNA, 22 nt, Homo sapiens
uugaagacuauaugauucuuca

SEQ ID NO: 29564 - RNA, 22 nt, Homo sapiens
gucuuuggaaagacaaaguuca

SEQ ID NO: 29565 - RNA, 22 nt, Homo sapiens
auggcagugucuagggguguuu

SEQ ID NO: 29566 - RNA, 22 nt, Homo sapiens
uugacauaguuucugaaauaga

SEQ ID NO: 29567 - RNA, 22 nt, Homo sapiens
ggaauggaacaaagucuugaaa

SEQ ID NO: 29568 - RNA, 22 nt, Homo sapiens
aauaucacaggguguacacuca

SEQ ID NO: 29569 - RNA, 22 nt, Homo sapiens
auugcucuuagaaauauuucuu

SEQ ID NO: 29570 - RNA, 21 nt, Homo sapiens
guggaaauggaauuuacuaau

SEQ ID NO: 29571 - RNA, 22 nt, Homo sapiens
auggcaguuuggucucugugcu

SEQ ID NO: 29572 - RNA, 22 nt, Homo sapiens
uugcugagucuuucuagguugc

SEQ ID NO: 29573 - RNA, 22 nt, Homo sapiens
auacaagugccauguuggugug

SEQ ID NO: 29574 - RNA, 22 nt, Homo sapiens
auugaguaaaaaauagugaugu

SEQ ID NO: 29575 - RNA, 21 nt, Homo sapiens
uaaaacuguaacuuuguccug

SEQ ID NO: 29576 - RNA, 22 nt, Homo sapiens
uucaauaugucauuggcaggca

SEQ ID NO: 29577 - RNA, 22 nt, Homo sapiens
auacaucugccauguuggugug

SEQ ID NO: 29578 - RNA, 22 nt, Homo sapiens
ugacaagauauggucuuaucaa

SEQ ID NO: 29579 - RNA, 22 nt, Homo sapiens
auugcacaccagucugggcaaa

SEQ ID NO: 29580 - RNA, 22 nt, Homo sapiens
cauggcuuucacaguaaagccu

SEQ ID NO: 29581 - RNA, 22 nt, Homo sapiens
guucaagugauucuacugccuc

SEQ ID NO: 29582 - RNA, 22 nt, Homo sapiens
auuguacuccagccugggcaaa

SEQ ID NO: 29583 - RNA, 18 nt, Homo sapiens
gacuuggaguuuacagug

SEQ ID NO: 29584 - RNA, 22 nt, Homo sapiens
acacagugucuguguauuuaaa

SEQ ID NO: 29585 - RNA, 19 nt, Homo sapiens
auugcacuccaaccugggu

SEQ ID NO: 29586 - RNA, 22 nt, Homo sapiens
uggaaaacaugcacauuggauu

SEQ ID NO: 29587 - RNA, 22 nt, Homo sapiens
uugcacagugguuuagagccug

SEQ ID NO: 29588 - RNA, 22 nt, Homo sapiens
ucauaucauuagaucuacugua

SEQ ID NO: 29589 - RNA, 22 nt, Homo sapiens
auugcacugcagccugggcaac

SEQ ID NO: 29590 - RNA, 22 nt, Homo sapiens
aaagagaucuaugggcacuaug

SEQ ID NO: 29591 - RNA, 22 nt, Homo sapiens
agaaugugaacaucuugaaagu

SEQ ID NO: 29592 - RNA, 22 nt, Homo sapiens
cuaauacaguuguccaagcugg

SEQ ID NO: 29593 - RNA, 22 nt, Homo sapiens
cuggcucauuucauuuagcaua

SEQ ID NO: 29594 - RNA, 22 nt, Homo sapiens
caugcacugaguccaccucugg

SEQ ID NO: 29595 - RNA, 22 nt, Homo sapiens
uaagacuguuggcaauuuuugc

SEQ ID NO: 29596 - RNA, 22 nt, Homo sapiens
uugagggaggcagggcuugucu

SEQ ID NO: 29597 - RNA, 22 nt, Homo sapiens
uuugaaccauuugaagaaugau

SEQ ID NO: 29598 - RNA, 22 nt, Homo sapiens
ucuaaaacuagauugugaugau

SEQ ID NO: 29599 - RNA, 22 nt, Homo sapiens
caccugagcgggaugcucgccu

SEQ ID NO: 29600 - RNA, 22 nt, Homo sapiens
auagaagcugccaacguuucag

SEQ ID NO: 29601 - RNA, 22 nt, Homo sapiens
uaaguucauucaugaaacuuag

SEQ ID NO: 29602 - RNA, 22 nt, Homo sapiens
ggcacgguggcucacgccugua

SEQ ID NO: 29603 - RNA, 22 nt, Homo sapiens
auacauguuucauguuggugug

SEQ ID NO: 29604 - RNA, 22 nt, Homo sapiens
uauggcuuuuaacugucguaug

SEQ ID NO: 29605 - RNA, 22 nt, Homo sapiens
uauacagcaaguuacugugcug

SEQ ID NO: 29606 - RNA, 22 nt, Homo sapiens
uuuuaacagccaggggacggcc

SEQ ID NO: 29607 - RNA, 22 nt, Homo sapiens
auaaagccaugagcuugagaug

SEQ ID NO: 29608 - RNA, 20 nt, Homo sapiens
cauugcccuccagccugggc

SEQ ID NO: 29609 - RNA, 22 nt, Homo sapiens
uuugaaaguaauuugguuggug

SEQ ID NO: 29610 - RNA, 22 nt, Homo sapiens
uguuacagugacuaauguuuua

SEQ ID NO: 29611 - RNA, 22 nt, Homo sapiens
acugagaucuuuaaauaaauaa

SEQ ID NO: 29612 - RNA, 22 nt, Homo sapiens
ugucagaaucuagaggcugcua

SEQ ID NO: 29613 - RNA, 22 nt, Homo sapiens
uaagagagcuccaucuuuuccu

SEQ ID NO: 29614 - RNA, 22 nt, Homo sapiens
uucagguaguuuaacuguucca

SEQ ID NO: 29615 - RNA, 22 nt, Homo sapiens
uugagaugaagucuugcucucu

SEQ ID NO: 29616 - RNA, 22 nt, Homo sapiens
uugagaugaaguuuugcucuuu

SEQ ID NO: 29617 - RNA, 22 nt, Homo sapiens
aucugugaaugaaguuauuuug

SEQ ID NO: 29618 - RNA, 22 nt, Homo sapiens
ucuuucacuuagcaugauguuu

SEQ ID NO: 29619 - RNA, 22 nt, Homo sapiens
ugauauuuuugauccuuaaguu

SEQ ID NO: 29620 - RNA, 22 nt, Homo sapiens
ucuugguugaaaauucauaaua

SEQ ID NO: 29621 - RNA, 22 nt, Homo sapiens
uuggcaguaucuacuacagcua

SEQ ID NO: 29622 - RNA, 22 nt, Homo sapiens
uauggcuuuuauuauguuguag

SEQ ID NO: 29623 - RNA, 19 nt, Homo sapiens
uuuuggaaaugugaacagc

SEQ ID NO: 29624 - RNA, 22 nt, Homo sapiens
ugagaugaguugcuggcucuga

SEQ ID NO: 29625 - RNA, 20 nt, Homo sapiens
agcuggguguguuggugcau

SEQ ID NO: 29626 - RNA, 22 nt, Homo sapiens
auaaccuauggaucuacucggg

SEQ ID NO: 29627 - RNA, 22 nt, Homo sapiens
acuuuuguuauacagugugaua

SEQ ID NO: 29628 - RNA, 22 nt, Homo sapiens
uuaguucauugugacuggacuc

SEQ ID NO: 29629 - RNA, 20 nt, Homo sapiens
agguagauagaugauagaua

SEQ ID NO: 29630 - RNA, 22 nt, Homo sapiens
acuuuguguuacccagcaagga

SEQ ID NO: 29631 - RNA, 22 nt, Homo sapiens
gaggcaagaguaguuaaguuag

SEQ ID NO: 29632 - RNA, 22 nt, Homo sapiens
cuacagcacugagcugugugca

SEQ ID NO: 29633 - RNA, 22 nt, Homo sapiens
auggcacuccagccugggcaac

SEQ ID NO: 29634 - RNA, 22 nt, Homo sapiens
ugcaaauguuaggugucauuau

SEQ ID NO: 29635 - RNA, 22 nt, Homo sapiens
uuugguuuuuguuaucacucau

SEQ ID NO: 29636 - RNA, 22 nt, Homo sapiens
cacaguguuacugguaugaagu

SEQ ID NO: 29637 - RNA, 22 nt, Homo sapiens
ugcacuguggucugagagacag

SEQ ID NO: 29638 - RNA, 22 nt, Homo sapiens
auggacuuuuuguucagugucu

SEQ ID NO: 29639 - RNA, 18 nt, Homo sapiens
uugcacuccugccugggu

SEQ ID NO: 29640 - RNA, 22 nt, Homo sapiens
ugagaucaguuguuauaauucu

SEQ ID NO: 29641 - RNA, 22 nt, Homo sapiens
augacagagauaugugaauuuu

SEQ ID NO: 29642 - RNA, 22 nt, Homo sapiens
gauacaccauuuucuagcuauu

SEQ ID NO: 29643 - RNA, 22 nt, Homo sapiens
uuugcuugaggucuagcuaccc

SEQ ID NO: 29644 - RNA, 22 nt, Homo sapiens
uuaaggaaggagucuuaaaugg

SEQ ID NO: 29645 - RNA, 22 nt, Homo sapiens
uuggaaacaccuggugagguua

SEQ ID NO: 29646 - RNA, 22 nt, Homo sapiens
ucuggaauguaaaguuuauggg

SEQ ID NO: 29647 - RNA, 22 nt, Homo sapiens
cucuuuggaugccuuaggguua

SEQ ID NO: 29648 - RNA, 22 nt, Homo sapiens
ucacuagaucaagggagagaaa

SEQ ID NO: 29649 - RNA, 22 nt, Homo sapiens
ugagaacugguagcacuuguga

SEQ ID NO: 29650 - RNA, 22 nt, Homo sapiens
aaggcaauuuguugugaggauu

SEQ ID NO: 29651 - RNA, 22 nt, Homo sapiens
uauacaugugccauguuggugu

SEQ ID NO: 29652 - RNA, 22 nt, Homo sapiens
ugaaggcaggagggagaaaagu

SEQ ID NO: 29653 - RNA, 22 nt, Homo sapiens
auggcaguguaugauuauauua

SEQ ID NO: 29654 - RNA, 22 nt, Homo sapiens
agcugguuuaauaugcugucug

SEQ ID NO: 29655 - RNA, 22 nt, Homo sapiens
augacugucagggcagucauug

SEQ ID NO: 29656 - RNA, 23 nt, Homo sapiens
uuuugcaauaagucacuggaaua

SEQ ID NO: 29657 - RNA, 22 nt, Homo sapiens
aaguggcauugaggaaaaaaau

SEQ ID NO: 29658 - RNA, 22 nt, Homo sapiens
uaucacuuugauaguuuaaaug

SEQ ID NO: 29659 - RNA, 22 nt, Homo sapiens
auugaacuguuggagagguuuu

SEQ ID NO: 29660 - RNA, 17 nt, Homo sapiens
ucuaauaauaugcauuu

SEQ ID NO: 29661 - RNA, 22 nt, Homo sapiens
uuggaaauauguuaagugucau

SEQ ID NO: 29662 - RNA, 22 nt, Homo sapiens
auggccugaugcaccuguccca

SEQ ID NO: 29663 - RNA, 22 nt, Homo sapiens
auugcacuccagccuugggcaa

SEQ ID NO: 29664 - RNA, 22 nt, Homo sapiens
uugacagaccuuggucauaucc

SEQ ID NO: 29665 - RNA, 22 nt, Homo sapiens
caucacuuuuccuuuuacagau

SEQ ID NO: 29666 - RNA, 22 nt, Homo sapiens
uugcuuagucaugaaucacuga

SEQ ID NO: 29667 - RNA, 22 nt, Homo sapiens
cugaggcacggcgaccuuaagu

SEQ ID NO: 29668 - RNA, 22 nt, Homo sapiens
guagcagaauaucagauaauuu

SEQ ID NO: 29669 - RNA, 22 nt, Homo sapiens
aauuaguuggcugggugcggug

SEQ ID NO: 29670 - RNA, 22 nt, Homo sapiens
uucuuagucauguaauagucca

SEQ ID NO: 29671 - RNA, 22 nt, Homo sapiens
aauggcuucuuauugugguuca

SEQ ID NO: 29672 - RNA, 22 nt, Homo sapiens
auugcacuccauccugggcaau

SEQ ID NO: 29673 - RNA, 22 nt, Homo sapiens
ucacugugcaugaaggaugcug

SEQ ID NO: 29674 - RNA, 22 nt, Homo sapiens
cuuugguuuacuuggugcuagu

SEQ ID NO: 29675 - RNA, 22 nt, Homo sapiens
uauggcuuuguuaacauuuucu

SEQ ID NO: 29676 - RNA, 22 nt, Homo sapiens
uuagcacauuuccagcacaugg

SEQ ID NO: 29677 - RNA, 23 nt, Homo sapiens
auugcagaaucacagagguagug

SEQ ID NO: 29678 - RNA, 22 nt, Homo sapiens
cauggcuuuaagcaacaccaag

SEQ ID NO: 29679 - RNA, 22 nt, Homo sapiens
gccaacauggcgcuccauucuu

SEQ ID NO: 29680 - RNA, 22 nt, Homo sapiens
aauauagcuauguacaugucca

SEQ ID NO: 29681 - RNA, 22 nt, Homo sapiens
cuuuguaugucaugacaacugu

SEQ ID NO: 29682 - RNA, 21 nt, Homo sapiens
auagcacuucacuugguuaga

SEQ ID NO: 29683 - RNA, 22 nt, Homo sapiens
cauacaagcuacaaucacaaag

SEQ ID NO: 29684 - RNA, 22 nt, Homo sapiens
aagcacccagccucacgccugc

SEQ ID NO: 29685 - RNA, 22 nt, Homo sapiens
uuacagcagugccccacuccca

SEQ ID NO: 29686 - RNA, 22 nt, Homo sapiens
uggcucauuucuaaacccagcu

SEQ ID NO: 29687 - RNA, 22 nt, Homo sapiens
uauuugguagcuauuuugcagu

SEQ ID NO: 29688 - RNA, 22 nt, Homo sapiens
acaauguauauuuuacuguagg

SEQ ID NO: 29689 - RNA, 18 nt, Homo sapiens
aaacagugucucuuucug

SEQ ID NO: 29690 - RNA, 16 nt, Homo sapiens
uugaggcaugucucag

SEQ ID NO: 29691 - RNA, 22 nt, Homo sapiens
ugugccuacugauagagccaag

SEQ ID NO: 29692 - RNA, 20 nt, Homo sapiens
auuccacuuauaugaggucc

SEQ ID NO: 29693 - RNA, 22 nt, Homo sapiens
uuugccaauauuuuauugagga

SEQ ID NO: 29694 - RNA, 22 nt, Homo sapiens
uaugacauaguccuuaacccuc

SEQ ID NO: 29695 - RNA, 22 nt, Homo sapiens
ugagaucaugucauuugcacuc

SEQ ID NO: 29696 - RNA, 22 nt, Homo sapiens
auacaagcaguccaacuccaua

SEQ ID NO: 29697 - RNA, 22 nt, Homo sapiens
auggcuuugggcugcucugccc

SEQ ID NO: 29698 - RNA, 22 nt, Homo sapiens
uugagccaaggauugucuuucc

SEQ ID NO: 29699 - RNA, 22 nt, Homo sapiens
gagaucacuguuuauauucucu

SEQ ID NO: 29700 - RNA, 22 nt, Homo sapiens
uugagcaccaugccuggccaug

SEQ ID NO: 29701 - RNA, 22 nt, Homo sapiens
uucucuggucagaggggagguu

SEQ ID NO: 29702 - RNA, 22 nt, Homo sapiens
uagcauaauuuguagaaaauca

SEQ ID NO: 29703 - RNA, 22 nt, Homo sapiens
ucacaaguguauagacaugucc

SEQ ID NO: 29704 - RNA, 22 nt, Homo sapiens
auggcaguuucacucugggauu

SEQ ID NO: 29705 - RNA, 19 nt, Homo sapiens
ugugacugguugucucgcu

SEQ ID NO: 29706 - RNA, 22 nt, Homo sapiens
gaucacuuugaugccaggaacu

SEQ ID NO: 29707 - RNA, 22 nt, Homo sapiens
uuauguaaaucaaucuggaauc

SEQ ID NO: 29708 - RNA, 22 nt, Homo sapiens
uagugaauguuggcuauuaaua

SEQ ID NO: 29709 - RNA, 22 nt, Homo sapiens
gagcugaucuuuucugauucca

SEQ ID NO: 29710 - RNA, 22 nt, Homo sapiens
uucagcuacuugggaggcugaa

SEQ ID NO: 29711 - RNA, 22 nt, Homo sapiens
ugagaucuuuuguggcugagaa

SEQ ID NO: 29712 - RNA, 22 nt, Homo sapiens
uucuacuucauuaggaggauug

SEQ ID NO: 29713 - RNA, 19 nt, Homo sapiens
uucauacagugagagcagc

SEQ ID NO: 29714 - RNA, 22 nt, Homo sapiens
agaugauguuuacugagcauca

SEQ ID NO: 29715 - RNA, 22 nt, Homo sapiens
uuugugcaaacuaggauugcga

SEQ ID NO: 29716 - RNA, 22 nt, Homo sapiens
auggcuguuccugggaguucua

SEQ ID NO: 29717 - RNA, 22 nt, Homo sapiens
auugcacuccagccugggcgac

SEQ ID NO: 29718 - RNA, 21 nt, Homo sapiens
agcugguuuccacagugugcu

SEQ ID NO: 29719 - RNA, 22 nt, Homo sapiens
auauggcuaugugagcauacca

SEQ ID NO: 29720 - RNA, 22 nt, Homo sapiens
uuauggauuuauauucuguagu

SEQ ID NO: 29721 - RNA, 22 nt, Homo sapiens
cugaaagagcauguaacacagu

SEQ ID NO: 29722 - RNA, 22 nt, Homo sapiens
uugcauauguugaaccaagcgu

SEQ ID NO: 29723 - RNA, 22 nt, Homo sapiens
uuguguuuuuaguagggaaggg

SEQ ID NO: 29724 - RNA, 20 nt, Homo sapiens
uaugacacugucauaaaaau

SEQ ID NO: 29725 - RNA, 22 nt, Homo sapiens
augcaacugcacuccagccugg

SEQ ID NO: 29726 - RNA, 22 nt, Homo sapiens
caaugguuuuuuaguauaagua

SEQ ID NO: 29727 - RNA, 22 nt, Homo sapiens
auggcucuggauagaaugcagg

SEQ ID NO: 29728 - RNA, 22 nt, Homo sapiens
gaaugcagcagugacagggcug

SEQ ID NO: 29729 - RNA, 22 nt, Homo sapiens
uugcauaagugcauucugugau

SEQ ID NO: 29730 - RNA, 22 nt, Homo sapiens
aucuuuggauacuugauauagu

SEQ ID NO: 29731 - RNA, 22 nt, Homo sapiens
uuccugagagggcugggugcag

SEQ ID NO: 29732 - RNA, 22 nt, Homo sapiens
cagagagcuugcccuuguauau

SEQ ID NO: 29733 - RNA, 22 nt, Homo sapiens
acacuauugagguuuguuugca

SEQ ID NO: 29734 - RNA, 22 nt, Homo sapiens
acuuuuugauggggagaacauu

SEQ ID NO: 29735 - RNA, 22 nt, Homo sapiens
uugagaagugucuguucauguc

SEQ ID NO: 29736 - RNA, 18 nt, Homo sapiens
auugcacuccugccuggg

SEQ ID NO: 29737 - RNA, 22 nt, Homo sapiens
aggcaaugugagaguuuauuca

SEQ ID NO: 29738 - RNA, 22 nt, Homo sapiens
cuagaagcauauucagaacaga

SEQ ID NO: 29739 - RNA, 22 nt, Homo sapiens
auguaacugggacacaagccuc

SEQ ID NO: 29740 - RNA, 22 nt, Homo sapiens
gagcugaucuuuauguaaauuc

SEQ ID NO: 29741 - RNA, 22 nt, Homo sapiens
agauguuguucaucugauuguu

SEQ ID NO: 29742 - RNA, 22 nt, Homo sapiens
uaaagcauguaauuagguuaga

SEQ ID NO: 29743 - RNA, 22 nt, Homo sapiens
auacaugugccauguugguaug

SEQ ID NO: 29744 - RNA, 22 nt, Homo sapiens
uucagacugggugaagagggua

SEQ ID NO: 29745 - RNA, 22 nt, Homo sapiens
gugcuuuguuguggcaguggca

SEQ ID NO: 29746 - RNA, 22 nt, Homo sapiens
ggagaugauuaugaaucacuua

SEQ ID NO: 29747 - RNA, 22 nt, Homo sapiens
ugucaauauguaauaacugaau

SEQ ID NO: 29748 - RNA, 22 nt, Homo sapiens
auugcacuccagccuaggcaac

SEQ ID NO: 29749 - RNA, 22 nt, Homo sapiens
aggugguuuugaugagcaggua

SEQ ID NO: 29750 - RNA, 22 nt, Homo sapiens
uauggcuuucuacuugaguucu

SEQ ID NO: 29751 - RNA, 22 nt, Homo sapiens
ccugucuugaagagauccuccu

SEQ ID NO: 29752 - RNA, 22 nt, Homo sapiens
uuagguaauauauugcugcuuu

SEQ ID NO: 29753 - RNA, 22 nt, Homo sapiens
aagugucagaguugcuaaugac

SEQ ID NO: 29754 - RNA, 22 nt, Homo sapiens
ucagugccucaguuuuuaaaga

SEQ ID NO: 29755 - RNA, 22 nt, Homo sapiens
ggagaauugcuuggacccggga

SEQ ID NO: 29756 - RNA, 20 nt, Homo sapiens
cguugcacuccagccugggc

SEQ ID NO: 29757 - RNA, 22 nt, Homo sapiens
caucacuuugccuccgucucua

SEQ ID NO: 29758 - RNA, 22 nt, Homo sapiens
ccagucuuggugucuguagcac

SEQ ID NO: 29759 - RNA, 22 nt, Homo sapiens
ggacaagagacugggacacuga

SEQ ID NO: 29760 - RNA, 22 nt, Homo sapiens
uucucugggacauaggucgggu

SEQ ID NO: 29761 - RNA, 22 nt, Homo sapiens
ucacaguccuguuuaggagagg

SEQ ID NO: 29762 - RNA, 22 nt, Homo sapiens
cacaguugccuaucuccugaag

SEQ ID NO: 29763 - RNA, 22 nt, Homo sapiens
uacuguacugcaguucugcaaa

SEQ ID NO: 29764 - RNA, 22 nt, Homo sapiens
ugugucacugcacuccagccug

SEQ ID NO: 29765 - RNA, 22 nt, Homo sapiens
ggucagaaagacaggcauucag

SEQ ID NO: 29766 - RNA, 22 nt, Homo sapiens
auagcagaauuuggucaagucu

SEQ ID NO: 29767 - RNA, 22 nt, Homo sapiens
acaguguagugacugccaacuu

SEQ ID NO: 29768 - RNA, 22 nt, Homo sapiens
uaaggcucuuguuauuuugagg

SEQ ID NO: 29769 - RNA, 22 nt, Homo sapiens
auugcacuccagucugggcaac

SEQ ID NO: 29770 - RNA, 22 nt, Homo sapiens
caacacagugaaacccgucucu

SEQ ID NO: 29771 - RNA, 22 nt, Homo sapiens
uaguucauuuuucuugcuuaga

SEQ ID NO: 29772 - RNA, 22 nt, Homo sapiens
gaaaugcucauuuuggauccuu

SEQ ID NO: 29773 - RNA, 22 nt, Homo sapiens
cuggaauguuccuaaagauuca

SEQ ID NO: 29774 - RNA, 22 nt, Homo sapiens
auggaaaugaagggcuggcccu

SEQ ID NO: 29775 - RNA, 22 nt, Homo sapiens
ucccugaaaauuagcauuuuaa

SEQ ID NO: 29776 - RNA, 22 nt, Homo sapiens
uuuuauguuuguucccugccaa

SEQ ID NO: 29777 - RNA, 20 nt, Homo sapiens
agcugguuuuaugaaucuuu

SEQ ID NO: 29778 - RNA, 22 nt, Homo sapiens
uucuacaggcuguucaagaagc

SEQ ID NO: 29779 - RNA, 20 nt, Homo sapiens
cauugcacuccagcuugggc

SEQ ID NO: 29780 - RNA, 22 nt, Homo sapiens
ggcagaauugcugaggaugcua

SEQ ID NO: 29781 - RNA, 22 nt, Homo sapiens
cuggcagugcuuguuauccugg

SEQ ID NO: 29782 - RNA, 22 nt, Homo sapiens
ugucucccuucccauuaggaag

SEQ ID NO: 29783 - RNA, 22 nt, Homo sapiens
ugagaugauaucuuauuguaau

SEQ ID NO: 29784 - RNA, 22 nt, Homo sapiens
ucugucuuguccucacccuaga

SEQ ID NO: 29785 - RNA, 22 nt, Homo sapiens
cauugcacuuagacaacuuuug

SEQ ID NO: 29786 - RNA, 22 nt, Homo sapiens
ugagaucaagguuaauauaauc

SEQ ID NO: 29787 - RNA, 22 nt, Homo sapiens
aaugcuguguuauuucaugacc

SEQ ID NO: 29788 - RNA, 19 nt, Homo sapiens
ugagauuguaugaggagau

SEQ ID NO: 29789 - RNA, 22 nt, Homo sapiens
agcuggcuguggagaaaccccu

SEQ ID NO: 29790 - RNA, 22 nt, Homo sapiens
auccugaagcuuuacugaauuc

SEQ ID NO: 29791 - RNA, 22 nt, Homo sapiens
uugagauggagucucacuccuu

SEQ ID NO: 29792 - RNA, 22 nt, Homo sapiens
acugaucaauguuaaggcuuau

SEQ ID NO: 29793 - RNA, 22 nt, Homo sapiens
uggagcccuaguuccucauaac

SEQ ID NO: 29794 - RNA, 22 nt, Homo sapiens
uggucuccuuuguacccugggc

SEQ ID NO: 29795 - RNA, 20 nt, Homo sapiens
ugagaacauguggcauuugg

SEQ ID NO: 29796 - RNA, 22 nt, Homo sapiens
ugccaacugguuucuuuuaguu

SEQ ID NO: 29797 - RNA, 20 nt, Homo sapiens
uagcacacauguagaauagu

SEQ ID NO: 29798 - RNA, 22 nt, Homo sapiens
uugggagugucucuggacugca

SEQ ID NO: 29799 - RNA, 19 nt, Homo sapiens
agaguauuguuacuucucu

SEQ ID NO: 29800 - RNA, 22 nt, Homo sapiens
gguaaaucuucacuaagacuga

SEQ ID NO: 29801 - RNA, 22 nt, Homo sapiens
cucauggagaacaucugcuagg

SEQ ID NO: 29802 - RNA, 22 nt, Homo sapiens
cugacuaguuuuaaugcagauu

SEQ ID NO: 29803 - RNA, 17 nt, Homo sapiens
cucucugguuuaaagca

SEQ ID NO: 29804 - RNA, 22 nt, Homo sapiens
cuuugguuaucuagcuguauga

SEQ ID NO: 29805 - RNA, 22 nt, Homo sapiens
ucuacagccaguucaggaagaa

SEQ ID NO: 29806 - RNA, 22 nt, Homo sapiens
cauaaagauggaggaggccagg

SEQ ID NO: 29807 - RNA, 22 nt, Homo sapiens
uacauagucuucuuuugguuau

SEQ ID NO: 29808 - RNA, 22 nt, Homo sapiens
gagacauugacuuuguuccaga

SEQ ID NO: 29809 - RNA, 22 nt, Homo sapiens
cuauggcucugucuuuuaaguu

SEQ ID NO: 29810 - RNA, 22 nt, Homo sapiens
uggugagaaaagaugucuuugu

SEQ ID NO: 29811 - RNA, 22 nt, Homo sapiens
cacagugaacugguggguuuuu

SEQ ID NO: 29812 - RNA, 22 nt, Homo sapiens
ugcagaaucccuucagauccga

SEQ ID NO: 29813 - RNA, 22 nt, Homo sapiens
augucuuucauagagacccaga

SEQ ID NO: 29814 - RNA, 22 nt, Homo sapiens
ugagaugaguugcgcucugucg

SEQ ID NO: 29815 - RNA, 22 nt, Homo sapiens
cucagugucuggcacacagaaa

SEQ ID NO: 29816 - RNA, 22 nt, Homo sapiens
cauugcacuccagcuugggcaa

SEQ ID NO: 29817 - RNA, 22 nt, Homo sapiens
uaucucuguggguagugcugaa

SEQ ID NO: 29818 - RNA, 22 nt, Homo sapiens
ugagaucuuggaggcuuuguga

SEQ ID NO: 29819 - RNA, 22 nt, Homo sapiens
cuguucaggaggcauuuggugg

SEQ ID NO: 29820 - RNA, 22 nt, Homo sapiens
aacacuguuuccagucaugauc

SEQ ID NO: 29821 - RNA, 22 nt, Homo sapiens
uuuguucaccucaaggauggga

SEQ ID NO: 29822 - RNA, 22 nt, Homo sapiens
uuaugacauugacaguuuuuag

SEQ ID NO: 29823 - RNA, 22 nt, Homo sapiens
uccuguaaucccagcuaccaga

SEQ ID NO: 29824 - RNA, 21 nt, Homo sapiens
cuuugguagaguuuuuagggu

SEQ ID NO: 29825 - RNA, 23 nt, Homo sapiens
uugaggcauguaccaucaauauc

SEQ ID NO: 29826 - RNA, 20 nt, Homo sapiens
uucuauggugaugaguccug

SEQ ID NO: 29827 - RNA, 22 nt, Homo sapiens
auagcagacauuucaaggcagg

SEQ ID NO: 29828 - RNA, 22 nt, Homo sapiens
auuccacuuccacuaguuucuc

SEQ ID NO: 29829 - RNA, 20 nt, Homo sapiens
ugagcucaugacauuuuucu

SEQ ID NO: 29830 - RNA, 22 nt, Homo sapiens
aucccugugauccaaucacuuc

SEQ ID NO: 29831 - RNA, 22 nt, Homo sapiens
cauugcacuccauccuuggcaa

SEQ ID NO: 29832 - RNA, 22 nt, Homo sapiens
uugagauggagucucacugugu

SEQ ID NO: 29833 - RNA, 19 nt, Homo sapiens
gugguauuaccuuuugauu

SEQ ID NO: 29834 - RNA, 22 nt, Homo sapiens
uuauagcuaacaucugugaaaa

SEQ ID NO: 29835 - RNA, 20 nt, Homo sapiens
uggagugaagguucuggacc

SEQ ID NO: 29836 - RNA, 22 nt, Homo sapiens
guccaagacuaggaguuggcag

SEQ ID NO: 29837 - RNA, 22 nt, Homo sapiens
cuagaguacuuaccacagcaug

SEQ ID NO: 29838 - RNA, 22 nt, Homo sapiens
cuggcacagugucagaaacaca

SEQ ID NO: 29839 - RNA, 22 nt, Homo sapiens
uugguucucuuagccaucuuaa

SEQ ID NO: 29840 - RNA, 22 nt, Homo sapiens
uuaauacugcuuaacuuuagga

SEQ ID NO: 29841 - RNA, 18 nt, Homo sapiens
auugcacaccagccuggg

SEQ ID NO: 29842 - RNA, 22 nt, Homo sapiens
ucugucuuugucaggaccagag

SEQ ID NO: 29843 - RNA, 21 nt, Homo sapiens
ugaacacuggacugagugucc

SEQ ID NO: 29844 - RNA, 22 nt, Homo sapiens
uauggcuucuauaaggaagcuu

SEQ ID NO: 29845 - RNA, 22 nt, Homo sapiens
cccagaguucuuaaauacugag

SEQ ID NO: 29846 - RNA, 22 nt, Homo sapiens
uugagauggaguuuugcucuug

SEQ ID NO: 29847 - RNA, 22 nt, Homo sapiens
guaacacucuaaagggaugcac

SEQ ID NO: 29848 - RNA, 22 nt, Homo sapiens
acacauuagcaagugcuguuau

SEQ ID NO: 29849 - RNA, 19 nt, Homo sapiens
ugagaugaagacagggguu

SEQ ID NO: 29850 - RNA, 22 nt, Homo sapiens
ugagaugaagcuagaagaaugg

SEQ ID NO: 29851 - RNA, 17 nt, Homo sapiens
auguaauccucaucucu

SEQ ID NO: 29852 - RNA, 22 nt, Homo sapiens
ugugccuaguaauguguccaga

SEQ ID NO: 29853 - RNA, 22 nt, Homo sapiens
gucuuggagacauugccauuga

SEQ ID NO: 29854 - RNA, 22 nt, Homo sapiens
auauucacagguaucagagauu

SEQ ID NO: 29855 - RNA, 19 nt, Homo sapiens
uaugcaacuuauagugcug

SEQ ID NO: 29856 - RNA, 22 nt, Homo sapiens
uugaguccccacacuggguccc

SEQ ID NO: 29857 - RNA, 22 nt, Homo sapiens
uuggacuucuaacugacaugga

SEQ ID NO: 29858 - RNA, 22 nt, Homo sapiens
ugaaauuuuuuauucguuggcu

SEQ ID NO: 29859 - RNA, 22 nt, Homo sapiens
ugagcugagaaaugcagcagcu

SEQ ID NO: 29860 - RNA, 22 nt, Homo sapiens
cauugcacuccaucuugggcaa

SEQ ID NO: 29861 - RNA, 22 nt, Homo sapiens
uuggaagacaaugcugauucuc

SEQ ID NO: 29862 - RNA, 22 nt, Homo sapiens
ugccauugcacuccagccuggg

SEQ ID NO: 29863 - RNA, 22 nt, Homo sapiens
aucuuuggucaucacagcuaga

SEQ ID NO: 29864 - RNA, 22 nt, Homo sapiens
uuauggccauucuuguaggagu

SEQ ID NO: 29865 - RNA, 22 nt, Homo sapiens
ucaaauguuuguuuaaggcuua

SEQ ID NO: 29866 - RNA, 22 nt, Homo sapiens
uucccagugccaggcacuggga

SEQ ID NO: 29867 - RNA, 22 nt, Homo sapiens
auagcauaucccacaugucaga

SEQ ID NO: 29868 - RNA, 22 nt, Homo sapiens
aaggagcuaagagaucauacau

SEQ ID NO: 29869 - RNA, 22 nt, Homo sapiens
uggaacacauaaauagcauagu

SEQ ID NO: 29870 - RNA, 22 nt, Homo sapiens
uuggaaaugguaaaggguuaau

SEQ ID NO: 29871 - RNA, 22 nt, Homo sapiens
uggaagauggaguuuuaucauu

SEQ ID NO: 29872 - RNA, 22 nt, Homo sapiens
uagcaggaaaggggucagaucu

SEQ ID NO: 29873 - RNA, 22 nt, Homo sapiens
auaugcuuauuagcaagaaaua

SEQ ID NO: 29874 - RNA, 22 nt, Homo sapiens
guggaagaccagacuuuccaac

SEQ ID NO: 29875 - RNA, 22 nt, Homo sapiens
auccauugucuaaugcuaagau

SEQ ID NO: 29876 - RNA, 22 nt, Homo sapiens
cugagugcaagugauccuccca

SEQ ID NO: 29877 - RNA, 22 nt, Homo sapiens
uugagauggagucucgcucuuu

SEQ ID NO: 29878 - RNA, 22 nt, Homo sapiens
agaauguuuuagaccaauacaa

SEQ ID NO: 29879 - RNA, 22 nt, Homo sapiens
aucccuagaaaaaucagcacau

SEQ ID NO: 29880 - RNA, 22 nt, Homo sapiens
uuugugaggugauggauauguc

SEQ ID NO: 29881 - RNA, 22 nt, Homo sapiens
cucaguagaaaauacauggacu

SEQ ID NO: 29882 - RNA, 22 nt, Homo sapiens
gaauaaacuagagaggacugag

SEQ ID NO: 29883 - RNA, 22 nt, Homo sapiens
ugagaucagaaggauuucucug

SEQ ID NO: 29884 - RNA, 22 nt, Homo sapiens
cuggcaguguuucuugugggcu

SEQ ID NO: 29885 - RNA, 22 nt, Homo sapiens
uauuguccacuuugcacugugu

SEQ ID NO: 29886 - RNA, 22 nt, Homo sapiens
auuguacuccagccugggcaag

SEQ ID NO: 29887 - RNA, 19 nt, Homo sapiens
ugcagcaauguaaaagaca

SEQ ID NO: 29888 - RNA, 22 nt, Homo sapiens
uacaagcaggaaaugguauaug

SEQ ID NO: 29889 - RNA, 22 nt, Homo sapiens
uccagaguggugaugcuggggc

SEQ ID NO: 29890 - RNA, 22 nt, Homo sapiens
cucuuugaguuccuccuggugu

SEQ ID NO: 29891 - RNA, 22 nt, Homo sapiens
ugagcugagaucaugcuauugu

SEQ ID NO: 29892 - RNA, 22 nt, Homo sapiens
uugcuccucugccaggaccugu

SEQ ID NO: 29893 - RNA, 21 nt, Homo sapiens
uuuccuggagcguauggcuuc

SEQ ID NO: 29894 - RNA, 22 nt, Homo sapiens
ugugaaacauggauagaacugg

SEQ ID NO: 29895 - RNA, 17 nt, Homo sapiens
aaguggcuuguucacca

SEQ ID NO: 29896 - RNA, 22 nt, Homo sapiens
ugagauucuuacuccugaguuc

SEQ ID NO: 29897 - RNA, 22 nt, Homo sapiens
gacuugaagaaucuaagggagg

SEQ ID NO: 29898 - RNA, 22 nt, Homo sapiens
gaaacugcauuucuaacaagcu

SEQ ID NO: 29899 - RNA, 22 nt, Homo sapiens
agagaugauuaacauuuuggua

SEQ ID NO: 29900 - RNA, 22 nt, Homo sapiens
ggaaugugugucaugcuuuugc

SEQ ID NO: 29901 - RNA, 22 nt, Homo sapiens
auaucaaggccauuuucuaaau

SEQ ID NO: 29902 - RNA, 22 nt, Homo sapiens
auuggcuuuugaaagucugcga

SEQ ID NO: 29903 - RNA, 22 nt, Homo sapiens
ugagaugaugggauaagagggc

SEQ ID NO: 29904 - RNA, 22 nt, Homo sapiens
ugagaccuuucauuucucagug

SEQ ID NO: 29905 - RNA, 22 nt, Homo sapiens
ugcauggauguuugaacacacu

SEQ ID NO: 29906 - RNA, 22 nt, Homo sapiens
cauugcacuccagccuaggcaa

SEQ ID NO: 29907 - RNA, 22 nt, Homo sapiens
ucucugagaaaaguuucuccca

SEQ ID NO: 29908 - RNA, 22 nt, Homo sapiens
ugugacucuggcacauggugag

SEQ ID NO: 29909 - RNA, 22 nt, Homo sapiens
auugcauaaacacauuucuuau

SEQ ID NO: 29910 - RNA, 22 nt, Homo sapiens
ugccaaaaugggcuuuauaccg

SEQ ID NO: 29911 - RNA, 23 nt, Homo sapiens
agccugguuucccugcuucuccc

SEQ ID NO: 29912 - RNA, 22 nt, Homo sapiens
ugagaugauuuaauggagccca

SEQ ID NO: 29913 - RNA, 22 nt, Homo sapiens
ucucuggauaucuacuuauguu

SEQ ID NO: 29914 - RNA, 22 nt, Homo sapiens
aaccuguaaccauaugaucagu

SEQ ID NO: 29915 - RNA, 22 nt, Homo sapiens
uacaaguauuuuuauuagugcc

SEQ ID NO: 29916 - RNA, 22 nt, Homo sapiens
gaaaacugcuucucuggguuuc

SEQ ID NO: 29917 - RNA, 22 nt, Homo sapiens
uuguuuuggagaugagcuaaaa

SEQ ID NO: 29918 - RNA, 23 nt, Homo sapiens
uguauacacccugugcaucuggg

SEQ ID NO: 29919 - RNA, 22 nt, Homo sapiens
acuggcuuauuucacuuagcau

SEQ ID NO: 29920 - RNA, 22 nt, Homo sapiens
auggagacaaauaaaggagagu

SEQ ID NO: 29921 - RNA, 23 nt, Homo sapiens
uuuggcauuccagaaauuuucau

SEQ ID NO: 29922 - RNA, 22 nt, Homo sapiens
aaucacuuugcuacaaggcagu

SEQ ID NO: 29923 - RNA, 22 nt, Homo sapiens
cucaguguuucagcugcucaga

SEQ ID NO: 29924 - RNA, 22 nt, Homo sapiens
uugcacuccggccuggguaaca

SEQ ID NO: 29925 - RNA, 22 nt, Homo sapiens
uaucaguauggauucauggauu

SEQ ID NO: 29926 - RNA, 22 nt, Homo sapiens
cucauggagaaccucugcuagg

SEQ ID NO: 29927 - RNA, 22 nt, Homo sapiens
uugacuuuuauucacucugcua

SEQ ID NO: 29928 - RNA, 22 nt, Homo sapiens
auggaaacauaagaguauagau

SEQ ID NO: 29929 - RNA, 22 nt, Homo sapiens
uaccacugccgagaaaacagau

SEQ ID NO: 29930 - RNA, 22 nt, Homo sapiens
cuggaauauuagcuggucuuaa

SEQ ID NO: 29931 - RNA, 22 nt, Homo sapiens
ugagcugagauuaagcugcugc

SEQ ID NO: 29932 - RNA, 22 nt, Homo sapiens
ugaauagacacuaaagacugua

SEQ ID NO: 29933 - RNA, 22 nt, Homo sapiens
ucacaauucucaauuugugaaa

SEQ ID NO: 29934 - RNA, 22 nt, Homo sapiens
cauugcacuccagccuggccaa

SEQ ID NO: 29935 - RNA, 22 nt, Homo sapiens
uacagucauaaugccuagugac

SEQ ID NO: 29936 - RNA, 22 nt, Homo sapiens
cauggcuuuuauaacaagaaau

SEQ ID NO: 29937 - RNA, 22 nt, Homo sapiens
uuucuacagggcuugccaggua

SEQ ID NO: 29938 - RNA, 22 nt, Homo sapiens
uugagauguaguuucacuccug

SEQ ID NO: 29939 - RNA, 22 nt, Homo sapiens
cucagugucuggggccccaggg

SEQ ID NO: 29940 - RNA, 22 nt, Homo sapiens
ggcaagaacuucacucacuuuu

SEQ ID NO: 29941 - RNA, 22 nt, Homo sapiens
aaugcuguucuuugcuuaaguu

SEQ ID NO: 29942 - RNA, 22 nt, Homo sapiens
uuggacuucucaaggcaauaaa

SEQ ID NO: 29943 - RNA, 22 nt, Homo sapiens
cauugcacuccagcuugggcga

SEQ ID NO: 29944 - RNA, 22 nt, Homo sapiens
ugugucuccugaaaauucacau

SEQ ID NO: 29945 - RNA, 22 nt, Homo sapiens
auguccauggaaucuguagcaa

SEQ ID NO: 29946 - RNA, 22 nt, Homo sapiens
uuggucaucucccuccuuuuag

SEQ ID NO: 29947 - RNA, 22 nt, Homo sapiens
uuaccugagaaggugacauuug

SEQ ID NO: 29948 - RNA, 22 nt, Homo sapiens
ugagaugauagauauguuaauu

SEQ ID NO: 29949 - RNA, 22 nt, Homo sapiens
agacaagauggcuugagguuca

SEQ ID NO: 29950 - RNA, 22 nt, Homo sapiens
agaaugugaccuuauuuggaga

SEQ ID NO: 29951 - RNA, 22 nt, Homo sapiens
uucuuuggaaacaguacuaauu

SEQ ID NO: 29952 - RNA, 23 nt, Homo sapiens
aaagacuagucaggugcaguggu

SEQ ID NO: 29953 - RNA, 18 nt, Homo sapiens
ugaaacacauuuuuuccu

SEQ ID NO: 29954 - RNA, 22 nt, Homo sapiens
ucagagucuagaucacucacug

SEQ ID NO: 29955 - RNA, 22 nt, Homo sapiens
uuggaaacgucaccuuuuccuu

SEQ ID NO: 29956 - RNA, 22 nt, Homo sapiens
acacuuucuagacaagggaaua

SEQ ID NO: 29957 - RNA, 22 nt, Homo sapiens
cauuaguugaagugcagggaga

SEQ ID NO: 29958 - RNA, 19 nt, Homo sapiens
uagguacauucaagucucc

SEQ ID NO: 29959 - RNA, 22 nt, Homo sapiens
aaaguucugcguuagggcuaaa

SEQ ID NO: 29960 - RNA, 22 nt, Homo sapiens
ugauuuguuuagugccaaguuu

SEQ ID NO: 29961 - RNA, 22 nt, Homo sapiens
uugagauggaaucucgcuuugu

SEQ ID NO: 29962 - RNA, 18 nt, Homo sapiens
auucuacaggccuuuuga

SEQ ID NO: 29963 - RNA, 23 nt, Homo sapiens
caugaacuaguuugcagccauga

SEQ ID NO: 29964 - RNA, 22 nt, Homo sapiens
aauggcuuucagcuuuucccca

SEQ ID NO: 29965 - RNA, 22 nt, Homo sapiens
gucagugugauaucugcagggg

SEQ ID NO: 29966 - RNA, 22 nt, Homo sapiens
uuccugagccuuguaucuagua

SEQ ID NO: 29967 - RNA, 22 nt, Homo sapiens
agagaugaagauggggcucccg

SEQ ID NO: 29968 - RNA, 22 nt, Homo sapiens
gcugaaauguuuaauuugggag

SEQ ID NO: 29969 - RNA, 22 nt, Homo sapiens
gucuuuaguugaaacauguggu

SEQ ID NO: 29970 - RNA, 21 nt, Homo sapiens
uuaaguaauuacccaacucuc

SEQ ID NO: 29971 - RNA, 22 nt, Homo sapiens
uggccuguaacgcugucucagc

SEQ ID NO: 29972 - RNA, 22 nt, Homo sapiens
guggcagugugaggauccugcu

SEQ ID NO: 29973 - RNA, 22 nt, Homo sapiens
guccaguacucuuuccugaaaa

SEQ ID NO: 29974 - RNA, 22 nt, Homo sapiens
aggugguuuuaggcagagacau

SEQ ID NO: 29975 - RNA, 22 nt, Homo sapiens
ugagcucagcuaguugaggugu

SEQ ID NO: 29976 - RNA, 22 nt, Homo sapiens
uauggcuuuucacuuaaguccu

SEQ ID NO: 29977 - RNA, 22 nt, Homo sapiens
gucuguuuggggaccuguggcc

SEQ ID NO: 29978 - RNA, 22 nt, Homo sapiens
aaguuaauguuuaagacuccua

SEQ ID NO: 29979 - RNA, 22 nt, Homo sapiens
uugagcaaaacauuaauauuag

SEQ ID NO: 29980 - RNA, 22 nt, Homo sapiens
uucuguguuuaggucacggcua

SEQ ID NO: 29981 - RNA, 22 nt, Homo sapiens
augacuuuucugaaaaccacca

SEQ ID NO: 29982 - RNA, 22 nt, Homo sapiens
guggaauggaaugauuguguau

SEQ ID NO: 29983 - RNA, 22 nt, Homo sapiens
uaagugcaugauuacaugcaua

SEQ ID NO: 29984 - RNA, 22 nt, Homo sapiens
auuguacuccagccugggcagc

SEQ ID NO: 29985 - RNA, 22 nt, Homo sapiens
uuaaguaaucagagaagagaac

SEQ ID NO: 29986 - RNA, 21 nt, Homo sapiens
uucaucuggccguauuccagg

SEQ ID NO: 29987 - RNA, 22 nt, Homo sapiens
cauugcacucuagccucggcaa

SEQ ID NO: 29988 - RNA, 22 nt, Homo sapiens
auggcucuuauuauuugaggua

SEQ ID NO: 29989 - RNA, 22 nt, Homo sapiens
cugucuagagggcacaugaugc

SEQ ID NO: 29990 - RNA, 22 nt, Homo sapiens
augaacagagccuugagaaccu

SEQ ID NO: 29991 - RNA, 22 nt, Homo sapiens
aauggcuuuuaauauccauaau

SEQ ID NO: 29992 - RNA, 22 nt, Homo sapiens
aacagacugucacauaaaauug

SEQ ID NO: 29993 - RNA, 22 nt, Homo sapiens
uauuugguuggugcaaaaguaa

SEQ ID NO: 29994 - RNA, 22 nt, Homo sapiens
gucagugucuuugcagcucaga

SEQ ID NO: 29995 - RNA, 22 nt, Homo sapiens
ugagcccauuguccugguuuau

SEQ ID NO: 29996 - RNA, 22 nt, Homo sapiens
ugagguagaggugaacuugacc

SEQ ID NO: 29997 - RNA, 21 nt, Homo sapiens
auuccacuuuuccuucaggga

SEQ ID NO: 29998 - RNA, 22 nt, Homo sapiens
gaaagauuuccugagcuagaaa

SEQ ID NO: 29999 - RNA, 22 nt, Homo sapiens
gucuuuggaaaaaaugucuguu

SEQ ID NO: 30000 - RNA, 22 nt, Homo sapiens
cauugcacuccagccuagccaa

SEQ ID NO: 30001 - RNA, 22 nt, Homo sapiens
guucucacuggacugugaaaau

SEQ ID NO: 30002 - RNA, 22 nt, Homo sapiens
ucuuuguuggaguccaaggaua

SEQ ID NO: 30003 - RNA, 22 nt, Homo sapiens
uguauguuguaagacuuagacc

SEQ ID NO: 30004 - RNA, 22 nt, Homo sapiens
ucaguagcaugaaaacagacua

SEQ ID NO: 30005 - RNA, 22 nt, Homo sapiens
ugaaacacacauugcccuuuau

SEQ ID NO: 30006 - RNA, 22 nt, Homo sapiens
uugaggcaaugaggagaagcug

SEQ ID NO: 30007 - RNA, 22 nt, Homo sapiens
augaagcuagcugauugcugau

SEQ ID NO: 30008 - RNA, 22 nt, Homo sapiens
ugagcaagaucuuuauaauuag

SEQ ID NO: 30009 - RNA, 22 nt, Homo sapiens
ugagcugagacaauaaguuuuu

SEQ ID NO: 30010 - RNA, 22 nt, Homo sapiens
uacacagucaaaaauuuccagg

SEQ ID NO: 30011 - RNA, 22 nt, Homo sapiens
ugagaugagaaucaguucuaau

SEQ ID NO: 30012 - RNA, 22 nt, Homo sapiens
ugagaugagggcugcacucaaa

SEQ ID NO: 30013 - RNA, 22 nt, Homo sapiens
cauugcacuccagccugccugg

SEQ ID NO: 30014 - RNA, 22 nt, Homo sapiens
gaugauguugaauguucucacc

SEQ ID NO: 30015 - RNA, 22 nt, Homo sapiens
ugagaugaucaaaguauaggcu

SEQ ID NO: 30016 - RNA, 22 nt, Homo sapiens
auugcacuccagccuggcaaua

SEQ ID NO: 30017 - RNA, 22 nt, Homo sapiens
aagugguuuuuacaaagacaga

SEQ ID NO: 30018 - RNA, 22 nt, Homo sapiens
augaugcugagguuugggguau

SEQ ID NO: 30019 - RNA, 22 nt, Homo sapiens
aagugucuuaccgggagggagu

SEQ ID NO: 30020 - RNA, 22 nt, Homo sapiens
uucagauugcauaccgaaagua

SEQ ID NO: 30021 - RNA, 22 nt, Homo sapiens
ugagaucacuaagagguaaugg

SEQ ID NO: 30022 - RNA, 22 nt, Homo sapiens
ugugagacugguucugaaccca

SEQ ID NO: 30023 - RNA, 22 nt, Homo sapiens
uauugcaauuggcagagugcua

SEQ ID NO: 30024 - RNA, 20 nt, Homo sapiens
ucaaagacauggcugucaga

SEQ ID NO: 30025 - RNA, 22 nt, Homo sapiens
ucuuuggugaauggucauccag

SEQ ID NO: 30026 - RNA, 22 nt, Homo sapiens
cucaguguucccauucuaccuu

SEQ ID NO: 30027 - RNA, 22 nt, Homo sapiens
cauggcuuuauuuucagcuucu

SEQ ID NO: 30028 - RNA, 22 nt, Homo sapiens
augaggcaggaaaggcguaucu

SEQ ID NO: 30029 - RNA, 22 nt, Homo sapiens
ugucucaguucccuucucugga

SEQ ID NO: 30030 - RNA, 22 nt, Homo sapiens
ccauugaacaugaaggaaugug

SEQ ID NO: 30031 - RNA, 22 nt, Homo sapiens
cuuugguucuguuuauaugcug

SEQ ID NO: 30032 - RNA, 22 nt, Homo sapiens
uuggagugugcucauaacugcu

SEQ ID NO: 30033 - RNA, 22 nt, Homo sapiens
cugagcucauuucuuuugcuac

SEQ ID NO: 30034 - RNA, 22 nt, Homo sapiens
guauacaugucaaaacucacau

SEQ ID NO: 30035 - RNA, 19 nt, Homo sapiens
uggaacugauucaguucug

SEQ ID NO: 30036 - RNA, 23 nt, Homo sapiens
augugugcuuggagagcaggaug

SEQ ID NO: 30037 - RNA, 22 nt, Homo sapiens
aauaucacaguggguguacacc

SEQ ID NO: 30038 - RNA, 22 nt, Homo sapiens
uuccagcugggggcaacucugc

SEQ ID NO: 30039 - RNA, 21 nt, Homo sapiens
acaucagaguugugaagguag

SEQ ID NO: 30040 - RNA, 22 nt, Homo sapiens
agaagaacauagggugacugaa

SEQ ID NO: 30041 - RNA, 22 nt, Homo sapiens
uacccucuggauacccuuguuc

SEQ ID NO: 30042 - RNA, 22 nt, Homo sapiens
auaaagacacuuggcaugauuu

SEQ ID NO: 30043 - RNA, 22 nt, Homo sapiens
guggaaugcaguguugauucaa

SEQ ID NO: 30044 - RNA, 18 nt, Homo sapiens
acauucagcuugaagaua

SEQ ID NO: 30045 - RNA, 22 nt, Homo sapiens
aucgcacuccauccugggcaac

SEQ ID NO: 30046 - RNA, 22 nt, Homo sapiens
auaaauaguaguugugguggcc

SEQ ID NO: 30047 - RNA, 22 nt, Homo sapiens
uggaagauucuagaagauucca

SEQ ID NO: 30048 - RNA, 22 nt, Homo sapiens
ugagaugagagaaugcuugccu

SEQ ID NO: 30049 - RNA, 22 nt, Homo sapiens
cuucaucugguuugugaacuuu

SEQ ID NO: 30050 - RNA, 23 nt, Homo sapiens
ggaaacauccagucuuucaccau

SEQ ID NO: 30051 - RNA, 22 nt, Homo sapiens
gcauaaagcuaauaagacgaag

SEQ ID NO: 30052 - RNA, 22 nt, Homo sapiens
aucacuuugcucuccagugugg

SEQ ID NO: 30053 - RNA, 22 nt, Homo sapiens
uuaauagugacucauuuuccac

SEQ ID NO: 30054 - RNA, 22 nt, Homo sapiens
uugaguccauucgaugcugauu

SEQ ID NO: 30055 - RNA, 22 nt, Homo sapiens
uugcacuauuaguauagauguc

SEQ ID NO: 30056 - RNA, 22 nt, Homo sapiens
uaagacugccccagacagcaag

SEQ ID NO: 30057 - RNA, 22 nt, Homo sapiens
gucucugguugcuuuuguacca

SEQ ID NO: 30058 - RNA, 22 nt, Homo sapiens
uuugcuuguguaaaaaucugga

SEQ ID NO: 30059 - RNA, 22 nt, Homo sapiens
uucccuguaucuucugccaugu

SEQ ID NO: 30060 - RNA, 22 nt, Homo sapiens
agagaccuguaaaguucaggca

SEQ ID NO: 30061 - RNA, 21 nt, Homo sapiens
ugcaagaaucaggaagcugcc

SEQ ID NO: 30062 - RNA, 22 nt, Homo sapiens
cucaguguuaaggccaccucug

SEQ ID NO: 30063 - RNA, 22 nt, Homo sapiens
auugcacuccagccugggcuag

SEQ ID NO: 30064 - RNA, 22 nt, Homo sapiens
ugagaucugauaggccuggguu

SEQ ID NO: 30065 - RNA, 22 nt, Homo sapiens
guggaaaucucugugugacuua

SEQ ID NO: 30066 - RNA, 20 nt, Homo sapiens
cauugcacuccagccugcug

SEQ ID NO: 30067 - RNA, 22 nt, Homo sapiens
ugagcuguuugaagaagcauuu

SEQ ID NO: 30068 - RNA, 22 nt, Homo sapiens
ugcucaguuuaaaacuuuugag

SEQ ID NO: 30069 - RNA, 22 nt, Homo sapiens
caguuacuugacacaaccaauu

SEQ ID NO: 30070 - RNA, 22 nt, Homo sapiens
aagagaugaagguccugacugu

SEQ ID NO: 30071 - RNA, 20 nt, Homo sapiens
uaugacaaagccuagugagu

SEQ ID NO: 30072 - RNA, 22 nt, Homo sapiens
auggcucuguuccaugugucuu

SEQ ID NO: 30073 - RNA, 22 nt, Homo sapiens
acauucagcuguuguuucaaug

SEQ ID NO: 30074 - RNA, 22 nt, Homo sapiens
uuaaaaguauaggccuggcaua

SEQ ID NO: 30075 - RNA, 22 nt, Homo sapiens
gcugcuuuugaugacaaaaaca

SEQ ID NO: 30076 - RNA, 22 nt, Homo sapiens
uaugagacugguuaauuuuugu

SEQ ID NO: 30077 - RNA, 17 nt, Homo sapiens
acagugucuaugaaaug

SEQ ID NO: 30078 - RNA, 22 nt, Homo sapiens
gucagugucuuaacagagauua

SEQ ID NO: 30079 - RNA, 22 nt, Homo sapiens
acaaagugccuccuuuuagagu

SEQ ID NO: 30080 - RNA, 22 nt, Homo sapiens
uucuacaugggucgucggugag

SEQ ID NO: 30081 - RNA, 22 nt, Homo sapiens
guggcaguuuuaaauaugaaaa

SEQ ID NO: 30082 - RNA, 22 nt, Homo sapiens
ugacaagagaccccuccgcagg

SEQ ID NO: 30083 - RNA, 22 nt, Homo sapiens
augugcaaagcacuguucagca

SEQ ID NO: 30084 - RNA, 20 nt, Homo sapiens
uugaggucaggaguuuggga

SEQ ID NO: 30085 - RNA, 22 nt, Homo sapiens
uucaguagucuccauagaaccg

SEQ ID NO: 30086 - RNA, 22 nt, Homo sapiens
cacuguggauggaacuauguga

SEQ ID NO: 30087 - RNA, 22 nt, Homo sapiens
uugcacauguugaaccagcaaa

SEQ ID NO: 30088 - RNA, 22 nt, Homo sapiens
guggaaugaaaacucucucaca

SEQ ID NO: 30089 - RNA, 22 nt, Homo sapiens
ucuaaguaguagcuggucagaa

SEQ ID NO: 30090 - RNA, 22 nt, Homo sapiens
ugacaagaaagcgucuucuuuu

SEQ ID NO: 30091 - RNA, 18 nt, Homo sapiens
uguggcuguuuuccaaua

SEQ ID NO: 30092 - RNA, 22 nt, Homo sapiens
ugagaugaagugauguaaaaca

SEQ ID NO: 30093 - RNA, 18 nt, Homo sapiens
aaacugcuuccuuggccu

SEQ ID NO: 30094 - RNA, 22 nt, Homo sapiens
gcuuuguuaaaacacagccaca

SEQ ID NO: 30095 - RNA, 22 nt, Homo sapiens
aucauauccuagauauaacuuc

SEQ ID NO: 30096 - RNA, 22 nt, Homo sapiens
augaggcacugcgcccuacuga

SEQ ID NO: 30097 - RNA, 22 nt, Homo sapiens
cugggaugugacuguugccccc

SEQ ID NO: 30098 - RNA, 22 nt, Homo sapiens
guguuauugagaaauagggugu

SEQ ID NO: 30099 - RNA, 22 nt, Homo sapiens
uagacaacugaaacacugugca

SEQ ID NO: 30100 - RNA, 22 nt, Homo sapiens
uuggaaauguguuugcauucag

SEQ ID NO: 30101 - RNA, 22 nt, Homo sapiens
acauaaagaagcaggacauugu

SEQ ID NO: 30102 - RNA, 22 nt, Homo sapiens
gugugacuagucaugccugaau

SEQ ID NO: 30103 - RNA, 22 nt, Homo sapiens
uugcauauucucugaggcagga

SEQ ID NO: 30104 - RNA, 22 nt, Homo sapiens
uucauaguguuuccuuccagug

SEQ ID NO: 30105 - RNA, 22 nt, Homo sapiens
uacaccauuugauucuuuaagc

SEQ ID NO: 30106 - RNA, 22 nt, Homo sapiens
uuauugcacuccagccugggua

SEQ ID NO: 30107 - RNA, 19 nt, Homo sapiens
uuccugagaacaagggcuu

SEQ ID NO: 30108 - RNA, 22 nt, Homo sapiens
uuaacacugccauugauacugu

SEQ ID NO: 30109 - RNA, 22 nt, Homo sapiens
ucacuuugacggccaacuucua

SEQ ID NO: 30110 - RNA, 22 nt, Homo sapiens
agugcaauggugccaucauagc

SEQ ID NO: 30111 - RNA, 22 nt, Homo sapiens
aggcaugaaauacaugcauuga

SEQ ID NO: 30112 - RNA, 22 nt, Homo sapiens
augcaacuugaaauuuuccgga

SEQ ID NO: 30113 - RNA, 22 nt, Homo sapiens
acacacgugcauguaugcguau

SEQ ID NO: 30114 - RNA, 18 nt, Homo sapiens
ggaaaacuuuucuaagua

SEQ ID NO: 30115 - RNA, 22 nt, Homo sapiens
uggaagaugggaccucaguuuu

SEQ ID NO: 30116 - RNA, 22 nt, Homo sapiens
uuuugcaaauuccaguggccau

SEQ ID NO: 30117 - RNA, 22 nt, Homo sapiens
cuauaacagugugguuuggaga

SEQ ID NO: 30118 - RNA, 22 nt, Homo sapiens
aaguaaacauuuuguacaauaa

SEQ ID NO: 30119 - RNA, 22 nt, Homo sapiens
ggacaagaucuuccaccauuca

SEQ ID NO: 30120 - RNA, 22 nt, Homo sapiens
aaauaguagcugaaugagggaa

SEQ ID NO: 30121 - RNA, 22 nt, Homo sapiens
aucuuuggugcaugauacuuug

SEQ ID NO: 30122 - RNA, 22 nt, Homo sapiens
uaaguauagguaacagaagcaa

SEQ ID NO: 30123 - RNA, 22 nt, Homo sapiens
cuuugguuaauaggauauggca

SEQ ID NO: 30124 - RNA, 22 nt, Homo sapiens
auuucuacuccuguguccagaa

SEQ ID NO: 30125 - RNA, 22 nt, Homo sapiens
auucuauaguccuaggauuggg

SEQ ID NO: 30126 - RNA, 21 nt, Homo sapiens
ugaaugcuuuaaauauuagaa

SEQ ID NO: 30127 - RNA, 22 nt, Homo sapiens
uuugacaaugugugcuuguauu

SEQ ID NO: 30128 - RNA, 22 nt, Homo sapiens
uguaacaggaggaaaaugugaa

SEQ ID NO: 30129 - RNA, 22 nt, Homo sapiens
guaaucucagcuacucaggagg

SEQ ID NO: 30130 - RNA, 22 nt, Homo sapiens
acccuguaggacuauucuaauc

SEQ ID NO: 30131 - RNA, 22 nt, Homo sapiens
gucuguuugauccagaucaaaa

SEQ ID NO: 30132 - RNA, 22 nt, Homo sapiens
cauugcacuccagcucugggcg

SEQ ID NO: 30133 - RNA, 22 nt, Homo sapiens
uuacacaguaggucccuaguaa

SEQ ID NO: 30134 - RNA, 22 nt, Homo sapiens
guaaagacacaugcacacguau

SEQ ID NO: 30135 - RNA, 22 nt, Homo sapiens
ugagaugaggucucgcucuguc

SEQ ID NO: 30136 - RNA, 22 nt, Homo sapiens
cauugcacugcauucugggcaa

SEQ ID NO: 30137 - RNA, 22 nt, Homo sapiens
gggaaauguaaagucauaagau

SEQ ID NO: 30138 - RNA, 22 nt, Homo sapiens
ucaagugcauugauucaguauu

SEQ ID NO: 30139 - RNA, 22 nt, Homo sapiens
gcugagaucucuugccugaacu

SEQ ID NO: 30140 - RNA, 22 nt, Homo sapiens
aucauccagccccagaagggag

SEQ ID NO: 30141 - RNA, 22 nt, Homo sapiens
gagaucauguacuagaacaccu

SEQ ID NO: 30142 - RNA, 22 nt, Homo sapiens
auugcacuccacccugggcaac

SEQ ID NO: 30143 - RNA, 22 nt, Homo sapiens
cauugcacuccagccugcugac

SEQ ID NO: 30144 - RNA, 22 nt, Homo sapiens
uaaguacuuuacagacauuauc

SEQ ID NO: 30145 - RNA, 22 nt, Homo sapiens
uuggaaacauuuaugguaacag

SEQ ID NO: 30146 - RNA, 22 nt, Homo sapiens
ucucuugguugaacaguuugga

SEQ ID NO: 30147 - RNA, 19 nt, Homo sapiens
ugugaacaucacagagugu

SEQ ID NO: 30148 - RNA, 23 nt, Homo sapiens
ucacacuuaagagaaaugcagcu

SEQ ID NO: 30149 - RNA, 19 nt, Homo sapiens
cucuuuggugucucuucuu

SEQ ID NO: 30150 - RNA, 22 nt, Homo sapiens
uucuaugguuuuuaugguguua

SEQ ID NO: 30151 - RNA, 22 nt, Homo sapiens
auagcagaagaagggacaauuc

SEQ ID NO: 30152 - RNA, 17 nt, Homo sapiens
gucuuugguugaguuua

SEQ ID NO: 30153 - RNA, 22 nt, Homo sapiens
uauggcuucuuuaaauugaggu

SEQ ID NO: 30154 - RNA, 22 nt, Homo sapiens
uucagugucauuaacacaguag

SEQ ID NO: 30155 - RNA, 22 nt, Homo sapiens
aggaagugugcaauuaauuucu

SEQ ID NO: 30156 - RNA, 22 nt, Homo sapiens
cugugcauguuguccaauucuu

SEQ ID NO: 30157 - RNA, 22 nt, Homo sapiens
aaaagcauucagagugcugggc

SEQ ID NO: 30158 - RNA, 22 nt, Homo sapiens
augugcaagaucauuaaagcuc

SEQ ID NO: 30159 - RNA, 22 nt, Homo sapiens
auggaacauuauagauguaaaa

SEQ ID NO: 30160 - RNA, 20 nt, Homo sapiens
aucucugggcaaaggaaaau

SEQ ID NO: 30161 - RNA, 22 nt, Homo sapiens
ugagaugaaagcagaaagacuu

SEQ ID NO: 30162 - RNA, 22 nt, Homo sapiens
uauggccuuuuuaaugauauug

SEQ ID NO: 30163 - RNA, 22 nt, Homo sapiens
augaucacuguggaaauucagc

SEQ ID NO: 30164 - RNA, 22 nt, Homo sapiens
ugagaugagggaagccuaggca

SEQ ID NO: 30165 - RNA, 21 nt, Homo sapiens
uuaucccagugucucugcagg

SEQ ID NO: 30166 - RNA, 22 nt, Homo sapiens
aagugaguaauacgucaguugu

SEQ ID NO: 30167 - RNA, 22 nt, Homo sapiens
uugacauguaaguacucuauag

SEQ ID NO: 30168 - RNA, 22 nt, Homo sapiens
ggaucacuugagaccaggaguu

SEQ ID NO: 30169 - RNA, 21 nt, Homo sapiens
ucagaagcucccagggaggac

SEQ ID NO: 30170 - RNA, 22 nt, Homo sapiens
uccauuugucuauguuucuguu

SEQ ID NO: 30171 - RNA, 22 nt, Homo sapiens
gacaagagaacacugcuauauu

SEQ ID NO: 30172 - RNA, 22 nt, Homo sapiens
ucauauugcgguucauugacuu

SEQ ID NO: 30173 - RNA, 22 nt, Homo sapiens
acacuuucuggagcugcacaua

SEQ ID NO: 30174 - RNA, 22 nt, Homo sapiens
cauugcacuccagucugggcaa

SEQ ID NO: 30175 - RNA, 22 nt, Homo sapiens
uuuugcaguuacagagagugag

SEQ ID NO: 30176 - RNA, 22 nt, Homo sapiens
uggcuuuguaagguuucauuuu

SEQ ID NO: 30177 - RNA, 22 nt, Homo sapiens
cauugcacugcagcccgggcaa

SEQ ID NO: 30178 - RNA, 22 nt, Homo sapiens
uucaaaaccucugcuuaagccc

SEQ ID NO: 30179 - RNA, 22 nt, Homo sapiens
uggcagaugcucuuggugccca

SEQ ID NO: 30180 - RNA, 19 nt, Homo sapiens
cauugcacuccacccuggg

SEQ ID NO: 30181 - RNA, 22 nt, Homo sapiens
uuuucaguggccauaguggaga

SEQ ID NO: 30182 - RNA, 22 nt, Homo sapiens
uuuucaguuuuccagguagccg

SEQ ID NO: 30183 - RNA, 22 nt, Homo sapiens
uuugguguauaaaaaugcuagu

SEQ ID NO: 30184 - RNA, 22 nt, Homo sapiens
uuugguguauauguaaacuaug

SEQ ID NO: 30185 - RNA, 22 nt, Homo sapiens
uuugguuauauauauacacucu

SEQ ID NO: 30186 - RNA, 22 nt, Homo sapiens
uuugguugccucuaugagccug

SEQ ID NO: 30187 - RNA, 22 nt, Homo sapiens
uuuggguuuuauguaacagcua

SEQ ID NO: 30188 - RNA, 22 nt, Homo sapiens
uuugggccaugguuuguguaua

SEQ ID NO: 30189 - RNA, 21 nt, Homo sapiens
uuuggcauuaugucaccagag

SEQ ID NO: 30190 - RNA, 22 nt, Homo sapiens
uuuguuugaagucgagacaacu

SEQ ID NO: 30191 - RNA, 22 nt, Homo sapiens
uuugugcuccuguugagaaucu

SEQ ID NO: 30192 - RNA, 22 nt, Homo sapiens
uuuguccccgcccagaucucau

SEQ ID NO: 30193 - RNA, 19 nt, Homo sapiens
uuuguccugcccuuucuca

SEQ ID NO: 30194 - RNA, 22 nt, Homo sapiens
uuguuuuggagaugagcuaaaa

SEQ ID NO: 30195 - RNA, 22 nt, Homo sapiens
uuucaguguggcaggcauagcu

SEQ ID NO: 30196 - RNA, 22 nt, Homo sapiens
uugugcuugauuugccuagcug

SEQ ID NO: 30197 - RNA, 22 nt, Homo sapiens
uuggauccauccugucuucucu

SEQ ID NO: 30198 - RNA, 22 nt, Homo sapiens
uuggccagugucuuuuuuuccu

SEQ ID NO: 30199 - RNA, 22 nt, Homo sapiens
uuggcucuggcugggcuccagc

SEQ ID NO: 30200 - RNA, 22 nt, Homo sapiens
uuggccgugucauuugcuuuga

SEQ ID NO: 30201 - RNA, 22 nt, Homo sapiens
uuguaccacagggcaugaagug

SEQ ID NO: 30202 - RNA, 22 nt, Homo sapiens
uugaguuuaucuaaagaccugg

SEQ ID NO: 30203 - RNA, 22 nt, Homo sapiens
uucugugcuuguggaugaagug

SEQ ID NO: 30204 - RNA, 19 nt, Homo sapiens
uugcauauguugaaccagg

SEQ ID NO: 30205 - RNA, 22 nt, Homo sapiens
uugcauauguugaaccagccuu

SEQ ID NO: 30206 - RNA, 22 nt, Homo sapiens
uugauguugaggacauaaaccu

SEQ ID NO: 30207 - RNA, 22 nt, Homo sapiens
uugcauugacacaugaagcuca

SEQ ID NO: 30208 - RNA, 22 nt, Homo sapiens
uugcauuguacuugguacggcu

SEQ ID NO: 30209 - RNA, 22 nt, Homo sapiens
uguggcuucuuugguucaguau

SEQ ID NO: 30210 - RNA, 22 nt, Homo sapiens
uguggcuuuuucuuggcugagg

SEQ ID NO: 30211 - RNA, 22 nt, Homo sapiens
uguguuugauaaguccauaguu

SEQ ID NO: 30212 - RNA, 22 nt, Homo sapiens
ugugaacaugacagugggcuag

SEQ ID NO: 30213 - RNA, 22 nt, Homo sapiens
ugugaacagcagcugggcuuug

SEQ ID NO: 30214 - RNA, 21 nt, Homo sapiens
ugugaacauguuggguggcau

SEQ ID NO: 30215 - RNA, 22 nt, Homo sapiens
ugguccccaauacuucuauaga

SEQ ID NO: 30216 - RNA, 22 nt, Homo sapiens
ugguccuuuccauuggagacac

SEQ ID NO: 30217 - RNA, 20 nt, Homo sapiens
ugguccccugagucuggcuu

SEQ ID NO: 30218 - RNA, 22 nt, Homo sapiens
uguuugcuuaacguggagccag

SEQ ID NO: 30219 - RNA, 22 nt, Homo sapiens
uguuugcuguuuucuccaauga

SEQ ID NO: 30220 - RNA, 22 nt, Homo sapiens
uguuuguuugauaugggauaaa

SEQ ID NO: 30221 - RNA, 22 nt, Homo sapiens
uguuuguuugugauacgguaca

SEQ ID NO: 30222 - RNA, 18 nt, Homo sapiens
uguugguguucacucacu

SEQ ID NO: 30223 - RNA, 22 nt, Homo sapiens
uuagguauuuuguuaugucagc

SEQ ID NO: 30224 - RNA, 22 nt, Homo sapiens
uuacauguuguggguuguggcc

SEQ ID NO: 30225 - RNA, 22 nt, Homo sapiens
uucaguccauuuccuuggucac

SEQ ID NO: 30226 - RNA, 22 nt, Homo sapiens
uucagugccuggaagucgugcu

SEQ ID NO: 30227 - RNA, 22 nt, Homo sapiens
uucugugcugaaucaaagacug

SEQ ID NO: 30228 - RNA, 22 nt, Homo sapiens
uucuggccuccauuuuucuccu

SEQ ID NO: 30229 - RNA, 22 nt, Homo sapiens
uuccugugacuguguggcaccc

SEQ ID NO: 30230 - RNA, 22 nt, Homo sapiens
uuccaauguuccguguugcagu

SEQ ID NO: 30231 - RNA, 22 nt, Homo sapiens
uuccauaggcuagaucaaccag

SEQ ID NO: 30232 - RNA, 22 nt, Homo sapiens
uuccaguguguucauccucaga

SEQ ID NO: 30233 - RNA, 22 nt, Homo sapiens
uuccuggaggggaaguguccaa

SEQ ID NO: 30234 - RNA, 22 nt, Homo sapiens
uuccugugacccccaagcccac

SEQ ID NO: 30235 - RNA, 18 nt, Homo sapiens
ucccuuuguagaugaccc

SEQ ID NO: 30236 - RNA, 22 nt, Homo sapiens
uccgaguguuagagagcugugu

SEQ ID NO: 30237 - RNA, 22 nt, Homo sapiens
uccucauggagaaccucugcua

SEQ ID NO: 30238 - RNA, 22 nt, Homo sapiens
ucccuguuaggcacagauuuau

SEQ ID NO: 30239 - RNA, 20 nt, Homo sapiens
uccugagauucccaguucuc

SEQ ID NO: 30240 - RNA, 22 nt, Homo sapiens
ucgcauuucccucuguagcuuc

SEQ ID NO: 30241 - RNA, 22 nt, Homo sapiens
ucauugguagcucauggaaccg

SEQ ID NO: 30242 - RNA, 22 nt, Homo sapiens
uccaccgugggcugcggggcuc

SEQ ID NO: 30243 - RNA, 23 nt, Homo sapiens
ucagugucuggauccugcucagu

SEQ ID NO: 30244 - RNA, 22 nt, Homo sapiens
uccccugauaccaaccaccaug

SEQ ID NO: 30245 - RNA, 19 nt, Homo sapiens
uccccgggucuagugcagc

SEQ ID NO: 30246 - RNA, 22 nt, Homo sapiens
uccccugagaccccucagcacu

SEQ ID NO: 30247 - RNA, 22 nt, Homo sapiens
ucccugacagggucugagcuuu

SEQ ID NO: 30248 - RNA, 22 nt, Homo sapiens
uccaaaucucuggcacugggau

SEQ ID NO: 30249 - RNA, 23 nt, Homo sapiens
uccccgggagcaccagcuuguug

SEQ ID NO: 30250 - RNA, 20 nt, Homo sapiens
uccacugagcgucacggcag

SEQ ID NO: 30251 - RNA, 22 nt, Homo sapiens
uccacugagcuagaccacuugg

SEQ ID NO: 30252 - RNA, 22 nt, Homo sapiens
ucagugcgugcauagccuggau

SEQ ID NO: 30253 - RNA, 22 nt, Homo sapiens
ucacaccauucuucuacuucag

SEQ ID NO: 30254 - RNA, 22 nt, Homo sapiens
ucaccuggagacaugaagacug

SEQ ID NO: 30255 - RNA, 22 nt, Homo sapiens
ucaccuggggcacagcugaaga

SEQ ID NO: 30256 - RNA, 21 nt, Homo sapiens
ugaaccccugcucucaagaaa

SEQ ID NO: 30257 - RNA, 20 nt, Homo sapiens
ugacaucagcaauguaauaa

SEQ ID NO: 30258 - RNA, 22 nt, Homo sapiens
ugacauggagguggaggaagau

SEQ ID NO: 30259 - RNA, 21 nt, Homo sapiens
ugagaacaacaggucaagcag

SEQ ID NO: 30260 - RNA, 22 nt, Homo sapiens
ucuuuguucaggagccaacucc

SEQ ID NO: 30261 - RNA, 22 nt, Homo sapiens
ucuuugauuuuguuacuaagac

SEQ ID NO: 30262 - RNA, 22 nt, Homo sapiens
ucuuuggucaucaugggaagca

SEQ ID NO: 30263 - RNA, 22 nt, Homo sapiens
ucuuuggucuacuuucauaugu

SEQ ID NO: 30264 - RNA, 19 nt, Homo sapiens
ucuuugguacgugcuuuga

SEQ ID NO: 30265 - RNA, 22 nt, Homo sapiens
ucuuugguagaagcuauuuuau

SEQ ID NO: 30266 - RNA, 20 nt, Homo sapiens
ucguugguagagagcagggc

SEQ ID NO: 30267 - RNA, 22 nt, Homo sapiens
ucucagcacagucagggcgccu

SEQ ID NO: 30268 - RNA, 18 nt, Homo sapiens
ugggaagaaauucuucuc

SEQ ID NO: 30269 - RNA, 22 nt, Homo sapiens
ugggaccccuacucuuuccaca

SEQ ID NO: 30270 - RNA, 22 nt, Homo sapiens
ugggagugugcacaauuucagc

SEQ ID NO: 30271 - RNA, 22 nt, Homo sapiens
ugggaagcugcugaacuacagu

SEQ ID NO: 30272 - RNA, 22 nt, Homo sapiens
uggccagugucggaggccagga

SEQ ID NO: 30273 - RNA, 22 nt, Homo sapiens
uggcuuuguaagguuucauuuu

SEQ ID NO: 30274 - RNA, 21 nt, Homo sapiens
uggcuguuuucaugcuagaac

SEQ ID NO: 30275 - RNA, 22 nt, Homo sapiens
uggcauggaguggauggcccca

SEQ ID NO: 30276 - RNA, 22 nt, Homo sapiens
uggcauggaacuacuuugaaac

SEQ ID NO: 30277 - RNA, 22 nt, Homo sapiens
uggcaugucguuuuucauagga

SEQ ID NO: 30278 - RNA, 22 nt, Homo sapiens
ugggcaaauugugagggaggua

SEQ ID NO: 30279 - RNA, 22 nt, Homo sapiens
ugggaucuuuccuauuagcgag

SEQ ID NO: 30280 - RNA, 22 nt, Homo sapiens
ugggcggagacgugcagccgcc

SEQ ID NO: 30281 - RNA, 22 nt, Homo sapiens
ugggcaagugacuuggcuucuc

SEQ ID NO: 30282 - RNA, 22 nt, Homo sapiens
ugggccgcugcaggaugguccc

SEQ ID NO: 30283 - RNA, 22 nt, Homo sapiens
uggggucguaggugcccgccag

SEQ ID NO: 30284 - RNA, 22 nt, Homo sapiens
uggguagagcacugggggcgag

SEQ ID NO: 30285 - RNA, 22 nt, Homo sapiens
ugggugugaccgcucaaggggg

SEQ ID NO: 30286 - RNA, 22 nt, Homo sapiens
uggucaaaucugaugugagaaa

SEQ ID NO: 30287 - RNA, 21 nt, Homo sapiens
uggaccccuuccuuacaucau

SEQ ID NO: 30288 - RNA, 21 nt, Homo sapiens
uggaccccuuccuugcaccau

SEQ ID NO: 30289 - RNA, 18 nt, Homo sapiens
uggacagugauuauccau

SEQ ID NO: 30290 - RNA, 21 nt, Homo sapiens
uggaccccuacuucucaccau

SEQ ID NO: 30291 - RNA, 21 nt, Homo sapiens
uggaccccuuccagucaucau

SEQ ID NO: 30292 - RNA, 22 nt, Homo sapiens
uggaacacauaaauagcauagu

SEQ ID NO: 30293 - RNA, 22 nt, Homo sapiens
uggaaauaaaugugccaagauc

SEQ ID NO: 30294 - RNA, 22 nt, Homo sapiens
ugccuacagaaggggcucagca

SEQ ID NO: 30295 - RNA, 21 nt, Homo sapiens
ugcccaguggcuuggggucag

SEQ ID NO: 30296 - RNA, 22 nt, Homo sapiens
ugagacaaucucaucucaguga

SEQ ID NO: 30297 - RNA, 22 nt, Homo sapiens
ugagacggagucucgcucuguc

SEQ ID NO: 30298 - RNA, 22 nt, Homo sapiens
ugagcaaaauuuuggacauaga

SEQ ID NO: 30299 - RNA, 22 nt, Homo sapiens
ugagggcguauccuucauuaag

SEQ ID NO: 30300 - RNA, 20 nt, Homo sapiens
ugagcuuguaaacacuguuu

SEQ ID NO: 30301 - RNA, 22 nt, Homo sapiens
ugagcucaugcauucuugagga

SEQ ID NO: 30302 - RNA, 22 nt, Homo sapiens
ugcauauguucaaaguauucug

SEQ ID NO: 30303 - RNA, 22 nt, Homo sapiens
ugcauaugucuuuauaguagca

SEQ ID NO: 30304 - RNA, 22 nt, Homo sapiens
ugcauauguauacaugugccau

SEQ ID NO: 30305 - RNA, 22 nt, Homo sapiens
ugcauaugucuuuauagcagca

SEQ ID NO: 30306 - RNA, 22 nt, Homo sapiens
ugcauaugcagcauuuaugauu

SEQ ID NO: 30307 - RNA, 22 nt, Homo sapiens
ugcauaucuuguggaauaucuc

SEQ ID NO: 30308 - RNA, 22 nt, Homo sapiens
ugcaguacauucagcauccucu

SEQ ID NO: 30309 - RNA, 23 nt, Homo sapiens
ugauguccacuuagggucuaggu

SEQ ID NO: 30310 - RNA, 22 nt, Homo sapiens
gggguauguaagugagugagug

SEQ ID NO: 30311 - RNA, 19 nt, Homo sapiens
ggucagcaaagucuagcug

SEQ ID NO: 30312 - RNA, 22 nt, Homo sapiens
gguguuccccuuaccucuuggc

SEQ ID NO: 30313 - RNA, 22 nt, Homo sapiens
guaagagcauguaguggcucua

SEQ ID NO: 30314 - RNA, 22 nt, Homo sapiens
guaugguuuauagggaaauugu

SEQ ID NO: 30315 - RNA, 22 nt, Homo sapiens
ggcgguguugauggcccccaca

SEQ ID NO: 30316 - RNA, 22 nt, Homo sapiens
ggcgccauugcacuccagccug

SEQ ID NO: 30317 - RNA, 22 nt, Homo sapiens
ggcccugagacaggaaaaagcu

SEQ ID NO: 30318 - RNA, 22 nt, Homo sapiens
ggcccugauacaaguaaggucu

SEQ ID NO: 30319 - RNA, 22 nt, Homo sapiens
gggcauguggacuuguauguuu

SEQ ID NO: 30320 - RNA, 22 nt, Homo sapiens
ggggaguguggacaucacccug

SEQ ID NO: 30321 - RNA, 22 nt, Homo sapiens
ggcauguguggguuauuaaaga

SEQ ID NO: 30322 - RNA, 22 nt, Homo sapiens
ggcccaguugcgggugguaccg

SEQ ID NO: 30323 - RNA, 17 nt, Homo sapiens
gcccuuugugccucuuc

SEQ ID NO: 30324 - RNA, 22 nt, Homo sapiens
gcggguguuuuacccuugcaga

SEQ ID NO: 30325 - RNA, 22 nt, Homo sapiens
ggaacaccauuuuuccugccuu

SEQ ID NO: 30326 - RNA, 22 nt, Homo sapiens
gcccuuugugucuggcuggggu

SEQ ID NO: 30327 - RNA, 22 nt, Homo sapiens
gccucaguuguggccagggauu

SEQ ID NO: 30328 - RNA, 22 nt, Homo sapiens
gcccuguugcccaggcuggagu

SEQ ID NO: 30329 - RNA, 22 nt, Homo sapiens
gcccagcguucagggaggggcu

SEQ ID NO: 30330 - RNA, 22 nt, Homo sapiens
gcccugagauucuuggauucug

SEQ ID NO: 30331 - RNA, 22 nt, Homo sapiens
ggacaagagacugggacacuga

SEQ ID NO: 30332 - RNA, 22 nt, Homo sapiens
ggagugugauuguucucuguua

SEQ ID NO: 30333 - RNA, 22 nt, Homo sapiens
ggagugucagaaacaguguccu

SEQ ID NO: 30334 - RNA, 22 nt, Homo sapiens
ggagugucugugcuggucaaag

SEQ ID NO: 30335 - RNA, 22 nt, Homo sapiens
guguuugauugcaaauaaucua

SEQ ID NO: 30336 - RNA, 22 nt, Homo sapiens
guguuugguugauagagccacu

SEQ ID NO: 30337 - RNA, 22 nt, Homo sapiens
guucagucacgugcccaaguuc

SEQ ID NO: 30338 - RNA, 22 nt, Homo sapiens
guguaugguuguuguagagaga

SEQ ID NO: 30339 - RNA, 22 nt, Homo sapiens
gugucaguggggagugaucuuc

SEQ ID NO: 30340 - RNA, 18 nt, Homo sapiens
gugucugguuaugggagu

SEQ ID NO: 30341 - RNA, 22 nt, Homo sapiens
guggcagcacauauagguuguu

SEQ ID NO: 30342 - RNA, 22 nt, Homo sapiens
guguaguuugagguaugggggc

SEQ ID NO: 30343 - RNA, 22 nt, Homo sapiens
guggaucacuugagguuagaag

SEQ ID NO: 30344 - RNA, 22 nt, Homo sapiens
guggaauuauagagacaucuug

SEQ ID NO: 30345 - RNA, 22 nt, Homo sapiens
gugauguguuucaacagcuccu

SEQ ID NO: 30346 - RNA, 22 nt, Homo sapiens
gugauugucuaaucaagauaca

SEQ ID NO: 30347 - RNA, 23 nt, Homo sapiens
gugaucauuguuguggguugaau

SEQ ID NO: 30348 - RNA, 22 nt, Homo sapiens
gugagcauuacucaugggauca

SEQ ID NO: 30349 - RNA, 22 nt, Homo sapiens
gugaggucagggcuguggacag

SEQ ID NO: 30350 - RNA, 22 nt, Homo sapiens
guccaguuguuuucugagguug

SEQ ID NO: 30351 - RNA, 22 nt, Homo sapiens
gucccagagauauugugucuuu

SEQ ID NO: 30352 - RNA, 22 nt, Homo sapiens
gucguggagucucuggcuugua

SEQ ID NO: 30353 - RNA, 22 nt, Homo sapiens
gucucacagcuagcugcuuuau

SEQ ID NO: 30354 - RNA, 22 nt, Homo sapiens
guccaaauccaugggauguaca

SEQ ID NO: 30355 - RNA, 22 nt, Homo sapiens
gucaagauuuguaggacagaga

SEQ ID NO: 30356 - RNA, 22 nt, Homo sapiens
uagcacuauguuaucacauacu

SEQ ID NO: 30357 - RNA, 22 nt, Homo sapiens
uacucacauucuguuucuugcu

SEQ ID NO: 30358 - RNA, 22 nt, Homo sapiens
uacuccccuuguucugugagcu

SEQ ID NO: 30359 - RNA, 22 nt, Homo sapiens
uacaccaauuuaaucaaaagca

SEQ ID NO: 30360 - RNA, 19 nt, Homo sapiens
uaaugccacugccuggcau

SEQ ID NO: 30361 - RNA, 22 nt, Homo sapiens
uaaggcuuugcuggacucaguc

SEQ ID NO: 30362 - RNA, 22 nt, Homo sapiens
uaacacccuucuccagguacau

SEQ ID NO: 30363 - RNA, 19 nt, Homo sapiens
guugacacuggcucuucag

SEQ ID NO: 30364 - RNA, 20 nt, Homo sapiens
guugaugcugaaguugcuua

SEQ ID NO: 30365 - RNA, 22 nt, Homo sapiens
uauagcacugaaagaggugauu

SEQ ID NO: 30366 - RNA, 20 nt, Homo sapiens
uagcaggugucaggugauau

SEQ ID NO: 30367 - RNA, 20 nt, Homo sapiens
ucaaagacauggcugucaga

SEQ ID NO: 30368 - RNA, 22 nt, Homo sapiens
uauugcuccuaauaucacggug

SEQ ID NO: 30369 - RNA, 22 nt, Homo sapiens
caugugcaugcuuucuuaugug

SEQ ID NO: 30370 - RNA, 22 nt, Homo sapiens
caugguacugccacagaagagu

SEQ ID NO: 30371 - RNA, 22 nt, Homo sapiens
cauggcccuggguccauaggaa

SEQ ID NO: 30372 - RNA, 22 nt, Homo sapiens
cagccggguggcuccuagggua

SEQ ID NO: 30373 - RNA, 22 nt, Homo sapiens
ccagccgggugcaguggcucac

SEQ ID NO: 30374 - RNA, 22 nt, Homo sapiens
ccagugucugacagacacggcg

SEQ ID NO: 30375 - RNA, 22 nt, Homo sapiens
ccagugguucccuguggccuga

SEQ ID NO: 30376 - RNA, 22 nt, Homo sapiens
ccaguuuucucacuguugcagu

SEQ ID NO: 30377 - RNA, 22 nt, Homo sapiens
cccagcguucggcauggcugag

SEQ ID NO: 30378 - RNA, 22 nt, Homo sapiens
cccagugugcugggugacagcu

SEQ ID NO: 30379 - RNA, 22 nt, Homo sapiens
cccagugguuacauaaggagua

SEQ ID NO: 30380 - RNA, 22 nt, Homo sapiens
ccuguguuaugguuucuaaugu

SEQ ID NO: 30381 - RNA, 22 nt, Homo sapiens
ccuucauccuccagcaggcuag

SEQ ID NO: 30382 - RNA, 22 nt, Homo sapiens
ccugguguuuugauggucgggu

SEQ ID NO: 30383 - RNA, 22 nt, Homo sapiens
cuccuggugauuggagugugaa

SEQ ID NO: 30384 - RNA, 22 nt, Homo sapiens
cucccagagccaguuauaggcu

SEQ ID NO: 30385 - RNA, 22 nt, Homo sapiens
caccugagcgggaugcucgccu

SEQ ID NO: 30386 - RNA, 22 nt, Homo sapiens
cacugggugccauauguuugcu

SEQ ID NO: 30387 - RNA, 22 nt, Homo sapiens
auuugguugggugcgguggcuu

SEQ ID NO: 30388 - RNA, 22 nt, Homo sapiens
cacccagucaucuuggguuuuu

SEQ ID NO: 30389 - RNA, 22 nt, Homo sapiens
auugacacugauuuuucuuuaa

SEQ ID NO: 30390 - RNA, 22 nt, Homo sapiens
augucuguuugcugagcccggc

SEQ ID NO: 30391 - RNA, 22 nt, Homo sapiens
auuggucuauuaaaccuaaguu

SEQ ID NO: 30392 - RNA, 22 nt, Homo sapiens
auuuggguuuuacaucaggcua

SEQ ID NO: 30393 - RNA, 22 nt, Homo sapiens
cuuuuguggaucuucuguugcu

SEQ ID NO: 30394 - RNA, 22 nt, Homo sapiens
cuuuuggucuaucagagaagca

SEQ ID NO: 30395 - RNA, 22 nt, Homo sapiens
gaauaaacuagagaggacugag

SEQ ID NO: 30396 - RNA, 22 nt, Homo sapiens
gaccccuagagauaggaggaac

SEQ ID NO: 30397 - RNA, 22 nt, Homo sapiens
gaccaaagaggcaggcauuaga

SEQ ID NO: 30398 - RNA, 22 nt, Homo sapiens
cucugguggaagcagggggcaa

SEQ ID NO: 30399 - RNA, 22 nt, Homo sapiens
cucuuugaggugagcugcccau

SEQ ID NO: 30400 - RNA, 22 nt, Homo sapiens
cugaaagagcauuugaaugggu

SEQ ID NO: 30401 - RNA, 22 nt, Homo sapiens
cuggcucugagguguuuagggc

SEQ ID NO: 30402 - RNA, 22 nt, Homo sapiens
cuggcgagacagcuccaucacu

SEQ ID NO: 30403 - RNA, 22 nt, Homo sapiens
cuggugugugacuuuucauuau

SEQ ID NO: 30404 - RNA, 22 nt, Homo sapiens
cugggcaaugcggcuggauaga

SEQ ID NO: 30405 - RNA, 22 nt, Homo sapiens
cugggaucaguucuagucagaa

SEQ ID NO: 30406 - RNA, 22 nt, Homo sapiens
cugguuguuacaugcuugccag

SEQ ID NO: 30407 - RNA, 22 nt, Homo sapiens
cugugguguaacucuuggggcg

SEQ ID NO: 30408 - RNA, 18 nt, Homo sapiens
gccaacauguaaacaggu

SEQ ID NO: 30409 - RNA, 22 nt, Homo sapiens
gcaugcauuuuccuaacuagaa

SEQ ID NO: 30410 - RNA, 22 nt, Homo sapiens
gcauggccuuuaaaugucacag

SEQ ID NO: 30411 - RNA, 22 nt, Homo sapiens
gcagucacagggagauggugac

SEQ ID NO: 30412 - RNA, 22 nt, Homo sapiens
gcaacccgucaucuagguuuua

SEQ ID NO: 30413 - RNA, 20 nt, Homo sapiens
gcaacauggccagagugaau

SEQ ID NO: 30414 - RNA, 22 nt, Homo sapiens
gauuugguguucuggcucaaga

SEQ ID NO: 30415 - RNA, 22 nt, Homo sapiens
gagccggugugauggggcuucu

SEQ ID NO: 30416 - RNA, 22 nt, Homo sapiens
gaggaaguuuacaaagcaucug

SEQ ID NO: 30417 - RNA, 22 nt, Homo sapiens
gaggaaguaauuuuaggccugu

SEQ ID NO: 30418 - RNA, 22 nt, Homo sapiens
gaggagauauucugcuggaugg

SEQ ID NO: 30419 - RNA, 22 nt, Homo sapiens
gaggaucucuugagcccagaag

SEQ ID NO: 30420 - RNA, 22 nt, Homo sapiens
gaugaugcuagguguuagggcu

SEQ ID NO: 30421 - RNA, 22 nt, Homo sapiens
agcuuuggauaccugcuguucc

SEQ ID NO: 30422 - RNA, 22 nt, Homo sapiens
aggcaaugugagaguuuauuca

SEQ ID NO: 30423 - RNA, 22 nt, Homo sapiens
aggagcacuggccuuggaguca

SEQ ID NO: 30424 - RNA, 22 nt, Homo sapiens
agggcaguguuaggacugucug

SEQ ID NO: 30425 - RNA, 22 nt, Homo sapiens
agggcuuuugagcugagauggu

SEQ ID NO: 30426 - RNA, 22 nt, Homo sapiens
aggcaugguggcacauacaugu

SEQ ID NO: 30427 - RNA, 22 nt, Homo sapiens
acuuugcuuaucccaggcacug

SEQ ID NO: 30428 - RNA, 20 nt, Homo sapiens
agagcaaagccgcaccccua

SEQ ID NO: 30429 - RNA, 22 nt, Homo sapiens
agaggucuuaucaaacaugcuu

SEQ ID NO: 30430 - RNA, 22 nt, Homo sapiens
agagguuuuggggcugagagcu

SEQ ID NO: 30431 - RNA, 22 nt, Homo sapiens
agcacgauggggucacgaugag

SEQ ID NO: 30432 - RNA, 22 nt, Homo sapiens
agcggcuguuccccuggucuau

SEQ ID NO: 30433 - RNA, 22 nt, Homo sapiens
aaucugucuuuuguuauugagg

SEQ ID NO: 30434 - RNA, 22 nt, Homo sapiens
aaucugucaguuuuguguuaau

SEQ ID NO: 30435 - RNA, 22 nt, Homo sapiens
aaucugggguuguuuggggagu

SEQ ID NO: 30436 - RNA, 22 nt, Homo sapiens
acagcagugccccacucuacug

SEQ ID NO: 30437 - RNA, 22 nt, Homo sapiens
acuagaugauuauguuccauug

SEQ ID NO: 30438 - RNA, 22 nt, Homo sapiens
acggcaguguggugcggucagg

SEQ ID NO: 30439 - RNA, 22 nt, Homo sapiens
acccuguugagcaacuggccau

SEQ ID NO: 30440 - RNA, 22 nt, Homo sapiens
acccuguugucagaauguggau

SEQ ID NO: 30441 - RNA, 20 nt, Homo sapiens
accgggugaaacccuaucuc

SEQ ID NO: 30442 - RNA, 22 nt, Homo sapiens
acccggcaguaauccugcgcgc

SEQ ID NO: 30443 - RNA, 22 nt, Homo sapiens
acccgggaggcaggagucauag

SEQ ID NO: 30444 - RNA, 17 nt, Homo sapiens
accccuaccucagaagc

SEQ ID NO: 30445 - RNA, 22 nt, Homo sapiens
acccugacacgauucuucacuu

SEQ ID NO: 30446 - RNA, 22 nt, Homo sapiens
acccuggagagugcuguaguaa

SEQ ID NO: 30447 - RNA, 22 nt, Homo sapiens
acccugugagagaguuaauauu

SEQ ID NO: 30448 - RNA, 22 nt, Homo sapiens
aguuuuugcugauagcaugcuu

SEQ ID NO: 30449 - RNA, 22 nt, Homo sapiens
aguguuuuuaucaugaaagggu

SEQ ID NO: 30450 - RNA, 22 nt, Homo sapiens
aggugguguuggguuccagccc

SEQ ID NO: 30451 - RNA, 22 nt, Homo sapiens
aggugguuuuaggcagagacau

SEQ ID NO: 30452 - RNA, 22 nt, Homo sapiens
auauguucucauucauaugugg

SEQ ID NO: 30453 - RNA, 19 nt, Homo sapiens
auauaacauccaggagcag

SEQ ID NO: 30454 - RNA, 22 nt, Homo sapiens
aucagugcauaguauuuaauga

SEQ ID NO: 30455 - RNA, 22 nt, Homo sapiens
aucagugcauguuuguugagcu

SEQ ID NO: 30456 - RNA, 22 nt, Homo sapiens
aucaucacaguuguguguaaug

SEQ ID NO: 30457 - RNA, 23 nt, Homo sapiens
aucagguuguagaauguguuugc

SEQ ID NO: 30458 - RNA, 22 nt, Homo sapiens
aucaaagcagcauggcccaguc

SEQ ID NO: 30459 - RNA, 22 nt, Homo sapiens
aucacagaacuuugagcagaga

SEQ ID NO: 30460 - RNA, 22 nt, Homo sapiens
auggugugugaauuaaauguua

SEQ ID NO: 30461 - RNA, 22 nt, Homo sapiens
augucugguagccaccuggagg

SEQ ID NO: 30462 - RNA, 22 nt, Homo sapiens
auggcuuuuuaaaucauguugu

SEQ ID NO: 30463 - RNA, 22 nt, Homo sapiens
auggcuuuugcccuaaauggau

SEQ ID NO: 30464 - RNA, 22 nt, Homo sapiens
auggcuuuguguucagagcuga

SEQ ID NO: 30465 - RNA, 22 nt, Homo sapiens
auggcuuugggcugcucugccc

SEQ ID NO: 30466 - RNA, 18 nt, Homo sapiens
augcauauuuuaaguugu

SEQ ID NO: 30467 - RNA, 22 nt, Homo sapiens
augcauauuuuaccuagaagag

SEQ ID NO: 30468 - RNA, 22 nt, Homo sapiens
auggacagacacuggccuucug

SEQ ID NO: 30469 - RNA, 18 nt, Homo sapiens
aucauugcacugucuugc

SEQ ID NO: 30470 - RNA, 22 nt, Homo sapiens
aucauccagccccagaagggag

SEQ ID NO: 30471 - RNA, 22 nt, Homo sapiens
augcauauuccugggccucacu

SEQ ID NO: 30472 - RNA, 22 nt, Homo sapiens
augcauaugucuuuauaguggc

SEQ ID NO: 30473 - RNA, 22 nt, Homo sapiens
augagggaagcucacgugucca

SEQ ID NO: 30474 - RNA, 22 nt, Homo sapiens
augaggagauauuaaauaccau

SEQ ID NO: 30475 - RNA, 22 nt, Homo sapiens
aagagguagcagucacaaaaga

SEQ ID NO: 30476 - RNA, 22 nt, Homo sapiens
aaaugcucuuuaugaaguugga

SEQ ID NO: 30477 - RNA, 20 nt, Homo sapiens
aaaggcugugagaacgagau

SEQ ID NO: 30478 - RNA, 22 nt, Homo sapiens
aaagcugucaaggcaggaggcu

SEQ ID NO: 30479 - RNA, 22 nt, Homo sapiens
aaaccacagugugcugcugggg

SEQ ID NO: 30480 - RNA, 22 nt, Homo sapiens
aaacccauauaccagcugugcu

SEQ ID NO: 30481 - RNA, 22 nt, Homo sapiens
aagugacauugugcccauuuga

SEQ ID NO: 30482 - RNA, 22 nt, Homo sapiens
aaucaccaugcacuacagccuu

SEQ ID NO: 30483 - RNA, 22 nt, Homo sapiens
aaucacacuugauguugagcaa

SEQ ID NO: 30484 - RNA, 22 nt, Homo sapiens
aaaagcauucagagugcugggc

SEQ ID NO: 30485 - RNA, 22 nt, Homo sapiens
aaaagcuuagaugggcuuguau

SEQ ID NO: 30486 - RNA, 22 nt, Homo sapiens
aaagcgcuguuaagaagacuga

SEQ ID NO: 30487 - RNA, 22 nt, Homo sapiens
agagcaccauuuagcaagguga

SEQ ID NO: 30488 - RNA, 23 nt, Homo sapiens
agagguuuaaucaggcaguugcu

SEQ ID NO: 30489 - RNA, 17 nt, Homo sapiens
acccagucuuuuugcac

SEQ ID NO: 30490 - RNA, 22 nt, Homo sapiens
accaguguuuaccaaguagcau

SEQ ID NO: 30491 - RNA, 22 nt, Homo sapiens
accccgagacugccaagaaucc

SEQ ID NO: 30492 - RNA, 22 nt, Homo sapiens
accccguagagucugcagcuac

SEQ ID NO: 30493 - RNA, 22 nt, Homo sapiens
acccgcccagguguggccggga

SEQ ID NO: 30494 - RNA, 22 nt, Homo sapiens
acccugcuaaacagcccccugc

SEQ ID NO: 30495 - RNA, 22 nt, Homo sapiens
acauacacuagggauguggugu

SEQ ID NO: 30496 - RNA, 22 nt, Homo sapiens
agugcauaugucuuuuuggaag

SEQ ID NO: 30497 - RNA, 21 nt, Homo sapiens
agugagucauuuggaaagcaa

SEQ ID NO: 30498 - RNA, 22 nt, Homo sapiens
agucauggcagaaggcaccucu

SEQ ID NO: 30499 - RNA, 22 nt, Homo sapiens
aggcuaagaugacuccaccccc

SEQ ID NO: 30500 - RNA, 22 nt, Homo sapiens
auaaaugccuguuguuuuaagc

SEQ ID NO: 30501 - RNA, 22 nt, Homo sapiens
aguuggugauugauugggucug

SEQ ID NO: 30502 - RNA, 22 nt, Homo sapiens
aguuggccccuacugggaggug

SEQ ID NO: 30503 - RNA, 19 nt, Homo sapiens
aguggguguuuucuguuug

SEQ ID NO: 30504 - RNA, 22 nt, Homo sapiens
aguggugucugaguggccaggg

SEQ ID NO: 30505 - RNA, 22 nt, Homo sapiens
aguggguguuccauuggauaaa

SEQ ID NO: 30506 - RNA, 22 nt, Homo sapiens
aguggcuuuuuaguggcagaug

SEQ ID NO: 30507 - RNA, 22 nt, Homo sapiens
aguguuuuuacaagcacucugg

SEQ ID NO: 30508 - RNA, 22 nt, Homo sapiens
aguguuuuucaugggauacuuu

SEQ ID NO: 30509 - RNA, 22 nt, Homo sapiens
aguguuuuuaacaagaaagggu

SEQ ID NO: 30510 - RNA, 22 nt, Homo sapiens
agugguuuuaaguagagcauac

SEQ ID NO: 30511 - RNA, 22 nt, Homo sapiens
agcaccacaauuuccugccuaa

SEQ ID NO: 30512 - RNA, 22 nt, Homo sapiens
agcccauuuugcacugagaugc

SEQ ID NO: 30513 - RNA, 22 nt, Homo sapiens
agcgccacugcacuccagccug

SEQ ID NO: 30514 - RNA, 22 nt, Homo sapiens
agccgguguccacgaagaagag

SEQ ID NO: 30515 - RNA, 22 nt, Homo sapiens
agcuccuuugcuuuuuccagga

SEQ ID NO: 30516 - RNA, 22 nt, Homo sapiens
aggcaaaugccagcaaucacac

SEQ ID NO: 30517 - RNA, 22 nt, Homo sapiens
aggcaugaguucagaggguaug

SEQ ID NO: 30518 - RNA, 22 nt, Homo sapiens
agcuugugauuuagagugagag

SEQ ID NO: 30519 - RNA, 22 nt, Homo sapiens
auggcugugaaaugguaggugg

SEQ ID NO: 30520 - RNA, 22 nt, Homo sapiens
augguguccuguuuccccagga

SEQ ID NO: 30521 - RNA, 22 nt, Homo sapiens
auggcccugaguucaauauauu

SEQ ID NO: 30522 - RNA, 22 nt, Homo sapiens
auggcccaguuugcuaucccua

SEQ ID NO: 30523 - RNA, 22 nt, Homo sapiens
auggcggugugaucuuggcuca

SEQ ID NO: 30524 - RNA, 22 nt, Homo sapiens
augaucauggaaguuuuccugu

SEQ ID NO: 30525 - RNA, 22 nt, Homo sapiens
auuccagauggaguugaggguu

SEQ ID NO: 30526 - RNA, 22 nt, Homo sapiens
auuccagguggcgccauucaca

SEQ ID NO: 30527 - RNA, 22 nt, Homo sapiens
auucaaggagucuucgucccaa

SEQ ID NO: 30528 - RNA, 22 nt, Homo sapiens
auucaccauggcuaccaagggu

SEQ ID NO: 30529 - RNA, 22 nt, Homo sapiens
auaaggcuaguguaggagccag

SEQ ID NO: 30530 - RNA, 22 nt, Homo sapiens
auaugguuuuuggaagcauauc

SEQ ID NO: 30531 - RNA, 19 nt, Homo sapiens
auaugggguuugaacugug

SEQ ID NO: 30532 - RNA, 22 nt, Homo sapiens
aucacguguguuuaugcuacgc

SEQ ID NO: 30533 - RNA, 22 nt, Homo sapiens
aucccagaaacucggguuucuc

SEQ ID NO: 30534 - RNA, 22 nt, Homo sapiens
augaccaaugggcagagcuaga

SEQ ID NO: 30535 - RNA, 22 nt, Homo sapiens
augaccaaagaaaugcuauagg

SEQ ID NO: 30536 - RNA, 22 nt, Homo sapiens
ugagacggagucuggcacuguc

SEQ ID NO: 30537 - RNA, 22 nt, Homo sapiens
ugagacggagucuugcucuguc

SEQ ID NO: 30538 - RNA, 22 nt, Homo sapiens
ugagacggagucucgcucuguu

SEQ ID NO: 30539 - RNA, 22 nt, Homo sapiens
ugagaggugauaaagcaagggu

SEQ ID NO: 30540 - RNA, 22 nt, Homo sapiens
ugagacggaguuuugcucuugu

SEQ ID NO: 30541 - RNA, 22 nt, Homo sapiens
ugagggaugcguacccuaugcc

SEQ ID NO: 30542 - RNA, 17 nt, Homo sapiens
ugagggaugccugguuc

SEQ ID NO: 30543 - RNA, 22 nt, Homo sapiens
ugacaagggaaaugcaaaaugu

SEQ ID NO: 30544 - RNA, 23 nt, Homo sapiens
ugacagaccuucuggaagaaguc

SEQ ID NO: 30545 - RNA, 22 nt, Homo sapiens
ucuuuguuggaguccaaggaua

SEQ ID NO: 30546 - RNA, 22 nt, Homo sapiens
ucuuuuguaaaaugaggaggug

SEQ ID NO: 30547 - RNA, 22 nt, Homo sapiens
ugaaauacuuuggcucuuuguu

SEQ ID NO: 30548 - RNA, 22 nt, Homo sapiens
ugacuggagaccucaguagggu

SEQ ID NO: 30549 - RNA, 18 nt, Homo sapiens
ugagaacauguguacaca

SEQ ID NO: 30550 - RNA, 22 nt, Homo sapiens
ucuuugguucuguuuauguaau

SEQ ID NO: 30551 - RNA, 22 nt, Homo sapiens
ucuuugguuucugucucuguaa

SEQ ID NO: 30552 - RNA, 22 nt, Homo sapiens
ucuguuguuguuuuaagagaca

SEQ ID NO: 30553 - RNA, 22 nt, Homo sapiens
ucuguggucagaguccuuggcc

SEQ ID NO: 30554 - RNA, 22 nt, Homo sapiens
ucugugguucaggcuggagugc

SEQ ID NO: 30555 - RNA, 22 nt, Homo sapiens
ucuguguugaucacacugggag

SEQ ID NO: 30556 - RNA, 17 nt, Homo sapiens
ucuggcuuucacaccug

SEQ ID NO: 30557 - RNA, 23 nt, Homo sapiens
ucuggcuuugggaugcucaaggg

SEQ ID NO: 30558 - RNA, 22 nt, Homo sapiens
ucucuugguugaacaguuugga

SEQ ID NO: 30559 - RNA, 22 nt, Homo sapiens
ucucuuggcggaaguugcagug

SEQ ID NO: 30560 - RNA, 19 nt, Homo sapiens
ucucugguguuggagggga

SEQ ID NO: 30561 - RNA, 21 nt, Homo sapiens
ucucucaaccaggaagugggc

SEQ ID NO: 30562 - RNA, 23 nt, Homo sapiens
ucgguccccuuggcugcccucgg

SEQ ID NO: 30563 - RNA, 22 nt, Homo sapiens
ucgcgccauucuccugccucag

SEQ ID NO: 30564 - RNA, 22 nt, Homo sapiens
ucguggccugugaguccucccc

SEQ ID NO: 30565 - RNA, 22 nt, Homo sapiens
ucgugcugugucaucuuguggc

SEQ ID NO: 30566 - RNA, 22 nt, Homo sapiens
ucgcugcgaccuccaccucccg

SEQ ID NO: 30567 - RNA, 22 nt, Homo sapiens
ucgcauggucuccaggcagcuc

SEQ ID NO: 30568 - RNA, 19 nt, Homo sapiens
ucgcgccauucuccugccu

SEQ ID NO: 30569 - RNA, 23 nt, Homo sapiens
ucgcagcauucaauaccaggcag

SEQ ID NO: 30570 - RNA, 22 nt, Homo sapiens
ucccuguuguuucauaauuuua

SEQ ID NO: 30571 - RNA, 22 nt, Homo sapiens
ucacugaaacuguccuggguua

SEQ ID NO: 30572 - RNA, 22 nt, Homo sapiens
ucagacacugagcaaacgacua

SEQ ID NO: 30573 - RNA, 19 nt, Homo sapiens
uccccuguggauaccaaga

SEQ ID NO: 30574 - RNA, 22 nt, Homo sapiens
ucccgaggacaucugggggcaa

SEQ ID NO: 30575 - RNA, 22 nt, Homo sapiens
uccccgucacacgcaggcuuac

SEQ ID NO: 30576 - RNA, 22 nt, Homo sapiens
ucccugagugauugaaaauaaa

SEQ ID NO: 30577 - RNA, 17 nt, Homo sapiens
ucccuguuuuuucaguc

SEQ ID NO: 30578 - RNA, 22 nt, Homo sapiens
ucccugacagucacagagcuac

SEQ ID NO: 30579 - RNA, 21 nt, Homo sapiens
ugggccccuuccuuacaucau

SEQ ID NO: 30580 - RNA, 22 nt, Homo sapiens
uggggugugagggagaaagaaa

SEQ ID NO: 30581 - RNA, 22 nt, Homo sapiens
uggguagagaaucaggaucuua

SEQ ID NO: 30582 - RNA, 23 nt, Homo sapiens
ugguuuguaagagauggacugga

SEQ ID NO: 30583 - RNA, 23 nt, Homo sapiens
uguaaaagcauuugucagccugg

SEQ ID NO: 30584 - RNA, 20 nt, Homo sapiens
uggcauguugguaugcaccc

SEQ ID NO: 30585 - RNA, 17 nt, Homo sapiens
uggcaugaggguguggg

SEQ ID NO: 30586 - RNA, 22 nt, Homo sapiens
uggccuguaacgcugucucagc

SEQ ID NO: 30587 - RNA, 22 nt, Homo sapiens
uguccguuuuguuucaggcuca

SEQ ID NO: 30588 - RNA, 22 nt, Homo sapiens
ugucuggaguccauagaagugu

SEQ ID NO: 30589 - RNA, 22 nt, Homo sapiens
uguauguugggucaaaguacau

SEQ ID NO: 30590 - RNA, 22 nt, Homo sapiens
uguaugagagacauggcugcuu

SEQ ID NO: 30591 - RNA, 21 nt, Homo sapiens
ugcuuuggucauacuucuucc

SEQ ID NO: 30592 - RNA, 22 nt, Homo sapiens
ugcugguggucccauaugauua

SEQ ID NO: 30593 - RNA, 22 nt, Homo sapiens
ugcugguguuuaggaauaagaa

SEQ ID NO: 30594 - RNA, 22 nt, Homo sapiens
uggaauggagagagggugcacg

SEQ ID NO: 30595 - RNA, 22 nt, Homo sapiens
uggaaugguaucuuguuggggu

SEQ ID NO: 30596 - RNA, 20 nt, Homo sapiens
uggaaucuaggcggagguuu

SEQ ID NO: 30597 - RNA, 22 nt, Homo sapiens
uggaauguuauggcuuuaaucu

SEQ ID NO: 30598 - RNA, 22 nt, Homo sapiens
ugcgccauugaacuccaggcug

SEQ ID NO: 30599 - RNA, 22 nt, Homo sapiens
ugccaguguugccuuucacuag

SEQ ID NO: 30600 - RNA, 22 nt, Homo sapiens
ugcuggcguuacucuccaucag

SEQ ID NO: 30601 - RNA, 22 nt, Homo sapiens
ugcugguauuuggaccagccug

SEQ ID NO: 30602 - RNA, 22 nt, Homo sapiens
ugcuggugauucagauucaaau

SEQ ID NO: 30603 - RNA, 23 nt, Homo sapiens
ugcuccccucauggaugaauaaa

SEQ ID NO: 30604 - RNA, 22 nt, Homo sapiens
ugaguuaauuuuuguaucaugu

SEQ ID NO: 30605 - RNA, 23 nt, Homo sapiens
ugagucacuuugcuggggucucu

SEQ ID NO: 30606 - RNA, 22 nt, Homo sapiens
ugagucuguucucacauugcua

SEQ ID NO: 30607 - RNA, 22 nt, Homo sapiens
uuuggcauauuuuaagcugguu

SEQ ID NO: 30608 - RNA, 20 nt, Homo sapiens
uuuggcaauaggguuuuugu

SEQ ID NO: 30609 - RNA, 22 nt, Homo sapiens
uuugcuugaggucuagcuaccc

SEQ ID NO: 30610 - RNA, 22 nt, Homo sapiens
uuugccuuugugauauggucua

SEQ ID NO: 30611 - RNA, 22 nt, Homo sapiens
uuucauguuuuucugugaggca

SEQ ID NO: 30612 - RNA, 22 nt, Homo sapiens
uuuugguuguuggguaagagua

SEQ ID NO: 30613 - RNA, 22 nt, Homo sapiens
uuuugguuaggauggguggcau

SEQ ID NO: 30614 - RNA, 22 nt, Homo sapiens
uuuugguauauacggggguccu

SEQ ID NO: 30615 - RNA, 22 nt, Homo sapiens
uuuugguaaugaacuuaggaag

SEQ ID NO: 30616 - RNA, 22 nt, Homo sapiens
aagagguuguaccuaaaguguu

SEQ ID NO: 30617 - RNA, 19 nt, Homo sapiens
aaccgggagugcacauguu

SEQ ID NO: 30618 - RNA, 22 nt, Homo sapiens
aacuggcauaugaacuuguucu

SEQ ID NO: 30619 - RNA, 22 nt, Homo sapiens
uuuugguuuuauccagggucuc

SEQ ID NO: 30620 - RNA, 21 nt, Homo sapiens
uuuuugggcuuucauaguguu

SEQ ID NO: 30621 - RNA, 22 nt, Homo sapiens
uuguguuuuuaguagggaaggg

SEQ ID NO: 30622 - RNA, 22 nt, Homo sapiens
uuguguuugaugcugacacgca

SEQ ID NO: 30623 - RNA, 22 nt, Homo sapiens
uugugcuucaucaccuagcaga

SEQ ID NO: 30624 - RNA, 22 nt, Homo sapiens
uuguccacugcuagccucugca

SEQ ID NO: 30625 - RNA, 22 nt, Homo sapiens
uugggguaggaauauggaauga

SEQ ID NO: 30626 - RNA, 22 nt, Homo sapiens
uuggcgugaaacagccuuacau

SEQ ID NO: 30627 - RNA, 22 nt, Homo sapiens
uuggcuuuuaugcagcuuaggu

SEQ ID NO: 30628 - RNA, 22 nt, Homo sapiens
uuggagugugucuuauuccauu

SEQ ID NO: 30629 - RNA, 19 nt, Homo sapiens
uuggaauuuuagaguuuga

SEQ ID NO: 30630 - RNA, 19 nt, Homo sapiens
ugugacugguugucucgcu

SEQ ID NO: 30631 - RNA, 22 nt, Homo sapiens
ugugaguguguacuaguuauca

SEQ ID NO: 30632 - RNA, 22 nt, Homo sapiens
ugugaaugauggagugucgaau

SEQ ID NO: 30633 - RNA, 22 nt, Homo sapiens
ugugaauggugcugccgugaag

SEQ ID NO: 30634 - RNA, 22 nt, Homo sapiens
uuacuguauagaaucaucuuga

SEQ ID NO: 30635 - RNA, 22 nt, Homo sapiens
uuaugguuguuaucuugguucg

SEQ ID NO: 30636 - RNA, 20 nt, Homo sapiens
uuauugcggcaucauucaug

SEQ ID NO: 30637 - RNA, 22 nt, Homo sapiens
uugaccaaagaagagucauugc

SEQ ID NO: 30638 - RNA, 21 nt, Homo sapiens
uuccagugagccuagaugccu

SEQ ID NO: 30639 - RNA, 22 nt, Homo sapiens
uucaccggggaccccuggcugu

SEQ ID NO: 30640 - RNA, 20 nt, Homo sapiens
cugcuccccuacaaaucuca

SEQ ID NO: 30641 - RNA, 18 nt, Homo sapiens
cuggaugucgaguguguu

SEQ ID NO: 30642 - RNA, 22 nt, Homo sapiens
cuggugagaugucuuuccucuu

SEQ ID NO: 30643 - RNA, 22 nt, Homo sapiens
cuccgggugcgucggcgcccug

SEQ ID NO: 30644 - RNA, 23 nt, Homo sapiens
cucccugaacaugacacaccaga

SEQ ID NO: 30645 - RNA, 22 nt, Homo sapiens
cucgcuccauuucggugaucaa

SEQ ID NO: 30646 - RNA, 22 nt, Homo sapiens
cugacacuucaaaacugccaau

SEQ ID NO: 30647 - RNA, 22 nt, Homo sapiens
cuacugcacaucaucugaguua

SEQ ID NO: 30648 - RNA, 22 nt, Homo sapiens
cuagcccagugcuccuggauca

SEQ ID NO: 30649 - RNA, 20 nt, Homo sapiens
ccaguguuauuuauguucua

SEQ ID NO: 30650 - RNA, 22 nt, Homo sapiens
ccauacugucaaauagauuucc

SEQ ID NO: 30651 - RNA, 22 nt, Homo sapiens
cgaguguaguaggccauaugaa

SEQ ID NO: 30652 - RNA, 22 nt, Homo sapiens
cggcaguggguaagccaagcuu

SEQ ID NO: 30653 - RNA, 22 nt, Homo sapiens
cgcuggugaucuagacccccaa

SEQ ID NO: 30654 - RNA, 22 nt, Homo sapiens
cgcuggugucuaagcgacagcu

SEQ ID NO: 30655 - RNA, 22 nt, Homo sapiens
cacaaaguagauuagucuucca

SEQ ID NO: 30656 - RNA, 22 nt, Homo sapiens
cacagggcuaacauuuuugccc

SEQ ID NO: 30657 - RNA, 22 nt, Homo sapiens
cacugcacuccagucccgucuc

SEQ ID NO: 30658 - RNA, 22 nt, Homo sapiens
cacugcacuccagucugacgac

SEQ ID NO: 30659 - RNA, 22 nt, Homo sapiens
cagagcacuaaagguaaaaggc

SEQ ID NO: 30660 - RNA, 22 nt, Homo sapiens
cagacaugucuuguggccgugg

SEQ ID NO: 30661 - RNA, 22 nt, Homo sapiens
cagagaucaugcaacugcucgc

SEQ ID NO: 30662 - RNA, 22 nt, Homo sapiens
caugccacugcacgccauccug

SEQ ID NO: 30663 - RNA, 20 nt, Homo sapiens
cagcaaccugcucucuuccu

SEQ ID NO: 30664 - RNA, 22 nt, Homo sapiens
caggcacgcuugggagacacac

SEQ ID NO: 30665 - RNA, 22 nt, Homo sapiens
cagagugcauguuuagaugagu

SEQ ID NO: 30666 - RNA, 19 nt, Homo sapiens
cagguagugugcugacaug

SEQ ID NO: 30667 - RNA, 22 nt, Homo sapiens
caggugguauuugguuuucugu

SEQ ID NO: 30668 - RNA, 22 nt, Homo sapiens
gaggaguauuuugucgaauguc

SEQ ID NO: 30669 - RNA, 22 nt, Homo sapiens
gagcucguuuuugcugacucuu

SEQ ID NO: 30670 - RNA, 17 nt, Homo sapiens
gacgaucaucaggaggc

SEQ ID NO: 30671 - RNA, 21 nt, Homo sapiens
gaccacagcagggaaugucag

SEQ ID NO: 30672 - RNA, 22 nt, Homo sapiens
gacuuugguagaggaaaaaucu

SEQ ID NO: 30673 - RNA, 22 nt, Homo sapiens
cuuugugugggccaagggcugg

SEQ ID NO: 30674 - RNA, 22 nt, Homo sapiens
cuuuguguaggugccucuggcu

SEQ ID NO: 30675 - RNA, 22 nt, Homo sapiens
cuuuguguggacauuucaggca

SEQ ID NO: 30676 - RNA, 22 nt, Homo sapiens
cuuuuggcuuaagauugucuug

SEQ ID NO: 30677 - RNA, 22 nt, Homo sapiens
cuuuuggcuuagaauugucuug

SEQ ID NO: 30678 - RNA, 22 nt, Homo sapiens
gaaagcugguauagauacauua

SEQ ID NO: 30679 - RNA, 20 nt, Homo sapiens
gacauagagacucucaaaaa

SEQ ID NO: 30680 - RNA, 22 nt, Homo sapiens
cuguggguuuuacuguuuuacu

SEQ ID NO: 30681 - RNA, 19 nt, Homo sapiens
cuguggucauuauuuugcu

SEQ ID NO: 30682 - RNA, 22 nt, Homo sapiens
cugugcauucuuaaaucaggaa

SEQ ID NO: 30683 - RNA, 22 nt, Homo sapiens
cugugcauaugacuuuauugga

SEQ ID NO: 30684 - RNA, 22 nt, Homo sapiens
cuguaugugagaaauaauaagu

SEQ ID NO: 30685 - RNA, 22 nt, Homo sapiens
ggagggugagaucaauuuggga

SEQ ID NO: 30686 - RNA, 22 nt, Homo sapiens
ggagucugauguucuaaggcag

SEQ ID NO: 30687 - RNA, 22 nt, Homo sapiens
ggagugucccaaucucagcuca

SEQ ID NO: 30688 - RNA, 19 nt, Homo sapiens
gcuucuugaggacgaugac

SEQ ID NO: 30689 - RNA, 22 nt, Homo sapiens
gcuuuguuaaaacacagccaca

SEQ ID NO: 30690 - RNA, 22 nt, Homo sapiens
gcugcguguagaguucucacug

SEQ ID NO: 30691 - RNA, 22 nt, Homo sapiens
gcugcuguaccagaugugguua

SEQ ID NO: 30692 - RNA, 22 nt, Homo sapiens
gcugagcuaugccauauaugcc

SEQ ID NO: 30693 - RNA, 22 nt, Homo sapiens
gcucugguuacaaaggcaaauu

SEQ ID NO: 30694 - RNA, 22 nt, Homo sapiens
gcacgugcucauuugaggucuu

SEQ ID NO: 30695 - RNA, 17 nt, Homo sapiens
gcacuggcguaucccac

SEQ ID NO: 30696 - RNA, 22 nt, Homo sapiens
gcaagcuugcugggccugacuc

SEQ ID NO: 30697 - RNA, 22 nt, Homo sapiens
gcaaggaugagugcccaugaga

SEQ ID NO: 30698 - RNA, 18 nt, Homo sapiens
gauguaguauggugugga

SEQ ID NO: 30699 - RNA, 22 nt, Homo sapiens
uaacccugaggggcuuggggac

SEQ ID NO: 30700 - RNA, 22 nt, Homo sapiens
uaaggcccggccuuuccaagca

SEQ ID NO: 30701 - RNA, 22 nt, Homo sapiens
uagugacauugcugggaaugcu

SEQ ID NO: 30702 - RNA, 22 nt, Homo sapiens
uagcugagacuacaguaggugc

SEQ ID NO: 30703 - RNA, 22 nt, Homo sapiens
uaggaaguuuucuugcugggcc

SEQ ID NO: 30704 - RNA, 22 nt, Homo sapiens
uauuacagaccauaucgccggg

SEQ ID NO: 30705 - RNA, 22 nt, Homo sapiens
uauugcauguugagcaguaccu

SEQ ID NO: 30706 - RNA, 22 nt, Homo sapiens
uauugcauuugagguugguuga

SEQ ID NO: 30707 - RNA, 22 nt, Homo sapiens
ucaacacaguuaaauggggaaa

SEQ ID NO: 30708 - RNA, 22 nt, Homo sapiens
uauugcuacuuugccuuccaaa

SEQ ID NO: 30709 - RNA, 22 nt, Homo sapiens
uauugcuggcucugucuucauu

SEQ ID NO: 30710 - RNA, 22 nt, Homo sapiens
uaucccaguggauguaccccau

SEQ ID NO: 30711 - RNA, 22 nt, Homo sapiens
uaugggucuuaaaucacuuagu

SEQ ID NO: 30712 - RNA, 22 nt, Homo sapiens
uaucucuguggguagugcugaa

SEQ ID NO: 30713 - RNA, 21 nt, Homo sapiens
ucacaucguuuagcugugccu

SEQ ID NO: 30714 - RNA, 22 nt, Homo sapiens
ucacccacacaggagacaggga

SEQ ID NO: 30715 - RNA, 22 nt, Homo sapiens
ucaccuggagaagauggaucau

SEQ ID NO: 30716 - RNA, 22 nt, Homo sapiens
ucaccuggagagcuugcuaaua

SEQ ID NO: 30717 - RNA, 22 nt, Homo sapiens
ucaccuggagccuucacauucu

SEQ ID NO: 30718 - RNA, 22 nt, Homo sapiens
ucaccuggggaucuuguuuaca

SEQ ID NO: 30719 - RNA, 22 nt, Homo sapiens
ucaccggcagacguggccugau

SEQ ID NO: 30720 - RNA, 18 nt, Homo sapiens
ucacggggagcagcagcc

SEQ ID NO: 30721 - RNA, 19 nt, Homo sapiens
ucacgugcagcagccacac

SEQ ID NO: 30722 - RNA, 22 nt, Homo sapiens
ucacgugguucauaaggcagaa

SEQ ID NO: 30723 - RNA, 20 nt, Homo sapiens
ucacaagccaagaucacguc

SEQ ID NO: 30724 - RNA, 22 nt, Homo sapiens
ucacaagcuccugccuuugcuu

SEQ ID NO: 30725 - RNA, 22 nt, Homo sapiens
gucugucuuuugucuuugaaau

SEQ ID NO: 30726 - RNA, 20 nt, Homo sapiens
gucugucuccgaguagaauu

SEQ ID NO: 30727 - RNA, 22 nt, Homo sapiens
gucucuugguuuagagcauuua

SEQ ID NO: 30728 - RNA, 22 nt, Homo sapiens
gugacgucauuguuccuggcuc

SEQ ID NO: 30729 - RNA, 22 nt, Homo sapiens
gugacugggaguggugaagaua

SEQ ID NO: 30730 - RNA, 22 nt, Homo sapiens
gucuuuggaaaaaaugucuguu

SEQ ID NO: 30731 - RNA, 22 nt, Homo sapiens
ggauuuguuggcauuagugaug

SEQ ID NO: 30732 - RNA, 22 nt, Homo sapiens
ggcaugaaguagcccacaggca

SEQ ID NO: 30733 - RNA, 22 nt, Homo sapiens
guaacccuguaggccuaaagua

SEQ ID NO: 30734 - RNA, 22 nt, Homo sapiens
guagcagccacacuugauaacu

SEQ ID NO: 30735 - RNA, 22 nt, Homo sapiens
guaucacacuuauugaccugca

SEQ ID NO: 30736 - RNA, 22 nt, Homo sapiens
uaacaguggucugugguaucug

SEQ ID NO: 30737 - RNA, 22 nt, Homo sapiens
uaacaguguauuccuuuggaca

SEQ ID NO: 30738 - RNA, 22 nt, Homo sapiens
uaacccagugucugugaugggu

SEQ ID NO: 30739 - RNA, 22 nt, Homo sapiens
guguuauggagccaaacuacua

SEQ ID NO: 30740 - RNA, 22 nt, Homo sapiens
guggacguguguccccauggcu

SEQ ID NO: 30741 - RNA, 22 nt, Homo sapiens
gugguuuucaacuccaccugca

SEQ ID NO: 30742 - RNA, 22 nt, Homo sapiens
gugauuguuaaacugccucucu

SEQ ID NO: 30743 - RNA, 22 nt, Homo sapiens
guggaaucuagagaggcaguag

SEQ ID NO: 30744 - RNA, 22 nt, Homo sapiens
guggaaugauaucucauugugg

SEQ ID NO: 30745 - RNA, 22 nt, Homo sapiens
guggaaugcaguguugauucaa

SEQ ID NO: 30746 - RNA, 17 nt, Homo sapiens
gugagguggguaguauc

SEQ ID NO: 30747 - RNA, 22 nt, Homo sapiens
gugauacugcuuauuaauuuaa

SEQ ID NO: 30748 - RNA, 22 nt, Homo sapiens
gugaucauuguauugggguuau

SEQ ID NO: 30749 - RNA, 22 nt, Homo sapiens
uuuuugguugguaggcuauuaa

SEQ ID NO: 30750 - RNA, 22 nt, Homo sapiens
uuuugguauaugcaggggucuu

SEQ ID NO: 30751 - RNA, 22 nt, Homo sapiens
uuuugguauacacaaggguccu

SEQ ID NO: 30752 - RNA, 22 nt, Homo sapiens
uuuugggggugauucacacagu

SEQ ID NO: 30753 - RNA, 22 nt, Homo sapiens
uuuugguucaauuaauuugcua

SEQ ID NO: 30754 - RNA, 21 nt, Homo sapiens
uuugcauauguugaaccagcc

SEQ ID NO: 30755 - RNA, 22 nt, Homo sapiens
uuuugcauuggcugaggagugu

SEQ ID NO: 30756 - RNA, 22 nt, Homo sapiens
uuugcauaauaagauuagggug

SEQ ID NO: 30757 - RNA, 19 nt, Homo sapiens
uuugcauagugagaauaua

SEQ ID NO: 30758 - RNA, 22 nt, Homo sapiens
uuugcagugucagcuucugugu

SEQ ID NO: 30759 - RNA, 22 nt, Homo sapiens
uuaaucaggccguuuccuaaga

SEQ ID NO: 30760 - RNA, 22 nt, Homo sapiens
ugugguuuuauaaacgugaccu

SEQ ID NO: 30761 - RNA, 22 nt, Homo sapiens
ugugucuugaauuuuguaugua

SEQ ID NO: 30762 - RNA, 22 nt, Homo sapiens
ugugcaaauuagcacaacccga

SEQ ID NO: 30763 - RNA, 22 nt, Homo sapiens
ugugauuauuuauagacaguca

SEQ ID NO: 30764 - RNA, 21 nt, Homo sapiens
uuaucccagugucucugcagg

SEQ ID NO: 30765 - RNA, 22 nt, Homo sapiens
uuauauguuucuuagggacaga

SEQ ID NO: 30766 - RNA, 22 nt, Homo sapiens
uuaggacacuguggguggguca

SEQ ID NO: 30767 - RNA, 22 nt, Homo sapiens
uuagcgccuuucuuccucuccu

SEQ ID NO: 30768 - RNA, 22 nt, Homo sapiens
uuagccggguguguuggcgggc

SEQ ID NO: 30769 - RNA, 22 nt, Homo sapiens
uuaugguuuucucucacgcagg

SEQ ID NO: 30770 - RNA, 22 nt, Homo sapiens
uuaugguuuauuagcaggguua

SEQ ID NO: 30771 - RNA, 22 nt, Homo sapiens
uuaugguuuuuagcagaguaau

SEQ ID NO: 30772 - RNA, 22 nt, Homo sapiens
uuauuagguuagugcaaaaguu

SEQ ID NO: 30773 - RNA, 22 nt, Homo sapiens
uuaugguuuuucugugagaugg

SEQ ID NO: 30774 - RNA, 22 nt, Homo sapiens
uggcgggaaaguugggagaaga

SEQ ID NO: 30775 - RNA, 22 nt, Homo sapiens
uggcggagacauggacuucaga

SEQ ID NO: 30776 - RNA, 22 nt, Homo sapiens
uggugccgugguccuggggcca

SEQ ID NO: 30777 - RNA, 22 nt, Homo sapiens
ugguuguuuuaaaugucgucug

SEQ ID NO: 30778 - RNA, 22 nt, Homo sapiens
ugguguuugagaagcugauguc

SEQ ID NO: 30779 - RNA, 20 nt, Homo sapiens
uggugguuuuaugugguuua

SEQ ID NO: 30780 - RNA, 15 nt, Homo sapiens
uggugguguugagac

SEQ ID NO: 30781 - RNA, 22 nt, Homo sapiens
ugguguccugucucugcgcuug

SEQ ID NO: 30782 - RNA, 22 nt, Homo sapiens
uguaaccauccagagucccagg

SEQ ID NO: 30783 - RNA, 22 nt, Homo sapiens
uguaugcuuuugagagauauuu

SEQ ID NO: 30784 - RNA, 22 nt, Homo sapiens
uguagguguacauacaugguua

SEQ ID NO: 30785 - RNA, 22 nt, Homo sapiens
ugucagggaggcucggccgcac

SEQ ID NO: 30786 - RNA, 22 nt, Homo sapiens
uguauuuguuguuaaauggaga

SEQ ID NO: 30787 - RNA, 22 nt, Homo sapiens
uguccguuuuggcuuucucccu

SEQ ID NO: 30788 - RNA, 22 nt, Homo sapiens
ugucuggaaggguggccuccug

SEQ ID NO: 30789 - RNA, 22 nt, Homo sapiens
uugcacagugguuuagagccug

SEQ ID NO: 30790 - RNA, 22 nt, Homo sapiens
uugcaagugccguaacuaccaa

SEQ ID NO: 30791 - RNA, 22 nt, Homo sapiens
uugagcacugucugugugcagu

SEQ ID NO: 30792 - RNA, 22 nt, Homo sapiens
uucuuuggauaaaguuuuaugc

SEQ ID NO: 30793 - RNA, 22 nt, Homo sapiens
uucauggaauauugaccauuuu

SEQ ID NO: 30794 - RNA, 21 nt, Homo sapiens
uucuuugcucaguguuagagu

SEQ ID NO: 30795 - RNA, 22 nt, Homo sapiens
uucaucacagucuccgaugccc

SEQ ID NO: 30796 - RNA, 21 nt, Homo sapiens
uuguccccacccaaaucucau

SEQ ID NO: 30797 - RNA, 22 nt, Homo sapiens
uuguccccacccaaaugucauc

SEQ ID NO: 30798 - RNA, 22 nt, Homo sapiens
uuggucuucuaauguaccuguu

SEQ ID NO: 30799 - RNA, 22 nt, Homo sapiens
uuggucugcucugauguuuucu

SEQ ID NO: 30800 - RNA, 22 nt, Homo sapiens
uugguccguugugaaaaggccu

SEQ ID NO: 30801 - RNA, 22 nt, Homo sapiens
uugcacagucuagcuccaccuu

SEQ ID NO: 30802 - RNA, 22 nt, Homo sapiens
uugcauauguugaaccaagcgu

SEQ ID NO: 30803 - RNA, 22 nt, Homo sapiens
uugggagugucucuggacugca

SEQ ID NO: 30804 - RNA, 22 nt, Homo sapiens
uuuaugguuuucugggagauug

SEQ ID NO: 30805 - RNA, 21 nt, Homo sapiens
uuuagguagcuuuucugggag

SEQ ID NO: 30806 - RNA, 22 nt, Homo sapiens
uuucugggggugcugauggaaa

SEQ ID NO: 30807 - RNA, 22 nt, Homo sapiens
uuucaccguguuggccaggcug

SEQ ID NO: 30808 - RNA, 22 nt, Homo sapiens
uuucaggcagggagcuucagug

SEQ ID NO: 30809 - RNA, 22 nt, Homo sapiens
uuucgugucuggucugugaugg

SEQ ID NO: 30810 - RNA, 22 nt, Homo sapiens
uuuccuguagggggcaaggccu

SEQ ID NO: 30811 - RNA, 22 nt, Homo sapiens
uugugguuuucagcuuauauau

SEQ ID NO: 30812 - RNA, 21 nt, Homo sapiens
uuugugguuacugugugagcu

SEQ ID NO: 30813 - RNA, 22 nt, Homo sapiens
uuuguucaccucaaggauggga

SEQ ID NO: 30814 - RNA, 22 nt, Homo sapiens
uuugugugugauuauaaaaggu

SEQ ID NO: 30815 - RNA, 22 nt, Homo sapiens
aaguugguguaugagacagaag

SEQ ID NO: 30816 - RNA, 22 nt, Homo sapiens
aauaaagcagcuuuuugggacu

SEQ ID NO: 30817 - RNA, 22 nt, Homo sapiens
aauaaagucugaagugugcuua

SEQ ID NO: 30818 - RNA, 22 nt, Homo sapiens
acacauacacauaugguguaua

SEQ ID NO: 30819 - RNA, 22 nt, Homo sapiens
acacgggugccggcaucagcac

SEQ ID NO: 30820 - RNA, 22 nt, Homo sapiens
aauggcaaauguuuucuguuga

SEQ ID NO: 30821 - RNA, 22 nt, Homo sapiens
aaucacguagcaguagggagaa

SEQ ID NO: 30822 - RNA, 21 nt, Homo sapiens
acccccacaccuccuuaguuc

SEQ ID NO: 30823 - RNA, 22 nt, Homo sapiens
acccaguaacauaugggaggga

SEQ ID NO: 30824 - RNA, 22 nt, Homo sapiens
acccacuagaugccaguggcac

SEQ ID NO: 30825 - RNA, 22 nt, Homo sapiens
agcagguguggcuuauccugaa

SEQ ID NO: 30826 - RNA, 22 nt, Homo sapiens
agaugguguuuucucaccagau

SEQ ID NO: 30827 - RNA, 22 nt, Homo sapiens
agacaagauggcuugagguuca

SEQ ID NO: 30828 - RNA, 22 nt, Homo sapiens
agugguuuuggaauggaauuca

SEQ ID NO: 30829 - RNA, 22 nt, Homo sapiens
auacgugcaggucacaggggau

SEQ ID NO: 30830 - RNA, 22 nt, Homo sapiens
auacaucugccauguuggugug

SEQ ID NO: 30831 - RNA, 22 nt, Homo sapiens
auaacucuguuuuuuucaugca

SEQ ID NO: 30832 - RNA, 22 nt, Homo sapiens
agcuggucuuggggaagaguag

SEQ ID NO: 30833 - RNA, 22 nt, Homo sapiens
aguggauguuguggccugggag

SEQ ID NO: 30834 - RNA, 22 nt, Homo sapiens
agugccaaaucgagggcucuga

SEQ ID NO: 30835 - RNA, 22 nt, Homo sapiens
agugauggagccaggauuuaau

SEQ ID NO: 30836 - RNA, 22 nt, Homo sapiens
agucacagguucuugggauuag

SEQ ID NO: 30837 - RNA, 22 nt, Homo sapiens
agugaacacagcuucuuugguu

SEQ ID NO: 30838 - RNA, 22 nt, Homo sapiens
agugagcugcagucuggggucc

SEQ ID NO: 30839 - RNA, 19 nt, Homo sapiens
augccuggagaugguuaua

SEQ ID NO: 30840 - RNA, 22 nt, Homo sapiens
auggauuuguaguacaugguug

SEQ ID NO: 30841 - RNA, 18 nt, Homo sapiens
augaccugcggguuauau

SEQ ID NO: 30842 - RNA, 22 nt, Homo sapiens
auccguugcaagggaagaauga

SEQ ID NO: 30843 - RNA, 22 nt, Homo sapiens
aucgcaccauugcacuccagca

SEQ ID NO: 30844 - RNA, 22 nt, Homo sapiens
aucgcgccauuguacuccagcc

SEQ ID NO: 30845 - RNA, 19 nt, Homo sapiens
aucuggaguuccuggggcu

SEQ ID NO: 30846 - RNA, 22 nt, Homo sapiens
aucugggguuggcaaaguuugg

SEQ ID NO: 30847 - RNA, 22 nt, Homo sapiens
aucuggguccguucugcuucuc

SEQ ID NO: 30848 - RNA, 20 nt, Homo sapiens
auaugguugugagugauuuu

SEQ ID NO: 30849 - RNA, 22 nt, Homo sapiens
aucaccgugggagauccugccu

SEQ ID NO: 30850 - RNA, 23 nt, Homo sapiens
auccacauucuaguccuuuaugc

SEQ ID NO: 30851 - RNA, 22 nt, Homo sapiens
aucccaguucagccucugacac

SEQ ID NO: 30852 - RNA, 22 nt, Homo sapiens
cugucuggaguccuucgugugc

SEQ ID NO: 30853 - RNA, 22 nt, Homo sapiens
cugguuuguaaaguuccugaga

SEQ ID NO: 30854 - RNA, 22 nt, Homo sapiens
cuuggcuuguuguccccugcuc

SEQ ID NO: 30855 - RNA, 22 nt, Homo sapiens
cuguuuguuuaggguacucaga

SEQ ID NO: 30856 - RNA, 23 nt, Homo sapiens
cuuugguaggaaauuugaauuau

SEQ ID NO: 30857 - RNA, 21 nt, Homo sapiens
cuuugguagaguuuuuagggu

SEQ ID NO: 30858 - RNA, 22 nt, Homo sapiens
cuaugguuucucaaacuccuga

SEQ ID NO: 30859 - RNA, 22 nt, Homo sapiens
cucacggcccugcgcacuggca

SEQ ID NO: 30860 - RNA, 22 nt, Homo sapiens
cucaaagugcugggacuggcug

SEQ ID NO: 30861 - RNA, 18 nt, Homo sapiens
cugagucauuccuggguc

SEQ ID NO: 30862 - RNA, 22 nt, Homo sapiens
cugaugaaguauuuguucugga

SEQ ID NO: 30863 - RNA, 22 nt, Homo sapiens
cugauauuuuucuggcuugugu

SEQ ID NO: 30864 - RNA, 22 nt, Homo sapiens
cugagaucaugggucagguggu

SEQ ID NO: 30865 - RNA, 22 nt, Homo sapiens
cugauuguuugccucuaaaauc

SEQ ID NO: 30866 - RNA, 22 nt, Homo sapiens
gaucugugugauuggaugcauu

SEQ ID NO: 30867 - RNA, 22 nt, Homo sapiens
gagaucaaguauucuccacuaa

SEQ ID NO: 30868 - RNA, 22 nt, Homo sapiens
gagagugugucagaggcugcga

SEQ ID NO: 30869 - RNA, 22 nt, Homo sapiens
gacagacacaauugauccauga

SEQ ID NO: 30870 - RNA, 22 nt, Homo sapiens
gacagagcaagacccuauuuaa

SEQ ID NO: 30871 - RNA, 22 nt, Homo sapiens
gacaguuuggugaggaagacga

SEQ ID NO: 30872 - RNA, 19 nt, Homo sapiens
cuuugguugagcguguugg

SEQ ID NO: 30873 - RNA, 22 nt, Homo sapiens
cuuugguggagucuuuagguuc

SEQ ID NO: 30874 - RNA, 18 nt, Homo sapiens
cuuugguccccgcacccu

SEQ ID NO: 30875 - RNA, 22 nt, Homo sapiens
cuuugguucuguuuauaugcug

SEQ ID NO: 30876 - RNA, 22 nt, Homo sapiens
cuuugguugugcucuccacuuu

SEQ ID NO: 30877 - RNA, 21 nt, Homo sapiens
cuuugguuucugacuugcaua

SEQ ID NO: 30878 - RNA, 22 nt, Homo sapiens
cuuugguuuacuuggugcuagu

SEQ ID NO: 30879 - RNA, 18 nt, Homo sapiens
auguggcuuuugaaggcu

SEQ ID NO: 30880 - RNA, 22 nt, Homo sapiens
auggcggugugggcggugcagc

SEQ ID NO: 30881 - RNA, 22 nt, Homo sapiens
auuaagugcuugccagugcugg

SEQ ID NO: 30882 - RNA, 22 nt, Homo sapiens
caaauacuuucauguugucuug

SEQ ID NO: 30883 - RNA, 22 nt, Homo sapiens
caucaggugaggauucaaugca

SEQ ID NO: 30884 - RNA, 16 nt, Homo sapiens
cacauugcugcauggc

SEQ ID NO: 30885 - RNA, 22 nt, Homo sapiens
caccaggugcccagcacggcca

SEQ ID NO: 30886 - RNA, 20 nt, Homo sapiens
cagggcaaugaggagguaaa

SEQ ID NO: 30887 - RNA, 22 nt, Homo sapiens
caggcagucuggggguguaucc

SEQ ID NO: 30888 - RNA, 22 nt, Homo sapiens
cagguaguguguagcacagcag

SEQ ID NO: 30889 - RNA, 21 nt, Homo sapiens
cagguagugucugaagccaga

SEQ ID NO: 30890 - RNA, 22 nt, Homo sapiens
cgccgggggaugggcaccagcg

SEQ ID NO: 30891 - RNA, 22 nt, Homo sapiens
cgccugagcugaggaagcugca

SEQ ID NO: 30892 - RNA, 22 nt, Homo sapiens
cauuugcacugagacucagcuu

SEQ ID NO: 30893 - RNA, 22 nt, Homo sapiens
ccacaaccuccauauccugggu

SEQ ID NO: 30894 - RNA, 22 nt, Homo sapiens
ccaaauccauccaaaucauaga

SEQ ID NO: 30895 - RNA, 22 nt, Homo sapiens
ccaccgggucccagcucugcuc

SEQ ID NO: 30896 - RNA, 22 nt, Homo sapiens
ccacccuuccauucuuccucuu

SEQ ID NO: 30897 - RNA, 20 nt, Homo sapiens
ccccguguuuagcauaucau

SEQ ID NO: 30898 - RNA, 17 nt, Homo sapiens
ccccugagcgaugcagu

SEQ ID NO: 30899 - RNA, 22 nt, Homo sapiens
cccgugucuuggucuagggccu

SEQ ID NO: 30900 - RNA, 23 nt, Homo sapiens
cccucagaagugcagggagagaa

SEQ ID NO: 30901 - RNA, 22 nt, Homo sapiens
cccugaagacuccaccgucaug

SEQ ID NO: 30902 - RNA, 20 nt, Homo sapiens
ccccuggaguggggcugcuu

SEQ ID NO: 30903 - RNA, 22 nt, Homo sapiens
ucuuucacuuagcaugauguuu

SEQ ID NO: 30904 - RNA, 22 nt, Homo sapiens
ucugugguaagaaacgcauguc

SEQ ID NO: 30905 - RNA, 22 nt, Homo sapiens
ucuguggucagcauccgccacu

SEQ ID NO: 30906 - RNA, 22 nt, Homo sapiens
ucugugcuugucauaugcuuug

SEQ ID NO: 30907 - RNA, 22 nt, Homo sapiens
ugaaagcuacagucuccuagga

SEQ ID NO: 30908 - RNA, 22 nt, Homo sapiens
ugacaagacuacauaucccauu

SEQ ID NO: 30909 - RNA, 22 nt, Homo sapiens
ugacaagagaccccuccgcagg

SEQ ID NO: 30910 - RNA, 23 nt, Homo sapiens
ucugcggguguggacccuagugc

SEQ ID NO: 30911 - RNA, 23 nt, Homo sapiens
ucuggaucauucguagugccagc

SEQ ID NO: 30912 - RNA, 22 nt, Homo sapiens
ucugucuuugucaggaccagag

SEQ ID NO: 30913 - RNA, 22 nt, Homo sapiens
ucugguguuauucauguaguuu

SEQ ID NO: 30914 - RNA, 22 nt, Homo sapiens
ucuggguuuuguaccgugcucg

SEQ ID NO: 30915 - RNA, 20 nt, Homo sapiens
ucuggguuuuggccacgccc

SEQ ID NO: 30916 - RNA, 22 nt, Homo sapiens
ucuggguuuuuccauugccggu

SEQ ID NO: 30917 - RNA, 22 nt, Homo sapiens
ucuggugugcucuggacuugca

SEQ ID NO: 30918 - RNA, 22 nt, Homo sapiens
ucugacaaugaacaaucuauag

SEQ ID NO: 30919 - RNA, 22 nt, Homo sapiens
ucccagucuagagccggauugg

SEQ ID NO: 30920 - RNA, 22 nt, Homo sapiens
ucccaguguguagcuugucucu

SEQ ID NO: 30921 - RNA, 22 nt, Homo sapiens
ucccagugcuaugcaaaagccu

SEQ ID NO: 30922 - RNA, 19 nt, Homo sapiens
ucccaagaugcucauacau

SEQ ID NO: 30923 - RNA, 22 nt, Homo sapiens
ucauggggugagcuacaggcac

SEQ ID NO: 30924 - RNA, 18 nt, Homo sapiens
uccaguuuucccagcauc

SEQ ID NO: 30925 - RNA, 21 nt, Homo sapiens
ucagggaccugcuguacugau

SEQ ID NO: 30926 - RNA, 22 nt, Homo sapiens
ucagguagcuagauuaugugag

SEQ ID NO: 30927 - RNA, 22 nt, Homo sapiens
ucacaugucagccguggggaag

SEQ ID NO: 30928 - RNA, 22 nt, Homo sapiens
ucacugcgcuucagccugggug

SEQ ID NO: 30929 - RNA, 22 nt, Homo sapiens
uauuugguagcuauuuugcagu

SEQ ID NO: 30930 - RNA, 22 nt, Homo sapiens
uauuucaguugcguuucccgag

SEQ ID NO: 30931 - RNA, 22 nt, Homo sapiens
uggaucauucuuucuugcaggg

SEQ ID NO: 30932 - RNA, 22 nt, Homo sapiens
uggcagcgugaauguggcugaa

SEQ ID NO: 30933 - RNA, 22 nt, Homo sapiens
ugcuggugauuaaauccugaag

SEQ ID NO: 30934 - RNA, 22 nt, Homo sapiens
ugcuggugucaucaaggcuuug

SEQ ID NO: 30935 - RNA, 22 nt, Homo sapiens
ugcuuugguagaaaucuuuggu

SEQ ID NO: 30936 - RNA, 22 nt, Homo sapiens
uggagugcaauggugagaucuu

SEQ ID NO: 30937 - RNA, 22 nt, Homo sapiens
uggaauuaauccuccugguuuc

SEQ ID NO: 30938 - RNA, 22 nt, Homo sapiens
ugcaaaugucaaggguuagugu

SEQ ID NO: 30939 - RNA, 20 nt, Homo sapiens
ugccaagaaaugaggguauu

SEQ ID NO: 30940 - RNA, 19 nt, Homo sapiens
ugccaagaaagucagcuua

SEQ ID NO: 30941 - RNA, 18 nt, Homo sapiens
ugcuccccugggugagca

SEQ ID NO: 30942 - RNA, 22 nt, Homo sapiens
ugcguucauuuggccaguggcg

SEQ ID NO: 30943 - RNA, 22 nt, Homo sapiens
ugaguguccaccccuuucacag

SEQ ID NO: 30944 - RNA, 22 nt, Homo sapiens
ugagucuguuccaaagaaauaa

SEQ ID NO: 30945 - RNA, 22 nt, Homo sapiens
ugaguguccaaguaaggugaaa

SEQ ID NO: 30946 - RNA, 22 nt, Homo sapiens
ugaguaguauucuaugguaugu

SEQ ID NO: 30947 - RNA, 22 nt, Homo sapiens
ugaguagucagugggcaggaag

SEQ ID NO: 30948 - RNA, 22 nt, Homo sapiens
ugaguagucuagaguggaaugu

SEQ ID NO: 30949 - RNA, 23 nt, Homo sapiens
ugagaugucugauugcgaggguc

SEQ ID NO: 30950 - RNA, 22 nt, Homo sapiens
ugagaucgagucucgcucuguc

SEQ ID NO: 30951 - RNA, 22 nt, Homo sapiens
ugacaagaguagagagggugcc

SEQ ID NO: 30952 - RNA, 22 nt, Homo sapiens
ugagacggaguuucacucuugu

SEQ ID NO: 30953 - RNA, 22 nt, Homo sapiens
ugagacggaguuucgcucuugu

SEQ ID NO: 30954 - RNA, 22 nt, Homo sapiens
ugagacugaguuuugcucguug

SEQ ID NO: 30955 - RNA, 22 nt, Homo sapiens
ugagaggugaauggcaggcuca

SEQ ID NO: 30956 - RNA, 22 nt, Homo sapiens
uaguuguugcagguaggaugua

SEQ ID NO: 30957 - RNA, 22 nt, Homo sapiens
uagggaguuuuggggugcagaa

SEQ ID NO: 30958 - RNA, 22 nt, Homo sapiens
uagggaguguccuuucgggaaa

SEQ ID NO: 30959 - RNA, 22 nt, Homo sapiens
uaggcuguguggccguggggcu

SEQ ID NO: 30960 - RNA, 21 nt, Homo sapiens
uagcugaugauguaggggaug

SEQ ID NO: 30961 - RNA, 21 nt, Homo sapiens
uagcauacauuuugcaucuua

SEQ ID NO: 30962 - RNA, 17 nt, Homo sapiens
uagcucuauuucuagcc

SEQ ID NO: 30963 - RNA, 22 nt, Homo sapiens
uauacuguuuucuauaguggcu

SEQ ID NO: 30964 - RNA, 22 nt, Homo sapiens
uaugaaccuguuaucuagguuu

SEQ ID NO: 30965 - RNA, 22 nt, Homo sapiens
uaucugcacauacacuuauagc

SEQ ID NO: 30966 - RNA, 22 nt, Homo sapiens
uauggcucuauuuccuugucua

SEQ ID NO: 30967 - RNA, 19 nt, Homo sapiens
uaugggauuuuuagggugu

SEQ ID NO: 30968 - RNA, 22 nt, Homo sapiens
uauggguguuauugcaugggag

SEQ ID NO: 30969 - RNA, 19 nt, Homo sapiens
uacccagaagcagcauugu

SEQ ID NO: 30970 - RNA, 22 nt, Homo sapiens
guugggcccauagacugccagu

SEQ ID NO: 30971 - RNA, 22 nt, Homo sapiens
guuugcauagugcugggagggg

SEQ ID NO: 30972 - RNA, 17 nt, Homo sapiens
guuuggguacuggguaa

SEQ ID NO: 30973 - RNA, 22 nt, Homo sapiens
gugguuuuuaaaguaccugugg

SEQ ID NO: 30974 - RNA, 19 nt, Homo sapiens
gugguauuaccuuuugauu

SEQ ID NO: 30975 - RNA, 22 nt, Homo sapiens
gugguguuugagcugccaggga

SEQ ID NO: 30976 - RNA, 22 nt, Homo sapiens
uaacugucucaggccaugggcg

SEQ ID NO: 30977 - RNA, 23 nt, Homo sapiens
uaagacacuaacuuuaugcuuug

SEQ ID NO: 30978 - RNA, 20 nt, Homo sapiens
uaagacaugguccacaugcc

SEQ ID NO: 30979 - RNA, 22 nt, Homo sapiens
uaaaccacguuuacauuugaga

SEQ ID NO: 30980 - RNA, 22 nt, Homo sapiens
guuugugguuaaagccuuucau

SEQ ID NO: 30981 - RNA, 22 nt, Homo sapiens
guuuugguuauauggaucaguu

SEQ ID NO: 30982 - RNA, 22 nt, Homo sapiens
guuugguugcauggaaaauuua

SEQ ID NO: 30983 - RNA, 22 nt, Homo sapiens
guuugugcuccuaugagaaccu

SEQ ID NO: 30984 - RNA, 22 nt, Homo sapiens
gcucguuuuugccucugguugc

SEQ ID NO: 30985 - RNA, 19 nt, Homo sapiens
gcucaccuugcugcuccag

SEQ ID NO: 30986 - RNA, 22 nt, Homo sapiens
gcacgugcacccacaugcacgu

SEQ ID NO: 30987 - RNA, 22 nt, Homo sapiens
gcgguuuuaagugaguuucuua

SEQ ID NO: 30988 - RNA, 22 nt, Homo sapiens
gcuuggugugcaagugguacua

SEQ ID NO: 30989 - RNA, 22 nt, Homo sapiens
ggaaaguccuucuguaggcucc

SEQ ID NO: 30990 - RNA, 22 nt, Homo sapiens
gcuguuugccgccaucgcagac

SEQ ID NO: 30991 - RNA, 22 nt, Homo sapiens
gcugucaugagcaacacaugaa

SEQ ID NO: 30992 - RNA, 22 nt, Homo sapiens
gcugguguugugaaucaggccg

SEQ ID NO: 30993 - RNA, 22 nt, Homo sapiens
gcuggucugccguaguaggugc

SEQ ID NO: 30994 - RNA, 22 nt, Homo sapiens
gcugguguagagugcagaaagg

SEQ ID NO: 30995 - RNA, 22 nt, Homo sapiens
gcugguauuacaggcaugagcc

SEQ ID NO: 30996 - RNA, 22 nt, Homo sapiens
ggaguaugaaacccacuccaau

SEQ ID NO: 30997 - RNA, 22 nt, Homo sapiens
ggaguaggcuguccggcaccca

SEQ ID NO: 30998 - RNA, 19 nt, Homo sapiens
ggacugucauggaguaguu

SEQ ID NO: 30999 - RNA, 22 nt, Homo sapiens
ggagaugugccugcucugcucu

SEQ ID NO: 31000 - RNA, 22 nt, Homo sapiens
ggcaccacagacgccaggcgug

SEQ ID NO: 31001 - RNA, 22 nt, Homo sapiens
gguggucuuccccuggaguucg

SEQ ID NO: 31002 - RNA, 22 nt, Homo sapiens
ggucuuggagaauuguccuggg

SEQ ID NO: 31003 - RNA, 22 nt, Homo sapiens
ggucugguguugaaauucuuca

SEQ ID NO: 31004 - RNA, 19 nt, Homo sapiens
ggucauggagguuguguga

SEQ ID NO: 31005 - RNA, 18 nt, Homo sapiens
ggcugguguuuuaguaua

SEQ ID NO: 31006 - RNA, 22 nt, Homo sapiens
ggcuguguguuaaaauaggcuu

SEQ ID NO: 31007 - RNA, 22 nt, Homo sapiens
gggaagugugcagaguucucuu

SEQ ID NO: 31008 - RNA, 22 nt, Homo sapiens
gggcacgugugugcugugcuca

SEQ ID NO: 31009 - RNA, 23 nt, Homo sapiens
gucuggucccugguuggaaacca

SEQ ID NO: 31010 - RNA, 22 nt, Homo sapiens
gucuccggauguuguuuuuggg

SEQ ID NO: 31011 - RNA, 22 nt, Homo sapiens
gucuggguuuguuuguacuugc

SEQ ID NO: 31012 - RNA, 22 nt, Homo sapiens
gucuuggagaacucagcuuggc

SEQ ID NO: 31013 - RNA, 22 nt, Homo sapiens
gucugguuggaguaguuuucag

SEQ ID NO: 31014 - RNA, 22 nt, Homo sapiens
gucugugcauuaauacgugcug

SEQ ID NO: 31015 - RNA, 22 nt, Homo sapiens
gucauggguuaaagguggauac

SEQ ID NO: 31016 - RNA, 22 nt, Homo sapiens
gucagggagggauagaugauua

SEQ ID NO: 31017 - RNA, 22 nt, Homo sapiens
gucagguauguuccaaaggcgg

SEQ ID NO: 31018 - RNA, 22 nt, Homo sapiens
gugaccaaagauagcucaaguu

SEQ ID NO: 31019 - RNA, 22 nt, Homo sapiens
gugacaguggagacuuacuuca

SEQ ID NO: 31020 - RNA, 22 nt, Homo sapiens
gugacuggacucugaagaaaau

SEQ ID NO: 31021 - RNA, 22 nt, Homo sapiens
guggcaugaaagcagauaccac

SEQ ID NO: 31022 - RNA, 22 nt, Homo sapiens
guggcuuuaaguacgauugagg

SEQ ID NO: 31023 - RNA, 22 nt, Homo sapiens
gugggauaauuuuuggugcugu

SEQ ID NO: 31024 - RNA, 22 nt, Homo sapiens
gugggauauaaucaguccugua

SEQ ID NO: 31025 - RNA, 22 nt, Homo sapiens
gugggaugaucgcuugagccca

SEQ ID NO: 31026 - RNA, 22 nt, Homo sapiens
gugggaagcuggaacucccucc

SEQ ID NO: 31027 - RNA, 22 nt, Homo sapiens
gugcgggaggcgcgccuaggug

SEQ ID NO: 31028 - RNA, 22 nt, Homo sapiens
gugcauaucugugguuggcuga

SEQ ID NO: 31029 - RNA, 22 nt, Homo sapiens
uguguaaauauauacacacgug

SEQ ID NO: 31030 - RNA, 22 nt, Homo sapiens
uguguuuuuauguaaaauggaa

SEQ ID NO: 31031 - RNA, 22 nt, Homo sapiens
uguuuuguuagcacucugggaa

SEQ ID NO: 31032 - RNA, 22 nt, Homo sapiens
uguuuguuugagauggagucuc

SEQ ID NO: 31033 - RNA, 22 nt, Homo sapiens
uuaaggcauucuuugucuucau

SEQ ID NO: 31034 - RNA, 22 nt, Homo sapiens
uggucuggagagucccgcccag

SEQ ID NO: 31035 - RNA, 23 nt, Homo sapiens
uggucccguguucuggcuuuagg

SEQ ID NO: 31036 - RNA, 22 nt, Homo sapiens
ugguggcuuuucguagguucac

SEQ ID NO: 31037 - RNA, 22 nt, Homo sapiens
uguggccuuuguuucaguuggg

SEQ ID NO: 31038 - RNA, 22 nt, Homo sapiens
ugugcuugcuucuucuccuagu

SEQ ID NO: 31039 - RNA, 22 nt, Homo sapiens
uguguaaauagcuacggaucug

SEQ ID NO: 31040 - RNA, 22 nt, Homo sapiens
uguggcuuuguaaccauggguc

SEQ ID NO: 31041 - RNA, 22 nt, Homo sapiens
ugugcgugugccuguaagaauu

SEQ ID NO: 31042 - RNA, 18 nt, Homo sapiens
uucagugaauucuuuuga

SEQ ID NO: 31043 - RNA, 22 nt, Homo sapiens
uucaguugcaucaguugaccag

SEQ ID NO: 31044 - RNA, 22 nt, Homo sapiens
uucagggagaaggcaaacguug

SEQ ID NO: 31045 - RNA, 22 nt, Homo sapiens
uucacagacaacuggucccuua

SEQ ID NO: 31046 - RNA, 18 nt, Homo sapiens
uuaccagcauaccuacac

SEQ ID NO: 31047 - RNA, 22 nt, Homo sapiens
uucugugguugaaaggagagau

SEQ ID NO: 31048 - RNA, 22 nt, Homo sapiens
uucugugguuucauuuaccugu

SEQ ID NO: 31049 - RNA, 22 nt, Homo sapiens
uucuggcucgauucucugaccg

SEQ ID NO: 31050 - RNA, 22 nt, Homo sapiens
uucugcacaucgaucacaagau

SEQ ID NO: 31051 - RNA, 22 nt, Homo sapiens
uuuggucuuuuauuuaaagcag

SEQ ID NO: 31052 - RNA, 22 nt, Homo sapiens
uuugggccucugauuucuuugg

SEQ ID NO: 31053 - RNA, 22 nt, Homo sapiens
uuugggacuguauuaaaugccu

SEQ ID NO: 31054 - RNA, 22 nt, Homo sapiens
uuugugcuaacuuuaacucuua

SEQ ID NO: 31055 - RNA, 23 nt, Homo sapiens
uuugugcuaauuuaugggcucuu

SEQ ID NO: 31056 - RNA, 22 nt, Homo sapiens
uuugugcuccuaugagaaucua

SEQ ID NO: 31057 - RNA, 22 nt, Homo sapiens
uuugugcuccugugagaaucua

SEQ ID NO: 31058 - RNA, 22 nt, Homo sapiens
uuugugcuccucucaguaugug

SEQ ID NO: 31059 - RNA, 22 nt, Homo sapiens
uuugucuccuaagacucugugg

SEQ ID NO: 31060 - RNA, 22 nt, Homo sapiens
uuugacacugggagugugggug

SEQ ID NO: 31061 - RNA, 22 nt, Homo sapiens
uuugauguccaccucagcccac

SEQ ID NO: 31062 - RNA, 22 nt, Homo sapiens
uuugauguugagacuauaaagc

SEQ ID NO: 31063 - RNA, 22 nt, Homo sapiens
uuugcauauguugaaccagccu

SEQ ID NO: 31064 - RNA, 22 nt, Homo sapiens
uuguauguugaaugaugguaua

SEQ ID NO: 31065 - RNA, 22 nt, Homo sapiens
uuguauccaucuuucaggcaac

SEQ ID NO: 31066 - RNA, 21 nt, Homo sapiens
uugguucccucugacaggucu

SEQ ID NO: 31067 - RNA, 22 nt, Homo sapiens
uugugguagugaaugagucuca

SEQ ID NO: 31068 - RNA, 22 nt, Homo sapiens
uuucaggcaagggugacccuga

SEQ ID NO: 31069 - RNA, 22 nt, Homo sapiens
uuucgguuaucuagcuuuauga

SEQ ID NO: 31070 - RNA, 22 nt, Homo sapiens
uuucugugguccucuugaaggu

SEQ ID NO: 31071 - RNA, 22 nt, Homo sapiens
uuuauugcucuaaaguugccau

SEQ ID NO: 31072 - RNA, 19 nt, Homo sapiens
uuggcagaguugcccccua

SEQ ID NO: 31073 - RNA, 19 nt, Homo sapiens
uuggucccuuuggguucuu

SEQ ID NO: 31074 - RNA, 22 nt, Homo sapiens
uugguauguaauuuauauugua

SEQ ID NO: 31075 - RNA, 22 nt, Homo sapiens
uuggccccuuucauccacagcu

SEQ ID NO: 31076 - RNA, 22 nt, Homo sapiens
uugcauauucucugaggcagga

SEQ ID NO: 31077 - RNA, 22 nt, Homo sapiens
uugccugagaagccaagaauaa

SEQ ID NO: 31078 - RNA, 22 nt, Homo sapiens
uucuggcucaggucaacacuuc

SEQ ID NO: 31079 - RNA, 19 nt, Homo sapiens
uugcauauguugaaccagc

SEQ ID NO: 31080 - RNA, 22 nt, Homo sapiens
ugacaagaaagcgucuucuuuu

SEQ ID NO: 31081 - RNA, 23 nt, Homo sapiens
ugacaagagcgagacuuggucuc

SEQ ID NO: 31082 - RNA, 22 nt, Homo sapiens
ugacaagaacuuuccauaguaa

SEQ ID NO: 31083 - RNA, 22 nt, Homo sapiens
ugacaagauauggucuuaucaa

SEQ ID NO: 31084 - RNA, 22 nt, Homo sapiens
ucuuugguaauggaugucugau

SEQ ID NO: 31085 - RNA, 22 nt, Homo sapiens
ucuuuggguguauuucacagcc

SEQ ID NO: 31086 - RNA, 22 nt, Homo sapiens
ucuuugguaggaguaggaggcc

SEQ ID NO: 31087 - RNA, 22 nt, Homo sapiens
ugaacacagccugccucugcca

SEQ ID NO: 31088 - RNA, 22 nt, Homo sapiens
ugaacacaucuccugguaccug

SEQ ID NO: 31089 - RNA, 22 nt, Homo sapiens
ucugggguuuccacuuuuacuu

SEQ ID NO: 31090 - RNA, 22 nt, Homo sapiens
ucugggguuagucaaagguaug

SEQ ID NO: 31091 - RNA, 23 nt, Homo sapiens
ucugguguugucaaaugcugguu

SEQ ID NO: 31092 - RNA, 22 nt, Homo sapiens
ucugguuccugcauucauucaa

SEQ ID NO: 31093 - RNA, 22 nt, Homo sapiens
ucugguuccuuggcuucggguc

SEQ ID NO: 31094 - RNA, 21 nt, Homo sapiens
aacacggugaaaucccgucuc

SEQ ID NO: 31095 - RNA, 22 nt, Homo sapiens
aacaggguggugccugguccau

SEQ ID NO: 31096 - RNA, 22 nt, Homo sapiens
ucauugguucuggguguuguug

SEQ ID NO: 31097 - RNA, 22 nt, Homo sapiens
ucauggggugcuuugcuagauu

SEQ ID NO: 31098 - RNA, 16 nt, Homo sapiens
ucccaccauugcuugu

SEQ ID NO: 31099 - RNA, 22 nt, Homo sapiens
uccaguggacagacauaccaug

SEQ ID NO: 31100 - RNA, 20 nt, Homo sapiens
uccaguuuuggagacauucu

SEQ ID NO: 31101 - RNA, 22 nt, Homo sapiens
uccccggaugacggccgcuuca

SEQ ID NO: 31102 - RNA, 22 nt, Homo sapiens
ucaucaggcucauucaagcuga

SEQ ID NO: 31103 - RNA, 22 nt, Homo sapiens
ucaucagguaugucagcggagu

SEQ ID NO: 31104 - RNA, 22 nt, Homo sapiens
ucagguugcuaaguauaauauu

SEQ ID NO: 31105 - RNA, 22 nt, Homo sapiens
ucagauguuucuuuaacgcaug

SEQ ID NO: 31106 - RNA, 21 nt, Homo sapiens
uggcuuauuugaaucuggcuu

SEQ ID NO: 31107 - RNA, 22 nt, Homo sapiens
uggcuuuuguuauuuggaagcu

SEQ ID NO: 31108 - RNA, 22 nt, Homo sapiens
uggguaggcccucauuggacag

SEQ ID NO: 31109 - RNA, 22 nt, Homo sapiens
ugggaaauguagccuagcugug

SEQ ID NO: 31110 - RNA, 22 nt, Homo sapiens
ugguaaacaacaggagaacuug

SEQ ID NO: 31111 - RNA, 22 nt, Homo sapiens
ugguacuguccuucuagauucc

SEQ ID NO: 31112 - RNA, 22 nt, Homo sapiens
ugguauguugucucuuuguucu

SEQ ID NO: 31113 - RNA, 19 nt, Homo sapiens
uggucaguucugggagcug

SEQ ID NO: 31114 - RNA, 22 nt, Homo sapiens
uggcaggugcacuggcuuugaa

SEQ ID NO: 31115 - RNA, 22 nt, Homo sapiens
uggcaagaagagcaugagacca

SEQ ID NO: 31116 - RNA, 19 nt, Homo sapiens
uggaccccuuccuuacacc

SEQ ID NO: 31117 - RNA, 22 nt, Homo sapiens
uggagaacugaugucuccaaga

SEQ ID NO: 31118 - RNA, 22 nt, Homo sapiens
uggagacaaagauagaaaagca

SEQ ID NO: 31119 - RNA, 22 nt, Homo sapiens
uggagguagagaugggaucucc

SEQ ID NO: 31120 - RNA, 22 nt, Homo sapiens
uggaggucauuggaucaugggg

SEQ ID NO: 31121 - RNA, 21 nt, Homo sapiens
uggaccccuuucuuacaccgu

SEQ ID NO: 31122 - RNA, 22 nt, Homo sapiens
uggaccccuucuccuauuaaaa

SEQ ID NO: 31123 - RNA, 22 nt, Homo sapiens
uggaccccugcucgggagcccu

SEQ ID NO: 31124 - RNA, 22 nt, Homo sapiens
ugcauauguugaaccagccuug

SEQ ID NO: 31125 - RNA, 22 nt, Homo sapiens
ugcauauguugagaugcauauu

SEQ ID NO: 31126 - RNA, 18 nt, Homo sapiens
ugcauauguugaaccagc

SEQ ID NO: 31127 - RNA, 22 nt, Homo sapiens
ugcccaguggacagaaagucau

SEQ ID NO: 31128 - RNA, 22 nt, Homo sapiens
uggaacacaucuaaggaagcag

SEQ ID NO: 31129 - RNA, 22 nt, Homo sapiens
ugcauaucuucagccgggcacg

SEQ ID NO: 31130 - RNA, 21 nt, Homo sapiens
ugcauaucucuaaugaccagu

SEQ ID NO: 31131 - RNA, 22 nt, Homo sapiens
ugcauacugggagguugggugu

SEQ ID NO: 31132 - RNA, 22 nt, Homo sapiens
ugcaccacugcuagccugggua

SEQ ID NO: 31133 - RNA, 22 nt, Homo sapiens
ugagcuccuucauaaaaaggca

SEQ ID NO: 31134 - RNA, 22 nt, Homo sapiens
ugagguugucagugucauucuu

SEQ ID NO: 31135 - RNA, 22 nt, Homo sapiens
ugaguauguuuagaaguaaagg

SEQ ID NO: 31136 - RNA, 22 nt, Homo sapiens
ugaguauguaggaugugucuua

SEQ ID NO: 31137 - RNA, 19 nt, Homo sapiens
ugaccagggacagaaacca

SEQ ID NO: 31138 - RNA, 20 nt, Homo sapiens
ugagccccuggacucaagcg

SEQ ID NO: 31139 - RNA, 22 nt, Homo sapiens
cacugcacuccagccuaagagg

SEQ ID NO: 31140 - RNA, 22 nt, Homo sapiens
caccgagguuggagugcagugg

SEQ ID NO: 31141 - RNA, 22 nt, Homo sapiens
caacacagugaaacccgucucu

SEQ ID NO: 31142 - RNA, 22 nt, Homo sapiens
cagccgggugagguggcuuguu

SEQ ID NO: 31143 - RNA, 22 nt, Homo sapiens
auugcauaaacacauuucuuau

SEQ ID NO: 31144 - RNA, 22 nt, Homo sapiens
auuugguuauucaguuguucag

SEQ ID NO: 31145 - RNA, 22 nt, Homo sapiens
auuugguaauauuuaaggacuu

SEQ ID NO: 31146 - RNA, 22 nt, Homo sapiens
auuugguuauggucauggacac

SEQ ID NO: 31147 - RNA, 20 nt, Homo sapiens
auuugcauuauggagcaccc

SEQ ID NO: 31148 - RNA, 22 nt, Homo sapiens
auuugguagaguucgauaccug

SEQ ID NO: 31149 - RNA, 22 nt, Homo sapiens
cugaauguccaggcagagguuu

SEQ ID NO: 31150 - RNA, 22 nt, Homo sapiens
cuaugguuucuccauaucauca

SEQ ID NO: 31151 - RNA, 22 nt, Homo sapiens
ccacaguagucuugggaugggc

SEQ ID NO: 31152 - RNA, 22 nt, Homo sapiens
ccacugggcuagguguuuugga

SEQ ID NO: 31153 - RNA, 22 nt, Homo sapiens
caucacauucugagauacugag

SEQ ID NO: 31154 - RNA, 22 nt, Homo sapiens
caucacaguacuaaucgucaua

SEQ ID NO: 31155 - RNA, 22 nt, Homo sapiens
ccccaguguguaaaggccuugc

SEQ ID NO: 31156 - RNA, 22 nt, Homo sapiens
cccaguguuacgugacagccug

SEQ ID NO: 31157 - RNA, 22 nt, Homo sapiens
ccaugaacuagaauagaacaug

SEQ ID NO: 31158 - RNA, 18 nt, Homo sapiens
ccauucaacagauuuguc

SEQ ID NO: 31159 - RNA, 22 nt, Homo sapiens
ccccuguaucucagcgucuuca

SEQ ID NO: 31160 - RNA, 19 nt, Homo sapiens
ccccuguggauaccgaggg

SEQ ID NO: 31161 - RNA, 22 nt, Homo sapiens
ccccggguucugucugcccuug

SEQ ID NO: 31162 - RNA, 22 nt, Homo sapiens
ccccggguggauguacauguga

SEQ ID NO: 31163 - RNA, 18 nt, Homo sapiens
cccgggugggcuguuccc

SEQ ID NO: 31164 - RNA, 22 nt, Homo sapiens
cccuugcacuucagagcugcau

SEQ ID NO: 31165 - RNA, 22 nt, Homo sapiens
ccggcuguguggagaggccccu

SEQ ID NO: 31166 - RNA, 22 nt, Homo sapiens
gauuugagagaggguguuuaua

SEQ ID NO: 31167 - RNA, 21 nt, Homo sapiens
gcaaaggaauugccuaagcuu

SEQ ID NO: 31168 - RNA, 22 nt, Homo sapiens
gcccaguagcaguacaucccuu

SEQ ID NO: 31169 - RNA, 22 nt, Homo sapiens
gccccugagacuugccucgggc

SEQ ID NO: 31170 - RNA, 22 nt, Homo sapiens
gccccgggugaugcagccguca

SEQ ID NO: 31171 - RNA, 22 nt, Homo sapiens
gcgguagcauagacugcaggac

SEQ ID NO: 31172 - RNA, 22 nt, Homo sapiens
gccugagaggauaugauccccu

SEQ ID NO: 31173 - RNA, 22 nt, Homo sapiens
gcgcagugggcugugccaucca

SEQ ID NO: 31174 - RNA, 22 nt, Homo sapiens
gcccuguugcccugaauacaua

SEQ ID NO: 31175 - RNA, 22 nt, Homo sapiens
gccgagagauuuggaaugggga

SEQ ID NO: 31176 - RNA, 22 nt, Homo sapiens
gcccuguguuuggguaugguca

SEQ ID NO: 31177 - RNA, 22 nt, Homo sapiens
gccuagggacaaaccguccgac

SEQ ID NO: 31178 - RNA, 22 nt, Homo sapiens
gcugguguucaggcccucaguc

SEQ ID NO: 31179 - RNA, 22 nt, Homo sapiens
gaugaaacaucuuuggaaacug

SEQ ID NO: 31180 - RNA, 22 nt, Homo sapiens
gaucccauuggcugccaugugg

SEQ ID NO: 31181 - RNA, 22 nt, Homo sapiens
gagaggucguauaugauuucug

SEQ ID NO: 31182 - RNA, 22 nt, Homo sapiens
gagaucauguacuagaacaccu

SEQ ID NO: 31183 - RNA, 22 nt, Homo sapiens
gagguaugauugacauauaaaa

SEQ ID NO: 31184 - RNA, 22 nt, Homo sapiens
gagguauggauaucuggagagg

SEQ ID NO: 31185 - RNA, 22 nt, Homo sapiens
gagagcauuaagccaucaucau

SEQ ID NO: 31186 - RNA, 22 nt, Homo sapiens
gaaucacaguuauuagagcagc

SEQ ID NO: 31187 - RNA, 20 nt, Homo sapiens
gacaaaccuagaugguacag

SEQ ID NO: 31188 - RNA, 22 nt, Homo sapiens
cuuugcuaauccaacccucauc

SEQ ID NO: 31189 - RNA, 22 nt, Homo sapiens
cuuugguuaauaggauauggca

SEQ ID NO: 31190 - RNA, 22 nt, Homo sapiens
gaagagacagguucccacaaaa

SEQ ID NO: 31191 - RNA, 22 nt, Homo sapiens
cugauugugcagagguguaauu

SEQ ID NO: 31192 - RNA, 22 nt, Homo sapiens
cugauugucaucaauauuauua

SEQ ID NO: 31193 - RNA, 20 nt, Homo sapiens
cuucacagaaguggaaucau

SEQ ID NO: 31194 - RNA, 22 nt, Homo sapiens
cuugacacugcaguuuuccugg

SEQ ID NO: 31195 - RNA, 22 nt, Homo sapiens
cuugacacugguuuucugaaua

SEQ ID NO: 31196 - RNA, 22 nt, Homo sapiens
cuugacacugucacucaggcca

SEQ ID NO: 31197 - RNA, 22 nt, Homo sapiens
cuugguacucugugucccagcu

SEQ ID NO: 31198 - RNA, 22 nt, Homo sapiens
cuugcauagaguuauugcccuu

SEQ ID NO: 31199 - RNA, 22 nt, Homo sapiens
gguccgccugccuuggccuccc

SEQ ID NO: 31200 - RNA, 22 nt, Homo sapiens
ggucccccuccacucucgcaaa

SEQ ID NO: 31201 - RNA, 22 nt, Homo sapiens
ggugcuugaggaacggaggcug

SEQ ID NO: 31202 - RNA, 22 nt, Homo sapiens
gguggcuuuuugugauggcuga

SEQ ID NO: 31203 - RNA, 22 nt, Homo sapiens
guaccugggugacaggauuauu

SEQ ID NO: 31204 - RNA, 22 nt, Homo sapiens
guauuguacuacaagcucuuua

SEQ ID NO: 31205 - RNA, 21 nt, Homo sapiens
guaugguugaagugacaagcc

SEQ ID NO: 31206 - RNA, 22 nt, Homo sapiens
guaugguugaagugacaagcca

SEQ ID NO: 31207 - RNA, 22 nt, Homo sapiens
guaugguuguaugaggacccau

SEQ ID NO: 31208 - RNA, 22 nt, Homo sapiens
ggcucguguuuucuguccaguu

SEQ ID NO: 31209 - RNA, 22 nt, Homo sapiens
ggcgguguccuccaagugcuuc

SEQ ID NO: 31210 - RNA, 22 nt, Homo sapiens
ggccggguggccauggcugccc

SEQ ID NO: 31211 - RNA, 22 nt, Homo sapiens
ggacaagaucuuccaccauuca

SEQ ID NO: 31212 - RNA, 22 nt, Homo sapiens
ggaaugcuaaaauaggaugcug

SEQ ID NO: 31213 - RNA, 22 nt, Homo sapiens
ggguaggcaagcggaugucaga

SEQ ID NO: 31214 - RNA, 22 nt, Homo sapiens
gggugguuuuaucucuucccuu

SEQ ID NO: 31215 - RNA, 22 nt, Homo sapiens
gggugguuuuauuaucagugac

SEQ ID NO: 31216 - RNA, 22 nt, Homo sapiens
ggguucccuucuggcucagggu

SEQ ID NO: 31217 - RNA, 22 nt, Homo sapiens
gggguuuuaccuucguauucuu

SEQ ID NO: 31218 - RNA, 22 nt, Homo sapiens
gggguaggcuacacugaguucc

SEQ ID NO: 31219 - RNA, 22 nt, Homo sapiens
gggggagugugguacccagcau

SEQ ID NO: 31220 - RNA, 22 nt, Homo sapiens
gggaaugaagagaaccuuccca

SEQ ID NO: 31221 - RNA, 22 nt, Homo sapiens
ggcuuuggucacacaggggcaa

SEQ ID NO: 31222 - RNA, 22 nt, Homo sapiens
guucagguauucuggaacagag

SEQ ID NO: 31223 - RNA, 22 nt, Homo sapiens
guggcaugaaagcaucugugau

SEQ ID NO: 31224 - RNA, 22 nt, Homo sapiens
guggcacgaugaucugggcuca

SEQ ID NO: 31225 - RNA, 22 nt, Homo sapiens
gugcauaugcaugugcaugcac

SEQ ID NO: 31226 - RNA, 22 nt, Homo sapiens
gugcuaggugcuaggaagauag

SEQ ID NO: 31227 - RNA, 22 nt, Homo sapiens
guggcgagaucauagcucauug

SEQ ID NO: 31228 - RNA, 22 nt, Homo sapiens
guggcuuuauuuagaagcaggg

SEQ ID NO: 31229 - RNA, 22 nt, Homo sapiens
gucaugcaggguucgccagccc

SEQ ID NO: 31230 - RNA, 22 nt, Homo sapiens
gucauccaggcuggagugaagc

SEQ ID NO: 31231 - RNA, 22 nt, Homo sapiens
gucucacaggcaugaugccagc

SEQ ID NO: 31232 - RNA, 18 nt, Homo sapiens
gucucacaugguggaagc

SEQ ID NO: 31233 - RNA, 22 nt, Homo sapiens
gucccugaggaacauccagggc

SEQ ID NO: 31234 - RNA, 22 nt, Homo sapiens
gucccguugugacuuacaaugg

SEQ ID NO: 31235 - RNA, 19 nt, Homo sapiens
gugagcacagacaauacaa

SEQ ID NO: 31236 - RNA, 23 nt, Homo sapiens
gugcaguggcgagauuucggcuc

SEQ ID NO: 31237 - RNA, 22 nt, Homo sapiens
gugcauauaaguuguuucuagu

SEQ ID NO: 31238 - RNA, 22 nt, Homo sapiens
gugagcgaggaaacgacggcgc

SEQ ID NO: 31239 - RNA, 22 nt, Homo sapiens
uacaacacugguucgacaugug

SEQ ID NO: 31240 - RNA, 22 nt, Homo sapiens
uacaccauuugauucuuuaagc

SEQ ID NO: 31241 - RNA, 22 nt, Homo sapiens
uacacacguguguauauauaca

SEQ ID NO: 31242 - RNA, 22 nt, Homo sapiens
uacacgugcacaacgugcacgu

SEQ ID NO: 31243 - RNA, 22 nt, Homo sapiens
uagacccauuguucagagagug

SEQ ID NO: 31244 - RNA, 22 nt, Homo sapiens
uacucaguagucuguugcuguc

SEQ ID NO: 31245 - RNA, 22 nt, Homo sapiens
uaggucccguuucagacugaga

SEQ ID NO: 31246 - RNA, 22 nt, Homo sapiens
uaguaaacauuuuucuaucauu

SEQ ID NO: 31247 - RNA, 22 nt, Homo sapiens
uaguaaacagcucugccacaau

SEQ ID NO: 31248 - RNA, 21 nt, Homo sapiens
uagcagcguuguugcaaaugu

SEQ ID NO: 31249 - RNA, 22 nt, Homo sapiens
uaguuuaucuucuggauggaca

SEQ ID NO: 31250 - RNA, 22 nt, Homo sapiens
uaugaaacucuaagauucacau

SEQ ID NO: 31251 - RNA, 22 nt, Homo sapiens
uauggccccuacaugugcaaaa

SEQ ID NO: 31252 - RNA, 22 nt, Homo sapiens
uauugacauuacagugggucuu

SEQ ID NO: 31253 - RNA, 22 nt, Homo sapiens
uauggcuuuguuaacauuuucu

SEQ ID NO: 31254 - RNA, 22 nt, Homo sapiens
aacaggcuccuaggggugcacc

SEQ ID NO: 31255 - RNA, 20 nt, Homo sapiens
aaccccuauagagaaaccau

SEQ ID NO: 31256 - RNA, 20 nt, Homo sapiens
aacagcacugucugaagcuu

SEQ ID NO: 31257 - RNA, 23 nt, Homo sapiens
aagugguuuugaacccggacccu

SEQ ID NO: 31258 - RNA, 22 nt, Homo sapiens
aaggagcaguggacggguccua

SEQ ID NO: 31259 - RNA, 22 nt, Homo sapiens
aagcacccagccucacgccugc

SEQ ID NO: 31260 - RNA, 22 nt, Homo sapiens
aagcacccuuugucuggacaug

SEQ ID NO: 31261 - RNA, 22 nt, Homo sapiens
aaauccaucucuuggggcauug

SEQ ID NO: 31262 - RNA, 22 nt, Homo sapiens
aaaggcacuagaaguuaccuuu

SEQ ID NO: 31263 - RNA, 22 nt, Homo sapiens
aaaacgcauccucacaggucug

SEQ ID NO: 31264 - RNA, 19 nt, Homo sapiens
agcuuuggcuaacuuucuc

SEQ ID NO: 31265 - RNA, 22 nt, Homo sapiens
agcugguuuaauaugcugucug

SEQ ID NO: 31266 - RNA, 21 nt, Homo sapiens
agcugguuuccacagugugcu

SEQ ID NO: 31267 - RNA, 22 nt, Homo sapiens
aggagaucagccucccugcaac

SEQ ID NO: 31268 - RNA, 22 nt, Homo sapiens
aggagcacaauggucaugugga

SEQ ID NO: 31269 - RNA, 22 nt, Homo sapiens
aggaccccucaucagcaccagu

SEQ ID NO: 31270 - RNA, 22 nt, Homo sapiens
agguuguugcaugcuccuuagg

SEQ ID NO: 31271 - RNA, 22 nt, Homo sapiens
agguuuucagccccagccuagg

SEQ ID NO: 31272 - RNA, 22 nt, Homo sapiens
agguccacuuacuacuccuguu

SEQ ID NO: 31273 - RNA, 22 nt, Homo sapiens
aggugguuuugaugagcaggua

SEQ ID NO: 31274 - RNA, 22 nt, Homo sapiens
aggugguuuuucaacacacacu

SEQ ID NO: 31275 - RNA, 22 nt, Homo sapiens
aggugguauuucaaaguggcag

SEQ ID NO: 31276 - RNA, 22 nt, Homo sapiens
acuggcuuauuucacuuagcau

SEQ ID NO: 31277 - RNA, 22 nt, Homo sapiens
acugguguaugggaggucccaa

SEQ ID NO: 31278 - RNA, 22 nt, Homo sapiens
agagagguggguggagccccca

SEQ ID NO: 31279 - RNA, 22 nt, Homo sapiens
agcucuauuagaagccgugggu

SEQ ID NO: 31280 - RNA, 22 nt, Homo sapiens
agcagcucaugccuuugggagg

SEQ ID NO: 31281 - RNA, 22 nt, Homo sapiens
acacguguugaaauuuaauugc

SEQ ID NO: 31282 - RNA, 22 nt, Homo sapiens
aauaaagcauggcuacuccaua

SEQ ID NO: 31283 - RNA, 18 nt, Homo sapiens
acuggaauuaaacuuuuu

SEQ ID NO: 31284 - RNA, 22 nt, Homo sapiens
acugcacuuauccuccaauguu

SEQ ID NO: 31285 - RNA, 22 nt, Homo sapiens
acugaaucaucagguguguuug

SEQ ID NO: 31286 - RNA, 22 nt, Homo sapiens
accgggauguacuuggcggguu

SEQ ID NO: 31287 - RNA, 22 nt, Homo sapiens
aucccgagacuuugcugaaguu

SEQ ID NO: 31288 - RNA, 22 nt, Homo sapiens
auacuggcuuuccaauugugau

SEQ ID NO: 31289 - RNA, 22 nt, Homo sapiens
augagggagggguggugccgca

SEQ ID NO: 31290 - RNA, 22 nt, Homo sapiens
augaggacaucuuccuuaugga

SEQ ID NO: 31291 - RNA, 22 nt, Homo sapiens
aucugguguccucgugggaguc

SEQ ID NO: 31292 - RNA, 21 nt, Homo sapiens
aucugugagaccuuggggguu

SEQ ID NO: 31293 - RNA, 22 nt, Homo sapiens
aucugguguauuggugcugggu

SEQ ID NO: 31294 - RNA, 22 nt, Homo sapiens
augugcuuauagguguauguuu

SEQ ID NO: 31295 - RNA, 22 nt, Homo sapiens
augucuggcagaagacuucuca

SEQ ID NO: 31296 - RNA, 21 nt, Homo sapiens
augggguagaagagaaggcuu

SEQ ID NO: 31297 - RNA, 22 nt, Homo sapiens
auggcuuuggucucccagugau

SEQ ID NO: 31298 - RNA, 22 nt, Homo sapiens
auggcuuuuuucuugggcacuc

SEQ ID NO: 31299 - RNA, 22 nt, Homo sapiens
auggcuuuugaccugguaggau

SEQ ID NO: 31300 - RNA, 22 nt, Homo sapiens
auggcuuuuccugucuugcaug

SEQ ID NO: 31301 - RNA, 22 nt, Homo sapiens
auggcuuuuauuguguugaggu

SEQ ID NO: 31302 - RNA, 22 nt, Homo sapiens
auggcuuuaagagugucugaau

SEQ ID NO: 31303 - RNA, 22 nt, Homo sapiens
auggcuuucaggacguggcgag

SEQ ID NO: 31304 - RNA, 20 nt, Human herpesvirus 1
ggcuggcuucgaaggccgug

SEQ ID NO: 31305 - RNA, 22 nt, Human herpesvirus 1
accccaggcgugccgggggaac

SEQ ID NO: 31306 - RNA, 22 nt, Human herpesvirus 1
caucaacaggaggucagugucc

SEQ ID NO: 31307 - RNA, 22 nt, Human herpesvirus 1
agaugggcugcgcugggcgcca

SEQ ID NO: 31308 - RNA, 22 nt, Human herpesvirus 1
cuccccugcggcguugcgacau

SEQ ID NO: 31309 - RNA, 22 nt, Human herpesvirus 1
gccauggcggccggccgcuucg

SEQ ID NO: 31310 - RNA, 22 nt, Human herpesvirus 1
uggcgcacccggacguggggcg

SEQ ID NO: 31311 - RNA, 23 nt, Human herpesvirus 1
uggccgucaggagcucggcgcag

SEQ ID NO: 31312 - RNA, 22 nt, Human herpesvirus 1
uggccgucgagugccuggccgc

SEQ ID NO: 31313 - RNA, 22 nt, Human herpesvirus 1
uggaggccggauggacgaucuc

SEQ ID NO: 31314 - RNA, 20 nt, Human herpesvirus 1
ugcgucgcccgcgucuggac

SEQ ID NO: 31315 - RNA, 22 nt, Human herpesvirus 1
ugccggacacccaggggcgauu

SEQ ID NO: 31316 - RNA, 22 nt, Human herpesvirus 1
ugcgcaggugcaugccccaggu

SEQ ID NO: 31317 - RNA, 22 nt, Human herpesvirus 1
auaauuuuauuggugggucguu

SEQ ID NO: 31318 - RNA, 22 nt, Human herpesvirus 1
cacccggagguuccggaggcgc

SEQ ID NO: 31319 - RNA, 22 nt, Human herpesvirus 1
agugcucgcacuucgcccuaau

SEQ ID NO: 31320 - RNA, 22 nt, Human herpesvirus 1
aggccccuaggucgcgacggcu

SEQ ID NO: 31321 - RNA, 22 nt, Human herpesvirus 1
agcgcgcucgucugacguuugg

SEQ ID NO: 31322 - RNA, 22 nt, Human herpesvirus 1
agcguucgcacuucgucccaau

SEQ ID NO: 31323 - RNA, 22 nt, Human herpesvirus 1
cgcagaacgcccucgagucgcc

SEQ ID NO: 31324 - RNA, 22 nt, Human herpesvirus 1
cgcccccucccuguuugucgcc

SEQ ID NO: 31325 - RNA, 22 nt, Human herpesvirus 1
cgcccgcggagccaucggcguc

SEQ ID NO: 31326 - RNA, 22 nt, Human herpesvirus 1
cgaucucgaccgccuggcggaa

SEQ ID NO: 31327 - RNA, 22 nt, Human herpesvirus 1
ccuuggccgccccggcugcagg

SEQ ID NO: 31328 - RNA, 22 nt, Human herpesvirus 1
cgaacgcacaacggcgcugcuc

SEQ ID NO: 31329 - RNA, 22 nt, Human herpesvirus 1
cgacccgacgcgggaccgccag

SEQ ID NO: 31330 - RNA, 22 nt, Human herpesvirus 1
cggguguuuccucauggccccu

SEQ ID NO: 31331 - RNA, 23 nt, Human herpesvirus 1
cgguccauggcgucgcgggcguc

SEQ ID NO: 31332 - RNA, 22 nt, Human herpesvirus 1
cggggugaaugagcugggcggc

SEQ ID NO: 31333 - RNA, 23 nt, Human herpesvirus 1
cggggugaaugagcugggcggcc

SEQ ID NO: 31334 - RNA, 22 nt, Human herpesvirus 1
gcggucccgcgucgggucgugg

SEQ ID NO: 31335 - RNA, 23 nt, Human herpesvirus 1
gcggucccgcgucgggucgugga

SEQ ID NO: 31336 - RNA, 22 nt, Human herpesvirus 1
cgccggggcugcccggccguga

SEQ ID NO: 31337 - RNA, 22 nt, Human herpesvirus 1
cggacgucuucggaggccccgc

SEQ ID NO: 31338 - RNA, 17 nt, Human herpesvirus 1
cggccggccgccauggc

SEQ ID NO: 31339 - RNA, 23 nt, Human herpesvirus 1
cggccggccgccauggcguagcc

SEQ ID NO: 31340 - RNA, 22 nt, Human herpesvirus 1
gguguuuacgaacgaguuugac

SEQ ID NO: 31341 - RNA, 22 nt, Human herpesvirus 1
ggucggcgucggugauccccaa

SEQ ID NO: 31342 - RNA, 22 nt, Human herpesvirus 1
ggucgucggcgggcugacgauc

SEQ ID NO: 31343 - RNA, 22 nt, Human herpesvirus 1
ggguggcagcagcgccgggucu

SEQ ID NO: 31344 - RNA, 22 nt, Human herpesvirus 1
ggucccgacgccaacccaggcc

SEQ ID NO: 31345 - RNA, 22 nt, Human herpesvirus 1
gguccggagaucaugcgcgggu

SEQ ID NO: 31346 - RNA, 22 nt, Human herpesvirus 1
gggcguggccgcuauuauaaaa

SEQ ID NO: 31347 - RNA, 22 nt, Human herpesvirus 1
ggggcgagcugugcccgcguga

SEQ ID NO: 31348 - RNA, 22 nt, Human herpesvirus 1
ggggggccuccgacggugcguu

SEQ ID NO: 31349 - RNA, 22 nt, Human herpesvirus 1
ggggggugcucugauagucucg

SEQ ID NO: 31350 - RNA, 22 nt, Human herpesvirus 1
gucgcggcguccuggaucgacg

SEQ ID NO: 31351 - RNA, 22 nt, Human herpesvirus 1
gucgcucgguauucgaggccac

SEQ ID NO: 31352 - RNA, 22 nt, Human herpesvirus 1
guacgcgaccguguugguguga

SEQ ID NO: 31353 - RNA, 22 nt, Human herpesvirus 1
guacucuggguucccuagguuc

SEQ ID NO: 31354 - RNA, 22 nt, Human herpesvirus 1
guauuggucccaauggggucuc

SEQ ID NO: 31355 - RNA, 22 nt, Human herpesvirus 1
gucccgccgaacgcauacaugc

SEQ ID NO: 31356 - RNA, 22 nt, Human herpesvirus 1
ucgucgagcguaccgacgggcg

SEQ ID NO: 31357 - RNA, 22 nt, Human herpesvirus 1
ucgucgucagcaccgucaucca

SEQ ID NO: 31358 - RNA, 22 nt, Human herpesvirus 1
ucucgucgacaaacagggggaa

SEQ ID NO: 31359 - RNA, 19 nt, Human herpesvirus 1
gcucggcuugcgccugccc

SEQ ID NO: 31360 - RNA, 22 nt, Human herpesvirus 1
gcgugcaggaggcggacggccc

SEQ ID NO: 31361 - RNA, 22 nt, Human herpesvirus 1
gcuggccgagggcuucgacggc

SEQ ID NO: 31362 - RNA, 22 nt, Human herpesvirus 1
ggacggccuggacguugcgagc

SEQ ID NO: 31363 - RNA, 22 nt, Human herpesvirus 1
gggcccccgcuuccggaugcga

SEQ ID NO: 31364 - RNA, 22 nt, Human herpesvirus 1
gggcccggaacgggaggccaca

SEQ ID NO: 31365 - RNA, 22 nt, Human herpesvirus 1
gggccuaccguggacuccauuu

SEQ ID NO: 31366 - RNA, 20 nt, Human herpesvirus 1
ggcuggcuucgaaggccgug

SEQ ID NO: 31367 - RNA, 22 nt, Human herpesvirus 1
gggacgcgaguacccacguuaa

SEQ ID NO: 31368 - RNA, 22 nt, Human herpesvirus 1
gggagugagggucgcgucgucu

SEQ ID NO: 31369 - RNA, 22 nt, Human herpesvirus 1
ggcggacguggugccucagcgu

SEQ ID NO: 31370 - RNA, 22 nt, Human herpesvirus 1
ggcgcgacacgaacaccgggcg

SEQ ID NO: 31371 - RNA, 23 nt, Human herpesvirus 1
ggccagcgccgaggacagcagcg

SEQ ID NO: 31372 - RNA, 22 nt, Human herpesvirus 1
ggcccccguucgccgccugggu

SEQ ID NO: 31373 - RNA, 22 nt, Human herpesvirus 1
ggccggggcccgcgcgcugaug

SEQ ID NO: 31374 - RNA, 22 nt, Human herpesvirus 1
ggccgucguagauggugcgggu

SEQ ID NO: 31375 - RNA, 22 nt, Human herpesvirus 1
ggcagggcguuguucuggucaa

SEQ ID NO: 31376 - RNA, 22 nt, Human herpesvirus 1
uguugggggcggcgugcgugac

SEQ ID NO: 31377 - RNA, 22 nt, Human herpesvirus 1
uguggccucaccugaccaaccu

SEQ ID NO: 31378 - RNA, 20 nt, Human herpesvirus 1
ugugucgcagggcggcccgc

SEQ ID NO: 31379 - RNA, 22 nt, Human herpesvirus 1
uguccgucggcgccugggaucg

SEQ ID NO: 31380 - RNA, 22 nt, Human herpesvirus 1
uggggaccacgcccccaacacg

SEQ ID NO: 31381 - RNA, 22 nt, Human herpesvirus 1
uggguuuggcgcgcguaugcgu

SEQ ID NO: 31382 - RNA, 22 nt, Human herpesvirus 1
uggucccgacgccaacccaggc

SEQ ID NO: 31383 - RNA, 22 nt, Human herpesvirus 1
uccggacucaaccgccgaaccc

SEQ ID NO: 31384 - RNA, 22 nt, Human herpesvirus 1
uguaggcgaugcgggucccccg

SEQ ID NO: 31385 - RNA, 22 nt, Human herpesvirus 1
uccgcggaagacccaggccgcc

SEQ ID NO: 31386 - RNA, 22 nt, Human herpesvirus 1
uccccugugguguuuuugguua

SEQ ID NO: 31387 - RNA, 22 nt, Human herpesvirus 1
guucccccggcacgccuggggu

SEQ ID NO: 31388 - RNA, 17 nt, Human herpesvirus 1
gcggcggccgccguggc

SEQ ID NO: 31389 - RNA, 22 nt, Human herpesvirus 1
gugccgggcgcgugcgacggug

SEQ ID NO: 31390 - RNA, 23 nt, Human herpesvirus 1
guggaccugggaccgcgccgccc

SEQ ID NO: 31391 - RNA, 22 nt, Human herpesvirus 1
gacgucgacucuaucgcgcgca

SEQ ID NO: 31392 - RNA, 22 nt, Human herpesvirus 1
gagggcgagcggcuccugggca

SEQ ID NO: 31393 - RNA, 22 nt, Human herpesvirus 1
gagugccagcccugggaccgaa

SEQ ID NO: 31394 - RNA, 19 nt, Human herpesvirus 1
gcacggccgacgccgcggu

SEQ ID NO: 31395 - RNA, 22 nt, Human herpesvirus 1
gcaggccgugugcaggcccugc

SEQ ID NO: 31396 - RNA, 22 nt, Human herpesvirus 1
gccauggcggccggccgcuucg

SEQ ID NO: 31397 - RNA, 22 nt, Human herpesvirus 1
gcccacggcgucgcccugaaca

SEQ ID NO: 31398 - RNA, 22 nt, Human herpesvirus 1
gcccggcucgcgccgugcugac

SEQ ID NO: 31399 - RNA, 22 nt, Human herpesvirus 1
gccgaccgaguccgcgguccac

SEQ ID NO: 31400 - RNA, 18 nt, Human herpesvirus 1
gccgucgccaucgccacg

SEQ ID NO: 31401 - RNA, 21 nt, Human herpesvirus 1
gcgacaccuucccgugcaugc

SEQ ID NO: 31402 - RNA, 22 nt, Human herpesvirus 1
gcgcagacugucgacggccccc

SEQ ID NO: 31403 - RNA, 22 nt, Human herpesvirus 1
gcgcccgaggccucgaaccggc

SEQ ID NO: 31404 - RNA, 22 nt, Human herpesvirus 1
gcgcgugguccccggggacgug

SEQ ID NO: 31405 - RNA, 22 nt, Human herpesvirus 1
aaugcgcgcgauagagucgacg

SEQ ID NO: 31406 - RNA, 22 nt, Human herpesvirus 1
acccaggcggcgaacgggggcc

SEQ ID NO: 31407 - RNA, 22 nt, Human herpesvirus 1
accccaggcgugccgggggaac

SEQ ID NO: 31408 - RNA, 22 nt, Human herpesvirus 1
acgcccucccggugcagcugca

SEQ ID NO: 31409 - RNA, 22 nt, Human herpesvirus 1
acgccgccaucgcgcccuuucg

SEQ ID NO: 31410 - RNA, 22 nt, Human herpesvirus 1
acgcgcgauagagucgacgacc

SEQ ID NO: 31411 - RNA, 22 nt, Human herpesvirus 1
acgggcgcuuuggcacccaguc

SEQ ID NO: 31412 - RNA, 22 nt, Human herpesvirus 1
cagcggccggccggcgcuuagg

SEQ ID NO: 31413 - RNA, 22 nt, Human herpesvirus 1
ccacaacauggagcauacgcuc

SEQ ID NO: 31414 - RNA, 22 nt, Human herpesvirus 1
ccacgggccgcagcggcaccgu

SEQ ID NO: 31415 - RNA, 22 nt, Human herpesvirus 1
ccaggugccggccgccgugaaa

SEQ ID NO: 31416 - RNA, 22 nt, Human herpesvirus 1
ccccagcgugcaggcugcggcc

SEQ ID NO: 31417 - RNA, 22 nt, Human herpesvirus 1
ccggcgcgccggacuucugcga

SEQ ID NO: 31418 - RNA, 22 nt, Human herpesvirus 1
ccucgagacggccgccagcgcu

SEQ ID NO: 31419 - RNA, 22 nt, Human herpesvirus 1
cgucccccgacgaccucuugca

SEQ ID NO: 31420 - RNA, 22 nt, Human herpesvirus 1
cguccgaggccgccaaggcgcg

SEQ ID NO: 31421 - RNA, 23 nt, Human herpesvirus 1
cgucgacucuaucgcgcgugccg

SEQ ID NO: 31422 - RNA, 22 nt, Human herpesvirus 1
cgugacgggcggggcgucucac

SEQ ID NO: 31423 - RNA, 22 nt, Human herpesvirus 1
cguggccccacggucagucugg

SEQ ID NO: 31424 - RNA, 22 nt, Human herpesvirus 1
cucauggccacggcggccgccg

SEQ ID NO: 31425 - RNA, 22 nt, Human herpesvirus 1
cuccccugcggcguugcgacau

SEQ ID NO: 31426 - RNA, 22 nt, Human herpesvirus 1
ccgcgugggccccgcuggcguu

SEQ ID NO: 31427 - RNA, 22 nt, Human herpesvirus 1
ccggagagcggcuuggugcgga

SEQ ID NO: 31428 - RNA, 22 nt, Human herpesvirus 1
ccggaucgagguaccgucggug

SEQ ID NO: 31429 - RNA, 22 nt, Human herpesvirus 1
ccggccuggccgcccugugucu

SEQ ID NO: 31430 - RNA, 22 nt, Human herpesvirus 1
cccgcgcgucgacgggacccag

SEQ ID NO: 31431 - RNA, 22 nt, Human herpesvirus 1
ccgccgcuugaucauuaucacc

SEQ ID NO: 31432 - RNA, 22 nt, Human herpesvirus 1
gacccggacgccgaucccgacu

SEQ ID NO: 31433 - RNA, 22 nt, Human herpesvirus 1
gaaggaggaggccgucccgccg

SEQ ID NO: 31434 - RNA, 18 nt, Human herpesvirus 1
gacaacaacgcccauguu

SEQ ID NO: 31435 - RNA, 22 nt, Human herpesvirus 1
cuuugguugcagaccccuuucu

SEQ ID NO: 31436 - RNA, 22 nt, Homo sapiens
uuaguucccucauucuugacuu

SEQ ID NO: 31437 - RNA, 22 nt, Homo sapiens
auugcacaucugcacuacagcc

SEQ ID NO: 31438 - RNA, 22 nt, Homo sapiens
ggaaugugugucaugcuuuugc

SEQ ID NO: 31439 - RNA, 22 nt, Homo sapiens
guaaagacacaugcacacguau

SEQ ID NO: 31440 - RNA, 22 nt, Homo sapiens
uuacagcagugccccacuccca

SEQ ID NO: 31441 - RNA, 22 nt, Homo sapiens
uuugguuuuuguuaucacucau

SEQ ID NO: 31442 - RNA, 22 nt, Homo sapiens
auugcacuccacccugggcaac

SEQ ID NO: 31443 - RNA, 22 nt, Homo sapiens
cuggcaguguuucuugugggcu

SEQ ID NO: 31444 - RNA, 22 nt, Homo sapiens
agcaagaugaaguugagcuagg

SEQ ID NO: 31445 - RNA, 22 nt, Homo sapiens
auaaccuauggaucuacucggg

SEQ ID NO: 31446 - RNA, 22 nt, Homo sapiens
cauggcuuguauaagauucuca

SEQ ID NO: 31447 - RNA, 22 nt, Homo sapiens
auuguacuccagccugggcaag

SEQ ID NO: 31448 - RNA, 22 nt, Homo sapiens
ugcacuguggucugagagacag

SEQ ID NO: 31449 - RNA, 22 nt, Homo sapiens
aucccuagaaaaaucagcacau

SEQ ID NO: 31450 - RNA, 22 nt, Homo sapiens
uuaguucauugugacuggacuc

SEQ ID NO: 31451 - RNA, 22 nt, Homo sapiens
aucauccagccccagaagggag

SEQ ID NO: 31452 - RNA, 22 nt, Homo sapiens
uauuguccacuuugcacugugu

SEQ ID NO: 31453 - RNA, 22 nt, Homo sapiens
cugagugcaagugauccuccca

SEQ ID NO: 31454 - RNA, 22 nt, Homo sapiens
ugcaaauguuaggugucauuau

SEQ ID NO: 31455 - RNA, 22 nt, Homo sapiens
gaauaaacuagagaggacugag

SEQ ID NO: 31456 - RNA, 22 nt, Homo sapiens
uggcucauuucuaaacccagcu

SEQ ID NO: 31457 - RNA, 22 nt, Homo sapiens
uauuugguagcuauuuugcagu

SEQ ID NO: 31458 - RNA, 22 nt, Homo sapiens
cugagcuagaccacuuggcucc

SEQ ID NO: 31459 - RNA, 22 nt, Homo sapiens
uacaaguauuuuuauuagugcc

SEQ ID NO: 31460 - RNA, 21 nt, Homo sapiens
uuaaguaauuacccaacucuc

SEQ ID NO: 31461 - RNA, 22 nt, Homo sapiens
gucuuuaguugaaacauguggu

SEQ ID NO: 31462 - RNA, 22 nt, Homo sapiens
agagaugaagauggggcucccg

SEQ ID NO: 31463 - RNA, 22 nt, Homo sapiens
ucacuuugacggccaacuucua

SEQ ID NO: 31464 - RNA, 22 nt, Homo sapiens
ucaguagcaugaaaacagacua

SEQ ID NO: 31465 - RNA, 22 nt, Homo sapiens
uucauaguguuuccuuccagug

SEQ ID NO: 31466 - RNA, 22 nt, Homo sapiens
augcaacugcacuccagccugg

SEQ ID NO: 31467 - RNA, 22 nt, Homo sapiens
gagcucauuaaaaauguagaau

SEQ ID NO: 31468 - RNA, 22 nt, Homo sapiens
uaccacugccgagaaaacagau

SEQ ID NO: 31469 - RNA, 22 nt, Homo sapiens
cacuagagaauagguaguucug

SEQ ID NO: 31470 - RNA, 22 nt, Homo sapiens
uuaacacugccauugauacugu

SEQ ID NO: 31471 - RNA, 18 nt, Homo sapiens
uugcacuccugccugggu

SEQ ID NO: 31472 - RNA, 22 nt, Homo sapiens
uuggaaaugguaaaggguuaau

SEQ ID NO: 31473 - RNA, 22 nt, Homo sapiens
uuggcaguaucuacuacagcua

SEQ ID NO: 31474 - RNA, 22 nt, Homo sapiens
ucuugguugaaaauucauaaua

SEQ ID NO: 31475 - RNA, 20 nt, Homo sapiens
agcuggguguguuggugcau

SEQ ID NO: 31476 - RNA, 22 nt, Homo sapiens
ugagaugaguugcuggcucuga

SEQ ID NO: 31477 - RNA, 22 nt, Homo sapiens
gaugauguugaauguucucacc

SEQ ID NO: 31478 - RNA, 23 nt, Homo sapiens
gaaguaauaaauggauucuuaac

SEQ ID NO: 31479 - RNA, 22 nt, Homo sapiens
auugcacuccagccugggcgac

SEQ ID NO: 31480 - RNA, 18 nt, Homo sapiens
aaacagugucucuuucug

SEQ ID NO: 31481 - RNA, 22 nt, Homo sapiens
uauggcuucuuauucuuucccg

SEQ ID NO: 31482 - RNA, 22 nt, Homo sapiens
uugaggcaaugaggagaagcug

SEQ ID NO: 31483 - RNA, 22 nt, Homo sapiens
ucuauguuuuugcuaguagugu

SEQ ID NO: 31484 - RNA, 22 nt, Homo sapiens
acucagagauuagcacauguuu

SEQ ID NO: 31485 - RNA, 22 nt, Homo sapiens
uccagaguggugaugcuggggc

SEQ ID NO: 31486 - RNA, 19 nt, Homo sapiens
ucccugagucuuagcuuga

SEQ ID NO: 31487 - RNA, 22 nt, Homo sapiens
auuucuacuccuguguccagaa

SEQ ID NO: 31488 - RNA, 22 nt, Homo sapiens
uucuuuggaaacaguacuaauu

SEQ ID NO: 31489 - RNA, 22 nt, Homo sapiens
uugagauggaaucucgcuuugu

SEQ ID NO: 31490 - RNA, 22 nt, Homo sapiens
aucauauccuagauauaacuuc

SEQ ID NO: 31491 - RNA, 22 nt, Homo sapiens
auacaagcaguccaacuccaua

SEQ ID NO: 31492 - RNA, 22 nt, Homo sapiens
aauuaguuggcugggugcggug

SEQ ID NO: 31493 - RNA, 22 nt, Homo sapiens
cuuuguaugucaugacaacugu

SEQ ID NO: 31494 - RNA, 19 nt, Homo sapiens
aauggcuuuuccuguuccc

SEQ ID NO: 31495 - RNA, 22 nt, Homo sapiens
ccagucuuggugucuguagcac

SEQ ID NO: 31496 - RNA, 22 nt, Homo sapiens
gucuuuggaaaaaaugucuguu

SEQ ID NO: 31497 - RNA, 22 nt, Homo sapiens
uuuccaagaugcuuacuuucuc

SEQ ID NO: 31498 - RNA, 22 nt, Homo sapiens
ugucaauauguaauaacugaau

SEQ ID NO: 31499 - RNA, 22 nt, Homo sapiens
cacaguugccuaucuccugaag

SEQ ID NO: 31500 - RNA, 22 nt, Homo sapiens
cauuaguugaagugcagggaga

SEQ ID NO: 31501 - RNA, 22 nt, Homo sapiens
guggcaguuuuaaauaugaaaa

SEQ ID NO: 31502 - RNA, 22 nt, Homo sapiens
augugcaaagcacuguucagca

SEQ ID NO: 31503 - RNA, 21 nt, Homo sapiens
acaucagaguugugaagguag

SEQ ID NO: 31504 - RNA, 22 nt, Homo sapiens
uguagcuuuugagauuuauauu

SEQ ID NO: 31505 - RNA, 22 nt, Homo sapiens
uuccagcugggggcaacucugc

SEQ ID NO: 31506 - RNA, 22 nt, Homo sapiens
uggaaguuaaaugacucuuucu

SEQ ID NO: 31507 - RNA, 22 nt, Homo sapiens
uugagauguaguuucacuccug

SEQ ID NO: 31508 - RNA, 22 nt, Homo sapiens
caacacagugaaacccgucucu

SEQ ID NO: 31509 - RNA, 22 nt, Homo sapiens
uuauucagcaccugcuguguuc

SEQ ID NO: 31510 - RNA, 22 nt, Homo sapiens
guauacaugucaaaacucacau

SEQ ID NO: 31511 - RNA, 22 nt, Homo sapiens
ugagaugagagaaugcuugccu

SEQ ID NO: 31512 - RNA, 22 nt, Homo sapiens
cugagcucauuucuuuugcuac

SEQ ID NO: 31513 - RNA, 22 nt, Homo sapiens
uaagacacuuaaaauguuacau

SEQ ID NO: 31514 - RNA, 22 nt, Homo sapiens
uuggagugugcucauaacugcu

SEQ ID NO: 31515 - RNA, 23 nt, Homo sapiens
augugugcuuggagagcaggaug

SEQ ID NO: 31516 - RNA, 22 nt, Homo sapiens
ggucagaaagacaggcauucag

SEQ ID NO: 31517 - RNA, 22 nt, Homo sapiens
uuauguaaaucaaucuggaauc

SEQ ID NO: 31518 - RNA, 22 nt, Homo sapiens
aauaucacaguggguguacacc

SEQ ID NO: 31519 - RNA, 23 nt, Homo sapiens
uguauacacccugugcaucuggg

SEQ ID NO: 31520 - RNA, 22 nt, Homo sapiens
ugagaugaggucucgcucuguc

SEQ ID NO: 31521 - RNA, 22 nt, Homo sapiens
ugugccuacugauagagccaag

SEQ ID NO: 31522 - RNA, 22 nt, Homo sapiens
ucaagugcauugauucaguauu

SEQ ID NO: 31523 - RNA, 22 nt, Homo sapiens
cauugcacuccagcucugggcg

SEQ ID NO: 31524 - RNA, 22 nt, Homo sapiens
cucaguagaaaauacauggacu

SEQ ID NO: 31525 - RNA, 22 nt, Homo sapiens
gcugagaucucuugccugaacu

SEQ ID NO: 31526 - RNA, 22 nt, Homo sapiens
auaugcaaauccauagagacag

SEQ ID NO: 31527 - RNA, 22 nt, Homo sapiens
uuggacuucucaaggcaauaaa

SEQ ID NO: 31528 - RNA, 21 nt, Homo sapiens
auagcacuucacuugguuaga

SEQ ID NO: 31529 - RNA, 22 nt, Homo sapiens
cauacaagcuacaaucacaaag

SEQ ID NO: 31530 - RNA, 22 nt, Homo sapiens
gaaacugcauuucuaacaagcu

SEQ ID NO: 31531 - RNA, 22 nt, Homo sapiens
uuacacaguaggucccuaguaa

SEQ ID NO: 31532 - RNA, 22 nt, Homo sapiens
ugugggaggugcuaauguaaau

SEQ ID NO: 31533 - RNA, 17 nt, Homo sapiens
auguaauccucaucucu

SEQ ID NO: 31534 - RNA, 22 nt, Homo sapiens
aguaaauuucugugcuuucaua

SEQ ID NO: 31535 - RNA, 22 nt, Homo sapiens
uuaagggaggagcuucaagaug

SEQ ID NO: 31536 - RNA, 22 nt, Homo sapiens
gucuuuggaaagacaaaguuca

SEQ ID NO: 31537 - RNA, 22 nt, Homo sapiens
uugcugagucuuucuagguugc

SEQ ID NO: 31538 - RNA, 22 nt, Homo sapiens
auggcaguuuggucucugugcu

SEQ ID NO: 31539 - RNA, 22 nt, Homo sapiens
auccugaagcuuuacugaauuc

SEQ ID NO: 31540 - RNA, 23 nt, Homo sapiens
uuuggcauuccagaaauuuucau

SEQ ID NO: 31541 - RNA, 22 nt, Homo sapiens
uuaauacugcuuaacuuuagga

SEQ ID NO: 31542 - RNA, 22 nt, Homo sapiens
uauggcuucuauaaggaagcuu

SEQ ID NO: 31543 - RNA, 22 nt, Homo sapiens
ucugucuugugguuugagugcc

SEQ ID NO: 31544 - RNA, 22 nt, Homo sapiens
uggucuccuuuguacccugggc

SEQ ID NO: 31545 - RNA, 22 nt, Homo sapiens
ugagaugauaucuuauuguaau

SEQ ID NO: 31546 - RNA, 22 nt, Homo sapiens
augacauugaugcucuggcugg

SEQ ID NO: 31547 - RNA, 22 nt, Homo sapiens
ugacaaguaaacagucagcacc

SEQ ID NO: 31548 - RNA, 21 nt, Homo sapiens
uauggauuugccuauucugga

SEQ ID NO: 31549 - RNA, 22 nt, Homo sapiens
uucagguaguuuaacuguucca

SEQ ID NO: 31550 - RNA, 22 nt, Homo sapiens
ugccaacugguuucuuuuaguu

SEQ ID NO: 31551 - RNA, 22 nt, Homo sapiens
cauugcacuccagccucggcaa

SEQ ID NO: 31552 - RNA, 22 nt, Homo sapiens
agugcacuccagccugggcaac

SEQ ID NO: 31553 - RNA, 22 nt, Homo sapiens
uuuuaugggcuauuugcauuag

SEQ ID NO: 31554 - RNA, 22 nt, Homo sapiens
uuggucaucucccuccuuuuag

SEQ ID NO: 31555 - RNA, 22 nt, Homo sapiens
caggaaugugaggguucccugc

SEQ ID NO: 31556 - RNA, 22 nt, Homo sapiens
acuguauagauggaguugauuu

SEQ ID NO: 31557 - RNA, 22 nt, Homo sapiens
uagauuguaauaugcagaaugg

SEQ ID NO: 31558 - RNA, 22 nt, Homo sapiens
auacauguuucauguuggugug

SEQ ID NO: 31559 - RNA, 18 nt, Homo sapiens
uuggacggagagucaaau

SEQ ID NO: 31560 - RNA, 22 nt, Homo sapiens
gacuugaagaaucuaagggagg

SEQ ID NO: 31561 - RNA, 22 nt, Homo sapiens
ugagauucuuacuccugaguuc

SEQ ID NO: 31562 - RNA, 21 nt, Homo sapiens
auugcacuccagccugggcga

SEQ ID NO: 31563 - RNA, 22 nt, Homo sapiens
ggcaagaacuucacucacuuuu

SEQ ID NO: 31564 - RNA, 22 nt, Homo sapiens
aaugcuguucuuugcuuaaguu

SEQ ID NO: 31565 - RNA, 22 nt, Homo sapiens
aagucaaggagagaagcuucag

SEQ ID NO: 31566 - RNA, 22 nt, Homo sapiens
uucuacaggcuguucaagaagc

SEQ ID NO: 31567 - RNA, 22 nt, Homo sapiens
auggcuuuaagagugucugaau

SEQ ID NO: 31568 - RNA, 22 nt, Homo sapiens
cugagacacucuuaucugcaua

SEQ ID NO: 31569 - RNA, 22 nt, Homo sapiens
aggcaagagugacuacgugaaa

SEQ ID NO: 31570 - RNA, 22 nt, Homo sapiens
auagcagaacagugucucacug

SEQ ID NO: 31571 - RNA, 22 nt, Homo sapiens
cucauggagaaccucugcuagg

SEQ ID NO: 31572 - RNA, 22 nt, Homo sapiens
augacaagaguguucagggaga

SEQ ID NO: 31573 - RNA, 22 nt, Homo sapiens
uugacuuuuauucacucugcua

SEQ ID NO: 31574 - RNA, 22 nt, Homo sapiens
gugugacuagucaugccugaau

SEQ ID NO: 31575 - RNA, 22 nt, Homo sapiens
guggacaugaauuuuggaggca

SEQ ID NO: 31576 - RNA, 22 nt, Homo sapiens
aucuuuggugaguucuuugguc

SEQ ID NO: 31577 - RNA, 20 nt, Homo sapiens
ugagaacauguggcauuugg

SEQ ID NO: 31578 - RNA, 22 nt, Homo sapiens
cauuuuacuuuccagacgugga

SEQ ID NO: 31579 - RNA, 22 nt, Homo sapiens
aaagagaucuaugggcacuaug

SEQ ID NO: 31580 - RNA, 22 nt, Homo sapiens
uacaguguuuugguauuccaca

SEQ ID NO: 31581 - RNA, 22 nt, Homo sapiens
uguggaguguaugugacagaga

SEQ ID NO: 31582 - RNA, 22 nt, Homo sapiens
aaucacuuuggcaccaaccuaa

SEQ ID NO: 31583 - RNA, 22 nt, Homo sapiens
cuaauacaguuguccaagcugg

SEQ ID NO: 31584 - RNA, 22 nt, Homo sapiens
uugcacauguugaaccagcaaa

SEQ ID NO: 31585 - RNA, 22 nt, Homo sapiens
cacuguggauggaacuauguga

SEQ ID NO: 31586 - RNA, 23 nt, Homo sapiens
aauaucacaguggguguacaccc

SEQ ID NO: 31587 - RNA, 22 nt, Homo sapiens
uugagauggaguuucgcucuuu

SEQ ID NO: 31588 - RNA, 22 nt, Homo sapiens
ugagaugaggucucacucuguu

SEQ ID NO: 31589 - RNA, 22 nt, Homo sapiens
uuugaaaguaauuugguuggug

SEQ ID NO: 31590 - RNA, 22 nt, Homo sapiens
uucaguagucuccauagaaccg

SEQ ID NO: 31591 - RNA, 22 nt, Homo sapiens
uagucacacacucaacuuuuca

SEQ ID NO: 31592 - RNA, 22 nt, Homo sapiens
uauggaaaucuuaccuuauggu

SEQ ID NO: 31593 - RNA, 22 nt, Homo sapiens
uugagauggagucuugcucugu

SEQ ID NO: 31594 - RNA, 22 nt, Homo sapiens
guggaaugaaaacucucucaca

SEQ ID NO: 31595 - RNA, 22 nt, Homo sapiens
ggagaugaaaugagcuacuuaa

SEQ ID NO: 31596 - RNA, 22 nt, Homo sapiens
uaucucuguggguagugcugaa

SEQ ID NO: 31597 - RNA, 22 nt, Homo sapiens
uuugcuugaggucuagcuaccc

SEQ ID NO: 31598 - RNA, 22 nt, Homo sapiens
ugauauuuuugauccuuaaguu

SEQ ID NO: 31599 - RNA, 22 nt, Homo sapiens
auacaucugccauguuggugug

SEQ ID NO: 31600 - RNA, 22 nt, Homo sapiens
aggaagugugcaauuaauuucu

SEQ ID NO: 31601 - RNA, 22 nt, Homo sapiens
uucuaugguuuuuaugguguua

SEQ ID NO: 31602 - RNA, 22 nt, Homo sapiens
augucuuucauagagacccaga

SEQ ID NO: 31603 - RNA, 22 nt, Homo sapiens
auugaguaaaaaauagugaugu

SEQ ID NO: 31604 - RNA, 22 nt, Homo sapiens
aaguauguaucaagucauacuu

SEQ ID NO: 31605 - RNA, 22 nt, Homo sapiens
ugccauugcacuccagccuggg

SEQ ID NO: 31606 - RNA, 22 nt, Homo sapiens
auagcagaagaagggacaauuc

SEQ ID NO: 31607 - RNA, 22 nt, Homo sapiens
auggcaguguaugauuauauua

SEQ ID NO: 31608 - RNA, 22 nt, Homo sapiens
uggucaguugaguccuugccaa

SEQ ID NO: 31609 - RNA, 22 nt, Homo sapiens
uucccagugccaggcacuggga

SEQ ID NO: 31610 - RNA, 17 nt, Homo sapiens
ugagcuaagauuacccc

SEQ ID NO: 31611 - RNA, 22 nt, Homo sapiens
acacuuucuggagcugcacaua

SEQ ID NO: 31612 - RNA, 22 nt, Homo sapiens
cugacuaguuuuaaugcagauu

SEQ ID NO: 31613 - RNA, 22 nt, Homo sapiens
cauaaagauggaggaggccagg

SEQ ID NO: 31614 - RNA, 23 nt, Homo sapiens
aucagguuguagaauguguuugc

SEQ ID NO: 31615 - RNA, 22 nt, Homo sapiens
guccaguacucuuuccugaaaa

SEQ ID NO: 31616 - RNA, 19 nt, Homo sapiens
ucuuuagucacauuuuuau

SEQ ID NO: 31617 - RNA, 22 nt, Homo sapiens
augacuuuucugaaaaccacca

SEQ ID NO: 31618 - RNA, 22 nt, Homo sapiens
ugcuuaguguugacccucugcc

SEQ ID NO: 31619 - RNA, 22 nt, Homo sapiens
uuugugcaugaagagggggugc

SEQ ID NO: 31620 - RNA, 22 nt, Homo sapiens
uugacuagaccaucuuucuaga

SEQ ID NO: 31621 - RNA, 22 nt, Homo sapiens
auaucaaggccauuuucuaaau

SEQ ID NO: 31622 - RNA, 22 nt, Homo sapiens
uugagaugaagucuugcucucu

SEQ ID NO: 31623 - RNA, 22 nt, Homo sapiens
uugagaugaaguuuugcucuuu

SEQ ID NO: 31624 - RNA, 22 nt, Homo sapiens
auggaacauuauagauguaaaa

SEQ ID NO: 31625 - RNA, 19 nt, Homo sapiens
uaucacuucccuggaaaca

SEQ ID NO: 31626 - RNA, 22 nt, Homo sapiens
cauugcacuccagcuugggcga

SEQ ID NO: 31627 - RNA, 22 nt, Homo sapiens
uuuugcaguuacagagagugag

SEQ ID NO: 31628 - RNA, 19 nt, Homo sapiens
ugcaaagucuuuuccuauu

SEQ ID NO: 31629 - RNA, 18 nt, Homo sapiens
uguggcuguuuuccaaua

SEQ ID NO: 31630 - RNA, 22 nt, Homo sapiens
uuggaaauauguuaagugucau

SEQ ID NO: 31631 - RNA, 22 nt, Homo sapiens
cauugcacugcagcccgggcaa

SEQ ID NO: 31632 - RNA, 22 nt, Homo sapiens
agagaccuguaaaguucaggca

SEQ ID NO: 31633 - RNA, 22 nt, Homo sapiens
cauugcccuccagccugggcaa

SEQ ID NO: 31634 - RNA, 19 nt, Homo sapiens
gugguauuaccuuuugauu

SEQ ID NO: 31635 - RNA, 22 nt, Homo sapiens
cugucuagagggcacaugaugc

SEQ ID NO: 31636 - RNA, 22 nt, Homo sapiens
aauggcuuuuaauauccauaau

SEQ ID NO: 31637 - RNA, 22 nt, Homo sapiens
cauugcacucuagccucggcaa

SEQ ID NO: 31638 - RNA, 23 nt, Homo sapiens
uugaggcauguaccaucaauauc

SEQ ID NO: 31639 - RNA, 22 nt, Homo sapiens
auggcucuuauuauuugaggua

SEQ ID NO: 31640 - RNA, 22 nt, Homo sapiens
guccaagacuaggaguuggcag

SEQ ID NO: 31641 - RNA, 22 nt, Homo sapiens
cuuccaaguggggcacgugcca

SEQ ID NO: 31642 - RNA, 22 nt, Homo sapiens
auguccaugagcacauguauca

SEQ ID NO: 31643 - RNA, 22 nt, Homo sapiens
cauugcacuccauccuuggcaa

SEQ ID NO: 31644 - RNA, 22 nt, Homo sapiens
ucauacaguaguccucacuugu

SEQ ID NO: 31645 - RNA, 22 nt, Homo sapiens
acaaagugccuccuuuuagagu

SEQ ID NO: 31646 - RNA, 22 nt, Homo sapiens
ugaggugaggguaucaaaugcu

SEQ ID NO: 31647 - RNA, 22 nt, Homo sapiens
cuagaguacuuaccacagcaug

SEQ ID NO: 31648 - RNA, 22 nt, Homo sapiens
uucuuugcaugaucucaaaguc

SEQ ID NO: 31649 - RNA, 22 nt, Homo sapiens
cauugcaauccagccugggcaa

SEQ ID NO: 31650 - RNA, 22 nt, Homo sapiens
gucucccagccuacauauuucu

SEQ ID NO: 31651 - RNA, 22 nt, Homo sapiens
ucuacagccaguucaggaagaa

SEQ ID NO: 31652 - RNA, 22 nt, Homo sapiens
uaugagacugguuaauuuuugu

SEQ ID NO: 31653 - RNA, 22 nt, Homo sapiens
uacauagucuucuuuugguuau

SEQ ID NO: 31654 - RNA, 22 nt, Homo sapiens
ugucagaaucugagacgacaac

SEQ ID NO: 31655 - RNA, 22 nt, Homo sapiens
uucuuugguacaagggccgacc

SEQ ID NO: 31656 - RNA, 22 nt, Homo sapiens
caguuacuugacacaaccaauu

SEQ ID NO: 31657 - RNA, 22 nt, Homo sapiens
gcugaaauguuuaauuugggag

SEQ ID NO: 31658 - RNA, 22 nt, Homo sapiens
uggaagaugggaccucaguuuu

SEQ ID NO: 31659 - RNA, 20 nt, Homo sapiens
ucugauugcaacugcaugag

SEQ ID NO: 31660 - RNA, 22 nt, Homo sapiens
gaucacuuugaugccaggaacu

SEQ ID NO: 31661 - RNA, 22 nt, Homo sapiens
cuggcucauuucauuuagcaua

SEQ ID NO: 31662 - RNA, 22 nt, Homo sapiens
ugagaugauuuaauggagccca

SEQ ID NO: 31663 - RNA, 22 nt, Homo sapiens
gaaaacugcuucucuggguuuc

SEQ ID NO: 31664 - RNA, 22 nt, Homo sapiens
auuguacuccagccugggcaaa

SEQ ID NO: 31665 - RNA, 22 nt, Homo sapiens
acacacgugcauguaugcguau

SEQ ID NO: 31666 - RNA, 22 nt, Homo sapiens
augugcuuauagguguauguuu

SEQ ID NO: 31667 - RNA, 22 nt, Homo sapiens
auggcuuugggcugcucugccc

SEQ ID NO: 31668 - RNA, 22 nt, Homo sapiens
aggcaugaaauacaugcauuga

SEQ ID NO: 31669 - RNA, 22 nt, Homo sapiens
uagaccaauuggcauauaguaa

SEQ ID NO: 31670 - RNA, 22 nt, Homo sapiens
agcugauggucuuguaugaugu

SEQ ID NO: 31671 - RNA, 22 nt, Homo sapiens
guggcagugugaggauccugcu

SEQ ID NO: 31672 - RNA, 18 nt, Homo sapiens
auucuacaggccuuuuga

SEQ ID NO: 31673 - RNA, 20 nt, Homo sapiens
uggaaauuaaccuuucaggu

SEQ ID NO: 31674 - RNA, 22 nt, Homo sapiens
ugcaauuuaaugugucccaauu

SEQ ID NO: 31675 - RNA, 22 nt, Homo sapiens
ugugccacugcacuccugccug

SEQ ID NO: 31676 - RNA, 22 nt, Homo sapiens
cauugcacuccagccuaggcaa

SEQ ID NO: 31677 - RNA, 22 nt, Homo sapiens
uucagacugggugaagagggua

SEQ ID NO: 31678 - RNA, 22 nt, Homo sapiens
ucacaguccuguuuaggagagg

SEQ ID NO: 31679 - RNA, 22 nt, Homo sapiens
ggagaauugcuuggacccggga

SEQ ID NO: 31680 - RNA, 22 nt, Homo sapiens
uucucugggacauaggucgggu

SEQ ID NO: 31681 - RNA, 22 nt, Homo sapiens
ugagcaagaucuuuauaauuag

SEQ ID NO: 31682 - RNA, 19 nt, Homo sapiens
ugcagcaauguaaaagaca

SEQ ID NO: 31683 - RNA, 22 nt, Homo sapiens
uguauguuguaagacuuagacc

SEQ ID NO: 31684 - RNA, 21 nt, Homo sapiens
uuuccuggagcguauggcuuc

SEQ ID NO: 31685 - RNA, 22 nt, Homo sapiens
uacacagucaaaaauuuccagg

SEQ ID NO: 31686 - RNA, 22 nt, Homo sapiens
ucuuuguuggaguccaaggaua

SEQ ID NO: 31687 - RNA, 22 nt, Homo sapiens
gugcuuuguuguggcaguggca

SEQ ID NO: 31688 - RNA, 22 nt, Homo sapiens
ggacaagagacugggacacuga

SEQ ID NO: 31689 - RNA, 22 nt, Homo sapiens
ugagaugagaaucaguucuaau

SEQ ID NO: 31690 - RNA, 22 nt, Homo sapiens
gagaucacuguuuauauucucu

SEQ ID NO: 31691 - RNA, 22 nt, Homo sapiens
uucuuagucauguaauagucca

SEQ ID NO: 31692 - RNA, 22 nt, Homo sapiens
auucuauaguccuaggauuggg

SEQ ID NO: 31693 - RNA, 22 nt, Homo sapiens
uugagcaccaugccuggccaug

SEQ ID NO: 31694 - RNA, 22 nt, Homo sapiens
gagcugaucuuuauguaaauuc

SEQ ID NO: 31695 - RNA, 22 nt, Homo sapiens
auguaacugggacacaagccuc

SEQ ID NO: 31696 - RNA, 17 nt, Homo sapiens
aaguggcuuguucacca

SEQ ID NO: 31697 - RNA, 22 nt, Homo sapiens
auugcacuccagccuaggcaac

SEQ ID NO: 31698 - RNA, 22 nt, Homo sapiens
uaaguauagguaacagaagcaa

SEQ ID NO: 31699 - RNA, 22 nt, Homo sapiens
aagagaugaagguccugacugu

SEQ ID NO: 31700 - RNA, 22 nt, Homo sapiens
cuauggcucugucuuuuaaguu

SEQ ID NO: 31701 - RNA, 22 nt, Homo sapiens
cuuugguuuacuuggugcuagu

SEQ ID NO: 31702 - RNA, 22 nt, Homo sapiens
uauggcuuuguuaacauuuucu

SEQ ID NO: 31703 - RNA, 22 nt, Homo sapiens
aagugucagaguugcuaaugac

SEQ ID NO: 31704 - RNA, 22 nt, Homo sapiens
uauggcuuucuacuugaguucu

SEQ ID NO: 31705 - RNA, 19 nt, Homo sapiens
uuccugagaacaagggcuu

SEQ ID NO: 31706 - RNA, 22 nt, Homo sapiens
auauggcuaugugagcauacca

SEQ ID NO: 31707 - RNA, 22 nt, Homo sapiens
gccaacauggcgcuccauucuu

SEQ ID NO: 31708 - RNA, 22 nt, Homo sapiens
ugagaucacuaagagguaaugg

SEQ ID NO: 31709 - RNA, 22 nt, Homo sapiens
aagugguuuuuacaaagacaga

SEQ ID NO: 31710 - RNA, 22 nt, Homo sapiens
uuauugcacuccagccugggua

SEQ ID NO: 31711 - RNA, 22 nt, Homo sapiens
uaucagcagagucauacuucaa

SEQ ID NO: 31712 - RNA, 21 nt, Homo sapiens
gugcaaacaucauagaaugua

SEQ ID NO: 31713 - RNA, 22 nt, Homo sapiens
ugagcuguuugaagaagcauuu

SEQ ID NO: 31714 - RNA, 20 nt, Homo sapiens
ugagcucaugacauuuuucu

SEQ ID NO: 31715 - RNA, 22 nt, Homo sapiens
uugagauggagucucacugugu

SEQ ID NO: 31716 - RNA, 22 nt, Homo sapiens
aucccaguucagccucugacac

SEQ ID NO: 31717 - RNA, 22 nt, Homo sapiens
gucauugcacuccagccuggac

SEQ ID NO: 31718 - RNA, 22 nt, Homo sapiens
agcuggcuguagcugcaagucu

SEQ ID NO: 31719 - RNA, 22 nt, Homo sapiens
ugagcccauuguccugguuuau

SEQ ID NO: 31720 - RNA, 22 nt, Homo sapiens
uugagcaaaacauuaauauuag

SEQ ID NO: 31721 - RNA, 22 nt, Homo sapiens
augaacagagccuugagaaccu

SEQ ID NO: 31722 - RNA, 22 nt, Homo sapiens
uucucuggucagaggggagguu

SEQ ID NO: 31723 - RNA, 22 nt, Homo sapiens
auugcacuccagccugggcuag

SEQ ID NO: 31724 - RNA, 22 nt, Homo sapiens
aacacuguuuccagucaugauc

SEQ ID NO: 31725 - RNA, 22 nt, Homo sapiens
ggcaaugucagcuaaugaugga

SEQ ID NO: 31726 - RNA, 20 nt, Homo sapiens
aucucugggcaaaggaaaau

SEQ ID NO: 31727 - RNA, 22 nt, Homo sapiens
augugcaagaucauuaaagcuc

SEQ ID NO: 31728 - RNA, 22 nt, Homo sapiens
guacacauacauauaugugugu

SEQ ID NO: 31729 - RNA, 22 nt, Homo sapiens
gguaaaucuucacuaagacuga

SEQ ID NO: 31730 - RNA, 22 nt, Homo sapiens
ggaucacuugagaccaggaguu

SEQ ID NO: 31731 - RNA, 22 nt, Homo sapiens
augaucacuguggaaauucagc

SEQ ID NO: 31732 - RNA, 22 nt, Homo sapiens
uggagcccuaguuccucauaac

SEQ ID NO: 31733 - RNA, 22 nt, Homo sapiens
uccauuugucuauguuucuguu

SEQ ID NO: 31734 - RNA, 22 nt, Homo sapiens
acugaucaauguuaaggcuuau

SEQ ID NO: 31735 - RNA, 22 nt, Homo sapiens
agacaagauggcuugagguuca

SEQ ID NO: 31736 - RNA, 22 nt, Homo sapiens
cauugcacuccagucugggcaa

SEQ ID NO: 31737 - RNA, 19 nt, Homo sapiens
aguggguguuuucuguuug

SEQ ID NO: 31738 - RNA, 19 nt, Homo sapiens
ugugaacaucacagagugu

SEQ ID NO: 31739 - RNA, 22 nt, Homo sapiens
uucaauaugucauuggcaggca

SEQ ID NO: 31740 - RNA, 22 nt, Homo sapiens
aucugugaaugaaguuauuuug

SEQ ID NO: 31741 - RNA, 22 nt, Homo sapiens
ugugucuccugaaaauucacau

SEQ ID NO: 31742 - RNA, 22 nt, Homo sapiens
uuggaacacauguuuuucuacc

SEQ ID NO: 31743 - RNA, 21 nt, Homo sapiens
uuuagguagcuuuucugggag

SEQ ID NO: 31744 - RNA, 21 nt, Homo sapiens
ugaacacuggacugagugucc

SEQ ID NO: 31745 - RNA, 22 nt, Homo sapiens
ugaaauuuuuuauucguuggcu

SEQ ID NO: 31746 - RNA, 22 nt, Homo sapiens
uuaaggaaggagucuuaaaugg

SEQ ID NO: 31747 - RNA, 22 nt, Homo sapiens
ucucuugguugaacaguuugga

SEQ ID NO: 31748 - RNA, 22 nt, Homo sapiens
uauggccuuuuuaaugauauug

SEQ ID NO: 31749 - RNA, 22 nt, Homo sapiens
ugagaugaguugcgcucugucg

SEQ ID NO: 31750 - RNA, 22 nt, Homo sapiens
ugaaggcaggagggagaaaagu

SEQ ID NO: 31751 - RNA, 22 nt, Homo sapiens
aaccuguaaccauaugaucagu

SEQ ID NO: 31752 - RNA, 23 nt, Homo sapiens
auugcagaaucacagagguagug

SEQ ID NO: 31753 - RNA, 22 nt, Homo sapiens
ucacaauucucaauuugugaaa

SEQ ID NO: 31754 - RNA, 22 nt, Homo sapiens
uggaaaacaugcacauuggauu

SEQ ID NO: 31755 - RNA, 22 nt, Homo sapiens
ggcaacaugccgaaaccacguc

SEQ ID NO: 31756 - RNA, 22 nt, Homo sapiens
auugcacuccauccugggcaau

SEQ ID NO: 31757 - RNA, 22 nt, Homo sapiens
ugauuggagaacaaacugcaua

SEQ ID NO: 31758 - RNA, 22 nt, Homo sapiens
auggcucuggauagaaugcagg

SEQ ID NO: 31759 - RNA, 22 nt, Homo sapiens
uggagugaaaacacacuaaucu

SEQ ID NO: 31760 - RNA, 22 nt, Homo sapiens
ccuucuuuuguaaggcugaaua

SEQ ID NO: 31761 - RNA, 22 nt, Homo sapiens
auaaagccaugagcuugagaug

SEQ ID NO: 31762 - RNA, 22 nt, Homo sapiens
gacacagugaagucucuacuug

SEQ ID NO: 31763 - RNA, 22 nt, Homo sapiens
guacaguuuucaguguucacug

SEQ ID NO: 31764 - RNA, 22 nt, Homo sapiens
cuggcagucugccucuucacug

SEQ ID NO: 31765 - RNA, 22 nt, Homo sapiens
auugcacuccagccuggggaac

SEQ ID NO: 31766 - RNA, 22 nt, Homo sapiens
augaagcuagcugauugcugau

SEQ ID NO: 31767 - RNA, 22 nt, Homo sapiens
uuugacaaugugugcuuguauu

SEQ ID NO: 31768 - RNA, 18 nt, Homo sapiens
cuaagacacuuggcagag

SEQ ID NO: 31769 - RNA, 22 nt, Homo sapiens
ucccugaaaauuagcauuuuaa

SEQ ID NO: 31770 - RNA, 22 nt, Homo sapiens
cauugcacuccagccuggccaa

SEQ ID NO: 31771 - RNA, 19 nt, Homo sapiens
uggaacugauucaguucug

SEQ ID NO: 31772 - RNA, 22 nt, Homo sapiens
uaguucauuuuucuugcuuaga

SEQ ID NO: 31773 - RNA, 22 nt, Homo sapiens
uugagauggagucucacuccuu

SEQ ID NO: 31774 - RNA, 22 nt, Homo sapiens
agaaugugaacaucuugaaagu

SEQ ID NO: 31775 - RNA, 22 nt, Homo sapiens
agaagaacauagggugacugaa

SEQ ID NO: 31776 - RNA, 22 nt, Homo sapiens
ugagaugaacuugauuguuuua

SEQ ID NO: 31777 - RNA, 22 nt, Homo sapiens
uucagugucauuaacacaguag

SEQ ID NO: 31778 - RNA, 22 nt, Homo sapiens
ugugcaaggcucucaaccugug

SEQ ID NO: 31779 - RNA, 22 nt, Homo sapiens
uuguuuuggagaugagcuaaaa

SEQ ID NO: 31780 - RNA, 22 nt, Homo sapiens
agugcaauggugccaucauagc

SEQ ID NO: 31781 - RNA, 22 nt, Homo sapiens
aauggcuucuuauugugguuca

SEQ ID NO: 31782 - RNA, 22 nt, Homo sapiens
ugaauagacacuaaagacugua

SEQ ID NO: 31783 - RNA, 22 nt, Homo sapiens
ucacugugcaugaaggaugcug

SEQ ID NO: 31784 - RNA, 22 nt, Homo sapiens
augaugcugagguuugggguau

SEQ ID NO: 31785 - RNA, 22 nt, Homo sapiens
cucaguguucccauucuaccuu

SEQ ID NO: 31786 - RNA, 20 nt, Homo sapiens
auuccacuuguuugagguac

SEQ ID NO: 31787 - RNA, 22 nt, Homo sapiens
ucucuggauaucuacuuauguu

SEQ ID NO: 31788 - RNA, 22 nt, Homo sapiens
cauugcacuccagccuuggcaa

SEQ ID NO: 31789 - RNA, 22 nt, Homo sapiens
uauggcuucuuuaaauugaggu

SEQ ID NO: 31790 - RNA, 22 nt, Homo sapiens
auagcauaucccacaugucaga

SEQ ID NO: 31791 - RNA, 22 nt, Homo sapiens
auuccacuuagugacucauuug

SEQ ID NO: 31792 - RNA, 22 nt, Homo sapiens
uuguaaucaacacaucauuggg

SEQ ID NO: 31793 - RNA, 22 nt, Homo sapiens
aaaagcauucagagugcugggc

SEQ ID NO: 31794 - RNA, 22 nt, Homo sapiens
ugagaugaugggauaagagggc

SEQ ID NO: 31795 - RNA, 22 nt, Homo sapiens
gagaucauguacuagaacaccu

SEQ ID NO: 31796 - RNA, 22 nt, Homo sapiens
uaugacauaguccuuaacccuc

SEQ ID NO: 31797 - RNA, 22 nt, Homo sapiens
cugugcauguuguccaauucuu

SEQ ID NO: 31798 - RNA, 22 nt, Homo sapiens
auggcaguuucagcuauaguuu

SEQ ID NO: 31799 - RNA, 22 nt, Homo sapiens
uaagugcaugauuacaugcaua

SEQ ID NO: 31800 - RNA, 22 nt, Homo sapiens
uguaacaggaggaaaaugugaa

SEQ ID NO: 31801 - RNA, 22 nt, Homo sapiens
guggaauggaaugauuguguau

SEQ ID NO: 31802 - RNA, 22 nt, Homo sapiens
gugaggcacugcugcuuuccag

SEQ ID NO: 31803 - RNA, 22 nt, Homo sapiens
ugagcugagacaauaaguuuuu

SEQ ID NO: 31804 - RNA, 22 nt, Homo sapiens
ugagaucaugucauuugcacuc

SEQ ID NO: 31805 - RNA, 22 nt, Homo sapiens
uugcuccucugccaggaccugu

SEQ ID NO: 31806 - RNA, 22 nt, Homo sapiens
ugagaugaagucuugcucuguu

SEQ ID NO: 31807 - RNA, 22 nt, Homo sapiens
uuauggauuuauauucuguagu

SEQ ID NO: 31808 - RNA, 20 nt, Homo sapiens
uuggaaaugugaauugggag

SEQ ID NO: 31809 - RNA, 22 nt, Homo sapiens
ggacaagaucuuccaccauuca

SEQ ID NO: 31810 - RNA, 22 nt, Homo sapiens
acacaguguuuauugugguuag

SEQ ID NO: 31811 - RNA, 22 nt, Homo sapiens
ucacaaguguauagacaugucc

SEQ ID NO: 31812 - RNA, 21 nt, Homo sapiens
uggagugaagaguuuauugac

SEQ ID NO: 31813 - RNA, 22 nt, Homo sapiens
auacaugugccauguugguaug

SEQ ID NO: 31814 - RNA, 22 nt, Homo sapiens
aaaguucugcguuagggcuaaa

SEQ ID NO: 31815 - RNA, 22 nt, Homo sapiens
aggugguuuugaugagcaggua

SEQ ID NO: 31816 - RNA, 22 nt, Homo sapiens
uugcuuagucaugaaucacuga

SEQ ID NO: 31817 - RNA, 22 nt, Homo sapiens
uuaaguaaucagagaagagaac

SEQ ID NO: 31818 - RNA, 22 nt, Homo sapiens
ugagcacuguacuuuaucaggu

SEQ ID NO: 31819 - RNA, 22 nt, Homo sapiens
guaaucucagcuacucaggagg

SEQ ID NO: 31820 - RNA, 22 nt, Homo sapiens
guucucacuggacugugaaaau

SEQ ID NO: 31821 - RNA, 22 nt, Homo sapiens
acacuuucuagacaagggaaua

SEQ ID NO: 31822 - RNA, 22 nt, Homo sapiens
cugaggcacggcgaccuuaagu

SEQ ID NO: 31823 - RNA, 22 nt, Homo sapiens
gucagugugauaucugcagggg

SEQ ID NO: 31824 - RNA, 22 nt, Homo sapiens
cauggcuuuauuuucagcuucu

SEQ ID NO: 31825 - RNA, 22 nt, Homo sapiens
auugcauaaacacauuucuuau

SEQ ID NO: 31826 - RNA, 22 nt, Homo sapiens
ugagccaugggguaaaugugau

SEQ ID NO: 31827 - RNA, 22 nt, Homo sapiens
aucuuuggugcaugauacuuug

SEQ ID NO: 31828 - RNA, 22 nt, Homo sapiens
uggaagauucuagaagauucca

SEQ ID NO: 31829 - RNA, 22 nt, Homo sapiens
auaaagacacuuggcaugauuu

SEQ ID NO: 31830 - RNA, 22 nt, Homo sapiens
uugcauaagugcauucugugau

SEQ ID NO: 31831 - RNA, 22 nt, Homo sapiens
uacccucuggauacccuuguuc

SEQ ID NO: 31832 - RNA, 22 nt, Homo sapiens
guggaaugcaguguugauucaa

SEQ ID NO: 31833 - RNA, 22 nt, Homo sapiens
auggaaaugaagggcuggcccu

SEQ ID NO: 31834 - RNA, 22 nt, Homo sapiens
ugagaucuuuuguggcugagaa

SEQ ID NO: 31835 - RNA, 18 nt, Homo sapiens
auugcacuccugccuggg

SEQ ID NO: 31836 - RNA, 22 nt, Homo sapiens
uaaggcucuuguuauuuugagg

SEQ ID NO: 31837 - RNA, 22 nt, Homo sapiens
uucagcuacuugggaggcugaa

SEQ ID NO: 31838 - RNA, 22 nt, Homo sapiens
uugcauauguugaaccaagcgu

SEQ ID NO: 31839 - RNA, 20 nt, Homo sapiens
uaugacacugucauaaaaau

SEQ ID NO: 31840 - RNA, 22 nt, Homo sapiens
uuguguuuuuaguagggaaggg

SEQ ID NO: 31841 - RNA, 22 nt, Homo sapiens
uuugugcaaacuaggauugcga

SEQ ID NO: 31842 - RNA, 20 nt, Homo sapiens
cauugcacuccagcuugggc

SEQ ID NO: 31843 - RNA, 22 nt, Homo sapiens
uagugaauguuggcuauuaaua

SEQ ID NO: 31844 - RNA, 19 nt, Homo sapiens
cucuuuggugucucuucuu

SEQ ID NO: 31845 - RNA, 21 nt, Homo sapiens
uaaaacuguaacuuuguccug

SEQ ID NO: 31846 - RNA, 22 nt, Homo sapiens
uggcuuuguaagguuucauuuu

SEQ ID NO: 31847 - RNA, 23 nt, Homo sapiens
ucacacuuaagagaaaugcagcu

SEQ ID NO: 31848 - RNA, 23 nt, Homo sapiens
ggaaacauccagucuuucaccau

SEQ ID NO: 31849 - RNA, 22 nt, Homo sapiens
ugagaacugguagcacuuguga

SEQ ID NO: 31850 - RNA, 22 nt, Homo sapiens
aucacuuugcucuccagugugg

SEQ ID NO: 31851 - RNA, 22 nt, Homo sapiens
agcuggcuguggagaaaccccu

SEQ ID NO: 31852 - RNA, 22 nt, Homo sapiens
ucauauugcgguucauugacuu

SEQ ID NO: 31853 - RNA, 17 nt, Homo sapiens
acagugucuaugaaaug

SEQ ID NO: 31854 - RNA, 22 nt, Homo sapiens
gcauaaagcuaauaagacgaag

SEQ ID NO: 31855 - RNA, 22 nt, Homo sapiens
aauaucacaggguguacacuca

SEQ ID NO: 31856 - RNA, 22 nt, Homo sapiens
ucuggaauguaaaguuuauggg

SEQ ID NO: 31857 - RNA, 22 nt, Homo sapiens
uuggaaacauuuaugguaacag

SEQ ID NO: 31858 - RNA, 22 nt, Homo sapiens
cauugcacuccagccugcugac

SEQ ID NO: 31859 - RNA, 17 nt, Homo sapiens
gucuuugguugaguuua

SEQ ID NO: 31860 - RNA, 22 nt, Homo sapiens
cucuuuggaugccuuaggguua

SEQ ID NO: 31861 - RNA, 22 nt, Homo sapiens
uucuacuucauuaggaggauug

SEQ ID NO: 31862 - RNA, 22 nt, Homo sapiens
ugagaugaucaaaguauaggcu

SEQ ID NO: 31863 - RNA, 22 nt, Homo sapiens
agaugauguuuacugagcauca

SEQ ID NO: 31864 - RNA, 22 nt, Homo sapiens
uaaguucauucaugaaacuuag

SEQ ID NO: 31865 - RNA, 22 nt, Homo sapiens
ucuuucacuuagcaugauguuu

SEQ ID NO: 31866 - RNA, 22 nt, Homo sapiens
uuaaaaguauaggccuggcaua

SEQ ID NO: 31867 - RNA, 22 nt, Homo sapiens
ugagaugagggaagccuaggca

SEQ ID NO: 31868 - RNA, 22 nt, Homo sapiens
uugacauguaaguacucuauag

SEQ ID NO: 31869 - RNA, 22 nt, Homo sapiens
uaucacuuugauaguuuaaaug

SEQ ID NO: 31870 - RNA, 21 nt, Homo sapiens
uuaucccagugucucugcagg

SEQ ID NO: 31871 - RNA, 22 nt, Homo sapiens
gaaugcagcagugacagggcug

SEQ ID NO: 31872 - RNA, 22 nt, Homo sapiens
uguagcaaaucgauacuauugg

SEQ ID NO: 31873 - RNA, 22 nt, Homo sapiens
gggcaacauugaguacccugaa

SEQ ID NO: 31874 - RNA, 19 nt, Homo sapiens
ugagauuguaugaggagau

SEQ ID NO: 31875 - RNA, 22 nt, Homo sapiens
cauugcacuccagccugaggga

SEQ ID NO: 31876 - RNA, 22 nt, Homo sapiens
auuccacuuauaugagguaucu

SEQ ID NO: 31877 - RNA, 22 nt, Homo sapiens
acaauguauauuuuacuguagg

SEQ ID NO: 31878 - RNA, 22 nt, Homo sapiens
cauugcacugcauucugggcaa

SEQ ID NO: 31879 - RNA, 22 nt, Homo sapiens
acaguaugcuuuaaacuuuguu

SEQ ID NO: 31880 - RNA, 22 nt, Homo sapiens
ggcaacauggugaaacucuguc

SEQ ID NO: 31881 - RNA, 22 nt, Homo sapiens
auggauauuuuuugaacauaga

SEQ ID NO: 31882 - RNA, 22 nt, Homo sapiens
uuugccaauauuuuauugagga

SEQ ID NO: 31883 - RNA, 22 nt, Homo sapiens
ugagccaaugauuugaauagag

SEQ ID NO: 31884 - RNA, 22 nt, Homo sapiens
auuccacuuacaugaaguaccu

SEQ ID NO: 31885 - RNA, 22 nt, Homo sapiens
aagcacccagccucacgccugc

SEQ ID NO: 31886 - RNA, 22 nt, Homo sapiens
auggcacuccagccugggcaac

SEQ ID NO: 31887 - RNA, 22 nt, Homo sapiens
auggcagugagucucuaguauu

SEQ ID NO: 31888 - RNA, 22 nt, Homo sapiens
ugagaucagaaggauuucucug

SEQ ID NO: 31889 - RNA, 22 nt, Homo sapiens
uugagauggagucucgcucugu

SEQ ID NO: 31890 - RNA, 22 nt, Homo sapiens
uggcagaugcucuuggugccca

SEQ ID NO: 31891 - RNA, 22 nt, Homo sapiens
ugcauggauguuugaacacacu

SEQ ID NO: 31892 - RNA, 22 nt, Homo sapiens
agagaugauuaacauuuuggua

SEQ ID NO: 31893 - RNA, 22 nt, Homo sapiens
auaugcuuauuagcaagaaaua

SEQ ID NO: 31894 - RNA, 20 nt, Homo sapiens
agguagauagaugauagaua

SEQ ID NO: 31895 - RNA, 22 nt, Homo sapiens
uuucauggaggcauuuuagauu

SEQ ID NO: 31896 - RNA, 22 nt, Homo sapiens
uuucuacagugaacgauuucua

SEQ ID NO: 31897 - RNA, 21 nt, Homo sapiens
uggucaguuuucucacuagga

SEQ ID NO: 31898 - RNA, 19 nt, Homo sapiens
uuuuggaaaugugaacagc

SEQ ID NO: 31899 - RNA, 22 nt, Homo sapiens
guggaagaccagacuuuccaac

SEQ ID NO: 31900 - RNA, 22 nt, Homo sapiens
cuacagcacugagcugugugca

SEQ ID NO: 31901 - RNA, 22 nt, Homo sapiens
uugagauggagucucgcucuuu

SEQ ID NO: 31902 - RNA, 22 nt, Homo sapiens
uuggucaggcuaaucucgaacg

SEQ ID NO: 31903 - RNA, 22 nt, Homo sapiens
uggaacacauaaauagcauagu

SEQ ID NO: 31904 - RNA, 22 nt, Homo sapiens
auugcacuccagccugagcaaa

SEQ ID NO: 31905 - RNA, 22 nt, Homo sapiens
uauugcaauuggcagagugcua

SEQ ID NO: 31906 - RNA, 22 nt, Homo sapiens
aucuuuggcgggaauaucacag

SEQ ID NO: 31907 - RNA, 22 nt, Homo sapiens
uuugcauaauaagauuagggug

SEQ ID NO: 31908 - RNA, 22 nt, Homo sapiens
aauauagcuauguacaugucca

SEQ ID NO: 31909 - RNA, 22 nt, Homo sapiens
ggcacgguggcucacgccugua

SEQ ID NO: 31910 - RNA, 22 nt, Homo sapiens
ucuuuggugaauggucauccag

SEQ ID NO: 31911 - RNA, 20 nt, Homo sapiens
ucaaagacauggcugucaga

SEQ ID NO: 31912 - RNA, 22 nt, Homo sapiens
ucucugagaaaaguuucuccca

SEQ ID NO: 31913 - RNA, 22 nt, Homo sapiens
caucacuuugccuccgucucua

SEQ ID NO: 31914 - RNA, 22 nt, Homo sapiens
auugcacuccagccugggcaac

SEQ ID NO: 31915 - RNA, 18 nt, Homo sapiens
ggaaaacuuuucuaagua

SEQ ID NO: 31916 - RNA, 22 nt, Homo sapiens
aagugucuuaccgggagggagu

SEQ ID NO: 31917 - RNA, 22 nt, Homo sapiens
ccugucuugaagagauccuccu

SEQ ID NO: 31918 - RNA, 22 nt, Homo sapiens
cugggaugugacuguugccccc

SEQ ID NO: 31919 - RNA, 22 nt, Homo sapiens
cauugcaugccagccugggcaa

SEQ ID NO: 31920 - RNA, 22 nt, Homo sapiens
uuuugcaaauuccaguggccau

SEQ ID NO: 31921 - RNA, 22 nt, Homo sapiens
auugcacuccagccuugggcaa

SEQ ID NO: 31922 - RNA, 22 nt, Homo sapiens
caugccacuguggacaaagaca

SEQ ID NO: 31923 - RNA, 20 nt, Homo sapiens
uaagccacacagucuaaggu

SEQ ID NO: 31924 - RNA, 22 nt, Homo sapiens
cucagugucuggggccccaggg

SEQ ID NO: 31925 - RNA, 22 nt, Homo sapiens
gagaugaugagauguucacagu

SEQ ID NO: 31926 - RNA, 20 nt, Homo sapiens
cauugcccuccagccugggc

SEQ ID NO: 31927 - RNA, 22 nt, Homo sapiens
gaaaugcucauuuuggauccuu

SEQ ID NO: 31928 - RNA, 22 nt, Homo sapiens
uagacaacugaaacacugugca

SEQ ID NO: 31929 - RNA, 22 nt, Homo sapiens
aaauaguagcugaaugagggaa

SEQ ID NO: 31930 - RNA, 22 nt, Homo sapiens
cuagaagcauauucagaacaga

SEQ ID NO: 31931 - RNA, 22 nt, Homo sapiens
guagcagaauaucagauaauuu

SEQ ID NO: 31932 - RNA, 22 nt, Homo sapiens
uguuucuacugucucuguagua

SEQ ID NO: 31933 - RNA, 22 nt, Homo sapiens
ugagaugaguucucgcucuguc

SEQ ID NO: 31934 - RNA, 20 nt, Homo sapiens
auuccacuuauaugaggucc

SEQ ID NO: 31935 - RNA, 22 nt, Homo sapiens
acccuguaggacuauucuaauc

SEQ ID NO: 31936 - RNA, 22 nt, Homo sapiens
aaccuacauucuuaacuguugc

SEQ ID NO: 31937 - RNA, 22 nt, Homo sapiens
uacaaaucuagguuuguuacug

SEQ ID NO: 31938 - RNA, 22 nt, Homo sapiens
auguccauggaaucuguagcaa

SEQ ID NO: 31939 - RNA, 22 nt, Homo sapiens
ugagaucugauaggccuggguu

SEQ ID NO: 31940 - RNA, 22 nt, Homo sapiens
auauucacagguaucagagauu

SEQ ID NO: 31941 - RNA, 16 nt, Homo sapiens
uugaggcaugucucag

SEQ ID NO: 31942 - RNA, 22 nt, Homo sapiens
acugagaucuuuaaauaaauaa

SEQ ID NO: 31943 - RNA, 22 nt, Homo sapiens
uuugccaaucagaggcaucuug

SEQ ID NO: 31944 - RNA, 22 nt, Homo sapiens
cucauggagaacaucugcuagg

SEQ ID NO: 31945 - RNA, 22 nt, Homo sapiens
cacagugaacugguggguuuuu

SEQ ID NO: 31946 - RNA, 22 nt, Homo sapiens
uuaccugagaaggugacauuug

SEQ ID NO: 31947 - RNA, 22 nt, Homo sapiens
gagcucauuguugcuaaagaga

SEQ ID NO: 31948 - RNA, 19 nt, Homo sapiens
ugagaugaagacagggguu

SEQ ID NO: 31949 - RNA, 22 nt, Homo sapiens
ugagcugagaaaugcagcagcu

SEQ ID NO: 31950 - RNA, 22 nt, Homo sapiens
uugaagacuauaugauucuuca

SEQ ID NO: 31951 - RNA, 22 nt, Homo sapiens
gcuguguugugcccagcaucau

SEQ ID NO: 31952 - RNA, 22 nt, Homo sapiens
uuucuauguugaccagucuaga

SEQ ID NO: 31953 - RNA, 22 nt, Homo sapiens
ugugccuaguaauguguccaga

SEQ ID NO: 31954 - RNA, 22 nt, Homo sapiens
ugaaaucuaaaauguuccaaga

SEQ ID NO: 31955 - RNA, 22 nt, Homo sapiens
ugagaugaagugauguaaaaca

SEQ ID NO: 31956 - RNA, 22 nt, Homo sapiens
uuugaguuugaggugcugauga

SEQ ID NO: 31957 - RNA, 22 nt, Homo sapiens
acaguguagugacugccaacuu

SEQ ID NO: 31958 - RNA, 22 nt, Homo sapiens
uuggcagucugaggcacagacu

SEQ ID NO: 31959 - RNA, 22 nt, Homo sapiens
uuuuauguuuguucccugccaa

SEQ ID NO: 31960 - RNA, 22 nt, Homo sapiens
uuggacuucuaacugacaugga

SEQ ID NO: 31961 - RNA, 22 nt, Homo sapiens
ucugucuuugucaggaccagag

SEQ ID NO: 31962 - RNA, 22 nt, Homo sapiens
cauugcacuccagcuugggcaa

SEQ ID NO: 31963 - RNA, 22 nt, Homo sapiens
uagcuguuggugggaagucaga

SEQ ID NO: 31964 - RNA, 22 nt, Homo sapiens
acauucagcuguuguuucaaug

SEQ ID NO: 31965 - RNA, 22 nt, Homo sapiens
cauugcacuccaucuugggcaa

SEQ ID NO: 31966 - RNA, 22 nt, Homo sapiens
uuugugugugauuauaaaaggu

SEQ ID NO: 31967 - RNA, 22 nt, Homo sapiens
aucuuuggucaucacagcuaga

SEQ ID NO: 31968 - RNA, 22 nt, Homo sapiens
ucaaauguuuguuuaaggcuua

SEQ ID NO: 31969 - RNA, 22 nt, Homo sapiens
auugcucuuagaaauauuucuu

SEQ ID NO: 31970 - RNA, 22 nt, Homo sapiens
ugagaugauagauauguuaauu

SEQ ID NO: 31971 - RNA, 22 nt, Homo sapiens
caugaaagugagaaacuccugg

SEQ ID NO: 31972 - RNA, 22 nt, Homo sapiens
ugagaucuuggaggcuuuguga

SEQ ID NO: 31973 - RNA, 22 nt, Homo sapiens
uugaguccccacacuggguccc

SEQ ID NO: 31974 - RNA, 22 nt, Homo sapiens
uuggaagacaaugcugauucuc

SEQ ID NO: 31975 - RNA, 23 nt, Homo sapiens
aaagacuagucaggugcaguggu

SEQ ID NO: 31976 - RNA, 22 nt, Homo sapiens
uucuguguuuaggucacggcua

SEQ ID NO: 31977 - RNA, 22 nt, Homo sapiens
ugugaaacauggauagaacugg

SEQ ID NO: 31978 - RNA, 22 nt, Homo sapiens
cucuuugaguuccuccuggugu

SEQ ID NO: 31979 - RNA, 22 nt, Homo sapiens
agaaugugaccuuauuuggaga

SEQ ID NO: 31980 - RNA, 18 nt, Homo sapiens
ugaaacacauuuuuuccu

SEQ ID NO: 31981 - RNA, 22 nt, Homo sapiens
auugcacuccagccuggccaac

SEQ ID NO: 31982 - RNA, 22 nt, Homo sapiens
auuguacuccagccugggcagc

SEQ ID NO: 31983 - RNA, 22 nt, Homo sapiens
uugagccaaggauugucuuucc

SEQ ID NO: 31984 - RNA, 22 nt, Homo sapiens
cuacucugugguguauuugcau

SEQ ID NO: 31985 - RNA, 19 nt, Homo sapiens
uagguacauucaagucucc

SEQ ID NO: 31986 - RNA, 22 nt, Homo sapiens
uacaagcaggaaaugguauaug

SEQ ID NO: 31987 - RNA, 22 nt, Homo sapiens
uggcuuuuauuauguugaggua

SEQ ID NO: 31988 - RNA, 22 nt, Homo sapiens
cuggcucugggcuaaagaaaua

SEQ ID NO: 31989 - RNA, 22 nt, Homo sapiens
uugacagaccuuggucauaucc

SEQ ID NO: 31990 - RNA, 22 nt, Homo sapiens
aauggcuuucagcuuuucccca

SEQ ID NO: 31991 - RNA, 22 nt, Homo sapiens
uuggaaacgucaccuuuuccuu

SEQ ID NO: 31992 - RNA, 22 nt, Homo sapiens
uggccuguaacgcugucucagc

SEQ ID NO: 31993 - RNA, 22 nt, Homo sapiens
ccugucuugauuaaauuacuua

SEQ ID NO: 31994 - RNA, 22 nt, Homo sapiens
ggaaagaucagcuaaauguaag

SEQ ID NO: 31995 - RNA, 22 nt, Homo sapiens
cuauaacagugugguuuggaga

SEQ ID NO: 31996 - RNA, 22 nt, Homo sapiens
ucagagucuagaucacucacug

SEQ ID NO: 31997 - RNA, 21 nt, Homo sapiens
ugagaugauccugcaugcaug

SEQ ID NO: 31998 - RNA, 22 nt, Homo sapiens
ugauuuguuuagugccaaguuu

SEQ ID NO: 31999 - RNA, 22 nt, Homo sapiens
caguuacuuuugcaccaaccua

SEQ ID NO: 32000 - RNA, 22 nt, Homo sapiens
auccaagagacugaugacuucc

SEQ ID NO: 32001 - RNA, 22 nt, Homo sapiens
acuggcuuauuucacuuagcau

SEQ ID NO: 32002 - RNA, 22 nt, Homo sapiens
ugucucccuucccauuaggaag

SEQ ID NO: 32003 - RNA, 22 nt, Homo sapiens
cucaguguuucagcugcucaga

SEQ ID NO: 32004 - RNA, 22 nt, Homo sapiens
aagugccauguggaugggcccu

SEQ ID NO: 32005 - RNA, 22 nt, Homo sapiens
auuacuuugcaccaaccuaaua

SEQ ID NO: 32006 - RNA, 22 nt, Homo sapiens
ugagaugagucucgcucuguca

SEQ ID NO: 32007 - RNA, 22 nt, Homo sapiens
aaucacuuugcuacaaggcagu

SEQ ID NO: 32008 - RNA, 22 nt, Homo sapiens
accugagacuaggcauuuuaua

SEQ ID NO: 32009 - RNA, 22 nt, Homo sapiens
uuucuacagggcuugccaggua

SEQ ID NO: 32010 - RNA, 22 nt, Homo sapiens
uaagacuguuggcaauuuuugc

SEQ ID NO: 32011 - RNA, 22 nt, Homo sapiens
gugagccaugauuuuaccacug

SEQ ID NO: 32012 - RNA, 22 nt, Homo sapiens
cauggcuuuuauaacaagaaau

SEQ ID NO: 32013 - RNA, 22 nt, Homo sapiens
auggaaacauaagaguauagau

SEQ ID NO: 32014 - RNA, 22 nt, Homo sapiens
cuugguacucugugucccagcu

SEQ ID NO: 32015 - RNA, 22 nt, Homo sapiens
auacaagugccauguuggugug

SEQ ID NO: 32016 - RNA, 22 nt, Homo sapiens
ugcagaaucccuucagauccga

SEQ ID NO: 32017 - RNA, 20 nt, Homo sapiens
uggaaucugaagaucucagu

SEQ ID NO: 32018 - RNA, 22 nt, Homo sapiens
uuggaaaccucugcagguguuu

SEQ ID NO: 32019 - RNA, 22 nt, Homo sapiens
ugacuaaaacugaguuucauua

SEQ ID NO: 32020 - RNA, 22 nt, Homo sapiens
caccugagcgggaugcucgccu

SEQ ID NO: 32021 - RNA, 19 nt, Homo sapiens
auugcacuccaaccugggu

SEQ ID NO: 32022 - RNA, 22 nt, Homo sapiens
cugucucagugaauugguuuua

SEQ ID NO: 32023 - RNA, 22 nt, Homo sapiens
auggagacaaauaaaggagagu

SEQ ID NO: 32024 - RNA, 22 nt, Homo sapiens
auugcacuccagucugggcaac

SEQ ID NO: 32025 - RNA, 22 nt, Homo sapiens
acauaaagaagcaggacauugu

SEQ ID NO: 32026 - RNA, 22 nt, Homo sapiens
augagacuagaagagaauaaua

SEQ ID NO: 32027 - RNA, 22 nt, Homo sapiens
ugauuugucucucagcccuacu

SEQ ID NO: 32028 - RNA, 22 nt, Homo sapiens
aucacuuucuauuucugugcca

SEQ ID NO: 32029 - RNA, 22 nt, Homo sapiens
auugcacugcagccugggcaac

SEQ ID NO: 32030 - RNA, 22 nt, Homo sapiens
ggaauggaacaaagucuugaaa

SEQ ID NO: 32031 - RNA, 22 nt, Homo sapiens
ucacuagaucaagggagagaaa

SEQ ID NO: 32032 - RNA, 22 nt, Homo sapiens
uuauggccauucuuguaggagu

SEQ ID NO: 32033 - RNA, 22 nt, Homo sapiens
gacaagagaacacugcuauauu

SEQ ID NO: 32034 - RNA, 22 nt, Homo sapiens
uucauacaguggcugcacucca

SEQ ID NO: 32035 - RNA, 22 nt, Homo sapiens
guaacacucuaaagggaugcac

SEQ ID NO: 32036 - RNA, 22 nt, Homo sapiens
uugagauggaguuuugcucuug

SEQ ID NO: 32037 - RNA, 22 nt, Homo sapiens
uauuguacauauccucccuuca

SEQ ID NO: 32038 - RNA, 22 nt, Homo sapiens
uuugguugcauucacauauuuc

SEQ ID NO: 32039 - RNA, 22 nt, Homo sapiens
auugcacuccagccugggcagc

SEQ ID NO: 32040 - RNA, 22 nt, Homo sapiens
augacugucagggcagucauug

SEQ ID NO: 32041 - RNA, 22 nt, Homo sapiens
uaagacugccccagacagcaag

SEQ ID NO: 32042 - RNA, 23 nt, Homo sapiens
ggaaugaaaccugguuaugauau

SEQ ID NO: 32043 - RNA, 22 nt, Homo sapiens
uuaauagugacucauuuuccac

SEQ ID NO: 32044 - RNA, 22 nt, Homo sapiens
gggaauguagcaaaucugcaau

SEQ ID NO: 32045 - RNA, 22 nt, Homo sapiens
uucccuguaucuucugccaugu

SEQ ID NO: 32046 - RNA, 22 nt, Homo sapiens
uaccagcauuucucuuuaagua

SEQ ID NO: 32047 - RNA, 22 nt, Homo sapiens
uugagauggaguguugcucugu

SEQ ID NO: 32048 - RNA, 22 nt, Homo sapiens
uugagauggagucuugcucucu

SEQ ID NO: 32049 - RNA, 22 nt, Homo sapiens
uuggcagugcccgaugcugggg

SEQ ID NO: 32050 - RNA, 22 nt, Homo sapiens
uaagacuguguaauuuaugaag

SEQ ID NO: 32051 - RNA, 22 nt, Homo sapiens
cuggcacagugucagaaacaca

SEQ ID NO: 32052 - RNA, 22 nt, Homo sapiens
augucaacauagacaguagagu

SEQ ID NO: 32053 - RNA, 22 nt, Homo sapiens
uugagauggagucuugcucuug

SEQ ID NO: 32054 - RNA, 22 nt, Homo sapiens
uggaagacaaguguuagcaugg

SEQ ID NO: 32055 - RNA, 22 nt, Homo sapiens
cuuuugugauucuucaguugcu

SEQ ID NO: 32056 - RNA, 22 nt, Homo sapiens
guucaagugauucuacugccuc

SEQ ID NO: 32057 - RNA, 22 nt, Homo sapiens
caucgcacuccagccugggcaa

SEQ ID NO: 32058 - RNA, 22 nt, Homo sapiens
uuggaagauuacuuaguuuucu

SEQ ID NO: 32059 - RNA, 22 nt, Homo sapiens
aaguuaauguuuaagacuccua

SEQ ID NO: 32060 - RNA, 22 nt, Homo sapiens
ccuuggcacuuugccacagugc

SEQ ID NO: 32061 - RNA, 22 nt, Homo sapiens
uaaucucagcuacucaggaggc

SEQ ID NO: 32062 - RNA, 22 nt, Homo sapiens
auugcacaccagucugggcaaa

SEQ ID NO: 32063 - RNA, 22 nt, Homo sapiens
uugagauggaguuucgcucuug

SEQ ID NO: 32064 - RNA, 22 nt, Homo sapiens
ugagcugagauuaagcugcugc

SEQ ID NO: 32065 - RNA, 20 nt, Homo sapiens
cauugcacuccagccugcug

SEQ ID NO: 32066 - RNA, 22 nt, Homo sapiens
uauggcuuuguucaacagccuc

SEQ ID NO: 32067 - RNA, 22 nt, Homo sapiens
augcaacuugaaauuuuccgga

SEQ ID NO: 32068 - RNA, 21 nt, Homo sapiens
uauggcuuagucaguguuucc

SEQ ID NO: 32069 - RNA, 20 nt, Homo sapiens
ugagaacaugugguauuugg

SEQ ID NO: 32070 - RNA, 22 nt, Homo sapiens
auggcucuguuccaugugucuu

SEQ ID NO: 32071 - RNA, 20 nt, Homo sapiens
uaugacaaagccuagugagu

SEQ ID NO: 32072 - RNA, 22 nt, Homo sapiens
uaucacuuuuccagcccagcuu

SEQ ID NO: 32073 - RNA, 22 nt, Homo sapiens
ugcucaguuuaaaacuuuugag

SEQ ID NO: 32074 - RNA, 22 nt, Homo sapiens
uuaugacauugacaguuuuuag

SEQ ID NO: 32075 - RNA, 21 nt, Homo sapiens
uucaucuggccguauuccagg

SEQ ID NO: 32076 - RNA, 22 nt, Homo sapiens
cuguucaggaggcauuuggugg

SEQ ID NO: 32077 - RNA, 22 nt, Homo sapiens
aucccugugauccaaucacuuc

SEQ ID NO: 32078 - RNA, 22 nt, Homo sapiens
uuauagcuaacaucugugaaaa

SEQ ID NO: 32079 - RNA, 20 nt, Homo sapiens
uggagugaagguucuggacc

SEQ ID NO: 32080 - RNA, 22 nt, Homo sapiens
aacagacugucacauaaaauug

SEQ ID NO: 32081 - RNA, 22 nt, Homo sapiens
cuggcagugcuuguuauccugg

SEQ ID NO: 32082 - RNA, 21 nt, Homo sapiens
auuccacuuuuccuucaggga

SEQ ID NO: 32083 - RNA, 22 nt, Homo sapiens
auuccacuuccacuaguuucuc

SEQ ID NO: 32084 - RNA, 22 nt, Homo sapiens
ugagcugagaucgugccauugu

SEQ ID NO: 32085 - RNA, 22 nt, Homo sapiens
uggagugagaacuucaaugaug

SEQ ID NO: 32086 - RNA, 20 nt, Homo sapiens
uucuauggugaugaguccug

SEQ ID NO: 32087 - RNA, 22 nt, Homo sapiens
ugagcucagcuaguugaggugu

SEQ ID NO: 32088 - RNA, 22 nt, Homo sapiens
gagcuguuuuucacuagaccaa

SEQ ID NO: 32089 - RNA, 18 nt, Homo sapiens
guaaauguaucuauugcc

SEQ ID NO: 32090 - RNA, 21 nt, Homo sapiens
cuuugguagaguuuuuagggu

SEQ ID NO: 32091 - RNA, 22 nt, Homo sapiens
aggugguuuuaggcagagacau

SEQ ID NO: 32092 - RNA, 22 nt, Homo sapiens
uauggccccuacaugugcaaaa

SEQ ID NO: 32093 - RNA, 21 nt, Homo sapiens
uucuaaguaaauguuggacau

SEQ ID NO: 32094 - RNA, 22 nt, Homo sapiens
ucugucuuugccuaaguuuguc

SEQ ID NO: 32095 - RNA, 22 nt, Homo sapiens
uuuggucacugccgccgccagc

SEQ ID NO: 32096 - RNA, 22 nt, Homo sapiens
ugguucaguugcacaggcuguu

SEQ ID NO: 32097 - RNA, 22 nt, Homo sapiens
augugacuuuuuccugugccuu

SEQ ID NO: 32098 - RNA, 22 nt, Homo sapiens
uaagagagcuccaucuuuuccu

SEQ ID NO: 32099 - RNA, 22 nt, Homo sapiens
aucuacagccagucugguuugu

SEQ ID NO: 32100 - RNA, 20 nt, Homo sapiens
aaacucugucuucuuuauca

SEQ ID NO: 32101 - RNA, 22 nt, Homo sapiens
aucgcacuccauccugggcaac

SEQ ID NO: 32102 - RNA, 22 nt, Homo sapiens
aaguugguguaugagacagaag

SEQ ID NO: 32103 - RNA, 22 nt, Homo sapiens
guggaaaucucugugugacuua

SEQ ID NO: 32104 - RNA, 22 nt, Homo sapiens
aaugcuguguuauuucaugacc

SEQ ID NO: 32105 - RNA, 19 nt, Homo sapiens
cauugcacuccacccuggg

SEQ ID NO: 32106 - RNA, 22 nt, Homo sapiens
uugcacuauuaguauagauguc

SEQ ID NO: 32107 - RNA, 22 nt, Homo sapiens
ucugucuuguccucacccuaga

SEQ ID NO: 32108 - RNA, 22 nt, Homo sapiens
uugagaagugucuguucauguc

SEQ ID NO: 32109 - RNA, 22 nt, Homo sapiens
aaggcaauuuguugugaggauu

SEQ ID NO: 32110 - RNA, 22 nt, Homo sapiens
uauacaugugccauguuggugu

SEQ ID NO: 32111 - RNA, 19 nt, Homo sapiens
uucucugguuguacuaccc

SEQ ID NO: 32112 - RNA, 22 nt, Homo sapiens
gauacaccauuuucuagcuauu

SEQ ID NO: 32113 - RNA, 23 nt, Homo sapiens
uuuugcaauaagucacuggaaua

SEQ ID NO: 32114 - RNA, 22 nt, Homo sapiens
uucaaaaccucugcuuaagccc

SEQ ID NO: 32115 - RNA, 22 nt, Homo sapiens
gucucugguugcuuuuguacca

SEQ ID NO: 32116 - RNA, 22 nt, Homo sapiens
uugaguccauucgaugcugauu

SEQ ID NO: 32117 - RNA, 22 nt, Homo sapiens
cucaguguuaaggccaccucug

SEQ ID NO: 32118 - RNA, 22 nt, Homo sapiens
aaguggcauugaggaaaaaaau

SEQ ID NO: 32119 - RNA, 21 nt, Homo sapiens
ugcaagaaucaggaagcugcc

SEQ ID NO: 32120 - RNA, 19 nt, Homo sapiens
agaguauuguuacuucucu

SEQ ID NO: 32121 - RNA, 22 nt, Homo sapiens
guugguuuccuguaacuggaca

SEQ ID NO: 32122 - RNA, 22 nt, Homo sapiens
ugacaagaaagcgucuucuuuu

SEQ ID NO: 32123 - RNA, 22 nt, Homo sapiens
ugagaugaaagcagaaagacuu

SEQ ID NO: 32124 - RNA, 22 nt, Homo sapiens
caugcacugaguccaccucugg

SEQ ID NO: 32125 - RNA, 22 nt, Homo sapiens
ugacaagagaccccuccgcagg

SEQ ID NO: 32126 - RNA, 22 nt, Homo sapiens
cuggaauguuccuaaagauuca

SEQ ID NO: 32127 - RNA, 22 nt, Homo sapiens
uugagggaggcagggcuugucu

SEQ ID NO: 32128 - RNA, 22 nt, Homo sapiens
cagagagcuugcccuuguauau

SEQ ID NO: 32129 - RNA, 22 nt, Homo sapiens
uauggcuuuuaacugucguaug

SEQ ID NO: 32130 - RNA, 22 nt, Homo sapiens
auaaauaguaguugugguggcc

SEQ ID NO: 32131 - RNA, 22 nt, Homo sapiens
acuuuuugauggggagaacauu

SEQ ID NO: 32132 - RNA, 22 nt, Homo sapiens
ugcaaugugaaauaagcacauc

SEQ ID NO: 32133 - RNA, 22 nt, Homo sapiens
aucuuuggauacuugauauagu

SEQ ID NO: 32134 - RNA, 22 nt, Homo sapiens
aggcaaugugagaguuuauuca

SEQ ID NO: 32135 - RNA, 22 nt, Homo sapiens
acacagugucuguguauuuaaa

SEQ ID NO: 32136 - RNA, 20 nt, Homo sapiens
uagcacacauguagaauagu

SEQ ID NO: 32137 - RNA, 22 nt, Homo sapiens
auacaaguuauuugaacugcgg

SEQ ID NO: 32138 - RNA, 22 nt, Homo sapiens
ugacaagauauggucuuaucaa

SEQ ID NO: 32139 - RNA, 22 nt, Homo sapiens
gcugcuuuugaugacaaaaaca

SEQ ID NO: 32140 - RNA, 22 nt, Homo sapiens
gucagugucuuaacagagauua

SEQ ID NO: 32141 - RNA, 22 nt, Homo sapiens
uuggaaacaccuggugagguua

SEQ ID NO: 32142 - RNA, 22 nt, Homo sapiens
ccauugaacaugaaggaaugug

SEQ ID NO: 32143 - RNA, 22 nt, Homo sapiens
gcuuuguuaaaacacagccaca

SEQ ID NO: 32144 - RNA, 22 nt, Homo sapiens
auggcuguuccugggaguucua

SEQ ID NO: 32145 - RNA, 22 nt, Homo sapiens
cuuugguucuguuuauaugcug

SEQ ID NO: 32146 - RNA, 22 nt, Homo sapiens
ucauaucauuagaucuacugua

SEQ ID NO: 32147 - RNA, 22 nt, Homo sapiens
uugcacagugguuuagagccug

SEQ ID NO: 32148 - RNA, 18 nt, Homo sapiens
acauucagcuugaagaua

SEQ ID NO: 32149 - RNA, 20 nt, Homo sapiens
uugaggucaggaguuuggga

SEQ ID NO: 32150 - RNA, 22 nt, Homo sapiens
aaacugcuuuccaugguggcug

SEQ ID NO: 32151 - RNA, 22 nt, Homo sapiens
uauacagcaaguuacugugcug

SEQ ID NO: 32152 - RNA, 22 nt, Homo sapiens
ugucagaaucuagaggcugcua

SEQ ID NO: 32153 - RNA, 17 nt, Homo sapiens
ucuaauaauaugcauuu

SEQ ID NO: 32154 - RNA, 17 nt, Homo sapiens
cucucugguuuaaagca

SEQ ID NO: 32155 - RNA, 22 nt, Homo sapiens
uugggagugucucuggacugca

SEQ ID NO: 32156 - RNA, 22 nt, Homo sapiens
uguggccuuuguuucaguuggg

SEQ ID NO: 32157 - RNA, 22 nt, Homo sapiens
uguuacagugacuaauguuuua

SEQ ID NO: 32158 - RNA, 22 nt, Homo sapiens
aagugaguaauacgucaguugu

SEQ ID NO: 32159 - RNA, 22 nt, Homo sapiens
uacagucacauuccugaccaua

SEQ ID NO: 32160 - RNA, 22 nt, Homo sapiens
ugagaccugaucuugguacugc

SEQ ID NO: 32161 - RNA, 22 nt, Homo sapiens
cguugcacuccagccugggcaa

SEQ ID NO: 32162 - RNA, 22 nt, Homo sapiens
aagacuguaauccaucuugagu

SEQ ID NO: 32163 - RNA, 22 nt, Homo sapiens
gucuguuuggggaccuguggcc

SEQ ID NO: 32164 - RNA, 19 nt, Homo sapiens
cauggcuuauaauuuuaau

SEQ ID NO: 32165 - RNA, 22 nt, Homo sapiens
auagcagacauuucaaggcagg

SEQ ID NO: 32166 - RNA, 22 nt, Homo sapiens
uugacaaggagccauugcaucu

SEQ ID NO: 32167 - RNA, 22 nt, Homo sapiens
uauggcuuuucacuuaaguccu

SEQ ID NO: 32168 - RNA, 22 nt, Homo sapiens
gucagugucuuugcagcucaga

SEQ ID NO: 32169 - RNA, 22 nt, Homo sapiens
aaaugcuuucuuggaccauuug

SEQ ID NO: 32170 - RNA, 22 nt, Homo sapiens
uucuacagugacugcagccaua

SEQ ID NO: 32171 - RNA, 20 nt, Homo sapiens
cguugcacuccagccugggc

SEQ ID NO: 32172 - RNA, 22 nt, Homo sapiens
uccuguaaucccagcuaccaga

SEQ ID NO: 32173 - RNA, 22 nt, Homo sapiens
gaaagauuuccugagcuagaaa

SEQ ID NO: 32174 - RNA, 22 nt, Homo sapiens
uauuugguuggugcaaaaguaa

SEQ ID NO: 32175 - RNA, 22 nt, Homo sapiens
ugagaugacgacacaccucagu

SEQ ID NO: 32176 - RNA, 22 nt, Homo sapiens
ugagguagaggugaacuugacc

SEQ ID NO: 32177 - RNA, 22 nt, Homo sapiens
agugaaaugucaccuuuuagga

SEQ ID NO: 32178 - RNA, 22 nt, Homo sapiens
uuuguucaccucaaggauggga

SEQ ID NO: 32179 - RNA, 22 nt, Homo sapiens
uuugugagguggauagauugca

SEQ ID NO: 32180 - RNA, 22 nt, Homo sapiens
auggcucuuauuauuuugaggu

SEQ ID NO: 32181 - RNA, 22 nt, Homo sapiens
ugagaugaagcuagaagaaugg

SEQ ID NO: 32182 - RNA, 22 nt, Homo sapiens
cccagaguucuuaaauacugag

SEQ ID NO: 32183 - RNA, 22 nt, Homo sapiens
uuugugauugcacacucaagau

SEQ ID NO: 32184 - RNA, 22 nt, Homo sapiens
uaaguacuuuacagacauuauc

SEQ ID NO: 32185 - RNA, 22 nt, Homo sapiens
cucagugucuggcacacagaaa

SEQ ID NO: 32186 - RNA, 22 nt, Homo sapiens
uuugaguaggcuuauauuuugg

SEQ ID NO: 32187 - RNA, 22 nt, Homo sapiens
gagagcauuaagccaucaucau

SEQ ID NO: 32188 - RNA, 22 nt, Homo sapiens
ccuucauucauuaauuuagccc

SEQ ID NO: 32189 - RNA, 22 nt, Homo sapiens
cuucuguuaguucugauaacuu

SEQ ID NO: 32190 - RNA, 22 nt, Homo sapiens
uuugcuuguguaaaaaucugga

SEQ ID NO: 32191 - RNA, 22 nt, Homo sapiens
uugacauaguuucugaaauaga

SEQ ID NO: 32192 - RNA, 22 nt, Homo sapiens
agcugguuuaauaugcugucug

SEQ ID NO: 32193 - RNA, 22 nt, Homo sapiens
auugaacuguuggagagguuuu

SEQ ID NO: 32194 - RNA, 22 nt, Homo sapiens
ugagaucaagguuaauauaauc

SEQ ID NO: 32195 - RNA, 22 nt, Homo sapiens
cauugcacuuagacaacuuuug

SEQ ID NO: 32196 - RNA, 22 nt, Homo sapiens
gucuuggagacauugccauuga

SEQ ID NO: 32197 - RNA, 21 nt, Homo sapiens
guggaaauggaauuuacuaau

SEQ ID NO: 32198 - RNA, 22 nt, Homo sapiens
cuucaucugguuugugaacuuu

SEQ ID NO: 32199 - RNA, 22 nt, Homo sapiens
acacauuagcaagugcuguuau

SEQ ID NO: 32200 - RNA, 22 nt, Homo sapiens
uugguucucuuagccaucuuaa

SEQ ID NO: 32201 - RNA, 18 nt, Homo sapiens
auugcacaccagccuggg

SEQ ID NO: 32202 - RNA, 21 nt, Homo sapiens
ucagaagcucccagggaggac

SEQ ID NO: 32203 - RNA, 22 nt, Homo sapiens
auggcagugucuagggguguuu

SEQ ID NO: 32204 - RNA, 22 nt, Homo sapiens
gucuguuugauccagaucaaaa

SEQ ID NO: 32205 - RNA, 22 nt, Homo sapiens
auggcaguuucacucugggauu

SEQ ID NO: 32206 - RNA, 22 nt, Homo sapiens
ugugacucuggcacauggugag

SEQ ID NO: 32207 - RNA, 22 nt, Homo sapiens
uaaagcauguaauuagguuaga

SEQ ID NO: 32208 - RNA, 19 nt, Homo sapiens
ugugacugguugucucgcu

SEQ ID NO: 32209 - RNA, 22 nt, Homo sapiens
agauguuguucaucugauuguu

SEQ ID NO: 32210 - RNA, 22 nt, Homo sapiens
aaguaaacauuuuguacaauaa

SEQ ID NO: 32211 - RNA, 22 nt, Homo sapiens
uuagguaauauauugcugcuuu

SEQ ID NO: 32212 - RNA, 22 nt, Homo sapiens
ugaaacacacauugcccuuuau

SEQ ID NO: 32213 - RNA, 22 nt, Homo sapiens
ugugucacugcacuccagccug

SEQ ID NO: 32214 - RNA, 22 nt, Homo sapiens
ggagaugauuaugaaucacuua

SEQ ID NO: 32215 - RNA, 20 nt, Homo sapiens
uucuacagucacaggaagau

SEQ ID NO: 32216 - RNA, 22 nt, Homo sapiens
cuuugguuaauaggauauggca

SEQ ID NO: 32217 - RNA, 22 nt, Homo sapiens
ucagugccucaguuuuuaaaga

SEQ ID NO: 32218 - RNA, 22 nt, Homo sapiens
ugucucaguucccuucucugga

SEQ ID NO: 32219 - RNA, 22 nt, Homo sapiens
cauugcacuccagccugccugg

SEQ ID NO: 32220 - RNA, 22 nt, Homo sapiens
augaggcaggaaaggcguaucu

SEQ ID NO: 32221 - RNA, 22 nt, Homo sapiens
auggccugaugcaccuguccca

SEQ ID NO: 32222 - RNA, 23 nt, Homo sapiens
agccugguuucccugcuucuccc

SEQ ID NO: 32223 - RNA, 22 nt, Homo sapiens
uacaccauuugauucuuuaagc

SEQ ID NO: 32224 - RNA, 22 nt, Homo sapiens
uucagauugcauaccgaaagua

SEQ ID NO: 32225 - RNA, 22 nt, Homo sapiens
ucuugcuuguuguucccuucau

SEQ ID NO: 32226 - RNA, 22 nt, Homo sapiens
cuuugguuaucuagcuguauga

SEQ ID NO: 32227 - RNA, 22 nt, Homo sapiens
uugaggucagagguucgagacc

SEQ ID NO: 32228 - RNA, 22 nt, Homo sapiens
uucaagaauuaaaguggcuuuu

SEQ ID NO: 32229 - RNA, 22 nt, Homo sapiens
ggggaauguuaaagaauuugca

SEQ ID NO: 32230 - RNA, 22 nt, Homo sapiens
uuauagacacguuguaacaaac

SEQ ID NO: 32231 - RNA, 22 nt, Homo sapiens
gagacauugacuuuguuccaga

SEQ ID NO: 32232 - RNA, 22 nt, Homo sapiens
ugacaagaacuuuccauaguaa

SEQ ID NO: 32233 - RNA, 22 nt, Homo sapiens
ucauugcacuccagccugggug

SEQ ID NO: 32234 - RNA, 22 nt, Homo sapiens
uuauacuacuauaaagagguag

SEQ ID NO: 32235 - RNA, 22 nt, Homo sapiens
uggugagaaaagaugucuuugu

SEQ ID NO: 32236 - RNA, 22 nt, Homo sapiens
cauggcuuucacaguaaagccu

SEQ ID NO: 32237 - RNA, 22 nt, Homo sapiens
cuacagcagcccaguccccgaa

SEQ ID NO: 32238 - RNA, 23 nt, Homo sapiens
uuaguaaacucaaugacaccaca

SEQ ID NO: 32239 - RNA, 22 nt, Homo sapiens
guguuauuuugcugggaaugau

SEQ ID NO: 32240 - RNA, 21 nt, Homo sapiens
agcugguuuccacagugugcu

SEQ ID NO: 32241 - RNA, 22 nt, Homo sapiens
ugagaugaagucucacucuguc

SEQ ID NO: 32242 - RNA, 22 nt, Homo sapiens
uaaagugcugagaugaggcugg

SEQ ID NO: 32243 - RNA, 22 nt, Homo sapiens
uuggcagugguucugacggacc

SEQ ID NO: 32244 - RNA, 22 nt, Homo sapiens
uucuuuggauaaaguuuuaugc

SEQ ID NO: 32245 - RNA, 23 nt, Homo sapiens
caugaacuaguuugcagccauga

SEQ ID NO: 32246 - RNA, 22 nt, Homo sapiens
caucacuuuuccuuuuacagau

SEQ ID NO: 32247 - RNA, 22 nt, Homo sapiens
ugagcugagaucaugcuauugu

SEQ ID NO: 32248 - RNA, 22 nt, Homo sapiens
cauugcacuccagccuagccaa

SEQ ID NO: 32249 - RNA, 22 nt, Homo sapiens
uagcauaauuuguagaaaauca

SEQ ID NO: 32250 - RNA, 21 nt, Homo sapiens
ugaaugcuuuaaauauuagaa

SEQ ID NO: 32251 - RNA, 22 nt, Homo sapiens
gaugagaugagcauuugaauug

SEQ ID NO: 32252 - RNA, 22 nt, Homo sapiens
uacuguacugcaguucugcaaa

SEQ ID NO: 32253 - RNA, 20 nt, Homo sapiens
agcugguuuuaugaaucuuu

SEQ ID NO: 32254 - RNA, 22 nt, Homo sapiens
uuuagcaaagcaauuuacacca

SEQ ID NO: 32255 - RNA, 22 nt, Homo sapiens
uuccugagagggcugggugcag

SEQ ID NO: 32256 - RNA, 22 nt, Homo sapiens
acacuauugagguuuguuugca

SEQ ID NO: 32257 - RNA, 22 nt, Homo sapiens
uugcuuaggcuggagugcagug

SEQ ID NO: 32258 - RNA, 22 nt, Homo sapiens
ggcagaauugcugaggaugcua

SEQ ID NO: 32259 - RNA, 22 nt, Homo sapiens
uuuuaacagccaggggacggcc

SEQ ID NO: 32260 - RNA, 22 nt, Homo sapiens
ucuaugguuuauuuccaagugu

SEQ ID NO: 32261 - RNA, 18 nt, Homo sapiens
aaacugcuuccuuggccu

SEQ ID NO: 32262 - RNA, 22 nt, Homo sapiens
augaggcacugcgcccuacuga

SEQ ID NO: 32263 - RNA, 22 nt, Homo sapiens
caaugguuuuuuaguauaagua

SEQ ID NO: 32264 - RNA, 22 nt, Homo sapiens
gucucccagccuacaucuuucu

SEQ ID NO: 32265 - RNA, 22 nt, Homo sapiens
uaucaguauggauucauggauu

SEQ ID NO: 32266 - RNA, 22 nt, Homo sapiens
uucuacaugggucgucggugag

SEQ ID NO: 32267 - RNA, 22 nt, Homo sapiens
uuggaaauguguuugcauucag

SEQ ID NO: 32268 - RNA, 18 nt, Homo sapiens
gacuuggaguuuacagug

SEQ ID NO: 32269 - RNA, 22 nt, Homo sapiens
ucuaaaacuagauugugaugau

SEQ ID NO: 32270 - RNA, 22 nt, Homo sapiens
auagcagaauuuggucaagucu

SEQ ID NO: 32271 - RNA, 22 nt, Homo sapiens
cuggaaacaucuuaggaaugca

SEQ ID NO: 32272 - RNA, 22 nt, Homo sapiens
auagaagcugccaacguuucag

SEQ ID NO: 32273 - RNA, 22 nt, Homo sapiens
uacagucauaaugccuagugac

SEQ ID NO: 32274 - RNA, 22 nt, Homo sapiens
uuugaaccauuugaagaaugau

SEQ ID NO: 32275 - RNA, 22 nt, Homo sapiens
agcugguuuauuucuauauccu

SEQ ID NO: 32276 - RNA, 22 nt, Homo sapiens
gagaaccuccagcaagguagua

SEQ ID NO: 32277 - RNA, 22 nt, Homo sapiens
uugcauauucucugaggcagga

SEQ ID NO: 32278 - RNA, 22 nt, Homo sapiens
ucuaaguaguagcuggucagaa

SEQ ID NO: 32279 - RNA, 22 nt, Homo sapiens
uugcacuccggccuggguaaca

SEQ ID NO: 32280 - RNA, 22 nt, Homo sapiens
cuggaauauuagcuggucuuaa

SEQ ID NO: 32281 - RNA, 22 nt, Homo sapiens
gagcugaucuuuucugauucca

SEQ ID NO: 32282 - RNA, 19 nt, Homo sapiens
uaugcaacuuauagugcug

SEQ ID NO: 32283 - RNA, 19 nt, Homo sapiens
uucauacagugagagcagc

SEQ ID NO: 32284 - RNA, 22 nt, Homo sapiens
guguuauugagaaauagggugu

SEQ ID NO: 32285 - RNA, 22 nt, Homo sapiens
uauggcuuuuauuauguuguag

SEQ ID NO: 32286 - RNA, 22 nt, Homo sapiens
auccauugucuaaugcuaagau

SEQ ID NO: 32287 - RNA, 22 nt, Homo sapiens
ugagaugagggcugcacucaaa

SEQ ID NO: 32288 - RNA, 22 nt, Homo sapiens
gagcucaccuuaccucuggagc

SEQ ID NO: 32289 - RNA, 22 nt, Homo sapiens
cuuuacaguuggacucacgagg

SEQ ID NO: 32290 - RNA, 23 nt, Homo sapiens
ucaguacuccacuuucaauagug

SEQ ID NO: 32291 - RNA, 22 nt, Homo sapiens
cugaaagagcauguaacacagu

SEQ ID NO: 32292 - RNA, 22 nt, Homo sapiens
uuagcacauuuccagcacaugg

SEQ ID NO: 32293 - RNA, 22 nt, Homo sapiens
cauugcacuccagccuggcaac

SEQ ID NO: 32294 - RNA, 22 nt, Homo sapiens
cauggcuuuaagcaacaccaag

SEQ ID NO: 32295 - RNA, 22 nt, Homo sapiens
acacuguagcugagggcaugcg

SEQ ID NO: 32296 - RNA, 22 nt, Homo sapiens
agaacuguccauucagcaugaa

SEQ ID NO: 32297 - RNA, 22 nt, Homo sapiens
ugccaaaaugggcuuuauaccg

SEQ ID NO: 32298 - RNA, 22 nt, Homo sapiens
ugugagacugguucugaaccca

SEQ ID NO: 32299 - RNA, 22 nt, Homo sapiens
auugcacuccagccuggcaaua

SEQ ID NO: 32300 - RNA, 22 nt, Homo sapiens
uuccugagccuuguaucuagua

SEQ ID NO: 32301 - RNA, 22 nt, Homo sapiens
aaggagcuaagagaucauacau

SEQ ID NO: 32302 - RNA, 22 nt, Homo sapiens
ugagaucaguuguuauaauucu

SEQ ID NO: 32303 - RNA, 22 nt, Homo sapiens
uagcaggaaaggggucagaucu

SEQ ID NO: 32304 - RNA, 22 nt, Homo sapiens
acuuuguguuacccagcaagga

SEQ ID NO: 32305 - RNA, 22 nt, Homo sapiens
uggaagauggaguuuuaucauu

SEQ ID NO: 32306 - RNA, 22 nt, Homo sapiens
gaggcaagaguaguuaaguuag

SEQ ID NO: 32307 - RNA, 22 nt, Homo sapiens
augacagagauaugugaauuuu

SEQ ID NO: 32308 - RNA, 22 nt, Homo sapiens
auggcaguuuauucuaaaucaa

SEQ ID NO: 32309 - RNA, 22 nt, Homo sapiens
acuuuuguuauacagugugaua

SEQ ID NO: 32310 - RNA, 22 nt, Homo sapiens
auggacuuuuuguucagugucu

SEQ ID NO: 32311 - RNA, 22 nt, Homo sapiens
auuggcuuuugaaagucugcga

SEQ ID NO: 32312 - RNA, 22 nt, Homo sapiens
ugagaccuuucauuucucagug

SEQ ID NO: 32313 - RNA, 22 nt, Homo sapiens
aucccuguaguaauauucuagc

SEQ ID NO: 32314 - RNA, 22 nt, Homo sapiens
augagcugauuuccuuaccaua

SEQ ID NO: 32315 - RNA, 22 nt, Homo sapiens
cacaguguuacugguaugaagu

SEQ ID NO: 32316 - RNA, 22 nt, Homo sapiens
uugcacucuccagccucggcaa

SEQ ID NO: 32317 - RNA, 22 nt, Homo sapiens
agaauguuuuagaccaauacaa

SEQ ID NO: 32318 - RNA, 22 nt, Homo sapiens
uuugugaggugauggauauguc

SEQ ID NO: 32319 - RNA, 22 nt, Homo sapiens
gauaaagauagcaauagggaca

SEQ ID NO: 32320 - RNA, 22 nt, Homo sapiens
gggaaauguaaagucauaagau

SEQ ID NO: 32321 - RNA, 22 nt, Homo sapiens
uuuugggggugauucacacagu

SEQ ID NO: 32322 - RNA, 23 nt, Homo sapiens
uuuuuguguuucauggaaauagg

SEQ ID NO: 32323 - RNA, 21 nt, Homo sapiens
uuuugugcaugugcagccugc

SEQ ID NO: 32324 - RNA, 22 nt, Homo sapiens
uuuuugagguauaguguggcua

SEQ ID NO: 32325 - RNA, 22 nt, Homo sapiens
uugugggaggugauuagaucau

SEQ ID NO: 32326 - RNA, 22 nt, Homo sapiens
uugugguuuuaucuaccuuugg

SEQ ID NO: 32327 - RNA, 22 nt, Homo sapiens
uuucgugucuggucugugaugg

SEQ ID NO: 32328 - RNA, 22 nt, Homo sapiens
uuucgguuaucuagcuuuauga

SEQ ID NO: 32329 - RNA, 22 nt, Homo sapiens
uuuauucggcuaggagcuucgg

SEQ ID NO: 32330 - RNA, 21 nt, Homo sapiens
uuggggaauggagagguuuuc

SEQ ID NO: 32331 - RNA, 22 nt, Homo sapiens
uucauccccuccaaaucucaug

SEQ ID NO: 32332 - RNA, 22 nt, Homo sapiens
uugaaagucauuucuucuaagu

SEQ ID NO: 32333 - RNA, 22 nt, Homo sapiens
uugacuucagagcugauucaag

SEQ ID NO: 32334 - RNA, 22 nt, Homo sapiens
uugcacauugcaccuuuuguau

SEQ ID NO: 32335 - RNA, 22 nt, Homo sapiens
uugcacuugcugaggagugauu

SEQ ID NO: 32336 - RNA, 22 nt, Homo sapiens
ugucuguuugcgaaauugcuuc

SEQ ID NO: 32337 - RNA, 22 nt, Homo sapiens
ugugacuaguggugaaugacgc

SEQ ID NO: 32338 - RNA, 22 nt, Homo sapiens
uguccguuuuggcuuucucccu

SEQ ID NO: 32339 - RNA, 22 nt, Homo sapiens
ugugauggaguuucauggacug

SEQ ID NO: 32340 - RNA, 22 nt, Homo sapiens
uguauguuucuuaggccugaga

SEQ ID NO: 32341 - RNA, 22 nt, Homo sapiens
uguagucauuugaaggaugucc

SEQ ID NO: 32342 - RNA, 22 nt, Homo sapiens
uguacccuuagagagugaucga

SEQ ID NO: 32343 - RNA, 20 nt, Homo sapiens
uggugguuuuaugugguuua

SEQ ID NO: 32344 - RNA, 20 nt, Homo sapiens
uggugucuuggaaagagcuc

SEQ ID NO: 32345 - RNA, 22 nt, Homo sapiens
uguaaaaagcccagccgcugag

SEQ ID NO: 32346 - RNA, 22 nt, Homo sapiens
uggugccgugguccuggggcca

SEQ ID NO: 32347 - RNA, 22 nt, Homo sapiens
uggugccguccugcaauccugg

SEQ ID NO: 32348 - RNA, 22 nt, Homo sapiens
uggcgggaaaguugggagaaga

SEQ ID NO: 32349 - RNA, 22 nt, Homo sapiens
ugugauugauauauuuacagaa

SEQ ID NO: 32350 - RNA, 22 nt, Homo sapiens
ugugguauuagguguaguaucu

SEQ ID NO: 32351 - RNA, 22 nt, Homo sapiens
ugugcacauugugcagguugau

SEQ ID NO: 32352 - RNA, 22 nt, Homo sapiens
ugugcaguuuugagugaauuuc

SEQ ID NO: 32353 - RNA, 22 nt, Homo sapiens
ugugucuugaauuuuguaugua

SEQ ID NO: 32354 - RNA, 22 nt, Homo sapiens
ugugguuuuucacauuuagaga

SEQ ID NO: 32355 - RNA, 22 nt, Homo sapiens
uuacuugagaugaguuggacaa

SEQ ID NO: 32356 - RNA, 22 nt, Homo sapiens
gugcaugucuaugcgagucuaa

SEQ ID NO: 32357 - RNA, 23 nt, Homo sapiens
gugcaguggcgagauuucggcuc

SEQ ID NO: 32358 - RNA, 22 nt, Homo sapiens
gugcagugugauccuuccguau

SEQ ID NO: 32359 - RNA, 22 nt, Homo sapiens
gugcgguauuagcaagccaaca

SEQ ID NO: 32360 - RNA, 22 nt, Homo sapiens
gugcucauuuagagagaagcac

SEQ ID NO: 32361 - RNA, 23 nt, Homo sapiens
gugccuucugagccuagucucca

SEQ ID NO: 32362 - RNA, 22 nt, Homo sapiens
gugggaagcuggaacucccucc

SEQ ID NO: 32363 - RNA, 22 nt, Homo sapiens
guggcuuuauuuagaagcaggg

SEQ ID NO: 32364 - RNA, 22 nt, Homo sapiens
gugggguaggguaggacucaac

SEQ ID NO: 32365 - RNA, 22 nt, Homo sapiens
guggcgagaucauagcucauug

SEQ ID NO: 32366 - RNA, 22 nt, Homo sapiens
guggaaaucucugugugacuua

SEQ ID NO: 32367 - RNA, 22 nt, Homo sapiens
gugacacagcaagacuccgucu

SEQ ID NO: 32368 - RNA, 22 nt, Homo sapiens
gugacaucagcuccagguauaa

SEQ ID NO: 32369 - RNA, 21 nt, Homo sapiens
gugcagaugccacagucacuc

SEQ ID NO: 32370 - RNA, 22 nt, Homo sapiens
gugcaagcaucauggaguguac

SEQ ID NO: 32371 - RNA, 22 nt, Homo sapiens
gguggugguauuucagaaaaug

SEQ ID NO: 32372 - RNA, 22 nt, Homo sapiens
gucugucuuuugucuuugaaau

SEQ ID NO: 32373 - RNA, 22 nt, Homo sapiens
gucugguuuuuuauauccucac

SEQ ID NO: 32374 - RNA, 20 nt, Homo sapiens
gucugucuccgaguagaauu

SEQ ID NO: 32375 - RNA, 22 nt, Homo sapiens
gucuggguuuguuuguacuugc

SEQ ID NO: 32376 - RNA, 21 nt, Homo sapiens
gucugguguuuuaaugaggac

SEQ ID NO: 32377 - RNA, 22 nt, Homo sapiens
gucugguuccugggagauuucu

SEQ ID NO: 32378 - RNA, 20 nt, Homo sapiens
gucuuguagcucaaguuauu

SEQ ID NO: 32379 - RNA, 22 nt, Homo sapiens
gucuuuguuuugauuuaccaga

SEQ ID NO: 32380 - RNA, 22 nt, Homo sapiens
gggcacgugugugcugugcuca

SEQ ID NO: 32381 - RNA, 20 nt, Homo sapiens
gggcaaguaugugggaaguc

SEQ ID NO: 32382 - RNA, 18 nt, Homo sapiens
gggaauauggggaguuga

SEQ ID NO: 32383 - RNA, 22 nt, Homo sapiens
gggaagauauaggcugggcacc

SEQ ID NO: 32384 - RNA, 22 nt, Homo sapiens
gggaggucauuguucaaugcug

SEQ ID NO: 32385 - RNA, 22 nt, Homo sapiens
ggcucguguuuucuguccaguu

SEQ ID NO: 32386 - RNA, 22 nt, Homo sapiens
ggucccccuccacucucgcaaa

SEQ ID NO: 32387 - RNA, 22 nt, Homo sapiens
gguccgccugccuuggccuccc

SEQ ID NO: 32388 - RNA, 22 nt, Homo sapiens
ggugagguaguaagguacaaua

SEQ ID NO: 32389 - RNA, 22 nt, Homo sapiens
ggcaccacagacgccaggcgug

SEQ ID NO: 32390 - RNA, 23 nt, Homo sapiens
ggcacggaauucaaagaggcauu

SEQ ID NO: 32391 - RNA, 22 nt, Homo sapiens
ggagaucuuuaggaguuggacu

SEQ ID NO: 32392 - RNA, 22 nt, Homo sapiens
gcugguguagagugcagaaagg

SEQ ID NO: 32393 - RNA, 22 nt, Homo sapiens
gcuguaguugaggauuuuaaga

SEQ ID NO: 32394 - RNA, 22 nt, Homo sapiens
gcuguguguuaucagaaauugc

SEQ ID NO: 32395 - RNA, 22 nt, Homo sapiens
gcuguugguaaaaaggacauga

SEQ ID NO: 32396 - RNA, 22 nt, Homo sapiens
ggaaaucaucauucucgguaua

SEQ ID NO: 32397 - RNA, 22 nt, Homo sapiens
ggacuguaguuucccgggcugg

SEQ ID NO: 32398 - RNA, 19 nt, Homo sapiens
ggaaaugucuauuaagauc

SEQ ID NO: 32399 - RNA, 22 nt, Homo sapiens
gcuuggugugcaagugguacua

SEQ ID NO: 32400 - RNA, 22 nt, Homo sapiens
gcacgugcacccacaugcacgu

SEQ ID NO: 32401 - RNA, 22 nt, Homo sapiens
gcaccguggaguauggggagga

SEQ ID NO: 32402 - RNA, 22 nt, Homo sapiens
gcacauggccccaucgugccga

SEQ ID NO: 32403 - RNA, 22 nt, Homo sapiens
gcugcacuuuaaggcauccccu

SEQ ID NO: 32404 - RNA, 22 nt, Homo sapiens
uaaagcacaaguaaagaauacu

SEQ ID NO: 32405 - RNA, 22 nt, Homo sapiens
uaacccagugucugugaugggu

SEQ ID NO: 32406 - RNA, 22 nt, Homo sapiens
uaacugcaaccucugccugcug

SEQ ID NO: 32407 - RNA, 22 nt, Homo sapiens
gugguuuuacaaagagaaagau

SEQ ID NO: 32408 - RNA, 22 nt, Homo sapiens
guuggcaaguggcugagcuggg

SEQ ID NO: 32409 - RNA, 22 nt, Homo sapiens
guguaauacacacauauaugca

SEQ ID NO: 32410 - RNA, 22 nt, Homo sapiens
uacccgucuacuuugaacaaaa

SEQ ID NO: 32411 - RNA, 22 nt, Homo sapiens
uacugcagucagacuccugggc

SEQ ID NO: 32412 - RNA, 22 nt, Homo sapiens
uacugcauucuccgccuccggg

SEQ ID NO: 32413 - RNA, 22 nt, Homo sapiens
uaauagagucauuauuauuguu

SEQ ID NO: 32414 - RNA, 22 nt, Homo sapiens
uauggguguuauugcaugggag

SEQ ID NO: 32415 - RNA, 22 nt, Homo sapiens
uauuccuuuugcauuuccacau

SEQ ID NO: 32416 - RNA, 22 nt, Homo sapiens
uaugacuuguuuucuggucugc

SEQ ID NO: 32417 - RNA, 22 nt, Homo sapiens
uaugaagccaggauuuauuauu

SEQ ID NO: 32418 - RNA, 22 nt, Homo sapiens
uaucaaggccacucauuuuaug

SEQ ID NO: 32419 - RNA, 22 nt, Homo sapiens
uaucacacaucaugguaaaucu

SEQ ID NO: 32420 - RNA, 21 nt, Homo sapiens
uaggccgggugcaggaugcuu

SEQ ID NO: 32421 - RNA, 22 nt, Homo sapiens
uagggcuugugaucagguguag

SEQ ID NO: 32422 - RNA, 22 nt, Homo sapiens
ugacaguaucuacagcuucuua

SEQ ID NO: 32423 - RNA, 22 nt, Homo sapiens
ugagguugguauuacugucucu

SEQ ID NO: 32424 - RNA, 22 nt, Homo sapiens
ugagucaauucuaacaauggca

SEQ ID NO: 32425 - RNA, 22 nt, Homo sapiens
ugagugugacuuagcagaagga

SEQ ID NO: 32426 - RNA, 18 nt, Homo sapiens
ugcuccccugggugagca

SEQ ID NO: 32427 - RNA, 22 nt, Homo sapiens
ugcuuuguugaaaaucauuugg

SEQ ID NO: 32428 - RNA, 22 nt, Homo sapiens
ugcugguggucccauaugauua

SEQ ID NO: 32429 - RNA, 22 nt, Homo sapiens
uggcagaugcucuuggugccca

SEQ ID NO: 32430 - RNA, 22 nt, Homo sapiens
uggcccccucccaaaucucaua

SEQ ID NO: 32431 - RNA, 19 nt, Homo sapiens
uggcacauguauacuuaug

SEQ ID NO: 32432 - RNA, 22 nt, Homo sapiens
uggcagacaaauuugagcauau

SEQ ID NO: 32433 - RNA, 21 nt, Homo sapiens
uggagugaagaguuuauugac

SEQ ID NO: 32434 - RNA, 20 nt, Homo sapiens
uauuugguuauuuccauggu

SEQ ID NO: 32435 - RNA, 22 nt, Homo sapiens
ucaaaaccucagagaguagagc

SEQ ID NO: 32436 - RNA, 22 nt, Homo sapiens
ucacuggcaaauauauccguug

SEQ ID NO: 32437 - RNA, 22 nt, Homo sapiens
ucacuggccaaauucuggguga

SEQ ID NO: 32438 - RNA, 22 nt, Homo sapiens
ucaccaccuuccaggaccacug

SEQ ID NO: 32439 - RNA, 22 nt, Homo sapiens
ucaggcacuaguaagaaaaagg

SEQ ID NO: 32440 - RNA, 22 nt, Homo sapiens
ucaguguuuggaaucucaauuu

SEQ ID NO: 32441 - RNA, 22 nt, Homo sapiens
ucccagaaacgcauauguucau

SEQ ID NO: 32442 - RNA, 22 nt, Homo sapiens
ucuccggguggcggcgaaggga

SEQ ID NO: 32443 - RNA, 22 nt, Homo sapiens
ucuccauuguccagaugaggaa

SEQ ID NO: 32444 - RNA, 20 nt, Homo sapiens
ucuggguuuuggccacgccc

SEQ ID NO: 32445 - RNA, 22 nt, Homo sapiens
ucugguguuauucauguaguuu

SEQ ID NO: 32446 - RNA, 22 nt, Homo sapiens
ucugucuuguccucacccuaga

SEQ ID NO: 32447 - RNA, 22 nt, Homo sapiens
ucugucuugugguuugagugcc

SEQ ID NO: 32448 - RNA, 22 nt, Homo sapiens
ucugagucaucacaaaugaugc

SEQ ID NO: 32449 - RNA, 23 nt, Homo sapiens
ucugcggguguggacccuagugc

SEQ ID NO: 32450 - RNA, 21 nt, Homo sapiens
ucuggcuuucauuccccuucu

SEQ ID NO: 32451 - RNA, 23 nt, Homo sapiens
ugacaaccucaugcuuugucaug

SEQ ID NO: 32452 - RNA, 20 nt, Homo sapiens
ugaaaucuucacuaagucuc

SEQ ID NO: 32453 - RNA, 22 nt, Homo sapiens
ucugugguaagaaacgcauguc

SEQ ID NO: 32454 - RNA, 22 nt, Homo sapiens
ucuugcuuguuguucccuucau

SEQ ID NO: 32455 - RNA, 22 nt, Homo sapiens
ugaaacugcagugggcuuggca

SEQ ID NO: 32456 - RNA, 20 nt, Homo sapiens
ccccuggaguggggcugcuu

SEQ ID NO: 32457 - RNA, 18 nt, Homo sapiens
cccgggugggcuguuccc

SEQ ID NO: 32458 - RNA, 22 nt, Homo sapiens
cccgugucuuggucuagggccu

SEQ ID NO: 32459 - RNA, 22 nt, Homo sapiens
ccccggguucugucugcccuug

SEQ ID NO: 32460 - RNA, 22 nt, Homo sapiens
ccacugcacuccagcccggcaa

SEQ ID NO: 32461 - RNA, 22 nt, Homo sapiens
ccacaaccuccauauccugggu

SEQ ID NO: 32462 - RNA, 22 nt, Homo sapiens
cauggcacuggugggagugucu

SEQ ID NO: 32463 - RNA, 22 nt, Homo sapiens
cgugaggaaaacagaggguguu

SEQ ID NO: 32464 - RNA, 22 nt, Homo sapiens
cccuggacacacacuuuuauuc

SEQ ID NO: 32465 - RNA, 22 nt, Homo sapiens
ccgugcacggaaaggcauauuu

SEQ ID NO: 32466 - RNA, 22 nt, Homo sapiens
cccuggacauucaucauuaugu

SEQ ID NO: 32467 - RNA, 19 nt, Homo sapiens
cagguagugugcugacaug

SEQ ID NO: 32468 - RNA, 22 nt, Homo sapiens
cagguaguguguagcacagcag

SEQ ID NO: 32469 - RNA, 22 nt, Homo sapiens
caggcacgcuugggagacacac

SEQ ID NO: 32470 - RNA, 22 nt, Homo sapiens
caggcagucuggcucccaagug

SEQ ID NO: 32471 - RNA, 22 nt, Homo sapiens
caccaaccucaguagcaucugu

SEQ ID NO: 32472 - RNA, 22 nt, Homo sapiens
cauacagcuaguaaguguaaga

SEQ ID NO: 32473 - RNA, 22 nt, Homo sapiens
auuguguuugaaugaggcucca

SEQ ID NO: 32474 - RNA, 22 nt, Homo sapiens
cacagagugagacccugucucu

SEQ ID NO: 32475 - RNA, 22 nt, Homo sapiens
auugcaguuucaacuccagggc

SEQ ID NO: 32476 - RNA, 22 nt, Homo sapiens
auugcagaaaugacagagcgcc

SEQ ID NO: 32477 - RNA, 22 nt, Homo sapiens
auugcacucuagccugggugac

SEQ ID NO: 32478 - RNA, 22 nt, Homo sapiens
auugcacuccagccuggggaac

SEQ ID NO: 32479 - RNA, 22 nt, Homo sapiens
auugcacuccagccugggugag

SEQ ID NO: 32480 - RNA, 22 nt, Homo sapiens
auugcacuccagccuuggggau

SEQ ID NO: 32481 - RNA, 22 nt, Homo sapiens
auugcacuccagccugggcgac

SEQ ID NO: 32482 - RNA, 22 nt, Homo sapiens
auugcacuccagccugcggaac

SEQ ID NO: 32483 - RNA, 22 nt, Homo sapiens
auguuugguaagaauauuguua

SEQ ID NO: 32484 - RNA, 19 nt, Homo sapiens
augugguuagcaugacugc

SEQ ID NO: 32485 - RNA, 22 nt, Homo sapiens
auucccuuggucaacggaugca

SEQ ID NO: 32486 - RNA, 22 nt, Homo sapiens
auucccuuagcugccucagccu

SEQ ID NO: 32487 - RNA, 22 nt, Homo sapiens
gagaucuucguguggggagaca

SEQ ID NO: 32488 - RNA, 22 nt, Homo sapiens
gagaacuggcgugaacugcacg

SEQ ID NO: 32489 - RNA, 22 nt, Homo sapiens
gaucugucuuuccuuauagucu

SEQ ID NO: 32490 - RNA, 22 nt, Homo sapiens
gauguguugggaagauuucaag

SEQ ID NO: 32491 - RNA, 22 nt, Homo sapiens
gaguucaauuuccagcuguucu

SEQ ID NO: 32492 - RNA, 22 nt, Homo sapiens
gaguuaggaucucacuguguca

SEQ ID NO: 32493 - RNA, 22 nt, Homo sapiens
cugcagaucuuggggcuugcca

SEQ ID NO: 32494 - RNA, 22 nt, Homo sapiens
cugcaguaaacuuucccauuca

SEQ ID NO: 32495 - RNA, 22 nt, Homo sapiens
cugaugaaguauuuguucugga

SEQ ID NO: 32496 - RNA, 22 nt, Homo sapiens
cugagguaggugaucagugcuu

SEQ ID NO: 32497 - RNA, 22 nt, Homo sapiens
cugagguacccacuucaucuca

SEQ ID NO: 32498 - RNA, 22 nt, Homo sapiens
cucacggcccugcgcacuggca

SEQ ID NO: 32499 - RNA, 18 nt, Homo sapiens
cucacacccuaaucagga

SEQ ID NO: 32500 - RNA, 22 nt, Homo sapiens
cuauucacaggcaauauguaca

SEQ ID NO: 32501 - RNA, 22 nt, Homo sapiens
cuacugcacaucaucugaguua

SEQ ID NO: 32502 - RNA, 22 nt, Homo sapiens
cuuguguuacauauuuaagaga

SEQ ID NO: 32503 - RNA, 22 nt, Homo sapiens
cuuccaguggcagccgggcaug

SEQ ID NO: 32504 - RNA, 22 nt, Homo sapiens
cugccuagauguuguagggggu

SEQ ID NO: 32505 - RNA, 22 nt, Homo sapiens
aucccgagacuuugcugaaguu

SEQ ID NO: 32506 - RNA, 22 nt, Homo sapiens
aucccuuucucuggcuaggggg

SEQ ID NO: 32507 - RNA, 22 nt, Homo sapiens
aucccuuucugauacuuucccu

SEQ ID NO: 32508 - RNA, 22 nt, Homo sapiens
aucaccuggaguagcccguccc

SEQ ID NO: 32509 - RNA, 20 nt, Homo sapiens
aucacuggagaaggaaaccu

SEQ ID NO: 32510 - RNA, 22 nt, Homo sapiens
aucuguguuuaaggucccagaa

SEQ ID NO: 32511 - RNA, 22 nt, Homo sapiens
aucgcgccauuguacuccagcc

SEQ ID NO: 32512 - RNA, 22 nt, Homo sapiens
augacagcaucugugaaguugu

SEQ ID NO: 32513 - RNA, 22 nt, Homo sapiens
augaaacuggcuaauuuuugua

SEQ ID NO: 32514 - RNA, 22 nt, Homo sapiens
augauggaggccgugauggacg

SEQ ID NO: 32515 - RNA, 21 nt, Homo sapiens
auggaaagacugccucuucaa

SEQ ID NO: 32516 - RNA, 22 nt, Homo sapiens
auggaaagcuguuccuacacaa

SEQ ID NO: 32517 - RNA, 22 nt, Homo sapiens
auggaacugaagugcugcccuu

SEQ ID NO: 32518 - RNA, 22 nt, Homo sapiens
auggauuuuggggccagaggca

SEQ ID NO: 32519 - RNA, 22 nt, Homo sapiens
aguccagguuuuguaauggcaa

SEQ ID NO: 32520 - RNA, 22 nt, Homo sapiens
agugcaguggcacaaucuuggc

SEQ ID NO: 32521 - RNA, 22 nt, Homo sapiens
agcuggucuuggggaagaguag

SEQ ID NO: 32522 - RNA, 22 nt, Homo sapiens
agcugguuuaauaugcugucug

SEQ ID NO: 32523 - RNA, 19 nt, Homo sapiens
agcaucauuauuguuuugg

SEQ ID NO: 32524 - RNA, 22 nt, Homo sapiens
agcuugugauuuagagugagag

SEQ ID NO: 32525 - RNA, 22 nt, Homo sapiens
agcuugugcuguaugaagggcc

SEQ ID NO: 32526 - RNA, 22 nt, Homo sapiens
auacugcacauuuagggaggga

SEQ ID NO: 32527 - RNA, 22 nt, Homo sapiens
auaacaggaaauacagggcuuu

SEQ ID NO: 32528 - RNA, 22 nt, Homo sapiens
auaggcaagaugagguuuuuau

SEQ ID NO: 32529 - RNA, 22 nt, Homo sapiens
agagagcuuuaacuacccauuu

SEQ ID NO: 32530 - RNA, 22 nt, Homo sapiens
agagagcuuuugguugcccuaa

SEQ ID NO: 32531 - RNA, 22 nt, Homo sapiens
agagaucacugaaucacggggg

SEQ ID NO: 32532 - RNA, 22 nt, Homo sapiens
agcaacauggaguuugugcgca

SEQ ID NO: 32533 - RNA, 22 nt, Homo sapiens
agcaggacaauaugggaucagg

SEQ ID NO: 32534 - RNA, 22 nt, Homo sapiens
acccagaauucagucuuaggcc

SEQ ID NO: 32535 - RNA, 22 nt, Homo sapiens
acccagaagucauucaggaaca

SEQ ID NO: 32536 - RNA, 22 nt, Homo sapiens
acugagucauugaggcccucuc

SEQ ID NO: 32537 - RNA, 22 nt, Homo sapiens
acugagucauugggugcccaga

SEQ ID NO: 32538 - RNA, 22 nt, Homo sapiens
acugcacuccagcuuuggguga

SEQ ID NO: 32539 - RNA, 22 nt, Homo sapiens
acugcacuccagcuugggugac

SEQ ID NO: 32540 - RNA, 22 nt, Homo sapiens
acugcacuccagccuuugcgau

SEQ ID NO: 32541 - RNA, 18 nt, Homo sapiens
acugcacuccauccuagg

SEQ ID NO: 32542 - RNA, 20 nt, Homo sapiens
acugcacuccaggcugccca

SEQ ID NO: 32543 - RNA, 19 nt, Homo sapiens
acugcacuccuccuugggu

SEQ ID NO: 32544 - RNA, 22 nt, Homo sapiens
acugcacucuagccuuggcaac

SEQ ID NO: 32545 - RNA, 22 nt, Homo sapiens
acugcacucuagcauggguaau

SEQ ID NO: 32546 - RNA, 22 nt, Homo sapiens
acugcacucuagccccugcgac

SEQ ID NO: 32547 - RNA, 22 nt, Homo sapiens
acugcacuccagcccgggugac

SEQ ID NO: 32548 - RNA, 22 nt, Homo sapiens
acugcacuccaccuugggcaac

SEQ ID NO: 32549 - RNA, 22 nt, Homo sapiens
acugcacuccacccuuggcagc

SEQ ID NO: 32550 - RNA, 22 nt, Homo sapiens
acugcacuccagccuuggcggc

SEQ ID NO: 32551 - RNA, 22 nt, Homo sapiens
acugcacuccagccuuggcaac

SEQ ID NO: 32552 - RNA, 22 nt, Homo sapiens
acugcacuccagccuuggccac

SEQ ID NO: 32553 - RNA, 22 nt, Homo sapiens
acugcacugucaaccuccuggg

SEQ ID NO: 32554 - RNA, 22 nt, Homo sapiens
acugcacuguccuagaguccuc

SEQ ID NO: 32555 - RNA, 22 nt, Homo sapiens
acugcacuucagccuguugaca

SEQ ID NO: 32556 - RNA, 22 nt, Homo sapiens
agaaacacagguggaauugcuu

SEQ ID NO: 32557 - RNA, 22 nt, Homo sapiens
aauaucacaguuggguguacac

SEQ ID NO: 32558 - RNA, 22 nt, Homo sapiens
aauccauuugccgucuauccau

SEQ ID NO: 32559 - RNA, 22 nt, Homo sapiens
acacuggaggagagcuguugcu

SEQ ID NO: 32560 - RNA, 22 nt, Homo sapiens
acacuggguaacauaucuguua

SEQ ID NO: 32561 - RNA, 22 nt, Homo sapiens
aaguggccuagagcgaccauuu

SEQ ID NO: 32562 - RNA, 22 nt, Homo sapiens
uuugugucccuacccgaaucuc

SEQ ID NO: 32563 - RNA, 22 nt, Homo sapiens
uuuguguccccacccaaacauc

SEQ ID NO: 32564 - RNA, 22 nt, Homo sapiens
uuuguguccccacccacaucuc

SEQ ID NO: 32565 - RNA, 19 nt, Homo sapiens
uuuuccccuuucuuaagac

SEQ ID NO: 32566 - RNA, 22 nt, Homo sapiens
aaaacgcauccucacaggucug

SEQ ID NO: 32567 - RNA, 22 nt, Homo sapiens
aaagucuguuacagcuauuucu

SEQ ID NO: 32568 - RNA, 22 nt, Homo sapiens
aaagugcuguagacugggcgca

SEQ ID NO: 32569 - RNA, 22 nt, Homo sapiens
aaagugcuuacuaaguugccaa

SEQ ID NO: 32570 - RNA, 22 nt, Homo sapiens
aaagugcacuuggaagagggcc

SEQ ID NO: 32571 - RNA, 22 nt, Homo sapiens
aaagugcuaggauuaccugggg

SEQ ID NO: 32572 - RNA, 22 nt, Homo sapiens
aaagugcugagaguucuaacuu

SEQ ID NO: 32573 - RNA, 22 nt, Homo sapiens
aaagugcugagucuaggcgggg

SEQ ID NO: 32574 - RNA, 23 nt, Homo sapiens
aaggacacugaacacuucccagc

SEQ ID NO: 32575 - RNA, 22 nt, Homo sapiens
aacagacugucacauaaaauug

SEQ ID NO: 32576 - RNA, 20 nt, Homo sapiens
aaccccuauagagaaaccau

SEQ ID NO: 32577 - RNA, 22 nt, Homo sapiens
aacaggcuccuaggggugcacc

SEQ ID NO: 32578 - RNA, 22 nt, Homo sapiens
auggcuuucaggacguggcgag

SEQ ID NO: 32579 - RNA, 22 nt, Homo sapiens
auggcuuuaagagugucugaau

SEQ ID NO: 32580 - RNA, 22 nt, Homo sapiens
auggcuuuuauuguguugaggu

SEQ ID NO: 32581 - RNA, 22 nt, Homo sapiens
auggcuuuuccugucuugcaug

SEQ ID NO: 32582 - RNA, 22 nt, Homo sapiens
auggcuuuugaccugguaggau

SEQ ID NO: 32583 - RNA, 22 nt, Homo sapiens
auggcuuuuuaaaucauguugu

SEQ ID NO: 32584 - RNA, 22 nt, Homo sapiens
auggcuuuugcccuaaauggau

SEQ ID NO: 32585 - RNA, 22 nt, Homo sapiens
augggcacugauguauucugug

SEQ ID NO: 32586 - RNA, 22 nt, Homo sapiens
augugcaugcuguucugccaga

SEQ ID NO: 32587 - RNA, 19 nt, Homo sapiens
aucuggaguuccuggggcu

SEQ ID NO: 32588 - RNA, 22 nt, Homo sapiens
aucuggguccguucugcuucuc

SEQ ID NO: 32589 - RNA, 22 nt, Homo sapiens
augaggaagucaggcccagggg

SEQ ID NO: 32590 - RNA, 22 nt, Homo sapiens
augagucacuuauuauuggggu

SEQ ID NO: 32591 - RNA, 18 nt, Homo sapiens
augagucauuguggaaau

SEQ ID NO: 32592 - RNA, 22 nt, Homo sapiens
augcacuguuuucuugaugaga

SEQ ID NO: 32593 - RNA, 22 nt, Homo sapiens
augcacuguuguuauuggauaa

SEQ ID NO: 32594 - RNA, 22 nt, Homo sapiens
augcaagcacacaagaggaaau

SEQ ID NO: 32595 - RNA, 22 nt, Homo sapiens
augcccauuuguuuucugaaag

SEQ ID NO: 32596 - RNA, 22 nt, Homo sapiens
auagugcuuuuuagaaccugga

SEQ ID NO: 32597 - RNA, 22 nt, Homo sapiens
aucaggcacacauuggaguuug

SEQ ID NO: 32598 - RNA, 22 nt, Homo sapiens
auaucacaggaaaggaagauac

SEQ ID NO: 32599 - RNA, 22 nt, Homo sapiens
aucacagagucacgggcaacuu

SEQ ID NO: 32600 - RNA, 22 nt, Homo sapiens
accgaguguucucccgcagcgg

SEQ ID NO: 32601 - RNA, 22 nt, Homo sapiens
acugcacuuauccuccaauguu

SEQ ID NO: 32602 - RNA, 22 nt, Homo sapiens
acugcacuucaaccucauugac

SEQ ID NO: 32603 - RNA, 22 nt, Homo sapiens
acugcacuucagccuugggaaa

SEQ ID NO: 32604 - RNA, 22 nt, Homo sapiens
acugcacuucagccuugugaca

SEQ ID NO: 32605 - RNA, 22 nt, Homo sapiens
acugcacuucagccuuggcuac

SEQ ID NO: 32606 - RNA, 20 nt, Homo sapiens
acugcauuuaguccucagga

SEQ ID NO: 32607 - RNA, 22 nt, Homo sapiens
acugcacuccuccuugggugac

SEQ ID NO: 32608 - RNA, 22 nt, Homo sapiens
acugcacuccggccuggcaaca

SEQ ID NO: 32609 - RNA, 22 nt, Homo sapiens
acugcacuccggccucgugaca

SEQ ID NO: 32610 - RNA, 22 nt, Homo sapiens
acugcacugcagccuggccaac

SEQ ID NO: 32611 - RNA, 22 nt, Homo sapiens
acugcacucuagcuugggugac

SEQ ID NO: 32612 - RNA, 22 nt, Homo sapiens
acugcacuccagcuuuggugac

SEQ ID NO: 32613 - RNA, 20 nt, Homo sapiens
acugcacuccagucucuggg

SEQ ID NO: 32614 - RNA, 22 nt, Homo sapiens
acugcacuccaguuccgggcaa

SEQ ID NO: 32615 - RNA, 22 nt, Homo sapiens
acugcacucccgcccgggugac

SEQ ID NO: 32616 - RNA, 22 nt, Homo sapiens
acugcacuccaucuuagguggc

SEQ ID NO: 32617 - RNA, 22 nt, Homo sapiens
acugcacuccagccuugauggc

SEQ ID NO: 32618 - RNA, 22 nt, Homo sapiens
acugcacuccagccucaugaca

SEQ ID NO: 32619 - RNA, 22 nt, Homo sapiens
acugcacuccagccuccugaca

SEQ ID NO: 32620 - RNA, 22 nt, Homo sapiens
acugcacuccagccucccgucu

SEQ ID NO: 32621 - RNA, 22 nt, Homo sapiens
acugcacuccagccuaggcgac

SEQ ID NO: 32622 - RNA, 22 nt, Homo sapiens
acugcacuccagcuccagggug

SEQ ID NO: 32623 - RNA, 22 nt, Homo sapiens
acugcacuccagccuugugaca

SEQ ID NO: 32624 - RNA, 22 nt, Homo sapiens
acugcacuccagccuuggagac

SEQ ID NO: 32625 - RNA, 22 nt, Homo sapiens
acugcacuccagccuugcgaca

SEQ ID NO: 32626 - RNA, 21 nt, Homo sapiens
acugcacuccaaccucaacag

SEQ ID NO: 32627 - RNA, 19 nt, Homo sapiens
acugcacuccaaccuccug

SEQ ID NO: 32628 - RNA, 20 nt, Homo sapiens
acugcacuccaaccuuugug

SEQ ID NO: 32629 - RNA, 22 nt, Homo sapiens
acugcacuccaaccuguugggc

SEQ ID NO: 32630 - RNA, 22 nt, Homo sapiens
acugcacuccaaccuuggugac

SEQ ID NO: 32631 - RNA, 22 nt, Homo sapiens
acugcacuccagcccaggugac

SEQ ID NO: 32632 - RNA, 22 nt, Homo sapiens
acugcacuccagacucugucuc

SEQ ID NO: 32633 - RNA, 22 nt, Homo sapiens
aauaaagucugaagugugcuua

SEQ ID NO: 32634 - RNA, 22 nt, Homo sapiens
acaacaguuuuaucaccccaga

SEQ ID NO: 32635 - RNA, 22 nt, Homo sapiens
acacacgugcauguaugcguau

SEQ ID NO: 32636 - RNA, 22 nt, Homo sapiens
aauuggugaccaagggaaggac

SEQ ID NO: 32637 - RNA, 22 nt, Homo sapiens
acagaaccauucacuccccugg

SEQ ID NO: 32638 - RNA, 22 nt, Homo sapiens
agcaggucuuaacuugugaggu

SEQ ID NO: 32639 - RNA, 22 nt, Homo sapiens
agccaguauuuccacagagugg

SEQ ID NO: 32640 - RNA, 22 nt, Homo sapiens
acuguacuccauccugggugac

SEQ ID NO: 32641 - RNA, 22 nt, Homo sapiens
acugggucaaaguagaaaacua

SEQ ID NO: 32642 - RNA, 20 nt, Homo sapiens
acugcacuucagccugcugg

SEQ ID NO: 32643 - RNA, 22 nt, Homo sapiens
agacacuguugaaaaggcccca

SEQ ID NO: 32644 - RNA, 22 nt, Homo sapiens
acuguacuccagccugggugac

SEQ ID NO: 32645 - RNA, 22 nt, Homo sapiens
aggugguguuggguuccagccc

SEQ ID NO: 32646 - RNA, 22 nt, Homo sapiens
aaaugcugucaaauuguguucu

SEQ ID NO: 32647 - RNA, 22 nt, Homo sapiens
aggaagacugaaauugcuguuc

SEQ ID NO: 32648 - RNA, 22 nt, Homo sapiens
aggaacuguaacuaugucucug

SEQ ID NO: 32649 - RNA, 22 nt, Homo sapiens
agcuuguuuuccugcaacuaga

SEQ ID NO: 32650 - RNA, 22 nt, Homo sapiens
agcugcacugguauaggagaaa

SEQ ID NO: 32651 - RNA, 22 nt, Homo sapiens
agcugguccugugacuugcuuc

SEQ ID NO: 32652 - RNA, 22 nt, Homo sapiens
agcuggucuacguguguaugag

SEQ ID NO: 32653 - RNA, 22 nt, Homo sapiens
agcuggucucaggugcccugcu

SEQ ID NO: 32654 - RNA, 22 nt, Homo sapiens
agcuggucugauacuuaccucc

SEQ ID NO: 32655 - RNA, 22 nt, Homo sapiens
uauacagcaaguuacugugcug

SEQ ID NO: 32656 - RNA, 22 nt, Homo sapiens
uagcaguaccccaguauccugg

SEQ ID NO: 32657 - RNA, 22 nt, Homo sapiens
uacugcacuccaggcucaccug

SEQ ID NO: 32658 - RNA, 22 nt, Homo sapiens
uacugcacuccagccuugccaa

SEQ ID NO: 32659 - RNA, 18 nt, Homo sapiens
uacugcacucuccagccu

SEQ ID NO: 32660 - RNA, 20 nt, Homo sapiens
uacugcacuccauccugggu

SEQ ID NO: 32661 - RNA, 19 nt, Homo sapiens
uacugcaccucaaccuggg

SEQ ID NO: 32662 - RNA, 22 nt, Homo sapiens
uacugcacauaugaagguuccc

SEQ ID NO: 32663 - RNA, 22 nt, Homo sapiens
uacugcacuccagcuuaggaga

SEQ ID NO: 32664 - RNA, 22 nt, Homo sapiens
uacaacacugguucgacaugug

SEQ ID NO: 32665 - RNA, 16 nt, Homo sapiens
uacaacagugaguaug

SEQ ID NO: 32666 - RNA, 22 nt, Homo sapiens
uacaagcacaggcagcaggcug

SEQ ID NO: 32667 - RNA, 22 nt, Homo sapiens
uacaaaguaacaguuccuguau

SEQ ID NO: 32668 - RNA, 22 nt, Homo sapiens
uaauucugacaacaguggcguu

SEQ ID NO: 32669 - RNA, 22 nt, Homo sapiens
uaagucuuuuuggaguuuauaa

SEQ ID NO: 32670 - RNA, 22 nt, Homo sapiens
guuguauaggcauggggagaau

SEQ ID NO: 32671 - RNA, 22 nt, Homo sapiens
gugagguauacugggaucacua

SEQ ID NO: 32672 - RNA, 22 nt, Homo sapiens
guggcuuuaaguacgauugagg

SEQ ID NO: 32673 - RNA, 22 nt, Homo sapiens
gugggauggaaaugggcuucag

SEQ ID NO: 32674 - RNA, 22 nt, Homo sapiens
guguaguuugagguaugggggc

SEQ ID NO: 32675 - RNA, 22 nt, Homo sapiens
guguaugguaggaugacggagu

SEQ ID NO: 32676 - RNA, 22 nt, Homo sapiens
guguaugguuguuguagagaga

SEQ ID NO: 32677 - RNA, 22 nt, Homo sapiens
gugcuaggugcuaggaagauag

SEQ ID NO: 32678 - RNA, 22 nt, Homo sapiens
gugcaugucugugacgacccug

SEQ ID NO: 32679 - RNA, 22 nt, Homo sapiens
gugcauguccacuaguccauau

SEQ ID NO: 32680 - RNA, 22 nt, Homo sapiens
guggcagaaaagagaagcaaug

SEQ ID NO: 32681 - RNA, 22 nt, Homo sapiens
guggcagugugaggauccugcu

SEQ ID NO: 32682 - RNA, 22 nt, Homo sapiens
guggcaaacucagcaugcccca

SEQ ID NO: 32683 - RNA, 22 nt, Homo sapiens
guguauguuucucccugucccu

SEQ ID NO: 32684 - RNA, 22 nt, Homo sapiens
ggcuuuggucacacaggggcaa

SEQ ID NO: 32685 - RNA, 22 nt, Homo sapiens
ggcugguuuucaguuacugagu

SEQ ID NO: 32686 - RNA, 22 nt, Homo sapiens
gggaagugugcagaguucucuu

SEQ ID NO: 32687 - RNA, 19 nt, Homo sapiens
gggcaaaucuggaaauuua

SEQ ID NO: 32688 - RNA, 20 nt, Homo sapiens
gggaaucguaauagaauauu

SEQ ID NO: 32689 - RNA, 22 nt, Homo sapiens
gggagcaaaaaugaugcccaag

SEQ ID NO: 32690 - RNA, 20 nt, Homo sapiens
gggaaugcaaauucucaucc

SEQ ID NO: 32691 - RNA, 22 nt, Homo sapiens
gggggagugugguacccagcau

SEQ ID NO: 32692 - RNA, 22 nt, Homo sapiens
gggguauguaagugagugagug

SEQ ID NO: 32693 - RNA, 22 nt, Homo sapiens
gggcgagaaucggcugcucagc

SEQ ID NO: 32694 - RNA, 22 nt, Homo sapiens
ggguucccuucuggcucagggu

SEQ ID NO: 32695 - RNA, 17 nt, Homo sapiens
gguacguuuuguucugu

SEQ ID NO: 32696 - RNA, 22 nt, Homo sapiens
ggaaaucucugaggcucccuuc

SEQ ID NO: 32697 - RNA, 22 nt, Homo sapiens
ggaaauguaaacaauggggcua

SEQ ID NO: 32698 - RNA, 22 nt, Homo sapiens
ggccggguggccauggcugccc

SEQ ID NO: 32699 - RNA, 22 nt, Homo sapiens
ggccagaugcgguggcucacac

SEQ ID NO: 32700 - RNA, 22 nt, Homo sapiens
guagaagcacagggccuguauu

SEQ ID NO: 32701 - RNA, 22 nt, Homo sapiens
guaccugauacaggcgcacggu

SEQ ID NO: 32702 - RNA, 22 nt, Homo sapiens
ggugucuuguuuaauacucauu

SEQ ID NO: 32703 - RNA, 22 nt, Homo sapiens
ggugcuugaggaacggaggcug

SEQ ID NO: 32704 - RNA, 22 nt, Homo sapiens
gguggcaaaucugaguggcgcu

SEQ ID NO: 32705 - RNA, 23 nt, Homo sapiens
ggugaggaguacagagucuucau

SEQ ID NO: 32706 - RNA, 22 nt, Homo sapiens
ggugaggaaaguugaguuucua

SEQ ID NO: 32707 - RNA, 19 nt, Homo sapiens
cuugccccauucauccucu

SEQ ID NO: 32708 - RNA, 22 nt, Homo sapiens
cuugccuuugucuucaaaggcu

SEQ ID NO: 32709 - RNA, 22 nt, Homo sapiens
cuucaugagacuuuuggaaggc

SEQ ID NO: 32710 - RNA, 22 nt, Homo sapiens
cugcaguaaccacuguaggugu

SEQ ID NO: 32711 - RNA, 18 nt, Homo sapiens
cugagucauuccuggguc

SEQ ID NO: 32712 - RNA, 22 nt, Homo sapiens
cuucacggugccuacuuguguc

SEQ ID NO: 32713 - RNA, 22 nt, Homo sapiens
cuuugguguauuuucagagacc

SEQ ID NO: 32714 - RNA, 22 nt, Homo sapiens
gaacugggguuggguugcgaua

SEQ ID NO: 32715 - RNA, 23 nt, Homo sapiens
cuuuggucucugguugacuucag

SEQ ID NO: 32716 - RNA, 22 nt, Homo sapiens
cuuuaugagguuggauggaucu

SEQ ID NO: 32717 - RNA, 20 nt, Homo sapiens
gacaaaccuagaugguacag

SEQ ID NO: 32718 - RNA, 22 nt, Homo sapiens
gagagaguacuugauauaauuu

SEQ ID NO: 32719 - RNA, 22 nt, Homo sapiens
gagaacugagugugcuggcgga

SEQ ID NO: 32720 - RNA, 22 nt, Homo sapiens
gagaacugacauuaucguguau

SEQ ID NO: 32721 - RNA, 22 nt, Homo sapiens
gagaucaaugggauggaauuga

SEQ ID NO: 32722 - RNA, 22 nt, Homo sapiens
gagaugaaaucuugcucuguca

SEQ ID NO: 32723 - RNA, 22 nt, Homo sapiens
gagaggucguauaugauuucug

SEQ ID NO: 32724 - RNA, 22 nt, Homo sapiens
gaucauggaguuggguucaagg

SEQ ID NO: 32725 - RNA, 22 nt, Homo sapiens
gaugaacugucuuacuacucac

SEQ ID NO: 32726 - RNA, 22 nt, Homo sapiens
gauauguugaguagaguuuuug

SEQ ID NO: 32727 - RNA, 22 nt, Homo sapiens
gcugguguucaggcccucaguc

SEQ ID NO: 32728 - RNA, 22 nt, Homo sapiens
gccgagagauuuggaaugggga

SEQ ID NO: 32729 - RNA, 22 nt, Homo sapiens
gccccugagacuugccucgggc

SEQ ID NO: 32730 - RNA, 22 nt, Homo sapiens
gauuuuccaguggcccugauca

SEQ ID NO: 32731 - RNA, 17 nt, Homo sapiens
gcauaugucgaaccagc

SEQ ID NO: 32732 - RNA, 22 nt, Homo sapiens
ccggcuguguggagaggccccu

SEQ ID NO: 32733 - RNA, 22 nt, Homo sapiens
ccggcugugugacugugggcag

SEQ ID NO: 32734 - RNA, 22 nt, Homo sapiens
cccucgagaaaccaucugcuga

SEQ ID NO: 32735 - RNA, 20 nt, Homo sapiens
ccccaguuuuucuauuagcu

SEQ ID NO: 32736 - RNA, 22 nt, Homo sapiens
ccccagugguugcaacagcaga

SEQ ID NO: 32737 - RNA, 22 nt, Homo sapiens
cccaguguuuauuuugagccaa

SEQ ID NO: 32738 - RNA, 23 nt, Homo sapiens
cccaguuaauccuuaaucuccac

SEQ ID NO: 32739 - RNA, 22 nt, Homo sapiens
cauagguugggcguuugauuuu

SEQ ID NO: 32740 - RNA, 22 nt, Homo sapiens
ccaccgggucccagcucugcuc

SEQ ID NO: 32741 - RNA, 22 nt, Homo sapiens
ccagcaccauuuauuaaauagg

SEQ ID NO: 32742 - RNA, 21 nt, Homo sapiens
cucaaaguacugauauuacag

SEQ ID NO: 32743 - RNA, 22 nt, Homo sapiens
cuagugcaguuccccugucuua

SEQ ID NO: 32744 - RNA, 22 nt, Homo sapiens
ccugagacugauugacucacaa

SEQ ID NO: 32745 - RNA, 22 nt, Homo sapiens
cucuuugaggugagcugcccau

SEQ ID NO: 32746 - RNA, 20 nt, Homo sapiens
auuugcauuauggagcaccc

SEQ ID NO: 32747 - RNA, 22 nt, Homo sapiens
auuugguguuguuuggagccua

SEQ ID NO: 32748 - RNA, 22 nt, Homo sapiens
auuggggaaugguggcuuuagu

SEQ ID NO: 32749 - RNA, 22 nt, Homo sapiens
cagccggguggcuccuagggua

SEQ ID NO: 32750 - RNA, 22 nt, Homo sapiens
cagcaucauucaucugggguaa

SEQ ID NO: 32751 - RNA, 22 nt, Homo sapiens
caacauccaccuccuggguuca

SEQ ID NO: 32752 - RNA, 22 nt, Homo sapiens
cacugcacuccagccuaagagg

SEQ ID NO: 32753 - RNA, 22 nt, Homo sapiens
cacugcacuccagcuugugggc

SEQ ID NO: 32754 - RNA, 20 nt, Homo sapiens
ugagcucaauuguugcaagu

SEQ ID NO: 32755 - RNA, 22 nt, Homo sapiens
ugagcacauuuacaucaguucc

SEQ ID NO: 32756 - RNA, 19 nt, Homo sapiens
ugaccagggacagaaacca

SEQ ID NO: 32757 - RNA, 22 nt, Homo sapiens
ugauacguaggaauuaugggag

SEQ ID NO: 32758 - RNA, 22 nt, Homo sapiens
ugcaccacugcacuccaggcug

SEQ ID NO: 32759 - RNA, 22 nt, Homo sapiens
ugauuuguccauguggcacgug

SEQ ID NO: 32760 - RNA, 22 nt, Homo sapiens
ugauuuccaugagaacaugccu

SEQ ID NO: 32761 - RNA, 22 nt, Homo sapiens
ugcaccacacuccauccugggc

SEQ ID NO: 32762 - RNA, 22 nt, Homo sapiens
ugcaccacuacacuccaggcug

SEQ ID NO: 32763 - RNA, 22 nt, Homo sapiens
ugauucccucaagugccuuaug

SEQ ID NO: 32764 - RNA, 22 nt, Homo sapiens
ugauauguggcuauugagauug

SEQ ID NO: 32765 - RNA, 22 nt, Homo sapiens
ugaugaaguauaggaagggcuu

SEQ ID NO: 32766 - RNA, 23 nt, Homo sapiens
uggaacugaauuucuuagcauuu

SEQ ID NO: 32767 - RNA, 22 nt, Homo sapiens
uggaaaguccaagccaaccggg

SEQ ID NO: 32768 - RNA, 22 nt, Homo sapiens
ugcauaugucuuuauagcagca

SEQ ID NO: 32769 - RNA, 22 nt, Homo sapiens
ugcauauguugagaugcauauu

SEQ ID NO: 32770 - RNA, 22 nt, Homo sapiens
uggaccccugcucgggagcccu

SEQ ID NO: 32771 - RNA, 21 nt, Homo sapiens
uggaccccuuccagucaucau

SEQ ID NO: 32772 - RNA, 22 nt, Homo sapiens
uggaccccuucuccuauuaaaa

SEQ ID NO: 32773 - RNA, 21 nt, Homo sapiens
uggaccccuuccuuacaucau

SEQ ID NO: 32774 - RNA, 22 nt, Homo sapiens
uggaaggcuucauauguaaaga

SEQ ID NO: 32775 - RNA, 21 nt, Homo sapiens
uggaccccuacuucucaccau

SEQ ID NO: 32776 - RNA, 19 nt, Homo sapiens
uggaacugauucaguucug

SEQ ID NO: 32777 - RNA, 19 nt, Homo sapiens
uggcacauguauacauaug

SEQ ID NO: 32778 - RNA, 22 nt, Homo sapiens
uggcagaugagccgcgcuccaa

SEQ ID NO: 32779 - RNA, 22 nt, Homo sapiens
uggcuccguuguacaggcugga

SEQ ID NO: 32780 - RNA, 22 nt, Homo sapiens
ugguccccaauacuucuauaga

SEQ ID NO: 32781 - RNA, 22 nt, Homo sapiens
ugguaucuaagaugcacguugu

SEQ ID NO: 32782 - RNA, 22 nt, Homo sapiens
ugggaaacauccagcacauacu

SEQ ID NO: 32783 - RNA, 22 nt, Homo sapiens
uggguaguuuuucagcucuugc

SEQ ID NO: 32784 - RNA, 22 nt, Homo sapiens
uggguagugucagcugauccau

SEQ ID NO: 32785 - RNA, 22 nt, Homo sapiens
uggcuuuuguuauuuggaagcu

SEQ ID NO: 32786 - RNA, 22 nt, Homo sapiens
uggcuuuuauuauguugaggua

SEQ ID NO: 32787 - RNA, 22 nt, Homo sapiens
ucaaacacuccauaucgcgauu

SEQ ID NO: 32788 - RNA, 22 nt, Homo sapiens
ucagcguguggacggccaucuu

SEQ ID NO: 32789 - RNA, 22 nt, Homo sapiens
ucagcgcauggucgugcggcau

SEQ ID NO: 32790 - RNA, 19 nt, Homo sapiens
ucagugcuauguaauguag

SEQ ID NO: 32791 - RNA, 22 nt, Homo sapiens
uccccgaggcuggagugcagug

SEQ ID NO: 32792 - RNA, 23 nt, Homo sapiens
uccccgggagcaccagcuuguug

SEQ ID NO: 32793 - RNA, 19 nt, Homo sapiens
uccccgggucuagugcagc

SEQ ID NO: 32794 - RNA, 23 nt, Homo sapiens
ucauguauucccuguaaugggua

SEQ ID NO: 32795 - RNA, 22 nt, Homo sapiens
ucaugucuuguuguauuuauuu

SEQ ID NO: 32796 - RNA, 19 nt, Homo sapiens
uccaccgcgugcaccucua

SEQ ID NO: 32797 - RNA, 19 nt, Homo sapiens
ucuuuagucacauuuuuau

SEQ ID NO: 32798 - RNA, 20 nt, Homo sapiens
ucuuucgguuaccaggcagu

SEQ ID NO: 32799 - RNA, 22 nt, Homo sapiens
aacacggcccgcagagcaagcu

SEQ ID NO: 32800 - RNA, 20 nt, Homo sapiens
aacagcacugucugaagcuu

SEQ ID NO: 32801 - RNA, 22 nt, Homo sapiens
aacagcauaguacccgugauaa

SEQ ID NO: 32802 - RNA, 22 nt, Homo sapiens
ucugugcauuuucuuuuagacu

SEQ ID NO: 32803 - RNA, 22 nt, Homo sapiens
ucugucuuugccuaaguuuguc

SEQ ID NO: 32804 - RNA, 22 nt, Homo sapiens
ucugucuuugucaggaccagag

SEQ ID NO: 32805 - RNA, 22 nt, Homo sapiens
ucugguuccugcauucauucaa

SEQ ID NO: 32806 - RNA, 22 nt, Homo sapiens
ucucacacugaauguguguggg

SEQ ID NO: 32807 - RNA, 22 nt, Homo sapiens
ucucacaccccucucauauacc

SEQ ID NO: 32808 - RNA, 22 nt, Homo sapiens
ugaaauguugggugauggaauc

SEQ ID NO: 32809 - RNA, 20 nt, Homo sapiens
ugaacugguuacuuucuguc

SEQ ID NO: 32810 - RNA, 21 nt, Homo sapiens
ugaaccccugcucucaagaaa

SEQ ID NO: 32811 - RNA, 22 nt, Homo sapiens
ugaauagacacuaaagacugua

SEQ ID NO: 32812 - RNA, 22 nt, Homo sapiens
uugcaguagucugaaagcaaua

SEQ ID NO: 32813 - RNA, 22 nt, Homo sapiens
uugcagagccccacacugggcu

SEQ ID NO: 32814 - RNA, 22 nt, Homo sapiens
uugcaguacuucuggcuuuaca

SEQ ID NO: 32815 - RNA, 19 nt, Homo sapiens
uugcaguauccuauauguu

SEQ ID NO: 32816 - RNA, 22 nt, Homo sapiens
uugcacauggcaggugcucaau

SEQ ID NO: 32817 - RNA, 22 nt, Homo sapiens
uugcacauugauuuuguaucuu

SEQ ID NO: 32818 - RNA, 22 nt, Homo sapiens
uugcacauugauuuuguauccu

SEQ ID NO: 32819 - RNA, 22 nt, Homo sapiens
uugcaugggagcugggugaggc

SEQ ID NO: 32820 - RNA, 22 nt, Homo sapiens
uuggccccuuucauccacagcu

SEQ ID NO: 32821 - RNA, 22 nt, Homo sapiens
uuggccccuccaaaucucaugu

SEQ ID NO: 32822 - RNA, 22 nt, Homo sapiens
uuggccccucccaaauuucaug

SEQ ID NO: 32823 - RNA, 22 nt, Homo sapiens
uuggcagaaaaggucggggguu

SEQ ID NO: 32824 - RNA, 22 nt, Homo sapiens
uuggaaggcugaauggccucuc

SEQ ID NO: 32825 - RNA, 22 nt, Homo sapiens
uuggcacgugguggggcucgga

SEQ ID NO: 32826 - RNA, 22 nt, Homo sapiens
uugugguuuucagcuuauauau

SEQ ID NO: 32827 - RNA, 22 nt, Homo sapiens
uuucugggggugcugauggaaa

SEQ ID NO: 32828 - RNA, 22 nt, Homo sapiens
uugugguuauagagucucccug

SEQ ID NO: 32829 - RNA, 22 nt, Homo sapiens
uugugguugaugaagacugucu

SEQ ID NO: 32830 - RNA, 22 nt, Homo sapiens
uugugcuuuugagcugagauga

SEQ ID NO: 32831 - RNA, 22 nt, Homo sapiens
uuguauguugaaugaugguaua

SEQ ID NO: 32832 - RNA, 22 nt, Homo sapiens
uuugguuuuuguuaucacucau

SEQ ID NO: 32833 - RNA, 22 nt, Homo sapiens
uuugguugccucuaugagccug

SEQ ID NO: 32834 - RNA, 22 nt, Homo sapiens
uuugguguauaaaaaugcuagu

SEQ ID NO: 32835 - RNA, 22 nt, Homo sapiens
uuugggaaugguuugucuccca

SEQ ID NO: 32836 - RNA, 18 nt, Homo sapiens
uuugccacuucccagaaa

SEQ ID NO: 32837 - RNA, 22 nt, Homo sapiens
uucuggccuccauuuuucuccu

SEQ ID NO: 32838 - RNA, 22 nt, Homo sapiens
uucuggcucgauucucugaccg

SEQ ID NO: 32839 - RNA, 22 nt, Homo sapiens
uucugugcuuguggaugaagug

SEQ ID NO: 32840 - RNA, 22 nt, Homo sapiens
uuccucuagacugucgguuucu

SEQ ID NO: 32841 - RNA, 22 nt, Homo sapiens
uucccuuucugccuugaaucuu

SEQ ID NO: 32842 - RNA, 22 nt, Homo sapiens
uucccuuuguuaaauuggaaga

SEQ ID NO: 32843 - RNA, 22 nt, Homo sapiens
uucccuuuuuucuaguagguag

SEQ ID NO: 32844 - RNA, 22 nt, Homo sapiens
uucccuuucuuaaagaguuagg

SEQ ID NO: 32845 - RNA, 22 nt, Homo sapiens
uucccuuugugcauaggauuug

SEQ ID NO: 32846 - RNA, 22 nt, Homo sapiens
uucucugggacauaggucgggu

SEQ ID NO: 32847 - RNA, 22 nt, Homo sapiens
uucucacaguacagggagcucu

SEQ ID NO: 32848 - RNA, 22 nt, Homo sapiens
uucccagagaaaaggguuucuu

SEQ ID NO: 32849 - RNA, 22 nt, Homo sapiens
uucccuagaacacauggaggga

SEQ ID NO: 32850 - RNA, 22 nt, Homo sapiens
ugugauugauuaaugugugcua

SEQ ID NO: 32851 - RNA, 22 nt, Homo sapiens
ugugauuggccuggcguggguc

SEQ ID NO: 32852 - RNA, 22 nt, Homo sapiens
uguggccuuuguuucaguuggg

SEQ ID NO: 32853 - RNA, 22 nt, Homo sapiens
uggugcuugaugaggguggagc

SEQ ID NO: 32854 - RNA, 15 nt, Homo sapiens
uggugguguugagac

SEQ ID NO: 32855 - RNA, 20 nt, Homo sapiens
ugguccccaccaaaucucau

SEQ ID NO: 32856 - RNA, 20 nt, Homo sapiens
ugguccccugagucuggcuu

SEQ ID NO: 32857 - RNA, 19 nt, Homo sapiens
uggugccuuguucuuggau

SEQ ID NO: 32858 - RNA, 22 nt, Homo sapiens
uggugcuuaaauaaggcuuuca

SEQ ID NO: 32859 - RNA, 22 nt, Homo sapiens
uggugcccuguccuucuguggc

SEQ ID NO: 32860 - RNA, 22 nt, Homo sapiens
uuaacagucacuuagcucauuu

SEQ ID NO: 32861 - RNA, 22 nt, Homo sapiens
uuaagaagugauuuuccucauu

SEQ ID NO: 32862 - RNA, 22 nt, Homo sapiens
uuaagagugggaguuggccaca

SEQ ID NO: 32863 - RNA, 22 nt, Homo sapiens
uguuuuggagguccucacuaga

SEQ ID NO: 32864 - RNA, 22 nt, Homo sapiens
uuaaaaguauaggccuggcaua

SEQ ID NO: 32865 - RNA, 22 nt, Homo sapiens
uuaaaggcaugguuagacaugg

SEQ ID NO: 32866 - RNA, 22 nt, Homo sapiens
uuaaaggcauguacacuagagu

SEQ ID NO: 32867 - RNA, 22 nt, Homo sapiens
uguguuuuuauguaaaauggaa

SEQ ID NO: 32868 - RNA, 22 nt, Homo sapiens
ugugucuuguuuuuucccaggc

SEQ ID NO: 32869 - RNA, 22 nt, Homo sapiens
ugugucuuuuaucacacaaugu

SEQ ID NO: 32870 - RNA, 22 nt, Homo sapiens
uguguuugauaaguccauaguu

SEQ ID NO: 32871 - RNA, 22 nt, Homo sapiens
ugugucuuguuuauagcuuucu

SEQ ID NO: 32872 - RNA, 22 nt, Homo sapiens
uguucauggauccaguggcuuc

SEQ ID NO: 32873 - RNA, 22 nt, Homo sapiens
uguucuggagaggcaggccaca

SEQ ID NO: 32874 - RNA, 22 nt, Homo sapiens
uguuauuuuguguuagggcaca

SEQ ID NO: 32875 - RNA, 19 nt, Homo sapiens
uuccuagugguugggaagu

SEQ ID NO: 32876 - RNA, 22 nt, Homo sapiens
uucccuuucugaaaaucucauu

SEQ ID NO: 32877 - RNA, 22 nt, Homo sapiens
uucccguacugguguugccuau

SEQ ID NO: 32878 - RNA, 22 nt, Homo sapiens
uucuauugguaauauuuucugu

SEQ ID NO: 32879 - RNA, 22 nt, Homo sapiens
uuacacaguugguaggggcaga

SEQ ID NO: 32880 - RNA, 18 nt, Homo sapiens
uguugguguucacucacu

SEQ ID NO: 32881 - RNA, 22 nt, Homo sapiens
uguuuguuugugauacgguaca

SEQ ID NO: 32882 - RNA, 22 nt, Homo sapiens
uguuuguuugauaugggauaaa

SEQ ID NO: 32883 - RNA, 22 nt, Homo sapiens
uguucuggagaguuuagucugg

SEQ ID NO: 32884 - RNA, 22 nt, Homo sapiens
uguuuguuugagauggagucuc

SEQ ID NO: 32885 - RNA, 21 nt, Homo sapiens
uguuuuugcuguguaucucuc

SEQ ID NO: 32886 - RNA, 19 nt, Homo sapiens
uuacacaaccuaguggggc

SEQ ID NO: 32887 - RNA, 19 nt, Homo sapiens
uggucccccgcaaucucau

SEQ ID NO: 32888 - RNA, 22 nt, Homo sapiens
ugucaugaaauauguuuuucua

SEQ ID NO: 32889 - RNA, 22 nt, Homo sapiens
ugucaugucaacuauggaauuu

SEQ ID NO: 32890 - RNA, 22 nt, Homo sapiens
uguggaaauuguuguauuuaau

SEQ ID NO: 32891 - RNA, 22 nt, Homo sapiens
uugcaugguggaacuuggagcu

SEQ ID NO: 32892 - RNA, 19 nt, Homo sapiens
uuggcagaguugcccccua

SEQ ID NO: 32893 - RNA, 22 nt, Homo sapiens
uuggccagugucuuuuuuuccu

SEQ ID NO: 32894 - RNA, 22 nt, Homo sapiens
uuggccaauggugauucccggc

SEQ ID NO: 32895 - RNA, 22 nt, Homo sapiens
uuguguuuuuaguagggaaggg

SEQ ID NO: 32896 - RNA, 22 nt, Homo sapiens
uugugccccuucucagucgggc

SEQ ID NO: 32897 - RNA, 22 nt, Homo sapiens
uuguuugguuagaugggcaagu

SEQ ID NO: 32898 - RNA, 23 nt, Homo sapiens
uuguucccuuccacucagucucc

SEQ ID NO: 32899 - RNA, 22 nt, Homo sapiens
uuucccuuacuuaaacuuacuc

SEQ ID NO: 32900 - RNA, 22 nt, Homo sapiens
uuucccuuuagcuuagugauuu

SEQ ID NO: 32901 - RNA, 22 nt, Homo sapiens
uuucccuuugcuuugucagcca

SEQ ID NO: 32902 - RNA, 22 nt, Homo sapiens
uuuguccugccaugguuuauuu

SEQ ID NO: 32903 - RNA, 22 nt, Homo sapiens
uuuguguccccacccaaaucuc

SEQ ID NO: 32904 - RNA, 22 nt, Homo sapiens
uuugggccaugcuucccgguca

SEQ ID NO: 32905 - RNA, 22 nt, Homo sapiens
uuugguugcauucacauauuuc

SEQ ID NO: 32906 - RNA, 22 nt, Homo sapiens
uuugguugucacaacuggggga

SEQ ID NO: 32907 - RNA, 22 nt, Homo sapiens
uuugguguauauguaaacuaug

SEQ ID NO: 32908 - RNA, 22 nt, Homo sapiens
augagcucauugggugacuggg

SEQ ID NO: 32909 - RNA, 22 nt, Homo sapiens
augagauuguuuguacuccaca

SEQ ID NO: 32910 - RNA, 22 nt, Homo sapiens
augagauuauguaaagagacca

SEQ ID NO: 32911 - RNA, 22 nt, Homo sapiens
augccaguguccagaguggguu

SEQ ID NO: 32912 - RNA, 22 nt, Homo sapiens
auggcuuugggcugcucugccc

SEQ ID NO: 32913 - RNA, 22 nt, Homo sapiens
auggcuuuguguucagagcuga

SEQ ID NO: 32914 - RNA, 22 nt, Homo sapiens
auggcuuuggucucccagugau

SEQ ID NO: 32915 - RNA, 22 nt, Homo sapiens
auggcuuuuuucuugggcacuc

SEQ ID NO: 32916 - RNA, 22 nt, Homo sapiens
auggugugugaauuaaauguua

SEQ ID NO: 32917 - RNA, 22 nt, Homo sapiens
auagugcugcaauaaccauggg

SEQ ID NO: 32918 - RNA, 22 nt, Homo sapiens
aggugcugagcagagaauccug

SEQ ID NO: 32919 - RNA, 20 nt, Homo sapiens
agguucaaaucccaaucaug

SEQ ID NO: 32920 - RNA, 22 nt, Homo sapiens
aggugcucuuccuguaggucac

SEQ ID NO: 32921 - RNA, 22 nt, Homo sapiens
aguuuuugcugauagcaugcuu

SEQ ID NO: 32922 - RNA, 22 nt, Homo sapiens
aguaccauuugacaugggaccc

SEQ ID NO: 32923 - RNA, 22 nt, Homo sapiens
auagcacauggcauccucucuu

SEQ ID NO: 32924 - RNA, 22 nt, Homo sapiens
auaaacagcuuauccucuauuc

SEQ ID NO: 32925 - RNA, 22 nt, Homo sapiens
acccuggagagugcuguaguaa

SEQ ID NO: 32926 - RNA, 22 nt, Homo sapiens
acccuggaguaguaggaaucug

SEQ ID NO: 32927 - RNA, 22 nt, Homo sapiens
acccuggauucguggccuugaa

SEQ ID NO: 32928 - RNA, 22 nt, Homo sapiens
acccgggaggcaggagucauag

SEQ ID NO: 32929 - RNA, 21 nt, Homo sapiens
acaucagaguugugaagguag

SEQ ID NO: 32930 - RNA, 22 nt, Homo sapiens
acaugcauccaugugaagagac

SEQ ID NO: 32931 - RNA, 22 nt, Homo sapiens
acaucccuugcucggggccccu

SEQ ID NO: 32932 - RNA, 22 nt, Homo sapiens
acaucccaugccuggguacucc

SEQ ID NO: 32933 - RNA, 22 nt, Homo sapiens
acggcaguguggugcggucagg

SEQ ID NO: 32934 - RNA, 22 nt, Homo sapiens
acgcagcacauucacagcuaug

SEQ ID NO: 32935 - RNA, 22 nt, Homo sapiens
acugcacuccagccucgcaaca

SEQ ID NO: 32936 - RNA, 22 nt, Homo sapiens
acugcacuccagccugaugaaa

SEQ ID NO: 32937 - RNA, 22 nt, Homo sapiens
acugcacuccagccugccgaca

SEQ ID NO: 32938 - RNA, 22 nt, Homo sapiens
acugcacuccagccucgugaca

SEQ ID NO: 32939 - RNA, 22 nt, Homo sapiens
acugcacuccagccugcugggu

SEQ ID NO: 32940 - RNA, 22 nt, Homo sapiens
acugcacuccagccuggacgaa

SEQ ID NO: 32941 - RNA, 22 nt, Homo sapiens
acugcacuccagccugcugaca

SEQ ID NO: 32942 - RNA, 22 nt, Homo sapiens
acugcacuccagccuggacgac

SEQ ID NO: 32943 - RNA, 22 nt, Homo sapiens
acugcacuccagccuguugaca

SEQ ID NO: 32944 - RNA, 22 nt, Homo sapiens
acacuguuggugggaguguaaa

SEQ ID NO: 32945 - RNA, 22 nt, Homo sapiens
aaugcacuccagccugggcgac

SEQ ID NO: 32946 - RNA, 22 nt, Homo sapiens
aagcugguguugcugcucuguu

SEQ ID NO: 32947 - RNA, 22 nt, Homo sapiens
aaggcgguguggauccuacagc

SEQ ID NO: 32948 - RNA, 22 nt, Homo sapiens
agcggcuguuccccuggucuau

SEQ ID NO: 32949 - RNA, 22 nt, Homo sapiens
agccgguguccacgaagaagag

SEQ ID NO: 32950 - RNA, 22 nt, Homo sapiens
agagguuuaacuggcuuauggu

SEQ ID NO: 32951 - RNA, 22 nt, Homo sapiens
agagcaccauuuagcaagguga

SEQ ID NO: 32952 - RNA, 20 nt, Homo sapiens
agagaucaguaauucaucaa

SEQ ID NO: 32953 - RNA, 22 nt, Homo sapiens
acuguacuacagccugggugac

SEQ ID NO: 32954 - RNA, 22 nt, Homo sapiens
acuguguguuugucuagcacag

SEQ ID NO: 32955 - RNA, 22 nt, Homo sapiens
acugcacuccagccuugagagc

SEQ ID NO: 32956 - RNA, 22 nt, Homo sapiens
acugcacuccagccuucaggac

SEQ ID NO: 32957 - RNA, 22 nt, Homo sapiens
acugcacuccagccuucgugac

SEQ ID NO: 32958 - RNA, 20 nt, Homo sapiens
acugggcuaccgaaguaagg

SEQ ID NO: 32959 - RNA, 22 nt, Homo sapiens
acuggauguuagggauuuuauu

SEQ ID NO: 32960 - RNA, 21 nt, Homo sapiens
aggcuguuguuuugggaugga

SEQ ID NO: 32961 - RNA, 22 nt, Homo sapiens
aggaccccucaucagcaccagu

SEQ ID NO: 32962 - RNA, 22 nt, Homo sapiens
aggcacggugucucaugccugu

SEQ ID NO: 32963 - RNA, 21 nt, Homo sapiens
agcuuguguguaucacagugu

SEQ ID NO: 32964 - RNA, 22 nt, Homo sapiens
agcuuguguuuuucuaaguauc

SEQ ID NO: 32965 - RNA, 22 nt, Homo sapiens
aggaagacauauagaacuaaaa

SEQ ID NO: 32966 - RNA, 22 nt, Homo sapiens
aggaaaucuuagcugaggggau

SEQ ID NO: 32967 - RNA, 22 nt, Homo sapiens
agcugcacaaauggaugugagg

SEQ ID NO: 32968 - RNA, 21 nt, Homo sapiens
gauaugacauggguaaaacca

SEQ ID NO: 32969 - RNA, 22 nt, Homo sapiens
gagguaaguaagaauggcaagc

SEQ ID NO: 32970 - RNA, 22 nt, Homo sapiens
gaggguguuguguugcuuaaua

SEQ ID NO: 32971 - RNA, 22 nt, Homo sapiens
gagguagguacaauugccacca

SEQ ID NO: 32972 - RNA, 22 nt, Homo sapiens
gaggcaaguggccaccgagucu

SEQ ID NO: 32973 - RNA, 22 nt, Homo sapiens
gaggcagucugucccuuagcag

SEQ ID NO: 32974 - RNA, 22 nt, Homo sapiens
gagcuuguggucuucguguuau

SEQ ID NO: 32975 - RNA, 22 nt, Homo sapiens
gagccggugugauggggcuucu

SEQ ID NO: 32976 - RNA, 22 nt, Homo sapiens
gagccuguaggaggagaggugg

SEQ ID NO: 32977 - RNA, 22 nt, Homo sapiens
gacucgugagguccccaggagg

SEQ ID NO: 32978 - RNA, 22 nt, Homo sapiens
gauggcucugcaggugagggua

SEQ ID NO: 32979 - RNA, 22 nt, Homo sapiens
gauggaguaauguaaucuugag

SEQ ID NO: 32980 - RNA, 22 nt, Homo sapiens
gcagcacaugacuguauguaua

SEQ ID NO: 32981 - RNA, 22 nt, Homo sapiens
gcagucacagggagauggugac

SEQ ID NO: 32982 - RNA, 22 nt, Homo sapiens
gcagugacaugugccaguuuau

SEQ ID NO: 32983 - RNA, 22 nt, Homo sapiens
gcauaugucuuuauagcagcau

SEQ ID NO: 32984 - RNA, 22 nt, Homo sapiens
gcauggccuuuaaaugucacag

SEQ ID NO: 32985 - RNA, 22 nt, Homo sapiens
cugacuaguuuuaaugcagauu

SEQ ID NO: 32986 - RNA, 22 nt, Homo sapiens
cugacucagacacauguauaug

SEQ ID NO: 32987 - RNA, 18 nt, Homo sapiens
cuggaugucgaguguguu

SEQ ID NO: 32988 - RNA, 22 nt, Homo sapiens
cugacguguuuuccagaccuuu

SEQ ID NO: 32989 - RNA, 22 nt, Homo sapiens
cucccuuugcugaauguuuuuc

SEQ ID NO: 32990 - RNA, 22 nt, Homo sapiens
gaccuggugguccacccgccuu

SEQ ID NO: 32991 - RNA, 22 nt, Homo sapiens
gaauaaacuagagaggacugag

SEQ ID NO: 32992 - RNA, 22 nt, Homo sapiens
cuuuuguggaucuucuguugcu

SEQ ID NO: 32993 - RNA, 22 nt, Homo sapiens
cuuuugugauucuucaguugcu

SEQ ID NO: 32994 - RNA, 22 nt, Homo sapiens
auugcacuccagccucggugac

SEQ ID NO: 32995 - RNA, 22 nt, Homo sapiens
augugacugauguaaucagaca

SEQ ID NO: 32996 - RNA, 22 nt, Homo sapiens
auucacuguggguccuuuggau

SEQ ID NO: 32997 - RNA, 22 nt, Homo sapiens
auucaaagugcauguucccacu

SEQ ID NO: 32998 - RNA, 19 nt, Homo sapiens
caccgccugcccccugcug

SEQ ID NO: 32999 - RNA, 22 nt, Homo sapiens
caccgguuaaucuguuuuuucu

SEQ ID NO: 33000 - RNA, 22 nt, Homo sapiens
caccgagguuggagugcagugg

SEQ ID NO: 33001 - RNA, 21 nt, Homo sapiens
auuugguggcugugugacacu

SEQ ID NO: 33002 - RNA, 22 nt, Homo sapiens
caaggugcugagacaggagccc

SEQ ID NO: 33003 - RNA, 22 nt, Homo sapiens
cacugcacuccagcuuugguga

SEQ ID NO: 33004 - RNA, 22 nt, Homo sapiens
cacugcacuccagucccgucuc

SEQ ID NO: 33005 - RNA, 22 nt, Homo sapiens
cacugcacuccagucuggcgac

SEQ ID NO: 33006 - RNA, 21 nt, Homo sapiens
cacugcacuugccuucugggu

SEQ ID NO: 33007 - RNA, 22 nt, Homo sapiens
cacugcacucuucuucugggca

SEQ ID NO: 33008 - RNA, 22 nt, Homo sapiens
cuccauuuggaacagauguccu

SEQ ID NO: 33009 - RNA, 22 nt, Homo sapiens
cuccgggugcgucggcgcccug

SEQ ID NO: 33010 - RNA, 22 nt, Homo sapiens
cucgaagacuaagcaucucuga

SEQ ID NO: 33011 - RNA, 22 nt, Homo sapiens
ccugguguuuugauggucgggu

SEQ ID NO: 33012 - RNA, 22 nt, Homo sapiens
cuagcuccauauaaagcaggau

SEQ ID NO: 33013 - RNA, 22 nt, Homo sapiens
cccagcguucggcauggcugag

SEQ ID NO: 33014 - RNA, 22 nt, Homo sapiens
ccugagacuugagggggcuucu

SEQ ID NO: 33015 - RNA, 19 nt, Homo sapiens
ccaguguugccagagcuga

SEQ ID NO: 33016 - RNA, 22 nt, Homo sapiens
ccaguguuuggauuagggaugc

SEQ ID NO: 33017 - RNA, 22 nt, Homo sapiens
cccagagacagaaugauaaacu

SEQ ID NO: 33018 - RNA, 19 nt, Homo sapiens
ccauggcaaugaucugaug

SEQ ID NO: 33019 - RNA, 22 nt, Homo sapiens
cauugcccuccagccugggcaa

SEQ ID NO: 33020 - RNA, 22 nt, Homo sapiens
cagccgggugagguggcuuguu

SEQ ID NO: 33021 - RNA, 22 nt, Homo sapiens
cauggcucuuguuuacucccag

SEQ ID NO: 33022 - RNA, 22 nt, Homo sapiens
ucaacaggucaauugcauagaa

SEQ ID NO: 33023 - RNA, 22 nt, Homo sapiens
uaugaggaguauaacccgguga

SEQ ID NO: 33024 - RNA, 22 nt, Homo sapiens
uaugguuuuaagguuaaggacu

SEQ ID NO: 33025 - RNA, 18 nt, Homo sapiens
uagcagacaucauugggg

SEQ ID NO: 33026 - RNA, 22 nt, Homo sapiens
uagcaguaucccaccaucuggu

SEQ ID NO: 33027 - RNA, 22 nt, Homo sapiens
uagugcaguggcuccaucucag

SEQ ID NO: 33028 - RNA, 22 nt, Homo sapiens
uaucaccauguccguuuuaaaa

SEQ ID NO: 33029 - RNA, 22 nt, Homo sapiens
guugcaugucugggaggccagc

SEQ ID NO: 33030 - RNA, 23 nt, Homo sapiens
guucaucagggauauuggccuga

SEQ ID NO: 33031 - RNA, 22 nt, Homo sapiens
uaacaggcaaggucacaccuug

SEQ ID NO: 33032 - RNA, 22 nt, Homo sapiens
uacaccaauuuaaucaaaagca

SEQ ID NO: 33033 - RNA, 23 nt, Homo sapiens
uacagcugcagaaucaggcuaag

SEQ ID NO: 33034 - RNA, 22 nt, Homo sapiens
uacugcacuccacccuggguga

SEQ ID NO: 33035 - RNA, 22 nt, Homo sapiens
uacugcacuccagccucgguga

SEQ ID NO: 33036 - RNA, 22 nt, Homo sapiens
uacugcacuccaaccugagaga

SEQ ID NO: 33037 - RNA, 22 nt, Homo sapiens
uacugcacuccagccugccaac

SEQ ID NO: 33038 - RNA, 20 nt, Homo sapiens
uacugcacuccaaccuaggc

SEQ ID NO: 33039 - RNA, 22 nt, Homo sapiens
uacugcacuccagccugggaga

SEQ ID NO: 33040 - RNA, 22 nt, Homo sapiens
uacugcacuccagccuggguga

SEQ ID NO: 33041 - RNA, 22 nt, Homo sapiens
uacugcacucuagccuggguga

SEQ ID NO: 33042 - RNA, 22 nt, Homo sapiens
uacugcacuggaggccucagau

SEQ ID NO: 33043 - RNA, 19 nt, Homo sapiens
uacugcacuccagucuggg

SEQ ID NO: 33044 - RNA, 22 nt, Homo sapiens
uacugcacuugaccuccugggc

SEQ ID NO: 33045 - RNA, 22 nt, Homo sapiens
guccaagacuaggaguuggcag

SEQ ID NO: 33046 - RNA, 22 nt, Homo sapiens
gucagauaauuugcauccaucu

SEQ ID NO: 33047 - RNA, 22 nt, Homo sapiens
gucgugcagaccucacagcauu

SEQ ID NO: 33048 - RNA, 22 nt, Homo sapiens
gucccagagauauugugucuuu

SEQ ID NO: 33049 - RNA, 22 nt, Homo sapiens
gucccaguggaaccuccaagcu

SEQ ID NO: 33050 - RNA, 22 nt, Homo sapiens
guccuguuuuuaagguucauag

SEQ ID NO: 33051 - RNA, 22 nt, Homo sapiens
guccaugagaugaauccacaca

SEQ ID NO: 33052 - RNA, 21 nt, Homo sapiens
gugaggucauugggcuuucug

SEQ ID NO: 33053 - RNA, 22 nt, Homo sapiens
gugagucaaucugagggguuca

SEQ ID NO: 33054 - RNA, 22 nt, Homo sapiens
gugagucagucuguguagggcu

SEQ ID NO: 33055 - RNA, 22 nt, Homo sapiens
gugagcgaggaaacgacggcgc

SEQ ID NO: 33056 - RNA, 22 nt, Homo sapiens
gugaggaaggaaaccugcuagc

SEQ ID NO: 33057 - RNA, 22 nt, Homo sapiens
gugagcagagaucgcgugauug

SEQ ID NO: 33058 - RNA, 22 nt, Homo sapiens
gugagucaugucccaucugauu

SEQ ID NO: 33059 - RNA, 20 nt, Homo sapiens
gugagucauuaguaaccaaa

SEQ ID NO: 33060 - RNA, 22 nt, Homo sapiens
guggaguacugagggucacuua

SEQ ID NO: 33061 - RNA, 22 nt, Homo sapiens
guggcagagucagagggaaaug

SEQ ID NO: 33062 - RNA, 22 nt, Homo sapiens
gugugauuguuaauuuuaggug

SEQ ID NO: 33063 - RNA, 22 nt, Homo sapiens
gugucaugagggggacaggaag

SEQ ID NO: 33064 - RNA, 22 nt, Homo sapiens
guucaucaggcuuucucuagag

SEQ ID NO: 33065 - RNA, 22 nt, Homo sapiens
guguuauugagaaauagggugu

SEQ ID NO: 33066 - RNA, 22 nt, Homo sapiens
gugugcauaugucuuuauagua

SEQ ID NO: 33067 - RNA, 22 nt, Homo sapiens
gugugcaacuuucauuaauauu

SEQ ID NO: 33068 - RNA, 20 nt, Homo sapiens
gugugcauuucagauuuugg

SEQ ID NO: 33069 - RNA, 21 nt, Homo sapiens
gugugcuugagugaugggauu

SEQ ID NO: 33070 - RNA, 22 nt, Homo sapiens
ggaguguguaggagaaagguaa

SEQ ID NO: 33071 - RNA, 22 nt, Homo sapiens
gccccgggugaugcagccguca

SEQ ID NO: 33072 - RNA, 22 nt, Homo sapiens
gcccagcguucagggaggggcu

SEQ ID NO: 33073 - RNA, 22 nt, Homo sapiens
ggccagaugaucuaugaaggaa

SEQ ID NO: 33074 - RNA, 22 nt, Homo sapiens
ggcauguugauagguagaugua

SEQ ID NO: 33075 - RNA, 22 nt, Homo sapiens
ggggaguguggacaucacccug

SEQ ID NO: 33076 - RNA, 22 nt, Homo sapiens
ggcagguaaggagugggagccu

SEQ ID NO: 33077 - RNA, 23 nt, Homo sapiens
ggauggaaaguuuugagggccac

SEQ ID NO: 33078 - RNA, 22 nt, Homo sapiens
guaucccuugcuaucugaaucu

SEQ ID NO: 33079 - RNA, 22 nt, Homo sapiens
guauggguuuuguuucuucugg

SEQ ID NO: 33080 - RNA, 22 nt, Homo sapiens
guauugcuugagcccaggaguu

SEQ ID NO: 33081 - RNA, 22 nt, Homo sapiens
guauuuuguuagggugugguau

SEQ ID NO: 33082 - RNA, 22 nt, Homo sapiens
guaguagcacgagcucugucuc

SEQ ID NO: 33083 - RNA, 22 nt, Homo sapiens
guaagugguagagcugggcuau

SEQ ID NO: 33084 - RNA, 22 nt, Homo sapiens
gguauuuaaaguaccugucugc

SEQ ID NO: 33085 - RNA, 22 nt, Homo sapiens
ggggcaaaaugccacgagucuc

SEQ ID NO: 33086 - RNA, 23 nt, Homo sapiens
ugauguccacuuagggucuaggu

SEQ ID NO: 33087 - RNA, 22 nt, Homo sapiens
ugcaccacugcacuccagcuug

SEQ ID NO: 33088 - RNA, 22 nt, Homo sapiens
ugcaccacugcaccccagucug

SEQ ID NO: 33089 - RNA, 19 nt, Homo sapiens
ugcagcaauguaaaagaca

SEQ ID NO: 33090 - RNA, 22 nt, Homo sapiens
ugcaccacugcuagccugggua

SEQ ID NO: 33091 - RNA, 22 nt, Homo sapiens
ugcaccacuguacuccagucug

SEQ ID NO: 33092 - RNA, 22 nt, Homo sapiens
ugcaguacauucagcauccucu

SEQ ID NO: 33093 - RNA, 22 nt, Homo sapiens
ugcagugugauuuucuggcuga

SEQ ID NO: 33094 - RNA, 23 nt, Homo sapiens
ugcagcuacauguggccaugugc

SEQ ID NO: 33095 - RNA, 22 nt, Homo sapiens
ugcauagcauauauuguagagu

SEQ ID NO: 33096 - RNA, 22 nt, Homo sapiens
ugcauaugucuuuauaguagca

SEQ ID NO: 33097 - RNA, 22 nt, Homo sapiens
ugagggaugccugguuuguuuu

SEQ ID NO: 33098 - RNA, 22 nt, Homo sapiens
ugagacggagucuggcacuguc

SEQ ID NO: 33099 - RNA, 22 nt, Homo sapiens
ugagaacugcagggagcugcau

SEQ ID NO: 33100 - RNA, 22 nt, Homo sapiens
uggaaauaaaugugccaagauc

SEQ ID NO: 33101 - RNA, 22 nt, Homo sapiens
uggaaaguacugagguccaccu

SEQ ID NO: 33102 - RNA, 22 nt, Homo sapiens
uggaaaucuaaguuuggauuga

SEQ ID NO: 33103 - RNA, 20 nt, Homo sapiens
uggaaaguaagucaugauau

SEQ ID NO: 33104 - RNA, 22 nt, Homo sapiens
uggaacugauauugauggaaaa

SEQ ID NO: 33105 - RNA, 19 nt, Homo sapiens
uggaccccuuccuuacacc

SEQ ID NO: 33106 - RNA, 20 nt, Homo sapiens
uggaaggcaucugcauuauu

SEQ ID NO: 33107 - RNA, 21 nt, Homo sapiens
uggaccccuuccuugcaccau

SEQ ID NO: 33108 - RNA, 21 nt, Homo sapiens
uggaccccuuucuuacaccgu

SEQ ID NO: 33109 - RNA, 22 nt, Homo sapiens
uggagcccuaaacuucuaauau

SEQ ID NO: 33110 - RNA, 22 nt, Homo sapiens
uggagggcuagucauuucuuuu

SEQ ID NO: 33111 - RNA, 22 nt, Homo sapiens
ugguaugucuuucuuccuguag

SEQ ID NO: 33112 - RNA, 22 nt, Homo sapiens
uggucauggggcagcugacacu

SEQ ID NO: 33113 - RNA, 22 nt, Homo sapiens
ugggugugaccgcucaaggggg

SEQ ID NO: 33114 - RNA, 19 nt, Homo sapiens
uggguagugaugagacaua

SEQ ID NO: 33115 - RNA, 22 nt, Homo sapiens
uggguaguuucuuacaacucug

SEQ ID NO: 33116 - RNA, 22 nt, Homo sapiens
uggggucguaggugcccgccag

SEQ ID NO: 33117 - RNA, 22 nt, Homo sapiens
ugggccgcugcaggaugguccc

SEQ ID NO: 33118 - RNA, 21 nt, Homo sapiens
ugggccccuuccuuacaucau

SEQ ID NO: 33119 - RNA, 22 nt, Homo sapiens
ugggaucgucaagugaggcucg

SEQ ID NO: 33120 - RNA, 22 nt, Homo sapiens
uggcuuuucauccugggacauu

SEQ ID NO: 33121 - RNA, 22 nt, Homo sapiens
uggccagugucggaggccagga

SEQ ID NO: 33122 - RNA, 22 nt, Homo sapiens
ugggaagaugcugcuucuuccu

SEQ ID NO: 33123 - RNA, 18 nt, Homo sapiens
ugggaagaaauucuucuc

SEQ ID NO: 33124 - RNA, 22 nt, Homo sapiens
ugggaagaagguuuacuugcca

SEQ ID NO: 33125 - RNA, 22 nt, Homo sapiens
ugggaagagggagcgauuuugg

SEQ ID NO: 33126 - RNA, 22 nt, Homo sapiens
ugggaaauguagccuagcugug

SEQ ID NO: 33127 - RNA, 20 nt, Homo sapiens
ugggaaauguccaggacaua

SEQ ID NO: 33128 - RNA, 22 nt, Homo sapiens
ucuauugguugaaauugcuuuu

SEQ ID NO: 33129 - RNA, 22 nt, Homo sapiens
ucucaaccuccacacuacaaua

SEQ ID NO: 33130 - RNA, 20 nt, Homo sapiens
ucguugguagagagcagggc

SEQ ID NO: 33131 - RNA, 22 nt, Homo sapiens
ucuuuguguaggucaaucuggc

SEQ ID NO: 33132 - RNA, 22 nt, Homo sapiens
ucuuuuguucuauucaggccuu

SEQ ID NO: 33133 - RNA, 22 nt, Homo sapiens
ucuuuugggccucuugucagac

SEQ ID NO: 33134 - RNA, 22 nt, Homo sapiens
ugacaucguugccauguuaugc

SEQ ID NO: 33135 - RNA, 22 nt, Homo sapiens
ugaaggaguauggauaagucgu

SEQ ID NO: 33136 - RNA, 22 nt, Homo sapiens
ucaccucgugaucugcccacuu

SEQ ID NO: 33137 - RNA, 18 nt, Homo sapiens
ucacggggagcagcagcc

SEQ ID NO: 33138 - RNA, 22 nt, Homo sapiens
ucacccacacaggagacaggga

SEQ ID NO: 33139 - RNA, 22 nt, Homo sapiens
ucacaaggcaggaaugaaaggg

SEQ ID NO: 33140 - RNA, 22 nt, Homo sapiens
ucagcacauucaaggccugccu

SEQ ID NO: 33141 - RNA, 22 nt, Homo sapiens
ucacgugguucauaaggcagaa

SEQ ID NO: 33142 - RNA, 23 nt, Homo sapiens
ucacggagaccugcaagaccaau

SEQ ID NO: 33143 - RNA, 22 nt, Homo sapiens
ucccaguuuuucugaauaguca

SEQ ID NO: 33144 - RNA, 22 nt, Homo sapiens
uccccggaugacggccgcuuca

SEQ ID NO: 33145 - RNA, 22 nt, Homo sapiens
uccccuuuguaagauggaaacg

SEQ ID NO: 33146 - RNA, 22 nt, Homo sapiens
ucgcgccauucuccugccucag

SEQ ID NO: 33147 - RNA, 22 nt, Homo sapiens
ucgcaccauugcacuccagcca

SEQ ID NO: 33148 - RNA, 23 nt, Homo sapiens
ucgcagcauucaauaccaggcag

SEQ ID NO: 33149 - RNA, 22 nt, Homo sapiens
ucccuuucuggaguuucccaag

SEQ ID NO: 33150 - RNA, 22 nt, Homo sapiens
aaagaguucagguagauuucaa

SEQ ID NO: 33151 - RNA, 18 nt, Homo sapiens
aaaaagugcucaggccua

SEQ ID NO: 33152 - RNA, 22 nt, Homo sapiens
aaacagucuucuccugagggac

SEQ ID NO: 33153 - RNA, 22 nt, Homo sapiens
aaucaccaugcacuacagccuu

SEQ ID NO: 33154 - RNA, 22 nt, Homo sapiens
aauagcauugaaucuaccaauu

SEQ ID NO: 33155 - RNA, 22 nt, Homo sapiens
aaugcaucuagaaaggugaauu

SEQ ID NO: 33156 - RNA, 22 nt, Homo sapiens
aaguccccugacagaggggagg

SEQ ID NO: 33157 - RNA, 22 nt, Homo sapiens
aaggaacuggaauauuuugaac

SEQ ID NO: 33158 - RNA, 22 nt, Homo sapiens
aaguaaacauugagagacaaga

SEQ ID NO: 33159 - RNA, 22 nt, Homo sapiens
aaaccacagugugcugcugggg

SEQ ID NO: 33160 - RNA, 22 nt, Homo sapiens
aaaugcauggacagcuggucuu

SEQ ID NO: 33161 - RNA, 22 nt, Homo sapiens
aaaugcagauuccuaggcccca

SEQ ID NO: 33162 - RNA, 20 nt, Homo sapiens
aagacacuguccccacugga

SEQ ID NO: 33163 - RNA, 22 nt, Homo sapiens
aacuggucuuaugcaagcacua

SEQ ID NO: 33164 - RNA, 22 nt, Homo sapiens
aacugcacauauuuguaugggu

SEQ ID NO: 33165 - RNA, 20 nt, Homo sapiens
augaaggcaggugugaguuu

SEQ ID NO: 33166 - RNA, 22 nt, Homo sapiens
augaaagguauguuuucuguga

SEQ ID NO: 33167 - RNA, 22 nt, Homo sapiens
aucaccuggaggugaucacuug

SEQ ID NO: 33168 - RNA, 22 nt, Homo sapiens
aucaccgugggagauccugccu

SEQ ID NO: 33169 - RNA, 22 nt, Homo sapiens
augugugcuugugacacagccu

SEQ ID NO: 33170 - RNA, 22 nt, Homo sapiens
auugcacuccagccccggggac

SEQ ID NO: 33171 - RNA, 22 nt, Homo sapiens
auugcacuccagcccgggugac

SEQ ID NO: 33172 - RNA, 23 nt, Homo sapiens
auugcacuccagccuaccugggc

SEQ ID NO: 33173 - RNA, 21 nt, Homo sapiens
auugcacuccagccugggcga

SEQ ID NO: 33174 - RNA, 22 nt, Homo sapiens
auugcacuccagccugggggac

SEQ ID NO: 33175 - RNA, 22 nt, Homo sapiens
auugcacuccagccugggugac

SEQ ID NO: 33176 - RNA, 22 nt, Homo sapiens
auugcacuccagccuggccgag

SEQ ID NO: 33177 - RNA, 22 nt, Homo sapiens
auggcggugugggcggugcagc

SEQ ID NO: 33178 - RNA, 22 nt, Homo sapiens
auggcccccuguuugugaacau

SEQ ID NO: 33179 - RNA, 22 nt, Homo sapiens
augguugguuaaaucuguguau

SEQ ID NO: 33180 - RNA, 22 nt, Homo sapiens
agcuugugauucuccaucaugu

SEQ ID NO: 33181 - RNA, 22 nt, Homo sapiens
agcuucauuguuaugaauguca

SEQ ID NO: 33182 - RNA, 20 nt, Homo sapiens
agcuugguuuggaugaucac

SEQ ID NO: 33183 - RNA, 22 nt, Homo sapiens
aggauacugguaugggcugaau

SEQ ID NO: 33184 - RNA, 22 nt, Homo sapiens
agcuuguguuugucugccuggg

SEQ ID NO: 33185 - RNA, 22 nt, Homo sapiens
agcuuguggugaauacugcuag

SEQ ID NO: 33186 - RNA, 22 nt, Homo sapiens
aggcaggugaaagauaguuuua

SEQ ID NO: 33187 - RNA, 22 nt, Homo sapiens
aggcaaguugcucaaaugcaaa

SEQ ID NO: 33188 - RNA, 23 nt, Homo sapiens
agccuguugccuaggcagcucau

SEQ ID NO: 33189 - RNA, 22 nt, Homo sapiens
agcaccacauacuacagagaua

SEQ ID NO: 33190 - RNA, 22 nt, Homo sapiens
agcaccacaauuuccugccuaa

SEQ ID NO: 33191 - RNA, 23 nt, Homo sapiens
aguggucuccugggcccagcugu

SEQ ID NO: 33192 - RNA, 22 nt, Homo sapiens
aguuggccccuacugggaggug

SEQ ID NO: 33193 - RNA, 22 nt, Homo sapiens
aguuggugauugauugggucug

SEQ ID NO: 33194 - RNA, 22 nt, Homo sapiens
agugcaauggcgugaucuuggc

SEQ ID NO: 33195 - RNA, 22 nt, Homo sapiens
agugcacugcccgcuuccuguc

SEQ ID NO: 33196 - RNA, 22 nt, Homo sapiens
agugcaguggcauggucauaac

SEQ ID NO: 33197 - RNA, 22 nt, Homo sapiens
agugcaguugucacgugccuuc

SEQ ID NO: 33198 - RNA, 22 nt, Homo sapiens
agugcaguggugccaucauaac

SEQ ID NO: 33199 - RNA, 22 nt, Homo sapiens
agugcagugguuaggagccagg

SEQ ID NO: 33200 - RNA, 22 nt, Homo sapiens
aauuacauggcaauugggaaau

SEQ ID NO: 33201 - RNA, 18 nt, Homo sapiens
acaucccaugcuggggug

SEQ ID NO: 33202 - RNA, 22 nt, Homo sapiens
acaugacauugggguggggaua

SEQ ID NO: 33203 - RNA, 22 nt, Homo sapiens
acccuggaggucuacagugcag

SEQ ID NO: 33204 - RNA, 22 nt, Homo sapiens
acugcacuccagccuccugggu

SEQ ID NO: 33205 - RNA, 22 nt, Homo sapiens
acugcacuccagccucggggac

SEQ ID NO: 33206 - RNA, 22 nt, Homo sapiens
acugcacuccagccucggcaau

SEQ ID NO: 33207 - RNA, 22 nt, Homo sapiens
acccgcccagguguggccggga

SEQ ID NO: 33208 - RNA, 22 nt, Homo sapiens
acccgugcucacugccucugcc

SEQ ID NO: 33209 - RNA, 22 nt, Homo sapiens
acccgugcugaauauguaggug

SEQ ID NO: 33210 - RNA, 22 nt, Homo sapiens
accaccacucccgcauucuaaa

SEQ ID NO: 33211 - RNA, 21 nt, Homo sapiens
acccccacaccuccuuaguuc

SEQ ID NO: 33212 - RNA, 22 nt, Homo sapiens
accauugcacuccuuucugggc

SEQ ID NO: 33213 - RNA, 20 nt, Homo sapiens
agagguuuugauagguucug

SEQ ID NO: 33214 - RNA, 22 nt, Homo sapiens
agagguuuugcacugguucuuu

SEQ ID NO: 33215 - RNA, 22 nt, Homo sapiens
acugcacuccagccugcuggca

SEQ ID NO: 33216 - RNA, 22 nt, Homo sapiens
acugcacuccagccuggaccac

SEQ ID NO: 33217 - RNA, 22 nt, Homo sapiens
acugcacuccagccugcuggau

SEQ ID NO: 33218 - RNA, 22 nt, Homo sapiens
acugcacuccagccucguggac

SEQ ID NO: 33219 - RNA, 22 nt, Homo sapiens
acugcacuccagccucggugac

SEQ ID NO: 33220 - RNA, 22 nt, Homo sapiens
acugcacuccagccugagccug

SEQ ID NO: 33221 - RNA, 22 nt, Homo sapiens
acugcacuccagccugcccaac

SEQ ID NO: 33222 - RNA, 22 nt, Homo sapiens
acugcacuccagccugugagac

SEQ ID NO: 33223 - RNA, 22 nt, Homo sapiens
acugcacuccagccuucggaca

SEQ ID NO: 33224 - RNA, 22 nt, Homo sapiens
acugcacuccagccuggcggac

SEQ ID NO: 33225 - RNA, 22 nt, Homo sapiens
acugcacuccagccugugcgua

SEQ ID NO: 33226 - RNA, 20 nt, Homo sapiens
acugcacuccagccuuccag

SEQ ID NO: 33227 - RNA, 22 nt, Homo sapiens
acugcacuccagccuuagugac

SEQ ID NO: 33228 - RNA, 22 nt, Homo sapiens
acuuuuugaugaggucguuugu

SEQ ID NO: 33229 - RNA, 22 nt, Homo sapiens
gugaccucauuacggggccugc

SEQ ID NO: 33230 - RNA, 22 nt, Homo sapiens
guggaaaaguaguugcgguuuu

SEQ ID NO: 33231 - RNA, 22 nt, Homo sapiens
guggagucaucacucagagugg

SEQ ID NO: 33232 - RNA, 22 nt, Homo sapiens
gugguguuugagcugccaggga

SEQ ID NO: 33233 - RNA, 22 nt, Homo sapiens
gugugcaugucuuuuuaguagg

SEQ ID NO: 33234 - RNA, 22 nt, Homo sapiens
gugugcauggagggggcaguga

SEQ ID NO: 33235 - RNA, 22 nt, Homo sapiens
uaacaggcuacucuugcauugc

SEQ ID NO: 33236 - RNA, 22 nt, Homo sapiens
uaacaacauucuaacugacggc

SEQ ID NO: 33237 - RNA, 19 nt, Homo sapiens
uaacacaguuguguuugag

SEQ ID NO: 33238 - RNA, 22 nt, Homo sapiens
uaacacccuucuccagguacau

SEQ ID NO: 33239 - RNA, 22 nt, Homo sapiens
guuuuuggggucacuauuaccg

SEQ ID NO: 33240 - RNA, 22 nt, Homo sapiens
uaaaccacguuuacauuugaga

SEQ ID NO: 33241 - RNA, 20 nt, Homo sapiens
guucccuguaggugugcgga

SEQ ID NO: 33242 - RNA, 22 nt, Homo sapiens
guacacaacaugcagguuuguu

SEQ ID NO: 33243 - RNA, 22 nt, Homo sapiens
ggcagcucaggccccgcgcuga

SEQ ID NO: 33244 - RNA, 22 nt, Homo sapiens
gucuuuguuuggucuguaucag

SEQ ID NO: 33245 - RNA, 22 nt, Homo sapiens
gucuuuugcuagccagagagcu

SEQ ID NO: 33246 - RNA, 22 nt, Homo sapiens
gugacgucauuguuccuggcuc

SEQ ID NO: 33247 - RNA, 22 nt, Homo sapiens
gugaauguaaagucaugugacu

SEQ ID NO: 33248 - RNA, 22 nt, Homo sapiens
ucacagacauugaggggaccuu

SEQ ID NO: 33249 - RNA, 22 nt, Homo sapiens
ucacagaugaggcgagaggcag

SEQ ID NO: 33250 - RNA, 22 nt, Homo sapiens
ucacgugcucuuguguguucug

SEQ ID NO: 33251 - RNA, 20 nt, Homo sapiens
ucacccugacaucugcccag

SEQ ID NO: 33252 - RNA, 20 nt, Homo sapiens
ucacauccucucccaacaug

SEQ ID NO: 33253 - RNA, 22 nt, Homo sapiens
ucaccaccugcugauuguagag

SEQ ID NO: 33254 - RNA, 22 nt, Homo sapiens
ucaccaccugcugaucauagag

SEQ ID NO: 33255 - RNA, 22 nt, Homo sapiens
ucaaacugcuugaggccauuua

SEQ ID NO: 33256 - RNA, 22 nt, Homo sapiens
uauguguuuuauggucagggag

SEQ ID NO: 33257 - RNA, 22 nt, Homo sapiens
uauugcacuccagccuuggcaa

SEQ ID NO: 33258 - RNA, 21 nt, Homo sapiens
uagcugcacccaggccuccuu

SEQ ID NO: 33259 - RNA, 22 nt, Homo sapiens
uagcugcauccugugcacucaa

SEQ ID NO: 33260 - RNA, 22 nt, Homo sapiens
uagccuguggugaauguuucug

SEQ ID NO: 33261 - RNA, 22 nt, Homo sapiens
uagugcugagauugagaagccc

SEQ ID NO: 33262 - RNA, 21 nt, Homo sapiens
uagugcagugggguaugacuu

SEQ ID NO: 33263 - RNA, 22 nt, Homo sapiens
uaccacccuuuuuccagaagcc

SEQ ID NO: 33264 - RNA, 22 nt, Homo sapiens
uaccaccauuguaguuuggaaa

SEQ ID NO: 33265 - RNA, 22 nt, Homo sapiens
uaccacugccgagaaaacagau

SEQ ID NO: 33266 - RNA, 22 nt, Homo sapiens
uaccaucauuauacguagaaau

SEQ ID NO: 33267 - RNA, 22 nt, Homo sapiens
uaacugcaaccuccgccucccg

SEQ ID NO: 33268 - RNA, 20 nt, Homo sapiens
uacugcacuuuccucauggu

SEQ ID NO: 33269 - RNA, 22 nt, Homo sapiens
uacuggccuugaacucuggugu

SEQ ID NO: 33270 - RNA, 22 nt, Homo sapiens
gauggugucccaggcucaggcu

SEQ ID NO: 33271 - RNA, 22 nt, Homo sapiens
gaguuccuuugagccugagagg

SEQ ID NO: 33272 - RNA, 22 nt, Homo sapiens
gcacgugcucauuugaggucuu

SEQ ID NO: 33273 - RNA, 22 nt, Homo sapiens
gcucguuuuugccucugguugc

SEQ ID NO: 33274 - RNA, 22 nt, Homo sapiens
ggagucugacuuauaggaaccu

SEQ ID NO: 33275 - RNA, 22 nt, Homo sapiens
ggcaaagagacaugcaucgggg

SEQ ID NO: 33276 - RNA, 22 nt, Homo sapiens
ggagggugagaucaauuuggga

SEQ ID NO: 33277 - RNA, 19 nt, Homo sapiens
ggacugucauggaguaguu

SEQ ID NO: 33278 - RNA, 22 nt, Homo sapiens
ggagaugugccugcucugcucu

SEQ ID NO: 33279 - RNA, 22 nt, Homo sapiens
cugugauuauauaguuaaggua

SEQ ID NO: 33280 - RNA, 22 nt, Homo sapiens
cugugguguaacucuuggggcg

SEQ ID NO: 33281 - RNA, 22 nt, Homo sapiens
cugugguuuaaggaauuuugac

SEQ ID NO: 33282 - RNA, 22 nt, Homo sapiens
cuuugguuuacuuggugcuagu

SEQ ID NO: 33283 - RNA, 20 nt, Homo sapiens
gacaugacuaggagauagcc

SEQ ID NO: 33284 - RNA, 22 nt, Homo sapiens
gaaccagcagacuuugacaggu

SEQ ID NO: 33285 - RNA, 20 nt, Homo sapiens
gaaacaucuauccucuccuu

SEQ ID NO: 33286 - RNA, 22 nt, Homo sapiens
cuuuguguggacauuucaggca

SEQ ID NO: 33287 - RNA, 22 nt, Homo sapiens
cuuuguguaggugccucuggcu

SEQ ID NO: 33288 - RNA, 22 nt, Homo sapiens
gagcucguuuuugcugacucuu

SEQ ID NO: 33289 - RNA, 22 nt, Homo sapiens
gaggaaguaauuuuaggccugu

SEQ ID NO: 33290 - RNA, 22 nt, Homo sapiens
gagcuuguagugugaaugguau

SEQ ID NO: 33291 - RNA, 22 nt, Homo sapiens
gaggcagucugacccuuagcag

SEQ ID NO: 33292 - RNA, 22 nt, Homo sapiens
gagcacauguggagagucuggg

SEQ ID NO: 33293 - RNA, 22 nt, Homo sapiens
gagcuacauggauagucugcau

SEQ ID NO: 33294 - RNA, 21 nt, Homo sapiens
cagguagugucugaagccaga

SEQ ID NO: 33295 - RNA, 22 nt, Homo sapiens
cagcuugugguauugcugguug

SEQ ID NO: 33296 - RNA, 22 nt, Homo sapiens
caucgcacuccagccuggguaa

SEQ ID NO: 33297 - RNA, 22 nt, Homo sapiens
cauggcacugagcagguaugca

SEQ ID NO: 33298 - RNA, 22 nt, Homo sapiens
cauggcccugggcugggcgaac

SEQ ID NO: 33299 - RNA, 22 nt, Homo sapiens
caugggcacugacuugcauucg

SEQ ID NO: 33300 - RNA, 22 nt, Homo sapiens
cacuguggauggaacuauguga

SEQ ID NO: 33301 - RNA, 22 nt, Homo sapiens
cacugcacuccagucugacgac

SEQ ID NO: 33302 - RNA, 22 nt, Homo sapiens
cacugcacuccaguuuggauga

SEQ ID NO: 33303 - RNA, 22 nt, Homo sapiens
cacugcacuccaguuucgguaa

SEQ ID NO: 33304 - RNA, 22 nt, Homo sapiens
cacugcauucuccaccucccag

SEQ ID NO: 33305 - RNA, 22 nt, Homo sapiens
cacagggcuaacauuuuugccc

SEQ ID NO: 33306 - RNA, 22 nt, Homo sapiens
auugcacuccggccugggugac

SEQ ID NO: 33307 - RNA, 22 nt, Homo sapiens
cgccgggggaugggcaccagcg

SEQ ID NO: 33308 - RNA, 17 nt, Homo sapiens
ccaguuuucccucagug

SEQ ID NO: 33309 - RNA, 22 nt, Homo sapiens
ccaguucaaugauauggaaacu

SEQ ID NO: 33310 - RNA, 22 nt, Homo sapiens
ccaguguucuggaaggcugagu

SEQ ID NO: 33311 - RNA, 22 nt, Homo sapiens
ccagugcauggaucccaggggg

SEQ ID NO: 33312 - RNA, 22 nt, Homo sapiens
ccagcaccauuuguugaauagg

SEQ ID NO: 33313 - RNA, 22 nt, Homo sapiens
ccagccgggugcaguggcucac

SEQ ID NO: 33314 - RNA, 23 nt, Homo sapiens
cuccaugagccguccagggccug

SEQ ID NO: 33315 - RNA, 22 nt, Homo sapiens
cuccacgugaaugccaaguauu

SEQ ID NO: 33316 - RNA, 22 nt, Homo sapiens
cuaccuggguggcucaugacuu

SEQ ID NO: 33317 - RNA, 22 nt, Homo sapiens
cugagauuuuuagauccuggcg

SEQ ID NO: 33318 - RNA, 21 nt, Homo sapiens
cugguguuagcacuucuuccc

SEQ ID NO: 33319 - RNA, 22 nt, Homo sapiens
cugguuuguaaaguuccugaga

SEQ ID NO: 33320 - RNA, 22 nt, Homo sapiens
cuggacguugaggcugcaguga

SEQ ID NO: 33321 - RNA, 22 nt, Homo sapiens
uucagaucaucccagcuccacu

SEQ ID NO: 33322 - RNA, 22 nt, Homo sapiens
uuccugcacuugcuugccuaug

SEQ ID NO: 33323 - RNA, 22 nt, Homo sapiens
uugagauggauagacauagcau

SEQ ID NO: 33324 - RNA, 22 nt, Homo sapiens
uugagggaagccagaggucugc

SEQ ID NO: 33325 - RNA, 22 nt, Homo sapiens
uugagggaggcagggcuugucu

SEQ ID NO: 33326 - RNA, 22 nt, Homo sapiens
uuacugcauaauuccugggaag

SEQ ID NO: 33327 - RNA, 22 nt, Homo sapiens
ugugaugauuugauaaacguau

SEQ ID NO: 33328 - RNA, 22 nt, Homo sapiens
uguucuggagccgguucaaaug

SEQ ID NO: 33329 - RNA, 19 nt, Homo sapiens
ugugacugguugucucgcu

SEQ ID NO: 33330 - RNA, 19 nt, Homo sapiens
uguuuggcuauaggucuaa

SEQ ID NO: 33331 - RNA, 22 nt, Homo sapiens
uguugguuaaaucagguuuuaa

SEQ ID NO: 33332 - RNA, 22 nt, Homo sapiens
uuaauagugacucauuuuccac

SEQ ID NO: 33333 - RNA, 22 nt, Homo sapiens
uuggauccauccugucuucucu

SEQ ID NO: 33334 - RNA, 22 nt, Homo sapiens
uuggcuuuuaugcagcuuaggu

SEQ ID NO: 33335 - RNA, 22 nt, Homo sapiens
uuggcgugaaacagccuuacau

SEQ ID NO: 33336 - RNA, 22 nt, Homo sapiens
uuggccgugucauuugcuuuga

SEQ ID NO: 33337 - RNA, 22 nt, Homo sapiens
uuggguccucugguccuugguu

SEQ ID NO: 33338 - RNA, 19 nt, Homo sapiens
uugguugguuauuucuuac

SEQ ID NO: 33339 - RNA, 22 nt, Homo sapiens
uuguguuugaugcugacacgca

SEQ ID NO: 33340 - RNA, 22 nt, Homo sapiens
uuguuugguugaguauggaagu

SEQ ID NO: 33341 - RNA, 22 nt, Homo sapiens
uuuaacauuggaugagaucguc

SEQ ID NO: 33342 - RNA, 21 nt, Homo sapiens
uuuuugggcuuucauaguguu

SEQ ID NO: 33343 - RNA, 22 nt, Homo sapiens
uuuuguacgccuguguccauca

SEQ ID NO: 33344 - RNA, 22 nt, Homo sapiens
aacugcacuaggacagguuuuu

SEQ ID NO: 33345 - RNA, 22 nt, Homo sapiens
aacucacauucuuucuugguac

SEQ ID NO: 33346 - RNA, 19 nt, Homo sapiens
aaccgggagugcacauguu

SEQ ID NO: 33347 - RNA, 22 nt, Homo sapiens
aagcacccuuugucuggacaug

SEQ ID NO: 33348 - RNA, 22 nt, Homo sapiens
aagcacccagccucacgccugc

SEQ ID NO: 33349 - RNA, 22 nt, Homo sapiens
uuuugguguacaauucuaugga

SEQ ID NO: 33350 - RNA, 22 nt, Homo sapiens
uuuuggucuccaguuucugcug

SEQ ID NO: 33351 - RNA, 22 nt, Homo sapiens
uuuugcuuuuccucggucccac

SEQ ID NO: 33352 - RNA, 22 nt, Homo sapiens
ugagucaugcuggagucauggc

SEQ ID NO: 33353 - RNA, 22 nt, Homo sapiens
ugagguaucauugcccaggcug

SEQ ID NO: 33354 - RNA, 22 nt, Homo sapiens
ugagguaggugaagaaugcacg

SEQ ID NO: 33355 - RNA, 22 nt, Homo sapiens
ugaguucuuuuagggauauugc

SEQ ID NO: 33356 - RNA, 22 nt, Homo sapiens
ugaguucuuuguagauucugug

SEQ ID NO: 33357 - RNA, 22 nt, Homo sapiens
ugcaaauguuaggugucauuau

SEQ ID NO: 33358 - RNA, 22 nt, Homo sapiens
ugcaaauguuauuuugguuucu

SEQ ID NO: 33359 - RNA, 22 nt, Homo sapiens
ugcaaguaauuccagcuacuga

SEQ ID NO: 33360 - RNA, 22 nt, Homo sapiens
ugcuggugucaucaaggcuuug

SEQ ID NO: 33361 - RNA, 22 nt, Homo sapiens
ugcuggcguuacucuccaucag

SEQ ID NO: 33362 - RNA, 22 nt, Homo sapiens
ugcugguauuauguuauccaga

SEQ ID NO: 33363 - RNA, 22 nt, Homo sapiens
ugcguaggcuagagugcagugg

SEQ ID NO: 33364 - RNA, 22 nt, Homo sapiens
ugcuuguguucagguaaccuuu

SEQ ID NO: 33365 - RNA, 22 nt, Homo sapiens
uguauguuuaaggccaguggaa

SEQ ID NO: 33366 - RNA, 22 nt, Homo sapiens
ugucuuggaugaggauuaacag

SEQ ID NO: 33367 - RNA, 22 nt, Homo sapiens
ugucuuggacuugaaucucauu

SEQ ID NO: 33368 - RNA, 22 nt, Homo sapiens
uguccaguguuccucagaagaa

SEQ ID NO: 33369 - RNA, 22 nt, Homo sapiens
ugucauggugcucugggcccug

SEQ ID NO: 33370 - RNA, 22 nt, Homo sapiens
uggcggagacauggacuucaga

SEQ ID NO: 33371 - RNA, 22 nt, Homo sapiens
ugggaagauucuguguuuuucc

SEQ ID NO: 33372 - RNA, 22 nt, Homo sapiens
uggauggugauuggaucaugga

SEQ ID NO: 33373 - RNA, 22 nt, Homo sapiens
uggguagagcacugggggcgag

SEQ ID NO: 33374 - RNA, 22 nt, Homo sapiens
uggggugugagggagaaagaaa

SEQ ID NO: 33375 - RNA, 22 nt, Homo sapiens
ugguguuugagaagcugauguc

SEQ ID NO: 33376 - RNA, 22 nt, Homo sapiens
ugguuagucuguguguauauau

SEQ ID NO: 33377 - RNA, 22 nt, Homo sapiens
ugggcggagacgugcagccgcc

SEQ ID NO: 33378 - RNA, 22 nt, Homo sapiens
ugggcaaaacuaagagcugugg

SEQ ID NO: 33379 - RNA, 20 nt, Homo sapiens
ucccucaaacuuuuccacug

SEQ ID NO: 33380 - RNA, 22 nt, Homo sapiens
ucccuguguccugggggcaccu

SEQ ID NO: 33381 - RNA, 22 nt, Homo sapiens
ucccuggacagccuugccuggg

SEQ ID NO: 33382 - RNA, 22 nt, Homo sapiens
ucccuggagcaagagaagaagg

SEQ ID NO: 33383 - RNA, 22 nt, Homo sapiens
uccccgucacacgcaggcuuac

SEQ ID NO: 33384 - RNA, 22 nt, Homo sapiens
ucccgaggacaucugggggcaa

SEQ ID NO: 33385 - RNA, 22 nt, Homo sapiens
ucagagucuagaucacucacug

SEQ ID NO: 33386 - RNA, 22 nt, Homo sapiens
uccucaguggauuggauggugc

SEQ ID NO: 33387 - RNA, 19 nt, Homo sapiens
ucgcgccauucuccugccu

SEQ ID NO: 33388 - RNA, 22 nt, Homo sapiens
ucguuggcuacuuguucauuuc

SEQ ID NO: 33389 - RNA, 22 nt, Homo sapiens
ucgugccacugcacuccagccu

SEQ ID NO: 33390 - RNA, 22 nt, Homo sapiens
ucguggccugugaguccucccc

SEQ ID NO: 33391 - RNA, 22 nt, Homo sapiens
ucggcucagugcaagcucugcc

SEQ ID NO: 33392 - RNA, 23 nt, Homo sapiens
ucgguccccuuggcugcccucgg

SEQ ID NO: 33393 - RNA, 22 nt, Homo sapiens
ucucugauuaaacaagauagug

SEQ ID NO: 33394 - RNA, 22 nt, Homo sapiens
ucucuguuugucuguuacuggu

SEQ ID NO: 33395 - RNA, 22 nt, Homo sapiens
ucucugguuuguggaaucuuag

SEQ ID NO: 33396 - RNA, 17 nt, Homo sapiens
ucuggcuuucacaccug

SEQ ID NO: 33397 - RNA, 21 nt, Homo sapiens
ucugagucauucaguggccug

SEQ ID NO: 33398 - RNA, 22 nt, Homo sapiens
ucuugcacaaauuauuuuaacu

SEQ ID NO: 33399 - RNA, 22 nt, Homo sapiens
ucuuuggucuacuuucauaugu

SEQ ID NO: 33400 - RNA, 22 nt, Homo sapiens
ugacuagagacagaaacuaaaa

SEQ ID NO: 33401 - RNA, 22 nt, Homo sapiens
ugaaaucuaaaauguuccaaga

SEQ ID NO: 33402 - RNA, 22 nt, Homo sapiens
ucuuuguuuucugauccugaag

SEQ ID NO: 33403 - RNA, 22 nt, Homo sapiens
ucuuuguuagaacccucuccuu

SEQ ID NO: 33404 - RNA, 19 nt, Homo sapiens
ugacacuguuggugggagg

SEQ ID NO: 33405 - RNA, 22 nt, Homo sapiens
ugaggcacucccuagcggggug

SEQ ID NO: 33406 - RNA, 22 nt, Homo sapiens
ugagguacaacauggacugaag

SEQ ID NO: 33407 - RNA, 22 nt, Human herpesvirus 2
ugggagucugcgguugggagcg

SEQ ID NO: 33408 - RNA, 22 nt, Human herpesvirus 2
agaccugguuuuuggugccccu

SEQ ID NO: 33409 - RNA, 22 nt, Human herpesvirus 2
gccccggcgcgucguccgucac

SEQ ID NO: 33410 - RNA, 22 nt, Human herpesvirus 2
gcuggcagcgguggccguggau

SEQ ID NO: 33411 - RNA, 22 nt, Human herpesvirus 2
ggcuccaggccgccacgcuggg

SEQ ID NO: 33412 - RNA, 22 nt, Human herpesvirus 2
agaggcuguccgccgggcguga

SEQ ID NO: 33413 - RNA, 22 nt, Human herpesvirus 2
uggccccgaacacaaccggcuc

SEQ ID NO: 33414 - RNA, 22 nt, Human herpesvirus 2
ugcccgacccggaggacgugcg

SEQ ID NO: 33415 - RNA, 22 nt, Human herpesvirus 2
ugccgagugaacucucccgccc

SEQ ID NO: 33416 - RNA, 19 nt, Human herpesvirus 2
ggccuccgccucgacccgc

SEQ ID NO: 33417 - RNA, 19 nt, Human herpesvirus 2
ggcggggagccgacgaucc

SEQ ID NO: 33418 - RNA, 22 nt, Human herpesvirus 2
ggcgcccggggacguggcgcug

SEQ ID NO: 33419 - RNA, 22 nt, Human herpesvirus 2
ggcuccaggccgccacgcuggg

SEQ ID NO: 33420 - RNA, 22 nt, Human herpesvirus 2
ggacgccggcacccccgaagcc

SEQ ID NO: 33421 - RNA, 22 nt, Human herpesvirus 2
gcuggcagcgguggccguggau

SEQ ID NO: 33422 - RNA, 22 nt, Human herpesvirus 2
gcucgguggccgcgcgguacgu

SEQ ID NO: 33423 - RNA, 22 nt, Human herpesvirus 2
gcgggcgagggcgucuaaggcc

SEQ ID NO: 33424 - RNA, 22 nt, Human herpesvirus 2
ucguacccgggcaccacguggc

SEQ ID NO: 33425 - RNA, 22 nt, Human herpesvirus 2
gucccggucgccgccgcaccag

SEQ ID NO: 33426 - RNA, 22 nt, Human herpesvirus 2
guccucgcccggcagcggcgag

SEQ ID NO: 33427 - RNA, 22 nt, Human herpesvirus 2
gucggcgcggggguggccaaac

SEQ ID NO: 33428 - RNA, 22 nt, Human herpesvirus 2
ggggcgcgucccuucagccacu

SEQ ID NO: 33429 - RNA, 22 nt, Human herpesvirus 2
ggucgcgcaugacccaggcuca

SEQ ID NO: 33430 - RNA, 22 nt, Human herpesvirus 2
ggucgcgccugcccggcccaga

SEQ ID NO: 33431 - RNA, 22 nt, Human herpesvirus 2
gguccccggcacgagggugagc

SEQ ID NO: 33432 - RNA, 22 nt, Human herpesvirus 2
cgcgcacguccuccgggucggg

SEQ ID NO: 33433 - RNA, 22 nt, Human herpesvirus 2
cgggggcugcagucggcgcuga

SEQ ID NO: 33434 - RNA, 22 nt, Human herpesvirus 2
cggccaucugcaucgugggccc

SEQ ID NO: 33435 - RNA, 22 nt, Human herpesvirus 2
caccucggucuccuccuccgag

SEQ ID NO: 33436 - RNA, 22 nt, Human herpesvirus 2
ccucggagguggagucgcggug

SEQ ID NO: 33437 - RNA, 22 nt, Human herpesvirus 2
cgcccggaggacggccguggcg

SEQ ID NO: 33438 - RNA, 22 nt, Human herpesvirus 2
cgcccgugugggcgcccgagcu

SEQ ID NO: 33439 - RNA, 22 nt, Human herpesvirus 2
cgccgcugccgggcgaggaccu

SEQ ID NO: 33440 - RNA, 22 nt, Human herpesvirus 2
agcgcgccuccggagcgagcuc

SEQ ID NO: 33441 - RNA, 22 nt, Human herpesvirus 2
cacgaagccccggcggguuugu

SEQ ID NO: 33442 - RNA, 22 nt, Human herpesvirus 2
cacgagcucgcggcaccccggc

SEQ ID NO: 33443 - RNA, 22 nt, Human herpesvirus 2
ucgaccccgccguucgggcggu

SEQ ID NO: 33444 - RNA, 22 nt, Human herpesvirus 2
uggcggcguagaugcgucucuc

SEQ ID NO: 33445 - RNA, 22 nt, Human herpesvirus 2
ugggccgggcaggcgcgaccga

SEQ ID NO: 33446 - RNA, 22 nt, Human herpesvirus 2
ugggcgucgacgaggcgucggc

SEQ ID NO: 33447 - RNA, 22 nt, Human herpesvirus 2
uugacgagcuucgcgguacuac

SEQ ID NO: 33448 - RNA, 22 nt, Human herpesvirus 2
gcggaccuggugcccggacguc

SEQ ID NO: 33449 - RNA, 22 nt, Human herpesvirus 2
gccuccagggcgugggcgcgcu

SEQ ID NO: 33450 - RNA, 22 nt, Human herpesvirus 2
gccugcgugggugccaucgcuc

SEQ ID NO: 33451 - RNA, 22 nt, Human herpesvirus 2
gccgucagcgggggagcccugg

SEQ ID NO: 33452 - RNA, 23 nt, Human herpesvirus 2
gccacgugcgugccgggcacgag

SEQ ID NO: 33453 - RNA, 22 nt, Human herpesvirus 2
gcccgguucgaggccucgggcg

SEQ ID NO: 33454 - RNA, 22 nt, Human herpesvirus 2
gccccggcgcgucguccgucac

SEQ ID NO: 33455 - RNA, 22 nt, Human herpesvirus 2
gcagggcguuucguuggucuag

SEQ ID NO: 33456 - RNA, 22 nt, Human herpesvirus 2
gcagaccgucacgcgaauggug

SEQ ID NO: 33457 - RNA, 22 nt, Human herpesvirus 2
gaggauggaagggcagaagaug

SEQ ID NO: 33458 - RNA, 22 nt, Human herpesvirus 2
gagaggccguggagcuugccag

SEQ ID NO: 33459 - RNA, 22 nt, Human herpesvirus 2
gugcggcggcgaccgggacgcc

SEQ ID NO: 33460 - RNA, 22 nt, Human herpesvirus 2
gcggccgcgacaugucccacag

SEQ ID NO: 33461 - RNA, 22 nt, Human herpesvirus 2
guucgcacuuuguccuaauaau

SEQ ID NO: 33462 - RNA, 22 nt, Human herpesvirus 2
gugggccgugaugcgcgggcgg

SEQ ID NO: 33463 - RNA, 17 nt, Human herpesvirus 2
gacgccgccauggccgc

SEQ ID NO: 33464 - RNA, 22 nt, Human herpesvirus 2
cugcgcggcggagaccgggacg

SEQ ID NO: 33465 - RNA, 22 nt, Human herpesvirus 2
cucggggcuccgccagggcgcc

SEQ ID NO: 33466 - RNA, 22 nt, Human herpesvirus 2
cccugggcucucggggaacccg

SEQ ID NO: 33467 - RNA, 22 nt, Human herpesvirus 2
ccgacgccgguggucccggcga

SEQ ID NO: 33468 - RNA, 22 nt, Human herpesvirus 2
cccgcggcgucgcgacagacca

SEQ ID NO: 33469 - RNA, 22 nt, Human herpesvirus 2
cccggcgcgccggacuucugcg

SEQ ID NO: 33470 - RNA, 22 nt, Human herpesvirus 2
cguucauggcccggccggcggu

SEQ ID NO: 33471 - RNA, 23 nt, Human herpesvirus 2
ccgggcgugcguggccgccaggc

SEQ ID NO: 33472 - RNA, 22 nt, Human herpesvirus 2
cccgccccguacguugugcacg

SEQ ID NO: 33473 - RNA, 18 nt, Human herpesvirus 2
cccgcgaugcuaaugaga

SEQ ID NO: 33474 - RNA, 22 nt, Human herpesvirus 2
cccgcgccgggcgcuaaugaga

SEQ ID NO: 33475 - RNA, 16 nt, Human herpesvirus 2
ccaucuccgugauggc

SEQ ID NO: 33476 - RNA, 22 nt, Human herpesvirus 2
ccagggcgccaugcgcccgcac

SEQ ID NO: 33477 - RNA, 22 nt, Human herpesvirus 2
cagggcguggaggcagucgcgc

SEQ ID NO: 33478 - RNA, 17 nt, Human herpesvirus 2
acgcggugucggcggug

SEQ ID NO: 33479 - RNA, 22 nt, Human herpesvirus 2
cacggccgacguccccagcgug

SEQ ID NO: 33480 - RNA, 22 nt, Human herpesvirus 2
agaccugguuuuuggugccccu

SEQ ID NO: 33481 - RNA, 22 nt, Human herpesvirus 2
agaggcuguccgccgggcguga

SEQ ID NO: 33482 - RNA, 22 nt, Human herpesvirus 2
aaggccgugguguugcggagcg

SEQ ID NO: 33483 - RNA, 20 nt, Human herpesvirus 2
aacgcccugggguugccgug

SEQ ID NO: 33484 - RNA, 22 nt, Human herpesvirus 2
aaaguccgggaggggccgcagg

SEQ ID NO: 33485 - RNA, 22 nt, Homo sapiens
aauauagcuauguacaugucca

SEQ ID NO: 33486 - RNA, 22 nt, Homo sapiens
ugccauugcacuccagccuggg

SEQ ID NO: 33487 - RNA, 22 nt, Homo sapiens
ugugaaacauggauagaacugg

SEQ ID NO: 33488 - RNA, 22 nt, Homo sapiens
uuaguucccucauucuugacuu

SEQ ID NO: 33489 - RNA, 22 nt, Homo sapiens
ugcagaaucccuucagauccga

SEQ ID NO: 33490 - RNA, 22 nt, Homo sapiens
auacaagcaguccaacuccaua

SEQ ID NO: 33491 - RNA, 22 nt, Homo sapiens
aucuacagccagucugguuugu

SEQ ID NO: 33492 - RNA, 22 nt, Homo sapiens
uucuaugguuuuuaugguguua

SEQ ID NO: 33493 - RNA, 22 nt, Homo sapiens
uaucucuguggguagugcugaa

SEQ ID NO: 33494 - RNA, 19 nt, Homo sapiens
ugcaaagucuuuuccuauu

SEQ ID NO: 33495 - RNA, 22 nt, Homo sapiens
uagaccaauuggcauauaguaa

SEQ ID NO: 33496 - RNA, 22 nt, Homo sapiens
aucccuagaaaaaucagcacau

SEQ ID NO: 33497 - RNA, 22 nt, Homo sapiens
auaugcuuauuagcaagaaaua

SEQ ID NO: 33498 - RNA, 22 nt, Homo sapiens
auggcaguguaugauuauauua

SEQ ID NO: 33499 - RNA, 22 nt, Homo sapiens
ucuuuggugaauggucauccag

SEQ ID NO: 33500 - RNA, 23 nt, Homo sapiens
augugugcuuggagagcaggaug

SEQ ID NO: 33501 - RNA, 22 nt, Homo sapiens
uuggcaguaucuacuacagcua

SEQ ID NO: 33502 - RNA, 21 nt, Homo sapiens
auugcacuccagccugggcga

SEQ ID NO: 33503 - RNA, 22 nt, Homo sapiens
uuuccaagaugcuuacuuucuc

SEQ ID NO: 33504 - RNA, 22 nt, Homo sapiens
uggaacacauaaauagcauagu

SEQ ID NO: 33505 - RNA, 22 nt, Homo sapiens
acaauguauauuuuacuguagg

SEQ ID NO: 33506 - RNA, 22 nt, Homo sapiens
uaccacugccgagaaaacagau

SEQ ID NO: 33507 - RNA, 22 nt, Homo sapiens
ccugucuugaagagauccuccu

SEQ ID NO: 33508 - RNA, 23 nt, Homo sapiens
agccugguuucccugcuucuccc

SEQ ID NO: 33509 - RNA, 22 nt, Homo sapiens
guaaagacacaugcacacguau

SEQ ID NO: 33510 - RNA, 22 nt, Homo sapiens
uaaggcucuuguuauuuugagg

SEQ ID NO: 33511 - RNA, 22 nt, Homo sapiens
gagcucauuaaaaauguagaau

SEQ ID NO: 33512 - RNA, 22 nt, Homo sapiens
uaaagugcugagaugaggcugg

SEQ ID NO: 33513 - RNA, 22 nt, Homo sapiens
auggauauuuuuugaacauaga

SEQ ID NO: 33514 - RNA, 22 nt, Homo sapiens
uaccagcauuucucuuuaagua

SEQ ID NO: 33515 - RNA, 22 nt, Homo sapiens
uuggagugugcucauaacugcu

SEQ ID NO: 33516 - RNA, 21 nt, Homo sapiens
uauggcuuagucaguguuucc

SEQ ID NO: 33517 - RNA, 22 nt, Homo sapiens
cauggcuuguauaagauucuca

SEQ ID NO: 33518 - RNA, 20 nt, Homo sapiens
cauugcacuccagcuugggc

SEQ ID NO: 33519 - RNA, 22 nt, Homo sapiens
gugcuuuguuguggcaguggca

SEQ ID NO: 33520 - RNA, 22 nt, Homo sapiens
uugagauggagucucgcucuuu

SEQ ID NO: 33521 - RNA, 22 nt, Homo sapiens
cuagaagcauauucagaacaga

SEQ ID NO: 33522 - RNA, 22 nt, Homo sapiens
auuguacuccagccugggcaag

SEQ ID NO: 33523 - RNA, 22 nt, Homo sapiens
aggcaagagugacuacgugaaa

SEQ ID NO: 33524 - RNA, 22 nt, Homo sapiens
cugucucagugaauugguuuua

SEQ ID NO: 33525 - RNA, 21 nt, Homo sapiens
acaucagaguugugaagguag

SEQ ID NO: 33526 - RNA, 22 nt, Homo sapiens
ugcaaugugaaauaagcacauc

SEQ ID NO: 33527 - RNA, 22 nt, Homo sapiens
ugcaaauguuaggugucauuau

SEQ ID NO: 33528 - RNA, 22 nt, Homo sapiens
uucuuuggaaacaguacuaauu

SEQ ID NO: 33529 - RNA, 22 nt, Homo sapiens
agauguuguucaucugauuguu

SEQ ID NO: 33530 - RNA, 22 nt, Homo sapiens
cucuuugaguuccuccuggugu

SEQ ID NO: 33531 - RNA, 22 nt, Homo sapiens
uccagaguggugaugcuggggc

SEQ ID NO: 33532 - RNA, 22 nt, Homo sapiens
uuucuacagugaacgauuucua

SEQ ID NO: 33533 - RNA, 19 nt, Homo sapiens
ugcagcaauguaaaagaca

SEQ ID NO: 33534 - RNA, 22 nt, Homo sapiens
uucucugggacauaggucgggu

SEQ ID NO: 33535 - RNA, 22 nt, Homo sapiens
cuacucugugguguauuugcau

SEQ ID NO: 33536 - RNA, 22 nt, Homo sapiens
gaauaaacuagagaggacugag

SEQ ID NO: 33537 - RNA, 20 nt, Homo sapiens
ugagaacauguggcauuugg

SEQ ID NO: 33538 - RNA, 22 nt, Homo sapiens
acucagagauuagcacauguuu

SEQ ID NO: 33539 - RNA, 22 nt, Homo sapiens
ccugucuugauuaaauuacuua

SEQ ID NO: 33540 - RNA, 22 nt, Homo sapiens
ucucugagaaaaguuucuccca

SEQ ID NO: 33541 - RNA, 22 nt, Homo sapiens
cugagcuagaccacuuggcucc

SEQ ID NO: 33542 - RNA, 22 nt, Homo sapiens
uucuguguuuaggucacggcua

SEQ ID NO: 33543 - RNA, 22 nt, Homo sapiens
uucuacaggcuguucaagaagc

SEQ ID NO: 33544 - RNA, 22 nt, Homo sapiens
ggagaugaaaugagcuacuuaa

SEQ ID NO: 33545 - RNA, 22 nt, Homo sapiens
ucaguagcaugaaaacagacua

SEQ ID NO: 33546 - RNA, 22 nt, Homo sapiens
gauacaccauuuucuagcuauu

SEQ ID NO: 33547 - RNA, 22 nt, Homo sapiens
uuugcauaauaagauuagggug

SEQ ID NO: 33548 - RNA, 22 nt, Homo sapiens
ugagaugaguucucgcucuguc

SEQ ID NO: 33549 - RNA, 22 nt, Homo sapiens
gagaugaugagauguucacagu

SEQ ID NO: 33550 - RNA, 21 nt, Homo sapiens
uuaucccagugucucugcagg

SEQ ID NO: 33551 - RNA, 23 nt, Homo sapiens
uguauacacccugugcaucuggg

SEQ ID NO: 33552 - RNA, 22 nt, Homo sapiens
uuuuauguuuguucccugccaa

SEQ ID NO: 33553 - RNA, 22 nt, Homo sapiens
caucacuuugccuccgucucua

SEQ ID NO: 33554 - RNA, 22 nt, Homo sapiens
uguuucuacugucucuguagua

SEQ ID NO: 33555 - RNA, 22 nt, Homo sapiens
cugagcucauuucuuuugcuac

SEQ ID NO: 33556 - RNA, 22 nt, Homo sapiens
uuauguaaaucaaucuggaauc

SEQ ID NO: 33557 - RNA, 22 nt, Homo sapiens
ucacuagaucaagggagagaaa

SEQ ID NO: 33558 - RNA, 22 nt, Homo sapiens
uuggucaucucccuccuuuuag

SEQ ID NO: 33559 - RNA, 22 nt, Homo sapiens
caggaaugugaggguucccugc

SEQ ID NO: 33560 - RNA, 22 nt, Homo sapiens
aucuuuggugaguucuuugguc

SEQ ID NO: 33561 - RNA, 22 nt, Homo sapiens
cauugcacuccaucuugggcaa

SEQ ID NO: 33562 - RNA, 22 nt, Homo sapiens
guauacaugucaaaacucacau

SEQ ID NO: 33563 - RNA, 22 nt, Homo sapiens
ccagucuuggugucuguagcac

SEQ ID NO: 33564 - RNA, 22 nt, Homo sapiens
augacaagaguguucagggaga

SEQ ID NO: 33565 - RNA, 22 nt, Homo sapiens
aucauauccuagauauaacuuc

SEQ ID NO: 33566 - RNA, 22 nt, Homo sapiens
ugaggugaggguaucaaaugcu

SEQ ID NO: 33567 - RNA, 18 nt, Homo sapiens
ugaaacacauuuuuuccu

SEQ ID NO: 33568 - RNA, 22 nt, Homo sapiens
gucucccagccuacauauuucu

SEQ ID NO: 33569 - RNA, 22 nt, Homo sapiens
caguuacuugacacaaccaauu

SEQ ID NO: 33570 - RNA, 22 nt, Homo sapiens
ugucagaaucugagacgacaac

SEQ ID NO: 33571 - RNA, 20 nt, Homo sapiens
cauugcacuccagccugcug

SEQ ID NO: 33572 - RNA, 22 nt, Homo sapiens
cauugcacuccauccuuggcaa

SEQ ID NO: 33573 - RNA, 22 nt, Homo sapiens
aaagagaucuaugggcacuaug

SEQ ID NO: 33574 - RNA, 22 nt, Homo sapiens
uacauagucuucuuuugguuau

SEQ ID NO: 33575 - RNA, 22 nt, Homo sapiens
auccaagagacugaugacuucc

SEQ ID NO: 33576 - RNA, 22 nt, Homo sapiens
cuaauacaguuguccaagcugg

SEQ ID NO: 33577 - RNA, 22 nt, Homo sapiens
cucagugucuggcacacagaaa

SEQ ID NO: 33578 - RNA, 22 nt, Homo sapiens
aaauaguagcugaaugagggaa

SEQ ID NO: 33579 - RNA, 22 nt, Homo sapiens
uuuggucacugccgccgccagc

SEQ ID NO: 33580 - RNA, 22 nt, Homo sapiens
ugagcucagcuaguugaggugu

SEQ ID NO: 33581 - RNA, 22 nt, Homo sapiens
uugcacuccggccuggguaaca

SEQ ID NO: 33582 - RNA, 21 nt, Homo sapiens
uucuaaguaaauguuggacau

SEQ ID NO: 33583 - RNA, 22 nt, Homo sapiens
uggagugagaacuucaaugaug

SEQ ID NO: 33584 - RNA, 20 nt, Homo sapiens
uggaaauuaaccuuucaggu

SEQ ID NO: 33585 - RNA, 22 nt, Homo sapiens
gucucccagccuacaucuuucu

SEQ ID NO: 33586 - RNA, 22 nt, Homo sapiens
agagaccuguaaaguucaggca

SEQ ID NO: 33587 - RNA, 22 nt, Homo sapiens
uaagacugccccagacagcaag

SEQ ID NO: 33588 - RNA, 22 nt, Homo sapiens
gugagccaugauuuuaccacug

SEQ ID NO: 33589 - RNA, 22 nt, Homo sapiens
uugagauguaguuucacuccug

SEQ ID NO: 33590 - RNA, 20 nt, Homo sapiens
agcugguuuuaugaaucuuu

SEQ ID NO: 33591 - RNA, 22 nt, Homo sapiens
uuaagggaggagcuucaagaug

SEQ ID NO: 33592 - RNA, 22 nt, Homo sapiens
ggaaagaucagcuaaauguaag

SEQ ID NO: 33593 - RNA, 23 nt, Homo sapiens
aauaucacaguggguguacaccc

SEQ ID NO: 33594 - RNA, 22 nt, Homo sapiens
ugucucccuucccauuaggaag

SEQ ID NO: 33595 - RNA, 22 nt, Homo sapiens
acugaucaauguuaaggcuuau

SEQ ID NO: 33596 - RNA, 22 nt, Homo sapiens
auuguacuccagccugggcagc

SEQ ID NO: 33597 - RNA, 22 nt, Homo sapiens
uugacagaccuuggucauaucc

SEQ ID NO: 33598 - RNA, 22 nt, Homo sapiens
uuggaaacgucaccuuuuccuu

SEQ ID NO: 33599 - RNA, 22 nt, Homo sapiens
acaguguagugacugccaacuu

SEQ ID NO: 33600 - RNA, 22 nt, Homo sapiens
ugagaugauaucuuauuguaau

SEQ ID NO: 33601 - RNA, 22 nt, Homo sapiens
guacacauacauauaugugugu

SEQ ID NO: 33602 - RNA, 18 nt, Homo sapiens
uuggacggagagucaaau

SEQ ID NO: 33603 - RNA, 22 nt, Homo sapiens
gacaagagaacacugcuauauu

SEQ ID NO: 33604 - RNA, 22 nt, Homo sapiens
gaaaugcucauuuuggauccuu

SEQ ID NO: 33605 - RNA, 22 nt, Homo sapiens
auggcacuccagccugggcaac

SEQ ID NO: 33606 - RNA, 22 nt, Homo sapiens
uuggaaaccucugcagguguuu

SEQ ID NO: 33607 - RNA, 22 nt, Homo sapiens
ugagaugaguugcgcucugucg

SEQ ID NO: 33608 - RNA, 22 nt, Homo sapiens
aagcacccagccucacgccugc

SEQ ID NO: 33609 - RNA, 22 nt, Homo sapiens
uggugagaaaagaugucuuugu

SEQ ID NO: 33610 - RNA, 22 nt, Homo sapiens
cuggcacagugucagaaacaca

SEQ ID NO: 33611 - RNA, 20 nt, Homo sapiens
cauugcccuccagccugggc

SEQ ID NO: 33612 - RNA, 22 nt, Homo sapiens
uggucaguugaguccuugccaa

SEQ ID NO: 33613 - RNA, 22 nt, Homo sapiens
augagacuagaagagaauaaua

SEQ ID NO: 33614 - RNA, 20 nt, Homo sapiens
ucugauugcaacugcaugag

SEQ ID NO: 33615 - RNA, 22 nt, Homo sapiens
acacuuucuggagcugcacaua

SEQ ID NO: 33616 - RNA, 22 nt, Homo sapiens
aaguauguaucaagucauacuu

SEQ ID NO: 33617 - RNA, 22 nt, Homo sapiens
ugacuaaaacugaguuucauua

SEQ ID NO: 33618 - RNA, 22 nt, Homo sapiens
ugcauggauguuugaacacacu

SEQ ID NO: 33619 - RNA, 22 nt, Homo sapiens
auaucaaggccauuuucuaaau

SEQ ID NO: 33620 - RNA, 22 nt, Homo sapiens
caccugagcgggaugcucgccu

SEQ ID NO: 33621 - RNA, 22 nt, Homo sapiens
uugacaaggagccauugcaucu

SEQ ID NO: 33622 - RNA, 22 nt, Homo sapiens
caacacagugaaacccgucucu

SEQ ID NO: 33623 - RNA, 22 nt, Homo sapiens
uuggucaggcuaaucucgaacg

SEQ ID NO: 33624 - RNA, 22 nt, Homo sapiens
cugacuaguuuuaaugcagauu

SEQ ID NO: 33625 - RNA, 22 nt, Homo sapiens
augugcaaagcacuguucagca

SEQ ID NO: 33626 - RNA, 22 nt, Homo sapiens
uggcucauuucuaaacccagcu

SEQ ID NO: 33627 - RNA, 22 nt, Homo sapiens
uacagucacauuccugaccaua

SEQ ID NO: 33628 - RNA, 22 nt, Homo sapiens
uugagauggagucucacugugu

SEQ ID NO: 33629 - RNA, 22 nt, Homo sapiens
uuugugagguggauagauugca

SEQ ID NO: 33630 - RNA, 22 nt, Homo sapiens
auggaacauuauagauguaaaa

SEQ ID NO: 33631 - RNA, 22 nt, Homo sapiens
uuuugcaguuacagagagugag

SEQ ID NO: 33632 - RNA, 22 nt, Homo sapiens
auaaccuauggaucuacucggg

SEQ ID NO: 33633 - RNA, 22 nt, Homo sapiens
uuugguuuuuguuaucacucau

SEQ ID NO: 33634 - RNA, 22 nt, Homo sapiens
acauaaagaagcaggacauugu

SEQ ID NO: 33635 - RNA, 22 nt, Homo sapiens
cauugcccuccagccugggcaa

SEQ ID NO: 33636 - RNA, 20 nt, Homo sapiens
aaacucugucuucuuuauca

SEQ ID NO: 33637 - RNA, 22 nt, Homo sapiens
ucuauguuuuugcuaguagugu

SEQ ID NO: 33638 - RNA, 22 nt, Homo sapiens
auugcucuuagaaauauuucuu

SEQ ID NO: 33639 - RNA, 22 nt, Homo sapiens
ugagaugauagauauguuaauu

SEQ ID NO: 33640 - RNA, 22 nt, Homo sapiens
cuuuugugauucuucaguugcu

SEQ ID NO: 33641 - RNA, 22 nt, Homo sapiens
ucauacaguaguccucacuugu

SEQ ID NO: 33642 - RNA, 22 nt, Homo sapiens
cuggcucugggcuaaagaaaua

SEQ ID NO: 33643 - RNA, 22 nt, Homo sapiens
uagcuguuggugggaagucaga

SEQ ID NO: 33644 - RNA, 22 nt, Homo sapiens
ugaaaucuaaaauguuccaaga

SEQ ID NO: 33645 - RNA, 22 nt, Homo sapiens
ugagaugaagucuugcucuguu

SEQ ID NO: 33646 - RNA, 22 nt, Homo sapiens
auuccacuuauaugagguaucu

SEQ ID NO: 33647 - RNA, 22 nt, Homo sapiens
ucugucuuugucaggaccagag

SEQ ID NO: 33648 - RNA, 22 nt, Homo sapiens
ggcaacauggugaaacucuguc

SEQ ID NO: 33649 - RNA, 22 nt, Homo sapiens
ugagaugaagugauguaaaaca

SEQ ID NO: 33650 - RNA, 22 nt, Homo sapiens
uugagauggaaucucgcuuugu

SEQ ID NO: 33651 - RNA, 22 nt, Homo sapiens
gucuuuaguugaaacauguggu

SEQ ID NO: 33652 - RNA, 22 nt, Homo sapiens
uaucacuuuuccagcccagcuu

SEQ ID NO: 33653 - RNA, 22 nt, Homo sapiens
cauuaguugaagugcagggaga

SEQ ID NO: 33654 - RNA, 19 nt, Homo sapiens
uagguacauucaagucucc

SEQ ID NO: 33655 - RNA, 22 nt, Homo sapiens
cuggcagugcuuguuauccugg

SEQ ID NO: 33656 - RNA, 22 nt, Homo sapiens
ugugccuaguaauguguccaga

SEQ ID NO: 33657 - RNA, 22 nt, Homo sapiens
gucagugugauaucugcagggg

SEQ ID NO: 33658 - RNA, 22 nt, Homo sapiens
aucuuuggucaucacagcuaga

SEQ ID NO: 33659 - RNA, 22 nt, Homo sapiens
caguuacuuuugcaccaaccua

SEQ ID NO: 33660 - RNA, 22 nt, Homo sapiens
ugacaaguaaacagucagcacc

SEQ ID NO: 33661 - RNA, 22 nt, Homo sapiens
cugucuagagggcacaugaugc

SEQ ID NO: 33662 - RNA, 19 nt, Homo sapiens
ucuuuagucacauuuuuau

SEQ ID NO: 33663 - RNA, 18 nt, Homo sapiens
auucuacaggccuuuuga

SEQ ID NO: 33664 - RNA, 21 nt, Homo sapiens
uggucaguuuucucacuagga

SEQ ID NO: 33665 - RNA, 22 nt, Homo sapiens
cacagugaacugguggguuuuu

SEQ ID NO: 33666 - RNA, 22 nt, Homo sapiens
ugagaucuuggaggcuuuguga

SEQ ID NO: 33667 - RNA, 23 nt, Homo sapiens
gaaguaauaaauggauucuuaac

SEQ ID NO: 33668 - RNA, 22 nt, Homo sapiens
aaggagcuaagagaucauacau

SEQ ID NO: 33669 - RNA, 22 nt, Homo sapiens
uauggcuucuauaaggaagcuu

SEQ ID NO: 33670 - RNA, 22 nt, Homo sapiens
aaaguucugcguuagggcuaaa

SEQ ID NO: 33671 - RNA, 22 nt, Homo sapiens
uaagugcaugauuacaugcaua

SEQ ID NO: 33672 - RNA, 22 nt, Homo sapiens
cauugcaauccagccugggcaa

SEQ ID NO: 33673 - RNA, 21 nt, Homo sapiens
uggagugaagaguuuauugac

SEQ ID NO: 33674 - RNA, 22 nt, Homo sapiens
uugagauggaguguugcucugu

SEQ ID NO: 33675 - RNA, 22 nt, Homo sapiens
uugagauggagucuugcucucu

SEQ ID NO: 33676 - RNA, 22 nt, Homo sapiens
uauggcuucuuauucuuucccg

SEQ ID NO: 33677 - RNA, 22 nt, Homo sapiens
uugagauggagucuugcucuug

SEQ ID NO: 33678 - RNA, 22 nt, Homo sapiens
uugcacauguugaaccagcaaa

SEQ ID NO: 33679 - RNA, 22 nt, Homo sapiens
ugagaugaggucucacucuguu

SEQ ID NO: 33680 - RNA, 22 nt, Homo sapiens
uuauagcuaacaucugugaaaa

SEQ ID NO: 33681 - RNA, 22 nt, Homo sapiens
aucccuguaguaauauucuagc

SEQ ID NO: 33682 - RNA, 22 nt, Homo sapiens
aagugccauguggaugggcccu

SEQ ID NO: 33683 - RNA, 22 nt, Homo sapiens
ugagcugagaaaugcagcagcu

SEQ ID NO: 33684 - RNA, 22 nt, Homo sapiens
uuggacuucuaacugacaugga

SEQ ID NO: 33685 - RNA, 22 nt, Homo sapiens
cauggcuuuuauaacaagaaau

SEQ ID NO: 33686 - RNA, 22 nt, Homo sapiens
accugagacuaggcauuuuaua

SEQ ID NO: 33687 - RNA, 22 nt, Homo sapiens
guggacaugaauuuuggaggca

SEQ ID NO: 33688 - RNA, 22 nt, Homo sapiens
uugacuuuuauucacucugcua

SEQ ID NO: 33689 - RNA, 22 nt, Homo sapiens
cugagacacucuuaucugcaua

SEQ ID NO: 33690 - RNA, 22 nt, Homo sapiens
uuggaagacaaugcugauucuc

SEQ ID NO: 33691 - RNA, 22 nt, Homo sapiens
agagaugauuaacauuuuggua

SEQ ID NO: 33692 - RNA, 22 nt, Homo sapiens
acuggcuuauuucacuuagcau

SEQ ID NO: 33693 - RNA, 22 nt, Homo sapiens
auagcauaucccacaugucaga

SEQ ID NO: 33694 - RNA, 22 nt, Homo sapiens
aucccugugauccaaucacuuc

SEQ ID NO: 33695 - RNA, 22 nt, Homo sapiens
guccaguacucuuuccugaaaa

SEQ ID NO: 33696 - RNA, 22 nt, Homo sapiens
auguccaugagcacauguauca

SEQ ID NO: 33697 - RNA, 22 nt, Homo sapiens
uagcaggaaaggggucagaucu

SEQ ID NO: 33698 - RNA, 22 nt, Homo sapiens
uuugugcaugaagagggggugc

SEQ ID NO: 33699 - RNA, 22 nt, Homo sapiens
auguccauggaaucuguagcaa

SEQ ID NO: 33700 - RNA, 22 nt, Homo sapiens
agugcacuccagccugggcaac

SEQ ID NO: 33701 - RNA, 21 nt, Homo sapiens
uauggauuugccuauucugga

SEQ ID NO: 33702 - RNA, 22 nt, Homo sapiens
cugaggcacggcgaccuuaagu

SEQ ID NO: 33703 - RNA, 22 nt, Homo sapiens
uauggaaaucuuaccuuauggu

SEQ ID NO: 33704 - RNA, 22 nt, Homo sapiens
uuaaguaaucagagaagagaac

SEQ ID NO: 33705 - RNA, 22 nt, Homo sapiens
aaucacuuuggcaccaaccuaa

SEQ ID NO: 33706 - RNA, 22 nt, Homo sapiens
ugagcugagaucgugccauugu

SEQ ID NO: 33707 - RNA, 22 nt, Homo sapiens
augaucacuguggaaauucagc

SEQ ID NO: 33708 - RNA, 22 nt, Homo sapiens
guggaauggaaugauuguguau

SEQ ID NO: 33709 - RNA, 22 nt, Homo sapiens
gauaaagauagcaauagggaca

SEQ ID NO: 33710 - RNA, 22 nt, Homo sapiens
ggaucacuugagaccaggaguu

SEQ ID NO: 33711 - RNA, 22 nt, Homo sapiens
auauucacagguaucagagauu

SEQ ID NO: 33712 - RNA, 22 nt, Homo sapiens
auugcacuccauccugggcaau

SEQ ID NO: 33713 - RNA, 22 nt, Homo sapiens
ucauaucauuagaucuacugua

SEQ ID NO: 33714 - RNA, 22 nt, Homo sapiens
uugaguccccacacuggguccc

SEQ ID NO: 33715 - RNA, 19 nt, Homo sapiens
uggaacugauucaguucug

SEQ ID NO: 33716 - RNA, 22 nt, Homo sapiens
ucacaauucucaauuugugaaa

SEQ ID NO: 33717 - RNA, 22 nt, Homo sapiens
uuagcacauuuccagcacaugg

SEQ ID NO: 33718 - RNA, 21 nt, Homo sapiens
uuuagguagcuuuucugggag

SEQ ID NO: 33719 - RNA, 22 nt, Homo sapiens
caugaaagugagaaacuccugg

SEQ ID NO: 33720 - RNA, 22 nt, Homo sapiens
cacuguggauggaacuauguga

SEQ ID NO: 33721 - RNA, 22 nt, Homo sapiens
auacaaguuauuugaacugcgg

SEQ ID NO: 33722 - RNA, 22 nt, Homo sapiens
agaugauguuuacugagcauca

SEQ ID NO: 33723 - RNA, 18 nt, Homo sapiens
auugcacuccugccuggg

SEQ ID NO: 33724 - RNA, 22 nt, Homo sapiens
ucauauugcgguucauugacuu

SEQ ID NO: 33725 - RNA, 22 nt, Homo sapiens
gaggcaagaguaguuaaguuag

SEQ ID NO: 33726 - RNA, 22 nt, Homo sapiens
ggggaauguuaaagaauuugca

SEQ ID NO: 33727 - RNA, 22 nt, Homo sapiens
gggcaacauugaguacccugaa

SEQ ID NO: 33728 - RNA, 22 nt, Homo sapiens
uacccucuggauacccuuguuc

SEQ ID NO: 33729 - RNA, 22 nt, Homo sapiens
uccuguaaucccagcuaccaga

SEQ ID NO: 33730 - RNA, 22 nt, Homo sapiens
cauggcuuuauuuucagcuucu

SEQ ID NO: 33731 - RNA, 22 nt, Homo sapiens
guugguuuccuguaacuggaca

SEQ ID NO: 33732 - RNA, 22 nt, Homo sapiens
aucauccagccccagaagggag

SEQ ID NO: 33733 - RNA, 21 nt, Homo sapiens
gugcaaacaucauagaaugua

SEQ ID NO: 33734 - RNA, 22 nt, Homo sapiens
ucacaguccuguuuaggagagg

SEQ ID NO: 33735 - RNA, 22 nt, Homo sapiens
uggaagauucuagaagauucca

SEQ ID NO: 33736 - RNA, 22 nt, Homo sapiens
uucagugucauuaacacaguag

SEQ ID NO: 33737 - RNA, 22 nt, Homo sapiens
aucuuuggauacuugauauagu

SEQ ID NO: 33738 - RNA, 22 nt, Homo sapiens
uucagcuacuugggaggcugaa

SEQ ID NO: 33739 - RNA, 22 nt, Homo sapiens
ucauugcacuccagccugggug

SEQ ID NO: 33740 - RNA, 22 nt, Homo sapiens
aaguggcauugaggaaaaaaau

SEQ ID NO: 33741 - RNA, 22 nt, Homo sapiens
uucuacuucauuaggaggauug

SEQ ID NO: 33742 - RNA, 22 nt, Homo sapiens
ugagaucuuuuguggcugagaa

SEQ ID NO: 33743 - RNA, 22 nt, Homo sapiens
auggcuguuccugggaguucua

SEQ ID NO: 33744 - RNA, 22 nt, Homo sapiens
acuuuuugauggggagaacauu

SEQ ID NO: 33745 - RNA, 22 nt, Homo sapiens
uagugaauguuggcuauuaaua

SEQ ID NO: 33746 - RNA, 22 nt, Homo sapiens
gucucugguugcuuuuguacca

SEQ ID NO: 33747 - RNA, 22 nt, Homo sapiens
cucaguguuaaggccaccucug

SEQ ID NO: 33748 - RNA, 22 nt, Homo sapiens
aaguugguguaugagacagaag

SEQ ID NO: 33749 - RNA, 22 nt, Homo sapiens
aucgcacuccauccugggcaac

SEQ ID NO: 33750 - RNA, 22 nt, Homo sapiens
ucugucuuguccucacccuaga

SEQ ID NO: 33751 - RNA, 22 nt, Homo sapiens
augaagcuagcugauugcugau

SEQ ID NO: 33752 - RNA, 22 nt, Homo sapiens
uauugcaauuggcagagugcua

SEQ ID NO: 33753 - RNA, 22 nt, Homo sapiens
auugcacuccagccugggcgac

SEQ ID NO: 33754 - RNA, 22 nt, Homo sapiens
auguaacugggacacaagccuc

SEQ ID NO: 33755 - RNA, 22 nt, Homo sapiens
uucagauugcauaccgaaagua

SEQ ID NO: 33756 - RNA, 22 nt, Homo sapiens
augcaacugcacuccagccugg

SEQ ID NO: 33757 - RNA, 22 nt, Homo sapiens
uugaguccauucgaugcugauu

SEQ ID NO: 33758 - RNA, 20 nt, Homo sapiens
cguugcacuccagccugggc

SEQ ID NO: 33759 - RNA, 22 nt, Homo sapiens
ugacaagauauggucuuaucaa

SEQ ID NO: 33760 - RNA, 22 nt, Homo sapiens
uugcacuauuaguauagauguc

SEQ ID NO: 33761 - RNA, 22 nt, Homo sapiens
uuacagcagugccccacuccca

SEQ ID NO: 33762 - RNA, 22 nt, Homo sapiens
gcugcuuuugaugacaaaaaca

SEQ ID NO: 33763 - RNA, 22 nt, Homo sapiens
gaugauguugaauguucucacc

SEQ ID NO: 33764 - RNA, 22 nt, Homo sapiens
guggaaaucucugugugacuua

SEQ ID NO: 33765 - RNA, 22 nt, Homo sapiens
uuggaaacaccuggugagguua

SEQ ID NO: 33766 - RNA, 22 nt, Homo sapiens
cucuuuggaugccuuaggguua

SEQ ID NO: 33767 - RNA, 22 nt, Homo sapiens
gucauugcacuccagccuggac

SEQ ID NO: 33768 - RNA, 22 nt, Homo sapiens
ucuugcuuguuguucccuucau

SEQ ID NO: 33769 - RNA, 19 nt, Homo sapiens
ugagauuguaugaggagau

SEQ ID NO: 33770 - RNA, 22 nt, Homo sapiens
ugagcaagaucuuuauaauuag

SEQ ID NO: 33771 - RNA, 19 nt, Homo sapiens
uuuuggaaaugugaacagc

SEQ ID NO: 33772 - RNA, 22 nt, Homo sapiens
gucagugucuuaacagagauua

SEQ ID NO: 33773 - RNA, 22 nt, Homo sapiens
gggaaauguaaagucauaagau

SEQ ID NO: 33774 - RNA, 22 nt, Homo sapiens
ggacaagaucuuccaccauuca

SEQ ID NO: 33775 - RNA, 22 nt, Homo sapiens
auggacuuuuuguucagugucu

SEQ ID NO: 33776 - RNA, 22 nt, Homo sapiens
auacauguuucauguuggugug

SEQ ID NO: 33777 - RNA, 22 nt, Homo sapiens
ugagcacuguacuuuaucaggu

SEQ ID NO: 33778 - RNA, 22 nt, Homo sapiens
gugaggcacugcugcuuuccag

SEQ ID NO: 33779 - RNA, 22 nt, Homo sapiens
auccauugucuaaugcuaagau

SEQ ID NO: 33780 - RNA, 22 nt, Homo sapiens
cauacaagcuacaaucacaaag

SEQ ID NO: 33781 - RNA, 22 nt, Homo sapiens
gugugacuagucaugccugaau

SEQ ID NO: 33782 - RNA, 22 nt, Homo sapiens
ugagaugaggucucgcucuguc

SEQ ID NO: 33783 - RNA, 22 nt, Homo sapiens
uaaucucagcuacucaggaggc

SEQ ID NO: 33784 - RNA, 22 nt, Homo sapiens
ucacugugcaugaaggaugcug

SEQ ID NO: 33785 - RNA, 19 nt, Homo sapiens
uucauacagugagagcagc

SEQ ID NO: 33786 - RNA, 22 nt, Homo sapiens
augacagagauaugugaauuuu

SEQ ID NO: 33787 - RNA, 22 nt, Homo sapiens
ugagaccuuucauuucucagug

SEQ ID NO: 33788 - RNA, 22 nt, Homo sapiens
gagcucaccuuaccucuggagc

SEQ ID NO: 33789 - RNA, 22 nt, Homo sapiens
aaccuacauucuuaacuguugc

SEQ ID NO: 33790 - RNA, 22 nt, Homo sapiens
aucugugaaugaaguuauuuug

SEQ ID NO: 33791 - RNA, 22 nt, Homo sapiens
uuugugcaaacuaggauugcga

SEQ ID NO: 33792 - RNA, 22 nt, Homo sapiens
uuauggauuuauauucuguagu

SEQ ID NO: 33793 - RNA, 22 nt, Homo sapiens
acacuuucuagacaagggaaua

SEQ ID NO: 33794 - RNA, 22 nt, Homo sapiens
uaaguacuuuacagacauuauc

SEQ ID NO: 33795 - RNA, 23 nt, Homo sapiens
ucacacuuaagagaaaugcagcu

SEQ ID NO: 33796 - RNA, 22 nt, Homo sapiens
aucuuuggugcaugauacuuug

SEQ ID NO: 33797 - RNA, 22 nt, Homo sapiens
aaacugcuuuccaugguggcug

SEQ ID NO: 33798 - RNA, 21 nt, Homo sapiens
ucagaagcucccagggaggac

SEQ ID NO: 33799 - RNA, 22 nt, Homo sapiens
uuugaaaguaauuugguuggug

SEQ ID NO: 33800 - RNA, 18 nt, Homo sapiens
auugcacaccagccuggg

SEQ ID NO: 33801 - RNA, 22 nt, Homo sapiens
cauugcacuccagccucggcaa

SEQ ID NO: 33802 - RNA, 22 nt, Homo sapiens
uugcuuagucaugaaucacuga

SEQ ID NO: 33803 - RNA, 22 nt, Homo sapiens
uucaguagucuccauagaaccg

SEQ ID NO: 33804 - RNA, 22 nt, Homo sapiens
uaaguauagguaacagaagcaa

SEQ ID NO: 33805 - RNA, 22 nt, Homo sapiens
uaagacuguuggcaauuuuugc

SEQ ID NO: 33806 - RNA, 22 nt, Homo sapiens
cuggaaacaucuuaggaaugca

SEQ ID NO: 33807 - RNA, 22 nt, Homo sapiens
guaaucucagcuacucaggagg

SEQ ID NO: 33808 - RNA, 22 nt, Homo sapiens
uugagccaaggauugucuuucc

SEQ ID NO: 33809 - RNA, 22 nt, Homo sapiens
auaugcaaauccauagagacag

SEQ ID NO: 33810 - RNA, 22 nt, Homo sapiens
uacuguacugcaguucugcaaa

SEQ ID NO: 33811 - RNA, 22 nt, Homo sapiens
guucucacuggacugugaaaau

SEQ ID NO: 33812 - RNA, 22 nt, Homo sapiens
uuguuuuggagaugagcuaaaa

SEQ ID NO: 33813 - RNA, 22 nt, Homo sapiens
auugaacuguuggagagguuuu

SEQ ID NO: 33814 - RNA, 22 nt, Homo sapiens
cuuccaaguggggcacgugcca

SEQ ID NO: 33815 - RNA, 22 nt, Homo sapiens
aaguaaacauuuuguacaauaa

SEQ ID NO: 33816 - RNA, 22 nt, Homo sapiens
cuuugguuaauaggauauggca

SEQ ID NO: 33817 - RNA, 22 nt, Homo sapiens
uugcuccucugccaggaccugu

SEQ ID NO: 33818 - RNA, 22 nt, Homo sapiens
cucaguagaaaauacauggacu

SEQ ID NO: 33819 - RNA, 22 nt, Homo sapiens
auggcagugucuagggguguuu

SEQ ID NO: 33820 - RNA, 22 nt, Homo sapiens
uucucuggucagaggggagguu

SEQ ID NO: 33821 - RNA, 22 nt, Homo sapiens
gccaacauggcgcuccauucuu

SEQ ID NO: 33822 - RNA, 22 nt, Homo sapiens
cuuuacaguuggacucacgagg

SEQ ID NO: 33823 - RNA, 20 nt, Homo sapiens
auuccacuuauaugaggucc

SEQ ID NO: 33824 - RNA, 19 nt, Homo sapiens
uuccugagaacaagggcuu

SEQ ID NO: 33825 - RNA, 21 nt, Homo sapiens
auagcacuucacuugguuaga

SEQ ID NO: 33826 - RNA, 22 nt, Homo sapiens
cuggcucauuucauuuagcaua

SEQ ID NO: 33827 - RNA, 22 nt, Homo sapiens
cauugcacuccagccuggccaa

SEQ ID NO: 33828 - RNA, 22 nt, Homo sapiens
uacaccauuugauucuuuaagc

SEQ ID NO: 33829 - RNA, 22 nt, Homo sapiens
cuuugguuuacuuggugcuagu

SEQ ID NO: 33830 - RNA, 22 nt, Homo sapiens
uucuuuggauaaaguuuuaugc

SEQ ID NO: 33831 - RNA, 22 nt, Homo sapiens
cuauaacagugugguuuggaga

SEQ ID NO: 33832 - RNA, 22 nt, Homo sapiens
cccagaguucuuaaauacugag

SEQ ID NO: 33833 - RNA, 22 nt, Homo sapiens
uggaagaugggaccucaguuuu

SEQ ID NO: 33834 - RNA, 22 nt, Homo sapiens
auggccugaugcaccuguccca

SEQ ID NO: 33835 - RNA, 22 nt, Homo sapiens
acacaguguuuauugugguuag

SEQ ID NO: 33836 - RNA, 22 nt, Homo sapiens
ugaaauuuuuuauucguuggcu

SEQ ID NO: 33837 - RNA, 22 nt, Homo sapiens
aauggcuuuuaauauccauaau

SEQ ID NO: 33838 - RNA, 22 nt, Homo sapiens
uugcauauucucugaggcagga

SEQ ID NO: 33839 - RNA, 22 nt, Homo sapiens
cauggcuuucacaguaaagccu

SEQ ID NO: 33840 - RNA, 20 nt, Homo sapiens
aucucugggcaaaggaaaau

SEQ ID NO: 33841 - RNA, 22 nt, Homo sapiens
uuggcagugguucugacggacc

SEQ ID NO: 33842 - RNA, 22 nt, Homo sapiens
uucaauaugucauuggcaggca

SEQ ID NO: 33843 - RNA, 22 nt, Homo sapiens
uuauugcacuccagccugggua

SEQ ID NO: 33844 - RNA, 22 nt, Homo sapiens
acacuguagcugagggcaugcg

SEQ ID NO: 33845 - RNA, 22 nt, Homo sapiens
uaugacauaguccuuaacccuc

SEQ ID NO: 33846 - RNA, 22 nt, Homo sapiens
uuggaacacauguuuuucuacc

SEQ ID NO: 33847 - RNA, 22 nt, Homo sapiens
cuucuguuaguucugauaacuu

SEQ ID NO: 33848 - RNA, 21 nt, Homo sapiens
ugaacacuggacugagugucc

SEQ ID NO: 33849 - RNA, 22 nt, Homo sapiens
uguuacagugacuaauguuuua

SEQ ID NO: 33850 - RNA, 22 nt, Homo sapiens
gagaaccuccagcaagguagua

SEQ ID NO: 33851 - RNA, 22 nt, Homo sapiens
uuaauagugacucauuuuccac

SEQ ID NO: 33852 - RNA, 18 nt, Homo sapiens
uguggcuguuuuccaaua

SEQ ID NO: 33853 - RNA, 22 nt, Homo sapiens
ugcucaguuuaaaacuuuugag

SEQ ID NO: 33854 - RNA, 22 nt, Homo sapiens
uauggcuucuuuaaauugaggu

SEQ ID NO: 33855 - RNA, 18 nt, Homo sapiens
gacuuggaguuuacagug

SEQ ID NO: 33856 - RNA, 22 nt, Homo sapiens
auagcagaauuuggucaagucu

SEQ ID NO: 33857 - RNA, 22 nt, Homo sapiens
auagaagcugccaacguuucag

SEQ ID NO: 33858 - RNA, 22 nt, Homo sapiens
uaucagcagagucauacuucaa

SEQ ID NO: 33859 - RNA, 22 nt, Homo sapiens
uauacagcaaguuacugugcug

SEQ ID NO: 33860 - RNA, 22 nt, Homo sapiens
ucuaaguaguagcuggucagaa

SEQ ID NO: 33861 - RNA, 23 nt, Homo sapiens
auugcagaaucacagagguagug

SEQ ID NO: 33862 - RNA, 22 nt, Homo sapiens
acaaagugccuccuuuuagagu

SEQ ID NO: 33863 - RNA, 22 nt, Homo sapiens
auggcaguuuauucuaaaucaa

SEQ ID NO: 33864 - RNA, 22 nt, Homo sapiens
aaguuaauguuuaagacuccua

SEQ ID NO: 33865 - RNA, 22 nt, Homo sapiens
auaaagccaugagcuugagaug

SEQ ID NO: 33866 - RNA, 22 nt, Homo sapiens
uccauuugucuauguuucuguu

SEQ ID NO: 33867 - RNA, 22 nt, Homo sapiens
guguuauugagaaauagggugu

SEQ ID NO: 33868 - RNA, 22 nt, Homo sapiens
auggcucuguuccaugugucuu

SEQ ID NO: 33869 - RNA, 22 nt, Homo sapiens
uuaaggaaggagucuuaaaugg

SEQ ID NO: 33870 - RNA, 18 nt, Homo sapiens
aaacugcuuccuuggccu

SEQ ID NO: 33871 - RNA, 22 nt, Homo sapiens
uuugaaccauuugaagaaugau

SEQ ID NO: 33872 - RNA, 22 nt, Homo sapiens
agaaugugaacaucuugaaagu

SEQ ID NO: 33873 - RNA, 22 nt, Homo sapiens
augaggcacugcgcccuacuga

SEQ ID NO: 33874 - RNA, 22 nt, Homo sapiens
uuauacuacuauaaagagguag

SEQ ID NO: 33875 - RNA, 22 nt, Homo sapiens
agcuggcuguggagaaaccccu

SEQ ID NO: 33876 - RNA, 22 nt, Homo sapiens
acacagugucuguguauuuaaa

SEQ ID NO: 33877 - RNA, 22 nt, Homo sapiens
uucuuagucauguaauagucca

SEQ ID NO: 33878 - RNA, 22 nt, Homo sapiens
uauggcuuucuacuugaguucu

SEQ ID NO: 33879 - RNA, 22 nt, Homo sapiens
ucuuuguuggaguccaaggaua

SEQ ID NO: 33880 - RNA, 22 nt, Homo sapiens
aagugguuuuuacaaagacaga

SEQ ID NO: 33881 - RNA, 22 nt, Homo sapiens
auugcacuccagccuaggcaac

SEQ ID NO: 33882 - RNA, 22 nt, Homo sapiens
uauggcuuuguuaacauuuucu

SEQ ID NO: 33883 - RNA, 19 nt, Homo sapiens
uucucugguuguacuaccc

SEQ ID NO: 33884 - RNA, 17 nt, Homo sapiens
cucucugguuuaaagca

SEQ ID NO: 33885 - RNA, 22 nt, Homo sapiens
uucagacugggugaagagggua

SEQ ID NO: 33886 - RNA, 22 nt, Homo sapiens
ugagaucacuaagagguaaugg

SEQ ID NO: 33887 - RNA, 22 nt, Homo sapiens
gagagcauuaagccaucaucau

SEQ ID NO: 33888 - RNA, 22 nt, Homo sapiens
aauaucacaggguguacacuca

SEQ ID NO: 33889 - RNA, 22 nt, Homo sapiens
auugaguaaaaaauagugaugu

SEQ ID NO: 33890 - RNA, 22 nt, Homo sapiens
ggaauggaacaaagucuugaaa

SEQ ID NO: 33891 - RNA, 22 nt, Homo sapiens
ugagaugaacuugauuguuuua

SEQ ID NO: 33892 - RNA, 22 nt, Homo sapiens
uugcuuaggcuggagugcagug

SEQ ID NO: 33893 - RNA, 22 nt, Homo sapiens
cuggaauguuccuaaagauuca

SEQ ID NO: 33894 - RNA, 22 nt, Homo sapiens
ccauugaacaugaaggaaugug

SEQ ID NO: 33895 - RNA, 22 nt, Homo sapiens
uucccuguaucuucugccaugu

SEQ ID NO: 33896 - RNA, 22 nt, Homo sapiens
uggagcccuaguuccucauaac

SEQ ID NO: 33897 - RNA, 22 nt, Homo sapiens
aaccuguaaccauaugaucagu

SEQ ID NO: 33898 - RNA, 22 nt, Homo sapiens
guagcagaauaucagauaauuu

SEQ ID NO: 33899 - RNA, 22 nt, Homo sapiens
aggcaaugugagaguuuauuca

SEQ ID NO: 33900 - RNA, 22 nt, Homo sapiens
uaaguucauucaugaaacuuag

SEQ ID NO: 33901 - RNA, 22 nt, Homo sapiens
gagaucacuguuuauauucucu

SEQ ID NO: 33902 - RNA, 22 nt, Homo sapiens
acacuauugagguuuguuugca

SEQ ID NO: 33903 - RNA, 19 nt, Homo sapiens
ugugacugguugucucgcu

SEQ ID NO: 33904 - RNA, 22 nt, Homo sapiens
uuagguaauauauugcugcuuu

SEQ ID NO: 33905 - RNA, 22 nt, Homo sapiens
gagcugaucuuuauguaaauuc

SEQ ID NO: 33906 - RNA, 22 nt, Homo sapiens
ugucaauauguaauaacugaau

SEQ ID NO: 33907 - RNA, 22 nt, Homo sapiens
uauuugguuggugcaaaaguaa

SEQ ID NO: 33908 - RNA, 22 nt, Homo sapiens
uugcacagugguuuagagccug

SEQ ID NO: 33909 - RNA, 22 nt, Homo sapiens
auauggcuaugugagcauacca

SEQ ID NO: 33910 - RNA, 21 nt, Homo sapiens
uaaaacuguaacuuuguccug

SEQ ID NO: 33911 - RNA, 22 nt, Homo sapiens
cauugcacuccagccugccugg

SEQ ID NO: 33912 - RNA, 22 nt, Homo sapiens
auggaaaugaagggcuggcccu

SEQ ID NO: 33913 - RNA, 22 nt, Homo sapiens
cuggcagucugccucuucacug

SEQ ID NO: 33914 - RNA, 19 nt, Homo sapiens
agaguauuguuacuucucu

SEQ ID NO: 33915 - RNA, 22 nt, Homo sapiens
ugacaagagaccccuccgcagg

SEQ ID NO: 33916 - RNA, 22 nt, Homo sapiens
caugcacugaguccaccucugg

SEQ ID NO: 33917 - RNA, 22 nt, Homo sapiens
ugagaugacgacacaccucagu

SEQ ID NO: 33918 - RNA, 22 nt, Homo sapiens
auagcagacauuucaaggcagg

SEQ ID NO: 33919 - RNA, 22 nt, Homo sapiens
cugaaagagcauguaacacagu

SEQ ID NO: 33920 - RNA, 22 nt, Homo sapiens
gucagugucuuugcagcucaga

SEQ ID NO: 33921 - RNA, 22 nt, Homo sapiens
ugagcccauuguccugguuuau

SEQ ID NO: 33922 - RNA, 22 nt, Homo sapiens
gcuuuguuaaaacacagccaca

SEQ ID NO: 33923 - RNA, 22 nt, Homo sapiens
uugaggucagagguucgagacc

SEQ ID NO: 33924 - RNA, 22 nt, Homo sapiens
auugcacuccagccuggcaaua

SEQ ID NO: 33925 - RNA, 22 nt, Homo sapiens
cugggaugugacuguugccccc

SEQ ID NO: 33926 - RNA, 22 nt, Homo sapiens
cuuugguuaucuagcuguauga

SEQ ID NO: 33927 - RNA, 22 nt, Homo sapiens
agcuggcuguagcugcaagucu

SEQ ID NO: 33928 - RNA, 22 nt, Homo sapiens
ggcaaugucagcuaaugaugga

SEQ ID NO: 33929 - RNA, 20 nt, Homo sapiens
ugagcucaugacauuuuucu

SEQ ID NO: 33930 - RNA, 22 nt, Homo sapiens
uucauacaguggcugcacucca

SEQ ID NO: 33931 - RNA, 22 nt, Homo sapiens
aagugucuuaccgggagggagu

SEQ ID NO: 33932 - RNA, 22 nt, Homo sapiens
agagaugaagauggggcucccg

SEQ ID NO: 33933 - RNA, 22 nt, Homo sapiens
uuguguuuuuaguagggaaggg

SEQ ID NO: 33934 - RNA, 22 nt, Homo sapiens
cucauggagaaccucugcuagg

SEQ ID NO: 33935 - RNA, 21 nt, Homo sapiens
uuaaguaauuacccaacucuc

SEQ ID NO: 33936 - RNA, 22 nt, Homo sapiens
uuauggccauucuuguaggagu

SEQ ID NO: 33937 - RNA, 22 nt, Homo sapiens
cauuuuacuuuccagacgugga

SEQ ID NO: 33938 - RNA, 19 nt, Homo sapiens
ucccugagucuuagcuuga

SEQ ID NO: 33939 - RNA, 22 nt, Homo sapiens
aucuuuggcgggaauaucacag

SEQ ID NO: 33940 - RNA, 22 nt, Homo sapiens
auagcagaagaagggacaauuc

SEQ ID NO: 33941 - RNA, 19 nt, Homo sapiens
aauggcuuuuccuguuccc

SEQ ID NO: 33942 - RNA, 17 nt, Homo sapiens
auguaauccucaucucu

SEQ ID NO: 33943 - RNA, 22 nt, Homo sapiens
uggaaguuaaaugacucuuucu

SEQ ID NO: 33944 - RNA, 22 nt, Homo sapiens
uggcuuuguaagguuucauuuu

SEQ ID NO: 33945 - RNA, 22 nt, Homo sapiens
cauugcacuccagccugcugac

SEQ ID NO: 33946 - RNA, 22 nt, Homo sapiens
uuugugugugauuauaaaaggu

SEQ ID NO: 33947 - RNA, 22 nt, Homo sapiens
ugagaacugguagcacuuguga

SEQ ID NO: 33948 - RNA, 22 nt, Homo sapiens
uauuguacauauccucccuuca

SEQ ID NO: 33949 - RNA, 22 nt, Homo sapiens
gggaauguagcaaaucugcaau

SEQ ID NO: 33950 - RNA, 22 nt, Homo sapiens
uuugguugcauucacauauuuc

SEQ ID NO: 33951 - RNA, 22 nt, Homo sapiens
aagucaaggagagaagcuucag

SEQ ID NO: 33952 - RNA, 22 nt, Homo sapiens
uugagauggagucuugcucugu

SEQ ID NO: 33953 - RNA, 22 nt, Homo sapiens
ugagaugagggaagccuaggca

SEQ ID NO: 33954 - RNA, 22 nt, Homo sapiens
uugaggcaaugaggagaagcug

SEQ ID NO: 33955 - RNA, 22 nt, Homo sapiens
aauaucacaguggguguacacc

SEQ ID NO: 33956 - RNA, 20 nt, Homo sapiens
uggaaucugaagaucucagu

SEQ ID NO: 33957 - RNA, 22 nt, Homo sapiens
aggaagugugcaauuaauuucu

SEQ ID NO: 33958 - RNA, 19 nt, Homo sapiens
uaucacuucccuggaaaca

SEQ ID NO: 33959 - RNA, 22 nt, Homo sapiens
uugacuagaccaucuuucuaga

SEQ ID NO: 33960 - RNA, 22 nt, Homo sapiens
uacaaguauuuuuauuagugcc

SEQ ID NO: 33961 - RNA, 22 nt, Homo sapiens
aucacuuucuauuucugugcca

SEQ ID NO: 33962 - RNA, 22 nt, Homo sapiens
auugcacuccagccugggcaac

SEQ ID NO: 33963 - RNA, 22 nt, Homo sapiens
uucaaaaccucugcuuaagccc

SEQ ID NO: 33964 - RNA, 22 nt, Homo sapiens
auugcacuccagccuugggcaa

SEQ ID NO: 33965 - RNA, 22 nt, Homo sapiens
cacuagagaauagguaguucug

SEQ ID NO: 33966 - RNA, 22 nt, Homo sapiens
agcaagaugaaguugagcuagg

SEQ ID NO: 33967 - RNA, 22 nt, Homo sapiens
cauugcaugccagccugggcaa

SEQ ID NO: 33968 - RNA, 22 nt, Homo sapiens
cuacagcacugagcugugugca

SEQ ID NO: 33969 - RNA, 22 nt, Homo sapiens
guaacacucuaaagggaugcac

SEQ ID NO: 33970 - RNA, 18 nt, Homo sapiens
ggaaaacuuuucuaagua

SEQ ID NO: 33971 - RNA, 18 nt, Homo sapiens
uugcacuccugccugggu

SEQ ID NO: 33972 - RNA, 22 nt, Homo sapiens
uuaguucauugugacuggacuc

SEQ ID NO: 33973 - RNA, 22 nt, Homo sapiens
uuugcuugaggucuagcuaccc

SEQ ID NO: 33974 - RNA, 22 nt, Homo sapiens
uuggaagauuacuuaguuuucu

SEQ ID NO: 33975 - RNA, 22 nt, Homo sapiens
gacuugaagaaucuaagggagg

SEQ ID NO: 33976 - RNA, 20 nt, Homo sapiens
ugagaacaugugguauuugg

SEQ ID NO: 33977 - RNA, 20 nt, Homo sapiens
uagcacacauguagaauagu

SEQ ID NO: 33978 - RNA, 22 nt, Homo sapiens
uuggaaaugguaaaggguuaau

SEQ ID NO: 33979 - RNA, 22 nt, Homo sapiens
auuccacuuacaugaaguaccu

SEQ ID NO: 33980 - RNA, 22 nt, Homo sapiens
caugccacuguggacaaagaca

SEQ ID NO: 33981 - RNA, 22 nt, Homo sapiens
uaagacacuuaaaauguuacau

SEQ ID NO: 33982 - RNA, 22 nt, Homo sapiens
uugagauggagucucgcucugu

SEQ ID NO: 33983 - RNA, 18 nt, Homo sapiens
aaacagugucucuuucug

SEQ ID NO: 33984 - RNA, 22 nt, Homo sapiens
uuccagcugggggcaacucugc

SEQ ID NO: 33985 - RNA, 22 nt, Homo sapiens
cuggcaguguuucuugugggcu

SEQ ID NO: 33986 - RNA, 22 nt, Homo sapiens
auggcuuuaagagugucugaau

SEQ ID NO: 33987 - RNA, 22 nt, Homo sapiens
ugauuugucucucagcccuacu

SEQ ID NO: 33988 - RNA, 22 nt, Homo sapiens
cugagugcaagugauccuccca

SEQ ID NO: 33989 - RNA, 22 nt, Homo sapiens
uacaagcaggaaaugguauaug

SEQ ID NO: 33990 - RNA, 22 nt, Homo sapiens
cacaguugccuaucuccugaag

SEQ ID NO: 33991 - RNA, 22 nt, Homo sapiens
ugcacuguggucugagagacag

SEQ ID NO: 33992 - RNA, 22 nt, Homo sapiens
uggcuuuuauuauguugaggua

SEQ ID NO: 33993 - RNA, 20 nt, Homo sapiens
uggagugaagguucuggacc

SEQ ID NO: 33994 - RNA, 22 nt, Homo sapiens
uugagauggagucucacuccuu

SEQ ID NO: 33995 - RNA, 22 nt, Homo sapiens
gguaaaucuucacuaagacuga

SEQ ID NO: 33996 - RNA, 22 nt, Homo sapiens
auccugaagcuuuacugaauuc

SEQ ID NO: 33997 - RNA, 22 nt, Homo sapiens
acuguauagauggaguugauuu

SEQ ID NO: 33998 - RNA, 22 nt, Homo sapiens
auuacuuugcaccaaccuaaua

SEQ ID NO: 33999 - RNA, 22 nt, Homo sapiens
ugccaacugguuucuuuuaguu

SEQ ID NO: 34000 - RNA, 22 nt, Homo sapiens
aauggcuuucagcuuuucccca

SEQ ID NO: 34001 - RNA, 22 nt, Homo sapiens
uagucacacacucaacuuuuca

SEQ ID NO: 34002 - RNA, 22 nt, Homo sapiens
uggccuguaacgcugucucagc

SEQ ID NO: 34003 - RNA, 22 nt, Homo sapiens
acauucagcuguuguuucaaug

SEQ ID NO: 34004 - RNA, 22 nt, Homo sapiens
uugagauggaguuucgcucuug

SEQ ID NO: 34005 - RNA, 22 nt, Homo sapiens
cauugcacuccagcuugggcaa

SEQ ID NO: 34006 - RNA, 22 nt, Homo sapiens
gaaaacugcuucucuggguuuc

SEQ ID NO: 34007 - RNA, 22 nt, Homo sapiens
agcugauggucuuguaugaugu

SEQ ID NO: 34008 - RNA, 22 nt, Homo sapiens
uaagagagcuccaucuuuuccu

SEQ ID NO: 34009 - RNA, 22 nt, Homo sapiens
auugcacuccagccuggccaac

SEQ ID NO: 34010 - RNA, 22 nt, Homo sapiens
uguagcuuuugagauuuauauu

SEQ ID NO: 34011 - RNA, 22 nt, Homo sapiens
guggaaugaaaacucucucaca

SEQ ID NO: 34012 - RNA, 22 nt, Homo sapiens
auuucuacuccuguguccagaa

SEQ ID NO: 34013 - RNA, 20 nt, Homo sapiens
uaugacaaagccuagugagu

SEQ ID NO: 34014 - RNA, 22 nt, Homo sapiens
ugagcugagaucaugcuauugu

SEQ ID NO: 34015 - RNA, 19 nt, Homo sapiens
gugguauuaccuuuugauu

SEQ ID NO: 34016 - RNA, 22 nt, Homo sapiens
uuucuacagggcuugccaggua

SEQ ID NO: 34017 - RNA, 22 nt, Homo sapiens
ucagagucuagaucacucacug

SEQ ID NO: 34018 - RNA, 22 nt, Homo sapiens
ccuucauucauuaauuuagccc

SEQ ID NO: 34019 - RNA, 22 nt, Homo sapiens
uugcugagucuuucuagguugc

SEQ ID NO: 34020 - RNA, 22 nt, Homo sapiens
uggucuccuuuguacccugggc

SEQ ID NO: 34021 - RNA, 22 nt, Homo sapiens
agaaugugaccuuauuuggaga

SEQ ID NO: 34022 - RNA, 22 nt, Homo sapiens
guggcagugugaggauccugcu

SEQ ID NO: 34023 - RNA, 22 nt, Homo sapiens
cucagugucuggggccccaggg

SEQ ID NO: 34024 - RNA, 22 nt, Homo sapiens
ugagaucugauaggccuggguu

SEQ ID NO: 34025 - RNA, 21 nt, Homo sapiens
ugagaugauccugcaugcaug

SEQ ID NO: 34026 - RNA, 22 nt, Homo sapiens
uagauuguaauaugcagaaugg

SEQ ID NO: 34027 - RNA, 22 nt, Homo sapiens
uucuuugcaugaucucaaaguc

SEQ ID NO: 34028 - RNA, 22 nt, Homo sapiens
uucccagugccaggcacuggga

SEQ ID NO: 34029 - RNA, 22 nt, Homo sapiens
guggcaguuuuaaauaugaaaa

SEQ ID NO: 34030 - RNA, 22 nt, Homo sapiens
augucuuucauagagacccaga

SEQ ID NO: 34031 - RNA, 22 nt, Homo sapiens
uauuguccacuuugcacugugu

SEQ ID NO: 34032 - RNA, 22 nt, Homo sapiens
auugcacuccacccugggcaac

SEQ ID NO: 34033 - RNA, 22 nt, Homo sapiens
auugcacugcagccugggcaac

SEQ ID NO: 34034 - RNA, 22 nt, Homo sapiens
cuugguacucugugucccagcu

SEQ ID NO: 34035 - RNA, 17 nt, Homo sapiens
ugagcuaagauuacccc

SEQ ID NO: 34036 - RNA, 22 nt, Homo sapiens
guggaagaccagacuuuccaac

SEQ ID NO: 34037 - RNA, 22 nt, Homo sapiens
auugcacuccagccugagcaaa

SEQ ID NO: 34038 - RNA, 22 nt, Homo sapiens
ugauauuuuugauccuuaaguu

SEQ ID NO: 34039 - RNA, 22 nt, Homo sapiens
uagacaacugaaacacugugca

SEQ ID NO: 34040 - RNA, 22 nt, Homo sapiens
augacugucagggcagucauug

SEQ ID NO: 34041 - RNA, 22 nt, Homo sapiens
auugcacuccagucugggcaac

SEQ ID NO: 34042 - RNA, 22 nt, Homo sapiens
ucuugguugaaaauucauaaua

SEQ ID NO: 34043 - RNA, 22 nt, Homo sapiens
uauggccccuacaugugcaaaa

SEQ ID NO: 34044 - RNA, 22 nt, Homo sapiens
ggucagaaagacaggcauucag

SEQ ID NO: 34045 - RNA, 22 nt, Homo sapiens
cauugcacuccagcuugggcga

SEQ ID NO: 34046 - RNA, 19 nt, Homo sapiens
auugcacuccaaccugggu

SEQ ID NO: 34047 - RNA, 22 nt, Homo sapiens
auuccacuuccacuaguuucuc

SEQ ID NO: 34048 - RNA, 23 nt, Homo sapiens
uugaggcauguaccaucaauauc

SEQ ID NO: 34049 - RNA, 22 nt, Homo sapiens
uugggagugucucuggacugca

SEQ ID NO: 34050 - RNA, 23 nt, Homo sapiens
ggaaugaaaccugguuaugauau

SEQ ID NO: 34051 - RNA, 22 nt, Homo sapiens
ugugccacugcacuccugccug

SEQ ID NO: 34052 - RNA, 22 nt, Homo sapiens
uucauaguguuuccuuccagug

SEQ ID NO: 34053 - RNA, 22 nt, Homo sapiens
auugcacaucugcacuacagcc

SEQ ID NO: 34054 - RNA, 22 nt, Homo sapiens
uuaacacugccauugauacugu

SEQ ID NO: 34055 - RNA, 22 nt, Homo sapiens
cuuuguaugucaugacaacugu

SEQ ID NO: 34056 - RNA, 22 nt, Homo sapiens
uugagauggaguuuugcucuug

SEQ ID NO: 34057 - RNA, 22 nt, Homo sapiens
ugagauucuuacuccugaguuc

SEQ ID NO: 34058 - RNA, 22 nt, Homo sapiens
cauugcacugcagcccgggcaa

SEQ ID NO: 34059 - RNA, 22 nt, Homo sapiens
aauuaguuggcugggugcggug

SEQ ID NO: 34060 - RNA, 22 nt, Homo sapiens
ucacuuugacggccaacuucua

SEQ ID NO: 34061 - RNA, 22 nt, Homo sapiens
uuauucagcaccugcuguguuc

SEQ ID NO: 34062 - RNA, 22 nt, Homo sapiens
uuggaaauauguuaagugucau

SEQ ID NO: 34063 - RNA, 22 nt, Homo sapiens
auugcacuccagccugggcagc

SEQ ID NO: 34064 - RNA, 22 nt, Homo sapiens
aacacuguuuccagucaugauc

SEQ ID NO: 34065 - RNA, 22 nt, Homo sapiens
ugagaugaagucucacucuguc

SEQ ID NO: 34066 - RNA, 22 nt, Homo sapiens
ugagaucagaaggauuucucug

SEQ ID NO: 34067 - RNA, 22 nt, Homo sapiens
uuuugcaaauuccaguggccau

SEQ ID NO: 34068 - RNA, 20 nt, Homo sapiens
uucuauggugaugaguccug

SEQ ID NO: 34069 - RNA, 22 nt, Homo sapiens
uaugagacugguuaauuuuugu

SEQ ID NO: 34070 - RNA, 22 nt, Homo sapiens
ugauuuguuuagugccaaguuu

SEQ ID NO: 34071 - RNA, 22 nt, Homo sapiens
ugagcugagauuaagcugcugc

SEQ ID NO: 34072 - RNA, 22 nt, Homo sapiens
ugcaauuuaaugugucccaauu

SEQ ID NO: 34073 - RNA, 22 nt, Homo sapiens
guccaagacuaggaguuggcag

SEQ ID NO: 34074 - RNA, 22 nt, Homo sapiens
uugaagacuauaugauucuuca

SEQ ID NO: 34075 - RNA, 19 nt, Homo sapiens
ugagaugaagacagggguu

SEQ ID NO: 34076 - RNA, 22 nt, Homo sapiens
aguaaauuucugugcuuucaua

SEQ ID NO: 34077 - RNA, 22 nt, Homo sapiens
uauggcuuuguucaacagccuc

SEQ ID NO: 34078 - RNA, 22 nt, Homo sapiens
gucuuuggaaagacaaaguuca

SEQ ID NO: 34079 - RNA, 22 nt, Homo sapiens
acaguaugcuuuaaacuuuguu

SEQ ID NO: 34080 - RNA, 23 nt, Homo sapiens
aaagacuagucaggugcaguggu

SEQ ID NO: 34081 - RNA, 22 nt, Homo sapiens
augugcuuauagguguauguuu

SEQ ID NO: 34082 - RNA, 22 nt, Homo sapiens
ugagccaaugauuugaauagag

SEQ ID NO: 34083 - RNA, 22 nt, Homo sapiens
ucaaauguuuguuuaaggcuua

SEQ ID NO: 34084 - RNA, 22 nt, Homo sapiens
gagcuguuuuucacuagaccaa

SEQ ID NO: 34085 - RNA, 22 nt, Homo sapiens
uuaugacauugacaguuuuuag

SEQ ID NO: 34086 - RNA, 21 nt, Homo sapiens
auuccacuuuuccuucaggga

SEQ ID NO: 34087 - RNA, 22 nt, Homo sapiens
auugcacaccagucugggcaaa

SEQ ID NO: 34088 - RNA, 22 nt, Homo sapiens
ugguucaguugcacaggcuguu

SEQ ID NO: 34089 - RNA, 18 nt, Homo sapiens
cuaagacacuuggcagag

SEQ ID NO: 34090 - RNA, 22 nt, Homo sapiens
uggaagacaaguguuagcaugg

SEQ ID NO: 34091 - RNA, 20 nt, Homo sapiens
uaagccacacagucuaaggu

SEQ ID NO: 34092 - RNA, 22 nt, Homo sapiens
gacacagugaagucucuacuug

SEQ ID NO: 34093 - RNA, 22 nt, Homo sapiens
caucgcacuccagccugggcaa

SEQ ID NO: 34094 - RNA, 22 nt, Homo sapiens
aggcaugaaauacaugcauuga

SEQ ID NO: 34095 - RNA, 22 nt, Homo sapiens
auggagacaaauaaaggagagu

SEQ ID NO: 34096 - RNA, 22 nt, Homo sapiens
uuugaguuugaggugcugauga

SEQ ID NO: 34097 - RNA, 21 nt, Homo sapiens
uucaucuggccguauuccagg

SEQ ID NO: 34098 - RNA, 22 nt, Homo sapiens
auggaaacauaagaguauagau

SEQ ID NO: 34099 - RNA, 22 nt, Homo sapiens
cuguucaggaggcauuuggugg

SEQ ID NO: 34100 - RNA, 22 nt, Homo sapiens
ugccaaaaugggcuuuauaccg

SEQ ID NO: 34101 - RNA, 22 nt, Homo sapiens
auuguacuccagccugggcaaa

SEQ ID NO: 34102 - RNA, 22 nt, Homo sapiens
uuccugagccuuguaucuagua

SEQ ID NO: 34103 - RNA, 22 nt, Homo sapiens
ugaauagacacuaaagacugua

SEQ ID NO: 34104 - RNA, 22 nt, Homo sapiens
augucaacauagacaguagagu

SEQ ID NO: 34105 - RNA, 22 nt, Homo sapiens
auugcacuccagccuggggaac

SEQ ID NO: 34106 - RNA, 22 nt, Homo sapiens
cauaaagauggaggaggccagg

SEQ ID NO: 34107 - RNA, 23 nt, Homo sapiens
ucaguacuccacuuucaauagug

SEQ ID NO: 34108 - RNA, 22 nt, Homo sapiens
cuagaguacuuaccacagcaug

SEQ ID NO: 34109 - RNA, 22 nt, Homo sapiens
ugagaugauuuaauggagccca

SEQ ID NO: 34110 - RNA, 22 nt, Homo sapiens
ugcuuaguguugacccucugcc

SEQ ID NO: 34111 - RNA, 18 nt, Homo sapiens
guaaauguaucuauugcc

SEQ ID NO: 34112 - RNA, 22 nt, Homo sapiens
gcuguguugugcccagcaucau

SEQ ID NO: 34113 - RNA, 22 nt, Homo sapiens
uuugccaaucagaggcaucuug

SEQ ID NO: 34114 - RNA, 22 nt, Homo sapiens
auuggcuuuugaaagucugcga

SEQ ID NO: 34115 - RNA, 22 nt, Homo sapiens
ugagaugagucucgcucuguca

SEQ ID NO: 34116 - RNA, 22 nt, Homo sapiens
acugagaucuuuaaauaaauaa

SEQ ID NO: 34117 - RNA, 22 nt, Homo sapiens
ggaaugugugucaugcuuuugc

SEQ ID NO: 34118 - RNA, 22 nt, Homo sapiens
auggcagugagucucuaguauu

SEQ ID NO: 34119 - RNA, 22 nt, Homo sapiens
auagcagaacagugucucacug

SEQ ID NO: 34120 - RNA, 22 nt, Homo sapiens
uucagguaguuuaacuguucca

SEQ ID NO: 34121 - RNA, 22 nt, Homo sapiens
cucauggagaacaucugcuagg

SEQ ID NO: 34122 - RNA, 22 nt, Homo sapiens
ucuacagccaguucaggaagaa

SEQ ID NO: 34123 - RNA, 22 nt, Homo sapiens
uuuuaugggcuauuugcauuag

SEQ ID NO: 34124 - RNA, 21 nt, Homo sapiens
cuuugguagaguuuuuagggu

SEQ ID NO: 34125 - RNA, 22 nt, Homo sapiens
uguggaguguaugugacagaga

SEQ ID NO: 34126 - RNA, 22 nt, Homo sapiens
uacaguguuuugguauuccaca

SEQ ID NO: 34127 - RNA, 22 nt, Homo sapiens
augacauugaugcucuggcugg

SEQ ID NO: 34128 - RNA, 22 nt, Homo sapiens
gagcucauuguugcuaaagaga

SEQ ID NO: 34129 - RNA, 22 nt, Homo sapiens
uugagauggaguuucgcucuuu

SEQ ID NO: 34130 - RNA, 22 nt, Homo sapiens
uuggcagugcccgaugcugggg

SEQ ID NO: 34131 - RNA, 23 nt, Homo sapiens
uuuggcauuccagaaauuuucau

SEQ ID NO: 34132 - RNA, 22 nt, Homo sapiens
aaugcuguucuuugcuuaaguu

SEQ ID NO: 34133 - RNA, 22 nt, Homo sapiens
aaucacuuugcuacaaggcagu

SEQ ID NO: 34134 - RNA, 22 nt, Homo sapiens
uuggcagucugaggcacagacu

SEQ ID NO: 34135 - RNA, 22 nt, Homo sapiens
augugacuuuuuccugugccuu

SEQ ID NO: 34136 - RNA, 22 nt, Homo sapiens
uuaccugagaaggugacauuug

SEQ ID NO: 34137 - RNA, 22 nt, Homo sapiens
uuucauggaggcauuuuagauu

SEQ ID NO: 34138 - RNA, 23 nt, Homo sapiens
aucagguuguagaauguguuugc

SEQ ID NO: 34139 - RNA, 22 nt, Homo sapiens
ucugucuugugguuugagugcc

SEQ ID NO: 34140 - RNA, 22 nt, Homo sapiens
uuaauacugcuuaacuuuagga

SEQ ID NO: 34141 - RNA, 22 nt, Homo sapiens
cucaguguuucagcugcucaga

SEQ ID NO: 34142 - RNA, 22 nt, Homo sapiens
uggaagauggaguuuuaucauu

SEQ ID NO: 34143 - RNA, 22 nt, Homo sapiens
auggcaguuuggucucugugcu

SEQ ID NO: 34144 - RNA, 22 nt, Homo sapiens
agaacuguccauucagcaugaa

SEQ ID NO: 34145 - RNA, 22 nt, Homo sapiens
uaucacuuugauaguuuaaaug

SEQ ID NO: 34146 - RNA, 22 nt, Homo sapiens
ugagaugaagcuagaagaaugg

SEQ ID NO: 34147 - RNA, 22 nt, Homo sapiens
cauggcuuuaagcaacaccaag

SEQ ID NO: 34148 - RNA, 19 nt, Homo sapiens
cucuuuggugucucuucuu

SEQ ID NO: 34149 - RNA, 22 nt, Homo sapiens
ugaaggcaggagggagaaaagu

SEQ ID NO: 34150 - RNA, 22 nt, Homo sapiens
ugagaugagggcugcacucaaa

SEQ ID NO: 34151 - RNA, 22 nt, Homo sapiens
uucuacaugggucgucggugag

SEQ ID NO: 34152 - RNA, 22 nt, Homo sapiens
ucuggaauguaaaguuuauggg

SEQ ID NO: 34153 - RNA, 22 nt, Homo sapiens
ugugagacugguucugaaccca

SEQ ID NO: 34154 - RNA, 22 nt, Homo sapiens
uguggccuuuguuucaguuggg

SEQ ID NO: 34155 - RNA, 22 nt, Homo sapiens
cauugcacuccagccuagccaa

SEQ ID NO: 34156 - RNA, 22 nt, Homo sapiens
uauggccuuuuuaaugauauug

SEQ ID NO: 34157 - RNA, 22 nt, Homo sapiens
gaugagaugagcauuugaauug

SEQ ID NO: 34158 - RNA, 19 nt, Homo sapiens
uaugcaacuuauagugcug

SEQ ID NO: 34159 - RNA, 22 nt, Homo sapiens
cauugcacuccagucugggcaa

SEQ ID NO: 34160 - RNA, 22 nt, Homo sapiens
uguaacaggaggaaaaugugaa

SEQ ID NO: 34161 - RNA, 17 nt, Homo sapiens
gucuuugguugaguuua

SEQ ID NO: 34162 - RNA, 22 nt, Homo sapiens
ggcaagaacuucacucacuuuu

SEQ ID NO: 34163 - RNA, 22 nt, Homo sapiens
ugagcugagacaauaaguuuuu

SEQ ID NO: 34164 - RNA, 22 nt, Homo sapiens
uacagucauaaugccuagugac

SEQ ID NO: 34165 - RNA, 22 nt, Homo sapiens
uggagugaaaacacacuaaucu

SEQ ID NO: 34166 - RNA, 22 nt, Homo sapiens
uuggacuucucaaggcaauaaa

SEQ ID NO: 34167 - RNA, 22 nt, Homo sapiens
agaagaacauagggugacugaa

SEQ ID NO: 34168 - RNA, 22 nt, Homo sapiens
uugacauguaaguacucuauag

SEQ ID NO: 34169 - RNA, 22 nt, Homo sapiens
ucuuucacuuagcaugauguuu

SEQ ID NO: 34170 - RNA, 22 nt, Homo sapiens
caucacuuuuccuuuuacagau

SEQ ID NO: 34171 - RNA, 23 nt, Homo sapiens
caugaacuaguuugcagccauga

SEQ ID NO: 34172 - RNA, 22 nt, Homo sapiens
cauugcacuccagccuggcaac

SEQ ID NO: 34173 - RNA, 22 nt, Homo sapiens
uugguucucuuagccaucuuaa

SEQ ID NO: 34174 - RNA, 22 nt, Homo sapiens
uuccugagagggcugggugcag

SEQ ID NO: 34175 - RNA, 18 nt, Homo sapiens
acauucagcuugaagaua

SEQ ID NO: 34176 - RNA, 22 nt, Homo sapiens
auggcucuggauagaaugcagg

SEQ ID NO: 34177 - RNA, 22 nt, Homo sapiens
uuucuauguugaccagucuaga

SEQ ID NO: 34178 - RNA, 22 nt, Homo sapiens
ugagaucaugucauuugcacuc

SEQ ID NO: 34179 - RNA, 21 nt, Homo sapiens
ugaaugcuuuaaauauuagaa

SEQ ID NO: 34180 - RNA, 22 nt, Homo sapiens
uagcauaauuuguagaaaauca

SEQ ID NO: 34181 - RNA, 22 nt, Homo sapiens
uuugugaggugauggauauguc

SEQ ID NO: 34182 - RNA, 16 nt, Homo sapiens
uugaggcaugucucag

SEQ ID NO: 34183 - RNA, 20 nt, Homo sapiens
uuggaaaugugaauugggag

SEQ ID NO: 34184 - RNA, 22 nt, Homo sapiens
ucacaaguguauagacaugucc

SEQ ID NO: 34185 - RNA, 22 nt, Homo sapiens
uacaaaucuagguuuguuacug

SEQ ID NO: 34186 - RNA, 22 nt, Homo sapiens
caaugguuuuuuaguauaagua

SEQ ID NO: 34187 - RNA, 22 nt, Homo sapiens
ugugccuacugauagagccaag

SEQ ID NO: 34188 - RNA, 22 nt, Homo sapiens
uuugacaaugugugcuuguauu

SEQ ID NO: 34189 - RNA, 22 nt, Homo sapiens
cauugcacuccagccuuggcaa

SEQ ID NO: 34190 - RNA, 22 nt, Homo sapiens
ggagaauugcuuggacccggga

SEQ ID NO: 34191 - RNA, 22 nt, Homo sapiens
ugauuggagaacaaacugcaua

SEQ ID NO: 34192 - RNA, 22 nt, Homo sapiens
ugagaugaugggauaagagggc

SEQ ID NO: 34193 - RNA, 22 nt, Homo sapiens
ugaaacacacauugcccuuuau

SEQ ID NO: 34194 - RNA, 22 nt, Homo sapiens
augagcugauuuccuuaccaua

SEQ ID NO: 34195 - RNA, 22 nt, Homo sapiens
ugugucacugcacuccagccug

SEQ ID NO: 34196 - RNA, 22 nt, Homo sapiens
cuggaauauuagcuggucuuaa

SEQ ID NO: 34197 - RNA, 22 nt, Homo sapiens
agcugguuuauuucuauauccu

SEQ ID NO: 34198 - RNA, 22 nt, Homo sapiens
uugagggaggcagggcuugucu

SEQ ID NO: 34199 - RNA, 22 nt, Homo sapiens
augaugcugagguuugggguau

SEQ ID NO: 34200 - RNA, 20 nt, Homo sapiens
auuccacuuguuugagguac

SEQ ID NO: 34201 - RNA, 22 nt, Homo sapiens
auggcucuuauuauuugaggua

SEQ ID NO: 34202 - RNA, 22 nt, Homo sapiens
auugcacuccagccugggcuag

SEQ ID NO: 34203 - RNA, 22 nt, Homo sapiens
cauugcacucuagccucggcaa

SEQ ID NO: 34204 - RNA, 22 nt, Homo sapiens
gaucacuuugaugccaggaacu

SEQ ID NO: 34205 - RNA, 21 nt, Homo sapiens
guggaaauggaauuuacuaau

SEQ ID NO: 34206 - RNA, 22 nt, Homo sapiens
cuucaucugguuugugaacuuu

SEQ ID NO: 34207 - RNA, 22 nt, Homo sapiens
gcugagaucucuugccugaacu

SEQ ID NO: 34208 - RNA, 22 nt, Homo sapiens
uugcacucuccagccucggcaa

SEQ ID NO: 34209 - RNA, 22 nt, Homo sapiens
ucucuggauaucuacuuauguu

SEQ ID NO: 34210 - RNA, 22 nt, Homo sapiens
uuugcuuguguaaaaaucugga

SEQ ID NO: 34211 - RNA, 22 nt, Homo sapiens
gucuuggagacauugccauuga

SEQ ID NO: 34212 - RNA, 22 nt, Homo sapiens
gucuguuuggggaccuguggcc

SEQ ID NO: 34213 - RNA, 22 nt, Homo sapiens
uugagcaccaugccuggccaug

SEQ ID NO: 34214 - RNA, 22 nt, Homo sapiens
ugugucuccugaaaauucacau

SEQ ID NO: 34215 - RNA, 22 nt, Homo sapiens
auggcuuugggcugcucugccc

SEQ ID NO: 34216 - RNA, 22 nt, Homo sapiens
augugcaagaucauuaaagcuc

SEQ ID NO: 34217 - RNA, 22 nt, Homo sapiens
augcaacuugaaauuuuccgga

SEQ ID NO: 34218 - RNA, 22 nt, Homo sapiens
cacaguguuacugguaugaagu

SEQ ID NO: 34219 - RNA, 22 nt, Homo sapiens
agaauguuuuagaccaauacaa

SEQ ID NO: 34220 - RNA, 22 nt, Homo sapiens
ugugcaaggcucucaaccugug

SEQ ID NO: 34221 - RNA, 22 nt, Homo sapiens
acuuuuguuauacagugugaua

SEQ ID NO: 34222 - RNA, 22 nt, Homo sapiens
aagugaguaauacgucaguugu

SEQ ID NO: 34223 - RNA, 22 nt, Homo sapiens
auucuauaguccuaggauuggg

SEQ ID NO: 34224 - RNA, 22 nt, Homo sapiens
ugagcuguuugaagaagcauuu

SEQ ID NO: 34225 - RNA, 22 nt, Homo sapiens
ugagaccugaucuugguacugc

SEQ ID NO: 34226 - RNA, 22 nt, Homo sapiens
aacagacugucacauaaaauug

SEQ ID NO: 34227 - RNA, 22 nt, Homo sapiens
cugugcauguuguccaauucuu

SEQ ID NO: 34228 - RNA, 22 nt, Homo sapiens
ugacaagaacuuuccauaguaa

SEQ ID NO: 34229 - RNA, 22 nt, Homo sapiens
acacauuagcaagugcuguuau

SEQ ID NO: 34230 - RNA, 22 nt, Homo sapiens
agacaagauggcuugagguuca

SEQ ID NO: 34231 - RNA, 22 nt, Homo sapiens
auugcauaaacacauuucuuau

SEQ ID NO: 34232 - RNA, 22 nt, Homo sapiens
ugagccaugggguaaaugugau

SEQ ID NO: 34233 - RNA, 22 nt, Homo sapiens
agcugguuuaauaugcugucug

SEQ ID NO: 34234 - RNA, 22 nt, Homo sapiens
uuguaaucaacacaucauuggg

SEQ ID NO: 34235 - RNA, 22 nt, Homo sapiens
ugucagaaucuagaggcugcua

SEQ ID NO: 34236 - RNA, 22 nt, Homo sapiens
uugacauaguuucugaaauaga

SEQ ID NO: 34237 - RNA, 22 nt, Homo sapiens
auggcucuuauuauuuugaggu

SEQ ID NO: 34238 - RNA, 17 nt, Homo sapiens
ucuaauaauaugcauuu

SEQ ID NO: 34239 - RNA, 22 nt, Homo sapiens
aagagaugaagguccugacugu

SEQ ID NO: 34240 - RNA, 22 nt, Homo sapiens
aauggcuucuuauugugguuca

SEQ ID NO: 34241 - RNA, 22 nt, Homo sapiens
gcugaaauguuuaauuugggag

SEQ ID NO: 34242 - RNA, 22 nt, Homo sapiens
acacacgugcauguaugcguau

SEQ ID NO: 34243 - RNA, 22 nt, Homo sapiens
agugcaauggugccaucauagc

SEQ ID NO: 34244 - RNA, 22 nt, Homo sapiens
ccuucuuuuguaaggcugaaua

SEQ ID NO: 34245 - RNA, 22 nt, Homo sapiens
cucaguguucccauucuaccuu

SEQ ID NO: 34246 - RNA, 22 nt, Homo sapiens
ugugggaggugcuaauguaaau

SEQ ID NO: 34247 - RNA, 22 nt, Homo sapiens
uaucaguauggauucauggauu

SEQ ID NO: 34248 - RNA, 22 nt, Homo sapiens
ugagaucaagguuaauauaauc

SEQ ID NO: 34249 - RNA, 19 nt, Homo sapiens
aguggguguuuucuguuug

SEQ ID NO: 34250 - RNA, 23 nt, Homo sapiens
ggaaacauccagucuuucaccau

SEQ ID NO: 34251 - RNA, 22 nt, Homo sapiens
auggcaguuucacucugggauu

SEQ ID NO: 34252 - RNA, 22 nt, Homo sapiens
aagugucagaguugcuaaugac

SEQ ID NO: 34253 - RNA, 22 nt, Homo sapiens
uugcauaagugcauucugugau

SEQ ID NO: 34254 - RNA, 22 nt, Homo sapiens
cauugcacuccagccugaggga

SEQ ID NO: 34255 - RNA, 22 nt, Homo sapiens
gcauaaagcuaauaagacgaag

SEQ ID NO: 34256 - RNA, 22 nt, Homo sapiens
auacaagugccauguuggugug

SEQ ID NO: 34257 - RNA, 20 nt, Homo sapiens
uugaggucaggaguuuggga

SEQ ID NO: 34258 - RNA, 17 nt, Homo sapiens
aaguggcuuguucacca

SEQ ID NO: 34259 - RNA, 22 nt, Homo sapiens
cauugcacuccagccuaggcaa

SEQ ID NO: 34260 - RNA, 22 nt, Homo sapiens
aaugcuguguuauuucaugacc

SEQ ID NO: 34261 - RNA, 22 nt, Homo sapiens
ugugacucuggcacauggugag

SEQ ID NO: 34262 - RNA, 22 nt, Homo sapiens
uauggcuuuuaacugucguaug

SEQ ID NO: 34263 - RNA, 22 nt, Homo sapiens
aaaugcuuucuuggaccauuug

SEQ ID NO: 34264 - RNA, 20 nt, Homo sapiens
uucuacagucacaggaagau

SEQ ID NO: 34265 - RNA, 22 nt, Homo sapiens
ggagaugauuaugaaucacuua

SEQ ID NO: 34266 - RNA, 22 nt, Homo sapiens
ugagaugagagaaugcuugccu

SEQ ID NO: 34267 - RNA, 22 nt, Homo sapiens
ggacaagagacugggacacuga

SEQ ID NO: 34268 - RNA, 22 nt, Homo sapiens
gucuguuugauccagaucaaaa

SEQ ID NO: 34269 - RNA, 22 nt, Homo sapiens
agugaaaugucaccuuuuagga

SEQ ID NO: 34270 - RNA, 22 nt, Homo sapiens
uguauguuguaagacuuagacc

SEQ ID NO: 34271 - RNA, 22 nt, Homo sapiens
guguuauuuugcugggaaugau

SEQ ID NO: 34272 - RNA, 22 nt, Homo sapiens
gucuuuggaaaaaaugucuguu

SEQ ID NO: 34273 - RNA, 22 nt, Homo sapiens
cuacagcagcccaguccccgaa

SEQ ID NO: 34274 - RNA, 22 nt, Homo sapiens
augaacagagccuugagaaccu

SEQ ID NO: 34275 - RNA, 22 nt, Homo sapiens
augaggcaggaaaggcguaucu

SEQ ID NO: 34276 - RNA, 22 nt, Homo sapiens
ugucucaguucccuucucugga

SEQ ID NO: 34277 - RNA, 21 nt, Homo sapiens
agcugguuuccacagugugcu

SEQ ID NO: 34278 - RNA, 22 nt, Homo sapiens
uuuguucaccucaaggauggga

SEQ ID NO: 34279 - RNA, 22 nt, Homo sapiens
ggcacgguggcucacgccugua

SEQ ID NO: 34280 - RNA, 22 nt, Homo sapiens
gagcugaucuuuucugauucca

SEQ ID NO: 34281 - RNA, 22 nt, Homo sapiens
augacuuuucugaaaaccacca

SEQ ID NO: 34282 - RNA, 22 nt, Homo sapiens
gaaacugcauuucuaacaagcu

SEQ ID NO: 34283 - RNA, 22 nt, Homo sapiens
uucuuugguacaagggccgacc

SEQ ID NO: 34284 - RNA, 22 nt, Homo sapiens
ccuuggcacuuugccacagugc

SEQ ID NO: 34285 - RNA, 22 nt, Homo sapiens
uuuuaacagccaggggacggcc

SEQ ID NO: 34286 - RNA, 22 nt, Homo sapiens
uuugaguaggcuuauauuuugg

SEQ ID NO: 34287 - RNA, 19 nt, Homo sapiens
ugugaacaucacagagugu

SEQ ID NO: 34288 - RNA, 22 nt, Homo sapiens
ucccugaaaauuagcauuuuaa

SEQ ID NO: 34289 - RNA, 22 nt, Homo sapiens
auggcaguuucagcuauaguuu

SEQ ID NO: 34290 - RNA, 22 nt, Homo sapiens
uuggaaauguguuugcauucag

SEQ ID NO: 34291 - RNA, 22 nt, Homo sapiens
gaaagauuuccugagcuagaaa

SEQ ID NO: 34292 - RNA, 22 nt, Homo sapiens
uauggcuuuucacuuaaguccu

SEQ ID NO: 34293 - RNA, 22 nt, Homo sapiens
uugagaugaaguuuugcucuuu

SEQ ID NO: 34294 - RNA, 22 nt, Homo sapiens
uugagaugaagucuugcucucu

SEQ ID NO: 34295 - RNA, 22 nt, Homo sapiens
ucuaugguuuauuuccaagugu

SEQ ID NO: 34296 - RNA, 22 nt, Homo sapiens
ucugucuuugccuaaguuuguc

SEQ ID NO: 34297 - RNA, 22 nt, Homo sapiens
aggugguuuuaggcagagacau

SEQ ID NO: 34298 - RNA, 22 nt, Homo sapiens
uaguucauuuuucuugcuuaga

SEQ ID NO: 34299 - RNA, 22 nt, Homo sapiens
cauugcacuuagacaacuuuug

SEQ ID NO: 34300 - RNA, 22 nt, Homo sapiens
ugagaugaucaaaguauaggcu

SEQ ID NO: 34301 - RNA, 22 nt, Homo sapiens
auacaucugccauguuggugug

SEQ ID NO: 34302 - RNA, 20 nt, Homo sapiens
uaugacacugucauaaaaau

SEQ ID NO: 34303 - RNA, 22 nt, Homo sapiens
uugcauauguugaaccaagcgu

SEQ ID NO: 34304 - RNA, 21 nt, Homo sapiens
uuuccuggagcguauggcuuc

SEQ ID NO: 34305 - RNA, 22 nt, Homo sapiens
uaaagcauguaauuagguuaga

SEQ ID NO: 34306 - RNA, 22 nt, Homo sapiens
ggcaacaugccgaaaccacguc

SEQ ID NO: 34307 - RNA, 22 nt, Homo sapiens
uuugugauugcacacucaagau

SEQ ID NO: 34308 - RNA, 22 nt, Homo sapiens
uaagacuguguaauuuaugaag

SEQ ID NO: 34309 - RNA, 22 nt, Homo sapiens
ucuaaaacuagauugugaugau

SEQ ID NO: 34310 - RNA, 22 nt, Homo sapiens
cguugcacuccagccugggcaa

SEQ ID NO: 34311 - RNA, 22 nt, Homo sapiens
guacaguuuucaguguucacug

SEQ ID NO: 34312 - RNA, 22 nt, Homo sapiens
ucucuugguugaacaguuugga

SEQ ID NO: 34313 - RNA, 22 nt, Homo sapiens
gagaucauguacuagaacaccu

SEQ ID NO: 34314 - RNA, 22 nt, Homo sapiens
ggcagaauugcugaggaugcua

SEQ ID NO: 34315 - RNA, 22 nt, Homo sapiens
uggaaaacaugcacauuggauu

SEQ ID NO: 34316 - RNA, 22 nt, Homo sapiens
guucaagugauucuacugccuc

SEQ ID NO: 34317 - RNA, 22 nt, Homo sapiens
auuccacuuagugacucauuug

SEQ ID NO: 34318 - RNA, 22 nt, Homo sapiens
uuuagcaaagcaauuuacacca

SEQ ID NO: 34319 - RNA, 22 nt, Homo sapiens
uuggaaacauuuaugguaacag

SEQ ID NO: 34320 - RNA, 22 nt, Homo sapiens
uguagcaaaucgauacuauugg

SEQ ID NO: 34321 - RNA, 22 nt, Homo sapiens
ugagaugagaaucaguucuaau

SEQ ID NO: 34322 - RNA, 22 nt, Homo sapiens
ugacaagaaagcgucuucuuuu

SEQ ID NO: 34323 - RNA, 22 nt, Homo sapiens
auacaugugccauguugguaug

SEQ ID NO: 34324 - RNA, 22 nt, Homo sapiens
ucaagugcauugauucaguauu

SEQ ID NO: 34325 - RNA, 17 nt, Homo sapiens
acagugucuaugaaaug

SEQ ID NO: 34326 - RNA, 22 nt, Homo sapiens
aggugguuuugaugagcaggua

SEQ ID NO: 34327 - RNA, 22 nt, Homo sapiens
uuugccaauauuuuauugagga

SEQ ID NO: 34328 - RNA, 22 nt, Homo sapiens
aucacuuugcucuccagugugg

SEQ ID NO: 34329 - RNA, 21 nt, Homo sapiens
ugcaagaaucaggaagcugcc

SEQ ID NO: 34330 - RNA, 22 nt, Homo sapiens
cuuugguucuguuuauaugcug

SEQ ID NO: 34331 - RNA, 22 nt, Homo sapiens
gaaugcagcagugacagggcug

SEQ ID NO: 34332 - RNA, 20 nt, Homo sapiens
agcuggguguguuggugcau

SEQ ID NO: 34333 - RNA, 22 nt, Homo sapiens
ugagaugaguugcuggcucuga

SEQ ID NO: 34334 - RNA, 22 nt, Homo sapiens
ucagugccucaguuuuuaaaga

SEQ ID NO: 34335 - RNA, 22 nt, Homo sapiens
uuacacaguaggucccuaguaa

SEQ ID NO: 34336 - RNA, 22 nt, Homo sapiens
uggcagaugcucuuggugccca

SEQ ID NO: 34337 - RNA, 22 nt, Homo sapiens
uucuacagugacugcagccaua

SEQ ID NO: 34338 - RNA, 23 nt, Homo sapiens
uuuugcaauaagucacuggaaua

SEQ ID NO: 34339 - RNA, 22 nt, Homo sapiens
acccuguaggacuauucuaauc

SEQ ID NO: 34340 - RNA, 22 nt, Homo sapiens
cuauggcucugucuuuuaaguu

SEQ ID NO: 34341 - RNA, 19 nt, Homo sapiens
cauggcuuauaauuuuaau

SEQ ID NO: 34342 - RNA, 22 nt, Homo sapiens
ugagguagaggugaacuugacc

SEQ ID NO: 34343 - RNA, 22 nt, Homo sapiens
uuauagacacguuguaacaaac

SEQ ID NO: 34344 - RNA, 22 nt, Homo sapiens
gagacauugacuuuguuccaga

SEQ ID NO: 34345 - RNA, 22 nt, Homo sapiens
ugagaucaguuguuauaauucu

SEQ ID NO: 34346 - RNA, 19 nt, Homo sapiens
cauugcacuccacccuggg

SEQ ID NO: 34347 - RNA, 22 nt, Homo sapiens
acuuuguguuacccagcaagga

SEQ ID NO: 34348 - RNA, 22 nt, Homo sapiens
uacacagucaaaaauuuccagg

SEQ ID NO: 34349 - RNA, 22 nt, Homo sapiens
uucaagaauuaaaguggcuuuu

SEQ ID NO: 34350 - RNA, 22 nt, Homo sapiens
uauggcuuuuauuauguuguag

SEQ ID NO: 34351 - RNA, 20 nt, Homo sapiens
ucaaagacauggcugucaga

SEQ ID NO: 34352 - RNA, 22 nt, Homo sapiens
aucccaguucagccucugacac

SEQ ID NO: 34353 - RNA, 22 nt, Homo sapiens
ugagaugaaagcagaaagacuu

SEQ ID NO: 34354 - RNA, 20 nt, Homo sapiens
agguagauagaugauagaua

SEQ ID NO: 34355 - RNA, 22 nt, Homo sapiens
cagagagcuugcccuuguauau

SEQ ID NO: 34356 - RNA, 22 nt, Homo sapiens
uauacaugugccauguuggugu

SEQ ID NO: 34357 - RNA, 22 nt, Homo sapiens
aaggcaauuuguugugaggauu

SEQ ID NO: 34358 - RNA, 22 nt, Homo sapiens
guggaaugcaguguugauucaa

SEQ ID NO: 34359 - RNA, 22 nt, Homo sapiens
cauugcacuccagcucugggcg

SEQ ID NO: 34360 - RNA, 22 nt, Homo sapiens
aaaagcauucagagugcugggc

SEQ ID NO: 34361 - RNA, 22 nt, Homo sapiens
auaaagacacuuggcaugauuu

SEQ ID NO: 34362 - RNA, 22 nt, Homo sapiens
uuaaaaguauaggccuggcaua

SEQ ID NO: 34363 - RNA, 22 nt, Homo sapiens
uauuugguagcuauuuugcagu

SEQ ID NO: 34364 - RNA, 22 nt, Homo sapiens
cauugcacugcauucugggcaa

SEQ ID NO: 34365 - RNA, 22 nt, Homo sapiens
auaaauaguaguugugguggcc

SEQ ID NO: 34366 - RNA, 22 nt, Homo sapiens
uugagaagugucuguucauguc

SEQ ID NO: 34367 - RNA, 22 nt, Homo sapiens
uugagcaaaacauuaauauuag

SEQ ID NO: 34368 - RNA, 22 nt, Homo sapiens
aagacuguaauccaucuugagu

SEQ ID NO: 34369 - RNA, 23 nt, Homo sapiens
uuaguaaacucaaugacaccaca

SEQ ID NO: 34370 - RNA, 22 nt, Homo sapiens
uuuuggcacuuugucugauucu

SEQ ID NO: 34371 - RNA, 22 nt, Homo sapiens
uuuugguucaauuaauuugcua

SEQ ID NO: 34372 - RNA, 22 nt, Homo sapiens
uuuugugacuauuguaaauggg

SEQ ID NO: 34373 - RNA, 22 nt, Homo sapiens
uuugaagacuacugggagugaa

SEQ ID NO: 34374 - RNA, 22 nt, Homo sapiens
uuuugcaguuacagagagugag

SEQ ID NO: 34375 - RNA, 19 nt, Homo sapiens
uuuugcucuuuauaccuau

SEQ ID NO: 34376 - RNA, 22 nt, Homo sapiens
uuugcuauagugaauagugcug

SEQ ID NO: 34377 - RNA, 22 nt, Homo sapiens
uuagaacagugcucaccacaaa

SEQ ID NO: 34378 - RNA, 22 nt, Homo sapiens
uuagaacaguguuugccucgcu

SEQ ID NO: 34379 - RNA, 22 nt, Homo sapiens
uuaccagucuagggcucaguuu

SEQ ID NO: 34380 - RNA, 22 nt, Homo sapiens
uuaaucuguucucuguauucua

SEQ ID NO: 34381 - RNA, 22 nt, Homo sapiens
uuaauagcaaagaguuuagacu

SEQ ID NO: 34382 - RNA, 22 nt, Homo sapiens
uuaaguuaggcuucagcagucu

SEQ ID NO: 34383 - RNA, 22 nt, Homo sapiens
ugugguuuuauaaacgugaccu

SEQ ID NO: 34384 - RNA, 22 nt, Homo sapiens
ugugucuugaauuuuguaugua

SEQ ID NO: 34385 - RNA, 22 nt, Homo sapiens
uguguacaucucuacacacaug

SEQ ID NO: 34386 - RNA, 22 nt, Homo sapiens
uguguagagaaauauuacuuau

SEQ ID NO: 34387 - RNA, 22 nt, Homo sapiens
ugugcacauugugcagguugau

SEQ ID NO: 34388 - RNA, 22 nt, Homo sapiens
ugugcauaugucuuuauaguag

SEQ ID NO: 34389 - RNA, 22 nt, Homo sapiens
ugugguagugcuuaccugcagu

SEQ ID NO: 34390 - RNA, 23 nt, Homo sapiens
ugugguauuauuccauuuauagg

SEQ ID NO: 34391 - RNA, 22 nt, Homo sapiens
uuaugguuuuuagcagaguaau

SEQ ID NO: 34392 - RNA, 22 nt, Homo sapiens
uuaugguuguuaucuugguucg

SEQ ID NO: 34393 - RNA, 22 nt, Homo sapiens
uuauggauuuauauucuguagu

SEQ ID NO: 34394 - RNA, 22 nt, Homo sapiens
uucacccugguuguagauggac

SEQ ID NO: 34395 - RNA, 22 nt, Homo sapiens
uuagaugaaugucucuuaaaca

SEQ ID NO: 34396 - RNA, 18 nt, Homo sapiens
uuagagugcauuacuuug

SEQ ID NO: 34397 - RNA, 22 nt, Homo sapiens
uuaucucagugaacugagugga

SEQ ID NO: 34398 - RNA, 22 nt, Homo sapiens
uuaugacaggcucaggagcccc

SEQ ID NO: 34399 - RNA, 22 nt, Homo sapiens
uuaugacauugacaguuuuuag

SEQ ID NO: 34400 - RNA, 22 nt, Homo sapiens
uuaugcaucuuccacacucauu

SEQ ID NO: 34401 - RNA, 20 nt, Homo sapiens
uuauagcuacaucuugacug

SEQ ID NO: 34402 - RNA, 22 nt, Homo sapiens
uuauagcuaacaucugugaaaa

SEQ ID NO: 34403 - RNA, 22 nt, Homo sapiens
uggcgggaaaguugggagaaga

SEQ ID NO: 34404 - RNA, 22 nt, Homo sapiens
uggcucuuucuagacuuaauua

SEQ ID NO: 34405 - RNA, 22 nt, Homo sapiens
uggcuguuuauuucaccugggu

SEQ ID NO: 34406 - RNA, 22 nt, Homo sapiens
uggcuguuuauuucaccugggc

SEQ ID NO: 34407 - RNA, 22 nt, Homo sapiens
uggcuguuuauuucaccuggau

SEQ ID NO: 34408 - RNA, 22 nt, Homo sapiens
uggcuguuguuacuaacaguuc

SEQ ID NO: 34409 - RNA, 22 nt, Homo sapiens
uguaaaaagcccagccgcugag

SEQ ID NO: 34410 - RNA, 22 nt, Homo sapiens
uguaaacauguauguguuuaug

SEQ ID NO: 34411 - RNA, 23 nt, Homo sapiens
uguaaaagcauuugucagccugg

SEQ ID NO: 34412 - RNA, 22 nt, Homo sapiens
ugguuguuuuaaaugucgucug

SEQ ID NO: 34413 - RNA, 19 nt, Homo sapiens
uguacacuguaaaccugug

SEQ ID NO: 34414 - RNA, 19 nt, Homo sapiens
uguaccagcaagucuuuuc

SEQ ID NO: 34415 - RNA, 22 nt, Homo sapiens
uguaauguuugguagguuaggu

SEQ ID NO: 34416 - RNA, 22 nt, Homo sapiens
uguaaaccauauauguauguag

SEQ ID NO: 34417 - RNA, 22 nt, Homo sapiens
uguaaaucuauuuuuaguguuu

SEQ ID NO: 34418 - RNA, 22 nt, Homo sapiens
uguaaaucugguuaauuggaua

SEQ ID NO: 34419 - RNA, 20 nt, Homo sapiens
uguaacacauggagaacucu

SEQ ID NO: 34420 - RNA, 22 nt, Homo sapiens
uguauauguuuguacauauguc

SEQ ID NO: 34421 - RNA, 22 nt, Homo sapiens
uguagguguacauacaugguua

SEQ ID NO: 34422 - RNA, 22 nt, Homo sapiens
uguagucauuuggaguccagcu

SEQ ID NO: 34423 - RNA, 22 nt, Homo sapiens
uguagcuuuugagauuuauauu

SEQ ID NO: 34424 - RNA, 22 nt, Homo sapiens
uguagcaaaucgauacuauugg

SEQ ID NO: 34425 - RNA, 22 nt, Homo sapiens
uguauguuucuuaggccugaga

SEQ ID NO: 34426 - RNA, 22 nt, Homo sapiens
uguauguuguaagacuuagacc

SEQ ID NO: 34427 - RNA, 22 nt, Homo sapiens
uguauguugggucaaaguacau

SEQ ID NO: 34428 - RNA, 22 nt, Homo sapiens
uguauguugauguuauauucug

SEQ ID NO: 34429 - RNA, 22 nt, Homo sapiens
ugucaaauucuggguuaaaaca

SEQ ID NO: 34430 - RNA, 22 nt, Homo sapiens
ugucaagaaaucaaggugugag

SEQ ID NO: 34431 - RNA, 22 nt, Homo sapiens
ugucaauauguaauaacugaau

SEQ ID NO: 34432 - RNA, 21 nt, Homo sapiens
ugucaagugggaaaacaugua

SEQ ID NO: 34433 - RNA, 22 nt, Homo sapiens
ugucaagaugguuugauguugu

SEQ ID NO: 34434 - RNA, 18 nt, Homo sapiens
ugucacuggauaaugguc

SEQ ID NO: 34435 - RNA, 22 nt, Homo sapiens
ugucagcacaacucagguuccu

SEQ ID NO: 34436 - RNA, 22 nt, Homo sapiens
ugucacagagauuuugguaugu

SEQ ID NO: 34437 - RNA, 22 nt, Homo sapiens
ugucaaugggaauuuguuuuag

SEQ ID NO: 34438 - RNA, 22 nt, Homo sapiens
ugugaguguguacuaguuauca

SEQ ID NO: 34439 - RNA, 22 nt, Homo sapiens
ugugagacugacagggcagggu

SEQ ID NO: 34440 - RNA, 22 nt, Homo sapiens
uguccguuuuggcuuucucccu

SEQ ID NO: 34441 - RNA, 22 nt, Homo sapiens
ugugacuaguggugaaugacgc

SEQ ID NO: 34442 - RNA, 22 nt, Homo sapiens
ugucuguuugcgaaauugcuuc

SEQ ID NO: 34443 - RNA, 22 nt, Homo sapiens
uugcagcauucugguuccuggu

SEQ ID NO: 34444 - RNA, 22 nt, Homo sapiens
uugcacauuuuuucuggcagaa

SEQ ID NO: 34445 - RNA, 22 nt, Homo sapiens
uugcaccccuacuauuugccaa

SEQ ID NO: 34446 - RNA, 22 nt, Homo sapiens
uugcacauggcuggggaggccu

SEQ ID NO: 34447 - RNA, 22 nt, Homo sapiens
uugcaccuugaagccaauagca

SEQ ID NO: 34448 - RNA, 22 nt, Homo sapiens
uugcacuccauccuggguugac

SEQ ID NO: 34449 - RNA, 22 nt, Homo sapiens
uugcacaauccugugagugagu

SEQ ID NO: 34450 - RNA, 22 nt, Homo sapiens
uugcaaacaucuuguuucacau

SEQ ID NO: 34451 - RNA, 22 nt, Homo sapiens
uugauguugaggacauaaaccu

SEQ ID NO: 34452 - RNA, 22 nt, Homo sapiens
uugagagcugaugaaagauaaa

SEQ ID NO: 34453 - RNA, 22 nt, Homo sapiens
uugacuuuuauucacucugcua

SEQ ID NO: 34454 - RNA, 22 nt, Homo sapiens
uugacaggaugcucagggccca

SEQ ID NO: 34455 - RNA, 22 nt, Homo sapiens
uugacagagaaaagugugacuu

SEQ ID NO: 34456 - RNA, 22 nt, Homo sapiens
uugacguaggaggauguugaga

SEQ ID NO: 34457 - RNA, 22 nt, Homo sapiens
uugacauauguguguccacaua

SEQ ID NO: 34458 - RNA, 22 nt, Homo sapiens
uugaaguaugaccgcugagaau

SEQ ID NO: 34459 - RNA, 22 nt, Homo sapiens
uugaaguagcauuucaugucua

SEQ ID NO: 34460 - RNA, 22 nt, Homo sapiens
uugaagacuaaguuaucaggau

SEQ ID NO: 34461 - RNA, 22 nt, Homo sapiens
uugaagacuaccuaccauacuu

SEQ ID NO: 34462 - RNA, 22 nt, Homo sapiens
uucuugguuggcaaccaacagu

SEQ ID NO: 34463 - RNA, 22 nt, Homo sapiens
uucauggaauauugaccauuuu

SEQ ID NO: 34464 - RNA, 22 nt, Homo sapiens
uucuugcacuuaacugacauuc

SEQ ID NO: 34465 - RNA, 21 nt, Homo sapiens
uucaucuggccguauuccagg

SEQ ID NO: 34466 - RNA, 22 nt, Homo sapiens
uucaucagggagaaauaauuuc

SEQ ID NO: 34467 - RNA, 22 nt, Homo sapiens
uucauacaguggcugcacucca

SEQ ID NO: 34468 - RNA, 21 nt, Homo sapiens
uuggggaauggagagguuuuc

SEQ ID NO: 34469 - RNA, 22 nt, Homo sapiens
uugggcaauaggaagcaggugg

SEQ ID NO: 34470 - RNA, 22 nt, Homo sapiens
uugguaaaaugaccacagacau

SEQ ID NO: 34471 - RNA, 22 nt, Homo sapiens
uuggaauacucaaaagguuggg

SEQ ID NO: 34472 - RNA, 22 nt, Homo sapiens
uuggaagauuacuuaguuuucu

SEQ ID NO: 34473 - RNA, 22 nt, Homo sapiens
uuggaagcacauuguuuaauua

SEQ ID NO: 34474 - RNA, 22 nt, Homo sapiens
uuggaaaccucugcagguguuu

SEQ ID NO: 34475 - RNA, 22 nt, Homo sapiens
uugcuuuguugucuggggaaua

SEQ ID NO: 34476 - RNA, 22 nt, Homo sapiens
uuguaaagaucauaugcuguuc

SEQ ID NO: 34477 - RNA, 22 nt, Homo sapiens
uuguaaagucugucucagucag

SEQ ID NO: 34478 - RNA, 22 nt, Homo sapiens
uugucacuauaaauaagcauuu

SEQ ID NO: 34479 - RNA, 22 nt, Homo sapiens
uuguaauggagcaaacagguug

SEQ ID NO: 34480 - RNA, 22 nt, Homo sapiens
uuguaagaaucuagcucuuuau

SEQ ID NO: 34481 - RNA, 22 nt, Homo sapiens
uuguacaggaguguaagcuuca

SEQ ID NO: 34482 - RNA, 22 nt, Homo sapiens
uuuauucggcuaggagcuucgg

SEQ ID NO: 34483 - RNA, 19 nt, Homo sapiens
uuucaauguaaggauggag

SEQ ID NO: 34484 - RNA, 23 nt, Homo sapiens
uuuauacguugucauuuaucagg

SEQ ID NO: 34485 - RNA, 21 nt, Homo sapiens
uuuagguagcuuuucugggag

SEQ ID NO: 34486 - RNA, 22 nt, Homo sapiens
uuuagggcaggccuggugguga

SEQ ID NO: 34487 - RNA, 22 nt, Homo sapiens
uuuaguacugcuuuaugugugu

SEQ ID NO: 34488 - RNA, 22 nt, Homo sapiens
uuuauagucaggaacuugagga

SEQ ID NO: 34489 - RNA, 22 nt, Homo sapiens
uuucaccguguuggccaggcug

SEQ ID NO: 34490 - RNA, 22 nt, Homo sapiens
uuguguaguaccucucacauug

SEQ ID NO: 34491 - RNA, 22 nt, Homo sapiens
uuuaagccaggugcaguggcuc

SEQ ID NO: 34492 - RNA, 22 nt, Homo sapiens
uuuaauacugcaucuuuacucu

SEQ ID NO: 34493 - RNA, 17 nt, Homo sapiens
uuuaaugcuaggacucu

SEQ ID NO: 34494 - RNA, 22 nt, Homo sapiens
uuuaaugcacuaggugguguuc

SEQ ID NO: 34495 - RNA, 22 nt, Homo sapiens
uuuaauguuacaguauugguau

SEQ ID NO: 34496 - RNA, 22 nt, Homo sapiens
uuuagcaaagcaauuuacacca

SEQ ID NO: 34497 - RNA, 22 nt, Homo sapiens
uuuacugugggguuucuuagag

SEQ ID NO: 34498 - RNA, 21 nt, Homo sapiens
uugucuagagaaauauaucuc

SEQ ID NO: 34499 - RNA, 22 nt, Homo sapiens
uugugguaggaguugccauguu

SEQ ID NO: 34500 - RNA, 22 nt, Homo sapiens
uugugguaggcauguaagauga

SEQ ID NO: 34501 - RNA, 22 nt, Homo sapiens
uugugguuuuagcacuguggau

SEQ ID NO: 34502 - RNA, 22 nt, Homo sapiens
uugugguugaugaagacugucu

SEQ ID NO: 34503 - RNA, 22 nt, Homo sapiens
uugugguugauacacguaggaa

SEQ ID NO: 34504 - RNA, 22 nt, Homo sapiens
uugucuugcagcuuaggcauca

SEQ ID NO: 34505 - RNA, 22 nt, Homo sapiens
uugugcuuuuuaaauagcuucc

SEQ ID NO: 34506 - RNA, 23 nt, Homo sapiens
uuuugcaauaagucacuggaaua

SEQ ID NO: 34507 - RNA, 22 nt, Homo sapiens
uuuugcaauauguuccugaaua

SEQ ID NO: 34508 - RNA, 22 nt, Homo sapiens
aagguucuugcuugcaugacug

SEQ ID NO: 34509 - RNA, 22 nt, Homo sapiens
aagguaguuuucuuuaaugcug

SEQ ID NO: 34510 - RNA, 22 nt, Homo sapiens
uuuguguccccacccaaacauc

SEQ ID NO: 34511 - RNA, 22 nt, Homo sapiens
uuuuaguugcucagguauucuc

SEQ ID NO: 34512 - RNA, 22 nt, Homo sapiens
uuuuaguggacaaagguauuua

SEQ ID NO: 34513 - RNA, 22 nt, Homo sapiens
aauaaaguaggaggugaggaaa

SEQ ID NO: 34514 - RNA, 21 nt, Homo sapiens
aauacucuagguuaagagagc

SEQ ID NO: 34515 - RNA, 22 nt, Homo sapiens
aauaauggcaccaaagcacaag

SEQ ID NO: 34516 - RNA, 22 nt, Homo sapiens
aagugcuuuacacaugcaugau

SEQ ID NO: 34517 - RNA, 22 nt, Homo sapiens
aagugacuagacuaugaaaccu

SEQ ID NO: 34518 - RNA, 22 nt, Homo sapiens
aagguauuuuugucuauaucuu

SEQ ID NO: 34519 - RNA, 22 nt, Homo sapiens
aagucaguuugggagaagcuau

SEQ ID NO: 34520 - RNA, 22 nt, Homo sapiens
aaguauagcuaugauaaacauu

SEQ ID NO: 34521 - RNA, 22 nt, Homo sapiens
aaguaucaggaauaguuauugg

SEQ ID NO: 34522 - RNA, 22 nt, Homo sapiens
aaguauuaagacuaagaggcuu

SEQ ID NO: 34523 - RNA, 23 nt, Homo sapiens
aagucauggaaucaaaugaggug

SEQ ID NO: 34524 - RNA, 22 nt, Homo sapiens
acacuguacuuauguuuugcag

SEQ ID NO: 34525 - RNA, 22 nt, Homo sapiens
acacuguagcugagggcaugcg

SEQ ID NO: 34526 - RNA, 22 nt, Homo sapiens
acaccuguggucccaguaacuu

SEQ ID NO: 34527 - RNA, 22 nt, Homo sapiens
acacauuagcaagugcuguuau

SEQ ID NO: 34528 - RNA, 22 nt, Homo sapiens
acacaguaaauauugucuccuc

SEQ ID NO: 34529 - RNA, 22 nt, Homo sapiens
aauuaguugucgugagaguggu

SEQ ID NO: 34530 - RNA, 22 nt, Homo sapiens
aauuaguuggcugggugcggug

SEQ ID NO: 34531 - RNA, 22 nt, Homo sapiens
acaauguauauuuuacuguagg

SEQ ID NO: 34532 - RNA, 22 nt, Homo sapiens
aauuaguugaaagucugcuuuu

SEQ ID NO: 34533 - RNA, 22 nt, Homo sapiens
aauccauuugccgucuauccau

SEQ ID NO: 34534 - RNA, 22 nt, Homo sapiens
aauggcaucuacguuaaauguc

SEQ ID NO: 34535 - RNA, 22 nt, Homo sapiens
aauggcauugguccuuuuggau

SEQ ID NO: 34536 - RNA, 22 nt, Homo sapiens
aauggcauuugccagggcaaag

SEQ ID NO: 34537 - RNA, 22 nt, Homo sapiens
aauggcaucuagaguggugaau

SEQ ID NO: 34538 - RNA, 20 nt, Homo sapiens
aauggcauguuggacaacug

SEQ ID NO: 34539 - RNA, 19 nt, Homo sapiens
aauggcuuuuccuguuccc

SEQ ID NO: 34540 - RNA, 22 nt, Homo sapiens
aaugugcuuucuuucacacagu

SEQ ID NO: 34541 - RNA, 22 nt, Homo sapiens
aauaucacaguuggguguacac

SEQ ID NO: 34542 - RNA, 22 nt, Homo sapiens
aauaucacaguggguguacacc

SEQ ID NO: 34543 - RNA, 23 nt, Homo sapiens
aauaucacaguggguguacaccc

SEQ ID NO: 34544 - RNA, 22 nt, Homo sapiens
aauaugucuugaaauuggguaa

SEQ ID NO: 34545 - RNA, 22 nt, Homo sapiens
aauauagcuauguacaugucca

SEQ ID NO: 34546 - RNA, 22 nt, Homo sapiens
aauaucacaggguguacacuca

SEQ ID NO: 34547 - RNA, 22 nt, Homo sapiens
aaucagauuccagugguuggaa

SEQ ID NO: 34548 - RNA, 16 nt, Homo sapiens
aauccauuggcccugc

SEQ ID NO: 34549 - RNA, 22 nt, Homo sapiens
aaucaccaugcacuacagccuu

SEQ ID NO: 34550 - RNA, 22 nt, Homo sapiens
aaucacaguuaguaagggagaa

SEQ ID NO: 34551 - RNA, 22 nt, Homo sapiens
agaaacacagguggaauugcuu

SEQ ID NO: 34552 - RNA, 22 nt, Homo sapiens
acuuuuugcaaccauuuggacc

SEQ ID NO: 34553 - RNA, 21 nt, Homo sapiens
agaaaaucuuaugggaaacau

SEQ ID NO: 34554 - RNA, 22 nt, Homo sapiens
acuuuuugaugaggucguuugu

SEQ ID NO: 34555 - RNA, 22 nt, Homo sapiens
acugcacuucagccuguugaca

SEQ ID NO: 34556 - RNA, 22 nt, Homo sapiens
acugcauaaauauguguaauau

SEQ ID NO: 34557 - RNA, 22 nt, Homo sapiens
acugcacuccagccuugugaca

SEQ ID NO: 34558 - RNA, 22 nt, Homo sapiens
acuccauuuccagagcagcccc

SEQ ID NO: 34559 - RNA, 22 nt, Homo sapiens
acuccauuuggacucugggagg

SEQ ID NO: 34560 - RNA, 21 nt, Homo sapiens
acugauguuugaaauucgcug

SEQ ID NO: 34561 - RNA, 22 nt, Homo sapiens
acccagaguuccuugucuuuca

SEQ ID NO: 34562 - RNA, 21 nt, Homo sapiens
acccccacaccuccuuaguuc

SEQ ID NO: 34563 - RNA, 22 nt, Homo sapiens
accccgagacugccaagaaucc

SEQ ID NO: 34564 - RNA, 22 nt, Homo sapiens
accacagugcuuccugcucacg

SEQ ID NO: 34565 - RNA, 22 nt, Homo sapiens
accaccauugcacugaacuuuc

SEQ ID NO: 34566 - RNA, 22 nt, Homo sapiens
agcacacuggguggcuuaaaca

SEQ ID NO: 34567 - RNA, 22 nt, Homo sapiens
agcagcuuugaucugaaugauu

SEQ ID NO: 34568 - RNA, 22 nt, Homo sapiens
agagaucacugaaucacggggg

SEQ ID NO: 34569 - RNA, 22 nt, Homo sapiens
agauauguuauugauguuaaug

SEQ ID NO: 34570 - RNA, 22 nt, Homo sapiens
agaauguaacucuaugaaggca

SEQ ID NO: 34571 - RNA, 22 nt, Homo sapiens
agaauguauauucuguaguugu

SEQ ID NO: 34572 - RNA, 20 nt, Homo sapiens
auaugcauguguuuucacuu

SEQ ID NO: 34573 - RNA, 22 nt, Homo sapiens
auauccguacaguggaauauua

SEQ ID NO: 34574 - RNA, 22 nt, Homo sapiens
auauccuggagcauuuuugcaa

SEQ ID NO: 34575 - RNA, 22 nt, Homo sapiens
auaucacagguguuuaccugau

SEQ ID NO: 34576 - RNA, 22 nt, Homo sapiens
auacuguuuuacaucauugccu

SEQ ID NO: 34577 - RNA, 22 nt, Homo sapiens
auagaaucaucugugcacuagu

SEQ ID NO: 34578 - RNA, 22 nt, Homo sapiens
auagcagugucccacuccuugg

SEQ ID NO: 34579 - RNA, 22 nt, Homo sapiens
auaacauccuuucuuaucguug

SEQ ID NO: 34580 - RNA, 20 nt, Homo sapiens
auaaauguauagguguacau

SEQ ID NO: 34581 - RNA, 19 nt, Homo sapiens
auaaaugccuacaagggug

SEQ ID NO: 34582 - RNA, 22 nt, Homo sapiens
auaaaugcuuagaucuguauau

SEQ ID NO: 34583 - RNA, 22 nt, Homo sapiens
auaaauaguaguugugguggcc

SEQ ID NO: 34584 - RNA, 22 nt, Homo sapiens
auaaaugcaaugguauuuuuga

SEQ ID NO: 34585 - RNA, 22 nt, Homo sapiens
agugguuuuggaauggaauuca

SEQ ID NO: 34586 - RNA, 22 nt, Homo sapiens
auaccuuuuaggggaacguucu

SEQ ID NO: 34587 - RNA, 22 nt, Homo sapiens
auaagaguaguacauaugagac

SEQ ID NO: 34588 - RNA, 22 nt, Homo sapiens
auacaugcauuugcacgagagu

SEQ ID NO: 34589 - RNA, 22 nt, Homo sapiens
auacaguguucugggaagaagu

SEQ ID NO: 34590 - RNA, 22 nt, Homo sapiens
auacaguguauguauaguacau

SEQ ID NO: 34591 - RNA, 22 nt, Homo sapiens
aguaucacaguggguguauacc

SEQ ID NO: 34592 - RNA, 22 nt, Homo sapiens
aguauguuuugaaaccaagaag

SEQ ID NO: 34593 - RNA, 22 nt, Homo sapiens
agcugugucuucuuaaagauuu

SEQ ID NO: 34594 - RNA, 22 nt, Homo sapiens
aguccaguguuaugaucaguag

SEQ ID NO: 34595 - RNA, 22 nt, Homo sapiens
agugagcugcagucuggggucc

SEQ ID NO: 34596 - RNA, 22 nt, Homo sapiens
agucacaugcauuuucuucaau

SEQ ID NO: 34597 - RNA, 22 nt, Homo sapiens
agucaaguuuuuucagagaaua

SEQ ID NO: 34598 - RNA, 22 nt, Homo sapiens
auggcacagacucuuggucaag

SEQ ID NO: 34599 - RNA, 22 nt, Homo sapiens
auggaacauuauagauguaaaa

SEQ ID NO: 34600 - RNA, 22 nt, Homo sapiens
auggauuuuaggauacaguuga

SEQ ID NO: 34601 - RNA, 22 nt, Homo sapiens
auggaagacuccucuuugggua

SEQ ID NO: 34602 - RNA, 19 nt, Homo sapiens
augauugucuauggaggaa

SEQ ID NO: 34603 - RNA, 22 nt, Homo sapiens
augcaaaucuuaaguaugugug

SEQ ID NO: 34604 - RNA, 22 nt, Homo sapiens
augaaacuggcuaauuuuugua

SEQ ID NO: 34605 - RNA, 22 nt, Homo sapiens
augaaaacaugauuugccuguu

SEQ ID NO: 34606 - RNA, 22 nt, Homo sapiens
augacagcaucugugaaguugu

SEQ ID NO: 34607 - RNA, 22 nt, Homo sapiens
augacagagauaugugaauuuu

SEQ ID NO: 34608 - RNA, 22 nt, Homo sapiens
auccuugagaaaauaaaugacc

SEQ ID NO: 34609 - RNA, 22 nt, Homo sapiens
auccguugcaagggaagaauga

SEQ ID NO: 34610 - RNA, 22 nt, Homo sapiens
aucuguguuuaaggucccagaa

SEQ ID NO: 34611 - RNA, 22 nt, Homo sapiens
aucugugguuguaugcauauua

SEQ ID NO: 34612 - RNA, 22 nt, Homo sapiens
aucugguguauuggugcugggu

SEQ ID NO: 34613 - RNA, 22 nt, Homo sapiens
aucugauggagagcguguggcu

SEQ ID NO: 34614 - RNA, 22 nt, Homo sapiens
aucacugugauuucuacugugc

SEQ ID NO: 34615 - RNA, 22 nt, Homo sapiens
aucacuguuuugaugcucggac

SEQ ID NO: 34616 - RNA, 22 nt, Homo sapiens
auauguaguauggaaacauugu

SEQ ID NO: 34617 - RNA, 22 nt, Homo sapiens
auauguauuuuaacguguaagg

SEQ ID NO: 34618 - RNA, 22 nt, Homo sapiens
aucagaguggguuuuaaaagug

SEQ ID NO: 34619 - RNA, 22 nt, Homo sapiens
cuggacaaaucuggaaagaacc

SEQ ID NO: 34620 - RNA, 22 nt, Homo sapiens
cuggacguugaggcugcaguga

SEQ ID NO: 34621 - RNA, 22 nt, Homo sapiens
cuguaaaguucucauuguagcc

SEQ ID NO: 34622 - RNA, 22 nt, Homo sapiens
cuguaacagaauaaauuuguuu

SEQ ID NO: 34623 - RNA, 22 nt, Homo sapiens
cuggauauguugcaacauuucc

SEQ ID NO: 34624 - RNA, 22 nt, Homo sapiens
cuggauguaaaugaaacuacag

SEQ ID NO: 34625 - RNA, 22 nt, Homo sapiens
cugucuggaggccugcaaauaa

SEQ ID NO: 34626 - RNA, 19 nt, Homo sapiens
cuguuguacuccaggcauu

SEQ ID NO: 34627 - RNA, 22 nt, Homo sapiens
cuguucaggaggcauuuggugg

SEQ ID NO: 34628 - RNA, 22 nt, Homo sapiens
cuucaguucuguaaggacagca

SEQ ID NO: 34629 - RNA, 20 nt, Homo sapiens
cuuaaugcagcauuucucag

SEQ ID NO: 34630 - RNA, 22 nt, Homo sapiens
cuuaaguaguuguggaaugaau

SEQ ID NO: 34631 - RNA, 17 nt, Homo sapiens
cuuguugugguaguuug

SEQ ID NO: 34632 - RNA, 21 nt, Homo sapiens
cuuugguagaguuuuuagggu

SEQ ID NO: 34633 - RNA, 23 nt, Homo sapiens
cuuugguaggaaauuugaauuau

SEQ ID NO: 34634 - RNA, 22 nt, Homo sapiens
cuuugaugagaaaauacuuugu

SEQ ID NO: 34635 - RNA, 22 nt, Homo sapiens
cuauuugguuggugaaaaaagu

SEQ ID NO: 34636 - RNA, 22 nt, Homo sapiens
cuaugguuucuccauaucauca

SEQ ID NO: 34637 - RNA, 22 nt, Homo sapiens
cuagacuagacccaaauugaag

SEQ ID NO: 34638 - RNA, 22 nt, Homo sapiens
cucacggugcaggcuucuggga

SEQ ID NO: 34639 - RNA, 19 nt, Homo sapiens
cucaaagugguauuuggag

SEQ ID NO: 34640 - RNA, 22 nt, Homo sapiens
cugaugaaguauuuguucugga

SEQ ID NO: 34641 - RNA, 22 nt, Homo sapiens
cugauuguuugccucuaaaauc

SEQ ID NO: 34642 - RNA, 22 nt, Homo sapiens
cugauugucaucaauauuauua

SEQ ID NO: 34643 - RNA, 22 nt, Homo sapiens
cugauugucuauuuaguucacu

SEQ ID NO: 34644 - RNA, 22 nt, Homo sapiens
gagugguucuauauguaauugg

SEQ ID NO: 34645 - RNA, 22 nt, Homo sapiens
gagugguuuugauuuauagcug

SEQ ID NO: 34646 - RNA, 22 nt, Homo sapiens
gagugcugagcccacuuccuug

SEQ ID NO: 34647 - RNA, 19 nt, Homo sapiens
gauauguugagcacccuuu

SEQ ID NO: 34648 - RNA, 22 nt, Homo sapiens
gaguauuuuacaucguguaauu

SEQ ID NO: 34649 - RNA, 22 nt, Homo sapiens
gagguugggaugagggauacag

SEQ ID NO: 34650 - RNA, 22 nt, Homo sapiens
gagguuuuagugagucccacug

SEQ ID NO: 34651 - RNA, 22 nt, Homo sapiens
gagaugguacacauacgauucu

SEQ ID NO: 34652 - RNA, 22 nt, Homo sapiens
gagauguaagaauuuauuuguu

SEQ ID NO: 34653 - RNA, 22 nt, Homo sapiens
gaggugauaucucauugugguu

SEQ ID NO: 34654 - RNA, 22 nt, Homo sapiens
gauguguuuaucacccaguccu

SEQ ID NO: 34655 - RNA, 22 nt, Homo sapiens
gaugguuuuucuccgauuuaua

SEQ ID NO: 34656 - RNA, 22 nt, Homo sapiens
gauguguuuuaggaucucagca

SEQ ID NO: 34657 - RNA, 22 nt, Homo sapiens
gauuauagaaguaauggguuua

SEQ ID NO: 34658 - RNA, 22 nt, Homo sapiens
gauuagugacguugagcacugu

SEQ ID NO: 34659 - RNA, 20 nt, Homo sapiens
gcaagcaugaagaguagaga

SEQ ID NO: 34660 - RNA, 22 nt, Homo sapiens
gcaagacaugucuaagguuuaa

SEQ ID NO: 34661 - RNA, 22 nt, Homo sapiens
gaugguuuucaccugcaugcuu

SEQ ID NO: 34662 - RNA, 22 nt, Homo sapiens
gauauuacuuccaauauugcaa

SEQ ID NO: 34663 - RNA, 22 nt, Homo sapiens
gaucacaguuccucacgggcau

SEQ ID NO: 34664 - RNA, 22 nt, Homo sapiens
gauauguuucuucaauaccuag

SEQ ID NO: 34665 - RNA, 22 nt, Homo sapiens
gagaacauuaauaguuaauuuu

SEQ ID NO: 34666 - RNA, 22 nt, Homo sapiens
gagaaccauuuggagaaaaagu

SEQ ID NO: 34667 - RNA, 22 nt, Homo sapiens
gagaucacuucuguauucuaca

SEQ ID NO: 34668 - RNA, 22 nt, Homo sapiens
gagauaguguggguacagcuau

SEQ ID NO: 34669 - RNA, 22 nt, Homo sapiens
gagauacacccagugcagaggc

SEQ ID NO: 34670 - RNA, 22 nt, Homo sapiens
gagaucaaugggauggaauuga

SEQ ID NO: 34671 - RNA, 22 nt, Homo sapiens
gaaugguuuacaaguguaaucu

SEQ ID NO: 34672 - RNA, 21 nt, Homo sapiens
gaauggcaccauuagcauaua

SEQ ID NO: 34673 - RNA, 23 nt, Homo sapiens
cuuuguacagcuugacuacuggg

SEQ ID NO: 34674 - RNA, 23 nt, Homo sapiens
cuuuguccccacccaaaucucau

SEQ ID NO: 34675 - RNA, 22 nt, Homo sapiens
gaauugcacaaaaacugcuugu

SEQ ID NO: 34676 - RNA, 22 nt, Homo sapiens
gacuggagcuguaugugguuac

SEQ ID NO: 34677 - RNA, 22 nt, Homo sapiens
gagaacagagauaauuuuacuu

SEQ ID NO: 34678 - RNA, 23 nt, Homo sapiens
auuccaguggcaauuggagaaac

SEQ ID NO: 34679 - RNA, 22 nt, Homo sapiens
auuccaguggguuuacauccca

SEQ ID NO: 34680 - RNA, 20 nt, Homo sapiens
auuccacuuguuugagguac

SEQ ID NO: 34681 - RNA, 19 nt, Homo sapiens
augugguuagcaugacugc

SEQ ID NO: 34682 - RNA, 22 nt, Homo sapiens
augugguaguuauagugauaag

SEQ ID NO: 34683 - RNA, 23 nt, Homo sapiens
augugguuuuagguguugaacug

SEQ ID NO: 34684 - RNA, 22 nt, Homo sapiens
auguuaagauggaacaugggaa

SEQ ID NO: 34685 - RNA, 18 nt, Homo sapiens
auguuauguuuguagaag

SEQ ID NO: 34686 - RNA, 20 nt, Homo sapiens
auguucuggaggacagaagc

SEQ ID NO: 34687 - RNA, 22 nt, Homo sapiens
auguuguaguaugagucaaaau

SEQ ID NO: 34688 - RNA, 22 nt, Homo sapiens
auuaagugcuugccagugcugg

SEQ ID NO: 34689 - RNA, 22 nt, Homo sapiens
auuaaguuaggauuuugagaua

SEQ ID NO: 34690 - RNA, 22 nt, Homo sapiens
auuaaguaaugguuccaauaau

SEQ ID NO: 34691 - RNA, 22 nt, Homo sapiens
auuaaauguuggacguauacau

SEQ ID NO: 34692 - RNA, 22 nt, Homo sapiens
auguuugguagugaauauggua

SEQ ID NO: 34693 - RNA, 22 nt, Homo sapiens
auggcaguuuggucucugugcu

SEQ ID NO: 34694 - RNA, 22 nt, Homo sapiens
auggccauuacuaagaauguuu

SEQ ID NO: 34695 - RNA, 22 nt, Homo sapiens
auggcugugagaucgacuuauu

SEQ ID NO: 34696 - RNA, 22 nt, Homo sapiens
auugaacaugccauauguacca

SEQ ID NO: 34697 - RNA, 22 nt, Homo sapiens
auugcaguuucaacuccagggc

SEQ ID NO: 34698 - RNA, 20 nt, Homo sapiens
auugcagcaugauuuauaau

SEQ ID NO: 34699 - RNA, 22 nt, Homo sapiens
auugucacuuaaaagugcaugu

SEQ ID NO: 34700 - RNA, 22 nt, Homo sapiens
auuguaguuugcuauggcaaua

SEQ ID NO: 34701 - RNA, 22 nt, Homo sapiens
cacagcacaggcaugaguguca

SEQ ID NO: 34702 - RNA, 22 nt, Homo sapiens
caacugguuuuauacaguuuag

SEQ ID NO: 34703 - RNA, 22 nt, Homo sapiens
cacauguucaggagcacuuaga

SEQ ID NO: 34704 - RNA, 22 nt, Homo sapiens
cacauguuuuagcauggcuguu

SEQ ID NO: 34705 - RNA, 22 nt, Homo sapiens
cacagucuugcaauauugagau

SEQ ID NO: 34706 - RNA, 22 nt, Homo sapiens
auugugauugcugcuaggccua

SEQ ID NO: 34707 - RNA, 22 nt, Homo sapiens
auuuagcaauggagguagugua

SEQ ID NO: 34708 - RNA, 22 nt, Homo sapiens
caaauacuuucauguugucuug

SEQ ID NO: 34709 - RNA, 22 nt, Homo sapiens
caaagucuucucauuaugucuu

SEQ ID NO: 34710 - RNA, 22 nt, Homo sapiens
caucacacuuggauguaagaca

SEQ ID NO: 34711 - RNA, 21 nt, Homo sapiens
caucaaauugucauggugggu

SEQ ID NO: 34712 - RNA, 22 nt, Homo sapiens
cauauaguaggugcucuguguu

SEQ ID NO: 34713 - RNA, 22 nt, Homo sapiens
caucccauucgaggggcacagc

SEQ ID NO: 34714 - RNA, 23 nt, Homo sapiens
cagugcaugacuguauaugcaaa

SEQ ID NO: 34715 - RNA, 22 nt, Homo sapiens
cagugguuuucucaguucagca

SEQ ID NO: 34716 - RNA, 22 nt, Homo sapiens
caccaaccucaguagcaucugu

SEQ ID NO: 34717 - RNA, 22 nt, Homo sapiens
caccacauuccauugaucaggc

SEQ ID NO: 34718 - RNA, 23 nt, Homo sapiens
cagcuggugauuuuaaguugaag

SEQ ID NO: 34719 - RNA, 22 nt, Homo sapiens
caggcauuguauuguaaucccc

SEQ ID NO: 34720 - RNA, 22 nt, Homo sapiens
cagucacagugacaggaugugg

SEQ ID NO: 34721 - RNA, 22 nt, Homo sapiens
caguagcaugccucagaaugag

SEQ ID NO: 34722 - RNA, 22 nt, Homo sapiens
ccccuguaucucagcgucuuca

SEQ ID NO: 34723 - RNA, 22 nt, Homo sapiens
cccugacauucggagauguagu

SEQ ID NO: 34724 - RNA, 22 nt, Homo sapiens
ccuuuuuguaguggaaguagga

SEQ ID NO: 34725 - RNA, 22 nt, Homo sapiens
ccuuuguuuaguugaauuguau

SEQ ID NO: 34726 - RNA, 22 nt, Homo sapiens
cguauccuguuuagcucuccca

SEQ ID NO: 34727 - RNA, 22 nt, Homo sapiens
cggaaugaaaauguccuucagu

SEQ ID NO: 34728 - RNA, 22 nt, Homo sapiens
cuaaaugucucuacuaaguuua

SEQ ID NO: 34729 - RNA, 16 nt, Homo sapiens
cuaaaaugucuacuug

SEQ ID NO: 34730 - RNA, 22 nt, Homo sapiens
cuaaaguauugagugguaaaga

SEQ ID NO: 34731 - RNA, 22 nt, Homo sapiens
cuaacaacacagcagauuagaa

SEQ ID NO: 34732 - RNA, 22 nt, Homo sapiens
caugacacuggcauguuucuuu

SEQ ID NO: 34733 - RNA, 22 nt, Homo sapiens
ccaaguguuuucauuguuccau

SEQ ID NO: 34734 - RNA, 22 nt, Homo sapiens
ccaaguguucucauuguucaau

SEQ ID NO: 34735 - RNA, 22 nt, Homo sapiens
cauuugguggcuacagaguaac

SEQ ID NO: 34736 - RNA, 22 nt, Homo sapiens
ccccggguggauguacauguga

SEQ ID NO: 34737 - RNA, 22 nt, Homo sapiens
ucuuucacuuagcaugauguuu

SEQ ID NO: 34738 - RNA, 22 nt, Homo sapiens
ugaaaguaauugcaguuuuuac

SEQ ID NO: 34739 - RNA, 22 nt, Homo sapiens
ucuuggcauggcugaagauucc

SEQ ID NO: 34740 - RNA, 22 nt, Homo sapiens
ugaaauggugcggucugcagca

SEQ ID NO: 34741 - RNA, 22 nt, Homo sapiens
ugaauauagacagggguagaga

SEQ ID NO: 34742 - RNA, 22 nt, Homo sapiens
ugaaauuauucuuaccaaggug

SEQ ID NO: 34743 - RNA, 23 nt, Homo sapiens
ugacaaccucaugcuuugucaug

SEQ ID NO: 34744 - RNA, 22 nt, Homo sapiens
ugaauucuguccaaaauaacug

SEQ ID NO: 34745 - RNA, 22 nt, Homo sapiens
ugaauguuugcagcuuauacca

SEQ ID NO: 34746 - RNA, 22 nt, Homo sapiens
ugaaugguuuuuagagaacaau

SEQ ID NO: 34747 - RNA, 22 nt, Homo sapiens
ugaauguacacgcguacuuguu

SEQ ID NO: 34748 - RNA, 22 nt, Homo sapiens
ugaauauuugcuacucacucuu

SEQ ID NO: 34749 - RNA, 22 nt, Homo sapiens
ucuggcuuuagcaugugggaag

SEQ ID NO: 34750 - RNA, 22 nt, Homo sapiens
ucuggagugugaaguggauaug

SEQ ID NO: 34751 - RNA, 22 nt, Homo sapiens
ucugugaaugaacacuugaaaa

SEQ ID NO: 34752 - RNA, 22 nt, Homo sapiens
ucuguacugccaaguuucuuua

SEQ ID NO: 34753 - RNA, 22 nt, Homo sapiens
ucuccauugaaauggacauaau

SEQ ID NO: 34754 - RNA, 22 nt, Homo sapiens
uccauuuguucagcuucaggaa

SEQ ID NO: 34755 - RNA, 22 nt, Homo sapiens
ucugacaaugaacaaucuauag

SEQ ID NO: 34756 - RNA, 22 nt, Homo sapiens
ucaguguuuggaaucucaauuu

SEQ ID NO: 34757 - RNA, 22 nt, Homo sapiens
ucauacaggccaccagggaagu

SEQ ID NO: 34758 - RNA, 22 nt, Homo sapiens
ucauaguagucacuuaauaaau

SEQ ID NO: 34759 - RNA, 22 nt, Homo sapiens
ucauaguacuuuguuuugaaaa

SEQ ID NO: 34760 - RNA, 22 nt, Homo sapiens
ucauacuguugugaaacaaaac

SEQ ID NO: 34761 - RNA, 22 nt, Homo sapiens
ucauacuguccaauucuagugg

SEQ ID NO: 34762 - RNA, 22 nt, Homo sapiens
ucagggacuuacaaaccagaag

SEQ ID NO: 34763 - RNA, 22 nt, Homo sapiens
uccauguagaagacaggggaga

SEQ ID NO: 34764 - RNA, 22 nt, Homo sapiens
ucauggggugcuuugcuagauu

SEQ ID NO: 34765 - RNA, 22 nt, Homo sapiens
ucaucuggcgaaugugaagagu

SEQ ID NO: 34766 - RNA, 22 nt, Homo sapiens
ucaccaccuuccaggaccacug

SEQ ID NO: 34767 - RNA, 22 nt, Homo sapiens
ucacugaaaccgccuccaccuc

SEQ ID NO: 34768 - RNA, 22 nt, Homo sapiens
ucaccaccugcugaucauagag

SEQ ID NO: 34769 - RNA, 22 nt, Homo sapiens
ucacugaaaccuccaccucucg

SEQ ID NO: 34770 - RNA, 22 nt, Homo sapiens
ucacugaaaccuccgccuucug

SEQ ID NO: 34771 - RNA, 22 nt, Homo sapiens
ucacuggcaaauauauccguug

SEQ ID NO: 34772 - RNA, 21 nt, Homo sapiens
ucacauggccagaguaggaac

SEQ ID NO: 34773 - RNA, 22 nt, Homo sapiens
ucacauucaauuguaauccccg

SEQ ID NO: 34774 - RNA, 22 nt, Homo sapiens
ucacauggaaaaguccaguaaa

SEQ ID NO: 34775 - RNA, 22 nt, Homo sapiens
ucacagucggugacuucuugcu

SEQ ID NO: 34776 - RNA, 22 nt, Homo sapiens
ucacagucacugucacguugaa

SEQ ID NO: 34777 - RNA, 22 nt, Homo sapiens
ucacagucuccucuagggaggg

SEQ ID NO: 34778 - RNA, 22 nt, Homo sapiens
ucaaaaccucagagaguagagc

SEQ ID NO: 34779 - RNA, 23 nt, Homo sapiens
ucacacuuaagagaaaugcagcu

SEQ ID NO: 34780 - RNA, 20 nt, Homo sapiens
ucacagucacacauaauccu

SEQ ID NO: 34781 - RNA, 22 nt, Homo sapiens
ucacaggguguuauuagaauua

SEQ ID NO: 34782 - RNA, 22 nt, Homo sapiens
uauuugauugacuuuagcagga

SEQ ID NO: 34783 - RNA, 22 nt, Homo sapiens
uauugugcauguugaauaacua

SEQ ID NO: 34784 - RNA, 22 nt, Homo sapiens
uauuguuaaagauguuaaugau

SEQ ID NO: 34785 - RNA, 22 nt, Homo sapiens
uauugacuugaugagggagggu

SEQ ID NO: 34786 - RNA, 22 nt, Homo sapiens
uggauauguucuuuguguaagg

SEQ ID NO: 34787 - RNA, 22 nt, Homo sapiens
uggaguguguugcagaugaagg

SEQ ID NO: 34788 - RNA, 18 nt, Homo sapiens
uggauaguuguuggcaga

SEQ ID NO: 34789 - RNA, 22 nt, Homo sapiens
uggauauguuuauuacccugaa

SEQ ID NO: 34790 - RNA, 22 nt, Homo sapiens
uggauguaauugauucauguug

SEQ ID NO: 34791 - RNA, 19 nt, Homo sapiens
uggcacauguauacuuaug

SEQ ID NO: 34792 - RNA, 22 nt, Homo sapiens
ugcugguaguuuaugacuaauu

SEQ ID NO: 34793 - RNA, 22 nt, Homo sapiens
ugcuucauuggccaccaggaag

SEQ ID NO: 34794 - RNA, 22 nt, Homo sapiens
uggaaugucagcuacaagaggg

SEQ ID NO: 34795 - RNA, 22 nt, Homo sapiens
uggaagucauugagguguguua

SEQ ID NO: 34796 - RNA, 22 nt, Homo sapiens
uggaauaucaugagaguuuguu

SEQ ID NO: 34797 - RNA, 22 nt, Homo sapiens
ugcugcaaacaggcaucugugg

SEQ ID NO: 34798 - RNA, 22 nt, Homo sapiens
ugcugcauuggggauuaaguuu

SEQ ID NO: 34799 - RNA, 19 nt, Homo sapiens
ugcugcauugugaccuugc

SEQ ID NO: 34800 - RNA, 22 nt, Homo sapiens
ugcguaggcuagagugcagugg

SEQ ID NO: 34801 - RNA, 22 nt, Homo sapiens
ugcuagaugcuguagggauuua

SEQ ID NO: 34802 - RNA, 22 nt, Homo sapiens
ugcuaucauugauuagugaugu

SEQ ID NO: 34803 - RNA, 22 nt, Homo sapiens
ugcauuguuuuugguucccagg

SEQ ID NO: 34804 - RNA, 22 nt, Homo sapiens
ugcgauaguuugcugguaaauu

SEQ ID NO: 34805 - RNA, 21 nt, Homo sapiens
ugcaugguagucacaugauuc

SEQ ID NO: 34806 - RNA, 22 nt, Homo sapiens
ugcauguucuuacucauacaug

SEQ ID NO: 34807 - RNA, 22 nt, Homo sapiens
ugcaacacauugccccugcucu

SEQ ID NO: 34808 - RNA, 22 nt, Homo sapiens
ugcaaagucgaaacugcaguuu

SEQ ID NO: 34809 - RNA, 22 nt, Homo sapiens
ugauuggagaacaaacugcaua

SEQ ID NO: 34810 - RNA, 21 nt, Homo sapiens
ugauaugguagaagagagaca

SEQ ID NO: 34811 - RNA, 22 nt, Homo sapiens
ugauauguguaaacaauguaua

SEQ ID NO: 34812 - RNA, 22 nt, Homo sapiens
ugauauguagguggcaagcaua

SEQ ID NO: 34813 - RNA, 22 nt, Homo sapiens
ugaucaaagugcuggaauuaca

SEQ ID NO: 34814 - RNA, 22 nt, Homo sapiens
ugaucacagcuugacuaaagga

SEQ ID NO: 34815 - RNA, 22 nt, Homo sapiens
ugauccccucacauuauuauau

SEQ ID NO: 34816 - RNA, 22 nt, Homo sapiens
ugagguguuugugcaccaucug

SEQ ID NO: 34817 - RNA, 22 nt, Homo sapiens
ugagguguuauccagaguucuu

SEQ ID NO: 34818 - RNA, 22 nt, Homo sapiens
ugaguaguauucuaugguaugu

SEQ ID NO: 34819 - RNA, 22 nt, Homo sapiens
ugaguauagaucaguucaagug

SEQ ID NO: 34820 - RNA, 22 nt, Homo sapiens
ugaguauguuuaaugugacaau

SEQ ID NO: 34821 - RNA, 19 nt, Homo sapiens
ugaguauauuguauucauu

SEQ ID NO: 34822 - RNA, 22 nt, Homo sapiens
ugagauuauauuucuuaacaga

SEQ ID NO: 34823 - RNA, 22 nt, Homo sapiens
ugacaguaucuacagcuucuua

SEQ ID NO: 34824 - RNA, 22 nt, Homo sapiens
ugacaguaaacagucuugauua

SEQ ID NO: 34825 - RNA, 22 nt, Homo sapiens
ugacaagcucccucugcaccuu

SEQ ID NO: 34826 - RNA, 22 nt, Homo sapiens
ugacagaggucuuuuaauagcu

SEQ ID NO: 34827 - RNA, 22 nt, Homo sapiens
ugagagaugauaaaauguuugu

SEQ ID NO: 34828 - RNA, 22 nt, Homo sapiens
ugagagcuuugaugcacuguuu

SEQ ID NO: 34829 - RNA, 22 nt, Homo sapiens
ugagagacaguuuguuaaaauu

SEQ ID NO: 34830 - RNA, 22 nt, Homo sapiens
ugagaucugauaggccuggguu

SEQ ID NO: 34831 - RNA, 22 nt, Homo sapiens
ugagauaaucaugugauuucau

SEQ ID NO: 34832 - RNA, 22 nt, Homo sapiens
ugagauguaaucucgcucuguc

SEQ ID NO: 34833 - RNA, 22 nt, Homo sapiens
uagguaaguaugugugaugggg

SEQ ID NO: 34834 - RNA, 22 nt, Homo sapiens
uaggcuuuucugggaugugggc

SEQ ID NO: 34835 - RNA, 22 nt, Homo sapiens
uagguuauucauucaucauuua

SEQ ID NO: 34836 - RNA, 23 nt, Homo sapiens
uagguuauuugguaaauauaugu

SEQ ID NO: 34837 - RNA, 22 nt, Homo sapiens
uagggcuuuuccaagcugccac

SEQ ID NO: 34838 - RNA, 22 nt, Homo sapiens
uauaaccauuucuucucucuuc

SEQ ID NO: 34839 - RNA, 22 nt, Homo sapiens
uauaagacuagcagcugaauug

SEQ ID NO: 34840 - RNA, 22 nt, Homo sapiens
uagugguaguagcaguaauauu

SEQ ID NO: 34841 - RNA, 22 nt, Homo sapiens
uagcuaaauucagcucuaggua

SEQ ID NO: 34842 - RNA, 21 nt, Homo sapiens
uagcauacauuuugcaucuua

SEQ ID NO: 34843 - RNA, 22 nt, Homo sapiens
uagaauggaaggcauguuugcc

SEQ ID NO: 34844 - RNA, 22 nt, Homo sapiens
uagaauguauaauauuuuacuu

SEQ ID NO: 34845 - RNA, 23 nt, Homo sapiens
uagaauguuuuuccauguuucuu

SEQ ID NO: 34846 - RNA, 22 nt, Homo sapiens
uagcugcauccugugcacucaa

SEQ ID NO: 34847 - RNA, 22 nt, Homo sapiens
uaggacaaugguacagcagaaa

SEQ ID NO: 34848 - RNA, 22 nt, Homo sapiens
uaggacacagauggagaaaagc

SEQ ID NO: 34849 - RNA, 22 nt, Homo sapiens
uaucacagcgggguguacaccc

SEQ ID NO: 34850 - RNA, 22 nt, Homo sapiens
uaucacagcaaggacccauuau

SEQ ID NO: 34851 - RNA, 22 nt, Homo sapiens
uaucaaggccacucauuuuaug

SEQ ID NO: 34852 - RNA, 22 nt, Homo sapiens
uauauguuuucauaaggcuaga

SEQ ID NO: 34853 - RNA, 22 nt, Homo sapiens
uauauguucuugcacuggaaag

SEQ ID NO: 34854 - RNA, 23 nt, Homo sapiens
uaugacagaggaagggggagcug

SEQ ID NO: 34855 - RNA, 22 nt, Homo sapiens
uaucacagcauugucuauaaua

SEQ ID NO: 34856 - RNA, 23 nt, Homo sapiens
uaucucaaugcacagagaggaaa

SEQ ID NO: 34857 - RNA, 22 nt, Homo sapiens
uaucucacauauucaguagguu

SEQ ID NO: 34858 - RNA, 20 nt, Homo sapiens
uaucacauggggagaaaccu

SEQ ID NO: 34859 - RNA, 21 nt, Homo sapiens
uaucacauuggugauuaaguu

SEQ ID NO: 34860 - RNA, 22 nt, Homo sapiens
uauggcauuguuggugaugaua

SEQ ID NO: 34861 - RNA, 22 nt, Homo sapiens
uauggguaguacaaaguguaua

SEQ ID NO: 34862 - RNA, 22 nt, Homo sapiens
uauggcugugacuuaucuuguu

SEQ ID NO: 34863 - RNA, 22 nt, Homo sapiens
uauggcugcuuucacacuacaa

SEQ ID NO: 34864 - RNA, 22 nt, Homo sapiens
uauugaacgugggauauugaag

SEQ ID NO: 34865 - RNA, 22 nt, Homo sapiens
uauugauuuucaguguucagcu

SEQ ID NO: 34866 - RNA, 22 nt, Homo sapiens
uaugggauuucauuaagugucu

SEQ ID NO: 34867 - RNA, 22 nt, Homo sapiens
uauggguuuuucauaaauaggu

SEQ ID NO: 34868 - RNA, 22 nt, Homo sapiens
uaauacuugucauaaaggcauu

SEQ ID NO: 34869 - RNA, 21 nt, Homo sapiens
uaauaaugucucagacaccua

SEQ ID NO: 34870 - RNA, 22 nt, Homo sapiens
uaauagcaguguuacuaggacu

SEQ ID NO: 34871 - RNA, 22 nt, Homo sapiens
uacaggugcucuacagacagga

SEQ ID NO: 34872 - RNA, 22 nt, Homo sapiens
uacaucagccugaaagagcucg

SEQ ID NO: 34873 - RNA, 22 nt, Homo sapiens
uaauacucuucucauuuuacag

SEQ ID NO: 34874 - RNA, 22 nt, Homo sapiens
uaaguguaaugucugaaguuug

SEQ ID NO: 34875 - RNA, 22 nt, Homo sapiens
uacuguguaguuagaccucaga

SEQ ID NO: 34876 - RNA, 21 nt, Homo sapiens
uacuggagauacagucugcaa

SEQ ID NO: 34877 - RNA, 22 nt, Homo sapiens
uacugcauuccaaucugggcga

SEQ ID NO: 34878 - RNA, 22 nt, Homo sapiens
uacugcuuaaaagucaauuacu

SEQ ID NO: 34879 - RNA, 22 nt, Homo sapiens
uaccagcauuucucuuuaagua

SEQ ID NO: 34880 - RNA, 19 nt, Homo sapiens
uaccagcacaguguuugag

SEQ ID NO: 34881 - RNA, 22 nt, Homo sapiens
uaccacccuuuuuccagaagcc

SEQ ID NO: 34882 - RNA, 19 nt, Homo sapiens
uacaugcagcaggcacgca

SEQ ID NO: 34883 - RNA, 22 nt, Homo sapiens
guguaaaucugcugugaacauu

SEQ ID NO: 34884 - RNA, 22 nt, Homo sapiens
guuggcaaguggcugagcuggg

SEQ ID NO: 34885 - RNA, 22 nt, Homo sapiens
guuggcuguuucccccaaguga

SEQ ID NO: 34886 - RNA, 22 nt, Homo sapiens
guuggaauguauugcuacuucu

SEQ ID NO: 34887 - RNA, 22 nt, Homo sapiens
guuggaauuaaaaggcaaguau

SEQ ID NO: 34888 - RNA, 22 nt, Homo sapiens
gugguuuuuaaaguaccugugg

SEQ ID NO: 34889 - RNA, 22 nt, Homo sapiens
gugguuuucaacuccaccugca

SEQ ID NO: 34890 - RNA, 22 nt, Homo sapiens
guguaaaacaauuagaggauuu

SEQ ID NO: 34891 - RNA, 20 nt, Homo sapiens
guguaagagcaagcuuccua

SEQ ID NO: 34892 - RNA, 22 nt, Homo sapiens
guguaaaugagugcugaaggag

SEQ ID NO: 34893 - RNA, 22 nt, Homo sapiens
uaacuaaagagaagucaauguc

SEQ ID NO: 34894 - RNA, 23 nt, Homo sapiens
uaacauugcaugauuaccugcau

SEQ ID NO: 34895 - RNA, 22 nt, Homo sapiens
uaaacugucuugcaguuacaug

SEQ ID NO: 34896 - RNA, 22 nt, Homo sapiens
uaaacugcuugaaaugguguca

SEQ ID NO: 34897 - RNA, 22 nt, Homo sapiens
gcugcguguagaguucucacug

SEQ ID NO: 34898 - RNA, 22 nt, Homo sapiens
gcugauguuuucagguaauucu

SEQ ID NO: 34899 - RNA, 22 nt, Homo sapiens
gcuaaaucuguaaaaugaggag

SEQ ID NO: 34900 - RNA, 22 nt, Homo sapiens
gcucuuuugggguaauucugag

SEQ ID NO: 34901 - RNA, 20 nt, Homo sapiens
gcuaaggcacgggaauuacu

SEQ ID NO: 34902 - RNA, 22 nt, Homo sapiens
gcuuguguauuaaaccuugcag

SEQ ID NO: 34903 - RNA, 22 nt, Homo sapiens
gcuuguguuuacuguaguuacu

SEQ ID NO: 34904 - RNA, 21 nt, Homo sapiens
gcuuuuucggaagucuuuggc

SEQ ID NO: 34905 - RNA, 22 nt, Homo sapiens
gcuguugguaaaaaggacauga

SEQ ID NO: 34906 - RNA, 22 nt, Homo sapiens
gcuguuugccgccaucgcagac

SEQ ID NO: 34907 - RNA, 22 nt, Homo sapiens
gcugguguagagugcagaaagg

SEQ ID NO: 34908 - RNA, 22 nt, Homo sapiens
gcugguguugugaaucaggccg

SEQ ID NO: 34909 - RNA, 22 nt, Homo sapiens
gcuggguugccagguuacuuaa

SEQ ID NO: 34910 - RNA, 19 nt, Homo sapiens
gcugauguuacauucuugc

SEQ ID NO: 34911 - RNA, 22 nt, Homo sapiens
ggagauguuuaaccuuuuaucu

SEQ ID NO: 34912 - RNA, 20 nt, Homo sapiens
ggagguguuggauuucuagu

SEQ ID NO: 34913 - RNA, 22 nt, Homo sapiens
ggcacaaugucagcucacugca

SEQ ID NO: 34914 - RNA, 22 nt, Homo sapiens
ggcacuguggcucaagccugua

SEQ ID NO: 34915 - RNA, 22 nt, Homo sapiens
ggcaauauauucugaauucagu

SEQ ID NO: 34916 - RNA, 22 nt, Homo sapiens
ggugagguaguaagguacaaua

SEQ ID NO: 34917 - RNA, 22 nt, Homo sapiens
ggugauguuugaguugagacag

SEQ ID NO: 34918 - RNA, 22 nt, Homo sapiens
gguccgccugccuuggccuccc

SEQ ID NO: 34919 - RNA, 22 nt, Homo sapiens
gggauuauugugauuucauguu

SEQ ID NO: 34920 - RNA, 22 nt, Homo sapiens
gggauauguagauuuuuaucuu

SEQ ID NO: 34921 - RNA, 22 nt, Homo sapiens
gucuuuguuauuaugaaucaac

SEQ ID NO: 34922 - RNA, 20 nt, Homo sapiens
gucuuguagcucaaguuauu

SEQ ID NO: 34923 - RNA, 22 nt, Homo sapiens
gucugguuccugggagauuucu

SEQ ID NO: 34924 - RNA, 22 nt, Homo sapiens
gucugucuuuugucuuugaaau

SEQ ID NO: 34925 - RNA, 22 nt, Homo sapiens
gucugguuggaguaguuuucag

SEQ ID NO: 34926 - RNA, 22 nt, Homo sapiens
gucuguuugauccagaucaaaa

SEQ ID NO: 34927 - RNA, 22 nt, Homo sapiens
gucuugcacuuaccuaagaacu

SEQ ID NO: 34928 - RNA, 22 nt, Homo sapiens
guacacauacauauaugugugu

SEQ ID NO: 34929 - RNA, 22 nt, Homo sapiens
guacaguucucuuuguugucag

SEQ ID NO: 34930 - RNA, 22 nt, Homo sapiens
guacauguaugcaugcaugcau

SEQ ID NO: 34931 - RNA, 22 nt, Homo sapiens
guacaagugcaguuucguuaca

SEQ ID NO: 34932 - RNA, 22 nt, Homo sapiens
guacaugugcacagugugcagg

SEQ ID NO: 34933 - RNA, 22 nt, Homo sapiens
guagaauguauacaguauacag

SEQ ID NO: 34934 - RNA, 22 nt, Homo sapiens
gugcacaugguagguauugagu

SEQ ID NO: 34935 - RNA, 22 nt, Homo sapiens
gugagaugauggguauguuaau

SEQ ID NO: 34936 - RNA, 22 nt, Homo sapiens
gugagauggagucuugcuuugu

SEQ ID NO: 34937 - RNA, 22 nt, Homo sapiens
gugagaacugugucuuauaaac

SEQ ID NO: 34938 - RNA, 22 nt, Homo sapiens
guggcaguuuuaaauaugaaaa

SEQ ID NO: 34939 - RNA, 22 nt, Homo sapiens
gugggguaggugacuugaugag

SEQ ID NO: 34940 - RNA, 22 nt, Homo sapiens
gugggguagcaggcuccuaucu

SEQ ID NO: 34941 - RNA, 23 nt, Homo sapiens
gugccuucugagccuagucucca

SEQ ID NO: 34942 - RNA, 22 nt, Homo sapiens
gugcucauuuagagagaagcac

SEQ ID NO: 34943 - RNA, 22 nt, Homo sapiens
aaaacgcauccucacaggucug

SEQ ID NO: 34944 - RNA, 22 nt, Homo sapiens
aaaagagcugagagguauucuu

SEQ ID NO: 34945 - RNA, 22 nt, Homo sapiens
aaacagucuucuccugagggac

SEQ ID NO: 34946 - RNA, 22 nt, Homo sapiens
aaaccacagugugcugcugggg

SEQ ID NO: 34947 - RNA, 22 nt, Homo sapiens
aaaguucuguugauagugcuga

SEQ ID NO: 34948 - RNA, 22 nt, Homo sapiens
aaaguguuucugcaguagguuu

SEQ ID NO: 34949 - RNA, 22 nt, Homo sapiens
aaagugcuucucuuuggugggu

SEQ ID NO: 34950 - RNA, 22 nt, Homo sapiens
aaagugguuuuucagacuuuga

SEQ ID NO: 34951 - RNA, 22 nt, Homo sapiens
aaagugcugggauuuuaggcau

SEQ ID NO: 34952 - RNA, 22 nt, Homo sapiens
aaagucuagaggaucaugugug

SEQ ID NO: 34953 - RNA, 22 nt, Homo sapiens
aacaucaaccaugaggguugga

SEQ ID NO: 34954 - RNA, 22 nt, Homo sapiens
aacauguuuagcagauaccugu

SEQ ID NO: 34955 - RNA, 22 nt, Homo sapiens
aaccacauggcucaguggacau

SEQ ID NO: 34956 - RNA, 22 nt, Homo sapiens
aaccuauaguauugaaaucaag

SEQ ID NO: 34957 - RNA, 22 nt, Homo sapiens
aagauauguuaguuauaaacuc

SEQ ID NO: 34958 - RNA, 22 nt, Homo sapiens
aacagacugucacauaaaauug

SEQ ID NO: 34959 - RNA, 22 nt, Homo sapiens
aacagagcuggugacuccaggu

SEQ ID NO: 34960 - RNA, 22 nt, Homo sapiens
aaaugcagcacucaagugggaa

SEQ ID NO: 34961 - RNA, 22 nt, Homo sapiens
aaaugcaucauuaggugauuuu

SEQ ID NO: 34962 - RNA, 22 nt, Homo sapiens
aagccagugugacaggaaacuu

SEQ ID NO: 34963 - RNA, 22 nt, Homo sapiens
aagggagcugcauaaucuugug

SEQ ID NO: 34964 - RNA, 22 nt, Homo sapiens
agcugguauuuugucgaggacu

SEQ ID NO: 34965 - RNA, 21 nt, Homo sapiens
agcugguuuccacagugugcu

SEQ ID NO: 34966 - RNA, 22 nt, Homo sapiens
aggaagugugcaauuaauuucu

SEQ ID NO: 34967 - RNA, 22 nt, Homo sapiens
aggcaugauuguauuuugcucu

SEQ ID NO: 34968 - RNA, 18 nt, Homo sapiens
aaaugcucuucuggaaua

SEQ ID NO: 34969 - RNA, 22 nt, Homo sapiens
aaaugcugucaaauuguguucu

SEQ ID NO: 34970 - RNA, 22 nt, Homo sapiens
aaaugggacugggguccuuuga

SEQ ID NO: 34971 - RNA, 22 nt, Homo sapiens
aaauucaucaaaugguuuguau

SEQ ID NO: 34972 - RNA, 21 nt, Homo sapiens
aaaugugcuuuaguacccuca

SEQ ID NO: 34973 - RNA, 22 nt, Homo sapiens
aggugaauggauaaacuguggg

SEQ ID NO: 34974 - RNA, 22 nt, Homo sapiens
aggugcaauggugguuuugugg

SEQ ID NO: 34975 - RNA, 21 nt, Homo sapiens
aggucaugaagauguucuaau

SEQ ID NO: 34976 - RNA, 22 nt, Homo sapiens
agguauguauguaugggagaaa

SEQ ID NO: 34977 - RNA, 22 nt, Homo sapiens
agguauuuucaacuuagaaugg

SEQ ID NO: 34978 - RNA, 22 nt, Homo sapiens
aggugguguuggguuccagccc

SEQ ID NO: 34979 - RNA, 22 nt, Homo sapiens
agguuaugauuguagagcgagg

SEQ ID NO: 34980 - RNA, 22 nt, Homo sapiens
aguaaauuucugugcuuucaua

SEQ ID NO: 34981 - RNA, 22 nt, Homo sapiens
agguuguugcaugcuccuuagg

SEQ ID NO: 34982 - RNA, 22 nt, Homo sapiens
aguaagucucaagguaggguag

SEQ ID NO: 34983 - RNA, 22 nt, Homo sapiens
aguaaucaucugagggcagaaa

SEQ ID NO: 34984 - RNA, 21 nt, Homo sapiens
agacacuuggaagguuuuaga

SEQ ID NO: 34985 - RNA, 22 nt, Homo sapiens
acuguacucuacccugggcaac

SEQ ID NO: 34986 - RNA, 22 nt, Homo sapiens
acuguacugucuggggcagucu

SEQ ID NO: 34987 - RNA, 22 nt, Homo sapiens
acugggauauuauugguaauau

SEQ ID NO: 34988 - RNA, 22 nt, Homo sapiens
agagauaauuagguuaaaugag

SEQ ID NO: 34989 - RNA, 22 nt, Homo sapiens
agacuguaaugcauaauuuacu

SEQ ID NO: 34990 - RNA, 22 nt, Homo sapiens
agacuuagagagucuauucuau

SEQ ID NO: 34991 - RNA, 22 nt, Homo sapiens
agacaguguguguauauauggu

SEQ ID NO: 34992 - RNA, 22 nt, Homo sapiens
agcaugacauauuguagagaaa

SEQ ID NO: 34993 - RNA, 22 nt, Homo sapiens
agcugcaauguuuaguauaaua

SEQ ID NO: 34994 - RNA, 22 nt, Homo sapiens
agcauagugccuugaaaacaau

SEQ ID NO: 34995 - RNA, 22 nt, Homo sapiens
agcagcauuaugauauaucuua

SEQ ID NO: 34996 - RNA, 22 nt, Homo sapiens
acagaaccauucacuccccugg

SEQ ID NO: 34997 - RNA, 23 nt, Homo sapiens
acagucuaguuugaagucaggua

SEQ ID NO: 34998 - RNA, 18 nt, Homo sapiens
acagugcuggcaugagau

SEQ ID NO: 34999 - RNA, 22 nt, Homo sapiens
acaguauaaugcuguagggaga

SEQ ID NO: 35000 - RNA, 21 nt, Homo sapiens
acaguaguaauaguguagcca

SEQ ID NO: 35001 - RNA, 22 nt, Homo sapiens
acacuacuggguauauguguuu

SEQ ID NO: 35002 - RNA, 22 nt, Homo sapiens
acacuugcuugcaauagccucc

SEQ ID NO: 35003 - RNA, 22 nt, Homo sapiens
acacagucaaauccacuuggcu

SEQ ID NO: 35004 - RNA, 22 nt, Homo sapiens
aauugcaucuguucuuugccag

SEQ ID NO: 35005 - RNA, 22 nt, Homo sapiens
aauugcacuggaaguaacugag

SEQ ID NO: 35006 - RNA, 22 nt, Homo sapiens
acacaguaaauauguauugaau

SEQ ID NO: 35007 - RNA, 22 nt, Homo sapiens
aauuaguaaccuaauuccaucu

SEQ ID NO: 35008 - RNA, 22 nt, Homo sapiens
aauuaguuggcugccuaugauu

SEQ ID NO: 35009 - RNA, 23 nt, Homo sapiens
aauugcacauuccuugcuggcag

SEQ ID NO: 35010 - RNA, 22 nt, Homo sapiens
aauucuguauuguuuagggacu

SEQ ID NO: 35011 - RNA, 22 nt, Homo sapiens
aaguguaaguuaauguuuaggu

SEQ ID NO: 35012 - RNA, 22 nt, Homo sapiens
acugcacuccagacucugucuc

SEQ ID NO: 35013 - RNA, 22 nt, Homo sapiens
acugcacuccaaccuuggugac

SEQ ID NO: 35014 - RNA, 22 nt, Homo sapiens
acugcacuucagccuuggcuac

SEQ ID NO: 35015 - RNA, 22 nt, Homo sapiens
acugcacuucagccuugugaca

SEQ ID NO: 35016 - RNA, 22 nt, Homo sapiens
acugcacuucaaccucauugac

SEQ ID NO: 35017 - RNA, 22 nt, Homo sapiens
acugcacuuauccuccaauguu

SEQ ID NO: 35018 - RNA, 22 nt, Homo sapiens
accgaguuagccaggauggucu

SEQ ID NO: 35019 - RNA, 22 nt, Homo sapiens
acccuuuagguuggaugaggau

SEQ ID NO: 35020 - RNA, 22 nt, Homo sapiens
accuggguguauguucaguuug

SEQ ID NO: 35021 - RNA, 23 nt, Homo sapiens
acaguggugugaucuuggcucag

SEQ ID NO: 35022 - RNA, 22 nt, Homo sapiens
acaguguagugacugccaacuu

SEQ ID NO: 35023 - RNA, 22 nt, Homo sapiens
acagugcuuucaauguucagua

SEQ ID NO: 35024 - RNA, 19 nt, Homo sapiens
acagugcuuugucagaagc

SEQ ID NO: 35025 - RNA, 22 nt, Homo sapiens
acucuguugucuggccuuccug

SEQ ID NO: 35026 - RNA, 22 nt, Homo sapiens
acuccacuuucaccacagcgga

SEQ ID NO: 35027 - RNA, 22 nt, Homo sapiens
acuccauuucauuuuagcucuu

SEQ ID NO: 35028 - RNA, 22 nt, Homo sapiens
accuuguagcaaaccuaacaua

SEQ ID NO: 35029 - RNA, 22 nt, Homo sapiens
aucacagagucacgggcaacuu

SEQ ID NO: 35030 - RNA, 22 nt, Homo sapiens
aucacagaacuuugagcagaga

SEQ ID NO: 35031 - RNA, 22 nt, Homo sapiens
aucaaauugucauuuuaaggau

SEQ ID NO: 35032 - RNA, 20 nt, Homo sapiens
aucagagacuaggauugcca

SEQ ID NO: 35033 - RNA, 22 nt, Homo sapiens
aucaaagugaauuaaugagaau

SEQ ID NO: 35034 - RNA, 22 nt, Homo sapiens
aucaaagugaaauauuaguuau

SEQ ID NO: 35035 - RNA, 22 nt, Homo sapiens
auaucacaggaaaggaagauac

SEQ ID NO: 35036 - RNA, 22 nt, Homo sapiens
auaucccagugaugauugauag

SEQ ID NO: 35037 - RNA, 22 nt, Homo sapiens
auaugcacuauacacacguaua

SEQ ID NO: 35038 - RNA, 22 nt, Homo sapiens
auauuggucuucaagaccugug

SEQ ID NO: 35039 - RNA, 22 nt, Homo sapiens
auaugcaaauccauagagacag

SEQ ID NO: 35040 - RNA, 22 nt, Homo sapiens
aucagauaccuguugggaaaug

SEQ ID NO: 35041 - RNA, 22 nt, Homo sapiens
auccuguagucucacagcccca

SEQ ID NO: 35042 - RNA, 22 nt, Homo sapiens
auccuguaggcuaguagacagu

SEQ ID NO: 35043 - RNA, 22 nt, Homo sapiens
aucucaguuaaugacccuaugc

SEQ ID NO: 35044 - RNA, 19 nt, Homo sapiens
auaguguaggaaaacagcu

SEQ ID NO: 35045 - RNA, 22 nt, Homo sapiens
auauaccuaggcuacaugguuu

SEQ ID NO: 35046 - RNA, 22 nt, Homo sapiens
auagcagugccccaaacuccug

SEQ ID NO: 35047 - RNA, 22 nt, Homo sapiens
auagcagacauuucaaggcagg

SEQ ID NO: 35048 - RNA, 22 nt, Homo sapiens
auagcagaagaagggacaauuc

SEQ ID NO: 35049 - RNA, 22 nt, Homo sapiens
auacccauacauauuggugacu

SEQ ID NO: 35050 - RNA, 22 nt, Homo sapiens
auacuaugagauaauaaagacu

SEQ ID NO: 35051 - RNA, 23 nt, Homo sapiens
auagagcuaggaugcagacagau

SEQ ID NO: 35052 - RNA, 22 nt, Homo sapiens
aguacugucagcaggguguuga

SEQ ID NO: 35053 - RNA, 22 nt, Homo sapiens
aguagcacaugccacccugucu

SEQ ID NO: 35054 - RNA, 22 nt, Homo sapiens
auaaucacacccagguuaaaug

SEQ ID NO: 35055 - RNA, 22 nt, Homo sapiens
auacaagcaguccaacuccaua

SEQ ID NO: 35056 - RNA, 22 nt, Homo sapiens
auaaugacuuccaguuccacuc

SEQ ID NO: 35057 - RNA, 22 nt, Homo sapiens
auacacgugccuuguuggugua

SEQ ID NO: 35058 - RNA, 22 nt, Homo sapiens
auacaguaaugucuuaggcugu

SEQ ID NO: 35059 - RNA, 22 nt, Homo sapiens
auacacgugccauguugguaug

SEQ ID NO: 35060 - RNA, 22 nt, Homo sapiens
auacaaguuauuugaacugcgg

SEQ ID NO: 35061 - RNA, 22 nt, Homo sapiens
auacacauuccugggccucacc

SEQ ID NO: 35062 - RNA, 22 nt, Homo sapiens
auacaguugccauuucuugugc

SEQ ID NO: 35063 - RNA, 22 nt, Homo sapiens
augccucugacaauuggauucu

SEQ ID NO: 35064 - RNA, 22 nt, Homo sapiens
augcaacuugaaauuuuccgga

SEQ ID NO: 35065 - RNA, 20 nt, Homo sapiens
augcaaacccugcuuugugg

SEQ ID NO: 35066 - RNA, 19 nt, Homo sapiens
augcacgugaaaugcauuu

SEQ ID NO: 35067 - RNA, 22 nt, Homo sapiens
augcacauauguacugcccuau

SEQ ID NO: 35068 - RNA, 22 nt, Homo sapiens
augcagacacaaguuauaguaa

SEQ ID NO: 35069 - RNA, 22 nt, Homo sapiens
augauuuuuguaucgccugaug

SEQ ID NO: 35070 - RNA, 22 nt, Homo sapiens
augugcaauguguacguagccc

SEQ ID NO: 35071 - RNA, 22 nt, Homo sapiens
augugcaacugcuggaacaguc

SEQ ID NO: 35072 - RNA, 22 nt, Homo sapiens
augugcaagaucauuaaagcuc

SEQ ID NO: 35073 - RNA, 22 nt, Homo sapiens
augugcaaauuuccaaacucuu

SEQ ID NO: 35074 - RNA, 22 nt, Homo sapiens
augugcaaagcacuguucagca

SEQ ID NO: 35075 - RNA, 22 nt, Homo sapiens
augugcuuuuggugagagauuu

SEQ ID NO: 35076 - RNA, 22 nt, Homo sapiens
augugcuugagggaaaucaguu

SEQ ID NO: 35077 - RNA, 22 nt, Homo sapiens
auguccauggaaucuguagcaa

SEQ ID NO: 35078 - RNA, 22 nt, Homo sapiens
auguccuggacccagacaaagc

SEQ ID NO: 35079 - RNA, 22 nt, Homo sapiens
augugaccaucucuccacuaau

SEQ ID NO: 35080 - RNA, 22 nt, Homo sapiens
augugacagugguuuuaagcgu

SEQ ID NO: 35081 - RNA, 22 nt, Homo sapiens
auguauacauagauacgugugu

SEQ ID NO: 35082 - RNA, 17 nt, Homo sapiens
auguauacauccaugua

SEQ ID NO: 35083 - RNA, 22 nt, Homo sapiens
augggucuccugaauacagcac

SEQ ID NO: 35084 - RNA, 18 nt, Homo sapiens
auggguguuggaaaauga

SEQ ID NO: 35085 - RNA, 22 nt, Homo sapiens
augggauaguaucaguggaaua

SEQ ID NO: 35086 - RNA, 22 nt, Homo sapiens
auggcuuuuauuguguugaggu

SEQ ID NO: 35087 - RNA, 22 nt, Homo sapiens
auggaauguaaguuauguuugc

SEQ ID NO: 35088 - RNA, 22 nt, Homo sapiens
uguuauuuuguguuagggcaca

SEQ ID NO: 35089 - RNA, 22 nt, Homo sapiens
uguuauguuuuagagguuucaa

SEQ ID NO: 35090 - RNA, 22 nt, Homo sapiens
uguucaauucccaccuaugagu

SEQ ID NO: 35091 - RNA, 22 nt, Homo sapiens
uguuacagcagaauugauugca

SEQ ID NO: 35092 - RNA, 22 nt, Homo sapiens
uguuacagcagaauugaaagag

SEQ ID NO: 35093 - RNA, 22 nt, Homo sapiens
uguuaucauuacguucuuaguu

SEQ ID NO: 35094 - RNA, 22 nt, Homo sapiens
ugugucuuguuuauagcuuucu

SEQ ID NO: 35095 - RNA, 22 nt, Homo sapiens
uguguuugauaaguccauaguu

SEQ ID NO: 35096 - RNA, 22 nt, Homo sapiens
ugugucuuguuuuuucccaggc

SEQ ID NO: 35097 - RNA, 21 nt, Homo sapiens
uguuaacaugcagauuacugg

SEQ ID NO: 35098 - RNA, 22 nt, Homo sapiens
uguguuuuuauguaaaauggaa

SEQ ID NO: 35099 - RNA, 22 nt, Homo sapiens
uguguaaauauauacacacgug

SEQ ID NO: 35100 - RNA, 22 nt, Homo sapiens
uuaaaguaauugaaauggccuu

SEQ ID NO: 35101 - RNA, 22 nt, Homo sapiens
uuaaaccugucuucucacuaau

SEQ ID NO: 35102 - RNA, 20 nt, Homo sapiens
uuaaaucuagugcagacuca

SEQ ID NO: 35103 - RNA, 22 nt, Homo sapiens
uuaaaguauaguuccucugguu

SEQ ID NO: 35104 - RNA, 22 nt, Homo sapiens
uuaaaugcacauacuugagaaa

SEQ ID NO: 35105 - RNA, 22 nt, Homo sapiens
uguuuguuugugauacgguaca

SEQ ID NO: 35106 - RNA, 22 nt, Homo sapiens
uuaagcaaagguaacaugagaa

SEQ ID NO: 35107 - RNA, 22 nt, Homo sapiens
uuaagccaggugugguggcaca

SEQ ID NO: 35108 - RNA, 22 nt, Homo sapiens
uuaacagucacuuagcucauuu

SEQ ID NO: 35109 - RNA, 22 nt, Homo sapiens
uuaaaugcucacauaaagguag

SEQ ID NO: 35110 - RNA, 22 nt, Homo sapiens
uuaaaugucuguagaugugcug

SEQ ID NO: 35111 - RNA, 22 nt, Homo sapiens
uuaacagcacaugcugucccuu

SEQ ID NO: 35112 - RNA, 22 nt, Homo sapiens
uuaaguaaucagagaagagaac

SEQ ID NO: 35113 - RNA, 21 nt, Homo sapiens
uuaaguaauuacccaacucuc

SEQ ID NO: 35114 - RNA, 22 nt, Homo sapiens
uguaauaguaggcucacauuug

SEQ ID NO: 35115 - RNA, 22 nt, Homo sapiens
uguaagcauuauauaauuguug

SEQ ID NO: 35116 - RNA, 22 nt, Homo sapiens
ugugcuuguaaaggccagagca

SEQ ID NO: 35117 - RNA, 22 nt, Homo sapiens
ugugguccucugaaggcuuuuc

SEQ ID NO: 35118 - RNA, 22 nt, Homo sapiens
uguguaaagcuuguuccagaaa

SEQ ID NO: 35119 - RNA, 22 nt, Homo sapiens
ugugguuuuucacauuuagaga

SEQ ID NO: 35120 - RNA, 22 nt, Homo sapiens
ugugcaaauuagcacaacccga

SEQ ID NO: 35121 - RNA, 22 nt, Homo sapiens
ugugcauauaaguguguauaua

SEQ ID NO: 35122 - RNA, 22 nt, Homo sapiens
ugugcacaauguacagguuagu

SEQ ID NO: 35123 - RNA, 22 nt, Homo sapiens
uucccguugcugugcuccugcc

SEQ ID NO: 35124 - RNA, 22 nt, Homo sapiens
uucauguaaucaaggcagcuaa

SEQ ID NO: 35125 - RNA, 22 nt, Homo sapiens
uucauagucacauucgaugucu

SEQ ID NO: 35126 - RNA, 22 nt, Homo sapiens
uucucaauggaugugggaccag

SEQ ID NO: 35127 - RNA, 22 nt, Homo sapiens
uucucauggaacaucuguacug

SEQ ID NO: 35128 - RNA, 22 nt, Homo sapiens
uucccuuugugcauaggauuug

SEQ ID NO: 35129 - RNA, 22 nt, Homo sapiens
uuccguguaguugagcaguuuu

SEQ ID NO: 35130 - RNA, 22 nt, Homo sapiens
uucucaaggagccuucguaacu

SEQ ID NO: 35131 - RNA, 22 nt, Homo sapiens
uuacauguggugugaagaagag

SEQ ID NO: 35132 - RNA, 22 nt, Homo sapiens
uuacauguuuauggggguacau

SEQ ID NO: 35133 - RNA, 22 nt, Homo sapiens
uuacaugagacugucgcuaguu

SEQ ID NO: 35134 - RNA, 22 nt, Homo sapiens
uuacauguuguggguuguggcc

SEQ ID NO: 35135 - RNA, 22 nt, Homo sapiens
uuacaguguuuguucuguuacu

SEQ ID NO: 35136 - RNA, 22 nt, Homo sapiens
uuaugaaguagguuaagagcag

SEQ ID NO: 35137 - RNA, 22 nt, Homo sapiens
uuaucauagugcaguuuucuga

SEQ ID NO: 35138 - RNA, 22 nt, Homo sapiens
uuaucacauugacugauuugca

SEQ ID NO: 35139 - RNA, 22 nt, Homo sapiens
uuauaguuuuucaccuggagaa

SEQ ID NO: 35140 - RNA, 22 nt, Homo sapiens
uucacagagagaacucaaacca

SEQ ID NO: 35141 - RNA, 22 nt, Homo sapiens
uucaagucaaggaaagaggucu

SEQ ID NO: 35142 - RNA, 19 nt, Homo sapiens
uucagcagugucugcucuu

SEQ ID NO: 35143 - RNA, 18 nt, Homo sapiens
uuuggcuguucaugacuc

SEQ ID NO: 35144 - RNA, 22 nt, Homo sapiens
uuugggaaaugaaguugguaga

SEQ ID NO: 35145 - RNA, 22 nt, Homo sapiens
uuugguugccucuaugagccug

SEQ ID NO: 35146 - RNA, 22 nt, Homo sapiens
uuugguuuuuguuaucacucau

SEQ ID NO: 35147 - RNA, 22 nt, Homo sapiens
uuugcaauguugugauggugaa

SEQ ID NO: 35148 - RNA, 22 nt, Homo sapiens
uuugauguugagacuauaaagc

SEQ ID NO: 35149 - RNA, 22 nt, Homo sapiens
uuugauguccaccucagcccac

SEQ ID NO: 35150 - RNA, 23 nt, Homo sapiens
uuugagugugauaaacacuguca

SEQ ID NO: 35151 - RNA, 22 nt, Homo sapiens
uuugaugcaucucuacuuuguu

SEQ ID NO: 35152 - RNA, 22 nt, Homo sapiens
uuugaggaaaggcauaaguagg

SEQ ID NO: 35153 - RNA, 20 nt, Homo sapiens
uuugaauguaaagcauguca

SEQ ID NO: 35154 - RNA, 22 nt, Homo sapiens
uuugacaaugugugcuuguauu

SEQ ID NO: 35155 - RNA, 22 nt, Homo sapiens
uuguauguugaaugaugguaua

SEQ ID NO: 35156 - RNA, 22 nt, Homo sapiens
uuguauguuguuugucagagaa

SEQ ID NO: 35157 - RNA, 22 nt, Homo sapiens
uuguauguuucugugcacauga

SEQ ID NO: 35158 - RNA, 22 nt, Homo sapiens
uuguauguuuguucuuucagau

SEQ ID NO: 35159 - RNA, 22 nt, Homo sapiens
uuguauguaaccauuuggcaaa

SEQ ID NO: 35160 - RNA, 22 nt, Homo sapiens
uugguucaguuuaacgaguaau

SEQ ID NO: 35161 - RNA, 22 nt, Homo sapiens
uugucacugcacuccagucugg

SEQ ID NO: 35162 - RNA, 22 nt, Homo sapiens
uugugguaggaugaagagauga

SEQ ID NO: 35163 - RNA, 22 nt, Homo sapiens
uuucucaguguuucaggguagg

SEQ ID NO: 35164 - RNA, 22 nt, Homo sapiens
uugugguuuucagcuuauauau

SEQ ID NO: 35165 - RNA, 19 nt, Homo sapiens
uuguguccccacaaaauuc

SEQ ID NO: 35166 - RNA, 22 nt, Homo sapiens
uugugucccuacccaaaucuca

SEQ ID NO: 35167 - RNA, 22 nt, Homo sapiens
uuuauggagagauauuuauggu

SEQ ID NO: 35168 - RNA, 22 nt, Homo sapiens
uuuaucuguuuaaaacuguuca

SEQ ID NO: 35169 - RNA, 22 nt, Homo sapiens
uuuagguagucaaagguuaguc

SEQ ID NO: 35170 - RNA, 22 nt, Homo sapiens
uuuagguauuugguauagcagu

SEQ ID NO: 35171 - RNA, 22 nt, Homo sapiens
uuggcaaauagguuuuauugca

SEQ ID NO: 35172 - RNA, 22 nt, Homo sapiens
uuggaauacuuguuaaagucca

SEQ ID NO: 35173 - RNA, 22 nt, Homo sapiens
uuggcagaguuaauuuguugag

SEQ ID NO: 35174 - RNA, 22 nt, Homo sapiens
uuggcagugguucugacggacc

SEQ ID NO: 35175 - RNA, 22 nt, Homo sapiens
uuggcauaguugcacuuacuag

SEQ ID NO: 35176 - RNA, 22 nt, Homo sapiens
uugguauguaauuuauauugua

SEQ ID NO: 35177 - RNA, 22 nt, Homo sapiens
uugguaccccugguguacuaau

SEQ ID NO: 35178 - RNA, 22 nt, Homo sapiens
uugguaaugggcugguauaacc

SEQ ID NO: 35179 - RNA, 22 nt, Homo sapiens
uugcauuagugugguacauuug

SEQ ID NO: 35180 - RNA, 22 nt, Homo sapiens
uugcaucagcuccugauguacu

SEQ ID NO: 35181 - RNA, 22 nt, Homo sapiens
uugcaugucauaacugauggaa

SEQ ID NO: 35182 - RNA, 23 nt, Homo sapiens
uugcauugcccuccauaguacuc

SEQ ID NO: 35183 - RNA, 22 nt, Homo sapiens
uugcauugacacaugaagcuca

SEQ ID NO: 35184 - RNA, 22 nt, Homo sapiens
uugcuagucucuguuucaggau

SEQ ID NO: 35185 - RNA, 22 nt, Homo sapiens
uugcuuaggcuggagugcagug

SEQ ID NO: 35186 - RNA, 22 nt, Homo sapiens
uugcuuuguuacugcaguuucc

SEQ ID NO: 35187 - RNA, 22 nt, Homo sapiens
uuggaacacauguuuuucuacc

SEQ ID NO: 35188 - RNA, 22 nt, Homo sapiens
uuggaaacaccuggugagguua

SEQ ID NO: 35189 - RNA, 22 nt, Homo sapiens
uugcacauggcaggugcucaau

SEQ ID NO: 35190 - RNA, 22 nt, Homo sapiens
uugcaagauguuaacauuggag

SEQ ID NO: 35191 - RNA, 19 nt, Homo sapiens
uugcaguauccuauauguu

SEQ ID NO: 35192 - RNA, 22 nt, Homo sapiens
uugcaguacuucuggcuuuaca

SEQ ID NO: 35193 - RNA, 22 nt, Homo sapiens
uugcagagaaauuucugguuua

SEQ ID NO: 35194 - RNA, 18 nt, Homo sapiens
uugaaugcgucccagaga

SEQ ID NO: 35195 - RNA, 22 nt, Homo sapiens
ugaauacuucaaaaaaauagcu

SEQ ID NO: 35196 - RNA, 21 nt, Homo sapiens
ugaaccccugcucucaagaaa

SEQ ID NO: 35197 - RNA, 22 nt, Homo sapiens
ugaacucauccuuucuuauggc

SEQ ID NO: 35198 - RNA, 22 nt, Homo sapiens
ugaaauuuuuuauucguuggcu

SEQ ID NO: 35199 - RNA, 22 nt, Homo sapiens
ugaacacaucuccugguaccug

SEQ ID NO: 35200 - RNA, 22 nt, Homo sapiens
ugaaauguaaguugucuagucu

SEQ ID NO: 35201 - RNA, 19 nt, Homo sapiens
ucuuugguacgugcuuuga

SEQ ID NO: 35202 - RNA, 22 nt, Homo sapiens
ugaauuguuuacgagaugugag

SEQ ID NO: 35203 - RNA, 22 nt, Homo sapiens
ugacaugaugagcaauaauggc

SEQ ID NO: 35204 - RNA, 22 nt, Homo sapiens
ugaauguuguugguugagauau

SEQ ID NO: 35205 - RNA, 22 nt, Homo sapiens
ugaauguaagaugucugcuggu

SEQ ID NO: 35206 - RNA, 22 nt, Homo sapiens
ugaaugccauucuguguuagcu

SEQ ID NO: 35207 - RNA, 22 nt, Homo sapiens
ugaaucaugcugcuauaaagac

SEQ ID NO: 35208 - RNA, 22 nt, Homo sapiens
ucucaauggguuguagacaaag

SEQ ID NO: 35209 - RNA, 22 nt, Homo sapiens
ucuguacuccuugaguagugcu

SEQ ID NO: 35210 - RNA, 22 nt, Homo sapiens
ucuguacuuccguaccuaaagu

SEQ ID NO: 35211 - RNA, 22 nt, Homo sapiens
ucuggguuuuguaccgugcucg

SEQ ID NO: 35212 - RNA, 22 nt, Homo sapiens
ucucccauccaugaacuucugu

SEQ ID NO: 35213 - RNA, 22 nt, Homo sapiens
ucucauggagucaggagcagaa

SEQ ID NO: 35214 - RNA, 22 nt, Homo sapiens
ucugucuuugucaggaccagag

SEQ ID NO: 35215 - RNA, 22 nt, Homo sapiens
ucugugcauuuucuuuuagacu

SEQ ID NO: 35216 - RNA, 22 nt, Homo sapiens
ucugugcauuguaggauguuua

SEQ ID NO: 35217 - RNA, 20 nt, Homo sapiens
aacagcacugucugaagcuu

SEQ ID NO: 35218 - RNA, 22 nt, Homo sapiens
aacaccuugcgugggcgucaau

SEQ ID NO: 35219 - RNA, 20 nt, Homo sapiens
ucuuucgguuaccaggcagu

SEQ ID NO: 35220 - RNA, 22 nt, Homo sapiens
ucuuugauuuuguuacuaagac

SEQ ID NO: 35221 - RNA, 22 nt, Homo sapiens
aacagucaauugcugaugaccu

SEQ ID NO: 35222 - RNA, 22 nt, Homo sapiens
aacaguaucuaacgagugauga

SEQ ID NO: 35223 - RNA, 19 nt, Homo sapiens
uccaccgcgugcaccucua

SEQ ID NO: 35224 - RNA, 22 nt, Homo sapiens
uccaaaucucuggcacugggau

SEQ ID NO: 35225 - RNA, 22 nt, Homo sapiens
ucaugugaggauaacaauagug

SEQ ID NO: 35226 - RNA, 22 nt, Homo sapiens
ucauguaauuuugugucuauga

SEQ ID NO: 35227 - RNA, 22 nt, Homo sapiens
ucauccauacaguuagcaaagg

SEQ ID NO: 35228 - RNA, 22 nt, Homo sapiens
uccagugugcaggcaaguuuga

SEQ ID NO: 35229 - RNA, 22 nt, Homo sapiens
uccaguuguuauuuuuauaaag

SEQ ID NO: 35230 - RNA, 19 nt, Homo sapiens
ucccaauguuuccaggcag

SEQ ID NO: 35231 - RNA, 22 nt, Homo sapiens
uccaugaguccauuagaaaaaa

SEQ ID NO: 35232 - RNA, 22 nt, Homo sapiens
ucagugaauacauguacucaug

SEQ ID NO: 35233 - RNA, 22 nt, Homo sapiens
ucagucuuuuaccauuaaguau

SEQ ID NO: 35234 - RNA, 20 nt, Homo sapiens
ucauacuguggaguaccagg

SEQ ID NO: 35235 - RNA, 16 nt, Homo sapiens
ucaucacagucucugg

SEQ ID NO: 35236 - RNA, 22 nt, Homo sapiens
ucaucagaaucccuuagggaug

SEQ ID NO: 35237 - RNA, 22 nt, Homo sapiens
ucagauuggugcaaaaguaauu

SEQ ID NO: 35238 - RNA, 22 nt, Homo sapiens
ucaaacacuccauaucgcgauu

SEQ ID NO: 35239 - RNA, 22 nt, Homo sapiens
uauuuguccccuccaaaaguca

SEQ ID NO: 35240 - RNA, 22 nt, Homo sapiens
ucagaugcauccauaccccacu

SEQ ID NO: 35241 - RNA, 22 nt, Homo sapiens
ucagguaucuuuauagcgaugc

SEQ ID NO: 35242 - RNA, 22 nt, Homo sapiens
ucagguaugucuuuaacagcag

SEQ ID NO: 35243 - RNA, 22 nt, Homo sapiens
uggcuuuuauuauguugaggua

SEQ ID NO: 35244 - RNA, 22 nt, Homo sapiens
uggcuuuuguuauuuggaagcu

SEQ ID NO: 35245 - RNA, 22 nt, Homo sapiens
uggcuguuuauuucacaugggu

SEQ ID NO: 35246 - RNA, 22 nt, Homo sapiens
ugggaacaugaagguuaaagag

SEQ ID NO: 35247 - RNA, 20 nt, Homo sapiens
ugggaacaugugguauaugg

SEQ ID NO: 35248 - RNA, 22 nt, Homo sapiens
ugguaucuaagaugcacguugu

SEQ ID NO: 35249 - RNA, 22 nt, Homo sapiens
ugguaaacaacaggagaacuug

SEQ ID NO: 35250 - RNA, 22 nt, Homo sapiens
ugguauguguucuaaaauuaug

SEQ ID NO: 35251 - RNA, 22 nt, Homo sapiens
ugguaugucuuucuuccuguag

SEQ ID NO: 35252 - RNA, 22 nt, Homo sapiens
ugguauguuuauaaguauagga

SEQ ID NO: 35253 - RNA, 22 nt, Homo sapiens
uggcaucuguucuacacauaaa

SEQ ID NO: 35254 - RNA, 22 nt, Homo sapiens
uggcagaugggugagcuggaga

SEQ ID NO: 35255 - RNA, 21 nt, Homo sapiens
uggcaacgaggugugcauuau

SEQ ID NO: 35256 - RNA, 22 nt, Homo sapiens
uggcaacaucuggggacauguu

SEQ ID NO: 35257 - RNA, 22 nt, Homo sapiens
uggcaaauagcaauaggagggu

SEQ ID NO: 35258 - RNA, 21 nt, Homo sapiens
uggaccccuacuucucaccau

SEQ ID NO: 35259 - RNA, 22 nt, Homo sapiens
uggacuguaauagagaacagaa

SEQ ID NO: 35260 - RNA, 22 nt, Homo sapiens
uggaggucauuggaucaugggg

SEQ ID NO: 35261 - RNA, 21 nt, Homo sapiens
uggauugagaaccccaggagg

SEQ ID NO: 35262 - RNA, 18 nt, Homo sapiens
uggauuguacuguguucu

SEQ ID NO: 35263 - RNA, 20 nt, Homo sapiens
uggauugugaugggauuugc

SEQ ID NO: 35264 - RNA, 18 nt, Homo sapiens
uggagauaagaagaacuu

SEQ ID NO: 35265 - RNA, 22 nt, Homo sapiens
ugcauggagauauacaguuuuu

SEQ ID NO: 35266 - RNA, 22 nt, Homo sapiens
ugcauccauucuagacucaucu

SEQ ID NO: 35267 - RNA, 22 nt, Homo sapiens
ugccuagagagaaccauaacug

SEQ ID NO: 35268 - RNA, 22 nt, Homo sapiens
uggaacacaucuaaggaagcag

SEQ ID NO: 35269 - RNA, 22 nt, Homo sapiens
uggaaacuuauguucuucugug

SEQ ID NO: 35270 - RNA, 21 nt, Homo sapiens
uggaaacuucuagcuuacgua

SEQ ID NO: 35271 - RNA, 22 nt, Homo sapiens
uggaaaauuaggggagguuaua

SEQ ID NO: 35272 - RNA, 22 nt, Homo sapiens
ugccuggagagcuccuacauau

SEQ ID NO: 35273 - RNA, 22 nt, Homo sapiens
ugaucuuuuuaauguccauggg

SEQ ID NO: 35274 - RNA, 22 nt, Homo sapiens
ugaugaugaaugaucuuuuaca

SEQ ID NO: 35275 - RNA, 22 nt, Homo sapiens
ugauauguggcuauugagauug

SEQ ID NO: 35276 - RNA, 20 nt, Homo sapiens
ugauauuuucugagcaggaa

SEQ ID NO: 35277 - RNA, 22 nt, Homo sapiens
ugauggcauuucauguuuguaa

SEQ ID NO: 35278 - RNA, 22 nt, Homo sapiens
ugaugacacugauuucuucaau

SEQ ID NO: 35279 - RNA, 22 nt, Homo sapiens
ugcacaguccagugcccacuga

SEQ ID NO: 35280 - RNA, 22 nt, Homo sapiens
ugcaccaauucuaaacaguucu

SEQ ID NO: 35281 - RNA, 18 nt, Homo sapiens
ugauugacuuauuuaggu

SEQ ID NO: 35282 - RNA, 22 nt, Homo sapiens
ugauuggagaugaauuucguuu

SEQ ID NO: 35283 - RNA, 19 nt, Homo sapiens
ugcaaagucagugaagggu

SEQ ID NO: 35284 - RNA, 21 nt, Homo sapiens
ugcauacuucucagaugauua

SEQ ID NO: 35285 - RNA, 22 nt, Homo sapiens
ugcauacacaagcauacaugua

SEQ ID NO: 35286 - RNA, 19 nt, Homo sapiens
ugaguaucuuuacacaucu

SEQ ID NO: 35287 - RNA, 18 nt, Homo sapiens
ugauaucaucacaauuga

SEQ ID NO: 35288 - RNA, 22 nt, Homo sapiens
ugauauauugaaugaugaaaca

SEQ ID NO: 35289 - RNA, 22 nt, Homo sapiens
ugauaucucuugccuccaaaug

SEQ ID NO: 35290 - RNA, 22 nt, Homo sapiens
ugauaucugaucauccuugaua

SEQ ID NO: 35291 - RNA, 20 nt, Homo sapiens
ugaguagaggaguucuauca

SEQ ID NO: 35292 - RNA, 22 nt, Homo sapiens
ugagauggguaauuaaauggug

SEQ ID NO: 35293 - RNA, 22 nt, Homo sapiens
ugagcaauaaaguuacacaguu

SEQ ID NO: 35294 - RNA, 22 nt, Homo sapiens
caccacagccauuauugucccc

SEQ ID NO: 35295 - RNA, 22 nt, Homo sapiens
caacaguaaagcauuuuuaagu

SEQ ID NO: 35296 - RNA, 22 nt, Homo sapiens
caaagucuucaguugauucuga

SEQ ID NO: 35297 - RNA, 22 nt, Homo sapiens
caaaguaauugugguuuugcca

SEQ ID NO: 35298 - RNA, 22 nt, Homo sapiens
caaaguaauugcuguuuugcca

SEQ ID NO: 35299 - RNA, 22 nt, Homo sapiens
caaaguaauuacgguuuuggcc

SEQ ID NO: 35300 - RNA, 20 nt, Homo sapiens
cagugcauugcuucugauuu

SEQ ID NO: 35301 - RNA, 22 nt, Homo sapiens
cagugcaugacuguauauuauc

SEQ ID NO: 35302 - RNA, 22 nt, Homo sapiens
cagugguuuuuagcuugcuggg

SEQ ID NO: 35303 - RNA, 22 nt, Homo sapiens
caguucaugguaggcaccauag

SEQ ID NO: 35304 - RNA, 22 nt, Homo sapiens
caguguuuuuaacaggugcccg

SEQ ID NO: 35305 - RNA, 22 nt, Homo sapiens
auuggguuaaaggauaugaaca

SEQ ID NO: 35306 - RNA, 22 nt, Homo sapiens
auuguguagucuuacugcuugc

SEQ ID NO: 35307 - RNA, 21 nt, Homo sapiens
auuguauguaaaccaaaugag

SEQ ID NO: 35308 - RNA, 22 nt, Homo sapiens
auuuggcauagaguaucauucu

SEQ ID NO: 35309 - RNA, 22 nt, Homo sapiens
auugcauuuucagguuggucug

SEQ ID NO: 35310 - RNA, 22 nt, Homo sapiens
auuggaguuguacgcacgcuca

SEQ ID NO: 35311 - RNA, 22 nt, Homo sapiens
auuagguuaggcaaacuucugu

SEQ ID NO: 35312 - RNA, 21 nt, Homo sapiens
auuaaugcucugguuagaggc

SEQ ID NO: 35313 - RNA, 22 nt, Homo sapiens
auuaaguugugccugaaaacuu

SEQ ID NO: 35314 - RNA, 22 nt, Homo sapiens
auuauaugucaucacagacacc

SEQ ID NO: 35315 - RNA, 22 nt, Homo sapiens
auuauaguguauacuugaaauu

SEQ ID NO: 35316 - RNA, 22 nt, Homo sapiens
cucugguuucgcaggaaauaga

SEQ ID NO: 35317 - RNA, 22 nt, Homo sapiens
cugaauagucaacgauggacug

SEQ ID NO: 35318 - RNA, 22 nt, Homo sapiens
cugaaaugaauuauuuucuuuc

SEQ ID NO: 35319 - RNA, 22 nt, Homo sapiens
cucaaguagugguuuucauuga

SEQ ID NO: 35320 - RNA, 22 nt, Homo sapiens
cucacagugacacgaaccccca

SEQ ID NO: 35321 - RNA, 22 nt, Homo sapiens
ccuggcacugggccccguggcu

SEQ ID NO: 35322 - RNA, 22 nt, Homo sapiens
ccuuggcacuacugacauugua

SEQ ID NO: 35323 - RNA, 22 nt, Homo sapiens
ccuugguggccacaagacauug

SEQ ID NO: 35324 - RNA, 19 nt, Homo sapiens
ccuugguuagguauauucc

SEQ ID NO: 35325 - RNA, 22 nt, Homo sapiens
ccuuuguggggcgguggguaau

SEQ ID NO: 35326 - RNA, 22 nt, Homo sapiens
cuauaguauaguuugaagucag

SEQ ID NO: 35327 - RNA, 21 nt, Homo sapiens
cuaucucaguguuuacauuug

SEQ ID NO: 35328 - RNA, 22 nt, Homo sapiens
ccacagucuaugcaacaagguc

SEQ ID NO: 35329 - RNA, 22 nt, Homo sapiens
ccacaaccuccauauccugggu

SEQ ID NO: 35330 - RNA, 22 nt, Homo sapiens
ccacaaccucaacagcaucuau

SEQ ID NO: 35331 - RNA, 22 nt, Homo sapiens
cauaguacuugcauaguacuau

SEQ ID NO: 35332 - RNA, 22 nt, Homo sapiens
cauauaguaguacuguuagguu

SEQ ID NO: 35333 - RNA, 22 nt, Homo sapiens
cauacaagcuacaaucacaaag

SEQ ID NO: 35334 - RNA, 22 nt, Homo sapiens
caucacaguacuaaucgucaua

SEQ ID NO: 35335 - RNA, 20 nt, Homo sapiens
caucaccuggcaggauuugu

SEQ ID NO: 35336 - RNA, 22 nt, Homo sapiens
caucauugcacccuauagagaa

SEQ ID NO: 35337 - RNA, 22 nt, Homo sapiens
cccaguuuugcuucucaugagg

SEQ ID NO: 35338 - RNA, 22 nt, Homo sapiens
ccauuugguuauguaucgaaac

SEQ ID NO: 35339 - RNA, 22 nt, Homo sapiens
cccagagacagaaugauaaacu

SEQ ID NO: 35340 - RNA, 22 nt, Homo sapiens
ccauggcaauggucagucuauu

SEQ ID NO: 35341 - RNA, 22 nt, Homo sapiens
ccccuguaaacuggcuucccug

SEQ ID NO: 35342 - RNA, 22 nt, Homo sapiens
ccuaggcacugggguccagccc

SEQ ID NO: 35343 - RNA, 22 nt, Homo sapiens
cccuuagacuacuaauaugagc

SEQ ID NO: 35344 - RNA, 17 nt, Homo sapiens
gcauaugucgaaccagc

SEQ ID NO: 35345 - RNA, 22 nt, Homo sapiens
gcaggauuggagccucucugaa

SEQ ID NO: 35346 - RNA, 22 nt, Homo sapiens
gcaagaaugagaaggauuaauu

SEQ ID NO: 35347 - RNA, 22 nt, Homo sapiens
gcagcauuaccaagacauggca

SEQ ID NO: 35348 - RNA, 22 nt, Homo sapiens
gauuuguuggccugugagcuag

SEQ ID NO: 35349 - RNA, 21 nt, Homo sapiens
gcaaacauccuuugaugccag

SEQ ID NO: 35350 - RNA, 22 nt, Homo sapiens
gauuccacuuucaaauucaaau

SEQ ID NO: 35351 - RNA, 20 nt, Homo sapiens
gcaguguucacuguauuccu

SEQ ID NO: 35352 - RNA, 20 nt, Homo sapiens
gcauaugucuuuauggcagc

SEQ ID NO: 35353 - RNA, 22 nt, Homo sapiens
gcccuacuguuuauacauagga

SEQ ID NO: 35354 - RNA, 22 nt, Homo sapiens
gcguugcacuccagccugggua

SEQ ID NO: 35355 - RNA, 22 nt, Homo sapiens
gcgguuuuaagugaguuucuua

SEQ ID NO: 35356 - RNA, 19 nt, Homo sapiens
gcugguuguccacucucuc

SEQ ID NO: 35357 - RNA, 22 nt, Homo sapiens
gauauguugaguagaguuuuug

SEQ ID NO: 35358 - RNA, 22 nt, Homo sapiens
gauauguuguuggauucgguua

SEQ ID NO: 35359 - RNA, 22 nt, Homo sapiens
gauauguucugagaaaugcauu

SEQ ID NO: 35360 - RNA, 22 nt, Homo sapiens
gauauguucuuucacguuggug

SEQ ID NO: 35361 - RNA, 22 nt, Homo sapiens
gauauguaaaaauuauaucuga

SEQ ID NO: 35362 - RNA, 22 nt, Homo sapiens
gaugaaacaucuuuggaaacug

SEQ ID NO: 35363 - RNA, 22 nt, Homo sapiens
gaugacagcugacucccuugcu

SEQ ID NO: 35364 - RNA, 22 nt, Homo sapiens
gaugacagugaguaaccccaac

SEQ ID NO: 35365 - RNA, 22 nt, Homo sapiens
gaucugucuuuccuuauagucu

SEQ ID NO: 35366 - RNA, 22 nt, Homo sapiens
gaucuggucuuugauuagacac

SEQ ID NO: 35367 - RNA, 22 nt, Homo sapiens
gagaucaaugccuauggcuuuc

SEQ ID NO: 35368 - RNA, 22 nt, Homo sapiens
gagaucuuuaagaacuacugcu

SEQ ID NO: 35369 - RNA, 22 nt, Homo sapiens
gagguguagagauauaccugaa

SEQ ID NO: 35370 - RNA, 22 nt, Homo sapiens
gaguaaaugucaaguacuuagg

SEQ ID NO: 35371 - RNA, 22 nt, Homo sapiens
gaguagaacugguuaucuaaua

SEQ ID NO: 35372 - RNA, 22 nt, Homo sapiens
gaauguuuacuuuguuuaauac

SEQ ID NO: 35373 - RNA, 22 nt, Homo sapiens
gacagacacaauugauccauga

SEQ ID NO: 35374 - RNA, 22 nt, Homo sapiens
gaauggaacugacuauagcuga

SEQ ID NO: 35375 - RNA, 22 nt, Homo sapiens
gaaugcaugaggggaucagaug

SEQ ID NO: 35376 - RNA, 22 nt, Homo sapiens
gaauacuguccaagagugaugg

SEQ ID NO: 35377 - RNA, 22 nt, Homo sapiens
gaauagugcugcaaugaacaua

SEQ ID NO: 35378 - RNA, 22 nt, Homo sapiens
cuuguuguggaggggagugcag

SEQ ID NO: 35379 - RNA, 22 nt, Homo sapiens
cuuugggaccgcgguuuauacu

SEQ ID NO: 35380 - RNA, 22 nt, Homo sapiens
gaagauguugcuuaccuuggag

SEQ ID NO: 35381 - RNA, 22 nt, Homo sapiens
gaacuuguguugcuucacaugu

SEQ ID NO: 35382 - RNA, 22 nt, Homo sapiens
cuuugguguauuuucagagacc

SEQ ID NO: 35383 - RNA, 22 nt, Homo sapiens
gaagacauuuacaugggagacc

SEQ ID NO: 35384 - RNA, 22 nt, Homo sapiens
cuucacggugccuacuuguguc

SEQ ID NO: 35385 - RNA, 22 nt, Homo sapiens
cuuaaugcuacggcucuguguu

SEQ ID NO: 35386 - RNA, 22 nt, Homo sapiens
cuuagguuaugauaaauuuagu

SEQ ID NO: 35387 - RNA, 22 nt, Homo sapiens
cuuaacagugguauugaugacc

SEQ ID NO: 35388 - RNA, 22 nt, Homo sapiens
cugauauuuuaaaauuggcugg

SEQ ID NO: 35389 - RNA, 22 nt, Homo sapiens
cuugaccaauauggugaaaccc

SEQ ID NO: 35390 - RNA, 22 nt, Homo sapiens
cuugaauguaaauaauguacag

SEQ ID NO: 35391 - RNA, 22 nt, Homo sapiens
cuugccuaaucugcaugauuuu

SEQ ID NO: 35392 - RNA, 22 nt, Homo sapiens
cuugguuacauuuuccuagaaa

SEQ ID NO: 35393 - RNA, 22 nt, Homo sapiens
cuugucacuguuggcuuuagaa

SEQ ID NO: 35394 - RNA, 22 nt, Homo sapiens
cuuggcuugguaucaaauaacc

SEQ ID NO: 35395 - RNA, 22 nt, Homo sapiens
ggucauguguccaggagguagc

SEQ ID NO: 35396 - RNA, 22 nt, Homo sapiens
guaaacuuccccucaugaauga

SEQ ID NO: 35397 - RNA, 17 nt, Homo sapiens
guacucagugaccaugg

SEQ ID NO: 35398 - RNA, 22 nt, Homo sapiens
guacaguuuucaguguucacug

SEQ ID NO: 35399 - RNA, 22 nt, Homo sapiens
guacaugcauacaugcacaucu

SEQ ID NO: 35400 - RNA, 22 nt, Homo sapiens
guacaugcauaguuuauuucug

SEQ ID NO: 35401 - RNA, 22 nt, Homo sapiens
guagcagaauaucagauaauuu

SEQ ID NO: 35402 - RNA, 22 nt, Homo sapiens
guaugaguuuucugaugugugg

SEQ ID NO: 35403 - RNA, 22 nt, Homo sapiens
guaugguuuauagggaaauugu

SEQ ID NO: 35404 - RNA, 22 nt, Homo sapiens
guauuguacuacaagcucuuua

SEQ ID NO: 35405 - RNA, 22 nt, Homo sapiens
ggcgguguugauggcccccaca

SEQ ID NO: 35406 - RNA, 21 nt, Homo sapiens
ggcucuguggucucagguuuc

SEQ ID NO: 35407 - RNA, 22 nt, Homo sapiens
ggccggguggccauggcugccc

SEQ ID NO: 35408 - RNA, 22 nt, Homo sapiens
ggaaauguuggugucaugaguu

SEQ ID NO: 35409 - RNA, 22 nt, Homo sapiens
gcugugguuuaguagaaagaag

SEQ ID NO: 35410 - RNA, 20 nt, Homo sapiens
gcugugcuuaauacacuuuc

SEQ ID NO: 35411 - RNA, 22 nt, Homo sapiens
ggaagacuggcuuguuuaccca

SEQ ID NO: 35412 - RNA, 22 nt, Homo sapiens
gguaaaucuucacuaagacuga

SEQ ID NO: 35413 - RNA, 22 nt, Homo sapiens
gguaaacauaagagagcugacu

SEQ ID NO: 35414 - RNA, 22 nt, Homo sapiens
gggcauguggacuuguauguuu

SEQ ID NO: 35415 - RNA, 22 nt, Homo sapiens
ggguaaaucucuuuucauggcu

SEQ ID NO: 35416 - RNA, 22 nt, Homo sapiens
gggaucaacuuauacuaaaauu

SEQ ID NO: 35417 - RNA, 23 nt, Homo sapiens
gggauuguaaaauaugagggcag

SEQ ID NO: 35418 - RNA, 22 nt, Homo sapiens
gggaacaugagaaugugaauga

SEQ ID NO: 35419 - RNA, 22 nt, Homo sapiens
gggaacauggaaauucugcucu

SEQ ID NO: 35420 - RNA, 22 nt, Homo sapiens
ggcuuuggucacacaggggcaa

SEQ ID NO: 35421 - RNA, 22 nt, Homo sapiens
guguauguuucucccugucccu

SEQ ID NO: 35422 - RNA, 22 nt, Homo sapiens
guuaaugcuggaauaaguuaag

SEQ ID NO: 35423 - RNA, 22 nt, Homo sapiens
guuacugucuuccugauugcuu

SEQ ID NO: 35424 - RNA, 22 nt, Homo sapiens
guuauguuauguuauguuaugu

SEQ ID NO: 35425 - RNA, 22 nt, Homo sapiens
guuagaucauguuuggauaucu

SEQ ID NO: 35426 - RNA, 22 nt, Homo sapiens
guuauguuaguuacaaggcuag

SEQ ID NO: 35427 - RNA, 22 nt, Homo sapiens
guuaugcagcuuagaaaaugaa

SEQ ID NO: 35428 - RNA, 22 nt, Homo sapiens
guuauggaguauaugugaacug

SEQ ID NO: 35429 - RNA, 22 nt, Homo sapiens
gugcuuguguuaauauguagcu

SEQ ID NO: 35430 - RNA, 22 nt, Homo sapiens
gugcgguauuagcaagccaaca

SEQ ID NO: 35431 - RNA, 18 nt, Homo sapiens
guguauggauggaggcca

SEQ ID NO: 35432 - RNA, 22 nt, Homo sapiens
guguauacauagaauuguguau

SEQ ID NO: 35433 - RNA, 22 nt, Homo sapiens
guguauauccuauuaguucugu

SEQ ID NO: 35434 - RNA, 22 nt, Homo sapiens
guggguaaaucucuguuugagg

SEQ ID NO: 35435 - RNA, 22 nt, Homo sapiens
guguaauacauuagcaaaccaa

SEQ ID NO: 35436 - RNA, 22 nt, Homo sapiens
guguagagaaaaguaccauuuu

SEQ ID NO: 35437 - RNA, 22 nt, Homo sapiens
guggcuuuauuuagaagcaggg

SEQ ID NO: 35438 - RNA, 22 nt, Homo sapiens
gugauuuaguagaugcuaguua

SEQ ID NO: 35439 - RNA, 22 nt, Homo sapiens
gugcauauaaguuguuucuagu

SEQ ID NO: 35440 - RNA, 22 nt, Homo sapiens
gugcacuguagaacccuuuguu

SEQ ID NO: 35441 - RNA, 22 nt, Homo sapiens
gugcacaugcgugcgcacauau

SEQ ID NO: 35442 - RNA, 22 nt, Homo sapiens
gugagauaucuagacuagggaa

SEQ ID NO: 35443 - RNA, 22 nt, Homo sapiens
gugagaugguaucucauugugg

SEQ ID NO: 35444 - RNA, 22 nt, Homo sapiens
gucccugugucuuuauguggcc

SEQ ID NO: 35445 - RNA, 22 nt, Homo sapiens
gucauccaggcuggagugaagc

SEQ ID NO: 35446 - RNA, 22 nt, Homo sapiens
gucauguuuaacuucuugagga

SEQ ID NO: 35447 - RNA, 22 nt, Homo sapiens
gucauugaaguggaaucaucca

SEQ ID NO: 35448 - RNA, 22 nt, Homo sapiens
gucaugucugcacauaguaaaa

SEQ ID NO: 35449 - RNA, 22 nt, Homo sapiens
gucauuguguggacauggagaa

SEQ ID NO: 35450 - RNA, 22 nt, Homo sapiens
guuguauaggcauggggagaau

SEQ ID NO: 35451 - RNA, 22 nt, Homo sapiens
guuuaacugguacuucaagucu

SEQ ID NO: 35452 - RNA, 22 nt, Homo sapiens
uaaggcuuaugguaaaguccug

SEQ ID NO: 35453 - RNA, 22 nt, Homo sapiens
uaaguaaaugaaagguugauuu

SEQ ID NO: 35454 - RNA, 22 nt, Homo sapiens
guuguggagucuucuguucugg

SEQ ID NO: 35455 - RNA, 22 nt, Homo sapiens
uaaugcuaucugggccaggggu

SEQ ID NO: 35456 - RNA, 21 nt, Homo sapiens
uaauggcaugaucucggcuca

SEQ ID NO: 35457 - RNA, 22 nt, Homo sapiens
uaaugguuuugcaccaucccuc

SEQ ID NO: 35458 - RNA, 22 nt, Homo sapiens
uaaugcauguaaugggcugaua

SEQ ID NO: 35459 - RNA, 22 nt, Homo sapiens
uaaugcauacagaagguguuuu

SEQ ID NO: 35460 - RNA, 22 nt, Homo sapiens
uaauauguauacagacagauac

SEQ ID NO: 35461 - RNA, 22 nt, Homo sapiens
uagacuguaagauccaggagag

SEQ ID NO: 35462 - RNA, 20 nt, Homo sapiens
uagagagauauggggguucc

SEQ ID NO: 35463 - RNA, 22 nt, Homo sapiens
uagauaauuagaggguuuuaag

SEQ ID NO: 35464 - RNA, 22 nt, Homo sapiens
uagagguauaccaaaaaggcau

SEQ ID NO: 35465 - RNA, 16 nt, Homo sapiens
uacuacugccuauuau

SEQ ID NO: 35466 - RNA, 22 nt, Homo sapiens
uacguguauuguuuucacaaga

SEQ ID NO: 35467 - RNA, 20 nt, Homo sapiens
uacacguaugagcacaugug

SEQ ID NO: 35468 - RNA, 22 nt, Homo sapiens
uacagaucaguuauuuuguaga

SEQ ID NO: 35469 - RNA, 22 nt, Homo sapiens
uacagcacaggugcagguguug

SEQ ID NO: 35470 - RNA, 22 nt, Homo sapiens
uacacagucaaaaauuuccagg

SEQ ID NO: 35471 - RNA, 22 nt, Homo sapiens
uacacaugugaguucuuuucua

SEQ ID NO: 35472 - RNA, 16 nt, Homo sapiens
uacaauguagaaaaca

SEQ ID NO: 35473 - RNA, 21 nt, Homo sapiens
uacaagcuguagcacaugcca

SEQ ID NO: 35474 - RNA, 22 nt, Homo sapiens
uacauaguagauauaggguuua

SEQ ID NO: 35475 - RNA, 22 nt, Homo sapiens
uacauagucuucuuuugguuau

SEQ ID NO: 35476 - RNA, 20 nt, Homo sapiens
uacauaguaaacugagagca

SEQ ID NO: 35477 - RNA, 22 nt, Homo sapiens
uacauaguaagcaucuccugug

SEQ ID NO: 35478 - RNA, 22 nt, Homo sapiens
uacagucuagaggagaaucagg

SEQ ID NO: 35479 - RNA, 20 nt, Homo sapiens
uacaggacugagaaucugug

SEQ ID NO: 35480 - RNA, 20 nt, Homo sapiens
uagguuuucacagaauugcc

SEQ ID NO: 35481 - RNA, 22 nt, Homo sapiens
uauacagcaaguuacugugcug

SEQ ID NO: 35482 - RNA, 22 nt, Homo sapiens
uauaacacccacauauagucuu

SEQ ID NO: 35483 - RNA, 22 nt, Homo sapiens
uaguuguugcagguaggaugua

SEQ ID NO: 35484 - RNA, 22 nt, Homo sapiens
uaucaccuugcaggagcuauga

SEQ ID NO: 35485 - RNA, 22 nt, Homo sapiens
uaucacggaguacauguucugu

SEQ ID NO: 35486 - RNA, 22 nt, Homo sapiens
uaucacagguggacugcacacc

SEQ ID NO: 35487 - RNA, 22 nt, Homo sapiens
uauggcguaugaauuauaucuc

SEQ ID NO: 35488 - RNA, 22 nt, Homo sapiens
uauuuggauagucuggaaaaaa

SEQ ID NO: 35489 - RNA, 22 nt, Homo sapiens
uauuguccaauaggauguuccu

SEQ ID NO: 35490 - RNA, 22 nt, Homo sapiens
uauugauuaauugugauuaggc

SEQ ID NO: 35491 - RNA, 22 nt, Homo sapiens
uauggcauuuuguaagggcuug

SEQ ID NO: 35492 - RNA, 22 nt, Homo sapiens
uauggcauuauuuugauagaca

SEQ ID NO: 35493 - RNA, 19 nt, Homo sapiens
uaugcaacuuauagugcug

SEQ ID NO: 35494 - RNA, 22 nt, Homo sapiens
uaugcacaugugccugggugug

SEQ ID NO: 35495 - RNA, 22 nt, Homo sapiens
uaugccuuuugguucaagcaac

SEQ ID NO: 35496 - RNA, 22 nt, Homo sapiens
uaugcuuguuuauuuaagaaac

SEQ ID NO: 35497 - RNA, 22 nt, Homo sapiens
uauggaaaucuuaccuuauggu

SEQ ID NO: 35498 - RNA, 22 nt, Homo sapiens
uaugaacacuuuugggaggcau

SEQ ID NO: 35499 - RNA, 22 nt, Homo sapiens
uaucagcgugcaaaucuuugga

SEQ ID NO: 35500 - RNA, 22 nt, Homo sapiens
uaucauagacaaucaguuauug

SEQ ID NO: 35501 - RNA, 22 nt, Homo sapiens
uaucagcagagucauacuucaa

SEQ ID NO: 35502 - RNA, 22 nt, Homo sapiens
uaugacuguuugcucauucagg

SEQ ID NO: 35503 - RNA, 22 nt, Homo sapiens
uaugagcacauauguaucuaug

SEQ ID NO: 35504 - RNA, 22 nt, Homo sapiens
uuugguugucacaacuggggga

SEQ ID NO: 35505 - RNA, 22 nt, Homo sapiens
uuuguacuucauacaauaacuc

SEQ ID NO: 35506 - RNA, 22 nt, Homo sapiens
uuuguacuucauugguucuacu

SEQ ID NO: 35507 - RNA, 22 nt, Homo sapiens
uuuguacuugaagaaucuuuau

SEQ ID NO: 35508 - RNA, 22 nt, Homo sapiens
uuuguaauaccugaggcugggu

SEQ ID NO: 35509 - RNA, 22 nt, Homo sapiens
uuugggaaugguuugucuccca

SEQ ID NO: 35510 - RNA, 22 nt, Homo sapiens
uuuggguuuuauguaacagcua

SEQ ID NO: 35511 - RNA, 22 nt, Homo sapiens
uuuggguuaguuuuccaaucuu

SEQ ID NO: 35512 - RNA, 22 nt, Homo sapiens
uuugggaaugaguuuaucauuu

SEQ ID NO: 35513 - RNA, 22 nt, Homo sapiens
uuuguguccccacccacaucuc

SEQ ID NO: 35514 - RNA, 20 nt, Homo sapiens
uuuuagcuuuuauugaaagc

SEQ ID NO: 35515 - RNA, 22 nt, Homo sapiens
uuugugacucauggucuagugc

SEQ ID NO: 35516 - RNA, 23 nt, Homo sapiens
uuugugacacucuccaucuccag

SEQ ID NO: 35517 - RNA, 22 nt, Homo sapiens
uuuguccccgcccagaucucau

SEQ ID NO: 35518 - RNA, 23 nt, Homo sapiens
uuuguaguagcaugauuuauaau

SEQ ID NO: 35519 - RNA, 22 nt, Homo sapiens
uuugaauggaaguuuugugaaa

SEQ ID NO: 35520 - RNA, 22 nt, Homo sapiens
uuucccagugguacaguuuaua

SEQ ID NO: 35521 - RNA, 22 nt, Homo sapiens
uuuggcacuguaaauuucucuu

SEQ ID NO: 35522 - RNA, 22 nt, Homo sapiens
uuuggaagaugccacuguauca

SEQ ID NO: 35523 - RNA, 22 nt, Homo sapiens
uuuggaaugaaacagcagagcc

SEQ ID NO: 35524 - RNA, 23 nt, Homo sapiens
uuguucccuuccacucagucucc

SEQ ID NO: 35525 - RNA, 22 nt, Homo sapiens
uuuaaagcacggaguuuguggc

SEQ ID NO: 35526 - RNA, 22 nt, Homo sapiens
uuuaaagcaugacgagaagaag

SEQ ID NO: 35527 - RNA, 22 nt, Homo sapiens
uugugauggugcauacugagcu

SEQ ID NO: 35528 - RNA, 22 nt, Homo sapiens
uugugcauguauauuaguucac

SEQ ID NO: 35529 - RNA, 22 nt, Homo sapiens
uuguguccccacccaaaucuca

SEQ ID NO: 35530 - RNA, 22 nt, Homo sapiens
uuguguccccacccaaauuuca

SEQ ID NO: 35531 - RNA, 22 nt, Homo sapiens
uuguguccccacucaaauuaca

SEQ ID NO: 35532 - RNA, 22 nt, Homo sapiens
uugugucccugcccaaaucuca

SEQ ID NO: 35533 - RNA, 22 nt, Homo sapiens
uuggcauugccaaacugucaac

SEQ ID NO: 35534 - RNA, 22 nt, Homo sapiens
uuggcagaauguuagaaacuua

SEQ ID NO: 35535 - RNA, 22 nt, Homo sapiens
uuggacugggauggccgaggcu

SEQ ID NO: 35536 - RNA, 22 nt, Homo sapiens
uuggauggucuuuauauaguau

SEQ ID NO: 35537 - RNA, 22 nt, Homo sapiens
uuggauuuugguggcaacucau

SEQ ID NO: 35538 - RNA, 22 nt, Homo sapiens
uuggcaaagugucuggcauuua

SEQ ID NO: 35539 - RNA, 22 nt, Homo sapiens
uuggcgugaaacagccuuacau

SEQ ID NO: 35540 - RNA, 22 nt, Homo sapiens
uuguaccacagggcaugaagug

SEQ ID NO: 35541 - RNA, 22 nt, Homo sapiens
uuguaguagcauuauuuauaau

SEQ ID NO: 35542 - RNA, 22 nt, Homo sapiens
uuguagcuuuuuaaugugcugc

SEQ ID NO: 35543 - RNA, 22 nt, Homo sapiens
uuguacuagucauauuuugaaa

SEQ ID NO: 35544 - RNA, 22 nt, Homo sapiens
uuggcuguguuucccuacaaau

SEQ ID NO: 35545 - RNA, 22 nt, Homo sapiens
uuguagcaaauauauuuuggaa

SEQ ID NO: 35546 - RNA, 22 nt, Homo sapiens
uugucaaacucauucuccaucc

SEQ ID NO: 35547 - RNA, 22 nt, Homo sapiens
uugugaauggugcugcaguaaa

SEQ ID NO: 35548 - RNA, 22 nt, Homo sapiens
uuguauaggcucaguaagaauc

SEQ ID NO: 35549 - RNA, 22 nt, Homo sapiens
uuguaugucuucauuugaaaaa

SEQ ID NO: 35550 - RNA, 22 nt, Homo sapiens
uugcaugguuuuuaucugaaau

SEQ ID NO: 35551 - RNA, 22 nt, Homo sapiens
uugaucaauagaauacaacaga

SEQ ID NO: 35552 - RNA, 22 nt, Homo sapiens
uugauguguuuccaggauuugu

SEQ ID NO: 35553 - RNA, 22 nt, Homo sapiens
uugauguaggcauucaaggcua

SEQ ID NO: 35554 - RNA, 22 nt, Homo sapiens
uugaucaucagcuuugucaucu

SEQ ID NO: 35555 - RNA, 22 nt, Homo sapiens
uugaucuguguuagaagcuaag

SEQ ID NO: 35556 - RNA, 22 nt, Homo sapiens
uugccaacauggugaacuccca

SEQ ID NO: 35557 - RNA, 22 nt, Homo sapiens
uuggaaugcaacagaaggauaa

SEQ ID NO: 35558 - RNA, 22 nt, Homo sapiens
uugaguagaaguaugucaguau

SEQ ID NO: 35559 - RNA, 22 nt, Homo sapiens
uugaguaguaaggauauuaucu

SEQ ID NO: 35560 - RNA, 22 nt, Homo sapiens
uugaguagugugaugcaugucu

SEQ ID NO: 35561 - RNA, 22 nt, Homo sapiens
uugaguaguaagugguucaccg

SEQ ID NO: 35562 - RNA, 22 nt, Homo sapiens
uugauauguguauagcaugugg

SEQ ID NO: 35563 - RNA, 22 nt, Homo sapiens
uguggaaauggugcuacgaaca

SEQ ID NO: 35564 - RNA, 22 nt, Homo sapiens
ugugucuugcuggugccugcau

SEQ ID NO: 35565 - RNA, 22 nt, Homo sapiens
uguuaagaugucaauuuuccac

SEQ ID NO: 35566 - RNA, 22 nt, Homo sapiens
uguuaacauggucucagucugu

SEQ ID NO: 35567 - RNA, 22 nt, Homo sapiens
ugugcuauguuauucacauggg

SEQ ID NO: 35568 - RNA, 18 nt, Homo sapiens
ugugacauugagcauguc

SEQ ID NO: 35569 - RNA, 22 nt, Homo sapiens
ugugacagguagguaauuuuug

SEQ ID NO: 35570 - RNA, 22 nt, Homo sapiens
ugugacaguguuacauuucaug

SEQ ID NO: 35571 - RNA, 22 nt, Homo sapiens
ugucaugucuuuguguaucaau

SEQ ID NO: 35572 - RNA, 22 nt, Homo sapiens
ugucaucuagguuuuaagccuu

SEQ ID NO: 35573 - RNA, 22 nt, Homo sapiens
ugguccaguucugugauauugc

SEQ ID NO: 35574 - RNA, 22 nt, Homo sapiens
ugugaacauuuuguauauauua

SEQ ID NO: 35575 - RNA, 19 nt, Homo sapiens
ugugaacaucacagagugu

SEQ ID NO: 35576 - RNA, 22 nt, Homo sapiens
ugugaaaucagauagccuuuuu

SEQ ID NO: 35577 - RNA, 22 nt, Homo sapiens
ugucauguggcuaacgauucau

SEQ ID NO: 35578 - RNA, 22 nt, Homo sapiens
uuaauguaucuaucacaucaca

SEQ ID NO: 35579 - RNA, 22 nt, Homo sapiens
uuacagauggauggcagcuggc

SEQ ID NO: 35580 - RNA, 22 nt, Homo sapiens
uuaacagugucaaucuguagua

SEQ ID NO: 35581 - RNA, 22 nt, Homo sapiens
uuaacagcacuacguggggauc

SEQ ID NO: 35582 - RNA, 22 nt, Homo sapiens
uguuuguuugagauggagucuc

SEQ ID NO: 35583 - RNA, 22 nt, Homo sapiens
uuaaaugcauagaauguguagu

SEQ ID NO: 35584 - RNA, 22 nt, Homo sapiens
uuaaaugcuagaauuuucuuug

SEQ ID NO: 35585 - RNA, 22 nt, Homo sapiens
uguuauguucuacuuuuaggug

SEQ ID NO: 35586 - RNA, 22 nt, Homo sapiens
uguucaugaguucucauuuuua

SEQ ID NO: 35587 - RNA, 22 nt, Homo sapiens
uguuauugagguuacuuauaag

SEQ ID NO: 35588 - RNA, 22 nt, Homo sapiens
uguuacacugugcacuaaauuu

SEQ ID NO: 35589 - RNA, 22 nt, Homo sapiens
uguuugcuuaacguggagccag

SEQ ID NO: 35590 - RNA, 18 nt, Homo sapiens
uguuugguucugcgccuc

SEQ ID NO: 35591 - RNA, 22 nt, Homo sapiens
uguugcuuaagccacccagucu

SEQ ID NO: 35592 - RNA, 22 nt, Homo sapiens
uguuggacuuacuuggcagauu

SEQ ID NO: 35593 - RNA, 22 nt, Homo sapiens
uguugcauuugucaaggucaag

SEQ ID NO: 35594 - RNA, 22 nt, Homo sapiens
uuacacguaauaguaagccugg

SEQ ID NO: 35595 - RNA, 22 nt, Homo sapiens
uuacaguaugaguaagaguucu

SEQ ID NO: 35596 - RNA, 22 nt, Homo sapiens
uuacagguggagaaguaaggcu

SEQ ID NO: 35597 - RNA, 22 nt, Homo sapiens
uuacaugucuugguaagguuag

SEQ ID NO: 35598 - RNA, 22 nt, Homo sapiens
uuagguauuuuguuaugucagc

SEQ ID NO: 35599 - RNA, 22 nt, Homo sapiens
uuaguaguagcugcaugucagu

SEQ ID NO: 35600 - RNA, 22 nt, Homo sapiens
uuaguaguaguuugcauuuacc

SEQ ID NO: 35601 - RNA, 23 nt, Homo sapiens
uuaguaaacucaaugacaccaca

SEQ ID NO: 35602 - RNA, 20 nt, Homo sapiens
uuauaacuuuuguucugggg

SEQ ID NO: 35603 - RNA, 22 nt, Homo sapiens
uuauaacucugcagccugguau

SEQ ID NO: 35604 - RNA, 19 nt, Homo sapiens
uuauacuguauuguuuagg

SEQ ID NO: 35605 - RNA, 22 nt, Homo sapiens
uucaaaguuggaggacaaacug

SEQ ID NO: 35606 - RNA, 20 nt, Homo sapiens
uuaguucauuuagaagguuu

SEQ ID NO: 35607 - RNA, 22 nt, Homo sapiens
uuauaaacaugaagauuugggg

SEQ ID NO: 35608 - RNA, 19 nt, Homo sapiens
uucauacagugagagcagc

SEQ ID NO: 35609 - RNA, 22 nt, Homo sapiens
uucauguaauuccauaagguaa

SEQ ID NO: 35610 - RNA, 22 nt, Homo sapiens
uucauguaauauuucacagcuu

SEQ ID NO: 35611 - RNA, 22 nt, Homo sapiens
uucaaguaagaaagacaucagg

SEQ ID NO: 35612 - RNA, 23 nt, Homo sapiens
uucaaauguucucugguugucag

SEQ ID NO: 35613 - RNA, 22 nt, Homo sapiens
uucaagucaauuuuugaaugac

SEQ ID NO: 35614 - RNA, 22 nt, Homo sapiens
uucaagucaacaagcacuugag

SEQ ID NO: 35615 - RNA, 22 nt, Homo sapiens
uucaagucuuggcuuugccacc

SEQ ID NO: 35616 - RNA, 22 nt, Homo sapiens
uuccuugagagcuugauaucac

SEQ ID NO: 35617 - RNA, 22 nt, Homo sapiens
uucgucaugagacagaugcuga

SEQ ID NO: 35618 - RNA, 22 nt, Homo sapiens
uucugccaaucaacccacaucc

SEQ ID NO: 35619 - RNA, 23 nt, Homo sapiens
uucugccacugaaaaugccucag

SEQ ID NO: 35620 - RNA, 22 nt, Homo sapiens
uucuggaaaucagcagagggug

SEQ ID NO: 35621 - RNA, 22 nt, Homo sapiens
uucugcacaucgaucacaagau

SEQ ID NO: 35622 - RNA, 22 nt, Homo sapiens
uuccauugugucaucuuggugg

SEQ ID NO: 35623 - RNA, 22 nt, Homo sapiens
uucccuuucugaaaaucucauu

SEQ ID NO: 35624 - RNA, 22 nt, Homo sapiens
uuccaugagaugcaucaaagcu

SEQ ID NO: 35625 - RNA, 22 nt, Homo sapiens
uuccaggugggcgugggccugg

SEQ ID NO: 35626 - RNA, 22 nt, Homo sapiens
uuccaauguuccguguugcagu

SEQ ID NO: 35627 - RNA, 22 nt, Homo sapiens
uuccacaauggcugaacuaguu

SEQ ID NO: 35628 - RNA, 22 nt, Homo sapiens
uuccacaaugguugaacuaguu

SEQ ID NO: 35629 - RNA, 22 nt, Homo sapiens
ucccuguagugccuagaucaga

SEQ ID NO: 35630 - RNA, 22 nt, Homo sapiens
uccugcauucugaaauacaagu

SEQ ID NO: 35631 - RNA, 22 nt, Homo sapiens
uccuguaaucccagcuaccaga

SEQ ID NO: 35632 - RNA, 22 nt, Homo sapiens
uccuucauuugucaacucuagu

SEQ ID NO: 35633 - RNA, 22 nt, Homo sapiens
ucgcaguuaauaaugaugugcg

SEQ ID NO: 35634 - RNA, 22 nt, Homo sapiens
ucgcauuucccucuguagcuuc

SEQ ID NO: 35635 - RNA, 19 nt, Homo sapiens
uccccgggucuagugcagc

SEQ ID NO: 35636 - RNA, 19 nt, Homo sapiens
ucccuguagaccacagugc

SEQ ID NO: 35637 - RNA, 22 nt, Homo sapiens
uccccggaugacggccgcuuca

SEQ ID NO: 35638 - RNA, 22 nt, Homo sapiens
uccacguggucuaucuguccuu

SEQ ID NO: 35639 - RNA, 22 nt, Homo sapiens
ucauuggauggaaugcucugua

SEQ ID NO: 35640 - RNA, 22 nt, Homo sapiens
uccaauguaaucaucauugaau

SEQ ID NO: 35641 - RNA, 22 nt, Homo sapiens
ucagucuuuuuuuggcaagcau

SEQ ID NO: 35642 - RNA, 20 nt, Homo sapiens
ucaguauauuguuuccacag

SEQ ID NO: 35643 - RNA, 18 nt, Homo sapiens
ucacaaccacagugcugu

SEQ ID NO: 35644 - RNA, 22 nt, Homo sapiens
ucaacagugauggaaaguuaua

SEQ ID NO: 35645 - RNA, 22 nt, Homo sapiens
ucaacugcuugagaucacaaau

SEQ ID NO: 35646 - RNA, 22 nt, Homo sapiens
ucaagcaauucgccugucucag

SEQ ID NO: 35647 - RNA, 22 nt, Homo sapiens
ucacccacacaggagacaggga

SEQ ID NO: 35648 - RNA, 19 nt, Homo sapiens
ucaccaguacacaauacaa

SEQ ID NO: 35649 - RNA, 18 nt, Homo sapiens
ucacggggagcagcagcc

SEQ ID NO: 35650 - RNA, 22 nt, Homo sapiens
ucacgguggaaucccagauccc

SEQ ID NO: 35651 - RNA, 19 nt, Homo sapiens
ucacgugcagcagccacac

SEQ ID NO: 35652 - RNA, 22 nt, Homo sapiens
ugaacuguaagguauaggugau

SEQ ID NO: 35653 - RNA, 22 nt, Homo sapiens
ugaagacucauacuugaaucag

SEQ ID NO: 35654 - RNA, 22 nt, Homo sapiens
ugacauguagagaacuucucau

SEQ ID NO: 35655 - RNA, 22 nt, Homo sapiens
ugacauuacagucacuugcugu

SEQ ID NO: 35656 - RNA, 19 nt, Homo sapiens
ugagaacaugugguauuug

SEQ ID NO: 35657 - RNA, 18 nt, Homo sapiens
ugagaacauguguacaca

SEQ ID NO: 35658 - RNA, 22 nt, Homo sapiens
ugacuuaugcaacucugaugug

SEQ ID NO: 35659 - RNA, 22 nt, Homo sapiens
ugacuugagcuggagccugccu

SEQ ID NO: 35660 - RNA, 22 nt, Homo sapiens
ugacugguguuuaaugagucaa

SEQ ID NO: 35661 - RNA, 22 nt, Homo sapiens
ugacuauaggauaacaugcauu

SEQ ID NO: 35662 - RNA, 22 nt, Homo sapiens
ugacggaggacaccugcggaau

SEQ ID NO: 35663 - RNA, 17 nt, Homo sapiens
ugaccacugauucuacu

SEQ ID NO: 35664 - RNA, 22 nt, Homo sapiens
ucuuuggucagaaagauuacac

SEQ ID NO: 35665 - RNA, 22 nt, Homo sapiens
ucuuuuguucuauucaggccuu

SEQ ID NO: 35666 - RNA, 22 nt, Homo sapiens
ucuuugguucuguuuauguaau

SEQ ID NO: 35667 - RNA, 22 nt, Homo sapiens
ucuucguuuaaagcaguggaag

SEQ ID NO: 35668 - RNA, 22 nt, Homo sapiens
ucucaaguggucgcaguuagau

SEQ ID NO: 35669 - RNA, 22 nt, Homo sapiens
ucucaaguaacugggacaauaa

SEQ ID NO: 35670 - RNA, 22 nt, Homo sapiens
ucucacauuucacagggauggg

SEQ ID NO: 35671 - RNA, 20 nt, Homo sapiens
ugggaaauguccaggacaua

SEQ ID NO: 35672 - RNA, 22 nt, Homo sapiens
ugggaaauguagccuagcugug

SEQ ID NO: 35673 - RNA, 22 nt, Homo sapiens
uggcuuuuccuugaaucugccu

SEQ ID NO: 35674 - RNA, 22 nt, Homo sapiens
ugggaagcugcugaacuacagu

SEQ ID NO: 35675 - RNA, 22 nt, Homo sapiens
uggcuuuucauccugggacauu

SEQ ID NO: 35676 - RNA, 22 nt, Homo sapiens
uggcuuuuccaggcauuacgau

SEQ ID NO: 35677 - RNA, 22 nt, Homo sapiens
uggcuuucuggggcuucuguuc

SEQ ID NO: 35678 - RNA, 22 nt, Homo sapiens
uggcuuuuaucuacucucaacu

SEQ ID NO: 35679 - RNA, 22 nt, Homo sapiens
uggcauggucugcccaaguuuc

SEQ ID NO: 35680 - RNA, 22 nt, Homo sapiens
uggcauggggcagaacauuaca

SEQ ID NO: 35681 - RNA, 20 nt, Homo sapiens
uggcaugaaauuuuccaagc

SEQ ID NO: 35682 - RNA, 22 nt, Homo sapiens
uggcaguuuugauguggagaga

SEQ ID NO: 35683 - RNA, 22 nt, Homo sapiens
ugggaucgucaagugaggcucg

SEQ ID NO: 35684 - RNA, 22 nt, Homo sapiens
ugggaucauuaugcauagugua

SEQ ID NO: 35685 - RNA, 22 nt, Homo sapiens
ugggccgcugcaggaugguccc

SEQ ID NO: 35686 - RNA, 22 nt, Homo sapiens
uggguaaaucucuguucagggc

SEQ ID NO: 35687 - RNA, 22 nt, Homo sapiens
uggucaccuucuugcucugucu

SEQ ID NO: 35688 - RNA, 22 nt, Homo sapiens
ugguaugucuagauggggaagu

SEQ ID NO: 35689 - RNA, 22 nt, Homo sapiens
ugguauuuaauauaugagaguu

SEQ ID NO: 35690 - RNA, 22 nt, Homo sapiens
ugguauguaugauuaacaugga

SEQ ID NO: 35691 - RNA, 22 nt, Homo sapiens
ugguacuucaugcucacagaua

SEQ ID NO: 35692 - RNA, 22 nt, Homo sapiens
uggagucgugcccuugcauuua

SEQ ID NO: 35693 - RNA, 19 nt, Homo sapiens
uggauuguuagagcagugu

SEQ ID NO: 35694 - RNA, 22 nt, Homo sapiens
uggcaaaugaagucagcuguac

SEQ ID NO: 35695 - RNA, 22 nt, Homo sapiens
uggcaaauguaguacccaauag

SEQ ID NO: 35696 - RNA, 22 nt, Homo sapiens
uggcaaaauauuuugguuucug

SEQ ID NO: 35697 - RNA, 22 nt, Homo sapiens
uggcaaauauuuuguuuuguaa

SEQ ID NO: 35698 - RNA, 22 nt, Homo sapiens
uggacuguaauuuuauaggcau

SEQ ID NO: 35699 - RNA, 19 nt, Homo sapiens
uggaccccuuccuuacacc

SEQ ID NO: 35700 - RNA, 22 nt, Homo sapiens
uggaagauggaguuuuaucauu

SEQ ID NO: 35701 - RNA, 22 nt, Homo sapiens
uggaacacauaaauagcauagu

SEQ ID NO: 35702 - RNA, 22 nt, Homo sapiens
uggaaauaaaugugccaagauc

SEQ ID NO: 35703 - RNA, 22 nt, Homo sapiens
ugagaacugguagcacuuguga

SEQ ID NO: 35704 - RNA, 22 nt, Homo sapiens
ugagaacuuauggugauuuuuu

SEQ ID NO: 35705 - RNA, 22 nt, Homo sapiens
ugagaacuuugucuuuuacucu

SEQ ID NO: 35706 - RNA, 22 nt, Homo sapiens
ugagacaaaguuguuggauguu

SEQ ID NO: 35707 - RNA, 22 nt, Homo sapiens
ugagacacugaauccggccuga

SEQ ID NO: 35708 - RNA, 22 nt, Homo sapiens
ugagcagagggagaaguaaauu

SEQ ID NO: 35709 - RNA, 22 nt, Homo sapiens
ugaggaauguguguuaaagaua

SEQ ID NO: 35710 - RNA, 22 nt, Homo sapiens
ugaggacugagaggcacugugg

SEQ ID NO: 35711 - RNA, 22 nt, Homo sapiens
ugauaauuuugucagguuuugg

SEQ ID NO: 35712 - RNA, 23 nt, Homo sapiens
ugauaacagcauaugaagauucu

SEQ ID NO: 35713 - RNA, 22 nt, Homo sapiens
ugaugugucaucugagagagug

SEQ ID NO: 35714 - RNA, 22 nt, Homo sapiens
ggggcauugugucuggguuccu

SEQ ID NO: 35715 - RNA, 22 nt, Homo sapiens
ggggucaucagagaaucuaccc

SEQ ID NO: 35716 - RNA, 22 nt, Homo sapiens
gguaauguaacugguauucugu

SEQ ID NO: 35717 - RNA, 22 nt, Homo sapiens
gguauguuuagaccauuuacau

SEQ ID NO: 35718 - RNA, 22 nt, Homo sapiens
gguauuauuugccuuuuacuga

SEQ ID NO: 35719 - RNA, 23 nt, Homo sapiens
guaauacuagucauaguagcagg

SEQ ID NO: 35720 - RNA, 22 nt, Homo sapiens
guagagguagauucuguuuuga

SEQ ID NO: 35721 - RNA, 22 nt, Homo sapiens
guaagagaauggguuacuuucc

SEQ ID NO: 35722 - RNA, 22 nt, Homo sapiens
guaacagucucaacaguggucu

SEQ ID NO: 35723 - RNA, 22 nt, Homo sapiens
guaaauguccccugugauauug

SEQ ID NO: 35724 - RNA, 18 nt, Homo sapiens
guaaauguaucuauugcc

SEQ ID NO: 35725 - RNA, 22 nt, Homo sapiens
guaaaucucuguuuucauggac

SEQ ID NO: 35726 - RNA, 22 nt, Homo sapiens
guaguaccauuaggauauuucu

SEQ ID NO: 35727 - RNA, 22 nt, Homo sapiens
guauacacccugugauauuauu

SEQ ID NO: 35728 - RNA, 22 nt, Homo sapiens
guauacaguugacccuugaacc

SEQ ID NO: 35729 - RNA, 22 nt, Homo sapiens
guauaugccucaguuauagcac

SEQ ID NO: 35730 - RNA, 22 nt, Homo sapiens
guauuuuguuagggugugguau

SEQ ID NO: 35731 - RNA, 19 nt, Homo sapiens
guauuugacuuucuuguuu

SEQ ID NO: 35732 - RNA, 22 nt, Homo sapiens
guauugacuaucaaucaugugc

SEQ ID NO: 35733 - RNA, 21 nt, Homo sapiens
guauggcauugauuaguuacu

SEQ ID NO: 35734 - RNA, 21 nt, Homo sapiens
guaugguugaagugacaagcc

SEQ ID NO: 35735 - RNA, 22 nt, Homo sapiens
guauagaucguagaccaauaaa

SEQ ID NO: 35736 - RNA, 22 nt, Homo sapiens
guaugcacauauguguauguau

SEQ ID NO: 35737 - RNA, 22 nt, Homo sapiens
guaugguugaagugacaagcca

SEQ ID NO: 35738 - RNA, 22 nt, Homo sapiens
guaugguuguaugaggacccau

SEQ ID NO: 35739 - RNA, 23 nt, Homo sapiens
ggaguguauuggcacgaucucag

SEQ ID NO: 35740 - RNA, 22 nt, Homo sapiens
ggauugugauaauuguugcaaa

SEQ ID NO: 35741 - RNA, 22 nt, Homo sapiens
ggauauguagggcauaucuaca

SEQ ID NO: 35742 - RNA, 22 nt, Homo sapiens
ggcagcgugguggauugaaaau

SEQ ID NO: 35743 - RNA, 22 nt, Homo sapiens
ggcaacaauuccuacuucuuuu

SEQ ID NO: 35744 - RNA, 22 nt, Homo sapiens
ggcgccauugcacuccagccug

SEQ ID NO: 35745 - RNA, 22 nt, Homo sapiens
ggcgguguccuccaagugcuuc

SEQ ID NO: 35746 - RNA, 22 nt, Homo sapiens
ggcaguuuguucuugcuccuuu

SEQ ID NO: 35747 - RNA, 22 nt, Homo sapiens
ggcaugaaguagcccacaggca

SEQ ID NO: 35748 - RNA, 21 nt, Homo sapiens
ggcaugaauggaaaagugaga

SEQ ID NO: 35749 - RNA, 22 nt, Homo sapiens
gccccgggugaugcagccguca

SEQ ID NO: 35750 - RNA, 22 nt, Homo sapiens
gcccuguaguauaguuugaagu

SEQ ID NO: 35751 - RNA, 22 nt, Homo sapiens
ggaguguaauggcgccaucuca

SEQ ID NO: 35752 - RNA, 22 nt, Homo sapiens
ggacacguagaugccgacuagc

SEQ ID NO: 35753 - RNA, 22 nt, Homo sapiens
ggaauauaaaacuuuugacagg

SEQ ID NO: 35754 - RNA, 22 nt, Homo sapiens
ggaauguauuaaggcauugggc

SEQ ID NO: 35755 - RNA, 22 nt, Homo sapiens
gugugguauuauaacuagguau

SEQ ID NO: 35756 - RNA, 22 nt, Homo sapiens
guguuauggagccaaacuacua

SEQ ID NO: 35757 - RNA, 22 nt, Homo sapiens
guguucaaacccaggucugucu

SEQ ID NO: 35758 - RNA, 22 nt, Homo sapiens
guguucaaauucugacagagag

SEQ ID NO: 35759 - RNA, 22 nt, Homo sapiens
guguucauggaauuugcaauug

SEQ ID NO: 35760 - RNA, 22 nt, Homo sapiens
guucaucagggacacugguuug

SEQ ID NO: 35761 - RNA, 22 nt, Homo sapiens
guuauuaguugauauuaaguuc

SEQ ID NO: 35762 - RNA, 22 nt, Homo sapiens
guuauguuaaauuguuguaugc

SEQ ID NO: 35763 - RNA, 22 nt, Homo sapiens
guuauguaucuugauugggugg

SEQ ID NO: 35764 - RNA, 22 nt, Homo sapiens
guuaugacacucuuuuuaucau

SEQ ID NO: 35765 - RNA, 22 nt, Homo sapiens
guuagugcuuauuaaauaguau

SEQ ID NO: 35766 - RNA, 18 nt, Homo sapiens
guuagguaguaugaugcu

SEQ ID NO: 35767 - RNA, 22 nt, Homo sapiens
guuaugcagcaauugauaaucu

SEQ ID NO: 35768 - RNA, 22 nt, Homo sapiens
guguaugugagaaugcucaugu

SEQ ID NO: 35769 - RNA, 22 nt, Homo sapiens
guguauguuguccauggaugcg

SEQ ID NO: 35770 - RNA, 22 nt, Homo sapiens
guggaauauaaagcaucgugua

SEQ ID NO: 35771 - RNA, 22 nt, Homo sapiens
guggaaggucaugaauguucuu

SEQ ID NO: 35772 - RNA, 22 nt, Homo sapiens
guggaggacuggauaaagaaaa

SEQ ID NO: 35773 - RNA, 22 nt, Homo sapiens
guggagcuguguggccuugggc

SEQ ID NO: 35774 - RNA, 22 nt, Homo sapiens
gugauaucacuguaucacucca

SEQ ID NO: 35775 - RNA, 22 nt, Homo sapiens
guggaagaccagacuuuccaac

SEQ ID NO: 35776 - RNA, 22 nt, Homo sapiens
guccagagaagucauuacuuca

SEQ ID NO: 35777 - RNA, 22 nt, Homo sapiens
gucgguguuuccugagaacgaa

SEQ ID NO: 35778 - RNA, 22 nt, Homo sapiens
gucgugcagaccucacagcauu

SEQ ID NO: 35779 - RNA, 22 nt, Homo sapiens
gucucccagccuacauauuucu

SEQ ID NO: 35780 - RNA, 22 nt, Homo sapiens
gucacuguggagaagaaagugg

SEQ ID NO: 35781 - RNA, 22 nt, Homo sapiens
gucacagcacuuuuaguaagug

SEQ ID NO: 35782 - RNA, 22 nt, Homo sapiens
gucacugagauugguauuaaug

SEQ ID NO: 35783 - RNA, 22 nt, Homo sapiens
uagagcucaucuucuuuaaacu

SEQ ID NO: 35784 - RNA, 22 nt, Homo sapiens
uagagcuugacacuuuccaugg

SEQ ID NO: 35785 - RNA, 22 nt, Homo sapiens
uagaucacucaggcaauaaaag

SEQ ID NO: 35786 - RNA, 22 nt, Homo sapiens
uagcacagggaauugguucucu

SEQ ID NO: 35787 - RNA, 22 nt, Homo sapiens
uagaugauucacuuuacuucca

SEQ ID NO: 35788 - RNA, 19 nt, Homo sapiens
uagaugucuuugcauagau

SEQ ID NO: 35789 - RNA, 22 nt, Homo sapiens
uagcaacauucagcucagguac

SEQ ID NO: 35790 - RNA, 20 nt, Homo sapiens
uacugcacuccaaccuaggc

SEQ ID NO: 35791 - RNA, 22 nt, Homo sapiens
uacguuguuugagggcaggagu

SEQ ID NO: 35792 - RNA, 23 nt, Homo sapiens
uacagcugcagaaucaggcuaag

SEQ ID NO: 35793 - RNA, 22 nt, Homo sapiens
uacaaguauuuuuauuagugcc

SEQ ID NO: 35794 - RNA, 22 nt, Homo sapiens
uacaagcaggaaaugguauaug

SEQ ID NO: 35795 - RNA, 22 nt, Homo sapiens
uacacacguguguauauauaca

SEQ ID NO: 35796 - RNA, 22 nt, Homo sapiens
uacaauagugacaaaucagcau

SEQ ID NO: 35797 - RNA, 22 nt, Homo sapiens
uaacaccuugcucugucaauaa

SEQ ID NO: 35798 - RNA, 22 nt, Homo sapiens
uaacauucacaugcugcaaaaa

SEQ ID NO: 35799 - RNA, 22 nt, Homo sapiens
uaacauagucauauacuugcuu

SEQ ID NO: 35800 - RNA, 22 nt, Homo sapiens
uaacagucaagguuugaccagg

SEQ ID NO: 35801 - RNA, 22 nt, Homo sapiens
uaacaacauucuaacugacggc

SEQ ID NO: 35802 - RNA, 22 nt, Homo sapiens
uaacacagagcuccuaaucccu

SEQ ID NO: 35803 - RNA, 22 nt, Homo sapiens
uaaaugacugucaguagaugaa

SEQ ID NO: 35804 - RNA, 22 nt, Homo sapiens
uaaaugcuuaauugaaugugga

SEQ ID NO: 35805 - RNA, 22 nt, Homo sapiens
uaaauugcauaaguacaaauga

SEQ ID NO: 35806 - RNA, 22 nt, Homo sapiens
guucuauguugggaguucacua

SEQ ID NO: 35807 - RNA, 22 nt, Homo sapiens
guugaguuugaccugaacucug

SEQ ID NO: 35808 - RNA, 22 nt, Homo sapiens
uaagguuacaaaggacuucaua

SEQ ID NO: 35809 - RNA, 22 nt, Homo sapiens
uaagucguggaugauucuucgg

SEQ ID NO: 35810 - RNA, 23 nt, Homo sapiens
uaagucacacagauuaauuuauu

SEQ ID NO: 35811 - RNA, 22 nt, Homo sapiens
uaaguauuaugugcugcauuuu

SEQ ID NO: 35812 - RNA, 16 nt, Homo sapiens
uacaacagugaguaug

SEQ ID NO: 35813 - RNA, 22 nt, Homo sapiens
uacaagcacaggcagcaggcug

SEQ ID NO: 35814 - RNA, 22 nt, Homo sapiens
uacaaaguaacaguuccuguau

SEQ ID NO: 35815 - RNA, 22 nt, Homo sapiens
uaaugcaucagugguaguucuu

SEQ ID NO: 35816 - RNA, 22 nt, Homo sapiens
uaaugcaucaugguuggcaaac

SEQ ID NO: 35817 - RNA, 22 nt, Homo sapiens
uaauaguuucagaaguuguuuu

SEQ ID NO: 35818 - RNA, 22 nt, Homo sapiens
uaauauguuuugaaaucaggaa

SEQ ID NO: 35819 - RNA, 22 nt, Homo sapiens
uaucaccauguccguuuuaaaa

SEQ ID NO: 35820 - RNA, 22 nt, Homo sapiens
uauaugcucugggauccugaaa

SEQ ID NO: 35821 - RNA, 22 nt, Homo sapiens
uaucaccuugcaguggaugcua

SEQ ID NO: 35822 - RNA, 22 nt, Homo sapiens
uaucagcacaguggguucaugg

SEQ ID NO: 35823 - RNA, 22 nt, Homo sapiens
uaucaguauggauucauggauu

SEQ ID NO: 35824 - RNA, 22 nt, Homo sapiens
uaucacuguuguuuguuuaagg

SEQ ID NO: 35825 - RNA, 22 nt, Homo sapiens
uaucaugggggguguacacucc

SEQ ID NO: 35826 - RNA, 22 nt, Homo sapiens
uaucauuguguuauuucuucca

SEQ ID NO: 35827 - RNA, 22 nt, Homo sapiens
uauagcuuaaaguuuagauccu

SEQ ID NO: 35828 - RNA, 22 nt, Homo sapiens
uauaucacaugcacucauuuuc

SEQ ID NO: 35829 - RNA, 22 nt, Homo sapiens
uauaugcacucagguguaugug

SEQ ID NO: 35830 - RNA, 22 nt, Homo sapiens
uauagcuugaaggaauggucau

SEQ ID NO: 35831 - RNA, 22 nt, Homo sapiens
uauagcuugauuauggugaugg

SEQ ID NO: 35832 - RNA, 21 nt, Homo sapiens
uauaguaguaugauuuacaau

SEQ ID NO: 35833 - RNA, 22 nt, Homo sapiens
uauauagcuaugucuguccauu

SEQ ID NO: 35834 - RNA, 22 nt, Homo sapiens
uagucccauaugauuuagugaa

SEQ ID NO: 35835 - RNA, 18 nt, Homo sapiens
uaguacuguucucaugau

SEQ ID NO: 35836 - RNA, 18 nt, Homo sapiens
uagcagacaucauugggg

SEQ ID NO: 35837 - RNA, 22 nt, Homo sapiens
uaugucaugggguuuuugagau

SEQ ID NO: 35838 - RNA, 22 nt, Homo sapiens
uauuaguuuucuguggauuaca

SEQ ID NO: 35839 - RNA, 22 nt, Homo sapiens
uauuaguuguaugauucccaag

SEQ ID NO: 35840 - RNA, 22 nt, Homo sapiens
uauuacuguuauuccuaucaaa

SEQ ID NO: 35841 - RNA, 22 nt, Homo sapiens
uauuacuugucugugucucaau

SEQ ID NO: 35842 - RNA, 22 nt, Homo sapiens
uauguuaucaaaaagcuaagga

SEQ ID NO: 35843 - RNA, 22 nt, Homo sapiens
uaugucuuuugcuugcaaauag

SEQ ID NO: 35844 - RNA, 18 nt, Homo sapiens
uauuaagcuagauauuau

SEQ ID NO: 35845 - RNA, 22 nt, Homo sapiens
uaugcacacacguguuuaugug

SEQ ID NO: 35846 - RNA, 22 nt, Homo sapiens
uaugcacacguguccaugugca

SEQ ID NO: 35847 - RNA, 23 nt, Homo sapiens
uaugccuguuucaaacaaacuuu

SEQ ID NO: 35848 - RNA, 22 nt, Homo sapiens
uaugccuuuuggcucaagaaac

SEQ ID NO: 35849 - RNA, 17 nt, Homo sapiens
ucaaaugcucccaguga

SEQ ID NO: 35850 - RNA, 22 nt, Homo sapiens
uauuguacauguuauagauuuu

SEQ ID NO: 35851 - RNA, 22 nt, Homo sapiens
uauugucaccaucccuguuuua

SEQ ID NO: 35852 - RNA, 22 nt, Homo sapiens
ucaaagucuucucaaguaacau

SEQ ID NO: 35853 - RNA, 22 nt, Homo sapiens
uauugcuugaggaaaugguaau

SEQ ID NO: 35854 - RNA, 22 nt, Homo sapiens
uauuguacauauccucccuuca

SEQ ID NO: 35855 - RNA, 22 nt, Homo sapiens
uauucaagccaaauucaagcca

SEQ ID NO: 35856 - RNA, 22 nt, Homo sapiens
uauugcagugagauccaucugg

SEQ ID NO: 35857 - RNA, 22 nt, Homo sapiens
uauugcuacuuugccuuccaaa

SEQ ID NO: 35858 - RNA, 22 nt, Homo sapiens
cauggcaucuguguggccucca

SEQ ID NO: 35859 - RNA, 22 nt, Homo sapiens
cauggguuuucucaaguaguca

SEQ ID NO: 35860 - RNA, 22 nt, Homo sapiens
cagcacauuacaaguacuuggu

SEQ ID NO: 35861 - RNA, 22 nt, Homo sapiens
caugugcaugcuuucuuaugug

SEQ ID NO: 35862 - RNA, 22 nt, Homo sapiens
cauguauagauuccauaguggu

SEQ ID NO: 35863 - RNA, 22 nt, Homo sapiens
cauugcacuccagcccuggcaa

SEQ ID NO: 35864 - RNA, 22 nt, Homo sapiens
cauugcacuccagccuugguga

SEQ ID NO: 35865 - RNA, 20 nt, Homo sapiens
cauugcacuccagcuugggc

SEQ ID NO: 35866 - RNA, 22 nt, Homo sapiens
cauugcacuccagcuugggcaa

SEQ ID NO: 35867 - RNA, 22 nt, Homo sapiens
cauugcacuccagccuggcaac

SEQ ID NO: 35868 - RNA, 22 nt, Homo sapiens
cauugcacuccagcccagguga

SEQ ID NO: 35869 - RNA, 19 nt, Homo sapiens
cauuggacuugcuuuugcc

SEQ ID NO: 35870 - RNA, 22 nt, Homo sapiens
cauugcacuccauccuuggcaa

SEQ ID NO: 35871 - RNA, 22 nt, Homo sapiens
cauugcacucuagccucggcaa

SEQ ID NO: 35872 - RNA, 22 nt, Homo sapiens
cauugcacugcuucuugggugu

SEQ ID NO: 35873 - RNA, 22 nt, Homo sapiens
ccaguauuuuauugaggguuuu

SEQ ID NO: 35874 - RNA, 22 nt, Homo sapiens
ccauugaacaugaaggaaugug

SEQ ID NO: 35875 - RNA, 22 nt, Homo sapiens
ccaucacgugcaguggccccac

SEQ ID NO: 35876 - RNA, 22 nt, Homo sapiens
ccaguguuuuugaauuccagga

SEQ ID NO: 35877 - RNA, 22 nt, Homo sapiens
ccaguuuuuggcaaugaugaau

SEQ ID NO: 35878 - RNA, 22 nt, Homo sapiens
ccaguguuuggauuagggaugc

SEQ ID NO: 35879 - RNA, 19 nt, Homo sapiens
ccaguguugccagagcuga

SEQ ID NO: 35880 - RNA, 22 nt, Homo sapiens
ccuccauuugugucaggaaguc

SEQ ID NO: 35881 - RNA, 22 nt, Homo sapiens
ccugaugacacgggagauguac

SEQ ID NO: 35882 - RNA, 22 nt, Homo sapiens
cuaggcacugauaguuguauuu

SEQ ID NO: 35883 - RNA, 22 nt, Homo sapiens
cuagccuggagugcaguggugc

SEQ ID NO: 35884 - RNA, 22 nt, Homo sapiens
cuagauuguuuccauaaugaca

SEQ ID NO: 35885 - RNA, 20 nt, Homo sapiens
cucuaguaauaaaguuuccc

SEQ ID NO: 35886 - RNA, 22 nt, Homo sapiens
cuccaugagauuguugaaguag

SEQ ID NO: 35887 - RNA, 22 nt, Homo sapiens
cuauauacugccugcugauuag

SEQ ID NO: 35888 - RNA, 22 nt, Homo sapiens
cuauaugucuguuuugguacca

SEQ ID NO: 35889 - RNA, 22 nt, Homo sapiens
cacugcauccuugaccuucugg

SEQ ID NO: 35890 - RNA, 22 nt, Homo sapiens
cagagaacugaguuauuuucuu

SEQ ID NO: 35891 - RNA, 21 nt, Homo sapiens
cagagaucaucucuguuuuaa

SEQ ID NO: 35892 - RNA, 22 nt, Homo sapiens
cagaguuaguagccuuugacaa

SEQ ID NO: 35893 - RNA, 22 nt, Homo sapiens
caaguacugggcuauggauauu

SEQ ID NO: 35894 - RNA, 22 nt, Homo sapiens
auuugucacuuaacagccauua

SEQ ID NO: 35895 - RNA, 22 nt, Homo sapiens
cacccuaucagauguccagaga

SEQ ID NO: 35896 - RNA, 22 nt, Homo sapiens
cacccgugacgcugucugaaau

SEQ ID NO: 35897 - RNA, 22 nt, Homo sapiens
caaucugucuuuuagggggcca

SEQ ID NO: 35898 - RNA, 22 nt, Homo sapiens
caaugcauuauucucccacuuc

SEQ ID NO: 35899 - RNA, 22 nt, Homo sapiens
caauugcacucuuagguguaca

SEQ ID NO: 35900 - RNA, 21 nt, Homo sapiens
caauggcacgaucuuggcuca

SEQ ID NO: 35901 - RNA, 22 nt, Homo sapiens
caauggcacgaucucgucucac

SEQ ID NO: 35902 - RNA, 22 nt, Homo sapiens
cacaaugucuaagauguuucua

SEQ ID NO: 35903 - RNA, 22 nt, Homo sapiens
auuauuaguuguugaaugaagu

SEQ ID NO: 35904 - RNA, 22 nt, Homo sapiens
auucaagucaucucuccgcauu

SEQ ID NO: 35905 - RNA, 22 nt, Homo sapiens
auucaagugaugcagcuguuuu

SEQ ID NO: 35906 - RNA, 22 nt, Homo sapiens
augugacugauguaaucagaca

SEQ ID NO: 35907 - RNA, 22 nt, Homo sapiens
augugcaaaguuaagaucccag

SEQ ID NO: 35908 - RNA, 22 nt, Homo sapiens
augugaacugaauuaauucaca

SEQ ID NO: 35909 - RNA, 22 nt, Homo sapiens
augugcagauguuacaaauugu

SEQ ID NO: 35910 - RNA, 22 nt, Homo sapiens
auuauguuguauuuccuugcag

SEQ ID NO: 35911 - RNA, 22 nt, Homo sapiens
auugcauugugaucuucccaga

SEQ ID NO: 35912 - RNA, 22 nt, Homo sapiens
auugcuaacugaaauaagacca

SEQ ID NO: 35913 - RNA, 22 nt, Homo sapiens
auugaguaacaauuuuguucaa

SEQ ID NO: 35914 - RNA, 22 nt, Homo sapiens
auuuggcagugaagggaucaca

SEQ ID NO: 35915 - RNA, 22 nt, Homo sapiens
auugcuuuuacugggagcuuug

SEQ ID NO: 35916 - RNA, 22 nt, Homo sapiens
auuggaacugaaauaauaacuu

SEQ ID NO: 35917 - RNA, 22 nt, Homo sapiens
gaaauguuuuucaugugggcaa

SEQ ID NO: 35918 - RNA, 22 nt, Homo sapiens
gaacacaucuuugguuagagga

SEQ ID NO: 35919 - RNA, 22 nt, Homo sapiens
gaacuguuucuggugaaagagu

SEQ ID NO: 35920 - RNA, 22 nt, Homo sapiens
gaaagacuuucugcuguggaua

SEQ ID NO: 35921 - RNA, 22 nt, Homo sapiens
gaaaacugcuucucuggguuuc

SEQ ID NO: 35922 - RNA, 22 nt, Homo sapiens
gaauaaacuagagaggacugag

SEQ ID NO: 35923 - RNA, 17 nt, Homo sapiens
gaaguguuucuucauga

SEQ ID NO: 35924 - RNA, 22 nt, Homo sapiens
cugaauguuuucuucuauucug

SEQ ID NO: 35925 - RNA, 22 nt, Homo sapiens
cuggcacccuugcuuaggaaga

SEQ ID NO: 35926 - RNA, 22 nt, Homo sapiens
cuugacaaugcuucaggcugaa

SEQ ID NO: 35927 - RNA, 22 nt, Homo sapiens
cugugcauaugacuuuauugga

SEQ ID NO: 35928 - RNA, 22 nt, Homo sapiens
cugugcaugcgcggagcugaaa

SEQ ID NO: 35929 - RNA, 22 nt, Homo sapiens
gcaugacaaugauugcucuuca

SEQ ID NO: 35930 - RNA, 22 nt, Homo sapiens
gcaugaugaauaauaucacaag

SEQ ID NO: 35931 - RNA, 18 nt, Homo sapiens
gccaacauguaaacaggu

SEQ ID NO: 35932 - RNA, 22 nt, Homo sapiens
gccauugcacuccagcuugggc

SEQ ID NO: 35933 - RNA, 20 nt, Homo sapiens
gcauaugucuuuauagcaga

SEQ ID NO: 35934 - RNA, 22 nt, Homo sapiens
gcaguguugugauccaggucuu

SEQ ID NO: 35935 - RNA, 22 nt, Homo sapiens
gcagguguuaugcaaacaacug

SEQ ID NO: 35936 - RNA, 22 nt, Homo sapiens
gcagcagugugggcugaaccua

SEQ ID NO: 35937 - RNA, 22 nt, Homo sapiens
gcaagaaucugggaguaaaauu

SEQ ID NO: 35938 - RNA, 17 nt, Homo sapiens
gcacuggcguaucccac

SEQ ID NO: 35939 - RNA, 22 nt, Homo sapiens
gcaacugguuucaguuuuucag

SEQ ID NO: 35940 - RNA, 20 nt, Homo sapiens
gcaaauggaucccacaagcc

SEQ ID NO: 35941 - RNA, 22 nt, Homo sapiens
gcaaaugcuaugccauuuuaua

SEQ ID NO: 35942 - RNA, 20 nt, Homo sapiens
gcaaaguuuagcucccacua

SEQ ID NO: 35943 - RNA, 22 nt, Homo sapiens
gauggcaugugcugccaccaag

SEQ ID NO: 35944 - RNA, 22 nt, Homo sapiens
gauggcaucugagaguguuaga

SEQ ID NO: 35945 - RNA, 22 nt, Homo sapiens
gauggcauuucuggaucugaca

SEQ ID NO: 35946 - RNA, 22 nt, Homo sapiens
gauggcauuucuggaucugccc

SEQ ID NO: 35947 - RNA, 22 nt, Homo sapiens
gauuccauugcgaauuuucaga

SEQ ID NO: 35948 - RNA, 22 nt, Homo sapiens
gauuguguucauaggcauguua

SEQ ID NO: 35949 - RNA, 22 nt, Homo sapiens
gacuauguuaccuuacacauca

SEQ ID NO: 35950 - RNA, 22 nt, Homo sapiens
gauaaauccagauucugaugua

SEQ ID NO: 35951 - RNA, 22 nt, Homo sapiens
gauaaaucuuggcuagucuaag

SEQ ID NO: 35952 - RNA, 22 nt, Homo sapiens
gauacaccauuuucuagcuauu

SEQ ID NO: 35953 - RNA, 22 nt, Homo sapiens
gauauguuagggggagaaguua

SEQ ID NO: 35954 - RNA, 22 nt, Homo sapiens
gauauguaguaguugaaaaaga

SEQ ID NO: 35955 - RNA, 22 nt, Homo sapiens
agcgguguuaggaaggugaggg

SEQ ID NO: 35956 - RNA, 22 nt, Homo sapiens
aggcaaaugccagcaaucacac

SEQ ID NO: 35957 - RNA, 22 nt, Homo sapiens
aggaccccucaucagcaccagu

SEQ ID NO: 35958 - RNA, 22 nt, Homo sapiens
aggcuguguggauaauauuggg

SEQ ID NO: 35959 - RNA, 22 nt, Homo sapiens
aggcauguggcucuguucugac

SEQ ID NO: 35960 - RNA, 22 nt, Homo sapiens
aggcauguugcuucgggcuuug

SEQ ID NO: 35961 - RNA, 22 nt, Homo sapiens
aggcaugaaauacaugcauuga

SEQ ID NO: 35962 - RNA, 22 nt, Homo sapiens
aggcaagugauagcugcguaau

SEQ ID NO: 35963 - RNA, 22 nt, Homo sapiens
aggcuuuuggagaacacugcac

SEQ ID NO: 35964 - RNA, 22 nt, Homo sapiens
aggcuuuuguuuuggucucagg

SEQ ID NO: 35965 - RNA, 22 nt, Homo sapiens
agguaagucucuaauuaugaau

SEQ ID NO: 35966 - RNA, 22 nt, Homo sapiens
acuggauguuagggauuuuauu

SEQ ID NO: 35967 - RNA, 22 nt, Homo sapiens
acugcacuccagccuucgugac

SEQ ID NO: 35968 - RNA, 22 nt, Homo sapiens
acugcacuccagccuugauggc

SEQ ID NO: 35969 - RNA, 22 nt, Homo sapiens
acuguguguuugucuagcacag

SEQ ID NO: 35970 - RNA, 19 nt, Homo sapiens
acuguacuccagucugggc

SEQ ID NO: 35971 - RNA, 22 nt, Homo sapiens
acuguacuccauccugggugac

SEQ ID NO: 35972 - RNA, 22 nt, Homo sapiens
acuguacuacagccugggugac

SEQ ID NO: 35973 - RNA, 22 nt, Homo sapiens
acuguacuccagccugggcaac

SEQ ID NO: 35974 - RNA, 22 nt, Homo sapiens
acuguacuccagccugggugac

SEQ ID NO: 35975 - RNA, 22 nt, Homo sapiens
acugguuguuuaacugaauuga

SEQ ID NO: 35976 - RNA, 22 nt, Homo sapiens
acugguguaugggaggucccaa

SEQ ID NO: 35977 - RNA, 22 nt, Homo sapiens
agagauccucauuuuauagaca

SEQ ID NO: 35978 - RNA, 22 nt, Homo sapiens
agccuguagugagcugugauug

SEQ ID NO: 35979 - RNA, 22 nt, Homo sapiens
agcagcaugcaaauggacuaau

SEQ ID NO: 35980 - RNA, 22 nt, Homo sapiens
agcagagcaguggauuuuguga

SEQ ID NO: 35981 - RNA, 22 nt, Homo sapiens
aaggcauggugacuauuuaggc

SEQ ID NO: 35982 - RNA, 22 nt, Homo sapiens
aaggcaugcugaguccuaaaag

SEQ ID NO: 35983 - RNA, 22 nt, Homo sapiens
aaggcaugcaaagaacauuuua

SEQ ID NO: 35984 - RNA, 22 nt, Homo sapiens
aaugcauaauuuguaugaggua

SEQ ID NO: 35985 - RNA, 22 nt, Homo sapiens
aaugcaucuagaaaggugaauu

SEQ ID NO: 35986 - RNA, 22 nt, Homo sapiens
aaugcuguguuauuucaugacc

SEQ ID NO: 35987 - RNA, 22 nt, Homo sapiens
aaucugucuuuuguuauugagg

SEQ ID NO: 35988 - RNA, 22 nt, Homo sapiens
aaugacagccagauucuucucu

SEQ ID NO: 35989 - RNA, 19 nt, Homo sapiens
acagcugguuuugguuucu

SEQ ID NO: 35990 - RNA, 22 nt, Homo sapiens
aauugcauaugcaguagaucua

SEQ ID NO: 35991 - RNA, 22 nt, Homo sapiens
aauuggcagugcucuugccaca

SEQ ID NO: 35992 - RNA, 22 nt, Homo sapiens
acaaccauuguaagggcuuugg

SEQ ID NO: 35993 - RNA, 22 nt, Homo sapiens
acuacugucagacugccacuga

SEQ ID NO: 35994 - RNA, 23 nt, Homo sapiens
accugugguuauuuuacucuucc

SEQ ID NO: 35995 - RNA, 22 nt, Homo sapiens
accuuguaucuguuaggauugc

SEQ ID NO: 35996 - RNA, 22 nt, Homo sapiens
accuuuacaacuuguuagagua

SEQ ID NO: 35997 - RNA, 22 nt, Homo sapiens
acgugguaguacaguauuuuaa

SEQ ID NO: 35998 - RNA, 16 nt, Homo sapiens
accuguacagcaugug

SEQ ID NO: 35999 - RNA, 22 nt, Homo sapiens
accgggcugagcgcaggccccg

SEQ ID NO: 36000 - RNA, 22 nt, Homo sapiens
acaugcauccaugugaagagac

SEQ ID NO: 36001 - RNA, 22 nt, Homo sapiens
acaugcaucauuaggugguuua

SEQ ID NO: 36002 - RNA, 22 nt, Homo sapiens
acauguaauugauuuuguguua

SEQ ID NO: 36003 - RNA, 21 nt, Homo sapiens
acaucagaguugugaagguag

SEQ ID NO: 36004 - RNA, 22 nt, Homo sapiens
acaucacuguuugauugauuga

SEQ ID NO: 36005 - RNA, 22 nt, Homo sapiens
acauacacuagggauguggugu

SEQ ID NO: 36006 - RNA, 22 nt, Homo sapiens
accccuuacaucagcucuggua

SEQ ID NO: 36007 - RNA, 17 nt, Homo sapiens
accccuaccucagaagc

SEQ ID NO: 36008 - RNA, 22 nt, Homo sapiens
acccuggagagugcuguaguaa

SEQ ID NO: 36009 - RNA, 22 nt, Homo sapiens
acccuguaguuagaaacuuuca

SEQ ID NO: 36010 - RNA, 17 nt, Homo sapiens
auaaacucaucauuuuu

SEQ ID NO: 36011 - RNA, 22 nt, Homo sapiens
auaauacugggaagaugagcau

SEQ ID NO: 36012 - RNA, 22 nt, Homo sapiens
auaaagacacuuggcaugauuu

SEQ ID NO: 36013 - RNA, 23 nt, Homo sapiens
auaaugcaaguggugguaaucug

SEQ ID NO: 36014 - RNA, 18 nt, Homo sapiens
auacaagcagcagagauu

SEQ ID NO: 36015 - RNA, 22 nt, Homo sapiens
auacacgugcagaacaugcagg

SEQ ID NO: 36016 - RNA, 22 nt, Homo sapiens
auacacgguaggcacauauuua

SEQ ID NO: 36017 - RNA, 22 nt, Homo sapiens
auacacgugccauguuggugug

SEQ ID NO: 36018 - RNA, 19 nt, Homo sapiens
auacacguguauacauaca

SEQ ID NO: 36019 - RNA, 22 nt, Homo sapiens
auacagacacagucagaggggu

SEQ ID NO: 36020 - RNA, 19 nt, Homo sapiens
agugucauggucauuauuu

SEQ ID NO: 36021 - RNA, 22 nt, Homo sapiens
aguguuuuuacaagcacucugg

SEQ ID NO: 36022 - RNA, 22 nt, Homo sapiens
aguacaucuggcuggauagaua

SEQ ID NO: 36023 - RNA, 22 nt, Homo sapiens
agguuuucagccccagccuagg

SEQ ID NO: 36024 - RNA, 22 nt, Homo sapiens
aguaaagccagaccuguuaauu

SEQ ID NO: 36025 - RNA, 22 nt, Homo sapiens
aguguuuuuaucaugaaagggu

SEQ ID NO: 36026 - RNA, 22 nt, Homo sapiens
aguguuuuucaugggauacuuu

SEQ ID NO: 36027 - RNA, 22 nt, Homo sapiens
aguucaaugcucuuucuacuau

SEQ ID NO: 36028 - RNA, 22 nt, Homo sapiens
agguauguaugucuguacagcg

SEQ ID NO: 36029 - RNA, 22 nt, Homo sapiens
agguauuuuuuauccuccagca

SEQ ID NO: 36030 - RNA, 22 nt, Homo sapiens
agguagugugaugcuccuguuu

SEQ ID NO: 36031 - RNA, 22 nt, Homo sapiens
agguuaugauuauagagcgagg

SEQ ID NO: 36032 - RNA, 22 nt, Homo sapiens
auagugcuggaauaaauauacg

SEQ ID NO: 36033 - RNA, 19 nt, Homo sapiens
auauaacauccaggagcag

SEQ ID NO: 36034 - RNA, 22 nt, Homo sapiens
auaguagagagggcaaaaugcu

SEQ ID NO: 36035 - RNA, 22 nt, Homo sapiens
auagguuauuagagcaaagcuu

SEQ ID NO: 36036 - RNA, 22 nt, Homo sapiens
auaucaagugacuggaguucca

SEQ ID NO: 36037 - RNA, 22 nt, Homo sapiens
auauaugcacacgugugcauau

SEQ ID NO: 36038 - RNA, 22 nt, Homo sapiens
auaucaaggccauuuucuaaau

SEQ ID NO: 36039 - RNA, 22 nt, Homo sapiens
auaucaacaucgugucauuagu

SEQ ID NO: 36040 - RNA, 22 nt, Homo sapiens
auauucacuauaugcagaacca

SEQ ID NO: 36041 - RNA, 22 nt, Homo sapiens
aucaagcuacacccuuuggaaa

SEQ ID NO: 36042 - RNA, 22 nt, Homo sapiens
aucacagugaaaacagucaauu

SEQ ID NO: 36043 - RNA, 22 nt, Homo sapiens
aucacagugagcauaugucuau

SEQ ID NO: 36044 - RNA, 22 nt, Homo sapiens
aucacaggucaaaucauuauuu

SEQ ID NO: 36045 - RNA, 22 nt, Homo sapiens
aucaaaucuccagaaccugucu

SEQ ID NO: 36046 - RNA, 22 nt, Homo sapiens
aucagugagugguuagugaaug

SEQ ID NO: 36047 - RNA, 22 nt, Homo sapiens
aucagugauugauuuaaagacg

SEQ ID NO: 36048 - RNA, 22 nt, Homo sapiens
aucacaguuuuaccauuuggua

SEQ ID NO: 36049 - RNA, 22 nt, Homo sapiens
aucacaguggcucacaagagcc

SEQ ID NO: 36050 - RNA, 22 nt, Homo sapiens
aucacaguuaagaggugaugaa

SEQ ID NO: 36051 - RNA, 22 nt, Homo sapiens
auguaaacagaugugcagcuug

SEQ ID NO: 36052 - RNA, 22 nt, Homo sapiens
augguuugugcuccuauaagaa

SEQ ID NO: 36053 - RNA, 22 nt, Homo sapiens
augguaucauuacuguuuuauu

SEQ ID NO: 36054 - RNA, 22 nt, Homo sapiens
augggguaggcuuugcugcagu

SEQ ID NO: 36055 - RNA, 22 nt, Homo sapiens
auguccaugagcacauguauca

SEQ ID NO: 36056 - RNA, 22 nt, Homo sapiens
augucaaagaggaaaacuggau

SEQ ID NO: 36057 - RNA, 22 nt, Homo sapiens
auguaguagauauuuauggaaa

SEQ ID NO: 36058 - RNA, 22 nt, Homo sapiens
auguaguagcagaaaauauuuu

SEQ ID NO: 36059 - RNA, 22 nt, Homo sapiens
auguaacacagugcggcugggc

SEQ ID NO: 36060 - RNA, 22 nt, Homo sapiens
auguaacaguauuuggagaugu

SEQ ID NO: 36061 - RNA, 22 nt, Homo sapiens
auguaacugggacacaagccuc

SEQ ID NO: 36062 - RNA, 20 nt, Homo sapiens
auguaauguaugauauguac

SEQ ID NO: 36063 - RNA, 22 nt, Homo sapiens
auggcuuuuuucuugggcacuc

SEQ ID NO: 36064 - RNA, 22 nt, Homo sapiens
auggcuuugggcugcucugccc

SEQ ID NO: 36065 - RNA, 22 nt, Homo sapiens
auggauguucuagggaugugau

SEQ ID NO: 36066 - RNA, 22 nt, Homo sapiens
auggagugagaauggagguucc

SEQ ID NO: 36067 - RNA, 22 nt, Homo sapiens
auggauaugcuuccaacugccu

SEQ ID NO: 36068 - RNA, 22 nt, Homo sapiens
auggauauugccuaggguagua

SEQ ID NO: 36069 - RNA, 22 nt, Homo sapiens
auggauauuuuuugaacauaga

SEQ ID NO: 36070 - RNA, 22 nt, Homo sapiens
auggaaugccauuuauaaugga

SEQ ID NO: 36071 - RNA, 22 nt, Homo sapiens
augcauauuuuaccuagaagag

SEQ ID NO: 36072 - RNA, 18 nt, Homo sapiens
augcauauuuuaaguugu

SEQ ID NO: 36073 - RNA, 22 nt, Homo sapiens
augaaguauuaggacacauuua

SEQ ID NO: 36074 - RNA, 21 nt, Homo sapiens
augaauguaaagaauguggga

SEQ ID NO: 36075 - RNA, 22 nt, Homo sapiens
aucaugcacaugcauagguaug

SEQ ID NO: 36076 - RNA, 22 nt, Homo sapiens
aucauguaguaagacacauuua

SEQ ID NO: 36077 - RNA, 22 nt, Homo sapiens
augaaagucaauccccaagugu

SEQ ID NO: 36078 - RNA, 22 nt, Homo sapiens
augaacacuccaauuguacucc

SEQ ID NO: 36079 - RNA, 22 nt, Homo sapiens
augaaaugcauguuaaguccgu

SEQ ID NO: 36080 - RNA, 22 nt, Homo sapiens
augaacucaucaucuagguuuu

SEQ ID NO: 36081 - RNA, 22 nt, Homo sapiens
augcacuguuuucuugaugaga

SEQ ID NO: 36082 - RNA, 22 nt, Homo sapiens
augauauggguugucaguugua

SEQ ID NO: 36083 - RNA, 22 nt, Homo sapiens
augaguugaagcuacaagaggc

SEQ ID NO: 36084 - RNA, 22 nt, Homo sapiens
aaacauugaccucauccuggca

SEQ ID NO: 36085 - RNA, 18 nt, Homo sapiens
aaacagugucucuuucug

SEQ ID NO: 36086 - RNA, 22 nt, Homo sapiens
aaacccauauaccagcugugcu

SEQ ID NO: 36087 - RNA, 22 nt, Homo sapiens
aacugcuguuuggguacuggug

SEQ ID NO: 36088 - RNA, 22 nt, Homo sapiens
aacuccauuuuagacccuagau

SEQ ID NO: 36089 - RNA, 22 nt, Homo sapiens
aacuaugucaaauaaaaugagg

SEQ ID NO: 36090 - RNA, 23 nt, Homo sapiens
aaauuugccuauuauuccuaugg

SEQ ID NO: 36091 - RNA, 22 nt, Homo sapiens
aacaccauucucuguaacaaga

SEQ ID NO: 36092 - RNA, 22 nt, Homo sapiens
aacaccuugcagggauuaugac

SEQ ID NO: 36093 - RNA, 22 nt, Homo sapiens
aacaccguagaaacacaaggga

SEQ ID NO: 36094 - RNA, 22 nt, Homo sapiens
aacacuaucugccuuacaggga

SEQ ID NO: 36095 - RNA, 22 nt, Homo sapiens
aacacuggcugcucgaguucuc

SEQ ID NO: 36096 - RNA, 22 nt, Homo sapiens
aacacuguuuccagucaugauc

SEQ ID NO: 36097 - RNA, 22 nt, Homo sapiens
aaccuguggauuuugguaucug

SEQ ID NO: 36098 - RNA, 20 nt, Homo sapiens
aaaugcuguaauguuuggga

SEQ ID NO: 36099 - RNA, 22 nt, Homo sapiens
aaauggcaccggcucuucccuc

SEQ ID NO: 36100 - RNA, 22 nt, Homo sapiens
aaaugcuucuauguggcauguu

SEQ ID NO: 36101 - RNA, 22 nt, Homo sapiens
aaaugguguuaguagaucuuua

SEQ ID NO: 36102 - RNA, 22 nt, Homo sapiens
aaaugucauggaguguuucccc

SEQ ID NO: 36103 - RNA, 22 nt, Homo sapiens
aaaguucuugcugaaggauuau

SEQ ID NO: 36104 - RNA, 22 nt, Homo sapiens
aaauaacugucagguucuggaa

SEQ ID NO: 36105 - RNA, 22 nt, Homo sapiens
aaauccauuuguucagcuaugc

SEQ ID NO: 36106 - RNA, 22 nt, Homo sapiens
aaaugcauggacagcuggucuu

SEQ ID NO: 36107 - RNA, 22 nt, Homo sapiens
aaaugcauaucaagauugcccu

SEQ ID NO: 36108 - RNA, 22 nt, Homo sapiens
aaaugcaugaauaagcucgugu

SEQ ID NO: 36109 - RNA, 22 nt, Homo sapiens
aaaugcauugagggaaaaggca

SEQ ID NO: 36110 - RNA, 22 nt, Homo sapiens
aaaugcaugaggugggaagaaa

SEQ ID NO: 36111 - RNA, 22 nt, Homo sapiens
aaacugcuuuccaugguggcug

SEQ ID NO: 36112 - RNA, 22 nt, Homo sapiens
aaagcaucacuuuuccuacuuu

SEQ ID NO: 36113 - RNA, 22 nt, Homo sapiens
aaugacagugcuaaagaacccu

SEQ ID NO: 36114 - RNA, 22 nt, Homo sapiens
aaugacucugccuaaauuucac

SEQ ID NO: 36115 - RNA, 22 nt, Homo sapiens
aaugacugugauauuuuucuuc

SEQ ID NO: 36116 - RNA, 22 nt, Homo sapiens
aaucucaacacuuugggaggcu

SEQ ID NO: 36117 - RNA, 22 nt, Homo sapiens
aaugacacugagcaucuuucau

SEQ ID NO: 36118 - RNA, 22 nt, Homo sapiens
aaucacuuugcuacaaggcagu

SEQ ID NO: 36119 - RNA, 22 nt, Homo sapiens
aaucauauugucugccaagagg

SEQ ID NO: 36120 - RNA, 22 nt, Homo sapiens
aauagcauugaaucuaccaauu

SEQ ID NO: 36121 - RNA, 22 nt, Homo sapiens
aauacugcuuugauguaagcua

SEQ ID NO: 36122 - RNA, 22 nt, Homo sapiens
aauacuggcacugaagaccaug

SEQ ID NO: 36123 - RNA, 22 nt, Homo sapiens
aauauugucaaaauggauucca

SEQ ID NO: 36124 - RNA, 22 nt, Homo sapiens
agaagacuauucuggguugggc

SEQ ID NO: 36125 - RNA, 22 nt, Homo sapiens
acugcacuccagccuuagugac

SEQ ID NO: 36126 - RNA, 22 nt, Homo sapiens
acugcacuccagccuguugaca

SEQ ID NO: 36127 - RNA, 22 nt, Homo sapiens
agagguuuugcacugguucuuu

SEQ ID NO: 36128 - RNA, 22 nt, Homo sapiens
agaguaguuucuauauucuuca

SEQ ID NO: 36129 - RNA, 19 nt, Homo sapiens
agaguauuguuacuucucu

SEQ ID NO: 36130 - RNA, 22 nt, Homo sapiens
agagugcaauggcaccaucucg

SEQ ID NO: 36131 - RNA, 22 nt, Homo sapiens
agcaaaucuaugaauguauauu

SEQ ID NO: 36132 - RNA, 22 nt, Homo sapiens
agauggguuuucacauguuggc

SEQ ID NO: 36133 - RNA, 22 nt, Homo sapiens
agauauguuuaguuucaaaaug

SEQ ID NO: 36134 - RNA, 22 nt, Homo sapiens
agaugcuguuaucaacuguagc

SEQ ID NO: 36135 - RNA, 22 nt, Homo sapiens
accaguagaaucaguggauucu

SEQ ID NO: 36136 - RNA, 22 nt, Homo sapiens
accccauuugcacugagcccuu

SEQ ID NO: 36137 - RNA, 22 nt, Homo sapiens
acccuguaacauacaagugguu

SEQ ID NO: 36138 - RNA, 22 nt, Homo sapiens
acccuguaggacuauucuaauc

SEQ ID NO: 36139 - RNA, 22 nt, Homo sapiens
acccuguaggugcuggcagaga

SEQ ID NO: 36140 - RNA, 22 nt, Homo sapiens
acaugacauugggguggggaua

SEQ ID NO: 36141 - RNA, 22 nt, Homo sapiens
acauccauuugcuuuauuugcu

SEQ ID NO: 36142 - RNA, 22 nt, Homo sapiens
acaucaggcuugugaugauuac

SEQ ID NO: 36143 - RNA, 19 nt, Homo sapiens
acauggauuuugugcaaac

SEQ ID NO: 36144 - RNA, 22 nt, Homo sapiens
acaugcauggcaugcauuguac

SEQ ID NO: 36145 - RNA, 21 nt, Homo sapiens
acauguacacauguaugcaca

SEQ ID NO: 36146 - RNA, 22 nt, Homo sapiens
acauggcuuaugaauuuggaga

SEQ ID NO: 36147 - RNA, 22 nt, Homo sapiens
aauuacauggcaauugggaaau

SEQ ID NO: 36148 - RNA, 22 nt, Homo sapiens
acaguuaugugagggccaccag

SEQ ID NO: 36149 - RNA, 22 nt, Homo sapiens
aaugucaugaguccaaccagaa

SEQ ID NO: 36150 - RNA, 22 nt, Homo sapiens
aauggcucugauguuguuguga

SEQ ID NO: 36151 - RNA, 22 nt, Homo sapiens
aauggguaguacugugguaaca

SEQ ID NO: 36152 - RNA, 18 nt, Homo sapiens
aaugggacuacaaagcca

SEQ ID NO: 36153 - RNA, 22 nt, Homo sapiens
aauggcacuuuauaaauguuaa

SEQ ID NO: 36154 - RNA, 22 nt, Homo sapiens
aggcuuuuggagguggcuuucu

SEQ ID NO: 36155 - RNA, 22 nt, Homo sapiens
agggcuuuugagcugagauggu

SEQ ID NO: 36156 - RNA, 22 nt, Homo sapiens
agggcuuaucuguguagaguuc

SEQ ID NO: 36157 - RNA, 22 nt, Homo sapiens
agguagaguguuuuguucuucu

SEQ ID NO: 36158 - RNA, 22 nt, Homo sapiens
auaaaugccuguuguuuuaagc

SEQ ID NO: 36159 - RNA, 22 nt, Homo sapiens
auaaaugcuuccagucauuaaa

SEQ ID NO: 36160 - RNA, 22 nt, Homo sapiens
auaaaugcauugagaacugcug

SEQ ID NO: 36161 - RNA, 22 nt, Homo sapiens
aguggaguguaaagcgucuuuu

SEQ ID NO: 36162 - RNA, 22 nt, Homo sapiens
agugguuuuaaguagagcauac

SEQ ID NO: 36163 - RNA, 20 nt, Homo sapiens
agugguuuucaaauaugucu

SEQ ID NO: 36164 - RNA, 22 nt, Homo sapiens
aguguuuuuaacaagaaagggu

SEQ ID NO: 36165 - RNA, 22 nt, Homo sapiens
agugguuugaucacagcucacu

SEQ ID NO: 36166 - RNA, 23 nt, Homo sapiens
agccugguuucccugcuucuccc

SEQ ID NO: 36167 - RNA, 22 nt, Homo sapiens
agcggguuuuagauuucuccug

SEQ ID NO: 36168 - RNA, 22 nt, Homo sapiens
agcuaugucugaugccugauua

SEQ ID NO: 36169 - RNA, 22 nt, Homo sapiens
aacaccauuuuucugcagccuu

SEQ ID NO: 36170 - RNA, 22 nt, Homo sapiens
aggcaugaguucagaggguaug

SEQ ID NO: 36171 - RNA, 22 nt, Homo sapiens
augguguauugauuauugcugu

SEQ ID NO: 36172 - RNA, 22 nt, Homo sapiens
auggugugugaauuaaauguua

SEQ ID NO: 36173 - RNA, 22 nt, Homo sapiens
auggucuuuauuguguugagug

SEQ ID NO: 36174 - RNA, 22 nt, Homo sapiens
augguauuuugugauaccuugu

SEQ ID NO: 36175 - RNA, 22 nt, Homo sapiens
auggcuguuuuuuauguuacag

SEQ ID NO: 36176 - RNA, 22 nt, Homo sapiens
auggcuguuucugcaaugucua

SEQ ID NO: 36177 - RNA, 22 nt, Homo sapiens
auggcauggugcaggguuuaag

SEQ ID NO: 36178 - RNA, 22 nt, Homo sapiens
auggcauugaagaguugucccu

SEQ ID NO: 36179 - RNA, 22 nt, Homo sapiens
auggcggugugggcggugcagc

SEQ ID NO: 36180 - RNA, 22 nt, Homo sapiens
augaucuguagaacuaguccuu

SEQ ID NO: 36181 - RNA, 19 nt, Homo sapiens
augaguuaggggaaauuuc

SEQ ID NO: 36182 - RNA, 22 nt, Homo sapiens
augauucugaucuagagcuugg

SEQ ID NO: 36183 - RNA, 22 nt, Homo sapiens
auggcagaaucaagccgacagc

SEQ ID NO: 36184 - RNA, 22 nt, Homo sapiens
auggauuuugaacuugagaguu

SEQ ID NO: 36185 - RNA, 22 nt, Homo sapiens
auugcacaucugcacuacagcc

SEQ ID NO: 36186 - RNA, 22 nt, Homo sapiens
auugcaacuuccgccuccuggg

SEQ ID NO: 36187 - RNA, 22 nt, Homo sapiens
auuccagguggcgccauucaca

SEQ ID NO: 36188 - RNA, 22 nt, Homo sapiens
auuccauaguacagugaugagu

SEQ ID NO: 36189 - RNA, 23 nt, Homo sapiens
auugaacacuuucauaugugagg

SEQ ID NO: 36190 - RNA, 22 nt, Homo sapiens
auguuacggaguuuuuauccag

SEQ ID NO: 36191 - RNA, 22 nt, Homo sapiens
auguuauguucuucucuguaua

SEQ ID NO: 36192 - RNA, 22 nt, Homo sapiens
auguguauuaccucgauuguga

SEQ ID NO: 36193 - RNA, 21 nt, Homo sapiens
auguaaugaagaagccacugg

SEQ ID NO: 36194 - RNA, 22 nt, Homo sapiens
auucaugggagcuacuuuaaaa

SEQ ID NO: 36195 - RNA, 22 nt, Homo sapiens
auuaagagcacauguucugggu

SEQ ID NO: 36196 - RNA, 22 nt, Homo sapiens
auguuauguuaaugauaaugga

SEQ ID NO: 36197 - RNA, 22 nt, Homo sapiens
auguuugguaagaauauuguua

SEQ ID NO: 36198 - RNA, 22 nt, Homo sapiens
aucacauuuauaguggcacgca

SEQ ID NO: 36199 - RNA, 22 nt, Homo sapiens
auauuggacugugcuaguuaga

SEQ ID NO: 36200 - RNA, 22 nt, Homo sapiens
auauuggacucugugcuaggaa

SEQ ID NO: 36201 - RNA, 20 nt, Homo sapiens
auaugguugugagugauuuu

SEQ ID NO: 36202 - RNA, 22 nt, Homo sapiens
auaugguuuuuggaagcauauc

SEQ ID NO: 36203 - RNA, 22 nt, Homo sapiens
auauucacagguaucagagauu

SEQ ID NO: 36204 - RNA, 18 nt, Homo sapiens
auauugcauuggauggau

SEQ ID NO: 36205 - RNA, 22 nt, Homo sapiens
auaaauucauuuaagcuccuua

SEQ ID NO: 36206 - RNA, 22 nt, Homo sapiens
auaacagcauuauugcauacgu

SEQ ID NO: 36207 - RNA, 22 nt, Homo sapiens
auaauaccugccucagagaguu

SEQ ID NO: 36208 - RNA, 22 nt, Homo sapiens
auaauaucagguugugaugaug

SEQ ID NO: 36209 - RNA, 22 nt, Homo sapiens
auaauagcugaucauuuagaag

SEQ ID NO: 36210 - RNA, 22 nt, Homo sapiens
auagugcugcaacaaauauacg

SEQ ID NO: 36211 - RNA, 19 nt, Homo sapiens
auagggcuagcauauacug

SEQ ID NO: 36212 - RNA, 22 nt, Homo sapiens
auagguauguaauacaaaugaa

SEQ ID NO: 36213 - RNA, 22 nt, Homo sapiens
auagcagugugaggacagacua

SEQ ID NO: 36214 - RNA, 22 nt, Homo sapiens
augaaauguaugagucuggguu

SEQ ID NO: 36215 - RNA, 22 nt, Homo sapiens
auccauguggauaaauguguau

SEQ ID NO: 36216 - RNA, 22 nt, Homo sapiens
augaaaagcauaaacgcugaag

SEQ ID NO: 36217 - RNA, 22 nt, Homo sapiens
auccaagagacugaugacuucc

SEQ ID NO: 36218 - RNA, 22 nt, Homo sapiens
auccaucagacggcaggcguug

SEQ ID NO: 36219 - RNA, 22 nt, Homo sapiens
aucauugugugaguugauggga

SEQ ID NO: 36220 - RNA, 22 nt, Homo sapiens
augaaugucuuauuuugagaaa

SEQ ID NO: 36221 - RNA, 18 nt, Homo sapiens
augaccugcggguuauau

SEQ ID NO: 36222 - RNA, 22 nt, Homo sapiens
augagaauguaaguuaaugaaa

SEQ ID NO: 36223 - RNA, 22 nt, Homo sapiens
ugagggaugcguacccuaugcc

SEQ ID NO: 36224 - RNA, 22 nt, Homo sapiens
ugagauaaugcaugugaagauc

SEQ ID NO: 36225 - RNA, 22 nt, Homo sapiens
ugagauauauauauuugagaca

SEQ ID NO: 36226 - RNA, 22 nt, Homo sapiens
ugagagacagacauuaucuuau

SEQ ID NO: 36227 - RNA, 22 nt, Homo sapiens
ugagaacugccuguauuuaucu

SEQ ID NO: 36228 - RNA, 22 nt, Homo sapiens
ugagaacucaugaaucuuucca

SEQ ID NO: 36229 - RNA, 22 nt, Homo sapiens
ugaaaugccuuuaaugaauuua

SEQ ID NO: 36230 - RNA, 22 nt, Homo sapiens
ucuuuguuagaacccucuccuu

SEQ ID NO: 36231 - RNA, 22 nt, Homo sapiens
ucuuuguuggaguccaaggaua

SEQ ID NO: 36232 - RNA, 22 nt, Homo sapiens
ugaaacacaccuccucuccauc

SEQ ID NO: 36233 - RNA, 22 nt, Homo sapiens
ugacuagacuugcaagguugca

SEQ ID NO: 36234 - RNA, 22 nt, Homo sapiens
ugacuagcagagugagaaacuc

SEQ ID NO: 36235 - RNA, 22 nt, Homo sapiens
ugacuauaguaaucacuucaca

SEQ ID NO: 36236 - RNA, 22 nt, Homo sapiens
ugacuauaucucuguauaaacu

SEQ ID NO: 36237 - RNA, 22 nt, Homo sapiens
ugacagugugagauccugucuc

SEQ ID NO: 36238 - RNA, 17 nt, Homo sapiens
ugagaacaugugguauu

SEQ ID NO: 36239 - RNA, 21 nt, Homo sapiens
ugagaacaacaggucaagcag

SEQ ID NO: 36240 - RNA, 22 nt, Homo sapiens
ugagaacaugugauauuuggug

SEQ ID NO: 36241 - RNA, 22 nt, Homo sapiens
ugacucgaggcgccuccagucc

SEQ ID NO: 36242 - RNA, 22 nt, Homo sapiens
ugacucuagagcugccuguggc

SEQ ID NO: 36243 - RNA, 22 nt, Homo sapiens
ucuuuggucuacuuucauaugu

SEQ ID NO: 36244 - RNA, 20 nt, Homo sapiens
ucuugguuggaggucuuuua

SEQ ID NO: 36245 - RNA, 22 nt, Homo sapiens
ucuuggcaaagaauuuuuggcu

SEQ ID NO: 36246 - RNA, 22 nt, Homo sapiens
ucuguuguuaucauaauauuga

SEQ ID NO: 36247 - RNA, 22 nt, Homo sapiens
ucuguguugaugcucauuaauu

SEQ ID NO: 36248 - RNA, 22 nt, Homo sapiens
ucuguguuugaucaagauugua

SEQ ID NO: 36249 - RNA, 17 nt, Homo sapiens
ucuucuguuacuguggc

SEQ ID NO: 36250 - RNA, 23 nt, Homo sapiens
ucugauguuauaaaauucuuugg

SEQ ID NO: 36251 - RNA, 22 nt, Homo sapiens
ucugacacagugauuaguaaau

SEQ ID NO: 36252 - RNA, 22 nt, Homo sapiens
ucugcauaucaugcagaacuau

SEQ ID NO: 36253 - RNA, 21 nt, Homo sapiens
ucuguguugaucucacuggga

SEQ ID NO: 36254 - RNA, 18 nt, Homo sapiens
ucugugguguaaauacgu

SEQ ID NO: 36255 - RNA, 22 nt, Homo sapiens
ucucuguuugucuguuacuggu

SEQ ID NO: 36256 - RNA, 19 nt, Homo sapiens
ucucugguguuggagggga

SEQ ID NO: 36257 - RNA, 22 nt, Homo sapiens
ucgcugggaaccagagguaaag

SEQ ID NO: 36258 - RNA, 22 nt, Homo sapiens
ucagagugguuguaccauuuga

SEQ ID NO: 36259 - RNA, 22 nt, Homo sapiens
ucccgaggacaucugggggcaa

SEQ ID NO: 36260 - RNA, 22 nt, Homo sapiens
ucagaacugauacuagaacuuu

SEQ ID NO: 36261 - RNA, 22 nt, Homo sapiens
uccccugauaccaaccaccaug

SEQ ID NO: 36262 - RNA, 22 nt, Homo sapiens
ucccugacagggucugagcuuu

SEQ ID NO: 36263 - RNA, 22 nt, Homo sapiens
ucacuggccaaauucuggguga

SEQ ID NO: 36264 - RNA, 22 nt, Homo sapiens
ucacugugcacauaugauaggu

SEQ ID NO: 36265 - RNA, 22 nt, Homo sapiens
ugggcggagacgugcagccgcc

SEQ ID NO: 36266 - RNA, 22 nt, Homo sapiens
ugggcaaaugcuuuuuagucaa

SEQ ID NO: 36267 - RNA, 22 nt, Homo sapiens
ugggagacuacauuuuuaacaa

SEQ ID NO: 36268 - RNA, 22 nt, Homo sapiens
ugguguuugagaagcugauguc

SEQ ID NO: 36269 - RNA, 21 nt, Homo sapiens
ugguucaguucguuacgugug

SEQ ID NO: 36270 - RNA, 22 nt, Homo sapiens
ugguucaguugcacaggcuguu

SEQ ID NO: 36271 - RNA, 22 nt, Homo sapiens
ugguuccauauuaauuuuagga

SEQ ID NO: 36272 - RNA, 22 nt, Homo sapiens
uggggugugagggagaaagaaa

SEQ ID NO: 36273 - RNA, 22 nt, Homo sapiens
uguaaacuaugagcugauuauu

SEQ ID NO: 36274 - RNA, 22 nt, Homo sapiens
uguauacugucuaauauguugu

SEQ ID NO: 36275 - RNA, 22 nt, Homo sapiens
uguauacauauguauguuuugu

SEQ ID NO: 36276 - RNA, 22 nt, Homo sapiens
uguaaaucuuucacaguugaug

SEQ ID NO: 36277 - RNA, 16 nt, Homo sapiens
uguaaauguuuugcau

SEQ ID NO: 36278 - RNA, 22 nt, Homo sapiens
uguauaacucacauugaaguuu

SEQ ID NO: 36279 - RNA, 22 nt, Homo sapiens
uggauggucagaggguuucugu

SEQ ID NO: 36280 - RNA, 19 nt, Homo sapiens
uggaugacugucugggucu

SEQ ID NO: 36281 - RNA, 22 nt, Homo sapiens
uggaugacuguuauaugcauau

SEQ ID NO: 36282 - RNA, 18 nt, Homo sapiens
uggauaugaaauucugga

SEQ ID NO: 36283 - RNA, 22 nt, Homo sapiens
uggauauguuuauauguugucu

SEQ ID NO: 36284 - RNA, 22 nt, Homo sapiens
ugggaagcugcauuuuaacaag

SEQ ID NO: 36285 - RNA, 22 nt, Homo sapiens
ugggagugugcacaauuucagc

SEQ ID NO: 36286 - RNA, 22 nt, Homo sapiens
ugggauauaaaaaacgcuauuc

SEQ ID NO: 36287 - RNA, 22 nt, Homo sapiens
ugggaucagucuggaauauuga

SEQ ID NO: 36288 - RNA, 23 nt, Homo sapiens
uggcgagacagaaaacuuuuaga

SEQ ID NO: 36289 - RNA, 23 nt, Homo sapiens
uggcauuuuaguuagcuucagug

SEQ ID NO: 36290 - RNA, 22 nt, Homo sapiens
ugucauggugcucugggcccug

SEQ ID NO: 36291 - RNA, 22 nt, Homo sapiens
ugucauggucacaggcauuuca

SEQ ID NO: 36292 - RNA, 22 nt, Homo sapiens
ugucauggauucugagucuggg

SEQ ID NO: 36293 - RNA, 23 nt, Homo sapiens
ugucaucaagaugaggucacacu

SEQ ID NO: 36294 - RNA, 22 nt, Homo sapiens
ugugaaacacgaaagucuaaaa

SEQ ID NO: 36295 - RNA, 22 nt, Homo sapiens
ugugaaacauggauagaacugg

SEQ ID NO: 36296 - RNA, 22 nt, Homo sapiens
ugugaacacagaggcuauggca

SEQ ID NO: 36297 - RNA, 20 nt, Homo sapiens
ugucuauggggguucucugc

SEQ ID NO: 36298 - RNA, 22 nt, Homo sapiens
uguauguuuaaggccaguggaa

SEQ ID NO: 36299 - RNA, 22 nt, Homo sapiens
uguauguaaagacaggauaaca

SEQ ID NO: 36300 - RNA, 22 nt, Homo sapiens
uguaugaguuguuuauaaauuu

SEQ ID NO: 36301 - RNA, 22 nt, Homo sapiens
uguaugcuuuugagagauauuu

SEQ ID NO: 36302 - RNA, 22 nt, Homo sapiens
uguaugucuucuuuagauaagu

SEQ ID NO: 36303 - RNA, 22 nt, Homo sapiens
ugucaaagagacaucugcacuc

SEQ ID NO: 36304 - RNA, 22 nt, Homo sapiens
ugucacaguuuguacuuuauag

SEQ ID NO: 36305 - RNA, 22 nt, Homo sapiens
ugucaguuucaguguuagccuu

SEQ ID NO: 36306 - RNA, 22 nt, Homo sapiens
ugucaguggucuggaugcagcc

SEQ ID NO: 36307 - RNA, 22 nt, Homo sapiens
ugucauauagaauguucuauga

SEQ ID NO: 36308 - RNA, 22 nt, Homo sapiens
ugucaucuagguauuaagcccc

SEQ ID NO: 36309 - RNA, 22 nt, Homo sapiens
ugcuguguugcuggcuuaaaga

SEQ ID NO: 36310 - RNA, 22 nt, Homo sapiens
uggaaucaucaacgaaugaaau

SEQ ID NO: 36311 - RNA, 22 nt, Homo sapiens
uggaaucuacuaaagcaaaauc

SEQ ID NO: 36312 - RNA, 22 nt, Homo sapiens
uggaagugaacaaccaaggcag

SEQ ID NO: 36313 - RNA, 22 nt, Homo sapiens
uggaauguuuaucaaaacagua

SEQ ID NO: 36314 - RNA, 22 nt, Homo sapiens
uggaguguagcggcaccuauua

SEQ ID NO: 36315 - RNA, 23 nt, Homo sapiens
ugcuauguaagcauuuauuaaau

SEQ ID NO: 36316 - RNA, 23 nt, Homo sapiens
ugcuccccucauggaugaauaaa

SEQ ID NO: 36317 - RNA, 22 nt, Homo sapiens
ugcaagcacacccagggauugu

SEQ ID NO: 36318 - RNA, 22 nt, Homo sapiens
ugcagagaaacauuuuguauuu

SEQ ID NO: 36319 - RNA, 22 nt, Homo sapiens
ugcauggagcucucuuuggacu

SEQ ID NO: 36320 - RNA, 22 nt, Homo sapiens
ugcaggguccauugucccaagu

SEQ ID NO: 36321 - RNA, 22 nt, Homo sapiens
ugcaaauguuauuuugguuucu

SEQ ID NO: 36322 - RNA, 19 nt, Homo sapiens
ugcaaauucuaaaaacuga

SEQ ID NO: 36323 - RNA, 22 nt, Homo sapiens
ugcaaauguuaggugucauuau

SEQ ID NO: 36324 - RNA, 19 nt, Homo sapiens
ugcaaagucuuuuccuauu

SEQ ID NO: 36325 - RNA, 22 nt, Homo sapiens
ugcaaaguccucauucuuaccc

SEQ ID NO: 36326 - RNA, 22 nt, Homo sapiens
ugcaaaugucaaggguuagugu

SEQ ID NO: 36327 - RNA, 22 nt, Homo sapiens
ugaguucaugcuuguaguucua

SEQ ID NO: 36328 - RNA, 22 nt, Homo sapiens
ugagguguauugggggaaauuc

SEQ ID NO: 36329 - RNA, 23 nt, Homo sapiens
ugagucacuuugcuggggucucu

SEQ ID NO: 36330 - RNA, 22 nt, Homo sapiens
ugagugaaggggcucuguugug

SEQ ID NO: 36331 - RNA, 22 nt, Homo sapiens
ugagugaaugugaaggcuaggg

SEQ ID NO: 36332 - RNA, 22 nt, Homo sapiens
uuuugguguacaauucuaugga

SEQ ID NO: 36333 - RNA, 22 nt, Homo sapiens
uuuuggugguuaugugucaaug

SEQ ID NO: 36334 - RNA, 22 nt, Homo sapiens
uuugucaauaacuaccaacagg

SEQ ID NO: 36335 - RNA, 22 nt, Homo sapiens
uuuguauguuggagauuggaga

SEQ ID NO: 36336 - RNA, 23 nt, Homo sapiens
uuuguacuaugucaguuuagaua

SEQ ID NO: 36337 - RNA, 22 nt, Homo sapiens
uuuguacacuguugguaggauu

SEQ ID NO: 36338 - RNA, 22 nt, Homo sapiens
uuucauccggcuguguauuaug

SEQ ID NO: 36339 - RNA, 22 nt, Homo sapiens
uuuccaguuggaagaaggggga

SEQ ID NO: 36340 - RNA, 22 nt, Homo sapiens
uuucccauuguucugcucugug

SEQ ID NO: 36341 - RNA, 22 nt, Homo sapiens
uuuggcaguuauuuacucagug

SEQ ID NO: 36342 - RNA, 22 nt, Homo sapiens
aagcacccagccucacgccugc

SEQ ID NO: 36343 - RNA, 22 nt, Homo sapiens
aagcaucacauaauggaucaug

SEQ ID NO: 36344 - RNA, 20 nt, Homo sapiens
aagcagacauuuggaugaaa

SEQ ID NO: 36345 - RNA, 22 nt, Homo sapiens
aagcugccuugcugaggagaaa

SEQ ID NO: 36346 - RNA, 22 nt, Homo sapiens
aagcugccaggcaugguggcug

SEQ ID NO: 36347 - RNA, 22 nt, Homo sapiens
uuuuuugguaauugaacaauga

SEQ ID NO: 36348 - RNA, 22 nt, Homo sapiens
aaccuacauucuuaacuguugc

SEQ ID NO: 36349 - RNA, 22 nt, Homo sapiens
aacucacauucuuucuugguac

SEQ ID NO: 36350 - RNA, 22 nt, Homo sapiens
aacuggcauaugaacuuguucu

SEQ ID NO: 36351 - RNA, 22 nt, Homo sapiens
aagacuguaauccaucuugagu

SEQ ID NO: 36352 - RNA, 19 nt, Homo sapiens
uuuuguacucugugacuug

SEQ ID NO: 36353 - RNA, 22 nt, Homo sapiens
uuuuucacuuaaguuaggcuca

SEQ ID NO: 36354 - RNA, 22 nt, Homo sapiens
uuuuugauuaauggguagacca

SEQ ID NO: 36355 - RNA, 22 nt, Homo sapiens
uuuuuggaggagguuagaucau

SEQ ID NO: 36356 - RNA, 22 nt, Homo sapiens
uuuaacauuggaugagaucguc

SEQ ID NO: 36357 - RNA, 20 nt, Homo sapiens
uuuaagacaugcugaauuga

SEQ ID NO: 36358 - RNA, 22 nt, Homo sapiens
uuuaaacugucuuggguuugga

SEQ ID NO: 36359 - RNA, 22 nt, Homo sapiens
uuuaaggcaugccuguacaugc

SEQ ID NO: 36360 - RNA, 22 nt, Homo sapiens
uuuaaugcugcccagucauggg

SEQ ID NO: 36361 - RNA, 21 nt, Homo sapiens
uuuacuguggacccauugcuu

SEQ ID NO: 36362 - RNA, 23 nt, Homo sapiens
uuucaguaguuguauccuguugc

SEQ ID NO: 36363 - RNA, 22 nt, Homo sapiens
uuguuuuggagaugagcuaaaa

SEQ ID NO: 36364 - RNA, 22 nt, Homo sapiens
uuuaaagcuaaaauauguuuau

SEQ ID NO: 36365 - RNA, 22 nt, Homo sapiens
uuguucccuucuggcuuuuaug

SEQ ID NO: 36366 - RNA, 17 nt, Homo sapiens
uuguucccauuaaaaag

SEQ ID NO: 36367 - RNA, 22 nt, Homo sapiens
uugugucccugcggcugaggag

SEQ ID NO: 36368 - RNA, 22 nt, Homo sapiens
uuguguuugaugcugacacgca

SEQ ID NO: 36369 - RNA, 23 nt, Homo sapiens
uugugucccuacccaaaucucau

SEQ ID NO: 36370 - RNA, 22 nt, Homo sapiens
uugugcuucaucaccuagcaga

SEQ ID NO: 36371 - RNA, 22 nt, Homo sapiens
uugugcuugauuugccuagcug

SEQ ID NO: 36372 - RNA, 22 nt, Homo sapiens
uugugcauaucagagguuugcu

SEQ ID NO: 36373 - RNA, 22 nt, Homo sapiens
uugguaagguggaugaugaaua

SEQ ID NO: 36374 - RNA, 22 nt, Homo sapiens
uuguaaaguucuuaggaagcuc

SEQ ID NO: 36375 - RNA, 22 nt, Homo sapiens
uuguaacaguucugcgagcagc

SEQ ID NO: 36376 - RNA, 22 nt, Homo sapiens
uuguaacaguuuauugacucga

SEQ ID NO: 36377 - RNA, 22 nt, Homo sapiens
uuguaacaugcuuucacuucag

SEQ ID NO: 36378 - RNA, 22 nt, Homo sapiens
uuguaaaguucucucccgaaaa

SEQ ID NO: 36379 - RNA, 22 nt, Homo sapiens
uuguacuuuuaguagagacggg

SEQ ID NO: 36380 - RNA, 22 nt, Homo sapiens
uuguacuauuuuuaucagugau

SEQ ID NO: 36381 - RNA, 22 nt, Homo sapiens
uuguaauguuaccaaauggugu

SEQ ID NO: 36382 - RNA, 23 nt, Homo sapiens
uuguacacuaagaaucgcagaug

SEQ ID NO: 36383 - RNA, 22 nt, Homo sapiens
uugggguagaauugcaacauau

SEQ ID NO: 36384 - RNA, 22 nt, Homo sapiens
uugggcaaguggcaugaccaug

SEQ ID NO: 36385 - RNA, 22 nt, Homo sapiens
uuggauauucaguuuuuccauc

SEQ ID NO: 36386 - RNA, 22 nt, Homo sapiens
uuggauuguuucuagauugggg

SEQ ID NO: 36387 - RNA, 22 nt, Homo sapiens
uuggauuauaaacugagauuug

SEQ ID NO: 36388 - RNA, 18 nt, Homo sapiens
uuggacggagagucaaau

SEQ ID NO: 36389 - RNA, 22 nt, Homo sapiens
uuggacuuuaagauagagaugu

SEQ ID NO: 36390 - RNA, 22 nt, Homo sapiens
uuggagagagaggacucccggc

SEQ ID NO: 36391 - RNA, 22 nt, Homo sapiens
uuggacaagauugcagagaauu

SEQ ID NO: 36392 - RNA, 22 nt, Homo sapiens
uuggaaugugacugauaauauu

SEQ ID NO: 36393 - RNA, 22 nt, Homo sapiens
uugaucaaaucugagugagaau

SEQ ID NO: 36394 - RNA, 22 nt, Homo sapiens
uugaucacuguacuaugacuau

SEQ ID NO: 36395 - RNA, 22 nt, Homo sapiens
uugauagaucagggauuugauu

SEQ ID NO: 36396 - RNA, 22 nt, Homo sapiens
uuaaucacagcugaacucaaac

SEQ ID NO: 36397 - RNA, 22 nt, Homo sapiens
uuaauaccgucacauggcugaa

SEQ ID NO: 36398 - RNA, 22 nt, Homo sapiens
uuaauacucuucuaaguagucc

SEQ ID NO: 36399 - RNA, 22 nt, Homo sapiens
uuaaucugucuaugauuuuggu

SEQ ID NO: 36400 - RNA, 22 nt, Homo sapiens
uuaccaguggugcuguaaacuu

SEQ ID NO: 36401 - RNA, 22 nt, Homo sapiens
uuacuagaacauuuagggaacu

SEQ ID NO: 36402 - RNA, 18 nt, Homo sapiens
uuaccagcauaccuacac

SEQ ID NO: 36403 - RNA, 22 nt, Homo sapiens
uuaauuguaucuauagauguca

SEQ ID NO: 36404 - RNA, 22 nt, Homo sapiens
uuaauuguccauuauucuguuc

SEQ ID NO: 36405 - RNA, 22 nt, Homo sapiens
uuaauucugucugcccucaucc

SEQ ID NO: 36406 - RNA, 22 nt, Homo sapiens
uguuucuacugucucuguagua

SEQ ID NO: 36407 - RNA, 22 nt, Homo sapiens
uguuugguggucucuucacaug

SEQ ID NO: 36408 - RNA, 19 nt, Homo sapiens
uuaaguaguuagagggucu

SEQ ID NO: 36409 - RNA, 22 nt, Homo sapiens
uuaaguagaugaaugugaaugu

SEQ ID NO: 36410 - RNA, 22 nt, Homo sapiens
ugugagacugguucugaaccca

SEQ ID NO: 36411 - RNA, 22 nt, Homo sapiens
ugugauaguugcuguucugggc

SEQ ID NO: 36412 - RNA, 17 nt, Homo sapiens
ugugaucaucacccuug

SEQ ID NO: 36413 - RNA, 22 nt, Homo sapiens
ugugaacagcagcugggcuuug

SEQ ID NO: 36414 - RNA, 22 nt, Homo sapiens
ugugaauguaaccuuauuugga

SEQ ID NO: 36415 - RNA, 22 nt, Homo sapiens
ugugacagcacgguucaacugc

SEQ ID NO: 36416 - RNA, 22 nt, Homo sapiens
uuacuguacugcucuuaaccug

SEQ ID NO: 36417 - RNA, 22 nt, Homo sapiens
uuaggacacuguggguggguca

SEQ ID NO: 36418 - RNA, 22 nt, Homo sapiens
uuauuagguuagugcaaaaguu

SEQ ID NO: 36419 - RNA, 22 nt, Homo sapiens
uuaugguuuauuagcaggguua

SEQ ID NO: 36420 - RNA, 22 nt, Homo sapiens
uuauacucgucugaaugauucu

SEQ ID NO: 36421 - RNA, 22 nt, Homo sapiens
uuauacacugugggaguguaaa

SEQ ID NO: 36422 - RNA, 22 nt, Homo sapiens
uuauacuacuauaaagagguag

SEQ ID NO: 36423 - RNA, 22 nt, Homo sapiens
uuaguucauugugacuggacuc

SEQ ID NO: 36424 - RNA, 22 nt, Homo sapiens
uuaguggaugcugaauaaagaa

SEQ ID NO: 36425 - RNA, 22 nt, Homo sapiens
uuagugcugaguggaauguucu

SEQ ID NO: 36426 - RNA, 22 nt, Homo sapiens
uuagugaaugcaccacuucuga

SEQ ID NO: 36427 - RNA, 22 nt, Homo sapiens
uugagauguggcaguuuaugag

SEQ ID NO: 36428 - RNA, 22 nt, Homo sapiens
uugacaaguuguccaguaugag

SEQ ID NO: 36429 - RNA, 22 nt, Homo sapiens
uugacauaaucauuucacagug

SEQ ID NO: 36430 - RNA, 20 nt, Homo sapiens
uugacagagggaaaguugcu

SEQ ID NO: 36431 - RNA, 22 nt, Homo sapiens
uugagaaucuuugcuaaaggaa

SEQ ID NO: 36432 - RNA, 23 nt, Homo sapiens
uugacuguggguacaaugugaua

SEQ ID NO: 36433 - RNA, 22 nt, Homo sapiens
uugaccacugggcacaguaagu

SEQ ID NO: 36434 - RNA, 20 nt, Homo sapiens
uugagaucuguaucugguuu

SEQ ID NO: 36435 - RNA, 22 nt, Homo sapiens
uugaaaucuuccacagcccaag

SEQ ID NO: 36436 - RNA, 22 nt, Homo sapiens
uugaagacuaauuuagauaaug

SEQ ID NO: 36437 - RNA, 22 nt, Homo sapiens
uucaccagggaagucucaacuc

SEQ ID NO: 36438 - RNA, 22 nt, Homo sapiens
uuccaguggacuacuucauccu

SEQ ID NO: 36439 - RNA, 22 nt, Homo sapiens
uuccacgugaaguauucuaaag

SEQ ID NO: 36440 - RNA, 22 nt, Homo sapiens
uuccacaaugguugaacuagcu

SEQ ID NO: 36441 - RNA, 22 nt, Homo sapiens
uuccacaaugguugaacuaauu

SEQ ID NO: 36442 - RNA, 22 nt, Homo sapiens
cuggagauauuggaagaaagaa

SEQ ID NO: 36443 - RNA, 22 nt, Homo sapiens
cuggagaucuugacauugaagu

SEQ ID NO: 36444 - RNA, 22 nt, Homo sapiens
cuggaaugugagccccaaaaag

SEQ ID NO: 36445 - RNA, 22 nt, Homo sapiens
cuggaaacaucuuaggaaugca

SEQ ID NO: 36446 - RNA, 22 nt, Homo sapiens
cugguuuguaaaguuccugaga

SEQ ID NO: 36447 - RNA, 22 nt, Homo sapiens
cugguuguucuggaugggcagg

SEQ ID NO: 36448 - RNA, 22 nt, Homo sapiens
cugguuguuacaaagagccugg

SEQ ID NO: 36449 - RNA, 22 nt, Homo sapiens
cugggguaggacuggcuuuuga

SEQ ID NO: 36450 - RNA, 22 nt, Homo sapiens
cuggcaccauuuugaucaaagg

SEQ ID NO: 36451 - RNA, 22 nt, Homo sapiens
cugagauaggacucugcuggcu

SEQ ID NO: 36452 - RNA, 22 nt, Homo sapiens
cugaccuaugauuuggcucaaa

SEQ ID NO: 36453 - RNA, 22 nt, Homo sapiens
cugacugaggaucaguucauca

SEQ ID NO: 36454 - RNA, 22 nt, Homo sapiens
cucucugagccauggcugcccu

SEQ ID NO: 36455 - RNA, 22 nt, Homo sapiens
cuaacacagagguuuauuucuc

SEQ ID NO: 36456 - RNA, 22 nt, Homo sapiens
cuaaaugcacugucaaaggaag

SEQ ID NO: 36457 - RNA, 22 nt, Homo sapiens
cuaacacagggcaagucaggcu

SEQ ID NO: 36458 - RNA, 22 nt, Homo sapiens
cucauuggucagacgcgucggu

SEQ ID NO: 36459 - RNA, 22 nt, Homo sapiens
cuccauuuaguccuuuuagaag

SEQ ID NO: 36460 - RNA, 22 nt, Homo sapiens
cauugguugaacagauuguguu

SEQ ID NO: 36461 - RNA, 22 nt, Homo sapiens
cauugguuuauagauggggaaa

SEQ ID NO: 36462 - RNA, 22 nt, Homo sapiens
ccaguguucuggaaggcugagu

SEQ ID NO: 36463 - RNA, 22 nt, Homo sapiens
ccaguuuucaagauaaugguuu

SEQ ID NO: 36464 - RNA, 22 nt, Homo sapiens
caagugaauaguugcucucaga

SEQ ID NO: 36465 - RNA, 22 nt, Homo sapiens
cacagugaaugucaucauugcc

SEQ ID NO: 36466 - RNA, 22 nt, Homo sapiens
cacagucugggcuuguuuguac

SEQ ID NO: 36467 - RNA, 22 nt, Homo sapiens
cacaaaguagauuagucuucca

SEQ ID NO: 36468 - RNA, 22 nt, Homo sapiens
caaugugcuuggggcacaugag

SEQ ID NO: 36469 - RNA, 22 nt, Homo sapiens
caauggcacuauuggaaaaggu

SEQ ID NO: 36470 - RNA, 22 nt, Homo sapiens
caauggcaaugaaauagugaga

SEQ ID NO: 36471 - RNA, 21 nt, Homo sapiens
caauggcacaaucucugcuca

SEQ ID NO: 36472 - RNA, 22 nt, Homo sapiens
cacugcauuacucaugagcaug

SEQ ID NO: 36473 - RNA, 22 nt, Homo sapiens
cacugcaguggaagauuaagaa

SEQ ID NO: 36474 - RNA, 21 nt, Homo sapiens
cacugcaucacaggacagcau

SEQ ID NO: 36475 - RNA, 22 nt, Homo sapiens
cagagaacauucagagcuguag

SEQ ID NO: 36476 - RNA, 22 nt, Homo sapiens
cacuggguuagaacaugcuccu

SEQ ID NO: 36477 - RNA, 17 nt, Homo sapiens
cacugggugcaagagga

SEQ ID NO: 36478 - RNA, 22 nt, Homo sapiens
cauguaacaucccgcuguagga

SEQ ID NO: 36479 - RNA, 22 nt, Homo sapiens
caugguacugccacagaagagu

SEQ ID NO: 36480 - RNA, 22 nt, Homo sapiens
cauggcauuugcagaguugaaa

SEQ ID NO: 36481 - RNA, 22 nt, Homo sapiens
cauggcauuucaagauuuacca

SEQ ID NO: 36482 - RNA, 22 nt, Homo sapiens
cauugcacuuagacaacuuuug

SEQ ID NO: 36483 - RNA, 22 nt, Homo sapiens
cauugcacuccagccuuggcaa

SEQ ID NO: 36484 - RNA, 22 nt, Homo sapiens
cauugcacuccaucuugggcaa

SEQ ID NO: 36485 - RNA, 22 nt, Homo sapiens
cauugcacucugcauuccaguc

SEQ ID NO: 36486 - RNA, 22 nt, Homo sapiens
cauugcacuccagcuugggcga

SEQ ID NO: 36487 - RNA, 22 nt, Homo sapiens
cauuaguugaagugcagggaga

SEQ ID NO: 36488 - RNA, 22 nt, Homo sapiens
cauugcaaugaggucuugcagu

SEQ ID NO: 36489 - RNA, 22 nt, Homo sapiens
cauugcacuccaccuuggguaa

SEQ ID NO: 36490 - RNA, 22 nt, Homo sapiens
cauugcacuccagccugaguga

SEQ ID NO: 36491 - RNA, 22 nt, Homo sapiens
cauugcacuccagccugccugg

SEQ ID NO: 36492 - RNA, 20 nt, Homo sapiens
cauugcacuccagccugcug

SEQ ID NO: 36493 - RNA, 22 nt, Homo sapiens
cauugcacuccacuccugaaca

SEQ ID NO: 36494 - RNA, 22 nt, Homo sapiens
cauugcacacauuuaccuaugu

SEQ ID NO: 36495 - RNA, 22 nt, Homo sapiens
cauugcacuccagccucggcaa

SEQ ID NO: 36496 - RNA, 22 nt, Homo sapiens
caugaaagacugaggaauugga

SEQ ID NO: 36497 - RNA, 22 nt, Homo sapiens
caguacaauguugauuagaagu

SEQ ID NO: 36498 - RNA, 22 nt, Homo sapiens
cagguaguauuugguuacauaa

SEQ ID NO: 36499 - RNA, 22 nt, Homo sapiens
cagggcauuggcugguaccugg

SEQ ID NO: 36500 - RNA, 22 nt, Homo sapiens
cagguacaugcaugugugugca

SEQ ID NO: 36501 - RNA, 22 nt, Homo sapiens
gagcuacacugauucauuuguu

SEQ ID NO: 36502 - RNA, 22 nt, Homo sapiens
gagcagacaugaggaccgcugg

SEQ ID NO: 36503 - RNA, 22 nt, Homo sapiens
gagcaacaguggcagugguggg

SEQ ID NO: 36504 - RNA, 22 nt, Homo sapiens
gaggcagucuguccauucucag

SEQ ID NO: 36505 - RNA, 22 nt, Homo sapiens
gagaacagaagcauuccuaauu

SEQ ID NO: 36506 - RNA, 22 nt, Homo sapiens
gacugacgaccgcucuaccugc

SEQ ID NO: 36507 - RNA, 18 nt, Homo sapiens
gacuccauuucagccaga

SEQ ID NO: 36508 - RNA, 22 nt, Homo sapiens
gagauguuuguuucacugucac

SEQ ID NO: 36509 - RNA, 22 nt, Homo sapiens
gacuugaagaaucuaagggagg

SEQ ID NO: 36510 - RNA, 22 nt, Homo sapiens
gagaacaguguuguauuuuuuc

SEQ ID NO: 36511 - RNA, 22 nt, Homo sapiens
gagaacauacggcauuugguuu

SEQ ID NO: 36512 - RNA, 21 nt, Homo sapiens
gaccacagcagggaaugucag

SEQ ID NO: 36513 - RNA, 20 nt, Homo sapiens
gacauguugguuugcugcac

SEQ ID NO: 36514 - RNA, 22 nt, Homo sapiens
gacauguuuacaguguugagag

SEQ ID NO: 36515 - RNA, 22 nt, Homo sapiens
cuuuuggcuuaagauugucuug

SEQ ID NO: 36516 - RNA, 22 nt, Homo sapiens
cuuuuggcuuagaauugucuug

SEQ ID NO: 36517 - RNA, 20 nt, Homo sapiens
gacauagagacucucaaaaa

SEQ ID NO: 36518 - RNA, 21 nt, Homo sapiens
gaaauacugccuuaggagcug

SEQ ID NO: 36519 - RNA, 22 nt, Homo sapiens
gaaaucucuacuauuuugaucu

SEQ ID NO: 36520 - RNA, 22 nt, Homo sapiens
gaaaugucugagauguggcuca

SEQ ID NO: 36521 - RNA, 23 nt, Homo sapiens
gaaaugucuuagugaaauugcuu

SEQ ID NO: 36522 - RNA, 22 nt, Homo sapiens
cuuugguugugcucuccacuuu

SEQ ID NO: 36523 - RNA, 22 nt, Homo sapiens
cuguuauguuugauggaugaau

SEQ ID NO: 36524 - RNA, 22 nt, Homo sapiens
cuuuguaugucaugacaacugu

SEQ ID NO: 36525 - RNA, 22 nt, Homo sapiens
cugugguuuaaggaauuuugac

SEQ ID NO: 36526 - RNA, 22 nt, Homo sapiens
cuguggguuuuacuguuuuacu

SEQ ID NO: 36527 - RNA, 22 nt, Homo sapiens
cugugcuugauuauaugagugu

SEQ ID NO: 36528 - RNA, 22 nt, Homo sapiens
cugugcaaacaagugaaccccu

SEQ ID NO: 36529 - RNA, 22 nt, Homo sapiens
cugugcauggauuuuaagauug

SEQ ID NO: 36530 - RNA, 22 nt, Homo sapiens
cuguaugugagaaauaauaagu

SEQ ID NO: 36531 - RNA, 19 nt, Homo sapiens
cugucacugaggaagacug

SEQ ID NO: 36532 - RNA, 22 nt, Homo sapiens
cuguacucaucccauaugcacu

SEQ ID NO: 36533 - RNA, 22 nt, Homo sapiens
cuguauguuucuaugaauguga

SEQ ID NO: 36534 - RNA, 22 nt, Homo sapiens
cugucaucauuucuaugugcca

SEQ ID NO: 36535 - RNA, 22 nt, Homo sapiens
ggagaucuuuaggaguuggacu

SEQ ID NO: 36536 - RNA, 22 nt, Homo sapiens
ggagauaauccagggagggacu

SEQ ID NO: 36537 - RNA, 22 nt, Homo sapiens
ggagcaaugccucauucucacu

SEQ ID NO: 36538 - RNA, 22 nt, Homo sapiens
ggacuguaauaccaugaggaca

SEQ ID NO: 36539 - RNA, 22 nt, Homo sapiens
ggcaaaaucgcaauuacuuuug

SEQ ID NO: 36540 - RNA, 22 nt, Homo sapiens
ggcaacaaagacauuucaacau

SEQ ID NO: 36541 - RNA, 22 nt, Homo sapiens
ggaucauaugauagcucaauuu

SEQ ID NO: 36542 - RNA, 22 nt, Homo sapiens
ggaguguaguggcuccaucucg

SEQ ID NO: 36543 - RNA, 22 nt, Homo sapiens
ggagugugauucaguauaauau

SEQ ID NO: 36544 - RNA, 22 nt, Homo sapiens
ggauaacagccaggucaaacaa

SEQ ID NO: 36545 - RNA, 22 nt, Homo sapiens
gcuuuguuguugaugggaaauc

SEQ ID NO: 36546 - RNA, 18 nt, Homo sapiens
ggaaaacuuuucuaagua

SEQ ID NO: 36547 - RNA, 22 nt, Homo sapiens
gcuuuggauaaaugucaguuua

SEQ ID NO: 36548 - RNA, 22 nt, Homo sapiens
gcaucaaugucuauaguguuug

SEQ ID NO: 36549 - RNA, 22 nt, Homo sapiens
gcacagucaacacuuauucacc

SEQ ID NO: 36550 - RNA, 22 nt, Homo sapiens
gcaauguuacugaauguguuuu

SEQ ID NO: 36551 - RNA, 22 nt, Homo sapiens
gcaccauugacaagaaauaggu

SEQ ID NO: 36552 - RNA, 22 nt, Homo sapiens
gcauggccuuuaaaugucacag

SEQ ID NO: 36553 - RNA, 22 nt, Homo sapiens
gcauggauguugauggcugcug

SEQ ID NO: 36554 - RNA, 20 nt, Homo sapiens
gccacaguuaagcuucugcc

SEQ ID NO: 36555 - RNA, 22 nt, Homo sapiens
gauaagagaugauuuugccaug

SEQ ID NO: 36556 - RNA, 22 nt, Homo sapiens
gaugguguuuugauaggaauug

SEQ ID NO: 36557 - RNA, 22 nt, Homo sapiens
gauguguugggaagauuucaag

SEQ ID NO: 36558 - RNA, 22 nt, Homo sapiens
uacugguuuuauauauuucucc

SEQ ID NO: 36559 - RNA, 18 nt, Homo sapiens
uagaauauaggucauucu

SEQ ID NO: 36560 - RNA, 22 nt, Homo sapiens
uacugcaucgaaaugcuuuuau

SEQ ID NO: 36561 - RNA, 22 nt, Homo sapiens
uacugcauuucacuguuaaaga

SEQ ID NO: 36562 - RNA, 22 nt, Homo sapiens
uagcacaucccuaaaaugcugu

SEQ ID NO: 36563 - RNA, 22 nt, Homo sapiens
uagaucauauacuugccaugac

SEQ ID NO: 36564 - RNA, 22 nt, Homo sapiens
uagauuaucucaccacucgagu

SEQ ID NO: 36565 - RNA, 22 nt, Homo sapiens
uaacccuuacaacuacacucgu

SEQ ID NO: 36566 - RNA, 22 nt, Homo sapiens
uaacuccauuuggacucaguau

SEQ ID NO: 36567 - RNA, 22 nt, Homo sapiens
uaacugucucccuugguccuga

SEQ ID NO: 36568 - RNA, 22 nt, Homo sapiens
uacaugugccauguugguuugc

SEQ ID NO: 36569 - RNA, 22 nt, Homo sapiens
uaguaguuuuguguauaauaau

SEQ ID NO: 36570 - RNA, 22 nt, Homo sapiens
uaguauguuuauagcauugagu

SEQ ID NO: 36571 - RNA, 22 nt, Homo sapiens
uaucaaacccaaggaggggguu

SEQ ID NO: 36572 - RNA, 22 nt, Homo sapiens
uauaugcauugugggguacuga

SEQ ID NO: 36573 - RNA, 22 nt, Homo sapiens
uauaugucugagacugggggau

SEQ ID NO: 36574 - RNA, 22 nt, Homo sapiens
uauaugucuucuuguaauuggc

SEQ ID NO: 36575 - RNA, 22 nt, Homo sapiens
uauaugcaacauaguguaugug

SEQ ID NO: 36576 - RNA, 22 nt, Homo sapiens
uauaucuguccauggcccugcu

SEQ ID NO: 36577 - RNA, 21 nt, Homo sapiens
uauaugacuuacuauugccuc

SEQ ID NO: 36578 - RNA, 22 nt, Homo sapiens
uagugguaguuauggauuugcu

SEQ ID NO: 36579 - RNA, 22 nt, Homo sapiens
uaguguuuuucauuggcagagg

SEQ ID NO: 36580 - RNA, 22 nt, Homo sapiens
uaguugcauucaggauaugacg

SEQ ID NO: 36581 - RNA, 22 nt, Homo sapiens
uaguucauuuuucuugcuuaga

SEQ ID NO: 36582 - RNA, 22 nt, Homo sapiens
uagcaugacacuuguugaaugc

SEQ ID NO: 36583 - RNA, 18 nt, Homo sapiens
uagcaugaugcugagugc

SEQ ID NO: 36584 - RNA, 22 nt, Homo sapiens
uagcaguucauuguugugugaa

SEQ ID NO: 36585 - RNA, 22 nt, Homo sapiens
uagcuucuccauagcuccaugu

SEQ ID NO: 36586 - RNA, 22 nt, Homo sapiens
uauguguuuuauggucagggag

SEQ ID NO: 36587 - RNA, 22 nt, Homo sapiens
uauuacagaccauaucgccggg

SEQ ID NO: 36588 - RNA, 20 nt, Homo sapiens
uauuacagaguaauggugga

SEQ ID NO: 36589 - RNA, 22 nt, Homo sapiens
uauugcauguugagcaguaccu

SEQ ID NO: 36590 - RNA, 22 nt, Homo sapiens
uauugcuaacaucccuuaugua

SEQ ID NO: 36591 - RNA, 22 nt, Homo sapiens
ucaaaugcucuuugcagagagg

SEQ ID NO: 36592 - RNA, 22 nt, Homo sapiens
uauggguauuuuauacauaacc

SEQ ID NO: 36593 - RNA, 22 nt, Homo sapiens
uauggguuucagagggugauag

SEQ ID NO: 36594 - RNA, 22 nt, Homo sapiens
uaugggcuuuguuuuguacuag

SEQ ID NO: 36595 - RNA, 22 nt, Homo sapiens
uaugguuuuaagguuaaggacu

SEQ ID NO: 36596 - RNA, 22 nt, Homo sapiens
uaugucuucuuuagagaaaugu

SEQ ID NO: 36597 - RNA, 22 nt, Homo sapiens
uaucccaauguaauaucacaaa

SEQ ID NO: 36598 - RNA, 22 nt, Homo sapiens
uaucauugccucaaucuguauu

SEQ ID NO: 36599 - RNA, 18 nt, Homo sapiens
uaucauguagggaaguug

SEQ ID NO: 36600 - RNA, 22 nt, Homo sapiens
uauaugucuuuguuauguugag

SEQ ID NO: 36601 - RNA, 22 nt, Homo sapiens
uaucaugucuguguguaccuag

SEQ ID NO: 36602 - RNA, 22 nt, Homo sapiens
uaucacacuguuggauuugauu

SEQ ID NO: 36603 - RNA, 22 nt, Homo sapiens
ucaccaccugcugauuguagag

SEQ ID NO: 36604 - RNA, 22 nt, Homo sapiens
ucacaguccuguuuaggagagg

SEQ ID NO: 36605 - RNA, 22 nt, Homo sapiens
ucacauggcagagaagaagcuc

SEQ ID NO: 36606 - RNA, 22 nt, Homo sapiens
ucacaugaagauuuuaguauac

SEQ ID NO: 36607 - RNA, 22 nt, Homo sapiens
ucacccuguguuuugcguuugc

SEQ ID NO: 36608 - RNA, 22 nt, Homo sapiens
ucacagccuaguuuuauacauu

SEQ ID NO: 36609 - RNA, 22 nt, Homo sapiens
ucacagucaaaguaaucauaga

SEQ ID NO: 36610 - RNA, 22 nt, Homo sapiens
ucacaccauucuucuacuucag

SEQ ID NO: 36611 - RNA, 22 nt, Homo sapiens
ucacaauucucaauuugugaaa

SEQ ID NO: 36612 - RNA, 22 nt, Homo sapiens
ucaauugcaucaacaguguaca

SEQ ID NO: 36613 - RNA, 22 nt, Homo sapiens
ucaacauugcugucaggcaucu

SEQ ID NO: 36614 - RNA, 22 nt, Homo sapiens
ucaacagugggcacuguaaaug

SEQ ID NO: 36615 - RNA, 18 nt, Homo sapiens
ucaagcaauugucaugcc

SEQ ID NO: 36616 - RNA, 22 nt, Homo sapiens
gugaauugagagaacuguguua

SEQ ID NO: 36617 - RNA, 22 nt, Homo sapiens
gugacaucagcuccagguauaa

SEQ ID NO: 36618 - RNA, 22 nt, Homo sapiens
gugacagaguaagacccuguau

SEQ ID NO: 36619 - RNA, 22 nt, Homo sapiens
gugaaauguguagaggaucugg

SEQ ID NO: 36620 - RNA, 22 nt, Homo sapiens
gucuugaaggcugaguaccugu

SEQ ID NO: 36621 - RNA, 22 nt, Homo sapiens
gucugguuuuuuauauccucac

SEQ ID NO: 36622 - RNA, 22 nt, Homo sapiens
gucugguacuuguuuguaaggg

SEQ ID NO: 36623 - RNA, 22 nt, Homo sapiens
gucucccagccuacaucuuucu

SEQ ID NO: 36624 - RNA, 22 nt, Homo sapiens
gucucccaaccccugugcccag

SEQ ID NO: 36625 - RNA, 22 nt, Homo sapiens
guaugaaaaucggagauugggu

SEQ ID NO: 36626 - RNA, 22 nt, Homo sapiens
gucaaguaaauguuaugguuau

SEQ ID NO: 36627 - RNA, 22 nt, Homo sapiens
gucaaugcauccaugaauggcu

SEQ ID NO: 36628 - RNA, 22 nt, Homo sapiens
ggcacaguuaagugcuaccuaa

SEQ ID NO: 36629 - RNA, 22 nt, Homo sapiens
ggcauguugauagguagaugua

SEQ ID NO: 36630 - RNA, 22 nt, Homo sapiens
ggcacgguggcucacgccugua

SEQ ID NO: 36631 - RNA, 22 nt, Homo sapiens
guaggcacuggcucagcuuauc

SEQ ID NO: 36632 - RNA, 22 nt, Homo sapiens
guaucacacuuauugaccugca

SEQ ID NO: 36633 - RNA, 22 nt, Homo sapiens
guaguuuaucagaaagaauagg

SEQ ID NO: 36634 - RNA, 22 nt, Homo sapiens
guaaggcuucuggucaacagca

SEQ ID NO: 36635 - RNA, 22 nt, Homo sapiens
guaacguaaugucaaaaucuau

SEQ ID NO: 36636 - RNA, 22 nt, Homo sapiens
guaacacaugcugcucucuggu

SEQ ID NO: 36637 - RNA, 22 nt, Homo sapiens
guaaauguccugcuacagagug

SEQ ID NO: 36638 - RNA, 22 nt, Homo sapiens
guaacaccaguuauaucaguuc

SEQ ID NO: 36639 - RNA, 22 nt, Homo sapiens
ggcauguuuaguagaauguggu

SEQ ID NO: 36640 - RNA, 22 nt, Homo sapiens
guaauaccuuccccugcuggag

SEQ ID NO: 36641 - RNA, 20 nt, Homo sapiens
guucauguaauuaguucagg

SEQ ID NO: 36642 - RNA, 22 nt, Homo sapiens
guucaucagggauauuggcuua

SEQ ID NO: 36643 - RNA, 22 nt, Homo sapiens
guucaucagggauacuggcuua

SEQ ID NO: 36644 - RNA, 22 nt, Homo sapiens
uaaaccacguuuacauuugaga

SEQ ID NO: 36645 - RNA, 22 nt, Homo sapiens
uaaacacucacuucauagccau

SEQ ID NO: 36646 - RNA, 22 nt, Homo sapiens
guuuuuggggucacuauuaccg

SEQ ID NO: 36647 - RNA, 22 nt, Homo sapiens
uaaacugcuugaggguaaguac

SEQ ID NO: 36648 - RNA, 22 nt, Homo sapiens
guugcagaguucuuccuccuga

SEQ ID NO: 36649 - RNA, 22 nt, Homo sapiens
uaacagcauuugugucuaguag

SEQ ID NO: 36650 - RNA, 22 nt, Homo sapiens
uaacaguguauuccuuuggaca

SEQ ID NO: 36651 - RNA, 22 nt, Homo sapiens
uaacaguguauuuacuacuucc

SEQ ID NO: 36652 - RNA, 22 nt, Homo sapiens
uaacauugcuggacuaccugcu

SEQ ID NO: 36653 - RNA, 22 nt, Homo sapiens
uaacauugucuugcuuaguuuu

SEQ ID NO: 36654 - RNA, 22 nt, Homo sapiens
uaacauuguugauuauacuaag

SEQ ID NO: 36655 - RNA, 21 nt, Homo sapiens
uaaaugucauacaaagcaaug

SEQ ID NO: 36656 - RNA, 22 nt, Homo sapiens
uaaaugcucuuuaaaagugcuu

SEQ ID NO: 36657 - RNA, 22 nt, Homo sapiens
uaaagcauguaauuagguuaga

SEQ ID NO: 36658 - RNA, 22 nt, Homo sapiens
uaaagagcuuuugaggugucau

SEQ ID NO: 36659 - RNA, 22 nt, Homo sapiens
uaaagauaaggcucgcuuggau

SEQ ID NO: 36660 - RNA, 22 nt, Homo sapiens
uaaagcuauuauaguuauguuu

SEQ ID NO: 36661 - RNA, 22 nt, Homo sapiens
guguaacaacagcacuccacug

SEQ ID NO: 36662 - RNA, 22 nt, Homo sapiens
gugugguaggauugguuacuca

SEQ ID NO: 36663 - RNA, 22 nt, Homo sapiens
guguuaaucucaaguacucuca

SEQ ID NO: 36664 - RNA, 23 nt, Homo sapiens
gugugguaggcuauaccaucuag

SEQ ID NO: 36665 - RNA, 22 nt, Homo sapiens
gugguguuugagcugccaggga

SEQ ID NO: 36666 - RNA, 22 nt, Homo sapiens
gugguuuuaucccagaaauuaa

SEQ ID NO: 36667 - RNA, 22 nt, Homo sapiens
gugguucuagagggacagaaug

SEQ ID NO: 36668 - RNA, 20 nt, Homo sapiens
gugauuggucacugguuguu

SEQ ID NO: 36669 - RNA, 22 nt, Homo sapiens
guggaauuauagagacaucuug

SEQ ID NO: 36670 - RNA, 20 nt, Homo sapiens
gugagaacaugugguauuug

SEQ ID NO: 36671 - RNA, 23 nt, Homo sapiens
gugaucauuguuguggguugaau

SEQ ID NO: 36672 - RNA, 22 nt, Homo sapiens
gugauaucuuacaauucucuuu

SEQ ID NO: 36673 - RNA, 22 nt, Human herpesvirus 3
cuaauuuaauagggcuaugucc

SEQ ID NO: 36674 - RNA, 15 nt, Human herpesvirus 3
agagcccacacaauc

SEQ ID NO: 36675 - RNA, 22 nt, Human herpesvirus 3
aucgggguucuggaucgcggca

SEQ ID NO: 36676 - RNA, 22 nt, Human herpesvirus 3
gguugugucggucucuccaagc

SEQ ID NO: 36677 - RNA, 22 nt, Human herpesvirus 3
ggauacuuggcucuguauuaaa

SEQ ID NO: 36678 - RNA, 22 nt, Human herpesvirus 3
uuuaucaugccaaugggagugu

SEQ ID NO: 36679 - RNA, 22 nt, Human herpesvirus 3
uucuaggauucgaacgacgaca

SEQ ID NO: 36680 - RNA, 22 nt, Human herpesvirus 3
uugaagacagggauacggaggg

SEQ ID NO: 36681 - RNA, 22 nt, Human herpesvirus 3
guguuguuguuuccaaacggaa

SEQ ID NO: 36682 - RNA, 22 nt, Human herpesvirus 3
gccguguuacugguaauggcgg

SEQ ID NO: 36683 - RNA, 22 nt, Human herpesvirus 3
uccccggacgguccaaaccgca

SEQ ID NO: 36684 - RNA, 22 nt, Human herpesvirus 3
gcauguugcucgaagagcacau

SEQ ID NO: 36685 - RNA, 22 nt, Human herpesvirus 3
cuaauuuaauagggcuaugucc

SEQ ID NO: 36686 - RNA, 22 nt, Homo sapiens
augaugcugagguuugggguau

SEQ ID NO: 36687 - RNA, 22 nt, Homo sapiens
ucauaucauuagaucuacugua

SEQ ID NO: 36688 - RNA, 22 nt, Homo sapiens
auugcacuccagccuaggcaac

SEQ ID NO: 36689 - RNA, 22 nt, Homo sapiens
uguggccuuuguuucaguuggg

SEQ ID NO: 36690 - RNA, 22 nt, Homo sapiens
uggagugagaacuucaaugaug

SEQ ID NO: 36691 - RNA, 17 nt, Homo sapiens
cucucugguuuaaagca

SEQ ID NO: 36692 - RNA, 22 nt, Homo sapiens
aaucacuuuggcaccaaccuaa

SEQ ID NO: 36693 - RNA, 22 nt, Homo sapiens
ugagaugaguugcgcucugucg

SEQ ID NO: 36694 - RNA, 22 nt, Homo sapiens
uucagacugggugaagagggua

SEQ ID NO: 36695 - RNA, 22 nt, Homo sapiens
gagagcauuaagccaucaucau

SEQ ID NO: 36696 - RNA, 22 nt, Homo sapiens
ucuuuguuggaguccaaggaua

SEQ ID NO: 36697 - RNA, 22 nt, Homo sapiens
uuaccugagaaggugacauuug

SEQ ID NO: 36698 - RNA, 22 nt, Homo sapiens
augagcugauuuccuuaccaua

SEQ ID NO: 36699 - RNA, 22 nt, Homo sapiens
uuggacuucucaaggcaauaaa

SEQ ID NO: 36700 - RNA, 22 nt, Homo sapiens
uauggccuuuuuaaugauauug

SEQ ID NO: 36701 - RNA, 22 nt, Homo sapiens
cauugcacuccagccuagccaa

SEQ ID NO: 36702 - RNA, 21 nt, Homo sapiens
uggagugaagaguuuauugac

SEQ ID NO: 36703 - RNA, 22 nt, Homo sapiens
cauugcacuccagccuuggcaa

SEQ ID NO: 36704 - RNA, 22 nt, Homo sapiens
gcugagaucucuugccugaacu

SEQ ID NO: 36705 - RNA, 21 nt, Homo sapiens
auagcacuucacuugguuaga

SEQ ID NO: 36706 - RNA, 22 nt, Homo sapiens
uuugaguuugaggugcugauga

SEQ ID NO: 36707 - RNA, 22 nt, Homo sapiens
uugagggaggcagggcuugucu

SEQ ID NO: 36708 - RNA, 17 nt, Homo sapiens
gucuuugguugaguuua

SEQ ID NO: 36709 - RNA, 22 nt, Homo sapiens
guguuauuuugcugggaaugau

SEQ ID NO: 36710 - RNA, 22 nt, Homo sapiens
cauugcacuccagccuggccaa

SEQ ID NO: 36711 - RNA, 22 nt, Homo sapiens
cuauggcucugucuuuuaaguu

SEQ ID NO: 36712 - RNA, 22 nt, Homo sapiens
cuuugguuaucuagcuguauga

SEQ ID NO: 36713 - RNA, 22 nt, Homo sapiens
uggaagacaaguguuagcaugg

SEQ ID NO: 36714 - RNA, 22 nt, Homo sapiens
guccaagacuaggaguuggcag

SEQ ID NO: 36715 - RNA, 22 nt, Homo sapiens
uuccugagccuuguaucuagua

SEQ ID NO: 36716 - RNA, 22 nt, Homo sapiens
acugaucaauguuaaggcuuau

SEQ ID NO: 36717 - RNA, 22 nt, Homo sapiens
uuacacaguaggucccuaguaa

SEQ ID NO: 36718 - RNA, 22 nt, Homo sapiens
augaggcaggaaaggcguaucu

SEQ ID NO: 36719 - RNA, 22 nt, Homo sapiens
agcuggcuguggagaaaccccu

SEQ ID NO: 36720 - RNA, 22 nt, Homo sapiens
aaaguucugcguuagggcuaaa

SEQ ID NO: 36721 - RNA, 22 nt, Homo sapiens
auugcacuccagccuggggaac

SEQ ID NO: 36722 - RNA, 19 nt, Homo sapiens
ugugaacaucacagagugu

SEQ ID NO: 36723 - RNA, 22 nt, Homo sapiens
uaugacauaguccuuaacccuc

SEQ ID NO: 36724 - RNA, 22 nt, Homo sapiens
uuugccaaucagaggcaucuug

SEQ ID NO: 36725 - RNA, 22 nt, Homo sapiens
aaugcuguguuauuucaugacc

SEQ ID NO: 36726 - RNA, 22 nt, Homo sapiens
acugagaucuuuaaauaaauaa

SEQ ID NO: 36727 - RNA, 22 nt, Homo sapiens
auggcucuggauagaaugcagg

SEQ ID NO: 36728 - RNA, 20 nt, Homo sapiens
auuccacuuauaugaggucc

SEQ ID NO: 36729 - RNA, 22 nt, Homo sapiens
agugcaauggugccaucauagc

SEQ ID NO: 36730 - RNA, 19 nt, Homo sapiens
gugguauuaccuuuugauu

SEQ ID NO: 36731 - RNA, 22 nt, Homo sapiens
cauugcacuccagucugggcaa

SEQ ID NO: 36732 - RNA, 22 nt, Homo sapiens
cuuugguuuacuuggugcuagu

SEQ ID NO: 36733 - RNA, 22 nt, Homo sapiens
uugcacuccggccuggguaaca

SEQ ID NO: 36734 - RNA, 22 nt, Homo sapiens
uugagauggagucucacuccuu

SEQ ID NO: 36735 - RNA, 23 nt, Homo sapiens
ucaguacuccacuuucaauagug

SEQ ID NO: 36736 - RNA, 22 nt, Homo sapiens
cuucaucugguuugugaacuuu

SEQ ID NO: 36737 - RNA, 22 nt, Homo sapiens
auggcaguuucagcuauaguuu

SEQ ID NO: 36738 - RNA, 22 nt, Homo sapiens
cucuuuggaugccuuaggguua

SEQ ID NO: 36739 - RNA, 22 nt, Homo sapiens
cuggaauguuccuaaagauuca

SEQ ID NO: 36740 - RNA, 22 nt, Homo sapiens
auggcagugucuagggguguuu

SEQ ID NO: 36741 - RNA, 22 nt, Homo sapiens
uacagucauaaugccuagugac

SEQ ID NO: 36742 - RNA, 19 nt, Homo sapiens
cucuuuggugucucuucuu

SEQ ID NO: 36743 - RNA, 22 nt, Homo sapiens
augacagagauaugugaauuuu

SEQ ID NO: 36744 - RNA, 22 nt, Homo sapiens
cugaaagagcauguaacacagu

SEQ ID NO: 36745 - RNA, 22 nt, Homo sapiens
ugagaugaggucucgcucuguc

SEQ ID NO: 36746 - RNA, 22 nt, Homo sapiens
agcugguuuauuucuauauccu

SEQ ID NO: 36747 - RNA, 22 nt, Homo sapiens
uuggcagugguucugacggacc

SEQ ID NO: 36748 - RNA, 21 nt, Homo sapiens
acaucagaguugugaagguag

SEQ ID NO: 36749 - RNA, 19 nt, Homo sapiens
uggaacugauucaguucug

SEQ ID NO: 36750 - RNA, 22 nt, Homo sapiens
acacaguguuuauugugguuag

SEQ ID NO: 36751 - RNA, 22 nt, Homo sapiens
gaucacuuugaugccaggaacu

SEQ ID NO: 36752 - RNA, 19 nt, Homo sapiens
uuccugagaacaagggcuu

SEQ ID NO: 36753 - RNA, 22 nt, Homo sapiens
ucucuugguugaacaguuugga

SEQ ID NO: 36754 - RNA, 22 nt, Homo sapiens
aaccuacauucuuaacuguugc

SEQ ID NO: 36755 - RNA, 22 nt, Homo sapiens
uugcuccucugccaggaccugu

SEQ ID NO: 36756 - RNA, 22 nt, Homo sapiens
uugacaaggagccauugcaucu

SEQ ID NO: 36757 - RNA, 22 nt, Homo sapiens
cauaaagauggaggaggccagg

SEQ ID NO: 36758 - RNA, 22 nt, Homo sapiens
aagugaguaauacgucaguugu

SEQ ID NO: 36759 - RNA, 22 nt, Homo sapiens
uuguuuuggagaugagcuaaaa

SEQ ID NO: 36760 - RNA, 22 nt, Homo sapiens
ugugaaacauggauagaacugg

SEQ ID NO: 36761 - RNA, 19 nt, Homo sapiens
cauggcuuauaauuuuaau

SEQ ID NO: 36762 - RNA, 22 nt, Homo sapiens
ugagaccuuucauuucucagug

SEQ ID NO: 36763 - RNA, 22 nt, Homo sapiens
uacaaaucuagguuuguuacug

SEQ ID NO: 36764 - RNA, 20 nt, Homo sapiens
ugagaacaugugguauuugg

SEQ ID NO: 36765 - RNA, 22 nt, Homo sapiens
aaguaaacauuuuguacaauaa

SEQ ID NO: 36766 - RNA, 22 nt, Homo sapiens
gagaucauguacuagaacaccu

SEQ ID NO: 36767 - RNA, 22 nt, Homo sapiens
uguuacagugacuaauguuuua

SEQ ID NO: 36768 - RNA, 22 nt, Homo sapiens
augacaagaguguucagggaga

SEQ ID NO: 36769 - RNA, 22 nt, Homo sapiens
ugagaacugguagcacuuguga

SEQ ID NO: 36770 - RNA, 18 nt, Homo sapiens
aaacagugucucuuucug

SEQ ID NO: 36771 - RNA, 22 nt, Homo sapiens
uuguguuuuuaguagggaaggg

SEQ ID NO: 36772 - RNA, 22 nt, Homo sapiens
ugcauggauguuugaacacacu

SEQ ID NO: 36773 - RNA, 22 nt, Homo sapiens
acuguauagauggaguugauuu

SEQ ID NO: 36774 - RNA, 22 nt, Homo sapiens
auuguacuccagccugggcagc

SEQ ID NO: 36775 - RNA, 22 nt, Homo sapiens
agcugauggucuuguaugaugu

SEQ ID NO: 36776 - RNA, 22 nt, Homo sapiens
uacaguguuuugguauuccaca

SEQ ID NO: 36777 - RNA, 22 nt, Homo sapiens
cauugcacuccagccugcugac

SEQ ID NO: 36778 - RNA, 22 nt, Homo sapiens
uuucuacagggcuugccaggua

SEQ ID NO: 36779 - RNA, 18 nt, Homo sapiens
guaaauguaucuauugcc

SEQ ID NO: 36780 - RNA, 22 nt, Homo sapiens
caugcacugaguccaccucugg

SEQ ID NO: 36781 - RNA, 21 nt, Homo sapiens
uuaaguaauuacccaacucuc

SEQ ID NO: 36782 - RNA, 22 nt, Homo sapiens
cacuagagaauagguaguucug

SEQ ID NO: 36783 - RNA, 23 nt, Homo sapiens
aaagacuagucaggugcaguggu

SEQ ID NO: 36784 - RNA, 22 nt, Homo sapiens
uggaagauggaguuuuaucauu

SEQ ID NO: 36785 - RNA, 22 nt, Homo sapiens
cuaauacaguuguccaagcugg

SEQ ID NO: 36786 - RNA, 22 nt, Homo sapiens
uuggcagugcccgaugcugggg

SEQ ID NO: 36787 - RNA, 22 nt, Homo sapiens
ucugucuugugguuugagugcc

SEQ ID NO: 36788 - RNA, 22 nt, Homo sapiens
auuggcuuuugaaagucugcga

SEQ ID NO: 36789 - RNA, 22 nt, Homo sapiens
uuugugcaugaagagggggugc

SEQ ID NO: 36790 - RNA, 22 nt, Homo sapiens
uaucacuuuuccagcccagcuu

SEQ ID NO: 36791 - RNA, 22 nt, Homo sapiens
uagcaggaaaggggucagaucu

SEQ ID NO: 36792 - RNA, 22 nt, Homo sapiens
uugagauggaaucucgcuuugu

SEQ ID NO: 36793 - RNA, 22 nt, Homo sapiens
auuccacuuauaugagguaucu

SEQ ID NO: 36794 - RNA, 22 nt, Homo sapiens
guggcagugugaggauccugcu

SEQ ID NO: 36795 - RNA, 22 nt, Homo sapiens
cauugcacuccagccuggcaac

SEQ ID NO: 36796 - RNA, 22 nt, Homo sapiens
gugagccaugauuuuaccacug

SEQ ID NO: 36797 - RNA, 22 nt, Homo sapiens
cauuaguugaagugcagggaga

SEQ ID NO: 36798 - RNA, 22 nt, Homo sapiens
uuaugacauugacaguuuuuag

SEQ ID NO: 36799 - RNA, 22 nt, Homo sapiens
ugcaauuuaaugugucccaauu

SEQ ID NO: 36800 - RNA, 22 nt, Homo sapiens
uauggcuuuguucaacagccuc

SEQ ID NO: 36801 - RNA, 22 nt, Homo sapiens
gucuuuaguugaaacauguggu

SEQ ID NO: 36802 - RNA, 22 nt, Homo sapiens
agaacuguccauucagcaugaa

SEQ ID NO: 36803 - RNA, 22 nt, Homo sapiens
aagucaaggagagaagcuucag

SEQ ID NO: 36804 - RNA, 22 nt, Homo sapiens
cugagugcaagugauccuccca

SEQ ID NO: 36805 - RNA, 22 nt, Homo sapiens
uuauggccauucuuguaggagu

SEQ ID NO: 36806 - RNA, 22 nt, Homo sapiens
auugcucuuagaaauauuucuu

SEQ ID NO: 36807 - RNA, 22 nt, Homo sapiens
cucagugucuggggccccaggg

SEQ ID NO: 36808 - RNA, 22 nt, Homo sapiens
guggaaugaaaacucucucaca

SEQ ID NO: 36809 - RNA, 22 nt, Homo sapiens
acauucagcuguuguuucaaug

SEQ ID NO: 36810 - RNA, 22 nt, Homo sapiens
ugaauagacacuaaagacugua

SEQ ID NO: 36811 - RNA, 22 nt, Homo sapiens
cuggaaacaucuuaggaaugca

SEQ ID NO: 36812 - RNA, 22 nt, Homo sapiens
gagcucauuguugcuaaagaga

SEQ ID NO: 36813 - RNA, 22 nt, Homo sapiens
ugagaucuuggaggcuuuguga

SEQ ID NO: 36814 - RNA, 21 nt, Homo sapiens
uauggcuuagucaguguuucc

SEQ ID NO: 36815 - RNA, 22 nt, Homo sapiens
ugaaaucuaaaauguuccaaga

SEQ ID NO: 36816 - RNA, 20 nt, Homo sapiens
uaagccacacagucuaaggu

SEQ ID NO: 36817 - RNA, 22 nt, Homo sapiens
gaugagaugagcauuugaauug

SEQ ID NO: 36818 - RNA, 19 nt, Homo sapiens
uagguacauucaagucucc

SEQ ID NO: 36819 - RNA, 22 nt, Homo sapiens
ugagaugaagugauguaaaaca

SEQ ID NO: 36820 - RNA, 23 nt, Homo sapiens
gaaguaauaaauggauucuuaac

SEQ ID NO: 36821 - RNA, 22 nt, Homo sapiens
ugauuuguuuagugccaaguuu

SEQ ID NO: 36822 - RNA, 22 nt, Homo sapiens
aaggagcuaagagaucauacau

SEQ ID NO: 36823 - RNA, 22 nt, Homo sapiens
gagcuguuuuucacuagaccaa

SEQ ID NO: 36824 - RNA, 22 nt, Homo sapiens
agagaugauuaacauuuuggua

SEQ ID NO: 36825 - RNA, 22 nt, Homo sapiens
cuguucaggaggcauuuggugg

SEQ ID NO: 36826 - RNA, 22 nt, Homo sapiens
uaaucucagcuacucaggaggc

SEQ ID NO: 36827 - RNA, 21 nt, Homo sapiens
uucuaaguaaauguuggacau

SEQ ID NO: 36828 - RNA, 22 nt, Homo sapiens
augacauugaugcucuggcugg

SEQ ID NO: 36829 - RNA, 23 nt, Homo sapiens
aucagguuguagaauguguuugc

SEQ ID NO: 36830 - RNA, 23 nt, Homo sapiens
uuuggcauuccagaaauuuucau

SEQ ID NO: 36831 - RNA, 22 nt, Homo sapiens
aaugcuguucuuugcuuaaguu

SEQ ID NO: 36832 - RNA, 22 nt, Homo sapiens
uugagauggaguuucgcucuuu

SEQ ID NO: 36833 - RNA, 22 nt, Homo sapiens
ugacaaguaaacagucagcacc

SEQ ID NO: 36834 - RNA, 22 nt, Homo sapiens
cuggcucugggcuaaagaaaua

SEQ ID NO: 36835 - RNA, 22 nt, Homo sapiens
agugcacuccagccugggcaac

SEQ ID NO: 36836 - RNA, 22 nt, Homo sapiens
uuggaagacaaugcugauucuc

SEQ ID NO: 36837 - RNA, 22 nt, Homo sapiens
aucccugugauccaaucacuuc

SEQ ID NO: 36838 - RNA, 22 nt, Homo sapiens
ugguucaguugcacaggcuguu

SEQ ID NO: 36839 - RNA, 22 nt, Homo sapiens
cacagugaacugguggguuuuu

SEQ ID NO: 36840 - RNA, 22 nt, Homo sapiens
cucauggagaacaucugcuagg

SEQ ID NO: 36841 - RNA, 20 nt, Homo sapiens
ucugauugcaacugcaugag

SEQ ID NO: 36842 - RNA, 22 nt, Homo sapiens
augugcuuauagguguauguuu

SEQ ID NO: 36843 - RNA, 22 nt, Homo sapiens
guccaguacucuuuccugaaaa

SEQ ID NO: 36844 - RNA, 22 nt, Homo sapiens
uauggcuuuucacuuaaguccu

SEQ ID NO: 36845 - RNA, 22 nt, Homo sapiens
guaaucucagcuacucaggagg

SEQ ID NO: 36846 - RNA, 23 nt, Homo sapiens
uugaggcauguaccaucaauauc

SEQ ID NO: 36847 - RNA, 17 nt, Homo sapiens
aaguggcuuguucacca

SEQ ID NO: 36848 - RNA, 22 nt, Homo sapiens
uuugacaaugugugcuuguauu

SEQ ID NO: 36849 - RNA, 22 nt, Homo sapiens
cguugcacuccagccugggcaa

SEQ ID NO: 36850 - RNA, 22 nt, Homo sapiens
uuugaguaggcuuauauuuugg

SEQ ID NO: 36851 - RNA, 22 nt, Homo sapiens
aacagacugucacauaaaauug

SEQ ID NO: 36852 - RNA, 22 nt, Homo sapiens
uugcauauucucugaggcagga

SEQ ID NO: 36853 - RNA, 22 nt, Homo sapiens
uugagccaaggauugucuuucc

SEQ ID NO: 36854 - RNA, 22 nt, Homo sapiens
ugagcugagaucaugcuauugu

SEQ ID NO: 36855 - RNA, 22 nt, Homo sapiens
uauggcuucuuuaaauugaggu

SEQ ID NO: 36856 - RNA, 22 nt, Homo sapiens
auuccacuuagugacucauuug

SEQ ID NO: 36857 - RNA, 22 nt, Homo sapiens
cacaguguuacugguaugaagu

SEQ ID NO: 36858 - RNA, 22 nt, Homo sapiens
acacuguagcugagggcaugcg

SEQ ID NO: 36859 - RNA, 22 nt, Homo sapiens
acaaagugccuccuuuuagagu

SEQ ID NO: 36860 - RNA, 22 nt, Homo sapiens
ugugacucuggcacauggugag

SEQ ID NO: 36861 - RNA, 22 nt, Homo sapiens
uuauucagcaccugcuguguuc

SEQ ID NO: 36862 - RNA, 22 nt, Homo sapiens
ccuucauucauuaauuuagccc

SEQ ID NO: 36863 - RNA, 22 nt, Homo sapiens
gaaaacugcuucucuggguuuc

SEQ ID NO: 36864 - RNA, 22 nt, Homo sapiens
aagcacccagccucacgccugc

SEQ ID NO: 36865 - RNA, 22 nt, Homo sapiens
cucagugucuggcacacagaaa

SEQ ID NO: 36866 - RNA, 22 nt, Homo sapiens
caggaaugugaggguucccugc

SEQ ID NO: 36867 - RNA, 22 nt, Homo sapiens
caacacagugaaacccgucucu

SEQ ID NO: 36868 - RNA, 22 nt, Homo sapiens
augcaacuugaaauuuuccgga

SEQ ID NO: 36869 - RNA, 22 nt, Homo sapiens
aaccuguaaccauaugaucagu

SEQ ID NO: 36870 - RNA, 22 nt, Homo sapiens
auagaagcugccaacguuucag

SEQ ID NO: 36871 - RNA, 22 nt, Homo sapiens
uugcuuaggcuggagugcagug

SEQ ID NO: 36872 - RNA, 22 nt, Homo sapiens
auggccugaugcaccuguccca

SEQ ID NO: 36873 - RNA, 22 nt, Homo sapiens
cuggcagucugccucuucacug

SEQ ID NO: 36874 - RNA, 22 nt, Homo sapiens
auugcacuccagucugggcaac

SEQ ID NO: 36875 - RNA, 22 nt, Homo sapiens
ugagcuguuugaagaagcauuu

SEQ ID NO: 36876 - RNA, 22 nt, Homo sapiens
ugagaugaacuugauuguuuua

SEQ ID NO: 36877 - RNA, 20 nt, Homo sapiens
cauugcacuccagccugcug

SEQ ID NO: 36878 - RNA, 22 nt, Homo sapiens
uagcauaauuuguagaaaauca

SEQ ID NO: 36879 - RNA, 22 nt, Homo sapiens
uggaaaacaugcacauuggauu

SEQ ID NO: 36880 - RNA, 22 nt, Homo sapiens
uugagauggaguuucgcucuug

SEQ ID NO: 36881 - RNA, 22 nt, Homo sapiens
augagacuagaagagaauaaua

SEQ ID NO: 36882 - RNA, 22 nt, Homo sapiens
ucucugagaaaaguuucuccca

SEQ ID NO: 36883 - RNA, 22 nt, Homo sapiens
uguuucuacugucucuguagua

SEQ ID NO: 36884 - RNA, 22 nt, Homo sapiens
uuuagcaaagcaauuuacacca

SEQ ID NO: 36885 - RNA, 22 nt, Homo sapiens
uggccuguaacgcugucucagc

SEQ ID NO: 36886 - RNA, 18 nt, Homo sapiens
aaacugcuuccuuggccu

SEQ ID NO: 36887 - RNA, 22 nt, Homo sapiens
gugaggcacugcugcuuuccag

SEQ ID NO: 36888 - RNA, 22 nt, Homo sapiens
uuugugagguggauagauugca

SEQ ID NO: 36889 - RNA, 22 nt, Homo sapiens
uauacagcaaguuacugugcug

SEQ ID NO: 36890 - RNA, 22 nt, Homo sapiens
auggagacaaauaaaggagagu

SEQ ID NO: 36891 - RNA, 22 nt, Homo sapiens
uuucuauguugaccagucuaga

SEQ ID NO: 36892 - RNA, 22 nt, Homo sapiens
uugagauggagucucgcucuuu

SEQ ID NO: 36893 - RNA, 22 nt, Homo sapiens
aauggcuuuuaauauccauaau

SEQ ID NO: 36894 - RNA, 22 nt, Homo sapiens
cauugcacucuagccucggcaa

SEQ ID NO: 36895 - RNA, 22 nt, Homo sapiens
uuuggucacugccgccgccagc

SEQ ID NO: 36896 - RNA, 22 nt, Homo sapiens
uuucuacagugaacgauuucua

SEQ ID NO: 36897 - RNA, 22 nt, Homo sapiens
auccauugucuaaugcuaagau

SEQ ID NO: 36898 - RNA, 22 nt, Homo sapiens
uucagguaguuuaacuguucca

SEQ ID NO: 36899 - RNA, 22 nt, Homo sapiens
cauugcacuccauccuuggcaa

SEQ ID NO: 36900 - RNA, 22 nt, Homo sapiens
ugugccuaguaauguguccaga

SEQ ID NO: 36901 - RNA, 22 nt, Homo sapiens
ccuucuuuuguaaggcugaaua

SEQ ID NO: 36902 - RNA, 18 nt, Homo sapiens
uguggcuguuuuccaaua

SEQ ID NO: 36903 - RNA, 22 nt, Homo sapiens
ugagcugagauuaagcugcugc

SEQ ID NO: 36904 - RNA, 22 nt, Homo sapiens
cuggcucauuucauuuagcaua

SEQ ID NO: 36905 - RNA, 22 nt, Homo sapiens
uuugugugugauuauaaaaggu

SEQ ID NO: 36906 - RNA, 22 nt, Homo sapiens
agaagaacauagggugacugaa

SEQ ID NO: 36907 - RNA, 22 nt, Homo sapiens
aucauccagccccagaagggag

SEQ ID NO: 36908 - RNA, 22 nt, Homo sapiens
aacacuguuuccagucaugauc

SEQ ID NO: 36909 - RNA, 20 nt, Homo sapiens
uugaggucaggaguuuggga

SEQ ID NO: 36910 - RNA, 22 nt, Homo sapiens
cauugcacuccagccugaggga

SEQ ID NO: 36911 - RNA, 22 nt, Homo sapiens
ugagaugagagaaugcuugccu

SEQ ID NO: 36912 - RNA, 22 nt, Homo sapiens
guugguuuccuguaacuggaca

SEQ ID NO: 36913 - RNA, 22 nt, Homo sapiens
auugaguaaaaaauagugaugu

SEQ ID NO: 36914 - RNA, 22 nt, Homo sapiens
ugaaggcaggagggagaaaagu

SEQ ID NO: 36915 - RNA, 22 nt, Homo sapiens
aaaugcuuucuuggaccauuug

SEQ ID NO: 36916 - RNA, 22 nt, Homo sapiens
cugagcucauuucuuuugcuac

SEQ ID NO: 36917 - RNA, 20 nt, Homo sapiens
cauugcacuccagcuugggc

SEQ ID NO: 36918 - RNA, 22 nt, Homo sapiens
uuauguaaaucaaucuggaauc

SEQ ID NO: 36919 - RNA, 22 nt, Homo sapiens
ggaauggaacaaagucuugaaa

SEQ ID NO: 36920 - RNA, 22 nt, Homo sapiens
gucagugucuuaacagagauua

SEQ ID NO: 36921 - RNA, 22 nt, Homo sapiens
gcauaaagcuaauaagacgaag

SEQ ID NO: 36922 - RNA, 22 nt, Homo sapiens
auagcagaagaagggacaauuc

SEQ ID NO: 36923 - RNA, 22 nt, Homo sapiens
ucuugcuuguuguucccuucau

SEQ ID NO: 36924 - RNA, 22 nt, Homo sapiens
ugcacuguggucugagagacag

SEQ ID NO: 36925 - RNA, 22 nt, Homo sapiens
uacagucacauuccugaccaua

SEQ ID NO: 36926 - RNA, 22 nt, Homo sapiens
auuccacuuccacuaguuucuc

SEQ ID NO: 36927 - RNA, 22 nt, Homo sapiens
uuagguaauauauugcugcuuu

SEQ ID NO: 36928 - RNA, 22 nt, Homo sapiens
aauggcuucuuauugugguuca

SEQ ID NO: 36929 - RNA, 22 nt, Homo sapiens
ggagaugauuaugaaucacuua

SEQ ID NO: 36930 - RNA, 21 nt, Homo sapiens
uuuccuggagcguauggcuuc

SEQ ID NO: 36931 - RNA, 22 nt, Homo sapiens
ugucucaguucccuucucugga

SEQ ID NO: 36932 - RNA, 20 nt, Homo sapiens
uucuacagucacaggaagau

SEQ ID NO: 36933 - RNA, 22 nt, Homo sapiens
aucacuuugcucuccagugugg

SEQ ID NO: 36934 - RNA, 22 nt, Homo sapiens
uucucugggacauaggucgggu

SEQ ID NO: 36935 - RNA, 21 nt, Homo sapiens
ucagaagcucccagggaggac

SEQ ID NO: 36936 - RNA, 22 nt, Homo sapiens
auggaaaugaagggcuggcccu

SEQ ID NO: 36937 - RNA, 22 nt, Homo sapiens
ugagaugacgacacaccucagu

SEQ ID NO: 36938 - RNA, 22 nt, Homo sapiens
gagcugaucuuuucugauucca

SEQ ID NO: 36939 - RNA, 22 nt, Homo sapiens
ugacaagaaagcgucuucuuuu

SEQ ID NO: 36940 - RNA, 22 nt, Homo sapiens
uauggcuuuuaacugucguaug

SEQ ID NO: 36941 - RNA, 22 nt, Homo sapiens
uggcuuuguaagguuucauuuu

SEQ ID NO: 36942 - RNA, 22 nt, Homo sapiens
ugagaucaguuguuauaauucu

SEQ ID NO: 36943 - RNA, 22 nt, Homo sapiens
uauggccccuacaugugcaaaa

SEQ ID NO: 36944 - RNA, 22 nt, Homo sapiens
cuacagcagcccaguccccgaa

SEQ ID NO: 36945 - RNA, 23 nt, Homo sapiens
augugugcuuggagagcaggaug

SEQ ID NO: 36946 - RNA, 22 nt, Homo sapiens
cugaggcacggcgaccuuaagu

SEQ ID NO: 36947 - RNA, 22 nt, Homo sapiens
ugcaaugugaaauaagcacauc

SEQ ID NO: 36948 - RNA, 23 nt, Homo sapiens
ucacacuuaagagaaaugcagcu

SEQ ID NO: 36949 - RNA, 22 nt, Homo sapiens
cauugcacuuagacaacuuuug

SEQ ID NO: 36950 - RNA, 22 nt, Homo sapiens
gucucugguugcuuuuguacca

SEQ ID NO: 36951 - RNA, 22 nt, Homo sapiens
gucuguuugauccagaucaaaa

SEQ ID NO: 36952 - RNA, 19 nt, Homo sapiens
ugcaaagucuuuuccuauu

SEQ ID NO: 36953 - RNA, 22 nt, Homo sapiens
ucuggaauguaaaguuuauggg

SEQ ID NO: 36954 - RNA, 22 nt, Homo sapiens
gagcucauuaaaaauguagaau

SEQ ID NO: 36955 - RNA, 22 nt, Homo sapiens
auaaagccaugagcuugagaug

SEQ ID NO: 36956 - RNA, 22 nt, Homo sapiens
uaagacuguguaauuuaugaag

SEQ ID NO: 36957 - RNA, 22 nt, Homo sapiens
uugagaugaagucuugcucucu

SEQ ID NO: 36958 - RNA, 22 nt, Homo sapiens
uugagaugaaguuuugcucuuu

SEQ ID NO: 36959 - RNA, 22 nt, Homo sapiens
aagugguuuuuacaaagacaga

SEQ ID NO: 36960 - RNA, 22 nt, Homo sapiens
uucuuagucauguaauagucca

SEQ ID NO: 36961 - RNA, 22 nt, Homo sapiens
uuugaaccauuugaagaaugau

SEQ ID NO: 36962 - RNA, 22 nt, Homo sapiens
cauggcuuuaagcaacaccaag

SEQ ID NO: 36963 - RNA, 22 nt, Homo sapiens
ggaucacuugagaccaggaguu

SEQ ID NO: 36964 - RNA, 22 nt, Homo sapiens
ugagaucaugucauuugcacuc

SEQ ID NO: 36965 - RNA, 19 nt, Homo sapiens
aguggguguuuucuguuug

SEQ ID NO: 36966 - RNA, 23 nt, Homo sapiens
ggaaacauccagucuuucaccau

SEQ ID NO: 36967 - RNA, 21 nt, Homo sapiens
uuaucccagugucucugcagg

SEQ ID NO: 36968 - RNA, 22 nt, Homo sapiens
uaaagcauguaauuagguuaga

SEQ ID NO: 36969 - RNA, 22 nt, Homo sapiens
uuggagugugcucauaacugcu

SEQ ID NO: 36970 - RNA, 20 nt, Homo sapiens
uaugacacugucauaaaaau

SEQ ID NO: 36971 - RNA, 22 nt, Homo sapiens
ugacaagaacuuuccauaguaa

SEQ ID NO: 36972 - RNA, 22 nt, Homo sapiens
aauaucacaguggguguacacc

SEQ ID NO: 36973 - RNA, 22 nt, Homo sapiens
uagaccaauuggcauauaguaa

SEQ ID NO: 36974 - RNA, 22 nt, Homo sapiens
cauugcacuccagccuaggcaa

SEQ ID NO: 36975 - RNA, 22 nt, Homo sapiens
cuuccaaguggggcacgugcca

SEQ ID NO: 36976 - RNA, 22 nt, Homo sapiens
uggaagaugggaccucaguuuu

SEQ ID NO: 36977 - RNA, 22 nt, Homo sapiens
uuaacacugccauugauacugu

SEQ ID NO: 36978 - RNA, 22 nt, Homo sapiens
ugugccacugcacuccugccug

SEQ ID NO: 36979 - RNA, 22 nt, Homo sapiens
cuugguacucugugucccagcu

SEQ ID NO: 36980 - RNA, 22 nt, Homo sapiens
uuuugcaaauuccaguggccau

SEQ ID NO: 36981 - RNA, 22 nt, Homo sapiens
ggucagaaagacaggcauucag

SEQ ID NO: 36982 - RNA, 22 nt, Homo sapiens
ucuugguugaaaauucauaaua

SEQ ID NO: 36983 - RNA, 22 nt, Homo sapiens
aggugguuuuaggcagagacau

SEQ ID NO: 36984 - RNA, 22 nt, Homo sapiens
auggcucuguuccaugugucuu

SEQ ID NO: 36985 - RNA, 22 nt, Homo sapiens
auucuauaguccuaggauuggg

SEQ ID NO: 36986 - RNA, 22 nt, Homo sapiens
gagaugaugagauguucacagu

SEQ ID NO: 36987 - RNA, 22 nt, Homo sapiens
auuucuacuccuguguccagaa

SEQ ID NO: 36988 - RNA, 22 nt, Homo sapiens
cuuuguaugucaugacaacugu

SEQ ID NO: 36989 - RNA, 22 nt, Homo sapiens
cucuuugaguuccuccuggugu

SEQ ID NO: 36990 - RNA, 22 nt, Homo sapiens
acauaaagaagcaggacauugu

SEQ ID NO: 36991 - RNA, 22 nt, Homo sapiens
caccugagcgggaugcucgccu

SEQ ID NO: 36992 - RNA, 22 nt, Homo sapiens
uugagauggagucucacugugu

SEQ ID NO: 36993 - RNA, 22 nt, Homo sapiens
uucuuugguacaagggccgacc

SEQ ID NO: 36994 - RNA, 22 nt, Homo sapiens
ucuaaaacuagauugugaugau

SEQ ID NO: 36995 - RNA, 22 nt, Homo sapiens
uugagcaccaugccuggccaug

SEQ ID NO: 36996 - RNA, 22 nt, Homo sapiens
uagacaacugaaacacugugca

SEQ ID NO: 36997 - RNA, 22 nt, Homo sapiens
aaauaguagcugaaugagggaa

SEQ ID NO: 36998 - RNA, 20 nt, Homo sapiens
uggagugaagguucuggacc

SEQ ID NO: 36999 - RNA, 22 nt, Homo sapiens
caucacuuuuccuuuuacagau

SEQ ID NO: 37000 - RNA, 22 nt, Homo sapiens
uauuguccacuuugcacugugu

SEQ ID NO: 37001 - RNA, 22 nt, Homo sapiens
augaacagagccuugagaaccu

SEQ ID NO: 37002 - RNA, 22 nt, Homo sapiens
auugcacuccacccugggcaac

SEQ ID NO: 37003 - RNA, 22 nt, Homo sapiens
ugcucaguuuaaaacuuuugag

SEQ ID NO: 37004 - RNA, 19 nt, Homo sapiens
ugcagcaauguaaaagaca

SEQ ID NO: 37005 - RNA, 22 nt, Homo sapiens
uacaagcaggaaaugguauaug

SEQ ID NO: 37006 - RNA, 22 nt, Homo sapiens
uugacauaguuucugaaauaga

SEQ ID NO: 37007 - RNA, 22 nt, Homo sapiens
uuuccaagaugcuuacuuucuc

SEQ ID NO: 37008 - RNA, 22 nt, Homo sapiens
uaagagagcuccaucuuuuccu

SEQ ID NO: 37009 - RNA, 22 nt, Homo sapiens
uuugcuugaggucuagcuaccc

SEQ ID NO: 37010 - RNA, 22 nt, Homo sapiens
aauauagcuauguacaugucca

SEQ ID NO: 37011 - RNA, 22 nt, Homo sapiens
gagacauugacuuuguuccaga

SEQ ID NO: 37012 - RNA, 22 nt, Homo sapiens
uucucuggucagaggggagguu

SEQ ID NO: 37013 - RNA, 22 nt, Homo sapiens
ucugucuuugucaggaccagag

SEQ ID NO: 37014 - RNA, 22 nt, Homo sapiens
gucucccagccuacauauuucu

SEQ ID NO: 37015 - RNA, 22 nt, Homo sapiens
auacaagugccauguuggugug

SEQ ID NO: 37016 - RNA, 20 nt, Homo sapiens
uggaaucugaagaucucagu

SEQ ID NO: 37017 - RNA, 22 nt, Homo sapiens
cuacagcacugagcugugugca

SEQ ID NO: 37018 - RNA, 22 nt, Homo sapiens
ugauauuuuugauccuuaaguu

SEQ ID NO: 37019 - RNA, 22 nt, Homo sapiens
uuaguucccucauucuugacuu

SEQ ID NO: 37020 - RNA, 22 nt, Homo sapiens
auggcuuugggcugcucugccc

SEQ ID NO: 37021 - RNA, 22 nt, Homo sapiens
auggcacuccagccugggcaac

SEQ ID NO: 37022 - RNA, 22 nt, Homo sapiens
gucagugucuuugcagcucaga

SEQ ID NO: 37023 - RNA, 22 nt, Homo sapiens
uggugagaaaagaugucuuugu

SEQ ID NO: 37024 - RNA, 22 nt, Homo sapiens
ucugucuuugccuaaguuuguc

SEQ ID NO: 37025 - RNA, 22 nt, Homo sapiens
augacuuuucugaaaaccacca

SEQ ID NO: 37026 - RNA, 22 nt, Homo sapiens
gucuguuuggggaccuguggcc

SEQ ID NO: 37027 - RNA, 22 nt, Homo sapiens
auugcacuccagccugggcuag

SEQ ID NO: 37028 - RNA, 22 nt, Homo sapiens
gaaagauuuccugagcuagaaa

SEQ ID NO: 37029 - RNA, 22 nt, Homo sapiens
ggcaacauggugaaacucuguc

SEQ ID NO: 37030 - RNA, 22 nt, Homo sapiens
auggauauuuuuugaacauaga

SEQ ID NO: 37031 - RNA, 20 nt, Homo sapiens
uagcacacauguagaauagu

SEQ ID NO: 37032 - RNA, 22 nt, Homo sapiens
guggcaguuuuaaauaugaaaa

SEQ ID NO: 37033 - RNA, 22 nt, Homo sapiens
auuguacuccagccugggcaaa

SEQ ID NO: 37034 - RNA, 22 nt, Homo sapiens
ugaggugaggguaucaaaugcu

SEQ ID NO: 37035 - RNA, 22 nt, Homo sapiens
auuccacuuacaugaaguaccu

SEQ ID NO: 37036 - RNA, 22 nt, Homo sapiens
aauggcuuucagcuuuucccca

SEQ ID NO: 37037 - RNA, 22 nt, Homo sapiens
cauugcacuccagcuugggcga

SEQ ID NO: 37038 - RNA, 22 nt, Homo sapiens
aauaucacaggguguacacuca

SEQ ID NO: 37039 - RNA, 20 nt, Homo sapiens
aaacucugucuucuuuauca

SEQ ID NO: 37040 - RNA, 22 nt, Homo sapiens
uuugccaauauuuuauugagga

SEQ ID NO: 37041 - RNA, 22 nt, Homo sapiens
uucccuguaucuucugccaugu

SEQ ID NO: 37042 - RNA, 21 nt, Homo sapiens
uauggauuugccuauucugga

SEQ ID NO: 37043 - RNA, 22 nt, Homo sapiens
auaugcuuauuagcaagaaaua

SEQ ID NO: 37044 - RNA, 22 nt, Homo sapiens
cuggcaguguuucuugugggcu

SEQ ID NO: 37045 - RNA, 22 nt, Homo sapiens
uucauacaguggcugcacucca

SEQ ID NO: 37046 - RNA, 22 nt, Homo sapiens
uauuugguuggugcaaaaguaa

SEQ ID NO: 37047 - RNA, 22 nt, Homo sapiens
ugccauugcacuccagccuggg

SEQ ID NO: 37048 - RNA, 22 nt, Homo sapiens
gauacaccauuuucuagcuauu

SEQ ID NO: 37049 - RNA, 22 nt, Homo sapiens
uuacagcagugccccacuccca

SEQ ID NO: 37050 - RNA, 19 nt, Homo sapiens
ugagaugaagacagggguu

SEQ ID NO: 37051 - RNA, 22 nt, Homo sapiens
ucuuuggugaauggucauccag

SEQ ID NO: 37052 - RNA, 22 nt, Homo sapiens
guaacacucuaaagggaugcac

SEQ ID NO: 37053 - RNA, 22 nt, Homo sapiens
ugcaaauguuaggugucauuau

SEQ ID NO: 37054 - RNA, 22 nt, Homo sapiens
cauuuuacuuuccagacgugga

SEQ ID NO: 37055 - RNA, 22 nt, Homo sapiens
auggcucuuauuauuugaggua

SEQ ID NO: 37056 - RNA, 22 nt, Homo sapiens
cugagcuagaccacuuggcucc

SEQ ID NO: 37057 - RNA, 22 nt, Homo sapiens
uugcugagucuuucuagguugc

SEQ ID NO: 37058 - RNA, 22 nt, Homo sapiens
uggcagaugcucuuggugccca

SEQ ID NO: 37059 - RNA, 22 nt, Homo sapiens
uucuaugguuuuuaugguguua

SEQ ID NO: 37060 - RNA, 22 nt, Homo sapiens
auacaucugccauguuggugug

SEQ ID NO: 37061 - RNA, 22 nt, Homo sapiens
cauugcccuccagccugggcaa

SEQ ID NO: 37062 - RNA, 22 nt, Homo sapiens
gcuuuguuaaaacacagccaca

SEQ ID NO: 37063 - RNA, 22 nt, Homo sapiens
auugcacaccagucugggcaaa

SEQ ID NO: 37064 - RNA, 22 nt, Homo sapiens
ugagaucagaaggauuucucug

SEQ ID NO: 37065 - RNA, 22 nt, Homo sapiens
ugagaugagggaagccuaggca

SEQ ID NO: 37066 - RNA, 22 nt, Homo sapiens
ugauuugucucucagcccuacu

SEQ ID NO: 37067 - RNA, 23 nt, Homo sapiens
uuuugcaauaagucacuggaaua

SEQ ID NO: 37068 - RNA, 22 nt, Homo sapiens
uagugaauguuggcuauuaaua

SEQ ID NO: 37069 - RNA, 18 nt, Homo sapiens
uugcacuccugccugggu

SEQ ID NO: 37070 - RNA, 22 nt, Homo sapiens
guggaaugcaguguugauucaa

SEQ ID NO: 37071 - RNA, 22 nt, Homo sapiens
caucacuuugccuccgucucua

SEQ ID NO: 37072 - RNA, 22 nt, Homo sapiens
ugagcaagaucuuuauaauuag

SEQ ID NO: 37073 - RNA, 22 nt, Homo sapiens
uucaagaauuaaaguggcuuuu

SEQ ID NO: 37074 - RNA, 22 nt, Homo sapiens
ugugucacugcacuccagccug

SEQ ID NO: 37075 - RNA, 22 nt, Homo sapiens
ugagguagaggugaacuugacc

SEQ ID NO: 37076 - RNA, 22 nt, Homo sapiens
ugucaauauguaauaacugaau

SEQ ID NO: 37077 - RNA, 22 nt, Homo sapiens
ugaaacacacauugcccuuuau

SEQ ID NO: 37078 - RNA, 22 nt, Homo sapiens
ggcaaugucagcuaaugaugga

SEQ ID NO: 37079 - RNA, 22 nt, Homo sapiens
gugcuuuguuguggcaguggca

SEQ ID NO: 37080 - RNA, 22 nt, Homo sapiens
uguagcaaaucgauacuauugg

SEQ ID NO: 37081 - RNA, 16 nt, Homo sapiens
uugaggcaugucucag

SEQ ID NO: 37082 - RNA, 22 nt, Homo sapiens
ugagaugaguugcuggcucuga

SEQ ID NO: 37083 - RNA, 22 nt, Homo sapiens
uguauguuguaagacuuagacc

SEQ ID NO: 37084 - RNA, 22 nt, Homo sapiens
agauguuguucaucugauuguu

SEQ ID NO: 37085 - RNA, 22 nt, Homo sapiens
auguaacugggacacaagccuc

SEQ ID NO: 37086 - RNA, 22 nt, Homo sapiens
aaaagcauucagagugcugggc

SEQ ID NO: 37087 - RNA, 22 nt, Homo sapiens
auacaaguuauuugaacugcgg

SEQ ID NO: 37088 - RNA, 22 nt, Homo sapiens
uacuguacugcaguucugcaaa

SEQ ID NO: 37089 - RNA, 19 nt, Homo sapiens
ugagauuguaugaggagau

SEQ ID NO: 37090 - RNA, 22 nt, Homo sapiens
gaggcaagaguaguuaaguuag

SEQ ID NO: 37091 - RNA, 22 nt, Homo sapiens
gagcugaucuuuauguaaauuc

SEQ ID NO: 37092 - RNA, 22 nt, Homo sapiens
aggugguuuugaugagcaggua

SEQ ID NO: 37093 - RNA, 22 nt, Homo sapiens
ucaguagcaugaaaacagacua

SEQ ID NO: 37094 - RNA, 22 nt, Homo sapiens
guucucacuggacugugaaaau

SEQ ID NO: 37095 - RNA, 22 nt, Homo sapiens
ugagcugagacaauaaguuuuu

SEQ ID NO: 37096 - RNA, 22 nt, Homo sapiens
cagagagcuugcccuuguauau

SEQ ID NO: 37097 - RNA, 22 nt, Homo sapiens
ggacaagagacugggacacuga

SEQ ID NO: 37098 - RNA, 22 nt, Homo sapiens
uugcacuauuaguauagauguc

SEQ ID NO: 37099 - RNA, 22 nt, Homo sapiens
aucuuuggauacuugauauagu

SEQ ID NO: 37100 - RNA, 20 nt, Homo sapiens
agcuggguguguuggugcau

SEQ ID NO: 37101 - RNA, 22 nt, Homo sapiens
ucugucuuguccucacccuaga

SEQ ID NO: 37102 - RNA, 21 nt, Homo sapiens
ugcaagaaucaggaagcugcc

SEQ ID NO: 37103 - RNA, 22 nt, Homo sapiens
uugagaagugucuguucauguc

SEQ ID NO: 37104 - RNA, 22 nt, Homo sapiens
acaauguauauuuuacuguagg

SEQ ID NO: 37105 - RNA, 22 nt, Homo sapiens
acccuguaggacuauucuaauc

SEQ ID NO: 37106 - RNA, 22 nt, Homo sapiens
caaugguuuuuuaguauaagua

SEQ ID NO: 37107 - RNA, 22 nt, Homo sapiens
cucaguguuaaggccaccucug

SEQ ID NO: 37108 - RNA, 22 nt, Homo sapiens
uucagauugcauaccgaaagua

SEQ ID NO: 37109 - RNA, 22 nt, Homo sapiens
aagugucuuaccgggagggagu

SEQ ID NO: 37110 - RNA, 20 nt, Homo sapiens
ucaaagacauggcugucaga

SEQ ID NO: 37111 - RNA, 22 nt, Homo sapiens
ucauugcacuccagccugggug

SEQ ID NO: 37112 - RNA, 20 nt, Homo sapiens
agguagauagaugauagaua

SEQ ID NO: 37113 - RNA, 22 nt, Homo sapiens
cuagaagcauauucagaacaga

SEQ ID NO: 37114 - RNA, 23 nt, Homo sapiens
aauaucacaguggguguacaccc

SEQ ID NO: 37115 - RNA, 22 nt, Homo sapiens
ugucucccuucccauuaggaag

SEQ ID NO: 37116 - RNA, 22 nt, Homo sapiens
uugguucucuuagccaucuuaa

SEQ ID NO: 37117 - RNA, 22 nt, Homo sapiens
ucacaauucucaauuugugaaa

SEQ ID NO: 37118 - RNA, 22 nt, Homo sapiens
uugaggucagagguucgagacc

SEQ ID NO: 37119 - RNA, 22 nt, Homo sapiens
uuagcacauuuccagcacaugg

SEQ ID NO: 37120 - RNA, 22 nt, Homo sapiens
ggaaagaucagcuaaauguaag

SEQ ID NO: 37121 - RNA, 22 nt, Homo sapiens
ucagagucuagaucacucacug

SEQ ID NO: 37122 - RNA, 22 nt, Homo sapiens
caugaaagugagaaacuccugg

SEQ ID NO: 37123 - RNA, 19 nt, Homo sapiens
uaugcaacuuauagugcug

SEQ ID NO: 37124 - RNA, 22 nt, Homo sapiens
cuuuacaguuggacucacgagg

SEQ ID NO: 37125 - RNA, 22 nt, Homo sapiens
auugcacuccauccugggcaau

SEQ ID NO: 37126 - RNA, 22 nt, Homo sapiens
guacacauacauauaugugugu

SEQ ID NO: 37127 - RNA, 19 nt, Homo sapiens
agaguauuguuacuucucu

SEQ ID NO: 37128 - RNA, 22 nt, Homo sapiens
auuacuuugcaccaaccuaaua

SEQ ID NO: 37129 - RNA, 22 nt, Homo sapiens
ugccaacugguuucuuuuaguu

SEQ ID NO: 37130 - RNA, 22 nt, Homo sapiens
aucuuuggugcaugauacuuug

SEQ ID NO: 37131 - RNA, 22 nt, Homo sapiens
auccugaagcuuuacugaauuc

SEQ ID NO: 37132 - RNA, 22 nt, Homo sapiens
auaaagacacuuggcaugauuu

SEQ ID NO: 37133 - RNA, 22 nt, Homo sapiens
ucccugaaaauuagcauuuuaa

SEQ ID NO: 37134 - RNA, 22 nt, Homo sapiens
gagaaccuccagcaagguagua

SEQ ID NO: 37135 - RNA, 22 nt, Homo sapiens
ugagcacuguacuuuaucaggu

SEQ ID NO: 37136 - RNA, 22 nt, Homo sapiens
agaaugugaacaucuugaaagu

SEQ ID NO: 37137 - RNA, 22 nt, Homo sapiens
ugugccuacugauagagccaag

SEQ ID NO: 37138 - RNA, 22 nt, Homo sapiens
uuugugauugcacacucaagau

SEQ ID NO: 37139 - RNA, 22 nt, Homo sapiens
auugcacuccagccuggccaac

SEQ ID NO: 37140 - RNA, 22 nt, Homo sapiens
ggcagaauugcugaggaugcua

SEQ ID NO: 37141 - RNA, 22 nt, Homo sapiens
uggagcccuaguuccucauaac

SEQ ID NO: 37142 - RNA, 22 nt, Homo sapiens
gguaaaucuucacuaagacuga

SEQ ID NO: 37143 - RNA, 22 nt, Homo sapiens
uuuuaacagccaggggacggcc

SEQ ID NO: 37144 - RNA, 18 nt, Homo sapiens
cuaagacacuuggcagag

SEQ ID NO: 37145 - RNA, 20 nt, Homo sapiens
uuggaaaugugaauugggag

SEQ ID NO: 37146 - RNA, 22 nt, Homo sapiens
gacacagugaagucucuacuug

SEQ ID NO: 37147 - RNA, 22 nt, Homo sapiens
ggacaagaucuuccaccauuca

SEQ ID NO: 37148 - RNA, 22 nt, Homo sapiens
agcugguuuaauaugcugucug

SEQ ID NO: 37149 - RNA, 22 nt, Homo sapiens
uuccugagagggcugggugcag

SEQ ID NO: 37150 - RNA, 22 nt, Homo sapiens
ugcuuaguguugacccucugcc

SEQ ID NO: 37151 - RNA, 22 nt, Homo sapiens
uaucaguauggauucauggauu

SEQ ID NO: 37152 - RNA, 22 nt, Homo sapiens
gucucccagccuacaucuuucu

SEQ ID NO: 37153 - RNA, 22 nt, Homo sapiens
aaacugcuuuccaugguggcug

SEQ ID NO: 37154 - RNA, 22 nt, Homo sapiens
gucuuggagacauugccauuga

SEQ ID NO: 37155 - RNA, 22 nt, Homo sapiens
uauggcuucuauaaggaagcuu

SEQ ID NO: 37156 - RNA, 22 nt, Homo sapiens
agugaaaugucaccuuuuagga

SEQ ID NO: 37157 - RNA, 22 nt, Homo sapiens
cacuguggauggaacuauguga

SEQ ID NO: 37158 - RNA, 22 nt, Homo sapiens
ugauuggagaacaaacugcaua

SEQ ID NO: 37159 - RNA, 22 nt, Homo sapiens
uugggagugucucuggacugca

SEQ ID NO: 37160 - RNA, 22 nt, Homo sapiens
cuggaauauuagcuggucuuaa

SEQ ID NO: 37161 - RNA, 22 nt, Homo sapiens
uugacauguaaguacucuauag

SEQ ID NO: 37162 - RNA, 22 nt, Homo sapiens
gaaugcagcagugacagggcug

SEQ ID NO: 37163 - RNA, 19 nt, Homo sapiens
uucucugguuguacuaccc

SEQ ID NO: 37164 - RNA, 22 nt, Homo sapiens
cauugcacuccagccucggcaa

SEQ ID NO: 37165 - RNA, 22 nt, Homo sapiens
augugcaagaucauuaaagcuc

SEQ ID NO: 37166 - RNA, 22 nt, Homo sapiens
gugugacuagucaugccugaau

SEQ ID NO: 37167 - RNA, 22 nt, Homo sapiens
ugagaccugaucuugguacugc

SEQ ID NO: 37168 - RNA, 22 nt, Homo sapiens
cauacaagcuacaaucacaaag

SEQ ID NO: 37169 - RNA, 22 nt, Homo sapiens
auagcagaauuuggucaagucu

SEQ ID NO: 37170 - RNA, 20 nt, Homo sapiens
uucuauggugaugaguccug

SEQ ID NO: 37171 - RNA, 22 nt, Homo sapiens
caucgcacuccagccugggcaa

SEQ ID NO: 37172 - RNA, 22 nt, Homo sapiens
ugccaaaaugggcuuuauaccg

SEQ ID NO: 37173 - RNA, 19 nt, Homo sapiens
uucauacagugagagcagc

SEQ ID NO: 37174 - RNA, 22 nt, Homo sapiens
auugaacuguuggagagguuuu

SEQ ID NO: 37175 - RNA, 22 nt, Homo sapiens
uucaauaugucauuggcaggca

SEQ ID NO: 37176 - RNA, 22 nt, Homo sapiens
agacaagauggcuugagguuca

SEQ ID NO: 37177 - RNA, 22 nt, Homo sapiens
acacauuagcaagugcuguuau

SEQ ID NO: 37178 - RNA, 22 nt, Homo sapiens
uggagugaaaacacacuaaucu

SEQ ID NO: 37179 - RNA, 22 nt, Homo sapiens
ugucagaaucugagacgacaac

SEQ ID NO: 37180 - RNA, 22 nt, Homo sapiens
ucacugugcaugaaggaugcug

SEQ ID NO: 37181 - RNA, 22 nt, Homo sapiens
uugcacucuccagccucggcaa

SEQ ID NO: 37182 - RNA, 22 nt, Homo sapiens
agaauguuuuagaccaauacaa

SEQ ID NO: 37183 - RNA, 22 nt, Homo sapiens
uuggaacacauguuuuucuacc

SEQ ID NO: 37184 - RNA, 22 nt, Homo sapiens
uuugugaggugauggauauguc

SEQ ID NO: 37185 - RNA, 22 nt, Homo sapiens
gucuuuggaaagacaaaguuca

SEQ ID NO: 37186 - RNA, 21 nt, Homo sapiens
ugaacacuggacugagugucc

SEQ ID NO: 37187 - RNA, 22 nt, Homo sapiens
ugaaauuuuuuauucguuggcu

SEQ ID NO: 37188 - RNA, 22 nt, Homo sapiens
ugagauucuuacuccugaguuc

SEQ ID NO: 37189 - RNA, 22 nt, Homo sapiens
uuggaagauuacuuaguuuucu

SEQ ID NO: 37190 - RNA, 22 nt, Homo sapiens
cuggcacagugucagaaacaca

SEQ ID NO: 37191 - RNA, 22 nt, Homo sapiens
gacuugaagaaucuaagggagg

SEQ ID NO: 37192 - RNA, 22 nt, Homo sapiens
uaugagacugguuaauuuuugu

SEQ ID NO: 37193 - RNA, 22 nt, Homo sapiens
uucuuuggauaaaguuuuaugc

SEQ ID NO: 37194 - RNA, 22 nt, Homo sapiens
uaccacugccgagaaaacagau

SEQ ID NO: 37195 - RNA, 22 nt, Homo sapiens
ugagcugagaaaugcagcagcu

SEQ ID NO: 37196 - RNA, 22 nt, Homo sapiens
aggaagugugcaauuaauuucu

SEQ ID NO: 37197 - RNA, 22 nt, Homo sapiens
uagauuguaauaugcagaaugg

SEQ ID NO: 37198 - RNA, 22 nt, Homo sapiens
ucacuagaucaagggagagaaa

SEQ ID NO: 37199 - RNA, 22 nt, Homo sapiens
uuggaaacgucaccuuuuccuu

SEQ ID NO: 37200 - RNA, 22 nt, Homo sapiens
auguccaugagcacauguauca

SEQ ID NO: 37201 - RNA, 22 nt, Homo sapiens
uguggaguguaugugacagaga

SEQ ID NO: 37202 - RNA, 22 nt, Homo sapiens
ggcaagaacuucacucacuuuu

SEQ ID NO: 37203 - RNA, 21 nt, Homo sapiens
uggucaguuuucucacuagga

SEQ ID NO: 37204 - RNA, 22 nt, Homo sapiens
cucauggagaaccucugcuagg

SEQ ID NO: 37205 - RNA, 22 nt, Homo sapiens
auggcagugagucucuaguauu

SEQ ID NO: 37206 - RNA, 22 nt, Homo sapiens
guggacaugaauuuuggaggca

SEQ ID NO: 37207 - RNA, 22 nt, Homo sapiens
uucuuuggaaacaguacuaauu

SEQ ID NO: 37208 - RNA, 22 nt, Homo sapiens
cucaguguuucagcugcucaga

SEQ ID NO: 37209 - RNA, 22 nt, Homo sapiens
uuggacuucuaacugacaugga

SEQ ID NO: 37210 - RNA, 19 nt, Homo sapiens
ucuuuagucacauuuuuau

SEQ ID NO: 37211 - RNA, 22 nt, Homo sapiens
aucuuuggugaguucuuugguc

SEQ ID NO: 37212 - RNA, 22 nt, Homo sapiens
uugagauggagucuugcucugu

SEQ ID NO: 37213 - RNA, 22 nt, Homo sapiens
agagaugaagauggggcucccg

SEQ ID NO: 37214 - RNA, 22 nt, Homo sapiens
caugccacuguggacaaagaca

SEQ ID NO: 37215 - RNA, 22 nt, Homo sapiens
caguuacuuuugcaccaaccua

SEQ ID NO: 37216 - RNA, 22 nt, Homo sapiens
uuggcagucugaggcacagacu

SEQ ID NO: 37217 - RNA, 18 nt, Homo sapiens
auucuacaggccuuuuga

SEQ ID NO: 37218 - RNA, 22 nt, Homo sapiens
acucagagauuagcacauguuu

SEQ ID NO: 37219 - RNA, 22 nt, Homo sapiens
ugagaugaggucucacucuguu

SEQ ID NO: 37220 - RNA, 22 nt, Homo sapiens
auguccauggaaucuguagcaa

SEQ ID NO: 37221 - RNA, 22 nt, Homo sapiens
ugagaugagucucgcucuguca

SEQ ID NO: 37222 - RNA, 22 nt, Homo sapiens
aaucacuuugcuacaaggcagu

SEQ ID NO: 37223 - RNA, 22 nt, Homo sapiens
gauaaagauagcaauagggaca

SEQ ID NO: 37224 - RNA, 22 nt, Homo sapiens
uucuguguuuaggucacggcua

SEQ ID NO: 37225 - RNA, 22 nt, Homo sapiens
ucuacagccaguucaggaagaa

SEQ ID NO: 37226 - RNA, 22 nt, Homo sapiens
uugacuuuuauucacucugcua

SEQ ID NO: 37227 - RNA, 22 nt, Homo sapiens
gucagugugauaucugcagggg

SEQ ID NO: 37228 - RNA, 22 nt, Homo sapiens
acacuuucuagacaagggaaua

SEQ ID NO: 37229 - RNA, 22 nt, Homo sapiens
uuucauggaggcauuuuagauu

SEQ ID NO: 37230 - RNA, 21 nt, Homo sapiens
auugcacuccagccugggcga

SEQ ID NO: 37231 - RNA, 22 nt, Homo sapiens
augugacuuuuuccugugccuu

SEQ ID NO: 37232 - RNA, 22 nt, Homo sapiens
uugagauggaguguugcucugu

SEQ ID NO: 37233 - RNA, 22 nt, Homo sapiens
uugagauggagucuugcucucu

SEQ ID NO: 37234 - RNA, 22 nt, Homo sapiens
cauugcacuccagcuugggcaa

SEQ ID NO: 37235 - RNA, 22 nt, Homo sapiens
cucaguagaaaauacauggacu

SEQ ID NO: 37236 - RNA, 22 nt, Homo sapiens
uaagacuguuggcaauuuuugc

SEQ ID NO: 37237 - RNA, 22 nt, Homo sapiens
ugcagaaucccuucagauccga

SEQ ID NO: 37238 - RNA, 22 nt, Homo sapiens
aguaaauuucugugcuuucaua

SEQ ID NO: 37239 - RNA, 22 nt, Homo sapiens
ugagaugaugggauaagagggc

SEQ ID NO: 37240 - RNA, 20 nt, Homo sapiens
ugagaacauguggcauuugg

SEQ ID NO: 37241 - RNA, 22 nt, Homo sapiens
auaugcaaauccauagagacag

SEQ ID NO: 37242 - RNA, 22 nt, Homo sapiens
aaagagaucuaugggcacuaug

SEQ ID NO: 37243 - RNA, 22 nt, Homo sapiens
uguagcuuuugagauuuauauu

SEQ ID NO: 37244 - RNA, 22 nt, Homo sapiens
uacauagucuucuuuugguuau

SEQ ID NO: 37245 - RNA, 22 nt, Homo sapiens
auuguacuccagccugggcaag

SEQ ID NO: 37246 - RNA, 22 nt, Homo sapiens
uugaagacuauaugauucuuca

SEQ ID NO: 37247 - RNA, 22 nt, Homo sapiens
caguuacuugacacaaccaauu

SEQ ID NO: 37248 - RNA, 22 nt, Homo sapiens
uugagauguaguuucacuccug

SEQ ID NO: 37249 - RNA, 22 nt, Homo sapiens
uggucuccuuuguacccugggc

SEQ ID NO: 37250 - RNA, 22 nt, Homo sapiens
agagaccuguaaaguucaggca

SEQ ID NO: 37251 - RNA, 22 nt, Homo sapiens
ggagaugaaaugagcuacuuaa

SEQ ID NO: 37252 - RNA, 22 nt, Homo sapiens
uuaagggaggagcuucaagaug

SEQ ID NO: 37253 - RNA, 20 nt, Homo sapiens
uaugacaaagccuagugagu

SEQ ID NO: 37254 - RNA, 22 nt, Homo sapiens
cugacuaguuuuaaugcagauu

SEQ ID NO: 37255 - RNA, 22 nt, Homo sapiens
augucaacauagacaguagagu

SEQ ID NO: 37256 - RNA, 22 nt, Homo sapiens
uuugaaaguaauuugguuggug

SEQ ID NO: 37257 - RNA, 22 nt, Homo sapiens
acaguguagugacugccaacuu

SEQ ID NO: 37258 - RNA, 22 nt, Homo sapiens
ugagccaaugauuugaauagag

SEQ ID NO: 37259 - RNA, 22 nt, Homo sapiens
gcuguguugugcccagcaucau

SEQ ID NO: 37260 - RNA, 22 nt, Homo sapiens
aucccuguaguaauauucuagc

SEQ ID NO: 37261 - RNA, 22 nt, Homo sapiens
ugagaugauagauauguuaauu

SEQ ID NO: 37262 - RNA, 22 nt, Homo sapiens
ugugggaggugcuaauguaaau

SEQ ID NO: 37263 - RNA, 22 nt, Homo sapiens
aucuuuggucaucacagcuaga

SEQ ID NO: 37264 - RNA, 22 nt, Homo sapiens
ugagaugaagucuugcucuguu

SEQ ID NO: 37265 - RNA, 22 nt, Homo sapiens
uaccagcauuucucuuuaagua

SEQ ID NO: 37266 - RNA, 22 nt, Homo sapiens
aagugccauguggaugggcccu

SEQ ID NO: 37267 - RNA, 22 nt, Homo sapiens
acaguaugcuuuaaacuuuguu

SEQ ID NO: 37268 - RNA, 22 nt, Homo sapiens
uuauagcuaacaucugugaaaa

SEQ ID NO: 37269 - RNA, 22 nt, Homo sapiens
cuggcagugcuuguuauccugg

SEQ ID NO: 37270 - RNA, 22 nt, Homo sapiens
ucuauguuuuugcuaguagugu

SEQ ID NO: 37271 - RNA, 22 nt, Homo sapiens
cuuuugugauucuucaguugcu

SEQ ID NO: 37272 - RNA, 22 nt, Homo sapiens
auagcauaucccacaugucaga

SEQ ID NO: 37273 - RNA, 22 nt, Homo sapiens
uaagugcaugauuacaugcaua

SEQ ID NO: 37274 - RNA, 22 nt, Homo sapiens
cauugcaauccagccugggcaa

SEQ ID NO: 37275 - RNA, 22 nt, Homo sapiens
ucacaaguguauagacaugucc

SEQ ID NO: 37276 - RNA, 22 nt, Homo sapiens
cccagaguucuuaaauacugag

SEQ ID NO: 37277 - RNA, 21 nt, Homo sapiens
ugagaugauccugcaugcaug

SEQ ID NO: 37278 - RNA, 22 nt, Homo sapiens
ugagcccauuguccugguuuau

SEQ ID NO: 37279 - RNA, 22 nt, Homo sapiens
ucuaugguuuauuuccaagugu

SEQ ID NO: 37280 - RNA, 22 nt, Homo sapiens
cuucuguuaguucugauaacuu

SEQ ID NO: 37281 - RNA, 17 nt, Homo sapiens
ucuaauaauaugcauuu

SEQ ID NO: 37282 - RNA, 22 nt, Homo sapiens
uauggcuuuuauuauguuguag

SEQ ID NO: 37283 - RNA, 22 nt, Homo sapiens
cugugcauguuguccaauucuu

SEQ ID NO: 37284 - RNA, 22 nt, Homo sapiens
uucuuugcaugaucucaaaguc

SEQ ID NO: 37285 - RNA, 22 nt, Homo sapiens
ugugucuccugaaaauucacau

SEQ ID NO: 37286 - RNA, 20 nt, Homo sapiens
aucucugggcaaaggaaaau

SEQ ID NO: 37287 - RNA, 22 nt, Homo sapiens
ugugcaaggcucucaaccugug

SEQ ID NO: 37288 - RNA, 22 nt, Homo sapiens
uaaguauagguaacagaagcaa

SEQ ID NO: 37289 - RNA, 22 nt, Homo sapiens
gaaacugcauuucuaacaagcu

SEQ ID NO: 37290 - RNA, 22 nt, Homo sapiens
aaguauguaucaagucauacuu

SEQ ID NO: 37291 - RNA, 22 nt, Homo sapiens
auugcauaaacacauuucuuau

SEQ ID NO: 37292 - RNA, 22 nt, Homo sapiens
ugagccaugggguaaaugugau

SEQ ID NO: 37293 - RNA, 22 nt, Homo sapiens
uucaguagucuccauagaaccg

SEQ ID NO: 37294 - RNA, 22 nt, Homo sapiens
augaggcacugcgcccuacuga

SEQ ID NO: 37295 - RNA, 20 nt, Homo sapiens
agcugguuuuaugaaucuuu

SEQ ID NO: 37296 - RNA, 22 nt, Homo sapiens
gagaucacuguuuauauucucu

SEQ ID NO: 37297 - RNA, 22 nt, Homo sapiens
uaucagcagagucauacuucaa

SEQ ID NO: 37298 - RNA, 22 nt, Homo sapiens
uaguucauuuuucuugcuuaga

SEQ ID NO: 37299 - RNA, 22 nt, Homo sapiens
ucuaaguaguagcuggucagaa

SEQ ID NO: 37300 - RNA, 21 nt, Homo sapiens
ugaaugcuuuaaauauuagaa

SEQ ID NO: 37301 - RNA, 22 nt, Homo sapiens
auggcaguuuauucuaaaucaa

SEQ ID NO: 37302 - RNA, 22 nt, Homo sapiens
guacaguuuucaguguucacug

SEQ ID NO: 37303 - RNA, 18 nt, Homo sapiens
gacuuggaguuuacagug

SEQ ID NO: 37304 - RNA, 22 nt, Homo sapiens
uuggaaauguguuugcauucag

SEQ ID NO: 37305 - RNA, 22 nt, Homo sapiens
uuguaaucaacacaucauuggg

SEQ ID NO: 37306 - RNA, 20 nt, Homo sapiens
auuccacuuguuugagguac

SEQ ID NO: 37307 - RNA, 22 nt, Homo sapiens
cugucucagugaauugguuuua

SEQ ID NO: 37308 - RNA, 22 nt, Homo sapiens
ugacuaaaacugaguuucauua

SEQ ID NO: 37309 - RNA, 22 nt, Homo sapiens
ucucuggauaucuacuuauguu

SEQ ID NO: 37310 - RNA, 22 nt, Homo sapiens
acuuuuguuauacagugugaua

SEQ ID NO: 37311 - RNA, 22 nt, Homo sapiens
cauggcuuucacaguaaagccu

SEQ ID NO: 37312 - RNA, 22 nt, Homo sapiens
ggcaacaugccgaaaccacguc

SEQ ID NO: 37313 - RNA, 22 nt, Homo sapiens
auacauguuucauguuggugug

SEQ ID NO: 37314 - RNA, 22 nt, Homo sapiens
cugagacacucuuaucugcaua

SEQ ID NO: 37315 - RNA, 18 nt, Homo sapiens
uuggacggagagucaaau

SEQ ID NO: 37316 - RNA, 18 nt, Homo sapiens
ugaaacacauuuuuuccu

SEQ ID NO: 37317 - RNA, 22 nt, Homo sapiens
ugagcugagaucgugccauugu

SEQ ID NO: 37318 - RNA, 22 nt, Homo sapiens
cuagaguacuuaccacagcaug

SEQ ID NO: 37319 - RNA, 22 nt, Homo sapiens
ugagaugaagcuagaagaaugg

SEQ ID NO: 37320 - RNA, 22 nt, Homo sapiens
cauggcuuuuauaacaagaaau

SEQ ID NO: 37321 - RNA, 22 nt, Homo sapiens
cuacucugugguguauuugcau

SEQ ID NO: 37322 - RNA, 22 nt, Homo sapiens
uugaguccccacacuggguccc

SEQ ID NO: 37323 - RNA, 22 nt, Homo sapiens
auggaaacauaagaguauagau

SEQ ID NO: 37324 - RNA, 22 nt, Homo sapiens
auccaagagacugaugacuucc

SEQ ID NO: 37325 - RNA, 22 nt, Homo sapiens
gcugaaauguuuaauuugggag

SEQ ID NO: 37326 - RNA, 18 nt, Homo sapiens
auugcacaccagccuggg

SEQ ID NO: 37327 - RNA, 22 nt, Homo sapiens
uauuguacauauccucccuuca

SEQ ID NO: 37328 - RNA, 21 nt, Homo sapiens
guggaaauggaauuuacuaau

SEQ ID NO: 37329 - RNA, 21 nt, Homo sapiens
cuuugguagaguuuuuagggu

SEQ ID NO: 37330 - RNA, 22 nt, Homo sapiens
uuugcuuguguaaaaaucugga

SEQ ID NO: 37331 - RNA, 22 nt, Homo sapiens
uaagacacuuaaaauguuacau

SEQ ID NO: 37332 - RNA, 22 nt, Homo sapiens
ugagaugauaucuuauuguaau

SEQ ID NO: 37333 - RNA, 22 nt, Homo sapiens
aggcaugaaauacaugcauuga

SEQ ID NO: 37334 - RNA, 22 nt, Homo sapiens
auagcagaacagugucucacug

SEQ ID NO: 37335 - RNA, 22 nt, Homo sapiens
uugacagaccuuggucauaucc

SEQ ID NO: 37336 - RNA, 22 nt, Homo sapiens
aaguuaauguuuaagacuccua

SEQ ID NO: 37337 - RNA, 19 nt, Homo sapiens
ucccugagucuuagcuuga

SEQ ID NO: 37338 - RNA, 22 nt, Homo sapiens
agaaugugaccuuauuuggaga

SEQ ID NO: 37339 - RNA, 22 nt, Homo sapiens
uguaacaggaggaaaaugugaa

SEQ ID NO: 37340 - RNA, 22 nt, Homo sapiens
guggaauggaaugauuguguau

SEQ ID NO: 37341 - RNA, 22 nt, Homo sapiens
uuaaguaaucagagaagagaac

SEQ ID NO: 37342 - RNA, 22 nt, Homo sapiens
guguuauugagaaauagggugu

SEQ ID NO: 37343 - RNA, 22 nt, Homo sapiens
ugagaugauuuaauggagccca

SEQ ID NO: 37344 - RNA, 22 nt, Homo sapiens
aggcaagagugacuacgugaaa

SEQ ID NO: 37345 - RNA, 22 nt, Homo sapiens
uagucacacacucaacuuuuca

SEQ ID NO: 37346 - RNA, 22 nt, Homo sapiens
accugagacuaggcauuuuaua

SEQ ID NO: 37347 - RNA, 22 nt, Homo sapiens
gagcucaccuuaccucuggagc

SEQ ID NO: 37348 - RNA, 21 nt, Homo sapiens
uuuagguagcuuuucugggag

SEQ ID NO: 37349 - RNA, 22 nt, Homo sapiens
uugacuagaccaucuuucuaga

SEQ ID NO: 37350 - RNA, 22 nt, Homo sapiens
uuggucaucucccuccuuuuag

SEQ ID NO: 37351 - RNA, 22 nt, Homo sapiens
aucacuuucuauuucugugcca

SEQ ID NO: 37352 - RNA, 22 nt, Homo sapiens
gggaauguagcaaaucugcaau

SEQ ID NO: 37353 - RNA, 22 nt, Homo sapiens
auauucacagguaucagagauu

SEQ ID NO: 37354 - RNA, 22 nt, Homo sapiens
uuuuauguuuguucccugccaa

SEQ ID NO: 37355 - RNA, 23 nt, Homo sapiens
uguauacacccugugcaucuggg

SEQ ID NO: 37356 - RNA, 22 nt, Homo sapiens
uggaaguuaaaugacucuuucu

SEQ ID NO: 37357 - RNA, 22 nt, Homo sapiens
uauggaaaucuuaccuuauggu

SEQ ID NO: 37358 - RNA, 22 nt, Homo sapiens
auugcacuccagccugggcaac

SEQ ID NO: 37359 - RNA, 23 nt, Homo sapiens
caugaacuaguuugcagccauga

SEQ ID NO: 37360 - RNA, 22 nt, Homo sapiens
uucuacuucauuaggaggauug

SEQ ID NO: 37361 - RNA, 22 nt, Homo sapiens
cuuugguucuguuuauaugcug

SEQ ID NO: 37362 - RNA, 22 nt, Homo sapiens
uccuguaaucccagcuaccaga

SEQ ID NO: 37363 - RNA, 22 nt, Homo sapiens
uugcauauguugaaccaagcgu

SEQ ID NO: 37364 - RNA, 22 nt, Homo sapiens
auggcuguuccugggaguucua

SEQ ID NO: 37365 - RNA, 22 nt, Homo sapiens
ggggaauguuaaagaauuugca

SEQ ID NO: 37366 - RNA, 22 nt, Homo sapiens
ugagaugagaaucaguucuaau

SEQ ID NO: 37367 - RNA, 22 nt, Homo sapiens
auacaugugccauguugguaug

SEQ ID NO: 37368 - RNA, 22 nt, Homo sapiens
auauggcuaugugagcauacca

SEQ ID NO: 37369 - RNA, 22 nt, Homo sapiens
uucagugucauuaacacaguag

SEQ ID NO: 37370 - RNA, 22 nt, Homo sapiens
augcaacugcacuccagccugg

SEQ ID NO: 37371 - RNA, 18 nt, Homo sapiens
acauucagcuugaagaua

SEQ ID NO: 37372 - RNA, 22 nt, Homo sapiens
uauuugguagcuauuuugcagu

SEQ ID NO: 37373 - RNA, 20 nt, Homo sapiens
cguugcacuccagccugggc

SEQ ID NO: 37374 - RNA, 22 nt, Homo sapiens
cauggcuuuauuuucagcuucu

SEQ ID NO: 37375 - RNA, 22 nt, Homo sapiens
ccauugaacaugaaggaaugug

SEQ ID NO: 37376 - RNA, 22 nt, Homo sapiens
uucagcuacuugggaggcugaa

SEQ ID NO: 37377 - RNA, 22 nt, Homo sapiens
ucaagugcauugauucaguauu

SEQ ID NO: 37378 - RNA, 22 nt, Homo sapiens
ugagaugagggcugcacucaaa

SEQ ID NO: 37379 - RNA, 22 nt, Homo sapiens
agcuggcuguagcugcaagucu

SEQ ID NO: 37380 - RNA, 22 nt, Homo sapiens
auugcacuccagccugggcgac

SEQ ID NO: 37381 - RNA, 22 nt, Homo sapiens
aagagaugaagguccugacugu

SEQ ID NO: 37382 - RNA, 22 nt, Homo sapiens
uauacaugugccauguuggugu

SEQ ID NO: 37383 - RNA, 22 nt, Homo sapiens
ucacaguccuguuuaggagagg

SEQ ID NO: 37384 - RNA, 22 nt, Homo sapiens
aaggcaauuuguugugaggauu

SEQ ID NO: 37385 - RNA, 22 nt, Homo sapiens
acuuuguguuacccagcaagga

SEQ ID NO: 37386 - RNA, 22 nt, Homo sapiens
uacacagucaaaaauuuccagg

SEQ ID NO: 37387 - RNA, 23 nt, Homo sapiens
uuaguaaacucaaugacaccaca

SEQ ID NO: 37388 - RNA, 22 nt, Homo sapiens
augaagcuagcugauugcugau

SEQ ID NO: 37389 - RNA, 22 nt, Homo sapiens
auagcagacauuucaaggcagg

SEQ ID NO: 37390 - RNA, 19 nt, Homo sapiens
uuuuggaaaugugaacagc

SEQ ID NO: 37391 - RNA, 22 nt, Homo sapiens
agaugauguuuacugagcauca

SEQ ID NO: 37392 - RNA, 22 nt, Homo sapiens
auugcacuccagccuggcaaua

SEQ ID NO: 37393 - RNA, 22 nt, Homo sapiens
ucauauugcgguucauugacuu

SEQ ID NO: 37394 - RNA, 22 nt, Homo sapiens
uuggaaacaccuggugagguua

SEQ ID NO: 37395 - RNA, 22 nt, Homo sapiens
gucauugcacuccagccuggac

SEQ ID NO: 37396 - RNA, 22 nt, Homo sapiens
ucagugccucaguuuuuaaaga

SEQ ID NO: 37397 - RNA, 17 nt, Homo sapiens
acagugucuaugaaaug

SEQ ID NO: 37398 - RNA, 22 nt, Homo sapiens
gggaaauguaaagucauaagau

SEQ ID NO: 37399 - RNA, 22 nt, Homo sapiens
acacuauugagguuuguuugca

SEQ ID NO: 37400 - RNA, 22 nt, Homo sapiens
gaugauguugaauguucucacc

SEQ ID NO: 37401 - RNA, 22 nt, Homo sapiens
gcugcuuuugaugacaaaaaca

SEQ ID NO: 37402 - RNA, 22 nt, Homo sapiens
uuccagcugggggcaacucugc

SEQ ID NO: 37403 - RNA, 22 nt, Homo sapiens
aagacuguaauccaucuugagu

SEQ ID NO: 37404 - RNA, 22 nt, Homo sapiens
ggagaauugcuuggacccggga

SEQ ID NO: 37405 - RNA, 22 nt, Homo sapiens
cauugcacugcauucugggcaa

SEQ ID NO: 37406 - RNA, 21 nt, Homo sapiens
gugcaaacaucauagaaugua

SEQ ID NO: 37407 - RNA, 22 nt, Homo sapiens
acuuuuugauggggagaacauu

SEQ ID NO: 37408 - RNA, 22 nt, Homo sapiens
uugagcaaaacauuaauauuag

SEQ ID NO: 37409 - RNA, 22 nt, Homo sapiens
uugcauaagugcauucugugau

SEQ ID NO: 37410 - RNA, 22 nt, Homo sapiens
cacaguugccuaucuccugaag

SEQ ID NO: 37411 - RNA, 22 nt, Homo sapiens
uauugcaauuggcagagugcua

SEQ ID NO: 37412 - RNA, 22 nt, Homo sapiens
uuugugcaaacuaggauugcga

SEQ ID NO: 37413 - RNA, 22 nt, Homo sapiens
ugagaucuuuuguggcugagaa

SEQ ID NO: 37414 - RNA, 22 nt, Homo sapiens
uuuguucaccucaaggauggga

SEQ ID NO: 37415 - RNA, 22 nt, Homo sapiens
gggcaacauugaguacccugaa

SEQ ID NO: 37416 - RNA, 22 nt, Homo sapiens
uggaagauucuagaagauucca

SEQ ID NO: 37417 - RNA, 22 nt, Homo sapiens
cauugcacuccagcucugggcg

SEQ ID NO: 37418 - RNA, 22 nt, Homo sapiens
aaguugguguaugagacagaag

SEQ ID NO: 37419 - RNA, 22 nt, Homo sapiens
uacccucuggauacccuuguuc

SEQ ID NO: 37420 - RNA, 22 nt, Homo sapiens
aagugucagaguugcuaaugac

SEQ ID NO: 37421 - RNA, 22 nt, Homo sapiens
ugagaugaaagcagaaagacuu

SEQ ID NO: 37422 - RNA, 19 nt, Homo sapiens
cauugcacuccacccuggg

SEQ ID NO: 37423 - RNA, 19 nt, Homo sapiens
auugcacuccaaccugggu

SEQ ID NO: 37424 - RNA, 19 nt, Homo sapiens
aauggcuuuuccuguuccc

SEQ ID NO: 37425 - RNA, 22 nt, Homo sapiens
augugcaaagcacuguucagca

SEQ ID NO: 37426 - RNA, 22 nt, Homo sapiens
ugagaugaguucucgcucuguc

SEQ ID NO: 37427 - RNA, 22 nt, Homo sapiens
uucuacaugggucgucggugag

SEQ ID NO: 37428 - RNA, 22 nt, Homo sapiens
uugcuuagucaugaaucacuga

SEQ ID NO: 37429 - RNA, 22 nt, Homo sapiens
uauggcuuuguuaacauuuucu

SEQ ID NO: 37430 - RNA, 22 nt, Homo sapiens
cauugcacuccagccugccugg

SEQ ID NO: 37431 - RNA, 21 nt, Homo sapiens
uaaaacuguaacuuuguccug

SEQ ID NO: 37432 - RNA, 22 nt, Homo sapiens
ugagaugaucaaaguauaggcu

SEQ ID NO: 37433 - RNA, 22 nt, Homo sapiens
uauggcuuucuacuugaguucu

SEQ ID NO: 37434 - RNA, 22 nt, Homo sapiens
uuaaaaguauaggccuggcaua

SEQ ID NO: 37435 - RNA, 22 nt, Homo sapiens
ccuuggcacuuugccacagugc

SEQ ID NO: 37436 - RNA, 22 nt, Homo sapiens
uugaggcaaugaggagaagcug

SEQ ID NO: 37437 - RNA, 22 nt, Homo sapiens
uaaggcucuuguuauuuugagg

SEQ ID NO: 37438 - RNA, 22 nt, Homo sapiens
uccagaguggugaugcuggggc

SEQ ID NO: 37439 - RNA, 22 nt, Homo sapiens
auggcaguuucacucugggauu

SEQ ID NO: 37440 - RNA, 22 nt, Homo sapiens
uuauugcacuccagccugggua

SEQ ID NO: 37441 - RNA, 23 nt, Homo sapiens
auugcagaaucacagagguagug

SEQ ID NO: 37442 - RNA, 22 nt, Homo sapiens
uuaaggaaggagucuuaaaugg

SEQ ID NO: 37443 - RNA, 22 nt, Homo sapiens
ucacuuugacggccaacuucua

SEQ ID NO: 37444 - RNA, 22 nt, Homo sapiens
auugcacuccagccugagcaaa

SEQ ID NO: 37445 - RNA, 22 nt, Homo sapiens
guggaagaccagacuuuccaac

SEQ ID NO: 37446 - RNA, 22 nt, Homo sapiens
auacaagcaguccaacuccaua

SEQ ID NO: 37447 - RNA, 22 nt, Homo sapiens
uuggaaaccucugcagguguuu

SEQ ID NO: 37448 - RNA, 22 nt, Homo sapiens
uuugcauaauaagauuagggug

SEQ ID NO: 37449 - RNA, 22 nt, Homo sapiens
uuggucaggcuaaucucgaacg

SEQ ID NO: 37450 - RNA, 22 nt, Homo sapiens
aauuaguuggcugggugcggug

SEQ ID NO: 37451 - RNA, 22 nt, Homo sapiens
uggcucauuucuaaacccagcu

SEQ ID NO: 37452 - RNA, 22 nt, Homo sapiens
uucauaguguuuccuuccagug

SEQ ID NO: 37453 - RNA, 20 nt, Homo sapiens
uggaaauuaaccuuucaggu

SEQ ID NO: 37454 - RNA, 22 nt, Homo sapiens
auugcacugcagccugggcaac

SEQ ID NO: 37455 - RNA, 22 nt, Homo sapiens
guagcagaauaucagauaauuu

SEQ ID NO: 37456 - RNA, 22 nt, Homo sapiens
auaaccuauggaucuacucggg

SEQ ID NO: 37457 - RNA, 22 nt, Homo sapiens
guucaagugauucuacugccuc

SEQ ID NO: 37458 - RNA, 22 nt, Homo sapiens
uaucucuguggguagugcugaa

SEQ ID NO: 37459 - RNA, 22 nt, Homo sapiens
auugcacaucugcacuacagcc

SEQ ID NO: 37460 - RNA, 22 nt, Homo sapiens
aucuuuggcgggaauaucacag

SEQ ID NO: 37461 - RNA, 22 nt, Homo sapiens
aucccaguucagccucugacac

SEQ ID NO: 37462 - RNA, 22 nt, Homo sapiens
acacagugucuguguauuuaaa

SEQ ID NO: 37463 - RNA, 22 nt, Homo sapiens
uaaguucauucaugaaacuuag

SEQ ID NO: 37464 - RNA, 22 nt, Homo sapiens
ugagaucaagguuaauauaauc

SEQ ID NO: 37465 - RNA, 22 nt, Homo sapiens
ucuuucacuuagcaugauguuu

SEQ ID NO: 37466 - RNA, 22 nt, Homo sapiens
ugacaagauauggucuuaucaa

SEQ ID NO: 37467 - RNA, 22 nt, Homo sapiens
uucuacagugacugcagccaua

SEQ ID NO: 37468 - RNA, 22 nt, Homo sapiens
guggaaaucucugugugacuua

SEQ ID NO: 37469 - RNA, 22 nt, Homo sapiens
uuggcaguaucuacuacagcua

SEQ ID NO: 37470 - RNA, 22 nt, Homo sapiens
uugaguccauucgaugcugauu

SEQ ID NO: 37471 - RNA, 22 nt, Homo sapiens
uuggaaacauuuaugguaacag

SEQ ID NO: 37472 - RNA, 22 nt, Homo sapiens
auggaacauuauagauguaaaa

SEQ ID NO: 37473 - RNA, 22 nt, Homo sapiens
uuauagacacguuguaacaaac

SEQ ID NO: 37474 - RNA, 22 nt, Homo sapiens
uuuugcaguuacagagagugag

SEQ ID NO: 37475 - RNA, 22 nt, Homo sapiens
auaaauaguaguugugguggcc

SEQ ID NO: 37476 - RNA, 18 nt, Homo sapiens
auugcacuccugccuggg

SEQ ID NO: 37477 - RNA, 22 nt, Homo sapiens
ugagaucacuaagagguaaugg

SEQ ID NO: 37478 - RNA, 22 nt, Homo sapiens
ugugagacugguucugaaccca

SEQ ID NO: 37479 - RNA, 22 nt, Homo sapiens
uaucacuuugauaguuuaaaug

SEQ ID NO: 37480 - RNA, 22 nt, Homo sapiens
uuaauagugacucauuuuccac

SEQ ID NO: 37481 - RNA, 19 nt, Homo sapiens
ugugacugguugucucgcu

SEQ ID NO: 37482 - RNA, 22 nt, Homo sapiens
aggcaaugugagaguuuauuca

SEQ ID NO: 37483 - RNA, 22 nt, Homo sapiens
augaucacuguggaaauucagc

SEQ ID NO: 37484 - RNA, 22 nt, Homo sapiens
acacuuucuggagcugcacaua

SEQ ID NO: 37485 - RNA, 22 nt, Homo sapiens
aucugugaaugaaguuauuuug

SEQ ID NO: 37486 - RNA, 22 nt, Homo sapiens
aaguggcauugaggaaaaaaau

SEQ ID NO: 37487 - RNA, 22 nt, Homo sapiens
gaaaugcucauuuuggauccuu

SEQ ID NO: 37488 - RNA, 22 nt, Homo sapiens
cucaguguucccauucuaccuu

SEQ ID NO: 37489 - RNA, 22 nt, Homo sapiens
uaaguacuuuacagacauuauc

SEQ ID NO: 37490 - RNA, 22 nt, Homo sapiens
gacaagagaacacugcuauauu

SEQ ID NO: 37491 - RNA, 22 nt, Homo sapiens
uuauggauuuauauucuguagu

SEQ ID NO: 37492 - RNA, 22 nt, Homo sapiens
aucgcacuccauccugggcaac

SEQ ID NO: 37493 - RNA, 21 nt, Homo sapiens
agcugguuuccacagugugcu

SEQ ID NO: 37494 - RNA, 22 nt, Homo sapiens
uccauuugucuauguuucuguu

SEQ ID NO: 37495 - RNA, 22 nt, Homo sapiens
auggacuuuuuguucagugucu

SEQ ID NO: 37496 - RNA, 22 nt, Homo sapiens
ugacaagagaccccuccgcagg

SEQ ID NO: 37497 - RNA, 22 nt, Homo sapiens
aucccuagaaaaaucagcacau

SEQ ID NO: 37498 - RNA, 22 nt, Homo sapiens
cauugcacuccaucuugggcaa

SEQ ID NO: 37499 - RNA, 17 nt, Homo sapiens
auguaauccucaucucu

SEQ ID NO: 37500 - RNA, 22 nt, Homo sapiens
uucuacaggcuguucaagaagc

SEQ ID NO: 37501 - RNA, 22 nt, Homo sapiens
uuggaaaugguaaaggguuaau

SEQ ID NO: 37502 - RNA, 21 nt, Homo sapiens
auuccacuuuuccuucaggga

SEQ ID NO: 37503 - RNA, 22 nt, Homo sapiens
guauacaugucaaaacucacau

SEQ ID NO: 37504 - RNA, 22 nt, Homo sapiens
uuaguucauugugacuggacuc

SEQ ID NO: 37505 - RNA, 22 nt, Homo sapiens
uuauacuacuauaaagagguag

SEQ ID NO: 37506 - RNA, 22 nt, Homo sapiens
cuauaacagugugguuuggaga

SEQ ID NO: 37507 - RNA, 22 nt, Homo sapiens
uaaagugcugagaugaggcugg

SEQ ID NO: 37508 - RNA, 22 nt, Homo sapiens
cugggaugugacuguugccccc

SEQ ID NO: 37509 - RNA, 22 nt, Homo sapiens
ugagaugaagucucacucuguc

SEQ ID NO: 37510 - RNA, 22 nt, Homo sapiens
uugagauggaguuuugcucuug

SEQ ID NO: 37511 - RNA, 22 nt, Homo sapiens
uuugguuuuuguuaucacucau

SEQ ID NO: 37512 - RNA, 22 nt, Homo sapiens
uagcuguuggugggaagucaga

SEQ ID NO: 37513 - RNA, 22 nt, Homo sapiens
cuuugguuaauaggauauggca

SEQ ID NO: 37514 - RNA, 22 nt, Homo sapiens
cauggcuuguauaagauucuca

SEQ ID NO: 37515 - RNA, 22 nt, Homo sapiens
uggcuuuuauuauguugaggua

SEQ ID NO: 37516 - RNA, 17 nt, Homo sapiens
ugagcuaagauuacccc

SEQ ID NO: 37517 - RNA, 22 nt, Homo sapiens
acacacgugcauguaugcguau

SEQ ID NO: 37518 - RNA, 22 nt, Homo sapiens
uacaccauuugauucuuuaagc

SEQ ID NO: 37519 - RNA, 22 nt, Homo sapiens
auaucaaggccauuuucuaaau

SEQ ID NO: 37520 - RNA, 22 nt, Homo sapiens
augucuuucauagagacccaga

SEQ ID NO: 37521 - RNA, 23 nt, Homo sapiens
agccugguuucccugcuucuccc

SEQ ID NO: 37522 - RNA, 22 nt, Homo sapiens
uucccagugccaggcacuggga

SEQ ID NO: 37523 - RNA, 22 nt, Homo sapiens
gccaacauggcgcuccauucuu

SEQ ID NO: 37524 - RNA, 22 nt, Homo sapiens
auugcacuccagccugggcagc

SEQ ID NO: 37525 - RNA, 22 nt, Homo sapiens
ugucagaaucuagaggcugcua

SEQ ID NO: 37526 - RNA, 21 nt, Homo sapiens
uucaucuggccguauuccagg

SEQ ID NO: 37527 - RNA, 22 nt, Homo sapiens
ccugucuugauuaaauuacuua

SEQ ID NO: 37528 - RNA, 20 nt, Homo sapiens
ugagcucaugacauuuuucu

SEQ ID NO: 37529 - RNA, 22 nt, Homo sapiens
aucuacagccagucugguuugu

SEQ ID NO: 37530 - RNA, 18 nt, Homo sapiens
ggaaaacuuuucuaagua

SEQ ID NO: 37531 - RNA, 22 nt, Homo sapiens
auggcaguguaugauuauauua

SEQ ID NO: 37532 - RNA, 22 nt, Homo sapiens
aucauauccuagauauaacuuc

SEQ ID NO: 37533 - RNA, 22 nt, Homo sapiens
auggcucuuauuauuuugaggu

SEQ ID NO: 37534 - RNA, 22 nt, Homo sapiens
auugcacuccagccuugggcaa

SEQ ID NO: 37535 - RNA, 22 nt, Homo sapiens
cauugcacugcagcccgggcaa

SEQ ID NO: 37536 - RNA, 22 nt, Homo sapiens
uuggaaauauguuaagugucau

SEQ ID NO: 37537 - RNA, 22 nt, Homo sapiens
augacugucagggcagucauug

SEQ ID NO: 37538 - RNA, 22 nt, Homo sapiens
uacaaguauuuuuauuagugcc

SEQ ID NO: 37539 - RNA, 22 nt, Homo sapiens
uggucaguugaguccuugccaa

SEQ ID NO: 37540 - RNA, 22 nt, Homo sapiens
acuggcuuauuucacuuagcau

SEQ ID NO: 37541 - RNA, 22 nt, Homo sapiens
ggcacgguggcucacgccugua

SEQ ID NO: 37542 - RNA, 22 nt, Homo sapiens
ggaaugugugucaugcuuuugc

SEQ ID NO: 37543 - RNA, 22 nt, Homo sapiens
uugagauggagucucgcucugu

SEQ ID NO: 37544 - RNA, 22 nt, Homo sapiens
uugagauggagucuugcucuug

SEQ ID NO: 37545 - RNA, 22 nt, Homo sapiens
cugucuagagggcacaugaugc

SEQ ID NO: 37546 - RNA, 22 nt, Homo sapiens
ucauacaguaguccucacuugu

SEQ ID NO: 37547 - RNA, 22 nt, Homo sapiens
uugcacagugguuuagagccug

SEQ ID NO: 37548 - RNA, 22 nt, Homo sapiens
ucaaauguuuguuuaaggcuua

SEQ ID NO: 37549 - RNA, 22 nt, Homo sapiens
guaaagacacaugcacacguau

SEQ ID NO: 37550 - RNA, 22 nt, Homo sapiens
uaagacugccccagacagcaag

SEQ ID NO: 37551 - RNA, 22 nt, Homo sapiens
ugagcucagcuaguugaggugu

SEQ ID NO: 37552 - RNA, 22 nt, Homo sapiens
gucuuuggaaaaaaugucuguu

SEQ ID NO: 37553 - RNA, 22 nt, Homo sapiens
uugcacauguugaaccagcaaa

SEQ ID NO: 37554 - RNA, 22 nt, Homo sapiens
uggaacacauaaauagcauagu

SEQ ID NO: 37555 - RNA, 22 nt, Homo sapiens
uuuuaugggcuauuugcauuag

SEQ ID NO: 37556 - RNA, 22 nt, Homo sapiens
uuugguugcauucacauauuuc

SEQ ID NO: 37557 - RNA, 22 nt, Homo sapiens
agcaagaugaaguugagcuagg

SEQ ID NO: 37558 - RNA, 22 nt, Homo sapiens
gaauaaacuagagaggacugag

SEQ ID NO: 37559 - RNA, 22 nt, Homo sapiens
ccugucuugaagagauccuccu

SEQ ID NO: 37560 - RNA, 19 nt, Homo sapiens
uaucacuucccuggaaaca

SEQ ID NO: 37561 - RNA, 22 nt, Homo sapiens
uauggcuucuuauucuuucccg

SEQ ID NO: 37562 - RNA, 22 nt, Homo sapiens
auggcuuuaagagugucugaau

SEQ ID NO: 37563 - RNA, 22 nt, Homo sapiens
cauugcaugccagccugggcaa

SEQ ID NO: 37564 - RNA, 22 nt, Homo sapiens
uuaauacugcuuaacuuuagga

SEQ ID NO: 37565 - RNA, 23 nt, Homo sapiens
ggaaugaaaccugguuaugauau

SEQ ID NO: 37566 - RNA, 22 nt, Homo sapiens
uucaaaaccucugcuuaagccc

SEQ ID NO: 37567 - RNA, 22 nt, Homo sapiens
auggcaguuuggucucugugcu

SEQ ID NO: 37568 - RNA, 22 nt, Homo sapiens
ccagucuuggugucuguagcac

SEQ ID NO: 37569 - RNA, 22 nt, Homo sapiens
ugagaucugauaggccuggguu

SEQ ID NO: 37570 - RNA, 20 nt, Homo sapiens
cauugcccuccagccugggc

SEQ ID NO: 37571 - RNA, 21 nt, Homo sapiens
uuuugugcaugugcagccugc

SEQ ID NO: 37572 - RNA, 22 nt, Homo sapiens
uuuuuggguaaugauuaucaau

SEQ ID NO: 37573 - RNA, 22 nt, Homo sapiens
uuuuuauggccaauccucagaa

SEQ ID NO: 37574 - RNA, 22 nt, Homo sapiens
uuuuggcacuuugucugauucu

SEQ ID NO: 37575 - RNA, 20 nt, Homo sapiens
uuuuggcuuaaagcagucug

SEQ ID NO: 37576 - RNA, 22 nt, Homo sapiens
uugugguugacuaaauuuguaa

SEQ ID NO: 37577 - RNA, 22 nt, Homo sapiens
uugugguuauagagucucccug

SEQ ID NO: 37578 - RNA, 22 nt, Homo sapiens
uugugguugaugaagacugucu

SEQ ID NO: 37579 - RNA, 22 nt, Homo sapiens
uugugguuuucagcuuauauau

SEQ ID NO: 37580 - RNA, 22 nt, Homo sapiens
uugugguaggaguugccauguu

SEQ ID NO: 37581 - RNA, 22 nt, Homo sapiens
uugugguaaucugugacagcag

SEQ ID NO: 37582 - RNA, 18 nt, Homo sapiens
uuguggccccuacaaauu

SEQ ID NO: 37583 - RNA, 22 nt, Homo sapiens
uuguggcuuaucucauuuagcg

SEQ ID NO: 37584 - RNA, 21 nt, Homo sapiens
uuuacuguggacccauugcuu

SEQ ID NO: 37585 - RNA, 22 nt, Homo sapiens
uuguguaguaccucucacauug

SEQ ID NO: 37586 - RNA, 22 nt, Homo sapiens
uugugguuuuaucuaccuuugg

SEQ ID NO: 37587 - RNA, 22 nt, Homo sapiens
uuucacagcugucuuccgucuc

SEQ ID NO: 37588 - RNA, 17 nt, Homo sapiens
uuucucagcccucuucu

SEQ ID NO: 37589 - RNA, 22 nt, Homo sapiens
uuuagguaauauuaaguagcug

SEQ ID NO: 37590 - RNA, 22 nt, Homo sapiens
uuuagcagcaaagagccaugcu

SEQ ID NO: 37591 - RNA, 19 nt, Homo sapiens
uuucacacucgccuacuuc

SEQ ID NO: 37592 - RNA, 22 nt, Homo sapiens
uuuaucaggccuuuggaaaaau

SEQ ID NO: 37593 - RNA, 22 nt, Homo sapiens
uuguacaggaguguaagcuuca

SEQ ID NO: 37594 - RNA, 23 nt, Homo sapiens
uuguccccuccaaagcucauguu

SEQ ID NO: 37595 - RNA, 22 nt, Homo sapiens
uuguccuccacauuugaucagu

SEQ ID NO: 37596 - RNA, 22 nt, Homo sapiens
uuguccucuccaaaucucaugu

SEQ ID NO: 37597 - RNA, 19 nt, Homo sapiens
uuguccccucuaaaucuca

SEQ ID NO: 37598 - RNA, 20 nt, Homo sapiens
uuggugaccuacagaugugg

SEQ ID NO: 37599 - RNA, 22 nt, Homo sapiens
uugguucucuuagccaucuuaa

SEQ ID NO: 37600 - RNA, 22 nt, Homo sapiens
uuggucucaucaagagcagcuu

SEQ ID NO: 37601 - RNA, 23 nt, Homo sapiens
uuggucucccaaaguguugagau

SEQ ID NO: 37602 - RNA, 22 nt, Homo sapiens
uuggucucuuaaucacacuuuu

SEQ ID NO: 37603 - RNA, 22 nt, Homo sapiens
uugcuucauucaacauugaggg

SEQ ID NO: 37604 - RNA, 20 nt, Homo sapiens
uugcugguguuagaggaggc

SEQ ID NO: 37605 - RNA, 22 nt, Homo sapiens
uugcuccccaggaaaggaagca

SEQ ID NO: 37606 - RNA, 22 nt, Homo sapiens
uugcagugguuucacuggcaaa

SEQ ID NO: 37607 - RNA, 22 nt, Homo sapiens
uugguacuacacuucuaaucuu

SEQ ID NO: 37608 - RNA, 22 nt, Homo sapiens
uugggguaggaauauggaauga

SEQ ID NO: 37609 - RNA, 22 nt, Homo sapiens
uugggccacuuuaguuuccuua

SEQ ID NO: 37610 - RNA, 22 nt, Homo sapiens
uugggagugucucuggacugca

SEQ ID NO: 37611 - RNA, 22 nt, Homo sapiens
uucagaugcacacuguagucua

SEQ ID NO: 37612 - RNA, 22 nt, Homo sapiens
uucagagugguaugaagugaug

SEQ ID NO: 37613 - RNA, 22 nt, Homo sapiens
uucauagucacauucgaugucu

SEQ ID NO: 37614 - RNA, 22 nt, Homo sapiens
uucaucagggagaaauaauuuc

SEQ ID NO: 37615 - RNA, 22 nt, Homo sapiens
uucagacugggugaagagggua

SEQ ID NO: 37616 - RNA, 22 nt, Homo sapiens
uucauaguucuuuuagucauua

SEQ ID NO: 37617 - RNA, 22 nt, Homo sapiens
uucuugguugcucacacccauc

SEQ ID NO: 37618 - RNA, 21 nt, Homo sapiens
uucuuugcucaguguuagagu

SEQ ID NO: 37619 - RNA, 22 nt, Homo sapiens
uucuuugcaugaucucaaaguc

SEQ ID NO: 37620 - RNA, 22 nt, Homo sapiens
uugagaagugucuguucauguc

SEQ ID NO: 37621 - RNA, 22 nt, Homo sapiens
uugagacugagucucgcccugu

SEQ ID NO: 37622 - RNA, 22 nt, Homo sapiens
uugacuucagagcugauucaag

SEQ ID NO: 37623 - RNA, 22 nt, Homo sapiens
uugagauagaauaggaauggga

SEQ ID NO: 37624 - RNA, 22 nt, Homo sapiens
uugagaguggcagagguggaac

SEQ ID NO: 37625 - RNA, 22 nt, Homo sapiens
uugagauauccauaaaugggaa

SEQ ID NO: 37626 - RNA, 22 nt, Homo sapiens
uugagauggagucucacucuuu

SEQ ID NO: 37627 - RNA, 22 nt, Homo sapiens
uugagauggagucucacucugc

SEQ ID NO: 37628 - RNA, 22 nt, Homo sapiens
uugagauggagucucacucuuc

SEQ ID NO: 37629 - RNA, 22 nt, Homo sapiens
uugagcccuggaggcagaggcu

SEQ ID NO: 37630 - RNA, 22 nt, Homo sapiens
uugagcaauccuccugccaugu

SEQ ID NO: 37631 - RNA, 22 nt, Homo sapiens
uugagcacaggaguuugagacc

SEQ ID NO: 37632 - RNA, 22 nt, Homo sapiens
uugagcaccaugccuggccaug

SEQ ID NO: 37633 - RNA, 22 nt, Homo sapiens
uugagauggaguuucacucugu

SEQ ID NO: 37634 - RNA, 22 nt, Homo sapiens
uugagauggaguuucacucuug

SEQ ID NO: 37635 - RNA, 22 nt, Homo sapiens
uugagauguggguuggugacuu

SEQ ID NO: 37636 - RNA, 22 nt, Homo sapiens
uugagauguauguauauaaugu

SEQ ID NO: 37637 - RNA, 22 nt, Homo sapiens
uugaggucagagguucgagacc

SEQ ID NO: 37638 - RNA, 22 nt, Homo sapiens
uugagguaggaggagcuuggau

SEQ ID NO: 37639 - RNA, 22 nt, Homo sapiens
uugagggcugaauaccaaucag

SEQ ID NO: 37640 - RNA, 22 nt, Homo sapiens
uugaggaggcagucugcccauu

SEQ ID NO: 37641 - RNA, 22 nt, Homo sapiens
uugaggaggcagucucuccauu

SEQ ID NO: 37642 - RNA, 20 nt, Homo sapiens
uugcacagagaaggaggcag

SEQ ID NO: 37643 - RNA, 22 nt, Homo sapiens
uugcaagauguucaugggcugu

SEQ ID NO: 37644 - RNA, 22 nt, Homo sapiens
uugcaagaaaucagagccuucc

SEQ ID NO: 37645 - RNA, 22 nt, Homo sapiens
uugcacuccagccuuggggaga

SEQ ID NO: 37646 - RNA, 22 nt, Homo sapiens
uugcacagugcuuucuuugccc

SEQ ID NO: 37647 - RNA, 22 nt, Homo sapiens
uugcacuugcugaggagugauu

SEQ ID NO: 37648 - RNA, 22 nt, Homo sapiens
uugcagagccccacacugggcu

SEQ ID NO: 37649 - RNA, 22 nt, Homo sapiens
ugucuggaaggguggccuccug

SEQ ID NO: 37650 - RNA, 19 nt, Homo sapiens
ugugacugggccagccuag

SEQ ID NO: 37651 - RNA, 22 nt, Homo sapiens
ugugaccaaaaucaacauaccu

SEQ ID NO: 37652 - RNA, 22 nt, Homo sapiens
ugucuuggacuugaaucucauu

SEQ ID NO: 37653 - RNA, 22 nt, Homo sapiens
uguccuggugaugcccaaauuc

SEQ ID NO: 37654 - RNA, 22 nt, Homo sapiens
ugucucagugauuggcuuucug

SEQ ID NO: 37655 - RNA, 22 nt, Homo sapiens
ugucuagaaaagccugccuucu

SEQ ID NO: 37656 - RNA, 19 nt, Homo sapiens
ugugauaguugaaccugcc

SEQ ID NO: 37657 - RNA, 22 nt, Homo sapiens
ugugauggaguuucauggacug

SEQ ID NO: 37658 - RNA, 22 nt, Homo sapiens
ugugaugugaugagaaguuccu

SEQ ID NO: 37659 - RNA, 22 nt, Homo sapiens
ugucacccuuuauccauuuccu

SEQ ID NO: 37660 - RNA, 22 nt, Homo sapiens
ugucaccuugcucauccucgga

SEQ ID NO: 37661 - RNA, 22 nt, Homo sapiens
ugucagcacaacucagguuccu

SEQ ID NO: 37662 - RNA, 22 nt, Homo sapiens
ugucaguguacuguaagaauua

SEQ ID NO: 37663 - RNA, 22 nt, Homo sapiens
ugucaguggucuggaugcagcc

SEQ ID NO: 37664 - RNA, 19 nt, Homo sapiens
ugucccagccauagaggca

SEQ ID NO: 37665 - RNA, 22 nt, Homo sapiens
ugucaaguugugguucaauuuu

SEQ ID NO: 37666 - RNA, 22 nt, Homo sapiens
uguagguguacauacaugguua

SEQ ID NO: 37667 - RNA, 20 nt, Homo sapiens
uguagguguacaguaaggag

SEQ ID NO: 37668 - RNA, 22 nt, Homo sapiens
uguauagaucugauucaucucc

SEQ ID NO: 37669 - RNA, 22 nt, Homo sapiens
uguaaaucuuucacaguugaug

SEQ ID NO: 37670 - RNA, 22 nt, Homo sapiens
uguaauguuugguagguuaggu

SEQ ID NO: 37671 - RNA, 19 nt, Homo sapiens
uguaccagcaagucuuuuc

SEQ ID NO: 37672 - RNA, 22 nt, Homo sapiens
uguacccuuagagagugaucga

SEQ ID NO: 37673 - RNA, 23 nt, Homo sapiens
ugguuuguaagagauggacugga

SEQ ID NO: 37674 - RNA, 15 nt, Homo sapiens
uggugguguugagac

SEQ ID NO: 37675 - RNA, 22 nt, Homo sapiens
ugguggcuuuucguagguucac

SEQ ID NO: 37676 - RNA, 22 nt, Homo sapiens
uggcucauuucuaaacccagcu

SEQ ID NO: 37677 - RNA, 20 nt, Homo sapiens
uggcucuuugcugcuaaagu

SEQ ID NO: 37678 - RNA, 22 nt, Homo sapiens
uggugccgugguccuggggcca

SEQ ID NO: 37679 - RNA, 22 nt, Homo sapiens
uggcuccguuguacaggcugga

SEQ ID NO: 37680 - RNA, 22 nt, Homo sapiens
uggcuaaguuaaucaaggagau

SEQ ID NO: 37681 - RNA, 23 nt, Homo sapiens
uggcuagacguccuuuccugaug

SEQ ID NO: 37682 - RNA, 22 nt, Homo sapiens
uuauagcuaacaucugugaaaa

SEQ ID NO: 37683 - RNA, 22 nt, Homo sapiens
uuauauguuuguacuuaggccu

SEQ ID NO: 37684 - RNA, 22 nt, Homo sapiens
uuagcagcaucccuggccugua

SEQ ID NO: 37685 - RNA, 23 nt, Homo sapiens
uucaccguguuggccaggcuggu

SEQ ID NO: 37686 - RNA, 22 nt, Homo sapiens
uucacagucacccuucuccaug

SEQ ID NO: 37687 - RNA, 22 nt, Homo sapiens
uucacugugaacucauauucag

SEQ ID NO: 37688 - RNA, 22 nt, Homo sapiens
uuaugguuuauuagcaggguua

SEQ ID NO: 37689 - RNA, 22 nt, Homo sapiens
uuauucagcaccugcuguguuc

SEQ ID NO: 37690 - RNA, 22 nt, Homo sapiens
ugugccaaucauagggcuuggu

SEQ ID NO: 37691 - RNA, 22 nt, Homo sapiens
ugugcaaauuagcacaacccga

SEQ ID NO: 37692 - RNA, 22 nt, Homo sapiens
ugugcaaaaacaauugcgguuu

SEQ ID NO: 37693 - RNA, 22 nt, Homo sapiens
ugugucacugcacuccagcgug

SEQ ID NO: 37694 - RNA, 22 nt, Homo sapiens
uguggucaucacuugaagguaa

SEQ ID NO: 37695 - RNA, 22 nt, Homo sapiens
ugugguuuuuuucuccaauagg

SEQ ID NO: 37696 - RNA, 23 nt, Homo sapiens
uuaaggugaugucuuugugccuc

SEQ ID NO: 37697 - RNA, 22 nt, Homo sapiens
uuaaucacagugucuuccuuca

SEQ ID NO: 37698 - RNA, 22 nt, Homo sapiens
uuaauguaauugauugauugac

SEQ ID NO: 37699 - RNA, 22 nt, Homo sapiens
uuacauugcuucaaauucagug

SEQ ID NO: 37700 - RNA, 17 nt, Homo sapiens
uuagagguagacucauu

SEQ ID NO: 37701 - RNA, 23 nt, Homo sapiens
gugccuucugagccuagucucca

SEQ ID NO: 37702 - RNA, 22 nt, Homo sapiens
gugcccacugucuguccuguag

SEQ ID NO: 37703 - RNA, 22 nt, Homo sapiens
gugcaguuuacaguuacccagu

SEQ ID NO: 37704 - RNA, 22 nt, Homo sapiens
gugcaguuugaaaguagaaaca

SEQ ID NO: 37705 - RNA, 23 nt, Homo sapiens
gugcaguggcgagauuucggcuc

SEQ ID NO: 37706 - RNA, 22 nt, Homo sapiens
gugggguaggcaauuccuagug

SEQ ID NO: 37707 - RNA, 22 nt, Homo sapiens
guggcaguuuuaaauaugaaaa

SEQ ID NO: 37708 - RNA, 22 nt, Homo sapiens
guggcaugaaagcagauaccac

SEQ ID NO: 37709 - RNA, 22 nt, Homo sapiens
guggcaugaaagcaucugugau

SEQ ID NO: 37710 - RNA, 22 nt, Homo sapiens
guggcuagaaugaagguagcug

SEQ ID NO: 37711 - RNA, 22 nt, Homo sapiens
gugacgucauuguuccuggcuc

SEQ ID NO: 37712 - RNA, 22 nt, Homo sapiens
gugagacugaguuucgcucuug

SEQ ID NO: 37713 - RNA, 22 nt, Homo sapiens
gugacugcauauaaguguaugu

SEQ ID NO: 37714 - RNA, 22 nt, Homo sapiens
gugacaucagcuccagguauaa

SEQ ID NO: 37715 - RNA, 22 nt, Homo sapiens
gugaauguuuucuuacauggua

SEQ ID NO: 37716 - RNA, 22 nt, Homo sapiens
gugaauugagagaacuguguua

SEQ ID NO: 37717 - RNA, 22 nt, Homo sapiens
gugaaucuguuuucuucuguuc

SEQ ID NO: 37718 - RNA, 22 nt, Homo sapiens
gugagauggagucuugcuuugu

SEQ ID NO: 37719 - RNA, 22 nt, Homo sapiens
gugcaaccaucaccacugacuc

SEQ ID NO: 37720 - RNA, 22 nt, Homo sapiens
gugcaaacuccaggucucuuca

SEQ ID NO: 37721 - RNA, 22 nt, Homo sapiens
gugcaacaugccuggcuaauuu

SEQ ID NO: 37722 - RNA, 22 nt, Homo sapiens
gugcacauuguuuaugucuguu

SEQ ID NO: 37723 - RNA, 22 nt, Homo sapiens
gugcacgucuuaggaggucacg

SEQ ID NO: 37724 - RNA, 22 nt, Homo sapiens
gugcaaugaguguggcaaagcc

SEQ ID NO: 37725 - RNA, 22 nt, Homo sapiens
guacaugcauacaugcacaucu

SEQ ID NO: 37726 - RNA, 22 nt, Homo sapiens
guacaguuuagugcuuugagaa

SEQ ID NO: 37727 - RNA, 22 nt, Homo sapiens
guacacaacaugcagguuuguu

SEQ ID NO: 37728 - RNA, 22 nt, Homo sapiens
guacaaguaagaaaauugccca

SEQ ID NO: 37729 - RNA, 22 nt, Homo sapiens
gucaguggauacugucucuguc

SEQ ID NO: 37730 - RNA, 22 nt, Homo sapiens
gucagugauugauuuaaagacg

SEQ ID NO: 37731 - RNA, 22 nt, Homo sapiens
gucagugucuuugcagcucaga

SEQ ID NO: 37732 - RNA, 22 nt, Homo sapiens
gucauugguucuguuuauguga

SEQ ID NO: 37733 - RNA, 22 nt, Homo sapiens
gucuguuuggggaccuguggcc

SEQ ID NO: 37734 - RNA, 22 nt, Homo sapiens
gucuuuguuuugauuuaccaga

SEQ ID NO: 37735 - RNA, 22 nt, Homo sapiens
gugaaaugaaacgcuaugucuu

SEQ ID NO: 37736 - RNA, 22 nt, Homo sapiens
gugaaguuuuuugcugagaguc

SEQ ID NO: 37737 - RNA, 22 nt, Homo sapiens
gugaagaucccuguccuguucc

SEQ ID NO: 37738 - RNA, 22 nt, Homo sapiens
gugaacuguuugaggaagagaa

SEQ ID NO: 37739 - RNA, 22 nt, Homo sapiens
gggcaacauugaguacccugaa

SEQ ID NO: 37740 - RNA, 22 nt, Homo sapiens
ggcucguguuuucuguccaguu

SEQ ID NO: 37741 - RNA, 22 nt, Homo sapiens
ggcuuuggucacacaggggcaa

SEQ ID NO: 37742 - RNA, 22 nt, Homo sapiens
gggagguagguauuagcuuuuc

SEQ ID NO: 37743 - RNA, 22 nt, Homo sapiens
ggugagaaaaacauagucucag

SEQ ID NO: 37744 - RNA, 21 nt, Homo sapiens
ggugagaaaggagacauagac

SEQ ID NO: 37745 - RNA, 19 nt, Homo sapiens
ggucauggagguuguguga

SEQ ID NO: 37746 - RNA, 22 nt, Homo sapiens
ggucauggauguuuauaguaca

SEQ ID NO: 37747 - RNA, 22 nt, Homo sapiens
gguggcuuuuugugauggcuga

SEQ ID NO: 37748 - RNA, 22 nt, Homo sapiens
ggugcuugaggaacggaggcug

SEQ ID NO: 37749 - RNA, 22 nt, Homo sapiens
ggcaaggugcuacagacaguga

SEQ ID NO: 37750 - RNA, 22 nt, Homo sapiens
ggcaagcucaggccucaggugu

SEQ ID NO: 37751 - RNA, 22 nt, Homo sapiens
ggcaagaaccacaauuacuuuu

SEQ ID NO: 37752 - RNA, 19 nt, Homo sapiens
ggcacugugugagugagga

SEQ ID NO: 37753 - RNA, 22 nt, Homo sapiens
ggcacaauugcagcaauaaaca

SEQ ID NO: 37754 - RNA, 22 nt, Homo sapiens
ggcaaugaggcggaccagcagg

SEQ ID NO: 37755 - RNA, 22 nt, Homo sapiens
ggaguaugaaacccacuccaau

SEQ ID NO: 37756 - RNA, 22 nt, Homo sapiens
ggagucuugcuauguugccaag

SEQ ID NO: 37757 - RNA, 22 nt, Homo sapiens
ggcaagaaccucaauuaccuuu

SEQ ID NO: 37758 - RNA, 22 nt, Homo sapiens
ggagucugacuuauaggaaccu

SEQ ID NO: 37759 - RNA, 22 nt, Homo sapiens
ggagaugugccugcucugcucu

SEQ ID NO: 37760 - RNA, 22 nt, Homo sapiens
ggagauuauugaaucaugaggg

SEQ ID NO: 37761 - RNA, 22 nt, Homo sapiens
ggagcugugauuugaguccaga

SEQ ID NO: 37762 - RNA, 22 nt, Homo sapiens
ggagaucuuguuaaaguacaga

SEQ ID NO: 37763 - RNA, 22 nt, Homo sapiens
ggagaucuuuaggaguuggacu

SEQ ID NO: 37764 - RNA, 22 nt, Homo sapiens
gcuggguucagagugggcugcg

SEQ ID NO: 37765 - RNA, 22 nt, Homo sapiens
gcuggucugccguaguaggugc

SEQ ID NO: 37766 - RNA, 19 nt, Homo sapiens
gcuuagagacaaaacauug

SEQ ID NO: 37767 - RNA, 22 nt, Homo sapiens
gcuuuguugauggugagucugu

SEQ ID NO: 37768 - RNA, 22 nt, Homo sapiens
ggaaauguuuagcauccacuuu

SEQ ID NO: 37769 - RNA, 22 nt, Homo sapiens
ggaaauguuggugucaugaguu

SEQ ID NO: 37770 - RNA, 22 nt, Homo sapiens
ggacugagaggacuacagugua

SEQ ID NO: 37771 - RNA, 22 nt, Homo sapiens
ggacuagggacauggggagcug

SEQ ID NO: 37772 - RNA, 22 nt, Homo sapiens
gcaccauugacaagaaauaggu

SEQ ID NO: 37773 - RNA, 22 nt, Homo sapiens
gcaauguuacugaauguguuuu

SEQ ID NO: 37774 - RNA, 22 nt, Homo sapiens
gcaagugucugagguuuuguau

SEQ ID NO: 37775 - RNA, 22 nt, Homo sapiens
gcucaugagacaagcaggagua

SEQ ID NO: 37776 - RNA, 22 nt, Homo sapiens
gcucaugggcagugugauuguu

SEQ ID NO: 37777 - RNA, 22 nt, Homo sapiens
gcugcuguaccagaugugguua

SEQ ID NO: 37778 - RNA, 22 nt, Homo sapiens
gcugagaucucuugccugaacu

SEQ ID NO: 37779 - RNA, 22 nt, Homo sapiens
gcugagguucaagaagguuaaa

SEQ ID NO: 37780 - RNA, 22 nt, Homo sapiens
gcugagcuaugccauauaugcc

SEQ ID NO: 37781 - RNA, 22 nt, Homo sapiens
guuuugguuauauggaucaguu

SEQ ID NO: 37782 - RNA, 22 nt, Homo sapiens
uaagaugaaggcucaccuagaa

SEQ ID NO: 37783 - RNA, 22 nt, Homo sapiens
uaagagagcuccaucuuuuccu

SEQ ID NO: 37784 - RNA, 22 nt, Homo sapiens
guguaaaucaaucuguugucuu

SEQ ID NO: 37785 - RNA, 22 nt, Homo sapiens
gugguuuuaauauucagucuag

SEQ ID NO: 37786 - RNA, 22 nt, Homo sapiens
guggucagaaaucucaguggca

SEQ ID NO: 37787 - RNA, 22 nt, Homo sapiens
gugguagaaauguagaugcuag

SEQ ID NO: 37788 - RNA, 22 nt, Homo sapiens
guugcucaggcuggagugcagu

SEQ ID NO: 37789 - RNA, 22 nt, Homo sapiens
guugcucaggccggagugcagu

SEQ ID NO: 37790 - RNA, 22 nt, Homo sapiens
uaccacugccgagaaaacagau

SEQ ID NO: 37791 - RNA, 22 nt, Homo sapiens
uaccacauuguagagggcauuc

SEQ ID NO: 37792 - RNA, 22 nt, Homo sapiens
uaccaucauuauacguagaaau

SEQ ID NO: 37793 - RNA, 22 nt, Homo sapiens
uacccgucuacuuugaacaaaa

SEQ ID NO: 37794 - RNA, 22 nt, Homo sapiens
uaccaugcagguguauguuugu

SEQ ID NO: 37795 - RNA, 22 nt, Homo sapiens
uacugcagucagacuccugggc

SEQ ID NO: 37796 - RNA, 22 nt, Homo sapiens
uaccugagacaacuuugaggaa

SEQ ID NO: 37797 - RNA, 22 nt, Homo sapiens
uaccugagcccucugcugaguu

SEQ ID NO: 37798 - RNA, 22 nt, Homo sapiens
uacuggccuugaacucuggugu

SEQ ID NO: 37799 - RNA, 22 nt, Homo sapiens
uacugcuuaagggcaugggccc

SEQ ID NO: 37800 - RNA, 22 nt, Homo sapiens
uagaaaguagggaagguaggau

SEQ ID NO: 37801 - RNA, 22 nt, Homo sapiens
uacaguggugugaucucagcuc

SEQ ID NO: 37802 - RNA, 22 nt, Homo sapiens
uacagguaugugucuauauaca

SEQ ID NO: 37803 - RNA, 19 nt, Homo sapiens
uacaguacacaacaccuuu

SEQ ID NO: 37804 - RNA, 19 nt, Homo sapiens
uacaggacugagcugaggu

SEQ ID NO: 37805 - RNA, 22 nt, Homo sapiens
uauggguuucagagggugauag

SEQ ID NO: 37806 - RNA, 22 nt, Homo sapiens
uaugggucuuaaaucacuuagu

SEQ ID NO: 37807 - RNA, 22 nt, Homo sapiens
uauggccuuuuuaaugauauug

SEQ ID NO: 37808 - RNA, 22 nt, Homo sapiens
uauggcauuauuuugauagaca

SEQ ID NO: 37809 - RNA, 22 nt, Homo sapiens
uauggcauuguuggugaugaua

SEQ ID NO: 37810 - RNA, 22 nt, Homo sapiens
uaugacuuguuuucuggucugc

SEQ ID NO: 37811 - RNA, 22 nt, Homo sapiens
uauaaugcacauucccaaaucu

SEQ ID NO: 37812 - RNA, 22 nt, Homo sapiens
uauaccacugauuuuauucuga

SEQ ID NO: 37813 - RNA, 19 nt, Homo sapiens
uaucaaguaugcacuguac

SEQ ID NO: 37814 - RNA, 22 nt, Homo sapiens
uaggaaugaacgauuuauuggu

SEQ ID NO: 37815 - RNA, 22 nt, Homo sapiens
uaggacacagaccuggauggaa

SEQ ID NO: 37816 - RNA, 22 nt, Homo sapiens
uaggcacacaucuacuacaaau

SEQ ID NO: 37817 - RNA, 20 nt, Homo sapiens
uaggagcaaugagaguagaa

SEQ ID NO: 37818 - RNA, 22 nt, Homo sapiens
uagcugcccagcacgaaguugg

SEQ ID NO: 37819 - RNA, 22 nt, Homo sapiens
uagcuggaguuuuuguuauagg

SEQ ID NO: 37820 - RNA, 22 nt, Homo sapiens
uagcugguucuccaggagcuag

SEQ ID NO: 37821 - RNA, 22 nt, Homo sapiens
uagaauggaagguugagaagaa

SEQ ID NO: 37822 - RNA, 22 nt, Homo sapiens
uagcaguucauuguugugugaa

SEQ ID NO: 37823 - RNA, 22 nt, Homo sapiens
uagcagucaagauagucauuau

SEQ ID NO: 37824 - RNA, 22 nt, Homo sapiens
uagcaucagauuccauauucua

SEQ ID NO: 37825 - RNA, 22 nt, Homo sapiens
uagcauccuucucuaaacagga

SEQ ID NO: 37826 - RNA, 22 nt, Homo sapiens
uagcucagcccagcuaagcuca

SEQ ID NO: 37827 - RNA, 20 nt, Homo sapiens
uagccggguguugugucaug

SEQ ID NO: 37828 - RNA, 22 nt, Homo sapiens
uaguggucccccagucccagcu

SEQ ID NO: 37829 - RNA, 22 nt, Homo sapiens
uaguggauguucagagauuuga

SEQ ID NO: 37830 - RNA, 22 nt, Homo sapiens
uagugcugugauuaacauaaug

SEQ ID NO: 37831 - RNA, 20 nt, Homo sapiens
uaguuggugauacagugcau

SEQ ID NO: 37832 - RNA, 22 nt, Homo sapiens
uagguaucuugguauaucagga

SEQ ID NO: 37833 - RNA, 22 nt, Homo sapiens
uagguagaacccagaaaucuga

SEQ ID NO: 37834 - RNA, 22 nt, Homo sapiens
uaggugaauguaguaagguguu

SEQ ID NO: 37835 - RNA, 22 nt, Homo sapiens
uaggcuuuucugggaugugggc

SEQ ID NO: 37836 - RNA, 22 nt, Homo sapiens
uagggcuugugaucagguguag

SEQ ID NO: 37837 - RNA, 22 nt, Homo sapiens
ugagauguaaucucgcucuguc

SEQ ID NO: 37838 - RNA, 22 nt, Homo sapiens
ugagauggaucuuggauuugaa

SEQ ID NO: 37839 - RNA, 22 nt, Homo sapiens
ugagauggcugaauucagaaua

SEQ ID NO: 37840 - RNA, 22 nt, Homo sapiens
ugagaugauuuaauggagccca

SEQ ID NO: 37841 - RNA, 22 nt, Homo sapiens
ugagauggagucuugucgccua

SEQ ID NO: 37842 - RNA, 22 nt, Homo sapiens
ugagaugaucaaaguauaggcu

SEQ ID NO: 37843 - RNA, 22 nt, Homo sapiens
ugagacugauaggacauuuucu

SEQ ID NO: 37844 - RNA, 21 nt, Homo sapiens
ugagaguaguguauuauucuc

SEQ ID NO: 37845 - RNA, 19 nt, Homo sapiens
ugagagcacaacugaacaa

SEQ ID NO: 37846 - RNA, 22 nt, Homo sapiens
ugagacugaguuuugcucguug

SEQ ID NO: 37847 - RNA, 22 nt, Homo sapiens
ugagacugguaauguguagggc

SEQ ID NO: 37848 - RNA, 22 nt, Homo sapiens
ugagacugaguuuugcucuugu

SEQ ID NO: 37849 - RNA, 22 nt, Homo sapiens
ugagacugaguuucacuuuugu

SEQ ID NO: 37850 - RNA, 22 nt, Homo sapiens
ugagacugagucuugcucuauu

SEQ ID NO: 37851 - RNA, 22 nt, Homo sapiens
ugagacugagucuugcucuugu

SEQ ID NO: 37852 - RNA, 22 nt, Homo sapiens
ugacagcugaggcccagaguac

SEQ ID NO: 37853 - RNA, 22 nt, Homo sapiens
ugacagagaagcauugaguuca

SEQ ID NO: 37854 - RNA, 23 nt, Homo sapiens
ugacagugcuugaaauugcucuu

SEQ ID NO: 37855 - RNA, 22 nt, Homo sapiens
ugagauuauauuucuuaacaga

SEQ ID NO: 37856 - RNA, 22 nt, Homo sapiens
ugagauuaucuugaucuugaaa

SEQ ID NO: 37857 - RNA, 23 nt, Homo sapiens
ugagguguuaagcagacuugucu

SEQ ID NO: 37858 - RNA, 23 nt, Homo sapiens
ugagaugucugauugcgaggguc

SEQ ID NO: 37859 - RNA, 22 nt, Homo sapiens
ugagauggguucugguccccug

SEQ ID NO: 37860 - RNA, 22 nt, Homo sapiens
ugagauggcuuuauugcugaau

SEQ ID NO: 37861 - RNA, 22 nt, Homo sapiens
ugagauggguaauuaaauggug

SEQ ID NO: 37862 - RNA, 21 nt, Homo sapiens
ugagaugugaccagggcauca

SEQ ID NO: 37863 - RNA, 22 nt, Homo sapiens
ugaguagauccaagacuguccu

SEQ ID NO: 37864 - RNA, 22 nt, Homo sapiens
ugaguagaagugaagauagugg

SEQ ID NO: 37865 - RNA, 22 nt, Homo sapiens
ugaguagaacuagucuagagcu

SEQ ID NO: 37866 - RNA, 22 nt, Homo sapiens
ugauccagugcucaguuggagu

SEQ ID NO: 37867 - RNA, 22 nt, Homo sapiens
ugaguguguaugugcauacaca

SEQ ID NO: 37868 - RNA, 22 nt, Homo sapiens
ugagucagucucacucugcugc

SEQ ID NO: 37869 - RNA, 22 nt, Homo sapiens
ugagugagguucuacucuguga

SEQ ID NO: 37870 - RNA, 22 nt, Homo sapiens
ugagugccuggagggcagggac

SEQ ID NO: 37871 - RNA, 22 nt, Homo sapiens
ugaguggagaucgcaccauugc

SEQ ID NO: 37872 - RNA, 22 nt, Homo sapiens
ugagucuguuccaaagaaauaa

SEQ ID NO: 37873 - RNA, 22 nt, Homo sapiens
ugaucucauuagcaccuuuagc

SEQ ID NO: 37874 - RNA, 22 nt, Homo sapiens
ugauugacauacauaggugugg

SEQ ID NO: 37875 - RNA, 22 nt, Homo sapiens
ugcaaagucgaaacugcaguuu

SEQ ID NO: 37876 - RNA, 22 nt, Homo sapiens
ugcaaagaaauuuuggugacca

SEQ ID NO: 37877 - RNA, 22 nt, Homo sapiens
ugcaacacauugccccugcucu

SEQ ID NO: 37878 - RNA, 22 nt, Homo sapiens
ugcaaauguuaggugucauuau

SEQ ID NO: 37879 - RNA, 22 nt, Homo sapiens
ugcauguucuuacucauacaug

SEQ ID NO: 37880 - RNA, 20 nt, Homo sapiens
ugcauguccucacuuacuug

SEQ ID NO: 37881 - RNA, 22 nt, Homo sapiens
ugcaauagcuucaggagaaggg

SEQ ID NO: 37882 - RNA, 22 nt, Homo sapiens
ugcaagaaacauauuccacaag

SEQ ID NO: 37883 - RNA, 22 nt, Homo sapiens
ugcgauaguuugcugguaaauu

SEQ ID NO: 37884 - RNA, 22 nt, Homo sapiens
ugccuggagagcuccuacauau

SEQ ID NO: 37885 - RNA, 20 nt, Homo sapiens
ugccaagaugacuauagcuc

SEQ ID NO: 37886 - RNA, 19 nt, Homo sapiens
ugccaagaaagucagcuua

SEQ ID NO: 37887 - RNA, 21 nt, Homo sapiens
ugcauuggagaauguuucuca

SEQ ID NO: 37888 - RNA, 22 nt, Homo sapiens
ugcauuaucagauguuugcuuu

SEQ ID NO: 37889 - RNA, 21 nt, Homo sapiens
ugcuacugucacuuccuuugu

SEQ ID NO: 37890 - RNA, 22 nt, Homo sapiens
ugccagagacguagggaauauu

SEQ ID NO: 37891 - RNA, 22 nt, Homo sapiens
ugcgccauugcauuccagccug

SEQ ID NO: 37892 - RNA, 22 nt, Homo sapiens
ugcgccauugaacuccaggcug

SEQ ID NO: 37893 - RNA, 22 nt, Homo sapiens
ugcgccauugcacucuagccug

SEQ ID NO: 37894 - RNA, 19 nt, Homo sapiens
ugcugcauugugaccuugc

SEQ ID NO: 37895 - RNA, 22 nt, Homo sapiens
ugcugcauuggggauuaaguuu

SEQ ID NO: 37896 - RNA, 18 nt, Homo sapiens
ugcuccccugggugagca

SEQ ID NO: 37897 - RNA, 20 nt, Homo sapiens
uggaaugcagccuccuucug

SEQ ID NO: 37898 - RNA, 19 nt, Homo sapiens
uggaaugaaauguuagggg

SEQ ID NO: 37899 - RNA, 21 nt, Homo sapiens
uggaaugaauggccaacaugg

SEQ ID NO: 37900 - RNA, 18 nt, Homo sapiens
uggaauguuuggguuaau

SEQ ID NO: 37901 - RNA, 22 nt, Homo sapiens
ugcuguuguuugaugaaguaau

SEQ ID NO: 37902 - RNA, 22 nt, Homo sapiens
uggaaggcuucauauguaaaga

SEQ ID NO: 37903 - RNA, 22 nt, Homo sapiens
uggaagguaaguuuugagcauu

SEQ ID NO: 37904 - RNA, 19 nt, Homo sapiens
ugcuuaguuuuauguguaa

SEQ ID NO: 37905 - RNA, 22 nt, Homo sapiens
ugcuggcguuacucuccaucag

SEQ ID NO: 37906 - RNA, 22 nt, Homo sapiens
ugcuggugucaucaaggcuuug

SEQ ID NO: 37907 - RNA, 19 nt, Homo sapiens
uggcaaugucagcagagau

SEQ ID NO: 37908 - RNA, 19 nt, Homo sapiens
uggcacauguauacauaug

SEQ ID NO: 37909 - RNA, 22 nt, Homo sapiens
uggcccccucccaaaucucaua

SEQ ID NO: 37910 - RNA, 22 nt, Homo sapiens
uggccuguaacccucucauagg

SEQ ID NO: 37911 - RNA, 22 nt, Homo sapiens
uggccuguaacgcugucucagc

SEQ ID NO: 37912 - RNA, 22 nt, Homo sapiens
uggcaguuuacaaaugccauga

SEQ ID NO: 37913 - RNA, 22 nt, Homo sapiens
uggccaguuuuuaauugggucu

SEQ ID NO: 37914 - RNA, 22 nt, Homo sapiens
uggcaguuucacauggcucaac

SEQ ID NO: 37915 - RNA, 22 nt, Homo sapiens
uggcagauggugacaccauuag

SEQ ID NO: 37916 - RNA, 22 nt, Homo sapiens
uggcagcgcaguugaaaaagaa

SEQ ID NO: 37917 - RNA, 22 nt, Homo sapiens
uggcaagagcaaaauguacagu

SEQ ID NO: 37918 - RNA, 23 nt, Homo sapiens
uggcaagauuuguauugccugga

SEQ ID NO: 37919 - RNA, 22 nt, Homo sapiens
uggcaagcaggacuaaagcacc

SEQ ID NO: 37920 - RNA, 21 nt, Homo sapiens
uggaugccuaggcagaaguuu

SEQ ID NO: 37921 - RNA, 21 nt, Homo sapiens
uggagugaagaguuuauugac

SEQ ID NO: 37922 - RNA, 22 nt, Homo sapiens
uggaguguguuaacuuuacaag

SEQ ID NO: 37923 - RNA, 22 nt, Homo sapiens
uggaguguagaagccagccucc

SEQ ID NO: 37924 - RNA, 22 nt, Homo sapiens
uggauagaaauguacuguuuuc

SEQ ID NO: 37925 - RNA, 22 nt, Homo sapiens
ucacagucaaaguaaucauaga

SEQ ID NO: 37926 - RNA, 21 nt, Homo sapiens
ucacagccuaggaccugaaga

SEQ ID NO: 37927 - RNA, 22 nt, Homo sapiens
ucacagaugaggcgagaggcag

SEQ ID NO: 37928 - RNA, 22 nt, Homo sapiens
ucaaagacacacaaggagaagg

SEQ ID NO: 37929 - RNA, 22 nt, Homo sapiens
ucaaacugcuugaggccauuua

SEQ ID NO: 37930 - RNA, 22 nt, Homo sapiens
ucacacugaauuugaagcaaug

SEQ ID NO: 37931 - RNA, 22 nt, Homo sapiens
ucaaacauccccaccagggacu

SEQ ID NO: 37932 - RNA, 22 nt, Homo sapiens
ucacagucuccucuagggaggg

SEQ ID NO: 37933 - RNA, 22 nt, Homo sapiens
ucacaguguuaaaccuuucuuu

SEQ ID NO: 37934 - RNA, 20 nt, Homo sapiens
ucacauccucucccaacaug

SEQ ID NO: 37935 - RNA, 22 nt, Homo sapiens
ucacaguuggccuggccuuuua

SEQ ID NO: 37936 - RNA, 21 nt, Homo sapiens
ucacauggccagaguaggaac

SEQ ID NO: 37937 - RNA, 18 nt, Homo sapiens
ucacauggccgagagaga

SEQ ID NO: 37938 - RNA, 22 nt, Homo sapiens
ucacauggggaagggacuagcu

SEQ ID NO: 37939 - RNA, 22 nt, Homo sapiens
ucacuggacagaaauaaaggug

SEQ ID NO: 37940 - RNA, 19 nt, Homo sapiens
ucacuggacagcacacuca

SEQ ID NO: 37941 - RNA, 22 nt, Homo sapiens
ucacugugguuuugaugugcau

SEQ ID NO: 37942 - RNA, 21 nt, Homo sapiens
ucacugagcaucaugguuuca

SEQ ID NO: 37943 - RNA, 22 nt, Homo sapiens
ucacugaaaccuccaccucucg

SEQ ID NO: 37944 - RNA, 22 nt, Homo sapiens
ucacugcgaccuccaccucccg

SEQ ID NO: 37945 - RNA, 22 nt, Homo sapiens
ucacugcacuagguaaugccac

SEQ ID NO: 37946 - RNA, 22 nt, Homo sapiens
ucaccaccugcugaucauagag

SEQ ID NO: 37947 - RNA, 22 nt, Homo sapiens
ucaccaccugcugauuguagag

SEQ ID NO: 37948 - RNA, 22 nt, Homo sapiens
ucaucaguggggaugugguuga

SEQ ID NO: 37949 - RNA, 22 nt, Homo sapiens
ucaucaguuuuuuauaugugau

SEQ ID NO: 37950 - RNA, 22 nt, Homo sapiens
ucaucagaaucccuuagggaug

SEQ ID NO: 37951 - RNA, 22 nt, Homo sapiens
ucaucagaguuuacaagcucag

SEQ ID NO: 37952 - RNA, 22 nt, Homo sapiens
ucauggcauuguuaaggguuuu

SEQ ID NO: 37953 - RNA, 22 nt, Homo sapiens
ucaugucuuguuguauuuauuu

SEQ ID NO: 37954 - RNA, 22 nt, Homo sapiens
uccauguagaagacaggggaga

SEQ ID NO: 37955 - RNA, 22 nt, Homo sapiens
uccaugagaauaguuaggcucu

SEQ ID NO: 37956 - RNA, 22 nt, Homo sapiens
uccauguaguugagcggcuuug

SEQ ID NO: 37957 - RNA, 22 nt, Homo sapiens
uccauugucuagauguaacaca

SEQ ID NO: 37958 - RNA, 18 nt, Homo sapiens
uccaguuuucccagcauc

SEQ ID NO: 37959 - RNA, 22 nt, Homo sapiens
uccaguguuauaauaugcgucu

SEQ ID NO: 37960 - RNA, 22 nt, Homo sapiens
ucauugcacucccagacacccu

SEQ ID NO: 37961 - RNA, 22 nt, Homo sapiens
ucaggcaugcagcaaugcagug

SEQ ID NO: 37962 - RNA, 20 nt, Homo sapiens
ucaggcuccgcauuaacuua

SEQ ID NO: 37963 - RNA, 22 nt, Homo sapiens
ucaggcacucagcuuagagucu

SEQ ID NO: 37964 - RNA, 22 nt, Homo sapiens
ucaggcaccuuccucuuaucug

SEQ ID NO: 37965 - RNA, 22 nt, Homo sapiens
ucagaacugauacuagaacuuu

SEQ ID NO: 37966 - RNA, 20 nt, Homo sapiens
ucagguagggcuucaacauu

SEQ ID NO: 37967 - RNA, 22 nt, Homo sapiens
ucaggugccuuggcuaauuguu

SEQ ID NO: 37968 - RNA, 22 nt, Homo sapiens
ucagguccuuacugugcucccu

SEQ ID NO: 37969 - RNA, 22 nt, Homo sapiens
ucauacaguaguccucacuugu

SEQ ID NO: 37970 - RNA, 22 nt, Homo sapiens
ucauaaaguuguuuuaauggga

SEQ ID NO: 37971 - RNA, 22 nt, Homo sapiens
ucaguagagacaggauuucacc

SEQ ID NO: 37972 - RNA, 22 nt, Homo sapiens
ucugacuagacaagcaguguac

SEQ ID NO: 37973 - RNA, 22 nt, Homo sapiens
ucucugauuaaacaagauagug

SEQ ID NO: 37974 - RNA, 16 nt, Homo sapiens
ucccaccauugcuugu

SEQ ID NO: 37975 - RNA, 22 nt, Homo sapiens
ucccacugucuucucgugcucg

SEQ ID NO: 37976 - RNA, 22 nt, Homo sapiens
ucucaguggcacccccaacacc

SEQ ID NO: 37977 - RNA, 22 nt, Homo sapiens
ucucaguggcuuccucacuuuu

SEQ ID NO: 37978 - RNA, 22 nt, Homo sapiens
ucucuagagagccugguguuca

SEQ ID NO: 37979 - RNA, 22 nt, Homo sapiens
ucucauggagucaggagcagaa

SEQ ID NO: 37980 - RNA, 22 nt, Homo sapiens
ucucauagaggcagagaguaaa

SEQ ID NO: 37981 - RNA, 20 nt, Homo sapiens
ucucauagagguagagaaua

SEQ ID NO: 37982 - RNA, 22 nt, Homo sapiens
ucucaugaagguggagaguagg

SEQ ID NO: 37983 - RNA, 20 nt, Homo sapiens
ucucauggagggaaagagca

SEQ ID NO: 37984 - RNA, 20 nt, Homo sapiens
ucucauggagguagagaaua

SEQ ID NO: 37985 - RNA, 22 nt, Homo sapiens
ucucaugaagauagagaauaga

SEQ ID NO: 37986 - RNA, 22 nt, Homo sapiens
ucucauggagguagagaguaaa

SEQ ID NO: 37987 - RNA, 22 nt, Homo sapiens
ucuggugugcucuggacuugca

SEQ ID NO: 37988 - RNA, 22 nt, Homo sapiens
ucuguaguuaacagcuucagcu

SEQ ID NO: 37989 - RNA, 22 nt, Homo sapiens
ucuggcaagagccgagggcagu

SEQ ID NO: 37990 - RNA, 22 nt, Homo sapiens
ucuggcacugaugugggaugcu

SEQ ID NO: 37991 - RNA, 20 nt, Homo sapiens
ucuggccccuccaaaucuca

SEQ ID NO: 37992 - RNA, 21 nt, Homo sapiens
ucuggccccuccaaaucucau

SEQ ID NO: 37993 - RNA, 22 nt, Homo sapiens
ucugccacugucauugugugau

SEQ ID NO: 37994 - RNA, 22 nt, Homo sapiens
ucugaguggcagaaugagcuga

SEQ ID NO: 37995 - RNA, 20 nt, Homo sapiens
ucugauugcaacugcaugag

SEQ ID NO: 37996 - RNA, 22 nt, Homo sapiens
ucugcaagucuaaacuagccau

SEQ ID NO: 37997 - RNA, 22 nt, Homo sapiens
ucuggccccucccaaaucucau

SEQ ID NO: 37998 - RNA, 22 nt, Homo sapiens
ucuggccccucucaaaucucau

SEQ ID NO: 37999 - RNA, 22 nt, Homo sapiens
ugaaugcuaaaggaaaacagua

SEQ ID NO: 38000 - RNA, 22 nt, Homo sapiens
ugaauguccauugauguuuuga

SEQ ID NO: 38001 - RNA, 22 nt, Homo sapiens
ugacaagagaccccuccgcagg

SEQ ID NO: 38002 - RNA, 22 nt, Homo sapiens
ugaacacaucuccugguaccug

SEQ ID NO: 38003 - RNA, 22 nt, Homo sapiens
ugaauagacacuaaagacugua

SEQ ID NO: 38004 - RNA, 22 nt, Homo sapiens
ugaaauguguuaucugggccug

SEQ ID NO: 38005 - RNA, 22 nt, Homo sapiens
ucuguggucagaguccuuggcc

SEQ ID NO: 38006 - RNA, 19 nt, Homo sapiens
ucugugcuugucccccugu

SEQ ID NO: 38007 - RNA, 22 nt, Homo sapiens
ucugugcauuguaggauguuua

SEQ ID NO: 38008 - RNA, 20 nt, Homo sapiens
ucuuucgguuaccaggcagu

SEQ ID NO: 38009 - RNA, 22 nt, Homo sapiens
ucuuugagugcccugagucccu

SEQ ID NO: 38010 - RNA, 22 nt, Homo sapiens
ccccggguggauguacauguga

SEQ ID NO: 38011 - RNA, 22 nt, Homo sapiens
ccagcaccauuuguugaauagg

SEQ ID NO: 38012 - RNA, 22 nt, Homo sapiens
ccccauuugaacuccuucaacu

SEQ ID NO: 38013 - RNA, 22 nt, Homo sapiens
cccgugucuuggucuagggccu

SEQ ID NO: 38014 - RNA, 22 nt, Homo sapiens
cccugaagacuccaccgucaug

SEQ ID NO: 38015 - RNA, 22 nt, Homo sapiens
cccugaagaaagccuaggacau

SEQ ID NO: 38016 - RNA, 22 nt, Homo sapiens
ccagaguugccucagguuucug

SEQ ID NO: 38017 - RNA, 22 nt, Homo sapiens
ccacauuggaaaggaucccccc

SEQ ID NO: 38018 - RNA, 22 nt, Homo sapiens
ccaaggcacugauucuguacuc

SEQ ID NO: 38019 - RNA, 22 nt, Homo sapiens
ccaaguguuuucauuguuccau

SEQ ID NO: 38020 - RNA, 22 nt, Homo sapiens
cauggcacuggugggagugucu

SEQ ID NO: 38021 - RNA, 22 nt, Homo sapiens
cauggcacauauauaucuaggu

SEQ ID NO: 38022 - RNA, 22 nt, Homo sapiens
cauggcacaucuuuucugacua

SEQ ID NO: 38023 - RNA, 22 nt, Homo sapiens
caugccacugcacgccauccug

SEQ ID NO: 38024 - RNA, 22 nt, Homo sapiens
caugccacugcacuccaaccug

SEQ ID NO: 38025 - RNA, 22 nt, Homo sapiens
caugccacuguggacaaagaca

SEQ ID NO: 38026 - RNA, 22 nt, Homo sapiens
cuaagggaggaagcugugcagg

SEQ ID NO: 38027 - RNA, 22 nt, Homo sapiens
cggaaugaaaauguccuucagu

SEQ ID NO: 38028 - RNA, 22 nt, Homo sapiens
cgugaauguuuuggucuuucac

SEQ ID NO: 38029 - RNA, 22 nt, Homo sapiens
ccuuuguggggcgguggguaau

SEQ ID NO: 38030 - RNA, 22 nt, Homo sapiens
cgccgggggaugggcaccagcg

SEQ ID NO: 38031 - RNA, 22 nt, Homo sapiens
cccugagaaaacuuuguccuua

SEQ ID NO: 38032 - RNA, 22 nt, Homo sapiens
cccugagagcagggucuuucuc

SEQ ID NO: 38033 - RNA, 22 nt, Homo sapiens
cccuggacacacacuuuuauuc

SEQ ID NO: 38034 - RNA, 22 nt, Homo sapiens
cccuggacauucaucauuaugu

SEQ ID NO: 38035 - RNA, 19 nt, Homo sapiens
cccuggcacauggaaaaug

SEQ ID NO: 38036 - RNA, 22 nt, Homo sapiens
ccggcugugugacugugggcag

SEQ ID NO: 38037 - RNA, 22 nt, Homo sapiens
caguagcaugccucagaaugag

SEQ ID NO: 38038 - RNA, 22 nt, Homo sapiens
caggugcuuacuuaauagccau

SEQ ID NO: 38039 - RNA, 22 nt, Homo sapiens
cagucacagugacaggaugugg

SEQ ID NO: 38040 - RNA, 22 nt, Homo sapiens
caggcacgcuugggagacacac

SEQ ID NO: 38041 - RNA, 22 nt, Homo sapiens
caggcaaggugaaguguacugg

SEQ ID NO: 38042 - RNA, 22 nt, Homo sapiens
cagguacuucugggcugagcag

SEQ ID NO: 38043 - RNA, 23 nt, Homo sapiens
cagguaguucuuuauaguagugu

SEQ ID NO: 38044 - RNA, 22 nt, Homo sapiens
caggugguauuugguuuucugu

SEQ ID NO: 38045 - RNA, 23 nt, Homo sapiens
cagcuggugauuuuaaguugaag

SEQ ID NO: 38046 - RNA, 22 nt, Homo sapiens
cagcuggugggagcuggguucc

SEQ ID NO: 38047 - RNA, 22 nt, Homo sapiens
caccacauuccauugaucaggc

SEQ ID NO: 38048 - RNA, 22 nt, Homo sapiens
caccacagccauuauugucccc

SEQ ID NO: 38049 - RNA, 22 nt, Homo sapiens
caccaggugcccagcacggcca

SEQ ID NO: 38050 - RNA, 22 nt, Homo sapiens
cagcugcuuuggaaaauauuuu

SEQ ID NO: 38051 - RNA, 22 nt, Homo sapiens
cagugucugcauuuggaacuca

SEQ ID NO: 38052 - RNA, 22 nt, Homo sapiens
caguguuuuuaacaggugcccg

SEQ ID NO: 38053 - RNA, 22 nt, Homo sapiens
caguucaugguaggcaccauag

SEQ ID NO: 38054 - RNA, 22 nt, Homo sapiens
cauacaagcuacaaucacaaag

SEQ ID NO: 38055 - RNA, 18 nt, Homo sapiens
cagugcaauacaggagag

SEQ ID NO: 38056 - RNA, 22 nt, Homo sapiens
caucagagugagauauaagauc

SEQ ID NO: 38057 - RNA, 19 nt, Homo sapiens
caucccugagcugaagugg

SEQ ID NO: 38058 - RNA, 22 nt, Homo sapiens
caucgcacuccagccuggguaa

SEQ ID NO: 38059 - RNA, 22 nt, Homo sapiens
caucagauugagaucaucuaag

SEQ ID NO: 38060 - RNA, 22 nt, Homo sapiens
cauauaguaggugcucuguguu

SEQ ID NO: 38061 - RNA, 22 nt, Homo sapiens
caaaggcuucugaaacugcaga

SEQ ID NO: 38062 - RNA, 22 nt, Homo sapiens
caaaggcuuccacugcauccuu

SEQ ID NO: 38063 - RNA, 22 nt, Homo sapiens
caaagugcugaaagaggccagg

SEQ ID NO: 38064 - RNA, 20 nt, Homo sapiens
auuguccuugauuacacaga

SEQ ID NO: 38065 - RNA, 22 nt, Homo sapiens
cacauagcuagucaguagugaa

SEQ ID NO: 38066 - RNA, 23 nt, Homo sapiens
cacagggugaacaccccuaaucc

SEQ ID NO: 38067 - RNA, 22 nt, Homo sapiens
cacaggucauccuggaucaagg

SEQ ID NO: 38068 - RNA, 22 nt, Homo sapiens
cacauguuuuagcauggcuguu

SEQ ID NO: 38069 - RNA, 22 nt, Homo sapiens
cacauugaauuucugaugacaa

SEQ ID NO: 38070 - RNA, 22 nt, Homo sapiens
caaauugcuuguggaggauaau

SEQ ID NO: 38071 - RNA, 22 nt, Homo sapiens
auugucacccgggcaguaagca

SEQ ID NO: 38072 - RNA, 22 nt, Homo sapiens
auuguaguacauuuggugguca

SEQ ID NO: 38073 - RNA, 22 nt, Homo sapiens
auugucccucuuaaucccagca

SEQ ID NO: 38074 - RNA, 23 nt, Homo sapiens
auugcagaaucacagagguagug

SEQ ID NO: 38075 - RNA, 22 nt, Homo sapiens
augugccauucucauggcgcuu

SEQ ID NO: 38076 - RNA, 22 nt, Homo sapiens
auguggcuuuucaacuguguga

SEQ ID NO: 38077 - RNA, 22 nt, Homo sapiens
auggcccccuguuugugaacau

SEQ ID NO: 38078 - RNA, 22 nt, Homo sapiens
auggcccugaguucaauauauu

SEQ ID NO: 38079 - RNA, 22 nt, Homo sapiens
auggccgggugcgguggcucac

SEQ ID NO: 38080 - RNA, 23 nt, Homo sapiens
auggcccuggugggagugucuuu

SEQ ID NO: 38081 - RNA, 22 nt, Homo sapiens
auggcccuguguggagcugcug

SEQ ID NO: 38082 - RNA, 22 nt, Homo sapiens
auggccugaugcaccuguccca

SEQ ID NO: 38083 - RNA, 22 nt, Homo sapiens
auggcucuguuccaugugucuu

SEQ ID NO: 38084 - RNA, 22 nt, Homo sapiens
auggcucuguuuuuuaugcucu

SEQ ID NO: 38085 - RNA, 22 nt, Homo sapiens
auguuugguagugaauauggua

SEQ ID NO: 38086 - RNA, 22 nt, Homo sapiens
auguuugguaagaauauuguua

SEQ ID NO: 38087 - RNA, 22 nt, Homo sapiens
auguuuagagagggugucaaau

SEQ ID NO: 38088 - RNA, 22 nt, Homo sapiens
auguuaacaucuuaguuuucau

SEQ ID NO: 38089 - RNA, 23 nt, Homo sapiens
augugguuuuagguguugaacug

SEQ ID NO: 38090 - RNA, 19 nt, Homo sapiens
augugguuagcaugacugc

SEQ ID NO: 38091 - RNA, 22 nt, Homo sapiens
auuacauagucaaggugucuca

SEQ ID NO: 38092 - RNA, 22 nt, Homo sapiens
auuaagugcuugcagaagucca

SEQ ID NO: 38093 - RNA, 22 nt, Homo sapiens
gacuggccauugauacagaggu

SEQ ID NO: 38094 - RNA, 16 nt, Homo sapiens
gacugggcugaggaau

SEQ ID NO: 38095 - RNA, 22 nt, Homo sapiens
gacuggguuaguuugaaagacu

SEQ ID NO: 38096 - RNA, 22 nt, Homo sapiens
gacugcagugcagcuguuaggc

SEQ ID NO: 38097 - RNA, 20 nt, Homo sapiens
gacauggaggaggauuauua

SEQ ID NO: 38098 - RNA, 20 nt, Homo sapiens
gacauguugguuugcugcac

SEQ ID NO: 38099 - RNA, 22 nt, Homo sapiens
gacagguuuucuguuucugaaa

SEQ ID NO: 38100 - RNA, 22 nt, Homo sapiens
gacaccugguguggaacuggag

SEQ ID NO: 38101 - RNA, 19 nt, Homo sapiens
gacaugagauuuggugggg

SEQ ID NO: 38102 - RNA, 23 nt, Homo sapiens
cuuuguccccacccaaaucucau

SEQ ID NO: 38103 - RNA, 22 nt, Homo sapiens
cuuugugcccuucugcccauca

SEQ ID NO: 38104 - RNA, 22 nt, Homo sapiens
gagauaaauaggucacaguucu

SEQ ID NO: 38105 - RNA, 22 nt, Homo sapiens
gagagugcuuuggguguaggcc

SEQ ID NO: 38106 - RNA, 22 nt, Homo sapiens
gagaucauguacuagaacaccu

SEQ ID NO: 38107 - RNA, 22 nt, Homo sapiens
gagaucauucugauccagaguc

SEQ ID NO: 38108 - RNA, 22 nt, Homo sapiens
gagauggagacuuggccuuaaa

SEQ ID NO: 38109 - RNA, 22 nt, Homo sapiens
gagaugcaccuugucacguuuc

SEQ ID NO: 38110 - RNA, 22 nt, Homo sapiens
gagaacaguguuguauuuuuuc

SEQ ID NO: 38111 - RNA, 22 nt, Homo sapiens
gagaacugagauaagugauauu

SEQ ID NO: 38112 - RNA, 21 nt, Homo sapiens
gagaaucaucauggcugcaua

SEQ ID NO: 38113 - RNA, 22 nt, Homo sapiens
gagacggagucucgcucugucg

SEQ ID NO: 38114 - RNA, 22 nt, Homo sapiens
gagacggagucuugcucuguug

SEQ ID NO: 38115 - RNA, 22 nt, Homo sapiens
gagagcuaggccacuggggcuu

SEQ ID NO: 38116 - RNA, 22 nt, Homo sapiens
gaucccauuggcugccaugugg

SEQ ID NO: 38117 - RNA, 22 nt, Homo sapiens
gaugguguuuugauaggaauug

SEQ ID NO: 38118 - RNA, 22 nt, Homo sapiens
gauggugucccaggcucaggcu

SEQ ID NO: 38119 - RNA, 22 nt, Homo sapiens
gaucugugugauuggaugcauu

SEQ ID NO: 38120 - RNA, 22 nt, Homo sapiens
gauuagagaaauacugcugcua

SEQ ID NO: 38121 - RNA, 18 nt, Homo sapiens
gauguaguauggugugga

SEQ ID NO: 38122 - RNA, 22 nt, Homo sapiens
gaggucaugucgggccccagga

SEQ ID NO: 38123 - RNA, 22 nt, Homo sapiens
gaggucauguggcaggcagcca

SEQ ID NO: 38124 - RNA, 22 nt, Homo sapiens
gagauggaguuucacuucgcuc

SEQ ID NO: 38125 - RNA, 22 nt, Homo sapiens
gagauggagucuuuuucuguca

SEQ ID NO: 38126 - RNA, 21 nt, Homo sapiens
gagugcaaauaaagagagggc

SEQ ID NO: 38127 - RNA, 19 nt, Homo sapiens
gauauguugagcacccuuu

SEQ ID NO: 38128 - RNA, 22 nt, Homo sapiens
gauauguucugagaaaugcauu

SEQ ID NO: 38129 - RNA, 21 nt, Homo sapiens
gaguggcuuuuguuucaccag

SEQ ID NO: 38130 - RNA, 22 nt, Homo sapiens
gauauguuagggggagaaguua

SEQ ID NO: 38131 - RNA, 22 nt, Homo sapiens
cugaugguuuuacacaagggca

SEQ ID NO: 38132 - RNA, 22 nt, Homo sapiens
cugcaagaugcauaggaauuuu

SEQ ID NO: 38133 - RNA, 22 nt, Homo sapiens
cuggaaagcaaagggugcauug

SEQ ID NO: 38134 - RNA, 22 nt, Homo sapiens
cuggaagaaaaucacgccaucu

SEQ ID NO: 38135 - RNA, 20 nt, Homo sapiens
cugcuccccuacaaaucuca

SEQ ID NO: 38136 - RNA, 21 nt, Homo sapiens
cugaucacaggugagcugccu

SEQ ID NO: 38137 - RNA, 18 nt, Homo sapiens
cugagucauuccuggguc

SEQ ID NO: 38138 - RNA, 20 nt, Homo sapiens
cugauacagccugagcucuc

SEQ ID NO: 38139 - RNA, 20 nt, Homo sapiens
cugagguugggguccuuccc

SEQ ID NO: 38140 - RNA, 22 nt, Homo sapiens
cugagguacccacuucaucuca

SEQ ID NO: 38141 - RNA, 22 nt, Homo sapiens
cugaggacaucagggaagcauc

SEQ ID NO: 38142 - RNA, 22 nt, Homo sapiens
cugagguaggugaucagugcuu

SEQ ID NO: 38143 - RNA, 22 nt, Homo sapiens
cugagcccauucuggggagaag

SEQ ID NO: 38144 - RNA, 22 nt, Homo sapiens
cugagaucugaaccaggagugu

SEQ ID NO: 38145 - RNA, 22 nt, Homo sapiens
cucaaaguguggucuguggguu

SEQ ID NO: 38146 - RNA, 22 nt, Homo sapiens
cucaaaugguccagcuaguggu

SEQ ID NO: 38147 - RNA, 22 nt, Homo sapiens
cucaauuuggaauugucaguaa

SEQ ID NO: 38148 - RNA, 22 nt, Homo sapiens
cucagcaguggauuuaccacca

SEQ ID NO: 38149 - RNA, 22 nt, Homo sapiens
cucacugggaccacucugaagu

SEQ ID NO: 38150 - RNA, 22 nt, Homo sapiens
cucacuggguguaaaacaugua

SEQ ID NO: 38151 - RNA, 22 nt, Homo sapiens
cugagaucuuauuagaaaugca

SEQ ID NO: 38152 - RNA, 22 nt, Homo sapiens
cuacucuggagagugacaauca

SEQ ID NO: 38153 - RNA, 22 nt, Homo sapiens
cuauggguuauaauucauuagu

SEQ ID NO: 38154 - RNA, 21 nt, Homo sapiens
cuacccuguauuagagaaaga

SEQ ID NO: 38155 - RNA, 22 nt, Homo sapiens
cuaaugcagucaggagaaggaa

SEQ ID NO: 38156 - RNA, 22 nt, Homo sapiens
cuaauccugugguagcacucaa

SEQ ID NO: 38157 - RNA, 20 nt, Homo sapiens
cuuuggcaaugagaacaggg

SEQ ID NO: 38158 - RNA, 22 nt, Homo sapiens
cuuuggcaaugucauuuucaau

SEQ ID NO: 38159 - RNA, 22 nt, Homo sapiens
cuuuggcacuuccuaagugcca

SEQ ID NO: 38160 - RNA, 22 nt, Homo sapiens
cuuuggcauuagccuguauaga

SEQ ID NO: 38161 - RNA, 22 nt, Homo sapiens
cuuguuguggaggggagugcag

SEQ ID NO: 38162 - RNA, 22 nt, Homo sapiens
cuuucugaggagaauagagaac

SEQ ID NO: 38163 - RNA, 19 nt, Homo sapiens
cuuaggugaccaguuccca

SEQ ID NO: 38164 - RNA, 22 nt, Homo sapiens
cuuaaugcuacggcucuguguu

SEQ ID NO: 38165 - RNA, 20 nt, Homo sapiens
cuuaucaguggcaaguauaa

SEQ ID NO: 38166 - RNA, 22 nt, Homo sapiens
cuucaccaguuuggcagucuca

SEQ ID NO: 38167 - RNA, 22 nt, Homo sapiens
cugucuggaggccugcaaauaa

SEQ ID NO: 38168 - RNA, 22 nt, Homo sapiens
cuggauggugagauaaagaaaa

SEQ ID NO: 38169 - RNA, 22 nt, Homo sapiens
cuggagauauuggaagaaagaa

SEQ ID NO: 38170 - RNA, 22 nt, Homo sapiens
cuggagcaaaggugacucuugu

SEQ ID NO: 38171 - RNA, 22 nt, Homo sapiens
cuggaguaugaaccauguauca

SEQ ID NO: 38172 - RNA, 19 nt, Homo sapiens
aucagcacaagugugcuuu

SEQ ID NO: 38173 - RNA, 20 nt, Homo sapiens
aucagagacuaggauugcca

SEQ ID NO: 38174 - RNA, 22 nt, Homo sapiens
auccccugcacggggugucauu

SEQ ID NO: 38175 - RNA, 22 nt, Homo sapiens
aucccuagaaaaaucagcacau

SEQ ID NO: 38176 - RNA, 22 nt, Homo sapiens
aucaccuggaguagcccguccc

SEQ ID NO: 38177 - RNA, 19 nt, Homo sapiens
auaugggguuugaacugug

SEQ ID NO: 38178 - RNA, 22 nt, Homo sapiens
auauguaguuucagaaguggaa

SEQ ID NO: 38179 - RNA, 22 nt, Homo sapiens
aucacuaugcaggugucucggg

SEQ ID NO: 38180 - RNA, 22 nt, Homo sapiens
aucacuggccuuuuuaaaugcu

SEQ ID NO: 38181 - RNA, 22 nt, Homo sapiens
aucacguguguuuaugcuacgc

SEQ ID NO: 38182 - RNA, 22 nt, Homo sapiens
aucugguguccucgugggaguc

SEQ ID NO: 38183 - RNA, 22 nt, Homo sapiens
aucugguguuuccuucacauug

SEQ ID NO: 38184 - RNA, 22 nt, Homo sapiens
aucuguagauucagcacaagcu

SEQ ID NO: 38185 - RNA, 22 nt, Homo sapiens
aucugguguggcugugauccuc

SEQ ID NO: 38186 - RNA, 22 nt, Homo sapiens
aucuuuggauacuugauauagu

SEQ ID NO: 38187 - RNA, 22 nt, Homo sapiens
auccuguagucucacagcccca

SEQ ID NO: 38188 - RNA, 22 nt, Homo sapiens
aucucagagaaaauuacuaaga

SEQ ID NO: 38189 - RNA, 22 nt, Homo sapiens
augacccugaccuaagccaauc

SEQ ID NO: 38190 - RNA, 22 nt, Homo sapiens
augaaaagcauaaacgcugaag

SEQ ID NO: 38191 - RNA, 22 nt, Homo sapiens
augcaaaucuuaaguaugugug

SEQ ID NO: 38192 - RNA, 22 nt, Homo sapiens
augcaaacaucugaagagacau

SEQ ID NO: 38193 - RNA, 22 nt, Homo sapiens
augcaaacaucauagaguguac

SEQ ID NO: 38194 - RNA, 22 nt, Homo sapiens
augauguguucuguguucccau

SEQ ID NO: 38195 - RNA, 17 nt, Homo sapiens
augacuucuucagugug

SEQ ID NO: 38196 - RNA, 22 nt, Homo sapiens
augaucacugugccuccuguga

SEQ ID NO: 38197 - RNA, 19 nt, Homo sapiens
augccuggagaugguuaua

SEQ ID NO: 38198 - RNA, 22 nt, Homo sapiens
augcuacuggauuuguauaaau

SEQ ID NO: 38199 - RNA, 22 nt, Homo sapiens
augcuauguagaugagggccca

SEQ ID NO: 38200 - RNA, 22 nt, Homo sapiens
augcuaugugugacuucuuaug

SEQ ID NO: 38201 - RNA, 22 nt, Homo sapiens
auggcagcaccccacucuacug

SEQ ID NO: 38202 - RNA, 22 nt, Homo sapiens
auggcagugucuagggguguuu

SEQ ID NO: 38203 - RNA, 22 nt, Homo sapiens
auggcacuuuggacugcuagau

SEQ ID NO: 38204 - RNA, 22 nt, Homo sapiens
auggcacuaaugggaguuuacu

SEQ ID NO: 38205 - RNA, 22 nt, Homo sapiens
agugaauuguucaacaggagga

SEQ ID NO: 38206 - RNA, 22 nt, Homo sapiens
agugaacaaagaagugcagaua

SEQ ID NO: 38207 - RNA, 22 nt, Homo sapiens
agugacuagaauaugaauuuua

SEQ ID NO: 38208 - RNA, 22 nt, Homo sapiens
agugccuacuauguagaugcug

SEQ ID NO: 38209 - RNA, 22 nt, Homo sapiens
agugggccccuagaggugaggu

SEQ ID NO: 38210 - RNA, 19 nt, Homo sapiens
aguggguguuuucuguuug

SEQ ID NO: 38211 - RNA, 22 nt, Homo sapiens
aguggguguuccauuggauaaa

SEQ ID NO: 38212 - RNA, 22 nt, Homo sapiens
aguggcacuauucucagaguca

SEQ ID NO: 38213 - RNA, 22 nt, Homo sapiens
agcuguguugucugaagucaga

SEQ ID NO: 38214 - RNA, 22 nt, Homo sapiens
agcugguuuauuucucacaaca

SEQ ID NO: 38215 - RNA, 21 nt, Homo sapiens
agcugguuuccacagugugcu

SEQ ID NO: 38216 - RNA, 20 nt, Homo sapiens
agcuguuguuaugagguuua

SEQ ID NO: 38217 - RNA, 22 nt, Homo sapiens
agcuguuguucucagaggcuuu

SEQ ID NO: 38218 - RNA, 20 nt, Homo sapiens
agcaucauugcaauuuguca

SEQ ID NO: 38219 - RNA, 22 nt, Homo sapiens
agcugguuuaauaugcugucug

SEQ ID NO: 38220 - RNA, 22 nt, Homo sapiens
agucaaaugcuuauguauaaag

SEQ ID NO: 38221 - RNA, 22 nt, Homo sapiens
agucaagaaucucagcaucuuu

SEQ ID NO: 38222 - RNA, 22 nt, Homo sapiens
aguaucacaggcaaaacagaau

SEQ ID NO: 38223 - RNA, 22 nt, Homo sapiens
aguaucacaagguguacaccca

SEQ ID NO: 38224 - RNA, 22 nt, Homo sapiens
agcuuguccuccacccacacug

SEQ ID NO: 38225 - RNA, 22 nt, Homo sapiens
agcuuguggugaauacugcuag

SEQ ID NO: 38226 - RNA, 17 nt, Homo sapiens
aguacugucccauccuu

SEQ ID NO: 38227 - RNA, 22 nt, Homo sapiens
aguacugucugguuaccugaca

SEQ ID NO: 38228 - RNA, 22 nt, Homo sapiens
agcuucauuguuaugaauguca

SEQ ID NO: 38229 - RNA, 22 nt, Homo sapiens
auacagugaauacuuacagugu

SEQ ID NO: 38230 - RNA, 22 nt, Homo sapiens
auaagagugggguguuagggau

SEQ ID NO: 38231 - RNA, 22 nt, Homo sapiens
auaccugguagucuugcuacac

SEQ ID NO: 38232 - RNA, 22 nt, Homo sapiens
auacaugugucauguugguuug

SEQ ID NO: 38233 - RNA, 22 nt, Homo sapiens
auacaugugccaugcuggugug

SEQ ID NO: 38234 - RNA, 22 nt, Homo sapiens
auacaugugccauguucgugug

SEQ ID NO: 38235 - RNA, 22 nt, Homo sapiens
aguggugucugaguggccaggg

SEQ ID NO: 38236 - RNA, 23 nt, Homo sapiens
aguggucuccugggcccagcugu

SEQ ID NO: 38237 - RNA, 22 nt, Homo sapiens
agugguguugccuguugaccua

SEQ ID NO: 38238 - RNA, 22 nt, Homo sapiens
auaaaugcauugagaacugcug

SEQ ID NO: 38239 - RNA, 22 nt, Homo sapiens
auagcagugccccaaacuccug

SEQ ID NO: 38240 - RNA, 22 nt, Homo sapiens
auagcagugugaaaauguacua

SEQ ID NO: 38241 - RNA, 22 nt, Homo sapiens
auagcagugugagaaugaacua

SEQ ID NO: 38242 - RNA, 22 nt, Homo sapiens
auagcauaucccacaugucaga

SEQ ID NO: 38243 - RNA, 22 nt, Homo sapiens
auagaaucaucugugcacuagu

SEQ ID NO: 38244 - RNA, 22 nt, Homo sapiens
auagcagcuugucagggcagac

SEQ ID NO: 38245 - RNA, 22 nt, Homo sapiens
auagguauguaauacaaaugaa

SEQ ID NO: 38246 - RNA, 22 nt, Homo sapiens
agaaugucagcuggauucagcu

SEQ ID NO: 38247 - RNA, 22 nt, Homo sapiens
agaauguaacucuaugaaggca

SEQ ID NO: 38248 - RNA, 20 nt, Homo sapiens
agaagcauugcucucuucag

SEQ ID NO: 38249 - RNA, 22 nt, Homo sapiens
agaaugauccuucucagaggca

SEQ ID NO: 38250 - RNA, 22 nt, Homo sapiens
agaagaacauagggugacugaa

SEQ ID NO: 38251 - RNA, 21 nt, Homo sapiens
agagaacugaaacaugugacu

SEQ ID NO: 38252 - RNA, 22 nt, Homo sapiens
agacuagacagaugaacagcac

SEQ ID NO: 38253 - RNA, 22 nt, Homo sapiens
agacaucauuugauggugggag

SEQ ID NO: 38254 - RNA, 22 nt, Homo sapiens
agacccuguauguguuuaguuu

SEQ ID NO: 38255 - RNA, 22 nt, Homo sapiens
agacagcugguagcacuuccug

SEQ ID NO: 38256 - RNA, 22 nt, Homo sapiens
agauauguuauugauguuaaug

SEQ ID NO: 38257 - RNA, 22 nt, Homo sapiens
agaucacaguaccguaaggcug

SEQ ID NO: 38258 - RNA, 22 nt, Homo sapiens
agagaucacugaaucacggggg

SEQ ID NO: 38259 - RNA, 23 nt, Homo sapiens
agagugcaauggugccaucucgg

SEQ ID NO: 38260 - RNA, 22 nt, Homo sapiens
agagaucaauaugaaggaaaug

SEQ ID NO: 38261 - RNA, 22 nt, Homo sapiens
agagaucaacugaauuacugga

SEQ ID NO: 38262 - RNA, 22 nt, Homo sapiens
agcaccacaauuuccugccuaa

SEQ ID NO: 38263 - RNA, 22 nt, Homo sapiens
agcaagauugauggccugcagg

SEQ ID NO: 38264 - RNA, 22 nt, Homo sapiens
agcaggacaauaugggaucagg

SEQ ID NO: 38265 - RNA, 17 nt, Homo sapiens
agcagcccauaucccca

SEQ ID NO: 38266 - RNA, 22 nt, Homo sapiens
agcagcucaugccuuugggagg

SEQ ID NO: 38267 - RNA, 22 nt, Homo sapiens
agcaguagaauuccugcaucac

SEQ ID NO: 38268 - RNA, 22 nt, Homo sapiens
agcaauaugacauugcuacauc

SEQ ID NO: 38269 - RNA, 22 nt, Homo sapiens
agcaagaugaaguugagcuagg

SEQ ID NO: 38270 - RNA, 22 nt, Homo sapiens
agaugguguuuucucaccagau

SEQ ID NO: 38271 - RNA, 22 nt, Homo sapiens
agaugguuuuguucacagcucu

SEQ ID NO: 38272 - RNA, 22 nt, Homo sapiens
agaugguguuggcugaguguau

SEQ ID NO: 38273 - RNA, 18 nt, Homo sapiens
agaugguguugcuucugu

SEQ ID NO: 38274 - RNA, 22 nt, Homo sapiens
agauggugugcuaggaaaugua

SEQ ID NO: 38275 - RNA, 22 nt, Homo sapiens
acagugcuuggcacacaguaau

SEQ ID NO: 38276 - RNA, 22 nt, Homo sapiens
accaguagaaucaguggauucu

SEQ ID NO: 38277 - RNA, 22 nt, Homo sapiens
accauugcacuccagccugggc

SEQ ID NO: 38278 - RNA, 22 nt, Homo sapiens
accacaggguaaaguuagauau

SEQ ID NO: 38279 - RNA, 22 nt, Homo sapiens
accaccacucccgcauucuaaa

SEQ ID NO: 38280 - RNA, 22 nt, Homo sapiens
acucacagcaaccuccgccucc

SEQ ID NO: 38281 - RNA, 22 nt, Homo sapiens
acuaugagacgaaugcaucagu

SEQ ID NO: 38282 - RNA, 22 nt, Homo sapiens
acuccacuuucaccacagcgga

SEQ ID NO: 38283 - RNA, 21 nt, Homo sapiens
acccccacaccuccuuaguuc

SEQ ID NO: 38284 - RNA, 22 nt, Homo sapiens
acugagccuuuaaaugacuuca

SEQ ID NO: 38285 - RNA, 22 nt, Homo sapiens
agaaacacagguggaauugcuu

SEQ ID NO: 38286 - RNA, 22 nt, Homo sapiens
agaaauguuuacucacccccuu

SEQ ID NO: 38287 - RNA, 21 nt, Homo sapiens
aaucacaguuguucugccuuc

SEQ ID NO: 38288 - RNA, 22 nt, Homo sapiens
aauccaugugcuuuaccauuuu

SEQ ID NO: 38289 - RNA, 22 nt, Homo sapiens
aauggguaguacugugguaaca

SEQ ID NO: 38290 - RNA, 22 nt, Homo sapiens
aaugucacugugguccuccagu

SEQ ID NO: 38291 - RNA, 22 nt, Homo sapiens
aauggccuuuuucauuauacug

SEQ ID NO: 38292 - RNA, 22 nt, Homo sapiens
aauggcucuguuggcccaagac

SEQ ID NO: 38293 - RNA, 22 nt, Homo sapiens
aauggcaagagccacagaggcg

SEQ ID NO: 38294 - RNA, 22 nt, Homo sapiens
acacaugugcguagacucuuua

SEQ ID NO: 38295 - RNA, 22 nt, Homo sapiens
acacaugugaaaaaaauguuac

SEQ ID NO: 38296 - RNA, 22 nt, Homo sapiens
acaccaucuccuuauuucucuu

SEQ ID NO: 38297 - RNA, 22 nt, Homo sapiens
acacgugcguauauguacguau

SEQ ID NO: 38298 - RNA, 20 nt, Homo sapiens
acaguauguuuggaugcaua

SEQ ID NO: 38299 - RNA, 22 nt, Homo sapiens
acaguggaauguaggguuugag

SEQ ID NO: 38300 - RNA, 19 nt, Homo sapiens
acagugcuuugucagaagc

SEQ ID NO: 38301 - RNA, 22 nt, Homo sapiens
acagucacaauuuguaccuuuu

SEQ ID NO: 38302 - RNA, 22 nt, Homo sapiens
aaguauuaagacuaagaggcuu

SEQ ID NO: 38303 - RNA, 22 nt, Homo sapiens
aagucaguuugggagaagcuau

SEQ ID NO: 38304 - RNA, 22 nt, Homo sapiens
aagucaaggagagaggcgucag

SEQ ID NO: 38305 - RNA, 22 nt, Homo sapiens
aagugcaaaucuguggcugaaa

SEQ ID NO: 38306 - RNA, 22 nt, Homo sapiens
aagugcuucuuuccucgagaag

SEQ ID NO: 38307 - RNA, 22 nt, Homo sapiens
aagugcuuccuuucagaggguu

SEQ ID NO: 38308 - RNA, 22 nt, Homo sapiens
aagugcuggccuacucaaucga

SEQ ID NO: 38309 - RNA, 21 nt, Homo sapiens
uuuguguccccacccaaaucu

SEQ ID NO: 38310 - RNA, 22 nt, Homo sapiens
uuuguguccccacccacaucuc

SEQ ID NO: 38311 - RNA, 21 nt, Homo sapiens
uuugugguuacugugugagcu

SEQ ID NO: 38312 - RNA, 22 nt, Homo sapiens
aagguagcugagugaagugguu

SEQ ID NO: 38313 - RNA, 22 nt, Homo sapiens
aaggugcuguaagcauccaugu

SEQ ID NO: 38314 - RNA, 22 nt, Homo sapiens
aaguaaacauuuuguacaauaa

SEQ ID NO: 38315 - RNA, 22 nt, Homo sapiens
aaaagagcugagagguauucuu

SEQ ID NO: 38316 - RNA, 22 nt, Homo sapiens
aaacagucuucuccugagggac

SEQ ID NO: 38317 - RNA, 22 nt, Homo sapiens
aaaaggcuagcuaguaacagaa

SEQ ID NO: 38318 - RNA, 22 nt, Homo sapiens
aaacauugaccucauccuggca

SEQ ID NO: 38319 - RNA, 22 nt, Homo sapiens
aaagucuguuacagcuauuucu

SEQ ID NO: 38320 - RNA, 22 nt, Homo sapiens
aaaggcacacacuccuuguuau

SEQ ID NO: 38321 - RNA, 22 nt, Homo sapiens
aaaggcacugugacuuuauagg

SEQ ID NO: 38322 - RNA, 22 nt, Homo sapiens
aaaggcacuagaaguuaccuuu

SEQ ID NO: 38323 - RNA, 22 nt, Homo sapiens
aaaguggacuaagugaauauga

SEQ ID NO: 38324 - RNA, 22 nt, Homo sapiens
aaauaacugucagguucuggaa

SEQ ID NO: 38325 - RNA, 22 nt, Homo sapiens
aaagugcugggauuggcugggc

SEQ ID NO: 38326 - RNA, 22 nt, Homo sapiens
aaagugcaguacuucguauauu

SEQ ID NO: 38327 - RNA, 22 nt, Homo sapiens
aagguucuugcuugcaugacug

SEQ ID NO: 38328 - RNA, 22 nt, Homo sapiens
aagugcccuauuuggcccuuga

SEQ ID NO: 38329 - RNA, 22 nt, Homo sapiens
aagugguguuugggagcuggac

SEQ ID NO: 38330 - RNA, 22 nt, Homo sapiens
aagugcugggauuggccgggca

SEQ ID NO: 38331 - RNA, 22 nt, Homo sapiens
aagugcuuuacacaugcaugau

SEQ ID NO: 38332 - RNA, 22 nt, Homo sapiens
aaggcuagagaagaagggcauc

SEQ ID NO: 38333 - RNA, 22 nt, Homo sapiens
aaggcacugaacuuaaauucug

SEQ ID NO: 38334 - RNA, 23 nt, Homo sapiens
aagcaugcacagcuguuuguggu

SEQ ID NO: 38335 - RNA, 22 nt, Homo sapiens
aagcacccagccucacgccugc

SEQ ID NO: 38336 - RNA, 22 nt, Homo sapiens
aagcaggugugggaggaaaugg

SEQ ID NO: 38337 - RNA, 22 nt, Homo sapiens
aagaugcagucauacuggagga

SEQ ID NO: 38338 - RNA, 22 nt, Homo sapiens
aacagaccuagauaguauaguc

SEQ ID NO: 38339 - RNA, 22 nt, Homo sapiens
aagauauguuaguuauaaacuc

SEQ ID NO: 38340 - RNA, 22 nt, Homo sapiens
aagaguaguaguggcacucucu

SEQ ID NO: 38341 - RNA, 22 nt, Homo sapiens
aaaugcccuaaaauggagcauc

SEQ ID NO: 38342 - RNA, 22 nt, Homo sapiens
aacaguguuuuggguuuucugg

SEQ ID NO: 38343 - RNA, 22 nt, Homo sapiens
aacaggguggugccugguccau

SEQ ID NO: 38344 - RNA, 22 nt, Homo sapiens
auggaagaauugucggggaugu

SEQ ID NO: 38345 - RNA, 22 nt, Homo sapiens
auggaaggagaauggucuuuga

SEQ ID NO: 38346 - RNA, 22 nt, Homo sapiens
auggaguguaauauugagagcu

SEQ ID NO: 38347 - RNA, 22 nt, Homo sapiens
auggaguguggaacugggaauc

SEQ ID NO: 38348 - RNA, 22 nt, Homo sapiens
auggaguguucugaauccuuug

SEQ ID NO: 38349 - RNA, 22 nt, Homo sapiens
augggacugggugccguggagc

SEQ ID NO: 38350 - RNA, 22 nt, Homo sapiens
augggaaaaucagaaggccugg

SEQ ID NO: 38351 - RNA, 21 nt, Homo sapiens
augggguagaagagaaggcuu

SEQ ID NO: 38352 - RNA, 22 nt, Homo sapiens
augggugaguaugaguugacuu

SEQ ID NO: 38353 - RNA, 22 nt, Homo sapiens
augggguaggcuuugcugcagu

SEQ ID NO: 38354 - RNA, 22 nt, Homo sapiens
augucaaggugggugauaguuu

SEQ ID NO: 38355 - RNA, 22 nt, Homo sapiens
augugaccaucucuccacuaau

SEQ ID NO: 38356 - RNA, 22 nt, Homo sapiens
auguccuggacccagacaaagc

SEQ ID NO: 38357 - RNA, 22 nt, Homo sapiens
augucuggcagaagacuucuca

SEQ ID NO: 38358 - RNA, 22 nt, Homo sapiens
augugccaauuaggauuccaag

SEQ ID NO: 38359 - RNA, 18 nt, Homo sapiens
auguggcuuuugaaggcu

SEQ ID NO: 38360 - RNA, 22 nt, Homo sapiens
auuaagugcuugccagugcugg

SEQ ID NO: 38361 - RNA, 22 nt, Homo sapiens
auguggcuuuccuagaucuuag

SEQ ID NO: 38362 - RNA, 22 nt, Homo sapiens
augugcacauucugguaaauau

SEQ ID NO: 38363 - RNA, 22 nt, Homo sapiens
augugcagauguuacaaauugu

SEQ ID NO: 38364 - RNA, 22 nt, Homo sapiens
augaggugggagaaucacuuga

SEQ ID NO: 38365 - RNA, 22 nt, Homo sapiens
augaggugaguaaauaaaugaa

SEQ ID NO: 38366 - RNA, 22 nt, Homo sapiens
augaggagguaugauuuucuga

SEQ ID NO: 38367 - RNA, 22 nt, Homo sapiens
augagcucauugggugacuggg

SEQ ID NO: 38368 - RNA, 22 nt, Homo sapiens
augagggcggacgcccuggaga

SEQ ID NO: 38369 - RNA, 22 nt, Homo sapiens
aucuuugcugagaugcauggca

SEQ ID NO: 38370 - RNA, 22 nt, Homo sapiens
aucuugggugggaacugagaau

SEQ ID NO: 38371 - RNA, 21 nt, Homo sapiens
aucuugguauagucuuauugg

SEQ ID NO: 38372 - RNA, 22 nt, Homo sapiens
aucuguguuuaaggucccagaa

SEQ ID NO: 38373 - RNA, 22 nt, Homo sapiens
augagcuauggagacagggcca

SEQ ID NO: 38374 - RNA, 22 nt, Homo sapiens
augagcaucaccagaaucaaua

SEQ ID NO: 38375 - RNA, 22 nt, Homo sapiens
augcagguguuuugcacugagu

SEQ ID NO: 38376 - RNA, 22 nt, Homo sapiens
augcauagugggaugcucugug

SEQ ID NO: 38377 - RNA, 22 nt, Homo sapiens
auggaaacauaagaguauagau

SEQ ID NO: 38378 - RNA, 22 nt, Homo sapiens
augcuggugguucacaugcgca

SEQ ID NO: 38379 - RNA, 19 nt, Homo sapiens
augcugguguugcucaaac

SEQ ID NO: 38380 - RNA, 22 nt, Homo sapiens
augccacuucucuaagucaugu

SEQ ID NO: 38381 - RNA, 22 nt, Homo sapiens
augccaguguccagaguggguu

SEQ ID NO: 38382 - RNA, 19 nt, Homo sapiens
augccucaguuuuguacuu

SEQ ID NO: 38383 - RNA, 20 nt, Homo sapiens
augccacugagcagugguga

SEQ ID NO: 38384 - RNA, 19 nt, Homo sapiens
augccacagugaggucaga

SEQ ID NO: 38385 - RNA, 22 nt, Homo sapiens
augccacugcacuccaaccugg

SEQ ID NO: 38386 - RNA, 22 nt, Homo sapiens
auacaugugccauggugguuug

SEQ ID NO: 38387 - RNA, 22 nt, Homo sapiens
auacaugugccauguugguuug

SEQ ID NO: 38388 - RNA, 22 nt, Homo sapiens
auacauguuucauguuggugug

SEQ ID NO: 38389 - RNA, 22 nt, Homo sapiens
auacacgugccauguuggugug

SEQ ID NO: 38390 - RNA, 22 nt, Homo sapiens
auacacgugccuuguuggugua

SEQ ID NO: 38391 - RNA, 22 nt, Homo sapiens
agucacagguucuugggauuag

SEQ ID NO: 38392 - RNA, 22 nt, Homo sapiens
auaaucacacccagguuaaaug

SEQ ID NO: 38393 - RNA, 22 nt, Homo sapiens
aguaacauuucuaguagagagu

SEQ ID NO: 38394 - RNA, 22 nt, Homo sapiens
agucaacaucaugaaguggaaa

SEQ ID NO: 38395 - RNA, 22 nt, Homo sapiens
auagaucuauuuauguaucccu

SEQ ID NO: 38396 - RNA, 22 nt, Homo sapiens
auagaguccugcucgaguugcu

SEQ ID NO: 38397 - RNA, 16 nt, Homo sapiens
auaccacagugacaca

SEQ ID NO: 38398 - RNA, 20 nt, Homo sapiens
auaccacagacuggguaguu

SEQ ID NO: 38399 - RNA, 21 nt, Homo sapiens
auagcacuucacuugguuaga

SEQ ID NO: 38400 - RNA, 22 nt, Homo sapiens
auauaccuaggcuacaugguuu

SEQ ID NO: 38401 - RNA, 22 nt, Homo sapiens
auauagcaaugaaagagaugaa

SEQ ID NO: 38402 - RNA, 22 nt, Homo sapiens
aucugauggagagcguguggcu

SEQ ID NO: 38403 - RNA, 22 nt, Homo sapiens
aucugcacaucuguguuuuugu

SEQ ID NO: 38404 - RNA, 22 nt, Homo sapiens
aucucugagauguucugauuuu

SEQ ID NO: 38405 - RNA, 22 nt, Homo sapiens
aucgcgccauuguacuccagcc

SEQ ID NO: 38406 - RNA, 22 nt, Homo sapiens
aucgcaccauugcacuccagca

SEQ ID NO: 38407 - RNA, 22 nt, Homo sapiens
auccucugagaucuaggcagag

SEQ ID NO: 38408 - RNA, 21 nt, Homo sapiens
aucagagacccaggcuuccuc

SEQ ID NO: 38409 - RNA, 22 nt, Homo sapiens
aucagauuccagaggcagcacc

SEQ ID NO: 38410 - RNA, 22 nt, Homo sapiens
aucagcacugaucauacagcuu

SEQ ID NO: 38411 - RNA, 22 nt, Homo sapiens
aucccugugacgagcaucccua

SEQ ID NO: 38412 - RNA, 22 nt, Homo sapiens
aucagugauugauuuaaagacg

SEQ ID NO: 38413 - RNA, 22 nt, Homo sapiens
auauuugguuaccugugggucu

SEQ ID NO: 38414 - RNA, 22 nt, Homo sapiens
aucaaagugaaauauuaguuau

SEQ ID NO: 38415 - RNA, 22 nt, Homo sapiens
aucaaaguaucucaauauggua

SEQ ID NO: 38416 - RNA, 22 nt, Homo sapiens
aucaaagugaauuaaugagaau

SEQ ID NO: 38417 - RNA, 22 nt, Homo sapiens
aucaaaguuucccagaaguugu

SEQ ID NO: 38418 - RNA, 22 nt, Homo sapiens
acuccauuucauuuuagcucuu

SEQ ID NO: 38419 - RNA, 22 nt, Homo sapiens
acuccauuuccagagcagcccc

SEQ ID NO: 38420 - RNA, 22 nt, Homo sapiens
acuccauuuggacucugggagg

SEQ ID NO: 38421 - RNA, 22 nt, Homo sapiens
acucuguugucuggccuuccug

SEQ ID NO: 38422 - RNA, 22 nt, Homo sapiens
acugagacugagaauguuucuu

SEQ ID NO: 38423 - RNA, 22 nt, Homo sapiens
acuagaugauuauguuccauug

SEQ ID NO: 38424 - RNA, 23 nt, Homo sapiens
accugugguuauuuuacucuucc

SEQ ID NO: 38425 - RNA, 22 nt, Homo sapiens
accgggauguacuuggcggguu

SEQ ID NO: 38426 - RNA, 22 nt, Homo sapiens
accugagauuacaggugcuggc

SEQ ID NO: 38427 - RNA, 22 nt, Homo sapiens
acugcacuguccuagaguccuc

SEQ ID NO: 38428 - RNA, 19 nt, Homo sapiens
acugcacuccaaccuccug

SEQ ID NO: 38429 - RNA, 22 nt, Homo sapiens
acugcacuccagacucugucuc

SEQ ID NO: 38430 - RNA, 22 nt, Homo sapiens
acaagugaauacaggauucucu

SEQ ID NO: 38431 - RNA, 22 nt, Homo sapiens
acaaaguguuuucugaaggccu

SEQ ID NO: 38432 - RNA, 22 nt, Homo sapiens
aauugguuaagauaagaucaua

SEQ ID NO: 38433 - RNA, 22 nt, Homo sapiens
acaccaugucuguuucugguuu

SEQ ID NO: 38434 - RNA, 22 nt, Homo sapiens
acacgggugccggcaucagcac

SEQ ID NO: 38435 - RNA, 22 nt, Homo sapiens
acacuguauccuucuguccuuu

SEQ ID NO: 38436 - RNA, 22 nt, Homo sapiens
acacugucucuugcugaccaug

SEQ ID NO: 38437 - RNA, 22 nt, Homo sapiens
acacuacuggguauauguguuu

SEQ ID NO: 38438 - RNA, 22 nt, Homo sapiens
acacuguaacucuuugagggca

SEQ ID NO: 38439 - RNA, 22 nt, Homo sapiens
acacuggaguuaaaggugauuu

SEQ ID NO: 38440 - RNA, 22 nt, Homo sapiens
acagguacacagaauauccaga

SEQ ID NO: 38441 - RNA, 20 nt, Homo sapiens
acagcacugguuucaagcaa

SEQ ID NO: 38442 - RNA, 22 nt, Homo sapiens
agcagguguccacaauguuugc

SEQ ID NO: 38443 - RNA, 16 nt, Homo sapiens
agcagguuuuucugca

SEQ ID NO: 38444 - RNA, 22 nt, Homo sapiens
agcagguguggcuuauccugaa

SEQ ID NO: 38445 - RNA, 22 nt, Homo sapiens
agcagguauucgggucaugggg

SEQ ID NO: 38446 - RNA, 21 nt, Homo sapiens
agcagcuuugguugaagcaga

SEQ ID NO: 38447 - RNA, 19 nt, Homo sapiens
agcaguguggagauuucuc

SEQ ID NO: 38448 - RNA, 22 nt, Homo sapiens
agcugcaaagggagagaugauu

SEQ ID NO: 38449 - RNA, 19 nt, Homo sapiens
agacuggcccaggcgggug

SEQ ID NO: 38450 - RNA, 22 nt, Homo sapiens
agacucauuuccauagucagcu

SEQ ID NO: 38451 - RNA, 22 nt, Homo sapiens
agacucauuuuuaucgagcaug

SEQ ID NO: 38452 - RNA, 22 nt, Homo sapiens
agagaacuggcuucaccauucu

SEQ ID NO: 38453 - RNA, 19 nt, Homo sapiens
agagacucauuguagcauu

SEQ ID NO: 38454 - RNA, 22 nt, Homo sapiens
agcaccauuucucuaaagcacu

SEQ ID NO: 38455 - RNA, 22 nt, Homo sapiens
agcaccauugcacuccagccug

SEQ ID NO: 38456 - RNA, 22 nt, Homo sapiens
agcaccauuuauugaaaagaca

SEQ ID NO: 38457 - RNA, 23 nt, Homo sapiens
agcaccuuuccuccacuaucugc

SEQ ID NO: 38458 - RNA, 22 nt, Homo sapiens
acuggcaauggcagaaauaguu

SEQ ID NO: 38459 - RNA, 22 nt, Homo sapiens
aguacaucuggcuggauagaua

SEQ ID NO: 38460 - RNA, 22 nt, Homo sapiens
agguucccuuuuggccugggau

SEQ ID NO: 38461 - RNA, 22 nt, Homo sapiens
aggugguguuggguuccagccc

SEQ ID NO: 38462 - RNA, 22 nt, Homo sapiens
aggugcugacaggauagguuuc

SEQ ID NO: 38463 - RNA, 22 nt, Homo sapiens
aggugcacucagaaaacagaua

SEQ ID NO: 38464 - RNA, 22 nt, Homo sapiens
aacaccaucccuuugaugcuuu

SEQ ID NO: 38465 - RNA, 22 nt, Homo sapiens
aaauugcauugagcugcuuauu

SEQ ID NO: 38466 - RNA, 18 nt, Homo sapiens
aaaugcucuucuggaaua

SEQ ID NO: 38467 - RNA, 22 nt, Homo sapiens
aggacacugauguaugcugugg

SEQ ID NO: 38468 - RNA, 22 nt, Homo sapiens
agcuuuggauaccugcuguucc

SEQ ID NO: 38469 - RNA, 22 nt, Homo sapiens
agcuggcuguggagaaaccccu

SEQ ID NO: 38470 - RNA, 20 nt, Homo sapiens
agcugcagauauaaauccgc

SEQ ID NO: 38471 - RNA, 22 nt, Homo sapiens
agcugccagucuuguaaggccu

SEQ ID NO: 38472 - RNA, 22 nt, Homo sapiens
agcuggcuguagcugcaagucu

SEQ ID NO: 38473 - RNA, 22 nt, Homo sapiens
uaugacuuuugaauacagaugg

SEQ ID NO: 38474 - RNA, 22 nt, Homo sapiens
uaugagguagguaugacuauca

SEQ ID NO: 38475 - RNA, 20 nt, Homo sapiens
uaugagacugggagaaguuc

SEQ ID NO: 38476 - RNA, 22 nt, Homo sapiens
uaugcacaugugccugggugug

SEQ ID NO: 38477 - RNA, 22 nt, Homo sapiens
uauggccugaauuagaaaagug

SEQ ID NO: 38478 - RNA, 22 nt, Homo sapiens
uauggccugcguccagugguau

SEQ ID NO: 38479 - RNA, 22 nt, Homo sapiens
uauuguccacuuugcacugugu

SEQ ID NO: 38480 - RNA, 22 nt, Homo sapiens
uaucacagauauuaugggccaa

SEQ ID NO: 38481 - RNA, 22 nt, Homo sapiens
uauagcuuaaaguuuagauccu

SEQ ID NO: 38482 - RNA, 21 nt, Homo sapiens
uaucagagacauugagaggca

SEQ ID NO: 38483 - RNA, 22 nt, Homo sapiens
uaucagaguuacacugaagacu

SEQ ID NO: 38484 - RNA, 22 nt, Homo sapiens
uauaagguuaggaaaaauuucu

SEQ ID NO: 38485 - RNA, 22 nt, Homo sapiens
uauagcauuuugauccuguaga

SEQ ID NO: 38486 - RNA, 22 nt, Homo sapiens
uaggugguuugaaauacucaag

SEQ ID NO: 38487 - RNA, 19 nt, Homo sapiens
uaggugguuuuccccucac

SEQ ID NO: 38488 - RNA, 22 nt, Homo sapiens
uagcagaauaacuugccagccu

SEQ ID NO: 38489 - RNA, 22 nt, Homo sapiens
uagcagcaucucuggcuucuac

SEQ ID NO: 38490 - RNA, 22 nt, Homo sapiens
uacagguauagauguguguucu

SEQ ID NO: 38491 - RNA, 22 nt, Homo sapiens
uacaguacagugacaccauuau

SEQ ID NO: 38492 - RNA, 22 nt, Homo sapiens
uacagucacauuccugaccaua

SEQ ID NO: 38493 - RNA, 22 nt, Homo sapiens
uacaccugaguuugugguuuuc

SEQ ID NO: 38494 - RNA, 22 nt, Homo sapiens
uacaccauuugauucuuuaagc

SEQ ID NO: 38495 - RNA, 22 nt, Homo sapiens
uacagcacaggugcagguguug

SEQ ID NO: 38496 - RNA, 22 nt, Homo sapiens
uacaccugcacucuagccuggg

SEQ ID NO: 38497 - RNA, 22 nt, Homo sapiens
uacucaguaagugcuggcugcu

SEQ ID NO: 38498 - RNA, 22 nt, Homo sapiens
uacuacuuucugacaucuuuaa

SEQ ID NO: 38499 - RNA, 22 nt, Homo sapiens
uagaucaacuuugguaagagaa

SEQ ID NO: 38500 - RNA, 22 nt, Homo sapiens
uagaggaaugaauuuggccaga

SEQ ID NO: 38501 - RNA, 20 nt, Homo sapiens
uagagagauauggggguucc

SEQ ID NO: 38502 - RNA, 21 nt, Homo sapiens
uagagagcaauaccuccagag

SEQ ID NO: 38503 - RNA, 22 nt, Homo sapiens
uagaccaauuggcauauaguaa

SEQ ID NO: 38504 - RNA, 22 nt, Homo sapiens
uagagauaucaauuucauggug

SEQ ID NO: 38505 - RNA, 21 nt, Homo sapiens
uagagcaacacacgcccucuc

SEQ ID NO: 38506 - RNA, 22 nt, Homo sapiens
uagagcaaugacucuggaaacc

SEQ ID NO: 38507 - RNA, 22 nt, Homo sapiens
uaauagagucauuauuauuguu

SEQ ID NO: 38508 - RNA, 22 nt, Homo sapiens
uaauaguuggcacuggagaaag

SEQ ID NO: 38509 - RNA, 22 nt, Homo sapiens
uacaagcacaggcagcaggcug

SEQ ID NO: 38510 - RNA, 22 nt, Homo sapiens
guuguggagucuucuguucugg

SEQ ID NO: 38511 - RNA, 22 nt, Homo sapiens
guuugccuuuuagauaggaaug

SEQ ID NO: 38512 - RNA, 22 nt, Homo sapiens
uaaggcucuuguuauuuugagg

SEQ ID NO: 38513 - RNA, 22 nt, Homo sapiens
uaagggacauguguugccuaag

SEQ ID NO: 38514 - RNA, 22 nt, Homo sapiens
uaagggacgcccccuucucucu

SEQ ID NO: 38515 - RNA, 22 nt, Homo sapiens
guuuaacugguacuucaagucu

SEQ ID NO: 38516 - RNA, 22 nt, Homo sapiens
guugggcccauagacugccagu

SEQ ID NO: 38517 - RNA, 22 nt, Homo sapiens
guuggcaaguggcugagcuggg

SEQ ID NO: 38518 - RNA, 22 nt, Homo sapiens
guuggcaagaggugcuguacac

SEQ ID NO: 38519 - RNA, 22 nt, Homo sapiens
guuggugaccugaagagaguaa

SEQ ID NO: 38520 - RNA, 22 nt, Homo sapiens
uaagguuuuugauaugcugcug

SEQ ID NO: 38521 - RNA, 22 nt, Homo sapiens
gucccugaggaacauccagggc

SEQ ID NO: 38522 - RNA, 22 nt, Homo sapiens
gucccagagauauugugucuuu

SEQ ID NO: 38523 - RNA, 22 nt, Homo sapiens
gugagauggaguuggugucuuu

SEQ ID NO: 38524 - RNA, 22 nt, Homo sapiens
gugagcagagaucgcgugauug

SEQ ID NO: 38525 - RNA, 22 nt, Homo sapiens
gugcacaucgugcagguuuguu

SEQ ID NO: 38526 - RNA, 22 nt, Homo sapiens
gugcacaugguagguauugagu

SEQ ID NO: 38527 - RNA, 22 nt, Homo sapiens
gugcacauauggugcauaagug

SEQ ID NO: 38528 - RNA, 22 nt, Homo sapiens
gugcagugugauccuuccguau

SEQ ID NO: 38529 - RNA, 17 nt, Homo sapiens
gugagguauccucaaaa

SEQ ID NO: 38530 - RNA, 22 nt, Homo sapiens
gugcaaaucucugaguaucuuu

SEQ ID NO: 38531 - RNA, 22 nt, Homo sapiens
gugcaaauguuauugagguuuu

SEQ ID NO: 38532 - RNA, 22 nt, Homo sapiens
gugcaaauuccagcucaacucc

SEQ ID NO: 38533 - RNA, 22 nt, Homo sapiens
gugcaagagugauugcaguuuu

SEQ ID NO: 38534 - RNA, 22 nt, Homo sapiens
gugcaagagugacugcaguuuu

SEQ ID NO: 38535 - RNA, 22 nt, Homo sapiens
gugcaagcaucauggaguguac

SEQ ID NO: 38536 - RNA, 21 nt, Homo sapiens
gugaggaguuacuggcuuuga

SEQ ID NO: 38537 - RNA, 22 nt, Homo sapiens
gugaggcuuuuccuguuagacu

SEQ ID NO: 38538 - RNA, 22 nt, Homo sapiens
gugagguagagcaugugaaaga

SEQ ID NO: 38539 - RNA, 22 nt, Homo sapiens
guggcuuuauuuagaagcaggg

SEQ ID NO: 38540 - RNA, 22 nt, Homo sapiens
guggcauuucccaaaguauucu

SEQ ID NO: 38541 - RNA, 21 nt, Homo sapiens
guggccuuuggagcaugucag

SEQ ID NO: 38542 - RNA, 22 nt, Homo sapiens
gugggguaggaggaguacuucc

SEQ ID NO: 38543 - RNA, 22 nt, Homo sapiens
gugggguaggguaggacucaac

SEQ ID NO: 38544 - RNA, 22 nt, Homo sapiens
gugggguagcaggcuccuaucu

SEQ ID NO: 38545 - RNA, 18 nt, Homo sapiens
guguauggauggaggcca

SEQ ID NO: 38546 - RNA, 22 nt, Homo sapiens
guguaugguaggaugacggagu

SEQ ID NO: 38547 - RNA, 22 nt, Homo sapiens
gugcgggaggcgcgccuaggug

SEQ ID NO: 38548 - RNA, 22 nt, Homo sapiens
gugcuaggugcuaggaagauag

SEQ ID NO: 38549 - RNA, 22 nt, Homo sapiens
gugccacaguguuaagggauuc

SEQ ID NO: 38550 - RNA, 22 nt, Homo sapiens
guggcacaauuaaguagcuauu

SEQ ID NO: 38551 - RNA, 22 nt, Homo sapiens
guggcaaguguuccaagaggcg

SEQ ID NO: 38552 - RNA, 22 nt, Homo sapiens
guucaucaggaauauuggccua

SEQ ID NO: 38553 - RNA, 22 nt, Homo sapiens
guugcucaggcugaagugcagu

SEQ ID NO: 38554 - RNA, 22 nt, Homo sapiens
guuacugucuuccugauugcuu

SEQ ID NO: 38555 - RNA, 22 nt, Homo sapiens
gugucuccuguggagcuaugua

SEQ ID NO: 38556 - RNA, 22 nt, Homo sapiens
guguauguuucucccugucccu

SEQ ID NO: 38557 - RNA, 22 nt, Homo sapiens
gugucaaggaugccugucaggc

SEQ ID NO: 38558 - RNA, 22 nt, Homo sapiens
gugucaugaagguuuuaugcag

SEQ ID NO: 38559 - RNA, 22 nt, Homo sapiens
gugucaugagggggacaggaag

SEQ ID NO: 38560 - RNA, 22 nt, Homo sapiens
gugucucagcccagaccuauuu

SEQ ID NO: 38561 - RNA, 22 nt, Homo sapiens
guguccucgaguacacaucagg

SEQ ID NO: 38562 - RNA, 22 nt, Homo sapiens
gugucaugggcauguccuuaac

SEQ ID NO: 38563 - RNA, 22 nt, Homo sapiens
gggaaugaagagaaccuuccca

SEQ ID NO: 38564 - RNA, 22 nt, Homo sapiens
gggauguuuuauacugagccug

SEQ ID NO: 38565 - RNA, 22 nt, Homo sapiens
gggaauggaagacauuaugaug

SEQ ID NO: 38566 - RNA, 22 nt, Homo sapiens
gggcacgugugugcugugcuca

SEQ ID NO: 38567 - RNA, 22 nt, Homo sapiens
gggcauugugggcagagggcag

SEQ ID NO: 38568 - RNA, 22 nt, Homo sapiens
gguaggcacuggugggaagaga

SEQ ID NO: 38569 - RNA, 22 nt, Homo sapiens
ggaagaauaaugggccuuagag

SEQ ID NO: 38570 - RNA, 22 nt, Homo sapiens
ggaaugugugucaugcuuuugc

SEQ ID NO: 38571 - RNA, 22 nt, Homo sapiens
gcuguguguuaucagaaauugc

SEQ ID NO: 38572 - RNA, 19 nt, Homo sapiens
ggaaaugucuauuaagauc

SEQ ID NO: 38573 - RNA, 22 nt, Homo sapiens
ggccggguggccauggcugccc

SEQ ID NO: 38574 - RNA, 22 nt, Homo sapiens
ggcccugagacaggaaaaagcu

SEQ ID NO: 38575 - RNA, 22 nt, Homo sapiens
ggacagaaaggguucaccaaac

SEQ ID NO: 38576 - RNA, 22 nt, Homo sapiens
ggacagugaaugccacuccucc

SEQ ID NO: 38577 - RNA, 21 nt, Homo sapiens
ggcucuguggucucagguuuc

SEQ ID NO: 38578 - RNA, 22 nt, Homo sapiens
ggcccugauacaaguaaggucu

SEQ ID NO: 38579 - RNA, 22 nt, Homo sapiens
ggcgccauugcacuccagccug

SEQ ID NO: 38580 - RNA, 22 nt, Homo sapiens
guauugacuaucaaucaugugc

SEQ ID NO: 38581 - RNA, 22 nt, Homo sapiens
gucaucaucaguccucugugca

SEQ ID NO: 38582 - RNA, 22 nt, Homo sapiens
guacuuuguuauaacccacagg

SEQ ID NO: 38583 - RNA, 22 nt, Homo sapiens
guauggguuuuguuucuucugg

SEQ ID NO: 38584 - RNA, 22 nt, Homo sapiens
guacaugugcacagugugcagg

SEQ ID NO: 38585 - RNA, 22 nt, Homo sapiens
guaccugauacaggcgcacggu

SEQ ID NO: 38586 - RNA, 22 nt, Homo sapiens
guaccugagaaguuccagggga

SEQ ID NO: 38587 - RNA, 22 nt, Homo sapiens
guaaaguaaagcacaucaaggu

SEQ ID NO: 38588 - RNA, 22 nt, Homo sapiens
ggucauggagcuuuacuuuaug

SEQ ID NO: 38589 - RNA, 22 nt, Homo sapiens
ggucacauuggacuaucaaguu

SEQ ID NO: 38590 - RNA, 22 nt, Homo sapiens
ggucaguuuuuuuaaccaucca

SEQ ID NO: 38591 - RNA, 22 nt, Homo sapiens
ggugagguaggaaaaguuagga

SEQ ID NO: 38592 - RNA, 19 nt, Homo sapiens
ggucccucucaagucauuc

SEQ ID NO: 38593 - RNA, 22 nt, Homo sapiens
gguggucuuccccuggaguucg

SEQ ID NO: 38594 - RNA, 22 nt, Homo sapiens
ggugucaguuggccccuacugg

SEQ ID NO: 38595 - RNA, 22 nt, Homo sapiens
cuugggcagugugcauguguau

SEQ ID NO: 38596 - RNA, 22 nt, Homo sapiens
cuugggccccacccaaaucuua

SEQ ID NO: 38597 - RNA, 22 nt, Homo sapiens
cuuggguaagucauuaaaauua

SEQ ID NO: 38598 - RNA, 22 nt, Homo sapiens
cuuguacacuguuggugggaau

SEQ ID NO: 38599 - RNA, 19 nt, Homo sapiens
cuugugccugaagcuuggg

SEQ ID NO: 38600 - RNA, 22 nt, Homo sapiens
cuuguggugcuuuuacgugggc

SEQ ID NO: 38601 - RNA, 22 nt, Homo sapiens
cuuggcauuguguugauagaag

SEQ ID NO: 38602 - RNA, 22 nt, Homo sapiens
cuugcacucagaagauucaguu

SEQ ID NO: 38603 - RNA, 22 nt, Homo sapiens
cuugaccuauggaucuguuuuu

SEQ ID NO: 38604 - RNA, 22 nt, Homo sapiens
cuugacacugucacucaggcca

SEQ ID NO: 38605 - RNA, 22 nt, Homo sapiens
cuugacaaugcuucaggcugaa

SEQ ID NO: 38606 - RNA, 22 nt, Homo sapiens
cuucagcaauauauccccuggg

SEQ ID NO: 38607 - RNA, 22 nt, Homo sapiens
cuucaucugguuugugaacuuu

SEQ ID NO: 38608 - RNA, 22 nt, Homo sapiens
cuuccugaguccugggcucaca

SEQ ID NO: 38609 - RNA, 22 nt, Homo sapiens
cugaauagagcacacugauggg

SEQ ID NO: 38610 - RNA, 22 nt, Homo sapiens
cugauuguagagccccagggcu

SEQ ID NO: 38611 - RNA, 22 nt, Homo sapiens
cugauuguucuugcugggccuu

SEQ ID NO: 38612 - RNA, 22 nt, Homo sapiens
cuucaaguguggccaccugacc

SEQ ID NO: 38613 - RNA, 22 nt, Homo sapiens
gaagacauuugcugcacguccu

SEQ ID NO: 38614 - RNA, 22 nt, Homo sapiens
gaagaacuaggugagaucuaga

SEQ ID NO: 38615 - RNA, 22 nt, Homo sapiens
gaagagacagguucccacaaaa

SEQ ID NO: 38616 - RNA, 22 nt, Homo sapiens
cuuugguguauuuucagagacc

SEQ ID NO: 38617 - RNA, 22 nt, Homo sapiens
cuuugguuaauaggauauggca

SEQ ID NO: 38618 - RNA, 21 nt, Homo sapiens
cuuugguagaguuuuuagggu

SEQ ID NO: 38619 - RNA, 22 nt, Homo sapiens
gacaccauuucaguacuagguu

SEQ ID NO: 38620 - RNA, 22 nt, Homo sapiens
gagaaccuccagcaagguagua

SEQ ID NO: 38621 - RNA, 22 nt, Homo sapiens
gagaaguaaauuuauuugcaaa

SEQ ID NO: 38622 - RNA, 21 nt, Homo sapiens
gagaaucuuuucagggcaaac

SEQ ID NO: 38623 - RNA, 22 nt, Homo sapiens
gagagcaugugcuggcaucagu

SEQ ID NO: 38624 - RNA, 21 nt, Homo sapiens
gagaggauucgccagccucuu

SEQ ID NO: 38625 - RNA, 23 nt, Homo sapiens
gagaccagcuucagaaagcacga

SEQ ID NO: 38626 - RNA, 22 nt, Homo sapiens
gagacggagucacgcccuguca

SEQ ID NO: 38627 - RNA, 22 nt, Homo sapiens
gagacggagucucgcucuguca

SEQ ID NO: 38628 - RNA, 22 nt, Homo sapiens
gagguugggaugagggauacag

SEQ ID NO: 38629 - RNA, 22 nt, Homo sapiens
gagguguagagauauaccugaa

SEQ ID NO: 38630 - RNA, 22 nt, Homo sapiens
gagguggauacauuaaauaaug

SEQ ID NO: 38631 - RNA, 22 nt, Homo sapiens
gagguaggaauaaacauuugaa

SEQ ID NO: 38632 - RNA, 22 nt, Homo sapiens
gagaucaauucauggcauaguu

SEQ ID NO: 38633 - RNA, 22 nt, Homo sapiens
gagaucaucuaaucuggccucu

SEQ ID NO: 38634 - RNA, 22 nt, Homo sapiens
gagaucaugcugguucucucau

SEQ ID NO: 38635 - RNA, 23 nt, Homo sapiens
gagaucauucuggaauuagagug

SEQ ID NO: 38636 - RNA, 22 nt, Homo sapiens
gagagucacagugaauguggca

SEQ ID NO: 38637 - RNA, 22 nt, Homo sapiens
gagagugaaguuugcuaccugu

SEQ ID NO: 38638 - RNA, 22 nt, Homo sapiens
gagagugcuuggcaucugcuga

SEQ ID NO: 38639 - RNA, 22 nt, Homo sapiens
gaucugagaaagugucauaaca

SEQ ID NO: 38640 - RNA, 22 nt, Homo sapiens
gaucuggagguuuuccucauga

SEQ ID NO: 38641 - RNA, 22 nt, Homo sapiens
gaucucaguggauacugugaug

SEQ ID NO: 38642 - RNA, 22 nt, Homo sapiens
gaugaggcuagagacaugugua

SEQ ID NO: 38643 - RNA, 22 nt, Homo sapiens
gauauguaaaaauuauaucuga

SEQ ID NO: 38644 - RNA, 22 nt, Homo sapiens
gauauguucuuucacguuggug

SEQ ID NO: 38645 - RNA, 22 nt, Homo sapiens
gaucagagugaaccuuguuaug

SEQ ID NO: 38646 - RNA, 22 nt, Homo sapiens
gaucacaguuccucacgggcau

SEQ ID NO: 38647 - RNA, 22 nt, Homo sapiens
gcugguguugugaaucaggccg

SEQ ID NO: 38648 - RNA, 22 nt, Homo sapiens
gcuaaaugcaugaggcgaugug

SEQ ID NO: 38649 - RNA, 22 nt, Homo sapiens
gcuagcauucaaaugugcagcc

SEQ ID NO: 38650 - RNA, 22 nt, Homo sapiens
gcccugauacauucuucugccu

SEQ ID NO: 38651 - RNA, 22 nt, Homo sapiens
gcccgugagacuggaagcaaga

SEQ ID NO: 38652 - RNA, 22 nt, Homo sapiens
gcccuguugcccaggcuggagu

SEQ ID NO: 38653 - RNA, 22 nt, Homo sapiens
gccauggaggauuuauagaggc

SEQ ID NO: 38654 - RNA, 20 nt, Homo sapiens
gcaguguucacuguauuccu

SEQ ID NO: 38655 - RNA, 22 nt, Homo sapiens
gccccugagacuugccucgggc

SEQ ID NO: 38656 - RNA, 22 nt, Homo sapiens
gccccgggugaugcagccguca

SEQ ID NO: 38657 - RNA, 22 nt, Homo sapiens
gcccagauguuuggggucaugg

SEQ ID NO: 38658 - RNA, 19 nt, Homo sapiens
gaugcaaugcacugagguc

SEQ ID NO: 38659 - RNA, 22 nt, Homo sapiens
gcagaguauagagggcugggcc

SEQ ID NO: 38660 - RNA, 22 nt, Homo sapiens
gcaguagugcgaucucagcuca

SEQ ID NO: 38661 - RNA, 20 nt, Homo sapiens
gcaguacuuuuaguucuaag

SEQ ID NO: 38662 - RNA, 22 nt, Homo sapiens
gcagucacagggagauggugac

SEQ ID NO: 38663 - RNA, 17 nt, Homo sapiens
gcauaugucgaaccagc

SEQ ID NO: 38664 - RNA, 22 nt, Homo sapiens
cccugugaauauuaccuuauuu

SEQ ID NO: 38665 - RNA, 22 nt, Homo sapiens
cccugagcagccugaguuuccc

SEQ ID NO: 38666 - RNA, 22 nt, Homo sapiens
cccugagaugugaauuucagag

SEQ ID NO: 38667 - RNA, 20 nt, Homo sapiens
ccuaguguucuuaggcugca

SEQ ID NO: 38668 - RNA, 21 nt, Homo sapiens
ccucuuugagggaagaaaggg

SEQ ID NO: 38669 - RNA, 22 nt, Homo sapiens
ccucuuuguugagacuucacca

SEQ ID NO: 38670 - RNA, 22 nt, Homo sapiens
ccggcuguguggagaggccccu

SEQ ID NO: 38671 - RNA, 22 nt, Homo sapiens
cccgggcugaaaucagauuugu

SEQ ID NO: 38672 - RNA, 23 nt, Homo sapiens
cccucagaagugcagggagagaa

SEQ ID NO: 38673 - RNA, 18 nt, Homo sapiens
cccgggugggcuguuccc

SEQ ID NO: 38674 - RNA, 20 nt, Homo sapiens
ccccuggaguggggcugcuu

SEQ ID NO: 38675 - RNA, 20 nt, Homo sapiens
cccuaagccagaugcugggg

SEQ ID NO: 38676 - RNA, 19 nt, Homo sapiens
ccccuguggauaccgaggg

SEQ ID NO: 38677 - RNA, 21 nt, Homo sapiens
ccauggcaaugguaaacugac

SEQ ID NO: 38678 - RNA, 22 nt, Homo sapiens
ccaucccuuucugagcaguucc

SEQ ID NO: 38679 - RNA, 22 nt, Homo sapiens
ccauugcacuccauccugggca

SEQ ID NO: 38680 - RNA, 22 nt, Homo sapiens
cccacaguggccucauauccuu

SEQ ID NO: 38681 - RNA, 22 nt, Homo sapiens
cccauuguuaaguugaguaucu

SEQ ID NO: 38682 - RNA, 22 nt, Homo sapiens
caucagcaauguaugaggguuc

SEQ ID NO: 38683 - RNA, 22 nt, Homo sapiens
caucacaugcuuauuuuccuca

SEQ ID NO: 38684 - RNA, 22 nt, Homo sapiens
caucacaguacuaaucgucaua

SEQ ID NO: 38685 - RNA, 22 nt, Homo sapiens
cauagcacugcacuucagccug

SEQ ID NO: 38686 - RNA, 18 nt, Homo sapiens
cauagcacuucagcacau

SEQ ID NO: 38687 - RNA, 22 nt, Homo sapiens
cauauaguaguacuguuagguu

SEQ ID NO: 38688 - RNA, 21 nt, Homo sapiens
caucaaauugucauggugggu

SEQ ID NO: 38689 - RNA, 19 nt, Homo sapiens
caucacagagucuuccauu

SEQ ID NO: 38690 - RNA, 22 nt, Homo sapiens
ccacaaccucaacagcaucuau

SEQ ID NO: 38691 - RNA, 22 nt, Homo sapiens
caucacuuugccuccgucucua

SEQ ID NO: 38692 - RNA, 22 nt, Homo sapiens
ccacaaccuccauauccugggu

SEQ ID NO: 38693 - RNA, 22 nt, Homo sapiens
ccaagccucaguuucccucugu

SEQ ID NO: 38694 - RNA, 22 nt, Homo sapiens
ccacacugucuuggugggaaac

SEQ ID NO: 38695 - RNA, 22 nt, Homo sapiens
ccagcaccauuuauuaaauagg

SEQ ID NO: 38696 - RNA, 20 nt, Homo sapiens
ccaucaguccucucuuguuc

SEQ ID NO: 38697 - RNA, 22 nt, Homo sapiens
ccacugggcaguuuauuaucag

SEQ ID NO: 38698 - RNA, 22 nt, Homo sapiens
ccagaguuucugauucagcagg

SEQ ID NO: 38699 - RNA, 22 nt, Homo sapiens
ccacccuuccauucuuccucuu

SEQ ID NO: 38700 - RNA, 22 nt, Homo sapiens
ccacccuggagaauuugagguc

SEQ ID NO: 38701 - RNA, 22 nt, Homo sapiens
ccacauuaccuugcuugcucca

SEQ ID NO: 38702 - RNA, 22 nt, Homo sapiens
ccacugugguaucugauacugg

SEQ ID NO: 38703 - RNA, 22 nt, Homo sapiens
ccacuguuuaaauggcugagga

SEQ ID NO: 38704 - RNA, 22 nt, Homo sapiens
ccaccuguacuuaagucacuuu

SEQ ID NO: 38705 - RNA, 22 nt, Homo sapiens
cuagguucucaaaccagcguca

SEQ ID NO: 38706 - RNA, 22 nt, Homo sapiens
cucaaagugcugggacuggcug

SEQ ID NO: 38707 - RNA, 22 nt, Homo sapiens
cucaaagugcugggauuggcca

SEQ ID NO: 38708 - RNA, 22 nt, Homo sapiens
ccuuggcaauggcuggggcuga

SEQ ID NO: 38709 - RNA, 22 nt, Homo sapiens
ccuuuguuuaguugaauuguau

SEQ ID NO: 38710 - RNA, 22 nt, Homo sapiens
ccuuuguuaguuugcugagaau

SEQ ID NO: 38711 - RNA, 22 nt, Homo sapiens
ccuucacaggcacugguucaga

SEQ ID NO: 38712 - RNA, 22 nt, Homo sapiens
ccuggcacugggccccguggcu

SEQ ID NO: 38713 - RNA, 22 nt, Homo sapiens
ccugcauugucaaggccaagcc

SEQ ID NO: 38714 - RNA, 22 nt, Homo sapiens
ccuggaucauugucauucccaa

SEQ ID NO: 38715 - RNA, 22 nt, Homo sapiens
ccugagacgaauggagugaaca

SEQ ID NO: 38716 - RNA, 22 nt, Homo sapiens
ccugagacuugagggggcuucu

SEQ ID NO: 38717 - RNA, 22 nt, Homo sapiens
ccugaugacacgggagauguac

SEQ ID NO: 38718 - RNA, 21 nt, Homo sapiens
ccugaugaccucugagaguua

SEQ ID NO: 38719 - RNA, 22 nt, Homo sapiens
ccugcauaguucaccgcugaua

SEQ ID NO: 38720 - RNA, 20 nt, Homo sapiens
cucagauuauucugaagcaa

SEQ ID NO: 38721 - RNA, 22 nt, Homo sapiens
cucacggcccugcgcacuggca

SEQ ID NO: 38722 - RNA, 22 nt, Homo sapiens
cucacggugcaggcuucuggga

SEQ ID NO: 38723 - RNA, 17 nt, Homo sapiens
cucacugagaacagcua

SEQ ID NO: 38724 - RNA, 22 nt, Homo sapiens
cucaguguuaaggccaccucug

SEQ ID NO: 38725 - RNA, 22 nt, Homo sapiens
cucaugcugucuucugggguaa

SEQ ID NO: 38726 - RNA, 19 nt, Homo sapiens
cucauggagaaggagaaua

SEQ ID NO: 38727 - RNA, 22 nt, Homo sapiens
cucagugaagggcaagaggcaa

SEQ ID NO: 38728 - RNA, 22 nt, Homo sapiens
cucaggcacucugauuccagug

SEQ ID NO: 38729 - RNA, 20 nt, Homo sapiens
cucagguauuugaggcugca

SEQ ID NO: 38730 - RNA, 22 nt, Homo sapiens
cugaaauggaaugugugcacag

SEQ ID NO: 38731 - RNA, 22 nt, Homo sapiens
cugaauguuuucuucuauucug

SEQ ID NO: 38732 - RNA, 22 nt, Homo sapiens
cucuuuuguuuagcugagaggg

SEQ ID NO: 38733 - RNA, 22 nt, Homo sapiens
cucuuacaguguguggugaaag

SEQ ID NO: 38734 - RNA, 22 nt, Homo sapiens
auuaucacaguuuugcauaugg

SEQ ID NO: 38735 - RNA, 20 nt, Homo sapiens
auuagagcuacauggcuaca

SEQ ID NO: 38736 - RNA, 16 nt, Homo sapiens
auuggcaagaugccuu

SEQ ID NO: 38737 - RNA, 22 nt, Homo sapiens
auuggcaaucgucuccauuuuu

SEQ ID NO: 38738 - RNA, 22 nt, Homo sapiens
auuggacagcauuucuagacuu

SEQ ID NO: 38739 - RNA, 22 nt, Homo sapiens
auugcucacacaaagccuguuu

SEQ ID NO: 38740 - RNA, 22 nt, Homo sapiens
auuuggcauagaguaucauucu

SEQ ID NO: 38741 - RNA, 22 nt, Homo sapiens
auuuggcagugaagggaucaca

SEQ ID NO: 38742 - RNA, 22 nt, Homo sapiens
auuugguagaguucgauaccug

SEQ ID NO: 38743 - RNA, 22 nt, Homo sapiens
auuuggcaauuuugaagaugcc

SEQ ID NO: 38744 - RNA, 22 nt, Homo sapiens
auuugguguuguuuggagccua

SEQ ID NO: 38745 - RNA, 22 nt, Homo sapiens
auuugucacuuaacagccauua

SEQ ID NO: 38746 - RNA, 22 nt, Homo sapiens
auuggcaauguacauaucuugc

SEQ ID NO: 38747 - RNA, 22 nt, Homo sapiens
auuggcauauccacgacaaugc

SEQ ID NO: 38748 - RNA, 22 nt, Homo sapiens
auuguaccccaauguacaauau

SEQ ID NO: 38749 - RNA, 22 nt, Homo sapiens
auuggcaauccauauauuuucu

SEQ ID NO: 38750 - RNA, 22 nt, Homo sapiens
caguguaugcuucuauuuuugg

SEQ ID NO: 38751 - RNA, 22 nt, Homo sapiens
caguggaugauguuuucugugg

SEQ ID NO: 38752 - RNA, 23 nt, Homo sapiens
cagugguguuagagaaaucuuuu

SEQ ID NO: 38753 - RNA, 22 nt, Homo sapiens
caguugguguacauauauguau

SEQ ID NO: 38754 - RNA, 22 nt, Homo sapiens
cauacagcuaguaaguguaaga

SEQ ID NO: 38755 - RNA, 22 nt, Homo sapiens
caguccuaugauaaccauuuac

SEQ ID NO: 38756 - RNA, 20 nt, Homo sapiens
cagugcacuuucccacuggu

SEQ ID NO: 38757 - RNA, 22 nt, Homo sapiens
cagugcaaagccucugcccaga

SEQ ID NO: 38758 - RNA, 22 nt, Homo sapiens
cagcucauugcagucucgaccu

SEQ ID NO: 38759 - RNA, 23 nt, Homo sapiens
cagcucauuuggguccccuuguc

SEQ ID NO: 38760 - RNA, 22 nt, Homo sapiens
caaaccuguaggggccaagagg

SEQ ID NO: 38761 - RNA, 22 nt, Homo sapiens
caaaggcuguuauaggccagga

SEQ ID NO: 38762 - RNA, 22 nt, Homo sapiens
caaagucuucaguugauucuga

SEQ ID NO: 38763 - RNA, 22 nt, Homo sapiens
caaagugcugggaugggccagg

SEQ ID NO: 38764 - RNA, 22 nt, Homo sapiens
caacagucagcccauccacaga

SEQ ID NO: 38765 - RNA, 22 nt, Homo sapiens
caccaaccucaguagcaucugu

SEQ ID NO: 38766 - RNA, 22 nt, Homo sapiens
caccauguguucagaaggauug

SEQ ID NO: 38767 - RNA, 22 nt, Homo sapiens
cacccaguaagcaugaggcccu

SEQ ID NO: 38768 - RNA, 18 nt, Homo sapiens
cacugagcccuucacucu

SEQ ID NO: 38769 - RNA, 22 nt, Homo sapiens
caccgagugacaguagccauca

SEQ ID NO: 38770 - RNA, 22 nt, Homo sapiens
caccuguacauggcaguguccu

SEQ ID NO: 38771 - RNA, 22 nt, Homo sapiens
ugagcagagaagugcccugcgc

SEQ ID NO: 38772 - RNA, 22 nt, Homo sapiens
ugagcucagcuaguugaggugu

SEQ ID NO: 38773 - RNA, 22 nt, Homo sapiens
ugagcugagaucaugcuauugu

SEQ ID NO: 38774 - RNA, 20 nt, Homo sapiens
ugagccccuggacucaagcg

SEQ ID NO: 38775 - RNA, 22 nt, Homo sapiens
ugagccauggcaccuugucuaa

SEQ ID NO: 38776 - RNA, 22 nt, Homo sapiens
ugagcagugaguguggugcagg

SEQ ID NO: 38777 - RNA, 22 nt, Homo sapiens
ugagauggaguuucgcuuuugu

SEQ ID NO: 38778 - RNA, 22 nt, Homo sapiens
ugagaugguaaauuuuuguugu

SEQ ID NO: 38779 - RNA, 22 nt, Homo sapiens
ugaccucugauagcaguaggug

SEQ ID NO: 38780 - RNA, 22 nt, Homo sapiens
ugaccuguuugaaauugccaau

SEQ ID NO: 38781 - RNA, 22 nt, Homo sapiens
ugacccuguggcagcgucuaag

SEQ ID NO: 38782 - RNA, 22 nt, Homo sapiens
ugaggagugaacuauuucugau

SEQ ID NO: 38783 - RNA, 22 nt, Homo sapiens
ugaguagaacuccuggagaugu

SEQ ID NO: 38784 - RNA, 22 nt, Homo sapiens
ugagguugucagugucauucuu

SEQ ID NO: 38785 - RNA, 22 nt, Homo sapiens
ugagguuggggucagggcuagc

SEQ ID NO: 38786 - RNA, 22 nt, Homo sapiens
ugaggaguguauuucauucgcu

SEQ ID NO: 38787 - RNA, 22 nt, Homo sapiens
ugaggaguauguucuguagacc

SEQ ID NO: 38788 - RNA, 22 nt, Homo sapiens
ugcaccacugcacuccagcuug

SEQ ID NO: 38789 - RNA, 22 nt, Homo sapiens
ugcaccacugcuagccugggua

SEQ ID NO: 38790 - RNA, 22 nt, Homo sapiens
ugcaccacugcacuucagccug

SEQ ID NO: 38791 - RNA, 21 nt, Homo sapiens
ugcagugugguugcccugcug

SEQ ID NO: 38792 - RNA, 22 nt, Homo sapiens
ugcaccauugcauacuuaauua

SEQ ID NO: 38793 - RNA, 22 nt, Homo sapiens
ugcaccauggcacuccaggcug

SEQ ID NO: 38794 - RNA, 22 nt, Homo sapiens
ugcaccauuacacuccaggcug

SEQ ID NO: 38795 - RNA, 22 nt, Homo sapiens
ugcaccacuguacuccagucug

SEQ ID NO: 38796 - RNA, 18 nt, Homo sapiens
ugcaccaguuuacacuuc

SEQ ID NO: 38797 - RNA, 19 nt, Homo sapiens
ugcaaagucagugaagggu

SEQ ID NO: 38798 - RNA, 22 nt, Homo sapiens
ugcaccacuacacuccaggcug

SEQ ID NO: 38799 - RNA, 22 nt, Homo sapiens
ugcaccacugcacuccacccug

SEQ ID NO: 38800 - RNA, 22 nt, Homo sapiens
ugcaccacugcaccccagucug

SEQ ID NO: 38801 - RNA, 22 nt, Homo sapiens
ugaugacccugcaguucucaag

SEQ ID NO: 38802 - RNA, 22 nt, Homo sapiens
ugauggccuguucuccauaugu

SEQ ID NO: 38803 - RNA, 22 nt, Homo sapiens
ugauucccucaagugccuuaug

SEQ ID NO: 38804 - RNA, 20 nt, Homo sapiens
ugauugaccagagcaguuuu

SEQ ID NO: 38805 - RNA, 21 nt, Homo sapiens
ugauguugaccuaaguaguga

SEQ ID NO: 38806 - RNA, 22 nt, Homo sapiens
ugaugucuugcaggcacgagau

SEQ ID NO: 38807 - RNA, 21 nt, Homo sapiens
ugauaugguuuggauaugugu

SEQ ID NO: 38808 - RNA, 22 nt, Homo sapiens
ugaugaaguauaggaagggcuu

SEQ ID NO: 38809 - RNA, 22 nt, Homo sapiens
ugaucucagcucacugguugaa

SEQ ID NO: 38810 - RNA, 22 nt, Homo sapiens
ugccugagcccagcccuguagu

SEQ ID NO: 38811 - RNA, 21 nt, Homo sapiens
ugcgauccucaauccucuguu

SEQ ID NO: 38812 - RNA, 22 nt, Homo sapiens
ugccuaguagaaggugaacaug

SEQ ID NO: 38813 - RNA, 22 nt, Homo sapiens
ugccuaguguguugagaguuuu

SEQ ID NO: 38814 - RNA, 22 nt, Homo sapiens
ugccugagccagguuuuaggag

SEQ ID NO: 38815 - RNA, 22 nt, Homo sapiens
ugcgauuauuaugucacuuccu

SEQ ID NO: 38816 - RNA, 22 nt, Homo sapiens
ugcccuguaucccacuguuuca

SEQ ID NO: 38817 - RNA, 22 nt, Homo sapiens
ugcccaguggacagaaagucau

SEQ ID NO: 38818 - RNA, 22 nt, Homo sapiens
ugccaugucauagguuaagccu

SEQ ID NO: 38819 - RNA, 22 nt, Homo sapiens
ugccauagagauuuguggaacu

SEQ ID NO: 38820 - RNA, 22 nt, Homo sapiens
ugccauagcaaugguaagcuga

SEQ ID NO: 38821 - RNA, 22 nt, Homo sapiens
ugccaucauuaauauuaggcau

SEQ ID NO: 38822 - RNA, 22 nt, Homo sapiens
ugcauccauucuagacucaucu

SEQ ID NO: 38823 - RNA, 22 nt, Homo sapiens
uggagcccuaaacuucuaauau

SEQ ID NO: 38824 - RNA, 22 nt, Homo sapiens
uggagauguuuaaaauccacug

SEQ ID NO: 38825 - RNA, 22 nt, Homo sapiens
uggagguagacauugggaagag

SEQ ID NO: 38826 - RNA, 22 nt, Homo sapiens
uggaggacugcagaacugaggc

SEQ ID NO: 38827 - RNA, 23 nt, Homo sapiens
uggaggacaagcauggauaguga

SEQ ID NO: 38828 - RNA, 22 nt, Homo sapiens
uggaggucauuggaucaugggg

SEQ ID NO: 38829 - RNA, 22 nt, Homo sapiens
uggaccccugcucgggagcccu

SEQ ID NO: 38830 - RNA, 22 nt, Homo sapiens
uggaagacauugggugaagggu

SEQ ID NO: 38831 - RNA, 22 nt, Homo sapiens
uggaagacucuagucucuugag

SEQ ID NO: 38832 - RNA, 22 nt, Homo sapiens
uggaagaugggaccucaguuuu

SEQ ID NO: 38833 - RNA, 22 nt, Homo sapiens
uggcaaagugugacgugggggu

SEQ ID NO: 38834 - RNA, 21 nt, Homo sapiens
uggcaaaaugggcaguggguu

SEQ ID NO: 38835 - RNA, 22 nt, Homo sapiens
uggcaaaaaucacaaguaccuu

SEQ ID NO: 38836 - RNA, 22 nt, Homo sapiens
uggcaagaacaacaauuacuuu

SEQ ID NO: 38837 - RNA, 22 nt, Homo sapiens
uggcaagaacgaaauguagggu

SEQ ID NO: 38838 - RNA, 22 nt, Homo sapiens
uggcaagaacugcaauugcuuu

SEQ ID NO: 38839 - RNA, 20 nt, Homo sapiens
uggcaagauggcagaauaga

SEQ ID NO: 38840 - RNA, 22 nt, Homo sapiens
uggcaagagggaugcaagguuu

SEQ ID NO: 38841 - RNA, 22 nt, Homo sapiens
uggcaagagcugcauucaucug

SEQ ID NO: 38842 - RNA, 22 nt, Homo sapiens
uggcaagagaacaacaucucuc

SEQ ID NO: 38843 - RNA, 22 nt, Homo sapiens
uggcagaugggugagcuggaga

SEQ ID NO: 38844 - RNA, 22 nt, Homo sapiens
uggcagaugcucuuggugccca

SEQ ID NO: 38845 - RNA, 20 nt, Homo sapiens
uggcaccugacagauagcca

SEQ ID NO: 38846 - RNA, 22 nt, Homo sapiens
uggcaauguggaaugguccagg

SEQ ID NO: 38847 - RNA, 22 nt, Homo sapiens
uggcaccauccaggugucucua

SEQ ID NO: 38848 - RNA, 22 nt, Homo sapiens
uggcacuggagauacauuaaua

SEQ ID NO: 38849 - RNA, 22 nt, Homo sapiens
uggcagacaaauuugagcauau

SEQ ID NO: 38850 - RNA, 22 nt, Homo sapiens
uggcaguuucauaugguucaac

SEQ ID NO: 38851 - RNA, 22 nt, Homo sapiens
uggcagcgugaauguggcugaa

SEQ ID NO: 38852 - RNA, 22 nt, Homo sapiens
uggcaguuuacagcuuuaggag

SEQ ID NO: 38853 - RNA, 22 nt, Homo sapiens
uggcaguuuugauguggagaga

SEQ ID NO: 38854 - RNA, 22 nt, Homo sapiens
uggcucuuucuagacuuaauua

SEQ ID NO: 38855 - RNA, 22 nt, Homo sapiens
uggucaaaucugaugugagaaa

SEQ ID NO: 38856 - RNA, 22 nt, Homo sapiens
ugguccccaauacuucuauaga

SEQ ID NO: 38857 - RNA, 22 nt, Homo sapiens
uggucagaaaauuacuugauau

SEQ ID NO: 38858 - RNA, 22 nt, Homo sapiens
uggucaguugaguccuugccaa

SEQ ID NO: 38859 - RNA, 21 nt, Homo sapiens
uggucaguuuucucacuagga

SEQ ID NO: 38860 - RNA, 22 nt, Homo sapiens
ugguaagaaaaccauuauuagc

SEQ ID NO: 38861 - RNA, 22 nt, Homo sapiens
uggguaggcccucauuggacag

SEQ ID NO: 38862 - RNA, 22 nt, Homo sapiens
ugggaaacauccagcacauacu

SEQ ID NO: 38863 - RNA, 22 nt, Homo sapiens
uggguagugucagcugauccau

SEQ ID NO: 38864 - RNA, 22 nt, Homo sapiens
uggguaguuucuuacaacucug

SEQ ID NO: 38865 - RNA, 19 nt, Homo sapiens
uggguagugaugagacaua

SEQ ID NO: 38866 - RNA, 22 nt, Homo sapiens
uggguaguguaaagcacuccag

SEQ ID NO: 38867 - RNA, 22 nt, Homo sapiens
uggcuuucuggggcuucuguuc

SEQ ID NO: 38868 - RNA, 22 nt, Homo sapiens
ucaggugcaguggcucaugcuu

SEQ ID NO: 38869 - RNA, 22 nt, Homo sapiens
ucagguaucucuauagcaaugu

SEQ ID NO: 38870 - RNA, 22 nt, Homo sapiens
ucagguaucuucauagcaaugc

SEQ ID NO: 38871 - RNA, 21 nt, Homo sapiens
ucaggaccucuaguuagccag

SEQ ID NO: 38872 - RNA, 22 nt, Homo sapiens
ucagguugcuaaguauaauauu

SEQ ID NO: 38873 - RNA, 22 nt, Homo sapiens
ucaguaguuuuuuuacuaggug

SEQ ID NO: 38874 - RNA, 22 nt, Homo sapiens
ucagcacauucaaggccugccu

SEQ ID NO: 38875 - RNA, 22 nt, Homo sapiens
ucagcaccauguaacaauugau

SEQ ID NO: 38876 - RNA, 22 nt, Homo sapiens
ucagcaucacgugggcucccgu

SEQ ID NO: 38877 - RNA, 23 nt, Homo sapiens
ucaucacagcauuuccugguauu

SEQ ID NO: 38878 - RNA, 21 nt, Homo sapiens
ucaucagucaaagacaauggu

SEQ ID NO: 38879 - RNA, 22 nt, Homo sapiens
ucaucuggcgaaugugaagagu

SEQ ID NO: 38880 - RNA, 22 nt, Homo sapiens
ucaugagacacacuggaaagga

SEQ ID NO: 38881 - RNA, 22 nt, Homo sapiens
ucaugacacagcauacugacuu

SEQ ID NO: 38882 - RNA, 22 nt, Homo sapiens
ucauacaggccaccagggaagu

SEQ ID NO: 38883 - RNA, 22 nt, Homo sapiens
ucagugacuggguauuaaauca

SEQ ID NO: 38884 - RNA, 22 nt, Homo sapiens
ucagugcaggaaucucuagcca

SEQ ID NO: 38885 - RNA, 22 nt, Homo sapiens
uccaugaguccauuagaaaaaa

SEQ ID NO: 38886 - RNA, 22 nt, Homo sapiens
uccauaguugcacucuggagcc

SEQ ID NO: 38887 - RNA, 19 nt, Homo sapiens
uccaugagcccacagugau

SEQ ID NO: 38888 - RNA, 22 nt, Homo sapiens
uccaguguuccucagucacccc

SEQ ID NO: 38889 - RNA, 22 nt, Homo sapiens
uccauagugagcagucaaugua

SEQ ID NO: 38890 - RNA, 22 nt, Homo sapiens
uccauaguacuagaaacugacc

SEQ ID NO: 38891 - RNA, 19 nt, Homo sapiens
uccccgggucuagugcagc

SEQ ID NO: 38892 - RNA, 22 nt, Homo sapiens
uccugagacucacaggcucccc

SEQ ID NO: 38893 - RNA, 22 nt, Homo sapiens
uccugagacugaggagcuuugg

SEQ ID NO: 38894 - RNA, 22 nt, Homo sapiens
uccugagagcagacccucuaua

SEQ ID NO: 38895 - RNA, 22 nt, Homo sapiens
ucccaguggucuugaaacaggg

SEQ ID NO: 38896 - RNA, 22 nt, Homo sapiens
ucccaguguguagcuugucucu

SEQ ID NO: 38897 - RNA, 22 nt, Homo sapiens
ucccagugaaaccccaccuuca

SEQ ID NO: 38898 - RNA, 22 nt, Homo sapiens
uccuugagccugggaguuauag

SEQ ID NO: 38899 - RNA, 20 nt, Homo sapiens
uccugagauucccaguucuc

SEQ ID NO: 38900 - RNA, 22 nt, Homo sapiens
ucaugcaaugagucaggaggca

SEQ ID NO: 38901 - RNA, 20 nt, Homo sapiens
ucaugccacugcgcuccagc

SEQ ID NO: 38902 - RNA, 21 nt, Homo sapiens
ucaugccacugcacuuuagcc

SEQ ID NO: 38903 - RNA, 22 nt, Homo sapiens
ucauggcacugaugagaguuuc

SEQ ID NO: 38904 - RNA, 22 nt, Homo sapiens
ucauggggugcuuugcuagauu

SEQ ID NO: 38905 - RNA, 22 nt, Homo sapiens
ucaugugaggauaacaauagug

SEQ ID NO: 38906 - RNA, 22 nt, Homo sapiens
ucauucuuucuguggaggggcu

SEQ ID NO: 38907 - RNA, 22 nt, Homo sapiens
uccacaguaaggacccugccuu

SEQ ID NO: 38908 - RNA, 21 nt, Homo sapiens
ucauugggugcagcccacccu

SEQ ID NO: 38909 - RNA, 22 nt, Homo sapiens
ucauugguugcguaauuugauu

SEQ ID NO: 38910 - RNA, 19 nt, Homo sapiens
uccaccgcgugcaccucua

SEQ ID NO: 38911 - RNA, 22 nt, Homo sapiens
uccacguggucuaucuguccuu

SEQ ID NO: 38912 - RNA, 22 nt, Homo sapiens
uccagguuuggcuuuauaacuu

SEQ ID NO: 38913 - RNA, 21 nt, Homo sapiens
uccagcuuugagaguuguggu

SEQ ID NO: 38914 - RNA, 22 nt, Homo sapiens
uccacugagcuagaccacuugg

SEQ ID NO: 38915 - RNA, 21 nt, Homo sapiens
aacagugcugaacagacaccu

SEQ ID NO: 38916 - RNA, 22 nt, Homo sapiens
aacagugcauucagggauauau

SEQ ID NO: 38917 - RNA, 22 nt, Homo sapiens
aacagucuccaguuguauccau

SEQ ID NO: 38918 - RNA, 22 nt, Homo sapiens
ucuuugauaagauccagaagaa

SEQ ID NO: 38919 - RNA, 19 nt, Homo sapiens
ucuuugaggcaucgcccuc

SEQ ID NO: 38920 - RNA, 22 nt, Homo sapiens
ucuuugaguuauugugcagacu

SEQ ID NO: 38921 - RNA, 22 nt, Homo sapiens
aacagagcuggugacuccaggu

SEQ ID NO: 38922 - RNA, 22 nt, Homo sapiens
ucugugcauuguaacaacuaaa

SEQ ID NO: 38923 - RNA, 22 nt, Homo sapiens
ucugugcauuuucuuuuagacu

SEQ ID NO: 38924 - RNA, 22 nt, Homo sapiens
ucugugcauggcagaggaauga

SEQ ID NO: 38925 - RNA, 22 nt, Homo sapiens
ucugucuuugucaggaccagag

SEQ ID NO: 38926 - RNA, 22 nt, Homo sapiens
ucugucuuguccucacccuaga

SEQ ID NO: 38927 - RNA, 23 nt, Homo sapiens
ucucauuccuugaaaauaaugac

SEQ ID NO: 38928 - RNA, 22 nt, Homo sapiens
ucuccauuuguaaggguuucuc

SEQ ID NO: 38929 - RNA, 22 nt, Homo sapiens
ucuccauuguccagaugaggaa

SEQ ID NO: 38930 - RNA, 17 nt, Homo sapiens
ucucccaucccuuucuc

SEQ ID NO: 38931 - RNA, 22 nt, Homo sapiens
ucuggguuuuuccauugccggu

SEQ ID NO: 38932 - RNA, 23 nt, Homo sapiens
ucugguguugucaaaugcugguu

SEQ ID NO: 38933 - RNA, 22 nt, Homo sapiens
ucucagugaaauaaauuauuuu

SEQ ID NO: 38934 - RNA, 22 nt, Homo sapiens
ucucagugugguaaaaguuuuu

SEQ ID NO: 38935 - RNA, 22 nt, Homo sapiens
ucucauggcucacccugcauag

SEQ ID NO: 38936 - RNA, 22 nt, Homo sapiens
ucucagcacagucagggcgccu

SEQ ID NO: 38937 - RNA, 22 nt, Homo sapiens
ugaaugugauggguuucaugug

SEQ ID NO: 38938 - RNA, 18 nt, Homo sapiens
ugacauugagcugagaaa

SEQ ID NO: 38939 - RNA, 23 nt, Homo sapiens
ugacauguaauucaguccagcag

SEQ ID NO: 38940 - RNA, 22 nt, Homo sapiens
ugacaagacuacauaucccauu

SEQ ID NO: 38941 - RNA, 22 nt, Homo sapiens
ugacaagaacuuuccauaguaa

SEQ ID NO: 38942 - RNA, 22 nt, Homo sapiens
ugacaucguugccauguuaugc

SEQ ID NO: 38943 - RNA, 22 nt, Homo sapiens
ucuuugguaauggaugucugau

SEQ ID NO: 38944 - RNA, 22 nt, Homo sapiens
ugaaauguaaguugucuagucu

SEQ ID NO: 38945 - RNA, 22 nt, Homo sapiens
ugaacacagccugccucugcca

SEQ ID NO: 38946 - RNA, 21 nt, Homo sapiens
ugaaguguaaccgugcagggc

SEQ ID NO: 38947 - RNA, 22 nt, Homo sapiens
ugaauagacagucacugccucc

SEQ ID NO: 38948 - RNA, 22 nt, Homo sapiens
ugaauagagcugcaguggacau

SEQ ID NO: 38949 - RNA, 22 nt, Homo sapiens
ugaagaucuuaggagcugaggg

SEQ ID NO: 38950 - RNA, 22 nt, Homo sapiens
ugaagacucaguuugagggaca

SEQ ID NO: 38951 - RNA, 18 nt, Homo sapiens
uugaaugcgucccagaga

SEQ ID NO: 38952 - RNA, 22 nt, Homo sapiens
uugaugauguuucugccuugcc

SEQ ID NO: 38953 - RNA, 21 nt, Homo sapiens
uugcaaaugcugcugccugau

SEQ ID NO: 38954 - RNA, 18 nt, Homo sapiens
uugcaaauucuucccugu

SEQ ID NO: 38955 - RNA, 22 nt, Homo sapiens
uugaagugaagaacaauaucac

SEQ ID NO: 38956 - RNA, 22 nt, Homo sapiens
uucuugcuguauccucacaugg

SEQ ID NO: 38957 - RNA, 22 nt, Homo sapiens
uugcauagugcugagguucggg

SEQ ID NO: 38958 - RNA, 19 nt, Homo sapiens
uugcauagguugaaccagc

SEQ ID NO: 38959 - RNA, 22 nt, Homo sapiens
uugcacauggcaggugcucaau

SEQ ID NO: 38960 - RNA, 22 nt, Homo sapiens
uugcacagucuagcuccaccuu

SEQ ID NO: 38961 - RNA, 22 nt, Homo sapiens
uugcacagugguuuagagccug

SEQ ID NO: 38962 - RNA, 22 nt, Homo sapiens
uugcaccccuacuauuugccaa

SEQ ID NO: 38963 - RNA, 22 nt, Homo sapiens
uugcacauuuuuucuggcagaa

SEQ ID NO: 38964 - RNA, 22 nt, Homo sapiens
uuggaagacauucugucugcua

SEQ ID NO: 38965 - RNA, 22 nt, Homo sapiens
uugcugagucuuucuagguugc

SEQ ID NO: 38966 - RNA, 22 nt, Homo sapiens
uugcuggugguucgagcaacac

SEQ ID NO: 38967 - RNA, 22 nt, Homo sapiens
uugcucaggcuagaguucagcu

SEQ ID NO: 38968 - RNA, 22 nt, Homo sapiens
uugcucaggcuggaguacaaug

SEQ ID NO: 38969 - RNA, 22 nt, Homo sapiens
uugcuccucugccaggaccugu

SEQ ID NO: 38970 - RNA, 22 nt, Homo sapiens
uugcuagagaugagggaugugu

SEQ ID NO: 38971 - RNA, 22 nt, Homo sapiens
uuggccccuccaaaucucaugu

SEQ ID NO: 38972 - RNA, 22 nt, Homo sapiens
uuggccauaugacuugcuuugg

SEQ ID NO: 38973 - RNA, 22 nt, Homo sapiens
uuggccauggagcacuuuucua

SEQ ID NO: 38974 - RNA, 20 nt, Homo sapiens
uuggcauuuagacaagaguu

SEQ ID NO: 38975 - RNA, 22 nt, Homo sapiens
uuggcauuuauucuaaggucaa

SEQ ID NO: 38976 - RNA, 22 nt, Homo sapiens
uugguccucccaugcucaagag

SEQ ID NO: 38977 - RNA, 22 nt, Homo sapiens
uugguccccacuccccugccaa

SEQ ID NO: 38978 - RNA, 22 nt, Homo sapiens
uugguccccuucaaccagcugu

SEQ ID NO: 38979 - RNA, 22 nt, Homo sapiens
uuggcauugaguuucaaaucau

SEQ ID NO: 38980 - RNA, 22 nt, Homo sapiens
uuggcauuguggauggaaucau

SEQ ID NO: 38981 - RNA, 22 nt, Homo sapiens
uuggcagugguucugacggacc

SEQ ID NO: 38982 - RNA, 22 nt, Homo sapiens
uuggcagucugaggcacagacu

SEQ ID NO: 38983 - RNA, 22 nt, Homo sapiens
uuggcagugcccgaugcugggg

SEQ ID NO: 38984 - RNA, 22 nt, Homo sapiens
uuggaagguaaucaaaaguucu

SEQ ID NO: 38985 - RNA, 22 nt, Homo sapiens
uuggcaaauagguuuuauugca

SEQ ID NO: 38986 - RNA, 22 nt, Homo sapiens
uuggaauauaaccuguuucuaa

SEQ ID NO: 38987 - RNA, 22 nt, Homo sapiens
uuggcacgugguggggcucgga

SEQ ID NO: 38988 - RNA, 22 nt, Homo sapiens
uuggcaaaugucacaaaucagg

SEQ ID NO: 38989 - RNA, 22 nt, Homo sapiens
uuggcaagcuguuaauuauaaa

SEQ ID NO: 38990 - RNA, 22 nt, Homo sapiens
uuggaaggcuccuaaugaaugg

SEQ ID NO: 38991 - RNA, 22 nt, Homo sapiens
uuggaauacucaaaagguuggg

SEQ ID NO: 38992 - RNA, 22 nt, Homo sapiens
uuggaagagaagggagauaaac

SEQ ID NO: 38993 - RNA, 22 nt, Homo sapiens
uuggaagacaaugcugauucuc

SEQ ID NO: 38994 - RNA, 22 nt, Homo sapiens
uuuagguagucaaagguuaguc

SEQ ID NO: 38995 - RNA, 22 nt, Homo sapiens
uuguguccccacccaaaucuca

SEQ ID NO: 38996 - RNA, 22 nt, Homo sapiens
uuguguccccacccaaauuuca

SEQ ID NO: 38997 - RNA, 22 nt, Homo sapiens
uuguguccccacucaaauuaca

SEQ ID NO: 38998 - RNA, 22 nt, Homo sapiens
uugugguuuuuaaaacuaggug

SEQ ID NO: 38999 - RNA, 22 nt, Homo sapiens
uuucuacagugaacgauuucua

SEQ ID NO: 39000 - RNA, 22 nt, Homo sapiens
uuucacaguguucucccccaga

SEQ ID NO: 39001 - RNA, 22 nt, Homo sapiens
uugugguaggaugaagagauga

SEQ ID NO: 39002 - RNA, 22 nt, Homo sapiens
uugugguaggcauguaagauga

SEQ ID NO: 39003 - RNA, 22 nt, Homo sapiens
uugugguuuuagcacuguggau

SEQ ID NO: 39004 - RNA, 22 nt, Homo sapiens
uugugguugauacacguaggaa

SEQ ID NO: 39005 - RNA, 16 nt, Homo sapiens
uuguggcuuuugcaca

SEQ ID NO: 39006 - RNA, 22 nt, Homo sapiens
uugucacucuuccuaggguagg

SEQ ID NO: 39007 - RNA, 22 nt, Homo sapiens
uugugcuuuugagcugagauga

SEQ ID NO: 39008 - RNA, 22 nt, Homo sapiens
uugucaaacucauucuccaucc

SEQ ID NO: 39009 - RNA, 22 nt, Homo sapiens
uuugcacuuuaauauaauguga

SEQ ID NO: 39010 - RNA, 23 nt, Homo sapiens
uuugcacuugcuccuucuauggc

SEQ ID NO: 39011 - RNA, 22 nt, Homo sapiens
uuugcaguguaguuggccagca

SEQ ID NO: 39012 - RNA, 22 nt, Homo sapiens
uuugucuccuaagacucugugg

SEQ ID NO: 39013 - RNA, 22 nt, Homo sapiens
uuugucccuuugcaguggcaca

SEQ ID NO: 39014 - RNA, 22 nt, Homo sapiens
uuugugcuccugugagaaucua

SEQ ID NO: 39015 - RNA, 22 nt, Homo sapiens
uuugugcuccuaugagaaucua

SEQ ID NO: 39016 - RNA, 22 nt, Homo sapiens
uuugggaaugguuugucuccca

SEQ ID NO: 39017 - RNA, 22 nt, Homo sapiens
uuuggcauuuuacuacucaaau

SEQ ID NO: 39018 - RNA, 22 nt, Homo sapiens
uuugccuguagacacuuacccu

SEQ ID NO: 39019 - RNA, 19 nt, Homo sapiens
uuugccuaggcacauggcc

SEQ ID NO: 39020 - RNA, 23 nt, Homo sapiens
uuugccacuuauuagcugggagg

SEQ ID NO: 39021 - RNA, 22 nt, Homo sapiens
uuugccaaugggaauuuuccua

SEQ ID NO: 39022 - RNA, 22 nt, Homo sapiens
uucacagaguuauuuuuaugcu

SEQ ID NO: 39023 - RNA, 22 nt, Homo sapiens
uucacagccgcaccccaucacu

SEQ ID NO: 39024 - RNA, 22 nt, Homo sapiens
uucagguucauuugcugcuauu

SEQ ID NO: 39025 - RNA, 22 nt, Homo sapiens
uucagugagacgaaaacaacaa

SEQ ID NO: 39026 - RNA, 22 nt, Homo sapiens
uucagugguuauuugugagauu

SEQ ID NO: 39027 - RNA, 22 nt, Homo sapiens
uucaguauugcaccuggagucc

SEQ ID NO: 39028 - RNA, 19 nt, Homo sapiens
uucaaugcagcauugccac

SEQ ID NO: 39029 - RNA, 22 nt, Homo sapiens
uuauggccauucuuguaggagu

SEQ ID NO: 39030 - RNA, 22 nt, Homo sapiens
uuauaguuuuucaccuggagaa

SEQ ID NO: 39031 - RNA, 20 nt, Homo sapiens
uuauagcuacaucuugacug

SEQ ID NO: 39032 - RNA, 22 nt, Homo sapiens
uuauauguuucuguuuggaggc

SEQ ID NO: 39033 - RNA, 22 nt, Homo sapiens
uuacagucaaguuacauuucuc

SEQ ID NO: 39034 - RNA, 22 nt, Homo sapiens
uuacaguucugguggagaggua

SEQ ID NO: 39035 - RNA, 21 nt, Homo sapiens
uuacaguugguugugaggugg

SEQ ID NO: 39036 - RNA, 22 nt, Homo sapiens
uuaccacagugccugucuaaug

SEQ ID NO: 39037 - RNA, 22 nt, Homo sapiens
uucuauugguaauauuuucugu

SEQ ID NO: 39038 - RNA, 22 nt, Homo sapiens
uuccuacugugcaaaguugcaa

SEQ ID NO: 39039 - RNA, 22 nt, Homo sapiens
uucugugcuuguggaugaagug

SEQ ID NO: 39040 - RNA, 22 nt, Homo sapiens
uucuccugguggacccuaaacg

SEQ ID NO: 39041 - RNA, 22 nt, Homo sapiens
uucugugguugaaaggagagau

SEQ ID NO: 39042 - RNA, 22 nt, Homo sapiens
uucuuccagccuugaggggccc

SEQ ID NO: 39043 - RNA, 22 nt, Homo sapiens
uucauaguaacaguaacuaugg

SEQ ID NO: 39044 - RNA, 18 nt, Homo sapiens
uucauaguagcaugauuu

SEQ ID NO: 39045 - RNA, 22 nt, Homo sapiens
uucauagugaaaaauucaaagu

SEQ ID NO: 39046 - RNA, 22 nt, Homo sapiens
uucaucagcuguagaugucaug

SEQ ID NO: 39047 - RNA, 22 nt, Homo sapiens
uucauaguuuauacugauauuu

SEQ ID NO: 39048 - RNA, 20 nt, Homo sapiens
uucaucaggauauuggucua

SEQ ID NO: 39049 - RNA, 21 nt, Homo sapiens
uucaucuggccguauuccagg

SEQ ID NO: 39050 - RNA, 22 nt, Homo sapiens
uucauguaauauuucacagcuu

SEQ ID NO: 39051 - RNA, 22 nt, Homo sapiens
uucauggugguacaaaagcaau

SEQ ID NO: 39052 - RNA, 22 nt, Homo sapiens
uucauuggacuuguguucuuga

SEQ ID NO: 39053 - RNA, 22 nt, Homo sapiens
uuccauaggcuagaucaaccag

SEQ ID NO: 39054 - RNA, 22 nt, Homo sapiens
uuccccgugaaacuuucucauu

SEQ ID NO: 39055 - RNA, 22 nt, Homo sapiens
uucccaguaaacucuaucccuc

SEQ ID NO: 39056 - RNA, 20 nt, Homo sapiens
uucccucagccuugagggua

SEQ ID NO: 39057 - RNA, 22 nt, Homo sapiens
uucccuugcaggaugaucugga

SEQ ID NO: 39058 - RNA, 22 nt, Homo sapiens
ugugcacauugugcagguugau

SEQ ID NO: 39059 - RNA, 22 nt, Homo sapiens
ugugcaguuuugagugaauuuc

SEQ ID NO: 39060 - RNA, 22 nt, Homo sapiens
ugugcauaugucuuuauaguag

SEQ ID NO: 39061 - RNA, 22 nt, Homo sapiens
ugugcaaucagcuucauuacau

SEQ ID NO: 39062 - RNA, 22 nt, Homo sapiens
ugugcaaaaguaauugcgguuu

SEQ ID NO: 39063 - RNA, 22 nt, Homo sapiens
ugugauugauuaaugugugcua

SEQ ID NO: 39064 - RNA, 22 nt, Homo sapiens
ugugccacugcacucuggccug

SEQ ID NO: 39065 - RNA, 22 nt, Homo sapiens
ugugccacugcacuccugccug

SEQ ID NO: 39066 - RNA, 22 nt, Homo sapiens
ugugccacugcacucccgccug

SEQ ID NO: 39067 - RNA, 22 nt, Homo sapiens
ugugccacuccagcucuagcuu

SEQ ID NO: 39068 - RNA, 22 nt, Homo sapiens
ugugccacuccaggaggcuguu

SEQ ID NO: 39069 - RNA, 22 nt, Homo sapiens
uguguaaagcuuguuccagaaa

SEQ ID NO: 39070 - RNA, 18 nt, Homo sapiens
uguggcuguuuuccaaua

SEQ ID NO: 39071 - RNA, 22 nt, Homo sapiens
uguggcuucuuugguucaguau

SEQ ID NO: 39072 - RNA, 22 nt, Homo sapiens
ugugcuuguaaaggccagagca

SEQ ID NO: 39073 - RNA, 22 nt, Homo sapiens
uguggcagugcuuuaugaaacc

SEQ ID NO: 39074 - RNA, 22 nt, Homo sapiens
uguggccccuagcuacuagaga

SEQ ID NO: 39075 - RNA, 19 nt, Homo sapiens
uggugccuuguucuuggau

SEQ ID NO: 39076 - RNA, 20 nt, Homo sapiens
ugguccccugagucuggcuu

SEQ ID NO: 39077 - RNA, 19 nt, Homo sapiens
uggucccccgcaaucucau

SEQ ID NO: 39078 - RNA, 21 nt, Homo sapiens
uggucccuucagaucggauuu

SEQ ID NO: 39079 - RNA, 22 nt, Homo sapiens
uggucagaugcugaguggaucu

SEQ ID NO: 39080 - RNA, 22 nt, Homo sapiens
ugugaugguuuggaagcuucuu

SEQ ID NO: 39081 - RNA, 22 nt, Homo sapiens
uuaaggccccgcccauucaggc

SEQ ID NO: 39082 - RNA, 22 nt, Homo sapiens
uuaaggccugaagcucauaaag

SEQ ID NO: 39083 - RNA, 22 nt, Homo sapiens
uguuuguuugagauggagucuc

SEQ ID NO: 39084 - RNA, 22 nt, Homo sapiens
uuaaaguguuuucaaaauguca

SEQ ID NO: 39085 - RNA, 22 nt, Homo sapiens
ugugucuugcuggugccugcau

SEQ ID NO: 39086 - RNA, 22 nt, Homo sapiens
uuuuaugggcuauuugcauuag

SEQ ID NO: 39087 - RNA, 22 nt, Homo sapiens
uuccaagugggaaacaaaaaug

SEQ ID NO: 39088 - RNA, 22 nt, Homo sapiens
uucaugucuuggcuguuagagu

SEQ ID NO: 39089 - RNA, 22 nt, Homo sapiens
uuccagugggacgagaugugga

SEQ ID NO: 39090 - RNA, 22 nt, Homo sapiens
uuccauguaguugaacgguuuu

SEQ ID NO: 39091 - RNA, 22 nt, Homo sapiens
uuccuggaggggaaguguccaa

SEQ ID NO: 39092 - RNA, 22 nt, Homo sapiens
uucccaguuggggaaagcgacc

SEQ ID NO: 39093 - RNA, 22 nt, Homo sapiens
uucccucagaaacacacagccc

SEQ ID NO: 39094 - RNA, 22 nt, Homo sapiens
uucccugagcaucuguugagcc

SEQ ID NO: 39095 - RNA, 22 nt, Homo sapiens
uucugcacaucgaucacaagau

SEQ ID NO: 39096 - RNA, 22 nt, Homo sapiens
uucugguuaauacuugcaaaaa

SEQ ID NO: 39097 - RNA, 22 nt, Homo sapiens
uucugccaaucaacccacaucc

SEQ ID NO: 39098 - RNA, 22 nt, Homo sapiens
uucuggccuccauuuuucuccu

SEQ ID NO: 39099 - RNA, 22 nt, Homo sapiens
uuccuuguuuauuuacaggagg

SEQ ID NO: 39100 - RNA, 22 nt, Homo sapiens
uucuauguuugaaaaugccaaa

SEQ ID NO: 39101 - RNA, 22 nt, Homo sapiens
uucaagugguucagaagucuga

SEQ ID NO: 39102 - RNA, 22 nt, Homo sapiens
uucagcaaugacagccuauaua

SEQ ID NO: 39103 - RNA, 22 nt, Homo sapiens
uucaagucaacaagcacuugag

SEQ ID NO: 39104 - RNA, 22 nt, Homo sapiens
uucaaguaagaaagacaucagg

SEQ ID NO: 39105 - RNA, 23 nt, Homo sapiens
uucaacagguagacccucccugc

SEQ ID NO: 39106 - RNA, 22 nt, Homo sapiens
uucaacagugauggccuuugua

SEQ ID NO: 39107 - RNA, 22 nt, Homo sapiens
uucauguaauuccauaagguaa

SEQ ID NO: 39108 - RNA, 22 nt, Homo sapiens
uucauguaauauauuucaggcc

SEQ ID NO: 39109 - RNA, 22 nt, Homo sapiens
uuaguugcauucaugugagagu

SEQ ID NO: 39110 - RNA, 22 nt, Homo sapiens
uuauaacucugcagccugguau

SEQ ID NO: 39111 - RNA, 22 nt, Homo sapiens
uuacacguaauaucacggugug

SEQ ID NO: 39112 - RNA, 22 nt, Homo sapiens
uguugcacuccagccuggguga

SEQ ID NO: 39113 - RNA, 22 nt, Homo sapiens
uguugcacuccauccugggcga

SEQ ID NO: 39114 - RNA, 22 nt, Homo sapiens
uguugcacuccagccugggcaa

SEQ ID NO: 39115 - RNA, 22 nt, Homo sapiens
uguuacaguguaggccuugggu

SEQ ID NO: 39116 - RNA, 22 nt, Homo sapiens
uguuauugagguuacuuauaag

SEQ ID NO: 39117 - RNA, 22 nt, Homo sapiens
uuaaaaguauaggccuggcaua

SEQ ID NO: 39118 - RNA, 22 nt, Homo sapiens
uguuuugguugucccuggccag

SEQ ID NO: 39119 - RNA, 22 nt, Homo sapiens
uuaaacugcuugaauuggguuu

SEQ ID NO: 39120 - RNA, 22 nt, Homo sapiens
uguuuuggaggccagaagucca

SEQ ID NO: 39121 - RNA, 22 nt, Homo sapiens
uuaagcaaagguaacaugagaa

SEQ ID NO: 39122 - RNA, 22 nt, Homo sapiens
uuaauuguaucuauagauguca

SEQ ID NO: 39123 - RNA, 21 nt, Homo sapiens
ugucuuggagccagacgccag

SEQ ID NO: 39124 - RNA, 22 nt, Homo sapiens
ugugaacacagaggcuauggca

SEQ ID NO: 39125 - RNA, 22 nt, Homo sapiens
ugucuuuguuaguuguccuagu

SEQ ID NO: 39126 - RNA, 20 nt, Homo sapiens
ugguccccaccaaaucucau

SEQ ID NO: 39127 - RNA, 22 nt, Homo sapiens
uggucccaugaacuuuagguca

SEQ ID NO: 39128 - RNA, 23 nt, Homo sapiens
uggucccguguucuggcuuuagg

SEQ ID NO: 39129 - RNA, 22 nt, Homo sapiens
uggucccucugaaaauugggug

SEQ ID NO: 39130 - RNA, 22 nt, Homo sapiens
uggucuucuggccuccagaacc

SEQ ID NO: 39131 - RNA, 22 nt, Homo sapiens
ugucauggggaaaauaacagac

SEQ ID NO: 39132 - RNA, 22 nt, Homo sapiens
ugucaugucuuuguguaucaau

SEQ ID NO: 39133 - RNA, 22 nt, Homo sapiens
ugucauguauauaccacuucca

SEQ ID NO: 39134 - RNA, 22 nt, Homo sapiens
ugugacaguuaguuugguguua

SEQ ID NO: 39135 - RNA, 22 nt, Homo sapiens
ugugacagguagguaauuuuug

SEQ ID NO: 39136 - RNA, 22 nt, Homo sapiens
ugugacaaauuuaguggacugu

SEQ ID NO: 39137 - RNA, 22 nt, Homo sapiens
ugugacagcacagcaucucuuu

SEQ ID NO: 39138 - RNA, 22 nt, Homo sapiens
ugugaaugaagaaugcuaaccu

SEQ ID NO: 39139 - RNA, 22 nt, Homo sapiens
ugugaaugauggagugucgaau

SEQ ID NO: 39140 - RNA, 22 nt, Homo sapiens
ugugccacugcacuucagccug

SEQ ID NO: 39141 - RNA, 22 nt, Homo sapiens
ugugcgcaucggggccugcuuc

SEQ ID NO: 39142 - RNA, 22 nt, Homo sapiens
ugugccuaguaauguguccaga

SEQ ID NO: 39143 - RNA, 22 nt, Homo sapiens
ugugcguguaagagaucuaggu

SEQ ID NO: 39144 - RNA, 20 nt, Homo sapiens
uguggcacuguaucucucag

SEQ ID NO: 39145 - RNA, 22 nt, Homo sapiens
uguggcuuuuucuuggcugagg

SEQ ID NO: 39146 - RNA, 22 nt, Homo sapiens
uguggcauuuucagaaaggaug

SEQ ID NO: 39147 - RNA, 22 nt, Homo sapiens
uugauaguuuuaaaauuaaucu

SEQ ID NO: 39148 - RNA, 22 nt, Homo sapiens
uugaguccccacacuggguccc

SEQ ID NO: 39149 - RNA, 22 nt, Homo sapiens
uugagguguauuguacagcaca

SEQ ID NO: 39150 - RNA, 22 nt, Homo sapiens
uugaggugaauuugcaggaugc

SEQ ID NO: 39151 - RNA, 22 nt, Homo sapiens
uucugugguagaaaucucaaau

SEQ ID NO: 39152 - RNA, 22 nt, Homo sapiens
uucuucaguuacaacaaggggg

SEQ ID NO: 39153 - RNA, 21 nt, Homo sapiens
uucuucaggcagaaggauuau

SEQ ID NO: 39154 - RNA, 22 nt, Homo sapiens
uucuucaggcauucccagaagc

SEQ ID NO: 39155 - RNA, 22 nt, Homo sapiens
uucuucaggccacaaaaauggu

SEQ ID NO: 39156 - RNA, 18 nt, Homo sapiens
uuggacggagagucaaau

SEQ ID NO: 39157 - RNA, 22 nt, Homo sapiens
uugccauagugcugccagauau

SEQ ID NO: 39158 - RNA, 22 nt, Homo sapiens
uugccaucaucucuuacucagu

SEQ ID NO: 39159 - RNA, 22 nt, Homo sapiens
uugcgaugaagacaaaacaugc

SEQ ID NO: 39160 - RNA, 22 nt, Homo sapiens
uuggaauauuauuauugggcag

SEQ ID NO: 39161 - RNA, 22 nt, Homo sapiens
uugaucaauagaauacaacaga

SEQ ID NO: 39162 - RNA, 22 nt, Homo sapiens
uugcaugggagcugggugaggc

SEQ ID NO: 39163 - RNA, 22 nt, Homo sapiens
uugcaugcacaguucucaauag

SEQ ID NO: 39164 - RNA, 22 nt, Homo sapiens
uuguauugucuugaugaguuga

SEQ ID NO: 39165 - RNA, 22 nt, Homo sapiens
uugugaaugaugucgcaguaaa

SEQ ID NO: 39166 - RNA, 22 nt, Homo sapiens
uugugaauggugccgcgauaaa

SEQ ID NO: 39167 - RNA, 22 nt, Homo sapiens
uugugaauggugcugcaguaaa

SEQ ID NO: 39168 - RNA, 22 nt, Homo sapiens
uugugaauggugccgcaguaaa

SEQ ID NO: 39169 - RNA, 22 nt, Homo sapiens
uugugaaugaugccgcaauaaa

SEQ ID NO: 39170 - RNA, 22 nt, Homo sapiens
uugugaauggugccacaauaaa

SEQ ID NO: 39171 - RNA, 22 nt, Homo sapiens
uuguacuauuuuuaucagugau

SEQ ID NO: 39172 - RNA, 22 nt, Homo sapiens
uuguacuccagccugggugaca

SEQ ID NO: 39173 - RNA, 22 nt, Homo sapiens
uuggcgugaaacagccuuacau

SEQ ID NO: 39174 - RNA, 22 nt, Homo sapiens
uuggcucugcgucucgcggacg

SEQ ID NO: 39175 - RNA, 22 nt, Homo sapiens
uuggccuccuggucauauccag

SEQ ID NO: 39176 - RNA, 21 nt, Homo sapiens
uuggccuggaggccugaaugu

SEQ ID NO: 39177 - RNA, 22 nt, Homo sapiens
uuggagcacuggggcacugaca

SEQ ID NO: 39178 - RNA, 22 nt, Homo sapiens
uuggagucaucucuguacugua

SEQ ID NO: 39179 - RNA, 22 nt, Homo sapiens
uuggcaaguuucugucagcaaa

SEQ ID NO: 39180 - RNA, 22 nt, Homo sapiens
uuggcauugccaaacugucaac

SEQ ID NO: 39181 - RNA, 22 nt, Homo sapiens
uuggccagugucuuuuuuuccu

SEQ ID NO: 39182 - RNA, 22 nt, Homo sapiens
uuggcauuuuuagucaugggaa

SEQ ID NO: 39183 - RNA, 22 nt, Homo sapiens
uuggcauuuuggacacccagga

SEQ ID NO: 39184 - RNA, 22 nt, Homo sapiens
uuggccccuuucauccacagcu

SEQ ID NO: 39185 - RNA, 22 nt, Homo sapiens
uugugucccugcccaaaucuca

SEQ ID NO: 39186 - RNA, 22 nt, Homo sapiens
uugugucccuacccaaaucuca

SEQ ID NO: 39187 - RNA, 19 nt, Homo sapiens
uuguguccccacaaaauuc

SEQ ID NO: 39188 - RNA, 22 nt, Homo sapiens
uugugcuccuaugagaaucuaa

SEQ ID NO: 39189 - RNA, 22 nt, Homo sapiens
uugugcuccugugagaaucuag

SEQ ID NO: 39190 - RNA, 18 nt, Homo sapiens
uugugccugagaaggugg

SEQ ID NO: 39191 - RNA, 22 nt, Homo sapiens
uugugcaugaugcauacauggu

SEQ ID NO: 39192 - RNA, 22 nt, Homo sapiens
uuucauagccuuugucgucuga

SEQ ID NO: 39193 - RNA, 22 nt, Homo sapiens
uuguucccuucuggcuuuuaug

SEQ ID NO: 39194 - RNA, 17 nt, Homo sapiens
uuguucccauuaaaaag

SEQ ID NO: 39195 - RNA, 22 nt, Homo sapiens
uuuggcaaagaucaacauguua

SEQ ID NO: 39196 - RNA, 22 nt, Homo sapiens
uuuggcaacguuggaucccuca

SEQ ID NO: 39197 - RNA, 22 nt, Homo sapiens
uuuggcaauuugacuguauagg

SEQ ID NO: 39198 - RNA, 22 nt, Homo sapiens
uuuggcagaugacccucaaguu

SEQ ID NO: 39199 - RNA, 22 nt, Homo sapiens
uuuggcaguuauuuacucagug

SEQ ID NO: 39200 - RNA, 22 nt, Homo sapiens
uuuggcaugggcuauuugcuuu

SEQ ID NO: 39201 - RNA, 22 nt, Homo sapiens
uuuccaguuuggaggaugcauu

SEQ ID NO: 39202 - RNA, 22 nt, Homo sapiens
uuuccacauggacuuaccuucg

SEQ ID NO: 39203 - RNA, 21 nt, Homo sapiens
uuuguaguagcaugauuuaua

SEQ ID NO: 39204 - RNA, 18 nt, Homo sapiens
uuugugcuccacaaagga

SEQ ID NO: 39205 - RNA, 22 nt, Homo sapiens
uuugugcuccucucaguaugug

SEQ ID NO: 39206 - RNA, 23 nt, Homo sapiens
uuuguguccccacccaaaucuca

SEQ ID NO: 39207 - RNA, 22 nt, Homo sapiens
uuuguguccccacccaaaucuc

SEQ ID NO: 39208 - RNA, 22 nt, Homo sapiens
uuuguguggccuuggccuggca

SEQ ID NO: 39209 - RNA, 22 nt, Homo sapiens
uuugugcuccuguugagaaucu

SEQ ID NO: 39210 - RNA, 21 nt, Homo sapiens
uuuggcauuaugucaccagag

SEQ ID NO: 39211 - RNA, 22 nt, Homo sapiens
uuuggcauuaagaugcuguauc

SEQ ID NO: 39212 - RNA, 22 nt, Homo sapiens
uuuggcauuagagagacuugca

SEQ ID NO: 39213 - RNA, 22 nt, Homo sapiens
uuuggcauuugaguuuguagga

SEQ ID NO: 39214 - RNA, 23 nt, Homo sapiens
uuuggcauuccagaaauuuucau

SEQ ID NO: 39215 - RNA, 22 nt, Homo sapiens
uuuggcccugagggauggcaua

SEQ ID NO: 39216 - RNA, 22 nt, Homo sapiens
uuuguacacuguuggugguuau

SEQ ID NO: 39217 - RNA, 22 nt, Homo sapiens
uuuguacacuguugguaggauu

SEQ ID NO: 39218 - RNA, 22 nt, Homo sapiens
uuugguugucacaacuggggga

SEQ ID NO: 39219 - RNA, 22 nt, Homo sapiens
uuugguuuuuguuaucacucau

SEQ ID NO: 39220 - RNA, 22 nt, Homo sapiens
augagugugaccugccaagaga

SEQ ID NO: 39221 - RNA, 22 nt, Homo sapiens
augaucacaccacugcacucca

SEQ ID NO: 39222 - RNA, 22 nt, Homo sapiens
augcagagucccagccccuagc

SEQ ID NO: 39223 - RNA, 22 nt, Homo sapiens
augcagugugcaacagauuaag

SEQ ID NO: 39224 - RNA, 22 nt, Homo sapiens
augagcagaugcuccugccucu

SEQ ID NO: 39225 - RNA, 22 nt, Homo sapiens
augaggagauauuaaauaccau

SEQ ID NO: 39226 - RNA, 22 nt, Homo sapiens
augaggugaggucaguaaggua

SEQ ID NO: 39227 - RNA, 22 nt, Homo sapiens
augagggagggguggugccgca

SEQ ID NO: 39228 - RNA, 22 nt, Homo sapiens
augaggugauuucuguucgggu

SEQ ID NO: 39229 - RNA, 17 nt, Homo sapiens
augaacucaucguucuu

SEQ ID NO: 39230 - RNA, 22 nt, Homo sapiens
augaaauguaugagucuggguu

SEQ ID NO: 39231 - RNA, 22 nt, Homo sapiens
augaaaguguguggaaacuuga

SEQ ID NO: 39232 - RNA, 18 nt, Homo sapiens
aucauugcacugucuugc

SEQ ID NO: 39233 - RNA, 22 nt, Homo sapiens
augaacucaucauuuuuugugg

SEQ ID NO: 39234 - RNA, 22 nt, Homo sapiens
augagagcuaacuguggguaca

SEQ ID NO: 39235 - RNA, 22 nt, Homo sapiens
augcauggcagagucaggguac

SEQ ID NO: 39236 - RNA, 22 nt, Homo sapiens
augccacuguuuaugucacuua

SEQ ID NO: 39237 - RNA, 22 nt, Homo sapiens
auggaaggagaggaaugaauga

SEQ ID NO: 39238 - RNA, 22 nt, Homo sapiens
auggagugagaauggagguucc

SEQ ID NO: 39239 - RNA, 22 nt, Homo sapiens
auggagaugugcgaacugagua

SEQ ID NO: 39240 - RNA, 22 nt, Homo sapiens
auggagcuugacaguuguagag

SEQ ID NO: 39241 - RNA, 22 nt, Homo sapiens
auggacguagauucucaaggau

SEQ ID NO: 39242 - RNA, 22 nt, Homo sapiens
auguaacugggacacaagccuc

SEQ ID NO: 39243 - RNA, 22 nt, Homo sapiens
augucaaggugaagaaagauca

SEQ ID NO: 39244 - RNA, 22 nt, Homo sapiens
augucacagguccuagccaagu

SEQ ID NO: 39245 - RNA, 22 nt, Homo sapiens
auguauacaugcaggucacagg

SEQ ID NO: 39246 - RNA, 21 nt, Homo sapiens
augggacuaacugaugggucu

SEQ ID NO: 39247 - RNA, 22 nt, Homo sapiens
auggucuuuauuguguugagug

SEQ ID NO: 39248 - RNA, 22 nt, Homo sapiens
augguguccuguuuccccagga

SEQ ID NO: 39249 - RNA, 22 nt, Homo sapiens
auggucuuuucccuggauuaua

SEQ ID NO: 39250 - RNA, 22 nt, Homo sapiens
auggucuuuuuguuaugagaga

SEQ ID NO: 39251 - RNA, 22 nt, Homo sapiens
aucaccagaugcuucaagcaga

SEQ ID NO: 39252 - RNA, 22 nt, Homo sapiens
aucagugcagugggaacuagaa

SEQ ID NO: 39253 - RNA, 22 nt, Homo sapiens
aucagugagugguuagugaaug

SEQ ID NO: 39254 - RNA, 22 nt, Homo sapiens
aucagucuguuggaauaucgcu

SEQ ID NO: 39255 - RNA, 22 nt, Homo sapiens
aucagugcauaguauuuaauga

SEQ ID NO: 39256 - RNA, 22 nt, Homo sapiens
aucaaaucuccagaaccugucu

SEQ ID NO: 39257 - RNA, 22 nt, Homo sapiens
aucaaagcagcauggcccaguc

SEQ ID NO: 39258 - RNA, 22 nt, Homo sapiens
aucacagauauggguuuaaauc

SEQ ID NO: 39259 - RNA, 22 nt, Homo sapiens
aucacagcuacuccucugucuu

SEQ ID NO: 39260 - RNA, 22 nt, Homo sapiens
auaugucuuaguuaccuugggc

SEQ ID NO: 39261 - RNA, 22 nt, Homo sapiens
auagucaguagucucauaauga

SEQ ID NO: 39262 - RNA, 22 nt, Homo sapiens
auagugaacuuugugagaacaa

SEQ ID NO: 39263 - RNA, 22 nt, Homo sapiens
auagcagaagaagggacaauuc

SEQ ID NO: 39264 - RNA, 22 nt, Homo sapiens
auagcagacauuucaaggcagg

SEQ ID NO: 39265 - RNA, 22 nt, Homo sapiens
agguuaugauuauagagcgagg

SEQ ID NO: 39266 - RNA, 22 nt, Homo sapiens
agguuaugauuguagagcgagg

SEQ ID NO: 39267 - RNA, 22 nt, Homo sapiens
aggugcugagcagagaauccug

SEQ ID NO: 39268 - RNA, 22 nt, Homo sapiens
aggugcaugcuucacuggauau

SEQ ID NO: 39269 - RNA, 22 nt, Homo sapiens
aggugcuaucugguuuuauagu

SEQ ID NO: 39270 - RNA, 22 nt, Homo sapiens
agguaguguuauuugcagcuga

SEQ ID NO: 39271 - RNA, 22 nt, Homo sapiens
aggugcucuuccuguaggucac

SEQ ID NO: 39272 - RNA, 22 nt, Homo sapiens
aggugaauggauaaacuguggg

SEQ ID NO: 39273 - RNA, 22 nt, Homo sapiens
aggugcaauggugguuuugugg

SEQ ID NO: 39274 - RNA, 21 nt, Homo sapiens
aggugucuuggguucccuggc

SEQ ID NO: 39275 - RNA, 22 nt, Homo sapiens
auacacgugccauguugguaug

SEQ ID NO: 39276 - RNA, 22 nt, Homo sapiens
auagcacaguguguguacacca

SEQ ID NO: 39277 - RNA, 22 nt, Homo sapiens
auagcaaugcaagaauggcuua

SEQ ID NO: 39278 - RNA, 23 nt, Homo sapiens
auaaugcaaguggugguaaucug

SEQ ID NO: 39279 - RNA, 22 nt, Homo sapiens
acccugugagagaguuaauauu

SEQ ID NO: 39280 - RNA, 22 nt, Homo sapiens
acccuggagagugcuguaguaa

SEQ ID NO: 39281 - RNA, 22 nt, Homo sapiens
acccugcuaaacagcccccugc

SEQ ID NO: 39282 - RNA, 22 nt, Homo sapiens
accccugagaucgaaucaugcu

SEQ ID NO: 39283 - RNA, 21 nt, Homo sapiens
acauguacacauguaugcaca

SEQ ID NO: 39284 - RNA, 22 nt, Homo sapiens
acccggagagcaggcgagaagg

SEQ ID NO: 39285 - RNA, 21 nt, Homo sapiens
acaucagaguugugaagguag

SEQ ID NO: 39286 - RNA, 22 nt, Homo sapiens
acaguuaugugagggccaccag

SEQ ID NO: 39287 - RNA, 22 nt, Homo sapiens
acauggcacugcgggcuucuug

SEQ ID NO: 39288 - RNA, 22 nt, Homo sapiens
acaucauugggggcuacaggug

SEQ ID NO: 39289 - RNA, 22 nt, Homo sapiens
accugagacuaggcauuuuaua

SEQ ID NO: 39290 - RNA, 22 nt, Homo sapiens
acccuguugagcaacuggccau

SEQ ID NO: 39291 - RNA, 16 nt, Homo sapiens
accuguacagcaugug

SEQ ID NO: 39292 - RNA, 22 nt, Homo sapiens
accugcacagccgaacauagac

SEQ ID NO: 39293 - RNA, 22 nt, Homo sapiens
acggcaguguggugcggucagg

SEQ ID NO: 39294 - RNA, 22 nt, Homo sapiens
accuucauuguugccaugucca

SEQ ID NO: 39295 - RNA, 22 nt, Homo sapiens
acaagcacaaaugcauagaugg

SEQ ID NO: 39296 - RNA, 21 nt, Homo sapiens
acaaagcuggagggagacugc

SEQ ID NO: 39297 - RNA, 22 nt, Homo sapiens
aauugcauaugcaguagaucua

SEQ ID NO: 39298 - RNA, 22 nt, Homo sapiens
aauugcauaaaauucaacucug

SEQ ID NO: 39299 - RNA, 22 nt, Homo sapiens
aauugcaauggacaaugcagca

SEQ ID NO: 39300 - RNA, 22 nt, Homo sapiens
aaucugauguuaucagcuuaag

SEQ ID NO: 39301 - RNA, 22 nt, Homo sapiens
aaucugggguuguuuggggagu

SEQ ID NO: 39302 - RNA, 22 nt, Homo sapiens
aaugccacugugccugccaagg

SEQ ID NO: 39303 - RNA, 22 nt, Homo sapiens
aaugcacauauauuuccuuauu

SEQ ID NO: 39304 - RNA, 22 nt, Homo sapiens
aaugaucaauguuugaggugau

SEQ ID NO: 39305 - RNA, 22 nt, Homo sapiens
aaggcaacgugaguuguugauu

SEQ ID NO: 39306 - RNA, 22 nt, Homo sapiens
aagcugguguugcugcucuguu

SEQ ID NO: 39307 - RNA, 22 nt, Homo sapiens
aagcuguguguaagcucucaca

SEQ ID NO: 39308 - RNA, 23 nt, Homo sapiens
aaggacacugaacacuucccagc

SEQ ID NO: 39309 - RNA, 22 nt, Homo sapiens
agcaccguucaaacccagguua

SEQ ID NO: 39310 - RNA, 22 nt, Homo sapiens
agcagauguuuagugagcgccu

SEQ ID NO: 39311 - RNA, 22 nt, Homo sapiens
agcagcaccaaacagacuaaga

SEQ ID NO: 39312 - RNA, 22 nt, Homo sapiens
agcaccauuguacuccagccug

SEQ ID NO: 39313 - RNA, 22 nt, Homo sapiens
agcaccaugggcugaguaagug

SEQ ID NO: 39314 - RNA, 20 nt, Homo sapiens
agcauugguuagaacaguag

SEQ ID NO: 39315 - RNA, 22 nt, Homo sapiens
agccuauccaauaucagugaga

SEQ ID NO: 39316 - RNA, 22 nt, Homo sapiens
agccuguguugaauuauagaaa

SEQ ID NO: 39317 - RNA, 22 nt, Homo sapiens
agcgccauugcacuccagccuu

SEQ ID NO: 39318 - RNA, 22 nt, Homo sapiens
agagaugaagauggggcucccg

SEQ ID NO: 39319 - RNA, 20 nt, Homo sapiens
agagaucaguaauucaucaa

SEQ ID NO: 39320 - RNA, 19 nt, Homo sapiens
acuuuggugauuagaggga

SEQ ID NO: 39321 - RNA, 20 nt, Homo sapiens
agagcaaagccgcaccccua

SEQ ID NO: 39322 - RNA, 22 nt, Homo sapiens
agagcaaugggugaauauuaaa

SEQ ID NO: 39323 - RNA, 18 nt, Homo sapiens
agagcacugaguuuuaga

SEQ ID NO: 39324 - RNA, 22 nt, Homo sapiens
agagguuuugcacugguucuuu

SEQ ID NO: 39325 - RNA, 22 nt, Homo sapiens
acugguguaugggaggucccaa

SEQ ID NO: 39326 - RNA, 22 nt, Homo sapiens
acuguguguuugucuagcacag

SEQ ID NO: 39327 - RNA, 22 nt, Homo sapiens
acugccuaaugacuuauguuuu

SEQ ID NO: 39328 - RNA, 20 nt, Homo sapiens
acuggcacugguaggugugg

SEQ ID NO: 39329 - RNA, 20 nt, Homo sapiens
acugggcuaccgaaguaagg

SEQ ID NO: 39330 - RNA, 20 nt, Homo sapiens
agguagauagaugauagaua

SEQ ID NO: 39331 - RNA, 22 nt, Homo sapiens
agggcacuguagguccugccuc

SEQ ID NO: 39332 - RNA, 22 nt, Homo sapiens
agggcuuuugagcugagauggu

SEQ ID NO: 39333 - RNA, 22 nt, Homo sapiens
aggguuuuuauuuauguggcau

SEQ ID NO: 39334 - RNA, 22 nt, Homo sapiens
aggcauggagacuaaaauuaua

SEQ ID NO: 39335 - RNA, 22 nt, Homo sapiens
aggcaugaguucagaggguaug

SEQ ID NO: 39336 - RNA, 22 nt, Homo sapiens
aggcaugugugcagacugucug

SEQ ID NO: 39337 - RNA, 22 nt, Homo sapiens
aggcuaagaugacuccaccccc

SEQ ID NO: 39338 - RNA, 22 nt, Homo sapiens
aggaccccucaucagcaccagu

SEQ ID NO: 39339 - RNA, 22 nt, Homo sapiens
aggagcacaauggucaugugga

SEQ ID NO: 39340 - RNA, 21 nt, Homo sapiens
aggagcauuguugugguggag

SEQ ID NO: 39341 - RNA, 22 nt, Homo sapiens
aggcaagagugacuacgugaaa

SEQ ID NO: 39342 - RNA, 21 nt, Homo sapiens
aggcaagauuacuuacgagca

SEQ ID NO: 39343 - RNA, 22 nt, Homo sapiens
aggcacggugucucaugccugu

SEQ ID NO: 39344 - RNA, 22 nt, Homo sapiens
aggcagaugagguccucagcug

SEQ ID NO: 39345 - RNA, 22 nt, Homo sapiens
aggcaaguugcucaaaugcaaa

SEQ ID NO: 39346 - RNA, 22 nt, Homo sapiens
agcuagcauucauaguuugagg

SEQ ID NO: 39347 - RNA, 22 nt, Homo sapiens
agcuaguggucauucaauccuu

SEQ ID NO: 39348 - RNA, 22 nt, Homo sapiens
agcuggaauuuaagguagauag

SEQ ID NO: 39349 - RNA, 22 nt, Homo sapiens
gauaguugugagaacucuuacu

SEQ ID NO: 39350 - RNA, 22 nt, Homo sapiens
gaugacagcugacucccuugcu

SEQ ID NO: 39351 - RNA, 22 nt, Homo sapiens
gagguaucauuauguugcccag

SEQ ID NO: 39352 - RNA, 21 nt, Homo sapiens
gagguagggauuaaagaccuc

SEQ ID NO: 39353 - RNA, 22 nt, Homo sapiens
gagcaucauucaacaaaagucu

SEQ ID NO: 39354 - RNA, 22 nt, Homo sapiens
gagcagacaugaggaccgcugg

SEQ ID NO: 39355 - RNA, 20 nt, Homo sapiens
gagcaucacaggccucugcu

SEQ ID NO: 39356 - RNA, 22 nt, Homo sapiens
gaggcagucugucccuuagcag

SEQ ID NO: 39357 - RNA, 22 nt, Homo sapiens
gaggcacucuguacaaaucugc

SEQ ID NO: 39358 - RNA, 22 nt, Homo sapiens
gaggcaaguggccaccgagucu

SEQ ID NO: 39359 - RNA, 22 nt, Homo sapiens
gaggcaauaugagggaggcuuc

SEQ ID NO: 39360 - RNA, 20 nt, Homo sapiens
gagcugguguacugccgggc

SEQ ID NO: 39361 - RNA, 22 nt, Homo sapiens
gagcuccuccccuuggcuuuca

SEQ ID NO: 39362 - RNA, 22 nt, Homo sapiens
gagcuuguagugugaaugguau

SEQ ID NO: 39363 - RNA, 20 nt, Homo sapiens
gagcucaucuucuuuaccac

SEQ ID NO: 39364 - RNA, 22 nt, Homo sapiens
gagcucauuguugcuaaagaga

SEQ ID NO: 39365 - RNA, 22 nt, Homo sapiens
gauuuuccaguggcccugauca

SEQ ID NO: 39366 - RNA, 22 nt, Homo sapiens
gauggcaucugagaguguuaga

SEQ ID NO: 39367 - RNA, 22 nt, Homo sapiens
gauggaguugacuaagacaaca

SEQ ID NO: 39368 - RNA, 22 nt, Homo sapiens
gaugcaguaagaaugcauagcg

SEQ ID NO: 39369 - RNA, 22 nt, Homo sapiens
gcaaaguguuuuccaacuuggu

SEQ ID NO: 39370 - RNA, 21 nt, Homo sapiens
gcaaacauccuuugaugccag

SEQ ID NO: 39371 - RNA, 22 nt, Homo sapiens
gcaaagaaugcagauuugccuc

SEQ ID NO: 39372 - RNA, 20 nt, Homo sapiens
gcagcaccauauuucuaaga

SEQ ID NO: 39373 - RNA, 22 nt, Homo sapiens
gcagguguuaugcaaacaacug

SEQ ID NO: 39374 - RNA, 22 nt, Homo sapiens
gcagugacaugugccaguuuau

SEQ ID NO: 39375 - RNA, 22 nt, Homo sapiens
gcagugugugaggaauuugggu

SEQ ID NO: 39376 - RNA, 22 nt, Homo sapiens
gccaagauuuaauucaucaguu

SEQ ID NO: 39377 - RNA, 22 nt, Homo sapiens
gcaugcacuguauuuaaguauc

SEQ ID NO: 39378 - RNA, 19 nt, Homo sapiens
gccaccuggugcguguucu

SEQ ID NO: 39379 - RNA, 22 nt, Homo sapiens
gccagauuguccaguuuuuuau

SEQ ID NO: 39380 - RNA, 22 nt, Homo sapiens
gcaugaugaauaauaucacaag

SEQ ID NO: 39381 - RNA, 22 nt, Homo sapiens
gcauggccuuuaaaugucacag

SEQ ID NO: 39382 - RNA, 22 nt, Homo sapiens
cugugcuugauuauaugagugu

SEQ ID NO: 39383 - RNA, 22 nt, Homo sapiens
cugugccaagcuugcgaugugc

SEQ ID NO: 39384 - RNA, 21 nt, Homo sapiens
cugguccccuuuauguaugug

SEQ ID NO: 39385 - RNA, 22 nt, Homo sapiens
cugggaucaguucuagucagaa

SEQ ID NO: 39386 - RNA, 22 nt, Homo sapiens
cuggugagaugucuuuccucuu

SEQ ID NO: 39387 - RNA, 22 nt, Homo sapiens
cugggauggaggagaauuagag

SEQ ID NO: 39388 - RNA, 22 nt, Homo sapiens
cugugguuuaaggaauuuugac

SEQ ID NO: 39389 - RNA, 22 nt, Homo sapiens
cugugguuacguucuuugugcu

SEQ ID NO: 39390 - RNA, 22 nt, Homo sapiens
cugugguauuauuagaaauauc

SEQ ID NO: 39391 - RNA, 22 nt, Homo sapiens
cuucccguuauugcccuugggu

SEQ ID NO: 39392 - RNA, 22 nt, Homo sapiens
cuggcuaagugcuugagugugc

SEQ ID NO: 39393 - RNA, 22 nt, Homo sapiens
cuggcaaauaguagagccagga

SEQ ID NO: 39394 - RNA, 22 nt, Homo sapiens
cugacugaggaucaguucauca

SEQ ID NO: 39395 - RNA, 22 nt, Homo sapiens
cuggcagucugccucuucacug

SEQ ID NO: 39396 - RNA, 22 nt, Homo sapiens
cuggcaccauacacuguuguug

SEQ ID NO: 39397 - RNA, 22 nt, Homo sapiens
cuggcaccauuuugaucaaagg

SEQ ID NO: 39398 - RNA, 22 nt, Homo sapiens
cugacugugcaugcccagcccc

SEQ ID NO: 39399 - RNA, 22 nt, Homo sapiens
cugagaaugaugauuuccaguu

SEQ ID NO: 39400 - RNA, 22 nt, Homo sapiens
cugacucagacacauguauaug

SEQ ID NO: 39401 - RNA, 22 nt, Homo sapiens
cugacauuguugaucacagcca

SEQ ID NO: 39402 - RNA, 22 nt, Homo sapiens
cugacaugcagccacugcaccu

SEQ ID NO: 39403 - RNA, 22 nt, Homo sapiens
cucuuugcuucuggcaucauug

SEQ ID NO: 39404 - RNA, 22 nt, Homo sapiens
cucugguggaagcagggggcaa

SEQ ID NO: 39405 - RNA, 22 nt, Homo sapiens
gaauacuguccaagagugaugg

SEQ ID NO: 39406 - RNA, 21 nt, Homo sapiens
gaccuguaguaagcauucaca

SEQ ID NO: 39407 - RNA, 22 nt, Homo sapiens
gacauguuuuuuaagguuuaug

SEQ ID NO: 39408 - RNA, 22 nt, Homo sapiens
gaccacauuccacacaggcuuu

SEQ ID NO: 39409 - RNA, 22 nt, Homo sapiens
gaaucacaguuauuagagcagc

SEQ ID NO: 39410 - RNA, 22 nt, Homo sapiens
gaaucacagauuaugaguaucu

SEQ ID NO: 39411 - RNA, 22 nt, Homo sapiens
gaaacugcauuucuaacaagcu

SEQ ID NO: 39412 - RNA, 22 nt, Homo sapiens
gaaagcuaaugacuuuggguga

SEQ ID NO: 39413 - RNA, 22 nt, Homo sapiens
gaaagugcugcuugacugggau

SEQ ID NO: 39414 - RNA, 22 nt, Homo sapiens
gaaaguguugagauuacaggca

SEQ ID NO: 39415 - RNA, 22 nt, Homo sapiens
gaacugggguuggguugcgaua

SEQ ID NO: 39416 - RNA, 22 nt, Homo sapiens
gaaauguugauagugggcauug

SEQ ID NO: 39417 - RNA, 22 nt, Homo sapiens
cuuuuggcuuaagauugucuug

(The sequence listing continues in the following parts.)
